United States Patent Application Publication US 2015/0052636 A1 - sequence listing, part 32

SEQ ID NO: 112227 - DNA, 983 bp, Setaria italica
  Intron number 2 from transcript Si009850m (locus Si009850m .g) derived from phytozome v7.0 (chr-ID scaffold_7; pos 24 727700 to 24728682 reverse strand)
tcttcacccacacgcacggtgagtcgtcttgagtcacttctctcagttctctgtttctcatccagtgacatgaacatgagcttcaaatcagagctttcgtccctgctcggtgactggcagatgcccacagcaccactcagtttcatcagagttggcaaatcaaatcttttcatccaggaaatctctcccccttttgtaagaacaaaaaagaaaaaaaaaatcttcacccacccagcaaacaaataagctagtggctacattcgtccttgtgctccaaccataaggatgatctagctatccttttttggtgaacgggagcgcattggttccctcactgcttgcctaatagagacgcaaaagcatcgaacccattttcagccgtctacaaatccaagaatattagtatagtctattttatcatgcaccataaaatactatactatcgatgcccatctcactagcgttaccactctccctctctctctctccccgaattattgtctggagaagatcgttcttaagctgaatgctgatgcgacgttgcgacagcgccgcgcgctgatattctctcttgggcgagctttgtcgtgttcatccgtgtagtgtactggtcagacgattgcagctgcctacctaatgcctcctctaatggtgtacctatctctaactatctctaaacactctaggagacaacccttccaatctgcctcttagcacatagctcataatatgaataaccccatacgtcatcctcacgtaatcttgaagtacgtgtatgaaattatctcttgatcaagagatagtttttctctctcttattaaaatatgagaaaatggtatgcaatcaagtctaaagattttatagcggcccgcagggatgtgtagcgataatttgttcgatgtcccctgcttttctgtttctctcaaaaagttttcaccatttggcagttgggatcaaggacgggcggaacggcgacgtggct

SEQ ID NO: 112228 - DNA, 817 bp, Setaria italica
  Intron number 1 from transcript Si021085m (locus Si021084m .g) derived from phytozome v7.0 (chr-ID scaffold_3; pos 21 229350 to 21230166 reverse strand)
ccatcgccccccaggccgaggacgagaaggaccaggtcggctgcaccgcacccctgcctcctaccccttcaaagatttcatttttacgctgctgcaggcatgactatccgtagttcggtgctggggtttgctaactttagcgcttcgcttgcaatcgtgtactcaattacggcattctgcgctagtaggtcttcagtagtgcttggatgcacatcctttgttccagtagattcacaattctagtgcaattgctcacgcttcaagtgagttgaccatgaaccatgttgaactagttacaaaaagttagaacatactagaatgtatggattgttgctcttggaatctgtactcaataatgtcattttgtagatcttgtgtcctcatagattcgaaattctggcggcagtttttctttttatctcaattccagtggtagttaatcaagctctaagtgagttgaccatgagttaaattaatgtagttagaagttagtgaaatactggaattgacagttactctgaagaggaaaggacagttattgcatatggctaatggttgccttgttattgctgtgaacagtttttgcgtctgttttttcttcagtgtttgtttatttgattgctaatttaacaaagtggtgctgtttatggatacaaaaatgtttgtctatccatattttgttagtgcttggctcgattcaattccacattttgcaggtatttgccagtgtatgtttatgctaatttatccaggagtgcttatgacgctccatctataaacaggttttgtgggctggattcgataaactagagcttca

SEQ ID NO: 112229 - DNA, 970 bp, Setaria italica
  Intron number 1 from transcript Si014497m (locus Si013948m .g) derived from phytozome v7.0 (chr-ID scaffold_6; pos 55 98170 to 5599139 reverse strand)
cggctccgacggggagcgcccgcacaagaagcgaggtgagagggctggggggcagggttttggtgaatctctgttttcctgtccttgaattagtagggcgtaaaaagattagtttttttgggcgatttcgtgcttgaattcttgtgtgaaaaatggtgcgattttgatgttcgtctgcgtgatcgttgggaggcagaggggaatcgtaggttaacgtttttgttgaaattggacgtttgcgtcgtgattcgatcccgttgcctttcagttcgtgattccattcggttgcctgcgggatgatttaggaggtttggtgttgtcgtgctgtttctgaattgtcaggtgctctgaaatctttacatgattgtgaaagaggaattggtgggggagattaaggtttgttagttgctgaaacatatattgttttttctggtttctgttgaatgctaatgtcaagccgttgcattttgttgttagggggtgattttgatgcttcgtgtccacaattttttttctttaatctgttttggtttatttcaggttcttccctcttttgttacggtttcatacaatttgcatgttggaatgctgcttgtgcattgtgtaaccgtatttacgttttgcgcttttgatgttgccatttaagtttggtgtcattggacattggtgacttggttgaccaaacgctgtgttacatgccacaaaacaaaactgaattctttaattaattatctatttggttgcatattcatgacatgtgtcatgtactcccttatgtgcctttaaatactgtttgaagtgctttttccttccttatttgtcttcttttttttgtaacctttctggtccatcatgatgggcatgttgctaatgccactctacactatgtttcataccattgtttggttgcagtccaatttgtgtaagctaaaatgtcatgttttctctttgttttggtgacaggcgaggc

SEQ ID NO: 112230 - DNA, 586 bp, Setaria italica
  Intron number 1 from transcript Si011741m (locus Si011741m .g) derived from phytozome v7.0 (chr-ID scaffold_7; pos 59 11850 to 5912435 reverse strand)
tgatttacttgttttgcaaacttactactctgcatgttgcaatttgttttcagttatgtgttggtagttaccaaatttcttttgcccctatgtgtttttgattatttgtggtttttgcaactaatctagtttgttgtttgcactccctatcatgattttttgcaaaacacacattaaccctttttttatacagaatagtgcttaggatggagcctgtgcgttcgtcccctcgtctcaagatgaaacacaggaggaaaaaccttaggcttcctgatcctccacaccccctgccaagtgacaatgatgaagataatgatttcgttccaaaaccattgaaacaatcccatcacccgatgtgcacgccactagaaagatgcggcatggggaggccagttccagtgtacattacccagtagatcttgctgaggtcaaaaaaaatttgatgtactttttttttattttctatttgaatattttatatatgttcaatagttgaatgatattgcttttttttgcacaacccgtaggacacaaacatcagtgatgatgtcggagaagataagaagattaggccagtctcgcttcg

SEQ ID NO: 112231 - DNA, 1004 bp, Setaria italica
  Intron number 1 from transcript Si022211m (locus Si022208m .g) derived from phytozome v7.0 (chr-ID scaffold_3; pos 68 39709 to 6840712)
ttgttggctcaggaacttctttctcttcttccgaggtacttaacttggattgccgctttggatttatctttttcctagctggtggacttagtatttagctagcctctagcggttttatggaactatagttagtgggcaaaaatgtggtggaaagttagtttgttgtagctagcctctcttgtggtatattaataatcatttggaggacacaaataccatgctactcttttgattgaccttgttgcagccatataagaagattggaagggctgaatttgttacattacaacttgtttgggttgtagagttattaagttttatttgtttgttctcttctttgagaagaacttacgattataagttcaactgtataatcagtttcagtgggatttcagactcaggttcttctccggatttgattatatgaagttaaaattgtagtggaagtgtgcgttcacatgttggtaacttgtgaaccctcaaaggattgtcctagtattctacaactatagcatgtgtagaaatcaacgagaatccttccctcacaaatttctccatgcccacacagctcaatgtattaggagtttattaggatgaaatacaagcccaggcctttacagggtggaatataacatatgaagctggatttggtgttttgtgctacttcaatcctgtcttgcagtgaaccccatataaaattatcaggatgctcaaatgaacaaaatatttcatcctttctcctaatggttgtcattcggtagttgtatacaacttttgcaaatgctgatccaaaaatagtttcagaatggagttccaaattgtatgttgcagccatttgagtcaacctttatgctttttattgccatattattattgcccgtattactccttcaaaaaagatattgtcttccctagctaaagagggatagctaagcagcttattgatatcaagtgttccttttctttcaggtggagaggaggtgacttcatctgtagtggggaaa

SEQ ID NO: 112232 - DNA, 658 bp, Setaria italica
  Intron number 1 from transcript Si022050m (locus Si022050m .g) derived from phytozome v7.0 (chr-ID scaffold_3; pos 35 482700 to 35483357 reverse strand)
agatcttcgacagccgcggcaaccccaccgttgaggtatgggctcggcatcgatgcacatctctctttcgcgcgtgagcgcccgtcgctcgttgtgctccgatctgctctggtagacgtgctgtggtgtgatccaactcgcgtggggaggtagctttgttgggggtggtttttggtttctcgtgcgaggtgggttgggggttttgttgaggttttggggattttacccgatttggggaatagactgttggatattgacttttctttgcgtgggtaggatctgactcgttggcccctagtgtgatatgcattttctggtcggtttagtcgtagatttagttttcctgattgaccttataatctgcttaggctattattttgctggattttgataggtagcagatctggaggtcatccttattgttgactcaaatcgaattcagtttttttattgctgtatccatttgatccgcatggtgcatacgatttgctcttgtagtttcaaatgccatgttactaggacttaatagttcgatctgatgactattgttgcctttctgatttcgtatttattggccgtacatttgacttgttcaaatttctttttttaataaatctgtgatctggtaggctgatttcattttgtatacctcaggttg

SEQ ID NO: 112233 - DNA, 1007 bp, Setaria italica
  Intron number 2 from transcript Si023045m (locus Si023045m .g) derived from phytozome v7.0 (chr-ID scaffold_3; pos 46 538104 to 46539110 reverse strand)
acgaccagaagctgtgagtaccccccattcctcttcctacctcattactaacgctacttccgtggccgccggccgccggccgcgttcgtcgtttccattagttagatccgtgggagtcggtgcctcttggtatgatctgccgtgcactgttcttggcggctcggtgccggagccacagttttctattagcaatcgcctgttggctcccctggccttgggcatccggtagttagtgtctggaagagtagctgcttattgcgtaacgttatccgacatgaagattattctgcttgctagaccggcgtgccagtgctacgcactaccttcacagttgaaggtttagaataatgtcctgttggaagtccattgttgggctagggaacggcaattgaatctactgtttttaaggttgttcaaaattttgaaattttaacattctaagtttattggttctgtgttggagcaggctgttgtttttccagaatgtttatagtagtctgtacctcattgtagggtttacgggaagctgtgtagtaaatagtggtggattgctggattgaatctttattgtttgttttccatgcaacccttctgtgatgattgttttataactctgcaagtccttggtggattatagagaaatgttatggtatcatcaaggagatgaaaactgctgttttaactgttcatttgtagtaatggcaacgtttgtttaggaaagtgattgtttcgtctcaaagaaacaactcaagtacattctcaaaatcaatgtggcagcacaccaggggaatgttgtctgattattattgaaataatgtgataacatttcttgtgtaccctgtaaattgacttaattttgtccttgggttgtgaatattttgcatatgatattccttccaactgtgattatgtagttgtatactgtatgtaacattacctgcttattagctaatgcctttttatcaactataggcgtgccttctttgacaaaaggatctcccaggagg

SEQ ID NO: 112234 - DNA, 750 bp, Setaria italica
  Intron number 1 from transcript Si005901m (locus Si005901m .g) derived from phytozome v7.0 (chr-ID scaffold_4; pos 43 8508 to 439257)
gatatcggccccggaggtcgtatctggggtatctggtatgttctctgattccttgcatcgaaattaaattggataaggtctgatgcatctcgtgtatatttggacaaatagtttagcagctgatcatgtttgatgccatagaaggaattaaaatgtagaaaaatgactgttaatccttgcttggccaatattgtagctgctattagtgttctataggtgcaaatggtcaagtttctgctatttcttcatcttgttgcttcaatataagctttaaactgtatttcacttgcaacgcaaaattgctgcggcatcatcctttgtttgattagacatcaccagcgagactataaaattaatactagtttcagccttgatgtgtatttgacataataaatctagttgtgctaattgctaagattggtattgctaatagtttgcacaagggatgaactctatttatgtattatcaatatttggtgctcaataagccaataatatgttgttagtaagaaggcactatcacttgctaaacctggttagcagtcatgaaatcagaaccatactaaataggtgcttaaagattgaaatgcagcttagccaacaaaaaagagggtatgatttctttgtgtggtttcacactcattcctgcacagataaattctctgtcaggactcaggagtcatgcagaagctcacctcacaatgcgttcttgcaggagcttctgaggaaaatatcaggggattgtttcag

SEQ ID NO: 112235 - DNA, 836 bp, Setaria italica
  Intron number 1 from transcript Si024093m (locus Si024093m .g) derived from phytozome v7.0 (chr-ID scaffold_3; pos 28 41869 to 2842704 reverse strand)
catcccctccctcgcgccaaggatctaaagcgcgcgtattcgctgcaaccaggcacgcgtacgcctcgccgatcctccgccgtgctgctttgatctgtgcgccgtgccgcgccgagattgtgcccccgatccggtggcttcgtgctggcgacgtccggcggcggtggacgctgatggcgggggcgtccagcgaacgtttgatttggtttacttgtggacatttacacggaccatgatgcattcatttcttttgcttcaacactgttttgtttgaggatatcaattgtttgcagtaacgtaacattttcaagttctatcataaggtatttgctacttggatgcattcatttcccagaaaatgcctagaaattagcagcagttcttctgtgggaggatctgatgggaaaacaaagtcatgtgtacggcgagcatgaagtttattatcaaatgcaagacgcacactgccgatctctatctcgtcagcttcagacttgcagaggaatgactagcatgggggccagaagctcagaaggctatggacttgtaaaatccctttgaaaatgaagatattttttttatgccagatctttcaaaacaggatacaaaactgctgatatatttgaaacatgtttgcttctttgtgaggggtggcttgggctctacagaggatttgcaactggtgctcttgacctaccaaggcagtggtgaactggtgctctgctctgataatcagcatttgcaacaacgaactgaacatttgcacttgcaaagactgaaacacaccagctttacatttcatagttcaccatctcacaagaccaacactctcaagtctc

SEQ ID NO: 112236 - DNA, 766 bp, Setaria italica
  Intron number 2 from transcript Si021065m (locus Si021065m .g) derived from phytozome v7.0 (chr-ID scaffold_3; pos 65 4605 to 655370)
agcagcagggggcagagaaggtgccggaggagaaggttcgtatactcacttacctccccttcgtccgcacagatagggctagcttgcgattttgcttctatcaagtggcatgggatgtatgagcattatatataaattgaattgcattttggccgcaagctctgttctgcatgactgctttgcctagatcgtgttcccgaaattgtaacatattatcctctgaaacagctgtttgttctctgagatgtctgaatcagcagtttgttttgagcggctgcttaatgcatactagcatatgtttgtatgaagtagcaatttgtgtacctttggtagtataatgctgctccttcccctaagggggtacatggctgatggctcctttgtgcaatcagaactgcttttttttgggggggggggggggggttagttagcaactatttctagtcagtactcactcctttttttttgttcctcccgcaacttgatgagaaagagttagaaaggaagctgaaaaaagatcaaaaggtatcaatcaaggtctggcttgcttttctctctatacttaatttttgtattgggcgtaattggatggcctgaagatggtaattggatcaagtttaacagacaaaagtgatttcactgaagtcagaaatgagctgaactataagattggactgttctgttatcatgtgcgtggatagtcatttatgggttaaatgttgcgcttgcaggcaaaagagaaagaagaaaaaaaacttaaggcgaa

SEQ ID NO: 112237 - DNA, 505 bp, Setaria italica
  Intron number 2 from transcript Si010665m (locus Si010630m .g) derived from phytozome v7.0 (chr-ID scaffold_7; pos 17 651583 to 17652087 reverse strand)
ctcgaagatcaggtgtgctctctttggaatactaatcaatcctttcatacattggcaccttattagctaacacagtatcaaatacggtccttgtcaggtttaactctgtttttttagataataatggaagtaatatccggcttcaaccccctggtcgagggagaatcggttcacacaattattatacataatagctaaacgcgacacgctccacaaaataaaatttagggcagcaacaaaattgttaaaaatcacttagctaagttatcaaaattttcaaataccacataaaaattttgaccaaattttctgtgtgatttttattccactattggctaataatgagtactattgttgtttctgttagctttagataataagccctgccactgcccgaaagaaaaactgcaggcagtggacttgtgttttatttatcctggaagaaagttgacatgtatagtaatttgaaggtgtcgcctaaagcctgtggacacactgaaggaag

SEQ ID NO: 112238 - DNA, 408 bp, Setaria italica
  Intron number 2 from transcript Si013830m (locus Si013830m .g) derived from phytozome v7.0 (chr-ID scaffold_6; pos 47 90896 to 4791303 reverse strand)
attggccattccagcctgccaactactactgtcaggtacctcttctcttcttatttctctgtttatcatctttgttctgagttaaatgttgcttcaaagtttacattctccattttgattactagattaatatgaagtaagcctacactacattgttaatttatttgtttaagattcaactatgttcgtattgtctaataagcctacattacattgattctggcatagtgcaagcaagattaactggcccacacagctaatctgtagccatcactaaagaagcccattaactggtgaagaaaaatttggatctatccccttaattcccttgggccaggctcttcgttatcctttttttttctcgtgtgtgcagcaatcactggtcctggtcctcaacgacagcgctag

SEQ ID NO: 112239 - DNA, 856 bp, Setaria italica
  Intron number 3 from transcript Si010571m (locus Si010571m .g) derived from phytozome v7.0 (chr-ID scaffold_7; pos 76 0519 to 761374)
cgcagctcactcctctgggttggagccaagtaagtttctaccatttcatttccaccacaagttagttaactctcaactactgaaattgtaactgctcatagcttcatagggtactaagtaagttctaataacaaattctgtgccatagccagagtttgagttgtgattcttcttggagtttcactcttttttttaaaaaaaaaagcacttggagttttactttggcctaaacataacaagatagatccaaagtgcctctgtttagtttgataactaatgcttgcttaccagttacaaatgtaggataacctcttttacaaagtatggtagttttcaattagtttgacctcctataatgacagccgttccctatgtataggatatgtcatatgtaaacatgactctgaattctgaatttggatgacatctttacagaaaaatgcactcctgactgttacacattgccatagtgatgttaaatacttttctgtaatgcttggcttactttgtattagccttccttggcgaaagcctgcatagtttacctcctgtatgccattaattgtatgctggcaccaacaaaacgtatttctaaggccctgtgctatttgcactaacttctgatagaatttatttccccttccccagtctgcaccaaaatgtaacatcagtttctcactcctaaggccagctgtgacgtttcatgattcgatcagctgattttttatttgaattgcaagttttatgagtaattatgtacattagtgagtttctttccgggcctccacataattgtttccacatggcattttcaagattcatgagttgttgatttacctaaattttctgtaggttg

SEQ ID NO: 112240 - DNA, 426 bp, Setaria italica
  Intron number 2 from transcript Si020949m (locus Si020949m .g) derived from phytozome v7.0 (chr-ID scaffold_3; pos 10 615842 to 10616267)
tccacttcctcctggtgcatttggtgcgcctattggtaagaaccttgtgcacatgatgcctccacattgtattaatttgattagttccctaataatttgcttttgttgataccatacctccttcgcttgttgttataaatttatgatacatggatgagactgaatataagccttatgttgacctctctacatcgcctcctgtcatcctaatacatctattgttaaatttatagtagatataaactctcttttctattcttggagtgttggaaagtttttgtcgggattgttttgtactgtcggaattgatgccagtacgttcttatcatgtattcatgtttatattatgctgacttgttttctgctgtttattttctatgttttggagcagttccagagcaaccgaagcagccctaccgatcttat

SEQ ID NO: 112241 - DNA, 517 bp, Setaria italica
  Intron number 2 from transcript Si021961m (locus Si021935m .g) derived from phytozome v7.0 (chr-ID scaffold_3; pos 39 485433 to 39485949 reverse strand)
ccctcctctgcggcattgagctcatccggtccggggtgagcatcagcttctcattttaccaatgcagcgttcgatttgctatgttatgaacgaagaattttgttctaatgtagagattggtacgaattctgtgtgctgcaaaggtttcttgtctgtcttttggtgaactactgaattattatcaaatgttctgcactcataagtttcatatatctgaaatcctggagagtgcagaattgactagattctataggtgggtatggataaataacaatgccgggccaacaattgttaatttatttacctctgtgaacaattgttaatttatattttcttcagtctgtcttctttatcctcttgttgttttgactctgctcatctatgtacacgactataacactgttgtcattgattttgtatagtttgaatggtcagtgtgctcaaactaccattaacctgagacttttcactgtgcatgacctttctttccctctttggtctttgaatgacaggtgac

SEQ ID NO: 112242 - DNA, 877 bp, Setaria italica
  Intron number 1 from transcript Si021975m (locus Si021975m .g) derived from phytozome v7.0 (chr-ID scaffold_3; pos 38 252809 to 38253685)
ctaaccgcaaaccctggtcattgtccttcagggattctggccaaatgttcctgtgcagaaagttgtgtttacttgataatattaaaagatgacaccaactgtataataattttgttccttagatatagttctatttataatattatgtttctgaccttcctcaagtctatatcagtatagttttttttactcacctggcttatgctatttcagatttctaaaggcaaggggatttgatattgacaagacaatagatatgtggtcggatatgctaaaatggaggaaagaatttggtgcagattctatcctgacagtaagttttgttttctaagcgtattgatgtgtatatacattgtagctatctagcctaaaggttcaatcaaaggaaacgtccaaaacaaattgctagttgtaattatacctcaatcaaattgctcctgttagatattctctcatacagtaggtttgtcgtctacaacatgttatatcaatgtatgtcacaatcatttcgcacagaataagtgaaagggcagtgaagcatgcgatgtttctacagaaagttgagttttgaattccagttttccagtcagatcgatcattgctgatctcatgaagacacaaattttacatgtatgaaatccatggttaaaatggctgatgttatgttgttctcacaataaaaggccccttgctgaggtaactgcttcctgagcaagcagccagcttttggggcatttttttgaccattaaggaatgccttggtgccttcctttattgcaatatatttatgactattctaattaacttcatcacatattaatgtgaagattgtgtgataacagtgaagagatatttcaggattttgtatttgaggaac

SEQ ID NO: 112243 - DNA, 1038 bp, Setaria italica
  Intron number 2 from transcript Si006083m (locus Si006083m .g) derived from phytozome v7.0 (chr-ID scaffold_4; pos 36 375314 to 36376351 reverse strand)
ccggaagcttcaacaacacggtcgctgagaagcaggtcagctcattgcgccattttggttctgtgctgccgttttgtttgcaggataactctcaataaattctgtgattcaatacttattgaacattggggtctggcggaacttggtttgggggggattactcatcacttgcctggttgaatttgcgaacggaactagttagatgctgccttttttttttcagaagattcttgatagcttgcatgtctagattgtatgcagttggcttttgaactgagcgatggttgactcctacactttgaatcttttgtcatgatgccttgaccgtcattagtgcattgtaatatccaagcattcaatgatccatccatatggcatcattatgttgcttttgaggcctttgacctaatatgtggccttttgactttatgtgcttgaattgacattccctagtgctgatgagcagcaacaatattttggttggtatttattgtactatactttgtaataattagtatatgactacatgtttatggtacagaaaagctactgtttaaggcagttaaaacttgtttgtaatacacctaagctgctataggaaaatctagttttggatacattctctagttctgtgtccccactggaattctgttagatgtttgatacctccaatagataaagatggttgcatgtcaatacttcccaatcccatttagcacatttgttactttctcgattctcaatgggcaatatactctatttttcgatttgaagcatgccatataatctgcatgatgcacattagcctcaagaaaaatgtcacataatgacatatggttactatttggatattgtagaacttgaagcacatacatacacactaaatttacattgctgtagtgcattattcatgtttttttcaagtatttagaaaatcgtttgtgcttgcatatcacaaatatgtaatacaaactgctcatcttcttccttgtactcatgccagggagttcttgaaactgtggccagaagagtaacaaa

SEQ ID NO: 112244 - DNA, 1032 bp, Setaria italica
  Intron number 1 from transcript Si012538m (locus Si012538m .g) derived from phytozome v7.0 (chr-ID scaffold_7; pos 32 312507 to 32313538 reverse strand)
ggaggtgagcaaatcagttctgaactttgactttctatatttgtgtttggagttgctcctgaaatgaaattgtgctgcttggtttaacttgctttctggaaatatgttatatacaagtgatccccattcccaactgcaattggttctctaaatgttggctaaaagtgagccatgccattataaaatataaatatactgcaagcttcaaggcaattttctcaagctgttcattcagtgacttgcaatctgcagattagttaaagtacaccaaattcgttcttgattatcaaaatattagggttctttatcattggtgaaattgtaagcttagttctattgatgatctttatttggctcattaatagatataaatgatgttttctgtagctacatcagtgcttcacaatttggatcccatctggtcttctggatatgttcttcataatagaagttatttctttgtaggctgatgccccttacattctctgcattgtgacataatgcaaatcattgtgtacagtgtataatgggagttgattctggtttgtctctctttgctaacacaagtggagaccaaaagttcaggttttgtttttctttttcctgaggattctggctttcaaactttttacattgtgctgtctgatcgagtatgttgcgctcctccttggcctttcgtttccctttctctgttgccaattttccatcacatgccacagtcccttatgagttttattaactaataattttgttgaaggttttatggattgtcaccctaactcggtgtccatggtgggagtgtgccattggcggaattggtgtctgttgcaccaaagttttgagcagattttagaaacccttttgaaaagttctgccctttttttgtcgaaaaattacacttatggcaaagtaatgttcaatttgactactggctggggatacattttcattacttgggtcttgacggagttactgttactgtcaaccattctcgcagactgaggaaagtggatctgaagagggactttggct

SEQ ID NO: 112245 - DNA, 536 bp, Setaria italica
  Intron number 1 from transcript Si010663m (locus Si010663m .g) derived from phytozome v7.0 (chr-ID scaffold_7; pos 98 58326 to 9858861 reverse strand)
aggtatataccttcttgaaccctattacaaaatggttatattatctattcccttgttccaaattatatgttattttggcttttctaaataaatatttttttattatatatctatatgtagtttatatctaggtgcatagcaaaagttatgtacataaaaaaaccaaaacaagcaataatttcagattgaggaagtacaaatttaaaaaatatatagtcttttcattccaaattataagttgttttagttttgtcctaagctaaatttatctaactttgaccaattttaaaaaaatattagcatcaacaatatcatgaggtacatattacgtgatagatctaatggaagtagcttgatgttatagttatttatgtattttcttctacaaacttagtcaaaactagagaagtttgacttgaacaaaactagaataattacttataatttggaacattgggagtattcatttttatatagtattaacgtgatgtgatcgaacaggaaatatccagtctcgaatctccaagtgcagctga

SEQ ID NO: 112246 - DNA, 749 bp, Setaria italica
  Intron number 4 from transcript Si011644m (locus Si011644m .g) derived from phytozome v7.0 (chr-ID scaffold_7; pos 67 38808 to 6739556)
agcatatccgttgttttttcttggtggtgagaccggttgggaggataattagatacaatacagagtttctccaccctcaaaaccgaagcggaagtatgtaaaacacaagagaaaaggtttggcaatttaacctttgttgaacttcttatatcatgtagttctttgtttctggcacatggaaattgatagttattctcgcgatatagattgatctgatggtgaaaatggtgaacctgcaaacgatgatcagataggcgtgggtagatgtaagaagcggaccaatcgtggtattactaattatgattccattcctttcatatgacaacttatcactgccttgttttatttatatttataaatttataaattataatattataaattccaacgttgtagactctcatgttgctaaagaagaagatgatgcgtgtggaattttgagaacaaatgaaggtacaataaattattgctactcttctaacctcgttctaatcttttaacatttagattccactttatagaccctcatgttgctcgctattttaatatttatttaatgtgtaatagataatagattttgtaggttttgatcatgaaagtgatccagatgaaaatatgtatggcgacttggaagggctaggtaacatttttacaatttagattagataagtttactggaaccatgaaatatttgtttatatatcatggtgttctattatattcgtcttaaaaactagaggtccacgcca

SEQ ID NO: 112247 - DNA, 375 bp, Setaria italica
  Intron number 1 from transcript Si010209m (locus Si010209m .g) derived from phytozome v7.0 (chr-ID scaffold_7; pos 34 216064 to 34216438 reverse strand)
tgaaacccttctcctacgacgaggaggtcttccaggtgagcgcgggctccttgcgatgtgtacggcacttgtatgatgaaatgcgtggctgagtgccgtgtttgatcaaattgtttgtttggcagggccatgtcatttttggcaatcttctcatgcgcttgcctttccgtgcatattgcatttgattcagttaatggcccttgtccaattagtatgcatggcatggggttttgtattatgttttctgtatctctcaatcaaaagcttatgcgtatgcagtagtcagtagttactacttactaataagtgataactgagcttagaactccattcccgtcaggcattagattttgtgatcagcgaagcaagaaagca

SEQ ID NO: 112248 - DNA, 907 bp, Setaria italica
  Intron number 1 from transcript Si025058m (locus Si025058m .g) derived from phytozome v7.0 (chr-ID scaffold_3; pos 37 153390 to 37154296 reverse strand)
cactacagtggggaaaacaggtagagtactaagccatttcaacacttctgtaaaggattaattatgtggaaatttgttctggtgtttcttgatagttctgtttaattttgtgtaacatcttccatatatttcttcaactacttaatcaaacatttttgggagaaaaatcctgatgtaggccaaactgtaactattagtgcgtgggtgaggcatttcttttggtaactataattgtctctggaaatctcagcctaggtgttttatgtgtgacatttgacgtaatgaatttggtccatgcaaaaagacttaacatttaaggccttgtttgcttgtccaatcctggccaacaaagaactttagtcctggattgggctgaaatcctagccagttttggttaatccaaacaggttatataagagagttgaataattgtagaagctaatgtttagctctaaatgtgtttactatttttacttttagtgttgccctatcattcattcttttgacctgaggtgttggctttgttcaatacagtttctatcaagtgtttcatcataaattttctgatatcattagaaacacgaacttctgccaacatctaatcataggagaattcaatattgtattattccacttgctgcttgctacatactttagtgtctgttgcggtgtgtgtcttgtactctttggttcaccttcttcttaatgaaatgacacacagctctcctgtcttgtttgaggaaaaaaagcaaaccccccagtatggcatacaatatgctttttttaatgaaaaaatgttactcttgtagccttcaccttagctttaagcactatgcttctctccctcaatactttatttgttgcaatataacgattcttggtaaatacaatgtagggtgatagcttg

SEQ ID NO: 112249 - DNA, 715 bp, Setaria italica
  Intron number 1 from transcript Si012225m (locus Si012225m .g) derived from phytozome v7.0 (chr-ID scaffold_7; pos 14 591326 to 14592040 reverse strand)
gtaggagtgctccttcagaagtttcaggttcgagtcttcgagatctgctttgatctcggctgctcttagctccttgttggtcgacatttatcaacctggtatgtagcactacttactagaaaaaacaacattgcttgcttattagcttgcttacagcaatacaggctacagcgttgtcgcccccttctgttattttgttctctgcagaaaaaaaagattgctgtgcattgttgattgtcttaatgtggttgttgtgctactatatatgctcatataggtggtggcgaaactgatcatgggttaggccagttaatttgctgctgctttcttgcttggtcttgtgcgtacagagaatatatattggtcaccaatggtgcattatcctcaaccgcggccatgggtactattctttcacattttacttctttctttcagacaattcttttcatacttcactattgaaagctgtagcatacaggtcatataaacacatattgtgcaatttaagtttcaccaattaaacaataataggaattgaaacaacatttgtattcgaacatccgtatcagattgacaaatggacgcagatatatcttaattcattttcataaaacaagctgcaacaaacgagacgacctccattcatttgcttactatatatactaattcttctactttaggtaacgctcgagtctgaagcaaggggcgacctact

SEQ ID NO: 112250 - DNA, 524 bp, Setaria italica
  Intron number 2 from transcript Si009298m (locus Si009298m .g) derived from phytozome v7.0 (chr-ID scaffold_7; pos 29 148829 to 29149352)
aattttacacgggtgattcatatatcatcttgaaggtacggacatactaatgccttgttatatatccttttctttttgaagattattggtgcatcatatttgaaaggcaaattatttcgtacatcttgaaacaaaagcttagatactttgagaaatctgtgataaaaatattttcttggctttcttttttctatttcccattcttctaccatactccctccgtttcaaaatgtaggtcgttttagtttttctaagtacatagattttgctatgtatctagacataaccctatatctaggtacatagcaacatctatgtacctagaaaacccaaaacgacctacattttggaacagagggagtataatgcaactctttatcattttgttgcatgatatgcttcaccatgatgaacttctcatgatgatattgcaatctgttttttggttgatctcagttttgctttatgtttactgcactgaatatttgtttccttttgttccctgcagacaacagcgttaaaga

SEQ ID NO: 112251 - DNA, 992 bp, Setaria italica
  Intron number 4 from transcript Si025557m (locus Si025445m .g) derived from phytozome v7.0 (chr-ID scaffold_3; pos 37 100414 to 37101405)
agattattgcatcagagatagctaaacaagcacaggtatgtgatttgcttaatctgataattgttcttacttaagcagcacatacgtgcgcagcatagatatctgtgtagaaccatgccacagttgcagattacttgaagtctataaaaaaacacaagatcttaagatgacactgatgaaagttgatgcatgttttggagtttaaatagtttgtcacaacatattttttatctatttagatattaatactggaacctaaaacaaggtgtgggcaaacccttcgttttaataaagcagtttgtggggattagatatttgaagtagttctcctgtccatttaatgaaagaagattttagtgataacagttttctcttaatatgagtatgtagtccatgatccttgaccatttcttagatctgttcctcatcgatctatgtgtacagggtacttagacagctacttttaaatgacaagaataacatatacggtagctaaccaaattaggaaatgtaagtaaaagctgtgggattggtgcataacatcactatgaactttcatttctgaactaacttttaggttctttaatgttagctgtgaatatgaccattgtgtcaccatgccatttattactccgcagaagaacccgttcctgttgtcgcctttgataatcatcggcacacatatctattctaggcagtctgcatgtgattttcaatctattggtggaatttgcactttgctacttctagttcaaaatggataagtaaaatatactaatgggacctacgtgggcaatcaagcaattggtgtttggtgttttctttcctcttccaatgcatacatgacaagacaagttctgttaatcattaaccttgattctttgagtgtgtcattcatataaacatgattgtcatttaaaactgcttcctaaagtgtttttttgtctttgtttgcagctttgtccgtaccatttcattccttcgggattgca

SEQ ID NO: 112252 - DNA, 927 bp, Setaria italica
  Intron number 1 from transcript Si009291m (locus Si009287m .g) derived from phytozome v7.0 (chr-ID scaffold_7; pos 30 076529 to 30077455 reverse strand)
cgctccgacggctcgcggtcgtcaccggcacgccggtacgtcgtcccctgatttcaattcggccgaagacgcaattcatttgttgcgaattggagagcggtgctgggaaattcgatccgctagggtcctctttcaggaaactactcttgactgctttcaggaggagatcgggtctcatggattttggttgctcatagaacgagaaaactctacttgattaattttgatcacgaattggatgggattggtgatagactgctagatactcgaaatgagctccaatagttgataactgtaacaaacaggacttctaggacatcacagctacacaaactgaccattctgggcgtgcatttgtgtttcgatcaggatgctatgcgcttgcttcactgatctacttaatttaatggatacaaacttttaagctttaatggtgaattagtatgagtgttatgtattaaactctgctaggtgctttgaggagtgaatagggtcttgtggaatttgttttttcattaaatagaaggctgtccttgtgaattttggtgatgaattacatgggaattagtgatttctgtacccagatttgggatgggtgcgatgggcaatatgtttatagcatcgcagctgctaagattaaccattgtgctcataaggttgtatattgatcagtgacttagcaagttaatctctgatataatctatgtgcaattctgtttaagcttagatagtaaattggtactgtgtaggattctcttctgttgaataggtgcaacggacgatttgtttagaccattgcagctgcaaaaactaaccattgtggccatatctcattcagtagatggtaaattggttatgtgtgggattctcttctgttgatattagtaaaataatatgcagctattgatctgcaggtacttgtcaaga

SEQ ID NO: 112253 - DNA, 578 bp, Setaria italica
  Intron number 3 from transcript Si009989m (locus Si009989m .g) derived from phytozome v7.0 (chr-ID scaffold_7; pos 21 117198 to 21117775 reverse strand)
aaggaggggcagcttttggccactgttcaagcaaggtaatcttgtggaaccaagtatatagatgaaaatttcacctttttcaacctaggttgaacgggtaggtgtaggcaggctaatatggtataccatggataggagttttgagttcgaatcttggtgggcgcaataaaattatagcagctctaatattaggataaaggagcttttttaaaaaaaagagaggataaaagagctttaagattcttgctaatttttctaaagggatggagcggttcacttttgctaggcatccaatacccctttttctaatgaacttgacccatattgctcttagtagttggtagtgctacgcaaagtttggaatgtttcatttcgaataaattcattactttttgagaggcatagtcacgaaaaagaaatgacatgtacaggacagtgcatttttcattgaatcaagcaaagaataatataatgctacagtttagtgtggaacaaaaactaatttaaaggtttgattcgtggccctttttttatatctcccagggaaaagtccccttgctctcgcgtcacgccttaga

SEQ ID NO: 112254 - DNA, 887 bp, Setaria italica
  Intron number 2 from transcript Si024813m (locus Si024813m .g) derived from phytozome v7.0 (chr-ID scaffold_3; pos 10 630776 to 10631662)
tcgaggaggagcacccgttcgagccccacgccgcggtgagcgtccacacgaccactgacttgatcggagttgtgtttgcttttatccactgagcagagaagatgaggtttatgctttgatttgagtggttgacctggagattgagctcatactagtaggctaggcggttgtgtaggggaaagatgcttgattatgggttgattactgactgaaacctatcagcttgggggcgttgacctgaagaactagatggatttttgttgatcttttggacgccggaagtagtagatagattgtatatctcgatatccatgttagctgcagcaaagctctggtctagctaatcgatacttgaactctttggatatgccaaagatagaattagtgtatttgctgctcttctcatttgttggtgttataagcctagtcttgagtaccggtcaacagaaccacaatggactgaaagcctgcaaggtcttgcatatatgcatttggagaaaaatggcattaactttgattaaaaaaatgaacatgattgtgggtttctatctttggactagtaaactgaaacatatcaacttcaggtgggatggttaaattaatcagctttcaggggtaataacttctacctttccttaagtgaactcatgtgtctctatggttatataaacacactgcatatcgattgaggatcccttttctttgcctcatttgaaatgtcaccttttgcttatgtatttgctgcaagatctttgttaacctagtagcatgaatagaacccacacttatgttcttgctattatgatgtaataatgattcatttcactggttgcttccttgtcctgattttccattgctcatttcaggcttgccctgtttgctctgag

SEQ ID NO: 112255 - DNA, 875 bp, Setaria italica
  Intron number 1 from transcript Si021716m (locus Si021716m .g) derived from phytozome v7.0 (chr-ID scaffold_3; pos 36 907143 to 36908017)
ctcctgcgcaggctgattgacaggaggaattgggggtaaggatttcctggatgctttcttgtgtgctgcgatattatctgtgtcggttcttgggcctttggtccgatgatcggggctgattgcctcaacgatgatcctggctattttcgtggattggattggtgaattgcgctcaaagatgagttttcccgtcccgatttcggttctcctgaatcgtgaatcgaaccaaatttcgtagatcctgttcatccgtctaatcgaaacctttcctttgctgctggacagtcagtggtactgatattttgccgccgatgatgcgatgggaatctcacttgtgtgcagagctggtgaactgaggatattgtttgataattgttgggtagtataagaaaggtgacttttgggggtagagtggggggaatatgctttctctttctgaaagtttccagtggcaccatcttcctcatcaggatcaaatcttcccctctctcctgcaatctttgcctctataagtgcagagttcttagttcagtctaggtgctgtttgggtttctagttgagttcatccttcttctccttgatctccagtgttgattggtatcttgtttggtgcatctttgtttgccaaagaatcttatctgtctgtgagtttatttgggggatcggatatgctctgttttgttatgattcttaatagttgtgtggattggttggatggattctttctcatccactcatctggtttggctgaataatataataatctcttttttaattgtgccagacgagggttgttgattagcttgctgcgaaagtaaccctcaattattgattgtggatgcatgtcatgctgttaatgcgtttcacattgcagg

SEQ ID NO: 112256 - DNA, 965 bp, Setaria italica
  Intron number 1 from transcript Si024005m (locus Si024005m .g) derived from phytozome v7.0 (chr-ID scaffold_3; pos 49 486395 to 49487359 reverse strand)
aaggtcgcaagcccttccaaagctcgtgtcgtcgggtaagtcctcgtccctgcatgggcatcgagttcttggccagaacagctctccattgagcttgccatggtgcaggggcaaacgcggcaagctcccggtagtggcgcgaatacaacaaccgcgcacgagatggagagagagggagagaagaagagagagaaaatatttttttttattgcttatgtttagccttaagcttacgactcaccttaaggaatcttttcctatggtgcaatcccacaatgtatgttgctttcaaacagtgctgcatttattgcctaatgctaactttttgcaacattgtggctgcccttagaggtgcattgttagcttgtgtttttaagccagtttcagaggttatatctattgttaagcttaattgatgaatagttcgacactcggtgactttacttgtccatgaggttgataagacttgccttttgcttgatatccataagaccctaacattagttctcacattatttttatctgcatctctggaacatccgaatatgcaatggcagagagttacacagactctatatggacacttaattttgactgttaaccttttccttcgtggttcacgctcacatgctaaaatggcagctatatcttgtactatgttccttcgatgattggccctagcgagtagcgacacaacgttgatgaatttgctaagatgccttacatcatggtctgactttcatcatagtgaagcggtacgctaaaccataacacataccgattgctatggatcatagtaaaatatgtctaagaaaatgctttgcaccgcacttgtaacttgtgtatgcataaaaaacatgtccattgcaagtcaccggtaacgggtactttttcaaatacactgtaaatcactgtattctgaagaatatgctaacttttatgcttatttgcatggtgcaggtatc

SEQ ID NO: 112257 - DNA, 988 bp, Setaria italica
  Intron number 1 from transcript Si024043m (locus Si024043m .g) derived from phytozome v7.0 (chr-ID scaffold_3; pos 38 511791 to 38512778 reverse strand)
tcttgtggccattggcttcctggatcctagcaactgtaagctctcatcctttcctcagagctgcatgctctttattgttgtaaatttgtgaaatttctggcaaagctgaaaagtaagtgcaaaaggaaaagtaaagaaaaagatattgttgtctgaaaaattctagctgaggttccattcagtccattttagaatataaagtttaagtttgatagatcactcatcaactaacctgtcaacattcagattttttttactgacttcgtagctaaattaatgtacttcagttcttgctgaaagtgcattgtttgttttcaatgctgcgccccagaccttaactgaccaacatggagcagagtagcaaacaagttatttttgatgtatctgctcatattgcaagaatgctagtgcctttggaatgtactagccttggggatgtagttgatatactgcatcatttgctattttttttcctattatcctacttatgacagtgcaaatctagctgtaagcatgtaacacgtgcctaatccagtttaagaaagcaaattgatgtgctgtaaatctagctgtaagcctgtaatctagttgatgtgctgttttcgcttcttttttctcaaattcttgcctatcagtatatatatctcaaattacctggtgtcgttgtctcatacttggacagcatcgatgtatatctattcaattaattctggtcctaggggcatgttgataatattttcatggagccgcacatctgcaagctcatgattgtgcatgcgagccacataagcagctgcacagatagacatgacggtctacctgtggctttctttgcacccatgtttttttttgaaagattatttgcacccatgtttttttttgaaagactatttgcacccatgttttcatgtccagcgacttgtggatcacttgaagcaggtatgagacatgtgcattggcatttggcaggtgcaggagcaaagtgaga

SEQ ID NO: 112258 - DNA, 455 bp, Setaria italica
  Intron number 3 from transcript Si010240m (locus Si010240m .g) derived from phytozome v7.0 (chr-ID scaffold_7; pos 31 392229 to 31392683 reverse strand)
gctcaggttagcttcactgaacttgtacaccgttggtaccgcacattattcagcaataaattgggtgctaattctgacagtttatttgcaattttcttacttaggaaggcatatgcaaaagttcgttagaagagttactttccattgtcatatgcaaaagttcattagaaaaatttacagtgttacacagacatgaattatttttgttttgattttgcaaaccagatggctgtacttccatacgctattgaaaccaaaaccaacagcaacaaaatatgttgtttgcttcccttcaaaaaaaatcttgtttgcttttgaacattgttgtcgtcgactcccataaaaatctaaggaccctcatgttcaatctaataataataatatgattattgaccactctgctgcttttgttttgtcaatcattccatcccctaagtagctgttgaatttaaaag

SEQ ID NO: 112259 - DNA, 839 bp, Setaria italica
  Intron number 1 from transcript Si009487m (locus Si009487m .g) derived from phytozome v7.0 (chr-ID scaffold_7; pos 17 271324 to 17272162 reverse strand)
tccacgattttgaacagataaagcgcgagatccaggtcagtgccgtgctgctgaggttgctgcagcttcgcttttctgctgcatttaggcgatttatttggtttaatgcttgagttgcgaagagatctgcttagtggagagaggatttttttggtacaattgcagccattcttaaattgtagttactataatgtgctgctcggtgctgatttggtgcgttagcatattggtgtatgtcaaatattattggtaaaatctaacaaaaggacatttttgcttaatttggtgggttcatgtttctttagtagtaccttattatgaagacttgtgtgtacttttagcagtagttatggtcaaccctcgtgcatttgtctattcctgtacagtggaaaagaagacgaccatgtcaaaacttgacaggcaacattgttttgtttttctttttggccagcaccacaacatgagccacttgaatgttagtatgtcaccagtattgcaagaatatacttgcttagtaccgatatttttcattgcattttgaactagttttatatatgcttgatgccttacgtttttgaaagtcgctgcaacaaacactcaaaaagttatatccttaacattttacttcattcctcctattttgttgatttactcttacagatactgcacactgttattgaactccatgggactatgttatattctttatttatcgtattctactctttccactggtaacacgtggagcatttcttgtatgccttcctatgttctcacatgatgtaagaaattgaatgctttcagcttgaaacggacaaagaagctggagataataaagg

SEQ ID NO: 112260 - DNA, 510 bp, Setaria italica
  Intron number 3 from transcript Si008272m (locus Si008272m .g) derived from phytozome v7.0 (chr-ID scaffold_4; pos 14 176910 to 14177419)
accacccgtaacaacaaggactgctgcttgaagtggttagtctgttgctagctatctaatgcataacataatttcctctttgaatctgtgcctaattttgtattcccttgactgaactgattaagctgtcctaacatcataaatttgaaacaggagggagtagattcaggttttctgcatttttatttatattggcctgcctttgtcttcctcaaactgactgggaaatcttcaaagctgaatgcccatgcattgcatcagttctgtttgtagaagttagaacacactatttagtgcaaggttgagtatctgttcagtgtacagatttagaattacgaattttcaaactttcctagctaacatgcttgtattgacacttttgtaaaatgcaattgttttgtctgtcctaatttttcaacttatatatgaatatgctatcatcggacagtttttaaatgaaacttatgcataacaggtaccagcaattagcatcgccactggttaaagaag

SEQ ID NO: 112261 - DNA, 729 bp, Setaria italica
  Intron number 1 from transcript Si012372m (locus Si012372m .g) derived from phytozome v7.0 (chr-ID scaffold_7; pos 23 449881 to 23450609)
aggaacctctacactctggtaagtccataaccagttcattaatacattgagcagtattaagtttaggaaaaagtaaaccttaagttcaacaaggtgtatttaggggcaatgaaaaaacatatatgtgcaattacacaggatctcttatttgtgacatctgcttttggagttcattccctttagttgttttcagtgcctaaagagcactgaaagcaagaatctcaactttctgtaagttgtaggctcttctttatggattgaaaaagacctctgcacttccattttgtttctgttgtccttatgtttgatagcgttggcacatgtacctgcatcttgtacatggcgctgactagaataaaaactatgccgtcaagaagtacaggaatcttgaataactatgataagatgcggaaatacatgtcacacgccacacggtacgaaagttttcacattttagtagcataatgaagatgccatcatagtaaactactacaagaagtctgaaacagacaaatttaacagcattactgagatttgtttatcctaaaaggctaaaacgcatcaaagttagtagataacttgaatgtccagattgcaggttaaaagaacaatgtctttgtaatcctcagaataaaagataagtaactgtggtacaaatttcaagtaaactgtttcattaagctaagaaaaatatttcctcaaaataacaagctaacttgctactaggtg

SEQ ID NO: 112262 - DNA, 544 bp, Setaria italica
  Intron number 1 from transcript Si010432m (locus Si010432m .g) derived from phytozome v7.0 (chr-ID scaffold_7; pos 35 604119 to 35604662)
attctgcatcaggtaaatactccttgagctgatatgagcattctagtatattcttcttcttctttcgttttggaacgggatatgagcgttgtgatatcagatcagcattcccgtactgcttttatctattggcatgagcgccatatttttggtagtctgttatcatttgccttggaactaataatgggctcaatactagatgtggctgtagagttatagttcctgtggtatttttgaacccaagtccacatcatttaagcatccttcatcagtagcttttgactgtgtgctgtgcatgtagttagcttaccatgcaactattactttctttagcagtaacgtctttttttatcataagatttatgcatcaacttgggaaaatcattatgtattacatcataagttcctctccaaacagatatcatctctaggaattttgctctgtgtccaagtacatatgtaagcaccaacaaagtgctcttttcatgtgtgggaagacgaagaaacttggttgcaagaattaaaacttgctcattctgtgcag

SEQ ID NO: 112263 - DNA, 857 bp, Setaria italica
  Intron number 2 from transcript Si023560m (locus Si023560m .g) derived from phytozome v7.0 (chr-ID scaffold_3; pos 62 67816 to 6268672 reverse strand)
catcaggtaggtaggctaagattgtgctccctggctttgcttcagtttcctttctgcttcagtttcctgcttgtttatctgttcacagaactgtaatctgtgtaccaaatcattttgttagtttaatttcgtcatttctagttaccacttcaaacttttcgaaatggcatcacgttgtctctggctcgtggcttctggcatagctatttttgccagagagactttgcaaggccaactgaagtactgaatttgatctgcaagttctgtaaccgctacaggaggaattaagttataaaacatcctgatttgctactttgaatgtggcatttgggatgataaaaataatatgctagatacactcgagttgctgagttcctggaccctggttggtaaaaggatttacctgttctgggtatgttgttgccatgctttatgcctatatctgctactcttcctagaaaaatagaaagaatcaacatctgggcgaattcaaaagtcggcaaaccaaaaataaaatccgagtatgccaaagctgcttgccaaaagtgagactagagggtgatgttggaaatattgtgcccaggggagaccaatgcatgtcttagttaacatgttctctatctaggtcaaatcttcaagcctagcaaattatgctaactttgtctttccaaatgaaaccagtgcactgattccactatagttgttccttttagattacaaaggttatcttaatttaagtgaagaaccaaaattgtaatgtttttcatttaccgcatttcaaaaaagatacttccataaatggaattgtgctaagcttggttttctctggctgttgtaaattcttgaagcctctgggg

SEQ ID NO: 112264 - DNA, 391 bp, Setaria italica
  Intron number 1 from transcript Si009432m (locus Si009432m .g) derived from phytozome v7.0 (chr-ID scaffold_7; pos 25 716920 to 25717310 reverse strand)
ccaaggtgaggacgttcacgccttatcatttctctcagcttatataatcttacatagagacatagaggcatacggcgtatagaagtttcatggatagccaacagacagtcttctaggagtattatactattagtcgacgcatagagaaacactgacatagtggcatgtttcgctccagggagtaggttgagattttctggataaactgggttgagaatttaatttccaattaaaatatctgtattcatgtggtttgattaccaatatgtcagctgaaaagtcgaattacaggcttgaacttaccatatttcttgtgaacttctatagaaaattgcgattacaacgagatcaaaagaaatgttttgatttgtaatccactaatggcaggtaa

SEQ ID NO: 112265 - DNA, 987 bp, Setaria italica
  Intron number 1 from transcript Si022797m (locus Si022797m .g) derived from phytozome v7.0 (chr-ID scaffold_3; pos 44 508468 to 44509454)
cgtcgccgccgctaccgccgtcacccaccctctcggtcagatatctgctcttcgtcttatttcgagtaatttactcttggattgccttggtattagtatgaagggggaaaacaaacagcacttttttttcctcgagagctgcgtatcattgtattaataggagaagaacgagttatacagagacccaaacacacacactagaacctgaagatcctaatcaccttttacaattcggttgggagtaattcagaatttatgtttagttccactgcccacctttccgactgttatctgcttagggagttgccgctagttgaaatgaggtcgttgagaagtgagataatgttgcagtagatagtaattgggaaaatgtgcctaaatatgacttagctaggtttttccacagcataatcatgggttatttggtgaaagagattaggcttgttttattttagacgaaagcttttgtggatagctattatttatatggtgtggtatgacagcttattcatggcaggctatttcttctagttgtgggaaaaagtaggagtatttacattccatttagataagtttggccattcaaacattttgtaacgggttgacggcctttccaagaagcgacaaatagtcgctttatctgactgcagtaaataacagttgtccataaaacaaacagacacatatggaggaaaatattgtcgaactaaacatagaacattttaaagatggtgctcaggaatttttcatgacattcattctaaagagtttgttgttaaaatttgacctgtccagcctatgatttttcagagatatttgacaactggtacctggaccaatacttgaggacacagatctaattaacttgtgtaacaatcaactgttcattgctatgctgcctatttggtaacaagaacatatatcttgtttgtccagaaagtaagttactccttttataggtctactaccaccattttcgtactgcag

SEQ ID NO: 112266 - DNA, 647 bp, Setaria italica
  Intron number 1 from transcript Si021341m (locus Si021341m .g) derived from phytozome v7.0 (chr-ID scaffold_3; pos 92 4396 to 925042)
ggagtcttcttcctgttgcaggtaattttcattcggacactcatatggtatggactgatggaatttggaattgagacttgcacatccatttgtagactagctgatcttagtagatatttaaaacaccgcaacggtttgatggctgacatgctagaatagtaaaaattgacttgaagggtgagatcaaactaaatgccatcttcattgcttaggatctttaaattgttaactggccacagcatacatcaagattaactgatttgggaaaatgcattcagattcctatagtttctgtcaacataattaggcactactgttaccaatttatgcatatttagatagtgttactgcttatccatgtttcaattaggatacttggttgtcgattatgtatttggctagtaaaggcaaaatgtgcaacactagattattgaaatgccatctgtctcaccagtaatgtgatgtttgttacctatctttttcattgtcagtaaaagtgtagatgtcatgcaggttcttaatacattttctgcctaattattgattctagttgaaggtcttctgtatgttctttaaatacatgagagctaaaacaaaacattcccttaccaggttttcttcttcttggactgggtgaaatatttgct

SEQ ID NO: 112267 - DNA, 989 bp, Setaria italica
  Intron number 2 from transcript Si007308m (locus Si007182m .g) derived from phytozome v7.0 (chr-ID scaffold_4; pos 32 326005 to 32326993 reverse strand)
gcgcatttattctgtatgtatatgttcacactggatgcaattcatatggttttttgtgcatgaatgatcttttttactttaggcaaatgcacgaccagttagtaacttagtagtaatggtgcaatactgcttgatcagaattattaacgctgagaagtttgtccatttttataagatgtatagccctgttataagacgctgttgatgtctggagttggtcagctgtttccatttattttttttcttgaataaaaaagaaaccaaattgatgtggaccagtcttgaacctgcgaccaaaccagttcttttttatgtcaacgtagtatggaaattaaatttgttgaaaagatttggagttatgatatgaatgactagcgtaacctgtgagcggatatgcttgggagaaaattcaagtggaattcatgagagcaagcataatttgaaattccaagaagtggttactttgctttctttagtttcatgatgaatatgttgaagattctgagtagcttccaaccttgtgcttttacatctgcatgatattagggtaatgcagtaggcaaattctttagctacatgctttttatttgttgatgcaatgatagtattgcttatcctgatatcaatgcataaactttctgtttggcatttatgcaaaaagaaaaaacagttagtacgacctgactttgctatcttgaaggaaagcatgaaagtatgttcatgtactagcacttgctgttgagaagtatcgggtgtaatgaaaatatatccagcatttatagtcatggtgtttataatatgagtgagaaggaaatgaaacttcagataacagatgcacccttggaactttatattgcatttgatttgaatttttagctagcttttctgtatggactctccgatgagtatatttcagttttcaatatttttaatactagtaaaattgtcatattctgcagtgcagcacacaagcgcttcacttactatca

SEQ ID NO: 112268 - DNA, 869 bp, Setaria italica
  Intron number 2 from transcript Si009381m (locus Si009381m .g) derived from phytozome v7.0 (chr-ID scaffold_7; pos 20 967451 to 20968319 reverse strand)
gccaacgtctgccccatcgagagcctcgactacgagtacgttcattacccccggcaattccgcaaaccctctcctatctgtattcccttccattcatattatctgctcctcgagagcattccagattgattcgagaaaaagatgtgatctttaatgtttcgtggaccatggtggtgatcttgacgagggatcgttgttattagtgtattgtttggcacggccactaaaagaaagctaggatcttgtgatgcgttgggaaacggaatgattatcttttcaagaaaatgtgatcaccgatgcgcctttctacactgaagtttctaaagaattcatacagccatcgacgatgacattctaatgtttagtccttttttgtgatgatggtattactgaatagggttgagggaggcttattggtaaattcatggaattttagaggtccaattcaggatcttccagagttcacattatgcatatattttaatgaacacttagtgtaaagtatgtggcatagaagaagaaataaactaaccgttttgggttctgaactgtgaaccgctccagtgccatttgaatttcaacaaatatatgagatcagacaggaacaatgagtttcaatcttgtggtatccagtatgaattagtattgaacttatatatgcttttaaatcaggctgcagcatgcataagtaggatgtctgctaataaattgagaaaatgtcgactgcagaagttcttcagatagtttcaaaactgccagaagtaaattgcagactgtagattccaaaaaaaattctgtaaactttagcaagcttgttatgttacttactatctagagttctttcactgcatgttttagaattgtggaaa

SEQ ID NO: 112269 - DNA, 887 bp, Setaria italica
  Intron number 3 from transcript Si023690m (locus Si023690m .g) derived from phytozome v7.0 (chr-ID scaffold_3; pos 11 077767 to 11078653 reverse strand)
taccccagcagtatctaatcaaggtagaatgtcttaccataacctcttagatgatgaagtgtttgatgcaccttgctcattatcagtgttcgatgatgcgaacttttgattgtcgcacatagcagacttttctaattgaatcgaaatgcgacgggtgcgatcttgggttgctctgtattcttgttgtttgtgtttaggggccccatgccaaatgggggaagctctgcttttagcttcgaaatacctgcaggttctctgcggggtgctcggaaattggggccctagagcaaatgcagtggtctcatagtacgaggctgtacttggttgatgagtctctcatcaaccgattcctcacagccttgcctccaatgaccacaatattcacatctgtgtcttgtaggtgtggcatttttgttgtcacgcaaggtgtggcatgtaggaagcttgatgtgattctgttattattgtgtacccatacttgtagaccgttccttgtgttgcctttctaggtgcttatatctgctatcttcacctggttgtgatcagtcttgatttagtagctgctatgttgctaccctgtctgtgtttccctaagttgtggactgatgaaaagctaggtgctttactgttgaatatttggaacttagtttaccacaactcgaaataatatagaaatggtatcttagcatggtttgggtggtagttatgtcttccttgatgaactctgagagcacaatggcttctatttggttgatcatttgtgctctatggtttgtctctagcacggcactagagagtgtctctcctcattgttttgttttgcatcacagttaatactcacgagtttcttcgtttctaacctgcaggtatcttgcctactgcctgct

SEQ ID NO: 112270 - DNA, 921 bp, Setaria italica
  Intron number 1 from transcript Si021115m (locus Si021115m .g) derived from phytozome v7.0 (chr-ID scaffold_3; pos 28 517810 to 28518730 reverse strand)
aagaattgcctccgccgacactaacccgcaaggtaagctttttttttgcaattcgtggaattttaggagtgggaagaaaaaaaaattgcgggttatgcgtttcagtagaggaaggctgaagagttttgcctgtttcaacagtaattaattgtcaagtattaccaattgaagggcagcagcaaaaatttgggagttcaatttggtaatattatgtgtttagtttgtctaaaaattggagatattcagttctgatttggtgattcgtttgttttgctggactttgtagtttcctcggattggatgagggtggaaatggcaaaaagtaaaaaagaaaaagaaaagaaaattgctttctttcctgcatatagtttcacctttcctgcgttttgtgttcatctttctctattaaactcagctttgatacatacgcctgaccatgttcttcccgttcgtgccagataatataacttttctatatcattcttccagttttatgttgggagcggcctactttaaggtttattggtagcaaaattgcttctctcttgcttttcttcggaaacagttctttggtgccattgttcagccagtttctaatttcacatcatctgtgtttcgcattaatttatatctactaaacgctgtttccatacatatgcttgaccacggttgatgtgattcttccagtttcatggtgccagataatgaaacttttgatgctccaatcttttccagatatgttatttagtaaaggatctataaccaaagaatttgcataaggttgttccaatagagccgatcccaacctactagtttaattcatacctgccgcaatatagtaatgaaatcaaatgtccaaaagttggttgactagttgttgtcaccctcctccctcttgcagcggctgctctcagatccttg

SEQ ID NO: 112271 - DNA, 808 bp, Setaria italica
  Intron number 2 from transcript Si025745m (locus Si025745m .g) derived from phytozome v7.0 (chr-ID scaffold_3; pos 13 004103 to 13004910)
gtaactggattcacatattgtaccaggtaatgacacattcaaccactggcgtgcttccattttctgttgctgtttgatttcttgtatctttgttatctgaagctcaggttgccctgttgcttaccagcggtttttagttgctagtgaactgtaacaactggacaaatcatttatgctcctacacctccataaggcagatacatagagttgattttccaatatttgaaggggttgaataaatgtttgtcatatcagcttcagttaataggatggcgttttgagctgtgccaccatgagcaccaagttttttcctcatgtgttacgtgtacctgttatcctttgaacatgaagcatgttggtgtcttatgttttcacaatcacatcctcaaatgtagtgccacaaggatttgggattattatgtgtcaaaattttcatcttgtagcacaatccatcgttatgtgatgatgggtttgtggacatccacgcattctgggttagtagatgttggaagaacaaaagcaaaaggtatagtcttgtgaggcttgctaaataaccttcacccagttgagctataaggcttactcaaatggcaatcctttgaaccccttttcaccatcaagtagttttgttgttggtagcctttttcatgtatttagactaagaacctgttactaccgattttacctttctggatggactttctcttcaaagttcaaaagtctcagatgaatttaaactgactgctttcaccattgtatatttggtattgaagcgctcgtacgacgctcggaaggccctccagaaaaa

SEQ ID NO: 112272 - DNA, 1014 bp, Setaria italica
  Intron number 1 from transcript Si009409m (locus Si009409m .g) derived from phytozome v7.0 (chr-ID scaffold_7; pos 30 570817 to 30571830 reverse strand)
cgtacgggtcctcgtcggcactgtcactcggtcaggtaattaattcgtggctttcttttgagctgagtgaggcaaaagcaaattcttgtctttccttcggaaagatcagcttgtacttgttgccgtttcttgtttcctttcgtcttctctttctcactcttggtaaaaggtttcatttcaatttgaggtttcagtttcagaacttgggattagcgatagaaacagaagggtcatgtctgcaatatactcctacatgtactgatcctgcgaggattagtagctttttccttggaaaccgagaagtctcaggagagagagagagagagagagagagagagagagagagagagagagagagagagagagagagaggtgttatctcaagtactgctgttcacacatagattaggtcatcagagtacatgagccccatttctttaagacttgctcctatataaaggggcagatgaatgggacagatgcttggagagaggtgagacttcgatcccttggttcctggtcttacacacatacacagaggctgtggagatcaacaggttggcgtgtagctcttccagctgctctttgggtcgtcttgtggcccttcaacaagaaacgacctaccatttcttccttcttccccctttgcaagcttgctttcacatctccctctccatcccctttcctgaaattattttggagcaactccttcattttatctgacttgtttctctcaatggaatcatttatttttcttgataaaatgctttttttgcaaccattattttccgtttctcttttcccatgaaactttatacaaattaatggcgaagatgaaacgcacggaatgccccaatatgcatgataggcaaacgtcccggtccttggcacttagttggtgtattaatttcaactgatttgtgcaccagtacagtgatttggatttcctaagttcttcattccccttccttgattgcagccaaacctgctggacaacccgcagctccagcaggc

SEQ ID NO: 112273 - DNA, 371 bp, Setaria italica
  Intron number 3 from transcript Si022368m (locus Si022368m .g) derived from phytozome v7.0 (chr-ID scaffold_3; pos 43 91270 to 4391640 reverse strand)
ccagtggacgtactactggtatgaatttattccttttagtgcagttttgattcagtctcccagttatatatttatggtttcgttatgctgttctccagtatctgtttgaagttattttcaaagttgcataattaagccattggatcatctattcatgtttgtgagttggcataattcaggtacagtatatcctatgtgattaccacctgctgtctatgaggtgatatgaattcaggcaaaactaaatactagtacctatagctaatactaataagtcaagaagtaatggaaatctgaactatttggttacacaatatgtggttgaagattctgtttttctctctgtgcaggtattgttcttgactctggtg

SEQ ID NO: 112274 - DNA, 770 bp, Setaria italica
  Intron number 1 from transcript Si024585m (locus Si024585m .g) derived from phytozome v7.0 (chr-ID scaffold_3; pos 23 183648 to 23184417)
ctgctcacctgcgtcgacgagctccccgacgggtaagcgggtaacgatggcgccaacgcgtgcccttcccttgctgcttcgacgtgcagtgggttcagttcgtggtgttcatgcatgggaggggttcctgctagtagggtgtagtcaaatgttagcagttcgcaattgttggtttgcgaagtgtgagcgttcaaaaatgcgattcttaaccatttgtccattgtttattgcagttcattggcaccgatttgtccacatctctttcttcttttcttcacttttcaaaagtcacgaccacgagcaagcatttggtgcaaatgctcacgagtgaccagaagtccagaacaatacaattttcgggccggttgcagcttgacattttgattcatgctgcattactcaatcattctgatgtcctactaattgcctggacaaattatcgaaccgcttacgaaattgctcgaaaacttgatgttttgcttctcttaacattaaagaaaaattgatgcgatgcagaaacaatattggctgcatagattttcaatgttaatctgttctctgaattgagaaattccgattgccaactcaatatatatagtgtctacgtatttatttttagcatatggatcttttggttcgtaattttctaatcagatgcaatacgtgatagtgaacacggtttcttaaataatatatagtattagtctctcatcctcttatggtgattcatatgtgcatgcgatggagcaggagcgaagagggcatctatt

SEQ ID NO: 112275 - DNA, 900 bp, Setaria italica
  Intron number 2 from transcript Si014111m (locus Si014111m .g) derived from phytozome v7.0 (chr-ID scaffold_6; pos 31 383071 to 31383970 reverse strand)
actccgataaggagaagttggtcgacataatccaggtctgacttttatgtcttcggttttacaacatagggtagctcattaatacattttttcgggtagcaagataggattggaaatgctctgagccatccattagtttaatgttagcttgaaaggtcatgttttctctagaaatcgtttcttttctcaatctgccattcaattattgtttctcaaacttctgcatgttggataacctgaggatctataattaatgccaagtaaaaacacacacatggtggaacacataggtgatgaacatgttacatggattcaaatatctatatgatcaaaagactgcatgttcacacaaatagactcttaggattcatactgactccttgtagcatgacttgtgcaattagccaagaaccatctcttttggttttaggcttttagcacatatggcattcacattcacatgggctcttttactactgcaaccattcaacataaatgaagtctcagattaatactaatacagtaatactgcacatcaactatccaaaaactggaatctaaaaaaaaactcgaccaaggggagagacgtccccctgattttgtcttaagaagattgtgccgcgactcgaacccgggctggctcagtgaaccgcttctttggcgtgttctgctgaccagttgcaccgtgagagtgttggccaaaaaatggaatctcatgtacctcatttgtgagctttccttctctaatctctaatgaggaaaatgtgcaagtcttttgtgcattcttgaaaacaggctattacagcttacgctattttaccttctcatttcaagaattttatagctgtaaccacttaatttgcaggactggaaaacagagagatacaaagaaataataaa

SEQ ID NO: 112276 - DNA, 670 bp, Setaria italica
  Intron number 2 from transcript Si024186m (locus Si024186m .g) derived from phytozome v7.0 (chr-ID scaffold_3; pos 13 935172 to 13935841)
cttccctccaggcaaccgaagagccttccctccaggcaagccccctccgcccccatgctgtccctcagatttgatttgtagaatctgcttgagcaaactgacggggaattcgtgatgatcgttggggttggctaattggccgccacactgaaagcgcttgcatgcttgaacaactcgcgtgcctgtttgagtgagtcgcgtgatttaggtgtttatatttggatgctctagggttggagagaaatgtgcataggtttaagcgttggaacgggaatttaaaattttcttctagattacaggaattggttttgaggacacagggtaaactgtatatatttggaaggaagaccaagaggtggagtcgacagtagcggagtagcctgctataggagacggcactaattaaattgatattcaagcaaagcaagtgtccccgtttcagttgattgcgtagtctctgcagtctacatacactatgaacagtacatcagtcttgttgcaaattgcattagtgattgcaaatccttggatgtttaatttgaatagctgatgccataatcagccgtttcttggtgttatttctgctcattctgtgcttgtttcatattcatcatctcttgctttcggtgcctattattctcacatcatgctattggaatcacagttcaag

SEQ ID NO: 112277 - DNA, 969 bp, Setaria italica
  Intron number 3 from transcript Si023487m (locus Si023487m .g) derived from phytozome v7.0 (chr-ID scaffold_3; pos 23 72603 to 2373571)
tttggcagaaaatcgacatatcaaacctctctcaggtggcttttccaaaatgtactcatttcttatactttcatcttactaatattttatgtataatatttccctgaactgccaatagataaccataactagttatttgcattcatgaagatcaatgcataaaagcaacaatctcttatttgcaataaccagattacagagactcaatgagatgatgatagtatttgcacatgtagtgtgtagcataacttgcaaaatgttgagtgcttttctcttgtaactggattcacgattgataactcatacagtatcagaaactatatagttacctcaagagaccttttttaatatgagcctgtttgtggaatatacatgtagaatcattcaaattcccagcagcatgaagaatcggtttgaatgtacatatagatttattggaatgataaatatatttttgaagtttatgtatatttttgaaatgagagatttattggggagtaagagattaattctaagtgattttttggttaggggtgatttgaagaaacaaggatcgagttatggcatgagttacttacaaaagagagagtgctgtttagagggcatgattagagttttaaaggcttttacagttctttcctcagcagttatgcgacttgataatggagaggcatacaaacataaaatgttacaatagtaaaaatatttgagtcaaaatcgaactgcattggagatgtataggtcaatattgggttcacgttctcaagcattgcaggaacctttcaatttcgttttttttggttttgagagccatttccaagaattatcatgcataattcacctgtacttaagagcaataagtgctatggtatgacttgatgttgtccgatgagtagattttaccttttgataagaattgagattgcaataacaggtcaagcttctgagggtcggagcccttccgagtca

SEQ ID NO: 112278 - DNA, 430 bp, Setaria italica
  Intron number 1 from transcript Si010763m (locus Si010763m .g) derived from phytozome v7.0 (chr-ID scaffold_7; pos 22 987665 to 22988094)
ccgctcaacgccttcaagccccaccccgagcacaagtgcgtacttcccctcggctctttctgctgctgttctgtttctgtattgctgcttgatgcctactcaacgtagctcgtgtgaattcttcgcgagcgtttaccctaatacgagttcgtgggttcccttgggtacccattagtgcgagtacaagtccgagggttcaattggctatccattagtgctggtgcattttgtagggttctgaatcaaaatgtattttggcatgatgctgcggtgatgtgacattgtatccaaagacaaattactgaattagtgacaaaaagtcgatgcacgtccttgtgatttgtgaatcagaacacacactactcttgctctttgggtgatttatatatgaactgatgaattaggttttgtgtcctagatcgaagctggt

SEQ ID NO: 112279 - DNA, 933 bp, Setaria italica
  Intron number 1 from transcript Si010538m (locus Si010339m .g) derived from phytozome v7.0 (chr-ID scaffold_7; pos 24 227633 to 24228565)
tggcgtgttcccgcgattggttgcggtctgatcaggtcagattgctgtctggcctgtttttcggtggattgcagactagcagcataggttacctttatggcatcgctgacagcaattgatcggggggtggggggtggggggcttgacctactgattcctgaagcagtgaagctgcttttttccctaccctttttgaaatgcttggagctacagttttgctctaattagcaagggataccatgtttggtaattggtactgtatgccatttgaggcctgtgcttccttttctcataacttcttgtgttggtgcatgatcaactgtcatctgacagatatggataattttttttctcttctttgccagtttgatgtatccgtcctatttgcctgcctatgctgcaatgatttggtcctggtaaagtccgagtagttactgtttggactgtaccaattatagacctcgcacacttgcacagtatcggcagaaacgagatatttttctcactttccttatttactccctccgttccaaattaaacgacatttctaagttcgtagatattattatgcacctagacatacactatatctagatgcataataatatctatgaagtaaaaaagctaaaacgacctacaatttgcaacggagggagtagttgctttgagcctttgaacatgtagagcacctctagttgtattgtacaataaatgcatggtcgaggcttgtgccacgaaaatggaaaataagcatttttgtttcctaaccgaatgcatgtattgtgaatgctttgatgatataagcatatcaagtgccagctcatattgtactacagtagctaattatatttctcattcattccaagttgctaaactgaatgctttattgttttttcagttttgattgaacctactagaaggaaaggaggacaa

SEQ ID NO: 112280 - DNA, 952 bp, Setaria italica
  Intron number 1 from transcript Si022120m (locus Si022120m .g) derived from phytozome v7.0 (chr-ID scaffold_3; pos 25 81763 to 2582714)
ccgccgccgccgggagcgcctcgatccagatccaggtatccctccgctgccgcagccgctcctctctttctcctcacttaggcgccctcccgttcgctacttcttctgctggtagggaggcggtagcttgccgcgactgtttgttcttcgtcttctgcatattctctgcacttctgcgagcccacgaatccaaattttttttcttgttttgtttgctgcgcttttttgttttctgtattacttggatttgctccgtggtggtgactagtatcgatttgctttccagggtccccatccccatgttgtttgaggatttgttaattctcggtcggatctagttttatttaacgtttctgagcaaaaaagtttgattttttttttggttgcgaactgcgtgtttcgcgggtgcggcgagttgctttgtggttttgctgggggtcgggctgttttcgtcggatacggtagtgcggatcttaggtttactacctcagaaattacggatagttgcagctttatattactaggattgaataaaaggtcgttaaaccaccaattcgtgggcagtttgctagcatcaaatttagcgtggatgttcacaagtggtttctctctggtgagtcttctgatagtaccgatcagcatggtttagtttgtatctgtcgggggtgggaggggacaccaattcctaactacagcttgtgatgcgagatgctgcaattgctgtgatgttccaactgccatctgagtcgtgtaaactgagacttgaggaaaattttctagttagtatgtgatattatttgtaggttctgaacttctgatatcgttgtctgtacttagtgtgctgtttctcaactgtagagatcatacctggtactatcatttgtacttcagccagattttcttagtttttgatgaaaggactgatggaagttttttcatgtgttcaggagac

SEQ ID NO: 112281 - DNA, 986 bp, Setaria italica
  Intron number 1 from transcript Si025366m (locus Si025366m .g) derived from phytozome v7.0 (chr-ID scaffold_3; pos 17 981349 to 17982334)
gtcacaaagatcagggaatacctcacaggcaaaaggtactacctaaaattctttggacctttctggtagaatactgagtagctaatcaacatttcttttgaggaaatataatttaaatcttttttcagaagagatagatatgcatcaaagtattaaaatatccgtcactagagtattgatagtaattttttatcaaataaacacttgcataaatttataaatgctactcaaatccttaagtctatatattttacaagaaatttattttttattggattcctaaatataaatgtacatagtattttgcaacacatttgttatgttctcaggccattttgctaacgtatagatatactcctatgcttaaacagtatatagagatagtggccaaatgtgtgtataaaagactgtattattgtctaaaatgaagtaaaagagaagaacctatcataggtcctctatgttcacaagagcatctccagaccagaagactgctaataaaggcatgtgaacatcaattatttgcaagtttttaccatgttacataaacacaacaatatatccagctcatgcaatgggttatttattaaattgcttctaaataactctctaagaaatactgattgctatgtacgacacatacaatgttatattgttgtttataaagcatggtaagttgtgctagttgatagcaatcatatcttgtgccaaagccgctacttcgcaaagagatggctttgcattctctccacaagtttcttaaacctgtcccaatacatttcatttttcttttatttctcttacgttagacactctattttaacaacattttcacatcatagtaattcaaactaacatagatttgtgaacatattgtcaagtctgtaattccatctaaacaattgtgccagctttttttttcctttttctggtcaaggattacaacattcttccatttttgttctgcagatacttcattctgctcg

SEQ ID NO: 112282 - DNA, 882 bp, Setaria italica
  Intron number 3 from transcript Si023263m (locus Si023263m .g) derived from phytozome v7.0 (chr-ID scaffold_3; pos 13 213973 to 13214854 reverse strand)
aggtgcagttcgaggacaggctcttcactttgcaagtaagattggttcccctggccttgctctatgttgtgctctgcgggtagttgggcttatttatgtgaactttaagtaccgattattagcttcgtaattagtttacgaactgatcacctctgatcttataaaagcatagcagaggatgcttgccgctaaacacttgaatgcttgcatgttagaccatagccttaatgtttgtgcaactgattcagtctggactatatcttgttttgttttggtggtttggttaaacttgaagtatctggtgctatgcctaggttccggtcacaaaaatagctggtctcaccattttattgtttgtttgattttgtttattgggatttgggaattgggaacctaccatgcaatgaagtattctgctcgaaaatatgcctcctaaattttccatgagaaaaacaatggcagtaaaatatgtactcgtttcaagaacttctaggcttctacattgtttaattctttactagtgaatcagatgctgctgcttatattggtgtgatgttcgtttggagtcagcttagggcatttggccgctgtatcgttaatccttccttatactttccctttgttcttgctcgttgcttaattgacaaacatttatgtgttcagatcattcccaaactttctaggtatcctaactgtgtaacaattcaaagtagtttcttatgttttggctgcttcttgataaagcaccgttttgagcatctccagtgagcacataagaaaactatgtagatttaaattgaactcgtgtgaagagataaaaatattttatatgtcgtcgtttatctgttgatttatggtgcttaacaacatgtctttgtagat

SEQ ID NO: 112283 - DNA, 417 bp, Setaria italica
  Intron number 5 from transcript Si022705m (locus Si022229m .g) derived from phytozome v7.0 (chr-ID scaffold_3; pos 43 18062 to 4318478)
tccatctgcgcaggttgtggggagagccaagtgaggtatattttcttgcatcatctcaccgtattcctccaagagaatttgaagtatttattagagctgaacatgtcgagaagtattctgaaaacttaagtttctgtctctttgatgattctcttccaacgtgctataagcataatatgcttgttctttcttgattttttttgcatttccaaatttatgctttatgtttcttttgacatgtgctacaagcatatagagtgcttaatgtcactattctttgctgtgttgacaaatgattcaaaccgaagaacctaacttttgcactgttccacattttgttgcttgcaatgttgtatgctgaaatttgattttgaatatacaggacctgcccttcaaaccaaagtaccttgttacctt

SEQ ID NO: 112284 - DNA, 726 bp, Setaria italica
  Intron number 2 from transcript Si009994m (locus Si009994m .g) derived from phytozome v7.0 (chr-ID scaffold_7; pos 13 400341 to 13401066 reverse strand)
agcacaggttatccccatttcttggtttcctttctgaacattgcgtgcctattccaccaccaacgcgttgctaacagatttactatgctttatgttttggccatccctctttgatgttcttcatgtcatatgtgaaatatagttaggggacttgtatacaaaccctagggggatgaaaaggtgttccaaaacgatcttgcacacaatgtcagaaaattaggagaagattagagaaaatgtgcttctgtgatgtgatggtagaaatgctattgcctctatgctgcattaggagatagaattattccgattagcaaatgaggaacactgtaatgtagggactaggaagtgtgaggcttgagatgatccaagctttagaggaaaggatcgtttactttatccattttgtagactactagttgtttgcagatcaggcatggaaaaaaggtccactttgaattatttatgaattaatgtgaggtttaagtcaaaatcatgatgcttcctgataaacatttattgcatacaacacttttattctttcgtaccgcaataaataaaagcaattgcaaaggatatccaacattgcatttttagcagaatgtcattgttacaactttgtttggatgatccataaggctatttgctgatgttcattttgtttggttcatttgctaatggaatgtgacctcagccatcgagcggttaatacggcactgtggtgtaact

SEQ ID NO: 112285 - DNA, 917 bp, Setaria italica
  Intron number 2 from transcript Si025490m (locus Si025490m .g) derived from phytozome v7.0 (chr-ID scaffold_3; pos 36 40946 to 3641862)
attaaccatcttggaataaagaaggcaacttcttggtaagcattaactcctacctttcgtcaccaacattccgctaaagtataactgattatttctccagttttttatttgaatttttatgattagaactgtggcttctggcatgagccttatttttgccatgtgttatcagtattgcttgcagtatgccatggcactaagtgcattacaacaaatgtattttatccattgcacgctaagcaccttcctgcaagatttattatgcagaagctaaatctgagccttcaagttgacaactataaagtgcatgaaagtggcttaaacagaatatatgttttcctttttattttataggtttggcattcaaaattaaaactttaagtgccatttttaaatatctgacacccaaacagttgtatgtgtactcagaagttccaaattataaccagatagtcctgtcttaacaaatccttatagctagaaatagaagattagtattatcttgaagttgaagagcgatacttgagttatataactaaagttatagtgaaaattttcagttcaacttatataaaagagctacaattcactattttgttctatgagcagttatccatttgtaatgaaggatagatgtcatacaatgtatcaatatggtcctactatttatgttgaaaaataaaatctaggttatgatgtaagtggagtcgaacacgcaggagaactatgttagtggagtcaaacgcgcaggagaactatgttagtggagtcagaaatgttaatggtagctattaactgtgtgacactctaaaaacaaaattctagaacctttgttgcataaaagaaatggttgctgggaatttctaactaggaatgttgttgtcaggaagaactgggtgtggagtaggactcaagaa

SEQ ID NO: 112286 - DNA, 463 bp, Setaria italica
  Intron number 3 from transcript Si023700m (locus Si023700m .g) derived from phytozome v7.0 (chr-ID scaffold_3; pos 17 579638 to 17580100 reverse strand)
aggtgtgtaaacctgaaaccttattctgctaacttctatgcagcattataatggcttgtcttctgtttcatttgactatatgctttctaatgtgggttacatcagttgcttatgtcataatgtgttttttaaagatcggctctactaagcagtgtttgctatatgcttattcattagtacatatgacccttcaacatgtaaccttaatgggtgtagtgtgcaaaaacagcttgtagtttgatttttcatgtcatagttttctaccatctcctgagtgacatagtattattaaacattttgttgccttgttattataataccactcctagagatttccgtcctggcatgtgtatacttgttagtatggtttctgaagcattgtgcatattgtggacatctctaatttaacttttcttttgggattgcaggtcggctggtactcacactgataagaagaaataga

SEQ ID NO: 112287 - DNA, 698 bp, Setaria italica
  Intron number 1 from transcript Si009654m (locus Si009459m .g) derived from phytozome v7.0 (chr-ID scaffold_7; pos 21 128538 to 21129235)
accaataggtatgttctataatgaaggatatattgatccaaagccatttttctttccttcttcttttcttttaattttgtgccccagactgagaagtcaacatcgttaggcatgcagcaatttaggctctagaactaagtattgcttttagtgtcatcattagtaacttgccacttatatatagttcatcatcgctaatgctaaaagtttatatgacctaatgctccacaatgaagttcagtttttttttcagaaaatactattgtgcatgatgcgtgattatatattgattgagtgttactgcttaagttgtggaacatgcacatatactagttcatcggttctctatctgaagttatttatattacgagattcccatctcatttactttgtgataatttagatgccccagctttaccccataggcaatacataatatggtgcttataatttgttaactgtggaagtagatagtaccgatattctaaaaacagctggaagagcttgggaaaatgcaattcgctacaaaacttgttgtaataagaacaagtgttgatgatttattgagtctgaagataagtatcatgctctttactactactaaaaattaaatagcatgtagcctgtggcaaaggttagtttgattatctgatcagtaaagttctaaggtattatttgtttttccttgcagtgagttg

SEQ ID NO: 112288 - DNA, 1058 bp, Setaria italica
  Intron number 1 from transcript Si023331m (locus Si023331m .g) derived from phytozome v7.0 (chr-ID scaffold_3; pos 71 63738 to 7164795)
tcaaggtcgacgtcgccgggaagcacgtcgtcgtggttagcggctcgacccttcctttctcgtgacccgcttttgcgtggatggcatgccttgtcgacttgtcgtgtgcggctattgccttcgggtgtggtcctgtacggagaatttgttagatttgataatttgttacctgccgcttgctcgtggacggagattattcacgtgacctcgtttggactgtttacatgcttgtttattacttcactcaggagttcagtagcttgctgcaaatattctctcttcagttacaggaagaagtccattctaatgcgagcaaaataaaggcatactcttctttctttggtttttgtttagcttgcataagtgttccaacgttttggcatgatgctcctgtgttgcatgtaatttctattttctaggtccctgcatatgttctttaatctgtcactgctacaaggtctcttattgtgaacatttgaaattattctagaattgttcaccagaagttgggcaaaaatgttctagatgggggagggataagaatgatcaggcaaggcactaatagtctgaaattgatgggatagtcttttaggtgaaggtgactctgtacaatgtgctgtataaggttgtttgaccgcttagtgtctttggagtactctcttatcagcaaaacgagcacactttttcccatgattcatgagctcaagcaagtatcaataggaccgtcgcactatcatttctagtcaaattatttgctatctgctggactatgatatattgacttgtacatagtcagagtgcctaattgcatgtctcattagaagggtggttgcttgtatgcaataggtgtgcctgaatcttgcatccaggatgatagaaatgccttctctgtccattatctgctttattttaattagcctatgtgttcagcaactgaactggcatattgcgttgcctgagatgaactcctatagatctgtttctgctggtatatggaatttgattgatatcgtatctttataggttgaagatattgtggacacagggaatactctctc

SEQ ID NO: 112289 - DNA, 802 bp, Setaria italica
  Intron number 1 from transcript Si010777m (locus Si010777m .g) derived from phytozome v7.0 (chr-ID scaffold_7; pos 20 266763 to 20267564 reverse strand)
tccgcatcgccgccggcgctggcgttgacccgaaggtgagatgtttggtacctctccttgccgtttgtggttacatgggttggagtggggaggtatctgtggagcaactagctcgcggagaatttcgcccctttgggggtactatgtttgatgaggagcagagagaattgggaagcactgctcttgaagtgtggcgattgcattgtgttagttcaatgtttttcttatgtatatgtgctcttaggtgtgccttattcttcaagggttggttccgtgacacgttgcaattggagtgttagagtgggtgaggaagaactgaacgtgtgtattaaggtgccattgctaattttgcgataagtacccatctttagtatgctctttgtttgccctggacgacaagaacttccagtgttacctatactgcatggggttggccagatagagaagatgagctaaaattagactgccttgctattattctgacaatcacatgagtgtttggacacattgggaaatgccttttttttctcttagataaattgaatagtttgaagcacggtgtgatgaaattggaacacgggttttaagccaaagttgaaagattgtgatttaagctactgttgcaacttgtgagcaatgaggtgaagtgatgatatacttacatagctggtagcaatgaaatgaaaagagaaatagaatcattcagaactgctcatgttctttgttcgatcctgttatgcatttgattttgataagtgtgttcatcaagtttcaccaaaatgagtgtctctgcaggttgtca

SEQ ID NO: 112290 - DNA, 500 bp, Setaria italica
  Intron number 1 from transcript Si013520m (locus Si013520m .g) derived from phytozome v7.0 (chr-ID scaffold_6; pos 18 270230 to 18270729)
ggctccagtatcaccccgaggtagcaaccgttatgattactctgatgctttgaaagttaagctacaaatttgtttcctctgttcttggctctttgaaaggggacgaaagtttggatattttgtgggaagctgtacggaaactactgtttgattgttcgatttaaattttgaattggtatgagagttatccgcattcttttgcatttacttgatgaaaaaacaaataaataccatgctttctaaattgggctaccaattgagttggaaaggggtactcaggaacaagctacgtgattattgttattcaattgaattgtgctgatatggatggactgagttctgcttatatggatagaaaaacaagtagatgtcaaattatttggtattactactgttaactgtgtatccactgcattgtggttactctttgtatatcatctggttgctctttgcatgactgttgaactttttatataaaggttacacattcaccccaagga

SEQ ID NO: 112291 - DNA, 769 bp, Setaria italica
  Intron number 2 from transcript Si014058m (locus Si014058m .g) derived from phytozome v7.0 (chr-ID scaffold_6; pos 32 006420 to 32007188 reverse strand)
caaatccacaaagccgtgagttcttagaaccttctcttcaagtgcttaatctgactatctgagaggctgcgacattgtgcttgggcattagtgtttgctcgtgttatgaagaaagtgtgggtttcggatctaatttacagttagtatacttgttgctgcaaagggctggtagcacctagggatttttattgttatgcggtaggcctattttcatgttcctgctagtaaaacaagggaagaaactgactaacttgtggaatgtgggaattctctcactgcagtattaattggttatgaagcagatggttagtaactattactgctgagaacctaataatgtaacccatttatgcttctaataaggcgctcttaaagtttcacatttaaaataaaaaatatactgctgcaagattaacaactgaaaatgtcacattacttacatttttcaaagcctaactacaaggtaggattatctaagtagaaatcagagaattgttctatcagtagctatgatatttgagaatttccttaatcctaagtttcccacttatgcaaaaaatatgtattgcttatctcgtgccagcaaatatatatattacttaccgctatagaacattacctgagtttgtatggctgaatgaatggtggatctttgattttgacttgattgtagtggacgaattgcttgtcagcaatatatttgtttgatctgtgatggatatattcagttgcctctgtataaccttctttaacatgtgttatccagttg

SEQ ID NO: 112292 - DNA, 677 bp, Setaria italica
  Intron number 1 from transcript Si025748m (locus Si025748m .g) derived from phytozome v7.0 (chr-ID scaffold_3; pos 90 03807 to 9004483)
cgttcttatcgggtggctttccattggaggcagtggtgaggtcgttgaactcctcagtccccttcccctttcctcgatgtcacagctcggtctttcattgttctgcatacacgtgtgtggttcagtggacaattcgattgttcagaaagtcagaaccatatctacatagtcgatttgagttgctccctgagattctgcatcatgggttggtgccggagcttgtattgtgaatttgtgatccagattattggattcttgtttttgtaacctgtaaatgtcaattgagctggacagaatatttggtttaagtttctatttttctaagtctgaactaattgatgaaaaccagatgttctacgatgctgctagtgttataatacaacctatatgttttcttagacatgtatacactctcgctagtccaattgcaatcctccaatgaaatctcccagtaatgtaggaattataattgttctatattagtgtagaagaaacagacaactcttaccttgccttgtttgtttgttttgttgttttttatcttgcaagtgaatcttcggttcatggatgctgttgccatttgttgatctcgtgaatgacttattaaattctcaaactcatttctcttctgtatgcctgcagattgaagccttaggggctaggtaagaggccgagag

SEQ ID NO: 112293 - DNA, 1000 bp, Setaria italica
  Intron number 1 from transcript Si022541m (locus Si022541m .g) derived from phytozome v7.0 (chr-ID scaffold_3; pos 28 046470 to 28047469 reverse strand)
ttcgccgacttcattgtcgccgaggagaagcagctgtgagtttgtttcttctgatatcttttggcttagaagcatcgagttgctgtttgatgttgcggtggttcgatcagaacctcgattcggggtctctagggatagagttttaatggaacacgggtccttggaagattaggtgcggaaaggggatctcaggagcataggcgatattcactgtcttattgaaactgatcaatatcttggtactttgtgtagtaggttccataaattgcgggcttaacagtgaacatgaacatgtatctgttgagttcacaatccaaagatggtcctccttgtttgatacagtattaattgtgttagcttggaacttgcattgcaaatatataactgaagatcggggtttgtgttcttgtagatattaggtaggcaatgtacagataaacagataatacctttcttcaccatactctgctgttaagaaataataacaatgcaaattactgtttttttcgacgaacaatggaggagagttgtgtgtcatttcattaagagagaacatgtacaacaagtcatgttaccataacccaacccgaatacaaaacccactccagttaacttggtcaagctcaagcatcaacattgttatggttttctcaaaaatggatgctgctaatcttgtagtggatgtttggtatccccatttgtttggtgtttatttttagttcagaacttccagcagctgaaccatatcacaaggacgcttcctgttaataatcaaggatatggcttttatcttagtaatacttaatatgcataacgactgacatagtacataacataatcagttcaaactgaattactgctgtcacttctgtttgatgtaaatgtgtgcatggaatcgaaacaaatgttgtgtcatttatgtattagttattttatttcttttatgagatctgctgctcaatcggtatcatgtttttgtgaatcagatttttagtgcctg

SEQ ID NO: 112294 - DNA, 1026 bp, Setaria italica
  Intron number 1 from transcript Si022177m (locus Si022177m .g) derived from phytozome v7.0 (chr-ID scaffold_3; pos 45 773866 to 45774891)
ccaaaggcttccaatcatttcttccttccggtttggtatgcagcatctcttctgatttaccttctgttaagttctgtctgacttgtgctctggtttagttgcttctctgacggtgttccggcagtttcatacggatctttgcttggttttcgaatttctgttggttttcatggttcgaaagactgtttcaggttttgaaaaagttcggttctgttgttcagaaatgctctttgtcaagtcagggtcccatctctgctgcctatgatatctcttgctctgttccgtgcaaggcgttttctttcttttgcttcagagtgattttacagcactgaagtcatatctgaaagtgaaagtcttctgtgttgatgtttgatgtcgtgttttgagctgtgatattgtaactgggaatttatactttcgttttgcacctttcaaatttggtgtattttggattctgagttggcctttctatctagctcctctgcttcttgagcagtttcagagttttccttgggtgaaaatgacagctactttgagggttgcattttgaagctcatatagcaattctgattcatttatttatttttctttcttttctagcggagctcatgggatagaactgcaaaccacattctccacttaattaacaatgtgtagtggcctagtggcttcttttgttaacttgacaatccttctttatcctgtctcctggacagctcaacgacagtgttgttcttaacatcttgcacaatttgacttcaattctttagggtacgtcgtcagagtacaatcccgcgcaccctgaattttgttcttaacatttcccgaaatttgacttgaattatttaggacccgttcaatatagagtactgtctgcatcctcaattcacggatgctcgaatcgttattctcttcagcttcctctgcattttcgttttcttcgtaccaagcacgcctgaaaaagtttctgatccttccgtcttggttgcagtccctggtccctgttcgccagcacagacaacgccg

SEQ ID NO: 112295 - DNA, 678 bp, Setaria italica
  Intron number 2 from transcript Si025556m (locus Si025556m .g) derived from phytozome v7.0 (chr-ID scaffold_3; pos 20 76818 to 2077495)
gggagtaaagaggtaagattgctgcatttcattctttcatttcttgttctgaataaaatatgttcttgagcactcaatttcagttcttggccagtactgttgggctgtttagtgcttactcaagtcaagtggggttggtcgtgatgatatacgtcctttgcctatagattgggtatttgcttttattgctgatgctactagtttaagaatttatactattttcttggcgaattatccaatttagttttttgattagaggcatttggtttctattttaccttagagaaataatgtctatatatgttcttggttgctaattgccttggtgacttgaggccgtcaaatgtacttcagatgatgagtttacttggccttttatttgtagtagctcaaccgctaaatggtctctgtccacgaataaattccgtcttttgagattatggggtctcgtagtatgtgtcaaatatatatttgatttgtctaaattcttttttggagatgtgggcactgaaaaatctagtatggttcttcagtttgtaaaatgacattgttgaattttgagtgaatcttttaaaataattctcgtactgagagagtgtatcattagttttttgtgctcatatttcattctatatatctgcaggaatcgttgattggagcggtgttctttcctcgacc

SEQ ID NO: 112296 - DNA, 783 bp, Setaria italica
  Intron number 3 from transcript Si023231m (locus Si023231m .g) derived from phytozome v7.0 (chr-ID scaffold_3; pos 49 623485 to 49624267)
cagtaccgcacctgtcacttttcacttattgataagtaatagcgtaactgggttcttctcagtctttggtcttctccagttctccttttgaattttgtgtccatgaaaaaggttgaggttttggtcgtagtgaggcatgtaactatgtaagaaataccatattagtatcaaatcgcgtcccctgtttcaaatactacttcaaaagtaacagaacatactaagatcaaagctcctataaagtggtgaggacaacataatgcaccccctgttgtttaagtgaaacaaaaaatatttccggttttagttcagaccttttgttgctcgtatcagttatataccccatctcaaaatttctgctatgttacttcttcatctcttattgtcactaaatcgcctaccacattcaactgttaaaatatcaaagcttcttcgttgagaattcacacacctttgtggtaccaattttttcctaatgaatattagtttcctacttattagtctaaattgttaccttgcatgtgtttttctggtatattcttttttatttatgtgaatgcttttattatttttaatctaataattgttgctgtagtttcagcattttcttagtcctttactggaatgaatgttgcagtttttttgtcctttcagttaccttcttgttacaggtttccataaagatttatgcattattttgggggatattttgagaactgtgttggctaatctcatattttgtgtctggcagggtcaatacgcctacccaaatattgacccatacta

SEQ ID NO: 112297 - DNA, 807 bp, Setaria italica
  Intron number 2 from transcript Si021999m (locus Si021999m .g) derived from phytozome v7.0 (chr-ID scaffold_3; pos 19 52543 to 1953349 reverse strand)
cttggttcggcatctcggaggttcctataaccgcggtaattgaccaatgctcgttaactctacaagtatttatatgttgtgattaattgtactttcacttcaatatatttgttggttgactcaattcacaacaaatatttgtggacatttgagtggtgatatctgccatggagtacacaattgtgcatgcttcagaaatcaaatcaaccatgcttcacacatttggttctgctagtgcttagcttaaaagaatagtgctagtgctatttggagtttaatttaaagaaatattacaaagctcatgtttaaaggacataaagagaagagtgcaaagttatcaatttgttgcaagctgaaatcacattctcatataaattcttattttcatatgtaagttctgtagcaatttctcgtgttgtaaatcacacgtttctaaacccaattcacatggcttcttgagagttttcatgaccctgaatcacttatgccgatcagaggggtaacctgatgctgcttggatataccgaacaaagtggatttctgttacactctgtcattatatagactatttttttcgaatacatattagattatgctttcaattaaaaaacaggcaaaagaaccacatcttcagtcaacatttatccagctgattgcttcctacttctactacactattaacaatgcagctttaattttccattattcaacgttctgttgatctgattgtttctattactactacaagcactccaatttagttaaggatttcatacttccaatgattgtttcagaaaactgttagag

SEQ ID NO: 112298 - DNA, 552 bp, Setaria italica
  Intron number 2 from transcript Si023034m (locus Si023025m .g) derived from phytozome v7.0 (chr-ID scaffold_3; pos 45 6525 to 457076)
gatctcagtcaaggtgctgctgcattcctataaaggtatgtttttgcaactagctaactatgtttctgcactgtactccaactggtgttatgagtaataccttgcttagttgctaggatagtgtcattcttttggtcgtgaagctatggttctctaaccaagttgaaggaatgctgcattaaattagttcttgctttggcataatctgaaatgtgctattatgtgtgatgacagtttgattttcctcactcttctctgttagacactactagtacccttggttgttctaactttcaagaaatagccaattgtgcatatataaacgacattccacctcaatctggttttcttctcagttgtactatggattgacagaaatttgcttctggaaaaggttgttggggacaccttctgtcgtatctacattttcttttggtcttaaccctgtatgttcttaacatgcttcatatcagtttgttcattagtttatcaatccgtggcttgtcctcactcgcagccgctgcacaacgcttaagacctcaagcacattga

SEQ ID NO: 112299 - DNA, 550 bp, Setaria italica
  Intron number 1 from transcript Si010333m (locus Si010333m .g) derived from phytozome v7.0 (chr-ID scaffold_7; pos 29 354285 to 29354834 reverse strand)
ggaaaaattctttgaggtatatctcccttgtttattctcttggcagattcatgcagtttgtcaattttctttgccatattattagctttgaaaattgatattggcttttgcatataacttatgcaagtgaaaattaggctttcagtagaactgtagaagtacctcttagactgaaacaataataaaaattggaatttatacaggaaggatgtaaaatttgaatttcacaatcattcaagttaataagcaagagggttgtctggtcttgattcaactctgtcattctttgaagtcatctacataactaccatagcctgaggtgactctttgtatcatgctgtatgaagaccgttatttaggatcgtttattataacttcattcattttgaaagagttatagttaataatgatacttcctgagctttattcaaaagtgcaatatcagcattgccaaggtccatcaatctttgaaggaatatcataatccactatgtcatcatcttttgctcaaaatttatttctccatgaccccaattatttctgcagggcc

SEQ ID NO: 112300 - DNA, 885 bp, Setaria italica
  Intron number 3 from transcript Si009904m (locus Si009434m .g) derived from phytozome v7.0 (chr-ID scaffold_7; pos 19 101764 to 19102648)
gatttccttatcgctattgctgaacctgtgtgcaggtccgctttaatcagttccatacttgaataccaccagctgcacctttaaatcagagttgtcatggctgtacccagatggctcacaacctgaattggagccgttgatttctccatggagttctgatagcatgaattagggctgcagtaagatgtccgtgctttggataggattggtctggtaaatccagaacacattgttaacacactagccgcaagtctgtctttggatgtcttggaccaggagatgaattttgaatatttacaagacaggatttcttgacttgcaattttgcattccattcaaaacccgacataagagtcaacatgatgtcatttgaaggaatttgtgtgaaattggttggagggatacatatgctaagaattgggagggagaaagacagtggtgcttgctcaatttaattaagcatggttacatggatctttaggttttaaggctatgctgaatgtagctatggcattttccagagttttgttgcttctggtgctatttgttcgtgagtggatttggaacaaacaaatattatttgaacactatctaaacttaccaaagttatgcgagatgtttacccttgtttcctaggtaataaatactaggacttgcttagttttgaggattgaatggtgtattagagatatcctgagcttgttacttcaaagaaacagcaagtcagcaacaatagtaagctaaattgtaactgtatctgagctaccatggtgctctggatattgaaatgaatatatgtgttaaatgcttgaatatattcaatgaaggtttccaacttttctttctgaaaattcaaccttttttttgttgtgcaggccagaatct

SEQ ID NO: 112301 - DNA, 949 bp, Setaria italica
  Intron number 2 from transcript Si022838m (locus Si022707m .g) derived from phytozome v7.0 (chr-ID scaffold_3; pos 51 17229 to 5118177 reverse strand)
ggagccaccatcaccattctgataactcatccgaggtgagatcggcttgatgtgtagtagggtgtgtgttgctttgatccgtgagagttattcgttgctagtaccttgaaggctgttctttgttctctccaaattacatttttttcatattatttcctaccttatttttcttttcagagaaaaaaactttataaaaaatatttctctcagcttggttcatgtacatcgcgcacgtatagtttgatgctgcactacactgtttaagctgagaagtatattgcatttgtctttgcttgctatatatacatccttggttcttcgaagtactatcttaggctatgcttcatctcgatctccctcgggaaaagctcttacttccaaaaggcactccattcatcttagtgtttgacatgggaaaatataccatgattatgttttgccattgataaccctctaggatgaggcttggctgtcaataggatctcttggtaatggtgcatttttttcttccatttagctgaaacaaattaaaaccagtagtagtattattcttcttttcacgaaaagatgctgctagtacaaatacatgtttccatgtcatatgcaaatccactttagtcaacaaaagcttagaggtagtattttcatgcacgctgttccatgatctctcttggtaacctggctacaacaatggccaagagtgtatggcatgcactcattgaaagggctagctcttttggttactacatttccttcacctattgttttctatggtcgtggtacatcataacctgtcagtgttgagaggtagaatcactgggaactcactttagggaagagctggtgctgtttcttgggacatgctgaaatgggatcatgattgttcatgcttttgcttctttgtctttctctagtgcaacagcactgcaacaggttcagccatcaagaa

SEQ ID NO: 112302 - DNA, 786 bp, Setaria italica
  Intron number 5 from transcript Si010190m (locus Si010190m .g) derived from phytozome v7.0 (chr-ID scaffold_7; pos 27 168653 to 27169438 reverse strand)
ttgaagaactgtacaagttttacagagaaactgaggtgatctcttgtcaaatcatgaattctgaaacattagatgatgtcaaaatcagagatgctaaattgaataaattaaaccggaaacctgtaatgagcattccactatgttgtacagtagcattatgtccatgtgtaattgaatgattgaataatgagcattccaataaattagaccggaaacctgtaacggaataatgagcaaattagaattcaaactgcagtttaatatggaaatgcatgcctagcatggattaacatcttttttgcacttcaagaaaataacttgaataaactatgcccatgtgtttttatttgaatgattctgatatcacacatttgttcacttcacagccaggagtatctaattaatttgtgttagctttcttgtgcaacacattggaatattatgctgtttgtatactattctcatataggtcttttattctggtgttacaatcatcagtacatgacgtaataacacttgtaaagctgaaatcgctttatgaacaatctggttcccatgttctaagaaaacattctattatcattgtattcccatcattgtgcttcagatcataaatattttgtccttgtactactaaaattggctcctcggacatcgtcaaaataaaccatggtcacctaatgcttcagttatctttacaaatttttcttggcagcttcttcaatcttttcagtattaccaatgtggtgcttaatgcaggcaaaaagttgtgtaaagcctgattac

SEQ ID NO: 112303 - DNA, 894 bp, Setaria italica
  Intron number 1 from transcript Si023471m (locus Si023471m .g) derived from phytozome v7.0 (chr-ID scaffold_3; pos 48 715755 to 48716648 reverse strand)
tggtaagaaccttacttgtttccttcacatgttggacagtaatttatgttgttggtgtgatgtgtcgtgctacttgttcctttaatgtgcttttgtgttgttgcacttgcaccatattggatagtaacttatgttgtcggtgtgctgtatgaacctgcaatgtgcttttgtgttgttgcagccaaattttattgttagagacatcttctgtttaattattagagacatcttctgtttaattgttagagacatgcctggatttgttttgttgtgtgctatattggatagctggtcaacgtagggattggactggagcaatttttacttgtgaagttatgatactgttggactatttcaaagctgataaaacatttgctactaatttcatgttttaataaaaataggtcattggcatgtcgtctaatatgttaattgtgtgtatgccctcagtttttctctcaaccagataagagtgaatgagaaagtcagtcggtaatagtataagcttatgtatctgtatgtaaatctatggaggttataattgtatatgaattcgtccttgttggtggtgtctatgagatatctgcttgtttttgttcacttccttcaaagcttactgattaacttgacatatgttttatgagtatatgccctttacaactatgtatcattttaaaagcgtgtgttgtaggcttgtgcttggatttgcggagtattaggaatgcaaaattttttaatgagtggatcgagttagccgcaagtctgcagccctacattataattttcaagttcacgtctataaacagtagaaacattctagtgctcctcttgatgattctaacactgttgtttttggtaggtcttctctcccttgacatattctttagcacttct

SEQ ID NO: 112304 - DNA, 1003 bp, Setaria italica
  Intron number 1 from transcript Si024830m (locus Si024830m .g) derived from phytozome v7.0 (chr-ID scaffold_3; pos 26 874958 to 26875960)
acctcgcctcattcgacctcgacgaggagtgtgagtaatccgtgccctcttgccatgccctgcttccccgcccgcccctagttgcattatgtgtgtttaggacgaggtccgaaacaacatcataccattcgaaaaattcagttacatttgggttttttttcctgtataagcccaaacatgcctacaggttctttttttcaatatataagtgcaaacttaccaagctatagttcatttgtttaaacttcgtgccttaatcaaattttggctagaattcagtcaatattaatgtcattagaatgtgtcactgcggttcaaatcatcatgcattatacagtgtgcctagaatttgtatttcgctaagtttattgccagaatttaaactctcgacgatgatgaaacatgcgctaaaagtttaatgcgcatttgtgatttgattgaataccaaaaagaaaaggaaatcccttagccttctgactttttgattaggagcattgcgtgacaattctgcaatcctatggggggaaaagaaaaaaaaggccctgaagaaactattaatgtcctggtcaagtaatgaaaaacttactatttgcttaaaaacatggtagatgccagtatgccaccgatgcaagtggaacatttaatgcatttgcagtcactgcacaaaagcatagtctttttttgtctgtcaatggttgaacacagccaatgaactactgatatttcaccaactggtgttgactaagatcattcactgaccgctgctgttggaagtggtatggtgaaaccacccaactaaaacgctgcaactagccacctgttttttatgttctcagcaaataccatagcttgtgttcagttactgatttcatagaagtccctgaccaaagggggtcacaagttaatcagccctcgatgtaaaggcacatcactaccttttttttatattgtaaaaggcatataacctttgtttttcccctgcatcgcagcaccccttccaccg

SEQ ID NO: 112305 - DNA, 707 bp, Setaria italica
  Intron number 1 from transcript Si010143m (locus Si010143m .g) derived from phytozome v7.0 (chr-ID scaffold_7; pos 35 647113 to 35647819 reverse strand)
gccgtctgccaggtactcacagagatatatccttggccttcttgcaagtatcgtctccttctggcatcccaacaagctgcgatatgatgtctacttgttcagtctgtctacccactgcacaatgcatccacaactttgtttaattttaacaacaatgcaccggatccatctctacttgcaccaactcaaactcattttttttttcgtttttgggaaaaattaccccaagctccgcttcaggttgtttttgcaagcttctctacccagtacaagctgcattttaaaacttaatttgaggaaagaaactgaattcttacagctagcctagtgaaatactctaggggtggggggaattttcaagaaactggaatttacctcaagttatgtactttgccatatttcaattttctcaaagtttgtattggacatgaacctcatcactacatcggcaatatgaaattatgagggcactcctattagcaactcttctttcttcttaaacgaaaggcagtgctcctgccaatgtttcgggaaaaaaaattgtgagggcacatccgtatcttgtactacattatagcatcaccaatgcaagtacattagctttcctcttttatgtgcgcaataataattcgattaaatcatgatgtgtcgcaattgtttcaagatgcttaggactttgctggccacaaaggccacatcttctgcgg

SEQ ID NO: 112306 - DNA, 511 bp, Setaria italica
  Intron number 2 from transcript Si012144m (locus Si012144m .g) derived from phytozome v7.0 (chr-ID scaffold_7; pos 21 776669 to 21777179 reverse strand)
agcaccaagcagttagagaggtcatacctgacctcaatgtgcatcctactaacgatgagcaccaaactgttggagaggccatacctgacctcaatatgcggcctacttatgatgaacaccaagcacatggagaggccataccagaccttaatgtgcaacctactcatattgaacagcaagcagatggagatgtcgcctttgatgttcttgatgaacaagatgatttttatctcaatttactagttcctggccaacacgaagaaatgcaacagagtatgatcagtaacctacactaatcttctttgtttttcataattatgcacaacaattttatttttaatcaatagcagccaaccttggttaatttaaacatggaatgcgagatagaaatatgattgattcaaaatttattgaaccaaatgggcataatagtctgtgttttacaaatgcatatattatgtgaatggccaatatgcgctacacaactaatctgtagtttttttagtaagtg

SEQ ID NO: 112307 - DNA, 908 bp, Setaria italica
  Intron number 2 from transcript Si021253m (locus Si021252m .g) derived from phytozome v7.0 (chr-ID scaffold_3; pos 24 864352 to 24865259 reverse strand)
tttctacagtccgaagtaaatcatctgtaccactggtatggcctaccactaagctttcaccacctttcaaatacataagcgagctttctggctactttgaagggtattaatttagcttctgttcatgtttgatgcgctcactttgtgcatgcatttctttcttgtgttatgcaactgcatggcatttgttcttcattgtggcagtgtgaattgtccttgttttggttgaaatattcacactactttttggcaggaaacaaatatccacggtattgatttattatttttaattccatcattttcttaacgtatatgccaatcgacagctatgaaagtgtaccaaaaaacaattcagcatactatgaatactacatcattccttttccatctttctttgttttagctttatatttatacttaagaaatatgtccataaagtagccaaatagagttacccttttttgctcaataacaacaacgaagccttttattcccacctataaaaaaggtctttttagtctcaaacaaggcagggtaggctaaaagttaacctcttttatcatacccccaaaaatggtcattcagctaaaagagccagtttaacactctattgttattttagggggtttgtgatgagttgaactgaagtactctaggcaacataggtttccatgcttgaaccagtcttttcctatcacagtgtgcactgattcattatgttatgtttctaagctacttggatggtttatggattccaggtcgcaaactttgataattgaaaaactggtgaagtgcacatttctgctgattggttaacacttttctttaacatgtcatgagctacagttggatatttttcatttgtctcttatacagtctatttggtgatacaggtcttccgtttgttg

SEQ ID NO: 112308 - DNA, 839 bp, Setaria italica
  Intron number 1 from transcript Si011306m (locus Si011306m .g) derived from phytozome v7.0 (chr-ID scaffold_7; pos 24 510952 to 24511790)
gagatcgtcgcctccgcgcccgtcgtcgtcttcaggtctcttccttcccatctctccagtctccattgacgagtgctgctagatttggcgtcggaaataattgcaaggaaatcaaaaaggggaaagggggagctggagaattttattatcagccctcctttaccatccatgagatgagcatattcctctcttcttcttttttcgttctccgcgagaatattcgctgttcatccctatcttcgaagagtgatgcaaggagattaatttaatctataatctctagagatgtcggtttcgttacggatgttttaacacgcaattcctggcagatttgctgaacgctgtggaaagtggagaatttgaatccgtaccctgtacctatcttatttggatagaaccaaatcatgtttgcaagtttgaaattcttcagctaagggattcgaaaactgatatgggggttattacttggattacctagccagctccttgccccccagcccttcaaagcctgtttggaaaggggagatgtgattcaaatccttagggttagttcaaatttgtgctagaagtttctatgcagctgaattggctgcatcagttcctaaggcaccccccccccccccccccccccccccatcttccaaacatgacctaaaaattttgatggtcctgctatctttactgttgaagtgttgaggttcacacttcacggcatcctgcaatggaagatggggtttttagttttgttgtctggaagtatcttcccctgctctgtggctgatcgttatttcgggttacatgcagcaagtcttactgccctttctgcgtccgtgtgaagc

SEQ ID NO: 112309 - DNA, 991 bp, Setaria italica
  Intron number 4 from transcript Si011145m (locus Si011145m .g) derived from phytozome v7.0 (chr-ID scaffold_7; pos 32 198687 to 32199677)
gctattctggtggactctttacttgactgtaagtgatgttatctgttatagagattctcatggcatagatggtagactacccacattttgattcgatagatatcatgatgtctgctgtttcttaattagaaattgctgtttgtaatcattttgcgaaccaatcggttaagacttgaggattacttaaataggaaattgaaaggctatgatacttacttttctgctatatatgtgcttggttattttatttttctttgttctttagctatgtatgtccattatccaatcagtcatgtttaagatagtcctagtttcagattttatttgacaaaggttaacaaaaatacctaaccatcgaggaattgaataattctggttaacaacttaatagaaatgtgacgttttatgtttgatcgtcatacatgtggaggctgtattgttctcagcttcttaaactttattcttcttacgtttttcattggctagaaacttgaaccttggtatgtccatcatacatgggtaagaagttgcacttacagtggattctggcttctcacttaaagcagtatctgcttgtctgttgccacacatatttaggacctatgacaaatttggtccgcatgcatacagcttttgcactagctatcacctcttttgactgttcctccccccccccccccccccccccccccacacacacacacacacacaatgctaccaatataccatgatgtgcacttagttagggtttctgtgatagtatcccttatctttcaacagttctggctgatcagtttgctctctggagaagatggaagtcttatcttaagtcttaacactttagatgatagcagtgaaatgtctcaccccatacttgagggcggtccttcagagaacttttattacctttcctatgtttactaactactgcaataattgatatgtcttaagagtgtatataaacaaacctctccatatttcaggctgctgc

SEQ ID NO: 112310 - DNA, 954 bp, Setaria italica
  Intron number 1 from transcript Si022086m (locus Si022083m .g) derived from phytozome v7.0 (chr-ID scaffold_3; pos 26 0140 to 261093 reverse strand)
tgctgccattggccgttcgattttgcgtgtcggtggtaagaaaactctctcatatcacgcccttcgctaagtcttcaatgtttattacttctaaattatcaagtgcccgcaggaaaggctggacgaattccagttcttaggccctacggtgctgatttgctggattgacgctttgtttcgtaatgttgcgtttctttgcttcatttggccaaagctgtctcctttgcagtctgaggagtactatgtaggcagacatttttattcttattattcaccgttcctcagactgcaacaaagccctcccttgtctgccttaaatatatactacatactaacacgaggcctatataacatagtactggttaatccgcagcttgcaaattaaggcttggaaccaaataaaaaaggttaattttgctgactgcgtggttgttttctataactagatctaataaaagtgttctgttggcctttccccatcggagaggttgtgccctcaaatcccaatggtgatctttgtatgaagtacacgacaagaacaattaattatatgatagtccaacggccctaggcaaacctctagattattcaagttggtatggaatactctagagtgaggcatcacatgattgttggtgacgcactccaatttcactgaattatcattgaatctaagggcaggatatgtaatacatgccaatatttatgaaggtggtggctttgactttttgattgcctctgctcgtccccaccatatatccttttttgccattttctgatacattaagaaatttcaccccgaataggaacaggacgtaagagaacttataacctatctcttgtgctgtataatgttcacagcactacttgtgtgcttattttaggagattgtgatactcatgctacttgtgagtttcagcttgcgcgtttctatttgtgggcattgagtgggtg

SEQ ID NO: 112311 - DNA, 879 bp, Setaria italica
  Intron number 2 from transcript Si022894m (locus Si022494m .g) derived from phytozome v7.0 (chr-ID scaffold_3; pos 16 270122 to 16271000 reverse strand)
tcgagggcatcggcctcggcgggtgcattgtccaggtgaggacgctgtttccttccaatttggtctggtttaggagtagtcaattcgcgtccttgtccactaaactgcgccatcaatggcgaaggttggggccgttgcggtttagcactcagcagaacctaccaatcctctaaacattgtcaaggaaaacgtcacgcagcacctttagaacttatgtttcatcttttaggtcttgcaaagtccacatcaaagtatcttgtcacaaaatcgctgttgttacttttttgagaaacacaaaaccacgacccttaacgtctcataatttgacgactctttttctttcactagcccgtgtgctcactattttttaaaacttataaaattttcaatttttattatactcaatggatctttacacgtttgttaaaaaatcaatactcaaatactcattgcatttctatctttttatttgtattattaatttacttttcggttgatctcaagttttactttgctagttatttctaaatccaaactcaaccaaactagctgcaggagtacaccgaagcaaacatggttcaaaccgctcagcggtcatagacccaccgattgacttcctaaactgatgtgccacctgctggcctatcctgtttcttttacgcgcactgatcttcgacaaatcatattcacctgtttcaacaaataaaaatattaaaaataataatattacaaatacaaaataaaaattgataaaatgtaaaaagaatgttagtttcagaatagactttagaaaagattggcgagcacaacgggaccaaagcttattgacccgacctatttctagtggtttgcagcgacaggcttttctgtccaacggct

SEQ ID NO: 112312 - DNA, 742 bp, Setaria italica
  Intron number 2 from transcript Si010193m (locus Si010193m .g) derived from phytozome v7.0 (chr-ID scaffold_7; pos 24 627049 to 24627790)
agacggggcagtggtcgtttggagagacggtggaggtataatcccggtcacttatgattgttcgagtgctgatgttttctgcatgatagaattttagccgcgatcatgtgttggaaggtcttgttttagggactggcgtgatggtatacatgttgagattgttgcatctgtagtggggtcaggggaaggaagccattgtggaactttgagaagaatgctgctgttgccctgcttcctttttctccccccataagagattagtcctgggaggcaactctagttttttaaggtttctgtgattccgatttaatttttctttgtgctaaatatttgtgtctattcatagccatattgtgtactgtttattgagacacatgcatcatctagtcgtttatctgttttgttttgatgcaaaattaatagtgttgagaggcaaataaaatgaaagaaattgattgccgatttgcaatttgttctcttaatgaaagttgtgcatttttctgttaatagtgtcttggttatgcaaataaattagaacaaatcgattgctatttgttggagaaactgtatatatttaactcaaaaaggagtgaggacttgaaatcctgatctagccatcacaattttctgttcttccaccagactacaatgttgttttgtcacgtaaactctgataagccatgtttttattgttgggttaagccatcttacttttactgtcatctacttttgcaggttatca

SEQ ID NO: 112313 - DNA, 641 bp, Setaria italica
  Intron number 2 from transcript Si012242m (locus Si012242m .g) derived from phytozome v7.0 (chr-ID scaffold_7; pos 31 484332 to 31484972)
cagtttggtgagttcaaaagatcgatatacctttagtgttcactgttcaccacattagcaattttcgtttttgaaacaatcaggttctttgatctgactatgaaaatactgcacgtttaagatgttgaatcaaggaactacccaaaaccataggattttcttttcatgtccatgccaattcgtgctggcagttgtggctcacatgtcaatataataggaaataggcagggcatcccacatgaaaaggttggctgacatgtgtaaactcttatacagtatcttaaatgtgcagctcttttttatgtagacaagccaacaaacctgcagtttccttaaatttactccaaatttcagcacttattatggcaataaagcctaagagacgccttcagctttgtttgtatatggtaacatatgatcaaagatagcataaaatataagttgaagcaaattaattaacaagtatatggttcaaaacaatgagaaatattgtttagttattatttaagcatttggtgtcttgaaattgttttacctttgctacacatctgcaggaatttatggagctgcactagtcttatatgcccttttttgtttttggtgcagttcttttggttgttctgttgttcaagggtgaccac

SEQ ID NO: 112314 - DNA, 820 bp, Setaria italica
  Intron number 1 from transcript Si023302m (locus Si023302m .g) derived from phytozome v7.0 (chr-ID scaffold_3; pos 17 946042 to 17946861 reverse strand)
actcctctgaggctggccagctagcaccgttcaacgtaattcccgcttctctgaactcacctacagttactggttcggaatcagagcgattgctgcttctacctcgtttatgttcgtgacaggctgcaattttgtttgatccggtgccttaggtgtcccatgggtgaaatggccattagacactgtgttttattctcaatcgaaagtgttacttgtgtagtagcacctaaaaaccataaatcatcagatcaaatatcgacgttctttttctgacagctgactgatgtgcctgcaatgctatatcaaatttgtgagctactgagtcagtatccatttagactcttgtcccttctaaacgtgtctgttagcatgtgctacccaaattctggtagaaaaatccttttgcacctggtttaattctccatcaagttagaccctatccatgccaggtcccataggatcactaagaatttccataaagaaaatgatcactgcatgtttcattgtattcgttatcatatttgttttactatgtgcatttgacatggatgtaaataactgtgtgttatgaaatcttcagaaggaaattaggggtagcagctgcagcactgtatacttttttgaaagaattagcattgtatactaccttgccattatattgtgcgcaaaaactgagttaaaagtatctatagtacccttccattatcagaagcaatgcaattttgatagccacagttccttttagtttctttaatacctaactttcagtctttcaaaatgtgcagagtgacgtgtttgatcaggtcattagagagtgcaa

SEQ ID NO: 112315 - DNA, 474 bp, Setaria italica
  Intron number 2 from transcript Si009817m (locus Si009817m .g) derived from phytozome v7.0 (chr-ID scaffold_7; pos 29 036245 to 29036718 reverse strand)
gaaggtgagaactgaaaccttttagattctcttgagtctgacgatgaatggctattgacgcatgctcttggaaaatagattgttaaatttgattagattatatttgcaaagaaaacattatgccttgtgactggatgcttatgtattcttcttaatagtctcgattttgtttataaatcattctagaattgttcgcaagaattatgattcaatcattatgttagccttctgtccttacatgcaatcaatagcaaaattttctgttgagttgttagtatgcaaacattggggagtcagctaggtgtaggactaactaatagaatttctacttttagttttttggtaccagtcaggcagtcattaaacagcatctccaattccttaagattttctgtaacttggctgtgaagatgccccgctatttagtttgcattttcattatagtctatcaggttcatttgtgcaggaaccaga

SEQ ID NO: 112316 - DNA, 390 bp, Setaria italica
  Intron number 3 from transcript Si021508m (locus Si021508m .g) derived from phytozome v7.0 (chr-ID scaffold_3; pos 12 089196 to 12089585)
tcaaaatcgctgaggttaacggaaccgaaataaaggtactcttctcttctatttccatgttgcattcacgcaaacataaattcaactacatttaacctttatagcgttcctcaattttttttttgcaaaacactttgttatacgtataacttaatttttcatattccttttattttagtgagggtatgcaactttattcatattactatgaatattcaaagatatagctgctgtcagtcaaaaagttgcatttaaacttgtttgacattattatgttgctatgtgatattactgttgttttttttgaaataaaatcttctgtcaagtatgctctcatacaacttctgatgttttttttcttctgcagccatttgtggagagtttatctaa

SEQ ID NO: 112317 - DNA, 451 bp, Setaria italica
  Intron number 3 from transcript Si010458m (locus Si010379m .g) derived from phytozome v7.0 (chr-ID scaffold_7; pos 18 601796 to 18602246 reverse strand)
acgaggtatgtgtgctactgtgcctgtaaggcctaaactactactttgtggtgctcatttgctctcacttgagctttgttctgttttttttttaattactgaaaagatgtaccggcaactattagcctcatttttagaagcagtttaatttcttttccttatcatgttttacaactggacaaacaacaaacactcctagaagcaggcattttttcatctgaacctgcagtagcatgattttacatcattcaaaatgaaataagcttgaaaaataggcaattgtacccttttgaggtcctatttgtctgctaaaccattgtctgtgtgtgttgtattcacatgtgttgtggatctgtagccaacatttgatgtccccttctgctgattaactttaagagtatcttgcaattaactttgtttttttagggccttgctttggttcctctctggg

SEQ ID NO: 112318 - DNA, 675 bp, Setaria italica
  Intron number 2 from transcript Si009759m (locus Si009759m .g) derived from phytozome v7.0 (chr-ID scaffold_7; pos 32 685593 to 32686267)
tggtgagccctctttgacattcagtattcagtaatgatgccatgatacagaaatgtcatatgaggggttagttcttcctaagcacatgatgtgcaatgccacagagcgaggtcttgtcatttgtgccaggttattgttgttatgaattactaagctgtgcttgaaaagtgagtcatggaagcttgaaggtgttaattagtttgttccatgtcagtttaggtgttgtgggggtaaaatttcctgaaattgaacttttttttttgccgtgaaattggtagcttacatgtgaatacgtatcttttctattataaggtgatcaggggcttcaacctgtgtaattgaactgtagtcccatttcgcactgccaagggctatcaccacagtttacgtcatatagttactgattgtaggtcatgtttgaatttcccgcaatcctaatccttcatgcttgcaagatgaatttctcttcctcaagcatggtgtttagttgacatagtgtttgtgtgccaaaagacttgttggttctccaaatatctctgttaaagttgtaatatggacctgggatgagttaggtgatagtgtagcatgatttaatctatttgagttccatcctatttccacttggaactcatgcaatgtttcttctgtccttgattttgttaggtgaaaacaggg

SEQ ID NO: 112319 - DNA, 358 bp, Setaria italica
  Intron number 2 from transcript Si009495m (locus Si009385m .g) derived from phytozome v7.0 (chr-ID scaffold_7; pos 29 682354 to 29682711)
ggcgagcagagctcctcgccgcggggtcgttaaaggtacatccacgtcttcttctctgctccattcgttgtcagtgaataaacataactcgaagagcggcgacgttgcatatcattagtacggacaaaaggggagtaatttgttgtaatttctgtcccacgtcatgcacggctgcatttgattcaaggcagaaaggaggattctttttttttcttgtatgctctatagcacgcacttgcaaagtcaagttttttacttgactttttattcgtatgcctggaagtaatgtacaacgacagatgtctgattgattcctttcttcgagcagcatatcctgagaagaggttggtagcagaaa

SEQ ID NO: 112320 - DNA, 638 bp, Setaria italica
  Intron number 1 from transcript Si021991m (locus Si021991m .g) derived from phytozome v7.0 (chr-ID scaffold_3; pos 47 032936 to 47033573 reverse strand)
cgctgccgcacctcagcatcaaggacacccccattgtaagaaccagctgctcacttcctgcttttcgctcgcgtgcgtgttcttgcgctagattgaactcaatcaggtgctcggtgaaattcccaatccgaaaaattgtgtgttttggagtctcggcgtcaagatttgagttcttggttgctgaatgtgcctgcttctagctcgaattgctgtctttttctctactgcgttcttgagcttctgcttcagtttgttaggggggaagcttttgtctgatgtttcctctgacatacattccactaagcttgtttgctggctccctaggggatgggaaacagaaaacactgtaaaaatgggttcttgatgtgatgtgtttgggggattacatgcatttcctaaaatattggcatctgagcacattgcggctgtaaaggtagctttccttacctgttgtgatatgacaggcagcgtccatttgcagtaatcgtttctggggaattattcgcttgaagaatgattagctgagctattcgctgtaaattttggttctttagtgtaccagtacaactgtgtaacagtgagttcttggtgtgttctacgcaggagacctcgtcggcgcagtacatcctgcagcagta

SEQ ID NO: 112321 - DNA, 928 bp, Setaria italica
  Intron number 1 from transcript Si010854m (locus Si010854m .g) derived from phytozome v7.0 (chr-ID scaffold_7; pos 14 972006 to 14972933)
atcctcggtgagcaaccgccgcttttccacatccaatcccctcgcttcccgccggcagctcctgagccgtcactcatcgggtttcttgctggattcgagcctgagcatgggttggactgcttgggaaatgggaagctcgaggaatcttgagcgtgcttcaggctggatggtttctgcagctccggtgccacggagctgtcggtctcccctttaaatctggccccttagtggttgacgtgggctaaatcgcggaatttcgaccgcatttgggtactgcgccactgaattccctgatcagctgacctgtgaatagtctcaacgcccggactagatgcgattttgggggattaaacttggtaccgaagcatttcttgttttgggcatcttggcatgcacaacgccccagtcatttttgttcccacttgcttgactggcgcccaggggtgcctgcagtggcctcccagttactctgatctagtgagtcaaagccttgtgttgttgtgtgctaatgcatttgacatggttgtgttttcttgtagaggtggatctatagattaagtagagcttctttacgagaagcacactttcttggcatgactaaaagaaattaacttttattttgatgcgcaaagcctttagtttataccatggtgtggcagagaaaattctagtaaactttatcaaatattcaaatgcaaagattgattatacaattgttcttaatggtcttcatgttgattagtatgccttcagcatcaattgttatgtttggcttcctactgctctgttttccagaaatgctggtttctcaatttcaatcagtgttaagaaactctgagttcttcgcttcaacgtattttggtttcattttgctttgtttttcacaaatacaggttctttgcttcagttagcacttctccatcagctg

SEQ ID NO: 112322 - DNA, 917 bp, Setaria italica
  Intron number 4 from transcript Si021603m (locus Si021603m .g) derived from phytozome v7.0 (chr-ID scaffold_3; pos 12 135689 to 12136605 reverse strand)
ccagtcggaaactgacccaacagaactttggggtaagttcctcaccaatcacagttgattctatggttttcttttttttaaaccagaaaagtacatgttgatccattttactggtttctgttatggtttctcaaactagttaaggtcacactggtacttgccattattctccatcaagatctatagggaaatttctttggatatttggttgatgggtagcaaatacaaaactaaccgtgtgtttaaataaagatattgtgtttcaaattacatatttctaataaaatgttcttccattctaatattgctgtccatattattcgtgcggcactgataaggaagtattggagtaaccttcaattagataactcccttctggatgacaaaatgccaagaagttagtgtgtatagactgctcctggcataaattctaaagttgtatatattatatctccttgtttcatcaaattgctaatgctgcgtgcataattggaaattgggaacatttctgtgccccatacatgattcatgcagtatttctggaaattcgtttgctccattgcttgaatacctaggcactgttgctttgaattgaagataaatctgtttttttcattcgctacacttttgcggttaccttggaggctcggacaggaactttcttatctatttcaaagcaaacggcaaaaatagatgactatatatgtacattttttatcctaccttgatattcaacttaaaagcaagaaatatttttacagtggcaatatggatattgtgcaggaactcctttcttttttaaatggtgatcaaaactgcatgatttgctgacacaacatccacttttgtaattaatgtgggacccaacagtggtgactgtgtgatcttttttccttgcagggtgctaaacctgattt

SEQ ID NO: 112323 - DNA, 686 bp, Setaria italica
  Intron number 2 from transcript Si022987m (locus Si022987m .g) derived from phytozome v7.0 (chr-ID scaffold_3; pos 11 990443 to 11991128 reverse strand)
acggacaggtgagatgtctctttcgatcgctccatttctggtatttgatctagcattaacatggttaacaaaaatcatgtgcaactaaaatgcattccgctgtggttgaactctgctgcgaggtgtcagtatatcatcaaaatctgactttcttagttaggccttgatccttttagtgaaatagaaaggaatatgattatgatctaggaaagctacctgaatcacagaatcaggattcaggaatataaccagtgccaccgaacaaaagtggctctcttgctcatctttatcaagcctgatattattgatatccagtaataaaaagtggagaggtgttaatctgttgctgtttcatattatgacaagtgctctcttggccaggaaaggcctccccacatgccattgtggccacatggtctatctaggccgctcatcatcttgcgcacatgctcccttggccactaaatgatgatgttgtgatgcagagttattttcatcctcataacatgtagacagtcgtctacattcttgatgtctttgtgtttccactctgttgatgtgattctcgacaagtatgtgtatttttctgattggatttttgtatgcatggaattcagcgtacttaactcatcactaaaccagaattaggtctttctgctaatattgttttttttcttctggcagat

SEQ ID NO: 112324 - DNA, 1021 bp, Setaria italica
  Intron number 1 from transcript Si022495m (locus Si022495m .g) derived from phytozome v7.0 (chr-ID scaffold_3; pos 46 541606 to 46542626)
acgcttcgtgctcgtcccaactccggtgggtggtggtagacggccggcgacgaggtgggcctcctcctcttcctcctcctcctgctcctgctcctcattgctctctcggattgaggcatggtggtgactgggttagggtttccggttcggggtcgtcgggggagggctcagagtgtctggcggcggcagtaggcacggcggtggtggcggatcgagggtggtgaggtgaggcggcgtgggaatccatccatccatccattgaagctccgtttccccacccctccaggctccaggcctgccgtttgctcgctcgcgccgcaactggcggctgctgcagcggcggcgccggtggccgcctatgcgttctccgcgctcttcgcattgctgttgttcgcagtcggtggccagcactggatggcatgggggctgctcctttttccctcagattcagccgtcgtctgacggcacctgatgcagcttggcaccgagattttccttgttttgtattccatcatattgacatttgtttcatccgtgctgatttgtgtcgattcttgctaatttgggtcattttctgtgctgatttgccaagtctggtgctttgatttcgtgatgcttttttgctgtgttctccaatagctcggttagttcagtcgagaccgagatcgaatccgaacgcccacccctagaatcatggccatgaggaagccaaatccctacactattattgtaaatattctgtttgcactatttatacatcctgtaatttatgcttgtttcagacttatttgttgagtttaatgtgttgtgtacctaatcgtttgggaattttgtacttgtgttaccgaattgcatattggagttttggctaggcatataccgtaggttaaatttctaggtccggattgctacgctgcgtgcttcgttgctaacccaatccgtccgtgttttcaacttccaactaggctatccttcgtcttcttcagtgagcaaggtgaatccagccgtggtgcgggcactg

SEQ ID NO: 112325 - DNA, 634 bp, Setaria italica
  Intron number 1 from transcript Si025303m (locus Si025303m .g) derived from phytozome v7.0 (chr-ID scaffold_3; pos 12 068383 to 12069016 reverse strand)
gaaagacggtacgtgagtcttatgttgcttgttaatcttacatggtttggtggtgaatcaatttgtgtgtaataagacattcgatttgggcctcctatgactgtcttctctcctttttttattcaaaaaaagctaagtaattgtgtttttttttgcgaggaagctaagtaattgttgatgtcaaatgatcaaacttttcattcataattgcatcaatagcatcacagatggtgacactgtattatgatctgaaatggtgttctatgcagcgtagacggaagacgcggaccttgtgatttaattctgttatttactcatggagatcaatgtcaaaacccagtctatacatgatttggatcttaaggaaaataaaaaaatgtgcgtatcgtttactaaatttaagagttaatttcacaaaactacaattatagtgcctctttagagaatggaataattagaaggggatattcgcattttgctatgagctgcatcggggcatgcaaacttgcccccgtttatttagactcgagaggtttatccaaattcatatgttatctgtttgtacaacctgtgccatttcttctattccatgaaaccaggttattgtgagcataccagacattcatccaaagga

SEQ ID NO: 112326 - DNA, 952 bp, Setaria italica
  Intron number 2 from transcript Si021873m (locus Si021873m .g) derived from phytozome v7.0 (chr-ID scaffold_3; pos 50 3940 to 504891 reverse strand)
accgctctgcctggcctgacccgcgccagttcctggtatctcctcgctgccttcacttttaccctttctaattgtatgcatttggtgggtgaaattgatagttcgttacctgcttggttattgtgggggtggtagattctttgcaactttttgattcacacacctaagccttcgagtgcctcttatcatggaggttgttgatttgtacctgttccatagatgaatgatgtgtatgcttgttatttacctatatttcgcttttggatggaatggatcgtgatggcttgcaaatggaatggtggcacctaccaactgtttgcctaacattttttcttttgttctgtttgatcattagattccatttctaaactaatgttacccgtgtgagacagcaatcatatcagctgctatcactcccatcattttgtccatcgctagacattgcttttcgtccccttccttttcagattgaactggttaatgtgagctcacagcatatatctagaaatagaatgcatgctgtcatctcaaatattgatattgtgccaaggggactttataggtttatctctgtagtcaattggcatttttacccgtctgaatggtgtcgctttaatagtggacagcaactttgtcaacacttttttgtatttttgattctaccatgtctacttgtactagtcctttatgtgcctttcaaatcgttatgctcatcccacaagatattttgtcatttaaggttctgttagtccattctaattttggtttgtgtcacaattcacatgtaatagtgtaatacatagaggaaagcatcctctttattgttgcggagttatggattctgtttgctttaccaataacagcggattttctgtgacatgcctgacctgacctttggggaaatatctattcttcaggaagaagctagatcagttggccagctccggagcaa

SEQ ID NO: 112327 - DNA, 729 bp, Setaria italica
  Intron number 1 from transcript Si009313m (locus Si009313m .g) derived from phytozome v7.0 (chr-ID scaffold_7; pos 29 576246 to 29576974 reverse strand)
ttactttgaggccatccccacaccggcgtcccgaggtgcgtatctagtgatttaggactgttaccagaaacacttgcttaaagttcattttgactacatggattaatgcactctttatgaaccattgtaacttgctgcccttgtcccaatgaaatgtcacattaactcaacaatatcccctatggccctattactctgtcactagaatcgcgacgttccattctaacaattgagcaagaataggttcacctgcgttttatgtttgtataagctgtatgtagaatttctagtttgccagcaatacggtgcttgtattttagtttctgtttgctttttggaccactcagaggcactgtattggactttagaaagccatgagtctgactctgccttattgtgtgctagtcacaattttgctgatgagggatgtttaacagattttggatagagatttggtgaagagggtttgatagagagaaataaagtatggaaaatttccaggacacagaagacaaaattgatagatagattataccattcaaatatccagatttgccaatatcagtgatggccatacacttatatttctgcagaatttcttatatccggatttccttttctttactcttctatgcatagatctactccgtcgattgatattttcttacttccttttgcattcttttgcatggagcagggtcaagtagaaaagtttaatcacctgacttg

SEQ ID NO: 112328 - DNA, 393 bp, Setaria italica
  Intron number 2 from transcript Si010456m (locus Si010456m .g) derived from phytozome v7.0 (chr-ID scaffold_7; pos 26 699802 to 26700194 reverse strand)
tatcttccatacaggcctctttgtacttcaggtagggctacttactttgcaggcattccatgtttctgcaaaagttttaaattcttgcaaatcagaaaataggttatttctgtctttggcgtggttataaacaaacctacatcgcatctagtatcattctttgatgttcattgaatcattgcttcataatggaaatctagctgtgtgataattgattctttgcttagtattgaattttttttcagttggttcagtacttaaggagttcgatgcagtttattttgcctgaatacttattagcatttctcaggaatttggttcatttttattacatttgaatttgatgtcctcagcaacacttctttttcaacttcattttgtttccagccttca

SEQ ID NO: 112329 - DNA, 808 bp, Setaria italica
  Intron number 1 from transcript Si013295m (locus Si013295m .g) derived from phytozome v7.0 (chr-ID scaffold_6; pos 31 734395 to 31735202)
ggcagccgcagcatcttccccgtcgggaagctccggtatgcatgcgatgcgcgcattcttcagatctgttcctctgttttgtctgcgatgtttttttatttgttttcccattcccggataaggtaatcagttcaatttgttcgtgatggttcagtaatctgttcggttgattctgtgcacgcttgaatcttgatgccctttttctttccttccaaattttgttctctgaacaaccggtgaaatggtaactgttgggatgtaaattttgattcgcagtaaacactgagcatttagtgtgagggaaaacagtggaattccgatgctgttagcgaaaagaggaaattgttgggactgtagtttatctgcacacagcttttagcgaaaagatcacttggcggccccttttctgtttcctagtgatttttctcaaaggggaagaaaatactgcctccgtcccaaaataaacgcacatccgcttctcgatgagtcaaacatttttaagtttgactaagaatatagaaaatagtatcaacatttgtatctccaaataaatttattaggaaaatatactcaatgctcaatctaatgatacttattatacatcataaatagtagtacattttttataaattttgatcaaacttaaaaagtttgactgagatgtgcgtttattttgggacggagggaataagcaacaaaccacttggcttttccaaggccaatttggccagatgaatcattaacgcagaaaaaagagaaaaaaaaacctgaagtcacgctatgcttgtgttgcagggacctacggttc

SEQ ID NO: 112330 - DNA, 523 bp, Setaria italica
  Intron number 1 from transcript Si013221m (locus Si013221m .g) derived from phytozome v7.0 (chr-ID scaffold_6; pos 65 30140 to 6530662 reverse strand)
ccatctccaagaggggtttggaatagatcacgcaggtatgattgaacaactaattttattgactgtgcaagtattggcactttggttttgtgttccatgcgcatagtgttcaagcaacttaaaatgctatgtctgggtcaaatttatattatggaagcatccaagatggaatttacaagaattgtgtaaattaagttgaggccactaggtttcctggctttccacctgtacttgtactcaagcagcatgctgtattccttccactaccaactgcaaggagttgaaaaatgtgggcctttgataatatatgttgtacttgtgaagaatctctctccagttttaatcaatcttgatctggaagatggtatattatcttaaaattcattcacaacttctactagaatttactatttgtaaattgtaatgtcatcgaaagactcagtatgctagcagtaccttttctttacactgtgtgtttctgttaacaggaacagaagtcgttccagaagcagaagcagaagca

SEQ ID NO: 112331 - DNA, 841 bp, Setaria italica
  Intron number 2 from transcript Si009903m (locus Si009903m .g) derived from phytozome v7.0 (chr-ID scaffold_7; pos 20 759212 to 20760052 reverse strand)
aaaagggtattttcttgatcttattagttattacctaatatgtttgtcttttttaattccatccgtgtaatctatcttcaggatacctaaatccatctgatcatattatgtcaacttgatcagttccaatcactgaatatacttgatcagttccaatcactgaatatacatcttttttaagatgataaactatccttgatggcctgccctttctttgttcataactcctgtgatctaagtttagcatgatttgttagggtctttgcatcagtcatgctactacttgacgttgcaaattgatgttaatttttgatacctgagcattagccgttcaactaatgttgtctcctattgattatgactagctatagttaaccttctatgaatactgtctacttgacctataggttctgttttccctttacttagtgactgtagaagaaaagaaagcgaaggtgctacgttgagattgtatcagatgtacttaaactaaggctgcagcaaacattaacaatgacatagtgccctgttaatcttgtccttggggttattgtgcatgttagtccaacttagttcagcaccgaggcggtggctgcaaggcacagaatatgttgatgtgataatatttcttgtagtgttatattatagtgctgaagcagaaatttgatacttactgcattaaatgtgtaaatccttctctctatttttttacgcaactgaagagcacatgtttctagtttttttttgggagtattcatttatgatctgctctatgtaaatcggatcttatggatgttgcccatggttctgtcaggcgttcaattcaaagctcttgtcgaat

SEQ ID NO: 112332 - DNA, 811 bp, Setaria italica
  Intron number 1 from transcript Si021180m (locus Si021180m .g) derived from phytozome v7.0 (chr-ID scaffold_3; pos 27 524337 to 27525147)
tcgcaagaaaatctcccctcctgcatcctggccaggtaactgattccatcaccttgtttctcccgttttcgtgcttcgtagtgccattcttgccttcctggatatctaggggtttgaaggaagtcctttttaccaacaaatttggctatggaatccccaaatttcagttcgttgccccatgatcgtccttgctgtgtcacctggagtgtcatattttggggggttttccgattagttagttcggaatattaggtttgtttatacagtctctacttagcaagggtacaggtccttccccccagatgcagtgatcattctggagttttaggtgctgttccttcctcttcctctaaatctatgatttggttttgtttccactgcaaatttgtaacttaagcctgctggtagtgtttttgggggcgctaagtttgttgtcttcggtatactaggctactagcagggtggcacctgtaacatgctgctgctttactacttcactccctcgagaaaagaaatgcacaaatgctaccttctgttctggcagcgatcttgaatgaattagttatggtgtgcaaattgatgcctttttccgtagtagtttctggacggactataaattttgatctttgtagaacccttaatttgtggtagatttttttctcagatatcagactttacatatgggtcagtttattgctgttcatctagccgatattcactatacatcttttctgtcaaaggaactaagttggattccttctctggtcttattgcaggtccagcttgtagccatctctatctgccttgttca

SEQ ID NO: 112333 - DNA, 752 bp, Setaria italica
  Intron number 3 from transcript Si009945m (locus Si009945m .g) derived from phytozome v7.0 (chr-ID scaffold_7; pos 24 503728 to 24504479)
gaggtcaccgtcgaaagtgctgaggctacattgaagtaagtcaattaattcccttattttcatccttggggtttcagtgggaccgatgtgaagctaattgttgttggtaccttagtctccaaaccagttaggaacaagggccaagggcttttcatggtgaatctaatctagtagctgacttgacaattgttttttcttcatgcatatgccataatcgtggatgtattgttcactctcacgtcagagatgattaaacactaacgttaaggtgtttggtttaatgttccgtatttccttttacctgatggttttccgtgaagagtctatcaaatagctataggggggtgcattttctcaatggcaggacacacctttgctttttggcaatactaaaggtgcttgaatgtttttaatttcatcttcattgtgtaatgtaggattggtatactcatttctagtttacacatactggtggtcttatcaatcaaccaatcactaattcactgttgatttgattgactatcaagattgttaaaccgttaactcttccgctgttgttctggtaaccatgcctaacaaccttaatatcctggagctgatcataaaattatagttcatctcagaattatgctggaccgtcttttgaacttctacttggcttttgcgtgtcatgatgccattttatgcataaaatcattttgtacattcttgttgcatatgtaagatctccttttgtgctctctacaggtata

SEQ ID NO: 112334 - DNA, 609 bp, Setaria italica
  Intron number 1 from transcript Si024535m (locus Si024535m .g) derived from phytozome v7.0 (chr-ID scaffold_3; pos 19 360610 to 19361218)
cactacaccagaagcacccccgaggtattttgattcgttctagatacagtatattgctcaatttggcgctactgtagaagtttacttggtgccctgtcaagaagagaaggattggaggaattgcagccaaaactgtgataaacttttcttttcttttttttgtctcactgaaaaaaggtgtgacggttggttcatgaggaaatggtgttctgatatcagttttagagttgctttaccacatgccaacaagacaatgtagtttgtgatcgatacagtttatcaaggcaccttagcgtggtggtttcgacctcaactcagcatgctgctacgcgggtgggacctgcacaatgatctgctatgagccgtgcgcacggtatacttggatctctccagatacagagatactacctgaactgatccctgcagttgcacatctagattaagaatgcaacgtgcacaaaggaatggtggaaacattcaattatcatcataattcatagataaagttaatagcattttctggatgcctaaaaaacttaatttgttatgcactccatcattcagtctatcccatgattaatcctccaagtctctgaaaaaaattgacag

SEQ ID NO: 112335 - DNA, 909 bp, Setaria italica
  Intron number 1 from transcript Si023611m (locus Si023611m .g) derived from phytozome v7.0 (chr-ID scaffold_3; pos 10 977567 to 10978475)
ctgggtctatggtgaggaaaaagggaattagggactgaatccattggtgtaattattaagggggctatatgaaaaaaaaccgccctggattcgccgtgggcagcaagcatccagcgtggcacaccatgtgtgcaagcgggtctggtccaagctcgttaggacatgtgtcaacgctcagatctagatattgtagctagatttccattttctgagtacagggatttagacggtcggccgtgaatttatctccctcgtatgtgcctcacggtcacggtcgcgacctgccgggctcgtcgtggccgcctgtaacaaacacacttggcgcctcgctgccgcgcgagccagtgaaaagaacggcctggggctgaggtgcagccaggcgaggcgagcccagccaactaagggggtgtttggatccccgggctaaactttagctcctatcacatcaaatgtttggatactaattaggagtattaaacataggctaattaaaaaaccaatttcacaacccctaggctaaattgcgagatgaatttattaagcctaattagtccatgatttgacaatatggtgctacagtaaacatttgctaatgatggattaattagacttaatagattcgtctcgcgatttagcctaggggttgtgtaattagttttgtaattagtctaggtttaatacttctaattagtgtccaaaccttcgacgtgacgggactaaaatttaaccccctctttccaaacacccctaaagatccaaacacctcccactctggatattcgatcgctggtccagttggtggtgcggacaagggctcacggctctctgcctctccctcccctcccaaccgcccatttctgcttgcacttgccagatcctcgtcccgcccggtagttccggatctgcgtc

SEQ ID NO: 112336 - DNA, 617 bp, Setaria italica
  Intron number 3 from transcript Si010248m (locus Si010248m .g) derived from phytozome v7.0 (chr-ID scaffold_7; pos 11 127152 to 11127768 reverse strand)
caggtagtactggtgtctatgttacttgctctcagtatggacctctttagcacatgaatctatttattttacatgattttgtgatgcttggttgctagctaaacatcgctgcattgcatgccatgcaatccacatttgtgtgcatgacagatagaatatgtggaatgtgttcctgtatggttatgatatctgacttaggtacctgccaaaaagttatactcttctggttacaaatacttgatgttttggataatattcagtcaagcttctgaaacttttacaattaataacttttcaaattttaggctggagactcgcaagtcatatatgcagttttgtcttgagtttgttggattatataaatatattctaacataaagtagtgatccgaggcgctcattggaaaccatctaatattcaaaacatcagttattttgggttttttaccagagaaagtacattatgaaatgcttgctgtttgacaatgttaacaaaccacacttacaatttttcataccttcccccatgtgaatatactacatttgttgacaaaccattatttgaaaaaacaatttcaattttatatatgttatagcgtgcaggcaaaggtgttcctg

SEQ ID NO: 112337 - DNA, 951 bp, Setaria italica
  Intron number 1 from transcript Si007291m (locus Si007291m .g) derived from phytozome v7.0 (chr-ID scaffold_4; pos 32 17743 to 3218693)
gccaactcccgtaaggcaccaccgcttccccgcctcggcccctcctcgcctggtccttgttttctgcgcggcgcgtccgtccaacgatcaccgcccgttcattccttggttgctcagtgggtttgtgttgccgtcgtagagatagatctatgattctgcgctcgtaggtttagtttcgagcctgtggcaattctgcttaggggagcggtaaggggtgattccactagtaaatcagctacccctatccgtttgattgactgccagtgctatgcccttgtggttaattagctgtttttgtcttgttgaggttagtagccatctagatgtcttgttttgtttgcgttccgtggctgcaggtctcatattgggatttgggtcactcactatgtcagtgtgcgctatcatcatgttgtggtcttttttatctgtgcatactctgatgatactgataaattgtatctaggtttgtagttgctgttatgattttgttacccgtgtacgttctaatttgtctgtgatgctagtttagctgaagaagatatctttagcagagtgatgcagttatttatgaagctaatagtctaaattctgattttggctagaactgcagttacttgcatttcaaatgatgatttgcaaggaagaaattgttcccgttagtatgccattgtgccgaggctttgactgcttggtttattatatgactgcatgataaagttagaatagttcagttactcatatttgttatgttcttctgggtagtttgttgcactgaactcttgtgttcatgtagttttgatgatgctgacttgtgttttatatttactgtctttatatttaaatattgaattgttaatgtcttgtttttactactaacaactgaaaggaatataagtatgaccatgttttctactaaacttacaggccagaacatccgtaagttggttaagg

SEQ ID NO: 112338 - DNA, 1011 bp, Setaria italica
  Intron number 1 from transcript Si021884m (locus Si021884m .g) derived from phytozome v7.0 (chr-ID scaffold_3; pos 45 932631 to 45933641)
gtcccgcagccaccgccgtcctcatctgcgcgctggtacggaccttgattgatttattggttccgttctgctggtatggaagtcccctcggcgacctttcccttcttcagcaaatctttcgtcttttttctgcagcgcattcccttcgctgcaagcgattaaacccgaatctttatctctccccgaatcggcgtacggctcatcccagatttgggtgatacacggtgggaattgtgtagtactagttcatttccctgcaaataaccttggggattaaaggtacatccggccccattgagatttaggttgtgtgccctgaaaaaaaacgggctttgatttttctttggtgtagatgtgctatgttttccagtttgatctacttaaaaaatggtgcatgggcaagttaactttagttgtgtggcgatcaaccgctagtatccctctttgcatttttgtctcaatcgtgcagaatcgaaaagaaatagaaactgctcgtgaacaggtaaacattatcgtgtcaggaacaccataatttctggaaaaaaaaggagcccttttattgttgaagaaaacgaaacaacataacccagtttcacatttagttacatttcaagttggttctgcaaatgtgcaatcttagtttcatggctgtgggtttccacttctattaattttctaattcaaaagaaatgtggcacagaatggagtatgtcgaagtattcatgatttttatgcttgtgctctcatgacatcagatagttttaattcaacatctgcaactatgtctcgtatgctcaccaaaaaacttatttttatgttagccctgcatttgcccttgcttatctcataaagtagcatcattcctaatgccatacttcatagtccaatttacctgttcggctccacagctctatcatgttctcaaaaacaagtctttttcacattattcttttctttaccctccatctacatatcataatgtcattgttgttttagcaaattcaggcttac

SEQ ID NO: 112339 - DNA, 751 bp, Setaria italica
  Intron number 1 from transcript Si015762m (locus Si015762m .g) derived from phytozome v7.0 (chr-ID scaffold_6; pos 10 09296 to 1010046)
agaggctacttaattggcaagaggtaaccagaattactttcttgtactataataattagccagttcatctagctatggcaatgttgtgaggtctttgtcgatcacatgagctcacctaatttatcggccattttacgattgtattttacggacccattcgagcataaaactaccacatatgcatttgttacatgacttcagctgttcaacatatctaccaaaagccatcgctaaatatcttacaacaacgtcaagtcaactgctcatgaatgtaggcgtatgtggttggagttggcctgtactatactatacaaaacgattgtgtgcgaatgatatttgagtagaaaattatttactctataccatcaaataattccagattcagtaaaattatttcttgataacttcaaccatgtttgttttgtatagccattctaaatatccataaaaatcttctttaaaaattaagttttcaaactgaacgcttcttgtttttcagtgggcctcatgtggaggaagctactcttttgcaggttgtagacagattcttttccgataatagaggaaatagtttccagcgtctattcctagcacgtgtaatacgaattgacagaaaaaatgtgccaccactatccatctctttacttttctccaatatctttcaccatgatatgctctatatgttgaatagttatggtggccttgtaacatgattcctcaaccaatgcatgcaggtacttcatcttgattg

SEQ ID NO: 112340 - DNA, 820 bp, Setaria italica
  Intron number 1 from transcript Si010327m (locus Si010327m .g) derived from phytozome v7.0 (chr-ID scaffold_7; pos 21 754858 to 21755677 reverse strand)
atcctgggggacacctgcacgcgcggctgcaggtaagagattcatcatgctcattttactgcctatttccatctttccaatatcgttgacagatgcttggatgcttaggagtgcagtttgagatcttcttgcgttatatccggattctgtatattagaatgtgctatccacaattcacttgcttttgtatgctagacatctagagtaacacgttgcagtgcactatactttagctgtttgaattcaggatctgattttgcatcctcacatatgtcagctgtttcttctggatcttgtagatacttttatactgctcttgatgtgaattagcggatcttagctgttgtgtcgcaatgaatgttatcaactctaaatttacaagcacatagacagtacactgttgttctatctagtgatagacttgtaagaatggatgctttctatatgtagcaattctatagaaaatctgcttattctattgtgtgtgtgatgatgtccaattacagggaacctgcagtttttgttgtttaggtacataattttagctgcttcatggatacttttgtttttttagaaacaaggtttccctgctttatttctgcgaaacaaagcaaatagttcgggtttacagctcatgaagcgtatttgaggcgcgcccgccttcatggatacttttgttttgtgtgagcctgcatgacaaggatgcgatttcttgttgtttgtgtctttgtgatttagattcaccttttggagaaatgagcttaaggcctatatttagttgcttgctgatttgagaaattaccaatttgcagattctgta

SEQ ID NO: 112341 - DNA, 912 bp, Setaria italica
  Intron number 1 from transcript Si009422m (locus Si009422m .g) derived from phytozome v7.0 (chr-ID scaffold_7; pos 26 021677 to 26022588 reverse strand)
gccggcagtggtgagtgagcgtaactttccctctttattttcgttctcttgttgcgtgcgccgttgctgtagtgcgctggtgcgagtcttgtcgatggcgcgtgagttctatgcgtcgatgatgtttgtggaaatgaccaggagagtatctctgtagagttgtggttcattgcaatttagtacgatgaaattaaaattgttaattactgtttgtgctgcttacggctgaccgccttacccaaagggagcagtttgcttgttgaggaccttatccccgcagcgcttctttcatgcttgttaatcggctgttaatgggtgtgctttaggctctagcagataaacattttaaaagttgtttcatggaaattgatggaacgatactgctcagagttgtagtaaaagcaatgctggacgtcatttctgtacaagctgttgtgctaattaaatttgattctcacgaatgaaagttaaattagttgttgcatagggaggtccaataatgaaagttctgcaaatattcagaaaaaaagtgtctgagaccttgtaaaatgggtgtggctctcttttcatttgattgatgtgaatttgctgcaagtacagaagtgaaattaatatgctgtgctgttgatgccacttgatactagaagtttcttcatatgttactcgccactttgactggatatcaatgctaaaacctttccatacaagtacatctgtaagaatcaccaaatgcatctctgaaaattgcaagtcacttgttttttgtttacatgttcttgttgccacatccaccatttttgttcgaaataatatattgctttgtccactttgttggctttatgagttagatattcacttgcttttgttgtatatccagatcgccaagtgcccttggaggattatcgcaatatc

SEQ ID NO: 112342 - DNA, 807 bp, Setaria italica
  Intron number 1 from transcript Si014178m (locus Si014178m .g) derived from phytozome v7.0 (chr-ID scaffold_6; pos 32 530364 to 32531170)
gcgtaccgcgccttcgacggcagcggtgagtcccgtttggttgattgatttgttgttcgtttgatgccgacgattgcgaggaagccctgctcgcgaagcagcattaggctgcgggcgattgattgatgtgtgctcgttagcgtggtgttgcgattttggataggttttcgtcaatagtcgcatggaagatgtgtaaacaagtcatgctaaacgagcaagcgtattagtctcaagaaaaaatagcacctgtgattgatatctttcagggttgagtccaatatgaactgtaatgatgggttaatggggggatagtcctgaatattgcgcagataggctgattgatgcttttgaaatactgatgggggatcactgctttatagtgctgggagtaaaaaagggtttaccaactgtttcatccatgtagtaaattcgtatcatataaatgtaagtgtttaattcacaaaaggcaggatgattatgtttggatttgtgaagagttggattgaatagcatgcctgttgtagtatgactgtatgtatgggggtgagaagttattgctgtggatacgacataaagctaagtaacttatctgaacacttattttgatgaaacttcagtttgttgctttaatgaatactttcgtatttgcattagtggaggattggttttaaatatgtaaaaatttcacgccttttgtgctgaaattattaaattagatttttgatttattaatgctctaaaattgttgcaagatgcatttttaacttatctgtagtagttgataattttccctaatttcagggactg

SEQ ID NO: 112343 - DNA, 843 bp, Setaria italica
  Intron number 3 from transcript Si013875m (locus Si013875m .g) derived from phytozome v7.0 (chr-ID scaffold_6; pos 34 937656 to 34938498 reverse strand)
aagtgttatcccttgggaaacgtcctcatattgtggtgagtgttgtagattccatgattttctttaccttattccaagctaaagttgtttgtcccatttacgtagcaatttttttacccaaagtatgtttccaatgtttatggcattgaaatttattcattataaaattacttctgtaaagccaccacagtggcattggcatcgttatgaaatccaatttctgctaccactggtggcttgtttggttggaggtaattggtgggagggaaatggagtttagatggaagaaattaaaattctattgtttttttggtgggcatgggagttttaatgggatgaggaatgagagtttagaggggcaactcccaccaatcacttcccagggggaggggtgggaatttattttaagtgaaagatgaatgcatctacaccgtttgtcatgacttaagatataatttcccacctctaaaccctcacactaaacaagggatatctagtctcacttaaactcccactcttaattccctccaaaagacaaacaagggaatggcactaaaaatcatattcccaagtgaattccctccgccaactcccaccactaattccctgggttgatttcttggagcttctagtatgtcgtatagaccagtagcaacaaacatgctagctttgattctctttgattcctccacacttccatgatattgaaaattctattagtgaatattctgtcacgtcaatttgatttcacataatgtttgtcttcatatggactaaccttctttgtaatatttccttcaaaacttaggttggaactcctggccgtcttttggaccatttgac

SEQ ID NO: 112344 - DNA, 498 bp, Setaria italica
  Intron number 2 from transcript Si021312m (locus Si021312m .g) derived from phytozome v7.0 (chr-ID scaffold_3; pos 21 577378 to 21577875)
gcgctgccttcgctctgggtctcctagctgtaaaggttccttctgatttcctaattgagttctagtctaaatttttcttcccttctactgcaattgcttgtattactgtcaaatttgtgctctacatagggctgtgaatttaaattcaagtttcctgtgacatagttagggacttcaacttccccatacacagtaatcctgaacctcctagcccgcatcctgacgcgtctgcatttcttttaaactgtagtaacatccaacctaccaaagtgatccttacttggtgtctcgctagtcatctctagtaccgtttacatagaaacttaggaaaagcatatcctagtctccaataccctataggaatccttgaataattatgctttgagtgtgtatgcttcactgttacagttttcatcaagttataattgtgctttgagcaatttagtcatttactcggtgtcttgctgcaacagcctgaacatcaacaacttattgttg

SEQ ID NO: 112345 - DNA, 1010 bp, Setaria italica
  Intron number 1 from transcript Si012154m (locus Si012154m .g) derived from phytozome v7.0 (chr-ID scaffold_7; pos 21 617056 to 21618065)
cggcgccacgcacgtctacttcaatcatctctacggtttgttcctctctagctcagtttcttctaagcaaagttctttttatattgttattggtggacggtcgtatccaggattccacttggtatgttcatgcttcaagattgactttgaatttggctcgacttagatgaaacaaagcaagtttactttctttctttctttttttttcatctgatttgctccatgttgagcggatctgccacatcactctaacaatagattattaaagtagtgcttgatttttttaagggacggcaagagttttgccgcgaatttttttagacgaatatagtagtattaacgtatctagtagcataccatcagaatccacgtgtcaactgcttcacaatttaacaactttgaaccctggtctcaagtcttgaatcttgacacacctccacatgtcaaatgagacgactcacctcgagtcttaggaggactaaacatgagctaattataaaaccaattgcatagatggaggctaatttgcgagacgaatctattaagcctaattagtccatgatttgacaatgtggtgctacagtaaatatgtgttaatcatgaattaattaggtttaatagattcgtctcgcgaattagcctccatctgtgcaattggttttgtaattagtctatgtttaatacttctaattagtatctaaacatttaatgtggcagaaactaaactttagtccgtggaaccaaacacccgctaaattcccagcatttcaccgtctccttccttaatccaaaagttctttgcatccccaactaacaatccgaatgaggtataggtatatgcccaattccatatatagtagtaggagtactttagttttcaatccattaattgcttgttctggaaccaagggatctttgctttaaacctttgagaccaccacatctagctcaataactgtgtcaccatcttttcagacccgatctcactggtcagggaccaccggctgaag

SEQ ID NO: 112346 - DNA, 1001 bp, Setaria italica
  Intron number 1 from transcript Si007651m (locus Si007595m .g) derived from phytozome v7.0 (chr-ID scaffold_4; pos 54 50455 to 5451455 reverse strand)
cccgcgcctccccggagttgtcagctcgcaagcaggtacgccatctccccgctcctgccgtccctcgcgacgattcggggccgcggcgccccgcccgaccctcgcgccgattcggatcggcggcgttccaccgatgtcggagcggaggtgccccgcacggccctcgcgccgattcgttgcgaatttttgtttgattggccccgttcttgttgattgcggagggtgaggtggaaatgagtaggatggctagggttagtcccaaaaccgcctttctccatatccatcaccagaacggaaaatcgagtcctacatggtatcaggatagagagatcaagaatgaagagctagtttttctaagcctatctatttgattcagataaataagcctaaaaaaacaagaatatgttcctaatttctgttttaaattcttgtgcccaaacaggttgtagatgaatcattactacattttttgcgcgattgaaagatgccgatgattgaattgtaagagttggtcaaatatgatatcttatttttaggttgtgctgaaacgcaggttctcaatgaatatcgggtgtgcattagaattccctgatcacttggtcttagctatgtattgtattcttatgggttattcggtactccctccgtcccaaattactattcgtttggcttttctaggtacatagcttttgctacgtatctatacatgcatagcaaaagttatgaatctagaaaagtcaaactgaatagtaatttgggacggagggagtagcttctatatatctttactttgcataaccttttgagttggccgaagatctgttgaaatgtattaggtcaatgggtaaatctcttgcacaatacatagtttacgttggatatctgctgcaagtatttgtttcttgtagctatgttacatctagaaactgcacatatctgttgtttaggagacttaatcactgtttttttgtttgatttgaaggaagacaagaagttgaaac

SEQ ID NO: 112347 - DNA, 974 bp, Setaria italica
  Intron number 1 from transcript Si011705m (locus Si011705m .g) derived from phytozome v7.0 (chr-ID scaffold_7; pos 21 394988 to 21395961 reverse strand)
gtcggggacgcctcgctcgcctacgtcgcagcctcgtaagtcacgttgtccttgctgacgcttggtctgattcaatcatgaaatgttcattcttggcttgggaaaattcgtgttaagttgtctgatgcgcgtgagccacattggcatggcatttcacaaacgtaagatgataatggtctcttctggaaccactgtttccttataagattgcaaaattgtcacaattttttttgcataagattgcctaatggcgtacaaatcagccctgccgcgggctacttgctacaatgctgctaccagaagctgtccattttttgcataacactgtaaattttctgaatcactcagagagtctgtttgttgtaggcttgtagctcatacttattgacttgcctgtgtcaacttaattcctagaaagggaggaacagctgatgtatcacacatctcatgagatgttctgctctgtatgttttcatcactctgtgttatcaagattgttagaacttagaacggtaatatactgcgttggtcctctgtgagcatcattatttgaaatttctgggtgtatccctggttctttgtaactggagctgacaaccttactcacttagtgacagaagctctggcttttcatgatgcctcttaagagatgtcgatgcttccctgactgatggtgcgtaatacctttgtactatggcctaatttgtttgattaaggcttgtactgcttcagtgaggacttaaggttgcatagggatatgttggtcatatactcagacagtgaactttttttttaaaaaaaaactgttctgtgctaccatgctttcccatgtacgtttagtgacttatgcagctaatagttgttactttaaatttttcagttcggtgtactctgcaaatatgacatccaaatcacattttttgcaactaatagtgtttgatgtttgcttctgttggacagcgggaggctactca

SEQ ID NO: 112348 - DNA, 806 bp, Setaria italica
  Intron number 2 from transcript Si010923m (locus Si010923m .g) derived from phytozome v7.0 (chr-ID scaffold_7; pos 27 670244 to 27671049)
acgacgatcttgcagaagttcttcaagatcaggttgggtaccatttcctgttctccgtttaattggctggccatgtgttcctcttacgtgtgcttctgatgttgtgggaagcctaaccaacttagtcaaaacattacagccctttcctgaactttatcactataaactaggtggataaaaacaatcgagtgttggtgagatttaccagaaatggttagttgatgcttgttttgaggaatcgattgtaactcgtaagcactagttatgatcttgaatcctagatttgtaaaatgggctgactgaaaaaaaaattattactgttttgccgataatatgcattcacacaggtttgtcatggactcatggtaaaatagctgattcataaatttctgttttactaggacgataagctggaaggttgagttcttagctcaaagttttttttttgaaaagcttggcaggagcgctgccatatcatttaagaagaagaagcaaataagttcttacatagtgtatattacataatagaaggaaatactcttgcataaaggaactaacatgaagaaactaagaaacactaggcccttctatggccaactcaaagttagaatccatggaacacccattttcatgaaattggcaacagtgtgaattgcttaccttttgctgcatggtgcttatgaccatttttttgtagtgcaactgttcagcatcatttgacaaatatgacagatatatatattaacttgcctgtttgtgcactctgttcaggaaatattgtatcaattaattcaaggaaataaagg

SEQ ID NO: 112349 - DNA, 710 bp, Setaria italica
  Intron number 1 from transcript Si024941m (locus Si024941m .g) derived from phytozome v7.0 (chr-ID scaffold_3; pos 47 65995 to 4766704 reverse strand)
cgcagtctcctgtcgcggtccgctcccctccaaaggtgcgtttgtcatcgatcttccagcgttcttggcccgattaattttctgcatccgattgtttcacttcgtgcgaaaaaaaagcattctcccccgaccatggcctgggggggagataccgagatttcccttttgctatttcggagattggttgatgcctgttggtgatgtcagcccatgattgccctctaatgaaatgctgatgctttgaattcaattatccacttgttcgtgttgggatatttccttttcttcgaccgcaacagttgttggatccttggaggaaagggaataataataatgggaaactcgacggactattcttaaaaagttactgcagcaatgggaggaaacagtattgcaaggcatagagtaaaatgtcataggcatctataccgtaaaattgatgttgacagaatcaaaaagacatatacgcatccagacaggcggcaattggtgctgtagcagctcgtccatcacaatttatgttcatttcagattagggaggatgaacataggagtcttgactttttctgtgttaatcgatcttcttggcatgtgtttactatatccgatatcatgtgcaaatgtctgaaagtatcattcgtttttagaaactattgcttatatcattctggcatccttacattgacagatgatacttgattaggttggaa

SEQ ID NO: 112350 - DNA, 799 bp, Setaria italica
  Intron number 1 from transcript Si010603m (locus Si010603m .g) derived from phytozome v7.0 (chr-ID scaffold_7; pos 31 928507 to 31929305)
cctgctccgaatccacgcccccgtcaagatctgcggtaatcaatcgccacgcgctctgcctgccctggcgccgccgcctaattcctttcccgtcctcgtttgggatgctgccgcctaattcctccgtctctcggcgtcgtggttcctccgatgtggatggggaggggaagcataattcggtcgtgctatttttggtttcaattagaaatgtcgaatcatagtgggatttgggtccgggattagtgcggtgcccaatcgggattattgacctgttgtttagatagctgattagtgctgggtctggctttggctgtctgcatttcatacgtgtcccgtttgcaagcctgagggcatgggaatgaatgatggaatcatcaatcatgggcgagttggcaggagtaatgatgtgtggttaggtaggagtttgtgccacaaggaaactcaatcgagtggctgtgccgtgccgttctctgtttatatctggttagaatgatgttttgtccatataactgcttgaaaagcttttcttggcccccaaaaaaatacaattatagaaaataacattatcagacacttatgcactacctgctttactccctgttcatttagtaacgtatacactgagaggctgtctgacccttttgagtttgagtgcgacaaattcacttgtgcaattgagaattatgttggtgtaaagatgtagggctcctttccccatgtgtttattctataaattcgtttacatctctatacaaaatgtcttcgccttatcaattgtgggatcctgcaggtgatatcc

SEQ ID NO: 112351 - DNA, 420 bp, Setaria italica
  Intron number 2 from transcript Si021058m (locus Si021058m .g) derived from phytozome v7.0 (chr-ID scaffold_3; pos 41 133664 to 41134083 reverse strand)
aggctatcccggtaggtgcacaaactgcatttgtttttatggtaaaggcagggaagtctcaaatatatgtacttgtagtgaactgatgaatcataccatatcgttaatataatatcacaactgagaaaatgtaatgattactcaaaatcgtcaaggtcacaatctcttagagccttgcagcatgtcttgatggttcagtttgctagtcttaaatcacaggatcttcttcttctttaatataatgatgcctagctctcctgcatgttcgagaaaaaaaaatcacaggatcattttttgcatatatgtttcatgttaataatgtagttttgtcaagtgttataaagcaatgcacctctgacacttcatttatggtgttcatttgtagaaggaagcaaacagcaattctccaactggaaaggc

SEQ ID NO: 112352 - DNA, 714 bp, Setaria italica
  Intron number 1 from transcript Si022296m (locus Si022296m .g) derived from phytozome v7.0 (chr-ID scaffold_3; pos 18 518553 to 18519266)
caggtgacccatcgatctttgtctcatctgaccgatctcgtataaatttggaggcacggctttcattgctttctctcttccctagctatttcctcttccgcgcaatcagaattcagaatcaatttctgtgttttaaattgctggggatgcttttcaagtacgcgtgctactacttgacttcgtttaaattaatcattccgtcagttagcactctaaaaaacttagaacatgcgaggtggacatacggcttgttatttgattggtgccttgtaaagtgtgaactgaacagaagtcgcattagtccagcaggcatggcatacacaaatgtccagcacctctaactcggcctcttgcatgcacatgctttgctagctaccaagtgtttcatgtgtacccgcaaggaatcaaatggaaagggacgatggaattaactgatttaaccccacaaggccacaataacgctgtgccgacatgctaagcttcagttcacacgcatttccccttcgtcttctccaacatgatgacaaggacaaacacgttctagctaatgtcgcgcaagaacatattccttgtttacacttcacgtcgaattcttttaacaccttttacgttgttaatttcttttctgtatacggaatctcaacgccgatgatgttggttgatacatgcatgcatgcatgttaattctctctcattttgcgtacgtacgtgcag

SEQ ID NO: 112353 - DNA, 855 bp, Setaria italica
  Intron number 2 from transcript Si011015m (locus Si010907m .g) derived from phytozome v7.0 (chr-ID scaffold_7; pos 29 750887 to 29751741)
gcggaacaggtaacgcgctccttcccgcgcttcttcgcgtgtacctctgctcttcgtcgctcgccgtcactcgctcgggccagttcgatatgcgatgcgcattcgcgttgataggttgagttgctctgatctggtcttgtcccgtgcgctggtgcctgcggctgctcgtgtgtttggtttgtcgcgatctatcgattcgatcttattgatcgaccgcaagcctgcatttttgtgtgtgtgattgcgcatcggtgaagtctttcactagtattctagtgatgcaatccttaatcaggtcttgctgttcgctgcggatttgtagtttaaagccccacgaacttgatgaggcttcgggatttgggttggactagatgcggtaggttttgtactggcacttgcaaatctcacttatcattttgtaatgttggggcgctgctggttactagtagttagagagacatggtcattctgttactagtaaactgtaaccaaattgaacttgataagatgttgtaacaaattttgattactgcagtatctttgtatgcagttttttgaactcccagtcctacctgtgccatatggatggtctagtgtcagttttactcttatttctttgtgcactacttatagtttctttgtgcgctacgatgtgatgcatttataacagtgttatcatgcacgcttattttagatcataacaattactctattagttagggattttgcgatttttcatttattcctttgtatatgcagtttcaatagtttgccgctagttgtgtcatagttctaatgtttgcatctacccattttccagactgagaaggcattcctcaagcagcctaaggtttt

SEQ ID NO: 112354 - DNA, 704 bp, Setaria italica
  Intron number 4 from transcript Si024868m (locus Si024868m .g) derived from phytozome v7.0 (chr-ID scaffold_3; pos 33 0030 to 330733)
actctgaggccagttctgcgaggtatttctctacctcagagttattacacagagccctgaagatgtatcaatgagtcctgtattgcatcgccatcttgttaagttcggccttatgactaaatctgaaacatcccacctatatcatgtttcatgacgtcacccacaaaaagctcattcttcagttttgatttgtaaagcttgaaagacactgatggcagaactcctgcttttggtttaaaaaaggggactacatgcctgattagtgtagattcgtataatatttctaccataatttgttgcgaggggtctgcagccataggtcaatgggaagagttatgctgggagcttcttcattgatgtgaaagaataccttttgtagtcaccatcagtgcagtgatctgtgatcagggctagctgtgccgtgttctgattgttaagtttggttgatcatgagcataaacttctaggttataaattatcaattcagtatattcctgtattatgattggcctttttcttcctcacacacttttatattttacttctttgttctatttccgaccagtttggcgagtgctgtatttggaacttccctttggaaatcattctcttaaattgcttgagatttgtgtttgtattgtctgattcatgatactgccaaaattcacgttcaaatatccacaggagagacgtaggaattctcc

SEQ ID NO: 112355 - DNA, 788 bp, Setaria italica
  Intron number 1 from transcript Si021626m (locus Si021626m .g) derived from phytozome v7.0 (chr-ID scaffold_3; pos 17 887464 to 17888251 reverse strand)
gaagacgtgagtttatcgctatgatccgcttctcacctccttcatcattcgaagaaaataaaaacacgtcggtcctttctgcttccgtttcatgccgcaattatttcttcttcggcgagaagaatctaacgaccacctcatggtcacatcatggaggtggaggctacatcctccttgaatctttattcactgtggtggcacagcttatttcttgtgcttgtgatttgatgatagtagatatggcttgtgatttgagctcttttggatatgtttctttgcttattatatgcatcaaatcattgttttgcactgttgatgttgagcagcttctatcatttctttgttttttcccttgtaataactagcaacttgttgcgagtttgcgaggttcatgaacataaacatagctcagccgttcatgagcatgaaatcggaaaatcaaattccaacaggctgctcaagttttatcccgtacaagttttcaaaatttgtactcgataagattcctagagcttgtcttctttcggaacgatgctatatacatcagtctaaactgcagaaagattccgtttacgttgttgccgtgtttttttttgggttgaaatgattctatttcacggttataatttatccaagcaaactatttggtcgcatcctgattccttgatcgggaacatacatgcatcttcggaacatacatacatgcatttttggtgtgttctaacttctaactcaactacatcaaccttgcaggtttgcaggcgatacaaacagtactaccagcagct

SEQ ID NO: 112356 - DNA, 588 bp, Setaria italica
  Intron number 1 from transcript Si012164m (locus Si012164m .g) derived from phytozome v7.0 (chr-ID scaffold_7; pos 16 137436 to 16138023 reverse strand)
aattttttcccaaaaaacttgtgggaacaattcaggtttgcatctattctttacttcttgacaataaaatgatcccatctccatcttaaccatttcattgcttcagcagctaaggtatttgctgcttatcagctgtttagtgtgcttcctttaacttaaatagtacctgaggtttctattatccggatggtcccaacataaaacactgtttgtaccgtttgatgtaaagcttaaatttcattgtttatataatgctgttatatacaatgtgtgtaccttgcttgcttttcttttctctgcatatgaaaattttcagtcatcttgcccgaaagactaaattaatataagcgcacttgatgaagatggttactataaccataaataattgagttctttgtaattagcttgctctagaacttaaagctatcccactgaatatggtgctcttacttgcaacatgaagaaaaagacttcttgatcattttgtcaaaggacccgcaggaactcctcgtttctatttatctaatgaatttcagtttcatcaaaattttaatttatgtccacttctctatgtatttcagacgtttc

SEQ ID NO: 112357 - DNA, 753 bp, Setaria italica
  Intron number 1 from transcript Si025328m (locus Si025328m .g) derived from phytozome v7.0 (chr-ID scaffold_3; pos 94 48393 to 9449145)
acgggcctcgccttcaccctgctcggatacctcgggtgatcagcgtttaccaattattgctggcgattagcgatctcctctttctctgaatgtagctggcaccggtccctgccgaaatttcggatgctgcgatcacgtggtggttataacgttagatgctttgatattcttctatgcttggctagttagcttcagttttaaaagtttcgtttactgtatgcttggtcgacagtggttaccgtttggagaattgcatctccagcagatgattatgtatttacagttagggatgcaacaagtgggtacaaagtagttctgcttgctgggtcactcccttcattttattttctcattttctgttttgaaatcttaacttggttgtatttttgagccaaccccgagtaaaaaaacttaaacttacctaaattacagttgatgtgtagttgtgtactatgtgtggggtggtcaagggtaataatttataagaacctgtatctctatttcttaaggtgataagaacttgtaatattgggaccaagttactaaacattgttttgcattttttcgtctgttcctgagggatgctgtggcatcttttccatgcatttatcgaaatgttaatttatgttgctaactcaagatttgttgtcctttcagtacaacacacaaatgcacagcttcatgattgaatttttttacatgctttctgatttttcaggataggttatcggtggatatcgcagcttattgcgc

SEQ ID NO: 112358 - DNA, 955 bp, Setaria italica
  Intron number 1 from transcript Si023563m (locus Si023567m .g) derived from phytozome v7.0 (chr-ID scaffold_3; pos 17 330695 to 17331649)
ccgagcccgtcctcctcgccagtcccaacctcgaggtacggacttttatccccgaatcactcggttgcttctcgctcttgctcggagtaccagcttactgtcctgtacaaattcgggttggtttatccccgaatccctgcccgatttttgccctagatccccaaattctcactgtaatgttttaattgatctttcgtcgaaaaaaatgttttacttgatccttgcgatgatatgcgaggttctcatttacactgttttactgtcagtggcccttcctaaagaagatgaaacgttgaattatgttaattgttaaaacagaggggatagtattggattatttagaagttgattctcattctcagcatgagcattgaggttcgattccctaaatcattctttttgtcagtgaacatgatccatttatgtgtattagttcacttgcagtatgtgaaacgctcctcagtacttggtgcgtttgttgccagctgaacttttagtttgattttgatgctcctggttgccttggactagccatgctgcttagatccttgggtacagatgtatggagtttttaatggatagtggttaccacagtatatggtattaactgtataaaaaccaggcacatatatacataatgtctgatctctgatgcatgcatgtactgcaccagttgtctggctaccaagtatgaatttatagtctagatgaacaagaaccctgcaagcatagcagttttgatagagtcatgagtgaccataaactgagttagggaaaaaatgttattaattgcagttgcttcctgtatacccaaaccaagataacctggaattggaaaaataaagaggcttaggaatgtcttatgccagataatcacataatcaggggatggatgagggataagccctgtgaatttgcaggcagaggatcagtgctgcaaagactggtggaagaa

SEQ ID NO: 112359 - DNA, 530 bp, Setaria italica
  Intron number 1 from transcript Si024601m (locus Si024601m .g) derived from phytozome v7.0 (chr-ID scaffold_3; pos 47 957370 to 47957899 reverse strand)
accgcggacttctccacgtacgtcgtcaggccgtggtcttgattttgactcatgttgatgcataaatgatcgatacgcgagcgtctgcgtctattgtgttgtggaaaaaaaaaaactccatgcatgctaggaggagctcatgcatggtgcatttgggcaatgtaaaaataaacaaaaatgtgtctccatgatagaaattaagcgatgaaataattaaaccaaatgtttttggttcttatcttaccaagcaaagaagtggggaagcgaaaatgctcactaatgagccgctatatatatggagagaatatgtagtggaaacctgatggttaatggaaacttggaaacctcatgcatctagcagctgagatatgcttctcatgttctggaaaaagaaaaagataacacaagaaatagctgagatacgtgcatggtttgatgtcccatatgatcatatgcatgtactacttacacgcgcgccttgcatcaacaagtagtacttttgttcactaataactcgcgtatgtgcaggg

SEQ ID NO: 112360 - DNA, 748 bp, Setaria italica
  Intron number 3 from transcript Si023108m (locus Si023108m .g) derived from phytozome v7.0 (chr-ID scaffold_3; pos 21 500948 to 21501695 reverse strand)
tggttgcaatcacataatccggtttgttttcccttgaaacttttctggtacttctttggtacaggatttaggacaccttatttttcaactaattttagtaaactctttgtgtggaaatgtgcaatgtccatgtcgtccttggtcttggagttcagacagtaatatttatcaaccatatagaaatcacggcgaaactcccaaggtctgaacctaattaataatgtttcaatttgacttagcattttatcgataacatactgagttataagttcttttggcatcctgttcaataattatcctgacagaaatttattgtttatatatatcgtatttaggatgtaatcctcttctaattttaggagaaaagcttttttttgtttgttttactttggctagcagcatattattttttgttccaaagcaatgtttcttgcggtgctcaccttggcttgaatacctctgcacttttatattgccttctttgcaaaagaatgattttagaaaaaggccatgacgtgcgcttgtttatatgtgaatatagataaatggtggtattttgttgaggcctcacataaacaactagttctgcacttttacattgccttctttgcaaaagaatgattttagaaataggccatgacgtgcacttgttttcttttgtctgatttcggatatcctgaataatttaactaagccctgccttcatctcttagcaaaaagcatttgaagaggcaaaaccagtaattgc

SEQ ID NO: 112361 - DNA, 957 bp, Setaria italica
  Intron number 1 from transcript Si022499m (locus Si022499m .g) derived from phytozome v7.0 (chr-ID scaffold_3; pos 61 47124 to 6148080 reverse strand)
gccccagctacgtcccggacttcgtccccggggaggtactgtgtctgcaacgccctgttatctaatctctattctcttctcctctcttctctcttctcttctctatataaaaagactcaaaacttttgttgttactggtctggtcataaactactccgataagtcgtgttgtatagcatctgcagcagcagttccccaataaatatttctcaataactagttaataaaataccttaatatcattttctctattattgcagtcttccaataatcgcatcccaatccaactactctattgggagagtcacaactcctcctttatttaaggagagttgggtgaattactggtttgttccaataattattaggaaaagagaaagataaagagaggctgctggatcgctactttattatcaattctcccaatatgttagtttgattagagaaagggagactgcttgaaatgctccgagactccaccatctgtggtttcttcaggcgttaagactctgtgatgactcctagtcaacggacaccagagatgatgcttagattttaggggatataaaaagtaagagatttttttattcgtacggttcacataggaattttagaggacttggattatcttgcttgaattactagggaaactttggtgaatttggaagcttgtgttcagatgcccagattttctgactaagcgaccgtccgtggtttatcagcatggaaatctgttcttcgaattactaattggagctaaagatgggaaatttttaattactgtccagattattctaaggaaattgggagtttatttctttcaatactctaataatcatcttctgcactggagatggatccacgtacttatctttttcagatggggaccttacaattctgtggtctccattcgtacaaatcttgcaggttttggttaactttggtgtcggcaaggtg

SEQ ID NO: 112362 - DNA, 978 bp, Setaria italica
  Intron number 2 from transcript Si023691m (locus Si023691m .g) derived from phytozome v7.0 (chr-ID scaffold_3; pos 20 052472 to 20053449 reverse strand)
acactttgtacgagtacctgcttaaccctaagaaggtattgttacttttctctttagttactgagatgctttagctagtctcttcagtgtttctttgttggtatggaaggttaaggggatggaaatgatgctctgtcacagttaactttttgtgaaaaatgatcccctggaatgtcttattgatgttcttttaccaatgagaagtatgccgcagtatcaatgtcaggaagtatagttaccttgcaaaaccatgtagagtacctcgaaaggtattacagctggataattgattttctgatgctaccttgatcaattggtcctgttaaatcttgataagaattgtcttgtgagttgtgaagatggatggtgccaaataactggatgaggcaaaagtaaaacttgcaaaagtgagttgtgaacatggatagttcattgtaaccatgccagcatgctgttagttgattacactcaaataactgggcatttggaggttaggatgacgttcttattaattttagcttactagtaagtcttgtttgatctggtgttttgtagattaagctttcttgactgccaagtgccagggtcacatgagggattcttatttagttattagttgtcctagtctattaggttcaggcattgagttgcttccagtaatcaggttatatgctagtaacttcgatgaaatccccagtcctttagactgtaggtcactgcatcatgtgccaccagttttatgcaacactattgaacgccccctgatctaagcatggatcagtagcctaaacaagtactgttgtagcggcaggccatggatggttgccgtaacaacttaacgagtatctcccacctaagcccaattgcatttatttggcacactttgtttaaatgtggtttctatttctgaactcttatcaatactgataacgtgaactgttctatctcatttatatgcagtacattcctggaaccaag

SEQ ID NO: 112363 - DNA, 928 bp, Setaria italica
  Intron number 1 from transcript Si013127m (locus Si013127m .g) derived from phytozome v7.0 (chr-ID scaffold_6; pos 16 85608 to 1686535 reverse strand)
tcccgcctgctgagccacctgaggagatcaacgaggtgagtggctctgcctgttcatcgttactgctatgctgtcagttagactaccgtattactagtcgcctgacatgattaaggtcaaacgtcaaaattgaggtgtctgttgacttgatcttgggtcaaatgacctttttttagctgtggtgaatgacacatttgatgttctcgcatgcatgtctggatgccaatgccaatgacttctctgtaagactagaagtagaaactgaacttctggttgcacaagacaccatagcattgtctatccctggttgtaaaattctgttgtgtgacttaataatatcatgtgaaactcatgctgtcatgcactagttttctagagtcttcagagggataccaagggcatctgtttatggctttgcaaattactttggttctgaaaacctatgaggtgtttggagtcaacaaaccttggatctttggaaaccatggcattgttaaaactgtagtctttttggttgtttagaaactccactgacgacctcttttttctgaactgtggtttaccacactgctggtttctaaaactacagtttctccataccgtagtttttctaaactacaacatccaaacaggctcagtttaaatcttaataattgtgcattagcttactttgcggaagcaccttgtattaatgaggttttttttgtctaccttatgcatgcgctaaacactatgtttgcctttgctcccgccttttcttatctgtattcaatcaagtttggttgttgaatgatgcatgtaaatattgaacagtcaacagtccatagcatcctatcatctgccatttaccaatgcctttttgatatggttctgggttcctggctttatgactatatgatgataattggtttcatgcaggttgcagttg

SEQ ID NO: 112364 - DNA, 973 bp, Setaria italica
  Intron number 1 from transcript Si010172m (locus Si010161m .g) derived from phytozome v7.0 (chr-ID scaffold_7; pos 22 920896 to 22921868 reverse strand)
acgtcttcgcctcgccggtgacgagcacccaccaggtatatgcctgcccctgctcttcccttcctgctgtgcgaaacggagcgccccaaaccctaaaataagctatctgtattcggatctgacccaattacaagtatacacgtgtattatacctactaacttcgatttttcttttgctaaaattgtcgggtgtacatgtgctatactgggtccgcccctgagtagctgagtacaatcccgcccctcatccatctgcccctagagtgctgctaaggggttggccaatccgcttatccctgtccgggtgtctcagacaataatccatgtttgatttgatttgtttgtttgtcgctgcgtggactgtttctgtttccatatgtgctaggttcgtgaaagatggtgcttcctgagaggaaatgcgtggtatatgatcagatggtgcgagtgcttcatgggatgccataacctgcaatccctggaattgagtgctgcatagtgtcttggatataccagttgaaatgttagttcaatgctaattatatggtttaattctcctccctgtggaccttcctgtgttgtttttaccttaaaatggctgcagttgatgtatgcagatcctagcaatgagttctctgaccataatgtatatactgagatgatgggtttttgagtccatatggtggcagttaggtttgtcttattgtattgatgtccagttggctgtaattcaagcttgtaaggcttggaagagtcctgtgtgcactccatcgtgcataatgcatgaattatttacatgctgcaatcttcctaatgaaaatacaaatgtaaaatttgctaagtgattctgtaatctcaggaggatgccatgtcaattaacctgatgtaattatatatgtttaattatcacttgaatttgttgaaagcgcattttcttttcagcttctctataagcggcatttcctttttcaggata

SEQ ID NO: 112365 - DNA, 515 bp, Setaria italica
  Intron number 1 from transcript Si009159m (locus Si009159m .g) derived from phytozome v7.0 (chr-ID scaffold_7; pos 87 23959 to 8724473 reverse strand)
ccaaaaagcacaaccagtctgtccgtcaaggtactgtgagattttattttccgattcaagtaaaattttgctttgatctatatatgaaagaattttttcttggctgatgttatttaacattgtaatgttgaaacctcaatatgtatgacatagaaagtggtagctgtggaacttgttctgataaaacagtattgcagcaagcctataatcttttcattttctggtaattgagagtaacttttaaatattcatatgatgttctcgtaactgcatttatacacatatctgtaaaagaaaaagtattttgcaagataacatatgcagtacatcaaattacatatatctgaacctttattttccttacgtattcattcctgttgaaacaaacttttacatttttttgtcagtgaaatatgcaaagaaaattagattgtagttgttaggtagtaatgtagatgtgctcagttcgaatgtttgtctgcatgtaggtcttgctggcatcatcgacctcccaa

SEQ ID NO: 112366 - DNA, 726 bp, Setaria italica
  Intron number 1 from transcript Si020975m (locus Si020975m .g) derived from phytozome v7.0 (chr-ID scaffold_3; pos 50 021159 to 50021884)
ttgcagaagcttcagagagaactcgctggaaagaggtacttttagaatttaatttgatgttgattcactcatctcaaacacgcacactggttttttttcctcacacacgctcaaaatatgtgcattacccttgagaataacacgtaattgaaaggataagtaaagcacatgcaaactacatacacaaaattcaacttcaaacttagatccgcatacacttttaattgctagtgctagtgaacttcgtacacttgaagaaactatgaaaaatgtacacgcacacatcatgtcaagtcgtacacagaaggcaacatccaacattttttttaattaaggaaaaacatccgatcttgaacattcacacgtgaatagaaaattttaggatcatttgatcaaaaattttaagtgaatagatcttcaaaaggttagcaggaaaaaaacatttcatctttttctgctccctcaactcatgctaaggagctgcaaaagctaacgacgcctcttgttttgaggccccagcattgaaatcaagaagacaacaacgcctcaccactggcaagttgccctctagatatgcacggaacttgcacatctcacataccatttacgcttcctctggtggcattcacataacttaagaaaaagacgtacacaaatagaaacgcactaatgacatgattatttgtaacaggtatcttcttgtattggacgacgtctggaataagg

SEQ ID NO: 112367 - DNA, 702 bp, Setaria italica
  Intron number 1 from transcript Si009836m (locus Si009836m .g) derived from phytozome v7.0 (chr-ID scaffold_7; pos 50 76671 to 5077372)
ttgaggtcagtatagtatttctgtatctatatacttcttggaatcatggattttgcagcataaaattaacctgaatggcaaaatatctctatccattggatgaaattactacatgaaatttgttgcatcggaagatattccacttttttctttcctcgtatatatccttttgtcaacaaaagctgtaacgccgacgtctttcgagctgaaaatgacaagtgcagtccaaaaacgcaagctatgggcgcgatccggtgacaagtgcagaggttggaagaatgcagcacaaacgtccaaggtggcggcaaacctttgctggtcgcgcacctattagctcccttacgtgttagatttgaatgaggcagctgtggtgaaagcttgcgacctgtttcaatgcatcatggatgatgcagaggagacaccggattggactttccggtctatcggttcccttcattagttttaaattttatataaaggctttatatggactttatctgaaaattgagactatccgttcagtattataattagaatcatttgtaattaaaaagtcaaaaattctatagaatgaaatagagctataaggataaaaactgttagctttttcccctttaaaagatgactgttcctgcaacccagaatttcttcacctttttttctccagatacacaaggcagactttgtcattctctgcattgg

SEQ ID NO: 112368 - DNA, 768 bp, Setaria italica
  Intron number 2 from transcript Si023360m (locus Si023360m .g) derived from phytozome v7.0 (chr-ID scaffold_3; pos 11 562035 to 11562802)
caccagtaagcaatttaaggcgatcgtcgggaaaggtaattcagtgcaaagtatactgatctacatgtgtatttcactgacctaaaccttgattttcgcaattttgaccttgctcagcaattttagttcccctcaactagctctgatttttagttctcctcataacttaggtctgtacttctgcatgcggagaaattttgctcatgttagccatacctggcaccccttgttgtgtatatttgaactcaaattcctagcatagtttgcctgaatataagtctctgacattgagttaggccattctactgatgctgttgtatctgatgatttcttctctttcttgctagctgatttacttagttatttgtgtatcaacttgaacataatcaaagaaggtgtcatctttcttgtcattggtctaagtttttttcgtacttcttccgaactttcctgtaaacagtacaatgaagtgttgtactgctgttgctgatgcttttgagcactatctatgtatagtggtatcaaatagatgaatgtgaacccgctctctgaagtttctctgttcttatttgtttgtaccccttgttctgagttaacgttttgtaagaactaactgcttgccagtttctgtcgattttctcaatcatatgcagctaaacgaaacctatgaatggataattttatattaaatttgtatctgagtggaatcaaagtatacgtgcatgttttgaaaatacaatgcttctctctatttaggccttattggtg

SEQ ID NO: 112369 - DNA, 459 bp, Setaria italica
  Intron number 3 from transcript Si014419m (locus Si014419m .g) derived from phytozome v7.0 (chr-ID scaffold_6; pos 88 5736 to 886194)
caacaggaaatcaatctgctccagaagggtctgaggtaattattctcacagctttaccttacagtttgtagaaaacaatcaaatcagctcctgtttccagcacacgcaaagaaactcgataaacctctatgtttgctaacaagtttgagctgtgacatggattcggtacattccatgtttttgtctacgtgtagcatcactgaattaccaaaccaagcaagcaacataaaacatttgtgtgaagagacagaaacttcaaaacctaagaaactaacccttgcacttcacactaaactgttcaatagaaaaacatgaactaccatctcaaaataggatttctttaaaaagaaaacaaaagaggaaacaacagagtttgcttacagcatcacacttcaattctgccattcatgctgacaaacaaggaacaattctgcaggtacatatacgggaacagggcaa

SEQ ID NO: 112370 - DNA, 851 bp, Setaria italica
  Intron number 2 from transcript Si021960m (locus Si021960m .g) derived from phytozome v7.0 (chr-ID scaffold_3; pos 38 067378 to 38068228 reverse strand)
caacgaagaacatcctctgcagcgattgccggggggtatgaatggctcttaaattctacagaatgattcttgcagttcgattaatatttatgactgccattgccttatccatatacacacatacagtacagttctatctgagtcgcactattacatagctcttccttgtttttaggatttcccttgaataagtacaagtggtacaaccaaacctgtcacattgagcaatcttaagtcttgttccctcatgtttatttcagtatcatgcaggtgtatgtttgtcattgcagtgcctgaccatgatgcgctgggaaatccagtttagggcttttgccaaaaacattaagcatcctaggagccactaccaattcataaaagggtgcactaaagacaacccataaagcctgataaaccactaaatgccattggtaacttactgcttgtaggttgaaagttgacgtagagctccgtattgacagataaaaaaaaagttccaaaccaggactcttcaattaagcttgtccgagtgggttgtcaatatgtggagaaggccataatttatgtttcagtaggtttttctttgttcatcccatgatgcaaatgtcagcagacattctttcattatctaaaaagaatgctttgtcaggttgtttatgtgcacatggtaatgctttagataaatttaaatcggttttttcttcagttaactgttactacttatctcttaacctattctctgattggtcgaatgacatgattctttgacatgcctcttttgctaatttttctttatcctttattccttttatttacaatcaaaatccttattcgtatcagggtggccagactgg

SEQ ID NO: 112371 - DNA, 392 bp, Setaria italica
  Intron number 3 from transcript Si021575m (locus Si021575m .g) derived from phytozome v7.0 (chr-ID scaffold_3; pos 71 83881 to 7184272)
aggtctgtggttaagtgtgtttcttttaatccatgttcacctgttttgttaaaatttattgtttgcttacttcactgttctctgggagtaaattaagaagttgatatttatgtttacaaatatcattgaagggtacccaaatgtcctacttatttcatttcattgtgtctcttatttgtttgcaaatgatttttctgccgtagatagttcaatctcatttaatggttttcattcccatggtttgtcattatataaacttttcaagtctttgactacagtgagttgaagatccattaacagtagttgcaattttaatggtctatgtttgatcattgttatcgttacagctgatcaactcttttcccttgctatgactgcagaaagattcactc

SEQ ID NO: 112372 - DNA, 863 bp, Setaria italica
  Intron number 1 from transcript Si021529m (locus Si021529m .g) derived from phytozome v7.0 (chr-ID scaffold_3; pos 20 488182 to 20489044)
aattcccgccgcggcaggaagcagctcccggtaaggtatccacggactcccttcgcgctctctttcttctctctcatctgcttgcttagactgatttttcgttcgcgtggttaaatattgcggttcttgttgagggttcttgaagttgagagatgctgcgagttagttataccgacaaaatcgatcaattttgcgttttcgcggagtactgtggtggaattttgggagataaaccctgtgcatgttgttgctcatgtgggtttgtgctgtggtaatcagatagtcccttttatttgttataaaagtaggactctgggtgtgaaatcggagggaaagatggggggtatgtgtttggatggtgccctctttccgaagatttttttcttagattttttttgcttctgaaaagttgggtacctttttgcggttagaggcgtttgtgctaggtatgagagatcaggatattaaacaagaactgccttttgagttttgatgttttttatactacaactgaggactgattcacgagctgcttctatcagatgattcatgcatccggttgcgcttattctttgttgcaacaatcttagccgaagttcccaactctgtgttatttgcttgcctgtgtgtggggactggttctttgctgatgttgcctgtgtgtggtccatattattgatattgtccatatcacgtttgaatcgaattttgcattttaggtagtgggagatagaagatgcatagcgactttcaggtccccatacggttgctgtcaccaattagcatgcgtgtttctaactttatggtttggattacgattttctgtaggtgaagtttgagtcaaggagaagttggattagtct

SEQ ID NO: 112373 - DNA, 964 bp, Setaria italica
  Intron number 2 from transcript Si022038m (locus Si022039m .g) derived from phytozome v7.0 (chr-ID scaffold_3; pos 23 427232 to 23428195 reverse strand)
atttgctgctgcaacaaggtataatttcagaatcctatctcacttttgttcatgatctgagatgctcttagatacgcatgtcagtagtccagctatattcgtttgcactcaatggtactgtctgtttctttgtaagtttgatactctacattttgattacaattttatgtactgaacttttcaaagtgcaataagctgctattgcttcaattaaataaccatctttttcctacatatttatcctagatcgtaatagttcccattcattaaattgcattgagttatagaatattttctataattttgttatgagtttgttgttaaaactgttttgagcaatttttggagttattggaagcacaagtgttgcatcattaaatttattcacatgattgttattgttttttaacttaatgtactgtgttacaatttcatgataggataggatgcattgacatagaccttgtgaaatctgtattttggacttgcaattttgtgttacaccctgcactagctaacttggatacgtttgagacaagttgagactaataatagttgcatcatttaattataatgaaatctgttctcgcatatatacttgtattgcatacagaatgcaagcacttgttgcctcatttaaatgtcttcatatgattggtattgttacttaatgtgctgtgctacaatttagtaataggatgtgttgacataccttatgaggactgtatatgtacttgctttatagttcttatagcttgcactagctaacttggatatgcatgtgatatttgatgatctacctatttatatttgtttactttgagatgccactttaaacaagtttattccctaaagaagtgcagtgtagcagtttttgattgatgtaatgttcttccgtgcttagtgtttgctatgatctcttccataagctaatgatgatcttatgtttctattctgtttgtag

SEQ ID NO: 112374 - DNA, 519 bp, Setaria italica
  Intron number 2 from transcript Si020986m (locus Si020986m .g) derived from phytozome v7.0 (chr-ID scaffold_3; pos 44 012745 to 44013263)
aacagaacccttcagccccaaagttaacgtagtcggtaaactccctcagccgttccctcacaaactaacttcactatagggtaattaggttcacgtgttaagcattctaattgattcacaggcaacttaatgttctctgataagtcgctcacaagcaatctccatctatattgagcctgcaatagataaatccttatatagtacgttcattgcaaagcttgtattatgaccactcatcaacattgggcacttattcaagatgcaaatattcttatctcctaaattggtatatatatgccagactctatcagcaaaccatgaccttgcaatgatacatatggttatatccttgtaactcttctgtgttcttgttcttgggttgcatggttgtaaccttccaatcttttgattgaattgattgcgagtaagtactaaaagagtgcaacaggaactttaatgcatagtttttggctccaaatgtactgacatttatttgatggtttgtcacagttggtgcaa

SEQ ID NO: 112375 - DNA, 796 bp, Setaria italica
  Intron number 1 from transcript Si010255m (locus Si010255m .g) derived from phytozome v7.0 (chr-ID scaffold_7; pos 28 605176 to 28605971 reverse strand)
cggatccggcaaaaagaaacagctcgacgctttgggtaatatagcctgcaccagctctctgctctgcccttttttttttgtgttcgcaccggagcttggctcctagttgtagttgtaacgcctgcaaaatgtgggcgtggacgtatatggcctgatttctggaataagtttgtgtgcctttttctttctgtacatttaattaatggactcggcgcaagaattcattttttaaaaggattcccccacattctggggaattaaaaacagaacgggatggtgcaggcattttaataattttgggaagtacaagcattgtctttattattacgcacagtataaacagaaaagtagtatctgttcaaacatgagcctggtctttgaatattgtttttttttcttttctaataagaatatatgtgtgtgcagtgtgcacatacagaccaaagatggataatttttcccttgtgtctttctgtcttgcctcaatttatgacaatctctagcattttaccctttgccaacagatacgggcagtaaatatttctttttacatgaatattttttcaccaccatattgcatagtcagaatgttaatggtaatatcatttaacaggtgtgcttaggttgtttagttctgccttagttgaaattaattatattaatttagtgcagtagggataattagaatccaaatccatggagttgtaaaaatatccttgagcaactctttaagtactcactgtctcacctgtgcttctcaggatcgtcagggacatcatttactccccacataata

SEQ ID NO: 112376 - DNA, 1057 bp, Setaria italica
  Intron number 2 from transcript Si024280m (locus Si024280m .g) derived from phytozome v7.0 (chr-ID scaffold_3; pos 42 238755 to 42239811 reverse strand)
ttctggcggccggccagtacataccgagtgttcaggtgagtatgtttttctttgtttctttttttttttgggccggttgtcactagctagctagttaaatttgagcatcagaaatgatcatgccgccctgcgctgattttcagcccatatatggagcatctttttgttcgcttaatataccatcgatttgccctgtttagaatgtagggaagaaatgtgtatacaacgatacagaaggcggtataaactagtttcaaactacatttccttcccttgcactatgaaataggttaagtatttaagtgcaatcggcaatcacttgtgaaggggcctgcgaaatggaacctaactgatagctgcccattgaccatggggctccttatggatcacgagaaatagaaaacatatggataggaaaagggcaaagactatcagtctatcatgccccttggattcccataaggattgaattattgaaagcacgtagagtagtcaaaaggttgtgtttgatatatgaaaaacacataaattttaaatggtactacatggattaggtaggtagaaacagacaggaccgaaaaagagaaatgttgcttttgaaaagtcaggagaaatttcaagataagcttagactagcatcatcacctttctcctccaaatagtgtatgatatgaaagttttctacagaattcctctaagtcatcaacttcattcaaagaaggtgctaggtcgtggtttcttttcacttggatgggaattctgcaacatttttccatttttaatacattccaaaggggccctaaattattgcatgattctgataaataaattctaaacagcaaatctttctgaaaaaaaaaaagaaactcaccaaagattcaaaaagtgctgactgaaagctaattcctcttccaatgtaaaacaaaactacaattctacattcggatccctaatgttttacatttgccacctcctagcactgtctaagattccaatatttttttgtattctgcaaacaacaggtacccatttgatccatacgatcggctctggcagt

SEQ ID NO: 112377 - DNA, 454 bp, Setaria italica
  Intron number 2 from transcript Si023842m (locus Si023842m .g) derived from phytozome v7.0 (chr-ID scaffold_3; pos 10 987317 to 10987770 reverse strand)
tgggcagaatttcttcatcgcctgtgaggaatttcgtaagatctatattttcctcatcaatctatttcttttccatgtcactgttcaacatgtggagtttgacatcaggttttttttgtaattctcatgatttatctctttgaacttcttgtgtagctggaagatctattatctaactcctctttgaataaattttattttcttgtttttttgaaatcgccaatcacactttttttaagcccacttctttgatctattgcagatataccgctttcttattcaaagatacgttgttttcttatttgaacctgaaaatactaatatccttgtaaattgacaactatgtccgtcttcaagatcctattatttcatctgtcgtagatttataactttcatctcatgggaatttttttaaaaagaagtctatttggcaatctaaggagagtgaaagcat

SEQ ID NO: 112378 - DNA, 1028 bp, Setaria italica
  Intron number 2 from transcript Si022111m (locus Si021646m .g) derived from phytozome v7.0 (chr-ID scaffold_3; pos 47 227001 to 47228028)
tctcgcctactgcgtccactccaatccgtcttggggtaaggcgcccttacatgcttgctttggtgtactagagtgagggagttcaatgctttgaagtaggcagagtttgttctgttcttttacttggggtttcccctcctattcaactagcatgactggaaaataatttcgaagatatcaggagaaagatttgattacgggctgcttagacttgagctccagatgatttcatcagtcatcacgttgaatggattttaaattgggagtttccgttgcttttgtgactgtattatactcctagttgacatgctgttttctgacatgctaaatgtttctttgcctcacttttgtatgcgactttcctaatccagcctgttaatgtatatttatatgtttctgagaatttccacgaatgattgatttatttatggcaaaagccccttttttgtttaagagtttgttgtttaccagcgaatattttgcttatctgtaagtagcttttctcggaataatgtacctttgattggtatacaatagcttgttcagttgattgatgcattgatgttgcgaaagcccctgtcttgtttaagagtttgtcgtttactggtgtatattttgcttatctgtaagttgctattctcagaatagtgtagcctctgattgttatagggtagtatgttcagttggacatgaaacttaatgactcaaaacattccatccattgctatagaaagaaatggtgctgataaagtattgaaaaggaagcggcatggataataaattcctagtttttagagtaatggatgattcctagtcttgtctgttgccgtttttcaaggtgcatccactgtagtattgagttatttttgtatatcaagatatttaggtacaaactgaactgctggaaatgttactactcgtgtggatcctatacatgattaagatatggaaagtttatgcttactcagttacttttgttgccttaatcttcagttcaggtggcagcacttgcattccttcactatctt

SEQ ID NO: 112379 - DNA, 817 bp, Setaria italica
  Intron number 2 from transcript Si021608m (locus Si021608m .g) derived from phytozome v7.0 (chr-ID scaffold_3; pos 12 179831 to 12180647)
cgacgagcgctccgacggcgagaccgaccgcgaaggttacttgctccctcttctcttctcctccgcccctccttttcttgagccgttgagcgcaaggttctgaatttctgaatcgatctgtttgctcaagcttgcttttatttggagcgaaattggggagaattttgtccggaagtatgagcggtagccggtaggcgttgacggcaatgcagagcagttaacacagtgttgcattgaaagttctttcttgtacgctactgtttgggctctggcgatttgactttacaagtggattagaaaaatgtcgtcttgaataattggtcagttcacgctggattgcattgcttgattgataattgcattactaccttactgtaactgttcattgtttgcatcaattcgatatagtatgttcgtatgtaggtatgatcaactctttcgtgagaatgcttaaccattgtggcgtgggtagccggatagtagtttcttccaaccagagattccttttggtatattcaacctttttatggaagacaataaggctattaggcatttcacgttgcttttttggtaacttttggctgttcttttcatcttttgaaaaaaaaaagaatatcaggaatggtgatgtgaccatcttctgcttgacttcactatctaatgcttggggttccccacgttctgtatctttttctctttactgaagaaaatctgcattatatttttagtcactgcattttctttagcttaagtttttggattgattttaataatcataattagtgattgatgtatttttaatgccttttgtgcagac

SEQ ID NO: 112380 - DNA, 684 bp, Setaria italica
  Intron number 3 from transcript Si009852m (locus Si009852m .g) derived from phytozome v7.0 (chr-ID scaffold_7; pos 19 037044 to 19037727 reverse strand)
cgaagcaaccccttctcacttcaggttattgttctgtgtgctgctacccttcctcctcctactacttgccttgctcaagactcgagagcatttaccctcatgctcctctcttgtctcctggctcctgagggtgttcttgattgctttggtggagatttatttttccctttattatatttctataaaagtagatcttgtactcttgtggaacatgtcgtgtttctttgcaaaccgtgtccagttaagtctggtagctttgcagcaagggctgacaattataattagtttatctatggttgtacaattcgagatggaggaggctgcagtcaaaatgatattcaccatttatggagttttaacaggctagtaatacaaggcaccctgcacaggtcaaactcaaggtttctcattggtttcatggcaattggcatgtaatttgtctacctcttataaatttggctggacgtatagtcaaaacaattgaccaaaatagtaggaaggactaattcacacacacattaaattgttccttcgaacatgaaggagaactatatgtcactgtattgaagacgtcagaaaaagtttgcagtacataatcctatgtgcctttgctcacatgctaccagtaacaatcctactactatttcaggtttggttcgcgtttccattcaagtataaaggaag

SEQ ID NO: 112381 - DNA, 593 bp, Setaria italica
  Intron number 1 from transcript Si024343m (locus Si024343m .g) derived from phytozome v7.0 (chr-ID scaffold_3; pos 47 628803 to 47629395)
tggtgaggcctgtgatctcctgtaaattttcttaaactatttcttttacttattttccacgggagactggacaaattgaactgaccctttcatagccttgatcctgaagtttagttagaaaaatgaatgtatttggtcaaaatagtgcttatagcttgtctgaacaaccaaagcttctgctgatacttaggacagtattataggttttctaggaaaagataacagcactgacctggttctgcggtgccttcgatgtcatgccatccttggaggcttcattttggagatcccacctcacgttgctggtagtggcaacaatgaaacctacctaggtagtttgccaattgtggttgtgatattaggtgtcttcttccatcccgtgtcttctgttgcatggtgatcttttttttacaggaaatattaatttttcagattcaaagtatatcatctaactttgttgaactcgttgacaaaacattactcttctttggacttgtttagcagctagaagctacagttttcataaatgttaatggaagccagtgaaattgttttaacctccatatgtttgttataggtaattgataaggatt

SEQ ID NO: 112382 - DNA, 1032 bp, Setaria italica
  Intron number 1 from transcript Si009996m (locus Si009996m .g) derived from phytozome v7.0 (chr-ID scaffold_7; pos 34 765977 to 34767008 reverse strand)
gctcttcttcgtcggcgtcacctccctcgcctcatgtacgtatttcgattactgttgctctacattaggctctagacaatgccttgcgcgcggcaactgggttcagtcatcttgggttttgctagctactctgttggacatacacgcatccggtgtacatcgaactcgagcctgcactgtgccaattttgattcttgcctagttcggtcgtcagggaatgcttgcattatgctctaagtagtgtccgccgccgctgccggctcgccggccgccggtgatgagcgtcgccggagacattctgcctggaccaaacaggacagagcatgttgctggccccacccgtgatagaaaattggacgtgcatgcatgtaaatatttggtagttgttgctgttgtaggaaggtgcatgcctgaatcttgatctgcctcctctaggtagcataacttcgtctagctgatcacaacgaaaagcagaagacagcccaccattgctcttaaaaggctgcaactcgatatttaaaaatcgtccgaaaagttatctttttatggcaatgccatctgagatccagcattatgttcatgcatgtaggatgctggctaagaccaagctatcaacagaacttaatattctgtgccagtcccgattggatcggtactaatacggctgtttagtctcccctttttgtgtaactgctagtatataagacgactgatgatggagcttccaaattgaagtcagaaattcaagttgaaactaacaaacatagggagcagttgcgtctgcagcagctttgctctcttatgtgtctggctactatgtctagctacctgccaccttgttcctttctcatttgcatccatctaacgccttagctgtgcgcgctttactaactgttttaattactcgatcaatgttttcaataatttgcaagctgagatctggttcagacaaaatattaacgataatgtaactttttttcccttgtgtttttttcagctttaccaatcacgtgcctcttcccattcatctat

SEQ ID NO: 112383 - DNA, 697 bp, Setaria italica
  Intron number 2 from transcript Si011332m (locus Si011332m .g) derived from phytozome v7.0 (chr-ID scaffold_7; pos 25 559864 to 25560560)
tcggggacgagcgcatcctccgagaagccatcaaggtaaatttcttgggtccttttcagttttttcttcttataatctatgattggggatagttctagtttggttgattgtattgtggttgatttgaggctttaggtagcttctagtggtgggaaatgtgaaatagaccgttcaatccgactcttacacctatatagctggtagctgtagtctcagcttcatcaatgcttgtggtcttttgtacgcttgtaaagttttttcctggaagatgggacagtttatgccgcagtcataattcagatttgtttcgatgttcatgatgttggagaaacttcatattgatctatggagctaactcttcattaaacttttcagtgcgttctgaactgttatggttcccatgctatcatcgatataggcaaaactagcaaaattgaccctcaacttgatatgtaggcgtattgtttcatacttccctgttattttaggttccaatgtcatcaattttggtaatcaaaatgcattctggaaatggaaagttgcagataattcaggaagagtagctatactgttagtgacattcatcaaacaataataattatacgctctttagtctggaactgacttctttttcctgttgaagcaagaccagatgatgatattttatctatcctgtctgtaggagccagtagcattc

SEQ ID NO: 112384 - DNA, 736 bp, Setaria italica
  Intron number 1 from transcript Si021564m (locus Si021564m .g) derived from phytozome v7.0 (chr-ID scaffold_3; pos 50 512423 to 50513158)
aaggcacgccatttcttcccctctgcttctttgcttttgctctgctcagtcgtctcgtccccaaggccatgtttcagttcacgcactgaggggccgttgacctgttaatggtaccccactatgctgtttgttcctctctactccagccctgaaattgatcgaatcatcacagagattgtatcgtttctctagattttttttttgcaattttctcataaacctgtaatttgggctcttttcatcttattatctattgctattgtctaggatgttttttttttgatgcaacaggaggggaaaaaaattccccctactgattacagtcccagaatggaatttcaaagccatcttatcagaaaaactgattgtcttactccaacagcagaggatatattggaaacaaaggggcaatattacatggagtgaattttactttgaccatgtagcatgtataccaggtagttcgtttattgacagaagttcactgttatggagcttttgtttcttaggttcactgttgtgaccttatagcatgtataggttaccaaatccgaatgttgttgattacttgacccaagtgcatcatattctgctctgttccagtacagaaaattcttattgatccaagcacttccatactgatgctagcactattctctcccccaactaacctgaattcaatttttgtactttcgcaacagggttttctaggcctaagtggggcgatactagtcca

SEQ ID NO: 112385 - DNA, 439 bp, Setaria italica
  Intron number 2 from transcript Si024522m (locus Si024522m .g) derived from phytozome v7.0 (chr-ID scaffold_3; pos 60 33342 to 6033780)
tcaaggtatgcttcaatactttaaaaaaaatccttccatcattatgttaatactttcctaaaaaattttatataaaaaaaattcaacaaaattggacacagatgtggatatcgaaatcagagaagacgaagaaactactacaaagatctcaaatccatatgacattgtctacaacaacgtactagacgacacaaacatgctgaaaaataaaaaaatttgcatatactgtaatgcaaagaaatttgagtatgaatctgaggggttatgatgcagaaaacgacatattagattagccaatcaagagacacctcctgaactcatgagactttggacaagcaacgattctgatgcaagacatttttggaacaatataagatttttcaatggacacttctcatttacatctctttattgccacctagacagtgcgaccactgac

SEQ ID NO: 112386 - DNA, 735 bp, Setaria italica
  Intron number 3 from transcript Si010069m (locus Si009926m .g) derived from phytozome v7.0 (chr-ID scaffold_7; pos 31 000299 to 31001033)
ttgctattcaaattcagaagaacttaagactgatcgtgagtaacctacttataaatttattgcatccaaatgaatttctggttggatgtgtccttttattaacaaaggagctttgaaataggtcgctggtggtgatggcacagcaagttggctgcttggagtagttagtgaccttaagctttcacatccaccacctattgctactgtgcctctaggaactggaaacaaccttcctttttcatttggatgggtacgtcaatggcaattgtttattttcaacattcagatttcctaatgtatgacaaatacctctatgtttttgtgtgtggaaattcacttgaatgaagatgctggttaaagttcttgtttgactgttcactatgtacatagccataaaagttagaaataaaaaaaatatttttttatgaaactgctacctactgcaactctttataagaaaactgctatgcctgagcatcagtgcctgttaaggaaacttttcattttggtatagaaactttggaggatttgtcagtaaattagtataatgtttgttcctatacaattttgcctgttccgtggccttgttctttgggcattatgtttctataccaagttttaccttttcgaaaacaatattcaattttaatttgactttttaactttttgaaaacaatattcaattttattttgactgcagggaaaaaagaatccagctactgaccaagcggcagt

SEQ ID NO: 112387 - DNA, 960 bp, Setaria italica
  Intron number 2 from transcript Si013246m (locus Si013246m .g) derived from phytozome v7.0 (chr-ID scaffold_6; pos 68 031 to 68990 reverse strand)
aagatgtgagtggtcgtctctcaccaccaacctgtgaccttttgttgttcgttgttacttttatgctgcactaagctgtcaatctttcacctgcacatatttttctgttatggaatttcttgaaaaatggggtccagctagtgcctcagatgttggccggtgggcttagagtgtctggcagcagcagtaggcacgtcggcggtggcggatagaagatggcaaggtgaggcggcgtgggcgccgcaggcggcggacgataaccggtgggaagggctgatggtgaggcgagcggcttcctcagttagcgaatggcgggtggagggcggcttgtggtggtgcggctggcggtggcaggggcagttcggttcattgaacctggactgtggatgctgtcgccccaaatcttgcatgtgcaggcgttagtaaagtccttgaattattactgtgtcgaagctgcgcatcgtggcgggcacacctttctcctccaccttttgtcatgtgatgatttattttagcaacagggaaataggaattaactgatttgttttcaaatcgaaaggtttggttcgtgtagctcttggatcctggtttgtgttgaattaaagaattatattatggcattaaagactttgctacctttttataggaggtaccatctccaatatttaaacaacaatttattaagcatttgtactcttatttgtgtgatttcaatgagaatgcgtggcatgcgtgcacgatctttttaactaagaattttgtctcgcatgttcgccccacctaaaatttagagtgtgctccgccactgaaccctagcttggttggagtggtttctctaataactgtttttgttttgggcaacctttttgttgcggatttgattgctgtgtgcttttcatggtctgattcgtctgttcttctccagcgcgagaggccaatccagccaagctgcggttgcgg

SEQ ID NO: 112388 - DNA, 875 bp, Setaria italica
  Intron number 4 from transcript Si014087m (locus Si014087m .g) derived from phytozome v7.0 (chr-ID scaffold_6; pos 31 398066 to 31398940 reverse strand)
ctgagccaatgtgagtaggcctgttttcctctcttaacatgttgatatcctgttatttgcgacatgcttgtagctaggtgtttactttgttaacataacaacatatgaagcctgttcctgaactcatttgttgtaaaccacccttgatttgatttgacagattatatgctaggaccagggaatatgattaggttgatgtgtctgtatatatatatatattttgtgttcttgttgatggttttatgattgaccatctatcttatattacccaaatatatttttaatcttctgatatgagcatatgaatgttgaatgtactagttcagccttcattcatttagtcttgataatgtgaatgaacatctggaggttggtccttagttccttgaattaaaactactaacatgagggtccaaaacaaaattaagaaactcttgtctttgtatacattttttgatacaggaaacaggttgagaaaatcaatgtttattaatctgtcggaagagttgaacattgtatttatctggctttaagatatatatacttttatttttcttttttagaatacaaccaatacaatactcattatttgcatccagtttggcaatctttaatttgcatacgcatttatgtggtagcctgcgtaaatcagtttgttgagttgaaaataaacaattcaaacagaaacactggaatttaatctcatctactactacttttatttatctcatgaacctatgttgcaagagagtgtatgcgttcatttatcttgccatctacttatatgaattgagtcatcatagttcactgctgctttgctttctggttatgtttctgtagccgtaaaggaagggtcaaagaggctgtggagaaat

SEQ ID NO: 112389 - DNA, 451 bp, Setaria italica
  Intron number 1 from transcript Si021587m (locus Si021587m .g) derived from phytozome v7.0 (chr-ID scaffold_3; pos 98 7128 to 987578 reverse strand)
tctagttcatccgacgctacccctgctgtgaatctgcaagtttcgttcatggagaccttttcctcagttcttcgtataaattcatttgtagtagtagccctgtgcatgtttctttaaagaatttgatgcaagaccaaatatttggatacatatttagacttttagagtaaagatttcagattgataaaagacttgttactcattttaaattgtgacccctcgtctcatttatggatatacggatctctactactgtctgaatactattcagaatcgcacctatctgaatgacttgtgtggtgtcttttcctgtgaatggaattcaatagggtgttttgaatgctcttctttggcaagaatcatgtctttgactgtttcattgttttttcaagaacctaatgtaaaattatttgacagacactcattgcaaaattgcagtatacttgtaaga

SEQ ID NO: 112390 - DNA, 1052 bp, Setaria italica
  Intron number 2 from transcript Si021139m (locus Si021139m .g) derived from phytozome v7.0 (chr-ID scaffold_3; pos 59 81957 to 5983008 reverse strand)
tttggagctctcactggaggaagctcgccaattaggtaggttaatcaaggcttctttttcttttttttttccttaccctgatgccttaaatttcagttcctattcgctctaattaactgctagaactaaatcaaactagaaggaattgccaactgtgtatgcttctcatggttcttgtgatacccttttgtcttgtcttctatttccttaatttgcaacttgcatcagattaaaatctagaaggattgtctctgttgaccaacattttgtagccccagaatggagtttccttttctgattacttccagatttaggcattttttctagtgagtcctgataaaaagctcccagacagccttttcttttaatgaaagattttgctgaaaatattgggtagagtttgtggacttttggatatgaagatatcaaatggcgtcttgacatagatacaagtgcagtttcccttaaatgtattcgacacatcattcttaactgacataagagggatcctgatttgataatggacaggtcattgcactatttgtatgcaattgatcttccatttttgtctatcgtgccactttttaaggaatggaagttgtgaatgtgtgcaatgggcatcataatctcatagaataaccttatcgcattgctatttttgtatcttcattatgcatatttggctatttgcatcattacgggcctgtttgttttgcatcatccaatatattacttttgtcccttttaacaattcaggtcttaagatggaattgaatccattgtcttgctttgtctattgtaaaaaaaaatatttgtcattgaccaattgtatatgtaaaatcatcccaccctgctttctcatttattatggtggatttacttcctatgttgataattgtcaagacatttatcttaaccagaataccatttccttctatgtatcgtatcatagtgcacttgatttttgacaagttctgtataagatttttttcgagcactaaacgcttccctttccaggacacaattatattggatctgagcacctgcttctt

SEQ ID NO: 112391 - DNA, 740 bp, Setaria italica
  Intron number 1 from transcript Si021139m (locus Si021139m .g) derived from phytozome v7.0 (chr-ID scaffold_3; pos 59 83536 to 5984275 reverse strand)
gcccttccaccacctcctcccctctctcctcggaggtgagcgccaccatcgcttctctctctctctctctctctctctctctctctctctctctctctctctctgaattcctcgttctgcgattgggtaatttcttgttcttggttgcgtgcccgaaactctcatcgaggattcgcgttcttcgattgatggatgggcaatcaccggttgtcgggggtgggctgtgattcctgaccctgaatctgtagattgttttgtggaaaaagttttgatttttattctgttttggttctggataagatgcatggctgatctccctctccctctttagttataaccgatgccaatgtgaggttgaaacattatttaattcgatcgatgggcgcagttcatggatgcgatccctttctgtaaccgggggaacaggtctttccccccaaatccaaatgtttctttcttttgcggatgtacagtccatgtccatccagattttacggattaatttggtaggaagcggagttctgtagcgcactttattttccaacttttagcacagtttgtttttgtgatttgtttggggtattaactggaggatgggtgaaatttcgaaaattggctgtactgctgtgaatgttttgatttcagtcattgtgtccatctgagatttttggaggattggtattaactattcctaaactatctaatgtctttgcacaggttaaggggcagcacttctgacc

SEQ ID NO: 112392 - DNA, 688 bp, Setaria italica
  Intron number 1 from transcript Si010862m (locus Si010641m .g) derived from phytozome v7.0 (chr-ID scaffold_7; pos 19 312963 to 19313650 reverse strand)
gttcccctggtcagtttttgagtttcgcatcagtttggttcctcgcacccttgcttaatcagttaatccttgcgggtgtgtactctaccagtagttatcaaccaatgcaatttgccatggagcctgtcaaacggtttactagtacagctgtgacactattccaaaatgcagccatattttattcatatataatcaatctctcacaagactgcatgaaacttcagaaatgttgacatccagaggcagagaacctgtgatttgcatgtttaccaaatgaatatacaatttcctaataacaatattaggacttaacattttagagatttctactctagacgattaaaacattacagttactgaatcttctgtacaagaccagaatgaatgcttcaatggagttttagatttaacactaacacactaaaacttgtcaagctattcactgatagtgcaatgtactaccatttaacactcaaacacattaaaacttgagatgcaaaacaaggactccatatctcttgactagattgtgttagcatagtcatatggaatctcctgcctgagattaacctaacagtttctgatctgcagcaaacgattctcgatttcaaacaagatcatcttctaatttgctattagttctaatttcatcatagatctcgcaaaggctgtgccagaggaccataag

SEQ ID NO: 112393 - DNA, 923 bp, Setaria italica
  Intron number 1 from transcript Si012055m (locus Si012055m .g) derived from phytozome v7.0 (chr-ID scaffold_7; pos 25 508355 to 25509277 reverse strand)
cggtggggtattatgaccacgaacttctcggaatcactcaacggagttttcaaaggcatccgaagtaggcccgtcgctggaattattgaatacacattcgaaaaatgcaacgcctactttgtgaaccgatggggaaaggcacgtgaaatgttagatcaaggctatagaattgggcaagttgcagataattatttatcagaggctgagcttagatccgtgcaccacttagcagaaccgtacgggccagaaaggatggtgtattctataagaagttacggtacgactaacattgggggtgagagtcatggaggccgacactatagagtggatctgcacgaagtttcgtgcacctgcaatgttcctcaattgttgcaccttccatgttcacacttcattacagcttgcaaggcaagaggtcttaactttgaaagccccatgtacatgtcaccgttgtactctagggagcacaccatcaaaatttgggaatcaagctttgaaccttacctagatccgtcacaatggccggcatatgaaggggtagggtacgtgcctaaccccagtttaatgagaaataaagtaggaaggcggcagaagaagcgtttcacaggcgagatggacgtgtcggaagggaggctttctgcagattatgatactggtgattttgatattgacaagtcggaaaatcgttgctccaagtgccacaagatcatcaggaattgcacatgccgcagtagaaaatcaaaaggcactaaatctagaccgagcagtaataggccgcgtacttcgaacaattgggtatgcgcgttgcttgtattatgcgtggctattattttatcttttttatagtagtacattatcatattttccgtacttatcatgtaatgaagctttttactaacgaccatttatgttgtttctttagg

SEQ ID NO: 112394 - DNA, 740 bp, Setaria italica
  Intron number 2 from transcript Si010067m (locus Si010067m .g) derived from phytozome v7.0 (chr-ID scaffold_7; pos 24 779663 to 24780402 reverse strand)
gtgaagaggtggccgtcaaactggtatgccacgaacaacttcccgttattctagtgtccacttcagagttaggagttaaactccagttggagtaatttgtatctgtagttagcctaatcgttgctacatcacgttgcaagcattatggtgtataaggagctgggcaattacaacacagagtttcatgtacacaaatgacgtgatccaacattgtctatgggtcttgctacagaatcgtcaacagtgggaccattgggcttctggaagcaatcttcatcattgtgaaatgaatcatttctagcgcacagttttgttctggagataggattgctcatctgagtcaatgaccctgtagttctcctttgaagtgacagtttcagtgctgaaaagcagccgtgggacatcaatcttttgtttgttctgattgatgattctaaaagttagatttagtttctgtggagttctgttttctctatctatcctaaattggattagtgtgctaactgacgatgaatgctgctcggaggcattaatatcaacagtagcatatgataaatacgtctggcacaatatatttggtatatcttgtaattgctaggtgcttaatcattttcagaagaatttgatttgttagcattgatattgtttgccagccttagttactgcctgatcaccttattttgtgtgtgtataacttcttattaggaatcagtgaaatcacggcatccgcagcttcacta

SEQ ID NO: 112395 - DNA, 874 bp, Setaria italica
  Intron number 2 from transcript Si023292m (locus Si023293m .g) derived from phytozome v7.0 (chr-ID scaffold_3; pos 21 0734 to 211607 reverse strand)
gctctcataaaggtaaacttgttagttgccttgtgactgcagtctgtcaagctttgctatgctagcgcattaagtcctgcaaaattatgcatgttatgttgatatgcctttgtgtaccattaaaagttggttttactgtttgctctgtttatttcaatggttagactgaatacgcctagtggtcacttaagcgacaaggcgcttgctaggggcaagttgtccccaaatcttaaggagaaaggtgacatgctgtggatggcattgggagactagggcacgggaagggatgctttatgggctgtagcttggattgggctttagtaagctattttgatttttgttgtctaatatgtgtgagtatggctgtcgccccgactgccttaccacattacgtttatcgcctaggtgataagaaggcggcgagtcactgcaaattgcattaccaccttaagaacatcgggctaaacatgaaagagtgggacctagtgtttttcatttataatcctagaatggaacaattggggaagttacatgcctatatggaaataatatccattctggagtgatgtatggtttgtcagcctggagtatatgtgcgcaaatggatatgctttacttttaatacacttgtccaatacactgggtgtttgttaattcctttaatcagagatccttaaattatatgaaaaatatgcatacctgccagattggtgcatgtccaagtactgtgtttgcacctaactacaatattgatagttggtggatgctgttactttgttcttcatttgaaaattagacatgaaaatactgacatggtgctgctgttttaaccgtctcagaatctattggacgaggagaaggaactagcaaagca

SEQ ID NO: 112396 - DNA, 833 bp, Setaria italica
  Intron number 2 from transcript Si009520m (locus Si009520m .g) derived from phytozome v7.0 (chr-ID scaffold_7; pos 33 419940 to 33420772 reverse strand)
gcaggttgctttgcaggtaatctattctctgtcttctctcccaagttaaggatagactagtgaatgcattcctgttctcttcacttgcaatttgcaacactcaagtaaaccaaggtcactggccactttatatccataatgcatcaaatgcggaaatacatggttgatggcagtgttaaataataacagtgttaactatacatagaccgctcaatcaaaattattgccccagacacaggattaactcataggttactctgttagtgcaggtgatgtacatctaagatttatgttaaacataccactgaattatgaatcaagtagtgcaatgatttcctaagaccattcattctttccattagcaatatggtgtaagtcagaaaggacattcaattatatatttggatggcccactgctttgctattttgtacatggaaaatttgtaggagtgttcatagcagatcatccatataaaataatgttagccaccttgtatatatcatatatatatatatggacctgcttttattaatgggacatgcttttccatgaaacagtgtagtacctgatgagcataccaagtcaccagaaacagcgtgcatgatacttttccatggaaaaaatatagtacctgatgagcataccaagtcaccaggaacagtatggatgatgcatgtttataagtagaaaaaacataattggtttttgaacacatttactttggttcccctttttcttgcttcgcctcatttttcatcttcttactgttgtgttatattaaacctttgcaccctgaaattctgagttagacattccttttcatttgcaaggc

SEQ ID NO: 112397 - DNA, 671 bp, Setaria italica
  Intron number 1 from transcript Si009520m (locus Si009520m .g) derived from phytozome v7.0 (chr-ID scaffold_7; pos 33 421271 to 33421941 reverse strand)
cacctacgcgccccttttgcgctgccgtccggaaggtacgcgggtacctactccctcgccttccctcattgtcgtggttgcagtttgaattttgttgacgatgtgtacgtgaattgggggtggtgatgggggcggggggcgatctgattcacctccgggagagtcctagggcctcaggaatgctttatgcgactgtctttgttgactgcgctgtgtttggggctatgcaggacagagactgcctcttttcagggaaaagttgtccagtaactattgttactgcccattaacttttggtaaccaagcatgagggatggttgtattcaattctataatcgccatgggagtattaaatacgtaatgtgcagtctacgtgtgcattaaagtgcgtctttagggtatggttgtaattgtattagaaggtcaaagattagctatacacaccgcactactttacctcatcagttaaaatggtgcatatttaatggtccattttctgtcgataagtggggtggttgcactgctcaatggaccaggtcagaaaagaaaagtaatcatgcagttagtctcttctcttgttataaagtttctttgatgtcgcaatctggacctggaaccttgagattttttgcctcatgttagtacttctctgcaggttttcgcctaagggc

SEQ ID NO: 112398 - DNA, 651 bp, Setaria italica
  Intron number 2 from transcript Si009402m (locus Si009402m .g) derived from phytozome v7.0 (chr-ID scaffold_7; pos 17 928032 to 17928682)
ctacggcctcgccttcagcggtatatgctctggtcgcgttttttctttttgtgtattggaaattggcttatcggttgtcggtaaaaagaggccttattgctgtctatagagttacaaagttctgatgttcagtttaggcggacttagtgctaatttactcgctgttatttgggtaggagtttggtttaggactgttatcttgatgtgcgtttacttctgctatgtttctgggacgattgatgttaatttgtgcttatttggtttgattaccagtaggccattaatttgtggtgttatcgagatcttcttgagttcagtccaattgttcataagtttcagtctcagaggatataacaaaatgctgttaattatttggtggattcaggatttttgtcatggtcaaagagctgcacaaggacttgatttttttcccacattttttgttcaagatagtttttcttagggtgaagccaagttcctaatatattgttgatgtattatattctgtttggggaaattttgctgcattgatgcctgattttgttgtttattcagagcattggtcacaccgaatactttcctccattttctttgaatttattcctgttctcaataaccaatcttgtggttgcaggggggtttggaagttat

SEQ ID NO: 112399 - DNA, 1048 bp, Setaria italica
  Intron number 1 from transcript Si024508m (locus Si024508m .g) derived from phytozome v7.0 (chr-ID scaffold_3; pos 21 196759 to 21197806)
tcaacatattcgaagatcctttctctgcatatcaggtataaggcttagattcgcaggagaaccccctttttgtacccatttgcttgaagtttgaaaatgtttttttcttatcccatttgcatttcttaattggtactacctccgttccaaattggaagttattttagcttttttagtttcatattattatgctagtgtatgtctaggtgcatataatatctatgaacctagaaaaatcaaaacaacctacaatttggaacggagggagtaccctttacctttgaatccgctattgcatttgtagcacttctcccaaggaacaacggcaaaattgcatcccatatcttctttttattttttatgtagcaaattcttttgcgggattataattcgcatatttgttcatttgttactcacgttaatagttaagtgtgccatgaattctcacatacctgtctttagttcattgttatttcacttcaattaacagatcatctaatcagatagagagaattccttctatacctctgggataattatccactgtcactgaataactctcatgatcccttctctgcccccacttcgcaaaagtcggatcccctccatgcttcactcttagcttgggtactgagcagggcataagggacatttctacccctattatttccccagaaatgagaactgaaaagaaaaggcccctgctatgacactgcaatgctattcttctcacgctcacactcgcacttgggtaccactagaaaagccttctaatttcctaatatacccccatccgtccctccccaaaatagtatgttgaggtcagcaacatttatctgctctaattgatggctaaactaaccatgatcatctagagggtaccagttttgtcaaatgatagcccataaggaagcatgagttatttggtggcagattgtgtaccaactaccgactgagttaatagcattgaaggaacctttcgaattagctaacatatatataaccatcaccaggtgtttcattctggcattccaatcacacttgttcc

SEQ ID NO: 112400 - DNA, 701 bp, Setaria italica
  Intron number 2 from transcript Si025034m (locus Si025034m .g) derived from phytozome v7.0 (chr-ID scaffold_3; pos 46 686210 to 46686910)
tgccgcggtcggcgacggaaagcacgctccgggaggttggtttggttcttctgtttcagggttgcagtggaccacccattggggatagaagattgcttgtgtgcgtgcagtgcagtgttggtagttaggcatctagaggttgactgagacctgtatatccgactatttatcgaagtagtgtctaaatagcaaatcagagtgttagatgagtaactgtccgtggagttggtggcattataggttctgcgattacttatttatttctgcgattacatacatgatacatttgtctcctcaatacttgcctaccatacccaaaacagagtgaagtaaaatgggagaaggggtttcaatttcttctgcaatccaaatgggaagagttgaatctaaagatacagttgtaccttggcccctcttatttattctgtaatttttttggatgtggaacagtaatataccagcatgtaaaaatgtcatattctatctatctagtaataagagaagtatgtcatattagaaggattaggataactattgtatatttgagtgttgaacttaatcatatttagaatttctactattcaacttatgtgttcatggctaaaggaagttttcttgcagtctgttcgttatgccactaatgggactgacttgtagtgttaacaggtattttctccttgtggagagatcgttgacgtgcg

SEQ ID NO: 112401 - DNA, 366 bp, Setaria italica
  Intron number 3 from transcript Si012165m (locus Si012165m .g) derived from phytozome v7.0 (chr-ID scaffold_7; pos 18 167346 to 18167711)
ggagaagagtctaccattcgcaggcgtaatctccagtaagttgattttcatgaggtcatctttcctttaagccaatatatgggatatttaaggaattttcataatttagtcagttacatgggtatcccttccatctgatttcatcaaatctgggtcacttgaaattttaagaaccggataagggctatgacttttgaattctagtttgttcttatttcaaactaagaattatgtggaataatttgctgtgttaatgcattgcactaatgaatgaaacgctcttctacatttgtagtccaagtaacatccagttttgtcgtataatgtgatttgtgacctgttgaatggtgcaggacaaagactggg

SEQ ID NO: 112402 - DNA, 1048 bp, Setaria italica
  Intron number 1 from transcript Si009567m (locus Si009566m .g) derived from phytozome v7.0 (chr-ID scaffold_7; pos 31 521680 to 31522727)
ttgcgagttggtcagaaactctgggacagtttctggtacggtttgttgcatctctcttgcaatatgctccttttttctgtttttttttctagttttatctcttgatttgcatgccaaaacattccccctcttctttcagtacatgattccttcgcaaatatgtgttttgtttcactttggttcgttcatggttcattccaccacaagttcatcaaacctgggcacgcctcttgttgaactgccaagaatttttttttcaaaaacaaaattctcgagtcccgtgtctgaaaaaaaatcattttttctctatgctgtgcgatacagcgatagattgatggcttcggcgttctgggttgggttaaatttctttctctgctcccatatttcaatctcgtgatcggagagcgaatcgatccttctctttgaaaccgtggatggctacctctgccttttccctttatttttgcttcttttactgcgtccttttgcaaaccgatagagaagggaaattaaatgcaaaagaaaaaagattgtatttttttgagcgtccacagaagcaatggggtccatctgcatgcggtccatctgtttaggtcgcatgcattgtacattcaccgtgctttgctttcacccattaaaatgcatgcatcaccacagctttttgcttgcgacagcaacccaaaccatcaagtttggtgcacgcgtacgccacaccaaatgcggctcatgccaagattgctacagtcacatagttaccaacaccctcattgttacttgctgtccaccactatttgtaaaaccaaaacaagtgcagttacttccatatactaacaaacaagagtagaattagaataatttggagtgcagacaacgtaccctgggcatattttgttagtatccttcagtgttccatccattgtaatctactgtttccttgtggttttcttgtgttctggtaaagttggagcacatatgtgttgcccaaatttttcacgttttacttgcatttacaggtcttttaaaccactacttgaaagaccagccatct

SEQ ID NO: 112403 - DNA, 950 bp, Setaria italica
  Intron number 1 from transcript Si022286m (locus Si022286m .g) derived from phytozome v7.0 (chr-ID scaffold_3; pos 71 67000 to 7167949)
tagcagaggagcccctcctcatccgggctctccatgtgagtatagcacacacatgctcctcctgatctaggagactcttaactgcaattgttcttgttgatatggttacattgctcacattatgatatcagaattatgctactattattggtttctgcctgcctctgccttggtatgattgatgatcatacatgtttaatacattgaaaattcaaattggtacttagcaattgcaatagaacgttagtggtgatgggaagaaaagtcgtgctacattccattaacatcatggcagtttgctgcgattatttctaatctatgctagagctgcccctgagaatccacataatatatattgtcttaatgcttgaaattcagaatgaaacagaaatgcatttggctatacactgggtaaccggctcttgtgctagcaatttcaaacgcaatgttgtggaggagggctgtgccacagcccatgagccctttctgcaaggtgttttgtggcgacgttgtgcagctttgcgttaacagtcaacttttcatttttatgatgataggaactagtacctgaggaagtgaggaaactgctgtcagcatatattatataggggttatattactgattaagtcaagtgttgtaaattttactgattaaattgtgagaaaactgattgtatcaagtgttgtaaatttcattcaataaactgcagctataatcgacttcttcatgatttagtgagaaatgaagcaaagcaagttctctacttctagacatgtctgctcagcattttgtgttgaggcatgtgcagcagattctgagcccaattctagtccttaaggcatttttaaaacttgtgctttcttattgtcccattcatgtgacattttctgaatagttgatatttcctcatgatttggtaacacctcacactcttgtagggactcgcaat

SEQ ID NO: 112404 - DNA, 778 bp, Setaria italica
  Intron number 2 from transcript Si009902m (locus Si009902m .g) derived from phytozome v7.0 (chr-ID scaffold_7; pos 22 137416 to 22138193 reverse strand)
tgcgggccaagttcctcagggcgatcgccgccaaggtgacacgatttaacccatctctgtctcaagtagctggttgatttaagtctgttggagccgtgaactatctcgttgctgtgtgaacagagttaattttagggcgactaggaaggaagaacggttttagctagtagattagagtgtgatagatagcttttggatagagggaaaaaagagacccgtgatcgagatggatgactgctgaacaattgttagatgactatgactcttttgtttggctagtcatctggtaccattttagattttactaatgttgatttgtttgattgttatgtatgaacttcttctactctttgggtccgctaatcttctgtacaagttgtagctttgaggtaataacaggacagcaacagcacaggctcccatcatagacaatattgttcctgctatgccatggcagcatggcaccagcatcggctatactagtctttcagtaccgcgttgcaaaatcttataatgtagatgttcttcagctattagccaatggcattggatgctactgttatcatttaagatcagtttgtgtgtgaacgtggaaggtttactgtttatgctgttcgatgcatttaaaatggaagatgcaaatgctgaacctctgttagtatggggaaaatttcccattgctatctgttggatggttgttttaactgacattaaatttctttaaatgttgttggtgggtgcagattaaagataggaaatctgatctggctttgcttga

SEQ ID NO: 112405 - DNA, 916 bp, Setaria italica
  Intron number 2 from transcript Si022037m (locus Si022037m .g) derived from phytozome v7.0 (chr-ID scaffold_3; pos 23 271135 to 23272050 reverse strand)
atctgctgctgcaacaaggtataatacagaaattcttatctcactttggttaatgatctgagagactcttaaatacacatgtctatagtccagatttatttgttttgcactcaatttgtactgcctatttctttcattgtgttgtggattggtttcaatgacaatgctagtatagtagtatgtgagttgtatactgaatttgacaaagtgcaacaagtgcctattgcttctattgaatgtttatatttatgttcgatggtagcagtttaccctcatggaattgcattatctgatatatgttctggcagattttttcccgataaccttggtataagtttcttgtttaactgttttgagtaatgttctgaagctattggaatacttgtaatgcatatagaatgcaagcacatgcgtcgcatcatttaaccgattcgtttgttacttaataatgtgctgtgttacgatttagtgataggatgacgtaactgatgaggtctgtatttgtacttgctttatgtttgttatagccatcactagctaacttgggtacgcctgtgatatataattatctacctatttatatatttgtttcttactgttgagatgcaactttaaacaagtttattccctaaagaagtgcagtgtagcagttaattttgattgatgtgatgtttttccgtatatagtgtttgcttcctgttcatgcgatctattccattataagctaataatgatcttatgttgctattctgtttatagatggactgctgttcttctgtatatacagttgtctgctgttcttgtgtaccatttaacattaattgatactgttcttgtgtatatacagtttgtctgctgttcatgcgatctcttcagttaagctaataatgatgttttattgataatctgttcgtag

SEQ ID NO: 112406 - DNA, 777 bp, Setaria italica
  Intron number 1 from transcript Si022037m (locus Si022037m .g) derived from phytozome v7.0 (chr-ID scaffold_3; pos 23 272495 to 23273271 reverse strand)
tcctcctctcgacgccgtttccttcgcttcctcaggtgctgtttctttgcggcccctcctttctcgatctgtgctactcgatgctgttgcgatgggatcgatgttctcatgtgtcgcctcctagtaattgggcagctgttgatactcacgtatctgattccgtagggtttgtggattttgcgttatcgcttgatttgaggatttttaattgctcgtgcgagtagcgatttgtcagtctggtagtgattgggttgtcgatactcatatccaattccgcagggtttctagactttgcgtaatcgcttgattcgaggatttaattgctggcgggagtagcgatttggtagtctggttttgactgggttgttgatacttgcatctccgattccgtagtgcttgtgggttttgcgtgttccttgatttgagaatttgattcttatggatgggttcatcaggatccggataagtgcttagatactgtaggttgatttgttagttatacttgtggatcggatgtttagaggtagctgctgtaattcctttatttttgagaggctgctgctgggtatcttgctgtatagtttatttttatatagttgcaacatccttgtttgatctagtttctgatctggtctgtaaaattgttttgttactgccttgtaaaagtttttatattactggcttccgaattctgtgctgatacttgctcgtttgctctgtttagtgttcctaacaattgactcatctgatgcagcggttcaagcttcacctgcagcc

SEQ ID NO: 112407 - DNA, 947 bp, Setaria italica
  Intron number 1 from transcript Si021076m (locus Si020989m .g) derived from phytozome v7.0 (chr-ID scaffold_3; pos 28 280882 to 28281828)
gcccaagtctttcttcggcttgtctatcttaacacgtacattgtttcatcttcgtaatattacttttttctgccttgcaaatcttgattattacaagttattatttcctcagctatcttgtccctgaaaaacaaggtttgattgatccacatcagtacaatttgtttgttttttaaataaatatttgtcacttaacaaacttgggtttggggatgctaatgaaaattgatatcttatcatgatatcagatgatattaggacaacatgtgagatactgtgaggtattggtggcatgtgctagagtgtgctggccactatctgggttttatcccagatgtgggcacccagggcaggtgagattgagaatagagttttgacaaaagttcaggtggtaatcttttcgatagggagaacatacaggaagttaattcaagctactcatcagcttgggcactttcaaatgagttaatattcagcttctggtgtcatttgtttatgcttgtttatttcccatatgcaaaacttcctaaatttctggtttgttgtgataaaaacttcaactttatgattttctttttagaatttaagtgtgcatgcatagttccggagaattttggtaaaggtttattctttgctattcagcaggtttaaagaaatattcatattcatgtaggggttttaattgtggaacaaatttttccatagcacctaactattattcaaacgttccatgcattatgtttgttaaaggtttattctttgctattcagcaggtttaaagaaatattcatattcatgtaggggttttaattgtggaacaaatttttccatagcacctaactattattcaaacgttccatgcattatgtttgttaaactgatgacacttacgttcctttttggatatgctaggatagaccggagaatttcaattatctactccggaa

SEQ ID NO: 112408 - DNA, 707 bp, Setaria italica
  Intron number 3 from transcript Si013906m (locus Si013906m .g) derived from phytozome v7.0 (chr-ID scaffold_6; pos 35 507162 to 35507868)
gtgcgacaggacggcctgaagagcccatccggacggtatgttatgaccatttctgtgaacacaataacaaatgattgtcctcctgctgttgtcctgaatattttttttgcatttgctggttgttattcaagctattaagctaatcatattgctcttagtggattgcatgaagtgcttactggctgtagtgccgttccttaacttattatgcatattctcaagaaaatgctgtagaaaagaatttcatctggctgcacctcttaggttgtgtgcttgtcataaggatgacgtgacattgtattctactaatacatagtattacatatccctccatttgaaattataaggcttatctaatttcgccttgccaatgcaattatgtgatgctctccccctgtgaggctgtgaccattcaaaaaaaaatgataggacaagactttgactgacaattactccattaatacatcatcatgtgatgcagaataatattcataagtatatttatcaatacatatataaaaatatcaaaattgtgtaaaagaattaggtagtaatagagtaattgatggtcaaagtattgtacttatgaaacaaaacctgtcttataatttcaaccggagcgagtataccataaatcattcaatcagttatgctgatggttattccatttaggtagattgggaaggaaaagttgctctaatacagtg

SEQ ID NO: 112409 - DNA, 1023 bp, Setaria italica
  Intron number 1 from transcript Si014248m (locus Si014248m .g) derived from phytozome v7.0 (chr-ID scaffold_6; pos 27 336109 to 27337131 reverse strand)
caccccaaccgccgaccccctcgcgcgccgcaagagtaagtccgtccgtccccctggcctccgtgttctcttcgtgatgatctcttccccgatccggttactccggcggcggttggtagtgctgacgggggaagccgatgtgtgggattcgagggtggatttagggttgtacggctcggcttcttaggattcttcttcggcgcattgttttgcccggccgcgccgcttgccctctttccgttgagggtttgggcagattggggaatttcgaatgttggtgttcgatgtgggcgatactgcgataatgattctggttggtgtgtgtggggaggctagtttctctgttgaattgaccgggtgtgaggaatcggctcttgtttactgtggccgttgtggcgcctgtggcattggggccacgcctggacgcctaggcggcaaggggtaactatgacctcgtggcgttgggggcacgcatggatgctaggtgatgactaggcggcactcaaaaaccaatggctgtggcattttgattttagggggtggaacttggaatatatgtgttctgaaaatttatgtccactatgcatgcctgaggaactgatagtaagagggctttagaacgtttaacagttctcaaatctgtttctctcaattaaactcttctgtagaattgttaagctgtctcttagttacctctgaatctctgtcagtgagctatttagtacaatatcattagctttttattgttgtctatttagtttcctcattgctagtgcattaacatgtccttctatcttgtatttataccaatatcgatgtgctctggactaggttcgtgcaatcaatttagtttcactagactaaagatctctaaatatatatcttcaagtccaacttacatgttcgtttcatttcttgcgagttcagattttggagctatgtccagctcctcctccgcaatctctaaaaattatcatctttgctgcaggttgccagtgcactgttggagtttgccacttggtt

SEQ ID NO: 112410 - DNA, 605 bp, Setaria italica
  Intron number 1 from transcript Si025801m (locus Si025801m .g) derived from phytozome v7.0 (chr-ID scaffold_3; pos 16 527252 to 16527856 reverse strand)
atcgtggcttgaatcaagccatatcccatctgcaggtgattaaatttcatatgttttcttctatatgcatgttgattacacatattgcaatttagatccatatttgtctttttacttatccttcaaatttgttcatagtagtatgatttgtttgttttgtggatcatctccaatagtagttgtttagtagattttcaaattagctttttttgagggtatttaagaggttgcaaaagttctaccttctgatgatgtttcagcactcctatctcaagaggaggtagcaaaaattagcgaatcaacccagtaccttgaaaggaaattaaaagcctcttcacaagtggttatggatactgcaatcttgacttaatgattctagttcctaaatattttgctgtcctcacttctgatgtctattctgaatcatgacagaccatatatccattttccatgatgtctgtctcgattaagcatgatacctggactagcattattttgctgcagttttgtaggcaaaagattcactgtgcaagagtaaaataaaagttattgtattgtactcatgaccttgaatcaacactgctcattattgtttttttaacagc

SEQ ID NO: 112411 - DNA, 597 bp, Setaria italica
  Intron number 3 from transcript Si024657m (locus Si024657m .g) derived from phytozome v7.0 (chr-ID scaffold_3; pos 49 14832 to 4915428 reverse strand)
gtttgcgccaagagaaaaaagggtaggtggctaggtatttctgaagaactcataatgttcctttagcatcctaaaactttcaagttaaactgaatggtattatctgtggagtctctctatttaaatctttttcactatagactagaattggtacactagaaataaatagttggggaactatgtgatggtacgtagacttgacaagccaaaaccgtgctttctgcatagaaactggataacttctgcaaactggtactgagtttcaattttagatctactagaacttgataaccagtacattgtttgatgaaaaatggagttacgtattattgttttctatttaagtgaaagggcaggagctctgcctaatgcattaaagaagtcattattcatgtttcagtgtgattacatacatctgcactctaacttttttcaaaaaaaataaaaatgaaaggaaatgctacaacattagtttcagtatttcaccaagaagttttaatggatgtgaattatgtgatcatgaaggtttaaaatgtttgagttactcattagacgaccagcaatcctaagtttgacacaaccttgcagaaatttgtc

SEQ ID NO: 112412 - DNA, 832 bp, Setaria italica
  Intron number 1 from transcript Si009282m (locus Si009282m .g) derived from phytozome v7.0 (chr-ID scaffold_7; pos 24 770347 to 24771178 reverse strand)
tggacgggattaccaggtaaatatctctctcacaaaaatgtttccgacagttacatatagcatgaacaattagctaaagattcttatctggttttaacagaaactagctgaatgacccacacattacatggctagtatatttttctttgatttagaatgaaattcatactgtgcatcctaattttctcttatagtttgatttttttattagtgatacttcatatcttcctctcacaaagccctatgcctctaatcccttagttgaattgttaagactcagacttccacttgaattgttaagattcagacttccatgcacaagtcatcgttgaccggcgaacctcttgtttttttcctcatagtatctagtcttgtgtaagcttggcaacatatataactttaaaaatgggcaaaatgtggtaaattccatgtaactcagatgtagaagtgttcgttcaaaaagatgtagaagtactattatgggagaatatgctctataacttatagccttgcagtttcagtatttcaagatccaactcaactgcatccaaaataagaaaaagacaaatacttatttgcaagtgagattgatcatttgcagtctggaactccagataaatgatcaatattatttatttagcccccatatctgtaacagatgggttgagataattaaatttgcatttttaaaaaagaaaacttttgactacaaactaactcttccctctacttacatcatacccataaatccacaacttgaaattcaccaacttcactttaactatatcctaatacttttttgttggtacaataactctgctaggtggtgatc

SEQ ID NO: 112413 - DNA, 417 bp, Setaria italica
  Intron number 2 from transcript Si021377m (locus Si021377m .g) derived from phytozome v7.0 (chr-ID scaffold_3; pos 43 740870 to 43741286)
ttgcggagagtggtgaggacttggtcagactaatgctcttacttttcttcagatctggatgattggtccttggtactcattccagatctctgggtgtttaatttgctgttcgtttggttgatttttgagaactttttagtgaattttaagtagagactgcaaaatctcctttgaaatttgttgaaagaacagctttgatgctactgtttcagctaaaaaaagatcagtttttttcactatttacctatgatattcgatgtattaaaatagcaggatacaaaatggtttacgcttataaaagatcgtgcgtgtgaatattatccgagtagtattcctgatttctgtcctataaacactagaacccttcccctgtctgacctttgcatatttcaggtttcagaggaggtagagaaagca

SEQ ID NO: 112414 - DNA, 958 bp, Setaria italica
  Intron number 2 from transcript Si011544m (locus Si011547m .g) derived from phytozome v7.0 (chr-ID scaffold_7; pos 37 83736 to 3784693)
ttcaaattcagtgtccgtggggttcaaattcgaaggtatatggtcatttccctttgcttggaagtacctatgcgatgaactatgtccctttccagtcacccattgtccgatgtgatacaagagatagtgatactgcaattgaggtgtaaagttatgaaccaagaggcagtgattaagtagtttctcatagtaatatgtttaaatgtgtaaatatatgtgaaaacatctcactgaaactttagactttactaagttggtccctatagactcaattgagtgacgttcggagaaactcaatgaagctgtttaagataaattgaagccaacactgtaaattaaatgccaactataatgctactcatgagattctctcaaatacttcataaacccttattttctccttaattgagaaaattgaaataaagtaataaacactcaatctagcacaccttctgatactgccatcaggaactattgttagaataatttgtttgtatatagtatatgtgccccagcaaaactgtgccataataaatataatcattttgttggtttcccttttttttatttactacttctctttgtatggctaaaatgtggaagcaatttgccaagtactgagcaagacagtgcacaaaagcttcattttgtcaccctgaccagcatgccattcaactttctacgttgtacatgaattagatgtagctttttttgagatttctcgggtttcccaattgctctctccagtcacaaataagaagactgtgtcaaataaaatctttggcaactaaacttttattataatctaactacaaaatgttgtgaggaacaatatggcttttaccttccagttgtctaatgtgcaactcctttttttaatattcataattggagattttggtagtaatttctaatctgatgtatttctcccttatttctacagttataaggagaactc

SEQ ID NO: 112415 - DNA, 884 bp, Setaria italica
  Intron number 3 from transcript Si011103m (locus Si011103m .g) derived from phytozome v7.0 (chr-ID scaffold_7; pos 20 088671 to 20089554 reverse strand)
tactgacctcgctgatttcatcacttccttcctaggtatagcccttgttgtaactgttttggatggcatataattttcctatgcttttcttgcaatgtagtttaactcaaattgcttgcttccatagagatttggtagtttaatggcatgggtcgggagactgttggacacgtggtcaccattggttagtggtgggaaaatttatctataaaattgggctgcactgatagatatcgtcattgaatattgtgatggagaagttcgcaggggaacttcatgactgttatttgatactctggtttctggttattctgtcatttttttttgtttagcaaggtgtcaactggccatagcacattgtgagtgtcattgtgtttcagtaagatgatatgttttctatgccaacatattcgatatttatatccttgtgacagcataatgccacaatgctagtgaagaataattgctatccattacttgaaaggtgcttattgttgttagctcaatatctgctttaaaaatgtagttattaaaatggcaagagtacctcttgatgtaaaatttacttaatacaaaatgagatgtcaaacaatttagtgatattcttcctctgacgtgctctgtaaataaaatatgatttccaggctgttaacatgatagaatggtttccctttgcttgcttgatttttaggaaattgttcagtacctatagaaagtatgatttccaggctgttaacatgattaattccttttgtttgctcgatctctgggaaattgttcaatgcttgctttataatattcatgtaactacttaaggtgaatataaaatcttcgtttattatgatgcagaaagctacagaaagagaatattccagctgttaact

SEQ ID NO: 112416 - DNA, 760 bp, Setaria italica
  Intron number 2 from transcript Si022238m (locus Si022238m .g) derived from phytozome v7.0 (chr-ID scaffold_3; pos 48 426378 to 48427137 reverse strand)
acgtgcagctgcaagaagtccaagtgcctcaagctgtaagttttctcgttccttccgggaatgcagtcttctccattccttcatcacagcaaacggatgtttcactgtggaatgagagaacaagtttcattttcgccttttagtccaacctctcatcgtctgtgatcgcttacgatgtctttaccattttgaaataggtgcttattttgtttgctgtagctaacgaatctgtgttgctttaggtaggtttagatcttactgtcttatgtttcaaatgtatggtggtaaaaaaacattttttttgtcaatttcacagtacctaaatatcaaaatggtgcagctttattcagcatgctgagcagttttgaatttaccaatgctgccaagcagttttgaatttaccaatgcttctctttttattatagtctacggtgccgaggtttctggtgtaatgacttgcctgttagtgccatgtaattctgtgtaccactcgtcctttggagggagctgagtttggggaagggggtttacatgaatggtgataagggtgatcattgaacaaactaggttggtttatgcacaaacctgtgggtgccaagtgcataccatctcctgcacaaacacacacccaagcacatgtgtgtacctagcttgtttttccttttgttactgaatttaagttttcttttgtgtgtataatcatcttttgcattatgctgtaacagttactgtgtgtgctttgcttctgggtcacattgta

SEQ ID NO: 112417 - DNA, 884 bp, Setaria italica
  Intron number 1 from transcript Si010093m (locus Si010093m .g) derived from phytozome v7.0 (chr-ID scaffold_7; pos 20 311449 to 20312332)
ctaattaagtctaaacatgagctaattataaaactaattgcagaaccctatgctaattggtgagatgaatctattaagcctaattaatccatcattagcaaatggttactgtagcaccacattgtcaaatcatggactaattagacttaatagattcatctcgcaaattatactccatctgtgcaattagttttataattagcctatgtttaatactcctaagtagcatccaaacatccgatgtgacaggtgttaaactttaacacggtgttcccaaacaccccctttcttttgaaacgagcagtgctactctccggtctccagaaattgcaagttcattaaatcaaaatagatttggaagaaacaaagagcaatccatggaaacctgctgtgtttagtgcctacttccatattttttatattcttctagttcctacttccaaacgctaattcctacacaattcctgtgtttttccatgaaaaaattgtgcactcttgtagtcccaacaaattagattagtgcctacttccaattttttatattcttctagttcctgcgttcccaacgcccgttcctacataattcctgtgtttttcctttcctctattttctcccatgcatattcctatgttacttcccaaacaggccctaaaaaaattggcaattcacgcaaggaccgtagcacaaactgcaagaaaccagaggttcaaaacgcaatcaagaagctcccaaaaaaaatttcgcaagcagttaggcacgccaaatcatggcgaaggttaaactaatcacctaatataaaacgagctcttcctccctcggctgtgttaccgaactcatactcatcccagcaacaagcttcaaatccctcccctccgctttccct

SEQ ID NO: 112418 - DNA, 748 bp, Setaria italica
  Intron number 4 from transcript Si011982m (locus Si011982m .g) derived from phytozome v7.0 (chr-ID scaffold_7; pos 28 541878 to 28542625 reverse strand)
ctcagttagctgggtaagatcacataactgctgctattctttgaatcagttttttttttcgaaacattattctttgaatcagtgccccccccccccccccggttgtctgatcactggaatccatgaaatgaagttaaaaaaatatactgtttgcaatgatctgatacattttaggtttctggagtgaaatgtgctctgtgcactagtcactgcactgcctcctgatgacctgtgtttgttcagtttctggcttctagatttggttatggttctctctcgcgcgcgcgctattgaactttgagcgagttttgttcaccaatcatgctattgttgcattgcaagttattattttcttcaatgatgtaattaatgcaatattctgcaaaagtgtaaatattaaaatgacttgaaaggtatatgtctacaagatatttgatgtatcttatgatttacatgtaaaataaaattcatataaatattgttgcagagagagcatagagtactactgtaataggaaatgtgtcctatctgtcattggaagtttatttttattccttgttgttattgacttcactgactaattcctgttctgttttgttttccaattaaactagatggcatttaaatcctagtaatgcatacattgaggacaaggacttaaaggaagcagcaagcatagtcaacgaagtccgttaaactatgatcgatgtcaggagttcttcgccgtacacaaagttcattggtcagc

SEQ ID NO: 112419 - DNA, 644 bp, Setaria italica
  Intron number 4 from transcript Si010360m (locus Si010360m .g) derived from phytozome v7.0 (chr-ID scaffold_7; pos 33 539711 to 33540354)
aaggtttgtttctcatacacaactgcgctcatctgttttgaatggtccaatctgatgccgggtcagaatgttcaataaagattcaccaacttcaacatcacatatatcggtgagacttgtgggtattgcatttatctagcacgcaattggatacagtctgaggttgctttttataattcgcaactgacttgctcggtgctgttaccggaacattatcagggttttcatgcgtttcttgttccccatataggtgcctagttacttgacaattagctctacttctccttttactagcattaagtttccacattccttttatacaagtttacagatcacagctagggtgtaaagttatgagaaattgatgccatattttctcaggataaagcaaacccatatatttcacagctaacatgccattgaactctgcctgtgattattccttccaactctttctacaagctcttagctacacttctttttcttctgcggtgtatccccatatggggtttggtctcaaatttatgagcttcagttcattgtagtattacgcaataatggtctctgtaatgttgttggctggaagctgagttttcagtgactgaaatgttttattttccaggttcgagcagcggaatataaca

SEQ ID NO: 112420 - DNA, 512 bp, Setaria italica
  Intron number 1 from transcript Si021304m (locus Si021304m .g) derived from phytozome v7.0 (chr-ID scaffold_3; pos 49 401033 to 49401544 reverse strand)
gctgccaaggtatgtgtttactgaagtaaaattggtccggagtttccaggatactcctctaaaaatctgatcaagctctgaatactatccagttttttactggcattgaggttgaaatgtcttaataaacctccacaaaatctcatgaacaacatcaataaacattcaatcaaaatttcaccttgtttcagctactgtcactgctaagaaaaacacaaaaaattgctggcaagcatgacacgtgtcatcattttttttacaacaggccatgcatgtcatcaatttgtttgtttttttacttctgaactggtaacagaatgagtcaacactagtgtaggttgcatattcatttcgtaatatttaatttcgggagtagttatggaaaagttatttacatcattacagagtcaactgaccttttttacttgttgaaattttctaaccttccatccatttgagtttagtttaacttatctgattgcttgtgtgtttatttgtatcttcagatatag

SEQ ID NO: 112421 - DNA, 744 bp, Setaria italica
  Intron number 1 from transcript Si023925m (locus Si023925m .g) derived from phytozome v7.0 (chr-ID scaffold_3; pos 33 208317 to 33209060)
ctctgtcaggtatagatcaatttattttgtataaaccatgttcatatatttgttcgcatttctctgtttgtatggcacaatgatgtcagtagtacttcatcagattctgtagatatgtcattaaccatattaccagtacagttgtaactgaaggttctgcataagaaaaaaaaagaaatttgtttttgaagtcattatttgtctgattttattacatacagttggaaatgtagactggaaggcgttatgcgctaattattttgtttcacctctccaaagatacaacaaaccaaccaacatgacttccatgtatcatatttttcatcagaatactatagcagcactatgagttatgaggaggcaatttgctctttacttgatgcttagaatgaggtattccaaagtaaatttttcagaaaaagtatgttttttccttctaatcaccttagggcccagttgaaatgcaatacttcagcaagagtttcgaggaaaatagttaaatgcagtacaccaatttgtcctttcaagaagcaagtgatcaaaatcttggatacgtttcatatagccaaatttgcttgtaaacttgtattaactttatgtccaagcttgcaaagctcattagtgtaaacttgtgctaacttaattttcttctacttttttatggagaattacattttttggttaactaacagaacccttacatttccagctttcttgattgcctccataagcttgagctgcagg

SEQ ID NO: 112422 - DNA, 754 bp, Setaria italica
  Intron number 3 from transcript Si024544m (locus Si024544m .g) derived from phytozome v7.0 (chr-ID scaffold_3; pos 82 88263 to 8289016 reverse strand)
gccccgtggaagtttagagcaccatctcttcaggagtaagcatctgacatctattccatctttaattctaaagcatatgttactgctttgcttaggagtggcatcactggccatttttaggcatatatgcccttacttgttactggtattcacagaagatgtgcacagcctacgtttatgacatcaccattgtttatgaaatcattatgctctagcatagtaacatataaagttaaccagattgatcatttcagaaatacagtagttcatttgttgtaaaaaacttatattgaaagcggtggcgttgatacatagtaacctgtatcatggtatatttgacccagaggccggagcttataattttctttttctttatatgggttttttctgtttttcttttcccacctgccatagctcatacatactcatagcctgcaaacttgtgaagatattatatccctgttgtgttcttgttaaaatctttttgtgctgcggccagctatacaagagcatgtgttaggccttgaacatccaggttacgcaccttcccattttgaaattttgaaataatgcgaagtttgctggttgtgacttgctagttgccagtcatcctttgttccttttttgttatttcttcatggtactgtgttatgttgatccaccaaatccattttggttttgcagttttggtggatttttactaacttattcttttgtggaataattctgattaaatagaggcagtgccacttcc

SEQ ID NO: 112423 - DNA, 705 bp, Setaria italica
  Intron number 3 from transcript Si009498m (locus Si009498m .g) derived from phytozome v7.0 (chr-ID scaffold_7; pos 24 160533 to 24161237)
ggagtgtaatcggatcgtacgcagtttcggtgcaggtaaaagggtcgtggttcaactagcgtaattgagcttcaggcgactttatttagtgaactggccaactggggcaaggttttaggttccggttatgggctttgaatttgagcttgatgatttggagacttagctacggtggatttcatactttttaacttgtaaatttgaattgttgtggatcttagtttgtatctgttgctgttgtgatgggaatgccattggggtattgttttgagattgtctacctcctggagcgaagcagattatgtctctattttaatagtgtagtcatgctttattagactttgcttcgatgtcttgagccaactagtcattgcgtgcgagtctgataatagtttgagacccagttcatgttactactatgtgatttttggtcgagtgtcaatcctactaataatgtgaaaattggcatttggagcccaagtgttggtcggttcgtgccagttggcaaaaatattggtctaaatctgacattgtaaaacatctaactaaataactaactttctgttcttccgcagggcttaatatctgcctaatttttactgctgttagaatagctgaacttatgtagctttcgcagaacaactataaaagcgagtttacaaaatgttgctggtataattgcaatgcaggagcttttggttatag

SEQ ID NO: 112424 - DNA, 1011 bp, Setaria italica
  Intron number 1 from transcript Si021685m (locus Si021685m .g) derived from phytozome v7.0 (chr-ID scaffold_3; pos 20 966753 to 20967763 reverse strand)
tccatccgggctttggtcgttctctcgttttgccggtaaggaagcactagattgattggatctgctgttctgagcgacttagttttgttctgcggtatctgtttgaataaacgctcgatccgtcccgtccaatctgttgcgaatctgttgctctgtgtgggcgatagtgccagtttatcttcgagaagagaaaaaacaactcgggttttaactgaaatccccatgctcttgttgattgcgcccctagttctaaacgttgcctgttatttgttgggtgaactccgggtggattctgtttcgtgtttttgagaactgattcatggtaggagttagctgaaacctatttggctgagttttattattcaccttcttgccgagatccaaattgtgaccaaaggtgttggtagtttcacaagctgatgttcttaaacagatgtgctgaggctgaagccttgttttgtgtctgacaacttggtgacttgaaaatttcagtagctcgcacgcttggttcttttggaagtatagaatagattgtgactttatgagcttataatttgtagcttattgatgcttaaagcacgatatgagcttataataccagcgatggtagcataaacagcatgggacattcttttttttttcttttgatgtaactcacaaagtcctatcatgctattctcgtgagtaaaagatttgttggccttccacatacagaagactgtaagcaaaccacttagtgaactgtttgtcagcctatatctttgtttagggaattgatgttagtactgtagtgtagactttaattaattaaccatgcttagttttattcgtttgattacaactgcactaaagtttggttcctccaggagaccaggaaatacactcttttcttcaattagtacattgttgaaatactacttttatttgctagtaccatatagtatgttatcacagcaaggctaataattcatgctgtactactagggtgctgtgagaagtcgtagcattcac

SEQ ID NO: 112425 - DNA, 979 bp, Setaria italica
  Intron number 3 from transcript Si021958m (locus Si021958m .g) derived from phytozome v7.0 (chr-ID scaffold_3; pos 37 37546 to 3738524)
cagatattgctctctcacctgatcagcaattccttgtaagtatcttgagcatcgaattcctttcagactggatcctggaccttttactgctgtatttggggaatttggggatgtgtttgatcactcagaccatgattcgtagaaggtctgggggaaggggctgctcccgttcctactcatgtatctgaatattggtccatttcctttctttttttttttaacttacattctaggtctttcaatatctatttatccctggtatgcattccttcttcaaaattggctacatcctcaatatcatgtgatatcgtttttttctaatggaatatcatgtgatttctgatgagggatgatttaggattgttgtgatgtgctatgccaattgccaacagttacttaattttttaaggatcttcaccacgtccagggatattttatttctataacttcaattttaaaacatgcgggggtgtgaagcttgctgttaagtagtcacaatgcctatttaaataaatgcaacaatttatttgtaccacttaccgaatatcaaggtttgttacttttcttcatgcaaaaaaagacaataccacatacttaggtgatttttggttcgtggcacatctgttgctataatatgtgtttgaacttgttttgtatctattcttctttaatgacatgattcacaattatcctgcatgttcgagaaacaaaataattaggtgattttgtattactaagaaaataagcacccaagaggacttcagcttaggtgcacatggcgtactactgttattttagtttaccattttaaagttttatttgttaactgcttacttttttccggtaaagggcctaccttgtggtctattctatctgcagcctgcagggtgtgctgttaactttagactttaccaagtcgcaattcatgttcagtggcatgccttttttaatcaagcagatttcatcacttcgcaggcct

SEQ ID NO: 112426 - DNA, 855 bp, Setaria italica
  Intron number 1 from transcript Si009300m (locus Si009300m .g) derived from phytozome v7.0 (chr-ID scaffold_7; pos 16 480766 to 16481620 reverse strand)
cccatacattttaagtggctgctcgcgagacagaggtattaacactaccccgttgtaagaaatccagcttcttctttcattacactcgatttctatattgagaacttaagcccgaggccattcagatatctagatttattatttattaatagaagcggtgtttacgtcttcaaaaaaggtacaatatatagggcagttaaaagaacccatagaaattcagcaaattataaatggtcctgcttgacttcctacagatgttgtagatatgccaactacatagttacccatatgaccaaaaaaactacaatactctatgtatttgtataattgatattcagtatgttacatactgtatgtactacttttcttccattcattttctttctgaattacaaattctcctaggattgacacagttgtcaaaaataccagaaagccatagtgggtgtcagggtgtgttgagcagaatacaaaatatgggtgttagaagtatgtgcccgtggggagcagaatacaaagcgcgcaaggttttcgtgagtctttgagattggtaattatatcctcaaagttataactttgggtcctctaaaataagtagtaagagaatttggaggaacttgtcccagattttctttatcttaaaactaatttggtggcttatattcaacctagctatatagtaatcatcccattctgggtcacactacagcatctatttacatattagataaaggtattacctgccaaaagaaaaggtattacttttctatagtactcattgtgaatacttttctactggaattaggttacaatcctgcagcgcaacaaaaagccaattgcagccgtgtttgtgga

SEQ ID NO: 112427 - DNA, 878 bp, Setaria italica
  Intron number 2 from transcript Si023715m (locus Si023715m .g) derived from phytozome v7.0 (chr-ID scaffold_3; pos 33 479560 to 33480437)
gttcggcaacacagagatcggccagctaactcaaggtgaggctttattaacaattgttttctttctgtcgattattctccctagctttcttcaaagccatgttgttcttttgcatacatatttctgggggtagttcttaagtttagttcagctatacatttgtctgattacatttcatgtccctgttgcattgttttttgaataaatttaccaaatttactggtcatgtacaacagtacaaggcaccaccacattctgctctttcttatcagaagctaagctataatgaaaaaaaacaaacgcagaaggtaaagtctgaaactgtactttttgcacttttcccttatgaacaacatgggtgttaattttgttgtcatctgaagaatgaatgaatacaagttcattttacatgttggacagccagacagcgccatccatcaatgatttgcatctgctttcgcaagaaaaaaaaaggaaatgattaatttgtagttgttgctattataagcctgaacttgtggccacttgtacatacaggtggcgcaacgtacatatatatcacatgggcttgtcgtcagttgggtagtagctccgcttacaatgtttagtgtgaatatatatgttatatgtttctatttaattttataatgcgacacagtggttgagaacagatgattagtattttttctccagtatggttaataggtgttcaaaaaataagcaagttactggcatgagttatctgttatgtcaagctattattttggtatagtaaagtaaaaaatatatactgacgaatatagtccatttcgaattatgtactgattcttttctccatttcagggttggagagcacttcaggtgctctagcacctttg

SEQ ID NO: 112428 - DNA, 873 bp, Setaria italica
  Intron number 1 from transcript Si006842m (locus Si006842m .g) derived from phytozome v7.0 (chr-ID scaffold_4; pos 37 87829 to 3788701 reverse strand)
gcggccgcgtccgcatcgcagtcgtcggcgacgtggtacttcttctcccctctctctacgaacaactatgcactctcttctttgaggagggggcgccagccatgggtgcggtacgggtgtagccttttgcgattccgtgttggattccaggttctgggcattagaagcaaggaggctggaccgccggagaggatttggccgtttgccatttggggactggggctctgcacattgacctgattgttgcagacttgcagtttggcttggtgattgggtgatggttggtagagttcggggatgggcgcgggacttaggcggcatttgatttctggaatttcagtttagaattttagcaagcgggacatggtttccgttatggggcagaattggacaatcatttgagttgtgttttccccccaaactcgagcgtaggcaaacacaggctcatgcaatatcctttgattccatattctgctggctaaacaccgtggaaacctgctagtcacttggtttatggatatgatttagtagtggatgacttgcttcctttcgctgtgtatggtagaaattacttgagttgcgttttcccaaacttgagcatagccaaactcagagtctcaggtgctgcattttgattccatgttctgctgatcagacaccttggaaagctgctagttacatgtatttctcttatggatatgatttaagagtgaatggcttacttttgtggtttgacaagaccatcagttatagtagtaactcttgtagcgtttatgcttccgggtttaaaattcatgtaatcatgtgcttagatctgattgtatgttgtactccgtactaatttggtgtttatgtgttgaactgtgcagcaca

SEQ ID NO: 112429 - DNA, 586 bp, Setaria italica
  Intron number 2 from transcript Si012287m (locus Si012287m .g) derived from phytozome v7.0 (chr-ID scaffold_7; pos 25 666495 to 25667080 reverse strand)
atctgaaggtaagtctgttctgattttgttttctgtactatgtagcccgtatcacgcctttgggttgtggacgtagcaggtgctgtagatccattgtgcactagctgcatagggtgattgtcagtatttttgcatgttcataaacataaaatctaatttattaagttttgaactttagatcaagtcgttgcatacctccagtttgtttgttttttctttgccactcttacagatcaaaatcaattacttgttcaattgttgtcaagaataatctcgtagctgtaccttatgccattgaaagctttagcaggacaagatggaagcaaaatgtatttgacacccataatttagttatagttcctttagtaccaaatgcatcttgtactgattagctgattttgtcgctggtgatggcaacttacttcgttaggctgcattggtgtccctttctgtgtgctaatggttttcttctttacaaaaaaaaaacttgaaaatccccaacttgtaccattgactttcaatgtctaatctgcctattgcgtgttctagtgctaatgccaatgcattgttttacagattggagaat

SEQ ID NO: 112430 - DNA, 754 bp, Setaria italica
  Intron number 1 from transcript Si021179m (locus Si021179m .g) derived from phytozome v7.0 (chr-ID scaffold_3; pos 10 863855 to 10864608)
ccaaaatatcaagaagtacttctggacggtggaaggtaatacaccgatttccttcaacgtgacattttgtggtgcccacaaagttataacggtcatgcgtttgttgtagtccaatgatccataactagaggtacttaaatcataggacatgtattaactcaaaattagaaaataagggtagagagaaattcttatccaatcctctcatggttaatttatttgtggttgagaagatgaagacaaattttgccatcaacatcagtagaaggctaaggggccatagagatcatgggagtggataggtaatagattagcctattacataatatcataatgaaaacgcctccataaggttttcctgccattcctcatgtggttgatataatcatggtttttcagttgtcatggcggaatggaagggcaccaaaaaggaaataagcatatggagcaacaaaaactccaatgccaatagcagaactaaatgttaaagagagaaatcatgagcacaccaagggttttaaaaatttggaactgttactttgacaaaaaaaaagggacctaaattatccttaagttaattaacctctggggaaatgtttggtgttctttaggtgctggtacctcccaacacattgcaaacaccgtaaaaagatctagttctatattcttttgtctcgttatgatctctaatcctcctatattgcctttattttctgcaggaatacttggccagctgccttggtatattgccatt

SEQ ID NO: 112431 - DNA, 540 bp, Setaria italica
  Intron number 1 from transcript Si021302m (locus Si021302m .g) derived from phytozome v7.0 (chr-ID scaffold_3; pos 11 047794 to 11048333 reverse strand)
ttggtgaggtatattcttcttcctggattgattcactcatatcataaaatgtttgtttgaacatatgatcacatttgactattttatgcgcattcaagcattccaaattctgtggctctactggctgtgccattaagaacaaatccatcttggttattttctgtccgaagctacttttattttgattgtttgtcagtgatgatcgccttattattagtgaaaatacttgagttcttgagtattaaccatttgttgtatagtaacctatccagtacaatcttttcttggcatcagtaattgtgttatccccaatgtaatattcctacaataacaattgggagttaaccttatgaattttttccattgaaagtttgcttcttatttgccttcatccatgccttgcagacactgttagaatctgcgtcgactttcttagattttcatatctgctagatagttttactgtagtactgtttgagcattgcctcctaaaaatgtcttaagtactaatgactttatacacataaatttcagtacaaa

SEQ ID NO: 112432 - DNA, 882 bp, Setaria italica
  Intron number 2 from transcript Si006280m (locus Si006280m .g) derived from phytozome v7.0 (chr-ID scaffold_4; pos 14 026561 to 14027442 reverse strand)
cgggaggcgtcagttgccatcttcttctcctttgagtaagcttaatttttagttctcactgtcctgaaatgccttctttttgtgtgttgccttctgcgcttggtaatgattgagatgcatcttcactactcttcctgtcttcaccttatcactgtatcaatgcgacaacaaattgtcctatttatcaacattagaatacgggtggagattgattacaatgaacaaatgctgtgaaatgataattcccaaggtagctgacaaatatttgcaaaacgagaagtaacgcatgttagtccatatatcacactagttaccttttcgtagttaccaagcctaccacaaaagtctctagtaattcgtaaatgcattctctttccatttgtgtgcattctttgcaatgaaccttaccctaaaccctatgaataatgccagattagcagttattgctttttttattcacttgatgcactacttctttgcactgtatcttaaactttcattacctcatccatctcacgcttgctaatctgttcgcatatgtatgttctggttgctatattacaagatgttagtctagcaacttgtgcaattatttcagtttatgtttgagcaatactttaggtaatagcgcttcgcagtattaggtccatttattatgaaactccagctatagaatttcttctttgcttgttgattccaaagcaaggggcatgccttccaggcaaggtaacaaccctatttgctaaccttaagatggcctgaagatgtgattctgttgttctgatttctagatgcctgaaaattatttcttgatgtattattcaaagattcaaaatactctagtacaatagctttaacatgtacaaatcatgtttcaggtat

SEQ ID NO: 112433 - DNA, 630 bp, Setaria italica
  Intron number 2 from transcript Si022835m (locus Si022231m .g) derived from phytozome v7.0 (chr-ID scaffold_3; pos 25 298436 to 25299065)
caccaagtataaggccgctgccgaaatcctcaacagtaagtaacctcgccttctcgccaaccttatcatttttgtgattgacctgctctctgttgctgccgcttgcctggggtagaagggcggtgtttggatttttttaaggactggttgccgctggtatttttgaattgctatgggtagctggatttagctgtttggtgagtaataagttagtgatggcagtttttgaaaaatggaaattgatatgttgaagttgttcatattgaccgtgatgggagtttttgagaaatataaattggtagagttaagtatctggtatcagttgtgggaccttatccattgtgggttgcagaatacaggactatctgtttgctccattttctttggaattgttttttgtgttctgttttgtatgcttgttaagttcaagagcatgattttgatgatgttcgctgatagagtaaactcttacggttatggtatttagctcttaaggttactttggattaagtatttgtttgggagattggtgcttgctttagcatgatagttcatacaaacatcagaaaggtaattctcaaagtgtcttcccacttttggaacagacgctctgaagctggttgtatctga

SEQ ID NO: 112434 - DNA, 814 bp, Setaria italica
  Intron number 1 from transcript Si021858m (locus Si021858m .g) derived from phytozome v7.0 (chr-ID scaffold_3; pos 61 97472 to 6198285)
tcgaggacgaggtggtgcacaagatcaccaagcaggtgggtgttgtttttccggttgttatgtttagatcaaaggcaaatattattagtatatttcgtcgatttgaaaacataggctggcattctgttgaccaaaaaaaattcgtctttgggtcaagacttagtcaagtgctaaaatgattctgtgtttaggaccagcaatatatatggctttatgctaatttgagcatgctagaaatttgttggtgtatttggtcaatactccaattttatccagggggaaacactagcaaccgaggtattgcagtgttgaggtgtactggccatctggccaagttgtgtgagaatctgagatcatgcgtttggctaatgaactgagcactctgaacattcatgctagttttgactgcaagtgatttcgtttggttttttagtgtatcagtatttttcttcagacagtatcaattaggttgtaaacttatgaagtcagctgttccttgttgtaaggtacattatagtctagggagtcattcgctcctagcatctatctgcagaaaattgatctacttctctgtttgttactatagtcaagtacgtctcagaatatttcaggaaaaatatgtatgtctcatggagctatttgtagtggtaaagatcaggacatggagcagcgatagtgctctttacttgttttaggacagcattttccttctttcccttttgtttttatttgtatgtttcattaactacgggtgcaatttctgtattgcatttttgtaggtggagtactattttagtgatataaacttggctac

SEQ ID NO: 112435 - DNA, 814 bp, Setaria italica
  Intron number 1 from transcript Si024284m (locus Si024284m .g) derived from phytozome v7.0 (chr-ID scaffold_3; pos 31 769236 to 31770049)
tgctccgccgcaagtgcgcccgcctcgacctccttgtaagcgcataatcggcctggactccccacgaactgtgtaaatctcggagtatataggaagctctgctgttgggttggctttgcgtggcaggtcaagatccgggtgtagatagttgctaaaactgtcatgcctttttctgctagaattgtattcgttgcaaagtcctgtagtgctgtgcctactgacctcgaacacacactaaaatttagtttatttttatattctcatcttctgaagcaattgatgtttttgatctagttttttttcttagggcctgtttggatacaggctcataaacttgtttagtacctgtcacatcgaatgtttggatactaattaggagtattaaatatagtctaattacaaaactaattacacagatggagtctaattcgcgagacgaatctattaaacctaattagtccatgatttgacaatgtggtgctacagtaaccatttgctaatgatggattaatcaggcttaatagattcgtctcgcgaattagtataggggttctgcagttagttttataattagctcatgcttagtcctcctaattagcgtccgaacatccgatgtgacccctcctaaagtttagtacctcgcatccaaacacccccttaagttcatagtaaaccctctgttttttaattttgctctgtaagtatctcatctccacttaatattttatttgtaagataccatatgtttttatgatttatttttattgggccatgtgcaggtaggccagtttattgattcagtgaaggaagaact

SEQ ID NO: 112436 - DNA, 797 bp, Setaria italica
  Intron number 1 from transcript Si023004m (locus Si023004m .g) derived from phytozome v7.0 (chr-ID scaffold_3; pos 38 755096 to 38755892 reverse strand)
gaccccgccgtcgactacttccaaatctttggcctgtgagtagctctgctcggcagatctcgagcctttcaattgcgttgctgtgaccaattaggggctcaaagatttactcataattcttgctttgattgtgaatcctgcgatgtctttggaatctcagtgttccttgtttgtggattaattttgactacgctgcaatcatagcactagcatactagtgactggaattttagtgtttgcatatcagagttgcagcatattgttccatgtatttttgtgtgtcctgctatgctctgcagtggaaatcatgggaatcaggaatgaattttatgttccatggatgcttggagaatgtactcatctgtggctaggattcatatactactcctccctctatactaaaacatttgtcgtttatgatgttagcgtcacccacaagatgatactttggcattcctctgtatgtcattttaaaatggcctaaccaaacaccacctaatgtttagatggcattcttggcagggtgataggtgatattttttgttattaattaatgtgagtaccataattatttagtcattaattcattttttctggtaattagttcagaaacttgtgttttcttatcatgtagatttctacacctttttacagctaatgaaactccaatgttgtttaacattctgccatttttgctttacaagtaatgtttctatgcaactgaatatatgatgctgatttttttctttttggtttcttcagagaaagagaatacaacataaaagataataacttgg

SEQ ID NO: 112437 - DNA, 433 bp, Setaria italica
  Intron number 1 from transcript Si021439m (locus Si021439m .g) derived from phytozome v7.0 (chr-ID scaffold_3; pos 20 963009 to 20963441 reverse strand)
aggtattccgctccctgcaagaactcttccctcaggtgcgtaccgcgtacgatcggtgttctcgtccgcgtgtcgcgcgcatcccatgagatttcgtatgttagtggatttattcttccgtgattttttgtatgtactgacgcaattgtggctgatggtggagtaactagtcctaggacacacggatatgttaaattccagtgggattaggagcttcttgttgcggaatttcgattcgatttcagtggctatggagaaactgtacacgattatttgattattagttcgaatttaggggtgttatctgtttgggttaatgggcaacctgaattgcaaggtttgtgcggttcatggctgtttccggaggggcaaatttgtctgattcctcttttctgtaggttgatcatcgtatactgaaggctatcgccattga

SEQ ID NO: 112438 - DNA, 629 bp, Setaria italica
  Intron number 1 from transcript Si025096m (locus Si025096m .g) derived from phytozome v7.0 (chr-ID scaffold_3; pos 74 99352 to 7499980 reverse strand)
cggtggacgtcgagcgcatctctttcggcggcaaggtccgattcgatccgacgacaaccacctattagccttcttgcttccattcccgatggccacttttgtagtcttcagttttaaattttagttctttgctttattcctctactgtctagttttttctatacctttaaattttagttcttcgctttattcctctaccgtctgttctttctttctgcttagaaatgttttgattccttgaaatgcagtctatactaatgggtttttgtctgcaacgttgtcaaatgctttttatttttggtgtttctacccaatgttttgctgtttctatcatctttgtcaaacaacggctgctcggctgcacagaattatgctcagttaatttctttttcctacttgtgcctagtcaataagaatgttggaattctgacgtttcttcttgcaactgatactaatatttggtccctgtgcatctgttgtggaagtcgcccaacatttgccaaacttagcatgttccacttccaagtttcttttgtttggactttggagtggtccatgttggctggactagtgctaagaactaaaaagggcgtgccttttctttaccaggagcatcttgtgaggacgag

SEQ ID NO: 112439 - DNA, 378 bp, Setaria italica
  Intron number 1 from transcript Si012819m (locus Si012819m .g) derived from phytozome v7.0 (chr-ID scaffold_7; pos 81 0185 to 810562)
ttgctgtttgcctatttcttcgcggtgaattccaggtaaaaacaacagctgttttcttcccctctgtaaattcagttagatgctttaccaagccaatcaactgtttgattaattatcgacataccgccgtatagtgccacaaacaattggtcctattctttcagcctcctcctgtattcatgtgaagtatttcctctgtttcatgtctgaactgatttactgttttccaaaatcactggatacatgaactgatcggtttgcttgatagacttttgagtcatcaccattttgttccgtttatttctccatcctatgttttgtgatatgtgtactaccatttcagggtgaacataaccctgggccctaacgaggatcggg

SEQ ID NO: 112440 - DNA, 639 bp, Setaria italica
  Intron number 2 from transcript Si022817m (locus Si022817m .g) derived from phytozome v7.0 (chr-ID scaffold_3; pos 87 81650 to 8782288 reverse strand)
gagaagtcctacctccacagcgagcagaagcagatgtgagtcacagtccttctcctgcatttacaagctctccgcatcttttattgccacaaacagtagctcctgtcttgctgcagcggtcatggtttctcatttcctcgtacgattgcatcttgcatgcatctagctctattttgtcatttcgcattgggactgaattcaattgaagcgttggaatgcacatgtgggagtagcaactgcccaactaggtatgataggtataggagggccgagccaacctaaggcaaggacaccagcaggtgtgaattggcttgactagaataaagacttttggtaatatctggaattttggaattatctgacaactgtctgtgtactgtttctagtctgaattttgtcagttcattgaaattcagagaaaggggccctctcatatttgtcagtgcagaataaatttcagaaacataggatgtgcactttcttctttttttaatgagtggatagtttactgaactcaaacttgcagtgtactcttatttcaacatggcacattttcaattgtacattcagattcattgaccatattatgacaattgaaactgttaatttacatcagggtgctggacaacttgaaagatt

SEQ ID NO: 112441 - DNA, 863 bp, Setaria italica
  Intron number 2 from transcript Si006437m (locus Si006257m .g) derived from phytozome v7.0 (chr-ID scaffold_4; pos 37 81772 to 3782634 reverse strand)
attagaagaggaacaaagaaaggcaaagacaataggttagtatgcgttatattcctcctgctcctcaagtgttcattatccaaaagaatgttaaaactcttctgttgtttcatttctgttagctgtccccttttatgtttgctaatttatgcattgacattcatccaggttcataatgttttagagaagtgcttatcacttatgtttacctatgccatgacatttgtcaaggtacttagtgttttagagaagtgcgctttctcgtattatctgtttttttaaaaaaaaagaatttgaagctagtccactgcatatgataatagtacagtcagggggagtatttcttttaagataattattttcttcctgttcatttttgtgaccttgtctaatgttcatcaagaaactcgtttatcttatccatttttaagtggaattagtttgttctagatttctgtggattccttaggtaaatggaaacacagagcgatacagttccatccaaaagaaagcaagaaattatcatgcagttaattgtttgtcttggcatcctttcttggcatctgtgtgtttacttttgatgatgggttgaagaatgatttctccaatttctatggttagatatgaaaattaacttgctgaatatttctctggattgcatccctgaaaagtgagtattacatagaagtgtatgggtatggcgaattggcgttcaaagctttatttgaactactgtaactcaatgtactatatgtctcagatgctgttacaaaaattccgtatgaattcatgcagttaatgtgtgtgacactttctggtttatttttttccccttctagacaaggatacacatttggaggacg

SEQ ID NO: 112442 - DNA, 624 bp, Setaria italica
  Intron number 1 from transcript Si021917m (locus Si021917m .g) derived from phytozome v7.0 (chr-ID scaffold_3; pos 14 602852 to 14603475)
gcaagggcgccaaggtcatcctctccagccacttggtgagtctccggccttcccgtctcacatctgatttggtgaagccgtgctcttggcacgcacagacaatgcaggaactccggactcgtgggatccgggcgtttgtgatcatgtgatttgctttggtcaagtaatatatggacactggctattagtcgtgattttgcttcctgtgttatactataccatttctgggcacaaattgggcattgctacaaaggtggaagagatgttttagaaacaagagttagttacaaaaggaaaaagtatgatattttaattcagcgcctgcttgtaactttaatcttagaaatttggtatctgactgctgctcttcgggtacacacacaatgtaggagccaaggacttgtagaatgatattgttcaattatgtgaattgtttatgcacactggctattagttgcaaatttgccttttgtgttgattgagtttctctgaaagattgctggactaagatattagttcagagacagctgcttatattgcttaattcatccaattttgatcgcatcccccttttcttttggatgtgcagggtcgccctaagggtgttactcccaagtttagctt

SEQ ID NO: 112443 - DNA, 662 bp, Setaria italica
  Intron number 1 from transcript Si021748m (locus Si021748m .g) derived from phytozome v7.0 (chr-ID scaffold_3; pos 22 305312 to 22305973 reverse strand)
ggtgagggcgctcgctgtcccggcatcttcgtctcgtttgcgttgctggtagaatgctgcgaatctgcgcggctggtagaagcgtcgtgaaaaagggtgagggaaggacgtttccacaaatggaatgcggatgtgtggtagatctcgttgtcgcgaatttattgctccgtgaatcgagaagcgactctcggtttgtgaacgaccatttctgtgggattggggattgttcaatggcttcataatttcgtttcaaatttaaaaaactggattctgaactctttttttgttgttggaataagccaattctgattagcttgatgtgtcacaaaagttcctctcggtcaattactgtcttctctttgatagactgtttggtactcttcgattatttcatatgatggagtagttggcgacctgggagtacatgaatttaaacttcttgtacgtgatatgctacaatgcactatcgtttatgaatgaactatgcaacttgttggatctagatacgttgctttgttttgaattatcaacttcgtgtatttgtggttcctggtttcgattgctgttatagttaaatgatggatttgtatgtttccagtctaacaagggaggggagactgcaagcctgccttcactcattcactccgcaaaatctgatgaag

SEQ ID NO: 112444 - DNA, 918 bp, Setaria italica
  Intron number 1 from transcript Si010017m (locus Si010017m .g) derived from phytozome v7.0 (chr-ID scaffold_7; pos 17 377326 to 17378243)
tcgtcttcaacaaggtcgagctcgtcgacgaacaggtaccatttcaaccggtgccccgtgtggctattcactcggatagttgctcaacggatcagattggctggaccgtagcatagcacattgcattggagatacgaattgtgggctgtgaataaggatttccctagttcatttgacaatttgctgtgatgtgctcggtcaagtgggaacaggggagaatggttttgtaaaaaaaaaaaggatgccgaacaaatttcaaccccgataataggggtcagcattcctgctttaaggtgttattggtggctcctttgtcaatcaaatagtcaataatgccactaatgtgctcatattagacctccatacaactcattaagttgatccaccctgtacactgtaaatatgtttggggacgttctcctttagatacagaaaaggtcacctgtatatgcagtaatgctaaatgctgacagtattctccagcttcaatctgtcatgggtaaagacttacaaatccaagcacattaccttttattgaacaatcaactatcagagacttggtacacaatacgtacctgaagatatatctatcgtttagaaaccccatcatcgaggttggtgtcctgtatttggagctaacctggagctagtaaagcaaagcaagggccattctacttatgcattcatgattttgttttccttgtccattattctgatctgaacaaatagcatgtctgcatgtgcagttgctcgactttcagtgttcttcaattgtaaatgtgtaataagatatgtagattattgcattcattgcatgcactctttatgtgttctgttttctatattatatggttgattggtattcttttgctttttgctgcagacaatagcttactggagagataggttaaagagttg

SEQ ID NO: 112445 - DNA, 724 bp, Setaria italica
  Intron number 1 from transcript Si013877m (locus Si013547m .g) derived from phytozome v7.0 (chr-ID scaffold_6; pos 28 219261 to 28219984)
tggatcccggccgcgcccatctcgcgtcgctgcaggtcggatctattcctgatttggtctgtttgttcattctctcgtcctggggctggcgtgtgcagatctaggtgtttctgctgtgcctgcatgcagcggggagttgtcgtcccgatatgttcgactcggccagatggctgccgccgcgatggcatgttctgaggagaacctgctcgatttcgcccatctgtgtccaattccggatagagatggtgtgcccgatagcttgcttgttggttagctgaatatgatttgaagggctgtttaatctagatttctagctccaaatttgagtgataggaatataatttagtcttattttcaatggcgacaagtcatgggaaggattttgttcgctctggaatctgtccatagacgtgattttgttttattgggcaattcacgttgacatctcatgaacattttctgtatgtggatggaatgctagttgaggtccacgtagagtgagtgtgtcctcggttgtgctagtgatggttgggagattgaatttcaatgtgccatcccgtagccaaatgataccgggttcaatttcttgtgaccgcttttgttctgttctagacctattgctgtagctggaacatctgattcttctagttactgctctgtctattatctgctatatcatctgcgtaaatataaatctaacagaactttgtttctgcagtcaggc

SEQ ID NO: 112446 - DNA, 903 bp, Setaria italica
  Intron number 3 from transcript Si009636m (locus Si009636m .g) derived from phytozome v7.0 (chr-ID scaffold_7; pos 30 419282 to 30420184 reverse strand)
gcaggtgagaaaccctgttttgttgtggcagtgatgatcgatgctgtctttgaaaagcaagaagagtgcagagtttctttgccaagcatttattggaatgatcaccaatctgttctcagtttccaacttaacgttgcaaaatatccttcagatcatttaaagtatttgactgtgtaatgccattagcattcaattttttgattacttgctaattgctaattcctcgggatgctactcttcaagttcacacattgatttggtcattttcaaagaatctacttagctacgatttttcagaaatatgttttagatctttgattgaagtgctaatccccttctctaacactaaaaagttttgaggtagttaagagttgttttcagtttacttgggaagtttggcagatcacaaatacgataatattgtgcttgttctttgtcataactgggcaagtgcattcagaattttcctattgaagttacttaaccccgaccagccaactgggttgcaacttactgttacaacttaaaaagtttgacggatcatcttgtgaaaataacgaattctccagtaagttctatagaaacggctcaccttactgcattccttttctttcttagttttgttggaattgtttatttcatatttacatgatcagttatccaagattatctctccgttattctgcagcccttagttatttgcaacactagtagcatttcatgtttgatgctattgtccataatgtttactctgtttggagtacatgatctatctatggtttccttattgacatctcttgatttcttctggaacttatctttttattttcatgtgttggttttaatggtaccttttgtcctgtttcagacagttgcagctgtgtgtgtatttctggcatcgaa

SEQ ID NO: 112447 - DNA, 868 bp, Setaria italica
  Intron number 1 from transcript Si021530m (locus Si021529m .g) derived from phytozome v7.0 (chr-ID scaffold_3; pos 20 488177 to 20489044)
tgcccaattcccgccgcggcaggaagcagctcccggtaaggtatccacggactcccttcgcgctctctttcttctctctcatctgcttgcttagactgatttttcgttcgcgtggttaaatattgcggttcttgttgagggttcttgaagttgagagatgctgcgagttagttataccgacaaaatcgatcaattttgcgttttcgcggagtactgtggtggaattttgggagataaaccctgtgcatgttgttgctcatgtgggtttgtgctgtggtaatcagatagtcccttttatttgttataaaagtaggactctgggtgtgaaatcggagggaaagatggggggtatgtgtttggatggtgccctctttccgaagatttttttcttagattttttttgcttctgaaaagttgggtacctttttgcggttagaggcgtttgtgctaggtatgagagatcaggatattaaacaagaactgccttttgagttttgatgttttttatactacaactgaggactgattcacgagctgcttctatcagatgattcatgcatccggttgcgcttattctttgttgcaacaatcttagccgaagttcccaactctgtgttatttgcttgcctgtgtgtggggactggttctttgctgatgttgcctgtgtgtggtccatattattgatattgtccatatcacgtttgaatcgaattttgcattttaggtagtgggagatagaagatgcatagcgactttcaggtccccatacggttgctgtcaccaattagcatgcgtgtttctaactttatggtttggattacgattttctgtaggtgaagtttgagtcaaggagaagttggattagtct

SEQ ID NO: 112448 - DNA, 640 bp, Setaria italica
  Intron number 1 from transcript Si022896m (locus Si022896m .g) derived from phytozome v7.0 (chr-ID scaffold_3; pos 46 67841 to 4668480 reverse strand)
ttctccgtcccgttcgtgcagaaggtatgcttcttgcttccatgatggttgctttctcaaagtttcttattgcagttcatctggaagtctagctcatgatatggctcgtctcagaaatttgtggttcttacatgcatgtttagcaaagctcaagcaggagtcttttcttgtttactgagaaaaaaacatcggcgggttcaataattcagtaagggaaagaacggaacagagcaaaagacaaagcaaagaacaagatgagaagttctcatgtggttggatctgcgacgcacgtgagaaatggccaaattcagaacaatactgtaacacacgagcggcggctaaggaaaaatccaaggaatacatttcttgcgccatcttgctagctcgcgccaccttgtcgtcttggtgaagcatccaaaagttcacatcctgcaacagctggtcttcgcatgattgcaatacaattgattgtttcttatccgatcgacgacgtacagtagcaaatacaagaaaagaatcagtgggcaactagggcaagcaaccaatgtgaatgcgacgtctgatagtctgatagaggattaatcctgcccctgaattggctgcagatcatcgccgagatcttcgggacctacttcctgat

SEQ ID NO: 112449 - DNA, 820 bp, Setaria italica
  Intron number 3 from transcript Si020942m (locus Si020942m .g) derived from phytozome v7.0 (chr-ID scaffold_3; pos 58 79643 to 5880462 reverse strand)
catcaccttgtggtgtttacacaagtaagtgagtacgagtggttttggttcttattgtgtcactaacatggattaactataaagtgtattaagcatgaaagaaagggtctactcaagtctcgtgcatcgagagtattaacctatttccattggaatgaggaaggaactacctagcatttgaactttgaagtccttcatgagatgtgacatctgtaatcatcataatctgcatttatttaaatgaaaattggtgtttgtggaagctatcattctttggtcttgacaatagcattttcagatgtgtaatattacattactaatatgcagaagtaaggttgttgtgactctaacttactagttcgcatgtaagtagtatatgtgaaggctccaaatttattgacccatatgtggaggatttgggcgctggctgctatttccatgcttggaagaaaagctgtgctgactattgaaaggatttcagtccatgcatcatgttaccatttatgcacatcaagcatacattttgcagtgatcattatgtttctattcctcagagagaccaattagaaattttgggagattaggtggcaactgttgtttctgttgacagaaatgtggtactgttggcattttgctccaatccctacgcagtaccgatttgcatcttttccttttcttttcaggtgcttgaaaatggttttacaatgcgaaacatagttccttgtgcatttttctgcagtagatttcacgggattgtgatgtactaggtatcaaaattgttctgattacacactgtgttctaattatttatggccagata

SEQ ID NO: 112450 - DNA, 618 bp, Setaria italica
  Intron number 4 from transcript Si013406m (locus Si013406m .g) derived from phytozome v7.0 (chr-ID scaffold_6; pos 15 711810 to 15712427)
gcagtccgagggacttgctctccatcctctgcgaggttggttacgctttgatttgtgtatgttaagttctggctgttggttgtcaaaactgccgtgttgcaatgctgatagaaaattcctccacacttggaagcacagcttgaatagcttgcaatttgtgagtacatttgctgctacaaaatatctccacccttagattgcggtttatggggtgggcggataaggatgcttgaacgtgtaatgttaaatgtgggatagcaataatgtatgaacgtggctcctttctcatccagatgtaattctatatgcgcattcactgacaaaggcttatgactgatgcccatttgggctctaagatgcttgatatgattttttccaatcaaatagatctggatggattagtcttcaatatttaaaataatgtttcctttgcccggacttgcgtagtgcaagtggtatagcattagcattgatacattcttaggaagtatataagcatttgtagcattgaaattagggtcttgtgtttttttcatctctctatagctgatactcagctcctttatttatctgatatctttttcttaacctatcatatttggttaatataggcattag

SEQ ID NO: 112451 - DNA, 1018 bp, Setaria italica
  Intron number 3 from transcript Si025035m (locus Si025035m .g) derived from phytozome v7.0 (chr-ID scaffold_3; pos 18 494505 to 18495522 reverse strand)
agcaaggtaattaggtaactacttataacataatggcagtaccaagaacaaatctcctacggtaatgctaagctcctaacgtccgacgccagcaaaatatcggacgcgacgtggctctttaccgtccacgtgaatcttatcccttcacatatttatccccatgatcttattcaccgaacaagatagtcctccaacagctctctctctctccacacacagcaagttcccggtggcctcgtcccccaccccaacggcgacgcgctcccccaccacggcgtcctcctcgtccaccccggcggcggcgcactcctccactccgggaacctcgttccccaccctggcggcgcccctcccccaactccgacgtcctcaaccaaccgggagcacccaacgccccggatctgttttgcaacagtctgacctgccaacaatcgggtgttgcaccaacttgttcatgatgttgcatatagttgttttctttgtttcgtctcttcttctttcgttgttgtaatgttgtaagagatatttttttttgttgcaatgtgtctgttttgaatgttgcacgaagcaattcgggatgtttcatgcacataaaggtgttgcaatcctcggtgttgcaagcgttgatttttgatgtttcgatagttatttttcaatgttgcgacggagcgtccgataaaataaaattatcggacgtccgggcgctagcacttctgaatctcctataccggaatcatttcaagagcatggaaatttgaatgttggttacacaggaaattttatggtagttgtactactgttcttagtgtctccaattctccattgccatatgaacaatccaggataccaatttagtggtagctatgatggcaattgaaccaatattgaatgcaacttgactttttgagcatcatgcattgaaatctacgtagtttccacaaaagtagatgaattttaatatcgcatgaaaaaaaaatcaactttatgcagatccaagaaaaaataccacttctggggg

SEQ ID NO: 112452 - DNA, 1025 bp, Setaria italica
  Intron number 1 from transcript Si009688m (locus Si009689m .g) derived from phytozome v7.0 (chr-ID scaffold_7; pos 22 260806 to 22261830 reverse strand)
aagcgaaggaggagcttgttgaggtaaacgtggcttttgcactccttactcatgaatgttctctgtgatgcttgatgaatatgggaagacaaaaatcattaggcaagacacatttcatcttgaaaaaaggcaatatacataggattcgagaggaatggagatggtacatccacatcgatacagaaattaggaaatgtcaatcaagcatactgtatttgtggtgggcttgcttttgctttgtcttagaaaatcactatgcatatagtgaattgcaatcacctcttagtcatgtgcatacattacatcagagctatgctccatttatcaagtggaaatgtcattttgataattcctctgctttgctcttgcattatgcattaatcagataatgtatgcctacaaacttcggcaatagtttatttcacatttgttagactcctataagagcttactccgtaggtcgttcgtgacacgaacttgaaggcttcattcatcagttggctcagtgttcactttaaagtattttttcgcatattagaagaagcaaaacttgggaatatgaacattacaataagatcttttgagtttcattgaggggaattaagcctgtttgccttgtatttgcttacttttacgatgtgcctcttgtactaaaccatgcctttgcaccattttgtttacgaagttcattgacgaaaataaaaaatgctgagaacactcttacaaggaacagaaatgtgatagctcctggaagtctgggacaacagggcagatataaactgttgaatggttactttgcacttgggctttgtacttgcatcttgcaattatattggtctcaaataatgtcctttagtaagtattgagtgctgttttttttccataactaggaatttcattggtctgaagttgtttctttttcccttgcaagaattagttttgcattactactgaatctggacaatggtcattaagaaccttagtaaaacatggcgattttccaatgcagatagtaagctgtttgc

SEQ ID NO: 112453 - DNA, 700 bp, Setaria italica
  Intron number 2 from transcript Si011536m (locus Si011466m .g) derived from phytozome v7.0 (chr-ID scaffold_7; pos 24 813200 to 24813899)
aggtgggaaagaaacgagttccagttctttgctctcttcctggctgttgctctgttttccaattttctgttgggatcaattatagtttagacacatgtgtcgaggtacggccttactgaccaattgctagatgttggatgaacaaatgacacgggttacctgggtagtcaagcagaattggagtaacttttgttgttgcattctcatctagctatgtagatttgtcatgatgactttatatattactacaaattcctagggtaatattgttctaacaaaattgagtagcttcgtaccatttttgggtgtggttagattgtgcggaaacatatcaattgtccacatatttttgggtggtagtgtaaacttaatgcagtataagggaactagagctggatatataaaattaaactctgaaaaaaagtaagaatctatagaactataaacaactatttggtcaagttataaaggagtgtgaaatagatcatgatgtagaatcatgtggcaacagaataacagggttgaatagaggatgcaatcccatccattgagtaatatagcattttttttgtcacatctatatagatcaaatttactctgaattgtgattgtatgtgctcttataatgagtgatgtgatgcagactgaacaaaagaagcaagtcgctgcaaatgttcttttccactattcacagtttgtg

SEQ ID NO: 112454 - DNA, 1024 bp, Setaria italica
  Intron number 1 from transcript Si021541m (locus Si021541m .g) derived from phytozome v7.0 (chr-ID scaffold_3; pos 18 172561 to 18173584 reverse strand)
acggacgggctccgcctcgtcgcccgctcctgcaggttcgcgactcctcgattctcttgcaccccttttgctccgatctggtgtggggagaagtagctcgaattggggttcggaagatggtgacaatgactgggcgggcgttagctactgtttggttgactccccccgaaatggtgtactagtaaatagcactgaactgagcatctctttctgcacgtagaaactcgttctaccttgggaggatttttccgaaaaggtggctctagatctggcgcccaaatttgggcgcctgacctcaatgattagagatcgtacgatcagcagcacagaaggtgtgcagatgccttaagagtgcactttcattcctgtatgattacaattcgtggcttcatttgtagatttctccaaagagaatttcaaaagaaaaggttaatgcaatggtgttaactgtgcataatttgatgattctgatgccttaattggatatatgaagagaaggggaaagcattgagcacatcactggaaacagtgaatcaaataagggagcatttagttagatctacccgaaaaggagtctttgaataaccctaaatttagtaacctgtacgtctgtagtattgttttaactgttatacttattcattgcatttcttggattcttggaaacatttaataccacaacacttaaaccactgaacaatctgtactggtttgagttgactaatgtgcttctccagcttctgaaattctaacaaaatggtcaagcaacactgaaaacagtggtatgggaaaagtctaggttttgtttcctgattcccctcatgatatacagttcagtgtcagacacagctagcattgtttgtggagtgctaaagaaagttacatttgtttgtccggactgcatccttttattctactatttttccctttagcatacttatagctgctagtattgtgatgaaaccatcgcactaacttgttccgctaaattcatcaggtcactgagaactttatttctggaaga

SEQ ID NO: 112455 - DNA, 777 bp, Setaria italica
  Intron number 2 from transcript Si022670m (locus Si022670m .g) derived from phytozome v7.0 (chr-ID scaffold_3; pos 11 615303 to 11616079)
gccttcgccaacttcatcaacctcctctccatctggtgcgccccaccttccccccacttctccctctcttagatctaatctaacgcacgggggcttggtcgttggttccgacgcgattgctccggttcccctgtcgatgcgcgttctaggtggtggttggttgcgacttgcgatcgggttgggattggttcgcgaaaagttgatttttccccctttttttggttacgccgaaggctttgattgagggttttctctcgtgtgatgtggagtggaagcaaggaatgtgctttactttcgggaagcttagtttcatgctggagagtggagatgaacattgacttttggaagggtgtggagaagactatgccatctgtataaagtcagtaacctcatgtcgtttctataaaattactcttgtcatcatgtgcctttctgaatccaagtgaaaaagtgaggcactcgagcaaaggctgattgccatattgcacgagagtagcacttcctatttcaggccacacagcgtgaattttcattgcactaccggcttgagaggaagtccgattgtactgtttcccacttgcaaaattgcaaactgaaccccaagatatgtttctgacagcacctacatctgaatgacgactatgtggcattaacgataggctgattgaatttagctggatgttcgtaattattgagttttaaagttagagagtttgcattgctgttccattaatctgtaatttgttcttcctagacatgcaggttaaaagagaagag

SEQ ID NO: 112456 - DNA, 687 bp, Setaria italica
  Intron number 3 from transcript Si023556m (locus Si023556m .g) derived from phytozome v7.0 (chr-ID scaffold_3; pos 11 860439 to 11861125)
gccaaggctgtgaagaaccaggtactagcacatgaaaattcataatggttacttgtctctgataatttgattgcttgttatgctctatctgataatgcataatctttgctttacaccctgggtattatttttgcacattgttgttattataatttgttgctgtgatgagccataacaagtaagaaggccaactgatcaactggttcttcgatgaaatatagctgatacgcttggcttctgagctaattatcatattggtttcatgtgctattcctgttttttgtacactggttattttaaatattatgttttgtttgaaagatagttatttgctatgttgcttgtatggtgctatgtgagattttttcttgttgatagattctcttttatatttttgggtttcactgcatatccaaggtgtagctatgatgagccataacttgtaagaaggccaactgatcaactggttcttcaatgaaatataagctgatacgcttggcttctgagctgaacctgcagaatacttagtctttgaatggttgaagtcttgcatgttcctttatgtgaagctttttcactatgattaccagtccttgtaactgatcttatagggttgctgattgttctaatttgtattttgtttgctgtgcaggttagcgacaactactacaggcctgacctaaccaa

SEQ ID NO: 112457 - DNA, 1019 bp, Setaria italica
  Intron number 1 from transcript Si023590m (locus Si023590m .g) derived from phytozome v7.0 (chr-ID scaffold_3; pos 72 74180 to 7275198 reverse strand)
aagaaaagcctcttcgatcaggttttgtctcagttcactgggaacctgggatcgtaatgactaacagtgtcacacctattaacatattttttttcatgtctggagctcttataggtttcataggataatcaacataactcattttgtcaggcagattattcactcattatatttcaaatttagttttgtaacgaaccacagctcattttgttagatgatttgaaataattcaagtagctccaatcttcctatctaaaagttacacaacatattctgctacatcatgttcacacattgtgaatttgtgataatggaatttagtagataaatggaaggaagtcgccgaccatacagaatagcgtgccactttattttcctattttcatattcctttgagaatatacagaaaggtgggttttcatactttacagagtcatcataatttaggatcattttgatcatacattagtttctggtaggcaaacatcagagtcccctttatgcctagctaggttgaagcctaaaaccacttgctggaactcagttggttggtctttatgtggactgtccaaaaggcaatctttcgttgtgtattttagagtgaagatttgtaacccttagggacaagcacaatccaaacggttgattctaaaaatgttctcaaatagcatacaagctgctaattttatctttcatttttcattatcatataacacatgatttggagcaaatgaaaaaacaggaaacccatgagatatagttttttcttatacattttgatcccatgtgtctttcttttatgtccaacgagccgccatacttgtcaccaaaaatgtgcttgtctccatgtccaaacataccctatatccattatttcatcaaggattttttgatccttcataatatttcaaacaattagaagaggccactctcaagagcaagttgctttttaccagagagttaattcttctttattttgctttttaatctaacccgtaatttcctgcagggttacctgg

SEQ ID NO: 112458 - DNA, 1023 bp, Setaria italica
  Intron number 1 from transcript Si009900m (locus Si009900m .g) derived from phytozome v7.0 (chr-ID scaffold_7; pos 22 838714 to 22839736)
tccgcgtgctcgacgtctcgcgcaaccagctcgaggtaacaaactagtcatcatcatacttaattagatctgcttgtttagggcgcctgtgccactgctttctgctgatgagccatgaactcgtagcttttgggggcttttgttctggatgagcattttttaatcgattctctgcacatattccactgtgttggcctgcaaatgcatgaaccggaatatgtgatggctgattgtgtgtttcaccataaaggagcgaaggatagtgattgtgtgtacgatatgtctgatccctactagctatggactataggatgagtgcacaccctgctatttttggaatttactattatttcaacctatgtacatctggagggaattctatgatattttttcaagagcagagaaattgatattttttcaacagttcttatttgattaggaaatactaaataggccgttcatatgtttgtagtgtattttggcatgacaataactaggccatgctggtgctacaactgaaggttaccattaggaaaattttgtgcatatatatattttgttggcaaaaagtacaaaattgaattgtaggaggctgcaactgcattacctaatgaaatgcacatggttttcgtttgtgattaactcaagtgtgccgttccatttttttggattgtttaatttatcataaatccatggatatcttgttcgtgtttgaattggaaatcatagtttggagtaggagaaataacttctgttctttttttacttcccaatattgcttttctgtatgcgtatgtgatatttatatagtgtatagtttgtttcagcatattatcattagaagaagacaagcaaatgttggatacaaaatctcatcatctttctcaagtcttaatcaatagacttcgaatatttttgagttgtaatcattaacaacatattttacatttccagttgtgattttgtcccccagcttgattgatcaataaatttccatttcaatgtcattataggttattccgg

SEQ ID NO: 112459 - DNA, 472 bp, Setaria italica
  Intron number 2 from transcript Si010775m (locus Si010775m .g) derived from phytozome v7.0 (chr-ID scaffold_7; pos 32 591856 to 32592327 reverse strand)
gattgggtgccactgaaatcatcgctagtgtcaaggtacgagttctcacactttcctgccaaaaaaaagagaggctaggcaaatgtttttgcatgataagttcaatcctctgtaaggaaccttatgctgttctttgctttaaaattcctaccaatcaactcttattttcccaaggcattgaggttatcaatcatcgattaatttggcatcaaatacctatgctgttgcagtgtgaagtttgaaccctgatatcacattgctagttttattgagccgctgcaaatgatgataaatgttaagcttgagtacgtgatgttggtgtctatctgttggtataatcagtaaacttgccccgaaataagaaaacaaacttgttagccgtagcgtgttaaaccgcttcagcaatgtctgcttatttgatgaattggaatctgcaggctgaattggggaaaccaagcattcttcaccctga

SEQ ID NO: 112460 - DNA, 948 bp, Setaria italica
  Intron number 3 from transcript Si024573m (locus Si024573m .g) derived from phytozome v7.0 (chr-ID scaffold_3; pos 16 42401 to 1643348 reverse strand)
gacttggtcccaacattaaggtactgacaaagctttctatgttgaattaggagattacaatactacccttgagtattacacccttaagacttgccttaactttacaaattagtgttgtccttctcttgttgtggcacaatggcagacttctactgaatatatgcgtactctgttatcacatccgtcacattctttcactaatcgttgacatctattgcaaaatgtctaccagcgtaatccaggtaatgttcaattctttgaaaaatgattttcttctactctgcactgtaatgcttgcagcctgcaggtaatagttcattctcttgtgtttaaaatgtgtgacgccttcacatgcctcagcttgccttagccacaacaagcatgctacattgtagaattcagatgtttgtctgcacagtaatttagcaccccacctgtatgtgtccgccttgatggcttagtaccgattatgttcatgttttcctggtgtttgaatacactaaagacgcccacatgcattatctgttcattttcattttagatcttgtcctgcttgttcaattatactagtttttatgatgtccatgtaaatatacttgcacgcctatgtcttgttttgttttcattttttctgacaagttaggtacagtttgtattgcatctttcgttatgcttatctcttattatccttttgcgctctcattccataacacggacacgctagtactagcttcaacacacttcctgtgcccccacattatggaatcatctgctcactctgcacatatcaaagctatgggtttttttttgtctttttagagttacttttttttttgcgtggtgcttatctgataggctattcccttgaccgtgtagcacaacatatctaatcaaagctcttataccctttcagctacacattggcttgccaaataggaccatcttaga

SEQ ID NO: 112461 - DNA, 733 bp, Setaria italica
  Intron number 1 from transcript Si009653m (locus Si009653m .g) derived from phytozome v7.0 (chr-ID scaffold_7; pos 21 337646 to 21338378 reverse strand)
gttgagcacacgtttgttgtgagtagtaatgccttctgctcgggcttcttttcaaaatatttaagaaaatctgaaataattcttgagtacctagaacacttctacaatttttttcttaatcgcataacaaatataattcactgggagtagcaatttatatttttttctacacaggccacgaataggcaaaacaaattaattaagaaaaattcaaatgcaaataaagtactaaaacatttttaggggtgattatttgaaacctctttaaaccactcctgaagaatttaaaacaagggactataattatgtacttcttggcgctgacatacagttttgtcccatccaattaattaagatacaacctctgttccaaattttagatcattttagcttttttctaagttaagctgctctaattttaactaatttttttagaaaaaacatattaacatatgcaagagcagataaatatactatcaaaatatatttcatggtgaatttaataaaacaaacttagtaatgttggtgcatttttctgcagctttgtcaaagttagaaaaaaattgacttgggagttaggacaaagttattagtttagcataagtcaataaataaaattttgataacacactgaaagctacgcagcccttttcacctgaaagcctgcttgattgtttattgacctgaaaagggtataatccagcgcaactacttgcaggtaaagcaagtgtat

SEQ ID NO: 112462 - DNA, 380 bp, Setaria italica
  Intron number 3 from transcript Si009739m (locus Si009739m .g) derived from phytozome v7.0 (chr-ID scaffold_7; pos 29 479270 to 29479649)
gtacggctctcagccacaaacactcttttctggaggttaggatgtatttctgtctctctacgttgatgcatactcctacctgtacattattgcaccagataaaagcatgactgcatgaggatgttgcatagcatggtctaaaatctctccaagaaactcacccttcttttgaaaagtccggtcttagctctaccttggcctcatggaagggcagaaaaacgtagtttgaattttcccaattatgtttttgctgattgataaggcagcatattgtcctttcatgattttctacctttttagggcccatgatttcttttccctgctcgacttgatctaagccttttactttcttcttcaggttatttgaaccatttgggtca

SEQ ID NO: 112463 - DNA, 851 bp, Setaria italica
  Intron number 3 from transcript Si025247m (locus Si025247m .g) derived from phytozome v7.0 (chr-ID scaffold_3; pos 83 3230 to 834080)
ctcaatcaggtaatccctcttttaattaatgtgttggaggacttcacatgatagtttaatacaacattttgtgtcccaattatttgtactcttaagtgcttatatctagcgtaaaaacgttatattgtggaacaacttaatagtttcggttattctttttccttttgaaacttaatatggacataccctgattattttgtaaatccaacctagttcacttaaagtttgtttaaatgattatggactatctgagcagcaaggaagtaggaatgcattgagatttgcttcagtatagccaatttatttgcatggtaaattgcttgcttgcaacttgcaagtgttaaacagtctgttaaaaaaaatactttggttatatgaaaataccatgtatctaacattggaggatgagctagcagcctagtagtttactataaagagggaagcaaaactaaatgactaatgatcttttattctatctctctatccgccactcacacacacacacagaccactccaatgtaaaaacttatttgtttctttaacgtagaagattggcacactgaaggtggttattctggacaaccgctactgatagagatgatgcctgtgagcattctataggttttttgccagatatattaggttgacggactcattatttacgatgactcttctgggtatatatgtttacttcaaaagaattattcagtttgtcctttgatatggacataagaattattatttgtattagggtagattgatagtgtggtaaatttccaaagatacatttagcttacttttcttcattatatcttgtggtatgcttattctggtgaaaattatagggtcta

SEQ ID NO: 112464 - DNA, 659 bp, Setaria italica
  Intron number 1 from transcript Si009208m (locus Si009208m .g) derived from phytozome v7.0 (chr-ID scaffold_7; pos 29 303122 to 29303780 reverse strand)
gcaacgccggcaacttcgcgcttgtcgccgctgaggtacagtacagtagcaccacagctgcacttccagtcctcaatctcacgttctcttctctaactaagccgtgttaccgcccttgtcggatgatgatatcaactctgttcaagtgctactagtactttgcatatgtatgttaggtttaacttagttgtgtatatgaattgggctagcagcataagctctagacgctgacaattagtgtcaggtttgcttctttgaattgtatgcttgacattttgtctcaacatgttttatatgctcatgcttggcttgttttttttttttatgggtcactggagggggagagaatcccccattttttatgcttggcatttctctttggattgatgggccaatcaatctgttttggtgcacacaatttgtcaataacgttctcctactttaaatgtggaatctgtcttggtctttatttggtttcgtggggttggatgggtgtagtttggattgaaaagtttggttcagatcagaatgattatagctagattgcttgattaaagtgccatattagtcattgtggtttatcagcagctaccttgcttaagttatgtattggttgctacccaggtcttgcaacggaggcaaggtataacgtctggtgg

SEQ ID NO: 112465 - DNA, 846 bp, Setaria italica
  Intron number 3 from transcript Si021988m (locus Si021885m .g) derived from phytozome v7.0 (chr-ID scaffold_3; pos 40 126907 to 40127752 reverse strand)
acatatcttttccaggttgtacttgtacatgttcttctatttactattcatgctgcaaactaaagttcatgttcagcactgtatactatgcaactgtaactaatctaggctaagggcagacaagatttatgttggagcagcctgcttctatttagtaccgtgcgctgatttcacaccattgagctatgcctttgtgtcctagtctcctagaatacatggtttatgtttcaaggcctaagttcttgtaggaaattagttgcttggcacactgtgaactcgtctctgatgcaggaaaacctgcatctgatattgcaggttttctttctaaaagaaatcgtcttcataaatgcaaatggctggacgatggtattcaaattttctgcttaggaatagcgtgggactgacatcaaaccagaatctaaattattctttgaactagttaaatttgaagtatgagctacatggcaaccactggatggtgtgaccgatgttccttttcttttcattgccctggcagggaagccctttttatgcttctttaattcttagttagccgaccaaactccatataaatgtattaaactttcatcactcctgtttaacccaacattcaatattacccaaatgtggcaccaatgagttcagttggattgaatcagctttgcagttctcctcaaacgatgatgctaatgaaactgataaaactacttttcatcctttgaatgtagataagaattcctgtttttggcgtgactatgagatgttcaactaatatttagttgtgcaaaaaaccagttttgctccatcattcctaactaaacattttgtgctctgttcaagcaggtg

SEQ ID NO: 112466 - DNA, 523 bp, Setaria italica
  Intron number 1 from transcript Si010824m (locus Si010824m .g) derived from phytozome v7.0 (chr-ID scaffold_7; pos 14 955899 to 14956421)
ctggtatatttcgcactaatctctgcttcacaactaacgtatcagttagttggagtaagcatgattatcatttctcactaacttttcctctatatttagtgctcgatcatatttttcaaattatgattttgaattaggtttcatctttattttttctcgcctgtctaattggcacttatttgacacttaattttcttcatattctatacacttgaaacattactgtatatgaatcactctccgatgtttctaagttgcttcagtagcatggctgcattatcttcatatatgctacctaaaatgcaccttattatagttacaaccatatatgttgtaatcggtacagtctcacctctgaaacacgactaatgctcaagcttatgtattttgtcaaacagttgagaaaccatacaaagaactgtggcatgacaattgtcatggttgcaaccaactcttgttttccttccatatagtaggctaaatatcttccttacctacttctcattgcatatatggtaataga

SEQ ID NO: 112467 - DNA, 620 bp, Setaria italica
  Intron number 1 from transcript Si014639m (locus Si014639m .g) derived from phytozome v7.0 (chr-ID scaffold_6; pos 24 060178 to 24060797 reverse strand)
accttgtacgtcaagcttgattcgttagaagacatctacaagatgcatggccatcactagtgttactgagacgagtacgtggacctcagacgaatcaagaagctcagtatttaaaagtcctatgatggtatcgagtggatcggggattattttgatatatttctgaatttgtaatatattaatgtgtgtggattattttgatttttttgaacaattggttattgtgttctgttaatttggattttttgaatttgttaaatatcattaatttgtggatcaaacaattattaaatttattaatcttgttatatatcgtgcttaaattatcttgatgtttttctggattaaaattgatgaacttgatgtttttttgaataacaagaagattcaatcgggttccaaataaagccaattacaatgttaacttattcttaccacctagaaataggaccggttagaatatcaatttaatctaaccgggtccgaatttggccggttagaatgttatcttattctaacaagcccagacatcttatatatactagtccacaccgtcaccttaaccctacccacacatccacgtagtctaaacccgccagcggcggcctcctcttcgattc

SEQ ID NO: 112468 - DNA, 1041 bp, Setaria italica
  Intron number 1 from transcript Si010499m (locus Si010499m .g) derived from phytozome v7.0 (chr-ID scaffold_7; pos 19 64539 to 1965579 reverse strand)
gtggctcccccgcgccggggactggatctgcaccggtatacagctctctcgccacgccccgctccgttattccccagcctgtatagcttgtttattctgctgcttatgttcctgcgccggccctagatgtagatgcagatgtagatttttccttcaacacatgtttagtgtctccagttttttttttgccttgtatatccagctggaaaaggaaagcaaaaataacgaaatggaacaaagacaggctaggacgtgatgttgagatgtaattaacattcttcttcccctcccctgggggtgagggtggaggggtgatgtgaattaactgaagtagatgaaacatgatccgttccccattaactgtgtcgaaagtttatgcaaccaagcatttcttcttcgtcatcatcatcacttgtgggttttttttattgactttgttactggattaaacctagtatgctgatatggccctggcaatagttggagccttcctgtctagattttctggatgtctagccacgtggggggatatgttaatgaggcaagttagttactcctactttatgagtatgaaatgaaaaagggtgtagaggaaatagaggctttgtttaaacttaaaagggtagtctgaaaattatttgactggcactcgttaagctttctataagagccaggccagtcatgctctttgatctaaaaaataaaaaaaattggcacaacaacttctggaagtgtctcttggatgatttttgtttgtgcgtgaattgttactgctacttattagaaaattttaatgcctcctgctgtttattttgttcattgaatgcttctatatgtagacaagatcagaaaattaccaataagtgtgctgagtaatgactagtgtgcgtgtgtctattcctttctatgggtttgtgcgggatggctggtcgtggtggtggtggtggtgggtgtgcgtgtgcttcggtgcattcttcttctgcctactgtgctggttggtttatgcggcaaatggatgaataggttgcagtaacaataatt

SEQ ID NO: 112469 - DNA, 690 bp, Setaria italica
  Intron number 1 from transcript Si009897m (locus Si009897m .g) derived from phytozome v7.0 (chr-ID scaffold_7; pos 24 234988 to 24235677 reverse strand)
ctttggtgaactccgtcgtgccagagccctacgtgagttccttctcttcccaggatgctattgctacgcttgttgaggagagattttgatatttgacattacaattcgtgagtgttgagtgtgtttctattctatggaatgctatttatctggtttcgatggcctattgaggatgcaagcaaaaaaatgagtgaactagtagccaaatgactggctatgcattctgtgctttgggaaataatttcacccaccaagtaatcggacggtatacctatttcatagatctcgccatctcgggtcgagctaatttcgttccatgaatgatgcaaagacactttggtgtttgatgtatgtttgtaattttatacaagtaaatacaaatttgagcatttgcacaaatgatccatattttttttttccatgcagaaacacgagtaaatattgcatgcattacaagtcatcttttcataagtcatggctttctagaaaatggaattctcaatatttttataagtcgaacaagcagatggggttttggggtatctatatatttgttacaaactacttgggggaatgggtaattcgttccatgttgttatacattgattcagcaatgtagaaaaacaaatacttttgagtaaaccataaaaatacatttagtgacatgctaactcatgccttctgtttagg

SEQ ID NO: 112470 - DNA, 912 bp, Setaria italica
  Intron number 1 from transcript Si022971m (locus Si022971m .g) derived from phytozome v7.0 (chr-ID scaffold_3; pos 22 23313 to 2224224)
gaggagcggctacccaccccaagctcgcaaccgtgagcgccgccttcccccccgtgccactccgctgccttgcgcgctcgctctcgcacagatctgtgccggggtctcctttgtttggccgcgcgtggcgccgccgctgtagattcgtcctgttgcttcgtttcttcttgtccgggtaggttgtttgtccgccgcgtggtggtgattcatggttggcttggtcgtagagggtgtgcctggttcctgcgctctggaacacgggggcccgattcacatggcttgttaaatgtggtttccactcggttttacagggtttgatcggttgattgggaaaaattgaaatatagggctgtatattgtagatcagtttccactttccagtcttcctagtgggttgctccatgatttgactggtaaggtggagtaatagttttctggtggaagtgtttgagatatgagttgtgcaacttgagtgctgagtcgatggtgctaggaagtagacggtttggttgaagggccctcgaccatgcatgtctggagttttaaacatagtgttttcatgacatggattgctgaattatagaatggtacttggaattgcttctttgatttatttgtaattgggttagcctgtattatgtaaatgcttagttatattgtattttatgtactgctagttatcttgctgttatgtaatatgaagatgcatgtccattttgttttatccaccgctaaactggttgtgctgatctcttatcatatcttaatggagtctcttgtaaagctctaggcagtttttttttgacccaaatcatgatttattgaatatggtagtgtgttgtctactgatcattgtttttgtttacctataatccaggctaggggtctgaagaagcatctcaagaggctcaa

SEQ ID NO: 112471 - DNA, 486 bp, Setaria italica
  Intron number 2 from transcript Si022711m (locus Si022709m .g) derived from phytozome v7.0 (chr-ID scaffold_3; pos 10 83419 to 1083904)
agctggccatactgaaggaagggcttgcaaggtaaattcagcgcccttttgcatcctgaattgcttttgcctgtgctgtactggtgcaaattgttgcctatgctgatggaagggacttggttatgcagtttgatttcttttcgcacctttaatgtgttccaaggtagtggagcatcaattagaaagtctaaaacgataattatgcaaccgggcctttttcttcgtcagttttgagcaaaatctaactttttctatcgtgcttttgtggttgttcagaatactgtggaacagcacttggtttcatccatgagcactttaatagccacacttgagtgctttatgaccatttttttccattatcaatctggccacaacactctagcctataattgttggcaagtactgccatttgcttgacaaattttacctgagaaactattcatttcctttccacttccaattccttcttcattggcattggcagat

SEQ ID NO: 112472 - DNA, 855 bp, Setaria italica
  Intron number 3 from transcript Si013223m (locus Si013223m .g) derived from phytozome v7.0 (chr-ID scaffold_6; pos 19 594353 to 19595207 reverse strand)
tcggaaagaatttgctcacaccaactgctggtagagtcttgcatggccactgttttgacttcaccatccttcaggaaatgccgggctgttcgtttgtgctggctgcataagcagctgcagctgcacgggacaacaggcccacagctcagcctcaggctgctgcagctgcagcagcaatctctactgaacaccctagtagatgttagcagttggcactaccatttgttgagcaataattttttgttgttaaaaggattgcttcccgccttgggttgaaactgaacatgttagatgtagttgcaaaaaaagggtgtaagctggggttacaagcttgcaacacaagactaaccaaactgtgcatagcaacctttcggagacagaaacacaacatacagaaagtcctgtccggagtcagatagcttataacattcacgtttttcacttattgcagtgcagtcaaatttctttgaaacagaccagcttatgttataataaattctatttcatcttgttttaacttcaacttgtttggaagttgaaagtgttcttttgattaggctgtgatgagatagtctccaagatttttttagcgtacatgatcaacaattctgattagtggctcctgttgggtttcagctctagcctacccccacttgcttggcattgtttgtttgtttgtattgcatccaggtttaacttcataaactgtttggttactgatattactatctggtagctattaatttgcatttttatataactttttggtgtctttgtctagtcctgacttgacatgcatctttgctatgcttcttcctagctgtttctgttgagcaagccgaagctactgctgac

SEQ ID NO: 112473 - DNA, 887 bp, Setaria italica
  Intron number 3 from transcript Si021526m (locus Si021526m .g) derived from phytozome v7.0 (chr-ID scaffold_3; pos 19 644871 to 19645757 reverse strand)
gaacttttggtaattgcttgttgggcacctgagcctttttttatgatcatgtgctggcgtgctgcattttatcttaatatctctatctatcaaatttagttcagtaaagccagtctcattgtttcctctctgtataaccttatacctagtgctgttgtctatcattatatgatcttctccagaagttgttcttgtattctacatctttgtttgttgaagaaaatgaactcactgctacatttgttgtcacctttgaaaagtacgacaagtttaaattgttaatgtgtcatggattttactttgattgaagtagtatcttttcatgttctttggatttatggttatttccattgcaattttagggcctggttgtttgagctgcagcttttgagcttttctaaaaagttgctgctagctttttggttctgaaaagccaacactagcttttagaagatgtatttagctttctgaactcaaaaagctacgaaaagctcacaaaactgagctttccagctttccatataaactcagcttttctaggcttccagcttcccggaagctgcacgagaagttcgctgtttgtttgagcttctggctttttacgctgagaaactgccaggaagctcaaacaaacaggcccttagctgtgccagctatcctaatgatgctgagaagtggaatatatgttaaaacatatccagaggaaatcatctgccacatacgaccaattactaagtgattatgacctatctagtaaatctgcatcatgctgtacaatgaagaataaaattctctaccgaccaattcttccctcaacaacccctaatactgatcgacaccactaattctttgatggtagcgttggtgctcgtgccaacgcgagagtt

SEQ ID NO: 112474 - DNA, 986 bp, Setaria italica
  Intron number 1 from transcript Si025669m (locus Si025669m .g) derived from phytozome v7.0 (chr-ID scaffold_3; pos 34 191163 to 34192148 reverse strand)
taaaagagagggggctgtcaccaaaaggcaaaaaagtaagcacaaatattgctcagcttttgtataactattttagaatatttgagttcacaaagatgtatccgcgattagctaaaaaatttcacatccaaggggcaaaattctgctcatatcaactaaacctcaaaattctggaattaatttattcttctattgataaattttgtgactttaatatgctccatgttttttgggaatcctaaatcctgcctattttgagatttggaatcactaaaagtcaaatacctgattttcaagaaaaaaacatacctttgataagtccacatttggggtttgtccagagtgatttctatttgctggtggcatggcaatgtagtgactccttgctgtgggccagcaattggcagggtcacatgttgaactgatggtgtttccctttgccagccacacacttgacaacaggatgcagcagattagctttgggatattggtttgcacaaattggacttgttggcgttgactggggtgctgatgctgcttgtggttgctgtagagggtagtaacagtctagggatgtgattctagcatgccaaggtgcatatggacatgagagaacaccaccctagtcaatctatggccctagctatcggtgtagaggaaaatatagtgaggggtagattaggtgtggctacgtcaagggtataaaataggagggctagggttagatgtgttttagaagcgatagtaacttttgtgcacactactgtggaaaactgtacatgagaagtgttgcacctgcttaaaccacctgtacagttttgtggacataaatatccagtttcaagtttatgtacctacttttgtgcctattctacaatttagggtgtctattactctttcaatattcattttctgttattgttaaaccttatgaactgatcacttttctccctgtggtcaggatgaactgatcgctcgcttaagag

SEQ ID NO: 112475 - DNA, 732 bp, Setaria italica
  Intron number 2 from transcript Si023730m (locus Si023730m .g) derived from phytozome v7.0 (chr-ID scaffold_3; pos 42 574513 to 42575244 reverse strand)
gatgtaagtatgctcagaactgggcaatccttttttttacctttgccccaatctttgtgatgcagtggaatttggtggctagacatttgctctctatctaccttggtaacttagggtggtgcccagaagtggggatttggtgatgtataggtgtagactatggtttacggattgtacaaagatgtgtacttttactgtcagtcagtgtttcaaaggcgtcgcctaggcgcccaggcggtcctagctcgccttgggaaaccggtccgccttgtcgcctaggacgcctaggtgataaggcgtgcaaagatttccaaggtcgccttatcgcctttaaaacactgctgtcagtgcgtgccatctaggttgtttatagtgacacagtaagttagcgtcatcaggggccggttgttctaggcagtgcacaaacactgctgtcaacgtgagtagttgagtaccctgcacccgtgctgtgtaacagttgtgtaaaacactttcacctttaccttctcaataccaagacatggcaaagaaaatgtgatttatattagttcagaggctagaagttttctgccagtactgaaaaatttgggcatgcttatgagaagaagtatcctgacgtgctttagctccaaagattatgtaaaacatttttgtttctagctcctagttttgtttttaccaaccaaattggtgcgttgctttatctaatgtttgcttctgaccgtacaggtg

SEQ ID NO: 112476 - DNA, 801 bp, Setaria italica
  Intron number 1 from transcript Si009492m (locus Si009492m .g) derived from phytozome v7.0 (chr-ID scaffold_7; pos 25 396111 to 25396911)
ctgcgtcgtcgccgcctacgacatcgccttcagcggtacggtaccttacctcttctctgcaacctgctggcttgctgcagagcacttttggtcttttagacggttttgcattggattctttggttactgataattgtaagcatgaagtcacgaacacaactaacaatttaattattaaagtcaacttcgaaaggaaaaatctcgcagtcagtcattaagaaactgtttatggagtacgttgattcttatgtaactagctaccaagatggtacacgcaagttgcaacttgaagcacgtctgaatactggcgacctcgagctgaaatagatgacctaaaatccggatgggctagactctgtatagctttgaattatttgaatacttgcttgacatgatggggtgagtcccagggatgtgacgctgctaacttggtagaagcattttcgcctaatactaactcaagcctaatcacaatcaaccgttgcggttgctttctgcttagcacgttcaggaaaatattagattgttcagctgcataattaatttcctataaaaaagatgcataatgaatttcaagtaacaagtgcaatattgcttgttacaagggggacagtgatgccttgcttttcttcttcttcttcttcctcctccttttcttttagttttttttttaaaaaaagggagtcaggagcactgtcgctatcacttatcccgtcgtttgtgtggaaagttatgtatgtgataaaattgtgtactgatccattctgactgataggtgggtttggcacttacttgtttggg

SEQ ID NO: 112477 - DNA, 901 bp, Setaria italica
  Intron number 1 from transcript Si023615m (locus Si023612m .g) derived from phytozome v7.0 (chr-ID scaffold_3; pos 64 74853 to 6475753 reverse strand)
ccccttgccggccgaatccccagctccgtctccaggtaaatcattgatcgcttggttcctcgctgattcgatccgacgcggctttccccggatccgtttggagacggccgttgctctcgggttattggaattaggggccgggggccgggtgtccggttcttcgtcgcgtaactgaggcgggtggttcaacgatcaaaagaaaggggacgggacgtgagaagaccttggttaccgagatggtgggaattttcacagcaatttagctggggtggtttgccacaagaaatgcttcaggaaaggggtattgccgattgctgaaacggttgtgccccctgctgaagttcatagtgatgaccagaaggtttagattaggctgtttgttaggatctccagctggtttaacttctgcttgaaaggggctagccatgtttcgatgttcgtcttgattactgtgcacagtcatgttgttcctagaaggtttttttatttgattgctgtgctgctatcatgtttgatttgttcgtagaagatgttttgttgctggaaatagctgcatggtagttatttagtataccggcaccataattgctgaccactagaacagtattccggtctttgatgagcaaaacaggtgctggagtgttccttttcttattcaactgtagctgtggctgtagcttacagtatgtttctttggtcacattacatgacacttatcagttttgacataatgtttgtccaattgtagacggcaaatgtacctctttgaaattaatttagtgttatatcagaatgggtgtatattcttctatctttggaaatgaatttttgattggatacacattgactggttttcctttattcaggcagcattttgtttcagtggtgtgcaagctttgct

SEQ ID NO: 112478 - DNA, 669 bp, Setaria italica
  Intron number 2 from transcript Si023356m (locus Si023245m .g) derived from phytozome v7.0 (chr-ID scaffold_3; pos 19 08257 to 1908925)
cgtgaggtatgtcgcacaacaaatggttcctgggagaagttatgccacagcacaatcaatggtgtctaaaatattcagaatgtagtgatatgttcgtcctgttttatttagttgtttgagtactttttccagcgagatgatctgcggatgcctaatcaattgctgggaataggtggctatgagctcactgataattggagagaacaaattaaccaacacatgctgtcgatatattcctgtgtgaactcaagtgacatttgtgttctaaaaaaatgccttttgctgtcagttgtatacctcacataatgtaaattcttttgtctcagaaatttcaccagatatatgttttaccttatatctaagactttcagctgagatacctgaaccccatgtcttcagggacactcagtaaagaccgtggaattgtgtaccaggaaccttaacattttaggaccctctcaacatcattatccatgctatgatcttaatgtgcagcagtagtactatctcatggaagtcagatacattgacttgtattttgacgaatttggatagatttccgtcacttataattccggttacggccaaaataatagactcccgttgtgttgatacagatagcagaaactaaatttgcttgtacttactctcatgtttgtacaggtaaac

SEQ ID NO: 112479 - DNA, 934 bp, Setaria italica
  Intron number 1 from transcript Si011556m (locus Si011556m .g) derived from phytozome v7.0 (chr-ID scaffold_7; pos 21 159673 to 21160606 reverse strand)
ttatctcttgaccatatagcaccaactactcataagtgagacaacaaaacagaaacgaagctacctgattcgagtctgctaaaaagtatcttcttcgaaacctaaaaaacaagtagtagcctggagtggtttacattgagaatttgagatagatgagtagttacttttttctgttttagtttctacaatcaacatggagggagggtagcctctacgatgagcgattctaatttttccagcaatgcaatcttcgaatttggttcaaaagatgaagtttgtgtatgaaaatcggatcgattggaggcggatgctagcaaaagtcaccaggattagctctagtttgagcttatcgcttgtcaatattttgaatataagaaatgattgcgagtcctgcagcagtatccatggaactctttctttcctgtcccatggatattgctgcaagacttgcaatcattcctaagaaaattcaaaatatacaaaatcgataagctcgaactagagcaaactctgggtgaattctgggagcatctgcctcccatccgatctgtctttcatacaaaaccatatgtttcgtcttcaaaacaaaatccacgttcttgaaacagaaaaaggggggttgctgaaaaaataggaattgttcaccatggaggttaacctctacggagaccgtagaaactaaaataggaaaaaagtagttacttgtctatctcaatgtaaatgaatgaaatcacttggtcttcctgttgcaaccgctcattcttacttttctgttcaagtctaaagaagaagaggttttattagcaagcgtgaatctggtagcttctactttgttctgttgtctcacttatgaggaactagtattacctgatcaagagataaatcttgcattgttaggtattttcttttcaggtgaggtgtgcatagatatctc

SEQ ID NO: 112480 - DNA, 864 bp, Setaria italica
  Intron number 3 from transcript Si015367m (locus Si015367m .g) derived from phytozome v7.0 (chr-ID scaffold_6; pos 11 483228 to 11484091 reverse strand)
gtagattttactggtgggcaagcaaccattcacaggtaaatacgagatagacatatacagtcacgtaggaattagcaagacagatattctttgtaagtttgtatatatagtgtcagataaactataaccaacttttatgaaacttagtaaacagttaaaggatctcaatctcagtgaaaaaaaatactaccctgtccatcaatataaggcatatttgtatttgaaaatgtcaaattacaactttgggccaacacttagtcaaattatatattctctagttagtgtatgaaagatacattacacaaaggaatttttggatgattttgattttgttgcaaatgccatagttgagataaacttaagataaaaatttattattggagatttcctactaaaagtacatcttgcatggatggatacagggaatacatagtatcataaggcaacagactattaattcagctttcattaatgacccaaaaaatttcatagaaatggggatggggactaggagtgagaaaatattttgtacggtgaacagataacatctaaaatatattgcataggaatggggatgaagtaacatgtgctactccgaacaggaagcaagacgggcttactggggactaggagtatatatacatccagtgaaatggtctttgtataaatcaacattaagatacataagtagctttattttaactttcatttatttctgtttattgttcttgattttaaaaatgaagttctgttttttctttcaggaagcacgtcctgcagtgtgaaccacggatattgaagaagcacattgtgacacactcctatcaagaaaccatcgtctgtattcactgagccaggaaaaca

SEQ ID NO: 112481 - DNA, 875 bp, Setaria italica
  Intron number 1 from transcript Si021687m (locus Si021687m .g) derived from phytozome v7.0 (chr-ID scaffold_3; pos 17 03374 to 1704248 reverse strand)
acaggttcaggtcgttggtggctgatccggcagaggtgagcaaaatatattgcagaagaattattagtagctactatccaattttggatgaatttgtttcgtatcgtgtatcatgggtagaatttatgcaatgctgctattattgtcagttggatcatactaaattatgaaaagggttttctccttgttctatttctacttgttttttgtttggacaaacttaagtgtagttgttcatgacctgttattagcaaggacaattgtcaccagatcatcccaatctgcaaattatcagcagattcttttttttctcgaatacgcaggagagctgcgtatctttgtattaagaaggaaaagtttgagtacaacgcacgattagcgtgcaaccagaccctacaacctgagcaaacacacgctcacaatctagaagttttgattactcagaaaatagacaaccaagttcttttgctccggctgcaatccaattatcagcagattctgtaatgctagattcgaagaatctgctaggaaagttggacatttattccttttgcattccatggttcagcattagctataaaaagttctggtagaagttgtttgtgcacagattctagcatataatgatgttcggtttataaggtccacaactgagagagttggggttcacgtttcacttttacactcttatatgtttcctgatccaaaacctttgcttatactagaagctttatttcttttataccttttcttaaggaactatgtctgtgattcattaatgatgaaacttcgactgagcctttttatctcatcgaactaactgtagtaactcatcacaagcaggaaagctctgtttcaaccgttaacacaacatt

SEQ ID NO: 112482 - DNA, 727 bp, Setaria italica
  Intron number 1 from transcript Si013139m (locus Si013139m .g) derived from phytozome v7.0 (chr-ID scaffold_6; pos 33 380695 to 33381421)
cgcagcatcaacgcaggcatgcaatcctttctctctttatctttcaatttctcgtttttcggtgttggattggagtatggatctcgaataggataatattgttttcccttttcttcagctttatattgttctcgacggtcaaatttctttcaccacctcttcgagtgctggacttgaaccctgattagtggcgggaggggctgagtagcactctgcccgcaggagggacgcgcagcgcggtaggggaggggaggggaggggaggggagggacgcgtagcacagggaggaggaggagagcgagaggtcggagaagacgtgctagatcggtcggttcgggagtcaaaaggcggtttgatggaatgctagatggggagaaatccagtgctaaatctgaaatcgcaaaataattagtggtgctagggcaaaacgattttgagggattggatttcccccctctcctgatatagtatttactagcgcgatagatttaggttttatggctggtttgttaggaaaatcgggcaaggtctgatgccctctgtttctttcgacacttcaatctcaaatgtatttctcgtgaatatttgggatctcaagttcctgctagaatagcaatgattgattacatcacatgccttttctattctggtctggggcgtcttttttcttcctcatatttggattctaacagctattccttctgacttctcatacatcaggactgcc

SEQ ID NO: 112483 - DNA, 984 bp, Setaria italica
  Intron number 2 from transcript Si006863m (locus Si006863m .g) derived from phytozome v7.0 (chr-ID scaffold_4; pos 25 90305 to 2591288)
tgccgcggtgctgcccaccaccggagatccatcaggtcgagggctgattctcctttttgttggtcagtaatcctcccttcctgcagtgaatccccttgtcccaaatcaaatccaagcctgctccttctgttcggttagtagtggatctatgtgctacgtggtgcccctacttgctgctgccgaattagggtttggatgcggtttatttccaaggattgaaccctcatgcccatagattttgtccgcccctgtgttgagcctaatttattccttcgaataaaagggggccgtttcatagttcgatgtcccaatgcttgtagggagtttacgaaactgctagatttatctattaattacgatcatgttgtgggatactcagacctctaccgattgggcagctcatattgaagtagaagtttagttgggttagactcacttgggctatttagggacagaaaccaacggacttcacttttgttttttttttcatctcactggtttattattaacagattcacttgttcataccttgtggccttgataaagaaagtactgtgtgcgtatcaagttgttgcagcagtcagaatttcacattataataaatcttcactgaactctgcacaaccatcacatcgtctacttttgtcaaactgtaaatttgtgcctggtgtaaagaaaagcacttttgttgaaatttagagcactctgattttccatagcaacattaacagagttaagagtttgtaatgcaaatatactccctttgcgatgcaaagataaaattatactccctttgcgatgcaaagataaaattatactccctttgcaatgcaaagatataattcatggccacaaggagtgatgcacaatgtcttttctttcttatttgaaacatactccagaccttgcataattaattctgtacctgcacaaatcatctgaattactgtaatcctgtgtagttgagcagttcaagcagagctg

SEQ ID NO: 112484 - DNA, 971 bp, Setaria italica
  Intron number 2 from transcript Si024262m (locus Si024262m .g) derived from phytozome v7.0 (chr-ID scaffold_3; pos 18 958399 to 18959369 reverse strand)
gacatcaaccagatccgcgatatcctgccacataggtgagctattgtaggtactgcgtgtccatttgttcctagattttatatttgtgagttactttgtgcatagatttttttttaagcagatgttgaaatttgcccaatgttgttgcatccctaactgttattccagcagttcactggctgaagatacattaacctgaaaggaatctatgcaatgttgttgccaaatgttgtttcatagtgaggatttcatgatcttgttggtagcaatccatttactgacttttatatagtaaatgtgatgttagattgttggcctaagaatgggtggttttgtttgttccttgtatatcgatttgatttcagttcctctctaattctacaactatgaagccaacaaattctctccgttcttggaccctcatgtaacttgctatactggggctcctttttattcaattgagttgctagctatctaaatgaaaagtagctggaagaaacttaaataaaatataaaagattcaccatggtcataggaagacatgatctttgccaatgatagttatatggttgagagacaagtggtatgctttctggcctgtcctcatgggctaatgagctattcgccaatgttctaaagaaaagcctccagagcagcgcatgtgcacggtgaagtgttcaagctaacctatcagctgtccgtactgaggcttctttagtttcttattaacactgaatgttgttaactgtatagtgagcactaaaaggtagggtagcatgctaaccgctatttagtacattgtggttagatatgttataaggtttatgaaaaaccttcttcatttgtagatttcctatccatgcttcgtaggtgatactcaacttccatgtaagctttgtgtgtgaagtgcttcattttttttcatgtgcatgctaggttcccattccttctggttgatagagtgattgatt

SEQ ID NO: 112485 - DNA, 1019 bp, Setaria italica
  Intron number 3 from transcript Si024856m (locus Si024856m .g) derived from phytozome v7.0 (chr-ID scaffold_3; pos 79 60095 to 7961113)
tctgcagaagggcttgttccaaaggtacattctttgcctatctacggatcatatggaagagcacagtgctggttcccgtgttcatactattggagctgttgggcctagcatcatttttccattgagccaattgtgtttttatttttcatttttaatttagtgtgctcagcaaactcttgaaatttcactaagaactgggacatatagtgcatatagatatggtagaagaatgagggacgtgaagataagaggaagtgacctgccacgttgctaagagtgttagacttgtcagtccttattgatttccctatcttgatccttttctttaaatgttgaacaaatcactagctgaatagttctggtaaaatattgtcatgtgacagattgtctaggaccaaaaggagatgttgacagaagtaacatggattaatatgattaagttttttcagtttgcatcttctactgttcaagtaatttagcacccatgtctgagaccaaatgatgttctcacagaagtaacctgtctttactgttcaatcaatgtagcatccatatttaagagcaaaaggagatgctgtgacagaagtgagatgtttccatgaaagaaactgctgaacctaaggattgagttaaactagcacattttgagaagttatttacacttaattgaaataatgatgtttacccaactctaagccagtccacagcagtgctgccacttgaccaagtaatagcagaactctaagccagtccacagcagtgctgacacttgaataagcgcagaattgataaaattatacctactcccaccacttttatctctgtacctgcatgaaagaactctaattgatgttttgtggagatcaagttgcttctcatgttgatgctgcttatgtacttgactacctcatccttttgtctactgcactttgggtgtaatgatcaaagggccatgcctcactccagttttcgaataattgatgcagcgcaagaaagaaaagaaacaggaggaaaaggat

SEQ ID NO: 112486 - DNA, 1053 bp, Setaria italica
  Intron number 1 from transcript Si010901m (locus Si010901m .g) derived from phytozome v7.0 (chr-ID scaffold_7; pos 28 706080 to 28707132 reverse strand)
ttgccgcgcaacctcgaggaactccaaatcctcacgtacgtttctcgtgccccttcatttcttgttccggttggtgtcttgtcagttttgttcacgaaagcttccgactttttctgcgggaattccattcagggtctcatatggtcattagctgatctgtgctcgcaaattgtccctattctattagtttgtaaggcgcagttctatttttttttgaaagatcggcacaattctatttccatttttaaatggcatgcttttcgtggattggcgtttgcgggaatggagcatttgattggtggtagtttgtaaggaattaggtagtgattttctcattatttggaatggatctcagcgttagtttggtgcgaatttttagttccaatgtaaaaagtatagcatggatctggcgacgttgcgactcgcgctgctgatttcgttaattcagacttgcaaacggatggtttgtttgtgttctagatcaatgtaaactttccttcaaattagaaagattaggtttcttaataataaggtgcgccgtcttcaaataccgcttagtgtttgtgctgttggtcgaaccattttagatctgacgagtgaccaccgattgatttgaattacaacctgtttatgcaattcaaatccagcattgctctgattccctggatcaactttctggaaaggtgacgtaattatgccactttaattaccatgtcactttcgttccagctacaattgccatatgctttggacttggtcttagcgtgttccatgtgccttgagctaggtattggataatggcacaggatatgatctgtccacacacgtcagctatttgtttccccatattaatgatatccacattgccttctggttccttgcaactactgaaatggaaatgccctttgttttttaattgctgaattgaaagttcagatgtgtgcgtagtggatagtaaatgcttctactgaaatggaaatgccctttgttttctaaccatcagttggtttctttgcagtggccatcttgagaactatactagtgactacaccc

SEQ ID NO: 112487 - DNA, 865 bp, Setaria italica
  Intron number 2 from transcript Si022815m (locus Si022815m .g) derived from phytozome v7.0 (chr-ID scaffold_3; pos 20 596460 to 20597324 reverse strand)
tcatcggccacgagtccaagtataactgtacgtgaccacgagctaatctatccattcctttcaatcatgtgtggttgctttttttctcaaaatagactgtgacattggtattgactattgttttctagcggtacttggtcctataagtgtgccgatttcctgcttaacttggacaatgtataagtatcccattttccatgcttgacttggacaagtaccacattagtctggcaggaagaatttgcttgctgttgctctcttgcctggatttatgatggagtcctgagttctgactcttatattgatttttactgtggttgttgccccatcaatatcaagtactagtaggtcatttatgtttggtttgtgttcacttgttcatactagtattctgtatgaaattagtgccaagtacaattctatgacgaatagttcaaatcagttaccaactacaattactgcagtgctaacctcatggtccagatagctgagtcaagtacatgctccttttattataatatcacaaagcaaatatcgatgtttggcaatactgcagccgccaatactcaatactatattgattattttttggaatagtattaaacatggtcgcaatctgctgttgataaatttggttaacactatttccagccagtataaactagatggaacttcaatgtgcattcaacaggacagcatggttagaaccttagcaatacaaactgcaactttagtttttaacatgtgaaaattgctgataaattgtgagctgtgaacatcaactggggtcctagcagtgaagtatcagtagttgttattgcatctgtttattaattctgctctctcaagaattacaggccatctc

SEQ ID NO: 112488 - DNA, 507 bp, Setaria italica
  Intron number 1 from transcript Si021337m (locus Si021337m .g) derived from phytozome v7.0 (chr-ID scaffold_3; pos 25 222225 to 25222731 reverse strand)
aagatacttctggtaatcatgacaataagtcaataaggctctctttctttcttcgcttttgattctgtatcaagttgcgcttttcttttcttgttttttatttttcaatcaatgagtaaagaaaacattgcttcaattttttggatattaccatgtgtgcacatggtattctgcttaatcctcgatactagcattttggtatactaaagttctggcaaaatagaaaatttgagaaataaaccttgtgtatctttaaatggattctttattttttaaaataattcattattgcagcagtttcacatataaaagccgatcttctgttgacgctattactatttgtactacattaatattttatggtattattatctttttttttatttgtgtggctcttgttaagtttcatctctaggctacccgggcttacttggcagttgagtgttggaactaaatgctttttgttgtatctttagggtgagattggtcgaagaagtggtggtgata

SEQ ID NO: 112489 - DNA, 671 bp, Setaria italica
  Intron number 2 from transcript Si010202m (locus Si010080m .g) derived from phytozome v7.0 (chr-ID scaffold_7; pos 33 085560 to 33086230 reverse strand)
tgcagtgcgacgcgccctgcgtcagctgcaacaaggtaccattcggttcccatcggcttctctgacttccgattcaggccggcagtgggatgtttccatcatgagttgctatcgggacacgtctgcagattggttctggtctaggtacttgtgttagttcaaggtccatcgttgggtctcgacattattttggcccaaagtttttttaccttgattgattggtttattgatacttgtgctagaaatgtccttttatcttttgggcatcacgttgtgctagtttggccttacttttcagctttcgaacgaaaaagtaagtgcaggcaaaagaaaaaagaaaagaaaagagaaaaggaaaggaacaggaaaaagaaacaaaaaagttaattttgtttcattagtctataaatggcaatcagttcagttcaggaaaagttagttttgtttcattcagacttggtttccatttcaagatttgttgtcaggtcattccctagccttgcattacatcactgatgaaatatgctatttccttctagcccagcatttcaaattaaatgccaagcttagtatagcttcagcttggaaattggaatagacttttgatgtttcctatcatgttaatggttggtacaggtgccacacccactctaccgaccaataaagaacaa

SEQ ID NO: 112490 - DNA, 1001 bp, Setaria italica
  Intron number 4 from transcript Si011152m (locus Si011152m .g) derived from phytozome v7.0 (chr-ID scaffold_7; pos 29 623032 to 29624032 reverse strand)
tttggtatccaggagcacattgatcttggcatcaagtaagattatcccatttctgctctctagtaatttaaatgtggtgtactgtttctgcgaatgaatgcttttatgattgttttgttgcttgtcatcaagtagaggaaggaacatgtaattttagattcatgtgtgctgcatgtcgggtgctactcactatggcaacttaacacagtttgagaatccactgtaaagtagcttttggatagcttgatctatttgccgatgtaccaatgtgactgaatcatacaaccatggaattccctttatgccaagaacattgttttggtcttcatatgtctggaactggtgtttcgttatctaaatacagtatgcaagttatttttgcaagtcatgttgaattgataacatcattttttttctatgtagagccattaatgcaagacattatttcctatattttgtcctcttgagttctattttatgctttttcagaagctgccataccagtcggttatatttcattaagttttagtatagtgtgagctggtatcagggttgacatgttaactcgagtccttagcaagtcaaaatgctattctttgggtgcatctgtgatttgtatctgatttattccatggttagcatgcttgtccagggctatggtcaaattagtactgtggtgcaacggacatattttgctgtggtgttattatttaacaagttgtatcctggagtatctccttgatttaaactgtgcatatgatgcaattcccacttgattcagtttgtcgaacattataccgatgctgtctttactgtctgcatatgtggccattgtttgtttgtggctagtttctcctcccttagggatttggaatttcagaatacttattgtgcatttgcaggggatagctcctttttcttgtctgccaagtgtctgcttaatgaagtgctgcattttgttgatgattagtaaccattttctttatcgcattatctcaggt

SEQ ID NO: 112491 - DNA, 994 bp, Setaria italica
  Intron number 1 from transcript Si013481m (locus Si013313m .g) derived from phytozome v7.0 (chr-ID scaffold_6; pos 31 955681 to 31956674)
ccaccggcatctgcgttgcggcgttcaatcgcggggtgagtacgagatccccgtggggaattgcatcgtttttgacttcggtgccataccctgtggggaattgtcttgtttgtttacggttgtagtgtcacctggtgccatttttcatcgagatatatgtatctatcggaaatcctactgggctaatggtatgctggtgtcaatttgtttactggttgggttcgtgagaagtcgttatttatgagatgtttatgtgctgtttggggtgctttgtcgagatttcagtatatttttgtgtctcctaaaatgtgaaatttgatgctatggggtcatggggacggtagtgtacttgtcagaattttgatctcttgttgagtggtgtgttgctgcatgatggctgatgctaagagttttttactgaccacatagtgtcttcttgtgctactgactacatagtgtcttcttgctgctgattttggtcaacggttttatgctgtgatggatcacatagagcttgattttactgaactgattaggtggatgcctggttgaatttaagctaaccgtatggaaaggtgactcgttttgttgttctatttactagtgaatgctacctttggcttagttaacatgattaccatttgtggagtcactgctgttatctggtgtgttatcttggcgattccattccattttgtgttgcttcattattctcatggaatcaaggtcattctactcgtttactctttaactgtgatctttgagccactgatagtcagtaattgattttttgcatcagttgcactgtgtgtttattcaactatatccaaatcaaaagggaaatctatatcttgctttgcaagaactcatagtcattatatgagaggaattaaatctagtttgcctgtgcattttttaaatccaaagttctaatttgatattttctgaatgtctgccactgtctcagaagtccctgcctgaccttttcaggtgc

SEQ ID NO: 112492 - DNA, 884 bp, Setaria italica
  Intron number 1 from transcript Si021330m (locus Si021330m .g) derived from phytozome v7.0 (chr-ID scaffold_3; pos 44 621266 to 44622149)
ggcactgctagtaggcaactaatgttaccttttgttgaaaatgtttcctatgaaaaccctaatgtcatctattttaaaatgaaaacgaatgcttttgtaacaatatgtgtttaaactatgttggatttaagggtgtgtagcgttgaaatagcatatcattcaatcaaggtactaacagctttcttgaattaatttgcatgtggagctaggaaggtatgtggaatagttgagcattgcatatttcaaatgtctacaagtttaaccatatgatctagaattagtcctatgttgactgatgctttgtgaagtcaaattgtattccttgatttaaatagtatggcttctgcaaagttgagctgatattgtgaaggcccttttagtcatgcagatagggacgaatttatagaaaccattcttatttttgttagcatcaatcctgtcatttatttttaaataatttatttactataaatattatatgattttgtaatgcgtcattagttatacgttgttttggcttgtgttgtggatggtgtttaggaaagagtataaagatctacatatggatatgacaagtgtcattaggtgatgaatgcaacaggctgttgggattaatctgataccatgcgctgtacggctgcacatcagtagcttgatagtattttatcaaattgctctcagttcattgaaatgccattaagcttctttgttttcttttgttaacacaacatgtggcctgaattaggtccaattcacatgcctgaagacacttgattttttcagcacctgagttactttggatggcatcatttgtagtttattatgcatatttccttggacgactattttctgaacttgaattcccgttttggcagtgttaacaa

SEQ ID NO: 112493 - DNA, 799 bp, Setaria italica
  Intron number 1 from transcript Si016034m (locus Si016034m .g) derived from phytozome v7.0 (chr-ID scaffold_6; pos 15 348769 to 15349567 reverse strand)
aggcccaacgtctaaacaatccatccagtgtaagtggccattttatttatgtagttcttttgaattcaaggtttgactgcttccttaccgttactgctgcttttgccaccaagcacctcttggtactactgctaagctacacaggatgtacctcccctcgtatttgtgcattatgtgatgttttgagttttgattcagtagcacggaagctcagactttcagtactgtttgggaaaagaaacatcttcactttcgagcgctgtattggtagagcataatgacagaggtaaattgggcactgtgactaagagaaaactaaagaatagctatgacttggtggcaccaagtggaaatattcatatttcactagcagtttgtggacttcaggttcagctgattagttacaacctgtgttgagcttgagagggctgcaaccataaaattgctcaaaaaacaaccccatcaatttccattacttgtaacgagaatattagagtttagttacattgccagataaaggaaacagaggagagagcagacaccccctagtagttctaacctgattcaagctaaaatcctaggtgcaattctgcatttttattggttcgttgagcttgtaatccaagcattagtgttaaaaggaattagattaataagtgtgcatgtgtcaaacactcaaatgctatatgttacacccttttccttttctccttttggttacgatcaattaaaatacacatatattttgtaacaaaccttccaagtttaactcagaaagttctttgccaggtactgtata

SEQ ID NO: 112494 - DNA, 587 bp, Setaria italica
  Intron number 2 from transcript Si022734m (locus Si022734m .g) derived from phytozome v7.0 (chr-ID scaffold_3; pos 17 780546 to 17781132)
aaaaggaggtaagtagtaattacttgcacccagtttcccatcacataattttctgttccatgtccacaccgctatttctttattctaactgattaggtgtactggttggtgctcctgggaaatatatttattaacttcatttagtttatgacataatcatatgatcatttcaactcacatgaatatgacacaatgcatcctattaggactaaggagtatatcatagctttaattttggcttgtgtttttctacatcacgtagaatgtttcttttaaggaaattcgattcatttctttttcaaaacaatatcaagagaagaatcatatccagatataccgatagtaagtccattctcttatttcacaatcagtaaaaagtgataagataacaaaaaggggcgtaagggtagcacaacaatgaaacagtgaaagaataagttaacgttggaagacaaactttccacagtttcccttccgtttgatttgatttcatttgaaatttgaaaacatgttatgtaatttcgctgagtgaatttaaaactattccctttcataggtgggcttggccttgaaaaaattatttgagg

SEQ ID NO: 112495 - DNA, 1046 bp, Setaria italica
  Intron number 1 from transcript Si010957m (locus Si010957m .g) derived from phytozome v7.0 (chr-ID scaffold_7; pos 25 869322 to 25870367 reverse strand)
cgctcgaggcccccaacaagaacctcatcttcaacgtaagcgactaccccatgcttctgcttcctttttgccccatttctctttgcaagttgcaagcctctgggatgattagctttcctctctcagtttaatttgttccttgctttgtttgttacgggtcacgtcagtgggggcgctttaccgctttagcaacaaagaggaatatcggaccctagtacctgttcggttcttagttctgaatcaattgtgttcttagctattccaaaaatctggaatttttggattgaaatcgtcagccttatgagctttgaaggtttgattcgttcggcgctgtatgatagatttgatctggcactagacgatcatgatctgtagtctactagaggcactcttctgttttttcttgataagattgaggcactcgtttgagccaattgatgaagacagatgcaaaaaattcaaaaagccataacactggtccttttgttcactgggagctcatgttcacatacaatattatactagtactccgtagataggaaacgagacggaaatgatgccaagattttagatagcatacatacataagaaagtcaacagcacatggggctgatcctattatattactgctagctgttaataatactaatgactcacgtgacctaccctgcaactgaccatccatggtgctccatccattccaaaatttaaggcgattttattttgtttagtaaattttctctaactttggccaagtttattgagaaatacaccaatatctacgatgccaaattagttttattgaatctatcgataatacatttattttgtattgtgtatattaatatatttctctataaacttgcgtttgacttaggataaaactaatcgtcatttacattttgaaatgagggagtagttttgaaatgcttattgtgaagataatgtagaaagcttgaaagatttgagtattcagtattcacccactcactggctgtaacttttcttgtgttgtggtatatccattgcaggttcaccctgtcctt

SEQ ID NO: 112496 - DNA, 1022 bp, Setaria italica
  Intron number 1 from transcript Si009680m (locus Si009679m .g) derived from phytozome v7.0 (chr-ID scaffold_7; pos 24 653366 to 24654387 reverse strand)
gacggcggggttttgctcgctcgctttgtctctcggtgaggttcctggcttgccttgcccctgcatgcattcgtttctcctccttctcgtcgtcctcgtcctccctcggcgcggagaggttgcggatttattttgcggggtttccatttcattcgtttctcctctcgtcaagattgtggaagggattcacggggattaagcgatgttgttgttgggttcagtgtgagggttccctctgcagatcctgccgttcgaggtcggtttcagacgaagattgcacacaaatcatacagagacaggctacctagtaacatttttataacacttcgacaatccaagccaaatcgacatagcaaattcacgtgtgtgtatgtgtgtacaagggtgtagtacatggagcatgaatgcatgagggggccatggccccccttactagctccgtcactggagatttgatctgattttgaatttttttcccctttcgcaatggttgggtaagatcacgcgtgtttcaagtcagcattggttttggggcattactagttctatgcaatgctcaatgctgagtgtgcaattccaaaagatatgattatggcttgaggacataagctagaacatattctttgttcttcatgcaaaggcattgggataagattccacgccttttgatttggataagcctgatgggaactttcgcaatgctttcacgacatttacactagagggctgatagcttttgacgagatattcccttctttccttctcccgcatcaatttttttggatatgttctgactgatgttgatgctcggaaatttgtattttctgacataaaaaattcttttttttttgaaggaacaacgacataaaaaattctgatgcttgccgtactgagcaacttttgtaatatgctcttccagcagaatttcctagagcctgtatcttcgtgctaactccagtgaatttctgttttaacgatgcagtgaagtgcgtgaccactgaccaagtacatctgaacctacg

SEQ ID NO: 112497 - DNA, 702 bp, Setaria italica
  Intron number 1 from transcript Si014125m (locus Si014125m .g) derived from phytozome v7.0 (chr-ID scaffold_6; pos 29 977550 to 29978251)
ataagcgccccgccccgccggagcgtaaagagaatgtgagtttggatctgagcttgtagtctcgagaaatgaccggtcgatcgatcggagacagacttataattgttgcgtttttacaaaacaaaaacgagtgccctctttttctggcctcctctctcatgcttgcaattatcagtgtagcttcaataccgtttacggtgctcaatcaagtgatgatgagcaaaaatgacacatctctccgcagtttatatgtgcaccttttaaactgttccactcctcttgagggttttgtttttctgaaattccgtattgaaactaaggagtactagaactggtgaaaggagtaatttataagttttgctcctgcacttatagatggattgaacacaagttttgctggaattaattctcagttctgcatgcatgcattctgcctttcttcttgaaaggtttgaattagtatttggaagtacctctatccatttacatatattcggctattcgagtatgcatgtcttaattccgaaaatctaaactcaatccctaccattttaaatttgaaaaccgtgccttttcttcagtgtggatttcgtttttaatcttataacccaaatccatggttcttttgctaagccgcgactccacaggagtacttgagagcatgtggctagcattctgaaaacaagtttcaaaacacggaga

SEQ ID NO: 112498 - DNA, 994 bp, Setaria italica
  Intron number 1 from transcript Si012341m (locus Si012341m .g) derived from phytozome v7.0 (chr-ID scaffold_7; pos 28 84536 to 2885529 reverse strand)
tgacaacacccgatccggagaggacctacttgcatgtgcgtatgctgacatgtagtcttttttctgatatatatgattggttcatccaacagctgagctattctatgcagctaactgatgttccatatctcatcctaatggaatttgaatattaagatcgaatatcctgctcttaacattctgtagtctgttttgctgttgtcggttttcagactagtcaattgatgggtccagtgttcagtgcttgattagctcattttccagttgtctgcagttgtcgtaagtggtacctcatgctacaataaaatagaagttattttactagaacagtgaaataagccttttgtgcaatcagaatagtgttattgcttaatgaagtatatagttttgtgtaatccagaaccatactatttcctaatgcctccccatattatggtcctgctcatattattgcctacttcagaaccatattatcttgatttgtgactggagagctttgagtagatatgtgccacaagtgtatgtggattatcacgtatttgtattttgactacttaaattagactgagaatagtacttcaccagactttgtgtaaaatgggagaaacatgctttgaacatgatttatattagcacgaatgcccctgttcattgttttctgtttcgagtcttgtggtagtaccttctgaaatgtgtgtttcttttccaagatcccttgttgccggacacaattgtgccaaacgaggagctacattttaacagcaaagatgaagccaaagaattttataaattctattcgggcaaagcagggtttgatgtgcacataaccaagactagtaggaaaaccatactggagttgtcgtgcaacaaggattactacaagcctggtgaggagagggtacgtgagaaaatgtcaatgaggtgtgaatgcaagtcttttgtgaagattaaatggaaaggactattggttctttgagaggataaggttggagca

SEQ ID NO: 112499 - DNA, 531 bp, Setaria italica
  Intron number 1 from transcript Si022206m (locus Si022206m .g) derived from phytozome v7.0 (chr-ID scaffold_3; pos 17 82711 to 1783241 reverse strand)
atcggcagcggcctgcaggtagtggcgccgctccttgaccagtctcagtccggaattgggctcgctttctctgccgttcataacagcgtctagatctgtttgatgtaaatttagaagaatttatccttttgcattctttccctccatccgatttcgtgatactgttcataacattgtccgtagtttagcatacgaggttttgtcgagtaatgcttttcgatagtctgctgtgaactttacaacagcagttttcggttctcaaaaaattagtcagtagtttgatgggcgaccttgcttacttcctcaccatccaattccatgactgccaccactagtagaacagcgctttagtttagataagaggatttgcttagtcatgctgttgcttgtgatattcttatctttaactattagaacatctatgcaatgttaaaatccaatttatgattttactgcgacaattactgtgtgttctttgtcgtctcctaaattctgataactggactatatgatttcagggtattgaatttt

SEQ ID NO: 112500 - DNA, 806 bp, Setaria italica
  Intron number 2 from transcript Si022651m (locus Si022651m .g) derived from phytozome v7.0 (chr-ID scaffold_3; pos 21 999553 to 22000358 reverse strand)
ccgcccgagttctacgacgaggtatgtgcgcgtgtgtgggtgatttcgtggttagtttgctgaggtatttcatcgagcgagtgatgtgcgagcttaatcccatctcgttatggtgaattggtggtaggatcgacaagcatgctgtaaaccggaaaatgtgacatggaccatatgctactagtgttagaaacattccctttttggataaatagagatgacttttgtttttcctcgtctttagatacatgggatgatgggcaatccactggagctgcaattttcctgataccaccagaagttctatgtagctgttattatctcagtactcagtattgttctttagcagacaactaaaatcacaattgtcttcgataggtataccaaatgtgcatcgtcgatggttcttctgccatcaaattttagcctgtagaaccaatctattatcagcacaggtcttcctcacatattgctcactctgtgttgagttgcaataatagcttcatagctatcagtgccatccatctccattcactgtgacctgtatgttggaagcagtacccgtactgtgatgtatgaaaactgtttatttcctcaaagataatatgtattttatctgtaaggtgtatgcattctcattaaacagcatcactctgtcaaatttcattcatctgttatgtttatatgagttgactgatggtatccatgatttgaccaaatatcaaaaacaactattttcctgcaaccggatatcacatatacttccacatgcaggagtggcaagcccgtcagcgggaaaggactaagga

SEQ ID NO: 112501 - DNA, 974 bp, Setaria italica
  Intron number 1 from transcript Si009808m (locus Si009808m .g) derived from phytozome v7.0 (chr-ID scaffold_7; pos 30 265383 to 30266356)
gagtacgagaggattcatcagaaggcacaggtatgagctctacgcaaagccagtgctgcatttgatctgagctacttgctggccactcaatttgctttgtagttcaccaagtgaatgcagcttttatcccttcgttttcctgattgcatttccatttgctttcttgggggactttgttttattgcaatagatgtgaactcttgccttgttgccagtttcacgttcttttcttcacttattatttggaaggttggacataatcatgcccgtttttgctgctttgtactctgtactaatgttctgtttcatttcagctaatctcctggagttccattgatactcctttaagaaaaaattgagaacaaagtggacgaaccatgaactgaagcgcatgaaccgataatggcttagtagaatgttagtaccagtttctggagtttccggtcagtctgctttctaaatggaggttcagaccacagttcgatgaattccagttcgatagggccaaaagaatcttttttcccatgtagtgccgactaagctagaatgcttagtctgaagaatttggtgccgttacaatacatctagtagtttgcaaagtgtttgtgatgatttcactaatttgcagcagttgatttttggcatcttgttccgggctgagatataggagtacccttccactaaatctcagctgtgtacacatctagttttaaaacgatttttttttttgggtggaaacgaagctgtggttcatatctagttctgcagagtgctacattatcctttggctgactcccactgtagcatattttccaaggttttagttttgcgagtgtgtagtgcaaaagtgaccaccttgattgcattattatcagttagggggaaagacttacttttttttgaacgaatagggggaaagacttacagccttgaggttcctgcaggctggtgccctttctccaacaaagctaagg

SEQ ID NO: 112502 - DNA, 890 bp, Setaria italica
  Intron number 3 from transcript Si023442m (locus Si023099m .g) derived from phytozome v7.0 (chr-ID scaffold_3; pos 45 930072 to 45930961)
caagtacaggactgtatagagaagaggccaccaaggtaagcccacatgcaagttcattgttgcattcttgtatttatcttttaagggatattctattgtcatttagttatgtttttgagatggttagatcacagaagaaaataatggattgttttaattgattgtaatcctgatttcctgccacatttcctggttcatattgaatgatgaagtacttgataacttcctattcatttgaaacagaggtggctttgtatatcgcaatgctccaagccttttgatacattttctatctcctgcatgtacatatcgatgcagccacctgatacaagtttcatgttgcatggcaatattgcttgtacccattacttgtagtcttgttgctaggcctctcgtttttctactagtcttgatgcaagtgacatttgatctataggatatctaatggcatctctgaactgatcgagaagctaaaagttagaaatactgatgtgtatcttgtttctgggggcttccaacagatgattaaggtataaacactaaagctgtccaatactttcccagtgatatctcagggaagtcagtgtgcattttatactctgattttgatcccacaagcttctgttcatttcaactttatgtttctttagccttacttttgacacagtttcaaagattacaacaataaacaaaaccagatccctccattctttgatacacatttttttattccgtcctcataaactgatatgtgttacactcttaatttataaaataatgtaataagtttaggtaatatgtatgctgctattccatattcaacaaagtctgtctttgacctacccattgctcgttctgccagtctgttgcattggagcttggtgtccccc

SEQ ID NO: 112503 - DNA, 944 bp, Setaria italica
  Intron number 2 from transcript Si009726m (locus Si009726m .g) derived from phytozome v7.0 (chr-ID scaffold_7; pos 33 676799 to 33677742)
aggctctggcaagaacactgcaggttagctaatattctgtttttgttgcaaaaccattcaagtcatgcttgcataactgacaacaggccaatccatgatatatgtgatgcttaagttgaagtgtttttcctactgtcaatagctgagtttaatcgattctaggatctgcttaatttgggcaatacttaggtattataacactaaaaccgatcttagtgaccaatatagcagacttgaaaaataagtgacttgttgatgcttatttacttttagaattgccatgttctgttgagaaactatagcaattaagccaaaactgttggttgctaacagaaaataaagttatgccttaatctcatttgtctgaaataacatgtcataatggatgtatttgagttattattcttataggtttaagttcaatgataaatatcttgataagttttgcaaactacttttgtgagtctaggatttatgtgttatttttcatgctcttcaaatttcaatgaagcatgactgcatgtacaggtgactttgaactatgatatgattgttcccttttcctttgttttcttcacaaacagttttccatgtttcatcacttaataaactaaaaatgaaagtgaacagtggggtaatgaaggaaggctggaaaagaaatttgatcaaaattgtttctaccgtaatcatcacactgcacatgagcataaatccttgtattttaatgcaatttataatatgattcctttctatgcctttctgtacctatgtgtgctttgtgcaccttctctcgctgagtatcagagttcacttatatattgtctacttatgtaaaatcacagtgcacccttaaattatgcacatatcattgcaatcttacatttgattatgtgtgttctatctaaacaggaaagcttcacagaagagaatacaactgtttccgg

SEQ ID NO: 112504 - DNA, 425 bp, Setaria italica
  Intron number 1 from transcript Si025312m (locus Si025312m .g) derived from phytozome v7.0 (chr-ID scaffold_3; pos 49 991521 to 49991945)
ttgcagaaccttcagagagaactcgctggaaagaggtacttttagaatttaatttgatgttgattcactcatctcaaacacgcacactggttttttttccctcacacatgctcaaaatatgtgcattgcccttgagaataacacgtaattgaaaagaacaagtaaagcacatgcaaactacatacacaaaattcaacttcaaacttagatcaagaagacaacaacgcctcaccactagcaaattgccctcttggatatgcacggaacttgcacatctcacataccatttacgcttcctctggtggcattcacataacttaagaaaaagacgtacacaaatagaaacgtacacaaatagaaacgcactaatggcatgattatttgtaacaggtaccttcttgtattggacgacgtctggaataagg

SEQ ID NO: 112505 - DNA, 1047 bp, Setaria italica
  Intron number 1 from transcript Si021681m (locus Si021681m .g) derived from phytozome v7.0 (chr-ID scaffold_3; pos 49 654722 to 49655768)
cgccggcgtgggctctcttcgcgcttcttctcctggttcgtgctctgcaaatgcagcttgtcttgttgctacttcactttagctcagatttaccggataaggatttatgtgtgacagattctaaatcttgccatgtgctgcttttgctatccaactttggggtgcatgtgagtttacatttctttacaaaagtgtagttaaagtgttacctgatggatggtgaaaaaagtaggataggatggcctaaactgtggcagcattggttggcttcatgttgctgctgcgaaatgtttgtgtgaagcttttagtagtactcttcttctatgctatctcaaagtaacatctgtatgaagcatgaactgctcgttgcgtttttaagcttcttttgcacccactacttagttctatctagtttgttttgctgccaaaggtaggatggtgatgaagcacaacttttggatgagcatgacgtgacctaatcctgttatgtgaatacatcgcgcaatactagtgcaatctatgataatgaaatcagtttcagaatatatgattgatcaattattcaatttggtactgtggcatgatgctaccctatttttcgtaaattggcttgctatttatgataatgcaccatatctgtaaatatgtaccctgtggggagtaacgtataaccccattcagcaagagacttacaaagttgatgttcagttgtttcatgcatcatgctgaattaactacagtttgtttgattcattaataggttaatatttatgattaatagcataaattcaaactgtataaatggaataaaataaagggaagaatcctagtgctaggtccccagatattttctcactgttaggttttgacattttgatgctgactgcatttttcattgtcatcaaaatgtacttgtatgctttgtagctttaacttgcaagtaagggtacacgatttcatatttagaaagatctcagaagatatgttgcttgttaatttcttaatagctcaatatttcagggggctgctggtgcagttgttcactat

SEQ ID NO: 112506 - DNA, 810 bp, Setaria italica
  Intron number 2 from transcript Si010616m (locus Si010616m .g) derived from phytozome v7.0 (chr-ID scaffold_7; pos 25 152824 to 25153633 reverse strand)
aacaagctggtctacgtccgtactctccgggcgaggtgcgcaccctcttttgatttgttcgtctccattggcgtacctgctggatagctttggtaacgggggtattcgatccggggatttgcctttaggattgactaccggtcctactatcggagaaatattttgtgttagcttgttatggcactgaattgagtggtaggtttgactggaatagttgggaagggtcctgcaatgtcgattcacttgtatagttttggttttgtgaattcattgctgaagtctagcagacccttttgatttgttcgtccccattggtgttcctgttggatagctctggcaacagtggagttcgatgcagtgattcgcctttaggattgacttttaaagttctagtatcacagaaaattatttatccttaacttgtgatgacactgaattgaggggtaggtttgattggaatagttgggaggggttgtataatgtcgattcagcatgtatgatttgggtttcttaaattcagtgctcaagttgtcaatgtgaagtattgtagcccctttgtgggatgcactgtatgttggttataagttttttctttctttctgaattcatatgtttggtcaatcagactacaagggtcatatttattggttgtgaggaagcattgcttacttgatctcatccaatatagttatttttttcctttatgtttttgtttacaaaaataaactcggaagtggaaagcttagtcctgtttgctctcttcaaaccttttcagatataagccagaggttggtgatatcatagttggcc

SEQ ID NO: 112507 - DNA, 549 bp, Setaria italica
  Intron number 3 from transcript Si011146m (locus Si011146m .g) derived from phytozome v7.0 (chr-ID scaffold_7; pos 20 193750 to 20194298)
ccgtttggctctggccctcctggtgaccgcccaaggtaaagcttttctttctatctttagtagtgttgtgtgtttccaattttgataggaaatttcatcatctgataggatcatgtgcttgtatttgcccatcgtgttatgctacacaatcgttactaggaatttgtcagtagctgaggtgttgtcagaattagacatgcgtgccacttatgcagcttgttgttgcacgagttaaatcaagcatacatttaaattaaagaactgtgggtttgtggtgcttatttgtacctagttataatttgtttgattgaatctgttcttgggtgtagcgcattgttgtggtgcttcaagaatatctgggtagattaagctaattttcgggcaactaggaagataacatctacagaatgctcagttttgtattatttgtagatactttacttatcctgttgccctctttttagaaattgaacgaggtaatttaattttttgtcgttgcttgtaatgtttgcaggggcccacctcgctttgaagacaggccaaggtttg

SEQ ID NO: 112508 - DNA, 597 bp, Setaria italica
  Intron number 2 from transcript Si011017m (locus Si011017m .g) derived from phytozome v7.0 (chr-ID scaffold_7; pos 15 678655 to 15679251 reverse strand)
ggtgggaaacagaaggcctggaggaagaagcgaaagtaattgccgattctctcccctctttagtcatttcggttcgcaatttgtagatttggcgagtggttgattagatcagtaatacgggtcgataggttttgatttcgatctataattgatcggagctttattgtttgttctcgacgagatttggtgaactccagtcacatttcactgttttagattagccacccctcttatttatgtggtcgctaaatcaacagcgactgttgaatcattagcgatgctgatgcttctcatgaatgatggagtcctgctgttgtgaaaaatgagttgtctcttctttaattatatgccttctttctagaagccaactggttttaacttgactgaattgatctaaggtggaatgtgtcttttgagctattttaaattctagcattcattgtttacttttaatgtgccttacaattatgtgattgacagatgaactgaggttctgatatttgaatcggtgttgtcagctagaagtaatacctcatatgggctgtatattgtgctgacttgattctcagaggttaattcagcttctcgtctgtaggt

SEQ ID NO: 112509 - DNA, 265 bp, Setaria italica
  Intron number 2 from transcript Si010832m (locus Si010832m .g) derived from phytozome v7.0 (chr-ID scaffold_7; pos 34 187111 to 34187375 reverse strand)
ggacagaagtggatctccaaagcaaagcattttaggtatgtaataaaacatatgcattgatttacatcacatagtgtttttttgtactgaatttggatattgagattctcatctatgttgatgattagctttttctgtggtaaagctcaaaattgcatccataattattatctagtagtagaattttaaataagaagatttagtattttgtacataacaaaaaaaataatctaatgagtttatgcttaatcaggagctactatag

SEQ ID NO: 112510 - DNA, 832 bp, Setaria italica
  Intron number 2 from transcript Si021130m (locus Si021130m .g) derived from phytozome v7.0 (chr-ID scaffold_3; pos 42 690151 to 42690982 reverse strand)
atcaacgcaatccgagaatttctaaagaacaagaggtatgtcaatggattcaaaatggtaacttgattattagtaacagatcctctctaaatcaatatccgtttctatttgtagctaaggaggttagttttatatactagttgcatatagataagccattatgttcatttccactgcttcagtttaataagatacataatgtaaggcgctttgtgcttcaagaaacatatcccttcagattttggaaggcgttcaaatttaccatcaagtatatttgatttaattttaactcagttacagtaagatcatacttttttacttgtttctgtagcaaaaaaagatgtggttatatgtgctaagctgttaatcatgtgactcgcttcctcacatgttgtgtggcttcaggccgactttatctgttgtcttcttgtttttgcctcctcaaatccttactaatatatatatcttatgaccatacaacctcatgttaattgctactcaccgaaatatgtggttgtttctacaactatgacactaaaacatgcaattttttggaatttatacaacacaattatggaagatagttatttccgtactccataaatggagaaaaacacataagatcatctggtcagctcttgcttgttttacaatctttggacttgttttagaatctttgtaaatattttttcgttgagtgcagaggcattttcctttctttctctgattacatccatatagtttgacatcagtagatatggcactttattattcttgcagctcttcctaattcgtagattatatgcgcttggtaggtacttcgttgttattg

SEQ ID NO: 112511 - DNA, 784 bp, Setaria italica
  Intron number 2 from transcript Si014272m (locus Si014272m .g) derived from phytozome v7.0 (chr-ID scaffold_6; pos 50 12471 to 5013254)
tcaaggttcgctgcctggcctccctctgttctccaatctgctccctgtataataattagcagtggtaacgatgatggctttgtccatgttgagttgtgctttggagattaaacattcgtgttgttttactggtggcaattcagctttggagtcgcatatcatcctaagcaatggttgaaattagaatttaactgcaaacaagttgaaaaggattgatttttttttttgtgtgtgtttttgctgaattactgacgaagtagctagtagtaattgattagggtgtgcatatttagcagcttgttagttagttgcattgtggaattgagttaatatatatccttgcaagattactatgatactgctcaagtagtcaaatgcttggtctattctaatttcttgctgtttcatatcaatttggttccagtagtttggatatagtcaagatttaattttgtgcttgattaacaactaggtttccagtgatgtacggttgcaggatatagtttgatgaaaatttaatggctacatggaacagaacagcataaatttgatgccacttttacgcaatatcatttaaattaatcacctagtgtgtaatgcaattttctgtaacaaacaaagtaatatttctctagctgctggtaatcttctgagccatctaatgatgttatcagctcttgttagtcggtgctacaaaccaagatgatggattaaacgatatttttctgtacagttctaacagagttttgtttttctcaccagggtaaacttgtggaaaagactc

SEQ ID NO: 112512 - DNA, 894 bp, Setaria italica
  Intron number 1 from transcript Si025802m (locus Si025514m .g) derived from phytozome v7.0 (chr-ID scaffold_3; pos 14 805297 to 14806190 reverse strand)
aaagccttcaacttccgtaatcaactaatcacacttgcatttcgtgcctccctaggttttcaccagaatcatcaatcgtgcacccgtacatactcggtcatatcaacatctctttcgttatatataaaaaaagtatatccacatctgtaattaagaggcggttagtttactattagttgactagttgcacacttcgaagataaggtgttatggaagatggacatatgttgacactgctagctatggattgtccttcaaaaaaaaaacatgttaaggattgtttgcaacacatggattttttttttcagtatttgcacgtagaacagtctagcactcataaaaatcaggtggcccccagttctgaattatactactgcagctgaatggtaccaatatcattatgttattattagtacaagatgagcatcaaacacctttgatttctttggtcatcggtgcttggtctgtgtctgaaacacacttctttttcaactaaacataggctggaaggtgcaatcggtacatgcatttttcctaggaccggtgccttttggaccaaatggttcttccatcctttttgacctacattagcttttgggagtcaaaaaatggaacaactcatgaccatgaaagcagagaaagaaacaaagttgataatctgaccgaagtacacagaactgaatgtcagctttttccttgagaagcttctctttgaaacatactcccatagtttttaaaaaaatgtttttttccttaaaaagtgctcagactttcggattaccgctctactgcttcagatgcgtttggtgcatgatttacaccaagctaacaaaccggcatgtggtatccaatctttcagggcgcgagggcctctgggcatcgggtgctggacgg

SEQ ID NO: 112513 - DNA, 600 bp, Setaria italica
  Intron number 1 from transcript Si022033m (locus Si022033m .g) derived from phytozome v7.0 (chr-ID scaffold_3; pos 23 491651 to 23492250 reverse strand)
ctccttcctacgccccttctcatccgcttcctcaggtaccgtttcttctcggctgctcctcgcttgatctatgctacttcatgctttcgcgactagattcgatgttgtattgtgccgcatcctcgtgctagtagtgatttggtcctctgatagtgattgcgttgttggtactcgcatgtccatttccctagggtttgtgggttatacgtgctcgctcggttctaggatttgactcttatggatggattcatctggatccggataattacatagattctgtaggttgatttgttagtcgtagttctggatcgaatgtttataggttagggttgctgcagttcctttattttgagaggcttttgctgtgtagttgatttgctgtgtagttgatgtatatgttaatagttgcagcgtctttgtttgatctattttctgatctgatctgtggaattgttctgtcactgcttttcatcattttgtatacactcctagcttgttagctggcctttaaattctgcgcagatacttgcttgtttgctctggttactgtttctaacaactgatttatctgatgcagcggtttaagcttcaccggcagcc

SEQ ID NO: 112514 - DNA, 758 bp, Setaria italica
  Intron number 2 from transcript Si021242m (locus Si021242m .g) derived from phytozome v7.0 (chr-ID scaffold_3; pos 35 832082 to 35832839 reverse strand)
tagattgcaaccccttcttaggcttcttcttgaaggtacagttcttttatatctacatgtatgcttttacagatataacattgggatgttcgctacccaatattttcattgatacactaagcttattgttggttttcctgagtcatattatgtgttgttctgtgtcaatagtatcatctcccaactccaatagcaaagaaggaaacaattgcttattttttaatttggtttttctttaaattcataactgatatttaattgttgttgtatgcactacttagtccaatgatatgcagacatttgtataaataatttatcttcttgctactcaaatttgaaagatttgtattattttccaagttctggtacaattcttagtaaataaaaccaagcttggtagttttcctttaagttcataactgatattacttacagtaagctacagaacatggaggaggattgttctatactggtttcttaagttctatcttgcaatgcattttatggagccacttcatatttttttgtggatagtacttattaggtgaagcaacatctatttgagctatggcctttgtatgttattgatagtataagtgtacttgtacgagtgtacattcaagaaagcacaatcatgttatcaagtttcaaaatgtagaattggcatattatagatggcatccaatattctttcctgttatcattgttgtattaaataggcagttgcttaccgtgtgctgtttgcaggttcacctgac

SEQ ID NO: 112515 - DNA, 646 bp, Setaria italica
  Intron number 2 from transcript Si015615m (locus Si015615m .g) derived from phytozome v7.0 (chr-ID scaffold_6; pos 97 03199 to 9703844 reverse strand)
gggggcttcaacgatctgcatatctaccatttaaggtttgacacttcatataattttatttgagttgtgaattttgcatgtgggcaaagtgagttttgatttgacattatggtagtgatgtcaaatattagtctttctgaactattcagtgtgattatgcttgtgatatggtgtaaatttgtgtacatcatatggtctgaaagttttgtttggaaatctttgtgttatttgcaaacatgctgtagtcttctgcagagcttctaaaccttcggctcactgtcttgcatatcaatacttagtgtttatatttaattgtataatgttttccataattaattgtactgaactgtgtgggggctatatgatctgtggggatgaacaaacaatctagattacctttagatttcgccatatgaaatatgactacattaattcttcctaatgttcttctatcctaacagagtttaaacctggtaggctcataactcaatgaagcccccccctccccccacaaaaaaaaagttcctacccttttaaactcataattgtcctgattttaaactcttttctgttgaaccttgcaaactaccaaaggatgtagtaattacttcagtaccattatgagcaggtcaacagttctggtgtc

SEQ ID NO: 112516 - DNA, 670 bp, Setaria italica
  Intron number 1 from transcript Si009560m (locus Si009480m .g) derived from phytozome v7.0 (chr-ID scaffold_7; pos 20 609749 to 20610418 reverse strand)
ggtttaggtgagcggacggccgtggaatggttggcgcctgtttatggctcgatatccggatttcgctgcggcccggctctcgctggaatttcctttcctcatttgggctgcaataattgcagtcgaatttgcctcgtgccctgatcgaattgggggggattgcgtggttagataggtcgatctgcacgcttagtttacgatcttccactctaatttagcgtgcgacggatttgaggggctttgaatcaagtgcggagttagagtggactgtgaggattcacaccaactgcaccagttgaccttttctaaggtcgttccagttagacaaatcctggtaaatacagattgaggactggatgatccagtttgacgattccgaataacgagtaaacagctgcgtctgtgatgtttcaccgattccagaattagagccagctatcatcctttttggtgcagcttaagttgttttgctgattctttgtttatccttccaagatatgatgcacatggattagtttatttttttattttggttttgcgctcggttatggcatcttgggaatagttccattgtgcctatttaaataggtacattattcagtagccagacatgtttattggtgatatgttctctgatgtttattgcttgcttgttgtaatctccaggtca

SEQ ID NO: 112517 - DNA, 727 bp, Setaria italica
  Intron number 3 from transcript Si009577m (locus Si009577m .g) derived from phytozome v7.0 (chr-ID scaffold_7; pos 35 462294 to 35463020)
ctggtaacttgattctcaacttgcacctactttattagtattttcattgcgacatgctgacatcttttagtgatccagtcgtttggttacattagacactggggggaaatttgtaggtgcatttgcattcctttttgagaagaatacttgtgcatgagaagtatatcaaagatacatacatatagagcatgctagaatttgaacgcatgcaaataaaaagggaaaattggtgcagacttgtatgattgctgcacgtacatagccaagtttgtctgtgcatatagcagcaatatgcattttggggtatactggtatgcgctaatgatcattttactacaagtttgcatattctatcatggtctatgtctatgattttcttcgttatatttttgacatgtataagtgtcaagcactaagactaaaatattgtctattttcccaacattggaatcatcagtgttgggttgtttaccttagaatgtttcttaatgtgactcctatgatgtgcgcaataatgtggataaatctgttgctattctttgactgtaattactacattcctatagtattttataaagtgttgtattgcatgaaatacttaatttgtatactcagtgtcaacccattttaggatattttttacctttttttgttttgattgaaactcataaatctaaaccttgataaatctgtttggtttaccttattgcagctcccagtaagcata

SEQ ID NO: 112518 - DNA, 276 bp, Setaria italica
  Intron number 3 from transcript Si021571m (locus Si021571m .g) derived from phytozome v7.0 (chr-ID scaffold_3; pos 45 384835 to 45385110)
gtggtagtgaccctattgtaggatcaggttcacaggtaagttcctttgtttctcttaccctgcatctgctttgactgcttcatcacttgaccatttattttattcatcgacctgctttgctataattatatgatgaccaagcttacttcagttctgcaatgtttttctatgcatcaaggtccctagcagataactgatatacgaaaattcatgaatttgatgtcttcaactaagagttgttttgttttaatcttcaggtggctagtcttgagacct

SEQ ID NO: 112519 - DNA, 754 bp, Setaria italica
  Intron number 2 from transcript Si010092m (locus Si010092m .g) derived from phytozome v7.0 (chr-ID scaffold_7; pos 30 143916 to 30144669 reverse strand)
accaaagccgacaagctgtgagccctacgcttctcctgttccacctgctgttttccttttcagttctcctgcgccttttgatccgcgagcaacctgattgctgtttcgggtgtagtggggatttcatttcgttttcggtcgagtaatcagagctgtttgggtcctgcgcgcgtcgaatttgaacccaccggtctgtaattctctactgatcatgccaatttctcgtgtggaggtatgttgagcgatccggaactacctggatctagtcctgctgttacacggagtttcacctcttcatgccaagtcatgccgctggtttccggtcgatcaggtgatcagatctccaagtggttggcagagataagcttcaggcagggctttgccgacttgcctgaatggcaattttgtatcgatccatatagtggggaaatctgacactgtagtcggcggttggcagagataagcttccaagtggttggcagagataagcttcaataagttcagagttttatcttatttccgtgtacatgacaataaatcgctgtagtcagatttttgccattgaaaaattatttctttgagtttgtgattgtgctacattttcctgcttttacttcaattactatgtcaatgtgccacctaaaaaattcctgtttcatcaacttacaatggagtctgtataaagcatgttccctcatttttttcttgaatatactctttttttgcagaacaaaattgagttttacaaggtgga

SEQ ID NO: 112520 - DNA, 934 bp, Setaria italica; identical to SEQ ID NO: 112157
  Intron number 2 from transcript Si022945m (locus Si022945m .g) derived from phytozome v7.0 (chr-ID scaffold_3; pos 13 814334 to 13815267)

SEQ ID NO: 112521 - DNA, 465 bp, Setaria italica
  Intron number 1 from transcript Si025734m (locus Si025734m .g) derived from phytozome v7.0 (chr-ID scaffold_3; pos 42 422295 to 42422759)
cgagcggccgaataatttgtaagaagatgggtagagttataatggtgaaaagattgattacaatttcttttgactcattagattgccacaggagcatgtgcatattttaggtggtgtgagaggtagcatgcttagaatgtgtttgttatttaaggtggcatgagatgtaatcaagatttagcaggtacttttggctttaatgacacctaaatttcttaattatattttaacctcatattttttctatatgtcatattgtgttttttattcttctactgataaataaagttaaattttcaagcaaagattagaagacaggaaattaatatgtttccccccaagagttttaggtcagaggtggcagtgtaatagttcaatttttcagttacattgatctacttaaactaatatataattttggcttatttgatgattgtgcatttcaggcagctctggtgatcggag

SEQ ID NO: 112522 - DNA, 618 bp, Setaria italica
  Intron number 1 from transcript Si024349m (locus Si024349m .g) derived from phytozome v7.0 (chr-ID scaffold_3; pos 47 15444 to 4716061 reverse strand)
tgtccgtcagaaaacccaaatcattttcatggaaatacagcatgaaacagttcgttttcatgggaatcaggaaaaaaaaaaagttcacgaccaagagctaactagacagggcggcgcagaaagctggctgcccaactcaaattgcgtagtagctgaacactgaaagcatgctcaatgattgtaccatgtcgagtcaacgtcgcatgatctcattatcaaaacaaaaaataaagaaaagaaaagaaacgtcgcatgatctcattatcaaaacaaaaaaagaaaagaaaagaaacgtcgcatgatcctgtcccgcgcgccgttctcatacacctcctcgtcgtggtccttagcgttgatgccgacctgcccgcaggcacgggcctctcgctgtcgcaggtcaactcgcctcgctccgttcgcagaaccgaggcgataattaagaatctattcattcactcaatcattcgttccttcggaaaaccaagattcctgtgggtacgagcgtcagccatgggaacagaccaataagcttgtccttggccgtgccggccggcgtgagatggtgaggcggccatggtagtagtgatcggcgccggagaggccggccgcggcggagaa

SEQ ID NO: 112523 - DNA, 760 bp, Setaria italica
  Intron number 2 from transcript Si012831m (locus Si012831m .g) derived from phytozome v7.0 (chr-ID scaffold_7; pos 35 351799 to 35352558)
tatagagttttctctcagccactgaaattttgtaggtacgagctccctgacattttggtagcatacctgacacatatttcagatgcttattttttctgatttaataaatattatcctattaggatggatctaaagactttctatcttagaaaaaggaataggattagttctgaatgtgtggcgaaagtgacaatttgtcctgtatcttttcttagttccttacattcacaacaagattggatgatttcagtcacataaagcaaagcttgttttaatttcagccatgaatattgaataaatcataggtatgtatggctataaatgtgctacaattatttccaggatgcaataatatagtgaagcaattatcaatctaagtatcttatcctaaatggctgcgtgcatccagcaggtctgttgtcatgatctttgagcagaatctggactagcagtacttcagtagcattttaatttgaatcattcgtggttgctttccaaattatatcagcttaacctgtttgatcatgtgccaaacctgttctatggtgcctgttggctgtcgcattgtgcatgatccttttctgaaattggcacgattccatggcaagcctgtagctaaaacgggttatgacctcaatggggagtgaatggcagtttcaaatattgaatgctcagtgggcgcattggttgtgcttgtgcatgattttggtttcttccaactgcagtcaaaagtggcctgacagacattcttggaccaagt

SEQ ID NO: 112524 - DNA, 627 bp, Setaria italica
  Intron number 1 from transcript Si012489m (locus Si012489m .g) derived from phytozome v7.0 (chr-ID scaffold_7; pos 29 022886 to 29023512)
gctccttcgaagacaacagtaagtttaatttaccatccaaattgatgaattgtcgcgacgagcctgatcattttctgtggaaagtacagatagattaattggcttttgaggtagcagtatcgacacgatttgaaccctgacggttcgtttggttggaagtaagtggtcgggaggccaggagtttagatggaagagattaaagttttattgtttgtttggtgggcacgagagttttaacgggatgagtaatggaggaaatttagaggggcaactcgcaccgatcacttcccaggaagaggggtgggaatttattttaagtggaagatacttaagatataatttcccacctctaaaccgtcacaccaaacaagggatatctagtcttacttaaaactcccactcttaattttctcaaaaaaaacaaacaagggaacgacacaaaaatcatatcccaagtgaattacctccgccaactcccaccactaattcccatgccccttcccgttagtcgccaaacacaccctaatagtcaaagaaactcgaccgcttgttttggtgattcgcaactgcgtatgcttcaaatggtttatcctgttacgtcttgtaattacagcctctgttcctccc

SEQ ID NO: 112525 - DNA, 523 bp, Setaria italica
  Intron number 3 from transcript Si012142m (locus Si012142m .g) derived from phytozome v7.0 (chr-ID scaffold_7; pos 15 239215 to 15239737 reverse strand)
ctgctgcctcagggagctcggcactccgcctgcaggtaaaaataccgcccttttcttctcgtggtgtcagtatctcgaaagaaatcgaaaatccttataaaaaaaaccgaaagttagttcttctgaatgtgatataacttcttcgtttgagttccctgtgtgtagtttcagccctgttttcaattgtaattataaacccctatcttcttgcaacagtgataaaatgtgcacatgaggctctgaagcgaaaaaaataatcatcttggtatatgatttggaaacagtaagcttgaaccttgaagtaatatacctgtactgaatcaagacttaggagtatatgcgatcttggttatcttctagttccctaccgcggtactgctaattagagcagcatacttcatgaattccattttccagttcaaactgattgtttgttactcgaatgtttcagtttcaaactgccatgagtagcaaagacacttcccacaggccacaattcatcactgtgcttcctccagattcc

SEQ ID NO: 112526 - DNA, 813 bp, Setaria italica
  Intron number 1 from transcript Si009268m (locus Si009268m .g) derived from phytozome v7.0 (chr-ID scaffold_7; pos 15 635228 to 15636040)
gtacgagtggctcgacccatccatcaagaaggtacgaaccaacttccagccccgccacctgcagtagccccctccctgctgccttgcatctctagcgaacccaacgatttttgctcgtatgggcgtttgtaggtttagctagcaggcattacttttaggatggacgaacacagttcatgattgcctgccgatgttactgtaaagaatggttacgtttgatattgcagatgcgagtaagctcacgtcacatttttttttgaaaatgcactaactattgcaaatgttagaggagcttccagaacttccaagatgtgatggtgttaactcttgaattattacattgacacagaaaatgtctacccctgtctccattgattacttttgagaataatttctagttctagaccacattataactcaactgtcatagtaggcacaagcgcattttttgttggatatgcacctaagcacctaacttcaactgaactactattgggtatgtatcgttttggaatcatgaacttcattgcaaatgcatatatgggaactcctattggaaactagtgaatttttcttatctaattcttgctgtattcaatatcttctggttaaaactgaaaaacacagagcctaaaatcactttagtgcacaaggtttactgctacaatcaatgaatacagctattttagctatccccaatcatgccatgctatttatttcttttgtttgcttacttgctttgccatgccacaatgacaatgattcttccattttcgtcaactttaactacgtcttttgttgactacagactga

SEQ ID NO: 112527 - DNA, 813 bp, Setaria italica; identical to SEQ ID NO: 112133
  Intron number 1 from transcript Si013879m (locus Si013547m .g) derived from phytozome v7.0 (chr-ID scaffold_6; pos 28 219172 to 28219984)

SEQ ID NO: 112528 - DNA, 739 bp, Setaria italica
  Intron number 1 from transcript Si025085m (locus Si025085m .g) derived from phytozome v7.0 (chr-ID scaffold_3; pos 47 04702 to 4705440)
gtgatctacactagaggcctcttcacctcctcgcggtgcttcgagcagtgatgttgtcgacaaaaaggcgacgatggaggagatcgacggcggcgggcgtgctcttgagctcgagctctggcaacggctgctctagagctcaaggcgaggcgctagggttggtgaggggctttggggcgtggcggcggcttttatagcccggtgggggctggccttggtgtgcgggcccgaggtctaggtgggcgcgcgcgcgggggtggcacggactcgaactcgagtccggctcgggcgcggcgcggcggaaggaaggagacgcctggcatcgggtgagagcgaaggcggcgctgagcgggcttgcgcgggagctgggtcgagctgggcctgccttgcagggtgatgctgcgctgctgctagcgagctgggtcgaaagaagaaagcgggctgaaagagagggagaaaaagagaagtaaagagaaagggtttttctattgtttaaaaagattcaaacataaatttaaattcaaatttgaattcaaacaaacaaaaattaatgcttgaacaatgaactcctatgattcattaacttgtcttagaaaatatttagatgcctaagaaatttaataaaaccttaaatccttaaataaaagcaattaaattctagcaaactgtaacaaatttattaatttgccaaagttgaaaattagggtgttacactgtctcgttaaggggctgtgccaga

SEQ ID NO: 112529 - DNA, 793 bp, Setaria italica
  Intron number 3 from transcript Si009238m (locus Si009238m .g) derived from phytozome v7.0 (chr-ID scaffold_7; pos 20 458028 to 20458820 reverse strand)
caaggaatcagtactttccattttcagctctcttgatttttctagaaatataagtgatcttaattagttgtaagactggacccgttgttacacgcctattagaattttaagtgggacaacatttggaagtcagttccgatgatcaatgtatcaccaatacggcgatatgatacagcgatatgcgactttggaaaacaacacagtggtgatatagagagagtatcgtagtatcggattcgcaagtattggatacgggtacggcagggtcagcgaagtatcggtgtttcatagccgatgatagctgcatgttagaagagctttgtagacaacagattcaagtcatggactatgcaaacaatgtctatcatagaatgcagattggtaggtaggtcggtggcccttctcattgagcctttttttgtgtttggggggcggaaaatttgagatatctagcagttggtgtccatgtgcgtgtgcatgcttcttcttgtcattgccacctctgcttttcattaggacccaagcacaagcatggctggtgcagtggtgctgcatgctttcttactacctctggtccaaaaatttgttatgaccttcaaaagaacataacttcatgcatggaagtttaattttgtatatatttagaaagagtaataattgtcaaatatgtgtgttggagaccgtaacaatggcctaaaaagacaaataaatcttactggggatagcatgcgtactttgagatttattcagtttcctaaaatttcactgttccttacaggcacggtctttgcat

SEQ ID NO: 112530 - DNA, 654 bp, Setaria italica
  Intron number 2 from transcript Si009238m (locus Si009238m .g) derived from phytozome v7.0 (chr-ID scaffold_7; pos 20 458866 to 20459519 reverse strand)
ctttcggtgagtgctcttggctcatttgctgtgtggtaccacaatgcacaacggttgatgatgcgaaggaaacatacctatttgccccaaaaggggataaatttgattggtgagtctgaagaataaggatgatgattgtgccatatttggtaatggattggcggtaggagctcacattccttttctgggcatactgggggtatgaatgttgatacatagtcacagttgagcagataggctaacagtttaaaacgattccctagggtcagtgttgtactctaatcactaataatcaatgaagatagatttatgctttgtactatttgtcactttgttgatcaggcgtgctgtacagtatgcaaaatgtagaacatggtaaggtcttcatgcttttcagtagaagtttcaataaatggtaaagaacagtgtggtttaaattctgttatttctttagaggattgttaattctgctgtcatttttaatctaaattcatgttccagtaagagaacctgaagtcagagataagctttaatgcacctcctagagatattaaccaagtttgtagtgtagcagggcttactaaaccatatgaatgctttgcatttttctcttttgtagataaagtttttggtcctgctactacaactcggcac

SEQ ID NO: 112531 - DNA, 905 bp, Setaria italica
  Intron number 5 from transcript Si023807m (locus Si023694m .g) derived from phytozome v7.0 (chr-ID scaffold_3; pos 45 711502 to 45712406)
ggtaattacttatggctattctttgttactttatggttcggtgcaattctggaggttgcaccagtcttatacacttgtgataaaaaaaaatgcatgctgatggagatccaaaatatatgtttgatttgcattgggatttagctcaccttggagctgtcagcagttgattattgaagtataaatgacatgtctgaatcatacaaatgaatttgttattgttacattaactggattctcacaaatatcctgatggttctttcttttgttagcactgcaccagtcaatagctagaattaaaacaagttcatgtctgatgcgaagtttcacactcctttagttatgattcttctatttatggcatgcctgcaaaatatattctgtggctagcattagcatatatctttgacctatcacttcgcattcaatttatgtggatggtgacttaggttgctttatgaccttgattggctagaagaacatattctaacgtccacaatattgccatctctccttttattgaggactgttgatccaattctcacttgtcacattcacagctacatcaagatcattataggatgcccgatttagtagcctttgaatctgtttccagtttctggggctaacaatcttgatttttggtccagtttccagggttaacgatcaatgttttttggtcaggcagtaaagaattactatctatctatcttttccttgctgctcaacagttgaatcctggttgtcttcaaatagaatttcataatattagtcaggagcatatctcattattgtttgtgtgtattttgcatactcaatgtttcacttcttatggaatgataatgatcttctcttcatttcaactggatgtaggctgtcaaggaaatacgatacaactttctggctgg

SEQ ID NO: 112532 - DNA, 848 bp, Setaria italica
  Intron number 1 from transcript Si010743m (locus Si010743m .g) derived from phytozome v7.0 (chr-ID scaffold_7; pos 34 958615 to 34959462 reverse strand)
gtacctcttcaccaacaccaacgtccgcaagatcggtaagtcccatcatcacgctcctcctctacttcgtcctgccattgttcgttctagtccgtggcgcgcgcctcgagtgcgtcgtgctggccagcgatgatgttgtttaggtgttgcgtcgtggacgcagtccagcgcagcgcgtttatgtctccggatttgcccgtcaactctgactaattgcccgacgtattcgactttgggaatcgggaggtggaagacttctacgaggcctgattgcacatgtgcagctcttcgtagttcgtggatttgcctggtctgtggtctgtagactgcactggcattttgatccttccttaaagaaatggagagtttacttcatttcgaactaagtggctgaatattgaattgatcaagtagatccctttgtttatgtggaaaatgatcatgtggagtagagtgtagaggacattactcattacagggttgtttccaagtaccagccacacaccgtggatacagcaccaagtaaagtaacatgaaattccggttccaatattgaaaccatgtgaccttttttgtatgaagtgattctactaggcatgtcacttctctgtaatgcatgtagttagggcatgtgtttgtgagcttctgaatttgtctgcaactcagaagatcagtgcttatttgtgtttctttctccattttcccccacaagcatgagatgcgcatatagtagtttcaccatttcccttgtatctcctacctcttactttcctaattatttcaaatgctaatttttgttttccatcttttcaggacccaaggagtttacttctgtattttacagtctt

SEQ ID NO: 112533 - DNA, 625 bp, Setaria italica
  Intron number 2 from transcript Si009992m (locus Si009992m .g) derived from phytozome v7.0 (chr-ID scaffold_7; pos 11 646210 to 11646834)
accgagctcaaggagaaattcaagaggatatgtgcgtatgcaacactactagttctcttcctatactcccagacgtcttccgataactgaactggtttgctagccataatcgcatgcgtcatgctaaacatgctttcctagtttgcacgtcatgctaaacatgcttcgatcatcatgcatgttcacgtcctgtgctgaaccaacctggtaaatggcggccaccagaatggtttggtttttgttttgagtgggtaggtagtaacgaagtttaaaggtgacagagggacctccaggacggaccaagtaacgaatttagcaatttcattgacaaagctcgacccctttttctaacttttcctctattagtcgattattcctttatattctctccacggtaagttttattgtccagcagattggaccggtcactgtcttcaaatccttgcatagttgcatatatgggccccaattctagtttttcaaaggctaaaaaacttactgataatgcatgtattcatctcggataataatgtcatttgcaaacatttaatctgtactatgcaatcctttaaaaaaaattgaatttcaaacgtcatgagtgtgggtgggtgcaggccgcaagtcg

SEQ ID NO: 112534 - DNA, 892 bp, Setaria italica
  Intron number 1 from transcript Si025202m (locus Si025202m .g) derived from phytozome v7.0 (chr-ID scaffold_3; pos 31 80753 to 3181644)
aaccccgtcaacaacgtcttcggtacgtgtcagatgccctcctcttccctttccttcactttggacttggaataccaattagccttgtttgattcctcatgcttgtacgcgcagtcgttttgtctacgcgtcggaattttccattattccttggtgcttcagatgcttgtagggtttagggttgagggcttgtagatctactgttattttgttttggagcttatagatccgctagaatttgttttgaggcctgtaggtctactggaatatgctgtatggctttagatgcttgttgggaatttgttttagggattagaggggatttggattggtttatctgaacaagccttgaacgtgagcagtatttgcttcgcttcaatgggggacatgagttgcagtaacaattggaaagtaatttgtttagtgtcaacagtaactgctttgtttatgtgctctatatgtgtaggattatccaaggtgagcctatttgtgaaatttgctgttcaaaattagatgctgccgtcttcatatgatcctctctttctgccacttgctaatagtaatttcaatcagacaatcagttcagtcactttttcttagttaatcaacaagttggtggctcgtgtgtagatgctactctagatctgcttagatggattgcacatcgtgcaattacaattttgaactaaaactatacttgaacactgactacccttggaaaaatttccttgtcacctttttttagggtgtaatttcggacagcagtggttggaaaatgtaccggttcattgattaatcaaagcttaatgctactaactggttacccaattgtacttgtgtgtttttctgctgtgatttgacaatccaactgaccgtctttttggatgcagac

SEQ ID NO: 112535 - DNA, 830 bp, Setaria italica
  Intron number 2 from transcript Si006150m (locus Si006150m .g) derived from phytozome v7.0 (chr-ID scaffold_4; pos 30 406818 to 30407647 reverse strand)
gctcaaggatcttcccggttcttcagataaggaaggtgagctgcgctccatccttgatggcctttctttcccccatttctgtggcttgcaagctctactgaatctcttctttctcgattttacctttttgttttattgtatggaaatgtttatttatgttgggtttgctccaagaagcaaatcagcagtttctcgttttaatgctggatttgatttatgggttcttggagtttgatgacgcaactttcaagtttgaacagttattttgattttttttttcggaagagagttggttggtgtcaggtttgagattctggtctaattcgaaacagtaaaatacataccagggcgtgcggtctctcgtttccatggaggactcgtagatggtcaaattctgccgaatttccaactctaccaaagcctctgaaatggacacttttgctgttatttgtgcgcctccttcacgtttcagagcctgtggctgtggtagagaggaacaaaacatcagttttggaaggaggcaaaggggtggtgcggatgtcaatttttggggtacttcatatatgttttctgttgaaggggggaaaaaacttctgcaatcgaacgcctcacgtactcgcatctggcagcacgtgcctttcatggcaagccagacaatctgtctatcattgtgtttttgtttcttgctgtgacttgctttgcactttgtcccgttcttgattgtagttaggtagctgattttttcataaatgcaaaatcagtgtcatggcgtactcacaaacttgtttgttatagcccatacctctgcaggagaggatcaagagaacact

SEQ ID NO: 112536 - DNA, 863 bp, Setaria italica
  Intron number 2 from transcript Si013331m (locus Si013331m .g) derived from phytozome v7.0 (chr-ID scaffold_6; pos 29 699697 to 29700559)
tgtttggtgctggtgtggccgatctagttgaaggggtatgaactttttggttactctttcttgatcattattttagatgtggggataacttcccctgtagtttactgaaggttttggctggattttctactagttattcaagttatccagattaccctgtttaactttagaagtcaatgagtcatgcgctcctttttcttaatgtatggatagctttatgcctttactactaagtaaacaaagtactcggtgacccaaattctagtgtcttgaccttggaagcttcttcctgactgagcaacttatttgtttataagctgtaggccatatcaatcaacttgtgatgaagtttcttagttaacaagtcaaactattccattcttaaacctttgtctttgttttgtcaacattatttgttcgaacaccacaaattagacatagtttctcaactcagtaccaagaaaagaggcaagaaatctggcctgtttcaagtgttcaacgttttctgtaacatgccccccaaatttcgtcagcatctttgatcattcaaccacaaatcaacagttctggccttcatcatccacaagaagtcacaagtgggcaaccacctctttcctgatcactgtttgagagaaatttgatattgttatatatgttatcacttaatccatgtcacacaatttcatgaatggatacacataaatcttttatttctttttccttacgaatacattgtgtcatcttttctcagttttaatcatatccagttcataaaaactgtgttgctatttctgctgcaagctcatggattaataattatttattcaggtttcgaagttaagccatttgagcaaacttgctcg

SEQ ID NO: 112537 - DNA, 823 bp, Setaria italica
  Intron number 1 from transcript Si009955m (locus Si009955m .g) derived from phytozome v7.0 (chr-ID scaffold_7; pos 34 781786 to 34782608 reverse strand)
cttcttccatacgtggatcatcaacctcgtcacctgtacgtgcaaccatatctccagttgtgtttatttgctctatttctgttcttctactaccttgcgccatggtatgtctggtctctgttccggctaaatccttcacgtcagtcgttataggagatgccacctctagctctgctagtaggtgctcgttcatcaagctagccaatacatacaacaattatacaggaacaaagaatttggttattaacatcaatggtagctgtcggtcagattcttaattcacagaggggaaaaaaacagagtagtcttcgctacttactactctgcttctctagtcagcaatagagattgtttcttttatgttataaataaatcaaatatactgctagattggttgcaggtacgatgcttggttattgcaatatatcggatattgcatggtctcaatacaaaatatgcaaactaaaagaaactggtagcagatctttggtacagtaataagttttagttcaggattattcaggattgtctcccaagttaaaggggtcgcaaaattagattaccaagttagcccaatatagtgtttcacgtgaaaaagataaaagaataacattcttcttttataacgtcaatgtttgtgataaagtctacaaagagatgtgtagtaataattaattcaactatttatcaatttcatctatgctgatagcatggttctattcatctatgcattttttgttactttttcaggctagttactaactttttgttccctttttgttctataggcctgccagtgtcctcgttatttcccttcttgtat

SEQ ID NO: 112538 - DNA, 747 bp, Setaria italica
  Intron number 1 from transcript Si009558m (locus Si009558m .g) derived from phytozome v7.0 (chr-ID scaffold_7; pos 20 883551 to 20884297)
ggacgtggcgaaccctggagcggctgcttcctcaggtttggattcctgcctctgcatgaatgaactcccgttcctactactgtcctgtcctccggggctatttgttcttctgaattcgctgcggtttcgctaaattgggttgtttgcgaactgaggcactgggaggcctggatagagttcgttcggtggacttcaatagttgactaatttgtgtggaaaacgctgtggaatcctcacaatttcagtaggtattagtaaacgaaaatactgggggaaccagcgattttccttggaataattgtgggttgccacctcttgatggttcgttaaaattgttctctgccaacataatttgttgccctgtacaattttgtttatttttagtttcatattttgtcctcgtttctccttgtgaagaggcatgccaatcacgatttctcaaatggggaaaagtttggatcagtgacctataacgaatctacatcctgttactttgattttttggtgtctgctatatgtggctactttagcatcagtgctgcttctcaaaggtgatgtttcgatgtggtggatccatatgcagatacgctcctgttcagtttattcttcgttatacttcagatagctcatgattagcaattacaagttggaactataaagtgaagaagcgaacgagttctgtatgttctttgtttcttcagttcttctgatgaccctttgatgcaaatcaattgcttctattcagga

SEQ ID NO: 112539 - DNA, 611 bp, Setaria italica
  Intron number 1 from transcript Si008563m (locus Si008563m .g) derived from phytozome v7.0 (chr-ID scaffold_4; pos 36 968967 to 36969577)
gagtgtcgcctggagtggggttgcaccaagagcaagtgcagactccacctgcaaagaaaagagaaaagatggacgtgtaaatgtttgcgattttagtaggatgatcattccacaaattaatatttatttagttcacgaatcataatatgttatatgtgttatactttgtacattatgacacatttgaagctaattagagctagttgtgatgtgatagccacctattttctctatagtaatgtttcaagaaacccatctatattgtttcatagctagtattaagtcccgctaaaaaaagaagggttgtgcaagccaaagtaaaactcaaagcatgtctattgccagatggtgaacagtaacactatgcatcctctgtactttgtagttccaacttctactaacaaaacgcatgcatctcacacatactagaaaaaggagtaaaactcacaagaaaattgtcattttgtaatgttgaagaaagaagatttagccaagggaaagaaaattaaatggcacatgtctccaagttgtgagagggcttgtagctgaccaggttcttttcaatcgtcacatcctcctggagcttcttcatggcgataccagtgacggtc

SEQ ID NO: 112540 - DNA, 572 bp, Setaria italica
  Intron number 1 from transcript Si013117m (locus Si013117m .g) derived from phytozome v7.0 (chr-ID scaffold_6; pos 18 782365 to 18782936)
ccggattgttacaatccaatgtaagaagctgcatgtttgtttcagcttgtgattgtaaaagctaaaatccacgatcccaagcctgagatgaacagggtgttacccttggttgcctaaaaggttccagttgattgttggatgtgcacgatgcaatcagagtagcaaggtgcagtatatgtcttgcagccttaaaatccctaaggggttctttggttctcatgttttcattaaaatcaaatttagttaaacaagattacgggctagctaatagctagatgagacagaagccgaattacttaaactggttttcgctgaaagtcaaatattcagttttattaaaactactacaacctattttttgagagaacttgttttctgcattagtttggtcatgtttcttttttccttgcatgattagagaaaacagagggactactaagaactctgtttagttagacttttctcctttgttcttttgccagagaggatactgcgctttcttcctgtgattgaggtatttgattttgatcttttcaggttcctctggttaattactgccggcaactggcgtc

SEQ ID NO: 112541 - DNA, 987 bp, Setaria italica; identical to SEQ ID NO: 112265
  Intron number 1 from transcript Si023040m (locus Si022797m .g) derived from phytozome v7.0 (chr-ID scaffold_3; pos 44 508468 to 44509454)

SEQ ID NO: 112542 - DNA, 506 bp, Setaria italica
  Intron number 2 from transcript Si021634m (locus Si021634m .g) derived from phytozome v7.0 (chr-ID scaffold_3; pos 16 101461 to 16101966)
gcaccactggtaagcgatgaacataagctacttcacaaactaatggcaggtagattacgtagggtctagaaaactaggagaaaggaccaaatttttagttttgttttgagatgggtgcatccacacaatcttcaggccgggaaaaggtttgcatataggtaggcaatcccgatcgagaacgtccgcgcattcctcatgtggtttcttgtactagtaacgtgtggccagtgtcaagatgcagacatgttttcttactctatttggagatctatcatgacggcaggtgttggttttatggcaaaaaagactgaagtgtcgcattcgatctccactgttcaaaaatcacgatagtcaatgttcatactctaagagccatattcaattttatttcgaaaatcgctactgcaccaatcatacgcgtgcatcatgcatgttttgatgtctaataatactaatgttgtactgttgcagggtggactaggagactcgtacaacggcgagctgca

SEQ ID NO: 112543 - DNA, 584 bp, Setaria italica
  Intron number 1 from transcript Si015173m (locus Si015173m .g) derived from phytozome v7.0 (chr-ID scaffold_6; pos 29 600879 to 29601462 reverse strand)
gacatcccaagctactatcgacaacgactggagaggtgacatgacaactcaacattcaatttcactctggatttactatttgtacttgtgttatcaactaagctcatgtgataaaactaagctcatgtgctagcctttcttcaggaaaagaaagaaagaaagctatacttttcatgttccaaactattggtcagtttaattttgttccaaatcaaacttttctatctttatttgacaagtttatagaacaagaattaacaactacaacattaaattagttttgttaagtccaccacaaaatatatattgacagtgtatttatctggtattgtaaaaattaacatattttttataacttgatcaaagttagagaggttttggcttaagacaaaactaaagtgacaaataatttggaacagagtgagtaccacatatatgcatcactggcccgtggctcaaaatagcttcactgctcatatgaacaactgactaggaactgtaattttggcgctgagtttatgcatgtcgttgctgtcgttactatgctagatacggtaccctgttcaagaccagcctggccgggc

SEQ ID NO: 112544 - DNA, 517 bp, Setaria italica
  Intron number 2 from transcript Si022216m (locus Si022216m .g) derived from phytozome v7.0 (chr-ID scaffold_3; pos 21 469 to 21985)
aggaactcgctgcttctggtgttaaactggtatgaagcctttttcatgtgtctgtggcattttcattatcaaccttatgaaatggatccttttgcataatatggttaaaaactacccttgtttaggcagattgctctcattttgctgtatgtagttcttacagagaagtttggaaactgaacaaaactgatgaaactaaggtgatctagatatttgaaaaaaaaaaattgattttttctccctcaattgatggatcaaggcccctcctgctggctcgaatggaaagctcctatggccatgttgcgggtttattgagtattttggttgagcgaagttcatagctctgaatcatttgccagcctgcataactgaacgagtttgcaaattaattagagaacagaatggcacaaacatgtgccagaatagttgcattattttgatattttatccttgctgaattggagtcacaagtggcttggtttactgtataattcctttttcactttcttcttgcagg

SEQ ID NO: 112545 - DNA, 944 bp, Setaria italica
  Intron number 1 from transcript Si009327m (locus Si009327m .g) derived from phytozome v7.0 (chr-ID scaffold_7; pos 28 715637 to 28716580 reverse strand)
acctcgccacccgcacttgcatacgcagctggaaggtgagttttggtttttcgtgcgtcccgtggtgcttcgatgtattcgaaatgttagtccattgatcagtgacttcgaccataggaaagcaattttaagtgaatagtcgttggaccctgttccggtatctagctagagagtaatcgagtttattcacgacatagtaaatgtctatagttctgtgagtggtctactagtttgaaagccctgcacaaatgcagttgtgcagttgcaacaagcttggaagcttgtattcctgtgtgaatgtcagaatgtgtcaactgagtcgtcgtgggctattcagctcgtcatcctggtccattattctgttgatagttagcttatggagtattgttaaggacagatgactttataaactagtaactctgggaaaataggcagattaaaatttctgatgatttgaaaggggttacactagatccatgagactctagtttcctttcacacttaatttattttattgcacactttcagaatacaagacctcatgctcagctttcagaatcagctattgcggatgcaagctaaattaaatgtggatattgaattgtaacattttccttcttatcctttcttggtaaatgtgcaaaaaggaaggatgcaattgttatttcctctgaccaacttaatatcacacactcagacgtactaatttctcgcaacgcacaccagtgcttttccaattttgattcattggatctttatcctgttatattaacttttgtattaatacttagttaactcagtgactgaatgggattttacaactacatgctaacatcttttacaaccttttcgtttcattatgttaatactatgatagtatactgtaattcctcgttgcagcatgtcaagtaaactcatgtattttcctaatgttgttcagggac

SEQ ID NO: 112546 - DNA, 878 bp, Setaria italica
  Intron number 1 from transcript Si022156m (locus Si021687m .g) derived from phytozome v7.0 (chr-ID scaffold_3; pos 17 03371 to 1704248 reverse strand)
acaggttcaggtcgttggtggctgatccggcagaggtgagcaaaatatattgcagaagaattattagtagctactatccaattttggatgaatttgtttcgtatcgtgtatcatgggtagaatttatgcaatgctgctattattgtcagttggatcatactaaattatgaaaagggttttctccttgttctatttctacttgttttttgtttggacaaacttaagtgtagttgttcatgacctgttattagcaaggacaattgtcaccagatcatcccaatctgcaaattatcagcagattcttttttttctcgaatacgcaggagagctgcgtatctttgtattaagaaggaaaagtttgagtacaacgcacgattagcgtgcaaccagaccctacaacctgagcaaacacacgctcacaatctagaagttttgattactcagaaaatagacaaccaagttcttttgctccggctgcaatccaattatcagcagattctgtaatgctagattcgaagaatctgctaggaaagttggacatttattccttttgcattccatggttcagcattagctataaaaagttctggtagaagttgtttgtgcacagattctagcatataatgatgttcggtttataaggtccacaactgagagagttggggttcacgtttcacttttacactcttatatgtttcctgatccaaaacctttgcttatactagaagctttatttcttttataccttttcttaaggaactatgtctgtgattcattaatgatgaaacttcgactgagcctttttatctcatcgaactaactgtagtaactcatcacaagcaggaaagctctgtttcaaccgttaacacaacatttga

SEQ ID NO: 112547 - DNA, 848 bp, Setaria italica
  Intron number 4 from transcript Si021531m (locus Si021531m .g) derived from phytozome v7.0 (chr-ID scaffold_3; pos 30 485885 to 30486732)
actttgtaccacgccgcattgttgcttgtgagaaggtacctcttgttcttttttatgtttggactaatccttttgtggttccttattgttatttgtgctggaggtccagtttgttggatcttagaatagtttccaatgcttactgctatttagttattctatatttaaatttagtaagagtgaaaactcaaagtgatcacaattgccatatgatggatatggttagcttgcatgagagtagatattgctgagtctagtggaaaattggtttaattaggttccaaaaattggcagccgaagctagtccatcagtttattactctgcccttaggctatgcttagacatgagttcaacgacaccaccttgtgtattgtatctggcatgttaagcattggcagatatgtaattacaaattttttagtggcgtgtaaggaattgcctatttataatatataatcctgctttgcgtaaactaaggccagtatctagaatcttataatctgtagtatgagatccgagcagggcctaaatgggttgcaatggagtcactagttcgatgacctggttcaatcaacagatatgttgcccaggatacatatcaggcctgaaatgttatttccagttgaacatcgtgaacttctatatagttaattcccagatatgtatttgaggttttaataacaaatgagctttaattgaaggcaatcttgtctttcttgctgccatgaagatgaatggaaataaaacatgtttagtttataattaaactgttattggaatatggcttatattgttttacttggcacctgcagatcctggaggaagagaaagttcatcagaaactgac

SEQ ID NO: 112548 - DNA, 548 bp, Setaria italica
  Intron number 1 from transcript Si010691m (locus Si010217m .g) derived from phytozome v7.0 (chr-ID scaffold_7; pos 20 372841 to 20373388 reverse strand)
cgtggtgcggccactgcaagcgcctcgcgcccgaggtacgagcgctgacctgcccgctagacctgccgacctgcaacttgctgctggtgctagccctgcgagatgcgatgcgaattgggatgtgctgggtgtcgggatgccgtggggttgtcgctgtggatcttgttgcctccgttagtgctattggagtggtttgattgggattccgggatcgcatgttctttgcgtggtcccatgaagcaaattagggagaagttgggagagtacagaacttactatttctttaggatatgttttcgatttttttttgaacaaggtctgttattattcagttattaaataaacagtgagatagtgtgtgacatcacagtagattagcttatggaagaaaagaaactaagtgctaatacagtatgtttgtggcccgttaatagattctcaaatgatacactttgcttacttgcacttgtattaaaaagccaggaactgccagtgagttaccttgttgtgaacttatgatattattgcctttttgttgatgcagttag

SEQ ID NO: 112549 - DNA, 353 bp, Setaria italica
  Intron number 2 from transcript Si023237m (locus Si023237m .g) derived from phytozome v7.0 (chr-ID scaffold_3; pos 14 944866 to 14945218)
cagcccatgtaagtctgcttactgtctttactaattataatgagatgtcctctgagcagcataggtattccaacctagctgggattattgtcacgcacaagggagaaaattaccccaaaaaaattgcatcatagcatactaattgtatataagatcagttgaagaacattttagttttcatatattagtttggaatgatacgaggcactatggtcctttcaacttttcagtttatcgcaaagttcaaaaataatctacttgcatgtacctctggtttgataccttgatgacgtcgcgagttgcttatcttttttatttgttgtaggcagtcttgctcatagcctcctatctcg

SEQ ID NO: 112550 - DNA, 711 bp, Setaria italica
  Intron number 3 from transcript Si015844m (locus Si015844m .g) derived from phytozome v7.0 (chr-ID scaffold_6; pos 25 566364 to 25567074 reverse strand)
ttttattgccaatttcctttacatttaaggtaataaacttattgtgcaaatcatatagttcgtgacatgttgtcatgtttttatgtgagttgctttgggacaaatgtgctcttattcatacatggtccatttcttccttttaatttgcccatcttggaaaaactaaaagctgttttgtgctattttctgaaattatttccgatttgttgctttctgttttgttacaacaatttgtgtcttttgtgtagtaataaaagaatagaattcatcagtatgatattaataacaagtattatatcaaatctctttgttgttaattgttctattaaccaattagtttcactaaccttatttatgtaactttaatgttgatgcttctgttgcttgattagttcacactataacatgttgccactattatcttttttatttcttgtttcagttctattctgatagagcactgaactttcaaacttagctaactacacctgcatgttcgttttcacttttttaacattcagacatgaaagaaaatctagaaagctccaccccctttatctggatgagtgaattagcaaatttaccatgaactgtttcatatgccagttatggaaatcagccacccctgttagattacaataagcaatccatggttctttccgcttctatttttcaggtcatcaggtgtcctccagtcgtcttgaaaagctt

SEQ ID NO: 112551 - DNA, 445 bp, Setaria italica
  Intron number 1 from transcript Si015844m (locus Si015844m .g) derived from phytozome v7.0 (chr-ID scaffold_6; pos 25 567256 to 25567700 reverse strand)
aggttagaaacttattctgccatatatatatttcatgtttaaagtgcgtctgggcctcttgtgttagttgactgttctttcaagcagtgttgcttcataactagtgtaacttttatatccgtgagactcctttcattaggaaaccccactagtttacataacatgttttgacttaaaatgtagttgaatgatgtgcccatggttcctttttctttttacaagtcataactttttacatgaatttctatttctttcataagatcatattagtgcctgttgcagtgtcctattattcatttaatttttaattattatgctaccaatctgtagaagactaaaagattatgctgttcacttagatacttttttgatctggtcgctattttctgatcgctggttgatactaacagggtattaaggtagttttccaatttgtattggctct

SEQ ID NO: 112552 - DNA, 1057 bp, Setaria italica
  Intron number 2 from transcript Si013435m (locus Si013435m .g) derived from phytozome v7.0 (chr-ID scaffold_6; pos 35 918240 to 35919296 reverse strand)
tccaagagctcaacctccacgcctccgtcctcaaggttctccttttctgccccacccacctatcaatcttctcttttacctgccgtactttcccatggaatccccgccaagcccagcgacatactatgatgacctcttccggaaactactactaacactgacgagtatgttttatttcaatattaatcaactgctctactgcaccggtatttgttttgttgttttgacaccaatttcatcttagcaataccagactctgcagtccagtcctatatgcaaccttgctactctgttattgcctgaccactcaacaattttaactgtgcacctattctacagtagtggattttgaaatctagagccaaaatgcttatcatacagttcagtatatgtataagatattcctaacaactgaatattgtctgtcctgtttgatattaacttgtgattaaattagtttccttccatcctagtttcattcctggaattttcagattcagacagttgccttgaagttgaccaaatgtttgtttttcccttttagtctttacttctttcagctgcctttgccctccaccttctgattctctgaatggatttacttgtagtcctgtcctcttgccactcagtagatttctaatagcaagctgacgctgctgaattcaaagcttgctataaatgcctgttgttatttttaagggtatttcggatgtttcaatctagaaaagggctttcgtatgtgcccactgatatttcaattgttccaaccctcttctttcattaacagttatgattccgcttgtgatttttataccaaaatagaaagaagttgaccacacacttttaacaaatcctggccatgcattcttatacaaccaaaatgcttaccagccgacatattatctcactttaggactattgctagagatatatgtatattgccctcaaagctgaattttttccaacttagaatcttcttttccaaatacaaaattggctatcctgactattcaaattttcaggagtggggagttgatcctaccaaggagatccctcc

SEQ ID NO: 112553 - DNA, 578 bp, Setaria italica
  Intron number 1 from transcript Si012187m (locus Si012187m .g) derived from phytozome v7.0 (chr-ID scaffold_7; pos 21 660616 to 21661193 reverse strand)
aagattttctatcacattatcctattcaacgtgattccaccatagacattcgataaagattacgtggtggagtgtaagttgattaagagttgtgttttgtcatagaagtattttatcatttagaaataatcaacagaacatatggttattcatttatgatgtttaatgcaatggccatttacttcttaatggtgataaataccatgatgctctatttgtatctgcattagagtggagagagattgctgatacaataattttactttgtaggggtaatgaggtaatatatgttagattcaggatgtataatataaagaatcagaagtgttatagaaaaaaactacattaacttctttctgccacactatatgtattttctttgtaccgtactatatgtagttctttctacatactacataaattggaattccatttatggttgatactagaattttctatcttctcctttgcagggtggagacatatcgtgctaaattttctaaacctgatcctgttctctttgattatgttgtgttacctcagaaattgataaacgtgctatcttgaacaatcagttg

SEQ ID NO: 112554 - DNA, 470 bp, Setaria italica
  Intron number 2 from transcript Si021116m (locus Si021116m .g) derived from phytozome v7.0 (chr-ID scaffold_3; pos 15 474743 to 15475212 reverse strand)
taacagaattgtatgatcagtacctctgtcttatctattcatagtttttgaactttcattcttcttcctggtagtctctgcttatgatattctgtagtgaactctcagtcgaagaaaaatcagtatacattctttgtctcgaaagtaccttttacagttaaatgctggctttatgagtagttcacactattatggttgaaatgctaacatgaaacctcagtttagttattcctgccggcctaagtttacaactcctagccattgctcaggtatcttttcgaaggtttttttgtttgtttgtttgacttgtcattttttaaaatttgtttatatttttatatcatcacaatattggatatggttaatctagtagctcattaaatcattactgtaaggatcaagttattcctgaagcattgtttttacttcatgcagacagttgtttaacaggaatctctcaggaagtttgg

SEQ ID NO: 112555 - DNA, 1018 bp, Setaria italica
  Intron number 3 from transcript Si022000m (locus Si021554m .g) derived from phytozome v7.0 (chr-ID scaffold_3; pos 22 17833 to 2218850 reverse strand)
gaggtcatctacaagatagaggtccccgccaacaggtcagtggaatttgttctggtcaacggaatcgatgctgcggggtatccagcaaacgaaaaccggtgaaaacttggaacatgaaaatactgagcaactacattatcgtgcaccaattaaatatgggtaattcggtttttgagacacataaaggatcaactaaaaatctctagcaaagatgctaaattgtaggtcaggtgacaccacccccctgtgacagattttgcctgtcgaatgggttggttgccgtggttgtagcagggtatacatggttatagttctattctattttgggtcctgccctccctgtgccctcatcatgccttgaattgtcacgcctgcggtgcatggtgtatttgaatgtaaccgtctaatatgtactacacaatgtgcctaattacgcaaaacgaaggcaaagagaacatgcctgaaagctgtttttgctgtatttgattgtaagcaggcatctactccatagttgattgtaagctggctggtagctaatttgtgttgcactgagatctgttctttagttcagttgtttggttcatggagagtttagtatgtatggagtactaagtaaactcattgttgtattgagctaaatatgaaccatgtttggtttttgctttatttctgctgattcattatttcttttactgatacatctaatccaagaacgttctatgaggatgtgcacatagcataatgttgagttgatttcagacttaaaataattgaacttcgttagagcatatttcattcagcttgccagtccaatatgttgcatggatggaaatttcatctattgcatagttatcggtagaatgtgtcttgtctggctcgttgatcctcgcttcattcttcagttatacttcatggaccattagcttcagctgtggatagtttttagtttcaaagcacacattgacgttttgtgcttcatgtgattaatatgatttccaatatgcagatacgatttgct

SEQ ID NO: 112556 - DNA, 786 bp, Setaria italica
  Intron number 1 from transcript Si010469m (locus Si010469m .g) derived from phytozome v7.0 (chr-ID scaffold_7; pos 15 969642 to 15970427)
cggtatgcgaaaacattcacagctactccctccgtttatctaagtatttcaagtttatgttataaaaaataaaaaaaatattgactgaattattggtaaaaaattgtaaagtttgaaacctgatgtacgtttactaatgaaaatggagggagtatctatatcgatcacaaacgctgtttcaattctagtacgtcaatacatgtgtttgcgtagaaaattaagactgatacctgttgacagttgttagcacatcaatttgtgaaccgcaagcgtacggatcagttgtagctcttctctcagagtattccccaaggtttatgaatccgtgaaacttatagcactgttattattaactttgtgtttgtaagagattcagatccaatctactaagcatatacagacagataacagatagagcaaaggtaaccgatccacctagccccttcctgggctcgttgattttcgtctttgtttggtttgacgctcgttcagtagcttatctagaaatatgtttttaggtctaatttcctgcaaaaacacgacatcctccaaatacgttgcttatgtgacaatgatcggtttattaggtgtaatcaatagtttaggtattaaattcatgttattattgaaaataaataggggtaaaagtgagtcaatagtgagcatcaacgataacaccatgtatgtacacggcttcatgtctgacaagacctagccatgcatgtttgattctatacatccttgcatgcaggctcttgctgggcgtttgctgcggtggcgtccatc

SEQ ID NO: 112557 - DNA, 767 bp, Setaria italica
  Intron number 2 from transcript Si024518m (locus Si024518m .g) derived from phytozome v7.0 (chr-ID scaffold_3; pos 39 3894 to 394660 reverse strand)
ccctattcccgtgtttgaattttctgcagatttgggtaagccttatcatcaaattactaaacagccaaactttgaatattgatcgaggaaaactttattatttcaccatgcatgtctcaccacttacgttagttagctgtgaatgaataatatataattgcagtgcctctacattgtttgcgagcctatgtaccacaattgaagcacaaccaaacgaaccaaaaatttgatcctaagatagagctgcgctgatgactatctacctgatccttattacatccctttttgatgcaaacgtgtgagtcgatgttttgacatgtgagtgccactgacaagagctgcagtgctgattcatcaacaataacacttggggtccaccggtcccactgacaagaggaagaagaggaagaggaggaataagtgttttgtttgtcccctcgctcgtcacaaccacattatatttctatcttgtctgcctttgtctttgcatatgcgttcaggccgtttgacagatgagacagcaaagcctcttgttgcgtctcatctatcaagtcaaaaccaacacacaaattaatcatattacgagttagaacacagcagggtgactgactgaccacaaaacgagacctacaaccgtttgccaaagttttggcatatttcccgtgtcctattcattacttttctcatcggaacacgtcatgtcctattcacttgtccacactagtattctagcactacaccttctctctgcacctcaaacccgcttg

SEQ ID NO: 112558 - DNA, 436 bp, Setaria italica
  Intron number 3 from transcript Si011619m (locus Si011619m .g) derived from phytozome v7.0 (chr-ID scaffold_7; pos 80 6487 to 806922 reverse strand)
cacttccatttctactacaggtaactgaatcttccgtcgcctattctttccagtcatgctatttttttggaggaaataagcaggagtatatgtcgttgcatataagtaccatggctcagtttacatgtctcgaagtcaaatttaaggatttttttacccacctgttatgagatatgggatcatgtttgtacctttatctaacttgctggaaagatttccaacagctctactatatttatttgatgatgtttatgattacctgatgcatagttgtgcacatagcttatctgtatctgtgctttccttttgtttgtattttcagttgtctctgttcacatagcttgtctgactataacaagattacctggtgaatatttgtgctacttaatgctatttggaatcctattattaattgaatctattgtaatgctgcaga

SEQ ID NO: 112559 - DNA, 884 bp, Setaria italica
  Intron number 2 from transcript Si024368m (locus Si024368m .g) derived from phytozome v7.0 (chr-ID scaffold_3; pos 12 574298 to 12575181)
actgggtaagtctatagtaaaattaatcttcgcttgcctcttgattactgtctagtgtttagccatgaaacagtaaaagtgcacttcgtagcagttaacgctaggttccatttccattattttgtttgttttatcatgtatagcctggttgttgtggatatgtattgtagcatgacttagcagccacttcaaaagtcaagtttgtggttgcaatgctatatggatgtcaggccaacatccattaccctttacacagctggaaatcatttaggcaggtgatgcaatatcaccaatcaatgcatataattagcagttactacggactgcaggatgtttctttctttgattctgggttttgtttctttcataaaaaaagattgccttgttgaaatcctgagaaaatcaggaggtttgtgtttggcatgaaggatttacatcttgccatttgactgatagctcctttgtgataactcaacattcaaaatatgggaacttgaatttacattttaaaagaaatatggcatagctttccaacgctaggattgcattaatcctaataacatggaattttcttagtccattgcgttttaagataatttcacacatttatgttccgtcctctagtatagccgttcaaaataatacttatgtttctttctcttgattccttaagtgtcactctgggacatacatggaccctgattggcaatggatttggcttaacacacatcatttttatgcaatttgcaatgatgttacatgaatttgtctttccatatgcctgccattgtgccacatatactaagacgtttttcttttgtcatcattttatttgccgggaatctccagtgtaattctctttcccatcgcaattacattctaca

SEQ ID NO: 112560 - DNA, 585 bp, Setaria italica
  Intron number 1 from transcript Si014254m (locus Si014254m .g) derived from phytozome v7.0 (chr-ID scaffold_6; pos 15 58873 to 1559457)
gacacactcacgtacatctcctctctcatgtaacaaacattgcggatttacatctaatattacaaaataatataaatataatatagaaaaaaatgttacatctaattttaaaaagttaaatttttaatatatttatgtgtgtgttgtattaattgcaaacaacattatatagtccaaatggttttgaaaagggataaacgattttgaatatatttatgtgtgtgttgtattaattgcaaacaacattatatagtccaaatggttttgaaaagggataaacgattttgaaagaaaatcgaatacaaggctttgattcaaactatttttgacaaatcacgttgccccatctcagtagggggcccccgtgtttactctttctccaaattggctccttggcaattggtaatttggcatcatgtacgctgtggaccaaactgccattgtgggtcaaaagttatgccttaaagtacagaaacagagaaggatttttatttctatagattttccgctcagagagagccagcccaaataagctgaaaaggcccaacaactcggtggaagagccgggcacgacacgacaccagg

SEQ ID NO: 112561 - DNA, 966 bp, Setaria italica
  Intron number 1 from transcript Si006518m (locus Si006518m .g) derived from phytozome v7.0 (chr-ID scaffold_4; pos 24 065857 to 24066822 reverse strand)
tacccatcccgcgacacgaatctcgcagctcgccggtcagtgcccatcctacttgttcacctcactactcttacagtcctggcgcaataacggcgcttaaatgtcgccgagatttacttctgttgtttttccaatagatagatgacacttgagtacatcgtgcattttttgtttgcccaatttttttaaaatggctgcagatgttagatcctagatctttctgtgcagaagctaatcttggtttattgggagcaaaaatgcttttgccaatgtggagtcacaaaaatgtgtttgttactcctgattattaccaatgtacatccttttaggatttccatcggtcataattcttcttttaaaacttttggccataaatatataaagaattatatagattgaaatgtattatagcttttgctagattcatcatgaaaagtacttccatataatatttaattatcactttgtgaaatgtgatattcttatagaaatcactaatcaaagtatcatcatatagactatgccaatgccctaagcaatgtgccattaatgactacaaatattggcgctactctataggagtttgcaaacagcaaagatgcatccatcagtgacattaacactttaacagggccctcatgtgggcacctttaataaccactagcttttatttcaacaaatttgtaaaatctgttaaatcataatcttacaaaatacattctgagtccaatctgcacatataattttcataagagttgctgctgtcttggctcttagtccaccttgttcacacctaattcatgagaaacaaattgtcttataacagcatactgaatgctttatctgcagtataataattggttggatcatccttgtgtgtaaatgtgaggcatatttcttttgtcaatacttaatttctgcttaaatccagagccgttgcagagtacctatcttgtgatctccctt

SEQ ID NO: 112562 - DNA, 976 bp, Setaria italica
  Intron number 2 from transcript Si023800m (locus Si023800m .g) derived from phytozome v7.0 (chr-ID scaffold_3; pos 25 571556 to 25572531 reverse strand)
aggtaagaaacaaatgagttccagttctcttctctcttcctggctgttgctctgtttccccattttctattgggatcaatcgtactagtttagactttagacacgtatggaggtacagccttactgatcaattgctagacagtggatgaacaaatgacatgtttaactactttataaagtaagttgcaggctgtcaagcagaattggagtaacttttttgttgggtttgcttctagctatgtagatttgtcgtgacgacttcatgtattactacatattcctaggttacaattgttctgacaacgtcgagtagctttgtaccattttgggtgtgattagattgaacagaaacatatcaattgtcaacatatttttgggtggtagtgtgaacttaggggatgcttggttccctgccaacgtttgcgacggcagaaagttcggcagccacaaagatttagggtgctgcttggttggttgttatgttttggcgtgccacagctagttggcagttttccgttgtatttctcgctgcagcagctccgcacttctgcagtttagtcgttgattttttccgccgcatctttggcgcagccgtacctttggtgtggctaactgcggccagcaaccaagcaccctcttaatgcctcataaggggattagagtggggatatataaattataaaattatactctgaaaaaaagtaagagtctatataactataagcaccaatttgtttgattacagaggagtgtgaaatagatcatgatgtagagttttggttaaaaaaatatcgtgatgtagaatcatgtggcagcagaatacaggtttgagtagaggatgcaatgccatctacagactaacatagcattttttgtcacatccaaatatatctaaatttactctgtactgtgattgtatttgttcttatagtgagtgatgtgatacagactgaacaaaagaagcaagctgctgcag

SEQ ID NO: 112563 - DNA, 865 bp, Setaria italica
  Intron number 3 from transcript Si013720m (locus Si013719m .g) derived from phytozome v7.0 (chr-ID scaffold_6; pos 29 693549 to 29694413)
gggttggatgtagcgcaattctcgctttcttacttcccttcccccgttggatttggtttgggtgcgatcccgtttagcggcagattatgagttcgttttctacacaggctgcaagcattcaagcgccggctgctgtgttctaaattaggttttgttttcatttgattgccgcatttactcctaggattttgaggtggcattggcaaaggcaagtttgtttgatttgcattgcccaaggttaagatggaagggagtgcttactaagttaatgattttctgtggtgatgctgcatttattacttgtctagattttgtgctcctagcgattttggagcatttatagtagcgtgctaaattggatgatttgatctgcaatcacaacctcaaaatgtgtgttatcttctttcattggaccaaattgttaacctattgttccaggatgttacatggtatgcgcttttggtcgaacttttaggatattggtaaagcatcaaagcttctgcatcttaaattgaaagtgaactagattgctggtaaagcactttgtgacttgtgagcgagcatatggtgggaagggtcactgcttgacaaaaggtcacagaaaatggcctgtccccataaagtttgtgttgcaacatgatttcactagttagttggcatgtgccaaggcaggcttgatcctgtttattgttggcagccgaaaattcagtaaattgtcaaaaggaaatgcattgaattgtatatctttcttacgtagctggcagctaaacatttcttttggaaatgttgcattatgtgctagaatatgcatctaacattaccttttctgaaacaggttcactgacaacattttcttactttttat

SEQ ID NO: 112564 - DNA, 809 bp, Setaria italica
  Intron number 1 from transcript Si010257m (locus Si010257m .g) derived from phytozome v7.0 (chr-ID scaffold_7; pos 34 144553 to 34145361)
gccgttactatttgggtagtcttggccatgctactgccttgaacgttgctcgctgtggtttagtgatgaagtgaaacataatgccaaatttgattttagtggatactatttgttgtgaaactgattattggcaagaaattacctataaaaaatcaaagttgtacaaataaataggggaagggattattacccctttaatgttatatggaaatgtatattcatcatgtgatgtgattcagtttattggtggatttgttggatccacagtagaatgagaaaagagcgcctctcatttcatcaccttgtagtttcatgttcatttggtcttcttcatggtcatggccaggagcgatgcttgcttctatttagcgaccaagtgaattacagaaaagctaatggtcacatgaattttgtctagataaggacaggatcatattattgcgtttttatctcaattgatattcatcttgaggatgctctacagagcaccccatctgccatgacttgaaaatatacaattctactatttcacaccaaaaagattctagttattatgcttttgtggaaaaaaccaagctgtaggtggttctgacctagcttgttttgattaaagtttagtacatccaaatagaccacttattgttcaattaaagcttactgcatttcctacagtgtattaactcataatacagtataaccctattatgtttcacttctttattctgatccactattattgcatttctatgtggcagagaagttaccattgtggagagcgcctctaagaacgctggccacacctcaggatc

SEQ ID NO: 112565 - DNA, 603 bp, Setaria italica
  Intron number 3 from transcript Si024570m (locus Si024570m .g) derived from phytozome v7.0 (chr-ID scaffold_3; pos 87 09654 to 8710256 reverse strand)
ccgggagcattttgcttgccgccgactgcctacaggtacttggctactttttcaggccattcatgttcgtttgagtttatacgaatttttcgttgccatgatcaaattcactaagattcttaggagtatatcggaggatgcttaaaaagacatttatcttaaaaaaatgtttctgacttaacgatgatgagctacattgagttgacttttgctggttcctttatccatgtgggcaaatattaattagaatttcaaatgctatttcagtatgctttggcttttttccttggcatatgcaatcacagctttacgatatttttaaaaggaaaaaaaagttatcacggagtcctacggttagatttgatggtgacgtaggattgggcttttgcctatccaaggggaatgtcagacagcttacatgtcatgtggaacagtggaaggataaatactttgaaggattcataaacattgtttttttcttcttggttgattgggtctgtttcttctacttttctgaaaattgaaacagtgtcacgtttctattttggaggcatcgatcgtctgaatatctcattgtaccctgcaattctgcacatgcagata

SEQ ID NO: 112566 - DNA, 807 bp, Setaria italica
  Intron number 1 from transcript Si025081m (locus Si025081m .g) derived from phytozome v7.0 (chr-ID scaffold_3; pos 14 270242 to 14271048 reverse strand)
ctgctgtcatccaccataaaggtgaactgccccttgttttgttgaagtactgtatgtcttctttcggaatgttatatgcgcaaacattccagatacacgcacacacctaaccccacaccacaattgaatgtataagttgttttatgatttttgtgggtcaaacttttttctaatttgatagtcaacatggaaagaaataagaagagtgaaaattaatcgcataaatgtatactacattactacttatcattctgaataatcattactcaaatttcaccttgcatactgcgttactatggggtgtttggttcctccccttgtcacatcgaatgtttagatactgattagatgtatattaaacgtagactatttacaaaacccattacataagtggaggctaaacggcgagacgaatctattaagcctaattagtccatgatttgacaatgtgttgctacagtaaacatttactaatgatggattaattaggcttaatagattcgtctcttcgttcagcctctatatgtgcaattagttttataactaacttatatatttagttctcctaattagcctccgaatattcgatgtgacacggactaaactttagctcgagaaaccaaacacccccatatatcctttcgatctaatggagcatatttcgtagtagtatcattctaaaggttttctaaataatgcagtgcattgtatttatttatttattttatttctactcttcctttatctaatgcacaattcattgcaactgcaggtataacaaagctgctgctggagtggaacaaggac

SEQ ID NO: 112567 - DNA, 987 bp, Setaria italica
  Intron number 1 from transcript Si010357m (locus Si010357m .g) derived from phytozome v7.0 (chr-ID scaffold_7; pos 27 870635 to 27871621 reverse strand)
gcactgccttgccgcgccgcggtcgccccgcacaggtctggtacctctgaagtctcgatcttctgccatttgttcagtttaatctgtgtattgtcaatttgtcatgcgttcggcgtgctcgaacgaccatctgaagggggtatacggaggggctgcagtatgagactatgagttgcagcgctaatctcattctttaacttgcttgcctagcccgcctgctcacttctgcaattggaaatcgtggactccactccatattctcaagaatagtcggctcattttgtttgcaaaatatcgcttgattcattgatgtgcgaatatcaattagctgcacagagatagatcaaagatgccggcaagccggatttggatggtggagaattgcataccaacgtttggcagctcttgacttggaccgtgtgtaccattgccttgttatgtgacttcaactagtaggcgatgccttgttggtagggactagaatgctttgccagtcctactagttcacgcttcctttattctagatgatgcttttctctctgtacatagttctgcgtttagtctacaatataaaaccctcctgtcacaggtacatgttattttggagttatatatgacactgtatctgaatgcaactaatttttcaaaaccccaacaaatgataattgcaagaactactttcagaaaaatctagtcgtatgtttttcatgtttcctgtctcaatttttaaagatgtgaggtagtcaaagtttcagctgtttggctgtatttgcgaccaaagagagtgcagagcttgcctaaagctttctttggtgtctctgtactactgaagatatttaataaactttgcttttctgaaggagtggcctccagtttttaattcactcatctgcaattctgcattctcctcacttccaaacacagcctctctaatacactgttacttgtgcaggactggcagagggaagtttccagtggcagccatca

SEQ ID NO: 112568 - DNA, 877 bp, Setaria italica
  Intron number 3 from transcript Si021372m (locus Si021372m .g) derived from phytozome v7.0 (chr-ID scaffold_3; pos 20 38304 to 2039180 reverse strand)
aagaaggaaaccgtagtgctcttcttcttagcaacgtgagttctcatctctgtaccgattggtcaattggtgaattgccacttttgtcccttgctacttgttccacgacccacctgcctcttgttgaagctcaaagtgaagtgcatggattggtagattgcggatttcgtcttttgtgccttaatcccactgatgataatccacctgtcgtttgctatcgagctcaaactgtgtggatgggttgcctgcgccatttgtcgcttgcggcttaattccataacacctgcgctatgttgtaaagctcaagtgaactgtatggattggtgaattgtgctgcgtcttgtgtctcagttccataacccacctgccttattttgtaaagctcaaatactgtatagattggctaagcaacttttgttggttactccttaattaggaacccacctgccttttctgttataaagttcaaataaactgctggtccagtccttgtacttggtgtattacaaaacatgtctgaggtcccaaagatttttttatgctttataacattgggatagtctatgtgcctttgatcctccactgatgacatgatagtttattgatacaggcattcatttctgtccgaattggaattgcgaagcaatttcttctgtggagattcagctccatttatcttgtcccagttctaatgaactgtttgattttgtcatataaaacattattttcaataacgagaaagtaattaagttgggcaaagtacttctccaccatttatgaaaagcaacattgtttgttatgagttatgcagtttacctcttttagttttgctctttcatctacattttgtggctaattatattcatcttgtgcagat

SEQ ID NO: 112569 - DNA, 1056 bp, Setaria italica
  Intron number 1 from transcript Si006824m (locus Si006824m .g) derived from phytozome v7.0 (chr-ID scaffold_4; pos 38 463396 to 38464451)
ccggagcacgacaagttcctcgaggccctgcagctgtgagtgcccccctccgattctgccctcttccgtcccttagctctggttgctggacgaattggtggcggtttcacgtaggttttgctgtttcgcctgttgggttgggtcgaattcgatgaggagggttcagttgaatctgtagatggtcccccagtcttggttggagcacatttgggtccgtgcatccatttcccggaggttgtctggtttcttgtgctaaattttggtggagggactggtggcagtgcgtttagttggatatatagcgtgcttattatctttatcaaattgattgatatatgttgttctaagactgtattcaggtataacagtgggatggcgggatgttgtctgatttttgttttatcaaaaaatttgcgagttggcatggattgttgcttagtctagttagctaatggagtgtgggaaggttgcttgttacttgttgatctgtgtggcattgcagttatgttaacaaggcaccttggttgcttgacagcattttaataaggctgctgaggacatcaattttctatattttggatcacattgttttaatcttttttctgtaatgcttagttgccatcttgcggtaattaaagacaagcattttatgcctatggcaacggtttctgctgaacttttaagctacatattatcagcatgattggatccttagacaaggttaggagggagaaagcatatttattccatgattgtgaaattttttggtaaggttttctgtcctctagcaaggataggcaagattagttgaagaaatcaaacaaagctagtgtatttgaatatttatacccttttcctgtgattgtttataattatgggctgtaagaaatgctactgtgaattaatagtacttgggaatgctttgtgcgagaactaggattattggacctacatttatcaaatttaattctggattattggacctacatttatcaaatttaattcgttcttttctttgctgtagttttgatcgtgattggaaaaagattgaagcat

SEQ ID NO: 112570 - DNA, 690 bp, Setaria italica
  Intron number 1 from transcript Si023707m (locus Si023707m .g) derived from phytozome v7.0 (chr-ID scaffold_3; pos 24 80886 to 2481575)
acacgcaattgtttacagggtacaacttggacatgcaattcttgaaaaaagtatatgggatttcttattaaaaacctttttcacggtcaacctattaccaacattagctttgcactgtcaatctatgtaacacttttatacatagcggtggtcaaaggcaaaaggatttgactgatggaaatatgaaacaacttatatatttgcagcaagggaaaataacacatattgatatcaagttataagatgtagtaaacagtactagctgaagacctgaagttatgtttcgaatatagaaaaaactaaacaaaggagaaacaaagggaaactataaataacgagcactaaaattcattccaaaataatcgatcgtcctgctagacactgctagttttagcatctctcgctcaaaccaaacattaaatcacctcctagtttagccgacgcaataatcgatccatgctaaagttaagcatcgcgcttgccaaactaacccactcaatttcaagcagtaatcaaatcgagacagcgactggacactatagataaccgccccccttgagcagagtttgcacaactcatccaagaagcatcgatcgatcgaaagaagctcaggctaagccagctgctaccgacaatggcggcggccgggcacaagagcaacgcgacgacgacgacgccggccgccacggc

SEQ ID NO: 112571 - DNA, 826 bp, Setaria italica
  Intron number 1 from transcript Si023775m (locus Si023775m .g) derived from phytozome v7.0 (chr-ID scaffold_3; pos 18 790651 to 18791476 reverse strand)
tccgctccgagcgcgagctccgcggcaagctccatgtaggtttcgtctcccttcgtggtttcctctagctgtggtaggctctgttctcttatgggcgtggaggcgcttctggtccagaagctccttcgttggggtagctgttagtgaagaagtaaaaatgtagtaactagtaattcttccgggtaggaaatatgtatacggaatattgggattgtgatttattggcaaattgtaggcactgagacatcataagattttactttttaagaaccttttctgagaaaattttgcttcctcttatgttggacgcatatactcttgcacaggttcataccagtatactaacatctctgaaacactgcacactttgatgctatctattttctcttgatgaaagtatgcagcataaactatcattatagacgtcatcagtataaacacctttggatctcgtagttagaagagtcagcaatcgtcctatgtaatttggaaatattaacaacatgtaacatataatcacaaatcatactgacttcgacactataataagtgggttgcttaacaatacatccctcaactggttgtccataagacatttgatcttgtgtttccatttcttttgtgctatctttcataaaacttagcagctcatatctgcttgtgtgattattacgttttgtctggtaccggcatgattgctcgactgattcattgtgaatgtttgtaatggttatgtaatgatacaccctggttttcttttgctattgcatgcatcttatttttcttggttctaagtttctttttatgcttccaccaatccaggcat

SEQ ID NO: 112572 - DNA, 640 bp, Setaria italica
  Intron number 2 from transcript Si021437m (locus Si021436m .g) derived from phytozome v7.0 (chr-ID scaffold_3; pos 50 332275 to 50332914 reverse strand)
agcgtctttgaggaatctcagtttggttgaacaaggtattactgaaaattgactagtgctctctcaagactctaacaaattattcgtgcaattctacttttcttaatggatactgtggtttccatggagacagggttatatccagccgtgttttaaaaatattgtagtccaatcatttgattttggtttctttgtgatgcgcaattgttcatctcggtataacaaatggaattcacaagcatatattcttgtttatcatgatagcgggcagtgcacaaagccgagtactttcttgatccaatctaaaagtggaagaggaccacctgtgcggctctttgcatttcagttcatattatcccacttctctagcaaaatttgcatgagcttctatttgatatctcacttgtgaccggcctctaagtatgttgttttggtaaaccttttgcgtgcaaagtttctgttgcagtcattatttctatttcacggaactgctttgctaacatcttgctgctctacttcatgaaacttgggtgccttttgatactgcaataaagaataaacctttataaatcttgaattatgtttaggcttcttacctgacccacttctcttcattcaactgcaggcgagctgtaagtga

SEQ ID NO: 112573 - DNA, 940 bp, Setaria italica
  Intron number 1 from transcript Si021437m (locus Si021436m .g) derived from phytozome v7.0 (chr-ID scaffold_3; pos 50 332922 to 50333861 reverse strand)
agaggagcacaacccgccctcaggtcgacttccctcccattttcttattgcctctcgtaccatctgcacctcctccttcctgctgcggcagcagcaaagaattgcttggtctctgcatgtatgtctagctcttctttgcttcggttggccgatgaaaatttctctgaattctggtgctcttgctgttttcggttcccgggctgctcttgctttcttggattactagagttggtagggtgtgctgctgtttattctgtctgaatttggagaaaaaatcgagctcctttcgttgtttgccggttttggtcggatacggatgataagctggtgttgggttttcttgtagaagcgaaagctccccaagagaaaagatgttcctttttgaccttgaggtgacatgcgctcatcaaagttcttccctttcttgctctactaactactacagatgctcgtcttttattcgattcactactcatggtctcgttccttcgaatttgtgtttgttacctcctcttttcgaactgacaaccgactcattctttgagtatcttggctaataatttgagcttgtttagcctttggaattggatttgcgacataatcctacgaagtttctctttcttctttcgatgccaagctcttaaagctctgttccttttatcccttttgtgctgcgtgttcgagttactgcaccacaagtgttctttctgcaaaggaaatattacgtgttttgatcagaactaactgtttcttttattctgtactacaagctgtaacagcaaagtttttgccttggagttttctcctggtttcacctcttttatgtcgtaaatattagtctctacaaagatttttctatcctaactgtggtctaggatgctaagcagttttatctcttcttccagattgatcaaaaaagcttgttcgtattggtagtcca

SEQ ID NO: 112574 - DNA, 929 bp, Setaria italica
  Intron number 2 from transcript Si023173m (locus Si023165m .g) derived from phytozome v7.0 (chr-ID scaffold_3; pos 26 680820 to 26681748)
ttggtgttcttttggtacgtctctgctgattgctggtaggtatcgagtggacttacacatacgcattaagatgcaatgtcacccctatgctagaaaggtcaatcttggtttagggtaactgcctttgctctaaattctaaaacgaaaaaggaaaagaatggactggtatgtagcaaatcaggatttgcaggatctaacctgtgacactgtcaagcattagtgctcaaaatttatcctaatttcatctgaagagagaatgcatcactccgtgaagcatgactgtcaagtgtcaactacactggttgtttcatttgtttcctgagtaattgcagtattgtccaaaagaaagcagagaatcaggaatacgatgctgatcattcggcggataaattcttatccgaatttttttgaatatgtaggatatctcggcactatattttctacttatttagaactagttattaggttttagacgaaaaatctgcacataacggaaaatgaacgaggtgaaaactgttggataattttatctggaagaaaattattttttctccaactacgtaggagagctgcgtgtaatttcgttaagatagaaagagagtaaaaaagattagggacatcccctaaactcagtacaaagacaacactgacaccaacacaacaccaacactaacaccacactagattaaaacacaggcgtgccacataaatatcatccctgaccaagatcaccacgcctaagaggcagatgaaagagacctagcgagcagctcagctaggttgaagtggaagaaagttattttcactgtttttatgcgtatcattttttataagcattatctgttggtgtagttagcaaagactcaccaatgacatggtgtatgcaatgatgtactgaatttttactatttattggttttgcagacaaa

SEQ ID NO: 112575 - DNA, 811 bp, Setaria italica
  Intron number 1 from transcript Si021796m (locus Si021614m .g) derived from phytozome v7.0 (chr-ID scaffold_3; pos 20 164680 to 20165490)
ccgtcccgctccagtccccgctaccgcccgtagaggtgaggcccccttctgctaccgccttggatcgcggggatttggggcattagtgccgatggcctggtcttggatttggctcctgtgccgattgctgtgcctctgcgggtgaccggtgacggtgtgcttcaacgagcaggaagaaggctgtggattttccggtggtttagtggctttgtgcgggttgtggggataggatgacttgctcgtggtggttttgaggatgcgtgaatttgcagttggatttgatgagatatggatggggatgcgtgaaatcatggtttaagtggagtttggcgcatgctaattgcgctcgtgtctggttaatgtggaactcccaatttattgtggcagattggatctgtaattataggccgtggtgttgaatttttgggaaaaaatggtcgttttgtttgctgcctcatagcaatttagtttaccctctctgctttcagtaaatttggtttggattgagtggctgtttgcctttgaatttggtttcctcacgttgttaatcatgcatgggccagtatgtgattttcggtgaagtattttcgaacccaagattatctaatttagggagacgctggtgtctgattcaagctagttgtttgttggatgctgcttagccacacatttttcttctgattgtgatcttttggtgttaactgcctccctttgttttcaactatagaagtattggatacaaggaacaaccatagtcgagaatgatgaactacaatattgattatatgtaaattttctgctgcaggaaata

SEQ ID NO: 112576 - DNA, 508 bp, Setaria italica
  Intron number 4 from transcript Si011385m (locus Si011385m .g) derived from phytozome v7.0 (chr-ID scaffold_7; pos 13 376495 to 13377002)
gagaggctgttttcttccaggtttttttcttcttattttgccttgtctcattttcatggccttcatttccatgtgatgctatctgaatgacttgatcaataaaacagtatgccaaaatactgcaatttgttaatgttactgttggatgttgcatccctctttgtttttttgccatttctatctcttgctgagttctgcatctacatccctgacatcaacatgttttaagcgacaagtctgcattcagatcccaagaaaatggggccttatgatattttttgtgctagaataattgtgcagtaatgctacgaaatgccattagagcatatcactcattcctgtttctgtatctgtcagaactagtgcatctgaagttgagcggcatctgtatttattaatagtcacaagatatgaatgaatgcattgatcctgcttgaatgttttgagaaaagtttaaaccctttgctatttttatcatttgcaggctacagcaagaggggaggagggg

SEQ ID NO: 112577 - DNA, 605 bp, Setaria italica
  Intron number 1 from transcript Si012338m (locus Si012338m .g) derived from phytozome v7.0 (chr-ID scaffold_7; pos 33 968276 to 33968880 reverse strand)
gaaaatcgaagtaagtgttcaacatttcacatccatcatctgtcattcttatcttaaaaactatcactaagtacacttattttcaactccttacagctgagataataaatacggatgcaagtggttttatggaatcggaaagtgagttgctcttctcattctctttttctgcactgagaattttgtaagtgactattcagaaggtattagcagagttttttttttaatctgagcagcacgagctatgatcgatgaaaaatgttcatgtcactctctgacagtccatatgataagtcttaaaaaaacaatggagatttcatgattctcactccattcagaagtagttcaaaatgggccagtcaaaaggatcgtttatgcatccaaaatgtgattatgctaaactattgcaatactgcatactaatgatctgtagaaaaaacaaatgactcatctacaacatagtcattattatgtacccctttcatgctttgcattattgcatatttcagtgatttgagcattagaatagctccctgctttgtaataaaaacctattaagtacgagttaaggctttacaattcaccttttactttatattcataat

SEQ ID NO: 112578 - DNA, 962 bp, Setaria italica
  Intron number 1 from transcript Si025671m (locus Si025671m .g) derived from phytozome v7.0 (chr-ID scaffold_3; pos 46 922278 to 46923239)
cttggtatgctcttcttgctcactatgtacttgtcaaaatgattcaccggaggtttgatgatatctcacggtgatgtatacttgcaacaggctactcatttaatttgttgattttatttgcagaaaaacagcaattctccactcatagtacatgcaattccttgctcttttattctcaaactatcttttcatgagtgagtcactggctcaatgctgttatatatatgtggatcattaaattcatatgcctgatttgacacggcatgctaagaagtcacttatttagctaaaaaagcaatagatcatctgaatgttaaattagattctgtatgtgtggaagcaccagaatcgtagaagaaaataatgcagtttcaggcgttataatggcttttctcatcctttatacttccttcaatagataacagtaaattctgaacttttgatttatgctacaaacttgaaagtagcaagatttaccatttgagtgaactctgcaaatcttaattttgatcatctgccagtttgcatcccttaactatactggagccacataaaaagcacacttgaagtaagttgctgtataaaatttacaggcaaataggcaatgcatttcacatttaacgttattctccactgaaagtaaaatattacatagccagtacaatttgtggaaaggaaaatcctacctttgcttttgcttggaagatagaaatctgaagcatttaccatgttgtctgtttcctactaaagcaagtgacaccaatcttgttacttcgtaattttatccagtttaacgtgtgggataaggaatcctaaaaaaaacatgtgggataaggtgaaccatttatttttctttgcttgacgacactgacattttggctctcaattcaccaccattgctgatgtatcgatctttcacccatacaggttgcaaatagcttgccggcaaaggcaatagcttt

SEQ ID NO: 112579 - DNA, 1053 bp, Setaria italica
  Intron number 1 from transcript Si014587m (locus Si014587m .g) derived from phytozome v7.0 (chr-ID scaffold_6; pos 67 14511 to 6715563 reverse strand)
cgaggtcgccgccgccatcgaccgcctcaacggaggtgggtgaaaaatctctgctgctccctctcgccttccccgcgacaatcccttccactcgctccctgatgctactgcggtcacgtgaatggccgtgttgcttagggttctgaaacttctgatgcgtagcatttttgcctcattaatgctaggttaggttcatattgtagtgttaattcaaaactgaagatttaatgggatctaaatggcataccgaatgggttatgtgttctgtatttgtatctgggtacactttgccactttgggatcttaaccatgcacaaggcgaagtcaaaattttgagttcgttgccacggcaattgagtcaaaatctctcttgtgcaatattaaatctctcttgtgcaatattttttatgtttttacatgcgtgtattgaggtgtatatgaacctcatttgaatcatcccgtgtaaactataaactacttccttctttcctttatgtatggggtattaggatttcaaaaggtctcgactctcgaaagtaaactttgaccattaatttctctccagtatattatcaatgtaaacttgttggtaaatatcatattaaaatgctaataagccttaaattgagaaaaggagggagtatgttgtaaacatatgatcgcagtagttaatagttgctttatttaatgccagccaaatccaattattgctagagactgagagttaatgaattgatttgtaaattctagcagttaaaaatatgccatcaataaatcgagcaactcagggtttgggccagcttgtactagaaataataaagttcaagacaatcttggagctatacttttacctgtctattccttggagtgctcttttttgcactttctactttctactttgaacccccccccccccccccccctgattgttcaatttttttttcatatatcaatggactagacaatttttttgctgaacaatatgtatgtgtacccagaaactgcatggaactgagcctaatgtttttgcagaattggacagactattagaga

SEQ ID NO: 112580 - DNA, 727 bp, Setaria italica
  Intron number 2 from transcript Si021051m (locus Si021051m .g) derived from phytozome v7.0 (chr-ID scaffold_3; pos 46 565864 to 46566590 reverse strand)
taacaaggtatgggatacaaatttgaagtaactttgtgcttttcttaccagttttaggtttgaattttggaattttagaaaattaagctttgagctgctgggatatttttattagcaatatttgatataattatgtttgtagtgctatcctttgcttaagtacactccactcttcaatcattctgtaaagttcttccaatacagagctgaagatgcaaattccatgaatctgggctcactgtatggttaacttgtctgataacaaatgggcctggcatgaatttcttctggactagactcctattttactgtatctagtgcttagacaagcatgccaaggcagattttcaaggctctgtgattatattggtacctcgtatacttagttagaaagagattaagtagattcttgtgttgtaactggcaacttctttgttttgtatgtgtattcacattcatatcccatagcatcaaagtgactatgttcagtacatggtgctgatgcctaaaaaaattaaaacttacctgtttatgttgtaccatcaagttgttgaaataggtcaagcaaaatgatcagcagtctcatttatggtatgacctgcattatgttcgtgtgttcagtgttgaccatgctttatcttgttatttccatactgctgctatggaaaagttaccgatataacttgtggaaactgatgtttaaccatcaatgcttaaggtgttcatc

SEQ ID NO: 112581 - DNA, 781 bp, Setaria italica
  Intron number 1 from transcript Si010393m (locus Si010393m .g) derived from phytozome v7.0 (chr-ID scaffold_7; pos 21 057263 to 21058043 reverse strand)
ccttgtgaaactggaaggttcaggttttcgcacaggttagttggacgacttatattctcctagagtttcagtagactcagatgactttgtatgtcaatttcttttctttcttctaatcttcaaaatttctcatgtattagctgtgttattcacctgctaattcctcagttctgctatggagattgattttcttcagtttataaaatattttgtttccatctacttgtcacttgcactggaattcactgggagaaattacatgtgtatgatgtatgtctgtagaggctattcttgtatggttagagtatatgtcctgaatcataattattcttcctttctgctgcatggtccctgactttgaggcaaacaatgtttggtttcatggagtcatggtaattcttgtggaactatgatgatattaaacaagcaggatattgcttaaaattgtatgaatattgatgctaatgtgggaattttaaaacgattgaacttacactgtttcggaatggataataatgtagaacctgtgttaactaaatgctggtgtgaaatctgtttctttatgagcaataattcagtctaaatcaggtataaacaaccatgttctccacatacggatcctataggattatgaaaactctgagaaggccctatttcaagcctttgattacctgcactgcacttggcgctgttaatatcatgccacagaactatgtgacatcttttatgttttaatcttgacacagaattgtgctggcacctttaacaagaaacagatcat

SEQ ID NO: 112582 - DNA, 591 bp, Setaria italica
  Intron number 2 from transcript Si023714m (locus Si023436m .g) derived from phytozome v7.0 (chr-ID scaffold_3; pos 16 81145 to 1681735)
gggcatcgtcatatctcgtatggaaacaatctttcctgtggaccattacatgcttctaagtggtttatgatgcgcattgctctttgtaatgcttgttaccttggcatcaaggctgggttgtcctagtggatctttactatgtgatatctcatacaatggacctgagcaattaggtactacctccaagtaattctggctggagataggactatgttccatagtgtatacactacattaagagacaaaaactgaagtttattttgatttttagtttcattttgcactgaggttcacctggttagttttttcttcttaatttaacaggggaggcatggtcttcttttttatattaccctttattgaagtacatagtaatggtgcgtgtacagtaaggaaacggagaatacctgtttgggcttgaatagttgaatgcatttacatatggcaaacaagccctctgcaccataggtttttctttttcagttggaacctagggaaaaaatatctttccaggattgtttcgttcttttgaactaagtctgctgtgtacacacagaagttgctggcctaaattttggctttcaattattc

SEQ ID NO: 112583 - DNA, 756 bp, Setaria italica
  Intron number 2 from transcript Si010311m (locus Si010311m .g) derived from phytozome v7.0 (chr-ID scaffold_7; pos 14 031392 to 14032147)
gtcgactgcgatcacgaggtatccacaagagactgctcctcgtcgaatagctatcgttaatcaactagtgaaatttcactttgaattctagctctcactcttgttctcttggactaaaaggatgatgcaagaatattcctttgggttatcttgttgccttctgctgggatgtcattttctgggtttcctctgttctggttggtgggggggaaacagaaggtcctcaacacagaaagtaggaaattatgaagaaaattgataaagataattttttttactatagaggactatcagaaagttgcgatttgtttacgcaccaaattgttagcttggatcttatccatttagtggttgtataaagtcaactacatgtggttggccattggccgcaagaaacttctcctaggttgcaacttgcaagtccaaggcaccagcagcatcaagcatcttctaatgtcttgtttcagttgttctaacagttcacttcttatgaatggaagtgtgtaatttttcaagggtttgaaaacttgctaattcttggtctgttttttttggaccatccaacaggtctgatagtattgtaattttaagctatgtacttgcaacttttagatgattcagagaaataatttcaagcgacaaaaaactaggaaactgttggccttcttagcttttatcccctgctggctcgcatatctgatttctgtgctctgttgctgtcttgaatttgcagtgtgatccgtcagaaccacgctc

SEQ ID NO: 112584 - DNA, 435 bp, Setaria italica
  Intron number 1 from transcript Si012776m (locus Si012776m .g) derived from phytozome v7.0 (chr-ID scaffold_7; pos 30 596113 to 30596547 reverse strand)
caagtaagggaaagaaatgtgaaattagtagtgttcttgtcttaacacagaaataataaactcagtaatatatgtttgctaaaaaaatgctttctgtgaagtacagcatctttgattaggcaatctcccaaaaaaaggtagaaatggcataagaaacttgagtagaaatactactgtattcataaattagtgttggtgttgtgtatcgtcacaattttaggttgtctgatccaattctcgcgataccaagttaacagttctgtgatatttatgcctgttctcagtgttgattcgccggtcaaggttctgtctatctgatgtcagtttattgattcctgccctgaaattttctgcatcttatgaatccttttaacaccttctgtgctgatttgcgctgaaggttttgtcctgaagttcacattggagcaacgggtc

SEQ ID NO: 112585 - DNA, 897 bp, Setaria italica
  Intron number 2 from transcript Si021787m (locus Si021787m .g) derived from phytozome v7.0 (chr-ID scaffold_3; pos 14 973227 to 14974123)
caactaatcgagaaaagcagcaaaggatcctgcaagtaagtcattattgtagctaacctctggacataatgctgttatattatttgagtttggtggtgttaggaactctccagtgattcatattttgatgtattcaccttttgagcatttctacaaccttctctgacaatatggaacacgttggctcagttgtagtgggaatgggagttcaatcaatttctctaaaaaacactttccattttctaacaaaaccagaatcatttggcatcactagtcacacgtcatattcatggatgcgatgtaatttagacttacattcactgctgcctcaatagactatcttctatatgctcttccaacctaaattacatttagaagatgagattacctagtaggaactaggtaatttaggcatagctctgaaccttctgtcatctggtttggagcaactgtgcacagcatggtaacagatctgtcaatcagtgctgaattgtcttcttctggtagctatcggcacctgaattttaatttgtcctgtttcgatggctaagttttcttgaggcaaatgggacttgctttttcctgggtgtaaaatatttctcctgagtacaaactgaccgttccaatccaattgctcagaaaaaaaaacaaaacgtaagtcgagtccaagaggttagacaaaactgcgtcaaaatcttcttaaaatggaacagagttaaacaaaaaaaaaagaatatctttaaataagatgggttcttggttgtttgcttgcttcatcaaagaaggtatcaattattaaatattccttacatttaattgggatgtcttgctctaatgttgtgcgtttaccaatttttttcagggagagtttagttttcaggatcacacgtggaaaac

SEQ ID NO: 112586 - DNA, 649 bp, Setaria italica
  Intron number 2 from transcript Si021486m (locus Si021486m .g) derived from phytozome v7.0 (chr-ID scaffold_3; pos 50 14822 to 5015470)
cgtgtacccgccgccgcatcagccgccgtacaagggtgagtttagatctctctcgtacacctcccgtgcctgcctgcctgtcgcagtgtcgctgtctagatccagatctggtgtgcaggtggcgtgagtagtaactagtactctcgttgctgtcggtttcaattcttgtcttcctggcaattcgggtggcggtgaatcttacgtcgcggcatgaacatgggtgttaggtgtgtgggtgcccgattcttcacgtaggtcttgttgacatgtgcaaagtggggtgaaaagtgttattaatttcactaagaatagaaactattttcaatttcaagagaattggacctggatttcattcatactcactaatccttaattgtgatggtgaagtcttagttgcttacgacatggtgtgcttttcttattgttcaacaacaaactttcctgtgattacattatctggtagccgttgatggatgccatgcatgctgtctaaatcaaatgacatattatattcgcttttagctattgcctgtttgttttgttcggaaaagaaagtaggagcagctcggtaagaatataattatgttctttaccagatggagacataatttatctcacatgatgtttcatcttactgcagaggatccat

SEQ ID NO: 112587 - DNA, 357 bp, Setaria italica
  Intron number 1 from transcript Si023720m (locus Si023526m .g) derived from phytozome v7.0 (chr-ID scaffold_3; pos 12 948616 to 12948972)
cttgaaaaagaacctctttgatcaggcatgtgttctattcttctcaagcattgtggttgagaaaataatgtgtttcctgtttgtttaagaagtactgcagtaatcctaccaatatatcccgtgcacaataggaccaattcacttttgaggctatgcaactcaacttctcaattctttgtctataattatttgtgctattttcagttcagcattgggcaagcagtagaaaacggtgttttctgcaagatcattttgcagtcatttcatattagttgacagaaagaaagctaatcagaacctaaaacacaatgttgaattaagtctgttttttgatattgtaatgacaggggtacttgg

SEQ ID NO: 112588 - DNA, 419 bp, Setaria italica
  Intron number 1 from transcript Si011063m (locus Si011063m .g) derived from phytozome v7.0 (chr-ID scaffold_7; pos 19 093063 to 19093481)
ggacgagtgggtggtccattccataggcacaaccggtggcaaagtccctctaatttagcctagcaaatttaaggatcgggcttcacgagggtcgagctataatagtatataattttgaactaaaaataaataaggctaagttggataataatatatgattttgaactaaaaatatataaaaatatatagagttgagttgtattgtgaaggaggcatgagggccatgatctattaccacccctagtcaattcataggcttcttggcggaggaaaaggtaatgctactcttcctttctttctggacaattaacttgcatcatttgaattaccaaagtttctgtctgaatccatgtgttcatggattgcgttgtttgcccctcgcagtggcggacattctgctgtggaaggacaggaactta

SEQ ID NO: 112589 - DNA, 865 bp, Setaria italica
  Intron number 4 from transcript Si025711m (locus Si025711m .g) derived from phytozome v7.0 (chr-ID scaffold_3; pos 67 53287 to 6754151)
aaatgtgagtgctgaacaaggaacaggaactgctttcttaagttctactcttactatgaagtgcttttgatacatgtagatgagtagatcttggcactacaatcctggttacacattacacaagtaaactaagttcttgtatatagttccgatcttgaaaggcacccttctttcttgctgtacttgcttgtgcaaactggtttacatgccaatggtcatgactacatctgttgtaccagttaatttgattgtgtaagactacctatcttcacgtctgctagtgacaggatttggttgacctgtcatgcgtgatgtgctcatgcatgatggcagttttgtgttgaactagtttcctgcaacttcaatgttgtctctatataggtttgtccatatgcacaatattgaagataaacttccttaataatgataattcttactaagtaccttttttagatctgaaagcatatgttagggtagcccacaaagagataaggtggacattcttgtatgtagttcctgtctgaaagactcatcccttttttctatcatacagttattttttgtgcaaacttgtttccaaactttttatgtctgtttgttcttaattttctgtgctcgttcagtggacctgtcatgcttgatggtgttgctagcattttcatattgaactcattctcgcaacttccacgttttctctattcgttttgtccatatgctcaaagtttcagatacactttcttcactaggaattgatgacaagtcttgccattttttgtagtgaaggtctatgctagtgtaatccacaaagagatattactgagacgtgcttatctggtttatctttgttctttcagatcggaactat

SEQ ID NO: 112590 - DNA, 654 bp, Setaria italica
  Intron number 3 from transcript Si010859m (locus Si010859m .g) derived from phytozome v7.0 (chr-ID scaffold_7; pos 25 939262 to 25939915 reverse strand)
gcagctgcccaaaagcgcggcgtccgggaacagaagtgagtgcctcgtcggttctcccattttcctcttcatagttttagtgcactagcaatagagaaacgatcgagttagtcgagagaggagagctccacaggctgagggctgcacatagttgacagttcttgtgagcacgcctgcaagcatgtagcttgattcctcttgtctctcgagactttgagcagtctttttttagcccactatttttcttcatagaggattatatttgagaggtcaagagcgagatgaatagtttgcacgtcagccaaatagtgccttctgtatgtgtgattcttttcacagtacgttcacggtaggctcttcccaatcccagagttcaaaattattataatatgcacagtgcgaaaaaaaatagaccagaaataaagtgttgaaatatgcaagtgctaaacacaggagatccaacagtgatctttagggatcgataacaacatacgtacagaacgttggccagtttgcccacatgttatctgacactatttgatgtagttttctcagtctttgcaaaataggtttgttcatcatctgttctactgttgactcgtgtgcgcgttttctgcagctgcagagaagcggcaaagagttccttcggcatac

SEQ ID NO: 112591 - DNA, 889 bp, Setaria italica
  Intron number 6 from transcript Si011083m (locus Si011083m .g) derived from phytozome v7.0 (chr-ID scaffold_7; pos 35 419558 to 35420446)
caattggctcagtaaggatacagcatgctccataattttattacctattcatttattttccagtcttttatctattgttgcatcataattatggaaatgccttctctatggaagcagctgcacgtttgtcagccacattaattaatttggaacggaatgactcatatcagtatatcactaggctatgagcagtagattcaaaataactgtaccacgggcatccatcagatctgataattaatcttttaacccatctgtatttgttagcacagtaacatttcttctgcgtaaatggctttttctactgtgtgcccatccccacttttgaagacataataaacacattcagtccagctgacaagctattttctgtctgcctgcttatggatgaatcgcaatattgttatgttcataagagagagaaattgttattaactgaagataaatgtgggccatctagaatgatcatgtttgcaaataatggaaactaatgatatcaaattggttcgcttgtcaattcacaaaagaaaagaattgtgaaacattttgatgctaaatagtcctttctgaagtaatagggaacatcaatgtagcatttttcgtcttgttctgtcttgtgagaccgaaaagacatggttacatgagatcgacacaatttccctttggaaaaggttcaaaatgatgcgcatcaactcaactgcaagttgcaaacttttagttgtggaggagctttatcaatattgatctaacaagtattgttattcgtcttacatgtgcatcgtcagattgtttaatggttttgcaattaaggtgtctctaaatttttttacgttcaaaaaaatctctgaatttttctgtttgagcagggaacttgaggtgggttcactcg

SEQ ID NO: 112592 - DNA, 625 bp, Setaria italica
  Intron number 2 from transcript Si009991m (locus Si009991m .g) derived from phytozome v7.0 (chr-ID scaffold_7; pos 11 581568 to 11582192)
accgagctcaaggagaaattcaagaggatatgtgcgtatgcaacactactagttctcttcctatactcccagacgtcttccgataactgaactggtttgctagccataatcgcatgcgtcatgctaaacatgctttcctagtttgcacgtcatgctaaacatgcttcgatcatcatgcatgttcacgtcctgtgctgaaccaacctggtaaatggcggccaccagaatggtttggtttttgttttgagtgggtaggtagtaacgaagtttaaaggtgacagagggacctccaggacggaccaagtaacgaatttagcaatttcattgacaaagctcgacccctttttctaacttttcctctattagtcgattattcctttatattctctccacggtaagttttattgtccagcagattggaccggtcactgtcttcaaatccttgcatagttgcatatatgggccccaattctagtttttcaaaggctaaaaaacttactgataatgcatgtattcatctcggataataatgtcatttgcaaacatttaatctgtactatgcaatcctttaaaaaaatttgaatttcaaacgtcatgagtgtgggtgggtgcaggccgcaagtcg

SEQ ID NO: 112593 - DNA, 672 bp, Setaria italica
  Intron number 2 from transcript Si012807m (locus Si012897m .g) derived from phytozome v7.0 (chr-ID scaffold_7; pos 28 214593 to 28215264 reverse strand)
ttatcgggtggcttttcattggaggcagtggtgaggtcattgaactcctcagtccccttcccctttcctcgatgtcacagctcgatctttcattgttctgcatacacgtgtgtggttcagtggacaattcgattggtcagaaagtcagaaccatatctacatagtcgatttgagttgctccctgagattctgcatcatgggtcggtgccggagcttgtattgtgaatttgtgatccagattattggattcttgtttctgtaacctgtaaatgtcaattgagcttgatagaatatttggtttgagtttctatttttctaagtctgaactaattgatgaaaaccagatgttctacgatgctgctagtgttataatacaacctatatgttttcttagacatgaatacactctcgctagtccaattgcaatcctccaatgaaatctcccagtaatgtaggaattataattgttctatattagtgtagaagaaacagacaactcttgccttgccttgtttgtttgttttgttgttttttatcttgcaagtgaatcttcggttcatggatgctgttgccattcgttgatctcgcgaatgacttattaaattctcaaactcatttctcttctgtatgcctgcagattgaagccttagggtcgaggtaagaggccaagag

SEQ ID NO: 112594 - DNA, 899 bp, Setaria italica
  Intron number 2 from transcript Si012081m (locus Si012081m .g) derived from phytozome v7.0 (chr-ID scaffold_7; pos 25 891169 to 25892067)
gggtgctcggctttcaacagacaagtggttactctgtaagagctataaactgatcgctctcagttgagccccatgattttttcttcttttttgtagcaatcttttatgaaggttgtacgattctaatcaaaattttaagcttctcgtgtgtccgtcatcagtgttttatgagtcgtagctgtggcctctactgtctgcttgtccaaatagcatagttgagatggaaaacaaagctgctaaccatacgcgaaatgtgttttttagagcttgttgaaacggataactaagggttgtccattgttgttgaaattaaacagtaggttgaggtagaaccgtagatgcctctcggcaccaacggcaggacagaatgatgcatgttctttcacagtaaaaagtggataaagtttctgacacgcgataaggcgcctagctgtggaagctatgattgaactttatctattactttttactcgtgtcttcagttgactcaacgaaggattcacaaaatttctccctagaaaaaaaatcatgcacatgtttttgagtatgtggattttgtggtccctcctgaagccatattgttctggagagcaatccctcaagccaattaaatttcccatttttgtgctgaaagaaaaacaattaaagactagtgttatttctccaaatttagattctgaatgtttttttaaaaatgtagattgtgattttttttaaaaaatagattgtgaatgtggttgtttgaacaaaaaagtattagaccatttgtttccctctctgttgatgaatgtgttgttctttcttttttttaaaaaatgaccgtgttcatctcataataatatgtctgttacctgtactgtctagagagttgtcgaattcatctctgcaaggattcttgg

SEQ ID NO: 112595 - DNA, 829 bp, Setaria italica
  Intron number 1 from transcript Si013460m (locus Si013460m .g) derived from phytozome v7.0 (chr-ID scaffold_6; pos 21 556758 to 21557586 reverse strand)
cgggaccgattcgcccgcatctccgaggccctcgcgtgagtacaaccccgcccaccagaggctggctctggctttgcccccttctccctgtcagttggttgctgctgattctaggatcactgtatttgtttttagtccaatttctggggttctgttgctgtgtagtgtggtgttcgaccggagcagctctgcagattgacaggaaaatgtagactggaaacagaaaacggaacgctgatactggcacatcccaaacttaacaattaacacgctcgactcttaaaagaatggttcataattagcaagatggatacatggatattttaaaatactagttttcaggatctaggcaacagacaactaggaatactcgttcaagattttagttacattctgaattccatgctgttcagcacacccatctcatggatatttgccgccctgcagcatttatgcattcgatgctttttttttcaatggttcaacactaaacaaattaatgtagtgcacatttaataacagttgaaatgtttggaagataatatcatcaatacatcacagggttattctaaagacagtagtatgtctatatacgatttgtgtctttgtacaagttaatcgaatgcaccatgttatgtttgagttaattctggagcactggctttaggacttgctacatacctcttttgaaatatgaagcagaataactgttagttcgttggtgcttatttaagtaaccgatatctattactgttctatatgagtatatgactaactattgctttcctgctcaggcatccttctcgttattcttgtattcgtgtcaata

SEQ ID NO: 112596 - DNA, 723 bp, Setaria italica
  Intron number 1 from transcript Si022911m (locus Si022911m .g) derived from phytozome v7.0 (chr-ID scaffold_3; pos 25 302328 to 25303050)
gtgctgataggttagcaatactacaattcctattaatttgaactaccaaagctaacggttaaatcattttcttgcattgtcctaagtatactctaacaatttattcattgaattaaagagacattatatatattacattgtatgtagctgtcaatatattgataaaggaaagcttacacccctgttttttaaaaacaacaccctagagagaatgaaattgcaacaagagtataagacctgtaaggtcatcttccaaagcgacatgatcactcccttaaattagttacacaagagaaatgacgtattgttagattttttttacgttattccaaggtgctatgcaattatttttgagcgggcaaaatattcatactactacaaattactccctctgttccaaattgcaggtcgttttgatttttataaatttatagatattattatgcatctagatctggtatctagatgcataacaatatctatgaatgtagaaaagtcaaaacaaccaatggaacggagagagtatatttgtggctaaaattaatttgcgtccgcattttctcgcttattacttgacgtaaacaaaccaaacaccggctattaccgccaacgaagccatctgcaagaaaccgacgctgttttccaatccgcgtgctcggcacgcagcacacccccatctctctggtagtgggtcccaccctcgcctccccttggcgcacaaaa

SEQ ID NO: 112597 - DNA, 672 bp, Setaria italica
  Intron number 1 from transcript Si013736m (locus Si013736m .g) derived from phytozome v7.0 (chr-ID scaffold_6; pos 28 39205 to 2839876)
actacatctacgggtgcttcgcggccacgggggaggtacgcgcttctcggtccctgcgtcggaaatcggaatctgccgcgtgccgcccgtggcttgcttcgattcgtttgatttggaacccttgatacttgtttttccatactcctattgggtgcaggtgccaatagctttgcctatcgttgtaggattattagagtctgatgcaatatgagagggattgtgaattcagatttcatgctatataactgtgaattcttagggtttgagtatgatgttattggtgtttattgcggatttagaatttctgcccatgtatgtatctgactgatggtatatggcactaaccgcgtgtagcataaaaaaaatctgaattcacagaaattgaagagaactgtttccgtagaagcattgatgcttgtttccatggttagttaaaacgaaactgtaccggtgctgtgatcatcatgtttgcaattttgcattgcattactattttaatgggatggttgattgattcaagaatgtttgtgttaccaccatacaaagtgattatcggcttattgttgtatttttcacaccgttatttggcttctgtccataggagtatgctgatcttctgtttgtcttgaatttataggtacaatctgtgaagcttatccgtgacaagcatac

SEQ ID NO: 112598 - DNA, 507 bp, Setaria italica
  Intron number 1 from transcript Si014157m (locus Si014157m .g) derived from phytozome v7.0 (chr-ID scaffold_6; pos 19 301628 to 19302134 reverse strand)
tggcggcggcggcggagccctgcgcttcgatcaaggtggggtttctggtctccgtgcgaggctcgtctgcggcgcgagtctcttatcggaatttggtcttggaaggtgctggatgtgtagagcgatttagaaatagtgggtcttgtagctccgtctctggacgccgggagttggtgattgcccattgattttattctctttctgagagattagggtttagagcgattcacttggaccgaagattttgatgtgtgtgttttttggggggtttgggggggggggttggctcaataccccgtgggaagagattggggatacttgctagggtttatacgcataaaggaatgttttaatctatgccatcttagacatgtatagcacctctgggcatattcattatatgaacaccaagcttcgtttattttgtttttcttgttttctaatgtaaccttactaagttatttacaagcaggtcattcctttgttaaatcagccagcacgttactc

SEQ ID NO: 112599 - DNA, 666 bp, Setaria italica
  Intron number 1 from transcript Si009264m (locus Si009264m .g) derived from phytozome v7.0 (chr-ID scaffold_7; pos 22 537356 to 22538021 reverse strand)
agaagtacaacaaaacaaaccatttgaactcccaggtattgtcttttaacttgctctacagtttgtttttcactcttaaattcattaccgtgcttactgactgggatgatgtaatcatgcaccgttattccatggagtgcatactcattatttcccaggcctcttagactgcagttcataacgtttggacatatgtggctatatcttttataaacttgctacatattatgtctcgttttaactccacgtgtcaaaagatttgtaagaacagagattagacttgaatttgctgttgttaactcccaaatggatttgcaagattatggaattcattacttaattactactaaaccctttgtttcattgaagataacagtggctatggcattttactgaaaaacactttcaggtcttggaggcaatatcctttaaaatttaattttggtgaactgagttgagttctgtacgagttaatttacatttgatattagtttaaagatgccacgtttttaggtggatgtgaagatatttcttgttttgttaggtgtaaaatgttacttgattgcatatgataatagtttgttcttccgtcgatctcattgaattgttttttattctgcacctttgatttattgttgtgagatatgtaggttccagcatactcac

SEQ ID NO: 112600 - DNA, 456 bp, Setaria italica
  Intron number 1 from transcript Si012869m (locus Si012936m .g) derived from phytozome v7.0 (chr-ID scaffold_7; pos 57 83559 to 5784014)
ccaccgtagcctcgagtccacatcaccttcgtcaggtatctatgctaccctacctaccgctgctaactgccttctcccaatccgctgcattttttatttaaatgtgagctcctctgtctttgttaaaggatgaatagtccaggattgagttcactttgcgtgaaatgcatcacaagtatccatattgtttttcctgtaagaatggtctctgaatactcagttgatgttctttgatttttgggaggattgaagttgtcatgtttgattaactcactgttaaatttttaagtaatttcatacaatgatggttaattagataatatatgttcctttgtctttatttttcgtggaagagtgcctcactgtggtgttgtgaattttccagtgtttctgccatgaattttctgtgtccacagtattgatgagttcttattcttatggtctacgtatgcaggg

SEQ ID NO: 112601 - DNA, 886 bp, Setaria italica
  Intron number 1 from transcript Si014423m (locus Si014423m .g) derived from phytozome v7.0 (chr-ID scaffold_6; pos 75 10644 to 7511529)
tccctgcgctcgctgacggcgacgtcgcgggagaagtatgggcagcagttgaggaacttgctccagttgcttctggccggcaatggcagcgggatgtcccggagtcttgggttatccgagagcacgtcgcagaggatcggaggatgccccgccacagatcgacccagcctaccgtgcctttctcgcctccgatggcgatcgtcttcgatgtcacgtggtacatctttcccttttttttagggttgagagggatggaacgaacggtaattttaacaccatgagccatgctattattgagcaccactctcatcttctatgttttttttcacccgtgcccatcttatttctttgcccgcattgttgccgatcccctttgcaggatgcaaatcgatgtttgccattgacatgtttccgttgttgcatattgatggttgccattgcttgtttgtctgtttcaacaatggatggagacatggagttaccgtcaatgtcatatatggttgcttcattacttgttttgcttgttgttttgatgttcgaagaatataactatagaagaacttggatttgtgatttgtgaacttgtaatatttgttatgtccctctactacttgaacttgttatctacagtgctacacgcttgagcttgatgcttgttgtatttgaattgtgaactactgatcttgattgcttcaaacaaacatttgctggttgcgtgttgctgctggagtgatggttgaatttactatttggttctggcttgcaccgatgggttcctaaaaattgtgcatgcgaactttcttgccaatagtaatacattgaggatccaaatgtaaattctctcacttaagccagaagcatcccaagaccctaatccgtccccctc

SEQ ID NO: 112602 - DNA, 722 bp, Setaria italica
  Intron number 1 from transcript Si020668m (locus Si020668m .g) derived from phytozome v7.0 (chr-ID scaffold_10; pos 2 80889 to 281610 reverse strand)
acaaagttaaggtaattacgctttcacatagtcgaattacgtccattttttctgaaagatagcaattagcataaacatgctgcactatcaaatttcactcttttttggccaatattctacagcatcatattattcttgtttgttgcatatgttggctatgcatgcacacagtattctttttttttcttggtatgtttacggaaccatgtgagaatggtaggaatatgagtaatttgcaaacaatgattattaaagttgtaatgattattgtacttaacaaataatttcagagatgtgtgtagtctttaaagagtgcaaaacttttgtctttttagtcagctaatgctatacttcatccatgttttaggcatctcttgaaagcttataaaacttgaaatcacttcctcagaaaaatgcaactcagtgttccactaacgtttgggactaggtgccacttggtggttcctgaataaggcagtttgatttgttgatgtgaatgttaagggtaaaagcgaatgggtatagtctagggtttcccttaacagtaaatattgtctgtatcttgttggaataaaggacttatctgtcttctaattgcatcactacttattacaaggaatatgcatgatcatttggtgattatttcgattcacagttaatgtatttcaataaaagatacattgagctatttctacttggcttttgtcttcagatagctttgc

SEQ ID NO: 112603 - DNA, 529 bp, Setaria italica
  Intron number 2 from transcript Si009501m (locus Si009501m .g) derived from phytozome v7.0 (chr-ID scaffold_7; pos 10 805637 to 10806165)
gcagtgatagcagagaaggtatgaaaaaggcatgacttatgtcttatgacgtttactagttatgaacattagtagttacctgacatgcctgcaataagatgtgcaaatgttctatgtgtctctttgcactgttccaaataatgtgttgaattgttcttcttatttcatcaaaatgctcccttccatgtttcagtggaaatattctacataacaaagtaaaggctatgtcattttaatcaagaatgcacaaaatgaaaaaatatcaaattcgcaaaaaaacttgacattttggtacatgcagaaaacaagcataagtgagaaaaatttggaagaaagatatgaaatcatagttacttctgaacatgaggctggaaaatttggaaatggttcagctaaggaaagtttgcatgtacgattgaacaaatactctttggcacatagtttactactttggaaaactagaaagaaaaaacaatggacattaaagtcctgtgacactgttttcagcaggtacctcctttcctgttga

SEQ ID NO: 112604 - DNA, 878 bp, Setaria italica
  Intron number 2 from transcript Si021421m (locus Si021421m .g) derived from phytozome v7.0 (chr-ID scaffold_3; pos 91 56357 to 9157234)
gaggtcttcggccccgtcacgcccggacaggtgcgcgcgcgcgctaaattctctgctcgccgcctgctgttttgctttcgcttcgttaacgtcagtagttactgagatctagccgagcttagttcgttggtttgctttgctctcgggagtagctgcgccgtgtgcgagtgcaatttgaatttgagttccagcacgaccgaatttggcgagattgttcgaaatttcccagttcgtgtacatgggggcggttctgaagtacaagcagcagcgggctcctgtgtgtggagtagttgcagttttaatgccatggtttaaggtagctccaaggttccatttccagccttccagggataatttagtgcccactaactaaaccgtgctccggcacatgagtccccgtacctaacaagtttggtgggtggacttctgctacttggaggtttcgtagcattgaagttgtctgctgattatgacttgcacgaagcataattcgtgttctgtggttgtggttttgaatgggtccaacgaagaaacttgattttcatcttatgctccttctaatatttttattgttagtcataatggttggcgtttcagcttgaccatggaaggaacttttactaatgtttgaatcactatatatgtggagttgagctgtgatatcgaaaagcaagggggaagtaatttctctgctgaaaaccactaggacagatttgtcatcatatcaaatccattacgctaggatataggcattgatgctttcttttaagaactaactggtagctatgtttattcgggatggtatcatggacttatggcactcaatgttttgctttctctcaggtgtcatttttgctaggtctattccctgtcctcat

SEQ ID NO: 112605 - DNA, 905 bp, Setaria italica
  Intron number 1 from transcript Si015811m (locus Si015811m .g) derived from phytozome v7.0 (chr-ID scaffold_6; pos 28 488547 to 28489451 reverse strand)
gttgtaccggtaagtgcgtgtgtaaagaagaggagggatggtgaaccgcgctataacagctcatcagagactaggtttttctctaaggaaccagctctgatgagtgacgagttcatttgctatttgggatttttgtggtatactgttgcaatatataggttctttcattggagtctggatttattgaaaaaattttacaggattaggttatgctttgaacatggactcagggagggtcctctagctaggaaattcttatttgaacagtttccaatccccttcggttttttttttcactacaaccacaagcatgcaggtttctcctgttcacgctaagaaatttatccaaggttctttttgccatcatgtagtcatatgtcgacaatatcccagattctagaaagtagcacgtctgttacgttgtgacggtctctaaccaaaccttggtaatattggttttatacattttattttgtccattttttattgttttgtcggtaagctagttaggcatgaactgtaccagtttataaagcaattcatcaacttcatttcaaaatatttttcaagagcatttctaactttatgtcaagttttacaccgtccactctagtctctacttcctccgttccaaattataagtcatttcaactttcttggaaagtcaaaccatattatgtttaactaaaattatagagaggatcacaaaaatttatggcaccgaatagatatactatgaaaatatatttaatgaagaaactaatggtactggtacttatttggtatcatgaatattagtactttattgtataaatttgatcaaacttgagatgcttaatttgggacggagggagtacttcctaattggggaacactcacaactcaccgtttctgtacagatatca

SEQ ID NO: 112606 - DNA, 403 bp, Setaria italica
  Intron number 2 from transcript Si011845m (locus Si011845m .g) derived from phytozome v7.0 (chr-ID scaffold_7; pos 21 213531 to 21213933)
caatagttgattgcaccagaaaaatagtagcccaggtatgccatccacaccattatagttacctactcttacttcagcttttgtagtaaattaccttggcagacattctttttgttgacaccgaatttgattaaggcatacataaactaatccaggtcatgattaacaagaattattccatgacagcagaaaaaacaaagtatattctagacatctacagtcacggttcatgtagggctaagaaaagtgtttaatcatctcaaatgatattgctaccctgttatgtaaatgcacatgcacttgtttaaatgaaagtgtagaagtgtatgatcaacattgcattcgtgccaccaacatttgagcatcaaggattgagatctaacacatggtatctgttctgcag

SEQ ID NO: 112607 - DNA, 761 bp, Setaria italica
  Intron number 1 from transcript Si021454m (locus Si021454m .g) derived from phytozome v7.0 (chr-ID scaffold_3; pos 47 207883 to 47208643 reverse strand)
gatccttcctcctcgacccagaggccaaggagccggtaagctttcctacctgcgttcctctcatttctccccatgaagcctgtgcaatctgatcgaaccgatcagcctggtaatggcatggagcttctcttcccttctcttctctgttcaatcactctttcctaatcctaacttgtctggagtagtggtgtgtatttttcagccaattttttcttgcattccacggttttttacagccatcacctgttttcttgaatccttacatctttgtctgcctgatctcctctgaagacacaccccaagtttctcacacattttgtttttttaataaaaaaaccacactcgcgttctttttctcaaatttgagtaaaccttttcgtttccctccacacaaaagttcagaatacaaatcaaattgtttgcttctcggttcaagagaacaacgtttgcaatccttcttccacacacacacaaaaaaaaaactgttttttgcagccttttactccttcccagtcatgcggtttttattttctccactgcaacctgaacaagattccaattccagcctcactagcgcctgctcccacgccgccgtgccggccgccctgcaccccccatcccccatttccccggcgattattccattcccgctgtcccctcacctctcacccccaggatgccaccgcttgctctgactccgtctccccgatccgatccaacttgcaggagccctcggattcctgggtcggccatcgcgtgct

SEQ ID NO: 112608 - DNA, 628 bp, Setaria italica
  Intron number 1 from transcript Si023854m (locus Si023854m .g) derived from phytozome v7.0 (chr-ID scaffold_3; pos 28 508338 to 28508965)
gtattggtactacgctgattccctactctatgcaacagaagatgactctagttatgtatttcgtttttctaactatgcaaacacatttttattgtttagaaggcttcaatggttcttcttacttatgagatatttgtggtttatgtgaaagagattaataaaagatgggacgagatatttggctgaaatgaaaaaaaaatagtaaagcctagaacgctgatgtcactgtgataactatcttaattataatcctgatgataatacatggtagtgtctttagctactactccctccgtcccaaattactatttgttttggcttttctagatacaaaacttttgctatgtatctagacatagtatttatctaggcatatatcaaaagctatgtatctagaaaagccaaaatgaatagtaatttgggacagagggaatgctaaaagagaaatgtttcatactactattgaaatagaagtgctggataatgattcatgtttcttgaaccaaagaagcaacgtcatctgtaatttcaactaggattgtacagcctttgtaatggtttagtagttaatcgattttttcataattccttaagagaaagatttgatgttggcaggacattggatttc

SEQ ID NO: 112609 - DNA, 993 bp, Setaria italica
  Intron number 1 from transcript Si023178m (locus Si023178m .g) derived from phytozome v7.0 (chr-ID scaffold_3; pos 50 537301 to 50538293)
ccacaccttcaacttcctcgtcaccgacggatacggtatactatgccttctctgctctgctacatgcttaatcttgatctgttttgctctgcttaagttccaatctcaaattctactctgttccattccagtagaatacaccgtttctttcctgctagattgagttgaaaattaaatatagtataatacaccgctatcatgtacttatatattaggatatcctttggattattagctatgcctcttgtttatcctttggactctgtctactatggctgcctgtgcaaccactctgctggtttataccatactataatataacaaattctttcggttggattgtaaacttcaattagagaactagctgctggctgtatcctgatgatcatacgagtgcttttgctgcactttctggatcaataggttgtagtagtttagcttacaccgatattcagagtcgcagttgctccaattcagaagaaacattcagtcagaatcatcagcactcagaagaggagtttgaattggtctgttcttggagacttttgatcctggcgtactaggatttccttagcaatatatatgtataaattctcccaatttgacaataatctattgctctctgatgccaatcttgtccactgttatattccttgtctccatgccaagttacccccctagtcccgtcatacatacaatacatttttttcgaaacgaaccggacagtagagttgccgattatattaaaaataagaaggtctagactggatgcttacaaagcaccaataggtgcaaagaagataaaaaaaaactaattacaaccctttgtagggaatgtattaacagtgttcatacatacaatacattatctgctactgaaagcacaagtgtgtgattattgcaacacaaaagcaatagcatccaactgacttgactgaagcatcgaaatgaatcgcagcatactgcgttgttgcgaccgaatcagctggacgg

SEQ ID NO: 112610 - DNA, 957 bp, Setaria italica
  Intron number 1 from transcript Si010416m (locus Si010416m .g) derived from phytozome v7.0 (chr-ID scaffold_7; pos 32 051699 to 32052655 reverse strand)
gaccgcgccgccctcgtcgagttctacgcgccgttcgcccctctctctctctcacaccctttattgtaaccgcgccggatccgaacctgataaatccgtagcaagtcgggaattgagttgaccagtctgggatcgggctgccgttgcttctgcgggagccaggaagcctgggatccttcttctacgcgtgtttgtgttcctcgtggctaagtagcaggctacgagttgtagcagtcacggatccttgttgccgaatggaatcctgaaagtttgcctactatatatggccgaatgttacattacactgagaaagtgtgggatctgatcctcgcagctaacaagttcgtgttgttttattgcattcctcattggttgtagtatgcgtggtgatttgaattatttctagttgctcatgagagtggtgaggttttactgttcagagagtcttgtaggaagaaaagggacaaatacgtaacagtttggtgtgctggtgatcttatttgctgccagttcatgaagcatggtatattttgacgttcattgcattaaatgaataaaccatccactcgaaggtgatcttaaactgtcaagtattttgataaatgtgctgagtgtcacgaagcatagtcagagctcaggatgctgtagttccatcatgccttggtattgctttaggaactctactgtgtgaattccattttctgagaaaagcttccagcaagtgatagtgttgtcaatcagattgactgtttcaatttatctgaagtataggagagtataccttaatttttagaatcatcacttcattcaaatctcgtctgctttcgagattgctcacatatctacaaacttttctctgaacatctgtattttaatgatcttattgtctgattctgtttgtctaatgattgtcgtattgttttaggtgtggccactgcaagaagcttgcccccgagt

SEQ ID NO: 112611 - DNA, 692 bp, Setaria italica
  Intron number 1 from transcript Si010894m (locus Si010894m .g) derived from phytozome v7.0 (chr-ID scaffold_7; pos 35 870884 to 35871575 reverse strand)
ccctcgagaagaagggcgtcctcgccaagattagggttcgttcgtccttccccatttcccccgtcccttccttgatccgctgccacggatctagcttgccctccccctccgctttggggatctacgcctccgcttccgcgatttcgttcccaaaatccgcacacccttttttttcttactttccaaattctagtgtgcacattttgagcgccttgacgctgctggttgggaatgctcgcacattgctgaagaaaaatttcgtcgcttaatattctgttggtccagttggcaaatccagttaggaggaaatgtgtcatgttactaggaaacttcttttttctggctcctctgttgtgacgactgcgcccacattactccatggtggtgggtttgattctaatggtgcgatgtcagcaaatcttggtttccagctgtaggcaattacagttcctctagaagtttgaaaagaacaaactttcagttttctcatgaaaacctcaaattatttggtgtttattcagttaataaatatatgtcatgcatagagaaatatgattactgatgaaaaaagttgttatatgttgaagcacattgtgcttaatcaaatccacatatttttcactagtttcctcatggtattccttgctgggtgactaggctgagctaagagcaagtgtgtttgaggccataga

SEQ ID NO: 112612 - DNA, 1047 bp, Setaria italica
  Intron number 2 from transcript Si021021m (locus Si021021m .g) derived from phytozome v7.0 (chr-ID scaffold_3; pos 49 166545 to 49167591)
cacgccgccctcgtcggctgggagcgccgggatccgtacgccccccttcaacctgaacttgtattgtttcagatgatttcatggattgtttagggtgctactttgtagtttcttcagagctagagtttgaagcagatagaaagggagcactagggaacgactttgattgttaatcttgctttggagtaggagcagaggaaactgatttcgggataaattgttttagtgcagatactagagcaggttgtgtctatagtgtttcagtttctcattctaaggtgggatccggtgtattggctattgggtgggcttgcacattttggcgggattaggttaaaaacaaaaaactgactgggaattgaactgctacctgatttggagagtaatcattagtgggatgtctagatgctatattgttacgtaacttacgtgtgcaggctgttacatgggggccacgtatggtgcttttctatgattttaagtgccaaacttagttcatgaacaataacactctagtactttcttgttgcagtttcgtatcaaaatagaaatttattacagttgtaggacattcttgtgtttagaataagtatgacgttagttgttccctttaatgccctattttgttgccagtttttttgctttagcatgatgattgtgtgctaaaagcaatattcaatgctccatagtggaatgcttatatgaaattatgatgtggtcagacattacggtggtctattaaacaccctaggataggtttgaagcagttattaactagatgaactgtactgctttgaaaggttaacctgaaatgaaatcagatgtcttcaaggttctctgaggcgtaacgttagggttacaccttttgttgtaccaagcaccatttatttcactcaaaaaccaaattggaaattgtgcaggaccttagctagtatcgaaatagaattttaactccttttgatgtgaaagttgagaaagtcttaccagttaccataaccttccttgatcacaggtcttgctggtgccactgcagacgtccactgttat

SEQ ID NO: 112613 - DNA, 901 bp, Setaria italica
  Intron number 2 from transcript Si011580m (locus Si011580m .g) derived from phytozome v7.0 (chr-ID scaffold_7; pos 34 793473 to 34794373 reverse strand)
gggttctctagaaaccactagctgaattctccttggtaagaacaaacttcctaattcctctatttcgtatttttattcattctgccacatgcaagaaacacgttctgtgaaataattaaactataatatcttccttgttagcatataggccattctcccgattccgtgtacagtctgtgcaagtgctcattgcaatcgccatttcttttacgtagagaaaggttccccgattggcctattgtatcttgttattatttgaggtctgttttggaccacgcaaatatcctcattttttaattgataaactcccaattcagtttgcaatttgtgtgaagaaagttgcattgaactattgaagtttttctgtatcagtaggtcttgttggatgatgttccctcaaacatatcatctgtttttccgcaagaacaaatgagaatgatagatgccatgagtagtcttctgaaatatgcacatgctgaatcgccatcatattgcacaaccatccatgaactgaatcgtttgtgtacagttctgcaaatttggttgtttgagctgctatacatattacacactttctgcttcactataggactacatttctcctcttcttgttggtcattggctcagcaccagctgtccctttcctcatcatcgccacaaactctgaataatctatccttccatcctgcatgcgcaaaaataaatcttagtcttaactgaaaacatatacaatcagtagaggaacaattaatcatgacaatttaatcatttgatctactggattctatttctgtatagtcccccctttgtaacactgatgatgctgtagtttctattgtttattataccaactaaatttacataatatttgttccttacattgtcagagtcggcatctgag

SEQ ID NO: 112614 - DNA, 735 bp, Setaria italica
  Intron number 1 from transcript Si011580m (locus Si011580m .g) derived from phytozome v7.0 (chr-ID scaffold_7; pos 34 794380 to 34795114 reverse strand)
acttcgtctgcctccacccctactgggaacgaagggtactgccgtacactacttgtcctcctccaccttccttgggcccttccgatcgcagaggtcagggatttagcctttaatcctcctcctttactactgctctagcagcaatattgacactctggctgagcaatgctggctgccgcgcctttaattgcaagcactcgctgatcgctgttgtttggagtgtgcgcgtcggctgtttgcagaaatgcctatgtggccagggagacgcgggttgctgggtttttcctttgatcaggactgcatcacctcgcggttcttaattgcaagccaataacgtgcgtgttcttttaaatggatttgtgttttgggtgccctgtttcctgctgcatgtttgtgcagagactgttttttgtagaaacgcttggatggggtaaaaatgacagtaactacagtctgcacgttgctgtgaaattttagctccatagattttaaggattatatttcaggagttcttgcaatattgtatcagaataatgcctttgggtggagaacttttttttatccatgtgttcttttcttgatttgatatacgcatttatgagaagttatacaaagtctaacatggtaacactgatacactaaatcaagttccagtttttttatccatgtatatcatgtaactttatgtccaacttgatagagagaacgtcgccaaagggaacgtgaagctctgca

SEQ ID NO: 112615 - DNA, 608 bp, Setaria italica
  Intron number 2 from transcript Si013209m (locus Si013209m .g) derived from phytozome v7.0 (chr-ID scaffold_6; pos 34 406104 to 34406711 reverse strand)
atcacctcctatcagaataccgtatcctttctgtttgtgcatcttgcgtcaatgctattaagtgtacacttaaccatctgcttttccgtccgccttatcattttgatgacttgtactttgtaaaccatattgactgtctgtttccttattaccttcttcttccactaatatcgtttattaatgacataatttatttttctgaactgtaaggttggggtgatttgctgacttgcagaatcagaatatttgcttgtaagttggttaataggttatttaatgccatatcaagtgcattctcagctgaaatacatgcaaccctacgcagagttgaaaatacatgcaaccctatgcagaatgcttgatactatgcagagactgtggtagattattggctttaatcaattggtggttggatttgtcatttcgtaaaggaactttccctaatataaatttctgctgaaagttttgatttgtttaaacttttttttttcattttcctacttgtttgcttttcaaatgctttgttggatcatttaccttcctatgtgtttatttctctccatccaaattctgtcacctgtatccttgacagcaacaagatttggaag

SEQ ID NO: 112616 - DNA, 801 bp, Setaria italica
  Intron number 1 from transcript Si025629m (locus Si025629m .g) derived from phytozome v7.0 (chr-ID scaffold_3; pos 25 011762 to 25012562)
tttcacaaatatagaaaagctatctagtggttgtggtgagtggtgacatcctgacaacttttcctttgtgtcattactgggtttgttctgcgtgtgatatggtttagctcactgaacttcctttcatccgtccatatcatatgaacataatcaagccggtgattaggtttatagaatggtcatatcctacctttagtccctatcatattaacacaatcaagctggtgattgatagatttgcttggcatcatcaccttccatgtgatcatatcaacctctttaaagctttgcaggcacacctatgctttggtcttttgatttgtgttgcacttgcataggcactaatgaattatccagcttgatgggtggcaattattgtactcctaaacagtcattgttcagcataaatacataataatgtagcatatcaagcctcagttctggtctcgctcctgttaccagagaccatcatgaactttgcatgttcaggctcctctgtaaaagtacttagcatcgatttgtagggggaggggaaatgtccctacagtagtgcttttgttaaagaagattgtgccgatttagctgttgccaggggagatgccagccgctcaaaatcccttttgtttccttcttggtgttgtgtgattcatacttcatagttgcatgattgctcgttgaatcttgagtgaacagtagctttcttatgacagatgagaaaactagttccatgacccgaccgagttatgaaggaaataaattgatgcagctgggatactgcatatttgtgggtaccagcagcgg

SEQ ID NO: 112617 - DNA, 780 bp, Setaria italica
  Intron number 3 from transcript Si012354m (locus Si012354m .g) derived from phytozome v7.0 (chr-ID scaffold_7; pos 30 597796 to 30598575)
gaaagaactcttcagcagctaatcgactcgtcaaggtaactaatccccatcagactcccgcttttaaggtttctcgcgattcaatgtccaaacctttcagtcgagttataacgcttcgccggatttgattggtgaaaattgttgagaacctgaaaattgttgggaaccagtcggggtttgcgctttaggcatctgatgatatgatctctcggttttgtagatcgatctaaattattgtgtagagttactgcgaaatttgtgaatgttctattatattgtgagtagattcagatttgtttagctcgtctatcatgattcttttttgtttagcagaacattacgattatttgcagtgtgtttcatatgagattgagatgtctatcgatgagctccattgctgattttttatctacagtctttttttgattagtcttggccttagttagttcactagttgtgacagctcctaaattcatgtttatatcttctgttcatactgtacctggacatgtatgattagtgctgagctttgtcctagttgcaatttattaatctggaatgctggagttgggttcttctgttgtggttgtgtatttcattcataggcgagtcttctatgtagctcatgtgtctctcttatttctttcttttttttttgttgctattgctagtttgggaacagcttctctgcttttaacttagtctacaataattatactgacccatgtcgattcagatgtgagcttgtgacattaattgtacacctcatgccttctgcag

SEQ ID NO: 112618 - DNA, 606 bp, Setaria italica
  Intron number 1 from transcript Si024604m (locus Si024604m .g) derived from phytozome v7.0 (chr-ID scaffold_3; pos 42 434726 to 42435331)
gctgccaaggtcaatttccttccttctttacttgctgagttcatctacttcaataccagctttcattatatttgttttttttcctaatattcagtttcttaaactgctcaaagttttagcaaaacgatgctaattcagtagctaataccctaaaactataaaagaaaattaaagggattgatagatggctagataattttattccccaatttatgtcttaatcgaattttatttagataattcagtaaaacatattaatatgtgactgcagttttggttgaagtaactctaacacccaatgatggtaccttctttttctaattttatatgccccaacggatttcttttccattggttaggatgtaagggtcccagtgtgtcttcatggtcaagcaaccatcatattgttttcaaataaaaattgcaaatagcatgtaattgttctcaggccaaaaaatcaaattgatgatctcaagttagttgtaagtagggttatcaaattataattaatgatgttcctctgtaaagcatgtctaacttttgggaatgaaattttccataggaaatgaaataatttcttttggttttgccttttgccagatataa

SEQ ID NO: 112619 - DNA, 385 bp, Setaria italica
  Intron number 1 from transcript Si011200m (locus Si011200m .g) derived from phytozome v7.0 (chr-ID scaffold_7; pos 32 878080 to 32878464 reverse strand)
cccggccttctccatctccagattcttctccacaggtatggtatggtatgtagctgccctctctacgtcagcaagtagatgtcaatattctgtgtctcttatgggaaacaaacatttggttctgcaataatgtattgttgtttctttgcattcttgcattgtgacatgcttgtctttattttttttttgttcgtatgcttgtgtatggaccggttcaattcggccgtcctgagtgcatgctttccctgtcgcgtcacaacaaaaaaactagctcttacaaaagacagagtagcaacttgttctgatggaagttggtctctgagaatgctgaatgctgcaaccaaaacccacggtcatgtttgatatatgatgtgttgtgcagttc

SEQ ID NO: 112620 - DNA, 655 bp, Setaria italica
  Intron number 1 from transcript Si024842m (locus Si024842m .g) derived from phytozome v7.0 (chr-ID scaffold_3; pos 49 684879 to 49685533 reverse strand)
atcggagaactccgaaaattcctcggaaacaagaggtatgcattgattagtagccacttatattaatgctcttagctagatgacaagcatatcacatcaaattaatagtttatctttttctatgccacaccacttgtgtgtgattgccattggaagcttacattgtatagagttatgaaaatgtttctgtttccttatgaatttttagttgagcacaactttcacaaattggaggcttcaacatgagcaccaagcggttgttattccttaactatatcgtagccatagactattccaatgtagtctttgatatgctatctattggatgtagacatttaaagttactccctgatatgctatctatcattatactaaaacaattgaactttaaggaatgagactctattgtagataaaactctcctgtgtttataaagataatgtttactttataaactacaatatttacatcaagatcataaatatagagtagattctagataataaaatacattacattagtaaattttccctatcatttttaagattttattctatactttgtcactcttcttttcttttatacatgctcaacggtttatcaactctgggtattgatttgtactgtcatgttgccaggtacttcatcgttattg

SEQ ID NO: 112621 - DNA, 384 bp, Setaria italica
  Intron number 2 from transcript Si023250m (locus Si023250m .g) derived from phytozome v7.0 (chr-ID scaffold_3; pos 81 77698 to 8178081)
ctccactgggcgcctctctccttcgctcctctcaggtccgtctctcacccccctgccctcgtgcggttccatgcggcgctgatttgattactagatttgaaatccaacttgcaaccggcctcgttgttcggacgagcgcctcacgggcggattagtttcgagcctttgcagctccgcctggtcctgccccatgcatgtcgcttccgccttctatcttatttttggggggtttttttcccttgggagggagggatttattcatttcgttttcaccatgttacgtattctgttattgcagcgagcttaatgttgttttttcttttcctatctgtgcctcctcctttcgcagagctggtgtaatttacctactaactgctgactaaa

SEQ ID NO: 112622 - DNA, 992 bp, Setaria italica
  Intron number 3 from transcript Si023008m (locus Si023008m .g) derived from phytozome v7.0 (chr-ID scaffold_3; pos 41 089376 to 41090367 reverse strand)
tctacattccaaaggattattatagtgggtaagtgctataaatatctaatcttgaagtggtcttgtttctgcaatgattggaactgaaaatagctggacgcctttcctactttttgggctgcatgaacatagaaactattttctaggggcatgacttagaccaataaataacctatatttaataaagtgaacacttgagcatcctcaaggcccagtgcattgtcaactttccaatattttggtgcgatgtgaaatgctcctgttatttttcttttttctgctgatgtatgccatcggtcattatatatcaaatataatgcataaatttatcctgtgtatccattcatccttgccctgtgtgaattaccttttttcccccaaatgattcccagggttgtgttggtttgaaccttgaagtaaatacaagctcctcttttatcaaagaatgccttttagccttactaacaattgatttgcttggcaagatagagtcttgtccgatgaagttcttctatgaagacaagatttgatacattgagaaaattaatttcctgaagtgaagataagagatatgtactggctgggtacatatgagaagataaaagcaagtcaagttgatttcaagtacttttgtgacttttcaaacattggggaacttgaagagaatgattttatgaagatgctctttatgaggatcaccatatgtagttgtatacaagaaatttggacactagagcctggacgtctaactgctttttgcaacacgtgcttcccttttgatggaattgttagtaagttattgaccgtgcttcactgaaaaccatagagggcacactaaatttttgatggtaacacggccggaagacaccattgtgaacactttgcaccccctcatatttgtttgtcattttcatgaatttcccttatcctactgtctaataaaatcaatgtatgcagggagcctcgaggatttgcatttgtggagtttgttg

SEQ ID NO: 112623 - DNA, 442 bp, Setaria italica
  Intron number 1 from transcript Si025155m (locus Si025155m .g) derived from phytozome v7.0 (chr-ID scaffold_3; pos 45 056746 to 45057187)
ctgtccaggtgacttcacgctccccgggcccagccatctcttcttcagtaattatttttactggtgatttcgggggttagtgcggtgatctgaatcagttcggtcgcaaagatttgttttataattagtgaatttctacgagatttggctcctgcaaactctttacgcttatttgctggggtgagttccgtttgattttatcgaatcgtgtttgtttcttctattttttatgttgttgccttgtttttccctcaagtctgatctgctgcaatgcgctttcagttcagctgtttcatccggaaatatgtccttcgtttggctaaatttggagttgtaatgatctagctaaatgctttccgatccattaattgcatactagaatcaccatatgttacaatacattgcaggctgtcctgtttgtgtctataaggcccttgtcgaa

SEQ ID NO: 112624 - DNA, 953 bp, Setaria italica
  Intron number 2 from transcript Si025155m (locus Si025155m .g) derived from phytozome v7.0 (chr-ID scaffold_3; pos 45 057241 to 45058193)
taatctggcttgtggattggtgggctggtgttaaggtaatcagaaacataaagttgagcaatccaaagtcagtttcttttcttctggatggagctgcgatgcatctcaattgtctgaaggggaaaaaacagcaacttgtttcctcgtgtgggctatatggcccctcatgctagcttattgatagcaaaaataagacgaatacattggtatattgcctactaattacttgcatgaagaatggtagtatgccatcgaatggtccactcgggaatctggtatgacaatggcacattgaataatttgcagttcctttcggataaaagggagtgttgagtgttgggggtttggatgggctgttttccatcaagacaagaatggccaacactatacatgattaaagtcaacattctttttgaaagtggccaagtctacaattaaagtgactactatctgcttatccagttggattaagtgaaatttgggtgccacatgagattgctctgtcttcttcagttatattgttcttcttaaactgtattgagatagcatagtgagggggcgagggaggagggaggtatttccatcacaaacgttatttaggcaacatgtagatgtttgaccaaagggtggcatgcaatggagctgttgctgctaagggtacacaattttcctcagtatggtcagttgcccactcacagaaacaattcaaatgcttgtgtgatttgcaatgcaaagtgtctcttgttcccaacttttttaaaaaggaaataaggtcacacaggaaaaggttgtattcccagagtagtcaggaaaaactcctatgttcgggcctgagacacagtgcttgatagcaaagcttaatttgtttggatctttctgaaataattggtttcacattcttagtttgttcgctgatttcaacagtttaattcaaattttccaggtacaattgc

SEQ ID NO: 112625 - DNA, 848 bp, Setaria italica
  Intron number 1 from transcript Si021436m (locus Si021436m .g) derived from phytozome v7.0 (chr-ID scaffold_3; pos 50 332922 to 50333769 reverse strand)
agcaaagaattgcttggtctctgcatgtatgtctagctcttctttgcttcggttggccgatgaaaatttctctgaattctggtgctcttgctgttttcggttcccgggctgctcttgctttcttggattactagagttggtagggtgtgctgctgtttattctgtctgaatttggagaaaaaatcgagctcctttcgttgtttgccggttttggtcggatacggatgataagctggtgttgggttttcttgtagaagcgaaagctccccaagagaaaagatgttcctttttgaccttgaggtgacatgcgctcatcaaagttcttccctttcttgctctactaactactacagatgctcgtcttttattcgattcactactcatggtctcgttccttcgaatttgtgtttgttacctcctcttttcgaactgacaaccgactcattctttgagtatcttggctaataatttgagcttgtttagcctttggaattggatttgcgacataatcctacgaagtttctctttcttctttcgatgccaagctcttaaagctctgttccttttatcccttttgtgctgcgtgttcgagttactgcaccacaagtgttctttctgcaaaggaaatattacgtgttttgatcagaactaactgtttcttttattctgtactacaagctgtaacagcaaagtttttgccttggagttttctcctggtttcacctcttttatgtcgtaaatattagtctctacaaagatttttctatcctaactgtggtctaggatgctaagcagttttatctcttcttccagattgatcaaaaaagcttgttcgtattggtagtcca

SEQ ID NO: 112626 - DNA, 806 bp, Setaria italica
  Intron number 3 from transcript Si022386m (locus Si022386m .g) derived from phytozome v7.0 (chr-ID scaffold_3; pos 11 999331 to 12000136)
tcaggaagcgcgtcgagaagctcagggagatccaggtatgggtgcttccacacttgtgatgagatactgttgtttctgtgttggtttctgccgttgtagcatgctttggtatggagcttgtgtggtactaaatcattatttgtctctaatcgagcgtgggttatgtaattgtgacgatacttgttgtaaaccgttgcgggatggtatgcattaggcacagaatttgtaaccttaataggagcaagggctgtttcaatattattaggttgcgctgttgtttgttaacagttcgtgctcactgccttgcctttgattattactagaagttctggagatatgccattgtgtcactcttgtaacatcatgtttcatgcactggttggtacttatgcttagttgtgtgttttagccctttttcttaatagaatgtacggttgttttaatttaaaaaaagaatgtacggttggctcctgaactcattgtgtgtgtgtgtgtgtgggggggggggttgcagaattttggaaagagtgtgatacctatacactttatctttttaaatccatcggaataccttcgtccttggtgtatgaagcttcgtttcttgattggttgatagttctcttttatgcatatgtgattggacttgttaccttgtgcgacatactgtcatgcagctcaatcaccgatgcgtatcttctgattctgtattacagtaatcacttaagtagtgcaacctggatatctaatgctctagatacaatttgtggtgagttctacttatatgtttactgtcttccagggccaac

SEQ ID NO: 112627 - DNA, 706 bp, Setaria italica
  Intron number 1 from transcript Si024961m (locus Si024961m .g) derived from phytozome v7.0 (chr-ID scaffold_3; pos 41 061781 to 41062486 reverse strand)
cagctttcggttacgaagcgcaggaagattcgcaggtaatgcaacatttccctagactgattctctaatgtgaaattgcatcattcttgctatttttttttgtgtagcatcagagtattggcttataaatggcagttacatctgacacttcttctggctgaagcaatttcttgtctttgatcatacagagacccaaaaacttcttcttcctgctaatttgttcaaattcctgctgcataagcactgcatggtttatatgaaatatgagctacatataggagtatctgataagcagtatgacaggaaaaaaaaattgtgtggctgaagggacaagtgagctagtagcatgagaaacatggacgtattgctataaagaactgataactaacttaaatttgatttcatgtggggccaaactatgaatcaaaaagtttaaattccactataaccttactgagaataaatagaagtgaaactgatatactctgaaagtcaggatggtacatgcatatactagtgagaatcatccattaatggttcatagtcattgtgaattaagatattctggggttacctagcttaatgttcctttttcaagttgccacatttctcaccaagaatcaagcccatgacaaatgccaaactgttttttctacggcgatctcacagttgcctcttgttgtgcaggtcgagcggcagggcgtga

SEQ ID NO: 112628 - DNA, 977 bp, Setaria italica
  Intron number 1 from transcript Si014432m (locus Si014432m .g) derived from phytozome v7.0 (chr-ID scaffold_6; pos 33 617333 to 33618309)
atcctgtcccgcgaccactccaagatcgcccaactgtacgcttccgaacccttcttgccgcccccatgttctcgttactgattcagagttcagacttcaggctgggtcgagttccctggttctgaaattcagatcccgcaactcggttttgcggtagcaagggcgttctggatttggttagccgtgtcgggcgtcgcgtgttccagaaattatggtttgcgcggcctctatcatgatttcattgcgtctggaaataagtaattctgttctgaagtttggtgttctgtattcagttagttgagaatttgaaacagtttaggctgaactctagtgctactaatccggtcaaaaatggtcttcaaaacttggtacagaactttgaccacaaatttgaatttaaaacacttgtaaaacttggtacacaataccgtcactttatttacatgaatggtttaaatattcatgtattgtttcttaaagttatatattaagttatattccatgtttttctaagatggctcttactacttttcactagtggccttgtggaagtaacattacctggtgcctggtggtgttatcatgatctattttttctgaactaaattgtggaaaacagagcgtgctataagcacctaggtctaaatgagatatgtcgatggaaaattgtctatcactatatacacattttataagtaaccatcatatactccctctggtcagtattagctgacatttccactgctgaatatagctaattttgcaagtcagtttggctgtccgaaatgtcaaataattcaggtaggaggtagtaatatttattttggacctcaggttggtgaatttcacattctctgggcttttcttccatgaattgaacctgtcttagttttttagtaacagaaaaaacctatctgctgtcgttgctgaattgctaatgtttttctcccaccttttccaacaaacagagcagacaa

SEQ ID NO: 112629 - DNA, 596 bp, Setaria italica
  Intron number 1 from transcript Si011861m (locus Si011861m .g) derived from phytozome v7.0 (chr-ID scaffold_7; pos 31 342717 to 31343312)
gacacagggaaaggttcattaggttggtctatttatcctaaggatatttctacaatgcttgcacatctatttcaatacgctctggcctatccgcactttgcattcagcattgtcctattcctttgtataatgaaaatcctattgctgaaacagtttatatttctgtacatttcatgtcagcagcaatattcatgagttgtttttcccatggtttactcactattttataggcaaaagctgtaagaatgaaagaaattactcttgaactccaacaagtacaaaattgtccactgttttagtttcgtggtaccctagaaacctggcatttgttgtagcactcttgttaatttaaacaggtctttgcctctttagtgctaataattttggtatgatatgtagaagttgccttatgtgagtttaaaactaaatgttcctttcaagtattataaacttgaatttttctgttgcaaacaatctatatgttctttgtgtttttttctttgcaattaagacctttgtattcaatatttgaatttgagttgtatgaccatggttttttaggctggaggagtcaagcccgaggtcatctgtacctt

SEQ ID NO: 112630 - DNA, 664 bp, Setaria italica
  Intron number 2 from transcript Si025417m (locus Si025620m .g) derived from phytozome v7.0 (chr-ID scaffold_3; pos 24 277061 to 24277724)
cgttcttatcgggtggcttttcattggaggcagtggtgaggtcgttgaactcctcagtccccttcccctttcctcgatctttcattgttctgcatacacgtgtgtggttcagtggacaattcgattggtcagaaagtcagaaccatatctacatagtcgatttgagttgctccctgagattctgcatcatgggtcggtgccggagcttgtattgtgaatttgtgatccagattattggattcttgtttctgtaacctgtaaatgtcaattgagctggacagaatatttggtttgagtttctatttttctaagtctgaactaattgatgaaaaccagatgttctacgatgctgctagtgttataatacaacctatatgttttcttagacatgtatacactctcgctagtccaattgcaatcctccaatgaaatcttccagtaatgtaggaattataattgttctatattagtgtagaagaaacagacaactcttgccttgccttgtttgtttgttttgttgttttttatcttgcaagtgaatcttcggttcatggatgttgttgccattcgttgatctcgcgaatgacttattaaattcccaaactcatttctcttctgtatgcctgcagattgaagccttaggggctaggtaagaggccgagag

SEQ ID NO: 112631 - DNA, 622 bp, Setaria italica
  Intron number 2 from transcript Si013516m (locus Si013516m .g) derived from phytozome v7.0 (chr-ID scaffold_6; pos 32 817124 to 32817745)
ccatcttctcatcagcaacaccgacactcaagaaggttaatatgcagtagttttttcagcatgatgcatatggttcttctagcagtgtgactgtgtgagtgtctgaccatatattccttttcttttttgagcaaacaaaaactgagcataaattctataaaaggccataatagtggcttcgatcgccttttttcgataatactgtttgattcttatttggttgcattagcagcattttctgcatagacctatttaaatttttgtgtgttactgtgctctgccattgtcttcagcagatcacttcaatagtctctcaggtgacatgtactgcgagtaataatgttgaaagtttctgttctagctacgcagagtgctcgtgccttttctgtgaatttgaataggaacatcattatagacagttgtacttgaaaaatcattttccagcaccacatctttatgctattatgtttcttgtctcctttgactgaaaaaagatcctcctttgactacagaaatattcagtttcagcatcctgagctgccaagctttcagttacacctcaagtgcttgattttctatctaaccttgataaattgttctcttttcagtgctataagcacat

SEQ ID NO: 112632 - DNA, 983 bp, Setaria italica
  Intron number 1 from transcript Si014217m (locus Si014217m .g) derived from phytozome v7.0 (chr-ID scaffold_6; pos 20 426368 to 20427350)
agaagtacgtcagacgcctgagcctccacctctcgcccccctgattctatccttccttttattcgttgcgacgatgtcttcgttcttgtgccgcgatggaggtttgatgggtggttctgtggacggatgtcttgaaaagattggatcttagagtcgattggtgatccctgtctggtttgttaggactcgggattggattgactgctcgtggtgctaaagatttctgatggtcccgattcgattggttttaagatgatcaagatgcaagtgaatctttcgttttctacttaggatagaactgtatgcgagttggtggctcgactgtggccgtcgggttggactgtcagaagtctagatgtgtttaatttttcttagactagggagtgaggaacttgctcagttccttgaatcttgaaattttaatgagagattatctatttcgctcgtgaattttaggcttttgatggctgcgttggtgttgatactgggatgggttttgttggtttcagataagtgtttgattgaaagtgaaacatgtaccttctattttcttttggcggaattggtaagagctgagttactgagtgagtagtgaactgatccttgtgattttcatctgattttcgggtgggcataattgattctagttgaggttaactattgatgtttggttggtatcacaatcaagtaatcctgtcaaactgaacaattcaatgagggacgctgaccattttgactctacttcaccattttggttgagttcgatcttgatttatgagtgctggttttcccaatctactagtagatcgaacaaatcaactgattccacttaagaagaccctaagagattcctcccatgatttgacataatagatcagttgatgagcattcactttctattattgtatctaggtgtgcgctcaatgattctggttgttgtgtttccaggtacattgcagagttgcttgcagagaagcaaaagc

SEQ ID NO: 112633 - DNA, 688 bp, Setaria italica
  Intron number 3 from transcript Si009694m (locus Si009694m .g) derived from phytozome v7.0 (chr-ID scaffold_7; pos 34 569000 to 34569687 reverse strand)
gaagctgttcatctcaggggtcaacaaccggagtggtatgtgaatagcttgtgtagctttgtgctttggtcaaatcatgcttgccatgggttttacaggcaacatgagcatgtcactgactcaaagtatgtttgttgcacacagggttctcgacaaatggatgaaacaacctgtttagaatctagcactgttgtttcttcaccaggccatcatcttgagcatgtaagaactagcgaatcactcgtgtgaagctattgcccctagcaattcattggtgtaactatgaactagggaaaggattacttttgaacattgatgttttccaactttaaggagtggcacatatgcatttttccttttttcttctggtaattataattgatatgccgacatgatgcccacttgtttctctgggttcacattctctttcaatacaatattgccaggttgaaaatgtgttttctagaaatattttgctagccccgctttctgtttgtaaagggaaaaagtttgcctttatgtccagcttttgctttgaacttgactttgccgttttctcttctatattctgtctaaacctttcattcatattttattccattgttctaatttgcccgtgaatcatgatgctactattcttctttgatcaacaggccatttggcagcagaaccattcaactgtcccagt

SEQ ID NO: 112634 - DNA, 670 bp, Setaria italica
  Intron number 3 from transcript Si014818m (locus Si014818m .g) derived from phytozome v7.0 (chr-ID scaffold_6; pos 33 865259 to 33865928)
aaattctcgcatagcagtgtaattgatcatgttttatatctcaatgcatggtttgaactaatcaattagaaaaaaatacaattgttcttatatacatgaaaggcaggttgcttcctctaaactgcatttcaagcgtctttccattcttgagtccaatgaacaaatcagggaattgcagagtagattgtttggtgatggttgtggtatgcagccacgttgcataattatacattgactaggttcgtatgaaggagaatctatttacaaacatctaactgaggatacatttgatgggacgctttaatcataaacatagctcataacatttgaaaattcatttatagtccttgtgcagctgccaggtcttcagccaaatcttcagtttgaaaactcagtattgtcaattatggatgttatctgattagtttataattagagaaacacttctaaaagataatttaatacagtgctaaatggacatcacaatccacctttctcagttaaatttgatatcttgtagtgaactaataggtgctgtgcattattagtaggtaacaacagcggggttacacatttaattgaatgatgagtccagattgatctgagtttgcattattatttgtagagaacaattgcccctattttacatcgcctatcataattgtagggt

SEQ ID NO: 112635 - DNA, 860 bp, Setaria italica
  Intron number 3 from transcript Si012625m (locus Si012625m .g) derived from phytozome v7.0 (chr-ID scaffold_7; pos 33 778728 to 33779587)
cgcggcggtacgggcgtgttcatcccgcgcaccgcgtgcactctcctcccgacctcggccaaaggtaacgcgcgccgccgcattcccgtcttgcgccgtgtgcttcagttcttgcgccgcccatgtttcggttctagcgctgtctaatctaatctaatccgcgatcaaaattgaaaaaaaaggaaataaatctgaacaaactgcattcattggtatcacaaatgcatgatcatatcctggctcatcaatgaacgatagctccgagtcaattgcaaacgagtgcttatggttcccgagattttgcgtgcatattccttgagcagtgcgaggcgttaatggcagcaacaaccagacatgcaccccggttttcgtgtaccaagcagttgcacgtactacatgcactgcagcaggggcggtgatggtgcttttggatttggtttgttggttgcagctagagccaggcagccaagccggagttgattagcacctgatgatagcgtgggccctgtactttctgacttgtgatgccatgcctgccagtgagatgcgatgcatgccatgcaacaaagctgcagactgttccattggatgccatgctagatgacgtcgctgtggctatagcaatggcattgggagggagggattagcaggaagtaattgggaaaggaaagctgctttgcatggctggtgccaactctgtaactgatgttgccatcaaaatgtcagctagcagtagcgcttggagatatactactaccaagtactactacaattatgaacctgtcatttgtatgtctaatagatgctcaaacgttttctttgcaggcgggatagcgacaagggcgtggcctgggactggc

SEQ ID NO: 112636 - DNA, 845 bp, Setaria italica
  Intron number 1 from transcript Si011891m (locus Si011891m .g) derived from phytozome v7.0 (chr-ID scaffold_7; pos 21 045666 to 21046510 reverse strand)
ggcaggtttcatctttcccacaggtaatcccttctctctctctctctctctctctctctctctccccgatctctccgagtgccctcggatatgatagatttatcccagtttcctaatccccgagtagcaaatggcactttgattaattagcgcccccaagaattattcgttgggtatcctcggttcatgcgagttggagcactacgggctacgggttaccggtaccatttgggcgccaaagcgcccgaacgaggtaggcctgcattttccaaagaaggaagacgacggataaggccggcagaaacatcgtctagtgatctttactttcgtgcggaggtgcgcgcgcgcggctttctctgctttcatgcagatgccgtctacttgttcgtaggaagaccaggttccccgattctctctctcccttttctgttttgccctttggcgattttaaagaggttggactgctttcccaggttttctatttcataattccggatgcttggcatcatgttgacatggcacccataacaaacactgatgtcagatggtaattgtcagttcccaaaaattctgaaatgattgacggggtgcctcaaatatcatcttaactatgacatgtatgtggaacagaaatttcattctgaggtgatcaaaagaaccgtgaatgtggtactgtggaaccgttgcgtttacagtggtatcactttaaggattccttttccatttgcgttcaaaaatccagtcagtttgtatttcagcgattttttcaagatcattttgatcaacaaggacttcgttttgcctgtgtagggtggttcttgcgccactaacgaggcagaggtcct

SEQ ID NO: 112637 - DNA, 385 bp, Setaria italica
  Intron number 2 from transcript Si021509m (locus Si021509m .g) derived from phytozome v7.0 (chr-ID scaffold_3; pos 44 67471 to 4467855 reverse strand)
gtgccttcaacctgggatcctgctgctctggcaaggtcagacaacttcttctcgtgtgctgccatacgaccaaactgtgatcatttctgttgtaaaaaagtttagtagcttggattcttggtcaggaaattcatattattggaaaactagtaggttggagcagcaatttgtgtttctagcttaatgctactgttgacccttatttatgtcatgaggttgatggatgctgctttgccgacacatatttttttcttttgagtttctcagtattgtatgaatggtgatatcactatggaagatatgagttgatgttgttcctcaaccttgattttggttgcttcaaatttcaggttcattgaaaagtttggaacccacttagttgttg

SEQ ID NO: 112638 - DNA, 798 bp, Setaria italica
  Intron number 3 from transcript Si025513m (locus Si025513m .g) derived from phytozome v7.0 (chr-ID scaffold_3; pos 48 770181 to 48770978 reverse strand)
agcagttcctcctagaaaaggtgaagctaaattccaacaatggtttgcggttgattttactccctgaacaaaatttaggctcactttgctcccctaaactatttcatttggtccaatctaccccctaattagatttttctttttttttctccatgtataagttgaattttgagttcaaattttgtgagcagatacaaaatataatgccttatgttaaaaaattatactaagaattttttatgattattttcataggttaggaatatttaatatgaaattgatcttagatatacaaaactgtatgaaaagtagaagtacagacgtgctaatattcagattacccaattaaaccatgagaaatcatactagacatatcctgtactgtttgcattatggaccagtttacataatcacatgttagacaaggacaagcacagagtgcttgttagagttggaagaattctgaaggaaagtgtaaggaaggtgccctttccgtgttgctactaattattcaaagcagttgtatacttccattgactggcctgttgtgttcctagcttttagctattagcctaattcttatgaatacatctggttcattccaaattggtgatttgtgagaaattaacttatcttttaggaatgcagcaaatgggcagactattagaaacttgctaggttggtgtaaaaaaaagaaacttgctagctttgaaatacctgaagtgctagagctatcagatcaagatttcaatttaaagcatctgaaatatgaaatttctgctatactgtcaggtctgg

SEQ ID NO: 112639 - DNA, 519 bp, Setaria italica
  Intron number 1 from transcript Si010495m (locus Si010495m .g) derived from phytozome v7.0 (chr-ID scaffold_7; pos 14 859824 to 14860342)
accgcattgacaccagggttcccatcgaaatcacggtgagcccccttgctttctcaggtcaaattttcaaggtctagggatgattttggtacctattatttccttttgaagaaaatagatgattctcgcttaattactttatatatatattatccttgagcttttaatttattttgctttggtctcatcctcttctgaaaccctgggaatttttgtctattattggtttcatcaaatctactaaacaatgcaatcactcaagacctgtaagtctacatttgctgaagaaaaataatggaacttgaataaaatgattcaaagtttcagaaccacaaacagaggtggttagggccaaaatggctcccctgcttctgcgtgcactttgcagaactagattatttaatttgctgttgtatctaataaacaaacttcaccacaaacaaactatgataaataagctcgtatatgttatcgatatctacaggtaggtgaactcaagaaactagtcgaagagggtaa

SEQ ID NO: 112640 - DNA, 682 bp, Setaria italica
  Intron number 1 from transcript Si010184m (locus Si010184m .g) derived from phytozome v7.0 (chr-ID scaffold_7; pos 34 344567 to 34345248 reverse strand)
aacaaagggccgcccgtcacgccgctccacgagaggtaccctccaaaccttcaatttcacatcaccctatcattttttttgtacaacctctgatgtcatgtcatgcctcgtgtaattctagcacacggtttcgtgacacaggttactaaagtaacgattttttttctttagttacctgctcacaacctcaatttctgcagttcagttctgtctggtgatttcagcagtataggagttactactgtgcaatcaattgttcaaaaaaaaaatgctttgatacctttgagattcacaaaattgtctcggatcaatcaactccggcaatctccacaaaatgggaacaatacagagggttttgctttcttgtggtagatagtattgtttcatccagaaattgagttaaggccaagagcaccaagtttatagcgcatcttcttaataaagtagatatgttacttggtttcacactttccacaaatactctttacatgatttttttatctcaattattatatcctgttattcctttatgcgtgacctggctgtatggaattttatgcgtttatgtgatcttatgtttctgattctttggatgtgtcagggattatcgaatatgttcctcccttattccatatgatttataataagtttctgacctttcttctgttttgggtaatacaga

SEQ ID NO: 112641 - DNA, 658 bp, Setaria italica
  Intron number 2 from transcript Si008362m (locus Si008362m .g) derived from phytozome v7.0 (chr-ID scaffold_4; pos 61 56137 to 6156794 reverse strand)
gggaggaggggaagagaactgtcactagcgggagggtgcggacgggagggtacggggccgcggggtagggcccgtcaaaatggtgttttaggagattttaggaggggttgggatgactaaaaagttttgagcctcctaaagattttagtccccttttagtcaatgtgtttggtaaactagtcaccttttagtcagtttttagtgactaaaattttaggaggtggaaaccaaacaccccctaactctgtttcggtgttgccaacgagcaggttgctgacttttctttgttgaaagaggagacacacaaattcgagaaacatgatctcgaccatttcgtgggtaagaaatgtgtagaactattttgctttcggagaagatgagtggcttaatgtctccgtccgattgactgattacctcttcgaactggtctttcaggagatgaaaaggcttgctatgagaggtcaccaatcaactttgttgataagtttacatgcccggtgattctatttcaagggctggaggataaggtatatgcgctggccagaaactatagtagatgtgttatatcaacgtttctataactagacatagttgttgttcatctgatttgttgtttttttcaggttgtgccaccagatcaggcacgcaagatatacaa

SEQ ID NO: 112642 - DNA, 981 bp, Setaria italica
  Intron number 2 from transcript Si010060m (locus Si010060m .g) derived from phytozome v7.0 (chr-ID scaffold_7; pos 21 942500 to 21943480)
aaggaaaagaaaaagttttcaaaggtaacgcataactcgcattggaagcatattgatttcttttagcacatgctacctctgcaatttcttgtgtcgaatataaggaaatgggaatatgggatacagctaaaagagtaaaagtatgccatttttctgacatgagtttcaggtacactgaaatgtaactacggtgcggtatttgagcgtcattgtaccaactatttgatgctcaatcaatctgatttgcgaagcaactttcactggcttcttccatttcttttttttttaaaaaaacaccttcagtactaacaacacatgtactacacatcgtatttccatttatacggcatttgctgacaagagtttcgggttccaaaagaacgaaaagagatgtaactacaatgcagtatttgagcatgaatcaactccaatcaatctgactgacgctagccctgattgcgaagcaacaactttcgctggcttgtaccacatctgtccatctagccctagaacctcggatgatttgccattttttgttaggtacgaaattgacgtgttaattgttgtctttctacaatagtgcaattctgaacactcgaaggagaacatgtctgacagtgactgatcagtgttctagtatacaggagctacatcacataatcaaaagggaggtgaagtagctaaatgtttcttttcctgcagttccttaaaacaaatcttattatttggtggtacctctgacatttgatgctgcatagtgtctaggagtcagctgcactgccacctcatcgtttggtagcaaacagacgtgtcaaatgttttgtcttctacaatggttcaatattgaacagcagaagggaaacctatctgatagtgactgaacagtatcatagacctacagtattcaaagctgaatgattttactgcacctgctgaactgaaattactatcctgtattctgcttttgtaggtgcttgtcat

SEQ ID NO: 112643 - DNA, 805 bp, Setaria italica
  Intron number 1 from transcript Si024486m (locus Si024486m .g) derived from phytozome v7.0 (chr-ID scaffold_3; pos 10 055520 to 10056324 reverse strand)
ccccaagtacaagacacagggattctggacccgaggtaaagtccatgacccttccaaagcaaactggcagcaaataacataagacgctttcattctatgttgataaacttttggttaagcatgctagttagtgattgtcacaagcagcaagttgcagctaagcatagtgaatataatcgatgactataagcattttatgttaagcagcaggttaagcaggttgctagttagtgaatataagcaggttgccatgcatgactatgtcatggatagctgaacactttaactcacacaatcgatgagcaaagggcatccaagtattttatgttctttagctttccattcatgatggacctcatcaactttccatgtgccaaactacagacatcctttggcactcaagaaaaggatctggtctaattacttggtctttgtactctgatgcccactaatcatgtgggctccaatcctagtactatcagaaaaatctcctccttccctagtgtgtccagcttgcagccaacatgcagttctcatattaacaagtcacagcctattgccaaaaagttatcttcctggcttttcgacagtgcgggtggccatgctttgaattgggtagtttctttgttttctttcttgtccttttattttcgagggatagttttggacaagtaatgccttactaaaaccatagacacagctgtagctaaatcagtacaagtagatcttggttaaaaattagaagtaatgttccgaatttagataaactgacaagcgtgtttgtttacttttgttttcaggttga

SEQ ID NO: 112644 - DNA, 514 bp, Setaria italica
  Intron number 2 from transcript Si012417m (locus Si012417m .g) derived from phytozome v7.0 (chr-ID scaffold_7; pos 27 026049 to 27026562)
gtgcctcgtatgttaccgctcttgctatgtttttttcataggacttaattcaggaattggagacgcacaatatttggcatttgttcttaccattgttttttgctcgaatttgattgtgttataaacgatagtcttatgcccatgtgatttgattctaggagacaccacttatctcactagtttgctgttaatcttcactagtttttttttatgttgcagtcatttcgggatgtaacatcttcagagttgattactgtcatggattaagttaaaatctgtcaaatgcttgattcggtgctaaaattctgtgatcccgtatgatatctaccaagtcaaataaagaacagtttcactatttggctccgttatcaatacaaatttacaaagctagagcatctaccggtaaccgtatatgggaataccatttgcttctcttggctctgtatgattaaccaatctgattcctgccttgtatgtaggtgtcgtgtttgcagtcagattcttccatccttct

SEQ ID NO: 112645 - DNA, 884 bp, Setaria italica
  Intron number 1 from transcript Si010412m (locus Si010412m .g) derived from phytozome v7.0 (chr-ID scaffold_7; pos 30 355404 to 30356287)
ctgaaagagaacagggaggccttctccagaattctgtaagctaagctaccttccaaaatagctgtattcgcttggtagcacactgctgattcaactgttcttggtttatgcacatcagcaattaattcacttaaagtaagtaactttatgagaaacgttcagaagaagtatacaacgatgacatatatttttgatatctgatagaaactgtcgtgtgagttgataaccatgtatcactccaaaattttagagaaagggtaggagagggcacagaggggcctccagccattgtggaaaacgtacagctccatgacaacaattagtctgaggtacctttgtccaattttttagtccaaggggataaacttgcctttgattattataagtaaatggtagcaaaagtggaccaatcacattgagtagaggacaagagatcatatgagccttgtgacttgtggtctggatggtcaaaagaagatggcaacttcattaggtactctcagataagacacatgacatcagtaatgcatgcacatgtgcaaatatattctccgctcatgtgcttcagctctttgataattgactaaactccgaatgtcttgtgccgatgatgctggagaatttttttaaaaaaagattttcgcaataagagtagggattaattgtctacaaaacaggcattgacaaaaatcgatgatttactgtgtgcactccacacccttaaaaaaaagcctaaaatttgaagcttgagaaaaaggaaatgttacatgtggtatttttatatgaaatgtatcaatccatattttcttcacggagaaccttatatctttccatggcaaatgattataggtttcgaccacgcatactgattgacgtctcccaca

SEQ ID NO: 112646 - DNA, 858 bp, Setaria italica
  Intron number 1 from transcript Si023418m (locus Si023190m .g) derived from phytozome v7.0 (chr-ID scaffold_3; pos 15 78845 to 1579702 reverse strand)
ggggttcgtcgccggcctgacgctgccgtccgctggtgagctcacttcctcctcctctgctccgcgcccttcgatctcgccctctctatctctccggccatcggttccgtcgggttggggcaccgcgtgctgctgctggttttgttttgagggagatgcggagatgattgctttgagttctcaccttagatcgagcgacttctcaccctgcaaggatcctcactccgggatacaattttcttatgtggcgaactgaacattgttcatggccgtgtagactgtagtaaactcgttcttgttgaagaatcaaggatccaagttccctttgatttttgaaataggaacttcaatccacatagtgcacaaagtgttcggtttgttttgctaatgtggcatagagataggaaactttcgtttttgtttatttttgagttacaatttaccttaggccatacttcacaagttgcaaccattatcatgtggtgtttatttaggtcttagaggatccgagatgccctccaaagctccaacctggtacttataagccaattgtacttatttcacctctttgtttcttaatttaaccaatcaccctttgtttggcgtctccaccaaacaaaatgttagtttctttggaaccatgataagtcatctgaatcaattttccatgtttcggtttgagagggtctcttctgtcatgccatgtcatgatggtttagcaggacggctgcatctggttagccagtgaggtttttgtttcatgttagttttttttgaatctcgaactcagctattgactaaactaattattaatgaaatccagggagtcctttaatttgctgcatcgaaatctctcac

SEQ ID NO: 112647 - DNA, 1009 bp, Setaria italica
  Intron number 1 from transcript Si010214m (locus Si010214m .g) derived from phytozome v7.0 (chr-ID scaffold_7; pos 25 528699 to 25529707)
ttcttcgctcatctgcctgcgtccacactcgaacagttgagtcgttcttcccctcccaaatccccattgttttatctcctggcgttctagaaccgtaagtacctgcgctcggcggcaagaagcagcaagcgcggggtgacgttccccgcgtcgtcaaaggattaggtggctcctcgttttcccctggatttcgcagctcgatttcacgatctttgggatagcctttttcaatgtattttatcatttcaatatggcggcagaggcattgctcgatcgatcgcgtaccggtagcactagctagcgcaggcatcccctggtgttttcttttgagtttttttttgggtttccgatggcacaacttgccgccgatacacaaaaaaacaacgccttttcggggcgaaaagtatgccaatttggccgtacgttacgccaagttgcactcctgttccgatgttgattactggtccccccctgcgaacgttttaaaggataagagttgcttcgtctcgctcactggtgttcgtcgtggtttatttcttcggttgtgcgcgcgtgcagagactgcagagacggggagcggaggtagtagtggtggcggtggcccttgctgggtggaggtggaggcttcgattcgggcggtggctcgtggcctgacgaatcccggaaaggccgccggaaaggggaggacaaaggtgggagagcttttattggtttctttcctgttcttgttcgatggtgctctctctgattggtttgtgctcgcgtacaagttacaatcttccgcagtatcctttctgcccgaacatttctttcaaaaatatcccttttactgcaagagtttccacgatcctcgtttccgtttctgccgtagattcttagtgcagttaatttctttcatcttcttgaatccgcgatgtggtttgttgaattgttgttgagttgctgatgtcgtttttgttgctggtcgtgaattcgcgacgctcgcaggtaaacaggccgctgtgaagcc

SEQ ID NO: 112648 - DNA, 774 bp, Setaria italica
  Intron number 1 from transcript Si010512m (locus Si010512m .g) derived from phytozome v7.0 (chr-ID scaffold_7; pos 26 886194 to 26886967)
cctcttcagctgctcctcctcttctccttcttcaggtcagtagaatcctctattcttcccggattcttgggaagttgctgctgtttgagctcggacgacgcattatgctgtgcatttgtagtttgctgctgtcttctactctgtaaaatattgagaaaaaagggagtttcgctgcaagattgcctcttaaagctttgcaatttctgtacgtagctgggatggagctaattaggccgagcactcatgttaaagttttgcctccttttatgctaaagttcgccttttattctgatacctgttgtaagtttgcctaaaatgcggaagtaatgtctgtagaaaaagttattattaggcattcttttttccctttatggtttgctataggttcatatggaggttgatctgtagaaatgctgcaataagtggggctctgcatatgtcttgttcctacattccaaacatactgcaagggggagtagggcttttttttttctgaagggacaaatgggagaacctagtgaacgaatcaatgcttgtactattctagattgctaataagcagagaaggaaaatattatttctcgttctgcagatttctttagtttctcactgaagtaaactctcagaaactaagcttttaacatcgaggattcatatattgattctgggtgtggactcttctcttcttatattcttgttgtgcattacgtttttataacttcgcttggttcctatgcagtttacgtcattgctggttctaattgatttattcat

SEQ ID NO: 112649 - DNA, 455 bp, Setaria italica
  Intron number 3 from transcript Si023688m (locus Si023688m .g) derived from phytozome v7.0 (chr-ID scaffold_3; pos 18 450639 to 18451093 reverse strand)
aagagaaggttgaagagaaggaagaatctgacgatgtaagtgtttttcacctagggaattgttctttattcattcatcttttgctgctcttctggcaggcctctctctaaccaggctgtagatgttaatccaagaacgattactgattactaagattttttgttttttgcttccaccaatcaaaagtttactttgttacctggttattgtaattttgtcatagcaagctgtttcttccatgtttggcacggcaacagcccttctctgcctcactataattcacagattgcctgaaataactgcacatgtagaggattagcgtatcttttgactcataagcaatacaacaattcgtggaatgttgtttatcttcatttgagttatgcagtttttttgggtacaaactactagtacatcctcactgattgttactcttggtgaattccttgcaggat

SEQ ID NO: 112650 - DNA, 828 bp, Setaria italica
  Intron number 1 from transcript Si023688m (locus Si023688m .g) derived from phytozome v7.0 (chr-ID scaffold_3; pos 18 451789 to 18452616 reverse strand)
atcgtccgcttcctccgttcggttcagctctcgaggtacgcgtgctccgatccccatctctcctattcctcttcgttaccaacgatttcctgtataatttgatcgaattggggtcctagagtagagctatttgttctgcaactgcaactattcacgtttccctggtacatgttggagttgggacctatgatttgttcgattgtctaacctgtccatctttggtttgtttcgttccggaggcatcccacgatttctccccactctaagatcactagctacttaaattcgactcagtttttgcgtggcttgaagggagtcgataaaatattaagccaaatatcagtgcaatcttgcaattgtagtcttcctttatctgacaataaagaaaccctggccttccagggctcaaatctaagatcaaatgagatatttgatgcctagggatttggatgggatcataagagtggatttttttggggaaatttgggattcaattcgaatcctgactaaaccctaagagtgtagcttcacggatatgggggtttacctcacatttgactatcaactaaaccctaaggattcgatccaagtatattcttacatgcctagttgaattggatttacttgagtaatttcatttcagtatgtatttatcttgtttctttgtctcaacttctaagaggtagaatgtcttattaattatcagtgctttcatgttgggatctctttctgtcccttgttatttacattgctcaatgctttgcatagttgagctgaattcattgactcatctttgaaaattatttatgcatttctgcagttttcacg

SEQ ID NO: 112651 - DNA, 841 bp, Setaria italica
  Intron number 3 from transcript Si021450m (locus Si021450m .g) derived from phytozome v7.0 (chr-ID scaffold_3; pos 11 972640 to 11973480)
agttgctgaagctactaacaagacggcagggggtatggatccagtgcttggcgaaattactgtgcttagctttcatcgccattagagaactacctgttatcttgaatatagcatccatccctcttatccctcatctgattttgatgtcgacaatagtattaatcttgatgctatgttttctccataatgtttgtgctttcaggacagggaaattctgatggcacagatcaattcattaaattgttagttggattactatgttcagtacctgaggggctcacactagaattgcacagcagttgtttcttagtgttgctgtcgtttccacaacatgacttataaattttcttcctggcttgctattcttttttgcattttagcaccgtttaatcgcaccaaaatcactatgctaactactgctgtattttacatactccctagttccaatcaggtccaggttaaattgtggttgaggctttccttaattcttgctcgaggctgttggttctcaagttgagaacatacgtactttttgatggagcaaattggtagcttaaacagtcttgaaaggatcactagtagtttctaacataggttttgttggtacctgttttgggaagcataaaacgagagggccctactatttttctaccctgtcttggtgcaatacacatcgctgccatgtaatctcaagttttgaaccaaatcaagatgatatatcaatcttattaagaatagggactacttgcctgaatgaagtattgagtaccactcatttgtttcttatttgattgatggggaaacaggtaccacttgtgcaactgtacttacacaggcaatt

SEQ ID NO: 112652 - DNA, 986 bp, Setaria italica
  Intron number 1 from transcript Si011892m (locus Si011892m .g) derived from phytozome v7.0 (chr-ID scaffold_7; pos 14 217707 to 14218692 reverse strand)
gtcgagttctcaggggtcgggacttaggaacggaggttgagcgctcaagatcgggggagctgagtcagcgggattaggaactcggactaagattaactcaaaagatttgaccaaggtcgtcacacaagtattacaattttgcatagtaagagcgatggacaacaatgagaacaatgttgaatccgccgagtaggattctgattctgacgatgattgtggatcgtattctactccacctgagtacgaaccaagcccatctaagactcgcaagcatctagatgaagatgaccctgaatatgatccaaccgcggatcattagttaccttcatgcacattcatacactagctagtgatgcgtttgttgttcgcatgaagatgataaactccaactattattttctctatagaacaatgaccaatccccggtgcattccccgtcgcgacgttgtagaacatatactctgcataaagatgagatagatccctctgcaccacaaccttcggctactactacttcttgtagcaatccgaaaaggcaacgtgggaaatgaagcttaaaccaaatccctgaaaaaggtattctcgtaatagaagagcttagcgccaaaggtgagcccatattacctaaggggatatctgctaggtcttagaacatacgttgagctattgtcacggataaattgtagacttggatcatagtaattggaagaatgtgcctaccactacaaaggatgtactgtggatcacattgaaagaaaggttcacttttcttgaaggttaagagaaattcgcaagaaactttgctaagggcctccttgggagatgtttcaggaattagaggtctattcttaataaaaatatgtacagaaaggaaagaatgctagggacgacttcggtaggattcctccagaaatgtgggaagagttcatacaatagaataacatgccgaagcaaaagccctgagcgtagaaaataccgtgaaggct

SEQ ID NO: 112653 - DNA, 567 bp, Setaria italica
  Intron number 2 from transcript Si010856m (locus Si010757m .g) derived from phytozome v7.0 (chr-ID scaffold_7; pos 28 408098 to 28408664 reverse strand)
ctgccgtctacttggctccttacctcaggtggtttgtaattctgaatcctgagataccgaattgtgttgcctttgttatgctttggatcagtttatcttgtgttctatattggtgtactttggagtatggactttcttttgtaaagcttgtatagcttttacatctctgtatggccagctgcctgtgactcttcgttgctgtgaataacttttgctgtgaaaatacatatatgtgctattcgagttgtagaattcacaaaaagatgatttttttttgtgtttgaattgtgctgcgctggcggcataagaaatcaaattaatggttatattgaactgttctcaagttgcatttcttgaggtaacgtaggcagccgaggaatatgtactttattaacttcattagcgtaaactcccagccccccccccccccccctccccctcccctgtcgtgctgcattttcagtaggctttctgattcaatcgagtattcattaaaaaatcctgttttttaatctctgtgttggagattgataaactcagacattctttttcagagctaacttatca

SEQ ID NO: 112654 - DNA, 596 bp, Setaria italica
  Intron number 2 from transcript Si021002m (locus Si021002m .g) derived from phytozome v7.0 (chr-ID scaffold_3; pos 18 24507 to 1825102 reverse strand)
ttgctggagcaattccattaattgatagattccaggtacgtgactacttcattccaacatcctcaccaatgtgttaaatctttgtaaaaatagaatatccccagttgtctatttggaaacagaagcgagattgggtgaactactcatcattatgtcacaattcaaatagactgaaataaacagaagctcaataggtcaaatatattctctctataataattcgaattttgtctttacaagttaagaggtcaattgaaagtaaggacaattagctcggcattcaagtttaagtttacattctcttctacatgaaaaaaatatggtaaaaatgctggtttccaactctaaaccatatatattcttacaattcaattgggcagtaccaacagttatccttatcactagcattagatacaaggaaattcaatagggcaatgccaacagttatccaaatcatcccggaggcccatcaaaatgtccattattacaggatttaataaaaatactgttatcgaatttcatatagtaagaaatgctcagattcccactctgataacagtgctgaaaaatgacaggtggagggctttctcaaagca

SEQ ID NO: 112655 - DNA, 497 bp, Setaria italica
  Intron number 1 from transcript Si021002m (locus Si021002m .g) derived from phytozome v7.0 (chr-ID scaffold_3; pos 18 25122 to 1825618 reverse strand)
ggatacgacagcgacggctacagcttcgcgccgccgtgagttccaccttccttcgccgtcccgggctggcgagttgattccgtgttgttgcctaatgcctatgtgtgattttagttagttactaccggttcgtttgtctgaggttttgaattttctagtaacgtatgatgattaccaaaagagtgttccctgcctagtggaaagtagaggaaaagttgggtcgatgtcttgtggctgagatttatttaactgttatttcgcgtcaatgtcgctataattggctacctgtgctgtgctcgtaatccatggcctaccaccctacttgtttaatgcgttaggtaccaatttttgtgcttgttttgaagccaaggcactagtaccttgctttcttctttgttacactcgcaaatgcagtctctgtttatttgctcacatcgagtgtaatccatatttaatcattggggccactgttttgcagtacaccatcaactttgtca

SEQ ID NO: 112656 - DNA, 983 bp, Setaria italica
  Intron number 1 from transcript Si024415m (locus Si024415m .g) derived from phytozome v7.0 (chr-ID scaffold_3; pos 14 070139 to 14071121)
aggatccccaaggggcccgaccctattcacaacaggtaccaaccttgctgatgactgcatgcacttgtcgttttagtttgcgtgcgttttggcattttctacttcatacacttaataagctgcggttcctgactgcatgagttggtaaacatctaactggttcctccctctatcctaaattactatttattttgactttttctagatgcatactaatatatatctaggtgcgcaacagatactacatccctcaaaaaccaaaacgaatagcaatttgggatggaaggagtagataaaacatattgacaacagagcttccttttgtattcaaatttatcttaccggtgctctgctgaaatagttagtcatacaatgaagacatgagcatcgtgtatctatgacttatcagagaaaaaatgcctacaatttgcaaaaaaagggagaaaatgcatataattcaatttttttgaaaaagtaaacaggtatatgcaattgaaatgaagcaacaaatataatcctttgcagatatataatcctcagctcgtagttcgagatttatctgcttgttccctttctcttctgccgatgcagaggaattcctaaccccacatgcccccagcccccacatatgtggcgtgcacatgatagacacgcctagtttgttgcactgaggcaattgttctttggatgcttctttgtaagtctcgggctttcggcaaagcaaaactgaagaacaacaacacgtacaaactgtacaagtgtacttctgagcagagcagagcggagctgcaaagcaaagcaaatcattgcacaagtcactttactgacaatgagaagcactacggataatgcccgcgcctaataagcttgtattaggctcgtcggcttacttgtagttaacagtattaagttaatactcaaccttccctgttggaaatgtgttcccaggcgtgccgggaagacgacgatcgagccgcggcggc

SEQ ID NO: 112657 - DNA, 678 bp, Setaria italica
  Intron number 4 from transcript Si024236m (locus Si024236m .g) derived from phytozome v7.0 (chr-ID scaffold_3; pos 48 108513 to 48109190)
tagagtctggagctgatcctaacattgctgacgaggtaattatgactctggttttgactttgctttttatttagtttcatacttttgaggactacaatatcttggcatttgcacatcagatggcttttggtggtaatttaaaatcaaggtttcttgagacaaggggtgcattgtataatttaagttgttcatgtcaggcaattttggtacacttgttgtgtattctggtccatctttttagcttcagactgcagtggtccggtcatactgttatttgtttctctagtgataagttacctgtgcatacatttatgaatatcttcatagttcatttagatcaggttctgcacctatgaatcatggtaccagattgtttagaagttagaacagaccactgaaattctattgttgaagtgttaatcaaggcacacctaaaactatttgcaggacttgatcaccaattagaattttgcagggagtaattttgctagctttcatttagagtctgctttacttattttagcgttatctagatctactacttgcattgtgataaattagggaatatctcatttttctctttctttctttttggcaaaaatacttgtattgttgatatctttttcatgtttcatgccagattgcattactgcgtttgctttttctttaaaatgcagg

SEQ ID NO: 112658 - DNA, 834 bp, Setaria italica
  Intron number 2 from transcript Si022906m (locus Si022906m .g) derived from phytozome v7.0 (chr-ID scaffold_3; pos 28 0698 to 281531)
tgcagagcgaaaaaggagcgcgaaaggcatccagggtatgttttgacgccttcctctgttcagatttatcggctcgaaccttctgcaatccatcatcatcttataacagttgaaccacaatatagcaatttaagtatttaacttgatatcttatgcaagaaaagtactagcatttacagtaataacgctcaataactaaaggacggtggactacaaggaatgggactaaaatgtagtattttatcagcgagatctttggccttaggattactctatgctcacacaataactggaacatctagttagatttatggttatctggcatactctatggatcatttgaatttcacatgctttggtatgatgtagatggagagtttagtaccttagtcctttcctgctgtgtttgacataaacatgatcaccagtttctatgtacatgagaaatgggaggttggtgcgccccaaatttatgagcttgtatagctgacacaatatgatcttgccaaaagaaaagcgagcgatgctggagcattgatggttttagtggtgtgtggcgtgcatttattttatgcactacggcacaaaagttttttatttgactaaaacaaatctgcaagtgtaattatcttgtagatcatagtgcagtacttgccaaaacagcttatcgcttctctcatcaatgatatcaatacatttatcttatgctgaattcagttatatgtacgcgtatgatgattctgaattttgctattctatgcaagcaattcctgttttgtgatcttagttgcacattaaggtgattcttctgaacaataaattgtcaacagaatt

SEQ ID NO: 112659 - DNA, 973 bp, Setaria italica
  Intron number 2 from transcript Si009938m (locus Si009938m .g) derived from phytozome v7.0 (chr-ID scaffold_7; pos 22 529296 to 22530268 reverse strand)
ttcacttcatacgacacaacaagtccttgcaagtggtaaaaattcttctctttgttcaggtttttctcatgccctctgttttaagatttgctttgtacactgatcagcaattcagtaggtgctttcttcttttggcctatgcagttcttctcagccatcttagataatgtgtgatggcttagatgtttagaatttttgttccacgaatactgctctaatatgttgttgggatattgaagacttgaatttcttggagctctggctgctataatttgtcccacaacatcttcctttataggaagccaaaaaatctgttaccttttatcaagtatgtatgctgccaatgcagtaggtgctttcttaaattttggcccatgcagtacttttcaggcatagataatgtgtgatggcttggttgtttaaaatttttgtttaagggatactggttaatatgttgttgggaacttgaagaattgactttctttgagctctgactgctataaattgtcccagatatcttcctttttaggaggccaaaaaaattgttgtcttttatcaaatacacgcctgccgcactagttcattcatgcattcactaatgtaaggacaaaacatatagtttgcccacttatatgcgatgctatttttggtcaaacctcccctttataatgccatcgtgtcttgcttggtgctgcattgatgcagtacccatatccacttctggaagtgttcgttttgctagttcccgttctgatgggtcgattagctctgtcagttattggttataagaaagttgtgacatcccagttcttgtcaattattctttcgtaggtaccacttattggctgcatcttttaaattattttcagcctttgaggtttgacctttagtttatgtttatgttaaccacctcttttttttttgtctgtgatgtatagagatacaaaaattgtcagagcttggcaaagaactt

SEQ ID NO: 112660 - DNA, 653 bp, Setaria italica
  Intron number 3 from transcript Si009447m (locus Si009447m .g) derived from phytozome v7.0 (chr-ID scaffold_7; pos 26 197374 to 26198026)
agaaagcagaacctatatttaaggtacttttgatatctacattatgcaaatgcgtaaacaactaatgatttgactagctatgtttaactatttttctgatagggtttcttcttgaaacttcttttttcaccattcttctttgtatgttcttgttgaatttccatttccaacttgaaattgccaagcttaggatatacttagtcatggtttgaatgcggattattgtatagtttgttatattgaagcctcgatctggatatacaaattgttaatctcttcatccttatacaactctgtagtgtaagcatggaataatgaatgcaacactggggctggagtaaaaagctgtttttgattcattatgcaatgaccgtttaattgccctcctctggtagtgcagtagtgatataccgttttagatttaaaaaataaagcagcagtcggttacaattgcctacatgtggcatattcctctcttgagaaggaatataaaatgttgtctttataaatgcatattttatctatgccagattcaataactagcttgagtcaaaatctgtgcatcttttatgctttagtgcgtaaatatttttgttgataatttatctactactaattgagtgataaaattgatgcagcttgcaggttttcag

SEQ ID NO: 112661 - DNA, 811 bp, Setaria italica
  Intron number 1 from transcript Si022775m (locus Si022775m .g) derived from phytozome v7.0 (chr-ID scaffold_3; pos 45 972494 to 45973304 reverse strand)
ccttccccggccgccatctcgccgtcgccgccgttagcacccccgcccctctcccctccccttcttcttcctctcctctcccctagccacccacttccaacccctcggagcggcgacctgaggagccgaccaaatctggctctcgctccgttgcggccagcccgcggttcggcggtgcgatcggagccgcatacggccctcccggatgggtacgtcgatctgtaggagggtttagcctcggacctagtggctagttgttggcgcggccggtgggcgaaattgcagggttgccttaggtaaatccgggcgaagagtaagggagatggtgctgaataatggtggggccacccgtgctgggcagtaggctgtagcagtgtagctcctttccgtttgctaaatttattcatagttcggcactatgtgtgatccagatacagcttgggcacaaggggaccttggtcaatttcgctcgagctgactctgtagtggtggattgtcagtctgaattgcagtggaaacgaatactgttgcaacttggaaaagtttgattcacattcacatgcttgatacttgaattcggatcgagtgacacaatttatttgtttttcctagcattgatcatgtattcagttgatttatgaccataaaattttctgatgaacattaatgccctgcatatagagattctagctcttaatcttcttccaatgtggaagtattgggtacgggtttttcgtgatgtaccatagggctaatggaattctatgggtatatgaaatcagaattatatcattggagcattcaagccacc

SEQ ID NO: 112662 - DNA, 776 bp, Setaria italica
  Intron number 1 from transcript Si014132m (locus Si014132m .g) derived from phytozome v7.0 (chr-ID scaffold_6; pos 96 81044 to 9681819 reverse strand)
cgccgtccagcttccacgtcgaggtgaggtgatgcagccgttgggtgtttggatggtttagcacgccatatagattgagtttttagaggttctaagacacaattcctgtgctgaggtagtgtcaggcccgagaaagattcagtttcccttttcttcttctgatctggcgttccgcgttaagttgacgatgcaaaatgctcgcgggttccaggctcgaaccattgttcggtgcaagaaaaattcagggcacttttggttgcattgtgttgtgggtacccttggcactgcaccagggtgttagaatggaaagcataaggcgttaggttgttacattgtacgaaatggtttgcatttcaatgttcaatcaagtagatggaagctttcacaactatgtggtgtgggaactggatttaggttctggactattacattatttgggaacttttagtgtgggacaaattacatagctgtgtgctattgttggtgataataacatcatgcaaagaatggaaaccttccctttgtgacttatttatggtttgagtttgcaaaacatgtctcgttaagaagggtgatccatgttgtgatgaaactagtttgccaaatatttgaatttccatgctgctttttttaatgaaataagtgataacccaaactgtaaacgttgatgttctcaatgatagcggtgtgattatttttttttatgcttaccgttctgtttcttactttctgtggctgcagtttcggcagagtggagctaggacaccacagtgcac

SEQ ID NO: 112663 - DNA, 684 bp, Setaria italica
  Intron number 2 from transcript Si023255m (locus Si023255m .g) derived from phytozome v7.0 (chr-ID scaffold_3; pos 26 468770 to 26469453)
ggtgcgttgtcatctctttggtatgcattaaatttttttgcatatttctgcagtgaaactttttataattttcagttggggatgaatatgaactatacttctgctgcaatatcgttacataactagaaatggttatacctcattaccttgattaaacttctgcagaatttctgcattgaattattaatatcttgtctttacataagatgctgtttacgattttattatgtataacacacgttttagagtatttttgcactgatgcttaggtttgtgcatgtacttttttttctcaaacagcatgctattgtattatagaagaaagaatggtccgattacaaacttagtcccagcttaggcttgttctcatacttgtttactgatgaaattcttgactactatatagtatcctggtcagacatctgaacatttttacaagaatgctgaattaagaaaccttggtcctcactcagtttttgtagcttatagagcttatttgccatcaacaaaaggttttgtagctactggttactgcagcccttttatttcctgcgatgcctttgaggctttgatgcttgttagcactttgagttttattttaccatttacattcaagtttgtcctcaagctttatcagtaagtattttctttgccttcaggacacagctgggcaagagaagtttc

SEQ ID NO: 112664 - DNA, 985 bp, Setaria italica
  Intron number 2 from transcript Si025299m (locus Si025299m .g) derived from phytozome v7.0 (chr-ID scaffold_3; pos 23 68006 to 2368990)
ttgccctcgcccatacccaaccgaagggagcagaggtaatgggctgtcctgctctcaagtgtttaattttgggtcgcatgcgtgacggatttcgtggtgcattacgttaatacatattggagcgaacatcagtgttctaggcctgtatggagttttccaattatgggagcgttctgcttactcaatttagtatttcagcatgtctgtgttccaagtgcctgccctatgcagttgattagttttcccatgctgtttagttgctagtttgcttttgaggctacaacttatctttcaaggactgtccgtctatgtatcgtgtcatagtttcccttatggaataattgtggtaaatatcaaaggataggggtagtgtgctaattcttcatttggtgattagtgacactgcaaaatacattaatggagtagtttattgctaaatttcagattttggtgcaatttttccatgaacctttttcttggactgttaccatgattctttggtatagatttcacagttcatgattctgcttacaggcactgcttctggaacttacaaaaggttcatatgtgcaattaggtggtggattcaaatgcaccaacataatttattttgaaataaatcgattgagcaatgctaaaataggataggccattattgaagagtccaaaccaaaccaggggttttctgagacagtctttgtctaaaatgatcagcacaaaccattgcaacttcatgccacattattggataacactcattgattgaattacagttgactcgggaaaaaaatcattagaaactttagtcatggttatttttttggcattcctttcagaactattctaacagtggtagttaagataagtatttgttttttcttcaaaagaaccatttaggctatgatcgctcttctttctctatgatcgctgggtaagtaatacaggctacatcattcttaggagatcagttgatcttggaagctca

SEQ ID NO: 112665 - DNA, 1000 bp, Setaria italica
  Intron number 1 from transcript Si023281m (locus Si023281m .g) derived from phytozome v7.0 (chr-ID scaffold_3; pos 58 6128 to 587127)
aaggtcaagtaagtgttttcctccgccgcgcccgtcttcagttcggcccccggcccagccgccctgacccaaaccctagatttcctattctcgccggaaaccctaaaccctagcgcgcaggtcacagagctccttagtgttcaagttagcgagggggttggtttaactggagagtaatgggcaacttgttgagtctactgtttgcaacgataagcatataatttttgctgggagtgctagcttgatgtgcatttctgccccatggctccttgacgggaaaagatggtcatgactatttatggaaacactgtattcaggttggattttgttgacttttatgttgtgtggtaaagtttcagttgagtggatttattgagttgagtggaattattgggaggtgggtagcaggatattgcactgcagtttcagtaacagcacagtcagagaagtaaaaacgctttggtttgttcccatcctgctttaggttgtttcacttacctgctttcgagttggcaatattggatgggtattttgatagtctgcagtaggtaggaagagaaactgtgctggcaaaaattgctaaaacctggtaaatagttcaagactttcaaatttataggtggtgacagttcaatcattctattaccgtgagccacctctttatttggtcgagcattccttgaatagttttaccatacacatcgtgtttgtgtagagacaatggtgcagaagcagaatgtcaaccatgattgaaatcaattgaaacaaaaaagcctttctcattcaaatatgtcatatttgaattgaaatttatattctttcgatatattcccatacttgtttgtcttaacagcagagattacatggcctatattttatttgtcttctataagaaccttccaaaagtcaggctaccttgctagttatgttcttgctaataactggttctgtccaatgcactataaactaatcaggactcacttctgtgaatgacagctac

SEQ ID NO: 112666 - DNA, 901 bp, Setaria italica
  Intron number 2 from transcript Si023559m (locus Si023559m .g) derived from phytozome v7.0 (chr-ID scaffold_3; pos 41 36684 to 4137584 reverse strand)
ggccgccgaggagaccttcgagtgcctccacagaggttctcttctgcccctgctttctaccccttttcttattcattgctcttcttcgagttcagtcatactgtattcaccttgttctgcttatttttgtttttagccttttctctttacaaaaaaggattatgtggttgataacactagtagtctcagttccatagcccaggacctttttagatgcaaaagttctcattttgcggcacgtacgtcagagattgaaaatatgttgccacaaaacatctgcatactctgcgaccgcaattaactgcaaggaccagaacagtggagcagatacaacattacaaccccatactgtattttgcataacctgcatttgccattcagtattacactgaattttctgcacatttgtgtagcctgcatttgacattcagtctcgattagatgactgaaatggaaagaattttgatggtcttactgacggttcgcttagttctgaacattggacctgaccagtgcaaaatcgtgttacctcgacagatcttaattgatgcactcacactagctatgtgccagcttgtacacttcttctcttatttcttgttttctcttccttattttgtattttgtaatctgctagagtattttaactcacttccttttaattaagcactgctagcaggccacctactattgttgtgccaattctgttgttctgcacctttaaatttgtccaatggcatttcagagtaattttattatgtattcatgttttttgtgctcaaaagattatgggacgcttgcattgtttgttgctatatttcactgcctaacaggagaagaagttggtactgtgcgcccttgcacacattatgacaaaaattttcttgtttctttgcagggg

SEQ ID NO: 112667 - DNA, 548 bp, Setaria italica
  Intron number 2 from transcript Si024541m (locus Si024541m .g) derived from phytozome v7.0 (chr-ID scaffold_3; pos 46 110729 to 46111276)
cgtggcctcggtgcgtttcttctttcttggtccccatggcacattccttctcttaggtcgttgtttcctgctcaacagtgtcttctgaaatatgaagtgggtgaaacggaagcagcttataaacttgccaatttcagggtacttttgagtttttatgcgttggctagcacagttacaatgttttgctgcaatgaaaattgtcactgaaatctcaatgaggagaggggggaaaaaagggaaagtttaatgtgacgtttacttgtaattgcattacattggctaaaaggtacggttgatgtatgaatgttgctacttgttgtatataacaatgtaatttaactccttttctcagtatttgtatgtgtagcttctaatcaggagctgtttgtcctgataaatgatgataaactgcccaatataagctgccgaagtatccatgaccaggatgctggaactggttttcatggatgttgcttgataatatacattgtcggttgcaaagctgtatttattgaaacatatttttccaatgcttgcagcaattacag

SEQ ID NO: 112668 - DNA, 803 bp, Setaria italica
  Intron number 3 from transcript Si010606m (locus Si010606m .g) derived from phytozome v7.0 (chr-ID scaffold_7; pos 35 563150 to 35563952 reverse strand)
gtcgcgctctctggtacgtcacgtcgtcaggctaaactcttgcacaaattcctacttagacatgttcaaacttcaactatggatggcatctttttggatatcaactgtagaattaatgagaaaataaagaaaactccacactttgctagcttctcaacaaaggtagctttagagattagataaagacagctggtgcacaccatcgccaacggaatcgatagctcagttttgactttaaccgtcgtcatatacttgtatatctttaaccgtgagtccgtgacacaggatcatttacctggcctgttgatgaagctcagttaattgtcggttactaacatataacacgtctagcacgagatatagttggtatagatatggacggaatgacatgataaagtttgcaaaaggtgacaacgatgccacaaaatgctgtcggtatgggtttcatctggaagaaaaaagaaagttgtgtgtacaagcttatgctttttgcatgttataaacctgtcaacaaccaccagtttgccacaaattatattgttcctttttttttgtcgcttcataactagaatcgaatactcttttctctcttatatatttacagaagcaacaaccacaagtttcaaaaaaatgttataaacttgtaatatatgattattatgtatagcgagcaatttattattatgtactagctagattaatatgataacctacttggaataattaatcttgatcggcctcttgcattgctatgatctgaattggcaggtgctcacaccataggcctagcacgctgcaccaac

SEQ ID NO: 112669 - DNA, 904 bp, Setaria italica
  Intron number 1 from transcript Si010863m (locus Si010863m .g) derived from phytozome v7.0 (chr-ID scaffold_7; pos 23 668351 to 23669254)
gaagcaaggaccctgccgccattgcggagtcacaagtgagctcttgttcttaatgaagcagaatttttcctatttgttccttttttttctctctctcttgtttcccccccttttcccctttggtcctcagcaagtagtactttacgggtgatgatttccaccaattatgcatctgggaagcgggcattagccgaaagattctaagggactcggattcattttctcggtggcagctcaattgaatctgaattcactgaactgccaagagtgttcatgagaaatctagggacatggttgtggtgtcagaggcctttgcctgtataattcttcagaacgtgaggaacatattataccatgctcacggaacaaatttagagttgtgtttgattacggtttaatgcgattcttagataacttaagcagataataaacatttgcttctgccaatctgatatttagagttcaattgctgctgctgctacacgaatgctagtttcagggtgccatagaagtgaaaactttggtttgctgtgtaattacacgatcttatcccatccttgtgcgtgcagcattacatggtctgaactttctttagctcttactgcagtaaaatgatcctttgaagtggctatctgcattcggtataagaattgcatgcctgtacaattgaactaaccattgaggcattaagtctgactgtattttgattagtgatatgatgtcttctggatacattcttgatagtgtatagtttcttaccctttttctatgctccttaccctgatggcaccatctcttgatacatctaaatgtgatatcaatttgtatgccgctcatattttgggtatcgattttgatggatttctcatgggaaatgctggaacaggcactcctctttggcgaa

SEQ ID NO: 112670 - DNA, 904 bp, Setaria italica
  Intron number 1 from transcript Si023485m (locus Si023485m .g) derived from phytozome v7.0 (chr-ID scaffold_3; pos 34 061000 to 34061903 reverse strand)
gtctgtgaccaggccggcgacgacgtccccgccgtgtaagctcccggaaaccctcgctaaaccctttctgctcctttccttcctagttcccattcttttttgttgttcttggcatgtaatacatggtagatgcactgctatttcgattcttgtcacatattttgcgttgaagttcgtagatctgtgaacatctgctttagtattgtgagaatcagtttggcacttgtcaggaattttagatccagttagttttagcttgaactaccattcttcagcttcactgctgctctgcactggtttcttggggtttttttggggccgcttacatagatcttttcggtacgtcaacatccacatgtgattctgttagcatttattaatgtagatctgaaggtgtggaagtggaacatcatggaaatagaaccctgttttgttttttgttttctcccttgtcctactttgtttgtctgcactctttttggtgctcttttggcctcgtgcagttcatctgtactttgtctactttggaaactgcgaaggcacacaggaaatgagtttgctactgtttttgaactcagatattgccataattttttagagaagaatagatctactcaccttttcaaaaaaaaaaataaaaatagatctactcattgcagtggcatctctccaaagaaatctgtgtttaatacttttattttatatttcatttggagaaaaatgtgaaacagtttttgctcggttacatagtactagtattctggagtacgaggttttgctatttacttaacaccgagcaaataaatggacattaaaactctgttccctgctcaaagtctcacacttttggtgcttgttgtttgttgcaggggcaaggaaggcgccgcggctagtgggctggttc

SEQ ID NO: 112671 - DNA, 795 bp, Setaria italica
  Intron number 1 from transcript Si024423m (locus Si024423m .g) derived from phytozome v7.0 (chr-ID scaffold_3; pos 47 656626 to 47657420)
accggagacttctccaagggcattgtaagtgtccacagcccactactctgttcattttctcgaccaatattccactgctatgtcaagtggacattaccttctttttctaaaattgatgttctctaaaacatgtggttaaatttttacaaattttggtaaaccaatacataaaaagccgtgtgcatttgtcatgtctaaatggtaactagtatagattcgccatcgcaaatatttattttattaatttaattttctctgtaattttatggaatgagggtatacatttatcacacaagctgtgcttcttctagctcttaaactttatgaggtgagcactactgtctactgagatatccctgtaaatggagatatgttactgaaaggagcttaagaagtaaaaggagtaatagacacaaacattgctttaaatctcatgtatatggacctaaatattaatcttacctaggagcacttattagatggaaaatatattgtaagtaatataaatttgatgttaatcttatgtccaccagccagctttcagttagtttttcactttctctttttaaataaagtaccgcaggatgacaagaggggttttttcagctatttttcaagatatctctgttgttttttccggggtcaagatgactactgttagttgactataaagcaaaatttgccggagctactacgttattactatctgaaaattaactatatgagcaatgattggtcaattttatgttttcatcttcagagcataccagataagtttgcaaagaatttcaaggg

SEQ ID NO: 112672 - DNA, 991 bp, Setaria italica
  Intron number 1 from transcript Si023199m (locus Si023199m .g) derived from phytozome v7.0 (chr-ID scaffold_3; pos 73 9999 to 740989)
gtcgcccaactcgaccaacgcctccccgccccctggtcagcaaccgctcctccctcccactcctcctgcttcagcagatctcagtctccgttcttgcttccgcgcgcgcgcgctagagttgtgttcctagattgtgcagctttcttgcccccttcgctgttcttgccaatccgtcgtccgtcgctttgaaaaatgcgttcgatttcagccaacaaattttattactgtactgtttcattggagcatttttccccttagattagatgtaccagccaattgagggtgccgtgcagaaatgagagatcgaggaatggcgtgcaaaacgaacctactcggcctccaccgaaagagctttcttttttcttctatggcagtttcaaaggctactctttttggatgggtgatgggcagggcctcacctcacatagaagatttggctacagttagtgacgcataaggaaaaagaaacggtatcctgtatccgtctagtggatgctagtgctattcggtggacaaggtgatccgctttcgtgttcctgttttggactcgtattctagagatttaggtggcggctgcaatgtggcgtcagatcgggacgcatgatgtgatgcaacggacggcctaactcaaaaggagatccacggttagttgattggtgggacaagcgcactgatgaagaatatggaaagaatgatgatgctgatgttaaacaaccaaatagcgaccatgtttaacaatcgctttcctcatcttaacactgtagtattaatcaaatgggccaagcgttcttgcttttgctgctgttataaacctatgatgtcagaggggcgtgcacttgctaatttaaaaataagtagtcaaatgcaattgttgagcaatattttggcaccatgtccacaaggtaacctgcatctactcctatataacatggtagttgttttactgagaaaattttactggtcatgcaggttcatctacacatttcttggc

SEQ ID NO: 112673 - DNA, 558 bp, Setaria italica
  Intron number 2 from transcript Si022454m (locus Si022454m .g) derived from phytozome v7.0 (chr-ID scaffold_3; pos 12 927223 to 12927780)
ccgtcgtgatccagaaggccttcagagggtacttggtaagtttgctgtcaaccggttcttcgtgttcatgatttattgccatttttctttgtttcaaagaattgtttgatttgtttctgctgcaagcactgttcaactgaagagtccggatgattttggccactcgttttcagttctaagcaacgaatcgatgaacaagtatgcatgattctgtcagattcttttgcatttgcattggacaagatatttgacttcacgaactgctgcaactgcaatccatggctgcttgctgctgttcctttccgttgagtcgttagctgctgctcactgtttaatctgcttagtttaatcacaaccttttcgcgatattcttgtttattgctagagtgcttcgtgaactgcacggtgtgacgcacctagtcgtcatcgcagctgttcaatgcccaattcttttcggtttccgatgctgcctgcagcgttccgatgtgacagtaaaaatttgaatcttgcaattcatgtgcaggcgaggaaggcgctgcgtgctctcaagtcgctcgt

SEQ ID NO: 112674 - DNA, 845 bp, Setaria italica
  Intron number 1 from transcript Si009527m (locus Si009527m .g) derived from phytozome v7.0 (chr-ID scaffold_7; pos 22 320094 to 22320938 reverse strand)
tgggaccccgccaaatccgccttcgtcgcctatccgtccgtgccgctctgtctctcccaaatctcctttcagttctagtaatccacccatagttgaggatccgcgtatagtgagctgaatatctgattggttttgcggtttgcgactagcagatttgtctgcttcaggcaacaacattttggccttgtttgctgtagaaagtttcgtggtgatacttcgaaggtggagaagtcgcattgaggttcttttgttttgagctgttattagcaaaacagccagtattacctattggccattgatcctaataataactgcttactgtgctttgtgcaatgttctgctatgattagctcatattgagatagcaataatggagatttgagcacctaaggaaaatgctgatcaagaatggttcgtgaacatgtaccttgcaaaaaattccaatatgacaaaataggttgcaatgacactgcagaacctgtgtgctacctgctagtgccaagcaccatgggtggacacggacgctgctctggcacacagccagttgtggcagattaacccccactttggaaaatgattttagcttcagagatgtggagggcagagccggacacatgtccaacactacccaggcccaatatagaatcttctgtatgtatgtctatatctgtcttagttgtgagggtttgcacctttgcagcgtgtgtagttgttggcttattgctgattgttaattgttgattgcttgaccacttactaatcagctctgtagctgatgttttttcaggactaaccttttcttcttggcaggcataacttctttatcttccctcgcaaagagctta

SEQ ID NO: 112675 - DNA, 806 bp, Setaria italica
  Intron number 1 from transcript Si023193m (locus Si023193m .g) derived from phytozome v7.0 (chr-ID scaffold_3; pos 64 77176 to 6477981)
ggccgaagtaagctcgcgtttcctatttccctacttttgattgcttccttgcggtgctgaatagggctacaagtctcgattagatccatgatagttctgcgaaatctgtttgatccatttgttttttattatccctgcgagctgaccgcacgcgcccagttcttgtagtttgctgttgatttgatttgtgagcctcacaaggatacctgctatttggttagttatgttgtggtcgcctagtataagttgttgatttgcgagacctgcatcgtaggaccaagcttgggcattggatattaggccctccagatttcctgtgcctaatactgtactggattgttagtctgtcctgaaatgccttctcctggtttgtaataatcactgtcataatgatctttgtgactaatggtagagcgaagaaattgattcactattagtaattgaaaagccttcttcttagggttaattcttgggattccttaatcagatgtatgctttcccttgtaaaatggtcagcaaacgcatgcttcacaaaaatttgacagattaggatgcttcctgtttgcaagcctttcccttttcttgtaacattatgtctcgatgttttatttttctttttgtcatgaagcagcactgttgcacaatctgcctagaatgcatatactcttactcttttaatacatgatgtgtatgttcattttatcattaactgcagttgatgctagtgttcgctgttgaaaacaagactttatgtttttgaatttttttcaggacctgcgaggtgctaccgccagatcaagaacaag

SEQ ID NO: 112676 - DNA, 846 bp, Setaria italica
  Intron number 1 from transcript Si022834m (locus Si022834m .g) derived from phytozome v7.0 (chr-ID scaffold_3; pos 19 391506 to 19392351)
gaggaggagtttaaggagggcggtcaacgcaactggtaagcaacgctctctgttttgtggagcagcgaatcccaccaaaaaaatctactgtctgttgaacacttgagctaggctttgacatttcacaactcagacagatcccttctctgtctgtgccaccatttccgtgtacgttctcagaataattgctgtagaaattctaagtatttagtgaatgatgctaggaaaaagaaagaatgttcagtgttcaactgagagatataaagatgcaaccacaaattggtgaactatataccagtttataataaattaacagttgattaagcactgctcaagattggccttaccacgtctagcaaaatgaaaggaaaaaaaggaacctaatgattggaaatgcgtctcacatggttaccatgtatatgccttctctcagttgtgtgcaggtctttattcagagttaccactttcatgctgctgtcagcttgcatacagtggaacagcaattgcggttccaaccaaagtcaaagtgttataaattcaagggaaattccctaaaattcttacatgtttaaatgctttgatgcaattacatcagattttattatgtgttacttaatctttttccttggaactatactcaaagtgataatagtctttgctcagttcaaaaaatatatacacagaagatgcccaaaaaatatcttgtggatgtcatcacacaccatcaaagatatatcacaattcacagcagctgctgttttgtcaacttaaattttctgttgtttcttattattcgctttacatcttacaggatccaagtactagcaaatagcacaattgccacta

SEQ ID NO: 112677 - DNA, 790 bp, Setaria italica
  Intron number 1 from transcript Si009502m (locus Si009502m .g) derived from phytozome v7.0 (chr-ID scaffold_7; pos 10 352799 to 10353588)
cgccgatcggggcccgggcggcgctgtgtgtgtccgtacgtttctccctgcttcgttctggcttttcttcatgttgcttgggggcggttaggtgggccggtgggtggatagggttgcgctcttcggtcaggggcccgggattggggtcgatggggttgtcctggggcgtggcggcgtgggggctgagatctgtgggggattttgggggtcggatctgagggtggtttttctgcggaattctttggctttacgacgggaattttgttgattcgagctcgctggggggttgggactaggatttcgttgtagaaacgccgtattttttttggggaaatggaatagaaatgagaattttatcgggaaatggatgcgcagagcgggattacttgcatggattggaattcggtagcattatgtttgcatatatttcgttgaaatgtctagtcaccacaaaatcaatagctattggctctgcgaaattgaccttcagtgaacaacatatccgacatttcttttctgcaataggcaataggtttagatactgctgaaaatgttctgtaggtccgtgcataacatgcagttctgtgtatggctgtcgtgttcatgaaaccttccttttaacaattacatgcttatcagcttatgctgttacaggctgactatgattttgagatgttccaaatgattagaatggttgctttgagatgttatgttgtgacattctatctgtgacttatgttgtttttatttgccagaatctagggaagaagtttgtagttctctccagttg

SEQ ID NO: 112678 - DNA, 724 bp, Setaria italica; identical to SEQ ID NO: 112445
  Intron number 2 from transcript Si013547m (locus Si013547m .g) derived from phytozome v7.0 (chr-ID scaffold_6; pos 28 219261 to 28219984)

SEQ ID NO: 112679 - DNA, 638 bp, Setaria italica
  Intron number 1 from transcript Si012785m (locus Si012785m .g) derived from phytozome v7.0 (chr-ID scaffold_7; pos 22 560483 to 22561120 reverse strand)
gcgtatgtgttctctaggttacgattttggtgcgaaggcgtactggaattattttacctttcatctatgggatgctaaattggcagttcaagaatgcttgctttactgaacttttgacctattcagaagtctgtgaaagcttaactttggttccacgatcagttttgctttgttttccagcatccatagtctcttctttccaaacaagctgccattgttttctcaaaagcagaaaatagtatagtatcattcatatctttcaaagttttcttcaaagcagaattgatatgatcaatctccaatctttccacagtaatctagtaaagcacaccccacatttcaaagccaaacgtccccctatgtccctatttggaagtcttatagtaatggatgttaatgttgtggaagctgggataggaatcttatgtgttttttcagttcttattatatacacttttgaaccatgtcctctaatgaactaaatgtgcatgacgtgttcactgttcatagatatgaacaagaacaactatgatcaactgaaaaaaggcactttgatccagaagctattagttatttacacatttttttcatgtattgtttcagggccaaacctcgccaaccacagggaaattattcag

SEQ ID NO: 112680 - DNA, 816 bp, Setaria italica
  Intron number 1 from transcript Si014246m (locus Si014246m .g) derived from phytozome v7.0 (chr-ID scaffold_6; pos 31 122712 to 31123527)
tcttcgagaagcacggctccgtcgtcggcgtggaggtaggcatctgcttcagtcccctccctctcttacctattcgaagtttttgcttcttgatacagctctgtaatagtagtagcagtaatcctgttagacggtggatgctgtcgaaagcagtggctgtcggattgaagtattagtactgttggagtagtttgcagttgctcaacttatgtagagacagaaagacgacatggcttgaagaagaaactgaaatgcatttggtgtgtaatgggcctcacgatccatttttgctgtgctcaagtaggtgcaatacaatagttgcaaggctttgaatctgaaggaaagctcattctatgcttgtgcgaatctggctgcaaagtacaaacatgacggctaatttagaattctgctactaaaatggggacatgaggaggttagtggaagcaatattcagagttattgtcaggttgttgcaaactccgtcggtatgcgcagagcttaattacttgcaaggtgcccctccctttattaactttggagctagttatattttgttaaaaaaatatttgggttagtcttatatgatttcaaagtcttgtatttggatccttgaataatggtttagtgctaccatattactttctactgctcatggaacaatgacttaactacttacgagaaagtattcttgttttcatggccggccgctcattaatccatttcacaatgggtgtttgctaaaattactcagctctatacaaagacagccatgaccaagttagtgattatttttcttacttgatttcctagctttca

SEQ ID NO: 112681 - DNA, 513 bp, Setaria italica
  Intron number 1 from transcript Si012523m (locus Si012523m .g) derived from phytozome v7.0 (chr-ID scaffold_7; pos 23 418797 to 23419309)
gatcctttgtccgggaaggcgagccggctggaacggtaaaagacacgcggtaggaactacggaggtgtggtcgatgcggcggcgctgcgcggtgtaccggcagggagcactttatgtgcactgtcaaggttccttcattatgaggtaagaatgacttctatgaagaccatgatgttttttttttggcgagtaaagtccatgatcttaaacacctccaatttgatccttttgttttcttttacacacatggcagcttagctagtttactgtcagcaaaatacatgatggttttattatgttatatgcttcgtgcatcacctttactagtctaattttgatgtttcagaataatattttattgtacatattatttttggtaaagtgttcggagttcgatgtggtactgaataaaaattatgcagatgaacatgcaattgatatggatggtatacataaaaaataacgtgctaattccttattcgttttacataaattaaggccttgtctcttgtt

SEQ ID NO: 112682 - DNA, 476 bp, Setaria italica
  Intron number 3 from transcript Si010557m (locus Si010557m .g) derived from phytozome v7.0 (chr-ID scaffold_7; pos 32 853414 to 32853889)
catatcgctgctaccctgcatctttcattgacaaggtttgtaaatcttcttcagatgaggtgccatattttctatttgaatatagtaatatatgttttccacttgatcatctacccagtttcaagggacatatgactaatgagatagttgcttgttatgagatactgtaatcaattcttttattccattctgtgtttcttttgtcctcctttgcatatgaatcatattccatatgttgggttctaatgcctattttcattcaattgttgaatgaggaacttatctttccttaatcaacatgacttttgaattgaatcaagtaaaatatatttaaactatcattaactgggccagtaaattctatcagcatctattgctagaataattacaacctttcaatataacatttttggtttgcttttttgcaatttattgtaatagatctctgttactgtttttgcagccacaacttgagg

SEQ ID NO: 112683 - DNA, 1025 bp, Setaria italica
  Intron number 1 from transcript Si010339m (locus Si010339m .g) derived from phytozome v7.0 (chr-ID scaffold_7; pos 24 227541 to 24228565)
ggcggcgctcgagttctcttctccccggcgaggcggtgagttgtcgcgtaacattcttggagctcccagagttccaggactcggctcccagctggcgtgttcccgcgattggttgcggtctgatcaggtcagattgctgtctggcctgtttttcggtggattgcagactagcagcataggttacctttatggcatcgctgacagcaattgatcggggggtggggggtggggggcttgacctactgattcctgaagcagtgaagctgcttttttccctaccctttttgaaatgcttggagctacagttttgctctaattagcaagggataccatgtttggtaattggtactgtatgccatttgaggcctgtgcttccttttctcataacttcttgtgttggtgcatgatcaactgtcatctgacagatatggataattttttttctcttctttgccagtttgatgtatccgtcctatttgcctgcctatgctgcaatgatttggtcctggtaaagtccgagtagttactgtttggactgtaccaattatagacctcgcacacttgcacagtatcggcagaaacgagatatttttctcactttccttatttactccctccgttccaaattaaacgacatttctaagttcgtagatattattatgcacctagacatacactatatctagatgcataataatatctatgaagtaaaaaagctaaaacgacctacaatttgcaacggagggagtagttgctttgagcctttgaacatgtagagcacctctagttgtattgtacaataaatgcatggtcgaggcttgtgccacgaaaatggaaaataagcatttttgtttcctaaccgaatgcatgtattgtgaatgctttgatgatataagcatatcaagtgccagctcatattgtactacagtagctaattatatttctcattcattccaagttgctaaactgaatgctttattgttttttcagttttgattgaacctactagaaggaaaggaggacaa

SEQ ID NO: 112684 - DNA, 854 bp, Setaria italica
  Intron number 2 from transcript Si021424m (locus Si021424m .g) derived from phytozome v7.0 (chr-ID scaffold_3; pos 38 06176 to 3807029)
ctgaggacgagaagctcatctacaacctgcgcagggtaaggaggctccaaatttctcccatttccccttccctcgtacatgttggtggtggtgccggccaaatgctcctgttgcagtagggatgcttggtcaatcccagggtaatccgcttctttgaatttctgtagttttgtgctgaaagttttgctggctaatgaattgtggagaggaatccggaatgtgtcgtgggatgttaagaaaagctatcatatcaggcttggctacatgtaaatgcgcatcccagaaaatagctaatatagttatattgtttggggttttgctctgtggaactgaaggcatcaaattagcagccttgggagataggaataaaatactgacatatgtgcctgtcaattgcaagttttgatttagacaaccacccctggtgcatgtgtacataagccttctatgattcccatggtttataggactttagaattttaaaaactgtggtaatgttcgttgtgagtatgccatagtatttgaagcccattgaagctttcatgatggtctaaatgaataaaggtgattgatagtgaacgtgcttgctttatttttaagcttgaagaaaaatcagtgtcaacaaataacacaaatatatgttttgtttcttctagtgattggatacttaatactcagttgctgagtttgcacgcctattaaaaagttacaatttccagatatatcgtgaaggtctagctaaccacagcgtagtctttggcctatttcttttttaatttagtaatgaagtcgttgacttaccataccagttttatacaggccaagaaaaaagttgctttgcttctacaaaagct

SEQ ID NO: 112685 - DNA, 842 bp, Setaria italica
  Intron number 1 from transcript Si011019m (locus Si011019m .g) derived from phytozome v7.0 (chr-ID scaffold_7; pos 32 419917 to 32420758 reverse strand)
ggcagaagtaagttcgcgtttccagttcttcagatcggattgcgcccttgagtgtttgatgcgaccggttgtttcagtagggccttttatttttccggtgtaaatctcgactagatccgtgattcttgtgcgaaatctgtttggtttgtttttgtggttccggtgggttaatggcacgcgcttagtatttgtacttgttgagtagattagtgaagctcgcaagtattcctgttacttgatcagtcaagttgtgttctcatagaaacggctgttcatttgctagactaggaggaagcgcgggctctgggtattagagcacccagatttcctttgttcgttcatattataatgaattggtattctgttccgagatgacatgctcatagtttgtaacaaccacttccatagctcattatctgtggtagaagtagaacaatgcatcaattggtttactgttggtagttggaaaatcttgttttggtcagggttaatgcttgtagaccttagaggtatgctttcccttatcaaaatggagtactaatggatttttaactttgtatttgattggcctcgttttgtttcatgaattagcgctactattgcacaatctgcctacagtgcatatgctcgttctgcatgcttcttgtaagcactgttgtttatgctctgaaacttgaggtggtccttgtgtctagtttgtgatatttgtttctttgcactgactatttttgttgtatccctaactttagtttattactatgttaactggttaattacaacctttggtgtgtttgaacctttggccagggcctgcgaggtgctatcgccagatcaagaacaag

SEQ ID NO: 112686 - DNA, 917 bp, Setaria italica
  Intron number 2 from transcript Si009835m (locus Si009835m .g) derived from phytozome v7.0 (chr-ID scaffold_7; pos 35 601607 to 35602523 reverse strand)
aaataccaagccttccagaggtatgacatataaaatgctggtaatggaagcgcttagtgcaagtcaaattccatgatgactggttgaagccctgaatcgtacaaaccagtgaacttaccaatgcttgctaaataaagattatgagcaaatagttaaatgctgcaaccttctacagccctgctttgcataggaagctttgctctattccactacaaaatttgtctccataataattgacctcaggcacccaatgcatagaagttgctttttctaaggctgggaggttctcaagttactcttcatactgtctctcttccctagattgtacaatttcaaaaatgtttcttttatatgaaatctgacattttatctccactagaccattgctttctgtacgttgtaatttgtgagctgcataaccttgtaggatggccttcttttattatctctggtcactaaggtttatgtcaatgtattttatactgtagctgccgaattatttgattatattacatcattacctgggcaaagtggactttccggctgttaaaatattcagatgtactattggtaccctatgcaaagttcatgcccgttcctttgctgccattgatttaacatgctattagacaattaaagatcatggcttccatcttagttggcgcaaatacaaaaaataaatgaaaaccacacttcatgactgattagggtaagagtatgtttttctattaaaatcatcaagtatagagtaatcaggcacatagcactgcacctgggttacaatattcctccgtaggttactcatgtttcttttccttccatctaaatcaaccatttgctacaatcctgatgttaaactgatctcttctctcctatgcttgtgcatgcagcacatctggcaacatatacattccctt

SEQ ID NO: 112687 - DNA, 572 bp, Setaria italica
  Intron number 1 from transcript Si024683m (locus Si024683m .g) derived from phytozome v7.0 (chr-ID scaffold_3; pos 47 670442 to 47671013)
agagtatgttcaagtagagcacaactaacacgggtgcccatgcatatgtacttgaattctttgatgggattgttgatcttgcctttgctgctaattttcttgaatttacgttgttcacgatttgtcggtgcttaaaaactgttcttgatgtttttttcccaaaaaaaggttaacaaatgtacttttgatatttctaactatatttttctactttgagtttctccggcgatgatcgaattgctaatgataattcagggatcaagcttttattttcttcgagctacgtctatgtttagggatttaaagggcaattttgtagcataagttagctcttctaataatattttcttacatttctgttccgagaaggtttcatcgcgattgatctttaattatgtacataccttccaactcattcgtaataaaatatactactatgcaattaacacatggtttatgcaagctgagtttattctatttgattcttcctctatgcattctcttggtactgaaacttccttgatttgtttttgccgcatcttctaggagcaacaccaaagtcagtattggaa

SEQ ID NO: 112688 - DNA, 787 bp, Setaria italica
  Intron number 3 from transcript Si011853m (locus Si011853m .g) derived from phytozome v7.0 (chr-ID scaffold_7; pos 28 999566 to 29000352 reverse strand)
catccgccgcggcttcgtctaccaccagcctgcccgtaagcgctctgccccttcctccgccttccttcctatcatcctatgcacggtttcgcattgcgcagcgatggcgtcggagtccatgccctcgatctggttgtttattcggatcgagggattcaggtgtcctcgaactcctttgttaatccggtccggtcatttgttaatctcatcccggattcgggcccaaaaagaatccagaactctagatttgctcatccctatagcttagcctcatgttctaatggggttttttattggtctgatgggattagataattagatgctatgcttggccccgcccaaaggaggtggttagcttattgatgattggtccttttcttggggattatttctgtctggttgttgggagcctaaccacgctcccactgctgctgcgagatgaagccatcctgcatcagttggaccccaaaagaatacagttccaaccatatcgctttcagatgctttcttcatagttaattagactcagtagatctacttgtgatgcactgtaacttctcgacggcgacgcgttgctttttgattctttgcgtctgaatttattggaaaagtacccattccggggtcgctccccggcttccaaatacgcatcgacacagacgcgttcgtacgcacgtacacaatatattgcgcgtcgcgccagccattgactggggtttcttctgctcactttgcgtgtggtgttcttgcagttgggtacgggccttacttcggcaagaaggttgac

SEQ ID NO: 112689 - DNA, 822 bp, Setaria italica
  Intron number 1 from transcript Si022145m (locus Si022145m .g) derived from phytozome v7.0 (chr-ID scaffold_3; pos 47 761281 to 47762102 reverse strand)
ccctcgccgcttttcctctggcggtttaaggtacctcggcatctcaacaaccctttcgattctagtttagttgccaaccccccctgtcctgctgtgaaatgaaatgcaatgagttacccatcccacatggactctgatttcatgtcaagtgatcttcgccaaatttacctcctgatgcaccattatattgtaaagcaaccgcactagtgtgcaaggagttactctgtttagtcgtcatcttacatgcaggggactaggggagtaggtctgccctgttctgcattatcttaaagtgccgcacatggttacgggacagttagttgttaagcatgttttgaggtcccagttgggagagttggtgcggagggttcagtttgagtttgcaagcatctattcataactgctattaaccacaactcagaactcacattgcaatgacaacaagcatcgacaattgagaagttaccagttgatgtataaacaaatcttttactgaaactcaacctacacatctgattctcctgggaaatggctgaaaatctagaaatgaatgatacaatgggcttttagcatttccatcttccattataagcttccttttctgttctcctatgacatgctgtttgattgtctctgcgtggcaaaagtctataaagctaatagttaaatttttctttgcccctacattattacgcataagctggttccagtgaatattggaaagctggttccagtgaatattacaaatgtgtaccgtattcgaatcatgctttcttagacttctgacagacctatcctttttcaggccatattgttcctcct

SEQ ID NO: 112690 - DNA, 471 bp, Setaria italica
  Intron number 1 from transcript Si021516m (locus Si021516m .g) derived from phytozome v7.0 (chr-ID scaffold_3; pos 68 4058 to 684528 reverse strand)
tcatcatcgagcgctccatccaccgactcagcaatgtgagtgcccaattcaaaagcaggcagatagatgcagtctgtgctcctcatgattacctgcttattatgcttggtacctttgtgttgtcttattgtgtgtctgtctatgtgcacttcttgagtttggaaaaataaatagttagtttatgattcaagagttacattgcagtaagatgtgatcaagtactcctgtttggagcaattaccctttttccccaaagagtttttgagcaaaacatgggtgggaacttctgttggtagcgattcttctccaaagcaaaattcttttcccaccagaagttcagctaaacagtggattgctctgctgaaaacttgatccgattctcattttcttcagcttcctgccccaactaactcaagataatcccgtaccttttcagtggttgaagaaaacccaccggaatccactttacaa

SEQ ID NO: 112691 - DNA, 717 bp, Setaria italica
  Intron number 3 from transcript Si020979m (locus Si020979m .g) derived from phytozome v7.0 (chr-ID scaffold_3; pos 79 03751 to 7904467)
taatccattctgctaggagtgttcagaccatcaaggtgaatctacaaataaaaccatctgtgtgcagttccaaatgcatcgattgctatatgctctctccgtccatcaatgcaggttgtattttttaggacaaagtcttcataggtggattctagcctttaatttctcttatacataatcataaatttcctttgaatatgaatctattggtgcaacatttgtacactgaacgcatgcataatttgacaaattgttggccaaacattccaattttgacctttttcaaatcaaaatatgccttacattgatggatggatggagtactagttagctgggagtttttccacggctaaagtgttttgttaggaagaataaaaaagttcccctgtttcccttactatcagtttcactaactgtcttaccgtgtttaatgaaattaatgagatgtaatagtatatggataaactttttttttctacgtgtgttttaggataaacataagtcgatgaaaagttgtccatggtacttgttggtcgtggtgcacaaataaaacatggaagtgcatggaataattttgtctattaggtccttgttcctgcagatacctttaaactccagaattattgaacctaataatttactccccacaattctggtatgtgcttattttctttctttccagagggagcgagcttttctgtcaacagctgatcgtgc

SEQ ID NO: 112692 - DNA, 755 bp, Setaria italica
  Intron number 1 from transcript Si023306m (locus Si023306m .g) derived from phytozome v7.0 (chr-ID scaffold_3; pos 73 3467 to 734221 reverse strand)
tgcaccgggtaaaatgattttgttgctaattttttatatatagatatggtttgtaacttcatagctaatttgatttttggcaaaaataaatcatctatcagatttgcaatgttccagcccaagaaaaaattattccaggtagaggaattaaatgttccagatagaggaataaaatatttgttctatcactttctttgccttgagaacatggagagggtgggtgaatacaaactgttggatttcaatccaatagttacaaacgttaatgatttgggggtcgaaaatctgttgacacataaatggattattctttggatttattttagtattcatagcaatttgtttctaatacagaaaactaagttaagatatgagcatggttcatatccctagcttgaatagttagggaaaaattatgtagcaccagacactggtgttgcaggaaaaaatcgtgtagtactagacactggttttaaagcgtgatcatgattttcgcaacctaattttaatttgcacctttagatgtaaaatcttagaatttttagaagtgatgatatcaggttctaaaactactacaaactttgactgtttgttgtttcatataggtgattgtttaccaatatattgttttcttgacatttttttttgaaaacttgttttcttgacatttgacgttataacataagtcacaggctggttcaactcatttgattgccctatcttttcagtgccagagttttattggtgggcctgtc

SEQ ID NO: 112693 - DNA, 543 bp, Setaria italica
  Intron number 2 from transcript Si009276m (locus Si009276m .g) derived from phytozome v7.0 (chr-ID scaffold_7; pos 43 3268 to 433810 reverse strand)
gatacttgcatatacaggaattgtacgagcataagcgatcaccttgtcaatcaattgcttcttttacattccacactaacccttctaatttgttttgagttgttttttgatgaatgactaaacttggccttggttttgatacaaatttgtttaccaccttagcttaataggccaggtttgcacctggatttgtttccactttttgaaagaaaacttgataatagcatctactctccctctcttttccaacatgcgttgcattcttcctgttttggcattgttggaaactacactgtatttggaatattggaggcttcgactaaaaggatccagaatgtgtttacatagtactgggggccttgtcccttctagtatctctggagttaattattttgctagtggatctgattgctgcaacacttgtttcacttgatgacttttttcccattagccagtagtttccatggctattaaagtatttacatctataacgtaaatgtgattgcagacagctcctagcgttgaatttatcaggaactttgg

SEQ ID NO: 112694 - DNA, 630 bp, Setaria italica
  Intron number 1 from transcript Si021426m (locus Si021426m .g) derived from phytozome v7.0 (chr-ID scaffold_3; pos 19 181309 to 19181938 reverse strand)
ctggtttgggcaaggcaaaagctggcgctgccaaggtttgaggaattcttgcgcttcttgtttgatctacgtttaacttgaatcaggcagcaataacatcgcatgttttgtaaagtaatagttgttccaagtgattcttagtattttgctagatttcagtgatataggtacagtgtccctacggtacatagcaaccaaataattctaatcatgatactgttatatattgcggacataactcactatttgttcagtatctatattcttctctatcatttcaatttggaatttttcttgtagtgatcatgctattctgtatgtcttattaaggtaatatgcttattgagtgcttattggcatcctggcaaaagaaatttagtcattaatgttctgtaaaacaacttatagttaaatggtttaccatgcgctagctcactcgtctatgctattatattttggcagctacatgcactccaattatccttttctatgacccgatggttctatacctcagtctaggttgaatgctgtgtttatggtggaaattgttagataggcttctctgccattcatatttgtttttttactgaaacaggtttcagaagtgagctcaattttaggtagagctag

SEQ ID NO: 112695 - DNA, 610 bp, Setaria italica
  Intron number 2 from transcript Si022045m (locus Si022045m .g) derived from phytozome v7.0 (chr-ID scaffold_3; pos 23 285730 to 23286339 reverse strand)
atttgctgctgcaacaaggtataattccagaaatccctatctcattatggttcatgatctgaaatgcccttaattacacatgccagtagtccatttttattcatttgcactaaattgtactccttcgttccaaaagcattgctagtgatggggtatgcaagtttggtattgaatttgtcagtgcattaagtgcctatttttgaaccagctgtttcctacatatttatgtttgatagtagcagttcaccttcattgaattgcattttctgatatatgtgcagaaatgttttttctgtaattttgttttaagtttctctctcaactgctttgagtagttttatgaagtttgaaatgtagcatacagaatgagaacacaagttgtgttatttaaccatcttcctatgattggtattgttaattaatgtgctttgttagtatttagtaataatgtgctttgttagaatttagctacaactttattccctaaactagtgccgtgtgccatttaacattaattgatactgttcttgtgtatatacagtttgtctgctgttcatgcgatctcttcagttaagctaataatgatgttttattgataatctgttcgtag

SEQ ID NO: 112696 - DNA, 1030 bp, Setaria italica
  Intron number 2 from transcript Si021783m (locus Si021783m .g) derived from phytozome v7.0 (chr-ID scaffold_3; pos 57 81601 to 5782630 reverse strand)
cacgctggagcgggtgcttggggacgaatcagtcggtgagatagcctcttgctctactctaatactctctgtgtgtggttgtattgagctctgcaacgccctaggaatgggggaattccaattcttagatgtacatttggctataataattgatttagcatctcagtaaattgatacatgcgcttttagacaattatatgctgatggcaggcttactttgctccaaagactatatgcccctctcattccggtcttgactcttgagtagatatcctgaacacgggtctgttgtatctctctacattcagaggcatgcttagaataatcaaatataagagagactgggttagatttttagggcttccccccaaaatgttggctgctcatctgattgttatgttttttattacttaacattctagtttgcagccgctggtattttacatttatcatatttccaaaaaaataggtttgcatttttttaccttgacttggaagctgattagaaatgcaaaacggctttagctccttttgacctgtttcttctttcatagatcttttcatgacattgcatttgttatctgccactttcactaatgttttgttgtgtagtcagggttgcagaaaattgatgtgatagttctgtttcatctgtattaatgcattgtgtgctctttgtatattttgctgtgtgatatgcaaatccactactgattctggcttggcaattcttcttggctttttatgttcatgatgtttctctatttaacctgggtatccctaaaagggaacagctacttagaaagggtaacaattgctcacccttttaccacagtgggggcctcccccgctgtacagtttttttttaaaacaattactcacccacggcattacattatagtaatgctgtttttgcacagacatgaagatataagtaattaatctatatgttatagatatgcttttcagtttgttgatacttctgcatcatgcagctgagttgttgacaaacaacaagttgtctgagcta

SEQ ID NO: 112697 - DNA, 721 bp, Setaria italica
  Intron number 1 from transcript Si023285m (locus Si023285m .g) derived from phytozome v7.0 (chr-ID scaffold_3; pos 12 284248 to 12284968 reverse strand)
gcacccgcgcttcgcaagtaagcttttgctacataacctgttatcttaccgttcgcttacatagatcatacagatttgtgatttcttttgtttatgtcattctgagcctgaaattcgaacagctcttgttaggattctagttagatctcgacagggtggctaattttaggctgcatgtgtagtatgtttgcttccatcatctgcctgactgcctttgctgccgtgcatttcatttgatcgcatgcacgttgtcatgtttcttaatgttgtaacacactattgggcaatttggttgcggggtaaaaaaagagaaacgtgtagcagtttacagtttagcatccacctgtgaaataagaagcatgcccttccgtcaattctcacataagaaataagatgtaaaaatgccttaagaattcagtgagcaatgatcattattcctgctgaattcttcagacctgtttcctcttgaatcatcattatttgtgtctatgcgcttgcaaagcttggaaggcttatgttcgcatttggcaaaatcactgatatctagagtgtcttattagacttaagagatgtaaatgcagagaaattcctcatggattctgaatgaatcaaaatctttgatgttgaggccatttccacttacagggtccctgcttcttaccagcttgtggttcctaacattgctaacattttcatctttctttgttctcctgcagagtct

SEQ ID NO: 112698 - DNA, 1018 bp, Setaria italica
  Intron number 1 from transcript Si024332m (locus Si024332m .g) derived from phytozome v7.0 (chr-ID scaffold_3; pos 49 514119 to 49515136 reverse strand)
aaaagaagtttggaaaaggtatgatttttgtaagactcagaaaactaaatgtgtagttgtagacaaagaaagaattagaaaaaaaattcattaatatgggttgttgccctttttttgggttcctgactcctgagctcgtgcataagcgatatgataagacctaaattctaaccatagattacaaaatggaaaaatgcctgtcctcagctggcacaaactgcctcccagttgtcattaccactttcacacgaccaagtggcaccatcctcaaaattctgattgtggaactggtattatggaccagaattggctggttatacttatactccgctggcacaaagcaacaaactgcctcccagttgccattaccacttttatacggaccaagtggcaccacctgaaaattctgattgtggggctggtattatggaccacaataaatttatttgatggaaacatagaattattctttaattcatataatttaaatgcaaaagttttggatttcgaatctccaatttatcagtaatgaatctgaaatcctaatagtcatatgcttagaatttaaatgcaaaacttttgggctgatgtcttttttaccagtctaggttggtatatctggtaaaaagacatgaagttaaaatgcaaaactttttacttgattttggcttattcgtagtttaacagtatgttctgttggacagtatgtatcttgtgatgtggcacacaggaagctgctctctgaaccttaataatgcatctagtgtttgttgtaatctagaatgaattttgctacataaacttggccctactgtgcatgtttgagtcttcttagactgctttattcttaatatagtgatgtgcagttctcttgcacgtttggaaaaaaagaagtttgttacatggttttatacatctatcttttttcgaaccctgtttgtctgctatgcacacattcaaataatatgatttctgcatttcagggcctagggagctcactggtgctgttgatttaatc

SEQ ID NO: 112699 - DNA, 855 bp, Setaria italica
  Intron number 1 from transcript Si024641m (locus Si024641m .g) derived from phytozome v7.0 (chr-ID scaffold_3; pos 49 148539 to 49149393)
agtgagcagttcacttgcgatcgtctgttttgcctgtatgccagctttcattacatttggcaactgcctaggatagaaagtttccatgatttcatctattcttggtacctggtacacatgtacttcatgtttgcttctaaatttgacctgtccctatatcctcggatagcattttctaggattccaaaggtcatgatgtgctcttcttcattggtcatagtatagcacatttacattttctccacggtttgattcaatgaagtagtatagctactgtaagattgttggtaccttcttcatacacacctggagtagagtagttgctttctgttatttgacaggcacctgatataagatccaagcctttaatatgtgccagagaatattgattttttatgataagtatttttttccctctcattccgagctggtctgaacccccagaaacagccataaccttctgaattatgcatttgctatgcaatcaaacaatgatttccaaaaacaagatactgttagttgcttaataaacttgatcctttttatacttgcacccgtgtagtgtttccaatcaaacaccgtaaattacaatgtcatgggtacagggactcatgaatgatgttcttctcatatgcactaccatttacttgtgttgattcgtttcttttcttagtatccaatattttagttatccgtaaacagattcttggctctagcaacttgaatgttggatctatggcagctttacttttattttgggatagaaggagccaaaggaccattcctgagagcttctgtgttttgtttcatttggtttcaggtaaaggggagaaaggttcagaacactctgccact

SEQ ID NO: 112700 - DNA, 613 bp, Setaria italica
  Intron number 1 from transcript Si025167m (locus Si025167m .g) derived from phytozome v7.0 (chr-ID scaffold_3; pos 20 135093 to 20135705 reverse strand)
ccagcttggtataaattactacgaagaagcaacaagttctaattaaaaaaaaagaaaaaagtccattttactcctctcacctatccactttgtccgcttaatcccctgagcaaagttttggctcacttaacccccttgaactatttttttgtccaatctacccctaattagatttctcttttttgtttctttgtgtaggagttgaattttgagttccaattttgtgagcatatacaaaacatgatgccttatgttaaaaaaattataatacgaatttttcatagttattttcataggttaggaatatttaatacaaaatcgattttagatagacaaaactgtatgaaaagtaatcatggaaaatttctaatgtattttttctgatatacagcatcatgttataagtcaactgacaaatctaaaattaaaattcaatttgtacgcgaagagataaaaaagagaaatctaattagaggtagattggaccaaatgaaatagtttgggggagtaaagtgagcctaaattttgcttagcggttaagtggataaagtaaataggtgaggggagtaaaatggacttttttcaataaaaaaggaaaagaaatacagtaaat

SEQ ID NO: 112701 - DNA, 851 bp, Setaria italica
  Intron number 3 from transcript Si023406m (locus Si023406m .g) derived from phytozome v7.0 (chr-ID scaffold_3; pos 53 05608 to 5306458 reverse strand)
agctacgttcgcaggtggccctactgcagtcaaaggtaaggatgtctgttggaacattttgaatcggtcctaatcgtgccatctcttttatccggagcagtttcagaaataaggcagactaacatatgcacaccataattctcaaattttgattaatatctacatgtacatgtcatccgaaacctttacatccacctttttttaagatgaaacaaatagtgtagatatctgaggagtatatagagaaggtttatatgcatgaaatggagaaagagaatgacactcctgcatgtttgggtaagggagaaagagagtagaggtcccaatcgagctgaatgagggcaatttagttaataggcaggggccaataaaaacaagttgcttgtctttcaccctatggacatttaggacacatatttatctgtgcctgccatattgttgtagatttatcgacttcagtgtagatcataccagtgaaagcatgtcctcatgtcttctcctgatatcatggggccacaaggtatgacatatgggagcttctgctctcattgtcctgcctatgtgctgaagcatgatggttatgaaatgttataattagtccggcagttgagcttcatatgaataactgatgaattgttttgctctgaaggtgtcattatgtcaatatgtgaagtataagttgtgatatctggtttcaactcatcagataaataggcacaacatcttcccttcaacaataaaattaattgagtgtgcgagtattgatgaccatgctttaatatgtagtattattttctgtgttgtgtccttctagcagtttgaaaaatcttttcatatttggcagttacatc

SEQ ID NO: 112702 - DNA, 484 bp, Setaria italica
  Intron number 3 from transcript Si010338m (locus Si010338m .g) derived from phytozome v7.0 (chr-ID scaffold_7; pos 19 926849 to 19927332 reverse strand)
tatttcttatatctgctttgctctcgcgcggattggtatgtgcttggtgaacgaactaatggctaatgcatgttgataagagtaaatcatggttccatattatggttaaagttgctaatggagtagtattacaccagaacaacaaatgaattgctagagctgatgttttggaatttatttaataatatgagttcaaaatatcattatctacttggtgggtgcttttgggattctttttgggtgttatatgcagttcataccttctggatggctattggctagttattcatttttgtagagaaagatgaaacaaatggttccaagttatgcttccctcctgactccttagtttcagtagaaaacaaagtttgtcatttgtttaagtgtcaactgacttgtttctcaaagcatgtcaacactttcttcattttcttaccatgcatagttgttctcctaatacaggaatatatccaggcagacaggg

SEQ ID NO: 112703 - DNA, 794 bp, Setaria italica
  Intron number 2 from transcript Si023909m (locus Si023909m .g) derived from phytozome v7.0 (chr-ID scaffold_3; pos 14 031166 to 14031959 reverse strand)
gaaggccaacaagctgaagcagtctctccctcctggtatgtatcgcactatgtatttggcattggctaaacccattttgatctgcatggtgtgtatctagatgtctccagggttagtggaattgacattttgtttcatggcttacacaagtgaccttttcacagaatagcaagccattctgtcagatttctgacttctgaccatgttactggttttgttgcgcatgtagtttattgtgaacatcatttgagaaccattagattttacatgcgcgcatcatatgaactttgcacgagctgtttaatttctattattttacgtgctaattgactctggttgttgctcaggtcttttagctgaaagctcctctgttctttgcctcaatagtcataactcagaagacccccttgcaatatcattggttcctgtgaatgtcagcttactttgttggagtgatgtaggaattcatgtcactactactgattatgcctttgtgctccatgattgatcatgcccctttaaacagagtgtttagttaaatcttaggttgtacatgctttctttgattttgttctacccgacaggccctctgctaagaagtattagacaaggattagatcagaaatttggttctattgtgcgcatcagtgcatctgcctccatgtatccccatttttattttgtttcaagttgaaacatggatgtgaaatttcccggccactttgcaagatactgattttttaactcttcttttggcaggcttgagcgtgcaggaggtttaagccttggaaatc

SEQ ID NO: 112704 - DNA, 414 bp, Setaria italica
  Intron number 1 from transcript Si013671m (locus Si013671m .g) derived from phytozome v7.0 (chr-ID scaffold_6; pos 75 19784 to 7520197 reverse strand)
tcaggaaactggactccgagtcttttgtgttcaaggtttggatcctcttcagtctgctgcctttagctttcttattagataaacacatgcggtgaatgtccatgtgctgtttcttttgggattcgctgttatgttcttgttttacacactggatctctagattataacttaatagatcgacttttatcatgatcactcccttctgaacattaacctgcttaagcataaccctacacagttatgcaatgggtgctatgagcaagaggcgaatcaataactagtaaattgagaacgaaacacaccttcattgtcatcaatcatcatccctttgatcttgttggtgtgacttttcagtatcctcatgttgagttaatgcttctgcttctaatttgctgtcaaacactttgagttagg

SEQ ID NO: 112705 - DNA, 586 bp, Setaria italica
  Intron number 1 from transcript Si009995m (locus Si009995m .g) derived from phytozome v7.0 (chr-ID scaffold_7; pos 22 470615 to 22471200)
tcgtcgacggcatcgttgcgcgcgggtacacgcaggtgagcgcagcgcgcacgactttcagactttgacacagacggtggtcagaaactctcaattgcagcttccgtgtcacctagtatttacttgtgtctatccatctacctctagactgcaaggtcgcaatgtgctgtactgaattggtgatgcgaggatttattttctaaaaaatatgctttaaataatgtaagatctcaatcaaactggttaagacttctgcactctccttgagtgttaaatcatacctcatgaccattataaaaagtgctttgagggcctttttatgtttcatatgtgttagatattcacataatcacattactcagggtatgacagaaaagcctaacgagtcatagaacgttattgtcagttaggggcaagaaagaagtagatgaccaattgttgcatttttttaacctcaataggatgaaaccatgaaggtatgctgacaatcgacgtgctagttgtgtaattccttccatatatccttgccactaaaacattttcaaatttacatgttctttgctgaaggtatacgcaattggcggag

SEQ ID NO: 112706 - DNA, 692 bp, Setaria italica
  Intron number 1 from transcript Si024538m (locus Si024538m .g) derived from phytozome v7.0 (chr-ID scaffold_3; pos 29 21737 to 2922428)
aagcgcctcccagggaatctggtaagaataataagatgctcctgccactgcttgaaaacaaataaggaattagtttgttttgtactattccaactgatagcataaactacgttgattggcagcagtgtcaattaacaggccaaacaatcataagtagcaaattaaatacaatgtattagtgaagatccctcaatacgtcctcttctgcacagcagagtttttgaagttggatgccagtggttaaataatacactgtaccaagttcagtgatttcttgcagatgccttttaggcctccaaataccgaccattcagagcatctgtgtttaaggcaaaccacacccctgtgccacagtattcccttctggatatatgtgtatacagtatactcctcagaaagtctggatcgaatctttgtagcaattttcttatgcactgtctcctgccagtgtcacatgcattttggtgttatacttgcccctgcaatttatgtctagttctaaactgtcattgatcaaaggaagtgactttcactaatataacatgaatcattgcatcccattcaaatttggtcagcaaatgacaacaacaactagatcaactaaataagtagaaaatagaaaatctgtctaatgtatgctacaactcacctttgcagggtctatcaagccatcaatagtctcttcaaagcac

SEQ ID NO: 112707 - DNA, 555 bp, Setaria italica
  Intron number 2 from transcript Si021079m (locus Si021079m .g) derived from phytozome v7.0 (chr-ID scaffold_3; pos 53 7644 to 538198 reverse strand)
tccatcaagccttgagttgacttcttcttttcttggtaaggaaaccctcgcttgcttgggcagattgttcatttcactggcgcataatattttcttttgctgtcgctcctcaaatccaaatatttgatcctaggattgacacccacacacctatgacctatccactcagattagtgctggtatgtttgctgagttgtgtagtaataatatcgatttgtttcccaaaaataatgttaaggtgttcaactcaacacttccctggggattttgtcttcatttgacgtggactgtttacaagttttaggacatgatctaaaaatgattgtatcatttagtatatatggtaaatataattctgatttaagctatgtctttcaatatagttggtttttttttccaatttacatatcctgtttgctttttgttgctgtttgtgttagcctgctactattttttttaaagtagcttttcgtcgattcttatttccagataattctaacaacttaatctctcttgtgcagtgcagtatagtgaactacaacatcagcagaggca

SEQ ID NO: 112708 - DNA, 998 bp, Setaria italica
  Intron number 1 from transcript Si021079m (locus Si021079m .g) derived from phytozome v7.0 (chr-ID scaffold_3; pos 53 8273 to 539270 reverse strand)
ggggccggccggatctgggagcgccgcgtccacaggtgaccagatctgggcctcctttgttttttttttgtttaccctcctcccccaggtttggtttcgattcagcgttctgcgctgcgatgcctcctcttagggattctaggatcctttggtgcatgcacaatcctataggttcttcatgtttgcgtctcgagttttactagttcctttttttctctctcgtgtgtttctggaatcgtactaggttcttcgtgcgtgtgttttggaaagtctagtttcatgggtgtttatcatgggtgatgggtgtttgtttttcggctccccaacaactccagttgcgtcgctttccaacgcccgagttcagcgctgcggggcgacgtcaaaaagcgcacagattcttttccgccggtacaactttttcgatatgtatctatctcctttcgatatgtacaactagtcgcgccaacgtgctcagattcaatcaatggattatatgcgtcagtcctatgatatgatacccgcgctgtatctgtaaagtctgatgcgattttgccccagataagtccagaaagcgaaatataaataatctgtagcctgttcgttcataatctatagcctgcttttttttgttttgtttttttttttggttgggattgtcgacgtcagctcttatctaccaaacatcggtgtcaccgaccagtgcttagccgatcgtcaccaaacttttggtcccagaatcaggtgtgaaagggattttaatcttagcttgatttgatgtggactgctacaggttttaggacatgatcgagcgactgttttttcccttcttatttaagataagaaagcggattctatcatttgttttgataactggtttaataatttctccttctcaagtagccacttcgtggatccatatatctgcaggcattgctaacagtacactattttctttctctgcagtgcagtgtagtggactacagtatcagctgcaacac

SEQ ID NO: 112709 - DNA, 735 bp, Setaria italica
  Intron number 2 from transcript Si009968m (locus Si009968m .g) derived from phytozome v7.0 (chr-ID scaffold_7; pos 24 292282 to 24293016)
attcttgaagatcaggtatgctttcaagtgataacaagtgcagatttctccccatagattgtgcttgttctgcttgtctagaaattcgtttcctttactttcacttactcttaggatcatgtgttcagtaacctttagtttttcttttggtcataacagccttgactgaaagaagttgttaaagcccaccagcgattgcaaactattctcttgaggataatatttatgttcatctacaagactgctattaggaaatattttttaattatttttccaacatggtatttccaggaaactctaggttactcttctaaaacatgaacagaaaaggtgacattcatcttgctaatcttgtacaagtttgagatctgttgaaatctagcattgatctgaatattgtgttagtcgaattgtacggctgttttgcttatgtgctgatatgttgaagttaccatttagaatcttaaaatggaacatgcattgtgaaacagtcatagttgtggcaattgttatagtttggaatctggagcaggcttgacaagttgacatctcacattctcgggttcgcaggactttgataattttcagagccaatataggttttatctatgttatgaaattgtgctcccagcgatgtaacctttaccgattatctatgatgcagtgatagatatttatttgaagtttctcttatagtgatatgatatatagtattctgaaggtgtcgccaaaagc

SEQ ID NO: 112710 - DNA, 1044 bp, Setaria italica
  Intron number 1 from transcript Si021543m (locus Si021543m .g) derived from phytozome v7.0 (chr-ID scaffold_3; pos 39 344522 to 39345565 reverse strand)
tcctcgcgtcccacccgctctcccgcgatatccacgtgagcgtccccttccgaccgaaccctcttccctcttgttctttcgtgattcgcggtccgaatctaatcccctttgagctaaccctagacacgggaacacctggcgcttaattttttttcttgttcgttccgccgcatgcttggttgggattgggcgggttgaaatcgctaacggcttcgatcgatttccggagatccattatgccctgtttggttccatggtaaaccgatctgtctgctggagtggtgttgatatatgcaacggcctgtcactagtctttggcttcgtttgattagaatattattcgttttgtttgatatatgaatccgcgaatatggtgattgggaaaagttttcaggggttgtgaataaaaaaatggaagttcgttttagttagcaaggataggtaaataaagtgaaatcaacaaggccttcagtagggtttcctatatcattggagatgcttattggataaacagagtaggctcccgctcccctattgtgtttatgctggccacttctcttttaggagaagggagtgatctgctgcttatatatatcttgtattgtttttttctggttttgctccaacttctgcttggagtctctagcatgaccattgatcattgccgttctatactgtgctcacttaaggaatggatgtgcaggtacaatgatcaattagttacttcgttaggtgtatataggttttactggactgtcatgagcgtttgttccatataaatttcaaagttcggctaggatgtagatagcaataacaggacacagattagtggcttctttcatgtgacatgtgtcttgtgctataatataaggtggtgaaagtgccctttatcttcatttaagtgaaactcttttgtttaaatatttgtctgcggcatttcctattggtcaattcatttaaaattctgctcactgattagtgatttcctatttgctgaatatatggtttgaatgttgcagatagagtctctttcattaacattcc

SEQ ID NO: 112711 - DNA, 843 bp, Setaria italica
  Intron number 1 from transcript Si013353m (locus Si013353m .g) derived from phytozome v7.0 (chr-ID scaffold_6; pos 75 00345 to 7501187 reverse strand)
acccgccgagctcggccgactcgccagcctccaaggtgacctcttccatcgattgccttgggtcttggttgtttgtgtttcatgtctggggcgagatagcttaacggtataatttggagtgatttgtttcaaatgctttctgagtaatttcgagttccatttgtgcatccatgcgcctcaatggttaattaattcatctcaggtgcttcttctcatgtgtaaaactggtggcaatttgaattttgaatttgggttagtaaacaaacaaaatcccctgtttttaggaaacgaaatgggaagccggaattggttttgtcctttctcattcttgtgcttcctttgtcgtgagtgctgattgcctgcctagaggctacatgaactcaggacgtcgacacatgaatgaaacgacacaaaggtttttttttctaccagtacattttggcctttgtggatttgatggtacggctactttgatgtactctactatgtatcatgatatgccgtctttattctttgccttttgtaccgaggcttaaagttggttactgacacaaaagaagcctgcattggattctgctcaaggaattccgttagtgtgttgaatttatttcatcagtgttctgtaatcacactgctcctacagccttcctcctgttgttccacagctcataattgacattacttctctgtctgcttcaggatcaaactagcctgcccaaaattgagtagatcaacctacccaaagttaatttgcaagtgcccacctctaatggtagatagcttaaaaagggttgctttctttgtgcagtactgcagctcggctacaaccagttgtcggggagc

SEQ ID NO: 112712 - DNA, 687 bp, Setaria italica
  Intron number 4 from transcript Si009768m (locus Si009768m .g) derived from phytozome v7.0 (chr-ID scaffold_7; pos 31 499655 to 31500341 reverse strand)
ccctgtttgcataggtgatcttaacttttcttatttatgttgctttgggggctctgcaatacaatcgcaatcatttgtaaatgtcaccatagtgtcacatttgaattcctgttgtgatctctgatgaagagatttattggatgtctccaaagagacctctgatgaagaaatttaggcacttctgttctgtgcttggaaacttcatctctgaggttgggaatctatttctatttccttgagacttaactaataactgttttcctgaagtgtttccaatgcctatcaattttgatgaactgctttagagctgccttcagggtgtagctttctaacctagtaggatctatcaaattacgcatcgaagttttttatttcagataaagtaaacttgatttatgtcttctttgtgttgttcaaccaacattacatacatacacgtggtactcaacattatgtacacacgtggcacttcataaatagatactaaatttctcattttcccgggcatagtttgaactttaaatgcctttctatttgatgcaacacttcatttgttattttcacttctcatattttgctggttgttacctgtcttgtttagggcattgcatgcctaactattctctgccatcttcatgtgttaattgatcagaaagattggaccaagacatcagtgggattttggca

SEQ ID NO: 112713 - DNA, 620 bp, Setaria italica
  Intron number 2 from transcript Si010524m (locus Si010524m .g) derived from phytozome v7.0 (chr-ID scaffold_7; pos 20 650917 to 20651536 reverse strand)
ctattgggcgattgcggagtccaaaggctggtttggtgagttttgatctatttggtcatttcttctttcatgtgctttggtaagatcggtggcattatatatgtttgaaaatgtttagtctgagtcttcaattggtaatcatatcacccttaacttagagcctgtcaaggtccaatggtctatttggccatgatgtgaaattacttctgaccagtgagcactgagttgctctaatcaaatgccatgcttgtgttagtgcagcatatttgttgaagcatgaattgattttggagttgagagtgtagagttaaaatgatgattttaagcctcatattttctattggatgccattgcttagtactgcatgaaaagttgaattgtctgtttatgtggagaagtataatgcatggatttattatttcaaaaaataatgcatggatttatatctgagcatggatagtcagaatatgaacaagctaatgctccctgaaattgatacattttactttctcatctgtcaccttagtgtattattagcacccttttgttcgtgcccccaagtttgagtttccagctatcctttgtaagattctcatagtttctatgtatctgcacaggga

SEQ ID NO: 112714 - DNA, 701 bp, Setaria italica
  Intron number 1 from transcript Si024859m (locus Si024859m .g) derived from phytozome v7.0 (chr-ID scaffold_3; pos 47 845553 to 47846253 reverse strand)
aaggtccaagaaaaagaaaaaaagatagccatgtcctcagaaatatttaaagggggagagatcataaaaaaaggagtatccatttcattcccattccatccaccatatccatatatgtgcacatcttgatttgactgtatgaattgttttctcattgggtctgatttttgaccttgcaatatatgtgatgcaagtatgccttatccttcataccttattgagctccacatacagccatcattagaagtaggatgaagaaaggcaagtcccatgccttggtaaggatatatacacattgagtcatccgagagaatcaaaagaggagctaagcaaagtttgttttgaaatcttattgaaaaatcccaagctacttgacatgaggagtagaggtgacttgattcaaggttgttccattcctcaactactcaagatgatatgataaacacttcaaagttcataggcacaaggtaaggcttggaatatttcttatgctcgcttcatacctttagaaattatgtttcaccttagtcctttctccttcactcaaggacgagaaaaggctaagtgtgggggtgttgttgacgactgttaagtaccaaatttaggccgtcaactcctgcataaacacacaaaagatgaacatcaatagtagtggtaggagttattactaacgaattccacaagtgttggtgagtatttgt

SEQ ID NO: 112715 - DNA, 776 bp, Setaria italica
  Intron number 1 from transcript Si024776m (locus Si024776m .g) derived from phytozome v7.0 (chr-ID scaffold_3; pos 69 83665 to 6984440)
gacctaccaaagtaccaagcacctttggtagaggctagggcaaagcacgggagggaggatggtccattgctgggcactgtgggcaattgaaagccctatttgatttgtttgtatttggggttcaataatcaacgggatatggaggtcaggaggtggatggggcccatctcatttcagacttggacaggacaggtgttggggcccaaaccctagtctttatcttgtccactagttatcttacttttttcccctcaagaaaagttacacttgtctttgaaaagaaaatcttatactttttcgcgaagaaacaaagaaaatctcatattgattcgctataacctggttttcgtttcgttagcatattacgtacttatgctccttgaattaattgcccgattgttcagaatattcagctattagtttaaatgaagtgaaaaaagagaaataaaccttgaataaggttcatgtggaacgatggaatttagataataaaatattccgagtgaaatattagttgatctcgaagtaaaaaaaaaggtttcacttgtagctaagctccagttttgaaacctgtttacagtttctgtcattctgtgcgtatcaatgggccaatttaaggaccctctctcatttccatctttacaaaggcccctgacgtggtgtagaaatggaatggcccaaaactagcttgggcctccagtccgtatatatatataaccgatgggttccggtcgcttccagctcgccacacacctctgccctctcccacgccaaca

SEQ ID NO: 112716 - DNA, 805 bp, Setaria italica
  Intron number 1 from transcript Si010510m (locus Si010510m .g) derived from phytozome v7.0 (chr-ID scaffold_7; pos 35 274320 to 35275124)
cgaggaggaggagtgcttcgagtccatcgacaagcgtaagccgcccgctctcccccctcttctcacctcccgcattacttgctctcgtcatctcgtgcgcgctccgcgcgcgcgcgttttttccaccctaccatcggtgctccagtccccggttacggcggatcgcttccgtgagcatacgcgctttgcgattttgggtttggtttggggaatttccgtctaaattggtgttgtttcgaagtgaattgatgcgatttgagctcggtctcgccatttgtttggtttttgttgcgtgcgcgtggctgggttttgcgctcgttttgattttccccaaaatttcgagtgttttggggattaactagtgttgcttcgtcgcataaattcgtggggttttagtattctccacttttgaataaaattctgcggctagttcgttctaatcaatgtgtgctgccgttgtttctgcataggttgatctgatgttagccttaaactgagttcatcaggtcgttctgtcaaatgatcagcaaaatccagtaggattcgaatattaactcgttctatcctgggagttttctgtggatactcgtagttttttagcaattgtgcacttggggcactcagggttttaagcttgggctcataatttgtttcagagttaacagaattcatgttgttatgttctccgtctgtgtcgtacatgctattaatttgagttctctgcaaaattcctgcactcaagctaatctgtggtgcgtctattggcacagtgatctctcaagggataaacgcaggagacgtgaag

SEQ ID NO: 112717 - DNA, 598 bp, Setaria italica
  Intron number 1 from transcript Si009709m (locus Si009709m .g) derived from phytozome v7.0 (chr-ID scaffold_7; pos 32 246969 to 32247566)
cgctcgccgtcgcggcttccctcgccgacctccaggtgctatacctgatcctataccctctccctcttccgttttggagtatatgagcgtgtttcctggtcatatgaactgctacagttcaaattgtttcttttttgaaaacgttcttctgttatttgaagctttcttggcttcaattattgttctcttgtgccaagattgcatttttatcaaggactgcgattaatcaatagacgatggttagcttaattgattctccaaatcagggaaaatgagtagatttgttgcattttagtaatatcagtgtatttcgtctggaaagctgggatgatttatggatggaatatgcattatctggaatttgaacgagtggaatctttctaatgaagtacatgcattagcttgttgaccaaaacaagtttgcttaatgttgtgttactgattactgttactattgtttgagtagtactttgtattccaattctcacttaacttttataatttgtcaggggtaggaactggaccttttcctttagccactgttaagctctcaaatctaacaatgccttttgatttcgtgttgtatgactgacaacag

SEQ ID NO: 112718 - DNA, 861 bp, Setaria italica
  Intron number 1 from transcript Si014386m (locus Si014386m .g) derived from phytozome v7.0 (chr-ID scaffold_6; pos 36 006489 to 36007349)
gtatagccaagaaaaagcttgaactcgacaagaaggtaagtgcttttctattcactcttttgctccaccaaaactttcgttgtggacatgtataatatcatggatttgcatggttcaacgatagcctacccagcttgcttgggacttttgcgttgttgttgttggtggtgaatgggttcagtgataacttatatgctgccatttaatgctcttttagcttagttcttcgcatatgtcaattttctactattgttactaaatgatttgggtgctcgtacaaacataatcattataaaattgctgaatgtatcttttgcttttaattcatcattcttgctctctttgttaagtcctccatgttttgcactagttcagtgatactagtttgctgcagagaagttattgctaggaacccttgataatagctaataggaggtttgccctgtagaattttaagtgatgtaccagtatctttggacttcattcaagtggtcatgctagtaaaattgtataatgtaattatatctttattttcagcaacctgagcttcataatcaaaaatcaaaagttgcaagaaagagattgagaaaaaaaggatgataacaagaagcatctggaagagatgagaaggctgcaaagttctctagttgatgtcacaaatgctcttgaggaattgaatgagcaaggacaagacaaaagtggaaaactgcagttagctgacgaccagctccaggagtatcatagaatgtgagtttgatcagacatcttatgtgcagtgaagcctctgtatctttatttatatgcacattgacttttgtagttttcatgtgtaggccgaggttggcagggaagccttggaag

SEQ ID NO: 112719 - DNA, 839 bp, Setaria italica
  Intron number 1 from transcript Si013873m (locus Si013873m .g) derived from phytozome v7.0 (chr-ID scaffold_6; pos 19 36022 to 1936860 reverse strand)
tcgccgtgtcgatcaggcacagggtgatctctcaggtgagcccccttccctcaatggcggttcagataagtcactcccattttcttgttctaaaggaacacacaagaaaaatctggaaaccgaaaaaatccggtatgctaatgatcacaacattccaattttgatcgagacaggatatacaagcaaaaaggcatacctggctgctttgatttggtcccaaatcattttgattttcgaataccccacttcctgaactagaacaaatataaaatacttgtcttttcagagcaagtgcggtaaattttctccaaacttaacctatcggtatggaaataagagagagcttatggaaaaaaatatttttttctttaataaggctctgatacatcacagtggcagttagcagtctaaactctgaactagctgcatctctttgtctgaaagactacactgcataccaacggagtaaaagaggtagtcctcatcctgtacccaaaaaaaaaaagaaaaagaaaagaaacttcatgttcttggcctgtttgatttcaaatcaaatcaggaaccctgataaagacattcaggacatatctctcacggtactccgaggcttctccgttgtccccatccgggacaggggacgttattcctgccgttggtgctaaagcaagagcatcctgttgcagacaagaggaacaaaacaatgccgtcttcctcagccgcacaaccgagccccaatttgcagattcttcaatcaacttggcactctgtattatttaatcaataaccatcagtcaaaatttgcaggttctggagctggggatcctggtgcactcggtgat

SEQ ID NO: 112720 - DNA, 1049 bp, Setaria italica
  Intron number 1 from transcript Si021188m (locus Si021188m .g) derived from phytozome v7.0 (chr-ID scaffold_3; pos 25 597953 to 25599001)
attcgtccgggcctggattgatttctcctctgcgcgtaaggaaccctaaccccgctcttattttgctccgatgaatcgcttgttgcggtcatgcgtctagctggtttggctcttcagtgattcagtttgagcatgatcttagttgtcctgtgatgctccttggtgcgtatgccttgtatgtcatgttcgcctggtttattctgtggattttaactgaggcacggtttgtcttagtccaaacactggccatctcctttgttgatgttgccagtaataggcgctctaatgatcatgttgcgtccaagttaggtggattggtgtattcatacaacgtagtgtagttatgtatctttgttctgttgattgatatatatctctgtatatctctgctctctgttgattgatatggctgctgatactattagggtagcgatctgttcacccaataatatatttgtttcgtagtttcttcattgtcatgtggcactgttctacatttcttctattatgaatattgatgctgtgtaatttcttcattacccataggcagtagtgctccatagtgttcctttttctgttattaggttgaaaaatgtttatggtattaatcacctgttcatgttttaagtcatgttagcagagatgtaacatgattatctagatgcttggatcatgtttaccccgcattagctttgtctggcctctcattgcattggttggtttagttgtttaactgataatctttgattgctgacgaggaaagtaatttctacataagaatatgtttgattatcttatgagtatgcgctttagtagtgcttataaaaatttgatatctcacaatcatacagcgcctttgttaaatgatttatctggctaatatttgtggtgtggacaatgttattttgaatgcaaaagctttaagctagatttaattggctcattgatctggtctgtatgtattatgctatttttgttgattttctctgattccttactgactgacaatctgtttccttttggtgcaggatagggcatttgctacaggc

SEQ ID NO: 112721 - DNA, 908 bp, Setaria italica
  Intron number 2 from transcript Si015294m (locus Si015294m .g) derived from phytozome v7.0 (chr-ID scaffold_6; pos 19 170337 to 19171244)
aagttaaaggtataagttactagaatatttactgcttaattaaattatcttcataattatccgataatgtggttcttagatattctaattccaatatgattttcatgtcttttcactctttgaatttgttatgctttctttggctcattagtgttgtattcttggtctcagaacttatttcattctaatatattcagtagggcacacttcactactgttctcctaaataggttacttattttttttcgactaatagtttaatcaatttagcagtgtagagtagcttagaggttacttaaaccttcaatattttgctgttgcattgcagtgtagattaaaatgcaaagccttgtagtcagcaaagcttagtttcatggattcgtacttcgaaagcaagtaacgcaataagctacaccatatcacatctactttttgaattctaatgacatcataattcagatacgatttgaccttttctatggaagtctatttaggaatccattgtcatcatgaatggcatgggctttattcatatacaaaattgagaaaccacttgtttgtatggtatttttatgcagattctgcacaggtttatcggggatatcaccaagactaccgaagaggtacactaatagacatgcatctgctgtggcctataatctcctttttttttctcaaatgtgtaggagagctgtgtttcaattcattaaagaagagaaaagaaacccatattacaacacgtgcatgtgcacgcacacatgcacgcacactgattctttgttaatctcaagtgatgtgtcatatgcagctctcctgtgtattccagggaaaaaatatttaattgttggtttcttttacttttgttttgattagcccagggcctcggtcaccgaagtgcaattcaccgg

SEQ ID NO: 112722 - DNA, 720 bp, Setaria italica
  Intron number 2 from transcript Si023515m (locus Si023515m .g) derived from phytozome v7.0 (chr-ID scaffold_3; pos 55 43800 to 5544519)
gcaaaaactggaaaagaagctcagcttttacacaagtaggtgtgaccttcctgttgagttgataatcttttcctttgcaaaaatcctgattgataatgtttgatgctgctgttcttgtcgtctataattcatcatctgttttatcagatctagatgggcagacatgtgtaggtagtacaatgttgagggttgcagtttgattgtttggaagaattgactgctgacactaggatgaaaaatttggtttttgccatcccaattttgtgccattgttaaacaattttttcttctcgaggaagggtagtagctctggcagaatggaaattgcaccaaatagttaacataacagaaatttgtcagcaaagtgcctactcccaggcctcttccttcagccaagagaatcagatgattaggcatttaggggttagtttgcagttgcaaatgtctcctacaagtttctaccctgcacacagcaaaggagtatgttttcattcttcactttcaatgatttgtgttgtagcttgatatagtttaccgtgagtacttgaaaaggtgacttggaagttataacaggaccaatttcaagtgtgttctttcttgcattccacttccatttccctacctcgcttttattttgcataataacatggcctatttcatttaccataatttgtgctataactcattggaagttttgatttgttattacagaagtaaaag

SEQ ID NO: 112723 - DNA, 716 bp, Setaria italica
  Intron number 1 from transcript Si011158m (locus Si011158m .g) derived from phytozome v7.0 (chr-ID scaffold_7; pos 21 990381 to 21991096)
cgttgtacgaggaggaagcagaggaggtaatggtctcccgaacccaccaggattcgaggattactcgcctcattcgttgcctgttacaacttccaactaattatgcagtagaagagtcgtgtgtttcattggtgcgcaagaatctcagtaaacctcaaatgcaaatgatttagaccctgattcatcaattctggccttgaattggttaggttcaacgttcagtaaaacaccaatcgcgcttggctagtttagtactttactgtttaccttgaatttgttattagtggtcgcaactaatagaagggacaattcaggttaactgggcgcgttggagctatgttctagcgcattttcgagcttctgctgactatgatgtatgcttgtgttgaaaaataatgtgaaaaccttttatatgagctagattttgtgccatagttgttgattatatggaaagaagagctatattctgatgcgctgaaatgttgtggatgtagcgagagtgcccgtagtttgattccacaattgtataataaatggtcttcgttttcatttttcgaaacataatcttttgctaaagaattaaaacgggtatgtggttttactaaaattaccctttagacatactagcaagtgggttttggtgcagacataccaatgcagacataaaactaccctttagaatgaaagttgatgtagtttgaatcttctatggcagt

SEQ ID NO: 112724 - DNA, 971 bp, Setaria italica
  Intron number 1 from transcript Si012091m (locus Si012091m .g) derived from phytozome v7.0 (chr-ID scaffold_7; pos 13 200297 to 13201267 reverse strand)
actcttcaggtaacacctaattaatcccttaaatcttgcatggagatgataggtttcatgcatattttgattctccgcctttgaagcatgttcatgagttaatttcactgcgtggctttccttcgccaactgccattgcctttttctttataaaattcttggtctaaaacactaggatccaattgacacattctgatgtagagcaggacaactagaccccattaaaatgagataaacaaaagccagagatgcattttctaagtgaaagggccgactaaacaatgaatgacaagggtatatcatggcattagtttttgctgcattaaactaatacttcagaaaattcatcgaggtaattcctaacctcctattctcaattgtagcattcaggattactttatcactctagctcaaagctattacatatagagtacttggatagtgttaatcatcctcacaagtaaccttcgaagagatagacagcacgagcatacaaacaccctccaagagagtttattttaacaatccaagagacagatagtagttgtctcacttgttcaaatatgcgaagaaacataagctttctatactcaaaatgtttctcacaatttagctgacaagtttgattctcaatggttactgatgtccagcatatattttatcctgttattgggagccaattgttcttaagtttatttctgaactagttattctgctaaacaaacttgttcagagtaaaaaaaaacaataaatccatattattttttcacttatagaaccacgggctgaaactccaattttaccaaaaaaaaatgttggtttgccttttctcgtctgatgcataatcgtaaatcctgcattgttttcgaaacagaatgataactgaaaatattactatgccattggtttttaacataagcttcgatggaattacagtctccacagtattgcaacacttacgagggtggcca

SEQ ID NO: 112725 - DNA, 814 bp, Setaria italica
  Intron number 1 from transcript Si015707m (locus Si015707m .g) derived from phytozome v7.0 (chr-ID scaffold_6; pos 34 419515 to 34420328)
agagctcggcgactcccaggtctcacgagaaggtaactatccctctaatccctccctcttaccttctcgtcagtcctatatccgccgctagcacatccattcggctcacccggagttctccgtgtaatgagttgctcggtagcaagttgcttgtgttcgtagaggcgatgaacatgttctatgccatgtttttgcttatttctcgtggattgtcgtgcaagagattggtcgggctagggttatgcgttgctaatgatgtgccatggcctccctgtgattgattgacacatgcagtggcaacttatgctcatgctgtctaccagctctatgcagtttgctggtgtggctcgctatgagcggtaatgctcttacctttaccctaggttgcattgctgctagcattgaaagcatagttttagttgctgtattttgatgtcgccgtggttgccatgctagttcatctcttctgtgtgctgtttcaactacatgtatgtcaatcacatccctaggttaggatggcatgtgcctgtttgaatgaatgttgcacttctgagtttcgacagtatgcagtgcttgtatttagaaatgtactgatagattgacaagttaaaattgtaaataaaccaccatgaagatacaactctatataaactacaattttaagtatagcatgtatgtgagagtttgcttttctttggtagttgcaattaggttttgtgccattctattagtattttctagtttgttgtcatcctatggctatgctttgtctaatagttcgtgaaacaaatctgtctgcagccgaagcagatcc

SEQ ID NO: 112726 - DNA, 616 bp, Setaria italica
  Intron number 1 from transcript Si009201m (locus Si009201m .g) derived from phytozome v7.0 (chr-ID scaffold_7; pos 31 227880 to 31228495)
cttccagaattaaagtagaagtgactataaaggtccaaagtattttcattatctctatatgtcaattacctgttctttctgccatgattttcccctaaagtgacacacatctatacaaactatagaatcattgacgaggaaattaaataaattataaaatgcttcggtaaggatggcatgatccgaatcatacattgcaggcaacaaaaagttctgccctgttctcataagtaaacctataaaccaatgccttggctattattttgctgctgagaaatattgacgtgcaacattttgattgtcaaattcccctgataccctaatcaatatattgaattatctgtgattgaacattaaatagagaagcctagtactggatggatgattggtgtttcagaacatcattagtttttttttctgcacactggattccaattgaagaattaggtctttaaattttcttattccttgtgcgcaatgaagcatgaagtcatgccactgatattggtatcacattgttactcagattttcttacgtattacagtcacctgattatctgatcttgttttaattgcatcaggtttattctttggagaaaagtgacaagtctaaaac

SEQ ID NO: 112727 - DNA, 939 bp, Setaria italica
  Intron number 1 from transcript Si021389m (locus Si021389m .g) derived from phytozome v7.0 (chr-ID scaffold_3; pos 21 471488 to 21472426 reverse strand)
gcaagcaattcgcggccgaggagatttctgcgcaggtatattactaatttcagatgtttcttcagcatacttaaggttaattgctgttatgtttccttttttctgaaaacttacagttatctcaacaaagtccatgcattcattgtcttgtgcttctactaatgaactaagaatattttgtcctgtaattttgcaggctatcgtgatattagaattattttttgcagtatttccttggaaaaattattgcttatggtccacatgactacacttaccatgaaaattaatttgttatcatggataatagtttttttcgtgatgtctgaaattgtacatttctcaaggagttggtgcattcattgtctgttaaattgttatcatggttaattgtttttccctgagttatgaaactgtacggttcgcaaaaaagttggtggtgcattcattgtctcatgctgcatttgtgttaatattgatggataatttgacttgaacttaactggcttattgtggtattatatatttttgcagtagttacatatgaaaaatatgtttcttttagttcctgactacctggtaactatagtgacactacattttccttgtttacgccttacacgggtgattgcttatgggagcccagtaattttgccttagcttttctgtatataccttaaattagagcatggttgatgattgtatcataagttggttgaatataatgaaatgtccgcaagtattgcacattgttgtttatttgacatgatatctatatatctgcttgtcatcattccatattgtccgcataatttgtctggggtgtctgtcgatgggaattgaaacagaggagtaataagcaaaactaactgagaaatgattttgattgtacattttaataataatgtttctaatcctctcaggtgctgagaaagttggtgg

SEQ ID NO: 112728 - DNA, 745 bp, Setaria italica
  Intron number 2 from transcript Si022751m (locus Si022751m .g) derived from phytozome v7.0 (chr-ID scaffold_3; pos 24 758732 to 24759476 reverse strand)
tcttcgagcgcggcatcgccgtcgaggccaccaaggtgcccccgggctttctctgctcgaattgtcagcatagcggttgcagtttgtaactctgactcatagaagaaatttcgattagaccatatggatgtcttggatacttggatgagctcactaatcctgcatttctgcatgaagtgtggcccttgcaaaatttgtacggctatgtcccacagtctcttcttgtcctgcaccacaaatgctacttcctgtttaggattttgggcaatccctaattccctatgtagcggagtaatgcgtcgaactatacacacttcgacttttgtgaattcaacctgtagttttagtttctgccctacagttagttgctctgaaccctctctctcaactttgcctatatggagtaataaaaaattgcaatactggtgtctggtgcaataacatttgacaataaaaggctaggatttcgaacaagatttaagcattacgtctgttttgactcatgtatgttcttattaatttgtaacatgagcatgaacatctatgatcctggtcctggaggaaaacaaactagacgttttgttgagatccaatggtttgacattggattatgtttgttattgtagagtccagtatgtactccgagaaagttacatttctgatctgttttcgtttccataatgttctcctttttcactatagtattgtgtgatttgtaggaattctcaagcttaagcgtggagcc

SEQ ID NO: 112729 - DNA, 1058 bp, Setaria italica
  Intron number 1 from transcript Si022409m (locus Si021860m .g) derived from phytozome v7.0 (chr-ID scaffold_3; pos 13 982853 to 13983910 reverse strand)
cgtccaggagctcgagaggttctcgcattacgtcggtacggcccccaaatctgctcccgcttcctttctgttgctgatggtagcatccggattctatggattggctctgcgacttgaattgcgtgtggtaaaagtaagatttgcgttccatccgtaacgtcgggagaaccatcagctttgggttccagttttgagtttttgactgatggcctcatggggtactgttcggatgtcaatttactctaaagcaatcatcgttggtgctagtgaacagtgatagaactgacccagttcatcaggctaataactggggtaactcgtcggggttcgcatttctatttgttttgtttactttgcccgacccaagatataaggatacagctcggaataccagtgcagaagcatcagggttggcataaattattaggtgccgtggagagatttgtgtagagccaacttgcttatacgaaattatggttctaatgcttgcacgccacactcaagatctagattccatatgccacttattctttgtgattgactggttcttgttgtacttttgcacatttcgtgctatatgccgatttaagacctgtgattgactagttaccgttgtggtcttggggcctgcacggttccccccactcttgccatgtttgcgtccatgaggaaattctgcttctttttcagctaggcaaattggatttgacgatgtcaatgaatgcccccacctgtgcacactagcttacgattacctgaggaagaataagggctatgaagacaatatttttgcattcttccaaaatagcggggaccctgaccccctgattgtgaagtttatcgaggaactcgacaagtgtatacttggctacttctccttccattggaactatgcaacttacataattacccaggtgaagggagtacaatgacttttgaagtttaccgcctattgtctcctagtcctagttaaactctccttacactatcttttctatattgatatagtaatgatctcgacaggttctcactgtggaaggtgtgaccaaaagaaggtt

SEQ ID NO: 112730 - DNA, 548 bp, Setaria italica
  Intron number 1 from transcript Si022172m (locus Si022172m .g) derived from phytozome v7.0 (chr-ID scaffold_3; pos 11 486256 to 11486803 reverse strand)
tgtcgtcacggcgcaggacaccgagcggatcgaaggtacgcggcgtgattcgtgtttgttcccatcgttttgcttttgcctgtttccatcttgcttctgatcatgataagcacattcttgtcagtgtctacaactcagctgtttgtttgcataccttgttgtcgcctgtagtacatcttgtaaattggtaaagcaacaattttggcatatattagtatgtccgtttgatctgttaggcctctgaattcatgggagttccatcctgacttcatatgcttatgggttagctgataagccgaatgcaggtggatcctttggtatgcaatgatacatgatgataatcagttaatcatgattcgttcagtttagcgtaggtgcgaaattcactttagacctgtttacattgcttagctagcataccttacttttgatcagtatgttctatgatcctgtgatccctagcatggttctacaactaggtatattcttttccccacttctgttcacgccctaatgccatggataataaaatgcaggaagtgctggtg

SEQ ID NO: 112731 - DNA, 920 bp, Setaria italica
  Intron number 1 from transcript Si010657m (locus Si010657m .g) derived from phytozome v7.0 (chr-ID scaffold_7; pos 20 997182 to 20998101 reverse strand)
gcttcctcggctgctcaatctcggaaattcgtttggtaaattacctcccagcttcttttactctcttgaattaatttcgatgtgtggttattgaattgataatctagggattcaatttattagcattagttgaattcttcgaatcctacggttagggcttcaattttacgaactgtatgatatttttcttcttcttctaagacttgggggtatggtaagcgacagattgtgtgccttaaaatttgtttctagttctgcagtgatattcgataattttgcttctatatgcccggaagctttaggttgtttggagatcatgtagtagatttacctctctgaattggtcagcgtccgcgcgtcaatctggataatatttgcttgttggagtccttgtcggcttcttctcttttcccctgtcgtgttggtgttgcatatgtgattaggtaatgggtgatgatcacctaatcataacgcaatagttggtggatctggagagagttcttttataaaagtcatcttggatgaagtgagacggaactttgttagacaattaaaagggggttgtaaacttgtaatgtacctttgatgttgaacacgtccagtcgtccacggtgaataagccatgtgaaagataagcactaacacgaagtagattggaagcttcatttgttattatattgctcgtttgaagtctaccgttgacagtattgtctttcatctattgttccaaataaatagcagcgttgccggcacctatctgtgcatgtcttccatctgttgataatttgtcttgctcccctttccttgcaggtttttctgtcttagtgttttgttgtaggatgtgagaacagcctttgtgttgaactgttgatgataaaagtgagaatgcttggaggtctcgagttgtggtgctttatgta

SEQ ID NO: 112732 - DNA, 641 bp, Setaria italica
  Intron number 3 from transcript Si013219m (locus Si013219m .g) derived from phytozome v7.0 (chr-ID scaffold_6; pos 17 00422 to 1701062 reverse strand)
atagatagccttagaaagtatctacaggacaaaaggtatttattcttgtcctacactcctagattcttttcaacacatcaacgctcacaagattatctggcattgatttgtgtttcctgttccttttttgtggcctttacatacatggcactatgaattgaagttcaactttacctctcaccaacactccactcttttctacgcaccattttaagctgcaggatttgtaacttcctcatttttaacttgattgaatttcaatttctttgaaatttaaatatgcacaataaattcagaatttcaaaattaaaatagtgtagggtcaaatctattttacttactttgctttgccgatccaatacaatacatttccgtaaggttcattgagacaatctccagtacatttctagggctcatatgggtgatgttacaatctttattttgaacagaattttggctagctaattcagctggtttcgctaacaagttacatagacacgttattttgggtgttaaagttcaacagatttattttagttgaaagcagtgcaagttgtttgaaaaaagaaaccttttacttgcggtatcatattaatatgtgtatttggacatgcatattggcaggtatttggttgtagttg

SEQ ID NO: 112733 - DNA, 801 bp, Setaria italica
  Intron number 2 from transcript Si013442m (locus Si013442m .g) derived from phytozome v7.0 (chr-ID scaffold_6; pos 28 454014 to 28454814)
acagggcttgggaaaactcgtaaggattggtaaaggtaagagttaaagctacaatgttaacttatcttacatactagaaaaggccatcttgttagtgttgacattttcattcattcccagctcctcttttcacctccctaaaacaattctaacatacagaaaatgggaaaaaacactgcaaacagattaagcgatttacttctagctatatgttttactgtgccaatgacttcctcccaccttaaattctttatttttttttgtgtgtggtttcatatcgcccctacatcccttcaatttttccattctcatcaccaaaggaggttgtagcaaactctgcttgagatccatacactaccttgctgtcgatatagcagtctcttctagtcgagcagcgaatatttgtccaggagggcgcaatgtgaggatgacaatgcaggccaaaacatgccaacgagatccgatgcgagatagggtgctaggctgggcatagaggaagatctgaggcacagtatagattgatggcaatgttggccaaagccaccaaacatggcaaggaggttgaagttccacttgggcatgtggtggaaaaggagattattcagctagtccttttcagctacttgcttgtagaatcatctaacatttgagttaactcaattgtgaaatatttaccaactataatcagtacataaaccatgcatatttttcagttaaagttatccatgacaagctaatggtgagttagatcttttccttacctatgttgatttttattacattttcattgcagggccagaa

SEQ ID NO: 112734 - DNA, 851 bp, Setaria italica
  Intron number 2 from transcript Si024481m (locus Si024481m .g) derived from phytozome v7.0 (chr-ID scaffold_3; pos 23 249813 to 23250663)
tgagtggtgagtggttctctcagattgatgacagtaccatggttgcagtaatttttgctcggttgtttgattgtgtccaataaccctgaatcttctctgaaatatctgaatgatgtctcttgtattgtctttttctacatggggaattagttagaagtaaatgcgatttagaaaggatttgatatggccatcttatgtcagtatatgaactactgtaaaaagctatcaagagagttgcatgctttttcgctgaaggttatcatcctaatgagctgaagcaaaactgattgggttattaatagtgtaacctggttccacaagtctgcaagcttaagattctttaaatgaaattagcatggttacccattgagcgaaacatagttattttcctcaaatatcagaatggctagtctcaatcttgatgtgatattttaatttatgttttttgtatccttttgtgtccaattggcttgtttttcctgtctttttactatattaggggtaacctatcctgttgcatttttcaaaaaagagatgtatgcctgtttcttttcaatattctctatgatattccatggaacaactgcattcattattcatgtcatataggtgaaggtcgcatagcatctataccatacatatcaaatacaagttgagtttgtctaaacagtattcgtcatttagaagtagaactcaaaaatttacatttcgcagtgtttttcctgcttaaactccatgatcagtgcttccttaagtaaaagggctgctattttttaaggccacactgccactgctgagctgatcatcacattcactttctaggaagcatcagggcgtgcaaggcagctgcc

SEQ ID NO: 112735 - DNA, 943 bp, Setaria italica
  Intron number 2 from transcript Si011725m (locus Si011725m .g) derived from phytozome v7.0 (chr-ID scaffold_7; pos 33 785118 to 33786060)
aggcaatcctcgcacagttcgacatcgtccgccgggtgagagactgctcccatcccctggttctgtaaagaatgctctgaatcccctagcgagttgggcgatgttttgggtttgattgtggtattggatgactttggaaggaattcagggcgccaaagtttgcattcaatgctcacggactagttttggtgcatgcctcatatataaaattttgaaggtatcgaaggtccatagatgggttgtaagttagttgccatattagtgtagttgcaattggctgtagtgatgtcaagattgcaattaatgattagcttatttcctctagtttgctcagagcttcatcgaattcttctgcaattgttataagcagtatcttcgacaatgttagatcactagagggtttttccatattggtgtagtcgcaaagtgctgcttggttttcttgttgcaagattaacatcgataactactgattagctttctgtacttttgctatctcggtgcttcatcaaattcttcagcagatattatcagtatcttccacactgtcagatcagcataggtttcatccgtattggtgtaaatgaaatgcacgctctgtttcctggcaagattagcatcaacgattattggttagctgctgtacttttgctagttcaccgcttcatcactttcttcagctgatgttataatcagcatctttggcactgtttgattattaaaggatttatccaaacagtgtattcattaccatttcttatgaagatacttctaatttttagatggtcttttaccattaaatatttttgtaactgcgtcaggttgttggcttgtatgtcaatatggtttaagcagaaggtgtaatctgttcacttaattaatgtggtggttgtctttttgaggtttaggctgaagctgtgatattgaggggcccacgtgagaa

SEQ ID NO: 112736 - DNA, 813 bp, Setaria italica
  Intron number 1 from transcript Si012473m (locus Si012473m .g) derived from phytozome v7.0 (chr-ID scaffold_7; pos 17 328724 to 17329536)
gtgcagtgagacagagttctgctgggctatagtttgattttatccggatcagcctgacgttttgctaagataagaaaacggtaatgttttatccgggtaatagtatgtgtccaatgtgtgcctgcgccacctttgtttgttctttctaatttctttcttcatcctgaggatgatgttcttggtttcttgatatagtacgatcacaaatgatttttctagaaaccgaagataatgtcaaggaatatatcattaagaccatgcaaaagtggaagcatttcatataaaatcatcttgtggcctgcagccttgtccaaagagcctataaattaaggtgcagcgcgtcgtcccttgtcattcccaggtgtaacgtacactcttcataacagcacacaaaatggctctaaagaatgtcgtccttgcgatccttctagtggtttcgctcgtctctgcaggtacttactatagactaatttgcatgacaaattaatggacagtcgcatcatccatgcatatacacaatcttcctccgtacacaacacaaaaaaattggcttaaaaagttatacatgatgagtgaaaatcccaccaaaattcaaacctaccgcttcttatcattttgttcttgtcacaatctttctccgcttttggcaatctgttgatgattcaaattggacaatgtttcaacggcagatgccgtcaaaggccagcagctgggaggaaccgggctcgtggacagcggtagcaacgatggcggcggcggcaactgggtgtctcccaagaccgagtgcgccgagaccaaactctacaaggggcc

SEQ ID NO: 112737 - DNA, 716 bp, Setaria italica
  Intron number 1 from transcript Si013208m (locus Si013208m .g) derived from phytozome v7.0 (chr-ID scaffold_6; pos 82 72562 to 8273277)
aggccgtcgatctggtacgaccaatccaccaaagcaacccctgcttcgtttgttcttgcatgcccggtttcgtcggtcctgtactttccttcgtcgccttatctgaccatgtctcttccttggagtcactcgttttagaagatctaacttgttcgtcactttgtttcagaggatctacaagtctttcctaacataatcagatgatgacgatagatcacggagaactttgacactagttttttgaaagaaaaaatcatgaacagtacaaattagctagttgtacatgtatatgatagatctaatcttattttaatttgctttctccaaaagaacatatacctggcctctgatcgtcacccagctcagcctagctcgtactggagtagattagcttatcgtcttttgctcatgtgaagctagcgataaagatgcctcctctcttttttttcccgttgcttgagtcacgggtaacaagccgcttcaagcggcttccagtttcccctccatctgcaaagattgcgctttttatttctgttccttgatctgcaaccaccgcgcttttttcggctgggctcattaatcacatctactaatcattgattagacagacgtcgctgttcaagggcttcgacaggtagattttcatggcgtccttggttttgttttcgtgatgcatggcaggagaacatccccgtcgaggaggtcttccagactct

SEQ ID NO: 112738 - DNA, 812 bp, Setaria italica
  Intron number 1 from transcript Si023488m (locus Si023488m .g) derived from phytozome v7.0 (chr-ID scaffold_3; pos 18 48279 to 1849090)
tcacttcaagccctggggagctctgcagcaggattgtgaggaagccataatcggaatgaggagccaatccgaccttgtctcctcgatgtgagaattgtggatagttgttcaaggccaggacctgcactcccttttcaagtttttcttgcatgtacaatggccttaatcctagaccttgtaggatagcatccataagttccattgacactctttgtatttcaacagcgtactcccccattttcttcctggaatcattttaaacaaaaaagatgaagttaggatagctggtggtaagttaagatcttttcattcatgtaacaatgtgccggattttgtaggttacctgtacgatggagggtgcattggccagtactgtacccagtcttccagagggttagcgtagtgcttcaggaatgacctggctttgctgatcccgtctcttgaactcgtgtcgtacctgataggccttcggatatcggttgatgcaaacaactccttgtgctctggtgaaagttcaaaaaaatccgaggcggcttcaagtgcacccttcatgacagacttgctgacaccgtggtttaccacctgtcatcatcaatacagcggtatcagcattttggcattaaggcatcagaatttgttttgcatgtgtactagtttgttcatttgatcactgatgaattgttacttaaaatgccatagtaagctggtcaggttgggtcagcataagttggatgtgtattgtaacttgttttagctgatcatgcagtgcaacagtagttcactgtgattgtcctcgaacaagtgttcgagga

SEQ ID NO: 112739 - DNA, 1001 bp, Setaria italica; identical to SEQ ID NO: 112346
  Intron number 1 from transcript Si007649m (locus Si007595m .g) derived from phytozome v7.0 (chr-ID scaffold_4; pos 54 50455 to 5451455 reverse strand)

SEQ ID NO: 112740 - DNA, 809 bp, Setaria italica
  Intron number 1 from transcript Si023578m (locus Si023578m .g) derived from phytozome v7.0 (chr-ID scaffold_3; pos 17 253756 to 17254564)
gggtacgttcgatgtctcttttacccttcgtcctgatttcctgcacctgtgctcgtgttgcgctgggcattcgttcatggaggcgctcctttgccgcagcccgcaggaagccctctgttcgatgcgtagatgttatgttgtggatgttatttaggctgctttgtgttggattagggaatgaaatcgcgttagatgtgagaagcaaaactgagcttattgacggtccagtgctgatcagattatacaccgtcagtgctaaacatactcataagcgacatcaatccgttgccgccgtgtaaccatgtgctcctggattcaaatgcttgggtccgggaggttatgcgtggtggcatacaaagtttgtttttccctctaatgtgctgttctaagaacctcctcaatcagttggttctgattcttttttgggtatatgtctatgcggctggttatttatgatgtttttagtgaggtcaatgtttgtgttagatagatctttatatttgtttgatttttgtgtagaatctgcttacaattctaggtgaaatcgtaccagtattcaaaattgatacaattcaggatcaaagtttacttttagtaatttgaattgcttacatatatgtacttttgttcctctttgtactggttgatgttcatttgtatctatatgctcacgccattagctcatgacatatttcacaacttcacatatgcttatgcaatttacaattgtgttctgtgagatgaagaacttgtgatttatataaagttgatgtaacaattatgattcacatcacagaaagacacgtggt

SEQ ID NO: 112741 - DNA, 846 bp, Setaria italica
  Intron number 2 from transcript Si010826m (locus Si010826m .g) derived from phytozome v7.0 (chr-ID scaffold_7; pos 30 094158 to 30095003)
ctcgatgtgagtatagtttgctcgtgctgtctcagtaattagagagttgggggtagctgtacagacataacatgtgtatggttgctttctttgtgattgagtatccatggatgaggggaatgagaaaatcatgccttattttgtgcaataggggagaaacaaaacctcctagttaacaggaaagaatcttaggccaaattcataaaatgggcaagtggaaacatcatcttataggaaaaacctttatgcgtgctgctcctagcttcagacgtttaagaggccagtagcgcattcatattaggagaaagtgatgtactttaccattgaacctaaaggcaccccagtgtggaaaactctacggcttttcgagcaccacgtgttgcaggtgaccactcttgggactgtgctatcgagcaattacttcacaaaatgcttgtttcaattttccttttcctagtttgatgtgatacatggaaagagtgctacttctcttcctcctgtcaaatagtgtaatcagtgagatgtatggctctggttattccacatagatgacagaaatgaccactataggtgactagcacttgtgaagagaaatagagtaactgtaaaaatactaaatacaaccaaagctagcatgcaaaagtccgtgtaaaaatctcaggaattttcgttattaagaatttatttttaaataggtttctggtctttaaatgccctactattctatcctacttatatcacgtggttcaaagtggaaagttctaactcatgttagataggtatgcctttttcagtcaaagttggccattaactcttgcgtttaaaactttcagcaactggcatcac

SEQ ID NO: 112742 - DNA, 407 bp, Setaria italica
  Intron number 2 from transcript Si024933m (locus Si024933m .g) derived from phytozome v7.0 (chr-ID scaffold_3; pos 50 210601 to 50211007)
ttgcagaaccttcagagagaactcgctggaaagaggtacttttagaatttaatttgatgttgattcactcatctcaaacacgcacactggttttttccctcacacatgctcaaaatatgtgcattgcccttgagaataacgcgtaattgaaaagaacaagtaaagcacatgcaaactacatacacaaaattcaacttcaaacttagatcaagaagacaacaacgcctcaccgctagcaagtttccctcttggatatgcacggaacttgcacatctcacataccatttacgcttcctcttgtggcattcacataacttaagaaaaaaacgtactcaaatagaaacgcactaatggcatgattatttgtaacaggtaccttcttgtattggacgacgtctggaataagg

SEQ ID NO: 112743 - DNA, 523 bp, Setaria italica
  Intron number 2 from transcript Si011016m (locus Si011016m .g) derived from phytozome v7.0 (chr-ID scaffold_7; pos 22 504725 to 22505247 reverse strand)
atttttgccttgggattccttttggtaagttcgaatttcatgaatgttttgttatgtgattagatggatataaatcacgcacaagagtacttctatcttgttaaatttcgtttttaaccttgtatgtgcagatattttgcagctcctaatttcaaggaattatgaacttttcatagcataaattgttcacagcagttaatcctaatgcaattttcagaaattgttttatggcctctggtagcaaactcttctgatctcatataacatgttatgtcatagaatcttaaatagtagaaagcaacatcattatttcttgtttcctttgcttccatactcaaacttgattgacaaattattctgctgctatgttcaatattcttacacgaagagtatgtcatattcctgagtgcttcaatattataagtttttggaatatgaactttgttgtcttgcatgtagccttttcacaaattaatgaaataactatattccatttggtaacgcaggtggtcttttattttct

SEQ ID NO: 112744 - DNA, 717 bp, Setaria italica
  Intron number 1 from transcript Si011016m (locus Si011016m .g) derived from phytozome v7.0 (chr-ID scaffold_7; pos 22 505393 to 22506109 reverse strand)
ggtggctacggacccctctagccgcttccccgaaggtatgaatccgatccgagtgaccctaatttggtgttcgtgaagcctttgcccctgtgtgtaactttgcgaagaacctggtgtaggggttagctgagtcatgacaatatgaaatccgatcgggccacgattcgctggacatccgggcagctcacagatatttttctatttgctgaaacaatagggataatttttttacatgtgagttgaaggcagaactggtgcgtttgtgttctaccggtgtcacgtgtcagcaaatatccaattccaccgaatcgggctcttgtccttgaggagtcaaggattttgtctgcaattctgtgtttgttagaaattagaaggactgtctttggaacgttctgttcttaagcggataaaatttatccaggatcttgatctgagaaacaagaatgttttttatttctttttatctatgccatcacttgaagtcttgaacaatgagatgaacgtactgtgtacacagaatcaagtgcattttgtgtgtgtgttgatatttgtattttttaatcaaactattacaacaagaccttttttttagcaactattacaacaagacattaatgttacagctctgtatggatctgtggtctttgctatagctattggaggggttaacatgttttgttgtcccagcagctttcgatttcttccactgaagttggt

SEQ ID NO: 112745 - DNA, 918 bp, Setaria italica
  Intron number 2 from transcript Si009848m (locus Si009848m .g) derived from phytozome v7.0 (chr-ID scaffold_7; pos 26 746846 to 26747763 reverse strand)
cctgtattggcttcccttttatatcagccacacaggttcgtcgagttatatttttgcagttaccacttaccacatggttttcttttttgacttctaccaaatgaaccctttttgaactatgatgatcagaaagcattattttgtgtctgaagatacaaaccttaatatatgatgtcacttaggacgagggcttgagatatttcataggctccagtcagactagcaattgaaaaattataagctctttgtgatgcgcaaatcaaactttccaacccttttgtatttgttggcaagcaatcagcagaactgaagctgacgtttctacaaccactggaagttaaggcattctcataatattaattaactacgatacaccattgacttgtccaaagttagtttatcttaaactggagcataacattccagttggacaagattccactggaacgcactcggcaacatgcatggtgctctttgacctgttagtagagaaatacaaatgaattattcttactctgcttatccctcaggcatgttgctggtttcttatctgcttaacgtagttgagttaaacaaaccattaaaaaaaggacacatgatgtgaatgttattgtctagtattgttgatattgctatctgaatatttgaattttttagtatcttgtttttttacacgcgataatgaatgggggatagaagaatttgttggctagtttcacaagctaactaataatcctgatttaattcagtataatgacattgacgtgttgatgaaaatttagcagctttactgcagaaaaatgcaggttcttaatagaactagagctcattgttagcactgaaatattttttactgacaccaccaatgtgttttgtttttcagccattggaggccaatacttgtcaaactcctcggcc

SEQ ID NO: 112746 - DNA, 974 bp, Setaria italica
  Intron number 1 from transcript Si023637m (locus Si023637m .g) derived from phytozome v7.0 (chr-ID scaffold_3; pos 48 78370 to 4879343 reverse strand)
cagctcaggggaggaagggagctccaggtggtaagcagtaagcaagatgacaagctgcctaaagtagtgaaaaaggtgtgagcttaatgcttcctacaaagatcatcatgaataatgaagcttaattaagtattagatggcgtgcttacctttgtgtctgtaactctgaaattactgtaacatgatgtgtgaccagattctgcgagaagaatgttatgcaaatgcaaacctgacagtccatccctctttcggcacataagaaaaatgcagtcgctgtttggttttcactgggatgttacaaggcataagccttaagagcaaggcagctgaagaggggctacaaccagctagcccagctcaacttcttttgccatttaaaatctactccctctgattccaaaatactatccgttttaatgttctagatacatagtttttactatatacctaaatataatctatatttatatgcatatcaaaagttatgtatctagaaaaatcaaaatgaatagtaatttgaaacaaagggagtacaaatcttcttcgagaaaggtattgacttcaagttgaacgttcggcgagttcctatgccactacatggtgccatggtggctagtcgactgcctcctccaatggctggggacaaagatggccagaaggaccttacaaggacttagcaatttttttttgtcaaaggtgtctttgtaaggattctagtgtaatattttttgtgcctatgtgaaataagagaaattttacggtgcttaggaataattgctgcccttcgtgaataattcctaactattgtagaacctcacatccagtgattaaaattttgatctctttcaatagtaaccgaaattacatcgcattttttactgcaagatccaactttttaaatttcatgaaattcgatggatataggaaacaaagctgaaactaaatttaaaacccttctcacatccaggttgagg

SEQ ID NO: 112747 - DNA, 497 bp, Setaria italica
  Intron number 1 from transcript Si008724m (locus Si008724m .g) derived from phytozome v7.0 (chr-ID scaffold_4; pos 37 989644 to 37990140)
tgataaggtacatctctggaagcctggtagtttctttctgtttacaattaggatattaaattagtcacatatttccagtctaaaaatctgctagatgttttcattctttgatgtaatgtaagaggaagagaggactagatatgtatcttaatgttccgttccgtgcgatcttgtccatggtatgacttagtattgtgccatccaagcataatttaggagatgccaggcacgtaaattgtatgaacagacaaacttagcatatgactttttaagatagtttgtctgttcaatgacccagcgcaacaaagtttgcttatgcttggtaatactacttcgtcaagatgccttaaaggcaataacccagcgtctgcttcattgtaaataacatattaagtttatatagctataatgcattacacctttttcatggcatatgttgtattacatcttttgttcttacaggtcgaaaaggagaaatcccttcaaatttttatctt

SEQ ID NO: 112748 - DNA, 677 bp, Setaria italica
  Intron number 1 from transcript Si014603m (locus Si014603m .g) derived from phytozome v7.0 (chr-ID scaffold_6; pos 42 55928 to 4256604)
cggcagccataagcattgctattaggtgctgcttcccctcttgctctttttttcccccttcttcccttcttgcccttgttcttcgatgattggttgggaactgcatcttaggatttgcttttcaaattttttatttgccttgctccggtcttcttggtgattctttacatgttttccatatgagatggcaagcagtccttcgctgtttggggctactggattaattttgacttctttaaccccctgccttatcctgaacttgttctaatcatcttctattaggccagcaatggcaaacgggtttcatgaatgtggtggttgctcatggatatccctagtgctaagtttagcctcttcaaactagcaagatttcctcaattttggttggttcttcaaaatagttttgaactgagctagtgggattgtggagcagttcctttttctgctgttttgctcatagaactgaggcaccggacttgataagattttggaactgaaaccttaaagatttgcacttgatgtgcatttggagaggcaatttctcttctccagtttctcgctgctagtgaagcgctttatctgtatattttctctgcaacttttactgatttaagagttcagagctgaagactttcttgctctctcatcagcaactcctgtactttgcccagggtttc

SEQ ID NO: 112749 - DNA, 821 bp, Setaria italica
  Intron number 1 from transcript Si009828m (locus Si009828m .g) derived from phytozome v7.0 (chr-ID scaffold_7; pos 35 750071 to 35750891)
ctgccactgaattcggcgtcttcgctaacactcaggtaccccatccagccaaaaatgtctctctctttttttcttttacagaattgagttgtcttgtcttgcgtgatccaatgttcatgtggtattcaagcgcattcacgtcactactttgcttcaaaaattttgattaggctttacattctttaaccatttcatcgattacagacctcaaaccagaatctaatctaatttgaccttacctatgtgcttgctttcaaaatgattagacaagtcccgcactacataattttgatgttagctggtattatgctagtatcagtacaatgtctcggacgatggaaaggactactaggacaattgagttgtacctgtttacctcattgttatttgtttcgaaaagaaatggaacatgaagttcttgcatttagttgggagtggattgggctatcttcaggtgcattgtggaatggatatgtggttttggttcttgactcccactgctctggttctggagcaaaatcgattagtttcctgcattttctagtacagcattgcagtatttctaatattctgtataacaagacttttgcgtgttccgttatatccctctatgccaaagtcatacacgctccacaaaatagcttcgaagaaaatcattccaggatatctctcatgcattccccatcatataacatgatcaatctgcagatggctgatgatttagtatcactgtatcagatgattgaccccaatttgttcccaaattcacttcctcaagcctcaccaattttgatcatgtaaacctttttgcagactagatc

SEQ ID NO: 112750 - DNA, 660 bp, Setaria italica
  Intron number 4 from transcript Si022481m (locus Si022481m .g) derived from phytozome v7.0 (chr-ID scaffold_3; pos 51 91516 to 5192175 reverse strand)
ctggtttcggccatttcgggattgctgttgaggatgtaagcttatatatctatggaccttcttcatttaacttgccggcattcagctctgtgatgctgctattcctgttttcttcagccagtcatgctgtgtagggactagggaagtatggagatttcatttatggattgctttgataggttttgtccccaggttcatagttgccacaagctttagcaccaaatgtgaacctgtattactgttacctttataaaaaaaactagactttatttggttaagggattaacagataacaaagtttgattggctgttggcagtttggttacaaattaaagtaagaaacttataacgggagttttttttgttatttttgctgcagcagatgattgtacagcataaagttcacatgtataaatatgaaatattctttgagatctgtaaggcatgaaatttctgtaccatgacactcatatccttcacctgaattagtcatgatgtatcaccaagttattacaaataattgaaatgtgatacgttggcaatatatttggttatttattttaccatttcacatttgattatgaactagtttggtaccttgagtttcaatgtttgaaaattgcaggttgcaaaaacagtggaccttattaaagcaaaagg

SEQ ID NO: 112751 - DNA, 627 bp, Setaria italica
  Intron number 4 from transcript Si025245m (locus Si025245m .g) derived from phytozome v7.0 (chr-ID scaffold_3; pos 39 83445 to 3984071)
gagagctctgagaacctgcggccgcctcctacccggtatggctccccggcgccgagctcctcgtggcgacctccccaggaactcaggtgagtgagctggatccgtctcagcactcagagcttacgtctggtgatggaaacgaacgtattttaatctgcatcagaattcagaccagccgtatttcagagtatggggcagacagaaacaggagactctgtttgtttctgtggatgttttttgtttccttgattttttgctgtcatgtcaacttgctgccgtgagtcaatgaatccagctcatgttctgaggtcaaattgcgttgagttcatacgatttcgtctgagtaggtggtcgtgttgtggctactggataggaacagtggctgggaatactttgggactgccgacctctagctgttcttcttttttcctttgaaatttatctagcatatagggacagtggttgcaacagtacgtagtaggcgattgtataatctcgcttagctgtggctaatgatgctacttcgtagatattttttctaaaaaaactattccctatcttatcctgtatatgttcttatacgaggattatattattcagtaactgttcatgttcatgttcttcaga

SEQ ID NO: 112752 - DNA, 972 bp, Setaria italica
  Intron number 2 from transcript Si024925m (locus Si024925m .g) derived from phytozome v7.0 (chr-ID scaffold_3; pos 10 106888 to 10107859)
cagtggatctccgccggggccagcgcgtgagtgcctcctatcacgccactcgaaagtccctttccgttctctttctctcggtgatacgcaggaaagctctcattccctactctctagttgggtggatgccacccgcacattcaaaaccatgtgctttgttcgtttgccctgcatctgttcgccattgtgcccctgaggatcctgagccatttggaaatgttgggtatggtaaccgtatacgattgcgacatgtgccatgatatgatttgtgatcttatgcatgttagtcgttgggagggcaagacacatttgttatgctgatcatatactctagctagtgctgacacactggtcctgatacaggggttagagaacacggcatcagcagatgctggcaccattgtagctagttctcactccagtgaaaaacaaatgtcgtcctatttatgatatttatttttcatgtggaaagatattgctggattgtcttgaaaaatgatgcaaatattgtagacttggtttaatggtaccagagtttggtcctcttggcataaccacttagcttgcttgtgtatctgctttatgcttctgatctctcaaaaagttactagacatgctcatattgtgaagagaatgaactaacatgcaaaacttgatttaatgcaaaggtaatcttcgttcagatgtttgatgatttatcagagctgttcatgtaatccataatattcttccctaggacggacacttggacagtaatgtaaaaaaatggaatgaaacagggagaaagatagtctgtttagaaattcagctactgctaactttttagtgatttccgcataatacctgggattgtggaacacatactcctacacagtataatttcgcagtaccatgtaagatttttatttgagcaatgtcaatcttttgtcttttgcagagtgctattgcttgctaaaggaacagccatacaca

SEQ ID NO: 112753 - DNA, 364 bp, Setaria italica
  Intron number 1 from transcript Si020708m (locus Si020708m .g) derived from phytozome v7.0 (chr-ID scaffold_11; pos 2 61714 to 262077 reverse strand)
tggagcagctcctcgccgccatcccttccaagagggtacgtaatactccctatattctcttttgacgtagggatatttcaccttgacacaatgataagaaacacaaccaagcttatcatttaataaatgtaaataagtcttttctcattagtcctccaatgctttcccttaatgacttctcgttatctatgtaatttattgccgcggtccacatcaatgacaaaaccctataaaaaatatccctctaaaaaagaaaagactattaaggacgttttttttatcagaagcatgtgaataaatcaaaccaaacctaacgaaaccactcgcaggaaccccccgccgaggacgaaacggagaaggtgaa

SEQ ID NO: 112754 - DNA, 843 bp, Setaria italica
  Intron number 1 from transcript Si006209m (locus Si006209m .g) derived from phytozome v7.0 (chr-ID scaffold_4; pos 28 974013 to 28974855 reverse strand)
acgaggagcccgacgcgcctgacgcccctgaagcggtaatcgagtactccctcttcgattcatctggtactgagtctgagttcgcccgccggtagattggaatagctgcgatatgatttcttcctagattggtgaactgcggttctgattacgtaggcggttagcattggtgcacgtggtggaaaaggtgggagctttcgggcttctgcttgttaaatttgcgcgacgctgttgatgtgctctgttgctggttaacgtgttgtcacgcaggtggagcgtagtaatttgccttggttctagattcgagtgttaccataggattggtgcaaaacatgcatgtttgccgagtagttttttactgttttctatctgtgttcagtactttggtgtattggtcttcttttccctatgtttagaagcatgtgatgtatgtgcttacgaatccatccattcctatgtccgaaccatgatcagtgcctggactccctcattacacttttatatatcttccaaagtgcccctacctcatttagtttgtctaaaacttaagtcatattttcattaatcagaagttcaatacgaggaattaggaaaccaaaaatttgatgatgcaccaagagaagacttcaataggaggatttggccagcctatactctttcttagtatggacacttctaaattgtcaaaatataatataatagagtgactgctcggttggcttagattgtatattttgattatgcctccaaaaggttgtgtatatatgtattttcacacagattatttatggtttcttgcaaaaaccagggcccccacatatttgagccagcagcaaaggatca

SEQ ID NO: 112755 - DNA, 850 bp, Setaria italica
  Intron number 1 from transcript Si023425m (locus Si023425m .g) derived from phytozome v7.0 (chr-ID scaffold_3; pos 91 3505 to 914354 reverse strand)
gcctcatcgcgcctgtcgtcgattgggcctcagaggtatatacactgctctgctgctgcttgacagaaatgttcatacagatatgtgaaagaattgtttctcgatagatatagtgaatgatgcaagcgttagcaattgtcatagaatttgccacatggcaccgttaatccggtaaaacgcaaatgaaagccgcaaatccctgacaagatcaagtagcagccccaaagagataaactgatatacgagactgatagtacatatgcactgagacaggtgagaaaatgcggttactatagttataaacaatctttaggatagttatgatgaggttacaacaacaaagcttcacatcggcaatataataagtacagtttgtcagtttgattgtgataaaactccaaggcagagtgttttataagaaattcagccaaagccaatcctgacacactataattgcgggctacagaaacatggtggtatgtttgatttccaatatgtaatgttagaccaaagccttaaggactttatccatagtgtgatacttccccaaactggtgtagaaaaatcaatggaagacctaactggtgtagaaacttagtgttttagctattgatccatgtacatgagacaatttcacattttttttcttagcaaaagcaaactaccctgtttttctttactggagggaaatagtagttcaaatgagctgcaatgtagcatcaccaagaccaattgcacatatgtattcctatgtaggaactttttaatgtggttcaacatgctgactttttaagaggaaactatatcatcagaattgcatttataaactgaatttttgtgaaacaggaat

SEQ ID NO: 112756 - DNA, 691 bp, Setaria italica
  Intron number 1 from transcript Si008353m (locus Si008353m .g) derived from phytozome v7.0 (chr-ID scaffold_4; pos 16 29094 to 1629784)
tctatcaacagtttgtacaacaaattggacggaaggtcaataatttgaatgtacacacgatatatttgctgtgcagatcatatataaacacgaaaaacacagaaagaaaatattttcagaggttcccttctcttcaaccatgttcacccactccttaacaggaaaaaccaacttttaaacaactcacagagacagacatatattgtttgaaatttaatattctgccaatgacagtaaagagctctcatgttaataactctacccattggcattcattaatggcatagggccacattctgccaaggccaacagaacccacggatacaatcatacaagcaagtgtgttgataagaccgcaagatatgcacaatgaacatattaattgtgtgacgtaacagacacctagcacatgatttgttaggcaggttacaacgatgaagtttcacctactcttgtaaaatgactaatctaacctttcaaaaaaatgactaatctacatgtttttagaaaatggtaatgttctggcctctacaatagcacacagccatgtaaaatgacaaatctacatatgcaacaaaactacattctattaaaagaaacattaagaaaggctcaacggaagtgagaagtgaagcagcccatgctacagttgttttaacaatacactaataccagcctgcatacgtgatag

SEQ ID NO: 112757 - DNA, 802 bp, Setaria italica
  Intron number 2 from transcript Si011262m (locus Si011262m .g) derived from phytozome v7.0 (chr-ID scaffold_7; pos 31 937789 to 31938590 reverse strand)
tgcttcggaaggtacgttcacttcatccttgtataattgagagtggagcaaagatgtgcatatcctatgggttatttgaaaggagatggaggtgcaggctttggtgattgcatgtgttaagggaggtggagtggacccagagaactgaaggcctgattggaaactgtcatcggtggtagtattaaaaaaaattagatcaacctaggaggagctaggtgatttttcattaagaagaagaaataggcacccaaattcgagctagaggtgacttgaacttgggtagttagagtgcacgaccacacctctcaccctaaccagttgagctaggctcacttccttcattggtggtagtattgacatgctacatgattttatcagtacaaaaccagtcatttgaagttggcgctgtccttaggaatagctacttaaaatgtcacctgttgctacttgctacaggcagtttgtggcattacaagactctttgatcctattctggcaccattgccagatatttctctaacccaggaaaatctgaaactgaaatttgtgatggaatagtcttcttgtactctgttataacttacgtaccgaataggatatctattgactcaaaattaaagaatttatttgaaggaactgatagcctcgctgaattctcacttctggaaaacatggtgttcccacttcccaatgaaatttcgtaggactgttattcatcttcacacatgtatttccatgcaattgccatgcctactcatcttgtcgacatgtttggtttcgcactacgcaggagattactaca

SEQ ID NO: 112758 - DNA, 486 bp, Setaria italica
  Intron number 4 from transcript Si009926m (locus Si009926m .g) derived from phytozome v7.0 (chr-ID scaffold_7; pos 31 000548 to 31001033)
ggtacgtcaatggcaattgtttattttcaacattcagatttcctaatgtatgacaaatacctctatgtttttgtgtgtggaaattcacttgaatgaagatgctggttaaagttcttgtttgactgttcactatgtacatagccataaaagttagaaataaaaaaaatatttttttatgaaactgctacctactgcaactctttataagaaaactgctatgcctgagcatcagtgcctgttaaggaaacttttcattttggtatagaaactttggaggatttgtcagtaaattagtataatgtttgttcctatacaattttgcctgttccgtggccttgttctttgggcattatgtttctataccaagttttaccttttcgaaaacaatattcaattttaatttgactttttaactttttgaaaacaatattcaattttattttgactgcagggaaaaaagaatccagctactgaccaagcggcagt

SEQ ID NO: 112759 - DNA, 524 bp, Setaria italica
  Intron number 2 from transcript Si009687m (locus Si009687m .g) derived from phytozome v7.0 (chr-ID scaffold_7; pos 19 513825 to 19514348)
gcgacgaaacttttggaacgccacagatcccaacggtacgtcgctttccttccctttaaactttctgtcacaaatctctgccgtttgaagttgttatatttctgctagatttatgtatatgtcttcgcaacttgcaaattcatttgctgttttgcacggcagagtacggtgttgcccttttctgaaacgacgaaataggatcacatcacatttagtattcaactggtaggcaaatcgagctccgcatgtaggcactaggcaagcatacctgttgaccatggtcacaaagatagagatgaacaaaatttagtttcctcaaaaaatggcagcatgaataattgtttgctggctccataatagtaatatgttaatcggtgttcctaatcttaacagctggaaataaaacttatacacttatctagtgacgtcaaattttgtattttattttcctcataattaaggagaaaattggatttgatatctctgcagctccactgtactacaaggggtggtaccatctcttc

SEQ ID NO: 112760 - DNA, 707 bp, Setaria italica
  Intron number 3 from transcript Si021607m (locus Si021607m .g) derived from phytozome v7.0 (chr-ID scaffold_3; pos 17 938969 to 17939675 reverse strand)
gcagacgttcccggacgggactaggctggaggtaaactactcctatggactagtactcgctaattaaattgagtacactcccaaaattaagagtcttctgcatcggtagcaaaatccgagcagtaactaaattgagtacactgctcaactaactaattgtaagatttccgaatctagctgtaataaacgtgtaattttccatgatcaaatcctgtgtccggccgacgtcctatctgagtgcaatgagcgcaaaatcttgggtgattttgaatcataattgtgcaggaccgcggcaaatagccattaaatacgtacttagccatttgatacctaatctagtgcattcaaaggggtgggatgttctgaggtcccaagagtaaagagcacatcaatgtgctgcccgttttggttggtcacctctgcgtctttcatcaaaccagccaattcaaatgcttgatcattcctagctgcatctgctaattagtgtccaggatgttgctaatcctatttctgttcccttttcttgctgcactaattgtatagtaatctgggttagtttgtagtgtaatctaacgtccacctgaacattgcaatatgcagttctatatctgaagacagtttttaaaaaactctgaagacaaaaacaataattttcacgcgagcagtgtaagctgattaccacttgtgggctgccattttttcagatc

SEQ ID NO: 112761 - DNA, 1037 bp, Setaria italica
  Intron number 1 from transcript Si024863m (locus Si024863m .g) derived from phytozome v7.0 (chr-ID scaffold_3; pos 42 887224 to 42888260 reverse strand)
cctcctcaccgccctccctcgctccgccgcctcaggtgaaaaaaagaaaaaaaagttatcccttctgagctctgaaaatgtttcgcttttaaacattggagaatatctaggagaattacgaattacaatgaacaacacattagacaaaatttgcaattttgcttttttttatcacaggcatgaaacaacctgaattcaaacgttccttctcgttctcatatagcatgatctttaatgcactagtgtcacaattcctactatcgagtgtcgtgtacagaaagtatgacatgctatgatgacagttaaaaatacaatgtgtagacttgagccacctgcacaagaaggaaaaaaatgatttagaatccattcccaatattgaatacttattcaagaatcaagagctagagttatgttcagtagatgcagaagcagaagggcatatgttgtgcaagtggtacagacagatgtatcattgttttttaaaaaaaaattataatgtatcattgtttagagcccttttttagtttactttgcctcggtttctaattgcatacaagcaatatcaatacaaactaatgactgtatgattctactgaatataagttataacaatggatcatttggggctatatatttttatcgtttagaatttgtgtgtgcaactcttcaattactcaggaggtttggaattgaatactactatttctcacctagtctcccaaattgtacggaattagttatggtgagttagtagttagtacctttcctaaggagtatagtttgtacttttgatgcaactgttgccaggctgaggtgaggaaacaacttttttgatcaatatttaagtggcccgatgcatattaatatcgtaatattgctttgctatacttatcacctaaatttcaatatatcagaccatattgaattatttatttgcatttttattgttttgccacgctgtttcaatttctaactataggcaaatatttttgtgacttgcaggggattcagctacaaaacctaaccttcaccttgcc

SEQ ID NO: 112762 - DNA, 653 bp, Setaria italica
  Intron number 1 from transcript Si015815m (locus Si015815m .g) derived from phytozome v7.0 (chr-ID scaffold_6; pos 32 936204 to 32936856)
ggtcaacaagctccggccggacctcaagacgtaatgctcgtgtcctgctcttcctttggttcatcggttcatccactttcctgacaaccttgtaggtggtgctgctcttcttcgctcttgcatctgtgtgtgaactcttccattgcgtggttctgttttcactgaagtggttcatcatgtcgattgctttcagtacagttgacgcttaatttgaagtctcaagagaagcaatagtattccttgtcagagacaaactattcgctgtcaatgtgatagtgcgctttaatctcgttgtctagaactctaattttttcagaaggtccgataaagtagtctgttcatttctgatgcatacacgacgctgaatggtgaagaactacttgatccgtgcattagccatgccatctacagctccaattttgttctaaaggctcatggcatgtaatggttgatgtgttgacaataaactagtctgttaatttctgatcgcatacacgacgctgaatggtgaccaactgcttgatccattggccatgccagactctgcattttactccccagtaaattgcagaggctctcacatcaaaacactgaagaagaatgctgtttgttctacagggggtgcaagttttctgcggaggaagagcgcgtgg

SEQ ID NO: 112763 - DNA, 807 bp, Setaria italica
  Intron number 2 from transcript Si010645m (locus Si010645m .g) derived from phytozome v7.0 (chr-ID scaffold_7; pos 20 747853 to 20748659 reverse strand)
caggctaaggtcgtccgcgaggtaattcgtccggtcctgcctccgtcaattgtttatttgcgccgtagtgtttcgttattgcgatgcttgaaagagtatagtttgatatttttggcgaagaatactagttgctagcatagttctgcgccctgtttcttagtgtttgattcctggaatcgaaattttacatttgaagtggagcttatggtgttttcctttcttgttgggaggaaaatggagcatgggagattgttgttgtttggcagagattcaccttggtgcttagcgcatcttgatttataagaggaatttttgtggatgaatcgagtgctaaacagggatttagctgaatgaaaatctcctatttatgaagatctaaagaattattttccattatttttctttggcaaaagtaattgtttgcttctgctgactgtttaatcggtccagtatttgaaaattagcatgtagcttagataaccggttttcgaattctgcacaagctttagcaatgagaaagatattccttcatgtagctactcaatcttgcatgctatattggtcgcagctgatttgttctacacgatacagatatgttatgtacctgtattttagtggaagctttccaaagaggagctttgttctgcatttcttatgctacgatgatatttttcatgtactctctgatctgagccactagctctgagttttattattgtttgataccttggtattttgattttttaaaaacaattcctctccttttgtacagtcaaaatacattgcacaacttaaggaaaaagcaga

SEQ ID NO: 112764 - DNA, 992 bp, Setaria italica
  Intron number 1 from transcript Si006125m (locus Si006125m .g) derived from phytozome v7.0 (chr-ID scaffold_4; pos 33 925267 to 33926258 reverse strand)
gatcggcatcggtggtgcgattctgatgtgagtgcctgtagactgctgctagattttctgctctatgttattttttaaattttgctctatgttattttttttcataatggcatttagttcaggggtggattcaattttagattaaacttgcttggggataattgaatcctgtttttgtgggtgcctgggtggttttgcattgacctgttaggaaagtagaaatacacatatcttctatacagcaaaataggcaagcgttttcttttccattttgtgacaactgtgaagacaacaaggcgctttatcctgaataacattaatacctgttgtgctgtacgactgaagttccaatgccttttactgtttctccctcaaagttctggttatgatcattcatgtttacagataaagtttggtttaattatatgcttgtattgttgatatcctgcaatcagattggaagagtagtgaaagtgggtaactggtgcatttcagacttgataccaaatcacaatatagtatctgataatgcaccaacatggcaacatatacccaacactatgtttgcattgtctattgttgcttcagttgtttggttgattatactctctgtttgattgttagcttcagtatgctgatgttgtctgtcagtctagtatgaaattatttccttaagtttgaaagtcactgtgcggttatgatgcagttatgcttaccagtgttcttctgaggtcaattgtacttccagtgcctcaagttatttttctgttatcaaatattttaggttacttaactcaagttttttatgctttgctgtgatcgtgcactacaccattcctgttcaattacccaatgtttattccttttgaaaaccccatgatacttatattctatgcttgctccatttctgtgtttgatgtaaatatctatcacagttcttatatgtacaatttttattatttttaatctgggtttatgtttttgaatgcaga

SEQ ID NO: 112765 - DNA, 963 bp, Setaria italica
  Intron number 3 from transcript Si005662m (locus Si005662m .g) derived from phytozome v7.0 (chr-ID scaffold_4; pos 77 79490 to 7780452 reverse strand)
ggcaagtaagttttgactctgcttcgcggcgcattgcaaatttacatagctaaaagaaaggaatgagactggagatgttcatctctaacatggcagtttcactcgtcacaagcctcatattgttttttttaaaaaaaaagtagaggaggtgattttgaccgtaaagtttctacaactttcttttcaatcatatattcatatcattcaatacagccaccattatcttcaagattgatccagtagttactttaattttctttttcgacggatatgtggtttccttctctttaaaacaatttaatttgagaaagaattgtaggcaagcttgcaacacgtgctccaacacatcactaaaatttgacgcgtctagtaaaacttaagtgctcctgccattgctttttcttattatgttttagcaaaagagtataaaaaattcactggcatcaaagtgctctttggtgagaaatttcccagcatgatttttcatgtcatagattgaataattttatacatgttcttttgtcaaagtttgtgatggttagttgctctcattctatagaatgacaagagaatggtgggagtataggcctacagtggtctatcaactagattttataggatacgatagccaactaagaatacaattgggaagcactagagggctatgctacaactctatatgcaatgcaaatttaccagtactaattataatgaaattattaatctggggattgctagtttgcaatctcttggatcgtgttggaatggacattgggtcgtgtaaatatatatatcagccaatcctttatgagcttttcttctggaaaatatttaaagcaatacaccaatcatgcatcttttagtgtcatcttttgtaatatacctaaaattgtgctcatgcaacagataggagctgtttcaaattcagagccttatgattctgtatttgcaggaaccgagtta

SEQ ID NO: 112766 - DNA, 934 bp, Setaria italica
  Intron number 1 from transcript Si010065m (locus Si010065m .g) derived from phytozome v7.0 (chr-ID scaffold_7; pos 22 84014 to 2284947 reverse strand)
tttgtgagtattatttttaaccatcactactgtttatgttttgaaaattaattactagcttccctttgcaatttgcacggcttcaactaatcaaattccatcaaagaatcatatatatatatatatatatatatatatatatatatatatatatatatatatatatatatatatacacacaatgaaatatttaatgatctggcatttgttaagatgtatatatatttataagggggtgtttgaatacgagctgctaaactttaggagggtcacatcggacgatcggatgctaattaggaggactaaacatgagctaattataaaattaactgcagaacccctatactaattcacgagacgaatctattaagcctaattaatccatcattagcgaatgtttactgtagcacaacattatcaaattatggactaattagacttaatagattcgtctcgtgaattagatttcatctatgcaattagttttgtaattagactatatttaatacttctaattagtattcaaacatccgatgcgacgggtactaaagtttaggagatgatcttactctgcttgagatgatggcccaagaaaattatattattaaaccaacgttgctatagtcgtattaatacgccacggaaataaatgtgaccagatgggctacacacattgcccgtctactgatgtttatctcgattccgattaggttctttaatccttttcttccctcatttttgccgctatgttgaatggactgtttacaacctaaacaataatgattggccttgttcaccatttatacggccgtttagatgaacactagcttgtatcaaaaggtatattgtttctttttcctatctttacaaaccacacctacctaacaattactttccaggacatttttggaggtgcgacaaccaccataggatc

SEQ ID NO: 112767 - DNA, 749 bp, Setaria italica
  Intron number 2 from transcript Si015390m (locus Si015390m .g) derived from phytozome v7.0 (chr-ID scaffold_6; pos 11 849213 to 11849961)
ccggcaacgcatctctgcctgttgccgcgcgtgaggtacggctgtctttccgcctttttctgtttggtaatttacgtgtttgtccatcttggtcggcctcacgttttctacgtcccatcaaatcttttctgctgagcactagctgcagccatcattgctgcattactttctgctgcatctttcgagcaatcatgtgtcatttgatcgtcttctgtgttagatttttcacctgagcgaatggcaaatccagttacctatcaaattgcactgttttttttccagataatgaaatctttagatcatgctgtagatctgatatttggtagaaatttcatttcaaatgtgggttgctgcataatattttggatcattgagttgattcttgattccataggccaggagtctacagcactgcttttgttttgtcggcatccaacatgtgtcatgtgagactccttagcttgctttgatggatatgagtatatgactgatcccactcaaataatggtttcgaaaaggacaagtgctaatatacgacaacaaagatataactcatgctacgaatagtccaattagcgaaacaactttttgtgtaccactagctgaactccaatcattgttgtatgtgctaataaaaaccacgccaataatgtaaacaaatcgaactatgacttggagacatgtatgtcgccaccatattaaagtagcatgcttttatgctaccaaagtttgattgtttgttgcagtaa

SEQ ID NO: 112768 - DNA, 673 bp, Setaria italica
  Intron number 1 from transcript Si010174m (locus Si010174m .g) derived from phytozome v7.0 (chr-ID scaffold_7; pos 30 500535 to 30501207)
cttcgccaacaccggggaggtacgtgttccgatctgaatctggttgtggtcgagcgtgatgtcgatgcctgtgcttttggaatttaggatgcgcgctttgctgttgctaatatgtctcacagtaaggttgtttgcttatgattcatgagtgactttgttgtgaatttcgtatgactgctagcgatgaagctcggtacgagttatttggtaggtgttctagattctattgaaataatcaaagctttgggctatttcatatgtggttctcgaaccggtaatattaaatttgttttcttcagttcattaccatgatctagcaaggattgcatcctgtgaaataacctaaaaccattctttctatagttgttttgtttgcgcctatttatcttttgcacaccgccttgctttctatagttgttttgtttgcgcctatttatcttttgcgcattctaaataataatgtttagcagccatgtaaattgctgtgcaaaactatttatatgcgtcagttttagtttcctcattggcgtttatagttgtattgctcagattacaagaactgcaaggtagcaatgtttgtccatgcatttataatttcctgacactttacttacattacatttgcaactaatttgcaggttcaatctgttaaactcatccgtgacaagaattc

SEQ ID NO: 112769 - DNA, 675 bp, Setaria italica
  Intron number 2 from transcript Si021537m (locus Si021537m .g) derived from phytozome v7.0 (chr-ID scaffold_3; pos 23 94917 to 2395591 reverse strand)
atagggggctcgccgtcgacttcaaggagtcgcaggtccgaggcgcatcgaattgctttattttgttttttacaggttgcacagtgcgtgctggagtattgagtgcagtggtagatcgaaatagaatgaggtgccaattagcttttctatacaatggaataaaatttatcccaacctctaaatctggagatgcacgcagcggtgggtgccaattagcaaaatggatgcatatttatttgatgttgggttcagctccacttagttactgcttcaatatcgattgacatgcttactggtgttttggctgggtgctttggttaccatttggtatgttacaccgtcttctacataggttgtatgctgggggcttgggtccgagtctgttcaaactattaatttgaatttctccattctagatttgagtcaatctgtacctcagctcttaattcagtctgaatcacccatggtggtgttcatatctatttcttgtgtgtgtgtgtgacttgtgatcactaatcagcacacttcctagttcctacccatgtagatttcttttctttttcttcttttgaggaatgactgtattccacatctatagctgtttcggtgttgccaccaaatcctagaaatcctctcttgtgctaactgttctattatactaggttgctgagtttg

SEQ ID NO: 112770 - DNA, 988 bp, Setaria italica
  Intron number 1 from transcript Si011668m (locus Si011668m .g) derived from phytozome v7.0 (chr-ID scaffold_7; pos 22 714250 to 22715237)
tcttgtggccattggcttcctggatcctagcaactgtaagctctcatcctttcctcagagctgcatgctctttattgttgtaaatttgtgaaatttctggcaaagctaaaaagtaagtgcaaaaggaaaagtaaagaaaaagatattgttgtctgaaaaattctagttgaggttccattcagtccattttagaatataaagtttaagtttgatagatcactcatcaactaacctgtcaacattcagattttttttactgacttcgtagctaaattaatgtacttcagttcttgctgaaagtgcattgtttgttttcaatgttgcgccccagaccttaactgaccaacatggagcagagtagcaaacaagttatttttgatgtatctgctcatattgcaagaatgctagtgcctttggaatgtactagcctaggggatgtagttgatatactgcatcatttgctattttttttcctgttatcctacttatgacagtgcaaatctagctgtaagcctgtaacacgtgcctaatccagtttaagaaagcaaattgatgtgctgtaaatctagctgtaagcctgtaatctagttgatgtgctgttttcgcttcttttttctcaaattcttgcctatcagtatatatatctcaaattacctggtgtcgctgtctcatacttggacagcatcgatgtatatctgttcaattaattctggtcctaggggcatgttgataatattttcatggagccgcacatctgcaagctcatgattgtgcatgcgagccacataagcagctgcacagatagacatgacggtctacctgtggctttctttgcacccatatttttttttgaaagattatttgcacccatgtttttttttgaaagactatttgcacccatgttttcatgtccagcgacttgtggatcacttgaagcaggtatgagacatgtgcattggcatttggcaggtgcaggagcaaagtgaga

SEQ ID NO: 112771 - DNA, 802 bp, Setaria italica
  Intron number 4 from transcript Si021158m (locus Si021158m .g) derived from phytozome v7.0 (chr-ID scaffold_3; pos 44 183517 to 44184318 reverse strand)
gtcagattacagaagaggagctgaaagaggtacgacctagggggcgttttcttccatgtcttatttttagcacgtgtcacatcgaatgtttagatactaattaggagtagtaaacgtagactatttacaaaaccaattacataagtggaatctaaacggcgagacgaatctattaagcctaattaagcctaattaatccatcattagcaaatatttactgtagcaacacattgtcaaatcatggactaattaggcttaatagattcgtctcgccgtttagattcgtcttatgtaatgggttttgtaaatagtctacgtttaatacttctaattagtatctaaacattcgatgtgacgggtgctaaagtttagcaagtggaagaaaacatgcccctaatcaacagaaacaaacacctcattacattactcgataagcttaggccttgtttagttggccaatttgggaggtgccaaattactgttacagcactgtagcacactgtagcgtttcgtttgtatttgtgaattattgtccaaatattaactaattaggctcaaaagattcgtctcgtaaagtacaacaaaactgtacaattactttttaatttcatctacatttagtactccatacatgtaccgcaagtttgatgtgatggggaatcttctttttgcatagtgtcaaagttggaagttgggagtaactaaacatggccttaattcagtgaagaatccggactctgaacattctgaatttcctgcaccatcaggtcctcactttgaccgcctcggcgaacaagctgtc

SEQ ID NO: 112772 - DNA, 961 bp, Setaria italica
  Intron number 3 from transcript Si021753m (locus Si021753m .g) derived from phytozome v7.0 (chr-ID scaffold_3; pos 24 170806 to 24171766 reverse strand)
gcgatctgggcgcaggcggctatcacaaatacaaggtctgcactccattatttcgattggctaacgtactatgaaaacgtgatatcggctggattacctgattgtgatgtttggaccgtgatcccacggtctctgttccgtttgttccttgcgttggcatactagctacaacttttcagcctgtcaccgtataccttgttgacaaataatggaaatgaaactagtgagtaccagattttgactcctgatacaagtagtatatgacatcattcttatgtaaatatatttttccttgacggccgacactactggattttcaatatttccagagtgctttttgcaacagctaacgggttttatcggttttttaaaaaacaaaattcaaatgaccaaggttcttttagtttaaacatttcccaagagttatttagtaagtgaccgaatttttttattggaaaatgttggttggaaattcttggttcctaatttatttttatcctagcggattgttcaatataaactataaaacagtcgaccacttaaggaaaaatcattaaaaaaacaataaacctcatcgttttgaaaaaaaaacactcaagaaatgttaaatatgtgatgtgcgatatttatacgaatttatggttttataaatagaattttttgagaaggttttaaacagaattaattatatattatgagagtattttttaattgtgaatctattaacatgaatcttatgtttcaatctatgtgatcttctaaaaattgatagctgaagtttaaaaagcttgactaggaagaatcgtaaatagacttcattgtatcgtggataagaggtagtggtatacaattgaagtttgctaccacaagaattagagtacttgacaaagtattgcgatgcacaactacacaagtacagtgttttttcttataaggacacattccaaactgtttcaggagg

SEQ ID NO: 112773 - DNA, 614 bp, Setaria italica
  Intron number 1 from transcript Si023612m (locus Si023612m .g) derived from phytozome v7.0 (chr-ID scaffold_3; pos 64 74853 to 6475466 reverse strand)
gcttcaggaaaggggtattgccgattgctgaaacggttgtgccccctgctgaagttcatagtgatgaccagaaggtttagattaggctgtttgttaggatctccagctggtttaacttctgcttgaaaggggctagccatgtttcgatgttcgtcttgattactgtgcacagtcatgttgttcctagaaggtttttttatttgattgctgtgctgctatcatgtttgatttgttcgtagaagatgttttgttgctggaaatagctgcatggtagttatttagtataccggcaccataattgctgaccactagaacagtattccggtctttgatgagcaaaacaggtgctggagtgttccttttcttattcaactgtagctgtggctgtagcttacagtatgtttctttggtcacattacatgacacttatcagttttgacataatgtttgtccaattgtagacggcaaatgtacctctttgaaattaatttagtgttatatcagaatgggtgtatattcttctatctttggaaatgaatttttgattggatacacattgactggttttcctttattcaggcagcattttgtttcagtggtgtgcaagctttgct

SEQ ID NO: 112774 - DNA, 863 bp, Setaria italica
  Intron number 1 from transcript Si010627m (locus Si010627m .g) derived from phytozome v7.0 (chr-ID scaffold_7; pos 85 10471 to 8511333 reverse strand)
cggtgggaattggattgctctccctcaaaaagcaggtatgatttgtgaacttacatattgatgtatcttatcttattaggggattcaacgctgttgtgagtttagtacaagtctaaacagtctttttgttcttgatgctaatgtcttctttttcaaatttatttgctttgttcttttgtttaggaccacttcaagggatttgagctatcattttttttaaaacaaagtgagaagaaaaactacgattattatttctctcatgcatgaatttagaacaaatagtatcgagaaaaaagctttgctctttcttccccacctctccctctctctttagttagctaggattctattaaccctctcgattcatttgatttattattttcaactttaggtgtacttttagtcaggatcttaacttctttcttgatgcgtttaggatcaatggtgccatctctgctacgcctgtactagtactttatatctttccagtctgctgggacatgagctagctagccctagtctattcttcggtgtcctcttcttctttctgtttttgactctttatgttttcgttttcttggatgtggagtattccactaaggattgtggcactctttttatgcttttaggaccagtggagtccatagcaagtcttgcagttaggtatcatgcaactgtaggattcttaattgtagtggcaagtcaaagtcccaggtttcttaccaaagtcttgtgtgacaagcctttccgtgtcgcaaatttcgtattatgatcatgctactttctatcttgttgtgttcaaaacaacaagttggactctaagtttgtaaggcttttgttattgtgattatagggttaaggag

SEQ ID NO: 112775 - DNA, 624 bp, Setaria italica
  Intron number 1 from transcript Si009316m (locus Si009316m .g) derived from phytozome v7.0 (chr-ID scaffold_7; pos 18 161543 to 18162166 reverse strand)
caggtatatctatttcacactcttcataatcatctgcatactatcctgtattcttttgcttatctgatgtgttccatcataacttcgtagggatattcttgtgagatttacatatttaatggatccagattaattcctgtatatgtatgtatgtatgtatgtatgtatgtatgtatgtatgtatgtatgtatgtatgtatgtatacatattttgagtcacagtgccatggctatgttgtgccaacataactgtagccttgaaaggcacaccctgaactatgttatatcagttatcactaatctgagctgtgaatcttgtgatcatactaacaatacccctatccaaaatccgaactgagaaatcctgttgaattttatatcataccacaattaactttggcatgccttggacctttttcttcgctgtagcattttaccttctggttgttattttgcttgagttgtttttttaatataaaagattaaactgttatgggtggcaaagttcctctggtcaagtactactagataatcttttgtcctgcggtaaagacattgaatttgatataatctctttatcactttgcagagtctctcgcaattcaatcttccagtatctgttcc

SEQ ID NO: 112776 - DNA, 1002 bp, Setaria italica
  Intron number 1 from transcript Si025514m (locus Si025514m .g) derived from phytozome v7.0 (chr-ID scaffold_3; pos 14 805297 to 14806298 reverse strand)
aaagctgccgcccccgccgccgggaaagccagcaggtcagtcactgtcaaagtcaaaccgacgatcacacgcggttacggtaaatttgcttgccatgaaactatgaaagccttcaacttccatggtaatcaactaatcacacttgcatttcgtgcctccctaggttttcaccagaatcatcaatcgtgcacccgtacatactcggtcatatcaacatctctttcgttatatataaaaaaagtatatccacatctgtaattaagaggcggttagtttactattagttgactagttgcacacttcgaagataaggtgttatggaagatggacatatgttgacactgctagctatggattgtccttcaaaaaaaaaacatgttaaggattgtttgcaacacatggattttttttttcagtatttgcacgtagaacagtctagcactcataaaaatcaggtggcccccagttctgaattatactactgcagctgaatggtaccaatatcattatgttattattagtacaagatgagcatcaaacacctttgatttctttggtcatcggtgcttggtctgtgtctgaaacacacttctttttcaactaaacataggctggaaggtgcaatcggtacatgcatttttcctaggaccggtgccttttggaccaaatggttcttccatcctttttgacctacattagcttttgggagtcaaaaaatggaacaactcatgaccatgaaagcagagaaagaaacaaagttgataatctgaccgaagtacacagaactgaatgtcagctttttccttgagaagcttctctttgaaacatactcccatagtttttaaaaaaatgtttttttccttaaaaagtgctcagactttcggattaccgctctactgcttcagatgcgtttggtgcatgatttacaccaagctaacaaaccggcatgtggtatccaatctttcagggcgcgagggcctctgggcatcgggtgctggacgg

SEQ ID NO: 112777 - DNA, 948 bp, Setaria italica
  Intron number 2 from transcript Si010203m (locus Si010203m .g) derived from phytozome v7.0 (chr-ID scaffold_7; pos 28 811996 to 28812943)
agctcgaccagttcctcggcctcgccgtcgtccaggtccgtcacttgattgattccgccgatgacgatctctcgtttcgttgccctcatggttgttacgcggcgtgaggtttgatctgattagggttaagtgaggcgtcctttttgggtaattaacttttaattttagtatgatgctgggcgctggctgcagctcgtgcagtagaattgttatgatctcgcatgggtgagatgagttcatcccccttggcgttgtggaattgttgaaagagcaactatttgcagaactatctagtttatattggtgtactcctagtttggtgccgaaatgtgtcttttgttgtttttatagttcactgcatgtaaaattgctatgattgtttattacagctacttcatcttgcaggtataaacaggcatagttgtgctgggatacatcttgatctctttcagtttaataaatcatataagcactctaaatgtagatactgttgtctgtgctcaaaattttggttgctaactctagtaatcgatcgcaactctgacccttttgtgtttgttttgtaaactagcttgctcgtgttggtagaacattgtagttcattgggttgaattgttaatacatactatgcaatatggaataggaataagtccatatttgtagcctgattaatcaagggtttactaatgtgcagttttttactccaaaacacctgcatatttggtttagtatttaaccattgtcacttaacacattgcatcatggctactatatctatgctctgaaatcacacagtactcttattgcatgtaaattcattctgattcccaaatacttccaaacctttttcatcaacagtctggttgcccttgtactatgtatatgctctttgtccttaccactgttctgattactcttacgttttcttcctttccattcaggcgggag

SEQ ID NO: 112778 - DNA, 831 bp, Setaria italica
  Intron number 2 from transcript Si023033m (locus Si023033m .g) derived from phytozome v7.0 (chr-ID scaffold_3; pos 77 31535 to 7732365 reverse strand)
cgcgcttcgtcacatccgccagcgctgaacccaaggtgccatctttaccgctgctgatttcctccttttcttaaaaaaaaactatacctggtaacgtatggctactgggcctgcggtaaagtttgcatctctcaagtggtgtccccattgtaccagggagattatcgtttaaggaagctaaactgcaatcctggccatttgttttattagattttatttgtctttattagtttcataatcatgggatagaagtgcaaattgaagttcatcattgatgatttaggtgtcttgttcactctgataaattgattgaatctaatagttgtatgcatgattaccactctagccattacttgcacgaagaagcagatgtgctactgtattagttgacacggtgggctagccttgtttagttgcctgattttgggtttccaaaatcactgtgctagcactgtagcacactgtagcgtttcgtttgtatttgtgaattattgtccaaatattgactaggctcaaaagatttgtctcgcaaagtacaacaaaacaacaaaactgtgcaattagtttttgatttcgtctacatttagtactccatgcatgtaccgcaaatttgatgtgatggggaatcttctttttgcatagtgtcaaagttgggagtttggggggaactaaacagggtagctttgcggtcacatttggttcatgtgtacctattctgctgtctcagtttgtaaggcgcaataggatggattggatgtatttcatggtactgatttggttcttccgccctctgcaggaagcagatattcagtccaaagtcacaaacaaggt

SEQ ID NO: 112779 - DNA, 1036 bp, Setaria italica
  Intron number 1 from transcript Si025210m (locus Si025210m .g) derived from phytozome v7.0 (chr-ID scaffold_3; pos 27 210183 to 27211218 reverse strand)
ccagggagtatctacagaactatccatttatccaggtgagtggagatgttacatttgagaatgtatccaggaatatcatttgagtgttgcaactccaagatgcatgatttcttttgattgtttttaagatgcatgttcgcttagctcattgccatctaattttagttatttgtactagtaggtttaatataactgaaaactaagtttgcagctcactgaaaattcttataattccacctccagtatacttatactgcacagcagaaaattgcgtaattactgttattttgttggaccttctaatttatagtttaaccatgatagcatttgatggccagatgtcaattaaaacaaccaaaatagagcatgttgtgcttccccatttcagtaccaaagcagatactgtcatatcagagctggtgctgttctgagtatcaaagcagctccccattgtactccaaacaaatacatgcattggacatttgaaaaactgatgatgaattgattcttcttcaccacagtagtagcaactgttagtgcctgtccaccctctctgaagaagattactcgtaatcaaattaacaacttctgcttaacggctaaaggaatacttagttctttgatagcatctttattttccacatgccctaaaaaatgtgatttcaatgatctaaatgcattctagggttcagtattccactccattaagacaaagccaagggatttcttctcctcatggtctgagtttttattttttttaaacttgcctggtctgtttcgtcttttttcatgcttacatggacttttacatgtgctcagcttgcctttcatttcaagttcctgcatatgaattacatgaataattctcgatcctaatattccagtgtagtactttcaccatgaacagtctatgttcttacaatgaagtattgagcttgtttattgaaaagaaacaataaaataaaaataagaggtatgccagatgtgacccttttcattttacaggttgacgaagtaggtcttgaccaggtacctg

SEQ ID NO: 112780 - DNA, 245 bp, Setaria italica
  Intron number 2 from transcript Si010144m (locus Si010144m .g) derived from phytozome v7.0 (chr-ID scaffold_7; pos 33 610611 to 33610855 reverse strand)
ctggaaaaatcacttttcctgtgtccctcaagcaggtgatgatgctctctttgatccctacatgttttatttttcttccctttttttgataattttagcatatttttatatatttttgtatccttactgtaacttgtgtttgggaagtagtactattaaaataaaggaaacaaggaataaaataaaccacacttttcctattcactaatattgttttgtttgttatattcagcctgggcctcgag

SEQ ID NO: 112781 - DNA, 914 bp, Setaria italica
  Intron number 2 from transcript Si021622m (locus Si021441m .g) derived from phytozome v7.0 (chr-ID scaffold_3; pos 19 141197 to 19142110)
gcaccatcgtcatcgcgtcgctgctctacgtcctcgtaagcaaccccacaccacaccccagatgccaaatcggcacgtcgctttcgctctgtctcgtcttcttgttttaggcttttagccctctctatgcttcctttgaaaattccccggttggcttgatcgcgagagatccgggaagctacagcctacagggcgtctacgctagaagcacgttgcatctgaccggtgtcgtgccaagttgatcttaaaatatcgccggattcattggaggttgttggcgtcgtcgcgtcacatcacgctctcgcaactctagtgcttgtcgatagtattaaaatcattgctgatggaatcgttgaaaacaaagggagcataaccatcgtgggccggtaaagtttgcattttactataaatgtgcaattgtagcatttcgtttgtatttgtgaaaattgggtggtaaagtttgcattttactataaatgtgcaactatagcatttcgtttgtatttgtgaattattgttcaaacattgactaattaggctcaaaagattcatctcgcaaagtacaacaaaactgtgcaattagtttttaatttcgtctacatttagtactccatacatgtactgcaagtttgacgtgacagtgaaccttctttttcgcccatgttgggaaaaaggaactaaacaaggccgtgatacgatcttcagaattttttggtcttcggttcttcacctacagtatagtataccagtttgactgtttcgttgtctgagtctagtgctaatgggccttgatttccctaacagacaaaggttttgggctaggttcaaatgccagcccatagcgccttcgatagaatctgtacatttgggacttcctgcctcattgagcttgaaaatgcatgcagggtctcggc

SEQ ID NO: 112782 - DNA, 1042 bp, Setaria italica
  Intron number 1 from transcript Si011213m (locus Si011213m .g) derived from phytozome v7.0 (chr-ID scaffold_7; pos 23 184438 to 23185479)
gcacgacgtctccatcggggctacctgcacttttggtgagtattagcggtgtgcaaatctttttgttactgctgttcatttggccgagccaattctctggttgagttgtgtctgaagattggtggaatgcgttcatgaagagttgatgtgaccatgattttttttctttttgccttttggggcttctctccaaggagttagcacatcttttgggggttaagaaaagttgaatgtcacatagagcccttttggttaccgtgatgctttggaactgagggttagcatgcacacggatggtgctcctttacatgattcagcttttggcataggttgggtgggtacattaggttggttcagttgaagtttcaggcttgcagagaactgatgcatcagtagagatgcgctagttcagtttgattctatagatggaacccgcagtagccagtaggcagtagtgtaatgagctgaaaaaagcccatgcctctatggtccagttgccttttggctcctgatggatactgagttactgagaactgaaagtaaaggtcgactttcgacacacctatcgtcctgtttacgcagccaaatccacacatttcgtcagaatttgcgtttcccacgtcgagccttctgaacttctcaatcttgctctgacgagagagatacgagagacacatttgtcacctacttcagcaataaaatgaaatgtcagacaggagtcagggctcagttagttcagtagaaaaacaatggcatgggcatgcctgcacaatgaacacaacgacgcgtctgcctagctacccgcactgccagcacacgatggttcaggtttcagacatggaacctgagtggaaccttcgcacattttgtcatcttcagaccataggcttccttcggacaattgtgtttgccattaaaaaaacaaagcctttgtcgttacagagaaataaaccagatgcttgtttgacatgatttttgcttgagatctaacgtgtgtccgtgcaaaataatggttgtaggggagctgaaggtggtgctgtcc

SEQ ID NO: 112783 - DNA, 835 bp, Setaria italica
  Intron number 2 from transcript Si025301m (locus Si025301m .g) derived from phytozome v7.0 (chr-ID scaffold_3; pos 64 50150 to 6450984 reverse strand)
aggtgtgttccgtggttttttctttgcgctattctgatttcatggataaagatggcattttcgtggttagtgttgtatttgtttcaagaaacttgccctactctaggcgcaacaaatgtgggcaatcagctgcgttggtgcgagttccaaagtaaaattttcgcttctattttgaaaatcagtaccatcgtcttgttcctctgttaatcttttgtgcgcttagctctgattatttgcaacgcctttagattagaattagactcttcctttcgtttcagtgcattagttaccaaattccatgtaaaaagggcaattgattggatgtatgaaagctggatccttcaagtgaatgcttgtccagtatatgtggctcatgttcagtttcatctctagcctagcctaatttgcttgcgactacgaggaattgctgttgttgtatatgtgttctcaggctaggtgtctgagcgagctagtacagatatctatcaaggtgcattttggcccatatgcatttttgtcacaggaatcaaactgttcttgtaaatttccagcattccaaatatgtccttgttttatataaatttgtcctggagcttctcatgggattgagcactgggcagttaggcttcttcttgagatccttttttagttgtgtttcatggagtttctccatagctctggattagtaacgtgctataaaattgaaaccacatcaagcactattcaatatcagtccatcaaaatacttcctaggtcaggagttacattttcatgttgtgagtcacaggttaaaactatgttttttttttggtttattaggcaattggagctgaat

SEQ ID NO: 112784 - DNA, 596 bp, Setaria italica
  Intron number 1 from transcript Si009453m (locus Si009453m .g) derived from phytozome v7.0 (chr-ID scaffold_7; pos 22 594472 to 22595067)
cgcgcagaaggccacttcttggaagacattgagcggtacacatcccccattctcctcttcttttccttcaggattgatgacccttttggacgccgccagttcatttttgctcaaaattcctcttttgcgcacgtctgttttgcttttagccctgttctttcgattatcatccattcgagcattgcgtgaaattcctacaatctgctaagggttttagattttgggtcgtccgggggttgttttggactgatcaagatgtccttccccctctggtagcctagtcttccagctgatggttgtgttatcatttaggacctggcagcagcttttgagatgaaggattggtacatgactgtgcgttgatagtatctctgtacacttatacatttcttatcgttacagcaaaacatatagcctggtctccttgacgatttatcctacctgcatgcctcattttgcataagaatcctgcttctcgaatgcattccggatgaaaagatttaaggatccaacaaccatttcaggcatccccttggctaacaaatacgcctgttttttcaggcaaggctccagcaatcgtagccaagggtggattt

SEQ ID NO: 112785 - DNA, 593 bp, Setaria italica
  Intron number 1 from transcript Si022691m (locus Si022691m .g) derived from phytozome v7.0 (chr-ID scaffold_3; pos 16 112231 to 16112823 reverse strand)
atagcgctcactctgttaagacagccatcaccgaggtatagccctgcatgtcaactttctttatgacttccatattcaggaaaagtaaagcacgtggattctagtcggctggaaacagtgtagcatattagcccgcggtcaaattaaacatgatgagccgtagatttgtggaattccaattattagttgcacgattcgtgctaattatcgctaaatctatctaaatcttctgtatttgtgcatagaattacatcctttttgctctgtggctgagaatcaagtaaacaaggaagccttttcttccagtcttggtttgtgctagataccaagtagtgataatttgatgagactttgtcagaagctcatggctgaaattgaaacctgaacttataaatgatataccagtatgaatctatttgttttaatgaaggtgtacagcttaaaagccgtccctgttgtaggcttgtagtgctagcttgtatctgaagaattttgccatgctctgtttgatttataacctgaattctgcagagcctgcttctaattgaattgagttctgaatgtctggttacccttgcaggctggatataggc

SEQ ID NO: 112786 - DNA, 907 bp, Setaria italica
  Intron number 1 from transcript Si025207m (locus Si025207m .g) derived from phytozome v7.0 (chr-ID scaffold_3; pos 47 662918 to 47663824 reverse strand)
tacacttttggtaatcctgcttttctcattcaccctaagccaaaattttgacagaactgggcctattcactgtgaaacatttcagatttaatgacaaatcagaagcatcctgctgtgtcaatcctatataatagtcatgaaacctatgtttaatgtcccattctttgttggatatctgttgctttttgttatcaagcatttcctgccagaaagattatcagtataaaagaaaagaaatactcactggcctatagccatggtaccaaatagccatgaccaaaacaagatcaaatcaggcctaactttcagccagtggcttctgaagctgcatatctcctaagcttgcaacaggcttccttcctccattcatgtcgccccgaaactaggaacagctccatcgaaaatgcaattgttcctgtgcttccagagtttcaagggttttttttgttgcgaggagagtttcaagtgttaagaagagtgtattcagtcttttatgccgctccatgtttacacttttgatcacctagcagcaccaatcagaaggtccattgctggtgccgaatgccggacatagttccaatactttcaattgttttcaattcatttgttttcacttgcagtttatttggggttagtactgtttctgtcagtgcggtactttgtcttgattgctcaaatgtggagtaacaacctcttgttcaatcacttcccgtgtgccctgatcagtgtttttgtgcattcatgttccatttttttttgtatttccgagccctgaagttttctgatttctcaatttgcagttcttgctatctcatatcacagtaaattgaaatttccgaagccttaacttaccataaggtgctatgttgcaggtacttgaagctgttgtgtagattccatccttttg

SEQ ID NO: 112787 - DNA, 753 bp, Setaria italica
  Intron number 1 from transcript Si021434m (locus Si021434m .g) derived from phytozome v7.0 (chr-ID scaffold_3; pos 17 574529 to 17575281)
aaccccaccaacaccgtcttcggtacgtgcctggcgcccttctcctcgtttcacttcggacttagtagaacgcttactagcattgcttaatttcttgcgtgttcgcgtagtcgatttgtctagttattcgtcggagatttccattgaatccttgcgcgtaagatgtttgtagacctattggagtttgtttttactgtagcaagcattatctgctctgttactatgggcgacacgagtagcagtaaccattgggaagtgatttgttcagtgcgaatagtagctgcttgtttatgcacactatatgagtaggattaaccattaagaagaacatatgtgtgaaatttgttgatcagaattaggtgctgcagtctatcctctgtttctaaaatttattagtactagttgcaatcagtttttttcgattggagctgtaatcagtaattaccgtcagttttcattagcatctggtgtagatgctactctagatctgcttagatggattgcgtgctattacatttttgaactaaaattttactgaaatgatgacttaccttggtaaattttcctattactgtagtaaatttcagattgcattggtggaattcgttgatctctgaaagctgaatgaagagttgatgttggttactgtagttgatgtttttctgccgtgatttgacggtcaaactgactgtgttgttgctcgtccctttggatgcagacgcgaagcggttgatcggtaggaggttctctgac

SEQ ID NO: 112788 - DNA, 775 bp, Setaria italica
  Intron number 2 from transcript Si008033m (locus Si008033m .g) derived from phytozome v7.0 (chr-ID scaffold_4; pos 32 757159 to 32757933 reverse strand)
aggtgctcgacgactccaccgaccccgccatcagggtaagaagaccatgcattatctccggctgtcacgtgctggcttaatcaacaaccttaattaacgactacgggatacgatccagcatgcacttgttgcccaacatatacatggttctagctaggacttgccagtgcaattgtgatcgaggtcggcgctgacgaagtaaaaagcgcgagccagcaatgtcagtggcggttgcaactgcgcgccaggtggcgccgctgtggccgaaagaaagcttaatcctcgggaaagagcttagcaatcacgtaggcatgtgcagaaagtggtcgtgcatgtatccgtctttaattgtcagagacaagccagaggcaagctgcctgccaacaggtttcgatccaaacaagtactcaaagcccaggttccattttagtctcatgatcatcatttggctcgcctcgagtccaccctggatatagcaggctcgtgattaggttataataggcaatagtactaggtgttatcctttccggaaactcttattagcaagattccgcaacgagaactaggaggaattatgtggttttttcattaaaaaagaatagacactctccaaccagttgagtaaggctcacttcttgttacatagcagcgaggctcacttcttgtcacagagccatcagagaactaactagaattgagcacgctaacccctgacgaggtgaattttttgtaatttgcaggagcttgtgcgggcggagtgcgagcggtgggcgag

SEQ ID NO: 112789 - DNA, 1066 bp, Setaria italica
  Intron number 1 from transcript Si022419m (locus Si022419m .g) derived from phytozome v7.0 (chr-ID scaffold_3; pos 49 674996 to 49676061)
gacgggacgcgcccagccgacggccttgcttctcggtaccgatttcttccccccatccgcccctcttttgatctgctttgatctctttgcaatctctctccatacttgtgcgattggctccttccctgtagcgaagtgtttgttaggtgtttcttcttcccctcgattccgccgcgtgcatgcattgtttcttgggcgatgcatgctgttagaggggattgctgccgtgttggtggtggatggcggtagcaccccgattcagggtgctggttcaatggaattgcccgtactggagcggtggaaagtggatggaggaggaaaaaatcactcctttgggcgttttagagctatccggtagtcctggattttggggcttgtgtgctcttgaattatgaggcacgcatttcggatgaaagcgttggattttagtctgcttgttctttagggcgtgtgatggaattagaggcatgctcttgggggcttgtgtgcgcatggagtgggcaatacatgctttctgttcccccgaatcgccagctggttggcaatcgcccggttcatgttaccattttggaagaatgagaaggtgtgcatgcaccatattatcagtgataagaaagcttaactgtttctttacaaggtttagacttgcaatgctaggggaatatgttgtacatgttggcatcatacatgtgcgaacataggctgacatggatatgcatttgtgattccatcctttacttaaaagagaaaaaaaattcctcagtgtgcgggaatatgttttagcatgagacttaaaaaaatcacctatggaccaattaattggaatatttacttgtgattgtgaatctgacaatatttctactgtctgatgtgttctggttgtgtacttgtttagacatattttattattggtcctccacaaatttaaaagttgtgaaaaaattggagattattaacacagtcgtattttgtactctcttaggacctatactaattttggatctttcgactcaaattttgctcatgttcaggtgctgcattttacgatccaagcaccttttggaag

SEQ ID NO: 112790 - DNA, 895 bp, Setaria italica
  Intron number 4 from transcript Si022419m (locus Si022419m .g) derived from phytozome v7.0 (chr-ID scaffold_3; pos 49 677089 to 49677983)
ttacagcttgccaacttaaggtcatccaaataaaagctttattcatttcttccattgttaagagctcagggaactccttaaatggtgtctgtttgttcacatcagtttgtagtatgcaacattgtgttgcttttttaacatgtagtgatagttaaagcacctttttgcatgatcttccccacctcactacctaccccagatgtgaattaccagtatgttgcagagtagcagtgttctggccacatcatcaacgcagtggcatggtagcagcctaatatcttgccagactttcgacacccctatatgttggaattatatttttcttgcttatgcttccaatgccatcgcggttttacaattgctcagattgtcatctctcctactgaccagcactgccactgccattgtggtggttgttaggagattatctacaattgtactggcgtctaaggccaaatgcttgactgtgtgatctatttgtgaatcctatacatgtactaaattttgaattggctatggcagtaggccagcagtagagtttgtgggtggataggatgtgaaaggtgtgttggctggcaggaaaatagggtggtaagaattaaaataaaggaaatatactaacaaatggttatcactttccacatcttggaagcacattgcaattttggaaattttaagctggctaactatcaaacaatatttttgatatatatcattgacaatttctgaaatttaaatgctattaatatatttccccataaaaaatatgactgggccattgaccttacttacaaaattattaggtcttatgcatatgccctgagtttatttggaatcatcgaaattgaatggctgtacaggtcatcgaaggtggaagaaattttgttggtcagct

SEQ ID NO: 112791 - DNA, 671 bp, Setaria italica
  Intron number 1 from transcript Si015318m (locus Si015318m .g) derived from phytozome v7.0 (chr-ID scaffold_6; pos 11 418471 to 11419141 reverse strand)
cgattggagtacttaagggcaacttggtaagtactatgacagcttctgtggttctttagttggtggacagatatctgtaatgagtagctagatacagtctattgaattggtatttaacacttaggtaggatatatatggcaacaacagtgaagcgaatcataaatgtcctaaatgattttggctgtattagtagggacaggttagtgttttcttgtgtattaagttgctcccttcctatctgaataagcccctgggtaacataactcctggttgcatcattaattttttattcccatttcatattcatatgttctgttgcagttgcatcaatcagagataaagctagtgcttgtttgttacagtcatttacgttatttctgattgactctgtacccttgaaccctcctctttccccaaggtacccccactgttccagtggtactgagtttgtggccttcatagcttcttgtcttttacacctagtaattattatttgtaattcagaactcaaaacacgtttccacatatttttggcctccagagagaatgtgttggctggtagcttactaggcaacatgggactaatcattagcattagatgtttatttggtatgatgttctgtcaagtcaatatcttcctttattttgcaggttcatttgaatcatattg

SEQ ID NO: 112792 - DNA, 949 bp, Setaria italica
  Intron number 1 from transcript Si028174m (locus Si028174m .g) derived from phytozome v7.0 (chr-ID scaffold_8; pos 27 806116 to 27807064)
ttataagggcaaaagcaatccgatctgaagggaaagtgaattaggattacgcgggcaacgaccccatcttcagtgtgcgcagcagccgtactctctgagcgaccagcggagagccacgattgcaatggaaaaccaactacctctaggctctagccgttctgcagaggctcctagcttttttccagctgttcagcgtggcacgtccccggtacgtcctttttcttcccccctgaggctctctgcttttttaatggattttttaatagaagactctctgctttgattcagagcttaattgttgtgatatatttttttaagtacgtcaccaaactaaaacaaactaaccattcatacattttactctggaggttttttttatcaaatagatcatagctctagacattatggtattagacggcccaaataagaaagcacggacctagtttcttttccacaggcctggttcgtagtgtctaatttttttggaagggcaaagcgagcggcgctcagctgatatggaacctttcctctcctaggttcgagtcctcgactcagcacgggtacatatttttctggatttgtttcaggatttaatcagtgctatactttcagtgataagcgacgtgcccgaggcgcatgcggtgacatcatcaatctcaagatttgccggttcagtctcctacagttacaattgcgtgtgtgtaatcataggggtgtgaatgttcgtgcctactgtgtttaaaaaaaccgaaacaagatttccacttttattaacaatcagcccgttgaattcctagccaagctcatccacgaggcccatttcacgtccgaatgtgtggggaatatctaagcttctaacactttgtttcagtggtgaccacagtgcgctagagagatcaactccatggtggtgtgacatcttctgaatggcccacgctttgaggaagac

SEQ ID NO: 112793 - DNA, 702 bp, Setaria italica
  Intron number 1 from transcript Si006715m (locus Si006715m .g) derived from phytozome v7.0 (chr-ID scaffold_4; pos 10 556630 to 10557331 reverse strand)
gtgcgcttgtaatcaacgtcggggaccttttgcaggtacaatcagattgtttttactttgacagtagccaattaatgcaactacaacccgtatgatcagaatcaagctatatctgaagtactatctgaattcagatttcttccatttcagttcaatctgcaccatcgagtaactcattttgcactctaagtacttcaaattaagtttacttcacattacttagaaactccagtgatctaaatacttcagttcttgtgctgctttaaacctttgagcactataaaacaatatctggttacacatatgtcctgaccaaatcgtggaagtaaagtagttgttacggccttaaagattggattattggaacagactgctccacagtatgcaactccagtattacttgtcctgtttgaagactttgatatcttacaatttctgacagaaaccatgtatagaaatgcctattagcttccaagcaaaaactcagaacatgtttggcttcaagaagggagtgtatagctttaggcattagtctttgatatgaccacaagtatccataggtaaatcaaaatgtgtcatgctggcatgcactatacaaaatacacctgctcgcacattgcacacccaccgtaagcgtggttcagttctatgatgccatcatcttatcaaacttctttttgtatcctattctttcatcagatc

SEQ ID NO: 112794 - DNA, 879 bp, Setaria italica
  Intron number 3 from transcript Si029973m (locus Si029973m .g) derived from phytozome v7.0 (chr-ID scaffold_2; pos 35 749234 to 35750112 reverse strand)
gctaagaggcctcattttgggttgttgttctgctggtaaccaagtgtacttaactaccttttctttgaaattattgataattctacttcaatttgtagataaacatagtgcagaaccatcttccacacttagccattagtttatccacctctgtggtttcgttgtatcagtttttagtatagttttcattgtaactgaggactggcaagttccaagctggacttgtgttcctagtcaattcgaataaggtagtcacaatgatacaagtaaaacaaattacataaaaatgataaaattgaaaacaatggacaagtggggaatcacgaattcaagatatatacaagtgagaaacgacagctaaataataaagtttcattgtaaaaaatcttaccttttgcagtaacatacaagcttccatacaccagttgcactaactaaatcaaaagcaaaccactaaaaagcaacaaccactaaaaagttgttgttatgttagaaaaagtcactgtcttcaattatagcttatacagtgaggaagtgaccagccactaattggaagtcctgatggttcaaagatgattcaagtttagtttcatatgtacatcatttatgacttgaattagaagcaaaaatgagttagtctctgaccgggtctgcaaagccaaggctcttctcagaatatttcagctgctcctatttatgcaatgttatgttggggttcagatatttaatccctgattaggatttgaagtcaattggtcattgacagtgaagtaagacacttctaggaaccttgtccttttcttatcttttcaaaaattacagttaacttgctggttggatgcaggcaatttgggcaatatctttctcataatcattcca

SEQ ID NO: 112795 - DNA, 602 bp, Setaria italica
  Intron number 2 from transcript Si026496m (locus Si026496m .g) derived from phytozome v7.0 (chr-ID scaffold_8; pos 52 92774 to 5293375)
cgtcgacgccagccatctcacggccatcgtcacaggtctccatctctcctcctctcttcatttttctttgtttccttcagtgcagtgaagcgatgctctctagcggtcctctgccggtcgttgcagagttagtgccacttgtcatgtggatgttcaaggccagaacgccacaatccaacttttcaggccttgatatagatcaaagttatgcacggaattattgtgtgatttgtctgtcaaaaacttacataatttctgtaagaacagacaaaagccaccagtatggagtgcacaaaagtgatagttcagacgttcagtgtctgttttttcctgttcagacgttcagtctgtttttttttcctgaaacattgtaatcgttcagtcttacagcatggattactgaacacgttctgcaggataactttcgtttatatcacactaagacagatgctatacagtatctattttgatcttcagattacaatactgtatttgtttcacttttgttttgttttggattccactagttggtaggcgtgacctatctcagactcacacattgttctcccttctgtttcatttgttgaaaacaggagcaacaa

SEQ ID NO: 112796 - DNA, 682 bp, Setaria italica
  Intron number 2 from transcript Si033409m (locus Si033409m .g) derived from phytozome v7.0 (chr-ID scaffold_2; pos 98 01412 to 9802093)
agctccttctcgtcaacaagctccgagagtgactccagtacaaaaggtgtgttgctttatttcagccctatatctatagtgatgtctgggctcacctagtagaagaacccagccacaataatcttaaaactagaaattatcacataattaggtgggaaaaagaaagtacacacatcaacctttattacgaatggctgtgatctgttggcatggtcctcctaatatacaacctaatataccacatatgcaactaggatctgattcacccgcttcataacaaacatgctcagtcaattggcaaccaaaaaaataaaataagaagaatatataagcatattgtttttatcaaagggacagtacaatcttcatgagcttaaaagcatgttgtttcaagccaatttgagatacataagtatcaatcttcaagatcttaaaagcatgtgttccactctcttaaaaagattcataactttcctatatcttgcagatggaaaaatgattaacatatatttgtgttcattttacctagaatagttgtatttttctcataatgcaatatgttttcattttgattactatttcaccagatcaagaatgaagcatacatgcatagtttttcccttacaacatatagtttatcaaatcagaatcacatattatggcaggtacatttctgtagtgg

SEQ ID NO: 112797 - DNA, 710 bp, Setaria italica
  Intron number 1 from transcript Si031941m (locus Si031941m .g) derived from phytozome v7.0 (chr-ID scaffold_2; pos 49 028427 to 49029136 reverse strand)
gcgagcaggtttgtttgttcctctcggagattttccctttgcgcccgtctcgtcgtgcaaattgacttcagctaatgcatactgccttgcaagcaattgagtagggatgtaaggctaatgtggtttgtggggttcggtggcccccaaacttacccccccccccccccccccccccgatttgttaattctcagtagtttttttagaacaaaaattctcagtagttggcttggagtctctcgttaatgtgtatggaattactacctgatttagatttttcttttttgtggctttggaatcggttggctgaatcacgaaagaaatctgggggtaaactgctgccaggttcttccattcactgttcattttatcataagcatgaggtacgctcggctgattgggtgcctcaaggatacttaagcataaatttgacgatgacatggatttaaccattgcttgattgtgagttgtgcatatatgtgatgctgtcatctcacttttagttcttatggaagcaacatgaagaattggtagattcagttaagctatttgtaattttttatgaatcttacttggggctgatgttgatcattcatgtccaaagtaatcccttagcaatatagaacttgtgagaagtatctttcagatttgattgattctcctgactcttcacacaggtgactaaggtcgtgccagctgtcacccttgaggt

SEQ ID NO: 112798 - DNA, 855 bp, Setaria italica
  Intron number 1 from transcript Si026022m (locus Si026022m .g) derived from phytozome v7.0 (chr-ID scaffold_8; pos 29 44463 to 2945317)
ctgcacaaattcaagctcagcttggtaggcttcccacaaacttggaaacagttcactgctaatttgtagttttggatgctaaacctcgagaaacaagcaacgctcctccaaacccaacacggcttaaaattttctgtttctagtatgcgcttgcaactgcttgcaaattgaatggaaataagctctcacctgattcaaattgagttgcttcgttaacccgtatttaatctggaattatgcatatatttttgtcattttgcttaaaagtagttttatggttgaaagttgtgctagagaatcggaaaattaaggtgtcaaaactcaaggaattagtctgatcaagtgatggtctaagaggtcgtggcactagaaatgtcacatgtttggaacacatgaggctggaaggagcactcgatgagtattgaaatagtaatgttaaagaaatgaagtagaaaaacaaagagatgttggactttttttcatctctcttaatacaaagatacacacctctcctgcgtatttgagagagaaaaaaacaaatagatgtttagtggtgaagcctggaagtctgaccgattttgattttcttcatgttcagatttatataaaagggaactcttatagactttagggattgaaattcaacaaagaaaaagtcagtcgtttggaagtcagtcataatctccaatatatttaatatctgcagatctgcacaatcatgtaatttacaattgcttgcaaacatgccgatcttaattaaatttattgtgggatacatgtgatgtgatgcagactgctctttttcctgtagcagattaaattgactcaccattgcacttcttattgcagaaatca

SEQ ID NO: 112799 - DNA, 1019 bp, Setaria italica
  Intron number 1 from transcript Si026255m (locus Si026255m .g) derived from phytozome v7.0 (chr-ID scaffold_8; pos 35 0380 to 351398)
cgattcagcaacggcatcctcgtgagtcccactactaatcttgttttgtttgccttttttttttttgacaactgatatatgtaggagtaacacttcatctaccaaagtgaaggtgaaccatatgactccctcacatgagaactccccaaccagtagtcaaccaccaccatattttcctacatagaaggtacaaaacccggtgcttattactgcaaaacaacgacctcttgcaacacccctagtttcaagtctactaaaccaaggcacgtcctgcgttttcattcataacacagtgcacattgacaaggaccagagagtagcaagacaaacttttcttaggcactagcattacaaaaactggccccatagagagtgacgcggcacactcaatcagaggagcaccatattcatgtctaactttacaaactggagtagtctttcacatgcaccaaccgtagtagcattcaatttttcatcaagtttcaaccaaaaccgttttgtggcccatgcaagctcgagataccatcgattttaagctcttcatctgcattttgggtccacgcttaaattccagtaaaactcaaattcctagatttggaaagtttcttgcacgtgcagacgtgcagtgcaaaagagacacccagcatcaatacgttggtgttccaattgctctcttcttctctcggtcaacaaaatagcgaggcgtcaggcttccatcagcagtaaccaatccatcatcatcgattgtgaagtcagtgtccaaagccatggtacaaaatgcatgcacaactccaatccgtttgattgctagaattgcattcttggctggcacaaacactctcttttgcgacgcaagatgaacaacgtctgccctggtggcctggcgtcggctcgtcgccaacaagacgcaagcaacctgtaaaagcattaacagctgaaaacattaggatatccgactatatgccaaccaatttaacacccttcaagcttaaatttcatggacgttactgcagctgggc

SEQ ID NO: 112800 - DNA, 887 bp, Setaria italica
  Intron number 1 from transcript Si032365m (locus Si032365m .g) derived from phytozome v7.0 (chr-ID scaffold_2; pos 21 824477 to 21825363 reverse strand)
tccgctttcggcttcacaaactactccgctttctggtaatgccccccaaactgattttttgcgtacgtctaggtaatgatgtttctggttcctacaacgcataggaatcaacaaagtggtgggtttgcttcttgcaaatctagacggagaatggtttctcgaggtgcagccgcgtgtgccttctggatttggatgcagtatgctaaacattctatatataaagtttctttgtgatgccaatctcagaactaatgaactgatgttaacttgtgaaataagatacgttgatgctccctacagttcagtagtttcatattgtaaagtttgggccttcaagaaatttgatttttgatggtttatttttatgttttcttctttttgttttgccgcaaatcagtgtacctagcttacagcttctattttttgacattcagcttctattttttgacctttttttagtgcggtgagtggaaaacgttgatggagaatcaagtgtttgtcaggcatttcgttcgcaccatatttactgcgtgggaacttttgcccgtaaatgatctactgtctatatgaattgggagttaagtttgaatagttgaactggacgggcttcaccatgagaaatacgcgtcataaaaaatattgcgaaaaccaagatttacgttcattaactatccaagtaataatagagcgggaggggctcgctaggaacgtacagtacgtacatagctgagatactggtaatcgtgcaccctgcagaattgggagtacttgattctttaatgaattattaccgttcagaataatgagcatccttgaaatcatctacagtcctattgatttctatccaaccatgcattctgatctctctttcttcttcttccagcttc

SEQ ID NO: 112801 - DNA, 750 bp, Setaria italica
  Intron number 1 from transcript Si029869m (locus Si029869m .g) derived from phytozome v7.0 (chr-ID scaffold_2; pos 50 64946 to 5065695 reverse strand)
gcggccggggccgacggggggtgcgccgacggcaggtgagcgtgtttctgttacggctggcgggttcgcgggggtaggtggcggaaatgcggcatctgtcctgtcggtggtgtccgttggaggcaacgcgtgcttcagttcggaattgaattgaatgatctcgcgatgcagtcgaccgtgacctatgctgaaggcggttcaggagatttgatctttttttcttctgctgttgtcaaaattactctatttcagctgaattgatggagtgacacatgtcgacagaacgcggatggaggggaagccgtgtttctattttgcattggcgacatgacgtgatggtggaaatttgtggcgttgctgatatgagagtgcataggggctaaacgatagtaccattttagctttgttgggtctctgaaaacttgctacctgtgtaggttataggttttgacggtgggttagttttgctcagtttggaccacagaaagatttgcaacatagcctgctttctggattgatcgtggttctggtagctcatcctttggtttagttcatgatgttcttgaagtagatgcaatcagaacataaccacaactcgtgctttcggcataagaatgcgtcatgatcttccgtcttctgaaatcaattctaaatttctaacttagctttctgtggtgagatatttattaattttgttaaattttgtgggtggcaggacaatatttgagggcgaacaagatactgtcgctg

SEQ ID NO: 112802 - DNA, 857 bp, Setaria italica
  Intron number 1 from transcript Si028170m (locus Si028170m .g) derived from phytozome v7.0 (chr-ID scaffold_8; pos 15 293657 to 15294513)
ggccagcggacgtccatctaccgcggcgtcacaaagtaggttcttgattgtttttaacaaaatctctttgttttctgttttggtgatggtcgtaacccttttgatggtgttgtgtttgatttgttcctggatgcatgtgatacaagctcggtttcttgttgtttttgggtcgttggcgtttgcagcatcatttggatcatgaaattatttttccccttcgtgagcagtagatttttttttctactctcatttttactgttcttgcgtaaggaatgttttcgctcttagtcgttttattggacatcatctctagttgatgtctttgttcttgctgatgccaagttatttaaatcttatgaacagttcttgtgccgtttgaaaaatcaaatctcacatctttggatgcacggaagcctgtcctgtgctcctccatttgatttctttcacatattgtcaatgattccataagatttttatatgctggattgttgcatctatcctctagttacagaagtgttgtgccattcatagtttttaccgcctgtaatcgagtagaaccacctcttcctcttttgattctattgtatcaattaaatctttcgttgaaaatgtttttatcatcatcattgcgtgaagtcattgacttgtgttcatgatttgactggctaaatttgctagtggctgattgtaaatctttgtaatttgtgcttcttgttattctttcctatcacctcttcgggcttgtttctttatccagaacacccaatctgcttcacatatttttctaatgctgtcatcatcttccatgtttgcagatatttgtactaaactattggctttgttctcaataggcatcg

SEQ ID NO: 112803 - DNA, 783 bp, Setaria italica
  Intron number 5 from transcript Si008256m (locus Si008256m .g) derived from phytozome v7.0 (chr-ID scaffold_4; pos 35 74908 to 3575690)
tacacctgctccgacgccgtgcttctcagggggacgtcgtcgggatcctccgccgcttcttcccggggtacccgccgtccccgataggtcagtactcagaactcagtcggtagggttgaccgctgactcgattattctcaggcttttctctgttttgtttataattttttcaaaagtttgaaggaaaatttaattaaaagcatgagaatttgtcaatgtatgatgctcacgtgctatcaaggctgacgaaagtgttggcaatggagttcacatactgctgaaccgatcgtgaaatctgttgccgactatgtcgatttcgtgcgatacggtacgaggctgatgtgattgtgacgactcctcctggttgcacgtctatggactatagttgaacattaatttgactttttgcttaggaaatgagggtgacagtggagtttggagaatttcttgcggctcttggaataattcttatttacaacagtacacacgccacacgtgtacatgtaccaaattacggataagtacgtgcatgatcgtttcaatggtaatgatgtgtgaatatatagttcagtgatgatccttctgcccaatgcataggtcagcaggtttcgtgtgtttaactccatccgaacgattccttttttcttaaaaaaaatctgaacgattcctaagaagattctaaattttcggccattcctgccgtcatcacggaacatatactacacgcgtcttagctaagcttgattagtgtatataccgttcttgcgttgcgtcgcaggtgct

SEQ ID NO: 112804 - DNA, 867 bp, Setaria italica
  Intron number 2 from transcript Si030513m (locus Si030513m .g) derived from phytozome v7.0 (chr-ID scaffold_2; pos 26 883333 to 26884199 reverse strand)
aaacagcaggtttggtgctcacaaaacctaatcatctgaaattttgaataagatgttggatctttatttaaaaatatcttaatatgcgagttgggatcactttcagttcaaaatacttgtcattatcttagaaatgcaagttttactaaatatatttttgaaatatgcagtttataatttcaaacttaaatgggttgtctgaaaaattgataactaatttccaagtttttgaaacttttgatgttgatttagtgctcaaataaagtggttttaaagtttccaagaatatggcgtgtttcaaggttaagaagctttagtgcaattttccctgctatgaaagtaattagcttcacaaatgtacgtatatttacttttctcacagatacatacatttatcaatttggccaaagtaaaaagaatagatatttacaaatggtaactggtcaaagttataaaagttccacggccatctatgaaagagaggaagattctactgcaggaagataggagctaatagaacacggaatgagtttaaggtttgtgcagagcagaaccaatactactatatagttccaaaattgatgcgatcccataatgcgtgcagtcaaactttttttcgctgctgtccacaggagtacttagtttcgtcacacgatcgaaatgataacggtatcagaagtacttgtatgtctcagaattttacttgatagttcatagcatatcagaagaacattcgagcacgtacgttagaaaccttaatgttgtaactaaacgacaagtaaaccgagtccatttgacttcgtttctaatgctagctttggactttcggtaggtttgcagcccgacaagaaattcaaggagcctcaa

SEQ ID NO: 112805 - DNA, 995 bp, Setaria italica
  Intron number 2 from transcript Si006372m (locus Si006372m .g) derived from phytozome v7.0 (chr-ID scaffold_4; pos 33 033712 to 33034706 reverse strand)
atcaggtactcaccattatttacacctttctgtctcgttgaagaaaacacaaatgaattattttttctggggatggttgagttatggttccatttgcatcgcgttcaatcattaatatttttgttctgttaatgaacacgctatgtctagaaaatgtgtagcaatgagctcttactagagttcatgcctaagtaatttcttcaccctctgcctttgatttcctttgttggtacttagcatatcattctcctttaactttgtgcctcaagtaggagttaaaatttttggctagcttgcccaatgttgcctacatatgttttatttgaccatcaaatcgccttaggatacgtaccctacgcagagactcaggcctactattatctgatgtcacccttttctcttccagagtcatatacacaaccatcattctgttttttttttgtggaatatgcttaacccgttcaccttgtttgtagcattctgtgtccatgttcaaatcttctagtgcctgttctaaaaaactctcgtgtacctgcctatgaaacactaggtactactgtcggactcaggcggcccgtgatacaccattcctcttattaacatgcatggcactattttttgtttacatatagtggtgaaaatctcaacaggtcgcaaaaacttaacctttataggcatgaatatttccatttgagaaatcaccatttgcacattaaataactattatgttcctgtttagtgcttaaatattctccgtgctaccaaatggattgacatgatttatttcttttgtccaccaaatttgatatttaatctattttatttctttgtggacataaaaatatgtatctgttgatttgtggttgtgactgcttttggccctgtttctctaagagtggtttgattgtgtaatattgttctgtaattctttttaaatataacttttgcactgtatgcttgctaactagttgcatcaacactcgacaggtgacgtc

SEQ ID NO: 112806 - DNA, 674 bp, Setaria italica
  Intron number 3 from transcript Si006509m (locus Si006509m .g) derived from phytozome v7.0 (chr-ID scaffold_4; pos 39 923304 to 39923977 reverse strand)
caactctggcaaaccaacctacaactgcccatctggtaactgtcgtgattcatactgttgccattttaattggatctgctccatgcactgcttcttagttatgtaaacttttccgttatgcaactttaaattggtgtaggaaccagatatttgaatacgatgcactacttttttgttgtcagtttcataattattagatagatgttgcttctcattatggtaaatatggcaattcaaacatttgatcagtgtgaaagggcattcctattatgcatatagagtatcaatttctgatatatttgaatgtgatgcactgtttttttgctgtcaatttgataattcttgggtagactctgcttcttcttatggtaaatttgacaattcaaatatttgatatgtgtagtgtgaaagggtgcatgtgaactttgaatttgcagtttggagtcccataaattgaattcatgttttgcatatagaatatctagcttttatctatgcactgaatcttctaatttgtgctgaatgctcttgtagttgtgtaaatatgaatatgaatattatacaatttgaatatgctatgagtttccccttgtttcgacaagtagtattcatgtatcagctctaatatttaattgttgtgcaggccccgattggaagtgaaagacagaaaagaa

SEQ ID NO: 112807 - DNA, 526 bp, Setaria italica
  Intron number 1 from transcript Si007599m (locus Si007599m .g) derived from phytozome v7.0 (chr-ID scaffold_4; pos 20 61776 to 2062301 reverse strand)
acgcctacctcctcaccagcgtccatcaccacaaggtaggggattaagcgcggtgttttcgattccgttggtacttctggaaagaatatgatatccaccctgttctacgggggagttctcgaagtattcgatgaaatgccaaagaagagtcctctctctcttccctccacttgatttgactgcctttcttttgatgtgctatgtgttgcttatagagaatgagatgctacttcacgagagatcattgttgtgagaaatctggataagagtcctcagagatcatttgctatgcgctaattggctgtctcgtacccatgcatcgagtaatataacagattgcactatgtgtccgttcattttaaccacaatttgaacgcatgattgtttttttactttacaccaagcaagttctttgcatcagtttaatgttcgtagtatactgcaggcttctcatgtactccattaactctagttcatttttcattgtccaggacctgctattctcatacaatattgctgtggaccg

SEQ ID NO: 112808 - DNA, 765 bp, Setaria italica
  Intron number 2 from transcript Si026417m (locus Si026181m .g) derived from phytozome v7.0 (chr-ID scaffold_8; pos 28 496005 to 28496769)
gctaccgggtaatgcggcacctctgtatcttcggatgtacagttcggatttttcctttttgttgcccatttgcttggatgttgggtttagcatctgattggtgaggaactgagggtacaatgaaactgattttgcctttagcgatagtccgtgggatgacttttggaacgtttgttggccattcaataatgtacaatctgtgttcattatcggttggtccaccaggtcagctgtatggtctattcatctgaaaaagctgcatggtctatatgtttcaaaattgatgtcaattagctacttttgcacataactaggagttgggttggcaatgtagaaatctgtcacctttatttcgttttagctcgttggttccctcaaggcattattgttcggataagggcgaagtagcagacaaattttgtgctagggccgttttgcttttgcaaacaacaattcactgccaacaagatctattgaagcttaattctgctgtgcgctgctaggcaagccttacatgcttcattgggcaaggtgtgtgactaaatttatagcacaacttttgtggggattttcatttaggcttgatagcttatctttggagcagcttatcagcactccttgagattcacacatcataacgctgataaaaaaaaagttcagttattggccacagcctaaggcctcttaatatttttagctttctatgggtcaagtgaggtcttctatttgactgttccccgttttgattattatgtcaggcagtcc

SEQ ID NO: 112809 - DNA, 975 bp, Setaria italica
  Intron number 1 from transcript Si031966m (locus Si031966m .g) derived from phytozome v7.0 (chr-ID scaffold_2; pos 41 11032 to 4112006 reverse strand)
gcagcggctgtcctgccccacctcttcattcgccggtacgtattcctagcttggcgctgggatggattgatcccctcgttccgtgtactttttttttttttgctcgcagcactcgtgcgatactagagcgcatagggttccatgctagtcagatgggcgcgtgtggtttgttgctgctgattggtgccccgccgtgccggtctgatccctcctggttgccccattttatgcgatctccgctgataggcgccatgttgattccaagccgctgtcggtttgatttctggtgtaatggagtgtccatgtagcaagcaaattgctgattcaactgatcatccacgctggttgcagcatcgtatagcagcttcagatcagtgtctgtatctgtaggaggagtaagctgttggctgcaaagaaacgatatttggtctgtttatttctatctatcttttctaaaggggagtatttgatgctaatgttggtagctcttttagaaacaaataatttctccttccttatctaggtgctgaatatgattggtatcggcaggaatggcttctgtcagcccaaagtctaaaccaccaaatttattccatgatattcattttagcaacatcaaaaaatattttgacatatgtgcatgtgcatcttttgaatagaaatatcacagaaaaatgcgatgttgtggactttcaagccaccaagtaaacatagcgaccttgcagtagttgtatttctcatttatgcacacaggttttgcagtatatcacgtcaattacaatggcatatctggtggggttggaagcaacactgtgtgtttaagttataacctgtcctagttaccaggatgttgctgcctcttgctatgtcgatccgtgcataggaagtaatctgttagtttttcactgatgtttagcggcctgcatatgtaaagaagaagatcttttgaagtgacagaagtttggtattgcagga

SEQ ID NO: 112810 - DNA, 811 bp, Setaria italica
  Intron number 4 from transcript Si029330m (locus Si029330m .g) derived from phytozome v7.0 (chr-ID scaffold_2; pos 37 191062 to 37191872)
aaacaactaaaggggtaagaagctgttataactgtaataattgttttccacatacctgaaccataaaaattctgaatatcggatgacttttctctttattttccccttttggtggtggctcgtgttgggtttcagctcttgcctactccaaaaggctttgttgctgttgtataatgaatgggttcatccatgttccatatcttttgcttgacccctgcagctattcttttgcattatcaatttcttctttttcacacaagttgtccaataatcagattattatgccactttgacttaggattttttttcgataactttaagagtttagagaagcataaaagtataactaacacaaacccctcctccaaacccaaaaaaaagaaggaaaggaaaatgcaaattgcccagaactatttaggattggtttacgctcttcctgttaaacctgcacttttaataactgaccatcctaaatacaaaagtggcacttcttctatagtgctttttatgtttgtgaagagatgtaacattgatattgggagaaagagatctgttcctggattggaatttatgttcagattctctatttggactctattttgtgctgctttattgttggtataggattgcatttgagttttgaactagcaattttattggtaatttcacttgaaatgtaagtctgttcaccatgtatctatgatatactttgcacatttgcatgtgtattgtgtaaatggattttgttctaattctttttctctatactgtagcaggggattgacactggtacaagtatttctccagtttc

SEQ ID NO: 112811 - DNA, 417 bp, Setaria italica
  Intron number 2 from transcript Si006860m (locus Si006860m .g) derived from phytozome v7.0 (chr-ID scaffold_4; pos 40 109662 to 40110078)
aaaaggtagatatcccatcatgcgtgctgcttgtgtttccgactcattttgtgctacatgcatccagtcttatttgacttttttttttagttagttttgaatttgttgtggagaaagcacaaactaggtttttataagacctcagtgctgacattgaactgccaaactgttacaatattgaagatgagtcatttacctaaattactcatggtttatccaccgttgcttgattgctgcccatcatgaaactgcaagtgcattttgaccattttgtaaagacggtatccctatggagaaaatcacacaaatgagaaaaaatctttatcatggcatctgttcatgttgtttcttagctgttgaagtgctacctcatacatgtgtgcattttgaacttaattttctgtggttctgcagaac

SEQ ID NO: 112812 - DNA, 905 bp, Setaria italica
  Intron number 1 from transcript Si031229m (locus Si031236m .g) derived from phytozome v7.0 (chr-ID scaffold_2; pos 73 30351 to 7331255)
gctcggcgagatcgtcaccaccatccccaccatcggtgagccccccacgcgcgcctcctctctctttcccttcccttgcgcacgttgatcggttcggatcgtgctgttcaattcggttatcagggggtcgcgcggtctagcacaatgccctgttagcgtttatatctggtcaatggatccatttcatgcgtaaatgatggatctgcatgtttagaacacatcgttcctaatatttttgaattgaattccagcatatctgaatttacctgtacacgcagttgcacctgatttgatgcaacacatgcgatttatgttggcctttttgactgtaagatccgtttgttcgtagtgagcatgattcattgttttctttaatgtcatcgtcactgattcatgtttttttattcattataatagtttcctgtctccatgaactcatctcattacaaaacattgaaatgcgagtgaactgtgtaatttttgatttcattattatccaattgaaaattttattgtcttcttataccgccaaaaaactaggaaagctcatttagacattatcacgttgaagaaggcaaattgaaccctctgaaaaactaggaaagataggaaacaataatgtaataatggcctcaacacatgtaatgcaggtttttgatgtcgggatatttattttctgttaattgaagggtttgatacaataaaacttggattaaaaaaaagcaagccacggtctatatgcaacattttataggtttgaataaaataaaacatggaggaaaaaaatgcaagcgatggtctatattgctaatttcttatgcttattctgtgatgacatgactggtgtttaatgtttctatgtcttgtgtcttacaagagagttgacttttaaaatgcaggtttca

SEQ ID NO: 112813 - DNA, 816 bp, Setaria italica
  Intron number 2 from transcript Si026682m (locus Si026682m .g) derived from phytozome v7.0 (chr-ID scaffold_8; pos 23 908988 to 23909803)
gaagtagccagcacgtgagatattacctctacaagtcactttgttgacggttcatttaccatgtgcatatgaataactctactggtaatttgaaaacaaaataatctagcatactgtcaaactgaaatattgtctccagcccctgaaatcgcatgataagtctccgagctcctagttcaaatgatagaatgcaggatatgttgctaggaacttccacagatgcataaagtggttttcaatcatgataatgtttgggcagtggcagttggtcatgcctggaataagggtttgttatccgtgggttataatttttttgtaaagatataggtgagcggttacatcctgatgcctgccaacgcatttcatactgtagtcctatgtttcttttgagctttgcctcacttatctgatagaagagaaataaaaatccaaccgaaatgggcaactggagcttccaatcttaggtggtctttccaatcgcgacaaatagaatcagacatggtctgctcacctgcaagcaggaagactattggtacactccagaaatgagatcaccctaaacctacagcccctaggttgccattgagaacaattttgtcctcaaactcaaggccaacatccttggctccttgcctgaaaccttgtgtccaaaggattgtatactttcgttagatcgagcttgctctgtgttttatctgctgcagttgataccccccccccccccccccccctgtttttctctgttcattttctaatgcaatcatgtgtcaaactcttgcagtactgtgttttgcccgattgctggttgtggtgccc

SEQ ID NO: 112814 - DNA, 528 bp, Setaria italica
  Intron number 2 from transcript Si027717m (locus Si027717m .g) derived from phytozome v7.0 (chr-ID scaffold_8; pos 80 51409 to 8051936)
tgagatagaggtaagatacttgcattttttttttggtcattgagcacaaatgtgcaccttgcctctcagatgggggaagaagcagcaaaatccttacttatctttttcttcttataatacttccatctatatgttcttataaaagcaacaccagtagaacaaattttcacaattatctaggaaagccttttcgacacgatctagcatgcagtaattttagtcatacatagcagcatttgatattataaagccacattggtaatccataaattgtatgtaccatccattgttgccagaagcggaccaaaagagggcctagtgggggcacgtgcccccacacagattctgtattctggtaaacttggctcctatttcaaaagtttacaaaggcaatgcactagcaggccttgttcaattttgttgaagatttgtgatgttttgtttcattctaattggtgatctaagttccttgtataacacttcatgtcaaatacaagagttatgatgatattgagcgcgagaaaaaca

SEQ ID NO: 112815 - DNA, 491 bp, Setaria italica
  Intron number 2 from transcript Si006519m (locus Si006519m .g) derived from phytozome v7.0 (chr-ID scaffold_4; pos 30 436552 to 30437042)
aggtgagaaagcacaaacatttggctcccctgtggtatccaggtggcgattttttttcccgattcgcttggttgcaagaggaagaatgttgatttcttccgacttttatttatgttgtgacgaattgtagtattgcccaatatatatatcttcctttttaggcaaactgaggattgaatcaggacagaaaattattggacaattaaatttgaatacatggtctgctacagtgctactccagttgtgcctagactggaatagctaaaaaggtctccaggatcaattgggattatcgatgtatatgctagatttttttttaaaataataaaaatgttaagagtagggcaacaattttgatttcgagaaaagagtaacatttgcatcgatacatggcctgctactccagttgctcatatattttgattttgagaaactcatttagatttacttccacagaaagattacagccttgatactactggagagaatta

SEQ ID NO: 112816 - DNA, 804 bp, Setaria italica
  Intron number 2 from transcript Si008470m (locus Si008470m .g) derived from phytozome v7.0 (chr-ID scaffold_4; pos 18 273473 to 18274276)
aaggatagtccgatcaaggtgtgccgaatcatctggtacgatatacatggttttagcagtgtttgtacttgggagttttgacagaccatggtgtataaactcattgtccatatcatcgttcatgctctgaaataggcaaaatgcaagacatattctgtcacgtctgcttttactatgtttagtgtccttttatcaatgtttgatgaatgatgattatccacttcaagttttttttccatattctacagttagttctgttgcttactgtgccagtgttggatgtttatgactttatatggtttctattagttttggactgtataattgcttctcattattctatttttgtaactatcactttgcactgtttgaatgtaactactttatgactgccttttccatgtgctgttctttccacaagataggggttccctgttcttaaccctttaactaaaacatgagctgcactttcaaccaaactcacatgaaaatgcaatgcaagtttggatagttcatctagaataacaaaactggcatggatcactatcatattgcactggagttagctcttgaagagtaaatacacatcttttagtttattggttaatctttctcttcaacatttgatataatctgaatgacctcaacattgtaaattttttcctgtagctgatcagtttattaaatacagaaatagttaaaatagcttggaatatctgtgcttactgttcaggtgaactcaaacctgtcaaaattggaaactgacacttttgacttactgttatggccatgttactagataca

SEQ ID NO: 112817 - DNA, 868 bp, Setaria italica
  Intron number 1 from transcript Si029432m (locus Si029432m .g) derived from phytozome v7.0 (chr-ID scaffold_2; pos 39 711314 to 39712181 reverse strand)
gacaaggtgacccatcctgttcgtgtctcatctggaccttgcacgggatagttcagctgaaggccactatttcaatagtctgtatctgtacttgcttaatgatacaggccatatctaacttgtcacattttttagtgctcattgtagtattcatttgcatcactggtacgagcatgtaaccttcactgtagtccaagagggtctttttaaatactatattacaagcatgcaaatgtttgaagtaatgagaaaaagttcaaattactcccttcaagtatagtgaaagtccagataacccccaaaactatgttttggttcaacttaccccataatgcaatttgtcatttttgtttctccgtacacaagttgaatttaatttgagagtttgcagggtggtagtgggcatcataatttgtactaaaaaaatatttatgaatttttcatcattagtttttatataattttgtatctcaaggataaattttattattaaatatcctaccctatcaaaataatgataaaaattcatgatatatttttttaacatgtcttatgatgtctgctatcatcttgcaaacttcaaacttaaaactccacttgtgcatggagaaacaaaaaagacaaattgtgttaaggggtaaattgaactaaatggcatagtttagggggtaaactgaaccaagaaatattttagggggttatccagactttggttatacttgaggggagtaatttggactttttccttaaaaaataataaaattgctgtttacagtttaatgcactcttcttgatgcaacatgatggaacttttgttaatttcaatattctagttctgcaggttaacttgagtgttgcaattattcca

SEQ ID NO: 112818 - DNA, 559 bp, Setaria italica
  Intron number 1 from transcript Si007767m (locus Si007767m .g) derived from phytozome v7.0 (chr-ID scaffold_4; pos 93 76846 to 9377404)
ttagcacttgtccattcaggtaattttccaaattcatagaaaattaatgaaagatcttaaattctgaatcttgtcatgtagctttactatatccactctcaaatctgaaattaccaacctattaagcttaattaattctaatgctgaaacaaattatatatcaaaataaaatgctgatagcagttatgtggccactgatatgcccatttcttccgggttatgacttatgagggagggctatttgatgtccttgtgcttgattgagaaaagcctacctattgttcaagtttgagctcttgaaattcgcttcacttaaatacagtagtagctttgttttgtatatacatgctccttaattctggcattatggttctaaccctagatgatcctaaattttgaactactacaggagagtagactgcaaatagaatacttgaaggcacaattttcagaaaggatttcatcaatcagtcagttcatgcatagaaatcgaacacttacatgtgtttttgtatagtctctcacattcactctgcagctgtttgtgttgtcagatcat

SEQ ID NO: 112819 - DNA, 864 bp, Setaria italica
  Intron number 1 from transcript Si030602m (locus Si030438m .g) derived from phytozome v7.0 (chr-ID scaffold_2; pos 43 951924 to 43952787 reverse strand)
caccggcgaccgatcgattcaggagcacgcaggaggtcagtctaggcacgtagccgcctctcctcccctgtttcctcttcgctgtttcgatccaatgtgggcgccactcgcccgatcgggggactcgggtgcgtgtgaattaggcgaaattccagattttgttccatttcgacggactagtagaacccatgatcatatttccttttcttcccgcgatttttttttacacttgatcgtttcgagttggggccgaaaggcgtctttccggtatcggcctctatctcgagcgcgactgtggcggacatttttacgcggctgtgaggaccgaggaggtggtctatcgctgccgtggtctccaggccgctagcttggtagagaagtccgaaagggattcagtagcagagctaaagggtgacagtgaggcggtgaggggaggtgaggggctgagtggggattgaggtgggtgagtcaagtctataggaagagaaggacagggggtttaagacaattcaaatgcgacgggagtgaggataggtggtcagccacactgttgcaatttgtttagggtttgtccagcttataaccaacatgatcccccatgcgtcctatttactattgcaatttttgactcaggaattcgaaagaacagcacgattgatttgtacaaaaatgctcagtggcaaccaattctgtaattgtttatgaaacacgcaataaagagcttctactaattaagaaaagaatatagtaatttcgctggtaatcagattgcatgttttttaatttgcttgaaaagaattggagcctttcttgttgtctaaatgattgtatttgtacacagtagttgaggagaaagcttcaaaa

SEQ ID NO: 112820 - DNA, 1016 bp, Setaria italica
  Intron number 2 from transcript Si006676m (locus Si006676m .g) derived from phytozome v7.0 (chr-ID scaffold_4; pos 18 370576 to 18371591 reverse strand)
acaaggagggccccaactgtggtcagtagcctccaaggatcggtgctactgttgttgttgttattgttgtttccttcttttgttctcaagtctacagtacttcttgactcgtaaaatcctgatatagtgtcatagaagcattcatagtccatgtatggtgccttctttacatgaaaatcactactgtttaggtcgttacccaatgcatatatgcaatatgatgccaacgatgactgctcttcttttttaatatttatagagcagcgatctttcatctgttccaatttccatggctcatggcagagggagaaattgttttctttatttggttcagccatttgtttgattaaatgattgatggctgataagtagcagtaacctctagcttatccaacttttcacgcaattcaggaattacgctggaattagctttaagcttgtcatactggcttacacctgcatatttaacctgaacacttttgtatgctttagtttactaagatgatggtatacaactattttttacatagatttgtagttctgactgttgttatgtaatggtgagccatggatgggttgtaagcagggtccattagcacataaaaaatttatccagccaatcagccacatagagaaagggaagaggagagagatattatgttattttattcttatggttgggctatatgataatggctacatataaggtacttgcacaatggtgagccaggccatgtaggcttataaagaccactttttctctacatcgtggctgccctgagggacacaggccagccaccagtggcttggtggtgggcccttgcacaggttatttataacctacccacccccccatggtttggggcttcgagtcctagaattacctcctctaatcaatgacaaaactactatacattatttttgtattataaaagtgctgttttcgtgggactcgtgcttattttcactaaatgtttattgttcttgttccagaactggagaagcacattgaagac

SEQ ID NO: 112821 - DNA, 858 bp, Setaria italica
  Intron number 1 from transcript Si026878m (locus Si026861m .g) derived from phytozome v7.0 (chr-ID scaffold_8; pos 14 504272 to 14505129 reverse strand)
acctgcccgcctccatctacgacatcgccgtcaaggtaggtggctattgcctcctgatgcggagagatctgctaagctttctttcccctctgcttttccgccagttcattgactcgtagtttggtgaaataattgggggttttcttaacggtaaataataattgggtttttttttttatgttggggtagtgaatcttgcttgcaatttgagcaattggtgataggatggttgttttagtcgccaagattgctcattccgtggtactaattgcggatgggacgctgattttattgttcctgctgcgttggtctgaagattatgtagttgatctgtatctggctagtgagtgaatggggaataaacaagtgttgacttgatggaacccgagaaggatcatgtccccttagtggaaccgtaagatttggcttttctttgtcacgcgctctggagctgaaacgctaccctttcctagttgggctagtttctgttgctgtcactgcaaagatgaactttttggctagacatgtgtcaaaagcgaactaatatctaataactatctcaaagcgtgtatatataattatatatacagtttgctcagcatgtgatagacagcattaagatcgatgctcagtaaggaacttggcatggtacctgtggtgctcaactcataacctgcaacagtctatgaggaggttgtgcgccttttgctttcacccagcatgattaacttgacttctagagtttcttataattttacaactgaaaatagttacgtgtactcaacttatatgttctacaatttttcgcagatttattagtgaactgatgttttgtttttctcaaggatattagaggga

SEQ ID NO: 112822 - DNA, 777 bp, Setaria italica
  Intron number 2 from transcript Si026698m (locus Si026698m .g) derived from phytozome v7.0 (chr-ID scaffold_8; pos 27 632795 to 27633571)
atcgcgtaagctagcacccacatatgtcaccctgcaccaacattctctctgttgttttcaagtaaaacagcaacattctgactctaccgctcgttcattgcaacattgttaatccgctggctgccagttgcaacgacgtagattaattaccagcgtattaactaaaaatcaccgccgcaaagagctgtaaaactttccagctcaccctgtgtcactgaggacggtgggtataggaccgtaggatggcagcaccacagtcctgaaaagatgctctgaatccctgcatcttgaaacaaggacaggaaaggtcgtagcaagatagcgcgtgcctccatgtgcagtcgctgctcacgggcacggcctgtgtgcagtgtgcacgcctgtctgcaaccctgtgcacaccagcacgaacactgctgcaatggcccctgccgtccatccctcgtcgtatagtcatgtttagttcactccaaaatcccaactttggcactatgcaaaaagaagattccccatcacatcaaacttgcggtacatgcatggagtactgaatgtagacgaaatcaaaaactaattgcacagttttgttgtactttgcgagacgaatcttttgagcctaattagtcaatatttggataataattcacaaatacaaacgaaacgctacagtgttgctacagtaattttgacaccccaaagttgggtaactaaacaaggcctaacccaacctcaccgtactctgcaggttcttcgtggacgacgtgccgatccgcgtgttca

SEQ ID NO: 112823 - DNA, 828 bp, Setaria italica
  Intron number 1 from transcript Si028642m (locus Si028642m .g) derived from phytozome v7.0 (chr-ID scaffold_2; pos 21 419955 to 21420782)
gctgtaccaaatgctattggcgccacatggcgtcttggtgcagcgctgggatagctggttactggggacaaaaatatgatcctttgatcagcccaggaactgggagtttcacctaattattgacagcagggcggtcaatggagatatgattttatatagagtaagggaaaaggcgaaacggtaccgtttacagactttgccctgtctagatgggtttagccaatgttgctagaggggtttaaagcaactatggttacttaagagcagtggtgtggggacacatgggccccgcagaatattctttcaccacgttaagtacaactcttcgccgcaactctcctgtgtattctagtaaaaaagtgtgatgcttttgcactaaaggacaaacattctcgtgatttttcaaaaggacacctagtgaaatatttattatgtggaaagggctatacagataaaattgttgttgctgtttgatactcttgtttatgttttctttgttctggtcttgattattttatgagggtttctgatcttaaacaattgccctgttgcttttcttattggtatactgtaggctgtagataagtgcaatgtgatgtcagtgtatatttgatagttgcctaatcaactagtttatttgaagttgatgctatgccccatgatattttgcaggtggagactgcaaggaccaagtgagagtgtttgctttatccattattgctgctccttagaagaaaaccgcactattgtttgtcgcctgccagctattgccatcagcttgggagatggagtaggcaaagggaatatgcatatgcaggattttggaca

SEQ ID NO: 112824 - DNA, 1040 bp, Setaria italica
  Intron number 1 from transcript Si007228m (locus Si007228m .g) derived from phytozome v7.0 (chr-ID scaffold_4; pos 38 457576 to 38458615 reverse strand)
tgtcgcgcgcaccgcggcctcgatccggcaagctagtaagttcccctcctcagttccatcagttcatccgatccgattcgcgagctgggctttctcgtgatcgcgattcggctccctgagtagcgtggctccggctagtgaagtcttgctgcttccctgcttcttggataacttcttcacatgattactgttcctgttagattttttttttgcgattaatagctccgctccttgaacttccttctgccggatttctactgaaaagttaagatcgcctgttagagcgattgttctgaactcaaactgccttctagaaagaggaaaaacatttttttggatcgattaatctaagatccgatcagtcgacttgtcaattaaattggtttaatttctatactgtctatttaaacgagtgaggttgttgggtgaaataggcggcctcttggatactgaactgctagttcgagtgaaatgtacggtatagcctagctatccatttactagtttcttgtttgtttgtttgtttattggttgcttggttgttcagttcgattaccgtgataaacatgcgtggaatgtttctttgatcctgtaaaaggaaagtttcattggattttgtgtgaaaagaggcatggggaactgggaactatctatcgaacacagggattacagtgaaaagatacgctaatgaagtctgtgccggtggtgacggaccctattttgctatactgctctattgtttgcttcttgttggaattggaatatagtctccattgaaatccaatcagaaatgtaaggtcccatgaagtaatataataagtaggaatcccatcaggcattatgcttccttgtttcaatcaggcaaacagggaactgttttggagtgtaatgctgggaaaagaagtttgcttctagctgctttgcgaccttttccagtatttcttgccatcatgcgaacgcatgccgcttgagtcttacataatgtatcactacttgttttctctgaagcttatcattgtcaatattcattgggagatagc

SEQ ID NO: 112825 - DNA, 1036 bp, Setaria italica
  Intron number 1 from transcript Si030959m (locus Si030961m .g) derived from phytozome v7.0 (chr-ID scaffold_2; pos 47 557980 to 47559015 reverse strand)
gtgctcgaggccgacatccagcacgccaactcgctgtgagtagtcagctcacctcatgcctcgccttttttgaattttgaccttggtctccacggttcagctccagctgagagatcatcaattaatatcgtttggcctgttcctgttctcaagtgtgttgagctgggatactgggcgtgttggtactagtatcttaccaaaaattgttgtgctatttttttgggggggaacagaattgctgtgttacctttttagaacaaaattactgtgttaattgaggtcttgagtggaatgggttagaaattacaccatgagatgcagctagacactttggttcattggtcccagtcataataggtagattagatatgatttgttgttgattgtgacacttggaacgagatcccctttggtgaatgtttcgactttgatgctaggtacgtgtaccactttagttatggttggggtataattagtaatgcgtggacaacttgagttttctgtcggtagctcctcacgctgacaccagtcagaaaatcttgctacgttttggcctgatctcctttatcagtgatgcacggctgtagcatttttgagttgccatcatggaatttctcttgctggtgtgtgatgcggttctggcagttggccagtttatctttaggccttcgaaaattaacctgtaccattgggaattgccataatgaaattacttgttgatgtgccatgcacttccgcttgagtggaaatgtggtggctcttcactatcgccatcattattttctgaagcactttgggattttggatggaatttcttgtccaccagggcataagtatgcaagataccattagggcaaacattcaatcgtgaattgaactttggtcatgatttatttcccaccctatttgtgcgagcacattagttggtcgggcaagtcatgatttaggtttacccatgactttagtacctttcagaggattcattgctaattattttgtttgtaaaaatgcagtgcttctgaatttcggagggaat

SEQ ID NO: 112826 - DNA, 642 bp, Setaria italica
  Intron number 3 from transcript Si030763m (locus Si030763m .g) derived from phytozome v7.0 (chr-ID scaffold_2; pos 37 860300 to 37860941)
cgaagctcagggaggtgatccaggttcccaagaaggttagttgtgctctcaatttagttcgatttgtcacgtgttgtgttgagatactgtgtttttgtttgattagattatgtgtattagcaatttggaatgtgaggtagagcatagttgtgttttgacaagttaatgaattagccagtctctctgcctgttctacctgtgatataatggtttcctaaatcacctgttcgattgggcatgccttgctgctgcagggtagaggtttcttaatgcctttacttgtaaaatccggtttgcttcatcttaaatgttcttctggcagtttcattttgagaagtgcaaccatgctttcttaaccaatccattttactgttcggtttattttattaaataataaatgttgtaatcgacacattacttaagtagaaacggtctatcacaaaacagtgtgctatatatatttgacttttccaacttcccctaatgtgcttagccttcctttttttcttattcttgtaaataagtaattatctggctcaatcatgaaaggttatattgtgcactttatctttgaaatccatatcaatttatgaaattgctcttttccataggttgtaagggatcccagatttgaacctatat

SEQ ID NO: 112827 - DNA, 1011 bp, Setaria italica
  Intron number 1 from transcript Si031292m (locus Si031292m .g) derived from phytozome v7.0 (chr-ID scaffold_2; pos 34 774982 to 34775992 reverse strand)
cagccgtcgccctcttcaccaagctcctcgtacccctccgtgtcccaggccttgtagctgtacctggtttctcctagctagggttgttttctgttgcaattgcaagtactttgtatttccttgaatgctttaacattatgcgaatagttgggtcaatgcgctagtatgcatgatggaccatggcatgcagtgtagaatcttcagattgttagatttgggcatgtagatacattactgtaggaacttgagaaatttgtaattgcttgttcttacaatgatcgtgttaagctactgcaaatgaatagtctccaggtgaggaattgcaggatatttctagttgtctattgttttcctagtgtatgaaatgttatcctctcgggctgtgtagatttgtgttattccaagtatgattttgtgatattgaatctgtttgacatatcattcgaattcagcttttctacccttttccatggatgaattctacaagtttcctttatacttcctccgttccaaaatataggtttgtttagtttttgtcctaagtcaaacttctctaactttggccaaatttgtagaataatgcaccaacatctgcatacatcaaattagtttcattaactccaccatgaaatatgtcttgataatgcttttatttggcattgtagatgttaatatatttttctataaacttggtcaagttataaacttttgacttaggacaaaactaaaacaacctaaattttggaacagggggtatagtttttataatttcacattccttgctagtatctgcataatgtttcatgacaagatgtgtacatccttcttgtgtaaactaaatcatcaagattcaagactgttgctttaagtcagggttaaaattcttaactactggctacttcaaagcctgtatgccatcatagaagcatttgaattcgatggtgttcttgtagctgtttgctggggcattaaaatgttataaatcttatttggtgttttgtgggcaggaac

SEQ ID NO: 112828 - DNA, 652 bp, Setaria italica
  Intron number 2 from transcript Si006734m (locus Si006734m .g) derived from phytozome v7.0 (chr-ID scaffold_4; pos 31 262071 to 31262722)
ccgtgagtttctattttatcaattatatctgctcatcacgactttttgtgttgctattcctggtcttgtaagtattacctggatacaggcacgagagtctggttgggtaaaaatactttgcacttgttgtccgtgtgtacttatggaaacttgcagaatgttctagaaagtgaaaaaaaccccgagtattggtatcattaatgtagtccttacatggtattgctgtttttgaagttagtgaagggaacctggggcaggcacatgttattaaatagatagctgaggtctgaagagttacatgttaactttttttttgttgacttcgccatgttttccagatgttggattgataataatgcttcaaaagtcaaaccatgtgatagacattgctctgaaagattagctctgcttgaaccttgaggactggaacctatgaatatgcatgatattccttgttgagtatcattagaggagaagctatgatttgttttcttagcatagtacaaatacaattcttgatgtgcttcattggtatcttttgagaggatggaatctcaccaatataattagttatgatagtatttgatcagtctattgtacaatctctaagcctttgcaattttccagcactcggctttgctagatcttgaca

SEQ ID NO: 112829 - DNA, 894 bp, Setaria italica
  Intron number 2 from transcript Si030754m (locus Si030754m .g) derived from phytozome v7.0 (chr-ID scaffold_2; pos 40 228521 to 40229414 reverse strand)
cttccaggtatcacgagccgattccaccagatcaattgggattgtcggttccaaaattgcgctcctttttttcttttctactattttttttgggggttcttgtgtccttaattttattcggtggcaagacgcgtctttctcgagtcttcttctctggcctcaagattctttcagtaccttggatttgtggctatgggttttgtttacgaatttttggggaaggtgcgctgatgtactccaagttgatgcttttgggactggactttctcgttatgttcagagttcagagccagcaagcaaagcaatctgcgaattctgggagaatctctgtgcttttttatttcagttagttgcctccactcaggccatgtttagttactcccaactcccaactttgacactatgcaaaaagaagatttcccatcatatcaaacttgcggtacatgcatggagtactaaatgtagatgaaattaaaaactaattgcacagttttgttgtactttgcgagacgaatcttttgagcctaattagtcaatatttggacaataattcacaaatacaaacgaaacgctacagtgtgctacagtgctgtaacagtaatttggcacctcccaaattccccaactaaacacggcctcaatcaagagaccaaatttggaactttctgttcacctttctgccaaatgcagttctgaaaaaccaagggtatcagtttgtaggtaccaaatgtatatgctctgctcagcggctttctactttggctttttggcaaacattttctttggcttctcagacgaatcagatatgccattcagcatactggatttttttttctttccagttcacctcagtttcttttgttcttaatcttttacttttcgatttggaaacag

SEQ ID NO: 112830 - DNA, 733 bp, Setaria italica
  Intron number 1 from transcript Si006889m (locus Si006889m .g) derived from phytozome v7.0 (chr-ID scaffold_4; pos 65 44587 to 6545319 reverse strand)
gggagtcggcagccaggtcgcgtgcgaggaagcaggtgaaaccttttgttcttccagtgcagcactgctacgctatccgttaatcatatgccttttccttaattatagtaaaatcctgtctgaaatggatctctatggtaactatatttggtatgcccctcgattatgttgtactttattcacctgatgtgatctgccacttccggtttagctgtttgatagtatttgtttatggctgagtagcctctccaattagcaagttgggattgaataatactgctaacctaaagaggagaactggggaagaatctgcaaatgaaccatggttcaacttggccctttcagattcagaaagactgagaggctatggataagtttgttaattttggggatggtggttacacattccagtctcacggacttttatcattcccccacctcatattgagatgatagggattgcatcttgggcctacagaaatttacatactaatgacaaacacatgaattttgtatcctttctggctaatttttttctacaaaatagaagagggataatggacctcttttatatgaattactgaatttattactgatgcaactcaaatctattggattgcgctgtacttgctagcaattttctatgtggttcaattcactgataggagtctaaaatcgtaacgctgtttacagacactgagctgtgcactatctaaccttgcaggcttacata

SEQ ID NO: 112831 - DNA, 795 bp, Setaria italica
  Intron number 2 from transcript Si030749m (locus Si030440m .g) derived from phytozome v7.0 (chr-ID scaffold_2; pos 44 451314 to 44452108)
acacacactattttctcagctctcggtaaaataaggtgtgctctggtgttctcctagtttgtttggctcataattcagtacctgctttttcactgattatgtagttcatgcttttgtgtcaatgggctacagcccaaatgaattactactataagaaatggaagctgccaaggcctaaagatatctaaactaactggatatgtctacattcgtcctcttagaaatctaaatcatcattgtttgattcattttgttagactcagtagcttcttaattttttcgtcgaacaatatttattctcacgtgtcttatgttatcctgaaaagtggatggtgttactgaattgatatgcatagataaaactctgtatcacaattccgaaggtagcttctcaatatgtgctagtatttgtgaaattttctcatattgtgttgtgcctttgtgtaaagtggtaatatgatacttcgtaaactcattagtaataaatatataaatttgcgatgattatgattcatatgaagaaatattctgaatcataactagaaaattgccctttgcaaaatgatattctgtgaattgtcttcactgaagccgtgatactgtgattcttcgatttttttttgggtatctgtattcatctagttttttcattactagccttcaaagtaatatgatgaattttactctgttaatactagtttctgcaacgcattttactgtctgtgaatacttattttgcctagtacttccttgcaatattcttccatccaaatgacaggactctaaatattgcca

SEQ ID NO: 112832 - DNA, 900 bp, Setaria italica
  Intron number 1 from transcript Si029059m (locus Si029059m .g) derived from phytozome v7.0 (chr-ID scaffold_2; pos 46 692991 to 46693890)
gttccaccagggacgtatttgtaagaatcttaaaaaaaaaagctaacaaacaaaaaaaaatgtcggtgattaggaccatgatatgcatgcgaactcgtttgcaatttttttatggtgctacacgatagagtattgttttttctctactgacgtggccggtgggccgctgtcacgagctgcagaggatacgctctacccgcaggcgtgatcgtgtgatcggtcgtgcacggctacgtgatccacagattcctttcgccacacgcccgttcacaccccgccaccacacgtggctccatcactgcagtgccccgacaaaccactccaatagtccaccacgtcccagggcttgtttagtcttttttccaactttgacactataaaaaagagattcttcatcaaacttgcggtacatgtatggagtactaaatgtagataaaatcaaaaactaattgcacaattttgttgtacttcacgatacgaatcttttgagcctaattagtcaatgtttggacaataattcacaaatacattcccaattttagcactatgcaaaaagaagattctccattacatcaaacttacggtacatgcatggagtactaaatgtagatgaaatcaaaaactaattgcacagttttgttgtactttgcgagacgaatcttttgagcctaattagtcaatatttggataataattcacaaatacaaatgaaatactacagttgcgtatttatggcaaaatgcaaactttgccactaccaatttgggaactaaagacccccaagcagataattgtttccccacgtgggccccaccaccaacctacaaatacgggcacacaccacgtcactttactcacagctcagctcgcggctcgcgcgcaccatcagtcgtgtccatc

SEQ ID NO: 112833 - DNA, 950 bp, Setaria italica
  Intron number 1 from transcript Si008763m (locus Si008763m .g) derived from phytozome v7.0 (chr-ID scaffold_4; pos 13 882366 to 13883315)
tcagtgctggtaagtaatactgatcatatttgttacagttatgcttgacatgagcttagagctctctactgattacacagcttttcttcacgattgacttcatggaagattcttttttaaatatactttttaaaaacaaagcttttctggattttactccctcaaaatgtaaggcatggtttgccccagtgcagtcttagagcatccgcagtggcctctggtatgatttgactcatccacctccatgcaagcactgaatcaatttattatatctcaccagttgtcactcaactaaagctaatggagcccgttgcagaatagaaaagcaattgcctccttgttttgctcatcaccttccctcgcaagaacaatggcggatggcctgcttgcctgaaagattaatcggttcatttctctctccgataagagttcgttcactcctcgttgtgttggctcgtgaagatgtcatgttggatcatgagtcggccattggagatggccgtaacgccacactttgaccgttgatatcgcatatattacaatgttaatgaccatgaactagacgcagtatgaaagtgctttcaaatatgaatccaatgatatcaaatttgtatgatataatctacaagttcacagactgtcactcaacaattaaaaagtttgaatcttcggttgcgtgcccgccttacaaaaagtgtgtgtgtgtgtggggggggggggggggggggggcttttttttttttttttgttgggaacacaaaaggttgttctttgctgccattgaatagaaaaatagtatgaaataagtgatagtataactattgaacttttgttatttcatttgatgtttaattgaattagtatttcttccgcatttaacttttcttcattatttccttcttcaacaactgccaggcaaatttttcacgagcacctggggcttcagtccc

SEQ ID NO: 112834 - DNA, 965 bp, Setaria italica
  Intron number 2 from transcript Si033289m (locus Si033289m .g) derived from phytozome v7.0 (chr-ID scaffold_2; pos 94 80267 to 9481231 reverse strand)
gttattgaggagggtagggtatttaaggaccttcccgcattgaagagatggttgcaagcttttgcggtgatacggaagagaccgtacaaagtgttgcattcatatgcggagcgccgttacacagttgtgtgtgacaaggaacggtgtccatggagggtttgtacaagaaagcaaaatatcactgggaagtggaagatcacaaaagttgtcggtccacacaattgtgctgaccatgagcttacagtgagacatccgcagctaacatctaccctcattgcgaagcggttgatgggaatattgaaggaacaacccaacatgaaagtgagaacaattataagaactgttgaggagatttatggaggatatgtgataacttatggtaaagcttggagggctaagcagcgagcgtggaggatgatttatggggattgggagtctgggtacgagcagctgccagtgctttttaatgcaattaaagcggtgaatccaggcatgcattatgagtatatcccaaagccaaatgcttggaaggacgggaggcagatattcgagcgtgcgttctggtgcttccctcagtctgtggaagcctttaggcactgtcgtcctgttttctctattgatggtacgtttttgattggcaaatatagaggcacacttcttatagccatatcttgtgacgcgaacaatatgttggttcctttggcatttgcattggttgagagggagaacaatgacagttgggggtggttcttaagactagtccggatacatgtggttggtcctggtagggaggttggcgtcatatccgataggcatcagggcatacttcatgctgtgcaagaacagatagaggattatgcacctttgcatcatcgttggtgcactcggcaccttgcggagaaccttcttcggaatgcatcatcgttggtgcactcggcaccttgcggagaaccttctttggaagg

SEQ ID NO: 112835 - DNA, 639 bp, Setaria italica
  Intron number 1 from transcript Si033746m (locus Si033746m .g) derived from phytozome v7.0 (chr-ID scaffold_2; pos 42 647032 to 42647670 reverse strand)
tcgcttggttggtcactggtacgtatcttgtcctagttatctatttaaaattcatgttgtttaacttcatttataagtagctaagctatgttgaatttttgcattagcatcttgaaaaagattaggtttggaaattaattcaaactggaccttgaaactggataaatttaaataactttaatgctgatcattcttcaaggtttgctttcaagcaaatcaggtcaaattgttctgtcaggtgtgctcgatctctaatttgagtattagtgccccttctcggatgtagagaaacacattcaaccaaagcacactagcttatgttgatatctttgatgcttccaactggggaaaaggaagatacatgtttatatattattattatctcctgcagtgctggttatccatcaatttttttgacatctatgtgctgcatcatatataagacagaaaaggctagattacttcttcagtaacaataataatcttttaaaaagtgtagcctttcactagtctttcatatgctgttatgaaaattatcaaagtgtgcaagagagcattacgttgctcgtattaagattgttgttattgccattgtcttgtgcaggctataattagctgtataaacggctttttttttgg

SEQ ID NO: 112836 - DNA, 831 bp, Setaria italica
  Intron number 1 from transcript Si028886m (locus Si028886m .g) derived from phytozome v7.0 (chr-ID scaffold_2; pos 25 409124 to 25409954)
accattgtgggggactacgtcgagaagatcgtgcggtacgcccgcgcgcccctgctggcccctctcctcttctcttccgttgccgcactgctgtttttttgttagctctcgcttcatcggattctagtgcccgcgagagaagggggatttaggatgtggggaggagtgcttgtgggtagatttcttcttgattcttcgctagggtttagggggaagagattggctgttggcatatcgtggaggcttgcgaggacgattcaagctttcggggcgggtgactggattatttgatgattcctgattgggtttgttgatctttctttatttaccgggacggagtgaaggacctctttggtgttggtgttttatttgatgatgaagcgcctagttcctaattggcgatctggcaggccaaacgacaattaggagttagtagcagcttgttgggttagcaagccattcttggctctgtgctaatggaggtgccgaggtggtcagtaggatgttgattttattttatttttacttagttcatttttgtagaggtcttctcatctatctcatttatctgcgtcatggcctcaatcttctctgacttaccacagtacaaacgtatcttctcactcttatttagttttctcaaataatcatccgattagcatggtagacatcttgattcaaggtttgaactccatgtccaatgcggccaacataattcattttccacatgatcgcattatgcaaccttcgcattttaaagtatggctgaatcgtgataaaattcaaatttgtgcaggagcttttgtgcaaacgaagtgccagggcaggtaa

SEQ ID NO: 112837 - DNA, 1056 bp, Setaria italica
  Intron number 1 from transcript Si028652m (locus Si028652m .g) derived from phytozome v7.0 (chr-ID scaffold_2; pos 47 042241 to 47043296)
cgccacgtcgctcggcatcttcagccccaactgaggtgatgttttgtgtttttaaacctttttagttctcagtgatggactgcgttatgcctgggggtggtaaagggccctctaatttagcctagcaaatttaaggatcgggctcaataaaggccgggccataataatatatgattttgagctaaaaatagatagggctgagttggattgtgaaggaggtacaagggccacccctagttatgcctgtgtttgtgtttttaaaatttgctgtggaagctaactgactggtgattcagctttcagtacttgctgttgcatctaagtaggtggagtgtagatactagaaacctagcactagggacacagttatggaaaaccttaagctcgctgtttgccttcagtggagctatattccaccggcaggaatttctcttatgtgatgatcatgaccacacatatcaatgatttctgtactgtacacttttgcagatgcaaagttttgtttggtcggatgtatgcatgcctcgcgtgacaattggcagatcataccagtacaatctgaatctgcacaagtataaacaattggcaggagtcaagttctcctttgttctagggctacatattcccacattgattggaaaaagagatagatatagagcattattgctagtatggttgtataacacgtacaactaagatttgatttatatgtgtcataaataatgattgtagctaaattttcgaaatataacttatgtgctatattattagccacacattggtgtgggcaatgtggctagtttctccattatgacctgttctagagaaatgcaaatttgtatgatctgctgtttcatcatagagaaatgttgcaagctgaaagtggacgtatcaaccatctagctgattacatgccttatgaactcttcttcttacataataagtcttagatggacatttgaagatgaaaacaacatgtatccttgctgatggaatttttcatgccttgcactctttctaggccagccacaccatcagtaagcaggccggtggatc

SEQ ID NO: 112838 - DNA, 870 bp, Setaria italica
  Intron number 1 from transcript Si030923m (locus Si030923m .g) derived from phytozome v7.0 (chr-ID scaffold_2; pos 41 52699 to 4153568 reverse strand)
tctctacatcttccttatcatcctccccttcatcggtgagcccaccctctccccccattccctctcaactttttctctctccgtttttcttttgggttctcttcctcggaggattttttcgatcggatattcggattggtggggaaagtagggtttccaagggtgttcccgtgagcctgccgaatgcgttccgcaaaatgtgcggtgcgtatgggttgcggttgcgatgagatgaggaatacgcgtgagattgaaatatctgagtcgcaacgttgtgtgtggtgaggtttctcgcactgctgattatttttcctcatttttggggattttttgatcgggttgttgcgagagggttccgctcacaactgatttttcccttaattttggggtttttttgatcggggtacttgcgatagattaattgtttctttggtttctgtttgttaatatattctgctcacttgctgagacgcgttaccttctaagttgcattttgaatcggatgccaaattcctaggggactagatgcttatcgtagcagtgaagtgttgccagtttttaaataattagatatagtttcaagggcttctgtgaaatcacgggactttgcgtcctctcgtgcgtgcacgtatggatgccctcgcgtggccgcaagggtaatttggtgggtgtgtgggtgggtgagctgacaagcattagccatgctgtgctttgcagaaaggtcacttaaaaaccaagttaatcatgtgttaccaggaattgggattggatttgatgtgataatacttctgaagattacatgttgctgaaaatggtttttcgttttgctgtgcagtgctgtgcccgctttactactaccacgagaggcac

SEQ ID NO: 112839 - DNA, 888 bp, Setaria italica
  Intron number 1 from transcript Si032573m (locus Si032573m .g) derived from phytozome v7.0 (chr-ID scaffold_2; pos 26 703172 to 26704059 reverse strand)
cggatccctcttcggctacgacctcggagtctccagtcagtacatctctcctcccactgctcttcttcttcttgcaattttctgtagtatactctgtttctcccattccagttgctagcccatttgattcaattgaatgctattcatctcgtttccaaatgatctagtctgagatgccgcggttgataattctctgcaaacaatttgtctcttaattctctatgtggtttgcgaaatgattgctcctgaacaacccaaccatttcttgaaaatgttttttcagaaaacaaaaaaaaatgtagaaatgcaggggaatattctgatccgaatttcattgacggtctcaatcgtgcctactgcttttgactcagaaaacaatcgattggggtagaccagataatcagatgagacggaattggaaacatcatgatgtctctgtctcgtatcatctgtggaagcaagcaaacccgctttactactatgttcccttgtgcaaaaatggttcatggttgttgcccactgtccgctggaatcaggaaactatgattaatcctcttcaacaaccattaccaaatcctgtgtgataacagaaacttgttccgtctcatcagtttcttggagacgagacgttccctgtcctctcattttcagtacagatatactctgtttcgtggagcacagcacatcctatccgcagtattgcaaatgccatctctaaaaattagcattttcagaaagcaacattttttaatttacattttatataaaatctgaattgcgtgaaatgaagtctgattgagcgaaattcattttaattcactgcaaaaaaaaggaaacatcaaagctttcctgctgatgaagaccattgttgcaggcggcgtgacatcc

SEQ ID NO: 112840 - DNA, 1022 bp, Setaria italica
  Intron number 4 from transcript Si033595m (locus Si033656m .g) derived from phytozome v7.0 (chr-ID scaffold_2; pos 31 457994 to 31459015 reverse strand)
aagttcctttcagacattgcaagcgattctcttcagtgagttaatctacagtcactattattctgtaattatattcttagtatcaatgatttgcagtcctcatgcatgttcaagaatagagcagtcttgttcctttcttccacgtaaatgcaaatcttatgttcaattgcatgctttggtttgtttctgtgtttattaggcttcaattaaaaccctttctctaattgcatgtactattcttgtggaattattcattcatgattagtgtaatatccgaatgatagaaaaaaaggttttcaagttatgctcctcattatcgtttaatttgcatttataatagttataattctagaacctgcccagctactgaaacactattcattgtgtgctgctcctgcaaacttaacatgccactatagtgatggataatcatttctatatttctatgcagacaagaaaatgccttcttttatagtctggtaactgataacatcctccatgagaaatatctccctttggaacttactaaactgtccgagtgttccatggatctctctgcctctactgactccctctctgggttcttggtcattgaaggagttcttttttcttaaaaaatgagattctgatacataatggatgtgcttatactaaatacttgatttgtgagagctatcctcatttcatagttatgctgtcttaatgtgcttccttggtaatatgttttggtgtgttcccaagattagtatttatttgtgcatgtaggtttgaggcttacatgttcttgtgccatttggggattgcattgtgtaaatttatcagggggtcttattttgttgtttctttttcgtcattgtatgacattctctactcttcactatatagaaaactagtttaaggatatcattagcagtatgcattacacactgttagtgtatcataattatacactaatttgattattacataattctttcccttcaataggcactgcaaggccagggtagcagcacctatcaaag

SEQ ID NO: 112841 - DNA, 512 bp, Setaria italica
  Intron number 3 from transcript Si030480m (locus Si030480m .g) derived from phytozome v7.0 (chr-ID scaffold_2; pos 38 147385 to 38147896 reverse strand)
ctgagggaagcaaatcatagagaggtaatgtgatttatatcttcagtctggctagtaatctgatcacattaccctttttgatctgtgattgctgtcctacaatacaattcagacctcaccatgtaggtttaatccaatttgaaaattactagtctatactatgctcagtttgagttcacttcctgtgttaccttttcaaaatacgcagagccaaactaagtttaatcaactacttgagtatagaactagtttacaaattgacttataaactgtcagattgctttttactatcccattctacatgcttgcacagtgtttgagtttgcttaatcacgtcactatattagactaatgtgtctattatattcttttaaaatattaagttcttattttctattcaaacaactaggggaatccttccttttttgtttcttttgccacaatgagtttggaaataaattaatgagacacctttcttgcttgtaaacagcttgatcaaattgtggttgaaa

SEQ ID NO: 112842 - DNA, 848 bp, Setaria italica
  Intron number 1 from transcript Si006401m (locus Si006401m .g) derived from phytozome v7.0 (chr-ID scaffold_4; pos 37 826107 to 37826954 reverse strand)
attcaacctctgcgccaggtgactcggctctcgtcatacccttttctgttttctggcaaatttcgcgttccttttattcccagcgggttcgtcataaagggtgtggtggattatgtccaaggaatctgctgatttgccatgccagaatggggtgttgcgtgcttctctcgtctcggatgacaatcgtgctaagctcgtggggttctagagactaaaggttgggtttcctagttaggaaccgttccttggtttgcgatgggtgaattgggcaccccacttgcgcaaaccaagcaaactgttactgccctcaaaagttatttaagaaaaaaagccaactgttactggtagtgggacataagcgggaatgcgcaggctgtggaccaattatcgtttgttcgtgcttaattttacgataaaaaaatatatgttcattcttcctccaagtgtcggtatactctatacgacagaagtcctaagctcttatcagattagtttttgcagtcacttgcctaaggccatgacccggatggttggctggtcgtttgcgggaggttctaggttttttgtgccacggtggaaggctgcagaagtgcttgccatgacatccgtgtcgctgcctgcttaagcggctgatgcctaaagcctagaggccatttggcatgaaaattgattgtttgattctggataactgaagattagcgtgtaaaattagtgaatcccattgtgggttaatggttaagagacaatagctcttcctttaagtgcctatctaagcattcttgcattgtacatactcttagtgttaaacttatcgttcctcatgttaacaggaagtttggagggtgttg

SEQ ID NO: 112843 - DNA, 1002 bp, Setaria italica
  Intron number 1 from transcript Si029163m (locus Si029163m .g) derived from phytozome v7.0 (chr-ID scaffold_2; pos 42 093086 to 42094087)
cacgccgccgtgctaacgagctacggtaagttcctcctgactgctagttcatgttgctctgtttatgacgagttaatgagcaatttggagtgcattaagatctagtgggtcaggtttagatatgctagtttgtcaattggggattgaggtactgtgggaagcttgactgaaatctggaaatacttctttcgatagaatgatcgaactatgtggtggttggattcatggattgagttgaatttagccgttcgtttcaaagcaatgatgcccctttttctaaagctagtggtggatggagtatgagtcggatgattggattctctgtttgatgtgatgattcacgttcactttatcacgcattgaactttagtgtatacctatctaaactcaaacagttcaaattgctataagctagtgatagcgattttggttagggttgtcttggcagcacacagtgagtatcatgctgtgagcctgtgagttgtgacattatgattattctgtagtcgattatcagattatgtggggctgcacatttagtgcttatgaaataggttttggcacaaatacttatgggtaacattgagttttgggtgggcagtgagcactcatcaaatggccagggtggcatattatatattaatcctactgtcctacatgtgaatcatgagatagaagataaataaaggtacatgtgaaaagaaccttgttgaaaaggacatgtaagcatggacagacataggcttaagtagtatatcatggacggttctattctattgaagaagtttttttgaatgctagttatttgctcaaggaatgaggagttaacaggctgacaaaagttatagatttttttattgaaccttataaaagatgaaccatttttgttgaaaattacgcataatcgatcaaatttaggtgtgattacgtcattactcgagaaaaagttattttatacttccatgcacctgacatattcactgaagttctttcataatagaa

SEQ ID NO: 112844 - DNA, 547 bp, Setaria italica
  Intron number 1 from transcript Si033538m (locus Si033538m .g) derived from phytozome v7.0 (chr-ID scaffold_2; pos 29 374429 to 29374975 reverse strand)
gattggattggtgagtaactgtcacatattactgcttaagtgttgatttggtatgatctgctcattgctttgactcctctcatgaaaacctgctaaagtcaatctgagatttgagactttaagatcttcaatctaggaacacaactattatctattatgtactactgctgaaaacgattattaggtccacaatgccacgtgtcccctctctttagtttcatatatgcacattgtggtggtgtggttcaatacaaacctattttaaaatgtttcaaacagaatatgtatgcagagttgagtctgattatagacttcattctcagtatctgctattaatgctacgttcatgtacagttaaatgttaatatgtagagctccggaacatatcattgatttgatattgcctaactattgtactcttaacttgtcctttctctgctatgctgctccacagatctgatttttagttgcattcctgctcttttttatacatatacatcttggagttctctgattatcgtcttgttgtattttgtctcctaaggac

SEQ ID NO: 112845 - DNA, 630 bp, Setaria italica
  Intron number 2 from transcript Si026190m (locus Si026190m .g) derived from phytozome v7.0 (chr-ID scaffold_8; pos 42 05943 to 4206572 reverse strand)
ccaacggcctgctctccggcatcgtaacggacaaggtatcctgttccttcagttgaatctgtttccagtttacggtgcttggtattatgattggctggtaagtggtttggagcttaaaaggttggagctttttagattaaaatgtcattgcatagtagtagctgctttgattgtactccacttggtcccataaaaagcttgcttgtgtctcaatcaagtgccttcagataaagcaattctttagtgttggacactatgcaccattgcaactttagattctgactttctttatttgttccttttttcttgttttaagttatggtgcttgaacttgaaatttgaaactgatgccacttttcatgttcatactgttttggagctgaaccttggtacatttgggttaaatatcgctagctggtgtattgttcgaatgtcactgcttggatcattgcatttagtgcatttgactagttatgctttcatctgtgtttgttttggacaaatctgacactaatccaggcatccagcagtatgtagctactactaaaagtatgtactttctcttttcattcttttcttttgaactgtgatataggacatagccacgagggtgattgccgagggcctgcg

SEQ ID NO: 112846 - DNA, 882 bp, Setaria italica
  Intron number 1 from transcript Si027317m (locus Si027317m .g) derived from phytozome v7.0 (chr-ID scaffold_8; pos 11 530287 to 11531168)
tggtacaggtccttgagggtcttcaggagcttgatgtgcccccatgccaagactccttgcagctttatcgcatggaattctctcaagagcctacatgggacagtcatgcttcataatcgatgttaataatcttttattcagaaaacgataaatttgtagtgtggcatggaaatagtaaagtgaagctgtgattgcttgtaattgtaaggcaagtaaatggcatccttgccatggtaccaaatctgttatggttagttttacatgtactttcgtggtgtaatttgtacagtgatattttgttcttcaactcgtgaattttttgatcatgtaggaaagggaaattggattatgatcagtcccttcatagaagtgtttgaaaatgaattcttgttgggtcatctctagtacatgttacttttgcaggctgtatatattctgtatgtggttgattcgtccttttatcaaatttacagcttcagttggcagtagggtttcctttttctccgaaagtctttgcgatgctgatgatacaagcaaacaaaagggcattgagtcttaaccctggagaagctaaaagggtatacggcgaatcactagcttagcatgattttactaaacaccagccacaaggatagcgagggagggatgcaaagctgatgggatcatcagttcagcaatcaattcttcagaaacacctgaaactgatccatctacaatttccactcggatagttactttggcatcaacacgttcgcgttagcgactgagctggtacggatgctagagcttctgatgctactatgctagcactcaagaaacaaggaaccaataaataaaaaaagaatagttcactacgggacacaggcaaattgccgagtgcca

SEQ ID NO: 112847 - DNA, 653 bp, Setaria italica
  Intron number 2 from transcript Si033348m (locus Si033348m .g) derived from phytozome v7.0 (chr-ID scaffold_2; pos 41 412101 to 41412753)
cacgggcagaaggtattttttcgtttttagtagttacatgcagaatcaaacatcactatcatggcagtgagatttaaaatttaagctttgttttttcttttaccaatttcaacaacatggtgtagatttgacccaaaaattttctgatatgtcagtatttgttcaactattgatctttctcaatttaattgtaatcatgcatgtgcctggccagtcgcgcagtcctaagttatacccttagtttcatttagtctgtttcgcactatgttttggtcctttatcgttcaagtaactagtggtgtatcttcaaccacgtccgaattttcttgtctgaaacctgctatttggttttgttaacaattgctcaatcactttaccggtttgtgctatccaattaacatttaagggcaataactaagcagtgtatgctgcataaatgcatgctattatattgttggtaaccatgttatcacttatcagttgcattgaggcagccttattacccatgcaccttccatggttttgaatcaaacttcatatactaggttgatggctacgttgaatttagattctacttgatatacttgggtaccagaggtgtctgctgtccaaaattaaattctcccctgatgcatgtttttagttctttgcag

SEQ ID NO: 112848 - DNA, 998 bp, Setaria italica
  Intron number 2 from transcript Si028656m (locus Si028656m .g) derived from phytozome v7.0 (chr-ID scaffold_2; pos 43 396526 to 43397523 reverse strand)
tcaagctcgtcgagcccgcgctcgactgcctccacgtaattaatcatcatcaccgtcccctttctcctcgtcctttgcttacctgcctgcctgcttgaggctctcaaagcggcagatgtgttgcattgatgccgagaatcgttgactagcaaaaatgcgtgccgttggagggatcattcgctctggcaccatgtatgctttggacgttagcaggcttgaaccacatttccttgtctagggtagatgctggcatggaccattcctcattttgcatgtgcaaagccaagtctctgacaattggttgtttgggctagagatgatagatagttgcaggtttatgccatttgacttatttacaattttggcgagattgcagactatcgttatgcaaagaggatatgtatagtagtatataaaatggaactcaggatagtaaaatgagtgcgcaataagaacatgtaggtgtccagacattaagttgattcatcaattatattacaagtttcaatgagatacgatgctatgccacccataatctggaattcacaaacatgatgtgcaaatacgtctatataagttctatgttgccaacttgccatcatatacatctagtgtatctctgaatttgggtccttcttctttgcgtggtaattgtctatacacttatacagatgtgagatctggtgctaccatatcttccccatgatccatcagaaatctatttccaccccatccttatactacgtgtccaaaagttggggcagtgctaaattacttgggattgcatcaagcgtgtggattttatgctagttgcaaagcagtccagatcaatgcactagttgccagtccttttcaacccatttttttggaccaagaatcagcctgctattgtatctttaccactttttttatgtaaaaatgcaacattagatgacagatcttaaacaatcctttctgattgagctgttcaatgtttttttaccagaaacttattgctt

SEQ ID NO: 112849 - DNA, 891 bp, Setaria italica
  Intron number 4 from transcript Si031284m (locus Si031224m .g) derived from phytozome v7.0 (chr-ID scaffold_2; pos 30 658488 to 30659378)
gactttgaagaacaaggacctcctcataacaaattgtgagttttcctattaaccgatgaatgttacatttaatgttcatgcgcttccaatgtgtataacactgttgtgtattacgttaccaaaaaaagctaaaccgtcaagcgatatcctgtgatgcagtattttctgcacccccccccccccaaccaccaccaccaaaaaaaagatgaaccctaatgggttgtatacaatacatttttattggagattttaatgctgcaatatattatattatgtcaatgctggaatacgatcactgcaaatacatgaaaagtactctggctgcataaattcacatacacaagagcagtccagaaccgggaaaatagctgaagttccataagtagagggtacctgtaagtttgtgtcttttacataagaaatatagtcgcatgtaaaaactataaagctctttccaatctagatggctgaaagaagaaacaaaggtgaaaagaaagcagcattgtttctaagaataaaacaaccaagtcattgttagtacagtatgagaaataagaatataattaattcaaaaagaatgaaatggagagctgtcaaacttttccggaatttctggttacaagaaacagcaatgggttcattttttctccttttcttttttagccagtattctaaccatgatgtccacctttaactccttaagtagcacccgtaaagtggcccaaatttggttagctaccatcatttgtcatctgtgtgatacaataattcattgactttccatgataaattggttattattagactcataactgtggtaggaatgggaatgaatgatttctcctgaaccctgcagattcatttgcaaggtgactgtccacctagagggac

SEQ ID NO: 112850 - DNA, 921 bp, Setaria italica
  Intron number 2 from transcript Si007253m (locus Si007253m .g) derived from phytozome v7.0 (chr-ID scaffold_4; pos 41 00520 to 4101440 reverse strand)
acccgcggttcctttgcttcatctcggtgaccagggtgagcctgcactcctctcctccgtcacgaatctaagaccctataggccctccctcgtcatccataccttgctgtctgtaggctgtagcccattcttaggccctccgattgttgctatcttacattgttttaggaggagggaggaaacaacccagacgagagtccattgtggaatcatattctaaaggtggctgttggaataaacatgcagagcaattccatgggtcgagccatggaattcccaatgacagtatttgcatctgaactgcatgtttctttgtagactcaaagcacatctgctttgaatatctaatgttggaatcaaagtgcacacaaatgtgacagcaccaattcttcagcagcttcaaaatgaaattgcagaggctgaaggagaatgagtctgaattatttccttgtaaactatatatgtttcttatttggcttcttttagttaatcgctgaattaggttacttaagttggaaccctctaaagttccatttgttgaacttattgaacttgcagttactttggtaattcatatataattattggtattaaaatatagtagccgtatccccgtgtcagtgttttttaggaatggcacatccgtgtgtccaatgtgtatagtatccgctcccatatccgcatccgggcaacataggcaatgatacataactctcctttgtatttgaggaaaaaaaattggaatgcattttttttaaatgggatgagctagcttttatgtgattgtatctgacggtatgaatgaatgtgaagtttctctataacaatgcaacttactattcaacaagatgctcccccttgtgtactatccatgatatcaatgtcatttgctccctttcatttacttttttaccttcaggt

SEQ ID NO: 112851 - DNA, 649 bp, Setaria italica
  Intron number 4 from transcript Si033373m (locus Si033373m .g) derived from phytozome v7.0 (chr-ID scaffold_2; pos 34 4075 to 344723)
tggcaaaagctgtactggaggagcttgaaaaggtaatttcaaggccagattttacttgtagtctgggatgggctcaaaaatagattctggacgcatattactgcagtgactcatctggccattgtttttgtttcacttgtttacatgtattgctggcatttatgatgcatagtttcatggattcaatacattctgatgatactctgcttttaattagcaatcggctctctgaccattgaccattgtagcagctcgcagtttggcttcagtacatcctaaacatgctattttgttgcctctggcccattttattttcagtatgtgtttaatatgtctatcaaaaggaggatagttccataataccatttcatgaaactttgttgtgtgacaagtgctgcaatgattcttagatgaaccacatgcttaatgattctcagcactatgcttgtttctgataaaatcggaaccttatctggttgatatttaccctatgtttgattggatttgtattctttagtttctctcaaacattgtttcctctgcatcatttaatgttgaaagtagtttgaggtcaatccaatgttcttgtatgctgcatcctgctctatctttctttgcatatcaataaattcatgctattgttcaggtg

SEQ ID NO: 112852 - DNA, 838 bp, Setaria italica
  Intron number 2 from transcript Si026765m (locus Si026765m .g) derived from phytozome v7.0 (chr-ID scaffold_8; pos 16 048444 to 16049281)
aggtacacgttcgagaagattcacttatctcaggcacatgatgtgtagtatttgtattgatggtacatgtgctagtggtttgtgcttgatgtactattgatattatgttgtctggtttaaaatttggcatgaatgtcatcaattgtttttttctttgtgcataggcgcaaaacattggactataccttcttgaaatgtcttcggtttccattattactgtttttactccctacatacagagccagatttctgaaagtattgtaaagaagcattaaatttacagatttgaatggctctcactaacgatagggaaaacttatgcatattagggaacccaattaaaatgatgattgattctgtatgaggcaaattttggaatcaaattttttaaacaaggatatgtaatgtgcttgcctttttaatggccaccagaccagattgttcaaagctgccacattattcagatgccaaacataagtaccatgtttttttcatggagcctttatattcgttaccgttagttctgttagacaggaacaactcgtctacattgaagtagtgaaactgcttagcctgttttcttctagtcagccgtcaccttctttagtacatctgcagagtcacaatagttaaaaagacaatggaaacactggaatatctgatagttttcatccttcagtgctctatgttagctgaaattatgaccaaaggatatgcaaaaaggttgcacatattttgtattttcttgacatgtcatactgccagcattttacactaatttcacctcaccatataacatgggtatcacagttttgtaattctatttgatgctttcaga

SEQ ID NO: 112853 - DNA, 633 bp, Setaria italica
  Intron number 1 from transcript Si005666m (locus Si005666m .g) derived from phytozome v7.0 (chr-ID scaffold_4; pos 53 50189 to 5350821)
tggaccaacattttcaaaatagtaagccagatccaacgctcctgttttttctccctttatgttctgttcgatatccgttgtttctccttctacacaacaccaaaacttgttaacatgttccctgtttcatcatgctgtgaaaatgcttacttcccagtgtttgttactgtaagttcttgctaacagattcatttaatctggttagaaattcctgtcacttagccatctctgcttagtcttttctcttttaaaattttttgagcaacatattcttcatatctagttttgatatatgagaattatatgagtacattcaccatttcaaatacttgcatgatccgataattccttcaagttatacaaatatgctttctgtaaaaaaaagtaataactacatctcgagaccttgaaaagtaagaagatgccttgaatttatgacataagagtattctacaactcagaccaacaaatttacattgtcaaccccaaaagttgcaactaaatagtttcttttttcattgggtcatttgtacaaaaaaaaacccatccatgctttcataccgtgactgacatgcttatgctttattcttatttttatgttttggcctaacaggtggacctccaaacagtttc

SEQ ID NO: 112854 - DNA, 757 bp, Setaria italica
  Intron number 1 from transcript Si006759m (locus Si006759m .g) derived from phytozome v7.0 (chr-ID scaffold_4; pos 35 566682 to 35567438 reverse strand)
gctgcagctgcaacagctcctccagttcgtccactgtaagtaccaacttctacaatgtatgccaaggcggccgccggtacggcgccgccgtctctcggtgccgcgcgcacggcggttctgtgtgctgggggtttcgtgcgaaaggtggggttttgggtcgagtggtgcgaggaatgctctattaataatatacttgcagggcgtggccgtcaggtgggattgcttccattaatttggtttttcttctgacaaattgtactcgcattagaggacaggaagaacagtagcttccaataggagcgttttaaaccgtttgatttggttttgatggccgaggtcagaaggaaaccgcaaagatggagtgtagctacaggatattgacttgagggattaacatctcgtggtagtggctaaattttttttcgaatgacatagtacagacgcggacgctcacatacacgtgcacacactcgcttctacgaacacacgcacgcaaccctacccctatgagcatatccaaaagactgagcctgcaaatctagaaaaatgcgagcaccagtgtcgagtcaaggactcgaacgctggtggacaggttccaccacaagaaaccttgcaagctgagctacgctcagttcgcgtggcagtggccaattttcccgtagcagcatataaaccaatgacacatgtgccattctcttcctgtaagtactgtgctatgtgtaattttttttttctttttgatgcagctcttcaagag

SEQ ID NO: 112855 - DNA, 993 bp, Setaria italica
  Intron number 1 from transcript Si026168m (locus Si026168m .g) derived from phytozome v7.0 (chr-ID scaffold_8; pos 37 445013 to 37446005)
cgcatccaggtgattgcagtatctttcttgctcggactgcagagctcctggctctgcttacttatcatgaacattgaacaagaaaaaaaaatgatcttgggtgtaaaaggtgcttaattttccgatagaaaaaggagcaattggatttaaaaaaaagctatcattttggcctagtttctggatttagtagtacgcaagttttgatctttgtttaccctgctgcaatttctctctctttctctggatttagcgctgaggctattaaagtttgatcaatttgtgagaattttgtgggattcgattgtttgcagccttgaaatgtcattgtactttatcaggaataatttttattttcctctatactttacattcaaactataaagttggctttccgatttctgataaggtgagggattgtgctcctcatctctgagattcaacgatacatgatgaattaatgtgacttgattaatgtataaccctaaaaagtgttaagggtgaatggcagcgatgaactcatgcaaaaaaagggcaaaaaaacactgctgcaagaacgtctagcttctgttttcagttgctccggaggatgccaagtagaacatgttctgttagttaacatattgcattgacaactctgaagaattcaggatagttaggatttctgacaaaacatcctctctagctttgcttctcacttcaatttctcctactctaggttatggtgcctttatatgaactttcaaatctaacacaaatctttccattttttcccgttttattcagttttgctatctgattgtccgtctatcagtatttatataggaaaaaaactaaccagtttgttatatattgggtgcaatgtaaagattcaatgctaatccggttggtttgttagcgaaaagtcgtgagacacctgctttggctaacattctttgatgcatcatactgaatagcattttctctcattaatgctttttcagggcaatctgcagc

SEQ ID NO: 112856 - DNA, 744 bp, Setaria italica
  Intron number 1 from transcript Si033433m (locus Si033678m .g) derived from phytozome v7.0 (chr-ID scaffold_2; pos 14 705472 to 14706215)
aggtatctctttcttactattgaactggctttattctattctttatattttcaaacattgtatctagaattctagattgtgcgctaacataattttgatgtggagaaaaatgacctaggaagggaatgcacaattgatcaattcatgtggcacaggagataaaaaaagatgaattataactatggtctgccattgcccatgcttgggtgtaatgtagatatgttgacaacattaaaggtgttggcacatggctaggtttaaattggtttggtcatttggtgtatggactgagggaactcctttttttcttttcttttttgagacaaggactgagggaactcaaggccatgaatacattgatctggcaaaataaaacaaaaaacatgaatacatacacatgaagcaggtcaaggtcgctggtgatcaagtgtcaaccctcagaataattttttggacaagctaaaagtatttagagtctcaagcttcgaatttagcctttttacagtactatatatagatggatatctgctaatattctatactaaagatgtgatagatgtggggtcgctcacccttaatcttttaaaaagtttcaagatgatgaatttataaagtaggagtataagtgaagaatattggtggcagcaggccttgtttctcattcactgccaatacctcgggctgactcaagaacttatgctgtttgcaggctactagtgcactggacgcgacaagtgagcggct

SEQ ID NO: 112857 - DNA, 849 bp, Setaria italica
  Intron number 2 from transcript Si006355m (locus Si006355m .g) derived from phytozome v7.0 (chr-ID scaffold_4; pos 10 78031 to 1078879 reverse strand)
gggcaaatcttggggatcaagtccgcggccgcgacgtgagtgccgcttccgtcccttccctttcttgtcatttcccatctccatgggattctaaatttctaacactatttaggatttctgaattggttatctcagttgatctgggatcagatttggcaccatatcctgctatttaccaatttagtttctatgctgtatggagcgattttagctgaaaacgtttcttccagtttttaaaattaatgaatttgccagtgcccatgggacagcatcgttgtgggattctagcatcatatatgcttgcttattcgattttgattctagtagttttttcactactgatcctctaccaaaggatcacttatttcaatacattcgtaatttactataaaatctttcttttaaaccctgaaatcaagatattttacttatggtgttgatatggggacaatacgccacagtcttctgcgttcatcatcaattcgtaggtttcatatttatttgtttattgtcatctacagcacataaaactcttgaggtttatgaatttaatagaacaagtcataagacatttacgcaattaagttgtattgctaaaatattttactagcggagatttttatttgagcccagaataaataagggcataatgctattcagcattttatgcttccacaacactaatttccacaacttttagagatctgttcaagctgtgcttacatgatattgccactggggatgggcacatagaacagccttttgttctcaaattggatgagctgttctgttggcatccaagtatacatgctttaagtattgattggttgttgctactattggcaggtc

SEQ ID NO: 112858 - DNA, 645 bp, Setaria italica
  Intron number 2 from transcript Si005659m (locus Si005659m .g) derived from phytozome v7.0 (chr-ID scaffold_4; pos 39 757009 to 39757653 reverse strand)
cgcatcctcctcttcctcgccgagcccgatttcaggtacctgccttcttcccctcttttccctccacaaaaccctagtccaattgttcctcgtatttgagtttgctttgatccggggatacatttgcgaatgagattgtggtatgaatgtgccatttgattggggccgcgtggcttgtatatagttttgctaaaatgcagttagatttatcccgttccagtgtgcagtggtgttgcaacttgcatatattgtccatttgattcgatagccgttcgtctcccatccaggcgtgtgttggatttctctgataatgcgtgtgcttcagaggccaaatgtgcggacactaactaaactatactcactagtgtgttaattaccagagtagcaagctacctgcaactggacataaaatttgccgctagttttcttgctgggggtgaaaagaaatggcatagtaggctaaggatgctgtgtaggtatggcatctgtcaaatcttcaccacgtttgtgtaactgttatccttgcggtctttgtaagtaatttggtacggtagtgttatctaagtgtgccagtggatttcacttgttagatgtcccacctgtcgtttacatgtatgctgtttcttcactgttgcaggttgagcc

SEQ ID NO: 112859 - DNA, 811 bp, Setaria italica
  Intron number 1 from transcript Si032615m (locus Si032615m .g) derived from phytozome v7.0 (chr-ID scaffold_2; pos 51 74684 to 5175494)
aaggttatttgattattccagtttgatttactcaaatgcctccttgctcttgtggtctttgtatcgacctaatatttctatattgtctatgccgtgcaggaaatctgggcagacttcgctgatcctgattcggcggcacatgaagttagtacccccttctccttctggttctaatttctttattatgatgcttgtgctcagtttaagctgagcagtgatcttgcacagttcatgtttgccattcttatttattctttgcattcatcagtgaagaaacatgaagaaaatcacttggtcatttagatgtttactaagttaacagactccaaaacccaatttctatccaaaaaattagttcggaagcatctagcatgattatgttgtttcgcatatgcatgcactcccaaaatgtattttggtgcgaagagatacctgtagaatattggggacatgtttgtgatacctagggtgacttgttgcaggctagggtgattcaaggttgacatgatgatggtattactacccatgaatggcagtattattttcaaaaatacattgcattagatgaacacttgaaatctcatttactcttgcaataagtgaggacttaaataaggatttatgacagctatctatgtacctactgaattaacaccccactccggcagaggcgtggcataatttttcacactaatcgtgtcttctccccttaacctggttatcgtttttcttttctttaacatcaggttcgtcttttaggatttaaaacttttcagaacaaggtgcacgcgattagtcaaagtactggtgt

SEQ ID NO: 112860 - DNA, 933 bp, Setaria italica
  Intron number 3 from transcript Si006895m (locus Si006895m .g) derived from phytozome v7.0 (chr-ID scaffold_4; pos 31 997189 to 31998121 reverse strand)
ggggtacacgatctccgggcgtatcaagatcgagggtaagtgatccagctcctatccaactcttccggatgcgtatttgagttgttgctaggtttgtagcgtttagggatcgtatacctgtagctcagtgccaaattagatgcgccagctgttacatttaggagtctgatctgctggaatgtttgttcttagatctcgatgtcgcttgctgtggacttcaaacaacttgcttgtctaaaccggacattgaaacagtttggattacttggatttattggccattgctccgatgggaaatgattttgggcaagttttagtagctaaggttatagcttatacagacttaagtgtagtccttaattgtggaagagtgtgctatactgctattcctactatctgttgtttggaataactgaattaacaggtgtgttctgtccaaaataaggagttgagagacgtgtaatctgtttttgaagttgatttttgctactttatttcagtaactgaatgaactggagatgagaattcacttttattttagattgattgatgctgtgccagcatggtttctgagaagtcgcatgaaattagagtagacattttgatatacttctccaccacgctgccctactccaagctagtttctttctttcgtgaatgtttcgccatgatgtctggaagtgatcattagcacatttaacagtgaatgttaatgtaatgattccttttctagccagtcatagttttagaattatggaattttcagtgttggattcattatctagattgttactgctgcttgaggtgtttggagcctaagtttcaagctgaaagcttacctccctgttgtcagtctggtactttggtgtctgatgttatttatttgctatggctataggtgcgaatccgaagggctttggtcttccagctaaa

SEQ ID NO: 112861 - DNA, 580 bp, Setaria italica
  Intron number 1 from transcript Si027343m (locus Si027343m .g) derived from phytozome v7.0 (chr-ID scaffold_8; pos 31 531810 to 31532389)
gtccgctgcaagagatctcacccacactgtgcgtaactaacctctctttaactccttttagtgcatatttgtttttgacatagaaattgttagtgctgtccctcagcaggtaggagtcgtgcaccagcacgtggcaccgatctttgtagggtccctaattttctaaaacaattgtgttgtaatgaagaatcttgtcaatctcaattataacttcatcagccatgaaacattcctataccataccaacttcgcccctctctccataattgacatccatgtttatcatagtcttccaagctagatgtaccaacatgcaacctggcatgtttaggtcaacctcaattaactaattcatgcatttagatataatacctagacaaatgagcagtttgttgatgaaaacatactaaaatgatcgttaaatattaaatatccaaatccattcatctaatttattttcttactacggcacatgaatagcaaggaagcaataataatactctagaaattgacacttatttataatacttttgtttgatttgtagctagccgtggtcgtggcttaggtggctactactgg

SEQ ID NO: 112862 - DNA, 784 bp, Setaria italica
  Intron number 1 from transcript Si033096m (locus Si033096m .g) derived from phytozome v7.0 (chr-ID scaffold_2; pos 43 403737 to 43404520 reverse strand)
tttgtggcatcttattcaggtagactttgtcttcatataatttcttaactaggtttgcatatttgaacttaccattgtaccacacagtatgaccgttttcctttcagcggttcataagttgtgggcatgggttgtacaaaatggtataggattagatgtccatgtgtatggctagtcccggttggtatttggacttgcataactgtggttaaccatgttgagaaaagtatggacggaaacccaaacaggcaaagctagtgcattttggaacttggggcttacgctgacctctcttagtgttaattcttcaaattttgtttctttctgaaataccttaggtcttcacattttttttctttctaaaatgtattaagtatctatattttgcttctttctgaaataatatgactacaaaagcagttaatatatactagataggtattaattacttgtatcgttggcccaatatatttctggatttttaatatcacaactaaggttagtttggactgtggatgctacataggttggcattttatgtcattacttgtgttgtcactgctgcatttgtccggagcacaggaaggagaaagagcccacattaattcatatgttatatttaaactgactgtttgattgctataagagtatgatacattgacatataatcaacctgcttttgagaaaagaaagtactttgtgtgatattctcttgtgtcttctacctggttgacttttgtggattattccagctattgatatatctacattaaatttatacaga

SEQ ID NO: 112863 - DNA, 530 bp, Setaria italica
  Intron number 3 from transcript Si030669m (locus Si030669m .g) derived from phytozome v7.0 (chr-ID scaffold_2; pos 24 845989 to 24846518 reverse strand)
tgcagttttatcttaccacctacaccgtgcaccaggtatgattggtcacagcttctgtgtttgtggtcgatttctatcgaacttttctgtaatatttgtgtaggtcatttcgttttcccttcaaataactcttaagttcttttctcggcactgtgaatatgcctgtaaaaaataggagtttatcctcttttattttatttagaaaaatgtaaaccaactcaacaaagtaaataatgccatatcttttgaagaccattctagctggcttgtggggttttagttcaagcatcaaagcaccaatctgatcaaagaattcttgtgatgacaaacttgtctttgaatacgaaacgtaaattataaaccaattacgttgctgaacaactgagatgtcttctgattgttgtaataatctgtaattatcattatgagattctgctacattcatcttctgtggtttaattttattttcatgagttgatccttgccagtatctgtacgatgaatccttcaccagttgatactgtctgcag

SEQ ID NO: 112864 - DNA, 503 bp, Setaria italica
  Intron number 2 from transcript Si027521m (locus Si027521m .g) derived from phytozome v7.0 (chr-ID scaffold_8; pos 71 97771 to 7198273 reverse strand)
ggcacaaggactgggttagtacttctatttaacatgttataccttctccatatttgattagccttgcatctgtgcatctagatctgtggttttgttcaaaaatgccttttgctacatgttatacctatattcaacattagaacttgataaatattgaagacttgatttctaatgttcaaggacagtccatgtaatcatatgaagtaaagcatatattttagtcacattattattactcatgtaaaagcatgatattaaatccatgtaaattgcttatatgtagacctagaaacatagggtgtaccaaaagaaattccgttccaaagttggagtggaagagttccttaaaacaaacgggccgataacaggcatgttcgaagatagaaaatttcagaagaaggtatagtaacccctttacagaaattattgcatgaaaataaaggagtccaccaccatgtaaatactcagaaccagatatatttagaaagtttctacattataaa

SEQ ID NO: 112865 - DNA, 958 bp, Setaria italica
  Intron number 1 from transcript Si028394m (locus Si028468m .g) derived from phytozome v7.0 (chr-ID scaffold_8; pos 71 11273 to 7112230)
tgactgctcaactagaaggtcctttcttccacaatatgcttctgttatttaacattatattcatgaaattggtgtcttgataaccgcttgatcaaattaggcatgtccacatgtccttgaggttttagtgcattagttaatacagtatataaacattcatttgctatgtgagcaatatccacgtttcctgcttatgtgagcaatatccattggagtctggagaagtggaatcaacagaaaggccagagttgatgcattgaacataaaccattagagaagacatcacatggtacacatagtaacatcaaaaagttaatgtcagaactcacataaaaattaacaattattgccgagaatattcttaactgttgcaccacatgccttgttattcctctttgtcagggctactaaattgctaagcatggctaccagcaaatagtagtataaagtagatcccatcaaaagatcaaatccatatttataatttaatactcacttcatcatgtttggaaggagaaaggaactactcacaacacaaaaacaaaaggaactaccaaatagctagcatgttgcggcttcctgtgctgccctgtttggtgcattagatacatctaagtatttgtatataaaatcctagcacatgactagctccttataagttttacttgtttaactatttttttaaaagtgggtcttgaagttggcagaactaccataggctattgtaactgctaaacatgaaacagaagaaagactgcaattatgaacctcaccaggcaatgaaaaagatcttgcttttctgcacattctcaccaggcaatgaaaaagatcttgcttttctgcacattctcaccaggcaatgaaaaagatcttttttggtatgtcatttctcactttgcatgcctatatgtatttaatttcaggatcgatccaaagagctgcgtgctgagacattgta

SEQ ID NO: 112866 - DNA, 810 bp, Setaria italica
  Intron number 2 from transcript Si029056m (locus Si029056m .g) derived from phytozome v7.0 (chr-ID scaffold_2; pos 46 152672 to 46153481 reverse strand)
ctggcgcacgctaggccctgctgagatctctctcggtacgtgaaatcccatccgattgcgattttaagggtttttttcggattgcacgtgcaggttttcccccgatgtttgcactgtgtggttgaggacttgagggtattaggggtttatgtgcggattctgttgaatgatggttttaatgtacaatgctcgtgagtgggatagaaatgcaatctatttagttcgctctctgggacatgtgttttcagttttgtaattatgtatgctgtgaacctctgcctcaggatcaacctattttatttaggttgcaatgtccctgatacccaaaaattacctgaattttggtatgtaggtaaaattaggagcatttttcttcctatatttagcatgcagctcttgtcaaaattcacggggtaaaaattgtacgaactacggacattaatagattatcattgtaaaagtgcatccacatactagagttaggggtgttccgtgttactattttgctgaatgtataaaatgtatatcattggagtaactagaatgcaagcaaaaaaagatggatttagtcctcaaatcttgttgttgcaacttgagaatttttctatccttaaatctgattcatatattacaatcctatatgatatagatcattttgtttcattgagctgtagaatgttgttttgatttcgttcatggcaatgtaatgtaacttttgcaatcaatttagctaccttctatttagtatatcgggaaaactttttgcagttgaaatgttgacatatcctattttgaacaaccagccaattg

SEQ ID NO: 112867 - DNA, 635 bp, Setaria italica
  Intron number 2 from transcript Si027303m (locus Si027303m .g) derived from phytozome v7.0 (chr-ID scaffold_8; pos 35 29605 to 3530239)
accaatatcaccggccagggtcacccaatacgaaggtgcgaattcacctttctttatgggaacagagataaaaaagaagatgcatttctgttttatcggcagttttttgtgcatgagtagaaggtggaaaatgaatggtcaaattgcttgctgaccttttcatgatcgttctgcaactaattttcactgcttcggttttgtgctgtactctttcgcatgcatcagttcctaccttctaatgaaatacatgcagttttccttattgtttcgagatagaaaagaacagaaaatcgttgcttcatagtgatcagtatgatgcattgcatcaatctgaaaaggaaataaaaaagaacttgagatttgattgctggataagataacacaatattaaggcaacaaatagttttaaccttcttgtggtggtttatcattttgttctcattaatccagtagtataaagctagctagaacaatccaggaatagaatgaagtgtgttagattgtttttttttgtcattttgctatatttcttaaccagatgacttttgaatttcgaaatctttcgctaatagataatgacatgctaggtggattgtgcagctgttgatattggtgcgaagggcacatttggcttt

SEQ ID NO: 112868 - DNA, 538 bp, Setaria italica
  Intron number 2 from transcript Si027384m (locus Si027384m .g) derived from phytozome v7.0 (chr-ID scaffold_8; pos 29 365602 to 29366139)
agcacttccgaaagactgagccggtaaatccttataattgacgaagtcaccgctggggcctcgatgttaaggggcacgtcacctaccactaaaagaatagcaccggttaaatccttaaaaaaatccaccacaagtaaccttactagctgagcgtaagctgagctacgctcagttcacgaccattcaataatattatattatatattatttatggctacaaacttattatcattggagagtacatttgattacatgttggaccattttaagtttacattataaaaattattagctaaattattgatacaatattgtaaaattcaaatcttaatatgcgtgtggaccttataaattggaatggagcatgtaacttttactacatctgttttcaaatatatgacactcttcattttttttcatttgtttggctaaataagccggaatgaagtggtccgctacgatggacccgctcacatcatcattggcatgactggcgagataagtcgttccttgctttccctcaactatctggagcacc

SEQ ID NO: 112869 - DNA, 521 bp, Setaria italica
  Intron number 3 from transcript Si006891m (locus Si006430m .g) derived from phytozome v7.0 (chr-ID scaffold_4; pos 33 978491 to 33979011)
gacaggttagcagatgatatttcccctttttgactttggatgcatacttgtgcttctttacatttgctctgttctgcactaatgctcattacacactaagctaccagactatttcctttctgcagcgagagctaccagactatttcttgatttgcctggttttaggacaaacctccctttcagatctagttgcccatattgcaaagcttgtggtttattattattgaagaaacctgtctcaccagtaatctcagtgacatattaacttctcttctgttgttagacggaaaaccatgttagggaatggaatttctctaaagagaaggataagctagcaattagtacagctgtactgtagaaagggtgcctcccaaaatcgatgctgcttttatctgataatcatggcctttattggactataatacttttcatttttcattgaacttgcaaatgttttccattttgtataacaatatttttcagcttccattaacttgcggaggttttttatgttaggtaaa

SEQ ID NO: 112870 - DNA, 806 bp, Setaria italica
  Intron number 1 from transcript Si027593m (locus Si027593m .g) derived from phytozome v7.0 (chr-ID scaffold_8; pos 11 590638 to 11591443 reverse strand)
actattccagtaagttttcccatgtaaatcttcggtcaatctgctcatgtagttgtcaatgattcacatggatatatggcctctatttcataaatcaattgcaagatcttgttcctataaatcattgattatgttccatccaactcagcatagttgtctacaactggattgatatccttgtttctaactagtatgtctcggaaatcaattaatttatggaggatctaggttgcacatactaataattattaacatatatttgtaggatcttgagttgatcttttcttttgatgtacgcaaaattttgatgcacaagtatcaacgtaacagtatctgtaaaattacatgttttaattgggatcatacatccaggagctctgttacacactgtttttgctaattttctctattagggaaaacaaagattagacctcctaagttgacaggaactgtgtgcatagttgatggtatggtgtacatctctaatgcctaggttcaagtcctctttagttatatttgggtacctttttctcttaatacagaattaccaagttaggtagcctttaattttttatataaaagtactatcatctgtcaaaaaagtactcatatgttgatttatttcattttttatctagcatgcataaaccattatagattactgtgacaatcaatttatatgaataacacacaagcacaaactttgggtacgatgcagtaccattaaaaatacataattaaacaaattcaaatatgacaatactaatactaatttatcatttttttcaactgtgtgcagtgccacc

SEQ ID NO: 112871 - DNA, 689 bp, Setaria italica
  Intron number 2 from transcript Si029438m (locus Si029428m .g) derived from phytozome v7.0 (chr-ID scaffold_2; pos 38 587945 to 38588633 reverse strand)
tcaaggtggagactttcttttgttcttcgttcatttttgctgcatatgatttctattggctgctgtataatgaatagttagattgtggatagctgcttcaccaaaatgcttctggaatagtttaaccaaatgaggtggggataatttgagatcttgcaattaagacgaaacaaaaagttctgtgatcaatgttgaacacatttgccttttctgcatatcccattgctattcatttccttctgactagaattgtggacataagccatgagcattactatattgtttgttgattatcttttgttgccatgtattccatcgaactctacatttgtatgtttaatgtacatttcatgccttatgtactgaaatagcaccggcaaatgttgcatgcacccgcaaagggccattttgtgaaggagatgcagacctagacattttcaagttcatattgtcctttactcctttgtgcaatattttgtagttctattaaatttgcagcattccggtttgagtaatactggcatggatgagtcaagtggtttaatctaagaagccatatgttttgtctttctcttgcttatgcttgtgatggatcttctatgtttgaggttgaattcaataatcatggggatacttttctttctccctacttgcctgtcaggaagtgaaagttcgtccgcttgtggaat

SEQ ID NO: 112872 - DNA, 552 bp, Setaria italica
  Intron number 4 from transcript Si026311m (locus Si026311m .g) derived from phytozome v7.0 (chr-ID scaffold_8; pos 21 1317 to 211868)
gtgttgctggaacacaggttgctttactctttacaccttcaaacctagacatcgttactggcaaatcttgactcatgtctatcacatacttttttaaaaaaattcaaagtttaatttctacaaagatattaattttgtaccgttgcacctgttcttctatatcttttatttttaattttgcagaaaatgtcatgggaacgtgctatgatgttgcctgtttgtatttgtgttcttattaagttgtttttaatttaaaaagcgtgtctttgctgattcaagtaaaaaaaaatccagaaacttattgtgaacaattgctggcatttatatcctgattcttgctagaaattgtaatggattgcaagagcgaatttggatcattaaaagatcgatttaagcgtaaattcagcaactttcttgaatggattgatcttcctctggacactttcagcttaaaggatgtcataagattggttgaaatgcaaataatcattaaactttaattttatctctctgagtttggaggtgtactgttcttcaggctgagaaggctcc

SEQ ID NO: 112873 - DNA, 846 bp, Setaria italica
  Intron number 2 from transcript Si026775m (locus Si026775m .g) derived from phytozome v7.0 (chr-ID scaffold_8; pos 26 036817 to 26037662 reverse strand)
ataaacctgtgaccagtagcagagatacacaagaggcaagctctctttgatgcttcacaaagttttcttcagtctgatctcatttgctaggaatgtcattccactgtttatgcttggtaaaaagaaaattgtctatgctcagttctctgtttttttttagtatatggtatagaacctgcatattgttttcacaaaatggaacacgtaaatcaatagtactagctagttttgcttctttggacgaagttgacataacaaaaggttttgtctatttagcatttttgctgttgcaattttgaatatggtataccgtgatctacttggttcaaagcttgcattgctattatgtactcatttctaaataagattttggggctaaaactaattagcagtctggttctcttttcctgaaccaagattcacaatcatattcttgttaacataatttatgaaagtttggagtccctgtaacattgaatgtaattgacggctcatgtccatagaaagttgacttgaacattaagtgaactgcatgagtctaatttgagaatatgctggttatgtttgaagcttaattaactggaagtgcgctccaaataatttgtcttttgttgttagggatcacattcaccatattgtgttatgcctgtagatgtaaatttgttgcagttgtctttgtgatatccaaagctttcattctatttctgattagatttacttctctagtagtgttctatataatttcatacgttcaaaaaactaacagtgtttttgtctcttctatgagatgcactaccttgcatcatttcacatccctacaggtttagtgttatctgatttttcggg

SEQ ID NO: 112874 - DNA, 392 bp, Setaria italica
  Intron number 2 from transcript Si007912m (locus Si007912m .g) derived from phytozome v7.0 (chr-ID scaffold_4; pos 13 381104 to 13381495)
aaggggtagggtacgtgcctaaccccagtttaatgagaaataaagtaggaaggaggcagaagaagcgtttaataggcgatatggacgtgtcggaagggaggctttctgcagattatgatactggtgattttgatattgacaagtcggaaaatcgttgctccaagtgccacaagatcattaggaattgcacatgctgcagtagaaaatcaaaaggcactaaatctagaccgagcagtaataggccgcgtacttcgaacaattgggtatgcgcgttgcttgtattatgcgtggctattgttttatattttttatagtagtacattatcatattttccgtacttatcatataatgaagctttttactaacgatcattttttgttgtttctttagg

SEQ ID NO: 112875 - DNA, 639 bp, Setaria italica
  Intron number 2 from transcript Si032916m (locus Si032916m .g) derived from phytozome v7.0 (chr-ID scaffold_2; pos 53 36955 to 5337593)
tgccgctacatctataaccatcaggcatatcatacgcagtgctacctccgttctcaaatatatgacatttagaacaaactagaaagttcctccgttcccaaatatatgacatttagaacaaactagaaagttcctccgttcccaaatatatgacatttagaacaaactagaaagttcatttttaactgatttgcttattctgaaagttcatttttaactaatttgattattctaaacgatgatgtaaaagaaacttctatagcactcaatgccaaatttgtttattagcactaatcggcttggaaatcaagacctccatttggcgcccaatgagacactttaatttactaagaagacggaatcattcatgctaatgtaccttgcgttgagacaggctatatcatgttgtaaaatttttcaaactctgtttcctaatggcactttgcatatacattaatttgattcgtgcaaatacttcaagccacttaaatttatatatttgacaaatatatgtaggcattaattttgcaatgcttcgcacaattttgattttaaaaattcgagccatgtgcataaaaaaacttaaatacgttaagtattcatgttttgaatttaaaaaatgcagaacgaagacagtgg

SEQ ID NO: 112876 - DNA, 1002 bp, Setaria italica
  Intron number 1 from transcript Si031544m (locus Si031544m .g) derived from phytozome v7.0 (chr-ID scaffold_2; pos 27 236282 to 27237283 reverse strand)
ctgcacgcgctgcgccctgatttcttcttctccaggtacgcttctgctcgttcgtaaccctccatcggctgccgcattttctccattccacatattcatgggggtgtatgccgagctcggagctttgggtgggcggagtagcgcgtggtgtgatagggtgggatactcggctcgcttctgttccgtcaaaaatttcttgcaagattcgccaatccgggggtgggattagtggcaaagattcggtctttcagtagtccgcgttggaatcatgccaagatttgctctcctactgtgaacttaacgcgtttggccctggaagactaccaggtccgaattagaataccagatttgggaagattctgactcgggagggatgcgatcttttacaatttttttaattttgagcgcattatctcacagagtttgtgaggtcaccttattagagcaactccaaaagaatctgtatcgtacccctaataccttgtttagggagaaaaaaaaagaaaaaaagactccaacagctcccccaaaacttcccaaagttatttgcgatgctaaaacagagcgcatatttgcgcgacatccttcctcccccaatcgccaagagtacccaattatgcgcaaatatgcgcggtgacgggctctattttagcgtcgcgaataacttggggaagttttgggggagctgttggagtccttttttttctccctaagcaaggtattaggggtaggatacaaattcttttggagttgctctaagcccgttgttctgcaaggtccagttctgtgtgtatcttcagagttagctgggctgtagattcagtagcattttccttaaaattgatacagccatacagatttacatgtttctgtaattacttggtgattgttgtgtttgatctttgtgttacctttgcaatggtaattactgatggaagccaagtactgaagtcagcttctttcgtagaacattatttcgatcagtgcatagcacgttgattg

SEQ ID NO: 112877 - DNA, 895 bp, Setaria italica
  Intron number 2 from transcript Si026201m (locus Si026201m .g) derived from phytozome v7.0 (chr-ID scaffold_8; pos 37 928297 to 37929191 reverse strand)
aggctggtggccatcctctgctccggcagcaagaggtaataattacatcattagtatagatagtccgatccgatgcatttctccgtctcaccatgcaagcaggtgtaattgcatatgaccctgatgcaattttaattttggtcgcaagtcctgggcgaacctctttataactattttttgcccgaataaaggttgtaggagttttctttgactcctttctagtcttagtagaagtagcaagatggcatgcgcaaatagcgcgggtagctagctttttataacttttttaggtatttttattttaaaataaatggatgcaaatagtcgtgtttagtcatgtcattgtaaattaagatatcataatgttttgtggcgtatctttttaaaacgtgaattcatgagaaaagggaataccttacacataaaaaatattttggggtaaaaactaaaccaatataaaggtttatacatttttagtaggaatatatttattattttttattagcaatgtacattttgtttgtgagttttttctacaatgataaattatccttatattttagtaaaatatctaggtggatagttcaatatatactaccaaaagtaataattataatttaagtttgaattcgattagaaacatcttgttagttcttagcatatccaaatcacctttttcattctttgttctccgatactgtttgctacattcccatgacgagagtcgacatgcatgaacccatattgtctcgtggttgttgcacctttccccagcatgaacattgtgccacgtagaaaaagtaaatatttttttatacaagcttcactaggataaaaaagtgaatcttttcctatttcaggttacaggagtgacggaggcatcacataacaggta

SEQ ID NO: 112878 - DNA, 1000 bp, Setaria italica
  Intron number 1 from transcript Si028294m (locus Si028294m .g) derived from phytozome v7.0 (chr-ID scaffold_8; pos 42 11667 to 4212666 reverse strand)
ctgcagccggcgaatttgggaggtgccaaaatactgtagcaacactgtagcgtttcgtttgtatttgtgaattattgtccaaacattgactaattaggcttaaaagattcgtctcgcaaagtataacaaaaccgtgcaattagtttttaatttcatctacatttagtactccatacatgtaccgcaagtttgatgtgatggggaatcttctttttgcatagtgccaaagttgggagtttggaggtaagagaacaagggcttaatcaaaggtgcacactcatcctgctgttcgtattaggtgagaatctgcaggctcttacatatatcttttgttggacccttgaagactttgactgacctggaattaagtacgggcacgtctatctcgatgcagacctagaggcattacgagtagccaggtgtcaggaagtactgctataccagaacaagtctttctttcttcattcctttatagccggcaacaggtaattagtcaacatattagccaaacacgcccagatggcaagcgtccaatatggtcatctgacatttgtttttttttcaaggaaagctgaaatttggaaattaactagggaaaaataatatagtcaagctactttcctataaaacgttgctgcgtagctggtcatagatatgaaccacaacacactctcgttgaacaactaaataagcctggcacgctccaatcatccgatggccactgcaagcagctcgttcatcctggtgcaattgttggccatctcactgtccgttctagttactggtgtcgcttctgcttcttcttcttccccaggcccaagtccaactcccaacatcaacgggagcgacactgacctcgccgcgctgctggctttcaaagctcagctctcggatcctctcggcatccttgccagaaactggacaaccaacgtgtccttctgtcgctggatcggcgtgtcatgcagtcagcttcagcagcgcgttactgcgctgtcgctga

SEQ ID NO: 112879 - DNA, 649 bp, Setaria italica
  Intron number 1 from transcript Si008726m (locus Si008726m .g) derived from phytozome v7.0 (chr-ID scaffold_4; pos 33 612913 to 33613561 reverse strand)
ctcctactgtggccaaatatttgtccaggttaaccatcttatttacttttattgcacaacattaagtaatcattgaatacctttagacacctattccaatatatagctggtgccttttttggtactcgatttttttttctcttttacatagttggtgcacgatattaaatccactacttttgctatatccattggatcttgggtttcttacacaataaacaaaaagaggtgatgtgttatgggaacacaaaaatttgattaaccttggtggtacttttacaatttgtgcacattgatggccttttctgtctccctgtttctctaatgtgtagtattgtgtcttaacacaggatttcttgactgcacaccaaaccaaatatatttttttcctgttaggagggtaaggtacatcgtaggaccttgacacctggcacccttgtcacgatacagctttgtcttattttgcttgcttcctctaagcacacatccattactatgcaactatcttctcatggccttgttactgtcatgttctctgccttttgtcctagtctaaggctataactaccacctttttagtaaattctacttactgttctggagagaatgtgcaggtttgctttgatactatccaaaactatcaaattgg

SEQ ID NO: 112880 - DNA, 676 bp, Setaria italica
  Intron number 1 from transcript Si026701m (locus Si026701m .g) derived from phytozome v7.0 (chr-ID scaffold_8; pos 34 958933 to 34959608)
gcagagaaggtgatcttgttctctctctacctctcgatttcgatctcttgacgtgagctccgcgttccacaattgtgtgtttgtgtttccatggatcttctgattgttcatcactaataacctatattctgttcttccataattgaaaggaatggtggtgagagaatatattctacaagtttccacacatatgcttgtcatgtccatgccatatttcagaaatcaaactgttcaggagcataattaacttacctgagtgtggttggtgcatttcaaaattgcttttctttccgatcaaaaaaatgtttttctttgcaagagaataaacatgttttgatgaaaattgctcttatttgtgtttcgaagtgcacaacaaaattcaatgctgatttcatggggggagaaaaacctctgctatcactaactctgctgtccctgataattcgattccattcatgtctacagttactaattaaccacaaaagagaaaaaacacatttgctgaatttaagaaagttttgcaaagcttcaagaagggtctagatgcttttaccccccttgctgtgtgctaactgcaatgcctttattgatgccctttattttacattagtgctgtaaaaaagaatagtatttaccttaattactaataataacgccactgtcaacacagatctcc

SEQ ID NO: 112881 - DNA, 1040 bp, Setaria italica
  Intron number 2 from transcript Si005847m (locus Si005847m .g) derived from phytozome v7.0 (chr-ID scaffold_4; pos 70 06605 to 7007644 reverse strand)
acgaagttaaaagaaaaagggacaagaagaaagaggtatacattagcagtttagatttttttaatgcaatggcaaagtgtaagattataagatataaagttgtttaccttttggattactctttttttgtttttagcgtactagatacgtgtttttgtcataatgttaggcttggtaaccaaattttcagacagtctaaagcagaaaggcacagctggggttctatgcccttaaatagtgaggtgcaggcatgcatagtgcccacagaagaaaacctgtcctaggaaacactagacgccacacacacacacgcacgcacgcacgatatgcatacctcagcagcctatttgctcttatgtctctctctttttttgttaactaatttttagcttacatatgaatgaacactagtcctggagagttatagtactcttgataatagtggaactgacctgcaacagcttaggtataaagctagcttcacaggttggattttgtggtaacgaaagttaggcacaccaaaattatggtaataatcactagggaagttagcctgagacacacctaacatatgtgtagttgtgtggccaagttagttatttgacaaacaggtgctaacgcttattaatcctgtacattgtgcaatatttcatatggcaatctaagttttcactatttgttacgagtactgcatttgaacttcgaaggtgggtctggtgcagcatccaggtcctgagtggcctagaaattcacttctctaggcccaccttatgtgcaagctttcagcattggctatgaatgatttgcacagatatgcaattattaatgagttttctatgaattgaatagacatgtcaggtttgttgcttctgtatattgttgtccaagtgtgttatatgaggctttactagtgctctcgcctggttgatctgtaataaaaagcatcttattaaattcactgcttatacattctcttatgctgaaaatgaattattgctttgttagagttctggtcagaagagctttgctgatagtactgc

SEQ ID NO: 112882 - DNA, 1030 bp, Setaria italica
  Intron number 3 from transcript Si030444m (locus Si030444m .g) derived from phytozome v7.0 (chr-ID scaffold_2; pos 10 616176 to 10617205 reverse strand)
agctaaagttgaaattaaaggttagaactagttatcctacgaatctcttaatttgttagtgtagttgtagtgacatgccatctgaaaaattgaaagggttcactgcaattcttagttcttagcgatcaatttttctcctttactaaggatggttctgttagtttggcctctttttcttaagattatgactagaataactaaaaagcaagcagggaaacatatttgatggaagaaagccattcggtggaactgtgacccaacttaaagccatgtttacctgtttcgaaaaaatctaaagaaaaaaagaactcatgcatatacaggaggcgattatgtacaagcatgaaaaattctaagattgaagttgactctgtttccaaggtatgaaattggcaaagagtggtgatataatgaagaagagcaaacatgtacatgctgtaattttttttttcatttgtgtttgttctctgccaatttcatgtctcaaacaaagtagagtttggccatgaattttatatgcttgtgaatcaccagctcctctcatctatgtgagtgtggtatagagagaatgaagctcaaacaatttagcaagttattaccaattcaaaatcaaaggtctagtggcattaagcaaatagcttattactaaacctccatccgtgattgccttgaaagtatggcatggtcgcagttgaatcatgtaacgattaacgagcactgtggtgcactgaaagtttgcctccacaggtcagtgcacataagataggtcgattattgatttgtttagtggggttccattttccttgttgcctgggccactagttttatgacatttgggtgctatttggcttcaggtctagtatttcactttggactttggaaccatgagaagcttagagatgaatttcacctatcaactaatgcaccataagcacagcaatgtgatattctaaatctgtcgttttcttgataatttcttgacaaatcctctgtagaaagaaggaagcaacattgtacaggaaggtccaag

SEQ ID NO: 112883 - DNA, 1066 bp, Setaria italica
  Intron number 1 from transcript Si030182m (locus Si030182m .g) derived from phytozome v7.0 (chr-ID scaffold_2; pos 37 345714 to 37346779)
gagcttgctcttgttgacccaaagagggcaaaaaggtctgttttctcaaagaacactatacttgttcttgtgacatttcatctgttatgtaagcttttttacatgctacttagtttggttgggcaggtttattttttgaaacaggattgggtagctttacttggaattgacttcattgtttgttgctaattttatagtaaatgcttgcatctgtaaatttgccattgggaggttcttagctaaatggtgcagttgctctaggtttcaggtttgcttcatagagtaggccgggtgagaggcaagataggtccgtaggtgagactgagggaaaaattacacagtgaacctaagaatctgattattaggtgcaaagacaaatagtattgaggggcaaaaatgtctgattctcagacttcttgtgaaatattttctatatatagtctttttacatacaaatcagttcagttggccaggcttactttgattgactgtattatctgttgatcatttcacatcaaatggttgcatctgaaagttttcctgaggaatatttggccaagggaaaatttactacatcctgtggtatggtgtggaactatgaatgaagataaatgatataattcttcaaggtttgcttcatagagtattagatcagggcactttaggagatactctctccgtcccaaattactattcgttttgggttttctaaatacgtagtttttgctatgcacctagatatatattatgtatagatacgtagcaaaagctatgtatctacaaaaagcaaaacgaatagtaatttgggacggagggagtagataggtaatgggcaggtgagaccatgagagtaaaaagaaataacatatgtggtgaaacaccaaaaaggtgcaagtgggatctgttccctcagtttccatatctttctattgccttctttcaggattcatcattcttcaagataaagtgaattttgcgttgtgaataagcatgcttactctgatttattgttgttatctatcatttgataggatttgggctaatagacaatctgctgcaagatcga

SEQ ID NO: 112884 - DNA, 580 bp, Setaria italica
  Intron number 1 from transcript Si027486m (locus Si027486m .g) derived from phytozome v7.0 (chr-ID scaffold_8; pos 31 558653 to 31559232)
gtccgctgcaagagatctcacccacactgtgcgtaactaacctctctttaactccttttagtgcatatttgtttttgacatagaaattgttagtgctgtccctcagcaggtaggagtcgtgcaccagcacgtggcaccgatctttgtagggtccctaattttctaaaacaattgtgttgtaatgaagaatcttgtcaatctcaattataacttcatcagccatgaaacattcctataccataccaacttcgcccctctctccataattgacatccatgtttatcatagtcttccaagctagatgtaccaacatgcaacctggcatgtttaggtcaacctcaattaactaattcatgcatttagatataatacctagacaaatgagcagtttgttgatgaaaacatactaaaatgatcgtgaaatattatatatccaaatccattcatctaatttattttcttattactgcacatgaatagcaaggaagcaataataatattctagaaattgacacttatttataatacttttgtttgatttgtagctagccgtggtcgtggcttaggtggctactactgg

SEQ ID NO: 112885 - DNA, 1032 bp, Setaria italica
  Intron number 2 from transcript Si025882m (locus Si025883m .g) derived from phytozome v7.0 (chr-ID scaffold_8; pos 29 491582 to 29492613)
cagtcaggcctgttgaaaataggtccttgatttaggtaagccatgtgcacttgagcacgctggaatcttctaacttctttcaagcatcgttgcaagttacgtccatttgccattcatggaaatgaaatgctgcagcctcctatattattttgacttgcaatgtaacattactagcacttgaaaggtcaggttttgtggagtggattgatggatgacagaaactaaatgagtccatgaactcttgaatgtttaagctgtttttagtgtgagaggtagggttggaaatgtgtgaccggttaggttgctagaaaggaaaccttgctggaatatgcacagcagtcggtttgagtcatttgttgtttatctttctgtttagctgagcaggcactaccacactagtgcttaagtaagaaataaatgtgcacactagtaaacttgaaaaataaggagtatactttacacatgcagatataactgtaaatcaaagtacaaactggtaaacttagtcaactccaggcagaagcctgagttctggaaggctaggtgctaacttcaacatgttcctactttattccagagacaatcttaaggttctggcaaggaatagtcttcaagcaggatggacctgtttgtatagcagtcagtccttattgtagatgaagttatacttgcaaaaaaaacaagaataatatccataaatggctaaagtgaaaggaaatcaaagatgcattgcatgggttttagtttagaagatataagggagcctaaaattcatggatggatgcacctaactccatctaagatggttttgtctatcggcccgctagtgcatggtatgaattttttctaggtgctttcatcatttacatatcgtttattctctttgcaatcggtgtgagatcctgttcaatagtagtttacacaatatgatgagtactcacagtagcatgtagtgctgtacatctttcaagtgcgacagatttgacttattgctgtaaactttataatttttaggtccaagttcaattgttt

SEQ ID NO: 112886 - DNA, 646 bp, Setaria italica
  Intron number 2 from transcript Si028439m (locus Si028439m .g) derived from phytozome v7.0 (chr-ID scaffold_8; pos 19 846517 to 19847162 reverse strand)
cgtgctcagagaaaggttggattgcgtaattttctggttggttattgcacacctgaagttagtattttgtttttgaggaatcactttctaacattgggataactacttgtgtctttgaggaatcactttataacattgggataactagtgtctgatgagcaggtagaagcagaagctattttacttgaatcaaataatttggctactgccatatgcaataatacataggaaaattaaatagttgcatttagctttagattcttcatcaaagaatatatttcgaaggtaagttcctaccataaatttgcagtgtttatttgaatgattatctatcttgctgaatttgaatataaatctgtacctttgtcacttgtgctgcttgagctcatgtctaactgatgcacaaaatggtggtggcatacttccataacctgtccagcataagcaacaagcagcattcatgtgctaacagggcaacactacataaccaaatttagtttaaatctaagcctgatttagttcaacataaccatatgctatcacctgtacagcagtgcatgtatttttccttgctaaatttgcaaactgacttgtcatattcttcgttacagtcagttcacctattgtcaactaaaggaagcattgg

SEQ ID NO: 112887 - DNA, 851 bp, Setaria italica
  Intron number 1 from transcript Si026192m (locus Si026192m .g) derived from phytozome v7.0 (chr-ID scaffold_8; pos 33 42874 to 3343724)
cggctcgaggcccacttcgcccggctccccaccaggtgactcgctcgctccgctcgtccccgcctctccctctctccctcccctcgcttctacacccagcccggggggtcggtttcgtttgggtgggtcgggaaggtttgccaaatggttggggaatcccacgagttcaggggggcgggaatcgcggaattcgcgtcggttcgtgcgcggattccgcctgaaatgttcgttcgtttgtggatttgtgggcactgcaatgaccgtactagccgtcaatccgccataccgtgcgtgactgaatttttgttgacctgtgtgcttcaggattcatcaagtcagtttacttcactcgattatgtcaatggaacagtacttggtccagagaccctgcttgtttagctgtgcttgttgggctttgaaagggtggtttccggattaaattaagtgcgtgtgtttgtttatttgactttggttggtgcgctctgctacttctttgtggttgtgggacgtggttctgaattgtcgacaacatttctgttattcctgctgtgtctgtagccttgttgtttgatcttagatttggactaactcagagactagaatattttcgttagaactgtgggatcaggggtcgcaagggtgtgacactgatgggtgtttcgcacttccactttcgtaaagaatattttgttctggttctgatttattacactttcttgttacctctgtagtagtcttgtagggtgtttaaaattcgattccatactgtcacatattgtttcgttgctgcctccaatgtttgctttaatgctattcttctactcttccatcgctatgtagctatcagctgg

SEQ ID NO: 112888 - DNA, 494 bp, Setaria italica
  Intron number 3 from transcript Si032841m (locus Si032841m .g) derived from phytozome v7.0 (chr-ID scaffold_2; pos 41 014796 to 41015289)
actgccgcaagaagaagtgtggccacagcaacgcggtgagagccttatcctttaatttttcttccacatgagtcatatttgggtcatcagcacatcccagtaatattaggaacggtagtatttccatggaaatctgtgtttgtcacctgttatttccatggtgcttgtctcagttttcaagggtatgcagcattgtgttccttttggatatagtaatgtatctcgtcaaacgccattggaatttcatagctaagttttgattttatgttctgcttgctcgatctttttcgttttatactatatatgctccatatccactatgccaaactatcatttcattttacaatgttttgtgcaacaatatatacttgtagatttaactatatagcagcaaacaacagaattaagttaaaatagtgaacaacttcggtctgtcctttgatctaatatatctttccaacatcacttttcagctgagggtaaagaagaagctc

SEQ ID NO: 112889 - DNA, 430 bp, Setaria italica
  Intron number 2 from transcript Si030162m (locus Si030157m .g) derived from phytozome v7.0 (chr-ID scaffold_2; pos 44 080400 to 44080829)
ggtttggggcaaacaggtgcgtgtcatgcaaacgcatttcagttccccattcgtaaattgcaagcaactgcatttcttaggcgcagatctttattagcacttggcacatttttcagtagataactgttaaggtaagcagtccattattttgttggtgcttgagaacctatagtcatttgatggtccggctttaggagaagaatttttaacctattactttgatttttttcctgattaattcgcttgaaagttaggtttgttcccaatttccaaatgtgactaaaatattgctaggaatttagtaatgacatgacacagatgcctctctggaagttaattgctagctttgctttgctttgcagtgatgtacccattcctcttcttttttttttcagtgaccattggcggaaaaatattcctgttcttgcca

SEQ ID NO: 112890 - DNA, 468 bp, Setaria italica
  Intron number 4 from transcript Si006546m (locus Si006546m .g) derived from phytozome v7.0 (chr-ID scaffold_4; pos 36 647610 to 36648077)
ctttctcgtggtttcaaggatcaggtaaactgtttgttcttttctatttagttctctaattcttagttgtgctgtattctttactaattttttttggttgtatataccttttgtaatcttaaagcatgcttgagtatctttaatgactggtttgcttggttgaagaaatgaaggtgtttgttgcattttcatagttttgttcactactgactgcatgtagtttgctattcaattacaattgcagtattatctttggatgttctaggctacaagacatgcttcagatggctaatcttgtgccaactaagttgcataaaaaattatttctttgccctgtgcttattatgatattctaactgaaactgaaacattctaaaagaatgaatgtcataatttttttttgatttatgcctcaaccaaaatcagtaattcatggtgtggtatcctgtctttgttaaatgcagattt

SEQ ID NO: 112891 - DNA, 908 bp, Setaria italica
  Intron number 1 from transcript Si029558m (locus Si029558m .g) derived from phytozome v7.0 (chr-ID scaffold_2; pos 28 497420 to 28498327)
ccttcctcgtcgccgtctccggcaccttcgcccaggttttggtccactttatcctacaccttttttttttttgccgtggaatatccgcgagttggtagggtactggtccaattctgctcagtccttgatcggatagtgcaaaaaattggaggtacggatggatcctatgggtatatgcttcggttgctcggcaaataatgcagttcttttgctagagtaggttgtggctgtgctttgctgctgctgcaaaagactgatcaggaatcctgtgcagttttcgcgttttcttagacatttagctgcgaaatttgacatgctgcaacaaatgaagtttatatcaatgtaacagaagaatacacttacacggaattttattgattgccttttagaaatataaatctgaattataatcaagcttcagttgcaatctgcaaataacggatttaatgtggctcaaacaaatacaggagtgaagtgtactagaactgccatatgcccatatgcatgcccctttaatcgcattccaaattcgtacactcgttcgagagtatctgatgtgcattaaagactcaaatacagttggatctctctgtcatgtgaaatgtaattgtttattgatcaaaatcgaatcccaaataatataatcagatattttgctacgttggtttgtatgcagtgaaattcatcttaagataaactttctgttactcaaaagagtattgagctatgtagatatagataccttgctttatcctctgagcactgtgcttgcttggaaaaactccctatacttgtttgaatggtccatgaatcctgccaccccattgatttgtcgaacaaaaaagattacaacattttttttgcatgaaaatgcgttcttgagcaggtagcagtagctagaggtttga

SEQ ID NO: 112892 - DNA, 925 bp, Setaria italica
  Intron number 2 from transcript Si006776m (locus Si006776m .g) derived from phytozome v7.0 (chr-ID scaffold_4; pos 32 00995 to 3201919 reverse strand)
cgcagttctacaagctctgggacgaactccgcaaggtgcgtggcttactgctttgtgctctagcaatttggtgattccactggaactggaacagtgcgatactgggttgcttaggcttattcaatttcacgacaatgtggcccctgaccaaatgatctgaagttgcatatatcaaaatttcctttctcaatggcatacttgtaatgatgttgtagacttgtagttaggtaattttgaagtgatttgagttttacaacatctgatctggattgatgtttgcttggatgacttactatgatcaccaaaagttgaaatagatggaacttgttttgttctctacaatatccaaacataatttaatgggaatgtctgtctttgtaactgatcacatattcacatgcatcctagatggagaactttgttatttactttgtattgttttatatactaaactagggatgtttggagtggtgtgggagacgatttttacctttgtttgccaaacaacgatgctaaaggagtgtattcaaatctgaagacagttgtttggaataaagtcgtgggagggtcttcagaatggacttttacttgtgaaaattcctaccaaaaaagaaaaccaaatccctgttatgtttcagaactgcagtttgttcactaactgatcttaaattaagcttgtatttgtatttttttgcgggttaatcaaggttgtatttgtttggatttgtcggaatatgagtagtcttttattgtatctcactgaatatctttctacttcatatctgacaagcaaacctaatttagccatctgtaattttctttatgcaagttttgtggtgccgaatgcaatttcatttttgctcatatggtgccttattattaacaaagaggctttcttctattgcttatgaaaattttttcagga

SEQ ID NO: 112893 - DNA, 651 bp, Setaria italica
  Intron number 2 from transcript Si025845m (locus Si025845m .g) derived from phytozome v7.0 (chr-ID scaffold_8; pos 34 707236 to 34707886 reverse strand)
tacgagggcccgctgctcaaccgggccatacgcaggtacggatgatgcgagaaatatcttttcttttttattgttttttccgtcgccttggcttttgactattggagaaggcaagggacggttcatgcttttctcgtggttggtcgtcggctgatcatctttgtcgagcctggttcatgatcaatagataaatcccttggaaaatcatgagatgtaaatgctgtgcttcaaaaagaaaaaaacagagatgaaaatgctaaaacttggttgcaagtttcttttcttgatggaaatagctagttagataacaagtgctgcaggagtacagctctataaggtgcctgaacttcagttttgtggtggaattgagacgacagctgagaccaattgcatgtattcttaatttagttttggccttacctggagatatttagttaaaattaatgcacgtcacataaaagtcactgtcatattgaattagtggtttgatgatttggaaaaagaaaattatgaggaaattctctactgctcttggaaacagaaaaattgtgatccgattcatgtccttggatggaaaccattgacctttttttaaattattttgttgctatgctaggtacaaagcttgttggcttccccttcttgctaagc

SEQ ID NO: 112894 - DNA, 1025 bp, Setaria italica
  Intron number 1 from transcript Si030047m (locus Si030047m .g) derived from phytozome v7.0 (chr-ID scaffold_2; pos 32 851984 to 32853008)
cgccaccggggacatcatcgtcgtgccgctgcccggtgagcttgcttgctagccttcgtcccttcgattgaaattgaaccactggcacgttttcttggatctggtttttggcattgctggtgtggaccgttgctcagcctgagatgtactatcgtgcggtcactcgcgtgcgtggtcggttggttagatcacatgcttgccgacaaatttggttggtgaaaaaattgctcacctggcagtacaaccagaaccagtgctgctagctgatcactgacctgaagcagcaagcaggtttttactcttgaaatgtgcttgatcgtgcaacatttctgcagagtagttcagtaaaagcaaaagccaggttggttgttcagtttgtatatttggacaggggcctcccggcttttacaagggcccgtccatgttttagttcggacatgaaaagggggataagaaaggggcgaagcatgcagcacgagtgctgcgccaaaagtgtgagttggtactctgttttggacgctggaattgttgtccagcgcggcagtaaacagagtgcgctccatgtgtgcgcgcgtcggctgtcttcagttgttaacagaggacggccgacagatgagcactttagctggaaaatttgtttctgcataaaggtcgcagcaacagcattgccctggacgctctgttgttcctgccatctttgcccttttcccgttttcagtgtcagctggaaaaagtaaaacactccagtatggcgttttctgatctactagccattttgaaaccctcattatccccagacattctgtaaggtcacggactaacagaataatagtagcatccacgattgatccctgagcataaccagtaggcctatgtatcatgttctcgtcatggatttcatcatcaatccacaaacccaccatcatgtgctgtgtcgtcattttgatacgttactgacaccctcttactctttcccgtctgctgtttcagcgtgcgcttcgtcattcccggcctacacgtcggac

SEQ ID NO: 112895 - DNA, 827 bp, Setaria italica
  Intron number 1 from transcript Si005775m (locus Si005775m .g) derived from phytozome v7.0 (chr-ID scaffold_4; pos 71 04155 to 7104981)
cctcctcctcgtcgccgtcgccgtcgccgacggttggtgatctgtttcccttttcgctctctccctatatctctttcttctccgggtgtcctctggttgcgtactggggagcaaaagattcagggggttgggtttgttaggattagtattttattagcgccgcaagtacgcgcttttggaggcatggtgattcgctagtgctccattcccatttctttaccgagtctaacacttaactactccttgtgatttgtgccattctcatctcatcttctcttctgccttgccaagaagcttgcagcagcctcagccctcaacctagttcaccgatgtttcaaaatgtatatcttctcccttcgcgttctgtttttgtttttacatgtgccgttttctgccctgttctgctgcttgttggagcaaactttcagaagattaagaaatggtttgggcaccaaatcttccctctttctttggctcttcagtgatgcaagtgtttttaatctgttctgtgtacgttgttgagccgttactttgatttttctgctcactatgatcctgctcccattgtgggcgaatcctggtaactttgtctttcaccattgtgctatttttgggcttttcaaatctgctgttcctcaactaagtttgctttcttgccttgaaaactagaggaaaccgtctctttctgctcatattccttttgccgaaccttctgttcagatttctaccaatctataatccgttgtatcgctgttctttgtgctaatccggctggttctacatcttccacagggtcgacgctgctggagatcaagaagtccttccgc

SEQ ID NO: 112896 - DNA, 1009 bp, Setaria italica
  Intron number 3 from transcript Si030260m (locus Si030260m .g) derived from phytozome v7.0 (chr-ID scaffold_2; pos 25 018721 to 25019729 reverse strand)
gtctgagtttcgtgaaggtaatatctttcctggtgctgttggtatcaatttttaattgctgaactcacaatgcatgctgaacgtttggaatgtactaaatctttatgcttcttgggcacatgaccataaatgtgtattttgtaaactagaatagggtcatttagtgatcttttactagtctagcttgcacatcttcattcaattgttatcatttcctttgttctggcatttggaagggctgatcaaactgggttggtatatctatatgacaattatcctgctcgttcaaaggagacactttaagggtgggatctttttgacactgctaaactattgaaagtaaactctgtattagcagtatggtggggagatatgtaattcaagcgtaccattaagtgaagtgcaaaagaatttggctacaccaaattgacatttaaaatatctgggagtaattctatattacttaaagttcactcttctgttaaatttgacctaaaggaagtagaaactcgacaaggggggatactcgtatcactcatttgggtttgttataagaaagtgccatgttttgaatctgagtcaggacaggagttttagagttaaatgctttaactggtcccccgcaagaagcttggcatgtaagaaaaagataattgttactatgcacaaaaagcctatcatctttgtgtttcttggaacttatttggagtatgaggttgaattttaaatggtatttcaacatagacgacatctagcatatttgttaggattttgtcatgttgatttggtgcccgaattgaaagtctttgcatctaattgtttgttttactacgcactatgtatctcttctagcctaaggtattggttccaattatttataatcatattccactcattcatgttgtataatcttctgcatcacacattgacatttctgattcaacatatgcttacatgctactgaatttagacaggtgtaacattggagggtgatcgctcaaagggaacc

SEQ ID NO: 112897 - DNA, 558 bp, Setaria italica
  Intron number 1 from transcript Si031041m (locus Si031041m .g) derived from phytozome v7.0 (chr-ID scaffold_2; pos 83 17986 to 8318543)
gagtttcttgttcgggaagcggaagacgcccgccggtaagaccacttcttccaatccggaaagattcgccttggaatttggtcggatcgatcggtcctaagctgctggtagctttgttttatccttgtttgtcgatggaggggtttcttgagatgcatagtcatagacaccagccaagttttgtgttggtcggccggttcaggctcggtaggatttcttggcacagttcgtaagggagtaacttatcggagaatggcaggaggttgagatttgaaaccgtgtggctcggtagtaactttttctgttaataattaatatgccggagttgaactggcagctaaactttacttcagtttagatctgttgaagccttccacctctttcaattcctgatcagattcagtgtgttttgaagttctttctagtgacattagttgcttgtacttcagttcgtatgttttgaatgaataatggtagagttacattccgtaccttatagcttagtttttttatgtttatttgttctttctttcagagctcttgagagagaacaagaga

SEQ ID NO: 112898 - DNA, 1038 bp, Setaria italica
  Intron number 1 from transcript Si006727m (locus Si006727m .g) derived from phytozome v7.0 (chr-ID scaffold_4; pos 52 36037 to 5237074 reverse strand)
acgtggctccccgcggatcgccagggcctgcaacggttagtcgctggtgtcacggcttttgctacttcgtttccgctcctgcttggtcgagatctagctgtagttgttgagtgtgaacagttgatgccgttttttactgctagtttgctgctgttagcaatgtggtgagattggtttgcaaacttgaaattgcttataagagttgatttggttgtccccacttacctagatgtaactgtgatccactcagatattcagctgctgccaattagctctcagatcatcaaaaaggaaaaggctgatgatctttatatatcagaacacctgataaattatttgtcaatctagagattactatgtggcagtagaatggtctatttgctctttaactgccttcctgaaatatcttcttcttggtgtttcacgtgctagttcatctccgttgttttctgacggaatccaatggtattgcaaagtatgcattgtttttgtggtacattcaaatagcggctacacaggtgttaggcaccactctcccaccttgcgcttaattgctactaactcacctagactgtttcttggtgatgatcaggaactaggctctgcctccgctctcctggtgcttagtgctttttgggaatttggactgtgctgttcttctacatgaattggttcaccctttttagttgtactttttctcactgccaatggcagttcattagtttgaatcttgggacatagttatgtctggtctttccaacgcaagttgtggaaaatataatgatttcactaacaaatgttgcctagcacgataaatcagccccacactagctttaagatatatgatcaatgaggatttttttttctaatttcactttgctgtctaagtttcccgaccattgttggcaattattactttccatgttttttaattattgtttttccctttggcgaaaatgctttctatcccttacaatgtgggtttttgttctctgcattgcagattggaggaagctactggtctggcattccggttcg

SEQ ID NO: 112899 - DNA, 646 bp, Setaria italica
  Intron number 2 from transcript Si007041m (locus Si006949m .g) derived from phytozome v7.0 (chr-ID scaffold_4; pos 57 43755 to 5744400 reverse strand)
cgctttgaggtgttctgatgtttcccttgctcctacccaattttttcactgaattggtcagagagttatctctgtttatgctaatccagatagggaggttgtattaagctagttcagcttacatactactctgacaagattaagttaaaagggtgcttattgatcatcacctgctttgaacttgtttttattgaataatggtagattgagagaatacaaagtcaaccaattgtcctgtccgcctgtgaacaagtgtgccaagttcagacaagtgtagcctgcattgctgttgctgccctgcaattccaagtcgtttgattgcccatagtgttactagcacctggatttgtggtgtacctgtcatttggtcctacaatgtacccaatttgtaacactgtgctaccacttctgttttcttctgaagaatgatagaagatgcacatctgtgctgacacttccttctgttttcttctgaacaatgacagaagatgcacatctgtgctgacacttccttctgttttcttctgaacaatcacacaagatgcacatctgttctgtgctgacacttccttctgttgtcttctaaagaatgacagaaaatgcacatctgtgctgactgctgacacctcctgttttcttctgaaga

SEQ ID NO: 112900 - DNA, 577 bp, Setaria italica
  Intron number 3 from transcript Si007076m (locus Si006886m .g) derived from phytozome v7.0 (chr-ID scaffold_4; pos 16 86189 to 1686765)
ttctacaccgccgtcaaccggaggatctctctcgggtgagtgcgccgatccgtgtgcattggcacatgatccttctttcgctggggccgtgcgctcaggttgggggaatgagattttacgccatgatatgatgcgatactattactatatgccagtgttaaagtttgttgctgctccatttccggtggctgttatgcttgttggttttgttgcagtgcatttttggctgtggcagtttacttgaaaatgccagtgcctatgttagtgtgcaggcagtgcttttgattacattaagtaaccatagtccatagacatggcgggctaacctttcaagtctcatgttgagcaatgaatattcaatctgttaagatgagatatcccatctgttaaggaccagagaaattcttcccatcttactgttttagtaagaagccacagtccataggtttgttagcgcttgaggtagctgaagaagaacagaatgactgacgttgtttgttggacacagttgacacttgagtatgctaatttacctttgataggttgtcaaacaagaaggctaccagagctcgtattt

SEQ ID NO: 112901 - DNA, 844 bp, Setaria italica
  Intron number 2 from transcript Si026131m (locus Si026131m .g) derived from phytozome v7.0 (chr-ID scaffold_8; pos 82 80282 to 8281125 reverse strand)
gggcaaagactattaagggagcaaagggagtgaaggtatgtttttttattccagaacttgtaatactctatcagtttgtatttttgtataattctttcaatagccttgatattattcttaacaatgcgactttgctcccttgtttctccagcgtctcatagcctcataagaatcattagttttagtttgggatctcaagatattaccatacttatgaagggtaaattgtgtatatcgggcagttgactaattatattaacatgtttactatttaaatatgacgcctactttcttacccagtcatgtcaaaaccctactcccacccatcacactccagtgttacagggacacaggtgcgagtattggtgtcactagcagtggaagaaaaagaatagtccggcttaggagtttgtctacagattggagatagagttagtttggagagtgttttggttatggcttgttgatcaagctagcaaattgttaggaaggttgttaagccaggttagagatttgagattggttgtcagcttgaatgtatgtaacaggagtgacattatatatgaagggtaggtcaatctctgatatcaagcataatttagagtgcccttggatggtgaacccatttatcttgccgttctttttttccttcttccacccaaatccaacacccatattaatatacctgtgctaggaaacattgaagctatattgtcttgaactaaaaggtatccaacaaataaaagaagtatagtgcatgctaaactttccatttctgaactttgcttagatgagtggtttgatttgctgcattttcacatttttttttatcatttaggtatct

SEQ ID NO: 112902 - DNA, 938 bp, Setaria italica
  Intron number 2 from transcript Si006615m (locus Si006615m .g) derived from phytozome v7.0 (chr-ID scaffold_4; pos 36 746741 to 36747678)
cgaggcggagaggcccgacctcatcgccttcaccggtgcggctcccctctcttctcctcctcctccttagagctacctgccgctggtgcgtggctttgctccaaccttggctgagctagcctcgccgtgctcagctcacctcgccaggctgcacagtaggattgccaattctgggtgggtaaactcgatttgggcagcgctggccgtcgccgggctcgattgtgcttggaggagctcgatttggtggttgtcgagctcatctgtgcacaggaggggaactcgatttggttgtcctcgagctttgccagcaggatctgttccgctcccgcccaagctaatgcaggcatggccatatatattagtagcagactagcagtatacagcaatacgctccaaaatgtagctcggtggcatttgttcgtctggttttggaatagtcgtccctaggtgcattcagtatgacggctggaggttttagttatgcagtgcaagttgtttgttgcatacttgcatgtaaagatgtaactctcaatacaatctcttgcaatttattggttttctgtgtgatgcaatggagatttatttagaaatcaatgtggggtcatgcttaagggttttcaaaaccaaaattttttgctgtgctcgggaattttacaccaaaatcacagcccataaactattgatttacatactgagaaaattgtcggtatagctctatcaaccaagcatgactactatcttgggtcgctccctgcaaactctggcaacatcttattctggcaaagaagttcacgacttacctctttgagttcctacactagtatttgctttccatcttcttcctttatgagcaaaagggagccactctagtttacacctaactcttccattgtttcaatttggaacaggggacaacatatttgggggcagtgcaactg

SEQ ID NO: 112903 - DNA, 550 bp, Setaria italica
  Intron number 2 from transcript Si006215m (locus Si006215m .g) derived from phytozome v7.0 (chr-ID scaffold_4; pos 36 310484 to 36311033 reverse strand)
actacgctgtcgtcaaagatgtaagtcagaaactcagaatgaatatgagacattctgttcaatcagtcaactttatgagagaactttatgatttctgacaatatattggtgttgcttagtaatttttgcatctgaatagattctcaggggaacatgaattttaacttgtttctgcttgaataaaaaacttttggtatccaagatgtgacatgaaacctttttctggttttgtcttttatctgtcttggcctaccagaaataggataatagattgcattggttttaacacattctgtaggatatgtatcttgctcccagccccacaatttttatggtctaggaacacttatcttttcatttaacaacattatcaactctgtagtgttgctccttgtatgaaatttctgcagatttttcatctgccagaaaatatattgctttagaataatctccctgtcagaagattcaaaaacagaacagaatgtctgatggtatccattcctcttattctacagtgttaaccgctgcaagcgggcactggcagagattg

SEQ ID NO: 112904 - DNA, 585 bp, Setaria italica
  Intron number 1 from transcript Si028927m (locus Si028927m .g) derived from phytozome v7.0 (chr-ID scaffold_2; pos 31 337367 to 31337951)
acaaatttcttttgaaaacggtaagattctttccaccaccaaaaactattcatttcagaatatcagaatgtcaatatatcagtattacttcactgttatcacgtaaacggttgtcaagtggtagacactagacagatagtaaatgaggagtagatagtacgcttttctaattactgcatgataaggatgaaaatgtaataactgaaaaggtagagatatttgaccatacgtaattctcttcccttatggtcaatgcccctggtgtctctcaagaaccaagctggtaagttcaattgttaaactatcttaatctacataatattatgcatctgtttttttcattctttgctcttttgttttgttttttgggtttattctgtactttttatctttttttcctatcttaatataatgatatgcagtcatcctttgtgtttgagaaaaaaattatgaacaagataaatgcccacagaacccaaactgcaagtttcagttgcagctcctgttgttttgactacaagagcgtggttgctactttgtttggagaagaataatctgatagaaatgatgtaggtggaatgcagg

SEQ ID NO: 112905 - DNA, 759 bp, Setaria italica
  Intron number 3 from transcript Si031042m (locus Si031042m .g) derived from phytozome v7.0 (chr-ID scaffold_2; pos 22 706598 to 22707356 reverse strand)
cccaggcttcgattacctcaccggtggaaaccaaggtgagtctgaattgtatgaatgtatggttgttcagatagttggtttctatcgaagatgcccaacgcctttattgatacaaagcagtttattcggtggaattagagttgcttgactgcttctcactgtagatgcagggaaagtggcaaaatgatatttcaaacttgtatgttgatttttcttgtgtgattgtaggtgaacatcaatcagaatgaatttttagtgtctgcagttctgtacatactgttggcgtatactttacattacttatcaaacttatttatgaatggtactattattaaaatctaagcatgttcattcaggtttgttgatatttcttctttcttgtaataaaagtctcctagttttatctttctggggtggttaatacacatcagtggctaaatgttttaatagatttgaggttgttatagttagaagtatcaataggtagtcaaatcagctcagtaatgatgcattcttagcacatagatcaaaggtttcagtttcatcaaataagtgaatccatgcgtgagataaagctggtttagtttgtatggcgtcgaatcatgcaggtgaaacttaacaaacttgactgctgggttattactgaactttgttagctgtcaagagtatagttatgctttttttttccctcattaatcctaaaaggctcaaaaaactgaagcaggagcccaacaagaaagtatatttcacaagacagac

SEQ ID NO: 112906 - DNA, 707 bp, Setaria italica
  Intron number 2 from transcript Si008182m (locus Si008182m .g) derived from phytozome v7.0 (chr-ID scaffold_4; pos 36 599142 to 36599848 reverse strand)
aatcaagtgccaaaaccatcatcattggttggaacgtaagtaatattactatatatatcagcatatactccctccgtcccaaaaagaatacaacttttgcttcccaagaagtcaaccaattttatatttgaacaaatttatacgaaatagtactgatatttatggtacaaaataaatattaataaattaatcatataacatatttcataccaaatctattttgagacgtgtgctagtacttttttttttataaatttggtcaaacttgaaactgtttgactcttttcgagaagcgagagttgcatttttttaggacggagggaatactatctatgatgcatccataaatataagatatttaggaaaagcaaattagtccaaacataatataatgggtaacaaattagattgtccgaaacatcatatatttaagaatggaggagtatatacctaatataatgcatgaattggcgtattatacaaaaataaattacatttttatgctccctttatgtttctttgacaggttctgccagccgagtatggtgattcgcgcgcacatttcttcactgcctggagtcctggacagtaagtgctttgtaatttcagtgtctgctagtggcagcagcacctcccattttgcagttgcagggcgatatcaggagcatgtgtattggtcttgccgaatcatcttgcttgcttgcagg

SEQ ID NO: 112907 - DNA, 819 bp, Setaria italica
  Intron number 2 from transcript Si006041m (locus Si006039m .g) derived from phytozome v7.0 (chr-ID scaffold_4; pos 20 762789 to 20763607)
cggtgccactagagtggtttataatcgtctttgtaatgttactaacctcttatatgatttttcgtaagaattacttctttattagtgttgctctttgaaacatttcactttcagtgtttctatgttgaagcttgattcacattgtcctttgattacatattcaaagctttcagcctgttacactgtgtagctttaagtcaattatgtacattgcactgtgttcatctggagatgatacaagtggaatagttggcgagttgtagctccaaagctttggaattaaaacttgtgctcatgtcagttgtggacttgtggtttactgtcttccgctaacaatgatattgctaatgaaatttactaatgctaaatatgttagtgcagtaaaaattctctatttaatcactttaataattcttatcatagactttagctgaaagacattagttagtgttaccaatttcgcttatatttggagactatgtaaaagatccaaattcttagattaagcaagcaagtgttatagagaaaaaaaatgcaaacagtaatgtgccataagtctttcctgaaattgcaaacagtaatgtgccatttacaaaaaaaatgcaaacagtaatgtgccataacagtaatgaaaaaactctgcttactgaactttacaaaattgagaaacaagttaaacatcttcgccaagcatacgtctgcaaagttggcatggagtttcagtgttgaagttatccattgctctactcaatcaccacttacagtttctgatcctatttattatcacttcgagaactgtagaccctatttcacttgtgc

SEQ ID NO: 112908 - DNA, 524 bp, Setaria italica
  Intron number 2 from transcript Si031647m (locus Si031645m .g) derived from phytozome v7.0 (chr-ID scaffold_2; pos 15 533815 to 15534338)
caaatctgaggggcagcagttcgatcccagccggagtaagccggagctcccgtctcaactggcttcaattcgtttctgtagattcttctgtatttctagttcgtgctgtaggtttgtttctgctttgtccgtaggaaatcaatcacaacctctctcgccatggtaatggaatattgaattattactagcttgcttttatgttggttatttgcagacatatttattccctgaattattggccttacaaaaattgtttttggttgtggggtcatgttcaaaaaaaattcaaatgttttttgctagattactttatggtactataaagtgtaaggacagtatctctagaatgtggttaaactgaatgttcagttgtattctttggcattatctcaaaaaagatgatccaccaaatctttgagtttttcaaatgagttgcatacttcattaatcttgggggtggtctgacacctaatttcttgatgttttaagtgattgggataatcaaaaggaaggccttgattaaa

SEQ ID NO: 112909 - DNA, 792 bp, Setaria italica
  Intron number 3 from transcript Si031647m (locus Si031645m .g) derived from phytozome v7.0 (chr-ID scaffold_2; pos 15 534382 to 15535173)
aagaactcttgcagcttcagagaaagtgggaggaggtcagtatccatcttccaaaatctcacctgtggagctccctctgttcctccgtattgcatagcactgtaattcagggtccctttcttgtttatttgcaaaaaatatttgttaattcccttgggagtttagttattttgaattcaaattatggttgactaaactgattgaagtcaagtcattgagttgtgaaatgaacattcatattgttcttcagagacagtagcacataggcctggacttttgaatagcaagaagaattccctaatgtgattgaattgcagcaatcagtggtgcatctatatcattgtgcaatgtgtcaaaagaatatgtgctggacccttctttacttttaaggaatccattttatcaactcatacttgttagctagtttttcaatttctaacttttttttgagctttgggatcatgtgttgaattgtatgagttgttgagaaatatgctaattctagcattgtggaactatatgtatgctttacagcagtgaaaagtgtcccagactctttactattacatcaacacatactttaagttagtttttcaatttatagtttttttgagcttcgggatcatgacttctcttgttcctgtttttgagaaagatgataattctagcaccctagaattatatatattgctttacagtagtgaaattttgcttttgccaggtagtcctgcagcacctttttttttgtgtgcaacgagtctcaaaatgttaatattgattcacaggaacagt

SEQ ID NO: 112910 - DNA, 748 bp, Setaria italica
  Intron number 1 from transcript Si031664m (locus Si031664m .g) derived from phytozome v7.0 (chr-ID scaffold_2; pos 43 827852 to 43828599 reverse strand)
cgacttcgacagcaaccacaccagcaacctaagaggtacgtatgcggcgagcacagatccacacgacaaatagggctagcgggctagctgtatttttaaaccaaagcatttgcttcaactttgcagtcgtcataagcgtaaaacagcaaatcagttagggttgctcggatagatcgattccttctctctcatcgattgcttcatcaatcagctaaacccgatggcatatcattgcaattgtacagtgaatattaagttctcaattttctgtagtattttcttcgtaatagctcgccccaaccgtatcccgtagtcagcaattcggtacggtagtcactgcaatgttattggctttctgctaagtacttcaaaagtataactgatggttctagcttgtgcttagtaattttcatcaggcacaagtacatttttactgatatttgactaattatctagagccatgttcatatcctgcactatcccaatactgagaaaagcatgtcaaatcaaataagctaaacatgactgttcacacgcatatctggtagcaatcacatattgcatccaaatatattgctagaatagatgatccagtccatccatttcattagctgtttggtccggtgctaataacacagttcattttccaaaattaaactatctgccatgaaacagggccaactcatgaattctgtttctccttttgtttacaggttgagtaggtgggttctgattctgggattcttgg

SEQ ID NO: 112911 - DNA, 718 bp, Setaria italica
  Intron number 3 from transcript Si026876m (locus Si026876m .g) derived from phytozome v7.0 (chr-ID scaffold_8; pos 16 72756 to 1673473)
tcgtccgagaacattccttcaaggatcaataggtgagaattcttatgaattatttcagattatctcctgatttttgaagaacaaatcaaactcaaatgtgaagatatactaatcagtggctgagtagaactgtagaagtaaatcaagaaaccaaaattgccgtttaacaaaaatattagaaaattacttcatgattagagaacttttagagagttaaagttccttttcttctgtatggaggcatagaaatgaatatgtttagcaccaaactggatatggaaatctctccgaatccttagtgatttggcgtcacatgtgttgtataatagaggaaccgccccacacatgacacagctcacaccgtcctactataatctggacatatctggtgtaaaataacaaaaaaagatagggaatgatacgcatactgatcttgtagatcttccatattgccgcatccatgaaacaggtttattgatgcagacagctcactagcaccactcgtctttatctgggtttattctatttctagttgcacgagacacaagtggaggaaaaatatattcagagggcattaaagtcaaactcaagaaagaatcgaaagatatgatatccgtaaacaaacgtacagatagaaacaaaaaaaagtaaaaaaaacttaagtgcatattgatctaggtaaaatcactgacccaattttcatgatattttgaatcag

SEQ ID NO: 112912 - DNA, 965 bp, Setaria italica
  Intron number 1 from transcript Si007423m (locus Si007423m .g) derived from phytozome v7.0 (chr-ID scaffold_4; pos 31 505393 to 31506357)
tcaaggccaagatccaggtccgccgccgccttctaccccccttccacttaattattccgacgagtccgttcgtgccctcccgattcgtcgcgtaattgagtcctagttgcgcatgattggtatggatttaggaggagtgctagttgccgcgccgatttggtaagggggggggggggggggggtggttagtgcggttcttgcctgctgagggtcaaaaggatcttggaatagttagtgttgatcgtgatgcggaggagttctctagaacggtacaaattccctttgcgtgttgctcgtagcctctcgtgatatatttgttgttgtgtacagctaaatttaggaaatttgtaccgtctaatctttcacggaccctatgtttttatgtgatttattgcagatataaatgtagagcaagtttatgttgtccaattcatgaacccatgactttatgagcctacctgttacctgtagcctgcaatcctagggtcgaatgtgacattgtttctttgtgatggttgctctgctctatcgattttaaacacgaaccatgtctgtaattgagggcagtgttactccatgtctcagatgcctgtattttagggggaatatgctgaatgcgtcgcttcagtatgagttggattttaggatccaagaaatatttcctgcgccaaaaagaaaatactgagcgagacataatatgagtcccttctcttagttttactgagtctgataactggatgactggatctgatcgtattccaacacccaagctcatgtttgagttatttattctgtgcccaagcaaaatgccaagccaggtgcctgaacccaaatcagattccaattctatgtaacacagtaacactgattggaagactagtaccattttaactttacagggtttctgacttgctgctttatatatttcaggacaaggagggcattcccccagaccagcaaaggct

SEQ ID NO: 112913 - DNA, 525 bp, Setaria italica
  Intron number 3 from transcript Si032671m (locus Si032671m .g) derived from phytozome v7.0 (chr-ID scaffold_2; pos 32 101835 to 32102359)
taagaaagattgtggtggaattaggttatcgtgtacgtgcatctaattaatccattttcatttcgggccatatgctctataatgtttcttagaccaatatcaaataagttagtaacaccatacgattatgcaaatctgaagactgttcatcaattaagggcttgacttttacttctagaagagataatactgtgcaactgcgtgcatcattcttgaagcatatgcgattaaaaaaataaaaatgttaaactgacaatgtacctcttgtatacgtgctcctactgtataggcttagatcctagtttgtgaccgagcactagtttgttagccgtcggtgcttcttgtacatgtatttaaccatctccgctcatgaatgaaagtgtgttggatcaaactcttctctttcgcattctctagttctacaaaaaaaattaaattgtccattcacaaatccaaactccatgatagaggtggagtcatggagtgcctcttgtcataaattgtgtttttattcttattttcagg

SEQ ID NO: 112914 - DNA, 832 bp, Setaria italica
  Intron number 3 from transcript Si033086m (locus Si033086m .g) derived from phytozome v7.0 (chr-ID scaffold_2; pos 34 757559 to 34758390 reverse strand)
gcacgtgagaagaggcctcaatacctccacaacttcaaagctggggcaatgaatgctctggtccactcactaaccttgccttgcatcgttatcagctaattttaacagatttacctttaaacttccgactttacatgatagtatgcacccattttcttctatgtactggcaagaacccactagttgaatcaaattctgctttcataatcatgaaatttctgacatgctatcgttttgtttagaaaagaatgggatgcaattgacaaaaggcatgaattttgcttaattaggtacaccttcaccgcttgtctacaccgtacatagtgcatgggtctatgtgacataaaattaaaattttgaaatttgaataaagataaagtgtaccacgtttgggaacattaccaatgcaaacatgagcaatgtagaataatacttgcatcagcagtatgtcatagaattctccaagtgcttgaaagtttaacaaattttagaacctccactattcagtcctttgtagaactctatagttcaaatctgttggttttacttagatgcaagtaacatattcataactgggagatatcactagggagtggtagggggtctgacaattaacataaaaaactcgcattagaaccatgatggctaaaaataaatataatgtattgtatactccatgaaagactacaatgccttttaacaatgaaaatttcaaaaatatatcattgtttattgaaattcagataagggtttcatcagcgataagcaacagccctatagtcatgaatgtggattgtgatatggtattccaacaactgtgattcaatcagag

SEQ ID NO: 112915 - DNA, 550 bp, Setaria italica
  Intron number 1 from transcript Si029656m (locus Si029656m .g) derived from phytozome v7.0 (chr-ID scaffold_2; pos 48 005779 to 48006328)
tcgagtggacgagattgcgtgagtcaggattcgaggtgagtctctaggagctcaagcatactgaattccccggtgtgctctgtgctgtcccatagatacaagtaggtagccattattgattcatggagtatattgagaaaacaaacacatggcttgttcattcgagtagtaaattggctcgtgcacattaaggttttatgaactgtgttctgtgaaatatacttgtggaagtagctcatctaaataactattgtgcatttattagttagggtgaataccaccaaagatccagggtattgtaacttccttttgagccttaaatttcagtagacactatgatctgtctgtataaactcaattttaaaagtaatcttcctttggtagtttctactgtgtcaaacatataaattagcatattggccaattacccttcattggttgtgacttctataattagcttttcatatgtagtaacgtcattgacatgcaagaatttttgtacttgtttattgcaggatctgtccgaactatttacacctctaaccgacaa

SEQ ID NO: 112916 - DNA, 792 bp, Setaria italica
  Intron number 1 from transcript Si029978m (locus Si029978m .g) derived from phytozome v7.0 (chr-ID scaffold_2; pos 65 55329 to 6556120)
agcggctcaacaagccggccgtcaagagcatcgaggtgggtggcgcctactcgtccgtggagcttgaaatgatgctctttcttttgagttctcattgagctatgtgctgatgagttctgaagaaatggttgcaaaatgggagttcgaattcaaaatggggtctatttgcagccagatgctttggttgggagatgtgttcttggggctaatgttttcttttcccctgtgttttcttggtttgctactttatctgcattttgtaggattcgaggcagtttcagtgagaagttgcattgcgtcctcattattcaataatgaaaaaggctgccttttatctgattcttttggttttgggctatcctcgctggtaaattttcgctttcactttggagaattgttttaaaaaagttctcgccttttagaggtaggcaatgcaaattcaagcggactagagcagaaaaagatgaatggttattgcggacaggctggctcttgcaaagtcatattctctgattgaaaaggggcaaagccttgaatttctgaacattttgcttcctgcttgagtttcagagtttctgagctcaaagaatttgcagagttctacaatgccagcttaatgttgcatatttgatattttcttctttattttctccttaaaagttgcaatcctgaagcttcattttgaatgaagtagacattttgaaaaaccaaagttgacatgagcattgcttttggctagagcagtgccttttccatctgacactgatagaagttttattcctcagagcccag

SEQ ID NO: 112917 - DNA, 995 bp, Setaria italica
  Intron number 1 from transcript Si026399m (locus Si026400m .g) derived from phytozome v7.0 (chr-ID scaffold_8; pos 30 436953 to 30437947 reverse strand)
caggcctgttgaaaataggtctgtgattcaggtaaggcttgtgcacttgagcgcactggaatcttctaacttcttccaagaattgttacaagttacgtccatttctcattcatggaaatgaaatcctgcagcctcctatattcttttgacttgcaatgtaacattactagcacttgaaaggtcaggttttctggagtagatttatggatgaaagaagctaaatgagtcgaccaactcttgaaaattttaagctgtttttagtatgagaggagggttgaaaatatatgagcatggaaatatgtgaccagttaggttgctagaaaggaaacattgctagaatatgcaaatcagtcagtttgagtcatttgatgtttatctttctatttagctgagcaggaactagcgcttaagtcagaaataaatgtgcacacaagagtcaattacactgaaaaaataaggagtatactttccacatacagatataatggcaagtcaaagcaaaaacatgtaaactcagtcaactacaagcagaagcctgagttccggaaggctaggtgctatctactagtaggcaggatagacctatttgcatagcaatcagtccttattgtagatgaagttataaatgcacaaaaaacaagaataatatccacaaatggctagagtgaaaggaaatcaaagatccattacatggattttagtctggaatatagtgcataagggagtctaaaactcatggatggatgcacctaagtccacccaagatggttttgtctatctgcccgctagtgcatggtgtgaatttttcctaggtgctttcatcatttacatatcctttattctctttgcaatcagtgtgagattatgtcaagtcgtagtttacagaatataatgagtactcataggagcatgtggtgttgtacgtctttcaagtgcgtacggatttgacatactgctgtaaactttataactttcaggttcaagttcaatcgttt

SEQ ID NO: 112918 - DNA, 837 bp, Setaria italica
  Intron number 3 from transcript Si007314m (locus Si007314m .g) derived from phytozome v7.0 (chr-ID scaffold_4; pos 13 610791 to 13611627 reverse strand)
aggtaaaaaatataagaaaaactgacaaggatatggagctatatgttattaagcttgtgtgggatatatattcagctatgtgtattaagtattattaagcttgtgtgggatgactgcaaaatacactcttgaggggtgttggggactgttacttttggtcaatttgatttataatctataattctacaatgaattgaagaggagcaaacgggcagtatagacaactgaggcgaacaaataaagacaatacaacctagtgtggggagggtgcatattttgagtaatgtaaagttgcaggcatattcagctggataaaggacattagatcatattatcataccaaaagtgaggtgtgatgttacagacatatggagaaggaaaatgcagtagccttgtttttccatattagcttgaaattaattatcattagacattttaattggtaatctggtatgtcaaggtgtcaacataataatttagtagcagcaagctggttatgcttctggtacctttttctccttttttcagtttttatgtggtcatgtttgatatatctgataaatgctattcttagtgtcatcttcattgttacaactttctggattatatttacagaactttgtaaagtgctctgtgtaactcattcagtctgcaaaatgtgttggatcccattatataagattctaactttcttcttctgttaacatcagttttcgatctccttgattgcctcgcatgaatagacttttcgtttatgttttttcattgtgcagaatcatttgatatttctaaccatatatttgtttgtagatccaaaatctagtgggttctacacca

SEQ ID NO: 112919 - DNA, 396 bp, Setaria italica
  Intron number 1 from transcript Si026939m (locus Si026939m .g) derived from phytozome v7.0 (chr-ID scaffold_8; pos 21 632534 to 21632929 reverse strand)
ctccagttccaagtaagttcatgctcttcttgcacatgtatagaactgtggatcgtgaatcctgcatcataccttcttaattcttactcccgtaatagaaacataacgttaggacaagatgattactgcaaaattgaactaaccatcttgtcctaacatcatcacgttttcatgactggagggagtacatggttgaaaaaaaaaagatcatatctctttatggacaaagctttgatctgtaaaattttgtaacgctggatggttgttgacaatacaaagtgaagaatgttgattacatcagtagtagttaatacagctatgtatctttctatttaaattggtttatattggcttcacccatttacttcttgacaggtgaggaagtggcaattggtg

SEQ ID NO: 112920 - DNA, 987 bp, Setaria italica
  Intron number 2 from transcript Si007107m (locus Si007107m .g) derived from phytozome v7.0 (chr-ID scaffold_4; pos 39 636468 to 39637454 reverse strand)
ttgaaaagaagtgaaggtaactcactagcctccataaatcacctgcagctggttaatactatttcccatgctagctttccgttatcttttgtacttagttcagtaattgttccaagtgccaaaactactcaaataattaaacaagcacacatattatattttaccgtttccttttttccttgcacatgtttatggtgggggtgttgggagggattattgtgttccctgttttcttttggttgacaaatagcagtttgactgttaaaaggcgattaccagtgcatattttgttgatccatacataggattagctatcataaatggggtatagtaggttagacatttttttttcaatgcagttttttgatagtttcatatttggtgaattgcgtgataccaaacagcattgaacaaccaaagaattatatatagatctgtgcttgttggtgcttataaatttagtatctgtgtttgctcgtttcaaatgtttcatcttgctagatatgcttcctgctacaattctaataccctcgttgtagacatcccacctgccacctgtgaaccatgttatgtgcgaattgtgttgccaggacattgtagtgaaatttgctggtataatttgtcattgaatgtagttccatttgggtccattgctttctgtggtaggtccatttgattcttcagttgcagggctgtagtgaaattgtaggtataatttgattcgtctctcaccatggaacttgttcatttaaaaccaagagactgtaacttattcttcaaacagtcctttatttgtattgtatcctatcttgataagtttatatgtacattagcactcgatagttcttttttactaatttgcagcaaataagcctgctacatagtggcattttattctttgctaccattcctgctgctaggactttttcatgttgcacaaactcgagtaacacatgtcctattgatctttctcaggactcctgggtc

SEQ ID NO: 112921 - DNA, 608 bp, Setaria italica
  Intron number 1 from transcript Si028647m (locus Si028647m .g) derived from phytozome v7.0 (chr-ID scaffold_2; pos 11 505060 to 11505667)
tacgaagaggtacaaaaattattagtttatagctacgagagcttttccagtgcaaacacatacattaagttaacatatatgcctgtttggttttgtagtggtattttactgtacttatgatagttagatttgatcaactgtgactattgtttgattggctatctcacttattgcaagctacactgcataatcaccgagacccatcattatgattttgggaaaaaatgtatttcttttcaaaatttctcctaatagcatttcctctcgtgcctcctgctcttggcgtcaggaaaccaattcgttgtctcaccacccaaaaaaccaggctttcatttgaaagagcctaatttaattaattatttttcacaagtttctcgtcttcgtgtcaggaaacccatagaatcaatgccttcatttgaaagagcataatttaattaaatattttttcacaaatttgaaaatatagcttttagaaaataaaatcgtccccctctaaccagccaatgaaaccttcttttgaaagaaaattcaaaataactaaagttctaaatgctatccattttttccttcttgaatttctcgaaaaactggtactgaaaacaaaaaga

SEQ ID NO: 112922 - DNA, 845 bp, Setaria italica
  Intron number 2 from transcript Si026189m (locus Si026189m .g) derived from phytozome v7.0 (chr-ID scaffold_8; pos 28 040241 to 28041085 reverse strand)
agctgcttcattctgaatccaggagttattctcaggtttgccctgactaatttctgctagagatccgtactcctatcagttttcctggtattttgacatgcttatcacattagtctggcataacagctatggaactgcaaaatcagttttgacatttaccacagcaatagtaaaacttctagattaatgcatagaaccatagaaatatacattaaagaacttaagggagcatttggatcttaggcaaggggaatcctagccttgccaagaaaggattggagtttggtagggcaggaaaagcttgattttgaggtcaatctaacccacaatcaccagcaaaagcttgctacctgaggagagccaggtcggctcaccatcgagagcaaatgagcgctatggtcagaaaactgatggcaaccgctattcataatacagacaaacaataatacttgcttttgccggctgtagcttagatggctagctgggcacaagccttggtagtcaagctgagtggtaaaaagagacattaccttcttcccgcagagaagaattatttgaaattttgaatcctttggctataaacacatgcaatggaacacaaggaattagatttcttgtaagtatgatacatgaaaggacatacattgatacagataaataaaccttaagcactgctcttatatttacaggaacgccaagagataatgaaaagaaaagaaagctaattcctcatcaaagaattacacagcgggtcatcacttcggcaacaacttgagttattaatctgtggtttctattctggctgtctaggttgacctaaacagggctggcgtacctttgcttga

SEQ ID NO: 112923 - DNA, 851 bp, Setaria italica
  Intron number 2 from transcript Si033419m (locus Si033419m .g) derived from phytozome v7.0 (chr-ID scaffold_2; pos 39 018250 to 39019100)
accaaagggacctcaaatcgcttaccatcagctgtgtagacaatacagtggcctttgtttgctatggttgatgcacagtatagcttgccatctttggttgcaccgatcgtcatcagcctcctcctcccaagtgctgccatatgttgccacctctttgccagttgaactagcctcttcggatgtatcatgtcgtaattctacgagataagcttttggtccactgtgctgttgcttcagttttttatgggttgtgaggatgatatgcgctagttttatgtacttataggatagcgagggagcactagagccataaggtatgtccaatgggtgtaggcatcagtctgactagttggcaagagacaaagccatgaactttatcttcctagatgttgctatcttgctctgtatgattgagtttgatgcttatttttcttcttagcctattggtatactttgggtccactctatcaatcttttcctcagtccagtctatttatcatttatgtcagcctcatccttccattattgtacacagttttgtgctgcttggttctacacttgtatctggtttgattggcactaatattgcagatggacaataaattttttttatcaagaactatttgagatttacgatatggataagtgaattcgtgaatagttcttttcttaaggtttggtaaaaaaggtataatgattaatatccaagctaaaaggtccaaaatttacacttttcatttcccatgctatttctactgcttcaactgatgtaagaacattcttcattattttctttgggtaaatattgatgtacagatttaggaacacaacttttctgtttgtttggccta

SEQ ID NO: 112924 - DNA, 801 bp, Setaria italica
  Intron number 1 from transcript Si029023m (locus Si029023m .g) derived from phytozome v7.0 (chr-ID scaffold_2; pos 17 99766 to 1800566 reverse strand)
gcctcggcgtccagctgcacggccacgccgacgacgtaagccgccgcttcctatcccctgcgccccgccccatcccctgctgctccgtctccgtttgcttcctctccaagcttgcggcgataccctcggtttcgatccgcccgccacgaagtcgagccctcgcgtgcggggggttcgattctcgttcgcggtggaaaccgtcggctctttgatctgctggctcgtcgcgggtttgtccagtgattcgatctagcttcgttccgtccgtgggttttggcttgcccctctcccggcccgtctggtgcgtttccagggtggtggatttcgagcgcgagtgcattggcggggcgtaattcggtttggcttcagtttggggcagtggatttcgaagggggtttaggtgtggtagagtaacctagagggttagttggtgggtgatcggtgatcagattactgtagtttgagctgtttttgctaggcaattgcaactagtttggtgattctatgaatgccggttaattagtttcgatgcaattgcgcttagtatatgtaatcagtgcagaaaacatagacttcctttgttctgctctaagtgcaattccaccatgttcgttttgtgctgatttaaggtccatccttgaatcttcagatcagattagtcagcactttatagttcaatagcctcattgttatcatcactattatcgtcaaaatgtcattttgattttacattttgtatagacacttgtttcatcgttggcttatcttgtttattcttctacaggttcgtggcatttgcgt

SEQ ID NO: 112925 - DNA, 773 bp, Setaria italica
  Intron number 1 from transcript Si030824m (locus Si030824m .g) derived from phytozome v7.0 (chr-ID scaffold_2; pos 40 089737 to 40090509 reverse strand)
tcctacagcggaagcgcaagacgcagtggcacaacgtaatcccgcctgcatccgtcgccccttctcttgtgatgtattattagcaggccctcgttttcattgctgaaaaaaagatgtctccttttgtttgatccgaccgtgattggtatctggccgggaatctgtttgatgaaatgcctgtagaaccaggtctgcggcaccattgatgtgcttttatacgcacgcgcttagtggaaattatcattcggggaaggattggtgtgttattgctcgatccctttggatcgatttcgcattataaaactatactaccggaaggttatttatacagctctgtaccgggtgatagatgcagaagttggggataccttgctcgatctttgatgcttgttaaccttctgtttgtctgggtgcttgtgcactgttttctgtattgctcattttgtgcttgatgctacatgtagaacttggcctccaaatttcaccagattgctgagggcttgactgtggtaaaattgcactgtgaattttcaagtcgattgtttttttcttgatgttatgcatgtgaaacttggtcaacagtgcttagttcagctggtttctctgttctttaagtttctatgatatagcattgtatctggaattctggatagaagtttgtgctaactgactattcacaatatatgtggttccatattgcaaagaagtttgtgctttgaatggagaaagaatcaacacaatgtatcttttggttgaacagagattcaactatt

SEQ ID NO: 112926 - DNA, 607 bp, Setaria italica
  Intron number 1 from transcript Si026776m (locus Si026776m .g) derived from phytozome v7.0 (chr-ID scaffold_8; pos 35 797410 to 35798016)
aagtctgccatcttcggtagggaggagaggaagatgtaaggatctctggcgcggcaaccgtcccatctcgtcgcgtccctctctttaccttcttcgatttattactcgtcgatttggtgccttctattatttgattttttttcttcacgaatcggctataaaaaccctagcttttctttattctaaattccgtgctgttaagactgttcacgagaaatgctcacatggtttagtacttttaattctcgaggatacaatgcccacatggtttagtacttttaattctcgaggatacacaaactaatctccctgcagaagtaatgctgtgttttacaatgttctgcacggtttactactttttttgtttatcttggtgatatgcaaaataatcgtgtccgcgaactgtaatttacttcttggcccataattgccttgtacaagttagagtagcctagtgtgctaatcgaaggcattggtttttggcctttgggtctatcttttcgttagtttgcttgtggttcataggctgaattgttgcttcacgactctggatgtgggattgatggatgcaggcagtaccagtcgcacatccgggggctcaacgcgt

SEQ ID NO: 112927 - DNA, 941 bp, Setaria italica
  Intron number 3 from transcript Si007270m (locus Si007270m .g) derived from phytozome v7.0 (chr-ID scaffold_4; pos 10 612738 to 10613678 reverse strand)
ttgactgtgatttccttgagattacttatgtgagtatttccctccattaaaatctgggtttatttcatttgctgaaggcatgtgatgatgtctgcaagttatattcatatgttactacttccattcgaaattataaatgcttttgcttcacaaagtctctgagatgcactttcactactacttatttcacaatatatgagtgtaagccagattttttttcctggggacaatggtatctatattcttcaaagacataaattttctgaagatttaatagttaagccttgagcattcaataagttacaggattatgtgacatggaattatttcagaacatgtatggaacctaaatctgtaactagagtgtttactggcatttcacatattctatgattgggaagcaaagtacaaagaatgcataccttctcctgtttcctagtattcttatggccaatttaatcggtcgtgttatcattatgcttcagttagctgtagaccctgaaccatggttcagtattactgctagagtgctagtaacgctgagatctacattttggtaagatggaatcactgaatcaaaataggagctaactatgtgaaattaagtttaggtatgataccatactcggaatcaacagagacaagttatcaactgcttcataggtactgcagacagaaagtagatgttctgcacgttagagatctagaacttttaaatttaggtttcactgtataacattttaacaagtgtttgagtaagtgtcctttttctgtatcaatttccaacttaatcatgttgccagattctagatgtttcatccaaatatgatcactttgcatattttctgcttgtagtctagtaactttttaaattatgattgcaaatttgtttgcatttttctttgctgctgcttactttcatgtttcggtctttaggtaca

SEQ ID NO: 112928 - DNA, 789 bp, Setaria italica
  Intron number 1 from transcript Si028030m (locus Si028030m .g) derived from phytozome v7.0 (chr-ID scaffold_8; pos 13 253441 to 13254229)
cagtttatattccacccagtgggcaattcttggtaagttccccccacattcgtcctatcccatttttttttgtcaataactatttgatcacttttccttcattatattatgtgtacaaaactgaaatgtttgatagagtaggcataaattactagtaatatatggatttatcgtgctcaggtttcaagttcggtacctatgactttgacttctcatttatggcaatcaggtgtttatttgtgttataaattactttaggcttgagttgaacaattatatcacctgagttcagtattgtttaacatttttttagctcaagaaaaactggattaaccagctcctcgagaagttaaattgaacaaatttttgacaaaatgtgtatcagtacaatgcctaccccaacttgcttcggattaaaaagactgtttaaagaccctaatttcataactatgtagcagtgcacagggacactacttcttaatttaggactgtactcacattcccatctataaatatatttatatgctcttcttcatgtagatgtgttgcgttgttaatatgtctctttgtgacaagaatgatatattatttgaaatttcaaagctcgattatttatattcattgcatagaacatgaaaaatttataactgctgggttactgtagcaagccatcacatgcatattttgttgttgtaactcagtggttttactttcatgttttatcgttttacatgactacagatgcatttgttttgaagcttattctcataacttttttgttttgcagga

SEQ ID NO: 112929 - DNA, 899 bp, Setaria italica
  Intron number 3 from transcript Si026491m (locus Si026491m .g) derived from phytozome v7.0 (chr-ID scaffold_8; pos 25 709762 to 25710660 reverse strand)
aacgttgccaaggcaagcagccaagcacactcaactcttgttgtttggaacaccggagttcttggaatccttggataaattttggggaaaaataaatggatttagtttcttcatagtgtggactgtgattgataatatgtagttagtttcacacaaattcacccaaagagagtttggaaaaaaaatcaaatgtttctgggttagttactgccaattatgagacgtcaacgtttggcccctctactcaggccccgtttggtagagcttcggcttctcataaaatagcttcggcttcggctttttcggtggagtggcttttttagtgaagctgaagccgttttgcaaaacatttggtaaaacggcttctcaatggcaatatatgtaattttatgatcacttaatgcttggagagggaggagaagccggtgaagccacttttttcggcttctcctctctagtgtaagccgttttgcggcttctccctggctttggtggtgaagccgttttgaaattgaccctttggtagggcttcaccaaaagccggtggagaagcactttgagaagccctaccaaacggggcctcagtagtgtctgagatcttggtgactgttggaatttttgaaacactagtcagagtttcatctctccctgtcactagctaggtctgttctgttagtaggtcggtaggtggcggactagtggttagttaagcaattgacactttattctttcaaatctactatataagggttattagttgtttccggaacacattcaccaaagttcgttgagcagactcaccttcctaagactaattaatgaccagtccatgtgatgattacgtgttgattaatgaacctgcaggaggtgattgagctaggagcgacccagatcatcat

SEQ ID NO: 112930 - DNA, 868 bp, Setaria italica
  Intron number 1 from transcript Si005665m (locus Si005665m .g) derived from phytozome v7.0 (chr-ID scaffold_4; pos 11 985687 to 11986554)
acctcgccctcaacgccgatttaataaaccgcaaggtgcgttttttgtccgcgccgccgccccggcttgctctcgcgattcccgcgtcttgttctcccaatagtattggggggcgttgctgtctgctttccattgggcgccgactggcgcgtgcctgctggctggatgatcgaattgtggcgtgggaaagcgagaacttggcggtggggcgaggtatcgttgatttgattgccgggtggggtttacttaatgtttgattttgaattttgatcgcgatggcaactgtttgttaggctagttgtggttacgattgaggcggatgttttggctatttttgtggtggagctagggattggtggggaaaataagtagagctgtattttcattggtgtcgagactggcaattttggatgtcaattttgattaagttgaatttattgattttgttcttaacttatgtcttatggacctgctggaccatcaggtttttgggagaagaagaaggggttatgaatctttgttgctatttgcagttcattcttttgaatcagactaaattcaaatatataacaatgcaaagtgtgtacagagagaatgacggaattgctaagtgtggctagtgttaaaagtcaatttagtagaaagtatcatttgcccagtagatgttagtttcagttctttctagctttaatgctcgttgtttactcgttttcttctaacacgaagcattcaaatagtctcttatgtggatgcaaaagaaaaaaagttgcaaaacctgcagaaattaaattgtttgcttcctgttttaaaacgaaccatcagttaattttctctactactactatttcagttgtcgggatctcctatt

SEQ ID NO: 112931 - DNA, 630 bp, Setaria italica
  Intron number 2 from transcript Si026204m (locus Si026204m .g) derived from phytozome v7.0 (chr-ID scaffold_8; pos 34 858517 to 34859146 reverse strand)
tcctccaacataagctcttcttcctccatcggtgagtaaaccttctacgatgtgcctttcggcttttggcttatctgtaacaatttatgggacttcctgagcaacggggattctgattctcatctggcgagcagcaaatcaaaaccttgccatgctttgttacctcatgttacatgtcttcaagtagatgcccataaggctgaaaggagataattaatggtaacctgttttgtttcttgcattgaaacgacatttattgatggaattaagttgaataggaaaattttcgtctaggactttgagttgccctttcccagcataagcacggatgggctccactgtcagctttgttgaactttaaatttaattaacttccggctcagcacttttttctgtgtttatatgtttaagtataccattccgttgcaccaattatgcttcaataggccaatcacgaattcaaagattgaaacttagtaatcagtaatccctccatcccaataatttgtgtttttcctatatatttctactacatccaatagtttgtgttccatggtgtgaagttgtatctaacatgaaagagtacatacatacatcttcaaccaggactacaggatggaagtgaggacc

SEQ ID NO: 112932 - DNA, 713 bp, Setaria italica
  Intron number 2 from transcript Si026478m (locus Si026478m .g) derived from phytozome v7.0 (chr-ID scaffold_8; pos 36 67886 to 3668598)
cccgaggaagcgctgctcccgccaccgtggcaagggtacgcacgcatctctcactctcccctcgccgatggtgcgggcgctcgtgtttcctcatggttgctagattcgtttgcgtgagcctgtccatggtgtagtgcttactagaacaattcggggctcgaaggatcagtccctgatttagtcaagtcgcttggatcagtagagtttgtgtgttgagtctgtgttaggatgattgcctatgttttaggcttaatttttcttgtggcagttttaactgtcttcatatgacgataagtatcctttatgtctgcccaatatacaaagctcttgtagtgatttattatttgctgtgcggagctagtttatattattatttatcatatagtactatgggttggtttttgcttaagtgtaaaactgtgatatgcataattgcaatgtaggattttcatcatgtctaacctcccattacgtcacacgtttgaattaattacccgtgaattctaaaccttttgattgttttttatttttggtcatcttataactggtgctgttacctgcctgtgattatttaatttgctttatatcccctgtttgattgatctagtgcttctgttacgcattatcctttgacagtgattttattacagtctaatgtgtattttcctgcttttgcagtgaagtccttccccagggataaccccacgaaacca

SEQ ID NO: 112933 - DNA, 996 bp, Setaria italica
  Intron number 1 from transcript Si032179m (locus Si032179m .g) derived from phytozome v7.0 (chr-ID scaffold_2; pos 16 115460 to 16116455)
aaagacaggtgagcgagattgctctgattattgctccggattcgcgttctggttcttctttaattccagctgctaatcgccacgctgagttaatgcctggctcactggtatggtatgagcatgacattgcttgtttgtttgtactaacgcaagcaagcaaagcgcgcatgcgaaacaactgaaaggtagcgtcgatctgtccaagcatggcatgatcgatcaccccagcatgcatgatctgtgcggcgtttctttcgtacagttggttgttgccgcatatatgcactttaatttgtttctcctccatgcatgtaaaagcgagaaaccaaagctactttgttttcgtttgcaacagtttcttgttttcttctccttttctttacctttcccccacgtcaaagtcaaaacccacagacatgaagtattcttcatgggatggatagatttttttttccttatgtgtatttgttcttggagaaattgtttgcatatacatgtatctgtagaggagtgaatgttagagatgtggtaacagaaaggaaggcaatgccatgcaacaatgaggtcaactctaggtctctagcttgtcgctagctagcaatattctgagatgagctggactcatttccgtctctctaatttgatttatctctgatacaatttattgccatatatcggagtgcatgcttgctgtccatccgtatcttaagctttgtactatgtatttgttacacaaattatatatgtatatatgagagcactcggtcgcctctaataattaacatgtgtatctagagtagtatatcttgtcagaaacgacaatcagtccagcttattaatttctgtacgtagtaggtttttatctagatcttgctacgtatactctctctatatatcgtatcgaccaaagattatgttattaactaactgctactaataaaccacgtccgcacgcggtcaggtgtaccgtctgtcgatcggggcggcgtgcgggct

SEQ ID NO: 112934 - DNA, 783 bp, Setaria italica
  Intron number 1 from transcript Si028503m (locus Si028503m .g) derived from phytozome v7.0 (chr-ID scaffold_8; pos 43 54100 to 4354882 reverse strand)
gcgggggtccgtttccccccctttttcattatattgtaagacaacctcattcacattcaactgttggtcatatttccaccatatttggcatgaatttgctgcccgcttgatctatgaactgttgagttccctcaacccgtggtgtctccaggccatgtcgaagatatacttatcgtgtgcgtgaatggatcatttcactagttgtatggtcatctgcagggatgattacatcatctcaacgatgcagtttttgcttattgtgacacaatccactttagtcccggacatgcgacatgatcacttggactacaggagaaaaattgggggggggggggggtgtcatacaaaattattgtcatccataattgactaaaaaaaactgtgatgagctattggatgctacaattccaagatagacaagacaatacaacatatgcttccagtcatgtgtccagattcaatgtttgaatgtgttagaaaacagcatgcacagcatgttggtgatggtggatttcttttgtattattcattttttttctttacaaaatggtagtatatacaccagggatttgtatggatgcatttctccgaactcatgatttaatcttatgtattctgaaatcattttcagatacaattatgtgattgtaaacattatatagctgtttagcttttgtgtttcgatagtaaaatccctttcattgtagttttgtttcttttccttgagagcagtcggtgccatgtggccaatttgctcccgggtgtcaatgttgcaatagtact

SEQ ID NO: 112935 - DNA, 469 bp, Setaria italica
  Intron number 1 from transcript Si028357m (locus Si028357m .g) derived from phytozome v7.0 (chr-ID scaffold_8; pos 37 418643 to 37419111)
catcggcgagaagaggtacccaatttctgacctgttgattgatgctaattttgttcttggtttcaggaggcatgctcatattaaacagcatgcatgcataatagattttcctgcaaaagtcctatgaacatggcttacttttttgtactgaatttaaaatttgggttggttaacttttgtgatcgaaccatgatcaaaccgtaagaagaattgatctatatgtgtgtgtcttttcctgttttcaattctttccatgctgttgaggttttttttttttgaagcaccatttccattttacgaattttttcatagttctgttctgataatccttacatgagtagttggaattttttttcggtagggaaatagaaacttaaatagcatttcgaattattaataatgcttgcatgtttagctttgataccttgttctattatttgcagtagcattgaggaagtgatagcaaaat

SEQ ID NO: 112936 - DNA, 945 bp, Setaria italica
  Intron number 2 from transcript Si005829m (locus Si005829m .g) derived from phytozome v7.0 (chr-ID scaffold_4; pos 45 76965 to 4577909)
gccggtgacatacctggcattttgagaaaggtaatgctgtttgctctcaccctataccagtcgatcgtttcttgtctttttagggaattgttcttgattggtgtatggctacttggttaaagtagtgggctaacatatatggtaattatgcgctgagaagctaattgcatgaccggattttttttttcttggatgagtatctgttagaatcaattattgaattggtcgcgttgatattaatgcattatagaagaagaatgtctcaccgctctttgcaagagcttctaactttttttaattaacacgttattgtctaaaagtggattgtatattgtcttaattaacgcatggtagtcgtgtagcattttttcagaagtacatgagatgcatgacatatcatttgaagtgtcacagcacattcaatgtggttttaatagttaaaattagggagcctttgcaacataaaaataacatattttgccaatgaatgcactgcatgagttagagtttgtaacatgcagcaacaacaaagcctttagtcccaagcaagttggggtaggctacagagaatctaacatggtaagtaaaattaaattactagaactgctgagcatatacttcacattctatcattatgttttaacaatttgtttgatctacctcatgctttactttggcagttgccacacattaagtaccttttgttccatcaatttccctctcaaggtgccatctggcccatccttgatttgcttgtgccatcttccaactttgatagcatgttacctgagctgttgaacaaatgtctggtagggttaccagatttgaccttgaactctgttttcgctccacattatgggggatcgtataatttgttgacaaattaaggtatggccacaaatttctgtgtcgccgatctgaaatctatcattgttgtctaggtat

SEQ ID NO: 112937 - DNA, 469 bp, Setaria italica
  Intron number 1 from transcript Si031514m (locus Si031514m .g) derived from phytozome v7.0 (chr-ID scaffold_2; pos 37 566413 to 37566881)
acaagttccggatctgaaccatacattatcggcaggtacttgtgttcattcgtgcgagcacaatcactctagtcctagagaacacacgcccccgttcccggtaaaaacatcttccattcttctttagttctttataaatacccgaaaagaatgttattagttcgggtcaattctgcaacacttttgtaagaggaattcatttcagctccggtttcacgaggaatttcatttcgtctctttcttgaatccgaatatgaaaagtttggttttttttttttttgagggggttggaccttgcgaaaacttggaaggaatcggtagcagcatttcgcagagtgggccgacaaagtttcttttaaacttttatacgcaggccgagcccagtctttggtcaacggactccggcccagcccgtcaagccggccgccggggaggagcggaggcgccgccgcctcgccacacccacaac

SEQ ID NO: 112938 - DNA, 461 bp, Setaria italica
  Intron number 2 from transcript Si032017m (locus Si032017m .g) derived from phytozome v7.0 (chr-ID scaffold_2; pos 38 344334 to 38344794 reverse strand)
gaacagctgcgattctggtgccagtactggtaagcaaacctatcgaacattcaggttaatctgcaacctcacgtagctctccatgttaggccttgtttagttggggaatttgggaggtgccaaattactgttacagcactgtagcacactgtagcgtttcgtttgtatttgtgaattattgtccaaatattgactaattaggctcaaaagattcgtctcgcaaagtacaacaaaactgtgcaattagtttttaatttcatctacatttagtactccatgcatgtaccgcaagtttgatgtgatggggaatcttctttttgcatagtgtcaaagttggaagttgggagtaactaaacatggccttaataatcttctgcagaatatgaatctgaattccgaactgtcattctcggtgtcgtcgtgcaggatcctgctcgcgttcctgacggctttcgagaggt

SEQ ID NO: 112939 - DNA, 839 bp, Setaria italica
  Intron number 1 from transcript Si026573m (locus Si026573m .g) derived from phytozome v7.0 (chr-ID scaffold_8; pos 97 0377 to 971215)
ttccagcaactgaagccaaaaacatcccagcagtagtaagttacttgtttctgcacgtagttacatgtttgatattgttgctaaacaagtaaagattctaagttttatacaaatttattcagcctccaacaagaaagtcttttcattccttgaacttgaaggtgtatgtgaatgagtggtgatttgcattcttttgtcaatttgtgctttggaaaaagggaactgactcattaactattagcctagaatgacatttacatgcttctttaaattacatatgtttatctgtactagactttctacacttctatttctactcatgtgaaaatatctgatgttctattaacttgccatgggaatgtattggaaggatgctaataaaatgttcctttctgttgttagcttttcaagtaatgttaattagtttatctgtggacttctagcagtacccgagtacaatcacgaaagtttgttataggtttcatggaatttccccaaattcaataatgttcttttgtctaattgtaactattgaagcactcgattatgctaaagtctcctctgaatatagtagggaattagtcatgaagatgcttgcgagcttgttctgcccaatttatgaaccatgagccatgcatagctcacagtatggctattaaattctattaccgtgtccaaaggtattctttagagaatatgaaggtcctttagttcttaggaatcaggatgactaaattagcatagcagcacagtatctcttcttgattgatgtgtttctttgatacatcttactatgctttgcagcaagagactggcctgtgcaagaatcttcttcagga

SEQ ID NO: 112940 - DNA, 763 bp, Setaria italica
  Intron number 2 from transcript Si006068m (locus Si006068m .g) derived from phytozome v7.0 (chr-ID scaffold_4; pos 26 017148 to 26017910)
gtatagaaaggctattgctgttttgtcactgattggtaatgatcacaagccttttatctatccatggagtcgactccatacatatatccatttttgttgatagataacaggtgtatgtccattcaatatgcatgaattatgaacctggaatcctgtttctcataaaattgttatacgtgatgatgaccattagatcacaatcacatagcattttattgtcaactttattttttctttgaacgctacattggacatttgtttcaaaatcaattgcctctctttctgagagcaaaaaaggcatcttattagtaccctttcctgattcaaatatcatttgaatttgcatgaaacaatttctaagaaggaaataaataaaaaggaagttttatatttgcatttggtatttacttcaatgaaaaattatttctatgacaggatgtaatttagatgaactcttctatgttttgtaaaaacatgatgcacatttgatgttcaattggtacattttctttttgtagataatgtaccggggacacttacaatgttctgtttgaacacaaagtgcattgacatatattataaaatacaactaactcattaacagatttcgaatacgctttgtctgaactactctaggcatcaattcctctattgtgtgcatttgttgtttctttgtttgtacatactgattttaaaatccatggatatttacattatcatgtctttttttttccatccatgcagacttgcaagatcttgtcag

SEQ ID NO: 112941 - DNA, 927 bp, Setaria italica
  Intron number 3 from transcript Si006855m (locus Si006855m .g) derived from phytozome v7.0 (chr-ID scaffold_4; pos 62 41568 to 6242494 reverse strand)
tttgggggagaatcgcaataccaccgaacaacgaggtctgtatttttgccgtcgtttgatttggcactagtactagtagttcggtcttatttagttgacttgctaccaaattggaattgttgtccggtgcatctggatgtctgcactacccttttaatactgcggttggaatgttgtgctgctctatgatttggagtcatgttgcttgacttcatgacttgcttcggttgaccatacctacgtgggtctcgtcagttgtgccattaactaatctggtgctttgttaggctcacatctaccagctcttggttctaaaagttacattaagatggatcttagagctgatcattttctttataggtcctttctttacttcaagcattctcatgtttcttgatttcccttctacttttttaagcaatttcacacagaaacagtgtagattgcatccatacttttgaaaacagtgggccatatcatttctgtgataccctttgaaaggttaggccaaaagctatcttctgggttctttcagcttacattggcaagagtgttttttcagcatttcatggacttgccattcataatgctgcttcttttatgtgtcttcttgtcctcactgtacttttcctgtaagttctgtttgtatcttgaacctaattggttggcaacaagccgaagcgcaatttcctttgttttccctttttagttttttttaaagaagtgagggctttataggctagacagttagacaaatctgaagttatttattggttgtgcatttaatctgtagaagtttgtgctgcttttagttacaaaattaaacttatgtagtgttagtcatgatctatttttttttgtatttgctagcctaaaattgaaccttttctttccatttttctaatatataccagaagctgtagagtc

SEQ ID NO: 112942 - DNA, 579 bp, Setaria italica
  Intron number 1 from transcript Si029758m (locus Si029758m .g) derived from phytozome v7.0 (chr-ID scaffold_2; pos 26 688188 to 26688766)
agagcacctgtgcccacaaggtaagacttctgctttagttcctaattaccttgcacctggaactaccatgtctttttatccactctagcctcagcataaagccattaaccgatatatcatcggtttcatgttctcattagaaggacactaggtaccatgtaatactaagatgtcatctatttcagggtacttcattttttctgcatcagaataatgttccctagatagctgatttcagaaagaaatatatcgcaagtatgtttttgctttgtcccatattttttgtttaattttttcctaaccattcttgttatcagatgcccctagtattgtgcaccgtaaaagagctcaattattaacacccagcaaactaaacccaaaaaaaaacaacagtaagcagcagagagattgctagaattctctctatagtaatggaagaattgctagaattctttcattttctcatcaaattgagtaaatttcaggtagctacaactattttgagctgtctagctggcattatttaacaaaaagtatactgcaggcatcattactctgttcatattcgaatccgattgc

SEQ ID NO: 112943 - DNA, 1002 bp, Setaria italica
  Intron number 1 from transcript Si007395m (locus Si007395m .g) derived from phytozome v7.0 (chr-ID scaffold_4; pos 77 59342 to 7760343 reverse strand)
ggcctcggccccggacgcgacaccttcatctacatgtgcgtaagcctttgcgttatttttttttcgtttctctctgagattcccgtaggctctgtttgaaaatatccgctgtttctgctgccctgcgtcctaaagattctgttactctgcttcttgttctttgcctcttcaaggttgttgcaacgcaactagtttttcgtgatcttggcacagaggaactgattgatctttgtgattcttgattgccagatatttttggatgatctgcttcactttgtttcagagaaagcatgtagctctgttctcttttctccgaaacagagtattattgagataaaaatttgatctgactgccacctgagtttggagaatattctgcgtgtctatcgcgctagattccctctgtcttcactgttccaaatgcttggggtgatgcatgatgtttcacttttttttttctgtggaaaatgatgattcactcatgctctgtttgaacggggggggggggggggggggggggggggtggacagaatgaaactgaaatgaacaagttgaggagaaaataggagccagctgccctttcggttgctggaaaatcacagatgcacttttgtattaatatctcttgtgccttgctttccactttgtgggtgaaagggaattcatttttcatgacaagaaacaagacaagtccttgtttccctttctgagtggttgggttcctgagcaggtggcattgcttagtaaccaacctctgcatcatggattcatgggatgtgaatgggtctccaacataatactagcccaacactcaatatctgcctcctgttttggtagcaaaaaaggattgttaactgatagttacttagcaaaatatctctcatccggcagaaactaaacagatgctaataatgttttgtgtaatcaaaccatcatttggtattaaacttttgtgttttcgctcaggggtgaggtggccttctgcagccaggagtgtaggc

SEQ ID NO: 112944 - DNA, 852 bp, Setaria italica
  Intron number 2 from transcript Si026706m (locus Si026706m .g) derived from phytozome v7.0 (chr-ID scaffold_8; pos 20 51572 to 2052423)
ccaggtcgagggccgcaagcgcaagggcaagcacggtatgcactctaccaacctcaactccgagctctagctcactgcaaaatcttccgaatgtttcgagatggaaccaaccctgcagtttaattaggtgtgtcgatgccgtgtgcagatgcattgcctttggcaaacagtggcacatgtactaaacggcaggatcagttatccagattacatttctttttgctttttgcggcagagtagctaatcagtcgaatacatcgtattcctggcctctttcatgatgtcctaattgcatcttcaatacagcaactagagttcagaaagtcacctattatgctctatcctaattctacctttaaaggagggtagatcatgaggctaggatactattattatgttaagaaagtttgtgcctatggatgggtgcatcaggtgtgccgtcaatcttgtattcgtgaatggtttatcgatgttctttttttatttatctttgaaataggatatatagcaccggaaaacttgtgctttatgaggtacatgtattgtgctcaaagttatgttttctgtaatctttatgattttctatcagaaatgttaatcgccataataaggtgtaaataggtcacaatacaagacgaatttgatgcttaaaaatgcactaggattcatgatatcagcatatgctctggataaagagtcattctcctaatagcacatgtccagtcacgtccctaattttccagtttttttaagctgatccttcattaaattgtgcatggaacttggtttctactcttggctgctgtttggtcttcagtgtacttaggtgagtggtgctactcgtggaagggg

SEQ ID NO: 112945 - DNA, 700 bp, Setaria italica
  Intron number 2 from transcript Si031166m (locus Si031166m .g) derived from phytozome v7.0 (chr-ID scaffold_2; pos 48 073899 to 48074598)
gtcaccgtcacctccgacggccccttctccaagaggtataccacgcctaccttcttcacggtgcttgcgtcgtactgttactatctgttcctcaggtcgccattatccttgtgtagatctgtctagtttcagctctgtgtgttcacgatatttcaaggtcactgctatgtaggagcttggtttggtccatttttcagttctgttatgcgaatcgatggttttttttttcggtatggaggagctttgtgactgcaatgctacatgcggattcgtcaatgaccgtagacgttcactcgttatagtgtactctattttgatcctgtgtagtttcaaatggaaactccagtgacttggtaattttagcatttgtgtgcaggtattaggtggtttttgataattttcagctgcaaacagtcattgaaacttgtagcatagcagatgccatatgacaaattacatggtagcattattatgttcgatgcttggaacattgtggttagtgtagtttcaaactaacctgtactcaagtaaacacttgaatgggacagtcaatttcatcctgtcttttcttttgttaagtgcgtctttgagcatccagaacgtgtttgttaataatgattgtaactagttgtttaatctgatggaatcattctctgttttatcaggtacctgaagtacttgaccaagaagtacttgaaga

SEQ ID NO: 112946 - DNA, 821 bp, Setaria italica
  Intron number 2 from transcript Si006658m (locus Si006660m .g) derived from phytozome v7.0 (chr-ID scaffold_4; pos 38 276022 to 38276842)
ctcattagggggttcgcaagattgttggtcgacaggttcacttatgctcgatcgcttacttttagtcgattcatgctgcgtactattgttgccccccgtggttttatcttttctcgagtgaaatccagtagatatagtagatatcgtagcattaggttttaattcaatcgattgattattgtatcatcaaaattgagaagttcgaatcatgcctatcatgctgcctcaaccgaaatcctgtatattgaagtttcaattcaattgattgatcattcattagattcaaccaaaatctagaaggttagatgacgcatgtcatgctgcctgcgtagtttacctttgatctgtttatgattaccttatcagtaggatatttgtgattttgggaagtagcactaactgattcatgctgacatgatgttccctttcagattatactgttgagtcctatctaattgatgctttgtatgctatatgaatacgtcatggtaaattagcagttaattagcatattagcaattgggcgtacctcatcaggattgctcttgtagatgtgtgtggtgatgtttcttgttcaattcatgttctgctttaaaagtatgtgttctctgtttgttaattaagattcatggttataatgatttggacctaattaatcagggttgcccttttagatgcgtggttacttgttgagttcatttttttcctgctatagttgtatgcgtttgttcattcatggttagatttgatttgtttcttctctattccatgccttccatatacttcaattgtagcttaacatgagatttctgtatatgcag

SEQ ID NO: 112947 - DNA, 895 bp, Setaria italica
  Intron number 1 from transcript Si005787m (locus Si005787m .g) derived from phytozome v7.0 (chr-ID scaffold_4; pos 31 250790 to 31251684 reverse strand)
ccgcgcactgcatcggcgaggctgttgagcgtgaggtgagtcgcttgtttaccattacgtttttttatataatataataaggagcctaggagcaatactagaccattttgaggactgttgggctgctcatggacagcaatgtgggacttatgattgtctgaaacattatctttgattgatgatttgtagtcttaaagagaatttgacagtaggcagcttgccatgtttgcgggtagtggggcaggattccatctgataggcttacggttccatttttgatttgacaagtcaaatgagagggttaatcaagcttggatagctaattggaggtagaggaactgatgagggcattatgcaagtaagacgtgcaacctaaattatataaccttagaactgtgcggtgatgtgaccatgatctgaaattgacctacattatccatcataacatgcatccatgcctggtatcctgtaatttgatcactgaatgaggatcgcaatttagcctacttgaaattgtgcggtagctggtgtatgcgtacaggtgtctgtacatgagaaaggtttggagagttaaaactttggaactattaaagtgtgatttagaatttgtcttcttgtggagtcaggtaaagtagtgaagtttggttacatcattgtgcacttccaaccttgtgcactagagtttagcttccgtacttttggtaaagtagtgaagtttggttacatcatttggaagtaacttaatactaatttttctttccttgctttcccattcatcctaattcctatttgtgttttccctagtggaaattcatttgacagtccactgaaagctatttttccctttcctttctttacagttcaaagtccagtcattctttcagaaaagtaggaa

SEQ ID NO: 112948 - DNA, 843 bp, Setaria italica
  Intron number 2 from transcript Si029396m (locus Si029396m .g) derived from phytozome v7.0 (chr-ID scaffold_2; pos 39 894169 to 39895011 reverse strand)
ctccaagtatgctgttctgagatatccgttaatttccccctttatggatatgcatatctgtgctaatctctgtgtcaactttagttagctcataatgggatgatttttgttagaaatcataattagtatgcagttttctctaatataggagagttttccatccgttgggctatgttctagttgaatctctgggtttacagatgaagttattaaatggggcttcttcagttcggggctggcagtttcaagagacaccttaagagtctagtgttcattagctctgtctataggattttagttggttcaattaagacctgaacagaaaccttttgggagcagtataaatggaagtacataattttgggaagaaattatctaatacgaaaccaactgttgagttcaaaggaatcaatccatcaagcaaatgctgtcttatttgaacaaataccaagtagtcttttggctgttcatggctcagcattgcccaacacctgatgagattaatattcatctatgttttgatatatttgaaggaaaagaaattataaaattttctttttattgaagtaaggatgaacgaggtctagaagtatggccacttgatctaatattgttacattttgctatgccatttctttgttttttctcacaagttgtatttcgcatgaaaagtcaatctaagaatttaatggaaattgctggttgcttgaactggtcatgatgccttgcaatttggtgttcccattttgcatattgtcaatactcagtttgtacagttatttcctactcgtggtgcagcataattcttatttgatctgtatgagtattgcagtactacctgta

SEQ ID NO: 112949 - DNA, 570 bp, Setaria italica
  Intron number 2 from transcript Si030945m (locus Si030945m .g) derived from phytozome v7.0 (chr-ID scaffold_2; pos 46 788926 to 46789495 reverse strand)
gcgacccgtaagttttgaattccttgggccatatttttcggtgcgagtttcgtccgtaggggcttttgtaccccataaatggcgtcggtggtgctctaatcttaggcttggtctgttttgttgtattagttttgcggctggatgactggtagatttatgctaaccatgtgatgatttatgcatcatatcaggtgaagattgtgggttttggggtctataaggtagttgattgaatgcatatgcttgcctgaattttgggtttagagttagaaggccagggttgctttcagtctaatgggggttttcggcagctacacagtgtgacaaagtttagtctgtagaatcgccatgttaacaatactgcagtggtattgcaattccttactaatataagaactcttctgtgattcagttcatggttttctacatggcttgttctctgttgggtctgtgtgattttagactctgatgatccttttaaggtttgtgtttcatgttctataatctgcaacttctggcatgtaaactatttcaggtattcagtttgagaacaattgtgaagttggcgtt

SEQ ID NO: 112950 - DNA, 963 bp, Setaria italica
  Intron number 2 from transcript Si007391m (locus Si007391m .g) derived from phytozome v7.0 (chr-ID scaffold_4; pos 24 92656 to 2493618 reverse strand)
catctatataccaagagtatagctaccttttcgaggtacaggtaccttctcacctggccagtttttctttctttttggtcgtgttcatgcatgctgctctcttgattaggccttttttggattagcagatactgattcgtcaaaaagaactcaatgattcatgtgttgtgctgtctatcccatagtttttctttgcttcttggtctcaaacactatggtttaagctactggttctttacctgcgtcgcataaaagtaaacacaatgcctgattacttggtctctaggattactctacacactacaccatatgttgccacagttgtgagatgctgataagcagtcggcaaaaagaccgtcgtcatgtagtactacttgactacttacatttactaatactttatcttataataactatccatcgtctgatattgctaataaacagattcatgtgcaggaagcaatatgcagatacattgattaaaggtccaagttaccatcttgttcgagaacttaaaacaaaaaacctttgtattgtgagagaagtattgtggttttaggctataatgtatacagatggtatgaaacaattgatggtacgcatatattttcagtaggcataagtgcatagtcacagacatgcatgattgatttttcttagaacatttgtgtcatggttgaaacccgaactcccaatcggagccaaccaaatgcatggataagttacgaatcttatgtaggctggctggctggccatggccaacggaatgcactaaaatgcaatgagccaatggaatgcactaaaatgcaatgagtctggtgctttttgttacttgttcttacctctagagttgaattttttgtgtactgtcatgtgctaaaaattagaattcaaaagtaatagagtgaggtgccggtgcggcaaaagttattgcgtaactgattttggccttttggttggcag

SEQ ID NO: 112951 - DNA, 582 bp, Setaria italica
  Intron number 1 from transcript Si026484m (locus Si026484m .g) derived from phytozome v7.0 (chr-ID scaffold_8; pos 12 95950 to 1296531)
agcgagcttcgtccaccaccggatcgatcgtcgaggtacgcaaggccgcttcgttgagttcttgcttgtttgttctttcttctttccctccccttttccagttgcttgattctgtttgggggtcacgcgtcaagacttggtcccttgagcgtctgcaactgattgtggaaatgacctgctagagtttaagcaccttgctcaattggaggatgggagatgcagatgctccattttaactagatcttcgtgcaacagtactatatattgctggaattgtcggtcgggcaacacttcaatgccaaataattctttgagattttgttttttcaacctgtaagacatttagcatttgacacaggaagcatccgacttccgggcactggtccttaccattttgtatatactccgtacaagcacaaacaccttagttgccttccaaacataaaatttgttactggcgaaaattgggaacaattggtaccttttgctccatagtagggtcggtgttcattagtagtcagatgttaaattcagcatgtggtgcaaacggcataagtaacaattgcaatttctgtttctagg

SEQ ID NO: 112952 - DNA, 791 bp, Setaria italica
  Intron number 2 from transcript Si026368m (locus Si026368m .g) derived from phytozome v7.0 (chr-ID scaffold_8; pos 39 139407 to 39140197)
gcgccggtccttacaggtatgtcttgacttctagcctgcaaattattgattcttcagagcccgtgcctgtgctctggaagaggaaaaatgtgaaatcttccaatgttacttactggatatctatttcggcctataatgttgttgagactagcctgtcccattgaaaggccttgtggagccgtgtgtttgtggacactggtaaaacagctgtaatgtcgccagtaagtgaaatgtgtagaaaaaataatatttcattgcagaatgtaaagtgccatgtgcaatgtgcatcatgtgcaccaatcttttcaattcatgtctacatttaacaaatacaaagcgaaggaatatttttggcacatacttcatgcaacgggcatctattcatcattgactgttatatgcatatatgttaaaattttagctatgactgcttgactagtttgtgtgtttaagtctttattttagctggagtgttttcacttgtgcacagtagagtcattccataattaatcaatttaaatatgtcacctgctctctggatgctttaataaatctcacctcaaatatcgaacctagtcagctgaagatttattctctctttctgtgtcctagagtttcttgcttttctacataatatcaattaagtgatgtgccaagcttgatgagtgtatatgcagatctccactgttatttttaaacttgatgtatatccacgaatgattttgattttttatctttcgaatgtgtttgctgcagagatttcaaacaacattcaaggggaaatactcaat

SEQ ID NO: 112953 - DNA, 574 bp, Setaria italica
  Intron number 1 from transcript Si006567m (locus Si006567m .g) derived from phytozome v7.0 (chr-ID scaffold_4; pos 35 759417 to 35759990)
tagttgtgctcaattcaactcaagtagccaaagaggttagttggaagttgtgtgtttttaccttttaagttctgttacacatatggttatgagttgttgctgtacattagtttccagaaatccagggcaattgtggcagttggaccttttttagtgttaccatgattgttgcaccagaaactctacattttcgatgctttctctttagtgtttttctttacaatttgactttcgaatggcgatctcaaagtcaaatactgatataggagttctgctcacatcctaaaattatattttaaaagctaatatgatgttattgttgctacaatatccctcttgatggatataaatcagtctttaatggccccttttgcttacaagaactatcaggataaaagttaaagcattatttaattttaaactgtggattaacaatattaaacagaaacacatcttagttttttaggtattctattaacattgtttcttctcaatgattaggggttgtagagatctctcgcatttcgtcaaaactaataagaataattattattgattctgtattttataggca

SEQ ID NO: 112954 - DNA, 956 bp, Setaria italica
  Intron number 1 from transcript Si033383m (locus Si033383m .g) derived from phytozome v7.0 (chr-ID scaffold_2; pos 37 019697 to 37020652)
attctccttgggcaagaattgctctcgctgactttgtaagtgagtgcttggtaattaattcttgtctatgacgacacaatggaatttatctgtcaatttattttctcctcagattagcctgttaatgtaatgaatatttgcacggcaaagtttaaccttctgccctgtagctagccccgccagaacctaaataggaaagcgtcagtctattattatttaggccactgttattcaaagtttggggatgaagttcataattgttgtgtaaaaaagtttggtagatcattttttttgctactgcaagtcagatgcacacattcaccgggattaaaattggttgagatgggtgtttatgtcgaaaaggcaaatatatttaattcttcttatgttcttatgaacacaatatccactatttgagttgtcatatatacatatctccgtcttatattatgggaaagggacatggatttagcacacagttaaagaaaatacattttcacaattttagatttttaaattcagcatattaaaaaaaccagctgttatctgattctatgtttttgacatatgttccctcacttgatttagttgggggcaatctccctttgatgggtctgcaccactggattatttgtttcagtaaggatttcttctatacctttgtaatcataagtaatttcttaccttaatgtttcattcaagtatcacatttaaggatatatacagctttgaataatttaggtttaaagtcaccagtttttaaatttgaatctctttcttgttgcaggaaccggcggctagaaccaatttcctgtaagtgtattagtattaccccttgactgatcaatttttttacaataataatatttcgctcatatgaaaaactaaatggttgaaaactaattaaattctgaaaccaagccattttatcattgtacagctggtctggaaggtga

SEQ ID NO: 112955 - DNA, 531 bp, Setaria italica
  Intron number 2 from transcript Si006126m (locus Si006126m .g) derived from phytozome v7.0 (chr-ID scaffold_4; pos 37 612501 to 37613031 reverse strand)
tttgagaaggtactttttcctaattgtttcctgtaagctgaaagcaattgcctggtgtttctttgctctgctacgaataaaccatttgggttagtatgccttcttatttatatcttggcttgtgtcgagtaaccgtggatttgtgataatccctccataaaaataaaagtggcgtcttaggacatgtgtagtcagcacattctgatcatggatgttatatataatgtttagtttgcatatatggaagtgatatgagcaagcttgacatgaaattatttcacaaatcataatattgcacattgtaacttatccctagtgtttgatgataaaatttatggtcgaagtggcatagcattgacatcaaaatgccaaaagcaccatttcttgtttactgctgggagtgcttaccttgataccttggttgcctcattgatgttcattcactttctgtgtttgttgagttgtggtatcttgacgaagttaagtgccacactgactgttttcttgctcttctctcgcagaaaagtaagg

SEQ ID NO: 112956 - DNA, 517 bp, Setaria italica
  Intron number 4 from transcript Si027779m (locus Si027779m .g) derived from phytozome v7.0 (chr-ID scaffold_8; pos 17 727900 to 17728416 reverse strand)
cattggacttggtgcggacacgtctcgcagctcaggtaagatgcttttaccagttccggataaacctttgtaaatatattctgaaatgatcaggtatcaaatgaatcggcctgtttagattctcacttgaaatgacagtacacaagttagtttccttgcagaagattatctaccatttctcttgattcccattttaaccgtagtggagttacaaacaacctgggctgttttccgtaagctattgcctacaaaactacaaaagaaagaacacattgagtgtctgaatttgccatgtacttatcagtatttgatgtggctataagtaaatgcttgcaactgaaccagatgtcaaatgttacaactaatgggtgttttgcactgcttcagaatttagcatattttattgcaaactactctgcaaaagctttcgttgttaagccaggttttgtgccactaatgggtgtttttcccatcggatgattgcagacaaatattgcctactacaggggcatatctc

SEQ ID NO: 112957 - DNA, 727 bp, Setaria italica
  Intron number 1 from transcript Si005715m (locus Si005715m .g) derived from phytozome v7.0 (chr-ID scaffold_4; pos 18 170558 to 18171284)
aagaaggggttgaggactggaggaggaaacaacaggtgccattcggatcttatgtttacatcctagctgtaatatttattgaattttgttcatgacgtaagcactgtggtttgaaagtactcgaacagctcgtatgcttaattaatccaatgcttgattgatatactatttaataaaccggaacaaaattttcttcgccttttcttggtgttgggattgttgggttcattctctatagataggttatagggaaataatatgtatgccttacttatgcaaacaatgaattctcattctgaacaattcactgagctatattactatgtattttggtgtcgaaaacttaaattcttaatttgatcattttccatgcgtgtgatttgaccatgtgatccattatggattataatcacaatgatccattctacttgtgttgctgtttgtgatgtagcaatagtttgtggtctcaattgtatcacttaatattccaagtcatctttttttatatatataaatgctgagcttatctgggaatcaagttgtaacataattaacttcgttataaactcatatagttgatgctgtacacgtttatgtgatggttttctgacattgatattagttgtaattgactgttagtgtaatttagttaatttgaatattttatgtaaattctccatgctattggtatattaaatagatctgtgccactacatcacccaggatc

SEQ ID NO: 112958 - DNA, 604 bp, Setaria italica
  Intron number 1 from transcript Si028864m (locus Si028864m .g) derived from phytozome v7.0 (chr-ID scaffold_2; pos 28 061885 to 28062488)
cgaacgccctcctccgcaagaacctctgcgtccaggtcccggcactgcctctcttttgcgccatctaccttttctcgctccccccccttttcagtgggcgaatctgtagagttgctccgctcgtcgtgccagccaggtgttagtggatttgcctgcccggttcttgagggttcaacgtagttgtattatccggaaagtgttgcttgagtctgatgggttttggccttttgaggaatttttttttgcagtaatttgttgattttagctctagcagtctagcttcataccaatctgtgtgcctgctgtttattgtgagccaaggccggtaggtagccttggcgtgtgggctttcttgctcttacacgacaagttctttaatttctttgattttctatttccgtttgttttatgaggtgcaaaaacgcgatccgaattaggcacaaattttaacaaatgcaaattttgcctgtctacatgaacagtatctaagctggctctgtttttcttttcttccctatgtcggctccacgaagagtgcctcaattaatcatgtatattatgcattgcagaaacggaacctcaagacaaacatcggcatcacctt

SEQ ID NO: 112959 - DNA, 575 bp, Setaria italica
  Intron number 1 from transcript Si006130m (locus Si006130m .g) derived from phytozome v7.0 (chr-ID scaffold_4; pos 37 197992 to 37198566)
cggcagtaccggtctcagctggagcaggaagtgagtgcctttctactttcttggttcataaactctacaattttgaattttgtagattgtggttttaagttgaatgaatttcgcttgtttcgagtagctctgttcgactgttcctgttagatggaagcagttaccgatgccactggctgctattggccgtgggcatttccagtggttcactgaaaagaaaattgctcatgaacctctgatgaaatccagtatctaaaatttgttccctgtaaattcatattaattcaagtttggtaaacttatgtgcattttcttttgttttttcatgacacgcatgttagacacgtcacagggaatgtgtacaatttgttccaagtatactatgtttatgccagaaactgatttcgagcagttctccgtgaataatttgtagcttctgagacaggagaaaaactgtgcagattaaaagaacaaaagcaaatattcccagatgtgatcgagtactaagtgtaatactctagtcctgacatacctgtacaggttaagaaattgcaaaggcaacttcaagaagaggt

SEQ ID NO: 112960 - DNA, 1054 bp, Setaria italica
  Intron number 3 from transcript Si026976m (locus Si026922m .g) derived from phytozome v7.0 (chr-ID scaffold_8; pos 12 88717 to 1289770 reverse strand)
ggccgggacctccgtgttcacttcaaggtgagagctcccttccgcgctctcgtttcgagagatcccatgatttgtttgcgtgcaccttagcgttcttcctttagttttcatatagcccgttcattttggactcactggtatcatcattcatgtcattcctcgtagttattggtcctttccttgatctaaatagaagagaccatttgtatatagcttcgtcctttatatgatactctgtagatggtttttggagcatggctgtattgtaaattatagttacagcttgtttgatttagttagcagaagccaaaagagaatagacagaatgtgaccactcttgtaaactttagaatgccaacttcattgttattgggtttatgatagcttcatgtctattggttcagtaaatttgctgttttatcctattgcttattcggtgaattctctgttgttgctgtgcaagttgctatatagtatttgtactgcatgtgtttcccctgttctgtgttataaaggtgtcattgtgtttattctgtgatgctgaagtaagattggttgttttgtgtgctagagtaaaatgacacaaatttctgggattgaaattgttataggtccaccatttctagtaactgcattaagcgtagttatgcagtgctttgcagtttatacgtgaactttatactacaaagttgtggtttctttagttggtgccctaaagaaaaaagcaggatgctgtgtttcttggtagcagtatccccgtaaactttaggaacattgtgttcatcgttattgggtgaaccgttggccctgtccatgtgttggacaattccatgtcaattggttcagtaaatgatggcacatttctctttctcaatttgttagcttggtctgagtcaactttagttgtgctcatccatataaatgcacacattattcttcctgtctgccttttatacttcgaagaaaagtatgatggtgcccatttcagggtttgttaatgctgtctgtaatacttgcagaacacccgtgagacagcgtttgccctcaggaagtt

SEQ ID NO: 112961 - DNA, 459 bp, Setaria italica
  Intron number 1 from transcript Si005884m (locus Si005884m .g) derived from phytozome v7.0 (chr-ID scaffold_4; pos 33 051240 to 33051698)
aaaatcaaggtatgcgtatcactgataattgtcagtttgttataatgaaatatccacatttttttgtagattgggttctacataacaaaatttgatgagatcattccaaatctatttgtactgctaaaatttacatactgcaccatatcttcttatgagctgtaccgtagttttgataatttaccacatatacgctgtgcaattcagttgtaagttgtagccatgtaattccaattgctcatggatcgattgcgggcttggactttggaatgggtccaaattctctcatgaacacatgctattcatgaaacttttcgttcctaatttgtgtagtttttcttaaacttgaacattgtttcctttttggcttgttatccaactatatttatatagtaaaataaatgttgcaagatttgtcctgaagaatatagttttttatggtaggtggctgcttgaatt

SEQ ID NO: 112962 - DNA, 1045 bp, Setaria italica
  Intron number 1 from transcript Si031382m (locus Si031382m .g) derived from phytozome v7.0 (chr-ID scaffold_2; pos 30 948047 to 30949091)
gcgacaccatcgacaacgtcaaggccaaaatccaggtgcgtgctgcccccttccggttcttgctcgcggcttgtcgttgctcccgccggcgagtcggtagctaggcagtgaccaatttctgctacgagtcgagggttcgatcgatctatccgcgctgctgtcgatgttttaagtttaccctagttggtatatttatcaatccggcgttttttggattgatctatcagatttatgttcaagtttgatttggggaattatctaggtatttaggattgctggagggaaagagattgagcaaatatggcatagccgctcagattgtgtgttgactgcttgagcaaataacgttcagttccatatgtaattttgctattttaaagacaattacgcctaaaattgattgagttttcgtatttctttagcgatgctattacctgttaatccctgccatgttattttgctggacgtagttactcctcaaagtgagattcattttatagtggtcggtacaagttgtatagtgagcaattcaattccttgcactcatggcaatggttattaagtccatgacgaagccaggaaggatatattcccttgttttattgttctttcgattttaaattaaccttttgaaaggaataaatgcttccactgattccacattgaggtagagttcaatgtttcaaagcataatgttcaaatgactcattctttttcctggcttattagggatccttttacattatttcccaataaattttctgcctctttgctcttttaccaaattatcactgtttttaaagataaaggtctccatatatatgtattctctgtccagtcagtcaactcctattggaaaagtttgtgtggaatcgttgtctttcaactttgagaattagatgcttgatttatataatttgttcctattttgatctgaatcatgcccctgattttgctacatcctgcaattgggtgctgaagagctgccatgttattttgcacactgtcaggacaaggaaggaattcctccggatcaacagcgtct

SEQ ID NO: 112963 - DNA, 1008 bp, Setaria italica
  Intron number 1 from transcript Si006424m (locus Si006424m .g) derived from phytozome v7.0 (chr-ID scaffold_4; pos 32 527212 to 32528219)
ccgtcgacaacctcctcaccaccggcgagctcgcggtgagtcgctctactgcttaattgctccaccccgtgaccaatttttgttttgaagccctgcacccaattaattagacacaattgctaaattcccaaattcgctcatgttcttacggcaaaccctgaattcctgatcgaggagaggaaaactttacggcgtctcctttcttaatttagacggaaccaataattgccgatgtgtcacgtttaattaagcgcaattggcatatagaatcattcagctgattgatggattgcctacaagagggggtcaagaatttgggcctaaccaaatcgagaaaacaggtggtctgaacgctgaattggactgcaaatcctcgatggttgtactgtaacctcctagcctttttagttagttagtgatagtgtggtgctagaaacagcaaagctgaggtgtgacgtgatatgctcaactagctatctgtctttgtccggtgcctggatcttaattctgaaaagatatgtcctcctccatctctggagccgaagtggcaaaacccctctgccaggatgcatgtaattgacatcacaacagctattcatgctgatgctaccgggagccaactgatgaatacaacttggaatccctgttgtagatataaatcagctattcattcctgaattttgcagccaccaaatgcgatttagtcagcacaggttgtcatttactcggtagacaagatagcaattgtctgaaagagatgcttaggagcgtttcgaacatgccatagtcaaagagtgggattcctggtactcacatgcgtgcgcattcattcaacaacaatcccgtcgtttactggcaaaagaacagttacaatattagagtaagaccacgattttatctcaacgacagcttcaaaatcctaacagtggttcaatgtttctaccgctttcgtttgctccttgctgaacggggatattctaacgtttttcttcacatttttttccagct

SEQ ID NO: 112964 - DNA, 601 bp, Setaria italica
  Intron number 1 from transcript Si006647m (locus Si006647m .g) derived from phytozome v7.0 (chr-ID scaffold_4; pos 30 752272 to 30752872 reverse strand)
cggccgcggcgactcccttcagggcttcaatctgtgtacgtttcacgggtctcattcccacctaatatgttttttttaacacgacttgaggggatatcgactggatttcatgtcgctgtggatgatattttggtcatatcaaatttctcgtctttgttcagtcaaatatggtcaaactggtggcgaaagcacatttcccttcttttaaaagaatacgtttcaaggaagatttgataaacagaatgaccaaattttcggtggcatactgaagaagagagagtccatcttagcacaaacaaaaaacattaataaaaaattggcactggtagtgaaatttctcaagcttgaattcatgtccggagataagttaatttatgacaggagggagtatacaggcacccagcttgtccatctgttctgctgtatctctgtacttatgaagatttttacaacttcccttacgaatttcctgaggagttgcctttggatctttatttcactaattattctgcctttatttattctccttgcttctaaacaaaacactaacacaagtaatcctgcaggactggcagagggaagttttcactggcagccatca

SEQ ID NO: 112965 - DNA, 859 bp, Setaria italica
  Intron number 1 from transcript Si028137m (locus Si028137m .g) derived from phytozome v7.0 (chr-ID scaffold_8; pos 60 91152 to 6092010 reverse strand)
cgacggcaacccttacctcctcggcgggtgccaaggttagtttgctactcctcctactcaagctagctggttaatttgcttcatttgtgcctgggtcaagtagcaagtgaatttgtcgatcgatccatacactgttgcaagctggaacttccatcctggaactatgttcccctgatttagctcttgtttacttcactcccaactcccaactttgacactatgcaaaaagaagattccccatcacatcaaacttgcggtacatgcatggaatactaaatgtagatgaaatcaaaaactaattgcacatttttgttgtactttgcgagacgaatcttttgagcctaattagttaatgtttggacaataattcacaaatacaaacgaaatgctacagttgcgcatttatggcaaaatgtcaatttggccactcccaaattgggaagtaaacaaggccacaagcttcgttcgttatttacaaagtgcttagaaaataaatgcattatgttaggtagctacaagacaaatattatatacgagaaaacaattagtgaagtctagttttaaagaccaagccaaattataaagccatggacagaggtgggtatttgtttttagctttaaatcacctgtatttgttttaaataatgacaatgactcgtaacgtagaagtaggtttggaggtttttgagttaattgttcgtgtaatatcactgctgggtaatttatctgcatttacaggtaatttaggctttgaggacagacgtttaggatttttctgttagccaaatacaaaggccatagatagatttcagccatgcctgtgttaattgcttcgattgactggtggctgcagatattg

SEQ ID NO: 112966 - DNA, 385 bp, Setaria italica
  Intron number 2 from transcript Si030506m (locus Si030514m .g) derived from phytozome v7.0 (chr-ID scaffold_2; pos 45 660908 to 45661292 reverse strand)
aggaaaaaggttcataattaggacatccttgttttcttatcctttagttcttgctgttattttctctcttgggttcttgattatgttgctcctgttttgttcctttggtgtatgcttttgatttcatgttgatgccatgcttcgaataggttttgttgtaccttgcttgtcatggtttcatatccttacatatggttatcaatgcaacaggagatccagcatatagctttgagaattggaatatttgttgttttctagttatggagcatatagcatatatttgttgtaatcatagagggaacaaaattggggtttctctttcaccttaacctgtgttttttttatcatcttggatgcagattttcaaataaacagttccattttc

SEQ ID NO: 112967 - DNA, 829 bp, Setaria italica
  Intron number 2 from transcript Si033056m (locus Si033056m .g) derived from phytozome v7.0 (chr-ID scaffold_2; pos 56 32726 to 5633554)
ctgccgctccaaacgctcttctcctgcaacagtaagtttttcgcaacctttttcttcatgcatatgtcgtccgtacgttattttgatccgtggattagatatggctgcaaggagattgaaaacagcatggtgtgatgtattttgacagcgcaacaagtgccgccgataatgccaccgatggcggtgccggcgccagccaatcctccagggtcaccaataaggtgatttatcttctttgacacaccttattctgactgatttgttgcagtttgtgttgtaatcgccacctaatatcctttcattttgtcttcaggtaatatatgtcatagcagtagcaactaccaagaggatcagagcacggatggtgtgcgtcaacgttaccactaggggtagtggggtacagtcttcttagttttaagttgctcttaggataatagcattgttaaggtagaggggaattgtacttattggtacggatcctgtaatgattccatcgatggatgcaaccgtcaaatgaggatatatattagtagatgttaaataaatataatggtgctctatgttatgacaccttggatctgacgatctgatatttgcttctgaatttacttgcaagatgcccgtgcgttgctacggcgaaacgatgtgtcttagtgcacgatattttttattatgtcgtatagcgcaccatattttttatcgtgttgtgtaacttttttatcaccttgctcccgcggtttgttgtgtgtgcggtctccatgtggttgggatatggacacgctcacgcggcacagtcgaggcggctcgagcgcggtcgggtgcagctgcc

SEQ ID NO: 112968 - DNA, 613 bp, Setaria italica
  Intron number 2 from transcript Si026126m (locus Si026126m .g) derived from phytozome v7.0 (chr-ID scaffold_8; pos 33 168232 to 33168844 reverse strand)
tctacaatcttctgctgctgctgagttccaaggtaaggcctttacattttttccaaataagatattctttattagctagcattagataagacgatagtaatttaaattgaagtattgactttgaattgaaaagctgtcataagtgacatggaaattattgtgctattgactaggctatctctaaagaccacagaagtgaatcttagaaatttggctccctgtccatgtcaccggtcaaatgtttgaatcagaaactctagaaggaaactacgggatagatctcgtaacactgtaacacataccagtggagtggagcagtgaattgcttgacccctttcagcatgctagtgctgttgcaatattctttgcattttccagggagcatcaaggcatttacattgagcaaagttaattttccttagttgaaatagacagcttcagattagcataatatactctatgacaccctatatagttaagcgctacagaatccagattgcaagtgagacactgaatagattcaataagaaggatttaaccacttttttgagaactcgagttacatcaaggccccagaaataagactctgttttgtctgcagtcgaagcactgt

SEQ ID NO: 112969 - DNA, 652 bp, Setaria italica
  Intron number 1 from transcript Si007168m (locus Si007168m .g) derived from phytozome v7.0 (chr-ID scaffold_4; pos 18 52076 to 1852727 reverse strand)
cgtcatcctcggcgccgactccaggaccagcaccggtacggcatccgacgcctctccatctgtgtgtgccgcgggagatcctaccacgggcgagggttgatttggcgcgggggatggggttggtctaggttttcgcttggatcgttgggaattgagaggtagctggtgatgttggccgctgtgatggccttttggttttgtttttgattgcttgcgagatcagaggactttatttgggtactagcagtaggatagatagaatgatgttgcggggaagttggcccttctctgcttcctgtttggattgtcagatcattgatggaatatagaatagtccaactcttgtttagcatacaatcaattgtctttgccatgagcccatgatagtggttgtgatgacaatgaacgatgagattatgtgctcactttgctttcaaggatgtctttggtgttttgtgaaccatgcatccttttgattaacttatgtcttcttactggaaaacatgcctccttaaagttcatgtagtgtcggtcaaagtagtccagaaaatgctttttctcctgcttccgccaaataaatttgatattaggctgttgtattcttgtttttatgctaaattttaatatttctttgctgctcaaatttgtagga

SEQ ID NO: 112970 - DNA, 952 bp, Setaria italica
  Intron number 1 from transcript Si007645m (locus Si007645m .g) derived from phytozome v7.0 (chr-ID scaffold_4; pos 99 98226 to 9999177 reverse strand)
ctcttcaggaacatcaccggcaacccggaagtcaggtccggatctggactcttcactcttttacccgtttgatccttgcaagagatgtgctgtgcgtgctggagcagcgtagatctgctgggtttgggtgctttcgttgagtggtctataagtagttcaagttcactagtcagtacccttcagttcttcctcgtttggactgttagacccatgggttggagttgacttaccaggctatggttgtatccatcaggtgaaattttgtggctgtagtttttctatgttgggaaattcgttctttctggtcggcaaggttgaaaattacaagacctttcgtaggaagtcaatcgttccaagatataaagggtccaaatacatgaagtaaattttttggtaggagttgaattcaggactcggttaattttggaagcgtaacataaggttggaaaatgccacagccaaactgtatgcatgtccttttgttttttggaggacatcttgttagtgtagttgcatgctggtaattattttcttttgagtaaaagcatgagcttgatcatgcatgtagtacctcttgttgcatgaaaagccacaagtttgagctgtttgtgtgtgtgtgtaacatgtacccctcctgtataaccaatgctgtatgcatacatgtttactgtttgtgatcttggactcttgttcttcttaagttcaagtggggctaatgaattgctgttttttacatgtgtggtgtgatctgtataaattataatgcaaagaaaatggctttctataactacaacttggtttcgtatcgttgtaacaccacttatatgaattgttttaattcatgctgtccaattactttttagttaaagaaccatgtgcatgcttgatttgcgatctaaattgcttgaattttacagggtaaacaaggcagggagggcagctggtgtccttg

SEQ ID NO: 112971 - DNA, 615 bp, Setaria italica
  Intron number 3 from transcript Si006286m (locus Si006286m .g) derived from phytozome v7.0 (chr-ID scaffold_4; pos 37 549207 to 37549821)
ttgctgttgatcactaccatcgttacaaggtaaggtggcaatgattgggatatttctttgttatttgattctgtttagtttaattcattcaattgttccatgaaaactggaaatttctgtttttcaaagcataaaaaatcccttcatacatgattcttggcatttgtatgaaaacttgcctgcctttcatctggccatcttctggcaattttaatttggaaaaatcgaaatcgtgtatgcattttcttgttcctttcgtgtctgtaagaatcattctatttaagaattatttgacataattatccttgcttcatcttcctccagtaattgctcctctttctcgtgtgttggcattagtttaccaaacacacaaaatataataactgctagtccacttctctggcatgctgctgccaaaaatagaatagtgagaagatgttttcctgaatatgaggtgccatttgtatcaacaagaatgttttcagagatcaagatttttactattttttctcaaattaggttaacttctatggctagtttgttaactgaacaagaatatcggttacattgaaataatatccagaaatgacaaacctaacactgactggcaggaag

SEQ ID NO: 112972 - DNA, 946 bp, Setaria italica
  Intron number 2 from transcript Si031085m (locus Si030973m .g) derived from phytozome v7.0 (chr-ID scaffold_2; pos 46 448286 to 46449231 reverse strand)
tgcaacgaattgggctttattttccctggtatcaggttgcagaattagtattgttggatttttcacgattcgatcaaagttgctgctcttacaagagctgacgttagatgcatgattcgtatctctcttcatagatgaaattagtagttgaggtcttgaggatgtgcaggctgcagagaatttccctgaaaaacataggatgtgcgcttgtgcagccaaggatatgttttccatgtagctagatgtttcagctttaccaaccgttgctgagattaagaagcacacacgcaaaaaagatggtggtattagttcatccccaacaaaatagtgtcatttgatcctgacctcctgagtcaggagtcgggagtgggattagaaaattcgcgtctgactgtgacgcacgcgtatcactatcctcgccttccaagagtcgtctcttgttcggcttctgttgcatcatgccatcatggtgggtatgttatgtaattcattccagaaggctgcagggctaaagaaagtagtagaatttgacgatcgcaaacaaaaccaaccatgaaacgcatggtgctcctccctattgtcacattgtctatacctttcaaaaattttgtgcactgcaatccgaaaataaaaaaccaggacgttgagggtgttttttttaacaggagcacattattggatttacatctctcctgcatatctttggaaaaaaagaagaagtaatattgtgtgcaaaccaaaaaaaatcaatgtgatcatgctaaactctgtttgctatgattccttgagcaacttgtttgctgaattacttgccctagctttctctccaatactcatttgactcatctgatgtcttttatgtgcctcaattagtctatctgatgtatgcattggcattgtcatcgtagcaggtggttgccgagaatactgtcggttggacagtgga

SEQ ID NO: 112973 - DNA, 835 bp, Setaria italica
  Intron number 1 from transcript Si029337m (locus Si029337m .g) derived from phytozome v7.0 (chr-ID scaffold_2; pos 24 33788 to 2434622 reverse strand)
ccgcgcggggcatcaccaggctcttccccatccaggtacctcctctcctttcgcgttctgatcagaagttgcagtctatcactcttatcaggttaagcttagtttggtctgaatttctgaatggaaatggtgtccgcatccttttaagcttctggattgttaggattcttgggacgtgactcaaattacgcgctaccaaagtgctagctttaactgaattccatggaattgtttcgtgtaaccacttgtgtagttactaagaaactcagaagatcagaagttcagaacaagtgccgtgcatctgcacatgtttccactgccatcttaattgaaaagacactatatatgtaaatatgttaggcttacaatctgactcagagatgcatatgagctgagggtaactgaaattgtggctttaatcgagtttgatataattgtgtcatggaagggaggaaatggcatttcatactttttagcatcagggctgtatagtaatctgtatgacgcaatgtgagctcttgattttgtatgctgcaatctgttgataggtttgcagcgactttggttcaaaccttaagctgtatcattgcttggaactgttaagttggaatcagtggattataatgcaacccccctgctatcctgctgtatgcttcccatgagcctaaactagttataagatgccttttttgcttaaaccaatataatggctccttatgttgtgtattttgtaactaatttctgtgtgcaatatattcctgtgtgaatatgttggatttacaatctgatcgggttcatgctactttgttttcagagggctgttcttgagccagca

SEQ ID NO: 112974 - DNA, 1029 bp, Setaria italica
  Intron number 2 from transcript Si033768m (locus Si033768m .g) derived from phytozome v7.0 (chr-ID scaffold_2; pos 39 150648 to 39151676 reverse strand)
gagccagagcacgccttgctctccgaggtgaggtttcctgcactgtattaacatagcagctataggattttttttttgccttttccgttcttacggaccggatagatccgcccagggaagggtgggttctgggttgtgcaggcggaactgcttggagcgtttggtgtaatccactagcaactcgtagattagggcttctcgtgattctggcggcggaaacagtgggtttgcgcgggggctgatgctactcgaggtctcgaggatatgttcacttgtttcctcaggacaacaattgttttctacttctgacgtgccacgacacattccatgaattggttctccaatctgtggaatcctgtgtcaagctgcttattagctctgtgtctatcctttgatgggggtcgccattggcccgttgagtggaggctgggattgtatgagtagattgtgcgctatccgttactggcttaatctcttagttgaactgacaggttataaaacttaactagaaacgccgcgccctttagttgttttctcatccctagctaccacaatttcaagaaacaccaattgtggcccatataaatttaagcccatgtcattgcacagtggcgcccatacatcaaaagtgatgaatgtttgttcagttttatatgatcatgattcttgaagctgtcttccagcatttattgcagtttacactgctcatttgtacaaaataggaacatggagacttccattgaagttggtatgatcttgaattgtgttaggcataaccattctatgttcttgcctgaagacacaaactccagcttttcagcatgacaataaacaaagataatgataattttgcactggtcattcttccaagttccaaccatttttctatttactccttttcatagtgttatgtttctgtttacttagcatgctttttcattaccattctgttgtgatttgttgaattcctatcttactcaagttatacacataggactgcaatttgcatcacgtggtgttgcttcacag

SEQ ID NO: 112975 - DNA, 716 bp, Setaria italica
  Intron number 1 from transcript Si029594m (locus Si029594m .g) derived from phytozome v7.0 (chr-ID scaffold_2; pos 45 629060 to 45629775 reverse strand)
cctcggcgcgcggcggcgtggcgcggcgcgctccggtaagatgagacactctgacactcagcatttggttgccgcatgtcctttgttcgctttgctggatccttgcatgaccgtacgttcgtatcctggtgtaatctcagagcatcggttgtatcgcccggggtaaatgtgccatttttatcctgttccgggtgttacattatgcgtttgcgatgcgtaatgcgtgtggagtaggattattccttggattgttctgaggatatttgattcttatatcttggtgtagtgagttgtactaggttagtctgctccgggttttggcctcgctgtcaggttcccctgcttctgcttgggatgcatttgcttgtggctactgctgaactggtgatttcaacattattttctttcagcttgtctggctctgcttgtttgcatttcctttgttagtagcacagagttttgacttgaaaattgagatacaatgggcgttgctcattcctgtataaaatagaaagggtgggtgtggaagactccaaaatgctaaaaatacatcttacaagaagagtcacatttattatgccctattttgcatcaagcaaacatattctttagttttttccccctgcgtgcatgtttgttcagacatcttcaggctgctatttgtttgtcactcaagcagataaggtcctcaacaaaattggttgtggtttgcagga

SEQ ID NO: 112976 - DNA, 967 bp, Setaria italica
  Intron number 1 from transcript Si028782m (locus Si028782m .g) derived from phytozome v7.0 (chr-ID scaffold_2; pos 46 203894 to 46204860 reverse strand)
catcgaggttgatctaagcaggaacggcttctcaggtaccttcccttttctactgaaatgtacatatctcattgaattttgtgatctatcagagtaggattgccactgtaagttgaattttggtgatctattagtttgtttcttgtgttgtttaatttcttgatgatggggatggcgagtggctcccgggccaaggtgcttaaaattgcaagccgcgaatcagatcttgggcattggtgcattcgcagacatgcatgtctgatggaaacggattcctcgtgacgacattgcaaaatgatcgctgtgtcttgaatctggaagactccatttgcttggaggatttgatgagcatagataaaaacaggctcttccatcaatgccgcttgtcgtggtgtagaaagtgtgccgttttccttttgacggatatggtcatcaaccttgtacttgcatgcatgctggcttacaattgattttgagaattatttttttcctctcattttagtcatgtgcttgcttttctagcatgtgatgttagcaagaatcagttacgttactaagaaaagtattagttcggaaccgactattttctgacagctggtgcctggtgattgataagcgaagtaaacattttttgcctattgaatcaactatcatgttggctcttgatttcttctaatgtagacctgtttcttggtctgagcctatcatgacttttcacagttcaatcaagaactttacaaactatttgaataccgtgacatgagattgactattggaaatgtatacacattaacatttgatcatgtgcgagtttaactaatagtctaatagtattccacttacatgtatcctgtcttgtttacagtcatttacagatactttattcattgatatttgtcattaaatgatgcatgtgcccttaaactttgcagggtcactgccgatcgtgaactctacaactttgaag

SEQ ID NO: 112977 - DNA, 925 bp, Setaria italica
  Intron number 1 from transcript Si033204m (locus Si033204m .g) derived from phytozome v7.0 (chr-ID scaffold_2; pos 40 291668 to 40292592 reverse strand)
gccagcgctcggcggtgaagtaaaatacaatttgatttcacctagcttctagtttattttaattccgatttacaaaatgatttcattgcttaaatttgcgcaaaacaggtggagctaaagctaaaataagctgccaaataggatcttaaatcaagctatgatattgcattgcccgatcttatgcgtgtaccagccgagccattctcttttgccggtttgctcaaattaaatagggaaaactatattgtgcatgagtttttttttcttctctccatacttaattttagttctactgacacaagccaatccaagactactggagcttctcctttgcatccagtgaggttagtgtcgagattgggatgattgaggttcggggttggaattgccggaatgtgcagagcctaatgggaaggctaggggtggctgaggcctcgttcatttcctttggaatggatccagtccaggaaccgttccaacccaggatcgagtggatccccttgcttcactcaatcctggccaggaaccattccaagctcaggaaccattccaagcccacaaataatatgttcggctgtacaggaattatttcagggctagagctatttcaacagagctatttgaccaaaaaaaattgttcttgaagcaacgaattcaaccaaaacgaatttagcaacaaaacgcttgtagcaacaaatttgttcttgaagtaacatttgtattcgacagagccatttataagtagcattctccttttaggaataggaaggcacactaagcattaatgtgatggtggcatgtgatttcgatctcaccatcacttttatttctagtggatgggagggatcagctacagatttcagagtgctaagatcggctatgagcaagggcttctaggtacctccaggcaaattcaatctggttg

SEQ ID NO: 112978 - DNA, 602 bp, Setaria italica
  Intron number 1 from transcript Si007004m (locus Si007004m .g) derived from phytozome v7.0 (chr-ID scaffold_4; pos 32 752102 to 32752703 reverse strand)
cggctcctccacctacgccttcttcggcttcagtaagctccatcgggtccctctcttcctatgttttctcttgcgggggacgttctctgtgtttcctttctcgttcacatgattctgcatggtccctcaaccttttcattttctaccacgtgtttcagctctcacaaagtcgcagtgagatcactctgtctccgagtctttgtaaagtgaaaaaaaggggggcatgtcccacatctcaaagtcatatgaaactgcataaagagggcgcaaaggaataacacgcagtaacacagagaacaacaagacagggacacagggctaccattcaataacatcctaaattcgattaaacaagttaaatgctggcatgtcttaggaagagatttaggaaatacagaaaccatgaatggtgaatgacaattatgaaaacataattgaatgaccaacttttatttgcacttttttttgtcaagtagtagtcactaatagacataagcgctggagtagttgcttattagaaactggattaaagcagcattatattatacgtttctgcatttgttcttaccattccaatgtttgtcgacaggaactgccggtgt

SEQ ID NO: 112979 - DNA, 763 bp, Setaria italica
  Intron number 1 from transcript Si031712m (locus Si031712m .g) derived from phytozome v7.0 (chr-ID scaffold_2; pos 10 817626 to 10818388)
gaaaaaaaggtaagaaatcccaaccggtgcctgcttccttctaaattatcccaattatttttgttcctttcaagcattgaagtgttcaagtgaaattgcaagttagaggaaaatttaagcttagtgggacttagttgtgatatttctttagcatgtgtgataatatgtgattgaaatttgaatcagctatgattgacaagtaattgatggaagaatttataagaggacgttgcagatagtgacagcaatgatttcatgtctagaggaaatgaagaatgccattctatatttttcctttggggaaatttagtactgtggtattgtatttcatatactacctcgttcttaaatatatgacaccattgactttgtttcattcgtttgactattcatcttttctccaaatatttttacaaatagataaatctacatgttaaatctaaagtactttagacaatagacataatggtactcattttactttatttaactaattcattaaatagatgttggtcaaagttggagcaaaaagtgaacaacatcatatatttaagaacggagtgagtataaaattaataaataaataaagtgttacagtagcgtagtggagcacaaaaccacaaaaaggccaagtgaaggaaagaagagagaggtcagagaaacaactttacagaaggctattcggccagatggatacatttatgactaaaaggactaaatctgtgcaggtgaatctttacagtatccagaaagcaaattttcc

SEQ ID NO: 112980 - DNA, 534 bp, Setaria italica
  Intron number 2 from transcript Si026614m (locus Si026614m .g) derived from phytozome v7.0 (chr-ID scaffold_8; pos 28 1841 to 282374)
gattcagttttggtacgtctgttcttaactgaggatttattttcatcttcagtctcctagttcttgtaacagtgctaacgaaaatttcctaccgaaattttatttgaagaaaaatgattcatacttcaactcggatgatgtgtactcttctgtcaatgaaattttgatttcaaatgctaatgtaccaaagtgttcactgcatttcctttcttaactattgaagaataatttgaacacaaacctataaagtgccctgactattgggcgtttctactgaacctgaaagctacactcttatagacttcattggtgtattttggcaatgtgtctgctgtgccttaatggccttaaccaaagtaatagaaacatgattattaatttcttactgtatgttacgtagttgcatgttctaccatatcctgcaccttctcaacaaaatgtacttgggcacttggatatatctcctgtcatattcttaaatacattttcttttttgcagccacaacattaactgggcttcattttgtgactacc

SEQ ID NO: 112981 - DNA, 963 bp, Setaria italica
  Intron number 1 from transcript Si008246m (locus Si008246m .g) derived from phytozome v7.0 (chr-ID scaffold_4; pos 33 589483 to 33590445 reverse strand)
taatcacgcctgatcctaacgagagattccacttggtgagcatgtcctctattgcaattgcgattttcatggagggcatgcttaatttttttttatttttgattgcaagcattcaaagagtgattgcaacctcaacctcccaaaatgggaaaactaaactgtgatgtttgtgatcgaaattgattttagatgtagattaggggagctgtctggttgcaactggtaaaaaaaatagttgcgatgatgaattatgtttttgtatgcttgcaacttgaggcatggattgcatcgttgtgtataggttgttttgcaccttgtatgttgcaacttcggatgcattggttgcaacttcatatgagaattgcaacattagttgtaatttgattacaactaatggctacagtctaattgcaactctatctctatctgtgaggtacatgcatgcaactagtgctaattgcaacttcagatgagaattgcaacattatttatcgcccgaccctagctgttcgcccgacccctctttccgtctcgcccgaccctgtctgttagccgacccttatctgcctcgcccgaggactcggctgtatctttttccttgacccgaggattgcaacattagttgtagtttgattgcaactagttgtgatactgtgattgcaactctatctgtttttggttatatgccagaattcattcgtatttacctccgcatatttttttcgcgggatccaaacatacttgatgtatttatcccaaggctgaggcagacatttgagacaaaaaaaagaagcctacctcttttactatgattatgcaagactggtcgggtttagtgtgagggtgaagagaactagcaaggagactacacactagttttgcaaccgagaggggtttctaaacagataaagagaataaccaaccacagattgaaaagacatcaaagagagtgggctaccctac

SEQ ID NO: 112982 - DNA, 743 bp, Setaria italica
  Intron number 1 from transcript Si008018m (locus Si008018m .g) derived from phytozome v7.0 (chr-ID scaffold_4; pos 52 40211 to 5240953)
acgaacgtgtgcggggacgaggagacctcttccttcgtggagaagctccatggtggatgacgttagaagctccatagtagatacaacgtcaaggtgtcggaagagtgagtagtgtcccttgcctttgtggcaagcttcatccgtcttggtgagagcctttgtgacgagctcaagaccttaactataagagacttggtgactggaacatatccttggtggagctccaacatggatcactgggggtgacatttgcctaccgataccacgagataaaatcaccgtgccgagtttacatcttcctaacctactcctttacatttccaccttttattcttgtaacttgagggtatcctattatgattgactttatgtttcaaaactctttgcggatgcaaccacatatacacatttagatacataaactaatccatgtttcaagattttaaatttgattaattcaccacttccctcttaggttagggcactgattccttgcagtttcctctaactactacacggttagtggtctaaccgtccgatccagccgttgaccagcgtccatgagaaaactggaggcaaaaaaattccactcgctcatctcacaaaactggagggatcaagtaggaagcatttattatcaccgtcgtctaagctagattcatcactcgattcatctagctaccgcacaaagaatcgcatatgatgcagttcagcggcggcacggcaagcgtgcttcctccgcg

SEQ ID NO: 112983 - DNA, 448 bp, Setaria italica
  Intron number 3 from transcript Si026140m (locus Si026140m .g) derived from phytozome v7.0 (chr-ID scaffold_8; pos 36 244190 to 36244637)
tcctaaacctcatcaggagatccccatcattataggttcgtgaattttcagcatttcacagtctaatacgataaacgtcaaaattgcacaccgtttctgtatacttgaccctgttacaacaaagatttgaatattgatggatagtgtcccaacccacatgactttactgcccccacagtaagaattctttttataaaaatgaaatggctctagcttcttccactgcacacagacatatccctatagcattctcatcagaacattaggtgatccaaaataacaaggcaaatagtgcacaaagagaatcaaataattataacgcaaagtcggaaatctagctggcatacgttctatacttttatttcacaatgatgtggctgaactatttgctgttgtgttcctggtaatgacaggggagtggtgggacctaaaggaccttggacaggtg

SEQ ID NO: 112984 - DNA, 897 bp, Setaria italica
  Intron number 1 from transcript Si031132m (locus Si031132m .g) derived from phytozome v7.0 (chr-ID scaffold_2; pos 98 36913 to 9837809)
tttccaatttttctcgaggtttaaaggctttggtggtcaaatgtagaagcccaacccaatcaaacccaacacctgtagtcgccaatgggctacagtggtaccctagcaaatgcattcgctatgggattattttctaatcaagttgtgtttgttggactctcggtacccatgaagatggaaacggtccaccttatagaaagaagaaaaaagaataaaacactaacatatgctgtcatattgcttattagtcgaatgattcaagcgtgacatatatactttgtatacatacccctccgtcttcgttttgaattttctagatacatagacttcaatatgtctatgtatttagatggatgctatgtctagatatgtaataaaaattatatataaaaaatcaaaatgaataataatttgagaccaaaggagtcgtagcattcaaccatcatcgaaagtcgtacacgacggcgtaagaaaaacgccccctcacgcacgcggcgaagcgtagaccgctcgcgtaaattattcgaagcaaaccggcgcgggcctttcgacgggaagaagaaaagtcggtgccaacaacttctttctcttcggagacctccgcaccgaccgcggcgcttggcccactgcccagttggcgttacgaattgggcatgtgaaagcgacccgcgcccgccgccgccgaaccgcgcgcagcaatcaaatcagcgcgtccacatgcgtctccagcctggtccacgccgttgcgcgcaccacgcgatttcctctcctctctactagtctcttcccctgggccctggccgattccgcaggaactttatttgtttatatttttttaaaaaaactaccaaccaatcagcagccaggcgccgtctgtccaggcccggcccagcccaa

SEQ ID NO: 112985 - DNA, 794 bp, Setaria italica
  Intron number 1 from transcript Si028136m (locus Si028136m .g) derived from phytozome v7.0 (chr-ID scaffold_8; pos 93 57017 to 9357810)
tctactacatatacgaaccagtcttgaaaacaggtcgggaagaataactacaccagaaataaaatgaattatattatgagaaataacaaaatgtaacactcaaagtgaaagaaagatgacaaaggaagaaaataaccatgttagaatgatgaaggggccgagccttgctagaccgcctaaaagcacgagccaatacactcttcatcaaaatcctatgctttatcaaaatctttcaatagattttcatgaaaacaacaaaaaaaacttgataatgtgattcactaattataaattaatactcaaaaagggcgacacaattagaattgaatgtgtaactaaacaagtatatataataacttacaccaatgtttgaaaaaaagtaatgcctcttggatatattaggatgaccatttggcttctaaaatatgttatagcataaaggcagaaacaaattgagtatgagttttcttagtagtagaaggtgtagtatcatctaaataaatatacattgaaaaatttaagtttgttcaagcagatggaagatgtgagaactgctaaatagccaagattaaaagaataaaggaataacaaaagagtattaggaactaaactgctcttcatcaacttatcaataacttcctcaacagcgggagtgtgtgactgaaaaaatataatcataagtaaagaaagaactagaacaaatcaatgtcatgcaaaaaaaagattgatatatattgtgtgaatttggtgcatggtcagattgatatcctcgatccatccccaaggactgagca

SEQ ID NO: 112986 - DNA, 658 bp, Setaria italica
  Intron number 1 from transcript Si029524m (locus Si029524m .g) derived from phytozome v7.0 (chr-ID scaffold_2; pos 10 598065 to 10598722)
ccgcgacttcataggcatcgccgccaccggatccggtacatcaaaaacgttcaacactagttgcttctattgttataaaaaaatgtgcgtcttgtgaattgcaatcatgaaacatatgcagcagatgaagttcaacactagttggcaacatgttcgctatactatatgatcctgtgctgattagaaccaggaagaagacaaatgcataacttctgaaatgcataaaaaaggtgtacaaggcactgaatattacgtatgatcttgaacttcaaactaggacagcccaatgtccaccgtactacatattactaaagctaacaaaatagacacctaggtgtgcacccaaaatgttcatttggtctcaaaattgagtactgctatgccaaaaaagaaatgcttaggctcttagcacgaggccattagggaagaacccatgtgtgcagacgacagttccaagtgtcaaaatgatttagtttgtataggttacaaaacgaagaaaagcaaacactagtacacttcatgttattttggattagaagtgaattagaagaggttattcctttccatttggttattcctttccaaatttctgatgaacttgttgctttgcgtcattcgggagccagggaagacgattgcctttggtgtgccggcactt

SEQ ID NO: 112987 - DNA, 949 bp, Setaria italica
  Intron number 1 from transcript Si031701m (locus Si031701m .g) derived from phytozome v7.0 (chr-ID scaffold_2; pos 21 897132 to 21898080 reverse strand)
gtaacaaaaaggtaaaatcaagtgttcatctctcaattcaattggaattcttagcatctcttcatgtactcactgtggtactatgctgtatttgtgtagacatttcaagctagcaagaattggacaatagacttgcctaggccaccaagaatagacatgattagttcttgtgttagtagagtatgtgttaatgattatgtcatatatgtttacttaaaaaataattgtgttatgacatcttaaaccgtcgtatctgtcatttatttgcatttggtgattctactgttgtgatttcaatataaatgtcgcatgcgaatgccgtcttttttttgttgcacttatgttcgacgtgcaagtctgccccacctaaaattttcagccagctctgccactgcctacggatgctgattaaatacgtacaagttgaacgtagcagtccatctttactctgtatcagtaaccagataaaggcaagacattggtataaccttttctttggctaaccatttagctagcacgtgctaacagattgataatgatattgtcataaaacaaaaaaaaacatcaagattcacttcctcacttcttttaaagttcatcaaaatacaaaaacaaaaccccagccatatagttctgttgcatattaggtaccagtacaagtgcataatcactgagcacctagcataatcatcagttgatcatgtacgtgattatatttaagcaaaaaagtcagaccctacatattagtgtaaactccatgatgccaggagtatagtacagtacatccacaaatgatgatcaaaattcacgtccctttcttcatgttgcccattgtattcctctgtagctctgcaaaacaggccacatcctgcttcttatttccatgtaatctatctgatgactatgaccaagctttgtttgaaaattttcaggaacaaggaagaaataa

SEQ ID NO: 112988 - DNA, 986 bp, Setaria italica
  Intron number 2 from transcript Si031759m (locus Si031619m .g) derived from phytozome v7.0 (chr-ID scaffold_2; pos 42 636843 to 42637828 reverse strand)
caaggccaacaagctcaagcagtcgctcccgccaggtccgtgctccactgctcctcccatgacccccccgcatccatcggctgctgcacctttcgttcgttttgcttgcttgccagtcgactgtgtctgtccgggtggaatcagatgaatcatttacggacgggtgtaggccatgttgccggtgtgcgagatcgataggggtagcggtgcctaaacgactgaatacctgtacctgatgcttcgggtaatttggcgaagaaaaagctatacttgatcggcatactgggctgttgctggttggatgcgaaatcctggtagtttcatgtatacattgactcgttctatttgtgcgacatacgaatttgattgagcccatttgtctgagacattcagtataatgacaattacagataaatcagtggatagtcatatatgttattctggatagtctagaatctagatcttcctatttatatagcctggaatctttttttcattctgatggcttgcagttatcatggcttgtcaccggatacttgatttgttgtcagtgtactacacaaataggatgatcggtcagtgtgcatgatcttctgctagtttgttgctgtcattgtgtatgacataatgctttctacctatgcatggctactgtaaccttggactggtgtttatcctactattagttcagactattgtaagtttgtaactataaaaccttggtctgaacaaattgtgcagaatatatttatagattcatgctgcaaatatgataatactgtgcacatgttttgtgaatcctgaaatttacatgttctgcatcatgccaagtcattttgatgtcaggtctagtgttctgaatctattttattacttatatggtttatgtgtgtacaatttgcagagttgccccgctttacacatactgattgtgattttcccttcttgcaggcttgagcgttcaggagatttaagtagcaagccag

SEQ ID NO: 112989 - DNA, 746 bp, Setaria italica
  Intron number 1 from transcript Si025997m (locus Si025997m .g) derived from phytozome v7.0 (chr-ID scaffold_8; pos 96 56531 to 9657276)
attggagaactccgaaaattcctccaaaacaagaggtatgcatagattagtagccacttcatcttagtagtttctccgcttcatctttttctgtgccacaccacttgtgtttgattgccattggaagcttacattgtagagttatgaaaatgttccttatgaatttttagttgagcacaactttcacaaattggaggcttcaacgtgagcaccgtaccaagcatatatgaaaagcatatatcacatcaaattagtagtttctccgcttcatctttacacaaattgtagagttatgaaaatgtttctgtttccttatgaatttttaattgtgcacaactttcacaaattggaggctttaactatatggtagccatacactactccattgtagtctttgaaatgctatctattggatgtagacatttaaagttactccctgatatgctatctatcattatactaaaacaattgaactttaaggaatgagactctattatagataaaactcttttgtgtttataaagataatgtttacattataaactaaaatatttacatcaagatcataaatattgagtagagtttagataataaaatacattacattagtaaatttttgctagcatttttaagattttattctatactttgtcacacttcttttcttttatacatggtcaacggtttatcaactttgggtattgatctttactgtcatgttgctaggtacttcattgttattaacg

SEQ ID NO: 112990 - DNA, 803 bp, Setaria italica
  Intron number 1 from transcript Si026142m (locus Si026142m .g) derived from phytozome v7.0 (chr-ID scaffold_8; pos 35 301686 to 35302488 reverse strand)
ccgaccacgccgacggccgcaactcccagccccaggttcgtgcgcgcgtggccccgatctgatttgctaccatgcctgtggctcgtagttggtagaaaccgctaggttgcgggagggtgtgcggcggaatgcgtgatttttcgtatttgatgctggcgcgagggggtcgcgttgggctaggtccgatgtctcgggttagattggttcggttggggcgttatgttcccggagtctaatgtagcgcggtggttattattgccaacctgatttcttattgtggttgttggtgatttgcttccaattgagtaataatacaaatagtgcaactaaaaatagggggataatttgggctctgtacgagttattggttggaatgagcctctttaggtctagtgacttggatgggatcgtttctatacgaaatcttctgttcccgtcagtcctgagattggtggcaggaggaggctaattttacaaacttttaccatgctcgttatagtttgtattgttcttattctgcaatcttagtttttaagtttaataattcatattttgctgatcatgccccactgggtagaatacaaaataagtcacatgttggcatttgattgctgacattttgttcagctactgcatggtaggttgtaacctccaattggattagcagctgcttgtggattcatgcgaaaatatcaatctctgtcagcctttgtacatgcttagcaacatgttttactgttatttcctttggatatactgggctgattgtattcttaacttttgttagcacgagacacagtcac

SEQ ID NO: 112991 - DNA, 848 bp, Setaria italica
  Intron number 1 from transcript Si005925m (locus Si005925m .g) derived from phytozome v7.0 (chr-ID scaffold_4; pos 78 9410 to 790257)
tcgcctactacaagaagaagcccagggacagcgtatgtatgtcttgcgtcgtatgtacgctctgaattctgctgttgggggtcgttagaaccgctctgaattctgctgttgtggaaatctgctctgagctcctcctctgttgcaaaatttgcctgcggttctagtcactagagttacctgctgaaggtctgattgctgtcggagttcctttgcttgtgattcataggctttgggattttccctctcgctgtttttgaattttgaggaggggttgaccagattgagatgcatggaactgggtctggagtctggagcagtgggcataattgttttctagtgtaggaatcattccagctgatgccaattgcgaaccatggagttgaggggccaaccaatgttggaattgttgaccattttggataattagatgctttaatgatcattagactccgggaggtgctgaataatggcacacttgtaaatagtagagttttggtcctcagctaatcatgcatcatgcaagcaacttgtttggcctgcctagacttctttagtgtaccaatcattcaatataatgattagctgtaaagctattccttccacaaatgcaacgcatattctgtgattaagaatataaccgctaattgaataaaagtttcctttctaacaagtttgtttccgtattcatgctgattctttgccttaatgaatcaatccattccagtttcatagtagagcatggtttgatggttaaactaggtatactcactgacagcatgatgtaattgttttcgactttctactgaatttgtgagttttgcaggttccgctcaagtcaattcttattg

SEQ ID NO: 112992 - DNA, 751 bp, Setaria italica
  Intron number 1 from transcript Si006521m (locus Si006417m .g) derived from phytozome v7.0 (chr-ID scaffold_4; pos 33 420534 to 33421284)
gcagcatgtaagtgaacccatccatttagctttctagctactagctagctagcttttctctatttttctcgattctaccttctctttttattcaaggaacggttccacctttctttttattcaaggaacggttccaccttttctcgaaattgaatcacaccatttgagcctttgtttcaattctacggtcgatagatgattttcctttgagaatcctgttacctgatcatcatgattaacatgagatgttcactatgattgattgcccctatttccttagctactcgttatcgtctttgtgtgctcatgcgataaattcatcaagttaactaagtcaagttgtgctgcgagtaaatgattgctatcaaacccgaagataaataaagaagcttcacctcccttcttatgcatgttttttttcctttatcgtagttcttcctgttggaagatggagagggataaccagttttttttgattatgtgccattttcaaacaaataattggttgtgttatttctgttcctttcggtgaacaaccctatagcaagcaaagggattagttcaacacctctctacgcaaggtcttattccatcaatactcaatttctattcttttttcttatttcctctctttcaactaaaacattttaaactttataacctaaacttgtagagctactcactaaatattatatcagttgtgatattttattgcatttctgaaagtgcagaagaagggatccagaaggat

SEQ ID NO: 112993 - DNA, 809 bp, Setaria italica
  Intron number 2 from transcript Si030902m (locus Si030902m .g) derived from phytozome v7.0 (chr-ID scaffold_2; pos 45 962460 to 45963268)
acgaccagaagctgtgagtatttctcgtcctccacttgttgtgtatttctcgtcctccacttcttgtgcccttttttttaacttagatccgtgtgagcgctgtattgcttcaattgagcactgttctggctattggtcaggcgattgggcgtcacgatatagtttaggaatcgtttatctctttcagcagtttggcagcttagctttatgactacattaggttgtaaactgtagtatccattgaacacaagttttgtagatgttgggttatgagtggatcagcctcctggtgtgtgaggactaattagaatgagggcagtaaaaattggctaggacatgcttgttaatttgcagttgaggttgtttaaatctaatcagaatgcaagaatagttttgattgtgattttatctctgatttgctatgagatgacattttagtgtttgtttcttaggtcattacagtcaaatattcacaaatcttttttgataaattgtgctcactagtgctgccaaaccttaggtcatgcagtcatgatgtctttagggcatataactgtttatgaaataggaaaatttgaagttacactttgaaaacagaatggtaacatgctgaagatatgttactttatttatttattgaagtgcgactgcattttcttcacagccttgtctatttcgctgtttatcattagggtgtatatttcagatatgttgtttgttcatgctctactttgtttttggttccaatatctaatacctatatatcaactgcaggcgtgccttttttgacaaaaggatctcccaggagg

SEQ ID NO: 112994 - DNA, 303 bp, Setaria italica
  Intron number 1 from transcript Si028892m (locus Si028892m .g) derived from phytozome v7.0 (chr-ID scaffold_2; pos 11 559286 to 11559588 reverse strand)
gtcttcaaccgggtgcggacatgcatgcgcactgtaccgttacattagtttggaaaatgcgaacaacttttgaatttgcaactagatcatttatctatacaacaaacagtaaaaaaaaatccgaaacagattatcggaaaacaactctgtcagcaacactttctgcacaaatggatagtgcttactgccatagtggtgtcaaactgaagagagtaactgagaagaccagtcttagcaatccaccaccaccttgaactgtttgctgctcatcttctactaatttaacaaaagagctaattgcag

SEQ ID NO: 112995 - DNA, 756 bp, Setaria italica
  Intron number 1 from transcript Si031346m (locus Si031346m .g) derived from phytozome v7.0 (chr-ID scaffold_2; pos 74 32509 to 7433264)
ggaggcggcggcggaggcgctagggtttgctgcaggtgagtcccgattctcccatctcctatcagacgcattgttccagcgatttcgccacgcgatggcgtctcctgctccaccccttactgtgtttgttctatgattaggcgtgcagttgttgttagtttgtgaagttcgtggttcctgtaatcccgggtggtaggtttgttgacggtctgatctgtctgaatccggtgccttagttatattcctcgggtgatttgttcgtgcgtagtatgtactcgcttggttactgccatgttgctgtagtgtttgattgacgctgccatgaggaattttgtgatggatccgttggtgctgttcggcactcatttctgattgtattccgtcagtgtagcaattcttccggtatcacatttgctgtaatgttgtagtgttggattgaagatggcatgatgaggtgggaagtttctgattttgttgatgtcagatttctcaatgttgctgctttaagcaatgcagtatttatagctgtctcgtgctgtgccacattgcaccttttctgctattcttgtgttattttcttttttgccacctgtaatgataaaacacagccttgtgatttcaacattggtgtgtaatttatatttgcaatgtatacattttagtgtctgatgccatctagttttattgtcactgatagtgattttgtctttacaatctacaggccaagggacattgaagatttgtcaaggcagcagt

SEQ ID NO: 112996 - DNA, 976 bp, Setaria italica
  Intron number 4 from transcript Si007409m (locus Si007409m .g) derived from phytozome v7.0 (chr-ID scaffold_4; pos 69 65144 to 6966119 reverse strand)
tgaaggggccgaagtggctgcagttgctcgttggggtaagttttcgttttttatttgctgaagttcatatattagtacttcatacatgctttattgttatctatatctggtagctttcttcttttccatgagattgatttagaagtctggttcgatatctaacatgtctgaagtctaagctctgaacacaattgtattacttagacatgtatagcaggaaattatccggtgttaggcaatacaaagatctttggtgaacaatttatcaccgacaaaactgtacttgtttctgattgtggaatcaactttgacaaaggtaggttagtagggaatatgtgcagtatgacctggttgctcaaaaaggtcaatgtgtgcttttctttttactgaaagtatgtaatgtttgaggtgatagggtgcttgatccaaagaaaactaagagtatgttgctacgcacccagacataaagctcaactgaactccaaactgggatgtaatatgttgctacgcacccagacataaaactcaactgaactccaaactgggatgtaagcagctgcatttaaaagtatgaatagagcgttgtaggattcttgaaaaacagtgtagctgaaagcaaagaaatagtcaaagtcagatctttgattgcctacatagtttctttgatagaaacttgggactgaggaccttgaacagggcaatctacacattaggttttatatttgaatcaaccttcttaacacaaattcaggtttggctatgagattattggtattgtggcatcatggactttgcaacttgctttgaacatttgctgtcctatgtttcagtggcaatcactaataaattctgtagactttgtgatctgtatggctatagaagtttgagtaaggatgcgtttttacattttattcactttggaaattgttacttttgtgcaggtgccaccactgctgttgttctcaggtgccagtgc

SEQ ID NO: 112997 - DNA, 521 bp, Setaria italica
  Intron number 1 from transcript Si007336m (locus Si007336m .g) derived from phytozome v7.0 (chr-ID scaffold_4; pos 12 919486 to 12920006)
gaggtaagtcctatctttgcatattagttttcagtgtgattggttataagtagaaggattcgggcgggagaagcgcgcgctaccgacaaaatactaagtcggttttgagaacccctcaagttgcgccgttacttgtgtttgaacatgggctggtacttctttttctatgaagatattggcaacaaccggcccatgatgcaaacctgttctccgcaatatcctagtttgaagagagaattcacaagacaagacttggtatataattttcatattttgtgtctatagtcaaggccatggtaggttgagaagaaaacttgcatgaaaactatatctgtagtattttcatagagtcgctaagtcatggatttggtacaagttgttgtaacaatgcatttgtgtgaactttgttttcggtatcattttcgttgaatgattgcttcattctctctgttaacaaacccctttctaattttctaacacatgcagccaccgaagcacccgaagagcgcaagatcccaaga

SEQ ID NO: 112998 - DNA, 886 bp, Setaria italica
  Intron number 1 from transcript Si008073m (locus Si008073m .g) derived from phytozome v7.0 (chr-ID scaffold_4; pos 38 397749 to 38398634 reverse strand)
ggtaagtttcagttgcatgaaatttctccgtttcggtttggagagcctatcttcgtgtgtcatttgtcgaagtcttggaggaaggagtgggctttggtctcggtaattattaggggctgattccgcaatgcaactgacggttcttggtgagttcagtttgagtgtttagtttctttgatgcagttttctttcccttttttctgcaaaagtgatgaacctctagtctcggctaacttctgatgctactgcggaattcggaggcacaacttgttgcataattcttcttgagtttaagttgcggatgttgcgttttcctggtccaagaattgatctgagatgatgaagaaaaggttgcaggctaagttctaaaaatgccacttattctcgttctgaatctaggtggcggtttaggctccttgtattaatttccttagccttggattctgggttgactttgctgtaaaagtaatgttgtctcgagccatgtttatatctgatatctcatccgcagtccatgagctggagcccaaagatgagatggcaaatgtcaacagctttgcttaatatcttcgatcaacccatttttgcagtcgtacgtatgtttattggaagtgtatgcatgtagttttgtcacttcggtctatctgaagcacttttttggtccaacttaatttgtactgttctgttgctttgaatgctttcttgcttactacctgtacctgtatgtagttcgtcaaaaaaagaatttgaaattgcatttactgtttgtgttactagattaatatttgccctatagatgttacgaatggtaaaaaaattactacaaaattacattgatcctgttggtgcagggacttcagaaagctacgcttttactggcatacca

SEQ ID NO: 112999 - DNA, 947 bp, Setaria italica
  Intron number 1 from transcript Si031956m (locus Si031956m .g) derived from phytozome v7.0 (chr-ID scaffold_2; pos 47 63094 to 4764040)
gcggcgactggtccgtaagcagacatgcttgcggctattttgattgtttcccgcatcttaggtagatgcttgtttacctctcccaggttgttaatacgagccaacagatcttcataatgacctatatatctttatcgtgttctcggtgtctttgagaatggatagacaatcagttagcatctcaggggtggatccttggatcttggcaaaaagatcattgtaggtcttcaactctatcaccagcttgttcttcacattgatggcttttctgagctgtttatttagctttctggaattccattttgctgcttttaattaatctgacgacagggccaatccggtcctctacaactagagtacagaggaatacaaaaggtactgtaaagaaaacattcacttcgctaaaatatgggaacttacgaggcaaaggtttgaactttgaactttatacctgtatttctctgttggacgtctatatatgttcttttttctcagccatagggttattatgcccaaactggtcaggtccctatccttctcggtcgtctcagatttcaggaccccatgttctcgaagctgttctctctgagaagccacagtctcttgagattgcttggtttcactctgcgtctctcagtctgctctttgagcctctcttcaagaattctgaccctttcgcaagctgcagttttctctgatgtcgtgttgtccaactctctgtggtttagattaatattaaagcaaggttaacaacattaagcaaataattagtaagggaacaagaatgcttactcttttattctggcaacatcttcataaacctgactttggcttatgtaagcctcaatacgctgcaatagacttttgtgaattctggtagacatgaaagttgtgtaaatgattagaaaaaacagatatactatcgaaattgacataactgatgcagg

SEQ ID NO: 113000 - DNA, 883 bp, Setaria italica
  Intron number 2 from transcript Si030561m (locus Si030561m .g) derived from phytozome v7.0 (chr-ID scaffold_2; pos 15 130085 to 15130967)
ctatcatacgtccctcctctctcctaggtggcgaggtaatgtatcgtcacccataactagtgtatgtgtatcggtttttgaggtctgtgtatgtttaggcttctcactgcataccaaatgtttatcttgagtgagttgaacaggaaagaacatggagtcaagatatagcgtatcagtgctgctagtgacttgtgaccaagaatgttggctgttgtagcagtacatgtttgcatcatatattcctatgtatcttggtgtcagcttgctaagcatgctgaatgatcatttttggtaaattgagacaaaattcaacagactctcatgttaggtaaaagaaaataactagagccaagtacaaagtggaagtaactttctatgaaacgtcatgtgaataaaggttcatgaaccccgaacatgtcagaatcccacaaaccaacgaatttaccaagtttctggcatttttttggatgaaccagtttctggcattctagttacagtttctggcattttgatgtttcagtggctaagtatgtttgccgactggagtgcgtaccattatctatatgtggttgtcagcatgctgccacaatctttggctgtatcggtgtatcctaacctaccatggaccagcttttctcaaaaaaaattttgcaatcatcatttatagtgtgcatggcattggaattaatctacacatacttggctaagtgatgatatagcagcagggacatgtaacctgaaatatctaattagttttgacaaaactcttgatcatgcttgtaactatatggctaagattatgtagacatctctgtgatatagatatagtatatatctaattcttactcaaattattcttttccagatccaaatttggcttgca

SEQ ID NO: 113001 - DNA, 999 bp, Setaria italica
  Intron number 1 from transcript Si030265m (locus Si030265m .g) derived from phytozome v7.0 (chr-ID scaffold_2; pos 37 703670 to 37704668 reverse strand)
ccctcgtccgcggattcaccaacctctacgccgtaagcaccaaaaacatgcgaaaatttcctccgttttcaccccccgtcttactgtctccaattcactcttctcgcggggacgtagtcacttgacttgattccacccaattcggtggtgtttgtgaggattggatgggcgggcagagtttcctggtgattggattggaaagcagctctccgaattttgggaggggaggttagtagggtagcatggtagaggagaaaaagtcgcattgcacttaaagtttctatgtatggaagagctagacatttgcctagaccaggctatacgaacgggaaagttaccaattcggggttggcttgggtttgtggctttgtgctggtactttgtggcatgtaggtcacgggattgttttcagttatgggaccgtgttcattaaccttcccaaatggtcattaggcttcttcttgataatatggtggtgatttcctcattatttgttgggttgatgatggaagctgaagattagggggctgacttgtagaaaagtactactacctggtctttggtaatattctcttgtctaggctaagcagaggttaataagaaattaggtggttggtttatggagaaaaaagaatacccactgtattgcaatttgatttaaaacatgtcccatttgggtagtaaaaaaagatacatgtatgactaggcaccagattttagaactccttattttccatccatctcgagcataatactgataaaaaaacctttcaataagatgcgtagacatttattgttagtgttgtcacgaattacaaaaaatgtaaaccaggttttattttttatcatatgtttttaagaaaaagattgatttgctattttcattgactgactctttatttgaaaagataccttatctcatttttgtagaactggaatgttgactcaacaacctcattttaacaatttatttgcaggaaattgatccaaaggtagaaa

SEQ ID NO: 113002 - DNA, 859 bp, Setaria italica
  Intron number 3 from transcript Si007283m (locus Si007283m .g) derived from phytozome v7.0 (chr-ID scaffold_4; pos 10 699081 to 10699939 reverse strand)
acaataatagacacccaactgtgagttctctaaagcttgcttgattctttttctgcagcacaaatgtgtgttttgtaattaaggtacagagtaaaatttgcaaaactacaaaattaagaagttgtatcacaaaaccacagaattaagaagttgtattgcaaaactgatagaacatgccaaagtatcacaaaactacacacttgataaataataccacacaattacaaactgagtgtgcaatgtatcatataaatacatattttggctgggtggaacttgaaattttgtgataccttacacactaaacacttttgtgatacaatttttttaaatatgtagtttttgaagtacttttattctaggtctgtagttttatgacaattttaccgatgtttcaaaaaaatggttggtgataaattgtacttttgccatattgatgtgggaaaatggagaaaataggaaatgttctatgttacacacaaaattggagaaaaaataggaaaaatacctaggtgctaggcggatacctagctgaaatgttgggtatttataacctacttgaatttagtctggtgcaccatactagccattcaaaatggcctttggttccattgtttctctagaggttcctgcaaggcttcaagtgtatctttcttatttcagctgtttttttttaaatttggtttatgttgttgtcttctgtttcctggcatattgtaattaataattataatatattggtgttctgattgcttaacaaaaacagaaacatgctatctgtactaaatttgttcactggtttgttcgtggatattctcaaacagggttctgctgaggtgatattcaccaggagaagcga

SEQ ID NO: 113003 - DNA, 746 bp, Setaria italica
  Intron number 3 from transcript Si031984m (locus Si031984m .g) derived from phytozome v7.0 (chr-ID scaffold_2; pos 40 536227 to 40536972)
cggcttggagaaattattggtacgagttattgtttttttatgagctcctggaaggataagtacctgaaagtaccaagtaatttctctagacaatatccaattgcatgaatttcccagtcatcaacagttacttaagttgttaggaaatatgactgctcttcatccactaatacatgaatgccactgaattatttaacctgtttcttgaatctagtttgcatcatcaatatttttcgcttttgctcgagggtttacttttataaacttgagtctactgggagaagcttctggatggaatgagcgagcagctacaatacatggtctgtcttaagaatcatgtgtttacttcaccatagaaacttctgcaatactatttgattatgagtgcataattccaatcagttttggtgttttaagtgagtgcatgattgttggatcatatggactttttattgctagagttaaatttcttgtaaattcttaaacttcaatccatcagccaatcaaataccgtggcacttcatatctttatcagtattcaaatcttcatttgggtggatcaaaatatttgtgtagtttatcagaatacttctaagtggattgattcttaagagcctttcatctgttattgaagcttgacatatctgaactcaaaagtaattttctcttacattttgtatgaactcaaaattatgttactgtgaactacaggaactaaaagaactaccgagtgtttgtcaaagagt

SEQ ID NO: 113004 - DNA, 833 bp, Setaria italica
  Intron number 2 from transcript Si026525m (locus Si026525m .g) derived from phytozome v7.0 (chr-ID scaffold_8; pos 18 37738 to 1838570)
tggcaagagacccttaaaatttgcaacgtgctttggtgagtaatggcataaatggtccgttccagtgcttgggatgttagtttctactttctagataagactaatatgctgcgtgagccatatattctattctattctattcatatccagtttgtgtttgtttgcactgtttccccctcataacaatttggggcaacatatataactttacatattcatcaacttcgttctcttttgcatgattatgatcatgagatgctaatggccttgcttgctttcaatgcgaataacatttttactactgaaatgggaatatgtaaacaagttctctatgtgtaggctgctctcaacacaaacagactagatactttgccatgtaaactagtggagggctggaggcttggagttcttgatatttcatactaattgtgccttcctgttactcttttgcattcactgagtactaatatcttttgccggtacctattcagtttgttgctctaatgctgatgtcaattttcaaaacatcaggtttcatcatttttctatttatcaaaagtgacccacatctccttttctgttcatcgactcatcgagtaacaacacctatttttatttctagtctaatgatcatgtcaattctcaaaagttcaaatttgatccttcttttgttgaaagttgcttaattctgtcatcgcatgtcaaagcttttgctattggaatgaagcatgcacatgcattttgatctagcattatgacaagtgcttcaaaggagaacaacagtgaattaaccttttcttttctgaatctcgtgtcgcagtgcactatagagc

SEQ ID NO: 113005 - DNA, 863 bp, Setaria italica
  Intron number 1 from transcript Si006998m (locus Si006835m .g) derived from phytozome v7.0 (chr-ID scaffold_4; pos 26 566803 to 26567665 reverse strand)
gggcgcaagggctgggtcaccggtggatttgagaggtaggcaatgagagcgcaatgatcgcgccgattgatgtgttgatgctgcctgtttttgttcctaattaatcaatgttattatgttatcaacgtgtgctagtgccgtgttggtggatatacaagtcttgcggtgcctaaactgcctatgttcgtgatgttctaggaggatattattaattcaaattgattagcttgacgggcatcaagatgcaaatctgggatgatgacgtgctccctccgttctagtctagttttgtcacaagtaaaacttatctaactttgatcaagtttattggaaaatgcatcaacatctacaccaaaccagtttcgttaaatccatcatggaatatgtcttgttagtgcatttgtttcttattgtagatgttaatatatttttctgtaaatttggccaaagttagagaaatttaaattagggcaaaactaaagcgacctacattttgaaatggagggagtagaatattacatggcaggtttatgatcttcaccctctaatattaatcttactaacaccgttttgatagtggaagcttgagaactcattatgatgctgatgcagttgtgctacattttacagatatctccttttgtgatgctgatgacataataaatgaatatatcaagttttagctactggcctttaatatatatatatatatatatatatatatattattgctggcttttaatagttacgttgttcttgtaataccaactttgtgtggtcaaccgcttacatttctccaatctactaaagattcagacactactttgattaacataaggtcaattactttgttggcagtgagg

SEQ ID NO: 113006 - DNA, 932 bp, Setaria italica
  Intron number 1 from transcript Si029381m (locus Si029381m .g) derived from phytozome v7.0 (chr-ID scaffold_2; pos 46 781203 to 46782134 reverse strand)
ggatctctcttcctcggattcgacagttccactcagtaagtctggtccctttctcagttaatccctctcttatagagttacagttcatttgggcgttggatcttgttcttgctgtggtggcggtgtagcttgttcatcttatgaagcgctcattgctctagacgatgaaatcatacgggtaaggactaaggagtaaagatgtgaacttacttgcctgtaaatggggataacgaaaatgtgcttaaaatttacgggagtacttgtctcggtgaagtgaatagaattttactctggccgaaggtttaaaaagaaggggaatcggaattgattagttgtgtatagagttcgtgccatgatgccatgtgatttctgtgcaagtccatgttggagaggtctttctacaatgtagagtccatagcagggtcatggcgataggggcctaagaaactgcgtattgctgtcctgatctgattccaagagcaagcatagcagtatgacgataggttctgcagacctctgcatgaggttccctgttcaacgctatggacgtttaatcgcacgtgctacttgctgcttactcttttcgaatgatgatctagaattaatcaacacctgtcatcggatgcaatatagcaattccatttaatttctgcagctttgactgcaaaatcaagttcttagctaaatagataagatgcacctatgtggctatgtgtgattcttcttaaatagatctctttcaagagtttgacccagctcaaatgtggtttccttgttttgtattcttcgcactgataactcggtaaccatttgcttcatatcatcctttctgtattttattttcatcctaaatcgtcgggttagcattggacttggattctaatactgtcattctcttgttaacaggtcactgaaagctactgtgctcaaca

SEQ ID NO: 113007 - DNA, 285 bp, Setaria italica
  Intron number 3 from transcript Si031225m (locus Si031225m .g) derived from phytozome v7.0 (chr-ID scaffold_2; pos 10 262959 to 10263243)
ttggagtggaaccaaggttagttcaccttgagcattctgtcttaggatttattttcttcgcactagaaacaaaggaactttatgtttgattgatgattggcacattatttttttcaaaaaaaatttatttctattacattttgcgatagcttggttgattatgtgataaatacacgaatcatgcatctaaatacagaatttttaattgtttggtttaatgatattacttatttccttctttttgttataggctgttgttcaattcctccaagtaaggatttgaga

SEQ ID NO: 113008 - DNA, 644 bp, Setaria italica
  Intron number 1 from transcript Si031122m (locus Si031122m .g) derived from phytozome v7.0 (chr-ID scaffold_2; pos 46 476830 to 46477473)
agtcttttggtcaggaatctccgtcgggactgcaggtaaatatttgtccaactttcactttctgctgtaattacagctatagagcttgttgctgtataacagatagtttgttaatctacatattcaaactcaattcagtgccttgcatgctcagaaactaattgaagtgcaaatctgcaatgttcccgtttgttttgttcattaagggaatcttgtcttgtagacctagcaaatcatttgaatagagcctgaagctaggataacttatgtaacgccagttattttctatttatacaattctaggattcttcttccttaatggataatagtggtataggttccaaagatgtatccggttgaccagtgttaccacatcggccgtgcctgtacacgtgagattttgccaagagccaaatcgatattcagttagttttggcaccttagtgatttctctctatttattctctctttgcgttttctagcgcttattattcagttatggttcccatgtgcatgccctggcgatcataggtagcgtctcaaaagagacttccttcttcctgtattttgtcaccttctaatgtacagtacattgataattgatttcaggccagaagaccttcgtcgcccattcgcacagtttg

SEQ ID NO: 113009 - DNA, 720 bp, Setaria italica
  Intron number 1 from transcript Si029994m (locus Si029327m .g) derived from phytozome v7.0 (chr-ID scaffold_2; pos 55 30869 to 5531588)
caggagacgacatacgaggaggtagagagccagagagcttacggcaagggcggtgattaggaatgattgtgaccttgcgttttgcaatgccggctgctgggcaccattgatttgttggcacggagttgattgactatttgttttattcaaaaagattagtgcaaatatgtaaaattataaaccatgcttaaagtatttttctatgatagaacgggtaaaacaaaataaatgatacgtccgtagtttcttaataagatgaatagtttgttttcggagttgaacacttctgttcacagcacgaggctagaagatgcatggatccgtgacaatttctctgctgtttccagcgtcattttacgtgctctcaagtctcagcttacttgatttctttttaccgcccaaaatgtcccgtgcattccgtcgaagaggaataaaaaaaaacattttccagccagtgccacgtcagcccgcactggcgccccggctgattccgataggatcgcacgacaccgactgacgcactgcaactcgtcgcacttcagccgccgtcacgcgcgccctgccaaccgggagtgccgccgatcctaatccacctccccctccctctctctgctcggcgggtcccacggccgccgcagccgcgattatatacagatcatcagccacccacccacccacccaccagcaccagtccaacaaaccactccgcctccgactcac

SEQ ID NO: 113010 - DNA, 632 bp, Setaria italica
  Intron number 4 from transcript Si030344m (locus Si030344m .g) derived from phytozome v7.0 (chr-ID scaffold_2; pos 37 162184 to 37162815)
gcctattgacattcagaagcaaacaagttttagaggtacaactatgtagctgcttcatatattcattcttcacatcagattctgtaggccttaaaataaatctatggttttcttcaatagcatttcatgtttatttgttttttttatacaaaattttccttgcttaaatagatgttcacatgcaacaacagttcatatttggtgaagttacctataaaaaaactcatgcatttgttaaaatatcatacttctggctaaaattgatttatttatgcagcagttcaaatgctgcaatccagtaaagtaaaacaaaaaaatggagctgatgtgaatttgtccaacaaaggatgaatggtgtcatcagcatttattagtatccatttgactgatggttttttccttcttttatcttccatagacaccatcattgctatctaatctcatgggcataggactatagttgtacatgtaaaataagcttctcgctgacatgaaacgcggtttagaatgagttgtgcctcagcaatgcacacatgtttcttccaaggatgtggtattgccttaaacatcttccaagagttctttttccttatgcagcttggttgtggatacgggcttcctggcatatttgc

SEQ ID NO: 113011 - DNA, 878 bp, Setaria italica
  Intron number 1 from transcript Si006010m (locus Si006011m .g) derived from phytozome v7.0 (chr-ID scaffold_4; pos 28 73522 to 2874399 reverse strand)
caaatcagggcctcctcctcctgccgcctcgcaaggtgagtagcgcactgcgcccgtataccttccctctccgcttgtgcctgtgattatacatggtttgtctgtcggagctgcctggatttttgttgaggaatctggcgtcttcctgttctgtgattgttctgtagtctgtattgttccctttgatccgtagcgatcggctagataggtattctttgttttgtccgggagttgtttggtcgatggatgtttagtgaccaagtaactgctgcttagatatgttgccagcgaaatttagggttcagatcggggtgctttggtgtttcgaacacgaccactgcaactgtccttagcagtgcaagtgatgcctatgatttcttactgtcatcctgcttttcttaatattagcttcagacgaaaaattcaagcttgcctgctgatggttttcccgaatgcatcgaatatgttaggttgagatgccctggcaaaagttatgctggtgcttagtatcatatgttttttgctttctgattgtattgatgctgtgcgtcgtagcaaggtgctgaactggtttatatgattacatcaatcttttgccttggagtgttgtaaagctgcagttcacttcttctagtttatttaatactgattggctttattgtcaaatttgtgctgttgacttaatctgtactgtcttgtgaagatgcatattgatgctttgtgattatcatttcaaactaactaatggttgctagtttggtttttctgttatgtcacattagatttttcttattcttgttattatactttaaagcattcacagtttaacatgcgttcttgttttacaggaataggtagctgagctttgtatcaacaag

SEQ ID NO: 113012 - DNA, 636 bp, Setaria italica
  Intron number 1 from transcript Si006947m (locus Si006469m .g) derived from phytozome v7.0 (chr-ID scaffold_4; pos 80 51619 to 8052254 reverse strand)
ctgcgtcagggcatcgcgaggtgagcgccctttttctttcctgtcgagttgatgcgaatttggggatcgggtcgatggtaccacgagctgttcagggttggatttagtgcgatttaggaggtgggcatgcgtctggcatttgattcggttaaaaaaaaaagagtgtcttcttggcgctgtgtgtggatcgtgttctgaaggataacttattaacttggcgtttcttcaaaaaaaaaaacttattaacttcataacttggcgccttggcgggtttggtggggaaaatggttggtttgttgttcacttggagtaaacgctgtgggttggtaacggagcttggttgaagcttcggagtaggtgatggttggcttggtcaaatccacgaaccggagactattcttgcctttgaactgatgtgattataattagttgcgattgggatggttgaattattataaagaggcaggcacggagttgcgtgggaaaggctgttaagctgtagtagaaaaggcattttttttcctgcaggaaatattctattgcattttagactacacaagctgtttgctattttttattacttggaatttagtcaaatactcaaattaactttccttacctcatcttatgtaggca

SEQ ID NO: 113013 - DNA, 696 bp, Setaria italica
  Intron number 1 from transcript Si026879m (locus Si026767m .g) derived from phytozome v7.0 (chr-ID scaffold_8; pos 10 9598 to 110293)
ccctcgagaagaagggcgtcctcgccaagattagggttcgttcgtccttccccatttcccccgtcccttccttgatccgctgccacggatctagcttgccctccccctccgctttggggatctacgcctccgcttccgcgatttcattcccaaaatccgcacacctttttcttcttcttattttccaaattctagtgtgcacattttgagcgccttgacgctgctggttgggaatgctcgcacattgctgaagaaaaatttcatctcttaagattctgttggtctagttggcaaacccagttaggaggaaatgtgtcatgttactaggaaacttcttttttctggctcctctgttgtgacgactgcgcccacattactccatggtggtgggtttgattctaatggtgtgatgtcagcaaatcttggtttccagctgtaggcaatgacagtttctctagaagtttggaaagaacaaacttgttcaattctctcatgaaaacctcaaattatttggtggttattcagttattaaatatatgtcatgcatagagaaatatgattactgatgaaaaaagttgttatgtgttgaagcacattatgctcaatcaaatccacatatttttcactagtttcctcatggtattccttgctgcgtgactaggctgagctgagagcaagtgtgtttgaggccataga

SEQ ID NO: 113014 - DNA, 742 bp, Setaria italica
  Intron number 1 from transcript Si026799m (locus Si026801m .g) derived from phytozome v7.0 (chr-ID scaffold_8; pos 22 37695 to 2238436)
gctcaccgccccccgcctctcgcctggctgccgaggtaatcccgggaaactgctctttatctccccttccattccatcgcgcgcgaacctgtgagctctctcttcgttcagatcgaatcgatacggacgtgtttcaattttcacgaatagtcttatcagtatttcaattagatttgtatagtctttggatcggatggatccttgctcattggctccattcagatcgccggtttgtcgtgcgctacaatggtgggatttctatgacccgttcattctctgaaactggcacggatggcatttcagaattcaggcaaccaaacacgcattttgtgttaatttgatttccccaccctcatcagcattcttacaccgctgccttggtcaatgagcgaattgaggttgatttgaaatgtttagatcagtcttgagtttgtgggatttgcttttttcgtctgtgttgctctgatttaggatgctagtatagtatgaagctgttacgtgatgtttaaattgctggggattgttattgcagcatttgtaccagatgtttggacttagattccaaaaatgtctgtataaaagtttttctttttgcacgccagcgagctacttgcatgcttgacatgtgttgctttccagaattaataatctctacgccacaatgcacaggtgttttccctcatggaactcaaatttcactgctaagtcaaattgaaaattttgatgcaggtttcacctgata

SEQ ID NO: 113015 - DNA, 746 bp, Setaria italica
  Intron number 1 from transcript Si029685m (locus Si029685m .g) derived from phytozome v7.0 (chr-ID scaffold_2; pos 31 157335 to 31158080)
gagagccttgcaggggaggcaccacctgaggtcaagtaagttccctcataaatcactatccttcctgtcccccttctctctagtctctacttcgtttcttggtttctccggcgttcttggatggatgaggaggaatcaatgggtggtcggggctgggggacgccagaaagattcagtcagtcccaatgcaccagcaatggcaatcccattcaattcatggatagtttctattcttggcgaatgaggtgctgtggattctatttactcccgttctggaaatgcttttgattggaaattgtgcgaatgctactgttagaaatgcaccttaattggatggaaaaacaaaacagacaagaactcatctttcacatgaaaaaaatggaggccgccaagatgggactgtcacgaggaatgcgatgcgatttccatggtgctttttcggtttttggggtcaggcctccggcagtgccagaagtagcacgtcccaagtactttttaatgtggacggattacataaacaacgataagaatagtaaattactaaatttccatgtggtaggtggtgacaccatcccagatttttcagctgctgaagtgtgcgcgcgtagagagagagagagagagagagagagagagagagagaatcgtgactcttcttcatccccgtagaccatggtgttcactcactcccgatttggttggaatgttcaggagcggtgggcggcgccacggtgctggagctgagg

SEQ ID NO: 113016 - DNA, 406 bp, Setaria italica
  Intron number 2 from transcript Si027542m (locus Si027542m .g) derived from phytozome v7.0 (chr-ID scaffold_8; pos 38 792481 to 38792886)
ggagcattgataagtgtatatttggtacggtaattttttatcttttctttctttcttcactcatactttttaatttggagtgtggatatcaattgttatatattacttcagtttcctgcactaaaatattattctctccatcccaaattactattgcttttgttttttctagatatatagtttttatatgcacctagatatatattatctctaggtacatagaaaatgttatgtatctagaaaagtcaaaatgaatagtaatttgggacggagggagtatgatggaactgattatggttcaggctatgaacatacgctttctagtcactatgttatgaaaattgatgttttggaggtccttataccagattactcatagaggatctatccttttttctttcttcag

SEQ ID NO: 113017 - DNA, 952 bp, Setaria italica
  Intron number 1 from transcript Si030555m (locus Si030555m .g) derived from phytozome v7.0 (chr-ID scaffold_2; pos 47 324172 to 47325123)
tcaaggaggtccgcgaggaggtcgccaagtacaaggtgaatttctgtttcctcgcatttacctttttgctcacgtcagcaagtgtttttcgactaaattgtgaattctagatgactaagtttggtaacttgcgagtgcaatctgagtgtcatgaatatgaattgtatagttcacaaactgaattaatggctctgaatgcagtttctgtcccatgtgtgcaatggatatagtagatttgaaatcacaattgagatgtcagttataacattggaagttgcttaggtcacctgattgttttttggtgtgttgcacctattttatattgattacataacaccatgtgttgttaccgttttctgttcagttatgacgcacgactgcaagtagcagtttgattgtagaaagcatggctgctgattacaatgtgactgtcctgaacattgaattttagtttcagattcaactttttgtgaaattttgggaattttagtttcaggatattatttcaagttttggtaataatatgaattctttgtgattttggttgttagttgctttggattacctactggggctaagtgtaaaattttaactgtgtaaaatctgattggctcagtggctgatgttgtctttggtggaacccatcaccaaatggatacaaatcatattgatcactgttgttacaattaaaatctcaagtggagtcatgtcaatgaagattggtgtcttgttacatagttttgtgatgtttgtaattctgtgttagtatcaagtcattttgttgatgtttttgcatggtcgtacttctgtcagtatttttattgcagcagatgctctatagatttgttgagctgaagtttatttagagcacatgttatctatatactaatgtcaaatctgttttttccccaaaacaggttggtgctcctgctcgtgttgggctggttgctcc

SEQ ID NO: 113018 - DNA, 872 bp, Setaria italica
  Intron number 1 from transcript Si006641m (locus Si006641m .g) derived from phytozome v7.0 (chr-ID scaffold_4; pos 39 717246 to 39718117)
agcagcccccgccgccgcatccgaaccccaaccccgtaagcgaacgcgcccccttctccttacgcagttcaaatcgacgtcgtagcggtagggcactgccccgtctttgcgttgccggggatgaggatgccggcgggtttaatcacgagtgcatctgcaaaggataagcccaaacttccccttttaaactgatgtagggttttgtggaagcttagtgagaaatttgtgtgcttcatgagtcctgttgttacgttttgggggcttcttttgccagagaaattaggagcgcaatcatggtccatgaactgcgccagctcggctgttgtgttgtaggcttgctatctgaaagggatccatacgttgtaggcgtagtttaatcgagttctggattataattgcactccccttaacaatgaggctgcaccactgccctaggtgacctgtgatacaaattgtttttgttgtcaactcatgttttcttcaatctgaagttctctcaaatttcctcttcatagtcgatttgctccagtagttccacaaggacacacaatacgagtgtttgctggaataaacaattgtggcattctaattcctcgaatatatttgcaacatgaagtgcctcagttacagtactgtttcggtaaaaagaaggcaagaagcgtccgcacttctcttcccatgctgtcgtagtacatgttctaattctgtcattcatttgccagctttagggtcatgggtgaacatcggtgttcaattgtgggcttctgcttttgtttttgactggcatgttgtttggaacctctgattcatatgccttccattcttcctttacttcaggtagacatcttgaagcgtttgcagcgagaagcatt

SEQ ID NO: 113019 - DNA, 470 bp, Setaria italica
  Intron number 2 from transcript Si029463m (locus Si029190m .g) derived from phytozome v7.0 (chr-ID scaffold_2; pos 45 417380 to 45417849 reverse strand)
tcgtggtttgcccgacaagggagcttgctatccaggtatatggtttggtgttgttgatttcctctgacaaatcatgatgcgacagtattccttttgattgagctcacatgcagtattccttttgattgatctcacatgttttaaggctgtacaagagctttctgttggagaaacattcgaaatcagatgtgtcagctaggataataattacactttgttaagacaacattttgtaaaaatgaaaaattgttcgtgttacattgcttttaagataagttacagaaaatggttcttcaaattgcaactgccaaaaattggcaaaatgtggaacttgaaattgtaaatgcattagtatctaaattttgtatagttgcagttgcagctccgagattctaaacataagttaatgaattgaagctttttatttcacttttcttaatcattgttgattcattttctctagacacata

SEQ ID NO: 113020 - DNA, 698 bp, Setaria italica
  Intron number 1 from transcript Si026028m (locus Si026028m .g) derived from phytozome v7.0 (chr-ID scaffold_8; pos 25 912861 to 25913558)
gagagatcgaagcaggagcaactcgcccgcgataagtaatgtcaacgatgataccttacgtttgtttcgagcaattcgtttgaaacaactaagaattttgattcaacaaagaaagaaaaagttgggaaaaattattcaaattgttttgctcttcgtaggctctgcttgatactctgttttgaaacgagtagattatgaaaatgttgttttatttttttactaaaacaagcatatgaggcactggagaatgtagttgtgattaggatctgttctcaacttatttgtggttactcgtggctgttaactgactgcattggtgttactttgttttttacttcaacaattttcagttactggtaatgcaggctatagttattaaataaatatggtgttgttgcatttgatgtttcttgttgatgtattctttcttttttgtgttgctgcattttgtttcttgttgatagaatttaatctttgatgcatcatggtgaaaataaaggtttttattttggcattccaaagtgaagagaaagtgaattcttgattcatacaattacttttccttttagtttcaaaatattgtcaatctcagatgctgcagcaaacctattgttctggattaattatgtgttttttcagttctcctatgaaatgacgctccttatttccgttgtccctgtttacctagttaggtcgga

SEQ ID NO: 113021 - DNA, 586 bp, Setaria italica
  Intron number 1 from transcript Si025933m (locus Si025933m .g) derived from phytozome v7.0 (chr-ID scaffold_8; pos 39 342525 to 39343110)
aaacccaggtacccaattatcacattgtataatgctatgtttctttcttcccttgccccttgtcaattaaatgatgtcctgttctttttacaaaaaaaactgatgttgtgttcttttacaaaaaaagaaaaaagaactgatgccatgctctcaacttaggatagttgttttcctggcacattatcatggtcactgtactgttttgttattatgagaccagttcacatttagatgccatattattcaaacgtaaaaatataaagagatgttgctgttgcttctaggaatgcttctacattataaattcacctatatcaattgtaagatttggtgcctgtcctcttaagttgtacttggttgcactctttccaatacagtttgattcttccacgcatcctatttgggtgcatctttttattatatctacttcacttccattgctgtcggatttcttaagagagtactatgctataaataaaatgttaaaagcaggcaaacaccattcagaaagggttactgaggtgtgatgtatccatgaattgtactttttgttgttaactgtatttatttggttcattcagctttc

SEQ ID NO: 113022 - DNA, 755 bp, Setaria italica
  Intron number 1 from transcript Si005929m (locus Si005929m .g) derived from phytozome v7.0 (chr-ID scaffold_4; pos 17 69097 to 1769851 reverse strand)
ccgcgatatctgctgttgcctactgtgagaggtgagtattgtcttaatttgtgtcgaggattcatagtgctattctttatgcattgtccatatttcataccatttaaaaatgactagttcaaggtttattagcacatgttctgtgcatttagataatcacttagatgaagattttgtggggctaaatatgacagctaactagtcagtactgttgaatgttgggaaagaaaattttgataggtaataactaggactatctatacacttagctgcagacattttctttccttttcaattggtttatataatcagatcaagtggatgggattctaagtagacagttgtgttcaagttttcaaaaagttttggaagttgaggatgaatttaggtgtattatttaatcaagccattcttttatgaaaatcttgattattcccaaagcattttgtattaataattgctggtggtgtacctgttggatggcttggagaaacattataatgaagtccagattggtgttattaactaatcaatagggtattcaagtccatttgatttatctcactatttctatttttttagaatctgaacaatatatatggagaaatatatagctggtgataacaaactgcatgcaagaacattgtttaatgacgggtttgaataggagtggtagaaaatgtgctgcatttcttcgttgtactcgttatttaatattgaatatatgatgagcatgtttatactttccttcagat

SEQ ID NO: 113023 - DNA, 761 bp, Setaria italica
  Intron number 2 from transcript Si032332m (locus Si032332m .g) derived from phytozome v7.0 (chr-ID scaffold_2; pos 34 386917 to 34387677 reverse strand)
caacagtcatttccggcctcaactttggcttctttgtgagtactgttctttgttgtccaatttgggggttttctgtgagatacacatgaacatgaacaactgcataaacactaatcacgccactagaatacctaaatcctaatgatgggagtagatgcattaccattggggatagcagttggggttgaggacgacatgtcgatgtgccgtgcctgcgtgatgcaggcgtcgatggagcggatcgtagagtagcagtgcacaccgtcggtgcaggggcttggcgttcccgccggctcccgcacacgtgtgatcggatggctgagggatgtcgggtagggcactagtctccgcgagaacgttggtctcgtgagtttgccgaccctcccttttattttgtgcgcggggcgacgggggaccgaaccagagtttggtttggcgcccccgatcagagcgcgtgacgttagtcgtggacgcgtcgtcccgtgagactcgcaccgacgggcttatcccgttttggccgcgagatcatcccaacattttcccccagaagaaacggggtcaaattggaatagaagaaaatgggaaacaaaacgaaattgggcttgccggctcgtaaatgttgataaattcggattgtttctttctttagaaaaaggaattcaaaatgcatggttgaatttgaattttgtggctgtaagccaaatcagtaaagcttacttgagttcagctcgagtaaatttgctgcaatttcgcaggttggc

SEQ ID NO: 113024 - DNA, 775 bp, Setaria italica
  Intron number 2 from transcript Si007602m (locus Si007562m .g) derived from phytozome v7.0 (chr-ID scaffold_4; pos 17 630144 to 17630918)
ggggtcggggtggggcaccaacgctcgcatcgaaggtaggggccggcggtggctgtcattttctagtgattttttggggtattgtcgttcgtaagatttcagtgcaatttgaggcaaatttcattggcaaattagtgctaggatatttttgatcatgttcaaggaggtcccctagcgaatcccccacttaagcttcacgaattcgttgtttcttcaaattttgtccttcacctagggtttgccaaaactcataaaattgatgctggtttcctgatctttaggagttcttctttctggatctgtttcccttgttgagaggagcttgtggtttaaatttcgcgtgaatcgaagttgtttagatcgagttttggcagactgatgtggacctgggactgctgtttgtgtcttgctcggttctgaatttttcaccagctgcacctctatatccggagctgtgatctgctcttaggcagaatatcagccgtttgtttctgttgatctctgcacagcagttctacttctcagttctatcaatcgattcagactgcgcttgtctgaatttcctgtgaagcttaagatttttatgaagttgttagttgccgtgccaatttgctgcgaagctttggatctgtgtgccagattggattgtctgatctgctacagctgcagaccggcagttttttttttcctgtctctgattctctttccagctgcagcttgtgttcttctctgtttttcagcttgtgcaggtaagcagcacaagtgcggtgaggcg

SEQ ID NO: 113025 - DNA, 755 bp, Setaria italica
  Intron number 3 from transcript Si025979m (locus Si025979m .g) derived from phytozome v7.0 (chr-ID scaffold_8; pos 40 366400 to 40367154 reverse strand)
aagacaacaggtgcagaatcgacatacaaacaattgctaaatcttcacgtcttctttgctccgagatgctatgtgcaatctgcaatgaactgctttcgatgtaaaatttgagaaatatgctgtaggcactacgaatacttggataactacatgttagttccttcatttatctgttagctgcatatatctatgcattgtctgttagttggctagcgcgtcttgttggagacttctctacatacaaagaacataatatcctgcagggatcaaccaaagaaataaaacaaataagtgccgagctcatgatgacaggtatcaagctcaatgttggcgacaacaatctaacctttactctggtcctctgaccctttcccccaaccagtcaataccaccgcgaatgatttcatgtactggttccatgccctatgtgatcctctatttcagctgtagtttttatagttactgctctagattaaagttgtttattccccattttaaaaacatcttcgcttttatggagtatggtccttacctgttgtttatttaaataaagtttagagtgcacttgtggtctagttcatcttgaatgtttcttttgcagttccgttattatacatcattacactgttgcagtctcatggatcattacttgctttgttcactagtcaatgcttctattcttttacttcattgtccattcccagttacagttttcatctttctcaaaattaggatttttcagttggaatttggga

SEQ ID NO: 113026 - DNA, 500 bp, Setaria italica
  Intron number 1 from transcript Si028129m (locus Si028129m .g) derived from phytozome v7.0 (chr-ID scaffold_8; pos 13 653095 to 13653594)
ggagaattgggtgtcatcaataggcgatgtaagtacatagagtactctttttatttgttgtttttaaattgtcaaatatatgttccagcattgattattgttctactttgtttgactaagggagacgtatgtttcctattgtgtcttgtgagtatgctcgtaagcggaggtggtttcggatgaaggattgtcgtttacgtaatcttggaagagtaggtgttgtaatagtagtcgctgaatttcttccttctatttttttactaatttttgtttattctataaactactttgttcgtgttagtttgcaaataggttttttttgtgaaatataccctcagtttcttgggagcgttttgctccggactatattgaatttttgaaaggtaatcaaagtatatgtatagtactcttttgttttaattgcgtgttatattaactgtatctatttttttgaaactttgttgtggatgaagcagtatcttatcctgatcggtcatact

SEQ ID NO: 113027 - DNA, 1063 bp, Setaria italica
  Intron number 1 from transcript Si026315m (locus Si026315m .g) derived from phytozome v7.0 (chr-ID scaffold_8; pos 12 639545 to 12640607)
cgccgccaagcctctcacgctgtggctgaacggaggttagttaccggacgaagcgtgctctgtttctttcttagtgtaaattttggcgcatgctgtgctcttatttttgcttgcctgaagtgatggatttgatgagaaaactgtgatcacttttttatccactgcctacctaaacgtttgcatctgaatttcctttgatggtgtttcgtgctgaaattcagagtcgactgggttgactgtcggtgaatttgctttgataggactgacgctgcagggatcttaaatcaccttgtcatggtcccttgaattttgatgaattttcgtttttatagatccattgggcagcctatgtttcttgccgtaatcacccttttctgattttccaatataaggaacttggcagtgataatgttccattagaaacatgaaaatattgcttttaaaattatatacacatatttgccatattgtgattggatcagaaactttctcaagtacatcttcaacatacttttttattcgccattcaacatatagttcgttgttcatgtgggaatgatggcaggcggtgtttcctggactggaaacaaaggaccgcctcctattcgccatctgctccacacctgccaagaaacattaggaaaggatcagcattaaaataacttgcgtcttgacttccttttaactaagtactagaatagtatctttgtcctttgaggtcaccgcatgtgaccttgcccgtttagagccttactccattgggctttgcgttttgtggtccctgtggattttaaaagaagtgagacatcatttgatctccatgcagcaaaagacacaccgaaagaaagctccaggcatgatttgatttcctctctctatataaacaaaagtaaaataaagcttctttcaagtaacacaaacttgatcacaacaatttcccatttaagaacttatcacaatattttggaatgcgtgttaaattatctgcaatttctcctgcttgtagtgataccccatatgatttttaggtcccggctgttcttcgattggaggtggtgctttc

SEQ ID NO: 113028 - DNA, 562 bp, Setaria italica
  Intron number 1 from transcript Si006702m (locus Si006702m .g) derived from phytozome v7.0 (chr-ID scaffold_4; pos 34 480709 to 34481270)
cattggatttgccgatccattgcttccgtttgttggtaaggaaccctaactttggttggatgaatttttcctctgttttttcctctctctccttagattagactagtttgttgtgtagatcgatcccttttccggcttagatgagcaatcatcaagtccaaatttgccgaaagatggcgttcaactgagcgctcatgcccaaggctaactccgcccccggtgaatacgctggttcatgttttgttggaacgcctcaagcgattcgcttcgattttgttcttctgttcttgtaacggatcgttacgccgatatgcatgcgctgtaatggttcctccacttgatttatctgctgtgagttttgcgctgttcgtcagtcaaggatgcgatttctttcaccaaaaactttcagggggctcttgtagaagcctgaaatcttcgtgtttggctcctgttgatctaatttattcttcttgttctgacgtatgttaatctgatttgttcgattattgataatatctttgatttattctttgcaacagagttcttgaagcaaaacaatccg

SEQ ID NO: 113029 - DNA, 330 bp, Setaria italica
  Intron number 3 from transcript Si032949m (locus Si032949m .g) derived from phytozome v7.0 (chr-ID scaffold_2; pos 12 356340 to 12356669)
gggcacagctgctgcaaatccctgggcttctcaaggtttgtttccacgcctcgagtaatttgatcatccacttctacgaaaacgagtcttgttcaagaaacatacaaaaaggagaaaaatatgttttagcagaaaaagaaagcttgctttggtttgaaatttgaaggaaccatatgattaaaatgatgatcataagaaattatgtgccaaaagaagaacacaatatgcagctatgcaccaaaagattataaatggtttgattttgtgcacaaacacaaacacaaacacgcagactgaaatctccttttgtgtctgatgacagagatagtc

SEQ ID NO: 113030 - DNA, 1029 bp, Setaria italica
  Intron number 1 from transcript Si028898m (locus Si028896m .g) derived from phytozome v7.0 (chr-ID scaffold_2; pos 47 335881 to 47336909)
cgcgcggcggcgcggtgtcggcgagcggcaacgcggtgagtgccgctcgatttcctcgcgacgcctgtcgtggagcgcggcgccggccgggctgttggaatttggcgtgcgtttggtgtcgggtgccttgctatggtgggttgttttgctgtttttgtggtgttgggaatatttgggttcgatcgagctgcggggcgagatggtgaggatgaacggccactgcggtttgggtggacggggatggtgtgggtgtttcatggatgggtggtgactgttgcctctgcggcgaggacgacgagagctgagttttcaggggccgccgcagctgctactggatttgggttgggttggacattagagggccagggggcggtttccatcgggtcacatagtagctcaaattcctgtgggaattgacgattctcgccgcagagatgtgtagtgaagtgttttgtgggtattctattggaaatgggacgatgatatggaggcccttccgatgtttcaagtgaatttgtgattgaaactagataaactggataagaacttctgaattgctatcagaggcgtcggaggatactgatttatttttttgggtgggggaatgactatgactcgatgttgttttaaagttcagatgtggtagaaggttgaatattgagttaatgtgacgattttttttttgttttttggagttcgtcttgtttatgtctgtttatgcatatgtgggtgcacgagagcagtctgtggaaacaaatttgttgattggagagctccctcacttccaaaaataggcaacttctctcgatagttcaacctgtttgttgtgaatttgtggtgcggtgcatgttttcatcgaactttttatttaacagtgctgtttctctttgaaacaaggcttctggacaagaaacatttcagattttgttctagtgttctttcatatttgtaattatcagtacaatatttctgacattcatgaccctctgggcaggtatttaagagtggccctctcttcatatcatccaa

SEQ ID NO: 113031 - DNA, 973 bp, Setaria italica
  Intron number 1 from transcript Si030848m (locus Si030848m .g) derived from phytozome v7.0 (chr-ID scaffold_2; pos 47 211690 to 47212662)
cggctccgcacgtacgcaatccagctcctccctctctgctgctatcctatcggtcgcggttaattcattgctggctgcttcaggaaattgttgcacttggttggtagtaggactgcacgaacagagtggagttaccgttggttgcttcgctttcgaattcccctcttcccgaaagtagaaagcttgtgtccttttgttcttcttcttttgctcatgcatatatagctgggaatggatggtggttctctgtacttgtacctgcctgcgtacgcagagtttgcaccgatagaatagaaatcgttgtttgggtttggccacgcagtaggttgtggaaaagtgtcctggtgatttggctgcgcttctttttgtatctttgcttacatatcattacgacaaccagacagggtcattctctcccccagttcttttttagcaagtcattctcagttagcccacgtgttagcattggtgataggtcactgcccttgatatgttgcttgctttgaatggaatcttgttgctatgagctgctctacggcaaggccacttgttatgtactccctccgtcccaacttactattcattttgatttttctagatacaaaacttttgctatgtatctagaaaagccaaaacgaatagtaatttgggacggagggagtactaaaatagtgaatgacccatgtctatgggactgaagcattgtttcttctatttttcttgtgttaagtgcagagtcactcatctacaaccaataccttggatggataatttgttttttaggatagtatatagctgtacaattgagattagcttaatcaactcttatcagggtagttctgcaggaacgagtttgttttcttcttgccgagatatgccccaacaatctggaagcagttttttccccttaactacattctctgtccaaattaactaattctgatttccctttcttgcgctgctgtctgtagtt

SEQ ID NO: 113032 - DNA, 463 bp, Setaria italica
  Intron number 1 from transcript Si031842m (locus Si031842m .g) derived from phytozome v7.0 (chr-ID scaffold_2; pos 13 686266 to 13686728 reverse strand)
gcagcagccggagcccgtcagctacctctgcggaggtaatcctctcgccccctatcaccatccgcaccttcgattcgttctcagacttcggtcacgccggcctcgcgacggttgatctttctctagcgcagcagcaagcaggggcctctctaggctaggattattcgattcctctctggagccgcggcttcggttttttgtcccccattcctgtgatccgctgctgaatcgagggttcaagttgagattgatcctgaaattgggcgttctagcggctaccggcctgttctgctttcctgtgacttgtagtgtttagttttgaatttctcgtctccactattttcctcagtctttttctttggcagaataaggatgaagaggatttctctttcgtttgtttgatttgaaaatttaatgttctgcttcagattgcggagctgagaacaccctgaagccaggagat

SEQ ID NO: 113033 - DNA, 409 bp, Setaria italica
  Intron number 3 from transcript Si032560m (locus Si032560m .g) derived from phytozome v7.0 (chr-ID scaffold_2; pos 14 254539 to 14254947 reverse strand)
tgaaaggattggtgcgtgacagctaaatgaagcacttccctttaatgttttatatactccagtttataagaaaatagttgcctaaatgttcagccattcttcattgtttaatacttaagacccaagtatcatgttaaaaagagcaggtagtattaaggatgctttgaattattattgtattgtaatttggtttcccaacaaggcctttctgtaaaatattaagagttatttacatttcattttatggctagacagacattccacagatatgaaacaaaaaaaaaactgtttacagggtattgtcagacgttttatttgttagtttttaatgctctgtcgggcatataatgaagttattgacaatctgtgcacaatcatatgttttcccttggctgatgttgttcagggg

SEQ ID NO: 113034 - DNA, 605 bp, Setaria italica
  Intron number 1 from transcript Si032868m (locus Si032868m .g) derived from phytozome v7.0 (chr-ID scaffold_2; pos 96 7425 to 968029 reverse strand)
ggctgcgccaggaacttgccagtacaacagaagctgtcagcaatctgatggctatttttttttgttgaaacaggagggttttatccccgctggttatatattaaaaggaaaggggatgaataaaatgtagtttgtaactaagagacaaaaaaggttaagaagaaaatcatgaagattacaacataagctctagccattccaccattgattgtttccagacctctttaactctatgcagaactaaagaataaatagtcttaaagcgtgcgatggccccttgaattgttggtggtatgtcacgaaagattgaatcatttcttgccatctatatgcaccagctcataattatgataattttcatgaagaagggaacttgaagctgagttttgaaggtattcataatggaaaaaggatccagttgtaaatctgcataaaggtctaaatggatccaacagtcttgagcaaacgggcattccagcaaaagatggaagagtatctcaattttgttgtagtgacaaaggacacagttatatgagggcagagccatatgtttttgaatctgatggctattttggagactgacagcggagctgcccaagaactgc

SEQ ID NO: 113035 - DNA, 787 bp, Setaria italica
  Intron number 1 from transcript Si008564m (locus Si008564m .g) derived from phytozome v7.0 (chr-ID scaffold_4; pos 50 28528 to 5029314 reverse strand)
tattggagaagaaggcgaatccctccaactggtccgtattgaggtaaatccgtccttgcttgctgcaattcacctcgatgttgcgattttgcatatgcagaaaaaaaaatcatgacggattttagaggttctgtgaatttgcatctttctagtgaaaacactgcacgattccatcgtactttgctgcaaatttagcttcaacagttgcaattctgtgtgattttgtagattctgtcgatattttttggttgatatggcaatttatatggaaacatctatgtttggtgtggcaacttatgctttgtgctttgttagtgttctgttagatatcaacttatgtttttgttactttaatgtgtgttataatccctgatgctagcaccaacatggctatttgaaccttttgtttgtgttttttgttttgcagtttgaagatgccttttaagggtctttttgatctgaatgctgagccacttcctattattattgacattctagatgcgggtgttattgggcaagatgagattgctgaggtgcctgaagccctgttgcttaaacctgtacgtactccagatgccgcaacgctgcagattatgaatccacctatgcccagcagcaacttgggtgctcagcagcaacagtagcaactggggtgctgaacggcaatagcaacaactttgatgttcaatagcaacaacagctttttcccgaggcgctgcaagctgagtctggtggggtaacagtacctacaggtgctatatccacttttggagttgctgttgaggat

SEQ ID NO: 113036 - DNA, 340 bp, Setaria italica
  Intron number 1 from transcript Si026815m (locus Si026815m .g) derived from phytozome v7.0 (chr-ID scaffold_8; pos 40 263505 to 40263844 reverse strand)
agcacaatccaagagctgaaccagcagcagtaagggtgcgtgactttaatttggctccctataattcttgcttaatgtcctcgatctaaatttctttcttccttttgatctaaattaatttggcaatgcgatctaaagtcgcattatttttttcttttctggcttcccatttccatgcttctgaagaaaaaaaaaaacagaatgagtaatgcgcgaacaagagcgttagcaatttcttcggggttgatctgaagaaaaaacaacatgactaatcaaagatcatacacagctgctgtttttcattgctccttatacactgtctatgcttgcaggtgtttac

SEQ ID NO: 113037 - DNA, 775 bp, Setaria italica
  Intron number 2 from transcript Si026393m (locus Si026393m .g) derived from phytozome v7.0 (chr-ID scaffold_8; pos 31 287291 to 31288065 reverse strand)
ctgtggttgtcaactctacaattgctgcatcaaaggtatgacctttgtaacatcaagcaataatttcccgcatgcttttctctgagttttgtaccttactgaatgctctttaattacaaacttgtatcctagcttattcacccattttaacacaattaacttcgattgagaactgttggggcaatggcagattagctttattgatctagggattaagggaaacaatggcagggactaagcctagttcgccctccgaagaggctctgaacctagatgactcaatctctgcttacctaaccaaatcactcagccggcttatattacaccggctgctaacaaactcactaacaaccagggaatggataacaaccatcccatctactgctaatctcttgccgttatctaaaccacccggcgcctaagcatccagtgctgctggcaccatcttgctgcggcacctatatgtgcacccaacaaaggcatccacaacagaactgttgctgtagacagatgttttattcacccatttgtgcatgctatcttcatgtctatatttattctgtctttgattttctatatgagagactattttgatagaaatttatctttgattattttgttatttatgtggtacgaggagaatttatatgcaaggaatatggaaccaagtcatgcgcaataacttatgcagtctaacttgctggatgggctttatttcagcctagaatcttctgttgatgcatcctattttctatggcaggatcctagaaggata

SEQ ID NO: 113038 - DNA, 589 bp, Setaria italica
  Intron number 1 from transcript Si026645m (locus Si026643m .g) derived from phytozome v7.0 (chr-ID scaffold_8; pos 34 6371 to 346959 reverse strand)
tctcaatcgggcggtgaacgctcgcgattagcgaggtaagcgaatcgcgatctgatgcaatgccgctagttccattttttttctctaggagaaatttcatgcaaactgggttggtggaggcgacctgtattcaggcttttcgcaagatttcaacgggacgatccccagcagcttcctagcttccttcgagatgctaagaagggtctaaatttgcaaattttgatgtcaaggaggctgccagtgttgggccaaatagctgcgagttggtgaaaattgcttctcgcgttttgagtagttgggcgtaaattctattgcacttaggtgttctaatttgttcaatacctggggttaaatttgctggtattgatctgtttctctatatttttaggtaagtttcactatgaatatggttcatcaaatagttctttactggcaactgcctagttttgtgtgccagctgttgaacttctaaattattcctgggattcttgttcgccaaagcatattggttagtctggtcagctctctactggttagttgtttccaacgtatattttctgatattgctccattctctctcagagcaggc

SEQ ID NO: 113039 - DNA, 549 bp, Setaria italica
  Intron number 3 from transcript Si029379m (locus Si029379m .g) derived from phytozome v7.0 (chr-ID scaffold_2; pos 28 202307 to 28202855)
cgggctcttgcagaagagccagggattgttgatctgttcttgacatatcctttttttttcattatattgttccttccactgcctgctagtactattattgagttgctttgatttagcatctattcttgatgcatcatgcttacgcactggattcccttgactgtaatgtgatcgcactaacgaatggccaactggagtgacgaatggggctgacacttccagtgtgcctaatcaggttttggatcctcatgggtttgatcctgttgttgctgaattggttgccgagattaagccaaggtttgatttctgacctcatacacaaaaggaaactgatttttgagaaagtcgccttaaagtactaacacacagtttctgtatggctgtatgctgatattttacaacgagattactttggagttactgaccactaacttagccagatcagtggtttgtatattatgtagcagaagacacaatgtagtctgatccagaattgtgacattgtttcatgcagatatcatattgctggtacgaaaggtgtcttttatt

SEQ ID NO: 113040 - DNA, 975 bp, Setaria italica
  Intron number 2 from transcript Si028724m (locus Si028724m .g) derived from phytozome v7.0 (chr-ID scaffold_2; pos 35 27929 to 3528903 reverse strand)
acctctccgatccgcggcattatcattcaaaaaatgtaagtttggaaaccaccagaatctgtagtagttttgacttgtaaattactagatgctgttaatattggttcttgtttgtgaacaagcaatcatgtgaatcctggtacattctaggaattcacgcagctaactgaatgcatttaattcatgtaatgttcatcttcgtccttggtaatagatctattttcatatttgtctacatgcattgttctgtggttctatgaacgtaaatgcaatgagttcatttcttgactaataaagtatgctggccatgtaattgaagtttgttacttcagaatcatccattctttgggcagttccagatgatcggctggtgcattttctcttgtgggcagaaaattctgcaaaaaaagcactctgagctgtcaatttccagtgcaattttgtatgcaaatatctgatagtggcaactgatgttgtttctgggtattttacagtgttcgcctaggtagcttgcaccatgtacgtctatcatgctttcatattgaatcgttacaagtctgaattttacattttatttatattttgctgatacagcatggttaatcttagttcagtagattactgttacattgtattagtcatgcgagatgcatgtattcgtatcaaggtatagcttttacttgattccgagtacagaaaaacattttttagttaattccaattagtagcactagagggtcattgaaattgaaactgagatgctttggttcatttttatctttctttactgtatgtttttctgcataattcaatggtttactagagaatggttcaaaaagagatagtcatttctttttttttcatttctttcctttttggtggcatatcttttttttttcaaacagtaagtatattctgatgtttcttttcatctatccagtgcaagttgcctgaaaaagagggaacaatttgcta

SEQ ID NO: 113041 - DNA, 998 bp, Setaria italica
  Intron number 1 from transcript Si028743m (locus Si028743m .g) derived from phytozome v7.0 (chr-ID scaffold_2; pos 43 644286 to 43645283)
tggggacgggaacgcccctccctgcgagatcactggtgagtcctcgctttgccttcgacaggactagtactagcttagcttagttcaaaatttttgcgagattttgttgtgaattgctgtgtttgcgctagtcggatcgttgatcggatgcgtatgcgtgcgatgtttgggaattgccgtgttgctacttgcgttggacagcgtctgagcgtgtaaaaccctagagttggcgggcactagctaaactgaactggccatcgtcgttcaggttctgcagttctattgctgtgattctattggactggaagtattataaatgctttggtgctcctttgttaattttacgcactgttttgactagtaaactataatgagatgccgacatgcccaaaccctgctcgtaatgtaaatcaaaagttgatgtgtgatcactgtgtgagatataaaggtccattttgttcacctagatgtttaagcaactgagtcggtcactcattgtttagccaatttgtcagaaaaaacggttgattactcaactaatcggccaaatggtcatttaggcgaatagggcaggcagctgtgcagcgtttgcattccctgtaattggcctaaatggcaggtgaacaatgccattttctgttggaggagtgaccttggtgtgcttcttaatcggtccatgatcatagcaactgtaactggtagttttggatttctactctacttcatcatggaatgcccatctaacactgattatggtgacatgcccaattccactttgagagcgtacctgatattgtcatcttctattgaaccgttgaatttccatggaagcctttaataatagtgtgaaatttgttgacggttgcatctcattctgtgtgcatatttgtagttggtttccatttttcatcatgtacctatcatggataaatttcaagtcattttgttatgcgcaagactaattcaaggatgttattcagttagtttcaggggaaagt

SEQ ID NO: 113042 - DNA, 801 bp, Setaria italica
  Intron number 2 from transcript Si030241m (locus Si030245m .g) derived from phytozome v7.0 (chr-ID scaffold_2; pos 11 737925 to 11738725 reverse strand)
ggagcagtccaaggctcagagcaataagatagaccgtacgatgcttacattcgatgcttgcttttattttcttgtttattaatgttgtgaattccagtgcaacaatgaacttagttgctcatattcagtttgaatagtatctgaaaacaatttcctggcgattcactaaaattttccggtttttaatatgaatcacgttgttgctggatgcacatacacttaaggtagattcagatattactttggagacggatagcaacttgattatgcaagaatatcatcatgttgtttcttgcatcaaatttatgcagatcaaattcatggatacaataatgattgctctcatcaaatgcatgctttcccaatatcattgtgtttcatgtattaaatttttgcacactcttataaatgtgtacacagttatttaggtaggtagacgaagaagtattggaatgccattcctctattttatgtcatacaggctacttttggcctttgggctacacaaatgaaccctttctttttaagggcgccaattcacattttgctcataatacatatctattatgacttccttgttttcaaaagttttatttttcttgtctcatatatgactgcctcggttctctatttaaacagaagtttctaaggtgttctgctacaatctattcgaataacaaatttgagacctacatgttaaggttcatattcaaaattacatcatttacatgttgattctttgctgatttagtttttatcttttcagcgaagcagaaatcttcgaagcctcctgttactcaa

SEQ ID NO: 113043 - DNA, 809 bp, Setaria italica
  Intron number 1 from transcript Si030241m (locus Si030245m .g) derived from phytozome v7.0 (chr-ID scaffold_2; pos 11 738785 to 11739593 reverse strand)
gaccggaactcgattgggttctccgttcgtcgctggtaaggaatccctaacgcgcttcacggattggttgattgcttgcttccttttccgggttgggattagtttggttttgaataggcccttgctgcgtcccctcgaatccaagccttcctttcctgcggcggatgcgcggatgctcctccagtccatccaattcaatccaatccaatccaatccccttcgtggttgctgcatttgcttgcttggttgctgcgcggcgaagtagttttccttcttcgattgttttgggggcggatggagaccccggagaccgccgcctggcgatggtgcaggtactgggtctcccggtagaggaattttttcctcgaatctccttctagttgccggatgcgcccctctccacgcgcttctggaaaaggctggctgaaagcgacccgcgtccctgcactcactcacctcaataatatctggaatggataggccccaaacccaccctgaaagagaaatagaacggtactgctagctttattcaagttatttagagagcagcagtactaccggccggcgtcctgtttatctgaacaagtttgttattagttcgcacatcagcaagaggtaaggccttcgtcgtacttggtgtgttgagtatggacaggtggggatgggtgttgtactctggtacctagtcgcagagtgattgctgtagatgaatgacgaatgccttcttctgacgttactatttatggctaactccctttttgtgttttgctgcatgtgctgaagtggtgaacaggcgacgggacagcgat

SEQ ID NO: 113044 - DNA, 883 bp, Setaria italica
  Intron number 2 from transcript Si031168m (locus Si031168m .g) derived from phytozome v7.0 (chr-ID scaffold_2; pos 45 438969 to 45439851 reverse strand)
ctctcaagaaaagtactatggctgaacttctcatggctaacctttttatacttattacatctactgattctttgtaatggtattgctccttgtaccctgatatatggctttgctgcttgcttgctctaaacctgttaggtagacaatcattcctgtaaagtatttagaggctgcaatttatgtttctttcaagtagttggttgaagaattgggttgaagcctcacatgaatcgtcctgcagctgtcaaacttggtctatctatttaccgtaggcaacaattctcaaaaaaaaagaagaagttagtatattagttgattcggtatttggtggaaatggtggagttgctttatatttcgtttgaggaaatgatggaaggtagttttgtacttttcctagtttatgaaaaatgagcacctatattactgagtgcccttctattttggtattttatttcccttgttctactttggttgactgcaaaatctggatcctcaaccttcattattgtctttacacaaactagtcctgccttttactggacatttaggcacttgaacttttcttgtatactgtttcggcgtgtggcaaatttgtcatctgcattgctgaatttgttgtcttcttgtactagctgccgctctttggattatgatattgatatgtagagaattgagagacttgtaggaccaattttgcaaactcacaattcagcgtcttaaagcatcatttggtttttcattactagtgtattttaccttgttctgttgctcactctatcatctttaggtattactttattttccattctactttggcctttttctggctttattttgttaattttttagtttaattatcttatgtttgatatgttattagaga

SEQ ID NO: 113045 - DNA, 1020 bp, Setaria italica
  Intron number 1 from transcript Si030627m (locus Si030627m .g) derived from phytozome v7.0 (chr-ID scaffold_2; pos 45 645768 to 45646787)
cttcctactcgacctcgcctccaagtcccaagaggtatggtgctgcagctgctgcttctcactgttcctttttcaattcaatctctctacgaggaatttgcttccagtttcctgtttccatcatgtgcagaatcccagtatgcttttttatttgttcatgatctctgtggaactttaggtggaggggatgggcatgttagatgctgctgcaaatcttgaatgctccccaactgtgtgccacagaagggattgcagtactagaggtcctggcaattttgtacagccccccatgtctatccgccgttagctcgttacgccaatttgggggttatcttgaattcggtgggacacgtttcagttgtgttttgtcagaaaaataaacctttcagttgttgtgtggagttgcattgatctgcttgtggattggttcaagcttagatatatgagatgtctgaaaggtttagtattattcgaagaatacatgtctcaaagctttttggattaaattgatttctattggttttggaccagttgtttaattgtcttaaatcttcttctgatgccaattgtaagcttctgttaccattttgacttctagaggaaattagtattgtaaacttctccagtttgaacagctgagacttctattttacgtagattttaccattttgacttctagaagaaattcgtatggtaaacttcagatcgatctacttaacttagtattataaacttctagaggaaaataatattgtaaacttctgttaccattttaccagtttgaacaggaacaacgtaaaatggtaacagtccattccaaaagaaagggcagatctaaaacgcctataagaatgtgtagcttttgaagcatatatgtatcataaagtttcgctgtgtatccaaaatgaaaggatttgagacaaggaagatcttgttggttatatatgtttctaaatcatctaaactactgcgatacttttagcatcagaatgacatttttaacaaattaatgtagcagga

SEQ ID NO: 113046 - DNA, 1013 bp, Setaria italica
  Intron number 1 from transcript Si026893m (locus Si026893m .g) derived from phytozome v7.0 (chr-ID scaffold_8; pos 19 352024 to 19353036 reverse strand)
tgctcaagataggtggagggaaggaaaggtcaatcagtttacttaacttgaattatgattgttcatttaccttttgcaattatcctcactactattcctttataaagatttttttcccaagataggtggtggaaaggaattgagattgaggactttcattaagaaattatggagatagcactctattttgctgtgaaatttgtcatttatgcccatctatgtgatctgctgtaggaactttgatctggttatcaggtgcaactgtaacaaaagaatagtgtaattacgcttatgcaaaattcattctacaatcagtacattaccttgaatgtgaaaaattataaatttaaactttctacatgagacatgcatccaattacaaatgtatcttttttcctctgtatggtttactttaattcctcaataattaaattttattttattccattttttattcacatgtcaactggcaggctgtattggaacatattattgatgtaatcattccatggtttggacaattggatggtcattttccatctcgggtgaaaacttaataaaatatgtctatgggctattcaaatcatgtattttttaacgacaaaaggagatgtagctgattcagtattgaatgttatgaagcatgtccaccaacaaaatatattctcacctcatatccaaaattttgcatcctaatttctttttgtacttctacattaggagtcactatagaaacatcaacaaacacaaaacattattttcaccttttgttgttgttgaggtaagtaatataatcaactgtaattgaggttagaaatttggtttgctgtcaaaaagaaaagtaagttgaaaaagataagtattcaaataggatataggaagattggttggtgatgatctcatgaaacaattattagtgttttaaggataactggatttcaagtaaaagaataatttattttaattctactgaaaaatctgagctttccaaattttaaatatttattttcagg

SEQ ID NO: 113047 - DNA, 547 bp, Setaria italica
  Intron number 4 from transcript Si031061m (locus Si031061m .g) derived from phytozome v7.0 (chr-ID scaffold_2; pos 46 791406 to 46791952 reverse strand)
gaagcatctcacggacgagagaggtaaatatttaatacacttgatttatgggtgcttgttgaaagatagatagctgccattcttctttctttctttctaatcatgtatctgctgtatctagttctccgtatggaatccacttactgcgcagatattttatctttaaaggtttctaaagttcataaataagttacttctcaaatgtatttggttgtacctgccaaaaatgtcagtgagatatagaagtccaataattaatcacttcctgttacttctatttgaatcaaaacactagtcttggataaattaacaaatactgtgatgaacaatgcactagggcaatgtattttacctttttttacatatgaatcaaaatgttgtttattgtactaaacaacctgctagagctatggattttacgtgcacacagctacatgaatttgagttcagttctcttttccatttgaagcattgttgttctcaacgttaatcttgttttcactaccaatcagactaccctgccagtaaacgaattaaccaagtcact

SEQ ID NO: 113048 - DNA, 807 bp, Setaria italica
  Intron number 1 from transcript Si007445m (locus Si007445m .g) derived from phytozome v7.0 (chr-ID scaffold_4; pos 19 20695 to 1921501 reverse strand)
accaagaaaaagaagaggctttgcaagttcacagggtatgctttgcttcttgttccctttgttatttgtgccccctgtattagactcagacagcttggttgattgttcattcttcttcaaaagaacaaaagatctttttgttgctattaaatttagttcaattggtctaaaaatgaactctgaattttagttatctgcaagggtgagtttgcttcctatgatgcatgcatgatatatgcaatttaattgatggtttactaatttccggcatagataagaataattagacttctcttgcatggtgttttgcttccttttcagttgggacactcttaacttaaaattataaatgattgacctgcatgtccaaatgattgattggagtgccgtcttggcctaatttaaggcagcctttgcttaatcactttctccatgtctgtcttgttttgccttaaaatattctttctttttagtttgtgattgcatgtagtacaagcatctaacaaaagctaaaagaatcaaagggtttcgtacagagtctcattcttctagcttctatctagcttgactgtcatgcgtcatgggccttaccgcataggtgcctggatatattcatatatatgtgtgtgtgtgtgtaatattgcaacacaacaaggttatttctgtaatgtctgttcatttatcatacaatttgaagaaactagtatctttaattctgttatatttttgctttgttatattttcaactacacatcactacatcatcttgacacatgcacggcgtgcagagctagctgtttactgcga

SEQ ID NO: 113049 - DNA, 701 bp, Setaria italica
  Intron number 1 from transcript Si007993m (locus Si007993m .g) derived from phytozome v7.0 (chr-ID scaffold_4; pos 48 76489 to 4877189 reverse strand)
gaccgctgccgccaaaccttcccgaagaaattccggtgagctcgccccgtcccctcttcttcattcgaactccacgggctgagcagggttcttaaaatctataggctctgcgcgtttttgagtccgtctgcaggaattactgaaccttgatttgattcttctccgtgttattgagtcaatgatgccgttagttctgaattatgcctgtaatattggatttgggctctgaacgttgttgcaattcttggtacattttgtgctaataatactagttgtttcgctctgttggaactcctcgcgttgatttggggggaatctacatattccttgattttgtagtcaatttgcgagaactactgaaacttctccgtcatgaaatcgtttgcatctgttcgtgtcagtttttactcttttgttgaagctgctagctagttagttcctgtgatcatctggagcctgctgcatcaccattggaatcctttcggatggcagataatttgagctgttcgtcgtaggtgtcggtctttggtcatttcttgccagatgataactggatatctaggtctgaacattgctacatgaattcagatttcttcattcagttaccacttaccagtattgtttgcttgtttttgtttcctaaacacaagcgttccattgcaacagaacggtgttgagcatccagtggtgttgcggcgcat

SEQ ID NO: 113050 - DNA, 916 bp, Setaria italica
  Intron number 1 from transcript Si006540m (locus Si006540m .g) derived from phytozome v7.0 (chr-ID scaffold_4; pos 39 953318 to 39954233 reverse strand)
gcgcggcaccaggtcgtcgccgtccgctgctcctggtaagtgacaaccaccaacaagccgagcgcgcgccatttctctctctctctctctctctctctctctctctctctctctctctctctctctccttcaatctttggcctcctgatgaggccacttcctctccccttgaaatgcaatcggtgaattgttcaattgtttggtaaattcagttattctcgcttttaacttcagttctggattcagaatgatcatgaccactcgctgatgctgcaacaaagcgtatcttttttactcgccccttaccagtgtgttgctaattccatcatgtggataagaatttcctgtgcgcagagctgcccacctatttgattcattatgctttcaaaactgaaactttgcatgcctttacttgcctgattgcgtattatgacataaagttgtcttcttttattcacaaatttctgttctatattgtaacaaacctcctacgaataatcatgctactcaagcctacagcgcactttctcaatatatttggccgatttgatgcatcaactaaattcttgctcttgcaactaaatttgttggtttctgccaattgtgctgacttttcttctgtagaataaagcaccacttcttctttttccccccttacaaaatgtttgtccgggccatagagaacccttgcaccatgtatatgttgttagtacaaaccgggagaatattacttctttttacccgaatggtaaaattcgccttataacctggtatcttaatcccagtaagcaaacacagcgtcttacatctaaatcattttagtgctatacatggtaaatttgcacgcacttgaaacttctcgttttctatccatttattaacgcaagacctcacatagtctatcgcaagtgcagga

SEQ ID NO: 113051 - DNA, 315 bp, Setaria italica
  Intron number 2 from transcript Si031025m (locus Si031025m .g) derived from phytozome v7.0 (chr-ID scaffold_2; pos 36 254859 to 36255173 reverse strand)
tggcctgggccaattcccagaggttccccaaggaggtgagtactgaaatgttggtgttcaaacattcaaaacaccgcaaatgcttctctctctaggcttttgcatttaatttaggcaatttgactttgaagtgaagtcattgcacttctccttttaagaagaataaaggaaaaataaaaactggcttctgctatacaaactcactagaccagaactggcaagttgttgctctctttggatatcatctagctctagtgttgtgaacatcaaatgaaaatagtttcttgggtcattttaggagattccaagcactat

SEQ ID NO: 113052 - DNA, 837 bp, Setaria italica
  Intron number 1 from transcript Si007890m (locus Si007890m .g) derived from phytozome v7.0 (chr-ID scaffold_4; pos 40 67678 to 4068514 reverse strand)
ggcggcgctccagtcctgggggctcttcgcggtacgtacgcatgggaccatgttggcttagactatggaggaaaccacgactgtgaaacacgagtttgatccatggtgagtggagatccaagaatgttttgttctcttattaaactactccatctggttcaaaatatagattttttttataatttatgttggttaaacatttttaactttgaacataatacaattattttattatgattggtaatataagacacatgttactagatttcatcttgaaaacaatgatttttatatattagtttacattattggaagcaccatatttttatacaaattattgagcaaagttttacctaatagaccatatcaatgtcctagacgacctacggagtatatgatgtaccagagggagcaggtgatattactcaaacaatcttaaaaatagaattcttcggattaatgtttctgttttctttatttttcacgaccctcacaaaatcttcaaaggttataagatttaacaccaataatataatccacaactatcgaccaaggttacaagaattatattgactgatttttctttacaaatactttcataatactccctttgtctcaaattatagatcgatttggattttttaatttataaagtgtgttatgcacttagatatatttttgtctagatgcataataatatctatgccaagtcaaaatgacatataatttggaacggagtattaattagcacaactgccaacaattacgaattttaaaatttgcacaaatggggagagtagcatgcatgagctaatttcaagcttttaggtgaccggc

SEQ ID NO: 113053 - DNA, 618 bp, Setaria italica
  Intron number 1 from transcript Si028069m (locus Si028069m .g) derived from phytozome v7.0 (chr-ID scaffold_8; pos 35 521116 to 35521733)
caactgtgttggcgggccatgtaagcgcccgccagaataatggtttcaagaaaattcaaaattatttaaatacttggtaaatgattttaaaattatttcaaacttttacacattcacataaatattatttagtgaattaaaaaatattatttcatagataacacgtggtctggtgttttatttgtcttgaagatttcgagcaacttgcaagttgcaagtggtcttgcttccgaagtctgaaccctcaccgcctgcgtcccctgttccgaaacgatagaaacctgcagcagcctctgcctctgcatgtggagcagcctgccggccggcgttcactcgatcacgacgagcaccacttccgatccttcacgtgcggccgctgctgccggcgatcgccggcgtgcatcgtaacttgcaccccccacgtgattggccagaccccggtcagggatggatgccccatcgccctcgtgcctcgcgaggatgctcctcctctgaatcaacgacgaccaacaaacaaaaaaaattacttttttcattccattatactgtattttcctttacattgtatttcattggtatttgcatactctgcaggcggtctccgacgaggcgcgcgcc

SEQ ID NO: 113054 - DNA, 855 bp, Setaria italica
  Intron number 1 from transcript Si030454m (locus Si030454m .g) derived from phytozome v7.0 (chr-ID scaffold_2; pos 25 087143 to 25087997)
tcgtttcgagggaatactacggccacaagaagaaggtaagccctctccacgccctcacaatatagcgaaaaagagaagccatcggaatttcttcgtgagcccctaaaacccaaaatctcgcaagaagaaaggaatccaagttccaaccttttgcatcttccggttccagttcgtagggtgaggccctaaagccaagcataatgaggaacaaagatgcgaaatttgcaatccttgggtcctccagtttgatttctagtaaggatctaagtgggatcatggtggctctatccgggtttcggtttgtgcggcgtattgtttctcttatccttggacataatgaagaaggtgtgacgatatttgagcggaaattaggctcgcccttctacttagaaactcgagttataatgttagggcttgctgaataaaaattaagatgtttgctgcagccaaacgtgcttgcgaaggagtttggctgtaatatttgttattccctctcttttggttgaactctgttgcagtaaaggagcaggagttgctcaaatgttcatttcttgtgcttgtctagctttccaaagcttcaatgaggaaaactaggaagggatagcttttcccttcacaagaaaaacattctgcaataggatttcttggtttgtttcttgcattctgttgattgtattgctaaatcgtccccataatgatcttcaaagaaaaactctaccctagtacttgacactacaaagtttagctgtatttgtggtttttcttttcttgctctttgttctgcatttcattggtaatcttatcagtgtgaatatttaatattctggtattttgttactaggtgcactctgtagc

SEQ ID NO: 113055 - DNA, 992 bp, Setaria italica
  Intron number 2 from transcript Si031207m (locus Si031207m .g) derived from phytozome v7.0 (chr-ID scaffold_2; pos 16 123131 to 16124122)
tacaacgtcagattcctgtctccttttttcttttttttttccttttttctttttggcttcctctgttcaaaatcaattcagttcaatatactcgtgctctcccaatattttactcaagagcaaaagattgattttctttccacatcaatgggatgggatgggcatggcaaagttcgggcaatttccccaaatgtcaacatttctcctttgtgtgcatttatacatcagtaacatatctattgtagaaaatccatttggaggattgcattgaagactgaactcttgtagggtttaaaatcagatgctcgccattgaatgctaatgtgtttacaattgattcacaagactcaatgtgagttgtaacttcatctgggataaccacaatggcgctcctattatcgttgcatgaaatttgttggtttagtgaatggtacttcatttcatcaatgcaaactggaatagttgggttatttcctcggacacatatgatgttcttggtttatttggtgtatatggttgtacaaatagataacataactgtgagactcgtttcatattcaaatgagttccagtcatctctattttttctcttctactccctccgtcccaaattgtagttcgttttggcttttctaggtgcatagtttttgctatgcatttagatgtagtatatgtctagatgcataataatatctatgaatctagaaaagccaaaacaacctacaatttgtgaaacggagggagtatattgtttttacagatgtcttgttttgttcatcagccatcatattttgagttactgtaacaaggttctaggtgcttatgaacaacattttccatattctatcttgcctcatgcagttgtacaaatatacatcgatgtgacattgcatttttgcttgctttcctcaatgataaccctaataaaggagaacttacaagtttgaatgctttcagtaaggcaattgagaaggcggctgacaacccaaagg

SEQ ID NO: 113056 - DNA, 879 bp, Setaria italica
  Intron number 1 from transcript Si029947m (locus Si029947m .g) derived from phytozome v7.0 (chr-ID scaffold_2; pos 36 321276 to 36322154 reverse strand)
tcaagcacgaccacttctcctcccccggcccccaggttcgtcccttcctccaaggatctccccttcccctctctctcgatttcctctcatggggtccggtggtagcttgctggttcttgatttggtggttgcgtggcaacttcgccgtgagtgagaatcaggcactttgtttcttctactataatccgtgttgtttgtgtgaggggacatggatggcggcgattggtcccgttgctggtctgtgtggagtgcggcgtgtgattaggatttccatttcggtttagttcttgcaaatctgaagtgatttggggatccaatactgaagggggatctcgcactgttctgcggccttgacttctggggcttagctagggtttatattattcaattccagtccattagcacgttgccccgaggttattaggtacttaagtcaaaggaatcagaatctcggtatctgtaaacaacacattatcgggagcgtccccggaaaaagcctgatggtgggccacatccttgagaagaaaaacaccagttgggtggatataaagcaaaagggggaagtcattattcttaaatctctttgcaaacagtcactatcctacatcgcattttaagatttaagatagttccatcagtctctccaacaatgaaaagctaaaaggtgtcctcaactaaccggctgcatctaatttgccaaaccgctgaattatctgcataatcttgcagactagggagctgatgtagtgatattatcagtatctgatagatcagggttattgggaggatttgtcttttcaactgatcaaggcttgctgtaaccggaatccatgtttgtgaacagctgggcttggaggcaacaggtgcagagtttaacac

SEQ ID NO: 113057 - DNA, 865 bp, Setaria italica
  Intron number 1 from transcript Si007148m (locus Si007148m .g) derived from phytozome v7.0 (chr-ID scaffold_4; pos 96 70715 to 9671579)
gtctcgctgccgcaggccaccttcggccccaaaaggtatcgcgtctctctcccattgtattctgtaaaaagttgtagttcacacttcacagtagttcccaattttgcgcgcgaaggcacaatagttaatttttgcaccttttcgttcatgcttcaagctttgaattgaaggtatctgcaagcaaccctgcaattgtgcacttgtgaatactgggatgcatattttgatcggaccaagtagtcgttagcaggcgtaaagttaaaaaaaaatcacataccaatctatatgtacactgtagtggcctagtgggcacaaatttgcgataggtgatagattcaccgtgatatgaaaatggctcagattcattcatactaatcaaatgacttaccagttaccactgccattattttgtacggtccaattcatttgaggagctcttctgctagcagtgttctacctctacctgctcctaaattcatacgaggacatgcaaagtgttcgtgacttacgcataaaaactgattaagggtcatttagtctctaggatgcaattggttacatggatgtgtactcacagaaatgtgcaaatgaactatatatttctaaaagctgaggtttgtatgctaactgttgggcatagtgaactctatttagtaccacatgtttcaacattcaggatctgtaaagaaaaatctattctcgtctctgtggcatgctgtatttaattcttccttgttggattaaaattgctaactaagcctttttttatgctctgatgtacttgagttaacgctgtgcctgtaaaatggaacctaataatgtattatcactttattctctgtgtttattgtggttttgtttgcag

SEQ ID NO: 113058 - DNA, 843 bp, Setaria italica
  Intron number 1 from transcript Si029223m (locus Si029223m .g) derived from phytozome v7.0 (chr-ID scaffold_2; pos 25 049574 to 25050416)
tcttcaggtttacaaacaaacctctttcgttcatgcattttacacctttgtttttggaccgatatggatgtttgcaaattgcaagatctttgttatgttcttgatgtgaaggaattactgccactgtcacatggaaagctcaaaacagctcaatcttggatgcaccgcggaactttgtggttttgctgctgcataggaaacacccctgccacttaggctccattctgcttatccttgggtttagctggcaaggttttctcaagtagttctaatgatacctgagactttggagtcttggtgattagtcacagtcacgagatcggttgatcatttatcagtacagctcctgtagttaacaaccttctgagtttttgaccggtgtatgacaattttgcttctagaggaagcagacttcttggttcagaaacttttttcctcacagacccctttctttcaacagaattgcagttcttcttccttattatttttccttagaaaaagtagataatcaaaactattttattttagacaccagtcaacatagcgaaacattgcaatcattaatattttttactccttttttttggaaactacgaaacttttggccagattgataacctccccttttttgcggtgatgctacttaatttgaagtttgaactagtactgataaatccacacggaaatgttttaattaccaccagccaccagccacatagttagagatacacgaaggttacctgaaagtattcttctctcatgtttctaaaaactgtagtatgttacaaatttcaaccactatgactagggaaccagagtcagagtggagtttggtgactcaac

SEQ ID NO: 113059 - DNA, 1032 bp, Setaria italica
  Intron number 2 from transcript Si030653m (locus Si030657m .g) derived from phytozome v7.0 (chr-ID scaffold_2; pos 26 759894 to 26760925)
ccggttcttggtacacaaacagtacttaccttccagaccccacaataacaattttgcaattcttttaatcttttatcttgttgcattttagatgctgcatgttttgcttgtttgatcttattcaacacttaatttacataattgatgtagtttcgacactggtcattattgaagaaaaccgtaaccgtttagttatctgacagtttatttgcttggagtggaataatgtgatactctctctggttgaattacttgttgttttagcctcttttacattctttaaaatacctgttctacaacttctaggaacgcatggccctttttttgccagtcttaccttccttgattgcatcattgtgaacttctttccccatgcatgcatgctttagagaacattaattgagggtaggatggtgattttatctacctcttcagctcttgcatccaagtctaaaacaacaagtaatgtgaataggatgaactacatcttttttgttttgcattcaccaactttagcattgccccaaaagttgtctcaagatgacattcatatttttgcatttgccacctttgaaattttcttcccgcaattttttatagaatgtccgttctataaatagttgttcttggccatataggtataactagtgctgaagccacataattagcctaattgttctgcattatcagtttatcactacatggtgggtgacacattgagtaccaggccactggttttataaacttccaggacatcaatgattgatgcatgcaggacattgtattttgctgttcattaatcatatttataacaaaatgaaattaatcactgtagcatttgcgtcctgtattcttttcaatgcagcgaacaaatgcagaggctacttgttgattaacttttagggatgtgaacaatgcttactatttctccttttgattaaatctttggttttgctattttggttgccctatcctaaaatctaagcactgcttgatgttcacaattagccaggaagctggaagaggaactcg

SEQ ID NO: 113060 - DNA, 472 bp, Setaria italica
  Intron number 5 from transcript Si028814m (locus Si028802m .g) derived from phytozome v7.0 (chr-ID scaffold_2; pos 49 043804 to 49044275)
cagaggtgacttcattttgcacaaaccacttatccatgtgtatcgctgctcagatgtgcttgtgtttcattcaatgttattcttttttttttttggggggggggggggtgctggtttcataattcttgttgcgacgccccataatgcacggcatagcaaatgcatgttaaatctgttctttgagctcatcaaggcatctcaggggattagcagggtggattgctataatgtgagacttccactattgtcaagttgttcttcaactgatcaataaacgcatcttccgtatcccatagcatccactatgtgccaccgttctcttaaagtgtgaattattgctgcttgtatttgatattcctatacattgtaataatatatttactttgaaatattgttcgcaaattaagcagcatgagatgttcttacacatcttgttttctatacagatcactggccacttgtttgactacac

SEQ ID NO: 113061 - DNA, 542 bp, Setaria italica
  Intron number 1 from transcript Si008590m (locus Si008590m .g) derived from phytozome v7.0 (chr-ID scaffold_4; pos 45 25425 to 4525966)
aggtaaaataaaatttcattgcagtaaataatcttgattatgatgaaaagactgaagaaatggaaaaactaaccagtaattgcaaatattcttgaagatggtgagcaaagaatcaaaagaagaagtggcaacacctagggcattggtagtaacaaattttgaggtacagaaattaataatttgatatccagaaataaaaaaggatgcatgcatagttaagataaaaaaaatgaaaaacatactttgcaggtagaagaaggagaagaaacaaaagcacgaaatgacaaaaattactaggtcaatgatggaatctgtcaaaatgacattttcagtgcgttacaattagaggaggtgagaacaaaattgggaacacaaatgtaaaaaaatagatcaaaataataacacaatttatgggaatgaataaatgaaaaacatacaatgttttactttgtagattccaaatccaagagaggatggttcagaagcaaatttagtgtcagaaaatgttgaagaaggtagtaatgaaaacaaagaagaggaaa

SEQ ID NO: 113062 - DNA, 820 bp, Setaria italica
  Intron number 1 from transcript Si028685m (locus Si028685m .g) derived from phytozome v7.0 (chr-ID scaffold_2; pos 10 060576 to 10061395)
agattcaagtagacctcggcattatcaaatctggagtaagcatattgcaacattggaagattcacctcagttccatcgatgccattggaagattcaccttagttcccaccctgctcaccggaccggcagatctatgccccaggggcaggatggcattgctatacctatactaggctagctatctggaaataaggacaatttggcatagacactgcgaatgtgactcataaaactatggtcctcctgttggggaaaccttgttgcaattttatcaatattgtactctgcacactgccaagcagctgtttccattcgcataaccgtaaagcttggattttggggtcatataaactctactctgttatggaaggaaaggaatacctcactttatgtgtaaatattttttagtattttcatttatttggttcttttttctacatcagattttgatactagaagcccaaccaaattggaacaaataaggctgttattttagtaaaggtttcattcctcagtcatgctatttcttgagaagaaaatagacacccttcagtaatattaaaaaaaattgacattcggaatgtaggctatgagaccattttaattctgacctgcaatatctttttgtgcatttagatttgccatatggaatttgtatgtgcaattttattacattttgtttttattggattttaggtatatattttatgggaatcattgttaaaattttgaccatgcttatgtacctaatgtggcaccaatcaaccttagagtgtaacgttttgtcactttgtcaattactttatcttcttgcaggtgg

SEQ ID NO: 113063 - DNA, 793 bp, Setaria italica
  Intron number 2 from transcript Si007688m (locus Si007688m .g) derived from phytozome v7.0 (chr-ID scaffold_4; pos 24 681319 to 24682111 reverse strand)
tgtggcagcacctactgcaactacactattcgcaggtgaataccttccttcttaactgccctatggtatctgattgttttgctgatcagatgttacaaatttgcattgatacctcacatatagagtagttaagtttttaaatatcaagaaattcttatgcatgtccacattgttttagatttttttgaatcgaggtctcctccatttccattacgaagacggaaataccacattgttttagatgagaatatcgtttttatatattctaaaatcagtcacttctcgagttaccttcactttcatattatttggacaaatccagtgatcctttgtatatctattggttgcatttcgttaaaaataagcacgcaagatgttatatttgcttcattttagttcagtcccgttgaccactagtcaaagttttaatggaaaaacctttcagatcagttggccaggtaaggttgaaactttttaaactggggaaatatcatggtgtagttgccttgattttttctccctggaaaaggaaatacatcatgtgattcgcttttttgacaaacaaaaggaagggattctggtatattgatggttacctagaacttttttctttgttttgtcatctagataccagtactgctatagtggtattatagtgtatctattttcttttgcgatgttaacattgataaatcgaatttgcaaagatatggattagaaaagtacatttgattattaactaaattctatcattgagataagagtttgcattttgatgcaggggggagacgta

SEQ ID NO: 113064 - DNA, 848 bp, Setaria italica
  Intron number 2 from transcript Si029227m (locus Si029227m .g) derived from phytozome v7.0 (chr-ID scaffold_2; pos 43 966071 to 43966918)
agcgcctcaacaaggcgccgctcgccaccatcgaggtactggccacctacccatccccgccatctgtctccgccacacggcgagcgccgagcgcacagttcgttcgatgggtttcgcattccattgccacaaatttcgtttcgtttccttcggattatggaagggaatccaactgaatccccatgggggcgggaaaaggaaggaggtcctgcattttgcatggaagtagtagaagaaagccgcccctttcgaggcaggggttcttgtgctccatgctcttgctgctttgcctggtccacctcgtcgctttggaagggttgaatggctgttcctcatggaccatccatgcattgggctcggtttcctttcgtcgcgggaggaaaaagtcgcgctttttggaggaatttatgggcgcccgtgctcctttggttcattggagctgaagcgaaagatgcttgcttttgattgctttgctttctttgctggagaactcgagtcatttctgaaccttgttacattttccctactgtttttgttcaatcaaactagtgacttcagcttgtttactcccacttctttcgaatgcagatatacatactagcatgcgcaatctttgtacaatctacattttgtgttcctttcctctttcaacagcttgggcaattgcagacgttttttacatttgttcagagaaaaagaaaattatgttgacaaaattcacatatccttcacatcattcctgcactaattttagcacatcctctcctttttctgcatttttgcaactactgattcttcgacaccaacttacagagcccagacggtgacatcatagactgcgtgcccat

SEQ ID NO: 113065 - DNA, 672 bp, Setaria italica
  Intron number 2 from transcript Si028639m (locus Si028639m .g) derived from phytozome v7.0 (chr-ID scaffold_2; pos 40 995357 to 40996028)
acggggtgaatttctcaatcaatacctgttcatttgtagtttgcctttagtctttcatgtagatattgtttgtgagctttttgataggatattgtttaagattaatacttcactacttttttgtgctgtgctaccatgcaaatatgagcggaaggcttaaacaatgatttcataatgtagccattatggaaaaggtattcttcatggagcatgcatagtacgattctagtgaaacacctgtaccatggttcaggtctttaggaaaccttttcatacaagcaagcaagccaagtgaattaggagcctacatgttttattaacatgcgaattctcacacctgcaatagcctgtcatactcgttcatactagcttgatatgcctgagctcccatgatactattttgttcaagataaatgcttgcaagtatgttgaaatggcacatctaattagattgtgacacatggttgaggggaatttcttagcaactgcaacgggaaaattggttatgaataatgggagcaattccgtcttcctccaaatatcaacataagaattacattttttttaattttgaaatttatacacttcctatttatgaactgctttgtatgtgacttcagttgtgttttccaagtttgcttatacatattacttttgtttctcagtatttct

SEQ ID NO: 113066 - DNA, 544 bp, Setaria italica
  Intron number 3 from transcript Si026586m (locus Si026504m .g) derived from phytozome v7.0 (chr-ID scaffold_8; pos 13 049727 to 13050270)
aggctggagggtacgttctcttccctgattcactttattttgttatagtgattaagcgtgtttgtacttcacgtgtacattaaatttttgttcttgcgcatggatctatgtttatcgatactagtctttctttattggctttactagatgcaaaacgatatgtttgtgtagcctggattctggagaacatgtgaaatagtcataagaaatagtttatcttgtttgaagtggtatatgaatatgattgaatattatttgtgtggatgcccgatgttcttttggtggactccgatagatttattattatttcagatgcaatgtcttcatgtgattcagtattttttttcagttgagacaatgacatgtacaactaggggctgtttaatctttagttgacttatttcgtgatgaattttccttgaagtagactgctgtagaatcattttaggtctgttatccgaatcaaatttgtttatgctgcctttcctgaaatttgttgacttctacagtatcatagagagtgttggagagggtgtgactgacg

SEQ ID NO: 113067 - DNA, 814 bp, Setaria italica
  Intron number 1 from transcript Si007573m (locus Si007432m .g) derived from phytozome v7.0 (chr-ID scaffold_4; pos 37 863540 to 37864353 reverse strand)
tcggctccggtcacccgtcgttccacgcaaccgtaagcgactgtcttctcgtatgaggctcgtacccggatctagatgcaagcatggtagtagttgggggtgatacttgtgtttggaggtgggttcctaagagcatagaatcactggaattttttgttgattggagctctggtttgcgtgctggttcatcacaatcgagattagactttcgctgaattagttgactgtaattcgtactcctgagctgaaggctgaagtgatgttctggggcaacatttttgcgaatctaatcatactgtatcagtgttctagatgaagatgtttgtttagctgccaaatgcgatgttctgagactgagagcaagcgatgctgattgggtcgggttctgcttgggtttttaattgttttctaagttggatagtcgatatgttctgcaggataattgttcacagtatatgccatgatgttagacttgtttgagttgaaattgttggtttgattagtacttaggaccaatttgctgttgaacggcttatagcaggttatgctaaatgcaactccagtggttttttctcagtatcaatccgttaacaagctacttatcctactgtcctgtgcccaattagtatggtattttgatgtcttgcagccccaacatggattataatatttcaactcaggttaactcgttgtgtagctgtgtactgtggaattgtgtctggtggttgtaacacaagtatgattgttaaatgtcatctgatagtaatatatgtttgcagtcgaagaggaagaccagggagcccaaggaggagaa

SEQ ID NO: 113068 - DNA, 941 bp, Setaria italica
  Intron number 1 from transcript Si007050m (locus Si007050m .g) derived from phytozome v7.0 (chr-ID scaffold_4; pos 59 00140 to 5901080)
cggacgtcgtcaggcagccagcaggagccctccgtgtaagttacttaccaaatttttattcctcaatctgttaatgtaccgcagcatcattctagattctacaaaccgctgcatctccaggtacgctaatctggtccacttaatttttaattttcaatattttaatcaatgttgatgggtgatgactgatgactaatataatattgaattattgatgttcagttatctttattctggatcatctagttccaagattctaatcatgtcttctgcaaaccggtctaatctggttaccaaaagcgtaagaaaaaataaaaaatagagaatttaactcaatctcaaaagaatagttctagtttttagggatgtagactttaaatttggtacagagcctcgatttttgcgggctcgaccctaagcacataggaaacaaaagctaaagggagggttcaattacatagcacaggtatacgctactagtttggaagctcgaaacaaacttagcaccccccccccacccccccaaaaaaaaaaacgcgcaagaaatttcacaagctgttggctctgaagtggttggacactgttacactgttgtcgtggtccttcaattagcattctaagtgcgtcccgttttcagctttaagcgattatatattcaaaatcttgcaaaactcggagtagaaaactcttaagtacccggctcattagaaaatggagatgaggaggagaagacacacattgcttctcactttcttaagttgtcaccacatatgaacggtaggtgtagggaaactcatcacgagcccaggtcgctgcatcccagtcacgcggtgccccctagaccctagtcctcctcgctccaccagcactccagcagcaatctctgctcgccgctccccttggcagccagacagccagtagcatctgcatctcctacgacc

SEQ ID NO: 113069 - DNA, 682 bp, Setaria italica
  Intron number 1 from transcript Si029848m (locus Si029848m .g) derived from phytozome v7.0 (chr-ID scaffold_2; pos 40 557501 to 40558182)
cctccctccctgcggcttcaacaccagggtgagatgagattctccttcgcctcaccataccctgcttcacttccggttaattgctgtaatcagttgcctgattaactgcgttgatgacccaagatcctagacttagaaatcagtagtaaagctttgttcggaaagatattcggaattttggcaatagggtacagttggggtgtcggctggtcaagcaataccccaactgaaagaaccattttcccccctgtataagattattaagtactggttcttgtttttttattacgcggtgcctattttgctctccgttcccctgtgcagttgcctcaatcgatcacatccgtagcttagttcctgaatctgcctaaagttcattcaaatcgtttatattatttgatctgaggcagcccatcgcgcccattgcttgtttctggaatctggaatctcccctaggaaattcctagaagattcagccttcacttttaatttttctgttgaaaatcttgcctcaactcttattacagaaatccaatattatcactgccccaaacccatcaaagcaatttttttttataattccccatcaaagcatttggaggggtctgtctgaatagcccaaccttttcttcttcccccttttgcagcctgtcaattattcagtatcgcatcagtggattct

SEQ ID NO: 113070 - DNA, 913 bp, Setaria italica
  Intron number 1 from transcript Si006537m (locus Si006537m .g) derived from phytozome v7.0 (chr-ID scaffold_4; pos 31 453239 to 31454151 reverse strand)
ggcgactccaaccaccggtgagcttcttctgttctttttgttaaaatcttagtttgctataagaattgtgaagaattactattcttgttcctttatgtttttggttactgaatatggatagggtgcgtaatttatgcctgctttgagttattcgctaatcagttcattcatgtgttgcaattcataataacttacacaatgtagtatccttagccaggcactatttatcatacttgctcatatgatgtattaaaactatgctatatatttccttctagcctttcctcaagagcagctatcatattgcagagttgctaacaaaaatgatgatacctcgtctatcatagtcataacttgctaaactcgctcttcctacattggataaagttagcattcctcctttaaaattaactaaaaagtgcaaagaacatatttccctttttttttaaagtttcccttttattcttatttccttcatataacggattggttagtccctcacaatttaacatcaacatctggaattgactatagtagttttgaatcacaacttaacagctgcccattcaatcaatctgtgctattctgttccatgtgtcctttgattttgatcctgctacagcaaccccccactgtaactgcttgaaaccataaatttggcaaaaggaacggttactttatcaaccagaaactaacagacaagcagtgttgcactgttaataactccatccataccatcaagaaaaccaaacaatcaaagtgtaaggtacagtgcttgctttatttgacacatcacatgctatggttgtcctgtgccttttctaggccttaccgatgaagtgtttcttaagttatgaattatttttacgagcaaagctgattcgtcatgttttctactgatcagatcctttct

SEQ ID NO: 113071 - DNA, 961 bp, Setaria italica
  Intron number 1 from transcript Si030746m (locus Si030746m .g) derived from phytozome v7.0 (chr-ID scaffold_2; pos 28 467210 to 28468170 reverse strand)
gtggccgccgagctgtctccgccgtggcggccccggtacgcctcgctctattccctcgtggttatcgagcccgtggaggtgttgtgcggctgtgcctgcgcgcgccaagtgtttgcgttaatgccgcagcgtgtggcgccgccacgcgatggcgtcctcggttgttggaggattttgtctgggtaatcggatttgcagcttagggtgggctggagtggtgctttgagattcgtctcagttttagagttccctggagcggagcgcggatgattccgggagtgacgcggttgcgtttcatgggagtaaatcgaggcaacgagtagctcgaaatagatgctaagaaatccactggtgcgagtatagtcatagtgtgtttatgtatgtaccctgtgcacttcattgtcagattgctacttgcaacattatgctgaatgtgctgcaacgacatgttagcctgggtctgcctgcaaatgttattaactgatggattcacctgcattgctagtgttttatagcaggatctcatcatgatggtgatggtattatagtccctaaatttggttcaaactgggctgttcaggatctgatgattcttagtgtaaatgtgacacatgtataattttcatgcctacaattaccacagtggctctatcagggactataaagtcatatcatatattcaaataacacatttcacttgtagttgtagttgccttactgccacttatgtattgctactattgctgaccttggatttagtgccgcagttgatactccaaagcatcaagttaatgcttgaatgtattatgtgtgatctggagtatgtggttacgattccaaggatgtgtgtgctggtagatactttgctttttcttgagttatcgagtttttttttttttgataattctgggaatctgcttctccagggttctccctgcccggggttaccagtcgagaggtt

SEQ ID NO: 113072 - DNA, 1066 bp, Setaria italica
  Intron number 2 from transcript Si032704m (locus Si032704m .g) derived from phytozome v7.0 (chr-ID scaffold_2; pos 30 438834 to 30439899 reverse strand)
ccaagtgccccgtgactgggaagaagatccagggggtgagtggctgctttgctgagcatatcctagtctgtagcacagcttgtgatgtagttcttaccgtttggttagcctttcgctttggtagtgctattcgcgttggaagtaggcatgctggtggggaaatggggtgttgggggttggtggttaatcttttcgcaaaatgtagtctagttagatgttaatctcgatcattatgttactttagaatgtttggcacttgtctttagtgtggaaatggcgagaatttgtggtctaacttgcaattggtaggcaatgagttcagcttgtaagaacggagtccatagaatggcttctagaatatcctcatgtaccttgcagttcctagtatcgtcactgcagtgtattgtcagagcataacagcaatttcacattggaacaagcacagtgtttactttcttagtgcaatcatggttttgtttgtacagtggcagttcttgtacaaaatactgctacaccagtaatccatgtctgcatgctcacatgtgccttctgtatatatcttgttggttgtaatatgcttaagaagattagtcttttactgttgaaacgtttgtggatacaatgctgtggtcttcttgagttcatttaagcattggattatgcactgtaagtgccaaagattggtattgtcatactaggcctaaaatctatttaatcaactgtattgcttgagatgatgcattgaaattcaaagcttttctgtgctacacactacagaatgcatacgcttcatgttacaatggcagaagaaaccactatatgttctttgtaaacataattccattagtgcttcttcctctaatcttaggaaaatggtgcctgatgaatgtgtttcagtaaacagtagtatgttttgaatttttgatgcatctctggattagcattctagagaatgcttccatgttctatttgactgtgtgccttggatatgttattgtgtttgctaacgccgtgatgacttccatttccagattccccacctcaggcctgctgagtacaagaggtc

SEQ ID NO: 113073 - DNA, 619 bp, Setaria italica
  Intron number 1 from transcript Si006266m (locus Si006266m .g) derived from phytozome v7.0 (chr-ID scaffold_4; pos 39 494738 to 39495356)
tggggtccaagccacgtcacacggaaccactctcaaaacagtccgaaaacaaacgggttttaaagttgagggatgattggtactcggtttgcacatgagggatgaaattgagaccatggcaatacacaagggaggactttttccttctctctgccatattatttttttttgcgaggggccgaatattaatctcctctgttattaagaggggaaaaaaatctttgatttgggattcgtttcgctcccagaagaatacacctcgttcaaattcacagacggttcgtggtgtgcgctttgtaccaactctactagaagaagtaatgctagcagtatttgctccccagaaaaatctgtccaaatcaggtacaaacataaaacagagtattcagaatccgctcaacacgaaatcagcgacagaaacaatcctagtcaaacctctccaatctcccgtgagtgagaatcacaggcccccaatctctaatcctcctccgcctggcctctctcagcaacggccagaagcatccaccatccaaaaaggccggggaacccaacccaacccaaacccctcctccaagcacaagcagcaatcgcgtcgcgccgcccccttccctaatccatc

SEQ ID NO: 113074 - DNA, 806 bp, Setaria italica
  Intron number 1 from transcript Si006308m (locus Si006308m .g) derived from phytozome v7.0 (chr-ID scaffold_4; pos 38 111271 to 38112076)
caattcccgcatttcaggttggactcagcacacaccagagttgagctgcacccaccaacaaagtttgctccgacattcagcgaaggtttttccttctttcattaacaaatctagatcgtcagatcatgatgagacttgccttgagtccatcttcaaccttcagcagcagcgctttctccctacacctccaataccttaatatgtaacccttcccttttgccactaatcctgtgagctagccatccattccatcattcttaaaatatgtaattaattaaaacgtatatatatgaggatatagtgtgaaacgtgtataaaaaatatattacaccaaatagaaagagctatatgttcaaagtagttttcatgaagaatcaaatgacatcaatctatatgatttttttttattggtgatgtggtcaaaacaaaaaagatctgaccaatagcagtcgaaaatagacttatgtattcaggaatcgggataacgtgttgaaacatgtcacaaacacattgttaaagatgcattcacttattcctccgaaacatattgcactgactaaggtttagcttgctaatcaagtgacaaataaaataggagaaaacagaagcattagcgccaaccgaataaccgaagcgttcaacagtggtgaaggccaggacagaacaggacacgcggcgcaacggcggttacgggccacgagcgcgtgtgctaccatgcgccgtggcgggaagctaccagtccgcggctccagtataaattctcccgggaagacgaggccgcacactcacctcggcctctccatctc

SEQ ID NO: 113075 - DNA, 720 bp, Setaria italica
  Intron number 1 from transcript Si029600m (locus Si029600m .g) derived from phytozome v7.0 (chr-ID scaffold_2; pos 22 827184 to 22827903)
actggtcagtgatctcaatgcctactttgttgttgcttaataaaatgatttgtgtgccctctcatcctttgtgagtctgtgcatgtggctagattcaattcagacaagtgataggacttaaatgtcagaagtacattcttggatgctttatctacgaagttatgcttaaaactcaaaaattttctttagacatctttatattgttattctaccagtacccttttagctcatatttagtaagaggtttctaaattgtaatgcagatctgatttttcctctgtttttcatgaatgcgttgacgccacccaaacaacttttttttttttgtaaactcctgttctgtctgtagtccagaattatgacttcatgagaagttcagaacttatggtgatttgataaaccatcaggtacttattgctcactatttttatagaggtaactgtgaaggattgcaatctgcaaattgggttcagacggcatgggccctaatatctggcgaaaataatgtttcattaaatatcaatacttgatgtatcatacatgactacgtgtcttcctttatcatgtccctgaagtgatacttgatcacatgaaccctgtgaaacaaaataaaagaacatcgattctcaagatttgccatacttagaagttacctttttttgttacatatttcaatgctgactctcggatatattgccaattcaggttcagcacaatcac

SEQ ID NO: 113076 - DNA, 867 bp, Setaria italica
  Intron number 1 from transcript Si032144m (locus Si032144m .g) derived from phytozome v7.0 (chr-ID scaffold_2; pos 30 430618 to 30431484)
ggatctcccaagtaagccactactttctctgtacctcttcttagtaaatcgaccaatttcgatcttgtgaagaaactgcttctctaaatgataaatgactgcaaaaaaagaatctatatttctggttcaatagaactggtggaatgtagtttctctatctactagcatgcatatattatgtcccacataaaggatagattaggagctcgagattaatcctcaccaccagcttatatcaacaaaagtatgcacagaagtcggtagcccaagccacagcactccaacttcatgatccgccatgcaacatgacgtacaagtactgcccacacttcaaaaaactacagcatgaagatacagctttcagtttacacaattatccctaatgcaagtaacataagaacatcagcaaaacaataatgtcagcttcatcccctttaggatagatcttgagttctgaaacaaatctagacaaatttatagtagccaatctttggtgcaaaaacacaaaatctacttgggtgaagacttctacaccatcaccaggaaaaggaaatcaaatattgtgagcatgcaagtgaaagggttctgaatacaatggcaaccataaaaaaatagcaaaagtgggaaacatagtagtatagtatgcactcagtttcatccatatttacaatagtatgttcaagcaccaagctgttcatcttcaaatcaatagataccttgtagattagtactagtaccttcccaccagaatactatgtttgccctcttgacagcttacatcctgcctactttttcacctaactttctgcaatcttatattcttgtgtattgctcttgcatagaacttgcaagcaccggggaaaaaga

SEQ ID NO: 113077 - DNA, 957 bp, Setaria italica
  Intron number 1 from transcript Si026110m (locus Si026110m .g) derived from phytozome v7.0 (chr-ID scaffold_8; pos 35 977271 to 35978227)
tcggcgccgtgcccaggtcgcgccgcccgcgccaggtacgtcgactcgtcccttctggatctggtgccgggttccttgctgccgcacgcggatcgcgagaaatgttgcgtcttttggcgatattgtagtgatgcggatccgggatcgttcgatatgtaggaagttctgaattttgagctggttctacattagagcaagtataataaggggctgtaagctggctgaatgctgacgtggaggagagagaagaggtgagagaggagaagcgggctataagcttacagccgacttgagcacaggaaccaagaaactttgtgagaatggcttgtgggtcatgtattaatggtgaagagctaaccattgtacgagtgggctaggaaaaggctgagagaaaccttgcagcccgcttgctagctgcgttattaaacttgctcttagatatgggaaacttggccaatgtagtggatttttgctttaattgacaccaattccccagacatcaaacaattccttgactttaaaatttcaaccatgggacagaggaattttgtagtgtatagctatgcaacagtaatgctaatgcactttgttcaggtcaaggaactattggtgtctgttcactaactagcttgaatgtaccttggctgtcaagaaattgccaggttgctagagtagaaacaacttagctgcatatggttgggacatactacattaatttgctggcattcttctagtccagatagtttttttttttaaatatgtctttctcaaagcctgctgcagtccaatttgaaagaattcttaatatagttttctcaaagccttgtgcagtccaatttgccaggaatgtataatacagtctttctcgaagctatttaactcctgtgttatatgatacacatagtgcttgtcttgaatgcaggcgcctactagtagcccatttcggcgccggaggag

SEQ ID NO: 113078 - DNA, 722 bp, Setaria italica
  Intron number 1 from transcript Si026358m (locus Si026358m .g) derived from phytozome v7.0 (chr-ID scaffold_8; pos 27 927049 to 27927770)
agaagctcgtcgccgtcgagggtggcaatcccccggtaaatgatttactaccttacccgtctgtcatacgatgccaaacccaccggtcacgagtaagtgtcgttttttggttgcatgtagtcgttttatcatcggtatctcgctgaatatttaattaattgaacttttggaaaaggtatggctaaattttctcttgaaaaatagtttcgaagcaaaatggcattgctgtatttatctcatttttagcagtgttttgtctcgagttcttccgttttacatcacaagtcattctctcctaagatcagctttgtttggattgtaattatgtctccactacattatacttcctctgttccaaattataggtcattttggttttcctagcttcacaaatattattatgcgtgtctagtatatgtctagatgcataataattatatttataaatctataaaagctaaaacaacttataatttggagcgtagtagggagtacgtaatatagttcacacacgaagagtaattaattttagtagtgtaatcaaagtttccaacggcattttgattcatttctaacgtgtcatattaaacttacaatgacatgagagcaaatattgaattatcctattattcgcataaatgaactcaaactaaccaattaaaatacttcaatctgcatggattacgggtgccaccacgcagaacgacgacgtgatcaacagg

SEQ ID NO: 113079 - DNA, 999 bp, Setaria italica
  Intron number 2 from transcript Si027602m (locus Si027602m .g) derived from phytozome v7.0 (chr-ID scaffold_8; pos 47 41249 to 4742247)
atttgcgaggaggtcggcccggtcgtctccttcaggtgcagtccatgtttcagccacacaaacatccaataagctgatgcaggatagctggttaagttcacagaggcttatgcatttacttgtttttgttaataatatagatgcctctcagattgttcaaatccatgtggtactgtcaaaatgcctgtttgaccttattttgttattttcaagtaatgaatactccctccgttccaaattgtaggtcgttttgacttttcttggttcgtagatattattatgcacctagacatacactatatctatatgcataataatatctatgaacctaaaaaagctaaaacgacctacaatttgtaacggagggagtatatccacataccgtcactagctccataatctgtaagtgaaaaaatgtatcattttagcgaatatgatagaaaaaattctatgtaaagggcttagtgcttggcagacaggggaaggctagaaaagaatgtactgccttgctttcaaatattacatctctgcctcataaaggtggccgccttatgactgaatttaactttaggaatcctagcaatatggaacattttgatagagaaactaatttatcaacatagaaagtatcaagttccgttgctgctgcatgttccgtttcctcctgctgctgcatgcctgatatcatgtgcctgtaggttaatgcttgatcataaatcttagaaatcctaaaacggtatcatcctatcctagtatctgatatgtttgtggtatatacatgttgcctcctcttgatcagatttctttgtaagtgaatatttactgatactggttgttgtttggtcagaggtagaatgagtaacttatttattatgactgtgaagttttttttacatgtgaatctgatatgatgctgttgagctatatcttttttttcatactgaccaccccaaattccttgtagattggttattgacaaagaaactgggaagcctaagg

SEQ ID NO: 113080 - DNA, 784 bp, Setaria italica
  Intron number 3 from transcript Si031942m (locus Si031942m .g) derived from phytozome v7.0 (chr-ID scaffold_2; pos 42 668511 to 42669294 reverse strand)
ttggcaagttgaaactgagtgtctccatttcgcaggtgcgtccgtacctcttttttttttccaaaaaagggaaaaaatcattttcttctgtccagtgattattttgtgtttgctcatggcagggaattgctgagtacaatagcttcttgagtgaaacaaacaagcttcccaactgtgagaacttgtcagtatactcagtgtggaatcaccatggccttgcacgaaccatgctgcatctcttgaggaattgcaatagtataaggaagttttccctaatgttggttgatggtccttacccctctttggtaatttctcagattcttaggtctatagtaatcttcctaaccttagtgtccaatgttttaaacgattgtggcatttcgcttgttatttgagaatagataggttcctgatctggtgtttattgaggtggggctgaggttattcaaacatgttatcgtactggtaagggtagtgcagtgtggtggtggcaactggcaaggtcagcaaatttgagtcttaatcgtgcaaatgagaaaatgatgaattttgtttgttttccttttttttttctgtgtgcatgtggaaactagggaggggacaggggatgcatttttgcattggtaacatgacaagtagacttccatggaactacgcatgatttagatccaaccatcacagccacataatcaaacatagttaacctttctgtacatacttgccgctaatgcagtagtattgtgttttcttatttccagaggaactcgtgtccattgtcttgccc

SEQ ID NO: 113081 - DNA, 368 bp, Setaria italica
  Intron number 1 from transcript Si008270m (locus Si008270m .g) derived from phytozome v7.0 (chr-ID scaffold_4; pos 16 151873 to 16152240)
acagtaagaatgacgtcaaaccatagcgttttctcatacctgtgatatgagtcgaatcaaaaatattgtttattttcttttcatgattagttattttcattaaaaccacaatgacattagactgttcttttttcagttccaatatatatattgtccactccagcaggttccagacatccacatataacatataaacatcctaggcaacagcgcactggaatttttcagaacaaataaagtactatttatctttcctgaatagaaaaatcttaatgcacaattcttttaaatctgttatcggtagttagtgtttggatgtaacgtattgtctcacttattttatgaactctttgtgaagcctctgcaag

SEQ ID NO: 113082 - DNA, 764 bp, Setaria italica
  Intron number 1 from transcript Si008720m (locus Si008720m .g) derived from phytozome v7.0 (chr-ID scaffold_4; pos 69 45320 to 6946083 reverse strand)
aagcacattgggttttggaccaagccagagcataggttattgattttctagatatccttcaaccctcttacatacacaagcttcaatatttttatttattttgctctattttttgaaatggttggtacatatttttgtgaattattattacacttattacaaatatggtgtgggctatacttcctaaattcgatgtccaataaacacgataaatctcaatctatgttcaatagatgcttggtatgaaaggttggggaagatagggtttaggtttgggtgttttggtttgaggaattgatgctattgggcttagaaagatggtttcagaggtgactagactcaaagaaggtaagcaacaggggaagctctgacctatgaggcatgacacatcagaccaccagtgctatagatcactagtgggcacaatggtgataggggagctcgaagactaataggttagcaatggagggggcaaagggaacgggcctccaataatggtagtgttagaaataggaggaagtgtcatctttgaagggagaaatatctgtggaaggaagaagatggttgctcaaagtgagaaacagaaaaaagaaagagataggcatttagacagtagcatagcctaatggagtatttattgtcatgaagcacggtgatctagtattgttttaaatgattttgagaatatgaagaataactatgtttctatctcattgtttcatcctaaatcctatctcattgcaggttgttcctccgcggtttgc

SEQ ID NO: 113083 - DNA, 1022 bp, Setaria italica
  Intron number 1 from transcript Si028759m (locus Si028759m .g) derived from phytozome v7.0 (chr-ID scaffold_2; pos 14 259955 to 14260976)
aaccagatcaacggcgtcctgattccgagcccgaggtatactaacggccgctgcatccctttcttgctgtggttgcttcagtaggtgttcaactgtctaggattgtttggtggtttcatgagcatagtcaatctgctcttgatttgattacccactggccggacgaaggtgcatgcactgggaagggtaggaactaggaaatgcagtagagaagtgcggcttgtataattctacctttgcttgctggttgtacctttggagtagatctagctatggtgatcttgtccctatcaatactaatgaaatgtcttaagttccaaatgtgcaacccattgggacttgggagattctttgagacatgtactgaacagtcccaagtatacacagatgtcatttcagaagattcaggaaagtgaagtggttcagtaattacttcgttgcaaatctatccttaacatatccacaaaccaatacccatgttcatatgttttaactgaatcatatgctggctgtgccaggctgtcaactgttgcttcaaatatcttaagcgtccttcctgaccagaaaggcctgctacatctttgatgttagaacaaatgcaaatatggatcaaaccagtgtcgccaattacaggcatgcctgcaaccatgttgcatcgtaattatgccttttccctttatctgcattatcatgagatagaaaaaccattagttttcaataaagtgaataacaaggagtcatgctaaaataaaaaatgactttcaagtgcaaatcaaacagaataatgaccacttggccagttaggagatattgtcacccttttcctgttttttgctagaaactttgggactttatgagcaaatgtggtttctctagctcaaattttctgtgctattagattatttgccaaccatggcatctcaggttacacccattatcatgatgctagacgcattataattttgttttctgtgcaatgttgaacaggtagtagataagcctggtgcttctgacgaagttgt

SEQ ID NO: 113084 - DNA, 1035 bp, Setaria italica
  Intron number 2 from transcript Si026662m (locus Si026662m .g) derived from phytozome v7.0 (chr-ID scaffold_8; pos 36 64247 to 3665281)
cgttctacatcgtcaaggacgagatccaggactcggtgagccgctgccctcccgcccgcccacacattgctcgatccgcccgtttgtttcgttgcttgcatccgcgagcgcctcgtttgatgctcattggtgcgcgtcgtagctttttgttcatccgggagtcgccgtgacgcataggttgtaaggagcagggaatcatgcagacttccttgcgccatttcttgtgttatttcttttggctcggagtccctagtactgtactctgatgcgccgcttgtgagagaatgatgggaaaggaaatttacccctttttcgattgatgtgcgcagttgtatctgtctggttgtgaatctgaagagctgaacaccgtttcttgcgatgtgcttacatgccttctgtctgtttcatgtgttcttggctgcttaaatgttagtggctcagcagatgtaggtcattgggtgttatcatggggatttggatctcagttgacagagtttgcagctcttgttccaattcttaggttattctgtttcattactgtacatgtttgcaaggtagctgcactggctataatgtaggtgggtaaatcacaagggtacacgaatctggggaacttcttttcttgggtgtgaagtactagcagtacatgttggtgtggtaatgccaggcattgtcgttgaaccaaatggctaccattcttgtgcagggaagcttgtttatgatgtctcattattacctgcatttgtagttttttatcattcgaatttgtttggtttagtttaagttttaatgtgtgcatctgcattcatgcattcttctctactcacaggcgctgtaaatatatgctgatctatacctgagaaaatatttgaagtattagctttacaccatccatcccagtcagatacactactagtcatatctttgattcctcggtttagtacatatttgtaaacttttatgatgcacataactaaagttttcttctttccctgttattgtatagattgacaaagtgcaagatactttcaacca

SEQ ID NO: 113085 - DNA, 1064 bp, Setaria italica
  Intron number 2 from transcript Si030573m (locus Si030573m .g) derived from phytozome v7.0 (chr-ID scaffold_2; pos 30 910922 to 30911985)
tccagaacgtctgggtgcttgctaataaagtgcaggtatgttgcaattcatattcctttataatgactacagtaatgtagtatgaaattaggacgaaaggcagagtagggctacaagttggcaaaatttgagatgctgttcatgtgcacaaaaagaagatgatgaattctgacaagaaaggagtgaaagaaattactactatgatggaatataataccatctcccttcacttttagacacgtcaaatctaacttttttgaacatcttccgtttttccttactcatctgttcatggtagtgacactactgttatcttatgttctgtacttgaaggatggccattacaccagtctcaaaaatgtgtagtccttttccggtcctgtcatagtggagctagtcaacatgcagctttggttactatttatgtgtagtacaatgataaagctaggagctggtttgattgctgaccttttccacaaacagcatatcttgcttttactttttaatagctgctctcagaaggaattattgaatgtaatgacatccccttatgtatatttaaaatttgtagtcatgaatgctgaaaaagagggaaaccaaataatgttataaactcgttaaacattattagctcgtcttcacgtcctatgttttgctgaaagactagcaaagtctatgcctcattattatgtatgaaagggagtattcgagtgctcatttgtcatgtttcaaagtgccacaaatgggtcacttaagtgaaactaggttgtatttgtcatgaaaaccaacttctaacggccagtagcttgtcaaatgtggtgaggatctgggttgggtaaagagttatttcctatcaagttatgggcttgtaccgccttctagcaagtgtttttgttgttggctggttcgaattaggagctgcttcaattttacattacaggttctctaaacaccagagattttttaatattgttgctggtattcgtctagtctcaatcatgtcactaacacattgttctttttttgaaggtgtaagcagtacttttgttaccattgcgccgccc

SEQ ID NO: 113086 - DNA, 817 bp, Setaria italica
  Intron number 2 from transcript Si029675m (locus Si029675m .g) derived from phytozome v7.0 (chr-ID scaffold_2; pos 21 29961 to 2130777 reverse strand)
gggtacgcttttgctttgcttccgtgtctggaaccaccactgcacgctagctgctcccatgtttcacgcttgtatgcaaaatagctagctgggtgcgcactgtcattttagcaagctagcacaattaaatgagcatgcaaaacagtcaaaccggcaaacttcgtctgcttctagggagcattttgtggcgctgcgagtctaaattctgttcattttgttgttgcgagtccaagttctgttcggattacttgttctttattaatgaggaaaggggattatttttgaaaagggattaaaggtaggaaaagaggaggagggatagtagatatatgctaatcctgatgatcgatgtgtcatctgtggtatgtagtcaaagaagggatgtcttttaaggatccggagggcagggaaataaagtaggcaagataacattatttgacacttcaaaagtgcttggaaaaaccagatgctggtaccactgcttccttttttttccctccacattggaaaagatgtggcgaaaaggagtggcttgtatatattggcatgcctggaagaagaatcttgtttctttttccttttttaaaaaaggaacaatctttttctctctctctctagactgaaataacacctagcaaatggcagagctgcaataatatactacattttgatcagagccatgcatgcatgtaggagctagctgctaatgaaatggtttcccagttaagtttttttttgtcttctgaaccctagctaaaccattaaactacttcttgttgcagggcgatcaagcgctccaactgcttccaccgcaacg

SEQ ID NO: 113087 - DNA, 969 bp, Setaria italica
  Intron number 2 from transcript Si027214m (locus Si027214m .g) derived from phytozome v7.0 (chr-ID scaffold_8; pos 12 49310 to 1250278 reverse strand)
gggttctctagaaaccactaactgatttctccttggtaagaacaaatttcccaattcctctatttcatatttttattcattctgccgcatgcaagaaacacgttctatgaaataattaaactataatatcttccttgttagcatataggccattctcccaattccttgtacagtctgtgcaagtgctcattgcaatagccatttcttttatgtagagaaaggttccccgattggcccattgtatatttttattatttgaggtctgttttggaccacgcaaatatcctcattttttaattgataaactgacatcattgtgccttctgtcatatggttacccttatcaattgttcagtttgcaatttgtgtgaagaaagttgcattgaactactgaagtttttctgtatcagtaggtcttgttggatgatgttccctcaaacatatcatctgtttttgtgcaagaacaaatgagaataatagatgccatgagtagtcttctgaaatatgcacatgctgaatggccatcatattgctcaatgtacacaaccatccatgaactgaatcgcaaaagtaactccattgcatttgtgtacagctgtgcaaatttggttgtttgagctgctatacacattacacactttctgcttcactataggactacatctctcctcttcttgttggtcattggctcagcaccagctgtccctttcctcatcatcgccacaaactctgaataatctatccttccatcctacatgtgcaaaaataaatcttagtgtcttaactaaaaacatatacaatcagtagaggaacaattaatcatgacaatttaatcctttgatctactggattctatttctgtataactcccccatcgtaacattgatgatgttgtggtttctgttgtttattatgtcaactaaatttacataatatttgttccttacattgtcagagtcggcatctgag

SEQ ID NO: 113088 - DNA, 728 bp, Setaria italica
  Intron number 1 from transcript Si027214m (locus Si027214m .g) derived from phytozome v7.0 (chr-ID scaffold_8; pos 12 50285 to 1251012 reverse strand)
acttcgtctgcttccacccctactgggaacgaagggtaccagcctcagtccttttcctccaccttccttccgtccttcccatcgcagggtcagggctcagggctgtagccttttaatcatcctttactagtactatagcagaaatattgacactctggctgagcaatgctggctgccgcgcctttaattgcaagcactcgctgatcgctgttgtttggagtgcgcgcgtcagctgtttgcagaaatgcctttgtggccagggacgggggttactggttttttcctttgattaggattgcatcaccttgcggttcttattttcaagccaataatgtgcatgttcttttaaatggatttgtgttttgggtgcctgtttcctgctgcatatttgtgcagagactgtttgtgggaacgcctggctggaataaaaatgagagtaactatattttgcatgttgctgtgaaattttagctccatagatttaaggatatatttcaggagttcttgcaatattgtattggaataatgcctttgggtggagaccttttgttatcggtgtgttcttttcttgatttgatatgcacatgttctgagacaagttatacaaagtctaacatggtaacactgatacactaaatcaagttccagttttttatccgtgtatatcatgtaactttatgtccaacctgatagagagaacgccgccaaagggaacgtgaagctctgca

SEQ ID NO: 113089 - DNA, 879 bp, Setaria italica
  Intron number 1 from transcript Si030225m (locus Si030206m .g) derived from phytozome v7.0 (chr-ID scaffold_2; pos 46 657863 to 46658741 reverse strand)
ccttcgggctctccaacaagcccgccatcctcaaggtccgtcgatgcctcccacgcctctctctgtccctgcctctccaaattaatttagctagtttttactcgatgtttcatttgagtgaccatttcgctgtcctgattgtttgtccttgtctcccatcagctcgtgggtgatttgacaggcttggtgcacctctgttcatctgggatggaaatttgtttttcagactagcatctttcattcactgtggttggctttcggtttagttcccaagtaactgaagtagcttttttgggattcttagcaggacttcgattccgaatataagcagaattttaattccgaatataattctggaaacgtggttcacttatgggtagatgctgcttccttttctttctttctttttaggtctgtttctttcgattccactcgtggtacagcattcactctcatgtctcattttgatttgccactagaaaattattctttgattcctcgttcttacgagattgtagttgcatttgttggaggaacaacaggttgtttttttggatgagaaggaatctttaaatgtgggagattcttccttttgaaaagcaaattctgggagattcttgcagccttgcttggtgtcttgcttactatttttttggcctagtgggttttttcatctcctttacctttcctggtcaatactataatacctgaagtcagcaaagaatgtatattttactgagagacagagatttcgttaaccaaatgaatattcttaccaaattgaccattctgatgtggaagtggcaccgatgtttggtctattaacaattgtttgtttcttaaggtgagggattggtacttggactcgttccgcgacat

SEQ ID NO: 113090 - DNA, 689 bp, Setaria italica
  Intron number 1 from transcript Si026411m (locus Si026411m .g) derived from phytozome v7.0 (chr-ID scaffold_8; pos 57 1818 to 572506)
aacaaggggccgcccgtcacgccgctccacgagaggtagtaccctctagaccttcaatttcacatcaccctatcatttttttttcaatctctggtgtcatgtcatgcctcgtgtaattctagcatatggttgcataacacaggtttccaaagtaacgttttttctttagttattacatgctcacgacctcctgcagttcagttctatttgggaattccagcagttaggactcacctctgtgcaaccagctgtttcaaaaaaaaaaaaaaactttgatctctttgagattcacaaaattgtcttggatcaatccactcctgcaatctccacaaaatgggaacaatccagagagttttatgttcttgtgggagatagtgttgtttcatccacaaattgagttaaggccaagagcaccagtgttcgtagcacatctttaatgaagtagatgggttactttggtttggcactttccaacaaatacatcttacatgatcgttttttattttatctcattttttatagtgttattcctttatgtatgacctggctgtatgaaagtttatgcgtttatgtggtgttatgtttctgattctttggatgtgtcagggagtatcaaatatgttgctctcttattcctctatgatttatagtaagtttcttatctttcttcgtttttgtggtaatgcaga

SEQ ID NO: 113091 - DNA, 545 bp, Setaria italica
  Intron number 1 from transcript Si005720m (locus Si005720m .g) derived from phytozome v7.0 (chr-ID scaffold_4; pos 13 327892 to 13328436 reverse strand)
tcttccgtccctttaggtatgtcctccttttccttcctggtgttttagcattgccaatagctcatggtttccagtaaacatctttcatgattgagtacagtagaacttctaaagaacttttgctattttttttaaaaaaattattgtgccatatacagtagacttctaaagatttcttccttgcaacatgatctctttttttttaaaacaaacccagtacggattctgatgatggactagggtcttacttgttactagtctcattcttttgtttaatttcttagccactgaagcatacacaataattcattgctactgtttgctatctttatgttggtggcattgactccacgcttcaagtcttctctttctccctgcatccattcttttgccaattgctcttcttccagaaaccagaacatccttgagtaatctgtgactttgaatcttacagatatcttctcacatccaaagacctgtttcctgctgctgcaaatgcaagggtagagggctgacacttgcagtatcagttggggaactgccat

SEQ ID NO: 113092 - DNA, 715 bp, Setaria italica
  Intron number 2 from transcript Si006796m (locus Si006796m .g) derived from phytozome v7.0 (chr-ID scaffold_4; pos 37 958563 to 37959277)
ctgaatttgctgccttctttccaccccatataaaggtactcacattcatccctggcttttgttaggttttcagttgatgcatccttgccttgttgccagaataaaatgttaattctaaatcttgagttagatagagttcaccttttagtttgtgattgtagcccaatttattgacatggtggtgttcattgactgacaaaaagaaaatacatgttcttgtagttgatctgatggctcgcaacgctattaatttaatttacgggatgttctttcttccagttggcttgtaagttgtaactcttgctttgaagctcaaatataagggtataagggtattaaacaacagcaagaagtgagaatctacattatctttctttgcttgctgttggatttgaaacttcattatgtaaatagcatgtaatacaatacacgatgctcattaacctgataaacacttacacaatccagacaggatgtcaatatgaccactagtcaggaagaaactgttagaacaaaaggtttttgacctaagatatgcatctatgtgcattagggtttttgaagtggtcaggtccagtaattgtaaaacaatttctgttgatttagttcatgtgctgacatgtgatatctactggtacttatgcatgttatattgattttgagtttattgtatgaaacagttggcaattctgtctattgcaaggagaagaaggct

SEQ ID NO: 113093 - DNA, 1036 bp, Setaria italica
  Intron number 1 from transcript Si028905m (locus Si028715m .g) derived from phytozome v7.0 (chr-ID scaffold_2; pos 23 093533 to 23094568)
ctcgctactccagcgacgagttcccagttcacgaggtgaggcattccccagttctatgtgcttgtcgcaatttttcgttaaaatcaactgatccgtggatatgtggcgcactgagttgaggatgtttatggtatatgtgggtggttgctcgagcgattcagccgtcatttcaatgagttgttgagaggtgttctatcattatgccatgaatttattaaactacctgacctgttagctgaatcaaaccaattaggatcttcaacttagtggtgaatgtatctacaatcatgtacacttgtataggatactacttaagcttcagacctgcggttagtctatcaattttttgacacatatggattagtgttcgcatatactccacttattcatcattcatacggcatctctacatgtgtagctatgtgctgcatgcaggtattagctagagttagcgcgctctggtatttctgttttaaatctacaggaacaagattctctgaccgttatattcatgttactttaatttgaatgagattgatcacagagtaggcagccagcaaaccatacataggcaatgcgaaaggtgtgaaatacatattttggaagactacatacaggcacaagtttctatacgtatttatatatattcacctgtcatcatatttttagctgtacccaataattttggaggactttttactctgcttgcacattgttgcattcttagaatagctgcaatgttcacatcttgcagaaaatgaggcaagtgggtacatgcacaaggtttgcagcaaatacaaaatatatcgaacctggattgcatcaaaatggtgtctggatttactcatgatttatttaaaattatatatgcatatttatcattgacatcacctaacatatttgcagtttagtttgtcaagtttttcttcatttttctcttctttcttcccatgtttattagccaaggattaattatttgctctatgtgttggaattaataggtcaattttcctcactggaaaggaaggacactcac

SEQ ID NO: 113094 - DNA, 813 bp, Setaria italica
  Intron number 3 from transcript Si028905m (locus Si028715m .g) derived from phytozome v7.0 (chr-ID scaffold_2; pos 23 095255 to 23096067)
tgagttccttggtcttgtaggtttatttattccagcgttttcattttatctatgatgacagccttgttcttgcaaagttgtcatgcatcatgcagtgatttgtttgctttatatccaagcatacaatttgtctaaaattacaccttcaatttgcattagcaactaagtttgttgtaaatgttcaatatccagcaggtatctgatgcacaagtgaataccacatcctctgatgataaaagttctgaagaagttgaagatgtgagttgagaaccttaaacttctgttttgttatttacggtgctagaccacaattggttgcacttagatcgggttactttctctctctttttctttttctgtgattgaataatttgcctgagttttgaattggctgaactgtattacttgtttaaaaacaataggtgaaggtgtgcgacatatgtggagatgttggtgaggaggagaagcttgctgtctgtagcagatgcaatgacggtgcagagcatacgtaatgtttttttgctgcattgctttcctttctatacaactgttcagttgcatttgggaatcctgtatggtaatggttcaagttgcccatttgctgttttctgatttttaattgctgactggaaggccaaaggcacaatgaggcatgccaatgcgcttataatacatttacaccattattatctttgtgtatatacctccgggcaggaagaaattgcacttttctgcatttgtctacttctcaaaagaatgtgctgttaatctgctatgagtttttcaatctttcttctttacttcaggtattgt

SEQ ID NO: 113095 - DNA, 576 bp, Setaria italica
  Intron number 2 from transcript Si033254m (locus Si033254m .g) derived from phytozome v7.0 (chr-ID scaffold_2; pos 44 837393 to 44837968)
caggcagaagtgtaagcatcgccccactttaccacttctttcaaccaatgcttacaatatttacattaccaaatcaaatagagtgaacttttcaattgcaatattcggtacacgcttaatatgaaaaaggtgggcgatatgactttgtttccagctgaattcagaaatagtgcatacgatgactgccctagtgccctggtcttagaaacggtgtttggctgtttcatacatatgaatagaagacagtgtatcaagcagattagttttacttttaccaaattgtggtctttggttgtaggagataatacaggaagcaaacttggaaactgctcatcttaatgtgctctcatgctaatttttatttttaagttgagtcttgacttccgttatctagcagactgttaaattagttttgttaagttgtagtagttgaagaaatttagtaaagaactcaataaacccttttctcttgaaacatgggtgataaagtgtttcaatatacgtcatataactggtcggtgttgtgtggtgatttctgcagaccagatacaaggcacatttttgtggatattggtc

SEQ ID NO: 113096 - DNA, 654 bp, Setaria italica
  Intron number 1 from transcript Si026488m (locus Si026488m .g) derived from phytozome v7.0 (chr-ID scaffold_8; pos 98 7247 to 987900 reverse strand)
ggcatccgttgttaacatgcaattcgttccttttccttcatgtgtgcttgttttagagtcacactgaactgcaagtccctggataggacaggagaatgtcagtcatcatgcatgatcgtcctctgacagattgtgcagatcaacgtgcgcatgtgttatgtttataagttgggagttcgaggaatctcagcctttgaccttccctttatggattttgttgtgttctatcaaacctcctggaccaatttgctgttacttaaaccagagcagtttactagtacaggaaacaatattttcaccttgtgtcgtgttccgtttcatggacaagattgggtgtttttggcaggaacatattgcaaatcaaacttaactctgagtttgctttttgatccatctgatctcagattcttttagcattcggatggatatgtgtgttgacaagggcctttactgcagcagtaaagcgacattgcaacagctagcatattctacgaagacacttgcaaatattaagattataatgattcatgatggcaatttcacagccttgtttgccccaaatttgcgccgtgtattccaaatctccaatgatgagaaacggtaaagagaaattctacttgtcctattttcaggtacctgaagcgctcggacagc

SEQ ID NO: 113097 - DNA, 566 bp, Setaria italica
  Intron number 1 from transcript Si030699m (locus Si030699m .g) derived from phytozome v7.0 (chr-ID scaffold_2; pos 44 689426 to 44689991)
tcacgggtcgacctgcaaggtaagggcctgttctgttcttacgcgttgtggcttttctgccctgttctgaacctgtggtacgcggaattaattacttgctgctgcagtgagatgctttacgggattattgggattttagggttcgcacaaatgtcggttcagtgctggtttcgtcttatttttatttattgactacttttgtttattttgattctaaaaaagactactcttatttatttatggcgattgcttgtgttgcggataaaccctgttcgatttatttttgttggcagtgggtttcgaacaccactgtttacgatccattttttattcgtatttttctacttaccgattccttgacgtttgattggtgtttagtaatttatcctgaaaacaagctggaaaataatatctggcacacatctgtgtgttttttgtaagttttgtatggaacagtattttgcaataggtctcctcgtgaaatcttcggtatcagtattcctcttaacctggctgttcttttccccgcagaaattgagaaggtggtggacaaaattcaggggaat

SEQ ID NO: 113098 - DNA, 717 bp, Setaria italica
  Intron number 2 from transcript Si030699m (locus Si030699m .g) derived from phytozome v7.0 (chr-ID scaffold_2; pos 44 690077 to 44690793)
cacttaacttctgcttctggccaggtataagttcaggcaaaaaatcagtgcgtcttatgaacacgaatcagattgatgtactattcctttaactggcacttgaagatttctagaatagcaccaatagaaattagccattgccaatcttggaatcctttcacttttgtataatctacagccttggtacaggtgtacgttcggaagaaagtattaagcgattcagtattactttcagctcatagtcaatgagtcacacgggttgccaacatgtttgacattaactgttattgtcttcaaacttttgactgtactgtgtacataacaagaatatggatgttttcaccagtaatactcctgtggctattcagtactttctttggcctcagacctgctgagttgtttgtggggtttccgagaagttggcccctttcattttttttctgatgtaattttagttactactttctttttgatgtatgtctagttactctccacagatcgcacctgtgccttaaaatccatggagtctcttttgcattgtttatgcaattccattcaattacatgtgaaacggcttgtagttttgcctgaaattattgtttctcactattgcgctgcagtagaattttcagttcctatttcagttgcatgtgtctcttctacaatcatgatgaatttattatgatattttttattgaacagataaggatttgagct

SEQ ID NO: 113099 - DNA, 822 bp, Setaria italica
  Intron number 3 from transcript Si031476m (locus Si031476m .g) derived from phytozome v7.0 (chr-ID scaffold_2; pos 36 196726 to 36197547)
aagtaagacatacacctctcccctgctcgcttcccatcacttgcttccaagacccaattttattggtcagggaaggtcagtggcgtgcaataggtgtcctgacaattaacatttcctagttgggggattagatatcgctgtattgatcctccttgagtgtgtgatgctattgatacatacattagttgaaagatttccatggcgtcagttttgcgcagagtgccaaccattgatgattgagactacttgaaagtagctagctacctgttgggatttaggatttaggatctagaacttatgtgattgtgtaagatctaggagctacatgtgagaaacacacaatggagtcttggattacttattccattacttttgtggtcaagaagctagagtgtttagaatttttcagaagaaaattacttaggtgtcatttgaaaatgggtgtcatttagattgcatgcaatcaatctattttaacattcttgtcggtatctttttgcatctttggacagacctatgattgtttgttttatgtcaaagaactattatagtttatttggtttacaaataaattagaataggaattgctgatcaaagtagtgatttagactggatgacatacaattttaggaaatctgtagtacaaactgcagtccatattttgacaaaacgacaatgagtgtgtcactttatttgtctctgaactgttgccttgaatatcatttctggtgcattttatagtttattaccccaacattatttgtctgtaatcaccaatatgatacaggtacctttatagaggtttatctacgggggacaggc

SEQ ID NO: 113100 - DNA, 668 bp, Setaria italica
  Intron number 2 from transcript Si032502m (locus Si032502m .g) derived from phytozome v7.0 (chr-ID scaffold_2; pos 53 0292 to 530959 reverse strand)
gtcaacaagctccgagagcgactccagtacaaaaggtgtgttgctttatttggaccctatcttcatttatctatagtaatgtctgggctcaccttaaaataatcttaaaactagaaattatcacataattcagtaggaaaagaaaatacacacatcaacctttattatgaatggctctgatctgttggcatggtcgtcctaatatacaacctaatataccacatatgcaactaggatctgattcacccgcttcataacaaacatgctcagtcaactggcaaaccaaaaaaataaaataagaagaatatataagcatgttgtttttgtctaacggacactacaatcttcatgagcttaaaagcatgttgtttcaagccaatttgagacacataagcatcaatcttcacgatcctaaaagcatgtgttccgactctcttaaaaagattcataacttttctatatcttgcagatagaaaaaatgattaacatatatttgtgtttgttttacttagaatagttgtatttttctcataatgcaatttgttttcattttgattactatttcaccagatcaagaatgaagcattacatgcatagtttttcccttaccacatatagttttataaaattagcatcccatatttgtggcaggtacattgttgtagtgg

SEQ ID NO: 113101 - DNA, 646 bp, Setaria italica
  Intron number 2 from transcript Si026495m (locus Si026495m .g) derived from phytozome v7.0 (chr-ID scaffold_8; pos 35 97378 to 3598023 reverse strand)
aagttcgctttcgagctctcccagtttgtccccaggtgcgtttctaaagaagtcaagacaatgagtcgcaatagaaatgggtcactggataatgtttttctatgtaggaataattgatttgagtaatcgatggaatactgataattgctagtgctgacaatgttcaaaaggtggtttggaataatgatagttagttaaagtttaccactgccgacgatgctcagaaagagaagttgcttttgtatggaagaatcaaaagaaaggaacatatctactcttagattacaaactttccataatgacgattgcagtttatgaagtaagctgtttgcgatcttacaatcttctctaaacgagaaattgctttagatacatcttagaatgttactagtatagtatacctatatgatttacacctgaagtttctaatgactccatacggctcatacttatgtacctagtatatttgccaaatggttacacatccctttaaaagtgtgtatcttttggtgatgtatcttttctattataagaaacatcgcgttgtcagtcctgtttaagtgagcaacaaggtagagaggtattatctcatgacatgtcaactgatgcagtgtgatagcatttgatcaccggcaaagtacactag

SEQ ID NO: 113102 - DNA, 854 bp, Setaria italica
  Intron number 1 from transcript Si007214m (locus Si007214m .g) derived from phytozome v7.0 (chr-ID scaffold_4; pos 34 63240 to 3464093 reverse strand)
caaccgagaagagcatctacgactacaccgtcaaggtgagacccggtttcttctgttgagattttcgctcgccgtggcccccgcaattacggcgatagcttatgctgtagtggatgcgttacgtgtgacttgcggcatgcctgtaataattgtttgagcggtggtaatggaagggcgcgtcacacgtggaatccatcagaatttcggacggtttttgtctcgtttctcgttggtattgtggtggtttgcgttggggtaggtggggggagttgcaaccatagattcattggtgtattaagtgttttgtggtgctgtcggttacatttgaaattgactgaatcagccgtcatgtgaatgctattgaagatttgttttcgaaatcaaatgggtactatgactatgttagctatcagtatcactgtatcagggttacagcgtcagaaactaagctttaaacattatttttaggatgcaataaatttttgtagtcctccacttgttgcatcatctaaccagctatgcgcttttgatggcagaaaatagcagggtttttagttgcagaaaaatcaaaattgcacatgcagtacatgttcaggcaggataacagaggaagcaagtaaaataaagagtgtattatgagaaattgtttggggtaccatttgtttagtggtgaaacctgaaatctgtgaattttatgtttcccgggggctttccttccacaagttttaatttgttgccgtcttacatatggatatatgaaggaataactgtgccataagaagatcaaatatgcatgcgtgttttgagctctcgtacctgaaagaattcttcattgttatttgttcaggacattg

SEQ ID NO: 113103 - DNA, 956 bp, Setaria italica
  Intron number 2 from transcript Si009055m (locus Si009117m .g) derived from phytozome v7.0 (chr-ID scaffold_4; pos 25 35646 to 2536601 reverse strand)
gcaacatcgaatccgtactggacaaagcacgagaggttcttatttttcatatccctattcttatttttcatattccataatttgagctctttaggcttgttggactttacaattgttcttatgtttgataatttctggtaatgggaattgcaaccaggctcctcaacacagctatcatctttctaatgaataggatatcatgatttgtgtctggatatgttgggcttagcgtgtaatcaattttgaattggatttataatttttccagttagatctattatttctcttaagaatgctgataggaaccactctagccagtgatgcatagatttcctattctgattttggtattctaattttacttctcttatcatctgagtgattaattgatccctactcctaaactctcatgtgagtgaagatatgttctgcaaactccttcaagaaccactccaagctaggtcctctcctccgcatggggttttcacctggttcaccgcacatcgcacaaaactgacgttggggagacgaacagacgtttagtgagcaatcatttgttttgtgaacaaccatatgtccttcagatttagtgcattagtaattataatatataaacaattatttgttttgtgagcaatgtttgttgttttttccgaaatgtcagtttgattgccatttgcattcaatacttgatttctttgttctcagttatctctggcacttgtgtgtactgtgtagtctgaaaaattagtaatatttttttcaattctcagtgcagatcatgagtacatcagcataggtgtctttgccagtacatttgttatttgcaatgaggaacctaatttagtgacatgagcatcatgaagttcttttttcacatgattactctattattcattactaatttccctgtgtgtgcagattggagagagggtcaaagcatcttcgacaggcat

SEQ ID NO: 113104 - DNA, 708 bp, Setaria italica
  Intron number 1 from transcript Si009055m (locus Si009117m .g) derived from phytozome v7.0 (chr-ID scaffold_4; pos 25 36910 to 2537617 reverse strand)
ttatcgggtggcttttcattggaggcagtggtgaggtcgttgaactcctcggtccccttcccctttcctcgatgtcacagctcgatctttcattgttctgcatacacgtgtgtggttcagtggacaatttgattggtcagaaagtccgaaccatatctacatagtcgatttgagttgctccctgagattctgcatcatgggtcggtgccggagcttgtattgtgaatttgtgatccagattattggattcttgtttctgtaacctgtaaatgtcaattgagctggacagaatatttggtttgagtttctatttttctaagtctgaactaattgatgaaaaccagatgttctacgatgctgctagtgttataatacaacctatatgttttcttagacatgtatacactctcgctagtccaattgcaatcctccaatgaaatctcccagtaatgtaggaattataattgttctatattagtgtagaagacacagacaactcttgccttgccttgtttgtttgttttgttgttttttatcttgcaagtgaatcttcagttcatggatgctgttgccattcgtcgatctcgcgaatgacttattaaattctcaaactcatttctcttctgtatgcctgcagattgaagccttaggggctaggtaagaggccgagagcaatgagctccaagggtgtacaaaggcgcggccagg

SEQ ID NO: 113105 - DNA, 1000 bp, Setaria italica
  Intron number 1 from transcript Si028668m (locus Si028668m .g) derived from phytozome v7.0 (chr-ID scaffold_2; pos 22 87292 to 2288291)
cgtcgacgcccctccaccgccccagatcgccagaggtaaccgctcctccccttctcgatccacacgaaaccctagctcagccccgccgctcgggttgttccgatttggaattcgtctgggcgttcgatccacgccgtaggttctaggttttgcggggttttgggcgggcgtttggtggtgctgccgccgtgggctttcgttcagttgtcgccggtgcagggttcatttttgggtcactggcgcatgctgtggcgccaggtttttcagatgtgtttgagggagatgctggggtagtcaagtacgttcggcttcgatttgggtgggttggatgcaatggtcaggttgtctattgtttctattttggggcggctgattgactgattggattagttacggtcagttatagtgttctgagtttgttgtcgagacttgaagagatcccttttgttttgtgttgatttgttgttgcggttgcagtcacatgtatggctgctttcatgtagaagttatgattgtggcgatggcgatgcatgtctttattattcttatagtcttcaaatgtatctgaaaaccaatggatcaactctgttggctcagaaataccatgttcactatagctttatgtaggtgtactacatctgtggcagattttggtattgattgtctttttgatctgcacaggagttaattagatttctcgagaaatttatttgaattacttacgcgatctatggtgttattactttcatctcggttatacttcaaaatcacctgcatctgcatgtttctcttgtatgactattgaacagttcttttgtttaatgaatgtgaccgtttgagacttagaatagatgaagcttgcgtcagtaataacaaactgtgaatattgccttctgtccttgcacgttatctttatagaatagcatgttacctgtcatattgatggtgacttttggttgttgcagagaagcaaggcctggatactgaaatacccctttct

SEQ ID NO: 113106 - DNA, 560 bp, Setaria italica
  Intron number 1 from transcript Si028698m (locus Si028698m .g) derived from phytozome v7.0 (chr-ID scaffold_2; pos 10 078155 to 10078714)
tattttaaggagtatcgcttttgaaacagaagcaggtgcttctactcatagaaccgcaatgctctctgcttttcaagtcatgttgtgtcaatgtctgagtgtcagtgttctaaatggggagaatctaatagacattgaattctaaaaatgattgtttcctaaactgaattaatttggtatgtctcaaccatttttgtatgactaccttgtgtttttttgttttgttaatgcttagaagaaaaatatttaccaattggaataaatcaaatcgcaacacatttggttattttagtactccctctgtcccaaattataggtcattttggcttttctagatgcatagatattattatgcatctagaaatagggcatatctaagtgcataacaaagtctatgaatctaaaaaagctaaaacaacttataatttgggacggaagaagtcagatttggatcttccagttcagcatatactcgtgcatgtgtgatggtagatttaatttgacatgttatcactaactttgcaggtggttgtggggcttgtgtcgtacttatagcaaag

SEQ ID NO: 113107 - DNA, 982 bp, Setaria italica
  Intron number 3 from transcript Si031380m (locus Si031380m .g) derived from phytozome v7.0 (chr-ID scaffold_2; pos 49 90214 to 4991195 reverse strand)
gcgctcatcaagaagctgcgcaaggcggtcagtctcctatcccttacttttcgctactactgtttggataaattcgtggatctgttatgctgttatgattaagtgatgcttattaggttctcggatctgatcttgtttatgtctttcggggttagtctagcatgattgtaaaattgagaaaaatagaaaagtgagcggctgcttgaatgatttaaatgctacttctctgatttcaggatctatgattggcactgttgcatacataatttatgatctttatataatcacaagttggacgttgaaaagattctgttggcttttaagcatttgtttgttatgttattataactttattggcgccacatgtttaactttttactatcgaaatgttttcagtaactttgcaataggtgtgatttttgctggctttatcttgtcttctcacttgaatatgcaacaagtaggattgttggtgcaaagcattgcaattctgaattctgattcctattgctaagtgtgcttaactggacaattgctgtattttcttcagttcctacgtcctgcattctatcattttgtaaaccggaattgcttggcagcatacttttcactatattgtggctaataaacttttgaaattggaagatgttgcattgttttcattgccttttgttgtgatctattatgttgtcttgagtgttaattttagtattttacctgaaaaaagggtttgtctcgttctcattctactgatcactatgggtaatgttatctatggtaaatgactattgggttaacgatggattatctttcctacctttaatatacaatgtgtagctgctgttccttctgtttgccagtagaacatggttagtgcaatattctgtgttgatctgttgatacatttagaactttgattttacctgatacatggtttcctcacaagctgtccttttggttatggccttcgaacagaaaaagg

SEQ ID NO: 113108 - DNA, 871 bp, Setaria italica
  Intron number 3 from transcript Si028813m (locus Si028813m .g) derived from phytozome v7.0 (chr-ID scaffold_2; pos 43 710846 to 43711716 reverse strand)
cagtagaagatagttactcaaagtacattgcagaggtatgccttattttgccaggttgaaaattttctttttcttgtttacatcactaactgttagagccctgtaaaggggatgcagcatgttctgttgtaacttgttattggattgagcttgcatttacaaagagctcctgaggtctgttggttcgtggatgcatttcctcaaggcgctagtagtgattgaattctttctttataagtttttttgacacagtgccacagtggaagtgctttagaaaatgacgggcagaagctgaactctagaatagtgcaagtgtgcaaccatcaaggaatatttaaatgtagtttctctgagccttacataaaggctaaagaagagaagaaaaaagtgcaaatgaaacaagtaggtatgaacagaacttgtgatcaaaattaccacttaatctttgttttatctcttggcaaggaacatacaccacagttaagtagtatttatcttttaagaggacatttgttcatcatcaggaaatcagggtatatagtttagattaaatctgctgctgcagaacaagtttctgtccatatttaattaatatgcgccaagctgaaattgagatcctgaaaccatctaaagcttctgtctggactccccaaaaatctatgggagactgctgaatataactgagcctgtgatattacttgcttgttgattcagctaactgaaagatacagtaaggtatgaactctcaaaaagttgatgagagatgaggagtactatgctatactcatgatttgcttacagatttcatacgctaaatttatgacacaaagtgttgcttatggtatatggaaaatgggtgttttcttgtagc

SEQ ID NO: 113109 - DNA, 873 bp, Setaria italica
  Intron number 1 from transcript Si007297m (locus Si007297m .g) derived from phytozome v7.0 (chr-ID scaffold_4; pos 14 15559 to 1416431)
ccaccaaaggagttcgggggcagggcacgagcgaggtgcgcagctgggaggcaggcccgactcttaggggggcaggcagtgggaccgtcgagggcccatgaagcttgggggtcaagaccatatatgtaattagtatatataattttctatttgacataataaccatttgaaggtccatcacaaagcaacccatgccataggtaactttcccttccaattctattatatgtaacctggtctattgagcggagggcaaatcgtagccgacgtttcgtttgatcatttcctgccgccacgaccctgcctgcacccctcgccacgaatgtctccattgcatatcagattctcttaactattccagtgacagtagcatcagcccaaagaagttcctccaaattgaaactattgacaaaattgtttgagataaactatgttgcaagaaagattgaatagtttgattatgtgcagcattgagatggatgttttggacgacattaatcttggtactgttcttgaagattttgcatcaagaaatacccgaagacagttttttacaaagcattatatttttctctgaggtaatcataatggttattgtttttagttttttgttacactattgttatgttttatgagctatacatatattgcaaattaatttttattatttgtactatatactttagttttgatattaaaaattagtttaatggactcttatcttcttacttgcccaagggcttttaaaattatagagccggccgtgtccatgtttggatgaaaattcatgtgggttaggttggacctcgggggaatataccgaatatactctatacaggttggttgcatccgctcaaaacgggcggacacgct

SEQ ID NO: 113110 - DNA, 531 bp, Setaria italica
  Intron number 2 from transcript Si030582m (locus Si030582m .g) derived from phytozome v7.0 (chr-ID scaffold_2; pos 47 155704 to 47156234 reverse strand)
tcggctgtagcctatctcgcgcttattcccgcaaggtagaatctcagacctccaaggcattgggattctgtacccagcaagatcttttactagctgcttggctcctagtttgccctagatctgtttcgtagttacctctgttttgattttccactggatgacttaaagttgtttcataattaccctctgaggtgaaatcttgtgccaatactgactgttaatgagagctactaatattggtaaccagcacatccatttggaatgcaggttaaagatgctgagttattgtaatgataacgattagtcagtgtgttagattaaagacatgttggtctcacggtctcaccactagattgtattcagcatttcatctggtgcccatagaaaaatgttttaaactatgaagatattctctaaagaaagaatcactaaaccaaatgtgaaatgttgatttttcagcagtttcattttttcagaactatttttttttctgcaggacgatcccttttgcttggaacctgataactgctg

SEQ ID NO: 113111 - DNA, 933 bp, Setaria italica
  Intron number 1 from transcript Si032521m (locus Si032521m .g) derived from phytozome v7.0 (chr-ID scaffold_2; pos 19 280853 to 19281785)
cttgtgccccaggtacccgccatacgatagatttttgtgttgcttggtgatcattgagtatctccttggaggaatgagcttccaatagttagtgatgcagagtcgcaaattatttgcaatcgacacagattagagttttaggataatcgcgtattagaaagatcatctagctagtttgttgtgtgttcttcagtccttaatttattggttgctcctttgcttgtctttatactagtgtatgtttggttttccgtttgtgccaaagtggtcacagaatgttgtaaaaggctattctaagtatgtgttagtgcaccttaatggagttatttgggtgcataactaatggatccttgcctttatgttgtcatgtggctttgagataaacattgttcttgataaacatttgttttctactacattaccgagcttgcctaaatgacaagttgaatggcccattgttaaaccttaggactacaatttggatggtttgcttgtgtccagtcttttcatgtcattgtttcttggtcgtgtactgctgctgcttgattaggtgcaactttcgatagggttcatccttttcttttgttgagcctctaaatagaatgataaattgtctattagttttctgttgcagactgcaaatattcgataatcttttattttcataaatgtggtcaataaaacaaccaaggcctatgataatcaaagcaacatcccattagatgaatcatctgtacttattcggtctcctcagttcttgctacaaatggtcctttcatatttttcacttgacttgattgccaaaatttccatactaaatagtaataaagaaagcatttacacaaatatgttatttttttagtgtaccctccattccattttaccttttctccaaaaatcagaacataaaatttttgtgctatactctaggca

SEQ ID NO: 113112 - DNA, 1036 bp, Setaria italica
  Intron number 1 from transcript Si029930m (locus Si029302m .g) derived from phytozome v7.0 (chr-ID scaffold_2; pos 34 114304 to 34115339 reverse strand)
gcgcgcttgttgaggagacgaaggccgcgtacccggtaaggagcttgcttctcttgtcttttgaattggggaacgtgagtgaaatttacgatttgtggtgcttttgttgtatatttagggacctaccccgaggagattatttatgtttaagttagcagcgaagagttaagattttttttatatacaaaaagtaagttagcccttgcctgtcgtcacttgttggggggagtgatatgcacgacgctctttgttctgaaaggaacatccacaatggggagttggaatgctgttgaatcaggagttttctgttttcgtaattgccttgtaaattgagtatctatgccaagctttatcttgtgttacggcacttgaaatcttataatgcttgctccccctgcataatctagttgcagaagaacatgcttgcccctgataattttggtgcacatttgacatttgagtaaattgtaagaagggaggattgagactcagtgctgtttgagtttgagagcccctccaccccagtatttggtacatgatttcctggtgactaagttagtgggactgtgagtgattgctttacgattgtgattcggaacttcaactatgtgaattgatgactttttatgatagttggatgctgatagcgatttacatttgttaatgtccaagtaaagagacaaaatacgagcttttgagttgtttgataatccctaggtttctgcaaatacaagaaagtaaaaattatggcaattggacaaacaccatggcctgtcaggaaaatgccgcatggttctctcagtgcttattgaaacctgaaacatatgcatgatggttatggttgagtgatgaatattccgtattgtaaataagaaaacttcatgtttgaaacttgtagtgcttaccatttcagtgaagtatgacatatctgcattttttaggctgttgagcttaccatcaacttcgtcctgatacctactttgtgactttgtacttcttagaaaacaaacttcaaggagtggaaacaagtgattca

SEQ ID NO: 113113 - DNA, 654 bp, Setaria italica
  Intron number 1 from transcript Si030871m (locus Si030871m .g) derived from phytozome v7.0 (chr-ID scaffold_2; pos 47 576487 to 47577140)
cggcgaggtgctcaggatttacctcgtgcccgaaggtaatcaatccgcggaatcgacgctcgcgtgtgggattgctgctaattttggtgggatagctgcagagcgcagtgccaatttcaggagcttaatgtgcccagtagataaaaaatgctgttcatagtcagtatgcttccattgactgatccagttagtagatatactcacactatgcatgtcttttttttttgagttcactgtggcaagtcgtgtctgcttgactgaaggatgctcattgtgctaagctttgcttctgctgcttgcatttgtgaaaatatagttctcgagagcgagaaggtcaattgcagtatctccttgtgtgatgttagtcagtcataagtgaggtgcatgctgccacaacaatactctgctattacttggtgaccctgatttattttttctttctgtcatgtgttagaatctgagtgttgctattgaagaaagaaaaaacactactgctcttttgctatttatgtaacatattatattagtatttcaatattggagagttatgaactgaaaaaccaccatgttagttttacaatttttgttgattaacacattctcttatatactaataatgtcatgttcatccctcaggtcaaggtcatcgcaagc

SEQ ID NO: 113114 - DNA, 636 bp, Setaria italica
  Intron number 3 from transcript Si028744m (locus Si028744m .g) derived from phytozome v7.0 (chr-ID scaffold_2; pos 41 36053 to 4136688)
tttgacgacaacagatcacattgtgagatcaagaggtccttttatctctttcctctgttgtggttatcttttatctcttttctctgttgtggttatcttccatattatatttaatcatgctttctcgagaaacaatcaaacgattaaccttctgtatgagtttggtaggaccgtaggaggtattgtctatgcttaattgcctagatttaaggtgctagtcactcctgttaattttttaaagaagataaataagtcaaatcatgttccttttttttttcaaattgctgcacttaatctatctgaacaaattcaatctatttaaacaacacaaaacatgcaggggcatgtatgcttacgctctgattgccagaagaaactgaaaatggcaacaacaagtgtgcgccactttattggattaataaattgcagttttgaaaaaaaaatgtgaagttcattattttatattctgttcaacacaacctgccaaattctctttcttggggcatctgttcctgatagatttgaacttaatatcattaaccttctagtggcagatgcatattgtttgctagttatttacttgtaagtttttattctacaggaatactgctcctcggggagatattgtctcgaatt

SEQ ID NO: 113115 - DNA, 995 bp, Setaria italica
  Intron number 1 from transcript Si031894m (locus Si031894m .g) derived from phytozome v7.0 (chr-ID scaffold_2; pos 21 116250 to 21117244 reverse strand)
tgagtgtgctggtttgtagtcttttcttcttgctggtccatccaaaagccagatggtgtcgcatagctaatcctacaacgaatcaatttccaaattcatgttttaggtgaccccccccaaaaggtctgaaagttcaggacacatttgaatgaaccttgatagtaaaatccagaaaacagtacttggtgccattattcagaaattcagaaatcaaaaacgtccagcatgaattgcattatgattattcattacctagttcattcctggtatatatatacctagctttcagaaattcaggaatcaaagtgtacagaatgaatttcattatggttattcattacctagttcattcctgattatgttatcagaatttcagaaatcttagatagtaactggattatgctttacctgattattcatttactgttgtcgtaagtgtcacagggcagagggtatgtatgtatgcagtcctttaccgtgtaccagttaactacctgtacacttactttgtgaagtatactagtgtgtctgtgtgtgccctatgtaggacattcagataaggtgacaaattcaggttgtcctatttttctgaccatgctggcttgtagtcttttttgtactatatatgattggttcagtaacatgccatgtagccctactgctgtagatgttgtccctatctcatcctagtgtagtttgaaataataaagatcgtgctccaaacattctgtagcgatatgttcaattttagtagttgtggtactgccttctgatatgtgtatttatttttccaggatcccttgttgccagagacaattgtgccaaccgaggagctgcatttttacagtagagatgaagctaaggaattttacaaattctatgcgggcaaggcagggtttgatgtgcgcataaccaagacaagtaggaagatggtactggagttgttgtgcaacaaacaaggacactgggattactacaagcctggtgaggagagg

SEQ ID NO: 113116 - DNA, 701 bp, Setaria italica
  Intron number 3 from transcript Si032149m (locus Si032149m .g) derived from phytozome v7.0 (chr-ID scaffold_2; pos 35 743452 to 35744152 reverse strand)
gctaaagggcctcatattgggttgttgttctgctggtaactaaagagtacctgtttctctagcatggtcctttttgaaggagggttctagttcagactttgaaaggaaagttctatttttattggctgcgcagagctcaccctacctttggaaatacataacttgtctgagaacatgaacctcatcttgatacaaacctgatggcctgaattctttctggaaaagtcccacaattttgtacaatatttatgtttttttcctaaacggaacatcatttatgaatggaaataaaagaagctataattagctagtctttggtcggatcaccaattctagctaaggcttttatcggaattttcaaatggcacgatcggttgcgcctagtagggatatggtagtagcaataatactgatgaaccaaaaatgatacaatgagacaaatgcatgatatatttgaaaattacctttgtaatgaaacaatttgccatgatgttattgacaaaatggggtacttttggtcttagggactggttacctgatcattgaatgtgaaattggacactttaggactttggattgaacaacaacttcagcttaatttgagttcaatcttgctcgatctttttcttttcaaaaagagcagtcagtttgcttggatggatgcaggtaacgtgggcaatattttcctgatcatcgtacca

SEQ ID NO: 113117 - DNA, 589 bp, Setaria italica
  Intron number 1 from transcript Si007236m (locus Si007236m .g) derived from phytozome v7.0 (chr-ID scaffold_4; pos 33 958565 to 33959153)
gcgcaggaaccacatcgctgatcccgctcgtccaggcaagtgctcctcgtcttgcaatctgttccccttctcaccgccgactgattccgcgctagctcgtatcgatcttcttgagcggacgctacttctcgtttcttgatttgctctgaacttccgatggaataaatagttggtgctctgataaataaagaactggctggaattcccctttttctcagggtggaatcgggcacacggaacaaggatatttaaatcctgacatcctttttaaaggtactctgttgtttcttgtggatgtagtatatgctactgtttctgctgttaatatctgatctcatgcttgcatacggtgtgtgatttcgcggtggtgaactgaaatcctgttcttgtgacttggccagtttgtttggagttcagagtttcagacagcctgttgttattgctcagtgttttgattgcttccactagttgcttaatgttgtgctacctggaactggaacagcagccatgcctgagcgattatgcttattaactcgattgctattcattttcagatttcagctgctccgtgcgcagccgattggggact

SEQ ID NO: 113118 - DNA, 999 bp, Setaria italica
  Intron number 2 from transcript Si006915m (locus Si006915m .g) derived from phytozome v7.0 (chr-ID scaffold_4; pos 32 659770 to 32660768)
gcccaattcctccaaagctgcttcaccagcagaaggtgagagcttttgatccgtgaatcacttcgcatttgtgtgtttcactcgtgggtaggtaatgagctgatatggtgattgctgatttactgtgattgtgaagtttgttcatgtacatatcagctcacatgaagactgtttgttcaacagtttgttcacataggtcataggctttatatttgccacgtgtacatgaatgcttctttctgaaccacctatgaagactgttgtgcgttcaaattgaatgtagaagaaataataaagcaagttgttggagagacgtgcttagttgatatctgtttgccctacaaaactaggtttgcttgcaaacagattgaacaggtatcactctaagaaattgagtgaagtctatgatatcttgtttacctttagctatctctatttcaatgaagaattgtcagcttgtcctgtgtaatcttgtcctcaagttatttggattgaagttttgagtttcccaaactgatggatggttgcatattaatacagttgcagcttggattttcttggaaccattaggttttccttttcttttttttttccagattgtgatagcactaaaatggctctcttagctgagcccaagttctcactctcagctggtttactactgtagctgcagatttactagccaatatattcaggaaatttgtttctggatctttccaagtatgagtttgtgcaaataagcaatgcacttttagatatagttgtggtttgttttattgcatcttttgttttttgcaattatagccaaataacaactctcaatgcatttcttgcaactaagtattaaatttgagatttagaaatgttcgttggggaaagaaacttgtgtttcttaactgggcacctctgagacatggactgagctgttgcagatcctcaggaatggtctttctaatgtagtaatgggatcatgcaggtgctctgatcaggagggctgaa

SEQ ID NO: 113119 - DNA, 1028 bp, Setaria italica
  Intron number 2 from transcript Si033001m (locus Si033001m .g) derived from phytozome v7.0 (chr-ID scaffold_2; pos 44 895013 to 44896040 reverse strand)
tcacgaggaacaactgccaaaccctcaccgaaaaggtattaagatttctcacttatcattcatcgttttatttggatcctggtgtgctgccgaatgcagctatcttaattatccaagaacattccgatgcacctgtgtgcacttcctaattgctattaccatgcaggcatgtgtggagttaattaacacggcatcttttctcctgtggtttcgcattttcgctgcactgagcaatttccaaaaaatgaccacttttaatgagcagaggagagttcgatgtataccttgatcagatttcattgtttcctagaaattatcatgactcacatgcacacagaattggcattccttttgctcgaattatacaatcatgtcgattgacagctcaatctggcatgtgaggagaacatatgactggcataatataataaaaactgatcatatgtctttgggtctgcaaggcatgtatatatgctgtgcaaataaaccgtttcctagcacgtggaaataaagttcctagcagaacacaaagtcagattccactagttaccaaaccgaagcatatgcgttgggctcgaataattactgattcagcacattggctgaagttcttgcctccctaatatggagataagggagtagatgcatgttgtcaaatgtctagtatagtggggagcctggggaagactgcctttaacttctcgtctggttcggaatgcacgcttaggaacactgccttaatagtttctggctgtttcaggtttgtttgcaaggcattggcaaaccaccttcaatgacgtctgattgcttgtcgaacagcagatatcctattgctttttttcactagttctaatatatttctccaatcttttgcgctgtgcaatctacatcattcatgccacacacgtgttccttttgtttgattatgctgcccaatgtttacctcaccattctctcctgtgtaccattatttatttgtggtcttgtatgcaggatcgatatttagtactgacaggtccaacccgtgc

SEQ ID NO: 113120 - DNA, 790 bp, Setaria italica
  Intron number 1 from transcript Si026448m (locus Si026448m .g) derived from phytozome v7.0 (chr-ID scaffold_8; pos 27 705758 to 27706547 reverse strand)
aaaggcttttagccgtgcagcttggaactactccggtgagtatttagtagtctttgtactgttatttcattattatcgctattttattagttgtttatttgtggttgatctagagattgaaattcgagtactccctccgttccaatttataggttattttaacttttctagacgcataatattattatgcatctacacatatggtatatccgagtgtataataaagtctataaatctaataaaactacctataatttgggacagagggagtatgttgttagaaaaaaaaaatcttttcaagtttgcagtgggtatttatttctggcctgaaatgaattttcttgcacaactcatgaaatgtttagacgtagagatggataccgatccaaatcctaccataataactgaatcgaatcatttcttatcgttgcattatacttcctccatcccaaaatgtatttattttcatttttctagatatatctagacatacagtatatatgtagttgcatatcaaaagttatatgtttagaaaagtcaaaacgaatagtaatctgatacggagggagtatattctccaaaccttaggaataacgtacgaagtgcaacaaggcaacatctatacgttgttcttactatctactccatctcaatcattaccacagagtgctgcggacatcaacgaaatggtagtgcgttatctgcactatttctcgtgcgatgaaggtcctgccaatgatgaatatcttggcaagctaggcctccatccgttcgaaattttacatagaac

SEQ ID NO: 113121 - DNA, 896 bp, Setaria italica
  Intron number 3 from transcript Si007407m (locus Si007407m .g) derived from phytozome v7.0 (chr-ID scaffold_4; pos 19 614070 to 19614965 reverse strand)
agtgagtacaataatatttttttttctttacttgacagctactttaattactaatttgattctgcacgttaattgtgtaaaatggctgcattaagaatctggatcggcaaagtattaagcaaacggaggagtcactgggtattaagcaaagtattaaaaaggctgccttaatttgaccattttgatcatcactgtgtaaacaccaccaggaggatgtacgggtgtagtcggctgcttgggatgagggaagagactatatatatgagcgagacgaatcgagaccaaggcagttttatagcaaaaatgaataaactcctagcagctttcttttgattatccttaagcaaaaaaataagaatcacatgagtaagcacaatggattcaagattacaaatctttaagggaaacaatacaaaattacagattgaattcaatctgcagacacggtgttttataatgcatctcgtaatcacctataagcttatacccataaatgcttgacaagcttgtttacagcctatgatttctgctatgtagcttcacttcttgcacggtgtttaatctagcagggccaggatcaggactcggtaatttgttctgttttgttttgacgatgaccctagtggactcaaaccaagcaacatagcaaatgagattatcaggggctgactgtttggttcatttggttgggatcctacagggagggatgtagatgcacttctttgtactgttgtaaaattagtaaagaaacaataagtgtatcatactatccctgcatctgtgattcagaaaatagaatctttctcaaaagaaacttggttagtcatgttaccaaaataaccacactgcttatttgtgaaggtgctctaaacttgaggcagcaggaaagcttctga

SEQ ID NO: 113122 - DNA, 971 bp, Setaria italica
  Intron number 1 from transcript Si006745m (locus Si006745m .g) derived from phytozome v7.0 (chr-ID scaffold_4; pos 33 983296 to 33984266 reverse strand)
caggttcttgttgacctatatctcagtctacttttccatacccttgcaaaggtgcaaagttgttgatgtgcacgtttgtgtaattgtgtagtatttattttttttaaaaaaaaatctttgtgcagttccagtagtgcaattgcaaagtaatttcaaatttgctcaacagtactccatccatctatgtttataaggcatggtatgacttagcacgatcttccaaatacaattcattgatcatatattatattatttatagttatcaatttataatcattgtagagtatatttgattatgaatccaaccatataaaatttacattataaaaataaaaaattgatgtcaagttattggtcaaagattgaaaagtttgaattttgatatgcgcatgcaccttaggccaatctcaacgcatagttttattgcatagttaccaagattaagaacttagtaactgtgcttgatgagtgtcatagggatgaaaatcttctcacatctgatcaaactctcccttctctctctcctcattatggtcttgccaagtaagtaaaattactgatatggcatacaatttaataatcatgaaactttcataaaactatgcattgagttgagactggccttatataaataaaaactgaggcagcatgtaccatccggtgtagtggcgctacgcttcgttttttaacaaaaaatgagctatctttttaacaaaaaatgagctatcttttagaaaatttacaaaaatacatgttgagttgttgtgttttaaacataattttaagttgaaagaaaaattcagttccatctttgattaaagagacattgattttgaaaaataaattatagtagatcgatcgagtaatggaggaaattaatgatagttttgtagttaattagtggtatacacaatagcacaatacacaccgttttgtgcttacgcctacgtatttgtaattttgtattgcag

SEQ ID NO: 113123 - DNA, 899 bp, Setaria italica
  Intron number 1 from transcript Si027383m (locus Si027383m .g) derived from phytozome v7.0 (chr-ID scaffold_8; pos 49 98633 to 4999531)
ggaccagcgacgccaccgtcgagtacaacatccacgtccgccatgactgaggatggatcatgcatgcttcgtcgtgcaaccgcgctattatttctggttgctgatttcttacatggcagttcgtatataagcttaatttctcgattgtagcactggttttaagttttgagctcgtgagatgatgcagaataatggggtattgatataaatataattgttccgtccatatataccttcgccgtttgaacgggagtgatatatcatttaattttgacttcgtcaatcgtgtactcatgttcatgctagtcaagagattttctccacaaagtgtggctgctctttataacattttcctgagccactcccctcgggcgttcagaaggaagtcaaggaactgcatggttggcaaggcaggggctcatagaccaactgccatcctgtagtaactgcagatgagacgactcatccccaagcctcctccggctgtcaagtcgtcgtcactgctcgtagtactgtactggccgaggcggcaggcccttgagctagacagagcagcatccgtttcttcccgtccctcccagtcacatgcatcaacaacactttgacactttcccgttttgagcatcatctgcttattgagaacgaagctgtttccacgcgaagccaagccacgtaggattataggtggagactctaaaaaagagagaaattataaaaattctcacaaaaattagaaacatccggtcatcaatccggtaggctttaatcacaattaataataatagccatcaaatctattatgttttctaaaacattactcacctctactatgattaaaagattctaaaatagccggtgacgccaccatccagtacaaccttcacatccaccacgactga

SEQ ID NO: 113124 - DNA, 512 bp, Setaria italica
  Intron number 3 from transcript Si027990m (locus Si027990m .g) derived from phytozome v7.0 (chr-ID scaffold_8; pos 36 067998 to 36068509)
ttcccatcattataggtttgtgaattattccacttttggatcgtttaagacatactctctccgttctttgttttttgaatcgagccaaaaaacagagctaccgattatattaaaaagaagaataaaacctagactggcgaataaaaaatagaaaaaaaagagagaactgcaacaacagctgcaacaacctcttattagcatcttccatgcataacaacttacattggaaacaacacacaaaccgccactccataaggtctactagccggttaacaaaaagcaccaccatcaccggacatgtatatgtgtatgtcaaattataggtcaatcattttgtctgttctggatacatagtttttactatgtatctagacatatctgtacggcaaaagttatatatatagaaaagaccaaacgacttataatttgggttggagggagtagcacctagcaaagttatgttgagcttatttctgagttgatgtcctgttgtggcaggggagtggtgggag

SEQ ID NO: 113125 - DNA, 913 bp, Setaria italica
  Intron number 1 from transcript Si029343m (locus Si029343m .g) derived from phytozome v7.0 (chr-ID scaffold_2; pos 32 28417 to 3229329 reverse strand)
tatcgatttcgggctttccatcttcttcaaaccaggtacagcctcgatttccagtgttgagtaatattctgttgtaggacgtgcatgcttgttggccattgtctcccaaaagaatcctagacagtgcttagtttgactgctagtttgctgtggtggtggaatagtactctagtagtgcatttgtgcatgcacagctttgagttgacactctttatttcacatgtttgttgaatatggtactttaaagacttattttaaatagtacaactggaagggttttcatgccttatagtagaaataatctaatttcagagcacggaaatttgtgacagtactattgtatagcagggtatatatgcatcttctggtattcaatgcatctggaattggaagcttgtgagggacaagagcaaaatgagctccgtccctgtactaatatgaaattgccaatcaggttcttgcactttcaagctacaaagaaataaatattggagcaacatgtagtggtttcaatattccagagctgaaaatcaaactccaagccttgtttgaatgcaactctggaaaatataatttctggcagtgttgatctgttttgaaaataaaagttccaggaaagaggaagaggagaatgggagaggagttctcgtttttctatttatttatttttccttcgggtccactaaacgaaccagctttggacacacattagggatgctgttaggggagttatatattgtatccttctgacacccagaaggatggtattggatgtcatacaagaaccatgtgaattatcaacattagcagatgaccactaatccttttttttcatttataacaccatgttacaatcacatatataccactgtctacctgttgtttagtctgtgttgacttgaactgcttacag

SEQ ID NO: 113126 - DNA, 426 bp, Setaria italica
  Intron number 1 from transcript Si031911m (locus Si031911m .g) derived from phytozome v7.0 (chr-ID scaffold_2; pos 39 941046 to 39941471 reverse strand)
cggctgtttctcgtggtcaaggtaagtaattaaaaatgataatattactagcttagctattctttcttagctatcttgggtgccaaaatatagttgagctagtttaggttttttttcatatgaaaaactatctctagtttgaccaagtttataggaaaaaactattcacatatacagaaccaaataagtataccatgaaaatatattccacaactgatttgatggcactaattgggtcataaatcttgatatatttttatacaaatttggtcaaacctaaacctaaggtggtttgagtttggtcaaaatgattttgagaggaagacctctccgtactggtaattaagagtgagattatcccaattaaatactgcaaccgcatgtacggcagcgctgcctacgcttctggagtggctcaaggacctg

SEQ ID NO: 113127 - DNA, 955 bp, Setaria italica
  Intron number 3 from transcript Si026318m (locus Si026208m .g) derived from phytozome v7.0 (chr-ID scaffold_8; pos 12 333872 to 12334826 reverse strand)
tgaagaagttgtgccctgtaagttgaatcctcttcagattcagttttaacatatctgaacgttattggtcaagtatgtttctatggacaaacattgccacgcatggggaattggtaactggaatttgggtggaaaggacattgcctaatgatcctttatgtcactttactagtttctggtttttataacttgcaacttatttggtgggtttatatgtcttgcgtttaagacagttttatgacaacatggttttgccatttgaattcaatttatgtatatagactgaacattcattatattttgtaataaatgtagctgtaaattagttttggtcttctaatatgcattgcacatatttaaatagtggatgcttacaaatcacattttataacttgcttgggactaaaaggctatgttgttgcaccactgtatggtataatttacatttttgaaaaaaatgctgtcccctgtttttattcttttttttcctctctgctaccactttgctctgctttctgaaaattagttgtatctactattgtggtagactatcagactgtcttcaattgtgtacggagttcagacttagatatgttttctgaatagctggagaaaatgacaagttttatgttcaatgattaggacaatggtaaatcttactttggcaatttgagatatcatacttatactttcttttaaggtttcctgcttagattttgttttcctatgtacttttttgtttaccattttatttgagttagacaactgtgattctttctccttttgaatgtttatgactttccattgtcgcattttggttggccttttttgcattcttctaactctatttgacaacatgaagccattgtttgccattttttatattgatgctgagaggcatatcctagaggcatctaacttgactagctgacttacaaattactatgcataggta

SEQ ID NO: 113128 - DNA, 503 bp, Setaria italica
  Intron number 2 from transcript Si030181m (locus Si030181m .g) derived from phytozome v7.0 (chr-ID scaffold_2; pos 42 058772 to 42059274 reverse strand)
ttcatacacgccctatacgggtaagatggattctatattcttcttagatgttcatacacgttcaagattggctcatgcaggatttggattgccttgtctgaggaatagtattcttttaggcttgaagtttcttattagcctgagattttggaaggcaaatacgggatcaggagctctcctgttttatcttgttgtattttaatatgtaattatattctgttttccatgtttccacaactctgcatttgatttggtccgggcatatactgccatgattgcttcagatgcacagagcacgctgtcacactccatgcaaacagtgcaactggcctttagattactgtgtgtatatggtttcactctattttaagtcactcaataacttaagttctgaagaaagcttgcattgcaacgcttggcctgtagtccaatttgttatgcaagaattcaggtgcttctgtccttaacctgatatttctatttttttttgtcagggtgacagc

SEQ ID NO: 113129 - DNA, 645 bp, Setaria italica
  Intron number 3 from transcript Si027915m (locus Si027915m .g) derived from phytozome v7.0 (chr-ID scaffold_8; pos 54 3387 to 544031)
gaaagcaagctactcggtggaacaactctcattagcgttctcagctgctaaagggcttgacattcaatggtgcaaggtgagcttggtaacattgggatgtataatgattttctgcctttgcataaatacctggaagttgacaagtgatgtctgtactatttcaggctccagatgttggacttgtagctccagatcttgtaatttatctggatgtacaaccagaggtattctgtttatactcactcggtctatggtgttccatcatgaaggtgttctagattttttagttttattgtgcttatggtgtgtaatgcatttgacttgtgttacattagttacacactgtaggatgatggccattgttcggccttaacccaatcaaaataatgtttacatatagaactcggtgatgaactgatgatgatgtacttaaggtcgcactgtatggatttctgtcttgaaacgctaaaatcaatccatttatttctgaagccttttgctgctgagaactttttgttcagaaattttctttgcccacccacctataatgctttatatcagcctgtatgctaaattgattttcgatgttatgtgtcacctaatccatgcttcaatagtttacattgattgtcctcctgcgtcatt

SEQ ID NO: 113130 - DNA, 904 bp, Setaria italica
  Intron number 1 from transcript Si026712m (locus Si026419m .g) derived from phytozome v7.0 (chr-ID scaffold_8; pos 56 48285 to 5649188)
gcgttccagctccacggcgacgtctaccccacagggtacgcgacctcctcctcctcctcccagacccctctctgatcaacgtcgtttagtaataggccgaggacccctcgattgtgccggcaagaatcctctgctgcgaggggggaagcgattcaccgcggaatttgtgctcttcccccctgattagatgcggaatttgggatgtttttacccaatcggggttggtggcatggcggattggtccgcctcctgcgaatgcaggtcgtcccgtctcgtctccgtcgcgccgcgggcgttggccatcgttttgaccgagcccgcatcaggcggagctacgaatcctctgttttgactttgcgccccttttcttgcctgcatttccttttgcggttcttgtcagtagttttcagagcatcactcctttactattcacttcaacggaatcttaccgccagagttaccgttttcgcttgctctgttttgtagcgcgaaaacaaaatcatcatcgttttttttttcttttggtcctctatggccatgtgaaatgcaggatgtttcaatttcatcttcttgacgtgctactttcaggttgttgcattgactttttacccctgcggaaatttcctggtgtcccctgtgcttcctctgctcatgtttcctgacgactagcgtgtggcgtactggcgtttcttgctctttgtttgaactccacatttttactgttgaagaagacgagagaatcctctgcttattctttccttgtctaattttccacttgttaaacaaatgattttgattgcctttaccatctaataattccatccaagcttataagcttttgtacaaccacttgtgtacagtacttgacattcgattccacctctgcagccactactatatcacg

SEQ ID NO: 113131 - DNA, 711 bp, Setaria italica
  Intron number 2 from transcript Si028811m (locus Si028811m .g) derived from phytozome v7.0 (chr-ID scaffold_2; pos 15 434912 to 15435622)
gcctccgcttcgccaccggaggtggcgaccagaaggtatgttgtgctgtttttttccccttcttttctatcggagctcacaactgtaaattttcccatgctcttttgtcttttggcaatgaatttttttcctgctaacttcccttgcttagttttttcgcatgctgttgtgtggttaacttttttgtgcttcgatgatgtttaagttgaaattattatttgaaggttaagtataaatagtagcttatgagcttatgatgtttaagttgaaagtattatttgaaggttaagggtattaattttgggtgaattggctagtcattgggagatatctaaggtaacattagaatttgtgatgtattatcaggattttcagctggaacttgtggtgcagtcactgtttatgagccaaattttaatctcataaggcctatttgagtcatttgtgttgtttctagtccagcttattaggatgggcttagtgttaatcaaactcaagatttggtagctttgttgttgggtgataattgaaaattttaacattgtgtttgttgcgtttttgtgattctgtttagtcatatttgatggtaacttcatgtttatgtgatactgaggtatagccactctttcatattttccttgtctttcctaggtgatcttcttcttttactaagtcccttttatttgcttcgttgttgaaataggttcgaat

SEQ ID NO: 113132 - DNA, 536 bp, Setaria italica
  Intron number 2 from transcript Si030274m (locus Si030274m .g) derived from phytozome v7.0 (chr-ID scaffold_2; pos 27 762991 to 27763526 reverse strand)
ggcgctggcgcgggagggctaccacgtcgtgctcggtgagtcggttgagtgtctcttcccgctgtcatgcttgactgggcattccgtcgaacaggtgtcctgcatctgagtaggatgccttctgtattgccaaggacatggaatcatcaataaaaagaagttgtagtttcgttactaccttttgttctgtattgcttgctgaattcgtaaaaccttctgcactgattcttcagcaaggacttgcgagcacaggttgccctccttttcttggtaactatggccttcaatggatctgtgatgtcaagtgtcttgatataattgttcatctgttgtttgcagtaaatttagcaaaacctctattctagattttgttccatgtttattcattcctatccttgctatagtcactgtaggaaaaatttacctttgacttttgttcttgccggatttattcatccatgttgatgtactgaatcattatgcaattctattctttctcagctggacgttccacacagctgttatttgaggtatta

SEQ ID NO: 113133 - DNA, 586 bp, Setaria italica
  Intron number 2 from transcript Si006494m (locus Si006494m .g) derived from phytozome v7.0 (chr-ID scaffold_4; pos 21 67444 to 2168029 reverse strand)
ggaagtcgttgttctaatatctccaggatatacaggtacatgatgtataatactttacttctctgtgaccattatatttagagcttctaaaacaaccacaagaccatcagttcttttaagccatgtacacatgtgggtattcatttatggtatacggtataatacaaagtctttgccgatcatgagagaatcaccgatccatatgtggtcatattgatgggcaatagcaaatggttacaatgaaatatgtagatttcaaaagaaaattaatcatgaaatgccacttctgaacataagttgttcataagattcctgtataattctgtctttgtttatactattaagttgttacatgctcagatttttttagcattatctaaataataaaatatttgatttgaatcttttctgtttatttgttatactactctgatattgtctttatctcagtttttattgcatttttttctttcttcctttactttcctccctccagtattctcatatgttaaaatttacttacctattatttcttctctctttgagagataacacaaacctgttatcagcattggaaagagtgtga

SEQ ID NO: 113134 - DNA, 539 bp, Setaria italica
  Intron number 1 from transcript Si006677m (locus Si006677m .g) derived from phytozome v7.0 (chr-ID scaffold_4; pos 76 84018 to 7684556 reverse strand)
tacaagttcttcgatgtgagtgatcagattcagatgcgagcgactgtcccgaatttcttcgaaaatttgttagataactgaaatgttagtcttctatagccgtttggtgagctagtgcacatgcaaatttgctgctctggggtgccaaatgtagtggagcggcatgttttcagtgttcacttaattggagtccactcactatgatttgctgggacttattttggtcagtcgcattccgcctagctggtcctttgctttgattttttgatcttttaagtatccattggtttgattttatcggaagctaatttgcggtcataatttgcattttacaatgtactccgcttcattttgggggaaaaaactaaattattgtagataactgtaattctgtgaagtgtgatgattatgaacattatgaactttaggattcgtagcatcctagcattcaaacttttggattgctgtgcgcacaaccttcattcgccatcatgccttttttttctctccagaattctattcaaacattgaagccggat

SEQ ID NO: 113135 - DNA, 1064 bp, Setaria italica
  Intron number 2 from transcript Si029707m (locus Si029710m .g) derived from phytozome v7.0 (chr-ID scaffold_2; pos 42 027137 to 42028200)
atctccagcaagctcaagtccgtcgacttctacaggtgtgcgcccgatctgccctccctcgatctggagcacccatccgttcctcgattattttcccgggataggctggggtgtgtttttcggggggattagatgaatactgagagtggtctcgtgcggttgcgctgggcggatttcggtgaatcctggtatcctggatgacagcggtgtgttctttacagcgaatgcgctattgcagtttggcgcgggagctctgcgtcagtgatttcctttatccggttgtagctcggtagagacgagagacttacacgacgaattggtagatgctgtgctcagaatcctgttcttttcttcttttttttttgtgtgggggcctttctgtaattgcactttgattggtagtgcactcaatgcccattgttagatttcattctgcagtggtgcttcggtttggacatatgccattgccattctaaaatagaagctagtctgacagttttggattacataggataagccccatgtttccagttttcttaaagcaaaaaaaggatgttttttgttcagatgatatacatccatgatatgatgaactaatgtataagggtctgatactctggtccatcatgcatgcttggatttgagagctgattggttctagttcctcgatgtaccaaccatgcttttcagtgagaaacttaatgttgttcatgtccatattgttgtttggatacccatggttggaggtagcctgagtgccttggggcagtcataacttggtttgagccaactgtttgtgcttcatttggaggccccaggaacaataatttggagactaatttgagtcagaaattctaagtattttttatagtttctttgtatctaataaaaatgtatagactaagttgattcaggatgactagcttttatgttgtcgtatcctaagtttcattttcaaatgacgggtttttatagtttcttttgttctttatagttgtaataatgcttgattattttttcatgttgcaggaaaatccctagggatttgaccgaggcatcactat

SEQ ID NO: 113136 - DNA, 816 bp, Setaria italica
  Intron number 2 from transcript Si026203m (locus Si026203m .g) derived from phytozome v7.0 (chr-ID scaffold_8; pos 28 466785 to 28467600)
ctgggtcggcggattaccgggttaagctctctgaggtatggatttgccccggatgcgatgggtgcgtgtaagcttgttgactacaataattttgttttgtcatcatgttatgattgttgtatgattgatcagttattttgaatgtggtagctaggtagggctagagatattaacttcatggatctggttgctgaagttgtctagtaccagtgcatactttttggaaacagaaacataatttattttgatgttacgtaaagttcacatttagataacaccgtcacatggtagcctttctgcgcctgtctaatgggcctgtgcaacattagaggaatcaactggttctggcctcctttgctatttggatcacaaactcaaaatctttccttagtacttagtagcagacaacataatacagatacttgcttgatcttgatgtcagtgaccctctaggacccaattttagttatttatgtgttccgcatatgcaattaatgtagcattttagaacacaatagttcatactactatttcctgacctcattattccacagaaaccaagttgtgcaatgtggatgctctgatacacttgaatagagacattatgcagattcaccactcgtttgagttagcaagccatagcgttcttctcttttacaatggctgtaccctttgatctaatatctagtgtttgtcatgcaattagtaatcgccagagttcacgtatgattatagatcacatgaagcctcaaatgatatgtttttctttgcttgagcgtaggttcatctgcgttcagcgaaaaagctacttaaact

SEQ ID NO: 113137 - DNA, 528 bp, Setaria italica
  Intron number 1 from transcript Si008818m (locus Si008818m .g) derived from phytozome v7.0 (chr-ID scaffold_4; pos 77 4214 to 774741 reverse strand)
cacgtcgcccttctaccaccaccaccacccgtcccgtgagctcaccctcgcttcttctgctctgctctgttctgctcttactagcatattatgctcgtctccttctatcatatcaggaatctcgctgaaatggatgcgtgcttgctgggataggggcaaaaacaaatggtgtcttttggattttcttttcacccttttcattcgggagagaatacatagatcttttgccggcttattgggattggtctggtatcatatagtgtgccgatttatgggtgcttaagcatatactagcatttgtctgtttatatggatctttggtgttttcttttccgtttgcacaagcggtgggattctttattcaaacttttaaacaaagcaaagcatctttgcatcgggttggtcaaatgtttatttgtttttgatctagcttcagtacaccttcttttcaatattattgaatggatggcgatggttgcgtggattgatttaatgtgcccccatctgtggttcctgcagtgagttact

SEQ ID NO: 113138 - DNA, 499 bp, Setaria italica
  Intron number 1 from transcript Si030577m (locus Si030577m .g) derived from phytozome v7.0 (chr-ID scaffold_2; pos 49 63912 to 4964410 reverse strand)
agttaaggtgcgttttgatccggtttatcaaactcggggggtaaatagacaatttaatctgtaccagttttggcattgctgacaatgtagcatttcttcttcatctaaacgtgtgaatgaacaaatctattcgtgttttctttgctctgagcgtttgttatttctgaccaagccggccggcgaggcggcgacgaccccgggttctcttgttccatttttctgcgctgaagtgatgtgtgtcgttgactcgagtgtcaaaaattcgtttttctttttttttcgtttgttcttgacttctaggtcgacgcacaaagccgtgtggagcctgaaaatggaccccttcattgcctagcatggaaatacgagagcacgtacgcacacgctgacacgcataggaaaagactctacattctacaaataccctcgagacctcgaccggccgacgccccgctcgtctcgttgagcatcatccgccggaccacgagccctgcgcgcggct

SEQ ID NO: 113139 - DNA, 527 bp, Setaria italica
  Intron number 2 from transcript Si028850m (locus Si028850m .g) derived from phytozome v7.0 (chr-ID scaffold_2; pos 34 33540 to 3434066 reverse strand)
tgatcactcgcatatctggtttcttcatagacgaggtcagtattttttcctcatcttgatattatgtctgtcctaatttgtgagtaaaagcatgtgcacttctgtctgctgagaaatgcagtagagtccttgttggattgctaggttgtctcctttgacagtgcattatattaaccattgtgaatctttcctcaatttcttttttgaatggggaccctactgtactattgctgacaacttgtagtaagcagcaaaggtcaatcgaacatagggtttcaatttattttgacattttaatgctaatcttttgctgctgtaatcaaagctggctcatttccctacaatgttaatacatgtataagattaccagggtataattatcaaaatatgaatcattctgcctaccactcaaagcatgctattgtttgttcatgtcatattttgagatccgctgttcttctaacatgaccatggtactgtacttcatttcagaacttcctatcatctacccatcctcttgttggcca

SEQ ID NO: 113140 - DNA, 986 bp, Setaria italica
  Intron number 2 from transcript Si031473m (locus Si031473m .g) derived from phytozome v7.0 (chr-ID scaffold_2; pos 65 46208 to 6547193)
aagcacaagtacctccccgacgaagtccaggtcagaatttgtgcttgttcctcgctctgtaattcgtatgtgctgtatgcaattgccaattgggaacggaagtaattttagataattgcatttctggactctggtggtggtggttctgctcgattgccatattaagtttaggtggattcataggaattggaatattggatgcagaacaagtgaatgatcattgggcttgggattgggttgtagaatcgacctagacccttgtgaacttgtggaaacagaaagtagtaaaggattttagttatcgctggtgtgatttccccccttttgagctcttttgagtcagaggttgtatgcttgtaatgctcactgtagtcactcatgccttagtctgtggtggtggatatggtaaattgccacattgattttaggtgtagttttcctagtgggttagtttcgacttccgagcaggatttgcgtcacgaattggataacaattatttgcgtaggtgattagggatgggttctgaacatcgtttttatgtgcttgttaaatggaaaaggtggaagctttagtgattggctgattgctaatgtgggttttcctgcttctgacgtctgtttgtgaacttgtgatagctatatccatgtatggtcagcgcaattattccatgtcttcttttgctgtgctgtatatatagaggttgatgcagctagatatatgttggtatcatataactcatttagttggtagagtcgcatctcaaattcaccaagggttgtttgttaactgctgctatcaggctctattttgattgcctgatcggacaagcataaatttttaataggcattgttttgcgagtcaccactaaatttatttatgatgtttctagaatccactgagacttcggtccgtgcatcaaatgaattgacaccttgatttcttttgacaggcaatacagacgccattcagaagctacctttctga

SEQ ID NO: 113141 - DNA, 680 bp, Setaria italica
  Intron number 3 from transcript Si005762m (locus Si005762m .g) derived from phytozome v7.0 (chr-ID scaffold_4; pos 37 323777 to 37324456)
ggtggtggattctcttgcagagaaccggatcctcaactgtattttctcttgtccttgctcacttttttgttgtcagtctagtgctgaatgatctgcttccttattgcaactttagcttaattagtgtctctatctttattaaacatgttgctggtaatgtgctcgttggtgacaaggttgagtgggcttacatcgtttggttacacactgaccgtaaacttctcctgggactaagatagatgttttattttaatgaccagcagagcattctcaataatttgttccttgagttaagaacttaagatagatatccctgtaattagaactataaagttatatgtgaaatcatgatccaacactattttgcttagttctgtagacatatgccctcatttgttacaagaatagcaagattagtttcttaaaatatagacttatgtacttgaatcaatatattcttacgcattatcttttcttgctattttgaactcaggtgctccatatcaaataagtcagaatagttcttcaagccgaaagcaaatgaagctttctgctttcttttccgagaaacaaaatgaaatgcgtcacctgggggagcaaaacaatcaaaataaggacattgagttccaatcttcatctgctcaggagggatcacagtatcaaagtgggagttgtgaaag

SEQ ID NO: 113142 - DNA, 498 bp, Setaria italica
  Intron number 2 from transcript Si006472m (locus Si006472m .g) derived from phytozome v7.0 (chr-ID scaffold_4; pos 38 742337 to 38742834 reverse strand)
ggtctagagcgccgtttttgccaacagtgtagccggtgagatgcccttgcctttaaaatgagtgcattttcatttctatggcattccttttgtatatcactttttttttggcatccttaatgagagaaggatggagcttcaaaaatgtgaccagctgaaagaaataccacccactttagttgtagaatcaaatgaaccactactacaccagataatggtcaattattttgcatgactgagcctttcatgatatttgcgatgtttatttatcctttgctgatcaagatacacaggaacactatagtgaaacgaatagtgaagaaaattggcatttccttttgtttctggcactagtttgttattgatgtgtaagtggactgttgatagaatatcttgaaaaaaagggaaatttcagatgagcaattataacaaacgtttacagattgaccttttagtgactcctcttttttctttaacccttcactgtctgtaggtttc

SEQ ID NO: 113143 - DNA, 413 bp, Setaria italica
  Intron number 1 from transcript Si031887m (locus Si031887m .g) derived from phytozome v7.0 (chr-ID scaffold_2; pos 15 813575 to 15813987 reverse strand)
tcctatgttgtgtggcacatatatttgctcttcaacagcaggtgagttctttgctgtggaatactaatttcaacaacactttggctttgtatataactatatatccatagtgatgaagatgtataataactgtaacattatactccatccggtcagatgtaaatgacatttcagacatcaaaattggcctgcatgtagctataatttgttatctgaaacatcatataggagtgactggagatagtagaaaggtttattattttggctctcaggtgtttgtttcatcagaagttttcttctcagagacgttagtaacattgaagtatgtgaatgtaatgtaatgttttcttctcacgggtggtaactctgcaagcacagctagcatcactcaaagctcaagcatcacaaggata

SEQ ID NO: 113144 - DNA, 462 bp, Setaria italica
  Intron number 1 from transcript Si028249m (locus Si028249m .g) derived from phytozome v7.0 (chr-ID scaffold_8; pos 14 91207 to 1491668 reverse strand)
gggagacctcctggaacgcatctcgcatcgtccaggtcggtcggcagtcctgaatctacttgatttatgcagtctccaacgagctagcacgactgattgcaggcgatttgtccatccttttagttctaagttagaacttctaactgcgtgtttggtatgccaattatctcgtcagtcagaacacaaaaaattcgatatctaagctgatttatgtttcattgtcatatctgcacctagaaaatgccaacctcgtcttgaatgtttgaatcttggttggttgaatttttgaagcaggaaaaagatgccccttttgcagtaaactgcagcaaagcgctcctatcaactagtactcgaaattctagatttcgaagttcctttcagccattcttccattaactgtcattgtttcagggaaacaaaattttctgactcacacaactcgaaatccttcaacagggacaa

SEQ ID NO: 113145 - DNA, 692 bp, Setaria italica
  Intron number 1 from transcript Si029058m (locus Si029058m .g) derived from phytozome v7.0 (chr-ID scaffold_2; pos 10 669367 to 10670058 reverse strand)
gaccacttcctcgagcaggacaccaccgcgcacgcgtacgccgtcagctcctgcctcccctctcctctcgtcttgtctcggctcgaccccatgggtcatatggatgctaccgagctcctcttgattaccggcttgctggagggaaatagtcagcactactattttcatttggacccacaatagcaattcatgtgctggaaccttaatctttccgtgatttggggaatctactagttacactttggtaggatcagctacttctactgcactctggtagaatcacttctacttcacttaggtcgattcagttacttccacttcattttggtagaatagaatcagctttgttgtcagaaagtttcaggaaacattaatttgtttaagatcagtcttgtctaggaaaaattgtttctacgcgctagcaaagaacatgcaaagaaaacttaaattgatatctcagaaactgaatgtatggcagagcaaccaaatggcccatgctatttaaggtgtatttttctgaattcaaagacattaaaccattccttttagcttgatagaagtgatgaatatgtagtgcttattttttaagacactatattactcctgttttgagttttaatgtccgtatatttatgcaccatttgaaatgatatgcagttttttcctcttaactaccgtgtatcaatctgcag

SEQ ID NO: 113146 - DNA, 1003 bp, Setaria italica
  Intron number 1 from transcript Si025999m (locus Si025999m .g) derived from phytozome v7.0 (chr-ID scaffold_8; pos 29 941199 to 29942201)
actggagaaggcacctcttggtcgcggcgtctcaggtcagtctgtgcagctagcagacatgttattacaagcttgaattttttggatttcagctgatatacagttcgaccaaattgatttttgggaaaatctaagtggagattatctagtcttaaaggaagaatcctcaaactttcctaaaatggaatatatgaactcaccacatttaaaaaaaagtaaaagaggttattttccttatgcaaacttttctaaaatagaaacatttgaatattagaaaacgtgagatttatatatataggcagacacaatatatataggcagacacatcagggggtgtttggatctttaggacctcctaaaatttatgtctcatcgaatattcggaggctaattaggaggactaaatatgagctaattataaaactaattacacagatggaggctaattcacgagacgaatctattaagcctaattaatccatcattagcacatgtttactgtagcatcacattgccaaatcatgaactaattaggcttaatagattcgtctcgcaaattagtctccatatgtgcaattggttttgtaattagtctatatttaatacttctaatcagtatataaatattcgatgtgacagaaattttaggagagacaaagaaacaaacacccaccgattgctgacctatatttagacctgcatctgccgctagctgttaacataagggggagatagtatcaaaaagaacatgaggaggagattaaaaaccaaagaactactttgttaatttgtgaaaaaaattcttataatttatatttgtttcttaagaattcgtacatgaaacatttagaaatgcttacatgacgaagggagtatacgtctaatggttctcttagtaagttactagcccacgcaggagcacgggtgtttacatataactcacatttgcacatgcctcagatcgccatagccatctatgtgttcgtcaagtcgtggtggttcc

SEQ ID NO: 113147 - DNA, 651 bp, Setaria italica
  Intron number 1 from transcript Si006121m (locus Si006121m .g) derived from phytozome v7.0 (chr-ID scaffold_4; pos 33 488241 to 33488891)
ctcagagctggtagatcacttcaaccatttagtcttctattgccctagttacactttttatttgactaacaaagtgaccaatatgataagatgtggccttggaccatagaggtctccatttttaatgcaattggtacaatactctaatgggcatgtatgatgaacaaaactatatcttttttaggtagcataatgttacattgatatctgtatccaaacaaaatttgagttccacaatgtctatactgcatgcatgcttggtcagatgcttatcctttttttttctatgaatttgtcggttggatactactcttctgttgacacattgttgttatctgctttagcgagcaaactgtagcactatccttgagctaaattatgtagctttgcatcataattgtactcttctgttgatgcattgttgttatctgtcctttgtcatcaagtttgcaagtttgttcattgttatagcaagcacaagcaatttgacatccttccaggatggggtatgcaatgctattttactaatttatgacatgtttaatcgatttaacttctaactggcaggatgcgagcctaatgaattcactttggcatcagtccttacatcctgtactggctctcaaggcatacatcaggtcaagcaagtcc

SEQ ID NO: 113148 - DNA, 838 bp, Setaria italica
  Intron number 1 from transcript Si031193m (locus Si031193m .g) derived from phytozome v7.0 (chr-ID scaffold_2; pos 36 741674 to 36742511)
agtgactttaaacgcggtcataaggtaaatgccatattgccattgaactataaacgtgctctaaaccggtcataaggtaaacgccatcgttctttatgcatatgtctgcatccttgacccttttttttgcgaattcatccttgaccattttacaatcgaacaaatagaaaaaaaaacacgactccgtcgacaacaaacgaactgtaccgcaaagagaaacaaccaaaatttgagaacactagttatgatttttgtgcaggatttgcagaaccttgtcttgttttctccccaactccagattcctttgtagaacaagaatgtagagatggactgttttctcacaattctaccagtattcctgggatcaaccaaccaataaagaattcaatcctccgtccaccattatcctcttgcagacgctacgcccattccccgtgctagccagcctgctatgctactagggccttgtttagttggggaatttgggaggtgtcaaattactgttacagcactgtagcacactgtagcgtttcgtttgtatttgtgaattattgtccaaatattgactaattaggctcaaaagattcgtctcgcaaagtacaacaaaactgtgcaattagtttttaatttcatctacatttagtactccatgcatgtaccgcaagtttgatgtgatggggaatcttctttttacatagtgtcaaagttgggagttgggagtaactaaacatggcctagtatttcaagagcgcccatgtcccctgcctgccttccccaactcgccctctccctcctcttctgagcaacacgaaaccgcacacccaactaaaaaaagccg

SEQ ID NO: 113149 - DNA, 832 bp, Setaria italica
  Intron number 3 from transcript Si029547m (locus Si029547m .g) derived from phytozome v7.0 (chr-ID scaffold_2; pos 45 131885 to 45132716 reverse strand)
gaaacatcatatcggtaaccacactggatgtaagttccttacaacatcatgatgcagatacttttagtggacccttgaaatttgttgccctttttgaatttcaggagattttcttgcgtgacttatattttgtatctgctctgtttagaatagtttttatatcctgtttatagaatagtaatagttgatcatccatcaatgttagcgatagtaccgccagcaagcttcacgtttactatgatcaaccggatgttatctcctatcttgactaaatcatcgttttaaattgaacaagccactttggcaatggctatctgtttgtgtgtgtgataagtgacttaaggtgctaaaaatatctttgtcggtaataacttattactagaaggtcggccttatctgttgtaatagtaagttaattgctgcaaaatcaacaccatcttaaaattctctttgatgcatttaattcatgcaacttttgtacattagacccaggtataatttgattattgttggccaaaatttggaaagttacttttgaaaactaaaatacgctttacattgatggatggagaacagagtattgtgtcatgaatgctgataagaaattaggagtattgtgtcatgaatgcagataagaaattagcagtattgtgtcatgaatgccgataagaaattagggtttttaagcactcacctgttattagtaatcacctaagcatgatctttgcttgtattgacaaataaataaattcataggttggttctgaatgtttgatccattttctgtgcttgagcaggatatcaaagtgcaacttcagtctacagacttcac

SEQ ID NO: 113150 - DNA, 738 bp, Setaria italica
  Intron number 2 from transcript Si032707m (locus Si032707m .g) derived from phytozome v7.0 (chr-ID scaffold_2; pos 19 872 to 20609 reverse strand)
tactgctcggagtcggcgtcggattcgccaatcaggtactaataaaatctatcgctgctgctgttgtgacgtttgatgagtttactgtttgtttccacacggcaggccaggtagcaaaataaaatcaaggaagaactaaccatctaatgcatgagacaagatgaaatgtatatatgttaattggttgcaccattaattaattaattaattaattgttctagctagcgttggttgtgacagcttaagagctagcgattccgtcaatgatcatacgtagtataagatagggacctgtatgcatagctgtccacgcttagcttgcttcagttttcaaaagatgagcaagcgagagcctagcttccttcagattcttcactaatagctactgtaattaacaaggaaaactaactatatagtatacttagtgtatgtataagctaagagagcaagtaacgtgcatgtgcaaagtccaagctggtaggctagctagtttattgccaacatgcaagctctgcttgtgtatatactatactactgtactgtgtataataactgtggatagatgcatatgcatgtgattcccaaagtccaagctagatagcaacacaattcaaagacgatgcttactattcttctcttctcttcctttttgttttcttgatgcaaagatgcgtgttcactccaaggaggttgactgctttgtttgtttatctcatttctacctaggtctattgctag

SEQ ID NO: 113151 - DNA, 478 bp, Setaria italica
  Intron number 2 from transcript Si026339m (locus Si026339m .g) derived from phytozome v7.0 (chr-ID scaffold_8; pos 85 43846 to 8544323)
aaaacaaccactcttaagctaggagtaagaaaaacaaattatatacgtatcatgataaaagccactttcacaataatatctaattaactttattttgaaaatgggtctttattttttgtttgtacaaattgtttgtcaaagtgtcatattaaagatccgattgatgccataaattacacaaatatattgaatcgcgaagatctgacaaaatgatcatcaattaacacattccactccttgatgtcgcctagggttgttacaatctctctgttcatttgcaccccaggatttgaaagatttagcataaacctgctatatactacaccccttatgcatgattgcatatttattctcaaagtattgcatgcaaaagagcctaaaaagttaatgggtctgaaactgcttccactacgcgtttaattagtgtttttcttaccatgcaggcaactgctggtctgagacttattggtgaagaaaa

SEQ ID NO: 113152 - DNA, 797 bp, Setaria italica
  Intron number 6 from transcript Si007574m (locus Si007574m .g) derived from phytozome v7.0 (chr-ID scaffold_4; pos 10 859408 to 10860204 reverse strand)
gcagcgcagaggccgctgatcaggacaggtagttccctgcagcattttacttgcgttaaacacatgtcttggggtcatgcgagctaggtgtagatcaattaaatttggaatgggccaagatagtagtctgtagactttgttatttgctaccttttcagctcccaacatctggacttcattttgcttataggataataaactgaattttctttcgacagaggaataggaaagtgaatttcagtcaggaaagacttcataaataatttcctttgtgtccaacagtcaatctcaaagcaaagtattgtggttggcttcctaaagaatacagtagtgaaacagctccttgttcagtctgctttgtagtcagtcctcttcaatttcagaagcgagttgcatttgccatctatagaggaagttaactgtatttgaaagaatttttgtgttcctaaattgaatgcttgactgcattctttacaataccattttgccatctgaggcgttaaaatagagatgttatttgttcactgattctaagctttaacttgtgatctatgcactatactgtccatctcaaaaaaaaaaaagaattgtggttgaattcctaaagaatgcagtaaatctgctacgttgagatagacttcctttatgttaacggggatattcatatgtcttattgaattttgcgaattctgacatgaaaagttcaggatagcgtatcatttgcatgctggtattgtatttccatgagatatgtttggcaataaattctcttccttttgcatgcagtccaagcaagg

SEQ ID NO: 113153 - DNA, 767 bp, Setaria italica
  Intron number 2 from transcript Si031113m (locus Si031113m .g) derived from phytozome v7.0 (chr-ID scaffold_2; pos 72 3610 to 724376)
aagttctggaaggtttgcgctcttcctccccgtttctcgatttggaatgtgagagagagcgaattggttgtgcagtcgttttcgaaactatctgagtgattaaagtagagcctaattggtcactatcttagtgattatggaatgttatgtgatttataatatcatccgatttagtcaaatgaggggcactcagtagtctgcgccactgtagcgagctttcttgcagtctgattgtctccttactgtgtttgatatgagcatttctgtccttttcagttaccttactcgttaatttacaaatctgtcagtaatttaacatttgcaatatatgatttgatccgtttatggagatgcctgatttgtatatctagcacaacatctgactggctctggttcggtttgtaagccgtgctatggtgttcaacctacacactattttcttggtatcgtggagcatccgtggacttgtggcatatggatgcccaatgtttcacttcattttaggcaattatcatgtttagcagtaaagatagttttgaaagtttaggtgttcatttgttctgttctgatgttatttttttcgtaatgtcctttaactgtttcagtaaataaaatttattacactgcccatttgttttggaatactgtgccaaattgagtttgttgaggttagcttagtatattttgataatttaactggcttgatggtttagtcacgtttttcttttttatgtaatcagatatttgaatactggcctgcacgggga

SEQ ID NO: 113154 - DNA, 803 bp, Setaria italica
  Intron number 1 from transcript Si007097m (locus Si007097m .g) derived from phytozome v7.0 (chr-ID scaffold_4; pos 30 136398 to 30137200 reverse strand)
ggggtacgttgacttccaggaaccatggctgatggctctgtttcttgcttggccttagttgcttgatacattgagtattcctgcgtttgccaattggtgattcggaaacgtcgatttcgatgcaaattggtgtataatcttagaacttttaagcatttcactgggtaatactctagctcttcactatggggtttggcattggttgttcagctagggaatgcctttgccctttagtgtcgacctcgcctaatgcattaaggtatggtgggatttctggtttgctaagcacattgctgcataaacatatcatttcaccgtttgtaataaaatttaattgtcacctgaattccaaattgaattatgtcatgaaacggagttttccaattttcaaatgctgtttcatgacatagtttagttatgtttttgctaaacgcattgtgtgattcaaaactctcaggggctttctgctttcagataatattactggcgctagcaattcaaattgaggagaaagtaaagctgtctacaggctactcctaaaatcctatttagcataacccttggatttctgcaagtaacttgtaggatagcccataatgttctctgtagaataaaagaagggtgttagatctttccaaggcaactcaattgatattggacatacttattttgaaaagatcaggtacccctggattggttgtttgatctagcttttcaatggattgcatgataatgtttaatgttctgttagaatgctactttgtatttacattttccctgattctttagatctcaggaattca

SEQ ID NO: 113155 - DNA, 750 bp, Setaria italica
  Intron number 1 from transcript Si029583m (locus Si029583m .g) derived from phytozome v7.0 (chr-ID scaffold_2; pos 11 254288 to 11255037 reverse strand)
tgcagccattcatagctataggaaaacggttgcaggtgggcatgctattggtttattttgatattttatgatttgttcactaaaacttatgttgattcatgctggttgtgagatgtgcctgtagatctggccctattttttgtttgaggaataagctagctaaatttggagcatgtcgtaatcaaataggctctgaaattgtggtgcacgttttgtttgtgtgttggggggggggggggggtcttgtaatccctattccttttcttcttattcgagaaaaaatatggctagattggtggagataggcacatatgggcaggtataaacttgagctcaccctccctgcaggacgctctgagtcttatgtttatttctgcttaatcctcaataaaactgctgtgctctatatatagaggtggcagtaacaaccttggctaaacaaactccaatattttctccttaagaaaactaacaaaccaactagcgaatatctttttaagtgtgccaaacaaactcagccacttttggatgcctgggccttcttcgtgagctggtacttgttgccatgcacacatcatggttggctggcacaaaatatttgaatagcacaaggagggcagcatactaattattgactttctgactttcaccaaatagaactgcaaaatgtattatttatgttatgttcaaggtggagtaacatttccttttttttgaaagctagtaacatttacttttgttggcaggact

SEQ ID NO: 113156 - DNA, 943 bp, Setaria italica
  Intron number 1 from transcript Si008013m (locus Si008013m .g) derived from phytozome v7.0 (chr-ID scaffold_4; pos 36 550282 to 36551224)
ctctgaagcgttacaacaaaaacaaaaacaacaaggtaattaatttttccatgttctttcctgcaagagaggctgacttgagcaagttaaaaccagctaaatgaagatgatgtcttccttcagtgcttccttagaaagaaagtttacaaatttcaaacagcatggaggctggtgcctggtgatttgttagcacaacttagtttgaatggttagcttgtcgtcttatttctgtgaagtttgcaaattgcactgaatatctctatccctagttaacaggctattgttgcactaggcaccgttgcattctcaatccaccgttttctttgtcaattgctaataaccaaacaacttgtaaagcaccatgcatacaagcaaagcttcgtgttgtgctagtcatgtaacacacaaatcgttgttttttgttatctctattgtgataatgagcactttgatccctgactgctcaatgtattatctttgttgttaaagttggactaacaagctagacattggcatttgattgggaatgctaatattggtattaggaattcctgattgcttaatatgttatctttgtcatcatagctttaggtcattttctcctcacttgtaacaaactgtcatagaggaatagggctagatatattctgtgtagagtgccagggcaaaggaggtcacaggaaaggtttgctcagtcagcatgcttacatggtgagaccaagtcaggcagcttttaaaacctcaaggacaaaagtaggccttttggcggaacataaggaaccgaaaccaaatgatcaataattcttcattattgtactgctgtagatactaagacttgtaatgcgccatagtagtctctgatctcatttttcatttaccatactgttcaggttacttggactaaattctttattgtaaatttgtttgtttgtttaggttaagt

SEQ ID NO: 113157 - DNA, 685 bp, Setaria italica
  Intron number 2 from transcript Si028690m (locus Si028684m .g) derived from phytozome v7.0 (chr-ID scaffold_2; pos 27 150881 to 27151565 reverse strand)
tgctcgaggtatgttccacttcgaggactaatttgcctcctctacctctttgaacttgagtaaaattttgcaggaaaaaaagagagaatatagcttatgcgccaaaatactagtcaaatttgtcaattggattcagataatgaagtagtataattcagacaaaccgatcattgtgaacaggcaaagcaacatttataatacaccatgtttgtgtatttgggcacatctatatatgcgcttagaagatagatggtaggaagcatgtcacatcaaacagaggaacctcattggagcgagtcctaccacatgctgtcctactgcacgcgctatatccagtcagtgtcagtctttgcgagtaatcacaatactgaagaatttggccaagcaaccacaaaactgaatgtaggctgaccggtttcaggtcaacataccaatttggcttgtcaaattttccttttttttttcttttactcaaggaatatccgtgaaacaatgtgctgaaatcatagcatgtagtttgaaacacggaacatcctgtttagtcagagcagatttaacataacgaaattcgacctggttccattgcatctcatttacgccattgtgatgacatgatatgcccttgtgctaccctcttttatgtggcctgacatgttggtaaccatcgccaaacagggcatcgcca

SEQ ID NO: 113158 - DNA, 937 bp, Setaria italica
  Intron number 1 from transcript Si029253m (locus Si029254m .g) derived from phytozome v7.0 (chr-ID scaffold_2; pos 44 979260 to 44980196)
ctggaggccgagggcgccgagaagctcgttgaacggtgagtgcgttattcttggtgtgggagcgttgtcattgccaagtgcattggatgacagacatgtcgtggttttgctgtattttgtggcgatctatttggtaggtagtgtatttacgatatatttttaggttcgggcgtgtaataatctgccgggagcctatggatgcatagagcagggttatctgttgtaattacaggatgtggtgtttgatcgagatgactgttactgggtctgattagattacttcgagagttcccagttttattttgtgtattgatatgctagggccataatctgatagcttgaccagaggcatacagaacggcaacacatatttttaattggaacatttaattatggaaaatggaactggcaacatatattttgaattgacacacataatactgaaaaatggaaaatgtcatgatctctcagtgctcaatgtgtttggctttgcattttattttatggatgcgtgaagatatttaatttgtgatgctctgtgtgaattgttttgctgagactgcagctgtactatggatttgtgatgtgtgattgatacaaactatcctgtacatgacatggtgtgtccataccgcaaaatctatatattattgtatctagtgctaagtatacaggaactgataaatgtctttgaggttgggatgataaggccagaaaattctattatttacactgctgtagtttacttctcaaaacgagttgtgttgatgcacgataggtttcttgcattcctttatcttccttttttgctccttggttttagtattgcaataactttactctaatttgtaccaaaatgtgttgtctcaaagtcactttgtgactctccactacattagatctgactatgaattgtttcctgtttgttgaaatcagg

SEQ ID NO: 113159 - DNA, 438 bp, Setaria italica
  Intron number 4 from transcript Si032139m (locus Si032139m .g) derived from phytozome v7.0 (chr-ID scaffold_2; pos 16 121186 to 16121623 reverse strand)
tggggatcagggtgtccagcaggaaggttacgtttcactcactcaattatccatctaaattcaccttttcctcaatatttctgtttcatgtttttgattcgcttgtcttgactgtatgtcctccaaaagtaaattggcatcacagttaactcttaaactcgtttggtaaaaaagaaaagaaaaactcgtaaacttatatagtcattctcatattgccaaattggtgtggtacatgactatgttgctttgtggtagcggttgtccattttattccttgcctatttcacaaggaaatggaactccactaggaattggactacctgaatgatgcagctgctgacacttgataacatcttggtacatgtcagttcatgtgttttctctgctttctagctgactattatttgctttctccaggttcttctggctgtgttgaac

SEQ ID NO: 113160 - DNA, 1052 bp, Setaria italica
  Intron number 1 from transcript Si028980m (locus Si028980m .g) derived from phytozome v7.0 (chr-ID scaffold_2; pos 10 628581 to 10629632 reverse strand)
aactttggccgcgaccggttcgacatcctcaagtacgtttgttgctcctaatgttacatttcgtggaacatttatgttccttgtgttgttaattatacacgatgcggaagtcaaattcatctgggtgcctttacatgaattattttacctgtgtcattgacttttggtcaaaacaggttcctttcctaaggtgcttgcgatagctttgaaaaagtttgaaggcaacccatgttaagataattccagtccatagtcttcgattcagttcattgccattccaatttttccatcctattgagagaccattatcatttgttagaagcttgtgggattatcaaaacagtatctttatttagagttgtcaagtgctagctgcataaaatttgaaggcaggattagatgaaaatttctagatccatcagatgggttgttactgtgttctttttcccccctagttttgatgctaagaagttaccactgttgtcgctcattgaagttagatgactaccttgctacacatacctttttcttcgctgtaagtggataatgatgatgcatatcctgccattgttattcccttggacgcacaggaatagatattttaagtcgcatttaaattttggaaagcttcccctaaatttattgcaaaatttggaaatttaggggtacaagtatcatgttaagttggaaaactcatcactgctgagagtaaatcactatggccatccgaaatcagatattgcttccttgcatataatttttttggtgaatccatgactgaagcacatgataattaaatctaagatatattgtatcggagaaccaacatgctttgcccgtgcatgtgaatattgttattttgcctcaaaattagtaaaaggaattcatttagcatgccagatcagaaagggttattattaatgttgcagcatttggacgactttgtttatagatacaacaaacgaacaaacaggagtgtgctaataatcatgttattgtttcctcaatcttatgcaggtccttgccaaggaaggatcttcagatattggttg

SEQ ID NO: 113161 - DNA, 1032 bp, Setaria italica
  Intron number 1 from transcript Si030545m (locus Si030545m .g) derived from phytozome v7.0 (chr-ID scaffold_2; pos 46 949244 to 46950275 reverse strand)
gccatcgcagccgagtgggagtaccaggtcctgatccaatccctctctctttctctctctcctctactgtattctttatatggttggacaaattcatgttactttagtgcagtgtgaatttctccggttcccaaattttgtgctggcctgttcatatctgtaagcaatttcaaatgatttggatggaaactgtctgagcccaattcatcatgatctcacgagcctagttcatcttggagcagtagtgaattattacagaatgttgtcactattagttcagcatttgaaatgaaattgtgtcatcttcctatccagaggcgttgaataatgaggactcaaatcatatgatttttggtgggttttttcatggtagtattgctttgtttcttcttttttttttggtgtgtcatgagtacaataactagaatgattttctttcaaaaagaaaacaaatgattaggatgctaattaacacctagtctgatcctgtagattaccattattccatcttgccttatgctactgttgatacttattctattatctacttgtctctacaaatgcaggagaaatcatgctgatttcctccaataaagttgcttagacatcaatgaagctcaaatactcctacatggacatcttctgacctgtaaaagctactcatttgttgcaatggttgaacagaacaagtatctagtgctctaatctgagtaaatcatcatgttataaagcaattaacttgattctgttactcctttagcatcatgatattgtaacatcaatgaggtagttttgttcctgcatctctagcaacatggtagagtttctgccttgacatgttctataactgacttgtaactggcaacagatgttagagcagcttgctttatttgtcgtccagcacctaacaagctaccaccttgcagagttatttctgaattaccttatttgccgatcttatcttacttttattttcttaatttcccgagcaatagatagtgatcctgaatttcttattgtgacaggagtcag

SEQ ID NO: 113162 - DNA, 865 bp, Setaria italica
  Intron number 1 from transcript Si031542m (locus Si031542m .g) derived from phytozome v7.0 (chr-ID scaffold_2; pos 14 049671 to 14050535)
ggaattgtatttccagaggaaaacaatattgtgaggtttgttctctacttacacaatagtgtgctattacctttagaggttaattttgctttcagatcaaaatcagtagtgtattctagtgcatcaattgtatgttgtgttagttgttacttagtattgtctgcattatctccagcgtatcaaagcttatatctttatcaatatgtgctattcttgttggtgttcttgtaaccacaatgtatttttcctttctagatatttgttaccaagaacaaagttgtatcacagaaaacaaaagaagaataatactccctccgtcccaaattatatgtcgttttggcttttctagttattatgcatctagacatagggtatatctaagtgcataacaaagtctatgaatctaaaaaagccaaaacgacctatatttggaatggagggagtagcatccagcttttccagacttgccattcttgtttgtgttattgtagtcacaaagtggggtttcaactttagcaattagcatttgtgtgtaacatctatcttgtaaacaagtattcttttgtacttttaccagtatgatggataatactttacatttttcctgaagttctgttctcaatgcactgataattctataatcatcaaaaagcttttcaactctagcatgtacattggtcattacaaatttacaatcaaaagtgatcaacaaaccacaggttgcttcaacttaaagtttctttatccttggatttttttattgcgccattaactatgcatccacgcccttccacttctttgatgactattttttatggctagtaagttttagtaacttgtgattctggttgcagggaagttcagc

SEQ ID NO: 113163 - DNA, 899 bp, Setaria italica
  Intron number 1 from transcript Si026408m (locus Si026408m .g) derived from phytozome v7.0 (chr-ID scaffold_8; pos 16 194844 to 16195742 reverse strand)
ccgcccgttccccttccccggcgtcctccgcgctggttcgttccctccgccttcagctcctaaaaccccaaccccacccttcccttttgctttgtgtttcaatccccaaccaagggtatcgaatggagacgagtcgattttcgattcaaatcaagggagtacggggcttgccccagttcctcgttggtgtggtcgatttgggcgcccctttcggttcctgattggttacaagatgcgggccgtgtctggtgctgtcatggtctcatggggactttgtacgggggatcgcaggcgttgtcaggtttgcgtgtttggttggttcggttaaggcaaagtggcgtgatggacggaaatctgtcctggtggcgtttctttgaaattggaacctcttcagttggatgagccccagacacagttgtgtgcagcatatgcttacattgtggtgttggtaccatgtggttgtgtacaccctatatttatatttggtacagtatcacgctattccattcatgcagtttgtcttgatatgttgcggttgtgtttacttttaactttgtttatggtcctgaaatcaccttccacggctctaataatagttctgtactaatcatttccgtttggttcatgattaatcctatagttcttgatttttcctatattacaatatcatgactatcatggaattcaagcagtgactcttgcctaagtatgctcatccctgctccttatttgcaaaagtggggcaaacgtaatcctatgtatttgctaatttgtgaaaaactgactaaataatgttatgctttcagccaaattttgaataagcagaagaattagtggttagtaaaaagtcatgttcaagttgtacctattttcatcatcttcttattgttttttcaggg

SEQ ID NO: 113164 - DNA, 693 bp, Setaria italica
  Intron number 1 from transcript Si030604m (locus Si030604m .g) derived from phytozome v7.0 (chr-ID scaffold_2; pos 37 367507 to 37368199 reverse strand)
tgaccagcgtctcatcttccttgcaaattgagcttgtaagcgctcctagctaaccaatgtgttgttattcagacttaatgttgttgattgtttgattaacacttgtcaatgtaagtgcctcgatgctgtattgagtattgacataggagtgctctgtagtaggcaatcagcagttgaaactagttgtgatgtgcttcttagaattggatggcatggctttgtagcaagaaagacaaggtcataaggccatttttatcaggaaagagcgcttgttcctgaaaagaagtctctcttatagtcttattcttcttccattccatgagttattccttcaatcatgcctggcttttcatctatcctctacctacaatgatatggacaggacaccttagactgtctttacgactgacattttcaagcatgcattggtgggccacataattgtctaatcatttgttcgtagtgtcttccagacagattggctacccttcataagatggaagcataaagaaattgcaggcattgttacaaatagggaaaactattaaagaaccagaattaattcattttccaaaagactttgattatcaatatattactcttcctactgcctgtagatttcttgtcattcaatcatatttctgagcatcctaagtattcatcagcaaatattgttgtttctgtgcaggtacc

SEQ ID NO: 113165 - DNA, 531 bp, Setaria italica
  Intron number 1 from transcript Si005721m (locus Si005721m .g) derived from phytozome v7.0 (chr-ID scaffold_4; pos 58 2190 to 582720)
gcgcgtttgactcgtcctcgactcggagtcgagtaagaaaccgctggcgctagctcttgtgttctcgaatctgcatctgcgggctcgtgggtgcctggttatcgattcgttcatccgtgggagtgttgttgtaatcttgggggatttttttttcagttaaaaggtggggtttttatttccgttcgagtggcgtttgtgctcgtgctcctttcttgctttggattgcgcgcagcggcgaggcgacgccttttgtcgtcagatttgtgcggccccgtcattcattcctccgtgtcgtttcgctgcccaaatttgaatcttgacccggggttccggccggctttctcgatccctgtccgattcgctgctttccactggggaaacttttgatcttttaccaaaaatttaccattttttcttcattcatatatgcgtgttaaaggattgctctttctcatcaatctctcaagcttaatctgatttgttcctgctcgcgcagatcaaccactgaccgatacgagctccacttccccc

SEQ ID NO: 113166 - DNA, 963 bp, Setaria italica
  Intron number 1 from transcript Si007703m (locus Si007703m .g) derived from phytozome v7.0 (chr-ID scaffold_4; pos 25 578354 to 25579316)
cgcgcagccgccggccccaccacccaccagcgacggtactgagaccccctctccccacatcctgctcctcctccgcctgctatctctctgtcgactcctttgagtctgagttcagttcgtcgatccgtacctctgtttcttgatgcgtgtcgctggcgcctgggccccacgcgtctcggctgcagccaggcgccagccatgtgcttcctggcaggcatcagtcgttcagccgcgtgttcgattccacctgctatcgagtccttagtacgaactacgaagcactgctgttttctgtaggctcatcttctttttagcatagagttcacgaagggttgtttacataagcacacttactgttttatgaacaatagttttgaaaagcattatgaacaatagtgacatattcttttatttagcatagagttgaccaagggtttagtgtccacaatttgatgcaaccttcaataaaaggattaagggctgagcatccaaaagggtttcgttttctagacaaagttccaccataattccagcccaatggtctagaaattcttgacactgtggctagaccaaagaagataggagcatgcacactcaatactcggtaaagtatttccattagtacgagtactacctaaatctgccacgttgattctatggaagactctgtgaccttctgatgcattacgtgtctgacttgtgcaagacaatttagcaggctttgggtggagacgccagtttgcaagtagtagcaatagttcaaactagtcatttttggtctagagttcgtattcagcaggccaatcttaaccagtcagagttcttgcagtcgatgacgtgcaaccttatattttatctttgcgctgtcaattattttgtttcttttgagtcacaatatgctaaaccgtgcaataacttatcgatgcaggcacatcaattgaccaggggatcgcgtacgtgctg

SEQ ID NO: 113167 - DNA, 886 bp, Setaria italica
  Intron number 2 from transcript Si030783m (locus Si030783m .g) derived from phytozome v7.0 (chr-ID scaffold_2; pos 46 141101 to 46141986 reverse strand)
ttacagaagattggccaagttctatcaccctggtcagtttatccacctttctctatttctcctatacagcacctctcctcactgcattccaggcgttatttgatttagttggtgtttcctgacctgaaattcacatgctcctacaaacatgatggatgactgccactctgttatctgattgtgttatgtttatcactgacctgttcacagtattcacaacgcatcattgtcaatgctacaaaattgtgcactgtaactactgcttcacagtattcgaccctcatttgaaatattaaattaaattagaaaatcttgttatccgtgagtttatatattgtggattcaccagtaaagcatcaattgcttatgcactgcaaagagcagatcacaaatattatttttccttgaagatttatgtattcctgtcttatagcataatccagtatttagccgattctccatgcataaatatgtggcattgcaaatgaattttcttatcctgagcagtagttgtatagtttgtgtgtatatctagcgccgcagtggtagtgcgtcagagtttcttgccttgtggtggattaatgatcagattcttccattcatgttttaacctacataaataccttaagtatcttgttaaagcctactgcctggagaatatgcactagtatataaactgaagactaatcaaaatacacctgtcaagtgaagtctgtggctagctgtggtttaccgacagctaaaccaatcaattaggggcaggaattagtgtcataggaatataggtgcagctacctttttgtggattgatgctatttctcacacagtaagtgaataaaaaatatcttcgtttattccatctgattatgtcattccattacagttt

SEQ ID NO: 113168 - DNA, 808 bp, Setaria italica
  Intron number 1 from transcript Si029292m (locus Si029292m .g) derived from phytozome v7.0 (chr-ID scaffold_2; pos 32 779191 to 32779998 reverse strand)
gtaccagctgcggtgctctgctcaaagagcttcaggtattcaccttgctttagaaattcgctttgcaattgcaatatttttccgctatgtttctcttttgttaaacatcgctgttatcttcgtatttctagattggctcatgtgctctgttaattcttcctctttgcgcttctttgggttttgtcttgtttactgggcgaaaatttgcatttctacatattttagcgccatttttttttggaactgttcagttgttagtcggctagaatatctgtgcttaggtttcttccatggtttctgagctgcatgttcttgccttctttgcctcttggggttacacttgttgcagaaagtgcaaaaatttccacctcttgagttaggacgacaatttctcgtgcaatcagctccttttctgggtggtgaactgctcggcaggtgaattccttgatgcagtgcattggctttattgtggatggctcacccttttcacctttctggttcttcagcagcccaaaaagcaatattgattggctctagtgcagcaggcagttaagatgtgacaataattactcttctaacctaatcaggcttttgctgtgtacctttacaaattaatatgctattgctcagaatgagtccgtactaatcaaaatttactctgaaactgttgcgttcttttatctgcattcaatttaagactttaagtctactgctattttgatcataaggttgtgtttgctcataactcatgcaatgttgtttcttgcaatcagcaaatctgggcagaggtaggagaaagtgagagcga

SEQ ID NO: 113169 - DNA, 321 bp, Setaria italica
  Intron number 3 from transcript Si029270m (locus Si028854m .g) derived from phytozome v7.0 (chr-ID scaffold_2; pos 12 330520 to 12330840 reverse strand)
agtatgtttcctgtaaacatccattgcacaatgtatatctttcttctcaactcgtggcatatatttaacatacaataataatacttgttagctttcttatcatatttgaatatcctgttttgattcattcattatttaatgtttcctttcattcatgatgtatttctttctctagttacttctcttagaaagaacccgggggctgtcttaccccctgcaggttgagttttttttttctagttacttttcttactcaagaagatttgtttattaatgtgactttcagagtataaatattgggaagaggcgattgataagtgg

SEQ ID NO: 113170 - DNA, 668 bp, Setaria italica
  Intron number 1 from transcript Si031680m (locus Si031680m .g) derived from phytozome v7.0 (chr-ID scaffold_2; pos 12 392612 to 12393279 reverse strand)
gattggtgggagagatacctcttcagtatccttcgtttcctgcctcatcaatttctctgatcccccttcccatctttttgtcccaagttctgcatgtttcgcatctccatcagtcagcatgaatgaaacaaccaagttcaatttgttctttcttcagaaaacaaaggaattagcatttggttacgctgctggtctccttgatttggggccaaattccactccaaagtttaagaagaggtccaaattaaagaatctaggtttgttcactgatggttaagtctcataaagatgatatcccaagtaaacatttgtacctgagctgccatcacagtaagtacaggtggctcaggtcaccttattgctttgctcatgtgcctggcaatttagcatgctccaggttaggttggtgagtagctaggctggattcagaaatttgaccaaactgaccggcctgcagccgccatacacacatgagctgccacacacaccggccctgcccctgagccctgatccctattcaaaacgtgggtatatgctagtacacattaaagtaatcttgccttttggcttctgattaattgttggaatcattttcctgatggtgtactggtgcttgtccttaacttacaatagacagcattgtcttgattctcctgtggttgttctgc

SEQ ID NO: 113171 - DNA, 442 bp, Setaria italica
  Intron number 3 from transcript Si029990m (locus Si029382m .g) derived from phytozome v7.0 (chr-ID scaffold_2; pos 37 525346 to 37525787)
ttgcaactcggaagggaaacaccattgtaaggatcttatctcagaaaatcttctgatttcttccctggtttcaggattcccctttacgttttaataatctgatgttttgtcctatttatggttgtagttatgttgcttaggattagtactaaaatgaagttactcgcattgatgagatattgtttgatcagtacctttagtgtccaatattttctgaaataactccaagaagaatttgaatattttccaggaatcaaagaaaagttaagttcagggtctactaaaaaaatgagaatattttcttccttggaacttaaaaatcaagaatttctaagcagttttggatttaatgtttctctatcttagtaatagcatgcagttatcatttcaaagaactgattactaactcgtactatatctgaaatttgtctcttccttacag

SEQ ID NO: 113172 - DNA, 861 bp, Setaria italica
  Intron number 1 from transcript Si029759m (locus Si029759m .g) derived from phytozome v7.0 (chr-ID scaffold_2; pos 26 231644 to 26232504 reverse strand)
tctactcgctagccggcgatctactgcacaagcaggtcgctgatatgatccatccagttccttctctgtagatatgctagtttgagaaattttcagattatcaggcctacgttttagaatagattatcatattatataggctaggttttgtacgatattttaggattcacattcccgaatgctcttactagggtcaataagatgcaaggatttgcttgaaatatgggcttgattttagtggctaataataagcagtgcttggaatgtggtgtggcacatgttctgttgagttgcttgatgttgggaagttgtttctgttggttttattgcccattctgagttttcatcttctttttaatataataattggcagctctcctgcttggttcatgtcaaaaaaacaaaaactccagtcatcacttttggatggcattaaaatgagcatgggacttctcagttagttgaaaaaattatatcaatagaaatcctcactaaaagatggttcacaagcactatttcttttttaagagttagctttttctttaaataaattgcataccctttgttaggttacttcaaatctgatgcatttggtatgatacaaccatgtgtttcttacttcacacatagtattgtatgactaaataacattgttgtgtaagaaaacagaatgctttgtaatgtagacagcacatgtattgtagtgcaaacagaagatactctatttgattgctcctactatcattaattatgttatttatctccgatctttatcaaacatgctttttttgttttttcactgtcttccttgatgtgcttatttcagagtatatatcctgcaaagatactgaaactcaactt

SEQ ID NO: 113173 - DNA, 1005 bp, Setaria italica
  Intron number 1 from transcript Si029586m (locus Si029375m .g) derived from phytozome v7.0 (chr-ID scaffold_2; pos 40 621583 to 40622587 reverse strand)
taatttacaaggtactttctctcgtatttttgtctgtgcttcttctgtgcgtcaaaacaaaactcctgcactggattagttgaatgatttttgtttcttacaataatctccctgctaataaacttgttttagccttgtattcttctttcattgggaagtacaacatgtcattcatatgctacgcgtagtcactttcttcaacatgtatgcttgatatgatgtcacttccatctagtaccctagcgagtagtgggactcaaacagcatgatagtgaactactttcctaatgaaataaaatgtaacattactttagtttatgactttcaaccaaaataaaatacggcagtacagttgtgcgttcctgatagtgtctgtacatctgtagtataaccaaaacttctaatttacaatttactaatattttgcctagccaccattctgcatgctttaagtatttgtttatatcaaagtgcctttggaagtaccagttataattcaattataattttgcacttctaacactgcaaaggttatgtttataatcgtgtcagtgtacactgcattagtactattgttcatagttcatcctgtcacccaatgggtttcaacaaaagacaaacaagcgagtttctacgactaaatgggttgcttattaatcaaagcaattgtttcttagtgactgctaaattccctcctagtgttctaaatgtcatatgcatctcttacgttaaatgaggtctgtagccaatcctaagtcttagcagctgttctcgacatgctgcacaaaatattttatactgggcaactcctaatattaagctgcagtgggtgctcctttagataacatttgttagttttgttatcctttttctttgataagtacattatttatttatgccttgttgtccgtaatttgactaaatgtcaaggactccttccgtgatacaattaatcaatgttctgttacagggaacttttctcccactgattgtgcctcctagttc

SEQ ID NO: 113174 - DNA, 189 bp, Setaria italica
  Intron number 3 from transcript Si029800m (locus Si029800m .g) derived from phytozome v7.0 (chr-ID scaffold_2; pos 44 150183 to 44150371)
gattcacaacaatctttgtcggggaactggtatgagccaagaaataacatgatccatctattaaaaagttcaatacaataacaatttatttgattttcttatctttttaatcaatatgagataattttctttagcatctgttgtgtataattctggtgaagatatataaacatactgcttctgttccag

SEQ ID NO: 113175 - DNA, 792 bp, Setaria italica
  Intron number 1 from transcript Si028942m (locus Si028942m .g) derived from phytozome v7.0 (chr-ID scaffold_2; pos 18 400452 to 18401243)
aaggagggcgatcccaaggtgcgcgattcattcctgctctcgtgttactactctctgtgtgtgggaaagcgaggagggttaggaacttgaatcttctagctatgaacatagcaaatctgtgcgttgggtacctttcggttgctatctggatgcgcatctgtggttggagccatgcttacgcgccccttgaccgtcccttgcgtcggaaatggttctggggctgtttatttagttccattcatggctgttcgctctggggtgggtagtgttaagtttgcttatgtatgtggttgggttcgccatgtgtgtggctgttcgctgtgtgtgtgcatatgtgcttgcaactgtttcttgagctgtatttgtcaatgtcaccacccactcttgttgcatccagtttgactcaatgcccatgttagtctgcatgttttgattttgtgagcgtgttgtgcattggcgcatgtcaatgccagttggcatgctattgggtccagattttcctctgttttatattcattagctgcgtcacttgttccatgaagcttacgtcagggcctctttaatcttgttgtcttaggctttaaatttgaagcataatttacctgagaccagcaaggaaacagttccgttggaagggtggatgatatagttgtccattgtctttgtataggacaactgtcagcttgaatcgatagtgtttcttcttttgctttgggagaagaaattgttgttctatcaaatttgtttttctgcatctgatgtcacattttgcaatttcaggtccaccataat

SEQ ID NO: 113176 - DNA, 541 bp, Setaria italica
  Intron number 2 from transcript Si030850m (locus Si030850m .g) derived from phytozome v7.0 (chr-ID scaffold_2; pos 46 404698 to 46405238)
gcagaatttgggaagacaaaggtcattgtctctgtgtaagtgcaacatccttcaaaccagctgtcttatgttttggatattgaatgcaaaaacttgtgtttcacttcagttttccataaattagtgtagtctccttggtctacaagtgtaaaatttgttctgttgaagatttatattggtgtctttggaatcaaatacgagcaagttagggtcaaccaaagtaagcctgtagtctgtaccttaataaacaccggctttcaatgagtttgtttgttccagttggatctatgtacttgtacttcttgtccgtgacgtggaaatcatggtttagttttatgctactaatgctcttgccacttatgatgtttagctatacggtcaaccattgctcactgcagaaatttcctgggctctactatgtgcttcttagcacgtcaatattttaatttcctctatcttaattttgaacagtattatttgattttccatctttgttaatgattaccttcgcaggtttgggccaagagaaagtaagaaagca

SEQ ID NO: 113177 - DNA, 725 bp, Setaria italica
  Intron number 2 from transcript Si031275m (locus Si031279m .g) derived from phytozome v7.0 (chr-ID scaffold_2; pos 45 653004 to 45653728)
ccattgtcccggtctacggcgtccactccacccaggtcaggaatcaaaacagctattttttcacatccaaggcacagcgtctttgacctggcccttgcctaactgggttctggtttcatcgtggtatggtttgttttggtttaaccgtgcatctagattggtttgatttggatttaggagggtgattggtggggtggggctgtccgaggttgacgttatttcgcagagaagttcggtgtggctttggtccggttttgggaccattagcagcttcagttgctagggtctttgatcgattttggaaaaatgagacaggattggaccaatcgtgtagagtattggttctgtatatacgttcccttgcactggaatgatgccacagtgatcctacattcctacttgttctgtagttctctatattgccaagattgacatgtactgaggcgtgacgaataggcaatcctggttacatacagatttaatgtaatggttgaggaaaaaaaagagagaactgtttctgaaggtgctatagctgacattattcttcctagagttactatctgcctggagcctggaggtagcaaatgtgatactagtcgtaacattttctctactgattttgtcaattgttctaggatatttttagatggtaatattcaattattagagtgacggtgtgctcttttttactattctataagcatttttgcatgtacagtttccaa

SEQ ID NO: 113178 - DNA, 439 bp, Setaria italica
  Intron number 3 from transcript Si031587m (locus Si031587m .g) derived from phytozome v7.0 (chr-ID scaffold_2; pos 21 895930 to 21896368 reverse strand)
gttgttacttttgactgggtaagaaaattatttcttttgtgcatgtatgtattccacaatgagttcagagaaaatggattaaaatgatggtaggcacctaagtcaaaattttccaaaagcatataggcctctaagcagaagttcatatccttttctatagagttcttgaaaaaccgtactcaatgtcctgttggattgtttaggctcctacattcaaagttttccaagagcatggtactcaaaatggagttcgtgttgtcagctagaattcttcatatatcctttaatttggaacaagattattcccaataacgaaatatcatattgctttacacctttccttctgcaaccgtgccataagaactagcaaacgaaataaaccatggaacattattgagatgtgtgggtgtgtttgttgcagctgacagccatcctatca

SEQ ID NO: 113179 - DNA, 761 bp, Setaria italica
  Intron number 1 from transcript Si028778m (locus Si028778m .g) derived from phytozome v7.0 (chr-ID scaffold_2; pos 25 945149 to 25945909 reverse strand)
atcagcagcagcctgcggaggaggctagaagatcagtaagttctccttccgtgcggttctttactatagaattgagtttaatacacacaaatcagacttgatgaggagtaaatttaaatgtgttgctcaaataaaagggaaatgagtatactatcatatatcacgtacataacccaacaagctaccgtaggatgaaactttttgacgcatttagatatgctgtcctaaacatgtattaagcatacatgtttatgtgcatagtagttttcgccaagggatatacaaattacaaatttcatggcaaccattttaaatgcagttatcttttagattaatagaattggatacatgtctattcaaagaaaacctgattgttaagatcatccatttaaagcaaaagactttttagctaaaatttagttagctgacctttagctagctaaaaaagagacaaagtttagatgggtggatccaaacagatccttatatatagtgcatgctcactggtgtccaatatatccatatataacatcaagagtcactggaaatgggatattgatgtttccccacactcgaccatcctctgtttattcatgaacacgcattgaccacccatcttcaaacaatctaatcacatttgtctgttttgttcaaattagaagaataacttacttttgttttctttatgccaatcactaagaatattaatcaatctcgtgtcaacagatccgccattggtttcggtcatcatcaagtgctgt

SEQ ID NO: 113180 - DNA, 864 bp, Setaria italica
  Intron number 1 from transcript Si006131m (locus Si006131m .g) derived from phytozome v7.0 (chr-ID scaffold_4; pos 15 504583 to 15505446)
cggcgccgaagccaccgccctcgccgcagccgctggttagtgctgcttgctcacgtttctttgattccttgttcttgcaatacattgatgtcaagtggaatgattgtattagccattgggtaactattccactgatcaaaataaggatgatttttttatagagttcctattgctaaccttgatctaatttatatgccaatgccactatgccagtataaaatgattggcaatggaaatctacttgagattttaattagtatgcttgcctgctcaaaatgcagcatgtgcagtcagttcatttcgatgtatgcaaaggccagtacgatatagtattgtgttgtttgaagtaccggatccggtgtggtggggataagtctgaaagagactttgcttgcttgtttttcttggattgctcattcctgagctattgatgacaggaaaaatattagattttatggtgcagttcagaatttgtgattttggggttcttcaaataggattagcaatttggcactactccactgataataattgtaaggatacttagttactttaagttcaaattgttagacgttcatttcatgtatgtaccaatgccagtctaagattatttggagtaagatctgatttctaaatttttgacactaagaaaaaaatctgaatcatgtgtgcttggctattgaaatgcattgtgcataatcagttcatctagctatatgcaaaatgccagtaaaaggtaatgtctgcttcagctgtttcatcgagcacaatgtgcaaatttttgaatgctcactttgctttattgcatgtaaagaagatgtgttaacatatatactgatgaatatgcaggatttggtccaaagg

SEQ ID NO: 113181 - DNA, 790 bp, Setaria italica
  Intron number 1 from transcript Si028181m (locus Si028181m .g) derived from phytozome v7.0 (chr-ID scaffold_8; pos 47 63360 to 4764149 reverse strand)
cgcgccttcacctcgcgccctaatccggtgattgtccaaatccgagcttttattgcatcgtccggtgggaaagttatgatcttggcattcgatttttctggagcggaattgagttcttgcccgccaaagttcctggtttcgtcttggaaaggggaaattttgcttccttgcttggttcgatgtgtccatatagggattgcaaatttgcactttgggcgctcaatttgttcgtgtagactaggtttattgctggtatagtattaaaagaaggattagtcataatctgtgttcttcacttgtcttttcaaaaatttcaaccatttccttttttgcttaaaaaagacgtgaattgatgttttgcatgcattgaacaaattttggcactaagatcgatccgatgctcgtcgtttgattgagaagggactatgtgatgcatgtactgtatagtcatgcatatgctagtatttgtagtagcagcctggtggttgatgttttataccaatgacgcaatggttaatttgaatttattaacttttacaaggcccaaagaaattctttgtgattttgactcagttgaacatgcattgctgatcatcttgtcttgatcattactaccatactaataacgtcagtaacctttggagttaagccttcgatcataattattactaccaaccttttcttctgatgctacgaatttagaaccaatttctcacatgtatgtgataatttcctcttgtccttgcatttcacagttactgacatctcattacaaaaagattggaaaacg

SEQ ID NO: 113182 - DNA, 983 bp, Setaria italica
  Intron number 1 from transcript Si025962m (locus Si025962m .g) derived from phytozome v7.0 (chr-ID scaffold_8; pos 37 579283 to 37580265)
ccggggttcgcggggagcagcccgcccaggagcaggtgagcaagctcgggcctttcttcatccggatctgcatttgccattgctgatacatcatttggatcggagcctctgatgaacttaagtttgattgatagtgaaatgtgcaagctagatccgaatcctggaatgtctcgagcaaccatttacaatgcgagagcttgcgctgtgtcggttattaaatggtgcagctttagctgtatttcttctttagatgctttgtgctggtgtcacagtatgtgtcacagctttcagtatgaattggatcggttgaggcgaatattacaccatagtgagtctgtcattaagaggagtctctgggagctcagagaaggaagttcagagatcagtgctcacttacaagcaatatgaaataatgtagctgagagactctcgtagtctcattttacacataatccgacttagtagtgtgtttcattacagttttgctccagttgcggctgatgtgtctgtagtccattttgaaccttttctaatgtgctgtaccataatgtctgggtagttttagattcaatattgattatgcttaactcagattgcacatgaaagttctttatttccatatctatggatcagagaatttgaggaggtttccttgctaagtaactgctgaaatacctgaatggtaaaacaggtttacagtcttcatcatagcttgttcaatagaaatgttgtcttttatttgttacatatcattcaagtataagcccacattctctgtggtacctctgaccttgcgtttttggcccttgaactctctcttgtgtgtatgcacatctattgcagtattattgaatgaataaagtgtgaaataagtgatagctttcctctctcttaaagttagcaccaataacctggtaatttcttctaaaccaatgtgtactcctgccattttctcatgctcactgtacttttcaggaaggcta

SEQ ID NO: 113183 - DNA, 482 bp, Setaria italica
  Intron number 2 from transcript Si033386m (locus Si033386m .g) derived from phytozome v7.0 (chr-ID scaffold_2; pos 27 308031 to 27308512)
ttggactgagaaattcgttaaggtagattatggctgttctctcatgtatgatgtttgtgcctatgtttgcaaatatataacttatttcagttggtgccgtgaagaaaaaaaaaatgaattaggggtgctttagttcagtttgcaaatttagaacttagttctgttgcttgcaagtttatatcctagtccagttgtttgcaaatttataaattagttctgttgcttgcaattttatatcctattccagttgtttgcaaatttaaaaattaagttcagttggcgcagttgagaaaaaaaatcagaacttatttgagatgttataatcaaagcttctattttttatgctttattttcctgcattaaatggaactaccatttgttgtgctctgtctgtttgatgacctgcagcttgtcacagagatttcaaacagtgactcctttgtcgttacctattttccaggatatatccacagggcagtttc

SEQ ID NO: 113184 - DNA, 529 bp, Setaria italica
  Intron number 2 from transcript Si031845m (locus Si031845m .g) derived from phytozome v7.0 (chr-ID scaffold_2; pos 10 248517 to 10249045 reverse strand)
gcaggtcttgtctgcatctttacagcataatgactctctcctaacatcctaggacttgggagtttatcttgttagtgtatagtataatgttggttacatgttttcttgcatctctctttctcctttactctatgatagaaacacttttattgcttgttccttttcaagtggtccttcagggtttagaatttcacacttagttgtttttgcataagcagaacagtagcactgagcataatgcaaatcatgtgttttgtaatcagttcaacttatatagttattatgtgttgtacatgtgtgctaatgacctcatgacctgatagatgctgagaacctttgttagatgaaacctttgcttttagaaactagagtttttgctatatgactatacactgcctgctattgaatgtaagctactgcaaataattacagcatcttataactcaatttgatacagataaattgtgatgttttcaggttcctaactaaaagagaaacagcaagaacatgaagagctagtgtcttggac

SEQ ID NO: 113185 - DNA, 816 bp, Setaria italica
  Intron number 1 from transcript Si031845m (locus Si031845m .g) derived from phytozome v7.0 (chr-ID scaffold_2; pos 10 249161 to 10249976 reverse strand)
tagcagccaacaagctcccgccgcttctccattaggtactgaatttatttccttcttccttggtctggcacattaagcctgtgctccatgtttctcattcagctgaataatcaatttttgctcgatgtgtgatctgagtattttctccattgatggggaggggactgtggtgtgtactattaaactaacacttgcttggcaaccttaccgcagtgtgcctttcctattcgacgttttgcgaggctgagtatggttgattaatttagagttccattttccttcaagtgaaggaaacacaatcttagtggtatccatgatttgctttgcattacagctaactggagatgtcaaatatgccagttaatctgctgacattttttggcttaagagtttgatcttttactcgtccttcctctcttctgtcttttaattttcagcttatagaatggacaactgtttactagtctgtcatgttctgcaactgctgttatatagtcaacatgagccaaatatgcaggaattcttgtggtttcaacaaaatcagaagacacgttgcttgcaccattacagtcctaccactggatgtagatcagtagtgcattttttgttgtgtgcgtgtcagtggggttaccggtccatgtttgaatcaaaattcagaccatatatctgaacttctactaggaatagacacccctgaatattttgtagaatatcgtgctagtatctttctgtgtgctacttttctggatcacttatattgacgataacaaaaattttgcttgtggttgctggtcctgggacaggttgtattgaaac

SEQ ID NO: 113186 - DNA, 956 bp, Setaria italica
  Intron number 5 from transcript Si028628m (locus Si028628m .g) derived from phytozome v7.0 (chr-ID scaffold_8; pos 38 055923 to 38056878)
ccccaagctatttgcagacaaaacggtatgacacttctgttcattggatggtgatcctattttgattcctacaagtgatgggttaagtgggtagcttgttctgtgtttgaaacttttttaagttggtagtatttcattaattggaaccttttctacttcacattgttaagagtttacaatctgtacacagctaccgcacgtgtaagttttagaaatctaaacttttaattggaatataaattagaatgtaattttgcgaagccgctacctaaaaaatgtttttttatttttcaccagaaatgtatgaaaccaactctaaataaaataaaattatatagtttaaaaaattatatacacatatatatagttaatttaatcatactattcttcaaaacttggggagtatataatgagacatattctttaccgtaaaataaaatagaaaataactttcttaattcctttaaattaatcttattgagaaagaatctcgctccaacttgattaggcacattaccggacattttgactatattaatactactattttagtttgatgctcttagtttttgtttctttggatgaaagtttaacacttttgtagggcaagctatggttggcaatgaaaatcaagaagaaaatagcccaatgcctaacctgcaacacccgtgtcggataaattcaactcaaactgagggaaacagtaaggcttgaggttcttttttttttttgctcttttttaagagaatgtaaggagatgcatgttccacctacatatttatacatcaaaataagggaatgttaacaattagtatattgcttgagccctagtacgaaaggtgcatgcccgcacccttaggccttagcagcctgcctgtaaaccagcctcctccttttctgcttgtatactgaatggttcaaatcattatgtttcctcctcattttcaggtttggat

SEQ ID NO: 113187 - DNA, 614 bp, Setaria italica
  Intron number 7 from transcript Si028628m (locus Si028628m .g) derived from phytozome v7.0 (chr-ID scaffold_8; pos 38 057182 to 38057795)
ccccaagctatttgcagacaaagcggtatgacacttctgttcattggatggtgatcctgttttgattcctacaagtgatgggttaagtgggtagcttgttctgtgtttgaaacttttttaagttggtagtatttcattaattggaaccttttctacttcacattgttaagagtttacaatctgtacacagctactgcacgtgtaagttttagaaatctagacttttaataggaatataaattagaatgtaattttgtgaagccgctacctaagaaaagttttttttattttccaccataaatgtatgaaaccaactctaaataaaataaaattatattgttttaaaaattatatacacatatatatatttaacttaatcatactattcttcaaaacttggggtagtatataatgagacatattctttagcataaaataaaatagaaaataactttcttaattcctttaaattaatcttattgagaaagaatcttgctccaacttgattaggcacattaccaggcattttgactatattaatactactattttagtttgatgttcttagtttttgtttctttggatgaaagtttcacacttttgtagggcaagct

SEQ ID NO: 113188 - DNA, 857 bp, Setaria italica
  Intron number 3 from transcript Si007563m (locus Si007563m .g) derived from phytozome v7.0 (chr-ID scaffold_4; pos 58 9692 to 590548)
acgtgatttgtgctgttgctactgcccttattcaggtaagttttaacatttctgtgtttgctgtgaatatcacttcaaacagatttggaggctcaaatactaacctcaacagtttctagtgtgtaccctagtatctaccaatgtttcttgttgccgattttcacatctgcatagtgtagtaatctagtgtctggtgatgtttgaaaattttgcctgaccaacttatagtgtataccatcttgtacctagagatatttcctgttgcggatttttctatctggatagtgagatgtttcaaaaaattacctgatcaactaatagcgtatactatcttacatctggatatatttcctcttaggtgtggattttaactaaatatatatggaatttgttgaaaatttggcaagtcacattacctagtcattttgtcataatataacaatgggtaggcaggcaccagaaaaaaagactgaatttgctactttttaaagactaataccgtgtaattcttttattacaacaagctatcgacttgcaaattttttgctctgcctatcggctggccactggattgtgtgggtgtagcgtagcagtgtacttgttgctgactgtatgttttttcaatctttgattgggtagatgaacttagtagctgtcatttttaagaaccaagttctgagtgcaagttttcatgtgcacttgctttttaccaactgaacattgttattcagtttgcagctcttctcttcagtcgttttttttgcaacatagctgggaattgcccttggcatgctaatacaaatgcgttgagagacttatgattatgctgttttgtgcggctaaaacaggttgcttac

SEQ ID NO: 113189 - DNA, 877 bp, Setaria italica
  Intron number 3 from transcript Si007460m (locus Si007460m .g) derived from phytozome v7.0 (chr-ID scaffold_4; pos 55 91124 to 5592000)
taacttcgatctccattgcttccaatctctcacaggtatgcaagctgcttgatagttgatagatctggcccacatcttatagttctgaactaaagtatatttggggcactttgggtacacttgcatcaattcaaggtttacaagctctgacttaagtatgccgtaggtcccttaactttcataaatttacctttttcttgttcatgccaactggctcatctcatgatattgcatatagcaccaaagcacatggttgtgtgccagaccatctgctatgtagccttttcatgtgtaggaatacctacattaatattactttgcccctgcagaattatggcactaggtagctgcatttgttaaactctaggatgggaagatttcatagcatgtcagatatttttctctgggagtaatgagggtgtgaattcatggctgaaaatgaagatttttaaacttgttatcagtttgttacttcgtttgccaaacaattttttctggaaccatgtataatttcatttgggtcattgtgcagctaagataactgtcttgtgcggttcgttcaaaaaaaaagggcagaccatctttagggttaagttatgctgttatctagttgtttgagatgtgatctatataatgagctagtagtaagttgcccaaattggcctgaatgcctgattcacagataccatgatccacctgttctcctatgacctatggtgtctttagactcttggatgtaccttttgatgttatcagacccaactgcactcgtatgtttttgattctttggctcgtttttttgtcacatttagcacctctgctgtatctgctctgctctgatttctccacttgattcaggtacaaaatttttcgttgt

SEQ ID NO: 113190 - DNA, 871 bp, Setaria italica
  Intron number 1 from transcript Si006288m (locus Si006288m .g) derived from phytozome v7.0 (chr-ID scaffold_4; pos 33 862668 to 33863538)
tcgccggcgagcgcttcctccactacctcggaaaggtacgtgcgtgctctgaaactcgaggaaatgtattgctagaatagaatggccgaatttttggactacacttgacgggaaatgtattgctcctttctgccatcgattcacaagctcgcgacgcctatgcctggcctgcagtgagcttgctggtttggtgagcttgagatgccatgggcgttgcatttgagttggtactcctcatctgcctttgacagtttgacctgttttagacgggtttgaaattgggcagaatgtgggattcagcctcacccgtgaggctgctttagatctaaggttttcccctgtttctaaagggagtttgaaacctagacaactttgcacgataggctacatcacatatctctatagtatctttgatccgaattacgtagtaggagttcaaatttgtccattcacccatcacactgatttcattttggcaagacaatgtcattaccttataattgtatttgtctccctaattatcaactgactcaaatatccagtcacttttctttttgtcttagtaaattattcttcattagatggaaagttatgacaattacatcttccatagttgagtgcctggccgctgtttcaggttggatgacttaagagttaagatatatatatttttaaatccatttaaatgacaataatggcagcgatcaactttgatctctgcacatttagaaagagtagtagtatataagtatatcaatcatgtttcgactataatttgaatattgaacaaatttgtttgattccctccttatgtcttttcccttttactcgtgcagtatttgaaacacaaggagcagaaagcactgttttc

SEQ ID NO: 113191 - DNA, 1007 bp, Setaria italica
  Intron number 2 from transcript Si026936m (locus Si026936m .g) derived from phytozome v7.0 (chr-ID scaffold_8; pos 41 52242 to 4153248 reverse strand)
gccattggcatcgttggtgacgctggagtcaggtaaaaagatctcactacttcctttatgtatgtagcaaccatcatagatcaatttctcttaacctgatatatttagctactgtctgctattaatgccgattgagtatcacgtagatcctgtccataatgtaattattgtgtctaacggatgctgtaatgttaactgtatcaataatgtgaccccataatgtaaaggcagttattagcattgaagttgttctttgttagcctaatgtcttttgtccttttgattgatggattcgcacataagttttcttcttgttcatcatacatttgaaaaatgaaatgtcccagctgataccacttttacaattaacgaatattcttctgattttgattatttcctgtcattgtaatgatgccatgcatatatactctacatcatgctcctgttttgttttgataccttacttttcaaaacagtttctttaactgaaaaaatagtgttaagaagatatgctactggttcctctgtatcttaactgttgtacatggatcattgttacatatgttcaaaagtttcgagtccactatcatattatggtacttcactgaagtatgatcaacctgagttctacacttacatgaagcttcagtgcatgtttatacacctagtattcctgctaccagtgcaagttcctttttttgtgaatctggatgagactgataacttatttttttgggataatttcgagacaagttattatacaattattatgtgtttaggttctaggtaaattagttcacttagaatgtcttaaccagttcattcaattattcctatttggttgatacagttcatttggtagctaatgtagttttcaactggatgttagctgatgtttctccttgcaatgaaggttttatgtgcttatttggaaattgaagtgtaacttctcttctatgtcactgttttcagggcaaacgcacaacagccgaagctatttgtgggca

SEQ ID NO: 113192 - DNA, 1007 bp, Setaria italica
  Intron number 3 from transcript Si027252m (locus Si027252m .g) derived from phytozome v7.0 (chr-ID scaffold_8; pos 25 116 to 26122)
tcttgtggccattggcttcctggatcctagcaactgtaagctctcatcctttcctcagagttgcatgctctttattgttgtaaatttgtgaaatttctggcaaagctaaaaagtaagtgcaaaaggaaaagtaaagaaaaagatattgttgtctgaaaaattctagttgaggttccattcagtccattttagaatataaagtttaagtttgatagatcactcatcaactaacctgtcaacattcagattttttttactgacttcgtagctaaattaatgtacttcagttcttgctgaaagtgcattgtttgttttcaatgctgcgccccagaccttaactgaccaacatggagcagagtagcaaacaagttatttttgatgtatctgctcatattgcaagaatgctagtgcctttggaatgtactagcctaggggatgtagttgatatactgcatcatttgctattttttttcctgttatcctacttatgacagtgcaaatctagctgtaagcctgtaacacgtgcctaatccagtttaagaaagcaaattgatgtgctgtaaatctagctgtaagcctgtaatctagttgatgtgctgttttcgcttcttttttctcaaattcttgcctatcagtatatatatctcaaattacctggtgtcgctgtctcatacttggacagcatcgatgtatatctgttcaattaattctggataaatttttgaaagactatttgaaagactatttgttcaattaattcagtatatatatctgttcaattatatctgttcaattaattcagtatatatatctcaattaattcagtattctgttcaattatatctgttcaattaattcagtatatatatctcatacctggtgtcgctgtctcaaatttttgaaagactatttgcacccatgttttcatgtccagcgacttgtggatcacttgaagaaggtatgagacatgtgcattggcatttggcaggtgcaggagcaaagtgaga

SEQ ID NO: 113193 - DNA, 764 bp, Setaria italica
  Intron number 1 from transcript Si032674m (locus Si032674m .g) derived from phytozome v7.0 (chr-ID scaffold_2; pos 32 412546 to 32413309 reverse strand)
gtcaggtacaaattttagtttggtaacaaatttagaagtcacaatcaaagtaatacaaaattataaaatatatattacagtttacatggcagtgtatggatgtgtgtattacagggaacaatacaaacatacatatatatatatattctagctggaaaatatggaattgaggtatatatgaaatattaaactgtcatgaatttaaacctaaactatgtacttgacaaattttttgtgtgaagcaggacatacatttgcaaggatttgaacaaccaaaactacttgaaatggaacccaaattgatgatgatgatgtaaaataaaatttcattgcagtaaataatcttgtttacagtaaaaaagactgaagaattagaaaaactaaccatcaatagcaaatattattaaagatggtgagcagagcatcagaagaagtggcaacacctatgagcatggcagaaacaaattttgaggtacacaaagtaataatttgatatccagaaaataaaaaaatatgcatgcataattaagacaaaataattaaaaccatactttacaggtagaagaaggagaagaaacgaaagcacagaatgacaataattactaggatgatgatggaatatgtcaaatgacattttcagtgcattacaattagaggaggtaagacaagaaaaatttaataagataaaataataagacaatagatgggattgaataaaatgataaacttacaatattttactttgcagattccaaatccgaaag

SEQ ID NO: 113194 - DNA, 955 bp, Setaria italica
  Intron number 2 from transcript Si006910m (locus Si006912m .g) derived from phytozome v7.0 (chr-ID scaffold_4; pos 46 21738 to 4622692 reverse strand)
ccgcgcggccgtacgagcccgaggtcatcgtcaaggtatacacattcatacatcctaggagcatcggagactgagcttaattcacttcttgagctgttgagcatatggaatacttgttcctctttgttggtttctgattcagccaatatctttttggattggaaggtcggtaattaaccccctaatcgagcaattgacgatcaattactaaaattgactcatgcctcactgttcctgcggtaggcgagaagggttacatcatcgaattggttggtggttcagttagacagtgatgtgttggaacttaatgaggaatgagtgaggaatgcagattgggatttaacagtagcaacttggtttgttgctcatgtgcgcgcgtgtggttataagtaaatgggtgaattggggggggggggggtgctaattttacggtagccagtaagctttggttagagttgattggttcaagacttccaagttacagaaggtcaattgatggttcttaacaaccaggttaaatttgtgcttacaatttccagttcttctgaaacggaaaacaatatttgttttatttatgtagaattagaaatgagaatctgatactggtcttaaataaaggactgcagtgaagactgaacaaaagtcaaaacagcagtagtatatttatttcattgcagattgataatgagttctgatggggatgttgctggctggcactgcatttagcatgctgacttttttgcgctacaactcctaatcatcacgtgatttatcgcgaaacaaactcatttcaataatgaagttcgttttttctttatggtctgcatttatggtctgggctacttgtcatggtaaaagtaaaatttacttctccgtagatctgagtctgctggttgcctcaaatctgtcctaaaccatgaacttctttcacttttgttttgcgcagagcttggtg

SEQ ID NO: 113195 - DNA, 881 bp, Setaria italica
  Intron number 1 from transcript Si026404m (locus Si026404m .g) derived from phytozome v7.0 (chr-ID scaffold_8; pos 84 14346 to 8415226 reverse strand)
cttctccccgtggctgcttcctcctccttatcaaggtccgtttattttttcccctccttcggcctggggtgcgagagaatctcttttgccgcggggcacattttggggctcataagagggttcagggttttgaacggggagcgatttcgtcgcagtgagcgccgcccagattgcctggggtagtttagagagtttctggattgcggtacactgaataaaacagcattatgaatcaatggggatacggtcttttatctacttcaattcagtagagacataaggttgggctctaattttccctgaactgtactgaatactgatattcgaatgacaaatgtatgtggatgcgaatatgtaatgtacgaatccatatgatagcttgtgtggttggatcatgaagatagtggcacatttgcaactatcatctgcattttcctgcctgtagaatatttaatttcagtcagccagttggggatataccttcttaatctgttctactccctccgtcccaaattaccattcgttttggcttttctacatattatatatctaggtgcatatcaaaagctatttacttagaaaagccaaaacgaatagtaatttgggacggagggagtagaattataatacctcttcgttcatgaacgtattgtgattgttgcattgatgatttatgtgatggtcaagagtaggatagggaatgcttacatttagtagctttaagatgtcgtaagtaactaaaagaagagaagtggattttcccccttttacttgaaccaatcttcttcttgaataacatacattttttgatgctgaagatcttactgtgttgaaatgtgtctgtagggttcccaatactgaattcctttgcatctgcatcg

SEQ ID NO: 113196 - DNA, 796 bp, Setaria italica
  Intron number 1 from transcript Si005777m (locus Si005777m .g) derived from phytozome v7.0 (chr-ID scaffold_4; pos 13 220697 to 13221492)
acatctggtacttgatttacctttctttattcagacgtacttgtatatctgtaagtttcaaaattcataatcgacaattatctcataaatttctatattttgagataaattaaaatcactacaactggaatattgtttgaaagtacataggaaatgtaagagaaattgttagcaaaattttagacctctccaagttaaattatgcttacatttgaaaggaatgaagtgcttgccatgttgtttctaggtgtttttaagttccttgtttggcatgagcagttttttaatctaattttgagttgctttgcaattccatagtgattgaagtatatatactgtcatctttgtatttgtaaatcgatgtctatggtatcaaccagagtaaaattttatcaaatttgaaatatagagacatgtgaaaaatgacggtttatatgttttagagaaaattcaaacacctgtattgggctttatagaaacttttggcatacactatattgaaatatctattgtattcttttaatccaaaattttgtttaaatgtggcctttggtgctaccggtatactagtgaactcgtggtttacaagtacttatatgctaggaccttttgttttatgttcaaacataggaatactctttgacattgccagcatatttttcagaaccctgaaaacatattgatcgaccttatatcttgttgtcggatatattagaacagaagaaagtatattgaaaatgcatgggaagcatatttattcatcgtgtttggttgtcacttgtcaggttcatcagcg

SEQ ID NO: 113197 - DNA, 861 bp, Setaria italica
  Intron number 1 from transcript Si007072m (locus Si007072m .g) derived from phytozome v7.0 (chr-ID scaffold_4; pos 32 063093 to 32063953)
gatccccaggtccgcctcctcgcgccttccaagcttcatcctttcctttccccatgcgtttttttaggtcgtagatgacgagatgcggtttaggccccatgatctagtgttgaccatttcggttccgttgctggaaagttgtgatccccagcgattttatcttgtgctgatgcgtatttgggtgcggaatcgggaaggtcatggcggctggaagctgaaatgaagctccttttctgggattaatatcttttactacttgcaaactttgatatgatatatgaaactacgagatggtagacggataagtctctttcccgtttcatcgttgatttaatagtttacatgcttgctcagatgcttgtgatacttcgaagatagaaatagaattctagaatggattaccgccgctgcatttgatggctttgggacatgatggcactgaaaattgtttgttaatgtgttttcatgaactgatatcctgcgtatgctttcttcacagtgctaatagctaagagaaggtttgtgaacatatggattagctgcatttaattcgtctcctcacttttgagaacttttgagcattatacgcatcatgtattgtagccgctccaagcatgtcatgtccccagcacacaaatttctttaataatctataaggttttcttacaaaggtgctaatttaacctccagctggctcttgatggttggaattgcttttgtgtagtatgagctaggtcgaaatacagatattaactttccctgctaatatttatatagatgttatacatatgtgcaacaaagctgacaatggttgtttgaaacaattgtagttgctggaaaaagctctggaagcatctggag

SEQ ID NO: 113198 - DNA, 771 bp, Setaria italica
  Intron number 1 from transcript Si026739m (locus Si026739m .g) derived from phytozome v7.0 (chr-ID scaffold_8; pos 89 00061 to 8900831)
acaccgagggcctcctcaacgccaagctcacgcaggtgcgtttcgggcgctcgtagcctgctcggcggaatgtcagtactcactgttgggttgggatttgaaatgttaatagggatcaagtaccaaacccgtgaaaattctctagtttcaaagaagttacaaattattccctaattataaacttcactagttggttctagagtttcaaaaaaaagataaaaagatacttctaaattgtgtgctttgcgtgacgaactatcagctttatgcctgttttgtctgaccaaaaatgcatcattaagtggttttaggaacctgatgtctgacaaaatgtatctacatgcattcggatccgtacccactccatgaactaatgaaactactttcatttaagattgatgaacacaaatgtgacacttggtttcctataggctgcaagtgctcaggaaagctttattttattagtttcagaacctcctttatcttgcctatagcgctgtatgaaacgtttgaggaacccttctgttcagccatatcaagccttttaacttgtaaactctgttttcaaagattcttcaaggtttcattcacacattctgtctaatccacagtccacatcgctgtctatgatgtgtatgctagtctttttttttctctttgactttgacacacaatacatttttataatatcttacttgtggacaacttatatgatataattccatgttctttccaaaagatgtaaccttgtttatttttttgttttttagg

SEQ ID NO: 113199 - DNA, 1007 bp, Setaria italica
  Intron number 2 from transcript Si029449m (locus Si029449m .g) derived from phytozome v7.0 (chr-ID scaffold_2; pos 47 178759 to 47179765 reverse strand)
cggcgtaccagcccatcccgcaggccccacagcaggtaggaagaaatgtccaagcccaattgcttagattcttatttgtaaaataaaacctcgatcgaattgattaagaatttcggtttaaatagtgggattggctcggctcttttaggacatgtgggcgtgcttgattgcgatccgactgtatcaatttaggctggttggtaggcgaggagggtagtacaataattttgtttggtaccagcagggttagtgtcctgtacttttgaccttttggagttcatgcttgcttgctgaattattctaccacaacactacattgtcagaattacagaattattctatcactatactacattgacagtacggatttgaaagtactccaaaagaaatagctcctggagggttaaaagaatagtttgatgctgatagtgtggtttggattagaacgggcgaaagagtagtttaattgcaactttgcaagttgtgtcgttgatatttgcagatatgttagataccaaaaggacaaaaaagggtaatctttaggtgcctgttttaggcttaggttcttcaattatggagcttccacatagcacacggcaacaagccaataatgcatgatggaatatccaacattacaagctaattgtgttttcttttggcgcagcggcaaaagcaatttaatactcaaagtgctcaacctcccacaatagaaaaggagcatagtggtagtctttgacacgatttattaattaatgtcacctaacttctagctttggttaactagctatatggatgattcatcagtttctttggcactaatatttcctttaagatatgatcaagattgtaccactgcttggatcgaatctctgaatctgaatgtgatgtcgtggtaatctaagctttaagttgacaatttgtagcggctaatgacctgctgtgacaagctgagtaactgatttgtcgttgcagggtccgcttccgtctctcaactcgcacaagtacac

SEQ ID NO: 113200 - DNA, 868 bp, Setaria italica
  Intron number 1 from transcript Si029138m (locus Si029138m .g) derived from phytozome v7.0 (chr-ID scaffold_2; pos 42 472642 to 42473509 reverse strand)
ttgtgccggccactgctggaggtcactaccaaatccttactttcagatcccgtttgaagcaccagctaaattttatcacagaacccaccagctaaattttagctcgctatggattcaaataggatccagcaaacatagctaaactggcaaaagatcaaattgtccctcccctttctcagaaaaagttttaaagtgggagggaaggatagaataggaaaaaaatctcttcaactagctagtggatctaaatacccataactaaactttattagttgggtggatccaaacgtgatcttatatatctacttggttaatttgtttataaaaaagtagatttatacacataaaaaaagagaggagaaagtgcctgtacgggagtgagtgctttattcctcttggtttttcgtaaaaaagaagaaacaaactcacaaaagaaaaacaaaatagtaacaaatctcactttatagagagataaatctacctcaagcacacgtaagttgttaccagccagttcaaacaaaaagtttagactaatagggaaagatgaacaattcatttgtatttcgacaaatcctgctgtccggcgaatgttttcaacaccgcttgtaattaaaaaatcccttaaattgggcaaattgcactactgtgtgcctactactgtactacacaccactgcttcatctgggaatttctgaggtaaacaattattcactgagcaacatcatcacaatcatgaacgcccccccccccccccaaccccccaaaaaaaaaaattgacacatgtagtgccggaggaataacttgaactgtttttttttttgacaaaatcgcaggtaaaaacaattcagctggcaaacttcttggaatt

SEQ ID NO: 113201 - DNA, 698 bp, Setaria italica
  Intron number 2 from transcript Si033345m (locus Si033345m .g) derived from phytozome v7.0 (chr-ID scaffold_2; pos 12 034877 to 12035574)
catctgtcttgataccatttttcatctgcgcaacagtaagtaacatgcaccacttcctagagtagaacttgaatactttttgtgagtttgactattgagacgttcgagaaaaacttgctggtttactatgctgacaattcacgaccagatactacatgaaaattcagttaatcttattagtcatgtcactcatattgaataatttttattatcaaccgtcatcttcatcagcaaaaaaatgctattactttttttctggcgtggtgcaggctacgcaagttaacctatttgtaatgctacaatcattctagttgattgcttttattgagatcccatgaaaaatatggtgatagctttagacttgaaatttatagattcaaactgtgttaagattaactatttgctagttagtattgaattacttttttgtccttaacttgatcatgtaaaattgcacatccatgactcgtgtaataaatgatagtgtgtcttctggttcattatgtactatttgcttctgatttactcaacattgtgctttatatcaggttataaaatggttaataagtatgcttacattatgtaacttgcaaagcgtgccttgtattttctccaaatgcaagcaacattctgttctagaaattaaaaaaacacttaatgcaggttggcacaacatcttcatcagctgtggacccctt

SEQ ID NO: 113202 - DNA, 932 bp, Setaria italica
  Intron number 2 from transcript Si030883m (locus Si030883m .g) derived from phytozome v7.0 (chr-ID scaffold_2; pos 46 836066 to 46836997 reverse strand)
cctccgggccgcttccagttagtacttcttgctcgtcctacacttttttcttgctaagtaatcttttgtgctctggaaaatgggtggtgaaggtgtactactggtcaattggtagtttaatatattgctgaaaggatgactgttagtgattactagatcatctagggaaatctacttcggccttgaactgtggagctagtgattgctggataaccatgcttacggtttggtatcggcttctgcaaaactactattctgtttggtcctgcagttttgggggatatgtccttgttatttcattaactgaatcagttgttagtccattgcacgcacatggttatgtagcacgagcatgtgtcatgcctacttagtttgttttacttaatgtatgacaaataaattccacaactatatgaaaaaaacttagtcagtatgcagtgaaaatctgggataaatggttgaacacattcagcttggaaatattgttgtgacaggtgtttttttcattttcctatttgggctttcgtagcagcaacgttgggtgttcattacacaatcatatgatataggaccacttttgcctaccttatatgagaatccttcctgatattctagttatctagtacgtgacatgaggacaccaaaaggctcacattcctcatgatccaacaaatgaaggatacaattgtgaattcctgtcactaggtgactgctatgtcttatttgatcccttcatgccttctttatagacagacgtcaagataaggaaaaatcatggcatgctatacccgagttccattccacctgttccattcaaaaacaccacattagttgtgttggtagattcttcacagaacatgatgccagttattgttgattccttgccatggaagcgccacttacatacgttctaataattggtgcagctgatt

SEQ ID NO: 113203 - DNA, 722 bp, Setaria italica
  Intron number 2 from transcript Si030503m (locus Si030503m .g) derived from phytozome v7.0 (chr-ID scaffold_2; pos 37 165365 to 37166086)
ccgaggccatcgagctcaaccccggcaactatactgtgagaattgcgctcttctctctttttctctactttattttcatgaggttattgaaaattaaagtttctatggttaggtgagaattttttaagggaaagaataattttctagtatagaggttgagccatttagttatagttttgacttgaaaccatgtagtactgtggtcatgagcttcactggctacaatggataaaatttctgaaccattactattatggtccagttatgagcatgcaacaatgctacagaaggtagaaacaagcagtgtggtagagccagttttagagagttggaatttccatgtaaactggacaaataggtacctgtttgcagctttagatagtctgtactctgatattgacaccatctatcattcatgcagcatgctttttcatcgtctatggtatctgtagaaggccatagcatgcttcctggccatacttttctccctgtgttatgtttcttaatgcagtatgccatgttattcttgaacagcaatggtgttgtttactatcacagaattgttgtttgttctattgctagtacaaaccctgctttttaagtattgtcatgtattccattttgatatcaatcaacccttttggtagttacctttttgacttacagacttaattgtttacttgataggtctggcatttcaggcgccttattctggaagcatt

SEQ ID NO: 113204 - DNA, 968 bp, Setaria italica
  Intron number 1 from transcript Si030069m (locus Si030069m .g) derived from phytozome v7.0 (chr-ID scaffold_2; pos 38 303019 to 38303986)
ccgcgcagaggaccccgacctcgtcatcttcaccggtgggtacccgccgctcgcaagtcgcaacctcccctgtcccttgttattcctagccaattagttaatcgatcgatttgacctttcttcatctcccttttcatctgaatccgtatcgctgatgctggtagttaggttgccgctgtggtttagttgaacggatagaataactggaacgattaaatcagttattgtgtgtgctcgcttgagatgagagagatctttaccgtttattcaagttaattatcctgtggtcgagatcccattctgaaaagaaaacgttaaataagcgtagctccggtgcctttgattagaacaataagcatgtcacgggttccacaagcgacagcacgtggagacagggcaagtagagcttgcattgtgttctacggactggattcaggaactcccaatccaaggggtcccgggtcgcatgccatcccatattcccattgccattgcgcccagttcagtgaggtcccacttggtgattggcccgggatgacgacgttcggcaactaatgcgaatatgcgatgatgaatgcgtccatgatggcgatgagcgccaaacagagctacagcatcagggaacagtacaaatgtagccgcctttgtgattatgtctaggttactgttatgcttcgtcgtgttgtttcatgggcaagtgcttcatctttccaaaagccgcaactgttgcaaacctggggccagactatgctttttctgtggggaaagcaaaaatggctgtgagcttgtggcttttatattgtggtaaaaatatttccctgaacaatgccaaataatgatggtcgtggttcataacttcatataattcatgccaatgattggcactccagtttctcgaggcctacaaatagactgtttttagagtagtattaatttatgacagttttgttgggcaggtgataacatct

SEQ ID NO: 113205 - DNA, 697 bp, Setaria italica
  Intron number 2 from transcript Si029694m (locus Si029694m .g) derived from phytozome v7.0 (chr-ID scaffold_2; pos 39 109021 to 39109717 reverse strand)
tccgcgacaagcaggaggacaccgcgcgcatcagggtgagcactcagcaccagttggttttatttatgtgcattgcagattagttcgtcggagaaacttgggttgctgatgctgtttagacagagtggtccctttatctcggtctgagatccctcgaatcggaagctgcggttgcgcgcgttctccatttctgatctcgcggtatataggcctgtttttatgcggattttcgggtttccagagcacgggggatcctgatgtacgatgacaagaaattccgtacgagttggttccttttggtcagttgagggggtacacgatcagaattggaaaacattaatcctaagagattaactgccttacacagtcagagttggtaagctttgattgtaagagattaaatgctctaaacatgacgtttttttggattaataacatcgagataaggaaaactccttaattatgctttaattttctgaacattgatgccgcagttttgaagtttcccttaaaataagttgtgcaagtaaattaggtatgtaaacctctgcaaattgctttgtttaccctgaggttcttttgactccttcgcccttgtgctgtcacatgttcttcagaaacagggcagaaaattttgatgcggatcgaatttcatacaattattaatccatgtacttggcaattttgcaggttgaac

SEQ ID NO: 113206 - DNA, 950 bp, Setaria italica
  Intron number 2 from transcript Si031396m (locus Si031396m .g) derived from phytozome v7.0 (chr-ID scaffold_2; pos 36 459226 to 36460175 reverse strand)
ccggggacgtgacggagctccagatcggcgtcaaggtacccgctcttattttcccgactaggactattttgcggatgcccgctgcgtgcatgaattgtgatgtttcgtttctcgcccttcttgtcagattgtcggagtagttaggtagtatggatatgttgtttttatcagattggagatccaacttagggggactaggtttgatccctggcttagtgtttggaacagattgacaattgtggaaacgagttctcatgggagggatgtcctgagatattattggcaaaagcaagctgtgcaggggaattgagtcattgtggtgggattgactgggccattgagcagaagataccatggtttggtcggtgtaaatatcatgtgtttttctgaggatgcataaacattgtgatttggagaaacacagagagttctctaagggaacttgaaattttgttgtttttacagagcaacaagttacggtactattctggttcatcattcaacaaatcgatttactaatgcatagttcaagtttccttttgttttgcattttggtaatctattcgatggaaatcataaactgagttggaacttaaccaactggatttcgcaacaaatcaacatgaactgttttaaaaactccttttcaattttgtagcagccaacgtatcaagttttcatacaactgattactccaaattgttatgctgtgagaaatcacttctgcctttccctctcagaaacagaatatcttgttggacatgcagaagtggatttatcagttcttattaaaaccataaaccatgttgtaaagaatagccatggagtgtaaataatagcataggctaccttcattgcacctgttaatttcctcatattcttatatttgtgttatgcctgtattaaaaattgcagttcaagccagagacctgcagcattcaagctcacaa

SEQ ID NO: 113207 - DNA, 326 bp, Setaria italica
  Intron number 3 from transcript Si028478m (locus Si028478m .g) derived from phytozome v7.0 (chr-ID scaffold_8; pos 38 053524 to 38053849)
aggtactttcagcctgcctgttgggcttataatatgcttcagaaactgcatgattttgcagcagtgttcttcaatatataactttttctttttttgattcggaaaacgcgacccggtcgtccctccaaataaattgcactgaaaattcgaactccaaagtcaaatgtgaaattttaaaagaaaaaccagcatcatgtttagattccttttgatcttgtcaccataaatttatctgcatcgaattttagatacccagtatactgcaatgatcgtactacagttaccgttcttttttttgaaggagctgttaacatgctctcagggca

SEQ ID NO: 113208 - DNA, 732 bp, Setaria italica
  Intron number 1 from transcript Si031603m (locus Si031603m .g) derived from phytozome v7.0 (chr-ID scaffold_2; pos 20 63407 to 2064138)
actgccaggctcccgaaggcagttaccttcttccggtaactaatccttttcctaactactgtccagtccctctgttgctctaacagcgcttcttattctagatggatttagtcttgtatagttctagaaaattggttgtacgggtgcagaaaattgtatgctcagcaacagttaatctgaacctcgaaattacacaattgagagaatgcataaacttctcatgtgaaggaaatcccgcttcattattcaaaacttagaaatttcctaatttagctcgaaagcacaagctgcactggacccacttaataggtttcagatttatttctcagctaaaaaaatccaagaatcgacaaaaagaacttgtcagtgtgtttaaatttcaacagtaaataagttagaagatagaactgattattgcacctttctgtgatataaatggaaatgcagatgtctgttttttagtacgtttggagaaatgtgttctgtatctgtacctagcttcacaatactcaacgttagttagaagtcatgaatcatatttctgggggactggttgaatccatttttatgggcgcttagaaactaccctaattgtgtactgtagctgtgggctgggcaatttggaaaacaaatattaatgagaaaattgtgctttatagatcgtgctcatttgacttcagtggttgatgttggattcatcagttctcttctctgagtgcagggtggcagata

SEQ ID NO: 113209 - DNA, 892 bp, Setaria italica
  Intron number 1 from transcript Si029408m (locus Si029408m .g) derived from phytozome v7.0 (chr-ID scaffold_2; pos 44 085644 to 44086535)
gccggcctcagcagcaggtacctcatgttcataagctaatgattacttgcattcgtgtttttctgagaaattcggtgcatgaatggtactttatttcctgataaattcgagtttagtactgtagtacttttgaacctgtttatccaataaggccattgtattgtagagattgaaatttgtcctgccgggattttttgtttgcacgtataggctgtttctgtgacctctcgtttctgaaggacgggcaccatagaaatttagacagcaaaacactcgtcaaatgttatctttaagctttgggtagctttcctgcaatcctctgatcctttgtgagctctgtcttgcgtggaacgtaataagataagcatagattcttaagtatctatacatgttgaaactggagcaatgataggttccagtcaccgaatccagcatgatattgaccctctgttaagtcaaagtagctttgacgttatgcttgtctcgacctattcggagtaggcgagtagcaaagcttgaaaagctttctgctctttggttataaaaaaatttccgagttttctcaagcataattcatatttcagcatttttcactctggaaatttgttttttatctccaaattacctaaaactgagcacttagttatcttgaatttacactacatggtgtgaagtttcagtaaaaaaaatactattatgattttattgctgcttgcagaagaagtttgataaaaaagaaaatgattgaaaaggtttgtcaaaaaaaaatataaaaaatcgttcaaaaagaagattgaaatttgaaaagcaacagcattatctgaaacttggcttagtatgtctgctctgaaacatttttggctcacctgtggcactgctgtttcagtttcag

SEQ ID NO: 113210 - DNA, 928 bp, Setaria italica
  Intron number 1 from transcript Si006545m (locus Si006545m .g) derived from phytozome v7.0 (chr-ID scaffold_4; pos 35 668824 to 35669751)
gcgctcgtgagttccttctcccttcctcctccgtgttttgttcctgctgcttcggtctgctttgtagttcatcacgcatcgcgagtgcctgtggggatctgtgggggcgtatacatagtttggttgggcgatgcacggtgctagtggtgccattcatgttgcttgttactagtagaacggctggctgtgcatttgtaaaaggtgtgatcatggtaattttggcgagggaatttcttcgtggacaaccatttgcgcacatctaagtcaatcatgtatttgagctgttggattcgtttaagagaatattattccaacccaagtgattttaaggctccgatccatagttctatttgggttgtaagttgtaagaaacttgctgtacttgtagcagcgctcttttggtcggtgaaggaaaagcagggtgttttagggtggttattatcatgatgcagcgcagctggcgataagtatagatgaggaattgaagttgggtgatgaagcatgaccatgttgatgtttatttgataatttagccattgtatgggaactcatatctagtactgtttgctattgtagttctctccctgcacatgcctttacttagttgcattgctaaaaccgtatttctttgcttaatctgtatgaaaaaggctcctctatcttgttgggaaacagagatttcattgaatgcttgagactacaaacactcgatctggacacttgtgtgtttgcttatgtatttgtccctactagtgaaacacgtgttttgtggtttatgtatatgttctgtttctttcacttagataagggtctagatgtcattgcttgtctttgtactgtttgattaccatccaaagtatcaacttgtaacacaatatgtctgtattttttgttccataggtattgcattcttttccaggaaacaaga

SEQ ID NO: 113211 - DNA, 862 bp, Setaria italica
  Intron number 2 from transcript Si029461m (locus Si029460m .g) derived from phytozome v7.0 (chr-ID scaffold_2; pos 41 742239 to 41743100 reverse strand)
cactgattttgggctttcggtctttattgaagaaggtaattcgaatatatatgatctatgtacgcttggaatgtgcattatttgcaatagcatttagacatatatttctgaactttgatctgttgaggttcgtggctggttgtagttttcagtgttcatattgctgaacaacccagctaaggctagcattccatatacaatctgatttcaggtcattagaacttatggcactttttcattccacgcaattcaagagcttgtggataattcacacctttttggacatgtcatgggcaacatttttgatactgcaaagtgtaaacataatgtgccatagtacttaagtcacttgaatacctgttgatcccgcctagcttcacagagaaccagccaaaactggtgattgttgccatgttcagtttcaggcatcgaatactatgaagctggttctgtatcagttatgagtgagaaaccactagtaaactagtgatgatagctcaatggtttttaatgtttgactggtttgaagcccagttgctatcacattaagaatcttattgtcctcttagtggcgatccttatatttggggagatgtataaatatttagtgatgttagcaattgcagaatatatgaaaataagaaaattgcttgctgtggggaggtagaccgtattttttcattggacatttccatcagtgatctcagtgtttggatattttttttataattcctaattaagggaacttggtgtaacaaactgcagtaagtttttgatgattaatagcattagaccctaaatttctagctttgggatttctcattatctcttcactggctgccttttgaacataacaggaaag

SEQ ID NO: 113212 - DNA, 830 bp, Setaria italica
  Intron number 1 from transcript Si006087m (locus Si006087m .g) derived from phytozome v7.0 (chr-ID scaffold_4; pos 34 19068 to 3419897 reverse strand)
ccctccaacgtcctctccccatcccacctcgcgcagtaagcgaatcaattcggttcccccttgccacgctgttgtctctcgctttccaatgcttcctcttttggtgttgtggtggtggacgtggtgattgctgctgaggctggtttcgcggcgtcggcgtctgtggcataagcttgatttggtcatgcttgcgcgaaatagtgtcgaatttgaggctttgagggttaatggggagcctagttgttgggagattcagggagctgagggcaaatctgtagtggagtcaccacgaattcttgtggaggctaggtgcactagtgttctaggatagtgtctgtgtctctgtggggtgaaatgttggaaaagtagtggcaaatgcctgtggtgtgttgacttggttaagacttctggcctcaatttgataaagcttgaatttttgtgtgaagttatggattctgggtgtgcttaacttgtagctgctttttgtcgaagcgcatccattttagtggtattcacttgtattttatacaattggggagatgaaagataataggggtgcctgttccctgttgtatagggagaagatgccaaatatcttctaggtttttgttaacaaacgttatgtcctgtttggctcagctagtgcttctgaatgtgcaatgttacctgtagtgttgtgattagtgagtagtcgtgcatttgataggcattttgatctattattcaaaagttttgttgttatattaattttcaaactaatttgaattggtgacttaatagcttctgctgttttttaactttaatcaattttgttcatgtgtctgtcaggt

SEQ ID NO: 113213 - DNA, 759 bp, Setaria italica
  Intron number 1 from transcript Si028560m (locus Si028560m .g) derived from phytozome v7.0 (chr-ID scaffold_8; pos 13 061340 to 13062098)
gatgtaattgtaccttgcactgaagatatttaagaatgataatgcctttgatttctattcgttgtttatttttggtatgtacctaactagttgctgcaccgagcagaacccattgtgccatattactgagccagtcatcaagacggccagtgattggatcagttgatgccgtatgatatttagaaggtgtttgatacgaggtgttatactttaacagtgtcacattagatgtttggaacatgagctaattataaaactaattgcagaaccctttgctaattcacgagatgaatctattaagcctaattaatccattattagcaaatggttactgtagcaccacattgtcaaatcatggactaattaggcttaatagattcgtcttgcgaattacactccatctgattctttagctcttgattgccatcagattctttagctgtaccgaattcattggaaaccccatcagatttgatacacagtaagtttatgatcatcgtggcatgttagtgacgcaaaatcataaaagaatacaacgaatcttttttgtttgaactagcgtgctcattaggtgtatgtgcgcttctttttcctgccttgacagagacaagtggagacttgtatttgactggagttacttgtttttcttcggttttgttgatgctgccacactctttcctgaatcctcttttttttttccactgttcttgctttgaattcgcagtgctataattcagttcatcgtcctcgtcgctagct

SEQ ID NO: 113214 - DNA, 977 bp, Setaria italica
  Intron number 1 from transcript Si031171m (locus Si031171m .g) derived from phytozome v7.0 (chr-ID scaffold_2; pos 43 612311 to 43613287 reverse strand)
gctctcctcgcccccgccatctccggcgaggtacgcgcccgtccccctccgcttttcctacggaaaacctggatcgcccgagccgctcgggcgatctccctcccgcgttttcgccgaagggttcgggatgttgttgtcgttgcggctttgctatcgatcgtgtttgtttcttctcagctggtgtttggggggtagggggacgaatgaacagattggggtaggcgtaggtcgcggctgaatcgtgtttaggctttgaaccgaaaggttgtggaagattgtggcacaaggggatcttctgtttggttttcatcaagctcccgtaacgttgaattgccacaggctgtggtatgggattgcgccaagtatggtttgcctttacctgagaatctagtcgctgtgccccgaacttctactttcgtcactgaagcactgaattgagttgtgtgagaaaggagacagttgttctgtaactgccattgctcctgcagtggatttatccttcctgttagttacaagagcattgcccagtatggccaggacattagtattataggagcattagtgaaaacggctagcacattggaggagtatttctggtattaatccatttgtcagtcatcatgtgagctaattggggatatgaatccacctggccatatacccatattcgccagagctgacagaacggagggacttttgtttttagtgtgttcagatttgctttagatttggtgagctactagagtgtacatggatttaattaaatttgtgtagcaagtttgtaccactaagacctagtcacttgccaagagcatcttgcaccgtgcttttcttcaaacactcttcgtttttcctgtggcctttatctaatggtccaaaatttaatggttgaataaaaagttattgatgctttgtgttaagactatatcggtatatccgcaggtgggtttgcggctcttattggcgccactaagctc

SEQ ID NO: 113215 - DNA, 1046 bp, Setaria italica
  Intron number 1 from transcript Si007027m (locus Si007027m .g) derived from phytozome v7.0 (chr-ID scaffold_4; pos 24 51429 to 2452474 reverse strand)
ccgcggctacgctgctccctacgcccacgacagaggtgcacgcccgctctctctgacccgacgaacccggcatggtttaccgttcgttttgcgcggacaaatatctgtggcagatttgtgcttgttgttgattgtctgtaatctacaaactttgtagaggaaattccaaatttagggttatcagggtccaggagctatcgattggggcagtttagttgtagttttctagccagttgcgagtgagtatcatccccgaccaaattagtactgaaatttaggtttcacttggtaggcagtaggcactgtattgcccattatgtctctgagaatacatcatatttgcaacttttcatgtgctgattgagtgtaagaacaaatttaatccagctgtatgtagtgcccttgcaggagtatagtgcagaccagttttccttatattttttagtgtaagacctcccttttttaagaagcataactcctggcctcttagccttaccagtaagatgttaagacttaagatgtccagagttatatagctactggaaatttgttgtgagaggtcatgtgacgtgatgatcgagtgacattggagatctgattgcaataaaagctactattaaaatacataaccatcatgagtgttaagttttgacttttgagtatgattgattaaataatttgctattagcaaactgcagtagaaccgttagtgaaatatttcccatgttctccatgtcagttggagtgatttggataaatttaattacttgtaccttatacttggaaaaaatgcgtggctagttttcaggcagagttatacactgcaaagatgaatatggaaatatgtgtatgctttgatagcacatgccttgatgaggtattcttcatgttttttcgattccttcctttcccttttttcttcttaagttttgaaaacgatgtctattcttgccttacaactgatcagggtatgttttgttggctaacttcttaacttcatttgattagcagatccacgaggtggttatcccgagtattttccatct

SEQ ID NO: 113216 - DNA, 824 bp, Setaria italica
  Intron number 1 from transcript Si027804m (locus Si027804m .g) derived from phytozome v7.0 (chr-ID scaffold_8; pos 17 94396 to 1795219 reverse strand)
gacttgccagtaacagtggaggatcacaagcaacaggaccccgctttgtgcacgatgctcaagaaggtatgcacccatcaacttgcagttagttcatgcgcttacttagtcattgttaatgtccagtatgttggtagaatagcagttgcccgagacaacaattccagtgtttacagtctgtttggtggtgtctgcatattgaacatacttgcctgaaaatgctgaaaattgttctttgtttatctgcaactttcatcaattagttgactttgcccccctttttttctggagtacatttgacttttgatttgaacattactgactggattccaatgtgagaaccagacaaccagattactccaagcagctaatgtttaggagaaatttcagaaaaagtagacatttgatgattagatgtaccttctatagtgaaagtgaaaagttagtagagggaaaacaagaaggatagaattgaactatggctgtcttccttttctgccagatcgggttgtctcaaatgcaaagtattttctattacattgaggctgccttagcttaggtcctagtaaacataagattttgttgttcctcctctgtattagttcacaaggattagcaagattagattgcatattgctgaacttggctatgaggctatgagctaacacgatggactgcatgtgcatatataatactgcatcgctttacatgtccgtaacttgtgagaaagtttcctctcgttctcttcatatttttttcgatattgattagtatctctgcatctggcaggtcacagaagtttgggagtggcccattgcatttat

SEQ ID NO: 113217 - DNA, 988 bp, Setaria italica
  Intron number 1 from transcript Si030424m (locus Si030424m .g) derived from phytozome v7.0 (chr-ID scaffold_2; pos 26 004892 to 26005879 reverse strand)
agctgcgcctgcctcgcctctcccagtacgcctccctctctctccccagttccctcttctcgcccggttcttcagatcgtttcttgggacggggcgcactcggtctctgatctgggaggcagcgcctgctttttcccgtttcgtctctttccttttcttggcgacgcgcgtcaagaaatctgcagggatcaggcaaattgggattggggcccccaaacctttcccgataaattgtgtaggaggttagctgcgtgattcgagcgctgttcttgtccaacgagtagccgccgccgccggccgcttctttaaatcttagtccggtgtggagctgatggtttatcgttccccttgctgctgagctcttgatgtgaagtggcaaattgttcaacaaagttggacaatttactgtccggtgagcgaggttggcctagttctgttcatcattcctagtgtttggtttccctctcaggaactaattaaggatattgctatttggactgtggttttcccgttagaggatttgtcggtatcttcattacacatgattatattacatatgtgagtctagcatctatacattataaattggagcgttatgccttaccccggtgtctttgtttaagtggttctactactattaggagccagtcaaacaccctggatcaatcatccagcctaacacggtatgaggcgtaatcttattatgttacatgtagcagcaatttaatttgttttgtactagatatgttgattatatgatatctcagaaagtggcctgtaaaccgttttctgtctatctccagttctagatcttgaaatttttttagtgacaacagttagtagttcaacaaaatttggttggttcattgttatatagctagtcctttttttccatttcagaagaataacagactgacgagtagttggaccttatagtaattctatttgaattctttgctaacactgaacctgttgcaggtgaattctc

SEQ ID NO: 113218 - DNA, 770 bp, Setaria italica
  Intron number 3 from transcript Si006617m (locus Si006617m .g) derived from phytozome v7.0 (chr-ID scaffold_4; pos 20 54860 to 2055629 reverse strand)
aggtattgttgctcttccattagcccttctgcttccgttgcatttgtttcatattaaatttaagcagcaaaagaacaactgcttatcaacaaacttctgcattgtttccacttaagtggtatgttaaacttgtggtaaacaaagatcttcttttaatactgacacctgctatgtagtaagagctgtgcttgtagcaaatcagatatagttctaaaaaagctagaggcagaacaaaagatggttcttatatttgtatctatactctagactcaggaagaactgaccaaaattctgaactgaaggaagatgttgatatgatcgaaatgtgcaatgggaggtcaaattggtggttctctggaatccaccattcatgtcctagcattttcttctttggaataaaacgatgtgcacatctatgaactgactgcttagccatgtgggtctatctgtgaaaatgatttttatgcctacagtaacattgacttttcctgtgtttatagctgtcaaatatttaattatttatgcttctttatgatgtacttcctctgtcccaaattataggtcgttttggcttttctagattcataaagtttgctatgcacttagatataccccatgtctagatgcataataatatctatgcatctagaaaagtcaaaatgacttataatttggaacggagggagtagtaaataatcattttgtacttctttccagtgtccaagtctcaaatctaatgtcattctttcaggaattttcccctggatcaa

SEQ ID NO: 113219 - DNA, 769 bp, Setaria italica
  Intron number 2 from transcript Si005718m (locus Si005718m .g) derived from phytozome v7.0 (chr-ID scaffold_4; pos 40 091525 to 40092293 reverse strand)
taaacctgtttctgttcatccaaggaacgggtaattgactgtttcttgcatgcttagtaactatcactggtgaacttgactgaatgtatctggtattctggtctgttgatgctgtgcatactgtttaacaagaaaattataaatgaactgacttaataggtccagaaaaatgaaaagattaggggatcatcaaccataaagatctagtagcttactattctaaattctgagttctaacttcatcaataaagttgaccccacccatcaacacaatcaaatttatctgggagctttgtgatgggatcctctgacgtaactgcaagctgtgactttgtcactgacatgtggggcacatgctgcttggacccagatgtcagtggtcaagtcaccatgcagttaagtcggagtggctgcctgtttgacaactgtggaggttcaatattggttagtcacaaagtttcttgcgcttggttgcattgcatatgtgaaaaatgaaggaagaactaaaagacagctgtactgattttttgccactgaaacttccaatccagtgtcacctagtcttctctggatccctgttagtttgctagccttatattactgtgtgtcatcattttcattatgatgcattttcataaccagggattcatccagcataaccaaacacctcacaactcatctgttcttccgattttctagaaagctacttgttttactgtgcttttgtggtgtggcagggacactgcattaacaatacttccgctagggc

SEQ ID NO: 113220 - DNA, 927 bp, Setaria italica
  Intron number 2 from transcript Si026618m (locus Si026618m .g) derived from phytozome v7.0 (chr-ID scaffold_8; pos 23 806564 to 23807490 reverse strand)
aacggaaccaccaccgaggtaaattgaaaacatgttcttttgcagttgtactgtttgtgtggtagatcccaccacatggttatcttcacttgttattttgctaactattcaatcagtgactgtgggtattgtactgaaactggctcgagttgctttataacctatcgctagctagtttagccttactttggaatagttgtaaatcttttctaacatttgtctacatctattctgttcttgagtgcgtttgctctgttttggagaatgatattattccttgtaaatgttgatcttatctgaaaaaatgatattgctagttgttgttcccgttgattaggcactatcggttggctttaggttgtcccacctgtttatttgattttttttgcttattgttccaggttgtacagtattccagttggaaaaatatctcagttctttgatagtttttagttgaaatttctacttcattacctccctgttagattaaatagtagaataatatcatatgaaccttgaatggtgagttacaaccaagttctggaatttatttcaattgtttatgctcttattttgtttgtggttaatataaatgtgaagttgttgtatcctcttgttctgatgttgtttatgattaaaaggtgacagtaagcttaaggcatcttaacaagatcattgtatttacagagaacatgttgaatacttgaatataaaagataagataacagaagcatactaaacttatgtatttgtttaaagtgtgattttgccctgcattgagggtcctaatttcttctatgtatattgattgtcacttgtaactttttgtatggtatttagttaaaccattgtcatagcatgcattgaaaattgtttctttcctatcctgtagttctgcaagaatattgttctagcaggagttggtag

SEQ ID NO: 113221 - DNA, 1012 bp, Setaria italica
  Intron number 2 from transcript Si007862m (locus Si007862m .g) derived from phytozome v7.0 (chr-ID scaffold_4; pos 31 716395 to 31717406 reverse strand)
gatatcccagtcatcagtaaaacccttgctcagactcatcacctaccatttttgtgctcgtgaatcttaccatgtttcttagagtatagcaataatgaggattagaagtagtgcctgtttcatattattatgacttgaatagatgcactgaataggttgtatgtacctcaggttgcatgcgatatccgatagatttattgattgtgaatgttcaggttgtagctgtttgcattggctactaggatatcaatgaatggtcgcatgctaatcataataccttattttttgggtgcatttctcttccgttgcaatcaaactataatatactatagtttaagttttctgcaattttggttgttcctagtttctcgtaagggcatggtggtgcagccaagatgattattacttaattttatcatttgtaattccatatgtgatgcctgtttgtaagctccacataaaaattgaactttttgcatgtgttttctacgtttctgcttgttcataagagctagatggtgttgaactgaccactcatattgttacttctaatttagttcatatacttacgggtatctagattagggatactttaatctatcgacaagcccagatcgacaagtccggaaaagggtgagattaggaagaagataccgattgggccgaaaaaaaaccactgacatcatgatttagctaaccggcggtgccccagaaggaggcccgggaatcaagataaacagtttgctagcctggcccaagttaccaagcgaaggccgaggcgcaatgatgggccaggcctaccacgtccctagggcgtggctaggtctgcctgatatgacaaccgtagtggtgctcgcgtgggctgagacaagaaaacacgggctggccagtcaagcgtaccgtattctgtgcctaggagagcacgacaaccacttcaagacaaagatccccagtcggggacggtgtcgcaacactgtgctcggtcatgcctgcccagtctctgtccaccagc

SEQ ID NO: 113222 - DNA, 795 bp, Setaria italica
  Intron number 3 from transcript Si029366m (locus Si029366m .g) derived from phytozome v7.0 (chr-ID scaffold_2; pos 34 729560 to 34730354)
gcacggcagtaccgaggctgcacctcgccgaccaggtaaatagctgacgatcaccatggtcgtgccgatgatacatgtttgattggatgatttaccaattaggcagtcatacatatctgaaggtactaaaaaaaaatgaggaccacaattctagcgaatgcttatccaatgtaatgtgcaccgattttgaatgttgcaatattgcaattactttcccgtgtctactgaatactgatgcacctggaatgtttctgtcaattattttaaaatgtttgttccataatattgaatgcttgtagattgttagaattttcttatagcttgctacctttgttgctgactgttgagtttggctgcctttagacttctcatgtggtaactgtaaggttgtttacctgctacatgttctcaattctcatatcatttcctgctacttgttatcatatcatttaaaacttgaaaatggcatcatatggtttgtcccactattgaaccaaggagttcgtgttgctggagttaagagtgtctttctggtactgctagagcaagaccttgctaattcttgctaaaatcctcgagcaccagtgcctggtcaaatttttctttttttcatagtgtttggaggcatgttgttctatcgacttgcagggaaacagcttgttctcagaaaggatattacctgtgctcataaaaggacttagcacacttaaattgctgtgttattctaactactaatccaaatcttctaattgttttttaggaataactagagttccaaagcttggccctgcagtt

SEQ ID NO: 113223 - DNA, 942 bp, Setaria italica
  Intron number 1 from transcript Si027461m (locus Si027461m .g) derived from phytozome v7.0 (chr-ID scaffold_8; pos 60 2554 to 603495)
gacagggctctccgctcctctccctcaggccacaggtgattacttgctactacttaacgtttctgcataatctagggcagcaaatgactttctgcttgtttaggacatgcatgcattttccctcaactataaagaatcggtttctgctgccttgatatgaagacctcaaaaataaaacaattactggcaatacagcaaaacagacccagtgatttttcttgaggttatcctttgcggtgttcttttcttacttgttaattaaattcttggaagcaacataaagtaataccaaaagtatacgaaattcattagcagtccttaaagcttgatcgaagactggatcaaagaattatttacagtcaacatgtagtgatcaatcacaaatgtcaattttatattttgctatctcccttagtactcactgtcccatttatttattattgtcctctctcggaatgtgacagcgcctttgaggccgtcgtcagaagaaatgcatttgccctaattttgtttactgggttagtacctccacattaattcaaagatttggtgacatgtgtgaagatttaggatcaaacaagtaggacaaaatccgaggaaaattaatgccgtcgcctacaaaaacaagcaaacaaaatgctttcataaggaaaaagaatcatatacaatgagatcttattctgttgttgcatatatattggtatcttattattattcttactatcattgaaaccttttctctctccttttctaaaaagaattcaaaccttttgttgcaacttgcaacaaggcaagcacaagcatgatcctaaaccggtttttactgtcctttccgcaattagtttttgactaagcaaaaccacagctcctaatcagggtaaaaactgttcttttttcgttgtaacagcttctcagcctgcacgatcgctggaactgctacac

SEQ ID NO: 113224 - DNA, 848 bp, Setaria italica
  Intron number 1 from transcript Si026611m (locus Si026611m .g) derived from phytozome v7.0 (chr-ID scaffold_8; pos 39 931681 to 39932528)
ccaacaaaaggtaactttacatcttctttactttgtcatttgtttacgccttgtggcttatcgtttctgcacttccagtctttaaactattttttactacatttatcgtgtttagcagcctctagctagtgcatttttttttgtacattttgaagcatgaggaggacacgatgggggatgtagtgtaggtgattagcatattgaaacgtagcaaatcttcttctttttttggtttgagttaaattaatggccaacctatctctgaacagtatgtagtttgatgtgttgatacataaacccttcctaatcattcctctaaatatccattcaactgtttcttggtattgtacattgtaatttttatcccatcaatcttatctggagtaaattcagacaggcagactatcgtctagtagcaaatttattgttttatcagctggatgctggctcttagattgtcgaagcacccccacatcatcattaagcagtttgagtgtacctggtatacttatgcccccctacgtgctaagttagaattatattgtctaaatctatgtgataaattatgccgaactattttcttctgtggtggataatccaaccacataatcatgtccacctagttaataaacggcagctgaatcggatctctgtctgattaacccacaagaacccagcaggcagccatctcggaaagatacatcctgttatatattactgtcgctgtgaattaatgaactagtgcttgttgtctacctttttctttttcatgtgatcgggaactagttgcattgcgggattagccttgtgactatttcttctttttgtgcagtcaggaactaagtgaa

SEQ ID NO: 113225 - DNA, 866 bp, Setaria italica
  Intron number 3 from transcript Si007285m (locus Si007285m .g) derived from phytozome v7.0 (chr-ID scaffold_4; pos 39 723580 to 39724445 reverse strand)
gaactgtgtttgttcaggtatgaattctgagattagtgtaacctggttctgtgtacaattttctaacctgtggtatgttattagttcatagcatattgtttaggtaggcttctgaatattgaagaaataatcaaaattgagcatcagtacagttcgaatttgaaaaactcggttatcctagagatgtcgatcacttggtattggattagatatgtagtgttctgacccatttgtgaaaatccaaccaagtgaggccacttgctaggttaaggcacttactgttctgatccattttggtccttataagaattgacatgcaaagcttttccgtgttcacggaaagagagtcaatactcgatattacgagaaaagagaggttctgttgctataatctgatgtaagttttcttgtggtctatacagatatcgcgctaggttgcagtgtgctttaatttgtttagttttggacgtatccatttacttaaataattttagtccattccaatatcaaccgagatgtctattagccatttagtctctgtattactatgttgcttctattgttttgcaagcacaaacttccccagattatgatttgtcactgttctcagtttggtatgtggttatctctgtccttgcgtttttctattattatcttgatgaactctgaattttgatttctcacgtatagttatctccaaactatgtgtgatttctgtaagaagttttttttttcacatttgggtgtttccttccccggcacttcattttctatctggttgtttgctttcatgtttatccatatttgctgaattttggtctgttattgcagtgctgtggttgcaatatattccataagttggtcga

SEQ ID NO: 113226 - DNA, 433 bp, Setaria italica
  Intron number 1 from transcript Si032995m (locus Si032995m .g) derived from phytozome v7.0 (chr-ID scaffold_2; pos 35 358813 to 35359245)
acaccagagtgagtcacggtttcttctccgttatgctaattataactcgattattatcaatcagtgttttgatagcgtccattatcttcagttgttgtatctcgatcgattaattcatactacttgctagcattactgttttctcatcaaaatttatgccactgctactcgtctccgatagctatagcatgtattgttttgtggcatcttctcttgatacatacctcgtagatttggttggatgagaaaaacaaaaacccgcaatgcataagctgagatgcgatccttgcagatttttgtgtttttttaaacaccgtttgcacatgttaattagtcactattcttatgacaactgctgctgctattagactacagtactctacctaaactcatttgaaatcgcctcaaattacttgcagccaggatcaaaccc

SEQ ID NO: 113227 - DNA, 795 bp, Setaria italica
  Intron number 2 from transcript Si032995m (locus Si032995m .g) derived from phytozome v7.0 (chr-ID scaffold_2; pos 35 359424 to 35360218)
gtacaagggattactgccaaaccctcaccgaagtctatactatctctagcctggagtaccattaattgtttcttactttcttgctgtgctgcctaaaccagcaataattttccgcaactttcttatacacctttcaggtcattactatgcatccacgcttggagtttgttaccatgtcatctttacacacctgtactttctcaaagatgttggttaatctgtttaattccatcaattattgatatctttgatgatgagcctatgggatagaggggtgtcctgaaatgtgattggatttagttgctttctagaacgtacaatgcctcaacccatagaggttcatattacttgcatctgaatcatgtaaagaactcagcttttcagtaattaccatctctagcaagttgatcaagcaggtgcatgttgtgggaagctctagggaagattgtctgcatgttttttcccttattcctgactgtctccttaggaattctaggctcccatgtatatgcttattagtgtgttgattatgtacacaacaatctcattttgtatcgctaatgcattaggttaataattgttgccgcacatttcgccctgcattatgtttctatactatctttttttattgaccctatattattatgagaccttttcttctttatgctgttttgtattgatataagctacttgatgttagtctcttcttattttgcttcagtatatatacttactgtttatttgattctgttccatacaggatccatatttagtgctgacaggtcctatccgtgc

SEQ ID NO: 113228 - DNA, 665 bp, Setaria italica
  Intron number 1 from transcript Si008074m (locus Si008074m .g) derived from phytozome v7.0 (chr-ID scaffold_4; pos 26 410680 to 26411344 reverse strand)
atcactacacactgagaagccagaatctgcaaaaggtatgtagcaatgatatggtgagaaaaaactttgtattaaccatcttagggaagcttcagtcctcttcctcgattgctattaacaacaatatattcacatgtggcctcaccttgaattcagactcgattttcgggtcaccaccttctgcagcatcaagtggtgactagtatccagtgccttcacgtgctactcgcactaacaaagtcacttccagaataacactaagtttgagtcattgaatcaacggggctagctagtttatataatatgatgtttcccatgcaacttatggagtactaaaatttatataattttttttcttcaaaggctgaagtggtatatcacaactcagcgtatccttgaagaagttcatctaatttgtcttctgcactaagaaactagaaagattatggtacattcactgtgagctaccattttgaaaccgtttagtggaatcaagcaattcaatctgcagcacatatgttacatgcgtcaacacaagtttgtctgcagattagcatcacttggtgctcacgctcattagagctgaccagtatgatatagctgatactaattcataataatgtcctgcagggtataaccaacaaaacgaaatccttgccacaaac

SEQ ID NO: 113229 - DNA, 663 bp, Setaria italica
  Intron number 4 from transcript Si030272m (locus Si030272m .g) derived from phytozome v7.0 (chr-ID scaffold_2; pos 43 49422 to 4350084 reverse strand)
cttatcatagcaagcagctgactgtagcagacagggtgagctgttgtttagaatttaatttctagtgaatatctataaagcatatttatttctgatttgttattatctaaatgaaaacagtaccattgcatgtgttttagcttcaaaccactaaattacatttgtctcaaagtgaaagcaatgaagtttttattgccacatgagaaaaaacacctttttgacagcagaagtacttcataagtgaatatgttctgtacttctgtttccaatttattagtttggaattaggatgctgaccttggacaacgttcagatagatatttcagcattctgcattgtacggtttagttccatttactgtgaagcaataagacttgttgaaagttgaaatttgaatatttttcaaatcttccacttatgttagaccgaacatttcttaccatagtaattttgtgatacaagaggtgagcagtgatgaattggttgtacctctcatcatgagtacttgcttgacttcagtatgacagtatctgccataacacatcgcaatactatcttctcattaccagtgtaattttcattttttgcctttgagaaattaattcaatgacatcattccccttttcaggtctctgagctgagtaaaccagtccgacttgttaa

SEQ ID NO: 113230 - DNA, 912 bp, Setaria italica
  Intron number 3 from transcript Si030272m (locus Si030272m .g) derived from phytozome v7.0 (chr-ID scaffold_2; pos 43 50377 to 4351288 reverse strand)
gcttccactgaattggttttagttgtcctgtttaggtaattttggttcacatcaaacaatatgttggaaattaaatcttatgatgacatttatttagtttattcgcatatcttttaggctcatcaattttagttatttttcccccctccatgagtgtttgattcctgctcacaacctgaaaacgataaggtcttgttgtgaatactgtgcctgggcttgtggtgcttagatgatgcatgtcactactcaagcttgtctccttcaaatctctggggtgcatattaactatttaagcttcaagttctgatgttcttttgtcctcgattatctttgaagtaagctaagtagtttcaagaaggtatgtcagagtgagggacaaaattttgcttctaatgtcactatgaatgctcctgaatcatgtttaccaaacatttcatggctcatgttggcagccttggatgttgggcacaatgaactctgccttcatttatttgctcatccagattatagggctctgccttcagctctttactgtgttcctggtccaatcaatgtgccttcagggacctttgtgtctcactaatttgctttgttgttattttgtcaacaaacgcctgttacaatcccgtgttgcggtaacctgttacttttaatctgataaggcatagttggtttagcctgatgactttgcggtatcctagattttcttctgtcaactcattttttaagagtgaactttatattccacttgtacactttaccaagaaatacaataatctaggctcttagcaaatgagatctttgttttcttattttcatattcttccctgtgtgctagtgcttcttttgacttttcttgatggtctgcattttatttgcatatacatatcaggctcaggttaatagtgggat

SEQ ID NO: 113231 - DNA, 602 bp, Setaria italica
  Intron number 4 from transcript Si030992m (locus Si030664m .g) derived from phytozome v7.0 (chr-ID scaffold_2; pos 46 382402 to 46383003 reverse strand)
gtgtaactttgttgaggtatagaaaatgttcataattcacctcaaatatgttctggtaactttttaatgattgtttattaagtgttaatatgctccattcttgttcggttatcctagaggctagtaaaagcaaggttgaaatcaatatgctatagtccgattctaccaacaatttctttaccaaggctatcataatgcatgaaggataactacgccactcgatacttatgttctcgtacaacctaaacttctgtggcaagaatgcaatatgctagttagtatttgttacaaaatgcatagttcttttttctcagcatttggcatcttgtgttgccaagaaatattgaagataatccatcaggctgatatcttccagttcccatgatttgttccagttttgggctgtctttagtgatttgggatgtagagtgtttagcttatgctgtaacttatttaccctttttctctttgagttcttgaatatttcttccttcctcttcagaaaggcagactagccatgctagacttgcatttttcttagctaaaactataatatttctttctcagaagtaccaacgccacaacatatctgaggacacctg

SEQ ID NO: 113232 - DNA, 497 bp, Setaria italica
  Intron number 1 from transcript Si026153m (locus Si026153m .g) derived from phytozome v7.0 (chr-ID scaffold_8; pos 36 606457 to 36606953)
tcggcgaggcggccatcgtcgagcacacctttgttgtaagtgatatactagtaataatgttaatgtgtcgttgacaatgctgtaatatttagtatggcattacaagaaatatagtttgttagtttgttttgcgctacgaaaaaatgctaatcttaggctttaaaaacgtttcttctaaaaagcaaaagcagagagacatgtagatggtgaggccttgcctaaggcttaatgatatcgtaataatatttgacgtgcattcttatgcttcaagtttggtgatgacgtgatggtttggcaatgctacaagtttttgcacactgaccaatatggtgaacttgcttagtagacaagtttaagctagctgtgtggtttccttagttcaaaactgcgactcacctgtcacctttttaagcatgccactatttagtactataggcttgcttacactacacaagttttaatcttgtcttctccgaacgatgaccacgtacaggtgc

SEQ ID NO: 113233 - DNA, 965 bp, Setaria italica
  Intron number 1 from transcript Si025874m (locus Si025874m .g) derived from phytozome v7.0 (chr-ID scaffold_8; pos 29 84875 to 2985839 reverse strand)
gctctgcatcttcgccatctcctacttcctcacgcgtgagcaccccctgcccccctcattttgaggcccaattgcttttctgtttcccggaagttttttttctttccccgcaacacgggcgctgatgagggattagattggcttgccgcggttgccccgtccctccattattatctgagggacagaactgcgattgctaatgggttagcgtagttgcaagagattttgggtaacggctgctgtagatgctggatcgtgaggggattggctggagaatgcgttacaaaagtagagaccttttgctagcctggcagctgtagcttgtgcttacaccattttagagatcctgaatctatccgatggtgagctgtgatggctgttacgtggcattttttttggatcttagttgctgtttttctgcttgcattcaattaagtcactactgctgctgctctttactagggttacagtgatcattagtaaatgagcttgtttgaattagcttggaatgcttattagagcttaaacttgagttaggttgtacagaaattaattgcctataggtcccaaacttgtgtaccattcttaaagtatttggttagttgcaggtggaaaagtagcttcaaataaatgatcattttttagcctcacaagggtggaaacagaagtaaaataagtcagtattgagccatgtccaattttgtttatatgctaaacagtcatatattttatacacttttacttgtcaaaataaccttcttttctttctgtgtttcacttctcactctgtgaatgtgttggctgcctgtaagtccctagtaattttttatattttgtctcttgttgactttgtgtgcagaaatttctttatgtttgtatacttcgcatatttcttcttaaatgaatcatcctgtgcccatgctaagatcggtatcattttgtttcaaatagatacaagtaaatca

SEQ ID NO: 113234 - DNA, 595 bp, Setaria italica
  Intron number 2 from transcript Si020660m (locus Si020660m .g) derived from phytozome v7.0 (chr-ID scaffold_52; pos 6 975 to 7569)
cgtccagcagctgaagaaccgacaaatactacaaggtagtgcaatacacataccagataacatgttccatttatatctttattacatcagtgcacttttgcattgtcaaataatgattggtggtagcttttgagatgttctttctctccataaattggatcacccaaacatcaaccttggttatacataaagtgcaataattttcttttcagtgtaacaggagggacaaagcccctaatggttatatattaaaaaaaaggaaaaagttaaagcgttacaacaagaagaagaaaaaagttcaataaattgcttcccaataaattgtaatgcatccctgaatcatgctccctccgtttatgtttataaggcgtacgcgcataccaagattcaaactttgtatatttgactaataatttaaccaatattttttatttttatgatgtaaactcgaaatggttggatttgtgtttataaccataaataatataatataaaatagattcatgatcaaagtataatttggaagatcatgccatgtcatatcacaccttataaaaataaacagagggatcattttcttcatgcagttccactg

SEQ ID NO: 113235 - DNA, 642 bp, Setaria italica
  Intron number 1 from transcript Si032370m (locus Si032370m .g) derived from phytozome v7.0 (chr-ID scaffold_2; pos 14 4123 to 144764 reverse strand)
gacgtcgtctgcactgcagtagcaaggttctccaggtacgagcgaagatccccaccaggtcctgtttacaagacatcattagtccacaagcaccataaacatgtaccatttctgtgcaccttccatgtagtagtaagtggtgaagcttacccaacgaatcatccttgtcattcttgtagctgtaggagtaaggaaaaatggcagtgtgtggctgcacaatacaaacatcaaaagaagatcatttgtgaattattacaaccattgagcattaaccttaacagtgttgaagaacaagggttgcgcagagctttgtaaggggaatcatccacgagcagagtatttgagggtgccaactcccccccggctcccaaggaaggtcaggttcctctttgttccacagcttcttcagttccttcaacactaacggtttcttcttgttttcaatagtgtattgtccagtagcagtgcatttacccaacagaacaacaggtggtgtttcagatctttcataaggatatcaacaacagcatccgtattagctctggagcaaatccaagtttgcaatcagaaccacgcgaaaaagtaaaaacaaaacaaaacaaaacagggggaggagccgcggggcgaggcgaggtgcaccgg

SEQ ID NO: 113236 - DNA, 870 bp, Setaria italica
  Intron number 1 from transcript Si032952m (locus Si032952m .g) derived from phytozome v7.0 (chr-ID scaffold_2; pos 15 66505 to 1567374 reverse strand)
gtcatcggaaggtatcccaacgatttttcgagccatttattatgtgaattaacggttgtacttttcctctgaggattagtaatcagtactccctctgttcttaaatatatgacaccgttgacttttttcatttgtttgactgttcgtcttttctacaaattaattgtttttgcaaatagataaacctacaagttaaatctaaagtacaattgaaaatagacataatgatacatgttttactttagttaactaactcgttcaatagatattggtggtcaaagttagagtaaaaattcaatggcatcatatatttaaggctaaggacggagggagtactagttaaaacatagaaattgtagcatattatctatggtttatttctccttgtcatataaaatttacccaacaggaaactgtaacatccattgtcacatcatgtttccgggatcatacaccatctatctatggcttctgtttctgcagcattttgatgttcatattattctgtgttactctagctggaatatattttttctagttatgaattttggtgaattgtcccagaagatcgtgttgtattctacatacttgataaattagttcttacctcgtcaatttgttgttcttcagatgcctgaggccattattctatatatttgatgataactcttaatatggtcaagtcgttgacttattgatcttaattaggctctgcttgtatctgagatcaacaatttaaattcaagcaaccgcatgcttcgggtgcttatttctaatatcaacaatttaaattcaagcaaccacaatatataatttgcctcatgttttgagccctgagcttccttctgttatgaggaggctaagaggagg

SEQ ID NO: 113237 - DNA, 1000 bp, Setaria italica
  Intron number 1 from transcript Si026489m (locus Si026489m .g) derived from phytozome v7.0 (chr-ID scaffold_8; pos 35 206952 to 35207951 reverse strand)
ggcgggtcaacaaggctcctgtcacgagcattcaggtattggcatcttaaattcgtaatgggaagaatgtatatacacgcagaaccactactgcagaaatacgtgtcggttacgcaaatgagaagtatgaaaactgacatgtcagtgacggatagtcggaccaaaatttgatgaaagaaaatggaggaaaaaaaagaccccagacttacccacatgatgattaccccacccctcgtatatatatgtcccttcttatgatctcggttatacttcattgttgatgcaacaggtagattttttttccttaggactcttgttgtctaaaacattttgtcaattacttatacatctcactacttcaaataaaaaatttccaacctacaattttcatataaagtttgtctccatccggacaagttataaatgctcgaaagaaaccgaaattcaaattacttgcacaggaaaagcattcgtgcttgttcaaatataaaggtggagccttgttggtagaggccaaagcaccgcttgcagactgccattatttacgctcaagtttacatggatgggctgcggcttttgttataaaaaatacgaatatgatttggtcagaaagataagtttgtgaaatatatagaccaaatcagatcaagaccttttctgtatttttggagaacacggacaacatctacaatatcaaatttgttttattgaactcaccatgaaatatattttatagtgcatatatttggtagtatagatgttatacttttctataaacatgtcaaagtgagagaagtttgaattagtacaaatctaatgtgacgtgtaaaaaaactagagggagacgtctcttctcaaatccggagctgtgcacgtatgcacggctttatggacttattataattataccaaaaggtcatggccgattgaaattgcacacagttgcgaaacataattgcattttttcaactactgattctgagaaattaacagagcccag

SEQ ID NO: 113238 - DNA, 713 bp, Setaria italica
  Intron number 3 from transcript Si031203m (locus Si031094m .g) derived from phytozome v7.0 (chr-ID scaffold_2; pos 40 594585 to 40595297)
tcaaaaggaaataaatacatcaattcgtgcttgaggtgataagtttgaccaaaatgttcttcatctatcatctttccatgctttttgtgatagtacagtatgtagacagcttatgttctagcagtgtactccctccgtcccaaaagaatgcaattctaattttgtcctcagtcaaaatatctcaagtttgaccaagtttataaagggtatcaacttttatgacacaaaatagatatgttatgaaaatatatttcatagcaaatgtagtgatacttatttggtatcataagtccttgtgcatttttatataaatttggtcaaacttaggacagtttgacttaggataaaactagaatcgcattcttttcgggacggagggagtatacttattctggggatattttgtaaagtagaatggcaattctggaagtaactgtaaactgcaaatttcagtattggttaaaagctttgctgaatcgcatgattactgtgattcttgaagcaaaaggaatttttatatgacaaatgtgtatttctttgttaaaatattattgtttttcagtattggttaaaagctttgctgaattgcattattactgtgattcttgaagcggaaggagattttatatgaaaaaaagtgtatttctttgtcacccattttgtgtttcttgattctcactagcattttctgataatatgtttttgcaggttaa

SEQ ID NO: 113239 - DNA, 525 bp, Setaria italica
  Intron number 1 from transcript Si026674m (locus Si026674m .g) derived from phytozome v7.0 (chr-ID scaffold_8; pos 25 019811 to 25020335 reverse strand)
gcgaataggtatggcacacttttggtttatgcttgcataaattgaatgtaactattataaattgtccgtctacttagaaaacaatattgatatcatgcaatttaacctgtcgacgtatctggttcatcacgagccactgaaaatgtttctttgtatcagaattgtaaatggggcctagtatagcttcatattttcttttctttctgatatataattctttgatctcaagtttgatcctctctagttgaatatctttggaaatgttttgggagcttgctaagttggtaatggccaatttttgttgttagcaactcttgcaagtgtcgtcgtacaaagccctaggcactgcgtttgcagttgggtctcacctggtgtgtaacagcacattaagtcagctaagcattaatcatgcaatagttgggtatgttttagacaaatgactcttctgcatcatatatttgaacaagattaactcctattgttactttaggccagtccgagcaagaaaagctgcagttctttgta

SEQ ID NO: 113240 - DNA, 615 bp, Setaria italica
  Intron number 5 from transcript Si031512m (locus Si031512m .g) derived from phytozome v7.0 (chr-ID scaffold_2; pos 39 386606 to 39387220)
ctggtggtgacaagtggaagtccctgtccgaggctgtgagttcgctttctcccctctgaaccgtgtgaactgcgtagttggtttcgatgtgccctttggtagtttgagtgttcaaatttcttccggttttgggtcctctgcgttgtgctatcctgtggttacctattgcaatgttagatctgcgaaatttctagtgttcctcgttcaaattttgacggttatgctctattaggtggttgccagttcaaatttcgctcatgtcttatggttaggagtgttaactagtggataagttggggatgcttgtaccagtctcagtcttagatctatgagctggtgatgtccgcttctattctccggattcttacttttcggttcaagagattatgaatttgaactatgttttgttccattccgtgttgaaacctgttcatccataggagtgtattgttgatgaacttgccattcagttgctgtgatgctctgctgcagtacaaatgaatatgattatttatgtttgaaattcaaactgacatgaaacacatcactgtcctgacgttgctatgttactgaaatgcaggagaaggcccccttcgtgaccaaggccgagaagct

SEQ ID NO: 113241 - DNA, 801 bp, Setaria italica
  Intron number 1 from transcript Si028193m (locus Si028193m .g) derived from phytozome v7.0 (chr-ID scaffold_8; pos 37 798136 to 37798936)
ggcggctttggtggtgtttacaaggtactccgatccgttactttcttggtttgttgattctaggtttgtgtacttttccatataatcacgtaggcatcactagctagttgaatatcaggcagagataggttaagactatttttcttcgtgtaacaagtaatttcaaatttaaatttatactaaatgttaccaatttgctgtcccaaagggcagggaataaactaattggtattagtctgtgctcaaacccgcaatcacgcctaaagctaacccttggctgttgtgtcctccgatacctcctataagtcctcctttgtggcattttagctcatggcaagaagccacgaaaactcctctcaactgtactctacattagacagggagtttagggaaagtgtctttcgtgcaactctagatctagcattttcattggtggttccttttgaaaattgccatctgtagtgagcctggtttctacggtcctcgaagttagttttcacgtcactcgtttctctagggcaactcccaattgaaagcatctcaaacctcaaagcacacacgtgtggtggtgcccatgcttcattccagcccaaagaccaaagtgagccaaagatgaaacttgatggactttgatgaagattttgaagcctgaggccagggcgccattgaacttttggcgaaactttaatgctaagatcagcagttctgctttttcccttctgttctgttaaaaacagaaatccaccatctgacatggtgtttatacttctcagggtgtcctgcaggacggacggctatacg

SEQ ID NO: 113242 - DNA, 864 bp, Setaria italica; identical to SEQ ID NO: 112819
  Intron number 1 from transcript Si030438m (locus Si030438m .g) derived from phytozome v7.0 (chr-ID scaffold_2; pos 43 951924 to 43952787 reverse strand)

SEQ ID NO: 113243 - DNA, 543 bp, Setaria italica
  Intron number 2 from transcript Si032117m (locus Si032117m .g) derived from phytozome v7.0 (chr-ID scaffold_2; pos 57 65224 to 5765766 reverse strand)
cacgacctgctgagtcaggtcctcgacgacggcaggtctctctttcaatcgatcggaccgcatgatactttagcgcagttttctgtttttacatcagttcttcaaaattgtaccttttcaccaaatttttacacttaaatccacgtcgacgccatttctcatggacaaattaaccattactccatctgtcccaaattaccatttattttgatttttctaaattcataacttttactatgcatctagatacattctatgtctagatacatagcaaaggtcttatatctagaaaagttaaaatgaatagtaatttgagatggaggaagtaattcggaaaggaaggattcttttgggaggttcaattccttcaacgccagcagggaaccgagttgtcgtcatgaacaataaaacactacaatttttttttgcaagggtaaaacataataatttgtagcatgctgtatgctaaatcatctttgcagttgaacttttgcggttttacctggatttttttagtgtagaaaacaccataaggctaaacct

SEQ ID NO: 113244 - DNA, 748 bp, Setaria italica
  Intron number 2 from transcript Si030237m (locus Si029556m .g) derived from phytozome v7.0 (chr-ID scaffold_2; pos 10 790744 to 10791491)
gcatatctgctgttgttgtggctctccttgctgatgcaagtatctactaaccattatcggttactatctctttcttttttatctgatggtttctattttcagtacacttcccacatttccttgttaatttatttctttctccacctattgaacaccttacctcaacagttaagcttttgagtggactggttggttcatgaaactcaatatgctttgagagtgcaaggtcctaaatatgagacttaacaaacaaaaattgacaataccccctgaatttgtttcactattgaacaagaaatcttaacggattcttgcttcagaatggaaggtggtcgaactggttgtatttgtctatgtcagttgttttgagtgcctttcatgtgttaatgctatactcctatatgttgttcttctgtcagacttccaatgttcgcatgtggaggtacaaactgtgcagtgtcacctcaaattgccttatcaccatcatcatttagaacttttggaaattaacatggttttcatactgcaaccttttaaacaatttattcctttctttgaaatgttttgagatttactatgtcatttggtgatgttcgataatatattctttttaaaaatattctgtaagttatatttctgtggtctcaagcaattttgactatcaagatagcatttcccatgtatttcctttaactgggttctttgtacttcagccagagccaaaaattcagtacaccctgaaggccat

SEQ ID NO: 113245 - DNA, 916 bp, Setaria italica
  Intron number 1 from transcript Si030487m (locus Si030487m .g) derived from phytozome v7.0 (chr-ID scaffold_2; pos 21 921320 to 21922235)
gctggcgcctgggtgaaggtgagcgcctcccctttccctgcccttgaagctctaattttcttcttctttcctcaattcttagtagcatctgcaaattatttctccagcttgccctttaagactttcctgaagtttgaatcggatttaggtttggttttgatttcgggaatgttcagggaagagatttgtttcttgatgcaaggtttttgcagtggagtgtaagtattcggtaccgatgaagacatggagtcgtggatttgaaagtgagttggcatcggttggtgaagaaagtcctatgaagattccgaatggatcttcctgatgccaaccgccaaggcgccaacgcttgttggcacgaaagccctgtgatggtgaacttcagctcaagtcaactgcttcttctacagctgcgtcttagctcttgctgtaccagcaaattttcagatgatgttggaccaaaactttgagagcggcaacttgttagattatctgaaattgccgaatttctagttgtagggatcactgctagccgatctatctatagatctatatcgctagctacaaccaattctttagccagtccatctgaccaaagtcaccagcataccacccgcagttgttgatatcctgacatgcatgttacagctgagctgatttcttttgcggcctttatccggctcaatagggattttttttttcgtgctacacttgttttgtggtcacttttcagcagctgatgatccatgctaaagttttgcctggattgggtctcaggagtttgaaggagcatagatccctatcaaacttgatattgtagatgaatttcttattccatttctcaattgtccaaaaactcacgtagccacttaataatcacacagttggagcagaagggagccgggccaggagcaagaag

SEQ ID NO: 113246 - DNA, 655 bp, Setaria italica
  Intron number 1 from transcript Si006252m (locus Si006252m .g) derived from phytozome v7.0 (chr-ID scaffold_4; pos 29 470907 to 29471561)
ccaggtgggtgtctttctgcaaaatcggcacgatttttgaatttttttcttcttagtgtagaaatattttggacacaaggagcgccacgtaagaaaaacaaacgtgtttaccgtagacgggggccttccttggacccagaatcgataagccgaaaatttaaggaacttttcgtaaaactgcgtgctcccgtagcaaccccgggatggtcggatcgcccacgatcggacgtccacgaaaagcccgggtgacgcgatagcaccccggaataagggtagttgatagcgtgtttgatttaatccggacgagattcacataaacaaaccataatccaaacatatagattcaaatcgacaaagcgagatccttttggctgcggttgctgtacacatttaatgagccgtagtttgacctcccacgcccattgacgcttcctggcagagaaggcgggcgcgagagtctgtgtactggccggccacgcgtttaatttttttttccaagactgactcgactcgaccgtaccgggcccggcccagcgtgttcctccctctagcacgcctcgcgccgcgccgtgcgcgtataaaatctgccgcgggctctcgctcccggcgcggcggcacagaccgaacgggattccttcctccgaatctcgacaca

SEQ ID NO: 113247 - DNA, 646 bp, Setaria italica; identical to SEQ ID NO: 112899
  Intron number 2 from transcript Si006949m (locus Si006949m .g) derived from phytozome v7.0 (chr-ID scaffold_4; pos 57 43755 to 5744400 reverse strand)

SEQ ID NO: 113248 - DNA, 799 bp, Setaria italica
  Intron number 2 from transcript Si033090m (locus Si033090m .g) derived from phytozome v7.0 (chr-ID scaffold_2; pos 46 506843 to 46507641)
caagaccgaggacgccgaggatccagcacctgccagtacgctcacgttctcgctgcctttcactctgttgctcagtcctcaatgttgcgactcgttccgattccgatctggttaaggcgatagctaagaggaaacctatgtaaatgggggttaggctacaggcacggtttctaactgcactactgcagttctaaacatctgttggcaaaaccccaaaactaaaaactagagttacaaattagtaaacacaatgcgcaaaatcccagcagttccaatgggcataaacgatagtttaccaataaataaagttgttcataggaattgagttcttaggatacttttggtcagcaagagactcttaggcctcttcaattcacaagtccccatctgtcatacactaaaatcatatatgaaaatgtgaagcaagcacttgatggcgtggaatgtggatgctagttacattgtccagaactgtaatctagtcaagtgttggtttcaatactgtatggagtttgtggtttgaattaacatgctgatggcggtttcaatagcaataaattaaccgaggggggggggtgccctatgttttgagaagagatggcagtttgaagtgcaaatttaaatctgttttacttttcttgataaaattctccccacagtctacatactgtcatctttgtcttttcaagaagagtaccatagaaagtttcatatgatcattatctacggttgatcttgaattttctgatatgatgctccaaatacttaacagatcaggaaagccaaccagcacaagggg

SEQ ID NO: 113249 - DNA, 968 bp, Setaria italica
  Intron number 1 from transcript Si027452m (locus Si027452m .g) derived from phytozome v7.0 (chr-ID scaffold_8; pos 14 072247 to 14073214)
agggaggatatacaatctgtacgcttactttcacttttactaatgtatatgtccaaatcatatttcctagttgttgtgatgaaaatattttcactttttaatgcctcgtctgtccaaaaattaaactctagggttgtctgaaggaaagaagccaataagagttgaaccaaacaatatttgaattgtctgttacaggctagcttatacaacagtacatgtcggttgtacaaatttgttaccccaactgaagacattaggacagtattcttagatgttttaagtattgttcatttgtaagtggcattctttagtttttagacctgtgatggattttcccttcaattttattacaggtgactagaaacatagaattccaattaatagtacacattggggttgtagaaggtgattatgcaatatgataatgtggcacacaagtcaaaatttaatgcagcctctgtagtctgcagtagtggtgggtttgggtttcatattgggagatcaaagttactggtagtagcatattacatctaataattgagtatcaaaatgtgtaacactctgaaattattcttttgaggaagaaaggacaactgtgcaagagagttactacaggtggtgcgtagaactgtccaaagtgggggtttcacataagcaattcagggtctggggtatattggttcggtcattgtgtgtattttaagtcttatttattgtttagttcattcattccatgttataaattacatagatatgcaccatctgtcagaatctgaattcaaaatgccttaaactatctcgctgaatagatatcactaagttcaatggtgccgaacattctgagttcatgcacggtcatgattacatcacttatcttatgaaaatgaaacattatttataaaaattgtcaacctgacgtttaaaagtaagtattgtaaacacatataccttattgttttgcagataga

SEQ ID NO: 113250 - DNA, 892 bp, Setaria italica
  Intron number 1 from transcript Si027050m (locus Si027050m .g) derived from phytozome v7.0 (chr-ID scaffold_8; pos 61 03164 to 6104055)
gctggtacttgtgtttttccttttccttttctcggttattgtcttctaagtactacaagctacattgtcaaaaaaaacatttggaacaactcaaactcggagcataacctatcgaaactagaaatcctttcctgctcaagcatatcacgactttgtagagctatactaaaaacaaagtttgagcaggtcacatttggtgtgacctcattgtgcctagtagcatagagccattgcacagtttaatgttagcctagtatttcattgctatgattgcctttatgaaaatattgaaagtgttttaaaatactagcatacaaccatcgataaaggattttttatggaaataggagaggttaagatctatattggttataaattaataaaagcaaaaaatgattctttttgtgcaaagaaaagagaaaaataaattactacatgttctcaaaccactctgaaattctaggaaggtcagctagggaaattaattcataaggatggactctaataaaaaataccaatgtatgaacttatcaaattcatctaaccacaagatacccaaatgcaagttctccatctctggaaacatcacaagaataatttttttaaataaatctaaaaggatggggaacatgcaaattgtgtaaacatattttggtccaaaatgtaaacatagatgtcctctaactaaaagcattgtgaaagaatttgtctagttaaaatttatctttggttaacttaaataccaagccatcaggtacctaagtgtaagtttaccatactcaaggcttcaccgaacttcgcacaaaaaaagaaaagaaaaaactccataaataaaacatctatataaaataaaaaagggggaaacctcgcaaaaaccccgcacccgtcctgt

SEQ ID NO: 113251 - DNA, 459 bp, Setaria italica
  Intron number 2 from transcript Si030276m (locus Si030276m .g) derived from phytozome v7.0 (chr-ID scaffold_2; pos 44 974038 to 44974496)
caagcacttgagcagcttgtgcagagaaaggataggtaaaatacagttattcctatctacgttaggatactttggattcaaagtatgacctaggatccagaagtattggccttcctatctgtattttattggctattcttttctttacctttaatttgttgatgtggccaaataattaatttgatattgacgtcctgcctgttgctcaaagtcactgacacctgtttttggttgacaatatcctgtttatttatgaacacggggctgattatcttttgctagtgatggtcgcttgccttatccaatctgcatgaaactgtggagttcaatttaattttttgatttgtaatagttcatgctcttgcattggtcctatgctataagctggtttgatagcacccttttcttatgatgatgtaaaatgtcctaatatgttgcagtaatttggtattctgcaga

SEQ ID NO: 113252 - DNA, 1037 bp, Setaria italica
  Intron number 2 from transcript Si028951m (locus Si028951m .g) derived from phytozome v7.0 (chr-ID scaffold_2; pos 28 093836 to 28094872)
gcgtcgtaagtgccgcgcctcctctccaccctgcactcctcccctcccctgttctcggtccttggtgctagggccttgtgccgtgctttggtcagatggattacgactcgaatgtatcggattgatgaaaccgtgtggggtgggttcataatctatattggattcatctgtatggtttgaaacctatgacgcggctttagcgatgggctgcgggatttaggcgggcatgaccgtcagcacatgagattaggttcctgcatggacctgcttatgagctgtgctttacagtatttttgtctgcttgtgcgtttgacgctgtaactcagcaacctgtgttttgctcgtgttgctctttcactgcatattttgaagtggggttggtagggagaagctcctgggtgttcagtagctcactagcctagcctatttgtggttctaaaaaaattgtggtgatgtgaaatagtaccaagcttgacctaagcaattggtgtcaggatcatcaagggatgcaacacatgttagcaaggtgggaggacagtggtttgaatagtcggttgttgagtgatgtgcactctgaatactggcaaggtagcttagggctgccaagcatggtgtcttttagtgctgttcggtgtcttctattctgatgaaaatgtgttttttttttctgaaccaaatctattggggataatggaactgcaatcaaagtatagaactcctgactagagccttttcccaacacgaaacaaaagatggtattgaaccctagttatgctgtttccataattggtttcttcaactcatgatatcttttgtatcttgttatttttggggatgtgttggaatctggaattatgtgtgctgttggggcttgttgtgtgcctttgaatcctttgatttttcgcttagatgctgcttacatgcttacattcatttgcctgtgtttatggctaacatactgtttcttacgattttaatggtctctattgcttgttcatgcaggctgtcacagctactagcactaagaaagctgacct

SEQ ID NO: 113253 - DNA, 997 bp, Setaria italica
  Intron number 1 from transcript Si031551m (locus Si031551m .g) derived from phytozome v7.0 (chr-ID scaffold_2; pos 41 950049 to 41951045)
tccatccgggcttgggttgatttcttcatttgccggtgaggaagcccgaagccctaggttgcttgaacaacccgcgtgatcttttctgtccctgtgtgccttcgaatctatcttcctttcctgtgatggaacctcgatccgttgcgtttttttttttccacacaaaccccgctcctcatattaaccatgtatcagcttcctgctatgatgattgattttgcttttgttcgtagattgtaaagatcgtggtatgcggatctaaacgggcaaagctcactgccgtgaattttattagttaccaggaaaaagaagtcctaggatttaggacttaagggcgtagatgggtaggcatactcaattattccttgcttcgttgttgctattgatgatataatggagaaaaatataagtttgttgcaatagtacaactgtatgacaacccatttcagatcatagttttcctttggaagctgtatgtgtatctgagttatggacagggtctaggcttgagtaaaaagacagtaaagtgattaggaattcaagatgttaggtagtataatgctcagatttatgtacccggtgccataacccatcagcagttcccacacccttgtagctcaacatccttttcagtacatgctgcgaatactgaaacggctaagatgctaaaaaaaaatactgaaatggctaagatgttatattggtttaccaaccaaacattgcaatgagatggatttgtgtgccacaacataatttatatctgtgtcctgcgaatactgcattggcttacattcgggattagctaggaatttgctaaactgcatcacttgttgtatgttgtaaaacaatgaagttcagttgtgtcaatttgattctgagattctccaattgacacgctctttctgagttgaacttcgcagcatatttctagttaggttgtttagcctgtgattctctattgaggctaatgtatgactattgtctgttttgtgcagga

SEQ ID NO: 113254 - DNA, 848 bp, Setaria italica; identical to SEQ ID NO: 113224
  Intron number 1 from transcript Si027494m (locus Si027494m .g) derived from phytozome v7.0 (chr-ID scaffold_8; pos 40 012976 to 40013823 reverse strand)

SEQ ID NO: 113255 - DNA, 567 bp, Setaria italica
  Intron number 2 from transcript Si032143m (locus Si032143m .g) derived from phytozome v7.0 (chr-ID scaffold_2; pos 36 491810 to 36492376 reverse strand)
gccacggtgatctcgggcagccggtgctgcgcagggtggcttcatcacaccagacactacggttctgagtgagtatagtgccttccgagttcattatccatgcatccttgttctgtgcaagaaaaggttatcatccctaaccaaacactaaaatgttaatgacaaatttgcatgataagtcatggaattcgtctaatcttttctggttttcctcttttttttccctgtccatttccggatgtagtcttcgtagcagacgcacgcaaatcccctgttattttaggcaaaaaaaaaggattgaagcaccttgattttgataatagaaagaagttgagttaacatcaactagctagattctagaaatctggaaagaaaattatcaacgaaagattaaccgtagaactcaaatgatggaagtttagctaaatttcaattgaattagataaattattaatcttactgtgaataatccgcactcggccatcttttcaaccttgctgcatgttctctctctctgttttttttttttttttttgagagagagaggggtgggggagaccagagaaa

SEQ ID NO: 113256 - DNA, 677 bp, Setaria italica
  Intron number 2 from transcript Si005673m (locus Si005673m .g) derived from phytozome v7.0 (chr-ID scaffold_4; pos 33 771046 to 33771722 reverse strand)
atactgatacgtgagtttcttatccaacttctgaaatcttgctcccagacttgacatcttaattacagtgagtcctagggatcagtttacaaggaaacgacaatgcattttcttgtgttttgataccaatttctatattttttggaacggtaaagcatatggcatgcctgaatatcttagaaaacgtgtaacatgtgtatgatatgtgtagttgctgtcttgcaagattatgagataattaaatttggttaagacaaacactgccagatgtgcgctccacttcccctggtaaaggaaactgtgctaccttagaattggtgccgtaaagtggtttgatgtacacctttttataggataggcaaagtgtagacaaatttcattaattatttatattttgtgacttgttgcatttttttcatatgggttggttgatgcctggttggacaaatttgtgtaacggagggagtatgcatgtttgtatgtatgtggggagaacatactgttatggaatactgttgtgatactatcatttatgttgatccaaggaaacatttaaagcaaaccttgtgggtgtgctccccttggatttttcaaaaaaaaacatttttctaatttctgactatgtccaaatttgattgccagctgcaagagttgtggtcagcattctgttcgctgcc

SEQ ID NO: 113257 - DNA, 1016 bp, Setaria italica
  Intron number 2 from transcript Si007077m (locus Si007077m .g) derived from phytozome v7.0 (chr-ID scaffold_4; pos 10 540630 to 10541645 reverse strand)
tcatcaacggaggcctgggacccaagaccataccggttagttttcgaatctgaatcttggtagaatcatggttagtttattagttggctcggtgtttagtttgatcgccaaaatttctgtacgtgaacctggcagaaaactagaaatatgttgatatcagttagctctgtctgccccactctccggcaaagcgattcagttcttctgcatggcaggaagaacagcctttagtgattagtgatggtttagacgtttagagctacgatcaactgttttgggtaaggtggcgtatgaaatcttaacgttgcttcctgtttctctccggcacaaccccagcttgtggcctagtacagtgatggtggcgtttgctcctcctacgttcaaattcaaacgatggcatttagagtatcgatgtgtcctctgatataaatatgggaccactagatgttcatcatctcgacgatattaaaatgcatgaaaacatattcaaacacattttatctacttttacccagtggtcagactttcaagagtttgactgcgcagatcctgaacataactctcgaatctcgaaacaagggagtaatcttttaatcaagagtcccaaacaatgccatataattaaagatgtgctgaatgggaaaaaaatccttaacgtgaagatacacacatgccagcacacattacacctagaacgatgcaacctttttcatcagaaaaaggaaaacaaaaaggcaggtataaagctgcgctgcatatgtcttatggcacatatacctagcactgcattatttccaccgtgaatgtgaacactcaagacctacaaaagcaaagctaacacctttaggttatgttttcagcatagaactctgaaatcgtggcatacgtaagtgcggatcaattcaggtgtaagttaggatccccatatctgtttttcttttctgatgctaactcatttccatgttcctcgtgtcactgaaggagaacgggaagaccccacgtctcaagctccccat

SEQ ID NO: 113258 - DNA, 719 bp, Setaria italica
  Intron number 1 from transcript Si029301m (locus Si029301m .g) derived from phytozome v7.0 (chr-ID scaffold_2; pos 44 472893 to 44473611)
tggtgtccgggccacatttcgaccgcgttctgcaggtattgagaatttgggatggttgcccgggctgtttgctttgctgtactttgggttcatctattacttgttcagagtacatttgagcaacttccatgtccttgggtgtagagtgttgaatttgatatggcctctaggtccttgggagtactaaatagccagcttaccttttgtttttctctataaaaaatctgaccaaagaaattaaatcatcatcatcaagcaattctaaatcaagagacaacaagacatcctgctgacctgggctgtgatggttcactgaacttgattgattgggatgacagttgaggagagtgaaatcgaacattaaatctaacctttgtacaaccgatacttcactaacccagccatacacatatccagtacttcctctacatcaccatagtgttgtttttgaaagtcgcatgtcactgtatcgccatagccttattgactctaactatgcttgcttttaggtaggacaattgcgatatccaggcctcataacaatttgaattggagatccataagaaaaatcaacattaccaaggaaaaaggagtagaaagcaccaattcttgtcaggatagtcttactcttatggttaggctttggccacagcgattccaatttttgcattaccaaccatactgtcttttatgaaatatgcaggacatctcacttctcc

SEQ ID NO: 113259 - DNA, 847 bp, Setaria italica
  Intron number 1 from transcript Si032061m (locus Si032061m .g) derived from phytozome v7.0 (chr-ID scaffold_2; pos 35 006387 to 35007233)
cgccaacctcgtcgccacgtccctcgacacctgtttgtctacttcgatcgcttccgtttcttcttgcggcgggtaaagtaaatgtgccttcgctacagcatagttctactagcagttaacaatgctgatccccttttttgaccttttgcgcctttggtatgtgcgttaatgtaactaggaatggatggatgcattagaggatatgatctgctaaatttgacgattgctgtaaaacgtagcttgagttggttaaaggaggattatgatcatccgtctgaagcaatcaagcaacacctctgtagctttcatacggttattgcacattgctggcttgtggcataacatatccaccattacgttttttaggcagaaaaaagataaagcaattcaagcaattagtttggagaccagttgaatgaaaataaacataaatgaaccagcaagaagattagcatttagcgaaagagaaaatgcaccatataaagccatctaataaatctgtcctgatttaactctacataataagtttttgagaggaagatggtagccgatcaggccacctaaactttgttgcaaaggaataatttaactctacataatcaccactgtttatcggttcctttaggaaaacttatcatctttcaatagtttcccagtcttgtatttgcttcattctaaatcacatatagccttgttgatgtgcttaattaccttgtaagtttaagtcatactatggtttttgtttcttgtacattgggctgatagacttatctactctttctgcatttcctgtgggaaactctcgtttgcagaggctctgaggggcaagtacagcaaagcagagtca

SEQ ID NO: 113260 - DNA, 915 bp, Setaria italica
  Intron number 1 from transcript Si031874m (locus Si031874m .g) derived from phytozome v7.0 (chr-ID scaffold_2; pos 68 82478 to 6883392)
cccgtcccgttccgtcctggcggatcggctcgtcggtgcgatccccgaaacccaaatctctctcggtgggcttctgggatgcgatcctgtaatgcatccagttcgtcgctggatttgtcgctggctccgctgccacgatttggataatggcatgaaattccccatctggcgtaatgtagcgatataggtctccgctcttttgtttgatctgaaagttggggattttcttaaatctgattcggaattgttgtacttcgtccaggacctgagagatggacgcgagcaggcgccagagcgggattcagcagcttctggccgcggagcaggaggctcagcagatcgtcaacgcggctagggctggtaatgttttcttatcttactgtccagctaaggccattgcaaatctagcgtagcattgtggagcaagttagctgagtacgagttctggatatgttgaccagagaattagagaatgctctttctttatcaacaatgtttgttcccaatgtaagcgaacatgcatgtaccttttgcattttgatgaagtgcggcataatcagcatctcggtcatggctttgacttgggcattggtgttgattttgcatatgttaccataaatcttgcacatctttcagcctattaggccatatcatctcatccaacgttacatgccagtttaatctacaaatatgcattcaacaatttttttgagcaatttaaagttgggaatttcttgtctttgctcaattagagaaaccgtattgttgcaaaactactctgggtatcatgaatagctatgtagatgaaaagcaaaaggatctacttttccccatttgtattggctgcaacgtaaactcaaatcttttctgtatccaacagctaagtcggcaaggcttaggcaagctaaagaggag

SEQ ID NO: 113261 - DNA, 1061 bp, Setaria italica
  Intron number 1 from transcript Si029483m (locus Si029483m .g) derived from phytozome v7.0 (chr-ID scaffold_2; pos 14 194335 to 14195395 reverse strand)
gcgctgctcgcgttcacgcaactgaacttgactgggtgagttattttcttgggttttgtccccgtttgttttttgtatgtatgaatatagatttatagagaaatcagctcactatgttcggttagtttggcaaacaacttgtggaagaaatgtaatttttttaagtattcctgggatatttgatcaacggcagcttgcattctagatagtggaaacaattttaagcattggttccaacataatgttatgggcgatttccatttagcctctggacttaatctgctgtaaatttgattgcatgttttagagtcactttaaaatttgctgattttagagttataaaattttgtaaaataaaataatgttgcagtctgccaattaagacattgaagttatttgtcctgttcctgaattttgacataggaaacaaaaaatggaaattgtgttttgccattcacaattgttgtcatactccttgtacatgtcaggaagatgagtgtacttggaagggagctatgggtgagggaatgtgatgtagttagataaatcttgtggggactgtttgtggcttcttgcctgagaagcctgcttacaggaaagattgctagagggtgtcatggaatcataaatagatgcatgcaacagagtttggtgttcaaatgtgccctagtgtcccgtttacacgaatatctgcaggttcatggtctaacaatactgtttgagctgtaattgaccatttcagcttgtgagagttattttttttaaaaattgtatgcataccatacaaaaacaatgtataaagaaaaaaggattagctagtgtttcaatagaatgataagtacattgtattttgtctgatttcacatctagttgttaatacacgcttttgtttattacgaatgatatgtttctatcaaagctgtaaattgcaatctgatttaccttttcatgttaatgtaaacctgttggattttttggagatatagttttcttgatatatatttgcttttcataaattgtctttaggcctccaagggagtttcccacttttcctttctgga

SEQ ID NO: 113262 - DNA, 822 bp, Setaria italica
  Intron number 2 from transcript Si029372m (locus Si029372m .g) derived from phytozome v7.0 (chr-ID scaffold_2; pos 37 361814 to 37362635 reverse strand)
caaggtctcccttgggcaaggtattccaaactgaaattgtctccacattcagatgtttgcacctcaatttcttatgtggaagaactacatagcgattgattccgtattaacatgattagtgaactgaggggagctaatgatacatggacgcaacacatattatttatagcatggagcttaatgtgccataaaatgatgatttggtaaatatgcatagagctctgctgttgctgtagacctatagattttccatttcaatatgtgattaagaattgtgttacaattcatcttgcgtttctgtggtgacaataggatgttagaaaagcatgtacagtgtgttaatacctggttggtggtaactctgctagcattcctctgttttggcggtcagtagtgattccagatcacggattcttgattgctatttgaattaatggatctggtagagagagcattactctcccagttggttatgtctaatttttgagtgaattgctactgttcattaagcagatgattcggtaggtataatatttcacgattggaactggacctagagcagtctgggcttctgtttgggagatgcaatatggatttctattcattttcccttttcaattattaggctccttttagctgacgcagttgctgcttgtgcatcttctgaagagaaaattgcatatctgtcacttccttgaacccaatctaggatttgctattttaaaaacatgaactacaaactttacccaagcctctttgaactatgaaatactggttttcttaagcagttcttttcagtttgtaataggtggtggcagtaac

SEQ ID NO: 113263 - DNA, 725 bp, Setaria italica
  Intron number 3 from transcript Si033663m (locus Si033663m .g) derived from phytozome v7.0 (chr-ID scaffold_2; pos 30 030018 to 30030742 reverse strand)
gtcgtcggcagccacggctacggagcgatcaaaaggtctgtgacatctcaacgccttagtatgctctgctctgctctgtttatgttctgtttcccaacttcacttgtgattagcaactggcaaggagtacagctaatgaaaggaataagttggtttgctcagatcatgagattactttgacgccaatactgttccagttaatatctttgctaatgtattatttggtataatggtatatgtccaaccaaagtagaataattagagacaagcataatatatgaaatggctctgtcccggtacagtcttatcttcaagtcatgcagcaaaaacttgtaagttccttttttactagttcgcagctctaatggagtatgcagcaaaatacgcaaaacttttttcagattcaaaaaaatgtttacggttgaagatcaaagagctaggcttgcctgacagaggccttctagaattggggcaaatactaaactgtttagaagtatttgtaaattcacttttcaaaccacatcttatatggattttttttatttcactctccatgtgcatacaggacaataagtcactgtaatgcgcgttgccttaccttgaagactgcattcttttccttctctgctttatgtttcttcttgtactcactttgcttcagtattactgagtcccttgaacctccaccagggctgttcttggaagcgtgagcgattactgcgccc

SEQ ID NO: 113264 - DNA, 891 bp, Setaria italica
  Intron number 1 from transcript Si029509m (locus Si029509m .g) derived from phytozome v7.0 (chr-ID scaffold_2; pos 37 091214 to 37092104 reverse strand)
ggttcgtcttcggcgctgggtcctcggctttccaggtacccgtactgccgagcgccgtgtatccatactccgattctgcgtgcgtgaaatcgaggactcgaagaaggatttcactacgtatacaattcgtggatgttcgcgatgctgttcttctgaatttggtcattttgtgatgcttttcttcataggtttctggaggaaatatataatatccagtgggaagtttttataatttctgaaaaaaagatcagatatgtagacgaggtaatgatatgtaaagcatataaaatttcaaagacgcaacttaacgatatgaaatcgacaacctacggagagaaaatatttttaaaaaatacacagcactttctgtccttttctttacttttgtcgaacaaagttagtctgtgagaatttcgcaaaaaaaaaaatagttagtctgtgagaagggagttcccatccggtttctttttaatataaaccagtcgttataactagcatttttttttatgctagcacatggttggaaggggccatgtactgattttaattcagagtttactgatttttttatgtgattcgactacaactgtcataaaatttgacactagttggctaccaaaagaaaacattaccaaagatttctagatatgtcagcgaaagaatattgtcactggtacaattacgaatcaaatgaaatttggtcacatttgcctgacccacggtatggcgacatttggctctactaaccaaacagcccctagcgagtgcttatcactttcatgtagaatgggtcaactagtcctatataaaaaagaaactttcactttcctggaattttgtgctgaagagctaaaatttgaacatattaggtggaaggagctgctgcagagg

SEQ ID NO: 113265 - DNA, 786 bp, Setaria italica
  Intron number 2 from transcript Si026961m (locus Si026961m .g) derived from phytozome v7.0 (chr-ID scaffold_8; pos 28 612436 to 28613221 reverse strand)
tttctgtaagtaaggtatgatggttctatgactttttttctataaatggtttagatttgaatatattgaaagcagtttgatactttgatcttcctaaatgtttattaattgttttaaatagtgtgctataatgcttagcagacaggagatatcagcctgttgtgtgtagtgatagacaagtacaaatgcagttaggttgatatgatccccgtttttttttttttttgcatattctagccctgcttcattttgaatccttactcgaatatgttcttttggtctaattatgagtttgtgtcatgtttttgtgaataaagctgagcatatcatggccataacaacaaaaacttttcattgcagtgcttccactgcactatttagaatgttgattccttttacttgatatttctattttcttttctgataaaaattggtactcaataggatttataatgaccatgcagccagaggaatttcgtcatgaaattcgaagtataattcgtgaagaaatggaaagctttcttagaacccgatctgattcccctcagaacttcggtaaccatgttgtctttttctttacttaaatatcggtgttatgtctctcttgacttgccaatacttgactaattggacctctacaaatatttcagcaagtacaactgaaggtagaaaagttgatgtggctgaccatacgtcagtgaaatccaaggtgtgattatttttttcacatcttcattttctatgcaagtgctggttttagtaacggtttgtttgctcctgtaggac

SEQ ID NO: 113266 - DNA, 435 bp, Setaria italica
  Intron number 2 from transcript Si006107m (locus Si006107m .g) derived from phytozome v7.0 (chr-ID scaffold_4; pos 16 339899 to 16340333 reverse strand)
ctccctcaccaaccaccctggcatcatcatctccggttagtgtttttcttgttcatttaatttagtggattggttaatgatttgataattttatgtttttttagggaaaagatccttatactattgattcaattgtagccgagaaagtggcatgttctgaatggattgactttgaatcagataatgacagaagaattctattagatgacgagaatcatcaaaatcaacatgaacaatacaaagtcgatcaaacatatgactatctcccacaaggtatgtttctatgaaatttttattcactcttttgttgtttttaacttttaacatcaccataaattttttgattacttgcagattatgaaatgacagacctggaatactgtgctcaaataacaatataaacatctttggaatctgatatacttgtgaagatag

SEQ ID NO: 113267 - DNA, 900 bp, Setaria italica
  Intron number 1 from transcript Si026067m (locus Si026047m .g) derived from phytozome v7.0 (chr-ID scaffold_8; pos 32 421399 to 32422298)
cgccggagctgcggccaaagatcgtcaagccactggtaacacaacagcctttcatcagttctttgctttggatacccatgtactccctcccttccaaattgtaggtcattccaactttaatggagagtcaaactattttgtgtttgaccaaaattatagagaggattacaaagatttatagcaccaaatagatatactatgaaaatatatttaatgacaaatctaataatacttatttggtataataaatgttagtacttcattgtataaatttggtaaaacttgagatgctttcactttcaagaaagttagaatgacttataatttggaatggagggagtatgttttgttataacttattttatcattaaaagtactgaagcatatattatattttgaaatgtttccactaaatttgtaaataagactaatgatcaaacgtttgtcagaatatgtttaaaaatggagggagtatttagaaatctaatcgtatgtatttgctatgctatgcaggtatatattatttgtgtatgatcatgaacagagttatattgatgaaaaaaagggttgatagtgagtgtttgagcacccttttttgttctctttgaacataagatggaatatcatgaaacataggcccctttggtgccgctcttgctggctcctgcactactgctcccgaaaactattcattactgtagagctgctgtttttcagctccttgctctagacaacgtggatggaggagctgaaaaatgtgcgccctaccctgtcttcattggtggcatgaggatgccgctggggttcgaacctgcaggttcgaacctgggctggcacgctccacgcatatgttttcctctaaaaatgatttcttggcatatgtttcaggcattattcagc

SEQ ID NO: 113268 - DNA, 958 bp, Setaria italica
  Intron number 1 from transcript Si031140m (locus Si031140m .g) derived from phytozome v7.0 (chr-ID scaffold_2; pos 81 70048 to 8171005 reverse strand)
cagcagaaggtaaatatatgcacggatcagccatccatttctttgtttctttcctttgattggcttgatctgaagttcagaaggatcgaccgttgtcctagaaacaagaacagaaaaaaaagaacaaacatcactctcttgatgtattctctgttttttcccttctttattcactctcttgatctattctctgttttattccttctttattcaaagttgctaaatgagattggatggtcgatttgagggagaagataggagcatgaatgcaggatcaattgccgagcttaagcaaaaaaagttgtgcttcaaatcgtgataaagaaatatttcttcatattccactacttggtcaatttcatggcatggaagggcgtctgcatttggaaattgatgcttcctgactcctgagtacctgactgaagtgctagttgatcacagggtactctcgtactgaggaacggtagcaatagtttagttccctgcgcaatctctgtcaaaactcactacttgattaaaagaaattttacgatttggacttccaggaatcaggatttgggatgcttccgcaatccaacttaagaattcatactgagcatgatattaagtgagcatcacatagcaaggttcaaataaagctgaagtccaacaactcaatataaccataaggttttgcgagagagtaaaaacaaaataatttctgaactttgtttgtgacagaaacctatttttaactctctgtattagactgtactacaaaaaacaggaacttgttgacagatttacaggacatcactctgttaccaacacatccaatttccatgcatttttttttacgttaaatccccgtaccattgctacaaaaccaacaagccctctgtttaatacgctctagtaggtcgatcatatataccagtttagcatcgcctcaccgtggcacatttaccaggtattcagc

SEQ ID NO: 113269 - DNA, 703 bp, Setaria italica
  Intron number 2 from transcript Si030216m (locus Si030216m .g) derived from phytozome v7.0 (chr-ID scaffold_2; pos 11 348603 to 11349305 reverse strand)
cccctatccatgtatacttaatatactaccctcctttcatgtccttgcatttattgcttatgatcacctgtatgcctgcttgatagattcactgatttttcgcatgaatcaagtgttctggtaggtttatcttgcatagggacctaatttcacatagatgcacagatgttttgatgttatgtgtctaattggctactccctatcccaaattataggtcgttttggcttttgtagattcatagattttctatgaatcgaaaaaagccaaaacaacctataatttgaaatgaagcgagtacttcactgatatggaaaagaagtggttttctttttgaccgtcaagtttgtgtgcttctgataaaggcttgaatatattagctaatcattttgcttatctatttatacttgtttttaaaaaatgctatttaattggctgaaatgtttgcctgtcatgctattaatgaaaatattccatttagtttatagtgattattgcattcaagaccgtccaattgttgcaatttgctgctctggttacatgttagtttttttcttcgttttgttttttttatttttcatgccaaaaaggtctatttatttaattgcattcgattctatcatcttcctcatacattatgttcttatgttttctcttatatgttttacagactcaaggttaccaatactcaggtgcttttactgt

SEQ ID NO: 113270 - DNA, 819 bp, Setaria italica
  Intron number 1 from transcript Si028928m (locus Si028928m .g) derived from phytozome v7.0 (chr-ID scaffold_2; pos 36 950042 to 36950860 reverse strand)
ttcaggaagcaggtgaggggtcgctccggatctcggtttctgcggtccggggatcctgcgtagctgctgggagattgatctcggcctctcgggcgagcgggagggataaagttttcagctttgggtgcaatgctttgctccggtggctcccggattgggttgcgggtggttgcgcggatctgcccttccttttgggttgtgctgatggggaatgagggcggagactctgatcccttgcggtgtaattcggtctccaatcaattttgaattaatagtgtaggacctgcaggtttaaccgcttcttttaaccgttttgtggactgtctgatgattgttcacgagtgcactttgtgttgttaggctgtactgatgcgaacacgacttggaactttgccctttaaaagtttagattctctatatgtgttctggtcttctgattgctatttctttttggacagtttgttgtttgtttcgatgcgaattaggtagcgcatcttgcttttcaatgtgtaaatttggcatgcattgtgatcatttggtgtacatttttggaaatgttccattaatttgtcagttgtcgacagaaaaagggttgccttaattatgcaaggagtatgaggagtcacaaattgtttgtaaagtaggtgccttcgatttattcatccttaatagcctattcaatttcgttatgaagcgtcatattgattcgatgaggccaacctaacctttgtattatgtttggggatctcgatattaaattccagtatttgcttcctgtggttcatgaacattatttaactcgtttccttgcattaatag

SEQ ID NO: 113271 - DNA, 843 bp, Setaria italica
  Intron number 1 from transcript Si008380m (locus Si008380m .g) derived from phytozome v7.0 (chr-ID scaffold_4; pos 37 564434 to 37565276 reverse strand)
ttggtcactgcccggtggtgccggtgtgggaaaaggtgagggtttttggcgggaagctgattcacaacggacttactatagtctaggggaaaacgtgcgccatcatgctccattccgttttctatattcatgccactcttcttttttgtatatttgggaactatgaaaatgggacgaaaatggaactctgtgagtaggtttcagactatgaactaccaaatcgtgtctatgttgtgtgtttaactatttcggacttgctttgtgagtcatgaacggtggtcgtcattacttgaccaattgggttgtcacttgctgtcgggtcagtgtttcccttttgtaaatcggttcatattggtttgtttataatatcacaggaactcgtgttagttcccatttctagtcttcattcctgttttgaatttcgttctcttgacaaaatgaaaataagagatgtcttttcttgtccgttccggttctttccatccctagaccctagctagctacgagagccaataaaccaagcccatgcggcgccaatgtagtcaagtccagtattctagtggaggaagcacttgctagcaccgggacctttttaggttaccgaatgctatcatggacgattcgtggaccgtcaaatgctccaacatgttccagtagatgtgattgatggtcatgccgttcagacttcgtagccatcgcgcgttcacttcccgatcaattcacaaaccattatttctctagttgttatttgttagtaacgcatcacttcccgatcaatttacttcccgcgttccgcgccatcatttttcaccaatggctccgacgacagcgctactgcttctc

SEQ ID NO: 113272 - DNA, 964 bp, Setaria italica
  Intron number 2 from transcript Si006410m (locus Si006410m .g) derived from phytozome v7.0 (chr-ID scaffold_4; pos 38 669091 to 38670054 reverse strand)
ttgggatactcgtcgacaagctcacataccttcaggtcagctactatcatcgccatgtttttactgataatatactggatgagtaaacaatgaaatggagtgttggagaaagttttttgtgtgtgttactatgacattgcttggattgcgtagcggaaagcaaatgatgcttccaaaagagccattcaatatcaggaacacacaaccatactgtaaaagtagacaaatgagtcgttttcattaacatgcatgtgcgcttgacatttgaaagggataaaaaaatcatgtcctatctgttacatagttcctggctgaagaaaaataacttaatcttccaaaaatatgattcatatattgaaagtaaggatggaaaaaaaagttgggtgcaatcaaaatcaatgaataacaaactttctaacatgttgtcataagttaaaaattattactaacaaatactctcatcattttaagtaagtatgaaatgtatccacaacgtttcaggtatagcttttacaattgcttatttgaacaaatgaaatagaatttaacatattgtttattaaatcaagtttaatacaacaaaaagaagtggaaattgcattatacgccatgttgttgcccaagacatgtcaatagtgtggccatgatctggtatccacaggctaaaataaaagctcctatgggtagaaaatggaaggggttgttaagagcccatggttccaaacctaggaaaattttcgtcaggtgaaatacaatgaataccacctagatttgcaggccgaaaccaaaaattttttctaggaaacagataaacaaccaaataattaggaaagagccctaaaaaatatctggaaagaaactgtgaaatgaggggaggggccagagtacgaagaacttactaccctttcaggatgtatgattaaatggctctaaacaaatgtataactcttcaggttcttgggct

SEQ ID NO: 113273 - DNA, 549 bp, Setaria italica
  Intron number 1 from transcript Si007621m (locus Si007621m .g) derived from phytozome v7.0 (chr-ID scaffold_4; pos 12 722294 to 12722842 reverse strand)
tcgtcttctacttcctgcagggacacctcgagcaggtaccctcccccgtttccaccccctcctctctgcttccattggagttagctccgcatttgacatttccatggacgatgccctcaatatgttcgatgaaatgggtacacagtacaattttcttcttttcccgttcaattttgcttgctgttttgtacagtccccatctctatcagttgtgcttgtatattcaggttcaaaatttagagttcaatagagagattgacatgagctctatgagttcagcggaactgcaattgttcagtgcaattgattcaatttgtggtgtagagatgtagtttagagaaggaaatcaaaatatgttaatcaattcaaagaatctactgttttttgttaagcgaggcatttgatctgtgcatactattcatctatctattcttttgttggtagaaagggatgttttagttggtagaactgcttagtgttgtatgaataaaaactgcatcttagttaaccatgggcttactaaatgcaggtcaagtgttggaagtatcc

SEQ ID NO: 113274 - DNA, 690 bp, Setaria italica
  Intron number 1 from transcript Si006592m (locus Si006592m .g) derived from phytozome v7.0 (chr-ID scaffold_4; pos 32 026133 to 32026822)
cgccgcccttcccgtccttccagttcggtcagtgtctccgcgtactatataccctatgggtcgggtggtctttggctcttcgctactactagcttcggtacccgatgtcttgttggttttttgtttttttttaaagcgcaggaggggcaagcccctactggatatatattaaaaaaggtaaagaacagaattacaggctaggagttcaaaacgaaactacactaacaaagaaagaaaggaagaaaaaactgaaaattacagggattgaacccaggccgtcatgctggatgccaaagatggttttgctctcaaaataactaaggaaaactcagagatgaacttccttcgacaagaatcaactgaggggtcaatgttattgaacaaccaatcattcctcgctgtccagatgcaccatgacattaagatgataatttccatgaagaatggcactgccagcttttgtcttgctgttgtttcgaacctgttttattgtcttgctattcagaaattgttaggtgaaatgcccccatttagttcgtgctcctatgcaattgtacaaaagttgctatggttagttgtgatttatgttgaattataattctccttagcaatcacactagttctgctgctttgcatctgtctaatactgaggaagtgagagtttgtaagagttttgtgtggattgcaggg

SEQ ID NO: 113275 - DNA, 658 bp, Setaria italica
  Intron number 1 from transcript Si029686m (locus Si029686m .g) derived from phytozome v7.0 (chr-ID scaffold_2; pos 32 887449 to 32888106 reverse strand)
cacgccgagtcgcagaaggcgctgctccagatcgagtagggttcttctctgtgtctttttttcctgtcctgttttctggtaatggtgtgcggttacttgggcacggcgtacctttgcttagatgtgagctttcgtgtcgatttgtgccttcaactagatttgttccatctgattagcaaaaattaccccttttacgttgtttttcttgcgcggtgcaggtgtacttggccaaactggtaaaatgtgattgcgtttgttctctgccagtggaggcagtactttttaaaaaagcctttttatttgaataaaatgttttgggggagtagcccagtaattttttttgttttgcttgtattgagggactgaggccttctatttctgaatgttattagcatccactgttttgaacttttttgttttgggcgaaaagatacatcttttgtggtctataatctgatttgcctctgtcacatttgatgttcacctggtgatcttaagagtagttttgtctgctttaatgttcatctatttgggcacccatgttgtttattgcagtttatggacgactatttgatgtttgaattgttcactttaagttgttttctaaaaaatgttgtgtaacactggttttgcagggataagatacgtgagtacaaag

SEQ ID NO: 113276 - DNA, 1005 bp, Setaria italica
  Intron number 1 from transcript Si031205m (locus Si031205m .g) derived from phytozome v7.0 (chr-ID scaffold_2; pos 47 884785 to 47885789 reverse strand)
tgaggtgagggcagaggcctgtggtctggttggttattcaccatttggctgattagagattacgccttactgttgtgttcaaggcttcaggcatatgtttatgtacggaatgattgattggctgtgagatgtgatcatagctgttgccaaatttcatctttgtcagtgccaatatatgttttctgccttctgataaatctaatggagtaattggatcagattacttgttgaattacttaacttttaaatggttgctatggcattatacagtatgctgttcataaagtgaagaaatttaacacacagaaagtaagttaattgatggaatatgttaagacttcattcaattggaaggcgtgatttatcctatgaatgaacatggaacattatgctccacttatctgttcaaggcttcatacaatgtgctaaatagttttcgatggactgattcacttcaaatacagatcggattacctcctaaatcgcactaaattatcaagcaaagtaattcctgacatggaattctgctgggtgattcatcatttgaaaattttctgtttatgtatgtgaagacaacctcaaattgagttgcataagttgggtttgcgtagtcatatcatttaagacgatcatccaatctgtcttctttttctttctttctttctttttttttgtgaaatggtgatcatccaatcttttaatctggcagctttgataaatgaccatccttgtgcatatggtgggctgttatctagcatctaccatggaaatctgctttacagccatactagcaatgttacagccctaaatatccccagttgacagttgctgcattgtgctggctcttctgcattaagctattctattctgttacagtccatatataatatccagatgtgctaaataggtgtatttttctcatattgttgaatatggcacctgtagatgtctggtttgagatatatgattctgattttccatttccatcatgcttacaggtgtgcc

SEQ ID NO: 113277 - DNA, 794 bp, Setaria italica
  Intron number 1 from transcript Si028468m (locus Si028468m .g) derived from phytozome v7.0 (chr-ID scaffold_8; pos 71 11338 to 7112131)
aaattggtgtcttgataaccgcttgatcaaattaggcatgtccacatgtccttgaggttttagtgcattagttaatacagtatataaacattcatttgctatgtgagcaatatccacgtttcctgcttatgtgagcaatatccattggagtctggagaagtggaatcaacagaaaggccagagttgatgcattgaacataaaccattagagaagacatcacatggtacacatagtaacatcaaaaagttaatgtcagaactcacataaaaattaacaattattgccgagaatattcttaactgttgcaccacatgccttgttattcctctttgtcagggctactaaattgctaagcatggctaccagcaaatagtagtataaagtagatcccatcaaaagatcaaatccatatttataatttaatactcacttcatcatgtttggaaggagaaaggaactactcacaacacaaaaacaaaaggaactaccaaatagctagcatgttgcggcttcctgtgctgccctgtttggtgcattagatacatctaagtatttgtatataaaatcctagcacatgactagctccttataagttttacttgtttaactatttttttaaaagtgggtcttgaagttggcagaactaccataggctattgtaactgctaaacatgaaacagaagaaagactgcaattatgaacctcaccaggcaatgaaaaagatcttgcttttctgcacattctcaccaggcaatgaaaaagatcttgcttttctgcacattctcaccaggca

SEQ ID NO: 113278 - DNA, 846 bp, Setaria italica
  Intron number 2 from transcript Si030978m (locus Si030978m .g) derived from phytozome v7.0 (chr-ID scaffold_2; pos 44 822683 to 44823528)
gctccggcgcccgcggaggctgccgcttccgaggagtaaggcgctggcgcccgcgttttgatccaccgaaatttgctgttattttggcatttcgttggaaattatccatggtctagtagtatccattgtctattagagatgcgcgtgagatgaggaactggtgtttgtttcatggacctggtgtgctgctaaaatattaagttataaaccgtgaatcttgccattgcatatgtataggttgtgcatgaatgtttgcatgcgctcatccattctggttttcttgttacgaagtggttaatcctcaagaatgattgtatcaatagggcttagagcttatgcttttacccatttcaatgtagggagtatacttgaactttgttagttatcgggctctggggcgggattgttttcttgatcaatgaataatgcaggtctgttaaactatatatttatcatatacagaatcaacccaacaatgttcattttccatgcgcacaattatagaggagtttcagttgttaacttattatctaaacaagtcaaccacttgttgtacacaatacttgtggggttagaactgtattatttgatctaggacatagcagctggcatttcaatgaagaatacctaactgcaaggacagttagttgatacttgatagctgcatctgtatacttgaagatttgaagttaaaatttagctttgttgatgatgtgtaccaaattcgtagtactttgtggaacaccaattgcaaatcctcaatttaatcaattatgcagatgtaactgtcaccttcaatcacacagacttagcttttaacttctctttgtactgcagtaaatatcc

SEQ ID NO: 113279 - DNA, 922 bp, Setaria italica
  Intron number 1 from transcript Si007691m (locus Si007691m .g) derived from phytozome v7.0 (chr-ID scaffold_4; pos 23 037967 to 23038888 reverse strand)
agtgcgtgcgcagaacagctgccctgctcatccaggtaagagaaattgcatgattttcatctacacctgtgcaatcggcaaccgagacgtccatcaaaattgatgcaatcaaaagctcggcctaccatgtttagctgaatattcaggtaaaaaacaactgagaaccaaaagagacacatctgacaactgagtcttcggcctggtttggttcggttgcttatttttaagcacccgtcacatcgaatgtttagatactaattaagagtattaaacgtagactatttacaaaatccattacataagcggaggctaaacggcgagacgaatctattaagcctaattagtccatgatttgacaatgtgttgctacagtaaacatttgctaatgatagattaattaggcttaataggttcgtctcgccgtttagcctccacttatgtaatgggttttgtaaatagcttacgtttaatactcctaattagtatctaaatatttgatgtgacacttgctaaaaataagcaatggaacccaacgcccccttcttttgctcccatgaaatgcaccgccagtagtcctagtaatttactaatctagccgctagttctagtaatttagtaatccagccactagtcctagtgatttagtaaattaggggatgaggatggttcaggaattcatattgtaaattgtcattcgttattatcgagtaatccaagcaccttatcagcagaattctgaaggatgatgattattcggtaatctagtagttagttccccacgtgatgatcgagcaatacatcatcggcaagccaagaatgccaactcatgcttttactttgtgtttggttgggctcccctcacacatgttttcctttttgcaatgcagctacttgaatcccagtacagattgaagagcttgct

SEQ ID NO: 113280 - DNA, 798 bp, Setaria italica
  Intron number 1 from transcript Si032084m (locus Si032084m .g) derived from phytozome v7.0 (chr-ID scaffold_2; pos 91 23454 to 9124251)
gtgaggtgttctccatgaccgtcagagcaaatggggaatttttccaaccacttggtcagcctgcttggtatgtgttgggctgggtggtcgtgtatccagcgcaacttctatgatgcgcacggcttttgttttgtaactgaaatatatagttatggatatcattaactcttttatgtttgttgtgagctctatcaagaattccacctaaggtgcacttcatttagaatctggatgcaatacaaacaagggaaatgcttcagatacaacccattaatatgagcatgttagaatcaggtaatccaacccctttgataaataattaaacaccacccaagcaattttaaccatttgatctcctggctgtaatgtggttgtacaaatgggtggtgcgtatagcagcattcagccaacaatgtggaatgcaacccgtctggtctagtagtgtgtttggtttgagttggcctagacgaaatgatccatcatgagataatcctatgaatattggtgggatgactccattattaatatttacactagacatgtgcttatgaggaatcacatggtgatggatcaatgcatcccattcctcaaacgaaacaagaaaaatcaggaatgagatgatgattcatcccactcctcaaaccaaactcaccataactacctccaaaactgaactcttcatattactaataatttaccatttataaagaatttttttcgtacatagcctgacatatagcctttgttttgtacattcacctaggttaggaaactggagcttttagttgcgctattggt

SEQ ID NO: 113281 - DNA, 686 bp, Setaria italica
  Intron number 1 from transcript Si029360m (locus Si029360m .g) derived from phytozome v7.0 (chr-ID scaffold_2; pos 39 717673 to 39718358 reverse strand)
gcccgcgcatacgtcgcctttgacgtcctctacaggttagttcgtgcgactgtgagctctgttaatctaatcgcacacttgattcatttgccggaggtaatatggattctagttctagtgcagtgttacagacttaagaggcaacctaatagcagcattaactaccgagtgaattgatggctgatattgcgaattcaaatagacacagatacatttgccttgtgatgattaagctgattgttactccagccctaaaaaggctgattgtcactgcacatcaacatttttgtgttttaactggtaggataaaaactgtagtgacatggttacagtggttaagttccttgtaaattggatcttcccttataatttgactgtgcgtgcatagatatttgttctggattcctaaaggttatgtgtgcttaacacatcttgcaacctctgatctactccctctgtcccaaatcataagttgtttcggcttttttagattcatagactttgttatgcacttagatataccctatgtctagattatgcatctagaaaagccaaaacgacctataatttggaacggagggagtattatgttatggccttatttatttccgtgatacttttctttctaaggaaatattgcataaacttattgtgccaccttgataggtacttgcgttatttggact

SEQ ID NO: 113282 - DNA, 797 bp, Setaria italica
  Intron number 3 from transcript Si029339m (locus Si029339m .g) derived from phytozome v7.0 (chr-ID scaffold_2; pos 34 70385 to 3471181)
tacttccctcaggttcgtacatcatgacccatctgtttctgctatcctttttcttggcagggctgagtgctaacggaaatgtggttattgatcaaatagtaaaattgtttctgccgctcttgttggaatgttaggttgtgatttttatggctataccttgtattgctactagaatttggaaagggttgtgcctaaatgaagtccgagaatctgcttttgagggtgacatacactacaacattctgtagaaaatgtcgaacgctagtgctagcttctgtgaacatatttttggatgcaaaagatacttaacttgataaggaacaaaatggcaaatcaaagctgacttttgacattgtgataaagatttgttctgttgacacttggctggaattcaggatagcaatggaagtacatgctccatataatgtagcatacgcctatgcaaatgaactctaggaaagtcaggtttacattgtcttgtatccagaaaaagcatttacaaatgcccattttttttttgctgtagatccatctgtggtcattgtcttccttttatctaggtgtctttgtcatacatttgctatgtttgatgttactgtttttttaattaagcgattgcctcatgctttatctgcatcagactccatagtttctactcctttatctgcttcttttcctatcttaatgcaatgatatgcagttctcctgcatattcgagaaaaaatctgtagtttcttatgcttgtcccttttgttgtatcagttcattccgtactcatttatagagaaggaagctag

SEQ ID NO: 113283 - DNA, 334 bp, Setaria italica
  Intron number 2 from transcript Si033490m (locus Si033490m .g) derived from phytozome v7.0 (chr-ID scaffold_2; pos 22 04012 to 2204345)
tctgtcttgatttggagacagtgatagcaccaaaggtaacttcttagttgctttgaaatatatttgcatctttttagctgttacacacttcttttctacttttggtattcacaaaaaatgttatgatttgttaagctgctccataaaaatagtttgatttttcagacttgctcttcaaagctccaataggactaagtaattatttgtttctgcaaagtgtgctactgggatttagagctctgaatgttctgaagtcaattaatatgactcatctacctctatgcaaaattctgtttcaggtacaatttctacaagatattggtgtacggagtga

SEQ ID NO: 113284 - DNA, 1012 bp, Setaria italica
  Intron number 1 from transcript Si028812m (locus Si028812m .g) derived from phytozome v7.0 (chr-ID scaffold_2; pos 48 902561 to 48903572)
tgcccaccaaccccaagatcgaggactgcctctcggtacgcgctctgtccgtctgggtcagagtcacttgcttagttgcttttgcagcagccattcgcctggaaatgtgcaattagattctgtatcttgggttgagcgccagattgattcggacgcaaatgaaccactaactcagtgcttcagtagtgtgctgcatttgatagcagagccgttgctcaatctgagcaatggaataactttggattgcaagtttgtgctaaaatttacaatacagcttgaatgcaccgggataaataccagacctcctttggtctgaaccaaacaggcttagtctgtttcatatatttttctagttcggcagagctgtgcagagagatcattatatagacagccagtattgagggcttttattgagtctgctggtgtgacagagaggattgcaaaggtttcgcttgcacaattacatgaactgtattaatgaagttatgatgagaattgcgtagaacacctccaatttgggaggaaaatcatatatcgtgtgagaaacccaagtagctaaaatggcttgcattttttaggatgcaaattaaacatgttgggactgattattattttttgttatagtatcagaggtttattatacattttaacttcatctttagtgtggctgaagctgagtaaatgccatcattttatgaaatatgggttcagtagggtcattcttaaagcattaaagggccttgctctcttccaccaaatggatatgctgtgttgccccccctttagacctcttatatcctagaaaccactgttgtttatctgttgaagcgaattgtgaatatattcttctcgatatcgaacttcaaagtggtagcacaaaaatctgttaagtggactgttgatgtgtgtttatatcttatgatttgattctgccagtcatgaccttctgtcactgtcatgctcacttgttcaaataggttgtagcattacctcttccacatcgaccactctt

SEQ ID NO: 113285 - DNA, 847 bp, Setaria italica
  Intron number 3 from transcript Si032906m (locus Si032906m .g) derived from phytozome v7.0 (chr-ID scaffold_2; pos 50 21390 to 5022236)
tttctttaacactgtatgtgcttgctcaactccgaaagctttctttgtattttttttatctaaactgtagcattttatcataattcaaacatttgtgaggagaaagggaggactatcagtttcagcttagtagccaattcttctatgtgtgttatgtcataattctatttggcctgttgccagctttactcagtatgctacccctggccacaaataaaataagtgatattttggacaccaacacaatacccaaaaggtccagaacacaaagttgactagcagtttctgttgtaacttattatgaacctagtaaatatgatattatgatagtgtactttgaacaaagctacacatggttatggatatccaatttaaatgttaatagccagactgcatgcatcacagtgaccccccagtggtactcgttttttaaggcatggttactaaacctgttgaataagaagtgaacttgaagactacagtgatacaattaacttgcagttgcattcagtatataatgaaagaatcagagtcaggatttgggaatgataggttctgtaagctagacactgtgctccatttcaattgttttctgaaaggtgaatacttatctagctttgcatgagttgatgagtattcacaattatattagattattagtcctttcttgacaattctgcaacactccatgcttattttccttatactatttattaactttgtatgatagcattataaagtagaaccaatgcactgatactgcaaagtatgctgccttgtggcttgatctagtttactcacaactcttgcagaaagagaagaagaatttgcaggatttggcaggtgt

SEQ ID NO: 113286 - DNA, 849 bp, Setaria italica
  Intron number 1 from transcript Si007028m (locus Si007028m .g) derived from phytozome v7.0 (chr-ID scaffold_4; pos 60 9271 to 610119 reverse strand)
tcgcctacttcctcagcaattccctcgccattgaggtctgcttccttccttctgccccttgcctgtctatttgttgatttgtttatgggaatgctgctacttgccctcttcaaagagccgtaaatatgcttccttttgtgttgttatggtagaaaataccttgacggccatttggtacaatcaaactgaactgatagtccaaaataatcaacgacgattgaggggtctgcttgttctgtgattagaatgcttccacaacaaattttgctgctgtgctgatacataggtcccatatatttgttgtttattatttgttaaagaaacctcatcatgggtttcctaactgatttaatgtcaaatgatctgcatattttatttagaattgaagccgcgttagtgttacaatacaagttctctgaatgacctgatcattctaagaaattgggaacggattcaaatcaatttccgaagatacaaactgggaaatggaaagacctaactaaatgtatttttctactcatctgtttgaattttaaattttaacctatacaagcatgttttgtgcggaacattgtgtctagaactatcttgatgtaattacttgaatggttatttagtactagtggttttggaacattgtttaggggggatataaaattcacagcagatgggtgaggcattggtgatgacatcagaatttcggttgtttgtcatgacatttgcaagccgtagccctttatgacgtgtttagcaatgcagagttgatggcaatgctttgaagcaaacttattcctttgttttcttgctgatgcagaattattttagttgcttttttccattgccgatagt

SEQ ID NO: 113287 - DNA, 859 bp, Setaria italica
  Intron number 1 from transcript Si006589m (locus Si006589m .g) derived from phytozome v7.0 (chr-ID scaffold_4; pos 27 221186 to 27222044 reverse strand)
ctgctccaacggccgcctcgtcgtcgacttcctcggtactgtgctgtacatttcttgtttctctttctctcttgcgacgtcatccatggctttggccttgccaacatcagcatatgttttgttttcttttttgcgattactttttgccaagtatatgtgtgggcttcgtagtatctaattgagatgtccttgttgctaaaagtgttgatttgagtgtggctgtgtgggggagagaaccatgctctgacttcggtggtcaagatgaattgacctgttcagtattctactcccaacgcccaatttctcttgctccatactctgcttccctattctttatatttggtggagcaaagctaaatccaagtcaaattgataagttttattttctttttcctttttaaagaatagagaccagatggcctactataatttgttcataaaagagttgtccccccccccccccccccccccccccccccccaaggggtgatttcttcacccttcttgaaaagatgaaaatgagcgatagaaaactgctggtaaaagaactcctgctttggctccctgtgaattattgctgtctccgttctcctacagcaaagtgttgatgtcgattaaaggaccttttctttttctttattataaagatgggtcagaccacaaatctgttcctactgcaaccttgcaattggcaatatgttcctccctgcagcaacactgctttgtgaatcatgaccttgagtacattgtgcagtaggcagtaccagagtgaatgatgtgaatttccccccctttctgatgggaatctttggccacttttgcagccgagcatttcgggctgccgctgccgcctccgtcg

SEQ ID NO: 113288 - DNA, 884 bp, Setaria italica
  Intron number 1 from transcript Si028865m (locus Si028865m .g) derived from phytozome v7.0 (chr-ID scaffold_2; pos 51 59878 to 5160761)
gttcaagcaaccggactgcagcctgcagggaaaaggtgtgctccctcgccgtcattcttgctcctagatgctcttatgcaatttccgtttcgtttctcctgccattctgggagaaataggcgtcagattttgagggtacatgtccgcgtgaaaaagaaaattaggtcttgcgtattgctgctatttacttagggactgcttggattgggagttttggggtggtccaaatccttcggatttagcctaaatttgactaatctcaaatattcttagagcctagtagatcccacatgaaagaactttttgtagtcagtactcactatgaatctatgaatagatcccacatgcatcgtatgtatgaaaactatgaccaaaataaattcgtgtgctgatgctgataaatgtgtaacatttactctcctgatcttttgcagttctgtttccttgtacttatctgaaatttgattatacattcgattcaatctcaacagagccttcccgaagtagattggagaaaaaaatgtcagatatatcttaagtacgataatgcaaaaatttaatgtagatcaggggttaaggattcctgttgatggataggtctgacgagggccaattccagttcgattctgaaaagtagcatgcatttaagctgttgccctaacagagtctgtgtcagtttgggttacggtcagttcgctgggaggatcgctgagtttctttttatgtaaggtaaagctatgaattttgctagaagaacaaaggtgctagtgttttcatagtctccagcaatgttattctcttcttttccactacatttatgcatgtagacgtttctttctctgcctgcaggattgagcccacaaagccataagagagtacctaac

SEQ ID NO: 113289 - DNA, 1005 bp, Setaria italica
  Intron number 1 from transcript Si026182m (locus Si026182m .g) derived from phytozome v7.0 (chr-ID scaffold_8; pos 46 47419 to 4648423 reverse strand)
atcaggtataaaaaaaatccttgttttgtggaaacagagcaacttttcttcttttggttgttttgagcattctggtttctgttatttacacggacatgttagttagaaatcaatcagtactccagaatgtgtctgcttacctactggtttctgttccttagacatgtttttcaggctatattttagcactcgtgtcataatatgtgatgaacctgtgatgtaggcttcacattgtttctcattcagtaccttttcattctgtaagtgacatgacttgtagatgcaacgagattttaacttctgttctgccttcactgtgattagttgatagagtagcctttttgtaatatgttatcgtgggacatgattacatgagcattgctgaattgaggatctttgattgctttgtagctggaatttttttgtattttagttcagattctttctccttaaagattgaatatctgatgatgctgtattactgtcggattttccattgctgttagctggaattctgatttctgttctctagtcagacatgttagaaatcagtactccaggacgtgtcttcttatttggtctcaacattgctacctttgctttgatcagatgatcttaaacttcagaatgccatgtttttttttcaggctatttcctagcacttgggtcataatatgtaatgaatctgtcatgtaggttgcacattgtttaacatacagtaccttttcattttgccactgacatgacttgtagatacaacaagattttgacttttgttgtgccttttctgagattaattgataagtggccttttgtattctgttaccattggacatgagcattgcagaattttgtatctttgattgctttgtagctggagttttcttgtatttcagttctgatttttttcccttaaagattgaatatctgatgatgctgtattctgttgatctttcccttactcttgcaggtttttgtgagggatttcgttccgagtgcattggc

SEQ ID NO: 113290 - DNA, 751 bp, Setaria italica; identical to SEQ ID NO: 112992
  Intron number 1 from transcript Si006417m (locus Si006417m .g) derived from phytozome v7.0 (chr-ID scaffold_4; pos 33 420534 to 33421284)

SEQ ID NO: 113291 - DNA, 1009 bp, Setaria italica
  Intron number 2 from transcript Si008146m (locus Si008146m .g) derived from phytozome v7.0 (chr-ID scaffold_4; pos 16 73424 to 1674432)
cggtatcctcgctgaaacccactcatttctctgtattgggatcacgctgctgaagcccactcttccatttccaactgtagttgatgaactgcaaattcgacattgaattccggggtttgcttggacgcgtttagtaaattgagcctattgagatttagaggctgttctggcaagcatctcataaaaaaattagcatgcctgttcgattcacaatgtgctccatgagcaatgccggtcctgaaataatgtaaaatcttgtatcatgggtacatgtcactacttttgttgttgcttacactgtcgtttttggtacagtgtaacacactgacaccttcaagcacatacctatgtacacaagctgctcagcagtgggtaaagctgccaacggttcggtgtaaaaccagttttctcggtttggtctttgatctggttgagcctgatttggtgggaatcggttggccctgagaattagtttgtttgggttcagtttctagctgagattggtttggggcaatttagattgggtttcaatggtctgcgcacgtgtggcgaggaaacccttccagatcttcacgcccgtctctcccaccatgcctgacgctgctaatttgttgccagatgatgctaattaacgcaaggatcaactttccattgtgacatcgaatggcatggcaagcgtaggttgctgcttggtagacagtgaaaaccatgttcaggaactggtaggaggtagtagtggtggttttgttcggttggaagctgctcattagtttatatcagtttggttttaaatgagcgtcggttggtctggttgggtccacctgctgtgattaattagaaatggtttggtgcagctttggtttggatttcagaccattaccaactttagcagtgggaggcaaacatctttcttctctacacaaggctactggttgtgcattctaccttatctatttttcttttgactaatctaggcttcaaagggtctctatcggcaactggtcctctt

SEQ ID NO: 113292 - DNA, 607 bp, Setaria italica
  Intron number 1 from transcript Si006663m (locus Si006647m .g) derived from phytozome v7.0 (chr-ID scaffold_4; pos 30 752266 to 30752872 reverse strand)
cggccgcggcgactcccttcagggcttcaatctgtgtacgtttcacgggtctcattcccacctaatatgttttttttaacacgacttgaggggatatcgactggatttcatgtcgctgtggatgatattttggtcatatcaaatttctcgtctttgttcagtcaaatatggtcaaactggtggcgaaagcacatttcccttcttttaaaagaatacgtttcaaggaagatttgataaacagaatgaccaaattttcggtggcatactgaagaagagagagtccatcttagcacaaacaaaaaacattaataaaaaattggcactggtagtgaaatttctcaagcttgaattcatgtccggagataagttaatttatgacaggagggagtatacaggcacccagcttgtccatctgttctgctgtatctctgtacttatgaagatttttacaacttcccttacgaatttcctgaggagttgcctttggatctttatttcactaattattctgcctttatttattctccttgcttctaaacaaaacactaacacaagtaatcctgcaggactggcagagggaagttttcactggcagccatcactcttg

SEQ ID NO: 113293 - DNA, 666 bp, Setaria italica
  Intron number 4 from transcript Si031368m (locus Si031061m .g) derived from phytozome v7.0 (chr-ID scaffold_2; pos 46 791287 to 46791952 reverse strand)
gaagcatctcacggacgagagaggtaaatatttaatacacttgatttatgggtgcttgttgaaagatagatagctgccattcttctttctttctttctaatcatgtatctgctgtatctagttctccgtatggaatccacttactgcgcagatattttatctttaaaggtttctaaagttcataaataagttacttctcaaatgtatttggttgtacctgccaaaaatgtcagtgagatatagaagtccaataattaatcacttcctgttacttctatttgaatcaaaacactagtcttggataaattaacaaatactgtgatgaacaatgcactagggcaatgtattttacctttttttacatatgaatcaaaatgttgtttattgtactaaacaacctgctagagctatggattttacgtgcacacagctacatgaatttgagttcagttctcttttccatttgaagcattgttgttctcaacgttaatcttgttttcactaccaatcagactaccctgccagtaaacgaattaaccaagtcactccggaagataggctacgacgtggtgccttctgatgacgctggccgatttgtgtgcaactacgtgtactaccactctcttcggtttgcagagcaacacgggatcaaatcgctgtttgtgc

SEQ ID NO: 113294 - DNA, 829 bp, Setaria italica
  Intron number 3 from transcript Si029194m (locus Si029194m .g) derived from phytozome v7.0 (chr-ID scaffold_2; pos 34 42874 to 3443702 reverse strand)
gattgcacaggctgctttggtatctcctgacacaggtgttgttcgcatttggagctatgttaatcttttcattatcaatgtcagatatttgttttaaattttgatgttgtttcttactttagatatcaagattcgtactaactaattaaattgaaaaaaagaaggatacaaacataagaagcctgggataaactaggttaattgacctagccaagtttcacactaggtaaattataattataattaacacaattagaattgacttttgtctgtggaagagagtggccacatgaggatgctacttaaattggcaatatacgaacaaaaatttctctcacagaatcatttcaagtaggcatcctttgatcaatacatgtgatatgcatatcgtttggagtttgcatcaggttcaacacaatgtcacaaacagactgatacacattagccctgtcccatgttcccaaatatgtggtcactttgcctgctccatgttccttactgagctggataaaacttgcttttgatggaaatggcttcttctaacatgaattggtgatttagtcaacacatgtggctgagtatttcttatctgcatgaaatgacatagcatcgaaaccatctaaatcattggagttgtgatatagaatgaaatagaatggtgtgtgtgacactgaatgagacaaatgtatgttcatcatcacacaatagtttaaagaaacttaattctgcattatttttcatcacctagtgtattctgtttcaattttctgattttctcttactatcccatacagaattaccaccggtgtctacagcgattggttttgat

SEQ ID NO: 113295 - DNA, 898 bp, Setaria italica
  Intron number 1 from transcript Si029194m (locus Si029194m .g) derived from phytozome v7.0 (chr-ID scaffold_2; pos 34 44399 to 3445296 reverse strand)
cccccgggcatccgttgctttcctcactctcgttggtaaggaagtgcgccggcgtgtctggatgggtttctgtaggagcgattttttgggggtctacagtattttccatcgctgtgaggcgttgaatcctcgtcgttttttgatagtatggattatcctgcggtccgcccacagttttttgctgggcttggttaatgagtgctgagggtgtcaaaagcagcttttcattcgaagaattctgggggtgtaggtgaatccccatggttacttgtgtgtggcctgtggcctatagatgcgttgtttttggtctcaaggtcgggggtgctgggtgtggggactcagaggcgcctgaaattttgatttgtttcgtgtggagactgtgggaacgaaacaattctgggttgtgctgcggttgtcttggtgatgcttgtgagggaggtgaagtttcgatagggtttcagtgaggctgtgtggcgaaattgttagatgagactatgagagacgggtgaggttttggaagggtttaataaattttgcgcggcaaaagtcagtagatggctagatgagcatctatatccattttgtaacaagcctatttctggaaagtacctttgcaagtgcaacgcactaacgacagtgttgtcatggcgttttgcggtgtagatgtttaattggtagttagtaatgctgatgcaactgagtctgttatggctgaggtcgttacaatctctgcttcaggtgggatgcaagtaggtctactggcttgcagtgatatttggcaccctgtaatgattagcgtaattaataatgcttggtgctaagtgtttttcttgatctagttttttcatttgctgatctttttatatgcagatttgagcctcacactggatattttctt

SEQ ID NO: 113296 - DNA, 1045 bp, Setaria italica
  Intron number 1 from transcript Si006179m (locus Si006179m .g) derived from phytozome v7.0 (chr-ID scaffold_4; pos 12 323988 to 12325032)
accagcaaccggcaggtacgcccactcattcccttcccttcccttcccttcctgccgtgcgaaatcgaacaccccaaagttcaaaaccctaatacatgcaatttgtgttcggatctgaatgcctgtcgctggggagggtttggccacgcccgtgcttgcccaccacaaaatcaattcatcgattgccccttcagcaccctccccagatttgcccatatccatgtgcccattacttatgttccagctttcacaggcaattaatcaagaataggcaaacaaatcgtgatcaattaattggcaaacacccatagatcgaacgcagggaaaatatttcttgttcctcacgtatccacgctctcagaagcaatccaattaaggaatactgaatcaattcgtcgcaacaaaaacaaaaagaaagaatcgcgcaggagcagctagcaataggaaaagcgaatttgtgggatttgtctgcttagtaacccatgtgctaggcccttgccatacctctcatcaccgatggtttcttccaatcctctgtacctggtgtttcctgctgctaaatctcacctggagatgttgcgatgcttccattggcgagattgctgcagctatgagcagggtgggggtcggcgaggttcggggaaagtaagggcaatggcggttgcggcagatgcgagtgctatgttgatggggagccttgctggagtcgccgctactggcggcatgcctcgtcagagatggaatcacgaatgggtgtgtacagggattaccctaccctaccctcttatcaaacgggtatatatccataccctacccgtcttctaatggctgcacggggattaagcacgtgtggatttgggcaatggacaagggtatcgagtggcagtttatagatctgactatgtatttacctgctagcttttattttttttgcaaaaatttattgggtgtacatgtgcacccatgtcctatactggatttgagcattgatctctccttttctttttcagctgtctgtgttctgattctcctggattgaggggat

SEQ ID NO: 113297 - DNA, 654 bp, Setaria italica
  Intron number 1 from transcript Si028318m (locus Si028318m .g) derived from phytozome v7.0 (chr-ID scaffold_8; pos 93 1881 to 932534)
ctcccgtgtcaactaagctaaacagctcaaccaaggtaagagttcctaacttaatttgttccttacggtttcagatgttagatatctcgatcgatttttcataaggccaaaattacatagctgaattatattttctcagccattaatttgttcgttgcaaggtgcattagttatcgacgtttggtttggtgtgatagcatggtttgctgttagtagagctgcatgtcaccatcgcagttgtatgcttcaactgaaaggttttgtaacagtgacgctgatgttaatgtattcttgaggttttcatttcaacaagtgcgccacatgctagtgttgtgttacagaattcccttctgttttgacctcaggaatgcagattacattgtacttgatttttcatttttcactatgtgtctggtgccttgtgaacagcgaagatccttgaaaaaaaacaactctttctttgacctctgccatttcacatttgcaaaaaccactttttgagtagtaataagcactgagcatgtggcgaaattatttctgatttatccatatccagttcagtaggcaaagatgacactaaagtcagaggtgctagtatgatttttgccagcataatgatttttattttattttttttgttgttgaatgcagggg

SEQ ID NO: 113298 - DNA, 764 bp, Setaria italica
  Intron number 2 from transcript Si008147m (locus Si008147m .g) derived from phytozome v7.0 (chr-ID scaffold_4; pos 19 79013 to 1979776)
ccattgttccctaggacttgaatctaggcttctacgtgtgtaaatgagaaaataataatttaccatctgagaaacgaaatcacaaacttgtgtggttttgttgccgtcccaaattataagtcatttagtttttttaattaatagatattttatgcacctagatatatattatttttacatgcatattagtaaatggtatgaacttggaaaattcaaaacaacctatgatttgggacggagggagtagaagctatggtagagtgtagagatatagaaggagatgggaaacactgcacacctaatgagaggtcgtgactttcatatatatagacatgtgcaactcgtgttacaagaacacaataaccctaaataagaggcaacgggtgtacatgctctaagggagattatttgtcgtctatccttcttctagtatacctactgggatgcatatacccttaattatttgtgaaaagtagacaagaattatgtataggtcgaccttgaggctgtgaaagtcaagtactttcatcgcacgaagatgagtagtggattcactacagaaaacaatttgtgatattagtttttgatgatttgttagaaaaacaaaatgtaatgatcatgctcacagattgtacactagtaacacgtaaatctttgttgtggatgcaagtaaaatgggactgagtagcagaaaacaaaaatgaaaccaacccagagtcattctgatacaaacctggcatatccttacaggtaagaagaatttg

SEQ ID NO: 113299 - DNA, 404 bp, Setaria italica
  Intron number 1 from transcript Si030177m (locus Si030177m .g) derived from phytozome v7.0 (chr-ID scaffold_2; pos 50 13346 to 5013749)
cacgtgttgcgcaggtgatggtgtttctaggggcaaaagaaaatggtctaaagattaaaggtcaaaattaccgttcagtgaagctcattatgctccaatgtctgaatctaagcaagcaccattgggtgcagaagtcctgaaccctcactgaatggtctctctttcttggcttgatattcttgagattattcaagaagtcatgtacattttttaacaaccgaaaaggctcctcaggacggcaacgcctagacgatgacagcgaggcgagagatggatgggctcgtttgcgggccgcaaatctatttgattccccggcccaacaccgagtacgtccctctgaggctctgacgtagaaaggtctggtgtcagaggaaccggttgttccactactcccactgtcccac

SEQ ID NO: 113300 - DNA, 857 bp, Setaria italica
  Intron number 1 from transcript Si033158m (locus Si033158m .g) derived from phytozome v7.0 (chr-ID scaffold_2; pos 36 881054 to 36881910 reverse strand)
tggataattcacctgagctgcggcgattactcgaggtaagagctgcgtcgcaccagaacccgtaccccctaatcctcgtgtttttttctatatatggaagctcatgcatgtttctcgctcatctcttgtcacgtgtgtaataatgtttttcaattgaaacagtgcagcggcacttgtattatgaatcgactagtattgattttcaattcaaagtttcatacatgtgaggctgtgactagttgctatacggcgattcacgtaacagcaccagctgttggtactgaacttgtaatctgcgtactttatttaggttcaagattttgtagcccatgacaaatgtgacttgtaggattatttttgttgattaattacaagagatgatgtaatttattcacttctgtaaggtgcaatggctataagaaaacggattgatcaaccagcttaatgcattgagggattagtcaacttgcttatctagcttaacggactcatgattttcctagaaagggtcagaggctagagtagtccctgcgttttctaggcaccggggttaccccggtcaggccgccttccactagtgaagacgtgccatggatgaagcagctagctagccacccaggcttcctcccgctcccaattcttgacttccctaggaaaatcccaccccatctttaaaacaatcttacagcacttggcacttgcacaaatttgagttacccatagttctttcgcatcaagacacaggcacacagttcatggtagttcttcatcacatcacatatacgaattttgccagacaatctgcagcctttgtcctaatggatgtatttattatgcagcaagagaaggagcagctg

SEQ ID NO: 113301 - DNA, 625 bp, Setaria italica
  Intron number 1 from transcript Si032569m (locus Si032569m .g) derived from phytozome v7.0 (chr-ID scaffold_2; pos 11 645236 to 11645860 reverse strand)
gtgttgttgctgcctattgcatttcttcgtgaaaggtaagcaggtaaagcaattcattcataacccattataagttgcattgggtgcaaaggaattaatcacatggccaccagccatgcataactaatttccacagctagtccccgatccttatgcctgctgaatttatttctgattctctgtatctcacaggaaaaatgtgagttctatgacgtttgggctgctgatgaagcttttattatgtgccttaattgggtatgaatgtcacttctctatcatcttcaggtttagattaaccatttctggttcaaagatggaaataattttgatggtatatatatgactttcgtgtctgtgcaaataagttgttatgtactgccgtttaagctttagtcaatgcaataattttttaaattgtagaaaaaccttcctttgggtgatatgtttcgatgcaatatcgatataaattcatgtagataaaagattggcataaatgaagatttgaatcaacaaagatatataattcagaaaaaggtcccttggattgtatgtattttgaagatgtatatatagttaattatatcttttggtttttgcagaaatacattttgcataaatctgataa

SEQ ID NO: 113302 - DNA, 1065 bp, Setaria italica
  Intron number 1 from transcript Si030306m (locus Si030306m .g) derived from phytozome v7.0 (chr-ID scaffold_2; pos 15 108614 to 15109678 reverse strand)
cgaggcttggctgggacgtggcgccggctgccgaggtaaacgcccctttttaccgactcccctgctctccgatgtgcagtttaggatacgttttgcctagatatggcatccccaggaggtgatttcgcatggatcaatcatctatttcggttagcttgatttcgcatggatcgatcatctatttagctacctatgtcattaccttgttatgaattgcggataaatgaagattctggatctaggtctagttgtttaatttagagtccggatctgtagagtttctagaactgccttgcaaaattagcatgttaaggttctggagggtgctgctaactctttatcaagccagattgactccgaacagcttttagtatcatctagagcttgcatgttttcttattttgagaacacaccctagagcttgcacgtttttcttgttttgagaacacactctagagcttgcacatagtttttttaaaataccaaaaaattgggtcgatacacattaaattttgcatatgtggacaattcaccctttaagatgctttaatcatgggaaacatcttggtataaactagtgtcataaattatatgagcttgctgcctgaaattgtgaaataggaacatggtttgagataattcacccaaggcattctgttgcgattgttattatgctgggtctacatgattatgatctaactggattcaattaatcaaataagaactaccgataacatttctgaatagtgcggtatctgttaaagtttgcatgttaatacaagtaatttgtagcttgcctagttccatttttcctgtgtggtgtggatggaatgaaagaaagaatgtacaatacatgctttcaagttcttacttataatctgtcatgtactacgcctgtgttccttgtgctattatccactgtatcccttttttcttatttggctcacttatcactgttaccatcacatggggaagtatttgtttatatttttctcttgcatgaaaaaaatgaatggatggatgtgtgtaggctcagataggaacattttgtgggcaagaagttgg

SEQ ID NO: 113303 - DNA, 448 bp, Setaria italica
  Intron number 3 from transcript Si027400m (locus Si027400m .g) derived from phytozome v7.0 (chr-ID scaffold_8; pos 37 562900 to 37563347)
cacctgttgtgaacaactgggttctgattccactggtgagtttaatttagtgtattttctatcagttgaagatcaaatagtttcttcattctatagataataatgaatacgtcctctaaataaagcacgcggaacaaatgtactccatgtgtcccaaattactattcgttttgacttttctagattcataaattttgttatatacctaggtataatacacacacaaagggggtatgtggcaagcatcctggaaagaaaataaactttcattgacctattcaaataattgtacataacataaatgtcactgttgagccaaaaaaccattcagattagtccgtatatatggcttcccatttgttaatgttttgcggtaggtcattgttctgagcaagttgtgtgcttgtttaatttgttggagttgggcataaaggctttcagcttgatt

SEQ ID NO: 113304 - DNA, 796 bp, Setaria italica
  Intron number 4 from transcript Si030038m (locus Si030038m .g) derived from phytozome v7.0 (chr-ID scaffold_2; pos 41 123108 to 41123903)
ttgtgttcattgtgcaggtattttcttcactctttaggaggagcttacataaaaataccaatactttgtcacatatgtagtattagacaggcaggcaaggcagccacctagacggtctacgggtctagtggtgattatgtgcgaaggctgcctccaatggttgagctagtgcattagctcttagctttgtccatctcatacaagagatagcaaaaagattacacctccaatggtttgtctaatagcacattgttcaaagcatcttgggtttacaatctctctcatcaacaaagcgtggagcctactttttctctgagctagctcttgaagaagagatagtacaccttctctcctcatcttctctctttcaagtaagcaaaatgatgagttggattcctatgagctagctggggtgttattgttggaggaggcctaaggtggagtctagatgggcttggcagagtttttttttccaaacagtgtgtggcaaagtaatcacatgtacagggcaaatgtaccaacagaactgatagaatgctaacaattttcccccataatttggtgacacacagcaaagtattgaaggtcaatgatgagttcaaataacaatgcactaatttatggctttatcataataaatgtctgtttcatgtatactgatagtatcagcaactgccaactatgctaatttatcttaatgcaatgatgcacagctctcctacatatttgagagaaaaaaactatgcgaatttgtcaagaaggtattttgatgttaaatccttcttcgtacaggcaa

SEQ ID NO: 113305 - DNA, 1006 bp, Setaria italica
  Intron number 2 from transcript Si030616m (locus Si030616m .g) derived from phytozome v7.0 (chr-ID scaffold_2; pos 33 803981 to 33804986 reverse strand)
cgcggtgttgctctgagggtgagaggatctagccggtgagttgaatcgatttcatctgtaatttcgctgcatgcgcgatcggattctggagctatttacgtcttattgcttcgatcgcttttgtggaagcctgacctgaatctatctgatctggtgtgcaaatttagatgtttgaactacgctctcagccttttcggtgcagctccaattctcctagctccttctgcttgttcagcttactcgatgaacgatttctatgtgttaagctagcctcattctttaacgttggtgcctctgtttcttcctatctgacgggggtgggctgtgctgcgggagaaaggagatccaaatttggggaattatatatatcgggacgtgtaccttagtaaaggacactattctgcaatttagatcaacctttcacttttttataatttgaatttgaatttgctgtgtcagtggtacactcttgtcatgtggaaatagtatggtggatggatgtatttatattcctctgtgttggagtaattaacatattattagtgcttgataagccgatgcttggtacagctggacctgtatcctattgtttagtgtgcccacgagtgattccagtttagtaagcctactttaaacatctctttcacttaactgtatatagtatcatgaacgatttactgttgttcagttggtaccctgaatcagctggtgaattgtaacagcagtgcaaaactgcaaagatgttctccaagtaggaatgctaacagagtagtagatctttagctacctttcatcaatttaatcttgtatgctgcataagtctgcatactgttagaaaaacttatgcgggattttattagctaggattttctatttcttatatgcggcataagcctgcatactgtataagcatcttcatgaccctcattgtctaaatttaatgtgtttaggcagcaaaatattgaataaagttttcttctacaggagagatttctcatttatcaca

SEQ ID NO: 113306 - DNA, 838 bp, Setaria italica
  Intron number 2 from transcript Si032698m (locus Si032698m .g) derived from phytozome v7.0 (chr-ID scaffold_2; pos 45 949774 to 45950611 reverse strand)
aagaaggtaaccatcatgccatgcgtgctcagctcactccccgacttgcttgttacaatagaatgtctggccctgccagcaaagaactatacgatcaatgcggcgtagttctttttatttattcttttaatgaagagagccactactattaattagttcagtatcatcacatagcaagtagcaaaatgtgccttgttcatctaagaagcttatggtttccatttctgcaaaattagtgcgcagaaacaagctaggtgtgaactgtgcatagtttcgcatattttatagtaccttatgtatgcacgccgtttttctttgtttctgcaggatgggttgatcacgttcccgtgcatcctggggcatgaagccgtcgggtaagaaaactacctgatgtacacaaaaaatcacagcccgtgccttgtagttaagcactgaaaacttcagagtacgtagacgcctaaaaacgccaatggataagcatgtaccatgccgttcaaaaaaggtagccatgtgctcactgtagctgctttggccgtgtcaaatactcaaatgcaaggccacaccgcggggatcccgttggttttgttaattgaaacccgttgatcttttatgaaaaggataagatcacgagttcttaacttttgatggaaatcatatcatatgaagagaaggtacagcaccgaatgatatgggcccatagcgactgattcgtatcgaaccctcttgccaaagcaaaagatattggagtacgtttattcgttattaaacggacgctccaatttcgtggtccaaatggtcagattatcaaactgtgttgaacattagttgcgtcatcaac

SEQ ID NO: 113307 - DNA, 665 bp, Setaria italica
  Intron number 1 from transcript Si006216m (locus Si006216m .g) derived from phytozome v7.0 (chr-ID scaffold_4; pos 36 293721 to 36294385)
gcaaccgcctcaggtgagcacccgccacccattgtacaacctggaaccctccgttctctcgtccgtcgccgtcctgtggcggctgcttgggccggccccgggcccggcggcgccgaggaatgcggcggaggttgtcgtcgctcctagtgtccacgtgatcagttcatgtggttcctagtacagttcagccgctcaatcaatctatcgagtggcgggtagcgcgttgcgtcgtaagaggttccgtccgtcgaggggggttcgcgggacggcttggggtctcacagaccttcggtcggtaggctttgatttggggccgtgctgttttgggaagggtacgtcgcgtgggattttaagagatttcggttaatgcctgtggcattggttcgctctggtacctgcattttgtttattatattattaaaaggatcaaatgtgaacccccaaaaagagtgtaccaaaagatggaatgtgatttctttttcaccatgaaggtggcacttggtgccaaatggaggttacatctttggtttttgctaccatcatggaagaatcacactatgtaattgcaagaaaacatatcctgggcggcgcaaagggattctctaagaatttatgtacattgttctgcagtgtctttcaagtcgcgagaggatcacaggaagcaa

SEQ ID NO: 113308 - DNA, 338 bp, Setaria italica
  Intron number 2 from transcript Si028858m (locus Si028858m .g) derived from phytozome v7.0 (chr-ID scaffold_2; pos 49 170478 to 49170815)
gatctcagtcaaggtgctgctgcattcctataaaggtatgtttttgcaactagctaactatgttcctgcactgtactcaactggtgttatgagtaataccttgcttagttgctaggatagtgtcattcttttggtcgtgaagttatggttctctaaccaagttgaaggaatgctgcattaaattagttcttgctttggcataatctgaaatgtgctattatgtgtgatgacagtttgattttcctcactcttctctgttagacactactagtacccttggttgttctaactttcaagaaatagccaattgtgcatctataaacgagaagagggcacgc

SEQ ID NO: 113309 - DNA, 1049 bp, Setaria italica
  Intron number 1 from transcript Si026564m (locus Si026564m .g) derived from phytozome v7.0 (chr-ID scaffold_8; pos 29 386791 to 29387839 reverse strand)
tgcggccccgcaccgccgacgactcctcgcagcaggtccgcctcgcccctcccctcccctcccctcgacactagccctcttcctctcaggcccccattgttttccccgtccctcgcgattaccgagtgtggtgggtcgcggatggatgattcgatccaccggctggccagccatctggtgtggtgtgctgtgctgtgacaggtagtgggcggtgctagagttgccgcctgttctgaggtgaaccctagctctcggagaagagaagggggattagtgagtggttcaagtttaatcctttgggggtgactagttgagctgttggaatattgaagatttgtatggttagcgcttgtgggcttacaggttgattaattttagggtgtatctgtggtgccatgatcctgatgctttgttagttaacagtttaatttgatcaattgctgtggcaatgattgctattattggcctgatgctgcagtcttggcaggcaaacaggggtatatacttaggagccgagtagtatgcacttgtgcaagcagtcaagtgcaattttagtttgattacactcagatagtttcaattaagatttatgggccctcatgtaggaaattcatcctggaggactagtctaaacacaagagccacaatctttaggcggatgtagtctttacctttctccccaaggatttgttgtttgctctcttatcctgctataatcataatggaagtggcagtaaagctgccagcaccaagcaataacttcttggttttttgataaaatcccttggttgcactttccatgagctttgaagtctatatagtcgtggcattacttttgttgcttgagatgaaggcatagagatttatctactgttttgtttcttagactttgacattgctagtggcgtctgatgcacgctggtagttcgatcaatattgccctaaattccactatttttattaggagttatacattatgatctgtgtgttaatgctgaattgctctgctttcagtttgtggaactctttcttggaattaaagcatcctc

SEQ ID NO: 113310 - DNA, 741 bp, Setaria italica
  Intron number 1 from transcript Si032226m (locus Si032226m .g) derived from phytozome v7.0 (chr-ID scaffold_2; pos 14 324114 to 14324854)
gtggagagggcagagcccgtcacctgttcgacgtaacttctcactgaattaacagcacgttctgtttcagtcttaggaagaagcttattttcttcaccgctagttgcttagcgtttgattccgatagcaagcttacaaattgctccaattatttaacccttcgtttcctatttgccaagctcattgtgaatgggagaatgtcctactcaatattttggatttcccgactatcttatttggtattggctagtacagtagctactttcaaagattttgatgcaacttaaattcttcctctggactgtgaggctgttataggtagaccacaatatctcaacacacagtgagatttggtgcaggtttaggaatatatggaaatgccttattactatttccatttttctgttatgagtaaaaccatcatgttttgctgtcctcaggttctcagtggaagtgaggtgtaggtacaatttagtattgggtataatgtggatggtcacatgaataatacatatacagaggagatactatcaaattttgtgctcttgtgcattaggccaccagctatatgctgaccagaattagttatgatatatccttctttttgtcttgtcttgatgattgggatcttgttgatatatatctccttacaattctccatgatggcgacctagttttcagttctgatttggtgttttgtattgacaaacaggacttttctgttctttcccctgttgtacc

SEQ ID NO: 113311 - DNA, 959 bp, Setaria italica
  Intron number 1 from transcript Si026737m (locus Si026737m .g) derived from phytozome v7.0 (chr-ID scaffold_8; pos 50 4131 to 505089 reverse strand)
tcttcagggacaaggcatacctgcaccccgagaaggtcacatttctgaccgttacatcatccagttatttccttttaaatcacctgcatctcatgaccgttttattctggattacgattcagatagatcccttttaccagcccatttggatgggttcacattcttactgatcagttaaaaatggaacttaacctataaattccctctttattaaaaacaaaattccatcaaattcccagagaaaccccctgtttcagtatccctctattgtctgagatgaattagtcaccctccatttcctagtcctgtttgtggcatggggggttctagcatcagttactagaaaactgaggaaaacggtaacattgggtattatcaagaggtgacatatgtcaagatgcacatggaattacccagaggatcaacatctagatggaattacagaaatgtagattcaatgtaggatggttatatgttaacattacagctattttgatttgactgtgtagcctgcagtccacctcaaccgttgtttgttcttcacctaccctggtcagaacaaagaccagagaaaaagcggaatcttgttagtatcctccacgacacttaaaatatctaatatctaagcatccgcctcagataaagctattattttattctttgagtgtagatattacatcaacaaaggctaaacgttcaaccaacaaggattgcatcatgtgtttgagatttttcttttctgttgctttcagatgtagactgtagtgaagtgacaattttgctatcgtgacagtgaaaataatgcatatcagcctatttagtaagagccagtggtttccttacttgggtgccaagatgggcaaaaggaatcatgatgtaattttctgactgaatcttatattgattgattattcacttttttaggtggtggacctggttagaagagctgtgccacttgc

SEQ ID NO: 113312 - DNA, 630 bp, Setaria italica
  Intron number 1 from transcript Si029801m (locus Si029801m .g) derived from phytozome v7.0 (chr-ID scaffold_2; pos 21 796881 to 21797510)
atcattattggtaaccggaactcttcatctgggcgcagcatgaatttcgattcagtattgctgttcatctgctgcttctttccactgcgaatttctcatagtcgttgtggtgtcttagtcctttggcctgagaaatttaacttcaatttgaaattaagtagtagtatcaatgagtttatggactgttggtgaccttggattgagcagtttcagtttgtacccactgttcttgcctgtacaacatactgcaagtacttaacaaaagtgagatactgggcaattgactaagaactttttctgctctcagtaaattctgtccatttcttttgtaaaacacctctgttaacatctttgtatttcctatttctgtatgaggtctgagacccatggattgtttagcataagttgtagaacaaaatattccatagacactgtctgactgaaatgtgaatttgtttcacttgtgcctgaccagaagcgctgagtatagtatacattttacatttaagttctgcattttacattcaaatttgatagaatgcaactcctttaatgctaccttagttagtgccttgaactgtggatactagttcatacttacaaatcaaatgttcatttttaccacaggtg

SEQ ID NO: 113313 - DNA, 887 bp, Setaria italica
  Intron number 2 from transcript Si031128m (locus Si031128m .g) derived from phytozome v7.0 (chr-ID scaffold_2; pos 37 63509 to 3764395 reverse strand)
acaaggcccgccgcctcggcttcaaggccaagcaggtagatctcctcctcgcgttttgttctcctgactgatacgagatggcggtagagatgtggttgtgcgaaggttggtcgaggcccatcggtaacttagctctctatggtgatatcaccatttgctggtttctgttcataagatacccatccttggcagaccatttgtgttcggatgccagttttttgtgtgcgcgaaatgtagaatcgctaggtggataactctactatattcagtatactgtttaagcatattttagagcctttgtttgggcatgcctattacatttctatatttgatgatgcttcaatttatatcttgattggctatgcaaaatactaattagtttggttggaacctgttgcggccacttccacacttaaccttgacacaaaaattatgaaccttgacacaaaaattatgaagagtgcactgctgttcattgcgaatgcattgtatcatcttcgtggaaaacagtttcatcattcttttttagaccaaaacttccattctctaggctaatttatagtcaccattataagaggtgaagataatttgagtcattgcagtaattttatctgtggtggtcatgcctgttaggcttgtcatttggtgaagcaaaataaatatttaggtaatattcaggttgtcagcctgtggtcaatggaattattgtcgccttgttagtattaattggcgtgccaatgtatcatcatctatctgatttgcagctatataatttgttctgcacattgtcaatttggtgttttgaatttttctttgtagagctttgctcttgtatgcgtgatagtcaaatgagcttgtgcttaactttgtgctgtgtctgcagggct

SEQ ID NO: 113314 - DNA, 711 bp, Setaria italica
  Intron number 3 from transcript Si030677m (locus Si030677m .g) derived from phytozome v7.0 (chr-ID scaffold_2; pos 50 45656 to 5046366 reverse strand)
ctctctcgtggtttcaaggatcaggttttctacttactccttgttacaacttccagggctatgatattcattcacttgttatgctgcaacttttagtagtttatggtgttgcaatcagtgatatttttgttttgttatgccacctgatatttttcttagtgatatccattagggcccaaggtacctaattgtttcctgatttatcgcttagttcagttgatgcagaatttgaataaaaacatatatctatcctagaactcctaatttaattaatttacctgtcttcttaaaaagtattctgtaagataattaatatttatacatggtaataagtgcttagtactccctccgtcccaaattattagtcgttttggcttttctagattcataggttttgctatgcacctatgtctagatgcatagtaaaaaatatgaacctagaaaaaccaaaacgattagtgatttaggatggagggagtaggatatagtagtatgcatgtctaactcagacaaagcatgtgaaattattttgatttcatggatggaggattggagattgttgctggcctggctgtgctccatctagtttcctgaaccagctttgtacttttctctccttctacatacatatttaggaggtaccattatggaagataccttttgtttgcttaagctgcttggcttgaaccgacttattcccttcgcagatct

SEQ ID NO: 113315 - DNA, 978 bp, Setaria italica
  Intron number 1 from transcript Si007710m (locus Si007710m .g) derived from phytozome v7.0 (chr-ID scaffold_4; pos 28 917344 to 28918321 reverse strand)
ctttcaggaggtattcttctacccctacctttttcatttctactctcccttgagttaaacagtagaaagagaatggctcttgttcttttagcctcttgccatctcacctaaaaggcataggtctcttttgcagttttattccctgtcactgttgttggaaaagaagtttgatgccagaataagctgttccatcgacgatacattttgcgttagagaccaaccttcgtctattactaacagaaactgaatcctctacaaggttattcctgtacaaactggttaccatctctattaggttggtcaacttaccttattatagtttttaggtcatttactgtagtttggttacaggaatacatcaatacaagtggagctacctaaagttctcattgtagcaatgcattgctgactgctattgacttccaataactatttatggttgaaaactttaaatctataaattattcattgtactgtatttttctcaaattttgttagaggcaaaattttcgactttgaatgtgtgctgaaacatatttacatttgcttaggaagtgagcctagctcaactagttagggtgggaggtgtggtcgtgcactctaaccacccaggtttgagtcccttccagctcgaatttgggtgcctatttcttcttcttaatgaaaaatcacctagctcctcctaggttgatcttatttttatatttacatttgctttagctttaatagaagtagctatggtgctaaccagaaatgagtaaatgactgcgaccatagcaaaaatgagatttgatgttgcaccgtcgattccaacatgaaggtccttaattgcatgcttaatgggaaaatatatgcaatgactcaccatcttcttctatcaattcaaacatctacttccctaattacctatacatgcattgaatgcgcataatcagattgtattatatcttttttatgccatgaaggtccattggtatt

SEQ ID NO: 113316 - DNA, 963 bp, Setaria italica
  Intron number 1 from transcript Si026551m (locus Si026551m .g) derived from phytozome v7.0 (chr-ID scaffold_8; pos 32 876254 to 32877216 reverse strand)
gatccgccggacccctccgctcccgttggatctcggtattgtcctcttcctccctctgccgctcaactcgttcccatgctccgcgatgcgtccgacgtatatattgcccctcgcgcgcgggggctcgcatcgcgtatgcccgcgccgtgttggtaaggtttcggttgggtgcacgtgcacatgccgcagcccgtccccatctcccgttctcttgcccttgcaaacaaaaatttggtggtatattgtggtttttagcctagatctagatccgcactttttcattcagtagggttggtaaacttcgcgtttcatgtccttgtcagatgcatgttaaatccgtattctagaacgtgtgctgcacatgatttatcattatttattaggatgccaaattcctttgatttgtagtgctgatacgacatggttttcgtgcaccgagcttctcggatttaataatcatctaaaatggaaataaagttaagccaatgctgtacaccgagcttgggtccgtgccaatgctgtggtcctagtattgttttgacatgtgtccattcagatgatgttttgatttcattgagcatacgctgcccggcacgtggagcgtgtatccgagctcaattttgctgttcttttgttttcagttatcccaatgctattgtcgagacaaaagacatgtggttgttattaactcaacagcttagttgtcactactctgtatggaattatgcgttctttgtgagtagatttagattgaagcatttgccacatgtagtgatgatggttatatctataatttattcatgtcggtttctatacttccatttctggctcctgcatctatttttaacagtacctacaactggaaagacgtgtacacgtgtactggttccagatgaacgatgcagcctcgctgacacatgtcctgttcctctttttctctgatttcagaagcacctcagcccc

SEQ ID NO: 113317 - DNA, 1043 bp, Setaria italica
  Intron number 1 from transcript Si029348m (locus Si029348m .g) derived from phytozome v7.0 (chr-ID scaffold_2; pos 21 83187 to 2184229)
acgagtgtagcccaccattagttcacaggtatgcctttctatatgatccaggcatctactttttccatttggtactgtggcgctatgctgttgttgcttggtacagacctaatattcaaaaaattagtcatccatgtactagtttttattttgtcccaatacttagactcttagatcatagtctagaaaaccatggaaggtccagatgccttccttttcagcatcttgttggcaaattaaggagacagttacatcaaagaccacaaaagaggtaggaacagtgaagaagtatctaatcttatgagataatttacatctttagttttataattgttgtgggtcccctttgttgcttttatgatggcaccaatgcatttcatgttatcgaggcactgttgctgaagaaaatgaatttctctatgcttcagtcttttgtttgtgaatcacttgctagtgtgaagaggatctcaggcctgtagactgaccatggtctgtctctgtatattgactagaaacaacccagtgtaaaaaaaacattttggtatgatttgtcgttttcttgtaattctttatgttggaaaagaagtattgctagtatgtatgactatctcaactcatttatgcattattctggaacggcatgctctttccttttactaaagtctagaacaagtataccatggcattcagtctctatcacagaattacatttgcatttgacaaaatttacctttgtgttatgcggatgtcatcaatcattcaatgaatctttgtttaaagtatgttaacataactagaagtagccttcttttgttcctcctacaatttttgtttgactaataacttttacttgtatcaccttggcttgtctatcctatcagtaggtgagttcaagttttcttagtttacaggaatacctccagtttcatgcatggtgctcaatgcctgtattttcctttatgtcattgttgacatctgatttattgagtactcatttctttattgcgattgcagagatatccaagcaagcagtgtccttcttg

SEQ ID NO: 113318 - DNA, 749 bp, Setaria italica
  Intron number 3 from transcript Si009132m (locus Si008903m .g) derived from phytozome v7.0 (chr-ID scaffold_4; pos 22 309176 to 22309924 reverse strand)
gcttcggagtgaggcttcaaattgttgctgtgaaggtaggtccagcttccctttcctgttaatgtccccaacttttgttagttaggtttggctgagaggagtaatcatgattacataggcctacaaggtaaatacttaaggaacttgacttataggacatgatcatatgagtataaagagagcaactctctatgagtaaagaaaatgaatcatagtgttctgtgttagttctgtataatttcttccttcattcttttttttttgactttatactattgtccgtttactcctttttcatgtatagaatttgtttatagagaaaatgaggtgatctcttgtcagacgatgcttatctgaataaatcagatcaaaaacctgtgatgatcattccacatcacacaagaatcttaactgcagaatgatgtaatgtggaaatgcatgcctaacatgtataaataattatgcattttaggaaactaatttgaataaacaatgccaatatgttttggagactatacatagatattatgagacccatgcagacaaacttttttttcgaagacaatgtacttttgatcataaggtgcttccgaaaaatatatgtagcctatgccttcactagaccagcttgtaagtctttgataagtgaataatctgttaccttcaattaacatcagcacatggttttctcaggtattgctatcaacccatcttatcagttctcttttttgcagttagtttataattga

SEQ ID NO: 113319 - DNA, 873 bp, Setaria italica
  Intron number 2 from transcript Si026025m (locus Si026025m .g) derived from phytozome v7.0 (chr-ID scaffold_8; pos 27 426425 to 27427297)
ccaggtctacttgaatcaaatgcaattgtttgttcttctaaaaaattgctagttagtagaaacagaaaaatacagttatcctttcactgacataggtgatagcagactaataccccgatgactgatgcgatgtgtgtatttgctactttagatcctgttcaacatggcatgatattttcctaaataaaagacatttccatcttgttagatgcttaaatcatgggtaaaatgtatggcaactgtgcataaggtcgctttatgccctcagaatctgttgttatattgcttcctgattttttggcatttactgtttttttgggggttgaatgtagaagtctttcagatctatttgcaccttattcagtactgaaattgcttattcataccggtgtaagatatctgttaggcttatgtggcttatgacttacaagcctcctagctgggatttcatttctactagatatgggataatatattgtatgcattactatcctgatagtttctgttcttacaattgaggatcccatttggtatatcctagaattttaatcagttgagctgattggattactatcctgctgtgtgggatactgggatctaaatgagataaatcctaataccattatcatgaaatttgtcctgactagttccaaatttttatagttgcatgtcattgatactttcttcttacttcttactttttttgggaaaacatctggtttaattttcttgttttcatgacaaaggcatgatggagttttcttaatttctgtttgattaagttgtattaacatttgcaaggcaaaatttcttaataaataatattgaggtgctggattaaatggtgttcactcaaatggcaggcttttatag

SEQ ID NO: 113320 - DNA, 936 bp, Setaria italica
  Intron number 2 from transcript Si026962m (locus Si026962m .g) derived from phytozome v7.0 (chr-ID scaffold_8; pos 26 991678 to 26992613 reverse strand)
gtttgacaagctgtccgacagctacttctgccccggtgaggatgaactccagaatcctctgctcctgcttcctctctctgtttttctcattctctcacttgatgcacgcacccatggcaaatagcttgtgtttcctcttcttggctttcagttcagagcctgtgcatttgtatgattgagaatatttacatgcaagcacggttgcaaacttgcaaatgcacgacagcacgttgacaatgaacatactacacatagaggagttgaagccttacgaagcgttaggctaatcccagtgggagtttcatagagattttatgcatatttaatacggtgacatatcagtatatgtgatgacatggcaagataattatgaagtgagagagtgaaagagtttcatcaggatgaaactgtgtatgcactgtttccaaggctatgaaacctgttgaaacttgcattgggggttatagaatttcatttcatttgaccatatctaatcacatgcctcgcaattaaatggcatggtcatcctatgaaatcgtgaaatgaaactctgcattgaggtgtattgtttcattcattaactcaaacatcttttgatgacatgtcacttttggaaaccgcgagacgaaacttcccactagcaattaatcacgttgatttccatgaaaatttgaacaacatggcaagaatttgacgaaatcacacagtaacacgcactaactcacacgtcataagcatacctcacttgtttaaaagacacaatgttagcatgcatagcaatgtttgttacattttcatcccaaaaaagtttgtttatgtttgcttacctatgactgtccacatggaaaaagtatatacttctctccaatgattgagcaatctctgtccattgttgatgcagtttgtggagctccgaagaggaggttcagagcatac

SEQ ID NO: 113321 - DNA, 899 bp, Setaria italica
  Intron number 1 from transcript Si026337m (locus Si026337m .g) derived from phytozome v7.0 (chr-ID scaffold_8; pos 85 35953 to 8536851)
cccgtatcggcgacgatatcgagttcttcgccaaggtatgatgatcgcatttactagttcttagtcctaaaggctgctagattatgcgaaaatggtgttgtttgaaatctgatgtagcagttaaaactaattacaagtgattgtattatacaattgcaaaagtgttcccgcaaaaagaaaaaataaaggaaaagagcaaaacaccacgccagaaacaatttgtactagcacaggcaaattagtgtgctggcgggcgtgattggcacccgccagcacaaagcttcctcggactggcgggggcacccaccagcacagtggctactgtgttggcaggcgacgcaagcacccgccagcacagatcgccccatctgtgttggcggtaggcttatgtgacctgctagcacaaaggccactgtgctgacggtcgacctaagcccacccccaacacagatggggtgatctgtgcttgcggttagcttatgtcgcctgccagcacaaagtccaccataaatgctcttgttcatctttttccttaggcaaccttccatttggaatttgcccgagaggagcttgggaaaagctccaaacaccaaatttaaggggaaaagttttgctcttgattttcttggaggaggtggctatataaggtgagtttgtgccatttcaaccttctttttgaacttctatccatcatatctagctttattagcttgtcatctatatctagatctagaactaggggggagagagaggagggaagagagagaaaaaaactagaaatggactagatttgttagctttttaacaacaagatttgttgttataagatgtttgtagaacattttgattgtccataattaatgatttgttggtgcaggtgaagcccgggctgagctcgt

SEQ ID NO: 113322 - DNA, 1016 bp, Setaria italica
  Intron number 3 from transcript Si006795m (locus Si006795m .g) derived from phytozome v7.0 (chr-ID scaffold_4; pos 39 261591 to 39262606)
gggtgagctcgtcgctttgctcataaaatctgcagtggtttgactcatatagataaatgaataattgaatattattccattgaaatttcagaagaatgcatatactggcaaaagctgataatatgactgtttgtttattgtacaactgctctcctgtgtgctgtttaatatctggtgaattgttgccttttctgcattaggatctagcttgtatgtgcttaggagaatgtctggttaggcattactgtggtggtccttttcctttggaggattcttatctatgataattgtcttacagtgtgaacagttgtaacatataggtggtgtttggttagctcaaatgtaacgtaatatgattactgaaggtaacgaatcccattacatatgtttggttgcggtagtttgtaatcaattgacatgtaatcgaataccttacctaaataatatctatacaagcttgttacccctcctcccccaccgtaattagatacaacacccacaccgtaatcagatacaacacccacaccgtaatctgattacgttaccagagtgcaaccaaacaaagagggtaatcacccattccaccgccaaatacactgtaatttgattccctttgcgtttacgttaccttagtacgaaccaaacactatcatagatataatggtattataatcataagacacagctcactgaataacttggtttgtccttcatatgcccgttggaccagaaaaataagctaagtttgttggcaacataagggggaaatatatctttcttttgtaaccatttacttgctacataatattctatgcaaaccatatatattgcacaactgttgctatctgagtgtcatctttttgtttatagtaccatttacgaattgcaatacttaatcttttgtacaagtatatcttaagtctggggactcagaatttggctttctgtattcgaatcttttccctgcatctgagagattttgcttatgcttgcagttttcaatcaaaagaccttgt

SEQ ID NO: 113323 - DNA, 745 bp, Setaria italica
  Intron number 1 from transcript Si030370m (locus Si030370m .g) derived from phytozome v7.0 (chr-ID scaffold_2; pos 31 867880 to 31868624)
cttataccgtaaaaattctcaaggtaagtactaagtagagtaagattggactagaaattaaggttaccataaaaacttcgagaaattacactcgaagaaagatagaaaataacaagttgcaacgattcggtaattaatgaccatcacaaagatccaattccatggagttgtatccatcattttagcatgggtgaccaatttagtgacataaagaaatgtgcatgtggacaggagcgatggaaaatgtcgtagcctagtcatgctggcactactaggacatctacaaaagaatataggccctgctcgaacatttctgtcctttagaaattgcctgtcactctctaatgattttcatgtctcgaaagtccatgctttctggttgattgtctattactttattctttcctgggtgctcttctgcccatcacaacatcaaatatgttttctatcacggtctcaccagatacgtaggtgtaataggttttagcatctacaatttgattgatacatttctgcttttttttggtacggttagatttgaattaatgtcttagtattactattaggtgctgctgtaatcgtaacaaagtgtcaaaacaagaaacaagcatgtgcatgcggacattatacatttaaaagaatattgtttgcgacaaaataacacaatgttttgccaaaattaatacgattcatgcatatgttcttatgtaagtttgatcacttcaggtgtgccttctacctggaa

SEQ ID NO: 113324 - DNA, 677 bp, Setaria italica
  Intron number 3 from transcript Si030748m (locus Si030748m .g) derived from phytozome v7.0 (chr-ID scaffold_2; pos 36 163774 to 36164450 reverse strand)
atcgatcgggttaccttccttaattttatagccaggttcgtacaagggcaacttaacttttggctttgttcatttgcaaggcaacttttcacttcagtgtttcattcactagttcggtcatttaaattgcaacttcgtcattgcacgtacgtgatgctcgctgaccgcttactttgttaagaataatgttttatgtacccttgtaacatttgaacgtacactaaatcgagtcacatatacaagatgtataaaggaaatattctgcaggaacaataattgttactgtgcaccttgtattcctggctgttgcttttaaaaaatactgtaacggtaaagagactatatatgttctttattttactgtaaataaacgtattcattcaggaatatagcagtactaatttcatatgcagtctcaaattttgaatttggtgataaaaaaaccccatgtttcttgttgcacgatttgcctaatttagtcttcgatcttccacatatgacacggttgttctcctcgtgtgatacaggtatgcacttttcgcaatctattatatctccgtcagcgttgaggtaaacggtctgaagaaatacagaagatttatactcccatgcatcttctactcgccgccccccgaaatgaaggaggcttgggactctgtctgagattgattttgcat

SEQ ID NO: 113325 - DNA, 344 bp, Setaria italica
  Intron number 1 from transcript Si030357m (locus Si030357m .g) derived from phytozome v7.0 (chr-ID scaffold_2; pos 47 983190 to 47983533)
ctgccagtgagtcttcagctctcccattttctcggttattaacttattatcttctgcaccggtaatgcaaagaaaaatttcaaggaggatccaatttgatatcattttggattgcaagaactagtttggatagatacacgcgatggtgcacggttgcaagtgataattcagtctgaatttggtggtatgggccatagttctgtactaagtttgaattacggtaccttctcacagcttcttggtgcacaaaatgatctaagtcccggccgcagtttcgagatcatcctgaaatataattgttttttttactgcctaacaaattaaatcattgcaacaggtgccag

SEQ ID NO: 113326 - DNA, 778 bp, Setaria italica
  Intron number 1 from transcript Si032798m (locus Si032798m .g) derived from phytozome v7.0 (chr-ID scaffold_2; pos 36 386440 to 36387217)
aaagccagatatctccagttgtttatttgcagaatgtatgaaatcaaaatgtctctgcatcaaaaaatatttcttttttcatggtaggcaatcttgtgaggtttccttcaagttgtgccaccatttgaatccagtgttctcatggtgccagaagctttgagaaatattggacggaaacctcaaaaaactgtttggaatgcagaaaaaaggttttcatacatgaagaaacaaattaatatcataactcctactgaggaatgcatacctgcaagttttatacatccatcgtttacagtagaatgcatggctttaatcatccaaacttgaggcggtcaagcatatctgttagttgaaatttatttgtcttttacttaacgatttttttttacttctagatatataaaattttcaaaaaatgtactgaagcaagccctgatattacaccttctgaagttgtcatacccttaaagtgcaatttgttcttagccttcttctgcatctaacacatgtaatcatttgtcagcattatagcaactcttagaaagtaagtccagcgtattatcataaaaatgaagtatgtttccttgatacttttcacaccaataaacattcttatgtggttcatagcctgaatgtcatcatctaccaacaatactactctgaacatgtgatggccacacaactttgcaaatgtgtctagttacagtagcagcgctatcagcattgtgttgttctccatagagcacttgagacattttttatttcatacatgagcttc

SEQ ID NO: 113327 - DNA, 915 bp, Setaria italica
  Intron number 1 from transcript Si031316m (locus Si031316m .g) derived from phytozome v7.0 (chr-ID scaffold_2; pos 41 171610 to 41172524)
gcgacccctacgtcgtcctccgcctcggccagcaggtaataagccgacgctctgctcccattcccgccgtctccctctcgctcttgctatggcgtacaccaagccaccaaggcataagagaaatgtttactatcctcttctacaaaatattaaagattttagtttttatcatgaatcaaacttctctaactttaatcaaaattatgaaaaaatacactaacattaatagtgtcaaagtagttttattaaatccatcataaaatatgccttgacagtgcatttttgtttgtgaaacttgacagcacatttattgatattatagatgttaataaattttatagatatgatcaaagttagagatatttgatttaaaacaaaaactcaaacctcttatattttattctagaaaggaggaactaacaaagactactgattgagattgagaggcccgtcagtattggttttgactttgaacttttcttgtgacaacactaaattaccgactctgttaattatcaggaatcattgctcaatattatcgttgtcgggctttgtttttttgtgaattggcaatgcgggtgtctccttaaataacgtgccatctgaattgccaattccacctcgtggcatttgaccacaaaagaagggagcaagcaaaagcttgtttagaatcaaagttttgggagttaatcggggaggaagtctttcacgagatgggaagcgaagggagtgatgccaagctaatataaggctcatgcttcacattttaaagtttctgtgtgtatttctctatttttaaggacctcttgcattgccaccttttgcatcgtagtcctcctttaacatgttatgtcggcattaattttcatatgttgggcagaaagtgaagtcaagtataaagtatcacacaatcaa

SEQ ID NO: 113328 - DNA, 894 bp, Setaria italica
  Intron number 2 from transcript Si006236m (locus Si006236m .g) derived from phytozome v7.0 (chr-ID scaffold_4; pos 96 49493 to 9650386 reverse strand)
ccaccatcgccgtctcctccttgctctacgtcctggtaagtcgaccgtgctctgctaattaatctcctctgcgatctttgatgccggccagcgaagcttcaggctcagagagacagagtctggttactgatcctgttctagcgttgcttgttgtttggtatgacattagttggcttattctggtaccaaaaagcaatttaatatgaattgagaatcagcaagtccatttctgaaccttgtcgttctgggatcaatatgagcaaattctttataatctaaaaaagatcctaaacattgtaattgtagtcaggcaacatacatgctcgagagacgggacaaaacgcaatgtacacacgtcaaaaattgagctattgcagaaaatacagatattggtgtagtttcagatgatgcaggacatagacagcagaccaggcatttcactatttcttcacttgacaatattaacattgctgtaaaccaagtggattttttcattcaaaataaaaaagagttgaatgacatgacaatattaactctgttggtattttacatctaaaattacttcaaaacccggttctattgcaatttgcaaatacagatatttagtgtagtttctgatggttaaggacagagacaagacaacagagtaatacaaagaacatttcagtgcaacagtatgacatacaaacaaaaggaccaggcattccactgtttcaacgtttaaaaatgaccaagaaaacaaattcagcacatggcaacattaacattattgcgcattccttgcaaataaaaaatactatcgtgaactaagtgtcttttttcattttaaaaaatagcttaagtaaactactagctatttttcagtttcaactgatcctgctccttacacagggt

SEQ ID NO: 113329 - DNA, 645 bp, Setaria italica
  Intron number 1 from transcript Si007009m (locus Si007009m .g) derived from phytozome v7.0 (chr-ID scaffold_4; pos 33 000195 to 33000839)
accgcgccacgggccgctccaagggctacggattcgtgagcacgccttctctcctctgttttttttcttgtccgtatctgccgttctggtttgggacgcttggtccgtacgtttcttttttctctgttggggatcaggggccaggttcgattctggagctgaaggttgtgattctctgcgcgagatggagtttgtgggttgaattcggagttttagtgatcagcggtggctgcgatggctgcggcaattggaggcgaaggtcttagaatttggcagttttgcatcccgtgcccggaaaatttggtggattgttgactccttagccatagaatcgaggggaagagctagattttgttatacagagcgaacgaatagctcccctgttaagcatttctagggtttatatgttgaatttctttaggcacttggttcagttatttgctgttggaattggaacaaaatttagtatttctcccctgtgaatcagggaactgtttgaattttgttagcagtattatggaattagtgcaccttttgttttttccaaattcagctcagatattttgtctttttccatttctgattcatcttaattatgtgtggaggtgtgtacaggtaacctttagggacccggagtcggcaagg

SEQ ID NO: 113330 - DNA, 836 bp, Setaria italica
  Intron number 2 from transcript Si033137m (locus Si033137m .g) derived from phytozome v7.0 (chr-ID scaffold_2; pos 46 775558 to 46776393 reverse strand)
aacggaaccactattgaggtgtactttgtgtgtgctcaattccaccacattgttatcttcacttgtattaactattcaaacagtgacagtgtatattgtactgaaaccaactcaagtttctattgaacctatcccaaatttagcctttgctttgaactagatgtaaaattttcttggcattgtactacatctattatgttcttgagtgtgtttgcgctgtttctgagaatcgtatttttttttcattttaaattccgaccttttctggaaaatgatattgctatttgttcccgttgattaagcactactgattaaggttgtctcagtctcacctgctgatttgatttttctttgcttattcttccaggttgtgtagcatttcggttgaaacatatcttgaatatttgaagttgaaatttctactttattgcctccctgttagactaatatcatatggtactcgaatgcttaggtagaaccaagttctgggattatcagttgtctatgcttttattttatttgtgggttaaatgtgaagttgctgtttcctgcctcttgctccacactaagtttaaggcatctcaacaagatcatcgtgttcacagagaacatgctaaatattatagataagataacagcagcatactaaactttgtattcattcaaagagtttgggctacgttgagggtcctcatttcttctatacatattgactggacttctttcataaccttttgtatggtatttagtgaaagcatcgtcatatcatgcactgaaaatggtttctttcttatgatgtagttctgcaagaatattgttctagcaggagttggtag

SEQ ID NO: 113331 - DNA, 842 bp, Setaria italica
  Intron number 3 from transcript Si030316m (locus Si030263m .g) derived from phytozome v7.0 (chr-ID scaffold_2; pos 39 776460 to 39777301 reverse strand)
gaggtaagtctgattgtttcctatccaggttatgatactgtgttcagttgcatttattacttggtgaatctgcattggtttgaattttctagagaatgcgttcattgagttttctcattctatccaattgacagttagatatattgatgctttctatagtataactgaagtatagtaaattctgtatcgcttccatgtgccaaatggattgactgtaagaatcaatagcaattttactgtcggccaggggcatgtttatcttcttgtgaatatatccatgccaacggtgctgacgctatcatcagtgttgagtgtatatatcaattccttgctgagaagtgttctgtggattcttcttggaagcactttttataagttacttttgctagtttcatctgaatttgccgaaaagattgcctcattatgagaaatgaacatgaggaggggtatttctaaagtactgttcccacactgtttcaaaaattgcccgtatagatgctttgcagttgctgcctagcctgtagattgtgctgggtatcctactgctctcactcagaaactaccggtgaagttcattgatgagcacacagtggattttcgtgaacaatgaaaatgctactgagcaatattaacttttggaatgatctcaattaaacctgttcacaacgtagcacttatttgttgctattctgaactttggttgtacaaaatactaagctcctattgtggcagtgacaagccaacaatccaactgtgtaatcatgcatcagatgagcaatgttttctcaggtaacctttttatttcaggaaaagctgtatctaaattctgcgcaaggcatttg

SEQ ID NO: 113332 - DNA, 896 bp, Setaria italica
  Intron number 4 from transcript Si007327m (locus Si007327m .g) derived from phytozome v7.0 (chr-ID scaffold_4; pos 42 89662 to 4290557 reverse strand)
aaccctgtaaagaccgacgccgacgatacggtcagtagatatttttaagttatatgtttcctgtgaaataaatattttgtaagattgttaaagtatgtattgtcttcttcaacttaggggtctgaatgtctgatacttgcatgactaaaaaaaacaaaagccaaaacgacctataatttgggacagagggagtagtaaacatcatcagaaaatggtagtgattaaatgctataaatatcatcagaaaatggtagtgattaaatgctataaatcctgaagtaccaacttttagatttagcaccttgacatcctatcaatgtgttttgtggtaattactagtgtaatcaaatattgactgcgtgttttagtctagatgaaaggtagctgccgatgcaggagttttgatttggtgatcgaaggtgtaacccttagcaaattgaatcctttgctagtatatttcagccaattatgaaattgcactccaacttaattatgtgtgttttgtctccttagatgatgtatgtttgcatagatgccatgcatcgttagatattgcctatgcaactatctgaccgtgtgtcatgacaaagcacgaagtttttaaaaggggtgctactgtcatcttcactttgcatccttatgaacatgttcagtcttatctggtttgacgcacatgtaaaagaactactgcaagctctatttttcttttattacctttctctattctgtactgctttaacttgatacttttttcccttaaaaagagaagttgatgcattgatttcatgtggtttatactttttggtggttagattagattgctgtggtattctgattaaaaaacaaattgctatggtataaatgccaacacatggtgcttttaaatcttcaacagg

SEQ ID NO: 113333 - DNA, 1001 bp, Setaria italica
  Intron number 1 from transcript Si006354m (locus Si006354m .g) derived from phytozome v7.0 (chr-ID scaffold_4; pos 38 759080 to 38760080)
ctacaatccgtgctcctaccttcgcggtgtttcaggtgaggctaaggtttcaaagatccttcatttttatctgcattccatcgcctccttggcatcagtcaggctgtgtaggagtacggtttttgctaaatttaacagtttcttttgtgctggccttaatgcttttgaagcgcaaatacaccccgttcttgatttgcctttcttccatctttggttgatgcgcttcactatgccctttgtcaaattctccgttcttttatcacctctgagctcactctttgattccccttcgaaggaacggatttgagcttctttcggggatttgtctcggtgtcgtgtgtaatttcctgggattgttccaaattccaacaactgtatgccaagttttctccccttgaccttctgatgctgaacctggacacagtatgggcattacatgcttcgctgccgcctgccggtcagacagggcgtcatttgctcgcctagctggaaggaaaaattttcggaaagtgcgtggaatctcgtatccggtcttttcaatgctattatgttcctttgttggttttgtcgacattgagaaacatttggttacttggttcgcagattctgaccgtcgttatgcatcatttttggagtttgtctttttttcagaacgaaatagtttccataaactgtgtggatctcgtaccaagctttttctagtggatgtgcttctttgcgtctatatgtcaaaagaaatctactgttaggtccacgtgttttcttgcaagtactgttagcacttggaagttatcatttgttgtcgaaatactggaatatagaaatgaattctatgtattcataaacaagtttcatctgtttgtaattttcttaatattattgtttatattatgaactatatgcttatttaagcattgaatttgtcgcacagcaatctccttacaatcaacaatttttcatgtacaggcctgtagcctatcaagtcattaatcagcagaagc

SEQ ID NO: 113334 - DNA, 798 bp, Setaria italica
  Intron number 3 from transcript Si028983m (locus Si028983m .g) derived from phytozome v7.0 (chr-ID scaffold_2; pos 14 905823 to 14906620 reverse strand)
gccaaggtacgagtatggcctgcacccttgcttccttgaaagttctgcttcggttatgaacgatcaaactgtataaggcgatctttctagtttattcagaagatgcagtaaaaccaaaactgtattgtgttctatagtaatttaaagattgcagtacaaagacaccttgtgctacagttaggatatgaccatacatagcaaattctagtcagtttcttcctaagaaaagaagcaaatatcttcataaatggttagctttcactttgagacctcaaaaaagcagcaatattgttcaacaattctccttgtgcgcttatttgctcaaatctttcattcatattccttccacagtttgttttaatttatgccacgaaacactacaaccatttaagccttccattggttgagctcagaatcaaaatgcatcatacttccagcatattagcattaccattctgaacttttgagagcaaactgaagtttagccctgaaatagattagttgccttcatatttaagcaaatattttgaaaagcctgataggaaagcctcctttggggacagagatatcgtccagtatgtgtatgaagccatttggttgtgagaagcaaagttttgtgtgctgcagcatgctgtcagtttcagtacttgataataattcagcatattagattatggcacactgctgtaaatttcaaagtcagtgtggcttacaattctgtgatcatgattatgaacataatagaggttaattgtaatgccaggtggaacatttgctctttattcactgctttgccgg

SEQ ID NO: 113335 - DNA, 568 bp, Setaria italica
  Intron number 1 from transcript Si028983m (locus Si028983m .g) derived from phytozome v7.0 (chr-ID scaffold_2; pos 14 907136 to 14907703 reverse strand)
gaatcttttggggtttttgttttgaagttttcaaggttagcagattctctcttccattgttggtagataccgcggaaatggcatcagaattggatcatttcgctgtttttaacaatttgttttatttgtaaattggaaattatgcatgcttattttatttgacgaccactcttctctatcagtaccagatcggtaaagcacctgccgcgcttttcaagaaaaaattacttacgcctttttcgtccggactcactgtcctacatcattcagaaattgtttgacagtggaaatcagctttcttctttggatggctttatgttgatcacctgtggatgtttgacattaaaacaaactatgtgctaatgtcaaatttcctgaattctggttgttaattgattctcaagtttatggaagtttcatcttgagacaatttaaaactggcatccttatcccttccagttcttctcaagtttagagctcatgttcttcttggtagctttggaaacagactgatatgttctgaatgcctgcaggcggcaggactgtgctgctgatttgtcggaaccca

SEQ ID NO: 113336 - DNA, 985 bp, Setaria italica
  Intron number 1 from transcript Si029894m (locus Si029894m .g) derived from phytozome v7.0 (chr-ID scaffold_2; pos 49 036398 to 49037382)
tctttcctgcctgctgctcgcccgcggtagtgcaggtcggtgtcctcggattttggcccccttgtttttctgctcaagtggctggcctcatctatttgtactgacggtgattgtcctcttgtatgtcttggttgtacagcgatcggagttctaggaggaggaatcggtgccgacggctggagcagcagcagcagcaccatactacctactgctcatcatcttgggtgagtgagtgatgacaatttacaaattttcctcttttttacgttttcttttcgagcagcgatatcctttctatttctatctgctcatttattcataatttcgacagccagacgtggaattggaaaaagaaaagtatgtttttgcctgccgatttttgggctgatggctgcactgcatagatatgaattattatttggatattgctgtcctagagcttaagaaccgatcagatgttgccttatcgaggggtgtacttttcctcactaatcaaatagacatcaaatttgcctacaaagcagtctcctctatgattcagcgtttgttgaattggaatttggtgcaccatttatatggtagtatggaacattagcaattgcatagaataggctgtcaacatacagtatactagttacatctctgtgattttttaactccattgtaccaaatgctgctttgcattgttctcttttttttgtttacaaagttgtcaaatttcatgccagatgcattcggcgcatttgacactcaaaacttcgggaccgattagtttcccactcaaatcacatgcaattaattgttctttgtattgtttcctgttacagaaacctcataaatgggcatgctagaagattactgcacattggtgataaatatactgcatttctccaagcacctcctcctattcacaagaagcggcacaagcatcataaaagcccgcaaaaactatcaccagtgcctgctccatcaccctcaccactca

SEQ ID NO: 113337 - DNA, 830 bp, Setaria italica
  Intron number 1 from transcript Si026006m (locus Si026006m .g) derived from phytozome v7.0 (chr-ID scaffold_8; pos 33 371344 to 33372173 reverse strand)
cacttgagctcttcaaaagaacggtaacattactcataaccaaccatatgcccatatatttataattcttatagagttctacataaatgctactagtgtatttttgtaagtagaagtgggatgcactgctgtacacacttccactcatgcccatgttagtgtacttttcatgtcatgaatgatctccgaatgaaacgtgagcactcaaactaggtggaataatcaatcacttggctcattggctctacattattatttcaattcaaagactattcgaattatctcatacattttgaatatcagattaacaaacaattctttcaaactctatccatctttaaatatatgaattcacttgtgcacatggtgtttgaccatcatcttattcaaaagttaagtgcaaatattcaaaattttaagtcatgcttaaaatacctttaactggaaaacaatagggtcacaattaaataaatattattttatagatttaaaaaaagacaaattgccaaacgtaatatccaaaagtcaatcttatcttttgatcttattggagcggtgtgattgtaattgttgttgacatctgtattaaagtttgatctgatttgaagcggtggatcttgtagttttgcaaattgaaacatcaataagtgtcattataattgttgtccgcattatattaacttttgatctgatcggttgatcttgtagttttacaattgaaacatatcaataaacgtgattataattgttcttcgcacctatactaatgcaatccttaaattcatttggttccagataactaagcggcgtcacagtttttggcccgctga

SEQ ID NO: 113338 - DNA, 517 bp, Setaria italica
  Intron number 3 from transcript Si006625m (locus Si006625m .g) derived from phytozome v7.0 (chr-ID scaffold_4; pos 13 74022 to 1374538)
gctgctggtgccggacttgggaacaagatcatcaggtgagcacgtaaagatgaattgcgtcaggaattgttgttttttttggatgttccagaagaaattagcttatcctgtgattcttttgcacaagcctaccatgaattttttgagttatatgactagatacacgtaatgtattaggatagtagctatgaaggattgaagggcaaatttacttgaatcagtgtaacatttcatgtctgaactgcaactgcagaacacggctttgtcgaattggaactgtgctgaaagcacgattcatcttttcagtaaattttaggattgatttgaactggatcaaaattccctatgtaaaactccccttataactgtgctaactatcaatttaaaattatgcatttcagacagcttcagcgcattatatattatagatccaagagatgccaagtgcagaataattttgggcattgatcaatttttatgtttctgatgttgatacactgatgcagccagggcaggg

SEQ ID NO: 113339 - DNA, 659 bp, Setaria italica
  Intron number 3 from transcript Si029322m (locus Si029191m .g) derived from phytozome v7.0 (chr-ID scaffold_2; pos 14 267451 to 14268109)
atcctcgaggtacgcttttgacaagtatttccggtacctgttatattccttagtgcatatgttattatttcaaatttacgaaatcacacaccttttttacttgtcacggtgattccgccccttaaaatttgtccacttttcttatgctgtcctgtatctactgtaataaataatgttctttgatctgtagtttcattttatggcattatgcagtcaaagagtggatgtctgtgctactaccattggctctcgaacggaaagtttgcataataactaacatgggtgcaagtaagacgttgctgactgtagtgtaactttacaagtaacctgagtttttggtttcacttcttttatctgttccttcctgttatgttagtggatcctcttggagcacagaaagaagtactgaacctggcatctattttgggactggagataacagtagctgtagcttatgaatcatcctttgaaactcaaggttctacatctctgtgctgattgaaaacatgatgggtttatcttctatgtagaaattgacaatcaagatcagactggtatttcaaaaatacaatcaatattggatgtattcttactgctattatttaattttgcctggttttgtaggaagccctctatcgtcctttcaatcaataggagcg

SEQ ID NO: 113340 - DNA, 567 bp, Setaria italica
  Intron number 3 from transcript Si032764m (locus Si032764m .g) derived from phytozome v7.0 (chr-ID scaffold_2; pos 41 346026 to 41346592 reverse strand)
caaaaaagctatctggcagggcgactttgctcgtatgttatcattatgtatcgaccaatatcacttcagtttcaaaaaacgggggaagttctttcagttatatggaactctccatatccttttcctttactgaagaaattcgcagggttggaatttggagaagaatggaaagcattgatatagatcaaaagggtttagatacacatgtacagaaagttgggaataccccggcagcaaaatgaaaagtaggactcaatattaaactattaatacttcccatacacatggcattttattttaagaaccgtttcactggcaaaattttgttaggaaatgcctaaaatttggcaaaattttgttaggaaatgcctaaaattgttgaaattgttcgacaaaaactgtttctacagggaaatacaatcattaggatggcatgactggtgaaagatcgtgcttttgttttgtactcattttgcatcaagtgttcacagttcctactctactgttccaccataaaatgctgtaatgtattttgcgtctgtgtgaacactgtgaaggggtggattt

SEQ ID NO: 113341 - DNA, 1030 bp, Setaria italica
  Intron number 1 from transcript Si028231m (locus Si028231m .g) derived from phytozome v7.0 (chr-ID scaffold_8; pos 15 158287 to 15159316)
tgcttgaaggcttggataagtgcagcaggaattgggtactagctcgaattctgaaagtaacacccaacggcaaggttaaattcaaacaccaaacaatagaaaaaatttacgagaggttgcaatagctcgctgaggcgttccaagccggactaggagaaagattagctaaccacctcaatcataaccgtagagcactctaggcgtgttcgagggatgtcatcaacattgccctggggtaaagcattcccaatcgaccaagcaagctacaagaagcacgaaagttataagaaaaaccttgaagagaagatgagagaaattgccaagcaggagttcatggagttcttggccagccagcacctagcaacagtggctgatgccatagtgcagaaccaaccattgagcttgcccacacaggattcgttgctccgagtagtgctgactccattgcaaacgtgaggtatcctgttgatgacatacaagtggatacagcatgcaggttggttataccttatggaaggaaacaaaataagtttcgagaggccgcaaccggtatggtagtaacgggtcatgtgttcccaaaagcacccctgccagaatacgcctggtgtaagtttttacggtgttagatgagaggggattgaggttctcggtgatgcgatgaaccagtacatatgatcaaaaagctccatcaacagaagtcgacaaggttttaaatgtattgaaaaagaaggcttcatcttccggtgaaaaatttgtgacttgcagcccctcttggcaaaaggaaaaggatcaaaacctcaattttttttgcgtcaaataaagtcccaatcaattatgagcatggcaaaccattcttgtattggtgggatctgctggagggcctataggaactgaataagctgcatggatggatcatgaatgcaatgaagcaaggcatttgagcaatcaccgtgcatgtcccaactaaggttttcattggcgttctcgattaccagattgtgatcgatttcgaggatttgcacaaacttta

SEQ ID NO: 113342 - DNA, 1009 bp, Setaria italica
  Intron number 1 from transcript Si007496m (locus Si007496m .g) derived from phytozome v7.0 (chr-ID scaffold_4; pos 55 51709 to 5552717 reverse strand)
gcagcgtctgggcgcagtccccgaccttcccccaggtacctctctcccctttatctctgcccgctctacttgtcagctctgttttctgctcctgcgctgatctagatccgagagactctagatctgcccccgccgccatctgctcgccgcgggcaccggccggatcgggggcaggggaggtccggatcttggcctcataggggagatgtggatccaagtcctcctcatcgtggttcagtggttgctgctgctggtgcttccgtgggcgtttgatgtgaatatagttgagtttaagcttgatgatgtgtgtgtagtagatttagggatggcaggattgtgttcgttggcgtatgaaattgatccggttggtcgctctattagactttattcaactcatgaaattatgctattgtcagaagtcgaattggcccgacagcaagcttggagcaatcgatttacatgtaaaatcagagagtggctgctagaggcccaccaaagactgcacgcagcataagtttcagcctacatagtgtcaactgtgactagaagtacatagttttagctttcattagatgatgattcgcttgctgctctgatgcccctctcgtgtgaccagttaaattcaaaagtagctttcacttgggaaattagtgttttgtgtcgcatgtttgatcacaccttgtggcctgcattgttccataggtctagtgcctagccaaggaaatcgtgtagtttgcaaaagatcttgctatacttagccagttggcttcatcatggtgttttcatgcacttcggctgtgtgatgctttgaacattcgctcaccagcagagactgaatttacaatggtatccttatatgtagggtgtcttagtatcatcaattgttacatccttgggttcacaatatctatctctctgttttttttcccgcattctcttatccctgtgttctcatgttcatgtttccttcttcttgttgcagtacaagcctgaggagattgttgccatc

SEQ ID NO: 113343 - DNA, 942 bp, Setaria italica
  Intron number 1 from transcript Si030193m (locus Si030193m .g) derived from phytozome v7.0 (chr-ID scaffold_2; pos 33 578606 to 33579547)
ggtgagcaattggacagggcaacaatttgcaacacgtacttcagggttcaggcgagattaacgtggaagaccggtggatcaaaaattcaaaacgctttcgcccttcagaaagaagcagagaaggtcacagcggcagcgatcatcatacgtacggcgtggaacatctagaaggagagaaatatgcgagtatttgaagggaggagcatgaggcctgaccaagtcgttgcactgatacaggagtatgtcaactggcgtttgtagggcgtgtggtactccatcagtgggttagagagctcttattatttttatgttaatgttgtacaagcgtgtctatttatgtaatattgaatttattgtaatttggaccttcctcctcctcctccttaaatgaaatagcaattcccctgctctttttcaaaaaaaattagcttcaatgatggaccgggaggtaccgctggccacaaattagctgagggacaagtcagcccactgacagtactacggtgttgtttagttgccaaagtttggaggtgccaaattactgttacagcactgtagcacactgtagcgtttcgtttgtatttgtgaattattgtccaaacattgactaattaggctcaaaagattcgtctcgcaaagtacaacaaaactgtgcaattagtttttaatttcgtctacattttgtactccatgcatgtatcgcaagtttgatgtgatgaagaatcttctttttgcatagtgccaaaattgggagttgggggtgaactaaacaaggctacaatgttcttccaaaaaagtggggaaaaaagaggatgacactgacaccttttgaccatgtgcatcacgagcttctttaccatttctaataccatctggcccggatccgagctctgtataccgcaaccagaagaaacgttggacaatcagctcgtcagctaccac

SEQ ID NO: 113344 - DNA, 989 bp, Setaria italica
  Intron number 4 from transcript Si006062m (locus Si006062m .g) derived from phytozome v7.0 (chr-ID scaffold_4; pos 23 831841 to 23832829 reverse strand)
gctctcggtatgccctcttaatttttaaaaaaaatgaaatgtttgttacatgtgaatgtaaaagccactggggttccatgttgcctgggttccatatgtaacatcccataggtatcgtgcactatattactaaaagggcgtacctagtgcgaaagctcccacacaaggtggggtctggggaagggaattcctagacaaccttacacttgcaaaattcttttaaaattctgcaaagaggctggtttgaacccaggacctccgggccacaagtggagagttttaccactgcgccaggtctgcccttctatcatgcactatgttactaaaaataaatattcttataggtttgaagaaatagtaggtaaaatccgaactatggaaaatccatagtaaggggtgtgtgttgtgtgtttgtatggccattttggcctttttctcctatcttaatgcaatgatacgcagctctcctgcatatttgagaaaaactatggaaaatccgttaagatacagggatgtatgtgtgttctagcttctgattctatcattaaacaaacctaaagttgttttaaaacctttgatattggatattaactttacctcattgttgtcaatttcaattatcatgcaagagcacctcaaacttccattttgtacataaaggtaattccaattagagcttaatgtggccattttgacatgatggggcttgtgcgctgtgatgcccaaattatttgttatctatgatattctgaattaatatcaatgaaattccacagctatcttaattggatttgcaattaaaattaaacatattatttaaatttctgttacacttttagcatttattggtttcaggggtggggtggggggggggggggtcatactggaaacaggatgcctagaatgccaattgtagttatgtttgtttgtaaattataattttttgacttggaaatgactaattcatggtcgcctttttttgaatgaag

SEQ ID NO: 113345 - DNA, 847 bp, Setaria italica
  Intron number 1 from transcript Si029140m (locus Si029140m .g) derived from phytozome v7.0 (chr-ID scaffold_2; pos 16 3100 to 163946 reverse strand)
gccacgcccacgcccgctccggcgggtaccactccgtaagcccgccaagctcccaatctatctcccttcccccccccccccccccgggggattcccaattcggtcttcagcagccttgctgtttgccgtcgggcctagctgggctagggcttaggttttggtttcgttagactgggagcctcgcggttggggatgcagtggttcggggaaggtgtgcggtagtgcggatttgttctaattttgcagagaaaaattggtgaagcacttgattttgacttttgggtacgtaatggacacatagatacatagatgaatccatggatttatttgcctcattttgtctccaaggcctgtcctgtgtaccacgaaatccaacttaaacatcttggtaacactaggaggagaaaactgagtccaggcacacaaggggagcctactgggggcaggcatgtctttcatcgcatctatgacagtttagcacatgttttcagctttgttctgctatatgaatttcattgctgtactcgattgggttcagggaactctagtttagtgttttctacactcagtgcaccaatctgaaaattgctaagctgtaaatctatgtatatctcgggaatttctagtggtaccaagtcacctgaacaacactggacctatcttggtgttaatttggaccactgtgctctgctagtgccaccaaagagttaaagcttagctcatgtagtttccttctgccccaattcttcatccttacataatgctccagccttctaatgttgtgcgcttcaaggaaagctgtctgttttaatgcttaatatggatggatttatgtaggaagaagtgg

SEQ ID NO: 113346 - DNA, 848 bp, Setaria italica; identical to SEQ ID NO: 113224
  Intron number 1 from transcript Si026610m (locus Si026610m .g) derived from phytozome v7.0 (chr-ID scaffold_8; pos 39 897943 to 39898790)

SEQ ID NO: 113347 - DNA, 619 bp, Setaria italica
  Intron number 1 from transcript Si026270m (locus Si026204m .g) derived from phytozome v7.0 (chr-ID scaffold_8; pos 34 858532 to 34859150 reverse strand)
actctcctccaacataagctcttcttcctccatcggtgagtaaaccttctacgatgtgcctttcggcttttggcttatctgtaacaatttatgggacttcctgagcaacggggattctgattctcatctggcgagcagcaaatcaaaaccttgccatgctttgttacctcatgttacatgtcttcaagtagatgcccataaggctgaaaggagataattaatggtaacctgttttgtttcttgcattgaaacgacatttattgatggaattaagttgaataggaaaattttcgtctaggactttgagttgccctttcccagcataagcacggatgggctccactgtcagctttgttgaactttaaatttaattaacttccggctcagcacttttttctgtgtttatatgtttaagtataccattccgttgcaccaattatgcttcaataggccaatcacgaattcaaagattgaaacttagtaatcagtaatccctccatcccaataatttgtgtttttcctatatatttctactacatccaatagtttgtgttccatggtgtgaagttgtatctaacatgaaagagtacatacatacatcttcaaccaggactacagg

SEQ ID NO: 113348 - DNA, 850 bp, Setaria italica
  Intron number 2 from transcript Si029845m (locus Si029845m .g) derived from phytozome v7.0 (chr-ID scaffold_2; pos 15 059058 to 15059907 reverse strand)
aagggtgtaagctctgaatctcttttgctgcttgttcagtttattgctaccttcgtaaaattgttataaatgaaatgtgatagaaccattgaaagtgtcccagcatgtgctctcatggtctaatgcatgctttaataactgtgtttgttcatttgtttattctttcatgtcaaactgagatatgattgttttctaaacagagtatgtaacttattcatatccctagttttacttatattttgtctcaaatgactcctgtttgtgttgtaaatccaatattttatgctagtttgttatttcgatctctatttgaactggaatccccctgagtttgttcaatactaagagctctcatcccacatgtgcgttgccaagtttggtgttgctcatggaatgaaatacagtactcagtatatgcacttatgcactcatagtgaatgaaatttgtacttactgaattattgtttgttgttttgaagtttatgggtatttatatcacttgtgcagacatatagtttatcacgttttgactactgaatatggaatatttatcttcttatatgtggtgtgtgtacttgtttctacttgaagacataaactcatgatcacttttgctctgtaccttaaggtcttgtttgattgcaacctcctagaaaacagcttataatgttttactctacagttacattgcctaatagcataaataacttactggtgttcaactgttcatctcaattataggaagaaagattgtcaatgattaaaatttgttgggtataatgtagattagcatggtatgttacagtttaactgccttttgcaggtagagtatttcaggcagcattctggt

SEQ ID NO: 113349 - DNA, 579 bp, Setaria italica
  Intron number 1 from transcript Si029845m (locus Si029845m .g) derived from phytozome v7.0 (chr-ID scaffold_2; pos 15 060052 to 15060630 reverse strand)
tgctgcctggggcaagctcctcttctccgccgcaggtaacccgctctgctcacgcgctgcagctgttcctaaaactctttgcttccctatctatcttgacgccaatggtaattaattttagtagatctttgtatgtatatttagtttctcgaacgtgtgctttatcctcggttcagtgacgttcggcaatctagatgcctgggtttattatgcaacctaattgagaatcgctatatggaagatttcagtgtgttagttcttatacccattttaatcatttatacatgtttgatcatattacagatattgttcaatttgtgatctttatttgcaatggtaggatgtggcatttggatgcgcagtaaacttttgttttcttggttacacgttcacacttactagtttaggaagggagcttttgatatgacgtagtaattacagaaatttgttatgatttggggactactaagctggataaattctttttctgtttagtttccttgataaacttcgtgatggtcatatatgattatttgttctgcagatttgctcgtaggattgttcatagacaccattctg

SEQ ID NO: 113350 - DNA, 640 bp, Setaria italica
  Intron number 1 from transcript Si033680m (locus Si033680m .g) derived from phytozome v7.0 (chr-ID scaffold_2; pos 32 201112 to 32201751)
ctggttcctttctgcgctgtcttcatttttgtcaggtggcatatgcttgcccctttgactcagcattcatatttattgatggaacatgtgtttacattttactcgaggttgctattattatctgatgctacacactgttagcatcttctaataatgtcagttcaatttacatctttttacctacaaaaatttccagtttccagatattggacaaaaaagagaataaaatacaagaagctttgtgcagcctttaaatatatttgcttgtatacaatgtctttgagccaaaaacctttcaaatcctcaagttacaggtttgaggagaaacaggggttctgattactactgtgtatggttgctagtgattttttttttttgggggggggggggggtagggggggtgggaagacctgtatggttgctagtgttgaatggcagtatgcgcgtgataggtttgtgataggcttcctaaaaaagaggaatttgtaggtgctgaaatatgaagcatccattttatttgtggaatttctttactttgattggagcaaaccttttctatcatttttgccaaaattgaaataaccgcaggttttttttcttggcagaacttgagattcaaaaggtactctgcgcacatcta

SEQ ID NO: 113351 - DNA, 631 bp, Setaria italica
  Intron number 2 from transcript Si029119m (locus Si029119m .g) derived from phytozome v7.0 (chr-ID scaffold_2; pos 46 410829 to 46411459)
gtggtcgaggcctacgagcggctgtccaaggagtgagtgtgattgatctgacttagctgattgctgtctgatttaattaattcggcagtgtggtttgttccgcggatttcgtagtggaaagtgcaattctcgactactggaagtcgtaatgggggtaatctatttggagtttaccagtttggtggtgtctctgtacttgtttatgttattggaatctaatttgctttgcctatatggatgagtttgtctggacatgatcaatgcctgcctggatccccagctttgagctagtgcagaaatattattcgtttttccaatccagtgctagttagatactgtttgtttgagggaaaattagtaatatactgtggatgaatgcttgtctgttgcttatctgtagctgcaaagagataggttcaggtggaatgtgactcactgactccgatgggggacgggtaggcatttccaaacctggaaggaaagttgtttgagctagaaatatgcttcttagccttttctctgtagcatttgcttttcttcttttggatatcttctttcatggaaactgagtgaatcctttgtcgatgtgaactcaggctatctgaaacgaatcaccaaccaactgttgata

SEQ ID NO: 113352 - DNA, 806 bp, Setaria italica
  Intron number 1 from transcript Si032710m (locus Si032710m .g) derived from phytozome v7.0 (chr-ID scaffold_2; pos 39 439919 to 39440724 reverse strand)
cttccagaggtatgttataaaatgctaataatgggagttatataactatattgaaagcaaaaatatatatatcaccatgactgctctaaaatatttcattaaaaaatgaccactcttaaatattgtacaatgtaaggcctaaaatagagatacaagtgggtaccaattggtgttttctgagtcagctgcttaattgcgatggcatgccaagttcattttattaagttttttggttgccaatgacccaaagaatttatgtattgcatacctacatatggctaaaaaaaagttatgaaatatttattgtaaagagaaattttggaacaaaactttaatgctgcagtctcccacattcctaatgcattgatatagcttttctttgttccaactgcatcacagatcaactctttttttgtaagtcttgtggagtagatttagcagagctgtcatcgttatcagctgcattttatacttcttcccttgctgtgattgttgaggtccagatccatcgatctgttgtttgcacttaccagaatcattttgtacttcccttgatgtgattgttgaggtccagatccattgacctgttgtttgcacttaccataatcctatgttggttatcgctaatctatccctatggcagctctaaactgacttttacaaagaaaagtcgcatctagtactatgtatggagatttgattgattgaaaattaagacggagtaacaatttgcctttacttgtatataagatctgatgctaatgcatgcaggacatctggaaccatatacgttccctagtacctct

SEQ ID NO: 113353 - DNA, 383 bp, Setaria italica
  Intron number 2 from transcript Si032948m (locus Si032948m .g) derived from phytozome v7.0 (chr-ID scaffold_2; pos 10 694981 to 10695363 reverse strand)
tggtgagcaccttaatttaattattcacgacgagttctacaatacatatttcttctttgtttctaatcaagaccttttacagaggctgatttagttagtgttttttcaaaatatgtttcaaacaagagatttggtttgcactttaatttaataaactaatgaacaatacatgctacatgtgtagcaagatattggctaaaaaagattgggaggacaagtcaaatctagctaacagatgatgcatgtagcaaattaaaaccggtgtcacttggtccatctttgaaaattcctccaagaacaactagtactcgagaccaatctgaacacgaaacgtatttaatgccctgtttgtgcgtcttgcacggcagttctacgcggcggtg

SEQ ID NO: 113354 - DNA, 403 bp, Setaria italica
  Intron number 1 from transcript Si033387m (locus Si033387m .g) derived from phytozome v7.0 (chr-ID scaffold_2; pos 81 72232 to 8172634 reverse strand)
cgggagaaggttgttggtggtgtttttctccctttcattcatgcactcgaccaaattcttcctgagtactcgtatattatagtccctgttggttgacgcaatcgatcgttgactttgatcttcaagtctctacttggtaattcagcttaattactttaatgatggcagttccaattagcaatgcagaaacaatagtcaataatctgttgtgttgttgacagcttcaaaagatctaaattgttttgtcaactcatccggtttccacgttaagtttacacaccaaatacttctgatgaactgtaaaaagaaactgtcagtgttctttgagtaagtagagtgggcatgccagtgccgcagcatgatctaacaacgacggtgaattctatcctatcaggtatttagc

SEQ ID NO: 113355 - DNA, 675 bp, Setaria italica
  Intron number 1 from transcript Si028856m (locus Si028856m .g) derived from phytozome v7.0 (chr-ID scaffold_2; pos 97 88507 to 9789181)
gtcaacaagctccgagagcaactccagtacaaaaggtgtgttgctttatttcgactctatgtccctatcttcctttatctatagtgatgtctgtgctcacctagtagaagcacccagccacaattatcttaaaaccagaaattatcacataattcggtgggaaaaagaaaacacacacatcaacctttattatgaatggctctgatctgttggcatggtcctcctaatataccacaaatgcaactaggatctgattcacccggttcataacaaacatgctcagtcaattggcaaaccaaaaaaataaaataagaagcttatataagaatgttgtttttatctacaaaacactacaatcttcatgagcttaaaagcatgttgtttccacccaatttgagatacataagcatcaatcttcaagatcttaaaagcatgcgttctgactcttaaaaagattcacaacttttctatatcttgcagatggaaaaattattaacatattttgtgttcattttacctagaatagttgtattttttgtcataatgcaatatgttttcattttgattactatttcaccagatcaagaatgaagcattacatgcatagtttttcccttacaacataaattttataaaatcagaatcacatattatgcaggtatattgttctagtgg

SEQ ID NO: 113356 - DNA, 934 bp, Setaria italica
  Intron number 1 from transcript Si027155m (locus Si027155m .g) derived from phytozome v7.0 (chr-ID scaffold_8; pos 17 862737 to 17863670)
gcccaggtaagcagtgctatcccccctgtgaaatttccatgtcgaatttcaggcaccgcccttcgcttaaagattggaacgatgtttcggagtaccaaatgatccggtttccccacaattttcgacaatttctctacgggtagcaaagaccctgcactgcaggttgatggcgccagagatgaatgcgtccgcttgacttgcgatttagggcctgatctgtaggtgcgagatcaactagttaaacctacatagatctaaggttgattttttcttaattcgcacacatgttttccgtcgatgctgaaaaaaaatgccctttgtccagacaattttgggcctcggttatgccagatgagatgactttatggcatgatagtacgccaattatttgtttgagggactggccaccgagcttcaataatttaattatcagtgtttatgttttaaattgctcgttggaaagtacttttaacgcagtatgtttatctagtgagtataaattatattgggctttgattataaaccttagaggactctctctcttataactctaaaaaagcttgaaacttttatatatgtgaactaattattttgtgtcttgctgtgcaacatggtcaactagtttccaccttttcatatcggaagatgttaactgcttactttgttaggattatgcggtcatggtagaacatacatgctatgcaattatataatatgagtatattggtcttcaaataaaagggttggggaaaaactatgtcaccatattgatttggaggcaacaacacacagaagtcttagcaatggaattgctaaagttatatctacggaatctggagaagcacgtccatttttttctcttctattaagcagaaagtattaattcctccaaaaattttgttctgtgatgcagactgttgtactcagggttggc

SEQ ID NO: 113357 - DNA, 914 bp, Setaria italica
  Intron number 1 from transcript Si028331m (locus Si028331m .g) derived from phytozome v7.0 (chr-ID scaffold_8; pos 29 288 to 30201)
cgaattgagtttaccctctactctaccggtccatcgtgcgcatgagaaaacatttagaactcaattcaatcaaatgacatagccgatattggatggggctctatttcaatctgcaaataacctctaagctaacattcatcatacatatatttgggttttcctccttgtttcattaggactaattttctttgtagcgtgtatgcgtgcgtgtggtcagttgaataattttggttggcagttctaaccaggtgctaggaactggctgctgatattttcaccactaggtgatcttatctgttatacaaaactagggtttgaataaattggagcatttttaaattttacacaaaaatcaagttctttgatactagttttgagcacttgtatatttttggccaaattgctctcatagcactcaaatgaaacagtttttgcaccaacgccattgttgtttattacttgcagcagcatctttgattcaaattttcttcatgtagcacatgttagatcgtacaccatcagccctggtacctgttagatcgtacagcatcggccattgatcatatcccaccgttaactttattaagtcctcacccaggttgtacaataactgcccagattagccattaatggcttgatggagtgctaggtcgggatagttggattctagtggtatttttgcatggacaaaaaataatcgcacgtgagctctgagattctctatattttcccccatcgaattacacgctatttactcttttatcagtgaacacgataaaataaaagctagcaaggtttccaattgatgtgggccatgatgactaatcttacaacaaggccttcattgctctaaaagcttttgtattgactctacttcaggactgcaaaggaacttaaacacaaggggcgggttg

SEQ ID NO: 113358 - DNA, 510 bp, Setaria italica
  Intron number 1 from transcript Si026060m (locus Si026060m .g) derived from phytozome v7.0 (chr-ID scaffold_8; pos 37 351477 to 37351986)
ctcatctttctttcttgctccgatccaagaagagggtaggactccgtgctcattttatttgatgatttttcttttgtgcttactttgatgttgcctgtctgattcttggcaatgccaatggaacttcttgagaagcttaaaaaactacattttttaaaatacaatagaagaaatttattggtcttgttcttgctccaagcgaggagtagagttggtgttccttgatttgtttttgttggtgcccagtctagtggattcctgggcccaaaaaaatttctgtcctttttcccctcagtatctgcaactgtttgatgtcttcctgttcttgcccaagtcccaaaggcagcatccgttttttaaaagcaaaaatttgtccttttctccccttattttcgacatgatttcttgggaccaatcccaaccgctccactaacccggcttcttttcccgtttcttcgcgtcgccgtgtttgcaggtgacaagagattgcggcggtagggtttggttaaa

SEQ ID NO: 113359 - DNA, 672 bp, Setaria italica
  Intron number 2 from transcript Si026060m (locus Si026060m .g) derived from phytozome v7.0 (chr-ID scaffold_8; pos 37 352073 to 37352744)
aagctggggaggtgagatttcagttcttcacccataaattttgctgcttttcgttgtttggttcgtatccattttttctactaaatattggtagatatttcttttctttatcttttttgttggtactcatgggaaaatattttatttttatctgttatgcgagatgttttggtttgattttctgatttggctgtggttgtttgcctgtttagaagatctaggggttcaatgcaagaaaaagtttgtgctttccatctcataaatacaagaaggaaaatggttgccctcgaaaaaagaagctggtgttaataagatttggttttagtgagccccaaatatatggagaaaagaggttctgttaaaaatgttgaacttatttgtaaatttctgggagatgtttgaacctaatttcgattccttctctatataactagatatgtttatttagatgactttttcttagtcttctttctgtagtcacaagattatttggttactgtgatgagcttgaatcttttggatttattatttctttcaagtcataatcataagcttgactagttgagttccaaaagaaaaggtctctcattgtgcattcactctgcttgccctcaaccttttattggtcatatgatttctgcaggttaaagggtcatctgcacgatcctttcc

SEQ ID NO: 113360 - DNA, 746 bp, Setaria italica
  Intron number 1 from transcript Si008837m (locus Si008837m .g) derived from phytozome v7.0 (chr-ID scaffold_4; pos 84 00940 to 8401685 reverse strand)
cgttccaaatcgccgtctcactgctcctcttcacggtaattgctctttgcagcatctaatttctgagaaaaggttattgtttttggtaccccaactcttgaaatgtgtcgctagtaatatttagtgttagtatttgttagctgttttccaaatgttcagtttggtatgtagacggcattcgagatggtttcaatatgataccattgttaagcatgcagatgtggatcacagttcagtacttcagtgtcacttaaccttttctttaaaaattgagggattttgtattgatgccttggtaatcgacaaaggtaaaatcagtaggttcaggaattgggtcgaaggcctgtagcaattacacccagtgtctgtgtgctataaataagaagataatggaatctctgagattaaccaaagacctgaatgtcgactgttgcttttgtctgctgaacaggtctccagctgaataattgttaacagaattagctttgttacttgcatgttagggaaatttcccaatggaaactggaatgtagcaaaaataaactgaattttgaaggcaacacaatttaggagctattaaagtttgaattggctcactgggttaagcaatctgactgcaaaagtttatgtttctacccttgaccaacattagctctgcgtgttgcttctggagttgactttgaaatttcacctgtgacaactggatttacaatcatgtaatttcctggaactgcaggttcttggtg

SEQ ID NO: 113361 - DNA, 657 bp, Setaria italica
  Intron number 1 from transcript Si033611m (locus Si033611m .g) derived from phytozome v7.0 (chr-ID scaffold_2; pos 82 83819 to 8284475 reverse strand)
gtcccgggctctcggcaacggcaaagcacgcacgggtatttgactacctgtttcatttttgttctagatttctcgaataaatccccattttgttcaagcaaagagccgtgtttgtcctttggggacggatcgattgcggaatgatgaatagtaaatagtttttatagtttccattcgaaaacgttggttgattttgtgatattctactctagggttagatctaacaataaagggactgggatgccctgtacttagttacatcgggagcattgtgttcaataactaagtgttgctgtttttttcgagaagataataaccaagtgttctgaatgcgatgctaaacaaatctgcctgtaaagtaagcaggtagcatagtgttcttataaatcagaggtatgcaaaacagcgtttcagactttcagttaccacttcaatctgtacctttgcaacctttgtagcttttaaccagtgtaggttccttaagtttgatttaacctaattagtgacacattttatcaatgccaactatcttttatccagtatcgacttattcttatcgttgcttggtcattttcatcggttccggttatattgaattatcgatgataaaagttgtttgacatattacttggttgttaaatttttgcttcagtatat

SEQ ID NO: 113362 - DNA, 776 bp, Setaria italica
  Intron number 1 from transcript Si029342m (locus Si029342m .g) derived from phytozome v7.0 (chr-ID scaffold_2; pos 35 165277 to 35166052 reverse strand)
atttggtctcggagaagtcgtccttcccagttcaggtgccagttggaatttctatcctgctttattttgttgattgtgccttttttgtgcatctatgttgatgataagggcggctaggttggcatcgaattttgcgtgtttcagagttgttgaggtttgatgagatcgtttcgggatcgcaaagcttgcgtctttggagtttatttgtttctcatttcagatgtcttctctccacgtcgcatcgaaattgcatctgtgttgattcagttgcagggactgagtgctctgttggggaaagtttgcagtttggtttgcaattctcttgcttgagcactagattggattctgcattctgtatggaaatttatgttttgggttatcgtaaatgaatttactggaaatttgtaaaggttgccgtttgttgcagttgatttttcaactcttcgactcctgtatttgacttttgtcatctctacagactgataagctgtttgccaatggagtttatagttggtctgtgtactactgatcaatgttcatatatgaatatgatttatttgttttttgtgttctgcctttggctaatttttctgctgtaggatcctgattggttttcaacatttgtttcgctcagtatgtaaaatttgtaaagagggcaagagaagggggaaaaaagaactttagctcagtttcactatcaagcaacctgatattgcaacaggactaatgtggtattacatgacaattatttcagttgagataaattacctgcacgc

SEQ ID NO: 113363 - DNA, 575 bp, Setaria italica
  Intron number 3 from transcript Si032915m (locus Si032915m .g) derived from phytozome v7.0 (chr-ID scaffold_2; pos 43 801482 to 43802056 reverse strand)
gcattggaacaatattggaggctctacttgcttgggtatttttgccttctaccactcctacaccttaagtactatctgagacatgtttgttctaagttcatcatatccaagtttgacttccttgtgacgattcttttctttgatcctttccaaattaaaaagaatcatgtgatgcacatcctttttgtttcagaaatatgcacagctttttgtagcgatctattaaaaacgactgagaaaattgaggtacaagaatgctctctgggttagatgagcccatcaagaagcttaggaactataagagaaaagggagaccagacaaagaaaacaacaactgatatcacaagagaacaatctcaagctgtagagttaaagacgttatgatgattttatatacgaaaggccaagcaaatttgaaacggagactcacatttcaaaatatcaaaattttaaagtgtaaagggcataataacaataattccgtatttttcttttttcagataacatgtaaagattttatatattggctatcaaattcattacatgtgaattgtatatgattaatgcaggctgtc

SEQ ID NO: 113364 - DNA, 928 bp, Setaria italica
  Intron number 1 from transcript Si029826m (locus Si029826m .g) derived from phytozome v7.0 (chr-ID scaffold_2; pos 22 805134 to 22806061)
cctacaccaaggtggaggagagcttcaacgtgcaggttccatcctctgctccctccttgtttgcctcgccccccatcggaatttggtcgcagtatgttgctgcattagtatagtgtcctggattgactgcatacccgtcttctcattctctggtggccggcgacctgctccgccccgcccggcgtgcctcatactcgacgcaaaagcagttgcacccgtgccgctgcctcgccggctcatccctgcccaccctgacttgtcgggctgcttaacccctaaacctaattatgggggtgctgctattcatcccgcgagcaatagggagttcccaatttctgcggatgttctgtgcaagtagttttgttcactgctaattaggcacctcagacattcggggatgaatgattgctaatttcttcaggcccagaagcttttgtagtatgtgttgcttgctggtgggagggtgaactttagatggtatgaattaaccccgatggatcgaaatggttttatttactaccgcgggttgcacatgaggatttttagagcaattattgctaatgatcttgatgatttaaggcagtggcatgaaagaaaatgcagacattcattgaaatgactttgaatataagcatttagttggtaaaaggagttgtatgtttgttggaatgcaactgtccacatatgctgtggaaatgtctagtgtttcccattatcaaatgccaatttatgtttcttttacgcagccatgtgtcctgtaacttagaagactttagttgcaaattaagtttagctgtacatgattcttacattttccaccttcatctgatagaatatgcttaccttgcctatggtttgagggtgcaattttactgccatgcatttcctgtggtcaagctagttacatgattcatttattttgtaggcc

SEQ ID NO: 113365 - DNA, 407 bp, Setaria italica
  Intron number 2 from transcript Si031868m (locus Si031868m .g) derived from phytozome v7.0 (chr-ID scaffold_2; pos 35 424503 to 35424909)
atgtatgattcctttatatgcacataatttatgcatagttgtgtaagtgatgcagataacttgcctgagtgctggaaaattttgattgttattcttctattgcaggtaatgtgcaggtctgtaaatggtgcagataacttgattgaatgttggttgttttttacctatgttttttataatcacaaatttttttgcttaggtgcttaaatggtacagataacctgattgaatgctggaactatatgatgattctcatatccgtatctgtttagatattatcgaatgaaatagcaaaacagatatctgatatttatgtgcttcctttttagtagttatatattaattgatattactttggttttgttggtttaggtctgtggtatcttttagtaaggtgttgtgggtga

SEQ ID NO: 113366 - DNA, 473 bp, Setaria italica
  Intron number 1 from transcript Si029453m (locus Si029453m .g) derived from phytozome v7.0 (chr-ID scaffold_2; pos 21 927249 to 21927721 reverse strand)
gtccccacgacgcaaccctcttgtcccaagccgaggtaacttctatcccttatttggactctcagatctgaacgatttggcgaagcattaggcatgaactgagatgattttagcttgaggatgttagttattggatgttttccatgctctccttgatgtatttgtcaaataaattaaccatgataaattgctcagcatctaaccagcccatcgaaaagccatactgcctgatttcggcagtggatttttctcaggtgggagcaccatgtagatgcctgcctttggtgtctagttctaacaattaaaagtgatagtttctgtgagggtgttaaaatggtcgacttaattcaataaataatatgattttttttgagattttgtgttttttctgtttggatggattttataacagattttttttctgtttggcatcaagaagttgtgttgtcttcttccttgcaggaatttccacc

SEQ ID NO: 113367 - DNA, 977 bp, Setaria italica
  Intron number 3 from transcript Si005871m (locus Si005871m .g) derived from phytozome v7.0 (chr-ID scaffold_4; pos 32 744698 to 32745674)
gagaaggaacaccataaatgtaaggatccaattatccccttccactgatttgtatttgttgagtgtagatttgtctttccagctttctaggtactgttcatagattcaagttctcagctgattgaatcgggctccacctcaaagtgacttgatacaatcaggcaatcatagaattgccccagtgttaggtgccagttttgtttcagccactgattctcaactgtaagatgtggagcaaggagtgaatttgtggcaaatggggtttctcctaggaaaaagtggtcaaactgatgccattcacctgaagaatttggttcgcatggagtggaagtgtggaagttgaggtgccaggatgtgaactgctgaacaacaatcacctcaagttatctctatttcatcagaagctgtggtggactatacagttcatcttggaaggtctttgattcttttgcagggcaaggcaacaccagggacatgtcatcaaaaaagatggagctctcagtagtcatgcatactaacagtttctatgagtagcaaaatggagcagcttcgtcgacattgatgcacaatacatggaattactcccttgtttcaagagatagtaggtggagttcttaaatggaaccactagtcaaagagaaaggataatggttctcatgtaagatatgctagacacgctgtgctctttcaattgatattatgtagttacaccaaagtgggatggcagaaagatggtaccacgtagtaagattcaggaacctggaaaaggtcaccgctgctgaaagaagttcacatctgccgaggtccaaattataaagcgaaggaccctattcttgactttttcgactaataatttggcctttgtcaagttaattgtgacttcactttattctgattccttttttgtgttgataatgtgctgttttattctaagtccttttctaactggatgaagttctgctatcatgaatctgcag

SEQ ID NO: 113368 - DNA, 384 bp, Setaria italica
  Intron number 1 from transcript Si025974m (locus Si025974m .g) derived from phytozome v7.0 (chr-ID scaffold_8; pos 80 02965 to 8003348)
gaaaggaaaacaaatcgagctgctgatactctgaggtatgaatactgagatttctttccacgcgagctgctgacctgctgtaattcatggattgtttctttcccttcttttttttcagaaattgccctgctattggatatagtaattattcagagttcgtgctaagaatttaacattttcttagactgttaaagaatagatattgaatggaatagagaagcacctgttttactttagttttgatcctttttaggctttatgctgtcaaatgattccctatttggatttagtcgtgtcctttctttgtatatgttgctatagccttcacatagatgccatttcctggcaggaattgacaagtcctctgctcttcaatttggtaag

SEQ ID NO: 113369 - DNA, 749 bp, Setaria italica; identical to SEQ ID NO: 113318
  Intron number 3 from transcript Si009118m (locus Si008903m .g) derived from phytozome v7.0 (chr-ID scaffold_4; pos 22 309176 to 22309924 reverse strand)

SEQ ID NO: 113370 - DNA, 1066 bp, Setaria italica
  Intron number 1 from transcript Si006035m (locus Si006035m .g) derived from phytozome v7.0 (chr-ID scaffold_4; pos 34 394937 to 34396002)
accaccacctcttccccaaggccatctcccagctggtgcgtgccccgtgcgcccccttccactcaggagcagatctctgatgctgctgacttagggtttgtgttccaattgtctatggttttccatttggcgtgcatattggtggatcagcttggactatcatataactagataggtagatcaattgacacgatcgatctgtttgcgggcacttcactaggacagtgagactagcaattgctgcaaagattatgctcttgacatattctacgtagttgcaataatacggtgaatctttactttgcatttatttccattttgcacagaatcatgtgtatcaagttgtcgaggcattagttgaatgttgcaatccaagtgcctttttgttttatgcaaatttgagttgagctgctatgcaatctctgtgaagtctgatagttgagattgcatttgactaggctagttctgctgtttggacttcttgatcatgctttgggctacggctatgctaccataatttaagtggtcctgtcaaatattgtgtgtgtgtatgtgtgtggatacaagtcacataatatgcagagaacctctgtttgctaacaatttggcaaatatcttctggattgttgcattcgaatgccaatgctgttgcatatacctttagattctcaaaccttcaattgcctttagtgtgaactagagccttgaggagcagtacataggtaatatgaaacaatggagagatctgtgtagcatacaatctgcatcgatttgtgcttgctgccgttgtcttgtgacatgctactgtttagattagcaagctttcttcgtcatgcactcagtatctctcagtaaccagcctaaaaatctctgtatatgttttttttttggttgcctgttactcatttgggcttttaagtcacaacagaacacagaagggacctccatttcttaaatcatgtcaacactttataacacattttaagaatgtttgggatccactattaacatcattatgctctgtcaaccaggtcaaaaaatatcacattagtgagttggagctatc

SEQ ID NO: 113371 - DNA, 802 bp, Setaria italica
  Intron number 1 from transcript Si029625m (locus Si029625m .g) derived from phytozome v7.0 (chr-ID scaffold_2; pos 80 432 to 81233 reverse strand)
actcctggggcaccgtcaccggcatcgccctcgtatctaatcacttccatcagtactttctttctttctttaatttcctttttgcgagagtatcacgagtacagttggtaacattattttacctaccactgaaaacctcaaatgtagagtttaccttcaagttccaagattaattctttagcagtgatagcaacaacctgcaagttactaacagttccatgtaaacaaaattatcagtgaagaatgtttcaaatattagtcttgtttctgaaactttgacaaaagatcaaagtggacttatatgaatataagatcagtcgcaaaagaaaaggaatataagatcatagaaaaattggaccaaaagaaatataagtggacttagaatcttacactagacaaaatatatataaatccctttccatgttgggccacgaagaaactaaaagtatcccctttcatttgactaaagtaaccaacttgctagtgttgaatggttgggtggacaaatgcaagcaacttcagagaaaatttggcttcaaaatgagatattttcagtgctatcaaaatttcagaaaagtacggtgatgctgctccatttccatgagcccttatttagtttcctgacaaaatttagtataatctacatacacccgactctaaatcttaagacatttcagtagaaaagttcacaagaatttctgacgtgcctgtaccaaaatgtctcttctttttacacctcatgtattgattagctggtatatttgcagactgggctgagcgggtccctggagacgctgtgcgg

SEQ ID NO: 113372 - DNA, 698 bp, Setaria italica
  Intron number 1 from transcript Si027504m (locus Si027504m .g) derived from phytozome v7.0 (chr-ID scaffold_8; pos 12 650024 to 12650721)
tcttcgggaaggccttttaaggttcagcttgtaaggttcgatccgtttggcccttggattttttacacccctttaccaggcctcacgagtcatctaaaaagttggatttaatttagttggttttaaagagccaagataggactagggtatatcgttaaatcagtgcatgtgcactcataagctcatttttagttgcttttgtgtcttcttaaaaaacaatatttctaatgattactcgagtaaataactgtatcgtccatcagttgatttttttcgtacgtgcgcgtcatgtttcttggtttgtttgttagtccagctcgttcgtgaatacgggcagcaattttcaggtcagtgctcatgggtcctttgggccctcggtgatggagagctcaactcggagtgtttagatgtgtccggcggttttgctctattttgtcgagaggtgggtgtggatcatccattcaacattttactcactcacctcctttcctctctttgctatcgggttttctttaagtttttgctcaagttcaagttcaagtgcaagtaacctctctctctcattttctttgttgcaagaatcaacaaccttggtggaacaactcacgtgtaagagttcattttgatttcactaacataacccgcaagctgtggtgcgttcaggaaggtgacaggatcgagctcaagccgctcccgtg

SEQ ID NO: 113373 - DNA, 777 bp, Setaria italica
  Intron number 1 from transcript Si008407m (locus Si008407m .g) derived from phytozome v7.0 (chr-ID scaffold_4; pos 63 16721 to 6317497)
tggcaacgcccgatccggagaggacctacttgcatgtgagtgtgctggcttttagtcttttcttcttgctggtccatctaaaagctaaatggtgtcgcatagctaaatttccaaattcatgttttaggtgacccccccaaaaggtctgaaagttcaggacacatttgaatgaaccttgatagtaaaatccaggaaacagtacttggtgccattattcagaaattcagaaatcagaaacgtccagcatgaattgcattatgattattcattacctagttgattcctggtatatatatacctagatttcagaaattcaggaaccaaagcgtacagcatgaatttcattacatagttcattcctgattatgttatcagaatttcagaaatcttagatatgattggttcagtaatatgccatgtagccctactgatgcagctgttgtcccctatctcatcctagtgtagtttgaaataataaagattgtgctccaaacattctgtagtagagatatgtgtattttagaagttgtggtactgcctttctgatatgtgtttttttcccaggatcccctgttgccagagacaattgtgccaaccaaggagctgcgttttgacagtagagatgaagctaaggaattttacaaattctatgcgggcaaggcagggtttgatgtgcgcataaccaagacaagtaggaagacggtactggagttgtcgtgcaacaaacaaggacactgggattactacaagcctggtgaggagagggtacgtgagaaa

SEQ ID NO: 113374 - DNA, 910 bp, Setaria italica
  Intron number 1 from transcript Si028679m (locus Si028679m .g) derived from phytozome v7.0 (chr-ID scaffold_2; pos 11 276773 to 11277682 reverse strand)
gccgccgggcttgatccgaccccgccggcggagtactggttacgatttgcctgatcggatttgtgcttgtttgattgggtagtagcgcgttggggatcggccgcgctgaaattgccgctcggtttgtggtgttttgttttccccgcaccttgtgatctcgtttagttggagcagctgtgtccccacatcattgagataatcatctattggaatccggcgttgttccaggaaatggtatctataggatatgaaatgaagagctgtttgctgtccttccttctgaccgtgattgtgcaatgtggcgaggctggtgctctggcttcaggctcaaactctgccctgtgatagattgcatccagtttttctcactaaggctctctcttacttagatgtggggtctgatcatctcatgatataggcttatgtgaatgtgatgttggtgagccagcatcaattgagaaaaatcagggcccttgtactctgtttggcgtttctcgacttgaaatcaatgtgcaaacataggcacttaaatcagaggtccttaaatcatgggacgtctattgatgttctctaaatttctttttcactcttttagtttaaattttattctgtggagaatgaaacttagtctatgtgtttgttataaccaattgtggaccttcatattgcacgtgtaagttcaaacgcaatgcaaggatttgatattcaggaacttgttgactattatttcatcagtatatgttgctcctggttgtgatttttggattgagatattgtcagttgttactatctattttgcttgtcctttgtattattcagtttgccacaatcactggtcaactgacattcgtgtgcttgtgcgttttctgttgcaggcatccaaagttcgttttacagtgggttctcaagt

SEQ ID NO: 113375 - DNA, 431 bp, Setaria italica
  Intron number 3 from transcript Si030618m (locus Si030618m .g) derived from phytozome v7.0 (chr-ID scaffold_2; pos 35 14381 to 3514811 reverse strand)
gagatccagttttggttgccaaagtcaaggatcaggtacccttaactaaatcaaaatattaaattcaaagtactgttgttttgtaggagcagtttgtgagcaattcctatgtaattcatacatttcacaagaaagtaaagttaatgtagctgtagttgcctgtttctatagttgtttcctgtttgtctttcaagaggttgacatgttatgtggtaaacatcttcgtttgagtttgacaatccttaagttattcaattcagccagccagccaccaggttcagaagtgaattgcatgttagactgtaccttcacctacaacctgactatttactgaataacatgattatatatgtatgcaacactaagaaaaatagaagtatctgtttgattgaagaataataaatatttttatgcaaggataggttgaaagc

SEQ ID NO: 113376 - DNA, 623 bp, Setaria italica
  Intron number 1 from transcript Si032444m (locus Si032444m .g) derived from phytozome v7.0 (chr-ID scaffold_2; pos 26 335043 to 26335665 reverse strand)
acggagaatcgcatccgagtaggttgctccccgccgctcaattccttcctccgttaactaatgcacatttcgctggaaatagaatctctacagccattttgggggcggttgttttgaggtttgcgacatcgttatcattagtctgtaaacctgggaaaacaaaagaatgtagcttgtgcatccacagattttgtgcatccacagaatctctacagcccctaagatttttacatttatgtaccgttgcagctaaggaaagcaccctttttgttctttgttgcaatgcctaggactaatactccttttgaacccataaaaggggatgcacaggaagatgattttctgcccgtgattatcaaaccattacttctttgccttatcaatctagtaagaatagtaaattcggttccggtaatcttatcattagtggattaaaatggagaaaagaatatttagttccactgaaaatagcaaatagttataatccgacaagaaaaagaaatgtcagttttggtactgtttgttgcttcttatgcatatttgttcagttggttgtcatgcttaatgtttatttgggtgatttgttctttgaagagactgaaagagttgcacgctaaagaacc

SEQ ID NO: 113377 - DNA, 797 bp, Setaria italica
  Intron number 1 from transcript Si027781m (locus Si027781m .g) derived from phytozome v7.0 (chr-ID scaffold_8; pos 71 15578 to 7116374 reverse strand)
caaccacaggttatgtatcctacttctatttgttagtgaaacaatgctatagtaaatctctgatactaaacatgtcacaaaatttcaaacactacattatttcactggcaattttctccctgtacacaatcagtatcacaatggggatacctgaagggcaaaaactgaagacagaagcaatttatggtaatcttactgttccctgaatccttttcttttgttagagattctgtacacagataatttgccacattagtgcatttttattttcatgataaacacaaatttgctacctctccctcttaaaatctgtatctgtttatcaagggaacctaagatgcatatttaagctccacagcatggctcctgcttttttttgttctgacaattgcttcattctctcctgtggactccggtgagctagggaagtctctacattgcttccgtgtttattggcagaaaactgaaggcacctaaaaagggtgttttaactttttgatatggctacctctcagatgtaaattggcttccaggagaatagttcacttataatggtttagggcttgcttttgtctgtatattcagaatgatttgaccgttgctattttgacagccttttacattcacatatctgtattatgaagcataaatataatgttagtcctgcttggttgtccctctcttttttctctttgcaccatttttatgcacatagataattttatgatccatctattcatattcttgttaaaaattttcatgcagttttgggtgcattgagtttacacaaggagtgc

SEQ ID NO: 113378 - DNA, 995 bp, Setaria italica
  Intron number 2 from transcript Si028201m (locus Si028201m .g) derived from phytozome v7.0 (chr-ID scaffold_8; pos 20 85422 to 2086416 reverse strand)
tatactccctccattctgaattgcaaggtattttggtttgttctaataagtcaaactaatgctaatttgaccaaattgtagtcgaaggagcataattagattcattacaaaatatattttcataatttacttatttaatgtgttagatgatcaaacttaccaaattgtagaaaagagcaataatatttaatgtatcaaatgagcataattagattcattacgaaatatattttcataatttacttatttaatgtgttagatgatcaaacttagagtaatttgacttagaacaaacaaaacggagggagtaaatttcaaaaagcagcaaaacatctctattaaggtatagcaaaaatatgataaaaaggacaatttatttaaaaattcactacaattttaacaaatactttgcatgttcggacatgacctaattgaacatgatgatgcaaagatatttaacatgtttgagttttatgtggttgacaacaaaaagagaatctatagcctagacttgggatttataatcccaactatggatcctttgatacctgctagctgatgtatccatatttttacaacatcattgcaaggttcccagggtaaccaaaatccatgtggtcatcatttttataattagctagccttggttagaatatagtatagctttgtcttcttgaatccaattataaacttaagttggtttaaaaattttacatgttttagtacattggtgctctaagtgattaattatgtaggccattttaatttgctactttggaagatattttttcctgtaacttttccctaccaattatcttgttttggttcttgatactatgtattatttggagttcatggagaatgcaaggtcccaaagaaaaactaaattgattctccttgatgcgtgtccaaataagttttgataaaacaataatagggtttgagtttggatgaatgaaggtggcaagcgctgaactttgcacggctcaatcata

SEQ ID NO: 113379 - DNA, 672 bp, Setaria italica
  Intron number 1 from transcript Si033149m (locus Si033149m .g) derived from phytozome v7.0 (chr-ID scaffold_2; pos 31 91176 to 3191847)
gaactcatattcccgtttccatatcccctgagaagcattctccttttaagaataggaagggcacactaagcataaatgtgatggtggcatgtgatttcgatctcaacatcacttttatttctagtggatgggagggatcagttacagattacagagtgctaagatcggctatgagtaaggacttccaggtacctccaagcaaattctatctggttgatggagggtatgcaaatattccatctttccttgctccatatcgaggggttcgataccatttgaaagaatttggagctagacatcgaagaccacaaaactcaaaggagctcttcaaccaccaccacgcactactgaggaaccatgtggaaaggactttgagtaggtttctacttacaacaagtgctactaaaaagaagccttctcctaaatgcagtggggcaaagaggagtggagattcaccacgaggtatggtgtttaatgtttcttcatgctttcttatcaattttttattattgatgctatgaaatttttattactaatgcttgacctcatggtggtaagttaatttcttaaagtaattctatggataacctcatagtgataactttgtatttgatcaatgttttcttcaaatgtgcagactttccccaaaatcaagaagtttcaaaacaacaa

SEQ ID NO: 113380 - DNA, 1020 bp, Setaria italica
  Intron number 1 from transcript Si030588m (locus Si030175m .g) derived from phytozome v7.0 (chr-ID scaffold_2; pos 46 094835 to 46095854 reverse strand)
gtgtaggttgtttatgataagcgagcctctgctggataattcatgctcgcatttttttggcaggttggaccttagatagggactaacaaaattttatgcaggacgtgccatatggtgtcaacttttcacaaattatgtgtctgaatgttctgttgtgatgctagctgagtgaaattttggtgcatgtgtcatctgtttatgctgttaacaacatggtcgcattgttgttaccagttccttttcctctctttcctgacgttgtctattcaatttcttataaacgattatgtacaaagtgccatttcataaatggtaaaccaatcagatcacagaaacttttgttttgcatttttttgtatcatgtgaatgtcttacaaaaaatggatgttgcttctaatattgttggtgattgtactataacaacagcaacatgtttctttctgatgtaactagtcactgtcaaatgctgctaaatgccaaacatataactgagagtctagagcagagcctaccaaatgagaataatttacaggaggtttagataggtttatgggtggttgtgtattggccctttggattgtgcaaattttgagcttccatcgaagaaaacatactcgcttcagacaggtggagtggcagaatattggctgctatctgatttctggctgattctttgccatggaaaatacctaattgtgatgttcattttatttgttatgcattttgattctcgtttgtggtgtgcttgcggagcaactaatttcactaatcttgttacacccctagtttgataatatgtagcttgcttttgactagagtatactatagctagcctattgactactgcgaacaactgattgtccgcatttcgttgctagaaaaatacatccatctgtgtgctatatgttgtacagaacaccaactatgaaaatttgcaactaatgttttttctactccaaaggtgctaaccatgttctgaaaatttgcagctgagggaccttgtttgggccacatccaagc

SEQ ID NO: 113381 - DNA, 380 bp, Setaria italica
  Intron number 1 from transcript Si032088m (locus Si032088m .g) derived from phytozome v7.0 (chr-ID scaffold_2; pos 31 76156 to 3176535 reverse strand)
ataggctattaaaaaaatcaaagtattccgaattgattgtttctaaatcagataactagattgattgttgtggcccattggaaccacatccatcaccagatgtaattaagcattcagacgtaattaaggaattagaagaacatagcaaaacaaaggttgacgaaacatatgattatctcccaaaagatatttggtattttttcattatacattgttagttccctcagttatgatggttcaaattacttgacttttggcatattatacaatgagccatctggatttttgtgctttgacttttggcatattatacaatgagcgatctggatttttgtgctcaaatagaaatagaaacatcttggaatctgatctactggtga

SEQ ID NO: 113382 - DNA, 850 bp, Setaria italica
  Intron number 2 from transcript Si026430m (locus Si026432m .g) derived from phytozome v7.0 (chr-ID scaffold_8; pos 17 675310 to 17676159 reverse strand)
ttcctctgcagctcgaaggagaagcccacccttgggtaagacatctttgcttattcttactgaaaactacatcatcagttttttatgaaatcattgatgcttgatcaaacattcccttgagtcagtatgatggtcctcagttgtgcatttctgttcctttcataccctcaaatgtagttggcatgctctttatcgctttctatctataaataatacttaaaatgtatgtatgaagtaggtatatggattttgctgtatggctgcagttaaaggagcaatccctgtaatttttgtttgatatattttttaggaacgttttgcttatgtggttatattgatgaatgatttgctgcaatagaagcacttgcagcatctgggagtaatgatgttacatgtttaagtttctttgttattgttccttttgagttcctgattacatgtggccctcttctttgttttgttgaccatccttttactgtgttgtgattttgtctattttaacttggcaagtttcttaatacaaacatgaaatttatctgtcatgattatagttgcatctttcctgttacctttattagtttattactatcattatgtgtaggtttactcctctcttcactattttcgactattttgtccgatcttgttggttttcatctatatcctaacatgatgtttgttgttatattatacttgcatggttttcttattaggattaccagcccttttggttattggttactcataatacataatgttcatgtcgtacagaggcatgttcgtgcaatttaccttttttctggcaattattgcagaggcacgcggattaagacccgcaagcggaatattg

SEQ ID NO: 113383 - DNA, 812 bp, Setaria italica
  Intron number 1 from transcript Si026430m (locus Si026432m .g) derived from phytozome v7.0 (chr-ID scaffold_8; pos 17 676114 to 17676925 reverse strand)
aggtacggatcgccctggatctctgcttctgcttctgcttctcgtagcgccgttcctagcggatctatagggctcgatggcgcttcagcttcctgttggatctatcggctaggtagctgctgtcgccatcttcgtttgggttatgaaaatagtttatatttgggatccctttctattttgatggggtggtggattgggttttcgagcggattcggtgtcatgtcagttgttattgagctgatggtactgttggcggctaggttcgctttaatgtttctcggtttacgtccgccgcaggagggtggacgattatatgcgtgttagtggtttttgaaacgggcacagggatttgtttcgacgttgttggtggttctgatggcttgatctctttggtttgggaaaagtttggggcttggtggtggggatttgaaccgctgggttaagtttctgttatgctagttgtttcgtaggctccctgattcttttggtccttcgtacatgggctattcaatttattgtgcatgacaattatttgttcttcattgatatggctacttgctatatcttcttaatttcgatggtttagtggtctgcttattacttgcaagttgcaacagtcctaaagacctggtaaaaaataaacctcaaatttctttccttacaattttgagtgttcaattgggagtatatgcgtcagtttggttatggaagaatttctttcagttgaattgggagtacatgttttgacttatatatgtcctcttctttcctctgcagctcgaaggagaagcccacccttgggtaagacatct

SEQ ID NO: 113384 - DNA, 719 bp, Setaria italica
  Intron number 2 from transcript Si030843m (locus Si030843m .g) derived from phytozome v7.0 (chr-ID scaffold_2; pos 42 203569 to 42204287 reverse strand)
ataaacaattttgcaagtcccctctaatttatcaggtaccttttgtccatttctccattttttggggcatgcaactttgcaaaataatcgtttgatctttattatgtaaatgtttgaaattaataaataaaagtgatatagtaccaaattttatacctaatctttaataacttaatgttgtaaaatctttcgatggtatttaagtgtactgaccaagtttgcttgtatctttactacttgaaaaaaatctgagttgtttgtggtggttggttttacattcgaggatcttctctgcatttgatgtgtttgaatggagaatcttcagtgctgagtttgtattcatgtgatttctttgtagcttaattattgggtgagtatgtaagttttagatatagggacaattaaactttaagtatcttagcgagtagcatttagaaaaaattttaaagtccatcacaatgcatgggcactcccggctagtatttctaaaattgagatatttcattgtcatgaatccaattttccaaaagttttaaatgtatttattatcatctatcactgcccaagttgaacttttagtatgtttagcatttgtttattcttggctgcagttttcttccttggggtcacttgatgagaaacggatgagtgaatttgcattactcgctgtcagatggatcacagctaggtatcgggaaaccactgattgtccggcctac

SEQ ID NO: 113385 - DNA, 545 bp, Setaria italica
  Intron number 1 from transcript Si030843m (locus Si030843m .g) derived from phytozome v7.0 (chr-ID scaffold_2; pos 42 204347 to 42204891 reverse strand)
ctttctttaggaaatttgactatagtaattcagttagtacaattctttgatctcaaagttgctttaaacttacatgcagtgctgaacggtttaatttttttggtttctctcttaactagactagcatatgcaatgatgttagcacttccgtctaaatgtcatttggggttatagcaagtttcaatgcttagctttgataaacaacagaaaaatggcaaattatttaccatgtaatagttggctttggatattatgtgcattgttgatgggctgcttgaccaggtttatatcatgccaaaaaagttacatactctgtcattttgagcgtcgtttggctgcttaccatacaaagtgttcattacttggaagaattttcacgttgattcaaaaaacacactatgcgttttttatccattttggcctgctactttcctcgtccgcgccaatttaacccatcctttttaacttatctatatattatttaatctcaagtgatcatttgcaggtcaggttgattggatcagttcctgttatcacgtgggccc

SEQ ID NO: 113386 - DNA, 404 bp, Setaria italica
  Intron number 1 from transcript Si029429m (locus Si029429m .g) derived from phytozome v7.0 (chr-ID scaffold_2; pos 70 522 to 70925)
ccaaggcctccgccagcaagaacgccgccggcaaggtaaccaccgcgacccgcatctccatctctctccttttccactccggtccggtctgtttcttgagacttagcctggatacctacctgcggttcttgagggggaaaaaaaaccaaattgctacttgtactgtactccagattcccaattcgtctgcacacgagaatcctgtagtacctctttttttttgcctcgtttaggatgcctgttctttctttgatatattgataattagagagggcacacccaaaaaggaaaataaaaagttccttagactgtcaaactgagacgccaattcttgagctttgtatggctgtatatgttgcccaaaaaccctactgctaactgaatttctcttcttgtttgttagg

SEQ ID NO: 113387 - DNA, 275 bp, Setaria italica
  Intron number 1 from transcript Si031872m (locus Si031872m .g) derived from phytozome v7.0 (chr-ID scaffold_2; pos 96 67048 to 9667322 reverse strand)
ccaacaccaggtgagccgtacgtgctctcggcatcgttttcttgtaatttcaactcacaagagattatacacacgaaatttttatttctttcccatatgattttgtattaatcgcatcatcttagcttttttgttttttctgcaataatcagcttctgcatacatctcaaaagaccattttgttttgttttaaagtgcaatctgcagttgaagacaactaaatgtctcaataagaacatcgtatatcaacaaaagatatacacgggagattttaa

SEQ ID NO: 113388 - DNA, 802 bp, Setaria italica
  Intron number 1 from transcript Si006030m (locus Si006030m .g) derived from phytozome v7.0 (chr-ID scaffold_4; pos 38 801141 to 38801942 reverse strand)
tcaaggtcagcatacgcgcgccactgcgcttcttgatagctgctcctgaaacggtgttcgctgatttggctgaaatggcaatgattttttattctttcagttacgactcacaacattggagtggatagctcaacatgaaaccttacttgttgcatagtcgttttcctaaggagacaaacctaaacgattctaatttagcatttcaattttcacagcctgtcattagcaagtttttcttgggttcatgctactaatgcctatctagattttccgccatggctgcagcctctgaatctgctgacatgctcaaactgttattgtgagtcactgcctgcataatttagctgagcttagattgtgcgactcattaagttgtcccttgcatcattacatgctgcaattctagagtttaaggtctgaaatgattgaagcaatgtatccactgtgtaatatgaacagttgaacgcttgaaaaaaaatctacaatagaaaaatggaccgtgcaactgttttactgaaatgtcaagatgatctatactgctaattggcttgtggaaaacaatcaattattgcggcaaacatcttccttaatttctgtttgaaaagaatctgaaaaatgaaaattgatggagcttctctcctcagtgtgtgagctgtttctcgtgcaattattgctgttatagtgttttactatacttcaagacatcttatcgttggtggtttgataaactaggaaaagtcaaacctaattttctcctattatgacaggctttagtaagaagaaacgaccctgaagtgataga

SEQ ID NO: 113389 - DNA, 452 bp, Setaria italica
  Intron number 3 from transcript Si029972m (locus Si029972m .g) derived from phytozome v7.0 (chr-ID scaffold_2; pos 29 573108 to 29573559 reverse strand)
tgacacacacaaaattaggggcaaagtgaataagggtaattccttatgcaatgtcttacctagtacttgtcgcctgtcattttttccactgctgcttcatgcttgctggcttaccttagactttggtagccacacttttcctgatgcttgtttacaaaccagaacttatgtggtatctccacattttacatgctaaaaccttattaatttgcggatttgcctttgcatgatagaatgctgttttgcatcctagagtgtaactatactgttgtgtgccattttattcttgtttattcacttccaagcattgtaagccacaatttttttgctgatcataatgagttttcgcaaacatgaaatttgactattctaatgcacagtttatatgttgaatctgaagattattttcctttgcctcatgtaatgttgctattacttcatagattgtaact

SEQ ID NO: 113390 - DNA, 958 bp, Setaria italica
  Intron number 1 from transcript Si027812m (locus Si027812m .g) derived from phytozome v7.0 (chr-ID scaffold_8; pos 92 29836 to 9230793 reverse strand)
gccatcatcctccccctcgtgctcctccgagagaggttcgtcctccatgcgtgcgccgccatcatcggcggttccatccagcatacagctattttagtgccttctaaaacctgaattccttttgtccatacctaaaccacaactatttaaagttagtttatgttagagacacactggttttcttaatctaaagtcgatgtagatcaatagtcaggtactcaagtttggtttcatgaattgaactaatctttgtatttaagccgattttagtcagaaaaacacttgaataatgttgatttctctcgctttcatcaaatctgagctgctgggtgtttatgaattgaatggctccaaaatcaggtattttggagccccaaaagatttcagttgttatgtacagacaggtccatttggaagacaatagcctagagttccagcaagagtagcaagatatccagtgagcaactgtttcctgttagtttcaaacatccctaacttggcttgtttattgttcaaccattgtgcacttgtgcaggggagctacagagatatggcatggtggatccatctgactactccattagaaactaactatatatagttgagatcttagtgatttattacttattatatttgttccttcaaagtaaagtttgttgattctatacttaattctttgcttgcacataattctaggtaaaacttgggaaacaacctagagattgctagcaagcataacatgcacaactgacaatattgtatatagttgattggccatatataaattataaagcatccagcaacatcaaaggacctgtcatttctaatatccagtttagaacttcaaatgtttatcgatctagatgattcaaggaattgtttcttctgaaattcctagtttcaaacattcctaacaattgtagtttgttcatctgttgtgtagagggaagtggaagag

SEQ ID NO: 113391 - DNA, 796 bp, Setaria italica
  Intron number 1 from transcript Si040850m (locus Si040850m .g) derived from phytozome v7.0 (chr-ID scaffold_31; pos 1 5954 to 16749 reverse strand)
cttctgatccggcgcatcatcaagccgatccaaaggtataaaaatagggatatcattactcctggtttggtttagttactcgatttattaccagattatctgataagaaatagtgttaactcatcccggatagattgtaaactaaactgcaaattcaaaggtataaaaataggcatagttctactcctggtttggtttagttgctcgatttatcaacagattacctgttaaatgattataccatcgttactcgtctaggataggttgtaaacttagctgcaaatcaaaaggtataaaaatagggatagcattactctttctagtttggttttttctttcttcttattttagcgatttattaccatctgttatatgttgatactagtgttactcatctcggatatgttgtaaacttagctgcaaatccaaagttatagaaatagggatagcgtattacggttactccttctggtttgctttggttgctcgacttattaccaaattacttgttaaatattgatactatcgttactcacctttgatagattgcaagcatggtttcaaatccaaaggtataaaagtagggatagcgttactcctcactttcagacttcaagttgcccttgttttatcatacaaatcaaaacaaggatagatgtgtaaaaatggggatagtattgctaataatagtaatgcgtatgcttagtaacagtaatgtttatgtatgcaatttggtaatgccttcagttttattttgtctaatctattctaattttgtgtagaaaggatattggac

SEQ ID NO: 113392 - DNA, 578 bp, Setaria italica
  Intron number 3 from transcript Si028248m (locus Si028248m .g) derived from phytozome v7.0 (chr-ID scaffold_8; pos 35 993144 to 35993721)
cttgcacggtgccatcatcatccggccaagagacggtgccaggtctcgtatccatttcccaatcctgataagtatgttcccatcattataggtttgtgaattattccacttttggatcgtttaagacatactctctccgttctttgttttttgaatcgagccaaaagacagagctaccaatgatattaaaaagaagaataaaacctagactggcgaataaaaaatagaaaaaaaagagagaactgcaacaacagctgcaacaacctcttattagcatcttccataacaacttacattggaaacaacacacaaaccgccactccataaggtctactagccggttaacaaaaagcaccaccatcactggacatgtatatgtgtatgtcaaattataggtcaatcattttgtctgttctggatacgtagtttttactatgtatctagacatatgtgtacagcaaaagttatataaaagacaaaacgacttataatttgggttggagggagtagcacctagcaaagttatgttgagcttatttctgagttgatgtcctgttgtggcaggggagtggtgggag

SEQ ID NO: 113393 - DNA, 1010 bp, Setaria italica
  Intron number 2 from transcript Si032025m (locus Si032025m .g) derived from phytozome v7.0 (chr-ID scaffold_2; pos 45 767904 to 45768913)
ccgctggccgcttcaccgagcgcaccgccgccaccgtaaggacccccttgcccttgttaccttttgcttcgctgttaattttgccccaaacttttgtgcctccggttggattggacccgttgcccttccttctactgtttatgacttaaattatgttagcctgaaccataatgattagaagcaaggctgttgtgacagcaattgtatgatatttgtgagggaaatacagcgggatcctttaccattacttttgttatttattagaacaaaaccaagatgaaaacggcagaggaaagagtgaggaaaagggaggaagaaaagcatcttctctacaaagtttcagagaactagtccatgagatgattaggtcttaagttggcaattccatgacattacttctactcactcctgaaagacagcaagagggtcttcagaaatgcctattctcataccatgtataattcattaattgctgattccttgatactgttttcctgtgcatttgaaacaagttgaagttacggttcataaaaaaggtgattaaagcagcaaattctttgatattcgaaaactttaagttccattttataagttgtcaagatggttcttgggtcttatagatttttgcattttctgattgtaacataaagtatctttagaaactgtacaatacaaggcaaaggatcaatcctgttttacaaattaagctgaaataaagttttccacaaacagcgaccacatgaagtgcactctgcagtttactccccttgacctatacatttacacatgaaacaatgtgagaatacatagcaattcgtttatgaagactgcagcttttgataatgccattaatggccaagaacatgtgctggcattgccataacaggtcctggaacatgatatacatatgcaggcttccttctgatttgccattcttttgttagattctgacggcactgaaccttacgtttttagtacgtcgcgagccttgctggtgcactggcgtactg

SEQ ID NO: 113394 - DNA, 741 bp, Setaria italica
  Intron number 3 from transcript Si026471m (locus Si026471m .g) derived from phytozome v7.0 (chr-ID scaffold_8; pos 29 896587 to 29897327 reverse strand)
cattctggagtatggtactagctctaatatatgtatcctacatgttacaatttgtatatatatttccgccgtgcacatgaaccataattagttagtgtttttttcagtaaggcaacattttagaacatttgaaatcatatcttaagaacgtgcctttccaactgtatgctatgattaactggtttggttgaccacatctattacctttgtttaggctgtaacagctgattgtgaatgcaaacattggacaagttgtataatatggtcggttctgcatgtgataatttcgttccctaaatttagtgtttgtcatctttctaatgcagtttcctaggcttgggaaaattggtaatcaactgtactctcttgcaactaaggaaaattagggatacaattatatgattaatgaacacttctcacattgctttttatcaatattgcaatcaaaatccatgtaactataattatcatttgcggtcggtgtgccctcatttttctatctggtgccgtcagtgctgctagagtcatatggtattatcgtgttagtgtaaattagaattcagtgtcttccattatgtaaaaaacatctttacatgtgcaagggcatagaattttagccatacatgcaggatgcttggcagaacctgtacctctttctcatttgttccctgttcaaaatatttttggctctaatgattgatgggatttttgtgtaggtgtcagagaagttcacagtgccca

SEQ ID NO: 113395 - DNA, 817 bp, Setaria italica
  Intron number 3 from transcript Si007315m (locus Si007315m .g) derived from phytozome v7.0 (chr-ID scaffold_4; pos 13 613385 to 13614201 reverse strand)
aggtaaaattataagacaaactgaaaaactgacaaggacatggagctatgtgtgttattaagcttgtgaggaatggctacaaaatacactcttgaggggtattggggattgttactttgtttaatttgatttatagtctattattctacaatgcattgaagaggagcgaatggatattatagacaattgaggcgaacaaataaaaacatacaagcgagtgaggacatgaaaagaacagaatataccagtaaagtgcatattttgagtaatgtaaacttgtagccacatttagctggataaaggacattatatcataccgaaagtgaggtgcgttgttacagatatatagacaaggaaatgcagtagcctggtttttccatattagcttgaaattattcatcattaaacatcttaattggtatgccaaggtgaaaacataataattcagtagcagcaggctggttatgcttctggtacctttttctctttttttatcagcttttgtgtggtcatgtttggtatgtctgacttatgatcttgctccattcacaaatgctattcttagtgtcctcctttcatcataaacaactttctggattatatttgaggaattctgtaaagcactctgtgtaactcagttgggctgcaaaaagtgttgggtgcgattagattagattctaattttcttcttctattaacatcatattccgatcaccttgattacctcgcatgaatagatatttcatttaggtttttttcattgtggtgaatcatttgatatttctaaccatacttttgcttgtagatccaaaatcta

SEQ ID NO: 113396 - DNA, 804 bp, Setaria italica
  Intron number 2 from transcript Si032072m (locus Si032072m .g) derived from phytozome v7.0 (chr-ID scaffold_2; pos 25 133233 to 25134036 reverse strand)
cctcaatctcgacgtcaacgcgggtggcgagggtaacattccccccttccccctcttcctctgattaatagttcgcctggtaggttggttgtgttgtggagcatggaaagttgggaagcctttgctctctgatttgtggaacagatggagggtttattggcgttacaaaatggggtattttaaggtattccatcgtgtttgctttggagaaaaatcgttggatggctatggtgacacaacccgtgtgtgggagcatggaaaatgtggtaatcatgaccagtgctcctgcagtagccttgaccagtgctgctacagttctcgagttgtgtgattctgaagactttactgcttctgggggaagccttttgtttgctacaccccccgtgccttgccaatttccatctaaagaagaaacctttttggtgttttggagtaaagaggaaaaccgttattgacttgggaagagttcacaatcaattggtcgctgtgaaatgcatgttgagtcatggatcttcataatttgatttgcaaagagttcgaattcagcagtgatggcattgtgccttgtgactcattcagtttttctgttccattttaatcatttgcgttatttcaagatacacacatcagactgcggtattgcttaattatacactttacttggtcgcaagcaagaagtgtccaatcattctgattctgacgaattgttgccatttcctatgccttttccaggtgtgacgcctctcttttttgcaatatatggtactggatccacagccattaccaggcttctccttgatcatc

SEQ ID NO: 113397 - DNA, 365 bp, Setaria italica
  Intron number 2 from transcript Si005946m (locus Si005946m .g) derived from phytozome v7.0 (chr-ID scaffold_4; pos 36 755598 to 36755962)
gcagatatccgaatcgtgctccaggtgaggactcttcccctctggcgaagttcaattgtattgtacaagtcttcagaatatacaatttagagcagcacagcatcagggaacagatatgtgggaatattgttcttgttaaggaaacgtgattaattaaaaaacggtgacctggtgtgaccttactcacagtagaatgctgatcacctaaacatctcaacttatttgttttctgcctccatatagaaaggatcagaggaaattatgcaatggaagctattttatcttcacaacttgtgtgacaaatgataccttgctatttgctcactgattatcttttgacatgcaactttgatacccagattggc

SEQ ID NO: 113398 - DNA, 590 bp, Setaria italica
  Intron number 1 from transcript Si006960m (locus Si006960m .g) derived from phytozome v7.0 (chr-ID scaffold_4; pos 37 182604 to 37183193 reverse strand)
tttcaaaacaacaattagaaggtaagcagttgccactgtaattttccaaattctcttacctgtatattatttttttctcaaaactcaaagactaaaacctaatgacaatatttttgctccaagaatcagcaaatcttttttggctccattgttaatactctgtcgctcatgcttactgcaacatggataataacaaagtgcacatgtgattgatttaataattttgataatactaatgtataccacatagaagttcatactgtcaaataaaaatgaataaacattattcatggaagagtactaagctactagctagtggtacaacatatctttaagacatgaaattacaaactcttgcataaagttctacactattagttcctttttcaaagaaaaatgtccgttcggttaccacactttaaaagttttcaatatgatgaaatgatgatctatcaaagaaacttgaacattttcatggtatctctgtatttgtttagtcatatcagtaaatgttgagatccagttgttcacaagaataaattatccatgattcaggagcactagacttgcaagaacagaaaattctggac

SEQ ID NO: 113399 - DNA, 851 bp, Setaria italica
  Intron number 1 from transcript Si007378m (locus Si007378m .g) derived from phytozome v7.0 (chr-ID scaffold_4; pos 24 15155 to 2416005)
gaagtggaacccgccactgttgaaacgtacgggcaaaccgtcaaagtttctctaaactttagtttttatatacgttccgaaagctatactcctacagtactttattaccaataaagaaagaaaagtttctccaagatcgaagtgggcatcattgcatcaagcgttgttcacaattcgtggccactactccatctgttgactgttgcacattccttctgcgtacaagtaaccaacatgcatgcggtggcaccaactaataatgctaaaggccttctctttgaactgtctcgttctccgagatatggtttgaatatatttatatctactaatctaactggccttatttagttccttttttccaactttgacactatacaaaaagaagattcctcgtcacatcaaacttgcggtatatgcatggagtactaaatgtagacaaaatcaaaaactaattatacagttttgttgtattttgtgagatgaatcttttgagcctaattaatcaatgtttggacaataattcacaaatacaaacgaaatactacagttgcgcatttatggcaaaatgcaaactttgccactcccaatttgaaaactaaacaagacctaagatttcttggagctgaagctagagctacaagtcacttctcctgtaagcaaaaagccatcccgttgcaattcttcatttcttccaagcgacttcctttcaaagtcaacgcgctagtttgtgtcacacagtggtccagcgccatttcgaccacacggcatcgtttacccccacacacacatatataggcctcctattccattccatagcgtccatcatcaatcgttgcacgcaaaattaaaac

SEQ ID NO: 113400 - DNA, 978 bp, Setaria italica
  Intron number 1 from transcript Si008525m (locus Si008525m .g) derived from phytozome v7.0 (chr-ID scaffold_4; pos 25 81562 to 2582539 reverse strand)
gccgcgaaactttcagtaggttacactctggaccagattcccaatgatatcaccaagaagactcctgcaagcttttagccttccattgattatgtggtcacaaaggtatggtttatatcaccgtttctcagcctgtttagagttgtacacatgatgcctgcaaatatgcacctacagtatatatttgacttttcttatctcccttgcttgctcctctgcatcagttgtcacctatcaactcataatgattgatatcaacaagtaatcaaactaattgaactggataagtctatccaattgcttatcctgatcttcatgcatagtttgactgttgagtatgttggtatactgaatgaatgattgtggcatatgctctggcatcagcctactaaatagtacaatagattgtttgtttatatcaaggtgaaggcagtagcattttgcaagcacatgtgtccagggtctaattgttttgcatgcttgctcagtgttgcttcattgccatcttagttaagcaacaataatttttttttgttcacatgtttgtcaaataaagatgaaaacatcacatccaatagtttttctatgatacgtgcatattttggagatctgtatgttgactgaaccttcccttgacaaatcttctcagcattacttgagatcagtcacattgtctttatctgtgtatttctcagtctcatggctatattctctgtcattatcacatactatccaaagctactctgctattcgagctgtatataaacatttacagttttggaatatgtttaggataatcaaatgatattctagtcacttactaaacctgttttattattttgttacaagcctgtatttatgcttctgacatgatcaacgcatgggatgtactagtcaactttcatgatatacttttctaatccactttgtatttattatgcagataccacgctttgcgtttgagaaattccctggatc

SEQ ID NO: 113401 - DNA, 542 bp, Setaria italica
  Intron number 1 from transcript Si028223m (locus Si028223m .g) derived from phytozome v7.0 (chr-ID scaffold_8; pos 31 685737 to 31686278)
aaggtatctgataccagtatgtttatattttcactaactatatatttaaagtgttctaaattggattttatatgtatattagtgttgaagtacaggcgatgccacctttctgaatcagcttttaggtttttggttgaactatcggtgcatgcaacttaataacttgtttgtgcgcacgcgcccatgacattaccgagtagcaagccagtcatgggaaaattttgcccaatcatctctaaatcaatgctacaggaaatggtatttgtaaatataacttcttgtattctatagatctaattatcttcacttcttagaaaaccttcacaggttcgacagagctactttaacttgctgtttttctctcccctttgatttagtttgtttagcattttcctttagttaactcttacttttaggttgatatgataaccactatctctttattcagtttattgcctagattccttctattgatcttattgtttgtcattgtaatgaatcttgctcttaggggaaaggaagagcattttgcgctggaggtg

SEQ ID NO: 113402 - DNA, 806 bp, Setaria italica
  Intron number 1 from transcript Si030036m (locus Si030036m .g) derived from phytozome v7.0 (chr-ID scaffold_2; pos 47 319436 to 47320241 reverse strand)
gagatactcaaaggtgatcatctacacctgctcgtgtgtattagtgctttgatttcttggtagtgcaataaccagtgagagcatgatctggttaagttcatgcatattcttttggattatttttggataactgatgaagtgccacactttgaaggtatagaatcataatcagaaacataacaatttcctgcatttggaacgataactgcaaatgtttcttacatcttggtactagtgtaagggtaatgtggctggggttgcattgttgcttgtgggattatgatctattatacatttcctcggttgtctattttggatgctattcatttcaatgtagcttaatgtaactcatggtgaagatgtgaatgctgaatttaaatgttggtatctgctgactggcagagtttcccttttagacttgtataggtgtgtccgtccatgttgtaaacagcctagtatgataaggtagcatcaaaatggtcctatagtttatttaccacttttggtgctcatggtgcctgtggtgtacttcttgactgattggaattatctatgaccacagttagttagcctttcatgttcgttttactttttctttttctgtggatttatctagtaatgggtacttctgtctaggaattcccttccctagaccccaccttgtgtgggagctttcgcattgggtacgcccctttttttttgtggatttatctagtaatgggtacttctaatctgtactgcatgcacaagtaaaagttagtgaaaacaatattttatgattgcaggtccaaatcgtgcatttggtg

SEQ ID NO: 113403 - DNA, 1054 bp, Setaria italica
  Intron number 1 from transcript Si026073m (locus Si026073m .g) derived from phytozome v7.0 (chr-ID scaffold_8; pos 13 443960 to 13445013 reverse strand)
gcgtccgacgagcagctggatctcggggtttacaggtgagaagccggcggcggttggcctggtggtttcggtggttggtttggtttggttcacggggcgagcagctaaagttgggcggtttggtggtgcggttcccgtgcggaattcggtgtaaagtgcgctcgttttggggggttaatcttgccgttcctgcagcttattaatgctttttttttttggctgaaatttcgttgtggacggcgtcacaatttggttctctagttgcctgcttctgtgttctgtttgcccttctgatggaattcagagcgagctggggaagtggaattgtgctatattcctgacgggtttgggtgtccagatttgtttttcttttgtactaattttgaaaatttgatatttcatttgtttggtaacttcctcgttgccgggactttggagccgcaattctgatgtttacctgatcgtttttcaatcactaggcatgctcagttcagagtggtgttaactgttcgccttctctgaaatttgtccacctgccgtccaattactactctgaattttggtcagttctgagtatactgtggctgtttgggggagttggtccaattggtctacggattctatcgtcctgttgatgattgcttttgagacttgtttgatcttcttacatttgggtgaatttctctgatgggtttggttttgcttgtctagttaggaagttcagaaatggatacttttttccgttttctagcaatattttaatccaaaaatttctacagctcacccattttaaggtattctttatgttgagaaaatcatcccccttttctgtacccttgcatgattacaaaggtaggagcaatagttgtcttaaggaaataattggtgttctttactagcaattagtattgtttgagattcgaatcttcaggatggagaaacaaggtgctactatttactcattagtccaaatatatgtattacagctgaaatttgttttttcatgtctgatttgacaggttatcagaaacaagcagcactcttccgggcagag

SEQ ID NO: 113404 - DNA, 899 bp, Setaria italica
  Intron number 1 from transcript Si029936m (locus Si029936m .g) derived from phytozome v7.0 (chr-ID scaffold_2; pos 47 517273 to 47518171 reverse strand)
aacaagaagggattgcccacgggcgaaatcaaagtgtgagtgcgcaagtacatcaacatgtcctcttgcaaatgccattgctccaggagtagatttaaatcgattcaagtgtttggcttgaggacatatgttttgttggtttatcgatgcaaccgtactgttaatagacttggattttgctcgattgaagccaataggctgcacaggctaagctagctggttttgttcggttcttgtgcataacttggaaattgtcttagaaagagagaggctgcttcttggtagttattatggaatccaacttacttgaagggctacagtttacgactgtagtttgattttatattatcatatggaattcttcttttgaggaatttaaatttgggatgtctagtttcactgatgaactaaaaagcccttaatctttttcttttttctttttacgttatataaactcttaataaacccaattgcatggacaagggttgctaaaaatcttccctttagttcacatgcctacatctatagagttgatgcaccacctcatccccttatgtttttgcaaaccaaattcttggtctgtcttggcaaatgtttggtttgctggattacatttctttagaaagacagataaaaaggtgccttttggagaagcacgatgtctcgataatgtgacttagtagtagacacttttaaccaggtctcaaagttatatccttagaattttagacaactgtgtagaaattcatattgaacagctgaagccacgatatgttaagttgaataatatcactgtatgcaccattcacacaaaagcctttgcaggatctacagctataatcaaatgttatatttgttttgcaggcctgaggcactaggtcttgttgttgggattgtct

SEQ ID NO: 113405 - DNA, 553 bp, Setaria italica
  Intron number 2 from transcript Si027610m (locus Si027610m .g) derived from phytozome v7.0 (chr-ID scaffold_8; pos 87 5843 to 876395 reverse strand)
tcgccttctccctcccgtccatccccaagcccagggtccgtgccacttccctttccccaccttggcggttttatttgcctagggagcactaaatcatttcagatgtggacttttccttaatttagttgttgccagaagctgatcgcttagattgttcgggaacagaaaattataagctttgcattcgcacttgtggtagttgaatgtcttgcatccaagttcaattgcaagtgcattacatgtccaattcaatacttttcactcgtcgtattgattcttggtttcttgtcctctgaagtcggattgttagaattagggatataaattttaagaaccagcaaaacattcacaccactaaacaagacttggataattttgttaaggccaaaagacagttttcaaaccaaagttgccgtgtttgttttttcttcatcttgatgagatatccattttaagaatccagtcaaattctttcacggaaacaagttaattttatcatgttgtatctgtggtttcaggctctgattttgatacataggttcttcagcatctc

SEQ ID NO: 113406 - DNA, 589 bp, Setaria italica
  Intron number 2 from transcript Si032452m (locus Si032452m .g) derived from phytozome v7.0 (chr-ID scaffold_2; pos 66 93475 to 6694063)
gtcaacaagctccgagagcgactccagtacaaaaggtgtgttgctttatttcagcactatatgtccctatcttcctttatctatagtgatgtctgggctcacctagtagaagcacccagccacaataatcttaaaactagaaattatcacataatttggtaggaaaagaaaatacacacatcaacctttattatgagatctgattcacccgcttcatcttcatgagaatatataagcatgtttcttttatctaacggacactacaatcttcatgaccttaaaagcatgttgtttcaagccaatttgagatacataagcatcaatcttcaagatctgaaaagcatgtgttctgactctcttaaaaagattcataaattttctatatcttgcagatggaaaaaatgattagcatatatttgtgttcgttttacctagaatagttgtatttttcacataatgcaatatattttcattttgattactatttcaccagatcaagaatgaagcattacatgcatagtttttcccttacaacatatagtttatgaaatcagaatcacatattatggcaggtacattgctgtagtgg

SEQ ID NO: 113407 - DNA, 744 bp, Setaria italica
  Intron number 1 from transcript Si029966m (locus Si029966m .g) derived from phytozome v7.0 (chr-ID scaffold_2; pos 24 035301 to 24036044 reverse strand)
cctgcctcttccaccatgtaagtcacacaagatatatcttgcatcacagctgcacatgttgctgtcaagttcctcttttcttttcgcgtctttggggagctctattcgtgtctccacaaagaagatgcatgttttgtgcttgcttctttctttctcgagattagggatttgacatctcgctctcaaatatatggttgcttctggtgcaaatgattaaaaagtgtattggaggttctgtgtttttgctagggtatgggaatgagattttttttccccttgagttttggcaatcagaactccgtgccatgggtatcttgcatcgatcttgtagagtttttggcctgggttgcttatttctagaactcaaccacacatggagatgaaggggtgaaagttgagaaagagacggatccacccatcatggagcacaatatcagatagtttattggttagttagggatcatggaaatagtttaggtgctgaggtaaggaagaaggacaccaaattaccaaataccaggatatgattcttttccttgtatctttcaacaagtagctagatcagaagctttttaaggatttgtcacaccgactgttctatctgctccattaaacaaagctaatccatccctcaaaaaaacaaagctaatcccctacttgctttctaatgcttccaacaactaattcttgcttatttcatcctccaatttcccttttaggagcaaggaatcagcaagctacgac

SEQ ID NO: 113408 - DNA, 941 bp, Setaria italica
  Intron number 1 from transcript Si025970m (locus Si025970m .g) derived from phytozome v7.0 (chr-ID scaffold_8; pos 37 124872 to 37125812)
ctttcgtggccgagaaaggctggtatgtgcattatttatttattagtatcccctccgtcccaaattataggtcattttgatgcatagcaaaagctatgtacttcctcctgtccaaattgcaggttcttttgacatttccagatatatagattttgctatgtatctagacatataactaggtgcatagcaaaaatcatgtatctacaattttaaatgaaggggttacctaaaaaatcaaaacgagaaggagtactccgggaaggatgcgtacacaccactatacatatggaccaaacacactcccattatgcttagaaattataaatccatatttttctaatgaagtagaaagaggagagttttaaataaatgtatagttggaactacagtttgaccttaataggtggattaaaaaagacaagaactgataagatcaaaatttggaagtaaaaatctagattcacaacgtcatgacaaatggaagcaaaaagaaaagtttttaactgcacatgcaccggagtccggagacacacagaaagtgtgatgaatgggaaaaacatatggtgcaatttggttgatattacagagtacgtaggtactccctccattccaaattataggtcgttttagcttttttagattcatagatattattatgcatctagacatacactatatctagatgcataataatatctatgaacctagaaaagtcaaaacgacctagacaatttggaacggagggagtattgtgctagaaaatgaatagagatctcaaagatattctttttgttagttttaggtactaaatttattcacttactttcaatatttatgttctatcccgtgtaggagcatggattggtggactagcattattaattggcaatttcatttgaaatttaggtacaatttcagtcggcaagacctcgttgacaaag

SEQ ID NO: 113409 - DNA, 589 bp, Setaria italica
  Intron number 1 from transcript Si027176m (locus Si027176m .g) derived from phytozome v7.0 (chr-ID scaffold_8; pos 27 385309 to 27385897 reverse strand)
tgattttacatatctccatcagattaatccttcaggtatgtctcaggtattggtgttttgtgagagattttctgtgaaattgcttttgtggtgaaaaatgttacagtactattgactacattggtccactacaattaatcttttcttgctttgaaatttttctactgtcttcacttgcacaaccagagtgattgattttccacatcattcaatccttttctcaggacatgaggggcaagtaacacttgacagatttgcacttaattcagaaggctgaaaatttcataaacgaaatgtgaaatttgttagattcttccattcaattagttcttagcaacattggacagttagaaatcaatcatccaacaagatagatgttcattttgttattccaaagaatctgacattgcatctgcttatgcaggtgagataaagaaagcctgaaacatcattaccatttaaaacattggctcctggaaattcaaatgatctacaaagctactcaccacccccattggagtgagatcagcagcaccagcacagcaaggtccttcagctacatctgtcatcgccatgtacgatagagcct

SEQ ID NO: 113410 - DNA, 878 bp, Setaria italica
  Intron number 1 from transcript Si007706m (locus Si007611m .g) derived from phytozome v7.0 (chr-ID scaffold_4; pos 39 56617 to 3957494 reverse strand)
aaacccttcaagcaggaattcaccttcggtcagtagctctcagtacacatctacctctgtatttcactcgatcgaatgaattcctgatgcatgctgggggtgcagatgagagggtccaggaatccgccgccatgatcgccaactaccccgccaggatccccgtatgtgaagcttctctgttccttttttttatttgatttgatgaggaggagaggggacttccctttccttctctgttccaggcttccagcccaaaccctaggaaagcagggcctgccccttcgtgtccacaactgacatcactagccggccgattagtggttgatactgctctatgccagtgccatcaggtgcttcttattacgttttccacttctgctctcattgatcaagtcatcacgtatgtggatgtggacggaaccaaacggcacagtggattttaggattcacttcagaattcctttgttgcttcacacaatttcttgcctttcggaaccctgaaataaatttctcatgctggggcctggggtttcgttcagggtttagtcttattttgtttatgctgtgccgattgaatcagttccctgtcttcccagttatgcccaccatgctcctgcaaaatgcaaatcaattttctgatgctcatggattcttacatgcatgcattaaggtcttgacatgttgcaaattctagcttaaaccacgcactctgaatttctactgaaactgaacaaactctagcctctattttgttctgcattccccttttgcccccaatctcggacagtttgtggcatctcttgcttgatgaacatggaactccttgtatttggctatttgcaggtcatcgttgaaaggttttcaaggagtaatttacc

SEQ ID NO: 113411 - DNA, 636 bp, Setaria italica
  Intron number 2 from transcript Si028790m (locus Si028790m .g) derived from phytozome v7.0 (chr-ID scaffold_2; pos 88 13843 to 8814478 reverse strand)
ttcgacaacaacaccgtctgccacatcaccaagctgtacgtatgccctctgtcttggtaatggttcggctgcacactaggtgctcgacgccaagaggccatgccgtcatgaaaatcctttgcttttttgcttaagttctgcagatttgtccatggaagctggcaggaacacaggcccgttcagggatgaatacaccaggaggctagggggagccttggctctctgcgttatatttaaaaaaaatcaaatcccctcttaagattttgtgtgctgcgaacctcttcgcaaacatgtagtcgcagttcatccttgaaccttagacaattactcagtaggaaggaaatgaaaggaaagaactgaaacgaaggggcaaaattgtttttcttttttgcggaaaagactgcagtagtaccttggttcattgggcactggagccttggaaaattatttgtgaaggttggagccttggaggttaccaaccaactgtacagtcgggaacgaaaattttacgcaaaccagttcttatgaactgacactgtattatccttttgtactagtaccaagcgaactaatttttccgacttcttgtttattcgtacaggagggtatacgcattgaacgttgtcggtcagatac

SEQ ID NO: 113412 - DNA, 799 bp, Setaria italica
  Intron number 1 from transcript Si032388m (locus Si032388m .g) derived from phytozome v7.0 (chr-ID scaffold_2; pos 13 667757 to 13668555)
acgaggatatcatttgtgcctcagagtcactatttcattttgcatttgcatatgtccaccattccatatcttcttatccttgaaaacctcacatatgtggatattcttatgattattggctcggaaggtaggcgaccgttagagagttttcttaattcaataatataagtgttaattcctacttgtcttgtccaagctccacaatataattgagtgacttttgagagatgagagcttacaaacaaataggatagccaccttataattgagtgacatgaaagtgcctggaaaagaaatttggtttcagttcttgttgcagagagtttgtttcacaaaggaaaaaacttccaagacgagacacaaagtaagtgtgactaattcttgaagctacttagttctaataaaaagttgtggggtaagtcttgcttagatgattctttgaacacgcatattttgattacctttgttgctcctctaatcttttgtttgaaggactgggtacttagctcgcttgctcaggtttgattcaagacctttgttcaactctttggagaattttatagtcacctgatttgctcgaggacgagcaagagctaaacgtgggggattgttgacacttgttattgacataattttagtactattttactaatattttcatgcatattcttatactaacccgccactcggtacttgaaataaccccatgtttgacaagtttttgttttaaagtattttgagccaagtctacctgaattgcgcaggcaaacgccggtcatcatcaggcagcgcgccgctg

SEQ ID NO: 113413 - DNA, 594 bp, Setaria italica
  Intron number 1 from transcript Si028032m (locus Si028032m .g) derived from phytozome v7.0 (chr-ID scaffold_8; pos 36 963043 to 36963636 reverse strand)
tcaaggccaccttcgggggcaagcttgacattcttgtaagcatcatcaccgtttgattgaatctcaatgaatcggtcatcagttaaataaataaactaagagcctgtttagtagaccccctatagtttttcaggaggaagctctgctaaatagtactaccttatcgaaatatttgttgctattgtccttttcttgcaacataaccatttgtcttatacaaaaatttattacaaatatatgaaaagttaagtcatgtttaaaacacttttgatggtaaagtaggtcacatgcataaggttttgaataagacaaatggtcgaacattgggatcaaaaggtaatagcgacaaatattattttgatagggaggaagtaatttgtttagaattagtctagaatgattccgtgtgagtgattacatgaaatgaaatgagatgatccctcctaattcacttcctctgtaaagtttatcgtaaagaatcacgattgcgtacataataatcatatttctcagagaaccattttcaggaagagctctccaaacatttgctaattcctaggcacgcgtgcaggtgaacaacgctggacagtgcac

SEQ ID NO: 113414 - DNA, 963 bp, Setaria italica
  Intron number 1 from transcript Si030134m (locus Si030134m .g) derived from phytozome v7.0 (chr-ID scaffold_2; pos 40 005884 to 40006846 reverse strand)
gagctgccgccgtgctcgccgccttccacgtactcgtaagcgccgacgcccttccttgctccttctccgctccccttttttctgttaagatctatttttagtgtcccaccgtgccgtgacaaatttgcagtatggggcctaattgtagaagcctctagagcccgagagatttgacaagattcggacgtaactgtctgtttttagtaatgctctcaaaaagtgcaatctagtgctttgtagaagcctgcaggattagaattgatttccctggtatgtctcttcattgatcacattgcacgtccaccaccacgagttcatgactacctgggattatagggttaatttaagctatgcttgtcaaatgtgcatctcagtcatatgcactgtgggtactggatttatgatgatatccactgtttagagttttagacctatgctgttgtgcaactgccaaaacagatttgacttgcgaagcagctcagtcatttgtgggaacagttccgttaggcagagtgtggttgactgaaggaattgaaaggttgcttggattgagcaggttggacacaaaactaattactggcgtattctcttggatgtggcaacttctgctcatcctcaagctgcaactttgactgttgcctttttatataagcatgttactaaatagttgtgatttttttcataacaaatctaaatataccattttcacataagttagtggtctccagatgccttcttttccataagttagagaagttcgacagcatgtttctagattccatattggaaaaaaatgattcttccagcgtctgtgagattatttcattttaccaatggtagctttgagttattatatttttgctttccagcatgggcttaaaaatgtgaaatacaaatcatgattatatttgattctgtctcgcttacacttcttcagggatcttgtttcttctgcagcttgca

SEQ ID NO: 113415 - DNA, 1016 bp, Setaria italica
  Intron number 3 from transcript Si005982m (locus Si005982m .g) derived from phytozome v7.0 (chr-ID scaffold_4; pos 10 00177 to 1001192 reverse strand)
tggccgtccaacctcgtgcaggtctcgctgttcaggtatactcagacccagctgtctgcctgtggtctccattccattccccaacaagtagttcgttctcagcttatcattgacattgcttgttaagtattagtgattaacattgcttgttaataactaataaaccagcttatcatcgatcactttcacaaacaaaaatgaagaaaagcttgtttgtcatagataggagagcaaaaatgtgtgatgtgtatgattggcacgtaggtgcatgtgtacggctttctgatttttaggaccagcgtttatgatagacaacaatgccacgtcggattgctcttgcttacatccaagaatgaaagggactgcaacgtgactggttccctggggccattcgaccccatgaattgtttgcgactcaaagacacgatgaatcttagtggaaataagcaagaattctgtcaaatattttgcttatttctactgattctcgcttatttggtaagtcgctctagagatttgaactacaagaaacgaaacgagaaaatttttacgattataataagcatggcatgcgatggaaaagtggtcgggcgccaggttgggctgggctctctctccaaacgtgctccagttgaccaaacaaagctggatctgaacgatcccaacaactggctcttgcaacttgttattttcagccatctcctccatttgctattagtttactgttgcggtcagctcgttcgtatttttatcgattctgaaaacgactagttatctcacaaacacatgcaaattaaaggaatttcccgtgtcagtctagtcaagctgaaggaaagacaggggtaacaggcatgtcaaaactgcatgtccagaaactttgttccgatcgaggatgtaaagaaaccaaagatacaaacagatgtagtagaattcgaacaaacagtttttcgaatgcatgttgttcctcaacacacactttttacaatgtatctgtaatccgttcaccagggcgctcc

SEQ ID NO: 113416 - DNA, 579 bp, Setaria italica
  Intron number 1 from transcript Si005809m (locus Si005809m .g) derived from phytozome v7.0 (chr-ID scaffold_4; pos 40 125823 to 40126401 reverse strand)
tcccctcctgcctttgccttcgattccattgcttggtaagaaaccctaacctcctgtttattgtatatatatatgtactctgtaatatggctccggtcaatttctcctccttctcaatccatccttctttctcccccacgccatcctcgatttctggtctatttctttctttctttctttctttctttctcgcggattgacggattctctgtttctcgcggatggggattttaatgttcgcggcgcctctcgaggtttatcttgttcggcctcggcctcaactcgacccccatgccttcgattcctacaatttcccattcctttacatagatgtctagtctcgtttctccagaatggaatcaaatcactctttctttgttctatgccacaaattctttttttttcttttctcaccagcgcaaggaccagttcctcatctcatttcgtttcttaaaaaaccaataatccatccgctaaagatccatgcaaaatacactgtacgagacgacattgattgctcacttggtgctactttctcttgcagaggacgtctcaaacaaatcactcttggggagttca

SEQ ID NO: 113417 - DNA, 828 bp, Setaria italica
  Intron number 3 from transcript Si006205m (locus Si006205m .g) derived from phytozome v7.0 (chr-ID scaffold_4; pos 73 42516 to 7343343 reverse strand)
tggcctcaacgtgggagacatttagggtgaggagtacatggaatgtattagtctgatttaaaaaatattagtctgataagcctctacattattacatctagggtattgtatgaaatttatgatctgatttcagagaattatgaagcatactggtcttactgttttgtttagactttacaatagggtacaccctcaagaaaggtattgtttcatactacttaagtactagctaaatgctatttagctcttaacttcactccatgttctacttctaccactgggtacaatttttcagctatatgatatatttttcctctgacttgttttgcccagttataatgaactgttttgttgagttcctgttataattaaatcgatggccactgtggtttcacaataggatatcacatgacaagaaactgatcagttgaacaaatgcaaaactgaacactgaatattataggtgaaggattggtgatatattgtttgctgtgtggtcaaaatgtttgtagggtcaacagtggatttttttttggcatattttgtgaaacaacgtttaaatatttttgccagtccacatataagattgctacgagcagatatgagactagagcatatgtcttaatagttttttctccctaagcagtcagaatcatatgtttattatcatttgattatccgttacttctatggctggtattgaagcaactgcaactcattggattgttacaatgctgttatttacatgtgcctttagtatttgttgagcttaagtgttaccttactggtttttatctttatataaacagctttggagggtgtcagaaa

SEQ ID NO: 113418 - DNA, 931 bp, Setaria italica
  Intron number 1 from transcript Si027912m (locus Si027912m .g) derived from phytozome v7.0 (chr-ID scaffold_8; pos 23 658402 to 23659332 reverse strand)
ttgccacggtaggattctttacccttagctacatatattttttcttcgtcctgtccaccaaaaagccataaaaaattctgttatagccttttatttcaatctgtttatctagtgagtttggttaagttgcaatccattagagtctttgtttagttgttgatcatatcatcatttgcgtgtccttttgtgcctttcatatctctgaaaaaaatcccataaaacaaaaaagtaaacccattgtatcctttgcgtaacttttatcctatcaagatagctactggttatatttggttctatcatcaatttgtgcaagtgttatatctggccttatttttttgttgcaaaaaaagtcaaaaaaaagaaaaggaaagaaagttgcaaataaaagtgtgttgagaaagttaaaaaaattgtgttggaaagaaaggagaaggatcagattgttggtatgcacaagtgttgaaccttcttcatatcaatttgcgtaactagtttgctatcatccgtgatgcaattttgctaggtgattctctttaaatcaatcatccctagaataatccttgtttgcatcaaatcaaaatttcttttgcgcgtatgttgcttcgtttacatcattcatatcttgtgataagcactaggcattgatatgtagtttggattgctacttagctttacaataactagaattcagatttctccttgtgcattattccccaccgagctccacaaataagctactgtaaactgaatgccggtcgtgtattcgcttaaccatcactttttttaccaccacacatagtacttatgtaacctacagggaactcataagagctttggttggtaagagaaggtgagattgtgacatctccacatattgtcctattccacatatatggttgctgttttgtagacattaaccatggcaggtcga

SEQ ID NO: 113419 - DNA, 920 bp, Setaria italica
  Intron number 2 from transcript Si007363m (locus Si007363m .g) derived from phytozome v7.0 (chr-ID scaffold_4; pos 38 548310 to 38549229 reverse strand)
ggtctccgggtcccccgccgcctgcctccccaaaggtggtaaatttgttctggaatcagttacggccgattgtgttgcgaggctcggctgcttgatatgtgtatctgcgagatgctctttttggatgtgggtggtcgtggcctaccgtctgctgcatttacctgcttgctgataacatcctattgggatttcgtaatgatttcataataatttgttttcactgctcggttgctgatgaaagatgcgcttggttctgaataatttgtaggataaccgtggttagagttgttttaatattagcattggatgtcagttaaacacttgatttgggtctagagacactccctcatacttagacatggacggtgcaaggtgatcattggcatatatgcgttcaaacaatcagatgtagcaagcaatgaagagtcgactaaaatttgtgcaaggcgaaatgcaatatctgaatgcatccctggcagttggtagtcagtagtggggaaaggctcatatccaggttagctagaaatctacgagtttgagttgagattcgttctgggatacaccacaagtacctcaagtggtttagtcttctgcggttattcttgatttctgtcagctggtagtcagtagtggggaagggctcataaactgtcttaccagttccagatagacttccacaaaatggtcattgtggaatcccagtttgttatattggtcatacaaatgtgtgtgtgcaaatttattcagttaaaaaattcaaccaggtcctgccatgtctgggaatcggtaaagcttcagtccctaatcatatgaatttctaccgattatttcacagaactatcaattttagctcaatgttgaattctgatatatttcttcctgctactctagatttgtgcgccacattgcttcatcaacca

SEQ ID NO: 113420 - DNA, 661 bp, Setaria italica
  Intron number 2 from transcript Si032048m (locus Si032048m .g) derived from phytozome v7.0 (chr-ID scaffold_2; pos 39 040970 to 39041630)
tccgcgacaagcaggaggacaccgcaagaatcagggtgagcactcagcaccagttggttttatttatgtgcgttgcagattagttcgtcggagaaacttgggttgctgatgctgtttagacagagtggtacctttatctcggcctgagatcccttgaatcggaagctgcgcctgcgcgtgttcttcattttcgatctcgcggtatataggcctgttttttatgcgaatttccaggtttccagagcatgggggatcctgatgtacaatgacaagaaattccgtatgtgttaattggaaaacattaatcctaagagattaactgccttgcacaatcagaattgggttactttgtaagagattaaatgctttaaacatgacgcttctttggattaataacattgagataaggaaacttcttaattatcctttaattttctgaacaatggtgccacagttttgaagtttagcccttaaaataagtcgtgtaagtaaattaggtatgtgaacctctgcaaattgctttgtttaccctgaggttcttttgattccttcgctcttgtgctgtcatatgttcttcagaaacagggtagaaaattttgatgcggaccgatttcgtataattattactaatccatgtacttggcaattttgcaggttgaac

SEQ ID NO: 113421 - DNA, 860 bp, Setaria italica
  Intron number 1 from transcript Si026934m (locus Si026934m .g) derived from phytozome v7.0 (chr-ID scaffold_8; pos 12 008373 to 12009232)
tcgatctgccgctcctcccgttccagcccgcggaggtaaggtcttcggatgggatacttgtttgggtgttcaggtttgggttaaaacggattctgtaggctgccattgccgacgttgaggtcgattattgggcaaagtgggtggcacatcgagcgcaatcagtgggtttcattcggggaggatttggggaccagtgtttcggtggtctcggatgggttaggttgtccaaattagtgaaccacagaaccaaccaggatttctttgctatagaaaattactttctagaacctgaaccccagaaccaactgccccgggtctgcctgaaactgtcttgaaaaaacgtgaggaggctgttatttttttagttttgttcattcttccatatgaaccatggatatcaagttatccaccaatgccagtatgttcagtctgcaaaatgatggcgctatctagttggttggcttgtagcatttatttttccctccccttgcaagatgccaagaaaatgcctgctactagcaatcggcattttcgacagtgctgcgaggaaagatattttcgtgcagcaaacaaatttgatattatatcgtactgtgttgattcagtttacctttgttataactgaagatttctgaccaaattcggggactgattgtggataacaagatctgaacaatttctgatctacaaatttgcattatgtatttgtattcattgaattctttcgtagcatcatatgagtttttttgcattagtattcgttatttttcattgaatataatctgcactttgcattatcagtaaaacctaatgaaaatgttataggtgctgataccatctgaatccaagactctgcactt

SEQ ID NO: 113422 - DNA, 824 bp, Setaria italica
  Intron number 1 from transcript Si032488m (locus Si032488m .g) derived from phytozome v7.0 (chr-ID scaffold_2; pos 23 514098 to 23514921)
agtcaggttagattgtttggcattatttggatattagtgtttattttttattatacttaatgatgccattagagttcgaatgatgagtggatggaaataatttataaagtttaagatattgtttgtgtttttaatcgttgtaactatattagcattgtgaacattctgtgtgtcactttagttttctttcagatatgacaaggtttactttcatataaataatgcacaattttcgtggtttcataagcatgtagtataaattgtttgttacctccatagaacagttagctttatatgtagtggtcctaataaaaaaaactaagtgacagatttttgttgcctttttttgaaatttattttttcaaactgaaccctttctgttgtcttgctaaaactgtagcatcttacatgaggtgtgaatcctgtagccattgataatgtataatagatgagtggatcttcatagtgctatggctatggtgagttattagatggtcgccttgataagaaattagtattacaacattcaaacagatttgcactgatatgtagataaaacactatgtgtcctacctaatagatatgctaactttttctgttgttgctcatatatacttcgtaaacattaaatagttgcaccacatgttactgatcgcactaggacgtgatgcattgtatattaatggtaccatttaccgttgaaatttcaaactatatgtgcattccatctaaaaacaatgtatgtaatttttacttgttgtttattagttacatttatttccatataaccacttcttaatattttttttggcaaataacaacag

SEQ ID NO: 113423 - DNA, 649 bp, Setaria italica
  Intron number 1 from transcript Si029744m (locus Si029744m .g) derived from phytozome v7.0 (chr-ID scaffold_2; pos 64 01385 to 6402033 reverse strand)
tcgacttcacgtaggcatctcccccctctcaattggatccatacgcgcgtggatttctctgtattggtaccgttaatgaggcttggatcttgcgggcgatctctcagactaaattaacaatcgccagttagcaatcactgtggtatcaaaattgaaatggtatattgaatgggatttggtcgcaatccattttaattagggttgatcctttgtagagttttctgtgcataatttatcattctgttgcttcatctatgatccaatgatggtctttaaaaaatatgatccagtgatggagtttggggattaatggttgccacattgatttgagcaagttatgtgatttgtttcattttcacaaactttaaggccatttgatgctttcctcattgactaaattgctatcgatttctgaatgtgtatgcctaaatgataaaacgttaccttgttttgacttaggtagccgcaacatactgtatcctgtagtattttctttcatttgttgtaaaagattattcgtttactagtataagatgcgacccggaaaccaaatatagctcagattgatttttttatgctattggagattgttttggaatattaaactttctttcatttctctgtcatgtgggatttcttttcagtttgg

SEQ ID NO: 113424 - DNA, 1020 bp, Setaria italica
  Intron number 1 from transcript Si026569m (locus Si026569m .g) derived from phytozome v7.0 (chr-ID scaffold_8; pos 17 368228 to 17369247)
ctgtactgttgaaggtactcttctagttctattattcagtctccaggaaaattttctcctgattatattcttgtgtcattcagtgtccagcttatcccgcactctataccgagtgtaactattaacaaacgaacttggttgtgcaattttcttatgtgtgaatttgaaaatttgtgttcaatcttctcttgacgttcacagtatcaaatagtcagaaaccaatcaaccaaggccaaattcagttacagcaaccatgaaagttcacgtaatataatacagatagctaggttccattcttcggatcaattgtgttcctaacgagctcatttttgctttgacgtcatatactccttgtctattaattactaagctagctactattaacacaaaatgaacaaagctagctactcttaagcaccgcacaagcatagttcttactaactctcacctttagtggagaacacaggaacatatatattttagctgtctttttatttttcagaaagacacatatttactgagccatggaactttgtattatttaatttgaccggtaatttgttgaaattttcatggttggcgatataaatattacaaagcatattatactcatctttaccaatacattcagaaatgtgtaaaaaacatgaagtcgtaattagtttggtgaccacgaagagtcaaacgaaactaaaagttaagaacatagggagtatatatatacacagtttctgtggtacaaattaagcacaatggtcaggatatactccccctgtcccatattactattgttttagcttttctagatacatagactttgctatgcatctagatatatgctatgtctagatacgtagcaaaaactacgtacctagaaaagccaaatgaatagtaatttaggatggagggagtatttaatttattcagtagaagaataatacagccgatagcaaatagtatcaaaggcgaaacactgtccacttttgaatggcatgtttgctatgtttcagtcggttttgc

SEQ ID NO: 113425 - DNA, 634 bp, Setaria italica
  Intron number 2 from transcript Si030098m (locus Si030098m .g) derived from phytozome v7.0 (chr-ID scaffold_2; pos 40 692175 to 40692808 reverse strand)
tgcgccagctcggcgcagacgacggcgcagtgtcggtatggaactctcctctgctctgttcgtccttttatacccactgtaatggggttacgatttccgttgcctccggaagcagtgcttgcgtttggggatcctcgtgatgtgaagttatttttacagtttgatagtggaatttcttcttcaggtttcaacccacagtgttagttctcatgtggaccttagaatttggtgcacacgctgtctgaatttcaggctccctttgtggctgggtaggggtagcgttttattctcaaacatagattctttggattttgttgatgatctagttcaggaatggatacattgtagttttgtcctcatggtgactgtgtggggtctattaaaatttaaaaatggttagacattatcatgatttgcttgggtggtttaaggtaagctatgctgttttcttcatggagttaccaagaataacaatgattcaaaacacctagaatgtcatggcaacatactcattactcaaccaatagctcttctatattcatggatgcttctgtttatttatattacctaatagaaatattcaattatttacttgttgttttggcaggcattcgcattgcagcttcctctattt

SEQ ID NO: 113426 - DNA, 954 bp, Setaria italica
  Intron number 1 from transcript Si006940m (locus Si006940m .g) derived from phytozome v7.0 (chr-ID scaffold_4; pos 87 86964 to 8787917)
ggaggtggataagaaggaggagggcaacgtgagacgtgagtactctgttctggagccgttctcttttgaaattgctatcgctgctgcgccatagggcttttgagatgtggttccggtaatccctcgcatgtcctgaagggcttttgaaatgtggttctaatccctatctcgcatgtcctgaatcggagggtcagagttagtagtaggaacgatttcttatcagaatagttattggttgactaaataggtgggggttgatgctctgatcaacatacatgggatgcattacctgcaatggggctgcaatccagagtgagcagaagctccctatttcagtgatgagttgaccaatggattcggagtttggctgtcggtttcaagttgcatggctttacttttgtgtaattaatcagtttcaaggtagcagtagttttgtttaatcaactcatgtgattagttaacctgatgcagtttttcggtagagctcttagtttttattcgatagagcttctagttttttactaaattacttgatatgtatgtgtatgtatccttggatggtagatttggtagagcttctagttttcattcggtagagcttctaattttcattcgatagagcttcagtttttgactaaattacttgatatgtatatgtatccttggatggtggatttatgtatctataagaaaatgaattctagagtgggtccttataccatttgatatgtttaaactgcatctcattgatgatatcagtggataacaaaatgcttaaatttctaaaactcagccttgttaggaaaagttacattcatttgccatttatttgcttcgggatggacttgcagtaatttccatctaagacaatttcttcgtatgtcatttgtactgaccttttggggatctcctaagtaaatctaattttatgtctgtcctaataaacagaaccaa

SEQ ID NO: 113427 - DNA, 782 bp, Setaria italica
  Intron number 2 from transcript Si029382m (locus Si029382m .g) derived from phytozome v7.0 (chr-ID scaffold_2; pos 37 524180 to 37524961)
tgcattccatattgcagcaaagcagggccatctgggttaggtttctttccttcatcactgaatttggtcccaatgagtacctgcctagtcgattagttgaggatttggctagtcttaattggaattctttaatatgtggattcactggcttatactggcagttctatctgacctttcatattgattcattagtgcttgcagttggtatgtttataaaaaatgacttgtatctcattgacttctgcagatctctatgagcatgaagggaccatttccctaatttatttctaatgacatgaagtgctaaatcatttacacgctaactaccttctgcaacgaaatggctgataaatttacttggctgatttgttctaggttccaacatatcatgtctgtctttcttggttttgcagacacattattgatttacaatgagttacagtttcctacaaccttgctaaaagtattgtttgtatgtctagaacaaagaagcggcaatccttttgaacatgaaatataatttacctggacatagatctagcgatgagatagtggcccacaatacttgtttgctcagcgacaaaccttcaccaaaccaatcaggctgtgtaatttcaaatatttgagttggtatgctgtcatgaagagcaaattgccgttttaactcgtaaccgtttaatacaaagaatgttttattttatcttattttttccaaaatgtttctattcatttcttctttgagaaaaacatacttatatcagttcaatttgctggtcttgcag

SEQ ID NO: 113428 - DNA, 620 bp, Setaria italica
  Intron number 1 from transcript Si032733m (locus Si032733m .g) derived from phytozome v7.0 (chr-ID scaffold_2; pos 22 444047 to 22444666)
gacagtaattagctcacatcctttgcccaccttggtattcgtatattctattattatgatatttaaagtaacctacatctaacctactgttattctactactaaaggctgcagccaaacggatgctcgtgactcccatcccttcactgcatctaatgtatttggagcgggtaaaaagaaattcactttgattatttgtcaataccggttctatgtctcacccgcaattcatcttttacagaaaatactaggcctgcacctaaagacgctacaggtactcagacacagccatctgttgttgacgagctgaattcaatgcctccacatggtggacaggcagggacacatgcctctatggaacatgatggtaaatgttgcacgtgcttccttcatactattattctacgtatgtaaatacgtttgtctcatcactcatgcgccaatgttgcatcagattgcgatgagaacatcatatttgaggacgatgaggaagaggatgaagggtacctttttggaggccaaggtacacctcggtgcatctatgtgacctttgacttatcttatttccaaaatataacactttatactcatgctaattattagaacctgattgggaagctg

SEQ ID NO: 113429 - DNA, 438 bp, Setaria italica
  Intron number 2 from transcript Si030977m (locus Si030977m .g) derived from phytozome v7.0 (chr-ID scaffold_2; pos 65 03892 to 6504329)
ataaggttcgatgagtcattcagtgttgactttttacctaatccataatctgttttatttcttctggaaggagtcttttgacctaattaatgcaaaatattcaaggtttgagcttgacagacaaccagactagctcacttggggttctctgtgcttccattaattatggtccaccttgggccttcctatctttaatagattcgccggtcagccaatctcggccgtatgccaaaaataaacaaacaaaaaaacctaaacgaaacgaaaaacaaaacaaaacaaaactaggagattcttggaccagtttaggttatttgttctttataaattcagaaacttgcagctttagctgaatcgtcttatccatgacaagtttgtctgatgaagatgctttgacatgcagaggatccagcaggttgtgcagcagacatctaggct

SEQ ID NO: 113430 - DNA, 710 bp, Setaria italica
  Intron number 2 from transcript Si031300m (locus Si031300m .g) derived from phytozome v7.0 (chr-ID scaffold_2; pos 46 164647 to 46165356)
tcttgcagtcaaagtgcccggcgcccctactgaaggtaatagatactactatgttctttttttatttttcagtttttgcaaaatgatgcgtccattttgaattttttttagcctgtctacgttaccaattttcggttcattaatatcagtacagagttatacaccaaagatcgggataatcatatgttaaaatttaggcctaaaatagggctgaattgtgcctagatggtgacagtattgttagctttcttggcagcaaaatggttccaacttctaaaaaaccatgaacgatgatagaccagacagatttttgaagcctgaacgctgtgcgtttttgtcttggcacgctgacagtcatctgcaagtgaaaatcttaattaataggacacttacgcgtaatctgaattactaacgtctctagtccaaaataaaatatgggcgtgggagagagtgagatgggacaggtggcagccaattttgtatccatcaggtccatcttaactcgcatgcctattagatctcagtaaatgatgtggagagtcatcagttgtgcactgaaacaagttctgaactgaagaaaaacttgggtcttgtatacattaccttttgtcctttaagctgtgcgtgtgattcgcttatctttcgtcgtctcactactctgcttccatgctgaaggtcctgcacctgcttctggatcggcaccggccgcc

SEQ ID NO: 113431 - DNA, 1065 bp, Setaria italica
  Intron number 3 from transcript Si031022m (locus Si031022m .g) derived from phytozome v7.0 (chr-ID scaffold_2; pos 38 024155 to 38025219)
accagatcaccaagggcaagactgacgctttcaaggtatggttgcattgtatcccctcaattgttgcagaaatctgttaaaatagtcatatgcgagcttttcagctacttggtagaattagaatgctagatgcccattggcatgcgacttatacaattgtgcactaggaattaaaggtacacagtggctgatcttgctgtctgactttcacaatgcatgcgacttatatgacgagtttagaacttgtatcaagacaaggaagattagaccattcgataccatggtttgttgtaatgtacatcactagaactcccagagtgtttttttccctctttgtggaatcaagtttatgttgcttacttgcttttgatataagaagataccatggtttgtgcagagtgaagggaatgtggttatgtgtatctgtcttagatttaagcagcacaggacctcctttatcttatctgtagattgacattagaaccaccttttttgccctgctgaaatttgttacggtttacagtctgccatctgcctcccctccaagagaaaaagaaaccctgtcagttgttaatagccattatcactttttacagttttaccagccttttttcacaatttctataatctctctaattaaatttaggtgaaacaagcactgaagttttctgtagtactgctcatgcagatagctagtgctgagctatcttgtttcataagtttatgatttggatttccgagtgcctatttggaagttggaacagttagatggaaattcttatgcaacacttagtgtatcatctgtgcaagggacataaggctgcaagtctttggttgtttaaccttatggttatcagtgttattacaagcagttataaaaattgatcataaaacttctcattctcggagtcggtgatcgaatgggtgctgttttatgtgaacactgcattatctttaattaatcagcagtttataccgcatgttattaaaacaatacgaatttgcttcattgtaagttggtttgtttcagagcctacggaagcatctccttgaagagcttgaaca

SEQ ID NO: 113432 - DNA, 706 bp, Setaria italica
  Intron number 4 from transcript Si029005m (locus Si029005m .g) derived from phytozome v7.0 (chr-ID scaffold_2; pos 34 156092 to 34156797)
tcttctgtcaccctttgtctgaaacttcctgagaggtacattttctcccccaaaactgtgctgtgaacttgtgatgttcttttcatgtcattcgacctaaccattctctagtttactgaacttcttaaaaaaaagtttactgaacttcttttgtctcccctctcccctcatacatgaacctgtattgtttcctggctgccttggaattcgccattccaattttgattagcactactactgtatttgtcatttgttatcatagctgctttctttgggacttttgtactttgtgtaaaaactttggtcagacagtccatggctactcatgtttaggctctgggaaaattgtctgcacaacttactacatgctattttgtgtctcgggatgcgttacactcaaacgtaaaatgctttagtgaataccctcatccccactgttcctcagacaaaaagaataccaacagaccaaataaaagccaaaactgacgagctattaacaggtagggtgcacaaggaatgatataactcatgattcctaatatttatttcctgtaatgatctggatcatgaggttggagcttggttcaaatcacttgctgaaaagcactgtacctgtagccttggtttcttgctcttttcaaagtagtatggcatactcaatatgtaaatttctgactttctgtaatcttttttagaggcacccaag

SEQ ID NO: 113433 - DNA, 532 bp, Setaria italica
  Intron number 1 from transcript Si032832m (locus Si032832m .g) derived from phytozome v7.0 (chr-ID scaffold_2; pos 44 942895 to 44943426)
tcggcgccgtccaggacagcctcgctgcggcttcggtatggttcgcattggttcttgcctgacataggcattagacgtcttattctggtttctgctttgatcaggatgtacaactgatgagctacttctgaaattctgtttccgtgggtaccactatgcacttgtttgcgagattctggtgattttcgtgtttcttggcaccagtttggcaaattcgtggacatctacgagagttgattgataactggttgttctttgattccatttgtctggatcgttctaggaatgtttaaggaacgatggatggaccatttagcctattcttttcccctgcagttcaataacaactgaaaatcaagcaaaataaaattggagggggatggtgggcatgttcagatgatataacgttaatatttctgtctgtcttttcgtgaatgataaggattttggtagagaattggaactgattttttcccctttaatgttggcactgttaggttgtacaatactctgaaacacagtcactaagtca

SEQ ID NO: 113434 - DNA, 802 bp, Setaria italica
  Intron number 1 from transcript Si028700m (locus Si028700m .g) derived from phytozome v7.0 (chr-ID scaffold_2; pos 47 432423 to 47433224 reverse strand)
cctccgcgccgccgacctcgaggagttcgtcaagggtaacgtgccgccgcctaccccgcttccccaaccgcgcgcacttgctgttccggtcgggggttgccccagtccttaggaattatgaggattctggattcggattttgatcgttgcctgcttaaaattctactggaatagggttttgttggtcggccgtactaattggagcttgtgatttggatgtagctggtatccctaaggccttctctcaagcaaatcggtgcatatatgtaaaaaattaagcctgcgactaaagcacacggccacttgaactgaaccttttgagctgctcgtattttaattttgaaattggtggtcttaccgttgcttttatacttaaccgtactactatatatggctggggttaagaaacttgatctgattttggaaaaaggtgtcttctgatgcaaaaagctaacataagttagtatgagttttgctttaacggccctgcataagcttgctagcttaattattcatagatcttagttctccattgtcagctctgcaaaattagtgattgtttaatgccataggacgttatcccttaatttccatgccatagtcttgcttttcataatgttggctggtctactttgtggtagcatgcgattagaaatctcttctaccataagcgtacagatctagcaagctttagtgttcttgttttttgaatgaaagaatcttatcaacatgaactgactctgttcttattctgattcaaactgaaggtgtatcatttgatctctctgacaaggagctcttc

SEQ ID NO: 113435 - DNA, 530 bp, Setaria italica
  Intron number 1 from transcript Si032794m (locus Si032794m .g) derived from phytozome v7.0 (chr-ID scaffold_2; pos 32 403535 to 32404064)
aagacaaatctaatgttagtataatgagtttaattcttttgatgtttttttagttttgttattctatgttttaactttatatcaacgtattttttcatgttcaaatgaagttatctctacatctgatggtacttaaggttttaaccaagctctctttgagctagttatgagaaatgtaaccaagctctctttgagctagttatgagaaatgtatggtagctgtgtactttttttcatatacattccctgtactgtactctgattttttagttcaatttatttgatttgttgtcttattttctaatattaattttttttatctctcggttcaagcttattaagaagttgaagtgtgaattatcttcatcttcaaagcataacgtttatatatttaactttactatatattatatttctaatatattatagaaccatattgtaattttatattttgattcatgctatcatttgattatgtttttttttgttttatttacagtccaaacggtctaaggttattaagaacagtg

SEQ ID NO: 113436 - DNA, 702 bp, Setaria italica
  Intron number 1 from transcript Si029450m (locus Si029450m .g) derived from phytozome v7.0 (chr-ID scaffold_2; pos 86 17508 to 8618209)
cggcggcgctacaggaagcgagggcgacgcagctggttttttgcgcggggggttttcctcacgtagaagtccgcctcaggcctcgttcgtttcaccaggattggattccagctaggattacttccaggtccggtttgagtgattccacccgtgtcactcaatctggtcaggattcattccaggggtgaggaggtatggtttcaatccgggccatctaatgtagaaggattccaatccaggtcggttttcgttccagatcagactaaaacgaacaacactttcaatgcaagtctggtttcaaaccgggtcacttcaaaccatccgaaatggacctcattccgggccaatccggtgaaaacgaacgaggcctcaactggtttttcaccggaaaacgtgggttcaccgttttttattcccaacgatttacgattacaaataactcggaaaaactctgcaattttgttattgagcgcgttggagttgagcactccaagctaatctgaccctcaccgccgacggcagcgcgcgaagagtcttgcattgcagccaagtcccctgacgaaacttccttcttctttttttgaatttaagctttcttttttctcctgacgaaacttcagcgttcagatccgctcaactccgagcagtctcaaaagtcaaaactgaggaacccaaatcccaattcccgtcacgcttgtacgc

SEQ ID NO: 113437 - DNA, 980 bp, Setaria italica
  Intron number 1 from transcript Si006934m (locus Si006934m .g) derived from phytozome v7.0 (chr-ID scaffold_4; pos 23 953176 to 23954155 reverse strand)
cgaagtactgaagcgaaaaatcggtaacttcctgaagataattggttcctaattgaatagatttgctggtggatggtcatagtatagtgcctgtcagtcatgcattaaagatcttaacaactgtctgctctagttgccctcaatggaacacttgttggacttagaagccagttcttcacataatctaatacccttcttgcggaacctttaagagtcatcaatttgttactgtaggtgaccttttcgtagatcaacaaggcctgaagttatttcatgagcccttttgagcttacatgctaccatgcctgcaaggatatgatctttaggggaaaaaatgttagtacccaaaaatgctcatcctcatttcttccatatcaattcatcaattgttatatctacaaatgtttgtgagatcatgtatgagcgagcgcccttgcagctaatgctgtaacaactttttagtttgttttcccttaattaaaaggatccgcagggttcctgcacattcttaaaaacaggaaaaataagcttgtgatggatacaacctggaagtctggaactctcttaagccactgaggagcagagaaattaacttaatttctggtatttgatataaagtgggaaaatggcaatatgaaaaatgagaactatcctaaatttcaaattctttcaaatactagtgtcaatcaattcagtctcatgtgtgcctatctgcttaattctttattctcgaggaaaatatatgtacttcttatagctctgtactttgtagcctctgctcactggcataagatgtgtcttaaaaataaatttgcatgctcggttaaacggtatctatattgcagtttgagttagttgtgcataatgaagtaatagtgtatggttcttctaagttaagtagaatacagtattttacatttggtgacttttgatgcactgatatatggccttcctctgcccgaggtgtaggacatcaaaag

SEQ ID NO: 113438 - DNA, 971 bp, Setaria italica
  Intron number 1 from transcript Si025968m (locus Si025968m .g) derived from phytozome v7.0 (chr-ID scaffold_8; pos 31 295854 to 31296824 reverse strand)
cgcctcttccacgaaatactcgaggtgagccgccgattctacccgaattgtgattgtttagctcccattcatgtgtacaaactacagagtacttgaagcaactcgagctgcaacatgcagctattccaatggataattgaagtatgatgcaacgttttagaatcagcttgaattgatgccttggcggtgcatagttactggggacaaaatgattgcacacatttgcacattaacatggtgaagaacatgtgaattcatctaaaaacaattccagaactgactgatagtctgttacagtttacaatcaatgctaagctgcaaattagaatcaccagctgattctaccaatctacattgtcgaaactctgctatctgttagctccgtcaccccaagacccaagctgttctgtgctgctttactgaatgtgtatgcattttgggtgtttgctgcagtttactcttgaccagaaatagggaaatgatgaattgcatcttggcagcgcttcaaagtttctgatgattattgtttatatcctaattatcaatactattttttcgcctattacggttctttaccactgtataattgagttgaaaacgagcactcaacgtcctttgcaattattaaggtctagttgagaaaatgtactagcaaaattgcggcaaaaatgctgataatatcatgggatatttagataaactagcgcagtatatttgtagcacaaattgatgggtttggtgtaacgatagatgttgaaaaccaccatgcttttaaatctctgttgcctccttttattttgagttgttccccaaaaagaaagaataagttgaatatagaggccagttgactgattctaaacccatgtttgttcaaatatcttgaaatgcttgtcaatctgacatcatttcccccctttttttgtttgtgttttgttggtcggtgattagagaaaaacaggaggtttggtaat

SEQ ID NO: 113439 - DNA, 539 bp, Setaria italica
  Intron number 1 from transcript Si028941m (locus Si028941m .g) derived from phytozome v7.0 (chr-ID scaffold_2; pos 30 980640 to 30981178 reverse strand)
gaggtaaatttgaatcgacaaatcgcgccgtgctgacatccacgcctctgtttcattttctgctctgtttaagtcgcagtagcttctgccccgtagcgagctgtgctttgctttgtactcatggcttgcttctgagctaatggattggccgtcaaggatgctctccctttttcgcagttcgtggtcacctactgccactgactgttcgcatattatcctggcgaaacgcgaacgcatcgtgcaccatctcttgaattaacaaatcaacaagttaaccactgcagatcactggtctaactgtgaaaatgggccaatgcttatcttgctgtcacggtttaaaaccaatgaagaaattttcgtaaaattgtctagtgcacataggctaatgtcagatcgaaacagagtgaaagattttttattttttatagacagaacagagagaacggactttcagctcgtgaaagattccgttcgtggcgatcaatgatgacgcgactttgtttgatgacggacaggccgcggagaagctgcaggagacc

SEQ ID NO: 113440 - DNA, 940 bp, Setaria italica
  Intron number 3 from transcript Si006636m (locus Si006636m .g) derived from phytozome v7.0 (chr-ID scaffold_4; pos 39 672063 to 39673002 reverse strand)
tttggcgtgtaaaaggactaattcaggtgtgtcttctgtaactgagaaacattcgtagctttcaggttttgttaggctatcatcttatattgctcatttccatactggcaatagatgcacctgttttgttgcatagtgaatgagtgttagcttgtttggtcagtgcactagctgtgcccactccaacctgccgcggcagagcccagctcagactcagtgcaggctcgcacccccttccctcttaattgattatatggcttcggtgccatatatctagagttacattgccttgaactattggtattctccttatcagttaatgctgtttactaaatgacaccattcatgtatgcctttggatgacaaaaccaagtagttgtaggtggcaacaactaaaataaccttatattcatttatgcaagatactcctttgtgttgtgaatgattatggcacccgtcctattctcttatgaagggagcttaggaattggattgttatgcattgttagtgcctgaagtatgtagtagcattaacatcattaagttcttcctcattagttactattactacggaagtttttggtgaacatgttcatttaggtttattttcatcggttaatgtaactttttattagtgtaaaaatattttgatctttagtcctccttaacctccgctctccacgcttgtttggatttgcgtttaatgtcttgccaatctgctccatggagggatcgaatctaatccccacctatcctgtgacatgcccatattatgataacatgctcagatatgtgataagcttttcttgtatgtttaacagctaacagatttgaaaatatcagtattagaaaaaacagatttgaaaatacctcctaaactgccatattctttaagtgttgagtttctcttgcatgttacaggtttgcagatcaatcggtg

SEQ ID NO: 113441 - DNA, 890 bp, Setaria italica
  Intron number 1 from transcript Si006636m (locus Si006636m .g) derived from phytozome v7.0 (chr-ID scaffold_4; pos 39 673847 to 39674736 reverse strand)
cgagcccgccaattgggcgcgccgcccacgctgaggtgcggattttttccctcccggtcacctttttttttccccttccccgcgccccctcttggcccgtcgggtgcccctggattggggagcttgcttgatccgcatcagcgagtttagcctgttagtcttctgtgttggagtgttggagtgttgtggtgtcgttcgattcttgtatttctctctccgggctaggaaattgcgcttggttcctcgaattgacgggctgcctgccatatgtgggaagcgcctgcgcgattgaacggagggggatagaggattttcgggggaattaatgtgtgaattatggtgtctccgttacctccctgtttgatggtaccgttgatctgcgtgttggtataaatgaggcccgagggatctttgcaatttacccgaggggatggggctttgtacaattacatttactgggtattggttttgattgccatttacatgcctatcatttgtttggttttatccgatagaagaaatacttcaaagttctgcatttgttgttagattttcagtatttataagccaaatattagctttgaacagtcgttcaaagggcatgtgttgtttattcccacttctagtctagtcatacgaaggagatttcaagcctaagagttgtagttgagcagctttgccaacattgatatgatacctgtaacgttattgctaactgacatgaaagaaagaaaataatgaccgaaaggcgttgttatcattgaacatacggagaggtttcgaatcaatgggcttctgagaattgtccataagctgtagctatgtttggctcatttctagctgattttgtttcaggacaaaggaagaaaaacattggcgtgctgagaagc

SEQ ID NO: 113442 - DNA, 649 bp, Setaria italica
  Intron number 3 from transcript Si007923m (locus Si007923m .g) derived from phytozome v7.0 (chr-ID scaffold_4; pos 27 006614 to 27007262)
agtcgtgcgagatagacatccctactgatgaggggattgaggttctcgatgattcgatgaaccagaacatactgtggcatcgctgagatatcgttctgaatgcatcaccagaaacctcacggccgagccaagaactaccccttccagattcaaatgttgacacagagcaaccgatgctgtcacatgtgtagagagctaacaatgagaacgagcagccaatgctatcacttgtcctagaagctatcagtgaggatgatgggacatcagcactagaaggcgatgaacgagtacatgatttagaagttaatgatccaacatcgtcgtcacgagcatctccacatgccaagaggctagtggtaccttgtatggtcaacaaatacgaaaaaggcaccatcaacagatgtcgacaagtttttaaacatattgaagaagaaggcttcatcttctggtgaaaaatctataactcgcagcgcctcttagcaaaaggaaaaggatcaaaacctcaatctctttgcgtcagatgaagtcccaatggattatgagcatgtcaaaccattcttgtatcagtgggatctgctagagggccccactaagctgcatggatagatcatgaatgcaatgaagcaaggcatttgagaaatcaccgtgc

SEQ ID NO: 113443 - DNA, 687 bp, Setaria italica
  Intron number 1 from transcript Si005736m (locus Si005736m .g) derived from phytozome v7.0 (chr-ID scaffold_4; pos 42 11374 to 4212060 reverse strand)
gctctaccaccccgccctcgtctctaccgtctcaggtactagtacttccctgaatccctgtacccacatttcttcagttaaatgttcagtgatggttgaacacaatttgaatcagtgaataaatcgacgctaaaaaaattcgattcagcaaaattcagcgaaagttgtgcctgttgctctgtgggaggaagcctatgatgtgaacgagggggcattgcttttcattgagaagtatatcggccattagcagtgtggtttaacatcaaaactgactccttcgtgtacatgtatttagaatatgaggttttctatctgaactccacctgaatgtttgaggctttatgggtctaaaacttttgctttcgatagtgctccacaatcaacatgagcttctttcgttttagaatattatttgtactgatattcgttgagatagaatcatcattttgacacgttctaggaaaaaaagtcatcattttgatagcaaatatccttaatggattgggtttgtgtttatcagaatcaacgcaaccattattatctgttttcaaacattcactataatgcttctggtatttctctatggagatcaaacccgtttccctctcatacatgatgagctgtagcactgcttttttgttttaatgagcatagcaaatgatagatttttcttatccttcagcgcag

SEQ ID NO: 113444 - DNA, 759 bp, Setaria italica
  Intron number 1 from transcript Si027967m (locus Si027967m .g) derived from phytozome v7.0 (chr-ID scaffold_8; pos 83 39342 to 8340100)
gctgtcagagctcaaaagattcagctccccaagaagtaagtgttctaaaagttctaatgtatatttgtgcttttctgatttgcgcccatgcatgcaagcaattttatcatactgtatgggtactgtcaaattgatgaagttggtaagatgaagttggtagcggtgtctttgggctttgtaattttggatagggtgctgatatgtaagttggtcattggaccatgcattttgttgaattcaattgtcccataggtacataacaaaaaccacagacaccattataattataattgtgttggagtatgtgtggcttctgcatcctttggggtcatcatctgtgtttttcttttacttttctaggagagttgggccagtagtgtatttggagcaccaataagcttgccattgtggtgacaattagaatctaaacttgcagatatttatttagggtcataatatgtgggaatgtgagctcctggatgttattgcagccttttcattgaattgttgaattgatctgacttttttagttgctgcttaatcaaaagttagttattcctgtttgttggtaaagatagtttcaattaaaatgggtgaagaaaagagtgccaaatgcttatagtacgaattttttcttgagattatttttgttcaactaatactgtgcctgactcgcattattttcacacagaaaaaggtgactggatgaagtgtgcttggaaaggtttcaacaatatagcagaacatacatccagtcat

SEQ ID NO: 113445 - DNA, 799 bp, Setaria italica
  Intron number 1 from transcript Si029029m (locus Si029029m .g) derived from phytozome v7.0 (chr-ID scaffold_2; pos 90 7976 to 908774 reverse strand)
ggtggggcgagagggccacgtacgcgcccaagtgcgtgtcgattccctttcttcagagtccgtctctcctttatttttgcccaatttggtctgaattgattgattgttgctcagagattgttgtttatgggcaattgcaattgtttcccagtttaacattgtgggaaggtgctgcatttgcaatcaatttgcatctggcattttaccatggtagtaatatagcgaagtttctgcacgaattagcaaatatactcaagacatcagattgattggttgcaaccatcaggaggaaatgttgctttcagtagttaagaaagggggcttttatgattattctgggatgttagcatttattgtgttgtggaaatgtaggaacaggggatcagaaatgtctccgtactggaatgtttgcttgaactgaactttcaacaggattgacagcaccttgacaattgctcaaaacaaacatccatcctctggccccacattccatctgtcctggacagaagtttggaaagagcatttgtgatggtgtttgaggtttctataaattgatttagctcagttgtacacagagccactagacagatgaaaaatagcacagcatcacctgattgccccttttctggctaatccttttccttttcatgtataacctgcacctttttttcataattgctatatatacttgagctcagcagaagctatttttttttcaatacttttgagttattccctgatccttacgagttttgtggttataggttcacaagccagactgtacaaaagtttcctgagc

SEQ ID NO: 113446 - DNA, 713 bp, Setaria italica
  Intron number 1 from transcript Si031957m (locus Si031957m .g) derived from phytozome v7.0 (chr-ID scaffold_2; pos 69 26404 to 6927116)
ataaggccagacccctcaccgcccccacgggcgtggtcgtcgctagaggtagatgattcttgtcactgtcgatttttcttagctttgtcttgttgggctagtagggcgaaacacgggcgatctcttaactgctccatcggtagataagtgtgttttttcggtctttggtttggattcatcggtctttggcagtttggatgtcgatttgcatccttggtggggctattgcttgaatcggggtgaaactaaatttgcacagcttgcaatagctccctccggttgcttcaagaagccgaagaagttgtactagtacttttttcctttttttttggtagaaattgagtttcagcatccaattttggtaaatgcagtggaaccttctttcatgtccatgctaatgatccttatcttggtaggaaaaaaattattcgcatttaggaaaaaagttaccttttctgtttagatttgtcccgttaactggggaaaagagacaatcttgtaatacagattagctctagggaagctttgatatctctgaatgaagataggaacacagagggatttcactcgtcatttataaacacaatatgaaattttagggtagtctaatatggtatagtaacatactttcaacttttcgtggattatctgatgccttatttttatctcgttcctttctttggatggattaaacacatttgcagctggtattg

SEQ ID NO: 113447 - DNA, 784 bp, Setaria italica
  Intron number 2 from transcript Si025958m (locus Si025958m .g) derived from phytozome v7.0 (chr-ID scaffold_8; pos 25 728356 to 25729139 reverse strand)
atcaacgaacttagagaattcctccgaaacaagaggtacatacatttcctctgtaaatggttataacactagacacgtattcatatactttgttccataaatttttgtaaattattgagccttttcttcaataatcctaaatttatgctaccaagctctagcgcaaaagtatccgtgtcactgttagtatgcatagttccagaatatgtttggtaattactgatataaaacttgagagagataatgatataatactcgtcagacaacttaaatgcacctcttctcttccttcattcccactttttaggagaacacattggagagcatataattccatatattaagcaaaacagatgttttacaaatagaaatacagctacatggtccagagttcaaggacttaatcgaaacagtctctgctcggccgtggcaactcctctgcttcttcaatgatggaaaaaaaagacaatcatgtggcatttcctttcctaagaatcaatcttggtgcaggcattttctttcctctgaaaatctgcagattgtctccattacttagggatcacttttgcatccatatatagatttgtccatattcactgatatctcttttgcattagaatttatgaacttctaagtggaggagtaagcagaaaccaatcctgtcttaggtttatggattattttttcacttggacagcttgaccattttcatgacagaaaaattacattgagttgtactaacataatcttttggttcaatcaaacaggtacttgattgttattg

SEQ ID NO: 113448 - DNA, 580 bp, Setaria italica
  Intron number 1 from transcript Si027127m (locus Si027127m .g) derived from phytozome v7.0 (chr-ID scaffold_8; pos 31 542604 to 31543183)
gtccgctgcaagagatctcacccacactgtgcgtaactaacctctctttaactccttttagtgcatatttgtttttgacatagaaattgttagtgctgtccctcagcaggtaggagtcgtgcaccagcacgtggcaccgatctttgtagggtccctaattttctaaaacaattgtgttgtaatgaagaatcttgtcaatctcaattataacttcatcagccatgaaacattcctataccataccaacttcgcccctctctccataattgacatccatgtttatcatagtcttccaagctagatgtaccaacatgcaacctggcatgtttaggtcaacctcaattaactaattcatgcatttagatataatacctagacaaatgagcagtttgttgatgaaaacatactaaaatgatcgtgaaatattatatatccaaatccattcatctaatttattttcttattactgcacatgaatagcaaggaagcaataataatattctagaaattgacacttatttataatacttttgtttgatttgcagctagccgtggtcgtggcttaggtggctactactgg

SEQ ID NO: 113449 - DNA, 448 bp, Setaria italica
  Intron number 2 from transcript Si029203m (locus Si029203m .g) derived from phytozome v7.0 (chr-ID scaffold_2; pos 26 766077 to 26766524)
ttcacccccgcgactacccaggtgaggcactggttgcttgccacctaatttgacaagctcgatgcattttcttgctgtgcgtggctgtttcgaaattgaggtctaggttttttttggcaagcactacatcaaaatttggagtctgtttgttctggtgagtcttgccagtagtttgtatctgttacagttaacttctgttttgggggtgtaaagactaaagaccacgggcggggagtaggtagctaatgtcattatcttttagagtgctttctcatggattaagctagttttagtcatgatttgggggatgctatggtaaaagtatgagtttggctgtttttcttgtatttagtaatccatacattgtgtggttatgttttgacataacattcttttatggttttacttcataatgtagcattcttttgttatgatttcttccaggcag

SEQ ID NO: 113450 - DNA, 893 bp, Setaria italica
  Intron number 3 from transcript Si029203m (locus Si029203m .g) derived from phytozome v7.0 (chr-ID scaffold_2; pos 26 766625 to 26767517)
tttctttaacactgtatgtgcttgctcaactccgaaagctttgttttattgctttctatggttgtgtttctagggatttaatttgttagataatgtatttttctatctaaactgtagcattttatcataattcacaaacatttatgaggagaaagggaggactttcagtttcagcttagtagccaattcttctatgtgcattatgtcataattctatttggcctgttgccagctttactcagtatgctacccctggccacaaataaaataagtgatattttggacaccaacacaatacccaaaaggtccagaacacaaagttgactagtggtttctactgtaacttattacgaacctagtaaatatgatattatgatagtatattttgaacaaatctacacatggttatggatatccaatttaaatgttaatagccagactgcatgcatcacagtgaccccccagtggtactcgttttttaaggcatggttactaaacctgttgaataagaagtgaacttgaagactacagtgatacaattaacttgcagttgcattcagtatataatgaaagaatcagagtcgggatttgtgaatgataggttctgtaagctagacaccgtgctccatttcaattgttttctgaaaggtgaatacttatctggctttgcatgagttgagtattcacaattatattagattattagtcatttcttgacaaatctgcaacactccgtgcttgttttccttgtactatttattaactgtgtatgatagcattataaagtagaaccaatgcactgatactgcaaagtatgctgccttgtggcttgatctagtttactcacaactcttgcagaaagagaagaagaatttgcaggatttggcaggtgt

SEQ ID NO: 113451 - DNA, 1067 bp, Setaria italica
  Intron number 2 from transcript Si031338m (locus Si031338m .g) derived from phytozome v7.0 (chr-ID scaffold_2; pos 10 2954 to 104020 reverse strand)
acggtttcatcgtcatcaagaaccgcccctgcaaggtacggtaccggtgcatccccctctcgcttgttacgacccataaagaattaatggcaacacaaatctcctattgtttgttgatttagaggtgtcgcggacaaactgctttgatatctattttgttttcccgtactgatttgtgcgctctgaaacttgcggttacttgcggattcagaggcgtcccaagtgtgagacggatccagtagattcacccgcaagacgactttgcagtgtagtagaaagctttgatctttcgatgcgctttgtatagttccagtcttggtcatgatttgtatctgaattacgtgatctttggggctgcttaggcatctgcggctcccctgttgtggttctggatgtcttcctttgaatctgtctagatttttttttgtttaatgatgaatggttcaaccacaaattaaccctggctgtcaacaagatacctgtcctgaccgtcaatgaatatgtttcagttacatatttgtaatactgcaaaaaaatccagcaaggttctttggagaaagcagagagttcatatcttttttgcaagaatttaatgctccttgcactgtttattctgcagttctgaacgacatgtttagatctgcaatgctggttaaactaggactatttccatgtagtttgtatgcttctacttgccaagggagttcttttttatcacttttgctcccagcaccttccctccgtatagttgctatctgtagcaatgtccttcatgcatgaaatattgtctgaattcattatctgttcatgctggtatgagttcacatgccattcaatttgtgtcatcagtgtctggattgatacatgttttcatactggaatactggatttcaatatttcttactaccctatgtttgcttgccacaccatattcctttatagtttgtacatccggtagccatattctctctttggatcttgcaatctaacaagtcttgatctgacaataattcctgtatactctttctttaggttgttgaggtttccacttccaagactgggaagca

SEQ ID NO: 113452 - DNA, 481 bp, Setaria italica
  Intron number 3 from transcript Si026806m (locus Si026806m .g) derived from phytozome v7.0 (chr-ID scaffold_8; pos 34 167248 to 34167728 reverse strand)
tcgctgttgagaaacgtgtcacctcgccactgctggtacttacgaacttacttattcttccttttagcttgtgatattgaacattgcacaacgaaacattgggatgttcagttgagaaacatttgcttgttggccacttgctcaataggaatctcctctcatttggtctatcattttactctcatggtttcctatacaatgcttgtccttaggtagttctgttaggatattcctctttcacgcagttgttacattcttggtgcagcccctaattctactacaatattttcgtaatattttgtactcaagctgatacaactttagagttttaaactctcaacttcattcaatttggtagctttagcagctccacttagcctctgattttcatgttataggttgtttaatgcttaaactgttaatgaattcaatgtttctttgctctttgatgttataggaacccagcagtgtggagaaaata

SEQ ID NO: 113453 - DNA, 514 bp, Setaria italica
  Intron number 1 from transcript Si029627m (locus Si029627m .g) derived from phytozome v7.0 (chr-ID scaffold_2; pos 49 064106 to 49064619 reverse strand)
cgacctgcccaggtacctaccagccatttcgttgctttttctgattgattgattcactggttggtttgtttgctacgcttggttgcttggattaatggagcagcattctgttttcgaattcggtttggtttcctcacaagactatgcatgtgcttgcttgcttgaccaagaactaagctcgatattgctatccaaattgcaaatttcaaattcgttgtttcattcttcgatgatttgattgatgaaatgcacatgatcgatcgagagaagaagttttgcaatgattttgggatccctatgctgctgcacaagtgctagatccagcctcgtatactactccgtgcacatgccgcggaattaggactaggaatgttacagatccctggtggccaccgacacttgattttccctctagtagcctggtagtatgcagtaaataatagtataatactgtatataaaaagtaataaatcatgcaggtttgacgcgtcgctgcttctggagcggctgcgga

SEQ ID NO: 113454 - DNA, 1014 bp, Setaria italica
  Intron number 1 from transcript Si006620m (locus Si006620m .g) derived from phytozome v7.0 (chr-ID scaffold_4; pos 59 63350 to 5964363 reverse strand)
tcggcgccgccagcggcaagccgcttcactttaaggttggtacggatcgactggatcgttgtggggggccttttgcctttacgcccttgcgtgattcgggtcggttgctgctgcttgtgcaggggcttggattctaacaacgctaattttggttgcttttgcctctctcgatttgggaatactgcgcgttgtcaatgtgccgccgttacggaataaagggttgaatatcggtgcgatttgacttgtcctaattgttctcagcaactaaaaccgaaaaaacactatttcttctgcgatcgattggttgttctagggttttaattcagatttcgtaacctgaaaataggaggaattgttttagatgtactttctctgtataaatcgatccccttcgacgaattgccttcttattggccggtagtttagcattttcagtttctaggtgagtaatttggttctgatgcgattgcttgtcttctcctatcaatttggtcctataattttctgctggcattgtaagcatcgtactttttttttgtcatatagctggatattctgcactatcagtatatttgcttttggtgctaaggttctgcctagttctttttgtttttcttgtttttttcctcggcagtactggtgctgtgatgtcaaatcagtgtcctttgatgtgcagtgaactctatgcatgcactgctgccaccagttctgatactgttgtaagggcccctcccttttgacttcatcctcattttcggcacatttttcaccatcaagttgatgcttgtgattactgttttgtctgaggctccactgtcctagcttcagaagcatatttgtattttgttatttcctatggcaagtctgtaagctagtaaatgagagtggtgggtggttctcagttatttttcaacttttctttcttggctatcttggtacagctgaaaatgtggcactagaattgcggtcagatgtggtcagtaatcacatctacttgttactgttgcagggctc

SEQ ID NO: 113455 - DNA, 525 bp, Setaria italica
  Intron number 1 from transcript Si026372m (locus Si026372m .g) derived from phytozome v7.0 (chr-ID scaffold_8; pos 10 81534 to 1082058 reverse strand)
cgatcttccaaggtatgatacgattactaatttcccaattaattttagctcaattttgctagtgtcagttgaaaagttccagcatatctgaagatgcagttctagaatagcaagctctgtcagtgtcagagtcaagaattttggaaggataatgtattttttttgtttatggaagcagtaaaatactcaagtaatctataactcaaacaaaaaaaggatagtactgcagagaataaaatcaacttacttcaagattgaaaactgatctgattacgacttgttaaccagaggcaaccaagaaaagaaaccaaacatgcaagagaactaactgacagtgaaagacaagaaccgagaaatacttctacctgttgcatattttattatctgtatgactgtaccatcctataacggtagaaaggagatcatatctcgaataacttactcggcatggtatgacatgatttctgaattttgccatatgtcaaaacagattcaacgcaactaggctgcttgaaaagctgagga

SEQ ID NO: 113456 - DNA, 956 bp, Setaria italica
  Intron number 1 from transcript Si006612m (locus Si006612m .g) derived from phytozome v7.0 (chr-ID scaffold_4; pos 39 519884 to 39520839 reverse strand)
tcgccgtcaagcgcctcaaccagcgcagcctgcaggtctgcttgcttcctcgcgtctcctctcttctctctgtttttttttttacctcctccccctttgcaagattatccatgccatgctgcattttgggcctagatttgtcattgccatatcgagtttgttcatcagaaagcttgaattctgtgacgattaatcatagtatttgatcacacttaggcagaatagcagtgtagcatttttatggagtccctacactacaaatttacagttatttgcacctcatatcttgtaaaaaaggatgtgcacgtgccatcagacttttcactcttcaagagctgtagactggttgaaatttctcaagacctgtagtccacgagatgccgtctccgtggatttgtcatttctggtgtatgggcatcatagaatttattaaatcatttttttggcgtccacaaactgccgagaagtaacagcatcatggagactttaggtgccctcctttggatcaaggcctaaactaaactcggaagattgttggtttgcagtgaatccattagataatttgagcttagtgacaatcttaaacacataaatattggcctggacagcttcaaagagaatattggtccaaccaaccggacaaggacatccagtgatgtcaacttcagtgggaatcatagaacaaaccacgtgaaaattagtcaagatggcatcacaagtcaacctattaaatcatatagatcagcatcacgctttaaacaccgcccaagtctgatcctgacaataattagatcctagtagtacataaatgaatttcatgaaaattttcaagtgttgaactgtgtgcctgaacaattggatttatcctttttttttaaaaaaaggaatagcagtttaaaagcctttttatgctgatttcaggggcacaagcagtggctggctgaagtccaattcct

SEQ ID NO: 113457 - DNA, 349 bp, Setaria italica
  Intron number 2 from transcript Si029171m (locus Si029171m .g) derived from phytozome v7.0 (chr-ID scaffold_2; pos 21 251106 to 21251454 reverse strand)
aagaccggggctatagaggtattgactgttacccatcacaccttattatgtttttttgagatcaataatctagaggaagactttttatggctagaacttgatatttacataatctactatcgaaatatttctgtttaagaagctcccatttcctttatgcaaaatgtatgggataaggaatatcatatataatttttataactcatagttcaagtacctgtttctttgattggcatcaacttttctattttcttttgtgttcagcggaaaccgacatgactgtctaactttgttgtcatgtggttaccgtgaaggttgctgcagatcgtgttttagtgctgaactcagt

SEQ ID NO: 113458 - DNA, 389 bp, Setaria italica
  Intron number 1 from transcript Si008166m (locus Si008166m .g) derived from phytozome v7.0 (chr-ID scaffold_4; pos 17 672716 to 17673104)
gggaaggaggacccgagaggtaagcaagctattctatcagagtttgaacggaggagacatgacaggggaaaaatacaatattgtgcgagtttctgaatgttggaaatctcccgaacatgggctttgtttagttgcccaactttggagatgcaaaatcactgttgtagtactgtaagcatactgtagcgtttcgtttgtatttgtgaattattatctaaatattgactaattaggcttaaaagattcatctcgcaaagtataacaaaactgtgcaattagtttttgatttcgtctacatttagtactccatgcatgtaccgcaagtttgatgtgatggggaatcttctttttgcatagtgttaaagttgggagtttggagggaactaaac

SEQ ID NO: 113459 - DNA, 526 bp, Setaria italica
  Intron number 2 from transcript Si026113m (locus Si026113m .g) derived from phytozome v7.0 (chr-ID scaffold_8; pos 35 972267 to 35972792)
gtcaacaagtcaccctacaacataacgatccattggtaaacaattactctcttctgtccattaatacaatatgcttataatttttagtaggcttaatttgtgtgtgaacatcagagatcggcacaaatgtgttgtttatgagtgggacttgagggtgaatgtaagggcacaatacttggagtacaacaagcttcttagccatgagatgaaaatagggatctaaatactaacaatacatatcatatgtagggtgtggatagttggggtatgatatccacaaaatactagagagcatctcatccataccgtggctggcaccatgaagctgacacggatacgcaaaatgcatgcagtttccttttgatcctttttgtctaaaaatttgatccattatttgggtaactaaatgacttaaaatcaaaaagttttcagacatatataggttagttttcagcaataattgagaaacagaaaaattgatttgtttgctactcaatctttactttctgtgtcttcttatataggc

SEQ ID NO: 113460 - DNA, 783 bp, Setaria italica
  Intron number 1 from transcript Si031268m (locus Si031268m .g) derived from phytozome v7.0 (chr-ID scaffold_2; pos 16 308786 to 16309568)
gcaccgcgtgcccggtctttgggctctagctcgaggtgaggaacttgaccgtcttcgaatgctcgtttagagccctgtaccaccatacgcttgccagtgcttacgggccatagaagctagctagggttagggatgtctgtacgcgagaaaagttaattcacttcctaccgcctcaagtctgacttcaataggtcaataacattacttggcatgcagtttaggggccaggtcttcatgtggcctatgtttattgttttgttagatttatgacttgctgtaatttttcagagggcacagctgggagactgtcctgatttttgtgccgcttgctgttcacttttttaagaacaatggaagaaattctatgcatgttttctttaataggatcaaatttcatttcctaggatccaaacatatttggtaatgatcacccagttgttcattctcggcagttcctaagcccattcaaattttagataattcaaactttgctaacttcaacgtattttcatttaatttctagcagttaatgttgcaattctgaacttcaacatttcctacattcagctccgtgcaggacttaacatgcttattgacatacattattgtgcttttgtgtgtgctccatcgggtatttgtttaagcctaataggaactaggaatttcaatctgtgaacctgttgtccaaatgcagccatactttatggaaaccaagcgttcatatccattatcatttgtttatgtgcaggcagcttgaaagacaagtagagttgtatcctgcaa

SEQ ID NO: 113461 - DNA, 864 bp, Setaria italica
  Intron number 1 from transcript Si032660m (locus Si032660m .g) derived from phytozome v7.0 (chr-ID scaffold_2; pos 30 120531 to 30121394)
gcggaccgagaaagtaccggggaaattagagtagtgacgatgtgggtgtttggatcgtatcgaatatttacactaactagaagtagaagtattaaatatggatatttacaaaactcattacacagatggaggctaaacagcgagatgaatctattaaacctaattagtccatgattagacaatgtgctactacaagtaatcatttgctaatgatgaattaattaggtttaatagattcgtctcgccgtttagcctctattatatgattagttttataattaacttatatttaatccttctaactagctttaaaatatttgatgtgacacaaactaaactctggctcgagatccaaaccgtttcggtgcgagtcagggcctcatagaagacggaagctaaagcactgtttttcctttttgccccccttttttttcacattggacacgtgctttctctgtggatccgcctgctctttggccgacctctcttgtcctgtttatcgatttcgcagtacgtgtcaacgttgttttggtggttgttgagaggagcacggagcatttgatttctttgtctgggtttcgttgggacgtattgaattgaatttcaacatggaacgaaaaggctagctggacggccgagccatggccgagcacgccatttctagattcgcatagagcgtactctctgctcctgtgaaacatatcctccttttgcgtttgatttctgtcacaagctcactgcgaagatttcatgtttcattcttgcattcgttccactgtctgcatgtggctctgacaccgtgtggttttccctctcgtgcgatgcccagccagcagcaacagtcaccggtcgcggcgcgcggag

SEQ ID NO: 113462 - DNA, 822 bp, Setaria italica
  Intron number 1 from transcript Si006840m (locus Si006840m .g) derived from phytozome v7.0 (chr-ID scaffold_4; pos 53 3095 to 533916)
gccttggcgcgtccaacccttccttgacctctacggtaaatcctggccgtccacttgtcaatccgcacacctgtcatctcttccattctgtacgtgtgcatgccttactgttcccggttgacttttccggtgcggtttcccaacaccctggtaacaattggtaaactgcaaattaaactcagatccgggtaccagcatacacccaaagggcaaagaaggcacaaatctgtcaaaggatttgatatgatagtaagcaaaattcaaaacctacttgaaggctgaagctctgcaaaatgtaatgatgctacttatacaatgcaaagtagcttcatttgcgctatgatgaagaccataagttgcttaaacatgatatactttcagatattaactcacaactacaatatttgtaccgtttccctgttttttggacaaaagcataaactaaactgatgacttgatgagcacccggcattagcagacaaattgggggagtcatgtgctcataatcaacaactgtgtcagcttaatatgtcacctcaagagataaatcagcagaaaaagagcagattacttgccctccgagacagaaaaatatataaattgctgttacaggtccctgcatatatccagaaaaatagcatactacttgtcagcttattaggtcacttgcttagatactgttcacttccaaatcataaggcagtgttccacttactcattgagggtgtatttatatcctattggtctttcaagaattcatataacctgacgtactaggatgtttcaggacgacggtttcacatcggcagcattcgaggtgtg

SEQ ID NO: 113463 - DNA, 479 bp, Setaria italica
  Intron number 4 from transcript Si030955m (locus Si030955m .g) derived from phytozome v7.0 (chr-ID scaffold_2; pos 46 785484 to 46785962)
tacaaccagaggtattctgtttatactcactcggtctatggtgttccatcatgaaggtgttctagatttttcagttttattgtgcttatggtgtgtaatgcatttgacttgtgttacattatttacacactgtaggatgatggccattgttcggccttaacccaatcaaaataatctttacatatagaactcggtgatgaactgatgatgatgcacttaaggtcgcactgtattgatttctgtcttgaaacgctaaaatcaatacatttatttctaaagccttttgctgctgagaactttttgttcagaaattttctttgcccacccacctataatgctatataccagcctgtatgctaaattgattttcgatgttatgtgtcatctaatccatgcttcaatagtttacattgattatcctcccgcttcattatggaatgtgaaatgattgctacagaaagcggctgaaagagggggct

SEQ ID NO: 113464 - DNA, 871 bp, Setaria italica
  Intron number 2 from transcript Si031511m (locus Si031511m .g) derived from phytozome v7.0 (chr-ID scaffold_2; pos 12 058657 to 12059527)
caagctcacgccggcgcaggtcgccgcgttgcagagtgagttcctttgcctggtttcttgtgcgaattcacggtgtcggcaaccatgctagagccttaattttggttcgtgtgcacaacagaatcttcggcaaattgctgcattaatttgtctagtcttgttaattgattgtcagcaaccatagtatagaaatgaagatcttcccacatggtctgcacatgatcgagtcaacccatggtttacagttaaccaaggcaaaaagatgttttttatgccctgttgacagattttagtcaagaggggaggagaatcctcttggcaattccgaggtcaatgcaacgcgtgcttcagtggtttccaattggatatagctacgtttgacatattattatccttagctttaactttaaaagtcactggaacgggtcttcgtggtaacttaaattcgatatatggtgaaaagtgtaactttgagtggtaaaaggttaacctgatgaaaccttccttgaaagtttctctttttctcgcgcctttcttgtcaagaagacaagcatactttgggtttcctactccgaaagcatctcaaagtgaaaagaagaagaggaccaccactaggcaaacaacgtagttaatacttaataacgttatccttcaattcactctggtgcatgaacatgctaataaggccttatttgaaatgccagaaatttttagggaacctgcgaaaatcaaactttaacctgtgttccaacaaaattcatgtaaatttagtagtttccaaccagggcctgaaggctcgaaacttatactaacttttgtgcttctttcttggccagagcatcctgaagttctccaggcgctgcctgacgtg

SEQ ID NO: 113465 - DNA, 893 bp, Setaria italica
  Intron number 1 from transcript Si008136m (locus Si008136m .g) derived from phytozome v7.0 (chr-ID scaffold_4; pos 25 602364 to 25603256 reverse strand)
gctggtttaggaatcgataaagtgacaaagttacgcacatccaaaagatggaagcagatatatgcaaataaaaatttgacataaaacttattgaacagcgtgatacaggcaagagcaatacacaactcaagtaatcaacccattaaaagattgacacatgcaacgcactttagttgtactacatggccgaaagatacaaatccaaaaactgagctttatcagttaggcaaaggacctttggccccttacacttgtcaaagaaaagaagcagagaatatatagtatcttgtgaataaattccagcatggttgcttgttcaagtgattatgatggaacttacacgtcagtattattcacctagctcgtgatcgatgctagtgaaccatgtcgcaaactgcataacaacaacgtctcacagcagcaccaagtaaccaacatgttccaacctaaaactaaatctattggcctgattccagcatacaagggggaaaaagcaatttgcacatactaataacgaaaccattctaacagtgtatcacaagctatttgaacaaaagggaacttgtttacaaaattctggcaatccttttgaaaaattgaaaccatttttgacttgtgttttacatctaacacagaagaccaacccatcgaactgaatataatgtagtccagataaaaaagcagaggaaaactgacaacagaacaatatttccctggacaaactacagtctgatgatccgtcaacctctagcaaatgatacttcgagatgcttacctgtataattctttcttgaggtctcagaacgaaaacaattatcagacctcctaccctcgattgccggagattttttatgaaaggtcgcttgctgcagctgcacaaaagcaaggccgct

SEQ ID NO: 113466 - DNA, 959 bp, Setaria italica
  Intron number 1 from transcript Si007025m (locus Si007025m .g) derived from phytozome v7.0 (chr-ID scaffold_4; pos 21 53322 to 2154280)
cgaggagatcctcctcgagcgcccccgcgcccctggtatggatcccccctccactcctcgatccgccgcctccatttctgatctgttgcatcatgtttttgttcgtcacctgttctttctattgctagcaactaggcgcgatcggtatctcgaatatttcgattcatttcttagttctgtaattgcagatagatgcagttgctgtgaaattgggggccgttggatggctttgtgtacatgttcgtctattctagatagacagggttcgcggtgtcgaacatttctaattaggccttgtaggagcaacaaatttcgtcatggttctattcatcccattccaatcacctcttgagtgatgcgataattgtgtcacggagcacttaaaattaccatttcattctggctgatcatctttgtcatactggtgattcctgctgttgttttaactgagctacaattagcagccattcaataaaattttggcagatctatttttgtttcatatcaaagactcgaattgcattccatatttcattgattgcgatctccatttgatgcagttgtaccactgactgcaagttatctcagtatgaagaattatttgttatgttacaacttacatgagctcctgaatgctcacatgccgcaaaaataacacaccatttcttcttgatgtgcttactatttctctttccagcattcacaaattcaggcatagttaagttacatttgtctatcaatctgccaaagcatttttcagctaaatagtgtacatcttacggttacagacctgtcagttagccattgtaaatgctctgcttaatgtattcatcatctttttttttgtgggttatggggcctctaaactcgcctgtattaaactttggtaatcttattatcttcatgccttgtgcttgcatatttgctaactgcccactcatttgtagggagcaaagctg

SEQ ID NO: 113467 - DNA, 1019 bp, Setaria italica
  Intron number 1 from transcript Si026886m (locus Si026886m .g) derived from phytozome v7.0 (chr-ID scaffold_8; pos 32 980066 to 32981084)
gagcatcgcgctcaatcaccaaggtcagcgcgttggtaagtactctcacatactatattattggtgctgttcgcctccaagtgcataagataaataaagccaagatcattaggtggaggcttcgcaatttggaggcagtgaacagttggtacggtggtttataccatcacacttctctgacttgcactgtgggcattactatggcttattaactggaagtgaaagtcacattctacccgttaagggagagtagtatttggttttggaatcaccccatctcagaagaggcccattcctcaaactaaagtaaaatgtgggaagggagaaggtgagagatgatggatcacccaattcctcaaacaaaatatgtagaaaggaatcaccaaagcctgcactagataccaggtgcacgtgtctagctttgttttgctaaaatattaatagaaagattttgcattgctgtggcaaccggaaatatgctatagataaggtgcagccaatcattgttgcacacgacaaaaattagaaccccaaaaaagtactgtaatggtgagcatagttttttttttccaaaacaaggacattccccatttccattataaaacggaaatacaacggagtttttaccttgtacagaggaaaaaaaagttatgtgaaataaaagtctggcattagactaggtaagggctaccttattattctggtaaagaacctattagctagcagactggcaggaagtttaacaacatatactcttattacaagacccatcaaaagaaatagacgcagtcgatcatcagactgagaacctctacagccagcggctcccctctccagtttttgacttcttaagcacatcatcaggcatgatcttaccagctcaatctttaagtaaaaacggataagaacagcaagatcagtcaacatcagtgtagtagttgtccaagtcaaacactgatatcatctgcttctccgatgttgcaggagtgttctactgcggtgctcaggtgctggtaaag

SEQ ID NO: 113468 - DNA, 334 bp, Setaria italica
  Intron number 1 from transcript Si008122m (locus Si008122m .g) derived from phytozome v7.0 (chr-ID scaffold_4; pos 24 665702 to 24666035)
caacaacaaatcattttaatcccaaacaagttagggtaggctagagatgaaacctaacaagaataaaggatcttccaagataaataattaaaaaaaactaaagaaatatttactctgttaaaatgttgttatgcatctatgattccaatatggtataatgatatttttttttcctgaaaatatgcacatatacatggcaaaccaacatatttacatctatgttaatcgatattgcagtagtactactttgattattccttatatgctttgtgtatccttctaatgaaatgatatcttgttaggtctccactagcaaatactatccatcctagtg

SEQ ID NO: 113469 - DNA, 1003 bp, Setaria italica
  Intron number 2 from transcript Si028028m (locus Si028028m .g) derived from phytozome v7.0 (chr-ID scaffold_8; pos 97 16569 to 9717571)
acaggtaattgaattgccactttgctggggttggtgcaatctatggtaagtatctatcatatgttgcttctgtagaaccggaactgcaattatttgcttacatttgatgattaatttgaaatcagcatgcgatgttatatctgtgaatgcgtatgggttgtacttaatacaactggagatagaaactataatagtaatggcagttcttgatggttctatgttctgtatagcaatttgctgtttgcatttatgtgatatgttgatgttaatgtcacaggaaaaggcatgtgcttgtcaagtgtcaacagggtaccataaaatagtttgcagttacatgggtggattgccgtggaatccttttaaagacgattttaacaactgcattgatgcatttatatatgaaataacctacatacaaaggcaatgaaggcttatctttaagtaggatgggtgatgaaaactacctgcatagtagatattgcgcataccatctcatatcattataaatctaagctcttttaataattaaactgcaaatatgtcaaattaatggggaaggaaggcatctaactggaaagcatctgactagttttccaaggccagtagatattttgtgtgacagtttacccatcaccattgctaattagctgattaggtggatgacatccattttttttgctgcactattcatattgttttgttactaaccgatatgttttttttctcgaacacgcaggagagttgcgtatcattgtattaataggagaagaaagagtcatacagagacccaaacacacacccacacacgctagaacctgaagatcctaatcaccttttacaagattaaaaaacgaccacgaaaaaaccaagagccgaggcctaatcaacccctctgacagcaggcagggggaggcccttggctcctgccatgctccacagctgggcatcttctttggctagaatcagagctgtagcaaccctgggggaagccccattaaacaca

SEQ ID NO: 113470 - DNA, 518 bp, Setaria italica
  Intron number 4 from transcript Si007221m (locus Si007221m .g) derived from phytozome v7.0 (chr-ID scaffold_4; pos 39 364327 to 39364844 reverse strand)
ttgacaccgctctcaaggaggttcgccacaggaaggcacgtacaaaccctaaccttttggttcatctctccaagctagatctacctcttctgcacactgatgatgtcctctttggatctgttcatatttcgtgctcctttgtagatctgcgtttcctgatttgtttgtgaatattgtctttcattggtagatctgtgtgcgtttttttttcgtgagtgtgaagttaacagaagatttatgacacttggagaatatgatactcctggttcattccttaatccttatggatgcatgcatctatgttctattcgttattttgacatcaaaattaaacagcaacgttttgctgtgacatttgtttttgtgtacaaggactggttcttgttctcaaaataaaagctgggagagaattgactgtaatttaaaatccgtgtacaatttcatctcatgcatgttcatgttttaaccttctatatctccttttctgatctttttttttcatttgattttgcagtatc

SEQ ID NO: 113471 - DNA, 613 bp, Setaria italica
  Intron number 1 from transcript Si005779m (locus Si005779m .g) derived from phytozome v7.0 (chr-ID scaffold_4; pos 32 906906 to 32907518 reverse strand)
agttcgtcgtcctcaacgtcgacgatttctccaaggtaggcctccggccgttgtgccgaggaacttattttttaccgtattttggcctgtttccagagtatatgccgatatgcgggttgttcgcgtcaattcgaacacgaatttctatcattatatggagaataacttcgctggatttgaattgtgggctattttttttcctccagcccgcctgttgagctaatttagcttttccatgttttgtattgactgtaatacatttttcttgttgtcaccatgttaatttggcattctctttcctgttacagtaaatttcgcttagggtgtggatgttttagctgtttgtaatattgtgggggaaaatgccaggggtgaaagaaatggagcagcagcattgttttactgcatttcatattgatttaattttacctgtttttgtcacttgaacatgttagtgtgtaggctactaaggtcttgcatagttgcatatggccagcaaaccatattttgtaatcaggctttcctgaagttctcactttacttctattcgtgttgatgtcatggcgttgcagcaaggatcttcacaaggctgtccagactacatctgtcagat

SEQ ID NO: 113472 - DNA, 882 bp, Setaria italica
  Intron number 2 from transcript Si031133m (locus Si031133m .g) derived from phytozome v7.0 (chr-ID scaffold_2; pos 40 707286 to 40708167)
acaaggcccgccgcctcggcttcaaggccaagcaggtagatcttctcccatctgccctgttgacgcgtgcgtagttttttccctcgtgatgttgatgggatttgcgggtacgccgaggctgagggttggctttgccgttgtcgtttaggatcgtgatttgtgtagcgcttcaagtgtatgctgcttgtcttgtaaatgttccagctttgatgtaacccatgcgtgtagtatttctggtgataggtgtctgtgtttttggacgaaatgaaggcttgattgtattccggagatggcttagccattcagtttatccttttaagaatgggcatttgtttctgtatgtatatgtatgtatatgtatgtatacgatgttcaaatatgtattattgaattttgtgctactggtcacttctgatgtattggcccctaattttgtagattcaaacctgttgttaagtaacgagtcaacttttgggaccttgtttcattcaaatagtgttcattagactcttttgtagtgattttagtgatgaacctgagatgaattccttcattttggccgctttatggtgagtacaggttgctatgctaggcttgattgagtgtagtgttgtcataccatttaggatgcatttatgcctaggcttccaacatttggtttaccagagtattgcttatcagcatgttgacatttaactccacttatgcgattcttttcttaggagtagaaatgatggagttgtctgcatgatgctccgaactaatttactctgaaatttttgagtagctgttcgctgtgactgtatgttcaaaatgattttgcttaactttgtttttttgccttcagggttacgttgtttaccgtgtgcgtgtcaggcgtgg

SEQ ID NO: 113473 - DNA, 626 bp, Setaria italica
  Intron number 1 from transcript Si021795m (locus Si021795m .g) derived from phytozome v7.0 (chr-ID scaffold_3; pos 21 251480 to 21252105)
gagagggtgaaggtgagaggcgtttctttagttaacttgacttgagacatgaaaactggtgatatatctgatataatacacctgctagcaatttttatctatctcaacaattatagccaatagggttactggccacaggattcacatgtgtacatcttggtaaaatcttgtgctaatgttaaacttaagttgttagtcgtgtcgtatgcgagaccagcattattttaactctcatttatggaaggtctaggtttgtttttgttgataaagacaatatacagactttcagtcaattctgctgaaaacgttactccccaataacagtgaccctaatgctcctttgatgtgacaagtgaggaacttcgcttgatttttaatgattatacaagaagaaacttatatggattggttaaagatccaattgttgcatgacaagttataacaatgtacagttattacagcatatccaagctgcctcaagcgatgtctttggtcaatgtttcgtctctctcatcaatgtttcttctttcttatcagcatgggtacacattttgtgctgcaggcaactaaacttaatattttcctttgtaggcttggataccagaaatagcagctaccatctcatc

SEQ ID NO: 113474 - DNA, 1037 bp, Setaria italica
  Intron number 2 from transcript Si021598m (locus Si021598m .g) derived from phytozome v7.0 (chr-ID scaffold_3; pos 26 621196 to 26622232)
cgccaacgccgtcggtgtcaccctcgggccccgaggtagcgaacgccctgacccggatgctacagcacattctgtgtgttagatgctctattgtgtttcacctccagaattaaaactgccattttgatgttgtagcaggtgcttcatcttcaaaattacgcctgctgatacagactcaattgtaatttctttctattgcaactgcattaactatttcattctcgaattatacgacactaatgtttatgtataatttttgtgcccctagttccttaacgttatcaggatgctccataatatgttcagtacctttagtgattactgacagaatgttatttaatgcaaattctaatccttgaaagctaattttgatcctcgaaaggcaacactcttgtagtgtagtggtaagctccccggttgagggagacaccaaccaggattcaaaatcctggttgcagcaaaaaagatcccctcactggcaacccgaaaaaatagtggtagggctggtggagatagagaagaataaaggggggtgtggcaccttcacaacatacttagacattcaatttaacatggtgaaaatttagaggtgataagagactatgatttttttctgggagcagccgcacctagcacttataacctagctccacccctagggcgccggcctgtggcacctgtggttggtttggggtagttgtagtggtcgccattcgccaacccagtgggtcatggttggccgaggttacggtgccgccctaggtgaagctggagtttggaggttttcttggctagcttggctgagatttctttcttagtgtaatgctgtgggaggcggtctttcccccaccgatcgagttttttgactgtgatccgcgatgaactgtttagtgtacttttgtttcttagcttagacaatgggcataccatcttctgtgatcataacacatttttgcgtaatctagcttaaaaagaaaatatacagtactgttaagctgaagcaatctgcgacctctggaatgttttcacagggagga

SEQ ID NO: 113475 - DNA, 494 bp, Setaria italica
  Intron number 2 from transcript Si031217m (locus Si031217m .g) derived from phytozome v7.0 (chr-ID scaffold_2; pos 40 665362 to 40665855 reverse strand)
tggcgcatactgttttggaaaaaggtaccctccagaataataatcaaatgcatttgaaattactgatgatgaaagttcaatacatatgtggagcaagcctctatttgtcgatttgaaatctagaggatcttgcttgggtggttactcctgcatattttttttggtgcatgttattgctagacaagcttgggggtgaagaagtgtgtgccaaggcttgtttcttttcttttgtcaccactgctatcttctagcatccaaaatcttcttggactcatttgggcccctgaaatgttttgccttcagttctgtaaaattcctagaaattgtgttttaagcaattatttcccctttaggcataaggaaacttatgtcagtttggtcaaactatgtatatttgactagttccttgagacaacacagtgactaacaattgcttgtttcattttactattgctgtagaccaagagcgcctggatattgataccaagaaactg

SEQ ID NO: 113476 - DNA, 796 bp, Setaria italica
  Intron number 1 from transcript Si021017m (locus Si021017m .g) derived from phytozome v7.0 (chr-ID scaffold_3; pos 42 708825 to 42709620)
tgcgcctcgccaacgtctacgacatcacccccaaggttagtcgggtccccgtccccttccttccctcccttcctcctctctccttcgctaacgccgtggcttgagttgctgtgcggcgaaccctagtcgccgccgcccgcgtggcggcgggttggctggtagtccgcgatcggatggggagggggtcctccttgggtcgacgccgcgatcggtggaggcgattttgtgctggatttgggcctgctcggattggttccagaagctgtatgtaggagtatgctctagtggtggtttggcgctggggcagttaccttgttttagctaagtttagcgtggccttgggcataacacttcctagtttgattcgcgaatggtaattccatgtgctgtgtgattgcctgtgtgacttctcccatagtttgatgtagctggtgcatcccctgcttgtaaaatttgacacaaaaaagaatagattaaggtgtggctgaggctcttgatacacattttgggcgcactttggtaggatataagatccttgcagttgcttgtctagtatttcgtgaggaccaaccaattggttctcaacattcgtgtggctttgattgaggcgtagttgcttgaattcttcggaccattcgaaaaccagcgtatcatcagtttgtcataccaaacagatcacattgttctgcagcattctcacacgctgtgtaactgtgtgcatatttcctatatgatgctagtacattgataacataccatcttttctgcatttgaacagacgtatcttttcaagctg

SEQ ID NO: 113477 - DNA, 551 bp, Setaria italica
  Intron number 2 from transcript Si021458m (locus Si021458m .g) derived from phytozome v7.0 (chr-ID scaffold_3; pos 72 70096 to 7270646)
gaacagggctcaaggagctgaggatcctcaaaaatgtaaggatttggattttgaataattgaatttcatggtttacttgtaattcatagttctgaagattcaaccaccctttaaaatttgtccatgttcgtgcgtagtatttgtggcttttgatgaaaacttttattttttttaatgcttaaatttttttggttctaaatactggtgttttgatcttctcttaagtgattaaactcattttacactgctaggtgatgtttatatcgcctaaaacattatcataacagatgaccctttcattgcacacttctttcaaatggtatcttgtgaaacaaggttaagttttcgattttgcagtacaagtacaacacgcatgaatgtagtttgtcttcgataaaacacgacttgacttctgattgaccattcatgtttgattttgcatattattcctattgaattgaacgagtgtgtaaaaatgcccatgttgacatgttgaccttttttctgtttgtcaaggaggacaccagggcaaaaatcatcagtggaaactc

SEQ ID NO: 113478 - DNA, 969 bp, Setaria italica
  Intron number 1 from transcript Si017415m (locus Si017415m .g) derived from phytozome v7.0 (chr-ID scaffold_1; pos 40 004611 to 40005579)
cggcggcaactggatcgcgctgccgcagaagattggtatgcctcttgtgcgccgtctcgtcgatcgatccatttggtgttttggttgcttattcataccagctcgcgttatctctttggttgcttctgatccgtgtgctactgtgcctatctccatggactgactggtcctgtcatgcatggtgcaacatgaatatggatgcggtatagctattagctaggttagctgccctttgtatccattcgatttagaggcaaacttttttcaaaagatggatatctgcctttgtatagcgattgatcctatgcatgttccccatgccccttcaatttcccctctcctcccttaaaccggccagatccaaattaaaattaaggacttttcgtaatatcatatgtatgttttgattggttttccttcatcatcaagatgtagtttaatttccgattaaaatagtacgcgcaattttgattagtaattttgatgaaaggagatgtgtgacgatgttccatcgtgcatagattgatctgtatgtttttcgtggtgcgagagatctagctaaagagagtacgtaccaatcaacttggtaaagagatcaagaaagccatttccctttctgaactaagaaatattcgtccggtgaaacatgataattacatgaaatcaaaacaagagagtagctagatctcaacatccttcgatctcgccagttactttcctagaagctagaatttgttttctgtatacataggttaccggtagtactggtacatatattcttccgtgaggttttgtccctgtactggtagagtagctatatatatactgcaggtagtgtgtagcatgccaatcatttctctcttgtttcttttgcttcctgattgtgaattggttgcttgctaatttggattaattgagttatatacttaattatatgtacacatgaatatgatttgcagggctgaagag

SEQ ID NO: 113479 - DNA, 840 bp, Setaria italica
  Intron number 2 from transcript Si010740m (locus Si010740m .g) derived from phytozome v7.0 (chr-ID scaffold_7; pos 27 355067 to 27355906 reverse strand)
cgaagaggtcctcctcgagcgcccacttgccccaggtattggctctcctgttatccccccatgcgtttctcccaccctagatctgctccgcgttgatcgattcatctgttaaccatgattaatcataatgtgtgtcgaccatttccatcgcagtgctaatcgagtaatcgtattgatgtcaattatggacgtgtggtgtgcacagattatactgtatttttatactttcgtaccacctaccatggaattggcatgcctttatcccattccaatcgcttcttgcgttagtgttaccaaacacccaaaattaccattctgcattttcctattgactcttctgtataatgtctagataataattctatctgctgttgactgctaattttagtgtattaaaggaaggaggccagctctacaccctttcttaaatttgtagacagattgttccgtttcatatcaaatactcgaattctgcaggtgatctcattccacattaggattacatcctcctgaaacctgaatgcaagcatattaaatctagcatgactgctttgtagtgttaactttttgatcaaaaccttactcgccaaatgatctgtcagctttgtagtgtacatcttgtgttgtggatatagaaatctatcgttcagccattgttaacgttcttctaatactatgactttaatcttcttagagcaaatgacagtttctcttgttacatacattcttttttctggttctgaagcctcaaaacttgctggttctgctgtaatcttgttatccttttgcctttgtttgctaacagttaattcaattgtagggaagcaagctgaggaacca

SEQ ID NO: 113480 - DNA, 652 bp, Setaria italica
  Intron number 1 from transcript Si014381m (locus Si014381m .g) derived from phytozome v7.0 (chr-ID scaffold_6; pos 21 780412 to 21781063 reverse strand)
ccacaaacgaggagagcaagctttccatcttcaacgtaaggatccttcgtcccctgtcgatttacgctgccgctttctcgtttgcgccgttagattaagtgttgaccttgttcctctgttgtgggagggtttgattgactctttcaataatcggatcgtgcagtttccgtgtggccgagttcttggttaggtgattggtcaccgggaacatgcattgtgacgtgggtagtgatagaaaaccttaaaggtttagaagaaatctgcggtttggtaattggtgtagggttttttttggcatgggaggaatttatgactggaaggagtggtgagttctttggtaatatttgctacttcatagaagaaagttccctatttacatgatttttctgcagtctaatcgtgtctttggtgctaatttagtgtacggtcacgcctttgccacaaaaataaaatatgtatacaaatacaaatgaattcatttgttttaagtttttccccctttccacacatgttagtacattgtgtttgttgtctttctgatggttgtaatgtgtaaaatcaggaacaatgcttctaattgtttattgatctgctgaagaggtatttcaagataataaaatctcatcctctcttccaggttcaccctgtgctg

SEQ ID NO: 113481 - DNA, 889 bp, Setaria italica
  Intron number 1 from transcript Si017210m (locus Si017210m .g) derived from phytozome v7.0 (chr-ID scaffold_1; pos 47 10262 to 4711150)
gagggccagctcggtcgtgggcttcactctccgaggtgagctaaaacccctcatacaactttcctctctttagatttcagaaattagtttaatacagcatcgggtaaataagtaatcaatcatgatgtgtttgttccagactagcagatttactgggtgaaagcggttcttctcgtgacactcgcgcagttacatgattaaactacatatggggatttggagaaagaaaaacagatatgcataagcagagagcacacatcgtgatggttatgtatgtgctaggcattaattaggagatagcatcagggttacaggaagagtaagaactaaatggacaaaaagagcccctttgatatattgaaatgtcttcttcatctggtaaacagttgaagaagaaaaggtttagtgcaggaagataatataccaggccttaagtgagtcaagaaataattatggaattagaacaacagaagtgacgccatttgttgaaagaaacacagaaggtggtagagtcaaagattagagatttatttttagtatcgacactactttcttttactggtttcacttttgtttttaattgattatgttctattagggatattaacattttgtccattacctttacccaatgaaacttcctctattggtttccagttcctttgaactcaaacattcatacggagaataaacatagttcaaacaggacagatgcgatcatatttttattgtctaatctagtgttgaataagcaggatatgattcatgggttaaactatagagcttatttacctgttcctgtgcaatgtcactggatatgcgcaaaactatttaactgtttcactaaatggcaggaatacttggagcaacccagaacaggtcagaggat

SEQ ID NO: 113482 - DNA, 987 bp, Setaria italica
  Intron number 2 from transcript Si031534m (locus Si031473m .g) derived from phytozome v7.0 (chr-ID scaffold_2; pos 65 46208 to 6547194)
aagcacaagtacctccccgacgaagtccaggtcagaatttgtgcttgttcctcgctctgtaattcgtatgtgctgtatgcaattgccaattgggaacggaagtaattttagataattgcatttctggactctggtggtggtggttctgctcgattgccatattaagtttaggtggattcataggaattggaatattggatgcagaacaagtgaatgatcattgggcttgggattgggttgtagaatcgacctagacccttgtgaacttgtggaaacagaaagtagtaaaggattttagttatcgctggtgtgatttccccccttttgagctcttttgagtcagaggttgtatgcttgtaatgctcactgtagtcactcatgccttagtctgtggtggtggatatggtaaattgccacattgattttaggtgtagttttcctagtgggttagtttcgacttccgagcaggatttgcgtcacgaattggataacaattatttgcgtaggtgattagggatgggttctgaacatcgtttttatgtgcttgttaaatggaaaaggtggaagctttagtgattggctgattgctaatgtgggttttcctgcttctgacgtctgtttgtgaacttgtgatagctatatccatgtatggtcagcgcaattattccatgtcttcttttgctgtgctgtatatatagaggttgatgcagctagatatatgttggtatcatataactcatttagttggtagagtcgcatctcaaattcaccaagggttgtttgttaactgctgctatcaggctctattttgattgcctgatcggacaagcataaatttttaataggcattgttttgcgagtcaccactaaatttatttatgatgtttctagaatccactgagacttcggtccgtgcatcaaatgaattgacaccttgatttcttttgacaggcaatacagacgccattcagaagctacctttctgac

SEQ ID NO: 113483 - DNA, 647 bp, Setaria italica
  Intron number 3 from transcript Si026617m (locus Si026617m .g) derived from phytozome v7.0 (chr-ID scaffold_8; pos 88 7378 to 888024 reverse strand)
gtcgcgctctccggtgtgtgattccctactccatgcatgtcaccaaacaaaattcaaaattaaagcattctatcgcacaccaaactatgacgggatttatttcattactcactagaccgatgatgagttgaccataagttggccagaaacggtgatagaaagggtaaacgatggtgacttacaacagattgccggcatcgtattctcaaagataaagtattgccaaaactttaaaaaattttaaaagtggagccaactaaaaagcgacgactttaatgaactgtcaatggctgaaagatcattcttccacgaggtatcttaattcaacgaaatatactaaagcaagcataatataaagtatgtccacattccctatacattcctatatacaaggttaggtagaacactacacatgtggttccttttgtttagctccatgtatagaatcaaatacctttagccttcttacaaatttagagaaccatgaacagcctgtacatttcaaaaagaagatgcttcaaaactttatttgataaattaattttgtgattttggatcaggcttcacactaaaaacatttccttctgtgtgttgccttgcatccttttccaggagcccataccattggccaagcacgctgcaccaac

SEQ ID NO: 113484 - DNA, 801 bp, Setaria italica
  Intron number 1 from transcript Si024464m (locus Si024464m .g) derived from phytozome v7.0 (chr-ID scaffold_3; pos 71 3597 to 714397 reverse strand)
gatcttggcgccaagcttgacgccgtaggccttggtggcgagcaatttaccccatacctcctggcgtttggaacgaaataagtataattattccgaggagtgtgcaacaaactatgctcagttcaactggttaggacttgatcttctcatcccaagatccatggcgccaagcccccgccacgttagcatccgcgtcagcagctgcgcatggaccgtcaagacgtgtaagcttggcgccagcgtggatggcgccaagctaagggtccatttttggaattggttccgccaggggcgtatttgtgagaatctttcgcaaaaagggctaaaaacaaaaaagtcgctatattagttcatacagcgctttgctgccttgcactattgcttgctctgtaggtggcaagtaggaatttatcttttgcatccgactcagttgatttcaggttccaggatttgaatcagaaaagtggttttgaatgactccagtttgcagggttttttttaattttttctaaaggtttgattataattgcatgattagttctgtcgtattatcctgtatgctattaatattccaatatttgtttgtggactcactttgaaacaaaatcattgactatatgcttttctttccagggtggagtatcaacttccaagcctgttcgcttcagcttattcagccggcttatcagccactaaacagtgttttcctctcacaacaaatcagccgtttcagcttttcagccggcttataagctgaagcgaacaggcaaatctcatcgtgggagctattacaaaagaaag

SEQ ID NO: 113485 - DNA, 935 bp, Setaria italica
  Intron number 2 from transcript Si029306m (locus Si029306m .g) derived from phytozome v7.0 (chr-ID scaffold_2; pos 45 527106 to 45528040)
agttcggtgctggtgtcgccgatcttgttaagggggtaattacttcgattcaccctttggagtttggatatgatcagaccgagcacgcgctaataattttttgttttttagaggaaacaattcattgttgataactatatccaacagtagcattgttgaatttagtattgctgaaattatactatagtaaagaccccttgttacaggcagcacctattattacacatattgaccatatcaataacatatcaaaatcagagcatgtcatcgatgccctatatttgagcataacataagtagtgctggagtgcaagatcagatcacagacgattccagttctacaaagaggccttctcatggacccctcttgtttattctgatatttcttgcctttgtcgttttcgtgactcggaattgggtggtgctagatatctgattgtgactgacagaacttattgatcgttactttgttgatggggcttctagaatagatgcctatataagttaggtatcacgttaccatcacctatatataatagtaggtacttgctgaatctaggaatgacttatctttcagtaatgtaaaatcagtccgtggttggttatcggacccaatccttttgttttccattctttccctttcgttttgtttgtcaataatatgttttgtttatgatgttacatcaactaaaaatgatgttacaacaatttatttggaatcttaaagattctgttgtttgttctgctaatgaatgctatgtgttatttgttgtataaagtcaatatttacacctaatatatgttgaggaaactttggttgcttgtgacatcttggtttattttcttggaagagatgatgacgttgtgtctcaattgactaaacaatagtttcattgccttctttataggtttccaatctaagtcatttcagcaaa

SEQ ID NO: 113486 - DNA, 562 bp, Setaria italica
  Intron number 1 from transcript Si021425m (locus Si021425m .g) derived from phytozome v7.0 (chr-ID scaffold_3; pos 34 266600 to 34267161)
ccaaggcaatccctacatcgccgacggctgtactggtaagtgcatttgatgggtatgaagaaattaagttcagtgttttggaggaagcaaaattctgaattcaaacgatcgagttgccactttgattagttcttactgaattgaattagacgttgtccgtcttgctacgttttagttgcaggggaaaactgattgttagttcagttagtacatagcgccactcttatgtggtctcagtaattccttctcacagacgtgtgtgggacactgttttcttttcttttgacagaaggcataggactagaaacaagtcataggccatagcagagtatcacaataactgacactgacccaatgtagcaaatcgtttgccacttaccacctacatataagagagtgacaaatagtcaactgcacctgtaaccttatatatttgcaaaggtcaattctatttctaattagttttccttaattatagaagtgttctatgtctcggaatatatcttatagacatgtcggtaaataatgcagatatcaacgagtgtgaggataaggagtatcc

SEQ ID NO: 113487 - DNA, 802 bp, Setaria italica
  Intron number 3 from transcript Si021365m (locus Si021365m .g) derived from phytozome v7.0 (chr-ID scaffold_3; pos 13 105682 to 13106483 reverse strand)
ctagtgaaggctggaaaaatcaaaggtttgtcacactaaattgctgttttgaatttgagttgcttgcatgttatgcattgtttttaatgtttcaaaggtgtttgtacgaattatcgatttttcaccagcggtattgaatattgttttggctgtgtattatttgctagccaaaatcttaaaatttacttgttaaccaaccacaataatgttacatgcaacagaattgacaaataggtgtttcactatcttgacattttaatttgcaaaatacgcttgtcaggtgcataacattccttagctgcccatcattttgcacctgattttcctttccatgtgcttctttgtcgtaataaaggatgggggttttttatcgcatttgcacatgaaacacatcagtgaaactttatgctttcacccttatgatatctgccttcactgtttgtgttccctttatgtatagttatcatttctgcctcttctcactgccaaccatgatgtgtgcttggttccctgtttgtttgagcttctggcttttcatgctgagaagctgtcaggaagctcaaacaaacaggcccttaaatttatgtggcctatttggcttagttgttgatcagatgtatagtagtagttattcattctccgttgaactttgcatataacagaaaccatcttgggatatttctactgctatgatttttctttagcttgagttcattgcagtttcagttacaatataaagtaactgtcgctcatgtacaagaatgcagtttggataagataagacctgagaaggagcttgaac

SEQ ID NO: 113488 - DNA, 936 bp, Setaria italica
  Intron number 2 from transcript Si036590m (locus Si036590m .g) derived from phytozome v7.0 (chr-ID scaffold_9; pos 51 145886 to 51146821)
ggcgggttcctctccagggtccttctgtaagcgctctcttgctccgaatcttaaatgtgttctttgcagattgcattttgagtttggagattcctcaggggcatgcatgttgggggttaaatttgatttgaaatgaaatgagttcggtatttctcttggtttgtttcacctgtagtatattgttttgttttaaaaaaatgggagatgcgctccttcctgtcgatttgtccaccttcttcttcgccgggaaatggggctgagagcacgcaagccattcaaaaatattttatcgttctcgaggagcataggagcaagttttcaatgcattgcacaacggtcaaaggttctgttcgtttttattcttccggtccggcttattctttttcctatgttttccaatcctatgttttgagagtgcattcctataaaattcctacgtttttcctattcctatatttttgcaatcctgtgttccaaaggggcccttaaggttgttgtctagtaaccacatttcttgaaatgcttgagatcgcataatactactgtatgagcttagatatgtccaatactgtgctctttgacctgcttcataaaaaaaaataccttggattttatcccgttcatttgtatgttggtgaattatctacctttgtggtgtaagtgcatcgaaaaattctattctcttgaacgatgttgagataccaaaaccgtgcatctttaaactggcaattgctccttttatggtttattgtggaataaatgggaaaaggtggaataaatatttttttactgaaatattaaaaaatttggtgaaaaacaacagccatttttttctatggtgatcggaataaatatagcactaacatttcatttatcttctggtgtttgatatgccaatgtcctgtaggttggcctttggctacgcctatcctgcct

SEQ ID NO: 113489 - DNA, 933 bp, Setaria italica
  Intron number 2 from transcript Si023117m (locus Si023117m .g) derived from phytozome v7.0 (chr-ID scaffold_3; pos 21 596865 to 21597797)
attcgtaagtacccaccataacaggttttcagttacatttttctcatatctactttgtatgaaagtatgctcttccgcactgttggcatgctgagagtctgtgagccttaggttcatattggttttttggtgttcttgcccctattttgaagtgcaattgtggttttgcgttcattttttaactttgtgatttttgcccttcactacgcaattttgtccttgatctatgcacatttgcccctgttttgatcatttgactaggggggaaatcgcgttgactcatgaatcataaagggaaaaattcacaatttttttaaaaaatgagggcaaaatcacaattacacttcaaagtaggccttcaatgtgtagaccagagatgcaacctcaagtttagctaactcaagaaactagcataactaggaaatgccaaatatgatcttttaccatgtggaataactttacattggtttgtgatctaccttctttgtatcataatggtatggaggcaattttgccttctttatatcatatataagaagcatctttatatctgaatgctaaactcttttccccaattacctgcccatttgtatttcaaaggggtttcatgtttgtcctagtgttctcaacatagcaggtcccaagcccctggtaaaggaagagggttgtgataggcttggcgagccagcgttaaacctagccattctaatggactagcctatctcaacttgcttgggactggaaggctatgttgttgttgttgctgctgttcatgtttgtcctagtaacaggaatgcatcaatcaatcagtagtaacaggcaataataatattggggtgaggaaaggggaagataaaggtgcaagaggcaggtgctgataaccaaagtgcatcagattaacttttgcaatacatttttgcaggtttttcaaca

SEQ ID NO: 113490 - DNA, 677 bp, Setaria italica
  Intron number 2 from transcript Si000306m (locus Si000306m .g) derived from phytozome v7.0 (chr-ID scaffold_5; pos 41 626092 to 41626768 reverse strand)
agttcggctacgagcttgaggtcctcgcggggcaggtgagctctcttggagtgtctccgctcctaaattgcagtgtgcctttttgttagttaaggccaatttagaagtacctggcagtggttatttaaataggatggtgccttgtttgactgcgacgttgcctaatgggatcgacggcttttatcacttgtttaagaaacagctgagatgatcgatcggataagcctagatttgattcactatcttaccaaaccaggaaaagggaatatattcgcacgttttgtagaagagattctgtagattccagatctgaactgaatatgaaaggaacttaactcgtgtaactttatcagaacccatgatattactgtgactattcttgacagaaattcgatactcacagcataagtgaagcagatctgaaaatgagttttaagttgaatgatttgtttatctaaaaaggtaaagctccaggatcaacacaatttgacatgttttctctttatctgcttgattggcataatttggctcatatatgaacctaaatgttgccaaggaccttatgtgtggattcatgacatctgactattaccttctgatctgattgaaatgccagcaattttctcactgatactgatgatgcaaattattttgaactgatttttctcaggaaaaag

SEQ ID NO: 113491 - DNA, 948 bp, Setaria italica
  Intron number 1 from transcript Si003819m (locus Si003819m .g) derived from phytozome v7.0 (chr-ID scaffold_5; pos 44 923071 to 44924018)
aggtagggcgcacctaatgttatattgaactccatgaccatgagacacgccccagcttgtatgcgcgcgtcatatgcatcggcaacttgttctttcactttgcatgatcttctttcttgtggccaaagcccatctattaccctcagcaattttatttgtctatttaactctcgaaacaagatatcgactccatttactccgacgaataataattcaaaccggatcaagtcactccctaatgaactttgtatcttttttagtttctccttgtacaagctatattttgggttcaaaactggcatcattactatgtcacaattttttttcagaaattgccctattatttttatcaactgggaccatgaacatacatgagaaataacaaaaaaaaagtcgtcaaattattttctaacatatatgatgcaactcattataggatgaactggaccaatttgtttagtttgaaatctgagggaaatggatgttttcctgtttttgagatcatttcattttgcatgattttgcattaccaagatagctaaacgagacttagttgacttgtgcctgtactgcatcctggtgcgtttgcggatactgtcgtactagtgatggcatgatgctttttccatttgaatgagttagatttagagagagggcagtgaaccttttcaccgaacgagttggcccaaatcaatgggtcagcactcatcagccagcagaggttttaagtatcgaatgagtaagtaagtagtacgtcgtcttctctttttcggccggtatgttagtaaatgggccctttcgagacaaccggagggcccagatttagataatcgcatatgaaaaaagccaccgtaactgtaaatcttgtgttttaatcggtctaaaactatttattttaatatttcacatgcaggtcttattcaagggcctacccgagctgctaccaaa

SEQ ID NO: 113492 - DNA, 766 bp, Setaria italica
  Intron number 1 from transcript Si000444m (locus Si000444m .g) derived from phytozome v7.0 (chr-ID scaffold_5; pos 43 534801 to 43535566)
ccccgacctcgtactgatcaccggggacctcacgggtatgtactagatccttctctccggccctcgcccccgtcctcggtttgattccacgcgatttcagggctgatccaatgtgaggtgaaattactcagttagcgaatgagaggatgttttcagtagttttcaatttgagtgtaaatgagatgtttcagaacattcgtgataaaatgcacactttaaggtagcacaatccgtccagtctggtctaggggcaagtggccagttttcgcccagttgcccaccagtaaccagggccactcactgcaggtttcaatttcaccattgcaacaaacatccagtagaacaaagtaagactcctccggatgatatactaggtagtaagcactgattgctaacaactgcaaacgcatgcagttccgtccctgtgatatatttgacttgttactaatatgcagggtacagttcttacatttaaaatgatttgatatgaagtaataaccaaagaaataaatttgaaattcaaagatctattgaaatgcaaaactgagctaactgaacatacaatcttctattgcatgtttcagcattggaaaattataggcacctataagtctgtaatattgatcagcatcacgagagttgctccaaccagcataaaagaaagtaattagcaccttctaagaaacggaaaaaattcattccctgaaatgttattaccaaggagatttatctcaatctttaattcatatctttttttttgttacag

SEQ ID NO: 113493 - DNA, 929 bp, Setaria italica
  Intron number 1 from transcript Si029822m (locus Si029822m .g) derived from phytozome v7.0 (chr-ID scaffold_2; pos 44 024367 to 44025295)
cccaggtgagtgacgatctcgatccgcgagtgcgttgcttttggttccccaaattttttgctgcgtgcatccgcctcgcgatctaggttctcggcttgggccgcctcgaaaatctggcgggctcgttgcatctcgttgtttccttcttctcgagaaatccttgcttcggcggagccaacgatgggcgggcgggtgggtgtgttagattggatggtactgtcatggcagttccgtgttcgtgtcttccttttcgttctacttctcgttgctccttggctccttgtaatgggtttttttgggtgggatatgttgcgctttgttgggcgttggtacatttctttgccggttgttgagagattcccagcaccggacgagatgcgacatttcctaattaagagtctgccctagcattttcggactattaggcctttaatttggtgcgtttgttctgttcctactaattaggcaggcgtcacagaggggatgcgtttggcttttgtatagaggagcgcacgttaacatgtcgtgggacaaattgggtttccaactccgtaagacgcaagatctgaagagttgaatctgtggggatgctcaataaataatgtaactggttagctctggtggatgtcagaccatggatctccctagattcaaaatatctggtccattgttaaaagtgctatgcttatctcagttttgcgtaatcttgtagcgccatagaaaattgtgctgatgctactgagaatagaaatcatgttggggatcctgaggaggcaggttacgtaggctctaatttatcttttggcgcatatgccaatgactcttgattgcattaactgagttaactgatttataagttcttactgtgcggtttttttaacgctgtattgtttgattgtgatgcagtgatacctcggttggcgtcgcac

SEQ ID NO: 113494 - DNA, 945 bp, Setaria italica
  Intron number 1 from transcript Si029084m (locus Si029084m .g) derived from phytozome v7.0 (chr-ID scaffold_2; pos 46 607068 to 46608012)
ctgccagggcctctttggaggcccgcttcggcaaggttagggcttctctgctccgttgctgttttgtgcggttacttgttggcgcattggggattggctcggtgctcggattagtggatccctgtggcaaggcacatcgaggacttgttgttcggtcaatcccctctacaagtggattggaggggatttcgacttgtaggagtttctttgctccgaagatgttaatccattcggaaaatggttctcttatctcttttcttttaagctcttagtactttgtagcgactttccctcaaaaaatagagttaatgaagcagttcgttactgtgatacgagtttcgagtttcgatcaatgcatatgtggtggtatacttgagagctttctcatcaagtcattccgtggaactgggttcttttggcgactcgattttcagtttgaagaaatggcgattttttctgtgttttctaagtccatagtttcgtgcgcaacattgatgcgactggtctgtaactagttatgttcaatttactgttgggatgtttgtggttcaagtaccaccagggtaggtgataataagctcaatcttgatgtaggattatttccaatttgttgtcttcatcttgaggtccagttaaaaatatcttttctttaacagtctttttatatgtcctgcattttagcatgcaagattgaaaagcaaacgttaatcgatagccttttctcttgtcaaaataaaatcgacggttctggctggattatcgatacctttggtgttgagaggatcactgttttagcaatagttaacctgttagacatagatgttttttactgctgcagctcttagattcttttatattcctagcttacaataaacgtgacccctatacttttcaatttcacttttactccttcaacttatttctcaggtagaagcactttctcct

SEQ ID NO: 113495 - DNA, 945 bp, Setaria italica
  Intron number 1 from transcript Si036459m (locus Si036459m .g) derived from phytozome v7.0 (chr-ID scaffold_9; pos 51 646890 to 51647834 reverse strand)
aggggacgcacaaccagtcacgggtcgcggagcaggtgagaggcattccatcttacgtgcgttcatagccttcctgccacgcatctcgatcccattgttgatacataccacatactaccagttgctaaaagttagtgctcaggcctgcaatcgagagcgtttgattcagttttcctgtttagatcgatgccgattcagttttgtttagtgcgagttgtatcagaagtcgtcgacgctttgcagttgcgcatgatgaggttgttcttggtcttctgcgtccgtcgtaatggatcatggatcggactaggaacgaagcaaaaaaaaatgttaatttgcgcacaaattagaccaacattgcctggcctaattaaaaaaacatgacacggtggttcacaatactaagaaccacttgcctcactattggcatgaaatcacatgcattttcttgtcatcattggcctcaactaacgaccatagcctaaccactaaaaactagacacatttatttagtttttgagaaaaaaacaagtcttacttgattggccaaatcggtgagaaacaatttcctttatcttttgtgtactcatgcgatcataattcattaagatatacaagtactagagtaatattagatagtttgtttaacatcctaaacaataatactctttgcaatcaaaagggaaagttgaaattttggacatttgcacaattttaacaaataactttcaccattaatttctaccatggtacacacatgtttaaacttattaaactacaaacatcatgatattatttttgcgatgagtatatgcataccattttaccacatgacatccaaatatttaaaaataggctggttgtatgtatctcaataaaaaatctgatattttgatggtcacaaatttaccacgtacatcccataacatcacttggttttgactgtag

SEQ ID NO: 113496 - DNA, 890 bp, Setaria italica
  Intron number 4 from transcript Si014276m (locus Si014276m .g) derived from phytozome v7.0 (chr-ID scaffold_6; pos 21 278043 to 21278932)
taagagaaaagtgtgccacccctattctgaagcaggtaatctttgttcatacgatcaaacatgactatttagtatgatgtgggctgtttgtattccattatattttcatgtaaagtaaaattgagctatataaccagcaatttgctgaaggcagaatttcaaacatgagatgaacttgaaatttgtacgaaaaagaggtattctacttagtgtggacatgggaaaagaaactgacactatttcaaccccacctgctgtttatactatcataatgccgcatgatgtcacacatttcggtcttggggattaaaatagaaatgcgtaaaactgagattcttagttaatttctagcaatctacatggaggatttaacaaagaagaataattgactccttggttaattttaacttttcaaaaacctgcgattatcacttatttagtgacatcatgatgcaatagactgatataagtgaaattcacaaaattttcacatcacaatatcacttaagcctacctcctaataaccacaatcccagatggttactataacatgagcttgatgatctatttgattctgatgcaacacactttagtagcttggaccattgattaagtttctatacatgcttaatcatattaattaggaattatcacaattgttcagcacatgcttttgagctaatagtgaggtactttttaagttcttgcactcaagcctgaacttggccttttggttaaggtaatattgtcatgcatttgcatggaaaaaagtcgcgtgacctaaactgacaaaatagcttacaaggatcaagcatacaatcacatagcagcaaatttctacagtgccatttgttattctgacatcattgctcatccctaggtcaggagtg

SEQ ID NO: 113497 - DNA, 1032 bp, Setaria italica
  Intron number 2 from transcript Si026224m (locus Si026224m .g) derived from phytozome v7.0 (chr-ID scaffold_8; pos 22 620905 to 22621936 reverse strand)
ccgtcggcctgttcggcgcctcgtacagggtccaggtgcgctcgccacgcccgcccgccgcctgcttttctagcgtgcggttctctgttagggtttgcggttcgctctgcttggtgtgtggaatgataattgaaagcattggcatggttgtgatgtccctgctcgttcgtgggcaattgtgggtgctctttacagatgttagaacttggagctccttagcagggattaaatgctagatgcatgctacattgtgttcggtagctgcttgaatcccattactgactgtagatacaccttattaagatgtgagacaggacatctgcgtcactctcactaatcactaactaaagttaagataaaatcagcacaagtttgatcctgtccaccatgtcatcttgcatctgcattgcttcagaagtttatagaacggttaaagacctcgcaaagtcttctttaagtggatcaaatatacagtatatggagtaaactaccggaagttatggttgttttgagtgcagtatgtcaaggctatcaaggagctgcaggaaacgtgacaaatatttaacaaatgctttaaaaacatgatgttccagctggtagtttgcatggattacatttctcagcatgaaaataaggtgtgggaatgaaacttccaatgcgttttatactttattgtggtttgggatgatgaagttaggcataaaacacatgtatttgagttggtaaggaatcaccaccatcttctctgtggaattggttaccaacactttgaccagaacgtaatgctaagtggcactcttgatagtgttgcatttggaaatacaatactaaacagattaggagtaatgttaaagaaacagcaaaattttcttagatatagatttttggtgtgtcacttatcttttcagttcagattcatttgccgtatatgcatggacttggaagatagtactataatgatatacatactatgcttacttgaattttctaccatattatttcttgtactgacatcaatgctactactcaagg

SEQ ID NO: 113498 - DNA, 963 bp, Setaria italica
  Intron number 1 from transcript Si021014m (locus Si021014m .g) derived from phytozome v7.0 (chr-ID scaffold_3; pos 21 68755 to 2169717)
cgccaggccctttgccgacgacgagcacccaccaggtacgccctccccttctcttcccttcctgctgtgcgaagcggagcacccccaaaccctagtacaagctatctgtattcgggtctgaccaagtagcagtatagtacctactagcttcgactttgtttgcaaaaattatcgctgggtccgcccctgggtgctcgttgtttctaggcgcaggcctcgtcatctgcgatttggccatgtgttgtgatttgagggggatggattctatgcaattgttcaatcccaattgcgtacagcgaagttagaataacttgatatgcttggtgcagctacgataagtggctcttgctagtttctctctgtatcttggataatcaattgcttccttcgagtaaattgtaccgatttccatcaacttatgtgcttagtttaggtctgtcagctatacttgttttgctgtaaatttgctgctgggttcatgaacttcatgatcaatgtagagttatagattgtagagacctatagtttctcgggccaggggcaactggattgcatctaagcatgtttatttcagtggtgatgttgttaacccttgtttgattagttcagaatagatttgatagaagatgggctggttttacaagaaaattgactcactttctgcaaagtcaaatcactgctattagcccctgttttttttaaaaaaaattcaagcagaagttttttttcccctgatatgaaagttctgccatttaagattttaatcttactgccttttgtggcttagcttggatgtttgattgtcctgctacaatttggaaacaaatattatgtgcatgcttatgcttctgttagctcttttgttatacattcgacatgatccatagtttttgaaaactttattgaattataccatgccaagtgactgttaccctgacacatcttttttgtttggttaggaaa

SEQ ID NO: 113499 - DNA, 826 bp, Setaria italica
  Intron number 2 from transcript Si032581m (locus Si032581m .g) derived from phytozome v7.0 (chr-ID scaffold_2; pos 45 748128 to 45748953)
tggtttcgcacgtttgacatccgaaacttttgcttcgcatatttgacacctaaaacataatacattcaggccatgtttagttactcccaactcccaactttgacactatgcaaaaagaagattccccatcacatcaaacttgcggtacatgcatggagtactaaatgtagatgaaattaaaaactaattgcacagttttgttgtactttgcgagacgaatcttttgagcctaattagtcaatatttggacaataattcacaaatacaaacgaaacgctacagtgtgctacagtgctgtaacagtaatttggcacctcccaaattccccaactaaacaaggcctcagtcaggattcacacaataagtttatactatgttcatgtttacacatctcaaccaaataggttgaatagttcacacatatagttcataaataaatcttagcagttaacttcatttgagctaaaataagttcagtcaacgtacatgcctcgtttaggcaagagaaaaagcaacagagataaacaccaatacatgcaagggcacatgtgtcgtttgataggccaaaatgatgaaaacaaaagaaaatagattaaaaagagaagaatgatacaaaatcaagcaacctactatttcaggtatcaaaattaccaagcaaatatttcggatgtcaaatctgcgaagccggttgtttggagtgtcaatacagcaaatttctcgatgtaaaaatacttctgaccgctgctgaaatgctaccttgacgcagccggagccggagttccggccgccaatgttggaggtcgtgcgcctggtgcagaggaccaac

SEQ ID NO: 113500 - DNA, 643 bp, Setaria italica
  Intron number 3 from transcript Si018082m (locus Si018082m .g) derived from phytozome v7.0 (chr-ID scaffold_1; pos 54 55798 to 5456440)
aggtacttgcactttcctgctcagccataggttcacggatgcatttttcccttttagtgccgactaatcctgctttgccttgtggggtaagtaggaatattacatagcctgcttcatttaccaaacaaaagtggtatggttacttgttcatacacaagacatggaaccagcacacgacatttgcagaagcaattaaattgcattttttttgttaagctttgctgcaaaccacgattcccctattcccttgcatgtgcagaactgcatctcaatgctcagttactttgattctgtagtgtatatgttcaagaaaccgtgatatagtgcagaactacactctactgcttttacgatctcttctttttcttgatttcgaaggaaatttcggatgtcatgatgatctgccatttgtgtgcttctaatagcataatacaaccattattatcaagtcactctgcttggataatcaaatacagtatttttttttagtatttgtgacatttggtatggcaatgttgaaatcccatttagtacacttcacattgtgatgcagcatatccttaggtttcagtgccgtgccttttcttatactttctcccatcatgcagcttcattttgcccagcatctctctgttgactacag

SEQ ID NO: 113501 - DNA, 634 bp, Setaria italica
  Intron number 1 from transcript Si006377m (locus Si006377m .g) derived from phytozome v7.0 (chr-ID scaffold_4; pos 31 786019 to 31786652 reverse strand)
cgttgctccggcggtgccggcgccgcctcccatcggtaggtgactggtttgaggaatcagatgaacagtcatttctgttccttttcttaattttttgggtgcatttttctgtttattgttttgatttggggggataactggtgtgagaatcttgcaaagtactccgtactagtattccctgaacagctaatggaagctgtttttgtctcgcaatttgcccgagcgaatttgctgggaaatgttatcctttttttgcccgagcgaatttgctgggaaatgttatccttttttattcgagccctgaaattcttttttgcagtctgggatcttgcatttcgttcaaattcgagagaggagagagaaatagaaccgttgcggaaaattcgctgcaagtttaattgtcatcaaacctgttcttccgtttgacggtttgggttgaaaaaaaaagcaagtggtgtttccagagcaattaatccttctgagctcagcgccgtttcgaaatacctgatcttttcaacgcccaaaaagaaagcggtaactctggagtcagttgatgctcttcctgaatttacctccctgtctgcctgttgtctctgcagtgatcatcgtggagcggcgccaccatttccaccgc

SEQ ID NO: 113502 - DNA, 866 bp, Setaria italica
  Intron number 1 from transcript Si018797m (locus Si018797m .g) derived from phytozome v7.0 (chr-ID scaffold_1; pos 62 73235 to 6274100)
ggcggccaaccaagtcggaggggaccgcgcgcacggtgagtgagtctcaggctgagacgcctccccttgctcttccgctacctcgtctcgatgcgagtcgcttaggtttccttcctgcgtgcgcgcccgtgaggcgctttgatgtgcctgggattcgaatccttgttaccagatctctgggggatattagcttccgggtttgatttaggtgcctagggttccagaaattgacttggtcgccattagtggtgtctcgggtaccaattctatgaaagtaatttgattgtttctgtcactagcttgcgcgagtatggtgacgatacaagacaaagagataatgttttgattattttcctaattatttatctattagcataggttccgagcttgaatttggttgggatgcttacatttgggggttggtacttgactgggatggcaatcgggtgaactgtcctgtgtccaacagtaggaaatgcaggtgcttatctacctatcaggttctgaaattcattgtatcagaagctacatgaggtttagagtacgtataaaatgacatcacaagattgaccgaacgagtgcatttgaatgccattatgcacggatgtagattttggtttcatgctaggaatctgatgtgtcatacatctgtagttggaactagttgtgatttatgtgtggaaactcgagaatttgccttttattaagtacggctgcaatgtgaaattgtgaactacttcagtagctttcatgagacaacacctccgagatgcatcgatctaaatatgtgcttcatatgcaggagcttgttcttcatttttacctgaacttgcctgttttcttttcttggaacaggaatcttcttc

SEQ ID NO: 113503 - DNA, 989 bp, Setaria italica
  Intron number 2 from transcript Si005112m (locus Si005112m .g) derived from phytozome v7.0 (chr-ID scaffold_5; pos 24 140352 to 24141340 reverse strand)
aattcaaaacatacctgttgcataagcttgaaaaggtatgcttatgctcgatcctcatcacctcgtcaatccttgccgaactgaaccacctaattttcacttgtaccatgacaattgcatggtgaagttctaaaaacaaagtttcatttctcagccttttgtactctgctcaatttctggatagtgctgacacccaccaaacagccaaaaacctgtttgtatattcttattctatttttaattgaatttctactttgtacctgtcgcacttcttcttgagccacaaacgtcctggtcataagtttgagtgatttgtaaaggaattaattagccatctgattcaattgtttccagtatgttcggagggatcagaactgggtattttactagcggtgccaggccacacaccatttggtgtcctttagcttgtctcagtacttcctgataaattgtttgtctgtaagacagccatttactggttcatgcataaaccaattaatttatgttagtttcttagagaactttgtgtgggtttgtagttccacttatgtaacagaatactctgaaatgagaggttttggatacaacaatcaatgtgaattgtccatcacccaagagttatgtcaatgtgaattgcctcattatgtcaactactgcctccgtcccagaatatagcaacgtttagagtttttcaaagtcaaacctttttaattttgactacgaatagcgaaataatcataaacactaataacataaaagtgatgttagtagatttagcatgaaaccaactattataatatgtaatcttttctattcgaaatcaattatttttagatttattgttggtcaaagttaaaaatgtttgactttgacaaaaaaaaatctaaacatagctatattttgggacggacggagtactcgttttgctatccaaccaaaagttatgatacatgtggtcttttcatgtttacccttttttgtttggcagg

SEQ ID NO: 113504 - DNA, 633 bp, Setaria italica
  Intron number 2 from transcript Si021706m (locus Si021706m .g) derived from phytozome v7.0 (chr-ID scaffold_3; pos 21 614391 to 21615023)
caggttcagtaaatcttatcctctggtcagtaatttatttgtttcccaaaggcaacaattgcgtgttttttgaattagttcttctattctttttaatctctccactttcataacctcatttccatgccacgtcttggctctactatgagtaaattatcatagatggccaggctgcacattttatttttagcataagccggagctttgggagagaagtttgtttgtcgcagcattgagacttgggaaattgctatttcaagcttgtaaaattgctcacatgtaaatcctttagaaaattgcaccatacatcattcagccttttgtttatctatttagatccataagtatcaagaaacattaggcccctgactttactatatgtttcacactcgattatcctagtaagtgtaagtttaacgagacattaaactggatctacttgtaaatttacatcaacatgttcactttcatagacctaattggaacaccacaagtctaagcatctttcttttggcacttggtctccattaaaaaagtgtaacttgttattttcgatgcctttttttgcaatagaaactgatctctttttattgaaaaacacataacaaagttatctgttttaggttctctgtc

SEQ ID NO: 113505 - DNA, 945 bp, Setaria italica
  Intron number 1 from transcript Si012291m (locus Si012291m .g) derived from phytozome v7.0 (chr-ID scaffold_7; pos 18 051672 to 18052616)
caataggtttgaccaagctatccaatgcggacatctcaagaaagatcatccatgttcttcccaaggataagtacgccgccatcgtcacctacttccattgcttcgaagacatgaacaacttgaagccaaccaagctcttgaacaagattattgctcatgagctatccatgaagattaccaaaagccattctcccttgagtaaagatgttggcacatcaagcaaagaagagaaggagaaggaagagaaaaatgaagataagcaagaatcttccacatcaagcaaaaaggctcaaaagcaagaatcaagttcaagctcaagctcaagtgaagcttcaagttcaagtgaagaagaagaagaaaatgatgatgaggtggaagatgaagaggatgatcaagcaagtagtagcaactcctccaacgatgaagaaatcaagcaacttgtgaaaggagtaaacaagctattcaagaagctcaattccaaaggtgtccctacagaacaattggttcgctacaacctaagaaaaaataagaatgaatgttttggttgtggtgaggaggaacactacattgagtattgtccgttgatggaaaaaagacacaagcaaagaaagaaagaaagaaaagaaaggaagaaagagaagaaggcaagcaagaagaaggccttcacaagcattgcaaatagtaggtttgatatgacaagctcaagtgatgaagaaacccaccgcaagccacgtgccttcttatcatcatcaagctcattgcacatttgccttatggcaaaaggtaagcatgatagcgatgtaagtgatgatgactcctctcctttcattaatgagcttgtggatcttgttcgaaatcaagaggtagcaataacaaatcttcttaataaaaataaggaactcaaagaaaaattggctagctcatcatccaattataaagaattga

SEQ ID NO: 113506 - DNA, 911 bp, Setaria italica
  Intron number 1 from transcript Si000245m (locus Si000245m .g) derived from phytozome v7.0 (chr-ID scaffold_5; pos 27 946173 to 27947083 reverse strand)
tcgcagactaactgggaggcggacaagatgtgaggatttagcttctccatttctcgagtgctgtctactcctcctccttcccttgcccgtttgattcgcgccgtgttttgcgggcgcgtacttttgtctggctgctgccgcgttgtgcggggacgatatttttgtgctagaatcgcggggcaggttcctggttgtgtcccgtatggcgttcgaggggacgcggaccagctagggtttcgggagacctccattacagctttgttttcctttgtcactgcgtgcccctgcagttttggctcgggggatgagtgtttcggattctatacatgagtgctcatttccggtgttggttttggaagagcaggataaccgatttggggatttgaaccagggggtcggggggttggcagatttagtgctctcggatttcaagagaaatgtcgtgattttagccttagattgtgaatgttcagtggttttgtttgagctatcaggggggcaatttccttttcctagtctggggtcatatctctgacctattcataactattttgtggaaagtggacagggctaaggatgtcttattaattgaatcaataggttgttgccagtaatatgaactgtgattagccgaacaacaatgcttaggatcattttagctaatgatttacaaaaagataaaagtcgaggaaacaaaactagtagcataactgtattgttgaagatatactttttcccgattctctctgtaatgctatgtattcatttcgtctctttttgttaagtttattagctatctatttatgttctgtttgaacatcggtatatatttgtggctgaatagttgtatgatgaatatttcctttaaccgctccattctgattatttaattacttaatgaaacaggctgg

SEQ ID NO: 113507 - DNA, 740 bp, Setaria italica
  Intron number 1 from transcript Si035255m (locus Si035123m .g) derived from phytozome v7.0 (chr-ID scaffold_9; pos 53 100417 to 53101156 reverse strand)
gaggaggtatgacccctgatgccccataatgtgtaggtatttgtttccatcaacatttctcgtttttatgctgtatagaccagcttaggtagtatggtattggttttatttgactcagattagatgcattacattacgggttccatagtgtttgatgaataggcctttcttctggtttgttgttagcattttctactatccttaagctatatcagagagagaaaactagtattcataatcaatttatttcttaatgcaagggtttggaaattttagagtgagggaagtgaacattatgtgaggcatctgttcctctgatcatttcttaaacttgccgagaggctatgaaaaaagagtacggtgaaaaatattttttgatgcatacgtggtcacttcaacacatggtgttatttgttaactttattttgtcccgagccttttagcaacttgtttttgatcctttgcacactttatcgatgatacctcagtgatggactgatggttttactcgattgtgctttgcaaatcctcatattgattgattagtcaaggggttcaatgtagcacaattgatgggtgcaggctttatctaaagtggctggcagtattatgaaatatgattcttctgtctgcttctatcttgtataggtcgagggacaatccgaggaagttatatttgatcatctccatgcaactgcattccagtatacatcccttggcagaccaatcttgggttcggc

SEQ ID NO: 113508 - DNA, 924 bp, Setaria italica
  Intron number 1 from transcript Si030622m (locus Si030622m .g) derived from phytozome v7.0 (chr-ID scaffold_2; pos 35 558518 to 35559441)
ttctccgttcgatttggtgaatcggaagaccaaaggtataaatcgattctctctagctgttgcgattaatttccgctatatctttaatcctatgctccgtgaaaggaatgtctgtgtttcctcgtcgttaagggttaaattaaagcatagattcatctcctgtttagatgcttccatttcaaccttagggtttaggggtttatgtgtagtaggatatctatacggcattttcagttagctggttagctgatggtgtgcctttgtggcgagtcttggtttgggccattgtctacgagtttgattgaagggtcaggaagttgctgtattgcttgatatgtttgggatttgggtagactgttttcgttttagcacattcgactcctgagaagttcaaaaggtagcatggattgaatcctctaagtaagcataagagcgaaagaaaaatgttaagagtttgcacttatttttagcaaagtcttcgtgaacttgttagaactagtaattcattatagtaacatagagagcttcgattttgttgtttcttccaaattaagtggtaaattgctaaattttggtgtcattggcagccgagtccttggtgcttgctatatcttgtgtatttatttgttttcttagccaatacatatatgtttcctagaagtcatctaaagctgcactgaagttttatttttaaccttcttcaattgtcgctactgataattgtcactgaagctgcactgaaatttaattttaaccttcttcaattgtccctgaagcatgtcacacgcctgccttgttatctatatttctattcgacccggcgtcttattgtatctgtagaaatgatctcatgttccactaataattaatatggattccccatttatgcattctttcagttgcacttggtactacctgaaggga

SEQ ID NO: 113509 - DNA, 1015 bp, Setaria italica
  Intron number 1 from transcript Si014065m (locus Si014065m .g) derived from phytozome v7.0 (chr-ID scaffold_6; pos 31 722996 to 31724010)
aagtccctccccttccgcatcggcctctggaactggtccgtcatccctcccgcttcccctccccttgtctctccctgcagatttgttactgcttgctaggaaattctctgctttgttacctggtgccatgtcgtccaggatgcaaaagcttgcaactttgcgttgctgctctgcgattcgtttcaatcgtttccatcgtatttgacacggagtttagtttttcattggagtaatctgacatggaattccctgtgcttgtgaaatctggttggccattgttttcattaatctgaagttcagatattaccggtattgcagagtgagtggacgaatagcaaattacttgaatttctttcatttggcatattagagttccgaatgaagtgagctattaaatcatgttatagttttgaaatttatttatggtgggactgaactttcatcagattatggtcctttctttgaggttggaaaatattcagaactttggctgtttggcagcacagcatcatgtctgaatttggtttgtctgacagcggtttcagtgtaatagtatttcagtttgctacgttgttcattagttttggatgtatctgcttaaatattatacttccaaccgaaactatatttggcctccttttagttatagttggatacctttcctcaccaacttatgtgtagccaggatttttcttaaccagatttggtctgtcagaaaagtagagactttgcttggaaccaaagatatttcagacaaagtttcactttctggaacatccgctttcagtggtattttctgctgttggtatgaaaatcattgatcaaggtgtatgcttccttaaatttatatgaagaagttgaagtcgtcatccacattgacataattgaaattttcaagaattctttgtagcatttgtgaaagggaaaattgatgtcattttgtgaggaactaataatgtttctgctaatgcaatgtgaaggtacctatctgtggagagaaacaacaagcaaactt

SEQ ID NO: 113510 - DNA, 726 bp, Setaria italica
  Intron number 2 from transcript Si025219m (locus Si025219m .g) derived from phytozome v7.0 (chr-ID scaffold_3; pos 29 924964 to 29925689)
gagcgtttgtagtctttagtgtatcattgttgtcttgtttcaaaattctagcatttttctttttatggaactagtgaatgatatgaatgttgactggtgtaattttcatgtcactctaattttacaataattctatttctttaaccaataatttatttatgtcatgtttattgcaaggactaaatattataaacacatttactctattttctccctacctaatattgatcaagttgtttatctaatacgaagccctatgtccatttttcacgtaacacgatgcagacggaccggcaatggatgtacaatgcgggcagacagatcaaggagttctttgatggcttgcattattttctcgaagtggccaaagccaacaagctagaaaagggattcatatgttgtccatgcttccaatgcagtaacaagaaggactactcttcctagcggactcttcacagccacttgtttagttacagtttcatgcctaactatttgatttggaccaagcatggtgaaataggagttataatagaagatggtgaagaagaaggggatgataacaacatttcagaatgggctgtaggccaagcctttgcagatactacaatgggcgaggctgacgaagaagggtttggagaagatggccgtattgatgatcttggtcaggtgctacgggatgcgcagaaatactgtgaaactgagaaggaatcaaaaaagttgcagcgt

SEQ ID NO: 113511 - DNA, 1047 bp, Setaria italica
  Intron number 2 from transcript Si037337m (locus Si037337m .g) derived from phytozome v7.0 (chr-ID scaffold_9; pos 51 176891 to 51177937 reverse strand)
tggaggcgtatccctcgccctgcctctacacgcaggtgattggacaagcaaactctccttccgctgatactgtagtgctcgttgtggaattactccctcttgagtcttgaggtccaataagatgaaagattgatcaggtgtagctctgatgtcctaacagttgagtgcttaaagtgtggggtatactctaccttgaagtgtcttggaccatggtctaggatccaggagtgtttttagctgtaagcttcttggtggtagaggcctagtggggtaggctgtacattccattgtgagatgcacttactgagagatccctttgttcttggaattacagaaacgttcggcttctattttgattgatgttttgagaatacctcacagcttctagagaacggtgagctttgattgacagatcatagaatagttgtatgggttattgagtgtaggacttctgtcacatgatgcgccgttgttcttttcctgactattgcagttgagctgtggtgaaaattgcagctggaacaacttctggcgtttatagctttgcatagattggtgatttgcttggttttcttgggcgtttgtgatcaattgttcacagtggatactcacaatgttcgaaattgcttgtagctcatgcatttccacagatgaacagagtttctctctatgtatatgaggggtggttttgtctcatttggagataggtttcttcattgctactcaccaataaatcaccagttaccagatgatgctatagagttcttgaacaaagcaagccctcatttgcatacaaatatatggtactcttgccgtgttggttaaaatttgtgaatgagaaccctattgaactatatcatagctgcatatcctgatcctgacaagagtagatcccattttggtgtttaataggtgtgcagtgaattaatgtgtctgtttctctctgttgttttatttttaatataatattctctggtataaatgtctgacgtttggtctatgtaatttgaagattgaggcagaagttggcacagacgaggaggctgg

SEQ ID NO: 113512 - DNA, 762 bp, Setaria italica
  Intron number 1 from transcript Si028196m (locus Si028196m .g) derived from phytozome v7.0 (chr-ID scaffold_8; pos 89 42509 to 8943270 reverse strand)
gtggagattcccagctggtaaggttcttgtttttgcctccttagaaaagatttgaaaagttatttgaacatttctaccttcatgggaaattttgattagctaaatttgtttttcaatccgcttttggcacagcctaaatttacgagcattattttacgaattaaggatgcaattttataaattattatatggaagtacgttgcaagctctatactaaaagcaatttgaactagttgcatgaatttttggaaatactaaggcatatgaccagcttttttgtctaaaacagggcacaattatttaatccctatcttttataatattatattatccattaatttgtgttctcttacaaaatatttttgtgaattaaattaactgagcttatgcaagcgagataaattaatgtacacttctagccaatattattactcgtaacaattaaattattgttacaccgattatacttaaaaaactattagcggtacttatttttttacacccattataataggttaaacgccatagaagaaccactattgcgtaacacatataaagaactgcaagtgatcacttgtttactgatgaggttctgatcggaacattattactgcattgccacatgttaatcttcgatgtgttttgacttttgaccaagttacacttaaacccagcacatagaggtcgccgttctgtaaataaagtatttcccaacttgttaccgcaggcattctacggtgtgttcgacggccacggcggccg

SEQ ID NO: 113513 - DNA, 850 bp, Setaria italica
  Intron number 2 from transcript Si011120m (locus Si011120m .g) derived from phytozome v7.0 (chr-ID scaffold_7; pos 16 720641 to 16721490 reverse strand)
cgctaaccttgccatcgtcgccgggtgctacggaggtgaggtctctgttcttgcaaagtttgcgacttataccgaatctactttgttgttttttcggttatggtgtgaataaagataagttgtttgtcattgtaatctagtcagtggatgcttgtagtagaatttcttcacaaacttgatgcttccttgtgtgggaggggataactggggaaaattttcacttgtacttcaacatcccttgaagaagttggggcagctatggttaagacagaactgaagacgttcactgacatttacaaatcctgcgggctgctggatgttagttgtggggactttggcagatctagattagtgtaagttgactgctgtgcatctgctcaaaatgacagaaggggatagctggtaacatgttaaatctatgaggtacctatagttttttatgttctacataatggtttatggtttggcttacacaggcttacctcaggctacgttttatgtacggcatccagtcttgtcacaggaacaacctttcatctattagtatttcttgtcatcacaggggagttaagcatgtctgtcttgttgatgaagagtgttaaagccgaaaacaaaggaacaagagatttaacttttaagacgtagatgcttttatattgtgggttcaaatttcaggaaaaggaagtgaacatgtagctaacagcgaatccacttttgaaatgttgttatctaatacgaagtgatcaagataatagagcattttgcagttgcattttcgtgtgtagatatgacatgtttcagtaaaacatatattattgttgccttccaggggcacgtgaactcgcaagag

SEQ ID NO: 113514 - DNA, 842 bp, Setaria italica
  Intron number 2 from transcript Si001984m (locus Si001984m .g) derived from phytozome v7.0 (chr-ID scaffold_5; pos 36 956134 to 36956975)
gactcggcaaaaggtatctggaatttccttgttctgctatcctttctgtccaacttttttttttactatgttgttttaggctagtaactacttattccgcccttgaacatcgagctaaccaattagggtattcactttatgtttctttaattttgaaaatgaaatttccatctaggccctgcatgttctcttgcatttgaaacagaggctttagaatggcctacctcaaaatgaaaaaaaaaatcctcttcttattaccaagcttatcctcttctagctgtaacagttgattgtagttttaattaatgggtttgtctgacttgtttgattggtttgttttcctaactactttcagtttgtgatggccatttaagttattattatttttattactaactgtaagaccctatttagttcagcttgcattttccaactcgtttgattctgaaatacggagacaataaaatttagaaatattcactaaaagatttttaggtaaagtaatgttgacctgcaagcatgtctcagctaaggtcctcatgatgcaaatatagctatataatatcaatcaactgacagttatattctttagtttctatatgttttgaaacttgaaagccatgaccagagttccttgctatatgtcatatttttacatcagcatatgggttattgggttatgggatttctgttaaaattatgatataaattaataaatcttgctaaatcagtgcttgacatttgtttctctttgagctatgagctcagctgccatatccttaatgatatatgcctaatctcttgcagatattccattttttgattggcctatcaaacatagg

SEQ ID NO: 113515 - DNA, 307 bp, Setaria italica
  Intron number 2 from transcript Si002998m (locus Si002998m .g) derived from phytozome v7.0 (chr-ID scaffold_5; pos 45 379696 to 45380002 reverse strand)
cagttcgtcaccaaagtgtatgcaggttaaccccctctgtttttattgatgactttttattctcgttacacaatgctcctacatatatgtgttgttatgttttctctgatcatgaacaactagcactgacagattccttacatccatttcttcagccttttgatttagtgattattatcttgccattttgttacatgtctccccttgtgttcctaagttctgctgccctctcttagttttttttttcagttcagctctgacttctcctccaacctatcttgaaggcaccctaacatcagtagccaaa

SEQ ID NO: 113516 - DNA, 954 bp, Setaria italica
  Intron number 1 from transcript Si023980m (locus Si023980m .g) derived from phytozome v7.0 (chr-ID scaffold_3; pos 38 502085 to 38503038 reverse strand)
gtcttcaactgtcgttcggtcgaccgggccctccggtatgtgcataataaaaaaattccttagatattcttcttgcaaattttatgaactgtcaaataattaaactgcacatataactctgtaaaaatcctgtgacacaggtgacagccctgtgtgccgtgttatcccggtatctttaagtagtttgtcttttctttctgaactgtagggttgactggacagactttgtaaagtaatgaaattcgggtttgaaccttagtggaaaaaaagataaccccaaaaacaaacactaaaccactctatccgctatctatcctactcacaaatgctgtatatgcatgagtttacaacggtgagtgtgcatgcatggagcgttttgcatcagtattgtatttttttttttaaaaaaagaaaccattcgcagaagtaatttgtagttacgaagttcgtgtttttttccggatgaagttcatgtattttattggcagtgggccagattacactaacactttctacatcaactgttaggaatatctgaaatttgcatcccctttgagttttggtaacgtgtgccacacgcgtggttctgcctttcgtatacaaatattagactccattggaatatctatatatggtagattagaattgactgtaatcctcacttaccttgtctctaagggagactccttgcccctaagtagtgtactcatatataatccggttacgagagactcagtagtagggtagaaccaattacaccaattccattctcgtacaacaaatattatttgttttttaggtctacaattaaccattggaatcatcccaacttgtactcgagacgtacaatgcttccaaataaatattttgtgaattgtaatgtaaagactgaaaattgtaatttaacagtctcatctaacacattatacccatcactgcagggtgcaggccctc

SEQ ID NO: 113517 - DNA, 951 bp, Setaria italica
  Intron number 2 from transcript Si004058m (locus Si004058m .g) derived from phytozome v7.0 (chr-ID scaffold_5; pos 47 197760 to 47198710)
ggctgcagaggaaggcaggtactcagatttcatcggtactagatgtcgctacttcgacctttggaaggtcaggccttcctctacaacttgcccttttcttctattcttctcctgctcattacctagccttggtatttgagtccgacctcctcttttcaggtcgttatttgcattagagcccatacaagagggggactgtatattggaagtaccttatggtgttgtaagttccttaacagttccactatcctaaggatatcttcctatgctagaacctcttttttgaataactctttttttttcctcacactatgcagcaacttactcaagataaacttccccaagaagtttgtatgctactcgataaccttgttggagatacagcaaagattgctgtgctcctcatactggagcaacacctgggacatgtatttccgatgcattattttttttacataaatggaaattgcaaaggaaaacgtaccatcttatgctcctttatccttctaggcatcaggatgggagccatatatcaaatctcttccatgcaaggatcagatgcataacatggtatgtgtatgctttacaaattctgcgcactgctattgtaaaggttttactacattttgagggagaaaaatgatattctaggttgcactgtgtaactattgacattgtaacataagtgtgctcggactaattttactctatgttttcttgttgatttgtaaaactataggtcctgctgacttttttgtaacactattagaggctaacttgaatacataaagtgtacatggaaagaataaatacttcctattatacacatatacttcctattatacacatatacttcctaatacttacggttcagatccttgttaggttttgggacaatatagtgacagttttatcgttacatatactatttgtgtttcttgtttgttccag

SEQ ID NO: 113518 - DNA, 888 bp, Setaria italica
  Intron number 2 from transcript Si016795m (locus Si016795m .g) derived from phytozome v7.0 (chr-ID scaffold_1; pos 85 19927 to 8520814)
aattgctcagcaaggttgacaaaacaggcactgaggtatagaacatcccaacttgggacctctagttttattcactttctgtttctagtcttcagtagtcagtttatgcgcggcatatatgtccagtgaaagatttgtagaaacttgatctgcttgaatcatattgcctgcacaaatgactagtggttcacacttcgcaccactagaccatggcattacatttagcgtgctgtgtataattaatctgcttgtctattgcatcagtcattagcaaaaactgaaatggtactgttaggtggtgtttcacctaagtgtgtctagcttaaagtggataagctttttttttcttttctgtgaagttaatcaacttcttactttttcgcagcttctgtgaaacgtatgttgttcacatgtttacttttaagattgcctgcgctttagtatgttttcccttgattttaagttggagagatcttactgtttatgagatgtcggctcctgcttgaccgcagaggttctcaaagtagcaatgaattgaaatgtttcaaggaagtgttgagtgttgacaccagattattctacctctattgctttgctttgctggaagtatctgaagcttactccagaattctgagctttgagaactgcctgcaatcttctataagcctagaagtttcttactgcaagtagtaaatttagttttctacaaattttggctacttaggagttggtgtatgttggttagcttttgttcacgatttcctataaatattttttaatactatacttgagaaactatgtaaaaatttcttattgttctgaagtttgattggacattatctttgtggcgagtttaacagtcagatacccatttcccccaggaaaatc

SEQ ID NO: 113519 - DNA, 836 bp, Setaria italica
  Intron number 5 from transcript Si035267m (locus Si035267m .g) derived from phytozome v7.0 (chr-ID scaffold_9; pos 51 087273 to 51088108)
acttctattcttatagaaagcaggtaaagcttcctatttgtataagcttaccttttgcacaagtctactatacccaaaaccctatgcaattgggaaagaaaagggagatttgttgctaacatgacccttgtagctccttttagctttctaatttgaacggtcagtaaaaagacgaactgtctaatcttgaatatatatttactgatctctacacattccactaaaacaatagcatggttgccagagtctactttaaaacttaaagtgttaactcttttgtactgggctttggttctgtattctctccatgatgatcatgcctttgtgataaaagtattactttaattatgaccaaaattggcatagtaagcttcttactataaaggaggaaatcagatgcagaactcaaagtaaatgtgttggaatatttataggtgacgtatgatgtgcatgtaacgcttgctttcttttccttataaagtttgtgtagattattatttttctttatgctttatgcattgtaaaaatcaatgaaatttgaatgaatggccaatgtaaaatgtctaattgatgaactggactgctgggtgcaatttgtaaaacattcagaagttactctccatgtattgtttagtaaactgcaacatcttaatttactttcgcttttacatgctaaatatctcctacaaaccgtagcaaatttccttgtttgacctagttcatgtttactaccagagctcacccaaaaattactgtatcatttggaaataattagcttgttggtttctattgtttcttcagattgaagcacgtggtctccctcttactccggaggt

SEQ ID NO: 113520 - DNA, 496 bp, Setaria italica
  Intron number 2 from transcript Si012173m (locus Si012173m .g) derived from phytozome v7.0 (chr-ID scaffold_7; pos 34 212985 to 34213480)
aagataagaaagatgtaatgttttgaatattcactttgttctctccttaaagcatagaccccctagcaactgatgagaatataacccgtaaactatatagcaaacaaacatacatatagtacaacatgaaaaacacaaactaaggtttttttaaaacaagaaatgtaataactcatatgagcatcacgaaattgcaatagctaaactgtgcatgataaaaggcagggtaaataaggtgaacactccccaacaaggcacccaatatttcctaaaaaaattgacttattctcagcatagccatttttatgatagatatgaaacaggaagtacaggagattttggaaaaattctagaaaagcaatatggacttaccataatacgcgatgaatttactatatttaatcttctgttataatactatgtgcgactaattacattatttgcatattaacatgtaacaggggttaccaagtttgcctgagaacgagattgaatt

SEQ ID NO: 113521 - DNA, 903 bp, Setaria italica
  Intron number 3 from transcript Si016108m (locus Si016108m .g) derived from phytozome v7.0 (chr-ID scaffold_1; pos 23 770131 to 23771033 reverse strand)
gtgttctccagactataaatccacacacgggcgaggtccgcacattcttcttattgtttttgttcagattttaagttgttgccccatttggcctttgcattttgagtttataaaattatagcctagtatagcattacgagagggcaacatttatagtggcattgctttgaaaaacccaggataacaaattgctgaacaactcttaatgaaacagcaacatattttcatgtgtactgtctaacttgctttgtttgtggtagcttggaagtagctgaattttctcatgacactaaatttatctccaaaaggaatctattgcatcaatttctgttcccagtctcatgaaaataacgtcagtcatgaaagatatgtatggcatcatgctagtgcccccatatgctttgtatatagtacagttgctgctagcatgcgcgcgcatagtgttatgcaatgtgtttgatttcagaagataatgaaatactcttttactcccatcttattgatacatataaaaggtattcaattgatggaataatgaaaatatcttgtgaatcatgtaaggtactagtaaactgaaaggacacataatctcttccattcctttgtgtttgtgtctcttgtctttgcaaaaggttttctacccagcacacttctcagccttgatatctttgtattaagactgccgtaatgtgtttgtacatgaaatacatgtcttcaggcaatggaattttgacacctgttatttggtacttttgttgattttaagttttatgcaaggaactgcatatgtttctcactaacagggaactagtgtttcctacttcggggtcaaataagtttatttattgacatattggctttaattggttatatcttagtacagaaggtctgtctcagctacag

SEQ ID NO: 113522 - DNA, 740 bp, Setaria italica
  Intron number 2 from transcript Si030172m (locus Si030172m .g) derived from phytozome v7.0 (chr-ID scaffold_2; pos 24 85829 to 2486568 reverse strand)
gctcggacggtttcctcaacggttcttcgcttaaggtacttggatgggttggttgcgtgctgactgctgaggctaaaatttgttgtcatttttggggtgtctgttggggaatctcgtggctggcactgtagaacactactgtagttcagagaggcgaaatttctaaattctgttcctactggagggcggtagcagtactagtacgacttgaagtaaaatgcatgtcaggatgtccttctttggttgctagagacatatgttgtttgctcgaatttttgttggattttgttcagcgatagtgttatttagaatcacaaatcacaaccagtacccagtagctaagcaaggcgctgaagagtttaaatggagggtgtattttagttgttttctgcccctgccaactaatagatgaagtggctgatgcctactattttctcgcacaagcgtactaattgttcagatcattttaggaaaggggtgttgagtacttgagtttgggcgtaactcagggcagaaaccactgcattttctcctaaagcaggactaggaacatagtaatttccagggaatgtgtgcaggatgaacattataggtacacatattcctgcttgagtaggtagcggatggtgaaattcctgcattttcggcttttcctacttgatgctatatgatatcagccttacatgatttgattgttatatttagggtaacaataatctaaactttcggagcaaaccgtg

SEQ ID NO: 113523 - DNA, 338 bp, Setaria italica
  Intron number 2 from transcript Si009305m (locus Si009305m .g) derived from phytozome v7.0 (chr-ID scaffold_7; pos 35 921652 to 35921989)
gatctcagtcaaggtgctgctgcattcctataaaggtatgtttctgcaactagctaactatgttcctgcactgtactcaactggtgttatgagcaataccttgcttagttgctaggatagtgtcattcttttggttgtgaagttatggttctctaaccaaattgaaggaatgctgcattaaattagttcttgctttggcataatctgaaatgtgctattatgtgtgatgacagtttgattttcctcactcttctttgttagacactacaagtacccttggttgttctaactttcaagaaatagccagttgtgcatatataaacgagaagagggcacgc

SEQ ID NO: 113524 - DNA, 702 bp, Setaria italica
  Intron number 4 from transcript Si013112m (locus Si013112m .g) derived from phytozome v7.0 (chr-ID scaffold_6; pos 75 28849 to 7529550)
cattgagcttgctaaattttccagaagagttacaggtcagccttcatacccatgttccttataggctgtttggatttatttgatagagggttgtgattgggattgggataaggatatgttaatggggtagttttaatcctcaattgaaaaagatgaagggttaggattagcctaccctcgtatcctgatcccttatgccatctatgtatccccaaatcaaaatacccttctgttggttcagtaaatttcaaaaagtcattttatctttatgataatttacttcactgttagcttaacaagttcagttgcgtattctaggggtagctttagttttcggattgtcacatttttgtttatttttctactgcatgccctttctattctattgaatataaaatttcactgaactggtaacatagacaaaacctcacaattttcatgtcatatatactaagtatgcgtttaagtctataagatgtgtttatcaaggaaccttcgaaaaaagatttgaagatttccaataataaactctttgcaatcacttgctaacatatttcttgtacttaaatttatccaaatttaacgtaattgctgtaaatctcgtgtgtgttcagaagagttatgcaatttacactattcatgaccttcctattcttttgaccttcagataaccaaacgggccagtcatttttatcctacata

SEQ ID NO: 113525 - DNA, 391 bp, Setaria italica
  Intron number 2 from transcript Si016543m (locus Si016543m .g) derived from phytozome v7.0 (chr-ID scaffold_1; pos 29 560135 to 29560525 reverse strand)
ttcaacctgcagtatgtttatataaattggtcatatgctgtcttttttctgttgaccattttaccccatcatagagtccatctagcactgtttaacatgtacattgaaaatatttagtaatgatatgcattgagtttttgtatttacccgataatctcttctaagttattgctggtaaactgtggcatttgccaattagaaaactgatccttattacctgcttgaattgcatggaattatacgctagtcttaagtcaatactaatgtgccgcaaagaaatattatctcatgctcgtccaataattaagtcaagtgctagccttagttggatattgcttgtgtattttgcaggacattactttgatagtgcttgtgtgttttgcaggacgct

SEQ ID NO: 113526 - DNA, 953 bp, Setaria italica
  Intron number 1 from transcript Si026752m (locus Si026752m .g) derived from phytozome v7.0 (chr-ID scaffold_8; pos 32 603070 to 32604022 reverse strand)
cgcctggctggggatcaagatccgccgaggccgaggtacccgagccgcaaagatcgtttcttgtcttgatctgaatttgggtgggcgtgggggaccaaagcttggttcggttctttgtgcgggcatggctcagtgggtacggagcaggaagggtagtagaaactgggttagtttcagatggattcattgcgaaagctggtgctttgatatgggtgttggattggttgcgcggttcttagtttagctgctgcggaaggagagaaagacgatggtttcttgaggagggttttagggagaaggggtctgtttggtgtgttacagggttgctttggtatgctttgaagtgtctgtattggattctttgtgtggattgaattcggataaagttagtaggattggattggcttcagcttggtgatggattgcatgagcagctcatggtttttggttgttgctgcaaaagaaagagtagattgattgatttatcttctactgtcctgaggattctttctgttgttggatcggtaaagttggccgtatttgataggttattggagcaattggtagtaatacaatactagcaattagcgattgagttcttgatgcagtttcagatggatttttgtgctgtcggtctgatcctttgtcccaagcccacacataaactttatttcttgatgtggttatgtgcggctcatataattatttgagacatacagtgcttttggttcatatttcttttcttagggggttaaaagtttagttctttgtggtattgtgagcaattgataatgccgtggtatagcttctcatcaaaccccagagtttttaagtggattgaatttggtgctctgatagcttgcagcctgtattcgctggcctttttattgcacttagtttcatctttttagtgcttaaatatccatttatgatgcaggaacattaatctggga

SEQ ID NO: 113527 - DNA, 756 bp, Setaria italica
  Intron number 2 from transcript Si005674m (locus Si005674m .g) derived from phytozome v7.0 (chr-ID scaffold_4; pos 13 051834 to 13052589 reverse strand)
tttcgaacattcttagaagttgtcaggtaatttaataattcaactttgtcaactaggtcagtgccttgtggtagagcatgaatgttcattcatttattgctgctttattttctcactgttggttgtgttgtaaagaaatccaacaaaatgtattccaataaaatctatacttgttcttctttgaacatgatttctgcaacttcacaatgaatatgatttccttttggtcttttgtccgtgtttatttttaaacttagaagtgtgtactgaggcctgaatttcaaagtccttattgctaaataaatggctgtagtattttcagtccagtagcatttcaaaatcctcaaaagatatactgcttaacaacatatgtattaagtatgtaggttagcagccttgatatccataactgatgatctttttgaacactttagctggccaaagaggttgcagtaatattgatctagagctggaacataatttctcgtggttccatataattttactagtatcatacttttttgtgaaacttggttaacaaacggttggaatattgttctgtgcctaagcagaaactcaaaggtttatttccttgcatatgattaaatattattgtgaacaatgccagataactttcttcatgcaacatttctgttagccctgtcattcttgatagaagtgcatacaccacatattaggttatattttattttcccttgtttgacttcagttttcttatgtgatgcagtgacagtc

SEQ ID NO: 113528 - DNA, 758 bp, Setaria italica
  Intron number 2 from transcript Si001166m (locus Si001166m .g) derived from phytozome v7.0 (chr-ID scaffold_5; pos 38 223172 to 38223929)
ttcgttggtctgcaaggttggttccttttcgctgctcaatgcctcatgctgattgcacatttgcccaagtgaagtctggctgatggtttcctttgctcaagagctcctgaattatcaaaacatgatttattgcaatctagtctaattggaatgttttgcactttgctcattcctttttttagaataataggccattgcctggcccataattaatttaaatgaaactattcaaaccattttacagcgcataatgatgttcacagtgagattggtcacctccagtaatccaactcataaattgaaggcggtcaagctcttacatagatcaggaagtagcaattgttaactattttataaaattttggtggatgttctgctttcttgaatatagcagaggtagtcaatcgataccataagttcttatatctcttgataaaattgagttatttccttgaagacacatctagaagcctaaggtgttagatgtacatatgtgctgttttaaatctgaaaaatcaagaagatggatgctttgatatgaggttcaatgctatagcatcaagtatcttcattttggctgaattggttgcacagaaaaaacataccttatgccgtaggcctttctatggcatatgcaaagatgggacaaatcctaaatttaatcacgttgagtcaatatatgtcgttatcccttgcatgctcaccattcttctcacaagatggcgttgttttcgtgcaggttctggtaaaactaccac

SEQ ID NO: 113529 - DNA, 781 bp, Setaria italica
  Intron number 2 from transcript Si036900m (locus Si036900m .g) derived from phytozome v7.0 (chr-ID scaffold_9; pos 58 031835 to 58032615 reverse strand)
ccaaccactgaatctaggtaaatattaactcacatctttctttccttgttcctaccatgttgaaatttatctcttccattttgtttctgcctctacggttgttgacatctctgccttgtgtattgtcggattgtaatgaatgatttttgttgttacagttgaaaatcgcaaaaatagagtaaagtgaaatcatttttctcttttttgattgaattgtattgatgaaaatatttaaatacgaaaatgaattgttttcatgatgctagccctggtgataagtggaagcttctgagtaaaaaacgaagaaacaatttgctctatatgtatgcctttggttgttgtgttgtcattggaggttgcctttctagttctaggccaatagcatagcatgaacactatacaagcatttccgtgagtacacaatgtttgtttccacatgcttgtattttctcacttttggctggaagcatgaaagttttgttccacgtttacagagctgttatatcattgagagtcatgtggttcatatggctttttatttgtatcattattgttaaaaaatggctggttgctgcgagtgttactaaaagctggcaatttactgtcaatggtgatgccaatgtaatagaaaattagaaacaaattcattctttgattaatttggttcccacttgggagaactcaattccctgtatattatatagtgaaaataaactgaaccataccttttctgtatgatcctgcaggttccactcaattgcatatctccagcaaatctggt

SEQ ID NO: 113530 - DNA, 883 bp, Setaria italica
  Intron number 1 from transcript Si026905m (locus Si026905m .g) derived from phytozome v7.0 (chr-ID scaffold_8; pos 29 645648 to 29646530 reverse strand)
aggtgagctttttctttagagtaaattctcatttcttaattaaatgttggcgggttttgctgcttgataaaactaagcatagaattatcgattgtgcattaatgagctgtgggtatgagtacttttacgccatctttgctgtatgttttcttcagtcattgtttatgtgaatatgcaaggatggcattgttcaatgcaatttatgacttgcaacagaaatccgctcttttaatactatactgcatatagaatatttaccttttaacacaaaaggcttgtatttattttaaaatttagcagtatacttccgatcatgaatataaagctatctgatttaatttattttgaccaccactgtctaaattatcccaagtcaaacctttttttattttgaccaccaatgtctaaattattatgtagattgacaactccatattgcattattaaattcattatgaaaactaccataatatttgacctttttcatttatgtactatattttcatagatattgctagtcaaataagtggaagtattagtaacagaaatatgatggaaactttctgatttatggttcacaaatcaaaatagatttactgattcttaaattatatttctttctttgaatttttggaagcctgtgaaatttgtgtaggacttggattgcaatatcgaactttgttgaaaactggcatagttttgttagaaagtttcagttgcaggtctgtaccaataaaaaacattcaaagtccccttacttttagtagaaaaatgttgagatactctacatgtatctaaattgagctcatgtttcttttctccctgtgtgtatgcacttgattagtcatctattttggattgacattttgtaaccaatgcaggt

SEQ ID NO: 113531 - DNA, 635 bp, Setaria italica
  Intron number 1 from transcript Si019289m (locus Si019289m .g) derived from phytozome v7.0 (chr-ID scaffold_1; pos 77 65077 to 7765711)
gctggtcattacaggtctgtgtacttactttgctatttcctgctttctgtagttagagattatatggttaaaatggtgtacacatgcagacacaaaactacaaaaccatcattagaaatgtatttctgttttatgttctccgttttgcacccttctttcttcagcataaaactatgtccaatttatgattgttatacggctacatatttttctatatgcatcttttgcagttcagagagactgcacggcttatatttcagtcttttgattcctttcatcctctcatgattactgggaccatttggttttaaaatttatatcgctactattacatgttgctcctgattgatcgcattatacagaatgagatgtgaattatgagcaaactggacagctgatgaacttgactcaatcaacagcacagcttgttttcagcacttgatcaaatattaagcatgcccctgaaaatcagtataagtaacacaaacacctctgtagaacatttcttagaacaacaacactacagctataacaaactgtaccttcttttcatttgtttgtttagcactgtctctgatatacattatatcattgttcaatgtagggatcccaggttcagacaccgacgttcacac

SEQ ID NO: 113532 - DNA, 612 bp, Setaria italica
  Intron number 2 from transcript Si016062m (locus Si016062m .g) derived from phytozome v7.0 (chr-ID scaffold_1; pos 10 370125 to 10370736)
cggagcaatcatctattccccaagaaacaaacaaggtatgcctgaaaaaacagaacttatttacttttaatcttatccacagttaatgggttcaactgcacccctttcagatatgcaatatggcctaactattttgatgtttgggtacttacatgttagtttgttaagaacatgaaattgaaacacatgtatgtcatagattgtgtcttgtgagctatgcagataccttcactgtttaagatgattgctcttgatactagccaccaacactttagtaacactgggcagctagttttaacttgatgtgtttgtgtgcattttactgcaacgtatggtcccttgcacagttgctttttgcctacctcgctgtctcatctagtcatctatcatagcatcttctctcccaaacagtccaaagaataattgtctatgaccctcaggaaccctacatcttttctagcacttggattacacggggaatctagagccatgttagacactggactcggattttcattagattctgatattaactcattgctttccttattgaaatacacaatattgctctttgcagtttaaggaaagtccatttcagaatcttcagagatt

SEQ ID NO: 113533 - DNA, 734 bp, Setaria italica
  Intron number 3 from transcript Si037567m (locus Si037567m .g) derived from phytozome v7.0 (chr-ID scaffold_9; pos 43 728949 to 43729682 reverse strand)
caaaacttgttttctgggatctgggtggtcaggtaagattactggtgcatcatatggaatcaattttcttattaagctctctgttgccgcaatgccctctattgtggttcataattgaatgttgccaagctaatcaagttagcatcatgaatatacattttgcatgttattatctcaagtttttaatatctggggaatgcattttatattaaagaactaggatgtggtagctttgattagtaatctagcatgtttgctgttctcagcaaaaatagaaattagttatattgaatcgcactgaaaatttcattatcaaattattttacattgaaagtggatctttgtcgtgaactgaaaataaagagatgctctgttggctcacttacattcagaatgtatggatggttttcacgtcttatatcatgtgctatatttgtattttgctaatttgcctgataaaggaggaaattatgggagaaacatgagatacatcctatattggagttatatgttatgtcgacatatattcgatgcagttgttaggaatggaatggggtgactgttagaaaagaatcaccttttctttgttataggaaatgaaattaatctaaattaagctaacttcaccctatacgtcaccacatgccagtactataagattccatgctcaagttcagtttctgacacactacctgcttggcaggttggcctacgcacaatctgggagaaatatt

SEQ ID NO: 113534 - DNA, 820 bp, Setaria italica
  Intron number 3 from transcript Si003304m (locus Si003304m .g) derived from phytozome v7.0 (chr-ID scaffold_5; pos 35 580588 to 35581407 reverse strand)
ccaagaagttcgagcccaagtaccgcctcatcagggtatgttgccatccggcctctgcttctatggcactgaggaaccttatcttaagtgaaagtgtgattactgattatatctctggcttgtatgtgtcaccactaatttgtgctgttagtacattttaagtataaatcatgctgcaatgtttcgatttgtttctgtgggaacatcctgaagagaagtacacatgttaaagtagaggctagttgtggctatttttttattttctgtcagtggtgattcacattaatttatgcaagctctttgtttgcaaaagcatattgattgaaagatgctggtgcttatgtgattgagtccatagtagtagaaattgaaggccagcacattttctgtacacagaaactccattgttatatagtgtgttttttatcctgctcgctacttttgagctgggaaaatttattgttgtgacaaaaaaatttcatggtaatatttaatttgcatgtagtgtgatgcacgattcatgtattatttattttgcatgtagtgtgacgcaagaatcacaaaagattctcatgtgctatgaatatgtttcttgatgcaagcaacattcaacattgctcaagaattctagatgcaaatgtatcattttctcagtcattttcattgttgatctatggtgttaagattcatgcatgatcaaagtgtatgtcaactgagttttgattaacttgaaattgatggacgcctcaacaacctgagttgtgtagctatgtagatttcaattgctgcactctgcttaatccatctttcttttggcaga

SEQ ID NO: 113535 - DNA, 625 bp, Setaria italica; identical to SEQ ID NO: 112592
  Intron number 1 from transcript Si010275m (locus Si010275m .g) derived from phytozome v7.0 (chr-ID scaffold_7; pos 11 515461 to 11516085 reverse strand)

SEQ ID NO: 113536 - DNA, 1039 bp, Setaria italica
  Intron number 2 from transcript Si035827m (locus Si035827m .g) derived from phytozome v7.0 (chr-ID scaffold_9; pos 17 411553 to 17412591)
cacccgtccccgccgacccgcttcccaaggtacgaacacgccgccgcgtaagctcgtgctctccttctgctcgcgtcgcaaagggatgggagggacgtattttaggcggtgtttggatccttagctaaagtttatgcaatttgtcattagcctatgtttaataattaatactcctaattagcatccaaacttccgatgtgaccgggctaaactttagccaaggatccaaacaccctctcagtctcgagtcctttttctctttatactgatcttacggatgtcactggccgatgagtaatttagttcgtcgtgtgctttcggggaccacgtttggtagcacctctgcctgcactctgttgctgatgcagctacgcactactgttagcttgttagtgtcagagggacagtgatctcaggtctcaaatttgggagggtacaatttcgttgtaccatgaatcagtagcatagaaagagaaagacatcgaggggggatagtcgacgaagtccaaacatatgctttgtttgatgattccatcgattcgcatcattaagaaagaaataatccattgatcggagtgcagcttcaagaaaaaaaaaatggtccacactccacaaagtcatcgaagataaaccttttggacttaataattggcggttagcaaagtatgctccagctgaggcttttacttttggtacctttgtagtggcagtgtcttggctcctgactctgatgggtgcaaaattcatgtagacccatgctgaggcatgagatgatgtaatttctgttggctgctcatgaatactagctgaagatctaaatactgtaacgatggaacacacaacttttttgtacaaattttgtttttgttctgctttattaaatatatttcccccaaatttctgagggaaaaatggagtgattctcttaattttcttgtatttcagggtgctgattcttttttccgaacagttatctcaaacatggaaaaggtttatttgagcaggaatccaacagccaaaaccattttggagcttgtcc

SEQ ID NO: 113537 - DNA, 900 bp, Setaria italica
  Intron number 1 from transcript Si000912m (locus Si000912m .g) derived from phytozome v7.0 (chr-ID scaffold_5; pos 44 747959 to 44748858)
cacggccgtctcgtcgcccgactcgagcctcacaggtgcggaactcttcttccacctcctgacctgacaccttccaagatcgctctgcacttgtctacgattgcttgtgcttgtgtgggatcggaggctttggttatctggctcttgcagtgattgcagtgtgattagcctgagatccgcccgctccgcctgcggccgagctagcatgacgagtcgctgcgagcggagacccacgcggcggcattcggcggattcgtcggttgtggtgggcgagctgttgctagtgctcatgattagccgtaatgcggctgatcaggaaagggaattgcttctgaattgtggggtttctgttgggtagttagtagtagcaatcttcgatgtaatgatagcgccatgagcaacacctccagcaggtgcccacaaagatgggcggtgtaaatggtgccttttagttgtagcaatgggccctggtattttggagaaggtttgcatagacctttcgtggtttttgctgagtatagtactgtttaaagtttgtttcttttcttcctgagaaagtcttttgagggcatccaagaaattttttgagttatgacacccacaagcgataagtggttcatgatggaaaaaagtcagcaaccagcaatcttggatcatgaaaagttcaaagcgccctgtttgtgcattttatgtcacctcagatgaactttgctcctcagtcagaaactgggtctgaaaagctgagcacattacatttgtattcttttttttttgcctcaataaattctacattatagccttcccattacttgttgtttatgaaacaagcctgatgttcgtctgaaatgattttctttttgcacagattcttcattacaagctcaattcttgaccttacaa

SEQ ID NO: 113538 - DNA, 376 bp, Setaria italica
  Intron number 3 from transcript Si025887m (locus Si025887m .g) derived from phytozome v7.0 (chr-ID scaffold_8; pos 29 869723 to 29870098)
gggtgctaggatttttgtgctcattaaggttattttttttgccaaataaatggaaaatgattatgttctggacatttgcaatctgtggaagtttgtagatttagttttagcctattagttaccagctagactagattattgactaggttctttgagttccttcgatgtcgtttcatctagcacctgcaccataatataacaaattgggctatttatccacttatatgttgattgtcgagtcatcactccggttggtttgtttcgccatgctaactgcagttcttatctaattttcattggcttacaatatttgacgctgcataagtttctgactttgttaatgccgcaccctggatcaatcaggcgtcctgcgacc

SEQ ID NO: 113539 - DNA, 1023 bp, Setaria italica
  Intron number 3 from transcript Si036751m (locus Si036751m .g) derived from phytozome v7.0 (chr-ID scaffold_9; pos 48 374361 to 48375383 reverse strand)
gagtggtgagtagccttaggcattttttttttgtaagtgactgctgatgtgctcttgcaggttcacccaaggacccctctaataagctgaaaagcaccattattcgtagtccactctgatatagtcttgtgggctatacgagcatggtgctaaagaaattactttgtttttcttttggtctttggaattcccatgtggcaagtacccaccatggctaggtcaaaagtaaacacacatttcttcattcttaagattctgtttgtttgtgagcatggaagtttgtaacacaattaggcgggcagttaggccgttacgtgaggccaagtgtgtatctatgtctcaacactacagtctttagattctgtttgtttgtgagcatggaagtttgtaacgctattaggtgggcagttaggctgttacatgaggccaagcgtcatctgtctcaacattacagtggatgtttcatagtctcgcttttctctgctcctgtatgcatttgaacattttttgcacccacaagtttaagacaacagagcattgatttgctgctctttcatatgttggcaccattttttttcatattgcacatgcatatgtgcagtatacgagcatggtgcaaaaggaaatggttctttggttctttgaggaattgtcctgtggcaagtatttatccgcatgacccagccaaaggaggaacatttactttctatgtgtggttgtgtgctatgtttactcttagtcgggagctaaatgcatgttgtagtgtgctgtacattccctaaattaatatgacactgattgggaatattatacaaggactattttgtttctgacatttgatttgcaattgtgtttagttttattatttacttgcattccagttggaatgagtttccttgttatatatgtttgaattttgcatgcttgtttgtagattcatggtttttgtgtcacagggtttaactgctaaactaaactattcttttttcagtgcgcacagcgctagtagccctgattgcattc

SEQ ID NO: 113540 - DNA, 315 bp, Setaria italica
  Intron number 2 from transcript Si013374m (locus Si013374m .g) derived from phytozome v7.0 (chr-ID scaffold_6; pos 31 990955 to 31991269 reverse strand)
ccattgtaagtatctatgtaatgcctattgagatgattgttgctcttggtgaagtcagatacaaattggaacatgtaggactattttcttttttagatcaaatattctttggattattctctaagcctggagggcatttattctttttatgacttttgagattcttaatgcaaaagtgaaatttaaaagaaaaaactaaaatagagaagatggttcactctttcctactgtacttatactgtttgtgatgtgaacctgaaattatttatgatctctgcaggcgcaaccttctcctacaactggcaagttgccatt

SEQ ID NO: 113541 - DNA, 729 bp, Setaria italica
  Intron number 1 from transcript Si028887m (locus Si028887m .g) derived from phytozome v7.0 (chr-ID scaffold_2; pos 23 815191 to 23815919 reverse strand)
tgtccgaagtcatatcatcgaaagtgtttgccaaggtgctattacaagactcgttctcaatcttgctttttaattttagtagttactccctccattccaaaatgtaagaggctttagttttgtcctaagtcacttctctaactttgaccaagtttatagaaaaattgcaccaacttctagttttattaaatccaccatgaaatgtcttgataatgcatttatcttttttttgaaactgtacagcaggggagacccccactatggtaaaatatattaaatataggaaaggaaaataactatgcacggacaagagtccaaagggcaccaaagcacccaaagagaaaaagacgtcagggaggggcctcaaagaaagctaagagttagggctaaatatgtccattgctgacccagttaagaaaggtctgttttttgttttccttgattctgtgggcttgaagtcttgcctcctctatgaaattggacatccagtcctggactgctggtcttttcctttcaaagatgagattattcctttgcagagaatgcatttatctggtattgtagatcttaatatatttttctataaacatggtcaaagttagagaagtttgacttaggacaaaactaaaacctcttacatttcagaggaagtatctagtctcttattcttctcatacatcaaattattttgcagagaaatttcctttcaagatattgaagaggaggaaa

SEQ ID NO: 113542 - DNA, 809 bp, Setaria italica
  Intron number 2 from transcript Si038022m (locus Si038022m .g) derived from phytozome v7.0 (chr-ID scaffold_9; pos 50 232045 to 50232853)
acatagacaagaaaattcgagcactgaagaagaaggttttcctctccctctctctaagtctgtgtgcacctttttttagtgaacaaaaaggcaaattaaagttgttagtccagttccaaaatttatttctaccatttccctagttgttttggggcctggccctggtttgttttgtccaatatcaagttggattttcttatttctggtaaacttcgagtatatgttttccgtttccagtttaaatataatagtgaaatattgtgtcttcctgcaatgttggttttacaacatgaaatgtgcttattaatgcactgtgaccttggctcctatttgttgaggtgtttccccctatcttctgatttattcatgccgagcaccaataatctaatcagtatctgccattgcctattgattgctccttagtttatctttagtgcatctgtcaatgttttaaacctgtaggattggtcttttagattctagatgtggtatctggtatacattttatcaaatatatatgtttgtctttcttataaaaaaaatctggaatgctatttttacttgtttgggagacctttacatattgtagacaattacttttgtgtattctgtcatgacccttttgaaaaaagacatgtctttttagagaaaatgattgatggatattcattagtagattatttattttaccgagttgatatttagtctgcaatgtgtgttagcatgatgacaagacaggatgagatctgacgtggatgaatttgtcttttgcagatacgtttagctgaagcacagctgcaaggtgaccc

SEQ ID NO: 113543 - DNA, 790 bp, Setaria italica
  Intron number 2 from transcript Si003012m (locus Si003012m .g) derived from phytozome v7.0 (chr-ID scaffold_5; pos 43 142994 to 43143783)
gaagaagcaccatcagcagcatacaccgcaattgtgtaagaggctattcctatttcgctttttccatggacagaagcaggtgcgttgggtaagatcggctgttactcttgtcttctgtgtggaatcaacactgtgtcttgcttgttgaaccacagtacagctgagagggcttcatggtttctatattactgtacctgcggaataagatgcgacatgataagtgattgaacgtggcaatttttcctccatgctatatatcaatgctgcaactctaaaatctgtcaaaaatactcgccgattttgcttaacctttaggaggaaaagcacatgataagagcactttcctagtagcgtttttgtttttggttgactgcttgaagccttgaacaggacactctttaggctagtactaattttgatgagatggagatcatcactgcattggtaggtaggttttatcaactaaaggttactattatattttgctccttattcatggcaatgttgtgccacctatacctggattggcttatgtgaaaaggctcatttttcttgaaaaataaaacaaaaccaaagggaaatcttaacagatcttatgattcaacatgatcttgtgggcaatctcttcagatatttggacatcaacatagttcatactgcaggtcaaagtgtacaatcacatgtttgtcatctttaaaacttgcaaatgtatcaaagccatcatatcaacacctgggagtctttctttggttcaggtgcagaaagtgaagttcatcgctggtgctgtggt

SEQ ID NO: 113544 - DNA, 1008 bp, Setaria italica
  Intron number 1 from transcript Si036031m (locus Si036031m .g) derived from phytozome v7.0 (chr-ID scaffold_9; pos 11 481138 to 11482145 reverse strand)
aggctgagacccagtccgtagacttccagaaaaaggttgatcctcttgcttgcaaacaactggcatggttaatatcgattgctatatatatctttgctgaaatattaagcaagtactgctaattctgcaattttgacatccttgcttgtaccgtttagttcattctcgtggtgatcctttctttttagtgtatctagacagcagtacagtcataacatgaactggttggtttctgctttcatagctgacattgggagtactattttcatgtctctgttttgaagaattatgtttgtaccttaaacagttcttaagcttgtgacgtaccatttgattttttttaaatagttataagtttgggcctttactgtatgctgtgctgtgggacagttacagacttatagtatgccagtttgacagttcatctatatactgaaatcatgagtagctcaagagtgtactgaaatccattattaacaaatatccatgtctcatgtctttgcaagttttatgtccctattgcattaaaaatgttagtgttcagtaatatcatcatgagtagtggagctatggaagtatcattactttcttttggtgctaagatggtgtcttttagtgtacaacttctctcatcaaattatgctggaagctgtttgttagtatttagtccaaatcattccttgggagtcgatatttggatttgttagtagtttacatgaatccatatatgtacgggtttctaatccgttgttgttctgagcacctttggaaaattatgattttgtggctttaggatttgtcattgtcgtggtgtgcaaagcttcaaatttttaggactagtgacagtgttcttttgagaaaaaaggagtttttattccggcctcaaattatgttgtttgttattatttagtccaatcaaattttgtattatgactcacttgcacagaggagccatatttattatctctttttttgtcaggctgctcaagttgctgctcaagtgaactc

SEQ ID NO: 113545 - DNA, 609 bp, Setaria italica
  Intron number 2 from transcript Si019179m (locus Si019179m .g) derived from phytozome v7.0 (chr-ID scaffold_1; pos 61 67487 to 6168095)
caggatacttactcacggtatatcctgtttccttgaattgtttatcttaaatcttaagatgtgcaaccttgtaatcttgtctctttcgatgtttaaatttatatgctaaaaaaatgtgagtttcattttcactgtgtcttagtacttcgtcagtttatgtacagtctccatttggtaactgatttttttttagaaatgaaaagctgacaagtttatgacaccaaaattcaagaatgttgtcccattgttatattcttggatcttgcagcaagaaaagcatgtcatcgagacattgacacaaagatctgaaacacccttctactgattatttatagagccactttgctgaataagcacttagtttctttactgtcttctgttcataactgacattttctgcaagtgaaaagctgacaggtctgtgacaaaaaaattcaagactgttgtcccattgttttctccttaggatatggcagaaagaaaaccagaattcattgacacaaagatctgaaacatgctgttctactagttatttatatatagccaattcttgaatagattggaccaggatgtttgacttctgacctgtatttttaatgctaggtcgga

SEQ ID NO: 113546 - DNA, 889 bp, Setaria italica
  Intron number 1 from transcript Si022483m (locus Si022483m .g) derived from phytozome v7.0 (chr-ID scaffold_3; pos 36 84059 to 3684947)
taccgttagcagtcaaaatagcaacggcaccgaaggtctccgtccctgcggtgccctctcccgattgaattcgtggttcggggaacggtgaccaccgactggtacagcctctggttcagtctgctttgcaaatgctgtctgcagtgctagtattggtgctctgagtctgctttctcgtcgcctgttcagtgcggacttggtggatctgcagctaagataggctagtggatatctagttgacctgtaggtcatgctgttgtataggtgatggctagtttagttcgtgatcagcgtccagtatttaggcttgtttaactttaattggccagcatatggttctagccgcagcagcgaagtgttacgcctcctaagcactctaccaagttggcacagttgcaaattccgcaacaacgtttgagtgaattgcagcgagccagtgactgattacttggccatggaaatgtcaggcagccacaatttgtgggaaatatgtggcgttggcatgactacacatgaataagctacaactacaagttcaaaagagaaattgttctgtgtttctggtttcttttcaaaaactatatgtttatgcatatttatgtacgtgttttatttgatttgcagaaaagctgggggaggttctatcacaccacatgtccaaaaatttcttttggagaattgcactgatactaatgtaaatgatcttttttcttctcatcttgtaaaatttactcaaacaacacaaataagatatatatttttgcaacagaagcaatagataatttatttgtgaaaaaaactgcaaatatagtgttgttataaaagtttcccattaatcaatatcttcacatcttataatgggatttccgttgtatactgatgcaggtat

SEQ ID NO: 113547 - DNA, 998 bp, Setaria italica
  Intron number 2 from transcript Si013673m (locus Si013673m .g) derived from phytozome v7.0 (chr-ID scaffold_6; pos 21 46573 to 2147570)
caggccgtcgtcgccggaaccgccgcctccaggtgtggttttcttttcccccccccccccccccgctccctccctcctcaactaccctctgtttcttgtttgtttttttttcctgtcggtatgattggagctccccaattctgaattgttcccccaaaattgttttttttaatcaattgacaattagagcagcctggtttctgaatttttccttcacgattcctctcatcctgcttctactcaaaatggtcaattggcggttgctggaagttttccggctgtagctgaactgttccattgttccccacagttacattaactgacctggatattggagctgccccctgattcttgaattgctccttcaagactcctcgcctcatgcttgagtcaagatggtcaatcggctgttcccagtggcagtaggtgacataagaagttggagcagaatgtggtgttcagcctataaacctacaaactataagcatactgtacagactgaaaatgcagtgaccgagaactaaagaatactttcaaaaatcagcggtaggtttagcgctcttggaactcaccaccaattatttcttcaaggttcctcttatcctgcttctagtcaaaatggctgtttccagtaggtgacttgagaagctgaatcagaacgtgtggtgctgggcttattgtggctgtacaattgctcaaaaaggtggttctgaatgtagtgtatttgcccaacaaattacagtgatgagggtaaaattggtaaaatcagtagtgtggcatcgccgatggaaactgaaaatgcagaacttttaggaactcaatttgaggagtcagcagtatatttagtgctcttgtaacccttactttaccaatatacttggtcgatatgattttttgtccaaaagtatatgatgtttttgaggatttgctaggtggcaatatgctaatggtttacattttctgaatgactacattctgcaggtgtgcttgtctcagca

SEQ ID NO: 113548 - DNA, 617 bp, Setaria italica
  Intron number 1 from transcript Si013996m (locus Si013996m .g) derived from phytozome v7.0 (chr-ID scaffold_6; pos 90 6130 to 906746)
gtggttaggtacaacacaagttgccaatatagctgattgagcatggaggcaagacgtgccatcggctacaaacacgatgatggctcaatgcgctaatgtcatactgtcctttgtttttgaaattcgtacatttaaattatttaagacaactttgaattgaacacaaattaaccctgcctcatataagcatcttacaataatattcttttttcaaccttcaggggacaaatgtcagtgttaggggaaacgggttggaccgttgatgcctaaaaaaattcctttttcactttattatatacaagaatattagtttcatttttttgggggaagagtatgcattttttataagagaaaaatgtttttggttgatagatgggtccagagcaaaaccgatgctaattccagcccagaattgtctagtctaggcccaacaagcacaacaggcctaatggaccgttcaacacttcaagtcctcaactcatcatcatacatattccagagcacgccactcctcagcaaagcccaacccaatacaccctcccgtcctcccgtttccgaaaataattctcctcaaaattcaagcaccaacctctcctctcatctcccgtcctccgtgc

SEQ ID NO: 113549 - DNA, 838 bp, Setaria italica
  Intron number 1 from transcript Si039164m (locus Si039164m .g) derived from phytozome v7.0 (chr-ID scaffold_9; pos 18 23004 to 1823841)
gtgagctcccgcctcgcccttccgccagcaaaggagtatgatgcaatgctcgatcaattcatctgtttttctgtgtagattggtgtttcgctcccgtgtcatcatagttgtatgttgcattgtgcgatcgttaccctgtagcttctactcgttggatcgaattgagcaaattcagacatatggttctatttaacctgacagttaatggtgtatgtattacattgctgttcccggagaacggtttctgaagcgtatgctatgacctgtaattgctctagtaaatgtagcaaatcgaattcaggagctctgttactgggtactgacaagtgggaacatgatctatgacttatgtcgcgcatcgcgtgcaccgtacctaagccttacacgaacttagctttgaatatgtcattttgagaagtctgttcatgtactcggaaattggttggcacttgttcttgaggttccttccttgaaggcattaaagatgaatctcctcggagtctattttgtgtacatgcaattcttgcatatgcaatcttcatacttagctttcgatgtgaaactattgcaccagtcatggtccaggaaaaaaaactattgcaccagtcacttacctagttaacttagccattatgattaattaactagataaaagatgaaaggatagatgtaaatttggtgtaatcaacttgtctcctcttccttcatttcagtgtatgctggtgggatgctcgtttgtagtgagactatctatatgttgtgctttaaaagctttttgaacacgttacttatttttatttcagaaatctggcaggaggacctggtttgtaaggcacgt

SEQ ID NO: 113550 - DNA, 521 bp, Setaria italica
  Intron number 3 from transcript Si026163m (locus Si026163m .g) derived from phytozome v7.0 (chr-ID scaffold_8; pos 17 14080 to 1714600 reverse strand)
caagatttcaattgagaaaagcaaatacctcggaggttggttatgtgatgctatacttttttgaaggaaataattctttattatggggaaaagtacatttggcatgtctatttattacctctgttttcaatggctttttatgtcaatgaataaacaggcatacctgttcatgagctgtccaaatcatgaattctgtgaaaatgagaatttgtttgacatagtcttctatgttggtaaatgccctatgtccactgtttcagaacatcattttcttaaatgaaatataaacagtgaacagcagcttgatcgttgcctaatggatcaatcacatgcagtcttccgttttttttttgaattcttgcaatcgaaaagaaattaagaaagatatagatgtcatattatcaatattgatgtggatatagtgactcagatgcttttctgaactactctttgactgagattttatttccatgctatgcttgtaaggtgatttggagcatacacatctggtcaaaggcttg

SEQ ID NO: 113551 - DNA, 1007 bp, Setaria italica
  Intron number 1 from transcript Si017702m (locus Si017702m .g) derived from phytozome v7.0 (chr-ID scaffold_1; pos 24 80987 to 2481993 reverse strand)
ggacgcaatcgccggattgcaggtgattactgccttgaggaatgtgtggttgcgaggctttgttgggccaatccgaacctagatgttcagttccggctatttgatgctgtgttggatattcctgcaatttctttctagtataaatcgtcattttcgtatgaccgccaatctgtgtcatccaggaaagcaaaatttacatgatacctggtaatgtgatcaataactattcatttaccattctattgttaatgttacttgttttaaacgggccaaaattaaatgcattgtatactattcataagagaaacgagagggtttgtgtatggttttggtgtgacgagaaatagaaatttttaagaaacttgtgtgcagattttagtgctcctgtaatctcattcccatcactgagccatttagtccccagtagtattaggtatcaagttagataattggtattaataggtgatcgattgtactatgtagccacttggctcaatcagtgtaagaacaagcagccataatggtgtttactcatacaattttagctagatccttacaatacgagcagacctagcaaggagactaaatttgggtctagcacactgcatgaaaatttgcagatttgcagacaactatatggagtatttcttatggttacttagaggacccaataacagttgaatgcattgttatactgtcctgatactttcacaacatgacccaagcatttgccatgggcagagttggaacaccaccctttccttcagtaagcttgagaaccgtagtgctgaaaacaatgcatataggctttaagtgcctttcttccttttgttttattgatgaacttctttgtttctgctccaactttattgatgctttaatttttaatgcattctggaaaaatcacttgatttatcttagaaatagggaagtagttttataatggtatctaactcccatttcatatttcaggagttggtccttagagataacaaacttacaaggat

SEQ ID NO: 113552 - DNA, 671 bp, Setaria italica
  Intron number 2 from transcript Si011466m (locus Si011466m .g) derived from phytozome v7.0 (chr-ID scaffold_7; pos 24 813200 to 24813870)
aggtgggaaagaaacgagttccagttctttgctctcttcctggctgttgctctgttttccaattttctgttgggatcaattatagtttagacacatgtgtcgaggtacggccttactgaccaattgctagatgttggatgaacaaatgacacgggttacctgggtagtcaagcagaattggagtaacttttgttgttgcattctcatctagctatgtagatttgtcatgatgactttatatattactacaaattcctagggtaatattgttctaacaaaattgagtagcttcgtaccatttttgggtgtggttagattgtgcggaaacatatcaattgtccacatatttttgggtggtagtgtaaacttaatgcagtataagggaactagagctggatatataaaattaaactctgaaaaaaagtaagaatctatagaactataaacaactatttggtcaagttataaaggagtgtgaaatagatcatgatgtagaatcatgtggcaacagaataacagggttgaatagaggatgcaatcccatccattgagtaatatagcattttttttgtcacatctatatagatcaaatttactctgaattgtgattgtatgtgctcttataatgagtgatgtgatgcagactgaacaaaagaagcaagtcgctgcaa

SEQ ID NO: 113553 - DNA, 749 bp, Setaria italica
  Intron number 2 from transcript Si035676m (locus Si035676m .g) derived from phytozome v7.0 (chr-ID scaffold_9; pos 47 199974 to 47200722)
gcttcaaaaattggtaggggcatgtttgaaaaatctgttttgttttgatttttctgaatcttttatttggtactgtaattttagagaaaaacattgcaaaggtattcaccattccacctccatattaactttcacaattacaactgccagcattcagcctacctgctttcatgacagaaatgaaaaagatctatcaaaagcatatttgcatttaccactttccagtttgcaattttctactttgatgtggtccctatgaagccagatataaaacattttcagacttactaatgtttccctaagtctaagtcattctacaactttgatgtacatgtttctagtttcttcattttgcaccctattcatacttaaggtgacatcacaaaaagtgtagcaaataatgaaggcaccaatatcattttctcttgctctttaatttatgtttccagtgctggaataactttaatctggtattggatgtactatgtcaataaaatgatgtaatatgtttgtcctttttttctgatttcttagtcatgtactgtgttctgtatacaggacaggagtacaggacacatgacacatgcatgccagaatagttccaaatcttgctttaccatatcttatgtcatgtgtctaagagtttagtgctttggttggatgaattcaatgctgatgagcgcacgaatattgaagtgcgggaaccatcatataagaaataatgtttcatccttctcctgcagagcacc

SEQ ID NO: 113554 - DNA, 703 bp, Setaria italica
  Intron number 2 from transcript Si023861m (locus Si023861m .g) derived from phytozome v7.0 (chr-ID scaffold_3; pos 40 38567 to 4039269)
tgcctgatttgcagtggccttgttagtttcttcttcgctttctttgtatcatcctaactagtgatcttgttagattttcgttgttgaagtaccaggtatagacgcatcttgtagatcatgacgagatgatgtagctgtaacctgtaggcacatctgcattaggaccaaatgaggtagctacaggtgcaggagtaagattctgtagttggcaaatctgcaacagttgcaagcatagaatgcatttgtgatatggcaccaatcactttattgtaggtccaattcgaacccattaggcaatattatgctactgaattaggcaaaacaatttgctcacaaagcaataatatgattctaaattagcaatgatatggctctgaattaggcaataatatatgcaagaattagaaaaatatttttctatattgtgcaaagcaatatacttcattaagcaattttgagcatttcataattccttttttgattgcttgcctccactagtagatcacatataactgccagcactgctactagatatagaagtcagtttttcagcctgatcagacttgttattttagtctactatatgtcatctaattgttgcttctttgtaattctgaaatgaaaactgtagcaaagaaatactgattgttcaattgatcaatcctaagttacctaatgtgatgttctttgtgcagacttggtg

SEQ ID NO: 113555 - DNA, 1034 bp, Setaria italica
  Intron number 2 from transcript Si018321m (locus Si018321m .g) derived from phytozome v7.0 (chr-ID scaffold_1; pos 99 2610 to 993643)
atcaggtttggttattctccttatctgcatactccaaactgacaatgtaggttaggagatgttgcatcatttcactcctgcaatttttggataaggtagtcattggagaatcgtgtacttatctttaatgcatttattgtggcagcaattgcttgctaaatatttccttgagagctagcaaaaaccagaacctatacatccttctcgtatgatgtattgttgttctggtgaatagggtaatttttcatggcatatttttatatgttgggagcacagaaaaaccatcattgttctttagtctgcagccttcttcggctcatagattctaataatacaatgcatctggggtacatccatagagaattctaccatgatggtgtcatcagctcaggttttatgcttgttgctgatttggttaccttagtcaatatggtgacaagaatgaaaaatataaagggtggataagattataggaggataatttaaaattcattttctccttttttaaaaagaaactaaggttatgtagaaaagtggtatgttcttagaccactagcagattctgtgtcatattatttatttgatactgatgcattgttttttcttggatgtgctagaacaaactatgaaatgctggaatggttgtgcataatatcaatagtacattttgcaaccaggcaatttggtattgatgtattactagaagcaaaagaatcaataatctgtaaaagtggaaacgtttttatgttcagctgttgtgtaaaagtgtagttttctcttagaatgatttgtatttgttggtgagatgctcttgtctgttatagcaaatacactacctatcttcatataaatgaactaatatgtcctggcagcctgctcagtgctttggtactggtgtatgtattagcttcacctgatttaccccattaatgactctccaattcagtgccttccccatttcatcagaaattgcactccctaatagtgcttgatttgcagatcatattaaacaaggtgctactagtgtcaactag

SEQ ID NO: 113556 - DNA, 553 bp, Setaria italica
  Intron number 1 from transcript Si019946m (locus Si019946m .g) derived from phytozome v7.0 (chr-ID scaffold_1; pos 27 419517 to 27420069)
agtcgctccagcatcaaggagacaagctagccgaggtatcttagtttctgttagatcaatgccctacagattgatttgattgccgcagatgaagggctgacatgtttttgtgggtttacatgctggtcctatactcctatctcacactcctttggaggtcaattttttcatggcctccatggccaaacaacacttagaaataatgtgcagaagcacagaatcaataaagctgtctcaggaatactcatgagtcatgtccatatatttttgtatttgcctctaggattcttcttcgcgaaagaatagcagagaaacataatgcttgtagttgtaacaaattctcttgaatgtattgtatgcccagcttacttgacaaggatggaaattgaggtgtatatatgtaatcattggagtcggttttttatttcacaccaaattgtttctgtaatagcttttgtttgcagttcaggctaggcatgttctgttgctaaattataatggaaaggcaaaaaattcattctcactttgttatctttttaggaagggaagtacc

SEQ ID NO: 113557 - DNA, 888 bp, Setaria italica
  Intron number 1 from transcript Si000067m (locus Si000067m .g) derived from phytozome v7.0 (chr-ID scaffold_5; pos 34 117724 to 34118611 reverse strand)
gcctcgccccgcttcgattcgtctcgtgccttcaggtgagccgagggtcataccttcatagacttttgtattgtatcgagtgattccctctcccaggcgtgctggcgaaattgttttatatggttaggtccgttgtcttcatgaatttcggacttgaggctggttttagttggagtcgacgtgataggaagttactgaggaaattgttatatgattaaccttcgtagatctgacttgctccgttctgcatccgtgcgtgcacaactgttcttgtgaggttttatgagcgtgggcttggccaagtttgtgattttttgttgttagcatctgggaacctgagttggagcctaatatcagtaatgggtggagatattaattaatatttcgcacgaactggcaataacaggatgaatgttcagttgatttagcatggattggttgataccatctagtaggaggatgaagcaatggtgtcaaagctttgtttcaataccactttcattaattctattgaagcatggtgctttggaatgatgttcattcttgcgggatagaagtttgtattatcttatgtattgtcctttggtcaagacaaagtctggtccaagaatatctttaaatctgtataattttgatggtttgtccctattgattcaagtttatatattgtttaaagtgtcattggtctgctttaagcaacttgagtacccatgaacaacttgctgagattctttggaggctatagaatttgacctaatgtttagcgtagtgcgaattaatgataatgtgtttatttctttattccttcctttctacttgggaaaactgctgtggtagttctcatatatctgtttctttatgacagattgctgagagagcttggcacaa

SEQ ID NO: 113558 - DNA, 817 bp, Setaria italica
  Intron number 2 from transcript Si023489m (locus Si023489m .g) derived from phytozome v7.0 (chr-ID scaffold_3; pos 19 118782 to 19119598 reverse strand)
cgctaactttcagctgttgttgctgtttcttgcttgtgagttctactatttatcatattcttatttcttactcagcaagcctcgtatatggactggtgaattttagtcgagggaaagcaagccttgtatacggacatgtgaattttggagtttagttgagggaaagagtccatgatttcattcgcagcaagaattgtccgatttttataaatttggattttcaaatttcgttgggacaacctgtaatccagttttttttagctcttatgctttggcgtcgtttgattcaggcccttatgtgtcaaatgtcaaatgaaaattgatgggaggaaatgttcttgacatactgagttcgatcaagatattacccagtaaggcagtaatatggtagtaggaatttagtaatgtactggttagtacaaatttcacgaagtaaataaaaacattggtgtctcccacattaccaggcattaactcattcgagctgccgagatactaacacatgatcatttttcccaagcgtgctccttgaatccacataattttcctgctatcttctatgaggcctcacttctataaagcttcgagggaatttaggctattatggcataaaatattcttctggatttcaaagaagaattgaataacaatacaaaataatccacattatctcttttctttttgaggaacaatccacattgtcttgcaacacttggtcaaagcaggatgtctatggttggaaatttggaacctggtttcttaatttgccctccttttattgggttcatggtttgcctgtgcagattcaggagtgtat

SEQ ID NO: 113559 - DNA, 986 bp, Setaria italica
  Intron number 1 from transcript Si014010m (locus Si014010m .g) derived from phytozome v7.0 (chr-ID scaffold_6; pos 30 010823 to 30011808 reverse strand)
ggtttgggagctggccagacgacctttactcctcggtaagtttctcacacgatggatgcctgatttatctatgccaacaaaatcattttggtattgcttatgcccaacaatagcgtatcaaaacttaggtgaagtgtcaacagttaaattcagatgagtgactcaactcgaggattaagatttgttttgtcaaagagcaaatagaagtttgaaatgcctacttggggctgttatttgctatgcatggtagtttactcccatcaggattgaaacagctaaatgaatagtaggaggttaggattcatgccaaccaatttaagtgttcgctttgttacctcaggccaccaaatgcatttcacaacaaacctttaattgtggtcgatcaattttcttcagtgagcactgagtacacaaaatatccagcaacgtgtcccagtaatggaatcattcattttttatcacgagtttaatctgggagtgagtgctttaagttgctgaaatttcttctatgaataggggtgagggtcaccaatttgcactgctatctgtgaatatgcaacatttgctgccgaatatgccctattttttttttgtcaagacttagcaattgagtgttaaaatttgtgtgagtatgcaaaacctccctacactgcaataggatttgtgggctcaagtaatttcagatgtttgtgtttaacaattgagtgttaaagtttgtgtgagtatgcaatagtatgccctgtttgtttgcttttgcttagcttgtgttttgggtgcattttttcgcgaggaagtgttttgggtgcttaataagctaagatgtttttactctgttcaagagctgctttctggcaattgctgtaagttttcttggataaataaatatagttgtaactgtgcatgcaatgtggattactttaatcatgttattttcagtgtcaccttactgtgtatgaaccttgaaatgcaggtgaggttggtgttcg

SEQ ID NO: 113560 - DNA, 588 bp, Setaria italica
  Intron number 1 from transcript Si013458m (locus Si013458m .g) derived from phytozome v7.0 (chr-ID scaffold_6; pos 35 652002 to 35652589)
cgacaagaacgtgagcttctccattctgctaggattgcacactattgcatcagaacgtgagcgtcatacttagacagtttagtaagactctacaagtagaaataaagatacgagtagcaatttcttcatccctgcactgaaactcagaaatgttttgagttcttgatgccgaatcatcatcagctttacattttggttttgatttttcggctgctgttaatttctgtgatgtggatagggctggctactgatgggtgatgcatatttaggttagtgccagaaagagggagaaaatttgcaataacaaactggagctttcttctctgcacagtcgcctgagtagaattttccccgaggatgcaacaaaagcgaaatctttgctgaacaaaatatggacattcctatgcattcgattaaatttgtaccctgtttgttacttcagtgcattctcgggtgattaaggcatgtgcttttactggaagcttaggaaagtttaaagctttatgccattgtactacagagtcctagggtaattatgcacattgagatcttaatggcagctggatttaatggttctttgcatcgcag

SEQ ID NO: 113561 - DNA, 987 bp, Setaria italica
  Intron number 1 from transcript Si001011m (locus Si001011m .g) derived from phytozome v7.0 (chr-ID scaffold_5; pos 25 72633 to 2573619 reverse strand)
gcgcacatcagcgggcttgtcgccgcacaggtacaataatctctgataaattgttctcgattagctagttgctttcatgaaatttcatcttgcattcccattgaaacggcaattagttggatctgagagatgtggtagtctggattctatttgctatctagtctaggcaaatcaattattgtggttgttgaatgaaacgctggattatttaatcccatattagatctcagtgttttgcacgtttactgattttaagatttttttatatggacgcttgctgtctgttgttttgtgccttgtcttgttttttaagtagtataaatgtgccttgtaatcgtgaaatcaatgttttacctgctttagtttgtctgaatgtattcctttgatggtgatagatctgatattccatctgttttcatgttttggagtattctcagtggatatgatcctgctttagtggaattgcactcagatactcaccgaaccaattgaaaccattgcaggagtcttcaatagtttgtactcttttacggcaatatattaaagaagtagtacatggttgttcttttgcaaattacatagcgcgtccttgtgcacattattgctaatcaaatttgggcttatgtatgtcaaaatgtttaaagtcgtattcatgcttttttggtctacatttgtcatgcaatgatcgtgcatatataggcaatccacagtagaacctcacaatcaatctgctgccgcacaaggcagacatatttctaactcattgtacccaacggctccttgctttagttagacttagctaatgcactatttgatggccataatacagaaggtgatattatttggctaatgcagtaatgcttgcatatcatcatccttctttgagtactggaggagacctgaagagattattcactacaaatgcttagtttgaaaatttttgccttcctccatttcaggaagccgcaaatccttttgagtattgtg

SEQ ID NO: 113562 - DNA, 767 bp, Setaria italica
  Intron number 2 from transcript Si026164m (locus Si026164m .g) derived from phytozome v7.0 (chr-ID scaffold_8; pos 25 581629 to 25582395 reverse strand)
actgccgggcttgctactatcgccgccaattgcaggtgacaattttgaaagcttcaagatttttatgtcacacttcttcaatttgagaaagagcgtattgagtactgttgtagttcatccagcttggccatttaattaccagcaatgtgattcaattcagtgttatctttgcaatcttctttgtgcttagtttattgtttgtgcaccatcttataacggatcatgtatgcctttcgatctctttatacttggttggatcttgatattaatatttatctattgtgtgtttactgattaagatttgttaatgtgaattgtgaagacagtgcaaaatctactgaaaaaagttctctagaattccagttgtatttcatctgcaggatttgaacttgtttttgtgtaatttttggccgtttcttagctctatctgtattagccttctttcattgttgcagccatgaaattttgtaactttcatttaagtttgataagtacagatctactgcctcgcaaaaaaggtacagatctactgcatgagtgcttatatggttttccatcccttgcttctatttctttgattgcataatttgcatttatatagtattattaatttccaggtctggcatattctgttgtgtgaagtttattttcactgtcatcttcctgtttagttttgctcaagattacttatggttgtctactccttacatgttttacaactctttgcttcaggtttcttaaggaactggacttacaagagagtgttg

SEQ ID NO: 113563 - DNA, 469 bp, Setaria italica
  Intron number 1 from transcript Si017542m (locus Si017542m .g) derived from phytozome v7.0 (chr-ID scaffold_1; pos 11 9293 to 119761)
gttctgcaacggaaggatacccacagacttcatcggtaataagtccttgtttacttccctccaaactcccaactttgacactatgcaaaaagaagattccctatcatatcaaacttgcggtacatgcatggagtactaaatgtagacgaaatcaaaaactaattgcacagttttgttgtactttgcgagacgaatcttttgagcctaattagtcaatatttggacaataattcacaaatacaaacgaaacgctacagttgcgcatttatgacaaaataccaattttatctatcccaaattgggaagtaaacaaggcctagcttgtactccatatgtttatatatgtgtgtgtgtacacactcacacacgtatatacatacagacatatcgggaaggaaggaaacaaacatgttaattcaatcatttgcatgcagcgtcccgtctggggctcaaggattacctgcctccc

SEQ ID NO: 113564 - DNA, 1019 bp, Setaria italica
  Intron number 1 from transcript Si006627m (locus Si006627m .g) derived from phytozome v7.0 (chr-ID scaffold_4; pos 41 22748 to 4123766)
gtggatcgacttccccgtgcttgccctcgacgaaagtaattgatctcttcccgattgtgatacacgattactagctccgcaagtaacgccatctgcttacgcaaattgcacctgtgatgtggttgcttggggtggttttcctcgagtaggtttagaggttgctggataagttgttaatagattctagtggaactgagaggtgatgtaactagcttaggacttcaactagggctatggagccaggagattgctgccgcaaaagtatgcaccatgggataatgttgcgtgagcgttaatgaactttgggctgtttgattgatgagagtattggtggatgggatgatcagaatctgagagaatgaatcgatctagcctaggtgattttcgatgttctggatttagattttggggttttacagctgctttccttttttgctcataacttagattgactgttaagttgcttggataagctggaaacaaatggataaagtcttatggtgtgtaatatgcttgggtgttgggtgttttgtcttctatgctgtttagtacaggtgtacaaaaggtctcaatgtctcatgaagtcattattttattttgtacttttgttccatgtggtattaatgattaattgattatggattgactttttcttattaaatataagtcttagtattaattgaatacattatcatgaatttttagattactttactgtttaacagctgtcgctactatatttagtaaattgtttaatgtttacttataaatggtaaagatatctttttttgtttgtgcttttactggttcaagttcaagtctttttttgccttcgcattaatttctgaagaatgcaggcttattaccgtgagttgttttactcagcttccttttgggagaatcatttgtgactgttctttttctgtgctatgaattttaattggtctttcagtgcaataacaatgtgttttatactgtttgcagattctataatctctgatattcaaagagatcatttg

SEQ ID NO: 113565 - DNA, 570 bp, Setaria italica
  Intron number 3 from transcript Si003283m (locus Si003283m .g) derived from phytozome v7.0 (chr-ID scaffold_5; pos 18 3653 to 184222 reverse strand)
cacaatagccgtgagtacattacaaatgatttcttcctggctgctcatgctgtttgcatacataactagtaacatcgtcaaacaactgagaaatatctatctagaagaaaaacagccaacaaaattgtacgtagttcactgcaacgagtttgttggatttctacatgcctgactgaactaatatcatcacaattcatgaactaggatttctagtctgtatagggctaagtgatccatatggcaaagagcaggttacacatttcaaagaaaagaatgcatctacgattctcattctcttggttatctttcgaaacaggtcagcaggaaatctgccggacttgtattaatatgttgggggtttaagagcaaacaaccaaaagcaaaagatagcagatagcatagtgccgtagtggtctatgtaaactactttctgtatagatgccctcatgaactccagatttgatcacctttcatatcaatcacttgttgctttgaagcttgggttcattctaacgagaatttcttggtatgacaggcagccctcgctacaattgctgtgatcattggggc

SEQ ID NO: 113566 - DNA, 839 bp, Setaria italica
  Intron number 2 from transcript Si007079m (locus Si007079m .g) derived from phytozome v7.0 (chr-ID scaffold_4; pos 10 466601 to 10467439 reverse strand)
gcattattacagcttcggagatctttgaaggtgactggttaaagtactagccatttatggatatacaaaaaaatttaaaaagcttgtgctagttaaatttgaaagatgaagaggactcaatttagtgcttaaatcatacgtacatgatatcgattatgaccttcgtgtttttctatcatatatttttctagcggctcctagtttcctatagcttctgtgttgattttcttttgctgtcaggtttttcttgtcgtaattaaaagtgacaaggtattttgcattatcacttggcacaaaattagcatatattaactaactatactttccactacccccccaaaaaaaaaccaattcgtttttcacatacattcctacgccattcttcttatccacgtttggtccttgtcatggaaagttttctatcaaaattgttgatgagcaagtgtatttattgacacaaatgttccaattaaacacaaaatcagataaagcataccctcttcatgccatatgtagctacttgtaggtctattccaagtcaaatatttttaatctttgactataaatagaaaaaaagattataaagattgataacataaaattgatgttagcatattcatcatgaaacaaacaactatcataacgaataactttttctatctgaaataaattgtttttagagatattgttggtcaagataaaattatttaacttaattagtacaaacctaaataaattagttatgttctgagatagagggaatatgttgttaacagtgtaattactgtgtaaatttttttttgtcatactttgagaactcgcaacttgggctgcaggat

SEQ ID NO: 113567 - DNA, 678 bp, Setaria italica
  Intron number 2 from transcript Si007371m (locus Si007371m .g) derived from phytozome v7.0 (chr-ID scaffold_4; pos 16 16309 to 1616986 reverse strand)
tggcaaaagctgtactggaggagcttgaaaaggtaatttcaaggccagattttacttgtagtctgggatgggctcaaaacatagattctggacgcatattactgcagtgactcatctggccattgtttttgtttcacttgtttacatgtattgctggcatttgtgatgcatagtttcatggattcaatacattctgatgatactctgcatttaattagcaattggttgtctgaccattgaccactgtagcagtatttatgtgtatgctctcagtttggctttggttcagtacatcctaaacatgctattttgttgcctctggcccattttattttcagtatgggtttaatatgtctatcaaaaggaggatagttccataataccatttcatgaaactttgttgtgtgacaagtactgcaagtactgcaatgattcttagatgaaccacatgcttaatgattctcaacactatgcttgtttctgataaaatcggaaccttatctggttgatatttaccctatgtttgattggatttgtattctttagtttctctcaaacattgtttcctctgcatcatttaatgttgaaattagtttgaggtcaatccaatgttcttgtatgctgcatcctgttctatctttctttgcataccaataaattcatgctattgttcaggtg

SEQ ID NO: 113568 - DNA, 417 bp, Setaria italica
  Intron number 2 from transcript Si025937m (locus Si025937m .g) derived from phytozome v7.0 (chr-ID scaffold_8; pos 36 854958 to 36855374 reverse strand)
ctgagctagcatcccgccatactagactggagcaggttactcctttcactatgtcacataagtttcgcatatggcaccatcataatgtttcttacatactttgatgcattgaggattttttatattcaatgttgaaagttagctaatgaatcacatcacattggtaggatactaggataactaagtcttcatatttttctcattacgatttaaactgaaccaattcaagttttttgtccgaggctacttggaatataacggagcttctttgttacctttagattgataatgtttgtttccaatcaaacttgacttgtttaatgtttggagttttactttctggttgattcattttagccagatgatgatcacatagcttaatgcatgtgcattatatttccatgcaggttcttcttg

SEQ ID NO: 113569 - DNA, 866 bp, Setaria italica
  Intron number 1 from transcript Si012351m (locus Si012351m .g) derived from phytozome v7.0 (chr-ID scaffold_7; pos 48 62248 to 4863113 reverse strand)
ccggctgctgctcccgcacgtcctgccgcactccggtgcgcggcatcttctgcaaccagtggtggagccagaaattttagagagcttaggcgagacaatatgccgagctagcaatgacaagcaatgcacataagtatattatataacatacatataatataatattagaaaatcatgatagattcaaattaagatattaaaataatttttcagtacaatttcaagacttagataatgaaacacaaaagataaacctaaatgctatttggtaactacggttgcacacaagcaggattacagggcagctacatcttgcgactcttcaagttttgaaaccgccaaagaatagtagcttcatcaagtgaattgaatagttctcactcaatatagcacaccatcaacttgttgaaccaatcatcagcaatcttattgcgagatttagacttgatagtcttcgtagctcagaaagccctgctattgacaccggcaccaacaatgccaattcaatgagcttgtagaccaatggaaaaggcaaatgtttttcagtttcaaccattttctaggacaaacttgcaatatctttgcaattagcaaaggcagcatgtctccttacatgaagaatatagtctccaattgttcccttatgactccacgatcatgatttgagaaatcctcatcataaatttcagcaagccgagtaagcttgttgacatcaaaactacttcgaccacggaatcctgcacttcttcgcccgcccgacggggaacgggcctatgatcgacggcaccttccgctccatacgcaacggccaccgccgcggctggaactcagttctggaccactgcaacggcctcatcctctttggc

SEQ ID NO: 113570 - DNA, 860 bp, Setaria italica
  Intron number 1 from transcript Si010322m (locus Si010322m .g) derived from phytozome v7.0 (chr-ID scaffold_7; pos 28 496114 to 28496973)
ctcaagaaattcagctccaaatcagaggtagtccaagttgatttgcgttcacgtttcttgttgttttcgttgtgctgttttccgtgagtccaaatcagatgtacttcaagttgatttttgcgttctcgtttcaagttgattgtttgtgttccatttggtttctttccacctttttttcgaacaacaatttttttggatgtctatagcacactcgtgcatttacagctccctgaacactcgaatttttccaccattggatggccatccgatggctcctgttcatcttcaacctagagcagcagcaggacctccacctgcacagcccacgcccccacgtgccgccgcccagccgcgacggggtagggtctcgccggagctttgattgttcttgtgctggcagctcgccttgccgtcctgagagagctagcaagatcgtaggaaacaacgttctaacatcgagatcatctcccattaagatctcaatctttttaaaaacatgtttcttaaaaaaagatttcctcaataagagtacctattcaactgaacgaaaagcaatcattaaaaaacagtaagatcaaaacagataggctgcgccacttcctgcatgggccacctaccttaccaccattgaattgggtagttgattggtgaaagctcgtggtgccatcctgattgatagaaacaaacaaaaaaatctcgcaaaagcagctttgcatgcgtgcctaacagccatttttcttgtttgtgttcagaaaaaaaaaggagtgaactttacctatgcgaaatttcccattttaaactaaccaacggcaatctttcatcattgtgctaataaggcactccagacgaggaatccgtcc

SEQ ID NO: 113571 - DNA, 747 bp, Setaria italica
  Intron number 1 from transcript Si020985m (locus Si020985m .g) derived from phytozome v7.0 (chr-ID scaffold_3; pos 49 730834 to 49731580 reverse strand)
gcgacgtcgcctacgacgtcgaagattgtctccaggtaggggtgcaaacaattacctgtttttcgatcttggttatttgtttttctttcagtgtaagaaaaatttataggggagagagagagagagagatttcttaggcaaatactcttattccgctaccatgtacgcgaggaggcctagcgctgatccttggcttgccacacggcatggtggagggatctggagctcggccgccatatgttgatgacctgcctgcttcctcaggggagagagaaattgatatcttattttattgtttggcttgaaatttaccggttccgagaaggggtggcactccgcggcgcgctaggggctaaataacaggatctttgtgtgtatatgcacaaggcttccgcaaagtagatagttagagagaataaggagatcgagcagctgacagcggccacacgaatctcaaacaccggaaggtatgtaaggaaaaatcttgtggaagattgataggattttcgatatacacatgcctaattagttgaaagatactagttcattgaattcacatttttttcattgaagtaaaaaataaatggatagattgattagttaagttcgatatgattaatgatcagctatcaaattatatatatatatatttgcatctgtatttgtaatttattagtattcatactgatgatgggttgacatacatacatacttctaggatttcgctgtccgtctagagaatcgatc

SEQ ID NO: 113572 - DNA, 971 bp, Setaria italica
  Intron number 2 from transcript Si009085m (locus Si009085m .g) derived from phytozome v7.0 (chr-ID scaffold_4; pos 43 00319 to 4301289 reverse strand)
tactttttgacgcactctctgctcgtattagaattgtatgtgatatgtgacttcactttaaatttattgtctttaaatcatgacagtccaacactgtgatgcatccaactccctccaccatgcgggggatgtcaccaatgttgcatcctcctatctacttttaacttgcacgctctttttagtataattatcacagaaccagtaacatgaattgcaatagtgggatagcgtgttgccaatcatgtttgagcataaaagaattgaaataggtcctgacaggaatgtaatcttttctatagtattattgtcagcattaatgagaaaccttgagtctttctgttcttgttggaagaacctttacattctaatgtgtggtatccttgtgatggccatgtcttggttgtgtttgcaggggttttttttttttgcttgataagcaattgaaattttgggaacagagcaattgctcgccagggtttcaagacttccctcttttaatgttttccgaacctttgctcagagctcgtacctagcctattcctagtagttaatgtttggctaccagaccaacagacagtcatattccaccgtttcttatcttacaaaccttttaacttcaaagagaatatagttgttaagtagtgaccaaagcattgcaaaaataaccaaaatgacatgatatcgcctggtttcttctcccagtactcatgattttcagtcgcctatggcatttggaaccctgtttgaggattcatccatttgcaggaggtctcttgttaagtggattttaacccttcatctagttctactcatcctgcaaactattaacatctctgtttgacctttgaaagttgtttgtgtgcttgaatgcacagctataagattcaatatcttaatagagctcattatcaagtctataactatgtatctttgcaggttaagcttcgtggaagcttgccagattgcaccct

SEQ ID NO: 113573 - DNA, 917 bp, Setaria italica
  Intron number 1 from transcript Si038959m (locus Si038959m .g) derived from phytozome v7.0 (chr-ID scaffold_9; pos 71 0438 to 711354)
cctcctctccgacgccttcgtccgccgactccgcggtaagttctagcttattgcgtgctctccacctcgtctgtttcgcggtgattccccttgcttgtttttcctacttctcgtcgtgctccgcgttgaggcgggcgagaacgtcagtgctcgttaccatttcgtcagaatttcccgaatgagtgggaatttccggcgagccggggaagctgcggcgattcgcgatccgaacggtgcgctataaatgccgggcgcccgaggttcagtctccccggtgatccctacctggcagcggtactggtaccatcccctttctgcctcgggggcagcaatgcttttggaggagccacctaatttcgacccaccttttgatcgcttgccgaaatttccgtgcactaggtgttgaggtcgtcattattaaaatcggctgtgcgagtgtgatcgacctaggcagttccacccatgtcaattattttggggggcggtcggggggcagatgagatggtacagccgttcctatcatcctgatcccgggttagttgggtcctttttatgtctagattcttctttatctttgcgggctttattatttggacccttttgatgtatagaggtttctttttagccttgtgggaagcttgattttgttacaggcataggcatgccattgtgtatttggtctcattgttctacatggattgtgaaaattgctggtacatgcgtcaaattgtgaaactgtgggaaccttcaagtaatgtgttgcaaatagtaatcctgtgaagcatgaatagtttgttttatggattaccgcatgggcaatattgagtcttcactcaaattataagacattttgcctcaaacttgcattgatccactttgcagcctgaacacccacttcgtagaaagtgctctcccct

SEQ ID NO: 113574 - DNA, 841 bp, Setaria italica
  Intron number 1 from transcript Si001529m (locus Si001529m .g) derived from phytozome v7.0 (chr-ID scaffold_5; pos 21 99637 to 2200477)
ccgttcactacaagtacaaccccatcaagaccatcatatccttgctcagttgcttcctttgaatctgaaggctaatccaaaattagtttccttttattgctataataatttcgatgattaatgctgtggttcaattgattgctaagatgcttggtctgcccttttctttccggtttaattttgttaattccggatagatgttaaggttttgattttttggcaataagtgtttgattaatttttagacgtaaggcttggtaaaactatagtatttgaatggatttcaattgtagttttggaggaaatgttgattttttattgttgggaagtgtgtggtcggttgttttcttgctttcatactaaaaaatcgatgtttgctctctgatgtatttggattgctctgaagaaagcttcttggatctggtgatctaggattgggttgcttgctaattctagttttgatgaaaatgattgcttcatgtttatctaacttgtaataggaataaaggtcaaacctgtgcttggactttggacctagttgagtattatagtcttttccactttgacaaagtttggatagtagttgcaaaaatcgtacgtcaagatcgctgcccttttctttttaatcaatgttgcttatctatcacttaacttcatgtcttttttttttccaactactaatgctagtgcttaggggagatgaagcccgagtgtgtaggtaccaaactagaatctgaaatagtcaaaacgtcaaagaagaaagctgttcgacttgctagtgcttactctatctttttgaaacgttattgtgaactttaacttttgagatggcacaagacca

SEQ ID NO: 113575 - DNA, 809 bp, Setaria italica
  Intron number 3 from transcript Si004797m (locus Si004797m .g) derived from phytozome v7.0 (chr-ID scaffold_5; pos 38 34636 to 3835444)
tttaattttgattataaggtcagtctctctttgtacagatagatctctgttggcgcgcaagatatggccatttggtttgatgggctatcatagcagttgtatattgcattttgtttgtttaacaattaaatatgtatggtatctgattcgtttgtcttatgaggtaaataagttagtactattgctgctgcactgcttgtggacattgtgtatggcaatgatagagatcattaaacatgttttgctctgacattttttcttttacatcttagaaggtctgctcattctctctttgaattagataagtatatggcttgagttgtgttgacattagtgaatgctaatgagtcatcttaggcaaccacttgatgacatcgatgtatcggctgtatcctaattgcgtgtagtgttccatgaatcatgattgggaagttttcacaatcccttttatcacataacttgcctctagtatctttttaacctgagtatgatcctcagcaggtaggttttcaatttttatttgttttcagtataagtttgacaaaaaaaagagtagagatagccccctcccctctcaagtttgtagttatgtttttaggctggtgcatttcgcgatgagcgatactttttttattacttactatttttctttttagaattttcaaatattatggtttcaccttccaatctggcgtatcttttaattctttgctttctctgcctgaaaatgtgttttaattagtaacttgattgcttttctacccttgattacagggcaaagattttagaactcagattcaaattgggaa

SEQ ID NO: 113576 - DNA, 737 bp, Setaria italica
  Intron number 2 from transcript Si030707m (locus Si030707m .g) derived from phytozome v7.0 (chr-ID scaffold_2; pos 46 029959 to 46030695 reverse strand)
gtgacggaggaggaggccgagagcctcaacaagaggtgagcttccgagcgtttaccctgccgggattctttcggggtggaaggatttggtgctctgttcttgttcagccgtctgatgacgggtttttggtcttggcgattactagatctctcgagatttacggccccaagttacggagaagtttaaatttttaggtttcggttattgatctgtggagatgcgagcagagaaatccgttggatttgagttttagctagttttgcatatgcgcgccgagttccgactctgttctttaagatttttctgttttcggttctgctctgcaggctccagaaaaaggaattgctagtagtgtattctagtgtggcatggtttcgatgttcatgtagttgccatctcaccaaatatgttggaatcttgaaatctgaccgtaccttttgtaatgttgaaggtcagttgtgagacaaacagaaagagtttccttgaagatcacttgcactgtttaaataagtaatcatgctttcgagcgctattgatgaattcgtgtcgatcatgaggctgctgatccgtgtaggtttcggcaagttctgcaagccatcttagttttattgcttattcagatttcagattagctcctgtatggagctgtgatttactagctgtggttcaccaagctgtttggagccttgatttactggttgtatttcaccaatctgttcttctttcttcaggaaacc

SEQ ID NO: 113577 - DNA, 1057 bp, Setaria italica
  Intron number 1 from transcript Si026710m (locus Si026710m .g) derived from phytozome v7.0 (chr-ID scaffold_8; pos 26 041015 to 26042071)
gagcggtggctgtcggcagcggccagcaaaggaaggtgagagaaaacaccagactcactcctagaactatgcatcctctgatcctcttgcatactagaagttttaaggcattactactagccaggagagagccagctaccatttggtgcagaaactttggtgttatctgcttaattaagatctctccagggtgttagattagattccaggactgcaggtgttaatgcagctgccggtactgttgtgtcatgtggttgatctcagcctcccagtgacaggagatagtgagaggagagagagagagtagtagatgagagagagacaggggggatatgtgggcccgcgtgtacgtttgcttgtgagttggaagcacggcagcttccaagaacagtgagtgccctgctgtttcaaaagggcagggccagcccacggcgatgtcaggcccccttttgccaatgccaagaatcttcccgttaaccacgcgcgcgagttccctggatttgttagccaacccacccaattgtttaatctcccactgtctgctcccagtctttgcaatgctccctacaatattttcaaagctgctttttaattgactgcccaaacagttttgaattccatccaaacccatgcacaagaataaaatgcaatgtttagttcacaaaaagtagaataaaaacaaagcatgaaatactttcctttttctttctgcatttctttattttcgtcagtgtgtgcatttatttacctagaaaatgaattttttttattatgtttatgatgatgcatacacatgccggttttttattgtaaaaaattattttcttccccgctgtcagctgacattgttgtacatctcaatgctcacaagaaattttatgttcccccctttgtcatttgcctttatagatttcaactaccagtacaagtttcaatgtctaatttttctaatcaagttccaacaaatctcacaacattcaactcgcatccaattctgacaccaagcacttaattctgcacaggcttgaggggaagatcgcagtagtcacggggggcg

SEQ ID NO: 113578 - DNA, 704 bp, Setaria italica
  Intron number 1 from transcript Si017267m (locus Si017267m .g) derived from phytozome v7.0 (chr-ID scaffold_1; pos 37 641604 to 37642307)
tcgcacagactcctgtcatcgctcaagaatgtatgcactctttcctttgtacctgtgtcgatctgcttcatcttggattgcacagtcacattctgtgattgcagacatgcatattcttgtgtgaaactttatgttgcatatcatggctttgaatgttgctcagacagcagttggctaatattggtcaaattaatcttgcacctggaacctttggtccacgaatttgcagtgctccagttgagcaggatgaagcatattagtgattatttatatttttcaccgtattgctgtcaatacagatgtgtagtggcattcataatctggattgattctgcagatgaagaagttgacaagctttatccatgccaataccatggcatctggggctctgggctcagtagtaactgccgcaaattatgcactatagtttcacatagtggaactgtctgtagatggctatgcactgtggttactgatccttaagaaagtatgtccttgattgctcattgtctctgatacttagtgttaacaataaataaattttgtgttgcatgaatcctgtgcttgtttctttagagaactcttagatgaaagattgttctgtctatgtaatttgattgcaactataaaatcttcatgctttaagttaccgcttttgtgcaatattagggtgctccagagaagtggagactagtgaaggctca

SEQ ID NO: 113579 - DNA, 468 bp, Setaria italica
  Intron number 1 from transcript Si036227m (locus Si036227m .g) derived from phytozome v7.0 (chr-ID scaffold_9; pos 55 790186 to 55790653 reverse strand)
ccaccaaatcaggtaacacttttctatcttggtttcatgtctgggattgcgtagctacagttataactaagaaatttctcttatttgtttgatccctcaattgaggcattaacgtaactgttgctaatttctttgaaaaaaatattctcttatatttgaaaacattagtgttcagtgagcatggcccctgctcttgcttaatcaaactgcagcaattttagtactcaacgtttaatctgatccaatccaatgattctttcttttccttaatcttgacaattggtcttatggctattccaagtaatgatcatagattttctgttttgccatatgaaattcttgttcatcttttgataactgattttacaaagttttctcaatcattcctatatttcagtatctatatatgtcttgcatattttatttgctgcagaatctccaaaaattcagagcccatcggagagaatt

SEQ ID NO: 113580 - DNA, 1025 bp, Selaginella moellendorffii
  Intron number 3 from transcript 424623 (locus 424623) deri ved from phytozome v7.0 (chr-ID scaffold_69; pos 74253 to 75277 reverse strand)
taacgtccttccccaggcaccttctttggtttgttgtttggactttgcgactggcattgggtcctcttgggcttgatatgcctcttgctcagcatataaaccctaaaaatcgtacggctttttatgcgaattcttctgagctgcgctactccaaacaatatgcttccagatcgtcttgcttcaccagcaactctcccgacgagtacctatgaattcgtttacattgcataaaacttcacgaaaagaccagcagcactaactccaacattttgaacaagcactatgtcatcaggcgtggagagcccagactccgcaacaatatctacaagcccatttgtttcatccactgttccatacaagtttgtgtgtgcttgtttttgtgatggagccacaccatagcaactaacactttctcccacacagattcacctagctcttcacatccacttagtgaatgaggagtgaaatcatttagagtctaggaaccagtcttgaaggaattttctagtggtatttctaaattaacttgaggttgagattagagcttaaacactttgggtgggagtgaatatggactccaagtagtgttagaagggttactcaaagaaatgctcaaaagtaactctcacttctggaaaggaaatcaactacaatactcctaatttatatgaaatgatgccaacttgcaattcattaatccttgccccttcctaggggcttgggccttccctttaagatggaagtgaaaaagtaaaaatactcatactaagccattaagctataatatttccccctagtgtcttgaagcaaatgttacacccaaggcttgggatttaaaggtgacctagagtgatatggtggtcattgtgccttaattcacaagtataattacgtttggtttgttaggagtggtctagtttacattctggcagaaaactatgagttcactcatactttgcattacttctcattgtcagttttgttttacaggcatatagctcgcctgtggaagatatcacactttc

SEQ ID NO: 113581 - DNA, 239 bp, Selaginella moellendorffii
  Intron number 1 from transcript 35436 (locus 35436) derive d from phytozome v7.0 (chr-ID scaffold_0; pos 4348202 to 4 348440 reverse strand)
tcgtgagtgtcctctctctctcccttctcttttttttttcttctctcttgcgcttgtgtttcgtcttccttcttccttgtgtttgtttgttccattattatatgctttcctatggctagatttctgggctttgtatctcttttgattctgagggattgtgacagctttagagttttttttatcacttcgtgccggattaatgtgggctttctctgttgttgattcccaggagcccaaga

SEQ ID NO: 113582 - DNA, 391 bp, Selaginella moellendorffii
  Intron number 1 from transcript 156060 (locus 156060) deri ved from phytozome v7.0 (chr-ID scaffold_59; pos 645646 to 646036 reverse strand)
agcttgtggagctcaagcagctttatcgtgacaaggtacgctttgtctagagttcttttccttggtttttgagtagagaagagttctagctttctctcttgggcttggagagatttttggattgatttggtcttctttgtcttaagtaaccaggccgagagctagattgtggtttgcttccagttctagatttctctcttctttgttttctcgaggctttgattcataactatctcttcaagttaatcaaaacgtatccatgcatggtttttaatctaaggggctggactcgctagattctatctatttgttctcaatcatttttaaactcactcttcgtttttctttgtttccagtttcgtacgggtggaaccgagaagctggtggaata

SEQ ID NO: 113583 - DNA, 622 bp, Selaginella moellendorffii
  Intron number 1 from transcript 410203 (locus 410203) deri ved from phytozome v7.0 (chr-ID scaffold_12; pos 717643 to 718264)
gtgatagtgttattttaaaaaaaaaatattgttaaaatattttactgtcatattggtaaataatcagaatatttcttgattataaaaacatataaagtgctaaaagatgatgtttgttattcttagcttcattatattttaccactacttattaaggaggttttttctgtgttttgactaattctaaaatgttgaaataaatcttatagtgatagaaattcatttattagttaaaaattacaaaaatatgatgaaaattactactagtttaatatttttttaataaaaaaatattattagatcaacatagcattctccaataagaaaataaaacaatttcatcataaatcttaaaagatatatctcaagcattaatctcactatagtctcaactcttaattaccttaattagataagtgagagtaaattaacaaacattaaaattactatattaataccatttaacttatttggaaataatgtagtacacgtgattagtgtaattattatagtaaatagagatttatatatataaaaaacaagttttgattatttttggttttgttttattttaaatgttaatgcaggatttcgaccatcttggaatttcctctggtcaaat

SEQ ID NO: 113584 - DNA, 437 bp, Selaginella moellendorffii
  Intron number 2 from transcript 411057 (locus 411057) deri ved from phytozome v7.0 (chr-ID scaffold_14; pos 874442 to 874878 reverse strand)
atattcaaagggtttgtagggggtttcaaaatatatttgggtttgtgctaggattatgccatgtttgattttggcatgattttcaagaatttaaatctattctagtttggaagtttttggttaagcacaggacattcaggagaataattatctcagacagctttccaaatgaaaaagcaaatgcaatctagaaagaataattgttcttggcttgatctttcgtttttctcgaaggaccaaaatgttccctccgatagacaaggaaatgctttgagaagacaaacatagtttcgcgactttgaaaagcttcaaccctctcggagatctgttcgggaaagttcccgacgcagccattgctttccggggcgggctttaaggtcactccacacctattggtatgttcggttattttgaaaccctaggttttgcgacaggcc

SEQ ID NO: 113585 - DNA, 446 bp, Selaginella moellendorffii
  Intron number 1 from transcript 88373 (locus 88373) derive d from phytozome v7.0 (chr-ID scaffold_9; pos 1087720 to 1 088165 reverse strand)
gtcatcgagacaacgggagcgcaagattcttacaggtatggctcgatcgatcaatacgcgcttccagcattgggttgctgtgtgtccttgcctgttgtgtagagcatcgaattattctaaacatcacgcattgcttttactggtttacttttccatttgcctgttctatcacttatttcctttcctagagtttgcttctttggtgccattgcattctttagtttcccttgtgagcactttttctttgcggcaatgcgacctcatggtttttcttctcgtatttgcgaacgtttcttttttttttttttttttttttgtttttgacgggagcgttgcctgaaatggtcttttctcatactgacttgagttccaacgggcattgaattctagttgctttgactgtgggattctttaacatttttctctctttttataactggcagctc

SEQ ID NO: 113586 - DNA, 444 bp, Selaginella moellendorffii
  Intron number 2 from transcript 417542 (locus 417542) deri ved from phytozome v7.0 (chr-ID scaffold_35; pos 58349 to 58792)
gagccgcctggcgggcctggacgtaaggtacgcacggcgagagcagcggttggagcgattgacagtcctccaccgccgggccggagggagcgatcgcgtctgcacgaatgctgcccagcgccagaggaggaagaagaagaacaagagcatgaagaagattcatggctttgcttttcccctttcggaaattagggctctttcctttaagcctttgaagtttgaatgttgaccagaccgtttcttggaccgaatacaaaataatctctctctagaaatttttactcgggacctttattggtcaccgcatttaaataagagcatttttgtgttaggaataagttttagtttacattatggaatttgtgttgttcgtattatttctttttatttaagtttttttttcctacttactaattaattttacaaaacttttgcagtgcaacc

SEQ ID NO: 113587 - DNA, 704 bp, Selaginella moellendorffii
  Intron number 2 from transcript 424951 (locus 424951) deri ved from phytozome v7.0 (chr-ID scaffold_70; pos 914067 to 914770 reverse strand)
ctggaactgcctagtgcctattgcaatttggccaggtcttattagaactggccaggcactattaaggtggagtcatctttaattatgaactctcaaagaacataacatagcataaggcattacaatgttaaattctgatcctactgctgcaatgccatttgaactccttgctatgaacacatgttcgcatggaagatcacccgtaggtacattccaacaaacttggcagccgatttctctgactcaaaattcacaaccactgaatccatcagagtagatcccatcagttgcttccttactcattgtattatctctacactccataaagaacccttacattgtatgcaggggtgaaaccgcacagcttgacgatccgctggaatttctcccatgtgaattgcaatcccaggagcaccaatgacttcaaaaccggggagattctttgagcttgaaagcagcgctcacggcactattgggcaagtaatgtttagaaaatgtttctttctattacattgatcttctgctggcttgcagatcggtggtggtgtcaacgtgtggaacacgactcgatgctagagcgagtcatgtgattgccagtgcttgatcgtcttaggttggaagaggcttgttttggacctgagttgcagcaagaaggcgagtaaattccttgtagtaacatatctaaaagaaaatgtcttgtcagg

SEQ ID NO: 113588 - DNA, 255 bp, Selaginella moellendorffii
  Intron number 2 from transcript 431704 (locus 431704) deri ved from phytozome v7.0 (chr-ID scaffold_165; pos 205663 t o 205917 reverse strand)
tgcacattacagaggttcgtttctgttttccagtctgtcttttaactcctcaaatgtctttttcagtctgtcttttactcctcaatgtcttgatcattatgaagaagagttcgagctaaaatcctttcaaaacgcaaaaccagcagaaaacacagaaatgctgccactttggatttatctctacgtccatctgagcttgcaggtctgtatggtggccctttgaattagcttacttatcatgacttgcaggaaacg

SEQ ID NO: 113589 - DNA, 800 bp, Selaginella moellendorffii
  Intron number 3 from transcript 424978 (locus 424978) deri ved from phytozome v7.0 (chr-ID scaffold_71; pos 60900 to 61699 reverse strand)
ggtgtgtctctgaccataaccactacacccaccaggttggctgccaaccttcttgaccatttgtttcgaataaggaagacaagaacccattggaactaattataccaacaaggacccaaaagaagaacaagtgggcaacatcaaaattctatgtatacgtgaggcataaggcctagaatttttgttacaaggtttgagagtgaatgaggaacttcctataaaggttatttcttttttttcataatttttattcttataggtttaagtctcttatcaaaagacatttggcacttggcaattacaactataaattattgtaataccccaatagaagactatagaaagttgattggacacaagagggtgaaaaacatagaataataaggtttttgctaaccatcttcattttttaataagtataatcactttgggaaagcaaggagaatggcaatgttatatattctatataactagtatgacggtactagtcatttgaaaaactatcaagacaaatttaaaaaagcattagagttatatgttgttaataggctaataaacctttaaataaagacccattggatcttcaagattgttaacttgttacttttagtaactaaaagcactttcatttgtggaggtttaacattcttttcaatttaggtggaaatgacgatcaataggctcaaattcatgagcaacaataacaaaattttggccaaaaaaccaaaatttttataatagaactttctcttttctctattttaggtggtcttgagtagtagtaacctaataattgtcca

SEQ ID NO: 113590 - DNA, 332 bp, Selaginella moellendorffii
  Intron number 2 from transcript 424978 (locus 424978) deri ved from phytozome v7.0 (chr-ID scaffold_71; pos 61699 to 62030 reverse strand)
ctgaggtagactaagtttagtttttttttagtcgaattttttattggtaatatagagtttcttctttgacttatgatatttatcttcttattagacttatattatttagctttttcttggactaaaaatatgtcttaaggtttgaatagaattgttggtttgtcctgaactaatcatttaaacatcaacttttgtatttggtaaactatattgactttcattgacttgagcttagctcaaaaactacctagcccctttttttgtattcttgtttactcacttgcaatcatttgataggtttatcttgggaggaattgcagtcaaagtggtgg

SEQ ID NO: 113591 - DNA, 606 bp, Selaginella moellendorffii
  Intron number 1 from transcript 431837 (locus 431837) deri ved from phytozome v7.0 (chr-ID scaffold_172; pos 145347 t o 145952)
ttgcattggaggaaagtaagagccactagaggagttgggcactagaggaaaataagagttgccaggtggagagttgggcattatacacaataccatctacactaactaaccctaaccgaactcaaatagatataattttctgcattgcactatgcaacaacgtttggtttgctttgatattgtcaatttttacataaataaaaaatttatatgatgtactcattttaatacaattttttattcatatgtacttcttgtttatctctcaaagagttcaactaatgttttttttatcaattttattcttcctatagcaatcttaaagcaaatagtgaagaatataagaaagaagtcctacactcttgcaatactaaaatcttgcaaactttcctttaagaacattattactagtcaaaaagttcactttttttgagtagtctgatgtgtttgtctttatagcatgtccataaacagaaaacaaggaactcctcatagtagagtatcacagtgatagaagaagtttgagcttcttctccatgcaatgggcaacaatataatcaagtggctgtagtgattgatacaacagttctcctggatcttgcttgt

SEQ ID NO: 113592 - DNA, 859 bp, Selaginella moellendorffii
  Intron number 2 from transcript 409853 (locus 409853) deri ved from phytozome v7.0 (chr-ID scaffold_11; pos 1439723 t o 1440581 reverse strand)
gtgaagtgtgcaaaactaacttttttttccaggggagggagtgtgaacaagaagcggaagtttgccttctgtttaaagtgatctatctgtctcttcaatacactttctgctttctctctcctgcagtgaagccattctctaagctccttaaccttggagcgatacatggaagattagcatccagctagcatcaagctgaacatgccacatttgtcatttgttgggtcatatttgacatcagtctagaaaaaaaactgcataaatttctgttgcagtctaaatgtccaacattcaagtctcatccaaacaacttgatttcttcagcaaaccaaaataatttgtattcttagtctcatttccagaaccataagcaggtgcatggtttttcagtgcaccacttctttatattcatcacctaatggtattgtctctatgaggcttcttgtcttaacatgttctttgggttcctcagtgtatatctcttaatctttgattattttaaatttatttattaattactagtttcttctgaaattttattttccttagcttagatcacaaagaatcgtcctaattttaaatactagtaaaatatcccactgatatcattgtaattgtagtctgttgggttgctcttgttcatatctctttcagggagcattagctttctttatgaagaggcaatgtgaagagatgctttgggcttagattctagaggtagggtatcatggatatcactttataggtattttcaattcatttaagaaaggaaaatatatttttaaacatcgttaagcagcactaatttgtattatgtcctaaagtactgtacccagggacgtgagcgggttggaattca

SEQ ID NO: 113593 - DNA, 592 bp, Selaginella moellendorffii
  Intron number 2 from transcript 423899 (locus 423899) deri ved from phytozome v7.0 (chr-ID scaffold_64; pos 212472 to 213063)
caaggtaacaaggagatgacgttaatagcaaccactcgctggaagaggattgtgaaaaagatgcaggctgccggcatgcaacaggactagaaggcttgctgaactagctagaacaacctttgcaatgactacaagtgcgtttgtaatttccagaggaaaactaggaatcccaactactttagcttaagccatgaggatgtgaagcagcttatgccaatgaagctaaacttgaaggtggtcctagtcgagtaaacaactactacaatcgtcaagtgccttgagtacaagatttgattcccagagacagtagcggaggttaaagttgtggctgcaaattttcaacaaatcaccaaaacccatctccctaatgtggctagggcaatcaactatacacatttcaaaattatctgactagttggcccggatggtgagggctactttgatcgaaagcaacagtacttagtgatcttgcaaggagtttgtgacgctcagaaaaggttcttaagtatctatgcaagctagctaggtaattacttttaatttttttcttctatacatttaattggtttatttttttcccaagggagtgttc

SEQ ID NO: 113594 - DNA, 333 bp, Selaginella moellendorffii
  Intron number 2 from transcript 402098 (locus 402098) deri ved from phytozome v7.0 (chr-ID scaffold_0; pos 684650 to 684982 reverse strand)
tctcccctctcactttatagttaaagttttgcttggtatgtttcatctattctttatattcttgtttccagaatgatagtgcatcgtcggattctgtgaactctttcaatgacggcctccggtcattctccaaatcatgtatgtaggcgtcttctcatttccagatttgatgtgtgacttcgttttgtaggtcttgcgggcttcaaactgttttgttatgacactgattttcatcgatctttctggcttgagctactttgcatggagttgaagaatacacactgctcatcgaagcgattactaatgactattatttattatgcttccaggagt

SEQ ID NO: 113595 - DNA, 679 bp, Selaginella moellendorffii
  Intron number 1 from transcript 432180 (locus 432180) deri ved from phytozome v7.0 (chr-ID scaffold_200; pos 17301 to 17979 reverse strand)
gaactttacaaggtatgaggaaaaattcgaacttgatcagaagatttccatgattttctgagtatacatctattcaggtatcttttctatcttgttgtgatgtctaggccattttcttctcacaaacttgctcatggacaaaatgaaggagaccaaggacagtgtttgtcaatctctcctccattgcgcatattgccttttacagcggtggaatccagttctcacaccttaatgacaaagcctggtacaccaaacaactctcgtttctcgtgagcagttctgatgattagggctagttctatatagaatggctcgttgtcatttggtatataatactatatatatatatgaataattaaaatatattttatattgcaagaaccactacttccttctaactgtaagaaatttttggcttttttaaatactatagaataccattatctacataaaatataaaactatttttaataaaaattattgaaaaggaaacatattttcagctgggatttatatcagttgtaagatggatgttgtagaaaatgctattgttgaagactaaaattgatttagaaattttttcttataaagactctaaaaaataatgatattctattatatcttcctttggatggagcttcgctttcttaaacttctttgattcctcctacaggtggtt

SEQ ID NO: 113596 - DNA, 578 bp, Selaginella moellendorffii
  Intron number 1 from transcript 8429 (locus 8429) derived from phytozome v7.0 (chr-ID scaffold_6; pos 751194 to 7517 71)
cttgcaggaaagggtgagaagcaatttgcgctcaaagcggaccgagtccagtaagtcttcgcgttttcttctttgatagtatcggtccctttctccttggatcatctttgagtgttttaatgacatcctttttcaattctctttggtccttgtttgaacttggtttcgtcttggtcatcgtttcatcattttgaacttggcctttcatattcgtcatagcttctgtcgctctttagcattgtctgccagaattctagcccaaattcttcctgtgaatggaactgtttcattcttttgatctcgttctttaagtttttgtttttgttattatgtttgccagtccccctgagagaacttcccgctccgacaaagtgttccagccctggaatcggtccacaaatgcttatttgctgtcattccttgtttagtattgttcgatcctgttgtttagctatgtctgtcagtgtccccgaaaagctagcgttctaagttacagcttcgcatttgaatcagtccatcttccacttgacattcttttttcttcaggtactggctctcggttggagctcagccttcca

SEQ ID NO: 113597 - DNA, 927 bp, Selaginella moellendorffii
  Intron number 1 from transcript 132312 (locus 132312) deri ved from phytozome v7.0 (chr-ID scaffold_112; pos 438967 t o 439893)
ccaaatccaaacgcggtgtcctacaattccatggccgcggcatatgctcaaaacgggaacctcgatcgagcaaaagagatcttcgatcaaactccgagaaaggatgttgggtcgtggaatggaatcattcaagcgctttctcaagctggatatgtcgaggctgcaaaggaagttttcgaggccatgccacagagagacattgtatcgtggtctactcttaccgcagcatatgcccaattggggcattttgaggaagccgagagtttgttcttgagaataccagaaccaaacgttgtgacatggaacacgatgatttccgcttatgccgaggtcgggcgtacgaaaaatgccatgttcgcgtacgacgccatgccgcagagaaatatggtgtcaatgaatggattactgcgtgcctttgggcttgctggggagacgaagagcgcagccatcttgttttacaagttgcccgaatgggatgtggtctcatttacaacaatgatcatggtgtattctaggagaggttgtgtggaggaagcaaagcttgtgtttgattccatgcccgagcacgacatggtagcgtacaatgccatgcttgtgggatatgccgagaatgggtatcttctggaaggggaaaggttattcttttctatgcccgggaataacttggaaacactgcatgcgctcatggcatcttacgcacagcatatgcattttgcgaaagctatgaacgttttagacgcaatgcctgtacgcacaaccctgtcatggaacacaatggtggcggcatatgcccaaaatgggtatatacagaaggcaagatccatgtttgcgctgcttccaagagcaaatgttgatacttataactcgatgatcaacggttttgcaaaggctggatatggaaatgatgctatcattctgttttatgag

SEQ ID NO: 113598 - DNA, 655 bp, Selaginella moellendorffii
  Intron number 3 from transcript 403164 (locus 403164) deri ved from phytozome v7.0 (chr-ID scaffold_1; pos 28994 to 2 9648 reverse strand)
actttgccacaggcactagcagaggtcacctatccaactttctaggctttttttgtgtccaaactcaactcataataaaagtgttagttttttgtactagaagggaggctcttaaggcaccttttcaatgtgtgaggcattgttaacttcagcaacatggtcaacataagtcaaaggaaagctcaacagttacattaaggcattgggaaaattcacctagggtaagtaacttaacctaccttaaaagcttgggggtgaggaacctcaagatgaggcctagggaggctagacttttttatcttttagtcctggatcatagaaagttttttttggagattttataaattataaacatgttcacaaattaaaaaatatataaattaatgtgatttgaaactctttgatcactctcataaaatcctggacatgatgacaagaatgtaatctcttgagattagagaggtctcattttgccacaattctaaacaacattgatttaaatttgaagtttgatctagtgtctaaccttcctcctctcccctgaaacttctagaagcattcaaggtgaaacattgcgacatttgagtttaaaccctgaacaattacatattttcttccagagatcgtttccactgagtgaggaagaatatctcct

SEQ ID NO: 113599 - DNA, 556 bp, Selaginella moellendorffii
  Intron number 1 from transcript 80113 (locus 80113) derive d from phytozome v7.0 (chr-ID scaffold_3; pos 1227482 to 1 228037)
tccgacttctcgggagcccttcgtcgcgatcacgggtaattgtcctgccgcattgtctgtttttaggattttagatctagttcctcgtcgatccagagttttattacctcttgtttgatttttcttttgtttgtatctttcttagctcgaagagtttgtcttgatttcatttaatcgatcattttttgcaatatgtctgcaagtttgatcttgtttttgctgtctacgaaccaaaagtttcgtgctgtgctcttgctgttgttaggattattttttctactttcagaaacttctgaaattgtctgttttttcattggattccttcttgtttgatatttctttcgtttctcttgaattgctcgaagagtttgtcttgatttcttcgatccatctgctgtcaagtttgatctttttgctgtctacgaatcaaaagtttgtgcggtttaagcttcatgctatattggctgtgtgctctaggattgttttttctactttcagactaacatctgaatttcatgcagcgtgtacacgccgtgaggtgaacaaagcatttcac

SEQ ID NO: 113600 - DNA, 769 bp, Selaginella moellendorffii
  Intron number 2 from transcript 109484 (locus 109484) deri ved from phytozome v7.0 (chr-ID scaffold_38; pos 1620669 t o 1621437)
tggtaagcctttcttcttttgcgcatcctaacgttgatactagattactatttcttgtttgttctttcgcctctctcgccggatctttgtttcttcttttctattccacctcgtttctcgagttcgatcgatcttctcgtctcttttctccgctctagtgattttttttgtttttgcttttttatgttcattatcagtcaacctttgtttagtttatctttcaatagttctctttcggtcttcttttacgtctttcatcgagggatccttatccaagtttcgtctgatttgggagaagattaagttctctcgcctcattcttttttttcctcctctcatctttgctttctcgaactcgatcttcgtgctagctttctagagtttccttctctttcttggcaatggcttaagctcatcccctttgctttcatttttctttgttttttcttttcctttctttccctcgagaagggtgatcgactgtgccatcaaagagtgatttttttctctccatctttgccttttcgagcttcgctcttcttagctctctggagctttgacacttctttctctctcgtggcaatgtccctttgctctcgttttctgttcttatcttttcctcgacaaacgtgatatgctgtgtcatcaaaagtagttttttttcttcctctcgcatgatttttttttgtattttttatttctggtgatggagatggaactaattgtgtccttaaagtaggtggatcttgcttggtcaccagacgactcg

SEQ ID NO: 113601 - DNA, 675 bp, Selaginella moellendorffii
  Intron number 3 from transcript 417874 (locus 417874) deri ved from phytozome v7.0 (chr-ID scaffold_36; pos 451573 to 452247 reverse strand)
attccactttgaaatccttgtccttgtaggaagtaaagcacctgaagaattgatctataacatcgcaaaaagcaagctctccttcaacaaataagctcttcaacacttggcatcataacattgataaaatgttggagagcaaacttgagaatgtgatgaaggaaaagccctatatcactcagagtattgtggttgctgaggagctacttcaagcatgagatacaaagttccttactagtgccccacactagcataacacttccagaatatgtccgaggatttcaagaactagccgggccaaccatttttctcacattgcatggcatataggtatattgcaagaaattaccttgcttatttaattatggctcttttgtaggtatttaaatcattgcccaggtgctctaatgtacacagcaagtgtttttctcaaactcttaactagtgagaagaagcttagcatatatgagccagagttccattgtcccactgcataggagtgaaaactttgtccatggtacttggaattgtggaggcaaatgccattatcaccttttgagcttgatctctacctcgagtgtcatctaggtttgagaagtaaaacttcctagtagtaacttatgtttctactttattgtagaggcacttttggagggagtggagattgcctcagga

SEQ ID NO: 113602 - DNA, 450 bp, Selaginella moellendorffii
  Intron number 1 from transcript 418362 (locus 418362) deri ved from phytozome v7.0 (chr-ID scaffold_37; pos 1536424 t o 1536873)
ggtggatcatcccccccagctgcgcgtacatcgaggtccaagaaacaagatccctggccggcatcttgcgaaatatcctgcgctctgcccggatggacggcggcgccaggatcgagttccaagacttttctttctgttcttctccagtttatttttcatttgcttgatcattggaccccgcgccaatcaaagtggtgacttttctttggcaaggggcaaagtgggcgcggtcgaagatcagggtgacttcagtacatgttaggccttcacgactgcggacggggtggccagttcttttgggatttatcatccctctccagggcgtgccgtggctctccaagcagcaattgattaaccgtaatgccaaaagttcgtgcctttgcttgagttctttgcttagcagatagttctacaggtttcgaccacaaaggtagtgactttgcattcgat

SEQ ID NO: 113603 - DNA, 798 bp, Selaginella moellendorffii
  Intron number 2 from transcript 418242 (locus 418242) deri ved from phytozome v7.0 (chr-ID scaffold_37; pos 844232 to 845029 reverse strand)
gagtgagtcgccactcctagttcgcagcatgaaaatcatgccagacaatggagtgcgtcgtccctcctgcttctcagcatgagacacaagcttcaactcatgatcaaattaaagaacaactagttctgccgtttgtaattaacaagtgcaaaagctagaagtttaaattttgaacttgtaacaacttttaactgctgagaaagaagcttttgacagagagaagcaaagtaatgctctctgctatcaataactactctgaaaatcacacgtgtgaatgcatgaacgttgatactcatgcgggagtagatgataatgctgaacagagagatagggattcatcctctagctctttcagcttcgatctgcagcgaatggcctcttcaaacagcatgagtttgtctccagctcccgttcgtgctacttccgggagctcatgcaactcatgctgctcgggcatgtgctgcaatgttcgtttcttcagcgagcactatggctggaccaagcatcgctggtccaagccttgctgctggacctagcacgaccctgctcctcatggcatgacgaccccggagcttttttgatttggttattcagaattccaaacaggaattcaacactgcaagtctaaatggttatcaaactttgcaagctaaacttgtcaagggtgaggtacctagattgctttgaatcaagactccaaggcagtgttgaaggaccagcaattaatctctcctgatgctgctctctccttatttgataccaggtttgggcatattgttcagacttctcttgagggaa

SEQ ID NO: 113604 - DNA, 636 bp, Selaginella moellendorffii
  Intron number 1 from transcript 403006 (locus 403006) deri ved from phytozome v7.0 (chr-ID scaffold_0; pos 5940521 to 5941156)
gtgatagtgttattgataacacaacaaaaaaacaattgttaaaatattctactgtcatattggtaaataatcagaatattccttgattataaaaaaatataaagtgctaaaagatgatgtttgttattcttagcttcattatattttaccactacttattaaggaggttttttctgtgttttgactaattctaaaatgtttgaaataaatcttatagtgatagaaattcatttattagttaaaaattacaaaaatatgatgaaaattactactagtttaagattttttaataaaaaatattattagatcaacatagcattctctaataaggaaataaaacaatttcatcataaatcttaaaagatatatctcaagcattaatctcactataatctaaactcttaattaccttaaatagataagtgagagtaaattaacaaacattaaaattactatattaataccatttaacctatttggaaataatgtagtacacgtgattagtgtaattattatagtaaatagagatttatatatataaaaaacacaacactaagttttgattatttttggttttgttttattttaaatgttaatgcaggatttcgaccagtcaaactcgtcttggaatttcct

SEQ ID NO: 113605 - DNA, 375 bp, Selaginella moellendorffii
  Intron number 1 from transcript 431777 (locus 431777) deri ved from phytozome v7.0 (chr-ID scaffold_169; pos 203897 t o 204271)
taaggctgtggtataaagcagaattatgggcagattgtcctcctagcaaaaaatcaagtttcataattttaaatgatcatatctcaaatggtaatggacaattgaaacctggggctggttattttttctagatgtagactcttcaggctaatagtaatggatatcattttatcaaatgtaaaacaacagtagtagtactactgacccaaaacgaacaacaggacttggagcatactgtgagaattttaagaagaaagaagagtggtcaactataaatcttgatgagttcattgaaaataatcagggtaaattaaagtgggtggttgtataattacataatattttaatttgttttttatgtttctaggagattag

SEQ ID NO: 113606 - DNA, 675 bp, Selaginella moellendorffii
  Intron number 2 from transcript 425287 (locus 425287) deri ved from phytozome v7.0 (chr-ID scaffold_73; pos 476517 to 477191 reverse strand)
tggcaccagagttcgtgcaaaagtaccttggagaggtaagttctttctactcattttttgtaagctctcaacaggagaactttcatgtcgaaacgtccacggatgatgcgcgatggcaagcttgccaaagcaaatgcgccagcgatcatctttatcgatgaagtagccttaggactcaagctctaggcaagagctctcgatggcacgttgcaagctttgctatggcggttatgacaaaaaatagggccgggatggcagaagttttatgcctggatgtttgtgaagattagacacaatatagacagtgagaaacttcgattaccataaggagaggtttttgtagagaaccaactccagagtttcaaagagctctcttacaccatccttgaaacaagtaccaccacccccatggtctccaaccactcagcataattgcaaaggaggctttgtgaaatccatcttactttactgtcacttgtttgaggttgactggtgatgggcttctgcaatgtttttacttcttttgggataagatgccatcgccactgctcgctttgattctcaaactggcccagacagggaagtgcagagaattttaatggaacttcttacccaggtttttctttcctttccattttctaaaaacctttgctgaaagcgttctcttgcagttgg

SEQ ID NO: 113607 - DNA, 591 bp, Selaginella moellendorffii
  Intron number 3 from transcript 410296 (locus 410296) deri ved from phytozome v7.0 (chr-ID scaffold_12; pos 1385986 t o 1386576)
caccctgatccggaaaagttcaatccatctgggaggtacgagattctcacccatgctctgtaactctgtctggggtttttcactagaaatatggagcatctccattcacgttcatacctttttgggatgggaaatcgaacttacgaacttgccaagcttcaaatattcattgtcatccattacttcattattacaggtgaagatctattatttgtgccattattcctttatctggggtttgtaggtggactgccttggatcccaacagcaaagtttcttacttgccacatccaagaccacgagacttctattctgtaagagtttcaaaacttctgtaattaaaagaaaaaaaatactttactgaattataccttatacaatatgataccttatgcattctcatgcctccactattctaatttgtccccgtcacttattgacttatcacaaggagcgaatcctgctttgaagtcactgcctcgacaagatgaaactcaaagacgagaagatactcaaaggcaggcttgccaagtacattgtagaggctgtttgtaagtcccaaatgtttctcatcacaggtctttggaggac

SEQ ID NO: 113608 - DNA, 652 bp, Selaginella moellendorffii
  Intron number 1 from transcript 7704 (locus 7704) derived from phytozome v7.0 (chr-ID scaffold_25; pos 953403 to 954 054 reverse strand)
cagtgcgctcaaactgcttgcgaatcgattccgtactaccaaagcttcttgaaggtgtttctttgtttctgaattttctgaatttttccagttgctgtggttgataacgtcctcgtcgagacgtttcaaaagaaactccagatcaaaagaatcgcggaggagtttccaggcacgaagtttatacttctcaagcccgtaggacaccgggtaaatgctcaagaggcgtatggattcagctgtaccctcagcaggccgctgcgacagtcgacgctcaaagatgcactcctcaagacctttaatcttctcggctttaaaagcttcgaagaagcctcacgtaacttccttgttctcttgatattctcacaagcaaaatcttctactccagggcctgcgttggcgagcagtaacagatccaaggccggggacaaggctcaaaccagaagacaccccaaagtccttgttgtcgtaagtttttttcgctcaattccacagacaatgatcgtttactttctacatttctcgcgaaacttttaggaagacaacaaggtgaaccaaatggtggcgatccggctgctcaacaatctcggctgcaccgtcgacgtcgcttgcaatggccaggaggcagtgtcgatcgtggacaagccagttgagt

SEQ ID NO: 113609 - DNA, 694 bp, Selaginella moellendorffii
  Intron number 2 from transcript 424637 (locus 424637) deri ved from phytozome v7.0 (chr-ID scaffold_69; pos 191999 to 192692)
aaagtatcaaaccaagcaatatatcattttgtgaggtaagtttttctttaatattatttagtattgagtttttatttatttagatgaaagctcttcaaacaaatattacctgaaaataatttttttctgaagtggtaaaagtcattaagcacaatggatttacacataacaaaaactgattcatacatcaatgactgtttgctatttcataaggagaataaagactttcaattttgtcaaatttacaacactaggaggtataaagattttaataattttatacctaagaaaatggtgactaatttcttattatacttcaacttcaagaacaattttaatataaagaaatagcacaatatatgatttattattttgatcattaatcctctgatgaaagaatgagaatgcctacagatggctcaacttggaaaacgttcaaagatgattatccaaattttactacagatctaagaaatatacttcttagtatggctaattctctaacaaaactaatggcaaaaccatatttatattacgtaattattgcagtagataattttataccatcaactctagcaaataaattttcgtttattataattatactatgaattaatttagataataatttaatataattatatttgtgacatccaaaggtacgatctaacagctaccagcggcttcaattgca

SEQ ID NO: 113610 - DNA, 936 bp, Selaginella moellendorffii
  Intron number 1 from transcript 424553 (locus 424553) deri ved from phytozome v7.0 (chr-ID scaffold_68; pos 384961 to 385896)
tcacggtgcttgctcgtgacacttttgagaaccaggtaagttatttctcaactttcactttccttgcttgcggatcgtgctgcctgtctcttacttttttacgtttgagtttttgtcgcttgtgattgtgcataaatttttttgttttttatgctttcttttgttacaaattcgatgagctattgatgattttgcttctttcaggaatcaatgatgaaggctagtaatttggggcgaagtcgttggttcaccaagctaaatcttggttttggatactggcaagtacggccgaagaagatattcctaaaactgcttttcgtacattatttggtttgtatgagttcttagtgatgccatttggtataaaaaatgctccagcaactttttaacagatgatggatgaggttctttgtgatatgccggtggtgactgctaacttcattaatgatgttttgatccactcgaaggggacgtgggaggagcatatttgtgatgtttgtaaagtgttggatcggctacgcgacgttggtttaaaactgaagcagtcaaagtgtgtgtttgggtccaaggatacagcttatcttgggtatcatatttcttgtgagggtttgcaagttgatcttgacaaacttgtggctgttttaaagttctctactccgaagtgtgtgaatgatgtgcagcgcttcttgggcaaggtgcagtatctcagtcattttatagatcatctttctgatcgcactgcaccattgcgagtgttgatagttgagctgctggtctttagcctcactcggcaaaaagaagacttgggagaagctgtgctggtgatgaaggtcttgtctgagaatcccagcactgcataactgatcaggcatgcacaaggtgcggtcgtgtttctcgtaactttactcggctgcgaggacgaggacgttaattcga

SEQ ID NO: 113611 - DNA, 781 bp, Selaginella moellendorffii
  Intron number 3 from transcript 425552 (locus 425552) deri ved from phytozome v7.0 (chr-ID scaffold_75; pos 207204 to 207984)
caattatccattgaagactcccaaggtaatgtggaaaggagggaagaattcaaagatcttatctcttgccagaaaatgtaggtggtgtttagaatgcaaatctatcactgcaacattcatcccagcagatagatcttcctgaaaattcttgaggagaattggagtccagctcttacaatctccaaagtttttgtttcgatttgtgcattgctgggcaagccagatccttgtgagttttctcttcgtttttcttcctcgtagttgatcctttgatgggaagtatcaccgggttatgaatgctcttgctgcatctcttgcatggtctggcaaggtgatggtggcactctgcttccgcatccaaccatgcacaacattatccaccgatatgctcatgctgggatcccttggattcagcacccatctcttttctaggcaatccttcgtatatccggaacttggcttgaaccactccacagttacattgaaggagttagtttctgcgtcctcctctgcatcagtgatgcagcgccccacccatatcatttgttttttattactgggtctgacaagcacgaccattcctttgcagacctgtactggattgaatgctctgcaaatatttgtctgaaatgctggtagcacctgaaagttgtgacacacagggagcttcaggaagcaaatctttttgaacaggtccaagcactttctgtttcaggttctagagcagagcttttagctctttgcagcacctccattgtggcctggagattcgagagttcca

SEQ ID NO: 113612 - DNA, 418 bp, Selaginella moellendorffii
  Intron number 1 from transcript 424733 (locus 424733) deri ved from phytozome v7.0 (chr-ID scaffold_69; pos 853424 to 853841 reverse strand)
ttataatagagacataaagtggctcacttatcaaagtagacaaagagataatagctgttaaacccttatctttaatgttttatattttaggagtacatggtttggccatatggcattatatttttgttgtcacgtttggattggtgcacatgagtggcttaaatttaaagagcttgacatctttatttcctaataacatatcttcaaaatgaaaagttttatattttatattttgtttgtgctttatgttttaccaaatcaaatttattcatgtcttataaattcacaatgtcttagcggttataaatgtgtaaatcaaatttgcaaaaaatcaaagaagtgttttccaggtaatttcttaatgttgttctattaatcttgttgttaacttaaattaatctttctttgctaacaggtg

SEQ ID NO: 113613 - DNA, 972 bp, Selaginella moellendorffii
  Intron number 5 from transcript 424516 (locus 424516) deri ved from phytozome v7.0 (chr-ID scaffold_67; pos 1043087 t o 1044058)
tcaggaagagctataaaagtaaggttttttacttataaaagtaaggttttataaaagtaaagttttttacttataaaagtaaggttttataaggtttttttttataaaagtaaggttttttttaaagtaagaatctcatggagatctttaaattaatcttggatgtataacacaataattccatatgtgccatggcatataaggaaatagagttttaacaaactctattataagaaacaaattttttattctaaatttaaaaaatataaatttttaataccataaggtccacaataccatatactattattaacataaatactctatataagctaaggtttttataataattgaatatgcacatttttgtattccatcaaatcccattgtgaatagtgatggaaaactatactctagcaaatatagaaagatagtatatacgtgacaataaaaaaaattaagatctatattatttacgctttccaatttgtggtatgtttttcaagaacagctaaaaattatgcttttttttgtgtttttgtcgtagcaatgtgggtaaattactcgtaaatcaaggggactgaattctatgaagaggagacaagttttagtcacttggtgtttcagacctttattggcaaccatccaggtcaaagcaacatagctacaatgatgttgttcaatgagtggcagaggagttggaactggatgatccctcgcaggtccggttgacagtactcgacgaacagtagagcacatatcaaaacatcgccttcgttactcttgtgctacaggttctttactttgagacattggcttcgcctacctcgctcatggaaaaagcattaaacatatctctctatgatgctagaatcgtcaaactaagcgcctgacacatttgtcttgtgattttgtgaccaaccacttcgtttctcaggtcgccgctcccaacgtacctgtgagtgagaacag

SEQ ID NO: 113614 - DNA, 529 bp, Selaginella moellendorffii
  Intron number 2 from transcript 426231 (locus 426231) deri ved from phytozome v7.0 (chr-ID scaffold_81; pos 563656 to 564184 reverse strand)
aggagagtcagtgcacgaaaaggttgaaaaggttcagaagctgccgaattggtttattgtctaccgtaaccctaagtttggaaaagttgacggattttaatttttagctcaaagttttattcttttatgtttttgattcttcaaagtgaagtctagtttatttttggatttttttactagtataaattaactagagataattctatttaatcaatcacatagatatgtcagatttggattgtgctatggatattgttcagtcgtcaccagctgaggatttgtctacagaatcaaattcttatgaaggtttggtttttctctttattccttagtatttcttgatttatttctctttggttttgtagtttcacaagcaaagaggacaaagttgaccatcctaaaagccactattgcatcacttgtctttgaaaaagcaaattcaaccaaaattcttgagctgaaggttttatctacgtatggttttgaaatcgttttttttctgtagttttgatttgctttttgcctaggt

SEQ ID NO: 113615 - DNA, 530 bp, Selaginella moellendorffii
  Intron number 3 from transcript 424964 (locus 424964) deri ved from phytozome v7.0 (chr-ID scaffold_70; pos 953128 to 953657 reverse strand)
gcgcgccccctccccttggagagtatcaagtttgttgtttgctgttgtttgatgttgagctgactagagaatagagtgatcaaggggcatccatttccattgccatatatttgcatgtttcagagaaaaagccaatcgctggaaaaatgttgtgatcttgtgagttttgattgagccagattatatcagctagacattttctaacaatgtaaagcgatctcactcctctagaacgctgccaaaacttaatacgcttgtgatatgtgtgaagataagcagggatcactgaagatctgaaggcacgtgttcgatccacgctcagaagtgaaggtttagggtatcaaatgttttttttaatgggaacaattatcaatgattttggcctttattggggctgttttattagcacaacctttaccaaattttaacttatattcgatgaacagcctttggatgaatttcgctggcataaagcacataaactcggccctgtagataaggcaaaaatcccgtttgaaaggcttgacaaa

SEQ ID NO: 113616 - DNA, 464 bp, Selaginella moellendorffii
  Intron number 5 from transcript 431942 (locus 431942) deri ved from phytozome v7.0 (chr-ID scaffold_179; pos 6617 to 7080 reverse strand)
atcgcaactattctgaaaacactcggaaaagtctggtatggtgtttgattttctctatctctctctctgattttatctgtattaggtataaaatttccttttcaagatgcttagcactgggcatgtgggtatcttctttgtgctttcgacaatctacttgtttctgcaattgtttgtggccaatacaatctagaatgacatatggtaacttgcagaactgaaagccaatcaccactgagtgttttgggtaccattaaacgatcgaataactgaagtattttaagcattccctatcatcaaaacagcaaagaatggtaagaaaccaggtggacttaccggaagaaacacgaaaagggcaccaggatatcccgtctcatttgtatgcattatcagatatttgagaagctcatggatatcacaaacaaatgtgcggcagcgcagaggacgagccggacgagtgaaag

SEQ ID NO: 113617 - DNA, 497 bp, Selaginella moellendorffii
  Intron number 1 from transcript 409623 (locus 409623) deri ved from phytozome v7.0 (chr-ID scaffold_11; pos 28408 to 28904 reverse strand)
agtaaggtgttagtgtttttcattttatccactcttctttatcattctcttgtattataaattagattgttcaaaccagattttaaattatataaaactaaaacttataaaattagttctaacatactactatatacatgaataattaaaatatattttatattgcaagaaccactacttcagtcgaactctatgaaatttttggctttattaaatactatagaatgacattatctacataaaatataaaatataaaatatatttttaaagaaaattattaaaaaagaaacatattttcagctgggatttatatcagttgtaagatggatgttttggaaaatgctaatcttgaagactaaaattgatttagcaaactattcttagttttaaagatactaaaatttaatgttattttattatgtcttcctttagatggagcttcactttcttcaacttctttgattcctcttacaggtggttctggagctgggaggca

SEQ ID NO: 113618 - DNA, 369 bp, Selaginella moellendorffii
  Intron number 2 from transcript 410302 (locus 410302) deri ved from phytozome v7.0 (chr-ID scaffold_12; pos 1543738 t o 1544106 reverse strand)
tcttgcaggctgctcatctggtacgctcttcaccttcaagatttcccttggtgtttttatcttgacaacttgcctgagtacgttagctttgagactcaaaattgaaaaatcttaagaaagacttcctgggagcaaaccagggagccacaaggaggtgacagaaaatcttgacattggatagatttgcagcacaactggggccataaagacttcagccagaacagtctgatcatgcctgcaaccttctgaagcaaatttaatcaaatcaattcacttcacttttctatcacgtttggacaagaaggcacaaacttatatatcttttcccctttgttctcccagacgatttattttgctgcaaggaggtta

SEQ ID NO: 113619 - DNA, 276 bp, Selaginella moellendorffii
  Intron number 1 from transcript 424430 (locus 424430) deri ved from phytozome v7.0 (chr-ID scaffold_67; pos 371305 to 371580)
tgcccggactgggcaactgcagaaggcttctagcagtaacctagcaacatctcgccaagagtggtattgtgtgaaacttatgattaaacgagataaaacccatagtttctatatcaattgaagaataaggtttatttgagtttttttttgttgtattcctcttatggtttttttgagggttgagggtggtagtgtgccggcactacaggctgcataatagctacctagtgtgcttttgcagtttctgaaagtagcaagagtcaaaaagggcaaaaa

SEQ ID NO: 113620 - DNA, 516 bp, Selaginella moellendorffii
  Intron number 4 from transcript 431524 (locus 431524) deri ved from phytozome v7.0 (chr-ID scaffold_157; pos 76116 to 76631 reverse strand)
agcatcttcatatccactctcaggccatttctctggtcattttacaaacttgcacttaccaatctgtttctctcttaatttgactttggtttattgtgagctcatattctttcatcaatacattaaattgggtctttagcgtgcaagtgcatgctagaaattctttgactttatgtgattattttatgcatttttaattatttttgctacatattttcatgttttgttttctcatattcacaaaaggagctttgttttttattttcctatttgcttgtctttttttgtacttttttccttctatttgtgttttgatatttgtaattttctttgtttttctcaagttaaaggagatgtaatagagattgtttgggataatggagaatcaattgcaaaaggaagaatagaatctttagatgctacttgcatttgtcactgtgcttctttaagagttagatgtgttttcctttgcattattaaggtgtttaacttgaattactcccaccttataggtga

SEQ ID NO: 113621 - DNA, 954 bp, Selaginella moellendorffii
  Intron number 1 from transcript 432215 (locus 432215) deri ved from phytozome v7.0 (chr-ID scaffold_210; pos 357 to 1 310 reverse strand)
ctcctttgccgaggtcgggtttgggagcacagctggtaccttcatcgtttcaccaactttccctggaaccggccggacagagtcagtgactactgaacttgaggaaaaatgggatcctatatggctgcgaaagtctcgtgagtttgatggattcttaggacaacatgtggagacagcagggttcattggaaagctcttttgggtgatcgatggaaaccataggtggctggcattttggaagtgcattcaagagaagttccgagatgacgaagaacgacacattagtgttccagtcacacttgtcgaaccaatgactcgggagcacactgtgaagctcaacatggcatgccataagatcaacatgtaagaatttattttttgtaaacttagctaatatcgtgtttttgcaggctaaaccaatttgcgtttcaagctcatacattggtacatgacattgagcaccttcggtttatgggcatgctctcgctagaggaggtccaaacgttgtacaatcgtgaggtatttgaagcaattcgagtgaagctaggagctaggaaaggccaagaattgcagacttggtaccaactgccacttgattttctagttgctgtctgggcgaaggtaaattattattgaagtatgtatcaacttacataatgtttcttgcagcccataatcaaaggagaaagagcgtcattctttaaaaatgctcgaggggacgagcagcagaaggagatggagtggcatgcgattgagcagcgaattttgaatacgaagagaacaaaggtgaaaaagttgctctcgattgcagacatacgacgcgggcaggaatggcttgatagcattgccgagatttgttctcgcgttcgtaagttcttataaaatttgtgaaacatttcataactctttgtgtgtgtaggaactgataaagcaccggaggaactcatttacaac

SEQ ID NO: 113622 - DNA, 739 bp, Selaginella moellendorffii
  Intron number 3 from transcript 423726 (locus 423726) deri ved from phytozome v7.0 (chr-ID scaffold_63; pos 282046 to 282784 reverse strand)
ggagaggtgtatattacaaagtaccacccgaagaggtacttcatcacattcgaactaacaatgccatgaatcgaggtggcacaaactaggggattatcaattcccgatctagctatcgaactggaggataccgatttagccgacgctaaattcgtgaggctttagccactcacaatccaagtagactggaacaaaggcacatgacaaggattcgacgatggatttacaggaacaaggaggcttatgcactttgccatatgaattgtgagtattctttcatttttgcttttttgtaagcacatgtggtaacatgtttattgtagcatattgcaagcttgtaagctatggtttctatgtacatgccattatttgtggggcaactcattatattgtagcttgtgagctagctacctccaaataatcctatgcaatatttaacacatatgcacaagctattcgtcgatttagaaggcccaagtgcatctggagtgacaatgctccagagcacaatgaggctgagaaggacatgatccactgttagggtcttgaagctaagagcttcatacgtgggacatcaacacgtaattaggtactcacagtgttagagtttttccaaataaggactcataggactaaatcaaatttgttttacagcacatagagcatttgtggagagagctctttgagtgcgggttttataagcacttttttgagtctatggaagatataggaattctcg

SEQ ID NO: 113623 - DNA, 525 bp, Selaginella moellendorffii
  Intron number 7 from transcript 430900 (locus 430900) deri ved from phytozome v7.0 (chr-ID scaffold_140; pos 135839 t o 136363 reverse strand)
aagtgcgtgtgtttgctctactgttagattgttgttaacatgggttcttttgtaggttgcccaagaagactacaatgagcctggcgacgaaggttaacagttgtatccacagtgcctgtcttcatggctttttgtttatgaatgtagaacatccgcagccggctaacgagactctggtagcgacagcaacacaagtggaaggtgtggaatccgaaggatcagagcctcccttgaatgaacaagatgacgatgaggaggacgagttaaacgacatcgatcaagccggtgaggagccaaagacaagtcatctcgtactagcgcagtttgagaaggtttggctgtttgaagtttgagccacttgcaatgcagttgactttgtcttagcaggtaactagatcaaagagcaagtggaaatgtatcctgaaggatgggattatgcacctcaataatcgtgacattctttttgtaaaggtctgaatttgcttcatgttctaccctctcaattcactctctttttccaggcaa

SEQ ID NO: 113624 - DNA, 434 bp, Selaginella moellendorffii
  Intron number 2 from transcript 431532 (locus 431532) deri ved from phytozome v7.0 (chr-ID scaffold_157; pos 234303 t o 234736)
cataccgtggctacgtttttcggcagagcttggaggtgctgaaagcggcattaagttcgtggaggattgatcttgatttggattgtatggatctctataaagtttgaaacttgagtttatttttcttctttgtcttctgtgttgccaaaataactggtgtcaaacttgcttttgcagactatctctagtacttctggatgcgatcaaggcctattgctcattgcttcaaaggaggagatgataattgatccccaaagagcaagcaaaatggaataatgcttacacaatggttcaatttaaacatgcaaaatactaatgcatttgatggttttgttgctttcatcaagttatcattccgctgcgatctgaaacaccacatcgtccactgtactttcacaggtttcgagacaggtacctgggaaaggtgtattcca

SEQ ID NO: 113625 - DNA, 352 bp, Selaginella moellendorffii
  Intron number 3 from transcript 425502 (locus 425502) deri ved from phytozome v7.0 (chr-ID scaffold_74; pos 717228 to 717579 reverse strand)
gacgtcgcaacagcttatccctcctgtcgtctaaggtaccttttatgaaacattaacactgtttatttggtgcaaggcttttggatattgtgggagcatcctctatactacagttcagttttgttgcttgcagtgaggacgcgccgtcgatgtcgatttattcaaatcgatacacttgcttcgagggcttgtggaacaaagtcgaaaatgcggctcttcttatttgtgttctttgtgtgttactgcaaaggagatgtttccagctcgttgaaggtttgcttcttgttactttcttttgattattaaccgtcttgcagccgtatattgtgtaccttggaggtaaaaaggggat

SEQ ID NO: 113626 - DNA, 954 bp, Selaginella moellendorffii
  Intron number 1 from transcript 431606 (locus 431606) deri ved from phytozome v7.0 (chr-ID scaffold_161; pos 228838 t o 229791 reverse strand)
ctcctttgccgaggtcgggtttgggagcacagctggtaccttcatcgtttcaccaactttccttggaaccggccggacagagtcagtgactactgaacttgaggaaaaatgggatcctatatggctgcgaaagtctcgtgagtttgatggattcttaggacaacatgtggagacagcagggttcattggaaagctcttttgggtgatcgatggaaaccataggtggctggcattttggaagtgcattcaagagaagttccgagatgacgaagaacgacacattagtgttccagtcacacttgtcgaaccaatgactcgggagcacactgtgaagctcaacatggcatgccataagatcaacatgtaagaatttattttttgtaaacttagctaatatcgtgtttttgcaggctaaaccaatttgcgtttcaagctcatacattggtacatgacattgagcaccttcggtttatgggcatgctctcgctagaggaggtccaaacgttgtacaatcgtgaggtatttgaagcaattcgagtgaagctaggagctaggaaaggccaagaattgcagacttggtaccaactgccacttgattttctagttgctgtctgggcgaaggtaaattattattgaagtatgtatcaacttacataatgtttcttgcagcccataatcaaaggagaaagagcgtcattctttaaaaatgctcgaggggacgagcagcagaaggagatggagtggcatgcgattgagcagcgaattttgaatacgaagagaacaaaggtgaaaaagttgctctcgattgcagacatacgacgcgggcaagaatggcttgatagcattgccgagatttgttctcgcgttcgtaagttcttataaaatttgtgaaacatttcataactctttgtgtgtgtaggaactggtaaagcaccggaggaactcatttacaac

SEQ ID NO: 113627 - DNA, 767 bp, Selaginella moellendorffii
  Intron number 1 from transcript 403348 (locus 403348) deri ved from phytozome v7.0 (chr-ID scaffold_1; pos 1742395 to 1743161 reverse strand)
ctggaaggtatgtgttcttccaaagaattccctggttagaagcttctcttgtttctttgctttctttgtttggagcattggaacgatttcattgcatttctttcttgtttacacttgttctttcgctcgttcgtgtttgtgaggagtgtagatcattagaactccctggttagaagtttttttttgctttcttggttctttgcattttcattttcggtttgtttgttcttgcgctcgttcgtgttcgtgaaaggaatcgtagaaatctctggttagaagtttctttgctttctttgtttgaagcattggagcgatctctttgcattttctttctcgtttagcttgttcttgttcgtgaaaggactcgtgtaatccctgcttagaagtttctttgttttctttgtttgagctttggaacgatctcttgcattatctttctcgtttatgtttgttctttcgctcgttcgtcttcgtgaaaggaatcgtgtagaccgagcattagcttcgtgtccaccgagagcatcatcctaagcacgatcttatggctaaatcttttttgtccatttgaggcaatcagtctataacgcttccttcgccatccttgtcgtgacggggctcgaacagctccacaaagagaagtcgtcgagatttttgcttctgttttctagcgcatctacaactggtggagcatcgttctcacatttgtttcgttgcttttcttgtttattccaggagagtcgccttggtgaaatcggacaaggacacaa

SEQ ID NO: 113628 - DNA, 583 bp, Selaginella moellendorffii
  Intron number 1 from transcript 411052 (locus 411052) deri ved from phytozome v7.0 (chr-ID scaffold_14; pos 846651 to 847233)
tgccccacatacactagcacgccggtgcgatgggggtcaaatctgcatgtctgtgggcaaacaaactctgtgcaagggcaaccatcctccagcttgcacaccataacccactggtctaatgcaggagggggcgctgcgagaccatgtaaacaaatgaatgaataaatgaatgatttggtagaattattatttatctgatgggggtcggataaattctggttgcaaaaccagtttacaaaataaactttgagaagttaagcaaattatatataacatgtatagatatatctcttttttcttttcttgtgtggcacttagctctctgcttcttttcaacctctggaaagaagtgtaaaattaagtgccacataggagagaagttttagagataatacaattattattaaaattaactgaagagcgtgaaaaagttaaaacgtggtgtaaattataattttaatcatataatgttcttttgtaatgcaagcgtgaatcaaaagtattaacatctgcacactcgtctgcggttcccgcgacacctcttactgggagcctgagaggttttgttttcgtcgctccagcc

SEQ ID NO: 113629 - DNA, 585 bp, Selaginella moellendorffii
  Intron number 4 from transcript 431745 (locus 431745) deri ved from phytozome v7.0 (chr-ID scaffold_168; pos 78907 to 79491 reverse strand)
cctattgcaggtctcccttcttattcctgggagtggtagaaaggctgggatttatttattttggttcttttgattggaaactactgagattcagcgttgaggtctataatgaaaggcagagaatttatggttgccatattcttgcagtgacctggatgagattcaatcctgaaattttgtgtttattactttttttttacagttttggagccgatcaaaatatccagtattgcttgaaatttcccaacaaggagtgcactgccaatacagcagtggtgctcttgagttatcgtcactggagccactattatgaacgtgactggtcgctcaattaatcagatgccatagttgagtaccaacgctgtaccattatggggttcttcctcctccaagttgttcactggaaagcaacatggcaacatggcagtgactgctttgctgacattctcaagatttttaaacaagtggtactacaagccggtgctcaagctgggacagcctccacttccaccgggtctgcttggatggcccaaaaacatggctgcttttctcagagccttcaagtctggattaccatactctttc

SEQ ID NO: 113630 - DNA, 742 bp, Selaginella moellendorffii
  Intron number 1 from transcript 410057 (locus 410057) deri ved from phytozome v7.0 (chr-ID scaffold_11; pos 2639651 t o 2640392)
ggtattcaagctttcaattggcaaaaagtaaggcacaaataaaaaggatgccgccaagatgtatcaagatcttcaagaattacaatttcggaagctcacttcaaatgaataatatcactgactaagtgaagccaaggctcaagttctcatctcaactcttgaaatgcacaagttgagtagctccatcaacaactcaataagttcaaggttaaacttgtaggaaatccagcattaacaaagctaattgacacaatggagcaatagaagcctcgatataaagttccatttagtcatgggagagtaaaacacaataaattaaccatgcatttaagcattttcttaatagttaggattataaccttgacactcaaaattaccattttgatagtcaagactcaggaagaagtccatgtaagagtagttaagggggaaagttaacactcaacctctatccctatctctattatactccaacttattaccaatgcacatccatttactcaagatttagaatattttagtgatgtcaagtttatctttactcataaccacttgcatgaaccttttttggggcacaaattagtttctaattaattaatgtgtttgttagcatattccaaggtgagaaatataatgccaacacaagatcaatgacatcaaaagccctcttgttttctgtaaccacaacaacaaactatcataactagttttttaccaaattctctctcacaaattccaccaa

SEQ ID NO: 113631 - DNA, 804 bp, Selaginella moellendorffii
  Intron number 1 from transcript 424897 (locus 424897) deri ved from phytozome v7.0 (chr-ID scaffold_70; pos 610270 to 611073 reverse strand)
aagttgtcagagccaccttagtaagcggagaatcactctaacattaataattcatactctggaaatgttttgccacaggaaatccttgcaggaggaacagacacaagcccatgcacagtagagtgggctttgctagaacttctcaacaatccagagatcatcaggaaagcacaagaagagctcgatgctgtcgtgggtggagatcgcatggtttcagagtctgatttcccaaagctgacatatcttgaggccattgtcaaggaaactttcaggatgcaccctccagcgccattgctggtgccgaggatgtcaactcgagcttgtgtattgggtcaatcattccacgttcccaaaggtgccaccactattgtcaacgtttactccattggcagaaatccgaaagtttgggagaatcctacaaagttttggcccgagaggtttctggggtcggcaatcgatgtgaaaggccaagactttgagctgattccatttggagctgggagaagaatatgcccaggcatggcactgggtctcaaaactgtctatctcactcttggaaatttgctccacggctttgattggcatcatgttcccgggaaaagctatggttttgatgagacttttggagcagtaacttggccagagtcaccactgcaagttcgtgtaactccaaggctaacaaatgcaagcactcagtaataaatattttgtattagagaaggtttgattttaataatttgaaatggattatacctttcaaagcagagaattgatagctctacttcgccctttgttagaattctc

SEQ ID NO: 113632 - DNA, 359 bp, Selaginella moellendorffii
  Intron number 3 from transcript 109639 (locus 109639) deri ved from phytozome v7.0 (chr-ID scaffold_38; pos 135629 to 135987)
acactctttgtcacgcaggttcgatttcacagccccatcctcattaatttgattttagttcttcaacactttcatgccttgtgcgtggttttctttccctggagttttttttttcttctctcctccctttattcctctttttccttggttaaatcccagaaacctttcctcgtttcaaaacttttctctccagtgatctcgaagagtctttcttcgagatagttttttcctcttgatgttcctttcaaagttctaggatgatcctagaactttggaatttttggaattttgtttctagtagaacttacgcttgtttttttgcagtggacggtgggattcgtctcattttggtaccccgg

SEQ ID NO: 113633 - DNA, 157 bp, Selaginella moellendorffii
  Intron number 2 from transcript 432429 (locus 432429) deri ved from phytozome v7.0 (chr-ID scaffold_322; pos 8573 to 8729 reverse strand)
agggtaaaaaaagaagtcagaagtttaatcataaggtacattaccatttttttaatgatttcttctagttttatgcatgcaaaacatttgatttgtgatttattattacatttttttttctctgtttcatgttaagggagagagttctaagaagctc

SEQ ID NO: 113634 - DNA, 597 bp, Selaginella moellendorffii
  Intron number 3 from transcript 441210 (locus 441210) deri ved from phytozome v7.0 (chr-ID scaffold_14; pos 2545325 t o 2545921 reverse strand)
cagagtggcgaagaaaccaatccccagaaggtgaagaagaagaataaaaggatatcagagatgctgaagagttgcttacatccagtaccatctcactgaaagtgtgcaagctgaaaaagatatataatcatatatcagttatattttggatattctcacggccatgtggctcggatttctgccactcgtacttgctgccaacgggttcgtgcatgggtggctctctcccaattgatccaggcgatcaacactaactctttcaccagcttgtgactgcagagtatcagtccccacgatgctttgataataagtaacctcttgttagaatgatctcacgcattatgtttccttgtatgtaccacggttactgctggatgatcttgacactgcgtcctggcccggaaaatcttgttgcatggatggctcactcttggtccctctataccttgctttttactatgaactcccggtataattatattatattatttataatatatcctgtatatactggagaatttacataaaggtcatgaattcttttgagtaaggtatatcaagagaaaacgctttgatcctgtcacagttatccgccat

SEQ ID NO: 113635 - DNA, 335 bp, Selaginella moellendorffii
  Intron number 1 from transcript 424457 (locus 424457) deri ved from phytozome v7.0 (chr-ID scaffold_67; pos 646877 to 647211)
ggactcgtgacgaacgtctttgttgtcttgagcacgtaagtcaccgagttctttttccctgttctcttctaagaattgtgctatagtttccagtgttggtgaaaaatagatatgcgtcgtccaaaaagctgtgatcgagaaataattcaaagttttctcatgtttttttttgttctctcaactctataatttgttcggagaagaacatcccacatcttgggacgaacgctacctctggaaagaagcatttgtgacgagtatgaatctcgctgcattttccgagttttcacgtccttcttgcgtgagactgtgaacaaaatccaaatgccagtgcc

SEQ ID NO: 113636 - DNA, 555 bp, Selaginella moellendorffii
  Intron number 1 from transcript 410121 (locus 410121) deri ved from phytozome v7.0 (chr-ID scaffold_12; pos 144306 to 144860 reverse strand)
agagagttttttcttctcctcttcctgtatacccggtatgtgtttctttctctccttctttaaatttttttcttgcgatgtacactcacaagaatttgtagatcgatctggagcgcatctaacactcgaaagtcatgggccgaagagagctctctctgccaatccgaatgctataagcagtgtggcggactttgcttgtaaggtatgttgtggatcatttgcttctttcgctggaatttattgtgttgctcccggcagcgtcgtgaatcgtgattgattggtttctcgtgatgctcttgccaggtttgtttcggggagttttatttcgtttcgcccccgccattgcgcttgtttccatcacccatggaatgattgtccataattggtttcgttagattgactcacacaatgtgggtggcctttcattcctgggcaagttttggtgtcgccattaaggttgatgttcttctaacatcgctttatctgttcttcttttccggctttgatttgcctttcttttgcaggctcgcgcgctcgctcgagcataaatccggc

SEQ ID NO: 113637 - DNA, 487 bp, Selaginella moellendorffii
  Intron number 1 from transcript 443645 (locus 443645) deri ved from phytozome v7.0 (chr-ID scaffold_35; pos 862462 to 862948)
cacccgctgttgtgtacagggcaaggtacaattatgacatggtttgctagtttttttttcctctctatttttttgtttttctcccttggacatctttgagttgtttctatccccttgcatctttcgttcattgtcttgttttccttgcctctcttcgttttgaggtactcaaagagaaaagcatctctctggttgagtttccaagagacctttgcatcgacaattcatgtaaaatgaaataccattaggagttctaacatctcaaggctttgtccttcatagcaaatccttggatgtttgtgttggcatttcctcgttctagtacgagtgaaatcaagtaagaacatggtctgttaggagctcatatgcaatgaaaacacagtctcaagcttttaagtggagtggcagatcatataaacagtgtaaattattggatgttataagccatccaggcatagcgttcaaaaacttgtattggcaattgaaa

SEQ ID NO: 113638 - DNA, 446 bp, Selaginella moellendorffii
  Intron number 2 from transcript 412486 (locus 412486) deri ved from phytozome v7.0 (chr-ID scaffold_18; pos 283214 to 283659)
gaacgtcgcgcaagcaaacgcttctgtcaagtcaggtaagatctttgtgtggcatttcttttcttttctttgtggtgtttgattgtgtttgtgttttgctggatgctccaactttgttcttgcgcacgagtgcttttaaaatcgttactttgtttgataatgtcttgctgactttgtttcattgtttggaatcattagctttgtttgatcttgtcttgctgactttgctccatggttaaaattactaactttgcttgattttgtcttggtgattttgctccattgttcgaaatcattagctttgtttggtcttgtcttgctgacctttctccattgtttactaagttctactctcttggtctaagaagaactaacacgagagtcgtttctttattttttctgtttctccagggaagtggcagagaagcaagtacacgggcgtttct

SEQ ID NO: 113639 - DNA, 415 bp, Selaginella moellendorffii
  Intron number 1 from transcript 403456 (locus 403456) deri ved from phytozome v7.0 (chr-ID scaffold_1; pos 2617067 to 2617481)
caagcggacctggaccaaagacaaggtgccaaggccaaggagcaaaaggccagcattctagaccatcgatccacatgtttcttctcaccttagatcaaagaatcatatacaagggaatttgatttaccagagtttctagcttacctgggctgagcttaaaggtgccagcgttctgtttttttttttgtttttttcttttcctcgtttcttcatttcttggcgtacctctgcgttttttttccaacactgactcagagtataaagcaagaccaatgtaaggcagagtattgcaacttcaaacagtgagtatttaataatttgcttcccaagtgcgagaaacaactgtacgtttatacgtttttatacgttttgttctatagggttgcgacgcgtccatcttgctcgactcgaaagg

SEQ ID NO: 113640 - DNA, 779 bp, Selaginella moellendorffii
  Intron number 2 from transcript 267866 (locus 267866) deri ved from phytozome v7.0 (chr-ID scaffold_28; pos 290843 to 291621)
tggtaagcctttcttcttttgcgcatcctaaagctgatactagattactatttcttgtttgttctttcgcctctctcgccggatctttgtttcttcttttctgttccacctcgtttctcgagttcgatcgatcttctcgtctcttttcttcgctctagtgattttttttgtttttgtttttttttttttttgttgttcttcattatcagtcaacctttgtttagtttatctttcaatagttctctttcggtcttcttttacgtctttcatcgagggatccttatccaagtttcgtctgatttggcgagaagattaagttctctcgcctcattctttttttttcctcctctcatctttgctttctcgaactcgatcttcgtgctagctttccttctctttcttggcaatggcttaagctcattccctttgctttcatttttctttcttttttcttttcctttcttttcctcgagaagggtgatcgactgtgtcatcaaagagtgatttttttccgtccatctttgccttctcgagcttcgctcttcttgctacctagctctctggagctttgacatttctctctctcgtggcaatgtccctttgctctcatcttctgttcttatcttttcctcgacaaacgtgatatgctgtgtcatcaaaaagtggttctttttcttcctctcgcatgattttttttgtattttttatttctggtgatggagatggaactaattgtgtccttaaagtaggtggatcttgcttggtcaccagacgactcg

SEQ ID NO: 113641 - DNA, 469 bp, Selaginella moellendorffii
  Intron number 1 from transcript 411484 (locus 411484) deri ved from phytozome v7.0 (chr-ID scaffold_15; pos 1038043 t o 1038511 reverse strand)
cgggtaagcattgttcccgcgttggtctatacacgaaaaggagacgacgtatccgcactttatagtatgtttcttgaccacgccatacttttaacttcgtgatatctgaagggaactgcattgacagaattccaggtggctgtaatctctcccatcaccttgttaagaagaacatgtaaaacacctattttcttttctttttattctttcagtgctttaactaattttgttcatcttacaagctttctgtataactcttgaatacttcaatgaccaactttacgatgtcacggccagtttattcttaacaaggacttactgttgtcctacacggatacttgaaactgacatgtttcacgacattcaaacactgaaagtgtccatggattaagtcccttgactgccagctgcagcatctgtagtcacacgtttgtggaagatcaaatttttctcatgtgttttagtccac

SEQ ID NO: 113642 - DNA, 610 bp, Selaginella moellendorffii
  Intron number 3 from transcript 412423 (locus 412423) deri ved from phytozome v7.0 (chr-ID scaffold_17; pos 2438572 t o 2439181)
gaggttgatggactcgagtgagggatctcgataaatccacaccaagccaaagagctatggaaagcactggcaaggctggattactagattaagaacactccaactggatgtttttgcgaaaatctccaagcctgtggtttttttttatgtatgaagctcaaatagggacttgagcaatccaaccagatccaaaaatcaaattccactaaatggatatttcctaatttttgaagttaatgttttttacagaaacaaagaacaaaaagttatttgagctagaaaaaaagaaaaactgggatcatccaacgagctctgtctttagctgacaattatgtgttgtatttatcatcattggcatccaaaccctgtgttcttggttgctccaagatgctaagccttgcaagtcaggatttatcagagaacatttgagtgaaaggaatacaaagttgaaaaacaaagctggttttagaatgcaaacctggaggccaagctacaaatgtcgtggttccactcccgggcaagtatatcaatgtgcaaaaccacattggaaccatagtcttctctcccatgccaccgctatatgaatcgacatcacagctttgggagggca

SEQ ID NO: 113643 - DNA, 304 bp, Selaginella moellendorffii
  Intron number 1 from transcript 421019 (locus 421019) deri ved from phytozome v7.0 (chr-ID scaffold_49; pos 673283 to 673586 reverse strand)
ggaggggattatcacaactacagtttagaggtacgcaagaatcttagattttttctcttattttctagtttcttttgatttgctatgttcttcgtggctgttcttccagctttgcttatgagtttcttgcttttcttcccattaaactttggtgttgttggtcgggatttcttttggttttctcgttgtttccgtgctcgtatctttcatgccttatcgagtctgatcttgtcggtgacattctttattgtttcgtcctctccatccatcgcgttcttatatcacgatcgtgccaggtttttac

SEQ ID NO: 113644 - DNA, 325 bp, Selaginella moellendorffii
  Intron number 2 from transcript 419138 (locus 419138) deri ved from phytozome v7.0 (chr-ID scaffold_41; pos 276230 to 276554)
aatgtatttgagtgttttttgttggagctcattagcttgcgtgcttcaagtcttttttcgttcttgctatcatttttgttttgctaagtttcatcgttttgatctttgagttggaggatagagtagattaaacgtttgtactggagctatgcttgcgtgctcttagcttcgttaccaatcttccgcagtttttcttttcattccctttcggcagtaccttttgataatctcttcgttctcttttgacagcttagtgatcgatcttaactctttttactcttttcttgcaggttctctacttggctgtgacggattttctagagaa

SEQ ID NO: 113645 - DNA, 361 bp, Selaginella moellendorffii
  Intron number 4 from transcript 419335 (locus 419335) deri ved from phytozome v7.0 (chr-ID scaffold_42; pos 391057 to 391417)
ggactcgtgacgaacgtctttgttgtcttgggcacgtaagtcatcgagttctttttctctgggttgatctgttctcttctaagaattgtgctatagtttctagtgttggtgaagaatagatatgcgtcgtccaaaaagctgtgatcgagaaataattcaaagttttctcaaactcacccaaactcatgtttttttttgttctctcaactctataatttgttcggagaagaacatcccacaccttgggacgaacgctacctctggaaagaagcatttgtgacgagtatgaatctcgctgcattttccgaatttttacgtccttcttgcgtgagactgtgaacaaaatccaaatgccagtgcc

SEQ ID NO: 113646 - DNA, 778 bp, Selaginella moellendorffii
  Intron number 1 from transcript 442983 (locus 442983) deri ved from phytozome v7.0 (chr-ID scaffold_29; pos 136787 to 137564 reverse strand)
gcccccagcaagcagcatttccagtgcgtggtgagcttgctggggcggggcggccacgcggacgacgcgcggagcttggtctcggccatgccgtacgtccccgacattgtggactggcggtcgctgctgtcggcgaccgggggacagggactttgcgttgacgcttggaagttggccaggacccaacagtgaccaagaagaaaccctctccaacaaagtagagagggaacatactcttccaagatgtttggaatcaaagacacttcttcactgagagtaattcgacattttcttgcctgaattgagaagataatctacatttcttggtgtcaaaagatttcttcacactaagcatttcttctttataacctaatgcaaagatcctgttacttattgatgtgaaccagaatagtcgacagattttttgtaagcaaaatttgacagatccaagtaagcagagacatatgtgcaaaatgcttcgccctggatagcacaagaacgagcttagcaaaaaaaaaaaaaaaaaggaaaaaaaaggaacaatcaagaaaatatcttacgtttgaacctgtgtggacgatcgctggaacttgcgtcactagtggttcccaaggctcatgatcaaattacatcaaatctagccataagtaataatgtattataaataaatgtcttcttcatactgccttgctttggtcattttgtttcatatctaactttgaaaggaactttgttctctgtaggatagagtactattcagcaaggcatcgagaacggt

SEQ ID NO: 113647 - DNA, 169 bp, Selaginella moellendorffii
  Intron number 1 from transcript 405141 (locus 405141) deri ved from phytozome v7.0 (chr-ID scaffold_3; pos 2739678 to 2739846)
atcaatcacagcgtttacagcacgcctgtctcaaggtttctaaatcctccaagtagtttggaataagcacttcatcactgtgttcttcttgtatattatacttaaagattttttgttaatatagttttgactttttcgtttattaaatattgtgattaaagtcattcag

SEQ ID NO: 113648 - DNA, 162 bp, Selaginella moellendorffii
  Intron number 2 from transcript 421403 (locus 421403) deri ved from phytozome v7.0 (chr-ID scaffold_51; pos 1110637 t o 1110798 reverse strand)
cgaatctaaactttggtttttttatatatattctttttaacaggccaatttttgttacttgagcagttttttttttcttcttcttcttttgtttttaggtcctcttaattaatttgctatgaatcagtatcgccacttttcatcctccggaggggattcgga

SEQ ID NO: 113649 - DNA, 244 bp, Selaginella moellendorffii
  Intron number 1 from transcript 412040 (locus 412040) deri ved from phytozome v7.0 (chr-ID scaffold_16; pos 2426284 t o 2426527 reverse strand)
cctgcatgtaagctggctgcactacaagatgatgattatactgtttttttgaccgtaatggattctattggatcaaagatgtacaatctgaagattcgttgcaagcttgagagctacagagataccaaaaaataatagttggacttcacactaaaaagaaaaaatgtgcgagaaaacaaaaagtatgttttatttctttctactattgttttataatgtgttgtgtgtggtatcaggtttctaa

SEQ ID NO: 113650 - DNA, 534 bp, Selaginella moellendorffii
  Intron number 2 from transcript 418914 (locus 418914) deri ved from phytozome v7.0 (chr-ID scaffold_40; pos 534231 to 534764)
ctccaagcctcccaagccctttggttgagtgacaagtaagcttgcggctttgatgatagcgtgtctttgcgtctggcttaaaccaaaactaatctgggaggcactttgctcaatgctcgagaagtgcatggtcatggaagatttcacgaagggagtgatcctcatcactatcactgcacagactcgagtgacatactgccagaagcttggattcttgcttcattgtcaaagggcggaataacctcttatggatcgattgtggaagttccaagtatcacaatgttgatgtttcacttcttcattgagagatatcgacgaacattttcttaacttgtgattgaatgtaagaaaatattgttattttctatattgatcattctaaaatatattaaatataaaacaaattaaaatttgaattttttagggtttcctccaaaattcacggcaattcgattattccgctaagggtaatttggcatattctgttaattatgatttaaagtggaagaaagaaacaaatgtagggtttttggg

SEQ ID NO: 113651 - DNA, 674 bp, Selaginella moellendorffii
  Intron number 1 from transcript 405484 (locus 405484) deri ved from phytozome v7.0 (chr-ID scaffold_4; pos 267379 to 268052 reverse strand)
cgggatcaacctcactcgagctcgagctcgaaaaggttcgcgtggcttttctaaagtttgaagccaaatccaaatttttcttaactttgaggattctaagccatgcagaaatacatcacgagccgatcataatcgaagctctagaacttgaaggaatcgtgcgtacatttgatctttcaggccgtgtgaatcgaataacgactcacgtgggagagggagccgcaaagaagcttagcgtaagaaggtagcattctaaatgggtcggtcgatcgatcaacgccagtagcagcaggggagtgacgccttaattcacgaacggcccaaggcgctcaacgccgctgggttgggataatcacgggatcaactgaaagggcattttgctctggggtggtatgtttcattcgtcttttgctagcttgtgagatctttcttagcttgcttctgatcatttccttataattcttagtgcatctctttgtttgtgtggtttcttcaaaaccataagaaaagactttggccttggtttctttgcatgacttttttcaagtcaaacatcaaaaaacatgaaaccaagaccaaagtcttctctcatggttttgtgttcctctccttgtgtttttcttttcgtatacatttcaggtttagaatctttccatcttgcgggctctcacaaa

SEQ ID NO: 113652 - DNA, 785 bp, Selaginella moellendorffii
  Intron number 1 from transcript 44932 (locus 44932) derive d from phytozome v7.0 (chr-ID scaffold_114; pos 174927 to 175711)
cggagatcgtcatcccccaccagaagctcaagaacgtaagtatacttcttcttcttcgttttctttttggtgattgtttgcatcggcattcaaatctggaggggccgatccagaaatcgagcacttgggtcgatggatcgcttcattgggtctcgtgggtagtcattatactccgtgtcggatcgtcccagcgatcgggaaagtgatcggcacaggcttctctttcttttctcattttttcgctcctcctttctcgttttgtgggcacaatcagagaatccatggccgtgctgcttttgctttcggccaccgagtgagaaatcaatgcgggccctcgtttcatgttctcgcctaaatctagtgcttgtgaccgtcaatcagcagcagtagagcataagcctgtgctacagtctcttttactcttctttctctctgtcctttcgctttctcgatggagcttcttccaccgttgccatgaagctcactctctcgcgtaccatcgagggaatcgattcagcttttcctcctctccttctttttccttgtcgatcgaatattggcccgtgaacatcctctgtttgtttcctccaacagtaggcagcttttataaatccgtgcattcgccaccactagcgttcttcgagaaggagaaaccatctttttcttcgctctttaattgtcatctaggacggaacaaactgttccaccacctttttttcttcgatagtcataattttgtgttctcactggtcttcgcagaggcacgggattatcaacgcagtggg

SEQ ID NO: 113653 - DNA, 240 bp, Selaginella moellendorffii
  Intron number 1 from transcript 428624 (locus 428624) deri ved from phytozome v7.0 (chr-ID scaffold_104; pos 423655 t o 423894)
cttgcatgtaagctgatgattatactgtttttttttttgctgcaatggactctattcaatcaaagatgtacaatctaaagattcattgcaagcttgagagctacagagatacagagaaattgaagtttttatagttggacttagtcttcaaagaaaaaatgtgtgagaaaacaaaaagtatgttttatttctttctactattgtttttataatttgttgtgtatggtatcaggtttctaa

SEQ ID NO: 113654 - DNA, 420 bp, Selaginella moellendorffii
  Intron number 2 from transcript 404737 (locus 404737) deri ved from phytozome v7.0 (chr-ID scaffold_2; pos 4140808 to 4141227)
gtaaggtacgtggttcattccaattgagctgtctcatgcatgccgcggatttgtcgcctcaagatttcttattgtctgtgcatgaccactttgggggaatgaggatgactaggaaacaattcaatgcagtgtcgatagttatccgtccctatggttgaccatgtacgaaagtacagttgtcttattccgtacgcgacgggcgcgaatcggcgcgaatctagtggcactgaaagccatggtagtgttaatgggcggctgcgatgggctcgcgtcaatgggaattgtcgtggacggccccgatttgtttgagtgctggcctgaataaacacgatctaggagcaattgcttcggtctcttctcaagaaaaatctcttagaagttgctctcttgtccttcattttcgacttgttttgctagatc

SEQ ID NO: 113655 - DNA, 950 bp, Selaginella moellendorffii
  Intron number 1 from transcript 410672 (locus 410672) deri ved from phytozome v7.0 (chr-ID scaffold_13; pos 1220720 t o 1221669 reverse strand)
ctcctttgccgaggtcgggtttgggagcacagctagtaccttcatcaccaactttccctggaaccagctggacagagttagtgactactgaacttgaggaaaaatgggattctatatggctgcgaaagtctcgtgagtttgatggattcttaggacaacatgtggagacagtagggttcattggaaagctcttttgggtgatcgatggaaaccataggtggctggcattttggaaatgcattcaagagaagtttcgagatgacgaagaatgacaaattagtgttcctagtcacgcttgtcgaaccaatgactcgggagcatactgtgaagctcaacatggcatgccataagatgaacatgtaagaatttattttttgtaaacttagctaatatcgtgtttttgcaggctaaaccaatttgcgtttcaagctcatacattggtacatgacattgagcacctttagtttattggcatgctctcgctagaggaggtccaaacattgtgcaatcatgaggtatttgaagcaattcgagtgaagctagcagctaggaaaggccaagaattgcagacttggtaccaactgccacttgattttctagttgctgtctgggtgaaggtaaattagtattgaagtatgtatcgacttacataatgtttcttgcagcccataatcaaaggagaaagagcgtcattctttaaaaatgcccgaggggacgagcagcagaaggagatggagtggcacgcgattgagcagtgaattttgaatacaaagagaacaaaggtgaaaaagttgctcttgattgcagacatatgacgcgggcaggaatggcttgacagcattgccgagatttgttgtcgcgttcataagttcttataaaatttgtgaaacacttcataactccttgtgtatgtaggaactggtaaagcaccggaggaactcatttacaac

SEQ ID NO: 113656 - DNA, 569 bp, Selaginella moellendorffii
  Intron number 1 from transcript 419309 (locus 419309) deri ved from phytozome v7.0 (chr-ID scaffold_42; pos 129500 to 130068)
catttgatcatcatgtgtggcctacttactcggtcttagcttacacccggccaattgtctctacatgcattaccagttgaatcaatgaatgcgtatcagctggtcagccagacgaaccgagaaaaatttaaaaactgagctcgacacttgatgtgtcgaatggatgggaatgtttaggatccgtcacgaccacacgttgtgtgcgtgacatgtaagatatgcgatcagatatggctcttggaagagtgtgatctcctctttccgttcgtagaattactaaatagcgactacagctacaagggggaaagcctcctttaatctcatgctgattgtcggcattgcatcctgactgttctgcaatctttgatgtagatagctatcggcttacaaccccgtactggctatagagccagctttggcttgttcttggttgtccttcttggttctttaaagcaatttgagtgattactatattctagctcagaactcagaagttcatagcttctaataataaaatttggatgttttttgcagggaaaatctcaccgcagtagctggttctgcttgta

SEQ ID NO: 113657 - DNA, 607 bp, Selaginella moellendorffii
  Intron number 6 from transcript 427837 (locus 427837) deri ved from phytozome v7.0 (chr-ID scaffold_95; pos 150113 to 150719)
gcttaacctcagcgagtccatctatccactggcaagttctcagtgttgagaatagcgagccaagtggcagtgactgaagaggtgagttttctattttttatgcttttagctccctggcaaacatctgtattctcttttcttcttctctagattactgacaaccttgcttggaatgtattgcagtcatacacattggagattaagtttcttgaagctctctgatgcttcaaacaaaaggcaagcactgccaccgtcaagcatacatgacaattggcttcaagaagatgatggctaggtttatgagttttgcaattgtcaattttgcaactgttcttggctcttctgtatctgccaagtgagtatttctgagatatgactcgatttctgatgttgaagcatgtgaagctttatgcagttttggtcagagtctagaacaatgcactggatctttgcacagaaacacaggaaacattcaaaataacccagcacttgaggtgatatgctcattaacgtttgtgatttgtttatctcgaggcatcttttttaggcactttgagcattgacttacacaggaactttcattggtgggggcaacgattctagcaaa

SEQ ID NO: 113658 - DNA, 521 bp, Selaginella moellendorffii
  Intron number 2 from transcript 404825 (locus 404825) deri ved from phytozome v7.0 (chr-ID scaffold_3; pos 558141 to 558661 reverse strand)
aggacttacgcaagaagcacaaacacgtaagtgcatctttctctgtgagaggaatggagattaattctttggctttgtagctggacttttcctcctgtgtgatcatgatgttgggatgaaaagaaacaccacaaagagaaacaaaccttgctggcaaaggtgagcgagctctgtgagtaactttgcgtcgacaccaagccatggaaagcttgtgatatttggatcgttcctcaactttcctggataccactaggcaatcttttttgtatttgcgcagacgtgctttggattgacactcgacaattcttcctactgcagacttttgacaaagaaatcggctcacaacattccacctctcgagaaggcacgttatcctctttccttttttttttttcccccgcttcttttctatcttctttgtttttgtttttggttttctattctatctatgcggttcttcgtttggacacgtttcctgacaacattgtttgcatgtgtggtgcagacttgtattgattgtc

SEQ ID NO: 113659 - DNA, 954 bp, Selaginella moellendorffii
  Intron number 1 from transcript 36212 (locus 36212) derive d from phytozome v7.0 (chr-ID scaffold_21; pos 555538 to 5 56491 reverse strand)
cccgttttgggcatgttgacatggcgagaacatcgtttgattgcggcatgccggaacataactcttattcttggaatgctcttctccagacctatgcgcatctcggaatggtggtagagatggaatcgctgtttgacgaaatgccgtgggaaagtaaagacctcatctcttggaactctatccttctcggtttctcgcaagtcgtcgatgctgctcgggcacaagaggtctttaagaaaatgccactttggaacgtaaagtcgtggaacattcttctttctgcttatgcccatgatttgcatgaatttcagaagactcgagcagtgatgccagaatgggatattgtaacttggaattctactctatcaacctacatttgccaaggtaaacttgaaatttgtgagagtgtgtttgactttatggtggaaaaggacattgtttcgtgggtgacaatggtagcaggatacgctcagattgggcatttcgatcaggtgaaatttcttctaaacaggatgccagtttggaacttggctgcctggaattcgatcattcaggcttatggcgaagctggcgagatggaagaagctgaaaaagcatttcgatctctgccatttgcgaacatgatctcatggacggcacttctcgcaggattaagagacaacgaccttattgagcaggccaaagatttgttttaccagagaatgcctaggcacaatgtggtctcctcgacggtggctctaacttttctcccgagagagtcggctcgagagttactcaactccatgccggaaaagaatgctttctcgtatggagcagtgctacagggacttatagcacaaaatgctactctggaagagatcaagtgtgcctttgattccacacggccacctttcaagaccatctttctgtggaacatgttgcttggagcttatgcaaatgctggaaaggttgaag

SEQ ID NO: 113660 - DNA, 305 bp, Selaginella moellendorffii
  Intron number 3 from transcript 418500 (locus 418500) deri ved from phytozome v7.0 (chr-ID scaffold_38; pos 974268 to 974572)
gttcttgagtattggctggccaggtaattacttttaatttttttcttctatatatctaattggtttatttttttccccagggagtgttcatgatatgagggtttttcggaactctaagctatgccacaagatccaagcaagggaattactcacaattccttagagtttgcttttgatgagtggattgagccatacctggtgggagacaagggctaccagctatagtagcacttaatgatccctcacttaggtaagttgattgttttttttttttcaattattcatttgaaataggttcccggttg

SEQ ID NO: 113661 - DNA, 910 bp, Selaginella moellendorffii
  Intron number 1 from transcript 426307 (locus 426307) deri ved from phytozome v7.0 (chr-ID scaffold_82; pos 280201 to 281110 reverse strand)
aagattctagtggagctggaagctttagtcagttggaggtgttgtaaaaagagttgtagaaggagttgcaaaaggagttagtaaagaaagagctattgaagaaagggttttttctttatcttgttgttgaacttattgaacctaaatgatgtgcatgaatgcaaaaagagagaatagagaatatctgttgttgctgctaattagaacttgaagaagtgttggagcccaaaatgccctgctcctcacaccatggtcatagctgctcttgcccaaagttagggcgtcaagttgaggcacatagctgatgtggtaggcaattgcatgcagaagagagagaatataaatttaagggtcctggggaggacccttaaattttacatagaaattttgttgaaccctaacttagagtttttttaagagtttaggtgtggaaaccctactcttaaaaaaactcttagttaactaagtattcaatgtgaaaacaatttcacccctaacccataaaatttatgggttagggacggccccacaatgcagtgggcattttcttgttccagataccatgggccaccttataaaccagaattgtgtatgttctttccaggcaaggaaatttgttactccatttctctagaagatgaaaatgataccatcctatcctatcatctaaggccctactcatgccaaaaattctaacctatacctctgataccatgtgaagaaagcctcttggtctaacactttgaagaaagcaaaaactacctcacaaaacatcaaagaaacctaaaaaccctaaattagtggatcattcaaccagttctttatggctttaaattgatatgatctttcttgttcttcgcttttgggatgtttaggccttggaggccagcacaagtccggtgccggcgat

SEQ ID NO: 113662 - DNA, 368 bp, Selaginella moellendorffii
  Intron number 3 from transcript 428056 (locus 428056) deri ved from phytozome v7.0 (chr-ID scaffold_98; pos 71066 to 71433)
tgccacttgattttctagttgttgtttgggtgaaggtaaattagtattgaagtatgtatcaacttacataatgtttcttgcagcccataatcaaaggagaaagagcatcattctttaaaaatgcccaaggggatgagcagtagaaggagatggagtggcatgtgattgagcagcaaattttaaatacaaagagaacaaaggtgaaaaagtttctctcaattgcagacatacaacgcaggtaggaatggcttgatagcattgtagagatttgttttcatgttcgtaagttcttctaaaatttgtgaaacatttcataagtccttgtgtgtgtaggaactggtaaagcaccggaggaactcatttacaac

SEQ ID NO: 113663 - DNA, 978 bp, Selaginella moellendorffii
  Intron number 1 from transcript 405791 (locus 405791) deri ved from phytozome v7.0 (chr-ID scaffold_4; pos 1895119 to 1896096)
gggacaacaatacatgtatgtgtttaaaatattattttgtgaggcacacatatgtgttataaaaagttaaacatatttgtgtttttcagtaatatattttataggcttctacctacgctacccaccttaccataaaataagcatgaaataaagaaaactttaagaaaatctatataactaacttctaaatttgagtttcccaagaactcatctagcttagcattatataaatccaaggacacttaaccttaaatatttttaaaattttaagcatataagaaagatacatttttttataatttgttttttaatatttaaacctttataaatcattttctttttaattgcttccttacaaatttacgcctttatgaacaacaattgaaaattacagttcttccaagagttctattcttttgacatcttaccctttaggtcaaatccaacccaagtaaactcaattaccaaatatcaatttcaatatatagtgtgattcccttagaaattaacagagttaatataaaattactctaaaactataaattttaacgtcctgagatatcacatatttaaacttaatcacatataactctaagtatcttaaccaagttggaaaaagacatttttcctttatatttgaacttttaaagattgttttttgaattattattattggttgtttatagtatatttgctgaggggacgtgtacctagggtgggcagtttgtaaacaattgtaaaattttacaaaatatatgaaaaaaaacacatgtatatttaattattgtaaaacatatgtatgactcacaaaataatattttaaatcgggagattatcagctccacaagcaagtattggagctggaggcacggctatcagtcacaggtagagaaaattccttttatcatccatacgttgtctaatgtgttttcctccttgccagattctaacttaaagcaagcgaagcaagagtccttt

SEQ ID NO: 113664 - DNA, 835 bp, Selaginella moellendorffii
  Intron number 3 from transcript 448857 (locus 448857) deri ved from phytozome v7.0 (chr-ID scaffold_139; pos 201738 t o 202572 reverse strand)
gtagtgccagttcacgacgacgagaaatcttacaagtaagaatagaggagttgacagttcagtggagacactggcttggctgaagaactgttctatggttgcagtggcagcagtatctgaaacacacaggaggtgagaggataacagcaagaggcaaatagtgtgttcacctgtgtcagagaaagagtgtggcctgattttgagatagcctgtccgtggcaaccaattagctgtgtattccctgcattcactgacaggtcttaggtcatgaaagtgttatttatttccccttaactagaaagaaaatgatgagagactttacctttttttgtgatgctaaatttatttgcattcgctcaaaactaaatcaatatgtatttcttaaagggttttggccaagtccactaacccaagcttatttttgtttactgttaaatatttaaggtttaatccgcaggatcttaggttaggcaggatttgatcagctactccttgatccttccaccgcctcttcacgagggttgcgtgtgcgtcccggctcaacgaaagcgcttcagagcaccataagcggctacttgctcaacaatctctagtccacattgaagctttgcttggtagaaccggccagtcttctttgtttttcctgctttgtttgtttggtcggagctgctgtttgtttggtcgaactgttgtgtgcttgaactgctgctgctgtttgtttggtcgaactgctactgctgctgctgccgcattcttagtttgttttacagtccctgaagctcctcaccgtgaagtaacgacagtgttctcgctgaagagcaaatagaggacgagt

SEQ ID NO: 113665 - DNA, 966 bp, Selaginella moellendorffii
  Intron number 2 from transcript 414251 (locus 414251) deri ved from phytozome v7.0 (chr-ID scaffold_23; pos 644234 to 645199 reverse strand)
gagtgcttgagctctttgatcttcctattgaggagaagatgaagtattatacggaggaggtgtttgtgcccgtgcggtactgcacgagtatgacaccttctcaagagactcatatggagtggcacgatcacttccagcactacttttcaaacacagaaaaagagcatccgtggccggaaaaaccagcctgctacaagtaaatgagcttgactaatctggatttcatgagattgcttggtttcttggatactgcaggaggctcgcttccagctatgtttcaagcgtgagacatctgagtcagactctgatgtctgctttgtctgaaggactcgggctggattcaaactgcctcgcgaaatcgtttggagactcggagatgatcttgcgatcaaattactatccgccgtgcccaaatcccgaccttgctcttgggatgaatggccacaccgatagtggcggtttgacaatcctgtttgaagatcaagttggcggactccaggccaggaagggtgatctctggtacgacttgaagcctataaagaatgcattcattgtgaacatcgctgatcagcttgaagtaagtgacttggattgatttttatcatggctttgttcgtttccatgccagattttgagcaatggaaaatacaagagcattgagcaccgagtccttgtccagcctgatcaaactcgtctctccatcgtggcattttgcaatccatcacgggatgctgtgataggacccctgccagaacttattgatgagcaaaacccgccactctacaagtcaaccttataccaagagcacatcacaaatgtctacacaaaatatttggatggcaagcattcacaaaagctccaaataaactaaaccaacgagctgttaactaaataaaataatacaaataataaatcttctattttataagagagaacggtctccaaagatctctacaaaggcaggat

SEQ ID NO: 113666 - DNA, 612 bp, Selaginella moellendorffii
  Intron number 2 from transcript 412916 (locus 412916) deri ved from phytozome v7.0 (chr-ID scaffold_19; pos 950072 to 950683 reverse strand)
agtaatttttttaatattatactttgattagccatgataatttaattgataaacctggactgtaataagtttttgaagatgctttgctaggataaaaaaattatggctagtaaagatttattatgggctgttaaagcatttatttcatctataaaatctataagagtgatagtaatcataataatttgctgcacattgcatgcaacaatgcttggtttgcttaatagtaatgtcattattattttgtatttttgaataatttaattgattgataattataaatatgtttataatttataaatcaagattaatcttatttcatatcaatcattagaataaataaaaatatactaggaagtgtttaggaaagtttataaattataaacatgtttataaattataaatacaagattaaccgttaaatggtagaatagaatattcaagtttattctaggtttatccactacttaagcaaaccaaaaagattataagagatttgttttttaattttgtttccttcacaaagaaacaaaatattaataagttttttattctttagaaaaataataaaatatagccgacatccaggagaaatatagctgcccggtgagc

SEQ ID NO: 113667 - DNA, 655 bp, Selaginella moellendorffii
  Intron number 1 from transcript 411692 (locus 411692) deri ved from phytozome v7.0 (chr-ID scaffold_16; pos 178461 to 179115)
gcgcgaggtgagaagctaagacgccgataaacgtagctctgtccgcctcaaatccttccagatccatctttgctagaagctcgagagctcgcaagctttctccatttgctgcgtgagctgagatcatggcgttccagctagccgtgtcccaaacgtgcttcccgggtaagtcccttctgcgcgaagtccatgagcatgagcgtccaggcatgagattgaacaaacccctcgcaagatcaaagtgagcgttttgagtgtatgctgtgatcatcgcgttccaggccacctggttcttctctttgatcctgtcgaaagcgttgactcctttcgaaaggttgttggaaagtcttatatctcctttttatggaaaaatttaaagtattattctgaggaatcagtaatcacaactaccaaaaaaactttaaattctggctgagaaatagtcccattaggtcggaggatcgaaacctgatgtttatcgaattgttttcgtccttggaatcgagctccagatctgagagctggttaaaaactggagctgaagaaatttttgttaaagctccggctgctgacgtgtattttgatttccaatcgctcgggccgccattcggttctcgcagctgccgccgcgcgcaggggcattggcgccggatac

SEQ ID NO: 113668 - DNA, 709 bp, Selaginella moellendorffii
  Intron number 6 from transcript 420257 (locus 420257) deri ved from phytozome v7.0 (chr-ID scaffold_45; pos 973476 to 974184 reverse strand)
ggatatttctggtaattaattcgttctttcttttgctagcttgattctggtcttaaacaagcagcactagaattatcttcctgaatggctcacaggatccatggcgtgtcaaaacaaactttctctccttatggtaacttattgttttgcttcgaagactttaagcaaagatgaattcacagagcctttctttatattaacgtgcaataactgcgcacattgccaagacctttggccagaatgtaccatagaaactggtatagcttctgtagtaataatttctgtataccctgtttttaacattggattggattctcagatctagatcagtgccaagagctaacgaaggcccacgcatttatatctttgtacatggagtggctttcctcgtagtacaaaatgatgctttggtttctcccgcccccattcaaattgctagggtttaggggaatggcggtgtgcttccttctttcggcttacatccggtgcataggttcgtcgattgtttcagatcaaacttaccaagcatttgaggcagatttccgatccagaggcggcgcttcgcacgagctagttattaaattatcatggatcctattatttttggtcttgacctcgcaggaaacaaactaaaagttgataagatttttactttctctcaggtagtcacctcttccagcttgctcttttttttttcttttacagatcg

SEQ ID NO: 113669 - DNA, 453 bp, Selaginella moellendorffii
  Intron number 1 from transcript 229072 (locus 229072) deri ved from phytozome v7.0 (chr-ID scaffold_65; pos 636499 to 636951)
ttacaaaggccgaggtcaagtccttgtcttcacaggtcagtagttcttagctccttcttttctagtctctccatagctctagagctctagaactttcattgtctctaggaatcatgctaggagatatagttgtaagtacttacagtctacagacagtgtgtgcttcctctttttttctttttttttgttctagctggagagtgctttgatttgctttgcttgcttgtttgtttgtcccttgtagcagcagcaacgcgtgttatgaaatcaatggctgtttttatgacaaagaggtaccgacaggattccattgtttgcgttccagatccagcataacttccagcttaagcagctctaatcatctttttttctctttctttctcgtgttcttgatggtttgtctttgatcgtttggcagctcaaagacgtggttttgaaggtctcggccgctta

SEQ ID NO: 113670 - DNA, 764 bp, Selaginella moellendorffii
  Intron number 1 from transcript 418720 (locus 418720) deri ved from phytozome v7.0 (chr-ID scaffold_39; pos 979940 to 980703 reverse strand)
agaaaaactttggctgattgcgtcaaagaaggtaaaaggcctacatttatcactaaggtgaagaaattccgttccaaaaagtttctctgtgccgacccttcagatgcattgtttgttaaggattctagacgttttatcatacaatgccttatttcttttaaaaagtttctcgtacaatatgaaatatagattttaataataaatttttattttaataatttgtatttattaatataattaatcaaattgaagtttataattataaacatgtttataatttataaaaaaagattaattccatttgatggtagaataaacaagaatatactaagaaaaatttataaattatttatgtatatccactcactccccttatgcttaagcaaaccaaaaatgttggcaataattagtatgtggaaattatagttagtttaactaataaatacttcttatacctggcactaaagagagatgagttgcccaacttttcaggccattacatctaaatggcagccattggatggaggggtactttgtcaaaaagttatttctttaaccatgtcttattaaaatattttgataaggttttgttttggccaatgattgttgtgttgtgagaaatttgacacatgtgacatgcacatttgggcaagagtcaaaatggcactttttgcttcctcaatcttaattccactcccactaaatagggccactccctcaattctcgatggcttggactgaaggttaaagttcttgatttaggc

SEQ ID NO: 113671 - DNA, 220 bp, Selaginella moellendorffii
  Intron number 2 from transcript 412541 (locus 412541) deri ved from phytozome v7.0 (chr-ID scaffold_18; pos 666367 to 666586 reverse strand)
tagaagacaaaccaccgtgcggagccaaagactctgtaagtttcttaccaaataaaaaatgaaaaaaaacataaaacaaggcaagaaaaataatagtgacagttgctggtctatgctgaccagtcacttctactgatagcctggtacctattgagaagatatcacaatcaaatttgactaactatcgacttagagattaatgtaggttctattacaagca

SEQ ID NO: 113672 - DNA, 970 bp, Selaginella moellendorffii
  Intron number 2 from transcript 412720 (locus 412720) deri ved from phytozome v7.0 (chr-ID scaffold_18; pos 1877507 t o 1878476)
ctgtaggaaattggtgtagaggtgctgtgcctgtgccttctgctgctaattcttcgtatttcatgtgcagaagatgagtatcaggtgaggttgtcgttggagatttaagttgttgagctgatttgaatatgtatcgtgcttatgaacagaaaccaagtctcggatcaccaattaacaacgagtggtttgccagccttacaaagtcatgttcttttgaatgctgatcatatggagccccaatgattgtgaattgtagttgtggttatcgggaatgcaaaatgttgagactgggtggtagtagtaggtggtgtcgagttgatcaaatggatcaatcaagctgtagacctctgtctatatctgttttgatgatgacaatggacttgggaacaagttactacaaacgacatatggagtgatagtgataatagtttgtgaccacaccaccccatgctatcattgtacggccgggctgcgacgtcccccatgcaggaacgccacggcagacttctggatgaaggataaggaggaacactgagtctgacctgccagccacaatgcaaaacgtgcatctcgtgcagctcagagccaggtgcctgccacataggcattgaccacagctgccacgtggaatatttctagaggtccgcctagatattcacgtctcatgttaattaaggcaattcctaaagtcttgagacattcaatattatgtaccatagattgttacaccttcccacgcgctccacagggtctatgtacgaactgttgtttgttctaaattttcagattttccttgttaattaatgcattaaggcattctggagttctccgtaagtacgtggccacaagaaggatatataagaatgcagcagcaagtgaaaatcataacacaaacacaatggcttcccgtctctctttctactttgctcttgctgttcttctgcttctaattccatttctttgacatcag

SEQ ID NO: 113673 - DNA, 725 bp, Selaginella moellendorffii
  Intron number 1 from transcript 420323 (locus 420323) deri ved from phytozome v7.0 (chr-ID scaffold_45; pos 1284815 t o 1285539)
ctcgatcccatcgtcgcgacggcactggtaaacatgtaccatggatgcaattgtgtggacgcggacgttgtagcgattaaaaaatggaccgtggacagaaatgactcctaactatgacaatcaaatctaacctcaagcctcagatcgagtgtggacaccctgtgcctcgagaaacccacgtcatcccacaagggccatagtaacccgctacaatgtgttaacctagagcgagtccaatcatttcagctgaatccgttagggtgttgagcaagcattatagctatatgcaatttgtctcatcacaacatcacaaccattcctcatttgtagttctctacctatttcacagttcacaatctccaaagatctgcaaacattgagttcatactagtttagctctctcaatttttaactcataatcttaaaagatctataaatgccacatcactctttagccatgatttatcatgctgacccaactctcttctccaactcacaatctcaaaagatctgtaaacatcacatcaaaaaccttccaaatttaaaaattcttaactcacaatctcaagcaatctttaacttcaaacttgttagcatgagaagcagcctctgacaattgaagtccacccaaaaacaaactatagattataatgattcacaacaaaggtgacaatcaaaaagttttgacagcccacgtagccccaccctcaatccttcgtcaaggc

SEQ ID NO: 113674 - DNA, 643 bp, Selaginella moellendorffii
  Intron number 2 from transcript 413095 (locus 413095) deri ved from phytozome v7.0 (chr-ID scaffold_19; pos 2072618 t o 2073260)
cttaaataaaacataatccagaaacagtttttaaggttctagaaaaataactttcaactattgtcattttcattgtcaatcaccccaaaagtaatcaaatataagtttaaaaaattttgagataaataaaaattgaaactacactaagatttttaaatgttatatagcttaaaaattgtaagcaagcaatgaaaacacttaacttgaatataagttttgtgcttttaagcaaatcagtatatctggtctgtttttttgttcctttttaatggtccagattttatgataatttattttaatggataagagttttttactaagcatagtgtttaaaattttttaattaccatacatctttggttttattagtctaatggttctaaactatttaccaatactacttttgatcatgcttggaaaaaggaacaatagattactctaaagcttgaagagtctactcttctttttcttgatttgatcttgatgctcttttcggagtataagaaaaatattaataaaaaatttccggatccatttatttattgatcttactagccgctgcttttcagcatccacacagcaagcgcgaggagcaatggctgggaggtgagcagaccactgacgaacgaggcctatagagggt

SEQ ID NO: 113675 - DNA, 298 bp, Selaginella moellendorffii
  Intron number 1 from transcript 412757 (locus 412757) deri ved from phytozome v7.0 (chr-ID scaffold_18; pos 2125310 t o 2125607)
cagcaaagtgagggtctccttccagaacgccattactgagcacaaatcccccgtaaaaactcgtccagtagcttcttatcttccaaggacaaagggctgtaggagcaagtaactgcaaaaagaacaaaatcttgtgagtcccgaattcaaagtgtcgcagctaggtgggacaataatcgtaatgacagagaacaagcgctcgtcaccagagacaaacgcaaacagaaaaaataacttcataaaacacaaaaggagaactgcagaaactaagtacagttccccagcaatacaaaccaga

SEQ ID NO: 113676 - DNA, 864 bp, Selaginella moellendorffii
  Intron number 3 from transcript 441539 (locus 441539) deri ved from phytozome v7.0 (chr-ID scaffold_17; pos 1224354 t o 1225217)
gagccagccctacacagtgtgtgtgtgtgtgtatcaaccagcagatgcacaaatcgttgagaattagcaacaaggcttagtatctagtgtactagtgtacatgtacatgtgtttcagctaaatataatgggccaaatacaccgaagaagtgtgtataagaagagtagaaacaaattaagaaatataaattaagaattgcaaaagaaatgaaaataaaaattgtccatcctcatcagtttgctgaaattaagttggattcaattcttccagctccaaatattgtgtgattgagttgtaagttaattaatagtagaaaataagaaaaaaaaaaacattgaaaaaatagtgtttgataatatcttctttgcttttagttttttatttttgaaagaaaattagggagtgctagtaaagatatctttgccgttcattggtggttaattaaatgagcatgtttagagatgtttataagagtttagctctggaccaagagttacccgaaaattaaagttcaaaatttacgtgcacaataagctaaattaatgtacttacccttattttttatgggaaattttggattcgcacgaaaaaaaggcgaatttagaggattcttaagtaattttcaaaatccccgaccaaatctaaagtgttggggtcattttattttaagggaagttgttaaaaattattccggaaatattcgagaagattcttagattagggtttggcgtgcctgcgaagaagatctgatctcgcggcacggcccgagaattaaaacatggcagcagccgcggagatttatgaggagaggaagaagcaggtaatccgattttagggttggaagaggaaacagagctctgggaa

SEQ ID NO: 113677 - DNA, 554 bp, Selaginella moellendorffii
  Intron number 1 from transcript 405303 (locus 405303) deri ved from phytozome v7.0 (chr-ID scaffold_3; pos 3721659 to 3722212)
gcaactggtgagttcctggcattgtttttttctaatggcaactagttcctggcatgttttttcacttcctagcatagtttatgacctgggctctggaagtgtgaagcttcttttctcttttttattttcggcaggcatctgattgttttgtcgatgcacggaacaatgggacaaaatggtgcctccggatcatcacagcctgatcaaccgcgaaaaataattcacgtccacagcaacacactgcggcatactagtctcctcaagctcataaatttgctgcgccgcggctgacactggtgagtgattccgggggattgtttgaatgattgaaaatggccacggccccacaaacctgtgcccaaatcactcgcttggttcctttgcctcccttgaaaaaaaaatttccttcatgcttgcaagaccatcttatttttctaacttgtttttttgctttgttttcggtttgtttttcttttgtttttgctccatctttgcttttaacttgtttttgctttgcaggcacagtcacaccactgacgagtcccattcaacgt

SEQ ID NO: 113678 - DNA, 265 bp, Selaginella moellendorffii
  Intron number 1 from transcript 412232 (locus 412232) deri ved from phytozome v7.0 (chr-ID scaffold_17; pos 1233683 t o 1233947 reverse strand)
caacaacgtttggtttgctttgatattgtcaatttttacataaataaaaaatttatatgatgtactcattttaatacattttttgattcatatgtacttctcaaagagttcaactaatgttttttttatcaattttattcttcctacagcaagcttaaagcaaatagtgaagaatataaaatcttgcaaactttcctttaagaacattattactagtcaaaaagttcactttttttgagtagtctgatgtgtttgtctttatagc

SEQ ID NO: 113679 - DNA, 717 bp, Selaginella moellendorffii
  Intron number 1 from transcript 405154 (locus 405154) deri ved from phytozome v7.0 (chr-ID scaffold_3; pos 2780536 to 2781252 reverse strand)
gctgtagcaatcaggtatgttccgccgcggcgagcaatgccgacacaagattgcgctagaagctcgaatcaacaacgcttgaatcggcaaagagagaaagaagatctaaaagagacactagtcgcgaagaacgactcgcaaaagttttctgcttttgttatctttgtcacaggacattatcgtgaaggaaggagattcagtgtgtgaagccttggtagcaaggaatgcaaatgctgctcagagcggcctagaggtttgggagattctaggcacagagaaaggcttctcgctagcaagaaccaagacctctctcagttggcttttcggaactaagtcaaacgttggccgaggcaagaagaattcaacagttgcaagtaaacgtcgtgcccatgccttttggtgtactgatcttttgatcaaccaagaaactcggatcaaggtggcaagttatttcgcaaagagacacatgatgaagaatcaagttaagctcgttgctcagtctgcgctcattgcaatggcaacctagagcgatagttccggtgctggagctgcacggcggtggaggctctcgacgccgctggcagactcgagcaacctgcgaggggcggtggaagagcttttgagaaagttaaataaaagagcactaaatatttgtctaaggtttatgcgaataatggctaagtgggaggctggtatcgcttggtcccgagtttctgt

SEQ ID NO: 113680 - DNA, 438 bp, Selaginella moellendorffii
  Intron number 2 from transcript 405668 (locus 405668) deri ved from phytozome v7.0 (chr-ID scaffold_4; pos 1292769 to 1293206)
taggcgctacaaacggcataaagtgtggtgtgaaggtaacggatgctccagcaagtttgctcgtagctactacaaacaccctggaaagatgaagatggtgatgaatcacatctattatacaagcgatataaaccattagagaagtaagtgatcactcacacaacctcgacattaagttccaatgttgctagacccaagacggccaccatccaaagttctgtgtgtctcattagagcccttgttggctttgatttgtttctatgttttgttaaatacaaaaatttctcatgcaatacaaaactaaaactaactcctcgatggcagacaaatggcagagtgtcaaagcgcttaaatgtggcaaaaaaaatagtaaaaaaaggtcaacccttttctaacgtggctataaaacgaagaggtttattgttccagcaaagtaaa

SEQ ID NO: 113681 - DNA, 368 bp, Selaginella moellendorffii
  Intron number 1 from transcript 422004 (locus 422004) deri ved from phytozome v7.0 (chr-ID scaffold_54; pos 906625 to 906992)
agcttacgtccagtactcttatcaaacccacagaaactcaagaaacgcctctgcgagacagtatctcctacgatctcctagaaggataggcagcgctcggttctgatagggaagagcaggagagtgtccaaagtcaaaaaatttgctattctgatgcattatctcttttaaaggcttattctcaaaatactaggatcatatcgtatccaatataattagttgtaaatcttttcttaaaccttatataacttgtggcattgttttaaaagagagcttgatgtgagggttttggtggaaaaatgacgtctctcttcatcttatttgtgttcctagctttgtcaacggttattgctgtaagaaatttcctt

SEQ ID NO: 113682 - DNA, 582 bp, Selaginella moellendorffii
  Intron number 2 from transcript 407075 (locus 407075) deri ved from phytozome v7.0 (chr-ID scaffold_6; pos 2111976 to 2112557 reverse strand)
ctggctctccttgcaaggccggggaggagattgtcaagcttgcccatgagctgtggatcgataatcccaaataatcccatcttttcttgaatgcaaatcgtcttatcaatgggtgatcgatccttagtagtaaattttaaatccttagtaacttctcttagtaacttttagtccttagtaacttttaatccttagataaccgcgtgaagaggagcgcgcgataatatttgctcgagaggtttttcgcaattttgtgcgcagcgcattcgtgctttgattatctccagcagtagagattctaaaagaatggagctgcctgtgttgtgtctttggatgttaggggttttagaggagaaatggccaccgtcatggcgccttgccagagaccagggcttagtttcgtcttggccgtctcctcgcgactgtcattagccaccagagctttcccggcgctttatttcttcttgcttcagatttttttgttctctctcggttcttccttttcatgtcaatttacttcctctgaatttgctactctcttttgcagacaaggagcttcactcggtactgtaaacccagttc

SEQ ID NO: 113683 - DNA, 352 bp, Selaginella moellendorffii
  Intron number 2 from transcript 427918 (locus 427918) deri ved from phytozome v7.0 (chr-ID scaffold_96; pos 227247 to 227598 reverse strand)
tacataaaacttaaacttataaaattagatttaacgtactactatatacatgaataattaaaatatattttatattgcaagaaccactgcttcattcgaactctatgaaatttttggctttattaaatactatagaatgacattatctacataaaatataaaatataaatctctttttaagaaaattattataaaagaaacatattttcgatggatgttttggaagactaaaattgatttagcaaactattcttagttttaaagatactaaaatttaatgttattttattatatcttccttcagatggagcttcgctttcttcaacttctttgattcctcttacaggtggtt

SEQ ID NO: 113684 - DNA, 815 bp, Selaginella moellendorffii
  Intron number 1 from transcript 403488 (locus 403488) deri ved from phytozome v7.0 (chr-ID scaffold_1; pos 2731083 to 2731897)
cattacaagaggtttattgctgtcaaaggtgagttgcttttatttcctaacactgttatatgaaacagaactgtattggatgtaaagctacaaactttaatcggatgcttttatgaccaacattgtttctgtaagagatttatataccaatacagtttggcgttgctgagcacctatttttaaaggtgagttgctcttatttcctaacaagaaaatattgattctgcttttcttgcatgacgaagctactagctgtgggttattgcagaacatgaagcagatttgagaaaggaatgagatgcgcaacgtgtaacagacgctgaggttcttttctaactttttttgttcttccaagatctgaagatcttttcagcataatccaagccgactgccagcatcgaatagagacacggcaagtttgtgatgctccagcagcaatacgcagccgtggagcagcgcctggcaagcacaaacgcgacagctgacacttaaggagtttgcggcccacaaattagctcagaggccgtcctcgatgccccagcctagatcctggtcgcagccacaaaattgccgagacaaatacaaagcacaggtatactccatcttttctaagaaacttgctcaggcaattctctcttcgtaggagagctctttttcttgttctgaaattctttgtgtttgtttgagttccaaagcaaaaccctatatgggacgagcgaacatgactgtggttacgaacaaagcatattctagagaaatattctaaaatccattgcaaagcatactcatcttcacttgcgttgtgggcgacttgt

SEQ ID NO: 113685 - DNA, 821 bp, Selaginella moellendorffii
  Intron number 5 from transcript 412041 (locus 412041) deri ved from phytozome v7.0 (chr-ID scaffold_16; pos 2436794 t o 2437614 reverse strand)
accactcgaggtatgtgtactttttcttttccttgacatgcttactcggattcttcattgtttagtttataattttttttttatagtgctgttttttcattaagcaatttctatgaagctgaggtagagctccattcctaagaattgtgcttaagaactttcatagaagggtcactaaactgtcactaccaccatcactacatgatatctgtgattttgtggctcaaacttgtcatgagaaaaaccagttagtgcagtaaagaaatgactaaaaaggcatgaaggaattgcaaacctggtaaagctgtataatacacattggaatcaaagctgtaagtcttggtagcaacttataaaaataaacatgctaaaacaaattaagaaaaagaaatagtttaaataattatagttacaaatacatcttttcaaattgaaaatattctctactactcctagcggagctgggatccctgctagtacccatatatttaaacgaaaaagcccgtataataatagcatatactggggacacttattctaggcatatgccaaaatctaatggctgagattaaacaatgtaaagtcttgacttttgggatcataaaaaatttcaaatgtcttttagggcgcgtgaccacaaggagacagcgtcgattcgtgtatgggggatgtgggaaatccagcgatccctcagagtaggagtactacaacgtcctccatgttttgaacacgagtaatattctgttatctttccttgttttcttctaaactttttttttcctgtagatacttttgtctggaagaagatttctaccactgga

SEQ ID NO: 113686 - DNA, 531 bp, Selaginella moellendorffii
  Intron number 4 from transcript 428401 (locus 428401) deri ved from phytozome v7.0 (chr-ID scaffold_101; pos 494454 t o 494984 reverse strand)
ttgaaacttgcgtgagacctatccagcagacagttttgcgcaggatctcgtgaacggccttgtcaaaatgcccattctcgcaaatgcgaggatccacggtactggattcttctccgggatttaaccgaagctgttcttcgtgagggaaacgacgccttggatggtcctaatgatggaagtcgtcgtaattcttaggatactactttatccatcacgaatagcatcaatacagtaatcacttagaagcttttaaaataggatctacatattttgtcttggtaatgggagatttcacttcctgaacatagtcgcttctatatatcaggtgaagcaagatctaacgtccacatcttgatcgatttcatttgctgttaaatccatccattttttgaattttttttctgtgtggctatccggcaccaggaatcgtctaaaatccatggtgaggctctttgggtatcgaggtttcttcatttgaatccttggaatctttcagttttcggtttttgacatccaagccggctccctttc

SEQ ID NO: 113687 - DNA, 390 bp, Selaginella moellendorffii
  Intron number 1 from transcript 429014 (locus 429014) deri ved from phytozome v7.0 (chr-ID scaffold_109; pos 539012 t o 539401 reverse strand)
tttacaacaaggagagtcagtacatgaaaaggttcaaaaggtttgtcacctgcggaattggtttattgtctaccctaaccctaagtttggcaagttgacggattttaatttttagctcaaagttgattcttcaaagtgaagtctagtttatttttggctctttttactaatataaattaactagaggtaattttatttaatcagtcacgtagatatgtcaaatttggattgtgctatcgatattgttcagtcgtcacccgctaaggatttgtcaacaaaaacaaattcttatgaaggtttggtttttctctttattctttagtatttcttgatttatttctttttggttttgtagtttcacaagcaaagagaacaaagttgaccatccta

SEQ ID NO: 113688 - DNA, 536 bp, Selaginella moellendorffii
  Intron number 3 from transcript 411419 (locus 411419) deri ved from phytozome v7.0 (chr-ID scaffold_15; pos 525680 to 526215 reverse strand)
ttgaaggagaccacatcttggtactaggaaagaaggtgagttataattctctcatcactacgctttctcatattgaatatattttctatgcacctacaaagaaacaaggatgcaattcaaagtttgagggacttgttgaatgagcataaacactctacatgcatttcttgtgtttcctcattgacaatgcgatgcttcaactgtacaggttgcatagctcaaggctaacagtatagatttgctttttgctaccatcaaaatttagctccaactgcatctaacaagccatagcatggtgtatgtggtagaacttggcgatggttttttttcttttttgggaagaccaaattgtggatgccaaaggcatatattttgcactttgcagttgatgggaatgtttgtgatgggagaaggtggtgcccactggcatctaaggatgctacctgatatgacatgattgcgggagtgtcatagaaacttggtaagtctcgatggtcctttgtaattctttctaacaagtattcaatatgtaggcg

SEQ ID NO: 113689 - DNA, 277 bp, Selaginella moellendorffii
  Intron number 1 from transcript 127584 (locus 127584) deri ved from phytozome v7.0 (chr-ID scaffold_87; pos 801184 to 801460)
cagctcgttactcgaggtaaacgtcgagactatcttcttgatggttcgatcttcctttcataaatttttctttccttgccgtccttaatccctggagttccaatcgtggtgacagtaaattttttgttttttcttttgatctctctcttcttgatcagctccttgttcttcaatgcgttgttcttccttgttcttatagacggcaatttttccttaaccaaatgtgttcttcaatgcaggaggtggaagagttggagttatcagctctcgtggcgat

SEQ ID NO: 113690 - DNA, 448 bp, Selaginella moellendorffii
  Intron number 3 from transcript 413576 (locus 413576) deri ved from phytozome v7.0 (chr-ID scaffold_21; pos 462533 to 462980)
tgagctctggcgaattgctgcctctgattataaaggtacgttccttgaattcaggttttcgcttgacactgtgatctgtaggcatgagctcaaagtattctctagtgaggttgatcgttttaaaaaccactgccgagtaccagaatggcattaactcgatcgtctgatcaacaggtgcctacttttcatatggattgtggctaggatcaaatgccaaccagaatgtcaatttgttttattctattagcaaaaggccaggccaagagctcccaatctcggaatgcttgaaagcttcataggttgctctccatcatcctcgcctacaataaaccgagaacatgaataagtaaaagcatgcacctaccaaatgcatcagtgatttgttgatgaagaacatgcactatatctagcagtttctccagaacaaatcgcacttttaccaggactt

SEQ ID NO: 113691 - DNA, 986 bp, Selaginella moellendorffii
  Intron number 2 from transcript 426500 (locus 426500) deri ved from phytozome v7.0 (chr-ID scaffold_83; pos 691869 to 692854)
ttaactggaagaccaaggaggtgtttcatcgtgagagtggaactctgctgcttaaaggtgaagggtgtactccacctattcttcaattgttagaggttaagcggcagattgaagagcttcttgcacttggttttattcagctgagtaagtctccttatggtgcactggttttgttggttcgcaaggacagttctctttgcatgtgtatagactatcatgctctgaacaaacggacgatagccaaccattttcctatgccttgtgtggacgagataatggatcggttgggtggtgtgaagtacttcacaaagctggatttgagagatgggtacaaccaaatcaagatgcaggattttgatatttcaaagactgtgtttaacactcctttttggccattatgagtttatggttatgccctttgggttaaccaatgctccagctaccttcatgcagttgatgaacgagtgggagtttcgtggtagctttgtcgaagtgttcctgaatgatattctcatctatagtcgaactcttgagaaacattgtgaacacttgtggaaggtgttacacattctttgtgacaacaagctctatgcgaagaagtcgaagtgtgaacttgttaaggaacgtgtagagtaccttggccatattgttttttcgcatggcattgaagtggatctaaagaaggtggataccattgtcaactggccagtccctgagactgttaatcggctctggagtttccttggcatggcaagttactaccgtaagttcatccaggagttttaaaggaggttgttgatcggtacaagcttcattggctgatcagttggttattgcttttgtgtaggcattgttggatgattcaagctgttctcgaacaaacgttgctagtatggggaactcatctggctgggttgtgttactatagttttaacttgtaatggttaataggtagttacggttccttggcctctagaccctgataa

SEQ ID NO: 113692 - DNA, 454 bp, Selaginella moellendorffii
  Intron number 2 from transcript 136252 (locus 136252) deri ved from phytozome v7.0 (chr-ID scaffold_145; pos 32256 to 32709 reverse strand)
agtttgtctctttgcctcgtttgtttgcctcaatgaaaggaggtaaggttttactctgatattaggatgttgatgatacataatctttttttcctaagaaaataatatatcagaaaattcaactatggtccatagattgatttaataataataaaagcttaggtgatgatgaatcacattttttaagatggtagccttttgtattgtgtataatgttgtctcaatcatatttttacctttacaccattgtatttatttttatattttcatgtatcaatgcacaaaagattactcttaaaaacagtattataactttatgatatcacacaaatcttaaactatatctactttgatgccgtacacactctacataatgagtttttttttggttacttatggaactttgatcttcatgcaggggttctcaagttcttctccagcttcctttggaaaa

SEQ ID NO: 113693 - DNA, 662 bp, Selaginella moellendorffii
  Intron number 5 from transcript 427441 (locus 427441) deri ved from phytozome v7.0 (chr-ID scaffold_91; pos 143424 to 144085 reverse strand)
tctagcttgtcttctcattttctatacacaggtatgtaaggtgttttcaagtacttctagggcctcaatatcttaattgttcctataggaaaagatttctcccattcttcgttcaagtatctagccaagttccatcttctaaagatttatgttttattagttattcatactgcctctgagtcatctaataagattgggtaattattcttgttgtatatgtagagatcaaagcaatgatccgagtaggtacacatttggtttgctatggattagcaagcattccttcagtgtggatttggttacctttttgaactaattattataccatctaaagtatgttatacatttatattaatcaagtataaatatattttataatttaaaaactttcttaaacagctctcttctggatatttataaattataaaaatgtttacagttataaactttcttaagcagctagtcttgccatagacacaaaggcactcatttccttacaatgaactcatgtgtttgttttcatataaagtttagagtagagttttctatgcaaagtttagacaagagagatcaagagttctaatgaatgaaatgaaaaaaaatcttaccttcattctttctctcaagttcatcaccacatcctacagtacaagcaggacagc

SEQ ID NO: 113694 - DNA, 390 bp, Selaginella moellendorffii
  Intron number 2 from transcript 404341 (locus 404341) deri ved from phytozome v7.0 (chr-ID scaffold_2; pos 1962757 to 1963146)
ctgcatatactagagtgattaaggttttaataaaggtttgctttgaagattgcattaaccggtgattgcaggtaaatatttactatattttttaattttattatgaaacttaattaatttttagcaaaaaattaaaatgctacaactgatcaaaataatgtcacaaaactatttcagaaaataatcaaaataaaaaatgataaggtagttttagggtatacattgaaaagattcctaaaaattattatacattttctattcagtcagcgaggcatgctagtggatttgttttcctcttctattttctttttttctgtttttcttttttttctgatatgactgttttgctcttcaggtgacgtaccggtttgttagtgggctcaacgacag

SEQ ID NO: 113695 - DNA, 700 bp, Selaginella moellendorffii
  Intron number 2 from transcript 410859 (locus 410859) deri ved from phytozome v7.0 (chr-ID scaffold_13; pos 2260253 t o 2260952 reverse strand)
ggcatagtgcggtaaaagaacttttttaaagcttcatcaaacaatccttaacaaagcaagcaatctaagaatcttaagtaaataaagaatattgaattgcctggagatgagtctaagaaggaagaggagcaataacaaaataaagaagaagatgatgatggccttgaccctttaaagagtcaagttacacaaagaagaacagttacaagggaagaggtaaggatggggttaaaggaaaggaaaaacaaaaagtaaaaccacaagtacaaaacgaaattctagatacaagttcgttcaattgtcccttgaagttcaaaatgaaagttgtctcacatttgctataacaactaataatcaagaaaaaaattccacctccccgagtgcctctatgttacatgatatcgaatttagtggtatgatttgtggtggatattgtagattagcttaggtttactatttaacaatgaggctttgtgcaatagagtataagtttattgtggtaaagggttgaacgaaaaaagagcttcctgaaatgagatatgatagtagtttgacatggaattcaaagccactttgagggatgagacttatgccaaatggaaggaagttctttcccatcggatgttacttgtgtaggagggaaatcactaattcaaggcatggttattatagatagatttgaactatttaaatccaactg

SEQ ID NO: 113696 - DNA, 446 bp, Selaginella moellendorffii
  Intron number 3 from transcript 429114 (locus 429114) deri ved from phytozome v7.0 (chr-ID scaffold_110; pos 570607 t o 571052 reverse strand)
ctttgccaccacttctttatattcatcacccagtattgtctctatgaggcttcttgtcttaacatgttctttgggttcctcagtaatctttgattattttgatttatttattaattactagtttcttctgaaattttattttcgttagcttagatcacaaagaagtgtcctaattttaaatactagtaaaatatcctactgatatcattgtaatcgtggtctattgggttgctcttgttcatatttctctcagggagcattaacttactgtgtgtgaagagatgcttcgggcttagattctagaggtagggcatcaaggatatcactttataggtattttcaattcatttaagagaggaaggtatatttttgaacatcgttaagcagcactaatttgtattatgtcctaaggtactgtacccagggacgtgagcgggttggaattc

SEQ ID NO: 113697 - DNA, 769 bp, Selaginella moellendorffii
  Intron number 1 from transcript 428364 (locus 428364) deri ved from phytozome v7.0 (chr-ID scaffold_101; pos 238895 t o 239663 reverse strand)
atctccagcccagaggacaggtccaactagcatcggacttttccccactctttcattctccagcgctgaaatttggctcgacactggcctcgtctagcttcccagatctccccagcagatccaccaagcatcttaagtgttccatgatcgtggacatgctgtagtcttgggctatggacgacaagtagttctcatcccgagatgactgcaggcagaagagctcgctctgatcacagtagcttgcaagatgcaaaggagggagaagcgttgcaaaatgttttgattgggtctctggctgtggattcgaacctgtgaccttgccatcaggttcccgtccaaatcggacactaattgcttcttaacgtatatcataccttcaccataacggcgcaagctaagcatcctttctaaacccgtgggaacgttttataaggctgtcatcctttctgcggttgtcaagctcaagaaagaaaccattatggaatgaagatttcaccactgaatccctgggataacctaccttttcttcttttgagaaacaaggtttccctgcatccaacgactgaatgtccgaagatggcttggttgagcattgaagattaaattgatccaggcacgctcttgattagcagcaaagttaagagtacaaggctggaggtacttctctgttctttcaaatcctggggagcttgagatttcatcaaggggctttcttgtcgtgttctatccaagtttgatgcttgttcctagcagcaacaggaaaaaatcc

SEQ ID NO: 113698 - DNA, 899 bp, Selaginella moellendorffii
  Intron number 1 from transcript 411777 (locus 411777) deri ved from phytozome v7.0 (chr-ID scaffold_16; pos 736667 to 737565 reverse strand)
aggtggtaattatgctaaaggccgacatgatcttgaatgagcaagtgcacaagactattgtccaagctcaagaatggtgttaggtgaaatggcttggaaaggatcccaacatcttcaaattccactttgccgtcttaagcaaagtcactgggtgcgctcagcctatgacctcaacatggctatttatacctctttcacagaggttggactcgagcacactgctggatcatttattgtgtcgtcatcattccccagaacaaatcgcatagacatggttactcacgagatcaagcagatttgggatcaaatatagcagaggaaatctcaagagtttgatactttgatggcatgccacaaggagacacaagcctttgtaggctggatgttcttcattattaatagaaaccactggtggctagcattttggaagtgtatccaaaagaagttccagaatgatgataagcaacatatttgtgttccaatgacacttgtggagccataggattgaaaccaagctgtgaggctcaacttggcatgtcacaagattaacatgtaaaaatcttttactagtaacctttgttcttaccaactatgttacaggcttaatcagtttgctttccaagcacataccttggtccataatatcaagcacctgcggtatattggcatgctttctctcaaggaaatccagatgctgtatagtcgtggggttatggaagtagttcaagcaaaatttgtagcatgtaaagtccaaaagttgcttacatggtatcaagtgcctatgaattttttgggtgcggtctgggcaaaagtatccttttcttgcatgaacttgtgttttctactcacaagtttttcttttagcaaattgtcaaggaggagcaaaactcatatttgaa

SEQ ID NO: 113699 - DNA, 716 bp, Selaginella moellendorffii
  Intron number 1 from transcript 410704 (locus 410704) deri ved from phytozome v7.0 (chr-ID scaffold_13; pos 1471755 t o 1472470)
gaggtgccttttgaaaagtagaattgaaaacttaaagatatataattgagatatcaaaaggctagatgatctttgccaatcactacagttgaaagttgtgttgaattctggctgctctagagaaattcagaattttatagaaatacaatttaaaagaaaatagcataaatgtgaggttagtagagttaagaacactaatgtatagcttttgagcatataatgtcaagattgataggcaaagagcttataccttgagcctgagtattgctccactccaacaaccattgctcaattaaaagagactactcagtgcaaagaagaatgaaactcaacacactttagagtgcgaagactaaacctatgaattataataaggaccaagaaccacaagaatctatcacaataaggcagagttgccaaactttctgggctgccggatccaaccagttgcagctgtccgatgggggtaactataaaggggttatttatttgaccatatactagcaaataattgtgctgatgtttgctctcagccaatgggatgtagccaaattgcatggggtgagagaagaaggctttgcaacatgtgttgcatgcaaatgtgttgaccattgactgcacctatcatctgtcctgtccaaacttagatctgctttgctagtaaggtttccatttatttagttcctcctcctcaaagacatcctggagatcaaaga

SEQ ID NO: 113700 - DNA, 587 bp, Selaginella moellendorffii
  Intron number 3 from transcript 427523 (locus 427523) deri ved from phytozome v7.0 (chr-ID scaffold_91; pos 651758 to 652344 reverse strand)
caggctctgaagttccgaagttcttaacaatctacaagcaccagtatcatgaaaagaccatggttgatattggagtgctgagatatccagactccatagataagctctttaaggttagcaggaaacttgatacaacattaccattaacgttttttctttcattttgtgatatagttgtaccatctacagctgactgtttgggctgatagcacgctcgtcttaggcgtggagaaggcaactaatggcattactggaggtaaccatgtagtttattcattctctttggctctattgagttgtttatgttgcgcagagttttactaccgtgagtttaaaccgagaacaagcgtcatatctgggatgaagaaggaaattcaggcaaaggctgctaatgaagccaaatccatgttcacaatttgaaaactctgtataatatgcataaactcttaacaaatgaaataaattttactataaattctggaaatattgtttgattgtttttgttcaacttaatttttaatggacaatttaagaaactttatgattagtgacttcatatatgacaacatattattgtgttatgcagt

SEQ ID NO: 113701 - DNA, 513 bp, Selaginella moellendorffii
  Intron number 1 from transcript 268522 (locus 268522) deri ved from phytozome v7.0 (chr-ID scaffold_51; pos 954324 to 954836 reverse strand)
tagatctccacgccaggtacttatattctatctcctcttcctctttctcctctttcccttctttatggtcggtcctatgtatcgtgtcgatggttttcacattctttgcgatgttggaagctaacgatttgtttgatttgagccacttaactaggaccttcgtagatgatctggagaatctctggctcggtaacgtaaccatggaaaaaaaaaaaaaaattggaattttggtttagttttttcttgagaggtattgatatggtttggtatggtaaaacgagactcagagcttttgtttctctgtctctcttcaactttgctggtgcaaatccaggagtactttttagacgctcgttggcatcggtaaactttctaattcctaagtagctgaatttcgagcgagaaagagatgatttccttaagctagctagagatttagttggctggtttggttttatatcttgttcttcttccgcgactcacatttgtttttgctgcgttccaggctcacag

SEQ ID NO: 113702 - DNA, 954 bp, Selaginella moellendorffii
  Intron number 1 from transcript 428323 (locus 428323) deri ved from phytozome v7.0 (chr-ID scaffold_100; pos 629703 t o 630656)
ctcctttgccgaggtcgggtttgggagcacagctggtaccttcatcgtttcaccaactttccctggaaccggccggacagagtcagtgactactgaacttgaggaaaaatgggatcctatatggctgcgaaagtctcctgagtttgatggattcttaggacaacatgtggagacagtagggttcattggaaagctcttttgggtgatcgatggaaaccataggtggctggcattttggaagtgcattcaaaagaagtttcgagatgacgaagaacgacacattagtgttccagtcacacttgtcgaaccaatgactcgggagcatactgtgaagctcaacatggcatgccataagatcaacatgtaagaatttattttttgtaaacttagctaatatcatgtttttgcaggctaaaccaatttgcgtttcaagctcatacattggtacatgacattgagcaccttcggtttatgggcatgctctcgctagaggaggtccaaacgttgtacaatcgtgaggtatttgaagcaattcgagtgaagctagcagctaggaaaggccaagaattgcagacttggtaccaactaccacttgattttctaattgctgtctgggcgaaggtaaattattattgaagtatgtatcaacttacataatgtttcttgcagcccataatcaaaggagaaagagcgtcattctttaaaaatgcccgaggggacgagcagcagaaggagatggagtggcatgcgattgagcagcgaattttgaatacgaagagaacaaaggtgaaaaaatttctctcgattgcagacatacgacatgggcaggaatggcttgatagcattgccgagatttgttctcgcgttcgtaagttcttataaaatttgtgaaacatttcataactctttgtgtgtgtaggaactggtaaagcaccggaggaactcatttacaac

SEQ ID NO: 113703 - DNA, 450 bp, Selaginella moellendorffii
  Intron number 3 from transcript 421194 (locus 421194) deri ved from phytozome v7.0 (chr-ID scaffold_50; pos 947341 to 947790 reverse strand)
ccataaacacgtaaacctcctcttttctttcattttttaaaatttttttcttcaggaattccatctcttaggtctatctcagactccattttaagtctagctggggtgtagggaatcaaaacacctgatctggtaaactcatgaagccttgttccgctattcctgtgggtacaccaaaggcctcagctaggattctatagacagcaacgctgcttcttgatcttcctcgcattggttattattcttctcagaacttggtagccacaattttcactaatatataaaacaagcactgactaaagtcacgcagataccgagttcattaaaaaaactggaccgcataaggtgctggtatagcgccataaaaaaaattacgatgctaatcaaaatctctctcttttgcacttctttttaggtgaaagttgttcttttttttgacacaagagagcg

SEQ ID NO: 113704 - DNA, 908 bp, Selaginella moellendorffii
  Intron number 1 from transcript 404137 (locus 404137) deri ved from phytozome v7.0 (chr-ID scaffold_2; pos 839764 to 840671 reverse strand)
cctgtggatccctgctgcttgcacctcggtattttatctagagatcaggggattaattaacagcaaagaacaactcaaaaaaaaaaaaagaggagagattgcataagagctggagaaatggcacaaaaaaagatccagcatgtccttattgtgtttccacctgatatttgttgtcgaggacatcacttgcgtcaacgatgtttacttgctttgggatgcgccggcctacatatactaatacgtaacgtatgtattttcccgataaactcagacatttacaatttacagaagcatttgtatagtgcattttttttctatttatcgaatgaggcggcgcgaggtttcatcgccggtatcgtctgaatctgatcatgtggagcgcgatcgcagcatccacagaagtatcgttctctcccgctctcggttttttttaaaatttttccgttgtgcttcttgcaagcactgacatagaatcgttctgccgcagattgcaggacaaacaccgaaatcttctctgttccagcgccgaggaggcccgtgcagcgtgcgcagtgatagcggcctaacagcgagcagctgcgcgatagagacgcgcccatcgctcgaggaaatcgtcgagatagcggcgctcgtccgacgattgcctgaaagtgaaagtatactactggttcgtaaacaagagggccaagcgctgccgcgatgccaactccgcctcttccttccccgcggcctccgccatcgccaccgccgtcgcttcatcctcctacacttttcttgaagaagaatggatcatatcttcaatcccggatgcgacaaggaaaaaaaaagaggactgggcaagacgatctttgctttctttcttttctttcaatccaacgtgtttctgtgcagggtccggcgggcagtct

SEQ ID NO: 113705 - DNA, 328 bp, Selaginella moellendorffii
  Intron number 2 from transcript 412223 (locus 412223) deri ved from phytozome v7.0 (chr-ID scaffold_17; pos 1134413 t o 1134740)
tgcacattacagaggttcgtttctgttttcaagtctgtcttttaactcctcaaatgtcttgatcattatgaagaagagaacccattgagaaaatacagtgttgggcagactgttcaagctaaaatcctttcaaaacgcaaaaccagcagaaagcacagaaatgctgccactttggatttatctctacgtccatctgagcttgcaggtctatatggtggccctttgaattagcttacttatcatgacttgcaggaaacgatgctgcatgcttagtgattactgcgtaaccattgaacagtcgattatcagatacaaaggacaactgggc

SEQ ID NO: 113706 - DNA, 502 bp, Selaginella moellendorffii
  Intron number 3 from transcript 424110 (locus 424110) deri ved from phytozome v7.0 (chr-ID scaffold_65; pos 477391 to 477892)
gctcgagtcaggtgagcgcagtgaaggtgagcactgcgtttctggatttcaaaactaactacttcagacagatgtatgctaatttttttggtgggagaattgccctgttgaaatgcgtgccgcttatgacaaggtgagtggtttagtctcatgaacggatttgcagttggcaaaaggtgtccaagctgcatttcttttgaagctggaggcaaatggatgaaggctttgagatcaaatccaatttgaagaaattgagcttaatttattgccttgagcgttttgatggagttttaaaattctatcttgagcttttcactgtggagtacatgtttgaacctttgcaaagatgatttctcaaaaatgtggatcttctttccttctggatttttagtgtagactaactcatctccttgaaaagtatacatgttgccactgacattggagtgcctaataatatcgataatctgtatggtgatctagggttctagggttaggtctctca

SEQ ID NO: 113707 - DNA, 301 bp, Selaginella moellendorffii
  Intron number 1 from transcript 444770 (locus 444770) deri ved from phytozome v7.0 (chr-ID scaffold_47; pos 1076195 t o 1076495)
tccggaagtggaagcgtggatctctcgccctcgaggtactgtacaaacaatgcgaattcttcctttggttccttcttttgttttctcccttgtaatgttgtgctaccattttttttcccggtgattctttcgtttctcgagtttttcttctattattcaagaatttcactcctttttttccttgacttgatcgttctcctcgttcctttcttgagaaattactttctttccaatgacgaatgctcaaagtttttggtttttctaactttctcacattcgaactccacaggttgccgattgg

SEQ ID NO: 113708 - DNA, 976 bp, Selaginella moellendorffii
  Intron number 1 from transcript 85389 (locus 85389) derive d from phytozome v7.0 (chr-ID scaffold_7; pos 2347612 to 2 348587 reverse strand)
cgggaaggggacacagtgtgaggagcttgttaaaaactacggatttgttcatctctccgctggcgagcttttgagggatgaaataaaaaacaagacacagattggaatcagctgcgaagaacttatggcagaagggaagcttgtgccatccgagattccacttaatctcttaaaggcggccatggagaaatccgaacacaagcattttcttatcgatggatttccacgatcagtggatcaggcgcagctcttcgagaaaaaggtacagcatttgtcacattctttgaattattttctatcatgttctgatctcgttttgagcagattggaaagccaaatctggtgatatatcttgaatgtccattcaaagtcatgcaagagcggctcttgaagcgtggtgaaacaagcggacgcagcgacgacaacatggagaccatcaagaaaaggtttgaaacttaccgcaaggaatcgtttccggttgtcaggttctatgagaaggttccaaatcttttgaagacggtgagagagttgacactctaaaacttctttatactgacttaaaaaactgactttaaaaactgtgtgtgcaggtctcttccgccatgtcgccgaccgaagtctttgagtacattgcgcaacttctcaaggatcaatatggtctttttgcaaagttcgcgcctgttcttacaggattcgaccacagacaacacaactgtaagagacgcaccattattttcgttctaggtacttctcccctcattcctttccttgttctccagatagcatttttttcctcaatttttttcctttgactttctttgtttcaggtggccctggctgtggcaaaggaactcagtgcgagcgaatggcaagtagacagaaatatttagctaaaggatgactgaagtacagtttttctgctttttttttctttttcacaggtcagagactttggctactcgcacttgtcgacagg

SEQ ID NO: 113709 - DNA, 269 bp, Selaginella moellendorffii
  Intron number 6 from transcript 439212 (locus 439212) deri ved from phytozome v7.0 (chr-ID scaffold_5; pos 4007263 to 4007531 reverse strand)
gctagttgatcaattggtccaactatcgaaaagtggtataacaaaggatttatgctcttcttttgctactcaagattgcatccatcgatagcagagctggtgagaattcaaacaacattttgcgtttatactcgtttttctttgtactgttatagatgcaagatgatcaaggaaatgattatttcgtcagtaacgatttcggagtctacgttttccccgacagttgtatatgtttttcattccttcagtttggtctgatctaacaacgg

SEQ ID NO: 113710 - DNA, 842 bp, Selaginella moellendorffii
  Intron number 2 from transcript 271394 (locus 271394) deri ved from phytozome v7.0 (chr-ID scaffold_42; pos 424557 to 425398)
tggcccggcccaattggccgaggctgtagcaagcggtactctctctctctctctctctctctctctctctctctctctctctctctctctctctctctctgtgtctgtgtttgtgtgtgtgtgtgagagagagagaggacattgtttcttcgctatcgccattatatttctttctctgttctctttgatctctatctctatctatctctttgatcaaacttccacgaaactattcaccttcttcctgttgatcaaagtgctatcatcactctagatcccttccttttgtttaactatacactggtcttcctttttcatcattctttctctttctctaacgacactgtcacttcccatagtttctctttgatcaagctatcatcgtcttcaaccgaactattcattcttttcttcgatcaaactttcttcgttatgttcgtttcccttctcttctgcgaattcttttatgttttttttttcttttgatcttcctcttctatcattcttctcttaatttacattatcatcaccatttcttcgctactatctttctttgtctacactctttgatctctatctctttgaacttcaacgaaactattcatctgatcaaactatcatcactcctctagtttaacatctcgcatggtttctctttgatcaagctatcattttctattcattcccgtttatcaaactttcctcgctatcatatctttgttctttcccttctcttcttagtctctatcatctcataaaactaacacgtcttttcttcgatcaagcaatcgtcctttctcgcttttttcattgctcgttctctttgcagtcgctacagagcc

SEQ ID NO: 113711 - DNA, 364 bp, Selaginella moellendorffii
  Intron number 3 from transcript 413736 (locus 413736) deri ved from phytozome v7.0 (chr-ID scaffold_21; pos 1382049 t o 1382412)
aaattgcaatcacattcattatcactttggggaaggtaaatttgaatatttataaacaaatgtttgatactttttagaaagtggtaacattttacatgaagtgatattgagatgccattccaatgataagcatccagaacttcaaacaaggcttttgatgagaggacaaaggaagaactaaccaagaaaaatggctagaggtatttggaaacaaatcaagagattataaaacaatttctcttaagtcatctttgtatttgaaccaaaacactgaaaatgtgatgcaagaaaaattaataactgtgattgagaatgctacttgagcacagctcccaagctacacatcaaagaactcaatccacct

SEQ ID NO: 113712 - DNA, 673 bp, Selaginella moellendorffii
  Intron number 3 from transcript 407854 (locus 407854) deri ved from phytozome v7.0 (chr-ID scaffold_7; pos 3120263 to 3120935)
ggcttgtcgactccacgattaggcaaaggcaaagggtatgttttcgtgaatccaatgattgtcaagtttgggaaagagcgagaagctgatactctagaaggatgcctacctttttacggcgctcaagccgatgcctaggtactattccttttgtacatagagattctcttttataacttgcgtctttgtttccagagaccgatatcgatctgagttgaaagctcaagatatcaatgatgctttatttcgttaaagtgggatttttcattatcccacttatagtgtgtggccacatgccatttttataacaacaataaaaaattgaagttttaactttataatttataaattaaaaacttttcatatgattttgtgttataatattgtgaaatataaaaaaataaattaaaaaactgatagaaatattaataaatattaattaagtactaggaaatggcatgtggacacatgctaattaatgtcccactttactgaataagtcccactttaatgaaataaagcttaacgggaagaaatttggtaccaccttcaggggctggactgctcgaattttccgacatgagtatgatcacctggaggtaatgtctcgtttgttttttttctgtgcaaacatcaaggtggccgtggtatttgttcgcacagggtgtccttt

SEQ ID NO: 113713 - DNA, 513 bp, Selaginella moellendorffii
  Intron number 1 from transcript 409173 (locus 409173) deri ved from phytozome v7.0 (chr-ID scaffold_10; pos 412873 to 413385)
agctcggcttggcacagggcctggtaagccagcatctcctgcttcgcctaggcctcgttgatcctaccattactctcgcccctgttacttaccacgcacaggctctcacgggaatgcccacacaaccgtgtccgaccagagtagccatggagccctaggagtgcatggcatcttgtcaccacgccctcttcccttcccggccacgcgtgcatcccgcccattggccgccacaacattgagccgatattcccgctaaccatggccaccggtcctggcccgagcctgggctggcctccccttgccgagaaccatggcttccgaggctgccccgggcctgggatcggacggctgcgggggtgtgggttcttcgttcttattattatagatattactcaaagccaagaaaaaaaaggagaaagcttccatgtttgcttttctttcttttcctattttgtttcagttttttttttttttccagcttgagttgctgcaggagctggtgtgcgagtgatc

SEQ ID NO: 113714 - DNA, 462 bp, Selaginella moellendorffii
  Intron number 2 from transcript 413956 (locus 413956) deri ved from phytozome v7.0 (chr-ID scaffold_22; pos 684999 to 685460 reverse strand)
cagtaagcaaagcattatcacttcacttgataacacatgctttgttttattcgctaaacaggtccccgaaaagcttggcagctgctttgctcgattttttctcgcaaagacttttggatgagagttgagcgagcgagccatgttcaagacgacaacgagccaatcatgccctgcaagctttgactgcttacttccgtcttgcaaccatcttcgttccatacaagaagcattctctcggctgggggactgcgaggaaaataattcacacaaccaagtaagcagtaatgcctgggccacctgcaataattttgtgagatagatccctgtggccgaatggaatcggagtttagtgttcttgtccacaacgaattggtggccacatattcccatggtagtttctctcttcctttttcatgtcttctttgttcgtattttttataatttcgttttgtggcagtaccg

SEQ ID NO: 113715 - DNA, 510 bp, Selaginella moellendorffii
  Intron number 1 from transcript 417053 (locus 417053) deri ved from phytozome v7.0 (chr-ID scaffold_33; pos 303010 to 303519 reverse strand)
gacgttgtcactggtaatctggacgattgtgtgagcttgaagttttggttttcttaatcgcaatctcagatacgatcttaagccaacgaaggagatggtcttcccatcttccacatttcactacacttaagatgagagtgtggattcgttaaagggtcaccacagttgtgcttttcaatgacagtcccaggaagtcgtcattctcttcaactaaaagcaacagaggaatctctctagagaatgtgaaatagaatcacaaattctttgatacaaaccaagcttacccaggcgtcgagccacaatttcgtgaggtgcgcgtcatctcgccagaagtatttaagctcccccttttgcctttcgcctctaattataaaaagcatttatgttattaagtccataattggacttgccaaagcatttaaggatgtgattcatcttccttctgtttttatatgcaattgtttcgtgggctcagatagtaagattacctttggactcaacacagtctgg

SEQ ID NO: 113716 - DNA, 553 bp, Selaginella moellendorffii
  Intron number 1 from transcript 409165 (locus 409165) deri ved from phytozome v7.0 (chr-ID scaffold_10; pos 351024 to 351576 reverse strand)
gtgtggacaccgttcggccatcagaaatctccaaggtttgttcctggatctcagccacaaagaagagacttatcctcttgaatcttttgaggaaaatattttcaccccaatttcttgaaaatgtgattagctgacagatctcgcaaaaggccatcagatctctgctgtcttcttttatccttcacctgtaactcatcttctttcagtttttcctctcttcttttcattcagatatgtaatattgctactcaataaaacctttgaaagcaataaaactatagcaaatcaatctccacgacaacagattgggaatgaggaaataaaaacagtagatagatcttcaaagaagaacaatgcatcttagctcgttctaaaagctgtcgttcttggcatgaaataatgggaaccagtggttttaccctaaagactacaaagaggcagaattcaaatggggccaacgttttgccaatgatcctagccatccatatcaagcattataggatattataatgcatcaatgccaaaaatagcaactttaaataaggaggatacc

SEQ ID NO: 113717 - DNA, 275 bp, Selaginella moellendorffii
  Intron number 1 from transcript 437874 (locus 437874) deri ved from phytozome v7.0 (chr-ID scaffold_1; pos 2871413 to 2871687 reverse strand)
cgctaaatccttccttcttaaaaacctccatcctggtagggtttctaacttatttgaaagaagcagaattaagaatcaaaggttccagaagcttatggataaataaacataaaccgtttcttttcaaaaaataaaggtgacaaaaaaagtatatcatttcgaaacaattgacgaagctttctttcctttttcttctgcggatttctacgatgtggagataatgctaatgttaaaggaaggaagaattatttgttctttggatttttctatagagg

SEQ ID NO: 113718 - DNA, 497 bp, Selaginella moellendorffii
  Intron number 1 from transcript 439188 (locus 439188) deri ved from phytozome v7.0 (chr-ID scaffold_5; pos 3572555 to 3573051 reverse strand)
gaggagttagtagtataatgaataataatctctctgcaaactcctcgcaaaatcgaacagtttcagagcgtgcaaatcaaaactatcacgacactgagttacactgaaagaggaaaccgttgaatggattcgaaccggcaaccagatgaaacaaaaaatctgttccgttgatatttctatatttggcgcgagacgcccagaaaaatatctggcggagtaataagctgccacgtgtgcagatgccattggccacggaagcacggaaaccagcatttgtgggattcatatgccacggagaaagatctgttgcttgcttcatgcaaattattcttcttcactccatccattcgtggccccctcctcttgaaaagagagaaaaaagcttccttaggttggagctcggtagaagaaccatctctctctctctctctctctctctctctccctctttgtatttcttctctatctcttccagggagaagatcgagcgcggagct

SEQ ID NO: 113719 - DNA, 587 bp, Selaginella moellendorffii
  Intron number 4 from transcript 429803 (locus 429803) deri ved from phytozome v7.0 (chr-ID scaffold_120; pos 175105 t o 175691)
gagattgatatcgtcaaagggaacctgcagacaatgtaaactccgcatagggttcaaagctttgtttttctgcgagtgctgtcgctgttgctcgcgagccctagaatttatcaaactgtcaaaatttgctgcagtgggtattttcgttgagacatggctttggtgttttgttccttgcagatcatagccctgaatgccgtccggcttgggctcggcatctttgacgatggccaaagagttctttaattatgaagacccaacacacttttcttggttctgttatcataaaaattaagactttgcttttcaaaagtaaagagttttgcctgaaattcttcctttgaaatatttctaactttttaatgagttaataataattttattcagtgaatattaccaatagatccttctccttgtatatttcttggcgggtgcagaaagacttgaatagtcagtcatacccgggcattatatagcttacacagccctggaaaaacatagaagaagatccatcatgggaccctcctctatccttagcatttttgagggcgccaaaagcttttacataccaccgcacagctcttatc

SEQ ID NO: 113720 - DNA, 598 bp, Selaginella moellendorffii
  Intron number 1 from transcript 415427 (locus 415427) deri ved from phytozome v7.0 (chr-ID scaffold_27; pos 701014 to 701611 reverse strand)
ctacaaagagctagaaagccatcacttacagcaaggttcttgttgggatcttgtttttcttcctcagcagatgatacaatgaaaaaggtaaagtcaggtatttgtttaacgtccacttggagcaaaccctgctcatcggatggcctcatgacaacccattacaacccaggatgaaaactccacatcaaagcttaaggcagcattgcttgtgatcaccttcatcttgctttacaaactgaagttatcataggttcgtgattggataatgcttgatggtgctgagactcaaatcatctttgttatggaaacaaccccatcacctcaaggtattgttttttatccccataacagtggtgcactgtttccatgtgtagttcccgaggaggtcccagttcccaggatggccttcggtaaaaggatcaggacgatacatcagagagggaaatacactgaactggatcctaaggttcaactgggagaatgctctgcaatacactagtttggggagtacctatatctgatcctatatagaatccgcctcagttatcctgggaaggtaatgagttcagtgtgtctttttttatgtgcaggtctaagc

SEQ ID NO: 113721 - DNA, 680 bp, Selaginella moellendorffii
  Intron number 1 from transcript 413776 (locus 413776) deri ved from phytozome v7.0 (chr-ID scaffold_21; pos 1569753 t o 1570432 reverse strand)
gcgagggaaggacgcgcccggacgcgatcacggtaagcatcctcagcgcttgctccattctgggagagctcggcgcggggaaagctctccacgagaggatcctcgctggtggttttgattccaacgcgatcgttgccacggctgtggtgacgatgtatttcaagtgtagcagcatcgatcgagcgagggaagcatttgacgggatgaagaacaggactgtcgtgtcttggaacacgatgatcacagcatatgcccacagaggggattttttccaggcaatgtttctctttgagagcatggatctggagagggattgcttcacatactcggcgattctgggtgccgcaaaagatctcaagaccggaaggaaaatccaccagatgatcttgggctctggaattcgcttggacgtggcggctttcaacgctctcgtgagcatgtatgtgagaggtggaagcatgggcgaagcgagagaggctttcgagtccatgacgatcaaagacatcgtttcctggaacgctatgatcgctggttacgtccagtttggctatggagtccctgcgatcgagctctacgagagaatggtttcgtctcctcgtaagttgtttctcttttctttatgcactgtcttcttagttttcatagcttgatccagaaaagcccaacgcgatcacttacgc

SEQ ID NO: 113722 - DNA, 690 bp, Selaginella moellendorffii
  Intron number 1 from transcript 129480 (locus 129480) deri ved from phytozome v7.0 (chr-ID scaffold_95; pos 145032 to 145721)
agattcaaggtattagtcaatgctttctctttcgctgattaggccgaaggagttgacatcacagccaatgctgttcatccagggttcatagtgacacctttgacgcagtgcacactctacataatgagcttgtctctttgcctcgtttgtttgcctcaatgaaaggaggtaaggttttactctgatattaggatgttgatgatacataatctttttttcctaagaaaataatatatcagaaaatttaactatggtccatagattgatttaataataataaaagcttaggtgatgatgaatcatattttttaagatggtagccttttgtattgtgtttaatgttgtctcaatcatatttttacctttacaccattgtatttatttttatattttcatgtatcaatgcacaaaaagattactcttaaaaacagtattataactttatgatatcacacaaatcttaaactatatctactttgatgccatacacaccctacataatgagtttgtttttggttacttatggaactttgatcttcatgcaggggttctcaagttcttctccagcttcctttggaaaaatgtgccacagataagaagaattctcccaataatctggaagtttttcgtgactaatatgtgattgatctctcagggcgctgctacgacgtgctacgcggctttacatcc

SEQ ID NO: 113723 - DNA, 618 bp, Selaginella moellendorffii
  Intron number 1 from transcript 417059 (locus 417059) deri ved from phytozome v7.0 (chr-ID scaffold_33; pos 359639 to 360256)
gttcgacagtaaattgtacggattaattgccaggaagatgctttctacgataagtgatatatatttcaacaaaacacttgacacggcatgctctcctaaaattgcatttaatttgcaattaccacccatacaaattgatcttggacaaggaattttaaaaattccaaaatcaagctatatgtcacctattgatggagtgggattatgtgtgaattttagattggatgaaggaagaaaaccaataaatattattggtttgtcttttttgaaaaatttgagagttacatacgatttaaggtcacgaactatgtcttacattcaagaaatgtaaaactatatatatccttaaaacgaacaggaaaatttccctcacctaagctttacctatgaaggcagagttagaggcgaggctgataaaagaaggggagaaaaactaactgaggaagcccagccaaacctgcttgccagtagacccccctcagacccattcctcaaaagctcaaattcttgtggaattcttcataagttcagggtctgatatagattttggtgctggaacttcacttccctgcttgttttccagcgcgttggcactccattgccaagctcgcactgccg

SEQ ID NO: 113724 - DNA, 469 bp, Selaginella moellendorffii
  Intron number 5 from transcript 406875 (locus 406875) deri ved from phytozome v7.0 (chr-ID scaffold_6; pos 832068 to 832536 reverse strand)
aggtacgaagagctcctgttcttagtttaagcttccaagtttcttcctttgcttgttttttggtgtgtccctcttttgggtaagaactccaccgtttggccctttgtttggagattctcaacttggtcataattttgcttgatctttcccttgtctcatgagcgtcactgttgctacttcactgtgaactttactcctcttgtttgtgctgtcacatatcttcgcgagcaaaacaaagccccgattcccctccatagtgatccaaacgtttctcatgtataaagactgttttttccccttggtttctcgctcctgtttgatctggcatctcttcgaattgagcagtgcttctcgccatatcattacttccgggcttctacagaaaaccatttagattgctcttaaacttaaccggcatcatttctttcctccaggactacggagacatagagaaatacgtttgcgacgc

SEQ ID NO: 113725 - DNA, 968 bp, Selaginella moellendorffii
  Intron number 2 from transcript 429697 (locus 429697) deri ved from phytozome v7.0 (chr-ID scaffold_119; pos 84675 to 85642)
agaacgttggtggatcgctgaagctttggaatctggtgggatgggaaatacaggggcgaggatccagccttcacacaacaaaaatgtttagagacaggatgctttttgttgtgggtggccactcataaaacttccccgactctgtctcaggttaatgtaatgtagaggagctttgagatccatctcacttcagtgctctctatctcaagttcatgcttttgacacggggacttaactgatgttgcacctttgccataggtgctcaatctaagaacactgacctggtccaaagttgagcaaaagctcccaatgtctccttttgtccttgtccatgccactgatcccaccctgtgctggtcatagcctggtaatttttttagctttatactttcatcttacaatattcctgagtgttttcagattctggaggacaggatgttgtttgttggtggccacttgagaaacccttgactctatctcaggttaatataatgcatttcagtgtctcacttcagtgctctctatctccagttcatgtttttgatatacagactttcacttggttgctttttccaacatatggacaagctccggtgcatgtgacctactgtatcacgaacctgagattgaccatttgctgtttgaggggccagtctgtttcgctgatcagatcctgcttagtggagtcatgtttggtggagaagactccaatagttgtctgctcaatgacctcaacatctgtgatctggaaacaatgacatggaaagcaatataagccagcacggacatatattgcatgtgaggtatgctattttgattatccttgctggccttactccgattccatttgtcattttctgtcctgcctagggattgagtctcgtcttcatgtgtttgaatggcgaagaaacattaatagccttggtttttttttagactgtgacttgtattgaggtggaagctgtcag

SEQ ID NO: 113726 - DNA, 788 bp, Selaginella moellendorffii
  Intron number 1 from transcript 416033 (locus 416033) deri ved from phytozome v7.0 (chr-ID scaffold_29; pos 814539 to 815326)
caatagcgctcgtttgcaaccccagcatatcctaagtaattagcagctagcatatctctgcgctggagaattcctcgcgatttcaccttcttgaatccatagggcgtgctgtgtttgtggcttgcatcctctccaattagctgcttttctcgccctcctcgcctaggaattcctcttgcttggattccagcgcccattctcagaaaggtttctgatctcagtggttaagtccaggaaaatgaaggaagacttctttacttttgtaaagtccaaagaactataagagataagagatcttaaaaccaacaagcgaaacaaaaactcagagtatttggaaagaattcaagagatttttgaagctcaatggaataatcaaagagctcacaagattcgatctagtaaaagaaatcacacaaaccaggcttgtgtacattgatctcccggcagtgaatctctgctatactctacctggatattcttgcttggtctggatgtgacagttgattgatctcttgagaatgatctggatgtgatagttgattgatctcttgagaatgatcgggatgttcttcttctggatgtgataggcctagttgatgacaatggacttctgctatactctaaacatcgggaacgcaatgaaaacccggagtggaccagtgactttggtcctggagtgatcggtgttcccgtcacacatccaggcgctgatactgggctccaagctagagaatactttgaattacggggcagtgagatctgcaacttggaataacagcggctttgct

SEQ ID NO: 113727 - DNA, 436 bp, Selaginella moellendorffii
  Intron number 3 from transcript 414398 (locus 414398) deri ved from phytozome v7.0 (chr-ID scaffold_23; pos 1568137 t o 1568572)
tacctcttcatcaagagtcagttaagtgtaagtaggtttagatgaagtctgatgtttcttttgataaatacaaaacttgggttgtggctaaggatatctggtgtgagacattctctcctgtagtgtgactcattactgttcatctatttttggcttattttgttcatcataatccttttattaattagatagatgtgaaaattgactttcttaatggtgatttatctgaagagatttatatggtgtaacctttaggttttgaagtgactagtgaaaaacacgaagtttgtagactttggaaggccttatatggactcaaacaacctttttgatcttagtataagaagattaacgactttcttctttggcacttctatgttgatgatatatcattttggtttctatgcagagctccttgtacacattaggagattga

SEQ ID NO: 113728 - DNA, 409 bp, Selaginella moellendorffii
  Intron number 1 from transcript 414977 (locus 414977) deri ved from phytozome v7.0 (chr-ID scaffold_25; pos 1458762 t o 1459170 reverse strand)
ccgtacgtccccttgcgttcaacgaaaaagcagtggacattgtgtacattctacaggacgggacactcatatggttgcttcatgggaagcaagacagagcaagatgtgccacgaaacatggaaaaaggacctggcatagcaaaggtgaaggtggaacaagaagtgcctggggactgagagatggaattgcatgtgagaacacctcagcctgtgcaagttactagttactaggggaaagctgtgccaccacaaccaaagaatcatagaatggcgcaaagaagctgtcaggagactcaatgaatttcttcttaatcttgacttccgtacttttaagcttgagtttccagttataaatctttgagttttttgcgcagaaggccatccaagtggagcgtttcagcgatagtgc

SEQ ID NO: 113729 - DNA, 716 bp, Selaginella moellendorffii
  Intron number 5 from transcript 423300 (locus 423300) deri ved from phytozome v7.0 (chr-ID scaffold_61; pos 26926 to 27641)
caaagtgagttggataggacagtttgaggtaattacttcttgtaagcattgtgtgatcacgtaggtgtgggctgatcgtctgcgatagaattgtcatggtagcatagaacagagggtggaactaagcattaatcaggaacaattctagattggaaccaagtgtgacagcaagtgtgagagatttgtggaaggtatgcaatacattacacagctcacaattgatatacatctttttttctgtgtgggttatagcacgaagattggacttcaaggcaggaggatggttttaaatagattcccatgactgtggtatcttgtccaacatttccatggcagaactgtactttaatagtggaagatgaacatgggatgccaataccactgatttgtagttagaaagtggattttaatctattttctttacttcttcaatctaatatgtgttttggcaaggtttttgcaaatcttacgtaaaatgcctcaatgattggagagcataaaatttatgttgttaagggtcgcatttatacagcaaccatgtcgcaaatctacatcaagcagaaaaacctctggcctttaacggtttctttggaaaaaacgagtctcaaagcataccccttgcgcatttgattgagccccccattggcagtcactgaaaggtaaccattcgtcactgctgtgggatccaggagcgctggggaatctgaattggaaag

SEQ ID NO: 113730 - DNA, 397 bp, Selaginella moellendorffii
  Intron number 1 from transcript 424156 (locus 424156) deri ved from phytozome v7.0 (chr-ID scaffold_65; pos 818507 to 818903)
actcccactaaaattgaaccaagggtcagttgagcactctaaaactcttcattgccttcaaataataaagccaagtcaaagttgatcctatgatgttgcaagaaaaaggggcagaattgcaataggtgcaaccagtgaaataagagatgtaattttaacaattaaatcttcaaaggtggagatgtttcaagtgcaagtgtacagtcacaatagaaattagtctcatcaaagataatgtttctcctcttgtacaattttttcttctccaaagaataaagtcaatatcctttagagaaatcactataacctaagaaaatcatttttctatcttgcaagtgagcttgtttggtcacttctcttttgggttaaatccgattagggtttgatcccagcaaga

SEQ ID NO: 113731 - DNA, 588 bp, Selaginella moellendorffii
  Intron number 6 from transcript 423008 (locus 423008) deri ved from phytozome v7.0 (chr-ID scaffold_59; pos 1009295 t o 1009882 reverse strand)
ccattaccagtcaacctcaaacaagtgacagtaaagtaagatggattttacaatgtttgagtgttaaacttctattacatttactagactgagcttcctttgcaactatgctgagtggttggagaccatgggggtggtggtacttgtttcaaggatggtgtaacagagctctttgaaactctagagttggttctctacaaaaacctcttcttatggtaatcgaagtttctcactgtttatgttgtgtctaatcttcacaaacatccaggcataaaacttctgccatcccggtccagtcccggctgctattttttgtcataactgccatagcaaagcttgcaacgtgtcattgagagctcttgcctagagcttgagtgctaaggttttttttttttttttgtcttctctaaggaactttcttgagtttaagttgatgttcttgatgaaggtggcacaatcagatcaactactcaaaaagactgtctggagaagaattgaagatcaccattgctgcttacaactgagtccctgaagtggagaagctggtgatgaatgcaaagatggaccttgccttgcagcttatacagc

SEQ ID NO: 113732 - DNA, 873 bp, Selaginella moellendorffii
  Intron number 1 from transcript 431352 (locus 431352) deri ved from phytozome v7.0 (chr-ID scaffold_151; pos 31573 to 32445)
agcgagtacgtaagattattgtctaggctcaagaacaaactatcagtagggtgttaggtgaaatggcttggaaaggatcccaacatctttaaattccactttaccgtcttaagtagagtcactgagtatgcttagcctatgatcttaacatggctatttatacctctttcacagaagttggattcgggcacactactagattatttattgtgttgtcatcattccctggaacaaattgcatagacatggttactcgcgagattgagcagagttgggatcagatatggcaaaggaaatctcaggagtttgatactttgatggcgtgccataaggaggcacaagcctttgtaggctagatgttcttcattattgatggaaaccatcaatggatagcgttttggaggtgtatccaagagaagttctaggacaatgatgagtgacatatttgtgttctagtaacacttgtggagccagaggatcgaaaccaagctgtgaggctcaacttggcatgtcacaagatcaacatgtaagaatcccttactagtaaccattgttctcaccaactatgttacaagcttaatcagtttgttttccaagcacataccttggtccatgatatcaagcaccttcaatatgttggcatgctttctctcgaggaaatccagatgttgtatagtcgtgaggttatggaagtagttcaagcaaagcttgtagcacgtaaaggccaagagtttcttacttcgtatttggtgcctagggattttttggttgtggactaggcaaaagtatccttttcttgcatgaacttgtgttttctgctcacaagttttccttttagtcaattgttaaggtggagcaaaactcatatttaaa

SEQ ID NO: 113733 - DNA, 424 bp, Selaginella moellendorffii
  Intron number 1 from transcript 422726 (locus 422726) deri ved from phytozome v7.0 (chr-ID scaffold_58; pos 193053 to 193476 reverse strand)
cgcaggtgtggaggagatggatgagctcttctggctcccggcgatctggcaaagattctaggcttctttgcagcaaatgccggagcaagggcatacgaaaacaacgacaaagaaaaggaatgtagagagtatcgatcctcaattgagcgctctacaaccctttgtttttctcatggttttgattaacaatggggtctacctttagaaggagagatgccggaaaaataaaataattgtttgatcatctgtcttattgagaaactatcccaagaaacatagacaattattcaatgggcgagtttaactctacatttgaaataataactcaaatggcagaagaaggaaaagaaatggcaatttttctcgtcattatcctagcaacgttccaggtaactcaaggcacctccatcacaggcgccaacac

SEQ ID NO: 113734 - DNA, 453 bp, Selaginella moellendorffii
  Intron number 1 from transcript 437992 (locus 437992) deri ved from phytozome v7.0 (chr-ID scaffold_1; pos 4942216 to 4942668 reverse strand)
ccagcaacagaggctcatcgagctgattagaagtggtgagtctcgcatttccttctccttcttagatcgatccatcgcctccctctcttttggatttcctctccatagcgcgctcgtttgtttttggagattgtctcgttagctctgtgcgatcctttgattgatggcctggctgctagaagtgatctctttgtgtaggagtgatagatggtctcgctgctagaaatgatttctctccttgtgtataggagtgatagattagaagtgatctctttccttgtggatagttttttttctttctttggtagagttctcgcgatctcttcctttgcgtatcaatggttccaatggattttttttttctagaattatagatctttgtcttacaccttcctttttttctacgttttggatccagggaagctcgaggaagccttggagtttgcacaggag

SEQ ID NO: 113735 - DNA, 598 bp, Selaginella moellendorffii
  Intron number 2 from transcript 71303 (locus 71303) derive d from phytozome v7.0 (chr-ID scaffold_0; pos 2040425 to 2 041022)
aggcggccttccttcacaactcaagaacatccaaggtgatcactttgctcactcaaatccttctttttctcttccatagattgcagtgcttgcggtggctagatttcttgtgctcagggcatagatttccatctcctggattttcttctcccttttcctactgcagcgagaggaggaatgttttactttttgtgtgggatcgtctttttgtttttttggccgctctctttcttgttgttgctccatccagtagcgcagcactcgactctctctttttgtaggccctgatgatgggagtcatggacagacacacatagagacagcacacggggcgacaaaacaaggcctttaaagggaaaaactaagaacatcactccaggaggagagagaggggataattaattctctctccctctctctctccctccacactcaatcgtggatccaattcgtgctctcgatttgattgcttgtctgatttgtggcatgatttccaagaagcattctttccattcgatcgatcgggagactgaccgtccgaagttaaatttttttccttgcaggactcggagtgggtcgtgtgccggatcttccagaa

SEQ ID NO: 113736 - DNA, 384 bp, Selaginella moellendorffii
  Intron number 2 from transcript 406998 (locus 406998) deri ved from phytozome v7.0 (chr-ID scaffold_6; pos 1594992 to 1595375)
gcaagcactacttctgtgaaagctgtgctctcgaggtgcgtttttgttttgttcttccttcttccttttgtccgagatctctgttctcttttcttccaagttttagatctctttctcttcgatctggtacctttgttatatcttgttctctttttccgagttttagatcgagaagtctctttctcttcgagctggttgattcttaatcaccttcttggtttgaacttttttctctcttcttccaagttttagatcgaaaagtcctgctttctcttcgagctggttgattcaaagtgtcagttcttaaagtttttttctctttcgagctaaaagttttccttttttgcagcactacaagaagaacaaatcgtgttttgtgtgcaa

SEQ ID NO: 113737 - DNA, 314 bp, Selaginella moellendorffii
  Intron number 3 from transcript 429464 (locus 429464) deri ved from phytozome v7.0 (chr-ID scaffold_114; pos 511689 t o 512002 reverse strand)
ttttttattgcaagaaccactacttccttctaactgtaagaaatttttggcttttttaaatactatagaataccattatctacataaaatataaaactatttttaataaaaattattgaaaaggaaacatattttcagctgggatttatatcagttgtaagatggatgttgtagaaaatgctattgttgaagactaaaattgatttagaaattttttcttataaagactctaaaaaattgtgatattttattatatcttcctttggatggagcttcactttcttcaacttctttgattcctcctacaggtggtt

SEQ ID NO: 113738 - DNA, 497 bp, Selaginella moellendorffii
  Intron number 1 from transcript 422359 (locus 422359) deri ved from phytozome v7.0 (chr-ID scaffold_56; pos 433830 to 434326)
gtgtggcagaaatcactagctgtgctaaaaaggtaagtctgaaaaagctttaatcttttagtggtttatatgcaaaatactgcaggaaatctgggtcaagtctatcgctacaaaccgttaagtacaaaatcaaacaaggctgaaactggctcttcaatctcttcaatattcttttggttttctagttgtaagctgttgtagggagttcactttttataaaatcaatataaaccacagaatggaaactttttgcatttcaagaaggctttcggaagtcgacaacgtccaaggtctccagaggacgttgctgctttaaccgtgcaaagtcgaacgttccaagctgccaagcagcgacactcttgccgagtgtctgttcaagactcaagcagagttccagctaaataattttctgtgccccggggtgaagaatcgatcttcagtttctgcgcaatttcttttctacaaatataattttgctttggccaaggataaatccg

SEQ ID NO: 113739 - DNA, 558 bp, Selaginella moellendorffii
  Intron number 2 from transcript 429951 (locus 429951) deri ved from phytozome v7.0 (chr-ID scaffold_122; pos 183040 t o 183597 reverse strand)
tgattcactgtcttgttgttaagcactgcaatccggtagatccctgtgtcggggtccacatccatcgcctctatcctcttcagggcactggatcatcttccaagtgtttgtgagaggattccccacggccaaataccgtgagcccgcattcgtccgcggtaccaggacggtccgagcgacgctgtggaaaccgagtcgcaggaggatgcccacgagcatctcctcctcacaaagccgaaaggcagagccgatcgccatgctagcttatgccctcttttgtttatttcttttcattaccttattgctaaaggagcctcctcaaaaatattcaaaaatattcaaaaataaaatttttcaaaaatattccgaatctccacctcaaaagtacttaatcaatttaacattctaaattgaagaatgcaaccttgtcttctttctaatcaaactttctatggaaattcttctacttttcctactcctaaatcgatttgtgacagcacaggtttcttgcttagaacacaaaaggacttactctaaattcttttgtttttttcagga

SEQ ID NO: 113740 - DNA, 569 bp, Selaginella moellendorffii
  Intron number 2 from transcript 421552 (locus 421552) deri ved from phytozome v7.0 (chr-ID scaffold_52; pos 728471 to 729039 reverse strand)
aagtgatctctgttgctccataacagcagattcgaccatctggttgcagaagagccatgttcttcgagtcacacaacagtgccgtgtttggttttcgatcaacagttctccgatgaagcgcttctggacgtgtgtgagatggacgtcgcgggaatcatcctcagcaaaccatatcaatggctgacctcagtacgacgcatttgcaaatacatactttttgaggaaggacgataagaggtggctactgcgggcatcgtcacctacaaacaaaactccacaatcgttattgatttctgcaaaagaatcggtcgttaacatcggacaatggtggcactgcttttgtggcgtacctgggatttagacttgctgcaacaggaaccacagttgatccggataaagttcacgcagtgttgagatgctccaatcgccatgagttgcgcagtttcttgtgcagtttcttgtatcgcgatgcttttgcaaacaatcttttcgatcgtattacagaaaactgtgattaatttgtttactaaaaagccttgcaaagcttaccttgccgcctttgccagaat

SEQ ID NO: 113741 - DNA, 351 bp, Selaginella moellendorffii
  Intron number 3 from transcript 422149 (locus 422149) deri ved from phytozome v7.0 (chr-ID scaffold_55; pos 331984 to 332334 reverse strand)
gccaagaccagcgcgcgcttctcgaggagtcagtatggtaccagggcctcttgttcgtgaagaaacgtggtcgacaaactggttcgaacttggctgctcgctccaaatgttgagtttccatttgagtttggatggatttttttccggttttcttaatcaggatgccgtgtgatctaggctggacagatttatcaaaagtttgagtgcaagggacgctttgataggggacaagtcgtaatgttgtaactggagccttcctggcttattgctgttatgtttgagagtttttatgtcaatcggtaagcttttcttttttcaattttggtggttttttatgcgtgtgtatttagg

SEQ ID NO: 113742 - DNA, 510 bp, Selaginella moellendorffii
  Intron number 1 from transcript 159382 (locus 159382) deri ved from phytozome v7.0 (chr-ID scaffold_87; pos 701004 to 701513)
tgcattgtaagagagtagcttggacgctcaagaaggtatgctctttttctttatgttcttcgtccattctcgagtcagtgcgtggattagttcttaagagttgtttgcatcatgtcgacagcatttttttttcctcgctctctgttgtgctctctggcattgttcttcattcaaacgatcgccttcttgtgcgattcttcgacgttttcttttcccttcttttcttttgtgttccagagtttttggctgctttcgattgcactttggtattctcgctccattgtttatttctctccagattctcagtcttgcgatcattaattactgggcgctctctctctctctctctatcggcgtgtgcgtgttcatgcgattcctttttcctcggttgtttaatgtttctggtcagatctttcttttttcgcgagtcttcgctcatcgcttcccagtcaaacttatgcttttgcttttgttttcttggtaggaatttgacaaggcatacgggccagc

SEQ ID NO: 113743 - DNA, 323 bp, Selaginella moellendorffii
  Intron number 4 from transcript 408546 (locus 408546) deri ved from phytozome v7.0 (chr-ID scaffold_8; pos 3074071 to 3074393 reverse strand)
taccattctccttacatctgcttttgcaggtccaggtaactggaagaacatcgtatgtgggccagactgcttgggtacaaagtggaatggtcgagaataatgtttgttttatggacagaagtaatacgatcgcgtgctggagatgtgtcaactcaaaagagatatggaagttcttccattcggagatcagacagaaataagcgagaggggcatcaatttaagcggggttagatagccgtgaaagaaagacagaaaaagaaaatggaggccatggccgggcggccagaagcaaaggatacaacttgctcgtgcactgtatcagg

SEQ ID NO: 113744 - DNA, 834 bp, Selaginella moellendorffii
  Intron number 2 from transcript 432136 (locus 432136) deri ved from phytozome v7.0 (chr-ID scaffold_194; pos 28077 to 28910)
gtggtgagggattatgcatgcatgattctgacaccatcttgaatgatcgtgttcgggacacaattatccaagctcaagaacggacagtcagtaaagtgttacaggaaatggcgtggaatggccctcatcgatttcttatccttgtgccgaagaacgacacattagtgttccagtcacacttgtcgaaccaatgactcgggagcacactgtgaagctcaacatggcatgccataagatcaacatgtaagaatttattttttgtaaacttagctaatatcgtgtttttgcaggctaaaccaatttgcgtttcaagctcatacattggtacatgacattgagcaccttcagtttatgggcatgctctcgctagaggaggtccaaacgttgtacaatcgtgaggtatttgaagcaattcgagtgaagctaggagctaggaaaggccaagaattgcagacttggtaccaactgccacttgactttctagttgctgtctgggcgaaggtaaattagtattgaagtatgtatcgacttacataatgtttcttgcagcccataatcaaaggagaaagagcgtcattctttaaaaatgcctaaggagacgagcaacaaaaggagatggagtggcatgcgattgagcagcgaattttgaatacgaagagaacaaaggtgaaaaagttgctctcgattgcagacatacgacgcgggcaggaatggcttgatagcattgccgagatttgttctcgcgttcgtaagttcttataaaatttgtgaaacatttcataactctttgtgtgtgtaggaactggtaaagcaccggaggaactcatttacaac

SEQ ID NO: 113745 - DNA, 692 bp, Selaginella moellendorffii
  Intron number 3 from transcript 429462 (locus 429462) deri ved from phytozome v7.0 (chr-ID scaffold_114; pos 469557 t o 470248)
catctccaaaggataaagtatgcactaaaaccagaacaggcattttgacttatatattcctggacaatgttttggtatatatgatttagtttctattttctaacattatttttctgtatatgcttagttatatgttaataaattaggcaattgtatgtagtggagatatatagtgatatatttactcaagagatgaaggcttaaagatgaagttggagtaaaggtatttaagatttgagagcttagatagaaactttaaaagttaccaaaattatgtgaattgtggtttaggagaaaccaccttctcttaaactgtatatgagaaaagagtatgtaattaatttgatactataatattaaaattacagatagttacttttattgtataaaaatggtatatggtaaacctaataaaaaccatgttttaaagtaaaagtagataaagtagttactatagaaaatgacatatttcataacttaaaatactattttgttttgtaaattacttttatttaattaataaatttatattaatacataatctagtgataaataatattcctaaataatattctaacagaagaatatgtgacgcctgatgcttttatttcgactaattttttaagttagggtctggtttaaaacattctttttcctttacaagcaaatgaaacttcatatctatttaggtc

SEQ ID NO: 113746 - DNA, 483 bp, Selaginella moellendorffii
  Intron number 1 from transcript 17086 (locus 17086) derive d from phytozome v7.0 (chr-ID scaffold_24; pos 40132 to 40 614)
caagcaaccggggagagatcggaaaggaagacaaggtattcttttcttttcactgtttttgccttcgtaataattcctactcgcgagctaactctttggcatttgtgtggcttttgtctccggatgggatcttctgggtggagctcctgcagtgtatctaggtacagtctctaaactatccacgcattgcgtgcgcccattagtttaggctttgttttcgctcttgcattatacgagtttttcattgtctagtcgacaggcatgctctctttcgctctcggcttggctttgtaggaaattgtttccgctactgtagagtttctgactttgtgtctggttcaaactagggagactgtagctcttagtgtcttgtgtgtgtggtgtgctagcgtacgatggcatctgcaagccagtttttttctcaagtggattgttttgagctgtttgtctaaaagaacgctttggaattggcaccaggtggtt

SEQ ID NO: 113747 - DNA, 361 bp, Selaginella moellendorffii
  Intron number 2 from transcript 430777 (locus 430777) deri ved from phytozome v7.0 (chr-ID scaffold_138; pos 29830 to 30190 reverse strand)
actccggcttgtttggaattcacgcatcgtctgtgagtagcactctctcgcaatagtttctagttgctaaacgcgtgttcctgtgatcttcttctaggagcacaagtttgtaggcgagcttgtagatctcataggagatgagctactttgaaacttttcaattctagcttgtctttgatcgctcttttccattccagtcgacgagattgaattggagcgcacacagaatgcaaccgtttcacttgttttgattaatctcgagtctcgggttcgtgaagtagaacaatattttcttccaaaaaaaaaaaactttttgtctttccatagataaacaaaatgttttctttgtaggtggtcgtga

SEQ ID NO: 113748 - DNA, 299 bp, Selaginella moellendorffii
  Intron number 4 from transcript 413971 (locus 413971) deri ved from phytozome v7.0 (chr-ID scaffold_22; pos 746127 to 746425)
gtatcggccttagggtatgttatgagtttctgtaagtccatttcctcttttgatctcatagcaagatctctgaagaagacagaaaacgagaactcattgaaagaacttcacatgccatacgtgagaatcagttttgcttttttttcctacttttacatcttgtttgcacggatatctttgagccttggcattctcatgtacaaattagcagcttttcttattgatactattgtgccatgatggccttctatcgtaaaatctcagtttttttcattttaacggattgttgttgaaaacaa

SEQ ID NO: 113749 - DNA, 369 bp, Selaginella moellendorffii
  Intron number 1 from transcript 406935 (locus 406935) deri ved from phytozome v7.0 (chr-ID scaffold_6; pos 1236751 to 1237119 reverse strand)
gaagtaagattgtttcttataattttctctttcagagcaattttcccacaaataacttttcggttttttgttttttagatcctgttgaagcatggcgaagatgctttagtggtcatgatggaaagactcaatgtttttactgggattgccatgctcctcttgctcctcctccaacaagctcttaatctgttttcttaaaatcagttttcttatatatgttgttaaacgtctaaatcttgttaaccaaatcctataattttggttttaaaagttttagggttagagatggtggcagagttatttcggccagcaatcaaatattttggtttgggcgtccctctcgttctctttgcaggatatctttcatca

SEQ ID NO: 113750 - DNA, 790 bp, Selaginella moellendorffii
  Intron number 1 from transcript 407652 (locus 407652) deri ved from phytozome v7.0 (chr-ID scaffold_7; pos 1984503 to 1985292 reverse strand)
gctaataagatttgctccaacaagaacacagtaaggtagtaagtggctgattggagaaacctatcacatattcaaaagattgaactgtgaatgcatatgaccgacctgactgccggatagtgcagttcgtacgtgccatgttacaaaggttgcataccattcaaaggcctcttctacagttgtgtatccatctttgatttctcgtgcctcggggcagccttccctcggagctttgtcgttgacttagcctgcagcattcaggagtgactattggtcgctcatgaaagcttcatgttgatgaagcataacgtggtggggacaactgatgacttaaattttcgaaaagatttaacctcttctcaatctctctctctctcttttttctaagaagacgaatcaatatatgtccacagtttctcaaacattgattcttatctgcttatgagctgcacaaaaggtgtccccataaatgcatatcattagacttgaagatattttcacgtgaaaaccatatgaatcagtggggacagcaattgtccataaattataattgtttacattattaaattaagatcattatccccatcacatcgtttatcaactagactatataatgtaataaggaaaggtcgatttaattagtgtcatacatttgcctgtctgtgcacaccatctcctttgagatttatgaagcatctggctttcaattaaaatgtttaagtgatttaatttagcatatccatgcttgtgctcagaaactttaaaatagcaagaacacaactattctcat

SEQ ID NO: 113751 - DNA, 391 bp, Selaginella moellendorffii
  Intron number 1 from transcript 431160 (locus 431160) deri ved from phytozome v7.0 (chr-ID scaffold_147; pos 31816 to 32206)
ctgtaaatcagaacaagttttaacaggaggtgcacagcaatggtgtctcagtccccaagaaaagaaagccacatcttacctgcagccgaatatatgtagagaattatattgggatttaaccaacacacaaatatacatgcaataaaattttgtgtcagtgtctacaacagtaatatacatacaaatttgtacataaagttttgtcatatttaaagtatgtgaattttgtctgcatatggacaccggcataaaactttattccacatgacattttgatttgaatccaccttcttgatcttgcttgtcttgtttcttttgtctagaaatttttttcatgataactcttatcttaacaggttttacagaagtttctatctacgctcaattccac

SEQ ID NO: 113752 - DNA, 830 bp, Selaginella moellendorffii
  Intron number 5 from transcript 432028 (locus 432028) deri ved from phytozome v7.0 (chr-ID scaffold_182; pos 112324 t o 113153)
aggttctcgaggctggaaccacgactagaatcaaggtttttcactctcttgctttttgctattctctttcgaggcttaaagttcctgtttgttccaggtgctcgaggctggaaccaagagaaaaaaaagaaattttcgtccctgtacttctcacccacgagcagcagagattgatgaggtcctcactttggagccatttctgagtggttcaacgtggtggcagtgatccagagcagcagctctagaagtggtaatgatgaccatgcgtttctctacagggacacggtgctgtacaaatccaattactattagcatcacacgtctgaggacaaattaagtgaagtggtgccagattcaattgtatttgtgttgtaatactacattatatataaggtgtctcctacccttgattggctacaaaaaaatagcaaatgtctttccctctttgctctaagtgagcactctgaccaacacacataacagtaacatatgtgtcgagaaggccaagtactgctcagttcaagctcaaagtcacctagcttctctacatttatatcaacagctcctctacataatcaggctgtgtactccacatgaaccatggagcctatagttggcctgtcgcaagatgtctcttctcctccggtattcctgttgaagcactaagcaacaagtaagcaatacacagcttacacatggatgtgagaaatccagcgatccctcctccatgttttggacacgagtaatatcctgttttctttccttgttttcttctaaactctttttcccctgcagatacttttgtctggaagaagatttctaccgctgga

SEQ ID NO: 113753 - DNA, 142 bp, Selaginella moellendorffii
  Intron number 1 from transcript 151471 (locus 151471) deri ved from phytozome v7.0 (chr-ID scaffold_32; pos 59965 to 60106 reverse strand)
agctccaaggacagggagaaagataaggactttcggtgagtcttatcaaactcttctctttgagttaatgggtgttttttggtttgttttttttttcctttgtccaggaagtctcgagagaggcgagacaggaaggaagaat

SEQ ID NO: 113754 - DNA, 432 bp, Selaginella moellendorffii
  Intron number 1 from transcript 408503 (locus 408503) deri ved from phytozome v7.0 (chr-ID scaffold_8; pos 2915467 to 2915898)
gagagtgggagaaaagtgagtgtcgaatatgccaactagaacaaacaagcatgaactgcttaaccttcttattctccaatactaattgtcaccatagccattcaaaggttcattcttctcagcattggcctcttcaatagtgttaatgttgccctatttactctttgcttcccaccaaagcacttacttttgtatttcatctcacacaattaatataatgatctttatccttcacaatgaaaatcaatgttataatttagcactaaaagacaaaaaagtctagcctacctagatttgatgttttttgctggaaagtctcttagctagcacacaggagacgatcaaggtcataagaaagcattggaacgtcaaaggagcttcaagtcacttctgataggctctcagccgatcttgaagctgcacgttctacaa

SEQ ID NO: 113755 - DNA, 394 bp, Selaginella moellendorffii
  Intron number 4 from transcript 416309 (locus 416309) deri ved from phytozome v7.0 (chr-ID scaffold_30; pos 440730 to 441123)
tggatccagcacctgtggcatcgatcacagtacgtgaactccactgcgtaggagcgaaactcgttccctgagaggagtctcttccacccgagacatattccccctctctcttttctttaaatcgtgccgccacgtggcttgcttgtaaatttaggttaggactagataaacaaaaaggtaccattaagaaagaaatattagtcaaataaaattgaaaataaaatcaaaaaggtgccaaaaaggaatacataaaccctatgttaaaagggaaatcataatataaatctaggtatcacaacacaacaaaggatcaatgaggaagcttgtggtagttgctttcttagctatattctttgcaggagctactttttcgcgattgttagcatctactcca

SEQ ID NO: 113756 - DNA, 819 bp, Selaginella moellendorffii
  Intron number 1 from transcript 421125 (locus 421125) deri ved from phytozome v7.0 (chr-ID scaffold_50; pos 231304 to 232122)
tcttgccactttgaggcatttctcgagattgaaaagtaatttgagaagcttgagtgatccttggtcgttctccaattctagagagctctttctcccaagcaatcgcctgagttttcagatacatgggaaacaaatgggttggcacttgccagaaaagaaacaacttctggaattgcctccaagtcaggagattcttggcgcagcagctttcagattgcattgccccacagtcaaaagaagatctaggatttagtagaatagaagccctatcctagccttcaaatgcagaaatggtgtgaacttttttcttccttgctcccatgtagacttgcggatccatcttattagcattcatgtatgcttgttggatgccaaggtggtttcttaatgaatggttgcctagggcagcctgatatgataggatctatcaaatctttagcatcaaccctatgttttgttaagaagatcatggtaggaaacaagagtaggtatataaatactttcataggctttgctttaaagctataagattaggacaagtcaaagtagttctatttatcatgggttgggtacattgatttgctacatatgtgagtgactattggtgggcttgttaaaagcttgtaagaaatcactagcttgtttgttaaaacttttctttcattttggtaagaattctttccacactctcaatcttgaaaccagtctcaaataactctctcaaaaagctccagttacagctttttttttcttttgcttttctctcatcttgttgtccttctagagggcagaaggcttacttcaaaaagggttcccttg

SEQ ID NO: 113757 - DNA, 954 bp, Selaginella moellendorffii
  Intron number 2 from transcript 418497 (locus 418497) deri ved from phytozome v7.0 (chr-ID scaffold_38; pos 857822 to 858775)
ctcctttgccgaggtcgggtttgggagcacagctggtaccttcatcgtttcaccaactttccctggaaccggccggacagagtcagtgactactgaacttgaggaaaaatgggatcctatatggctgcgaaagtctcgtgagtttgatggattcttaggacaacatgtggagacagcagggttcattggaaagctcttttgggtgatcgatggaaaccataggtggctggcattttggaagtgcattcaagagaagtttcgagatgacaaagaacgacacattagtgttccagtcacacttgtcgaaccaatgactcgggagcatactgtgaagctcaacatggcatgccataagatcaacatgtaagaatttattttttgtaaacttagctaatatcgtgtttttgcaggctaaaccaatttgcgtttcaagctcatacattggtacatgacattgagcaccttcggtttatgggcatgctctcgctagaggaggtccaaacgttgtacaatcatgaggtatttgaagcaattcgagtgaagctagcagctaggaaaggccaagaattgcagacttggtaccaactaccacttgattttcttgttgctgtctgggcgaaggtaaattattattgaagtatgtatcaacttacataatgtttcttgcagcccataatcaaaggagaaagagcgtcattctttaaaaatgcccgaggggacgagcagcagaaggagatggagtggcatgcgattgagcagcgaattttgaatacgaagagaacaaaggtgaaaaaattgctctcgattgcagacatacgacgcgggcaggaatggcttgatagcattgccgaaatttgttctcgcgttcataagttcttataaaatttgtgaaacatttcataactctttgtgtgtgtaggaactggtaaagcaccggaggaactcatttacaac

SEQ ID NO: 113758 - DNA, 696 bp, Selaginella moellendorffii
  Intron number 2 from transcript 414221 (locus 414221) deri ved from phytozome v7.0 (chr-ID scaffold_23; pos 453762 to 454457)
gccagtccaagagaccaaggcaaagcatcagtaccgtgagtagagtccccaaaactccatcgatcacccctccatcgctcagagtgctcaaaagctttagataacaaaataggcattagtgctaatcaaaactgacaagcggggatagctcagttgggagagcgtcagactgaagatctgaaggtcgcgtgttcgatccacgctcaccgcaaccatgttatcctgggtcggtgcctaattattcttcggacatcaccctgatattctaatttttggtccacaaatgccgtacgaggtagcccctgcaaaagagagatcttgccaatgcagtgcactgtcctctcaaatccgcccctcttcgtgtacatacgaacctggagaggggcgcccgtcatatacgtcaggccccacccctgcatttatgacttaccagggcggatgagacgggcagccgtcagcgtccgtccccagccctaattccgttcgcaagggaatgttcacaacgcgcatattcgggcccatattgtggtgatcgaatgccaaagctgggaattcacagcattgaatctgtttttcggatgattggtgcccgccaccaacaacattgcactaaaaatatgggagctatttgggattgggcatgtagcgagcataggaaaaggatggagggggccacattaaaaatcgcaaacagag

SEQ ID NO: 113759 - DNA, 243 bp, Selaginella moellendorffii
  Intron number 3 from transcript 410947 (locus 410947) deri ved from phytozome v7.0 (chr-ID scaffold_13; pos 2851998 t o 2852240)
cctgcatgtaagctggctgcactacaagatgatgattatactgttttttgaccgtaatggactctatttgatccaagatgtacaatctgaagattcgttgcaagcttaagagctacagagataccaaaaacttatagttggacttgacacttaaaagaaaaaatatgtgagaaaacaaaaagtatgttttatttctttatactatttttttataatttgttgtgtgtggtatcaggtttctaa

SEQ ID NO: 113760 - DNA, 579 bp, Selaginella moellendorffii
  Intron number 2 from transcript 146060 (locus 146060) deri ved from phytozome v7.0 (chr-ID scaffold_11; pos 2229038 t o 2229616 reverse strand)
ccgcgctagcatcgaggaggagtatacttctctcggtaagcattctctgatcgacgtctttcttctcggatcaggcattgtttccttgttcctctttcgacggcgttgtgttcttgcatacgaagtcacggttttggcgttgtttgagtttgtttcgagtcgttttctctttcttcttcgcagcttcatcccactttctctgagagtttatgttcctttgagctcattcctttcatctcaattggaagcgttctcatgctcttcgctctccacactttcatgattctctcaaagctggggcttgcgcattcaagactctcttgtttgttttgtttcctttttccttctcccgtgtagcatcacacttgtcgcgtctggtgtttcttcaatgcatggtacgtatgcttcgatgctgcatgtccatgtgcagatccggcataaacatcactgcttcggcggcttgcaattgtctcgtatcacgatattaccttcccggcttatattattttctgatcgtattctaatcgtcgtttcaacgctgcagggcctacaagctttgccgaggcctcggtgctaagc

SEQ ID NO: 113761 - DNA, 588 bp, Selaginella moellendorffii
  Intron number 2 from transcript 430645 (locus 430645) deri ved from phytozome v7.0 (chr-ID scaffold_135; pos 209667 t o 210254 reverse strand)
tatcaattagaattatagagtccttgtttgttaatgtaatggcaatatccagtggcaacagcttatgcaggaagacttaaactgctctcaaaggtatgttcatgtaattcaagacaagagctctactttttttcttttttcttttttctttttttgagcctgttttatttttttccatctgccacaccagcagtgctcctgcctgaactaaagagtactagagcactggcagatttgttttctcatttcttcattcataagcaacctttcagccagacatgattgacaatgtcagtgttatgttctcaagactgtcatgttaaacgcgcatcaaggatagagggagcaagcagaccacaaacaaacttcccaaatctttatgcacagtctcatggttcatagatagtatggatagactactttgaaaattactagcatgttttaacaagtcttttacgtcatcagatagagaaatttacggatggtttaaatattatttctaattaaaacacctttgaatccttatttttatttgatccagcgtagctgggttccttgctagttctgctttaagcactctgccaggat

SEQ ID NO: 113762 - DNA, 997 bp, Physcomitrella patens
  Intron number 1 from transcript Pp1s263_108V6.1 (locus Pp1 s263_108V6) derived from phytozome v7.0 (chr-ID scaffold_2 63; pos 620679 to 621675)
gcagcacatttctttaccgtgaggtgcgttcgcttcatagaactgtcgccgaaagtccaaatgagttggatacttgtcctgctttcagttgagcctcttcacgtcggggcatttcatctaccagcgaccatggtggagcctttgatgttactttcgacatgggctgagagacccaagagcattgtttctattgcgataggttttattcttgctggaatcgctaccggtttcgtgctgttccgtttggaagttgccaagcggagttaaacctctgtacatttgaggcctttttatcataattattgttatcactctcccccctgctctttttttgtattccgactaggggagtaatgatttggttaattcacccgatacagaagcggtccagacttgaagtatccgtatcttgatctgcgagacttttcgtccgtttagttagacgcagcacacttaagaagtaggttgcgaggtgaactattgtagtttagctttggacgtcaatgctcgtaagaactaatttgctaaatctttcgagcatgatcgcgggacttctaactttctaatgcttcagtgctcacctgaaatgtctcacccaaccgtgatgcttgagcttaacattgaggttacgattgtgcgcgtagtgttcagtaatcaatgcatttgttacatcgcacgtcaaagtaggcaagcgcttcaaacctcacttggcattcgtgcctgccatttgatgctgctaacactgtaaccatttcattcgtcaatcgaaactgagatagagacgctaggaaaggatcatgcccttgtaacatcgggcaggtacactctgtgaggattttagagggattcggggtaaagtttttgattttcatctcactctgcatgagtgcgttctactccgtcgcaacttttccttttgaaataaaaaaaattctggctatcataagaactaagatctctctgactttgattttgggaactgggttatgttgtgcag

SEQ ID NO: 113763 - DNA, 712 bp, Physcomitrella patens
  Intron number 1 from transcript Pp1s9_39V6.2 (locus Pp1s9_ 39V6) derived from phytozome v7.0 (chr-ID scaffold_9; pos 399499 to 400210)
agactcagttcactgcaatttctggttcgtaccgtgaatcacctcagtttaggtcatcgaataagcggcagaatggcgttttttgacgaatccaacgagcctttgggcgatgacgctgtcgtgcaattcaaatggtacctgaggcagatgttcttgtgttaaggaatcgggaaggagtatgttaatctctctcaaaactgagtgatacctgtaggggtaatgtctagtttcagttaatcacaaaaaaagaaaaaaaaaaggttattgggtgtatgggactgtattgagttgcttccaatttgagattgagctcttttagagttggcagtagcaaaatttatgtcagtgccactgagccgacatttcctcatgtctgaaatcgaacttgaaaattttgggtttcgattttattaagcaagttggcgcttaagttgcagcttagattcaggggttagtgaagaattctgcagagtttttttgattaaatcaatgatctgttaacggaggtcatcaatcttactgatggctgatatacaaattggaatagggttactactggcacggaggatgggtgcgtactagcgaaggggttttggagtcttcaaattttcaatgcaaggcttctgtaggtatcacagaatcagggttcaattttttgtttgagggaatgcgaggatactgaggagtgttatctcgtgtgtacaggttttca

SEQ ID NO: 113764 - DNA, 738 bp, Physcomitrella patens
  Intron number 1 from transcript Pp1s4_129V6.1 (locus Pp1s4 _129V6) derived from phytozome v7.0 (chr-ID scaffold_4; po s 959800 to 960537 reverse strand)
gggcgtgtaatcctcgtgtaagttcagtgaaagttgcctctgatggcgtagtgaggatcctctttcctgttgtggatgagaggcatctgggagggtacccttcaaattctggcagcttctcagagaatcattttgatttttgaaagttttctcagacgttttgtttcactgggtttatgttggatgattactacaggatgaactagattcgggacctggttaggaattctacactcctatgaaggggtttgttcttaaagggttttgtggtgctagaagagattttgatttaaaaagatttcctccagagccgtctcagtatttacattggcttcagatcacgatcgcatcagttttatactcgtggtaccttgaggtggtcttacagtgcagtgagccgttggtagttttcggggaggttctttttatctccgctgccgttggatgcaactttcttgttttagcgtctggttttgcttgacgaaagtctgttgagttgacctctgcaccgaacatgtttgatctctttcttgcgtttggttgtaaccctctcattgttcgaagtgtactgtttactgtttcagtgcgctagggtgattccatcggcaaggtgtcaaaattccaggtgttggaagatacagaatgtgctggttctacattgataaatcaggttgtcatcaattcgtagaatggcacatgaacggaatggatacccacaggttccttatagagagacgt

SEQ ID NO: 113765 - DNA, 441 bp, Physcomitrella patens
  Intron number 1 from transcript Pp1s332_18V6.1 (locus Pp1s 332_18V6) derived from phytozome v7.0 (chr-ID scaffold_332 ; pos 44655 to 45095)
tgagaatcagcgctcgaagcatagaaacgctactggtgagttttgacttgaaacgttcatggtgttaaccgtctgtggtagtcgcttttcgacacatagtgcgtggtttttagaggctaaaaatgttgttggaatgtttgtggtttattttaaggctcatcctctctgtagctttggatgtgttcattaaaggaggaaaaatatagttgcagtttgatcagttgtcggagctctgttaattcactagttgtgaccgctaatattgtcaaaattcttgcaccattttcatttgaggaaatagcgagacagaaatgcaaatctcaatctcacaacagaagacgtgttagattttggacatttagagttgctggcttctttttgttcttttattccggaatttattgacgaacttgtggattccaattctgcagaggctgagat

SEQ ID NO: 113766 - DNA, 843 bp, Physcomitrella patens
  Intron number 1 from transcript Pp1s51_295V6.1 (locus Pp1s 51_295V6) derived from phytozome v7.0 (chr-ID scaffold_51; pos 1774492 to 1775334 reverse strand)
gggagctcttttgctcgtcaatctcgggataggaggtttgtgctctcctgctgtgttctggttttgtctttgaaattattcacattttttgcggaatggattcaatgttcgactggattgcttattggggggatagaacttgtgggttgtttcgaattttttctacacagagattagtgaattcctgtgtacctagtttttcttttttctttttcttctttttttttttttttttttttttttttttgtatcttggagtaccggggttgtgaatttttcaggagttgcagcaggtatgattcgtcacgtttgatatggtaatgcaggaatgcgatctagctgcgtctcaagttcatgactcctagatatcctatggacctgcgagagttgttagggtatccggtcttagttctctgtaacgtaatacttgttttgacgttgaccgattctagtttcgggaaaggtcgagctatttttcacttttccaaataggagccattcatatcgcaatatgctttcactttcgtcatatactacttgttttgtgttcaatgttttgaaagaagaattttacagctggatgttcctgtcactttgatctcttttttattatatttagcagaatatccaaattttcaaacatttttcacgttttaattagaggtgttttagattttgggtccactgctaatacagaatatatgtgcagagtcgagaaagtgcgtatgtatgcggtgtcttggtctcaaccccgttctttggagtagatgtcgagatctgatttcatctgtggcaattgaagtttccgattgttgaaatgtctgtgtgtttgttgtgcaggtt

SEQ ID NO: 113767 - DNA, 765 bp, Physcomitrella patens
  Intron number 1 from transcript Pp1s241_46V6.1 (locus Pp1s 241_46V6) derived from phytozome v7.0 (chr-ID scaffold_241 ; pos 159871 to 160635 reverse strand)
ggtgggggaagagctggagcttgaacttgcaattgtacaaatgtagtgattaggagtcggagcaattatacaccgattgttagtccgacacacaacgattccttacttcgattcccacctccaccgttttcttacattgtttccaattttgacaaaatgtgaaaagtgtgtgctcaatctggatatcgcattttagctttgaggtttgctctccagtcttctacgagtcgttgagcttcactgccttcaatttgggagcatgaatcaaacagctgcaacacatgattgttactggtgctcttgtaaattgggattggaatgtggcattgcccagcagcgggatgtcagcaatatcacaattctaaagcaccgagaccgtcaactggtgtctctggtttttttttttctcctaaggaaatcatcagccacatggccagcatgagcagatccaagcacgagatttttaaattctcaccgttggtgtaactcttgagcgtggctgtaaaccttaccaagcttggaaactaagatgttcgcagtttctagcaactgtcaccaatgtgcttctagaggtcttttgaaggcgtatgggttgtttgtgtcacgaacttgcttgcacggatattttcagcatggcgttgggactccgttgtttgagaatccgtccctaaaagtggaaaatttcataaactgttattccacctcattattgttgtgttccgtgtggtagtggtgacgaacgctgatagacttgacaacctgttg

SEQ ID NO: 113768 - DNA, 1008 bp, Physcomitrella patens
  Intron number 1 from transcript Pp1s47_179V6.1 (locus Pp1s 47_179V6) derived from phytozome v7.0 (chr-ID scaffold_47; pos 1157982 to 1158989)
cgatcttcttactggagcagaactgcggcttaagagtaagtgggggctctggttcgaggctgtgagcgcttagttgcaaagtgggtgcgaggatttcttttttttctttttttctgaacttttacagtgaatttttaaagttgtgttgagtcgtcttcgtgatggtggttgtgatgggtttgatttttctgcttttaagtcggattaggattttgagtgaagctggtggtgaggacatgcatgtgttgaagagtagatgaagcttgccagggaagcttggatgtttgtaagggtgcgtctttcggtggagtttttgggttcttcgcgatgtttaaagagaacgctgggattaggattttggtttgaatagtctttaagtttcattctcgcggccgttggatggctggtaggaagtgtatctctgtgcttgtaactgatgtctatgagatagctcgttttaacttgtgattctcgagtcctagtaatctagcattcctgaattttgttgggtttggttctgctctactctctaagtgttaactcaaagctgagaaatggtaagtgtgttattcacgctacaccatgtaaacgtagacggtggaagtgtggccacagaaagggtattgtagaagttatacgttgatgttagatgtttctccagccatttgatagtccgtctagtttgtgtacgttatattgttccttggtttctcccttaatgtcagttgcaggtttgagtatgatcaagcagattctatgcaagggcttaacgacagtcggagtttcttctaattctggattcagaatactgaaactactgaaaagttcgtttatgagttgttataattgtgctgaaggcaaatagattgccccccaggttgaatcttgtgctagaaggtaaccttgccgctaattgacaacaagtcagtgatattcatagcaagcatgttgtggtcttgtctgtgtggatcagggcttttcaagtagttgcgaggaccaggattcaag

SEQ ID NO: 113769 - DNA, 793 bp, Physcomitrella patens
  Intron number 1 from transcript Pp1s317_15V6.1 (locus Pp1s 317_15V6) derived from phytozome v7.0 (chr-ID scaffold_317 ; pos 106607 to 107399)
cggggcagcatatcaacctcaaagttaaaggacaggtcggtttcggttggtagtgacgagaaagatggtattcaaaacgtgtgtaaagtttttgtgtgagaggactggggttagtggttgagctttggtgacgccgagtttaatttgggagtggtttgggcattttcgtcgataaggtgttagggtttgttgcattcttttctctgtaaagacgtagggttttaatgaatttgcatggattttcatggagacgcgtttgcttgtacttcatggaggtagcggtaggatctgaaatgttgctttattttatttttttcccctggtgtttctttgacgttttagttctcggcagtgcgtctttctatgtggttttccgaggacaatgctcgtaaatgtgcagccatgctatttgttatgactgtagatctttctctcctctttggttttagttcttgggaaagcgttttaaaagaagtgaatgaatagaaagggttacaccctagagggtcggtttccagtagtttaaatgcaaccggactcaatactcggggttttagtaagggctgtgttgcccacttgattttaagtatctggccttgtttgttgttagaataccgctgtactttgggtatctctttagtcgaaaaagtttctgctcagtttacgcaggttgtgttccgttcatatttttcgtcgtggtgtgtcgacgtaagcacgagatgacgattggcagcattctaatttatagatcaacaccgtattaatttggcagcgttggttgtcatgatgtagg

SEQ ID NO: 113770 - DNA, 733 bp, Physcomitrella patens
  Intron number 1 from transcript Pp1s24_125V6.2 (locus Pp1s 24_125V6) derived from phytozome v7.0 (chr-ID scaffold_24; pos 1414376 to 1415108)
gtctcctccaacgagctaaaatctccaagcaacctgtgagtcgatcaggcctgttgtatctgaatcttcttatgccctttttctttctgtgccactacgtcaagtttatgtgggttgatccaatgtcttggatgtagcgccttgcgacagttctttagaaagcagcaatttcacgattttagttttcaggaattcagtaacgagtaggtccggtattatttaactttttttttttttttttttttttttctcataccctacttttgcttaccagattctgtcgatcagagacgccttagaatcacttaatttgttgttaacccttgaaccctcagtgctcctttcttattccgttgggctgaatcgtacattttgattcttcggaggtctgcttgtccatcttagttttagcgttttcattttacgctcatagaccacattcggggttttgacctaatcggcaattcatttacgggggtggctcgtgcatattcaaatggttgaaaatttatttacattttggttcttaaatcttcttctccgaatccccaatttggttttgtggtgttatttacactccaaggggtcagtacaatgcactacgactgtaacaatggcggtttgaatgaaactaatttgttattcccaattaggttcagaaattatgtaacattcttttccaatttcttaactaacgttgttatttgggtgcttttgcaggccgtagtcaact

SEQ ID NO: 113771 - DNA, 327 bp, Physcomitrella patens
  Intron number 1 from transcript Pp1s187_60V6.1 (locus Pp1s 187_60V6) derived from phytozome v7.0 (chr-ID scaffold_187 ; pos 367913 to 368239)
aagcaatagattgtgtcaaattaatatagacaaagctgatgagaatccaagtaaggttgtactaaaagtcataggaagcaacaatgaagcaatagattgtgtcaaggaagatataacaaatcacaaacatcatctaagtttctttctactatattcatttcttctttttttcttttttatcaaatattaaaatttgatctttattttttattttaatttttgatattgcacaatatttgttgtaaactagtggaattgtagatttgcatttgtaaaaattacaacaaatttgtgtttttaattaggtctggaacacagtggagaagc

SEQ ID NO: 113772 - DNA, 462 bp, Physcomitrella patens
  Intron number 2 from transcript Pp1s193_53V6.1 (locus Pp1s 193_53V6) derived from phytozome v7.0 (chr-ID scaffold_193 ; pos 536677 to 537138 reverse strand)
atatctcactagaagctacaagctacttgtcagaggtacgtatttcagtacatctgcattcctcatgagtccgtgaatgctttgacatgtgtggtctgcttcttcatcggttctgtgtttctttcgagttccgttattaatatccaaatgtttatgtatcatcgaactgtcacgaaatgttcctgcataccacattcaagttccagatctttctgccgtgtttgtcatgaactcgaacccttttttgattttttttaaatttatacattctgatcagctagttttatatttgttgcttcgaagctagaaaaccataccgcggctgttggggcaattttcctgttctacagtttctctttcattccttatcttgaattgatatagtatttctggcattatgacattggagacatggtttcggtatttgacaggtcaagcgtgtacttcgaccaggtggaaagt

SEQ ID NO: 113773 - DNA, 652 bp, Physcomitrella patens
  Intron number 1 from transcript Pp1s30_260V6.2 (locus Pp1s 30_260V6) derived from phytozome v7.0 (chr-ID scaffold_30; pos 1931024 to 1931675)
ttcggggtgcagcgctttcatcacatcgaattctggtaatcaatcgcgctttgttaggaagattaaaattatctttttttttttttttttttttttttttgccctcccatccttcttcttgttggaaatctttttgtgtctgaacgaagtgaaagatcgtgaatggtttcggagttggcttacggatttgaattctcaatgctcattgtaccatgctttttcattgtctttctggcaacaacgtaggatttgaaatgtttgctctagtgggtaggtgcgcatggcagtgttaaatagttttggacacagtgcgtctgttgtgctattggtttttatatctaatgacgaggattagatattcgcctctcctttttcatgctttgatttgcgaggacatcttctagtttttcttgtttctcttctttctcttggcgagggattgaggaacaagcttctcttctactgataatcaagtttctttggctctcgttctacatctttaaaatattgcagttctggttggtttttaccttatagtctgtgcttggagagattgtttcgatggaaaatttaattgatgctcatgtcctcagcaatctctgatttattgtgaagcaataattcgtgagtatttgtatctgtaggtgtgggg

SEQ ID NO: 113774 - DNA, 714 bp, Physcomitrella patens
  Intron number 1 from transcript Pp1s156_108V6.2 (locus Pp1 s156_108V6) derived from phytozome v7.0 (chr-ID scaffold_1 56; pos 645391 to 646104)
gcttgttgcgtaacaagtctgtctgtggaactcgggtggggggaactgtagtagccagctaaaggttgcagttttgcgcacgagtgtgtgggtttttttgttttttcttcagttaggaagcttccatcgtcgtggtgagtgctgaactggtccggtggttgcgcgtgggtggttacgcgttcgctggtcggtggattgttttgtgcttgatggcctgggagggggcaggtgtgattgcgcgatgcagtggagagagagagagagagagagagagagagatatgctgttgataactcgggttgtgtgtgtgttttttttctgtgctctgattgacgatgtgtgcggggtttttagcttgtccactgtcggctgaagtgttatttagtcgtgggtttgtagcgagctgcaacttctagtccgaatcttggtcctgagtgggttgtagtggttttaactgcgttccaggtaatgatttggattcgtctttgaggagtgttagtgctcgcgtttgcaaactggcatctggagtccttttgcgttaaagagtttgaagttggtaaatttggaaacgagcaagccaacaccgacgcatcacacctaactctaggccttggattagggcatactgtgattgagcgtggtcttcaaacattgacgcatgtatgctgtgtatttccagggtgcgaagctagaattggagttcatctaaaagtt

SEQ ID NO: 113775 - DNA, 457 bp, Physcomitrella patens
  Intron number 3 from transcript Pp1s136_162V6.2 (locus Pp1 s136_162V6) derived from phytozome v7.0 (chr-ID scaffold_1 36; pos 870002 to 870458 reverse strand)
gcgaccagcgccctcgttacaggtctttctatattttccttccagcttagcgttttcgagtttatgattctttttttacatactcatgtttgttaggcttaagttgactacatgtaggcttgcgctcgcgcattgagacaaagagaccttttcctacgaaattataagctttggttgtgtaggtttctaacgcactccacatcacaagttcgtgctttgacttcaaattcaaatcccttgataattgtaccatattatccgcagtcatttcgttttacgatttgagatgatatgacttaagattagatactgttatgatatacttcagcttcggcaatgtagtgacgtgtgcaagtagattttcttaaaataatttggtgaacgtaagaattctggactagttcctctgggaagagcactgatttagtgggtatggacggtcaccgtgtcataggga

SEQ ID NO: 113776 - DNA, 534 bp, Physcomitrella patens
  Intron number 1 from transcript Pp1s39_428V6.1 (locus Pp1s 39_428V6) derived from phytozome v7.0 (chr-ID scaffold_39; pos 2270126 to 2270659)
gaggcgccggaggtaagtgccactttttttctggaaatgtgtcgctggtttgttttccggccgaattttggtggaattggaggtttctatcgacgtgctcgtgatctgggagctatttgattgttaacattatttgggtgtcgctggaacgttgcccttttattataaacttggtgcgtaggaattttgaattctgtgttttgaaagtagtgaagtcgattgtgattggggggagggggagacgattatctcaactttttggagattcacaagggagctgggaagagcgaattccttaagggcagagataaatatttgggttcggaacagaaaatgacttagagttctatgggaagttgtgattaatgcccaggattactatccgtaccctaatgggaaataactaggatgggatccttcaattttctcatgtcatacttgaggtttgtatggctacgtagattgttgttggtttcatgccaagtcatggagggtgtatgttgatgtttcgaggataatatgcagaggaacatt

SEQ ID NO: 113777 - DNA, 923 bp, Physcomitrella patens
  Intron number 1 from transcript Pp1s106_185V6.1 (locus Pp1 s106_185V6) derived from phytozome v7.0 (chr-ID scaffold_1 06; pos 1076744 to 1077666)
gccttccgtccccgtgcgcaatcgcaaggtgatgccgagtcgtgtagggatgtctttcttattggctctgaggagtttgtagcgatggtatcaaatgttcgcgcttagttgaatgtagtagcgacttttatgtcaatttgtagtgaacttttagagaatgcgtggaggattttttttgagatttgattgccggccatggcattgggtggggtggatgtcgggcagtttgcaatttgtaggtaggatgttttggttagtgaatgtgtgatctcgtaggtggagatatggtggtgggaaggaattataggtaattaaaataaggaagaaagaatagaaaagaaacggaaacgagtcatgagttgtttcttctgtcgctttccgcatctattcggttgttctatgagcagtggtaacgtggtcgtctcggacactgaccataattgatgtatgctatttgaccaggttgcgaattgtatgtggcctattggtggaagctattaaattagttggtgccagcatttagtgatttgcactgtttctcgtcttatatttgggatttagattaagctcgtgttcctgattttctgacagtttatcacaagttttcacgcgctcgacttctggtcatcgatcttgactagattaggaagtcgaatgccgaaacagatcgtcgagtgtaacagctgaacaacagaatagtagcagtacagcatttgcgtgcagaattcccaatacttggaccgaaaagtaaattgcatgtgactgcttggctgtctcttaatagctttattatttacgtgatgaatctctggcattaagcggctttacactttgcaagggtgtgaagccgggagacgaaatgaatgcaattgtgcctgacggatttgcttctgaatcggatgcaggtaccaagcttacacagg

SEQ ID NO: 113778 - DNA, 1052 bp, Physcomitrella patens
  Intron number 1 from transcript Pp1s109_205V6.3 (locus Pp1 s109_205V6) derived from phytozome v7.0 (chr-ID scaffold_1 09; pos 1124191 to 1125242)
ggagttttttctcgttgtatttggccctggaaaacgtacggtgggagtattctccttgatatgacgggggtagtgtctcgattgttgcgttttttttcgtgttgttgatgatggcgtggtgtggaaattgcgagggcaattaggaacgtttgagttactgaggatattaaagcgaatcgcggcgtgatcgtttaggccgacttgattttgttcctgtggaggtcgtttctttgaaagcgatagttcgagggggtgaggagtgcagtttgaaagctggtgcaattggttacgttagctaccatgcacttatcggttggtatgtctttggtcctgtttgtttagaggtaccgtgtctcggtgcacgtcagggtcggagagcgctgtagtgtgcgtttgtgtgctatacaattgtgggagaatctgtgtccctcctgccgtaagtaattttgagtgactcaatttggcttgtgtgtgggaagtcgttgcgttgaatttttattcagacgatcaggtcattggggtacttctcgggctgcatgtgttgagagaacttagctattcggttttgtttcttgaggacctattttagactttctattttagggtttatgaccctctctgagtacagtcatcaggcgttctattctacggaacaaaagacattcagtggaatccatgcagtatttaatacttcattaaattgcttcctgcctgatattcagttattgtctctgtttctagtcaaaatagaaaagaacaatgatgcatcggttgttatcctgaaacttcaaaacctgtgcgataatttatgaattttatctcaagtgtctatatttagacagctattttcccgtttactctttggttctgttgccgacgcaatctgcatgttgtcgttcttgtttcttgtgcttatcagcgttgcatttcttgcttccttcgattgaccagtttttctgaaccgcatgttgtaggtggtgttgaacaatgtgctcttgctgtggtttggatgtacagggggctgagcatttggcttcaaacgaaaagtttcc

SEQ ID NO: 113779 - DNA, 938 bp, Physcomitrella patens
  Intron number 2 from transcript Pp1s109_205V6.3 (locus Pp1 s109_205V6) derived from phytozome v7.0 (chr-ID scaffold_1 09; pos 1125443 to 1126380)
aatccctgccatcagtcgccgtggtgggaggccaggtgtgcacagctctactttccttcgacattccaattgcacgtgctcatattaatgttctgatgctcaatatttgatgagtcgttagcagacaaggtttttgtagagcgggcaaccttactagatcatctgccacattgctctgtgcgtagacttctcttgtgaatttccttaaggaccttgaccaacgacgtaagaacatgagcttacgaacacactgaaactcgtaacagcctacaggttgcagtgctgttgccatcttaatcattcgaaaatataaagagacaacatttttactttgtttctgaggagtgtgggaatcttttctatgttagggggctctaacttaggtcaagcgactcgggtaggttttactttgtccccgtgcaactgatctgagcattgtgtgtggacgaggaattttgtagttcggactggaggattagtacgaggtttatgttaatctcatacctttctcacttggctgtatttttaagttattgttaagtgtgatgccagtgtgtgctctttgatttctgatttaatcccggattaatcaacaagtaatagggaacgcatgatctcttctagttttatctaaaaattatgtctccttacgtttcttcatgaacgtcccttgttgctttcttaaacaagaaggttactatccgagtttttctctctcgatatttttggcttgacattttagacttgaagggtgacattcacgtcatgagaagctcagagtgaaccttgactatgagcaggtgacatttgctaatccttaaccacaaaaaactagtaaagtgagccggttaaagattttcaattatatgcatcgtatattaattcggcttgtgtaatctgcagagttctggaaagtcttcagttcttgagagtattgt

SEQ ID NO: 113780 - DNA, 785 bp, Physcomitrella patens
  Intron number 1 from transcript Pp1s15_90V6.2 (locus Pp1s1 5_90V6) derived from phytozome v7.0 (chr-ID scaffold_15; p os 531131 to 531915 reverse strand)
aaatcggtgagttgtgattgagctggaacctttttgggatttccacatgggttgtgggagaggaatgttgtcacctgtacttttgctgcgaagagaatttgaagctgaaggtgtgataggaggagcatctgttgaatttcgtgcagtgccctgctgctggaatttcgtagtggtagagaattcagctcgattggtagtttagaactaaggcggtgcgcaattgtttgtgttctttctcatgtgttttttttgccccaaagagtcagcaattttgcatttgagtaatttgagtggaggatatgttaattgtagatgcatccacttcgatttacgctttggatctgtagttcttatctctgtagttggactttgatatgggaactctggaaaaagtaacagtggacatcattaggtaattcgaagttagacatttgagtgtcgactatatatacatatatatatatatatatatatatgctaggttcctgaattttcaaatattttactggattcttttttctttttattctctgactacactgccgatgtaaatgatttaggggaaaaaaaaaaaaaaaaaaaaaaaaaaaaacgccgaattttaaattactcttaagatggtgtttcggtatttgagtttgtcaatcaaaggttcctgaatggatgtgtattttcgaagtactcatgtttttgcctcgtgaagacatggtattgaaccttatacttggaccttcagtttaacggaatgtgtatgctgatgtagcaggctgtagaagggggtatcc

SEQ ID NO: 113781 - DNA, 783 bp, Physcomitrella patens
  Intron number 3 from transcript Pp1s64_219V6.2 (locus Pp1s 64_219V6) derived from phytozome v7.0 (chr-ID scaffold_64; pos 1791237 to 1792019 reverse strand)
ggacacggtatgtttttttcattggtcgccctcgtatgcccatcgagtaggacaagatgtggttatattgaagaatttggcccttaattgagtatttggcgcacttcctgtcagtggtgaattctgtgataatcatttgagtagatctgttttgccataaacgttcacaagaatcattgtggattatatccattcatctgattattaggtctgcaaatagttcatccagcctgattatgagggtgcccttgtatatctccatcttgattttggtatataagttggttttatggtctgtgcatctcagtaaatatttgattctattgaaggaaccgttagataatctttagttatgttgggggtgttcactcgcatatttttgtcttgacgattatggagtacaacttacttcttttgaggagctttgaagctatgtattctcacagtaagtttaaatgtgaatctgtgcaattagtggtctaaaattagggattgttgataatgcggagtctaccacgtagtataagcctgtcataagtttcttgcttgtgattcgtattgtggtttcaacactttgcgcatgttgtggttcctcagttttagctgatttacctccggagatttcgaaacaaacatatcataatcatcatgtccggaagcatttaatagctcgagcttaggagcctgtattgactacttacaggtacatgtagagtttcgaaacttagactaacattttgctgcccaggctggccaagaatcgttccggtccatcacgaggtc

SEQ ID NO: 113782 - DNA, 642 bp, Physcomitrella patens
  Intron number 1 from transcript Pp1s42_29V6.1 (locus Pp1s4 2_29V6) derived from phytozome v7.0 (chr-ID scaffold_42; p os 193663 to 194304 reverse strand)
gattcgtgcacttcaactccttcgtgtaacaaaaggtaattatactaatgacaagtgaaggaatccattctctttttcattatatatatatatatatatatatatatatatgtatagacataaacaaaagactgaaattttgatcaaattcatgaaattcttatatataaaacttcaagagtaaaaaacaaaaaacaattatatcaagaaatacatgcatacatatatacatacatacagtgagagtttagtaaatgcaagaatggaagagataatgaagtttaatatacttcaaccaaagaataacatatataatttcacttataaagaccttgttggtactaaacgtgcacagttcttctgcccaaccttcaatataatgtccattagaatgagctgatcctcaaagtggttgttatttgagtgaacaaacaaaataaaaaatcaccaccattgaattatcttcagatgaatgatacagacaccagaatactcacaatcagtttttggtttcaacccaacacaatgcaaatcttcttcttcttcttcttcttcttcaagttaccctttctaactttctaatccattttttcaatgtgatgtgcagccactcaacaagttatccggacaggagaggaccca

SEQ ID NO: 113783 - DNA, 785 bp, Physcomitrella patens
  Intron number 1 from transcript Pp1s60_41V6.1 (locus Pp1s6 0_41V6) derived from phytozome v7.0 (chr-ID scaffold_60; p os 331817 to 332601 reverse strand)
ctttcactcttcggccaacgtatttcagcccacaggtctggtcgtaaaacggaccatttgtgtgccaatcttgatcagttctcttttgatagatactctacacagatcaaatcaaacgttgtttccatcatgacgtgtttgtgaaatctaattccgaacacagatttgcgaatcaatgcgaagaagctcaactgtcttctcagttgaaagattctcacacttaaaaacctatccatcgcacaacttctagatcgtttttatgaaaaccaaccatgtgatgaagcccttgatagcggacatccgcattttgttattttaagagacgccacttttctatgaagattatgacgtgtggacttctctgcactatttcaacttcagcagcagccacggggatcttcatgacatttttacttacatcaaatgttacaatttttcatttatcagataatcacaagtaacgttgagctctctagacttgatctccgtaacaattagtctactaatttcatacaagaattaggcgcgtgcataaattcacctgggggtggatttatccgaaattaacgaaatgttataagttcgataaatcgtctgtttgttggattgaaatgaatacggactaaaggtcgtactagaaactttatagaacttaaaccgtttactgccgatccggattttttcagccaattacatcatagtatatagtggaggctagtgctctgatgctccagatatagatgctgtgcgttgcatggtattctaattcttctggtaacttgcag

SEQ ID NO: 113784 - DNA, 854 bp, Physcomitrella patens
  Intron number 1 from transcript Pp1s197_99V6.1 (locus Pp1s 197_99V6) derived from phytozome v7.0 (chr-ID scaffold_197 ; pos 404134 to 404987)
tgggcaaacccttgccctctgacttggtggatccggtactacccccgctctcctttcccacaatcctctcccttcgctgcatcgcactttttcttcatttcctcttttgtttcatgaatgaattggggtcatatgggattaccatatcaggagttttataaggtggccgtttgttgttattattgttatttttttagaaaaaataatagtatgagaaacatttggcgtgcagatgcattttactgatgtagatgtggtgtattggtgttcatgtcatcgttacgatcacttgagattgacgaaggttttccctgacatttgattttgagggaaacgggagttttgaggcgcagtggtttctgacctaattttcgtgtgttctttcggagcttgtaacatttggtgtgatgaagtggggctgtctgttcacctgatcgtagcctctggttacattctgtcatgggatggttttgatgtctttgcaattctcgctttttttcagtttgttttggttgtttctggtgctggttcggggttttgtgttcatcaaccgcaatgcatcacctgcaataaagcttgcgttagagtacgcattaacttctttaatgttctggaaacttgttgaaagaaaggattacagttttataagttgcagcggatggatgcgaattggtaaactggagggtgcaatcatctcaatgctttacagaacgtctgacaaaattttagaacggctaaaacttgatgggttatttagaggagtaatgcagtatcggcctgtgtggaatttgaaagtccttgatacttgcaaaactaagtgaactgatagcccgccctgtctcgaaccgcccagg

SEQ ID NO: 113785 - DNA, 804 bp, Physcomitrella patens
  Intron number 1 from transcript Pp1s6_407V6.1 (locus Pp1s6 _407V6) derived from phytozome v7.0 (chr-ID scaffold_6; po s 3265861 to 3266664)
gttgggtttcagctgggcgggcgtcatttagttgggtttggtctctgggtcccttctcgctttcgtgttttgttttctctctgagtattgtgatgaattggtgcgattttgataggtttctggttttgggggaaggtcacgggaattcgcattgggtaggaattgggtgagtttgggaaatgctggcattagtgtttttgggtgtagtggtgatgggttggacggatgtttgttgaatctctggttgggtcgtggctctgctacggctgctcaaaattttcatgatccgtcacgggttcgaggatagaggaggtgacagtgggaattagtgcggagcgatgtggttgcggtgtaccctcacgattgtgccaaatttagtataattatgctagtccggagatggtttgtgaagttgccctgttcctagtgggaggtgtgttgctcgcagtgatgaaatcgtagtataatatagatccttaattggaggcagtttcacatgtggttagaatttcgtaatatcctgctgttcgagtattgagtgagtcatgtagaacacgagaagattatgctaagatgtgaattatgtcattgtctgcgactcgaatcttgtcttgctcctcctgatacctgatgcttttttaaaaatagtggttcgcgtggattacattttcgtaaattgtctttgctgtttgtaattcaacctaccccccccccctttttcggtgtcagcaatacgtgtatttgtttattaagaaatgtagttacttcgtgtttgtatttacgcaggcaagacgtgctgccacc

SEQ ID NO: 113786 - DNA, 823 bp, Physcomitrella patens
  Intron number 1 from transcript Pp1s419_11V6.1 (locus Pp1s 419_11V6) derived from phytozome v7.0 (chr-ID scaffold_419 ; pos 126123 to 126945)
tccattcgtgcgcgaaagaaggaggcggtaagcatctatttcaacagggatccagaattacgctacttgagtcaagctgctgaatgtacggggatgcagggcaaggattcttgagagtccctgatatttgactcggccgaatcccaccaaaagttgtcaccaatatgctttctatttggagtgaaagctatgaccttgataattcgtccggaaattggccaacctcgcttttcaatgcgctgcttcggcaagtgcatcttcatgaggtcaacgtggacactcttcaagctgcggtcactggaatgcgaagtcctgggataaccttgtgcagccacatcgtgtggtcacgtgagtctcgagggtgcaatgcaggacggtggaggatatttctcgactcctctggttgtccatctccgctagttcacgttgatgacacgagatgttaggggcccgaaatggttctggctggcagtcccggtgccaggcattttgtgaaccgcaagtgtgaatcggtggttgtgggaaacgttccccacaagaatattctagttttacccttaagggtgcagtattacatggttgcagttggacacgatattaatttttagttttttggtttttacatgcttaactggacattgtattcactgacttcaatttaaagttcaatatagaactcgttttacccaatttgcaatgatcatgatgaaacagaactgccagtccgacaacagtcagaagaattataaaaatattcactcacactcatcggatctaagctgaaggctaaaatgtaatatagttttggtttgtggggtagggc

SEQ ID NO: 113787 - DNA, 858 bp, Physcomitrella patens
  Intron number 1 from transcript Pp1s47_97V6.1 (locus Pp1s4 7_97V6) derived from phytozome v7.0 (chr-ID scaffold_47; p os 551536 to 552393 reverse strand)
aaaaacaagcgaaagtggtgaggaattaggatctatggtcttacgttacggctttaagcttcactagcatgtcgtgtatcattcattacgtggtatttaaatgttgctctctctctcacacacagattcttttttttcttttcttttgtttttttaatcttagacttttcgtcagcaattgctgacattggttgatccttcgaggttcccgtttgacccgtaattttttggattgaattttattccaaatctcaaagtcatggaatgttttggatgtgattgtcagttggcttaaacctgaaagatctcagctttgtgtacttggtacttcaatctcttgtgttcgggttgaagcagaagtcacctttagttaggtgttggactaggcgatttctttggacatcatcgctcgagtgacacttgactgtcgttatgacgatgcctgcgtcaatattttgataataattaattacatatgactcccttggtttgaaggatgtcaagagatttgacagaattgtggaagatttattttagttagaatgttgatccccgcgcaccataataagagaccagggatattttaaccgggaaattctgagtacatattaagatggaattttaacttcttccttcagtgttgtgagcgtcaaggtgatcagtcatctaattggctgtacggatatgctagtttattttaagtgtacctctttaccgctctgcaacgttttagccaagagaaggcaatgtaagcatatcattttcttttgcaacaattgctttaacctcatgcaggcattcctaattgagctttgtacttcagctgtgtgcaaaacttgcaagccgctttggtgctcg

SEQ ID NO: 113788 - DNA, 1004 bp, Physcomitrella patens
  Intron number 2 from transcript Pp1s123_22V6.1 (locus Pp1s 123_22V6) derived from phytozome v7.0 (chr-ID scaffold_123 ; pos 225004 to 226007 reverse strand)
caagacgctcatcactacgctcggtttctgcttcggtacgaggaattcctcggatatgtgttccctggcttctgtctactttcttaaaaaccagatctcgaagttatctagtaatttgctggttctttgaggagaatccgaagatgcttggggttgtgttacttcgttagtgcctctttggagaattccttccggttgagggctgtgtgtttggtagcttcaccttttttgattttttaatttcgggacgagacagtgggtacacatacctccaacagcatgagcgtctgacgacagtggatccgtgaactgaatgtgtttttttcctagctggccggcccggtgtgcgtggtatcgtactgtagggtacaactgcgtttttcagtaggtgaatagttgagtttagttccgcagagattgccgttttatacagtgcgctgccctgttgtgggatggaaacatctgaggaactacgatggagtggtttgcgctgctatttttctcaatttaagactatctttcctcttccacaaggacacgttacgtgctttcccgtatacttcttcttcttttctttctttctttctttctctctccctcttttttttttttttttttttttttcttttttcttttttcttctcctatccacaacgaggacacgtagaaaagacgaagttctacagagctggaaattgttttttgatatgtgtggcgagcgacttgattagagtaggttacagtagtgcgctgcatttgcttttgaaatcagcaattctcatcatcataagtgatcaaatgttgtggtctcacgtgatttgcattagtggtcaggtttgtcaggttggcgatcacttagaatagcgagattttaaaagttgattacgtacttttcacttcatcttattttgaattcttcgtgtttagggaagaggtatttctttgaccttctgtgttcgtttagtacagctaccacattgacaagctggcatctagcggtgaca

SEQ ID NO: 113789 - DNA, 311 bp, Physcomitrella patens
  Intron number 3 from transcript Pp1s104_96V6.1 (locus Pp1s 104_96V6) derived from phytozome v7.0 (chr-ID scaffold_104 ; pos 676554 to 676864)
tacagaacgtaagtttctcacttcatttgcgaacattgtgttttcaggtctatctgtttgatttttatatattgtcaagtgatgtagattttgggctgttgagttgttcttggttgaggttttaatgtttctgttagattactgtcgtgtacattcgtgcgcctccatgctcaaaaattagaattattgctggcttaattttctgcttactgtttattagactggaaaatgaagtatttcttgaaaactaattttatttgtcttctgttttcccagcacaactggtgcatttccctgagaattcgagagtt

SEQ ID NO: 113790 - DNA, 790 bp, Physcomitrella patens
  Intron number 1 from transcript Pp1s47_192V6.1 (locus Pp1s 47_192V6) derived from phytozome v7.0 (chr-ID scaffold_47; pos 1228663 to 1229452 reverse strand)
gttgattgctgtggctgtgggccgaaacatcgtaggtgaggggtctgttgcgtcggaaccctacatcgctggctactccgctctctgctctgtgaatgatttctggaattcttgagtactagcgcacgagaggagtatactacattgcattttccagtgaccagaattgtggaatcacctgtagctcacattggttttcttatgttcgattttatatttgctaaaattccattgatctgcgagttttgatttaaacgagtgctaggattcgaggaatagggaaatcagcttagtttaaggcgtgagtagctcctagtgagctcctagtaccagcaaacgattctcacaagcacctcattcaaagcagattttggaaaataaacatgggtggttttttccccgtaagcatagacagagtctagttttctttttctgacatactcctagtcttagcatgaggttcagtttgattcgtcttagctgctcttaagatatcgttcattttaaagtcgcttgtacatatggtttaatagcatattctcaatgtagatactaatgccttctgttctggtgctcttgattagtgggttttattttccttctttcagtttgaaattaccacacgcacaacgcaagattcggtttttcgattgtgcaatattttctagtggcagctctaaaaccccctgccgttgttgatattctcttcctttattaactggcaaacgtttttagtcattagaaacgcttacagttattggatgtgaatctgtctattttgcagagttcg

SEQ ID NO: 113791 - DNA, 546 bp, Physcomitrella patens
  Intron number 2 from transcript Pp1s127_21V6.1 (locus Pp1s 127_21V6) derived from phytozome v7.0 (chr-ID scaffold_127 ; pos 105392 to 105937)
gctaagcgcagtaaggtcagtttgatattcctcttcgtacataccaatgttacggatcgggtcgctgcattatgcatcgacaattcttccccacaagtcgaatgcatgtgtagctgcttaaggttgaatggattggatgtctataataagaggaaaggactgtcagtatcctcgaggagtaaattagtgaagagagtatcaacggattccaacatccgcacgcatactggggagtcagatctttcaagtagtgaaatagggtctctttagtcatgatagtcagcagactgattatgaccagtatcctcccttttttaccacactttaaactttctttttgataaaataaagtaaaacattgttgataattcaccctcatcctcggagttcatcgagggcataagtgtaattatttttctctcaaggcaatggtctgatttgagagacagttgccaaatcaaagtgcgcttgttcggtgcaaatggttattatttatacattcgctcaccttcaaatcatgttggtttctgcaggcaaaaccaactg

SEQ ID NO: 113792 - DNA, 674 bp, Physcomitrella patens
  Intron number 1 from transcript Pp1s110_58V6.1 (locus Pp1s 110_58V6) derived from phytozome v7.0 (chr-ID scaffold_110 ; pos 286258 to 286931)
gaacgtccgccacattgacggtaaacactttacaggtgctgtgatatcgccgattaaatagccttttggttcatcttcagatgaaaagaacctcaaaagcagcttatttcaagtataatccaactaacttggggatataattccaattaattcttcactttctcaagacatcctcaggtggtgatctggaacgaacagataatctcaaaagtcaatagctgtaagtgaaggtcaactgcaattatgttttttcacaagccaggtttaatttgattaatttgtggcattcgatcctccccctgaacaccaccaccgtgttcgatcctcgtctctatgagctgcggaaggaagcgaacaccaagcctatggaagtgaacaacagggacatcttctgcgcctccacacacacacatatatatatagctgatacagaatagtccaacttttcttatttttgcttccaacaacgagctcgtgtgatcgtgtcgatgattccgggaggaaaaaaatcatctttgatttgtggagcttatgggcgcaacgtacttaagcggcaaaaaggtttcttgctgaagcatctctgtattgtagaagcgcgaaatactgacctcaatgtaggaaattgatatcttctgtaagtttttgtgaaaacagtcttggttgctcagagcatt

SEQ ID NO: 113793 - DNA, 236 bp, Physcomitrella patens
  Intron number 3 from transcript Pp1s4_360V6.3 (locus Pp1s4 _360V6) derived from phytozome v7.0 (chr-ID scaffold_4; po s 2714788 to 2715023 reverse strand)
ctggctgcccctcaagtcaacaccaacaacgggaggtacggttttctaattttctttcatgtatgatgcgtgcctgctgtgtcgactccaatccgtgtctgtaggagcaactagctgttttgttcccactctcaaatcggtcactactggctcatttgagtgttatgctgcaatgctttgtttatcgaaacgttatcattgttgtgaagtggattcttcattttctttctttagga

SEQ ID NO: 113794 - DNA, 620 bp, Physcomitrella patens
  Intron number 1 from transcript Pp1s21_258V6.1 (locus Pp1s 21_258V6) derived from phytozome v7.0 (chr-ID scaffold_21; pos 1554321 to 1554940 reverse strand)
cgaactgacttctccaacattggtgctcttgtaagtaaatatttttaaattgaaaaaaataaaaataaaaactatatacgttttgatttatttaactttcctgttttttttgtatagttttttttttgtacaatgttcatggttgcaatcaattatcaaaggctgcgaacacttttggcatttcgaatttcttctgtccggtagttgagttacgagactttctttagagtttcagttcattgaacgaaggctaaaaaaatattcgctgcttagtgatatgtgcttccgtgttttatttatttatttatttgtttatttttgccttcaagcacctaccgcgcttctttgttggtcgaattggtcgtctgtttcagttgttgtggcaagcagcgattgagtaggagtattttcactttgctcttcggtgcttgtagaatgcatattgtgtattttactcgtattaaattattggaaataaatatgctgaaagcaagtgttttcgcttgtataatatttatcgatgctcttgtgctcctagaagtagtaccttaattgctcgtgagagtatccacattgtgcgctaatcgtttaatgcatcatgtgatgatgcagcgtgagca

SEQ ID NO: 113795 - DNA, 946 bp, Physcomitrella patens
  Intron number 1 from transcript Pp1s7_65V6.4 (locus Pp1s7_ 65V6) derived from phytozome v7.0 (chr-ID scaffold_7; pos 272871 to 273816 reverse strand)
ctgctgtgggaattcaggtcgcacctgtctagaaggtatgacatcgatcacaaaagctacattgtctagcgtgagtccacaaaacagcagcgttagcatccttccctatcaaatcgctgtcggtaagtatgcaagtttcagctggacactgttttggttgcatttgtttttatcagtgttgatacaggtaagtttcgtcgtgggcgtagtgaagcagctgggtattgtgttttctgcaccttctgatatggtgaggccttgactagtgatttaatgtgcccatgctctgactactattggacctcagagtgacccttcatggcagtgaatctgatacacttgcaaagaaattgcttgagagcttgtagggataaaacctctgattgaactactcgtgaaatttctcaatgacagccagtgagatgcactcctcttatgttccgagtacatgcacaacataaagttttgtagtcattactctccagttcccattcacactccgtcctggacaatagagtaacattatcgtccatcatcggtttaccggtgtttctggacaaaatgctggtcctgaagataccttaaatctttggagtgttgtccaacccactgttctcgaatgagacggctggatttatactggtagctagaatggtttagtttatgctgctgcatgggtaacatcggactaatgtatcctgatgtgcagcgtagaagtgccgatatctatcacgggtcttgtatccactgaattctaggaaggatccttaatctactttgatttttctagaaccagaaagtcatggcgcttcactaatttgtgcagtaggttgaaaatctggtgtgtccagttcagacatcgattcctgtcttccattttaaattcccactgatctggttattgaccggcagaagtactcttggtgtctggcctcgcttgcagaag

SEQ ID NO: 113796 - DNA, 680 bp, Physcomitrella patens
  Intron number 2 from transcript Pp1s235_76V6.1 (locus Pp1s 235_76V6) derived from phytozome v7.0 (chr-ID scaffold_235 ; pos 341952 to 342631)
gaacaggtatgacctttacggactacaggactgttatcgaggtccgattaatgcgctctcatccgtcatagttctgattattaatgcatcactcttgtgtcctttcgactgtggttccaagtaagagttgtggatattgtgagatcaatattgtcattttgtaattctgagaacctcttaaactaggagggcctggcgttttaatttgtaatcatcggtgcacgatggattgaagggtgtgtagtaggctctatttgttccaaattttgctttaaatctattttgagattttaataaacattaactcgtaatagtggcataggccgtctgccgtcctcgaagcgttcactaacaggcttgacctgaagacattagaactggttacaacattttggaatagttcttctcgggcttcccgtggcctcatttggtctcgaaatcacaatatcctgagcctcgcaagactgataggttgaccttgttttgcattacacaccagtttcttgttggaatgtagtatcgccgtttgtatcttgcattcatgtagtgcgtttttttttttttttttttttttttttccttttctttccttatctcttttatgtcttcgttggttagtaatgatatgcaattgttgaatcgcagagtgaagacttctgcagtatttgccatctgggagg

SEQ ID NO: 113797 - DNA, 567 bp, Physcomitrella patens
  Intron number 2 from transcript Pp1s195_4V6.1 (locus Pp1s1 95_4V6) derived from phytozome v7.0 (chr-ID scaffold_195; pos 40731 to 41297)
aattgcgcaacaaagtttcggcgcatcgctgccctgtaagtctagaagcattattttaagttctttgtcaaatacaagtgcctttttgctagtctatgaggagagcaggtgctgtaggctcggtattcaatggcaaattcgagcaattctgaattttgaaactggcttactgtcgggaatgggtcataatttatcttggaggtgctaggcagttcttttctgacgaagtcgttctaatggtgattcgactagcatgtaatggatttggatagaatgttagattcaaatagtcggactgtgcttctacagcttaattccttttttgtttatttatttttaagcttttgtgtgcggacgtggttaaatagcgacgagtttttgatttttatagatttagtggtaaagagttggagtgtactaccgtctcgtggattgcagagtcatacagttgtatgcctgaatctccatttgtaatcagcttggcttttgttgatgaacccttaacgagcttcatctcctatctggtatcattataatgaataattggggtgattcagtgtttactga

SEQ ID NO: 113798 - DNA, 1015 bp, Physcomitrella patens
  Intron number 1 from transcript Pp1s66_115V6.1 (locus Pp1s 66_115V6) derived from phytozome v7.0 (chr-ID scaffold_66; pos 511557 to 512571)
cccgaggtactaaactagttttccctatctagactcgccatttgctggtcttgattgattgatgtcgagacctgtgactcaattgctccgcattggtttctcacactattgtccttgaatactcagcacatcctctgcacttgtgtgagcatgtcggtggcatgatcggtgagcattcatgcgtgaatttgtttttgtggaggagttgtgagagcttaaagaccttgaagcttgttttctgtggcgtcccatgatcgcgttacatcacaatgttacattttaacgcgaaagtgatctaactttgctcatcgactatgattgctagttccacaatttgaaagatttacgtagtgctctcacttttcgacttttctgtatcttcaatccccagaagcgttttgtattgtctgtgcgtgagggtgatccttgagttgaagttcaatgccattgattaatttcgaggggataaacagtgatcttgcaatctccgtctgcctatctcgaaattctcgtagcggcggacgattgcctcaaaaaatcgtgcaagagctaacgaagtttgcaatcacacacttcctttctttcgtcactctaccttggtttgtggcttttggcgaccgcttacgcatctcactattttctcctccaaattgaagattcattggtagctcgtggttgcatcctgtttcattgctacagatcggcggtgctgcaacttttatgttatttttattttctattgatttaagttttggtttttctctttgttggttttctttttatcctcctcagtcaattcgctcgaaattaccttgattcctctcaaacagagtttttagtgtccagttgacgaggcagattttggaagcatccacaatctgcaagtaacgtctacgtgagcaattgtgggaataattctttcaacccaattatgaatgctgacctgtcaccatgggtgcaaatgttgattgatgatgcagacagtggaaatcaggacggtggtgcttcgggtgat

SEQ ID NO: 113799 - DNA, 776 bp, Physcomitrella patens
  Intron number 1 from transcript Pp1s7_47V6.1 (locus Pp1s7_ 47V6) derived from phytozome v7.0 (chr-ID scaffold_7; pos 179685 to 180460)
cggagaaagaagaagactacgtcattcgtatacaagtatgcagaatctcaaactgtcaccatatactttctcatctttaatgtggtgtgcaattgtacatctggctagtctatcgattacacagtcgcttcattgattcgccagaggttggtttagtagctgagttagatctattttgtttgctgtgcacatgctaacctttgtaaggaaacactagagagcactctctgtgtttgcgtacgtttatgttcgtcgaaaaaagataatgcaagaatgtaatgctgaattttatttatgtatttatgtaatcattttccatcccgccgtatgtctcgatatatttttagtattcagaaacaattaaggtcaggcagaggacacggtgcgtaaactttgacaacatatgcgctctattgcaatataggagtggaagctaaggattaaatttcgtgagaatctgttgtagttgaacccttagaatggtctttaggaaggctttcgacatttatgcttgagtgaatttagaaaataggattaatcttcatcgtgtgtgttgctgaaaattggcgttaattttccgcgttttttaattatctcgaagttcgtctttcctactagttcgccttgtaactaggcttttgtttttctgagtagaaaatgctagtgcctttcatattattatcttgcgatatatatatatatatatatatatatagttgttaacaaccttttgtattacaggagctaaagcagaggctggagggtttgcgtcagca

SEQ ID NO: 113800 - DNA, 860 bp, Physcomitrella patens
  Intron number 1 from transcript Pp1s173_160V6.1 (locus Pp1 s173_160V6) derived from phytozome v7.0 (chr-ID scaffold_1 73; pos 927649 to 928508)
gcggtgagctgtgtgttagattttgcggatatatcaacagctaatgaaaacatactcaactaagcatatttctatcgagaagttgcaaaaggagcactcctttgagcggaaatgcctgtggcattgaattataatacgaatccatcgataatgaacacacatcaagacaagcagaaagaagttacaaatttgtttgtatttgtattgaatttctgaatccattctatcccaaccaggcaatgaagctgataatcctggccattcagatccatgattgtatcacttatctttgttatatgagaacttgcgtcttgtctttttgtgcttagaacgatgactgaagtgaaaccgagtacaatccgccacgcaatccctggcctacaattgcctctagcatgatgctatctcatccttcacgaagaacgtacacagacatgtagacgtctgctttgagccatccatgcggtgctgcagacgcaatgtgaatcgtctatcaactagattacaacccctaaaagtccttttgatattccagattgtgtcgccagcagattctaatgatcctagtcattcgtcccaaagatctgcatcctggttaagctttacagtcactcggtccataaaattctagccataccctcgcgaaacctctagtttcaaactcgttcttgctgcatgtgagtcggtttcgatctcggtaaatttgaggaagaggaagaagagtgtacaggccgttggagatgatggataaccattctaagtggctctgaactcatggtagaattcgaattaacgatattgccgacctctaactttttcttgcagcttttcaccagagatattcttagacgatcctggag

SEQ ID NO: 113801 - DNA, 543 bp, Physcomitrella patens
  Intron number 2 from transcript Pp1s148_83V6.2 (locus Pp1s 148_83V6) derived from phytozome v7.0 (chr-ID scaffold_148 ; pos 564263 to 564805)
ctcaggtaggtcagctagccgtgaataataatgggttacgtgttggtatgcactctaatttggtgatttgatcttatgtttgatgatatttcgcagccaagttttcaagtctggtgtaatgtaaagtatgtgtaggtgctgtgctatattaaatctttgcgattctacgattcttgcatgaattcctgatgtccctcaaaacgccatttgagatagttctagattaaatggcccccagcgattgcgcaatgagtataattttggccttcgatgggtatccgtgaccttttgagcagcagtattatctaggggttacactctaatatctgtgactggcgtgcaatcaacgtgtttccttgatgggaatatttgacaattaatgcaacataaaactgatgacttactttttagccaatgcagattattttgaactgcattctttcgaatccaatgtggcttggaagagtttggaattcaatctattcgtcggatgtctctcaaatttgtttctggttctgaatttgatgttttctatatgtgcag

SEQ ID NO: 113802 - DNA, 801 bp, Physcomitrella patens
  Intron number 1 from transcript Pp1s359_31V6.1 (locus Pp1s 359_31V6) derived from phytozome v7.0 (chr-ID scaffold_359 ; pos 213664 to 214464)
gccgtgcgcactggcggaaagggcagtgttagaaggtaaaattcacttctacgcctcttgactgtgctgacattccctccactccgatggggtttggtttgtgcgtcttgtgacgaggtctagggttttgtattagtgtgttgttatgttggttttggtggtttagtgcctccttcaagtgctttgtagcatttggaagttgaactgagctggcgtggagggactggtgcaatgcatttttgtagctcttgggaactgagctgtaggtttagaggagtattggggaaattttgatttcttgttgttgttattgtgttttttcgagacttcgactttcctgggacttcgattttcttgctttactagcaatattaatgaattctgcacaatgacatttcaaaatggaattaaagaagacattgttatatctatggcattcttgtttcactgcaggattgtgaaccacctatgctagttgtttttggtgatatcacaaccaatttgtagattttctacataatcttccgaaccgactcggaattcttctttttgagcatagaaacttatcacactggtcattgttccgcttgcattatattattcatgattacgaatctttgatggtatcatgttcgctaattttcacgttgatgctgtcgacttttccttctcccatgccagtagtaggtgtttcgttatagggtgttagttggtgagccaagtattgtgattacctatacgcatgtcaacatctcaaccttgacaggaaacacaaagcggttcataaaactaccactactg

SEQ ID NO: 113803 - DNA, 455 bp, Physcomitrella patens
  Intron number 1 from transcript Pp1s228_20V6.1 (locus Pp1s 228_20V6) derived from phytozome v7.0 (chr-ID scaffold_228 ; pos 211518 to 211972)
cctcttccttaccatttccgatcgacgccgacacggtatggaccacctgaggagttggaagaaatcataactgcaataacatcttcaatacgcttccagtctctgttatgaggttagggatgtattatcctgcacaatcgatcatgtaactaagtttttacagccacaatcagatttcgtttgattccatcatgtttcgatgtttgttccgcttggtgagatggacaattttgcaagataatcacaagatttaacctggaactggaaaacttcgcatacgtcactggggaagagagattcttgtgcactctaaattattctactcccagacctctgaacattcatcaccgttgcgacggctgctaagattagcttcttagattattattattattataactattattaatattttttcaacatactctgagaaaagtgtgtgtatgttctgaagg

SEQ ID NO: 113804 - DNA, 500 bp, Physcomitrella patens
  Intron number 1 from transcript Pp1s101_203V6.1 (locus Pp1 s101_203V6) derived from phytozome v7.0 (chr-ID scaffold_1 01; pos 1027912 to 1028411)
ctcagtcacagattccaaagagtggtatgttctcccttccgcgcgcatccgagcattttctctctctgtgcaatcttggcgtcctggttctggcaaagcaatctcttcggcttgattgatattttgacgattccaatgattgcgctttgctcaatacaggaaccgactttcatttgcctcgctaggacctgactgcgagtagtacttgatttaataaatagacgcagtttcttgtcctcacttgatcgtcgtatctacttgagtcacagtctgactatcttcaaaattatctccgtcgttgcgatttgaatctgtcccgtaatagcacacccgattttcaggggggagcctgcgtgtctgtttaattgctgcttggtgaattgattttccagtacactacggtgtgttcagatctgagtgcccttgaggtgcactgaaaacactacatacggttttctcaccgttttggttcttttttcgtttccattaatcaggtggct

SEQ ID NO: 113805 - DNA, 711 bp, Physcomitrella patens
  Intron number 3 from transcript Pp1s164_99V6.2 (locus Pp1s 164_99V6) derived from phytozome v7.0 (chr-ID scaffold_164 ; pos 632614 to 633324 reverse strand)
ttctccaggcaatccagcattggtgagcaatgaaacccctttttcttttgtctccctcactcctggtcgagtaatgggttggatcggatggcttgtttctgtagataacgttggcaataccacaatcaagagaaaggtttgtgtcatgtatttgtttcacgtggtgatggaaacttttgatgaaattgtgtttgtaatcattcgtaacagaacgatggacgcaagaaacgttttgggactacgtttctttgcttttttgcatcaccccagggattaatttcatgcattggtacaatctcaaagtctagatgggtggtgaaaatttctcattctgagaatgtgtttcgagaggtgctgcagagtaatgtgagaacttaacaattttgttttagtggagctcattcgtgttcatcttggaagtggtcatcactctcacacccccacaattgttagcaatcatgtctgactaacgagtcacgtagctgccgcctagattctaggagttagttcactccttcactcttgctgtggtacacggggtgtgaaagagtgtacttgccaaaacaatatatatatatatacatatattgcattggcgtttttatagcttgttttatgttatctgacactgcgtcgttattcagttttctcgttcaaatactaacctactgcatctccggcaatcgcagatcataagaaacgccttgagcg

SEQ ID NO: 113806 - DNA, 781 bp, Physcomitrella patens
  Intron number 1 from transcript Pp1s53_180V6.3 (locus Pp1s 53_180V6) derived from phytozome v7.0 (chr-ID scaffold_53; pos 1199652 to 1200432)
ctggtgagctttcctgaatctaccgtggttttcatctctttagaattttggttgattctagaatgccctaagttggctaagttttcggtcttcttggcttttcttttagttgaatatggtgctgtttgatcagtgaccgtgtggttagggttattgggagaaatctctatgtctgatcgcaaggttttgtccgcgggttttgatttgctggattcttttctttgagttttggttgtagtacttggcccggtagattactacttctagggttgaattacttctatttttctttcatgcaatgattgagtttattttgagtcgcttttcctttcttagagcgttatctgtcttccttgaatgtgtgaccagctgtgttgagtttttatatggttgatgtgctactacattaaagtatctgcattaaagtcgcgtttgaggctaggattgcttggtttcgaagatgaattttcaacggttgaatatgttttatggattaggcatgtcatgtgtcttaatatggactactgcatctgagaattttgctagaagcgtctgtctattgttgaatcattgattcgtgtgctcactttctattcgagatattaccttttggtgatctgtagcaagtaattgataaggtgtacagagcacggtttcgttgcgtcatttttcatagagcaaattcgttgccacatgtatgtttacctttgtacgtttacttagtgtaagttgacttggaactgtagaggagacggctaagtggcgcagcatcacaattgca

SEQ ID NO: 113807 - DNA, 618 bp, Physcomitrella patens
  Intron number 1 from transcript Pp1s263_19V6.1 (locus Pp1s 263_19V6) derived from phytozome v7.0 (chr-ID scaffold_263 ; pos 111003 to 111620 reverse strand)
aaggtgcgagtctctgatttgctagtcattatcatttgatgactcagtttattcctttaattcatgtcagtgccagaagatgcattctctgcattgcgaaggagttgctaattctatttgctcagggttgtgtgagctttagaatcgctgtttatacactcagaatttggcagctaagttttagtggttgctcttgaattctgcatcctttgactagaagccaattttctccgggtgcacattagtttctgtcaatgtcattgaagtgagaaagagacattttatccttgactacgtctatgttaaataaaaattggttttatgtcttgatttgtttttagttttagttttagttttagcttattatttttttgcataattatccttctttttccgttttctaatttttgaaacctgcgggccctttgcttagaatccgatgcctacggttcaggattcatatattgccgtaggctgtagtcctggttgacgtaattttgtacgtgggggggggcgagagttaatcatgcaatgttttttcttgggaacgagcaacgtaacattgctcctgtcgatgttgcagagtgctccccctggtaagtccaagccggtcgacag

SEQ ID NO: 113808 - DNA, 522 bp, Physcomitrella patens
  Intron number 2 from transcript Pp1s156_48V6.1 (locus Pp1s 156_48V6) derived from phytozome v7.0 (chr-ID scaffold_156 ; pos 349467 to 349988)
caccagaaggctttcatctacctcccgtgcacaaggttagtgattgtggcatgagctgtacttatgtacctctaagattctgacactcaggctcttgtgagcttaggaattcatttgtgaggatatgaaacttgcaatcatggattgaaccgaatgttaagtagggaatgttgaagcagctggtgatacgtctcggccattttgtttcatgcgaagttgtctctagggttttctccctcttacttgataaccaagcattgtgaggcatccgctctcatcttggtagcttttgatatgaagtacatcaagagagcgcaaatttgcgagttgaatctagatgcatgagtttcttctcgttctcctattcttttgagtataattaggtgtaatgaagccattttttttttttaatttctaattttaatttttaatatatatagttgcgatcttggacagagtcaaccttgcatccgttataccttccaacaaatgaagacgcttgtgtttggtgctgcagaaaat

SEQ ID NO: 113809 - DNA, 676 bp, Physcomitrella patens
  Intron number 1 from transcript Pp1s290_35V6.1 (locus Pp1s 290_35V6) derived from phytozome v7.0 (chr-ID scaffold_290 ; pos 519616 to 520291)
tgcgtgttgctgctgctggttcgctcgctcactcggtctgtctgtcccttccctccgtgttctcttcctctcctctcctcccctctgtcaccctccaggtctccctccaggtctcttcccttcctcgtatcgcctccccgctgtgatttcctccctcccctcctcaaccctctcttttttttttacttgttttgttttgttttgttttgggtatccttgtggggtttgggtgtttattagtagcactggtctatcataccctatgagctcttttttctttccttgcacgcgtcgtgtatgcgtcttcttacgtgttcagccactccatgtctgtttcaagggtacctggttaaagccctgtagtatcagcttttgattgtgagattgcggacttgtaatgtgtttcggcgtctgagttatacgtgttttccgcttcaaacgtttctatccagggatctaagccgtctagcttcttcgtggtgggggttctagaaagcgcatcgtgtcgcttggcttgccgttgtcttcttgttcttaatctgttcaatcagttgtggcactagtgagactgcctcgttagtgttgttcttgtggatttatgttatggacgcggtgctgatgatttcttttgttgttcgcagcacatcttttgcggagttacgcaacgttgtcttct

SEQ ID NO: 113810 - DNA, 999 bp, Physcomitrella patens
  Intron number 1 from transcript Pp1s71_253V6.1 (locus Pp1s 71_253V6) derived from phytozome v7.0 (chr-ID scaffold_71; pos 1317149 to 1318147)
ggcgaactgaacaggtgcgctggtgtttagatttttgcatttggtcagggaagattgaggagagttgtttctgcgcgaaagtacatttacctttcttagggtttttgttactgatgaatttcatttgattttggggaatgctttgggtttctttttgagcattttagactgtacaattctatcattcttgtccttttggtcaggaacttgggaatgtagtgtggtatgtacaatagcttaatgttcgtttttttgggtatggtacatgcgattttgttggtgtgagttgcatttatcacgagtgtattctataccctttgattcagaagtctcaagaagtttgcaccttttgcttaagataactattgtaaacaaaaatacgtgagtataggggatgttcttgaatatcttacttcaaaactagttatgaatcgatgattatgtttttgacaattaacgactataacaacagattttaaaaagggaattgcagccttatgaggcctttcagagcaaacaatggtctcattcttatgatttctcttagggtttcgtttcatgggcaaacgattagtaagatgttgtgtgttggagaattctgtgacttacattgcagtgcgtggaacttatgaaggacatcagagctcgtttgtgggcttacctgtaataaatgaattgcttactttcggttactgaagtgtagtaatggcgatggtggcatttactgttaatttagtgtttggagtcatcggggctgcatggaagacttctcagactatttcccatcgttaacctaggaattagtcattgacgacaagtttttgggcagtgatctgtttctttgactgagtggtgaccattaactacagcgcaaaacatcaagatagcagagccatacttgttactgcatgacttgataacatttagtgctagtggtatttttgtaagtctttcaatggaaaatgcagttgacatgaggtgattatgattttcgtaggg

SEQ ID NO: 113811 - DNA, 960 bp, Physcomitrella patens
  Intron number 2 from transcript Pp1s51_100V6.1 (locus Pp1s 51_100V6) derived from phytozome v7.0 (chr-ID scaffold_51; pos 716500 to 717459 reverse strand)
cccaaggctccccacgtcactgtccaggtttgtgagaagcatcttcaacccctatttgtttttatcattcttgtactatgcggctaattgtctcacatttcagccttcgttatctctgctctgaattatagtgtaccatgaacattggatgtttttgtcgcagcaataacggcctcgttgtcttgatcacgtttcttgtgcttcgcttgtcccccattgacaaattctggtcttttcccgaaccactgtagtccaggttttccctgcttgattccgccatggtgaattccttttttccagcgtatttcatttctgaagttgcggtcctgtattctttcgtggtaccacccagaactttttcattattttgagtgaagtagcgcgtattatgcagaactcccatcgtttatgcagtcatacgttgacctcaccatttacttgctgtagcccctacataatttgggaacaaacttaaggcggtcggtagtccagttttcttcttgtaggctttgggcaatcgcagtagccgcggatattactgagattaacacaatcttggtataccagggttttcttttagccattggttttaaacaaaggctgtaatgagttctgccgacacaatgtctcgcctgtggctcaacacaatttatttttgtggcagtgcttgaatagaactgatgtcctcatttttttattttttttttatcttttattttgaaaaaaaaaatctcgtcttttagtactcttcctcacttcattgtcgaatcttctaattttttttgaagcgtaagtcttgcttttgcatgcatcttatagtggtatgggttgcgttatttctatgcatcagaactcacttggtgggatgtttcaaaaatggctttggcaatctcgttcaccctcattgaaatctgtaatttggatttgtgcagagtgcaagtttctcgtacttcggtttag

SEQ ID NO: 113812 - DNA, 922 bp, Physcomitrella patens
  Intron number 1 from transcript Pp1s62_198V6.1 (locus Pp1s 62_198V6) derived from phytozome v7.0 (chr-ID scaffold_62; pos 1486709 to 1487630 reverse strand)
tgcttcaagccatcgtccttcgtcgtgtctcagaggtacaaaccttgttgttcgcttctagtttttatcttctgaattcggattgtgaaagttctgagaatcgtggttcaggaggcattggaataaggctcagtggggtcttgttttctttgtgaagtccgtgtcgacatttctggttttgacaaagaaattaatcagaggggaaaactggcataaatttaattgctacaagttttcttgtttgattttttacgggttttttgacgattgagttttcgctgtcatttcttttttcaaacgcgatgagacggcaggaagtctcggttcagatatggtcgcataattcaggattattttcacaattttacagttcatacacacacacacacagacacacatatgtatctatgtatgtatatatatatatatatatatatacatatatgtctgtatgtgtgtgtgtgtttgtgtctgtgtcttaaaagttaaaacttccagttcgattattgctatacactgcaagtaggacgcatgtttcttagaactgctattttgaattacctcctattttgatgacatgaagttggcaaggtagtgattgaaatttaacactctcttcatactggtgacgtctaaatactttatatgatgatacacaagatgcatgtttcagttgaagctatactttaattaataactttatgttcagctttcatcgcttttgcaatctctaggtttacactgtagctggacttgcacttacgcattcacgtgatttctagtttttccctgaacattctgatgatattctcatatcccgattacgcgcattgctatcatgaactggcgaagtggggtgaggagaatcacaaatggtagcgtggtgataaagtaaagatgcttctgatttgcagaggggagc

SEQ ID NO: 113813 - DNA, 457 bp, Physcomitrella patens
  Intron number 1 from transcript Pp1s12_29V6.1 (locus Pp1s1 2_29V6) derived from phytozome v7.0 (chr-ID scaffold_12; p os 224049 to 224505)
cgttttcttctgaaggtcaaggaacgtcttcacaggttaggacaatgactctcagtttcttcagtgttgaggatttttttggtatgtccagtttaattattacaacagcacgcatctggtgacgaattattgagattatgtcgatcacatataatcaacgaatcaaatctgtatagacttcgggtcttttgaaaatttcgtcaaatatattctggacaagctcacgttgagaaatggttatgaatttagaatttcttgtaaggctcgggatgaagttatggtacaaagcttccttctagacatgagtgagtactttcagattttcgaaggaaatgtttagtacagcgaatacattccgtttgcagacaagagtatcattttcttagtatcattttctcactgcctgttatttgtatcttcagagtgggcatacaattgccttcagttgaagttcgat

SEQ ID NO: 113814 - DNA, 412 bp, Physcomitrella patens
  Intron number 1 from transcript Pp1s322_27V6.1 (locus Pp1s 322_27V6) derived from phytozome v7.0 (chr-ID scaffold_322 ; pos 341335 to 341746)
gcggtgctcgtgttggctcagtatctcgtcgcgaggtgactcccagtaggtttaacttttttcatcgcattcgattcggttttatttcgagctgtccaccgagtgttttggaaggggaagacggggatgaccagtggagagcttcacatgcagaatttagttagactgaatcggttttaaataacgcttttccaagaatatggtctgctgtacgacagcttgtgatttaaatttttgttgggtattagttcacaaatgcaggggaagtcaacaaataatcatcgtgaaatgacattcgcaaatttttttctgtgtgtgatggagaatgaaaggcgatcgggtttggtttttgagtttgatgactgctggtagcaactgctttcaatcgctacggatgcgcaggttctcctgg

SEQ ID NO: 113815 - DNA, 697 bp, Physcomitrella patens
  Intron number 2 from transcript Pp1s49_289V6.2 (locus Pp1s 49_289V6) derived from phytozome v7.0 (chr-ID scaffold_49; pos 2100551 to 2101247 reverse strand)
ggggcggttgtgcgaaggactcggaaaatttacaggtgaatttggggtcatgatgtaaagtcttttttcttttttctttttttctttttttctctaaaccctctgttgctaaaatactcattctcttttcatcagcttccacctcaaatctttcatcgtgatattgtgcacaattacgaagtgtcaccttcttgatcttgtgtttgtaatgatgatataagctgtttctcctgcttttcgagtagacaatgatggtgataggcttatttaggagtgataaaagtttattaacaccactttgtagatttctttgcagctaaatgatagggtaatttgaatcagtgaatagagcattaagcagttaacatctacgtggtcaccttgcaatataggattgtagagaattgtttagagcaatatcataggggtttgagcttcagttgtgtccagcataggctattgagataacactgagaatgttcactaacacacacgtacacacactttcgtttgttatttgtttttgaatttcatgtaaagagagaattttgaatttcatgtaaagagagaattttgaacatgacttcatctgctattgaggttgtgcatgagaaccaatcgaatgcagttattaacaactattcattcattcacgggactaaaacttagcatgttgttttgggtgtatgcaaggtgc

SEQ ID NO: 113816 - DNA, 689 bp, Physcomitrella patens
  Intron number 2 from transcript Pp1s21_105V6.2 (locus Pp1s 21_105V6) derived from phytozome v7.0 (chr-ID scaffold_21; pos 627439 to 628127 reverse strand)
ctccgccttgcgtacggtgtcttaaccttttgatgtattgacgaccaaattggcgcatgattaccgtttgacaacctcgttagtctggacttgaggcttgtgacgctctgagtagaaatctcctcttctctttcgctgtttcgtagcctaatatgcctttctctcgcagctggaacagagtactactgccgtaatttacagtgttttccctgttcgtaactttggtccacaccttctcgacgaggattgtaatgattagctcttgtatcctagtagcaatgcagaaagattaaattcattttttcgagtggttgcacttcaacaaccaatttaagttcatagattttacttcgttctctctttcttttgtctataaaaattctaagtagttgggagttgaactctggttattttgttggaacaaacagatacaaactttattgcacttgctgctagctattgttggctttctttcaaaccagatctgtggaagctttatgtaagatttctgcaacggaattatttggcagtgtttagggtccgatgacatcattaccatgtcttcttcttaactacatccgaaattaagatttgaacttttaattctgacgagctgtgagcacgtaattacgttgggacttttttttgttgtagttcttaattttacaatgatacattgtgtaggtggc

SEQ ID NO: 113817 - DNA, 383 bp, Physcomitrella patens
  Intron number 1 from transcript Pp1s341_97V6.1 (locus Pp1s 341_97V6) derived from phytozome v7.0 (chr-ID scaffold_341 ; pos 477724 to 478106)
tggcatctttattctgtaaagctggctgcaggaaggtaacccttggatattcgtgcgtgtgctaatgtgcttggtacagcttaaatttatttttttgccttcaacttcttttgtcggtgggactttgctgaagcttttgagattggatggcagatgcagacattgggactgaaacataatcaagaaagaaaaaagttggaattcgcagtgtttgttctacgtgccaggccacacaaacatatttcgtataaaatcgtttcttctgaaggagtctgaacgaatcaatcacaacgtttcaaacaaattagtcagaagtctcaatctgttgaatgatttggcctgttgcagcggcaggcttcctcgtggaagctggcaagactgca

SEQ ID NO: 113818 - DNA, 807 bp, Physcomitrella patens
  Intron number 1 from transcript Pp1s162_162V6.1 (locus Pp1 s162_162V6) derived from phytozome v7.0 (chr-ID scaffold_1 62; pos 892725 to 893531)
gcgccgcagcagtgcatttgcccgccgcagctcaggtgcgttgttgtctttgtagatctgggttcctcttcgcgagtgtgagtgacttgagcttctgctggagaagttaaagtcagatcgggtgcatattcacgacgaggatcagtttaatcctatctcaaaacgaaaattagggtggtattttttttttttgtttttgaggtgtattgtggttctgtgttggatctgtggtggaattttgtgttgcagcatttattgttgggatcggaaagaaccgcggaatgatagaacttgttaatccagacatgtaggcaccttgttaggtgttagagaatcgctttgggttacattggacgtcgcaatgcagatcttgcttcacccactgtttgaaatttgtttcaatctgttaattaggctgttgtacagctctacaaatgtgcagagatctatcactcatacacgtccagaaataaaacgctgttccggcgaatagattccgacactgccattgttggaggaacgagagtctctttggaactgctgcgatgagtttgtgctgcatctgttaaagctttaggaagctgtgttttggtatcgcatttgtcacattgtctgggatcagggatacaaacttgttatgatgtggtctatggacttgtcataaaacttgttgacggtgggtttttcaacagtagttgttgcctttctaatacgcagttgggtagagattgaagaatacgtgtaataatattttgttgctgtttcgctgaagttggtggcactgcaggtactgacgttagtggtacg

SEQ ID NO: 113819 - DNA, 350 bp, Physcomitrella patens
  Intron number 2 from transcript Pp1s11_162V6.1 (locus Pp1s 11_162V6) derived from phytozome v7.0 (chr-ID scaffold_11; pos 1474707 to 1475056 reverse strand)
ttgaggttgttgttgccttggaggacaaacttcaggtaaatttattgctgaagacacgtggtcacgtttcagtgttcgactgatggatgctacgttgttttatttggtaacgatttctcactaaataggtatcgatcattttgtctttgaattgcgtgggtttcaaatattgtagtgtaccgcattaatgctagattctttttttcttttttttttgtttgtttgtttgtgtgtatgtgtgtcgattttatatgttttagaaagggtctagaggagaaatcttcgtctgttgttaaaccatcgaaatctgttggagtaggttatcgatccgcgggtgtcgtttgcctctg

SEQ ID NO: 113820 - DNA, 746 bp, Physcomitrella patens
  Intron number 1 from transcript Pp1s9_131V6.1 (locus Pp1s9 _131V6) derived from phytozome v7.0 (chr-ID scaffold_9; po s 984387 to 985132 reverse strand)
tgtctgtttggtgtgtcgatcagtggccgttgaaggtgattctacgtgattctcatgtgcgaataagttcatgtgaggtggtgttggaatcgagggtcttgttggcacagttaagccctttaggttgctgtccatgtgtcaaaaaacaggggccatgcattagggtttgtgtgtgtattcaattgcaggatcgccccttcagctgaccaagcattagtgaatctgcgagtggagttgctagatgagatttttgcgtgaagctgaagacgttattggaaaagcagctcatgaaaactttgtggtttggtgtagtgtgtgtacaagttccagttcagattgtaagaagaaaagcctttacgatcggatccttgccttcttgtgagattggtgtgttactgggaacaaacttgtcattcatgagggacaatcttgttttcaataatgttgtgcatggatagatgcgaaagtaggtattattaacttgatgatctgtgaactcacttttatcaagcttatctccacttggtaaggtgtctgtgtcatgttgctgatcacgagaatgctgtcacggtggtttctatgaagcatacaacttaggagactttgccggttgcgaatatctagacctcgatgaagtcaatccatcagtgatatcaccagtgaaaactcacatgatcggacctgaaggctcgagttttgaatttgaagccagttaaacatcagcattgtgttgtttaatatcaagg

SEQ ID NO: 113821 - DNA, 702 bp, Physcomitrella patens
  Intron number 1 from transcript Pp1s136_188V6.1 (locus Pp1 s136_188V6) derived from phytozome v7.0 (chr-ID scaffold_1 36; pos 949608 to 950309)
ggtggagctgaaccgcctcgagaacgaagtcaggggtaagagttggtgtcgcgtcatcgcttcttggtccttctctgtccacgagctgctctgctgggagtgagactagcgatttgtccaagattcattcgacctccttgtatctaaatagcgtctatcctggagctgtatgcaacgcaggtctgaaaccgaatgttccgtggctgttaaaacaagtgcagtgtaggttgttccgaatgctaatagtttcttgaagaccgtttcgttttctacacgggtttagtagtttcgaataacggactgagtgccgtttttccgcgggacttgttgtctttcaaaactagatctgtcggatgaagttgtccttaagctatgcacggaagttgctactcatgcatgtagtggttccttggagcttctgcatattctctcggccgttgacattattttttatagcagggttggttagtagtcaactgcagagatgttaatcaactctctgatttgcatcttggatatttgcattggttcctcgtacctaaagaccgttcccgttgtctttggtggggctcggtttgagtctctttttgtagagagctatttggtgtcctggagtctggatttttgcatgggcaattatcttatctagttctgtgtcttgatatagataaagatcggaaattggcagaagctactgcagaa

SEQ ID NO: 113822 - DNA, 294 bp, Physcomitrella patens
  Intron number 1 from transcript Pp1s246_129V6.1 (locus Pp1 s246_129V6) derived from phytozome v7.0 (chr-ID scaffold_2 46; pos 599022 to 599315)
aacaaggttctaggccacttgttacttcatccaatttttacaagtcttaaagatttttctactttgttaagttacaactgcaagtgaaagatatctgcatgttgtcttcttaatcattgagtggattgacctagctagttgtttcttttaagatgtgcataataagttaactggtttatgtcattacaaatcaaacttgagttatagatccttagtcttaaaagtatccaaaatataaatgtatatgtatagtgatgcttggtgctggtggattgtaggtgccaaaatctggcg

SEQ ID NO: 113823 - DNA, 793 bp, Physcomitrella patens
  Intron number 2 from transcript Pp1s12_178V6.1 (locus Pp1s 12_178V6) derived from phytozome v7.0 (chr-ID scaffold_12; pos 1093264 to 1094056)
tggattgtttttcgtgcttccgtaaggctgccactgatctgcaccgccatcggattgtttacccacacgtctttgagcacacggaagcctgtctaaagttgtggacttattggatacgaggttccaatcacggaatcacttatctttcatgcttgctacctaggctttacatcagcatattgttatacggattgaattgtctattgggtcgatcaccatcggggtgcatctccaagagatcaatcgtgtgtaactggttttcggtaagcttacggatggcgagaggttggaagctgtttacatgacttacctgtgtaaagttttttttttgttttttttaatatatagattgtgttctgtttacgggttcccaagttggttgattaaacaaacttcaataggactctgtttcttgatgtgaattctgcaatagttgcgttatgggtcgtgagattctgcggtaatggtgattgtactaactgagatcggatctatgattggcgtggggggaggagttgtggaagggtggagggtggggtgttcagtttgattgaagagatagtttttcttctaaattttgaaattgggtagctttcgtggatgtcgagtcgtttggtgaggatggattgctaatttggcaatcaagtcatcgtcctgtgaattctatgttttctcttagctagaggtgacaagtccttcaaccgcctgaaattgcgatcgttggttatctaattttttgtggctttgtctattggcagtttttagattctgcagtacttaaaaagacaaggaa

SEQ ID NO: 113824 - DNA, 510 bp, Physcomitrella patens
  Intron number 1 from transcript Pp1s62_181V6.1 (locus Pp1s 62_181V6) derived from phytozome v7.0 (chr-ID scaffold_62; pos 1360480 to 1360989 reverse strand)
ggcgaagtaacatctcattgcactgctacaaagtttgaatgtaacttcgcttaagcgtctctgcttggatctgttgaataatggacatattgtgcacgtaattattttagtgtgttgagagaaatgcgagtcctgttttctatcacctcaacagcttgagaagatatagctaggatgagactgggacatactaagctctcactgcgtagtctatatatcattgtagcaacctgtagtgcaagctgcagggtcactcacattttgtctaatcatctttgccaaatgacaatcttagaacgtgggaaatcttctatatagtttgttttgagatggtgcatacttatccccatttttcttttttttgatgctgtcggaagaagactttctttaatctccatgaacctcttgcagcgacgaattcttcaggtcaatgatggttccgtgaactcccattattctaattttcttctcgtggtttgttttatttagtttgagaaagctcgtgttgcc

SEQ ID NO: 113825 - DNA, 648 bp, Physcomitrella patens
  Intron number 1 from transcript Pp1s9_319V6.2 (locus Pp1s9 _319V6) derived from phytozome v7.0 (chr-ID scaffold_9; po s 2176363 to 2177010 reverse strand)
ttggttgcgaatccagttcgtgcggtgaatcctgaatccacaccatccctcgcttgatattttgtgttgttctgcttgcgggaaggctgagcttgcaattccacgtctcgtgtccccacggtttggagctccctggtcgcgcactagcgctgtgattgtgtcccgacttccgagctgcgagagttttcccagagtatgaatgattgctcgtgggttggacaattgagggagtgagtttggggttgattgaggaagtgatcgaggattgaattcgattggattggattggaatggccgcgtgctgtgtgtctgtggcggtgatggccaatttgagtagcagtgtagtcgccgttcctcccgataagcagagcgtggctgtgcgcaaggactcctccactgcccccgccgttcaaagcaaactcgtactcatgcgccatggtagtgaattttatatggatttttaattttgattttttgaatttgtggattttgttttgtgggtttttatttttacttattttttatttgataatctttgtatcttcttttttgtgtaggaaaaatgcgtattcggtgcgttagtctgaagttcagggtgccttattattaataggttttttgggaattgtttgtggggcaggcgaaagc

SEQ ID NO: 113826 - DNA, 969 bp, Physcomitrella patens
  Intron number 1 from transcript Pp1s176_7V6.1 (locus Pp1s1 76_7V6) derived from phytozome v7.0 (chr-ID scaffold_176; pos 26466 to 27434)
cgagtctccctagtcccgtgactctcagtcccggcgtgagtcccagttcggcacaagtttctaaattctgaattgaaatttcttgaattccttcgaacttcttgaattctttgtccccatagaccaaatttgtatttactctttggtttttttgttttttgatgctagacaaattctattttaaataattataacactgacgtgaaaaagtattggagtgaaatgcacttagttgcatgtgtagtgaagatccccgaatgcgaaagtattatgttcagactcacaaccgtaaccaagtaacgtattgagggcaaggcaaagttttgatgtgaggcgaggcgaggcgaggcgaggcgaggtgagccagactccaagctcgtaaacctggtcgcattggaggtgaacctgtgctggatcaaaattcggctgctctgtgttgatctgtttttctttcgaagtgaagttgaggcattcttggggcgatttgaatcgattttttattttatttttatttttttttgttttattttggtttgttttgtttgttttctaaagtgagtaactgtgctccttcgttgtgtttgaggttgaagtaggagcttcaaggagagggacgttacatcgcttcgcatgttccttattaggtcaactcttgtctactccaccacctgcataacatgtaaaatgctgtccaaaactccacatgcttccatatttgtgtggtgcatggttcccaatttaattgtttcatggattgttgaaacctggtttaggattgaatttgttttgggatggaattagaagatttgacaactttttggctcaatgaacatggggtttgttttaagcctcttcatggttcttgtttttcattcactgctgcaatccctaaacctggtacattgcataaaggaatcggccaacgtaatgacagggacggagcggtgggacggagcgtgctggtccaca

SEQ ID NO: 113827 - DNA, 1018 bp, Physcomitrella patens
  Intron number 1 from transcript Pp1s21_338V6.1 (locus Pp1s 21_338V6) derived from phytozome v7.0 (chr-ID scaffold_21; pos 2033763 to 2034780 reverse strand)
gacggaagtccaaagggtagctatcttcagacacgacatgcgttgcgttgttgtgtttgtaatacttaacttgatgaggcgccacgattacaagtgtcattccaaagaactactgagttccatcaaaaataaaactcagagtctacatgtcaaacatgtgtacacgcgatccaaattaacacaaggaatcgtcttgctaataggagtttctcgaatcttaacaagccacagccacttgttgtcgaataaaaaaaaaacatggagctgaaatgtagcatagaagaacgacaacaacaacaacatagcacaccaaatcggcccctttgattctttgtggggtgtttattatgaggcactaatcagaggttaggcactagaattagcaggcattgacaattgggacgtggttaattgagggccacaacgatgttttcaaatagaacttgcgccacgtaggattagggcccacgtgttgcattgggaatcgtgcacgattgtgctcgtgggggttggcgttggcgccctttctgaggagaggtcgttagggctgctgggtttaaggcacccggcccggtgtatttgccattctaagggacacacactcacacacataagacagagggcgtggccaccaatgagttcactggttctcgtccccctgcccctacgcacggtcatccacttcccttatttttagaaccaagcccccccacggtcacccgcctccgttatttttagaaccaaacctcccccacggtgacccgcctcccttcgtgcatcccccccctctagcaacagacacaagaacactgtttcgctcagaagattctcttgggatcagatcttgtacttatagtttatgtgactcttcatataaactctaggttaggatttgcatgttttacacatggagatattgccgcgtgtggtttctaaacttttttttttaaaatatattattgttattcattttggttgtttaggagtatagaagcaaaatcattgaggttgagactgg

SEQ ID NO: 113828 - DNA, 806 bp, Physcomitrella patens
  Intron number 1 from transcript Pp1s9_349V6.1 (locus Pp1s9 _349V6) derived from phytozome v7.0 (chr-ID scaffold_9; po s 2371796 to 2372601)
agaaggaaacaagcacagagacgtaacaccagcaggtgggtttcttgttgcatgccataactctaacccattctcaggatatttatttgtttccgtctagttttttattcttcactgccgcattgccgtcttgtcggcgtttgtaactccttacaacagtatgactgttgtccagtactacacagagcgacgtaaccaggcacacacagagcgtgaaagagagcgattgaagattatttatttatttatttttgaaacattaagatttcgtctaggatatgatagctctatggccagttgcggtacagtcaagggttgtgctctctcaagtcgggactatttttgaacagatttgcctttcggggttcaaccatgatcagacagaatacctagttgaaggtgtttgcttgttcttggattgtcacctttgagggaataagtgacgtaccttcctcagcggtactagtcatagctattcattcctttaccgagatacaagtttgaggtgtgagaaaaagcaggatcggagaagaagatagagtggcgattttggttttgaagaggtagacggtttgagtgtgacagtttcgggtgaaggatcaagggcctaaggagcattgttcttttaaagtttgcttgatgtgtatgtgggtcatttgcaaactgtctctgtctgcctttcttgcaggaaaattctctcatatgggctaatgttggaacagacatgcacatgcattcataatcgtacatgtgctctgatttttgaggcagaaaagcgaggaggaggactaatcggccggccgctt

SEQ ID NO: 113829 - DNA, 737 bp, Physcomitrella patens
  Intron number 2 from transcript Pp1s113_159V6.3 (locus Pp1 s113_159V6) derived from phytozome v7.0 (chr-ID scaffold_1 13; pos 838993 to 839729 reverse strand)
ctatctcatcaagctgttgctgatcggtgacagtggtacgtatcatgtatatccgctacttgcttgaaatcgaattctcctcaagaatgtggtctcttcgacgattttttaatttttctttccaggtttccgccaaaatgtgctcgattgtgtcggtcgagttttttgtgcttactttctttgaataacttaaaaggggggttgttaagggcgttgtaatcagaagaaattcattcacgcccgtttcgaggtagtgcagctgcccttgtgatcgtattgcacatattgcacaaacagtcaatccagtttctcagctctggggctatctttagtgatagatctggtcgctattgctacaaggtgttaatcgtcttggacaatcaagaacgttagagatatcttacgtaaagtccgtccttcagatatcataatcaactcttttattaaggataagccacttgacatgagttgtgagcaagaatgccgacgacaagagttttttgaaaatcgagtgctgtgactagtaccttggttttgatttagggcatgagtaatgaacatttttgtatcactttataaggttcgatggattgctcagtttcttgatatcatttattgtaaatatttttcatgtcaagtcaatgactccctgcttcgtattggcgtcgtacacgaattgaaaattgtgtttgatgctcgcaggggttggaaagtcttgcctcctcctccgattttca

SEQ ID NO: 113830 - DNA, 942 bp, Physcomitrella patens
  Intron number 1 from transcript Pp1s173_33V6.1 (locus Pp1s 173_33V6) derived from phytozome v7.0 (chr-ID scaffold_173 ; pos 235132 to 236073)
agttttatcgtcaagtacgtgtctgcatctcttcctcgattgcttcgtgatcgcttagtttgtaaatgctaaaattagatgccgttagctagctggtgaaggtgatcgaaaaaactacagcgtttcgtgatgcttcaactggtttctacagagggctcggtaaagaattcggaaactagcttgttctaattggtagtttgaattagttgtgtgtcctcgcatagctggaagattgaagctcgtctactaccctaacattgcgagtattgaagtaggaacacttgtgttgtttattaatttactaatttattatcatatactggagttccatccacgggagttgtcttccaattggatttcacgagagccgcttctttttttgtgctccgaacttaatcgtgattcgctgccccaatacttcacatcaactctgctcttagtgcaatgtatcacaaaatctgctagtttactacgggattatttcacgaaaccgagcttctacagatccaagagttttcaaatgaaccactagagtttcgaagaaccgcaatcactcctagaaagatgcgaggtgaatgctttttgctcaggcagtctcttctgattctgaataaaagtattgaacttggatgaagagaaccttttactagttgcacggataaacttgtctctcgttatccatatgtccgtcaaatattgacgatcgcaactaattttattacacttatacaatgcatgcgaggtgcaaagaaagcctacctcgattttcttatctttgtgtttgtggttgtgacatataaagttctcctctgtagttgctgaaaattatttttggtgattgatgtctggtttatctgaaataaacgaatgaagacgttgaaactgttaactaaacaaggtgttggattcgctttgataccccctttttgtgtggtgtcacag

SEQ ID NO: 113831 - DNA, 977 bp, Physcomitrella patens
  Intron number 1 from transcript Pp1s6_239V6.1 (locus Pp1s6 _239V6) derived from phytozome v7.0 (chr-ID scaffold_6; po s 2180787 to 2181763 reverse strand)
ggcggctttgggtttcatttttccattgcgaccaggtgcgaggctgatgatgcctgtattggaccaatacctttcgtgcctgttttcgaactgctttggtttgtattcgcgccttttctttttctttttttttttttttcgttttgttttgttgttgattacgaagtgccgaatcgaggcgcattgcatgctccggaatcgtgttccgtgttttgggttcgagtgatttttccatgggtgggcgttgccactgaggtggaggtaaacaaatgagccgattttgcgcggggggggggggtgcttgtacaaaaaccgtgaatgagttcgcagagtttttgagtttggaagcgagggagtaccggcattttggattgtggattttgaataagtgaagagtctgggctgctagagaaatgttggaggtgtggattatagctttggtggtggtggtgggtgagggtttggcgtgttgcagaatgctgctcttgtggccgttagtatttgtagttcggagacagaggtgttgtgggtttttgagctgagtttttgcggaagccgtgctggcgactaagcttgaggtgttttttggacttcattgacgtagttgtgattgccactgtcgagagaagattggatttgaggtgatccgtcgtctcggcatcgcacgtctttgctcctgaaacgagcgcgctagtgtatctaaggttacgcaaagactttttttgaatggatcctctgcgcatggtttggctacgggcggattatgcaacaattttctgcctcaaacgcgaactatagcttatcctcatgtagtgcaactgagtttcacactctggtagttcttcattacatctcgtaaagtcaaaatgcgtgacttaatggagacgtgacataagagtacatggctggacgccggatgaattagcttgattttttctttgacgagtcgtggcctggattgggggcaggtggttgct

SEQ ID NO: 113832 - DNA, 528 bp, Physcomitrella patens
  Intron number 1 from transcript Pp1s53_136V6.1 (locus Pp1s 53_136V6) derived from phytozome v7.0 (chr-ID scaffold_53; pos 870321 to 870848 reverse strand)
aatagcttgtggcttatcatcagcgtaagtattttcgctgcatttctgattctcttgagcagacacagtgtttatgtacacgtattctattttttttcacaaaagatttcacgaggccatccatgtagtttctattgtgggtttgatttgcagtgaaactaatggaagatcgaaactttgaagattaaaagtgaaatggtaactgttgactgtcaaaacaaaattttgaaactttttgaaacttcttttgactgtctcaaacatcttctgttagtgggcgatactagtaaccaggttactctcgctggttcagtttttttgaggatacgttaaaattcttatacttgttgcgggtgctacgtaataatttgcctcttattccgagggctactgtgcgatcagctgaagtggacttggatgttggtttcaaacatcaatcgcttttacttgcttgtgtagggtacaaactgatttatggaagaaatactgtggtttgtgatgtgtgcgaactgcaggttattattattt

SEQ ID NO: 113833 - DNA, 596 bp, Physcomitrella patens
  Intron number 2 from transcript Pp1s174_108V6.2 (locus Pp1 s174_108V6) derived from phytozome v7.0 (chr-ID scaffold_1 74; pos 761744 to 762339)
ttctcaggggagattgagcacatcaagcttctcaagtgagcttcattcttccagagtggtggatctttgcttcgtgaatttcccgaggaatttggtgatttgatctcgacgatacagttgctgcgttttgcgtcattggtaactttggtggttccctgtcaacacattgttgtagtatgcgcctgaagtgttttgttccaacgaaagggtgatgcacctgcgtctggtcagagggaccatgtgtctcgagacgtagctcctgggatgtccagaaattatcactttacaactagagccatgcgtaggatttttctcactgttttttggcacttaatcttcatttttggacgatcattacggaaatcatttgagtttgagaatgttcctttagatggattacaatttagccaagtcaaatagattttcaggtgtaggattgagctcctgcagtctaccgagaaataaatcttcatgaaattatctggctattttcgtagctttagagataaatttgcaacgattcaagtcttcgaatgctgagtgaatttagtggtagattttccttaaattcaatgtttatccatgtctttgtaggg

SEQ ID NO: 113834 - DNA, 358 bp, Physcomitrella patens
  Intron number 1 from transcript Pp1s213_133V6.1 (locus Pp1 s213_133V6) derived from phytozome v7.0 (chr-ID scaffold_2 13; pos 693268 to 693625 reverse strand)
gtattattatcgctgcggcaggtcttttgcacaaggtcttcatagtggagctcgatgttctttgattatttgttttgtttttattgcttaaaaatgaattacattgcggatgtgctcattttgagggtgaaaacgcatgcgtttgtggaaggtcaaacaattagttatggttttggaacgactagtcgtcctggatagtttttagaccaggactaggtcgtgatgaggtggagcgattggggtgactcttgagtggtcgtctttgcgccatgtgttttcttttctttcttttattatttgttttccttagattaatatatttttgggagatgtctttgcgttcagggtttttcgggaa

SEQ ID NO: 113835 - DNA, 247 bp, Physcomitrella patens
  Intron number 1 from transcript Pp1s130_290V6.1 (locus Pp1 s130_290V6) derived from phytozome v7.0 (chr-ID scaffold_1 30; pos 1078008 to 1078254)
cttaggtaacattcttctttcattttcttcttcctattccttaaaacaaaggccacataccattaaaaaaacaacttaatttttttcagaaatgaataaatataactaagagagataaaagtatgcagtttaattattaattgtaagtctcctacaattaaaaatgagtgtaaaaatattttaaaatgcgtttttgtttttgcttttgtttttttattttttctgtttttgcaggtttgtgttgttg

SEQ ID NO: 113836 - DNA, 395 bp, Physcomitrella patens
  Intron number 1 from transcript Pp1s22_106V6.1 (locus Pp1s 22_106V6) derived from phytozome v7.0 (chr-ID scaffold_22; pos 686553 to 686947)
ggagaagaagttggccaggaaaccaccggacattggtatctaaattttcctaggaaatgtttatctaaatttaggtggattcaattttttaaaggtatgatcacttgtttcagtagtacaagagtaatgagggtaaccccaagggtggtgatggtgatgagcacaggtagagaattattattttaaaaaggtaaaggaaacatgtaataaattagttaaggatgaaaaagaagtcttttgtcggtgtgaggttttgaactaaataccttactagtgtttagaattttacttgtcatttacaatagagtattaactcatgttcttctcttgaaatctaaaaacaaaaatctaaataatgcttttattttgtacatgttgttttctaggcttaaagc

SEQ ID NO: 113837 - DNA, 994 bp, Physcomitrella patens
  Intron number 1 from transcript Pp1s11_350V6.1 (locus Pp1s 11_350V6) derived from phytozome v7.0 (chr-ID scaffold_11; pos 2550961 to 2551954 reverse strand)
ttttggcagctgtcagccttacgtgaaggggagatgtaagggaaatggatcttatccattgaatttacatttttgtcagctatttcttttgacttcattatagcttgtaattgagctttaaagttattacatatgaaacaattatgtcatggaccttttcggtttggaaacttagcaaagacgtagaatttgtagaacgcaatgcagcataaagacacaggcatcgattatccgagactctagttttttcttggtaagaatttgacgtattcatctcgaagacgtacgatgctttgcgtgaccagttcgactgtaacggagtcgaaagaaattcttaatagttttttctaccttcgttcggatgcttcctctcgactttggaagcgcaaaatcgttgtaatgcaccctgacaaggtttgtttatcagcagctccgatcaggctttacatcgtccatttcaccaaatggactatcttgtcaatctcggttcccggacgtgtaacgcgtctagaacactcaacaatgtgtgagtgtgttccgaacgcttttttaaaactttaccatctcgaacatcctttatgacggggaactttcagactgacttctcgctcgatctacgcactcgctgagtgctgacaatcagaagcaacaaccctcattttctagaatattcccgataatctatcattctttgaacaccttttgcaacgcggtagtagttgacgaatttttcctggttcttggagaaaagacgccctacacgttgtctactagattcaatctaacgaaagaacattcgttgatgcaaggttagagtcgctaccaatgtttcaggctcgaggtttggcgatgttaaagtttgtagtcagcatcctgtatcatggggcagcctgtatcgtggtacctcaaggcagtcattgctagctagattctcctgaacttgccaattggtctcatatacacttgatcctgaatctatgatattgtttgtagg

SEQ ID NO: 113838 - DNA, 575 bp, Physcomitrella patens
  Intron number 1 from transcript Pp1s62_110V6.1 (locus Pp1s 62_110V6) derived from phytozome v7.0 (chr-ID scaffold_62; pos 824367 to 824941 reverse strand)
cgtggagtcaacaaagtgggttatctccaacccaggtttgttgtcccatcactgctttagtgtcaaccatttcatcttcgaaacaaaataaaattataaataatcttcgaggcaaatattcttcacagaaaccccggactttttcttctgaacaccgattttacaggactccacacccattaagtcaaatttatagaaattgtcaatgcccgccaattattcaccacgttccacgatgacaagcttctatgacgattccaatcagaacggattgccaaccagctgcggaagcagaccgctgcagaagtcggccaaattcaacgacaaaagtacggtaacaacgcagcaggagcatatgactggttggatcagaaggggtagcgtacaagtcatcggtaagccatcacacgaatcaaatggaaacccacaactcattcgcgagctagagccttaatgaagacacttcactccttagtaatattagacgtgtggagggttttttaaaaaaagaaaaatgttttttctgcgtttctcttggagatcatattcgctggtggactcagtcccgtcgggga

SEQ ID NO: 113839 - DNA, 660 bp, Physcomitrella patens
  Intron number 1 from transcript Pp1s369_30V6.1 (locus Pp1s 369_30V6) derived from phytozome v7.0 (chr-ID scaffold_369 ; pos 205672 to 206331)
cgctgtgacttccgtcaaggatcaaggctcgtgcggtaagatgtacttttggtgcgtctctgttgtttttggttgttgcgattggcggtaattgctttgtggagctctttgataggttgttaatttttcacgttggggattacagtgtggttgatcctcatggtttactgttgtagtggccagagaactacttcggtcgtagtttcttttttgtgctgttttttcttaccttagttgcgttaccttgcggctatggactttgagtctggagatttgtagttctggagtgaattatcttaatatcttgacgttttgtgcgcatttcttctcgctcgaaagatattgaaagtgctatgttacttacttgaagcttttcaatccatgtcatcgcactgctacatggttgaccctcacgaaattattccaatgtcggtggatttgtttttctccttctgttatttccaagaatctgctttgttacttctaaacttttcgatttgggaacctggagctttcagattagtcgttatggatatacatgtattacagatctctagctgtattcccttgttcgaggtgaatccctctgactcaccaacaagtttctgtgacttgtaactgccaggaagttgctgggctttttcagctgttggatctgtt

SEQ ID NO: 113840 - DNA, 637 bp, Physcomitrella patens
  Intron number 1 from transcript Pp1s145_123V6.1 (locus Pp1 s145_123V6) derived from phytozome v7.0 (chr-ID scaffold_1 45; pos 827714 to 828350 reverse strand)
aaagtgtctcttgtgtatcttctgcagatactgatgtgagtggtagtcgttcccttttttcttgttcaatttgttgagttaccaactgttgaacttgttgcggaaactacttttggttttacctgaccttagaaactatttcaggaaaataatcacactttaatattactgaaatcgggggcttcttgggaaatttaactgtactcagttatacactcgttttaagtattggatgtttcagaaagcttaaacttgtccgccatttagactcttttcacttgatgatttgcagttggaggggttcttaaaaccttactctcaaacgtcttttgagacttcaaacttatgttgaagtgatttccatgtaacaaccatgtagggtgtggtatactttgccattctctattttgtttttgttttttaaaatttcggagtgtggacttcagagttaagttgctttagttgaattgcactgaagcaagtcttcaaatgacagaatttgtggacgtctcactccgtcagggggactgaaaatcgagattggtcgatgttggactgaaatagattataggactcatgtgtctgtatttttttgtgtgcaggagacatcagctcgtgaaacattagcagaaaagag

SEQ ID NO: 113841 - DNA, 701 bp, Physcomitrella patens
  Intron number 1 from transcript Pp1s185_55V6.1 (locus Pp1s 185_55V6) derived from phytozome v7.0 (chr-ID scaffold_185 ; pos 439347 to 440047 reverse strand)
cgaaagagtgagtgatttgagctggcgtgggtttatttgatattttccaacttgtactgaacaattgtattgctgcgttggaaatctcaaagcagcggggctcttggatctacaggaacgtcaatgagatgaatttcagctcaatattataacctgtattacttgccgttcggcaagcttttcagagtagggacgatgttcggtcgctattgttttgatcagggcaattgtgaatgtcaaacgtgtgttacacagttcttaatgctagagatggctgggagtaagatcttgtgactgttatttattctcgttaaaatatatgttttgttatttatgtagtgtgtgtggctgtgttgattctctcagtccggcatattgcccacaaggttttatatcctttgcgtcgattatgaagatatcatctattattgttatcaatgtaaatatgattttctgtatttggatctgaacgctggattttgagattctttttatcaaacaaaatgttggttgagagtgtcgaatggcggtgattttgcgtgttgaacctcatactctctaaatttggagttctccagctcatttacgtgcactggatcaggaaaatgttactggttgttaagaaagtatgattagaaagtggttaactttgagatgcatctgcagatcaataaagacgttcacacaagagtctttccaga

SEQ ID NO: 113842 - DNA, 554 bp, Physcomitrella patens
  Intron number 1 from transcript Pp1s358_44V6.1 (locus Pp1s 358_44V6) derived from phytozome v7.0 (chr-ID scaffold_358 ; pos 235455 to 236008 reverse strand)
tcttcgtcgtggtggttgtggtgccttgcacagaggtatttctgcgacagacggtgtgttttttgattttgtttttgttttgtttgtttgtttgtttgttttttttgttttttttgttttttttactttttgtcttgctaagaagctgttctaattcataatcgctgtgcctcttgcagattactgagtatctggtgctggtgctggtgctgcaggtgaatgatgctttgttcatggtgaaattaacctacagagtttgcgcaactttaatacgtgtactcgtgttgaattataactcccaagtccaggggatatcaagttttttttttagctatgtgaggaaagttgaacataattctggattttgaattgaattcggttcttctttcaatttaatttgactcaacttaactttttgtcgagagagaggagtgtgaagagaatgggtttgatgtctatgtttttgacagcagttaaagctgaaaaatccctgagaatgactgcttaatgatgcgtgactgctttgctggggtaacagtagtcaatcgtgtaaa

SEQ ID NO: 113843 - DNA, 822 bp, Physcomitrella patens
  Intron number 1 from transcript Pp1s162_162V6.2 (locus Pp1 s162_162V6) derived from phytozome v7.0 (chr-ID scaffold_1 62; pos 892725 to 893546)
gcgccgcagcagtgcatttgcccgccgcagctcaggtgcgttgttgtctttgtagatctgggttcctcttcgcgagtgtgagtgacttgagcttctgctggagaagttaaagtcagatcgggtgcatattcacgacgaggatcagtttaatcctatctcaaaacgaaaattagggtggtattttttttttttgtttttgaggtgtattgtggttctgtgttggatctgtggtggaattttgtgttgcagcatttattgttgggatcggaaagaaccgcggaatgatagaacttgttaatccagacatgtaggcaccttgttaggtgttagagaatcgctttgggttacattggacgtcgcaatgcagatcttgcttcacccactgtttgaaatttgtttcaatctgttaattaggctgttgtacagctctacaaatgtgcagagatctatcactcatacacgtccagaaataaaacgctgttccggcgaatagattccgacactgccattgttggaggaacgagagtctctttggaactgctgcgatgagtttgtgctgcatctgttaaagctttaggaagctgtgttttggtatcgcatttgtcacattgtctgggatcagggatacaaacttgttatgatgtggtctatggacttgtcataaaacttgttgacggtgggtttttcaacagtagttgttgcctttctaatacgcagttgggtagagattgaagaatacgtgtaataatattttgttgctgtttcgctgaagttggtggcactgcaggtactgacgttagtggtacgagactcaggcctggg

SEQ ID NO: 113844 - DNA, 461 bp, Physcomitrella patens
  Intron number 1 from transcript Pp1s164_27V6.1 (locus Pp1s 164_27V6) derived from phytozome v7.0 (chr-ID scaffold_164 ; pos 166961 to 167421 reverse strand)
cctctcaagtggtacggttctccctcctcaaggtgtcttgaattggtgtctggcattcttcaatgagacatgcgttaggacgttctgtccagtttgagagcttctctcttctctcattcatcctattggtagcttatcttcttttttcaacttgacctctatgaaactcttctctcctttcattctccacatatcactactctaacgaccaactctcgatgatatgatgcttaatggttgggtgctttgtggacttttactgtctggatggatgacaatctaatgtttggaagctgtctgtgtattactcaaacttgttaatttaattgtgcgctaagaatttcacctgcgttttttatgcaagatttgattggtagtatcgcatgctgtccttgactatgtgaggtccttgagggatgcttgcaggtgtcttataagtggctgagtcggaatttttctgt

SEQ ID NO: 113845 - DNA, 713 bp, Physcomitrella patens
  Intron number 1 from transcript Pp1s168_102V6.2 (locus Pp1 s168_102V6) derived from phytozome v7.0 (chr-ID scaffold_1 68; pos 812362 to 813074 reverse strand)
atcgcccattgcacaggtcttgtcattctggaaaggtaatagctcttatgctttttggatctgaaatgaagagtgtggttaaatttagggttgtgaaagctactaggatttgggttttgttatatgtttcttgtgacgggtgggtatgttgatcttcctttgaatttttgatattttctcctatttttgaggttttcttctggtcagctcctttgaagcattttcagctctagctatggccataattaaggttgccggggttgtttcagaactatgtgattaggatgtgaagcgtgctcattagaagttctgaatctacttctttgcccaactgcgtcccccaatttgagttttaatctgccagaatgtctccggattttcaacaattcgtctcttagccaagtcctggtaagagtggtagaagtgaacgagggtttcgaggcttgtgcgcttggcatctgaaacattgtatctcagaacaatgggttggcaacttccgggctttaagtatttcatccttcaatgatgattgaatgctcttcatctacaatgtatagcatctgcttgattaggccgtttcaaattgatcatatggatatcatgcactttcacttggttagtgtgggagcctagggcgtttgatttttcgagttgaacccatttttatttggcaaccagattttgatttggagaattggaggactcaattggac

SEQ ID NO: 113846 - DNA, 730 bp, Physcomitrella patens
  Intron number 1 from transcript Pp1s213_66V6.1 (locus Pp1s 213_66V6) derived from phytozome v7.0 (chr-ID scaffold_213 ; pos 394172 to 394901)
tcttcgccaggagagtgagtgaattgtgattcttaattttttgttccgtctttggacgagaatccgttttgaattggaaatgacattttgccacagtactcctcctcgggacgtgttgtctgagtgtatttacggggtagaaaaatgataagcactctgttctttgtagattgcattgtgctttgtgagatgcgtagaggagcaatcatttggcgaaacgttctattctactttgttttctccaaccctggtgtatttttttggatggattttgatatctgagtttctttgacctgcccagcggattggtgctttctgtttcgtcggtagatttcatgaggattttagaaggcttttatttttgtgccgaatgtgatgttactgggttgaaattagctgaagaaatgttagggtcgaagcttattcacagaatcgctgacaggtctatgtgtgatagcttaattgtatacctaaaccgattggaaatccgctttaggaattcgtcaagcaatctgcatttcactcttgatcctttctatctcgaagactttccagaagaaagctgatggacatcttagtgcttttctctacctattactccgatgacctaatatccagttcacacgcctgcctagctatgtatatgctgcaaattttccaacgatttcaggtcttaaatttctttcaagtctatgattttcctcattaactcgcttccctgatcttgcag

SEQ ID NO: 113847 - DNA, 459 bp, Physcomitrella patens
  Intron number 1 from transcript Pp1s130_124V6.1 (locus Pp1 s130_124V6) derived from phytozome v7.0 (chr-ID scaffold_1 30; pos 511585 to 512043 reverse strand)
ctccgttaaaacgtttttgcgcttcatccagatatgtaagcagtttttttaatttttttaattttttttccttctcttctgtgagcacactcgcaatggtatctgcatgctccttgcccaaactgataaaatatgcggtttcattcgaagcgcttaaggtagtcgaggtatgtcagtcgctaatcatgtatgattggttaatttgtgaagcgtcatggtcgtagagatagtcagaaagttttggtgagcttcagtcttatgtgcctgctatggatgatttgggggtagttagcttttaaaatcttaatccatttgattttaaatctttttgcggtgtctgtgccattgtctacgttgagggcgtgtcaatcaccgggtgtatcgttgggagtattttcctttcgatatacataatgaaagattgatgaactgactggtagttcttttgtcaggtacaga

SEQ ID NO: 113848 - DNA, 454 bp, Physcomitrella patens
  Intron number 1 from transcript Pp1s79_158V6.4 (locus Pp1s 79_158V6) derived from phytozome v7.0 (chr-ID scaffold_79; pos 993320 to 993773 reverse strand)
tctcctcatctccctctctctcgctatctcgctcggtgcgtgagtgtttctgggtgcccatctcatttcttcataaagtggatcctcccaagcctcgtttactgtagtgttcacttggttttttttataactcttgctctccactggtgggtgcgtagttgccgctgaggtatagtggctattcccaaatttttatcagagcacaaggccaaggatgatctttgatattatggctgggtgttcgcggtggcaagtctttagtggatcgttcgtttgtttcatgcatgtttggggtggtttttagtcctgagttgttgggattttgtgtttggaatagtattgtgctgggaggtgttttggaggaaaagagaagagtgtgtctgaggaagatgttttaatgatggggggttgtttttttgggttgccctgagatactgcaggaagtcgagagatc

SEQ ID NO: 113849 - DNA, 834 bp, Physcomitrella patens
  Intron number 1 from transcript Pp1s294_68V6.1 (locus Pp1s 294_68V6) derived from phytozome v7.0 (chr-ID scaffold_294 ; pos 411144 to 411977)
tttaacgcgagcagatatcagatggcaacagtcacaagtatgcagggctatgctttagggtaataaatttccgagcgagtttcagcgtcatcgcacttggcttgcagacgtggtaagatccttgaaacgactgcatatcagaatgctgagacgcttcgatattatctctaaaccctaaaacataaagttgttactcaattcgtacccactaacagggtagagatcaccaaacctcgaagttcgtaggacacggcaggcaatcaaccaatcgcctctgagatgaaacccatttacccacgacctctacaaaccctttgttgctcatacgtagatgaagtcattggtgaaatttcgtttttcagaaggtcagtaggggtgagagcatggccctgcagtgcccatgcaactctgaccaatgatcttacagtcgcattttgcatttccggcataataatctgtattccgagatcctttgactcttcacctttttgttattactctttgaaagcgcaattgatattggaatgatttacgtggtgtcggtgctctatctattgagggttagcttaagtagggctttggagggtacagtcgtcagtcacaattcggtgattgttgagaatgggtgctgtgcacttccttgctcgctctttacatttcgaccaacagggccaagggttcagagtttcggttacacaaattctgatacatgctagagaatggcttgtattcagagcacagttcgtggccctacttgagaagaataatcgatcttgttacctttgttttaactgtgtttgtcagtggtatagactgatagctggtgttggcagg

SEQ ID NO: 113850 - DNA, 681 bp, Physcomitrella patens
  Intron number 1 from transcript Pp1s47_263V6.1 (locus Pp1s 47_263V6) derived from phytozome v7.0 (chr-ID scaffold_47; pos 1683753 to 1684433)
gccgtcctatttctgaagaggtttgtgagaaaatcaatgagcctttccttgcatttgtaaaatacgttttaaattccgatcgctatcttagtctatcaaaaactgggcgcggctgtaggaacatagaaacctgatttttaagctgcattacaatcggcgtatgatttcatactcgttggagattgtctcgccactcaattttttttgctacggcacatgatggtaacccttcatttatcagaagaattgaatttacgaagcacgtaagggtatcatttgggcaacttgctcaatgcagcttatatgctctactttaggtttttcaggaatgccttaaccccacaatttgggtttttttaatgcattcccctcctgatctctataattaaggtttaaattctcatgaacatcaaagtggccaagtgcttctgcttaatgttaatagtaatttgagttgttcagaagtggcctgatttacattatgaataattttaataacgttttaggttctgtttttttcttactctttcttggacgattgtgctcgctgttttgtgttttagacgagccagtcagcaattccaagaagtagtgcagactctacttgatcctcccttgataatattcacgctcaaatgtgttaactgattttggtattgctgtttccacagaacaatcgta

SEQ ID NO: 113851 - DNA, 865 bp, Physcomitrella patens
  Intron number 1 from transcript Pp1s370_45V6.4 (locus Pp1s 370_45V6) derived from phytozome v7.0 (chr-ID scaffold_370 ; pos 213361 to 214225 reverse strand)
ttgcagcgacttccaggcagggtcggggttctgaggtgagtgccggcccttatttccgaaaccgcggagttttgggagcttcgagggttgtcgtgacgtagtgactggtagttttttgtctagtctgctgcagagtggttctgtgttctgggttgtgttgttctttttcgaggtgctgctgtgatttgaataggttattgctgtgtgttgtcatggagaggtgccgagttctttgtttgtttgagatcgtgaatgagtgttttttccttcacgtatcctcgacaacgctgtagctaagtgtgaagaaaatcgttttagaagttatggagattcttgacgaggcgagggtttgcttagctttcacagtgcgcatgcgacccgacgagcctactacagttatagaggatgtgagcagttttgcgaagttgtttgaattaatgggataaaatttgagaaggaacttgagcgatgacagatttgtcgagataatttttctccactatagttctcttaatttcatccctcgcttgtctaggcaatcgaacgttcagattattcgcatttcttgcgtgaaaaccttttcggtgtgttctgcaagtgtctcactcagagacgttggggtgagatttttttgcataagaaacttttacatggcttttacacactgcagtgtcagcgtcgacgtatgcattgtaatcggcaagacagtttgtgtctttttgcagctaagagattggagtgcggcgtccatttttgaggcgaattctccatttgattcatctggtggagacaagtatattcattagatgaattgatcgactgctatagtggagcacagaagtcggcaaaagtgggtcaggcgagg

SEQ ID NO: 113852 - DNA, 419 bp, Physcomitrella patens
  Intron number 2 from transcript Pp1s7_399V6.2 (locus Pp1s7 _399V6) derived from phytozome v7.0 (chr-ID scaffold_7; po s 2395828 to 2396246)
acacttacgagtacaggtgcgtgccctcgggtcggtttttgagttccatgtctttgaggttttgggtttcagtgacctaaagctcggttgctttggtgatctgagaagaaccgcgaaccggttgcctacctaccctaatgttttcgagtatctttttttgaggtttgagacaattctagttgttttctgatttcgagtctcgtcttcttgtgcgtgttgcatttcaatggacgacattaactctttgatagactttagaacgttatttttgactttagtagggttaggataattgaattgatttgtgtattcggcacttcctggtgagaatgaatgcggctgcaagtttctagatgttggtaaagcataactgcaattcttacccctggtccactgattttttctggagtgcttcaggc

SEQ ID NO: 113853 - DNA, 606 bp, Physcomitrella patens
  Intron number 1 from transcript Pp1s42_174V6.1 (locus Pp1s 42_174V6) derived from phytozome v7.0 (chr-ID scaffold_42; pos 1457261 to 1457866)
caggccttgcctcctcaacctggtgcgctgccctgctttgtagaacctaatagtctggacaaatcaagtgagtcgataagaagtatggggtacggtgttggattatggggagcctgtgcattgttgttatgatcgattcgtgtgcatgtccaacatctcgaacctgaccagctgctagtcttcgatgtcattttccctgaaattgcttttttcttccgcgtggttttatacttttttttttttttttttttttttttttgataatcttcacatagatgcatcagaattttgattggaggatattggctaggcactgtactttatcccggtggacacgtagcagtaagggtttgcggttcagaatcgtggatatgccagttgggcatactgaagattgttgttctggaatgtttgttcttcttttaggatctcccccgtcaacttacttagattagggcaatactcgtattcagtccttagctagcacatcaagaggagtataagtgattttttacttgcctccaatattacagagcgtatcttggattgaggacataggaatgatgaaaattcagaagtcgtgactatgtggtcaatttgtaggtt

SEQ ID NO: 113854 - DNA, 395 bp, Physcomitrella patens
  Intron number 2 from transcript Pp1s85_168V6.2 (locus Pp1s 85_168V6) derived from phytozome v7.0 (chr-ID scaffold_85; pos 1251792 to 1252186 reverse strand)
ggcggtagtcaaggtttgatttttcttatttactctcgcatgttaacttcgcacagcagtaagcctgattttgaatcagaaattgatttttctttatgtttttacataaccgaaacgtgtttgtcatagtgagtatctgagtcaggttctaggtatttaagtgcaggtcttattgtgacattaagttcattttcctacgtactcggctgagcgtgcataaaatatctgttgtcgtaattgactgttgagatgtggactgggaatatattttcgttcattgtggtcccaaggcgcaacttacgatttttttcaggtctcatgtacaatgtaacaattttctttcttcacgaagtaactcgcccgtgaattgaactgttcagattcagcactcacaa

SEQ ID NO: 113855 - DNA, 1037 bp, Physcomitrella patens
  Intron number 1 from transcript Pp1s155_109V6.1 (locus Pp1 s155_109V6) derived from phytozome v7.0 (chr-ID scaffold_1 55; pos 946286 to 947322)
gcaccgggctctagctcggtaagcctgtctgcctcccttgtaatcttttgctttcaccaggtaaagggtagataatgagatttgcaagtatcctaccctattttgttataattgctttgtccacgcattcccacttttgctacatcctgcgttactgctgcattccaagaatttcttctctcacacataaatctggtctaggtctgtactgtaaactagctgtatagccaacttcagattcgcttataacattctatcttttttagccactgtcgatatgctgttgctctctggacaccgaaactggaagctacctcctcattcgcgctcacattcctgtcgttgttttattcacgtcacatcgtggcaggattttagtggtgattgtactgtagatgtcaagatagttaatggtgattagtctctgatatctagcggatttagtggcacgggtctctatctttttgtctaccttaagagcgatgttagagtctccatggtctcgagaattccgtagtgttgaacgtcccgaattatggcttggttttttcattggatttaacgtttcacgtggtggcatgattgcttttgttttgttttgttttgttttttgtttttttctggtgtcatgttttgaatagcacggagtgtaatgtaattcaagagtatttgatctgcagctggatttcattctgtttaacgctgtcttgttacctacatggttctgctgttggatcgggttgatgatgttcctctgtgcataccatattttgtcctgtatatttatgtggacttcgttccgagtatcttgaaagtattgctattggtgtggaaggcgtgtatgcctctaccatttctgttcacagatccttcttgacgtcgtttaaatatttttgattggaagattaagtgccccactcaataacatgtcgtagcgtattatagtcaaaataccgtaccatatgcgaccaccttctttcatctcacctgaacacttttcaggaaccatcaccttttgtatcgcggcggaactctta

SEQ ID NO: 113856 - DNA, 912 bp, Physcomitrella patens
  Intron number 1 from transcript Pp1s312_11V6.1 (locus Pp1s 312_11V6) derived from phytozome v7.0 (chr-ID scaffold_312 ; pos 75196 to 76107 reverse strand)
ttctgttggtgggtttccaatttcgtgtcataattttagggttagggtttctgaaatttatgtgtagcatatcaattttcgcgtgaagtccatgctcatctgtgccatgcgtgttcgggaaaagtcctagattgagtatccgacataggtgattttcttgatttttcgtagatggagactcaggcttctaggcaatcatctgaccatagcatactgattattcaagtgtttggaatttcaatctatttttcagttaatctaatttttttcatttcatttcagttttgtttttgtttttgtttttgtttttgttcgtcttcgtgtttttgtgtttctgtgttgtgtttttgtgtttttgtgtttttcttttttctttctggctttttggctttttcccttgttttatgttgtgttgttcatgatcaacgaatgaagtttcctgctaaagatacatatcaactgttaacctttggagagtgggactacatttgaattttcagttgcttccttacagccaatgtggttgaaactgtagtgttcatgtggagtacatcacttttcaacatacacaatctcatagattttttataaaaaaaaatttaagctttacattaatgtttttgttttagtgactcagatggaggatggatattgttacatagcagtatctgtgtgttccttattctttgtttgagactggtgcacatagcgcaagacatgataatcttgtcaaagtgtctgcgtgtttattttttcatttgttctttggattttatattccctcagatttgttgagttgaaacacgttgtgtcaccttcaattcttcaacgtttctgatatgctacaagtagttgatgtagagtacttgaatattcacctgcgttatttttttggatttgtcaggctcagag

SEQ ID NO: 113857 - DNA, 580 bp, Physcomitrella patens
  Intron number 1 from transcript Pp1s11_178V6.1 (locus Pp1s 11_178V6) derived from phytozome v7.0 (chr-ID scaffold_11; pos 1594033 to 1594612)
ctgcctacacgcaccggtacacttatcacttcttggttttgcagtttgcggttgggtgttgagatgttgcttcttcttcattttgtatgtttcttttgagttctgtttgtgtggagaaagggttgcttctcgtcccagcaccttatttttcatcagctgcaatcgcttctgtagctatttttgtgacgatggatggttgttacataagcagacctaatttggcaagagtgtgagattagtgttaacaaatttgatctcgagaattttgaggtgtggaaaagggtgagatattttggggtgtgaagtaacattttttttttatgttagtacatggcccgaagatttcaattaatcgtttccaactgtgcgggtgatattcttccgttgagtgaaaactgtggtcttctgtagaatgtgtaacccgcaattgcctagtgaagctgtgatgatcaggtgacaaaggcctctccagctgaagattggggtcaagcgccgactctaagtgcggatcaagatgtgtttgacagagtgtttggctgcatcatgttgcctttgtcaatcatgtacaggctcgtgccgc

SEQ ID NO: 113858 - DNA, 955 bp, Physcomitrella patens
  Intron number 1 from transcript Pp1s168_77V6.1 (locus Pp1s 168_77V6) derived from phytozome v7.0 (chr-ID scaffold_168 ; pos 520636 to 521590)
tgtttccactacggctttttctccactttcccaaggtttgtatttctagtgctctggattattgtttcttctcagggtcgacgttgtcggttatggacgaacccattatcggctttctgatttttcagtgaatgtattattgtatcttcggggacattctcagtcttcgcgcggtgattacgggaaatatgctttttgtgtcggtttcaggttttttctgtgtgagtttgattgagcatgcgttaatagacgatgcagtgagtgttgaacgttattagaatatcttttaatcgaaaatttgggggaggattctctctaccccctttcggcgactttgtgacgtgtgcgcttgctttgtatataatttcctccctgtgaagctacttcagtgatgtcgtatgttagcacgtcttaagagggtcttcaataaccggagaaatgttgcgatgtgagcccgaaattgggcgggaaaagattcaatttttatgacggtttctttgttatcgacaacatgcgaacttaaaaattggaacttgcattgtttaagtggcaatacagcggcggttctgtgggtttaaggttaaacacatttgtctgatataaaagaggaatgcgtaggttttgcgtgttgatgcaccgataattcttaccgaatctctattttgttcgagtctcgcctaattctatttcaccgcatgtagtctttttacttatttacttgagtcaatgtgccctgccatacagacacaggttcaatgatatttggttaaagatggtcaatagtaggttgtttaggcgagacattgaggtccagaagaggcatttcatttacatgtgcatgtggtgtatctaaatggtcaaggtgtagtaagttttcagatttcaagtacgtcagtctactcgttcctgattctatttctgtgctgccgcaggtgcattgtccaggtttgcagga

SEQ ID NO: 113859 - DNA, 467 bp, Physcomitrella patens
  Intron number 2 from transcript Pp1s168_77V6.1 (locus Pp1s 168_77V6) derived from phytozome v7.0 (chr-ID scaffold_168 ; pos 521880 to 522346)
gtagcgactccgaacacagctctcaaccttcacaggtatctaacgctatcttttaacaaattttgagcttcgtactcgtgatagctgacatgacctcaattggtttactacctatgcccttgtattgtggtgatcaggagctatagaaggattctctacttgtgtttttagaaacatatcgtcaacagagtcaagagatggatagaggtgggatggcttggttattgggttcctattgattggtgaaggcatcttactgccgtctgcacctgagttttcttaatctagagaagactctactccattacactctgcagcgatggtttcatgttcaattaacatcacaatattccactgtgacattctactgctggtaaaagcttcctgtgttcatcagttggcagatttgtgtgatgaaccgtaatttatgtaataatgtgggcgtgaaattctccaggagatcgtgg

SEQ ID NO: 113860 - DNA, 312 bp, Physcomitrella patens
  Intron number 3 from transcript Pp1s168_77V6.1 (locus Pp1s 168_77V6) derived from phytozome v7.0 (chr-ID scaffold_168 ; pos 522521 to 522832)
cccttctcactgctcttaacattggccgctatcaggttagggccctcgagactcttactcaaggattcttaggttgttagcagtccatgctaattctttcctcatgcactacaagctcagagtctgtttatcattctcagtgatgttgactgaacagtgtgtcgctacacgtccaaaagaataatcgcttgcgatgatcatgtgggaaacttggaagtcttctacatgctcatgaaacccattttcgtgcatcgactttgagctttcaaaggcctctcacaaacaaattgcttttttaccttgaatgcagaa

SEQ ID NO: 113861 - DNA, 835 bp, Physcomitrella patens
  Intron number 1 from transcript Pp1s49_145V6.1 (locus Pp1s 49_145V6) derived from phytozome v7.0 (chr-ID scaffold_49; pos 1239411 to 1240245 reverse strand)
ctatcaacaacgaaccttcgtaagttggcggacgcatgacttggtgtcgattagctctggtcttggtgggggcgttaacttgaatttcgagtttgcgcgctgcgggaatcttgggtggtttcgatttggctttgttaccctgcgaattgtggagtgttagacacgttgtttgtgatgcttgagacagtggagttccgtgaccgtattgtttcgtggtttgccggcatgggcataggctcgctgatggtttttgtttttgatttctgcttttcggtgtaagagcttggtgcattaattcttcgtgtggggcaccagagctgtcactgagtcacttggtgggcttttcttggtccatcaagatatctgaaatgaggattggtgggtccaggtttttatcgagctcgtactttagttgccggtatttttagtaacagggcaaagcatgtgttttaacacagggcgctgtgagctgctaagcagcaccagccgagtttctataatttgttttttccgtggaattgaagcgtgatcttttgcccatcgactggaccgcgaatacagaattttaataaaattgctgattgtgaatttgttagatctttgtatgtttcgatgataggttgtcgctggcgtcactcctggcctgtggtcgggtctgtgatctttgaagcattttgtggagtgagcatctggacgtatttgtattccttgatttgtgaactgtaccaaaatgctgtttagttgtagtcggcaaatttgaggctggtaactaactcttttcaatgtttgtggtgtaccagacaagcaaaagatatagtgagagctgttaagaaac

SEQ ID NO: 113862 - DNA, 708 bp, Physcomitrella patens
  Intron number 2 from transcript Pp1s341_35V6.1 (locus Pp1s 341_35V6) derived from phytozome v7.0 (chr-ID scaffold_341 ; pos 224995 to 225702)
caagagccacattgcagtctcttcttgcatcttcggcgcttgggataatttgaggactcctacaaacaggaaaataagttttgattcgagggtgaggtatctccttctgtttctggtcacgctgtgctttagtcgttttagttagagacagctcttgaagtgatgttaaagctctcctgtgcggtttccaggtgtcaagcgactgtgtgttttgtgatgttcgtggactagaagagttgtgaatgtcataaatcaggatggtcaagtacccaatgacagggttttcttggcttgtgaaaaatcgatgtcttaaagaacttactataccaagattgacgaagaaatgggaaagttcccaagctcttgacacaccgattatttcctaatgccagtttctaaaactgctgcctttgtttgatgctagtatatgctagtctcacagatccgaaatgcctcagagtatcaagacaaaccacagttgtatttcattttacattgagtggtgctttcaaaatgtcgtgcagtttttaggaccattggactgtctgttatactcataaaattgaacagttagtaggatctttcttccactagttgttgacttggtgagtattgacaggtattccatatggctggatagcaaacttcgcctatatgctaatccatttttgacattagaacgtttctaatggcaggaggactacgagt

SEQ ID NO: 113863 - DNA, 934 bp, Physcomitrella patens
  Intron number 1 from transcript Pp1s49_156V6.1 (locus Pp1s 49_156V6) derived from phytozome v7.0 (chr-ID scaffold_49; pos 1300931 to 1301864)
ccggcgtttgaagccggtgttaaacgtttggatccttccttctattttatatgagcgtttaggcttttttggggcgtgttttggagtttcgaagagaatgttcgggatttgaagtgttgcgtggcctttatctgctgcgcgatctcttttcgtcttggtgttttttagaggaattattagactagcgagaatatgacgacgattcttaaaagatagtttcggtaggctgtgtatatgacagggtctggaatttaagatttttagacgagtgtttttgaaggtgatagttgtaagagtaactcgagattcctttgggtttttttttttgggtttaaatattctatcttcttcttcttattcttctcttctccttcttttcccaatcttgacgttactattgcaaccttcgatccttgttgtgtatatgtctgtttgattgtttgtttgtttgcgtgttttttcggggtgatctcgaagtggttttagtatcccgtcttctttttctggaaattcaattcacgaacgaacaattacccctctcttgtaccatccccgaaccgatccagctactgacgacgaattacaaatttaatcactgttttcccttttcatatcttacaagacctggtgccgatgcgtagcatgatgtcttgttgagaggcgcagagaattaaagttctttcatacgtggccagaatcctaaggcatgctttaggaaacgagcatgtgtaactatttatctgaagactactactacttttttcttttcaagcgacataatatgttcctttggagacggagatgatagacaccctaaaagttgagacgtgaataccacagccttcataaattagaattctatcgagttatacgcattggctggtgtgcaacaacactaccctgggagcatgttgcgtccagaattgaacgagcg

SEQ ID NO: 113864 - DNA, 533 bp, Physcomitrella patens
  Intron number 1 from transcript Pp1s460_26V6.1 (locus Pp1s 460_26V6) derived from phytozome v7.0 (chr-ID scaffold_460 ; pos 166854 to 167386)
aaatcgtgagttctgaggctttggattgtagaaaccccgtagcgaagtagtgagctgctgttgtgaatatggattgccagtagtcaagcgtcgggtgttgctcgacatagtttgtgaacggcggctcgaattttattgcgtgttgtgcttggtgtgtgaatggcgtgcatgccttgttattctcggaagatctcgagtcgatgttgttcttgttgaataacatagaaaatttcaagcgaaggatacgctcaaaaaattaagtcctgcttctgaaatttagacgcgtgaagacattattcctagtcaatacatgagctgctagataatgcagccagtatctagggtttggttttctatcttcatcctatattccatcgcagcgaaggaagccgacggtatggttaaggttgtacggtattgttattagcgacactggaatgagcttaggtttatgcatacaagctgaaaagacttagaattgaagtgtttcattgtcctcaccaccctctttttgttatttgcaacagcgtcaa

SEQ ID NO: 113865 - DNA, 759 bp, Physcomitrella patens
  Intron number 1 from transcript Pp1s103_73V6.1 (locus Pp1s 103_73V6) derived from phytozome v7.0 (chr-ID scaffold_103 ; pos 684688 to 685446)
aatctttcttcgtccatcacggtcgtgcagctcgggttcatgtcccccccccccctacattttcacaaagagcggctgcatgaaagccttttcgctgtcctgtacgttttgttatgctgccgatgagcacaaaagattggaagacacggatacgattgtttctctaattttctttttgtcttgtcttagcgtcgcgttggttggcattcatgagcttgccatacttctatgtaatttgcattggtccacctgagtttactacaaaatgaagaaccctttcgcacattcatgtgtttatctcattaatctttgcgatggtttgaagtttttgaggttgtgcttgagacactgaggaagtgtgacattttattttattttattttgtttttgttttcgcatattcctttgactacgttcataagctcgacagagacttcttgatcttgtcttcactgattgcgtttaaattagcgctgtgagattgatggcgttgcaccggagttgtgcaacttattactacgtgtttatgtgttgaatgcctgtgttcatggtgccgtagtggtgtgtgaaatctgatagatcttaagataaggtttgaccaacgaggttacacatagcggtagtgttgctttttttctgaaaggattcagttttgcttgtggacttgtgggcatgcatcggagagggagaccggccacctacttttcttttttgtttttcgcagagattggtcgtgcacggagactcagcctgtggact

SEQ ID NO: 113866 - DNA, 845 bp, Physcomitrella patens
  Intron number 1 from transcript Pp1s130_272V6.3 (locus Pp1 s130_272V6) derived from phytozome v7.0 (chr-ID scaffold_1 30; pos 1038736 to 1039580 reverse strand)
aagcatcgttatttacagacgagccacagaagcaggtcgttggtttctattttcggttgataatcagtcctaatcgcctgctggtgctgcagaaacttttaaatcaatatcccaatctgctagtttcggcacgagttcgtcggtgtggagactccgggcccctcaattttgaccttcactcgcaatcctgccattttccatgctgtcgattgatcacgtcatctgtagggttcaactatccctgcaatcacatctgggtacttgaatggtagttcggatatcgcatttgccattggatttgttggaatccttcgactttcacagtcaaacagaactcgaggccaaaagattcgcacattaagtctctttcggtctggtaggttttgaatcaagtagtgggaattgagggcgtgggggagaggagttttgtgggctcggtcggaatctcatgtatcgattgtaaaagcagatagtgtctcgtggttgatttgattgcggaagtggagttcagtagcccttgttgtaggatatggtttgattcgaggaacaatctagttgtaagaatcgcgccaggcgcgaattccttgagagcatttctttggcgtgtgttttttttggttgttgttcaggaactctaagtaaaccattctcttcttttttctggatttccctccgactgtagaatggttacgtttgtgtactgtttcaggatttagggtgtagggtttaagattcaaggtgaagattttatcgtcgttagaagattattggggaagcttaccaggacgccatttatcaatgccatcgcctgctctgaacacgttgataaactgcaggaagcaaca

SEQ ID NO: 113867 - DNA, 804 bp, Physcomitrella patens
  Intron number 1 from transcript Pp1s39_263V6.1 (locus Pp1s 39_263V6) derived from phytozome v7.0 (chr-ID scaffold_39; pos 1329342 to 1330145)
ttgcggcgagggtgaacagccgcggctcgcttacggtaactgatggtttcaattttgtaacgttcttgatgtgtgtgcctgtgcaagtttggtttcattgtggtggatcgcttttttaaattttttggaaatataaaaaaaattaaaaattaaaaaatcggtcatggagggttgggatggaaagaaaaggctggtaattgattccgactgcggcgtagaatgcatggggagaaactgtattatgggggagctcaaaatagactcatttggaaaaaatacgattgaggggtagtatgaagaaagccgaaagtttctttaggtttgtacgtaactagtggtttttgattggtttggctcaggaagttgatgtttgcaatgtctcaagcaaggttttagcgggaatcctggggctataaagtcgtaggtgattttatatttttttattaacattcttgaaccttttccttgtttttaattttaaaatgaatgttctttttaattattgtagagaataaaatgtgcaagagagagtgagtgactagtgagtgagttgttcttagcatggctcgacctttggaatgacttgattgttcgagggttgtaacttcaatcatgaatagttttccagaagcaggactcagtgctaaagtttttttagatctaaaccttttgtcccctctcttaactttgcaaagtttaaatttctttgatctaaaatttgaatagatatttctttttcatctaaaatgaagctgcatctcgatcaaagagtgcagtggattgtgttcggtcccggtgacaatt

SEQ ID NO: 113868 - DNA, 710 bp, Physcomitrella patens
  Intron number 2 from transcript Pp1s197_90V6.1 (locus Pp1s 197_90V6) derived from phytozome v7.0 (chr-ID scaffold_197 ; pos 358147 to 358856 reverse strand)
tgctcttgactctacggggtcattctgctgacgtggtattttttcgtccctataacaccctgcattgcttctaggaaattcaaaaattcgtgctttttatttatgttttactatcttccattgaggttttgttatccttgtgagcaataccgtgaagatcaacagctgttagaggtcctctttggattacttttgtttggtagctcgtcttttgccattaccgatagaattttctccgacaagtgcttgacctttttttttattttcaatatctaacttcaacttatatctgttaatgatgaatcaaggtcgtaccttccggaattgaatttgatctaaaacattgcttgttgtgactttcatagcatcatccccattgatcgtttcaagtccagcttagaggatatgttgtcgctttcgatggaaaaatcgagtgttcacttcttgccacctctaacttaataaaaaatcagttcctggttctaaagctgatcactgacgataaattttctttatcatgaattgcgtgacacaacgctagaatttgtctagtggactggtaattataaaaactaggtttctgaatttttttagtatgagttctctgggttgattgtaacgcattttaaccctcattaaggcactaaattgtgcgtttggttggctgtgtgtgcgttccctgaagtaggtggatcttgggtggtcaccgg

SEQ ID NO: 113869 - DNA, 827 bp, Physcomitrella patens
  Intron number 1 from transcript Pp1s347_28V6.1 (locus Pp1s 347_28V6) derived from phytozome v7.0 (chr-ID scaffold_347 ; pos 289411 to 290237 reverse strand)
aatcaaagcgtcttgttgcgcacgcacgagcgctggtgagtcttaactacttttgacttgtgagattggggtcttgaattttacattattctttctttaaacctcaaacaagtgcggttactcagtggtattgcctcaaatgaaattgaggtcccctctcgttaattctaggactatctggaaatttttctgccttcggtgctccctggcaaatgtcgcttacatctttcaaacttcggaaacacccatttcacaaattctgagatagacgtcctgggtgactttctgtaaacgacgtgcctagttagaaccatcaatggggcgttacttcatggctgctgaggtcgtttgaattgaagacctgaatatgcaaacactcagagtacactttcggtttattcaagcttgcgttagtcgcattttgatatagctcgttttcatgttcaaaatgataaatctgttgtagaatttcagtgttcatatttataatgaatatcttttttccccctagcactttttattctgcaatcttaatatgatcttgtttggtgagtattccgatcaaagcgtcacccttcattaggcttcttgtattcttactaactactccttgtttgtatcctttcagaaactcgcatttaaagtcagtggctcatttatcatttaggacgaaagtataatatgttctgattgattcaactgtctggaagctgcatgaatcttggttgtctgttatttttgaagtcttctttgctgtctgactaagcggatccttctttcttttggatgcagggctcaagtggaattggccaaaagccatacactgg

SEQ ID NO: 113870 - DNA, 342 bp, Physcomitrella patens
  Intron number 1 from transcript Pp1s330_27V6.1 (locus Pp1s 330_27V6) derived from phytozome v7.0 (chr-ID scaffold_330 ; pos 203545 to 203886 reverse strand)
aagctcttcaggtgcttacagcagctttgcaaagtgattaagtctgagggacagttgtaatcgttctgtgcttattcgtgttctttttcgaggtagtttctgtgtcacgaccgccccttaatgattctcgcatacctcagggatgactaacggagtgatgctgtggactgcaagcatctgaggatatattcttctttttcttgagttagtaattctccagatgtaagattcaaaagactgttacgatggatcgtgaagtgacgccgacaatagttgggatttaactgaattctttgtgtgcatgtagcgacgtgggcttaaaacctgaggtgagggcgtcgt

SEQ ID NO: 113871 - DNA, 865 bp, Physcomitrella patens
  Intron number 1 from transcript Pp1s422_9V6.2 (locus Pp1s4 22_9V6) derived from phytozome v7.0 (chr-ID scaffold_422; pos 122852 to 123716)
tgtcgtcttcctgctccgcccgttccactcttttcgtacgtcaactcttcgtttcctcctctgctcagacttcgtcgtgcggagcagctttggcaagcttgtggttttgaattttgagttgggttgcaagttttgaaggaagaggacatactgaggtttccgttgcgctagaacttggttactcgtaggtccatttcactggtttcgctgtggttatttgggttcttgagtactattgatgatcctgccttcaaggcccaattttctttctgtgggttggattttttggtttcttcttttcatgtaagtgtatgtccatttaagacacccaccttactactgcaacactcatcgcacattcgccatgtttattttatcttgttatgccatgtgattttccttctgcatttctggacaagtctgttttctttgtgttgacgatttggggaatgcatttcacattgagagatgcctgctgttgtttatggttggcttagttggagtgatccggagtggggcgagtgatctaccgagggagtgccagagcgagagagagagagagagagagagagagagagagaaggcgggctaggaaacaatctgtgaacttaataagctagggtttgggctacttctagcagctcaattgctgcttttttgggacattttatgtgcttttctgagcccttaggcatgatttagtgtaatttgttatagtttagggtggccaattaatcgatcgtcacacatacttcgtattgaaaatgaaatggtctcgcattgatctctctgttgttgctttggttggcataatagtagcgaaagagtgatatgagttttcctggtgaagaggaagaagaaagga

SEQ ID NO: 113872 - DNA, 1004 bp, Physcomitrella patens
  Intron number 2 from transcript Pp1s4_386V6.1 (locus Pp1s4 _386V6) derived from phytozome v7.0 (chr-ID scaffold_4; po s 3050769 to 3051772)
acacttgctaccactttcaggtttgtctttcatttcattcactcttgtgcttctaatttttgcctagatgcttttacaatcgtattcaggcttgacgaaataaattgccgaggctatgtaggttttggtatcgacatgagtaccctatatttctagtaggttgtttcatgtccaaactaaatggtcctggatagtttcttattcctcgcttttattttataccttttcgcaaaggaagacgctactagttttttagatgctttgttcttagcacgtcttacagatgcatccaattagttgtcagtcatgaacgctggtaaacttctccgtgattattattatttttttgttaggctatttagacgagtttgtcttcattgcaaagctacggaatcttgccgatttctttgagttaatctttcacagttagtccctatggaactttgtctcggtttgggtttgaagctaccattttccaacatgaagttttcttgcctctactggatcatgaaatgagtacaagtttttcaccttcttttattatgatttttatgattctatctttctttcttttttatatattttttttctcagtttgaacatgtcccgctggaagggttacgtggatttcaagagagattaggtcatagccagataaatttgtatttccctttttatgttccttcaccttttgagctatcagcaaaataacttacaaaaagtttgaaatgataatgctacaagtacgatagctttagtctaagaatacgattggcatctaaaaccatttatttattccgaacttggggtttctttaaacgaaatctcacttaccctagttacggttagatagtgtggacccttgtgtttcaattgctagaagtaataatacctgagttatgagagacgaatccttttaatcctccaaacttaacttttcgtgtttgctcgagtttccagttgtgcggagtgttaataagttttcatttttctacctcagggat

SEQ ID NO: 113873 - DNA, 956 bp, Physcomitrella patens
  Intron number 1 from transcript Pp1s4_414V6.2 (locus Pp1s4 _414V6) derived from phytozome v7.0 (chr-ID scaffold_4; po s 3441184 to 3442139)
cttactaggtcgctttatttcatccaggaaaccaggtgcgccctccacttgcctcttccgctctctctttcatatcaagttatggagtttcagatccccgatgcggcaatgtgtctacagcgtgggacttcctgtgaaatcagttatgctcattttcgtgcgtggtctccatttcgttgagaatttctttgtataagttcattgacgttgatgttcatatgcctagagagacactagaaacctaaaaacagattttttttgtgtcaaaaacgtggtaatttttgtcacaagtctcgatttttccacgtgttgaggatgtttcggcttgaatggctctattatcacatgagaaaatatttaggttcctagtgagaatggatttggcgtctttgcggtactggttgcaagctgtgtcaatgcattgattcgctcttctggctttgattttgagagaacctctcataattaaaagattgatttggaaaatactgttttattcccactcgaagtgttggatccctctttaaaacgagtttttctctccaacgatggtggaggctgttgattgccatggttgacctgtgagcaacatggggtacgtccctgcaaggattttggaggttcttaatgtccagtggcttatctttgaatcttacaactacgatccatgaacttgtgcatgccctgtctcaggtttagggtttagctgccttcggtgatttgtttcctaatggaggcaacaagaactgtagaaatcttttaaggatggactaattgcttttgtacgcatggaatactcaaaaaccaaatgatcaattaaaagttactttgaattatcttctgaattttcaaaaaatagattgtgttgaagtgtgctgtatggtatgtggaaaggttaaggggagatagattctcagttgttaattgcatgcagcgaacagtgctagaagctgaga

SEQ ID NO: 113874 - DNA, 636 bp, Physcomitrella patens
  Intron number 2 from transcript Pp1s11_111V6.3 (locus Pp1s 11_111V6) derived from phytozome v7.0 (chr-ID scaffold_11; pos 875163 to 875798)
gaagccacacattcagacaaacaacataaagaagagtaagtacaatgctccataggacccggggttgccattccttgtgttgcatgtatttatggaagtattgggtggagtatcaacatttcaaattacgtgctgcttggatgaacatgtctgttgtttttttttatacagtaaagttttctggggttaacctgagttaatttcgggctgtaaatttgtagtttatgcatcgtttaactatattgcatttcattttcttacttttgggaaacagtttattgaaatagtagaggcagttatcttatggtttctacagtctgaatgggatttttaacttcgtgattttacatatggcagctagactttacaaaatcaaacttgtgagtgacaggggtggatgttgtccctatcatatatatatatattagacttgtttgtttactcagtcacatatcactgaagattactatagtgaagtggaagcactatcttgaaccttatgtagagatcctagttcatgttagttttcatttgggatagtatcaagcccggacttactcgcaccaaattgtgtttgtgtttacaaacttcaaacgggactgatattattgttgtgctcctctaggctacaaaaag

SEQ ID NO: 113875 - DNA, 847 bp, Physcomitrella patens
  Intron number 2 from transcript Pp1s219_17V6.1 (locus Pp1s 219_17V6) derived from phytozome v7.0 (chr-ID scaffold_219 ; pos 126699 to 127545 reverse strand)
tggacggacgaataaaaagcgaacaagaccttccagtaagtcacgagctgtttagacttttttcctttgatatccaacctgtttttttaatctaggaagatctattggctcagctttaatttattctatcagcatgtacaaagcaggtggtctactagagctatgaaccatgtcgtatctagagtatacccgaaattgctttgcctgagtttttgataaatttaaatatttgaagtgtttgattctaccgtccaaaggtcactgctggatggcactttgagcttcattttcgttttaggtaggagatgctcatagcgatactttccaccaaaccaagttcttgattctgaaatcactatgtcaagattttttttctcgattagtatcagtctttatatgcttaaacagtgcttgaatcctctaagcactaagaagccctcttttagtcgaggttgcatttggtctgtcattttgaagctcatcaggtcttccggagtgccttgcgcggatttcctcgctagaataattaccatcacatggaaatgcatggttaataacagtaaaataacctcggactatgttgcaaagatgtaagtaacataacttcttttcgggctatcaatcatggactccccgtgcatgacctttattacagagtaacagtcctggtaacataggccttagcttgaagtggcgtagtcttgcatccaaatcaggaagagtaacatgcagtcgtgaattgtaggggtctaacaatagagtagccaccaatttgtagtaatcgtcgaagatttgggaagaagtcttgaagaaaaacgatgaatgtcttgattcgttgtgggtgtag

SEQ ID NO: 113876 - DNA, 472 bp, Physcomitrella patens
  Intron number 2 from transcript Pp1s4_491V6.2 (locus Pp1s4 _491V6) derived from phytozome v7.0 (chr-ID scaffold_4; po s 3937219 to 3937690 reverse strand)
cgagagctcccttatcatatcctgtttatcgttgtcttcatctgttggttttacatttcgttctcagtgtcgacaacttcatattcgattgatagtttacaagctggataattatgtatcaaatagtttcctttcttctcattgttgtctgttgcactgctctcgcctgtgttcatgtgttcgtaacctcaggtctgggttacgacatggttgattgacgttggtcaaacatggtcaatcacgtgtacaaagtccatcaagggctatttgagttcacagattttatccctaaatgaatcagaggcttcatcgtatgtattgcaacacgatggcatttaaaactatctgtgaaaggtcgtgggtttggatgatggctttgtttttcaaatgcagtggcttctctcgtatcaaaagaatttcatccttgacatagtctgcaccagaccgatactatctgggaaacgagcgccgc

SEQ ID NO: 113877 - DNA, 504 bp, Physcomitrella patens
  Intron number 1 from transcript Pp1s49_90V6.1 (locus Pp1s4 9_90V6) derived from phytozome v7.0 (chr-ID scaffold_49; p os 772481 to 772984)
gtcaagtttctcgagttgtgagtcctcttcgacctaagtttcgcaaattgtgtatgaattccgttttgtaatcgttggagcgattcggttgtgcactttttggttgaggatttcttgtaaggtggagtgagtctttaaaattttgagtgccgattgtattgtgtataattgagtttttgtacaagttaggtgatgtcatagaaggattccgtgaaagtaatttgttcaatttgagataatcaagtgctcggtatatgtccgttgaagtagtgtggttttgagtcttggatgtccacgtttttttttgcattcatatttgcaggtcttgtattacaattcctctgtctctttttttctttttctttttttcttttttttttttgcaatcgtttatttattttcatcatgggcgtggtttaggttttacaggacagtgtgtggatgaattcaatgacttgatgatgacctttttattagtttatgcaggttgactcttgtgaaagg

SEQ ID NO: 113878 - DNA, 888 bp, Physcomitrella patens
  Intron number 1 from transcript Pp1s2_677V6.5 (locus Pp1s2 _677V6) derived from phytozome v7.0 (chr-ID scaffold_2; po s 4138571 to 4139458)
agcagattgtagaagtgtgctggaaccaagtggaggcatgtgtggtcaaagcttactgtgaactcctcgctgcgtaggtttcggtaatgttgcttgcttgtattgaatgattaccctggtactgtgataaatcccgctgcagcgcggcttttcttgttggaagtagtgtatcggtgttgagaccgactcagtgatggactggtggtgtttctatgcaccggcaatatattactgctatcaactctcaatagatttcaaagtagactcaattccttactgcgatcgattgcagtgaaactcgataatagaataaattacgttgttttatttatttttggttttggtttatcaacgagatggctcctttgcagttgtagagacttcgtgtgcgaggttcattcctttttcagtggacttcgtagccgcttggcattcgttaggtgcttcgacagagctagacatcacaactgtcacggaaagtgagcccagagtttagtctgttcttcttctctccttatcgccttacgtgcagtagaatactcaaagttggagatcatgtcagtctgggtcctacctcattgaatttcttctgggaagtatatttagaatcatgtttggaattggcagagtgattactacgattgggtgtgtttggacgtgttcacatggctttcatcgaggtcggagtctcattttcttggcagtccaggaaatggaagagggacggacgtggactttccgaaagcgatagcaatgagaagcaactcacagtgtgtgattactgatttggatttggaatcaatgctgggttggagagcctcttgattgacgagcggcggttgtgtgtgtgttggacttgggttcaggtagattgtaggatcgctcgcg

SEQ ID NO: 113879 - DNA, 481 bp, Physcomitrella patens
  Intron number 1 from transcript Pp1s30_96V6.1 (locus Pp1s3 0_96V6) derived from phytozome v7.0 (chr-ID scaffold_30; p os 670709 to 671189 reverse strand)
tcgtcaacgctgtaagattcatgtgtaagggattttaggtggcaagttctggtgtcaatgatttggaagacacagacggcacttttgttttttcttacctcgcgtcttttattttgctagcgttgtggcatttctttgcgtgggtgcggcgttaaggaagtgagcaggaaaatttcctagtttttcagaagtaaattcgaatgcgctgtgcagttttacggagaacaaaattaattcttgtgggtcaataaaagtgtgcatgatctagatcacgccgacctttttttttttttttttgccgtatttgagtcattcaattctcttgcttagacgaattaggcataagggagagttcagtcagggcttcaaatgtcatacaattttgacttctccaatcatcttcagcaaattatgtttctggctgttctaattcggaagcaggtgtgtgtaattattggcgcttcaggtcattgaaatttcc

SEQ ID NO: 113880 - DNA, 783 bp, Physcomitrella patens
  Intron number 1 from transcript Pp1s18_8V6.2 (locus Pp1s18 _8V6) derived from phytozome v7.0 (chr-ID scaffold_18; pos 58597 to 59379)
ggtaacaaaccgttttgcaacttagcctgggattcgcgtcttccctctgtctttctttttcttttcttttctctttgtttttctgtaccgtccgtaaactgtataagaattgttcaccgtgtagtctaccctacgcatatgaccaggtccatccatgagcttacatgactgcgaaccgtagttggtggttttctgcgacacattttgacgcgagttgatggagctttgccaattctcttatttatttttcttatcgtggttcatttaatgcggtgtttgaagcgcgctcatgagtgagattactctgctttgtcgtcaataatttggtggcacgtgatcttgctgaggatttggaccattatgggttggcatttaagataatgcatagcggtattgtgctcgtgttatttgctccatccgcggtcttgtggctttagatcttacattgaatgctgtggaatatttttagattttttgtttgggacatttactactttttacgtccacttgttccaatcatgaactgtgaagtccgtgggaaatattcatttagaacatgcttggaactagtttcattatcccattggaatgaatctgcagtgttctctgctcgatttcatcttgctacttgtccattgcggatggacatgttatgtattatggaaaatgcttatggggcttcctttaggtcctcttagatgatgcgacacccgtgaaactcataacttgctgttgcttatgtgtgcagcgggagactggctgcaaggaccatacgtgtacgcc

SEQ ID NO: 113881 - DNA, 505 bp, Physcomitrella patens
  Intron number 1 from transcript Pp1s316_17V6.2 (locus Pp1s 316_17V6) derived from phytozome v7.0 (chr-ID scaffold_316 ; pos 170637 to 171141)
ctgaatccgggtaatgtgcctttcatgccctttagagtagcgaacaatctatcacatgtggatgcttgagcattttagctattctggctcatacgttggtgctctctttgaatataaaatacgatctttcaatttgatcctcggtttattttcttttctatttgatacaaactgcaagtttgtagaattcaacctgggataatcaatgattagaataattccatgctctcgagcactttctttcaaatcataatttttccacatggaaatcgtttcatgactcatgtacataatctttgagcccaggtggatcccttgtcaagtcggtcttaggctgattttgttgctgaattttgtagtatggatttgtactggagtgttttgcgctcgcagattgctttgatccttgcattagaaacgtcaatagtacatcgctctttagctcacttggtcttcttgctgttgtgcagtgccttggtatcggaggagaaatttcactcgctag

SEQ ID NO: 113882 - DNA, 1025 bp, Physcomitrella patens
  Intron number 1 from transcript Pp1s22_216V6.1 (locus Pp1s 22_216V6) derived from phytozome v7.0 (chr-ID scaffold_22; pos 1335580 to 1336604 reverse strand)
gcaatccttgtcaaccacaagcttgaaaagaagaagttagtcctcggaaccttgaattggatattccttgctattttcctttcgtaacgtgttaaagaattccttctctacgccggtcattcagcaacgtgcgcggtgtctctcaatcataccttctgtagcctctgaccagtacttctatctggttcctcgttccatgtttttccgctcactggtgtccatttgcattgcattgagacgcttgtcatcgtgtatgacatcaattttccgcagtagtcggtaactcttagtttttatagacgatagactttaaatttcagtcctatgtggaaaaatcatttactgtttctaaagtctttgatgcaaataaaaagagatgttgttgttaattgtgtttactgctattgcagttatcactgaacactccttctcgaatgattattatagaaagtacctgctattttcaagtcacctagtgctccaactcttttttgggatgccacataattacttgtatgtcaaatagtgcacgatttcactgaagaaaaatatgtctagcgtcgagcatcacatacaagcatgttcacgatcatgtgcattcgcctagagacatattaatgtgctcggagtgtcgtctgaaaagtcttgctgtaagcattgttccttcgtttcccgaaaacaggaacacgctgttggcctctgctgatgttcgttattttatgtgtaatttgaacttgacagaatgttttctcacagtgaagtttagtgaatgtcatttgaaagcctcattccgactcgtttaacttctgaggttctgtctggttaattgaatgttggcattttacctgcataatgaaacacctgtcctttggctagtctaatgtttgtcataatggtggccaacttctgctctgatcatttaccgtaaacttcatcggacttagtagagtacttgtcttttgtttttttctatctccgtagtcttttagcgtgtgataattttgttgtacatttttggagcaggt

SEQ ID NO: 113883 - DNA, 888 bp, Physcomitrella patens
  Intron number 1 from transcript Pp1s30_315V6.1 (locus Pp1s 30_315V6) derived from phytozome v7.0 (chr-ID scaffold_30; pos 2223741 to 2224628)
cgggagaacaagcagcgccgcttctggtatcgacgtcgaacattctgttcacacttacaggcgactgcgtgaagtgatctctccataacctcctgttgttccactttctcgtgatcagatgctcgattgagactgtgtgcgatagtgtagccacagacagcagcgattgatccacttcttcgcaacccagaagcttatcgagacgaatctagtgacccacttcctgagggcctgaacttgatgttactctaaacgatactcgtcctgatttattctggtcgctgttagtattggcagaggtggcaccatcattgtgaacgatgttaacgttttcttctaccaagtgacctccaactgagccttcgcccgaaatctctcaaccaaatccacaagctgagtcccttatcgttcacggcaacacagacttactgcaccgtaatgtaacgaaggagagccaactgattaaccattctgcatcaaagtctcaaagaagcaaaaaaaaatcctaggggccaagggtcacgtaagtactcagtacagagtaaagccaccgagggactcagaaggcgaaagacagctcaagttaatgacttcggctacgaaattctttttagtttaataattataaacataacaaatctgcaacattacttggaatacgcctcgtgtgggaaataaaagcacaggtcatggtgacaccgtgaaaagctgtgaacataacgacgaagatttaacacctcaagaaagcaaaggttgtacaatttagatactcatcaacacctacccataaggaaacaaaagggttggttaaatctctttgcggtgggtcggaacactctacatggcgtcacagcgccgccagcgacaagagggctgacataacgggga

SEQ ID NO: 113884 - DNA, 809 bp, Physcomitrella patens
  Intron number 1 from transcript Pp1s197_122V6.2 (locus Pp1 s197_122V6) derived from phytozome v7.0 (chr-ID scaffold_1 97; pos 589237 to 590045)
ctggagcttcgaagagattagagcattttcttgaggtgcccacctcatttttcagttgaatttgtgtatagttttggagaactcgatttgcaattcggaccttgacgcggctatcaaattcagctgttttcgtttagttttgtgaactgtttctcgtgttttcgtggttgagttggacagttttctgctcatcagtggcctaatgatattcagttcatgcgagtatccgtcagatccctagtgagagattattgttgtggtacgtgaatgtttgttcaattctttgtctgcgcctagtagtgattagagctatctttctattttttattagggttttagctccagggcttgcgatttcttctagggatgtagtgtttcattgtgtcccattgaggattgaaaattactgccagttctctgtttgattagaactggcttcgattcggaatccgggatttttgcatattgaataactcagagatgtaagcctttgtgtgtcgctgaattgaaagtaattgcctggcggagtactatcatctgaccaaaactagtgaagcattttgcccatttatcgtgcatttcagaatggcatgccagagctcacatttacatgccctacttttaatctacctgactctgtattcggagtgtgatcattgtgatggttacgaggttcgtgcaggtttaagtgtccttacgaattcaatatttcatgctatttagtgtaagaaaacatttcggttgctaatgctcatcattctctgtggtttgaaggtgtcatcaccctaatcgttcactcgttcctgact

SEQ ID NO: 113885 - DNA, 770 bp, Physcomitrella patens
  Intron number 1 from transcript Pp1s21_318V6.2 (locus Pp1s 21_318V6) derived from phytozome v7.0 (chr-ID scaffold_21; pos 1868344 to 1869113)
agctgtatttgctttgtagcgtttttgtatctaaggtaacaaacagtccgtgcgcaatttgcagcatttcttgtggaggtttataaccgtagttttgtctcctttcggattgttcatgaatgcttttaatttgttttttaatcggcgtttaatgagttttcgcggtgcggctggagagatgtcgtgttttggatttttctgtctgggagtcttgtcctgtttctatgagtcgaggatttgtcatataggtttctgtgctggttgtgtgtaattttatggtcttccagggtttgtcgtgttgttttgaagcaacttgaggtctggagcgatgcatgtgattgaggaggttgggaggaaagctaatcagtagtttttatgtgatattgtggtttttgactctcctacagttttcccttgtttttattttttatttttattattttattattatctgtgtggaggagagtttttattggagaggacgcgagccactttttttttttttttttttttttcccgcgtttttgctcttttgaagaggggactgtattttatgaacatcgcggtggtgaccgaaattcagaagttggtcctgtgtctagttatattcggtgtttctgaatttttatgtcttattctctgtgaatgcggacggagacgtggtgagggggtgcggtgttggtttttgtctgaaatgtgtcgtaactggatactgatgtccgacagatgatgcagaatataatttcttggttgaacgccgctgcgtcagg

SEQ ID NO: 113886 - DNA, 996 bp, Physcomitrella patens
  Intron number 1 from transcript Pp1s101_254V6.1 (locus Pp1 s101_254V6) derived from phytozome v7.0 (chr-ID scaffold_1 01; pos 1390443 to 1391438 reverse strand)
gtgtccctgcttgcattgatctacaccggtgaaaggtgctccaattctcaccagccttgggtttctggtggattgcgtcaatttggctttcgttttggatctttgagttcgcttgcggggtgatgtgtgtttgtgtggagggttgatgtggggattgcaagcttgggagatgaattttagttagcctgtggggtcagtggattttcgtcatagagtcgtttgggaattcttgagcttggactttcgagtacttagtcagaatcaggaacatgcatcggttctggggagatgttcgtattgaaattctgggatagatcaatctgttctaatgagcattgctcgattttgacaggtgttgttttcattagatttgacagttccgtttctcattgttgcagtttgctcgcttctttctgagaccactacctgttaatctttagggttcttactttttgtttttactttataaaattttggtcttttttaatttaagttgacgtcgatttgccacctacatgtgctcaaagaacgtgtgcgtgatagggaatcttgtgaattaagaagacctattttgttgcttttgaagtcatatgggcacagtatctagcaatacatcattctatgcaatatttagttgatgaaacgtcacgtcagtttttcgaaaggtaaatcacatttgaaatgcgcgtaaatgcaatgtttaccgacacatgagttttctttcatgagcacttgcaaaatggccatatacctaatttttaagtgaagtatagtttaacagatgactgtaggctcagccgttggttaatctgtgccatgactgaacggagatttcgagaaccacggccatatgggttcttaggacctgaaggatcatcttaagacgggcatcaatggagcgtcttttttttcagtgctcatgtttcaattgcacatgggatactcatgacttcctgtgcccttttttgacaccttttcaatgttgagctccaggct

SEQ ID NO: 113887 - DNA, 616 bp, Physcomitrella patens
  Intron number 2 from transcript Pp1s56_198V6.1 (locus Pp1s 56_198V6) derived from phytozome v7.0 (chr-ID scaffold_56; pos 1499706 to 1500321 reverse strand)
gtgctgttctttgcctctctggtggcgcatcgcaggtctgttttgtttgttgaatgttgtatcacagctgttgtataatttaggtcatggcgccacgaaagtttggatccccagtttgagctcctcaattttaatcctgttcagcaccactgtttgatggaggcctcatctcaaggtttacgctcagaaaatcacaaccactaagaacttttaaatattttgccatgtggcacaaaagtgggaaaattgtggcgaaatgacgccattactgcatggaaattttttccagagcaagtagtgagtgtataatttcccatcactttgtatacgagaaagcttgcgattactctttataatcgaagtggaagtgttattggggtcttcgttggtaattcacattgaaattcagtggtgcaagattcaaattcaatcacgttatctgcctttagcacgtacatgcattatgctcagatctgctcttcttgtaatcgagagatttcgaggagattgtagaactactctgtcgctgcaacagccaacatgattcagagaaaacattgttgtggacgctgagtgtaaaggctctaggttggctgttgtcggtgccacgagcgtc

SEQ ID NO: 113888 - DNA, 583 bp, Physcomitrella patens
  Intron number 2 from transcript Pp1s18_23V6.1 (locus Pp1s1 8_23V6) derived from phytozome v7.0 (chr-ID scaffold_18; p os 121679 to 122261 reverse strand)
cattggcgaagctcctagcagtcaatcgtgagtatacttttcttttcttttctatgtctttcaaccacacagtaccacctcgaagttatcgctccctgatatcctagtttcaaaggtgtttgttggttgcaaaggaaagtcgtcattaaagtaattgcaatgcactagcatttgtagagcggttatatttcgcaagctaaagtcacgggcaattccataggcatggatatttgtacgcatgggttttgttttatgcaaatcgaagtcatcaaaaggcgcgtttgttgttcgctgtcaaagttgcgtccagattcgtgatatatgctttttactatctgttcttctgtcaatctgtgccgaaaatggcagtgtcattattgatttttggtttcacttcgcctgttaatcgctttcttatttgtgagcgtacatatcgttgaaggatccggtcggctggctgtgaacagaatatggcgattgatgaaagcttctacctttcttgtgttttgaggttatcgtgacgagtttaattctcctgttctgaataggtacctcaatattccgaacataataacggctgcaa

SEQ ID NO: 113889 - DNA, 814 bp, Physcomitrella patens
  Intron number 3 from transcript Pp1s60_238V6.2 (locus Pp1s 60_238V6) derived from phytozome v7.0 (chr-ID scaffold_60; pos 1431906 to 1432719 reverse strand)
ggacaataggtgtgctttagcccgcgtccctattgaattttatctacttcgaaattatattgtactgtgctgattattcttaagctgttggaaaacggtcagtcaacttttacttaaagagcaaaatacatttccctccaatcgtataatctttgacttgaaggtttacccggaaatgattaggaagcctccgccacgtctacagtgagtaaatattaatatgaaactaagggaacatgcggaagcagatatatgattttctacgattgtaatcatggaaattgggtgattctagacacgaaagtatcagtgagagtactctcaatgcttgtttttaagtttaatctagtctactgagtggtattaatgaacctatggttgcacgagatcacatcgatctagttctttcgttttttgataaccctacatttagaagttcaagccaaacgtggtgtctggaattttttcgcagatactttgtcaaatctggtggtctctacgctgtctttggttttgaaattgtagatcagtaacacgcctcatgttagattgttgggaaccatcaatatttgagaactgtcttcaacattcagacttgccttcatgtatttcactgacgaacaagtagtcttggctgtaaatagatagaatggtactgttcagtacatcaacttagaactaatacgttggagtaatttgcacacccaaggaggcatgtgacctagttgagactcgaaaacttacatgaacttcatgatggtctcttgtttgtgttgcagggctttttcaacagctcacgctttgatttcatctg

SEQ ID NO: 113890 - DNA, 522 bp, Physcomitrella patens
  Intron number 2 from transcript Pp1s60_238V6.2 (locus Pp1s 60_238V6) derived from phytozome v7.0 (chr-ID scaffold_60; pos 1432765 to 1433286 reverse strand)
gatcggtgctcctaggcatcgtgttttgtaagcttgtgcgtttctgtcctactttcaattattgcacttattttagttatttgtgtttcgttgtctccgaaggaatcacaatactccttggaaaatttgtacttcttttgtgcagaccctccgcttccagacccttttttggtcttattctctctcatgtcttctcctcatatgtttctcgctgccgccgtctggaacttgacaagtgtcacacattctccttgaatcaaaggccaatgatgtatcactatgcaataaaaaattgttttttgaaacctctggaggatacctcaagttcgatgggtttaccccgtacgtgtcaaaataaaataaaataaaacacctttggaggattaaggagcttaatggagtcccatgaattccagtttaggttcctgtcaaaccttatgtagtcattggaagctaaccattattgtccattttgggctgcattcaggtctacgacatttcccaagcacttagtccagtgat

SEQ ID NO: 113891 - DNA, 930 bp, Physcomitrella patens
  Intron number 1 from transcript Pp1s69_148V6.1 (locus Pp1s 69_148V6) derived from phytozome v7.0 (chr-ID scaffold_69; pos 896132 to 897061 reverse strand)
tcatcagcacagcagctggcacccgaagctttcaggtcttaatttcttacattttgaatgctgtcttaccctgccactcctttccatctggttcttgaatcatttcgtaattgattcggcgctcatcacctgttgaattggtccttaaaattctttcaacttctagggcctcatactatgctctactttaggttttaaatttctaccttgctttggttctgtatggagtgtgtaatcgcacctgaaacatttgcccttaagtgtctgtttatttttccgtcttgcaatgcgggtggtagcgttgtactatgtgctgttcagaaaatttggcacataccattcagattctatttcatcatcgattgtcaagtctttgggttccccaaaatcataagccctagaggtagtgacctcatatgcactttcgcactctttttcggtgtttgtaattgttaggtgaagttcgtgtaatctaaacgtttcagcatcgccttctgatggacttggctcgtccaatttttgtagcttagatccatgtggccaatcttctgtttccgcgagtgtcgcttagtcaatggtttagtaagagctcttttatgatgattattttaatgagttaatgagttaatgaatccaaatcaacagttctcgctattacgttaccatgtacacactttgatgtacgcagtcctttagcctctcctttagcattctttgaatgtttagaaattttcacaaggagtccaaaccatattacgagtgttttttttcacgaatttgttcacgtggtagaattaatttgtaaacctcagaggtgttggatttggaatgcgagtatcctctgaaatcttatatatatgttttgttctgcacttgcaatacttttgaggatactaacaagctacgcttttgacttggctttcccgcaga

SEQ ID NO: 113892 - DNA, 713 bp, Physcomitrella patens
  Intron number 2 from transcript Pp1s203_103V6.1 (locus Pp1 s203_103V6) derived from phytozome v7.0 (chr-ID scaffold_2 03; pos 822023 to 822735 reverse strand)
tttacgagattgattgggatttttcaaacctggaggtaaacgcttccacttctcgtcttttttcatacggacaatgttaagtacctgtgcttattctttagtaaataatggtgaatttgtagcttctctcccttatggtatgtagcctcactatcgcctggtggttcttctactgtatgaggcacttagacgaagtatttatatcatgctcagcgacgaggagttaatcccgccacttcttccctgcgcgaatgaaaccagtttctatgaactggattcctttggcatggttccgctctgtttcctccatgaaatcaaactgtcttaaggtgtcatagcattacattttgaacctctgaatctgtgaaacattattaaaagtaatcctcaacatcatcgttgtaaaaatattactacttggaggatgaaatatctttcgaagtctcaggccgagcagcccagactatgggctacgactgctattacttaatctcttcatcagtaacttggatctgccttgtctgtcttgtaaatggtggcgcgtcaaatgaccaattaccacaggagtaggaaatggagtatggttttatgaatgtgtacactgtttctttgaatgcctcgcaaaactgaaattactattttctcaaaatgtgaagcttcccgtgaactgtggtgcagagtgagtttgaagaaggaggaaaattatacggcaa

SEQ ID NO: 113893 - DNA, 569 bp, Physcomitrella patens
  Intron number 2 from transcript Pp1s2121_1V6.1 (locus Pp1s 2121_1V6) derived from phytozome v7.0 (chr-ID scaffold_212 1; pos 1413 to 1981 reverse strand)
attacgaaactgcatctaattaccttgattgggaggtatgaagtacgtggtttaccctttggagactttttttcatctgctgtgtagtgtgactgcaggtcaagcttcagtttcctttctgtgttgcccttgacgggctttgggatgttctatgaatttttctttatgtaatgaagtaggaatatactgtatgtcgtgtgatttcactgcttctgtttcccatgctgccaagctgatatgtgcgggtcttcactgagtattttcttcctcattcttgtaaacaataatccttaaaaaaaaacaaaaaaatcgcttcattaacgggtttttggcctagtatcttgttaaaattctcttgacctcattagctagaatcaacccatttgtgggcaactgaataactcatgcatgaagaactactttttgaatttcgaattttaaattttgattcatatcggaaatctagttacccttggctcattcaaagatgaatatggtcaaattttaggttggaaacatggtatgattctggagttcacccaccctgacagcacgcgacgaagcgctac

SEQ ID NO: 113894 - DNA, 489 bp, Physcomitrella patens
  Intron number 1 from transcript Pp1s270_12V6.1 (locus Pp1s 270_12V6) derived from phytozome v7.0 (chr-ID scaffold_270 ; pos 124517 to 125005 reverse strand)
gggcttgcaggaaaaactgttgtaagcagttcaatcagccgtgtttaattcatgttagtattgctctgtgcaaacactccattttcatagataatcctactagatcttttcaacctttgccattagttactttttttttaaacctctttaaatttgactttgatggattttgcacaacatcagtttcatgagacataggaagacagcataattaatcaggcaatattgttgatttaatttttaattttaaatttttgtttttaatgaatctttaataacctaatgaactttttgatgaaatgttgtttatggttgttgaaaatcacaacacattttatgatgggaggaatctataatgaaaaaagaaattgaattatgcatgctagaagtggattttgcaaatgtttgcatgttttttttaaagtgggtggtttctttaaagtttgtttgttttgtttgttccattttcttgcagtttgggctcattac

SEQ ID NO: 113895 - DNA, 576 bp, Physcomitrella patens
  Intron number 2 from transcript Pp1s24_126V6.1 (locus Pp1s 24_126V6) derived from phytozome v7.0 (chr-ID scaffold_24; pos 1418002 to 1418577 reverse strand)
catcccccaagttcagcactggcatccgagtggcggtgagtcttccttcacactctccggcatccctcaatttttcgtattaataattttaactttagttgtctttatatttgtagaagattatcggctgtgtggattagcattcatgagtttcttgtagtggaggcatatctaacattggttaagaatgacgagtcctgggtaagctctgcagcttatcttgttttagttttagtgatatttgtgcgtgatttattattgagtcccactatgctacattaggtctgaactcattatcgtcacagcacatttttcacctgggtgctgtatttctgggatttcggacgcgacattgtgtgacaagttgggaattggatagattcagttttgccatggtaaccaggtttcactagcagtgtttaagtgccattttgtattttagatttgaatgccgattggatgaaatggaatgatcaaacaattttggcctgtgtgatgtgcgtccatgtataagaacacttctacttctctcctggccctgaagtatggcatacgttggtaaaaacagataaagcg

SEQ ID NO: 113896 - DNA, 946 bp, Physcomitrella patens
  Intron number 1 from transcript Pp1s360_26V6.1 (locus Pp1s 360_26V6) derived from phytozome v7.0 (chr-ID scaffold_360 ; pos 267213 to 268158 reverse strand)
ccttctggtgagaatgtttgaagtgaatagtttgataaattttcatgcaaaaaattgttgagttttcttcttttgatttttagagcataattgtgcgtgaagtccccaagcattgtttcgccatcctcttttagatttacattggaccctgggagtcgattctgctagtggaaggacactcttcgtaattgtgacgtccaaatttttactcgatgctgtactactcattttgttggaagcacgggagcccacggggggtgtggacttgcccaacgtgtacaatcatgaatttgatattttcttgttctcttggttgttttagcttaacgaacgcggtaaaacatgtccacctgtggggttgagggtttttattttatcttattttatttataatatttctgtaattattaggttactttatctttcggagtgacaatcaccaaacacctagagccatctctctctaatacggtccagcagcttgtagcgtcttggtgtctgttagtaatgttttctgtccaatttacgcactattccctgtttggaccgactcctcacgtcgttggacaataagtgttgtgtggtgactctacaatgagtcatagatgaattgtaaatctcatattgttcccataatttgatggttatttatacatctttcataaacgtatgcatcttatagcgctctgtatcctgtatttgtcacccatttaattagttcttcctttatgattgagacaataggttatgcttgtcgctacagattttgtgactattttctatttttggaatactttctggtacatttatccaggttatgctcaaaaagtgcttcatcttttatctttgcatgattatcaattctcgccttaactgtgtaatgacatgctacataataatgacatatttaggagattattggtgccaaggatctgggacagcaaag

SEQ ID NO: 113897 - DNA, 931 bp, Physcomitrella patens
  Intron number 2 from transcript Pp1s60_168V6.1 (locus Pp1s 60_168V6) derived from phytozome v7.0 (chr-ID scaffold_60; pos 1057945 to 1058875 reverse strand)
aatattgctctcttcaaagacgtgcacacaaattggtaagcaggagttcctgccagcaatgaccttaacatgatttgagactacgtgaagcttgggtatgtagcttcaaaagagaagtaaaaacgagataaaataaaataaaacagcagaacttcagatgtacaggtccagctccgtgaaattcgagacaatactttccttacatatcaattcaaagaatatcagcggggacctgcatgttgaaactgttatttaaaatttggagctcaactctcactactaactttgtcaactagggggaaattattattttttaatttttgagtagagcaatccttcagtactttagtcttgatcacatgggaaccaaaattcttagttgccaggagactcatgagtagcatgtcggaaatttaatcagcgctctaaatgattatatgcattaatgttcgacttatttctcagatttcaaagagcagaattgtgacttgcctgcgaattagtttctacccagtttaatgcttcatgacagtctctactgaaggacaccaacacggattgcaaatttgaagtggtttgatgacatttctgtctctagaaaaacttctcaggaacttgagagagtgcatctgtctggatctccatctgatggcagactctgggggggaagagaaatcgaaggcggagagacgctgctccacggtcgtctattttggaacaagagtatgagatgttatgtaatgactgtacacatgaaagtcctaaagtgtgctagcttaaaggggcgccaaaccgacttgaattctagagatcaagctagcattctaagtcttggaaggatcatgcgatacagttgctaactagaaaatacctaactgcaattcgtgaatacacagggtctgaagctccgaagttaacaagtgaaactgtc

SEQ ID NO: 113898 - DNA, 411 bp, Physcomitrella patens
  Intron number 2 from transcript Pp1s250_6V6.1 (locus Pp1s2 50_6V6) derived from phytozome v7.0 (chr-ID scaffold_250; pos 86742 to 87152 reverse strand)
ccaatttcctcatcttcgtagtagtttgcgtacaggtgctatttgccttttcctgttcttcatgtttgggtgatcaagtcctttttctttccttttttcaaaatcttcatgcaaaagcctgcttactaacaaattcaaagtcttaatgtcgttcatgaatcttttgtggagttgttgaatacatatttttttgaaagaggtattctgcagctcatcgggtccattaacttctgcctaaccagtatttatacttgttttattcgtattacatgctggctttgctcacttgagtgtttgcccttctttgtaataaaagaggttggagaaacatctactgctcccttcatgtcaaattcttctattggtttgacctcagctgccgcggtgccgcgctttgaaagtgaatccgcc

SEQ ID NO: 113899 - DNA, 471 bp, Physcomitrella patens
  Intron number 2 from transcript Pp1s30_62V6.1 (locus Pp1s3 0_62V6) derived from phytozome v7.0 (chr-ID scaffold_30; p os 437239 to 437709 reverse strand)
ctggtaatttattcactcattttaaactttgagacataagagggtatcccttcgctgattaaagaggagaatttcagttttatggtctgcaagtgacttttactcagattgaactaggcttattttagttggtgcagtgtagttccaaccaaggtagggaacatcttttagttctaatttatcatctatgattcaggtttgttcaaacattttgagcagtttgatttcattttgaggtctcattgtattgcttctagagttttttcaaacatgctttcccatagtcaggtagcctgttctataggacatatattgctttgttctctggccaagcttcttgtttaaaaatcataacacttctttgctctctcatctgatccaagagcagattcctactattaaaggccataacattttcctatctttgtttgtgcaggctggcaattggtggcagtaatacccccatttgga

SEQ ID NO: 113900 - DNA, 816 bp, Physcomitrella patens
  Intron number 1 from transcript Pp1s332_45V6.1 (locus Pp1s 332_45V6) derived from phytozome v7.0 (chr-ID scaffold_332 ; pos 268655 to 269470 reverse strand)
cgcagaaccgtgccactgtgcagcagcttaaactggtgagtctttttttttcgtgcttgtggaatttttttctcctcgttctgaaagtttaattgtggcgttgagttcgtttttcttgccctgtggtagctgcaagtgatgcgtggcggagccctagggttgttacggatcttctggatgggacatttgtcggtggtgtttagaggtgtgcctatgtttaccgcgcatttggtccggtgttttattggttttttttttttttttttgaacagtgaggctgttccctaattttgtttgcactcagatagtaatggttatttgtatcacttgcagtattgaggggttatggctacagccctaaaccctgtttcctgttgtcaaacctgtcgttattttgaagaggaagtggactaattttgcttttagggcaaaatgctcttgcattgttaagtgtgggaatatttgtagaagtacatatgtgtatgttcttgctaaaacacacaaaagatatagccacacattcatacacattcacttggggtatgtggaggtcctcgttctatttgctctttgttaagggccagctgatcgacttagcattattcttgattgtttaacttctcctgtaaatccatcgttatcaaccttgtcgccactaatatagaaggttccgccttaaacgaaagggtcgatgtcggttctgatgtacgaaatattatgtgtggtaggtgctttcaggttgtgcgaaatggactaacacattcttatccgtttgcttcagattgggcagagccatccaactggtttgactactaa

SEQ ID NO: 113901 - DNA, 752 bp, Physcomitrella patens
  Intron number 1 from transcript Pp1s260_24V6.1 (locus Pp1s 260_24V6) derived from phytozome v7.0 (chr-ID scaffold_260 ; pos 228745 to 229496 reverse strand)
ccaacttgttctgggcagagcgctttggcaaagaggttcttacatcccaatggacgacttgttgcaaactgagtttttgaattccggaatgtcggatttggtgttaggttatttcggaatggatacgctcttctagttgtgcttgttcgtttacggatttgaccctagtttggctatatcggccgttcttcctactaatccgaaacttggagtgttcgtttctgagcttgtttagagtattttgagagcatgtcaagtgttcttctttatagtcgaccagaatcgcgttaggaaattcagcaacgtcctcaaggatctggaaaacttttggcgttgaaacttggcaagctgtgggcggttggtttgtgttgctgttatgagtttacttggtgcttttcgtactcagcagttagcactgttcacttggctatttactgtgtgtgtgagagcgagaaagtttgaaagagatgcataataattggaatgcttgcattagtctacttggattttctccttgaagcctgcggattgtcgttttgccttttccttctttttttttttttttttttagaatacttgatcatgtcttctatcatggtcgtggcttctgagttttctgtgaatttgattctctagctgacctttatgcgaatggaatcagcatccccattgtaagttcgcagcaatctcacttatttttaacgagcagttattaattacatgactttgaaacggttttgcaggaattggag

SEQ ID NO: 113902 - DNA, 601 bp, Physcomitrella patens
  Intron number 1 from transcript Pp1s101_201V6.2 (locus Pp1 s101_201V6) derived from phytozome v7.0 (chr-ID scaffold_1 01; pos 1002953 to 1003553 reverse strand)
tcaaggataattgtcagattcttcacgaatttaaggtaattggcggtcgcatttttcatggggctgatgatggcccgtgagactgtttttgtggaattgaagtttctttgttcattgttttttttgatttttgatttgaagaatctattttatgatgttggtgatactccagtcagcaagtttgaattaggtgtttgcttgtaggtttgtgatattgtgcaccgcaaaactgtgttttttgcatggagttcattttgtttcttaagtgggagatgtgctcctgtttctggatcaaatttgaaagacgtgcctcgaaaattctcaatcgtagtttacttgatacgtaattgcttcaccctcattgccaattaggtgcatgtcatcgcatggactcgtgcgattaattatggtggtgataatctattagcagagctgaattgatgaactttcgtatatgtttgtgtgcgtgtatgtcagggattattgaacacatcggagtgtgtttcgatctcttgacgtttaactgatcttctgcttgttgggtctgttttttttctgactgggaccgaaatgcgttatgtccttaggtgcttgatcagac

SEQ ID NO: 113903 - DNA, 415 bp, Physcomitrella patens
  Intron number 1 from transcript Pp1s85_19V6.1 (locus Pp1s8 5_19V6) derived from phytozome v7.0 (chr-ID scaffold_85; p os 111352 to 111766)
ggcactggtatgtgcatctcagagcttgggtttcgctgctttcttctgcgacttacgtttctggatacaatttgatttgagttgcagcttgcaaagtttgatgtgacgtcgaccatacctgggtcgagatttgggctgtatggaactagatgaagggatggtttcgatgaccgaagattattaatcgattcgtgaaagcttctgtaaactactatgagaggctacataattagatccaactatacgtatgtttaaaaaaacgtttccctcaagcaatccacaggtaaaacaaaacgagaatgataagaattaccatgattgaggcttggaaaatggctgattcggtcaatgcgatgataacgaaaggaagcagaatttcggtgtagtttacgtttgtgtgatctgatcacaggtg

SEQ ID NO: 113904 - DNA, 892 bp, Physcomitrella patens
  Intron number 1 from transcript Pp1s201_25V6.1 (locus Pp1s 201_25V6) derived from phytozome v7.0 (chr-ID scaffold_201 ; pos 113667 to 114558 reverse strand)
ggccaagctcgccgagcaggcggagcgttacgacggtacgtgcttaattttttgtcctggtgtgtgtgtttgtttgttttgttttgttttgttttgttttttttttttttccagatcgcgagcttgttgtttgaatctggatttcggtggtgatggtggaaggcggatggagatgtggagattcattgtggcgtattttggttgagagcggggatgtggatgcgaatgcggtgttgatgttgtctttcgttgtggagatttggtgtggtattgtcgtggttgaaactggagtgattttgtaaaaggaatttgtaatttctgcgttttttttgggagggtgtggtgatccattatccgcctgcgagggttttctctgtcacaatcgtcaatgagttgtttggatccctggacgaagtggaatgcgtaactgttcataattttacgtatgctcctctggactgagctgtgtcttagtgggagggtatttacatttcatttttttttttaatttttgtctgtgaactagttaactcgattacatgttttgcgccagattttgtgactctgcgagtggatttgtacatagtgacgggcgtttcgtgtttctcaggggttaagtattattaggtttgtttaggaaggacattatggaaatctgtttcacatatcatggattcttcctcatggttgcttgaatcactacatattattgactacttgactggctgtttggttcagagcccgaccattgctatatttctggggatatacatccactttcgtgattagtaaaagtagtatttgtaggaacgaactgtgcaactgcacgtgatcttttcttggagtcgttgtatatgtccacagctcatgtattgcgttgccaactgcagaa

SEQ ID NO: 113905 - DNA, 353 bp, Physcomitrella patens
  Intron number 1 from transcript Pp1s89_128V6.1 (locus Pp1s 89_128V6) derived from phytozome v7.0 (chr-ID scaffold_89; pos 703592 to 703944 reverse strand)
aagaagaggtggatttgaagagaccgaaactgaaggtaagttacctctggtgttcaaggatttactggattgctggagtatggctcttgtcggatggtacggctttgttttgttggaaatcttgcccagagactttgtgactttgggttaatgtgtttgcaccctttttgatgttggctttttttttttttcttcttatacagatatgcatggttaagaggaagagacgagtgatgcctttgcacctatcagatcagattaataaactcatcgtggatgattccgctattgattctctctattgtatttctgccttttaaccctcgttactgtgcagattctgcgacttgcat

SEQ ID NO: 113906 - DNA, 704 bp, Physcomitrella patens
  Intron number 5 from transcript Pp1s30_324V6.3 (locus Pp1s 30_324V6) derived from phytozome v7.0 (chr-ID scaffold_30; pos 2245240 to 2245943)
agctcgagctggaactccaaagagctcgacagcaggttttttcccttcacatcactcatgtctggccagttacaccaggtttctgtatgtcttagcggctaacgttcaaatgtctatccttgaaggacactgcttttctattttgatgcaattgtaaacctgttgcgcattacaagacggaaggacaattcgtaatcggagttttgattggtgaagcaaaacttgcagctttagtagtttttgtgacaattagtactttctagcttctcaacttacggagtacatagttcgaaggcgtgaatgccttcatgtcgctttgaatgtgcagattgacttttatttttatttccaagcgatgaaaagagaatgaattgctgtcctcttctcttgaaattcatttttattgcttttaagatatttcgatcttttaataagtccataaattcttttcttgactctatttaagcacatcaatccgttcgcgtacatttccacttcagggttcaaagggataaagaacggcatttcttcttggtcaaaattttgtttcatggtcttttagttctgcaaaaatctaaacccaatacacagaattcgcctctgtattttgcaaaggagtaatattttgttcctctgaatctgagtaagttaaatttatggcttccttagcagggtttatatttgggaccttcttcctacagcgg

SEQ ID NO: 113907 - DNA, 888 bp, Physcomitrella patens
  Intron number 1 from transcript Pp1s219_17V6.2 (locus Pp1s 219_17V6) derived from phytozome v7.0 (chr-ID scaffold_219 ; pos 126658 to 127545 reverse strand)
tggacggacgaataaaaagcgaacaagaccttccagtaagtcacgagctgtttagacttttttcctttgatatccaacctgtttttttaatctaggaagatctattggctcagctttaatttattctatcagcatgtacaaagcaggtggtctactagagctatgaaccatgtcgtatctagagtatacccgaaattgctttgcctgagtttttgataaatttaaatatttgaagtgtttgattctaccgtccaaaggtcactgctggatggcactttgagcttcattttcgttttaggtaggagatgctcatagcgatactttccaccaaaccaagttcttgattctgaaatcactatgtcaagattttttttctcgattagtatcagtctttatatgcttaaacagtgcttgaatcctctaagcactaagaagccctcttttagtcgaggttgcatttggtctgtcattttgaagctcatcaggtcttccggagtgccttgcgcggatttcctcgctagaataattaccatcacatggaaatgcatggttaataacagtaaaataacctcggactatgttgcaaagatgtaagtaacataacttcttttcgggctatcaatcatggactccccgtgcatgacctttattacagagtaacagtcctggtaacataggccttagcttgaagtggcgtagtcttgcatccaaatcaggaagagtaacatgcagtcgtgaattgtaggggtctaacaatagagtagccaccaatttgtagtaatcgtcgaagatttgggaagaagtcttgaagaaaaacgatgaatgtcttgattcgttgtgggtgtagatgcagtttcgagcgatctaatccgcaaaggagtgtcacaa

SEQ ID NO: 113908 - DNA, 638 bp, Physcomitrella patens
  Intron number 1 from transcript Pp1s280_13V6.1 (locus Pp1s 280_13V6) derived from phytozome v7.0 (chr-ID scaffold_280 ; pos 77741 to 78378 reverse strand)
gagcaattccgtatcctgcgtcaaaagggcactgagtaagaattcgtgctctgaggttttgttgctgttggagtgttgtgggcatggaattgggtcgcaattcaaatgcgtagcttgttcgactttttttttcgcattttcttttggattaggttgaaatgatagggacgtcattttttcatactttttgtcgtatttaaaacataccctaattgtccatttttctcagctgaagtggtacagaggggtcatccttttgcgccctgttttgaagctgagtgaatgtggtgcatccttcaatgcatgttgataagtagagtttattcttacctggctgtgagtgctggtgaagattaagaaattatcaggtcgaagtgtgaccgtgttggcggtggtaaacttatcaagaagccagtctggttgtttgtaatttgcgaagaacttgaccgaattgtacataaatttgatgttaagaatattttgttggaaccatgtttggggtttcgtaggtctgagtctgttccatgtacttcagtgtaaagaacctcgctgagattggttttgtccttttctctaactcgggagaaaccacttattgtacagatatcctggtaccggtgagtacaacaagaacaaag

SEQ ID NO: 113909 - DNA, 754 bp, Physcomitrella patens
  Intron number 1 from transcript Pp1s433_16V6.1 (locus Pp1s 433_16V6) derived from phytozome v7.0 (chr-ID scaffold_433 ; pos 134291 to 135044 reverse strand)
ataccaccactgacgaagctgcttccaaggtaaaattggcttaattgtggtgagggtgcagtaatgtggcctaagaagagggtcttgtgaggattggaaatgtgctcgccagtgtatgtactgatatgtgagggtaatcacgttgatgctctgtttgcatgctttgtcgtagatcttggtggtttttgcgtgttatatggagaattcactatagttgggtgatgttgtaagctagcctttttttctttttttttttaataacgaatttaggttttcgggagaattggttcgatcgactctacgccaggtgttattggggaagcttggtgataaggtttattagagtccttctagagctcaaccgttggcgtacttcctagaatttcatttctctttgctcagatttgaatctttataatcacaatcggtactcgaggcatttatttccacatcattgtggcaatcgtggagatactgaattgtcacattagcagaattcgctcgtgcttacatctgtaaccctttaattttgtgattcatattacgatggaaaaagtagcttaggtagagcgcgatctgtccgtggggttctatttgaatttggtgagaacggctaccagtggtttttgtaggattaagtttgggtaagtttctggtgttcgatttaggacctctaaaaaatagactctgcttagtagttgtgaattttattttcgtcgtcttgtcgtgtgtattttatcaggaactggaggag

SEQ ID NO: 113910 - DNA, 512 bp, Physcomitrella patens
  Intron number 1 from transcript Pp1s444_10V6.3 (locus Pp1s 444_10V6) derived from phytozome v7.0 (chr-ID scaffold_444 ; pos 39857 to 40368)
tggttccgatcagctgtgagcgatttcgaaattgggtcattcttcacatcttgcatcaacacactgcatctattggtggataaatctagtttgtttgttagtttgtttgtatgtttgttgtttgaaccgtatgggatgtactcttcgttggaaaattaatggaaaatacaacacaacatcatgtcttaatatagacttgggttagatagaataacagaatgtaataataatcatttcgcgtgaacttcaccgacattaacttcggtagtgatcaaaatgtttacatcgaattcttctttttactgaaaatccacgtcgattcgtatacgtatgctgtatacgggcgagaggcgtgtgagcgtgccgtatattcgtgtgcagcacagcttttcccgcctgcggccacaggatcggcggaaatcaaaggaagcatcgccatcctgctgcgcatttgaattcctgggtttggtggcgcagattttcttggtgtcctctacgaattcggatcacct

SEQ ID NO: 113911 - DNA, 649 bp, Physcomitrella patens
  Intron number 1 from transcript Pp1s15_443V6.1 (locus Pp1s 15_443V6) derived from phytozome v7.0 (chr-ID scaffold_15; pos 2498902 to 2499550 reverse strand)
tcgctgcgtctgcattcagcgcttgttgggccgaggtgctagcactgttctctctccctctgggtggttttggtttattgcgattcctcgcagcttagttgggttgggtgaagttgcacacgagtcggattttattgtcagtttccacggattgttagcgtatgagatttttaaaaaaaacaaaacaaaacaaaacaaaaccagtaaataaattggtgaggtgccgattgcggttataatttgtcggatttgttctgttctgtggagatcgtcagttttgagttgctatggttattatttccttgttgggttacacattcctttcattccttttttcattaaatattcttaagtacttgtaattttctttttccttttctttttcttgcgaaattgggtcacatgagagcactcatacatgattttaaacgctttccatgtggtgtttagagcgaggaagtgttcggctgctcagattgtattcttcaattttctaagcaacgatttgagctccaaactgcaaaaataagttcggtcatgagcagtgaatgtatggcgttatgtagattggtattcagtggtgtgggagctaacgaggacgttggacatggcagacttgtacaatccctctagatacggccaaagtgag

SEQ ID NO: 113912 - DNA, 549 bp, Physcomitrella patens
  Intron number 2 from transcript Pp1s6_281V6.1 (locus Pp1s6 _281V6) derived from phytozome v7.0 (chr-ID scaffold_6; po s 2333633 to 2334181 reverse strand)
attggtgtctcatcgtcgactgtgtacgaatcgaggttaaatcatttcacaatttacatttgctgcccaaatgttttgtgtaaatctggttcagagcaacgtcaaatctttgctgctgttcccttagatttctacaatgaatttagtggttgctgcttcaagggtcatttgttcctcaaattatgcttatctttgtgatactttcttcaaaattgaaatcaaggattgcaaggtactgcaggttttcatttttttttttttttttttttttttttttctgccggttggaatggtttcacatctatgaaagcaattatattggtctgattcagatactctttcgcagtagtcaagatatggcttcctgcacggggatacccccatagtagcagttttttgaactttgaacatctgccttctcaagttgaatgatgaatcacacgaaatgtaaaatgaatttcctggagatgtgcttcagaataagcatgttgaagttttaacatttgttttttccgtgatcaaatgcagcccgctgcctaaacaaggagt

SEQ ID NO: 113913 - DNA, 761 bp, Physcomitrella patens
  Intron number 1 from transcript Pp1s44_17V6.1 (locus Pp1s4 4_17V6) derived from phytozome v7.0 (chr-ID scaffold_44; p os 171417 to 172177)
cggacggcgtttgtctggaggacgagcttcacaaagtaagttgaagcagattttaatcttgcagatagattttgccaacggcatgcaatctctagaatcccttgaaggaccggcacttccagttatttgcatttccatttttattttggggttatgattatggatgaagcctctcacctgcaaatatcgatagtatttaatggatgagctgttaggagtcctaaaaaaatatttggaatgaaacttgtgctatttgaaactacaagcagtggtgcatccctgaagtttgctggattgggctcttgctgcacgttacatcagatggcaatgcttcgaaaatgaaatggaataaggcacgaacctatttattttagagaaaccaaactggcgctgggtcctaaccttcggagactcatattcccgatatgcaaagaacccatggttatcttaaaacaggatttgaaatttcaagcacatcacacaatccacaaacaattcagaagatgcaggactgaaacattttctatccataattttcttattctttttaaaatccttagcaattttaaagtttacaagctattcaaaagtatttgtttggtaccatgacccaaactgagtttgttttactcatcggtgatggaaacttcccgcatcggtggtggaaacttgtggagagctttgttcaataattaactgacgtcagtggagaatgtttcaaccatgacagggcttgcgaagcagccaactccgttccagaa

SEQ ID NO: 113914 - DNA, 800 bp, Physcomitrella patens
  Intron number 2 from transcript Pp1s173_15V6.1 (locus Pp1s 173_15V6) derived from phytozome v7.0 (chr-ID scaffold_173 ; pos 125704 to 126503 reverse strand)
ataatcgtactagtacgttcactaaatctggagcttctttctgtttttgaatattatttcgaattgctctcattttcgactttctttctttctttctttctttctttcgctgagaagaatttagagagcatgtgcgctgacaattttagcgatttcaagttgttgcaattgataccgttttgttgaatcatattttgaagtgcgtgcaaatatgcttttgctttgacttcaaacgtcagaacaaaataatgactgaagtatttgagaagactggcttgttactgtgcttttaatgtcctgctctcgctagatggaatttgtgtcctcatgacaatcgtaactaggaataaaagaaaattatatctactttttcttaaggccattatccatgatgctgcactgtaggttgagggaatagcggttcattgcttcttggtctttaatatatgagtagcataggctcttgattaatgatttttactgcagtggatattattctggttcaatcacaatcatctccttgtgattgaccagttcagcgttacttttagtaggggtgttgaagcctatccggccgagattggtaacatggagcagcatgcatgcttctgttttgtttgtgaatatgtctgcgtacattctacttattgtacttaagtgtgcgcaagtccattggtgtaatagagacctctgctggcggctgaccgtgattcttggtttcatcaataaccgactcaaggaccctgtcttattgttgctctgcaggtattccagtcccctcaccaagtccgtcaccctcg

SEQ ID NO: 113915 - DNA, 521 bp, Physcomitrella patens
  Intron number 3 from transcript Pp1s279_37V6.1 (locus Pp1s 279_37V6) derived from phytozome v7.0 (chr-ID scaffold_279 ; pos 152635 to 153155 reverse strand)
aaagacagcagagaatttccgagctctttgcacaggtagactattttgcatgtattctatctttcagtaatctacaaggaaattattgcagtttgtggagtacatggagggtatacttttgaggttttttttttattaattctggaggtggaaaatgaaaccgcatgcttggttgcgtgaaggggttgttaggtgctagatctgagtgtttgtctctacgccgtgttatctctgcgtattactagccgttcttttcttgatatcagcatatacgaattagggatgaggtcttggaagatttttggacttgatagtttgagtggcgctgtttaatctacttatatctttattgtgggtgttgaatgttatggcttttgtgtagctctgatttttttttttttttttttttttttttttttttgtaagtgataacttggtagccatgtttagtagagacagtctcccatgattcagtcattgatttttttttgatacctgcaggagagaagggtttaggccgc

SEQ ID NO: 113916 - DNA, 378 bp, Physcomitrella patens
  Intron number 1 from transcript Pp1s145_130V6.1 (locus Pp1 s145_130V6) derived from phytozome v7.0 (chr-ID scaffold_1 45; pos 847977 to 848354)
ttcttgtaaacttgtctgctcaatttctctaaaacaattccattcatggctacgtaagttagtggcacttcttttgaattggatacaggagagggaggaaacacacgagaagaaggggattctcaacttgctagagattgcatcgttagagaggtcgttgaaggtcgtgtatggaagacatgttcattttcaaattgatttgagcattttgcaatgtcgtaaaccagctcgcatgaattatttgaaactggatttggtttgatttcaaggtttgaagttcatgcccttatcggtgagattgattgggatttttccctatgttggtttggtttatgagctgcagctaggtctggggagcgctctggagactctctgcgg

SEQ ID NO: 113917 - DNA, 325 bp, Physcomitrella patens
  Intron number 3 from transcript Pp1s62_113V6.1 (locus Pp1s 62_113V6) derived from phytozome v7.0 (chr-ID scaffold_62; pos 843187 to 843511)
gtttttggcgagtaagtcttggaagatgcttttttgaagcaagggctgacaaaattgtagtcaatggttgagattttttgggtttttggtttttggtttttggttttttttttttttttattgctttatgggtacaattatctgctatccaatgtagggatcacaaatgaaattcattgcagtgatgccaagatcggcatcataattcgggctgttaaaataatggccgcccgatttgttcgcattgaatgttcagcaccagacacagagaagatggatgcaaatcgtgattttcgtctctttcttgaatgcagggatcattaca

SEQ ID NO: 113918 - DNA, 563 bp, Physcomitrella patens
  Intron number 3 from transcript Pp1s101_1V6.2 (locus Pp1s1 01_1V6) derived from phytozome v7.0 (chr-ID scaffold_101; pos 4090 to 4652 reverse strand)
gtgtcggtttctaccatttcaggtacctctagcctcaaaagtttttgcttaggacttcatcaatttctgacttggggttcaatccacagtatacatcaaacttattacttcggtagcatatgcttggggtagttcaatataaatctgtcttgccgtttcaaatgcaatggattatttaactaaaaattgcatttagccctgctcttttgccattgaattacatattttgaaattacctatgttgtgatcgtggttcactggtctgcgaccctacttttttctcattttccatgtgattccactgaaaagacagtcaatagatagaattaaaaatgcacttttcctcccttgtcagatgcacttccttttcaatatatgataaaccatctgtcattgtgattattatgaagcgggtcttaggtattttcttcaaattttctgttcggagaacttgttgctcatttcgctgaagtatgtaaataaacattaggaagacggtgagagtacaatctcagtttcttttgaggatgcattagtcatgttatccatctgctttgccagga

SEQ ID NO: 113919 - DNA, 567 bp, Physcomitrella patens
  Intron number 1 from transcript Pp1s101_1V6.2 (locus Pp1s1 01_1V6) derived from phytozome v7.0 (chr-ID scaffold_101; pos 6590 to 7156 reverse strand)
cgtcactctgtcgctagggttcgcctgcttttcaggtattgctcttctccctcaaccctcacctcctctcttcttcgtctcgtgcttgcttactcacactctatatctctcttgtgctgctaccctaagttctggtgcatctgtttactgacgtcttctcaggtcaactgaaaatcgttgcatttatatttgtacaatcattttactgcacagcatgtgggcaaatgagagagaattttggttttttcgctttcgctaagagttttatacttttcttttccatttaaagatacactgcacatgagacgttgtagcaagcctcggatgttcaacatcttcactacatttcaccagggttatgagtatacccagctcctttttcttgcagggtcaaggtgatgtattgctccaattctacatctgcaagcctgtcgtgtcctcctatctgcttatgttcttatagatagccgactttgattcgctgtggcgatgctatactaacgctaggatgttgttaatgttttgttgctagaccccagaagtgccgtcgtgtttgaatacccgaag

SEQ ID NO: 113920 - DNA, 538 bp, Physcomitrella patens
  Intron number 2 from transcript Pp1s22_279V6.2 (locus Pp1s 22_279V6) derived from phytozome v7.0 (chr-ID scaffold_22; pos 1671553 to 1672090 reverse strand)
aaaaatcaagagaggtcagtggtttcttttcatcacaagaatctacgaatttcttagatgtttttgttttttgttttttgaggcattcgagtgtgaggattcgaaaatttctgaatcctctcggctttatagatttgaaacagggtgatttgcaaccaatactcttatagttctttgcatggaagccggaagacggatttgtcgaaagagtgctctagattttcactggaatggcttcttcgaatttgaagtaacttttgtactcttatatatatatatatatatatatatatatatatatatgtatatattgttacttccaaagaattctaaaaccaagttagattgtcaggccatgtgcctctcttgccagtgatagattgaacccattttgtgtgtgttgaaatttcggatgtgcttcagtaattatgtagagtactgttccccatttttcgagtaggctgtgtagcttttcttccagtgaggtagaaaatatgaatgaaatcacctatttacaaattagtgagtatttttcagg

SEQ ID NO: 113921 - DNA, 751 bp, Physcomitrella patens
  Intron number 1 from transcript Pp1s49_243V6.1 (locus Pp1s 49_243V6) derived from phytozome v7.0 (chr-ID scaffold_49; pos 1871328 to 1872078 reverse strand)
gcgcgtggagtcttcccgtcggacctctactctgggtatgcgctattttcgtcgttctatgggattcctacttgaatttgaattctttcgtagatttggactttgctcgtaatggcattatcttgttgtctttgaacgagatatgaggaattagacagtagttttgggtgattcgacatattgtaagcgcattggcagtttgtgttggttttatttttgtttatttatgtagagctttggctttctcatcccgtcagtagtttggggattttgggtgtgtatggaaatttttaattggtggtggatagtctgttaatgcgctgaaatttacctttatccgttcgagaatgccgagctctcgaatttgagtgcgtcggtagtcctaacccctgatatttgactggcgaaacgtgtaaggaagagaatagtcttttgcgagtgtgatgacggccagcttagtaggatgacagttccaacgcaatgcgcatttgcatcacggtctctgaacacaatgtgattcacctactttaaagctgcgttgctttgagagaagaagcgtgctactgagtatggttgattgttttgttcgattttaactactggggtatgtaacatgctgtatcctctgcattggataagtcgtgtttcttgcagcgataggaatgggtctttgtggagcgcaagctgatatttaagtttggatgttttacatgcagagatctttgcgttgagtagcaacgatttcaggaat

SEQ ID NO: 113922 - DNA, 1034 bp, Physcomitrella patens
  Intron number 1 from transcript Pp1s49_256V6.1 (locus Pp1s 49_256V6) derived from phytozome v7.0 (chr-ID scaffold_49; pos 1940653 to 1941686)
tcgacgaggacgacatcgcccttctcaaaacctatgtaagtgcccatgtccttccttttcgcagtttttgcgtcatttgccgcaaatttggacccgcctcgagaacatttagtgcggcctcgatgtagaatgtgtgtgattttgattgcgcattacgttgtgtacactgacttcgtttgaaaaaagtattgatcgatgacttcaatctcgagggacgggtctgtgtggatgtgggatcgcctcccttgcggtggtcgtgatccagggttacaaagtaatatgtaattgaggggttttactctggcatatgtgtctcagttgcggtgcgtggttgctgggtttctagaaaattgatgtggcgacacttttgtgctactttttgaatctacagtagatcagacatcggcaggggtttgtggtggtttttgtttttgattggatatcaccagcttgtgttgcttaaaccttctagtattgaaatctgattgattgtgttgattccgtcagtctttcccgtttcagggattggttctacactttattagggttgctactcacacacaaatgtttgatgggcttggagtgtaaaggaagagtcggttcgcacgtgaataaagatttgaagctcgtgataaattggtgataaaagacgagtttggctcgtcttttatcgacctgagttggaactgcactttacgaatacttgatggaactcttgtaccctactgcagtttcatttttctatgctagtcttttcaggcgcagattcatttcgaaacgctttcgagttgtcatgtcgcactgtctcttcgaattttcaatgtgaaacgtaattttttgagatagtcatggtttgtagacatcatcaggactttgttcttatcatttgtcgcttatgagtttttccgaggtttagggtttgcctggcgatcgtcgcctcaatccttcttgaaaacgggtagtctctagggtgtggaaatttttgttttatcaataattatgtgcgtggttggatctgcagggcttgggtccat

SEQ ID NO: 113923 - DNA, 245 bp, Physcomitrella patens
  Intron number 2 from transcript Pp1s44_183V6.1 (locus Pp1s 44_183V6) derived from phytozome v7.0 (chr-ID scaffold_44; pos 1223615 to 1223859)
ttgaaggtgagccttcagacatctcaagcgattgaatattctgcaagtgactaattgttttttcgtttgaataatcgtgtcttaagagaatgagaaatgcattttaaagtttgaatatgctttcttttgcttgtttttcttttgcaagtatttgatgaaaataaatcttccaaagaggttgcaaacattgaaaaacaatgacaaattggtttgaaacaacatatttttttgttcaatagatttaa

SEQ ID NO: 113924 - DNA, 720 bp, Physcomitrella patens
  Intron number 1 from transcript Pp1s2_734V6.5 (locus Pp1s2 _734V6) derived from phytozome v7.0 (chr-ID scaffold_2; po s 4502654 to 4503373)
catactggtcgcacagctgcagagaatttctagtggtgggttttctttcggtccctgttctttgcgcttgtgttggagatagttttgttgtttgtttctgaattcaagatatttgtgccaaccaagtggaaagatctcacgtccttttttgatgtttcgggttggacgtcttctgttgaaaaggcacgattcgcttgaatatgaaatttggatgttgacagagagatcgctttcaggtttgtcagctgcttgtgattggaatgtgcgatcgatactcgcaacctaaatatttcaatgtctgctgctttgtctatggctgtttttggttttgttctagctatttgaggtgctgatttaggatatctttgacgacatcgaactcgaaatgtaattgagagatttgttcctctctttggttgtgtttccactttacatgtctttcgggttccttgaaaagatttatcctgtgtatgagttacatgcacgatcttgcgtttcgttatctaacgcctatctggccgcgttgcttggtgcatctttgaaatcactttttctccgcaccaactaattcacaatatatcttgtaccttcacattaatttcaactttcgatttcttcttatctgtaaatgacccaggggtgatgtggacttagcctgctcatggctgattcgtgctctattgatgctatcatacagaaagataaccaaacaatcctgca

SEQ ID NO: 113925 - DNA, 855 bp, Physcomitrella patens
  Intron number 1 from transcript Pp1s4_346V6.1 (locus Pp1s4 _346V6) derived from phytozome v7.0 (chr-ID scaffold_4; po s 2555341 to 2556195 reverse strand)
tgactacaggtccctctggattagttgattggaatgtaagcaccacgaatcactccctcgttcagattcgttactggtgtaagaatctttgcagaaactgtcatggacctggttgtgttgcagatctgttcttttatgataatgaacttcgtattgctcattttgcttttccgattattttcccttacatgatcctgcccaccgtacttattctttgacctaattcacctagtttaatcgaagaggtagttaagacacgtcgagtacatgctatatataattggagttatttgggtatgcaagagttcatcaagttgaagtgcacagctcacagaaaacgatgttcatttcatgagtttgtacatgaatttaataggcctgttccaatttttctattattattattgtctttgtatagtgccttatcgtttgaattggatagagatagattaaactgcaactgtgtagctgcagtttaaacgaggttcttaagtggcttggaaactgaggtagctaagttctacattgttggaagtcattcatgttttgggtaaaatactgttcaccagtagcatgccgcttgacaatctgtgaattgatttgcaaaaatgaataagattttacactgtttacagcgtttgcaatctgtggtccatatgctaagatataattctaagctgatacatttgacctttggtcttcaacctggacatttggcttactgatagtgtgaagtgttgcaatttagatcttttgtgcaggtttgtagtgatgagtgtcaggtgatcaatgaatattcgtatgttttgttttgttttgttttgtaggtagtcaagaaagagcttcaaaatattg

SEQ ID NO: 113926 - DNA, 858 bp, Physcomitrella patens
  Intron number 3 from transcript Pp1s18_240V6.1 (locus Pp1s 18_240V6) derived from phytozome v7.0 (chr-ID scaffold_18; pos 1795214 to 1796071)
agattgcgtttgaacaacatcgacttagcgacgaggttgacctctgaatgttagtcttaaaagtgcagataattgtgtctacgttacatttgtgtgcaccgcctatgtatattttcttgtggttaatgcattcgtcaacatgaagtatcaagcattgcactgtaagagctctttacagtagtgaaagggagcgattcagagtaaaagaacttatcaactatatcaagcttagagactcccgtagtcactgtcacctaagttgcaatctaggcatcatcagcaagaggagtttggaagggacatcatatcaatttgattgtcattcatgaatttctgtacgtttctcttagtgtaactacataaatacaatgcatgattacacctttagaaatgcatttaagggcttctgtcgccaaggatagctgtgtaagaagtatctatgtcgtgtcatcaacattagacgttgaaacaaccccttctgaaaaattcaccggatactacaaccagaaactaggttaactagtaggtgcatgttactcttgcttgataccttcatggagaatgctgaacattaataccttgtacaatttttcgtgtaattacgagggatacaggattagagagaaacagggctttaaaggctgacagtcttgctcatgtcaacacctggttacgtacctcacgtctggtggaagactacgtaatttgatgcgagacttacattacgaacttggacgtttcatatcgcgagatgctggtatttctttttgcaagattttaaaactcacgggatattcaatttgcgccatgtagtctaattatcgccgtcacaacatgtgcaggaacacaactgcgaag

SEQ ID NO: 113927 - DNA, 607 bp, Physcomitrella patens
  Intron number 2 from transcript Pp1s66_181V6.3 (locus Pp1s 66_181V6) derived from phytozome v7.0 (chr-ID scaffold_66; pos 857953 to 858559 reverse strand)
tcttgaaagctcaaaatatcactcggatcctcaatgtacgtgcccctcttcatttcatctttgcaaccgttgattctcaaaaatcgatatcccctcgtagaatagtattaccatcccatgggatgttgacggttttttgctaacattttttttttttcactttcaatattttagaaagaaattactgaataagaggggttttatgagaagtatgttctgtctaattgcttgagcaccactaaaacatttctcgcttgtatctacaggcttgataataatgcttttatgccgcttatcagtatgaataatttgtctctcagttagagtactcgtacacagtatcattaacatgaattcgattgtactcgtgctttttgggctgtaatccaaagactgaccaggggtttaatattcaccactgaatcggtttagtctccttagactgggcgatttcaacaagatacacactttgagcttgttgcgtcatcttcacagcgagccttccatctgattatctgtgatgtctcattacatgcgctgtccaacgaacatggatgtacagcacttgtttaaattacccaatttgcttcttgcagactgttccaac

SEQ ID NO: 113928 - DNA, 875 bp, Physcomitrella patens
  Intron number 1 from transcript Pp1s235_57V6.1 (locus Pp1s 235_57V6) derived from phytozome v7.0 (chr-ID scaffold_235 ; pos 241720 to 242594 reverse strand)
aggtttgtgagctgggttcttcgggattcttcgaggcggccctcgtttgggttgctttgcttgattttgtgtacggttttgctcacgtttgagtgttgaatgcttggttgggtcatgtgtaagatcctcggtgctctgcacgttgtttggtttcattggtgtgttagtttgtgggtgtttatgaatttgagtttgcagatttggtgttccaagagcggttggctgtttgggcggggtagtgtgctgatgaggctgtgtgttgcgtttggggtgggttctgtggttatgttgaggatggggaattaagtctcgtgtttctctttgtatctggtgtgaatggatttttactgtttacccgacagtgatttgtagcgacttgaataccttagaaagaatctagggtttgttattcggttcagtggttgtgacttcttatttcggagttcttttgtggatttcaacatattactatcttatgtccgtgttttcctgagctttattatgtggtatgtcgagaaggtgtctgttctatatgaagtttcgtctggcagctgtcgattttcaattttagatagaatgtgccttcaggattattcacaattgtcaggtttaaggcagggtcaattcgcagttcggtgttatagatttcaatcaaatgtgcgatttgctatcttattcgagtacatttctcttagtccaagtgctttgccccaccattcttatgtgttagcagcgtctgtatgagcttttctatgatatggaaatgattcaactactcattaactggtgtagctcttgacttgtgatatatttttctctgattttttgttgtgaaatcttgttctgcagctcgaaggagaaaccgacacttgggt

SEQ ID NO: 113929 - DNA, 779 bp, Physcomitrella patens
  Intron number 1 from transcript Pp1s221_23V6.1 (locus Pp1s 221_23V6) derived from phytozome v7.0 (chr-ID scaffold_221 ; pos 295049 to 295827)
ctacttgttctgaatcctctccattgggcggaacactcggactagcgagatcgcagatcatatctgcaactatggactcttttgagagagagagagagtagagtggtaggatgtgttgttgaccccatgacctcctacatttagggacatttttctgctaccttagcatattcatgagcaagttacgcgaccgtaggtgcaccgaatagctcgttcagtgcgtattatttatcctcaacattgtttacagaattactcgttctgtgatacactcgtagtggtggagattgaggaagatgtggctcctagcgcccgaatacgcggtgccttgatttttattctagtccatatgtttgtttaatgccaccaaggttagagtagacagtttctcattcaacggggtcttccttagcagaaggcttatccgttttttgagttcgtgaatggtgtgcgttcatatgctataatcttgtttctattgtcgcccgtgacactggagattcaacacaggtaatatttcatttgcagacatcaatgacttgtgtaaactcacaactacatgtacctgcatgcgtgactatgttttctctattgcctgcatgtgtacctgcatgttttctctattatttgcatgtttttttcagtggattcaaaaatgacaggagttactaacaatgagatctggatcgtgagtctagacttagtgataataatcggagacattacacacattgcaatatatgctgattataaatttttgtgacttttgcagcctgagc

SEQ ID NO: 113930 - DNA, 479 bp, Physcomitrella patens
  Intron number 1 from transcript Pp1s438_10V6.1 (locus Pp1s 438_10V6) derived from phytozome v7.0 (chr-ID scaffold_438 ; pos 73930 to 74408)
gcttgaagcgcgtcctcgacgacactacatccgaggtcagtttggctcttctttcttcactttcgaaagtgcctgattttttgctccggaatacggtgattgtgactgtagtttacagtttaatgcggttcttatttgagttttttattgggtccatgtaaaattgttttggttcttgatttcttagtgctgatcgttgctggctccagaggggttttagtatagatcggattatgttattaggtcaccatcttgttttgctgtacacaccacgtcagccaagattgggattatttgtatgttgtgatgagagctagtattgtgttctgaaaggttgctctttttggtgtagcatagaagcggatggaagacttgtatggaaaatttacctggttatgtaccgttttttaggtacttccacggtatctaactgcaagtcgtgtggattatgggtttgcaggtagtacttgagcggggct

SEQ ID NO: 113931 - DNA, 596 bp, Physcomitrella patens
  Intron number 1 from transcript Pp1s12_149V6.2 (locus Pp1s 12_149V6) derived from phytozome v7.0 (chr-ID scaffold_12; pos 902970 to 903565 reverse strand)
tgcacaattcgcacacccttcagccgacttgtaagacttgtacctcccccctcctccgattgatactgccgtttgtgtgtgttgatgtttcctgcattgtgtttgtgggttcagggttttgatcagccctggtgatgatgaggttctccggtgttctgtggggtgcgctgttgcttttcgtttctttggagctaggggattagttcgcaagtttggagcccttggttgggattgattttttttttttttttgcttgtttgtttttatttctgtttttggtgatgtgggttgatttgtggtggtttgagctgcattttgctactgcattgtattgttaactgggttgtgtttctcagtgaatcgttgtattagacatgaatcatggactctttgggtttttgaggattagtttttgagttgaattgggattgtgaggtgcgcagcctgtacagaagagaaatgctgagctgcttagcgcgcttggaggtgatgatcccatatagtatttgttcgatggcaatgtttgtctagtccttgtacatgtactatcatttttgaattttaaattccttttacttgacaggtgcagaagactt

SEQ ID NO: 113932 - DNA, 276 bp, Physcomitrella patens
  Intron number 3 from transcript Pp1s101_225V6.1 (locus Pp1 s101_225V6) derived from phytozome v7.0 (chr-ID scaffold_1 01; pos 1172678 to 1172953)
ctggactatactgtgcctggaggtgtgacctcttctctcccatcacgtttagaggccctccgatctatttgaatcgaaagcacacctaattactgtttgtttttatttttttatttttggttttttgttggtctgttttatatgaagctgttccagcaaggaaaataatctgtggaggcggcagacggtttgcaaatgttagcatttgaatttcaactctgatacattggatcttttgcaggaaaattgaacagaggtttgtcagtcgtccacagc

SEQ ID NO: 113933 - DNA, 601 bp, Physcomitrella patens
  Intron number 1 from transcript Pp1s77_208V6.1 (locus Pp1s 77_208V6) derived from phytozome v7.0 (chr-ID scaffold_77; pos 1149630 to 1150230 reverse strand)
aggcccttcttcccgctgtctacgaccaggtcttacgctcttcatctcttccttttcagacagcaagtttacgaatctgtaagtgtaggcctgtgcttaggttgtgtgacgaatttggtattcttgtatttgcgattgagttgctgattgcccaaccttgtggttccaatgttatctcggagttgtggctgattaggtttgccgtgcgccactagctttctgagtcctttatattcaggcatcgactccggtattatccttggaattgataatcacaacttggctcactgaagtagaaacagtgtgtgacaatctagcacggtgtagtcaatttgggttagtaattttttgagtcaagatcacgcaatacaactgtgcaagacaaggtgcggatggcttggaacacggccaggaatgtgattttgtcctgaaatgcccccttatgttggaggggagcttctgaagcttggatatactcagattctttgttttttacatcttagggcttgaactgaacggattctttcaaatttttctaaagtagtcatcacccttggcacactcaggtgggaaaagcttttggagtaacacctgcagcatt

SEQ ID NO: 113934 - DNA, 960 bp, Physcomitrella patens
  Intron number 1 from transcript Pp1s15_391V6.1 (locus Pp1s 15_391V6) derived from phytozome v7.0 (chr-ID scaffold_15; pos 2245215 to 2246174 reverse strand)
caggtgcccccttcttggtaagcaagtctgaaaaattgcagttgtatcggatatgcctgtgcagttttcttagcagcaggcttgtgtgcgtggttgatataggttagtgtccagtggagattacgagtatttgggttttagcactttctgtaacgaagaaccgcctatctctttgaaataacctatttgtatttccatctgcagggcttacgaatagtacttcgttgcaagtgtggagtttgattgctggcgtgctgctcatgtagcttaatcttgtctgtggttactggcatttgagccttcaaagaaaatcgtcgctggaggtatgtgaggcctttatcgtcagcagggaaaatcgagatacctttactgaagacgtcgataatttagtatgaatgctttggtattttgggcgttttttggggggttttttttttggaagcattgagggagtgactttctaagctacattcctgaatcaaaggccctcagagtttgtttaacctggaactgtcaacctataatcttccagctattttctctgtctttgattttacggacgtggtccgttgggcttgaaaagtactgtttccgagacaattacatttgattatatctttattgctcggggttaattgaaagtgacttgctgtagtgctgctaggctgaaagattacttgatgtcagcttattgccagtcaatttcatactaagcattgcgcctatcagtaacgtatggaccaaacctctcctgagtattccttgaagtcaagcttgttgcaagtttaaaacagtgtagaatttgcactcttacgaatagggagattccgtagttgaccaagagataagcttattctgtatagtacacaatacctgattctacgagacgtgtcaaagtgcacttattaacaattttctgaagctcttgaaggatgtgtggtatgcttcaggcctccaaaa

SEQ ID NO: 113935 - DNA, 771 bp, Physcomitrella patens
  Intron number 1 from transcript Pp1s290_19V6.1 (locus Pp1s 290_19V6) derived from phytozome v7.0 (chr-ID scaffold_290 ; pos 325749 to 326519 reverse strand)
gtgaaaactccagaaacttcatcacggtcagttcatcgtccccttcgaccgtgttaggatctggcgattggattcgtcacagggttcattaaaatttgtctctgctgtagagcttgaggttggtagtgaaattgaacttagactaagagggtgagcttcagacgagtagtaggagcagaaatgtaaatcctatccacgcgcgaggctcttcttcatacaaagtgtgaaattaggacctctcacgttgtttcaccatctgaacggtacagttcattccggtggttcaaatgttgcaatggaatcagaagaccggctcgaatggtcgttctattccagttttagcatgtcagtgacgaagtacgatgcagtcattgctccaagtctaaccacagccgccttaatcataccttactgatagcagagcttattgaacgcagactgatttaacaagtttgaacgcattatattgttgggataccgcttgaatcaaatcgggtttgaaaaaaccttcaaaccttgaattgttttcccgttctgaatacatcaacacttcaccaagccacattagcttacattttgttcaattcatcaataatcgaaaattcctggccggcaatagaatcgtagtcggggcaattcatagttcagcaagttggaattttacgaattcatctttttagatgatgtttctgcaaatgagattcgtagtaatgcagatggtgtgggtattttgcaggatcggccatccacgcgaatccaagctgctccagg

SEQ ID NO: 113936 - DNA, 867 bp, Physcomitrella patens
  Intron number 1 from transcript Pp1s343_3V6.1 (locus Pp1s3 43_3V6) derived from phytozome v7.0 (chr-ID scaffold_343; pos 34907 to 35773)
gaagtcgacaacacattaaaaggtaaagatacacttcttattacgttcatgattccagctcttaaagacgatagtaaaaggacacctataaaagtacactttgactttagctcaggtgtaatgaagataagatatgtatcatcatatgctgtatctgttgctgagcttgttagcatgattagtgctacaatctgtattgatatacaacaagatgttgaagtcacaaacatagagttatctgctaacataacagaagagaagccagatttagagctactatgtgatgttgtaatgaacgagcctagactatgtgagatcttttcattaagagaaaaaactcttccaatatccatgaaagtcaagtattctttgtacgctaaacttggaataataacattcaaaagaagagaaagcaagactatcacaatatcaaatattaagaacgaagaacatatagatgatattatagatcaaatcctattcttacttagtgtctacaatgaggtaaaagatgagtttaacaagttatacaacttcatagttgaagaagagaagatgtctaaacatcgtacacgaacatttgctttaaaagaagaagttccagagttgtttgtatctggatatgcaagagagtgctctattaaaccaataataattgcagaactagaagaggagaagtataagtctgaaggaagaccaactatgagatatcccaaggatggtccgtactcaagagtatatgcttgtgacataggactattcccaggacttaaaagaaacagattgcctaataaagatatgtttgagtttcttccttgttgttatgctacagatcatcttaagagactacaatctaactattacaag

SEQ ID NO: 113937 - DNA, 497 bp, Physcomitrella patens
  Intron number 3 from transcript Pp1s15_221V6.1 (locus Pp1s 15_221V6) derived from phytozome v7.0 (chr-ID scaffold_15; pos 1362640 to 1363136 reverse strand)
atataattggtaagtattaaattctaaatctctcaatttatgtatgtttttggctaggtagaaatgcctcgtttctgcaaactgatttcttattgtattttctttttcataattgtaatttaatacccgaaaaattgaagagaaggggaaatgagcttcatctggtcttgtttagtgatttttgttctgaagatgctcacattattacgaagtgttgttccgttctactccaacaagttcttgcgtagtgaaagatccatcaatgagaggcttatagagatgcctacgtagagttactatttttgagtctctcaactgttggcgtctcaaactctactaattttgctattatttccagtctctcctcgacaccctcagaaatgagatttctcaaatgttgggattacgatactaattggaaggttttctttgctcttaaccctactcacatacttgctgcagaatttaattttcgacccggtgcacgcgttctattt

SEQ ID NO: 113938 - DNA, 518 bp, Physcomitrella patens
  Intron number 1 from transcript Pp1s359_27V6.1 (locus Pp1s 359_27V6) derived from phytozome v7.0 (chr-ID scaffold_359 ; pos 174622 to 175139 reverse strand)
gagctggtttacttgcagcgagcttcaaagtacaggtcatttctccagtctcatctatacccttgtcttgtgttgcaagttatcattgcagttgtggaagccgtggcaccgcactgtgcttcaattgtgatgcattgtagtgatcgtgaaactgtgtttcgcggtttgataatgtgtgcagcacatcatatccgtatctgacctcttgactccaatttgtttgaatctcgccttcatagctataacttggatctgtgaacattttctaattaggcgctgtcattggaaatattttacaagacaactctccgtacgtaatagtttttatatcccgtattttgtgtccaatgtttccccgtgacattcgctaatcttgtcaacacttttcgatttcgaatattctttgctttcatcgggacttgaggatgtttcttcacgagtctatgcgatctatcttttgagttgttgaaacttcgctctgttggattgatctttgaatgaatatgaaacaggtcaac

SEQ ID NO: 113939 - DNA, 694 bp, Physcomitrella patens
  Intron number 1 from transcript Pp1s163_89V6.1 (locus Pp1s 163_89V6) derived from phytozome v7.0 (chr-ID scaffold_163 ; pos 679643 to 680336 reverse strand)
ctgtcatttccatgtaagcagtggcaggctcttggtcagcatgagttagggtctcccttcaaccagacgctggtgaggccaaggtgtggattctggtcgattcgtgatgatcgtccttgattacaatctcctgggtcaaattatggcttctttgaggtcgacttagattttaagacttcatctagtgttacagcgggaaaattttggaagttggagcaatcaaaaaatgacccaaatcacgcgaaatgtagtttcatagcccttcgttgcaagtatcaggattgtttgtaccttgtacagtaagttaatgatatgatttgtcgatacgcttacggcatgtatgttcagcgctaaggaactttgacgcaccgtagatgaggcctggagtgaatttatagcagagaactggagagttctgcgggttatattactgccgtgagaagttctgagtagataaccatgaatggtgctgtctactgtatttcattctgaaaccctgtctcgtttccattctttgaactttgtctaatgagagaatgggtggattttaattttgtacaaatcctgaatgtgtaccgaaaagtcagaaaagaaaaataaacaccaaaaagtgaatacgaagaacatgcaaggcctgaatgtggctaattatgttgcaggaaaagcgcagaggcgacctgtactcgtttctcta

SEQ ID NO: 113940 - DNA, 565 bp, Physcomitrella patens
  Intron number 1 from transcript Pp1s12_178V6.2 (locus Pp1s 12_178V6) derived from phytozome v7.0 (chr-ID scaffold_12; pos 1093492 to 1094056)
tctccaagagatcaatcgtgtgtaactggttttcggtaagcttacggatggcgagaggttggaagctgtttacatgacttacctgtgtaaagttttttttttgttttttttaatatatagattgtgttctgtttacgggttcccaagttggttgattaaacaaacttcaataggactctgtttcttgatgtgaattctgcaatagttgcgttatgggtcgtgagattctgcggtaatggtgattgtactaactgagatcggatctatgattggcgtggggggaggagttgtggaagggtggagggtggggtgttcagtttgattgaagagatagtttttcttctaaattttgaaattgggtagctttcgtggatgtcgagtcgtttggtgaggatggattgctaatttggcaatcaagtcatcgtcctgtgaattctatgttttctcttagctagaggtgacaagtccttcaaccgcctgaaattgcgatcgttggttatctaattttttgtggctttgtctattggcagtttttagattctgcagtacttaaaaagacaaggaa

SEQ ID NO: 113941 - DNA, 1049 bp, Physcomitrella patens
  Intron number 1 from transcript Pp1s217_42V6.1 (locus Pp1s 217_42V6) derived from phytozome v7.0 (chr-ID scaffold_217 ; pos 301187 to 302235 reverse strand)
tgaacttgcaaaactccgagccagcaggatcggtggtaaggcatctgtttttagccatttcagcatattcgatgagctgtggtgatgtatcagagtctcccagttgtgaaaatggaccgaagcaatctgacaatgcttttttcctgcggactaaagttcactcggtttctattgttaactttgtcttgtgcatcagtcggcaattgctgttgactttaagggaactaggaaggcagtgagctttctgcaggattgctaaaagcagagattggaacagttttttttagtctgaatcacttgtgctccaatcaccgaaccagagcaatgagttgatgtctttggagccactaggtccgaaagacgcaatgaagggatctaatgcagagttacatcttcagccaacagcccttttgctacgtattatgaattcaaaatcactaggtcatgacaagcaagttaaaaccttgaaatgatcctaatgaccgaaggcggcttttacatcagaaagtttgcacaaaaatatatttgaaaccacatggaattcgagttggagggatctgcaaagatatgtttcattatgctttactccaaacctatgatagatgacatgttttcattaattcatagtagaagtttagaacttattttcaaaattttagatgtaattctcttattattattaatgtagacaacatctacacttgaacaaatatagtgaatatagacaactttgagttgatgttatggatagcttgaaaatattttcttgttacttcctaccaatgtttggaatattgcaaaatataaagaacattttttccctcattgaaagaaagtattaatcaacgaagaagaaattgcatgcacttaggattttcatgattaatgatactatcactagaatataagtcgtaggtatagagtcagcattgacgttgttatcctcgaatttcatctcgtctaggtaattgcttaattagtgatattgacgttcttgcaaacattgttcaatagaggtctgtcgtggtgaacttggaaagaaccttgca

SEQ ID NO: 113942 - DNA, 572 bp, Physcomitrella patens
  Intron number 1 from transcript Pp1s12_316V6.1 (locus Pp1s 12_316V6) derived from phytozome v7.0 (chr-ID scaffold_12; pos 2195401 to 2195972)
cggagtggctctcgaagcaaggctttccaactcaggtgcgttgtgtacaccccgattccgtggcttagatagtgagtggaattgttatatgttggccatcggttttggaaattattgataatcttcaaaaatgcttctttcttcaggtttagatgaaaattataaattttattttctacatgtgtgattacaccgttttaagtcttggcggttttaaatcaccgtacatcttttgaagtctaggggaggagtgcctcaaaattatatttttctattctgcttgcgtctagtttgttgtctcccctttgcattgccaatcataaacgttgtgcccaatgaactgatagacttaatctgtgggcagtgtgaagtgccgatcaatgaatctctatgtaatatctaattgttactcagactggagagagaattttaggtcgcaacatcaaaacagaagttgaagttactgtgctggacgtttttctaaattcagattagtggataacaatgtatgataagtttgtggtttccatcacacaggacgtgatactgacaggttttggagaggagggtgt

SEQ ID NO: 113943 - DNA, 854 bp, Physcomitrella patens
  Intron number 1 from transcript Pp1s42_156V6.1 (locus Pp1s 42_156V6) derived from phytozome v7.0 (chr-ID scaffold_42; pos 1335938 to 1336791)
cctcgggtgagtctcacgctcccctttcccgattttcatcttcgattgtgatttggctgtgttgggttggtgttgggtttggagcctacctgcgtctgaattgagtctaatcatccgccgttgctgctgcttctggtggtatttgggtctcgatcttgggacagttgcggaatttcgttaagtcatagtgttcttccaacgatttcctctgtcggtatcgttgcggaggtatcttgtgtcccgtggtgtgatcgttgtgagatggagcatagttttcaagagtgtggaccgcttggtatctttggatcactttgtgtttttttttgagcacgcacgggcttcgtttgcgtcgcagttgatgtttaggcaactttacatcgtctatgtggttttggattgacggggacagaatgggttcgagtattggtttaactgctgggcacttttattgatgcctatttttttttcccgattgttggcgtcagtttagacgatggatcatctttttttagaatcactccggatgtagagtgatggtccatttgatgatgtgctatgagaacttccacttacttgcgggtttcaaccgagttgtgcttgagcttacgtatctcaggtcccccacctgtgggttcggcttaattgagcatggctctatatatcgtaagtacgattgtgaacgtagtatgagcttctagagttatattctgggcacgagtactgttgatttgattacttaacattgtaattagcagctctgtgattaatttctgcatattcaatgttatcctgaaagcatcttggaattttttgacgcaggattatacgtaaggaaaggcacaaggaaattcaat

SEQ ID NO: 113944 - DNA, 727 bp, Physcomitrella patens
  Intron number 2 from transcript Pp1s18_45V6.1 (locus Pp1s1 8_45V6) derived from phytozome v7.0 (chr-ID scaffold_18; p os 199608 to 200334 reverse strand)
ggtattttgttttttattttttattttttattttttatccttgttgtttagacccaattgctgaaatggctcacttgaacccaaatagttttttccacgaaaacctagttcaacgtatcagacactccagaagtgggttgtcagctaaaatcagtaggatttgtgcgtggagcaattgaggtgataaagtcgattttaaactcgtttttctttctccgcttagcattaattgtgaggagttgttttagttcattgggttgacgtttcgtacattctgaatgtttatttggaagcaggctagtggatgcatcaccggaattcagaactactagtgctaattttccacttccctcatctgtgttgtcttcctttttgctttgatgtcgttcccagttaggtaggaaagatcttgatgtcgtgatgaacattgctctgcagtgctcaagagattcaatgcctatccctggaatctggaacctccccccccccccccccccttgctggtatccaaattcattagatccacaagcaatctcccttaacacatgtaatcagaacacaaaccaagtggaaagaaacgcttgctttgtccctctgaaacttccacagattgtttgcatcgtttatgacgccattgatgagagaaacttgaagagcttgctcgtgttttgatcttgtttattttctccatgattctatgcagaagacgctgataggcgaagagtcc

SEQ ID NO: 113945 - DNA, 595 bp, Physcomitrella patens
  Intron number 1 from transcript Pp1s300_84V6.2 (locus Pp1s 300_84V6) derived from phytozome v7.0 (chr-ID scaffold_300 ; pos 518819 to 519413)
tgcgggtggtgttctggatctgaagctcacctgaagtaagtaatcctaatcctaactttgacgccattcggtttggggagtttgtttttcaatcctcttgggaaggatcgaatttgagcaaaccggatcgtctgctcggtgaattgtcaagttgaccttagacaacagaatctacgtggttgtgatagcttgaacttatatctcagtactctggtctagattctttgtcgttttgtatgtgtagcagtaggcggttgttgatcttggcttcagtttgtggattctccatccttctagttacgcctgctattgatgacttggtgtttaggtttttcgtgctatcgtcagatttagtgttactagtttcccgcaaggtgggtgtttgtttgcggtcgctgtgtggcccgtattgttcttcgttttcaagcaatgctttctcaacacggtgctaagacctccattctttacgatagccagttgaagttgtggtttcttgtctcttttctttaattgcgggttttcataactcccttgtcgttgctgtcactggattcggaaatgattttaaaagaggcagtttagggttcggggagag

SEQ ID NO: 113946 - DNA, 1058 bp, Physcomitrella patens
  Intron number 1 from transcript Pp1s60_129V6.1 (locus Pp1s 60_129V6) derived from phytozome v7.0 (chr-ID scaffold_60; pos 818077 to 819134 reverse strand)
tcccccttcacccgcagttccacctctatcgccaggttctccctcttccccctcgtcttcttcttcttctgtcctcatcgcgatcgcattttattctatttttacgtatctgaatttgctcgtctgtttggtcggggcaagtcgtagtgtggctggcgaatgtttggtcgctctggatcttttgtgttcactaggttttctctcgattacggtgagattttcgcgattctcgttacctgcggcggggtagcgtcccggattgaggttgttgggcgttgggttttcgttgtttcaggggatttggtggtggttgaatcggattatagaattagggtttgttggcttttggattgttggatcttttctctgattgggtacatgctgggtggaggtttcattttttttgtatttttgttttttgtttctttgtttttttttttgagttttttttgggggggagggggggagcagtcggttgtgtattgcgtggtttgcccttttgtgtgtaaaattagattgtggaccgaggtctcggatgctgtgttctggacggtgtgctccaaatcgtgcccttgatggttctgcgtttgttggaattgaaatgtactaactttgtactgacgcctgtttctgtgtggctttcggctgactggttctgtttttaaattcccgtgtgtaaacagaaaattgtgctgtagcaggctaaaatgtctattgtgcgtatggtcgttttctcgagatcagtagtagagtacatatgatgaagtgcgtgttcttatcctatctttttgcttgaatagcagccttgtgattggttaatcgcgattcagtgcgtctgcagctgttttttgttcgcggtatcacacggctgtagaaaattttaaatgtgctgatttggaagggcttgatgtgtatctcgttttctaccttgagttgagctggtgaacagcgtcggaaggtggcctcagattgtcaattgtaactgtgttctcatttgtgtatcgatgtgcgcaaactgggcagaatttagagacttttcgtgctcaagagtgcggaag

SEQ ID NO: 113947 - DNA, 733 bp, Physcomitrella patens
  Intron number 2 from transcript Pp1s162_133V6.1 (locus Pp1 s162_133V6) derived from phytozome v7.0 (chr-ID scaffold_1 62; pos 674524 to 675256)
acggggattgtgcgttcatcaatcatgtgtcttatgtttacaccttgaatttccttcgccaggtttgtaggattgggctgggaggtgaattccatggaacatgcatgatgtcaatgtatcatttccaaaacatgacctgaagtaggtgaaagaaatcgataaacgcgcagccagaattgtgtccccgttttggtattttagtgaccgcttagtctttctttgacttaccaaaacggtgtgtgcaatcattccccggaatcatccaattcagtgatccatagttcatctataaatgtgatcgaaagaaattagtttgattggttcttatgaaaagctagtgtttaactacaagtatctgcctacaacaagttcgaaaataccacatttttgctgatgcaagctttatcctgagacggattgctgtcatacaatcttcttggctggagcctgggctggcttgaagagtctgcgtaatcagtaagtgacaaatgtggagaatgtttacattgtaagagtagtacaggaacttgtttgtattcttgatttagtaatttgctgagtagttcatgtgaaatagccgcacgaataattaaagggactgagtcatggcgtactcagaatctgcattggaacaggtcctggtacgatttacagttgtgtagagtctatgctgatttgtttgcaagagagtgccaatgttaatgtttattgggagcttcggctcacgcagagg

SEQ ID NO: 113948 - DNA, 764 bp, Physcomitrella patens
  Intron number 1 from transcript Pp1s176_100V6.1 (locus Pp1 s176_100V6) derived from phytozome v7.0 (chr-ID scaffold_1 76; pos 666622 to 667385 reverse strand)
aatactcaggtatgggtgaattcttattgttagatgacatctcatttatggatgaagttttgtataaagatgaattcttatcaatggatgagaatatctaaattgagtgatgattggaggtatgattttttttattttggttgcttgtgttaagttggactaaattgagggagttagaagggtaggtaataattgcaattcattggatattaaaatttggtggattattgcatggttgaataagctaccattagggtggtaatatttatcttccaagaatctaatctagtttttcatcaatcaaatactaatatttgatgtgtgcattttctcataagtttaatattaaaatttgatgcttgcatcttctataggtgacaaggccatttcctagtaataaatttgaacatcttaaagcactatttccaattcttctttgaatcatggctaggttggattctacaactcatacttcagaatcaatgttgccaaatgttgatggtgtgggtaatgctctttccactacaaaatcaatatgtcgagttcaaatggttttaataccttagtttcattattgtgcttctttttacaatatagatagtgtattttactacaggcatgttttttctctagttgtaagtaatgttgtgctagtctttacaatgtctttttgattgtattgacaaccgtatgatttaatattggtccatggttatgaaatacgtgcagatcatactcttggtggagttgtatcaagcatatat

SEQ ID NO: 113949 - DNA, 751 bp, Physcomitrella patens
  Intron number 1 from transcript Pp1s47_206V6.1 (locus Pp1s 47_206V6) derived from phytozome v7.0 (chr-ID scaffold_47; pos 1279540 to 1280290 reverse strand)
tttcctgcacaaggttgttctactcccttccacctctctttcttctaatcatctatttatatttcaaatcacgtgtacgtacgttaaggacctgattcgttttagtccactaatactatcagtttaccgcaatggaaggttacaggttttgttttcggttctttcgattttaagagcgtgggaattaggatgtagccaggatacgtgcgctagtgttatcttctttgctctcgtaaacggagctttgattctattttgtgaataaacacacaatccttgaccactttgcgaagctgtcgatctaaattgcaagacttccctcgaggtacatgagcgattgctgtactacgggcggaattaactctgcaacttggtcacaaagactaaacgtgctcagtggtaattttacctttgatgacttttttctcgtttagaaactgataagtattctgtgcaggcattgctgtattctgctgggcaggaatccgcttggaagatttgtaagacgtttttcaagtgttcgttcggtaccagatttatatgtatatatatatatatatatatatatataaaattaagattactgcacctgcgtgggagttagttgcaacatttaattagatgatgattcactttcgctgattatggacagtaatcgactctgttcacttctgtgatgaaattgggatcaatgaataccgacgactctgaatgcgaggtgttgatatctacaggtcgatcaattgaagca

SEQ ID NO: 113950 - DNA, 345 bp, Physcomitrella patens
  Intron number 2 from transcript Pp1s221_60V6.1 (locus Pp1s 221_60V6) derived from phytozome v7.0 (chr-ID scaffold_221 ; pos 560413 to 560757)
cgcatctcggtatgtatagtaagtccaaaggaatgggacttgccactaaaattttctatggagtagttgttgtcaggtttaaattttttatcctcatttgtctgtataattaaactcagatagtcttcagttgaatgctccatatgtggaatatagaagaaaaaaaaaacccagatcttctataccctctcactgtcgtgtataactcgcaaagcttgcgagtatacatgtgactgcacaatgtagaagaatcatgcgtggaattcttactaacatcaatctaatttcgtagcaattaatcaaacgtgtacgatggtctgtaggttctcttggcaccctgccctc

SEQ ID NO: 113951 - DNA, 391 bp, Physcomitrella patens
  Intron number 1 from transcript Pp1s294_60V6.1 (locus Pp1s 294_60V6) derived from phytozome v7.0 (chr-ID scaffold_294 ; pos 359139 to 359529)
gagaggtaaaatcacacctctgatatctcacccctaaaaagatatgttttcattttcagaagagtgatgaaatatctgtgaaaatttcccttgggtagaatgagtctattaagtttctgagttacagacgaaagggaatgaatcccgatattttataagatttgattatccaaaaaaaatctccaatcgtgagggagatatattaaaagaagattctacgaggttcgagagaatgtagatgcttctgattcatcccccttttatctacttttttccattcttatgttgtcgtcgtcgagatcaccagctgttattgtttgtttcaatatctacatgaagttatggatgcccatgtttaacgaagaataccttgcctggatacttggagaaa

SEQ ID NO: 113952 - DNA, 546 bp, Physcomitrella patens
  Intron number 1 from transcript Pp1s244_64V6.1 (locus Pp1s 244_64V6) derived from phytozome v7.0 (chr-ID scaffold_244 ; pos 472198 to 472743)
cagatgctggtgaataattgtcacaaccttgggatcattagaaagcaaatggttaagaacattgcggggtagcaacccactgtcgaagaaaatgaatcccaatgatcaaatttatgaagaaacccaatttcacccgtccaccaccttctggtgcctttcatacacattctacactgatcaagtaaccataacacaattcccaaaaaaacacaaaaagaacttagtaatcacaattcaataaaaccagaaagggagggagatagggtgagcacgagagagagagagagagagagagagagagacacaaaggagatgaagaagacgaagaagaatcatcaatgcaccactataagcaagttcatggacaacattttcagagacgcacttaatcctcttctgcagcttactcatcttgttgctcaagaagccctttttaaataccacaaagtagaaatcacacaagaatagcagtgcataacattaccactcaaagcggtcgcatttacatatgaagacaaacggatacatgatcttgactgcagtaag

SEQ ID NO: 113953 - DNA, 802 bp, Physcomitrella patens
  Intron number 1 from transcript Pp1s51_168V6.1 (locus Pp1s 51_168V6) derived from phytozome v7.0 (chr-ID scaffold_51; pos 1060782 to 1061583)
gtcactgttctcgttccaaggtctgcatcgaacggaaatacacccgactcctaattcctcagctaacacacatttgacgtgtaagaaatgcaaaaaaacaaaaaaaacaaaaaactcaaatcttactatttatagtctttccatgtctagtctcttgaatgttacttcgtaaaaaaatagcttcattttgatctgattaaactttccaaagtgcggcttttatcatgcgaggttaggccgtgagccttgacacccaaataccgcactttttggtgcaaaagttcgggtggtgatcgaagtgcatactaaacgttatctctcgccgcattcttgattgatttgtattgggtctcacgtttttcgcaactgtgatttttcattttgatcaatgctgaggtttgatttaacatgagcatgaaagcgagtttcaactttgttagagtagatcagaacagatcgcattcatcaaaacaatgggcattgacaagtgatgtgtgcttcttccggagctcttgacgccatttgaggttttgagtatagaccatagctttgcgttgtgaactttctctccagtggttgtgattgtttgtgtgtctttcttctcatggttgtttcacttgcatgttaggtgttttggccttgttggataatttgggcaggtgactttgtgtgctttgaaggaaacactttgggacaaacttctcgcttgaaccacactcactcgcaagttatcaacatgaacaaattatatatgagagaatgttaaatgtaaaaagcccccacatgctgctgcaggaccctc

SEQ ID NO: 113954 - DNA, 999 bp, Physcomitrella patens
  Intron number 1 from transcript Pp1s15_49V6.1 (locus Pp1s1 5_49V6) derived from phytozome v7.0 (chr-ID scaffold_15; p os 285536 to 286534 reverse strand)
attttggaagagggagctttgcggctctgattcaggtatgggaggtcttctaccatgttggtggttcaaggtagtgccttgggatgcttgatggaggagattttctttggtgattcgctgcggatagacgtcgaaattatttttgagatttcagtgggtgtagtgggtgcggtgcggaggcggtcctgatcggcactactggaggtcgccaacttgggcacgcagatcggctacgccaagtaatttactgggaggatccgcttgtggtgctgtggacggattattttaggtttctttcgtagtacgggtgcatatctggctcttgaactcgtgcatcttatccttttagcaaaagttttacctgctgccttccacttgaggcagcttccccatgagaccgtagtccaattctgctcactactgtgggtttttggtcctaaatgggtggaaccttattcgtccaattgagcttcttcaggttgttgggcgggtactgtaagcctggtgagattttttgcaatttttcggtcggtagttttgtgtgcatcctttgtcggctgatgtattcttctcaatcatgcgacagttggcgacttattggttcttggttggtgcatttttgaactatttttagtgtcccatccagtctagttccatagaggggttaattcaccagatacgatgatttctgtgcaacttattcgtgcaagcaattcctcttacactctgtggtgttttgaaattataattatattgttgtgtgcagaacatttcaaaacaagagcaacttttaatttcgagaggttgtcagcgttgagagtagagtgattgctcaaaggctcatccgaattgagcactataactggacgcacttgggcacgtttgatggtttcagtgcttttgatgttctgaattaaatgttcttggagcttatccagcttagtatttgggaagttccggtgctgctaaagtcttaataactttcagagacttcagaag

SEQ ID NO: 113955 - DNA, 485 bp, Physcomitrella patens
  Intron number 3 from transcript Pp1s207_95V6.1 (locus Pp1s 207_95V6) derived from phytozome v7.0 (chr-ID scaffold_207 ; pos 633503 to 633987 reverse strand)
tgttgatagtcaacacaacacacatgtatggttttctacattcaagaagcatttttgcgtcttttgtttgtcctggtgcttatcaagtttaaattacctggggcattggtgtgcattttcaagtgattattctatatctcactaaagctaaatgcgttggacgcattatgaccttgatgtctccggttaatcttagaattatatggagttaagaggctgttcttcgagactgctagtatctagaaagaactttggaatagcagtacctatagtttgacctttaaacgcggagcgaatgtctttgatctttgtcttacgaaccaattttagctcattttttctaattttctgaatacgtttcgagcctgctttcttctgaactgttagtaatttgcatggatttttttttttttttttttttttttttttacttaaacgtgcgcttcttgttttgtaggtattaaagctaacaattgtgtaagagc

SEQ ID NO: 113956 - DNA, 864 bp, Physcomitrella patens
  Intron number 1 from transcript Pp1s123_157V6.1 (locus Pp1 s123_157V6) derived from phytozome v7.0 (chr-ID scaffold_1 23; pos 1099106 to 1099969 reverse strand)
ttcagcgcctcatcagagatcgctttgattgcaaggtcttagctcgccacctgcacttaatgtagaaattacacttctttctgttccttctcacagattcagggagcgtgttcgcatctgtgccggttacataaattgtcatggaaagttcgatttttgttgcgctatgcgtgttcgtcagtggctttggagccaaatacacttttaagttcgaaaactttgatgtataccttcacaagtttccgttatttttaacccacttttaaagaagcgtgcttatttcttgggcatagatttgaattgcacagttggcaaagggtattgatcctggcaaggttgctctcaatctgtaatgttcacggccttcacatgtatctcgaatttctgaattagtcagttaagatggtttgtttaaagcagtgctgaactgcaatcagtactgtttacacagcattattgatctagcaagagagttaagtgaacacatgaccgctattcacacacatggctggaattagattcgatacttcagaggctttcctgctggagactggtagcatgtgaagatttttaggtcgtatccttctttagatgctatcaaattgtcagtggtgtggcaatttcggtctttacgatctttcagttgcccagctcaagatttaatgctagcgcagaaagtgggcgggcaatgcttccatgttacgtttatatgagctgtttacttcagtcatttggacaaatttcgtttcgcgttttcattcttcatgtgaacgacgatctggttggaagtgctgtgctctattaatgcggttattttgcttcttaccaggtagtgaaatttggctctgtaccactgaagacata

SEQ ID NO: 113957 - DNA, 493 bp, Physcomitrella patens
  Intron number 1 from transcript Pp1s58_281V6.1 (locus Pp1s 58_281V6) derived from phytozome v7.0 (chr-ID scaffold_58; pos 1813449 to 1813941)
gcagcatattgtaggtgactccacgtccaccctcttttctttcccgatttgtgacctatacccttgcactctcgtaatctgtatgaactggagctttttgatcttctggaatatttaataaccttgttcatttcacttcgtcatgacctgttggatccatttcttcgtggagaattttaactctagcagtccatttttctaatgggcctgcaagtttggatggtatagagattctttgaatgcaaggtgtttcaagaatcttagtgatcagtagctcttgacatggcatatggttgtgcaaactctatcgggataaattggaggacaggaacttgctctttgaatttgcaatactcacggtccttaaaatactgtgtttcgttctcattacagaattgtgttttgagagttatataaatgctgttttgaggggtttgggattgggtgcttggatggtgctgctctgaccacaggaagaaatacttgatcgaag

SEQ ID NO: 113958 - DNA, 1020 bp, Physcomitrella patens
  Intron number 1 from transcript Pp1s387_60V6.1 (locus Pp1s 387_60V6) derived from phytozome v7.0 (chr-ID scaffold_387 ; pos 335518 to 336537 reverse strand)
agcttgtgcacaacacaagtgaggataaattggaggtaatttaagtatcttttcaattcagcttagcacttgaacactccggttatctatatagaatatgatccaattacaagtgcaaaagtcagcatgttcttaaaaacttgtggaggaagatcgcggaacgagcgagcataaccaggaacttgcacttcaaccgaaacagaatcaaagaaaaagacagtccactcgtatatatcatgaggaaaagctgtacttattcaaaatctgaagtatcctcaaataaaaagacgcagttcttcttttttttttcttttccctcgttttttaacatgcacacatttcgagccttaggataaacttgcatccatcagtctcgcaactgcagattcgcaactctagattcgcatcgtggtcaagtctcgcatgctgcattctacaataccacttgtgaacatgagaagcccagaaagtggttcattgatgttataagagggaaccggttcctctcaaaaaaatccaggaatgaaacgaaacaatggcactaagcacaaaaatatcttatttctgctggagacgtaattcccacttaacaggcggagctagatctcactgagggcaaaaacaattactataattacacaagtacccaaactaccggtagagtagaaaaatcacaccactgtttctaaatgatgaaatctgcactaagcacacaactcaactcatcaaatatgccgaaacagtgccaaatcgtgagcccctgatttctgggtttgagctaaacagtctgatatccctatcaagttccttgtctcctgcttcagtggtcaaatttaggccagaaacgccgccgagtgaagccctgacacaaagccccgcacaagcaagtaaccggaaaccaacagatcagaaggggtcttcagaaagcagccgtaaatagaaagcacttgttaactggtctctgttgtatttttacttaaactaggaggtcttgtcagagctgaagaaaaagaatagcac

SEQ ID NO: 113959 - DNA, 902 bp, Physcomitrella patens
  Intron number 2 from transcript Pp1s387_24V6.1 (locus Pp1s 387_24V6) derived from phytozome v7.0 (chr-ID scaffold_387 ; pos 134645 to 135546)
cttggagggccgagtaagtgttgccatagacaagtgctgtcccgtgtgccttaaaggaatacaagaatcaatcttgcatagattctgagaatgtgagtctgcgaggaaggcttgggaatggggggtgcacatactccagcgacttgtattacaaaccgatcaaaggagcgaactcagtcaagcaaggggaggttttaccaggcctaacaacagtcaggaggggcaacaaagtaatccgatcaacacagcgggggtaacgaatcaggaatgccgctcgcaaatttccatccatcctggaaacactgcatctacgcttatcatatcccacgtcgttttaaaaaagtaagtcgcatgcggatgctactgcgaggggtggttctgtagatactatggatccattgatacatggacgggaggaattcggcctcagtcccgcattcagaattctgtgccgcatgtgctgctgagcatgaaaaaaaatattagttttagtccatggtctaatagtctcatggacaaaaactgaacgtaagtttaaaagtaagtccacagccactctggatgagacgcgaattcgcccccgaaagattcaaattcaaagcgacaaaaggggcttacagtacctaaacttctcagatcagtgtaattttgacagtatgcacgatgcacttgccttctgctgtatccgcactttgaatatagtgttgatactacaagaaaatttccttggaacatatgaaatcttattcccgcatcaagacacaatcttccccaacaaaaaaccatatcatttaattttaatcagaagttcgagctaccttcattgggcattgttataagaagcatagccagctcaactcattatacattttaaattatgttcgtatcctgtttgaaggtta

SEQ ID NO: 113960 - DNA, 592 bp, Physcomitrella patens
  Intron number 2 from transcript Pp1s197_28V6.1 (locus Pp1s 197_28V6) derived from phytozome v7.0 (chr-ID scaffold_197 ; pos 135970 to 136561)
gttgaggtatattctgtgagcaagctctttcaattacgatttaaaactttttaaaccactttatttctttagacccagcttgggccggtgtgagatccaggttcaaaacacacgagattataggaacttctgtgccattgctgtcaagcgtcaggggaggaagctacaagaacagttccatccaaatcaaacgcagcagtgcaactattaatcgtccgctcgtttcattttcatagaggagagggtcaatggcgtggctggacactgaccggcattagccgtattagctgcagaaaccacgaggacacctattggctctcatgtaggttaattggtaaaatttgatcattatagtggaactatgaatagaagaggatcactgttacataactgcttccgtttcttccaccaagtactttatctagaaggcttgagacacgtattttattaagcctaagtgtttaattcagttatgttttagggtgcttgttgaggatcttgaagttggcttgtcgaagtaaacttcttctgaagttaatcttggatgatggtgccagacagtcgctcttttcaagtcgtatttcggaggggc

SEQ ID NO: 113961 - DNA, 540 bp, Physcomitrella patens
  Intron number 1 from transcript Pp1s66_6V6.1 (locus Pp1s66 _6V6) derived from phytozome v7.0 (chr-ID scaffold_66; pos 36382 to 36921)
gaggtaattacacctcgtgcatgtctctcaatcctactcattgtgtggtaccgtggtctacatcactacaaatcaaatgcaaacgtcccgtattaaccattggtgtgtagtacatttattgtaggaaaccacttctgctggacaattcactcgaatcatccaaaattcattcaaaattagcgaaacaaagagtcacaagacgttaagaaaacctggtaaaagagaagcgagcagaagcaaaacctccgattcttatgtcacccaaacatatgagcttggtatagcaggaaaagcagaaaagaaccctgcatctgactcgtgaaggtgatgcaatatcacattatgatctcgtaatagatcagttttgtgcatgctaaatcagtcccggataatcataagtatatccttgtgtcgataaacgatctacataactctctacttccatttttccagaacgctcatgcacacaatgctctcaaataggtttctgccactggacgttcagttacaaagtgcacctgaatccctcaaaaccaagct

SEQ ID NO: 113962 - DNA, 714 bp, Physcomitrella patens
  Intron number 1 from transcript Pp1s396_19V6.1 (locus Pp1s 396_19V6) derived from phytozome v7.0 (chr-ID scaffold_396 ; pos 127165 to 127878)
aggtatcgtctcttttggcggtagttctatatcattcatgcttttgcgcttcgggcttaatgcgtgcactatttaaatcttatattagcccgatccttctcaggcttctatccgtagtcaatttggtattagcgggcgacaagagtgcgttattcatctggtcatcacaggtggaaacttgaatcaactgttatcttgggaatcgacagaaagatttcacaagttgtgaaacctatgcagctaatcagccatgtgcggtgccacaattgcttctgattctacaatgcaaatcatactttgaaatgatagattttgaaatggtacatcacatgaaggataagagggtagacttcggggtggaggcccacgctactcagcagtaaggcttcatcattctgcgaaattggtcagaggaacatcgcataatcgctatactttgtagtgctactttcacgagagatgtacaattaatctttgtgacacagggtgaaataagatttttatttattcatttttctcccccctttctgatttcttagtttcagttggaatgatttctgaatcaaagcttgcaagaggctgtttctggaatttttcttggaaggatgccagtttactgcatcttattgtccgctaagaatttatccccaacttttgatgcttccttctctggtcgcaggagactggcacatcgggtgttgacacaacaattac

SEQ ID NO: 113963 - DNA, 937 bp, Physcomitrella patens
  Intron number 1 from transcript Pp1s213_133V6.3 (locus Pp1 s213_133V6) derived from phytozome v7.0 (chr-ID scaffold_2 13; pos 693268 to 694204 reverse strand)
ggggtgccgggtgcattgaatactgctgcatttaggtactttgacggtatgctggtcgctggccgttgtgtatgattgagtaggagaggtactttcgaggtgttttttatttactattatggggcagtaagttagcttacctattctgccagagagggagtgtgggaatgatgagagccagtgacgctgctgctctctgcccctctgcttggtttttgttccctcccccctgcagcagagagtgtgttttcctttgctgtctgtgacagaagcctctcttcgatgtggatataggtggaagagcttgtgtggttgccactgtccgtttcggaagcaattatttggatttttttcgaggtggggagtgtcataagggatgtgatggtttttaattgcacgagtttgttgaggagatctgcattggggcgatgttggttgcgcccgttgaagtgtttggctactcgtgaagagttttcgctgttttttgtagttggtgattgacccttgcggtaacacacagacagagaaagagtcagagatagggggcgaaaccgattttgcacaagtaatcggaagcgagtattattatcgctgcggcaggtcttttgcacaaggtcttcatagtggagctcgatgttctttgattatttgttttgtttttattgcttaaaaatgaattacattgcggatgtgctcattttgagggtgaaaacgcatgcgtttgtggaaggtcaaacaattagttatggttttggaacgactagtcgtcctggatagtttttagaccaggactaggtcgtgatgaggtggagcgattggggtgactcttgagtggtcgtctttgcgccatgtgttttcttttctttcttttattatttgttttccttagattaatatatttttgggagatgtctttgcgttcagggtttttcgggaa

SEQ ID NO: 113964 - DNA, 598 bp, Physcomitrella patens
  Intron number 1 from transcript Pp1s44_262V6.2 (locus Pp1s 44_262V6) derived from phytozome v7.0 (chr-ID scaffold_44; pos 1672422 to 1673019 reverse strand)
ccgctggtgaggacccatctgcaaccttttcccctagccaaattttattgcaattacgtcttgatttgtaatttgtatttctcttttttgagttgttaagtagaattcctctggcatgtgtggtgggaagtctggaggactgatcgcaatcgaaatggtttttctttttttctttttttgttgcgctgaatttgagttttggttggggaatcggaggttctggtgactgagatcatgtattgagtctatgagcgtgagtgggagaggtcgaagttttttggagagggggatctgttttgggttttgaactccctcccccctgtgcttctcctttaggtgatcgcccatgattttctatcttcggacggtcgttggtgaattaatttcactactgttttgtagtgtattatttggatatggttgatgtgaggctcttttcatgggctcggtttgtggattttcgaagggagtgtggcagaagtttcttagatggaggaggcgatcgtgtcataaaaattcgcctcgcatcttacatgtgcttcaatcttcttggttgatatcaggtggaactgtactgctcgctctaaaattgggtacc

SEQ ID NO: 113965 - DNA, 725 bp, Physcomitrella patens
  Intron number 1 from transcript Pp1s327_24V6.1 (locus Pp1s 327_24V6) derived from phytozome v7.0 (chr-ID scaffold_327 ; pos 175372 to 176096)
acaggacttttacggggaaattgacgatacactaggtgagcaaagctttgtaggttttcgcgacgtagagtttagggtgttttctgtaatcatcataatctcagggtcctctaaaacatttcgttggactttatcaaatttggtcttgcgcaatttaagtatattcaggaagatatgcttaattgctaggtaacacatgttaactgtatccgaacatccgctttaggggtcttcggtgtgcacacctctgtcaagagttccgtgcacgaagttttaacggtctcatctgctttcaagctaacagagctttcatgataaataatctcataggcgagagttgtagtaaggttgtatccaatacctaatcatgtcgggattgaacataatgttgctcaaacttttcgttgcgatgatattttgtccggaaagaaactaggcggttgctataacaactgtggacatagagaaatggtttttctaggcttgcttggagctcacagcccacgctgggtttagggttttcatagacctgcatagctagttttaatctcgacatgttctgtctttgtcatcaactcaaaatacaacatggaatacgtactcccttttttaacaaaacatctgtctcatgtatataatctgtttatggtgaattcgtttttaatttcattgtggctttatgatttccctaacaggtgggattgaagagaggtacgaggaccacg

SEQ ID NO: 113966 - DNA, 322 bp, Physcomitrella patens
  Intron number 1 from transcript Pp1s213_128V6.1 (locus Pp1 s213_128V6) derived from phytozome v7.0 (chr-ID scaffold_2 13; pos 667501 to 667822)
tttacttcaaacgaggcgaatctcttgatttgaaggttcgattcatttcatacagtttgtccttttctttttttcttttctgtaaaaacaattattaggatgaacatgtataagcgtcattatcgattattacgtactgtcgtcttgatggttgtaattttactgcagtctgttgtagtgggtgcaacatttgtaagaagcccaccatgctgctgaagcttgcacatgttcatcctaatttgagttcttttgttagacttggccggtttcgaagttcctttgttgatacttatgtgtttatttttcatatttatgaaggagt

SEQ ID NO: 113967 - DNA, 989 bp, Physcomitrella patens
  Intron number 1 from transcript Pp1s109_205V6.2 (locus Pp1 s109_205V6) derived from phytozome v7.0 (chr-ID scaffold_1 09; pos 1124254 to 1125242)
acgggggtagtgtctcgattgttgcgttttttttcgtgttgttgatgatggcgtggtgtggaaattgcgagggcaattaggaacgtttgagttactgaggatattaaagcgaatcgcggcgtgatcgtttaggccgacttgattttgttcctgtggaggtcgtttctttgaaagcgatagttcgagggggtgaggagtgcagtttgaaagctggtgcaattggttacgttagctaccatgcacttatcggttggtatgtctttggtcctgtttgtttagaggtaccgtgtctcggtgcacgtcagggtcggagagcgctgtagtgtgcgtttgtgtgctatacaattgtgggagaatctgtgtccctcctgccgtaagtaattttgagtgactcaatttggcttgtgtgtgggaagtcgttgcgttgaatttttattcagacgatcaggtcattggggtacttctcgggctgcatgtgttgagagaacttagctattcggttttgtttcttgaggacctattttagactttctattttagggtttatgaccctctctgagtacagtcatcaggcgttctattctacggaacaaaagacattcagtggaatccatgcagtatttaatacttcattaaattgcttcctgcctgatattcagttattgtctctgtttctagtcaaaatagaaaagaacaatgatgcatcggttgttatcctgaaacttcaaaacctgtgcgataatttatgaattttatctcaagtgtctatatttagacagctattttcccgtttactctttggttctgttgccgacgcaatctgcatgttgtcgttcttgtttcttgtgcttatcagcgttgcatttcttgcttccttcgattgaccagtttttctgaaccgcatgttgtaggtggtgttgaacaatgtgctcttgctgtggtttggatgtacagggggctgagcatttggcttcaaacgaaaagtttcc

SEQ ID NO: 113968 - DNA, 466 bp, Physcomitrella patens
  Intron number 1 from transcript Pp1s7_379V6.1 (locus Pp1s7 _379V6) derived from phytozome v7.0 (chr-ID scaffold_7; po s 2286595 to 2287060)
tggacttgttgctggcggattttaagctggattgagtaagttgcgcgaagtgtcggaatttttcgcgatgatgctgttcctttgaacttgtgttgattggtttgtgtttagaggtttggttgggataaacattcgtctgcgtgttgcttgatcttcgtgagcagaattatgctttttgatgaagaggagggtaaatttacgtggttgtggaattcattccgtagaaagaattttgagttccttttcttttctttccttttctttcttactaggtttctattacttggttacttgattattgttctgtcatgtgcaataatcttgaatatttgaggatcacagtaaatttctgagatttatgagagtttttttctagaataattctaggtttgaagtgacaacgatgttaatctctgaggtctgacgtatagtaatctcgatcagaacttgtatcctgatcgcgaca

SEQ ID NO: 113969 - DNA, 501 bp, Physcomitrella patens
  Intron number 2 from transcript Pp1s7_379V6.1 (locus Pp1s7 _379V6) derived from phytozome v7.0 (chr-ID scaffold_7; po s 2287286 to 2287786)
cagtatgtatcaacttccttttatacttggcacggcactctggacacactaattgcttgatgccttgcttgattgtggttttgctgctacttctaattatgtgtggatcacaattaagtgtctaatgaacatgtaatgcaagggaatgaaattgacgctggaagatgatttgttcaactcacaggttgaccatttgaattattctagagagcatactcacaaaaaattcttcatatggaatttctatgttttgtttttttttttttttttttttttttaatgtaacgtacgcttcagtcaaataaaaatacgagtcatcattctcagcactgtcatattcttttctgtttagtattctgctgtaattgtgtcttttagcgtgtctttatggaatctgcgtgatgaccaaagcgtgttgctagacatgattgtttcttgtacttactagttctgccagtcatagtggttcttaaaaaataatctgaacgtgtatgcagattt

SEQ ID NO: 113970 - DNA, 819 bp, Physcomitrella patens
  Intron number 1 from transcript Pp1s32_20V6.1 (locus Pp1s3 2_20V6) derived from phytozome v7.0 (chr-ID scaffold_32; p os 129304 to 130122)
cgctccaccagggcaagtgcttcaagtcgcgaaaggtaacgtttcgatcttcaggcgtgcgcagatcactgtaaagttgctctctcgcgatcattttacagcgatccgatgtttttgcctcaccaggatgcgatccgtgggggatcgtctggaaattcgcatttgaatgcgacacgagtcgtaccattttaccgtttcgaaaaaagattccgtggaatcctttagcgattggaaatgctacaaacttcgtagacgatcgttggcataggatccccccccccaatcctctctccagtagatcaccgtcttgcttctctctaccattttctgtaaactaagcaagccgcgatctaagtaaaactgtgatacttcgctccaatgcaaaagagtacgaacaagcttttttgcttattccatcctgtgtccactccttttgaagccacctcagtgcggactacattttctgtctttgcaaaggaattcaaaccttaacctgtcacttgagatcatatatagtgcagtatcgtatggtgtttgtcttgaaggtgactttcctcctgtgcgacatttaagatttgtagatgtcgaattccatgccttttaataaatatctataccagcttttaaaacattaaaagttctgatcctcgatcatttgaaaatgggttatgtttgttttattaagagccatttgttcactgttgagctattagctaatgttgactgtgtccgatgagagtgtcttgtgcattagctaatcaggggagggacaatggagttgcagacgtccgggaattgcttactgatagccaactttac

SEQ ID NO: 113971 - DNA, 677 bp, Physcomitrella patens
  Intron number 1 from transcript Pp1s113_134V6.1 (locus Pp1 s113_134V6) derived from phytozome v7.0 (chr-ID scaffold_1 13; pos 716940 to 717616)
gcattgcggaattcttgccaccttcggaacagcaggttcttcttctcgatagccttaaatttcgtaaatgtcacttgacttctttgcgtattggcaggtcaacattgcagcttagagatgtaaacactattctcagtccaacataagaaaagtgaaatcacatcaaattcagctcagctagtgacgataccttgtagcagggactttcagacatttttccatattggggtggtttgaaagagacccttatcattataacaaccagtttaaaaaattatctgattcatgaagtttgtgcgcagacttaaatctgtgacttttacggagtgggttttttatattattcagaaacaacgtatctaacctttaaatttcgaacttagaaaattctacaatccaggtggtaggagaaatgtgcatagatatagattgcgctgtcgtctgtccatgtcgcggtgagcatagttgagttgtatggtactgaccaccgcgcgcaggagtgtgcgtctgtttcactgtgaactgcaatataacttactgtttcattgaagtgtagaggattgtaatatctcatcttagcttcaaactttgataagatagacctcgcttgcttatgcactgtcggatgccgttgttttgcagaggcgagactcagatttatctactgttcttcgaag

SEQ ID NO: 113972 - DNA, 594 bp, Physcomitrella patens
  Intron number 1 from transcript Pp1s324_48V6.1 (locus Pp1s 324_48V6) derived from phytozome v7.0 (chr-ID scaffold_324 ; pos 341334 to 341927)
aagtctctatcctatcaggttcgtcgattgtattggtttttgtttattttgattaattctgtaccatttgcaaaggaacttggtggcttcataattgcctggtgatattagttatcgaacgggcgcacatgagcaattagttgacgggagctttgcactgtctggattgagcagccctaatttcgcagggtaactggctgtttgggagacagagcagttggttttccagtaaagactcgactaggttttggaaattgtatcgattttgaatggtgagcaagctttagcactagataatatacagggctgataatgaaatggaagataatacaaacttctctggaaaaatctaaaggttttcgggagaggattttcgtctagattctactttctccattcatgatagagtatctgcaaacaacagggtgacgctgaagtaattatcggcaagcgacaatagaaagtttcttcttgtctgtgacagtaagaatgctggattctaatcttctgagtaagttatcttttacaagtgttgagatatagtttggttctttgacaggctgcggtgcactctctccttcaatcagttattga

SEQ ID NO: 113973 - DNA, 1008 bp, Physcomitrella patens
  Intron number 1 from transcript Pp1s60_57V6.1 (locus Pp1s6 0_57V6) derived from phytozome v7.0 (chr-ID scaffold_60; p os 393757 to 394764 reverse strand)
ccatctggtgattttctcggcatattcattttttcttcaatttaactcttgctactagccatctaacgcactctctgctagtgttttagtttaatttacgcataaatcttgaagatttatgatggatgcacacgtaacttatatacacagcctgagcatttttttgtggattttgggatctgatcctttttttcatttcaaaataacttgcacctgctaataccagtcttttttatgttaaattggagtatcaacctcacaatttctgtacataaaatgtagagagtccgcggatcttgaattttctgtatgtatgtttccatttgcgcacagctgatctagagtaatctctgtgcgtaggcgattttaatcttgccttcgaaagcacaaactttctctgttcccttaatttacaccaacattcggcctgtatttttatgttgtagagttcaaacgtcgaattactgttccaatctgaagtatttttatcgatctcttgtgtttttgctatggtcttagttgggaatgcgtccagtttggcaagttttggaatacatctcgtctggtagataccaatttgtcagatattactattattagagcttctatctggtatattactgtggtgtgtttgaagtcatgatattacgagttctgaatcttgaatgcgatgcttgcatgccattttcgactactgtctatgagtacattacgccttcgaaaggtttgacagaaatgtgcgttctttactgatttcgaatgaaaacttgtgttgctgttttgattcgtacctaatagcaatttgctgtaagcttttatcgttttgcataattttggtgccacgtctcgaaggtcattgtttgaatgtcgcacgttcgtaggagtgtcttatttgtttgatgtgtttgtgccgatgaatcgaagtcagttgttgtttttgatctctgcttatgagtgaattgggacgataattgttcaggaaagcttaaaattggggtatctgacgat

SEQ ID NO: 113974 - DNA, 1023 bp, Physcomitrella patens
  Intron number 1 from transcript Pp1s79_254V6.2 (locus Pp1s 79_254V6) derived from phytozome v7.0 (chr-ID scaffold_79; pos 1463713 to 1464735)
tggtcgtggggctaattgctgtgtcggcctcacaggtatggatccaaaagatcattggaaagagtttgctcacgtgacactgatgtgcctttagggcttgtgatgcggcttctagtagtttcagcacgcaggggattgttttgaaagcagttgaggatgtgctcgtcttttgatgttgagcctaggctggaggcgtgggctggttcttggaatcctggaacccttagtttggaatttgttcccctggatcgaattctccccgttttacaaatatctctctgaaggctcgtggtttagtttagtttagtttagtttagttttttttttttttttttttttttttttttttttttttttctttgtatctgtaattggtgtaggatgtgattcgggagtagtgtcttcctgtccctcgccaagctttgattgtcgcactggtgctaattgactactctgtggtccagctgtttcttaacgttcgtcctttgatatgtgtgtttatgagatgcatttcaactttttccgaataacaaggctgagctggtcgtcagaagattgttgttgaggccttattagtgctggattttgaattttcatgaatttctgatcagggaggttgatacgagtccggatttgtatttagaagacgcaacatccgttgagttatgcgtagagaagtaaatgttccgtcttgactgaatgatgcacgcgcgagtgtgaaattgatggaataccattttttgttttggtttgctttgttttgtttgctttttatttttttatttttttatttttttgtttgttttgttttattctagtgtacagcaattgtgtccgttcagtagttttggaacggtacaggtccagctcatggccagtattttgaatatgtttcccgatttggggcatttttaaggtcatgtgaaattttctattcggtgaacgttgaattaatgatacttcttcgcaaaatagtggaatcacgaagaataatgtagtctttttggtggatctttcaggcgg

SEQ ID NO: 113975 - DNA, 845 bp, Physcomitrella patens
  Intron number 1 from transcript Pp1s199_64V6.1 (locus Pp1s 199_64V6) derived from phytozome v7.0 (chr-ID scaffold_199 ; pos 359400 to 360244 reverse strand)
taccggtgccgcacctgtcaaacaaacgattctaggtgtgtattcattaagccttttcctcttcctgcctatgttgttctgtttttttttactaaatcgaatataactgagtatgtcaagaccattttgatttttggacttctcttgtccgagtggttcgttatacctatttgtctactctcaatgagtcggatgtagagaatatggggtttcgtttcggatattacggaagagcgttttgcaagactggtctctggcctgcttgtgccacacggtcatttgcaacatgcctgatgggttgaaactggacgccttcaatccacatggcagtaacattcacaccatcaacttgatctcttcagaccatgatatctagcttaaaattactggcgtgttaacgtgttctggttatctgatcatgcttctcctcaagatggagaaggcggtaggttcaaaatttacatgtagatcttcgtgctaaatcatgaacctgtagcgtttgtatctaataatcaggaaacgtcactatgaaccgtaatcatttgtcaaggtgggatgctaacaatctgataggaatgtctagagactcacacttcgtgattctactagaacgtcatattcatggaagggaggcggttatcaaaaaaagatcgcttacggttcttatttcatttttgtcatcattgggacatttcacatcttggggggggtttgaatattgaaatacaagctatgttgactaaacattatgttgtattttattttaatttttatgatacgtaatgattttgcacaaagtaactccttgtgtccactttaattctttggttggtgtgtagtgcaat

SEQ ID NO: 113976 - DNA, 904 bp, Physcomitrella patens
  Intron number 1 from transcript Pp1s143_168V6.1 (locus Pp1 s143_168V6) derived from phytozome v7.0 (chr-ID scaffold_1 43; pos 1058023 to 1058926 reverse strand)
cccggtgcctggttgtgtgaggtggtggctatttggtaagttaacttgagccattggtcgctttaagagttttgacttcggattgttgaacatggaataggaggaaggagggggcgataggcagagaggagcgttagtcatctgtttttgtgctggctggatgctaggtttctttgcgagtccttgttctggggagtgtgcagtcgtgctctcttgttatggttcaagcagtgcaagaaacgttggagaaatgctttagaccattttttggggtttgtaaaccctattaccgtcacattagtaatctttgcagtcgaggcggctttcgtgcaggcacttaccagtagtttagggataggttactctcgttcttccgtagcggttcccctccctcctacctcatttagaccttttatgtccaggtgttgtggtctcaaggaaaacaaacggaagggagagttaccgaaatatgctaatatgtatcttcaagacgtgatgagtgcttttgtagagttcctgtcgttcaggtagtatgactttttggtgaaacctggtttaaattttgtgatcaatgatcggtttgcaaacggttagggcaagtcgtaagtggctttctggtatgacctgcctcgctccctttttctggagggaggtttggattgaagcaccgcgaggatgcaaacagagttttcattattatttaggcgaaaacaggcaggttgtagggatattacttatgtccgtgaagtctcttattagctttatgttattcgctgcgttgaggtcgacacatgtttatcgcagacacactcgttttaataaagacgaattaacattgttctaattattgttctggtatttccgtaaagctcttttgcggacgattatttgtgcaggaaagggc

SEQ ID NO: 113977 - DNA, 1019 bp, Physcomitrella patens
  Intron number 1 from transcript Pp1s11_325V6.1 (locus Pp1s 11_325V6) derived from phytozome v7.0 (chr-ID scaffold_11; pos 2386298 to 2387316)
gacactggctcagtggttcgccgcaagtccttcaggtagacgtgcgttttttgaagcttctctcctctgttgggcacttagaaattgacaagcgctaacacttcagaagcgtgcgcgctcaaagcacaaacgagaattcgtagtatccattaactgcagatagtggtaaatttcgtaagacaactctgtttgcgagttcgtgagaccaaaagcaatttgagagagcgctcaccatcttctctatctcgtctattacaatttgtggtagtgtattgagggtcgaattttatggaatgctatcttatccgtcgtgggtttctattttcttgtcgtcgaggtgcgctcccgttctctttttatttgtggtataaatcattcatatccgctctggctgctgtacattgaactctgtcttttaatatgtaatcggttttccatgacgttaatcctgaatttcttactcaatttcatgcgcattctagaggacgtatctttccgtctcatgtttctaaaaatgcgatgctttcttcgcacggatgccgcgcgggttgcttcttctattgttatccaccggtatttgttttagtcctgccatttttaagtgtattaattacctgtttatttagtagacccatttaagtgatcgaagagtcccaaggcgcaaaattcattaatgtgataaattctgtatactcttggtgcaaatatacgataattttcatggattttaaattgaaagatattctcaaatggttaattcaaattcatgattttctttctaatctaactcgttcaacggtgcttccaatgattcttaaaccagttggaatgtaccaacgtataaatgtacatttgatttaccttcatttcggtctctgggttcttcataagcagttcactttggaacttgctgtgcatcatgaaattaggaatttggattgacctgaaggaagggttcttatggcatctctcatgttgtaccaggcctcaaggagaacgaacagtgaaacgtttacggc

SEQ ID NO: 113978 - DNA, 482 bp, Physcomitrella patens
  Intron number 2 from transcript Pp1s15_33V6.1 (locus Pp1s1 5_33V6) derived from phytozome v7.0 (chr-ID scaffold_15; p os 230605 to 231086)
aaacagccactgttgcgaagagaggggccttgaaagtatgtaactatttcatcccattccacattttgcttcttcttataagggtgtaagaacgaaactggcttttcctctagcacagctcttaggcattttgtgattaatgtcctcttatgttttcgtgctccacccgtcagttcccattttgagttcagctatggacttggtacaaaagtttacatcagccactcttgactaacttagttcgagattatgttgagaaattactgataaatttgatataaaattacagtgaatatgtttcgtctcttgaggaatgtacctggtagcgcatattgtcaggtctgatgagctcaattgaagcagcttattgtttttttcacaacgagctgcgtgacttttgataagtaccgcaaaatcaattcatttatggtggaaaatttgtaattgagcaggtctcagaagttattagagtagcaggctcc

SEQ ID NO: 113979 - DNA, 639 bp, Physcomitrella patens
  Intron number 1 from transcript Pp1s85_79V6.1 (locus Pp1s8 5_79V6) derived from phytozome v7.0 (chr-ID scaffold_85; p os 421143 to 421781)
gctctagaggtattgaagaataaatatgaaagaatgacaatgtgctcttttgatgcagatgtgttttcatttgcaatggtgtgttataagattcttttgaaaagagatcgatttgataactgtaagagagatgagatattggaaagaatagaaagaggtgaaagaccataattaccttcaaattgtgatgaattgacagagcttattgaagaatgttggaacttaaatccatcaaatcaaccttagtttgcaaaaatttgtgaaagattgagagtattgaagaaaaaaattatgggtggagattttgtggctataacaccatattatggtgcttcaatgaacaaaagtcatgaaaatatagaattacaacaaacttccaacaaagtgcttgtttcaaacccaattctattaaatgaggtaataatatgttgaagtgatttgatttattagagttttaatctgtacacaagcttacatgatgtggtattggttaattgtagtaaaaagagtgctagtttgaagatctagatttgaatttagtatgtgttatatgtgtatttattttacttgtagtgttgatgcttaatttaatttcttattgtaggttgacataggtgaagaagtgcttggtagaaagca

SEQ ID NO: 113980 - DNA, 553 bp, Physcomitrella patens
  Intron number 1 from transcript Pp1s464_13V6.1 (locus Pp1s 464_13V6) derived from phytozome v7.0 (chr-ID scaffold_464 ; pos 130600 to 131152)
aagccgttgacgggactgcttctgaggtatattccattatcctactgccctctaactcgcaaatgctgctgcatattaaattctcggtgcacttgttttgtttctgttgaagtcatcgtgttgacgtgttcatcaagctatggcggtgtgctcaggaaggagtgcgtgaattcttgttaccttcgtgttgtttggggtttaccgctcttcttgtatcaccgattggcaggtctcgaatttttggcaaggggtctgaacttgctttaaaatgacttcgatttttagcggttttatgtcacaatgattgatgacggaaattgtggactggagatagcctcggctgaaaatggaaaatcaatttaaaaaatcgttttagagaagaaggtttcattgtggggttataatactattcttcacgttcagggaaaattttgatgttctgatgactgctttgtgtcgtgatgacccaatcctttctcatgaacgttaacttaattatgctcaatgcttgggcacaggctgtgtcgagggcccagggaggagagaaagttca

SEQ ID NO: 113981 - DNA, 612 bp, Physcomitrella patens
  Intron number 1 from transcript Pp1s77_83V6.1 (locus Pp1s7 7_83V6) derived from phytozome v7.0 (chr-ID scaffold_77; p os 367819 to 368430)
atcacgaaaattcggcattcggaaggtacttgtgatattcatttaagtcttgtgctcagtcttccctactttaagccttacgtcacgtgtgactgacgctgctttccagttttggttctcgttttggaaactttgcacatgctttcgtttcttcacatccagaaccccactttgtgcatacctgggacagctgaaggcttgctgcccgtgctggcattccgaggtatccagcgtcgcatattggatggtgcatgagagttaattaagtggctcagagacgtatcttctgacttgagctctgccgtgataggctcaaagtttgattagtctagggtttctatccactctgaacatgtcttctctccttgacatacttctattttcacggaaatgctacggccacagtaggtctcttgctccacatatcatgctgttcatcgtttgttgctgaccacacaccagattacaaatgtttttctgacttcgagtcccctacccaatcgttttcgtcgatatcatggcaagcactttatttttatgagttcataattgagctccttggattttgaaattctgaactcattccagcttattgaacgatttgcagctgtg

SEQ ID NO: 113982 - DNA, 501 bp, Physcomitrella patens
  Intron number 1 from transcript Pp1s4_8V6.1 (locus Pp1s4_8 V6) derived from phytozome v7.0 (chr-ID scaffold_4; pos 10 1122 to 101622)
gggaaagtctctgagctcgtcttatcctgtgctaggttctgtcttccgacctcgttttcaattccctgcattttggttgtgtgtgaatggttttgtttctcttggattagagatggagaaatgcccttgcggaagttgagctttgcgaaagcgggtaattagtgtgcgagaaccaagagataagcttgaatttttatggacttcaataactcaactttttttagtttgatttttttggtgagtgaggggtaaaaattcagattaagaaaaaagaaataaatatatcatgacccttatatgttgatgttgaggtggatttttggctaatggacttgtgtgatgcgatttggagaaaatcatgctttcttctttaccaatcgatggacgatcgatgaaaagggcttcgtttattttattttttttcacgcataatcctgtatatctgagcgaaactttggatttgcagggactactgctgggattttcacctcaacagacgtg

SEQ ID NO: 113983 - DNA, 504 bp, Physcomitrella patens
  Intron number 1 from transcript Pp1s130_272V6.1 (locus Pp1 s130_272V6) derived from phytozome v7.0 (chr-ID scaffold_1 30; pos 1038736 to 1039239 reverse strand)
ccaaaagattcgcacattaagtctctttcggtctggtaggttttgaatcaagtagtgggaattgagggcgtgggggagaggagttttgtgggctcggtcggaatctcatgtatcgattgtaaaagcagatagtgtctcgtggttgatttgattgcggaagtggagttcagtagcccttgttgtaggatatggtttgattcgaggaacaatctagttgtaagaatcgcgccaggcgcgaattccttgagagcatttctttggcgtgtgttttttttggttgttgttcaggaactctaagtaaaccattctcttcttttttctggatttccctccgactgtagaatggttacgtttgtgtactgtttcaggatttagggtgtagggtttaagattcaaggtgaagattttatcgtcgttagaagattattggggaagcttaccaggacgccatttatcaatgccatcgcctgctctgaacacgttgataaactgcaggaagcaaca

SEQ ID NO: 113984 - DNA, 490 bp, Physcomitrella patens
  Intron number 1 from transcript Pp1s37_7V6.1 (locus Pp1s37 _7V6) derived from phytozome v7.0 (chr-ID scaffold_37; pos 106449 to 106938)
aataggaacaaggtgattctggtaatactaggcttctgcttcacttcgatctcatatttgcagtattccgatttcttgcggcatatggtatgattagagaaaattttggcctattttacggtttcagtctttactaagctattgcagagaaatgttcatgcatatttgagtgtggatagaagctgtttattcttcgtctcggttgcactctaggtcttaagaaatttcacttcaggcttgtgggtcacagtactcgttttcaaacatgggagatacgtcgcttgcatgtatactttgtctcacacagagaatcaactggctcagggttgagtcgtttgcaccagaatacaacctaaagttaatcgttcttatttgtattgctgggtgtcttaaatttatttcattttgttctaccttttttttaaatttttaattttaaatgtttttaccgtttcttcgcagggacaacaaccgagtttgatttcaaaag

SEQ ID NO: 113985 - DNA, 643 bp, Physcomitrella patens
  Intron number 2 from transcript Pp1s7_467V6.1 (locus Pp1s7 _467V6) derived from phytozome v7.0 (chr-ID scaffold_7; po s 2866408 to 2867050)
gccacgagcgtgaatatccacgaagatcgacaaaggtagggagaggagcgtagtagactactttacaccgactcgaacatcagctggcggttcgttgaataagatccctgataagccctagacccaagagaaaaataacaaaacaaaactaaacaataaaaaagaaaaaaagaaaaaaagaaaaaaagaaaaaagacgtagggtcgtaagccacttcgggaatcgataacgatgagaacacacgagaagcaaccaacacctgggacgagtagctcgaacgctggtgaatgcaatacggttctcaggaaagaacgcgttacactgaagctccgaagacaacgtcaccgccaccaccaccaccaccaccaccactggggcctcgagagcaaatcctaaccctaactaggatcatcaagttacgtgaactaaggggtagcaaatacattgtagaggcaaaaacaaacaacattataatgacaacaataacaatgatatgattagctgtgagcagcaactctctttcaatttactttttagtgctttaagtggattgattttgtatcactcttgtgacaagcttcaagcattcttcaagttcatcctgtgattgtttgtttttattttttgaatgtgacatcacagg

SEQ ID NO: 113986 - DNA, 547 bp, Physcomitrella patens
  Intron number 1 from transcript Pp1s28_303V6.1 (locus Pp1s 28_303V6) derived from phytozome v7.0 (chr-ID scaffold_28; pos 1915520 to 1916066)
ctctcggcttctgaagcgtgggaggttgaattctggtatggtgttcggaggttttgatttggacagtgaggcattcatggaggaggttgcttgagtttgtgtgtgtgtgcgtgtatgtgtgttggtattgggggctggctgatggggtgtgtgtggtttgtacgtgttggttgtatttcgatgtcgtggattcttacgttttttacgactcgatagttctcgtgttttaattttgcgatttttgattttttgtttgaatttatttcttatttcgcgattaagacaagttctgatttactgtagcgtatatgctgtaaagtctgggctgacaccttgttttcttctagctcgcttggtttctcctttttagttgaccgaatggaatctcgtctagaactgggttatattttcaattaaggatgggaatgatctgtgtgtgaggcatcactagattatggaacttgcaccagggagctgcgggaaccaatctaatgttttatttcttggttcagtttctttctcgaaacgtggctgcgctaccgacgga

SEQ ID NO: 113987 - DNA, 596 bp, Physcomitrella patens
  Intron number 1 from transcript Pp1s379_13V6.1 (locus Pp1s 379_13V6) derived from phytozome v7.0 (chr-ID scaffold_379 ; pos 119581 to 120176)
gcctgtaggcaaattcgttgccagctcccgatacagtaaattcatgtttaggctcatcttcctcttcaggtttgcactgtgtgggttttctgagaagcgcttgtacttctttatgtgtatctgaaagaaccctgtaacaatttaatgagaagtttggatcttgaaggaatgcaatgttttagtgcatgccgttactgagtgtggaatttactgctattttgaattgcaaatgtaagggaacattcttaatagcttcctttcactgcagcgaacagcggtggattggcttggtcggggagaggaggcatcaaccttgttggggtttttattttaagaagcatgcttcggttaatataccaccttgcctactatccttttattccttttccgttcacagagcatggaacctgttctagtgacagatggctgatagcaatttttcagaatagtaatcctgaaactgtctcttgttctgtttttaattttgaagacgtataaagtcttaaagttgttccaatcattatctagttttcaacttcctagatatacccttccttatggagtcttgtattttttttatccaggactaaaagcaa

SEQ ID NO: 113988 - DNA, 625 bp, Physcomitrella patens
  Intron number 1 from transcript Pp1s335_77V6.3 (locus Pp1s 335_77V6) derived from phytozome v7.0 (chr-ID scaffold_335 ; pos 324694 to 325318)
ccttctatcattccttcccctttccgctcattttggtacctatttggatccctctctgtttggtgcggtagccagcccccgctctaccctccctctttctccactcagattttgtttggatagggttcgtccgacgacttaattttggaactcatgctctcttgtttgtggggtaaatccgaagcacaccgaggttgtgtttgctttgggcctgtgggaaaaagaagagttggagtgtttgttgaaaagattcttcttgcgagtcacgtagttttgtgccgcccagttaatggtggtgcttagccgtgtggaagtatctttgctctttttatttttgtttcttttattttattgtatttgttttttgtgtcgttttgagcttgtgtgaagtgtggttgccgcgggacgatgttcgataggaagtgaactggaaatggagggtaggggtgggtgggagtgtaaagtgatgcttgtttcttttgacgagagatgtttgtgtggtttaggacatgtattttctgttcctctttgcgctttagctgctattcatgtctgtggaatttctttcagcgtgcgctaacaactttaggggtttatttacaggcaagtagctagcgaaggaaga

SEQ ID NO: 113989 - DNA, 615 bp, Physcomitrella patens
  Intron number 1 from transcript Pp1s9_381V6.2 (locus Pp1s9 _381V6) derived from phytozome v7.0 (chr-ID scaffold_9; po s 2538266 to 2538880 reverse strand)
ctgaatcgaggagataattcgtgctgctagtgtcggtgagaaatttcttacgtgtatttagagattttttttttttttttttttttttttcttttctctctctctctcgctctggttagggtactggatggattcgtgtcaatttcggtgttgagtgagtgaattgaagttggttgaagatgagcacgtgctgaggatgtgtggaattttaagtatgaaaataaagttagatgatagatgtaagtgagtgggaagatgtgggtttgacgacggcgttagaggaaggtcctataatcccttcatctttttgaatagcatatctgtttctgtttttgataattcgtgtaatttaaaggttgacatcaccgcccagattaaattaggttgatgatttttgagcgtttgggtttctctgcacctgacagtttctggggagcattggaaccctctttgttgtttcgtggtatttatgaggaggtgattttgttggcaatctttcaggcttcttatgcggtgtttgttgttgagtctatcatccgaggtgcgaggatttgtgaattgaaaacaactttgtttgcagggtcgggttaggacagatcggctgtgagatacaca

SEQ ID NO: 113990 - DNA, 738 bp, Physcomitrella patens
  Intron number 1 from transcript Pp1s219_95V6.1 (locus Pp1s 219_95V6) derived from phytozome v7.0 (chr-ID scaffold_219 ; pos 571343 to 572080 reverse strand)
ggagaattatactgcacctagaatcgttctggcaggtacgaaggttccctatccagtaaaatctcctgcccatttgatagtttcaaggcctgctgagattccactagtcttcaccgttgaatttgagttttcttggactcataattcaggaagtgatcaattatgtcgagaattcgctgctgctctgagttgcaattgtaatatgtgagaatgccatggtgggagttttgtatgcggatgctatgcatgtgtctcactgaatgaatgtcctattaagcttgcgaatgacgagattgatgttgtggtgggtcaagatgtgatttatgcttcttcgcggatctagcaaccaaggattgtagagtttgttcaaatcatcacatgtgcatgtccaacacgattagtaacaagtctcatgttatgcatgtttagtacaattctagtgggggttttgtagtttagtattacttttactggcttttgaaatctactgtttcttccgtatcatctgagttagctctgaaccctgggaattaagagaacttgttgctgattttatttctttttactttttgtgctggaaaatgcgtagtgctcggttggtatgtacttccaaccttgtgccatttgggattaaccttttcttattagtgtattggttcagtttgagggcttccagtgtccccaatcatttttttcagttagtaacctcttctatttttgcagcctcgggtgtggaac

SEQ ID NO: 113991 - DNA, 273 bp, Physcomitrella patens
  Intron number 2 from transcript Pp1s324_47V6.1 (locus Pp1s 324_47V6) derived from phytozome v7.0 (chr-ID scaffold_324 ; pos 335934 to 336206 reverse strand)
agaaccagaaataagtactctcgccactattcgaggcaagaaccatacacatcacatcgttcttattaataataagaaacccaatttttaggagccagagaaacagggtcactgctgtccgaagtcggaagaatcgcgcttatggtcagtaaactacacaccaaaaaaaccaaaaacaaaaacagaaaagacgaagtaattatctctcttccctgcgatttgatttgcgattgaacagatattgaaaagggattggaggcaaatctacaagag

SEQ ID NO: 113992 - DNA, 517 bp, Physcomitrella patens
  Intron number 1 from transcript Pp1s22_122V6.1 (locus Pp1s 22_122V6) derived from phytozome v7.0 (chr-ID scaffold_22; pos 764674 to 765190 reverse strand)
cacccaccgccataactaaacacaaacaatctataaacttatccgcatcaattattctagtgtcatttttgatgtcgatgatgtttcgcgcttctgaatccgctgtgaaatacttacgatttgagtataatcgttgaggagttatcatctttcccctgttgagcataaccgttaaggggtacacctgcagtttcaagggttgtttctaccacaggcgttgaaacggagaggaaaagagaggtgattgccactggagaggtgattagcactggtgaatttttctgtttgggtttgaatggagtacgcttcgagggaatggagtagcacgctggggttttacacacttaccgctgattcctgacatcttattcacttatactttatatttagaatcccaaattaagaggtttttctaagtaataaaagaacatacatcaaaggtcgaagcttatatattcttctgttttgtaatgtgctaccagagagtttctgctggtgtcactgcgccttctatcat

SEQ ID NO: 113993 - DNA, 304 bp, Physcomitrella patens
  Intron number 2 from transcript Pp1s30_264V6.1 (locus Pp1s 30_264V6) derived from phytozome v7.0 (chr-ID scaffold_30; pos 1950643 to 1950946 reverse strand)
cttacgttgttttcaaacgaagagtatcagaagcggtaaggttatctctatctcaatccagtctaatgtgaatctctttggcttccactgttatgaagtatatcttctatgtgaaggggttggaatcatatcttggataatattttgtcttaaaatactgacatcattagaattcatagtgcaatgaaaccaacgaaaacaacgaaagcaacgtaaccgagacgtgcttcatgtgtactaattgtgctctttgattcccggagctttagggtgaaggaatattgcatcaaaaaacgtctgaagt

SEQ ID NO: 113994 - DNA, 1027 bp, Physcomitrella patens
  Intron number 1 from transcript Pp1s30_264V6.1 (locus Pp1s 30_264V6) derived from phytozome v7.0 (chr-ID scaffold_30; pos 1951095 to 1952121 reverse strand)
cgactcaatttactgttgcggggacgaacgattccgtaagttcgactgcattctatcgggattgatacgtcttttgtcggtgtgatttggttgagtagatgtaattcggtgggtttggttttgagcgttgccgaaatttgagaagtattttgaattttcgagggctggttgttgttttatgatgatctcatggacgatatgcaatccacactgtggttaagatgatcggggtttaatgtagagagatccgtattttcgtgatgataagttttaggctatctggctgcagctaagagactgcaaacagatctaggatgatactgttcaggaattattgtccgaataggaacacgagaccggaatgacgttgattgccttcacgctgggatgcgcctctcgttctcttccagtacataagcatggacagtagtggccccttgtttgccaccactgtttgtggcatttattttctttacaatcaatcgcttaagatcgaaattttgtacgagatggacctcctcgtggctacatcgtcattttgcggccagttatccacatcaggctgtagtagagctacgtttagttatatgtgagcatgataccccgggctttggttaatggctggggctgggcttcagtctttaaagcttattgaatcatcaaaagacgaaagtactccggcgtgggacttttcagctgcacgagcacttatttcaggtcaatatgcatatttaaaaaactggatgtaaacagttaggatcataatcgtataggaattgcttgaaatcaagcagaatctatccaggtgtgactaataatgaaggtccatatcctatcgaacataagctgttaatactcatttttacggtagtgcttaaaatctacgacagacgaaacagttgtatattcttgatgtcgaatttagctcgtattcgaacaggtaagcacatgacaattccttgtctaatgtgtgtgtaccgcccttcacattttacttttgttctgtgccttttaggtagggaattga

SEQ ID NO: 113995 - DNA, 348 bp, Physcomitrella patens
  Intron number 1 from transcript Pp1s89_267V6.1 (locus Pp1s 89_267V6) derived from phytozome v7.0 (chr-ID scaffold_89; pos 1347853 to 1348200 reverse strand)
tacttctatcaagggcaatcaaataggtttgttccattttcgtgttcaggccaatttgttttttgaatactggattgacaatcagcatatctttaaaggactgacgattttgcaactgattgaaatgcgcctaaaattcgggtactaatcggatcattaatctgagctgtgcaggaatttctttttgtagctagaaccacaaaaaaatcctagttaatgaattgagctggtttgtccaagccatacagaattggataaccaacttgcttgctctcctactcatatcttctttggtacagtaaatggagcttgtggatccgttctcatacaaaaggttgtgctcctcag

SEQ ID NO: 113996 - DNA, 405 bp, Physcomitrella patens
  Intron number 1 from transcript Pp1s21_361V6.1 (locus Pp1s 21_361V6) derived from phytozome v7.0 (chr-ID scaffold_21; pos 2167719 to 2168123 reverse strand)
agggattcgaaagcagctgaacttattcttgagaagtgagttccgctttgatgttcttggtgcatttcatattctcgcatactttaatcttcgcttgtaaatcatggaattcgaaaaacatcccagtgcctgtgactcgcttttatagtttcttcatcaattttgattgtgacgttttgtaaaagaaagattaactttagtggatcatggtaacatgaagattggcctcagcacttttacaccaggttatgaagcgtttcttggcttccatcgtgctaattatcacctttaacaattatgtcgtgtcgcagggtattgactaaaatgcttttttcatatgatattttggatgcaaatgaatagtgccacaggttaaatgtttttttctccccgtttctttgcaga

SEQ ID NO: 113997 - DNA, 1004 bp, Physcomitrella patens
  Intron number 1 from transcript Pp1s131_104V6.1 (locus Pp1 s131_104V6) derived from phytozome v7.0 (chr-ID scaffold_1 31; pos 428250 to 429253)
cacacgcaggtgggttttgctcctggcagcccatgttctatcctggccttgcctttctcctctcatgtctattggtgactgacgatggagtctcttctttggtacgagtaaagtgacgtatatagttagagcaatgttggctttggtattgccccaacacatcatttttgttgtctccacctcgcttttgtcttactcaacctgtctactgaacgtcaggctatcgtatcgtatttttgaggtttttcggggattttttcgttttaacgttttggcatgtttgagaatccagcagtgcggtgaggttgttgtttgattctcatttggaaggattgtgagtttttccatcgagcgcttttgtcgtatctaccacgcagtggaacactttgttttacacaattcatgggagttttactgttcgaagctacgaccggttccgctcgttctggaagtacacatcataatgtttgattgatcgtgatatgttactgcgacccccgcggggtttggaggaaaatcatggcaaggagcatgagcggtgcacatattgacgaatagagctcctgcaaactttcagctctgttaatgcctgagtataaccaaaccctaaaggtcaacctcagaagaattgatttgcgaaaaacgctcggtggcatagttgtgacctgtagtgtgttagttgcagtcgagagcatgtttctcacgacctctacttattttcttcgttccatcttgataagaagtttctttcatctaggattttctgaggtatgaagaattgtggggtttttccccaccctaaccgctgctcattattgcttctcatggatgtctgatttcacaatgcgactggtatttcatcccacatttttccacattttaggggcgtttctctcattatttttcgagatttgaagaccatacaaatgcccttccaaatctaccctacatttatttccctcactgtggaactcatggaagtgcaggctcccaggtttcagttc

SEQ ID NO: 113998 - DNA, 498 bp, Physcomitrella patens
  Intron number 2 from transcript Pp1s258_82V6.1 (locus Pp1s 258_82V6) derived from phytozome v7.0 (chr-ID scaffold_258 ; pos 548509 to 549006)
cgcgggtattctccttctcatattttgttcgctggaatatttcctgctcattttttgtagtcacaagtgttgccgccccgattattttatgtgaaatttgaagtgggttttaagttcaaatttaatgaagcttagaagaagtttcggtattctatcaactcactactcttccaagatccaatttgaataatgtgtgcctgagcaatttgaggagtggtaggaataatttttctttgtgcgttccatctaacgtgtataagtaggaccttgtccgcttttttgatgccttgacacctgtagctgaggcgctttacgtttaagatggaatgtgctctagtattgtacctcagaagtttgatgttttacagattatcggtgttcaactgtcagtgttctattgatcacacgtggaggctcctgtgtttgtagttgcaagccttaatgggttgttgttttttggtgttatttcagggatttcgttaaggactcaggaactgt

SEQ ID NO: 113999 - DNA, 650 bp, Physcomitrella patens
  Intron number 2 from transcript Pp1s18_332V6.1 (locus Pp1s 18_332V6) derived from phytozome v7.0 (chr-ID scaffold_18; pos 2621451 to 2622100 reverse strand)
cgacctgctctctaccaacttcacgacttttccaggtttttccaacctctctctaacaatgtatactgggaattggatatggtttacattcttgtacgacgattccttgtgatttgtcagttcagaagcgattcaggatcataggcgtgagacccctggtagagagaaaagagaggcagttggctccttttacaaccctaaaggactgtatgtcaaagtgaagattgcaatgagtttgcagtggagctgttgagtattattgcagttgttgctcaacaaacctcgtttagttatggactttgtttagagtgttagccacttggaccacaaatttgaaagagggttgtttcaccatactgtaggaaagtcataggttttactttttgtttttttgttttttttgtttttttgtttttctcggggttgctttaatctgtgtctcattcgattgactatgtttttttttttttttttttttttttttttcattctttttcttaaggcgattgattatctaagtattttgtcccgtggggttgagtggttggttcacttgcctttatactttgattctcacaattgatttcttaagcatattttagttatattgtgcaggctgtagaagatattttgaattccactggcaaaag

SEQ ID NO: 114000 - DNA, 617 bp, Physcomitrella patens
  Intron number 1 from transcript Pp1s18_332V6.1 (locus Pp1s 18_332V6) derived from phytozome v7.0 (chr-ID scaffold_18; pos 2622436 to 2623052 reverse strand)
gattttctcccttcggcgcctgcccgcattgcaaggtgagacccgacagagcctggatcaatctggagagttgggatccgaatgttctgggagctcgggatcgatcagtttgcgagctctgcccccactccttccctcctccccctcccataaaaattctcgtgttagtgcatgtagttgatgtttggttctctgtttttgttttttgtttttctcgtttctgtctagcttttttgagtgtcttgtaacgggaaaacaagttttttgacatcaggctttgcagggtgagaagtaagaaatttgtgagtaaaggagatacgtgaggatacgtataattaggatccttttgtaggatcagtcggcttgagattcgaagaacatattcctcccaaagagtgttatgtgattttaggttttattcttttttttggagggggcttgtgttctgtcgaccgaaagtttagatctcagctgaagagtgcactcttgcaatggtgagccggtcatgttcggcgtggtcgtgattgtgcacgagaattgattgggggtcgatttgtgtgatgtttttccttctcagtgtaggtcagttttcccagcgcaacgtaattcgagttacg

SEQ ID NO: 114001 - DNA, 623 bp, Physcomitrella patens
  Intron number 1 from transcript Pp1s47_320V6.1 (locus Pp1s 47_320V6) derived from phytozome v7.0 (chr-ID scaffold_47; pos 2029584 to 2030206)
agctcctctcccccaagcgagtggccctctctcaggtaaccattttctccagcaaccctcataattccttgccctgattgccttcacgaattaatgcgatcttcaaatctgtcggtcgaaccccattcaaatctagtgtgaggtatttgcagcagttccgagccgtattctaacccctcattccaattctgattatcttccgatctaaatggaagttgaaattctcgttaactgagctctcaggttcatacggttcgaagatgcctcagatgtggaaaaagatttcagagttagacggctgcttatttgaatttgctaagcttgtgatgaagtgacttgaacatacacacgacatgcaagagctatacaatatatttgtattgcaattttcttttccaaaaatattacgtttgttagtgtgcaaaaacattccttcgcagaaaagaaaaaaaagcaaggaaaaggaaaaggaaaataataacaagaacaatggttctgaacacaaatgggacgtttgccaattgcgttgagatgagtaacaacagtacaaggatcacccccggctatttcatatgagcacgatttcactgcaggaattgaggcagattgaggtgaagcacgtg

SEQ ID NO: 114002 - DNA, 809 bp, Physcomitrella patens
  Intron number 2 from transcript Pp1s199_4V6.1 (locus Pp1s1 99_4V6) derived from phytozome v7.0 (chr-ID scaffold_199; pos 27578 to 28386)
atattggaggttgccttgcatacaaacttgctcaggtaagtatggaattgtgtgtcgcattttaggagcctagtatgaatggagatttgagtttaaatttaggctaatacattccggtgtgttgtaattgaccactgtgaggcactctacccgtcagttttctgtagtagtagatcgcgatagcattgccggcgttgggttttagtggtaaataagctcgattttgggatcttggagcccgtggtgcgccagactcttttgcgcgggaaggtcgtatttaactgtttaccggatgtgttgaggacgaggaccgggtatgcgggcagtgctttcaagaataattgtcactgatttccagcttctgacgatattacatggtgtggtcattagggttcggtgttgaggcttaaagggctatgaactctggattcatgaagaggctcacagtctaccggacagtcttcagtgaatccgtagaagttcacgcacattccatccgaacgcctccttttgttattattcataggcgacaagcggtcaatgtgacgcctccaagggtcattcctttgtcagcaaacattcctcgagttttaatggtatctagagggtctcctacgttgccaacaacagttggtgggaacacaaatggactctttgtggtgaatactggagatgatcgaggaaattcgagggtactagaaggacctgttggtacggaagatgtttctagtgaactgaagcaaactaatgaggagtactctgtctgtgatgcagctatttcagcctacaaagaagagtttaacaagaat

SEQ ID NO: 114003 - DNA, 792 bp, Physcomitrella patens
  Intron number 3 from transcript Pp1s158_75V6.1 (locus Pp1s 158_75V6) derived from phytozome v7.0 (chr-ID scaffold_158 ; pos 405305 to 406096 reverse strand)
tgtgcgcattgaggggtccaaacctttccgctaaggttattttattttattttattttattttaattcatgttttgtcgtctttgatttctggcttcattactttgtttctcataggctgtttatatgttcattctgaaatcttacatgtgcaacagttcgctatgcgtatatctttgctctatcttctggcttatttgtaagaattgagctgtattatcttcaactaaattcagatatgtgagaatatgccataattcagaaggatataaaactcgtactatatgtaaaagtctagtatctgggtgttgtgtggatttttggtttcaatgcaaaaaatctggcagttgattaaaatgttttctatccaagcccctcctaagagtgaatctcgatggtagtaattgacttggcctttatgcctgagttgcatggacgtgatatgttcacttttgttttcctcgtattcgtgtctggtaggtttagggttttgttatgttgttgacagaagaaacatgtatgaaattgctgtacaaatcttgttgggtaatacataagaaatgccttgaaattaacacaaaaggattgatgtttacgcttttgtctttttaaaattctccatgctttcttgactctttgagatatgctgagtttctgttgggatctgcttcctatcaaattggtgaattttaaatgtttatgtggattgtgagttcaatatatatggcactgattgtggtttgcgaatcttcgtaccattgacaggactttgctggagtgtggcctatttttg

SEQ ID NO: 114004 - DNA, 788 bp, Physcomitrella patens
  Intron number 1 from transcript Pp1s269_85V6.1 (locus Pp1s 269_85V6) derived from phytozome v7.0 (chr-ID scaffold_269 ; pos 508517 to 509304)
ccgcaaggttagttagttcatccccaaccctagttttaatatgtcttcgtcgctttccaaataaacgtgtgatgcttgaagcaatgaatctcttggcatggacacacactgtttcgatttgatcctgttggtcgctacagcggatctagaaaatggactgtgagagggttttcattgacatgaggaagttggaccttccactaatttgcgtatttgatgtgcaattgcatcaaatcagagacgggtttcagacgattatttcatcaaattcgccgatgggggtccgcactggcttttcttgatacttgcattgaaactatttactgaggattttgctgaagcatgttcattcagaaaacccttgcttttaattccgacatgtagttacaaggcatcgtcttgtttgaaaacaaattccccgttgtaagacagtgtcgcattgctttttttatgttccataaaattttatcgctgtttctgtactggtgtaaggggtgtaaatattgtcgtgtggcaaaagagttctttgtgtatatcctgtttgtatctgtgctttctcaattccgtggaccttgagtaggcgaatcgataacatgttttaagtgtcaatccctcagattatctccttttttggatagcttgtaccctacttctaaccatggagtgttacggaggtcttctggatttatttagttaccgaatcgacttctgcaagcaattaaccatactgttctttgttctgttgatggccaggctaccaaggtgtactgctttgttcacaaggcacc

SEQ ID NO: 114005 - DNA, 963 bp, Physcomitrella patens
  Intron number 1 from transcript Pp1s21_222V6.1 (locus Pp1s 21_222V6) derived from phytozome v7.0 (chr-ID scaffold_21; pos 1428942 to 1429904 reverse strand)
ttaggtcagtacgttgtgccgcttctgtgagaattggagattagaggatagagtgcgtcggcagtggtgggtacgtcatgcgatgcttttgtatttggtcaggaagcggattgattttggtacacgaaggggacgaaattggcaacctttgtgaagactctgaggttttaattatttattttgatgttttttgtatttttggatgtggccgaggtttaggtttctagtgctctgtgatcaaattcaattggatgtcaatacactgttttatggtgactgtttagtcgagcataccatgaggcttatgaaacttctctaataataacttaatgaatcaatttatgggattttgattaacggggttgatctgggacatggctgtgagcctgtttggagaagatagcgattgtgatcacgatctcttttctctgaggtcgagcactgtttccgctcacttcgcccctaacaagtaaactaagattcatcacaaccaaaaatgtacgcagtgaggctgaagcatcatttttgagatgttcgtgagtaggtattggcagcgattgctgtggttacaatgcgtattcttcttcttcttattattattattattattatttgtagtccttctatatacatgttctgcacaatcatgttgcatcggcatgctttctgtttttcccttgctaatgccacgtatctgcttcagaattggctctatagatttttgtcagtaagggcttatcagcgtactgcaaacatcatgaggaaggcttattatatttcagagaagttagaaaactaattttcagattgatgaataaatgaattggcatagttttggagtaccaaattgaagctttagtgaaaaggataccgcttcgttgaagatgtgtatgaattgcgatcttagaatctcaataacatctgtgtatgctttgaacgacagggacgaggagcgtgcttttg

SEQ ID NO: 114006 - DNA, 564 bp, Physcomitrella patens
  Intron number 1 from transcript Pp1s6_370V6.2 (locus Pp1s6 _370V6) derived from phytozome v7.0 (chr-ID scaffold_6; po s 2940862 to 2941425 reverse strand)
aaacagcatccttgatctcggttttgagctgttctgtaagcctaatacccatgaactcaaagttcctatgtttccttcacttgtgagatctaagaagaaattttcaaattcagaaaccatcaggatccccaggtattgaagctgaggagtatcaatcttagtgagaggaatttcgcgatcgcggcaacagtaaaacttgctaatttagaaaagaaaagaaaaacaactcttcgtgaaagttgaatgatattgtgatattgaccataagtgatcctattaattagcacttttaacctgtgctacatgtttaggtttcacatttcagacaataaaaagtgcattggatttgaatttcctagatttcccttcaactgtatgttggataattaattgaaccaatccgagatgcaaaattcctcgacgctgtgaccaacttaacgagtcattgctaggcactaaccgcaaaaaaaatcaataccatttttgttcctgttttcattgatatattcccaatcctggccctccgacagggtatcctctctccttttagacaaattcttgcag

SEQ ID NO: 114007 - DNA, 965 bp, Physcomitrella patens
  Intron number 2 from transcript Pp1s191_127V6.2 (locus Pp1 s191_127V6) derived from phytozome v7.0 (chr-ID scaffold_1 91; pos 721270 to 722234)
gatcccgtatgtgtctttcctgcagatcactgggatatggcaatcattggagaagagcatttttctgccttgccaactcccttccccgctcttcttagtgcaagtaaaaactatccgtaaagtttgtgcgaattgcggacttgcgattgatttgggaattcgaactgtagtaaggctgtaccgcataactgcgtggcagtcctcgaggggcttggtcaaagaaacttaataatatacagacttcgttaaggaaaagcaataaaatctagaataaaagcagttgcttcagttttagtgtgttccttcgaagtcctcgaaggttactttcagatgcgaaattaggatgctgcactcatttcttcacttcgtgggatgcgagacggttcttaattcttgtatgacccgccgacccctgtacgattcttcctcaaaatccatgccttgcttgcttcccgtccaaccctcacctaccttacgtctgtaaggtcggagtcctgccaactatgactcgttcatttttcttgtcgtagtatactggtgttgagttcaggttgtggatagcgatgattaaatgtgatgtctacggtcttttcaagtaatgtatgagcgacttgagtatgttggcccactttggcgatttatgacctcgccgttctacggtacacattaacagactagtttgattttcaagtgacgtgtagttcatggttttgattttaaggccggagttcttctgggttcacctagcacctcttggagtaaggtgcaggctttgggatttacctgtcagagcgactctgactgagaaacacagtttgatgttcccgaaaatggtaatgcaaaaaataccgacagtggtctttaacactggcgggagtcgtaaggtctccaatttgtactgtttacatgaagtatgctgacaagtttccatggatttttgtaggaacttcctcaatatatagttg

SEQ ID NO: 114008 - DNA, 819 bp, Physcomitrella patens
  Intron number 1 from transcript Pp1s302_35V6.2 (locus Pp1s 302_35V6) derived from phytozome v7.0 (chr-ID scaffold_302 ; pos 241363 to 242181)
ctggagcaacaggttgtcttgtcgctgccattgctgtacgtcctattggctatcatgcgccacttctgctgttctttttaagcttatgttgaggttttttaagcatgttttgaggaagatagcataagtcgattaagtgcggtgctcgcctcggttgtttttttcttttttctgtcgatctggtagcaattcttgtgattaaagtggatggcgtcttagggctgggcgttcgtgagcttcagttgaggtttgatcgcgcattgttggggaggttcgctagtctgcagccgtgtgcagagtcagtatcttgtgcggagcaagtgtaggttgtatttcgctctgttggttatattcatatttatttgtttatttatttttctttttaaaatttatgttcttcgtgtgtgcgtgtgcgtggttccgtcttcttcttccccctctctcttttttttttttttttttttttttttttttgattttctttggttctttgctcttcttggtttgatctttggagaggtgctacagctatggaaacaaaattttaggaacgaaaagagcggacagcagagactgatgtgatgttggtatcactaagtctcttcgcatccttaaagcaagaggtgaaagaccatgtcgctgcagtgactttatccttggactttggaacgagactctcagattttagtgcatcatttactgttggtgaagaatattgattttctcaagaagagggaggttctcagtgaggttgtgcccgcagaaagtttgctcactgttagtttcttgctttgcatattttcctttactaccacaggg

SEQ ID NO: 114009 - DNA, 1036 bp, Physcomitrella patens
  Intron number 1 from transcript Pp1s67_222V6.2 (locus Pp1s 67_222V6) derived from phytozome v7.0 (chr-ID scaffold_67; pos 1489559 to 1490594)
ctcctaaggaggctaatctcttcaagctcatcgtggtatgtggacctttcttagcttgtgttcggtgtcggagagattgttggattttttatttttatttttattttttattttttattcttgtattttgaagaggattttcattcttctctcctcctcgtcctccttcttctatgtgtgtacaatttggaaagagattttggcgggtgtagagcagtgtgtggagtttctatactcgtggtgtctggttttcggttcagattttttgagtcttatcgcagctgcgacacattgtaaattgccagtagctcagttgaaaaagttttgcttattataattggatcactttttaggcctatctaatagcaaatgctggaggaaaggaatgaaaatttgccgtcgagattgccatttacatttttcatgggcttgacgtggtgtgttctacggtggaattggcattttcaatcatgtttggttaattagaagtctaggattgagtccatggcccgagaccgtgatcccaagaatttgacttaaattgggttataatgtgagaattaggatgctgtcaagatttatttatttatttatactttttcgtttgtacttggatgagttagttttatggcactcaaattgcttctttgtgttgtgtcctctgtcgaattccaagacatgtgtagttccaggttgaccagaagagtctttttggggattcaagtcacattaaatttctggattcacttttgttttgcaagagagtgctcccgagaattataagcccttaatcaagaatgatcgttcctcaagcccttaattaaggcatgaaatgaaaaagtcagggcttgaggaacgatcagactggtgttcaggagagatggctttatctctttcaaagtggctcctatgtatcatgaggctcttttgcatgttgtattaccagtttcatgataactcgattagaaatttaaagtctgaagaacagcgtggtcgttgacgtttagcttgttgggtttatgagtccagaaatcat

SEQ ID NO: 114010 - DNA, 1012 bp, Physcomitrella patens
  Intron number 1 from transcript Pp1s252_19V6.1 (locus Pp1s 252_19V6) derived from phytozome v7.0 (chr-ID scaffold_252 ; pos 151946 to 152957 reverse strand)
atcccaaaggaaaaatagttccttgcgttgcccaggtttcttccctttttccttctccagtcgctgctaatgcagcctttggaccttgctgggaccctgtcttgatacactagtactctttagcctgcagtttgaaacgatgtgcacatctactcgatacgaaacacctcgtctttcctcgtctacggaataacccgcgtaaagtttgccacggttgcttttacgcatctcggttggtactgtgcgaattcaaatcacattttcgcacccacgaactctgttcgttcgccgtatacgcaatacgtcgaatgcaccgcggaatgcattcttgcatttatgttttttaactatgagtcttcagtaacacagaaatctatcttctaatgtttctgaggctgaagcgtatcgcctatcagtttccctgtcttctcgtcgatctaacttaggctgaatactaggtgggtcccgctgacctgtctatcttaggtgaccatgggagctcaggatgcgtaattgcaatgagtgttacatcctcacagcattgtttgaacatttgcatttaactacctgctcgtcgtcttgtacacgtaggcttgcttctatgatcaacgtacttttgattgtaggagattcctagtgtcttggaacaatgagaatagattcaaggatcgtgctgccgcttgtcatgagactaattagaataatttggattgttgatccacttggcagcagatatcgtacgaggttgtaagagtactagttatttagtgggttcacgaaaatgccactacctacaccagtcagttttctggcttgcgttccacttctgaagaatgtgaaagagtacgaaacctgtgttagggcggtggaaaatttactcgaacgaccctgaaccaatacttcagtgatagttgctgacctgtccgagtcccaccctaacctctgcaagaaggtgatcacgactacacgatcgaattcatcgggcgactgtggcatcttaggatttgcagca

SEQ ID NO: 114011 - DNA, 887 bp, Physcomitrella patens
  Intron number 1 from transcript Pp1s212_118V6.1 (locus Pp1 s212_118V6) derived from phytozome v7.0 (chr-ID scaffold_2 12; pos 776704 to 777590)
ctgtttgagccctatcctcccgactgtaccgcttggtaaatggttatactccaaatgtgcttaatcttcgtgtgtgctgggtatgttcttcaacctgttctattgaatactcagaatgtataatcatatttttctggaaattcgctgtattgagtgcaatcggcaagctgaagtaggtttataccactatggttccgaaggtattctctttaatgaaatttgcctgggtattttcatgtgacgtggttttttgtgagacttattagtgttttttgtgtcgtcgaagttttatatttcatactcctccatgccatatatattttctcctgggttgatctgcttcaaagaagggacggagagaagtatgagtaatgaggtttctttgaccagaatcgaatgcgattacgtggaaaatattcaaaacgtccttgtgtcattttcgctatttctttttattgaaagtgtctcatgtgggatgaattatgaccctcgtggtatgaattcagaattccctaaagtgcagaagaaagtggatttctttcgcattcagaagccgtccccttttactgtatgtagtctgcaacattactttccttaatattttggtttcatgaaaagtttcgattatttagcacatcacatccttactggtatgggtccttccacgcgaagaattaaacagagattcacgcacaatctgacacttatgacttaattttgtggcattctcctgagacaaatgaatggagcaaattaaatagcccacacccaaatgaatggagcagttttagaatgttcccttccttctccctctcccctcaatgcttaatatcctcaactttttatttacaggagtgaagtgcttggagacaaggaaacgacgtaga

SEQ ID NO: 114012 - DNA, 725 bp, Physcomitrella patens
  Intron number 1 from transcript Pp1s22_241V6.3 (locus Pp1s 22_241V6) derived from phytozome v7.0 (chr-ID scaffold_22; pos 1510358 to 1511082)
accgcttgaatttcgctcagtgttatcttaaactcgtaagtttgttttcattcttgcgctgttaaagtttgatgaggtgagtggtttggattttatggttggtgcggtgaggaatgtcgtgatcacgggttgctcctacactaattttgttgtgtggatgtcggcagtttgttgtgattgtggaacggtggtctgccaagtttgagtgctgaggttgcctccgttgtcttgttcttgtttccacgaggatttgttttgtgtgtttgctgagttgaggtagcgtgtagcattgggagttccagtttcagatgccttgcgtggttgtgagatcttgactgggttttcttgagtgttggaagagcgaagtgttgaattttcgcgcaggctttttttctcttgtggtgtgttgtggtgagttgtctttcgtagcttatggtttcgtgcatcgcgtgtagaattgggtttttgtcggtgagaaaagaggataatctacgaacttttcttagttgaaatttcgggctaggtttatggtttggttacttcaaatgagaagtgcttggcccttttggctgtcgattaggtttggccagcgtcctctgaattgcgctttgaccttcttcgtttgaaggttttcttgcattattatattctcaagacctaattgtgtttgactgatgttgtgaatttcatttcacttgattctaccgctctgcagcgttaccaag

SEQ ID NO: 114013 - DNA, 209 bp, Physcomitrella patens
  Intron number 6 from transcript Pp1s114_133V6.2 (locus Pp1 s114_133V6) derived from phytozome v7.0 (chr-ID scaffold_1 14; pos 780828 to 781036 reverse strand)
aactcaattggagggtggttaagccctgatattatgtacgtcttcactgtcgatttttgtttgttgcaatgcttaatttgtggattttttgaatttaactttagaatttcttttcatttttattcttttgtttaaagatactaatcatgcttttattaatgacacccattgcagagactcattttcaaagtacgctagattttgttttg

SEQ ID NO: 114014 - DNA, 728 bp, Physcomitrella patens
  Intron number 1 from transcript Pp1s139_77V6.2 (locus Pp1s 139_77V6) derived from phytozome v7.0 (chr-ID scaffold_139 ; pos 645719 to 646446 reverse strand)
ggaagagcttgttccgttgtagcggagctgtttcggtaagttgtgcgtattgtttttattaagtgggttttggtttgagaaacttggaagttaggatttacggcgcgtccaccagtctgacaacgcagatttgggtttgtatcagatgcctcgttcgtacgcatgtactgctctaaacctgctgattgtatcaacattctcaaattgaattggcatttagtagctccgatcatgccttttcttgaatgctagctcgctcttacatttgcttgtattaagttacacacttgagaattatcttgcggctagtttacgagaatctgtctggacaagagggaataccagcaaattcaccatgtactgcttgtacgaagcttgagctctcaaattacacttctatacgtgtcctcttccgtctccttgcttattgatggatttgcctgtactggacatatgctctaaacctgagtcaaattggaagtgcctcacaatgagagtcgtttcataccctacttaagaagagtgactaacacagaggaatgaaggccaaaggaaagaagattaacactcttgcagaacgaaattcgctcctcccgaccgttagttgtataaaaactgttggaggtctaagcacttccagaatctagtgtccataattgcgccacccaaatccaattcgaattctaagtatgcgttttgagttgtaggtcaagaagaacagaacgcta

SEQ ID NO: 114015 - DNA, 961 bp, Physcomitrella patens
  Intron number 1 from transcript Pp1s24_116V6.2 (locus Pp1s 24_116V6) derived from phytozome v7.0 (chr-ID scaffold_24; pos 1320427 to 1321387 reverse strand)
gcttaccggaggatatctggtgagtgttttttgtctttttgtatgttgagtttcttggcgttgacgatgattgctgttcgtggtgttgtggacgatgtttcgtgaatttagggtttggcggtatttgtggcgttgcatgaggaacttctgttgtgagtcctatgttggttttgcgggtttgtattttattttgctttttttttcagctttgtttgaactggaatttcttctcgcttcggtgcgtctgattatattagagttggcagaggttgttttgagtgaggagaaaagatcagttgtgttgattgagggacagggttataaatttgcatggctaggattagtgtaactgaggtacagaggatttgcttcggtgatggcgatgcttgtgagttaggttctgcgtgatctgctgattaaggtttaatcattttcctctagtttttgtctgtaatctttggcgctaatttcctctcatgctcgatggaagataaagaccggtcgtttatgccgacttccatttacatgcgtctggatattttgttgcacgagtaggtgtgaaaggcctctgctgtctttgcgcgccgcatgacacttttgtgagaacaaagatgtagtttgcagtctaagccggacttaatgtatcatacaattatttggaagcattcagcacctgaggcattaaaccttgttctggttgataggaattctcctcatgttgacttcattactaagggtgttgtgaggacttacactgcctctgcgacagcatagtccggtttttggattatcgtctgcaatgtggaaccacttctgttcaggaaccaggagagggctttatttacttcatgaatgatgtggagtagatattcagtaatttttcttgttagtcgtgtcgcgtaggcaagaaattacaatcgtcataacaataacgaggagctgcattgttggtgcaggttcc

SEQ ID NO: 114016 - DNA, 998 bp, Physcomitrella patens
  Intron number 1 from transcript Pp1s146_17V6.2 (locus Pp1s 146_17V6) derived from phytozome v7.0 (chr-ID scaffold_146 ; pos 247089 to 248086 reverse strand)
ttcttggcttctggaggtcattgcagttattttgagtgcgtacagttcgcccagctcggaggactttgttgttgtacgagcctgtttgggaggcggtggtgcagtggtcgtgtagagtgcggtaatgtgttgatgttcgaatgtcgtgatgtggtgattttgtagtagctgttccttcaaagatgggttttgcgcttgtttctttggaacagcgggttcctcaggtttctcttgcgtcatacatgtgctgcttttattaatatctacttatcggaggtactcgtgcgtcgttagcgctgtccccgtgctggcgactgtaaactgttcgtctgtgccctggttttatttttcctttttctatcgctcccctgaagtgtgcaggcaatgtgttgattggagaacgggtgcctgccaatgttgggtgttgaactcggtttttggttgcgggtcacttcatgtgtttggatcgatgcatcctttcgtgaacttttttcccaccttcgattgcggagtgtgtcgtactgcaagcattagtagttggtcaatattgatagatttactgtcgcaactgtagtagcgattgtttccttgacaggccatcctggacgcagctttcgcggcctctggtatccctgtcgatatgtccgcatgcaatccttcgagtttgcggtctgaatctaaatagattgcatcctaaagcagttgatagtagtggcggcggtctatacttcttagcgctcattgtatgggacttactcttccgagaatcattgaaggatcgatacgaaagtagatgtacagcggatcatgccaagaatctacgagttttgctttgtgaaagcttttttctcacgactttttcagagaatcgaaattctggaagtgccatctgagtcgtaatgtatatcctaatcacgagccagttgagaatctatgctaatttaagataggtaatcaactgcgattgaagttctaaggtggttttttcttgcaggtca

SEQ ID NO: 114017 - DNA, 882 bp, Physcomitrella patens
  Intron number 1 from transcript Pp1s195_13V6.1 (locus Pp1s 195_13V6) derived from phytozome v7.0 (chr-ID scaffold_195 ; pos 101217 to 102098 reverse strand)
ttgggtgggaaggaactgctgagcgagcgctggaggtatgcgaattggtttagggcaattttgatgtgttccatcgggcatagtagaacatttgtgtatgttgaatggtattgggttgcttgaatttgcagcccaaatcagtgtggtgtgaatgaggacaccttgttgattaagtttcaggaagaattatctcgtttttggaggaagattgtgtttggtatagtgatgtgcagtcaattcttgttctgtgagagaattggatgtggaagctttgtagagggtttattcggaagcgaatctccttcttgaaattcactattcatctataagtagctggattgaagaaccatgaattgatcgaagtattgtagcaattgtgggaaatgaagtggacgcgatcaaagacaatttccatcacaaaactatgagggttttgtgatcctccagctgaatgtatgtgttcatctgggggtgcgcggagtatgggaggatggtcagccctaaactgagccgcacagtcctccttacagcttttgtacagggatgcattacgttattcgcaccatcttgcctctttttcaggctttgatatgaagctttcatttgaactctaagtttcttaaaagaaataaaaagtcaatcagttgccctcaatacacagcagaaatccagcggaacaaggccagttgcagtcatctgccaaagattagattttgtacaagtaagattaggctgaatacgtgtaatgtgaaagggattatgcgttttgaggtgaggtttggcgatatttacagcattatcagtagtgtgcgcttttctaaagagtttctgttgatgggctgtgtcttgatgctaatgatgccggattgttatggattcagg

SEQ ID NO: 114018 - DNA, 1002 bp, Physcomitrella patens
  Intron number 1 from transcript Pp1s7_280V6.3 (locus Pp1s7 _280V6) derived from phytozome v7.0 (chr-ID scaffold_7; po s 1651539 to 1652540 reverse strand)
caacaaggtgtgcattatatgctttacactcgatcctacactgggcatacgtgattagatttgcaccatgcgaaggtgcgttggaaatgcgtgcaaggtgcaatgcaggttgcttagccactcttatttttgaagacacttgtttccgagttggtagagcaaagtttctgctaagagagcttgtcgcacgatagccttcagaaaatcggcctagaaatgagcttcgtcaagggaacaactcaatgttgaggacatagccagtccgttggtgatatgctcaactgttgtctgtgccttactcttcttctgcaaaccgctccttgttgaagggcctcgcttgttctacatggtaaaggtacataaatgattccggttgaaaagttcatgtaggtaggtggtgtgaatgtttggctcgctagatatgttgctagttttttcgtcggacgatgttgtcatttttgttctccttcgtctggttacgctgagcatttcgcagtgttgaccggatatgatacacgagcattgcaagaaaagagaattgaagctttttcgatgtcaccttgtgtgaagtgacgtgcggttgattgaacttcgggctgcattttggcccacttgtctctcggtccatctcttcgcataagacttaaagacgcccaacattttaagattaaggattcgtggaaccgtcattatgaatgtgaaaaatgtattcgcatgtgcgacaaatatctttcaccggtattccttttggcactccgctcggcacaacgatttcgcagagcgattctctattagaccttgtattctctctacagaaaacacttcaagcagaatcactaaaaatcccttgatctggtggacaatattatctttgttgtcctcgcctgccatctgaaggagatgctgttcagtcctctcttgttggattttgagttgaacaagtatctaatcgaatctgcaggatatgttgcagtgccgcgttcatcggagagtctcgaaaac

SEQ ID NO: 114019 - DNA, 829 bp, Physcomitrella patens
  Intron number 4 from transcript Pp1s312_47V6.1 (locus Pp1s 312_47V6) derived from phytozome v7.0 (chr-ID scaffold_312 ; pos 328989 to 329817 reverse strand)
aaaaggtaatctgaatctctagcagtctatatggattttgatttaggaaaataagttagaagtgctcgttttctattggttttcactttagtgttactttttaaggatttggagtgtttcagacaccttcgtttgatttggccgtgttatttaagccattggagttctcagcagacaaaattgtggcatccaggttgatccttcgtcctcaatattcattcagggtgatcaacggttcattgaaggaaatgtatggtttgtacactgatccatgatcttttaggcctcttcttcttcttcttcttcttctacttctttgttacttactcgttcattcgttcctttattcactcattcattcgtgtattattattattgttactgtgcatttttattttttataagtttttaaaccaggaaagcttgaacttgaaactccttatttcaatacatatatgcttatttcgttttgacatgtgccaaatattaccgaaatcctcacatacaatttccacattaagcaatgtcttttctaaaatgtgctagaaaattaacctgccaaaatcgaggtacaacagcttgtttatattaaactgatttgagcatataatcagattgagcataacagctggagggtagataatgtaaccacacgagtgctgttttgtgtccgtttttaatctctgtgtctccgtgtttaaatcgggttgtatgagtcttcatttttgcgttcttcgtctgatattttgactagttcgtttgtagtaaatgatccgtgaagtttgataagattagactcattgcaagtgtggatcgcaggagaagctaa

SEQ ID NO: 114020 - DNA, 637 bp, Physcomitrella patens
  Intron number 3 from transcript Pp1s15_298V6.1 (locus Pp1s 15_298V6) derived from phytozome v7.0 (chr-ID scaffold_15; pos 1685956 to 1686592)
aggttggcttgacttttccccctctcctattcaaagacttacaaatgttatgcaacctgtccggagaattttgcgaatgttttctaatcaaacacacgttccgaaaatagcggattttcctttgaagtttgggactctctgtttattcctttttgtgatttcttaatgtatactttagtaagatcttgtttgcgttatactcaatgcatagcgttcattatggaacgctgaataaattagacagaaaataaaccaaactttaggtgttatcttcttagttgttacattttgatgtcaacaaattattattaagcatctgtagaagtttgattataagcccgtattagcttagattgtgtgcaatgacacacagcacaagttgaaaaaaattcattgactgtagtcttcaggtttgaatttccaacaatgacttgcacttgcactttgatgttgcagcacagtagtttgaacttttatttttgaataattctgcaatattattgatcctggtgcaatacttccggtctcttaaggttttatatggtagaggagtacagtgaaatcgttttagttgtggttaggtacggcattgacttatacaagtctgtggcaggtaatcattgtaacaagttcttta

SEQ ID NO: 114021 - DNA, 258 bp, Physcomitrella patens
  Intron number 1 from transcript Pp1s42_163V6.1 (locus Pp1s 42_163V6) derived from phytozome v7.0 (chr-ID scaffold_42; pos 1370069 to 1370326)
ttcctcggcagatttgcattccgatcattccactcgtgcgttcatgttgctactcgactttttctcttcctctgcatgcgtgcttccgatgcttctgctcagtgattgctaacctgttcttggttggatgagttcacgctaatcttgtcagtgtttgtggtttatttatttatttaattattcttgcgatttgatcgtgtgtatgtgtgtggttgtgattttttttgatttcttgttaattttttcaggatcacggtt

SEQ ID NO: 114022 - DNA, 652 bp, Physcomitrella patens
  Intron number 2 from transcript Pp1s21_298V6.2 (locus Pp1s 21_298V6) derived from phytozome v7.0 (chr-ID scaffold_21; pos 1743857 to 1744508)
ccattggcgtggagttcgccactcgctccattcaggtatcatccgtctgctgtagtaaatgtaccctttcctgagttaattatcgctgtgactctttctgtagagggtgttgatgatgcattaggagaggatattgtgtgtaatttggagtagaagcccccggagaaagaatctgtcatgtaacgtagatgccaaacgctgtgtaatgcagctcattcgttaagatagtcacattttctatgagccataactaatgtcttggaggattttcttggggtgatcggtaatttctgagattttggatgccacatgtggatcgtacccgatctctatttgtgttgggtcccgaaagaatagcttctcctgatatgcattttgtttttgtgcgttcgtatgtataatttttaatattttgtttcttgcgtatgtgtgttgtataagtatattggaaggtgtatcctcattttacaaatcatgattcgctttatttttaaattcttctcacctcctattatagttgacagattttggtcatctagtgatgtcttagatgacgcgtagctaagaatttgttgtctggaagttctaacttttagtgtccttctttattttattaggtcgacggaaagaccatcaaagctcaaatctggga

SEQ ID NO: 114023 - DNA, 808 bp, Physcomitrella patens
  Intron number 1 from transcript Pp1s6_167V6.1 (locus Pp1s6 _167V6) derived from phytozome v7.0 (chr-ID scaffold_6; po s 1796055 to 1796862 reverse strand)
ctgcgtcgattctcgtggctttctttcaggtggaggtaaccagattgaccaaattgaacttgcccctatcatttttgctgcatttctcatgatttttttagtaccagtaatgtatgtgggattaaaacccgaaagagtttgaataggaaccagatattttgctagaaatgatcaaatgcttctcgacaattggatatttatgagtacttcgtatcgggaaattcagacttgctttagtctttcgagcggaagaggatttaacgattcggtgctgttgtagctgcttgggtacaaggtatttctgccatgcattatattttccaagcattctcactgcaaggatcgctcatgtctgattgattgaaatactgcaactccatgtttctttgaatcttaactcgaaggtaagattatgataagggacgacaaagatcacataattttgagatgttgcttctgtagggagcatagaaaatgaactaccttccgcgtttaattgtgcgaagcgctgctgctaattcttacaaaaatttccagttaggtggctcggaggttgtttgaaaaagtgttttagagctgaaatctgtgtcgtaattgccgcaaacttctaagatttcttacctaccgccactttgtaaaactacgctttcttctgactaaatttctatcacaggttttagcagccttaaaataaaataaaataaaataaatccactgccctattcctgaagcacccgttgagaagaaataaagcgcaatgaccgatctgatttcgatcttggagtcatcagggtcatcacgagaggag

SEQ ID NO: 114024 - DNA, 720 bp, Physcomitrella patens
  Intron number 1 from transcript Pp1s422_7V6.1 (locus Pp1s4 22_7V6) derived from phytozome v7.0 (chr-ID scaffold_422; pos 106809 to 107528)
gcggacgaaacaggtttgcttttgtttcccaccatccggatctgctaggagcttgtttggatatccgaaatttccacttctatcagaacggctgtccgaactgttgtcccaatatgttgcttgatgtgcttggctgagattccaatttgtttggttttgagacacctcttctccttgtacaatatgtgcttttttgtggaattgaaactatcgttgtacatgtctatgcagccaaaggagagtaaggaagttttttgtgtctcggttgtgccaacttcttctaatcctattcttaactgggccaattctagctcaatttccgacatccactcagtaggaatgatagttgccaatcatgtatcaaagttcaatctaatctttcgggaactatgctggttcaaagtgtgtaactggtaacttaaatcgcgttgattgtcagaaccgtatatctaaagtgatgaaaaaaatgtagtgtcatgtgtgatccacgttgtagcagattccgatagacatttgtgcttttcgtcaccttccctagatgttttccacccgtcagtgaatactaatcataatgatatagaccgacataagattctcctcaatttatctattttcggctacccacacagcaattttcgttcgatgtttgactattaaagttcataaattttatcatttcgctcaatagttaacacctatcacaatgtgacgaatgcagcg

SEQ ID NO: 114025 - DNA, 911 bp, Physcomitrella patens
  Intron number 1 from transcript Pp1s164_92V6.2 (locus Pp1s 164_92V6) derived from phytozome v7.0 (chr-ID scaffold_164 ; pos 613002 to 613912 reverse strand)
tttttttccaggcatcgcgttggtttgaaaagctcgtaatttacccacatcctttcctccctcacattctgggttgtaaaccaagtctcgtgcagatgacgtgatcttctctagtctttttacttggtttgttcatgctgtggttactcgttgcgactaggtcgttcttgtcgtcgtactttggaagaaacgtgggcgtggcagtcagacagggtgcgcgacttgctcgttttgggtctgactgggtcgtatagcgtcgagtatataagtctgcggcggccactccatttcccctcgcttttcatggttgctcctgtttaacggtttaagaagaacttggatcttgcttgttttagtgggtatttttctgggactgaagagaacgagagagaaattctaatctgcatcgagctcaataaggtcggtgggtcgagcttgcttcgataggattcacaatgtccctgttttgcgcaccgatgtttcatcggcttccgcgtcgcacgcctgtggaattttatatcttgttagactgttgttcttgcccggattaatcattgtgctaagttttcgacatttggatttgctgatggacaaacctcgcactcacgcttgttggttgaaggaatagccacgtttgacttgagctacccattgctgtgagcctccagttaatcgttcctaggtttttgggtgattcaatattcagttctacaacaatatttcagtatatatgtacctacggaatgtctttcaatgggacggctttcagtgtaggtagaacttgtgatagggaagacgagtttttccttacaggttgtctgtgtgtgtcttcaatagctctacttgagatactgaaggatccactctctcgtgcagggcgcagtttgaaagaacgcaataagagaataagt

SEQ ID NO: 114026 - DNA, 741 bp, Physcomitrella patens
  Intron number 1 from transcript Pp1s477_7V6.1 (locus Pp1s4 77_7V6) derived from phytozome v7.0 (chr-ID scaffold_477; pos 65199 to 65939)
cgcaagggtttttgctctcgcaatttggacgacaggtacaatcccaccggccataacatcaacgttgttattactaggtttctcatttctaatcaccaagacatcattaggtatcagctcaagcatcagtaatcacctatatcgtctaatccacctaaaatgctccagaagccctgttaacctaagtatctggattattaatgtttgcgaaattaaattacatatctcaacaggctttatggagctcgtggtattcagcatttattctattatcaagagacctaccttgtgctcaatcttaaaatacaagaccttcacatcttgtgacccgtataaataccgtggtttagtaatctgtaggattctcatcttcacacctattgggaggaatcttctttacaagtgatttaaatctgtggacctcctaagtttgaactactcctgcgcaatttaacattatacgcacaccttacctgctgtttgtttgactctgttgtcggttataggtcggcctaatcacgtgtcgtttgctgctccaaacattctgccagaattgaaatttataaatctcacaattgtgtcgacaaagtcaattcatctggaggaggtgattcagcacagcagaaatggaaaaaaactaccaaagctggagtaggcggtgccagtgaagggacttgcagctatcgggacttcgaagtgtacactcataaagatcatgaggatgattcctcattcagtgca

SEQ ID NO: 114027 - DNA, 887 bp, Physcomitrella patens
  Intron number 1 from transcript Pp1s37_13V6.3 (locus Pp1s3 7_13V6) derived from phytozome v7.0 (chr-ID scaffold_37; p os 118586 to 119472)
attctgaaccctgccacacgtcgtttcattccctggtgagtagtgtgttcgctttgatgggtctgcgcagagttccacgtcggagtggtggttgcagcggggttgggaattcgcaagggtgggaaggtccaggtggatgagtattttgggcagttcgtgggatctgagtcgagcattggagaagggagtttgatgtagtgttgatgtgccgtagttggattttttttggtgctcgttcgagttgtcgccttggtggggttagggtacaggaagaacgagtgtgtgtgtgtgtgtgtgtgtgtttgtgtttgtttgtggggtggtgtctttggatgcgggatgaggagattttgtttcagtttacggtgtttggaagcggatcgttttgggagattaagaagagtggtgtcgagagcatcgtaaagtttgggcgtgttccttggtcttcactgtgagtgcggcggaattgaagacgggcacttcggccgtgcttgatggcgtcttcggccatctttttattttcttgattcttcaatttttgttttttgaatttgtggattgttctcgcgaaggcgcgtggtctcgttgcttccttttgacttgcaaagttagactgttggtggaggattctactctgtgtggtaatacgtccttccaaggatcggtgggagcttttcgtacttcgtctcgcttattttttacttgttatatttctgtgtgtttttcttcgtggctcgattgattcagaggctggtgatcttggacagtttcttccttccatcttcttctgcatcttgtggctctaattagattttggggccttttaagttagactcattctgaattttgcagatccaaggtgattgcgtttaggtcgaactttcaaa

SEQ ID NO: 114028 - DNA, 1027 bp, Physcomitrella patens
  Intron number 3 from transcript Pp1s7_177V6.1 (locus Pp1s7 _177V6) derived from phytozome v7.0 (chr-ID scaffold_7; po s 801437 to 802463)
gcatcggtacgtgatgcgccctttacagtcttttgttgacgttgctttaataagcagcgaagcacgatcaaatgagttagagcttctcgatactttttccttctagtgtttccttcggtttcatggtagaataatttatttgtggatgcaactctaagtatccactgcttggtattcttctgctacatctcaagtagcttgagaatcattagcagtagatcagacatgtcatgcagctctctttcacgagagagaaattgccacatgctgttctgttggtgtttgcatcctaaatgaacgtggatctatatccaccagcaacctcaacaggtttcactatgctggcagtgcatagatgagaagtatgatgagttgcacaagccctactttgctcccgtgtcatttgatgtccctgctagccgttgttgtcaaacgtgcggaaattcttgaatttgttcgagaaatatcgttgagaaggaatgttagcaatctgggctttaatttacttgtcaaagattggaaattgaacatgccacgctcaaactacaaaacaacttaattgcagattctcttaacttttgattgtcgagatgggaatacgatcctgcaaattgtcttggaaggataagactggaggttgagcatcgctagcttcaccagtaaatcgtctctttttgcacatgacgaaaggattcaggtagtagagaaaaagttgccacaactatatattattggtcgatagcagatcacagatacccggtcgtgagagcaagtcgacttttgactcttcaagagtcgaacatctcactgactggtgtccatactagtttattcaaacactgttgtatagagagaaagtgaggcagcgagagtggctttgattcacgtattcacgggacatgggaaattgacttaggcgagagaacaatgtacctcaaactcaaaacgatctttgcgtctgttgttattcagtcgctgaaagttctctcaaatgtacaggcttcagctgttggcgatctctgtgaag

SEQ ID NO: 114029 - DNA, 860 bp, Physcomitrella patens
  Intron number 1 from transcript Pp1s58_270V6.1 (locus Pp1s 58_270V6) derived from phytozome v7.0 (chr-ID scaffold_58; pos 1732074 to 1732933)
gttaggtaagcaaacactctcttctgacttagaacgcaatagaatattctgtttttaatggtgacaaatggctgctgaaaggaatgtgtatgagacttcatttttaagactacgttactgattagcttttgtgactctgggagcacgcctcctaaccatcttcgtacatacttgtttatacactcatcaagtttcaaaatctgatgcctattcaataacggaattcgtgatgtacgtaaaatcccaaacatcagaaccttgaggtgattgattaattacattggacataacttaagaaagatttgaaggaatctacattttattgactgtggttcttcccctacacgatgtggatggttacagctttgtggcaaatgaattcggaagatgtatttccagcctgatggactgccgtaagttcagaccaaatgcgcaatcaaattaccaacgatgccaaatttctttccacgattctcatttacaaagatggcattaagtgacacaaaattcattcggagtgaatgacacctaattaatttgaccgttgggcaacatctcttttctgaattgtaaatgtgggcgtgttcattgggttgggttcagcttcgacttttggagacgtattagtccatgtttcttcgaggtatccatactcgtgcctatcttgaatcgctctcttgacttcgcaaagtttacagtatgtcagttttttctacttctcaacaggaatcatgctcctgtgttaaatgaatgtatctttattttggaaataaaatttaattgatcttatcccatttcggacgatgcttccattggtgtgagcagagccagcaacacagcgaccttgctagtcctctcac

SEQ ID NO: 114030 - DNA, 512 bp, Physcomitrella patens
  Intron number 1 from transcript Pp1s42_259V6.2 (locus Pp1s 42_259V6) derived from phytozome v7.0 (chr-ID scaffold_42; pos 2145422 to 2145933 reverse strand)
cccctttcggggcttacattcgctgtgaaggacatgtaagaactaacttcctatcattctttgagtctgtccattctctttgatcaccaatagtgagaaaatgcaagaattgagggtatgatgtcttgatagtaagtcaggatgctagagctaggggtttattgtcagcgatcacttaatgtgcatcaatcaagagtatcgtacctattcggaaaccaattttgccaggaattttgggagcctccagatttgagcgtgccgtctgcctttctcttctgccactccttttcactccgtcctttgaggcgttgttttttattcttcacttgttgtaggagaatgcgttgcgaatgtaaagtattgtgtatacaaggaacatacttcatcaggattttccaggatttttgatgttacgatttccttttgttttctcagttgcagtgtggtgtgatgtacatgtatgtgctcttagatcgtgtggaatatatttgtggaaatgataaacagattcg

SEQ ID NO: 114031 - DNA, 531 bp, Physcomitrella patens
  Intron number 2 from transcript Pp1s79_213V6.1 (locus Pp1s 79_213V6) derived from phytozome v7.0 (chr-ID scaffold_79; pos 1287356 to 1287886)
tggatagtaagtaggtttcttatttcgttccgaggtttgatggcattctctcctcactaggttattcgttgtcagattgctggaggaatggacggtgggaatcctcaattttgttgtgagggttttctttggttgtggtcagtaactttgaggcatctatggattgacttaatcgtcatgttttttttattttcttttattttcttttttttaacccggtgcaattgttccaagtcttacaccaatatccgattcctgaatacatctctcagtagaaatacttcagctgttagcgcagtcttcactgggagaccgcaatgtcaccaaccctattcaaccttcttggcattgtgactttgtgtgtggcgagtgatcacggcactcgacttccgtgatttgagctttcctagtttgtacttttctttttgcagtatcctgtagctcaaggtgttgacaatgagcatacagagcactaactggcatccctctattgcaggttgtatcataggcttaacgtgtgttccaatcacc

SEQ ID NO: 114032 - DNA, 860 bp, Physcomitrella patens
  Intron number 1 from transcript Pp1s62_170V6.1 (locus Pp1s 62_170V6) derived from phytozome v7.0 (chr-ID scaffold_62; pos 1318148 to 1319007 reverse strand)
ttttcttctttttagttccatttttcctgctggaggtgtgtgttactccccactttcttcattttcttcttcctgcgtctgtttgtttgacatgtgattggaaatttaagccatttagacgtttctggagcttcgatgatggaagctgtttgtgatttgagtgtataaattttttgattctgatgttctaagtctactttggaaataggtgttagaggagcatgtttgcggttcctccgtttccatctattacactacgtttgtgggtgtctgtaactctttgttagtctttggtgggacaaggtgaggaagcggaggtggaatttagggacgggctttgcgtgtgcattgaaagcgtttgtttggggctgtatactctgtcggaatttgtaattttacaatttaggtctgatgttactcagcccgatgcgacgtaaatgtgcaagattgaggcatgatgcagtcttcatgcaacatggttgtgaggcggattcttgagttccctccagagtcagcagtgttttatatcgtatttgatttcaatgggtgcacatgatggtaacgagctgtatggatgtcagaaaagtattccaagcgtgaaatttatgaatgattaagtagtcgaatttgacctcaattggatcactatttcgtcttacataggacatgaaatgaagattctggagatagaatttgcccctagaaagaaagttattatatgattgagagaattagaatcaagtatagtaagatagagtatgaaatcgttgctttctctcattgcagtgttctccaactgatacaggccagaacaagcctctttgatttcgcacccctagctgtaaacttcagagctcggt

SEQ ID NO: 114033 - DNA, 790 bp, Physcomitrella patens
  Intron number 3 from transcript Pp1s141_97V6.1 (locus Pp1s 141_97V6) derived from phytozome v7.0 (chr-ID scaffold_141 ; pos 698562 to 699351 reverse strand)
ctgtaaaccagctaggtggcgctgacagtaagttcctctcctatcttttacactcattatcctcaagttcttcacaagtgtttgttgcgatgtgttcatcgtgttagctctcaaaaaagtgttgactcggcaaatccgaccgataattcgcatgtcctaaagatttgacacttagagttttgagctgtttcaagtgtttctctttgtggtgaattcatctggaccgcttattttatcatgtagtgaaagctttgtcttgatttgtggagagcctattctcgaaaatgatttcacccagctatatggtcaataatgatcgtcatgctccaacagtcacatgtctcaggatgatagcatgaaaatgaagcaacaccacacatcgtattttacatcagttttaacctcaagacctcgcagatatgatcgttcagttcagttcagttttattatgtcttactggagttttttgtgcggaatgctgtccctccataagcagattatcgccgctacgataaaattagaattggtggagtaatcacaaaactctagtctgataaaaatcagcataccttgctgaagcattgccgtatgccacttctgcatgtattactggtgtaaatcgagattgagcatgtgatcaggtttactttcgacaaaagatggttttccaaaataacgttttcttgagctggtaaatggttcaacaattgcttcctcacgtacgttgaagttacgcaaatattaattactgttttgattcaatgatgcagaggcaacaccaaaatccgtg

SEQ ID NO: 114034 - DNA, 978 bp, Physcomitrella patens
  Intron number 2 from transcript Pp1s302_53V6.1 (locus Pp1s 302_53V6) derived from phytozome v7.0 (chr-ID scaffold_302 ; pos 366993 to 367970 reverse strand)
ggtgtttgaaactggtgttgagtcttcgtgcacttgtgagtatttttttcttctctttaattgatgtactgaagaagtgatttctatacttccattcagagttactgcagattcttgcagtgttaaggagcttgtgaggtttggggatttattgccggagtttgcttctgagcattgtgggattgtgagcaatggcggctgctgttcagttgtttgtcgtttgtttacctgcttttccttgctctcgtttcttttattacaaaccggccgttgctcaccgtgcatcgtgaggggttgcatttcgcatacctgtgccacagttcgtaattagcaccttgctttttctgaccatcgaattctcaatcgagatgatgtttccaggaattatatttttcgagctgcctttttctgaagcaagaatctgttgcgaatctttggtgggagtggcagagggtactactgtatttgattggataatggcggaggggcccgcgatgaagattttactcacgtcatttgtaaaagaggttgaaacagcactgcccctcaggagttccttcttcgttggaaccactaggtgatgccagttactaattgtatgaacatggagtgacaactgattcagtgccagcgatgtggaaaatcatgtgaacgatttccataaaactggttctaacaggcatttacatatgaaaacttaatgtggttgatgaaattgaaatcatcaattaaaggccatctacatttgaagctggagcggccgatttgaatgccattgatgcgctgaatacaactcacgttcaagaaccgttgagagtaagcttgccgtttctcacgtgaaactgttggtcatgtggggaaaatcaggtcaatatgcactactttggttccttggttgggtagatgttcccgtatatactctttgagatagccacctttgttaagcaattgatcgttttgtgagtctattgcaggcag

SEQ ID NO: 114035 - DNA, 957 bp, Physcomitrella patens
  Intron number 1 from transcript Pp1s39_287V6.1 (locus Pp1s 39_287V6) derived from phytozome v7.0 (chr-ID scaffold_39; pos 1454739 to 1455695 reverse strand)
cccagtgcgtgtgcttgcttcgtttcgccaccgtacgccttacttttcttcctttccttctttatttctgttccattttcctcttagcacgaactctgtcgtggtcttgaatgccgcacacgtcttgctaacccgagttccatagttttagggctaagggctgcttgcctgtttgctgtacgggaggtggttaatttgagactgtaatgaccctgatttttattttttattttggagttatttggtattggtgttcatgttaggtttttggtatcggacgattgtgtggtttcgtccacctccacgaagaagctgacattagcttgaatcgtagagcaaacttcgtgaattaggggtttcgtgataacgagttggtcgtgctgtcgatttgtggcttcttgtttctgtgtcttggttcaagaccctgggttgatgtcttggagatgacacatatttttatcgtgaatgctttagattggattttaaagtttgagtgaagcgcttttgatgataaagacattaaagtattttgaagtgttaaacacttgtttcagtctgatgatcatttgagacccatgcagcatttgaatgtttcagttgtggagtattcgtgttgcacatcgggtctctagtcgtttctttagactacctttggacgctggattcatttcaaggtgcttccatgtggggcatcacatgtgtgaattgtaattcctgtggtggagattaattggactcttagtggacctcgtctgcgatttcgcaatagactccagtcctatgctgggtcctcgcatcacattatgtgtttttgcggaagtgagttatgagaaacgtatctggaggaaaataacggtcatttttaattgaatcgcggcttcttacctcgagtatttactgtgctgtggatgtggtggaacagggacgtgtaaggaccaaaaccgtgaagaaggcctc

SEQ ID NO: 114036 - DNA, 453 bp, Physcomitrella patens
  Intron number 2 from transcript Pp1s307_59V6.1 (locus Pp1s 307_59V6) derived from phytozome v7.0 (chr-ID scaffold_307 ; pos 345597 to 346049 reverse strand)
ttcggcgtcattagaagaaacctcatcatcagcaggtaaagtgagagtgggaatttgacatctcttcgtctttaaaattaaagtaattaaattaaaatatatgaatgaatgaaccaactaatctggaatgttctttttagcgcataattcatcacgacgaatttgatattggattttgagctcagttgttgaagcgattgcgcgtttgccgtttctttgttagatttctttaaaactggggtagagataggttcacactgtttgggttccatttttctttcaaattatttaaaattttagtcccgctgtggcttcctcttgcagaagcaagttgcagctacaagtaatgagaaggcattgctacaaattgccaaacacttgtacaaaagcatagatcgccagtccgagaaaccacgtacataccctcagagctgtaagatttaattggagaag

SEQ ID NO: 114037 - DNA, 594 bp, Physcomitrella patens
  Intron number 1 from transcript Pp1s12_239V6.1 (locus Pp1s 12_239V6) derived from phytozome v7.0 (chr-ID scaffold_12; pos 1395615 to 1396208)
ttgcgttgcgttgccttttttttttttttttttttttttgattctctctgttgtagttgggattttcccgtggttatgctggtctgtttcagtttggtgtttgtagagggtgaatctagagcagtggtcatgttgagactgcttcgttactggtttctattggctgggatgtgatgtatttgcttaaaggtgctcgggtccttggttttcaattctagtgctcttttctgtattacggtaggagattctcttggtgacttttccagctgatagcttcaagtgggagttgatgaggagggagagagtaatgctggtctttaaatcatcatctgtgagggcatttggagtgggcgtcttagaatgcagagatttgatgatttccatccggacgaagtgtgtatttggcgtctgtacggtactggagtggtttccttgcagacaactgctcgtgtagtgtaatgacgcagttttttcttttcttcccttctctctccccccccccatctttcccacatgcaatccagaagtaatgatatctgtggcgtgattgacgctgcaggatacaggttagtgaaccgcacgagaataagcgtc

SEQ ID NO: 114038 - DNA, 290 bp, Physcomitrella patens
  Intron number 1 from transcript Pp1s18_210V6.1 (locus Pp1s 18_210V6) derived from phytozome v7.0 (chr-ID scaffold_18; pos 1569582 to 1569871)
aagaagcggcactcctgttgagagaaaacaagcaggtggttcactatttctcgtccttaactctacacagataaggccagtgatgaattcttagcgcttataaattggctgtgtccgacagagtgcattaagctgagtggtttctgattcttagattcaattcattacaacaggatctatatatctttggtttatttgaactttgatgaatatgtattttttttcaatcaatcttctgccatccaaagtaatgtgcaaatttttcattcctcctgcaagcagccgctata

SEQ ID NO: 114039 - DNA, 839 bp, Physcomitrella patens
  Intron number 1 from transcript Pp1s187_11V6.1 (locus Pp1s 187_11V6) derived from phytozome v7.0 (chr-ID scaffold_187 ; pos 50427 to 51265 reverse strand)
caggtgaagccgggtggaatttagaattctgtaaggtttgtttttattggcataagcttcttcattctcatggattgtgagagtttttatgagaaagtagagccactgcgagcttggagccgcggcgactcgattgtttctgtcatgtctagagtcaattctcgtgaaaattgctgttgaaggacgtccggatgaagagagttgtggtctgtacaggtgttggcccaaaatgattgtgatcatggtatgtgcgctgtctttgcgtgactgtagtgtttccgtagtagattaacgaggaatattatgcaacggaccatctcagtgtgtcatatatttcattatctattgttactattgcaaagaagtcgatcttcttggttttttttttttttttttttttttttttttttttttaagtctttttcagaaagatatcgtggctcgagtgtatacgtttgttgtatccttcggtcttcagaagcacacttcttacaagttaactttgcaactgctgtatgattttgaactctctcctataaataagcattcgtggacttttacgtaacgaagaaattttactcctatcataaagtctgatatacatacatacatacatacaatgtgttgtgctacttcaaatgttttgctctgcatcaaaattgtttgtatgcgacgttgtagattgttgtatacccgtgcgtgtgagttcacattcaatcatgattatagtattgaagtcatattatactcttccattcaccttgtgcatttgtgagagctctgcactgagttttgtgaattgcacctgaacatgcagggggatctttgtaagctcgaag

SEQ ID NO: 114040 - DNA, 1027 bp, Physcomitrella patens
  Intron number 1 from transcript Pp1s460_13V6.1 (locus Pp1s 460_13V6) derived from phytozome v7.0 (chr-ID scaffold_460 ; pos 84538 to 85564)
cctcgcccgtccagacaatcaagttagtagaccactgttctttattcttggaggttaagttttgattggcttgcttgtttgttctagttttgaggtgtgtcttggtaggaaattgctacatatacctcaaaaatgccgtgatactttacgctcgcggtattgttattcgtgttaaacttggtgctctcgactaaatcttctagttagctgatctttgtcagcagtattggtcccattaattcagtttttggtctacgttagggtgtttgcaataaacagatcaggacatggttaagcatgcttaagtttaatttagaataattcgtaataccttgggttgtgttagtgttcagttttgaaatctcggagaaacttcttctcaatgtcaatctttgagtaatttcttgatgattgcgctttattccagtttcataagcggtttttatccaaatctagcaatcaagtggcacaagagtcaagcattatacgattgatgcatcgatcatgttgcttagacttctttgtcgaaaatgttgggagtcggaattagtggtgcctgcaaattcctctttagtttagtgtatgtacctttgtcacttagaaggaaagaaaatggaacggtttcagggcaaatacgaacatacaataattcctaatcaaataacgcttagctatcgagtttttacatgatctcacttcaacgcttttggaggtaaagtactggagatgagagtgttgatgtggaagggcgtactaacacttgaaacatctcattttcagagtcctatctagacgggtgtgattcttttgttaacacccataacattatggcattgtacagagggcattaattgtgcattattgtacatctatatgtttcatcactttcagtttccgaaaagaacatgactttgcggtcaagtagagttaactggattctagagtttatgtgtatctgcgagcttacttctacaatttctttttgagtgtagtgttcgttcgtggagcatcgcaactacaaagtgat

SEQ ID NO: 114041 - DNA, 560 bp, Physcomitrella patens
  Intron number 2 from transcript Pp1s58_120V6.1 (locus Pp1s 58_120V6) derived from phytozome v7.0 (chr-ID scaffold_58; pos 608820 to 609379 reverse strand)
aatttcttcgaaaatttcaccacgcgctgcttgaggtaaatttgtggttattttttgagctttgatttatgaatagtgtgacaagaatttgtgatcacatgcgcaatcccgttgtagtttgacgacgtttctaatcttcaatactgtgagcaataagtccacgctgaattaaatttcttttgtactaagtgggattgcgtatcaggttgttattatgtctaattgtttgtttgtttgtttttgttttgtttgttttgtttgtttttgttttgtttgttttgtttgtttgtttttttcttttttcctttgtttctttgttagtatcacaagtcatgtggccatactcgtcacattttgcgttgagctttattttaactttatgtttctgagggctctttatcaatatatgtgtatatatattttcgaatttcagttattagcaataatatatgcaaaactccggcatttaccgaatgtattctctcaatctacactactatgctcaaacttgtttactcgtgtatgtactggcaggtccatttggaggaaggtgctctgat

SEQ ID NO: 114042 - DNA, 792 bp, Physcomitrella patens
  Intron number 1 from transcript Pp1s474_4V6.2 (locus Pp1s4 74_4V6) derived from phytozome v7.0 (chr-ID scaffold_474; pos 55517 to 56308 reverse strand)
cccaattttttgtttcgcgaacagcaacatagagagtgagttatcccgggatggaatctcaaaaagcataatttgctgtggtttagtgcatgttggggaagaatcttttgttgtgtgcgtgaagggggtgtggtgaccttgaagggacgatcggttaggttgtgggtgactatgcaacgtctttcaatcgtctttcgattggtttggttagatttcgttggaatattcattgttttgtggcttcaggaatttttcatcacgggtttcgatctattgctgggtttgtgtctgcttgtggatcgggtattcttgctatgatatattgtggaaattaggggtttcttgaagtaggggtttatagaatctcgatatgtttattggtggcagcatcgcagccatccctcagtgactcctaggaatctccttgtaagcagagtgatcattcgtacgtttttttggatattggcttttaatgttgatgatgatgtaaggacgagaacgtatttggtgccaataatactgagaggtatgagaacgggatatgtttatgtttctatgatttgctgttcaaggaagtttacaccttacccttgacaaatttgataagacttttaaaatgaagcccttgatatttgacttgcgtgaactgaattatcgagtactggagcgtctactttaatcctatgtcttagtttttattgtctgcatcttttgttgctgcaacttgataccaacacctttatgccctcgtcagtcatgaaagataattcactgactgagcaacagtggatt

SEQ ID NO: 114043 - DNA, 703 bp, Physcomitrella patens
  Intron number 1 from transcript Pp1s30_95V6.1 (locus Pp1s3 0_95V6) derived from phytozome v7.0 (chr-ID scaffold_30; p os 658782 to 659484)
ctaatattgcttcttgtaagtttcttcattagtaagtatagcaatgccatgaaaattttgatggattcttattggatcttctttggatggaatacataatcataacaagtttgtataattctttgtcttttaaatggaaaggactatatgtctaggaaatttgaattacttttaatttgtgttgattggaccttgtaggtttgattggtgccatagtcaacaacttgtacaaaggacctaacatttacaaagtggtatgtgggaatgaaactccatcatctcttttattgtacatgtcttggcttgtggtaattagttgttggattataattcatgggttgtagacttgtgtgtaatgctctttgctatttctcagtgatatcttgggatcaagtctaacttttggtgattactcctttaacatgttgggagaatacttgtgtaaatattgaaatattcactagtggcattttgctgcaaccttggcagagttcaatgaatttgcaaatctaaatacatcctttttaatagagttagtataggttttacataacatatttagcaataggacaaatctcattttaatgaatgtctctctctctcagtactcctttttataagacaaggggctgacaatcgttgcgcacattgagatgaacgctaaactctgtctcttacgtggaacagtggccaaagcagctaa

SEQ ID NO: 114044 - DNA, 289 bp, Physcomitrella patens
  Intron number 1 from transcript Pp1s56_34V6.1 (locus Pp1s5 6_34V6) derived from phytozome v7.0 (chr-ID scaffold_56; p os 272966 to 273254 reverse strand)
aagcaagcatacaagcaggtagtttaccacctctcattttgttttgctttttgagttttattttgttttatttcaaattttatttttttttctaagtttatttttttattttaatcttttgttttgttctcttttaagttatgttttttcttttcttttcttttctttcaagttctattttcttttgttgataatattttgttttttttttctttcaagtaatgtttttttttttttttcaaaagtttaattttattaattttgaatttattcacattatgtatggaag

SEQ ID NO: 114045 - DNA, 533 bp, Physcomitrella patens
  Intron number 3 from transcript Pp1s77_172V6.1 (locus Pp1s 77_172V6) derived from phytozome v7.0 (chr-ID scaffold_77; pos 881633 to 882165)
gctgcgaataagtatgttgccattttcttttcacgttttgctaatcaactgaacaggcttcttgtggtggttcccatgtgaatggtcagctttatggtgtatctggttttataatcaatgaaaaatctaaggatgtgctgcttgttagtctccgttgtgccgtaatggattaagaagcatgcatttttacgttggatccactgaggtgtggtaggttattggattcatgggctctggtcagtaccggctagtcctagttttgagttgctagaaggcaaggatggtcttgttctagtctggtgtgcttagacttacgctgtgtagggattctcaatgtagttggtttcctgtattacttggagcatctgatgagatatccgtgccagaatcatgctaagagtgcatagtttgtacacctgtataaatttatctgttttctggttgaatgcacacaaactttcgtataaactgctacaggaatcagctgacatatcattttcttcttcgtgcaggtaaatttgttcctggttgct

SEQ ID NO: 114046 - DNA, 838 bp, Physcomitrella patens
  Intron number 2 from transcript Pp1s307_5V6.1 (locus Pp1s3 07_5V6) derived from phytozome v7.0 (chr-ID scaffold_307; pos 39305 to 40142 reverse strand)
gccggtgagtctcgtgatagccccaagctgtaatatccgattacttcttttggatgtcttcttggaagattctagtttttttttgaaaagcagatttctgggcactcggtacactgatacatctgttattttggcgacgttatcatcttcgtttacatatgctaggagtctaccttcaatttgtgatatctgagaacgcaaggttgcaaggttctgaacatctgttactgagcatcgatatctcagcccatgtagaattgctagatatgtttatattttaagtgtaggtgaaccatgctttgcatttccatattgtttcctttaatgtgcatagtggatttcttcgttccattttatcggcttatcatctgattttctcgcccattggtgcgctgtaaaacctttcaatgcaagtttctgttcaatcttcaataagcccggttcgttgtgttttttgctagtctgttgaggactgcccacattgcggatcttattggatgaataaatatttgtttcttgctattttggtggactggttgctgtctacaacttaatttgtccttctcagaccaatcatttgcctcgatgtcatattgtatggtttctgaaagcgcacgccctggtaacacctttgaagcatgtttgcaattcttgctgatgggagagagatcagtgaggacacagtctaggtttttgattgaggtatttatttgactctgagattgagggttccaaacttcggggatattagatacattcgttgcgtgaccttaatggactccaactcttgtcttgtatttcagactcgaaggatttccaagagtcgctgtttcaagag

SEQ ID NO: 114047 - DNA, 474 bp, Physcomitrella patens
  Intron number 1 from transcript Pp1s347_31V6.1 (locus Pp1s 347_31V6) derived from phytozome v7.0 (chr-ID scaffold_347 ; pos 296364 to 296837 reverse strand)
tcgcggtacttccttcgtgtaagtgaactgctccagtagctgcacatgtgttgagattttttccgggagctatttaggtttggaattggttgagtttgattagggctaaaccctaaagctgttggaattttaagggtggaggccgtcctgttgagatcttcagaatccttacgagtttattgagtcgaagggcacatagagccttgattggacacgcaagctattgttcaatttcgatttttagggcaataggttttagtggttgttcgcattctccgtggtgcaatttgttttgtactttgaacggtgtgaatggagaagcttgcttgtctttgcagtattcctttcgtttgtcaaatttttaatgcaaaagctattctggctaagaatgtgagtgccgtgtattcatctgaaagtattctttcgttttgtggtacagaaaccacttgctggtctatctccagcagttacaga

SEQ ID NO: 114048 - DNA, 458 bp, Physcomitrella patens
  Intron number 2 from transcript Pp1s106_4V6.1 (locus Pp1s1 06_4V6) derived from phytozome v7.0 (chr-ID scaffold_106; pos 59367 to 59824 reverse strand)
gagcttgggaagactttcgctccgcaaccgaggaggtatatctccttcaaagctactttgagctcctcagctcctaacgactttcagtgaacattaatttttcgagcaaataatagaagattatgtcctttcagaattctttactgtatcgacagatgactctccttgttgttgtatgcattttgtgtgtgttttttaattgtttgtttgtttgtttttgtttttttccatgatattttgttttaattttttttataaattggtcaggatttgcaccaaatcatacggcatgaaatacctgtgaatggttaatctttctattttgtatagaattgtcaatggttctcataaagaacttgcgtagcccttctggtattactataggctgatttgcaacatgtatcaaacttaactttcgtccctgcgctattttctgtgtccaggaaaaagaaaaagct

SEQ ID NO: 114049 - DNA, 360 bp, Physcomitrella patens
  Intron number 5 from transcript Pp1s11_8V6.1 (locus Pp1s11 _8V6) derived from phytozome v7.0 (chr-ID scaffold_11; pos 91191 to 91550 reverse strand)
cggaacagattgggcactttggagttgggtttaaggtacttagccgcggtgaagtacactcttcgtttcgtttgtttaccctgtttagcggtgcaatagaacagaataatagtcagtcattcttgctttgttgtggagtcatttgttgggattagcaaacatacactctcgtgtaagaccatagaatattgagttctggcagattgtatcccttcgctttgaatttctagcgctgtgttgattattttgcacgtcgatctaagtttttctgaattgatacttccaagttttagctaagttttccaaggtccgaaaaaaaaaaaaaaacaaaaacaaaaatccaattttcagacaggtgca

SEQ ID NO: 114050 - DNA, 377 bp, Physcomitrella patens
  Intron number 1 from transcript Pp1s114_87V6.2 (locus Pp1s 114_87V6) derived from phytozome v7.0 (chr-ID scaffold_114 ; pos 486705 to 487081 reverse strand)
gtcttccgtgtttgcgcagcagagagtaggatttgtgtcgccattgctgtcctacgtgcatggattcagttgggacgcggtgtgagtagtggttatttgtacttagttttgaaattggttaatttggtgttggtttttatgcctttgaatatcttggtgtttgagcaagggttttcaattcttaaatttttgacactgtagcggtctgaaattgtaggctagtttcggttgctggaagacgttgttctgcgtaatgtggcactttgtttctgatttatgatagaggaattatttctcagattttctcaattttaaactggacgtccattgcatttcaatcagggcatcacgtcagtacctgagtctttgcaagcttc

SEQ ID NO: 114051 - DNA, 503 bp, Physcomitrella patens
  Intron number 1 from transcript Pp1s53_156V6.1 (locus Pp1s 53_156V6) derived from phytozome v7.0 (chr-ID scaffold_53; pos 1018072 to 1018574 reverse strand)
tgttttgactcgaattttcttgggttgtgttcggggtgagtggaatgcgattctttcttctgcttactcgagttgaagttatgcgcagtagacttttatttatttatttatttatttatttattttgttttgtttagagacgattgagtggaatgaattggcggaggttttggggaggtggctgatgcatgtgttttgataggtggtttatgatgttttccagagattccattttcgtccctttatatttgctctcgtaggtactaggtttcgaggcgctttgttcaggttaatgagatcagaagtaatctgatagtattgaacaacacgtaattctaaccacgttcggattaaagtagggttgcaaccttggtttttaaagcttccagctcagatatcttcactcttcattcagtttgtgttcaatttaatattatatcaatttttggttcgtgttctgacatggcttaatttcggctgaaaaagacgtagtgcctgtcacg

SEQ ID NO: 114052 - DNA, 802 bp, Physcomitrella patens
  Intron number 1 from transcript Pp1s310_32V6.1 (locus Pp1s 310_32V6) derived from phytozome v7.0 (chr-ID scaffold_310 ; pos 293155 to 293956 reverse strand)
tgagtcgaatcaccgacctgagcagtttttctcaggtgggttcccagttcttttgtagaccctttgaaagttcggaaggctcctgccaaagactctttgtgcgccttgctgtgtgagcggtcatgtctcacgaacagttcgatgttcaatggacaaacaagatgaaagtcgaggaggaggcatggcgtacgagatgtagtctttggtccagtttaaacttccgacccgagagaaagtgtatctgttggggaaagtcacagttcaagtggctgctgttacgatgaggacagtggcttttagaattccattcgttcattgctgatttgagctggatccggtgtaaatgcttttaaaagttcaaaactgaacgaatagtacctttggtttggtgattcgtttttcaaagtattggaggtcttcgacgtacaagcagcttctcacttaaacgggaaccccaccttgttttttaaggtcactttcgaagcacaggatgaatgttggagtgatatcagaatggtgccagtttcaaatgaaattatttcatgaaggcgtcaatgtttgtataagatgcaaagccaaatttcgggaaggacataggtgttcaatcgaagtgctgtagcgaaaccgagttttgaatgtacaagcaggatgcgtgcgagtttcgttttggatcatttcaattccatgtgtacaaatccaaaatcataagctgttaagtgctgtttcaaaccacacattgacggaccatcatgtggtattcttcggtgcagagcccagggcagccacagacgttaggaacagg

SEQ ID NO: 114053 - DNA, 430 bp, Physcomitrella patens
  Intron number 1 from transcript Pp1s51_165V6.2 (locus Pp1s 51_165V6) derived from phytozome v7.0 (chr-ID scaffold_51; pos 1050902 to 1051331)
ttcgcacaataggaggaacgcgtaaccggcaccttgcaagttttctcgcccttcgcattcgtttcttatatcagtgtgaagttcatacataaatgatttctgctttgaaaccgctctttattatgtcatgagctcatgcactaattcctgaattgtgaagccagcaagtgctaatacgttgttcatccatcttctggccttgtgcaactggggaatttgttctgtgtttaatttttttggttttgcgttgagtgctggcaagcgtttcattacgtacagaacgagtatgagttgtgatgatttggtgggatttttttaaatagttgaacgtcggctgggtattgagttcaaagtgggttgagtcttaggctgatagttcaagtttgagtgaacagggcttggtcgaacaagtgctacgtgacaagcgggc

SEQ ID NO: 114054 - DNA, 535 bp, Physcomitrella patens
  Intron number 3 from transcript Pp1s51_165V6.2 (locus Pp1s 51_165V6) derived from phytozome v7.0 (chr-ID scaffold_51; pos 1051984 to 1052518)
agttcggcccatacacgcgcggaacagtcttgccggtaaacttccttcgtgtaacacacgtccaccatagcaattcgagtgatcgaagtaattttgagatttagttttgggagtcttcggtgaaaactaggctgatatatattctcttatgactctacagtgttttttggaagaccgtaatgaaactgttgctgtgcccaattgcccgtgccaggcgaacgtagtaacttaaatataaggtgtaaatagccatgttgatcgagaacgtgggcttgctgttgcgatttctagatttgcatgattaggaaaccccgatcgtgagttacaatttatatcaccgtctggtcagtagtcttcatcctctgcaaaactgttgtaatttgctgagcatatcgaatgatgtctcgacgcatacggtcttcttaacgatcccaatctaaaccgaggtgacggagtataaggaatcgtttagaaagctacatgaaatgaaaatctgacaactctcgatgcaatttgtcatctcttgccaaacagg

SEQ ID NO: 114055 - DNA, 825 bp, Physcomitrella patens
  Intron number 1 from transcript Pp1s7_483V6.1 (locus Pp1s7 _483V6) derived from phytozome v7.0 (chr-ID scaffold_7; po s 2890606 to 2891430)
gcagtgaattgcaggaacgtgtcagcagacacagcgtaagtctctgtgtgcaaaaggagaagttggaagcactggaataaacccccagtattttgtaaacttagacccggcgttctgtactcctgctggccagccagagcggtgccgggggtgggggttggttacttgtagacggttgctcgtccattctaaccacttcgtggtcatggggtctggcacccccgtcccttgatcccagttacgcagcaatgctcccccttttttttatttttatttttattttttttccttttcttataactttcctacctaattgcaagcacgctggcagagtcgctgctattctgtactgcgggtgcccagagtgatggattgaatctgcagagcaggtgggaaacctcatggagatgacgaaccagggtcaagatctagctcgcgttcctggtgcttcagatcattctggggattcgcgtacaggtggaggtttttcgcggtccacaggtgtctagagcgaaaccgagattcagttgatttccgcagttgtgagaagcctttttctagtaacctgtcttcgcctagactcatccgagagctggttcctgattcccacggtttactcgactggttctaatctgaagcggtttctctctgtcgtcgacacatgtgtgtgtttgtgtgtgtatgtgccggtgttttgtggtctggatcagcgtgaagcatggactgcgttccgaaagaggaatcaaaggagattataacaacaaatattattaatataatgataatttgtctacattcaaattttgtgttctgttttcggaggtc

SEQ ID NO: 114056 - DNA, 681 bp, Physcomitrella patens
  Intron number 1 from transcript Pp1s210_84V6.1 (locus Pp1s 210_84V6) derived from phytozome v7.0 (chr-ID scaffold_210 ; pos 570202 to 570882 reverse strand)
gaggtgtttttagggcttgcgtgggaggaagtgaggtgggttgcgttttttttcgagctgggtctttgatttcaatgctgttttgtgtgtgctggtttgtggttttgagcagcattggactcggaggtggatcggtgagttgggttcttgggattcagaggtttgggtcctctgtggtcgttgtcatgtgtgtagttgtgccgatcattgcctgttcttgttttggacaggagagagtagcttttagggatgttgctgagaaattcttcgtgaggtagtccagagattgttcgtaaacaggaaaggcctttttttcttttgaatgttgttttgggaagtatcgtgcttggttgagattgtgtgtgatcactcccaaattgaactgtgtttcggatgacctaatagctgcatctgaatcgggctggaatttctgcactggaatggatctctagtgatcagccgcattgattgctgctaaatagtggtgcggtattccctgtattattgttatgaattgatgtgtagaggcgattcctctctctctctctctctcacacacacacacacattcggcgttatgtagtcaagatttggtgggacagtttcgagttctgatcgccgctctcttcaattttgaacattgtaggtttcttttattctatttcttttcctggtcagcca

SEQ ID NO: 114057 - DNA, 1041 bp, Physcomitrella patens
  Intron number 1 from transcript Pp1s317_49V6.1 (locus Pp1s 317_49V6) derived from phytozome v7.0 (chr-ID scaffold_317 ; pos 334815 to 335855 reverse strand)
aatcgtttgcgaagcccaggagactgtcaccggaggtatctatatttctcttttacaccagtttaaatactggctttgtgtagctctctgccctggctgtaaaccttgtattcttcgtaaatagcatactggcgtgcagactctattccttaggtggtcgggtcttcggcaggtctttttttttcttctgtttttgcactttttatccgaagaagtgcatgttcattctcacttggtcgccaaggatttcctgttgactgtttgagtttcctggtgtacgacgattgctttgcccttcgatgtccttccgtgtggtatttgttgttctttcaagagtggctagcattagatggacggttcggaaagagtttttgatgtagataataggggattcagttctagcaatgtgttggatgttcctcgagtaaactcaatgacaggttgcgaaagatttatcacgtagtttggttaatgtggctgttttttcttttcacttggaggtgtagaattttaaagatttagaagtctgacaatatgaaactctctagcttaccatgacactcttcgaaaggggaacctacgagaattattcacagttttatcagtctttctttgaatgcgaaggactgttctgtttctcctacaaccgaacgagagattttcaaacgagctgcttgagatgcccatttaaggtctttcttacatagcgcatattgcttacgatggtaggttctgtctattggggtatactcggattaaatttactgagtgggattaagcggatgttatacttatatctttaattagtatccaagaatgtgtagtgagaattttctttgcccttggatatatcattaatgacattagtccgatagctaccccacctgagttgaatggcgccgccctcattgctatgacaacccttacatccccatattttcagctgttttcattcttaactgagtgtttctctttcggtttgctgatacattttatctcaacctggtcttcttttctttccatcagtcgcaggtgttgtaa

SEQ ID NO: 114058 - DNA, 663 bp, Physcomitrella patens
  Intron number 1 from transcript Pp1s85_49V6.1 (locus Pp1s8 5_49V6) derived from phytozome v7.0 (chr-ID scaffold_85; p os 288353 to 289015 reverse strand)
tttctttaggtccgctgctattgaggttgctgaaggtatggtttcgattagatcctataaatctttttgtttgaagatgctttgtattgtaactacccaatccttgtagttgttaggaccatttagcatcgtttctttggaacaaatgaattcaagtgaacccattgtacttgatcaatctgtaagagcaatgtatcaagtgatgagtttctagaactcttcacaataagaggagaagaaaaaagaagaaaacaatggtcttctaagttagctgaattaaacaatgtgcaagtcatcaaccaaagtttgcacaaaaatcctctactctgataccatgaggaaataattcaaaagaacataacacaaaagctaccattttacggtgatacacaaaaaacactcaacgagcatcaagcaatgcttgtataagtacagagaagcacaggatgagatccacttctctccgagatatgtggatctgaggtcaagtattcgtagatctaggtaatagcgtaagtaggaggatgatggagtagggatgaacgtcccaacagttcggactccgacgacgcggtgccggcgtcgatgtgagagccccgggagtcgcgtgaatctcaacgcccgtgatgttgttgttgttgatgctgtattcagagctccaat

SEQ ID NO: 114059 - DNA, 935 bp, Physcomitrella patens
  Intron number 1 from transcript Pp1s15_145V6.1 (locus Pp1s 15_145V6) derived from phytozome v7.0 (chr-ID scaffold_15; pos 964561 to 965495 reverse strand)
tgccagacgaccttgcggaagctggacggtgtcatgtttgtttaacctgtagccatacgattggaagtgttgaactgcatacaactgttcttcttcaaaaacatggctaaatgattagtttctcaacatcaaaatcagactgacgaagtcacttgctaccttcactggcctaaaaagttgcaaaaaagcacaaatgcgtgtgtaacaattgtgcgctagttgtagatgcttctgccacaacaacaacaaaaacaaaacaaaacaaaaaacaaacagcattcaattcagccagtgcacgactcattctgctatcaaactcagctgaatgtggtgggtctcgtctggagacagattctcagataagaacacgaggttaatgtcgatagccactccaatctgcacagaaatttccagtcacaaggaagtttacaaacttcacacggaatgaatatagaattatctggagatttcagttttggccaggaaactcaacctggaaattcgtcgttacctctatgggagtggtgcttgccgctgtagaactgatctcagacactttggcagcatcgtatgagcaattccacagcaatgcagaccaaagatcgtcgtctaagttccacttccataaattgtgtaactgatagaggtctaattcatgaaggctatctctgaactcacaatagcgccaaggcgggatcaagttggtcaagaactattgctgttttgttttgttttgtgttttgtgttttgtgtgtgtgtgtgtgttttttttttttttttttttttttttttctggtttattgaaacctcgagtccagcagttggaatagtctgcatgaattggagatgaattgatcatatgcattcaacttttccaatgtgggtcgacctgaaggattgcctaattacttgcagatcagaatatttcagttcag

SEQ ID NO: 114060 - DNA, 898 bp, Physcomitrella patens
  Intron number 1 from transcript Pp1s56_121V6.1 (locus Pp1s 56_121V6) derived from phytozome v7.0 (chr-ID scaffold_56; pos 855796 to 856693)
tgcttctgggagtggcgttggctacgggttcgtaggtaagtcgtcagacgatttcagtttgagtttggtgagggaaattgcattgctgttgtggatgtttttgagatgatagtttcctgagtgttaagaacgttgcaggttggttccaggagaaatttacagagtgttcgtggattctgatagttacgatggtgaatgacttgtctcctttcccgtttggtcgatttcccacagtcttccatcattctgtgagagtatgtgctcattttcatagatccagggactagtgctaataattaatgtcacatgacgacatctttagtgtcatgtctattagcaccctgtccctcagttagttgatatacaccaatagatgcagaaaaggatgcaagaccttgaaatctaggtcaatgtccataagagtaggatatcagtttagctttcttggaccaaagatgcacaatctatcaaccgtaaactctcaagaatagatgtcactcatagcggtgattcttctgtttacctcactaccgattccatgtgtttatacctccagatctctctcaagtacataaactagatacttttatcctcacgtagcaatagaactccgtaatatcttgaattcctttcatctttgatactaaatctgcatagttttgccaatgatgatgatgatgatgatttctttttttttttcggaagaatctgatacatttaatacgactcagttgtacaagctctaagcacatgcttccagtggatggaacagtgcgtctaaaaatgttgaaatgaacatgtatttctaggtctgcgggctttcttttatatcaaaattaataatattctgtttctacatgcaggagtttagcaggagttattcacggaggcattatct

SEQ ID NO: 114061 - DNA, 1004 bp, Physcomitrella patens
  Intron number 1 from transcript Pp1s67_108V6.1 (locus Pp1s 67_108V6) derived from phytozome v7.0 (chr-ID scaffold_67; pos 799784 to 800787)
tccgcgctgaggctgcttccccgcacccccgccatgtgagtatctccgaccccctgccttttctccccctttgccgatttgaattcccaggcgtacgccgtgcctgcttgtgaaatgcggtccctgggtttttgtagaattttgcagaaaccaatcgaacgctaagtgaggagggaatatgtgagatgcgtgttgtgacgtgctgtgttgagtgaaccttttgtttctacgactacgaggatttggttgcgaggtgcggttcagtgtttggatgccgggcttggggtgcgcttcttcgtgtgtcttgttttgttttgttttgttttatgttttatgtttttttgtttgtttttattttatttatatatatatatatatatatatatatatatgttttcaatgctgttgagctcgtggagttgagtttggattgagatcctgaatttcagcaagtgcgtggtgttggtcgtctgtcttgtccatgtcgtcaggataattggcggcactgttcacttgcatctgtgtaggacattgggaggggagtctgttgttttgtttctgacctttagacttgacggatagtttgtagctgaggtagatggaagcgctcagctctctctgatactgaacagacatcctcacaattatttcctttgtccagctgtgtgctggtattcggatgttttgatcccgtatgtcttggaagtagtgttcatagtttgagtttgcaaagatcaattttccggcggatatactcgtctgcgaaggacatggatatattgttccgactgcatctttctgcgcttcaggtgacctaaatctgtcttttgatgcttggattgacgcttggcaagcgtcacacatatcagtggaccatgggaaggtgaggtcattcagtgaccgtcgaggaagaacatcgttgagagatcttatttaatgtgcctgttcatgtctctcttcgtgtttcagggcgtctggaagcgttgtatagagaacggcggcag

SEQ ID NO: 114062 - DNA, 1007 bp, Physcomitrella patens
  Intron number 1 from transcript Pp1s289_11V6.1 (locus Pp1s 289_11V6) derived from phytozome v7.0 (chr-ID scaffold_289 ; pos 58913 to 59919 reverse strand)
aagaggcgggagcggtctactgcaggtatatgtttgtgtttttccagctccgtctttgtctcggacaggagcgagagagagagagagaggtttttgttgtcgctggcgccgccctccgtcttaattagctcctccgtttgttccaggtatggatggtggcattcaatgctgagtttccttttcacgattttggtttttatattttttttacgaattgtgtcttcgcaagtgtgtgtgtgtgtggaattgaatcttggtcgaggagatgtgtgatgcctgagtggcgagaattggtcgtaatgaatgttgagtggtggtagattgcttttgttttctgtttggtttgtgtgttgttgtgaagctgtgtgtgtggttgggtgtgagagattctggaaaggggaatggacgcaagattgagtgggcgggtggggtttgtttcgtaactggtgctgggtgagtgggattttattcgtttttttcgaatgagttctcttcccgctatcgaattttgagctgccttatccgaagtttttatgagttgagtatctgatttacaaattgtgtactgaatttgagaggatagatgagaccgtattggtaacgaccctgcaggatcgatctcgagctttggttgattttgaggttcatttccttagaccatggggcgatggagcctgatagcgttgaatcgcagctttggttcctaagaactatgagctaatggattctctaaaaggaaaacagcagactacgagcactctgctacttgaattggatgataccattttcttgatttccgttttacgtctggtgtaggcttagagcttaaccagagactgctggtcctttatatatatatatatatatatatattattttttctcgcatgaatcctgattgcaggaagggtgactagcagcaattcgtccaatactcgtctgattgagaatttttcgttggtcatctgtgcagagatccgtggttgttgggcaaagtgaacaagagaa

SEQ ID NO: 114063 - DNA, 933 bp, Physcomitrella patens
  Intron number 1 from transcript Pp1s47_21V6.1 (locus Pp1s4 7_21V6) derived from phytozome v7.0 (chr-ID scaffold_47; p os 120597 to 121529)
ctgaccgatacatttcagcgggaaggtacgaccagttttttcttctcaagaagatgtccggcgccgataatccactttgtatattcatcatgcttcatatttatatgcttccggggtgcctcgagtccttggttatcattttcgaggtatcgaatcaaatgtctgcttacagttttaatcttctgtaaagaattggtcttctgcatcgtggtttgagtttgttacttgtttatccgtgcacgctccgctcacgaatggttttgacagctgattctgtgtgattgtcgcagagacacggtagagtttcgcattgcttgagttttctatgaattttttcttgatatcttggttattttctttttaaactaagtaagaaatgagacggtgtcaagagactatttgaattcattgttttctgtatggatgttgtttgtgttgtctgtggagtgtgcagcgtgagcgttttgtttgtctgttataactaataggaactgtctcagattaattccttcaacgtttattttgcttgttatatttttcaaaccatacgtctacgggttttatcaacgaatacggcctatctgaaaacctgcttagtgtgcctcattgcaaaaattggagaagtaataagcggatttgagcctacatgtcagcacggctttttgattgtttggctcgcttcttccagtaatgctctactaatttacaccattgtgccgttctcatttcatatatgttacaggtgtttatttattctattctactgatttgattgtcccttcacatttctgtaagtatgcattcagcgctctagtgttctgtttagcaaaaccctaaaccctaaacctcggtagatatcattttgatgaatttttggcaatttcgtatgcttgtgcagcattgagtactggcccgaccctcagcgtggtatca

SEQ ID NO: 114064 - DNA, 408 bp, Physcomitrella patens
  Intron number 1 from transcript Pp1s101_237V6.1 (locus Pp1 s101_237V6) derived from phytozome v7.0 (chr-ID scaffold_1 01; pos 1262962 to 1263369)
cctcactcacaaatctgtcatcgttaaaggtatattctattctttggtggattgtagtaatgaggtgttattactagaccagttcattgtcaaatcattgggctctattgttatttttcttcaaaaccaatatcccacatatcctcctattgtgatgcccacaaatgaatttcaaaattggacaatatatgagcaatcaataattgatttcaccccaaaagacgaacccaaatacacaggaatctccatcctccttacaaggatcccaccgcatttttctaaaaaaagggagaaaaaaatttaaaaaactcaatcacgtttgatttttgaaaagcatttattctgttctgaggtttattataatgaggatcaggtcaaaagcacggaaagagcacgagtggagaacgc

SEQ ID NO: 114065 - DNA, 803 bp, Physcomitrella patens
  Intron number 1 from transcript Pp1s269_14V6.3 (locus Pp1s 269_14V6) derived from phytozome v7.0 (chr-ID scaffold_269 ; pos 97579 to 98381 reverse strand)
agatttcagtttcggctgaggaggtacttccatcacgtcccagccttttttttttttttttttttttttttttcgtttttttgtttcctgcagtttctcttgtgatgaggcactcgtcaatcaagagggtgttgattttgcatttggttattgccacggagttctagatttggctcagtgggtgacattgcggtgtgagatctccaaaacgggattaccatagggcagagttttcgagagccggtttagttgtcgttagtatgattatttaaaatttcacagttagacgaatactgtcgtattaagtggcacgaaattcttagcttaaattattgtttttaggtttttttaggacgttggagtcatgtcagatctttgattgtgattttttgaatgtgtatccaactctgtttactggaattcccgaaaaatttaagggttagggtgatgaaagatttggcgtttattcaatcctggtcttcgacgttgatttgttctagcgttggtgatagcgctattttactcaacataattgactcaacattcaatgtagaagctgggttgttggacgaatgagccgtctctgattctgcttctttttttaagctctgaagttgcttctcagtctatgcagttcccctcttatcttttctaacccttttgttttttgttttttgttttccttctttcctttttttcttccttaccaattcttcatagcgtgcggatacatagggtctaaataacgatccacggggcttatttcaggaattcaacattgagaagctacagattgtggaagc

SEQ ID NO: 114066 - DNA, 860 bp, Physcomitrella patens
  Intron number 1 from transcript Pp1s200_79V6.1 (locus Pp1s 200_79V6) derived from phytozome v7.0 (chr-ID scaffold_200 ; pos 564581 to 565440)
cttcattggagctgcagctgctctcgtcttttcatgtatggactcacccgccagcgatctagctcagaattgtttcttttactattgggtttctcttcattggggtctggttagacatggtcgtaagtagtctctaatctacaagagacacacaataagctatctttagggtattgagaacccctattgatttcagctttgtggattgctaccagtgttttgagtacagtttgtagagatttttcattaggatttgatgtgatcaaatgatttctgggtgggcgcgggggtgatggattggtctgtgtacgcgtatgtgtcggtgagatgcgcatgccttgtgttgttagatgattatttaattatgcttggtctggggtagtgctttcttctttgatgttgggtgaggtagtagaaagagtttgctgcggaaacgcgtgccgactctgttggaagggttgaaatttgctagcgcgatgccttgtttattcgtctcttatgttatattgtagaaattttcagttcagggttatcctcatttttccaatacaagcagtatgtgccctttcgaattgagtaatgataatttcatgattcctgctagtgagataactagccgttaattgggtgcctgatggatgcatcttgcacgatatgagtggggcattttatgataaatcagccaaaacggtatgaatttgccgaaagagggttgcgtatgtaggtggaagataaagaaaaattacgccaagcgtttccccgtgaacggtgttgggcacttaagcttcaatttcctcagctagggtgcgacttcgaaactcctggacatgaactaaatgttgaatgttattgcgtcaggc

SEQ ID NO: 114067 - DNA, 996 bp, Physcomitrella patens
  Intron number 1 from transcript Pp1s39_68V6.1 (locus Pp1s3 9_68V6) derived from phytozome v7.0 (chr-ID scaffold_39; p os 189880 to 190875 reverse strand)
gcgagcttgacgacgctgccgtgatcacccctctctcttctccatggtgtccctcgctactatccgttctcccacccccagtttccggtccggttcctattcccactcttggctagggtttccattctctcgttccactactctttttattatctcgcatctctccgatagtggcagtagttacatgtcgtagcctctgctgtcgtggtttatcgctatcttcttgtcgtctttcggggattttcggcgattagaaagggagagaagaagccgtatcaactcttgtttatgttttctcgtgctgccatttttctgtgatcatttcctgagaggaaggaatggagcgagacagaatgaaagagggaaggatactttaaaacttctgtttgagaagcagagtgtttttttttttttttttttttttttttttttcaattttatcctccaattctttttaaaaataataacttattttttcgttaggggacatgcactgctcgctcttatcacagcatcatatttaacatcattccattccggaagcgtctctcaagtgtttgttgggtaggggttaggttcttgtctcgaagtaattatccgctcttcgcttctaagacgagtgttcggaaattttggggctgcatatcatatgaagattcagatgttattcatttgtcccataatcggtcgtagactcctgaggactgcacctgtgagagttacagattttggaatttatagtttccttttgtgcggactttggctctgtcgactggttcgcatttctctttcaattcctcctttggaagtcctcctttgagattgaagatctctctcctcattcttcatattgcttcatcaactcatgcttctttctctatcctgatagagttgaaacggagtttgaagttgaattttatttttatctatttaatcttctgtacatgtccatagacctcagattcgtatcgagggagagttgtctctgaggtaagg

SEQ ID NO: 114068 - DNA, 570 bp, Physcomitrella patens
  Intron number 1 from transcript Pp1s111_120V6.2 (locus Pp1 s111_120V6) derived from phytozome v7.0 (chr-ID scaffold_1 11; pos 769266 to 769835 reverse strand)
ctcctaaatcggtggtggcatcgttgtcgaggctggtgcgtagatttttaaaaaggaatttgtgaatgttttttgaataatttttccgattgtgtaagagtttttgaactctaagcagacatacggacggatcttagctgagtggcttgtcgtttgtgtgaggctcttcttctcatggctgtgaacttaactgcgatcgaagtgttggatatataggtatcttagagagcagcgtaccctaggctttgattcttgtgagtatctagaggtattttacaccttgtgttctttaccatgaagaaaccgctgctgagcccattgaggagcaggacttctaaatcaacatttcgattcacttgctttgtttccgtggccgcactaattgcaggctctcttttctacttattcctgcttgctaatcctgcgctgagatcgcaaataggtgctattaggttgaatcgcagtttggcgattgcgaacgaggtctcttccgctgttgccttcgcgggcgcaggcgctgaattttcttgtgattgtacttccgaactcaactcccagaatgtttcgaag

SEQ ID NO: 114069 - DNA, 675 bp, Physcomitrella patens
  Intron number 1 from transcript Pp1s47_88V6.1 (locus Pp1s4 7_88V6) derived from phytozome v7.0 (chr-ID scaffold_47; p os 494155 to 494829)
gacattttgcagtggcttgccgttattgctgccatgtgagtcctgtaacgatgtgctgtagaggcttgcatattttcactgtggatgttctttgcgtggtgagctatttggtgggtcgtggttagatcagtgttgctaccattgcttttttgcttcgtacccgaggatttcttatcaaactaatcgtgaatctgagaatcatggttagtcgtattgaatacatgttctatctctttagcgagtactctcgtctttctaagaaaaggattgtattccggtttctaggccaggctccactcctcctactgactgtcagttgggttgacgtttcgaacttctcccgtcttagcatttgaactctaattttcacaccgttatacatgtcgctccatcttcgtcgagaacccaattagaagtttaatgggtgtagatttaacatgaagtggttttggccttgcgtacattagagagtgtattctgttgatcgatcttaacacagtcaaaatctgcagctatggcttacgaaacgtcaggcatgtgtcactcatgtcatatctgttgtgagtagcgtttaagtcgcggtccgatatcacccactgcacgtgatatgcctcacacttgtcgcgtttgtcttgtgcagctatctgttggtgttggacagaaccaactggagga

SEQ ID NO: 114070 - DNA, 600 bp, Physcomitrella patens
  Intron number 1 from transcript Pp1s203_51V6.1 (locus Pp1s 203_51V6) derived from phytozome v7.0 (chr-ID scaffold_203 ; pos 467452 to 468051)
agactgaacgccctggttagcatccgcctcatttgtcacgcacaggttatgatgtcaatgtaacagactaaaacacacactgcacgtaacaaggtggttcagaaagacgtttgaaaagtgctgatgcggtactggaaaaatagctctgagaaaatgctgatcgagaagttatgaatttcctagatgattttgagtgttttacaggcaaacataaattctagagaatactaagagattaggcagtgtagtgtgtcttgagaaaaatcgacgcatgtccctcgtagagtgttcacatggttaatatgggcatgcttagggagtgtcttgtttctttattttacatattttgttacaatttaagtaacttagaatatgaaatctaagttggtccccagtaccctttgctaagactttcataggtacgaacctagatttgagagtgaaattttactttctctcttctcggtgatcacttaaaccattgtttctcgtgcggagttgtcaaacttcataactgatccgagtccaattgcataacctgtgttccttgttttcgcttttgcagcgctgttccagtcactgctgtacgaagcctgtgga

SEQ ID NO: 114071 - DNA, 616 bp, Physcomitrella patens
  Intron number 1 from transcript Pp1s9_30V6.2 (locus Pp1s9_ 30V6) derived from phytozome v7.0 (chr-ID scaffold_9; pos 287177 to 287792)
ctgtctcttcctctgcgtcttcctccttgcctcgtgtaagatctgcatttcctttgatgtgagatgaatgttagctctgcaatttgtttttttgttttgttttgttttgttttttttttaacaggtggattcttgtctcccagatctgacgatgagagattttggtcgaatcttaactgtagtcggagattccgattaattgcgaatctgaatctatctttgaatttcgtaatcacggctgtggactaacaacatcccgctgacattttcttctagtattcggtaaattttggaaatgataggcggaatggttcactagtgtttttctgaacaatttttttaatcaaaatctcacttttgctcttttctgtgttaaatatttttccttctgaattcctgttacgcgattctgatctaatttaccacttagtcattataatttatttttttcaaggcatagcagggtacttcctactgaagaaatcagtgtttgaaatagtatcaaggtggcctttggatgttgcagcggattggagttttctgactcactgcaatggggtgtttgtatgttgtaatgccagtggcagacggattgcttcaggtgcattggcaagcg

SEQ ID NO: 114072 - DNA, 715 bp, Physcomitrella patens
  Intron number 1 from transcript Pp1s190_70V6.1 (locus Pp1s 190_70V6) derived from phytozome v7.0 (chr-ID scaffold_190 ; pos 560669 to 561383)
aactcttcagcgtcgcttcagaatttctgttgcaggtagaaatttcttcacgatcaaaagtttctatctcctcccgtggttgagtttagaagttgagggctgggggctttaggatttagggtttaatgcattgtggatttccaatcgttcatctctcggcctgtactcagtttggttttgatgcttcacgaggactcggcttggttattcgtttagatgaacgctgagaaacttcgctacttcgcgatcagcgtaagtactttgaattggatgtatgcgaagtgttagagtgtgctttagcaacggtaggaaactttctgaagatctgcagagtggctgtgaaatgcacagtatagtcgagctgaatacctggcacaaagttcaaagagattggtaggattagggttcttgatttctccatcacattaacgtacctcacctgcccgttttttcaaattcgtagtcatttcgatttacaatttgactctacactttgagctagtctggttggtgattgcatagctcatatcgatgcgtgttgttcgtcctgcgttgcgtagccagaatcgtggagtaaggtttattgagttttatggtattggtgaaaaaatttcgggtttgttttgtgaaggcaatggcagctgaattcctcttacatgtggttttctccgtatttgaagggttttaaaagtgcagtagaaaccagagaactaga

SEQ ID NO: 114073 - DNA, 952 bp, Physcomitrella patens
  Intron number 2 from transcript Pp1s210_35V6.2 (locus Pp1s 210_35V6) derived from phytozome v7.0 (chr-ID scaffold_210 ; pos 225172 to 226123)
attttgagtctgacaaacggaattttcggtatttggtaattgtgctaaaaaacttcatctttagttcttgttctttggtaaagctagtcaagtatggaacttctcattcacagcaattagttaaaataattctgcacaaattatttctgcgcatcctgcaatttgaaggaaatcaacacagagcgatgtagtcagacagtctttctcctaattttatgagtttctctcagtctctagtccgtatttctccatctcctcggaaacctttcatgcaggttgcaaattttaaatgcttgtgtctattcgaatttctgtctccttatcattccgcgtccagggggctttgatagttgtcttttgagctcaagtccactcatttttagcacgtgcgttttctccctttcgttttcctaaatcaagcatgttggattgcagtgatagtgtggcaatcctcttaagctgaccagggcgtttctcttcctttcccctatctaccattccgttagatctttcggcgaactacaaaacgaaccaaagggacgtaatccaggcgggttgcaaccttcaattgtaattattctcttgatcgatagctttataaaccccgccccttgattctctgaattgttaaaaaaacataacgaagggtttaaatatccgacgttattgtgtaggtgttcttgtgaagcagctgatcatttaatgcgagagggatcacaagtttgactgaaccttggttgtctgctgcagctcctcatctcttcaaaacagggcaaataattcttggtagctcgtctttgaattactgggtcaaacatgatgcttacaggaaggatatctcccgtaaacatggtcgctgttggtgtctcacacgggaattagataaatgtgatcaatggatactggagcagcaattgacaatattcatatgcttgcagaatctgtttcgggg

SEQ ID NO: 114074 - DNA, 676 bp, Physcomitrella patens
  Intron number 1 from transcript Pp1s219_73V6.3 (locus Pp1s 219_73V6) derived from phytozome v7.0 (chr-ID scaffold_219 ; pos 416063 to 416738)
acgattgaagttacaatctgaagtaagttttacaggtatggttgtcgttgttgttgttgttgttgttgcggagagtgtatgagtctttcacgcgccccgcggtgtgtcagtggcgtgtgatcgatggtagtgtgattggtttcctcatggttgtggcgaaattcgacaatgtccactccatgtcgatgcaggatctcattaaaatcctcgcgctcaaaggaaaatcttgcagtgaatggattttgttagggcgtctatggacatttgggttttctttggcggtctttctggcttggaatcgtttcctgagaggataaatgtgttatgcacgcgcaggttggtttagggatggtggtacaatgttataatcccgagatatgagtgtttttgcgctttgtgcgatatgggggttgtgtcgttgagggttgggtgtatcgtttgttttaatttgtgtttatttgagttgtttttttgtttttttattttattattatttttgaccagatttctgtcgatttggattcttctgtctgcgtaatgggaatgcattgttgatggactgctgttgtttttgtgaaaatccaccatcgtattgatgccctcctttttccatgtcatgacaagtatctgtgagataatattccgtttgttgaattctgtggtgattgtgaagcag

SEQ ID NO: 114075 - DNA, 929 bp, Physcomitrella patens
  Intron number 1 from transcript Pp1s24_138V6.1 (locus Pp1s 24_138V6) derived from phytozome v7.0 (chr-ID scaffold_24; pos 1491240 to 1492168)
ccgtccgtacgtttctagtcttctcaccgactccattatttctgttacttggtcccacagatttttggatactgaggtcttactgttgcagaatcagaatgtcgagtcctctcagtcgctactagccgctggattgatcagtctcatttttcagaacgattgccggtttgtagattttcttagggtttacaaggttttgggagggggtgtgaaaatgagacgttacgagctttccaatttatacaacccctgtaccagatgtcttgctttaattattgagatgaggatctaggcaccaggtgtttggatgcagatcgccaagattttgcgtccagattatgctattgaaacttgaagttagtgaacgtgctactaatttaatttaatttgatttaatttacgtctcgttaatatcgggatgctgtttagtttctggcgtcgaagtcttcgtgtttcaagatgactgtggttgatgtctggtagttttcctgaatcgatcacaattcagtgctgattgtgtgatttgctactttggtttactcaaatgacgcacaatttctttttaaattccccccagattgttctatgcacctgcatccgaggatacccgaagtcaagtcacgagttatttgaatttgaaataaaacgcttacaattatgattaattaaataaaatttcaaacttctaactatcatgttcggatttattggattaggaacaatacaaatgttggaactgtgtagtattactcttgttgtcttgtggtgatgtggtgatgtgttgcacgttctaaatctcgactggacttaagtaatgcattgttgtccatttatgttgctttcgaggtctattttactgttgtctaaaaactacgattgttcttgtttgttcagaggaatcaaaaaacagactactgaaagcaggctat

SEQ ID NO: 114076 - DNA, 937 bp, Physcomitrella patens
  Intron number 1 from transcript Pp1s21_102V6.3 (locus Pp1s 21_102V6) derived from phytozome v7.0 (chr-ID scaffold_21; pos 612061 to 612997 reverse strand)
atcgcgtgtggagctggttcgtggctcattcaagagtcgttgtgaattagggggagtctgtcagttgggtcctggctgtcggtcttggggtttccgcagcgttgttgcggaatcatcgagaagtgatcgtgaaatgttggtgtggagtttctacactgcgatgttgctgggttgaaactaagttagtatgtctagtgggagaaagaccttggcggtggtggtactgtcctaggttcaatgtctatatgacgtgccggtggcgagagaagaactacaggtgcaagatgaacaatttttttttttttttttttttttttttttttctaaccgagaacagctggaagagagtcgacattaattgcgagattagatttctgtgagtttcgtaaaccgtgacactttgatctctttcgttaccgcgacggtttgttgagctaatttgtcgagcgccatgctggtagtcacgtgatgcgttacatactgaaatgatatcactgtgcgtggcaatgtcgaatttctgtatgcgttatgcatgcactcggcagttgcaaatgagctttacggtgtgatgtttctgcgtcggccgtattacagaacttcacttcactggtgactcacgaagcataggtagctgagtttagaaatcattgttgggaactaaatatggtttgagtaataggatccagcatgttgaccttgcatataaatacggcaatatctcttttcacgcaaagtcaacgtggtgtccataatttctgcgttaggttctgatgtatgcataaaagaatccagcatgatttactgagttcgtttcaacgacaatgttcaaacaatttctcaacatgccgtcattacaactaatttcgttctctttgcctgtccagttgattcattcatcaagacttgccattgaattcagactttactcgaattgaaa

SEQ ID NO: 114077 - DNA, 669 bp, Physcomitrella patens
  Intron number 1 from transcript Pp1s44_187V6.1 (locus Pp1s 44_187V6) derived from phytozome v7.0 (chr-ID scaffold_44; pos 1230585 to 1231253 reverse strand)
tcctgcttcggctgctgcacgaatcggtccagctggtaatatgttttccttagctacctgtcgaaattccattaccaagctgctactgttataattcttaaaattttgatattaagtgaagtatttgtgtttcatcatatactttctttgattccatctgcgaagtcggacgttttttctggataagtacccggccatttcgaatctgaatccagaccctggtataattgaatggagaaaattaatctctgttctcaagtctggcgactgttcagatggtagatatgtagataggtccgtcaaccttcgcagccatgtgtgatggatgattaaaagtatttggatttctcaagtgcactataatcgattgtgtctgcacgttcaaaaggctgatgtgattgaattcaacgagcagatcacatggaaccgttatgagtcagatgtttgtccgcttcttcactttttatgaaaaaaaattgtgaataaaatattaaaatctgttctccaaatagagggtcaagataccacctttgacttttggctttcaaagttcttttcataacgtttcatttcgctgaaattgacgacccgcccactgcatcaaatgaagcacgccattcgcacttacaacgtgggttgttgattacaggcacgccctccgtggagacg

SEQ ID NO: 114078 - DNA, 584 bp, Physcomitrella patens
  Intron number 1 from transcript Pp1s132_95V6.1 (locus Pp1s 132_95V6) derived from phytozome v7.0 (chr-ID scaffold_132 ; pos 752319 to 752902)
gtggatccttggagtgcaccacaatcttcttacctgtaagtgcgtttatttgtacttacatttagaactctgaatttgtgtttcattagttgagtgagagggacttgatcagtaagccgaggagctgtggcgacaaattcttgaagaatttttgatgttgtctaagtgagaaggagtattgtggaaacacatacacgcacacacacacccttttgtacatatacatacttatacgttttaaatttctgtcaattgagttgatctgtgacggtattatactgctgaagaagaggtagtgttatgtatttttttttgtcgtgtttaaatggactgtgttaccatggttgtttgccctgcatgctggttgtggcgtctacagtgtcaaagagccttgtggtcttgaattccgatgttccggaatttcaaggggtcttgacggtgctgcggggtctttcactgaagtacagtcagcaagcgatcgacgtggggtcatacgcacttaccgtatcgtcctttttttattttaataatttactttactgtttgaagaactttttttcggatctgtaggcatttaaaggcag

SEQ ID NO: 114079 - DNA, 607 bp, Physcomitrella patens
  Intron number 2 from transcript Pp1s7_222V6.1 (locus Pp1s7 _222V6) derived from phytozome v7.0 (chr-ID scaffold_7; po s 1198004 to 1198610 reverse strand)
gccaggtctgctgaaccttctcaccttttttttctaaaaaatattacataaagttaaataaatatttttattttgttttgttttgtttatttatttatttatttatttattattattattattattattatttattttgtacaaatagattagcttgtgcaagtgtttttcaacggagcatccattttctacttcattacaaaatagagtatttttatcttaccaggccgattatttggttttctttgttcatttttattcttttcggttgcagttcatattgtctattgcaattaatcgtgtagtagtaatccaggtcgtcaccactattagcctattacatgggtgcgtgcagtggtttttaggtgagaaaggtatctcatattcatgttggcgtacatgaatttgaagtcttagcctgcagctctctctctctcctcttttttttttttttttttttttttttttctccctatttgattggactgtttctttcatatcttaatttgtttttacgtttcatttgtctgaccctcttctctgtacaatgtataatttcattaagaaaaatctcaaaataccatgtgattatgggggcaggtgagat

SEQ ID NO: 114080 - DNA, 425 bp, Physcomitrella patens
  Intron number 1 from transcript Pp1s506_5V6.1 (locus Pp1s5 06_5V6) derived from phytozome v7.0 (chr-ID scaffold_506; pos 29229 to 29653)
tggttggatatcttggaggaggccgttggaatccggtattgttatggacctcgggcgcattttaaccctcttctgttttttttcttgtaatttgtgaattgggagagctctgaagttcccgggagcgcctcgctggtatatgtgaggctgcggttgtttttttattgctcctcgttccattgagatgctgcaatgtagcaccttgtttttttgtgatcattgtggagtccagggaaccaaagaatgcgcaggggattcttcctattgttctgtctgttttttttttttttttttttttttctttccttttgaagatttgactatggggaggtgcagcattatacaagttctctttgacattttttttgagttggcggagcggcggtgcagaggttcttgtgtgtaaggcaacgaccaccttcaac

SEQ ID NO: 114081 - DNA, 251 bp, Physcomitrella patens
  Intron number 1 from transcript Pp1s24_102V6.1 (locus Pp1s 24_102V6) derived from phytozome v7.0 (chr-ID scaffold_24; pos 1131803 to 1132053)
ctcaaggtggcattaccccaggatcttttgactgaatcctttcactgattagagcacaaatgtttcctggagcctcaaactggggaattgttaggaagcacgttgatgcagttcacatctaatctgtgtctcttctctattatttgcatggcttttggtttttttctttcattctatcttcgtttggataacttcctttaaagtgagatgttgctgattttagaacttgggggtttgttgggtagtcaccg

SEQ ID NO: 114082 - DNA, 1033 bp, Physcomitrella patens
  Intron number 1 from transcript Pp1s223_98V6.3 (locus Pp1s 223_98V6) derived from phytozome v7.0 (chr-ID scaffold_223 ; pos 529443 to 530475 reverse strand)
tcgaggtgggatcctaatcgaggcactttgttccgcgcgcttctccactgctactttagaatttcccttcctcggctgattttcgcaggtttccactcgtgaattggatgaggaatgccatgtctgggaccaatccatgtgcgtgtatggtgcgattccacgagcttcgatcgtcggtagggtggaatgttatgcagaggcgattggatcgagctggtaagtatgccagggattatgcagcgggttggttctagagcccgtcgctattcatgcgtcgaaagggtggtggttgttgggccgtttcgagaaaattcccctgcgtggagcttgttgtggggttctgcgttttgcgcgttgcgcagagttaatcctgctgttggatagtaattctgagtttttcgctgggagcgtgatcggattagcgattaggataacaatggtgaaagagattgtgaggtttgtgtttttttagtgttgagttggttgtgataagcttcaatctagggaggcatgccagggaagaggatgaattgttgtcattttggaggaggcgtagaactcggaactttacttgtgaggagttgcttgttcgggaaatgtatctccgtctgaatctacactaccgtaattacattttctgtctgtcgaagcaatcgtgaaccctaaatctcagtgttgaatactcttctatctcgagtcagttctgtttttttatgcaagtggaggttgtaattagatttgtgtcatttgacttggcgctcgttggcgttgattcgataactcagagtctcttggcagcgttattcttcaggatagggaacggaactagattgcaaatcggtacaagccttgagggtacgatgaacgttgtattgaaggttctctggggcctaacatgtcagttgtctctgctctggagatcttttatgacgttagggttcagagtttttcctcgtctgaactgcttctataacatttgtttcttgcaatgaagggatgtcagattcgattctgcagttccgtgatatagacg

SEQ ID NO: 114083 - DNA, 599 bp, Physcomitrella patens
  Intron number 2 from transcript Pp1s69_93V6.1 (locus Pp1s6 9_93V6) derived from phytozome v7.0 (chr-ID scaffold_69; p os 581092 to 581690 reverse strand)
aagtatgaaactcatggcaatgtcaaacattctgatttgctaacagattcagagggtggaaattgaaattaatatgacaattaaaaagcatttgtgcttaatattctttacgataagaaattgactttaggggaagatgtcccaaaaccactgttcccaccaggacatggattcttctggaaaccattgtccagctggatgttccctctttgttctagaactgcagagggtacattttggcaacatgattttgatgtgttcataaattttgaatcagaggcaagccgttttatcattcattgtgaagagggaacagaactcagatgaggtgtgggagtccagaatgccagaattgatttctcatgctcagcatgggagtaagagggtttcctttaaaaacagcaaccaaagaagactaaaactacacacaaaatctgagtaccttgggtgcacgctctataataattctaccatacttacaatatccttctcctctcagaaaagaaaatttctttaaattgtttaaaaacatttttcacaaagtactgttcaaacaatgcaaaggaactacagcacctagcagaatttgtagagatatt

SEQ ID NO: 114084 - DNA, 716 bp, Physcomitrella patens
  Intron number 1 from transcript Pp1s47_249V6.1 (locus Pp1s 47_249V6) derived from phytozome v7.0 (chr-ID scaffold_47; pos 1567336 to 1568051)
cgagaggccttcacagcctgggtgagtgcaccacgaacttcaaggttctaatagtgatctccaagaaaattcaaaaagaagtctctgttattgcgctggagtgtgcgacaatcatccagcatcggtctgttcgctgccggtgtcgcgtaagtttgtcttgtcgcagcttaccgaatgggaaatatttggaaaagcttagtgtctttcttccagtctttttgccggactgcagaactttcgtgcaagagcatcaattattccagaatcccttctccggagtctccgatttgcaggtctccaagtcggtgcccctgaatttgactagtgacggatagagaaacagtcgggcagcattggaaatccatcactttctgattgctacttagaatgttagaaggatccaagaatagtagaagcggtctgtggaaaagaagggcttccagttgaagggctgactgactattttattttcaactgctttataacattataaaattatcaagaataaaggttgctttcgaggcctgctatatttgaaaagaactgagcctagaagttggtaaccaactccaaatgatcccactcatcactgattggtagtttgattgccaggtgaatgaaatttgagactcgaaaacactgcaaattgttcacttcatgaaaattatcgcacagattaatcactgaaccatgtctgacaggaccaactccacttg

SEQ ID NO: 114085 - DNA, 479 bp, Physcomitrella patens
  Intron number 1 from transcript Pp1s21_347V6.2 (locus Pp1s 21_347V6) derived from phytozome v7.0 (chr-ID scaffold_21; pos 2110318 to 2110796)
gcttcacggccgttctccgcgcgtgattacttgcagttagtgtgctttgcttttcaccttggaacaaatttggggttgcatgtactttctcgtacgaatttctagttgtgatcgttgcaactatttcgtttgacgaggtgtttgtttatcttcttttattttgttttttttgtataatattttgaattttgtctcttccatggtggcattgcccttggctttacctggtgcgtgactttgagatctgatttcacgtacatgttcgcttgaattggttgatcctgtagtctgctctgtagtttacttatgtttgtataatttgtgtattcccttatgcgatagtgtgttcttttgtaccaagtcaatgcttgggaattgtttgtctggctgcatgttgtgttagtgtcatggggtgagctaaactcgactaatttggcaaaccatgaaagaatttgcgacgctcgtgtgctcgtgcaggc

SEQ ID NO: 114086 - DNA, 884 bp, Physcomitrella patens
  Intron number 1 from transcript Pp1s250_36V6.1 (locus Pp1s 250_36V6) derived from phytozome v7.0 (chr-ID scaffold_250 ; pos 331540 to 332423 reverse strand)
ctacgtttacgtatgaaccccgttcaatgtttcctagatcaactggagtttaagttggattaggtttagtattagagagttgcttgtgctcgtcttgtttttggagttgcaattgttgaggttgaagctgccccgatgttgattcccttgaacttatccatgtctttgattgagttgattgttgccttatcgacgaagtttagcaatttaatttagtttggggttagcgctcccttcgagcccattgacgcatgagatctggcttgtgcgtaatggcgcctgtagaaagtcgtgatcaaagtcacgatacaatcttcttttacttcggtagtcttgcgtaagttctggtgtatacttggactgtgactatttaggtctcgctctggaaatctgttgtgtgtaccgtcaaattattgaacactttgtctctactaccacgtttaactacacttcaatttacagaaatatgtgttgtaaagaacttgaagtttttagtctgaatcgtgaatagcatgtatgattgacagcttggtttttgtatcacgcttcggttggactctccttggaagtcaatttgtgtataatgatgacagttttctttacgcttgtctgtttacaacaaggagctcagcatcaaggagctacgcatcccctgatttcgatttatatttctacttctgtgaactgttcatcaattttcagatttttctccctaccgttccagattttacagtttcttcttaatcattggcatttaatatgtactatttaatcctttagtataattgcgttcctgttcgagatcaactttgagactaaagtagttgtctactgttgtgcgtgtcacagatacctccaagaaaaagtgcagcctcttacaggta

SEQ ID NO: 114087 - DNA, 564 bp, Physcomitrella patens
  Intron number 3 from transcript Pp1s114_190V6.1 (locus Pp1 s114_190V6) derived from phytozome v7.0 (chr-ID scaffold_1 14; pos 1137602 to 1138165)
agtaagtccacttctctcattgcggctttcttttcctgcatctcatttcactgctaggaacataaacaaaaagtgcttggtactcacagcagtttatgttttcctttaaaacaagtgcgtttctacagacttgaaattattcaattacagctccgcatgcactggatgcggggtttttaactacagactgaacctttggtattcagcaagtgaatttgttacttaatgggggtctcttacttatttaggctacatgtgtacgagttcattctccgtgatttttagtaattgttttgctcattaatgaggtaaccttttgaattagcactttgatgtgaaacttttattgcttgattctggacggtgcggggcacactagcgttcattaccttcttcttcttcttctttttttttttttttttttttttttttttaatgtttttgtgtgtgtgtgtgtaaatgtgtcctccagctggctcttgtcaggttgaaatggtatgaattaatatgagggttgggactgaatattgtgtaattgtgattcagccggcgtgccttctgaaa

SEQ ID NO: 114088 - DNA, 739 bp, Physcomitrella patens
  Intron number 1 from transcript Pp1s130_12V6.1 (locus Pp1s 130_12V6) derived from phytozome v7.0 (chr-ID scaffold_130 ; pos 86992 to 87730 reverse strand)
cgcatttgaggctgaaagcatcgggtatgcattctactctactcaatttgagttttctctgtgacagcttgatatattcatcctaggaagagtagagaggtgctcaagggaatgagtaacagaggtgattgctagcgatagacgctagatggtttggttactcatctcggtgagaattgaaaagacactgtgttgagagcgagcataaagcactggaattcctttcctgtggtgcgtaattccatagtacagatagcgtgcatgctgcctccaaagttccatgccttgatggcctggtactgatcaagatatggagagattttcttatgtctagcttaatttgcgaagagcatgatccagcattttcacataggggacttatgtgtttcttgtatcagtatctaacattttcgggtgtctgaaagtgaagcttctattttagtggaggagggaagatttagtaactagttcatttactgctgttgttgtctctattcattctatacctgaaagagttatactccttgttacgaatactaagttgtccagtttactaaggtgttggtttgaatgtagctcgtttgcagggatctgtgttctctcagattagcggagaggttgttaagctttgactcattaatgatgccgctgcggttatcatgagttgggatcttaaaggtttggtagctcatgattttcttttgtgcagaggatccttcacaactggagagccaaccaa

SEQ ID NO: 114089 - DNA, 780 bp, Physcomitrella patens
  Intron number 1 from transcript Pp1s235_88V6.1 (locus Pp1s 235_88V6) derived from phytozome v7.0 (chr-ID scaffold_235 ; pos 417942 to 418721 reverse strand)
ctcggtctatcgatctcatcaaagctcgccttgaggtgatttggtttgcgaccgccctgtcaggacttgggtttttgcgcattggtttttttgggctgggtgcgatgtcctctgttcccagcgctatgctcttgtgtagtcttcttcagcaatttggacaattatgtttgttgaaggcctcgattaagtctctagaatttgaggatgacatctgaggcacgaggtcattgttcttctgtgtgaatctgtattacatatcatgcacagttctcattcacacccggataggaaactgattgcacccaacatctgagaaggtttcgtcactggatcataggtcctttggacgatctcatggtattcgtggggatgggccggtggcttcctgtagggtttagggtttatggccaacacctgtgaaaaaaagaaatttggctttttccttttggcagaagattacaaacgtcaacattgttagatgggtgtatgcgtacaataattccaccatcgtaacattggcacattttgagtcacgaacccaatgaacacttgcttactttatttgtgtgttcatttattttcaatttactttgaactgtgattagttttctttgcacaaggcatttccaaaattccatgcctatatcaatttccgtttgacgtacaattctcattcacacccggcgaatttttcagatttttgagtatttctcttcgttgctatgctgtgctctgctttgtgtagtggaaaaaactgcttgccagggttcaggagttgga

SEQ ID NO: 114090 - DNA, 957 bp, Physcomitrella patens
  Intron number 1 from transcript Pp1s116_76V6.1 (locus Pp1s 116_76V6) derived from phytozome v7.0 (chr-ID scaffold_116 ; pos 418585 to 419541)
aggtttgctactctaatctgtgtatgtttggtagtttcgttttcatattggttcttaaagtagaacggagctgcttcttgcggggaggggggggggttaggataggcactcaacttatcctgagttctcttggatcgtacctgacagtaccggttgtgtgttctattgaaaattgttcacgataaataggaagataaatttaggtgattcttagtagggaagatctgaacgctggaagagaacacaagttttctgagagttttttttatccttttgtagtgagtgcggccaaaagccgttggacgggtcggaacgttatagttgtggttgtgaagattttttttcttatgctttggtttagcgtcgagttgtcggacgtctcttccgttggtgccacagaaagtttcgtttgcttgcctgtcaaccttctgcatactgtaagatgttgttctggatagttcaagcgagcgctgcaaagttatgcgggtatagagtgctaatgtatttgtttttgaaagaaatatccactcctagttctgcctgagggctggtaactgaaacgtggattgtgactgacgtcggtcttatcgaggatacaattttaaaataatctgtagattttgccaccgaatatcatgcacaaaacgactagatgtctaagtctcatatagctatttgtacgctatagcaagcggtgaagcacatttctcttcccgtatctctcgtgttgaagcgtttgtttttttattgttttgtgtacactggcgctctccgggtgaagtccatgcaggcgacctggtatcgcggacctttgatatcggagaaggtatcaaaggatcgcatggttttaacgtggcatttgtgtccacagtgtcaagttctatgcttatccaattcttacaagagttttctcgacatgcagacacgttttcccggaacacgctggacagttttcaa

SEQ ID NO: 114091 - DNA, 658 bp, Physcomitrella patens
  Intron number 2 from transcript Pp1s2_219V6.1 (locus Pp1s2 _219V6) derived from phytozome v7.0 (chr-ID scaffold_2; po s 1101776 to 1102433)
cgttgtcacgcaaaagaaagtcccggtaatctatactttatcaccctcagatatgtcaatttatcaaacggcaagttatctttcacctgctgaagatttaaattcgtaactctcttcgtcgtagttgtcaatgataaacgattggccctaataagagttgttcgcttttgtaaaactggcttctgaaagtgtgtttttgaataaatggaaggaaagtcaaactcataactaaaagattaaggtttgactatatgggtaatgtggaggtgaatttggacacataaatttgtatgaagtcgataatcatctcataccaatactcgttatacttgtgaagtcttgtgtgcgtatgatcaaataaaatcaatcatatatccttgaatttttatttatacatgatcaagcaacggtattcattttgtgaggaaaatctaagttttaattcttttaagcaaccatgtaaaataaagaaccttttccacctcactgttcttaaagctaatgatctattatgtgtcttgaaacatttgtcatcttttttgttacgatgagttatcaactaagatagtgcgcacaatgacgtaatgaactaaaccttgtcacccaatgtctccatcttgaaggacaagcttctcgatcgatcgagcgtcacgcatct

SEQ ID NO: 114092 - DNA, 697 bp, Physcomitrella patens
  Intron number 1 from transcript Pp1s51_28V6.1 (locus Pp1s5 1_28V6) derived from phytozome v7.0 (chr-ID scaffold_51; p os 263101 to 263797)
agttctgctgccatattcaattcaggtgtgcatgactccgttaaacctggtcactgataacacaacattgatgtttcttgtaacacaccatttgaaccagttccatcgttccatgtcgtgatgtcagatttatgaaggaatttgtgaattatcaaccgtaccttcttccacggttgatcattcatcatggtcagctttgagtttggctccatgatgtgtggcttgtgcgatcagctgtcttgtacattgttatcaaattggaattccatgcctctctcatgatttcattacatctgaatttgattcttaggtaatgaactttatgattaaggtcaggggtgaagcagtccaaattcaagcccgaattcaagtcacgttgagcgggaatttgtctcagaactgtcgtcaagcagtcttgttggtccgcttacacaaaagctgaataggatgtttattcttgaaaaattagagtctacgactgaacctgtattgcaaatcatgcaatctgtgatcaaaacttgaatcagttcagttaagatcctgtgaagctagtaacagagtgaacatagcagtacttgaatgagaatcgtgtcaacatttggattgttgtatttcataatttatgtacgatataaaagcctctggactcaagcttatttgtttgttttttttttctggttggattccattgcagtgg

SEQ ID NO: 114093 - DNA, 1010 bp, Physcomitrella patens
  Intron number 1 from transcript Pp1s67_260V6.1 (locus Pp1s 67_260V6) derived from phytozome v7.0 (chr-ID scaffold_67; pos 1751008 to 1752017)
atcaattcgaagcgtccggaaagatccatctcaaggtacgcagcgagagagagagcattggtcataagttctgtcctattcacagaaacacgttagaacgaacatttgttaaaaccctgcaatgcgattcgatccttttgcaaatataaactgctaaagggatgttttgacttttttttagcttttttgttatgcagtcatttttttcatggctttttaatacaaatttctgaccgctaagagggtgtctagtttgaataccagcagaatttttaaatctgtagtccacaagaggaaatggtctcatgcataatacatagcaagtgttatgagcagctttctatggacgagcatgactgttgatcaatccatcaacatgtcttgtttctacccaagtttcacaatgtgtctgccgtagttggatgccatatttgacttcaagaagtaattggagttgcttgagttctctacgttcatctttggctgctcagtggatgcaacaattggattgttatttgtttcaatctgtgtagctcacggtgtttcgcaatgtttactacacctctagacttgtgctcaaagtcgattttatctatttaattcgttgagtttccttttggaaggaaggcctgcgtagaactagactcaaggcaaagcttgcttgttttcggatagttggctatatttccttgtgaagcacttgcctcggcttcgaccatcattagggtttcgtcttcggtccttaatttatagtaatcggagactctttccgattagttgtggtattgaggactgatatcgctgcatcatttttgttgctcgtgaaaaaccaaatcacataatttgttctaccactctgtttgtgttagtgacttcgcagttttatgttttatggacaattctaggaatcattcttcttttctcggaaattgatctagttcacatgctcagaattgcttttctaatcgtacgcaggtgtcctctattcgttacagccagtcagacgacaa

SEQ ID NO: 114094 - DNA, 739 bp, Physcomitrella patens
  Intron number 1 from transcript Pp1s176_132V6.1 (locus Pp1 s176_132V6) derived from phytozome v7.0 (chr-ID scaffold_1 76; pos 891850 to 892588)
tcttcaccatttggacgtgagtattgcttttcgccttgagcctttggactaactggttcagtttgagttttcagttgactcaagtgtattttggcgtgtttcggacagtctgcaccaggcattgggttccctacgacgtgatggggatgtggggaggtgtcgcttattctcagagggtcacttgcagggttgctccatattcttgcatttgacctgcattgtgttgcccattccttgagcaggtggacatggatttggcacttccatttacctatctatgctgtaaactactttgtattcagccgaatttgcatattccacagtttattactttttgtgttttctgtgcccgtttttaaggtcaggaggaggccacacacgatatgtgttgtaggatgtatgtatccgagttagcaaaattccaaggacaccaaataagttttcttcgaagtatttcgaatccaggttgattatgaggaatatattgtgtttgttacccgagccaagtttctgaggctgatcctgatgaatctgctgcagacctaatcgtttatcatctctaagtctctttgcagacgtggtctattgttttggcttaatggcaaatagctcacgcagcgtttgtgtgcagaggaaaaattataatgcctccaaagcagatccctcgtctcgtggtatttatctgtataattattattattttcattaatctaacaggcactaccctgccgtggcaggc

SEQ ID NO: 114095 - DNA, 934 bp, Physcomitrella patens
  Intron number 1 from transcript Pp1s307_2V6.1 (locus Pp1s3 07_2V6) derived from phytozome v7.0 (chr-ID scaffold_307; pos 22309 to 23242)
tcgacgctgccacgctcaaccaggtgcaatttggtgctgtgctctttgttccttgcggggaagtgtttttggaggcgccatagccgatccttggttagatcatgggtggaactaagagggatgtagaacctacttcctttaatttgaggaccaaactccctgtggaccataatgtcgagaggtctgtcttctacttgtatgaccacgcggaatctacaaccgagcggagcagagaaatcatgcactctgaatgtttactttttagcagttatgttgaaccctagctgattaaaatgtattacttgtcgatctcgtctttatccaattccattgctacttttaattcttccggttatgcaaaagtttaacctgccctgcgtttaggttaatgtctttggttcagaatcgcttgtatttgtgtcttacgtttgtcatctgttttctttcaacaaatcaacgaagtggacgaatccttgtgtccatcttagtaatcgctagtgaagtcagaatatgaatgcattagaaatgtttctgtcaaaccccttttcccgttgaaatgtaaagcctggccacatttctttgtacagtgaataatctttaggtcatctccataatgcgcatatctcgccgttttgaaacttttataagtttatctttacctatatacctgctatcaatggctaccgaccgaggcatcaatctgtgatttcgtgtgcagttttcttgtatatacgcttgtagggacgatgatgcaaagctggagttggttattccagtattgatatctaacaggaataaattcgtaaaacaaaaagaaactatatgtgtgtgtgtgtgtgtattcgtgttaatctatgttgcttcctccaatcccagattttgattattcccattttcaggatttagtggctgttcaggagaagacaagagttga

SEQ ID NO: 114096 - DNA, 786 bp, Physcomitrella patens
  Intron number 1 from transcript Pp1s332_33V6.1 (locus Pp1s 332_33V6) derived from phytozome v7.0 (chr-ID scaffold_332 ; pos 135508 to 136293)
ggagtggatagtgagcagttgccttactcgtacatgtaggttcttgaggctctcctgtcagttttgtttgtttaggttcatgtggtttcgtgtgaattcgttatggagtaaatgtagacattcgatgtgatgtcctgggatactgtagattcgagagtcttaagctccgaatgtaccaagatattttcatagtgcttgttggtttcgttcaagtaaggatgttgtgtccgcatttgcttactgagattattgtattatcgtaatcgtgacggccttttcgaagatgggtttgatggaatatactctgtcgtttctggcatcattctttagttacgatttgcagtagaatgtggccgacaatcattgtcgattctcaccgagcttgtagctacttttgatggtgaagttgtaagctttctgctgtaagctacgtaatggtatggtgctgtagacggtcagatctgtaggagctttatctgtctattgcctcgcagcttgctgcaagttgtttgatcgtcgttaatagatctcgtagtgcatgtgtttggtgcagttgtttggccatgaattgtcgaagtaaagtgacctcattatcgatatgctcgtggaattggggtcttaggcttaaaataagctagaaagtctcaggtcactgtgttctgaattcatgagaggctttaaaatctttgatttgagtattaacggtgcaatgacagcttttttcacttgacttttgcatatgcacatgcaggattgtgactacacaggttaggaatcgttcgatac

SEQ ID NO: 114097 - DNA, 419 bp, Physcomitrella patens
  Intron number 3 from transcript Pp1s64_184V6.1 (locus Pp1s 64_184V6) derived from phytozome v7.0 (chr-ID scaffold_64; pos 1563792 to 1564210)
aggtacatcggtcagaattcaaattttccttttttgtttattttttacttttgtttctcttatcgttttcttttctgcgctaacgtgtcctatgcactaaaacagcaactaatatttcgaaaatggtggatgggtgtccacacataatgaaagtatttaatgtagatgcttaccatctgaaactgtactctggtcgattacgtttacgaatgtctgtagtagagctatgcatatctcttaaatttgaaaagtaatttctccttgtactataggttcttaaagtaagtcttccagctgtgcagttctggagtttccgtaaattacatgtcaagttcagttttgatcgtgtccctttctaacagtactagctaatcggattcatttttttgacaaacagttgattccagtagcaccaagtg

SEQ ID NO: 114098 - DNA, 912 bp, Physcomitrella patens
  Intron number 1 from transcript Pp1s113_104V6.1 (locus Pp1 s113_104V6) derived from phytozome v7.0 (chr-ID scaffold_1 13; pos 552881 to 553792 reverse strand)
atagggtaagctagcttttaggaatccttgtgcatgtgaaattttccgaggctgatgtttggaaaagctccgcaggggtaagacgctggtgaatgagtggtatgtgaattggagagactgctagtaatttttttctgggtgtatttagtttgcgaatgcggagggtttggagggtgtttggaggttgataggatgtttttaatgtgctgtcattgtcttgggtttgctctatctcgctgaaataatagaggtctgatcaggttgttcagttttccaaggttagtgtagtttggacggttgggggttatggtgagcggtgaatagcccttcgtggaacgtattcatttccttggattcgttcttgaacgtccgggtggttttcaagactcttggagtagcttgccgcgaggcggtgacgatctatctgtgtgttggtggttgttataagcatttttatttatttattttttcctttttctttgtgtggaacctacagtataggatcttctgtgggctattgtgtaaagattttactgtcttacaagattgcgatggatcttttagtgccttctctgataacaatttgattgttctcgcgttttggaagggctgacgatttcccggctgtgatgtgcacttcgtttttaattattgttattatttcccttactctcaatacctctattttcttagtttctattttagatttggtgaaatctgccttaatttcagtgtctccaaaactctgatgatgctgctagatccttatcacctgatcttggtagtaagtctgagtttcaagataattggcattggtgtatttcatgccgacacttctgacgtatggaagcttagattcgctgccaagagcagtaaactgaacggaatctcttgtgtgtgatagacataaac

SEQ ID NO: 114099 - DNA, 886 bp, Physcomitrella patens
  Intron number 2 from transcript Pp1s359_7V6.3 (locus Pp1s3 59_7V6) derived from phytozome v7.0 (chr-ID scaffold_359; pos 52504 to 53389)
gagccgaggcctccaggtcggtttaaccatcatcatcttgaatttgctttttatctcgagcatgttgttcacgattgggttgtatttctttttcttcttcgtttttactgccgcgatattgtccagagccgaggcacacaggtcggctaaactactccatccttcattttggccattcgaagctgataagtttttgcttctttttcgtagttgggtcttaattttatggagttttaaaagggagcttatcaaccacacactaaccttcatctctgccctagtttttagctcctctcgcattcatttctgcagttcagagatggaatgttttggtgagggggcttatcaacgttgaagtttatatttgaatgcaaaaggagcttaaaacgaatcctaaacttctaaactgtaaacgttcattgcaattaaggcagaagaagtattgcatcaattctagtgcccttttgagtattttgagatgctttgaagtatccagtaatgaattcaagaaaccggaatttaggcaagcatggaaaaaattagggtttatatggtggctgaagctttaccaggccattacgctgaattggttaagttatggaatgaacctaataatgaattggctgagaattttttcaacttactggccgaacctcatatgcttcattcgcattaaagtcagcaaccgagagaaaaagtacagctcatcaggtgattgcgctacatgaggttgggtccaagcctcactgatgaccagtaattcactagttaaatcctcggatctatctcatgtggctatcccgtctttgatggtaatggaaatgaaggacctaactatgttgtgtttttaggcgcagggaatcagcttctagaattcgaaggtagt

SEQ ID NO: 114100 - DNA, 1000 bp, Physcomitrella patens
  Intron number 1 from transcript Pp1s136_98V6.1 (locus Pp1s 136_98V6) derived from phytozome v7.0 (chr-ID scaffold_136 ; pos 638696 to 639695 reverse strand)
caatcactgcaaagggacgcttaaggttcgtgtgggggttgtgatttgctgctgatgctgcttgtgggtttgtatcggggttggtattagtgatctggtgtcccgtccatcggtcgatctgtgtgtgcgtgtgtgtgttgggtgggagaatgtgggggagggggggggggatctccttggtggagccatagatttttcagcatgtctctgaaacaggcttgcagcggcttggttcagtagaatggctttaccacaaactttgagttacatccttaatcttcaccccatccggtcctctgatagatctatgcgagtacctataggttttccctatcccttcgattccagagaagtgatgcagcggattcctgtgctgaatccatggcctcctagtctgaacggattcgcgctatgatccgagtgtttagttaatagatgagccagagaggtttgaagtccgtcttcgaggaatgacatcagaagcaagactaaaaagtaattgctaatacaatagtggccaatgtgctcttcctttccaaaggttttgttggcatctcttcttccacctctggaatcggattagagtcttcaattggaacgataaagtacgcgtcaccgttagaaattgaagtaatgcggtgtatttgcgaaagtttctgaatttccaattgctcaaatgacggggaataccagataacacgagtagttttgtactggtggtgcagtagcgaatttggattgtcgcgctgttctgccgaaattgcgtatggaattactgtcctgttattagcgtatatgaaagctcagatgatgctgtgacatgcgacctggcctagtcgtcggatctaatccacccgacaatttgccatttaaagaagcttactgttgtcagtatttcttgttgctggataggtattctaacccacccgattttgctatgtctatcacgtcttttgtgaagtgatgcaattaactcttttatgcaaacagctggcaagtt

SEQ ID NO: 114101 - DNA, 753 bp, Physcomitrella patens
  Intron number 1 from transcript Pp1s136_142V6.1 (locus Pp1 s136_142V6) derived from phytozome v7.0 (chr-ID scaffold_1 36; pos 797138 to 797890)
aatgtatgcggatttagtcatcgccttatcgaattctttctctttacgacactgacgacccctgcagatgttgtcctagatcgcaacttcacaacctgcagtgagcaacgcggattcatctgaagtggagacgaacgttatggcttcggcgtcgttgtatgaagacgttgctcacgatcatgttttctctgccgaacaaatctcgagagcatatgttctcatgatttgagcttgtgtttttggtgatgttttgaaggagttgtgtttaggaattttttgtgaggggggattgttggtttgggaatttggtgtctgggatgctggattagtgtgtccgtagtgtatgcagtggtgggaaaaattggattattgagatgggcaattggatgtttggctttccatgacgttgagcatcagttaatggtaggggtagtgttttgttggtgtttagggttttgttgcttttgatcgtggagtggatttgctcgcggatatcattaagtatgtcctggttgaatttttggtgccagattggtggtttgtcaatttgtccttcactcgtcttcagagcgctttggagaatgacttgatgtttgatatgatttacacgtcaattttgtgcataccagctctggtggtgatgttgcttgtgtagaaacgagggatggcattgcaagatttagtagttgtattcttttgctccagtgtctaacctgaagacagaattgtgcagagaattgagtgggatcgtgt

SEQ ID NO: 114102 - DNA, 835 bp, Physcomitrella patens
  Intron number 1 from transcript Pp1s254_31V6.1 (locus Pp1s 254_31V6) derived from phytozome v7.0 (chr-ID scaffold_254 ; pos 210129 to 210963)
ccgttcattcgcagacttcctgagttcaaattctggtacgtgtggcgattccttgtagtcttttctgtcctgaccgttactagttctttcacgtcgtttttatttttattttttaaattctttttgttccgtcccccctcctgtttttttcactcttttgcgtttaattgttgcgtcctgagaacggtcgttggtctagttttgatctaccaaggaatctggttaggggaggggtgacgaatatttcaatgcggttctgaaaatgaggtgactgttactgcactcttgtggcggaactcgtagcctacgacgttctttctttggcagcaagaaaaacacgtcggaattgaatttcaattatgctaattatgcgatacacgtcatctcacagtgtggcattgctgtttgaagcgcttcagtcggtcgtacttgatcttcgtaaagtctctttgacttgctcttttgaacaccatgccttacgacggtatcaaatggtcacgtagttagaagctttatgtctgtattttaaatcgaaagattcttcaacatcatccctacatgcttaccatacgagcaaagaagaatagttgtcatggccgcatttccttgtcgtaagctttgtacaatcattgatgatccctattatatttgcagataggaatgggttgttggtttccgtttccttagacttctcattgttgttggagtaatcacacatattaccttggaaaataagggtttcttctcctagaattatacgattctgcttcatgacgagtcttcgccttgttcttatccaggtacgcattcacgaaagcgttggtggtggcattca

SEQ ID NO: 114103 - DNA, 751 bp, Physcomitrella patens
  Intron number 1 from transcript Pp1s28_145V6.1 (locus Pp1s 28_145V6) derived from phytozome v7.0 (chr-ID scaffold_28; pos 823829 to 824579)
tgcgtcgtatcctccttggctcgccgagaattttggtaacttgctaatcaatcaacatgtgttgtggtccccgaaggaatttttctctcgtaattgtgcttaattcctatcttcgatttgccccacactactctagaagcttcaagaagcctttacgtctacaccctactctcgcagggtttcccagacccaggaccgggcaatttgtaatgttaaattttcgagattcacaaatgcatttcgtccccgtttcctcccaagtgtcagtccttcgagattcatggatcaaatccaccatgttctaatttcagctggccacgctttctgaggtagcacaaagtgccctccttgttttagacggaacatgccctcttcaggataagctagatttactacacctggcaccagaaacctcaccgtgttactcacctccctccccccgctctccccacctcgacaatatgccccccctcccacccatctccaaaagtgcaaaagttcaaaaaaaaataaaaaataaaaataacaaatgcaaaacccaacccctcattacaggccgaatcttaattattcaatatctacacacacacacacacacacacacacacatatatatatatatatatatatatatctagacatatactgatatgcacattctttctgggacaaccagcatgatctgagagaccatcgctttgttgcacccagtgcagggcgcaagactctgcttgaaactggggattggccg

SEQ ID NO: 114104 - DNA, 842 bp, Physcomitrella patens
  Intron number 1 from transcript Pp1s257_38V6.1 (locus Pp1s 257_38V6) derived from phytozome v7.0 (chr-ID scaffold_257 ; pos 242286 to 243127)
agcgcttcttcaaagcgtattgagcgtccttgggggtactctttctcgctggcttaatggttaggagcacgatggtgtgtcaattccatttgggattgaggtgtttgtgatatttttgactagggtttaagctttgaggaggatcttagggttttttttttataatttgaagtttattttgtgggaggctttagtggcgtgattttagttcctattgcgagaggttggattttgatgctgcgatcagtttttgtttcggtttttgagtgctgagattgaagttttttcagcaattttggggagtttttttcttcgtgtgctcctgattgtgggccccggacttcatcattggggccctctgcaggagttttttaatgtaatgtgttgtagcgagcggtttctgcgctttagggttttctctctatcagattttccgggctggtttaggtgcttagcgtgtgtcgttgctgtctggttctattgacacgcagccttcactttgattggttactatgcattgggtttgttctggccaatgctttggatgtattggcctttgcaaatttccggaggctatatcctctgaggatgtaaattgcagcgatgctggtgtctgagcaatgcacactgtgagttgcgaccttcaggtccaatactcgagtagtcttaggttgtagttctagagctcacaaaggtcatgaactcttgtctcggtagttataattttagctctgctgtttgccaatgctcatgtttcacatgattttttgttgggttttgtactcaaattttcaaattggaactcaggctgcgggagattctgaagagtaattttcgttcaa

SEQ ID NO: 114105 - DNA, 1027 bp, Physcomitrella patens
  Intron number 2 from transcript Pp1s37_40V6.2 (locus Pp1s3 7_40V6) derived from phytozome v7.0 (chr-ID scaffold_37; p os 253303 to 254329)
tcgcgcagctggaaaacatctggagatagacatttgtaagtgcatcgcctttttctattcttgttaccatggaatccagcattagtatatgtagtcgtcgggcgctttaaatgctgcaatccctactgtttacagtggcgcatgtgcgattttatgcggtgcattcctggtgtgcatttgtggtagaaaaactcctaagagtttgtcatatgaggcttgcagggactgactgatgtttctatttgttagagtgtagtagtttatatcctcgcattatcaaaagtacaacgcaaggaactgggctattttagaaagccattcagtaatgtacagtttgcgtaatcgacgggtttctcaatgtaccaccccggatgttgactgtcattcaattcaaataggtaaatgtatgagattaagctcggttgttagcctgaagaggactcacatctaagtccatgatttgtcaacatcatcacgctgatctgtgactcgctgcttgttctccccgcatatagactcgttgatttccgttatgtcctatttaagatcatgacgaggattggaaagctgtagaacttgtattcgtatctcgtacaactccttctgcacaatagcaactgttgcttttcgcagtgaagtaagagttgctatgatgaggaaatctagtcaggtccagtttgcaggtatgcttatttatgaatcttcgccgttggcgagtgccacgggtgcccatttgtgtgtgtagtgacgttaagatgctctagagataaaagatacttgtggattttttattttttattttttattttttgtggagtatgcatgcccagcagcgtaattctcaaaataagacaccttcgaagtgggtacgatggctgtagattacgggacgagatgacagattcgagatggttgttgtttaatttgcatgttaatccgtgaagtactgttttccaacttctgtgcaagatctggccattggaacatgcgtctctgatgcgttccatattgtgtttgtagaatcggg

SEQ ID NO: 114106 - DNA, 667 bp, Physcomitrella patens
  Intron number 1 from transcript Pp1s18_260V6.1 (locus Pp1s 18_260V6) derived from phytozome v7.0 (chr-ID scaffold_18; pos 1960589 to 1961255 reverse strand)
ggatcgctccttcgtcgccaaaactgaagttaacggtatcatatattttgtcttggctgttttgtggcacaacgagctagtcacgagttggtttgtaattatgctttctatgtagcatgctagttgcgattgctacatttatttattttgtggttttttgctctctggtagatagtcaaattgacagcctttttcttttttttcttttttttttcttttttttcccttgcagagcacagagacctgaagttagagagcaaacattacagcatgaatattgttgcttccttgcgtttgtggatcataccaagagttatctatagcatcatccagtgagatattgttctcatatgctatcactatgatagttggtttggggagattatgctctgaaacaagtttagtcagtcatgttgaatgtacgccgcggaaagaggtgaaggagtagttggtgttatcaatttcagtgagtatcaaatattttttgtgatagtgtgatccttacaaggaagttcgggttcctgtccatgtgattctggacttttgatatgtggggtcttacataaggacagaaagcttcgtgacagccttgttagaaacttacggattatgcaaagcacagtgacagtatagagttgtaatttgcaagtgagcatcatcgaagaac

SEQ ID NO: 114107 - DNA, 813 bp, Physcomitrella patens
  Intron number 1 from transcript Pp1s21_218V6.4 (locus Pp1s 21_218V6) derived from phytozome v7.0 (chr-ID scaffold_21; pos 1418304 to 1419116 reverse strand)
aaagcggcgctttctgatatcctgttgacatcgtacgttcggcggaatcgtcatctcaaaaccctaagatgttttgtgtttctgtgtgtcgtggtcctgccttcgacctgtctacggcgtgtgcgccgtggcggttttggattggttagtgttgtctgaatgtgtcctcggtggcagtcatcattgcgttttaaattgttttggatggtctttgttagggttgtttggttgcggttgtttgcttatttatttttgttttctttttgttgattatcggtttttagttcgttgcgcatcttcgggtcgagtttgtttattttcaatagagttttttttgtgaaaagtgttcgttgaatggaaccgtcggattttttagtttgcgagtctttatgtccagtatatctttgttgttgttgttgttgttggaatatgactgattcgaagatcttacacttcgtggtgctggtggatcgtgaggattagtgttcatgtagtttcttcatcgggtagggacacgtactcgtataatctgttacataggtttgtggtttccaatcagttgtttgtgtaccatgtgtaccgccacctaaatctagctcattgaggtctctgtgtgggagctctacagtttatgcactgatcgaagtcactggttagggttttattgtggtgtaattgttacctcctgtgtgagggtgaggggtgtgaggaatcgacacatgtcctactctacggtagtattgccttacaccagtttgattttgtgatggttgagcaggactctcctagaggacgcagcaggtactagtgctg

SEQ ID NO: 114108 - DNA, 994 bp, Physcomitrella patens
  Intron number 1 from transcript Pp1s18_123V6.1 (locus Pp1s 18_123V6) derived from phytozome v7.0 (chr-ID scaffold_18; pos 604613 to 605606 reverse strand)
ccgcacaggtgtgtgccgcgcttcactatctccttgatcgggttgttgcgttttatttttcctttttcttttctcttctatcccctgtttactgtcattagggtagtcattgttgatcaagttgtgtttattgatttggagccttgtcgtacgccatggcgatagaagggcgaatgcttgtgcggaagcatgcaaaggagacagtgagaatgtgctgttgcttcttgtttattgatcacgttaattggctaagaaggatagtgcttacatcacatcgcaaaactgcggttgattttctttggcaagtagtaagaccgtcacacctagagccacaatttgtgtatccttagcctgtaaagttcttagcaggcaagatcaacctgatgcagttggctgtcgagtactataatttggaccattacttttaaatcatttttttcagcaatactctagtcttaggaacttcaatagttatatgcacgaatttctcacagacgcaagcttttccacacgaacaactctgcacccacttttgaatgtttcagtgcattagactaattcattctttctcgtcgcagggaggtaaatgctactaacaataaagatgaagatggctacaaggtttgaataggattttttttttttttttttttttgtaggatgcattgggtccgtacataaacaatgttcccaatgtctgatttaatgagaatgtggtttgttcaacttctacctagtgccgacgttgtcttgtacatttggacagaagtcgctgtctcttgaatttagaaaatctgtttatgttcgcaatattttggttggaggtttattgcttatgagttggaagtgtgatcttgtccgacaatgatttctcttgtctcactggaggcatgattggtccttctgtgtatttgagctgtttcatcccatgttaaattctaaatctgaattgtttacaggatctcctagagcacccggagatagatcgacgaag

SEQ ID NO: 114109 - DNA, 375 bp, Physcomitrella patens
  Intron number 1 from transcript Pp1s148_169V6.1 (locus Pp1 s148_169V6) derived from phytozome v7.0 (chr-ID scaffold_1 48; pos 1088847 to 1089221)
acaaggtttgagggtttaaagttgcacctttactaattgaaatgtccaagcatcatctttcactctgtttcatgggtttaacaacttggtgaaagatggctcatgtggcaagatagaatgacctttccaaatgttcctaatgtaaagcactttgatctatgactttttcaaaataatgttttatgcaatttcaaaaggactagtagaaggatgttagtttggaacgattgttttcaaagtgagtttttctgttatttgttcatctttgttggatcatgtacattctcttcttgcatagtttgtttgctacagcacaaagtcctaaaatgtaacattgaaaatattgaactttgtaggggggcatgtattgtgcag

SEQ ID NO: 114110 - DNA, 703 bp, Physcomitrella patens
  Intron number 1 from transcript Pp1s9_109V6.1 (locus Pp1s9 _109V6) derived from phytozome v7.0 (chr-ID scaffold_9; po s 896358 to 897060)
caagagcctgtaccacaccgaggaagtgccgcaaggttagtgcgcgcggtggagttgttgtcgtttatatctttatttatttattttttttttatagggggtgtctggtgatctgttgtgttttttctgtttttctggtgtttgaagtttcccggcgtgggatgctgcatggaccctttggaacagatgcccttcaaagtgtattcgtagtctttcagctaataccggaacgtgccagcgttaatgacgatggggaagattgattagcgagacagtgagcaatttgtgctactagttggttcgcttgagggttctcgatctcagagagctcaaaccctttaacatttggtgtcattttgatgggaagttgtttcctttgtttcgcggttaattaatccaggtatgtcgggcataatgtctggcactgtgttctgcttgcctcgattggaaccgcagaatttgtagtcttcatttctagactggagtggaatccttggcattgattgttatggttcccgcttcacgtttaattggtggcaatcggagtttcgattctgaagtgcgcttccaatctttcgaagttcaatatggatcgatgcgaagtaatgtccgaagggctttcaacgccatttttcggtatttagtggtcaggacattcatcgaatttagttcgctgctgacatgtttgtgaggtgatccagac

SEQ ID NO: 114111 - DNA, 942 bp, Physcomitrella patens
  Intron number 1 from transcript Pp1s30_201V6.1 (locus Pp1s 30_201V6) derived from phytozome v7.0 (chr-ID scaffold_30; pos 1353062 to 1354003 reverse strand)
agtctcaaacttgattcatcagcgtttctcctcaggtgagtgcaagactcttgctggttgggtgtggtgaaataatcaggaaggatgtgtgctcttgctagcaaagatctctttgtgtctgcacagtgccatcttggcgatgctagctttgcattggtgaactatagcaaagtaacaattaaaaagaaaaacactaattcatgccaagtctttgtcaaaattctcagctgccattgctttttcaggaacgtaaatttagaggaccctcttctatagttcgaggcgtgaacattgcaacggttgccgttgacgcctttagtaaccctggtttcgatttctgagttgtatgtcacaacttattttcttttccacgtattaaaaattacgtagcattttcataatcgttttcctaccaattgcaacacatgactatgattatctattaacagcctctaggcctgtcgccaataacggtgtccattacactgcttgcatcgtcagcggacaaccatagtgattagttttgaaagatacataaacccctgtctgaacccctcttattcgttgtaactgggttttaactcgttcgcaatagcttcatcctaattagtgtggtatcagtccgtggaagaaaccactttagttcttgcacgatggacttttaaactttgaatttcatattctcggtgattctaacggttagacaaactcggagttggtgttttaaaattaaggtgtctggtgcctaatttcttcacgcatttcaacagcagaagtggatcactgaagccttggaattatagccactagaacatttttttttatctgctgcatggggttggtcgatgattctagtgtttgtgagaactttggtggcttcaggagaaactgcagatgcactagcaggatgaccatcgtttctaccgttgctactagacttcg

SEQ ID NO: 114112 - DNA, 525 bp, Physcomitrella patens
  Intron number 1 from transcript Pp1s363_41V6.1 (locus Pp1s 363_41V6) derived from phytozome v7.0 (chr-ID scaffold_363 ; pos 309347 to 309871)
gacggtaatgttctatctcctctttacgtctttatgcattgttgttttctctagctggtaatttttcctagttgtaggaagttttaggggtctagactggtggctgaaaccagaatgtaagcttggtattgcatgtcttccatcgaagtcgatgaacatacttcattagaggagtacagagatgttacatttacatatgacatattcatcttcacgaacacgaattttaataaaatcaaaaaacaaaaaacaaaaacaaaacagaaatcaatttcctgggtgtgcagtgagtttcttactccctctaactttgataagttttacaggtctgcctgctgtcgcagtgaaagcttgatatgtagatacatgtcttggttagtccagagttcgtttttagttgaaaatgagctaaccgatttcttacagcaacccggatttctccgggtattgacatctctattaatcacagtcatgaaccctaacataccgatggtctatggatgttttgggtgcattacagggacg

SEQ ID NO: 114113 - DNA, 913 bp, Physcomitrella patens
  Intron number 1 from transcript Pp1s2_483V6.1 (locus Pp1s2 _483V6) derived from phytozome v7.0 (chr-ID scaffold_2; po s 2818618 to 2819530)
ctaccaatacctccagagcaggttttaacgacagaaagtctgcgttgttttctaagtagccgtgacagcatcagagtgttgtatttggttgagtttctgatacctgctcttcgatatctgtatgttgggataagaaaattaggtgaaactaacgattgagctggctcattactaaaccgaggatatgactgaggaagaggggctagagtggagattttagcaggaatgaggatcactgaatagaaggtcccaaacaactacaatgcttgcttaggtgagacattcatgagcggtactgtttgcactgggaggcctttaaacttgcaacaacatggtgggcctcggttgggattagcatcagtcgggctataagatgatagtgattattactcgtttttgtcgtgaatgggcatttgggctttaggataattagttgtcttatgtatggatgcaggcggtaacccactcatgctgaggtcaacctcattttctgaacatttggaagggttttcggtttccagctttatagggttcagcgagatgcatcacttctcttagtctccagactttccattagaatttcccatactaaggctggataaattgtcttaaacaaccacattttatgtgcaagtgttagcgaagtcaaaacttgtgctggaggcactgatgaaagctctaatatctgtattttagaggtcataaaagcacggcatttcatagattgaacagtaacgggttttgtcagttgatgcttgaggtggaatattgatcttgttctacctgtcaatctacacatatgtctgagactatgttttgtgtgatgataaatctggatttgtaaaccttgtaattgaacgtacttttatttaatccagagctacatattcttggagctgaaaaaggaatcaat

SEQ ID NO: 114114 - DNA, 555 bp, Physcomitrella patens
  Intron number 1 from transcript Pp1s110_136V6.1 (locus Pp1 s110_136V6) derived from phytozome v7.0 (chr-ID scaffold_1 10; pos 1228380 to 1228934)
gcactgggtgttccttccacactttgctacttctaaattccatctctggctcgatggcttggtttggtttacattttgagtctctgacctgttgtattgcgaattttattctcattatttcatagattgcctgtggattcttttctctgtcctcgcgtaatgaatctgtagtttgtggattgtgtgaaggacttgtgcgagattgtgatgcatctgctgaattcactgcgtttggttatggttagcgtaattttttggtcggagccggcgggttgaaatgttgttgaaatgtggcgtggttctgatcagttctttttgtcgtcgtattgaacttgtaaaaaaataataataataataattaataaaaaaaaggatagctagctctcgggattcgttttatgaaactgattatatacagatattttgtactgtctgcaatcctgtaaggttgttcgctacgcaattttggcacgacgtgacgctacattgagttgggttattgaaaaaatctcacgtgacgaacatataggtatacgaaggtgggatttgcaggga

SEQ ID NO: 114115 - DNA, 1070 bp, Physcomitrella patens
  Intron number 1 from transcript Pp1s89_299V6.1 (locus Pp1s 89_299V6) derived from phytozome v7.0 (chr-ID scaffold_89; pos 1490629 to 1491698 reverse strand)
actccagagaaagtcctttccaaagaaaagatcaagtatgttgtatcctaaacagttaatagaaatatgcttgtagcgattgatcttcttaagtaactaaagaacaccaaaaacattagtaatatcagcagtgcagactttgaagctcttttactaaacctcttgataagtttcttgatgaaagagtaattaagaagcaacaagaaagagcaaacccgtttgatactcctagagatgtcacaagttcctttattaagctcttgaacatactcaagcgataaggtgcagatattacagctatcaaagtcaaagacaatcaatcatcattgtcatctgtatcgaagttgcttagaatgtacatatcaaacaatctagagaaaaatggaagacaaatagtacttgactctacacttgagaatctcttttcagaagaccagatacaagatttgtataataaaaacaaaagagagttcacaacaaaaggtcagatgcaaaagctagcatctcttttagtaacaaaaagtgcataaaaaaaactttttttattctagatttaatctatactctcatccattaaggtcacaaatcttaatatctttcttcgatagaagtgtcatctcatcatcatacatgtgtccaatagccatcatcttattatcgacctcagtgaatatgagcttggtgtttagatcaacatatacatcttccatatgctcgatagcttgtagcttcatctctgctggtaatctcctttgctgtctctttataccaatgacatcacggaagctatttatttgtttctgcttagtgtcattaaggagcccatcaactttcatcatcgtattcagatgtcttttacagaactcaaagtttatagttcttagaagagaacaattcctacccttgttggcaccgctttgaagtaccttctgacacgttttgtatcgtttctagaaggtctagagctagatcctattacgatggagacatcagcagattgaaacgttcttgatgctacattatttataatgtcagtgtgagcttcaagatttggtatttgctctatcaag

SEQ ID NO: 114116 - DNA, 680 bp, Physcomitrella patens
  Intron number 2 from transcript Pp1s44_316V6.1 (locus Pp1s 44_316V6) derived from phytozome v7.0 (chr-ID scaffold_44; pos 1998793 to 1999472 reverse strand)
tctcagcattcagcctggggatctgaagtttgcatgtgcgttttttctttcaccactggttgctcattattattgttgcaactaatacacagaccactattggttgaagcatgctgtgcgcccattaaatatagctcactcattaacagtgtggcgctgccaattcgctagttatgcttcaattagatttacatcatctgtacatgaacaaacggtagtaacggtcgtgtctgggtttgggaaggtaccagagttattcgggttatccatttttcactgatgttcgctacaaatttgacatctgtagtactattctatgtcctctaatcatgcttttctacagtaatttgtgaggtcatagttagctttcttccgaggtgtgcacgatcagatcagtaatgcagttgtgtctgctaaccaagtcttaggatttagtgaccaaggcttacagtgccactacttatgtgtaccgcatttcgcagtttttttgatgcattgcgtctaagtaggtatttgatgcctcttcaatttgatgtatctgtagaagataactctacatatcttggttctgtttctccaaatttggatttcacttttaatcatctattatgctgatggaaactgcattcctctgccatgcaacagttgagttgaagaaacagatatcatcttctcttcgg

SEQ ID NO: 114117 - DNA, 933 bp, Physcomitrella patens
  Intron number 1 from transcript Pp1s44_316V6.1 (locus Pp1s 44_316V6) derived from phytozome v7.0 (chr-ID scaffold_44; pos 1999572 to 2000504 reverse strand)
cgatctggactctcccctcgcgcgctcctttgcaggtgcggtccgcttcgtcgacgcggatgccgtctttgcgctgcgattttatgaattaatgggtttttttgggagtgtttttggcatcgttttggagcgagttttggagggtcgagggtttttttttttttttttttttttttttgggttcgcggggttagatttgaccaagtggagcaggaatttcatagtgactttcactgcggttcttctgcataggatcctgtttttcgtgacatgggtgcttttgggtaagagcgagtgcgaggttttcgtgcactgattacagcaccgtacgcaaagcaggggcaagaagaatctgaggaagtgaggatgtcccggatgtgaaggcgaagtgccccggagacactcgctgcgtaggtgtgagttgggtcatcgttgtgtaggttgtggttgtcatattgccgtaccatttttcgcgaccgtcggaggtcagaggaagaaaaggggacggggttgatggttgcagtagttgaaacaaggagttgcgattcctttcgtgaagttgcatttacttcgccttggtgatgtgtaggatttgatagcatcttacgttcgatttttttttaaaatttgtttttatttatttatatttttttaaaaatttatttatgtatttggagggcttacatggtgcaatcagctgtggtttatctggttgggctatcttgggttcaagagtttcatatctcttttaccacttggagtctggtggaatgtgtgtagatgctgaatcttttgattctttccgatcgttcgtctgcaaatgaatcgtgtatggctcggtgggtttgtgctctggatttctcatgaaatgaatcgttggttgatatgtgttgtacagtaacccccccccccccctccgaggtcaagaaagtg

SEQ ID NO: 114118 - DNA, 748 bp, Physcomitrella patens
  Intron number 2 from transcript Pp1s195_82V6.2 (locus Pp1s 195_82V6) derived from phytozome v7.0 (chr-ID scaffold_195 ; pos 559557 to 560304)
cgaggtcagtgttctactttgtcatagctccctcctctctttgggtttccccctttggtttcttgcccttttggctggatcatatgtatcaggatatgagtgaaattgcagagagctctacgactctccattatctgcatgtttttagtgcgatgactctgtgatatcacacagtgctaattgcacagtaagtttatgaagttagcattgcattacttgttttgattgtagattgaagtgttagcattgatctacatcgctgtgaagcacagtctcttcctctcttctttcatatccaatcctcgaagttcctccagaagattcgtactagttgaatccagtggcatcagtaacattgcagtcatccttgtgtgacgctcacatgaagtttacactagagggttcacatattgatatgaggagcttcgaacgttcttaatctactttgtgaattagtagtgttgttggttccgccgaaatagaggagcatgttatggaagtcagtccgggttatctcggtcaattcaacatttctgaatggttagctgctggtcttgatgccagcaaccgattgagggcacgtgcacatgatcatggacatcgtgcttttgatattttgtgtaaatattgcatcatgcacactgtgagtttcagtctggctttacatttgaacaggtcagtatatttcttttctcagatactgctagcgcaaccattgactttagtttttcgtttccttttctttgag

SEQ ID NO: 114119 - DNA, 829 bp, Physcomitrella patens
  Intron number 1 from transcript Pp1s237_7V6.1 (locus Pp1s2 37_7V6) derived from phytozome v7.0 (chr-ID scaffold_237; pos 15886 to 16714 reverse strand)
caattcccgttctgcgcttcgatcactggttcgaggtaccacctcactctccgaaggctttttagtgtttgatttttaattttttttggtacactttgaataggttcaaccctgaagctcgttcccatctcttctcgatgttacttgaatactgttccctggtttactgaaacaggaatatgtgctgaaaagtccatcttgttcgatatcacattgttcgggagtggtgcatagctgaggtaggaccaatcctcttctttttgaagggaagtggcaagagagtgatgaactcaagttttggtcaaccgcagatcattttcagacggcaaaggttgctttttaggtgtcacatagttgagaggaatgacgagattttcttgctctatggagccaggcgagtgattttctaaagctgaatggacgatacatccgagaggtaaaatgagcagctgacttagacaagaaagcttttagattgctgaaatggagtagtacttcgactgcccaactttccaatgccagtgttacgatgccgaattttgtcccccctagattccaagcttttccagagcaaaaaaaattggacaagtcaccacccggaatatattggcgttgagagttacacagtacatttgtgtctatgactcgagttttcaggcctcgctctgaaaattgcttgcagtacagattgattagtgacctagaaatcaggtctataattcatcgatggccctggcaggtaggtagggaagcaggcagacagctgcacattaagtatcttctgacaattggtttgtcctgtattatgccgcagatacttcgaaattag

SEQ ID NO: 114120 - DNA, 624 bp, Physcomitrella patens
  Intron number 1 from transcript Pp1s143_175V6.1 (locus Pp1 s143_175V6) derived from phytozome v7.0 (chr-ID scaffold_1 43; pos 1077197 to 1077820 reverse strand)
gcgcagtcctgcctgcactccaccgccggtaatgccttggctttcccgactccagtgtttgggtccctccccttgttgctccaaatttgtagcttgggcgggactgactccattcgtgggcatacctgcattcttgtgattgattttggatttttaatttctttttaattttttaattttgatttggtgaattcagtgattgtttgatgtaaaagttgtctgcatcgtttgtgtggatgttgtatccgggttgttttgggtaattgcgtcggtttcttgcaaggttcgcgttgaattgcatcggtctagtcttcggcgatactatttcgtagctcagaaatgatgaatgaagcatgatggcagtattaactttgggttcgaagaattatagcaatagggtatggctgatcacacaatcgcagaagggattggctcttctttacgcgctcttatttgttaaacttctggggaaaatgtgctttgaagacttcaacacagcagtgtccactgaagccttcaagttattgagaaggtgatcatttgactttcaactcaatgttgtcactgactcgtgcgtcgcatctgtgcacaggagcagctatctggacatttccagcggccaag

SEQ ID NO: 114121 - DNA, 755 bp, Physcomitrella patens
  Intron number 1 from transcript Pp1s22_70V6.2 (locus Pp1s2 2_70V6) derived from phytozome v7.0 (chr-ID scaffold_22; p os 439205 to 439959)
ggctcgtaagttgtctcaatgtttatcagattaagatctaagaacatagaaacatgttattgcacctccaagattattttttacgaggaagagtatggagatgagggttgaggacggggatgagggtgagactggctttctatattttccagaatcttattgattagtcagatatactgattcttaaaagttgtagcagttcaattagtgctttatacaggaactttctccgcgttgcagttttgtttctttcttctgtgtgtcgtgatggttcgttgagaatttttttaatgaattcattttcaatgcgaaacgtgcagatatttcaactaaggaatcaaactgaatcttctcaaatatctgttctcgaatttatttctacattagcacttgccagccgaactttgattttttacattaactgggctttgagcgcaggaggccacaaagtcgtgagagctcacacagtagagaaaattgtcagatccagaacgagggctgcgataacgagaatgctgttaatgaggggtgacctttcttatccctccattatttttttccacgagctcgttcgcttcgacttctcgtctctggtgaatgtagtctgtcactacgtgacagactccttgtttttgcggaactgaacgaagttcaatgtcacccatgtaattcaatcacccccatatagtatctgcttgatagctggtaacaaagttttgatgcgttattgtgtaggtcgccagccgccgtgtcga

SEQ ID NO: 114122 - DNA, 535 bp, Physcomitrella patens
  Intron number 4 from transcript Pp1s22_422V6.1 (locus Pp1s 22_422V6) derived from phytozome v7.0 (chr-ID scaffold_22; pos 2609606 to 2610140 reverse strand)
cttttttgggtaagttttagttcgcgacatcaaaacatctatccactgacaactgtcattagatttcacattcctgtcttggccatacagcttactatcaaaaagaaccctttaatgaggaagaacagttgacattatggtaaaaggtgctcctgccattgcaactgctgcagtctagtcaaatgtgcttctagcatttatttctccgccatttccctggtgaaagagtacttccgagtcctgttccgaataactaataagagcgaggcgggcaagtgataaaacagataaatcgacaaattccatatcctgttattaggatcacggttcacagtgacgtttttactgctttcgcttggttgtgtctcttgctgttgaaagttgtgaattgattgtacgttaaaagagatgacaaactagaccacaagatgagatgcgcgccatttctttttctaggtgctgttttctcagtgtaattgaacaagtgaggatatctaacgtggaatctgatattcgtgtttgtttgacgtccagc

SEQ ID NO: 114123 - DNA, 491 bp, Physcomitrella patens
  Intron number 1 from transcript Pp1s71_140V6.1 (locus Pp1s 71_140V6) derived from phytozome v7.0 (chr-ID scaffold_71; pos 784303 to 784793 reverse strand)
gagaaattctacgacagcatcggtggtattattgggtaacctctcttcctcccgtgcataaaactctctcataactagacctgtaagccttgaaggctttgggtttctgcctgttgctccaaagtttgctgatctcttccttatcgtcacgatatgtattgcagctagtaggtgccagtgggttccaatttatgttgtcaaatgcctcaagctagtgtagagttgttattttctgcagatttctatcagtcgaataaatttgcagtgggtgaatattgaattttcagtgtatttgtttttagatgttgatggttttgagcctagtgatgttcctagttttatcagcaacgaaagtgttggtctggagttgaattgtacatatttcacatgaaggtttccaattttcaatcattatcgagaacataacgtaattgattatatgttacaatatcacagatatcaagtagcggctcttgagcttataaaagcct

SEQ ID NO: 114124 - DNA, 592 bp, Physcomitrella patens
  Intron number 1 from transcript Pp1s2_67V6.1 (locus Pp1s2_ 67V6) derived from phytozome v7.0 (chr-ID scaffold_2; pos 398507 to 399098)
ataaaatttgcacacctctagaggtacattgctttagctgaaacattcgcctttagcatgtgttttgaatgaaaaaagtttcttcgacactcttcgggattgaattcgggttgcgtcggtgctcctgtaggaataagattttttagagtggcgttttgtcatcatactgtgttcgagtttttgtctcctacttgctggttgcgcttcaacgccagagtcaatttgttttgatgttatttctctctagatagttgatctgtggtacaggtcgtgagggctcgacgtttgatagaagacacaagattaatataatgaatatcaaccacattggtgacggaatcttgttattcttatcagttcttattaatgttgtattgatgaggctcgtacgaactgcatttgtgacgtaatggggattcttcagtacttctacagtcattctgtcaaacaactagccttagagtggatgatttgttttgagtatcggagattgcgctaatgctagcgtcgcttcagtacccagaagacttgtaatgttatcgttaaatactttttttgagagaaccttacggagagtttctattttaggttt

SEQ ID NO: 114125 - DNA, 831 bp, Physcomitrella patens
  Intron number 1 from transcript Pp1s6_425V6.1 (locus Pp1s6 _425V6) derived from phytozome v7.0 (chr-ID scaffold_6; po s 3550453 to 3551283 reverse strand)
tcatcgccgaagctacttttaaggtaaagtcctgggatctgatgccttccaaaatcaactttcgtagaaccgatcgcttggtatcaacctcctttcattgtagcgtctgaagtttaaagaatttgtgaaccttcacacatgatactgttgcctgcaacaactttcctctgagtacctaaagttgatcttcggtccgattgtagacagtatcagctattttgaaacgtgtgataattcatgaatttagaagtaggttgtgtttggaacttgaaatagatatgacgatgagacatatagatcttcatttttttcttggaatgcaatctacctcgaaggcttaaaaggtgtcagataatacgtctcttctatgtgccttgaattctatattgaaggtgatctttagcactcctacgaattgtcatgaaaatttgtgtattaaattgaaagacctaacggacaattatattaaattgaccaattagccaaacatattgttaaccagaaatgtttaattacagcgtcttcatcaagatgggactgctcaagtatcaccacagaacatacatgcatgcctggttatgaataggcggattgtaatgttttaatatccttatactggttccttactagaaacattgctttcagcaatagtgaacgagccaatgcttgttttcctgtgaccaggggcttccaagtttttcatctggcatcaccattgtttggttttccaccttatatcggtccacagtaacatctgttcaactcaaatgtaataattgaacttcttatgtttcagctcacgcgtgtgcgggcagagcagttctatcgagc

SEQ ID NO: 114126 - DNA, 1008 bp, Physcomitrella patens
  Intron number 2 from transcript Pp1s212_60V6.3 (locus Pp1s 212_60V6) derived from phytozome v7.0 (chr-ID scaffold_212 ; pos 336898 to 337905 reverse strand)
ggagaagaagaagaaccgtgtgagtccgtaactaggtgagatgtagtggtgttacgaattcgggtgagagggtcgatttggtttgtgtttttgtgatgtgacaaggatagtggattatgtttgagatttttggcgttttcggtgtggtttcaaccatgccgtagcgtatattcatgttttcgctgtgatgtgtagtttgggctttattttcttcaatcgcctttaatcctcggatcgtgaagtatctcgagcgactggctttcagagataatcgtgttgaagttagctgtgttggaacttttgagtgtgtgatttggtgagctggtgttctgattcttaattgcagaatttgaactcgacggcttgtaatttagacacagagaagtggtgtctgagtaatcggatcaatgacgattctatttcagttcgaattaattgatttaaagcaacgaagctagatatttctgttcaattttcaatttgttgtttggtattctttaagatatattttgaatattggttcagggtttgatgaacggtagtaggggatactgaacaggatcatctgcaatggatacaatttataaaagagtcttaatcttaagaatctgtctcatgtttgaacttatctcgaaagccgattgatttaaccagaagcgggtttatacaaattatcgatcacaagaaatgtgcacttaagggcgatttgaatgacgcaagattggttgagtgagtctcagtatagaagtgcattgaattaactttcaaagattgaatatgtgtcccatattcacggtatatatatgtttggcgccaggaatccttcactgtctggagaataagcagcgatcgtttgttattgtaagtctgagtccatgtgagaacgaaatttgaagttgaatttattcaagtcagttttcgtcaatacatagccacactagtattgatgaacggtcgctgtggattgcctcagacaatctggcggaccttgcaagacgaaggctgggc

SEQ ID NO: 114127 - DNA, 482 bp, Physcomitrella patens
  Intron number 2 from transcript Pp1s191_66V6.1 (locus Pp1s 191_66V6) derived from phytozome v7.0 (chr-ID scaffold_191 ; pos 412073 to 412554 reverse strand)
gtgcaaatcgtggaattgtatcctcaccattttctctatattgttacttgcaagcattgcgttgtgatgtcctctgtacccgctcttaaggaatcgccgaactctgccccgtaatagctgtggacattgtaaccgtgaagtctcttctgttatctagacccttcgtttatttgcttgtttgatttcttttcccctcaacgtttcctcagtaatttcggaaccttctcaaaagaggagcatgcccttcatggtcgaatttaagactaaacacatcaatctaggatctatttcatgttgacctcttgacctgcctccaggctgcttttctccttgaggtggattgtcggactcattctacacggttgaaaattgagcgaggttttgagttagatacatgtgattaattacagcccgaaatgaaaatgtttacatcaatgttgacctccttgactaggactgattgtggttaaagtcgagtgatt

SEQ ID NO: 114128 - DNA, 895 bp, Physcomitrella patens
  Intron number 3 from transcript Pp1s11_27V6.1 (locus Pp1s1 1_27V6) derived from phytozome v7.0 (chr-ID scaffold_11; p os 262210 to 263104 reverse strand)
caaatcaagagcacttacaggaagttggctttgaagtaagtgttcatgtatgcgtagtcggcttgcgcttgatgtgttcgcgcttgatgtcttctagcctagaatagcgacgatcgtgtggttgaggatttagaatctataccctatacagaagttgagttatgaattctttgcaagtatttcatgctttttgtacacttagcttttacttacatggtccaagtttgatatcagtaatatattttcactttcccagtttcatgggactttctgctatttgctgcacgaggttcacgtagttctgcgtagctcatttcttaaacatgaactccttgttattgttgggggaatgttcctccttgttattttctttgtttcttttattcctgcaaaggtttacgtgtaagctggatgtgtctccaagtacttttccgggtatttagagtatggctgaaatcttgattaactgtgctgtcgaggttaaacagttgtttaaacctttgtgaagaaattatgtatttcatctttttcaggagctgcaattaatttttattaaaattgatctataacttccttcgggccttagacggtgtcatgtgatctgtagtcacatgtgtccgcgtctaatgcaatcgtgaagatttcaaataaaaatgcatcagggctggacgtttatgagctagatttttgacatatggttttgaactatctaagtactgagaggtttcttgctttagggcttatgttttcattcacaattatgcgtgggttgactcaattatttaaacgtggagttcttagtaatctgcaccattagttgcttcctgcatttttctgacggtgatagttcctgataataggtatcatccagataagaacacaggcaatcctgagg

SEQ ID NO: 114129 - DNA, 398 bp, Physcomitrella patens
  Intron number 1 from transcript Pp1s438_24V6.1 (locus Pp1s 438_24V6) derived from phytozome v7.0 (chr-ID scaffold_438 ; pos 133955 to 134352 reverse strand)
cctccagagcacgtacgcaagattatcaggtgtggtattgaaattggtcagggatttgagctgaaatattgtgggggtttatatcgttatgaattcatttatttgattatcatgagtatagattgctcttatttcgagatgttacagtcgatatcgattcggttagggtttgatcatgctttgtttatttttgtatttttttgtatttttttttgtcgaggatgcttcttcttcagagaagcaggatcttatacattaatgttatactagatggtttcttttcttggttgcatagacagataaattaatgtctctttgagcagaacgatattatttgcaccgttcctagttttttttcgcaaacttacggtgtgttccttcacgtgatcatagggacc

SEQ ID NO: 114130 - DNA, 884 bp, Physcomitrella patens
  Intron number 1 from transcript Pp1s176_84V6.1 (locus Pp1s 176_84V6) derived from phytozome v7.0 (chr-ID scaffold_176 ; pos 596539 to 597422 reverse strand)
gccagctaccactccaattgggttgcaggtcccctctttgacaactctcatgctttctgcgctgatctatttttgttaatttgccgtatccttgaagtggttatgcctccatagtgttgcttgtggacaaggtgaagagtggcattcgactgctaagttctcttgttcaatcttttgtatactagaggtgttggattggcgtctttgacattctttcaagcggtggttgtttcttccttgtcattgtggagttagaagagcagcaagccctcagcctggtgtgcaaattgtagagttttttccattggtgacttgcaaagaggcgaccactctggacagcggcggtggctatttcttctgttgaataggatattgcgggcttgtgccgacctattgattctagtatttgacaatcgtgcggccgaattgcaactctgaatgctttacggaacctagtgcaactgtttaattgatgctagtttaaggagtcgtgagagaaggtttgacttcctgtagatataaaatccaacttgagcatttcgtaaggcacctcatttgattataacaaagtgggaaaatagtgcaaaggagtgtcgtaggtggtctggtggttccaagctatacctcccatgtgttgtcggagatttattgatctgtcacagtagcaaggaagaaggtagctcctgaaggatacataattcaaagacgtgtatttattttatgaactacatacaagggagagaatactatccttagtattgttgcactgaggacgccaaggcatctccaaccagaccatcaaggtttggtgtgaatctcaagtaatatatttccacggataccacgtagcagcgaagaggcactgctgcaacggttcaggttac

SEQ ID NO: 114131 - DNA, 558 bp, Physcomitrella patens
  Intron number 1 from transcript Pp1s190_104V6.1 (locus Pp1 s190_104V6) derived from phytozome v7.0 (chr-ID scaffold_1 90; pos 834993 to 835550 reverse strand)
ggctagtcccaaagacactcccgctcttcgagctggtcagtaactcggaccctattccttcttcatttctgggtctggaatcctaaaatttgaatttcgcaattctcatatgggtcttttacaccataaatttcaagttatgtaagaacaacattctggaaatggctttctcaattcggtcaaccttgaatgatgtgcaaagtccaatccaagaggagcattgtatgttttgggggttacgaggtctcaatttgaacggtgcagatatcctatactacatcagtaagtaattgttcaaaaatgtcgcattaattccctttctgaaaagtatgggaggcactatggttggagttggagggaatgaaatgactttcgggtgtttactgtattgccaagtttccaccccgtttagtcttcctcgcttcaaagattgctactctgattagatcagccccatttgatgacgtttcaaaggtttctgtctatgtttttcacttgttgacggtgtgtgcatacataacagggaacgtgaaaccgtataaattcattctaccccca

SEQ ID NO: 114132 - DNA, 718 bp, Physcomitrella patens
  Intron number 1 from transcript Pp1s270_56V6.1 (locus Pp1s 270_56V6) derived from phytozome v7.0 (chr-ID scaffold_270 ; pos 382946 to 383663 reverse strand)
gcgaagctcatccaggacgttgagggcacctgcaggtgttgctttcccttcctcctcagtctcatgattagggtcgtagaattgtgggtttctttggaaaatctgaaatctgcaactggtgttcgctatgtccgagtgggttacctcgcgacgatagtggatttgctgctgaccttggctttgcgtaaaaccctcgttagcggcgtaagtccctttgtgggttagccgagtgttgtaggaagaagggtggtgcgtatgtgggtttgtttagcttctgtgttgtgacgaaatggggttttggacagtcgctgtccatcctaggcacgctgcaaagaatgatttcgctacgtgaccgggactcgtgttagttcgctgagaatgcccgtttgttcagtttcttcacactggctcggtagcagcgcattgcaccagctaggaatgctctgccgaaaatttgggctgatgcgtacaatctggctgtaatagggagtattttgttttatgtcttgccatcctaaatttttggaaaccctgtttggaactgttagtgatgctgtgagctttggttcttcatccttaatgaaaatgtatttctctagtaactcatgcgcatgtctgtatcaggagcgtcacttcaagatcttcgatagttatcattaataatcatccccttgttaatgccgctaatgttttttttgtggctgttgcagtggacgtc

SEQ ID NO: 114133 - DNA, 970 bp, Physcomitrella patens
  Intron number 1 from transcript Pp1s114_70V6.1 (locus Pp1s 114_70V6) derived from phytozome v7.0 (chr-ID scaffold_114 ; pos 420382 to 421351)
agcgaactttgttgctcaattctcgctgattcaaggtatatatctgtaagccggttgtatagtcttctttacttttgcattggctgccatttatgttgaatgggtgagccgctgcttagagaacctgaagatagtaaccttgatgcaaaatttcgtggtgtgaggtgtttttttcatgcgagtggtggagtgttgattattgggttggtttcgattgagctcctgttttgtgggttcgtgcaggattagtctgtcagaagagctttgtagaataacgtcgtccttagatgtttttttggttctgttttggctgtgagtctgaatttctctgtgcatcttttcaagttgtgtctccgatcggtattgagaggggaagaggcttcccacatgcatcatgcgctgcaaggaactatattttactgacaccttgccgtctattataaccctgtacagcattgcatcgttttcatttgagtttattgtcttccatagattatgaaatatctgatttaagtcattcatgaaactaagctatttggattgggaagggtaatctttttgtattctatttatctttacctggctgtgttcgctgccgttgaattatatgtcttttctgcagaccccgtcgccttctagtaacatttctctcagaaatctttttaccatcacattattttttggggttcgcttcagttttgtaacactattcttgttctggtggattcgagtactaacatacgatctccgccattgtccgttctgcatgtttctttgtaataggcttacacgcgaatgtcatgacagtagccagctattcccacacgcgtttcccaaaacttataattagctatcagttacttttccgaatgatgctagaattcaaaatgtggagcggcaaccaagtcagcgactaaggttggctctattacgcaaactgggttgaccagcttctacactggcctgcagg

SEQ ID NO: 114134 - DNA, 973 bp, Physcomitrella patens
  Intron number 1 from transcript Pp1s58_92V6.1 (locus Pp1s5 8_92V6) derived from phytozome v7.0 (chr-ID scaffold_58; p os 423453 to 424425 reverse strand)
ttgacaaggctgaaatgcgtggcgttaacttagagagccaaaaaggagtaacttaattgctgctcttcagcaagtagatgaagaagaggatatacaacgagtgttccggaaagtgttacctctgattgacaattttctacattgtaaaaactccaggcccatgatagtacctggtgtccttttgattcagtcgcacttgtggagtgcagcatgatgctaatttgggcttcaatcatcatcgtttagactgaacaacatgagaacgccgtgtgcaggtacttctcatatgaacatctttacgacaaatattgcaagttctcgtggccagattcggatcatggcttttctgtttacgaggatggtctcctttgatgtggatagtatggtttcacttaccgaatagttgaacgtatcttgtgatcccctggtccgttgaacttcccaaattagcattcgatctagacgtactcactgtgcctaaaatgctgtaaagactttgaattggtgtaatgctttgagcgcttttgttggtaaatgaccattgtggttccattccaggtgtaaattaagataagtggtgattggcaggctccaaggaagtttttcagcgaagtagagggaatgatggattatgaagattgtttgtggtttgttttttttaaaagaaaacaaatcttcagaacccagcttagaataccggtgttcatctttacatggctccatgtggctctttttttttctatttgcggatttggcaactagaacgaggcgttagagttagtcctaaattactagaagtgaggagaaagatcaacttgaacaaaaaatctaatggatatctgtgctaatcatttcaggttcaagtatgtggacttggattgtgataatgtgataataccaaatgatatgcagtttttttttttttttttttttttttttttaatttttacagggagcaattgcatcgagtgga

SEQ ID NO: 114135 - DNA, 608 bp, Physcomitrella patens
  Intron number 2 from transcript Pp1s66_286V6.1 (locus Pp1s 66_286V6) derived from phytozome v7.0 (chr-ID scaffold_66; pos 1615467 to 1616074)
agaatatcccgccagaggatcttgctagcattgtgagtacttggactatcaagataagtttaggttctcgagtaagtgcacgcattattttgggacatcaatacactccagccttattgtgcaatccctgtggctataagcagttctcgcagtgaagctttaggaagctgttgtgaaggcattttgtgttggcatatgtagcttttgattgttctgaaaagtttcatgatcttctaaacggaaatgtttgtccaattactcaagcttttcctccaatgtcctctgagtagaaaaaatcatcgtaggttagttcaaatatccagcgagtcgtagatgttcattggtcactttattacgtctttaatggttgtagtattgtcttacgtatatcgctacatgtacctgcacatatcttggaactccaattcttgtcattttttctgtgttttttttcttatggaaaacatggcggtttgctaaagcatatgaatagaataaatgccactggaaacactttcttcgaatatgtgtctgatcggagttaatttggttatgcgttgattgaaaatacagtcagagatcgaccttttaaaggtatttccctgaac

SEQ ID NO: 114136 - DNA, 753 bp, Physcomitrella patens
  Intron number 2 from transcript Pp1s332_40V6.1 (locus Pp1s 332_40V6) derived from phytozome v7.0 (chr-ID scaffold_332 ; pos 240217 to 240969 reverse strand)
tcaacattaaatttcagaagaaagttcggcttcaggtcaccccggaacctttcaccaacgtgtaggatgttgcttgggtgtatttcttttatttatttatttatttatttattatagttatttattgtgtagtagagcagcttcaatgttgtacgttgttaccgattgcttaatgcctagatttgactcttgaaatacagatgtgacgtaggtggttggtcatttatgtttgcacgcagtgtccatcagtgctcattcttgtcagtcttcctgcatttgcaacaagttgcaatttccgtagatttcaaggtcgacgaaagttacactcacaagttttcagtacgagctggaaaatccttccatgatcttcgagtaaattgctttcgatcccactcactgttctagcgcagagcttgcacaaaatcttcttttgtttccaagcgatgaacgcactgattgaagatatctttgtaagattttgtgcagctatacatcctccgcacttgtgttgcttcacattttactcttgaaattctgattctgaccttgttattttattcccttcctttacgctatgtcgattgccatctcgatgttgcatcttttaaccagtactggaaatgagctgaagctgggctgcaacttggattaaccatatttgatggtgagctctccaatcacggcagtagctgatgaggaatacatctctttacaacttctgtctaataccagttctgtttatttgcagggcgg

SEQ ID NO: 114137 - DNA, 628 bp, Physcomitrella patens
  Intron number 4 from transcript Pp1s28_202V6.1 (locus Pp1s 28_202V6) derived from phytozome v7.0 (chr-ID scaffold_28; pos 1151184 to 1151811 reverse strand)
aacacctttttgtgctcaagactcgacttagtaaggtatcaactttgatccgagtctttgttttgatgtctttctggatctttgcagtctggtctttgagtatagattaatatttacacactcgaccctgtcaaccagagtgaagaaaaagcgaaggaagaactgaaaaaagagaagcgagcttgagcatcaactgagagagctccttcaagagtccatcaatctagaggcttcattagaagacgagcgcgtgcatggaagaggacttgaaaaacagatagaagattctcggacgctatatgtgagacggaggaactcgagacaaagatggaatggacggtgcggaagtacatcattttgtgacaatcctgcaccttcgattggacttagaatcggcggagatcacacttgagaagcaacaacaactactaaaggaggtggaagcttctcgtaaatgcctccagaaactgttggatgacacaatcacacaacgatataccgagaaagaagcagtcatctttctcaaaagttgccgaactcgtgttgagattgagatagattctctccgaagttttatcctcttctgacccaagttagcggcaactctttcagagaaggatttgctttc

SEQ ID NO: 114138 - DNA, 500 bp, Physcomitrella patens
  Intron number 1 from transcript Pp1s156_59V6.1 (locus Pp1s 156_59V6) derived from phytozome v7.0 (chr-ID scaffold_156 ; pos 410171 to 410670)
cggtacgtcacctgcccctctaacatttttatttatttattattttttactgtttatttatttatttctcccaatgataatcaactactttttgagaaatcaagctcataattgggttgattaccattgttatgtcatgtttatggttttatggttgtatggttgtatgtatgtttttttttctctctcgctttctctctttaggtcagtcaggcaaggttgtttcagtatgttagcaacttaatcccaaccttgtcgcagggatcatgatttctgattctggaagacatcatctttcatggatcgtctcaattaaagagagacgctctttggttgtgttgtcattacactgtttgcatttgatccatgccgaagaaatttagggttctaagaatttcgctctgcacaatactgcaaagatgtctgttaataaagtctaacccaatttttggaatggcgatccaggaaaatagcagggttttagaggaaaggtacgtttt

SEQ ID NO: 114139 - DNA, 954 bp, Physcomitrella patens
  Intron number 2 from transcript Pp1s104_135V6.1 (locus Pp1 s104_135V6) derived from phytozome v7.0 (chr-ID scaffold_1 04; pos 899215 to 900168)
taatacaggcgattaatcttttagggtatgagctttagtctttttctgcgaaaatggcatatatttgctggaggaatgcattttttcgatcgttcgtccgattatgtcaatgagctggagttgttgcgtgtatttgtctttgctctcctcattcgctacttttagaattaatctagttcgagtgcgtagggcagcgttgaagtcatttcggtgttctggcggtggtgaattagcttgtggagtgggtttcagtagtagttccataatgagaaagacaccgttgaatggggaggattttttgaacgtgagggagatctaattgtgtaaagcaacgtctatgaagtcgctcaataattgtccgttcttcagtcttcgcattattgtacgaagaatacatttcaaatcacaatgtagctgctgcactgtttttccaaagctctgtggaagcccaattcacacactcatctccaaaactctgttatgtcgcacatatgctagtccacttggctgcttttaagtatcggggtgcaccataaactgtccttctggccttcgtgtcattactctttgttattcaaaaggcccaaacatatgattgctgtttctactggttggcatcatcagggcgcgacaatagttacagaggggtgtttgcaggattgagattcaatcccttaatttgggagacgccgacagtgctctcagtctggcttagagtgttctaggaggctgtgttatataatgagtatgcttagagtgcattgaagtggctttgaaattttgaacgttgagtctttcagttgaggtgatgtgtagattacaatgctgaaccttttcctaatcgtaactttgactgttatgcttagattgaaagcatgtgtgaaggtgctaatgctattgaccgagaaaagcgacgctaagcagaaggaattttgtggtgcagaaaattgtctc

SEQ ID NO: 114140 - DNA, 727 bp, Physcomitrella patens
  Intron number 1 from transcript Pp1s299_24V6.1 (locus Pp1s 299_24V6) derived from phytozome v7.0 (chr-ID scaffold_299 ; pos 128619 to 129345 reverse strand)
agagagctgccagctcagctggccaggtctttacctctttctcgtacttgttttgttttgttttgttttaaattttttgctgctgcccaatcacgtggtttattgggcaactgccaagtccagattcctgcgaagcaaaacaacggttgttgattctaattaacgttgacaggatttaacataagcaagcttgaaccaaaagagaaaagcacataatttttatttatttattttcatttaagcaagttatgtaaacaaaggtgagtatccccacacattgaattactcgattggttgggttagtttgtctcacctacacaaaccacaatagactgggtgatgcaacccaacaaaaccttcagctttatgagcaaattctgtgttaaacccacatctaagtgtttctgcatttatcttctgaaatacacttcaacgcttaacctttccttgtactggggaaaaattaggaaccacaccatttacctgtgtagaatgctcatgtgtgctccaaaattattatcactttttgcttgcttccgactttgaggttgagaaggatttactcatttcctctaacactattattgcttcccatccatctgttcaccttgtacgagtgtgatcgacaaagtaaagccccttgtgtgtgtttcgacagtttgttttactgtcgtagcattttatgatttaagctactgcttcgtatcgggaaagtgcaacaattgct

SEQ ID NO: 114141 - DNA, 422 bp, Physcomitrella patens
  Intron number 1 from transcript Pp1s176_28V6.2 (locus Pp1s 176_28V6) derived from phytozome v7.0 (chr-ID scaffold_176 ; pos 94477 to 94898 reverse strand)
agttcacaggagtgcaatttacctcgattagtgcagtaatttctcctccttgatttgtggtttctatggaatgtctttttaatgagacattgtttctggctgcctgcttttctggcttctccgcgtttttacagtgctattgatggtcagtttcgtgtataatcttctcaaccagttccacttatgtccgggggctcagcacttcctgctctggagtctgtccatcgtggggattcacatcagaagcagaaccctgaacctgcaccgacatattgccaccactacataatgaagcgcacttctttttgatttaaactcttagaagttatggtgttgtgggattctttagattattttttattttattttattttaatttatttcttggcacaaatgaaattttatttcattgcagggagtaa

SEQ ID NO: 114142 - DNA, 703 bp, Physcomitrella patens
  Intron number 1 from transcript Pp1s310_30V6.1 (locus Pp1s 310_30V6) derived from phytozome v7.0 (chr-ID scaffold_310 ; pos 277890 to 278592 reverse strand)
ggcagcgagtgttgaacaccgggtctcctatcgtgagaacctttgttgagtggatgtggtggtggttaggatgtttattttgttttggtgaattttccgggtcgaaggctcttctgtgcctgtttgattgcatctggatttgtgtagccgtctgagtgtaatgtggccgttccgtgttttagtgatggacttttgtggaatggtgatcagatttggtacaattactaaacgcgaacattcttgtgtgaatctgcggtaattgagattacaggtcatgttcatgttatactatgcgaacgtgtatctttagtgttgttacatgatgacataatgctaattatcagctcgtttaattagaggatatgcatgtaactttccagataatcatatgttccacaattcgtttggtacacagtattagagttcttttttcctgagatgtgaaacctcttaagtactcagattggaaacagtgtatgttttgacattttcactctgagctggaaattctgattctgtcgaggaatcacacgcatccgagttagcgggaatagtaggtttttgaatccattatgtgctgcttagattcctgatgcacgagactctcagatcatgagtttttgaatcgggttgaatcgaacgggtaatttgatactccgattgtgcaggtccccgtggggcgtgcaactttgggtcgtattat

SEQ ID NO: 114143 - DNA, 923 bp, Physcomitrella patens
  Intron number 1 from transcript Pp1s136_27V6.2 (locus Pp1s 136_27V6) derived from phytozome v7.0 (chr-ID scaffold_136 ; pos 210365 to 211287)
gccaggttgcgccaggtacttaaatccttatcctacgctggttttcggttgcgttccgggttttctggggtccatgtttaaattcacattctgaaattcgagatgaaaatgaagctacagtgtggttcgagattaggttcgtagtgttgttccgaaggaacgatatattcattattatattttggcggcgtatgggctttgaagcactgcctttctatagtttcttgtaacgtagcaggggagagaggcaatcaaactttgaagattcggcgcttgttaatgtttgctgttcgcattctggagtgtctggctctttggtatggttctggcattaagcaggaatttggagcactcagcaaatggcctgcaggtgaagtagtgtagctggatttttgcgcatcattcgcaaattgttttgggcgtcatatacgttgtcacagagtatgtgggtgccagggtttcgtttacttcaattgtagagagctttgtatatttagctacagctctaaatgcatggtttcgttactcccatcatggatcatcgtgagagaaggcagacgttttgcgtggacgggttactgtgagacaaacgtcttcaaatttttagctcagcaaaggacattgtaagagctctgaacatgcaatacgcttcgctgagctaaaaatttctacgtttagggctctcacaatgtaactctagttggttatttgcacatgcacaaacacctctcaagtgattttgctgtctctgaagcctctgaagttcaaacatctttttattcaagtaactggagttagattctattaaagtattgcatgtgctgacggcgtcttctatgatgaatgctttggttttgaatacttccattaacaatcgaattttcgcagaatagcgtgagaagaaactattggggacgatcgtc

SEQ ID NO: 114144 - DNA, 587 bp, Physcomitrella patens
  Intron number 1 from transcript Pp1s290_16V6.1 (locus Pp1s 290_16V6) derived from phytozome v7.0 (chr-ID scaffold_290 ; pos 292459 to 293045 reverse strand)
cgacctctgcctttcaccgtgacatcattctacaggttcgatttggttcattaagctattgcagtaatgattatatcagtccagattgcagttgctgctattcaatggagtacgcatattaaaaccgtagttcagtaactgcacgtcgaatgtatgctcttcttgcattcagtccctgtgctgttcttcttcggtgtgtcttgctgtttggaatcccgttcctaggcatgcaaattttcagcgagccagttccctggcttgtttttcctagttcgtctctaaacttgtttcgagacaattaaacgtgtttcaaactcgttatgaattaaatgcggaacatggaggataaggaataaaacaaaaggattcgaaacacgtctcagagactagaattgttacattgtttcgtcctccagtttctcctctgggatgtcggacagcattagatgacattgctcaatgcagcacgcagctgttggatcaaactgcatatgttgcagatgtctttgtgttcactttctgttgctcacgttgcgtggttctattaacgttctgaatcaagacccgacttctgcacgcaggtgttg

SEQ ID NO: 114145 - DNA, 452 bp, Physcomitrella patens
  Intron number 1 from transcript Pp1s56_97V6.1 (locus Pp1s5 6_97V6) derived from phytozome v7.0 (chr-ID scaffold_56; p os 738917 to 739368)
ggaatcacacggtgcgatgcttattctcccttgtctatacctatttttgttttccacaccctgaaaacattcatttgcgtaacgagccaatcttctggaattggcgccttggcgtttctcaatttctttagggttttccgttaaactgtctttgctattcgaactatcactgttgatgtcggatttcggtgagattttaaatcactgacttattgcatttgaagaacaaactgaacaattaatttgacttgcggccttggttgccctcgatgatcaccgcacggaatctgttgacagagaacgaagcgttgaaccatcttcaagtaacaagtaccaagaaactagatattcactgcccatatctattggaaatttggatagattaatatcctgtagtctaatatcacaaacattcgcaaatcacagggaggagttgcagcagccagcctttc

SEQ ID NO: 114146 - DNA, 930 bp, Physcomitrella patens
  Intron number 1 from transcript Pp1s203_68V6.1 (locus Pp1s 203_68V6) derived from phytozome v7.0 (chr-ID scaffold_203 ; pos 603354 to 604283)
gcagtcctgtttcgcttgtactcgttcgcatccgagtaagtgattttgtcgtgcaagggacgttttcgtagcgttttggtgttaacggctgttgttgccctttaggctgtattatgcttacaatccaaaggaaaatttgagggattctgcgagcgtgagttagattcaggtgagatgggagtcgttgcgtgatagattaatgtgtggttttctagatcgcgtttctggcggtatgttgtgtgcttagtttggaagtataggcattgttgaggaaggtcaggcgtagaagacggtgagatgtgccggccttaatgtgtcggctgaatgttctcgacaggagtggtcgagagttcgtgtttgggacttgtggttgttctgtcaaggctttttgattggtgaggggcagcctttgcgtctcccacattgtttcagggtttttttcgaagtctgagcgtcgagtatatcagctagcacattggtcttgtagtatgggaatgagagttacattatcataggacgagtagtgtatggaagggtttgtttctgagccggggaccggtgaaacttacacataaatttcgtttaagtttgccagtgaagaaagagctgatgcccttggttttgtagtgttgcatatcgattaagagtgaagggcgcgtgattggttggataagcgatagtcagttgcctgcttgatttattaagtagtcccgtaacgtgaattgatacatcttaacgcattctagtcctgcccatgtcaaatcttggagtttcatttcgtgttgaattattcaagtattgttccttgggcttcccgtttcctatttcaaacatcacttttattgagttatttgaaacgtaccgatttgaagtcctgagataccattcctgcgcgctgtttcttacattgttgttgcttttacagggtag

SEQ ID NO: 114147 - DNA, 438 bp, Physcomitrella patens
  Intron number 1 from transcript Pp1s51_212V6.1 (locus Pp1s 51_212V6) derived from phytozome v7.0 (chr-ID scaffold_51; pos 1353785 to 1354222)
ttggctctgactttggaattcagtccctagagaaggtattgagcctgttcttctgatcatgtaacatgttctttactttgtatgattttgctcagtttgtttcgttgttgactgaaaattacagtaagatttgctgcttggggtcgaagtctgttgtttttggtttattatttttattttagggttcgagtctcattgtttttagagtgccgttggcaatttatataacgttcaatgatccgtttctctcttgtttttcaagtatactttttattgcagaggttcatactccatattgtggttcgtgtattctttgaaactagtggatacatctcatattttgatagtatgtgtaagaatttgagaaaccaataagaaattggagcgcttattaactgtaaaattcttattattacctctgcagatacggctggcgac

SEQ ID NO: 114148 - DNA, 801 bp, Physcomitrella patens
  Intron number 2 from transcript Pp1s269_36V6.1 (locus Pp1s 269_36V6) derived from phytozome v7.0 (chr-ID scaffold_269 ; pos 215514 to 216314 reverse strand)
ccgtcacccaattgggcggccccgatcgtaagctctctttcagcccagcaaacagttggattgattcggagcggaggtggagaggcaaataggtgtcgtggcaatgttagtagtatatgctaaaatattccattttcgctttactccagactggattcttactacacgtggtccttaagctctgcgcttcccgtaaccttcgtaatttctcttttttgcctcctggctgtgcatgtagtagaagcccaatccatgtgaatccttctgcacaatatgagtctcatctagtcggatgatgagctggcttcttatttcggctaatgcaatgtttaaaattttcaaccatagtgttgttttgtgactttttattatctttccgagtcgggtcctctccctgcttatctgggataaggggcgaagaatgctagttgttttgtagaagagccatgatcttctgggttttaatgagttttctttaccctcctactgaggtgtaggctcttcttgatcccggatgtattcgactatagtgtagtatgcatcccgtctgttgtgtggctatcacgtttgtttatcacttccttttgctttttatcatagcagtaatgcccaagtttttaaagaagtgtccgatttgtcagtgacttccattgctttgagataagatatcttctacttttttgtttttttgtcttttttaactacttgctctattgaaacattcagattttgctggatatctgatcatttcgtggtatggatcatctgtcaggggctactcctaaaggcgtcttaagagtc

SEQ ID NO: 114149 - DNA, 1007 bp, Physcomitrella patens
  Intron number 1 from transcript Pp1s223_76V6.1 (locus Pp1s 223_76V6) derived from phytozome v7.0 (chr-ID scaffold_223 ; pos 463798 to 464804 reverse strand)
tttaccttcaatttgcggtcatgtaagtgcctctcttttgattcgtcgtgtgattgagctgttagacgagttgctttcaggtgggtgtcgcattagaaagctgtatttctgagagtgtgttgtgaggggcttgtcagcctggtgtactcatcattgaatcgaataaatggcattcgttttgcgtgttttggttgagagatccctggacaataaacttgggtgccgtttgacagtcgccaaagtcgggtctagggtattacatttgtttccggaatagaagcgatggtatgttgtagaattttggtcttgtcgttgcagtacaggaagcagttgcgaagataattgcaaaccgtcgttcagctgaactggcctgttcttttatttcatgaggtataggattgtgtgagctcaatggcctaggatggtgtgatgtttgttcgtttgtggcatgaagatgaaagattcatactcgccgttgaatagtcaggaattcggaaagcagttgtgaacgtggtttacgttggcaggcttagtgtggccttgatatgagttatcagagctgctttcgcaaggtcgctaatatttgtcactgatcttgaaagcttgtttctatgatcttcttggttcagcgttggttttttggtagggttaggttgaggtgatgctcgtcaaggtagatgggtatctgatttcattgtgatcctcacgtacctagctttcagttccgtttctgaatgaataggtgctggcttttaggatatacgcactatattggaagagttgaatctaaaagaatgaggagcatactgaatttgaatgaaagtgattatttatttgcttctgttctttagaggaggtgaattgggattgtttttgtgcgaaaacctttatttttctttttctttttattttgattggttgggtgcttaatctaattttctgaccatgtgaagattacgctttcttgtgcagtgccgcaattgtgggcctctgtctgtcgatcgtac

SEQ ID NO: 114150 - DNA, 795 bp, Physcomitrella patens
  Intron number 1 from transcript Pp1s106_190V6.1 (locus Pp1 s106_190V6) derived from phytozome v7.0 (chr-ID scaffold_1 06; pos 1095085 to 1095879 reverse strand)
ccggtacggttcatcgcaggattgaggaaatgtagtgttgaacttggagaagagtttctaacaaatctcagtcgagtgcgcaacttatttttccttttttaaatcttgtgttttattgttttgttttcctcgaatgtgatgcgtgacgtgatttatatgatgggttaaaatggtgggtttgaagcggtttggggaagagagatttgaagtcgcgctgtagtgaaggtgcattttgtagcctacgaggattgatggttgagatggttctgcgagattgctcagatgtttcgatttcagtgaatttgaatttagcttcggagtgagtccaattgagtttttgagcggatattggttgttaccaacaattgctgcgtggatcttcttctcatcttcgggaagttttttgacacaaatagcagtttaatcaggatatctcgtagtttccggcctgtgaaccacatgtttcatttttggagtagggttagggttttggatatattatttgtcctccatgtcaatgtatattcctgcatttgttgactgatttccaggagtatgcgtaaaattgacgaggctggatgtatttaagctttgcaagaaagccaagtttcgttgtgaaaatgatacattaccacatgtaatgatgttatcacatgagtaatatgtttcaagtccaccagcaacctaactcatggcgaattgttaattggactatgtgatgtattttgctgattagatttgtttggttgatcgtacgcagatagagctattccactgacactcagattgacaagt

SEQ ID NO: 114151 - DNA, 579 bp, Physcomitrella patens
  Intron number 2 from transcript Pp1s130_48V6.1 (locus Pp1s 130_48V6) derived from phytozome v7.0 (chr-ID scaffold_130 ; pos 263163 to 263741)
ggccgaggtgggctcatcacccctcttgcgaaagtccaagtagcccacttgtctcatgttcaaagctttcacttgttgagcctttctctgcttttctttccttacactcatacatgtattgtattatattatttatatgtatatatacatacacatacaatagctcctggtctttcttatcagtagctggactttggaccttaacttggagcggttgtcgcactggcggccacttgatgatagcctccaaaagaagaaaataaaagcccgtttttggtgtttccagcatgtgctaggctttgacctgatcataacccaattgctcacaatgtacaaatatacatgtatacatatcaaataatacttgtttggttgccattgttgagtctgaatgcattgatggcgaatagtagcttttgttcattttttctgttttttactttgtttttagatgtgtgtgtgagtatagatatatatatatatatatatattcataagagtgtgcttgtggaaatttgcgacatctcggtcagtcagaaaagagaagtgactttctttgtgcacatttgcaggcagtag

SEQ ID NO: 114152 - DNA, 578 bp, Physcomitrella patens
  Intron number 1 from transcript Pp1s79_2V6.3 (locus Pp1s79 _2V6) derived from phytozome v7.0 (chr-ID scaffold_79; pos 12217 to 12794 reverse strand)
tgaacgagtatcggttcattttcttacggaattaggtgagttgcggggttttgtgttcggtggtgggatttgtcgaaaccagctgtaaagcgaagctttgttcctaatttgtcttatttttttgtatttgtatttttttattgatagatcattgctagagagtttcacgcagttttggtttgtggtctttcttgaaaacgattggtttgacttttgttttgagtcggtgcgtgtttttgtttatcaatgtagtttgtggtaatcatagggtcttggttcataagttgctttagaaagttgattctgatatcggatgacttgccttctgtggtctatgttattacgactgcggtacattggtctattgccttcaccaattgtgacttggttcaagtcccgtcagctttctgaaaaatttctagtagcgcaccctagtatttgctcctagtgaagaaagaaccgaataacttctctcacacatgtagttgcctgtggttcactgtacgcgtttcacggttttcattctaacctctttcgacgcagatatccactatcacagattttccgactctgagaaa

SEQ ID NO: 114153 - DNA, 981 bp, Physcomitrella patens
  Intron number 1 from transcript Pp1s166_94V6.1 (locus Pp1s 166_94V6) derived from phytozome v7.0 (chr-ID scaffold_166 ; pos 657273 to 658253 reverse strand)
gcgagaataagccggaccaagtgcaggagcatctggtaaatttgatctcttacctcaaggctgtgtctcggtttcgagtgagatggtcagatttagggctgtggctgagattctggcctgcacttactttattacaatgaccgtggagtcggtatggggttttgaaatgatggatctgaagatcaggttgatgaggagcaaaattagagacggacagcatcaaattcaaggtggaaactattcttgtgtctctgtgttgtttgctctacggcttttgacaatgggtttcacggtcattattcagcaacatgatcgccgttttgttccagctcgaattgaagtgttcttgtacttctgtccgcttaaggagagaaatgggctgcagttattaatttcgtcgttcgaaatttgtgtctcatttcttttgcttggaacatcttggtctcacatagctgtgtctcttcaggttctcgtggaaattagagtttcgtgatccgatctactgtagtcagaccctcgtgtacgtgtggtgccaggatagttgtccttgaatgtgttataatcatgttaagtgactgtttttttttttttttttttttttttttttgttgagacatccctatatgtatttttctttgtgagagttttcattgcatgatttttgtcaatttcagtctccagggtttgttttattgatgcaaaatagaatgttttacaatctagccgttagcaaaaaaattccctttttgttcatgagagagtttcatcaatcttttacttctgcgaatccttttaagagtgcttagtcaataatatactaatgtatgaatcagtaggagaagttatacttactattttctgcctgctggccagtattttggtgttcgtgttgcctttcaaatcaacaaagttcgggcgactaaagtatcgtgatttgtggttgcaggaagggacagaagaagctgacgaacaggaagagaa

SEQ ID NO: 114154 - DNA, 898 bp, Physcomitrella patens
  Intron number 1 from transcript Pp1s44_320V6.1 (locus Pp1s 44_320V6) derived from phytozome v7.0 (chr-ID scaffold_44; pos 2014309 to 2015206 reverse strand)
tagctcgctcagccgatcgtggcacttttctcgtggtgggttctcttcgtgtgaagcttttttgtcttctgtgtgcgcctttcagctgtgtgctgttgcttcgaagagttttcgctttgggttgtcgaatttagggcacattggcagtcgatttgtggcctatgctttgatgtgttcgttggtgatttggttctgacacaagtgtaggacgcattaagggtttgcggagtcttcgatgctgagcttcgggttatattctgtttttgaattgattgggatctatgcagttgtgatcttgtgaattcataaaggtttcccctagttgaatcaatatgttctaggaaattgtgcatatgttgttcagtggtattttttgcttctggtggaagcatgtcttgattaaacgcaaaaccaacatttcacgttagaaacctattgttttgtttagaactcgtgaaattgattgtcttcgaaacctaacgaaaatttacataattagggtaataatcattctgtaaacaaagggaccctataaaattagctgcataatagatttgtgccgcatacttttagagcagggagagtactgaaataggatgccggagtacacgcaggctagcccatatcctgtccgttactctagagcgggacaaacgtcggcgctgattggaaacttgggatttttcattcagcctgtttatcacgctgtacagttgatttctacagataaactggtccacgcggtgaatatatcaaagtgcctctcatatcttatgtcaatatatcaaagttgcgctttgctatccttgataagtctaggagtgcctaattgtcatgattatattgctactaatgtatcaagccatatgttgttgccatgtctcaggatttgcctcag

SEQ ID NO: 114155 - DNA, 761 bp, Physcomitrella patens
  Intron number 1 from transcript Pp1s32_24V6.1 (locus Pp1s3 2_24V6) derived from phytozome v7.0 (chr-ID scaffold_32; p os 167184 to 167944 reverse strand)
cgactgcagttccgctaagcgaggcggtgatctgggtacttgtcttcgttccacgctcatctgtgcccgtgcttgcgtcaccctctaacttttttctttctgtccgtggttgcatccctcgagttagtcgataacaattgggaaattgcttccactcccggtttctgaattagggtttggcagcagaggtgtcgtaaatgaacaacatatccatcacccatgcatgccttgttgggatacatgtatttgtcagaggtttgcagtgattgtaatgtctattttgccagtctaacttgtctcaatggcaccagtgagttctgcatttatcaagggatgggacttgttagcgattcaacttttcagagtgatttttctgcagatttttctctttcattgtccttgcttgtttatccctcaggatttaattttatcgcaatcgctccagatttttgttttatttatttattttgtttgtttctgtattgcgctcatgtatcaactggggtccggaattcttcttcatattactttgattttcacagatatttcaagtcctcgcttttgtgcagtctcttccgtgactggccttgtatcccctatccaccagtggaatgttcaagtcgcttttctgtgtagtgtcgctcaaagcttcatttccacatctcttgccgtaattgcgagtaaataatgtgattgtttcacgtagatctaagtgctctgcacacactttcttaacttcgccttgatgtgagtgatgcagg

SEQ ID NO: 114156 - DNA, 866 bp, Physcomitrella patens
  Intron number 1 from transcript Pp1s302_69V6.1 (locus Pp1s 302_69V6) derived from phytozome v7.0 (chr-ID scaffold_302 ; pos 517353 to 518218 reverse strand)
gtttttcgagcctctccattcattcttcgagaacggtgaatccacaataatccctcccctcatctttgcgaagttcgaatcttgtagtaaagtcaatgactcgtttttttcttttttctttctttctttctcgacagttagaccttcacgacgagtatttattgtgaattagagcttgttcaactagtgcgaagatgaaaacgtatgtgaactacctggataaattcttataggtcgcattacatggctagtggcttctgctgcttcattacggctttttgtatttcaccggtatttgtttctcttatcatcacaattgtgatttcggtcatgcggcatggcactgttcgtattcgttcattcgaaactgtgcttagtctgcatcttgacggagcatattatcgctaatctattcgcatattcgggatgttctcatttgctgattagcccacacgagacttgctcgattgtagaattccaggtcatctacgtttgtctgattaagttgcgctatcatactaagtggaatatgtccaacagacgaaggatatatcgtgtgacaattatgtttgattgtggatattttctggtatgaaaagtgtcttctatctatgacgttcttcatcaatctgggaattactacgttagttgaacttttagaagtctttgcttcgtgaaaaggcctgtggttgttaatcatgcttgatgcgccgtcgaagctgtcgacctttgccgcagcttcggcgtggatgtgaggtctatgttaacggggtgtaatcgctttagtagtcagactgtttcccgagcaagcattttcttactgagtatttcatctctgttcaatggtgtttagggcgtgagtgaaa

SEQ ID NO: 114157 - DNA, 525 bp, Physcomitrella patens
  Intron number 1 from transcript Pp1s302_41V6.1 (locus Pp1s 302_41V6) derived from phytozome v7.0 (chr-ID scaffold_302 ; pos 298467 to 298991)
gaggtgcaggcgagcagtcctctcactcttctgcggtaagattttgctggtgaagacgattagtttttgggatcgcaatcagaattgggtcaaattgtttatatccttttatggactttacgttaagacagcgccaaacaatacctgatcatgtcaaacccagtttgtccctcattattcaagttgcttatgactttcctcatgaaagaacagggtagtgggtaagtgttctcttaaaatggctgaagtatacctgcactgtgaaaaatttagcatttgaatttaagaaactcagaattttaataaccttgagtttctattgataataattgtctgacacgaagagtgaagtgttggtacatgtgtccatgaactatctgtctcccgctgatatactttaatgatagacacggaatctcttccttctgaaatcgcaacatatatgggatagcttggaaattgttcatttttgtctggacgtttgctttatcacatgctgtacacaatgaactgtaggttgattgt

SEQ ID NO: 114158 - DNA, 781 bp, Physcomitrella patens
  Intron number 1 from transcript Pp1s12_55V6.1 (locus Pp1s1 2_55V6) derived from phytozome v7.0 (chr-ID scaffold_12; p os 331954 to 332734)
atttgggtgagttgagattgcctggtcactgttcatcgtgtttttggtccacgatgcgaatgccgttgagaaataccggcccgtgtggtgacgcagtcacggccgtgtgcttgtggttgactagtgaagtagagtcattctgagtttgggatagtgtggccttttgatggaaatggattgagcaatgaatgggttaatctggctggggtgtgaaatcgtctttcgttttgtctgtttgtttcttctctttcatcatgtgtagatatatttgaatcgctgcagtcgctgttcatttgggagatatagaaatatgacggtggcaatcatgttggtctctcagaaccggtcatgtcctgtctcagtagatgatgtatgatgaaagttggtaatcaccattatttggtgtccaaacagagacgactagttcaaaggatgtggcttgcgtaaggttcagagtgcacacatgaatcttgcagttccgtttttttgaattagggtttatcatcttactttgatttcttcgcgacaaggcaactataattgtatcttataatttgctgttgaaatttgtaaccctcgggaactcatcttcaatactcatctccttaccgctgtaacgagtcactactatagttgtcctctagtggtagtacaatcgtattcttccctgcatcatgtcttgtggctcttctcttgcaattagtcgacaataatggctgaaagaatcattgcagcagtctgaatctaatttttcctttctttgtttgtggcgtagcaaatc

SEQ ID NO: 114159 - DNA, 578 bp, Physcomitrella patens
  Intron number 2 from transcript Pp1s477_5V6.1 (locus Pp1s4 77_5V6) derived from phytozome v7.0 (chr-ID scaffold_477; pos 45918 to 46495)
actaccttctggtgagctgatttcctcttgcatttcttggcaggctcactatttttcttcaaccatgtttagcaaggttcacgtggtcatactgcactagtccacgtatatctttgcatgcttattaattattttattcgtgtaataaacgaatgttgctgagattctaacctgctttttcgatatctggaattgtacattttttggcctcaatacgatctagacttagctctaactcagattaaattctgtttgctcatctgtttgagtgtttgttcgtttgcttttaagtcttacaaaaattcaatcctctttatgatttccttgtaatttttattccgaaatgaaaaattgccccaatcgtctcattttttaatgtctcacggtcacgtgccgtagatcagcatgctagtaaatgattgtgaatggtgccgtagaaatcatggagtctggccactccaaattccgaatggtagagctgcagacaatgatgagtattactattgttgaggttatccatttaaattttgtattccttaacaggtgcttgcgaagaagtttggagcagctgtggtaag

SEQ ID NO: 114160 - DNA, 944 bp, Physcomitrella patens
  Intron number 1 from transcript Pp1s2_298V6.1 (locus Pp1s2 _298V6) derived from phytozome v7.0 (chr-ID scaffold_2; po s 1447869 to 1448812 reverse strand)
tcctgctcccctcgcagctccgtttccacaccgtgcgttcgtttcccatcccatcctgtcttccgctattgcaatttccccctccgactccatcgcttcatctggagaacacttattcccagttttttattttagggtttcagtgtgttcgggtcgggttcgtgaggtgcatgcgtagtctgtgtgagtttttcggaatatgttgttgtatttttttccttctttgtgttttctgtccaaattcgtgtaatcattttgtgtgtctgtatggtggttgaatcaatggatgtggattggtttgtcaccttctacgtcagtctgagttggacttaatgactggattggagcatggttgcgcttggcatgtaatgcgccgcctcggtcagttgttgtggttgtgtcaattgtagaagttttgaaatctggcagagtgaagcttgtttcgtctgcataatgtaacgcatatttccgatgtgtgtgagtcaacatgttgaacttattttaggtctcctccccagcacggtttagaagttcaagctttggtgattacactatgttgctgttcctcgttgttgcttcagtatgtggttctagaaatttgttcagagaggtgtagtttctgtgttggctggcttggtaatcctgttggagcggggtctttgccggtgcctttcggtgggatagttttgcgttcattttatgaggcgaggattattgtttgtgactcttattggactttgactgcgatcacgcaactaaacccagctttatcttgcgtccttgctgatggtttagtcctagtctttggtgcgttggacaccgaacagaagtgatgttaggctttttggtcaaatttgtgactcttctaatgtgagaatttgagctgacgtttgtttgagtgtggcgcagggtcgtgtgagaaccaaaaccgtgaagaaggcctc

SEQ ID NO: 114161 - DNA, 1038 bp, Physcomitrella patens
  Intron number 1 from transcript Pp1s164_92V6.1 (locus Pp1s 164_92V6) derived from phytozome v7.0 (chr-ID scaffold_164 ; pos 613002 to 614039 reverse strand)
aacttagcggctgcatcgccgtgtcaaaccgcgttgtcagttcgtcactcccatctccgttattcactctctgcagggtctgttttgtcggaagttttcctgtgttcttccttcgaagctatcagattttttttccaggcatcgcgttggtttgaaaagctcgtaatttacccacatcctttcctccctcacattctgggttgtaaaccaagtctcgtgcagatgacgtgatcttctctagtctttttacttggtttgttcatgctgtggttactcgttgcgactaggtcgttcttgtcgtcgtactttggaagaaacgtgggcgtggcagtcagacagggtgcgcgacttgctcgttttgggtctgactgggtcgtatagcgtcgagtatataagtctgcggcggccactccatttcccctcgcttttcatggttgctcctgtttaacggtttaagaagaacttggatcttgcttgttttagtgggtatttttctgggactgaagagaacgagagagaaattctaatctgcatcgagctcaataaggtcggtgggtcgagcttgcttcgataggattcacaatgtccctgttttgcgcaccgatgtttcatcggcttccgcgtcgcacgcctgtggaattttatatcttgttagactgttgttcttgcccggattaatcattgtgctaagttttcgacatttggatttgctgatggacaaacctcgcactcacgcttgttggttgaaggaatagccacgtttgacttgagctacccattgctgtgagcctccagttaatcgttcctaggtttttgggtgattcaatattcagttctacaacaatatttcagtatatatgtacctacggaatgtctttcaatgggacggctttcagtgtaggtagaacttgtgatagggaagacgagtttttccttacaggttgtctgtgtgtgtcttcaatagctctacttgagatactgaaggatccactctctcgtgcagggcgcagtttgaaagaacgcaataagagaataagt

SEQ ID NO: 114162 - DNA, 787 bp, Physcomitrella patens
  Intron number 1 from transcript Pp1s89_282V6.1 (locus Pp1s 89_282V6) derived from phytozome v7.0 (chr-ID scaffold_89; pos 1410484 to 1411270 reverse strand)
cgtggaacctgcagctctgttgcaatctgccccaggtgagtggtttaaagatttctgacccatctagccaacagtggaatcacgcactctctctctctctctctctgctactatctctttgtgtgtgccaccggcttggctctgataaagaagcgtacgtgttgctcatggagttcgttcccttgttcagagggtttgaagtgttcgggcaagtgggtttttgctcagctggtctgcacagatagtaccgttagtaattaactcgtggtggattcagtaactatatgacagataacacacatcgtgtgtgcgcgacaatgccacgcagacaaccagttatcaagtcttaaaagagtgcgcaatccaaaatccttcaggatgtaagttgtgacttacaaatacgttgttaagtaagtggagtaagatctgggtccgaaaggaatattccaaccgccgctagcagagcctcgactttcttcaaaagagagaagctcttattcgcaagctataggacgcatttccctgggtctgacacaggcacataaaagcaaagaaaacttcgttccgcacagacaaccttctgtcaatcagaacgttttgccctagccttgtctaccttttaatactaactccacggttcaaaccccctgagacccacgaggttaggcaggatattttaaaattcggattgacttgctattatttgtttatttatttcttggcacagtaggggataatgaatttggagttaaatttctgagaccactactgtttatcagggtgctcg

SEQ ID NO: 114163 - DNA, 449 bp, Physcomitrella patens
  Intron number 1 from transcript Pp1s156_94V6.1 (locus Pp1s 156_94V6) derived from phytozome v7.0 (chr-ID scaffold_156 ; pos 597847 to 598295)
ctcatcaggtgatttgttttgaatttatgtttatatttacttttcattactaaatgaattcaaaatttatttcactttccaggatactgttatttcgaaacatgcaaattgataccatatgatctcacagactatttgaaacatatataagatgatacactggagttacttttgatgtttatctagaatatgaatactatttataagatgtttgcacacatatactgattcttttcatgtattcaatgtttgctatcatttcatcctatttgtactacaggtctatttttattacaattcactctatatgtacattactgtcacaactatgttaaaatttcatggttaaggcactaagttcttttttccacttcgaatatgaattaaatacttacgtccggttcacattgcacaaatcaacaggtgacccttgcctgttcagcattgag

SEQ ID NO: 114164 - DNA, 444 bp, Physcomitrella patens
  Intron number 1 from transcript Pp1s79_74V6.1 (locus Pp1s7 9_74V6) derived from phytozome v7.0 (chr-ID scaffold_79; p os 453474 to 453917 reverse strand)
gaaggtattgctctttcctctgtctcacttttcagtttggttcccataatttgtctgcttgcattgatttgatttttgggttttaggggcattgaaaatttatcgaagacattggttcgttttttttttttttatcgaagggtactttttacttggattttggagaaagtgtgtacctttgtcccattatgtaaaacatcgtagctactatgtgttgctgtgggatgcagctgttgtaatcaaatccaaaaaccctaattatttttctgtcggtagtaaccgaagttgtacatgttctgtgatatttttttgcatatcattataatgttttgtagtgattttgcagtaatgagaatgttgatttttgtattaatgttttacagatggtagggtttctaatgtagattgagggatggaagacttatagttgggtttttgctgcag

SEQ ID NO: 114165 - DNA, 751 bp, Physcomitrella patens
  Intron number 1 from transcript Pp1s106_67V6.1 (locus Pp1s 106_67V6) derived from phytozome v7.0 (chr-ID scaffold_106 ; pos 386814 to 387564)
aattgtgtgcgaattccaggaaacggttaccggaggtacttgaatgttctactttctgggttcagacgatctggacgattgtgagttcagaagattagtgctgttgatcatttcctcgatcccgtttgagagttttaagtccattttgagaataaattcgattattctctaggtatattttctttagagtcgatgaaattttgaggtaattggtcagcttctcgtatttgtattcgcatatgtgtggaagaggagtgacgcgaatgatcagtacaaattgttaacggatatgtgatgtgtgacattcatcaaaatgatatgtcggactttgaactcattttagctgtcagagcttggtcaaggtcaattgctgtgtgcatcaggtcagtaagctcttgcatcgaacgccctattcagatattcatgaagtccttccgctacacactcgttctacaccagatcgtaggtttatttccttaatcatttaaatacgaatcaaatgtatttcaaaagcagtgagaactggtaagcgttgctgctgaaatcagatggcgctaagtaagtgcgcatgatttgtacggttggttttcatgtacatgttgcagcttgttatgttcagattgtttccccacgcatgaagacatcagattattctatgtcgcttgcatccaagcacttatttaataagaacttattttttacacatggtttggcagtggctggagttgtaaacgaatctacttggaaagaa

SEQ ID NO: 114166 - DNA, 462 bp, Physcomitrella patens
  Intron number 1 from transcript Pp1s217_91V6.2 (locus Pp1s 217_91V6) derived from phytozome v7.0 (chr-ID scaffold_217 ; pos 572492 to 572953 reverse strand)
tttttaacgcacgcgtccattgacatcgatatctggtattcatcacctgctaattcttctacgtgctgataagttagcattggaagttgggtttgtcgtcatttttgcaaattgtttcctggtacccaatcatctgcgggtcgtcgaactgagtgattttgcgtttctgaaatcgtgtccgttatcgaaggattgtagctgtgtctttgcagtttgaagttcgtggagatgttgtgatattcaggagcttgtgtgatttgattagatttttaggggatgtctggacttctttcttttttttctttttttttaaaattttctttttagtttttaatttttggtgatcatcggtggatttttgagggtttcggcaatggatgggttttgttattgacttttttgtccaacgattggtttaggtgatgtgatgccttgtggcaatgtgagtaaaggtgcaggaaa

SEQ ID NO: 114167 - DNA, 507 bp, Physcomitrella patens
  Intron number 2 from transcript Pp1s116_54V6.1 (locus Pp1s 116_54V6) derived from phytozome v7.0 (chr-ID scaffold_116 ; pos 336614 to 337120)
ccaaaaaggtgaattagttgctccagaaatttgattgtttcccccttttttttctctttctttgaaaaaaaataaattacgctgcggtcaattttgaacgaatccccactttcgatagtgttttttgaggacaatcctctgcatgttcatgtcgagcacccaagtcgatgaatgattcttcaggagcctatgtttgttccactttcgtagcgggtccatgttaaaccctagtgagggtttaagcccctttcttgtatgtcacagagattaaacccttggtagggtttaaggctactggaatcgcaggggtggctttgtataactccttttaggattgtgactagatatcactttgccctcgagtatcatgctcattgtacacggaaaataattagtgacaaaaaatttcgccaggattgggagatgtctattatctctccagtctgtgcttgatgatcacgtgcattatcaaagctgatgctatgttctttgcaggtttttgagttg

SEQ ID NO: 114168 - DNA, 298 bp, Physcomitrella patens
  Intron number 2 from transcript Pp1s159_68V6.1 (locus Pp1s 159_68V6) derived from phytozome v7.0 (chr-ID scaffold_159 ; pos 380412 to 380709 reverse strand)
ccggtgaattcagcgccattgtcgcagttggctaagtaagattattcgatcggcttttaaagttttcctactgcgatcattcttacaaatgattttgcgctcattaatttcgtttgttatcttgctgaattgcggcaactaactcttccagtgactctagaaatgtgtatatatatatatatatatatgtatacatatatatccttgtgtttgttgaaaaatcgtcaacttctagttttctttttttgatactgttctaatgatctgtagctccgtactctcgttggtttatttgcag

SEQ ID NO: 114169 - DNA, 466 bp, Physcomitrella patens
  Intron number 1 from transcript Pp1s89_117V6.1 (locus Pp1s 89_117V6) derived from phytozome v7.0 (chr-ID scaffold_89; pos 656237 to 656702)
ccggtatgtgcataacgctatattagataatcttctcatgacagatgaatagccgaaactgcgagttttgaattgagaattgaaggagtgtggtaataactctctgtttcttaggagcatgttatcctggttatatactggaaaatctcgattaatgaaggttttggtttttgatttcagctgatagaaacctaagaacaaattcgcctggaccaattctggtggataactctttgaagtgaacattgacagcggccttttcctcgccgaaacttcctgaaatttactcctttgttcttcctattgtcatgagcattttggcatatgaagaactatcagaatcttccgaaatggggccattcgtcatgaagttcctgtgccatgtatagttgatttttcgctgactttgtggtattacgttactactgcaggtgcaaaagagggagtaagtaacctggtggttcag

SEQ ID NO: 114170 - DNA, 697 bp, Physcomitrella patens
  Intron number 3 from transcript Pp1s89_117V6.1 (locus Pp1s 89_117V6) derived from phytozome v7.0 (chr-ID scaffold_89; pos 657111 to 657807)
tagaaacggctcctcgctgtgtgcagttgaagccggtaaaaacttcctcacttgtactaatttttcgacatggttctatggtctatcctcagcagataaatcatataaccgtggggatttcaattaccaactagatagttgttcttacaatgcatgccttctcctgggtctatctttttcagaaaggtagagccgttgtaagaatgttttgatcttatttctccttcctttggaactctcatccataacttttagcccacggtccgattatgagtctaccctctattacttggatacaaagcgctttaataccctcaaaattgcttgtggacgttgctttgaggagcgcattctagtagtgttgtattgcagagcggtccttgctgatgctgtactatctgacttcgaatgtgcagtacagagccagtaatcgcggatttcatgtgtagcatcaacagtttcctgcaacctagacacttgagaggacgaatcatttcggtgaggggactgagatcgtcccgcatttgatcaaccattacgcgtcttcttgcttactagttcgacaagttggtttctgtcactcacatagctattgggacttttgattgtagtttattcttctgatttttactgactgaagacagcgttaactttgtagttaggtgaattacaaaggaatcttcacgctggactccga

SEQ ID NO: 114171 - DNA, 1008 bp, Physcomitrella patens
  Intron number 1 from transcript Pp1s162_165V6.1 (locus Pp1 s162_165V6) derived from phytozome v7.0 (chr-ID scaffold_1 62; pos 964755 to 965762 reverse strand)
gtacaaagcacgtggagcccagtacggaggtactctacgctctctgtactccttcggtagtggatattcgtataggacgaagttggattttaaatggatgttacatggacaacaaaaaaacactggtacgtagaggttgtgccatcccagaccagtccttacagcgtaagggagtgggttgaggtcgaaagtgaccacagtgaactgcagcattgcggtggtcaggatcccatcctcacaactcggatagtgtaccctcatatcacatcatctcacaaaggacccagttttcgagtgggtcctgttaatcatacacgccgttggctaaatcctgaggagagatgaggaacgttgaaacggtaggtgtttcgtgaggagcatttttgcgctcgagtcaattactggtcggtggtgatgggatgtgagtgcacatttatgaggcgttattgcctttgtaactgctacttctacacctgttactgactcttctacaactcaggcattctttagcataacttgttgagggaccgagtgccttgatgctgtttctgtctcaatatgctcgatacttttatgcagtcacccaatgtacattgttcctcgccctcgggttgtaggaaagttgcttgctcgcacgttcttgtgtacttatgagaatattatgttatacaaagattgtctcgatattgtctctgccatccacgcaatctcagttgttttgcacgagtctaactgaatatacttttagctacgttttgttcatagattcactacactgaaagtgatcaaataatgacgtacgaaaggagttttagcttaaatttctactcgaagtttttatctgaactcatttggttttgttctgtacgtaagtgaagttcgtgtgcttcggatctttgttgtgctgcagcactagtggtcgttagctttgagtaattcaaccatgacttcaggtttcatcgattgagtatagaaaggagaatctgttgggcacatttacatcgtaca

SEQ ID NO: 114172 - DNA, 1057 bp, Physcomitrella patens
  Intron number 1 from transcript Pp1s250_10V6.2 (locus Pp1s 250_10V6) derived from phytozome v7.0 (chr-ID scaffold_250 ; pos 109875 to 110931)
cttcttcactcacctcctgctacctgctgtgctcggtacgttgctctccctctcttcttcatgctcctcccttcttcctccctcgccctcgtcctcgctctggtcgtctgttttttttttcctgcccttcgcgctctctttcgacacccttgtcactcgctgacacgtccaggtgtagttgctggatgcctccgtctgtgtttgaactcacgccgccttagggccggtgttggtgtcgcgtccccccccctttaatcttcgctgcatcttgtgttgtgcatcttgtgttgtgttttctcggattcttacctaggattctctttttccgggtcatcgtgacttgatgtctggctcttttcttctgggaacttagtatagtgcgtttcgctgtgtggagaaggggataggttctggtcgactacgggaaggtagtgtttgtttttgcatatatgtcgaaggttggttcgtgaagtgtatatatagcgcagtattcttctgacctcacaggttttgttcgtgccgtgattctgatggcatgttaggtcccacgtaggttttgtagaatgtcctacttgaaggtgcgatgatgaagtcacgccctcttctgtgagtatgttttgatgagcattgcagtcaatgcaccttctcacagtgcctgctatattatctaactggtatctacttgatgaggtggatctctcaatctgaaccaggggaaaacattatattcgccgtccgtgatcttactttttgagtgactcatcttatgctaggtttctgtcaaaatgaagaattaaagatctgttagatcctcaaaagcctaggtttgttaacatcgttgttgatcatccagcttcggacggatcagttagcattgaaaaacgtttatttcatagccgcatactttataagtctactagaagtttcgcttttattgtttgtaatttgtttcaagtgacgagaattttatttccgtggattctcatacctgacattacacatgattttttattttcgtgcagtgacagatcgaattctcttgcatacttcctcagcg

SEQ ID NO: 114173 - DNA, 615 bp, Physcomitrella patens
  Intron number 1 from transcript Pp1s156_108V6.4 (locus Pp1 s156_108V6) derived from phytozome v7.0 (chr-ID scaffold_1 56; pos 645490 to 646104)
gttttttcttcagttaggaagcttccatcgtcgtggtgagtgctgaactggtccggtggttgcgcgtgggtggttacgcgttcgctggtcggtggattgttttgtgcttgatggcctgggagggggcaggtgtgattgcgcgatgcagtggagagagagagagagagagagagagagagatatgctgttgataactcgggttgtgtgtgtgttttttttctgtgctctgattgacgatgtgtgcggggtttttagcttgtccactgtcggctgaagtgttatttagtcgtgggtttgtagcgagctgcaacttctagtccgaatcttggtcctgagtgggttgtagtggttttaactgcgttccaggtaatgatttggattcgtctttgaggagtgttagtgctcgcgtttgcaaactggcatctggagtccttttgcgttaaagagtttgaagttggtaaatttggaaacgagcaagccaacaccgacgcatcacacctaactctaggccttggattagggcatactgtgattgagcgtggtcttcaaacattgacgcatgtatgctgtgtatttccagggtgcgaagctagaattggagttcatctaaaagtt

SEQ ID NO: 114174 - DNA, 649 bp, Physcomitrella patens
  Intron number 1 from transcript Pp1s15_488V6.2 (locus Pp1s 15_488V6) derived from phytozome v7.0 (chr-ID scaffold_15; pos 2889159 to 2889807 reverse strand)
gaccttcctcttcaagtgagattctttgatgcacctctcatgtgtcccactttggttctgcctgcacctctttcctaaacatccaattttcgtattggcatcgagataggcattcagattgtcgaactttcagacttcgaaccagtgattcttgccgctttttgttcaaattattttaattctccaatctaataggaagaaaattgaatttgcggtgaagatccacagtgaatccgcagtgaaagccattcaatctacgacactcctaatcttgtagtggatcgtcattcaataatccttcttaggtttgcatcgttctttgatgccggagcggttgacttgtgaaggattattaatgcttggaatggactggtggaaatagtacttacatctggttgaatatcacagcataatctataacttctatgtgtaggttttaaagaagaaagtacagttaatgtgagtttttgattgtctcgttcatttgctaatacctaccagaatttgttgtttgtgctgaaacttttaaggcatagaaaatcgaacattacaagttcttaggtagggcggcagggttgcaaatttcttttgcactcactcgattgtgcaagttttggcagattttgtggggcggaggcccccttccact

SEQ ID NO: 114175 - DNA, 760 bp, Physcomitrella patens
  Intron number 1 from transcript Pp1s9_453V6.1 (locus Pp1s9 _453V6) derived from phytozome v7.0 (chr-ID scaffold_9; po s 2969198 to 2969957 reverse strand)
gctttctgcaaggtgcgaatttctccctcacttcacattctttgcagatggctacctttttctcctgccacatcatcacacctccatttttataccctttgagtttagaattgttgcgtgggcaatttgttggattcacgaggaagagataacagttggatgccgccccggaatgtagcttggttcccataagttattatgagcagtagatatgtcaccagtgagaaacctaaacttcagagcgaaagaaggttttccgtgattgaatttgatctaattttctgtctcatggatcgttcgcgttcgtcagctctctattcccagccgccatagctcgagcctttttattattattattactaatatttttattttcttatcaatttctttttctattttaggggcattctctgctcaactcatagtaattttggatctcgagacatctccttttcgcaccactttaagatatgagttgtccttcatgaaaatacaaccctgaagtcgacccaaaccgttattaagatattcaaggccactatgtattaggtcttaccagcgttaatttagggggtatcttcgggagagggtcaagctctaactccagatcatatgcatcaaatgtaaatccagctccggaagggctcttgtatctcatatctttcgaaaggcagtatgagacttcaaatttgtaatgtgcaagatatagagaattttgatgctgatgttgttcgcgggctgggtcgtttgcaggaggggt

SEQ ID NO: 114176 - DNA, 587 bp, Physcomitrella patens
  Intron number 1 from transcript Pp1s244_45V6.1 (locus Pp1s 244_45V6) derived from phytozome v7.0 (chr-ID scaffold_244 ; pos 381565 to 382151 reverse strand)
cccgttggatctccatctctaccaggaaccttcaggttagctttacctcgctcggacatgcctccatctccgtgctgcagttctcgctgtatgcgccgcaccggttgtgcttgctgtatagtcacgcattgtggatcgcgcttgttctcatagttcgggcatagcactgttacactgtttatgttttctacgggtcgtttgtgtgtcaacataggtcgaaagctttcacttgcgagtcgatgatgtgagacgttgataaaccgaggcccgtctgtttgatagctcgatgccagtacctgagtttgacgagtagtacacaatagaaaccttcgttattcctcacgaaataatagctgggaattagtttcagagatctgcatttcgttccctgcgatcaaaacaatcgaagatcagaggggatgtcgctcgtttcttattttgaaatttggctatcgaatgaattgccattataatattgctttaatctatgattcgccttgcccacagattgaggagtggagctagtacaagaagataaccagtccagctgagctggctcacggttttcacgatcattgaccccccta

SEQ ID NO: 114177 - DNA, 686 bp, Physcomitrella patens
  Intron number 1 from transcript Pp1s233_36V6.1 (locus Pp1s 233_36V6) derived from phytozome v7.0 (chr-ID scaffold_233 ; pos 239810 to 240495)
gtaaatttatcccaattcatccctccaactttgcattttggtattttgaatttataaaagaaaaaagtaaaaaaaaaaaaaaaaaaaaaaaaggggtcaatttgggttgtcatcaagtaataagctaatccagtctttttttctgtgaaggctgtggggcagtgaatcaacgaagtgggtttgggtttcaaatgaggtggtggttttgctcacaaaagtgccaacactacccacaagtagctaataatttccccatctgacattgccatgtcccttccatccccaagattatcttcactggttctcgtctcaattacactgcagccgcattgtttgtcctttgtttttatgttttgttatatttgtgtgctttcccttgtttagaaacccatgatgcattgttcccagaaagctgctcaaattgaggtctgcgttaaggcatcaagctggatgtagttgtcagagttcggggaggggggttgatggagacgcacatttgcttttcatgtggtgattcgtagctgctattggtgcatcaggtgataatgtgtgggactatgaacattgatgaggacgtcgcttacataagaaaagtgtgccatgtgctcccttcagttgcagaattggaccagctttagcactctctttgcttacactctgagttcggcaaacattgactgtgcaga

SEQ ID NO: 114178 - DNA, 493 bp, Physcomitrella patens
  Intron number 2 from transcript Pp1s233_36V6.1 (locus Pp1s 233_36V6) derived from phytozome v7.0 (chr-ID scaffold_233 ; pos 240616 to 241108)
ccgctgctccaagtcttcgttcaacaggtgagctcttcaggatcctgctgcggacttgttattcatcttgtctctagggagaaaacaacttcggttcgcattcaccggtttccataacctggttgcttttgaagttcgtttaatactgatcggacgagatcttactttcactgggatgctcatgtgaccggattgcagctactgtactgattgattctctagtttctagcactttctggcgagttgtttcggtttcatgctgtggccccatgcgagccatgtgtggaatggctcttcttgttagtaatgatacctgcagagctatttgatttttgaacaaaagtgtatgaaggactcgtgaagtccagataagatccgctcaaggctcactgaatacaatgtattgcgcttgagtctgtaatgcatagcgattatgtgttacatctgtgttgggccaggcactaggtatttgctagctacgacaagtgccaat

SEQ ID NO: 114179 - DNA, 1002 bp, Physcomitrella patens
  Intron number 1 from transcript Pp1s131_174V6.1 (locus Pp1 s131_174V6) derived from phytozome v7.0 (chr-ID scaffold_1 31; pos 1041515 to 1042516 reverse strand)
tgcgctttagccaggcacaacgcaacctgtgagttctggtacttcccttctcattgtctgccccggatttattgattggtaattaggggcggatgattcccctggctggcattggatcttgtccacccttcgcaaaattcatggtttctgttcaacgtttaggcggacttcgagccctaatgcgcggtgtatatgcgtgtctgtacaatgatttctgaattcttttgccttctttgcgcgcctgttacatctgcatccttggcactcagagtacgcctttcggggtttgattcgagtgcttgattcgagatattgccacacaatccataattctgtacatggcctcactgcgtaggttcagtctttagcgctatatgttgctggtttgcggcttgggcaccttaatgataggtaattgtggataaacaaatgcacaccttgatctccttcacttggatatggcacttgacctatgctctttttgtatgtgttactaccgaaggatggagttcaaattaagcggatctcttgttacagtagtcagctgtgcaggttcgggttctttgtgctcttagtttatattaacacaaaacgagacatttttcctgatggcatctactttgaaggctcacttgtatagaatgaatctccacccagccttctaacattaatttccgtccctcgatggcatttacgccattacccctggatggcggagttttccacaatattaggcacctctcatttggaatgaaaggggcgattgtagttcagttgaaaaaaatatcacttctacaccattttatgtcgcatcggtgcgtcctccttggttggctttatgtgtttcatctgttgcatctacagatgaaattcatggttattagattacatctttgagtcttcagtattggatgttttggaaaatgatgaaggacgatgctcaatctgatacgatttgtttgaacagattggacgtttacgtacccaatcgcaaatcagctg

SEQ ID NO: 114180 - DNA, 858 bp, Physcomitrella patens
  Intron number 1 from transcript Pp1s263_6V6.1 (locus Pp1s2 63_6V6) derived from phytozome v7.0 (chr-ID scaffold_263; pos 35380 to 36237)
gaagacggagagctaggtcggttgttctcacacttatcttcatacgtttttcccatcatattccttgtttagcattacaaaattagagaacactagggaggaaagccatcacctggtacatgatgcatattgcgaatatgctccagaatggaccaatattttgaaatccttgaaattgtgtggagcgctcggactggaccgccaatgcgttctcgaggaactgtttcttggagaagcgaaggattctcagaatctggcatgtttcgtaacctccgaacgaacttttcactgcggatttgtctaagacgccgagtcaaacagcgtttgttggctctcaggcagctcctgcaagcgtaacttgatgctcgaagcctcaaatcaagaaacaattccgcaagaaatcaaagcgctcacaaattgtacgccatcaagaatgaaccacacctcagtagcaaatcacggatattctcaagtttggtctggggagcatttcacgacctgacgcatccttctaaatttaagttttagtattgaccttgcactagtcgaatgaagatgctgatgtttggcacggccttgcaccctccatcacattgctttcctaccgtagcttgtgccgtgaggcttcaaactctgttgcctgcgacaccatgaccgtgccaagtttgctcagtcgagcttctgttgcagtgtaaatcaaattaagaactgaatatgcagaatcgtccagtgtgcgttccattaacgattaaaagctcgtcagtgaggttgcaacacttctccgaggcattatacaaccacacatcctcgtcacgaagaagcagggtaaagcattactggtgtggatttgtagcacag

SEQ ID NO: 114181 - DNA, 717 bp, Physcomitrella patens
  Intron number 2 from transcript Pp1s178_101V6.1 (locus Pp1 s178_101V6) derived from phytozome v7.0 (chr-ID scaffold_1 78; pos 688069 to 688785)
cctttagagtcttgcaatcgctaacttggacacaggtctgtttcaaccacaagtagaaacgttctaaaattcgttttctcagttgggaagttgtgcaaggtaccgccaatctattcgccccagtgatggtaagatcatgtacgagagtctcgtatggtccgagattctgacttcagtgataaagtcgccaccgtcacactgagcagcacatgatggtagaattgaacgtcttcgtttctcttttcagattgacatcatttacgctaggcaatatgcaacgcttcatgctgtatcgaacgtggccgtttcgaaacagtgtcagtctgattttcccagtaaacgacctgggaaaaatggtatagactttgcagtgagaaggcacatcaattatttgaatggagcacttgacgaaagtgggggaccattaggttgtttgcaaacctaacttagtggaatgtgaggcgttccctgctagcatggtttgattgaattgctcgccattattctaccaactgtatttcttatcttcgtttcagaattcggttgtccaatatcgaataattttaatttttgagtttagacaaagaaataattttcaggagcatggcgaggactcagtcatcgagctgctaagactgaaacgtgtgcagtccaagaaagaatgtcataaaaattccggtgttactgttgcttgtttcaacttcatgcagcttcgag

SEQ ID NO: 114182 - DNA, 759 bp, Physcomitrella patens
  Intron number 1 from transcript Pp1s44_57V6.1 (locus Pp1s4 4_57V6) derived from phytozome v7.0 (chr-ID scaffold_44; p os 418131 to 418889 reverse strand)
tcgtttcatagctgaacaaagtcctggtgaacagagtacgtcttcttcgtagtctatcttgaaatttggtgtagcatgcacacaggttccttcataatccccgatggcttgcaggtttttgttgtttgtgcagagcttgtagagtgtgcagtctttcgtcctttgtaggtcatctttttctttgaaccgttgttgttgtacactcctgacgctttatgggtgtatggttaagcctactttgatccttccatggtaggtgctcttgctcaattgagttgttggtctgtgttcactaacatgcttagtggtcgtgcgatctgcagttcttactgaatcacatggcttacagagtcacagttcatgttcagctcgattggggagttgaatcagggcttgcatattgtgtcgttttggttgattgttgatcctttgacgtctgacatgagaagtttttcttttgggtcttgtctgcgagggtatctacatcattcaacattattgtccatgttactcaatttgacacagacctgtgtaagggcctcctttcatgagtatgaatgctttcttgccttggaaaatcatgtaaattgcacttgttattgtagctgttgcaggtgagctttgtcagcccggggagcatcatatttgtatttgttttgtgttagcttttcacgaatttttttatgtcttttttagttaatcgctgtaaagttttctaatggctgtaatgactgttttctgacctgtgcaggtagaacg

SEQ ID NO: 114183 - DNA, 1010 bp, Physcomitrella patens
  Intron number 1 from transcript Pp1s18_20V6.2 (locus Pp1s1 8_20V6) derived from phytozome v7.0 (chr-ID scaffold_18; p os 111686 to 112695 reverse strand)
attactctctcttctgccgagcggctttcccgcaggttcttacgcccgctcgtgctgctgcttcttcttcttcctcctactttttcacctctgcttgcagtttctcgcagcttgccctattggatcgtcgtcgtaattgtcgtcgtttgtttcttccggtgcgtcgtgcgcgtgtggctggggttttgatttctcgactgctgcctctgtaatggtcgctgcttcctggctgcgctgcggcgcgagcggtgatctgcaaggggtgcaagtttttgcagttgttaatttttgtttttattttgctcgcagtagttttcctgtcaattgaggagtaggtcaagtggctttgacgccgttgcggttgcggttttatgttggtttttttgttttgtcttagcggtggcggatactgcgggccaacggtgatgattgttgtctttgtggcggcgcgcgtttttggcggagtgtgtattgagtgcttggtgccttttatagtgtgttacaggagtcctgcgagaggatggttaggtgttatgcatgagagtgcgttaggctgcatagtttcgctctgtaaaagcttgggtgcgcgcgccgccttgttcagttacttgcaccgcgaaggtcgtggcttctgtttcactccaaactcttgttaaccttggggacactcttcttgccttactcttcctggcctacaaagtgtcatattcttagcattgcgctgttattattggcaagttcctcgtagctctgcaattacggtaatacgaatgcatgtcgggggtgacatatcgaagtcaatttcttggggtgtcatttcgctgttgcccgtgtgaaaagtagataattgtccgctggagattactgaagtcttttgtgttaattgtctcctggaattctgcccttggttaagtttcacgaaagggttttactagtcgattgataactgttttttttggttggaatgtgtgacagatctttcctagggttttataccattgcatcgggag

SEQ ID NO: 114184 - DNA, 952 bp, Physcomitrella patens
  Intron number 1 from transcript Pp1s39_222V6.1 (locus Pp1s 39_222V6) derived from phytozome v7.0 (chr-ID scaffold_39; pos 1047453 to 1048404 reverse strand)
tgctcgggaactgcccagtggcatcgtctgtatcggtcagtcagctcatccctggcaccgggagaatcacgactcttgagattgcgctaatagtatattccgggaccttcaaaatgacactagttttgatttatttctagtcagttcgcgacatgcttgtcgtgtcatgtgtaagtcttttcctggtgcattctttccttgtacattctttcccatgccaatctttgatcatcgcgtttgataaacgggaacccagttccctgattacgacatgaagaaaatctgggctgatcacaagtcaagttgtattaaatgccgattcaaagctccaactctcggataagtaggttagccagcagcatcaagttgcaggcaagccacgaatgcgagccctaaaaacaacgtgcttaggcgatcgatcgtgctgcattatagattttctttttttcctttttttgctcatgtttttttctaaagcaggaggtgcaactcaagcatttaatcgaagcaacaccgtgaagattgaaacccaggcctgtaggcatgtctgggaccgccaccgaaatttttcacatcaacatgtagattgccacgtttggcagtagttgctaaacgtcatgaggaatactgacaatgtcactacccgagctgagttgtgaagcatgcttgggccagctctaatagcaattgcatcttacatacgtcgatttgtggcaaactttgcaaactattgattcaaacacaggatttttctccaccgtaacttgttttccaggtgactaatttgtggggactgtctaggcccatgaagctcacaatgcattcattccttgctcattgtgagaaagctcacaagtgagttgcacttcgaaagcaggatcctgtcatgcttgtggtgatttacacattttgtgaatgtcttgatcagcaggtgagaaaaacttggttacga

SEQ ID NO: 114185 - DNA, 382 bp, Physcomitrella patens
  Intron number 2 from transcript Pp1s155_1V6.1 (locus Pp1s1 55_1V6) derived from phytozome v7.0 (chr-ID scaffold_155; pos 12082 to 12463 reverse strand)
acaccggtcaagttgcaaggccaggaaggcaaagagtaagcaattctgtgctttgacttgcgattcagttttcggagccaataatcttcctttttttgttttttttggaattcacttcgtgcttgcatgtcatgatgtcacgaattcatgttgcaccgaacatgtcataaatcatttccatttctggttctaccactgaacaagtaagaagtattcatctctctgctgtaattgggctattagccaacgtatgaattctggcaggatttgcactgattgagaggacgccgcagcgtttggctgatattgaccagtgaatttggtgcactgatattattcttcacaatgttgaaccgcctgcgcaggtttttattatatcgca

SEQ ID NO: 114186 - DNA, 595 bp, Physcomitrella patens
  Intron number 1 from transcript Pp1s114_48V6.2 (locus Pp1s 114_48V6) derived from phytozome v7.0 (chr-ID scaffold_114 ; pos 296834 to 297428 reverse strand)
gttcgacaccgagtgctggatcgaccccccttccggtacagtagtcctcgttgttatcgttttttggacatcgcgggttttgactgtgtgttggaagtgtattgagtttggaccacaggtgggttttcagatctgttgtgtggcgggtggagaagagttttgcggaggagatgatgaggaaggagtagttcatgtctgtcgtagagatgcttgcggttgctctttcgttacaactctatgttgctttggaggttcggactttgggttgccacgtagtcaatggaagggggaggggattggagtttggggtttaatgggctgtgtcgatgaatggacttggggtttgaaggttgtggatcatgtttaacggaatgtgtccgagggagagagatttcgttttgttttcccctttttaaagttggagatgcgattgaagttagagctggacaggctgttcggttttgatgatgtgttcaaagcgttttgttttatcaagatccacgggcaatggatagatctttgtgagctcattgtttgttttgtttgttctgttctctcaggtgtttgagccccagtggttttaaccattatcttg

SEQ ID NO: 114187 - DNA, 743 bp, Physcomitrella patens
  Intron number 1 from transcript Pp1s241_14V6.1 (locus Pp1s 241_14V6) derived from phytozome v7.0 (chr-ID scaffold_241 ; pos 27243 to 27985 reverse strand)
gaagtgaagacagacctctgcgtgcctgtaagtttaaaatttagtgttcctcatgctttaatgcgagttgtctagttacgacagcacatatctttgacatattttatttgattttggtattttcctctctctctctctctctctctcttcctggtagacctcgcgagtacttgtttcacttttcgaacatggctcgcagcgtgttgtctgtgcacctcaattattacattaccaacctaattctagtttctgtagtccttgacccgcagtatgtaaatgctgaaccactgtttttgttttgtttgtttagttttatttctatcaacatcaagcgattgtatctcatcatggttggtagagtggagtattgagagcaatttcgttgtcatctaacgactagtattataatttataggtggtttcgaaatgttacaatgcaatgtcaactgtctacaacttacatattagattttgaatggctctcagataggacggggctctcccttgattcttcaattgtgttgcatatgtctgaaatttgaaattgtctcacacagcattcacattgtataggtttgtgcctttctactcatggaaacatcagtactgaaagagcattgatgcgcttttgagaatgacaatgtgtactcgaggactcacgcttttctatgcccttgttgcctaaaattttcacaccggtatttttagagctaataaaaaatatttattttttgtgcagtgtg

SEQ ID NO: 114188 - DNA, 292 bp, Physcomitrella patens
  Intron number 1 from transcript Pp1s71_269V6.1 (locus Pp1s 71_269V6) derived from phytozome v7.0 (chr-ID scaffold_71; pos 1378438 to 1378729 reverse strand)
tctcttgtgacgacgacggtttgtgctctttcgacaggctacgcttcgagtttcgagtttatgattttttgagagtggcgtaggattggtttgttgatttttgtttttattcttcgtgtttttcatattgagcatgtctgcgttgtgagaatatctgtttttttttaacttaattcgatgcatgatcgagtgagatattgcatttatttatttatttatttttttagaggtttcctgattgttactaatttgtggttttgtcgttgtgcccttcggcacgcagtggaggagc

SEQ ID NO: 114189 - DNA, 484 bp, Physcomitrella patens
  Intron number 3 from transcript Pp1s148_9V6.1 (locus Pp1s1 48_9V6) derived from phytozome v7.0 (chr-ID scaffold_148; pos 81107 to 81590)
acgaggtaatatttagatccgctgcttcactgaggtcgtttcgcgattaaacctcgttgttctaagttttgaattttttcgacacaggtcttgctccagcattttctttattcgtgtttgaagatgcccatcacagacattttcctgtcactgtaacatccgtctctcacttgtcaacagtcttttgaaagtttagatttcgttatttaaaccggaacagtagaacattctagctgatcaagatgctgctgcccacgaatttcaaaccaaggtctttactgttgaacgcaagattggttcgtaggttatggcacttctagggttcaccatttataagtgggtccgcttctacttatcctataccctgttattgtcaacaaaacaactacttttactccttgtgtttgtaatgatcgcaattcaatgagattgtctacttttggttgtaggctttggctacgtatcgagaagctttggctcaaaa

SEQ ID NO: 114190 - DNA, 709 bp, Physcomitrella patens
  Intron number 2 from transcript Pp1s30_144V6.1 (locus Pp1s 30_144V6) derived from phytozome v7.0 (chr-ID scaffold_30; pos 952092 to 952800)
aaattttcaactcaatcggctcaatagtgaaaagtgtgagtgagctttagtcaatgttgcttttcataatccatgagaagattctcgtgcagcaaaagcaaggaaaactctccacaaaaacgaagaatatcagtgtcaacagtttgcctactatgagacccaccctcgaatgaagtgcacttcgttgaagtgaattagtgatgcaaaaacaattgtggacaatcttgctagtaagtgttcgaatattgtaagcatatcgtaactcaattttgtcaataaatgagttttcaattagatatagaagtgaaaagtctgaactatttagacaaaatgcgcataactgcagtaaattaggggaaaagtctaggatgtagaaacaccagataaagccactttttgattcatgcaaacaaactcgttaatctccaggtacactttcatcatggacgttgctagggtgggctcagagaggatacctgccgtcgcattgaatgaagttacacacaattgacaacattacgtcgaaacgactctgattaattatttgtcctgttcaacctcaccaaatgtgatggatgtcagggtcttatgaagatgaaattctcaacttaacatgaaaaaagtatcagcaacaagttttaagaatgattcataattctgaactcaagtatgtagttattttgttttacaggcccaggtcctattccaa

SEQ ID NO: 114191 - DNA, 1065 bp, Physcomitrella patens
  Intron number 1 from transcript Pp1s58_205V6.1 (locus Pp1s 58_205V6) derived from phytozome v7.0 (chr-ID scaffold_58; pos 1211235 to 1212299)
gcgtcagcctgtaatttcgggtgcttcgcccgctggtatgcgttgctgctgttgtatctggtactactaggagtgatatgacgggaatgtttggactatttttctgtttagggttttagtatgtttctctatcttttttttaaaaataatctctttctatcgttttcgtttcaattgtaagatctggaggtgaacatcattctctttgacttttggggagcgatagtaagaaattgacctagaaatcaaggtacgagtgaggttgggaatgcgggatattttttcaaatgtggaggtgaaaaatggaaaggataataggggaaaggagtttagagctgcttagtggttatcgcattatttctcttttatcgacagtgggttaaatgtagtgtagcgaattagaggcgggatgtgagcatttgttagtctgttcatggtttttatttttatttttgtttctttgttttaaatttttattctttttagccaaggtatccggaatttatccttcgtggattgaatgaccaaaagtagaacttctttaaagaactaattgataccccgttggtggtctcccgcgtaggcgagggaaacctacgttgtatctgtttagcgaaggagaagagtaccactattactcgtccatgagctcacatcttcaggaaatagtaaaaccagctgccttagaagtctcagttgttgttcagagttattgccaagtctttttctcccgaagaaagtgccaattgcgccaacagttcgagtcaataactgaatttgagctgtgaagacaaatatgcacacgatagtgtagcttctcgagctgaagaacgtttacacagagtcgtaacatgatgcaggaacttaagaagcattcttacagctctctaagagtgaagcactggaagatatttacacttgtaaccatcttttatatttattttttgacttgcaatcaatgcatttaataatcacgagccccttattttgagagtgctgaatctggtgagtttcctaccgacgattgtagggttgaagattaaattgaggtctggagcagctgca

SEQ ID NO: 114192 - DNA, 426 bp, Physcomitrella patens
  Intron number 3 from transcript Pp1s156_55V6.1 (locus Pp1s 156_55V6) derived from phytozome v7.0 (chr-ID scaffold_156 ; pos 371121 to 371546 reverse strand)
tccgttgccacgagaggtatattgtcacatttaattgttttcagtgtgtccattatacaagctgtgccctacttatacaagtgtatcatgcagagtttgaatgattgaagatggctcgtcttaggattgctccaaccggattctgtacttgaactgtctagtttagcataatgcaggatcccttgtacttgttttttctccgtggaactcgcttcgccgttttgtcatgacttgtcgttcctgtttttttcagttcagtcttctgcttggtgttcttctttaagtctagttcttctggtgaacgacgactttctgtttttcataatttgggtgtggctgactattttaagacctgactgcattgttcgggaatcgtttgattgatcattaggttttgaccgagagattggtgctttgcagattgag

SEQ ID NO: 114193 - DNA, 618 bp, Physcomitrella patens
  Intron number 2 from transcript Pp1s156_55V6.1 (locus Pp1s 156_55V6) derived from phytozome v7.0 (chr-ID scaffold_156 ; pos 371550 to 372167 reverse strand)
aatatttttaagaagaagccggacccaaaaggtttgtagattgtagacactagtccttttttgtgttccttttgattccaaacttgcaactacaacggaggaagaatatgagcatcaaaaaaagcacaggcatctatatatatttatttacacacacccacacacgttatttccttcttctgttttcggtttgtcatgcccagtagtaactagtgtagaggataactgtagcgatgtacacagggttttgtaagttttggcattattaacatgttgcctacatctttagcgagctcgacaagttcacattattcaaatttgggattaaatatcttgggagaggtttcaatcagtttctttgcttcttataagtgccatttaatgcaatcagcaacatttgcaccttgtatcagttgcaaagtcataattttgtactcatttgtctggtccttccagtctaggttacaatcttttgagagatcgtatgaatgtctacaatgagtgatgcaagcacttcctgggtaggggtggaattgtcgagcatgtgacatttgtcttgatatatttacttcacgctgattgttgccaacagaggtgctccgagccagtaaacgtgag

SEQ ID NO: 114194 - DNA, 516 bp, Physcomitrella patens
  Intron number 3 from transcript Pp1s139_50V6.1 (locus Pp1s 139_50V6) derived from phytozome v7.0 (chr-ID scaffold_139 ; pos 467409 to 467924)
aagaggttgttgaccttattcgactttatattctatattatacagtctataatgctagatatgctcgatagttacgtactgtagctgtgaatggatatagcatcacgagttaggtacaagatgattgcttaataaacattagtctggcggttcgtatgaattacctattgcttcaccaagtattttcggagctttgatagagttcacctgctttgattaggtgctggacagctctagcctgttatgtaggagtaggtcctggttgatgacagcaagtatcttgtcctttatgcaatgccgaatgtcatttaactctagctgccctttcttcatttttgacacctatttatatggccttcgtagtgacctagatcatgatctcagattctttgtatgaaatgatttatatctattggtgatcttgagtcgcgatattggatgtccaatttcttacgagggttagattgttttcgtgctctagactttacgacgggttgatctcttgcgcaagaggat

SEQ ID NO: 114195 - DNA, 580 bp, Physcomitrella patens
  Intron number 1 from transcript Pp1s21_182V6.1 (locus Pp1s 21_182V6) derived from phytozome v7.0 (chr-ID scaffold_21; pos 1237136 to 1237715)
aggttagtgctcctgctggaggttttcaagcatactccaccattgcgaattgtttgctttcgtattgtgtggagtcttcattttgaatgtgtggaatcctggacctgttacttagttcttagaatatgctttttaggtctgtaggagagtctggttgttagcccgtagaaaatccttttttacgaatccttatttcttctcactctcactctactccttatttttctttttctttttcttttttcgtttttgtttttcatcacgtacatgtgaacagcttatctcatcgtttactgaaactttaccagttgccttattgacttgcttctgtgaaagaaatagtacggaattgagattgaggctggatgtataaagatcttctagaggtttataaaattgttggtgcatttgttcagtcgtttgttggtaaatgttttcaggtcagtcacgattcaaaagcatatccgaggtttcaatttgcagctatacggtattcattacttcagcttttgtgcactttgttcctcatgtggattaattttaattttgtgttgttaggtttttgtagcgcagcgattag

SEQ ID NO: 114196 - DNA, 840 bp, Physcomitrella patens
  Intron number 1 from transcript Pp1s2_677V6.4 (locus Pp1s2 _677V6) derived from phytozome v7.0 (chr-ID scaffold_2; po s 4138619 to 4139458)
aagcttactgtgaactcctcgctgcgtaggtttcggtaatgttgcttgcttgtattgaatgattaccctggtactgtgataaatcccgctgcagcgcggcttttcttgttggaagtagtgtatcggtgttgagaccgactcagtgatggactggtggtgtttctatgcaccggcaatatattactgctatcaactctcaatagatttcaaagtagactcaattccttactgcgatcgattgcagtgaaactcgataatagaataaattacgttgttttatttatttttggttttggtttatcaacgagatggctcctttgcagttgtagagacttcgtgtgcgaggttcattcctttttcagtggacttcgtagccgcttggcattcgttaggtgcttcgacagagctagacatcacaactgtcacggaaagtgagcccagagtttagtctgttcttcttctctccttatcgccttacgtgcagtagaatactcaaagttggagatcatgtcagtctgggtcctacctcattgaatttcttctgggaagtatatttagaatcatgtttggaattggcagagtgattactacgattgggtgtgtttggacgtgttcacatggctttcatcgaggtcggagtctcattttcttggcagtccaggaaatggaagagggacggacgtggactttccgaaagcgatagcaatgagaagcaactcacagtgtgtgattactgatttggatttggaatcaatgctgggttggagagcctcttgattgacgagcggcggttgtgtgtgtgttggacttgggttcaggtagattgtaggatcgctcgcg

SEQ ID NO: 114197 - DNA, 808 bp, Physcomitrella patens
  Intron number 1 from transcript Pp1s146_98V6.1 (locus Pp1s 146_98V6) derived from phytozome v7.0 (chr-ID scaffold_146 ; pos 800847 to 801654 reverse strand)
gtccttgttggcaaggtgagcactgtctatcccgttttatcttaaaccctgttctagggttttttggatcagtaatgctgatctctgccttgctcacctctttggcattgtggtctatgctgtagagctcaagtttgctaatcagctgcaatgtgttccaaatctgttgaagaaatcagcctacttgttgacggcagggaagggctttagcattcgccttgttcgcctcgttctgtgatctgagtggccaataacagtgtggatattctgtatttgaccgatcaagtagtccagggttttacacaggcggagttaaatgggaaaggatttcatcataaatttgattctaaactaggtttggttatcctcttgggatgagtataattttggaaacttatcactttctgcgttatcatcaaattatttcttgtagtatactgaatgatggatgtgaacttcacacactgtaactgaaaaatcgtttcttgaagttatggatttcctctttgatgctatggttgctgattttttgaatggtctttctgtgtcatctccaaggcttttataaccgtccagcaaagtcatcgtctttgtggattgtagcacttggttacgtgaattttgtaaatcatgtgtaggcattagtataacacatgtttctgaatcttaattagcttgatatcggctttattatctatttagtttgtgacacttttatgttccttgcgtccaattgtacttgattgtgcttgaccccatattcttgattgcaggtgaacaagtctcttgtctcgcttatcaacaaggc

SEQ ID NO: 114198 - DNA, 1050 bp, Physcomitrella patens
  Intron number 1 from transcript Pp1s4_106V6.2 (locus Pp1s4 _106V6) derived from phytozome v7.0 (chr-ID scaffold_4; po s 794714 to 795763)
gtgatcattttttgaagaaaaattccctttcatcggtgagtgctttccaatcttcttcgcgtcacatttctgataagttcttgtgtgtcgtgtctgtcttgctaccacgcacggaatccttgcctttttccagcccagcgagccggaattcgtttgatgcttctggttttcgtggaggttttgagaattgggtttagattggattcgagtgttttcaagttcgtcagccgcctccgttcgagtactagatttttgaaatagatttaaagggtgtttttttaacggtggtgtagcggaattgcgtcatagtcaaggatctctgtcttctcgtagacacggctcaacgcgccctcagagctcgttcgatgtgctaaccgaggatttgatgtctcactgttgcttttgagttgaatttttgctgacaaaaatggagagcttatgggttctgtgaaatcggctgtgttggttcactttctctaagctagtgtttttttgtcaactgttatctgatagaattttttatcaccagatttatcttactgcacctgtctggttcgtgcacgcaagcgtctttcgagaagggatgttgtcgttcggcaaacaaatttcaccctggcaggataatgtgacggactggaatttaatctgtttagcaacttagattcttatatttctcctttattgtaaaagtttgcccttgcactactggacaccggaagaccttgccaaccataaaatctaccaatgcttgcactacgagtgctttgggacaggaaaggttgactgtgtttctgtagctacaattgtgatgcacacagttgaaatttgtttttttggtttctgaaaccacgacaccccttaactagaaagtggattggagtaataggttctgatttatggttccaagctcattatgattttgcattccctgcaataaatagcgtttgtatctagaagaggttaacacgcgcagttatccactgatggcattttaatgattattgtcgtggtgatgatctacagctatttttttaacttggagcagcggca

SEQ ID NO: 114199 - DNA, 1037 bp, Physcomitrella patens
  Intron number 1 from transcript Pp1s130_175V6.2 (locus Pp1 s130_175V6) derived from phytozome v7.0 (chr-ID scaffold_1 30; pos 722848 to 723884)
cgacccagggccttcttcataccacttcacttcaggtttctcacctcaaggctttagactctcaagcgctttgcggttttctgtggtgtgggatgtttcattgcggtcttgttcaggtgtggatctccgcgtgatagaactggactgatgattattgtggggggagtattatttattgatttttgaatcgcctcggagatgatcattgatttcaaagctgaaacctagcttgtctcgacggttgagtgcccttcctagagtatcgggtgtgtgcaggcctattgtggaatgcatgcgtcgcagtcttctgttgcactggatttctgaatgcgggccttggttgggacgccctcgtattgtctggttttagcctcgagttagtgagttagcaagttagcaagttagcagaagctgcagtttattgccttgggctttaaagtaattgttttcctcgaggcgaggatgatgaatcaggtgctgtggttcgagtggcctccatagtttagcgaccttttatttgttcattcctttttcgtttttcggttggccaggatgtcgtgcttatttactttggcgcattgtcaactgctgcggcggcgaattttcctggtcgttgggttgtgaatagtattcagaaggatgtcatttgccgttaggcaggttgtaggtcaagcttgtctgcctctgttatccctatctcggggaaagctttacgcctgaccgaattcccctatgaatttccgacctctctctgttgaccttggtgtgtaaacatccaccgacggtattcaagtttgattgaccccccccccccttgtcgtcattagatgattgttggttgagagagtgttgcgtggtcttctgatttcactatcagtccattaatttgtctgtggtatggggggactttggtacgatggatttgaactttcttatctatacttgaaaactatgaagagtttaattcaaggtctcctcgataactatggtatgctttccttcaatccagttggttccaggcactaccaagttgtcat

SEQ ID NO: 114200 - DNA, 399 bp, Physcomitrella patens
  Intron number 1 from transcript Pp1s66_174V6.1 (locus Pp1s 66_174V6) derived from phytozome v7.0 (chr-ID scaffold_66; pos 847579 to 847977 reverse strand)
gcagtgctgcgcctcttccagagagggtaatggacatcgcttttgtttctctctttcttagttatttatttcttgctcactctttttttttgtctttagttctgttgtcaaaatgtatcatatgatgtcggctccaataaaatcctgcatccgatttgaagatatctgaaccaattggatagagaacttcgttttttgaggaatcttttcattttgtttttgataatttttattctgcattaatcttcttcatggtggaaatccgtgtcatggatggacgcagctaactatgatggagtgcggcatgtcgtgacattattactatgtgagttgttactgacctccttgtattctgaatgcgcaggttcaagttggtggctctccagtctacaagattga

SEQ ID NO: 114201 - DNA, 1052 bp, Physcomitrella patens
  Intron number 1 from transcript Pp1s203_65V6.1 (locus Pp1s 203_65V6) derived from phytozome v7.0 (chr-ID scaffold_203 ; pos 566770 to 567821 reverse strand)
gtgacgtcgccgaaaaggtgattgtgtcttttgactggttgctagtggtattggtgttgaatcttcgtgattcttctttttgttcgactagcgaatagttcgaatgtgagtttcttcttcttcctcctcttcttcttcttgtgcttcttctcgggcttgaaggtatcgcgagtattagccttcgcattgatttgaattatgtgaacgagagctatgagattgtgtagtaaggagtaaatggcaaggatgctgtgtgcgatgcggctgaatgaaattgtcagcacacagaaaaaacacgtggaagtatttgaataagacaacgtaatagaagttgctccacgttaaattgacaggttaattccgttggttttgcgatagtatgctgtgttatcgtttcagactaaaacatgacgtgttgttggtttgaactgctgtagttagttttgcatttgataaattgctgagtcttacagcactgatttgtttgtcttgttacattcaaactccgtctctcctatggcatgaagctggttaatcgattgtattcctaatgttgagtgtaactagggtttgacattgacaagcttagtctcacatcattaaagaatcggcgtgaatagcacttaagaacatcatcaaaattaggaattcacctccgactgaagttgaatgattagatataaaataataaataataataaataataaaaaaaactaaaaaaactaaattaacaggattagcacacgcaataacttaatcaaagtcttcccagactcgaacgtgtgcatcttgaacttagttctgatttactaggttgtttctgctagattgtcagtcgaaaatatgctaggaatatttcgagcttaaaagagttctcaaaagtttcatgttcagtctccatgttttaagcttgtattcctgtgatttttctctaagtttcccgttgatggcgtagaacgattagggtaagaaatgattatgcaactgaaacttggctgctctcttcattgtgcaaggtggataagtctgaagaaatcggagcttcaggcag

SEQ ID NO: 114202 - DNA, 869 bp, Physcomitrella patens
  Intron number 1 from transcript Pp1s164_25V6.1 (locus Pp1s 164_25V6) derived from phytozome v7.0 (chr-ID scaffold_164 ; pos 159947 to 160815 reverse strand)
agaggcaaaacttagcagttgttaatcataagtttacagcacttgtggcgccagattatcgtttgacgacagcttggtagacgataaggcaaacacaccagagtagccttgaatttgtcatcatacttctcgttcgcataggaactaaaattaatgatagaaaggccctctcatagtaactttgctggaggatacagatttgcaaatgaatcattccgcaaaacaatttggaccaaggtggtttcatgagaattgagcccaagagtgttccaatttagaaacatttgagtccagtcctcacttgaaagcgctgctggacaagtaggtaagtggaaacgaggtcttgagaagcctccttaaaagtgaatctagtttctggtaaagaagaatcgtagcaaggtctgcggatttgtgagcatggtagcgtagtatcgattcaggaagccttccaccacgggacttgctgcactaatgccgaaagtgttcgaatccaagttcattagattatcctttcccgctgtctcaaagatccgtcttagtcaccttaccactacaactactacttctcctactactgtaagcgcccgtcggctaaccagacaaggttttgccagaatcatccagtctaggtacctcgtcttcctccagtgacagccttgcaagactttgtccgggcagtgttgaagccaagtatcctgcatccagtctagagtaacatttctaataaaacaaattaagagggaaacgaagaaaaataactttggccaggcagcacttgacctgcagtacaaaattggaatacttctcagcgtgtaagtttcttcggattcttagaatacaccgaaaagtttgctgagaattgcgattcc

SEQ ID NO: 114203 - DNA, 817 bp, Physcomitrella patens
  Intron number 2 from transcript Pp1s178_142V6.1 (locus Pp1 s178_142V6) derived from phytozome v7.0 (chr-ID scaffold_1 78; pos 1002708 to 1003524)
actttgatcctggcctacttcttcacccctggcaggtttgaacatttctcttgatgaatgtgtgtttgaatttttagtcatatgattttgtctctttcatctctttcgtatgcaagtcaatgcgtgacacattatgtcttgtctatccttgattctgagtgttcgccttgcattagaatgttattttattgagcagtcgagctttttctgttcataggtttgaatagtttgacatttcgtaatgtttttactccgagtcatgactgtgagtagaaatagctgggaagttagcgagaattttgtttgcttggatacctactgtacgttgccgctaatattttctagtacatgatttcgatcttgtctttttaattttagttgaaacggaggagttagtttttgttttgaaaatgtgttcttccaagcttttgagggctccctctgtagaagggaagcgaaacctcagatctgaattatattcgtcgctatgttaaactatctgttgcatcactgtgaagtcctacaaattcaacttttttccttgttcttggggtttttgaagtaagcttttttgctctgaggttcggtttgtgcaataagaccatcaaatgatgtaattttagagagctccttcgtttctgaaccagctcagaacataagcgcagagagcacttgaccgagtctgacctggctcgatccactcttaaccaaagaagacttgagttgaaatttgatcatactaatgatacaatttagttggaatctttatgagtaagactgattacttggaatacttgcaggttttctattgaaccgg

SEQ ID NO: 114204 - DNA, 483 bp, Physcomitrella patens
  Intron number 3 from transcript Pp1s7_268V6.1 (locus Pp1s7 _268V6) derived from phytozome v7.0 (chr-ID scaffold_7; po s 1533966 to 1534448)
ctgtggtgcagcgagtcacgtctgcacgcattgaggtgcttctcttgacttattctcaaacgctgctcgttggtgacttccttgattcctggtttacgtagtattcatacttttcattagggatttcgatcgttgagaatgtgaacttggaggagtatagataggtgaatgaagttgatggcagtgaatgtacagcttgcgatgctatttaactctctcgctttgcatttaatcaacgaaaggccccagaatttgcagagattctacattcacgtggagtcgccggttcccttgcaccgcattttcttcgttttactcaatcatgggagttttcagagtgcatttgattggaagcgacagcatcatacttttgtagttctttttttgggtattgctgtttctcatcttcagttgattaggtccaaaatttgaatgcctttgttgaaatgggttatgggattctgggtatttattgacaggtgg

SEQ ID NO: 114205 - DNA, 1036 bp, Physcomitrella patens
  Intron number 1 from transcript Pp1s217_30V6.1 (locus Pp1s 217_30V6) derived from phytozome v7.0 (chr-ID scaffold_217 ; pos 235119 to 236154 reverse strand)
cccgcggctggacctgctgggaaatcctcggatccgtaaggatctctcgcaccgggcagtattatatctgttcaaggagtgatatgttgtgcggagcttggcttttggtgatggattcgtggggtgttgacagcgggttgcgaactagaactgaaatcgcagccagaattcgatgtggtgggatgtaaaatgtgggactagcgtggtttgttggttgatttgtatttggggtactttttggagcgtggtagggggttttgtgatgtttgtggagtaatctagggtttcctgtctgaccgactctcgtcttgcatctctacgatgtcgtttaattatgcacctcaacgcacccattagattatgttattgatgggcaaattcgaaattgaatcttgattggttcttgcttacaagatcagcggattgctctcggtggcgtaatggtcattgggtgttgtttgcaatgcgaagctagagctttgtgctaattggagtagcgtccgttgtgggtagggacgcctattataggtgacatgctgtattaatttcagattttttttcactgcgtatcaagcaatgaaatttagtgggtaacttgatagtattagtttttattacttattaatgttgctggggtcttcaaaactgagaagctactagtttcagagtataggtagaagtccgttcagacgttttttttttttttgtttttttgttttttttgttttttgtggttattttcttgattgaaatgacggaagaactacagtttgaattgccatcttttagcacgccatcatggtctcttttttgtgcgttgagacaacaacttgggactgtatatatctgattggatgttatgattgatgaagtgatgctggaattgttttgcacgtgataggtggagctcgatcatctgacatgaatttgtaacgttctagtccgaggctgcccatattttctctcacttactgaacattctgcatgtttcttcgatacagcaagccaaagaaagacttttccaccgctattttgg

SEQ ID NO: 114206 - DNA, 972 bp, Physcomitrella patens
  Intron number 1 from transcript Pp1s39_129V6.1 (locus Pp1s 39_129V6) derived from phytozome v7.0 (chr-ID scaffold_39; pos 541112 to 542083 reverse strand)
tttactgtcttagagagataggcctgcaacttgaggtacgtgttcactttattgatatctgtgaggtacatcagcttctaatcaaggattttcgttttggacgacaagaccaagggcaatcacctaggcaagtatcgtagagacatgctctgagcatgtcaaatcgagtaaataccgtatcaggggcatgactagtcattagaatcagcatttttcgattatgttaggttaacttgtttgtgcatttgtgctttcttgcacacgagctaatactgttctgttcctgatggagtgataccacccttgtttagtcattaatcttttgcaacggctagtgacaaattgttaggggtagggctaggcttgtaatcaagtcttcctttcattacgttttcttctgtgacctttagacctcgaaaaatattatcacgtcagctggaaaaagtgactagccttccagcttgtaatgtaaacagtacgagattgggtgagtcaagatgtctactacgaatactttatcttcgattacgtatgtgcacctactagttgcacagaatattgggtcaacactgggtgcagggttattccttcttagataaatgccgtatcttaacaagtttccatccttatggtcatcaatcaaccgtttcacgcctggaagctcgtaacatttgttttgcgccatcgacactaactagaagtagcttaaatttccgacataggatagtggtcttttgacttgtgcattgtagaacctatttgcaatgcactgcacattctgcgtgagagcaactactcatatctccaattattgacttctgtggtcaactgaactacctagtagtaagccagaggaaaaaactaagcagtggttgtgccgcaaagcactcatgagttttggacgaactcatgttgagataatcttctaacacactgctcttatgagtgaaaatagttgcgtaatggagttgg

SEQ ID NO: 114207 - DNA, 755 bp, Physcomitrella patens
  Intron number 1 from transcript Pp1s67_128V6.1 (locus Pp1s 67_128V6) derived from phytozome v7.0 (chr-ID scaffold_67; pos 936336 to 937090)
gcaggtactaattcgaaaccactgacggattcctttggataaaaagtggcccaccttgaaatctggaacacaacaaaagaattcaagaatagtcactccttcacaccttgagtgtgttttgatttggcgagattggattcctcatctcctgtgtagctgcggagtgaagtgattgtgaaagggtaatttgtttttgctgtgttatgttcttgaggttttagtttttttttaaaaataattcaagcttccggaatgagcgagaaaggagggtttatagaagtgcgggatagtatagcaggaagtgctagaaaagcccgattgattgaggagtgatgtcaagctagagaagattggtttatattgcatctttttgccgctttctttcgaagtttatgagcgcgttggataatcaagtttgcgctcgctgtactattgacttccaatctagccctggaattagatattctcatggtttattagctgtagatcatcaatcataggtatgcttgtcgttaagatgcaactcttggcggctcacttcggaaacgtgcaattcaaaggatgccttcaagctagctaaggattcttgtagagtttagatcattgaaaacagtttctgaatgactatacaatgattggcgggtgcggtactatgtttacttgttatttaagacgcatgagaggcagcaattgaccagacggtgactgttggaatcgcagtctagcaatttgcaacggagcttgacggttgttcc

SEQ ID NO: 114208 - DNA, 564 bp, Physcomitrella patens
  Intron number 1 from transcript Pp1s77_67V6.4 (locus Pp1s7 7_67V6) derived from phytozome v7.0 (chr-ID scaffold_77; p os 328496 to 329059)
ttgcgaggttgcccatactaggtacagcaggggagaagattcagtagctcgtctgcaccgtcacttgctatttgtgattcgaggctttgagctacttatgatgatcgcttgattgggaagatgtaatagtttgaaaagatcggtaacttggaaacttggtaacggttgcgtgcttatcttctttctggaagtgtaagttaggcctcataagcgaaggcattctacaaaatttatcagtagttgcaagctcttagtggcgttgatgtgatggaatgcttgttgtgctttgtttctgcagtcaatttgtagattatctaattattcaatcgttgtagggttacaggtgtgatgtctcatatccgtatacttgtctgaatttggccaccaccttgcatatgcaggcctcttgtgtatcgctagatttttcctctaagggacgtgttgcctttgatttttttgtacagaatcttgcgtttctcgtttgaagtacctcttgctcatgtgctttttgcgacgttccatattccaggtgcatcggtatacgcggagctttgtcttcagtaa

SEQ ID NO: 114209 - DNA, 441 bp, Physcomitrella patens
  Intron number 1 from transcript Pp1s39_36V6.1 (locus Pp1s3 9_36V6) derived from phytozome v7.0 (chr-ID scaffold_39; p os 87916 to 88356)
tgagaatcagcgctcgaagcatagaaacgctactggtgagttttgacttgaaacgttcatggtgctaaccgtctgcagtagtcgcttttcgacacatagtgcgtggtttttagaggctaaaaatgttgttggaatgtttgtggtttattttaaggctcatcccctctgtagctttggatgtgttcattaacggaggaaaaatatagttgcagtttgatcagttgtcggagctctgttaattcactagttgtgaccgctaatattgtcaaaattcttgcaccattttcatttgaggaaatagcgagacagaaatgcaaatctcaatctcacaacagaagacgtgttagattttggacatttagagttgctggcttctttttgttcttttattccggactttattgacgaacttgtggattccaattctgcagaggctgagat

SEQ ID NO: 114210 - DNA, 398 bp, Physcomitrella patens
  Intron number 3 from transcript Pp1s18_283V6.2 (locus Pp1s 18_283V6) derived from phytozome v7.0 (chr-ID scaffold_18; pos 2106566 to 2106963 reverse strand)
tgtacgtttcttcctgtccaccatcgtttcgcatgattgcactctatgtcttttataaatctgtctaccatcccctggcttctttcaattccaattttgattccatgaaaaaaatgattatgttgagaatgatacgtctcagtatcgtccttgaatcaactccatagaaccaggaatttatttctttgttgccgtgattaccttctctcaagtaagaaactcaactgtgtgaaggcatgcaaattgtcataatctgctttagttacggtttttattttattttattttattgttgttgatgcattatgcgtcatgtttgggagttagattggagtatcatggttgtggtggttgtgtaagcagtgctcaaggcagaagtggagggtgaaaacgaggac

SEQ ID NO: 114211 - DNA, 455 bp, Physcomitrella patens
  Intron number 2 from transcript Pp1s28_101V6.1 (locus Pp1s 28_101V6) derived from phytozome v7.0 (chr-ID scaffold_28; pos 648478 to 648932 reverse strand)
tactcccaaatttctggattgaagggactttgcaggtgattattttctttttttggtaaaaatttccttcattactacaaaagcatagctcgcgtgattagtgatgtattcttcacttgagttgtatcgattatataagttacataactccatttgattttgtattcaccaacgctttgccttccacttaatccttctatatcgtcattacttgcacttgtgtagttctacttcataatagaggaagttggctagttgaagtgggttctaaattagcaatgcaatgttaaaaaagatttctttcatgtattcgtcgtttcaccatcaagtcatttgtttgtttattcttcgaaatcgataatgtggaggttttggtacattacgcaaacaaggctgtctggtatcaaagttaatcacacgggaagtttgggatgcaggctactggggcagcagca

SEQ ID NO: 114212 - DNA, 920 bp, Physcomitrella patens
  Intron number 1 from transcript Pp1s317_70V6.1 (locus Pp1s 317_70V6) derived from phytozome v7.0 (chr-ID scaffold_317 ; pos 424263 to 425182 reverse strand)
aggagctgccgctgggagtgttatcggtcttcgaggttagttagctgtctactttacttccgagaaacccgaaagtgcttttaattagggatgctttgtaatgcaatctattgtagtttttgggatgttcgtgacaaggctggtcaaacaatttttttgtttttttgttttttgggcttcctcctaaatccctcttcctgtctcgtatctttacatcatcatagacttagacgcaaatacaggatggcttttcggtgattggagaaaatagtagtatttgaggtggagatggccacggtcatgaacacacctttaaacgatcgaactagaatttttggtcggaaaacaggtgaagagatggaactgcacgcatagaactagtttctttctgtagaattggttgcgaaatctttgagcatattcttgatagataatttattctactaggacggtaatggaattgcgtgtctatatgctgagtaagcaagtccaattaatgtagggttgattgcgtactatttgtttgtactgccttggatttctctgaggtatacagatctgtaggggtgaacctaacgtttgtgaacagaataaactgtcctgagtgtagagtgtgcaactgtgaacctgatgactattgccccattttctaagatgataatctacaatccaatgatgtaatgctagaattcagtaacgagtggtcttcaggatggcttgtctttcttcgagctggcttattttgaaggttgttgccggcctatcatgttgtggacatcgcatggattatcctgtagtgaaagagtcaggttgatatgcagtaatcccctgttttgatgttgtagttaactcgtgttgtgctgattattggtattgcacttgcagctgggaagttgcctgtgggtattggagcagcggca

SEQ ID NO: 114213 - DNA, 717 bp, Physcomitrella patens
  Intron number 1 from transcript Pp1s22_276V6.1 (locus Pp1s 22_276V6) derived from phytozome v7.0 (chr-ID scaffold_22; pos 1646488 to 1647204 reverse strand)
gggctgaattcttcgattgtgagctgctggtgattgtctctctgttactctcatttatgtatcttcgggttggttacgccgttatcttttcaacgtgctgctgtttgtacttcgccgtcacttttgaatgtgtgttagtgtgtcctcatctttgcgcaacctgtgtggtggtgcaacaacttgtgagcttcctttttcttttgcgaccaacacttctgggtctttctgtgcttgctgcgaacatctgaggttctgggtattgaagttgaattaagggggtttttttctttttggaagttaatctttatgcttgtgcttgacctactgggtttataggtttgcggttgtgcacttcttttatccctttggttctgtgtcattttatttccaaattcagcttcctggacttttactttttgtttggataattgtctttgagcaatagggcttgctcaaattttgtacgaacgtgctgcatatgtgttgttgtgtagtagatttcatgaaggacattcatgaaggatatcgtgagaaagaggataaatttcaaggaacatattctggaaggagtaaattggagattcatttcttgctagttagctctaaaggcagattcgtgtgtgcttttacttaactagggtttttagatgaccacattattcacctcaagtcttcgtatcaatggacctgttttcgtgtgcagatccttgcggattg

SEQ ID NO: 114214 - DNA, 727 bp, Physcomitrella patens
  Intron number 1 from transcript Pp1s213_21V6.1 (locus Pp1s 213_21V6) derived from phytozome v7.0 (chr-ID scaffold_213 ; pos 158655 to 159381)
gctgcacatacggcgagcctcggtgcttggatgttagtacctttgcaagtcatggagtgagttaggatttgatcagcgcatgctggccattgaatcaggatagttgcgttcgtggagggaggtaacattggctgatgtagagaacgagagtgggggaggagtggtagaaaaggggagcgatacgagcggaacacgattgtgcacatgcgcaggggacgaggaaagaatgtaggcgaggtggaacttggcggctccaagagtgtggaacctaatttagtgcagttgtaggcgtgcctcacttgatttttttttttttttttttttttttttttttttttctgtatgctgtgagcgttgagtattcttgagaccgaatttatagtaggccggggaggacttttattagtagtaatagtacttgttctgtgctctgtcagagtcgtcttgtttggctgtttttgattgtgtggaggagaagcacttgtccactatgatagcgctatttagaatgctacagccagaattggtcagtgattagctcgttggctggtaatcaagttactttgtgttcgatgttgtaattctccagccagagagagtgagagagttggcggagattattcgcgctattagctccgttatcttcatacggattattgtttcaggaaatgatcatcacctcgtgtttgcagtcaggacacagcggcttgtagctccattttggaag

SEQ ID NO: 114215 - DNA, 585 bp, Physcomitrella patens
  Intron number 2 from transcript Pp1s213_21V6.1 (locus Pp1s 213_21V6) derived from phytozome v7.0 (chr-ID scaffold_213 ; pos 160026 to 160610)
gactttcttccaaagcccctgtcttgaaagtaagtttcctcgacttttgagtattcaaactagtgtgaattgtttcctagttttaatttagtagtgtcgataataattcttgattttgaatgtttttcttgtccgtaaatgacgagatcagcagttgaatacagatgatgtagctagccttcttaattatgggatttgttttaactttttgttctgatcaggcaccacagtactgttatggacatctcgttctgtcgcttgttttgaagcatgacctaatgtttaggttgccctgatcagagaaagtatcatttttgccgctgagatttattttctgtgttcgtacgatactgagtagtattcttctttttgccaatgatttttttttcttagctcgctaatcttgtttttttagttggaagcatcatgatcatgtcttaatttagtagcggatagaacaaggttaggaacttgaagcggaattaccagcacaccaatctttgctcttgaacagaatgaagtcttatctatgcgctggaattttctgcaggttcgtgattggtacgtggattcttttacggacct

SEQ ID NO: 114216 - DNA, 877 bp, Physcomitrella patens
  Intron number 2 from transcript Pp1s176_108V6.1 (locus Pp1 s176_108V6) derived from phytozome v7.0 (chr-ID scaffold_1 76; pos 728214 to 729090 reverse strand)
actccaggctcgttttcgacatcttccacattgcggtgagacttccagattggatgaattgttggattggacgactaattgagttggataaagttaggttaggaatttgatctagccatgtggatgaacaacttgaatgaatactcaggtatgggtgaattcttattgttagatgacatctcatttatggatgaagttttgtataaagaggaatacttgtcaatggatgagaatatctaaattgagtgatgatggaggaatgattttttatttatttattttggttgcttgcaataattgcaattcattggatattaaaatttggtgaattattgcatggttgaataagctaccattagggtggtaatatttatcttgcaagaatctaatctagtttttcataagtcaaatactaatatttgatgtgtgcattttctcataagttaaatattaatatttgatgcttgtatcttctataggtgacaaggccattttctagtactaaatttgaacatcctaaagcactgttttccaattcttctttgaattatggctaggttggatcctacaactcatatttcagaatcaatgttgccaaatgttgatggtgtgggtaatgctcttcccactacaaaatcaatatgtcttgagttcaaaatggttttgataccttggttgcattattgtgcttcttttataatataggtagtgtatttccctataggcatgtttttggttttttctagttgtaagtaatgttgtgctagtctttacaatgtctttttgattgtattgacaaccatataatttaatattggtccatggttgtgaaatacatgtagatcatactcttggtggagttgtatcaagcaaatat

SEQ ID NO: 114217 - DNA, 858 bp, Physcomitrella patens
  Intron number 1 from transcript Pp1s28_112V6.2 (locus Pp1s 28_112V6) derived from phytozome v7.0 (chr-ID scaffold_28; pos 704519 to 705376 reverse strand)
agtgttagttgcgtggagaggtgcgatcttctcgggtgaggatctcgggggctttgtgtccgttgggattcctggaatgtgtcggggtgtcgggacaatgtggagggttttgttggtgctgtgtggattgtgaattttcttagaattgtgaggatgcagtgcgtcattaggttgttgttgtttaacttgtgaggggttgtgagaactctagtttgttgaggacgactaacgatgtagttttcatgcttacgctcttttagcgatgcgttgagacgggtggatcactgccgtcattgcagtttgtgtcagaaagagattgtctggtaatgaattgggtgcttcttgtctggctatatgcaagagttttgtgtgcgtgtatcaaattgtacgtaattatgactttgctatgtaattggtattcttaacgatccacgagcagattaatttcagtcaagtgtattgttttgtcagtcaacacaatcgttcgttgctatcaaattgcaattgcgctccctagatgcaagttctgctctttggggtcttttcgggatcgtcttcttgtggttattcgtgtctgacttctgcctcgaccttggccttggatattagttgcaaacgcttcaattgagtcggttatttaattaagcggtcgcacatctacatgcaactgtcttttttccgacatttgctattacagatttagcactagaattcgcgctttgactcttttccaacatttactcagctgtctattttcttgccaagtccagtcctagttttgttcgatttcccaataatgatctgacgggattacgtgatacagttcgtgaaggggataaattctttaataaaagttaa

SEQ ID NO: 114218 - DNA, 875 bp, Physcomitrella patens
  Intron number 2 from transcript Pp1s51_262V6.1 (locus Pp1s 51_262V6) derived from phytozome v7.0 (chr-ID scaffold_51; pos 1598341 to 1599215)
gttttgtgagtattctgttgtcatcagtccctctgtctcatattactttttggaccttgtttctggtgcgatgattagttgagccctttgtctcgtcgaagagctagtctgccggttgcttgtcgaatctgatgcacgaactcaacaacgagcaggtgaatgggttcagttgatacgcatcgtctgggtggactgcaaccttgtgagacaacgctacgaggattgtttaaacaaatagttttttttgatgttatttttggttttcagaggatggttcgcgctggtttaaaatcaagtgagaggtattgttatcgctaggtcatcatttaggtctcattttctttcaggtctacatatggtaccagaagttcgatctgagttcgcactcaaccctttgtttgtctctaagcttgaactgatcgtcaaccggagacgtccattttatgaaatgcaggagagttcacacagtgtttcagcccagactagtgttggcagtgtggattgtggacttacaagttcgctctgaattaaactcgtgtgactgttggtgacccgcatttttttgattatgcatcttctagctacacttttacgacttaacgtttgcaagaacttattttcgatggactaaggtctgggagcgtcatttgattattcagaacatttgcgaaaccaaagtttttttcagattcttcacgttcgaacgaacaattaattatcgcagctctagtcatatcagtgagaatcgatcaagcgttcgacctctactgaacgtctaatcaaacaatcttaatggtttcaacagcagttttgaaggtgtgttgttcctggaatgactgagataaggtgtgtgtgtgtgcaggttaccttccggg

SEQ ID NO: 114219 - DNA, 726 bp, Physcomitrella patens
  Intron number 2 from transcript Pp1s187_53V6.1 (locus Pp1s 187_53V6) derived from phytozome v7.0 (chr-ID scaffold_187 ; pos 339891 to 340616)
ggtatgctctcatggatgtagttctctttgtctacccgtttagaatgtgcgttggctgggtacatacagcaacgtttaccaaggaagtcgtgtctattgttgtttgcttgtctagtgattaccgggaacaattaatcaaacgactctgaagttatttgaagacatacgtgggatttttgctgagaatgtcgcttttctatgcaatcttttgaattgccgccttcccctgcgcctcattttaatatatgcttagctcatgtgctttatttcttaattggttctgattcttcttttgtttaaatgtagcactatttattatgagtaattgtttgtgaaggccttggctgagaagcgttaccatttagtcccaatgaagtgtgtgattgttaaatgcgcatccacaagtcactcctttggtgagggtacctcagctccaaatcaatgcttgctcctttcatgagcttgtgttgacttgtgagctgcaacgtccctcgttcttttgcttacattaagggtagtattggtttttgtttgcattcttaccggtttctgatcgtctatcaatctttgtatcaaggtgcgtcagtcgttggatcaaattgatttctactgtaatttgatagtggagagttgatcataaattgccgcctgagaaatttgaacttgaacaatgacacgggattttaaacatgtgcaggttgtgtgtgataggtttactgccaaccc

SEQ ID NO: 114220 - DNA, 651 bp, Physcomitrella patens
  Intron number 1 from transcript Pp1s22_241V6.2 (locus Pp1s 22_241V6) derived from phytozome v7.0 (chr-ID scaffold_22; pos 1510432 to 1511082)
aggtgagtggtttggattttatggttggtgcggtgaggaatgtcgtgatcacgggttgctcctacactaattttgttgtgtggatgtcggcagtttgttgtgattgtggaacggtggtctgccaagtttgagtgctgaggttgcctccgttgtcttgttcttgtttccacgaggatttgttttgtgtgtttgctgagttgaggtagcgtgtagcattgggagttccagtttcagatgccttgcgtggttgtgagatcttgactgggttttcttgagtgttggaagagcgaagtgttgaattttcgcgcaggctttttttctcttgtggtgtgttgtggtgagttgtctttcgtagcttatggtttcgtgcatcgcgtgtagaattgggtttttgtcggtgagaaaagaggataatctacgaacttttcttagttgaaatttcgggctaggtttatggtttggttacttcaaatgagaagtgcttggcccttttggctgtcgattaggtttggccagcgtcctctgaattgcgctttgaccttcttcgtttgaaggttttcttgcattattatattctcaagacctaattgtgtttgactgatgttgtgaatttcatttcacttgattctaccgctctgcagcgttaccaag

SEQ ID NO: 114221 - DNA, 660 bp, Physcomitrella patens
  Intron number 1 from transcript Pp1s77_164V6.2 (locus Pp1s 77_164V6) derived from phytozome v7.0 (chr-ID scaffold_77; pos 858213 to 858872 reverse strand)
cagtcgcccggccaacgccttacgcgagcgcaaaggcaagcaaagcggcatccccttattcacttattcacttagtggcaatggcagaccttgaaagagtcagtagggataaggaaacagaaagagagagagagagaaaaaaaaagaagcatacttatcaggcacaaagaggcctgaggattcaatatcttgagtgataaaatcgtctgagtttgatatgagcaacgggccaagctttcataaggaagacatttactgtttcaagggagcagggtttggtgttttggatgtcaaaaagaagggtggaattctgttggagaccctatggacgtggtgtgcctgtagttcatcttcggctggaatgctgggggcctactttgatgatttccattcaatcagcgctttgacacgttcatattgagcttctctactttgacgcatttgtcctgggaggaggtatccatatctaaaatttgtaggatgtggctcgcctcttctgcagcgtttgtagtacatatgccgtgtttatgctctgtgtgtgcatgttggcgggggtgtgatgtgtggctctggaaagcgtttgcgtgagagggtatttttgctgatagattacatgggtggtgcgaaccgccaatcacttgttttctctgtgaacagtta

SEQ ID NO: 114222 - DNA, 926 bp, Physcomitrella patens
  Intron number 2 from transcript Pp1s276_13V6.1 (locus Pp1s 276_13V6) derived from phytozome v7.0 (chr-ID scaffold_276 ; pos 82619 to 83544 reverse strand)
tgcgtggtggagcattagtttcaatcttttcttgtgtacgagacttttaccgttactcttcccatagtttccttctttgtctacctctgtgttgttttcaaatgctgttatacgcgatgatgaggttctattttagtgttgggggtttgttttaggtttccgttcatgatttgatcatgccgatttactgtaaagttaatattttgatgttaatctcctctaactttgttttgttttgtgttgtttttgcaaggtttgttatgtttcttttcttttcttttcgtttgcagtaccttttatagatagaattgtacaattcaattgccccttgtcgtttcagtattttcaggttaacctctagattgttgaacggttttgaattttgaatcgaaagatgtacagtaaatattttagaagagctttgcagattgagaggacggtatttgttttctgcatgctgagaataaatggttgctccaagtcatggggattgactagccagggtcgattgtgtgattgtacagaggtgctatgccagaccaggcgattctcccaccttgcacctttttgagagttggccaggtagatacacgtatgctgtattagagaaatggtatcgaatatgtactgtctgaacaaaactttatgcgagttagctgcttgtatctgcatgttatcgatggtctttagttttcaaccaagtaatcccgtctctagatttttatgtgtggtgatacttgcttggaaacaagagatttctatgtgatgatacttctaggctagaatcatgtgtgatgatcgagtacaccatgcttggatcacagttgtcttctgatgtcatcaatctaattcccagagacggcagaattaccgcatgatttcatagtgcactattgcttctgttcagtcatttgcaggatcacaga

SEQ ID NO: 114223 - DNA, 679 bp, Physcomitrella patens
  Intron number 1 from transcript Pp1s155_9V6.1 (locus Pp1s1 55_9V6) derived from phytozome v7.0 (chr-ID scaffold_155; pos 33508 to 34186)
atttgattggctcttgcttggtcgccatagctgcggtatgtttccctttcttgttttctagtaatttgtgtcctggccttcaattttttcatccagccttggttttgtctgctgtacccgtagttctttttttccttccgaagagagccagaaatgtattaatacgaaacaatagaggcttgatttgctcaaagaacaccaacctccaccgaacgtgtggtagtcaaaatgcttcgtggaaacacgattcataacaaccgggctcccagactctccgaccgaacagatgtacgtgatgtggaatagaatgcacgctcaatatgtttcgtaaatgcaagaattctgggacttgcttctcccgtctctctacaaattgcatattgaccttgcagtatggaccatctatctttgtgaatgtgtggtgattctgaattgggcgatttaagggagtaagcaaagcatattgaaaatggattctatcttaaagcttcattgttttctaccccgctgtggtcgtgattgagagtcttttgcgaagttagtatccttgaggcggcaagaaagcacaacatagatcaaactgcttgactagttgaagaattggtattatattccttgactgaattggttcattgctgctgcaggttggctctatatttgagtatttcaaccagaatcc

SEQ ID NO: 114224 - DNA, 781 bp, Physcomitrella patens
  Intron number 2 from transcript Pp1s15_279V6.1 (locus Pp1s 15_279V6) derived from phytozome v7.0 (chr-ID scaffold_15; pos 1575975 to 1576755 reverse strand)
acggtaattcactgttgcatgacaatttatgagatcaaatcagtgccgttggttacaatgccgttttgctttcattacctgtgtgctgatcttaagtgattctgttctctctctgtctgtctcagagatgggtttttggttagatttcctcatgtatgtctccgagctggacctgcattagtcctattcataatacacgctattcggaaacatgtgatctgtgttgcattctgtcggaattgatcctggaatgggagtgaatggaatgcgaccttacaactgcatatgagttctttccactggcatttgttcacgcttgggggtctgatgtcagttatactgtcaatgactatcagtttgttttttgtacgagaaggctgcgtaatttggatttatctaattaccacttctttaaggcattgtgtgggaccttgtttgtatgtggttatccctgtttctagttcgcccactcaaagagtattggctggaatacactgcctcttcggttgcaggtttttaggttcattgagaatattcgtttcggtgcctttgttaattgaaggaggcgggaagagttctgtttttttctttttcttttttcttttgctagcaatacccgtaattcttcacgaagttatttctcggtaaagcttccttgtgttcatctcttgatacaggtttattttgttttgtcatatcttaatctattttctttattctcattctgagttgaattgttaatgtagtggttgcggaggatttggaatcggaaagcgaggag

SEQ ID NO: 114225 - DNA, 900 bp, Physcomitrella patens
  Intron number 1 from transcript Pp1s69_191V6.1 (locus Pp1s 69_191V6) derived from phytozome v7.0 (chr-ID scaffold_69; pos 1289975 to 1290874)
aagttctctccgcgtaagtcttgaatgcctgaatttgtgtttcaacgcggtcactggagagtgattagagcccgaatggacttgaaacctaggtgcttgtgctcgataaactggttgcctcgtcctccggaaacattgttcgattctgtgagttttttgtagggtatgtcttctttcttcgactggctacgcgttcggtactcgttgcatggcgggaaagttcttatgccgatgtttaagtgtcgacggttgaccccttgattcgtagttgaaaggtcgtgtttagatttaatattgtagtacacgtcctcacagacgaagcagttttgaggtgatgaaggtaatgttgattctgtttcgttggctagaattaagccctaatgcggaagagctactttagggtttagctgccgtcgtggattgttacgaaatttttcatgcaagttccctgtttgtcattccggtttggcttgagggttctgggtttttgtttccggtatcgattgcatttatccctgacctagatattcttcgtttgattatgatagtaattcttgtatacccatttactaaaaggtgatgtgaatgtgttatgaagacctggttgcgagcgtgtatgcgtatgttcaacgccggaattgaccttcatgactgcactgttgattagatttggattgattgataccgtacttgacctgggtggtaacaatgcaactcccggagttccatgattttttgctgttttggaacctgcgttgcatctttttaactttatcttcgttgaagatgctgtttattggtgcatcatgacatcccaactttattggctttacaactgcatagatttccttgtcttaatgtgcaggtgtgagcagctctagacgcaagtcgcggaaggca

SEQ ID NO: 114226 - DNA, 912 bp, Physcomitrella patens
  Intron number 1 from transcript Pp1s212_26V6.1 (locus Pp1s 212_26V6) derived from phytozome v7.0 (chr-ID scaffold_212 ; pos 128510 to 129421 reverse strand)
agctaaataatccgcctcagaccgaccggcttcaggtttgttgacaatctcttgcgttgtgggtggtgggtttgggttttcgctaagttgggtggaagtgagggtgttggggaggatctggagatgacctcactgagaggtaaagtagcgggaatggctgatcgttgtgttttacagaggtcgagattgtggttttcacttcacattcttcgtgaagttccattttttattacattgtggatgcgatggccttttgttttgttttgcttcgttttctttttccttttttttttttttttttttttttttttttggtttgttttgttttgttttgcgttgtggaattcttggtgtgcagaggtgtcggagttggggtctaaggtctggttactttcgtaatgaacgtcaagaatgtgctgccagtacttgcttaactgcttttggtctgtcaagagtttcatctttaggatttggcttttgtatagcttttttcttcccatgtgttgtgctggttatcatagtaagcgtgttggtttgttgaattgtccatcttttgagtgatgcgtggttttgtccagttgccgttgtgttttttagtatcgtgttttttgttttgtgatggctgtcgagtggatgcagcattcttcatagcgttgcacatctttatcaagctggacaagtgaggacaaaaacgcggttgtatttttatatatgtgatcgtccaggaggactctgtcatatgataggagatatgtcgaatcattttattttcattactaatcatgccctgtaaaaacggacgggcgtgcgtgttattacttgttcttgactgcgtcgttgacttggagcgtatgcggcttttaattttccttcctgtgaattatttgtcccatcgtagagctcccgagcaag

SEQ ID NO: 114227 - DNA, 741 bp, Physcomitrella patens
  Intron number 1 from transcript Pp1s15_317V6.1 (locus Pp1s 15_317V6) derived from phytozome v7.0 (chr-ID scaffold_15; pos 1790386 to 1791126)
ctccatcgctcgccgcctactcatcgtcacgtcaggtgtgtgtgtgtgtgtgtgcttgcttgctcaattcagtaatggccagtttgattttctgtgttcatgatcctgctgcttgttttcttttcttttcttttctttgttttttcttcttctaataaggccttttggcgcatgtctccatctcccgtagagccgaattatgacaatttggattctctaccattcgcttgcttatgcgaatgaaaattcgtgtattgtaaatggatttcgttgcttgtttttgtccagtagcttcatgccagggagtgcttcgattctcaatcctcgagttccaatcaatctaactcgagttcacactggattctaattatgagctttccggctcgatttagatgagcaggatacaatttatgagtgaaacttgtaattttttgattgctgtcaagcaggcagtttatgttgatttactaaaatgatgatggattataactctcgcatcggacatgtcaatctctaatcaattttgaatagcatttctagaatggtcaaaaatcgaacagcagcatcacgacatttacaactttggcgaaatcaaagtgcagttagttcacgactttgagtattcaatggaagttgaatcggtctttgcaaaattcaaggttgttttttgaattgcatgtcttcagcaattttttaataagaataatacatgatattttcgtggttgagtttttggcagac

SEQ ID NO: 114228 - DNA, 610 bp, Physcomitrella patens
  Intron number 1 from transcript Pp1s159_27V6.1 (locus Pp1s 159_27V6) derived from phytozome v7.0 (chr-ID scaffold_159 ; pos 173901 to 174510 reverse strand)
catccgagccgcggggcgttgactggggattcttggtgggctctctgacccagcccgcggagctgcctttggcgctctgtgcggagtctctgtgaacatcttttgtgttgttgaggtggcatgttgagtgctgttgcctttaggttaatttttttttgaatgtgtgctgaggcctcgtgcctgtgcaggcagtttagggttatttccgttttcctgagcaactctgaggcgtttaggttattgatggtgtgcttggtgttactgatcagttctgggtagccgtgagaggaaccgaagtcacctagagggttgggttttggttagatgatgaggttgtgtgtatgaggagcgattagtgcacttgcaggttttattgagggaagagaggctcgtagaaattcgctactttgctcattagaagggaatagaaagaaatcagtggtttgttgacgatgttttcccacccatgcaagtagtaatgtgtcgtagtttgcgagctgagttgagcagtgtgattcttgaggctcgtctttatgggttttgttgatcatacctctgagtaacatcgggagattaattgttgtcaggttggttaagtttcgcttccact

SEQ ID NO: 114229 - DNA, 639 bp, Physcomitrella patens
  Intron number 1 from transcript Pp1s190_72V6.1 (locus Pp1s 190_72V6) derived from phytozome v7.0 (chr-ID scaffold_190 ; pos 570012 to 570650)
cgagtcgcaacaagacattgatcatcaattcgaaggtgagagctatggtgtggttagatgcgctgttttgaattgcatgattggaatcgacgttgagtgggttgcggaattagagagcgggtctcaattttgttttttttctttttcgagctggaaacctcttcgtgcgtggtttaatcttgggtttttgaactcttgcattctgttgtgaatgtgacgaaaccctttgcgctatgcttgtttcctattcgccacttcactttgccgaattcagcattcgtgggcgacggtgatctaggacttgctctgtgtgtccagtcgtgttgtattcgttagaatgttcgaattttgtagcttacaggatggggtttttgccttttacggagtctctcgcattttggtttgtagttcttgcttcgagcgattctctgacggctacattttctattgagtaaggaagttatgtaaattgaatttccgaagtcttggaatttgagggtttttgagactgggatttttgtgctccaatgaattgcttcacatccaaagaaaatatttaatggtctataagtttagtctggagattttgtattgtctcattttgtgctctctatgtttgcttgtttcaggaacctttca

SEQ ID NO: 114230 - DNA, 480 bp, Physcomitrella patens
  Intron number 1 from transcript Pp1s173_2V6.1 (locus Pp1s1 73_2V6) derived from phytozome v7.0 (chr-ID scaffold_173; pos 4677 to 5156)
agcgactctattaaggtagtctaattggaattcctgcacggacaacctagttttttggactgttgtgttgctttgtatttgctcatgagttcgaagtgtccgatattagtaatgttctaactttcttggcaattgataaaattcatcagaaaggtcctaaagatcgatcaagtatgtgatgttacatttatcgcaagtaatccagaaaattcgagatagtctgaaatgtattaaatgcctctctccaacaataagtatttgtattatatcatacacacagatcagtctgtctacgattgatttgtctgcctgagcctcttacaaaatagttttctttagatcctttgatttctttagctacagtttctaattaagcgcagctcgttaaattccactgattttgaatcccatatgaccgttttttttaaatcttgttttagagtcgtgctgctgctgatgttctctgggtgcacagctatt

SEQ ID NO: 114231 - DNA, 565 bp, Physcomitrella patens
  Intron number 1 from transcript Pp1s269_93V6.1 (locus Pp1s 269_93V6) derived from phytozome v7.0 (chr-ID scaffold_269 ; pos 593135 to 593699 reverse strand)
atcgcttcggcgtcagactcgttaaggctcctctggtactactatgttattttaattttctctatctttagttcctcagggttttgatagggttttctggtttattgtgtggacattttcggctacggaatatcttattcttcttcgtcttttacatgtgcgtgtgtgcgtgtttgtgtgtgtgtgtgtgtatgtgcgtatatatatttgggggatattctatagcgaacttcagatggatttcctgttttttcattcctcgatgagaatggcgagagtctaataattgttcagacaacctatgatttaaaatttggatgacagaagagccacgaaattctgtggcatctcagactctttttgctgctgttgcaatgaattttcatgtgactagcaagtattttgaattaaaatttctgttgcttacatatttgatgctgtatgtctcacatgtatgtgcacatctctctcgatagccataagaaagattttctgcttgacacagacgaactgacggagtgttatcataggtggtgaaattggacaagaggaagtgggtggaatc

SEQ ID NO: 114232 - DNA, 719 bp, Physcomitrella patens
  Intron number 1 from transcript Pp1s226_63V6.1 (locus Pp1s 226_63V6) derived from phytozome v7.0 (chr-ID scaffold_226 ; pos 327521 to 328239)
aaggaaggtcgtcaagtttgtagcattgtcaaaaggtgaaatcactctactttcttttgctacatcaattctttagttgtcttgtttgcagtacacagtctagttgtgtttagaactagtcacggaaacggatagtaacgttgctgattagtaaataatttatactttaatttaagtagaatctccatattagagacatagatatttgatgtttggtggttggacgatagagtttccatctaattttagtattcatgtagtaaaattaaaccaagttcaacatttagatttcaaagcactagttatttttctcttttgatggcctttataatttcttcaaaatatattacaattttgtgggggttttgaatgctaatattgtactaaataaaatgaatagacaaagcattagtgaatatataataattgtagtcttatggactttgtcttctatactaaacaaataacataaataaaagagtccacaattgaataagaaactcaataacaaagtttttttttgttggaagatagttgagtatgagattgtaatgccttgtttgtgcttttgtaactaatcttattttaataaaattataggtcgaaagtaattgtgaatgatgtatgtgaatttaatttaagttgtttgcatgtagatggataatgcaatgtgcatgtgcatgtgcaggtgatatatttgtgataatttctttaaaaaa

SEQ ID NO: 114233 - DNA, 693 bp, Physcomitrella patens
  Intron number 1 from transcript Pp1s191_74V6.1 (locus Pp1s 191_74V6) derived from phytozome v7.0 (chr-ID scaffold_191 ; pos 432256 to 432948)
gctacattcaaccgaaagtgagtgggttcagtagtttttgcgattgcatttagccacaatttctttttccttttttcctgatatcattattactgttctctggttttttgtatttgcggcagattttgagcaaccctaaaatcgtgcatgacaactattttgaatgccaagatagccgagaaggcatttcgagcgcttaattttgttgtgtaacaatgatcctcaggattttatggcaatgtctcgtgctgacctttttctggctcgtcaacattaccatctcttattgtctcgtaacgtgtttgacattcaatcgaattggggtttccttagggtttactagggttattagaattcacatgtttccgttcatattcactgtaatcggacgtgaggagttgacgctataagaattgaccagttcataaaaattagggttaatttttttctgtttttagctcaagtaggtggaagttgagctttattaatacattagatttcgactacctggtgttgtcaacgagcagtagagtttaagtctatctggtgcttagaggtggttatatttcatacaagttttcgttaagccagtagtcaaggaagagataattatgcaagcagattgctttctaaacgttgcacacgctgacttcaaacttcaaacctttctgacatgcatgcagtaagccgcac

SEQ ID NO: 114234 - DNA, 818 bp, Physcomitrella patens
  Intron number 2 from transcript Pp1s252_40V6.1 (locus Pp1s 252_40V6) derived from phytozome v7.0 (chr-ID scaffold_252 ; pos 250183 to 251000)
ccccctgagttccggaccgcagactgcctgagcaggtaagttggaaaagtatttagttgtaaaattccttttttttgagggagggggtaagagggttttgcagtacttttcttattcctgctaatgaagcttgaacagcgacgcagaattttagtgatgcatagtgagagcaaacctaatcccacgtagcgatcaactcacatacaggcatgaaagaatgatcttttaaaacagcgcaatactgaccataataggaattttagcagtttaataactgcgtttgcctcgcgaagtactcgttgaaatgacctagatgacaaactctgctgcaataggatcagtaatgtattgctttagagtgcacgtgaaatggcttgtgtgaacgcagagatttcactagatttttgaatggctgcacttcattggatctgcggaaaaacatgaataggtgctaaaagagttgtagttgggcgaatacaatagactaagagactctagttttgaatgtttgaaaatctgtgcagcaccataatcttagttctctttataagattaatgctttggaatacatacatatgagctttgccagcttagaatcatctcgtatcatgcagaccagatgaatcggcgtttgagcccttgaatgctttgttacatttgtttctcctcttcattactaagtttgttaactatgtcctcggggattcctatcctgcaaagatcaatatcgcagttgaattaatactaagcttatcagttgcagccttttgttgatggtggcaggtgtggccacggagacttcctgtcggcttgcgtag

SEQ ID NO: 114235 - DNA, 752 bp, Physcomitrella patens
  Intron number 2 from transcript Pp1s163_84V6.1 (locus Pp1s 163_84V6) derived from phytozome v7.0 (chr-ID scaffold_163 ; pos 632258 to 633009)
ctgtggtcatcacccctagtatagcctgtcaagaggtgagattgacaccctctttgctcaattgtagatttttttccttctcagggctgaatcccagtttttttttttttttttttttttttttccttcttcttcaacttcgagttcgtgtctgtatgaagaagtccacgggttcaatgtgttaagacttaggcatttccttcagctttgcctagtggagatatgcgtattttttgattgtgaggattccggttcttagaccatgattggtttattacagtggtcattcaaatcctatttgatttgagaatgtatttacttcgttgtgttgggagatgattgttccctcgaattctatgcggtagctaccgcttctttcgtaatgaagacctttgaagttcacatagacttcaagaagaatgctatttgtgtttttgtgattgtgtgttcaagtttggtgcagtattgttaaaatttgggtgatgactaagtacactttatgcggcccaagtagtcaagttgagcatttgtaaatgctgaaatgagttaggctgacggtaaatgtctgtggatgtagcctagtgatgtatttgatctcggcataatcttcagtgatcaatacaaataattcaagaaagaggggtcaatgtgttcctgcgagtaccttcgcatgttcaacgtgaactgaattatgttaattaagctgagcaacatagaccttcttgctgttgacagagttcaaattcggtaat

SEQ ID NO: 114236 - DNA, 842 bp, Physcomitrella patens
  Intron number 1 from transcript Pp1s257_12V6.1 (locus Pp1s 257_12V6) derived from phytozome v7.0 (chr-ID scaffold_257 ; pos 62518 to 63359 reverse strand)
cagccagcccgcaaaccgcttctcatttcgagcaggtaagagcacacacagtttcgaagccttttgcactcttaatgttccggacagctctgagtctctagccagccatttccactatcttcttgtggtgtgtgaccacacaaaccgaatttcgtgaaatgtgtatatatattgtctgaatctggatcgaatggatggtcgagagctttggagtggaggcgatttctgagcagcctggaatttgtcgtttgaagaggttgttggaagaatgtatcggtgtcgtcgtttgaattttcgttctgtgttgggttttttttggcaaattggaatgtgaacccttgatggcttagctggcctcgttctacctgaagggttataagctgacagttgtgatagattgtgttatatgtcctgctcatctaatgtaattattataacgttcgtgactattttaggtggttatgtggctcattagggtgtcgagaagcctttgcatttatacatcaggtgctgggtttatgtcttgatctaagtcagcaataagatgcagactaaagaatattatacagtttcatagtgcggttgtttcgctaagattttgtatctttgaactctagctctatatcccctgaggtttgaataggggtggttagatggttcgcagaaacgatttgaagcgaagattagctcggtattagacttaaagaaattaaggatagagaatatggatgttacgtatgttcagtactaggtatggtttaaagctttaatacgactttgagactgacggttaagttaacgaggaatttggtggtgtgaaaagagggagaaagaagcactga

SEQ ID NO: 114237 - DNA, 661 bp, Physcomitrella patens
  Intron number 2 from transcript Pp1s49_175V6.2 (locus Pp1s 49_175V6) derived from phytozome v7.0 (chr-ID scaffold_49; pos 1478826 to 1479486 reverse strand)
cagaaagttgacaccgctaaggtatcgtctcgtcttcagagtctcaatttctttcaaatgcggtggtatatacttaaatctgctaaattgtggtacgcgttccactgtaaaaagatgaaattttgtaatagccatggtattaacttccttcgtgtagcaaattcgatattcatgcccttgcaaccaaaattcatccatagctgtctcttagtcgattcgtatatctagatattgtgataaagcaacctgtaaatttagacccagtcgacgtctatcttatatcgtctccgtattgctcatatatatcataatctactagaattcagctgattatcccgtatagaaacctcgtaattccttccttttaatccccattaccaaattcaaattagattttgcccctgctgctagatgagtgtaaaggttaatcttagttcgttttgtattgttagtgagatggcagagtatgaacatctcgaagtgactcgtatatgaagttagctttcggcaaagtttggtgttcgaaattgaaattaagagcaatggtatttttctgacaagcagaagagttgtggcacttatcatgacaaagcagaacatcatatatgttcattgcaaaggagctcatcggtttcatcttggtttcaataggtgactccca

SEQ ID NO: 114238 - DNA, 929 bp, Physcomitrella patens
  Intron number 1 from transcript Pp1s210_47V6.1 (locus Pp1s 210_47V6) derived from phytozome v7.0 (chr-ID scaffold_210 ; pos 293108 to 294036)
tcatcacagttgctcctgatttccaggtctttctttacttttgtctttcttgtcggtgattgggtggttttggttttgttttttgttttgttttgtctttttttttttttttttttttttttttggtgatgctgcttttgtcgaaaaaatgggcttcttgttggaggcgatggcaatagtgggagattttgtgtgtcttcattgctgcaattacaagattgtcgtttgccacactctctgtccacgtcaattttgaggtttgtcattgttatcactgcttattttatacttggtgggatttcttgcccaatcacctcgactgtgcaatgcatttcaacgaagtatcatgcattgcaacattatgaattgagatgaaatttgtcaatctttgtttcaaggattgatagttcgaagtgtgagtttaataataacatccaagtcctttttttatggagctttcgacgtagaaaattcaaacattgtcgcaaaactcttcattggttccgcgtagtcacaatggtctgcattggacacatcaggtctcatacggcccggccctgtagtgcgaaggccgggtatttgcgggatatatgatatgattttgtgtcgtagtcagaagagttttgatcctaatcgggattctaacctctgaattgagtgcaagcttgctggatttcaagtcagaatttaattcccagacttcatgtctccggcgagttcagttcgcgacataagaagtggggtggaactactgtttgaagtgcatcacggttgtttgtggcttttgcgactgcaccgagtgtccctcgtactttacacatgcgactgtattttttgaactggattgcacgattttattggaactggttgtcgttgattattgatttactcgtgctgctacagctagtggagcccctcaccggcaaaac

SEQ ID NO: 114239 - DNA, 620 bp, Physcomitrella patens
  Intron number 1 from transcript Pp1s146_99V6.1 (locus Pp1s 146_99V6) derived from phytozome v7.0 (chr-ID scaffold_146 ; pos 808279 to 808898)
ggcagaccgttcattgaaaggtatttctggacttgatttaaatttttttcctctgtttttggatcatttccatgtccgcggagtggttttcactagaaatcatcccgttcttggtttaggataagaattcagttagaccatacatcgaactgctgcaaggaatttggtgtcacggaaaaactccacgatgatcgaaaatagcgtcagtgataacaagaactcgactccgtgtagatgggaatcaatccaccgttgcagtgctgacaatgggcgggaaaattatttgcccacacatttactgttaaagttaggattattttattttattttattttatattttttttctcgtttggtatcccatacgaaacacgacaacagaaaagacaatcatgttgtgtatgcaagcttgtcatgattgcattatatccggcatttgagtctatgaattcctggagatttccgttgatgacaatgtagagttggaaaatttaatgcgacgcctcgattaaagagtatacgtcccactatcttttaccatggatgaattaactcgtgttctcatatctcgatgctacaatggcagatcacaaaaggccgctgagcaataaaggtcgttta

SEQ ID NO: 114240 - DNA, 959 bp, Physcomitrella patens
  Intron number 1 from transcript Pp1s241_33V6.1 (locus Pp1s 241_33V6) derived from phytozome v7.0 (chr-ID scaffold_241 ; pos 99352 to 100310)
cctctctcaagacgcttccgctctcagccggacaggtgagatcaaggctcgcttgtataggtggtgtcttcacttgtgattgttgtcgtgatgtggagtttgcggtctgtgtcggttttggattgtgtggatgtgcaatgggagtgtttatttctgggattttgtgccacaggattgtttttttcttttcttctgggattgcgtgttattggaggtgatttttttgtggtggatgtggggggtgtcacggttgtagtatgggaaggtacattgggcgtgggttatgtttgggacgagttttatcgggatgttgatgctgcggagtctgatggttttcctgttgctcggtttgttctttagttagaatgagggaatcttgtagatggactgtaggtaatgcttgttctaggatacacttctaagacatccacaattacctgtcgtgtctgtttatcgttccgtcgtgctttcaacgagcagctctgaaacatacaggagcatgattggctctagtcgagtggacggtgaagggtatctgaccaacttgccatcaacttaatcgttgtgtgtattatggttcaaattgtgaacgtctgagtctcggatgtctcgctgtaggtagcttgtaagctcctgaagtgcttacacattgaatagccggagtcggcgcgtgattgagtactgtcgctggtcgacggtgcggtgcaatgtgtctttctgttcttgacgtccgtaagatagatggttcgtttgttcaatagcgtgctatgcttttcggaatcacatcggcattccataggggaagtagttccacacttttttgagtcgtggtgtgttggttgtctgtcatgtgatgtatacccgtcatcttgtttacctcccagcacgcagacctcaacattgatatcttggtttacttgacaggtatctggtattaaagtttccggttctctcagctg

SEQ ID NO: 114241 - DNA, 942 bp, Physcomitrella patens
  Intron number 1 from transcript Pp1s309_30V6.1 (locus Pp1s 309_30V6) derived from phytozome v7.0 (chr-ID scaffold_309 ; pos 142006 to 142947 reverse strand)
cagcaagcaagcaagcatccatcacactctccaaggtcacaattgaactcttcttttgttgttggtggtgttgttggtgttgttgttgcatgagatgagtgaaaaagctctgaggttttaagttcatgatatggtgtgagtttccaagttggtatgaacccttttgtcctttctcctacatggacaccaacaaacagctgtaaaatgcaaaaactgtaccaagtatttttatttcagtaatctctaatccaataatttcttttcagcaacaaggaagaaatgatataaagaaggagagaacaagagatgggagttctccattttgattgtactgatttggctgcaaataatgagtggcttcatgcagtcctgacaaacggtgtcaaaaacctgtctgtcaaacacttgtccaaatgcggttcacaatcttgcattcaaccaaagaaaagaagacagaaatgatgaaagaaagaaacaaaaaaaatggttagtgggtcttggtgtaattgggttatatttactaaaccctaaacctgcatgacaaggggggaaacaccaacaaccctgctgtgagtccagtaagtgtacccactaaagaagagaaaagaagaagaggagcccccaccaccattgtgatcatttgaaatggtccatccatcacacacacaccagaaacaacaattgatggatggattgcccctgtttgcctacttctcagactcttttgtagcaccccaatcacatctcacttctgtctgtcacttgtgtcatatctccactgtttcatacccgcccactatttgatacccctgagtttgttttcttttgaaacttggctctgaatttgtctgtttgattgatggtcgattgattgtccagtaactactactactctcccaatggtgggtatctgacacatttttattctagacgagggcagcg

SEQ ID NO: 114242 - DNA, 691 bp, Physcomitrella patens
  Intron number 1 from transcript Pp1s223_15V6.1 (locus Pp1s 223_15V6) derived from phytozome v7.0 (chr-ID scaffold_223 ; pos 105318 to 106008)
ggggtgagtttattataatcttctctgagagttgcattcgtctgactttcttgagggttgtttgtacacaaagattaattttacttgcacattcttaagataacctagttcgggagttcaagagtagaaccttattcactaccgttttcatggaaaacaatgcattgcctacacaggcttcgttgtcgtgctatcctactatttgaatttaaaggtcgctgcattgagttccatttggatcgtaacatgatcctctttctttcgtctttcgacggttggctgaagcatattgtctgcagcgaaggagacatcttcactgtataggattttcaacagtaacttttaaaaaacaaaaggtccccactccatatctcggattcgatgatatcgctgctgaacattggaatccagatcgaatgagttgatggctaaatgcgtttaacttgtttatggcagtgtttcacgtctagtccaggtgatgaggggcttactgtactaaatacggttattttataggaaatgtctgctcctgaaggctctcatggatcattactattagcgtgctctcatttaggcacgtagatgtgtttgagttgccttttagatcaatttttttgaattgaatgtgtgagttgtcgttggtattcatttggtagcggtaagcttgaacggagacgcttccagcggtgga

SEQ ID NO: 114243 - DNA, 1063 bp, Physcomitrella patens
  Intron number 1 from transcript Pp1s131_40V6.1 (locus Pp1s 131_40V6) derived from phytozome v7.0 (chr-ID scaffold_131 ; pos 174294 to 175356)
tgccacacttgactgattggctgtctggattaccggtgagaatttaggtgccgtgtaatgtgtattgtgaagtgtaatattagttcattttttttgttttattttgcttgatcagctgcttgttgtcccatgcggaccacttaggttggttcttgttgtgcaacggtcggcggactatcgttggcttgctgtttcatcgctccctttgagaagttttcagaaataattgtgctgactagaatttttttttgtggctgatattgacgctttagtacgaagccttatggttcttttattgttagcattaatacaccaccttgcgatcgtcgtaagttgttttcgctgtttccagatttggttgttgaagcgaatccgactttgatgcgtaaatgaccaatgtattagattctctctcgtttctcggctcttccctcccccctctccattacagaaaaccttgttgtagcgaaattaattggaaagtggtgttccccgtagttttgaatcgcagtttttaatcaaaattttggtttattgtttggtactggatcgataaatctttttcctgaacttgcaatagtaaagagctttaaatttcacatctatgaacgtcctgagtgaccctgctctcttccacctgcttgaaacatgaaatttttgtgttgagcacgagaacgtccctgcatctgagcacatacccgctttcaaggtatttgtcaagcgggtgcagatatgatgctggtagagatgctgagtctgagagaagggcagtcttgcactgcataattacatgacatgaatggttcagctttcttattttatggcagaaaaactcggagacttttaaatttgagtggaagggcgtttttatcactggctattatattctgggtagacttgacgacaacgttaaattcatcaccatccaaaacaccattttgaagctaattgttgttcttggtatagatcacttttcattttttacacattgtcgtaaaattgatcgaactttttcattatgattgcagacctacccgaatccattgaaatacaaccctgcata

SEQ ID NO: 114244 - DNA, 419 bp, Physcomitrella patens
  Intron number 1 from transcript Pp1s39_322V6.1 (locus Pp1s 39_322V6) derived from phytozome v7.0 (chr-ID scaffold_39; pos 1625068 to 1625486)
cccgattgcctcgtccgcaactcatcccaatttgggtacgtttaggcattatgtagcggctgtcttttgagtgtttgagtagaaggatttcggtttcgtgtttgatggttgtgtagaggtgatctggatcgaaggattggatcgtggagggttgtttttgattgtgggtcttgtcgtcaaggctgtttgacggaccccattttgtgttttttttttcttcagctacgttgcattttggatccaagtggtggtaattgagtttatgaatgcatcatgggtttgtcaattgttgagaaccttctgtgagtgcttcgatcggatgattaccggcattttccatcttgacgtattgatatcatagtggagattgtatggttttgtcaggcaattgcacgagggtgatcatagttaaggtgctc

SEQ ID NO: 114245 - DNA, 615 bp, Physcomitrella patens
  Intron number 1 from transcript Pp1s53_226V6.1 (locus Pp1s 53_226V6) derived from phytozome v7.0 (chr-ID scaffold_53; pos 1505402 to 1506016)
gagccgacatcagtgattatttctctggctaggtgacgcagttttcaatacctggggactggatcacggtcatttttttttggattgccctggtcgtgtcaatgcgtcagaatttgcgtatggtattttgcacatgctaactctgtggatagaatgcatccttgccattcttctctttacgtgaatcgaaagtggatcgtcggtgtttctagtggctgattttgtctcgaaattagtgaagactggtaaaagagagaatcacaagtgaacgatcgagtcgtttccctggcagtatacttatggaattgttttagctatgtaatgtacagttagtcttgggatctcatcttgtcacagcgtgctgtgtctccaaccttttcattttatgtgggggagatcgagcgattattgtctagtcttattctgtttgtaatattccttccttgaatattggagtgcatccttgcgtggcgttttcgtttgattcttctgtttcgccgattaattttaaatttgaatactaataaaaaataacgtcggtctctacttgaggtgatttattgtaatgtaactctgtgaagctatgcaggaaactagggaggagtgttctgtcga

SEQ ID NO: 114246 - DNA, 278 bp, Physcomitrella patens
  Intron number 1 from transcript Pp1s66_164V6.1 (locus Pp1s 66_164V6) derived from phytozome v7.0 (chr-ID scaffold_66; pos 779464 to 779741)
caatctttcgacaggttagtggaggaggactattttggatatgcataatttttctttaacaaaatgatatcctgaaatgctttccgcgattgtttgatcttcgtttcctgtttgcttgattttttttttaaattgcattttggacgtggttagctttgtaccttattatatgtagactttatatctgctcgtttgtaacgatccaatgtatgtgtttattattcacgcgtaattctttggacaaagctcacgattaattttctcttcattgcagagcc

SEQ ID NO: 114247 - DNA, 933 bp, Physcomitrella patens
  Intron number 1 from transcript Pp1s347_12V6.1 (locus Pp1s 347_12V6) derived from phytozome v7.0 (chr-ID scaffold_347 ; pos 182220 to 183152 reverse strand)
tttcttctgtcttggcagaactcgacgaggcccttgtaagctttgccttatcttcgaacctactccatgagtatgcgaatatttgcgtgatgcggttcgtctactatttttcttgcttctatcttctttctccctctcccgttccagattggcccggctacgacgaagccttgtgtaatattccactcacgatttggaataggataatgtgtagggactagctctgtctaatgctgcgttgttaatacgagggtgtgagacagagcttgccttacgtatgatcccttcactgttaaagaatggaacatattggaagaaaccaaaatgtagctatttcgttatcagtgcacttatacggagcttctttgtgaaggatccttggttcgaatggacttgttcagcttcattgacaccactttaaaattaattttcttggtatgatgtcctagcatctgaagctctggacgatctatgcattctcgccagtatattggcactctcttgacactgtcttgacactcgcgtttctactgcgaaactcaacgcattcaagatatgcagagccataggctagttgtacacatgcagttaacgagtattcaaagcttgtagtcttaaaggcgcacgaatcaacgaatctatgagcgatttcttcaagtagctgtcttactgcggcaagccatacctcaacgattgtgttctcctctttccatgctcatcgatgcttgggctgtcaaacagatatatggtttggaaagacctcaacgatattttttgttttcccaaacctctgagcttggattagactaatccttcgaagaaatatcgtgtgaaccttttgttaattcaggattcctagtgttttcacagttaagtgagctgtatccgtgtttcgcaggaggacggcaccgaggagaaagcccgggttgatcc

SEQ ID NO: 114248 - DNA, 449 bp, Physcomitrella patens
  Intron number 2 from transcript Pp1s64_195V6.1 (locus Pp1s 64_195V6) derived from phytozome v7.0 (chr-ID scaffold_64; pos 1628783 to 1629231 reverse strand)
tccaaaggagcagatccagtcttacgtctttggttggtattctgaattccattccaatattcggtacttatggttaaatataatgttaaaccataatttttatcaatatgaactttgatcaccttcttctcttggatatttatgaactactctaaagtactcgaatacgagtggttgcttacccttcacttatcagtggcgccaagatttgagttaaatcgatagagtagtgccttgacgctggtgcattgcttagatttatcgtagataatgtgattgcttccaaacgcatgagcacagataatatcaaactcgagaggttgagtacgacgctcagtcgtgttgggtatactctttgcaatgacttacattagctatgacaccgaaccttatcatttctaagttttcgaagcctctaatttgtttttgtattgaacagttgtacgagc

SEQ ID NO: 114249 - DNA, 231 bp, Physcomitrella patens
  Intron number 2 from transcript Pp1s72_134V6.1 (locus Pp1s 72_134V6) derived from phytozome v7.0 (chr-ID scaffold_72; pos 659000 to 659230 reverse strand)
aatcctgcaagacacacaagaaggtgagaccaacaaactggctctgctcctgtcgtcctcaatccgtccgtgttcagagtcatacttagctttgtcttccatggttatttacagcaacatcaatctttgattcggaagattttttccttttttccttttcttttgaagtaattactatcaacataactattctaataactgttatagcaggaattattctgcagagaaaaa

SEQ ID NO: 114250 - DNA, 610 bp, Physcomitrella patens
  Intron number 1 from transcript Pp1s72_134V6.1 (locus Pp1s 72_134V6) derived from phytozome v7.0 (chr-ID scaffold_72; pos 659274 to 659883 reverse strand)
ctttcgcgacgctgacctccttgcatcgttccaaagtacgcggtgctgatggctttgaaactgcgcttccaagttttggttttgattttgatgttttttttaccttaatttttaagtgaacacagttgatttgttgcgcgacagattgatcatgccctatttcccacgcaaaatttcatgcttgttctgagtgcgtactagaacaaagtatagtgtatggctccttggagagagatgagagaattttgaggatggaaggagagtggaaatgcggggcgtcaaggaattccttgtacagttttaagtcagctggtcttattttctttggctgcattgcttacaacatgcagattttttattttttatttttatttttcttttaattctatttttttttgaagttctagattgaactggtttgcgatagttggatacttgaagattggggtgtcaagctctaaagtccctgcataagttgagtcttccctacagccatgacatgtgcaagcctgataattgcatgacagtagtcgccctgggatttaatctttgtgaccagtttcttcgcacgctgcttgcagacagctactaggattacactcgacagagc

SEQ ID NO: 114251 - DNA, 769 bp, Physcomitrella patens
  Intron number 1 from transcript Pp1s56_240V6.1 (locus Pp1s 56_240V6) derived from phytozome v7.0 (chr-ID scaffold_56; pos 1739855 to 1740623 reverse strand)
ggtgggtgtcttcagcgagtggaagcgctctgtcacaagagcaagaggtttgggtttcaagggagaattgaacttgtgggagttcgtttcttaggtttggagtaacatttcaaagaaatttggggtctctttgttctcaagggtgtgatagtacttggaaaattatctctgggtattgtagaaaatcacatcatctgcgaatgccaagtcttcctgataattatttctgtttaagaagagctgaaatgaattggacgcaaataaaattcttacaagtagctaatatcacagaaattgtgggatcctgcagttcaattctcttaggtatgaaaatttgagaccctaaggtgctgtgagtgccatatcaaaggatagctaagcaactaataaccaggatttgactcgtaatgaaacagcaaactctgcagaaatttttcaaaaggaacatacgcatttacatacaagacaaagcgtgttgaagattaaaattaggttaaaatttaacaaaagaggcaatcacctttttctatcttgtacttcgtcttagttcgtcctcccgtatcagatttgtcatagtatttgcattcgttttggcatttccgaccatttcctactttcattttatttttttttctagagatgtgatctttttagatgctgatctgtcctcctgttgcacgcactatgtattttcagaagcgaactaagagactgaagcttgtggttgtccgtagcttctcagcttccgtatctgcggcctcagaagcag

SEQ ID NO: 114252 - DNA, 615 bp, Physcomitrella patens
  Intron number 1 from transcript Pp1s213_133V6.2 (locus Pp1 s213_133V6) derived from phytozome v7.0 (chr-ID scaffold_2 13; pos 693268 to 693882 reverse strand)
ccgtttcggaagcaattatttggatttttttcgaggtggggagtgtcataagggatgtgatggtttttaattgcacgagtttgttgaggagatctgcattggggcgatgttggttgcgcccgttgaagtgtttggctactcgtgaagagttttcgctgttttttgtagttggtgattgacccttgcggtaacacacagacagagaaagagtcagagatagggggcgaaaccgattttgcacaagtaatcggaagcgagtattattatcgctgcggcaggtcttttgcacaaggtcttcatagtggagctcgatgttctttgattatttgttttgtttttattgcttaaaaatgaattacattgcggatgtgctcattttgagggtgaaaacgcatgcgtttgtggaaggtcaaacaattagttatggttttggaacgactagtcgtcctggatagtttttagaccaggactaggtcgtgatgaggtggagcgattggggtgactcttgagtggtcgtctttgcgccatgtgttttcttttctttcttttattatttgttttccttagattaatatatttttgggagatgtctttgcgttcagggtttttcgggaa

SEQ ID NO: 114253 - DNA, 764 bp, Physcomitrella patens
  Intron number 1 from transcript Pp1s207_24V6.1 (locus Pp1s 207_24V6) derived from phytozome v7.0 (chr-ID scaffold_207 ; pos 194714 to 195477)
gatttcaaaacttcatcctcgttgccttcacaaacgtagggctcacttcctcatctgcaattaatttttttgaagttgtcattataaaggggaattgttaaaatgacccaagtatttgttaaatcaatccaaccatgatatcattggtttttaactaatgtggatttggcaatggagaattttttggtgatggttaggatgggtgggtcaatttagtaattgcttgggtcaatttaacaattttctaataaaatcaaacataatatttgggttaacacaaaataaaattttggaatataatttgaaataagagagaatgtagtcgtttccattgcttgtaaatgacaacacgactttggccaagattttaagttcaaagtaaaatttgttcaatttatctgaatattatgaggaagcatttggacaacaaacaaaactatttggggtgtaaacctactttgaatggaactaagaacaattattctatgatatatatatatatatatatatatatatattattgtgtgtgtgtgtgtgtgtgtgtgtatatatacatacatcacaatataaatttgatacagtgtaatgacatgctgttaatagatactaaatagtgcatgggcaaagatttcaaagcataaaagcatttctttgaacttataaaacatttgatggtgcataagaaaacaaaaatatcaattgtgaaaagaactaagttgcctgatggatctttcatacatatattacataataattcctacaga

SEQ ID NO: 114254 - DNA, 365 bp, Physcomitrella patens
  Intron number 1 from transcript Pp1s158_5V6.1 (locus Pp1s1 58_5V6) derived from phytozome v7.0 (chr-ID scaffold_158; pos 55861 to 56225)
gaagacgcagtacgtgccttcctactcaatgaagagggaaccctgtgcaaatcagttcatttcaattaaaattgaatttgaatgtaattaaccgatttattattaatgggtacattttattagattgattcaagtattagcaggattaatatatggtgtacttattttaataatgttttacattgtttttttctctctagaggagttagggggacaaatacttcgtgggattcattgctggaattcgtatgcagattcatagatttgatactgataatacaccgtattttaatactctacagccacttacgtctgccttatgatgtgcagcacactgctattttggacgtggataacacatctac

SEQ ID NO: 114255 - DNA, 828 bp, Physcomitrella patens
  Intron number 2 from transcript Pp1s246_132V6.1 (locus Pp1 s246_132V6) derived from phytozome v7.0 (chr-ID scaffold_2 46; pos 631118 to 631945 reverse strand)
aaagttcagtattacctgcagtggaagagctccaggtcagatcttctgttgagaacactgagtctttcaagatatatgacacaaaacagattgagaatattaagtctttcaagacatatgacacagagagattgcaactgtgagtcatagaaagctcactcctcaaaatggactaagaatcttcgtagatgaacaagtttgaagatgttctcaccatattccaggttgtagaagtcttccgtcctttaaatcattcagaacagctcctatctcgaaattcgattgcacacaagcctagccaggatacacttgtgatgtgctgttcaatgcgccgacatcttcttgacaatcctcatccctgaagctggaatttcgaaaataataaacacacaaaaaaatactgaatacacatcaacgcaagaatgccagatagcccaagtccctagcaaagaaatcggacttccgctagattaacatcataagttacagtatctacaatattcaatattcataaaaaacctaaaacctcttgattgttcacgcgctacacacaaacacaggacttacagaatgtagtcaacattggtatcagaagtgagattaaaaacaacaaaggatttgtccggcttgggtgaccaactgcaagtgatagaagatggtgagaggaagcggaaaacaacacaagaagaaagaaagaaaagcaaaaaaacgaagtagtatcctggatcggcttatctcagacgattcgagtgaattgaaatagtatcgttagatgttgagttggaaccctgttttcattgccgaggcctaattgtttgcagagtgaaa

SEQ ID NO: 114256 - DNA, 923 bp, Physcomitrella patens
  Intron number 1 from transcript Pp1s53_177V6.1 (locus Pp1s 53_177V6) derived from phytozome v7.0 (chr-ID scaffold_53; pos 1172597 to 1173519 reverse strand)
gagtatcgtcgtgacgtctctcgaataacctcttggtacagcaaacttgccttttttgtttcttactccccgttcgtttcccgttgccgaagttggattcggcgcggccaggatcttcggtggttccggtaatgtgagtatgcgttggattgggtcttgggacgtgggtgtgaattgggactgaggaggtttgtctagggtgtatgacggatatggtggcaacatgtgttgtggatttgtggaggtttgtgggaagccgggggctctttgcctgtccgaacttgctagagatgggatcgtatagaggaatgctaggaggatagaggagatactgatgtgtagttctgacgggactggttcaggatagctgcaggtcacattcaggtcaaagaatcgagctaagtactgtcttttcccgatcgtttagggtttaaacgtgtttttcgcttttgatctgggatcctccacttttatgttttcgacttggaggacttttgaaatctggtgtggcttgaattagctttgcgactcggagttctagtaaccccatctcgatttagggtttgatcttcgaaggtctttatggccttcacatgcaggcgtgtttagtccttcgcggtgttccttgtgtattggtttgctgaaatcttggatgttggactagaagacgttcggaggctttgttctctttgtgtgttgctttatcctgagcgaacagagccgccaattacgggaaattcgtagtggacatgaaccctaacagaaggcggtgagactacgagtcattaatttttttatttttatttttatttttatttttcatttgtggtctgacgatctaggattttcctgactggagctcttgtttggaggacttttaaatgtgacatagaagtagtcgtcaaattatgttgatgcaggcg

SEQ ID NO: 114257 - DNA, 974 bp, Physcomitrella patens
  Intron number 1 from transcript Pp1s72_135V6.1 (locus Pp1s 72_135V6) derived from phytozome v7.0 (chr-ID scaffold_72; pos 657762 to 658735)
caggaacaagggaaacaactagtccaacatcgtttgcatgatcctgtatccaaaagcaaaggaaagataccatgtgcagtgagtgccattacactgaaaataacaaagatttcatcaagcacttgcggacaactgagttacgtgctatgcattcataggacattgtgtactcctaacgttgtgtggagcatggatatgagcttactcattgccaggaacttccaccgcttaaagaggcagcattgtgaaaggaacggtgtagacctacaagcagcagcagcagcaggaccaccaccacttgttagaactgtgaactagtttttgaatcttgagtgcggctcaacgctaccctgccacatttgtcgatgggctaagacatttccatcttcaaaggatgacaggaaatttgtttctcgtcgacggaagtcgacgaaagtaaggtctgagaagaagggaatggcactcttggaaactaaatctttgcctctaagtaactagcttaaaagcgcaggacaaaaagtgccatagtacctccaaggaaacactcagctcggtttttaagttgagcacttgatctccttcgggggtgtcgtgccatatcaagtgattcttcaagctggctgcacaaaatttttgataaacgaaaaataaattcaagtgattttcgacattgaaagtaaattcacggtaacacaacaatagaattaatgagttaaattacattgtccctcatgatctcgacaacagtggatgttaggatgtgtaaaaaaaatgggataggtataacgagggcaaaatgtaccagaaaaacgttcgttctggtcctggatagctttagagctacacaacgatgttagcaagacaataaacttgtaggcattagatcaaagaaatgcacaagtgtgtttaggcgcaccgagcattgacgcatgtccacacgacagtccacatcacttgcagccacaaagaggtcg

SEQ ID NO: 114258 - DNA, 756 bp, Physcomitrella patens
  Intron number 1 from transcript Pp1s207_58V6.1 (locus Pp1s 207_58V6) derived from phytozome v7.0 (chr-ID scaffold_207 ; pos 431365 to 432120)
atcgggtggcggttctcaacactgggttagccgccgtaagttctctctcttttttctttttcttagttagcgtcgcaaaggccgacctctgcaactgtgttgtttttcccttctttgcttcggtgcagcaaggaggtgtttttatctggtgctgcaattggagcgacagttcactcgtcctgcctttctctggttttcgttatttgatcttgttttttgagcttcgaaagagtcgacgtggcgaggagctgcggtgcagccaaggatgctagactcctcgtgttctgttctttttgttgtttgtgtgcggaaggcgctgtagcggccatcagcttgttcgcaggttttcttccggttggactgagcagcatggctgctggtttgttagtctcctgttggttactgatcttgacgagaccccatctggatctgcgcctcgagtgatgcggctggactgttcagttttttttcggttcaacgttgccttctggtcgcaattgaagggtcatctgcggagcaagggattttgaggctcagaaggtagcgtgcaaaggagcatagaggctcttgcttcggatataaactctgtaggtggattgcacattattcaggcgtttgcaacttcggcgcccgttgcagtaggaggttatggtgcgaaagtggggctctagttgatccataaggtatcatgtagctctacgtcgtggcgcctatgacatagttggactggagaagtggagggaggaagcgcacatc

SEQ ID NO: 114259 - DNA, 711 bp, Physcomitrella patens
  Intron number 1 from transcript Pp1s66_181V6.2 (locus Pp1s 66_181V6) derived from phytozome v7.0 (chr-ID scaffold_66; pos 858792 to 859502 reverse strand)
gaggtttttcaggcaccctcgatattgtgttagggtttctgtgaattgtatcctgctgtgtggtgtggtgtggcgttggtgtggagggatgatccggagccatcggaatttatcaactcagattggctgtgaagctaggctttggatgttgtggggatagttggaatttttgcagaccgtggaggttgatgagttttcggaattgatttgtggtttgtagcaatccgtgtctacgtttgcgcaagtttttgaggttaggttcgtccagggagtggtatttgtacgtgttgatatttgtgttatattttgtttttggttttgtttttgtgaaggggaaggggagaggttagggtatgttagggtggtgggggtgttgtgggtttgtgctgttttaggggttgtttatttggtgattttctggcggatgtaatccggatcgcatggtgagtaagcggggcggagtaggaagtgatcgggacagtgagttttgagcgtttgcaattgggtggtttggagccagaggactggatgtaagtgatcgaggagtgtcagtgtcttgcgcgtggaattggtactgtagagtagattgtattcttttcttcctcatttcttgaaaatttttttttgatttgttctacttttaatctaatacatgaaggtgatgtatcattcgcaggagctgatccggaagggaagtgtccatcggcatta

SEQ ID NO: 114260 - DNA, 997 bp, Physcomitrella patens
  Intron number 1 from transcript Pp1s21_318V6.1 (locus Pp1s 21_318V6) derived from phytozome v7.0 (chr-ID scaffold_21; pos 1868344 to 1869340)
agctgtatttgctttgtagcgtttttgtatctaaggtaacaaacagtccgtgcgcaatttgcagcatttcttgtggaggtttataaccgtagttttgtctcctttcggattgttcatgaatgcttttaatttgttttttaatcggcgtttaatgagttttcgcggtgcggctggagagatgtcgtgttttggatttttctgtctgggagtcttgtcctgtttctatgagtcgaggatttgtcatataggtttctgtgctggttgtgtgtaattttatggtcttccagggtttgtcgtgttgttttgaagcaacttgaggtctggagcgatgcatgtgattgaggaggttgggaggaaagctaatcagtagtttttatgtgatattgtggtttttgactctcctacagttttcccttgtttttattttttatttttattattttattattatctgtgtggaggagagtttttattggagaggacgcgagccactttttttttttttttttttttttcccgcgtttttgctcttttgaagaggggactgtattttatgaacatcgcggtggtgaccgaaattcagaagttggtcctgtgtctagttatattcggtgtttctgaatttttatgtcttattctctgtgaatgcggacggagacgtggtgagggggtgcggtgttggtttttgtctgaaatgtgtcgtaactggatactgatgtccgacagatgatgcagaatataatttcttggttgaacgccgctgcgtcaggtgcatttgaagtgtacctatctttgttcttgaggtgcttcgttttgtctccgtctgccgcgtggtgtagtctgcttgtgtggcagtatgtgcagttatctgtctgttttttcttttcctttctccttttttgtttgaggcttatggaagatcctggcactgcaacgtaccacacttagtttgagattctgatagctgtgtgtatttccatttgtaggaccctcggaa

SEQ ID NO: 114261 - DNA, 841 bp, Physcomitrella patens
  Intron number 1 from transcript Pp1s235_62V6.2 (locus Pp1s 235_62V6) derived from phytozome v7.0 (chr-ID scaffold_235 ; pos 266637 to 267477 reverse strand)
gtcccctggctctgcaactccacttccaccggcaggtctgatgcctggacattgtggcctgatttcaccgtcagaaaagacagtcgttgtctctatcttctcctgatgcttctggaatcttggtacttaagcagcattcattggtatgtctggagaatgatttgggttcaatctgtacgcattgtgtttcttggggacgactggtgagttattgcaacggtaagaacttgaattttgaagcagagcacgtgcagattgctacctaggatgattgagtcgtgctagccttgattatggcccattccgtgggttcataatcttgcttgcaacatacctgtggctttgcgttttgaggtttgaggttgttggacttctggggttgtcgttgtaggaagcgatgaggtttgaggaacccatgtggccaggtccaggttgtgttggagtttgtctgttttgtcccccagttgctttccatgtattccaacacctcgatttctgggcttccaaggtggcctgttaatgcccacagcattgtgggaataacaatggtgtgctaatttcagatagaacatgagctaaatttagctttcaataattcgttttaggaatcatgatgggcacctgtagctctggtccacacattgtatgaccctcaagtcgaatgttgcgaaggttagtcgtgagttagagggtaatgttggtgcttcaaatccaagatagtcgcaagtgctcattttccgcagttgtagacaacggtgattttccacatcttactaatgtaacgctctccgcattttttgctgcagcgaggggtgttttttgtgaaggaaaaagaatacaa

SEQ ID NO: 114262 - DNA, 335 bp, Physcomitrella patens
  Intron number 1 from transcript Pp1s47_46V6.3 (locus Pp1s4 7_46V6) derived from phytozome v7.0 (chr-ID scaffold_47; p os 279080 to 279414)
cggagaagtgttgaggcagctggattctgaacgctgtaagtaatggtgcggagcctttgaattggttgaaggagtggtagagggagtttctagaggtttgcgtaaatggagaagatgttcttttgcagattcttcggagcttctttctgtggtcataggatgattagtacgatgaaccgaatgtggtagattgaacggtacaggtggtagtggctatctgttttgttttgcgattcgttcatatatttattttttttctctgcctgtatctcatcatttcattgagagtttgattgtctgagcagtaattgtgaaggcgagcagtggcccacggt

SEQ ID NO: 114263 - DNA, 607 bp, Physcomitrella patens
  Intron number 1 from transcript Pp1s223_54V6.2 (locus Pp1s 223_54V6) derived from phytozome v7.0 (chr-ID scaffold_223 ; pos 328416 to 329022)
ttgttgcattggattttacaggagataatcgctaggtttgtgagcacttctttctagggttttatatccgctccctgaatttttttggtgtgcctttgcgcttgtttgatagtttttttttggtgataggctaagacagagcgcctcaaccatgtttcatatacttcgttggaatggtcatggagaatgtttggggtgattgaacctgttgatagttttttcgcgatgctgtttcttttaaattgctgatgtgcagctgcattttgatttttttatagcgttactggtttgctgttcttcattctgtcttggatatgttttatcatgtttatttttttggttttatacgtgtaagggatgtgagcatgattctataatctgatatcgtcgttgaagtttcttgagatcgtcactgcgggttttgtagcattagtgatcattgtatgtgtaattcgtgaggatgatgctgatttcatttgcttgatgcattatgtacagatgatttgtacttttggaggatctctagggtttatgggctgtttatcagtctaagtgatgtagccttgtcgcaggagctggttggaatacggagcttgtattgacattg

SEQ ID NO: 114264 - DNA, 940 bp, Physcomitrella patens
  Intron number 2 from transcript Pp1s37_33V6.2 (locus Pp1s3 7_33V6) derived from phytozome v7.0 (chr-ID scaffold_37; p os 197803 to 198742)
cggtatgtatcatttacttcccgtcatggactcatctagcctgtgttctcggtgttggttagaggaaattatagttggttctctttgaggggatcaatcatggcatgcttacttttcagtcctttgccagcttcgattcttgtcgaaaattgcaaatggattattctcatcagcaattgagcagaaaccccctgttgtctctcctttttgaattgtacagctgaggaggaagtgtagaagtgatcactagctgttacgctttagactacaattggtttcgttactttcttcgttaccaaagtctgcatgcgttatgactgagtaccttctgtgcttttcaatatttgatttaacgctgcttccttgacaatgtgatcagtatctgactttatgtcagcacaaaactattatgtatggtctgatcacgaatgtgcagtccacgtgtgtatgcattcatgagagtgggtgataaggagttgatttgacaagagattctatcctttgagcccagttccgttgttactttgctgtattgattgctggaagaatctagattgatttagtaacgcgtactgcatttggctatctttgcgtcgccgtaggtataattaagtagattacctcgggtttatttagtagtatacataacaaacatttcggtctaagttcaacttggctagttgaatcgctggtcacagtggatttttcagccgaattcattttgttcgtgaaatggacactgctgtattgacaataaccagcaatgatatatcgtattatcgacgcgagttttgacactgttaagttgtggttaagtaaactttctttgcatctgtgtgatgacacatttggacaagagctgttacgagagattggctataaactgtttcctctatgtgacttgttttgcatgcaggacctgcgagccaagattgcggaa

SEQ ID NO: 114265 - DNA, 856 bp, Physcomitrella patens
  Intron number 1 from transcript Pp1s64_165V6.1 (locus Pp1s 64_165V6) derived from phytozome v7.0 (chr-ID scaffold_64; pos 1401163 to 1402018 reverse strand)
agcgactgcgtttcggtctgagatccttccctgtgcaaacccacgcagccttcgatctctctctctctctcgctctcttaccttgcctgttttgagtagcgccgcaagattgagtctctgttctagcgatgtgttggagggttaagcttcaacgattgagattattcctgctttttttttttttttttttttttttttttctttttttctttttgtttttcctcctccttgatactcggtgaggatctgagtttggagtcttgcatgtgcgcttcacttctgatcgaagcgagtggacttgagaagaggagttattgttttcgttctcggaggtgtgtagtttgtggtgtatacattcaccagctgaagtcccttttcggaagagaacgtttttgtaagcaccgtttttattacggtgcttgagaagtgtcttcagtttgatttgctgtggtatttcttcatccagaaaatttgaaagtggccttgattttgaggattgttcaagaagaaaaggaaatattgtttattaatttttgtgttgtaaggaaatgaggctgggggaaagccaatttagtgctcagctcaaattattgtagacgtgtctcttcttcttttttcttcccttttctcttcttatctttttcaattttgctccatgaagtttcgcgatcgagatagaaaacctgttccatgaattttagcgtttcatatcttctgatagaagacacgcgcgcgcatacggatcgccagttgctgagtattcgtgaggtaccgccaaggaaagaagtgagtactttgtgatgtcatggatttcgttcgtctcggcagtccctgaactttgagaaacatacacaac

SEQ ID NO: 114266 - DNA, 989 bp, Physcomitrella patens
  Intron number 1 from transcript Pp1s201_93V6.1 (locus Pp1s 201_93V6) derived from phytozome v7.0 (chr-ID scaffold_201 ; pos 523895 to 524883 reverse strand)
agtctggaaggggggttgattgtccttttgttcgcgtaagatctatttcatctcgaataaaatttggacattcgattttgtgatttcgcattcctctcatccaggcttttagctgttgttgcactaattcttcacttcaaagtactcctgggtacttgtcgatgacagtaataatatgtaattatatgtatttttgtacttatctttttcctttgttgataagctgttgaggaaaacctgaacaatcattttgcctgtggcatgacctaattccaagcgctgactgcgacctcttaaattgtctcttaaattgtcttgatggaaattttcagatgtttcacagattgctgaggaatttaagagagaacactcacgccaagtgttttggttcatgaagtgcaataattcgtgcgtgtctcaccctgctgcatagggtgcttgtctggaaccatatcactggaaagtttgactttttttttttgagaagtaagaataatatacctttttctccatcgttcttgattcttgattcgaatggagtaacttttataatttcttcacgaagcaggtatttttgaataagatttgataatcaagatggcagaccccgaatcccctggcgtccctctggatccgacttctgcagaagcgcgggcatggccgagagaatctgtgaaactgatcgcatctttcggccttgacgtttgtctctgttctttttgccgttgaattccaagtttgcatacttagtgttcagcgtccatgcctcgatgatcatcgttatcttgttcatgactattatgagacattcaaggattttcgtttgtaactataaatggtcatggagagtcttggttttcaaatttgtgtccctaacgcttgcaggctaacttattagattactcaccatacattcataccaacgtcttgatctgtattgtatttctggaaatcttgtattatttgatcgcagggaagcaggagaaata

SEQ ID NO: 114267 - DNA, 1018 bp, Physcomitrella patens
  Intron number 1 from transcript Pp1s58_234V6.1 (locus Pp1s 58_234V6) derived from phytozome v7.0 (chr-ID scaffold_58; pos 1413954 to 1414971 reverse strand)
acgcttgaatccccactcaggtcaggaacagcaatttctaatgtccatctgagtaaagttttgctaatgtgaatcttactacaattgattgttagaaaggtgtattgtggcatgagggatgcatgtaaatttcagctttagaatatcgcagtttctgtacacaagtcatgaggttgaagaagcattgggatcatgttaaaatgttacataggtgctgtcattacaatcgccgtaattcgttttgatttaaagtttatcgacattcaaagaaactgaatgtgtcgagcacattgtaaatcctcggaatgtgtcgggacagatctctggtaacgcgtagccgctatcagatgatattaaagggggtcattaaagctgttctatttctttgtttgtaatttctaggtcattctctcaaagtatcacactcaatgagggcaagcgttactttaccaatcctcaaaatattccaacactcgtaatttcaattcctccgtttcgtttctgaagagtttaattatttcttcttatatagaataatttttgagtactgcagactgagcatggactgatgaatgatcttgtccttgaaacaggtttgtattgatgttatagttagtcgagggtaaacaagcaagttattgcagtgtgggcatgatgccttcttggctggatgggtcaaggggatcctcatctccttcaacatccaaatcaaaccaccaatccccaccatgtgcccgatatcatccatacgcccggaagcaacaattgtacggccttgtcacttgaatctggaaaacttaaaagtcttgcacttatagtttgtattgactacattttctgtatctaaatgtctagcacgtgctctttgttcttgccgaaacctacacatccttttgttgttgccagtatatatatagccgtttaatatttttttttcctgattttgtgtcctgcgtcttaagcatctatttcatgatgtaaattgaccctatatttatgattcttcacagaggtggaa

SEQ ID NO: 114268 - DNA, 732 bp, Physcomitrella patens
  Intron number 3 from transcript Pp1s114_52V6.1 (locus Pp1s 114_52V6) derived from phytozome v7.0 (chr-ID scaffold_114 ; pos 315303 to 316034 reverse strand)
ctctttggaccagtcaggtgcttctccattcctttgtcgcggtacatgatttactttgacggtcacgaattgtactacctgtctactttctatctagacttgcgttttaaattttaattattcacaagtgacatttggagttctagattgaatacgcttagattgaatacgcttaggttgaatacgcttccaaatatcattcgataatattgtgtttgagtgtatcttgtatggtgataagaaaattatcatatcagttgaaaagctcaacattggatacctgtacatggcaataattgttcatgaactagttttttcctgagcacatccccatagagaacaagaaacaatcaccgaaatgaaaaaaattatttggtttctcctcacttgtaatggcttattaccagaaacccaggtcttcacatgatcatccatctttgaagtcaaggccccaggtcatgaagtcatttgtgtggatcccacctctaggtctgttaagtctttccttgatgactaagttagtgcatgatctattgcctctattctgatgaattcaattttggcttactattgtaccttctactttgtttttgtaatggtttataattaatctgtactatgcaatttgcgtatatgaaatgttttatcgtttcatgatcacatgcatcaaaattctgaaatgcatcgaaattttaatgttactggtagagtcttactgatttttctcaacag

SEQ ID NO: 114269 - DNA, 1046 bp, Physcomitrella patens
  Intron number 1 from transcript Pp1s58_31V6.1 (locus Pp1s5 8_31V6) derived from phytozome v7.0 (chr-ID scaffold_58; p os 168883 to 169928 reverse strand)
taggtcgtgtattcacgaggttgcccttccgccaggtcagtacatgtggacaccggttgtgtttcgctctgagttttctttgattgtttggtttttgattattttttctgtgatctccacactagttttagccatgatggcgaaattaactcctagcagctttgtgctggcatacttctacattttgaaaggatttaagctttcatgagaatctttaaaccttgctggacggtgaggtcttttgacatgagtactgttttcctgttacggtcagtggcgattccgctatctgagctcttcctgttaccccgtcttcaaggttccttacttagaacatatatgttaaaaccttgggtttaaggtatgacagtttgttctcattttacttcagtgctctgcttgtttcacaactatcactgtttaacttgtcaagacaatccttcttgcttactacagtattattttcccttgtgtagcttggtaattgaaaagagtcacaaactcagtatcaattgtctcttcccagctcattcctgacatttgatgtttaaacctggccttagctcctgttttcagatcatgctgttgcctagtaacacaaattttacattttccacccagggtgctttgtgttttcttcggttaaagagcttaataattccctggtgctttgcatgttcttgaatttattcctctatcaatatttcaatgtaaacttattcacatatcgactgtcgttctgttcttctttttccgtcctgcaagcaatttgtgtcaagggtacagtttaagtccgaggtttcttagcggcaatgtaggttcgttgttcagttctcgcgttacagtgcgtggtcagaaacatcggcaccccccccccccttttttttttcttttttccgagttgtgtgttggtaattctacatttacttgtttgaaatggtccatatgtgcagcattcttaggtacagagggtgctagtttggaacagatttgtttctctattgacttcttactgtatcatgccttagggtttacgccttctaaag

SEQ ID NO: 114270 - DNA, 793 bp, Physcomitrella patens
  Intron number 1 from transcript Pp1s250_66V6.1 (locus Pp1s 250_66V6) derived from phytozome v7.0 (chr-ID scaffold_250 ; pos 648859 to 649651 reverse strand)
gctctgctttctacacgagagacttttcttggtgagtggaagctccctttgaatgccatcatggattgaattcagcatgcattcatgcaacttggaaatgagagatgtttgttgctcaaagatggagtgtgaactttacacagttggtattcattgacataatgcaaaatataatataaaatttgaagtaagtgcaagatgatgtgatggtcccaagttctgtatattagcattgcatgaaggcccataaacaagctgtggtccttagagaggcttgtgtacagccttggcagcaatcactgattgcacattcttatgcattcctggattctagcaatgaatatgatgtgaaggaggttcatctggaaactcacagaaggagttgtacaaggtcaaccctattttgtttttgttttgttttgttttgttttttttttttttttgttctatcttttttacttttcttctcccattcaatatctagccaaggtggttctggtggtattgttccaatggaggctctggcagccaacactaaacccaactgtgacaaaagctgctgcaagtcattcctcactgagattcaacaagagaaagtgcttgattccactctgaagtcactgcttaaatgttttctatttccaaattaagttgaggtgaaactttcaaagatatcctgaattaaacttttttgttgttattgttaatattatttgtttgtgtgagaaccatatttttgacttaatattaagcatgaataccatgcagcaaagccaatccaacttgtatctaa

SEQ ID NO: 114271 - DNA, 810 bp, Physcomitrella patens
  Intron number 1 from transcript Pp1s12_189V6.1 (locus Pp1s 12_189V6) derived from phytozome v7.0 (chr-ID scaffold_12; pos 1150534 to 1151343)
agcgattacagtcacaagagtcaactgtatttgaggtttacttcgacagcttctctcctcatgcaaatttgcagacttgagctcttccattatctatgttttttcatgcctgtgtattggctctttagctgtgacctaatccgctcttgaaagcgatctttccatgtttttcttactttcaatgtaacttagaatttaaattttgggcaattaaaattgcgtcacgtcgatgactttcttggcgaagtactgtcgtcctgaggttttggggctatttgattaccttgctgtcgtggaaattcatgtcgcgatctcgttccttgtgtacactcctggaattcgcgagcaaaacagaattgcatgagttcatattgttgtaagatattatgcctgtacgtagttcaaactcttttagggtttgggctaccctacattaacctagcagctcctacttgtcgccctgatgttgcaaggaaatttgtaaatgacggtgagtccaccctcgtaagaacacattgaagcatgaagtgtctggggtttatatatacctttgctgttactttccgcaattggagagtgcaaatacatgcccacacttgatgtttgtgattgttatatctttatgatgattagaagttgtttcctactctacatacagcgatcagcagctattttaattcctcaacatcctattcttaaatttagggttgatgctcacattatttgcgagatgcatacaaagaatttgctgaagtagtggaggttttgtcgacagggtttaggttataatactctcagattcaaatcaac

SEQ ID NO: 114272 - DNA, 471 bp, Physcomitrella patens
  Intron number 1 from transcript Pp1s155_27V6.1 (locus Pp1s 155_27V6) derived from phytozome v7.0 (chr-ID scaffold_155 ; pos 223723 to 224193)
gagaaggcgcgggcattgggtgtgtcattttttaggtcagttgggtgctccagagatgattgctctctcgaatcgttttctagcagtgacaagcttgctttttgtcctaactagaggtgcttgcgaacgtttcctacaactatccatctatctatgcatttagatgtacaagaatatgtagttcttctgctccaaatagattcttttcctaacagttattgatgataacatcttgctcttgaaaatccttctacatttactgggagaagtgttttggtttcgtatttgtattgatcagtgaatctgaatggtttggagcttcgaagtctgcagttgagtgaaggctgtagcttgaaccgatagctatagttcctctcccttcatttgatgtaaagagccggagctagcatcatatgtgtccgatgaccatcattaatgacaatgctggcttttgaatctgtagagacccgg

SEQ ID NO: 114273 - DNA, 843 bp, Physcomitrella patens
  Intron number 1 from transcript Pp1s250_25V6.1 (locus Pp1s 250_25V6) derived from phytozome v7.0 (chr-ID scaffold_250 ; pos 261681 to 262523 reverse strand)
ccgattggggatacagcagattctagtcttgcaaggtgagaatttgatttttgatgaacctggaaggtggtcaaattttagaattctgcgacgttaagctgcagtcggtctggtattttttcagtttggggagcggaacttgcagggtggaattttaaaagtttctagcactacaaggattatcggataggcagacagtgctaattgggtcaaggctgtttattcctggttttgaaattgtccttatccactgggcatgtccagttgattttactgaaccaagtttctgttgtgggccccaatcgtttgcgtgtgagtgtgacgtgtgtgagtaacccatcaatcagaattatcagaacttcaaccttgaaatttatgagcttcacaccagagcggaagtagaactgaactagaattgaataagttgaagtacacgccgtgaatgattgaacctcaaatgcaatgctcccctccgcaattggtaccagaagtgggatagcttcaagtcttcaaagtttgtaattaacccatatgtcctgaaccttgaattagtgtgattaagtaattttagagtggtgtaccggccgatgacgtattggtattgttttatgccctcaggatgcagaattgaatttgtgtatttaactatgaagtgcttccgcacatgtttggttgcatgtatggccaatttgaatgaactgctgactcgtgttactcaaatcttctttcttagcttttttgttcaagatcggcttctgcttttcaatggataaaatcatgttgactcacaggtttggtcgcatgacaggcaattgatctgctgaagaatagcgagcttgctgc

SEQ ID NO: 114274 - DNA, 923 bp, Physcomitrella patens
  Intron number 1 from transcript Pp1s111_5V6.1 (locus Pp1s1 11_5V6) derived from phytozome v7.0 (chr-ID scaffold_111; pos 40788 to 41710 reverse strand)
gcccagcaacagagttgaggtacgtggttggttgcctacgagggtggattttctctttcctcgcttgataggaaggtgttaggatgcttagtgtttcggtctttgagtgggcgaagcttggctccgaagtctacacttcggagtcaagcttgagtgctagctgtcgcggactgtgccgagtgagctttagtcgggctgagtcagaaaaggttgaaatataaatttctgtgatcaaggtgtatcattagttttttctgtttgtattgatgctctgataacaattcaacccagaagtatcgttcgtgtcgtagctgcaggttagggttgagtgggaactagagtttaatatttagcgctctttttcattgtgccgctgtctcattttagatgaatcgtacgtccattcatgaaggtctcctcatctggcaggattttgagttgtaacttcctcctctaaaattctttcatcatagtctgtttttggtttttcacttgacccagatgtctggccgggactaatgtttattatattcttctgaaatttctgtagaaatttagggaggattgacattttttgattttatcctattttttaaattcttaccacactggtccacaaatcaactcaatttctgggatacgtatttcaatgccctcaaggacgttcgcacgagagccttttttaataattatctgcagcatactgtcttctttaggtggatgcaaatccctccgcagttgtttcttcctctctagaacgtatttcgtctcagattgctggtcttgttatgttctagattccgtttggttgcgaaatgtgagtgtgcctggttctgcctgcaaaatgcctcacatctgtttcgatagttgatatccggcttctggcatggtctggcaggtggaagtacaatcgtcagtcgagg

SEQ ID NO: 114275 - DNA, 775 bp, Physcomitrella patens
  Intron number 1 from transcript Pp1s2_110V6.1 (locus Pp1s2 _110V6) derived from phytozome v7.0 (chr-ID scaffold_2; po s 526447 to 527221 reverse strand)
tcgccgacccaactcatttttccgaattgaagctggtgcgctatctcaagggcgattcttcggacggtcacaagtctatgcttcaggatgagtattgctccaagttgccgcttatatctcttttgttgaagcttgagctgatggtcttggcatgtgggtttttgaaagaggttgaattgtgcttttggatttaattttcggaattcgttttgtcatgccaagattcggtacagtgttagaaatctcaagtagatgcgatttgaggatcaagtcgcacggataccccatggtgacttcaagaaacatgaatttgacttttcaaagaaggcggtacctcatcatcttgaaatcttgcaggctagggctcctttcttttggcttggaacactaggttagcagaatactacaggaactttgtgggacttgatgtcatgtgcgcttcattgcgagtaagctgtatgtctcggcgtctaagtgtcgatgcctccgatgatactatggaggataactagggatttgacttggttaatgtcaagcatgtggtactttcctttccagagcttcaatatctgggttcatcgagttagattttcctgcctgcataacgattatgaacttttcgtcgtttgatcgttccttaatttcatatgattgccttctggtttgggaatttcttgtacgtggtttgcaaggttatcaatagtactcatgcgaattgtggtcggcaaattttgaaacagctgagagaacaagttgatcacatcaccgcattggc

SEQ ID NO: 114276 - DNA, 836 bp, Physcomitrella patens
  Intron number 1 from transcript Pp1s66_200V6.1 (locus Pp1s 66_200V6) derived from phytozome v7.0 (chr-ID scaffold_66; pos 934944 to 935779 reverse strand)
gctgcccaagtattttcctcaaaacatttcaccttcatttccgaaattactcctcgcatgacgtttttctctgtcggacagctattttgaatgtttgggttagtatttcgtgctctagggtcacggtttccagtatctccatgtcagtcttttggaagaatgtaaggttgaacttggcatgtggcaaggatcttgattctgttttaaagagtaagtcagaatgtcgagttccttccagcagcatgccttatcgtcctcgattctgttatgagttaaattttacagtgagtctggttgagtatgaagcgctcaaggctttcaagcgagtgtttctgaagtcacttcttcactgctaacggcggttgctcaatgagtgtatttatagaatttggcaatgaaggcagtagttcctctgttgttacttctcagcaacaacgttgtctggtgtagtgttaacgatggcgcacgtgtgtaggtgaagcgtattgctttaatcgacttcacatctattgttgaagctgggaggataaaacttaaatgtatacgccacttgtcaaactagtcgcctaactgatcaggattttcactaaatggaaaaaaatgcgaaattgagcaactatattcgtaaatctagctttagcatgtaaccttctgggtattatgtcgtacggaagggttctgtatgtacaggactagctatctgaatgtatgtagcagtgtgtcttaagttcagactccaacttaatccttcatgtttttcatgattatttatggacaattttctgaaggtttttatttttatttttgcgtgcaacagcttcccggacgaactgaca

SEQ ID NO: 114277 - DNA, 941 bp, Physcomitrella patens
  Intron number 1 from transcript Pp1s173_23V6.2 (locus Pp1s 173_23V6) derived from phytozome v7.0 (chr-ID scaffold_173 ; pos 161854 to 162794 reverse strand)
gagggagggagatcaccacccacaccccctgccaggttgggcgtcttaagctccttggggtgtgtgtgtgtgtgtgtctatgtgggcgcgagtgttgcttctcttgtagaagcttagtagcgttgtcttgtagcggttccgtatcgaatttgtcttcgccctggcgcgcaagtagcaggatactccttggttatttatttatttttatttattttttgatttttgacatagttcgcaagagtttcgagggcgatacgatataagtgcctttgggtggcatggctgtgctgtacttagacgggggtagatgtgcctggttaggtggtgaggatcgcaccgcgttcaggtgttgtgtctctgacccagagctgagtctataatgctgaagatgttgggttttggcggatcgaagggtggttgggcgagtttcggagttgtagtagggtgtatcagtgatgtgggtgcctgttcgacctctcaagtcatttgctgaaggagcccatgcgtgtaggtgatgtgtgagagacaagcgtaagagcggtcacttattgatcgcgtcccgcgtggggtcagctgggatatggactgtggaagctgttctcgagtggttttctgagggtagggtggcatggtctaggtggtgatggtggtttttatctattaatctttcaagtgtcagtttttctcgggtgggcggtagggtgagtcagtgagtgagtgggcatggaggtcgcattctcttttctccatggagatgctagcatggcttgtggcgtgtggatatcgaatgaaaggagcgcttgcgtgacgtaatgattagtacatgtgagagtgggtgaagagtgagtcggtgcacacaacaggatatagggttttcaacctgccaggtgtgttccgtgagttggcttagcatggagcttacgcatgtaatggtggcaggt

SEQ ID NO: 114278 - DNA, 852 bp, Physcomitrella patens
  Intron number 1 from transcript Pp1s146_112V6.1 (locus Pp1 s146_112V6) derived from phytozome v7.0 (chr-ID scaffold_1 46; pos 867154 to 868005 reverse strand)
ctgtctcttcgtctctcacagctctcacctctgaggtactgaacagaaatccgtagaattggactgcgtttgagtgagtttttgtttggtttcttttgcacggtagtcagtcgcggaagactctgagttgattgtttgaaggagtgaagctctttgcgtgtcctgttgttggtttacgtctttaggaggatacatgtagggtttaactgcttctattttagagacatgacgtaaaatgtgtgcgttgagactgggttttgggcgaatttgacttcaggggcactgagattttccccaggttagaccttgcagtgtgggtggttttacatgggacacgtttccgatagtgcacgttttttttatttttttatttttttttaatttttggtattcccttaatgaattgtcgtgcttgaatctcgactcttagctgcacttcttgagcaatgcacagtctaaagatgaatagatagacttgcactcattacgtatcacttgcgcacatagtctggccaccgctatctttctggcattcacatttatttccagcgtcaagagagaatttaaatgccatgaacctaaacacttgtgccttactgcctagaattttggcattgtatttgacaatacccactgtcaatgttctttacttttcttttcttttttccttttattccccctttcaccttttccagtaagtggtcccagagagtgttacgatatgagtccatccatgctgttctccagacatggagcgcctgcaacttggacttttgaattctgattggtaacccgtccgggactgacttctatgcagagggctaccacagggatcaccgccagcgtacaatc

SEQ ID NO: 114279 - DNA, 1016 bp, Physcomitrella patens
  Intron number 1 from transcript Pp1s58_99V6.1 (locus Pp1s5 8_99V6) derived from phytozome v7.0 (chr-ID scaffold_58; p os 490117 to 491132)
gtccatactcaagttgtattgtacacctagtacgagtacgttgtacatacgagctgaactgggtcacctaaaggcttaggcatgaacttttcgtgttacagttaagattctggaaagataaatgcgagatgtaggaagtatgattcatgcttgtctccgtagcgtcttttcttatttctagaggaataaagaacaattgccttttgaacaggtcgtgggttttggttgcaaggcagtacggggggggcttctttttttggcttttgctttggtttgaccgatagtggttgcaaccgaacttcaatatccatcagcttttttttccccttacctgaaccaacaaccgcacacagtttgcttctgaaaaatactgtgccattgcttacaaagtcgcaataacgttctttcgctggtctgttccagtaatctcacatgttggtcatggagaccacaaagatacattttgtacactggtcctggttactagcgtttgtgctcttccatgggccattatgctaaacccccacgtttgaagtcgtggtatgaaacatgtgaaaatcagagtgttgatatcttcacatattgcttattataagttgttaatctcttaacaaacaatgcttcatgttaaataaagaaatcctgtcccaatccacattttggcctctgttgttcgcgtacagatttatgcttccctgtctccatcaactagcccactccaaggtccatcctcattatcaaaacaaaataacaagctacagaaatctccctctacttagagtgggtccaaaagcgtaccagtaaacagtgtcaataatgagaagtggaactggtccaagccgccgatgacaacaagtctaaatttaattccaagtcaatctcagcctgcgttgattaagtggcatctgcacctgcactgggaggttctaccaaacttcctcttaacctcaccatatttcggagaatcctgaattccattaggggaccgcctacagcgattactggacggttatcag

SEQ ID NO: 114280 - DNA, 514 bp, Physcomitrella patens
  Intron number 2 from transcript Pp1s85_21V6.1 (locus Pp1s8 5_21V6) derived from phytozome v7.0 (chr-ID scaffold_85; p os 120320 to 120833)
agaggaacagtttcaagttttgattcaaattagaggttagtctttggagtttttggatgtgatgggtacgtgttcatgggattgcgccgtggaattggtgtcttttgtctgtggcagttcaacaatgtttagttacgatggcctaattgggtctcacgtagtgtgctcggttgcaagggtttcgtaatctttgtgtttaaaaacctggttggtttgcctgagaattatttcttgggttttctttgcttctgttattgaagtgttcggtatggcaagtagcattaagtcaaatcagtcgaaattttgtcttagttgtctcttgtgccgtcttgggagaggtgtatgggaaaagagttgacgagttcatttcgaataaggtttgaattggaattgtaggtcattgacagagtttagtggagaagtttgtgtactacaggacgctacggatttcaaatccagaggtttgtgtatgctagtatcatcgcttaacttttttttggtttttttagaactc

SEQ ID NO: 114281 - DNA, 251 bp, Physcomitrella patens
  Intron number 1 from transcript Pp1s158_132V6.1 (locus Pp1 s158_132V6) derived from phytozome v7.0 (chr-ID scaffold_1 58; pos 674362 to 674612)
gattgccattggtaagacttatactagaaaccaaagtaaatatgtctttgattaaatgtattaattattatttatagtttttttctcactcttctttaaattaatggtgtttacatgcctttgtatgaactcaagttagtaagactaaattaaaatgtaatatatgtatcattcttattttttttgttaatttgtggttaaatttgttaattgtaggttgaatcatctggagaggaaatatttggtagagc

SEQ ID NO: 114282 - DNA, 1051 bp, Physcomitrella patens
  Intron number 4 from transcript Pp1s21_332V6.1 (locus Pp1s 21_332V6) derived from phytozome v7.0 (chr-ID scaffold_21; pos 2011844 to 2012894 reverse strand)
gtgattgtcaattatctgtggcaggcctgtcaacagtgaggtcgccaacggctttgggatcttttgaacaccttgatcacaaatagtgtttggtgtttcttcacggtgtacgcacactgaaattgtgtaggttggtcggagggcaatctggtagaatagtgatcaaaacgtgttgcgaaagcaaccactcaaactgtcacgattcggtttcaatgagaagagactccttttttacaggaacaaagaaacccattcgtgaccttttgagtagtttgataaatgcaatttgcattctttaatgccacgaatctgtgtatctctgaagcacatgataaaaaaagaagacgtctagcttctcgaagcaaagaattttgtcgagagcaaatcgcttcacagcagcaaagagtcgctggattacatcattcgtcgctggagagtttggaattccaacttgaacccagtatggtttcttatgcattgcattcatcttgcctttgttatcagatagacacgttcttctttgtaccctccttactagaaaaagccatgaatccttgacatctaaagaggtcatttcatccttgttactctaagtcgctacccgttagtttgacctgctaccttgcaacgtgagagagccttgtagatactgcatcaactaaaacttccttttgtctactaagaagatagcaatgagatgtgctggacacactacgaggtagagcaataatccatgtgtgaaccacatcatacatcgtcagatcaactgccgagctgctaggcttgatactatcgaaaacgactttgtgaccgcatttttgtagcttccagacatgctctttgattgtcaacaaaccaagttaaggctgattaatcttgcgaagaatgtgaatcacaatgtctgaagtccatttaatgggtcgtgacagtgagaacaagcactatctggagaattattgctgggattgtgaggtattgtcacagtttagtaatggtctttaacatggcgtctacagtctcggtgagttggaccccaagctgccattgccgt

SEQ ID NO: 114283 - DNA, 331 bp, Physcomitrella patens
  Intron number 2 from transcript Pp1s363_25V6.1 (locus Pp1s 363_25V6) derived from phytozome v7.0 (chr-ID scaffold_363 ; pos 141039 to 141369 reverse strand)
aatcttgtggttagttctgtatcctgattcttgagtgtgttatggacttgcatggcgcagtccgttacacacattttccaattcttctttgattacagactgagacagtgaacttagctcgaaacatttataattaatagtatctgttcgcaatttacgtgtatttggtttggttagaaagagcttgcatgattcaatgaggcaggcatggatgttatgctagaaggttcaaaaaacagcttctgtagcttcaatattctccctcatttctgcaatcctggaaacattgttctcaattagggtttgtgtggcggttgtgttcaggcaaggc

SEQ ID NO: 114284 - DNA, 667 bp, Physcomitrella patens
  Intron number 1 from transcript Pp1s106_83V6.1 (locus Pp1s 106_83V6) derived from phytozome v7.0 (chr-ID scaffold_106 ; pos 495934 to 496600)
gtgccgaagcaagagaattccatccacagatttttgtaagctctttgggtatttaccttttctttttgtttttattgattgaatgatttatttcttaatagtgtctaggtactctttgaagtaacctctctctcgtctaataaatgtgtagcggtcatcgtcaattcattgccaggggtgaagtacaaatgaagcatgcagtattcatttcttagtgcacggtttctggaagagagggattgaaatttacagtccccagttacttattaacacaaactgtctatgacacgtattgattgctctgttcttagcttcccttgggtctcttgaggccaaggagatgtgacttagtttgaaatacaagtgtttttaaagtacggttcaggggtcttctttaaagtgtgtgcaattgaagaattgagggaattgctacgacgcccttttcggttttcttttagaggactcacttcagatgcttgtttgaggtgccacatagttgctcgcctgaggtatgagtctgagagttcggaagatgtactgggcatgtctcgtaagcatacgactacgcagacacgttgaagagtttattcattacggtctttgtctcgacaatgaggaacagcagaatcttaggatgctcttttttgaggggtgtgcaggacggcta

SEQ ID NO: 114285 - DNA, 734 bp, Physcomitrella patens
  Intron number 1 from transcript Pp1s158_27V6.1 (locus Pp1s 158_27V6) derived from phytozome v7.0 (chr-ID scaffold_158 ; pos 221382 to 222115)
aacgctcctcacgtgagacgaacacaacctctaccgtgtccgaatttttggtgttctcttggtgccgtggaatagtttcttgcgctgcattgagtaggagtgtttttgtttttgttttttttgtttgcttccttggaatggaacttgttttttgtgctcgcgcgttgatgtggatttggaattttgtgttagatcagctcttgtgcgggtaatgctgagttttggtagttcgatgtttttgctcgcatggttggtgacgtatgtaggaaattgtggtggagggaatattcgggggagtttgcgtataggttgcacggtagcttgatgacctatcgtccaggaacggtcttttgcttgagctttagtggtagtagtagtgggggagtagaaatgtcgattctgttaccatgctctgtttttgtgatgttttgttttgtttttgtttttgcgatttattttgcgatacgtaaaatggcgcctgctttgtttgtttagtaggtagctaggattttgatgggaaatttctgcaggcactggcgtgaaagtttcggcttagaataattggtgaatttgacatacaaggcctttgcaagttcgctaggaaggcgcaggcagagtgggcgatgcttgaaagccgaagaaactgcagtcttgttggaactgttttttcacgtttgtgcatgtgggcgtgtgcagcagcagggaatcgtagctttggacggcagaatttgttg

SEQ ID NO: 114286 - DNA, 797 bp, Physcomitrella patens
  Intron number 1 from transcript Pp1s285_7V6.1 (locus Pp1s2 85_7V6) derived from phytozome v7.0 (chr-ID scaffold_285; pos 107451 to 108247 reverse strand)
gtcgaccagctacactgggtgcgtaaaccaccctcttgcttctaaattaatcttgttaaatgcggtatataacaggtcgtttagatatcccttaacagctcttatttaagcgcacactcgaagacgtcccagtgacagcagaattcgctgtttctcagtagatgaatccatgctttcgacttgcggcttggacacttcttggagccagcatctgcgagcagtggaagtgaatgaactggcggttaagaagttggtatctctcggactcagagtgaccagagtgaatattaagcgtaatcccattggctagtgggattatgatctggccactctgccccagagtgatgcttttcgctacgggacttgtgcaattacaaatagagcgaatcaagacctctgctatgtgattacatcacgaggcttccaatgctacattgggaagagatatggagaacaaagcaaaagagataaatcgaaagcatttgcaaggcaagggttgtcagctagaaagacttcctgttttcaacaaatttcaattgaatttgcagccaggtggatatgctgttggattgccatcctactgctcatactttctaaatcgtttcctttcaatctttctttctttctttcttttttatttatttatttttgactatagacatcgtatctgcaaccttagtctcgtgttcagctaattgatctgacaacttcgaaggatttcccttctagaattcttacaacctcgccgtgcttgtatagcagagtgaactggttcctgtgctgtctttggaagtgac

SEQ ID NO: 114287 - DNA, 875 bp, Physcomitrella patens
  Intron number 1 from transcript Pp1s235_37V6.1 (locus Pp1s 235_37V6) derived from phytozome v7.0 (chr-ID scaffold_235 ; pos 184397 to 185271 reverse strand)
ttcttgcagctgggcgggctgcttgctacaaggtttgacgtaatttcgtcatctgcctctttgttgctatgagttcggaacagctcaccagcttggaccgccgctcttgatgattttgataagtggcctgttcttctgcttttttcttctaatccactgccttggccttttcctctcgctctcgctgatgcccttttgcatggcctttaaaataacaattgtcgtcatttctgatatatgcctcaagaatcatgcaaatcctggaccgtgttatataatttatgttttagagaatcggattttgtttcattcggattcaacttctgggccgtcggaaatcctctctcgtagttcaagattgccggggttcaaggtccttcgtggcgtagacgagtatgcattgtccttccaagaggtgaatgacacccgaaaggaaaacaccctcaaaattttttctagttaattgtaaataaaattgggacgattgccgatgcacgtatctttcttgtcagaaaatgaccgatatgcagctggatcaccccacttattgttctcgaaggtcttaagagtctctacacaaagtcctagtcgactggcttcttactcgttgctcgatgctgtaaattttcacaagccggcagtgtaatgtgtgctgagaagagtatcctgcggagcattagacaagaacttgaacgggatcgggctttctttggtccaattatcaccagatgaagtcaacctgtgctcgacttggttttgcttaatagcaatttcaaatgctgactttgcattctgcatttttagggtgagttctttttggttaagaagcacacattcaaactgaggctttcctgttggagtaacacaggcacggg

SEQ ID NO: 114288 - DNA, 810 bp, Physcomitrella patens
  Intron number 2 from transcript Pp1s317_82V6.1 (locus Pp1s 317_82V6) derived from phytozome v7.0 (chr-ID scaffold_317 ; pos 486833 to 487642 reverse strand)
aaaggtgagtttgtatgtatttatatcgaccaatactggttagaacctaattgaggatttttggatgaatgaggggattaatttttggggatgaagagtcattccaagccatgagaattactcttttgtctcttgtggtactgttgtccttttttttgtgtatagctttggaaacaataaaacttaactttaattttatgatttccctttttctttaattaagcaactaaaacattcagaattgcaacaatcaaatcacacacaagtaagtgtttaaattttagaatgtcaatttcccatatgtatgtatcagtcatgtttataaaatactggttttctcaccaaagattacaggaaaagattgaaaactcttacaacaaaataaaataaaataaacactgttcaagaatgtttttccaacaaagatatgtgtttagagcaatattgcctcctcgactagcattttctgggtttcatctcttctcccccccacctttctattttgttcatttttgggtaagaccatgtaaatttggaggtgtattttatggctgaaaaagcctgacagaatgtaacatagtggaagtaaacacacatgattaccactctcagagctatttcttttaaaattattctaacaataacaataatagtataataatacaaacagagagagggatggagggggggacaggttctgggaagtgtccattgcaatgatagtacttgctcatcatggtttatggacacatgctctctctctctcttttcattgggaggagaaggaggaggcccaactcccacattggc

SEQ ID NO: 114289 - DNA, 363 bp, Physcomitrella patens
  Intron number 2 from transcript Pp1s217_5V6.1 (locus Pp1s2 17_5V6) derived from phytozome v7.0 (chr-ID scaffold_217; pos 21778 to 22140 reverse strand)
agctgacagtgaccaagtccctgcgatttttgcccgtatgtggtcagtcctttcatgaacaccaagtcattatcatcccctaaaattccttttaaaatatccctaaatacgtgctagtttaatggcttatgacgctgaatttgttgattgaaagtgcacgctgttttgagaggaccatttggtgcctgaatgttgtggcattatgaatgcttcggcgtctttgcacgactgaaaattcatatcgctggatgttcatagacgtattcccagtggtctgcctcttcttttatacggccagttttgtttttgttgcaaataaataatgttgtcttttacagttgtcagtagttcttcatcagaaga

SEQ ID NO: 114290 - DNA, 963 bp, Physcomitrella patens
  Intron number 1 from transcript Pp1s69_198V6.1 (locus Pp1s 69_198V6) derived from phytozome v7.0 (chr-ID scaffold_69; pos 1312889 to 1313851 reverse strand)
cgcaaatcctaaacctagcgattggaaggtttgcggtaagtttagagctctccaaaatgagttcgatttgaagtgaagctgaagacatcgtcggactcttcttaagtcttgctttgcggattgcagagaggtttctgttttctatagaggttttcccctttggagtgagttagggacgtgtatctgtaagtagttggcggaaggattttgtgcatatgtagagatgtgaaagaggcttggatcggagggtttcgagactatcatctgctaaatttttagtgctatttcattgacgggattttttggttgcatgtgacgaagtgcaaaaagagcgtctgtagatgattatacgctcatggttttcgagatgctattgtttatggcttctatttcgatttatttgatcataaaactgttctgagtagtctggtgaataaggtgctgcatagcttctcagatttgtgtgttgtttctttttatggtaaaatagaggtatcatactgccggttgttatgctggcgcttgatgattagcatgactgtggatggctgcattgctacagcttctcggtttaatctggtttttctgtaattagcgactcgtgcgaagagatatgacgcaagtgtcatcttgttgtagtgtatgatatacctgtggttgagttcctgcttagaacgtaggcgaatgagatgtattttgaatttatgtatatgcctttgcagcttttcgttcatttacatcacttttacattattatgccacgcttatctcttctttgagcttgccctatgagatctagttgaatgagttcaatatccatgtatactttgtgatatactctactagagaggtagaatgtggagggtatttgttgtacttgtttaagtatgatatttggatacgctgttgatactgactgtggcgctaatcaggaacttttgcgtgcagattcccacgccaact

SEQ ID NO: 114291 - DNA, 769 bp, Physcomitrella patens
  Intron number 2 from transcript Pp1s2_281V6.1 (locus Pp1s2 _281V6) derived from phytozome v7.0 (chr-ID scaffold_2; po s 1385505 to 1386273)
tttctggtattgttaatattacgtcttccttatttttggtaatgagatgtcatattctgtccggacttgtgtgtatttgtttttatgacagccacaactattgagcaaacaattattgatgcagttgctcaagttttgattgtgtgataactgtttgagctggacttacgagggctatgtgtatttcaggcccatttccttcaatttaatatgttctcatatctaccttctcaagtaacacgcagactatgttcctacattttcagatgattgataatgatgcatccaacttcaaaggagttactcgacaacctttttctgttcgttagagcttggatatgagttgcaaagcatgggatttgaggagttattagagcgttaaatttccgttgagtgcacgttaagtttttctcttaaagaatatattaggtgactgaatttctcaggttagattttgtcatcaatcctcgattatcacttaaattgtaccattatctaagttctagattacgaatagcaggtttgttggaagcagttgtggggcgtcttcgaaatggacaatgtcttggtctcttccattttagtcttccacatcctgctttggttcaaacgggtcgagcatcttttgcggtatttggatggagttttctccttacaggtggaagggtggagttttccgacacgaaattgattgcatgctcgatcttgtttctacatctacacggtaatgtaccaattatcgtctttaaatgcaggctcctcctctatc

SEQ ID NO: 114292 - DNA, 955 bp, Physcomitrella patens
  Intron number 2 from transcript Pp1s15_349V6.1 (locus Pp1s 15_349V6) derived from phytozome v7.0 (chr-ID scaffold_15; pos 2001434 to 2002388 reverse strand)
caaccttggaaaaactggtggtgagtgagtcgatgacacctctcattcggaaagtcgatcttacagttggttttcactactaggacctggtcagtagcctctccagtgagaagatgcaacagaattgttcagagttgggtttgtactgcattcgtataccatgggttttcggagttaatcttcaggtttctgacggctccaatcttgaggactttgaaactcagtgtcattcttttttgttttcagtgagaagtttcatcaaattgaatgaaaccatcatacatcaaaaactagcggtaatagtaataataatagagcccatgctctgagaagatatagtaatcaaattttgaatagcgaacaacgacaactgttgaatgtaatgctacggttgagactggcataatctcacagtttttgagattgcatgatcttgtcatgtggcaaatgacatgtcagtactccacactaaaagctgtctattatagctcattttgtaagattaataacaatccaaacccatgagaagcagcgacacaagatagaccatatattaaagtgagataagtattccgttttcatttatttcgaaacaaagaattatatatatatatatatatatatatatatatatatgcacgacaagccaagttttttggttcacagtgacagtttttttttattattattgaaataaaaagcagaacctttctcacaattatttatatcatgtcgtgccatttcaatcttcacccatgtactaacttcgtcgtctctaagctctttactgtcaataagaaagcagccagtttcaaaaacaaaaaaaaacaaaaaaacaaaaaaacaaaaatcaaaaaatcaaaaaattataaacaaaaaaatatatatgtatgttttgaagaagatgtgcacttttgaaggtcaacaactcgtgcacctaattgaagccacgcgg

SEQ ID NO: 114293 - DNA, 845 bp, Physcomitrella patens
  Intron number 1 from transcript Pp1s346_33V6.1 (locus Pp1s 346_33V6) derived from phytozome v7.0 (chr-ID scaffold_346 ; pos 344563 to 345407 reverse strand)
caagtgtgctgagatccaggccgccatctccgaaggtgggttgttttcctcaattcttcatgtaaacgtgattcaatttcttttgagattcttgtgttgccaatgtatgtatagatgcctcgtttcgcaggaaaatcttctttagtccgtttattctccgcacacaatgttccctgcatctgtcaagcttcggttaaatgaatcgtggtctaccggtagtgaagttggattataagttctacatgttctcggggcttggtttgagagtcaatttctcaaacgcatcaacagcgtctttctaaatcccggaagtcgagcacttggaaactcagtgtgaaaattttgagctgacagtatgaacaactagatgttgacaagatgttgacttgtcgatcagtgtgcttaactttcaccatgggcagttgagtcctctgtggctgctgtcaactacacagcttaactaacactagaaagagtcccattagctctttaacgtgacttcatctaggcatgttgactctggcggcacacagagccattccggtgaatggaaatcttaccctccgcacgtataacctaacgcattccctggtaatttgaatgtaatatacttcagccaccctcatttgcatccgatcttattctcagctgagattggcacccaattctcgaattgattgtccttcctcgatctattttcgaccatgtccggtctttcactttcagtctagagttgtgtgtgtttaaactagtatccagacagccctggtcacgttgaaattttatcctttcactcgtagttaatcaaactgcgctctgcaggttccgaggcattcttgacgaca

SEQ ID NO: 114294 - DNA, 999 bp, Physcomitrella patens
  Intron number 2 from transcript Pp1s47_261V6.1 (locus Pp1s 47_261V6) derived from phytozome v7.0 (chr-ID scaffold_47; pos 1634346 to 1635344 reverse strand)
tgcgtcaagccccttgttgaaagttgctgcgctgggtacgcaaacacacggccacacatttgcctggatgcttaactacagtatcctgatcttatttctcttgtgccgctcagtaaacttataagtttgaaaggagtagagattatgccctaaagcattcgcttgtatggagttgctgagctccatagtaattgcacctatcgaaggattttttctgtggtcgttgtgcattcatgataaaattctcaaaattttcggcaagttggtggattagacttgttttggacacacctccagatagaatcgaatgcgagtggatgcagtctgcggaaagagcaatggtgggggcattttgcgatagttttggtaattccatactttttacgttgggaattgcaaaggaaatcagtggtggaaagtaattgattcaccttgcaaggctggtcgattgtggagaagaaacaaggaagaacagtatgggatttcgtttcattgtagtcttggagtactgtggatagagcagaattgtctcggaagccaaggccggtgggaaaccaaacaggcttgttggtcgacttttcgactcaagcatattcgggattttattggggatgagttttactgagatttcaactcatccgtttgtagctcgctgaagcgaaagttcttttctgtaggtttctgaaatctcgggtcgtgccctcgcctactttgctcaggacttcgcagggatgaactcagaagatattagattagaagggttcatcgatggattgtgtataatatgcttggtgacgtaactttctcctataattacctattcaattaataaatctagttgacaatacccagctcaagggtttttattttcagtaatgagctgaatatatgtggaattatgacaaatttcaaagtcaggaccccctcgcgttcaatgtgtgtcattggtgtagacttgtgaggaaatttgatgtggaagtttctactgacacaggtaca

SEQ ID NO: 114295 - DNA, 832 bp, Physcomitrella patens
  Intron number 1 from transcript Pp1s28_408V6.1 (locus Pp1s 28_408V6) derived from phytozome v7.0 (chr-ID scaffold_28; pos 2538124 to 2538955 reverse strand)
aagattccaattatccccgctagtattgggactatgtatgtttctgtactgccccaaccacgccaacatgccggagagaactgtagatgtcagtcttccgaggtgcagtgaactcatcaccctccaacatcattgactacttcttgtagaactgttagtggagggtgatggaggacttattgctcataggagcttgtggaagcgtatccagtggtactgagttgatttcagggaagcaaggcacaggttagggttatcaaagtgggtttacggaattgccgcgatcgatagagttgctttgtagccttgggagaggtggttgtccacgcacgacgactatttgctgtggctggttgccactttttcattaacaccaaatgcgtgttcggtaatttggtgttgtgagacttaagttggttcatgtattcttctcatgcctttctccggcttatctatgtcatcaatatcagtttatttagttgcgaagcatgtggtattctctgctcaggtctaacgtacaggacatgctacttgttagctttcaaaatattttacacaatgtcgttacactagtgtattcgacaacctgatgattctaccagttgggcgactaccttcagtatgtctgttagagggcttgtatcaattgctactacaagcaacagtgagattcgtgacagttctaaatgtcaaagctcaaacctaacacttaacagggcacataattagaagttcaatcaatagttgccgtgtattttcttacgcggtggtttatacagcaatttgcagctggaatcattctgatagagatctttgcggtgctcaggcagtc

SEQ ID NO: 114296 - DNA, 777 bp, Physcomitrella patens
  Intron number 1 from transcript Pp1s60_154V6.2 (locus Pp1s 60_154V6) derived from phytozome v7.0 (chr-ID scaffold_60; pos 972905 to 973681)
agaagacctggcgcgcgaaggagtcaattgcgaaggtgattcgtgagatttctgagatgtttatggtggaggttgtcatcgttggatctgttgctgaacttcgggtgtgagttttatgagttcaactcgacgtagtcgtctttcgtagtgagtgtatgttgatgagtcatcctcttcgcgggattgggaactcctctgcagtatcattggtttgtccttcacggccgtcgcgcttgacttgtgcatggtttttgcgcttgcgcgtgatctccttgatttcgagatagtttgaaggagtgaagttattttggctggctgagtcgcggatgtgacttattcttcaacgaagcacgtctgagtaggaaaggaaagtctgagctttgcagctgtggtggtcgttcatgatttgggacagtgctgttcagggtagtatggagtgaaattttaatgaagtggagagagcttggcgtggcacgtttgtttgagttggattttagggtttaagcagttgtagaagtcaattaggtacagaagtttgggtgccttgagattcacggagacatattttggcaaagagaggctggttttagtgagcgagtctttggtgcatagtaagagggggtttgtttctggtggtgaagcttttccttcattggtgtgcattgcgagtcctatcatagaggttgcattgagccaattccgttttttcctttcttttctttttgggtcatttatctttcaggggcgtaggaaattgctgtggctgtgcttagtgat

SEQ ID NO: 114297 - DNA, 532 bp, Physcomitrella patens
  Intron number 2 from transcript Pp1s60_154V6.2 (locus Pp1s 60_154V6) derived from phytozome v7.0 (chr-ID scaffold_60; pos 973870 to 974401)
ccacgacgtcagtgttcctgctcactccacatttggtgcgccataccctaaaattttgcttcaatgataatcgtgacaataatctagataaattagcatttttagttattattctgcgtatgccctcagttgatgttttgatcgttactgccttactattaaatttttggcattcacgacacttcatgacattactcccatggaatgcatggttcactatgttaatatgcaggagctgttttagtgtccaggaggtaattcattcataacttgaacgaatttcctgagcagagtttctgtagcgtctaagttctttcacttctacgtttcactgtatcgttcgaatcctgttaacaaccgattggggtttagattgttggaccttgtcaagaatagtgcatgatatattatttttggtatcttggggtttttcttttctttccttttttccttcttttgcttggattgaagttgatttcattgataatcaaatgaaggtgatttgaagaggttactggttggagacacgggt

SEQ ID NO: 114298 - DNA, 667 bp, Physcomitrella patens
  Intron number 1 from transcript Pp1s269_66V6.1 (locus Pp1s 269_66V6) derived from phytozome v7.0 (chr-ID scaffold_269 ; pos 431974 to 432640 reverse strand)
tttagcgtcactgcgagcgttcgggctgtgtagaagtatatcaattctgttacctcattgatcggcagtctgtttttatttatggtatctgtatggagaggtttgtgtagattgtagtttttaacagttttttttaaggtgtgctggtgatttgaggaggttgtgttgcggtagaagcgagggcgatgatgtgggtgtggtgttacaaggctatgaagaggaggatgcattgttgtgttcagtatattgtgtttccctccgtcccgtttgatttagttactgggtgtgttaagtagtgtggaataggtcttttttttttttttttttttttttttttgtctttgtttgttactctctcacctttcaatctccttacgtgtgtttcatcagatttcattagattgtagtactaggggaataatctctggcacttaacacgctaaaaattggattgcacttcagattggttttctgtattatttggagaggttgaatctgaattttctgtgtccgattgattttagtagaagcgaagtaggttcaatctcggtgtgtcagtgggtttgtgtctgcatgctccttttactttcttcctttcttttgtcttcatttactgtcaccttccttccaattattctataatatttttttcacggcgcagggaccg

SEQ ID NO: 114299 - DNA, 338 bp, Physcomitrella patens
  Intron number 1 from transcript Pp1s2_775V6.1 (locus Pp1s2 _775V6) derived from phytozome v7.0 (chr-ID scaffold_2; po s 4721859 to 4722196)
gccgagaccacaaacgatgtaagaattctggaaattacttttgaaaatcaaagttttatcatttatttattatattttgataaaaccaacaacctatctttgtggtcctgcaactctgaagtatcttgaattttcttttcttgacatgaatccaccttttcagctatgcatacaatatgtttttctccttaccaatggcttattatgttcttgttgattggttcaaaccatgtcggtgattgttgatcggttctttgccgtttaatttgtttatttattattattgttctttgagaactacaggcagaagatcgatttacaaggcccagatcggcatc

SEQ ID NO: 114300 - DNA, 765 bp, Physcomitrella patens
  Intron number 1 from transcript Pp1s349_1V6.1 (locus Pp1s3 49_1V6) derived from phytozome v7.0 (chr-ID scaffold_349; pos 9177 to 9941)
gtgaccatatcgaaatcaaagatatcgaacccccagtaagagtccacacaaacaattttggctttgtttagcatgtcaagatagaagactttgcaggattacaatgtcccgtttctgggagcaggtccttttttttgttgttttgtcaggatctattacaaacaggtagagcatgtgaaggtcacactcttgagacacatagtttgattgtggtggagtaattggcacattgctccaacgttttttttttttatttttttaagctactctaggaaacagttgattttgtaatttatgcagtaggtttatggcttggtccgtttttgacttctaggtccagatgtaagctgtgtcctgaaacctgtttgaagcttagtgtgttgagtagagtatttctggcactatccccttatcggtatagcttactggatttaggtatctggagatgtgtccgtaattaccagtcgtgtggacaaccattgatagttcatagtccacgcatgcgaagttatttaggttaattttaagcatagtcacctaatactcatctgggggatttgaacacgacgtttacaggtcatttatatttcttcttgctgaaaatgctgggtttgttttatttctttctcttgagtccttgggttgttttatattattgcaatggctaggattttgttgttaaacactgacgaggacttggagtatatgctaactggtcgttctctggcaggtgtttaaagcgctgctacattttatctatcgaga

SEQ ID NO: 114301 - DNA, 555 bp, Physcomitrella patens
  Intron number 1 from transcript Pp1s443_2V6.1 (locus Pp1s4 43_2V6) derived from phytozome v7.0 (chr-ID scaffold_443; pos 18771 to 19325 reverse strand)
gcatcatcttcccatctggtgggatctgtttggttagtctctctgctcgatctgggacccttttcatattgtacctctgattgccttgaatttggattttatattcgaagctgtgtctttggaattgtactgagttgcaatgatctgtcctgagtcctcggtggagatttagtctgttagggtatgataacctaggcgtcttgtttcttttattccctccattggattctagttatgcgacattggtttgcttcttcgttgaactctctttccgactttcgtccacaagaatgtccaatcttatcccaatggctgtggttcatgtcttgtccacttcaagcccttcttctgtgctacgtgccaacacacaaattcgcgtattttgttccttggactttctaccttgatttcgtacccattggttttaaacttgctatgcagaatttcaggagattcacatgcgtgacgacctagatgtgcttccttcattattcgtattgtgaaagtgggcattgatccaaatttgagttacattgacaggtaatccgtggatct

SEQ ID NO: 114302 - DNA, 659 bp, Physcomitrella patens
  Intron number 1 from transcript Pp1s9_214V6.1 (locus Pp1s9 _214V6) derived from phytozome v7.0 (chr-ID scaffold_9; po s 1549184 to 1549842)
ctctttctccggtctggacagcggggaacaatccggtgagtagccatctggaacgagaaatgcacttcgtttcttgcatttcaatacgttccaaccctctattttgttaatgacgtcgtatgagttacgacacctgggtttagacctacgtgtatctctatgttgcggaatgaatcatcatggtaaaatgattaccacgtatttgtaggccacatgattgactttggggatagaaagtaacaacttcgttttgaaatcaactgattgtttgtagttcattcatgattcaatataaagaagttgatttgcacaggattcgtaggagtattcaaacgtcctaattcaaagttctcatgtcattcgctatttaagtacggatcactcttcaaatataagatagaatttggaaacaaatggagcgtcatacacagctcatactggatatcacaattgatgttcattttcatgtagattgtgtacgtaaggagacggtggaagtaaagacatatcaaatcagctactgcttgttgatattctattccatttcatgagttattcaggctctgataagtgtaggaatgaaggtcaggcgtgcattgatgtgtgaagcttgcttccttgcagtcgattgcggaggttttggaactgcacgaatcggg

SEQ ID NO: 114303 - DNA, 773 bp, Physcomitrella patens
  Intron number 1 from transcript Pp1s113_21V6.1 (locus Pp1s 113_21V6) derived from phytozome v7.0 (chr-ID scaffold_113 ; pos 116451 to 117223)
gaaaattccataatcgatcccagtttaattcacaggtttgaacttctacagtcaccactgtgatgaatcaaaagcagaaaatgttcattaattaattgatgaacaagaaatcttagttttacagtcgttcgatttgtggattctaccttgtgtgcaaacgatgtaaccatcggccattccaaaatttcatgccacgatcttgttgatgtagagactgaaagaagtttgtgttcgctaaaaccagtattccatgagcctctactgtgatgccaattctcctaacctcacaaacagaagagcaccgcctgccactctttctagatgttgtgactcaagccgctcttcaacttcaccaccgaagttctctgcacttgaggttttaaaccgaaggtccggagctgctctgctcaacaccaagctgcagcatgtctgcaaatgtaggcaacaggacgattcagatcctactcactttcattgatctttgcaagatgtgattgtcttacatcagaaaattgttaagagcggggtttggatggtttttcccacttgcaagggcaaccattggctttggtttgatagtttctcaacaagagtaggacccaggcaggacaggtactcgagttgagttccggcgtttccttcggttttattcgctgtatgtgacctttaaatccagtttggttttgatttggtgttttgtttcgttttgtaagtttactcctaatttttcaacggcagggattcgtctacctctccaactcatcacccgattt

SEQ ID NO: 114304 - DNA, 384 bp, Physcomitrella patens
  Intron number 1 from transcript Pp1s89_23V6.1 (locus Pp1s8 9_23V6) derived from phytozome v7.0 (chr-ID scaffold_89; p os 56592 to 56975 reverse strand)
acaagagcagcgagtttcgtcgcattcacaaaaacgtacgtgatggggaattctgccgtttgctatgcattgtggagattaggaagtgcattttctttttctgctactatccttgtggggaatggcgggtggggtgttcagagtaatattgcgagaagttcctccatcttcgtattttgctcaatttcttagaacccttcactaccaggaggataggttttgcacagtcgccgctggaaatttcatttgtttgcagcattcgttttgtttgtctacagacccctgaagccttacgtggtacgcagtgcgttacgcgaatccttatgcatcctactgaaaatttgaatttcgaacttcatggttggatgatgacagattgcgagg

SEQ ID NO: 114305 - DNA, 547 bp, Physcomitrella patens
  Intron number 1 from transcript Pp1s310_4V6.1 (locus Pp1s3 10_4V6) derived from phytozome v7.0 (chr-ID scaffold_310; pos 80345 to 80891)
ggagttgtcggacacggagattccggcctcttttggtgcgcttcttacttaccctgcgctttgtgttctgggatgtggttgtgactgcgacgctattttttttctttgtctcctgtgtttcttgccatttacggtgtgaccgcgatgtgattctcttctgtgttatatccggggcttgcgtttcgagtgtttgttccttttggggtttgcccgtatggttttgcttgaacaagtcacattagatattgtgctttcatccgtatggaaggacatgactgggtttatgttcctttgtgcatgttttttacaccatgcttggtaatgcttgtctacttcggatattcgttacatagtcaagttttttattcccggcgacttgtgcttacgtttttcacccaatcttggacttgcgtaaacttctgtcagtttattgtgtcaattaccgtcttttccggtccttatgatattattttttgggtatgccgtatggtcgttatgactgagtcttggattttgaattggtgttcagacccattcgcggaagcga

SEQ ID NO: 114306 - DNA, 873 bp, Physcomitrella patens
  Intron number 1 from transcript Pp1s15_198V6.1 (locus Pp1s 15_198V6) derived from phytozome v7.0 (chr-ID scaffold_15; pos 1306012 to 1306884 reverse strand)
aaatcgtgaaccaggtgttttcgccttccccttcctcgtcaccttcatctcctggatagttggatttctgtagagccagcctaaaaattaaaggaaaacggccgaattttgtatcctgctcttcacaaatcgaatagacggagcaataggagcttggagggaagcacgacacaggacctaagcatgctttccgatcctgtgatgtgtttttctttccagacgtctatgtctgcgtcccttcctctttgaatcttgaggcaggtcttcgcctagagaatagaaagggtttagaataatgattcagtgataggcagctagagtatagaattcacttaattcagctgccaaaatatgttaggaaacatgtacatcaagtagtcccaagtcctgtttgcaaccctgaggttgattgcgtgtctgcgtcggagcaatctagtcatgttctagcactcagtcggtgtggtcggtgtcagcaactgtgtcgaattgtttggtgactatctgtaatacaccaagccataacgtatactttgaaaaaaaagtgtttccggtagtatgaatttcaccttgaattgaacaccctaccgataagagaattctcgaacgagaacgattgtaggtgctgtcaaacgattctttgataattccattgtgaatctggacagttccaattctcattcacttaagatagtcagctcatctacaacttctgccattcatggccgtgtcggatgagcggcaaaatggaggtctactttgtaaattgattttgaaaccactgcattatttcatgacgctaacgttgtgtcctgccgccttgtcggtgctccctgtgcagatcatcaaggaactagcccacgaagcccggcctct

SEQ ID NO: 114307 - DNA, 620 bp, Physcomitrella patens
  Intron number 1 from transcript Pp1s49_167V6.2 (locus Pp1s 49_167V6) derived from phytozome v7.0 (chr-ID scaffold_49; pos 1408657 to 1409276)
tcaggtccgtgcgtagagaaccaatcttggtttgcgtacgtgccatcttgctcaaaatggcttttaatacatcactgcatttctctctatacttttctttcttagagtcaggattagggttggaggcatcctggtccttctgcattgtttgcagtgcacctctgatttcttcgtagtaaatcacttttaggcgtgatttaaactttcgccttgtttttatatctgtttatcaatttatcaatttttcatgttcaattttttgtatctcttctgcttccaggaatcacttcatagccatgttgaaattactctatctggtagtatagccagttttcaaactgtatgcaaggtttacgaggcactagattaacttcaacctcaaatcctacatttagaaataatttgatgactctgttttgaaatttaagatatgtttatttgtgaagccggctcttttcttctttgtttttcttatttttattttcttttattttcttcttgtaataatcaatgtagcccctacagtcgacaacgctgtgccgtagattttggttctgattgattttcacactatcatatccatgtcttgtgcagattgtagccattgtattgcttcagat

SEQ ID NO: 114308 - DNA, 662 bp, Physcomitrella patens
  Intron number 1 from transcript Pp1s106_127V6.1 (locus Pp1 s106_127V6) derived from phytozome v7.0 (chr-ID scaffold_1 06; pos 845029 to 845690)
caggtacgtaagttttggtacgtagcggccagctgcatttcctacaagccagagcaactgtttaatgtcaatatcccccatcgcctttaataaacgtgacacattttcttagcgtttcccaacatttcgtttgtttttactgtgtgcttgattggttggaatcagtaacttataatactcaacttagtatttccccaaacaaatttccgggatgatcatgacttgtgatattctataaggaattctcatctcatgctgaaataataacgctagggtcatgccaatgctctttccattcttctttttctttttcttttcctggcttttcccttcccataatgcgaactgattgaacgcggcgtttgaaaagacgaacaatcaacttcagtgtcgccaaagtttgagagaaacaggatttgctgcttaaaacgcttgttcaacgaagaaaaccctcactccgattatcatagtattcggcaagagccagatgatatgaatccctttcacgctgttcactactttcacactatggaccgcataccttgaaatattgagtgtccgttgcaatccttgaatatttaacagcaattgttgtaaccagacgcactgtgtggattgcatgttcagagagtacttccccgcgcagtgcgcactctaccccg

SEQ ID NO: 114309 - DNA, 947 bp, Physcomitrella patens
  Intron number 1 from transcript Pp1s30_351V6.2 (locus Pp1s 30_351V6) derived from phytozome v7.0 (chr-ID scaffold_30; pos 2392324 to 2393270 reverse strand)
ctcggaatctcaccgtttcccgtgttgtcatcgtatctagtcttactctttacttgttgtaggttggattgcatgtttagggtttatttggtttgtgggtttattagataccaagcagagaactgattgaggcagctcatacgggaacgaactgtgctgccggaagaagctcttcattctttatttagttgttcccgagattagttgtttctgaaggcgggcagcctcgactatgatgggcgaaggcagtgcacttgtgaagctgctcctttggtttgtagtcgtaggagccgtagtgggatgaattttcaagttccacgatgacgaaatgtcatttgggtctatgtagatctgaatgcatgttgatatcaagtgctgtagttggggttctaaggtcatgaacaacaatgtttgaaaattccgaggccttgcagcttaacttgcctaactcaacaatatgcataacttgctgttggaactccatttgaaataatcggtgcctgtatatttgcgtgagatcagcctttgattgacagtctttcactgcagcttgatgcattacactgtagtatggcgcaactccttactgattttggatactaaccaggtttatttctctttagttgcaacacactgccggttttaggcagctctttcgcaatcgttaagtttactcgctattttcgttatgttttctgaacacattccgccgtgctgaagtagcttatgattgcagtaattgagaggtggtcagtttgcattgaagtagtcttttcttacttcactgtctcaaacaagtttatcgatttgcaactaattgctcgtttacggcagcttcagttcattttggatagtattttgaaatagaaatgcgcgatgaggccagacttgtgacagggtgtgttggtgcaggtcacagtggcagttttggtgggagctctgacaat

SEQ ID NO: 114310 - DNA, 1036 bp, Physcomitrella patens
  Intron number 1 from transcript Pp1s438_3V6.1 (locus Pp1s4 38_3V6) derived from phytozome v7.0 (chr-ID scaffold_438; pos 50165 to 51200 reverse strand)
agcttgttggagcgtgggactgttttagcgagtggaagtatctttgtcgcggttttttagattctgcaggtgaatctgaaatgcggggaggaatgtgttgatgaagaggtctgattggtgcatatcattggcatgcaacgttaatgaagaaggtccctccccccggttacattcctgttttgtgcaattgagggcgcgggtatctggtaggtagctctgagtttatttagatttgaccagagtgacatcgagagtaagagggtgtgcgtgtgtgtggcacggggccgagtttttgtagttgaagattgctgcatcacgaacgaaaaagtgctacttaggtgaactctagtcccaccgaagtagtacaagtttacagggttagcagcaatgaaattggtatgttagagtgctctggcagtgggccgaacgttggcttttaacatttttctcccagttctatttgtcgacatgagcttgcactttgccaatgcgtggtagtgtaattgtcgaagcagtcttgcaagattactcacttccagctttggtctgtgagttgatacccacgtccgtttgccgtaattgattgctttctttgttgtgcgatctgatccttcagagactgagggctcgggtgaacgagtgcacgcagttacgcaatcagaatgaacgatggcggggtttgggcactggttctggttgccggaaaagatcctgcctgttcaagcacaccgtgacgagggcgtgaggggctaatcttctcggtcaggaaatacggcagaggggatggacggtgcatgttccccaaatttcgataaactcagtcgttttgagcttgaggcgtgagctttgacttgagctaccgtttgataaccggaaaatgtggatttgatcttgaaattttcctcaggacgtcaattgttctatttgctgggggaatgcgtgagatagatttgaaaacattgagatcatgactgggccagtcattgttgcaaacggttaagagtatcaagagcaagaggaaaccgtggactgagaa

SEQ ID NO: 114311 - DNA, 977 bp, Physcomitrella patens
  Intron number 1 from transcript Pp1s182_50V6.1 (locus Pp1s 182_50V6) derived from phytozome v7.0 (chr-ID scaffold_182 ; pos 422413 to 423389 reverse strand)
ccgcccgtcttcggtcactgaaaggtcttcagatgctctggcaaactgctctttcgtgtccaccatgccgtggttgcacccctttgcgcttttttctgatgcctgtatcgtctgtggtcgttgaccggtggctcttgtgtcagcattctctttgttctgcgtgggggttgtatagtttggagagttatggcgaggcaggaattgttgataatgatatgttgtgttgtgttgtgttgtgttgtgtttttgttttgttttgttttgttttgtttgctggttagcgtgggggtgcggcggtttaatggtagtgtgggacggtgaccatcaggcgcactgcatgtggaagcggtagatattctcagggccagctgttgatggtgagttgagtggacagctgtggacggcaagtggaagaggacggagctgggttagtcgttggtttagagttggacttgaaaaagtgtggtgggcgggttggattttgaggtggtagccaaggagcttcaagtcgcgagaacgacttgttttcgacttgttgaacgtagtattgattagaggctcgtatgctctaaggcactttgagatggctttttcacctgatgatgtatttcgtgctggcatttcaatgcctgataaatgagcgggtattagagtcagctactacaatccttttttttattttattttatcgttctgtagatattccttctactgcgatgcctaagctagatcatccttatgaacggaggaaagcccttcgcactccgtgtcgatgctttcgagagttcagaaataagcgtttaaactctctcactggaaggtgcatgtgtcggatgaagtttctcgtagctcatgtcatgctggtcgctgcagcaatgctattcttctcgagtcatcaccagcatagagactcattatttgtccaaatgtcattgtctgcaggtgcttccacgagagctagagtttagcggcaagca

SEQ ID NO: 114312 - DNA, 953 bp, Physcomitrella patens
  Intron number 2 from transcript Pp1s302_35V6.1 (locus Pp1s 302_35V6) derived from phytozome v7.0 (chr-ID scaffold_302 ; pos 241654 to 242606)
gtgcagagtcagtatcttgtgcggagcaagtgtaggttgtatttcgctctgttggttatattcatatttatttgtttatttatttttctttttaaaatttatgttcttcgtgtgtgcgtgtgcgtggttccgtcttcttcttccccctctctcttttttttttttttttttttttttttttttgattttctttggttctttgctcttcttggtttgatctttggagaggtgctacagctatggaaacaaaattttaggaacgaaaagagcggacagcagagactgatgtgatgttggtatcactaagtctcttcgcatccttaaagcaagaggtgaaagaccatgtcgctgcagtgactttatccttggactttggaacgagactctcagattttagtgcatcatttactgttggtgaagaatattgattttctcaagaagagggaggttctcagtgaggttgtgcccgcagaaagtttgctcactgttagtttcttgctttgcatattttcctttactaccacagggatgcgtacagatcttatgtttgcgatcgaaaggctcctataatcgacgtaactacacacctatgacttattttattcgtccatcttcatatctgcaccgcagacatgcagattgaagccatgctttgtcctacagcatatgattagtcgtccgacttcattcaatacatggacgttcataaattctctctctctctctctctctctctctctctctctatatatatatatatatatatatatacatacatatatgtggatgcacgcattcacacctcatgtactgtgcttgtttctacgcgaatcttagtgagttttccaactgcctgtcatgctatcttatgaagagtacctctgacatgtgcgtttctcttctgcgtgtggaaagcagaaagccattcttacttctagcacttctcggaggtt

SEQ ID NO: 114313 - DNA, 555 bp, Physcomitrella patens
  Intron number 1 from transcript Pp1s37_126V6.1 (locus Pp1s 37_126V6) derived from phytozome v7.0 (chr-ID scaffold_37; pos 673051 to 673605 reverse strand)
aagggctcagtcccgccatttcgcacacagcgaaggtgaacagctcttcactgctgggaaagtatagcaccttgagtctcgaagggattcagattacctatgaatgttgctcaccactcgtgtttctgacttcgcttggaaaacaatggcgacggatttgagggagtgctgtggctctgcgtagcgtttattttttttatttatttttaaaaatgttttctggttgtttttttttttttttgtttgtttgtttgtttgtttgtttgtttttgtttttgtttttttttttggacctctcttgaatgatctctgggagtcctctgttgttgtggagcgacatgcagtaaccgctgacaggcattgcgctaggttttcagtgtgctggacctggtgctgaggatcttcttttaatgtcaatatgggtcaataaggtcacgatgctcaatgatgcagacttgaggcattattcaatttcgtttgattattgagtgctgatcgcaaagcattttggttttttcagatactaaaccgtccacacacgactttctttctctt

SEQ ID NO: 114314 - DNA, 933 bp, Physcomitrella patens
  Intron number 1 from transcript Pp1s130_291V6.1 (locus Pp1 s130_291V6) derived from phytozome v7.0 (chr-ID scaffold_1 30; pos 1107062 to 1107994)
ctgcacgtgaggtacgtgatatcggctatcctctttcttagtttaatttttattttgccctcaggattgagatgaccagctgcatctattactgcgtgttgatttttgtgatctgtacttgcgatatgcttttctgcgagagaatgattgtttgctcctgaggaagtgcttagtttctttgctttcttctctgtctcaaggatttagtcgagtcttccatgtagtcacttcgagggtttagggtatacttggcagataccatttacatatcgtttcatctgatctaattttttagatggagatgtggagatttggcttcgactgccttaatcctaaatcaacgccacaataaatcatttatccagtgtaaattgtatctctgcgtaacatcggtttatcgaagtatcacgcgccttattgattccttgtaggaatcacaagtcatggattagaacatgctgtcgttattgaccatctagaatcgtactatgaactgtattatagttgtatttcagtggtatcaacaaaatctagctcgtcttcgaatatttttattgcgggatgattaaaagaaagatttagtttttcaaatatttatgattcacaattggaactcttccatatttggttattccgtgtttatgcacgataatattacattatgttcaaggcttccgcattgcaaataagttggatactggacgccaattttatgtgctggcaatgaacattttcttgaaaccttgaagtcaatctgaattcaagtcgaaccaataataatcatacttttgttaagttattaactgttcacgattcaagacgtttctcacttgtcatctgcgttcatgtgtgttgattcatggttccattatcaagtagtattttttgaatggtgcaggtcgaggcagtaatcagaggccttgtagctcagca

SEQ ID NO: 114315 - DNA, 401 bp, Physcomitrella patens
  Intron number 1 from transcript Pp1s427_18V6.3 (locus Pp1s 427_18V6) derived from phytozome v7.0 (chr-ID scaffold_427 ; pos 61634 to 62034 reverse strand)
gcttcgaatttctggacgtcctcgcactggtgaggatcggatcagatcagctcacccttctgttttttggattgcctcgcgcgagcttatgttcgaaatatttgatgttgtggagtttgtttgttttaattttcgaataatgttttttcatgagttgtggtccgatgatttgccgaattaaatgcgtcgattttgctgcggggtttttaggttacggaagatgctatcgaggctttgttcttgcagtcagggttggaggaatttgaggttttggtctgtgggttgagagagtaatagtgaacggcatctgtctgaatggttattgctgtgatttgattccagacgcatgttgtgggaatgtgactgtagcaagaaactgctagaccaagaggaagttagtc

SEQ ID NO: 114316 - DNA, 630 bp, Physcomitrella patens
  Intron number 2 from transcript Pp1s136_187V6.1 (locus Pp1 s136_187V6) derived from phytozome v7.0 (chr-ID scaffold_1 36; pos 943232 to 943861 reverse strand)
tcggggtaagtcgtcactctgcttcgttcgtcatacgtgatttttcctctgtttgtagatgtaggcgaagtttcaaaatttgcagcttattttatttttatttttaatagccactggtgatttgggacgtctttgaatttaggtcttatttatctagatttgtgacatttcggtagttatccagaagggatcttgaatttctccgagtttagttggcaaggacactttctcgtagcactttcattttccccactactaccgattcagtagtagtagtatttttatttatttatcaatttttttgcttgcttgcttgcttaccagttttgaagagtcaaatttatttacctacagccttgtcactgtgcgatatttctcgcttgactgtccgttttcttggctggacctagttcttatatgacctaggcacaccagggtgtagttacgagtcttgtggaaattaatctgcagctctaagttttatggttttcctcagaagtcaagtataaatgtactgagatattatgtaaaaaatcctggaagcttttttttgatttaaagagaatgtttacgttttagggtttcgattttgcagaagcgatatcaggatattccaaagttgggctccaa

SEQ ID NO: 114317 - DNA, 988 bp, Physcomitrella patens
  Intron number 1 from transcript Pp1s66_57V6.1 (locus Pp1s6 6_57V6) derived from phytozome v7.0 (chr-ID scaffold_66; p os 207731 to 208718 reverse strand)
caaggagttcactgctaagctggtcaggtttgatcacttatcggcataaaatcgaatttctcactgattagtttatctgcttgatcgttatgacgaatctcaaaaacttgcccatcgcaggttgatgatatagtgtgaatcatgaactgtacccactgactggccactgtgaagtaaatttgtgttccccgttactgggatgttgctgaatgtgtctgtattgagcatgctaagtgaagaggctcaaacaatggggcgtttggcgatgcagtctgtgtgtgcctcacagtcttgcatgggctgcagtcttagtctttcctccagcacatgtgggttgcctcatgtctcacaatgtttatggttcctcgataatttgcaatatctgaaaattttctgaaaaacaagtaaatgtgttgtttttgttttttctatttaaagaactgagacttgctagcattttcttgagggaatcgtttggacatcgaatgtattcgtaattatcacgtttcctgcatctttgttgaaatctacctttgctcatcgattgaagcactttctagatatttggctgtctgtttataccgtctgggatggaaaagattcaaatgtttctggtttgtttaacatgtattattacaacaagaagtacacctttagagttacaaattgaaactaatctctgcgtagttgtttgatatcgaagagtttcagttagtaatgtttatttcaatgatgaaagttctgcttgacgcagacgaggttaaggagatggctgaaatgctgacggattcctcagaaatagtgggctttcgtcttctgcacaacctcaagtacctgaaccctgtgttaatataaattctgaaccttgtttcacaattactgtgcctctcagatcatcaagtaatagcaagttgtcactatcacttccaattgtcgaatattcaaaacactaagctgagattcatttctattggtgatgtgctgcagg

SEQ ID NO: 114318 - DNA, 657 bp, Physcomitrella patens
  Intron number 1 from transcript Pp1s132_178V6.1 (locus Pp1 s132_178V6) derived from phytozome v7.0 (chr-ID scaffold_1 32; pos 994701 to 995357 reverse strand)
agcattacacgaatcattcaacaagcttcagaacggtgagtatctactttttccacagaaaatggccttgtcctcataattatagagctcagtttattgcttcagtgggatcttgttttgtggaaaaatttctgaccttgttgaattcatgaaaaggttggacaaatttttgttgggttataacacgagggaagagttcatagtcaagtcttaatctgtttgctatcgcgatgctggttgaacgactggtgtggagttaaagtagtcttcaacgctacaggattctcagcggatttgaggccattcagctggctttgatcctttgagaattggctggatacttatttcgtttgaaataagggtgagctacctaattagggttctaatagccgaaattcagtgttatatggtgaatggaagccaagacgccgggctctgcccttgaaggcgaattccatcaaatcatctttgattaagaacaagaatcctggttctcatgtcattttaggaccttgttaacggctttgctgagttgtgtgaaaatggttgtgaggtgcacagtctggtgtggtttactattattgagtcaaacttacactgagaaatttggaactatttgcagaagaggcagacgagggtggtgacgagcaaccacca

SEQ ID NO: 114319 - DNA, 354 bp, Physcomitrella patens
  Intron number 1 from transcript Pp1s403_47V6.1 (locus Pp1s 403_47V6) derived from phytozome v7.0 (chr-ID scaffold_403 ; pos 241189 to 241542)
tgcttttgtttccaaagcaagacctcgttaatcaggtgccgaaccttgtcgattgtgttcttactttcaataattgttttcgtcatgcatcccccccccccccccctcttcttcaagtttcttcaaactattttatgggtttagtgggaattgtttttggcacgcggacttcgatgcactacttgcctcagagccagtcctctgctttattctcttttatttgattatgctccgttgttttgagtttattgaagactattgaactggatgcctctgggcagcggctctttctgacttgaagttctctttatcaaagtagtgcaaagataaattgagtcgaaacaaaaagttcgt

SEQ ID NO: 114320 - DNA, 300 bp, Physcomitrella patens
  Intron number 2 from transcript Pp1s403_47V6.1 (locus Pp1s 403_47V6) derived from phytozome v7.0 (chr-ID scaffold_403 ; pos 241680 to 241979)
tagtctttgctgaagccgatcacatttttgctaaggtaggatattttgatgtagttcaagcaaaacctcgcagcgtgtgcaaggggtttaagcttatgatcttgtgttggggttagttgcagcacctcttcttattacgtctgtccaacacgctttgtgcacaaagaacaacctaaatttctagtttcgtaatataaacacatcgtaggtgcaggcttaccacacttgatgttacgaatggagtggttacacaacgaataatattgtgaaaccgtgattgggatagctttgttttgcagg

SEQ ID NO: 114321 - DNA, 522 bp, Physcomitrella patens
  Intron number 1 from transcript Pp1s28_184V6.1 (locus Pp1s 28_184V6) derived from phytozome v7.0 (chr-ID scaffold_28; pos 1025170 to 1025691 reverse strand)
tcgacgattttgatttaggtaccgactttgttattttgtctgtaattactgattacttcttcttcagggcggagaagacccgcatattgcgcatttgattttttagtcttcgacatgctttagtctgctccgcaatgttgtgcatcttgaacatttcctcattttgctccttttttctttcgttgcatatggtttagtggccttacatgctacttgctacgtctgtttcttgctacatcttgaacatactcgccgtactagtttgaaatttagttatcgagcatgaatcatttgttctcattcatgaatctggtgtgcaagcttttcgttaactttcgagaaaacatttctgcggttttatctggccggtttaatctctcaaacttgcctatcttcaattgcatagctgttgtagttacgaatgtctcaacgtgacagttgcgggccaaacttgatcgtcactatttaatttggtacccctgtgcaggtgcattgtaattttagaaattttcttgggaggtt

SEQ ID NO: 114322 - DNA, 898 bp, Physcomitrella patens
  Intron number 1 from transcript Pp1s317_48V6.1 (locus Pp1s 317_48V6) derived from phytozome v7.0 (chr-ID scaffold_317 ; pos 330466 to 331363)
gcgttctcagatcttcgcccgctgtctcgtgatctgtgagtgagtgagtgagtgagtgagtaagtggctgctgctgctggctcgcggcctgcgctcgccgttgccaatcggcaggtaatccgagctcgtgtccgtcgccattcgagccgccttgccagcccaatacgctctttttcttggaatttgtgccgggatgttgtgtttttttggttcggtcgtgctggctctgcttcttgcctcgtgtgcggcggttcgttagaatggtggtctggttgtactgcgagagtttgcgaggcgcagttttgtagagcttcagtaccatccgcttgaggttttcttgatgcgggcttctattttgtttttattgtttttattgtttgtttttttaatattttttaggtgaattaggagaggtagatatgattagagatcgctgcggatgtatcatgcggcttcagtgtcgggtcgtaggcgttctatgtcttgcgctcgaccctgtgagctgcatgaaagggcatgtattgtcgtcttcgagatgcgttattttatttatttatattttattttctcttggctgttcgttggagctcgaaagcatggctctacacgctcttgcattagtcgatgggcgcggatatgcagcgagaaggaattgtcacctgtcattttccgggcgttgaacatatgtgttttgctagattgattggaggtgttgagaccgtcactccttccttctcatctttgacttcgctacattttatgtccgtagtggaatgctacggtcgtattccagctaggaaagttgtgttaatttgttgcttcatgctgcaggtctgacatttaaattcttgtttatgtggcagatcagggtcttggttgggcccaaagttttatttta

SEQ ID NO: 114323 - DNA, 692 bp, Physcomitrella patens
  Intron number 1 from transcript Pp1s89_116V6.1 (locus Pp1s 89_116V6) derived from phytozome v7.0 (chr-ID scaffold_89; pos 647034 to 647725)
ccaggttgaattttctttccctgatattttgaatatgaattcgaattcctatgtttgtctaactcctaaggacatacctgatacacccgcaacaagatttacccgacctccagtttggctgtgtatactgagcgctgttcgagtttttaaggcgttagctgaattcatttgtcctctgcaacttttcttctcggcgatctgcacagttctgtagtgcggttctaccttagacgatcttgccttgtaggtatccaattctctctacctgaatctagctcttagtttatatagatattcttgcgtttgcgattgagctctacacatacgtaaacctttctggcagtagtatcggtgtaagataatgaatactcagcatgatcgttattccccttcgttgaacacacgttgtaacttgtatgaacatcatctgtgcttgctgtcgtattgccactctcaacgatcatcctccaatgttctcaattgtggacagaatctcaaccttgtgcgccagctttcgtttctacccatagtttttaattagttgtctagtccatgcttatgatgctagcgttgtcatatctttgacttaatggtcgcttggttttgtttttttgttttttgtttttttttgcgtccggtattctgcttccacctactctgatcatttagcgtttggttttgatttgatcagc

SEQ ID NO: 114324 - DNA, 795 bp, Physcomitrella patens
  Intron number 1 from transcript Pp1s213_38V6.1 (locus Pp1s 213_38V6) derived from phytozome v7.0 (chr-ID scaffold_213 ; pos 268788 to 269582)
ttcctcctgctccggaagggtaggttcctaataagttggacgtttcatgttgatttggttgaagattattgttgtagtatgtattggttgcttgttgtgataaattactcgatcgtgtggttgagtgatttgcaaggttgtgttttggtctccgtgcatgcggcgtttatttttctaattgagcatttgcaaaggcgtgtgccaatgagagttcctgggatttgtctgttgggaagcatacgtaatcagcggttaattttgaatggttcgtgtccgtggtcggtagttctcctgtgatgtgtttgcgttcacctcgccagaggcagttttgtgtctcgtcaattgattgttccagaattgcggcactatggatcggagggtttatattgacaatattgacgatagttttttttagggttagggtacaacgcagttagggaatggatgggtctgatgctcttggttgtcacttctttattagcctcggatagcactcttccgtctcaaccatgccgtttgatacttgaactgtgttttcagagcatacaatttttgttttcatttgaagaagtcattagttggctaggaaaggaactaaccgtggcttcatttaagttgaatccatcagtttcctttaaattttttgcagttgcattgctgcattcttgacgatcttgtcacagcaagtgtcgctttctaagcgacggtttgcctaattctcaccatgttaataattcattgttctatgaaatgggtgcaggagggggacaaagagagactttacatctgcaatcc

SEQ ID NO: 114325 - DNA, 638 bp, Physcomitrella patens
  Intron number 2 from transcript Pp1s39_160V6.2 (locus Pp1s 39_160V6) derived from phytozome v7.0 (chr-ID scaffold_39; pos 653661 to 654298)
agcatttatcagtttctggtacgtgtttcgttttagcaattaattgtatatgatttgttttttttgaaaattaattaattatttttttccaaaagagaaaggtatgattatctgtgcattgaaagtgccactgtttaattcaactcggaatatccacaaatgggagcgcctagtctttcgctcatgcggttgcggtcaaattgacggttcgaatcgtcattacagagttctagaagtacttgacattatgaaataagagatatggaggattaaaactttgtcttcttcactagtgactggcaaaatgaaatcgatgatacctcctgtcttaatcatgagaagtatttttcttttagcttcacctaccactgcaatcgtcaatatgttgcttatatagttttgttaccaaaaccagggatcatgtagtttaaatacatatcatttgaaaagaaagcgtgtccttgtgctgatggtatgatgtgtgcgaatttaaaacaatataattgtgccgcccacacctgattgaggccatgctttgtactcaaaagcggtctatctcggtttatgctccatcgaactcatgtttgctgtgctcttctgcagatagtcgtagggcgcagtggaagcgaattactcac

SEQ ID NO: 114326 - DNA, 967 bp, Physcomitrella patens
  Intron number 1 from transcript Pp1s474_4V6.3 (locus Pp1s4 74_4V6) derived from phytozome v7.0 (chr-ID scaffold_474; pos 55499 to 56465 reverse strand)
tattcaaaagcccagacgcagtggttggtttgccggtagctctcgcattgcccacttgcatgatcagtcggtgtgcacgattgctactgtggttaccgcttgattgttttgctgggatcgcggtgagttgcaggagagtgcatgtcttcgagtattgcccaattttttgtttcgcgaacagcaacatagagagtgagttatcccgggatggaatctcaaaaagcataatttgctgtggtttagtgcatgttggggaagaatcttttgttgtgtgcgtgaagggggtgtggtgaccttgaagggacgatcggttaggttgtgggtgactatgcaacgtctttcaatcgtctttcgattggtttggttagatttcgttggaatattcattgttttgtggcttcaggaatttttcatcacgggtttcgatctattgctgggtttgtgtctgcttgtggatcgggtattcttgctatgatatattgtggaaattaggggtttcttgaagtaggggtttatagaatctcgatatgtttattggtggcagcatcgcagccatccctcagtgactcctaggaatctccttgtaagcagagtgatcattcgtacgtttttttggatattggcttttaatgttgatgatgatgtaaggacgagaacgtatttggtgccaataatactgagaggtatgagaacgggatatgtttatgtttctatgatttgctgttcaaggaagtttacaccttacccttgacaaatttgataagacttttaaaatgaagcccttgatatttgacttgcgtgaactgaattatcgagtactggagcgtctactttaatcctatgtcttagtttttattgtctgcatcttttgttgctgcaacttgataccaacacctttatgccctcgtcagtcatgaaagataattcactgactgagcaacagtggattatgcagatttcttcagtg

SEQ ID NO: 114327 - DNA, 544 bp, Physcomitrella patens
  Intron number 1 from transcript Pp1s246_51V6.1 (locus Pp1s 246_51V6) derived from phytozome v7.0 (chr-ID scaffold_246 ; pos 292483 to 293026)
ccaaggtatgaatgcgagtggtcgcatcagttaatttgtttctagagtcagtctgatacacattgttacactgttctgaaattcccacaacctaattaggttttagataaattgccactatttatcaatggatttgaatccatacatgagctgagtgacttctaaggaatcataggaacttcagctaaactttctttaaatttgctaactctggtgagtattagccaagtagcgaatcacttcaaattttagagactaccttgagcgcagttcgtgttcaattttgtaagaatcagaagtattctttttcagtcttgagaagtttctacattgatgttcttcaccgtattacttcgaaacaactgcacggtctatatgttaatcgtttattgctgcttttgaattgatgttttgtacacgcatttttgtctcaattgtagtgtcctttttgatacaatccctgttgcatgttcattgcgtatgtaaaggaatcacgcatgaaaggtgtctttcttaattgcaggctcaggggaagtcaagtgtg

SEQ ID NO: 114328 - DNA, 734 bp, Physcomitrella patens
  Intron number 1 from transcript Pp1s80_87V6.1 (locus Pp1s8 0_87V6) derived from phytozome v7.0 (chr-ID scaffold_80; p os 550745 to 551478)
ctgctcgatttgtgtttgagctctgccaaaccctggtgagctacctttctcgttggaactgttactgcttttgtcttgaaactttccaggataactccgtttgttcaattgcacattggagttttcgaataaaaaaaaatctgtttgaattgcagcttacaatttgtgctgttgagaatttgatatcaatgagcttctattgttgattgtgcatttagaatttttttcctgaggtccattctgagcgccccccccattccccctccctgtgtgttatcaagtgctctgctggagtgaccaggagtgttatattcgaatcgggtagatttgcagttttgtagttcaaaccatacgctttgacttcttattggtagcaaccaatgtttggaaaagaaaaaaagaaaaatcttttcagttcaatctagctgccttgtaattttgaaatgaatggcggtgctgaaatacaatcgaagggatgtttgacgattagtttaagccctatctaacacaacttatccatttaacctaattatttaaaattttaactatggcccgggctattaccttttgcaagtgatgagcattctagtcctagtaatactcaaacagtaataaattcgtaggacttgagaagaaaattggtgatagtttactgtagagttattgggtggaagatgtataatgtcttatatttatgtccttttgcaggttcttggggagctaccactcacaaa

SEQ ID NO: 114329 - DNA, 903 bp, Physcomitrella patens
  Intron number 1 from transcript Pp1s22_116V6.1 (locus Pp1s 22_116V6) derived from phytozome v7.0 (chr-ID scaffold_22; pos 720502 to 721404)
accgaacgtatccggtaagtgagaaaaggttaagcgtcatgttttgatctgactttgtgtattatcttttgcatcatcaaatctggaatataggactaacacaaatttactaaatgttgttgatcgtttgaagtccagtgaattgctttgtcacttaggtatcaaagattgctgacagacaagtgaagttaatgtagaatttgcagcaagatagatcatacattgcattgtggattttaagacttcagtggagatatagactcggttgtttcatttggcagcctggcgttgagatattgagagaggacccgttggcctccaaactgaagagtctctccatgaagactagacgcgacaagaagtgcaaagtgaaggttgagattgctgaattgactgggagtcgttgtgggccttgcacctgccattggacatggcattcgaaccagacctggatggtcgaggcaatattgtcgtaggtggttatgaggtgaacaatgacaccagcgtccggcttacgattgaagtgacatggcaagatacttctctgtaatatctgtggatgaatcgatgaaatgctccaaaccagagctcatttaccctctagtgatgctggacgacggcgaagcagagaactgtttctcgcgcaggcaagtctcttacaattatatacagcttcggaagcaatctaatgacaaatctagtgcaaattttgccttattgatctgactaacacctggctacattcatacttggtcattgcaggagtggggcaagggtttttccttgtaaacaacaatatgatgaggatccagtaggctccagcagatgcctgcgaaccagtgttcttgtatttggttgtcgttagcagctgcctaactccaggtacgtttcaagctgacaact

SEQ ID NO: 114330 - DNA, 630 bp, Physcomitrella patens
  Intron number 1 from transcript Pp1s101_26V6.1 (locus Pp1s 101_26V6) derived from phytozome v7.0 (chr-ID scaffold_101 ; pos 166291 to 166920 reverse strand)
tcgtcaaccgacggctattttctccagtgccggtactgtactcacacctgcaccattctgtttaaaggattttttcccgtctctcaagaacattaacggtcaatctctagcacgaaatggatagcatccagattgttcagaagattacgtttttttttttttttttttttgactgtgtcggaaatgctcattgtatggttgatacgagacagtgtcaatgtagtgttactgtaggctatgttattacaattcacatttttgcttgatgatgctttcctatggaatcgatagtgatctctatgtctttagaggtgagtgacgggtcaccagtcaagtgaagaaagcgcagcgctgcttcttgtgcggtgaacgaaggtttgtggtttgagttggacgattaatcctgtacctctcagtatcgaggtcgtcacgacttactttggatatgatctagggatacaagttaacttcaggcactgtacaattgtttacgtctagctgtgcagtcactggtattttgtaatcaatggaatcttaagcgccagtcaggaagactacagtttaattttttcccacctttgtgttgaacaaacaggtttcgattgcagagtgagcagaaagttttagtct

SEQ ID NO: 114331 - DNA, 331 bp, Physcomitrella patens
  Intron number 1 from transcript Pp1s18_204V6.1 (locus Pp1s 18_204V6) derived from phytozome v7.0 (chr-ID scaffold_18; pos 1554899 to 1555229)
gtgaatcgaaatagcagcgcaacacaggaggtaagctggattcacaacttgagctcgtaccctctgcacatgacgatgaattgtccctgaagaagactgctagatctagtggaaatactatcctgggccgtcccctcggacagagattgctactgggtaaccatcgttacagtgaggtctttataataaagaatatgaatgccggtaagattgtgttgcgcagttccaataacacaaacccagaataatgacatcatcacgtttcttccgttttgattgtcttggccaattcgttcgaccacatttatgtcacagggtttagggtttagcg

SEQ ID NO: 114332 - DNA, 810 bp, Physcomitrella patens
  Intron number 1 from transcript Pp1s131_96V6.1 (locus Pp1s 131_96V6) derived from phytozome v7.0 (chr-ID scaffold_131 ; pos 410239 to 411048 reverse strand)
cgttcatcaatcacagccgtggctcatccgctgaggtttgtttttactacagtctttcgtttgcgtcgctgatgttggaatcttctcgttgtgacgacttttgattgcgtcatgagtccactggattttatgaggtcatgtgctttgtagttggatttggaggaaggagtgtctagtacagtgtccgtaacgaatcgtgatgaaagaattgagtatgctaggtggggtagaagtatgtttcctgttataaaaacttggaaaatgaattgaaagatcagggaggtttgcttgaacagggcactacagttcaggctagattccttgtagttcactggtttccgttcaatttgagagagtttttatgtcgcgaaaattggatcaattctgtttttgacgatgcgactacaactcacgtgtatgggaagtccaaatctccgcttgcctccaggcttaatcttgtatccaactagccctaagtcttaaatacgctgtgcacgtggatagcaaacttaagctcggtttttggcatcggtaggtcgaaatctaaaaaatgcgtgagcttttctggattttctggattttcttttctggacagaagtgaccatagttcagccctgcttacattaaactaacagatgtttgctttttaagataagctgtttgtttaaatgtctgtaaaataattgacatcttacaacctgtataaaaactatcaggaatttttatgctcgctgatatttctgcttttcttacagtttttaaaggagttcgtttttcacttttatctttattccattttctcttgcaggg

SEQ ID NO: 114333 - DNA, 1036 bp, Physcomitrella patens
  Intron number 1 from transcript Pp1s389_18V6.1 (locus Pp1s 389_18V6) derived from phytozome v7.0 (chr-ID scaffold_389 ; pos 139532 to 140567)
agccttctctggccccttgttggtgtttctgagcggtgagaagcttgttgatgttctgatcgatcttggacaatgtcccttgagtatctgtgatttgggtatggcgtttgaagcggtgtttttgtggtcgttgttttggggtttcttggagagttttcggtagtgggtagaagttgtttctgaaattgttgccgttcttattctgtgatgctcattgtctcatcgcattgctgctgatgtcttcgaacctgcaaaaatacactcaatttcgttcagatttgagggtaggctctctccgcgaccttggatccggaaagccacacccggcttcatctaggtcgtgggcttgggtctacgggttggttgccctctttagaaccctcccggttcctctaaatcctgaaagctttcttttcaaatactttgaattaatgtgattttctctgggcaccattgggagcagtaaagaagtgttcgacccgaagcctctctttctgttggtttactgccttaaagcttgggtggtctcgctctcagacactagtgtgtaatgcccttgtcacagtcgtagtaaagttccaaggtttctgaatatttgtttgaggaacctcattttgagatgtctgagtatatgaccatctgtatgttggccatacgttcttggtgcttgttagcatgtatgcacacgcttctcacagtcggctttctaccttgtgtacatagttagaggagtgatgtagtttggatgaatcactgggatctggtcgaatggcaacaaatggctctagggtcacatacgacggatggctgttgctcatgtctttcacctgccatcccagtaatgtgaagagtaatataaatagcagaaggaacagaaaaagatctgaatccaaacattatgcaagtttgatcaacttcttgtgaactgcttgtttgactgatcctacagatttaaagcattggatacttgatttttcggggtgctcctgctgaggatcactaacagctcattcgaatgtcttaggctgcacgaagg

SEQ ID NO: 114334 - DNA, 903 bp, Physcomitrella patens
  Intron number 1 from transcript Pp1s219_111V6.1 (locus Pp1 s219_111V6) derived from phytozome v7.0 (chr-ID scaffold_2 19; pos 744418 to 745320)
ctcaccaagtcagtgaaacaaacagtaagtcacgttacttgacataaacgtccgatctagaatgtgcactagagaggtatggcagatatttggcattttttacatttaaaaacacctccgcaaacttagtcgtaagcttgagaagcacaatgtaaccgggaacttgtattcttcggacatccgatactgcaagtatacgcacagaaatacgatacaaatactccttgtgcccgattcctattagtatgtagtctaattacatctagattacgtagtttgtgcgtgacattagggtttgttatatgaattttagtaattgctgctttcttttgacctgcattgtcccatctgctgtctctgtcgcatacattaatatgagctcaagttttacgtggcttttgatgttccagaggttcatgttgcataaaattatcagtacagttctgaacgtagcttttcttcgagggttgccttgctttcgcttcgaattttcggtttctcttgcgtggttttctctttataattcttccagtgaattgcacaattggtggaggatctttaaattttacttgtaggattttggcattgatgttacaattacgcataaccttgccgcagtccctgttgtgtgtttttttcaagttgattcagcaaattactactactgattttatgaattacgcacccttcatcgcccatctgcattcttctacaaaaaaatctttaactgaattttgagataaccaccgagaaattctaccactactatgaggtccattcttgtaagcaatcaatcttaataacagtggatgtctagaattatatgagtttctatttatggataattgtcaccgatgatgttttggctacttccccagtgtgttacgcaagactttaccggga

SEQ ID NO: 114335 - DNA, 511 bp, Physcomitrella patens
  Intron number 2 from transcript Pp1s22_221V6.1 (locus Pp1s 22_221V6) derived from phytozome v7.0 (chr-ID scaffold_22; pos 1348749 to 1349259 reverse strand)
acctgtttgtgaacacaaagagtgaccttggtatgcttgtgcagtccctctatccccttaatccctttgcatgccctcctcttagcaacaaaaacctttgtatagaaatatgcacacactctcttgtttccattaaggaagggatgattatatatttacatttatatatctatatatatatatatataggtattggtaatgacattatagtttttgctattgctatcaaaacttgctattcacttgacatgtttttttggtttttttttaattcttatcaaaaagattatttttgtttcgaaagaaaatcatttttttcaaattatatcaaataaataattgaaaacttgttttaaaaaataaaaatatatgtggagtgggtaacaagttgtggaggcactagcaaaactgtggtgacattacatattcacccatgaatgcaaataaaataatagattatattggtgttgttatgttgatgtaatgtttgcagggccctgcccaaagattc

SEQ ID NO: 114336 - DNA, 897 bp, Physcomitrella patens
  Intron number 1 from transcript Pp1s18_97V6.1 (locus Pp1s1 8_97V6) derived from phytozome v7.0 (chr-ID scaffold_18; p os 466056 to 466952 reverse strand)
cacactcgaaggcgttcacaactgcacatctctcggtatgtccacatcttatggaagttcgcatccttcttgattcttgtggattccataacctacaggtagtctaacatcttctgtctgcgtatctggaacattaagtgtgacatcttgtgtatcttttttgcacatcttctgatttgtaccatttgttgactatgcaaaccgggatcatcatgtcacaaccacatcccactatatttctattctatttctctgtctaatccctcccagatgtgtttgagcggatccactgttttcaaatgagtcggagattaacacaatcttatgggaggtctttgcccgtcatagcccgtcccggaacttgggcagtgtagattttacttctctattggtttctctgcatgccgagttttgaatgtagttcaggtatacaagtgctgaagtttttcattaatgtaagtgctgctcagccaagcgtggccgtgatagaaaccctgaaagagctcttggggcaatgaggcgggcaggtcgtacaatttatttcgctcagttggatcgttgtcgttactatgattagggctaattgcaccgttttatctgcaatttttttgagctggcattggggcttgagatcattgcttctatttgcccgaattctttcgagtatggatcaggtcgaagctgtgaccctcgttttgatctacttctcaaaattttgattgtgaagttggtacggggagatattggttcttagctggccacgattttgaaggagcaagtttatcgcttttctgggttcaaatgttgcagggctgttggggggtagactctgacatgaagtgactgcttgtgtgcttgttagattgcttcggaaggaaacttggacccaaattatcg

SEQ ID NO: 114337 - DNA, 735 bp, Physcomitrella patens
  Intron number 1 from transcript Pp1s30_365V6.1 (locus Pp1s 30_365V6) derived from phytozome v7.0 (chr-ID scaffold_30; pos 2455357 to 2456091 reverse strand)
gctggttagtgtttgcttgcgatcggagttattttttgactagttgtgtagaaccctaattttttttgatgtcgtgggtttgctgaaatcagtttcgaattgcgaaggttttttttgctttcttttcagcggcattgaaaagttatgaggaatcggtctcggtatcttccgttgcgataggtttagggttttagggtttacagtgttcttcgaacccatttaggtcagtgcttggggatttttgtgtgtcttcagttttctgtgctgtgtcaatttattggaggatgatttacaccagtcgtaatcaccagatctttctgaatcagtagtcagtttttgcagttactcgacgatcttgctgcctctatgatatttttaattaattcttaacagcatctcgttgatgagaagtccgcatccgtagtctttcatggagtatattactatgtagtgtatttatgtggaagaggtgttatcctcagatattacatgtattttcattaatttgaaggtcgtacgactgtttttatacctcaagtgcaagatggataatgttcgtaatcattagttttgttcacaattcaaaatccagaattctctgtcatgtgtagggttagtacccaaatccttgtgatcgttgatctcaagtatattcatgatgcttttactcctgttcatcggtctcttcatttaaacacttgctttccctgttacaaccgcagcactttcaagaag

SEQ ID NO: 114338 - DNA, 658 bp, Physcomitrella patens
  Intron number 1 from transcript Pp1s233_44V6.1 (locus Pp1s 233_44V6) derived from phytozome v7.0 (chr-ID scaffold_233 ; pos 288038 to 288695 reverse strand)
ttgacaaaatcgtcaggttgttcctgttccttaatcgcctccttgtggaattatgctgcatcgtagttggaaggaatttttctgttgtcgatgttttgttctgattttgaaattggtgtgcctgtccctacatgcttaagtttttatattggagaagatttctaatgcattcaagtttgttcgattagccggaatttattacatatccaatggagatttttgtgtagatgtagttccgtcagtttgtgtggtttacgccatctgcttacatgaattgatgacgattctctcactaaaggcattactgatttgcaaaatcatgagtatacttgccgacctgaagggatattgaatagaaggcagatagcaatgttgtctgtaattcatcaagattctagaagtcttcaaatttcatagttgtaattgatggtcctcaccgtagcttagactgattcttctaagtccaagcaacaagttcattattctattcgactcttagtttgatgttttctacatgcaagtagctaaatgttgcttatcatcaggctttttgaaccaaatgtatttttttctctcaattttaatttgacacgtgttggtattggatggatatgttggtgtagagcattttttgacgagtcgaataaccaggtaaatt

SEQ ID NO: 114339 - DNA, 304 bp, Physcomitrella patens
  Intron number 1 from transcript Pp1s66_271V6.1 (locus Pp1s 66_271V6) derived from phytozome v7.0 (chr-ID scaffold_66; pos 1502725 to 1503028 reverse strand)
ggctgcggcgtcgtcaacccctttcggctcccacagtgatgagctcacgttgccatttagactcttttattttgttttttgtttttattttttatttttattttattcttctgttctcccactttcccgcttacctgttttgattcagttcaaagtttgcattaaaaacaaaaacaaaacggtttggaaaatgcagcaggccgggatccatcttcatttctttatacaaacggtatgaaatatgaattagtctggaaacaaattaagcatcttgacatggctctgtgtattgtcattattgtag

SEQ ID NO: 114340 - DNA, 851 bp, Physcomitrella patens
  Intron number 1 from transcript Pp1s197_123V6.1 (locus Pp1 s197_123V6) derived from phytozome v7.0 (chr-ID scaffold_1 97; pos 594747 to 595597 reverse strand)
cttccttcaaggcctccgtttcctccgccgccctcgtacgttgctacccccccctgacgttgctgatgcccctgtgctcaatgctagttgactcgcacggtctctgttggatttccctgtcttggaaggacatacagtgatgtaagcaattcgatgctgtcgcagagagttgttccctgtcagccacttgggtggacgagtgctgagacttacgcagctcgcagggtagtgaaggatcatgcattgagtaattgtagaacctggtgttgctctgaatgcttttcgaactcccactggtagtttgcataccggaggtctctttgcttagtgcgctcggattcgacttatgttctgcactgcggtggttcatcgcgttgtctgttggttttgaattggttaagtaggaggaattctgggttgttgtgggtgttttgtgattttttcgccagtcagattaagttgatttatccatgattttcagccgaactgtaacgcttgaataataaatatcttgtactagtggttgacgatacttcttgtaacctacctacctacaggatgtgaatccgaatcttcttttgctcgatcatttataatgtgtagagacctaggggtttctacgatatgtatgtcagtttacttcttggttgatacaagtgatgctagaggtcccctatatgtctgcaatagcacttcttctgagcaaactctgttacagaatgtctcaggatatgcaacagccattaaattctgcgcaatgtgactgctctggaaccagaggacgaattctgacgttgaaatttttcttgtctgcaggagggaaagaggagcactgtgtttggtaccaacgt

SEQ ID NO: 114341 - DNA, 674 bp, Physcomitrella patens
  Intron number 1 from transcript Pp1s221_49V6.1 (locus Pp1s 221_49V6) derived from phytozome v7.0 (chr-ID scaffold_221 ; pos 517053 to 517726)
ctatcgtctgcggcatcgccaagtaccctcgcaaggtttgtaatttcgcgccccccgtttgttacccgcatcgccaggctttttataacagcttctgatttttaggtctacgtgcctttgaagggttatgttgtgagttagcctgatgggatgcttagtttcaagtatcgtttgttactgggaacagtagtcgatttgttattttggtttagctttacatgtttttccgggttagttaggggagagttctggacgagaaggtttgtatcgcctcttcagaaatttgtgtggatattagtttattttttctgtaaagtttgtttacagcagattccgagggttttacatcctgggtgtaggcgcttagagtagaatgcattgcatgtgaagctgtagggtcttaagtttgattttagctttggcttaaataggcggtttgtaacgaagcatttcactcttgtgatttttttgtttatttacatatttatttattaatttttttcggtgtttcctcacggagcttgtgctgctctggaacaaactccgcacccgtagtatttaaaggatgattgggctaggggagttaaggtgcacgaactcgtgctttcttctaagtctctcttctattcacgcatgcaggttatcaagaaggcttcacagaagaccattgccaa

SEQ ID NO: 114342 - DNA, 937 bp, Physcomitrella patens
  Intron number 1 from transcript Pp1s104_46V6.1 (locus Pp1s 104_46V6) derived from phytozome v7.0 (chr-ID scaffold_104 ; pos 366376 to 367312)
tgtcacgtttgagcaagctaccacatccgtcaaaggtaaatttgatgcttggctttgtgggaggtggggataaaaaaataaacttgcagtgtgatcaacatctacctgttatccactacaaacataaagaaatgagcatcttgattgaacagtgttggttatgatttcaatgacggaaacacgcttaaatttcacccaatagagcatattgcgaactcaaagcatgagtattaccattattaatattcttattttttactaggcagtaccccagcttctgctcaatgtagaatttctaatttatgtcgtgaaagagcaacctggatatcacgcagagtgataactcgcagccagctatgcacaagattatttaaaacttttcttcgtaactatcaaaacgttcttttcgttgtaactgaaatcattgcacatgtcattctcaaacgttgtgagaccaacgctgatgatactttttctgtctagcgagcaacgtgaggtggaccatcgacatcaaaaaaatgccaattctagaaaaagaaaagaaaaaagtggcaagataacccaaatacataagccaatcgaacaaaatcaggcaatttgtttgaaatagtgcacactcaaggaggaagttaggatggtcgcagctggagaaagaaagaataatggccatcggaacagtgaggaggtgcagcagcaccactagcaacaacagcaacaacaaagcagaatctgagatgaggaggagaagaaaccgtctcgatccaggataaggggagggcaagctaaacatagaggaacaagaggggaaggggcgccaatggtcggcgtcgatcgatcctgtgtcgatatggtgagaagaggtcagtgatggtcggagaatcaatagagtgtggtgtgcacaggaactggaagggattccaacgctgctccctgcaat

SEQ ID NO: 114343 - DNA, 534 bp, Physcomitrella patens
  Intron number 2 from transcript Pp1s257_88V6.3 (locus Pp1s 257_88V6) derived from phytozome v7.0 (chr-ID scaffold_257 ; pos 503473 to 504006 reverse strand)
ttctgcagtggaggtcgttcgaggatttcgaagaggtagtagaaattggaaggtcggtaggatggggcacaccttgtgatacatcgagcggacatttgagtggagcttcgcattcttggaaagacgcagagaccaattgtttactctcagtcatccagaaatgtgaacttagaaacatcgaccagaaattattttgagttttctctccttttttcttttttcgaacagtgtttcttaactaccaaagcctttttcttaagaccgtgtttacaatctgcactgcgtggtcgaaatcgtcgattggctttctctatttccgcgtgtgtttgttaccaaatcttgtaagtggtgaaagagcaatgtcggagattcctctgacgatcgaatgagtatcatgtctcctggtcaagtataaaaccaggtctgtcaaagctgtggtgggtcgttgaagaacaggcttgtgcattttccatctgtctgcagctctgaaggtgcgataattcgtgtttgcaggcccaggttttcctgaacacg

SEQ ID NO: 114344 - DNA, 804 bp, Physcomitrella patens
  Intron number 2 from transcript Pp1s213_46V6.1 (locus Pp1s 213_46V6) derived from phytozome v7.0 (chr-ID scaffold_213 ; pos 339734 to 340537)
ctgatcaagcaaagtgcggggatttttatcgtcaggtaatatataccagccaacattcctgccttctttcttctcgctggttggtcaataatttgatggtattttttcacctttcttgtgataccatcaaatccttgtaagctaaaataggaaaaagtatttgatggtttgtgatctgcgcacattatcctgctcatttttagaaagtaacataagtatttatggggttctttactttaaaaaaaattaattgcttccactgttactaccacgcgtcttgtctcgtagtcagttctatcgattgtgtaggtttttatttctttctgttccaaagcatcatcagaatcctttgaagagcctatgaattcacgaatattttttcctattttagctttccttagtaagttgttttgtgacgcgaaggcactgttgcttcatgtctatggtacaagtggctgtccttttcttgaagtgaatttccaacgctgattcagtccgcagtggggatttttcacatcctcgaatattgcgaacttcgcagttcaatcacagattttctgatcgtctcttttgattttcgttccctccctgtgagtgtggaaatgatggaaataaacatgctctttcctttagtaggaatgcagtatctatgttctgtttctttctcattggtggtttctgctcatacacaaagaccgttggctactccacgtaacagtctgtgatgactgatgaaggatgccctgttggttttgtgctattgttttagtgctggttgaagaagcagaaggatccttttgatcc

SEQ ID NO: 114345 - DNA, 681 bp, Physcomitrella patens
  Intron number 2 from transcript Pp1s18_199V6.1 (locus Pp1s 18_199V6) derived from phytozome v7.0 (chr-ID scaffold_18; pos 1539217 to 1539897 reverse strand)
tttctggtgatcttggtgtgttctctaaacccgaggtgagtaattggtatcatttttcacttttcaaatgttggttcgggctgtacattgtatcggctttgatgttactggtggtttattctgtgtggcttaccaaggcagatgaagcatttcaatgttgatttggcgtctttgttgaattggtatgaaagcacaatcttatgatatcgagtatcactttctcagattatgtattaataatagctatcgcagaacctagaattctctagctttataactgtattttcagagcggcagatgcgtttattctctgtcacagaattgctttgcatatcttcccttgatttccaatttatcttgtatactttttagaaatgatgtacacaaatggaaagggttcagggttttagtggttccagtgtgcaacaacttcataccacttggttcatgttcgcctccttcttcttccttgtgcccttgtacatgcctacgttgattttcaacaattcttcaatatactactctattatacgattgagaactgggtatgcgccctttgcgtttgagatcttccagttaagctgtgtgggatgacttcatgcctttaactttgactgcgcattttgggaatgggttttgtgtgtagaccaaagcttggactctggaaggactcgtcaagta

SEQ ID NO: 114346 - DNA, 595 bp, Physcomitrella patens
  Intron number 4 from transcript Pp1s12_357V6.1 (locus Pp1s 12_357V6) derived from phytozome v7.0 (chr-ID scaffold_12; pos 2541436 to 2542030)
gcagccaagcattacaaggtgatctccctcgctctctctctctctctctctctctctctctactctcttcgttttttttttttttttttttttttttttttttttttttttttgttcttttagttcctccgacatttgccatggtagtccttcacttcgtattgtagatacatcgatagttgcaaccgacgtcgtcctaagagaccattccttttatacaacatgtcattttcccgaatattcatttaccgaattcctgcatagatgcctcacggcttctagggaaacgtgtttaactatcgttaatggtgtgaatttgtgtttctagatcgcgactataaactggtttgagtacttgttacgtgtgtaaattgaatgtgatttgtaaagcgaaagtgtgaaatatgttttttatgcatactttatgccactacccaggtatatcgctatttttaataaattcagatcttgatgaagcctctactaagtttagtcactcgctaggcaggagctgcatgtcgctggcttactggagtcaaggtactacacatttttgatgacctagatgtgtatctacaggatatagcggacattt

SEQ ID NO: 114347 - DNA, 695 bp, Physcomitrella patens
  Intron number 1 from transcript Pp1s279_13V6.1 (locus Pp1s 279_13V6) derived from phytozome v7.0 (chr-ID scaffold_279 ; pos 38697 to 39391)
ttctttggtccacggagctaccgatccgagcggtatggtcccttgtcctgctttgtttcttcgtatgctacagcgttatgagaagtgcagggaaacggttattcttgatgagttcttgcgagtattcgagtttcagctcgtccattagtgcgacatgagcacatggattcaaagttctcctcatataaaaatgatcatgaatctgaccttttaagctcatccgcttacgagcaattcggacgactctgcagaaatactatcttaagcatatccatagagactttgggaaagacaatgtggtatatgatatcggcgtggtggaaaatttggtggcatccaaaatttgccgggaggatgaacgtatgatgtattcagttttcaaaatggcatgtgctccacgggaagagcatctcttagcacatcaggggccgagaactgtatctaacagtgtcagtgatcattaatacttatgattttaagcattgttctcagatttgaagcgaccaaccatactcttcaagaactaaagctctggattccgattctgtaaactaaggattaacctgtgcacagtttgagctatttgagtggtgcccattacattcgtcaaggtcttttggtcagtataatcagcaggtttgaggatctgactcggtgcatcggtgcttgtgcttgcagtatcttctttgaacacc

SEQ ID NO: 114348 - DNA, 982 bp, Physcomitrella patens
  Intron number 1 from transcript Pp1s62_226V6.1 (locus Pp1s 62_226V6) derived from phytozome v7.0 (chr-ID scaffold_62; pos 1714832 to 1715813 reverse strand)
ctgcccgaggcgtgcctaggttgtcgtcgcagcgggtgtgagaacgcagctaattttatttcgtttttgtctaactgtttggtatagttgattgttgagttccttagccttagtgtgataatttgtggtcggaaggtgagaggatgtcttcgtggctatttattttgcagcagattgtcggaatgctttgtcaattgcgattctattcttggcgtaatggtagttttttgaggtactgaattaggattaatcgtgaagcacataattgaaggatcacctcggggaagaaattcctgaacacagagcaggggctctgaaattaggtagcgtgttatcacaattatctaggtgccagcaagggtgttttgaacacaggatttgactatgttcttgtttggatgcgtaaattgtacggagtggagagacagtagacagggttggtaggttatgctgtgttttttggattgttagagagcttgacgtacctttttaactgctcctcagctaattgtgaaagtcacaatcaattccctgtcaaatagttctgctcagtaacgtcatgcaaaaatgaatgcaccgttgagtattgtctaaggaattgaacaaggcgtatgtttttcagatcgttgtgtaagatcactgatgataggcggaacgttagttattatgtaacaggtgcgggacatcccttcagttaattctgtttgaaaggattaggtattgttcaagcagtacgctatgcattgcgagagttctgcacggcaggggtggcagcgtttgtatttgggtcataatttagtaaacaatgacgaaacgggtgggagtcgattttaacattattcaacccacggggttgacagcttttcgaaatacttttctgttctttttattatccattttttcccgccgtatgtgaagttccaatgatcaatgaaatgtttgagcagacgcctttagcgggagctgagcacgggcggcgaag

SEQ ID NO: 114349 - DNA, 515 bp, Physcomitrella patens
  Intron number 1 from transcript Pp1s30_145V6.1 (locus Pp1s 30_145V6) derived from phytozome v7.0 (chr-ID scaffold_30; pos 972330 to 972844)
ggccatcgccaaagcggccaacgcactcttttgctgtaagtgcatttgtgttgaattggacacagttcgacgctcatgagactgagtttatcttacattgatttttgggtgtgaagagtttgtgtctctggtgttgtgttaatgtagtggcgtgacttttatttagactgcccatttagaaacaatgagctatgattggtgttcgttcatagggttttcagttgattacattatcagtcttctctccagtgtgaatttctggagagcagtagtctttgtttcgccgtattgttaagctgaattttaaatttgcactacctttgaatacgtgtgccacaatggtttctagaatgtttcgtaattgatcggtgatgttttttttgtttgaatttgattcaaacaaatgtctgttcgaggtttacaatcctgcattcttgtgagtaagacataacattaaaaaggcctgtgtcgatgatgtagtgcatctgagaactaccggccaggatccagagaag

SEQ ID NO: 114350 - DNA, 702 bp, Physcomitrella patens
  Intron number 1 from transcript Pp1s56_2V6.1 (locus Pp1s56 _2V6) derived from phytozome v7.0 (chr-ID scaffold_56; pos 19515 to 20216 reverse strand)
aagtgctgcagcttgacgagggcacccgaatttcggtacttatgttctcggtcgttcaattctatgaggcatttgaggttgcctattgtgattcttgttattctttttagttttgctcttgttagaccaccttcttctggatccgtgttgtctatttgctacttttagctgttgggaatatgtagcaaccacaagttgattggctctttagtatactctctgtgtgttagcgatgaatgtcttcatgttgttagtttgggtagttccatgtgcagttcctatgccctcaagtcaactgaaacttgcaccaaaaaatacatagaaatatattagggtttcagtaatttactcagctccattcctatctcgtattgaatctacggctttataacctagtactttgaaattcgaagattcttcctaaaataccacttcggattcgccaaacacatgccgttgttttttgtgttcagaaatttatagtccattgaatgcacttaaattttaatatatttaatttgggcttgctgaagaatgtagggactttgattattcttgacatactagcactggtgacttctgtaggtttcgaggaactggttagctgcatttggcttgttttctatgctcaataagaatatcttttaaacgaaaattctgagtgcagagcgacttctggacggcgtcgaaaagccgaattca

SEQ ID NO: 114351 - DNA, 487 bp, Physcomitrella patens
  Intron number 1 from transcript Pp1s113_200V6.1 (locus Pp1 s113_200V6) derived from phytozome v7.0 (chr-ID scaffold_1 13; pos 1061056 to 1061542)
gactcctgctaaccctgaagttgatttgaagtacgtccttttctcttgccattcctcccaggttgaaatgtcaatctttcagctcgaaattcttaaacccctaaaaattgatgatttggttgaggtatctcactggatgactgactgctaagactttcgaatagttaccgatgatgcgcacacggagactgctgtagatggtaattttgatatgttaattggcctaagctttcaacggtgttgagacattagaactttctagaagttaagcggaagacagtttaagaacaagaaacggaagtccgatcagggtatgcaggcgctaatgtcatccagtcgtgtttgaaacgtgttattctattttaatctattttactatatatatattttcctggtcatctttcacgttatcttgatcataaatgctagaaatcctgatgtcgaattattctgatttcgttctgcagagcactggtgatcctgctac

SEQ ID NO: 114352 - DNA, 531 bp, Physcomitrella patens
  Intron number 1 from transcript Pp1s178_19V6.1 (locus Pp1s 178_19V6) derived from phytozome v7.0 (chr-ID scaffold_178 ; pos 138041 to 138571)
tgccttctgtcggattcctgctttcggacatcgaggtgagggtttgaactctgggttgggttttgattccctaattgctctgtttgggttcgtcaagccctttccctggagttggttgcgagcatctgtgggtgaaattcgttgccccaacaccgactgtgtggattagcagccggatctggtcatgagaacaatgtccgattgtgggtcggtgaagaagttgcgttaatacgcgttagtttttctgtttttttgggagccgaagtcgagagtgaaacggatgtgaaagtaattgtcgagctcaggtgactcttgccggactattgggccataattggtcaccaaagccattgtctatgccgtcagtttaagtcaatgattgttgacctttttcatttcttttcttaatctgtattatgggaccagttgaattgaaaattgactgggatgggtgacctcttatttcagtttttttttgactgtctgcaattttcaggttttttattttctttcctgtgggtcattgagcaa

SEQ ID NO: 114353 - DNA, 365 bp, Physcomitrella patens
  Intron number 4 from transcript Pp1s178_19V6.1 (locus Pp1s 178_19V6) derived from phytozome v7.0 (chr-ID scaffold_178 ; pos 139440 to 139804)
tcgcctacgagagctatacaaggagcaaaacagccgtaagtctctcattactcaatgttttgttgaatttcacagaaatcacggagcaatgattcatacccgaaggtcttaatctataatagatggtgtaatattctgttatagttagtgtgacaacaatagctgaaatgattcattacaattatttagttacaactgcctttgatgtgaaaacttctcactttcattttcatggtcaaatgctatgaggcgatcttgtttattttgtttttttttgttttgttttgttcttttatttcttctgtaatatgatttgttgatttttaacagagaaagagaggaagcaaattgtgcccattgatttg

SEQ ID NO: 114354 - DNA, 442 bp, Physcomitrella patens
  Intron number 2 from transcript Pp1s37_244V6.2 (locus Pp1s 37_244V6) derived from phytozome v7.0 (chr-ID scaffold_37; pos 1663865 to 1664306)
attgtgagagggactctggaattaaacacgactaggtaagacttgttcttaagcattaccttaagcttgtttgttaatgagtacttgactcaaagcttattttgattagccaggcttctacgttgcttgggacgtgtggtgcatgatgcaaatgaagctggctgcttgacactgcgggttgttagtaataatcgtggtacgcgttggggtttaagtttttgagcatggcggtaataatgtgatacatcagtcactgtagcgacacatgtgtcgactttatgattcagctaaaagacctgtttttctattcgatgcccgaagcagttaagttactagtgtacggtgtttaggaaagattgtgaaatgtacaacccgcaccttacgatgtataataaaatctaatttagctcttcttcgcagattgacttgcgagtatcaacca

SEQ ID NO: 114355 - DNA, 878 bp, Physcomitrella patens
  Intron number 1 from transcript Pp1s223_9V6.1 (locus Pp1s2 23_9V6) derived from phytozome v7.0 (chr-ID scaffold_223; pos 42623 to 43500 reverse strand)
agtcttcttccgatcgtcttcaagaccctcaactggtattttctcatgtctttgttttattattttatcagtgttgctggatgcatgatgaatgtggtttttttaagaagtttaggggggctttgtactgaggtgtgacgagatcactgcccacaatcagtggattggcattggggagtgcacattcttctagggtggaatggattttttgtggatgcagtgagattttgtgctaattttctccttgaaggttgtttcctatcctcaagtcaacacagataaaagtagcctggattgcatagaaaatgatgcatagaatgtagctaggagtgatgaggagctggactccaaagtggaagctgccttgtgggttcacatgttagagagagtcaaacataacacataggtgctagcttaggactcaaattcaaccatctaaactgagaatctcttgataagttttgtctttgaaaaaatggtgaggaaattatgtttttcataaatctgctgtaaaaatccatttctccaaagaaatctatataaaaattattatatatgggaaatgttcagcaaataaatcatatgataacattatgtatgaaaaatcattctgcaagcatatttcatatatgtctagcattttgagataaattaagtgattgcttcatgcatgaattccaagaacttttttgttaagcaccacaataagaaatatgcatgatgaccatccttagcaagagaaaaaccacaagaagtgcacaacccagaatttcagccccctctcacatggtaatttttgtggtgtttggattctattcacaatgaaaatcacttttacatcaattgcagtgggggctactttgaagcaatcccaattg

SEQ ID NO: 114356 - DNA, 971 bp, Physcomitrella patens
  Intron number 1 from transcript Pp1s21_102V6.2 (locus Pp1s 21_102V6) derived from phytozome v7.0 (chr-ID scaffold_21; pos 612061 to 613031 reverse strand)
caactctgcgtgcgtgctgtaggtgcagctcatgatcgcgtgtggagctggttcgtggctcattcaagagtcgttgtgaattagggggagtctgtcagttgggtcctggctgtcggtcttggggtttccgcagcgttgttgcggaatcatcgagaagtgatcgtgaaatgttggtgtggagtttctacactgcgatgttgctgggttgaaactaagttagtatgtctagtgggagaaagaccttggcggtggtggtactgtcctaggttcaatgtctatatgacgtgccggtggcgagagaagaactacaggtgcaagatgaacaatttttttttttttttttttttttttttttttctaaccgagaacagctggaagagagtcgacattaattgcgagattagatttctgtgagtttcgtaaaccgtgacactttgatctctttcgttaccgcgacggtttgttgagctaatttgtcgagcgccatgctggtagtcacgtgatgcgttacatactgaaatgatatcactgtgcgtggcaatgtcgaatttctgtatgcgttatgcatgcactcggcagttgcaaatgagctttacggtgtgatgtttctgcgtcggccgtattacagaacttcacttcactggtgactcacgaagcataggtagctgagtttagaaatcattgttgggaactaaatatggtttgagtaataggatccagcatgttgaccttgcatataaatacggcaatatctcttttcacgcaaagtcaacgtggtgtccataatttctgcgttaggttctgatgtatgcataaaagaatccagcatgatttactgagttcgtttcaacgacaatgttcaaacaatttctcaacatgccgtcattacaactaatttcgttctctttgcctgtccagttgattcattcatcaagacttgccattgaattcagactttactcgaattgaaa

SEQ ID NO: 114357 - DNA, 822 bp, Physcomitrella patens
  Intron number 1 from transcript Pp1s90_212V6.1 (locus Pp1s 90_212V6) derived from phytozome v7.0 (chr-ID scaffold_90; pos 1330470 to 1331291 reverse strand)
ttactttgaatccttaccgacacctcctccactcggtaacaaagctgttttgaattgtttaaaacctataggtaatttccagccaagttttagggttagtctgtcgaatctcaagtaaagggctgttgaaaatcaatatatacaaaaaaaaaaaaaaaaaaaaaaaaaaaaaacttaaacatagggtgtcattgatgccaccttaatttgccacttgcctccatgacttttactaatgctaccacactatcctaaacttgagttatttgttgggtttgtagggcgtgtgtcacattaagcgttaaagttactagctgttcaaaagcagctggtaatttctaacatgctgcttctaatgggaacaattttccttcttgtaatgcatctagacacagctagaaaattcttcctctagacatctctccgattgtcttgagagtgtggactagaacgtttgtgatgaggaggattccccgcaccttgtctgtgaattgcattccggacagcttcgatggcagccagctcattctctgctgtcatttcgtctatgtttatttctcatcttaccgattgatcacaagtgactgtatgagaaagaaacttgagtggaaagtatcgtgatattaatttttgtctctttgcttttactttttgaaacctgcatctggagtaaatgagcttaaggaattcctatactggttcgggatccataaaattatgttttaggactacagcttataaagacatcccacaatagcctccagctttttcttgacccgatagtgagcacagttactggggctggatctacaagctgctcaa

SEQ ID NO: 114358 - DNA, 609 bp, Physcomitrella patens
  Intron number 1 from transcript Pp1s58_158V6.1 (locus Pp1s 58_158V6) derived from phytozome v7.0 (chr-ID scaffold_58; pos 868870 to 869478)
gaacccaaacaggcttattgattgccttacatcttcttctaggtttcaataggtaattttgttttcatgttaacacacattccagagatataaaacaattgactccatcctcacaaagctgtgaagacctcaatttttacatttgcagttgagcaacatcaaaatatggagtccatttgaaccaaagtcccttgtttcactctatttcaaaaaggccaatgcttcttcttcttcttcttccttcattttttgtttgtttgtttgtttgtttgtttgtttgttgttgttgtgttttttttttttttttttttttttttttccctctctttcattgcttcaattgagcatgaaacaagcaagatttacttgcttttgaagtttttctatgccttagaatctacatggataatatactcacaagtaggccattccttgcctttttgccttgtaacgcaacaatagtcttggtcacagttactcacatgaagaacttctacactgaaactgaagtactgttgcaggacaatcatacagctaagtgagtgaataaattaataaataaataaataaataaatcccatatgtacatactgatgcagctaagtcact

SEQ ID NO: 114359 - DNA, 447 bp, Physcomitrella patens
  Intron number 2 from transcript Pp1s132_19V6.1 (locus Pp1s 132_19V6) derived from phytozome v7.0 (chr-ID scaffold_132 ; pos 243064 to 243510)
ggagtggagaaggttagatctcacaggattcactgcatttgtcacatgccccctttgacagtcgatacacctgtttccctttaattcttttattttaacattaaaggattgacgacgaatacctaagcacctcgttgtgaccgaacgtaaattacatgcaatctttctccttttggttatttatttatttattcaattatttgtcctgactgaagagaaaaccccaatgctacagtattctttgacttattatcgtattttccaagcatctatctatggcacacatgaatatcagtcgttcaacatttagggcggagaaaccgtaataggctagattttaattaagtcatgcattactatccaagctcaacttgatggaacgctgactcttatgttctttcttgcatagcaggttttgaagagacttcagacgaggtgctttcttta

SEQ ID NO: 114360 - DNA, 1035 bp, Physcomitrella patens
  Intron number 1 from transcript Pp1s71_57V6.1 (locus Pp1s7 1_57V6) derived from phytozome v7.0 (chr-ID scaffold_71; p os 236214 to 237248 reverse strand)
tgctttgtgattcatcgtctttgctcttggaagaggttagtgattgcccggtgtattggagtgtgggtgttaggggttgtaccaacgtgtatcgcaggtgggtttgaatgaatttactgtgagttgttctagtcagttttgtttatctattggatttctggtttgaagtgagggttgtgtgatgaggtaatttgtggcttgatcagtgtacctttgttgtgttgggtgattgtggaatgatccttgagtgatgtcacgtagaaataacctgttgctgtgtcttgtgttggagggtgatcgttttcgctacggtctagatagatttccatagttagccctagcaatttcgtaagaatctgattcgtttacttacaaaaagtttgccaaagagagtaagcttggtcgtgtttaaatttgaacgagttttggaaattcggcttaatttttagggtattgtatcaccctatcccattgcgggttgcaattaactctcaaatgttcgttgtgtcggcgatgaatagggacgcaagtgctatttctttcccgaactgtttcgagttttggttcgtatcacatttcaagcgagttcctcttcttcgtcttaatacctctaattttattgagcttgttctaagaggataatggacgtttttatagtgtagatgatttgttagtgtaaatagttggatgcacatatattcttttcgactaaaatcacagttaatcgatctgccgtgctcatcagctttgttcttattagtttacacttagttgcgtttgtgcgttgccattcattacttgaatgggttttcatcttcttcttcttttgacggctacccgtttgattagttcattacttgcattgctcttctttataacaatatatcttgttcattgtattatcctcattaatggatgtatttctgattcagtgacgatcattgtgcttaattctatttcatcgtaactccacagatttgtatcatacataggctgagtggctagacgttttaacatcatgcattcttgcagatc

SEQ ID NO: 114361 - DNA, 948 bp, Physcomitrella patens
  Intron number 1 from transcript Pp1s80_89V6.1 (locus Pp1s8 0_89V6) derived from phytozome v7.0 (chr-ID scaffold_80; p os 598283 to 599230 reverse strand)
tgaatccatttctctattgaaatcgtatagcacaggtccgtatcttctaaccactcttttctatattctactgacataattcatggtacgaatgccttttttttattttttttatttttttttgtgtaacacgcctgtattccacgccgacattgtagaacttgatttttggtactgggtagagttcgagctatctttcgttatcaactacattcgtaacgtattggtcggcgggtaagagaatagcgtaattgattgtggtgcttgggtacgtgcttttgagaaccacaagcatcttgtgtttatgaataaatggtgattttttagtatcttaggcgttgcttttgattgggatcgccgtgtaagcttgttttagggctgtgaacgtctggttctaggtaggtgttttactgtgtttttattgtgtgctttatttagtatctcatcttattgtaatatactgtttgttttgttttggtaatgaattccaccagttgccttctttcagccctgtaggtagcgaagtgcataaaactatgatagttgctcctctattttttacctagattgtttggcgaaatcatagctctcatacaatctgtagactaaacctcaggcctcaacatgttgaatatctttgaaatagggttaaaccagtaactgtagttgagacccaagtgtgttgctagggttggaggtgtttgggtttggaaattgtattccattgggagttaaatgattgttactgagtcctttcaccctagtagcgtattgaaattgagtatgtaacatttgaaggtatggcacattttatggcgaggaagcgaccgattttatggcgcatgatttgccgagtaaatgtatgacgtgattggagtgagttaacttgacttagttatctgaatgaaatagttttatgcaatgtaggtgaaccaaacccaaatttgg

SEQ ID NO: 114362 - DNA, 319 bp, Physcomitrella patens
  Intron number 3 from transcript Pp1s156_90V6.1 (locus Pp1s 156_90V6) derived from phytozome v7.0 (chr-ID scaffold_156 ; pos 550788 to 551106)
tagcaattgctgctgagacaattgaacgtgacgtaaatagccattttcatacgtttgactagggaagaagattacgtgtctgaacattaataaagctctttttagtccttttacattagaaatcacgctacttttctcgtaattttcctgattggtgaaggattgtttatttttacttttgtttttttgtttttttattagtttctatgcgtgagtctaccagggaaatctgtatgattgttattttggaagtctctttctcacgttccttggatacgcttaaggtactccttggagccacagctgtggaggataagct

SEQ ID NO: 114363 - DNA, 580 bp, Physcomitrella patens
  Intron number 1 from transcript Pp1s47_23V6.2 (locus Pp1s4 7_23V6) derived from phytozome v7.0 (chr-ID scaffold_47; p os 146332 to 146911 reverse strand)
ccgttcactaatccaacacggcgttctgagagtttgtaagaatttgagcttgcaagtggtcgtcatgtattttgggtttgacgttgctcacgtagtttggttcgtttcttgtcaacaacatggtctagagtactatttgattgtttgaaaagggtatgggtgtacagatttctcttcaggaattatgctagttcggtttgtggggtttacagggaatatggcattgactgctttcttcctgtattggtggggtatacgtcaattttcttctttcgcccttccgagtgccttttgtggaccttaggtgcagctttagttgactccagcatctggctattagatgggcccagttgtgttggcggggcagaaaatttctgagctattgttctgaatcattactctttgaagctgcaatatgctaatccttttgagactttgagaattgcaagtttttgttgcatcttgacttctacactttctgtgcgcctcccgtgcttatttttagaactgggtgtgcttcaatgaagaatattgatctgcctgtgcagtagtaggcattccgaaggtagtggacgcgtag

SEQ ID NO: 114364 - DNA, 839 bp, Physcomitrella patens
  Intron number 1 from transcript Pp1s223_98V6.1 (locus Pp1s 223_98V6) derived from phytozome v7.0 (chr-ID scaffold_223 ; pos 529443 to 530281 reverse strand)
cagaggcgattggatcgagctggtaagtatgccagggattatgcagcgggttggttctagagcccgtcgctattcatgcgtcgaaagggtggtggttgttgggccgtttcgagaaaattcccctgcgtggagcttgttgtggggttctgcgttttgcgcgttgcgcagagttaatcctgctgttggatagtaattctgagtttttcgctgggagcgtgatcggattagcgattaggataacaatggtgaaagagattgtgaggtttgtgtttttttagtgttgagttggttgtgataagcttcaatctagggaggcatgccagggaagaggatgaattgttgtcattttggaggaggcgtagaactcggaactttacttgtgaggagttgcttgttcgggaaatgtatctccgtctgaatctacactaccgtaattacattttctgtctgtcgaagcaatcgtgaaccctaaatctcagtgttgaatactcttctatctcgagtcagttctgtttttttatgcaagtggaggttgtaattagatttgtgtcatttgacttggcgctcgttggcgttgattcgataactcagagtctcttggcagcgttattcttcaggatagggaacggaactagattgcaaatcggtacaagccttgagggtacgatgaacgttgtattgaaggttctctggggcctaacatgtcagttgtctctgctctggagatcttttatgacgttagggttcagagtttttcctcgtctgaactgcttctataacatttgtttcttgcaatgaagggatgtcagattcgattctgcagttccgtgatatagacg

SEQ ID NO: 114365 - DNA, 347 bp, Physcomitrella patens
  Intron number 1 from transcript Pp1s389_11V6.1 (locus Pp1s 389_11V6) derived from phytozome v7.0 (chr-ID scaffold_389 ; pos 94574 to 94920 reverse strand)
tttctcatcaagtgcacggtattcttggtatgatcaacatgctttgtattcacaaaaaataacacacacacacacacacacaccttttaccattaaaaacaaaactttcaaaaccaagtttcaatagatacaagaaacttaaatttaactacaggaaacgaaaaaagaaaaccaaactattacaaattaaaattcttgtcttaaaagggttactgaactacttatttgtatcattattatttattttattataaattattcctactacgtatgttctgtagcattaacccctcaaaatggtaaatttttgtgcagggcaaacgtatcaggaaacaaaagaagtctac

SEQ ID NO: 114366 - DNA, 748 bp, Physcomitrella patens
  Intron number 1 from transcript Pp1s2_53V6.1 (locus Pp1s2_ 53V6) derived from phytozome v7.0 (chr-ID scaffold_2; pos 352882 to 353629 reverse strand)
cgccgggtttcctttctcttgatatatttgaagtggtatgtttcgaaattattgtttgtttgctgtagtagttttaagtgcgttgaattgaatctcggtgttaacattcaataaaaacccatggtcttcattcgatgtgttatcaaggtcgtgatcttatcgacgtaaacttgctttcaattgctcaatttccagtatatctttatttcagcgaaagcaagcatacatgtggcaccacattgcgaattgtctccacacggtttttgttgaaacaaaatattaacaattcataatgtaatttataaatgtttctatgttcataaggaatgcaattttaatcgttagctataaatttaccaagttgtggggagctgttctttgggaggtatcacaatgcttattgatgtgaactccggctccagaagttttaagtgaacattatcttaggtggtcgccagaggtcttggcagcagtgctcagctgtcaactttgcataattcgtggtatcttagactagcagatttctttacttgtactgctgtagtgcatcttgtgttttgtttagcaatgacgatattccaggggtttacaagtttttggagcgtaaattcttgtctaattatcattgttttgaaggatactgtaggagggttttattcgttacgacgggcaatatcttgggagcccttactttgtttttattcttgtcgcagaaaaagaagcaccatcaattagggactgtcctttg

SEQ ID NO: 114367 - DNA, 693 bp, Physcomitrella patens
  Intron number 1 from transcript Pp1s260_3V6.1 (locus Pp1s2 60_3V6) derived from phytozome v7.0 (chr-ID scaffold_260; pos 13108 to 13800)
aacgatttgtgccttacgctccttcatcagaagaagtacgtctctcattcttgttcctcatctatcctcgaagctctgctaaatactatcccatttctcgttccgatgagtgatatccacgaacaggtcaagaatatgtgggtttgcgcgatggaatttactactcacgtgcttgccaaaactaagtctaaaatccaaattcctccaaggatttccgtccgcgagctacttaggcgttagacacgtatctcctacgcatctcatgacctgctctggaactgtcccgagatcgtccgattccatcaaaaaacaaaacaacagaaaaaaattaaaaaattaagtttcaatcatagcttgagatgttctggtaaagactactttttttgagaaatgcttatactaatgcaagtcaaggaaatgcaatgagaattgacacgaagatgattacattagtctctaatttcgcagggttccatcaaaagaatatgtgggcttgcgcgatggaatttacggactagactggaaatagtatgctggaatgacttgaaactttgaattggtagtcagcgtctgtgggctgtaaaattgaaggtaatctttatgctctcctgatggtcagacatctatataggacttacaaatgttcctcgtttgacagttactgctgataaaagagtgggacgccatttttcc

SEQ ID NO: 114368 - DNA, 612 bp, Physcomitrella patens
  Intron number 1 from transcript Pp1s104_16V6.3 (locus Pp1s 104_16V6) derived from phytozome v7.0 (chr-ID scaffold_104 ; pos 189225 to 189836 reverse strand)
cgttgcctcattctccccctgcacatccactacaggttttccttcccctcgaaacaggacctacagtgtcgctacagtttactgattgcccgttttgataacttcctgtgcactgacggcaattattggtgagtcggtgtggattttctgatggacactttctcaccgactcctggttttatgaggtttctagatcgtgatctaatccattcggccacagagatgtgatgggttgtgtgatggtgacaaattctcgctgacggctctcctgctcccctgttgtctaagagaacaaatgactggaagaagggttatttgattttgaaagtagctttttctgaattttttgtctaatgtgacagggcggttgatagatttctccgattacacacgcagaacgagcgaattgggtgatgtagagtagttcaaaggaactgcaagagattagattcatgagtgccgttatgatcaatcgacttccgagtaaatctctcagtttcgtagaataaggcagagtttcaaagagtttcctgcggtcaggaattttgctgttgtgtgacacatgtgatttctccagcgcaggtgtaactgaatcgaggtcaagtcatttga

SEQ ID NO: 114369 - DNA, 941 bp, Physcomitrella patens
  Intron number 1 from transcript Pp1s62_166V6.1 (locus Pp1s 62_166V6) derived from phytozome v7.0 (chr-ID scaffold_62; pos 1304895 to 1305835 reverse strand)
tccatcccaacaccacgcttacgggccggtgtaaggtaagcatttctttctacatttcagaacccacaaactcatcgtggctcatcgttgttcttgtaaacagtggaaaattagaactgaccacaaaagttgaaaaaattgtagctatgttgcataactgattcagtcatattcaaactcaggtctacttcccgaacagattcacaactttatttgatcatatttagacaccactgaaactctgagcccggtttttacagtagatgaatcaaatgccactcacttgacactcaatacacctccatttctacataaaacatgaacgggaaagtactctccaatctaaaaccaaaacataccagactcggctaaatcatcaacttataagctccgcgcttgagaacatggcgacggccaaggtgccggtatcgtcggcggcatgtgatttcatgaatcagatgttatggtttcagagtgttttcttcttatcgtgaaggggtttggacaatcggttgagctttggcaacctaggtagcatgtcgtggtcaccgcgcacgagaaatattctgtgcacgttagtctatgactgggtactcggcaacgtagacttcgtcctcttcagttctacttcgtcggactgcgcacatgagctgtgagtacgcagattgacattggaaaaggtcagtaggagattgtgtttcttcagctagctggtcctgtggattaagcaggtggcacctctcggacgtagctcaagatgtctctcctggtgttgcatgtcttgtcgtagagctatattgagtttttgcttttggcgaagagcgtttgttttctcatccagtacgctggtgtgaaccatgcctgttgatgacttaggattctgtgtgatgtgttactgtttcccaggactttgcccccactcgtgaggattactcgtccgc

SEQ ID NO: 114370 - DNA, 1027 bp, Physcomitrella patens
  Intron number 2 from transcript Pp1s7_364V6.1 (locus Pp1s7 _364V6) derived from phytozome v7.0 (chr-ID scaffold_7; po s 2183217 to 2184243)
acaaggctcgacgcctgggatacaaggcgaaacaggtatgttcaaacttgcgaatctttaacctacagtactttttgcttgggcaggttgtagtatgaactgcggcaagtgcatcgctttgactggtgggtaatcccaggtacagaaatgaaagtcactgcgcatttagggtttcctggacctttgtatatgctgaccaccaggagcatttaagttattattatcgattggtgtatagttgtgaaaatgtgtcgtcctcaagtgcgatttctcggcatgtctttattaatgtgtaaacctaaattcactattcaacaaatacattggggatattaattttgattcatgaatgtgatcgttctaatgctctctaggtccatcaagaagaatataaatatgtttactccttgtgtcaaactctatttttcactagttaactgagcctccgctggttacagtttagttaggttgttgtcatagtttagtatgtgcctcgctgttgacgaaggaggaacggaacctatcaagtccctcaacagacttttttaccttctgaaactacactcatgtcaaatggtgtgcttacgtttctggagcttttgtcttgttgttctgtcagcaatgaatctaaatgtggccgaaagggttggtatggggcacaaagcttgtctacgggtcttctttgacaggagactagagtactcgtgacgtcagaaacaaccctgcttagtatcgtttctaccctcaagctatattcatagcgttgtggttgaataatctcgttctaaactcatttatcacattcaaactaatgtaaatatcagcatggatagcaccccgcaagttccatttctgagaacttgggctttctgtcaatcgcgtggtctaaggcttgatgatgaaaatatggtcgatattcgtcttttgtttatcaagtatggtcagagtattagtgatgtacttgttactgaacactatcctgtgtgtgacagggttacgtggtgtatcgcgtccgcgtacgccgcgg

SEQ ID NO: 114371 - DNA, 370 bp, Physcomitrella patens
  Intron number 3 from transcript Pp1s201_7V6.1 (locus Pp1s2 01_7V6) derived from phytozome v7.0 (chr-ID scaffold_201; pos 51050 to 51419 reverse strand)
cgtgctcttcgtaacactgttgactctttttattggtacactcctttcgcgccattgcctagttcttcaccttttttcttttatttatttttaatgaaatagggtttttgcttagcaatggaagcatcgaagagatttttgtttttataccttggatttccggtaattttggctacctttctagctcataagtgtgaaacagggcgttggaggttttaataagttctagcccctcctacgtcttgcacaccttatatttcgatttttgacttctcaattaggtttgggcgagcctgaatgtttaatctttttggcaaatatttcttgaactgtagttactcgggtcacattcaagcggaagaagtccaaa

SEQ ID NO: 114372 - DNA, 351 bp, Physcomitrella patens
  Intron number 2 from transcript Pp1s37_117V6.1 (locus Pp1s 37_117V6) derived from phytozome v7.0 (chr-ID scaffold_37; pos 617430 to 617780)
aggtaagaactatcaatgctggtgagtcggtagacctcaaagctaaggttaatatgcagtttttttgacactggtagtatcatattacacacgtttcaagaaaatttaaatcattctcttctttctgtatttttgtttcagcaattcaaatgatgaattagtctgtaaatcatatttttctcctttattctcctagtttagttggaattcgaattatttttttggttcgcataacctatagcacagtggttcgtgcaaccctttcgtatagaacgcaaattgttcgaggtgtatcgtttagaagctgaactacagtggccgggttgtgataatatcagcttcaatctagtg

SEQ ID NO: 114373 - DNA, 633 bp, Physcomitrella patens
  Intron number 1 from transcript Pp1s66_7V6.1 (locus Pp1s66 _7V6) derived from phytozome v7.0 (chr-ID scaffold_66; pos 41353 to 41985 reverse strand)
cttcagctgtaagattatgccttcaaaccccctttgcaattgtttcttttactgaggattctggttgtggctgggcaatgcggctgtgaacttcgcagccgctacaaacctgttgagcatttcgaataccactccaggcgggtgatttttctcagttgccgagctagcgagttcatctgcagagccgagttcaatttgagggaattctttacgctagctttgtattgcgactgattgagatcaaagtttcaagaattaaacttggaatcaattaaggtcttcgatctgtcgtgaataacgatgttcagggtttagtgcagggtttatgttatttcgggaggattaaattatctacatgagtatttaggttattttttttgcggtgaaagactgaatgttgtgaacatgttcttgcgccagatatggttttcgttatttgcagagcatgacattccgttgtttcattggtttgtgtgttttaggtgtattcttttttcgacatgtacttagattatgattcgtgcagtatcggagagtatttagatccccgtaaatatccatggatgttttctgtttgattcagatatttgctgtgcagatccttagagaacatccagagctcgaatcatttat

SEQ ID NO: 114374 - DNA, 838 bp, Physcomitrella patens
  Intron number 1 from transcript Pp1s95_21V6.1 (locus Pp1s9 5_21V6) derived from phytozome v7.0 (chr-ID scaffold_95; p os 102124 to 102961 reverse strand)
ggagactgcactcttattggccttcaggtaccttcatagatctacttcacacacttgaatgccagggtgagaacaccggtatgagatcctgagctatacttttgtcacaattcgcgactaagctaatacttggcagatacctactttttgttgagagtttttctttctatgctgtagtaatgggtttgtagttagttccttgacaaggtcagtagcttagtggacgatgacggcatgcaatccgatccacaattatctccggcgaggctcaattctgctgaacttgaccagtgtaaagttctggttctacagtactttgagcaaagaccttttatcatttatgtccgaaatatttaattcccccaaaaatgaggtccagatgccgtgaaatttttctagggatgtattcatctcttacgtagattcgagcttttaacgccaaagcgaagtagtgcctctctaatttttacttcttgtcgtattgtaaaatcacgtgatttactggggattggaatcgttggctcaacatgagtttgatatggtgaaatgggattcattgttctcattttattaaagtcaatgcgtcatattataagataataacttgatgcaactcttcttaattcagtttctcattttcattttttctttcattaagaagccacttgatgcttgaaacatatttggtacagttgtcttcatttttgtgtgttcgaatcaatctgtttactccaactcgtttacagggtgattgcattgtcatgggccttcttccttataaacttttggatttggtgttctgatgtccagccaatattggtctacatatcgaaagtgg

SEQ ID NO: 114375 - DNA, 483 bp, Physcomitrella patens
  Intron number 1 from transcript Pp1s15_354V6.1 (locus Pp1s 15_354V6) derived from phytozome v7.0 (chr-ID scaffold_15; pos 2045124 to 2045606 reverse strand)
gattctagaaagctgcgagcataaggtacgattttagggtttggatcatatgttctggtttgttcgcacgtaggttttgcattcgctgttgagtgagtttttttttttttaatgctcgatccatcttctgtctctttttctttccctttttttttttttttttttttttttttttttttttatgaataggagcttaggtttctgaggttagaaaatgtgcttgtgtatgatggtgctgtgttttgctgaattggtgatttttggagttttttgaggttttgattttatctggattttgtgtgttttggtgtggcgatttcttttagcaggggaatggtagaagggaatgttgtaaggttgtgtctcagggtttttgagagcgcaaatggaggcctctgcaatgatgttatggttcgggaattctgaacatccctcgaaagttgtgcagggaccttcagaggaccagaagagaccttacttgga

SEQ ID NO: 114376 - DNA, 592 bp, Physcomitrella patens
  Intron number 1 from transcript Pp1s114_67V6.1 (locus Pp1s 114_67V6) derived from phytozome v7.0 (chr-ID scaffold_114 ; pos 418802 to 419393 reverse strand)
tcacaaaggaggacgtaatatctgcatttctccaggtatgaaacgcacttagacttcataatgatcatactgtatcctctgcgacacaatcaaaatacaactaggtgtaggacattataatgttagtcataatatttcaaatcattcaagaggaaattaaaatattatgcacggaatgaagcttcaaagttttgcccataaatttgtcaccaagagatcaattgatgtaacaacactctatcagccttgcttaattctacaaatgaaacctgaattgtggaatggtcgaagattctgaattgaattcagaagtggacatgaaaggggaagtgttactggctttcttttgaaattagggtatttggctaatcgtcattgatcggatagcacctagcaatgacctacatcacctgcttccagcccttcgtgtgggccgcttttaaaattttaacttatctgacgttgaatcatgtgctcatctgctttcttgtgatgtttttgaaaattttacctcaaatcacctcatattgtgttctttatttgaactcatcttgtagaccattcaaagaaccataaattgcttgtcagccga

SEQ ID NO: 114377 - DNA, 638 bp, Physcomitrella patens
  Intron number 1 from transcript Pp1s114_10V6.1 (locus Pp1s 114_10V6) derived from phytozome v7.0 (chr-ID scaffold_114 ; pos 81278 to 81915 reverse strand)
cctacttgtatgtcttttttcactttgattttctcctctttgcttgtctgtgttgaagtattgtatttgagttttttttttttttttttttttttttttttggatgggaatacctaaatgaacccgattcttttgatttttagaaatttccggatatgtgttctcatgcgttagcacttggggagtggggttgttaggaacagaacttcgttggattctttgagttggggtgtgagggtagctagtgccgcgaagcgaaaaaaagagatacgttgccgtttttgaagcgacagaaaatcattctgggcatatgcttttgatgtttgtactgaaggccgaggctgcgagattgttgcttgcaataattcgctctttttacgattcctaacacaattctttgaggtactagtcgattagggcatatagaggcgacgttctgatacactggttcggaaatgtatcttctttaactgatttgcagcctgacacacaagaatgtccgatgagttggcatctttacttgagaataggacacgtaatttctcaagaacatcgtcacgaacttattcccacgtttgacgatcatggtgggtttggtttctgcaatggttgcagagtgtttgacgaagaaaccggtg

SEQ ID NO: 114378 - DNA, 767 bp, Physcomitrella patens
  Intron number 1 from transcript Pp1s11_307V6.1 (locus Pp1s 11_307V6) derived from phytozome v7.0 (chr-ID scaffold_11; pos 2303246 to 2304012)
ttttcgacatttcagccaagtgagtttgagtgatttgaacttctacattttaggtgtctgtgcttagattgcttttttattttgagatgtgtttttctttttcagacagttgtgatcgtatggtgttctgtgtcgaggaagtttagtcacaggcttagatttttagggttgatgattagcaagtggtagcactctcaagcatttcgattcggctgtttcgttgcaatgttatgctctgagtacatggcctgtgtagttatcatgtgcacgtgcttcttttgtcaatcggccttaagccctaaaccccgaggataagagcattgatcaattcttgaatgtgtcgatcgtggtccttccgtatagacggaggtttcagtcgaagtgctggtaattctatgcagtgattgttctatttggtctattggagtatgtatttgtaacgaaggtcactctatcaaggataatgttaaccgaaggacgggatttttaaaatcaatccctttgtcttctaaactacacgatgagttgcgatattgatgtacgaattatagttttaacttttggtttgggtattgaacacggcgctactacgatcaatcgataaagttttctgtctattaattctgattctttcatctgacattcctcatctattaaggaaaatgttctgtttgtttgaactctgtctacgattattaggtgtcagtcctcctagctatgaatgggctgtaattatcccacttgtgttctctcctttgatctccagt

SEQ ID NO: 114379 - DNA, 484 bp, Physcomitrella patens
  Intron number 2 from transcript Pp1s111_165V6.2 (locus Pp1 s111_165V6) derived from phytozome v7.0 (chr-ID scaffold_1 11; pos 950885 to 951368)
tcatcacacacttcagccctctcaatctcttattggtgtgttcctccattccgtatttggttttcttgctgtttggttgtgcgtgtagaatttcgaccagtcgattattggagtttgctcaggtgttgaccatattatctgatgttcctatttccaatataaaattaagaagatagtctcctttttactgtaagggagattgttattaggtagtcaaactaagtgtccgccttgtcttagctgtaaaagatttggcagcagaatcttcatgcaacaaactctctgttcttttttcttttttcttttatccccccccctccccttatggtcaacgtgttgtcttgagctttgatttacccgtctgaacatgtaagtgacgttgcgtttagttgttatggtccttcactctggttttaaaacactcagctgtgaactttgttgttttggtttgttcatttctttacagaccgtcaccttaacctag

SEQ ID NO: 114380 - DNA, 667 bp, Physcomitrella patens
  Intron number 1 from transcript Pp1s191_84V6.1 (locus Pp1s 191_84V6) derived from phytozome v7.0 (chr-ID scaffold_191 ; pos 490307 to 490973 reverse strand)
aagcattttacgagttccaggagcgacacgggccagtatgcttctttaccccatcttcaatgttgaaccgttttccagtgaaaataaatctatgtcacgtttgttttttgagttgttcctttgagcggtccaaatttcttttcgtttgtggtggagtgggtaatgggaagatttcttctatcttttttcttcttttttttcgtccttttgttttcgactttttatttttattttttatttttttatttctttttccatcccctcaattctcttctcatctttgactgaatgcttcaaaggaagagatccttccactgatagaccggaaatctaatgtatcgctctttagcactgtagctttgtcctctggcaattttgctcgaagttgctcaagctaggtttgcgaattgctaagggttttggggttagaggaaagcatattaatcaactaatacggcaacctgggctgtatcaatgaccagttcgattaataataattggaacatgaaggtactgtaaaggacatcaattgactgggtgaaaaatatgttccaagcattatggatttcgcaagaatgcttatgctagttttagatgtagagatttgtaattttcgatcccatcttgtgcaggttgccaaatctcagtacgtcttgttgtggtgctg

SEQ ID NO: 114381 - DNA, 652 bp, Physcomitrella patens
  Intron number 2 from transcript Pp1s9_69V6.1 (locus Pp1s9_ 69V6) derived from phytozome v7.0 (chr-ID scaffold_9; pos 586690 to 587341)
tttactgaaggaggcttgttcgaaacttgttgaaggtgtgtttcagttcacatatgtttttggcaattcgggggtagtaatggttcgtcttactttgagatggatttttcgagatgatcagctgtctgtatgttgcgtgtctctttcttgtattttgggttgacgaagatgtcagatgaagatgtgtgatgtttctggagtataaaagttagaagactgtcttctcagttgcatctttcttggtcttgcctgattcatgctgaacttgatgcttcaaactgtaaaagtccataaaagtatggagtggagtattttagcttctaaacaggattcaataagatacgacatttgtggcaagcaaccttaaaagtcttcagtgctatcgatgcttaaatttgctgcaatctcgaatctatgtcattttataattttcttgtgaaatacactaaagaaaaacacattatcaatgtgttgtacgcacaattgcttctggtactgcaggaatagtctaatttttgaactagtcaaaacattgtagtttttaatgtcgttgcatgaagttttctaactatttccatcgctgtggtgcctttattgatattgtttgaatatttcaggagttgaaactaagtttttcgagcctgttgttacc

SEQ ID NO: 114382 - DNA, 899 bp, Physcomitrella patens
  Intron number 1 from transcript Pp1s199_22V6.1 (locus Pp1s 199_22V6) derived from phytozome v7.0 (chr-ID scaffold_199 ; pos 106581 to 107479)
ggcacaaccgccagttcttaggcaccttgcttcatgtatatctctgttctgcttcgcatccgatttagctacccttgatgtctggacgtggcgatttaagatcggcgtagttattttgttcttgcttggcaaatgtgtgctctatagatgcttcagatagtttgaagttgtttttgcgcactcgggcgcatgattcgtaaggatttgcggtttgcgtgagtaattttatcttgttcacatttatatatatatatatatatatatatatatatatatattgcatcggattatttgtggtggttgtctattgcagtgaacttattctggattttttttgcgtagtaccggccaactgatttcctctgtagctagccttgtcgtggaagaaccccgcacttctcatgcagtctgggcgagaattttggtgaacttataattaatccgccacttcgttgtctgtcggggtgctgtagatggtttcgctctttgttaaaattcgtagttgctccggaataaatgtcgatttcgaactgcattgaaagaaacccgtggagttcggctgtttccaggcagataatacgagttcggatatcacattgcttatctaaatctgtagttcgacgacaccgtctcgctactcacttgatagaatagggttctgccgttgctagaaagaagacggtgcgtcgaatacccaacgtcatattctggattttcaaacttgcaagtttacagctgccacttaagcagcggtttccttgccgcgcgttctgtagattgcagccgtctaattgacgatttgcagatataccctggatttttgatgcagagcattgtgattatgtgttggtgatgactctgaggcttacgatggttttttcggactgcagggcttcgca

SEQ ID NO: 114383 - DNA, 385 bp, Physcomitrella patens
  Intron number 2 from transcript Pp1s6_198V6.1 (locus Pp1s6 _198V6) derived from phytozome v7.0 (chr-ID scaffold_6; po s 1986839 to 1987223 reverse strand)
gtacaagaaggggaaggacagcttgtacgcccaaggtatccacttcgttttgcttgattctttttgacttgttgaatctagctgtgtttgtccgagtgcttttcctcggcattttagggggcgtctgtgattttgtgtcttctgtggagttggacattaaagtttttgcgaaatttttcttgggtttgaagacactatgatgatgtggatcttgatgatcgttgtagtaacctattagtagggctgatcctctcatagcgccagtcctattcgatttgactagcattttcgtttttagtgactcacattgatagtaatgctactccttcataactgcgtttgtattgaacatcctttgtctgcattccggcaggaaagaggcgtt

SEQ ID NO: 114384 - DNA, 610 bp, Physcomitrella patens
  Intron number 2 from transcript Pp1s2_640V6.1 (locus Pp1s2 _640V6) derived from phytozome v7.0 (chr-ID scaffold_2; po s 3887362 to 3887971)
gtcggcaacgggtgggtgacttctgcttccagtttgaccttgttgacgtcaatagatcatgcaatgcatcacaaaatttcctcagccattatttcatgtatatcagcaggtgtgaacttagatactccacagttgagattgaagagctcttgtggcttgaatgaagcatccaagaatttctctgtgctagggttccagtagtagtatatgaattgtttaagaatctctcatgataggaaaaaaatcaaaagaaaaaagggaatctaacatgacatcaataactacagaatcattgttgtgaagttatggtaatgtcagaaacctaaagaaaagtttctgtagaacaagaagttaatgatcgtagttttataattttttgttttgttttattcatttctgttgcttctaattgacgtacttacgcgtattctacattcaaacgctttctgtaacgcttgtaaagaacgagtatcttacaatttcttctgagcaagggtgacgtttgctggatttgacttgttttttgaatgtcccaagccagattataaacagtttaattggaaagttctgtgcagggtcaattcggcaaacttacatacgaaatcaaaag

SEQ ID NO: 114385 - DNA, 696 bp, Physcomitrella patens
  Intron number 2 from transcript Pp1s156_156V6.1 (locus Pp1 s156_156V6) derived from phytozome v7.0 (chr-ID scaffold_1 56; pos 872099 to 872794 reverse strand)
agacgaggtgcttcgaggaggtacgtctcaggacttgattccctctggctaactttctgattcatatttttggtagaaatatggcattctgatcttttgttttcttggaacgaaacgcacacctctaatctaatgcatatcagtgacctgattaccatagctctttgttacatcgactctggcattacctttacattcgtttgttgacgtcacgaagtatgtcagggctgtgtggcagtttgtcagatgctcaacattttggaataataagattgtgggatactcaacatctcaagtaatatccagtagaggtctcaacattctggaataataatcgcattgtagaacagaaattgtgggtcggggaaatctttgagcactatggaccatggcttagagggacacatgagtctgagatctggcttgagctgtgtaggactcccttaatgcttcgtttcgcaccagactcataagtgccttcagattgtatagatatagatcgaagatgccttgcagagagatctctgggcaaataggacactgcattgtaaggcgcatgaagaattcgtcactttggacagttacccattagtgtccatgcagatgtttctgaggcaatttgaactaccaatgtctcataaaatcccgtggtatcttccagattcgagtgtcacagcctttcatcgtcggcattca

SEQ ID NO: 114386 - DNA, 822 bp, Physcomitrella patens
  Intron number 1 from transcript Pp1s308_31V6.2 (locus Pp1s 308_31V6) derived from phytozome v7.0 (chr-ID scaffold_308 ; pos 490185 to 491006)
tgcgtgcgagcgttcgtcaccggctgcactaatcggtaggcagattacgcaggcagttttgttttgtctacttctcttcctgattgatatcttcttgatgattcactgatgtattatcttcgctacctcttctcctcagaattcggcatatatgagtatgtaagcatccaccgggtgaattccacaatgcgaatggtattcgttccgatgaatctttccttagatgttgatgtttgaggagtttctcttgtctgctggcaataattttattgtaggttcggagacgcgcagttttcaaactaacgtgccgtcaaaggtacgcgagttcgtcgcttaatcgtgtattagatgctgagggtggagtttttggttttccaattgccgaagtggtgagcggtgttgctcattttgtgggctgaagagatctacttcagcaaacagaaaagtgtgagtaccatcatctgacaaatctcgatcatagggttgcccttcggtcgttcaaaaccttcgccgttgaagtgcaatgccagaaaccttgtgatgtttattccgcgcttcctgctaccacttatgttatcgatggtctcgctctttggtcaaatgcggagtctgaaatttccaaggtataaatgctaccctggaaattccagacctagaattacttgaaaggttgagtctctgttaggtttgtggtggtgattttctcgaagggtagtgagtcctaatgggactctcgattccattccttcattcaatatatttgttctgattcttacttggatttcaggaaggtgttgctgttacctatcgctctcgccgtga

SEQ ID NO: 114387 - DNA, 720 bp, Physcomitrella patens
  Intron number 1 from transcript Pp1s312_29V6.1 (locus Pp1s 312_29V6) derived from phytozome v7.0 (chr-ID scaffold_312 ; pos 233758 to 234477)
acgcgtggtcggcgtctggcgtcgcagctggtttgttttctcgttgatttctatttgcaaactgacataaactgtgaatttcgtgttttttcccagcttcatgatggttttcctcaattcgtttgtgcttcaattaattgacttgaacgtgtatgcgtttactgtggtgaaatttttcatggagtggcggatattttcagctcaatagatatccgtgtttttttcattttgtattttttaatttttctacattttgtaacaaaatttgaggaaatctatttgtgtttcttttcattgataaattctggtgatggtgctgccatgcttacattttgacctttcatcatgtttcaacagaattgcatgatgtatcaatgctgtgaaaatttgactgatgaaattcttagtcctccaccctttttcattttctttccttctgcagactgatcttacctgttttctgtcttccgtttttccggtcctggaagtggcgataattagaactcttattttcttgtgaaattctctggcttttgacttccaaatccatttattggatgatcatatcttgtgcttcttattcgtcttcttcttcgtatttatttttaaattttaattatagaatatattcaaatatgtaatgtatttcaaaaacaattcttgacattaacattttatctggtttgagggaacaggttcaaggaagcttttcattgtcaa

SEQ ID NO: 114388 - DNA, 846 bp, Physcomitrella patens
  Intron number 1 from transcript Pp1s7_436V6.1 (locus Pp1s7 _436V6) derived from phytozome v7.0 (chr-ID scaffold_7; po s 2697078 to 2697923)
cccacaaggtactttcagccagtattgctatcaatcttcgatttaaaaactcacaagcaatctcatttcattattttggtttgtggttttcgatttgcacctggcgaaatatgcgcctcagtcccttcaagcatggcgtctggggacagtgaaaacacactgaatctttcagcggtccctctgccaagtttccgctttattgttacaaattctcattgattctaaactagtgtcgtgcagagtgtagattatgggtttataaatcaagtatcttttcctttttgtctcaattacttgataccacagctttcgaattgtattcatgggggaattccgctttgcgaattagaaacatacagtcatgtctttatccatgatccataaatgctctctaaaaccttgattcttatacaataaaggatttaatcatttgtgtaaagggacatgaatgttgatatatatatatatatatatacagattcatttataaggcatccgcagttgaacatcagatatagcttatcgccttcgcctcaaaagaggttgcaacccaccttatgatgtccccctggcctcctgcggtgctcttctccttggtctagtgtattaaaatgattgagttcgttgcctttggttggttaaatctgggatgtggcccaataatctctggttcattacgttactccctgctgccatcgttcactaggcatggttattgacttcagtttttttttttgtttttagctacttccgaaattctatggacagcattcgtttatgatctaaattgttgaagaccatttattttcagggcaggaccgtgggttaccttgtgtgttggttact

SEQ ID NO: 114389 - DNA, 689 bp, Physcomitrella patens
  Intron number 1 from transcript Pp1s111_173V6.1 (locus Pp1 s111_173V6) derived from phytozome v7.0 (chr-ID scaffold_1 11; pos 1030730 to 1031418 reverse strand)
tggcgtattttgccgcgcaattaccctcccccacagtgcgttcctccactctgtcctcctacttgcccttctcctttaattttgctttcaaacatccaattcattctctcacaaatttccagcttaagtcttttgtgaatcattgcctctactagctttcagaaatgtcttaccaaagcgaatactaagtgatttcataatcttgcagcaaataattcgtttctgaaataatgtgcaccgaaatattttgcacaaaagtcattgaccttgcaggcttaacgttatcgtctaaaagcccgagctacaatgccatattaaccagtagtaaaatagaatcagagattctcatctccgccgccaattcctttaactggttcccgagaatctagctgaagaagcagctgtgatctagaagattagagcgatctcagtttgttagatttctgcgctcgcactactcaaacgcttgccctctacgttaaccaactttttcaagtgattgttttgattttagagagtcctgagctgcagttcttatatagaagttccacaacacacagttacaatgctattagtggaagaatttattgagatctcaaagaggaggcggtgctagcctttctgaagtccaggaccatgtctctaaggaacttaagctctttctcatggaagtcaggcttttgctgcag

SEQ ID NO: 114390 - DNA, 710 bp, Physcomitrella patens
  Intron number 1 from transcript Pp1s199_90V6.2 (locus Pp1s 199_90V6) derived from phytozome v7.0 (chr-ID scaffold_199 ; pos 515889 to 516598)
gagttcccagttttcagacacagaatcgtcgccaggtgatgtttccaatgctgcacttgtgttggtgttatttcgtgttgtctctttgagttgttgtgttttttaattgagagagagagaggagtgtgattttcatggcattttatttatttatttgtttattttttgattttattgtaggacgggtttgtgaattgtataggcgtttgtcgaactgaagcacacgactagctgaagctaatgtgtagggtttagggttttgatgatgatggtagtcgtggttcaatgacagtgttaccgagaagatcgagctgataaggaaacgtgtgagagaattgagctgtacagtgtcgcagatgtcagtttggttagagagtgaagcccgcagcagtctggcagaatcgacttgtccttccaatgaacggtgcaagttttgagtgatgtgttggattaatgatgcgagagaaaaacagccacttcacttcatttgttgctatcatgaatattgttttccatacatctaagttagataaatgtccaaacaattcgtttttagagattgagagagctattaggttgatagtttgtcttgcgtggcgcagggaattttttctgggtcagagttggaccaaatatttgcattagcaagttttctgaggttttactttttcttttcttttcttcctttcagtgtgtttccagttcagagg

SEQ ID NO: 114391 - DNA, 830 bp, Physcomitrella patens
  Intron number 1 from transcript Pp1s270_84V6.1 (locus Pp1s 270_84V6) derived from phytozome v7.0 (chr-ID scaffold_270 ; pos 550306 to 551135 reverse strand)
gttcggcgaacgtgaccaggcatgaagaacgtattctcagtaccatgagctggatacgagaatccacattattccaatcattaatgaaaacaagtcactccagggcattatttacatgagcttacagattcaaaggagcacttattatcatcgttattattattattactattattcttccagcttcaggagacaaagcatccagattttcaaggaagaaacatacggaagcatgaaacatccacaaggcttagaagacatggtgaccctatgttacaatggcacattttttttttaaagtgccgaaattctacacctatggtgaaatatctaacctaagctccataggaaatccttcaactccatcgggcccaaacatgctgcgaggacattcaggcaccacatgccatgtgccatccgacaaatcaaatacccacgtatactcccactcaggtgacgaaaagatgagagcatctttgtggtcttcagccgagaaggtgtaaatgttgaatgaatcgaaatcatgcgaagaatcgaatggttggtaaggaacctcaccgacaacgactatgtccagacccaactggtcgttgatagcccacacttggaaacacccttggccagtggaggaatgctccagttcgaaggcagcatctccacccaccacgcttctcgtcaagacgagaacgcggccgtgactctctacaattcctaaggtccgcatgctcaaaaactcatgagcggatggcacattcaagtggattctactccaaacccctgtctccaagtcatacgccgcaatctgggacaggttttgggacaagcaatac

SEQ ID NO: 114392 - DNA, 443 bp, Physcomitrella patens
  Intron number 1 from transcript Pp1s173_24V6.1 (locus Pp1s 173_24V6) derived from phytozome v7.0 (chr-ID scaffold_173 ; pos 166931 to 167373)
gaaggagttggatcgtggctgtgcaccgatcagcggcagattctaggccagtacatgtacaaacactccaacggcaaaccctaacatcctctttgccattgcaaatggcagttacgtgcaaaatttgagggagacagtgccgttgtctaagttttaatcgggaatttggagcagcagattacgtcccagttagttggttttattcttcatttggcgtggattctccttcctcagttgtgtctgtagtagtgagtattgatttttttttttttttttttttttttttttccttcttttaattactgaacatgatcgagcgtaacgttacttaatttgtggatgcaacttattatgagcaatctgaattggaggagagtttatgatgtagttagagaaacgtagagaagagttttgatgtatttgttatcagcatattttgggag

SEQ ID NO: 114393 - DNA, 636 bp, Physcomitrella patens
  Intron number 1 from transcript Pp1s58_257V6.1 (locus Pp1s 58_257V6) derived from phytozome v7.0 (chr-ID scaffold_58; pos 1629044 to 1629679)
gggggatcgctacagcacttggtagacctcaggaagtacggtttcacctatccctcgttggcggtgctgtgaatggttagtttcgagaagaaacgttttagtgggtaggatgtatttgattttgaagtgtgtccgatcttcttggaatttcgaattgtaaacaacaaccagaacgtaacagttttttgtcaaattgcattagatgctttgaagcgaaagcgtcagcaggttcatgttggtgtcgtaaggattgtagaaaggtctgatttcgataaagtcatatttgcccggttccttcgttgcaatttgagattttttcccttgcctccagcgcttggtctgttaatccaagggacttagatcgaattttgaaaagctgtgtatgcaactggtttttcaccggttgataatcgacactgttatggactgttatgggttgtaaaattatatccatgtgttcaacgcacaaatcatttttgattctcaatctgttgcataatcaattgaattattaagagttttgatcgattgcgttggtataggtcatgattgacgtagccctgagattgcactaacaagtcgctggctgtgtcatgtccaggtgaaaacgtcgcctgtgaggactctacgtggtga

SEQ ID NO: 114394 - DNA, 806 bp, Physcomitrella patens
  Intron number 1 from transcript Pp1s213_121V6.1 (locus Pp1 s213_121V6) derived from phytozome v7.0 (chr-ID scaffold_2 13; pos 640373 to 641178)
tcgcatcagcgctcgagatctggtcagagtcccgcttttactatcttctgcgttgattgggagttgaggattgtgattgtatttgcatttgcatcgtaggtcaagagccctgctttgaattgttgattgagaattgaagcttcttccaaatagctaaacgcgatgttggattctgtcgtcgtaggccgagtgacggattacttaaaaagttgaatctttttaattctattatgcccgattggctgtggggcttgtttcgattccaatgggtaataataattcgacttgtaagtagattacaactccacaggtggtgatttgtaggcgaggtatccgttttcggcaagcgtttgccatgaatctgttttaggtcatgaatgaaacacatcaatcagacagtgtttccgaagcaactttgatcgagctagaaagttgagctccatcatgagcagacaagcaccgtccacatttggcagagacattttagagtctgaatttcgtaaagcatacactgaatggtgcattgatgctgtgcttgtgtagctacctcggcgtagctctgcaccatgctcaatccacctttatgataatgaatgattaattgcaggaacagttcaaatgctgtgagatcattgattggtcaagtgcgtgtactcttttgcacctctcgttttccgtctaagtggttttattctaagttttacgaagtagacaaggatgtgaatatctttacatgtgcaagtcacttcgattaaattgttattagtttggattgcttgttgcagacccatttagagtcgcggcag

SEQ ID NO: 114395 - DNA, 853 bp, Physcomitrella patens
  Intron number 2 from transcript Pp1s79_54V6.1 (locus Pp1s7 9_54V6) derived from phytozome v7.0 (chr-ID scaffold_79; p os 326816 to 327668 reverse strand)
taacggtgagatttagccgccattacttgtttggccgttttggcaggttaaggcttcattctgatttcatgtttgcactgttcgttttgttttattttttaaaaaataataattgtggagtgaacatttggtagcaacatctcctgaatgatttcgatatatatatatatatcgtggttgaagattttataacccgttggatcgatcgagtggatctgcaccattatggcaatgtgcggtgtatttggagtttgaattcattaattgtcgtggtgcatgggttacatgcacttgatgatcgagctccggaaaagcgtttgagtcatttctactggatagatgagtaggacgggtgcgggatagatctgagtaatttgaaaacttcttggcgctcaaattctgtgaccgttttgagttgttagagttgcatcgcttcatcgaacacaatcacatcgagtctacgaatattttcactctagtgatcaaggttgagcggtggaaaggtcttttatgtattggcagcttttaatatatccgttattgttcacttggaggctccccaatgaatctgggcagaaccctctgctgtcgattgtaaaccttacagatgtagtttattgctgtgttggaaacagtctttcgttcgtaggcgtggtctttgatggagttgtcatgacttcacttggcaggacgtcccgtgccttgaaaatcttctaaagttacagcagattattgccttctttttgttttgttcttttttgttctttttcttgctgatccttgcatgagtttcaacttgtagcatgctgtcttaatttcgcaccatgtatgaaacagtggccgaagcagctca

SEQ ID NO: 114396 - DNA, 752 bp, Physcomitrella patens
  Intron number 1 from transcript Pp1s332_29V6.1 (locus Pp1s 332_29V6) derived from phytozome v7.0 (chr-ID scaffold_332 ; pos 115122 to 115873 reverse strand)
agtttcgagtttacggtgtgctacgcaggtttgttattgtgcttatctcatctcatctcatcttatctacttatttactcacttttgttgagtatgaaatgttctacctgttttttgttcttaaattgcttgaaggaattgtgtcatgagggtttggttggagataggtgttgtgcttttcctagccaagatttattacggaaagtaagttatgcctgcgtgctaggtatggtttatttgctcgacgcggctgcgggctatttttgtggaggtctatgtgcttagtttttggtttgatgacgctttgattaatcttttttttcggacagtaggatggtttcttggctaagatccccacttttcttatcttaaacctatcatttttttgtggtatacacttgttcctcctttaaaagccttgttagagaaataataatcgtcagttttagaaactcgcatggaagaagcatttctgaaagctctactgatctgttgcccgaatactcccatgaaggctattggaactagggtccacatctcaaagactgatggagatgagtacaacttgtctaacttgtcaggaaggaatcgtctacaagttgtacataagatttcacagttctgtcccagtgattcgtctctcatgcaaggactgtcctccttttgtcttgaaaatctgctgctgaaagccattcctgtctgacccatggatttcagtgtgtgggttggccgcaaaccgccgggctttgctt

SEQ ID NO: 114397 - DNA, 817 bp, Physcomitrella patens
  Intron number 1 from transcript Pp1s7_347V6.1 (locus Pp1s7 _347V6) derived from phytozome v7.0 (chr-ID scaffold_7; po s 2029887 to 2030703 reverse strand)
ttctaaacgctctcagattcggacttgtcagtctggtagtcaacgttctaaatctgcggtcccgtttacagccttattccccaaattgtgactttaatcagcagatacgggtttcttggaccgacgaacttgcaataatgttttatttattgcttctaattggtagggattgttttattgttttagaccattgttttcgttgttctggtagaggcgacggttctagaccttgttggagtgaggcgtggggggattgcgatcaattgagtagtgctcgggctttgcgtggcattcacgttgggtttgtgtgtttgattaggtctccggaactgtgtcggagtttgggtttgatgaggaacttagagtcggtgaacctcgctgagtagagccttcgcttccagacttgtgaagcacctttcgtttaattcgagcagttgtatcgatgacagacgagattttgcaatggaagttatatcaatatcaagcatgaggtgagggacgtttagccatgcgctttcatgaaatcaaaaaagatatgtttgaatggcgtattgtggtcgatggaatttgtagaaaacgtttcttctgactttcctcaagtcctagttatccttggaatggaagcctactctggtgaattgtcctgagaagtgggatttcagtttggattaaacaatttcggaaagcgaagtcgttcggtatcaattaggtgaacttttcgagtccaggaaaggatgctctctcggaatttgactttttttaatttgtgcaattgtttgcagtatcatcgtggagttacgagagtgaggggagcgtg

SEQ ID NO: 114398 - DNA, 428 bp, Physcomitrella patens
  Intron number 1 from transcript Pp1s39_261V6.1 (locus Pp1s 39_261V6) derived from phytozome v7.0 (chr-ID scaffold_39; pos 1322641 to 1323068)
gaactgtgtgttgcggtggtccgggttccgaacaggtcagctctggtgtttttgttactcttgtcttccagtgtctttgaagtttctagccttttctgattcacatgacagtgcacaggatgtgtttgtggtttaatgaaattgatgacgccgtttgctttgtgtaatctcgtccctcgggttttagactaggttctcctatgtttggcattctaacattgatcttctgcgtagctcatcgaacacatttgcattatatatataaagattttgatctttccgttttagcattgatccttccgtctcccatgtagtaaccctgtctagtctatcaagaatataattctctggttagttttagtcgtttcctgaatgtgtccgtttctttaacttttgaagtgttggactccaccgcagcgaaaattttg

SEQ ID NO: 114399 - DNA, 746 bp, Physcomitrella patens
  Intron number 1 from transcript Pp1s235_118V6.1 (locus Pp1 s235_118V6) derived from phytozome v7.0 (chr-ID scaffold_2 35; pos 567716 to 568461 reverse strand)
gccgtggtactcgagaagccagacttcctactaaggtaccgcaatgctgccgacttgttttcgatttagggtttcttactagagtgacgacagattgcgtcacgcagtgattgtctcttttttcagtactttgagcttgtgttttttcttctgattgctgttatttagggtttcctgggatttgtggggtcaccctgtcttggtatcttttactgatattactggctttagatattacatgtcagcttctctttgccttaaactttggcatttagcctaggtttctgcgttatattcttgaagctagggcgatctcttgttttcatctgttgcataaggtctacacattgttcaagaacggacagtgaagatttgctgccactattttttagggttgtgtagagttcaaaagggcaaattgagagtttgttcattttcatatagcttgtgaactaccatgtagccgatgtacgtggatgcatcctatgtagcacgccttagggcttcacgtgcagctgcaatgtttgtcactttttcgtgatgtgctcatacgctactgcgttttccctgggctgcagtactttaacacatcttcactctctaaaaattcgttcaattgtggagacttgggatgagtagagaagatttcacgaatattcactgggaattggttaggttatggttaacaacacatggatgtattcatgagaaacgaagtggatatgcaggtcttgtggttgcggcgc

SEQ ID NO: 114400 - DNA, 642 bp, Physcomitrella patens
  Intron number 1 from transcript Pp1s24_201V6.2 (locus Pp1s 24_201V6) derived from phytozome v7.0 (chr-ID scaffold_24; pos 1981306 to 1981947 reverse strand)
ttcctctcttccctgttctcatctctatctatctggtaagtatcatctcccagtatatggtatcatcagacactcccctgcaattgcctaaccctcgtgttgtggtttttattctttggggtttttaagagtagcatttgtgtatttgtatgtcgctggtgtttttgggtttgtggaatgagctggggttaggggtcggggacgaagattggcatttagtcgtgaaaacgatggtctgttagttatcatggcgtttgaattagtgacaaaggaagtgccaggggtgtgttttttggtagaaattagtgggtgttgttgagtttctgtgtagctcgaagttttcggtgacttttgagcttcgcctggaggttttcacaattaggcttcctcctgcgccgtgtcgccggcagcagcgtgtgtcgtgtgagacttcgtcgctaggtatcagtcaagttttggtagggatgggtttttcctgcagtaatgtactgcacagggaggagtttgctttgcgggtagcgtctaagccttctctacaaagaaactcctgggtttgcgcaagcctggatcacaagcttttgaagcttagggttaatattgcagtgctgattgtaggcgagttcttgtggaggctgacagacc

SEQ ID NO: 114401 - DNA, 653 bp, Physcomitrella patens
  Intron number 1 from transcript Pp1s173_70V6.1 (locus Pp1s 173_70V6) derived from phytozome v7.0 (chr-ID scaffold_173 ; pos 437770 to 438422)
gcggtaagtattcatcatcatcaaaacgctgcatgttttgacttgcaatccccgagttcccctctatcgccacatcaccttccttcaaatcctgtgtatctgagtcttgacgatctggtttaaacagcacttcctagacttttattaggattgaatcacgggtttgaaattgctatgacatgttgtaggaacactttttattaattcatttgtttattcctggccttagtgatctctgaagaatagtgatgccgagtgtatttatcattgcaagttggctccatcccaccgtcgttgaaaaatgaactccgtgacatccttagaaaagatccatgatgaagtgaacacattatgtcaactctaattttcatgaacttcagttattgatatacatatacctgacagaaagtaggttaggcatctgcagaaaatggacgcagaccatgtggaggaatccatcctaaaattggtatccctgaacagagtcatcacatgaatacaaccgctgaaagtccaacggtgtttgtgtgggatttggatgaaactctcagtatttttcaaactctcttagaccgggaatacgcggacatatttgatggttttaaggatcgccactaggcgaaactcctcggtcggcgctgggaacaacttat

SEQ ID NO: 114402 - DNA, 889 bp, Physcomitrella patens
  Intron number 1 from transcript Pp1s116_55V6.1 (locus Pp1s 116_55V6) derived from phytozome v7.0 (chr-ID scaffold_116 ; pos 346060 to 346948 reverse strand)
gccaccacggtaccgtcttcttctattccgatctcgttttgcctttcaatttggccttcattcgtaacttctgtcgtcatttccctcgacgtgtctcctcctctttccattcgggctttggtgtagggttgtgaggagccatgtcttgtccctggttgtgtgcgatggtggatatgtgcgtttcgaatgaatgaggaaattttctgttcgtttggaatcgaaaacgcgcctcgtaatgtcgaaatacagtcctggtgatttttttttttttttttttttttttttttttttcatgtattggcgtttcagagagatgatttatagtggatacgagaatgagtgggagcgagagtgagatgatgtcgcgcgtggcgtggcgtggcgtttgtgtatacttggatggattggtttactttcccatgtccaacgcaatgcaatctgcgtagagatagcgcacattgagagattgtggagcatgatagttctcggagctattattttccacggtgatttagatcggtgagattgtagcacgttaactttaactggctgaaatgccttcattgtagacagctagtttgttgcgtagcacacctggagcttgctattcgtttcttggggtgaactcagcacagcatttgtgttgtcttatttttgacacgcgattcatggtgtttggagttttttggttttaggaatcagcagttcagcctgttcatttgcaactcaatcggctttaatcatttcttgtatagttaagttacctatgtattgatttctttcaaagacagaagcttctgcgacaacatttatgcagcagggcttatatcctaccttaatcatcaacctgtccaatgctttgcagggggagttgatcaaggcagacgcc

SEQ ID NO: 114403 - DNA, 996 bp, Physcomitrella patens
  Intron number 1 from transcript Pp1s223_98V6.2 (locus Pp1s 223_98V6) derived from phytozome v7.0 (chr-ID scaffold_223 ; pos 529480 to 530475 reverse strand)
tcgaggtgggatcctaatcgaggcactttgttccgcgcgcttctccactgctactttagaatttcccttcctcggctgattttcgcaggtttccactcgtgaattggatgaggaatgccatgtctgggaccaatccatgtgcgtgtatggtgcgattccacgagcttcgatcgtcggtagggtggaatgttatgcagaggcgattggatcgagctggtaagtatgccagggattatgcagcgggttggttctagagcccgtcgctattcatgcgtcgaaagggtggtggttgttgggccgtttcgagaaaattcccctgcgtggagcttgttgtggggttctgcgttttgcgcgttgcgcagagttaatcctgctgttggatagtaattctgagtttttcgctgggagcgtgatcggattagcgattaggataacaatggtgaaagagattgtgaggtttgtgtttttttagtgttgagttggttgtgataagcttcaatctagggaggcatgccagggaagaggatgaattgttgtcattttggaggaggcgtagaactcggaactttacttgtgaggagttgcttgttcgggaaatgtatctccgtctgaatctacactaccgtaattacattttctgtctgtcgaagcaatcgtgaaccctaaatctcagtgttgaatactcttctatctcgagtcagttctgtttttttatgcaagtggaggttgtaattagatttgtgtcatttgacttggcgctcgttggcgttgattcgataactcagagtctcttggcagcgttattcttcaggatagggaacggaactagattgcaaatcggtacaagccttgagggtacgatgaacgttgtattgaaggttctctggggcctaacatgtcagttgtctctgctctggagatcttttatgacgttagggttcagagtttttcctcgtctgaactgcttctataacatttgtttcttgcaatgaaggg

SEQ ID NO: 114404 - DNA, 824 bp, Physcomitrella patens
  Intron number 2 from transcript Pp1s317_48V6.2 (locus Pp1s 317_48V6) derived from phytozome v7.0 (chr-ID scaffold_317 ; pos 330545 to 331368)
gctcgcggcctgcgctcgccgttgccaatcggcaggtaatccgagctcgtgtccgtcgccattcgagccgccttgccagcccaatacgctctttttcttggaatttgtgccgggatgttgtgtttttttggttcggtcgtgctggctctgcttcttgcctcgtgtgcggcggttcgttagaatggtggtctggttgtactgcgagagtttgcgaggcgcagttttgtagagcttcagtaccatccgcttgaggttttcttgatgcgggcttctattttgtttttattgtttttattgtttgtttttttaatattttttaggtgaattaggagaggtagatatgattagagatcgctgcggatgtatcatgcggcttcagtgtcgggtcgtaggcgttctatgtcttgcgctcgaccctgtgagctgcatgaaagggcatgtattgtcgtcttcgagatgcgttattttatttatttatattttattttctcttggctgttcgttggagctcgaaagcatggctctacacgctcttgcattagtcgatgggcgcggatatgcagcgagaaggaattgtcacctgtcattttccgggcgttgaacatatgtgttttgctagattgattggaggtgttgagaccgtcactccttccttctcatctttgacttcgctacattttatgtccgtagtggaatgctacggtcgtattccagctaggaaagttgtgttaatttgttgcttcatgctgcaggtctgacatttaaattcttgtttatgtggcagatcagggtcttggttgggcccaaagttttattttacattc

SEQ ID NO: 114405 - DNA, 619 bp, Physcomitrella patens
  Intron number 1 from transcript Pp1s263_83V6.1 (locus Pp1s 263_83V6) derived from phytozome v7.0 (chr-ID scaffold_263 ; pos 482301 to 482919)
cacgctactatctcgatttgacgggtaagccaaggatttaatgactgagcaattgagcatctggccttaagaggtctggaatgcttgtgtcgtggaatggagagtaggagaaagggttggtttagagacgatgataagaacgaggtaattgtggtgcatgtcggttgaggttttgattgagacgatgaacggggattgcctctgtgttgggagttttgtgcgaagcgtagtttttttgtctttctctcgactgtgatacttgctttgttttgtgtagtcggctgtttatttctcgtggagactggagttggatctgccttcttgtatagattatgattatttttgtcggtagttttcttagttatctttaagattttgaggagcaggagatttttgccgaattgcgctctaatgttggtccttggggccaattctgttgtagaatgatgacgttaaccttatgttagggtttgtgtttcacgggtttggattgtctgcggtttctgacggtgtgttttttcttctcttttctcttagatttaattttcactttggtattaatttttgagtatatgtgtaagcagattccgtggtttctgactccgcctaggcacaagca

SEQ ID NO: 114406 - DNA, 964 bp, Physcomitrella patens
  Intron number 1 from transcript Pp1s7_280V6.4 (locus Pp1s7 _280V6) derived from phytozome v7.0 (chr-ID scaffold_7; po s 1651577 to 1652540 reverse strand)
caacaaggtgtgcattatatgctttacactcgatcctacactgggcatacgtgattagatttgcaccatgcgaaggtgcgttggaaatgcgtgcaaggtgcaatgcaggttgcttagccactcttatttttgaagacacttgtttccgagttggtagagcaaagtttctgctaagagagcttgtcgcacgatagccttcagaaaatcggcctagaaatgagcttcgtcaagggaacaactcaatgttgaggacatagccagtccgttggtgatatgctcaactgttgtctgtgccttactcttcttctgcaaaccgctccttgttgaagggcctcgcttgttctacatggtaaaggtacataaatgattccggttgaaaagttcatgtaggtaggtggtgtgaatgtttggctcgctagatatgttgctagttttttcgtcggacgatgttgtcatttttgttctccttcgtctggttacgctgagcatttcgcagtgttgaccggatatgatacacgagcattgcaagaaaagagaattgaagctttttcgatgtcaccttgtgtgaagtgacgtgcggttgattgaacttcgggctgcattttggcccacttgtctctcggtccatctcttcgcataagacttaaagacgcccaacattttaagattaaggattcgtggaaccgtcattatgaatgtgaaaaatgtattcgcatgtgcgacaaatatctttcaccggtattccttttggcactccgctcggcacaacgatttcgcagagcgattctctattagaccttgtattctctctacagaaaacacttcaagcagaatcactaaaaatcccttgatctggtggacaatattatctttgttgtcctcgcctgccatctgaaggagatgctgttcagtcctctcttgttggattttgagttgaacaagtatctaatcgaatctgcaggat

SEQ ID NO: 114407 - DNA, 760 bp, Physcomitrella patens
  Intron number 1 from transcript Pp1s162_11V6.1 (locus Pp1s 162_11V6) derived from phytozome v7.0 (chr-ID scaffold_162 ; pos 68014 to 68773 reverse strand)
aagaaggtatttctttggttgtgattgacgttgtccttacggggttttgaatttttccatttgaagtttctgcgagtgttgctgtcttctgtgtatccattgtttccccggtttgcgtgtttgagttgtcagatattgtgtgtacgattttgatgttatagaagttcaagttggagtgctgcaattaatttcagtggtctggcatttcttggtttttaattaataataataataattattattttataaatttattttttatcttcagcttggcaacttggccaaatgtgagtcggaatttattatttcttctgatattcaatttaactgcaaattatgcagctctagatatcaattttttcagacatataaacatgaagtaatacagtgaattcactctcgtgacgcaattacttagtactttttggttgaatgagcattttgatatatatgcaatcgtatgtaacagctagtgaatcaatagagttaattaacgttcaggattcattcgcgtcaatgttctagattcgtcttggtcggataagttcatgtgattcagattgctatgcttctggaagatcattgtgctgtaagctttgtaattactgctatgtccaatcatttgtcccgatcagaggtgcatacatgaacgcaaagaatctcacacaatactttatcatattttaatccttgagttctttttttgtgtactttgcaatccacagttggtgagggcgttgttcctgcaccgcctccgacg

SEQ ID NO: 114408 - DNA, 554 bp, Physcomitrella patens
  Intron number 1 from transcript Pp1s332_14V6.1 (locus Pp1s 332_14V6) derived from phytozome v7.0 (chr-ID scaffold_332 ; pos 40277 to 40830)
ttttttggtgaggctctctccccccccccctccttgtcctgatctgtagttgccattcatattttggcgattgagagcgattattttgcttttgagctatattttgattctgtgtaatttccatacatgcagtggaactgttcgctatgcaagtgtgcatgcacatatgagaaggactaggagtaggaaggacgacttgggatcactagcttacactttgatattccttctgtagggtagtcttccttcgcaaggttattaggtaccgatcaactttgtagctagtagctaatgaagaagtaatcaatgcaatatatatatatttttatttatttatttattatttttttttttcttccttccttccttccttccttccttttcactatttttcatttggacgtactctatatatttggttttgtaaggcaacaacaaaggttttctggtgtggaagaagaaaatggcaacatctcctgaaatgttgcgctgtttttgcccaattccgtttttaaacagacattttggagatagtcgcaaacataaagttcaat

SEQ ID NO: 114409 - DNA, 798 bp, Physcomitrella patens
  Intron number 2 from transcript Pp1s21_253V6.1 (locus Pp1s 21_253V6) derived from phytozome v7.0 (chr-ID scaffold_21; pos 1525910 to 1526707 reverse strand)
accttcgagcttacaccatcccgtcccttcaactggtttgaacacaacaaactcgacatataaatcagaaacgtttttcagttgagaacaaacacctctcttccggtggtccctcattttttacactaaaccaacgtggcttccaacgcaactggaaaagatttcaagtgagccatcaggtcatcccgttacgctaatgaaagcaacggcgctggagattcaaccaagccgttcatcctggtagctgggctatgtggaaacagcaatgagcgactcgatggaaaaaaaccttcggctttccgtctccctcgcttttcccgtaggggctgttgattcatggaaatcgacaaccagctccaccgcaaaaaagttgtctgcattcactcatgcttcctcccccaactagacccagatcactcatgcacccttggatgggaccacctgaatcctatttgctctcaaaggctttgaccccggtctccagcaacaaagcaacagtactttgtgctgcagctcaaacacgatttttcgaaaaagaaaaacgtaaatacaacgacacctgcagtaccccatcttcaaactaaaagcatcccaattcaaaaaaattcaaaaactcaaaattttcaaaataaataaaattaaaaataatcaaaacccactccccaatgctgatgaatgcagatgaactcaaactatatagatagatatttaattatttttttaataaaaggaatacacaatagtagtagtcctacatgggcagagtggagggaaggacgtgacgagcagagagagcag

SEQ ID NO: 114410 - DNA, 704 bp, Physcomitrella patens
  Intron number 1 from transcript Pp1s21_253V6.1 (locus Pp1s 21_253V6) derived from phytozome v7.0 (chr-ID scaffold_21; pos 1526758 to 1527461 reverse strand)
agacagatttggtcccgaattcaagccttgaccacgtaagggaatcaccttcacatgagcacccagtttgatttcagctgattagaatgttgcacaattcctggccagtgttcagagctgtaaacccgcctgtgggagctttcagtaccgtactgcgtacttcaggtttgaatatgtcgtaggaaatttagtgttgaggaaaaggagtttccggagcttcatgcaaagcagcaaacattccactcggtgctgtcacgaaaatcacaaattaaagtggctgttttctctaaaaaaaaaaaaaaaaaaaaaaaactcatttcaaacggttcgttttcttcttttttcgttaatgtgtgttttatttactttttatttttaatctaatgagtactatatctccaagatgataaaaaatattgcatcaacggtcaatttttaagtatcgtcgttgtgctgcaagtcttgttataatatcagagctgtatactgttagagaagtccccgaacagagtttcggaatgtgattaacacgttcacatcgcataatttccactcttgacagtgtaaaatggtagaattccttcaagaaagtgttgagttttcgatacctctgaaatggtaatcgatggaggaatcttcccgcgttggaattgcagctgaattccatgacctatttcatctgaacacatgcaccagagagcagg

SEQ ID NO: 114411 - DNA, 839 bp, Physcomitrella patens
  Intron number 1 from transcript Pp1s9_408V6.1 (locus Pp1s9 _408V6) derived from phytozome v7.0 (chr-ID scaffold_9; po s 2705848 to 2706686 reverse strand)
cacgcgcgaccatcttcaaagtctcgccttccgctgtgcgtctgcatctcatctttcgtattatgggacatgttgtggttactcttgcacgtgagttttgaaaattcgtgcggtaattgatgcgtgttagtgttaataatttttcgtttttgtttttgtgtttttttggagtagttttgagggttgggttggcgagcttgatatcttctgctggacttctcggtgcgctgttctgtgttggtgataatttgatagtagtgttgaggtttaaggcgagcattggggtttctcatgggtttgagtgggaatttgtatgcaattggcgtagggttttgtcctatcctggatgtttcaagagcttgcccgctgcattttgtgcttaactagtttgagggaggtatttgacctttttgaattaatcctgcgctactcggagagagtttttggtcgcggaagctgaactcgtgcaatccagagcgaatgtgtctttcttgacgaactatcttttgaagatgcagagtatgacaagagtcacacaatgcactgctaaatttcgagcaatcatccaattggaaaactcgcgagggatagaatttcgtgatggattgtatatacacacgctttgaaaactaagaaactcaatatctggggaaaccttacgcatatctactttcgagagaaggagaattggactagaagtgatcacactgttcatcattcgaacgacctaccctagcattagactcatgaaattcacgtcaattgattccagaacatgtctaatccaaagtttgtcgactgtaggctcatctatcgacttttgaggggttgagggctga

SEQ ID NO: 114412 - DNA, 779 bp, Physcomitrella patens
  Intron number 2 from transcript Pp1s103_99V6.1 (locus Pp1s 103_99V6) derived from phytozome v7.0 (chr-ID scaffold_103 ; pos 913486 to 914264)
gtgtcctcgggtggtggactacagcagggtatgtcactgtcacccttgtagatccattttaaagtatgcgtaatgcgtcgactcgcctcgttcctgcacattctgaaactacattgaataaactcctccctctgcttgagtgtcgggaatagaccgccctccacgcagttaaatgtttcacgagtggagattgataaaagtggctgtatatcagtcgccagtgcattgattatccagaatacaatgtctacgcaagagtctaattctattctgctgaatagtatctcttttataactttgatttgtctcttcctcgattttcacatctgcacatcgactgcagatctggatgtctcgaacatcctctcttgcatccctcattttacaggcttcgtctggacctggcacgacgtcgtaatgtagcatcagagcgctctgaaattggttctcccgctgttgaaatgtgtttgtcttcctcatcgtgccgtggttgtatgtcatggtttatgcaccacgaaagccgctgatctctgtaaaaccttgttgacagaagaataagtattcatgaacatcgtgaataatccatttggtgctgtttttattttatcccgtaatgaatccattaccttatcccacagttaggaaatcaatttagtgttactgatggcgctgatatcatccgaatacttttccaccttaaactctgtgtgtagtatcctcatctcgaaattttgtggtttataggttctcttgaagaaaacattgacgttgagcacctc

SEQ ID NO: 114413 - DNA, 1017 bp, Physcomitrella patens
  Intron number 1 from transcript Pp1s109_268V6.1 (locus Pp1 s109_268V6) derived from phytozome v7.0 (chr-ID scaffold_1 09; pos 1372033 to 1373049)
ggcgctgttttcaaggattatgtacgctcccttcgatcccgttgcttccgaaattgatatcatgctgtgttcagatttgtcgcatggggggttgttaaaaactcgtttcgtgacagcatgtttttgaagattggtttctgctgcattggtggagtgggttcgtgatgataacgttttggggttcgaggaggaccttgattcttatttttattttcttcaagaagcgaaaattggggtaattgtgttaatgagctgttgcattcggtattttttcttttttgtacgaagggaatttatgaacatgatttttactgggtgaccggcggtacagctggtgctgttggtcttagtgtagtttaattgtggatcctagcatgtggacttgtggacgcggttgtagtcgcctcaaatgagcttcggagctagagtttatgatcactataaagtctttagggtttaaggttcagttgttttctacaactgggagtgagaatggtggtcaattactcattgacatgtggattgttcagatcccccccccccccccccccccgaatgttaaattagcgtgttacaaatttgcttccataacaatgcattccttgggagactctggaaaagtcgatgctcttagctaatttgatgttgaagatggaaattcattgattaagtgctgagtcctgccattctaatggttcgtgaattttggggaggttcctccgaagtttgcgggaagttatttttttagcgtcaactagtcgtatggaactagcatgtcctctggatctttaaatccttcgatgtatttcaatgcgttgctttcgttgtgaggaagttcaataataatgagaataataacatcaatattaacagcatttgaataaatgtctataggaaaaagaagttgaatgtggaggtttatttttaaaatattagacttgatgagaacaattggctcacttattgtggttactgtttctagggagcgaagataaattcactcgattttcatcgaac

SEQ ID NO: 114414 - DNA, 938 bp, Physcomitrella patens
  Intron number 1 from transcript Pp1s49_69V6.1 (locus Pp1s4 9_69V6) derived from phytozome v7.0 (chr-ID scaffold_49; p os 525367 to 526304)
ctactgtttgcgagggggtttctgctcacagacccgtaagtgtagtataatctagtctcatggacgcctgtagtctgtccagttctaaatttagtgaaccaatgttcattatccatgttgtgcgcctcctcccccccccggggttgttgtttacctagttccatggtggaattccttgatggtttcattcagaggctaggttatttgtcgacttcttttgattgttggtgtttgaggttggaagtggtatttgatatgatcctggatcgaaaaactcattttgcgaattctgaaataatttcctcgttgtttgcgtacttgaaaaacatgatgagtcgatatcgtccggcgcaaatagtaaacttgaatcacagcacttgaaaaggatagtcgcactcttagacagcaactgaagtgttttgttgttctgttcgggatccttgtgtagatagtacacgggattctgccttaactgtggatgttgtactgcgttatctttatcttccgtcactctcattttgtactgaggtaatcggatccgcggtcgggtctgatgttcaaggcgtgctgtacatagcggatgaattgctggatctctctctgtatactttgtaagattgtcgttttcaccctccaggcttctacgaacgtgaacattctcatgtagtcttgacgtaactaattaaccttatatcacagaaactcggattgttccggccagtagctgttataggcgcacatcttctagtctttccgttcgctttgaagtcagcagcatgctcacttttgcagtaaatctacatttacatacctggaagttcgtgatagttacgcccctgttcttatttcaacaggtctctcggcttctcgatgtccctgttgaccttgatgtgtgtctgctgtctgttcagaagaggagtgcacgaattcgcatttcg

SEQ ID NO: 114415 - DNA, 302 bp, Physcomitrella patens
  Intron number 4 from transcript Pp1s49_69V6.1 (locus Pp1s4 9_69V6) derived from phytozome v7.0 (chr-ID scaffold_49; p os 528530 to 528831)
tcgccaacaaccgcttcaattgcaacaaaaggtattaagggatttctgtttcgtgcaaatgtctttgtaccttgcatgcaaattactgttttgtttactaattttcgtatttgattcaaggtttagtaatgttcatggttcagattacaggatattttgtttcctcgttgcaattagaataagtactagtatggacatgttgtactccattcgaatgggttttcttccaaccaaagtcttgtgaccaaggtgcggttatgtggacaggaccccagacgaattttgtcacttggcgggtgtag

SEQ ID NO: 114416 - DNA, 442 bp, Physcomitrella patens
  Intron number 3 from transcript Pp1s670_3V6.1 (locus Pp1s6 70_3V6) derived from phytozome v7.0 (chr-ID scaffold_670; pos 12480 to 12921)
actgaactccatcgtacgtgtcagcagagaactttacacattggaatagtaaaaattctaagttgttttgttagtatgaccagcagtagacttttaagtgaaaatatttttctgtgaaacaaaattcctacttgcataaagaagttttggaaaaaagcattatttctttaaaatgtttcggtttcactgcaatcttcaaagctacaggagcattgttgctttgagtgcgtttaagatttgcaattttggtagggcatcgtcattgttcttctgaatggtagttactgaatagtgagagtaggaatcgatttggtcactcataggtgtagagaaaaagatcaacagaattttctttaaaaaatatcttttgatggtgtagagatgattagggagtcctcatacatattcgtctttcccgcttttgtttctttatcaggttcca

SEQ ID NO: 114417 - DNA, 778 bp, Physcomitrella patens
  Intron number 1 from transcript Pp1s309_38V6.1 (locus Pp1s 309_38V6) derived from phytozome v7.0 (chr-ID scaffold_309 ; pos 197028 to 197805)
aagtacgttgttcatccctttactggggttacagattcggttgttgctttttcacggtttatgggtagttcatgaggttcttgagctgctggacacttaacctggtaaatcgatcgagctcactgctaatggcactcatttcgacttaccaccatgcattgcacggagaagtgtatatatattttggagcatatccgttcttctcattcttgccacaaacgtggaggtcatcctggtctctgtgaagccgactctcatcagcatgcatcgttttccagcttgtgttgccttccagatgtgtagagattttggtcttgaccgaattactgttgtgtcacattgagctgcattgacacgctgcgaaacaaaaattgagatacatcagttgttgatagcatccgatcgacatacatcacttagggttgagtcttgaactaactttatcttctctacatcaccacattgtttttgaactcgttcttgtttctatcctctttcaattccttgtagcattgaatgccatcaagttgttgtagccttgctttgagttgaatgcttccgttagtgcttcaagatgaagtagagctaaacgctacgaagggtctcaggaagttatttcaattcttacgcacagtgacatcaaaatcactgagaactcatgaaagagacaagtcggtgggtatgtcgctttgcttctaaaccacatcttgcaagccatatatctgaccaagtctcggccgcagcttttgaagtgcaggacaatttactccttgtacaa

SEQ ID NO: 114418 - DNA, 749 bp, Physcomitrella patens
  Intron number 1 from transcript Pp1s4_438V6.1 (locus Pp1s4 _438V6) derived from phytozome v7.0 (chr-ID scaffold_4; po s 3642769 to 3643517)
gagggagtagaggctggatctctgctttaagatttgtaagcactcgattgccacgtaatatcttttgttgttctcaaatcacatgtaatcaaataggttgatattcgcgataaataaaaggaaacgtgtagtatatgaatgtagcagatttgtcgaaacctcctagctttcaattggacttgcggtggatgtacaggaagggctattgagggaagagaaagatgagaatgaattgaagaaactaaaagataccctagcagctaccgtcactacccacggtggagtatgaatctgctgacaggatgtcatctcaggcatctggccatgactgctctgcacatagttgatacaaagagttgggcaggagaggttctaaggtgcagcatattcaaagtcttactagtcttaaaatcgcgatgttagtggagccttaaccgtatgctggaagcccttgccttttttaataatcctctgttgtcaacgttttaaaacgtccaactacaagcaccctggacgaggtttattcgcatcatcacgagtttaaaaaagaaaagaaaatatcatctcaagatggtaggaagcaggagctaaaatctaaaaccgaaacgttcagtgacagtgagggagaggcaaaaccagtttgagaaagtgtcacagaaatacgaacttgcaaaagcggaagtttaatatgctatgatacgatctttccatcagagctgccgcgtttcacgctttggacaaggctacct

SEQ ID NO: 114419 - DNA, 997 bp, Physcomitrella patens
  Intron number 1 from transcript Pp1s66_72V6.1 (locus Pp1s6 6_72V6) derived from phytozome v7.0 (chr-ID scaffold_66; p os 283948 to 284944 reverse strand)
ctgcggaggggcatccagcgctgaagtttccggaggtactgtaattcttccagtgtcaattcttttactaggtgttggagtcaagcctagaaactggctttgcttttggtgatgtagggcaatacaacaggtgcttgcgattaacagaaggctttgagatttgttcgttgaagaattctcattcagctcatttgtttgtgggggtcaacattatagaagccgcagtctcgacgtctacatttccaaaccacctgtaatttggactgtggtcttgtttttttcaagtccactgcttactctgtaatgtgtggatcagttcaagcagcattggcagtacaagtgtttatgtttgttcagtttttccaacgatataatacataagagttattttagatctgagtgtagaaaatcctagaattctagttattcgacatggttctgtgatttcttattttgcatgtaggttcgctttagtaatcattttgtaaaatgtatttttcgttcctcagttgcgaatttcctttaacaatctcgagcgcaattttcaaccattgcaagaattctggtatccgaaggggtgcctttgaagttgttggtacattaacgtaggctatttctcaaatgtctatcttgaatctcttccagtgaggcgaggacatgacgtttcagcattctcggatcaataagtcttttttcatactaacgttagtttttatgttccgattactacaactgtgacagttcttgaacctcgcacccatgatatcaaatcttcttcttcatcgagcttctgcacttgatgatcattggtagcgtcagatgtgttttttcaagcatttatgctagacttcatacaaagagtggttttagggctgcagtgtttactgaatctgctgttgagtacacacacacacacactgctttatctttagttttgtaaaagacacttggtaattgaacaggttcgaggagcaatattcgccttgagaagcgttgg

SEQ ID NO: 114420 - DNA, 361 bp, Physcomitrella patens
  Intron number 2 from transcript Pp1s401_7V6.1 (locus Pp1s4 01_7V6) derived from phytozome v7.0 (chr-ID scaffold_401; pos 96146 to 96506 reverse strand)
catcaggtcttggtgaacaacgacggtactcgaaggtaggtagcagtggtggggatcaagacgttagtaggttgtttgtttttgtaatttggatttgaaggtgcaaattttgcattgttagggcaggattaagttatttgttcttctttgaatggagatgaaggcgcgtcgtcgttggagtttttggcagagatgtcaaggtaatgatcaaagcacgagggggatggtgttggagagtatggtgcacgaagggtatctacaaatggtttgaggagcattttcagaacatgacatttggaatgcgtttgatgtgtgtgtatgtgcaggtacgttgtgaaagatctggtaggttcgggcacgt

SEQ ID NO: 114421 - DNA, 711 bp, Physcomitrella patens
  Intron number 1 from transcript Pp1s49_189V6.1 (locus Pp1s 49_189V6) derived from phytozome v7.0 (chr-ID scaffold_49; pos 1581993 to 1582703 reverse strand)
attctggaggatctcacgaataaaaaccctgaattgtagcttctccccctccccttatttatttatttattttttctctctctccttttgaaattttgaaaattactcatttgtttctttgtaagtgctgttggtttgcaagtcaagagtatcgtgaggcattttgagtagggtttagctgtcggatcacacacatgggaaacacttttttagacggaattttggttcaatgtgaagaccttgccgccttgtcttctgcattctattttcatagaactggtttttgtggcctttttcttcattttcactctctgggatacgcattccattcattggggctagggcgttgtagtaagtaggacgccgtctgtgcatctcgaaacagttcttctcgtgtaaatgcgatgtatatgaactgacatggaatgaaaatattgaataatgtgtaatgtaaagctgcattgacgtgtccttaaaaagggccgctggaggttttgtttcttcaagaaattcaggaacttcgatgagaatttagatttgactagcgtctatttttaaaacttcacaaaaagagtttcaaagaacggttcttcttgcaatagaagttgcatgtcagtgggcgaggaggatgacatgtacatgaatcgtagtttaatattcttttattgtaactgtttttgccttgattttggaggtgtagatataagcgga

SEQ ID NO: 114422 - DNA, 646 bp, Physcomitrella patens
  Intron number 1 from transcript Pp1s182_7V6.1 (locus Pp1s1 82_7V6) derived from phytozome v7.0 (chr-ID scaffold_182; pos 96997 to 97642)
tttgaggattggtgttgtaggttctcttactcgacgctctcacggctgttccctatctctcaagtttagttctttcattcgcgtttcaatgcagtttctattttggtagcgaggcgtagggcgggtgattttggctcaatgattaataatgtgcaggggaggtcgtttaagcgatcgtaacccttacttggttgcagttggcttttattcacttcttctctgtgtgtctatcctatactcgcacgaccgtgtttagaattgtcgaatttgaagtggttgctgtagacgtcaaatggatccgggaatttaattctatcggtttattacgtatgttcaggaaggtgcaggttatttggctctttgcgcaagaccttgcactcatgcttcgcagtgtaggtgttcagtgtttgagtgttctgttggtaattgcggtcagcagattcgaccacttttgcaattgacacatccccctctcctgaagtagccattctttttcataaatttattgataacttatttgggttctggtttgtgagcggtgggcatcttccttaaactgattactagaaatcagctactaatggggtagaattatgtgacttgtttaacaggtttaattgattctcacttatcagcactggaccta

SEQ ID NO: 114423 - DNA, 495 bp, Physcomitrella patens
  Intron number 1 from transcript Pp1s44_175V6.1 (locus Pp1s 44_175V6) derived from phytozome v7.0 (chr-ID scaffold_44; pos 1185631 to 1186125)
cagcaggtaagtttctttctaatcagatcactgtccgtcggaattatatcaatgccttgcttggtaacagactagttcataaacttcacttttgatgaggtagtagtcgataattatgaattgcaggtgaagggtttggaatatgtagttgagatcattaactatccacttttgcgggaagagtatgtccttggaattagctttcagaatgtccaactcagtgcaagtgaacagcaaaatggaagactgaatcaaaacccactgaaatagtgtgaaggtgaaggttgaggctctgtgtggtcaagcaagtgaagccattcaacatgtgtttttcaacaccctcgctacgtgggtaaggtgaatgtttagaacaattcacagaaagtggatcttatggagttgatgtgtcgtctaggagacaagtgttcagcagctgcaacttgttccatgtgctcaacagattccggacaaggagacccttcaattgggtgaata

SEQ ID NO: 114424 - DNA, 851 bp, Physcomitrella patens
  Intron number 2 from transcript Pp1s163_107V6.1 (locus Pp1 s163_107V6) derived from phytozome v7.0 (chr-ID scaffold_1 63; pos 788811 to 789661)
aaaggcgtgtgcaagcagaaaagacgcatcaagtggtagacaacttaacagtcgaacctagttctgatcttctgtcatttggttgctttcgccccgcagattagcgtggcttggtgatctttgctgtataatttgaagcaaaacacaagaggtgttgctccatcccaatctcatagctgctcaagctgctgaattaattaagattaattcaccaaacataacagtaaagtaaaatgcaatacatttccaagtgcggatccgcacatattaactagtcatccaacgttatttttgtgggagaatatgttcatttacgcagagacgagcttgtgctcaataagtaagactgtaagctccagtcaccgtgtaggttgatagagcggtataaacttttgaatgttcagaaatcctatgaaagaggatagaaaatattaacacagaagttacactatagattttccactcagaattactaacaagcttccattcatgtagcagttggattggaggacaggattactcgtgattcgggtcgcctgttccttgaagtgaagtcatactgcctgataccgggtactaagtctgaataatctcaatctatttcttctttagggatatgattcacgtgatgaaagactttcaagtgatgcaattttttttatctctgattctttgagttgatgattgctgatgcaacatctaagatgtaaggaatctttacgctattctatacttaacgcatcacaatgtctaaagacgcaacatgaaacttatgaagcaggacaaataagagtttgtggtgcaagtatgctgattaacagttcttgagtgtttgaaattttgcaggatct

SEQ ID NO: 114425 - DNA, 417 bp, Physcomitrella patens
  Intron number 1 from transcript Pp1s309_91V6.1 (locus Pp1s 309_91V6) derived from phytozome v7.0 (chr-ID scaffold_309 ; pos 471253 to 471669)
tgacaacgccctaggacgcccattcattatcacaggtcagtattttgtaaaccacttttgatgaataatcgattgaaatggcaagatgactaaatctataattgtgaactgtccgtctgtatttgttagtaggttcgtggtgttggttctcagtttttgatttacttctcgtcttctactttccttgctcaagattttataaaaagttttaggaaatctaagatatttcggcccgttggccttctcctccgtcatttgatcgctactgcaaattaatttcatgacagcactttctgtaggattgcgttgcataacccgcttcgtgttgaaagagaaggtgaatacttggtgctgatgccaattattgccgtattatcatcaggttttagctcgttggggggtggaatcaagcaccgt

SEQ ID NO: 114426 - DNA, 1020 bp, Physcomitrella patens
  Intron number 1 from transcript Pp1s7_13V6.4 (locus Pp1s7_ 13V6) derived from phytozome v7.0 (chr-ID scaffold_7; pos 58767 to 59786)
cgatcacgctctctcaccgtcgtcgtttccgcctcgcaagttaacttacagacgttcatctcctacgtctctctctgcagcgagatacagaataggggctgctgcattcttatattttgttttcccgtattgtatcgttttttttttttttttttttttttttttttgcctgttatttttttgggttggttttgtttttcttgtgtctctttttcgggcgaaagtgttgatggttgggatagccagcgcgttgtggactttaatttgacgcttgcgaggtcatggccgagtaggctccgaccgcgggcgcgtttaagaggtggttttggggtgcaatgggttgtttctattcgtgagcggaaaggttggagatccgcgattagacagactccggtagcagtgagtgtctgtggattcctgagaagctggggtgtcttcgatagtgccgaagcggtttttattttttagttttattttttatgggctgcgaggacgaaggcgtggtgcggagcgcaggtaggcgaacgttgggttttgaggtgtcaatgtgattctgtggcactttccttgtaccaaatcgacacagacttgaattgagtgtaggtttcagcatttttttttttttttttttttttttttttttttttgtgtgtgtggcaaagacgaacttgtagtgcaaacggtgacctctgttctgcaagtgattattttgcgtgcctcgagtgatgtgtactcaaagagaaagcgcggtctctccacttgcatgcctcgatttgggtgcactctctctctgagggaaacagagttacctaaaccccatcaaattaatctacctagagggagggactcagcgaatctaagaggaacacctcgtttcgtttactcaactatcattgcttgccttcgagaggttgcatactcttctgtcgagtatttggagcttgttgttcagtttttgtaggcattgttcattgagtcagaacattgtcttgtgttggcagaccccatttctgcgacgac

SEQ ID NO: 114427 - DNA, 703 bp, Physcomitrella patens
  Intron number 1 from transcript Pp1s2_543V6.1 (locus Pp1s2 _543V6) derived from phytozome v7.0 (chr-ID scaffold_2; po s 3307203 to 3307905)
aggacgaagcagctgcattatcctttctctcccaggtactcacgagaccagcatcgaggctcttgtgtttctttcattcgccgctatttcttctcattgcacatcagtgttgcaatttagtcagaattcaatttgtgcctattgtaactgtacttaaggcttagtttccaatgcacaaattctactcctgacggcactcttgatctcgtttgcgacagaagcgtacagtatttctagtcaactcccaaaccttgtaaaatttgtttaggtttctattatctcatcatcatgtgtagctctaatgtctaaataatcaaataagtgcaacttaatgtgtggcacagtgttttaatagcatctttgccactttttctttttccaatgtttttgaagaatctagttgcaacttgtttgctcctatttttcgaatatttcgaaaccctagcctgaactctaccaaatagacgttcatgaaatcaacaagaaagcaaagacaaaaatgcttatcattgtcatgcaaggtttatttaacatagtagtggcagggcttacatttgcttctgtgctctacttttgctgaggtcttccgctatttttgaatgtgttcctggcgagttgctgctcttgtgactgataacattatcctttgttactatgcgtaagttcaggtgcgtgatacaagcgcttctcacaactgctgggc

SEQ ID NO: 114428 - DNA, 753 bp, Physcomitrella patens
  Intron number 1 from transcript Pp1s200_62V6.1 (locus Pp1s 200_62V6) derived from phytozome v7.0 (chr-ID scaffold_200 ; pos 483875 to 484627 reverse strand)
cgctcgccccaatttcgccctcgtcgatcgtggcggtaacctcactttcgtctcttttgtatttatttctttaaatataagtatgcaaatacttgatatctcagttctgcaagttttgtaacattttttttaattaaatattcccggcatgcagcaaggattgcttcggatttaaattttttcttagttagtggctacttcagaggtacttgatcaaaaactgatggcagttctgtgttaggactttcgaatttgtgcagcctttaatatttgaattcaacacctgaacaggaaatcttgttgtgatcattagttaggctcttctttcaccttcggggaatgtttgttggtagtcaattgaatgtcggttggatcgctggtttaggctattagatttgtaggaaggagagagataccaaactcctaatcccataacaagtaactctttatgatatttgttgattgaaaaatagagcgaggtgttgaaatcgcttaaaagctacctcaagacttggagtacctagattttcgatcatttttctttcaagctttgacaaagaagagttattgagaacagatcaacgatggcgtgttgtggtaggacaatttgacgagcgtgatgcgaattttagggcagaccttgtcgtcagagaatcaagtagattatttcgcaatttaagtgaatttgatggagatcgattcacttggagatgtgcagattgttactttgcaaccaaggtgtggcacgcgcaa

SEQ ID NO: 114429 - DNA, 844 bp, Physcomitrella patens
  Intron number 1 from transcript Pp1s116_41V6.1 (locus Pp1s 116_41V6) derived from phytozome v7.0 (chr-ID scaffold_116 ; pos 258573 to 259416 reverse strand)
acggtgagccagacgtaattccaagctttcaaaggcaaattggaattgagaattattatctaaagtatcctctgatttaagctctcagtagtgctaacgttttcgtagtaattcttactgaagaaatttcaagtcggtgaaagcgacagaggttttcttgaatgtgactgccgatttagttcctgtccattgacgcgaagtgatgtagagcctacatccttagagtttcaaccacgtcaatgtgttcagatccaatcgtcttaagtccatcccaaagatggcgatcaatgaaccttgctcagtattagattttttttaatagcctgcattagcaagttgtatggagtggaaactgagacaatattaagctttcgtattccttgtgctgttatgtgtggcgatgagcttgttcagattacagctctctctattaagtgccgtctctttgcgtttgttggcgaacctcccttctgtgtgcaagatcaggctgtgaggccctgtactccgctgttactcatttcataaatttactcaagtattgaccgattagcagaagagatattgctcagtaatgttacagtgtagcttcagcacgcgaaagttcctttacgtgtcagcagagctttctgtttaactatttgaatttctcctgtgctgcggaagtcaaatattgtaggataattttcagaatgggatgctctacctcgagagtcgacaacgaagacgcaagaagaggaagcgattgatgaagcaaactgtagcgtatcggcgtaacttcgcagcttcacaagcgaaattaatttcttctctttccgacaatttgcagagggagaggagataaagg

SEQ ID NO: 114430 - DNA, 600 bp, Physcomitrella patens
  Intron number 1 from transcript Pp1s22_396V6.1 (locus Pp1s 22_396V6) derived from phytozome v7.0 (chr-ID scaffold_22; pos 2381621 to 2382220 reverse strand)
taggaaggaggcggagagctgcgattgcttgcaaggtatgatcaaatccaaacggtttccatctttctttgaagactattgaaacactttgactatctgtctttttgtctccaatcgtgcctttttttgtattatcactgtattctgatctaactttggtttctgtttacttccgaagctatactatctataagagtttctttcatgcctgcacaatgcttgtcttttcttccagcttaaaattttgaagctctttcttcgaatgcatatactgtgcattcgttcaccagtatacaagtcctgacatatgttaaaggaaatatgtgcccatcttggtctcgtctattgatgattattctgtgccttcgcttatgtactcgaaagggactgtaccttccgtttttgctttccttcccatctgtactgctggttgagtttgggttcaggacatattactgtttccctcagaccgatactcttacgcaatgaacaccacgagtaacagtgtgtggctgttgcatccgcagcactaagataaaattgggttcttgataccattttagtgacttcgcctcttttctatgtcgcaggttttcaggt

SEQ ID NO: 114431 - DNA, 715 bp, Physcomitrella patens
  Intron number 1 from transcript Pp1s297_68V6.1 (locus Pp1s 297_68V6) derived from phytozome v7.0 (chr-ID scaffold_297 ; pos 452186 to 452900 reverse strand)
gaaggtgggtgattctagaattttcgccctaccttgggtcttcttaatttcaggcatggcgatctcattcatattggttgcattcgcaaggttctccgtaaactgtgacttattcgcttaggtgtgtgaaagctcgaagcttagggctgttgattcatggtgactattttgtgttttttgtgaccctagtctaattcattggttccggttgtagcgtatcgtacacacgaacttataaagcggtgattgaatgtaatgtcgtgctgttgttctcttctgggtcgaagagcagtttatgaactatggtaatttttagggtctaacgctgcgtagaaatcaaatccgcactgatggagatacgtgccatccttaccgttgtcgtgtttctctagaatcgcaatgaagtttctgctgcctacttgggacctattactttgtggttgaatgatccataattgtagcatgggtggtagcgggacactagcttttcaattaggcgtttgcaagcagttttctgtcgtgagaagtggatatgggtttagccttcacatatttacctcttagttgttgaaggttagggctattgtattttcaaatctcgtcacagtgatcattattgtggtgctttgagtaagtgttaagctttcaagggactgatcatcttcatttcacaatgcttgctgcacctcaatgtatgtcaggaaacgtaccaatc

SEQ ID NO: 114432 - DNA, 1044 bp, Physcomitrella patens
  Intron number 1 from transcript Pp1s7_502V6.1 (locus Pp1s7 _502V6) derived from phytozome v7.0 (chr-ID scaffold_7; po s 3207527 to 3208570)
tgaggaatctgaatctagattccgattctgtcgtagatccccttgtttctcacccctgctttcgtgccgtttccctttacttttccttttactttaaaatgtgttttatcaaagctaatattacttacgaacagagtgagatttttgtttacagtcgaatggctcctgattccaaatttcaaattgaatgcaggtgtggagcaaggaaacatagttggggtaaggagtaaattgaacggtcgtttttattttttggagaaggttgggttgtgaagcatatcccttgcttctgaacttaatccccaaaatacaaagaacgaagagaatgaagaaaggggtctaggcttgaacaagaagcaacaagaattgttcttccgctgggtgggttggtcttgtttcatgctcttctgctgagagccggttcgtcgttgctagtcatgcatgggcggctgctcgaggctcagcgacatcattgacacataggactgttggttgcaccatccaagcatctccacaggagaggaggagcaggagtaggatcacgagcgctagtgtggtgtgaaatgctacttgcacatggagcagttcggggtttcgacttcggactttctgcaatgattctgctcgtttcagaaaatctcattaggaagtcagaaccatggcatcctccggcagctggttgttatgaaatcaagcttcttctttttatttatttatttattttttttatttttttccttattttcccaaagccgtgtggccaggtttagaaggcgtgcgtccagcctgtgtgggtcctacctcatagccgcgtgccttgactagccctcaagacattcgttgcttccggatctcactcagatgcagtgaatggcaccatcgtcgccctcctcacgcccccacccctctgctcccgagatagttttctgcacgtcaacatgatgccggagatgtatgacgattccacgtaacggaattggctttgctcttgtgtacctacaagtttgttaacagagcctgtctctgtcacctctctctgtcacc

SEQ ID NO: 114433 - DNA, 615 bp, Physcomitrella patens
  Intron number 1 from transcript Pp1s47_228V6.1 (locus Pp1s 47_228V6) derived from phytozome v7.0 (chr-ID scaffold_47; pos 1412370 to 1412984 reverse strand)
cattcgtgagtactgcaccactttacaattttgatgtttgcaaagattttttgttgttgtgtattaataactttcatttgagcagtagttgggttttttctatacatgggggcggtgatcattagacaatggttggttcaaggggcacagggtttagtggctggttccgtctgtattgacgatgcatagcttaaagttatggtttagcagccattgtcttctttaacagaactaagactagtgtatcacattctatcctgttctatttatttatttttcttgttgttaaaaatcaagttttgtagctgcgattgtctgtgttttgcaataggtattggaagcttggcaattacacatgacaagtttgtaatgtacaaaattcgctgtgtaccttgtagggattgttccaagagttgtttttcggcgaagaggctctgtgttagcgtggtgggcatctttaggcagcgtctcatctcccaactttaggctgacaactctaagtgcatatcatcgttctttttggctactaagacagatatctgttgacattctaatcggtgctcaactacagcagatgctcagtgggagaaattggaggtagcaacgcattaaaag

SEQ ID NO: 114434 - DNA, 629 bp, Physcomitrella patens
  Intron number 1 from transcript Pp1s197_146V6.3 (locus Pp1 s197_146V6) derived from phytozome v7.0 (chr-ID scaffold_1 97; pos 702380 to 703008)
ctggaccgactctctcgctcccacggattttacaggtggttcatctaggcttgattttcgatgctttgaatctgggcttttttgttttttgtttttggcgtgtgctttacacgtgggatctgatcgtgcaaattttaaattacgacggggaatgaatgaggttgtagtgtgcgaggttcttgttggacaaagtgggggtgatggggagggtcctcgtgattcaacgacctgtgtagtcttcggtcggtagctgcgagattcggtatttgcatacgttttgaagaaggtgcgattacaccgaggataggtccaattgcatattagagagttgatggacatcgtttgatcgttaactgcagcgaaataagtccatggggtttttaggaaagttctggttcatgttgttgctgtcgctgaattgatggtttggaattattgttgaaggatttttctttgccttcccacagttcctttttctcgcaacggatgatcacgtagtggtttaaggatggatagattacgggaatacttttgttaggagaccagggaggaatcatattaccttgatcccaaagttgttggttgtgtgttcaggaagtggagtgatacatcgtcgcatagttactggg

SEQ ID NO: 114435 - DNA, 898 bp, Physcomitrella patens
  Intron number 1 from transcript Pp1s51_210V6.1 (locus Pp1s 51_210V6) derived from phytozome v7.0 (chr-ID scaffold_51; pos 1337828 to 1338725)
gagttctggagcgcgatattgaacaggtagggatccttggagaagcccttgtcaacgtctagttgaatgatggctgtcattctgagtgcagaaactagggttcctcgatattttttttcttcttaggtgttctaccgaacctgttcgaatgatcattgttattcttgattcactactttcgcaagaagcattgccctgatttctataactgcaattatatgacttatcttatttaaccttcttgtcgagtgaagacagtcagtgtgaactggcttgaatatggtgagagaagatgcaattggatcgtctcgagctgaggcgaatttgtactaaatgtctgtatattcttgtcctagttttgaggttctaattgtgtcataagtggtagtgtttatttatacgtcagctcaatcgaattaccgcatttatggttgttgtggtcctcaatgcttaaaagatgttaatgaacatgattttatctcttcattacgtgttgtccataattgtggcgtgatgttttttcgtcctatcgtatacatgaaaattatgtgaaattagtgtgtctaaaccatcgtagatggatggctcacaagaaaagaattcgattgttccatcatgattataactcatgctagaaatgcggaaaggtggtcctgaagcgatgctgaaatgttgatgtagtcatgcttggatgaagtgctagcttctgaagagatcgttcaggatcttagcatatgaattacaaacaaaaggatgaatctttgacttgcttcgtctacttctaccagatttttcctcttattcgataatcgtactcaaatggttgtcttgcgatctgatctgctacattttattgggtgaaggccatcactgcactgaagaaaggtgctcagctctt

SEQ ID NO: 114436 - DNA, 932 bp, Physcomitrella patens
  Intron number 1 from transcript Pp1s489_24V6.1 (locus Pp1s 489_24V6) derived from phytozome v7.0 (chr-ID scaffold_489 ; pos 131061 to 131992 reverse strand)
actctcagtcccggcgtgagtcccagttcggcacaagtttctaaattctgaattaaaatttcttgaattccttcgaacttcttgaattctttgtctccatagaccaaatttgtatttactctttggtttttttgttttttgatgctagacaaattctattttaaataattataacactgacgtgaaaaagtattggagtgaaatgcacttagttgcatgtgtagtgaagatccccgaatgcgaaagtattgtgttcagactcacaactgtaacaagtaatgtattgagggcaaggcgaagttgtgatgtgaggcgaggcgaagtgagccagactccaagctcgtaaacctggtcgcattggaggtgaacctgtgctggatcaaaattcggctgctctgtgttgatctgtttttcttacaaagtgaagttgaggcattcttggggcgatttgaatcgattttttattttattttattgttttttgttttcttttggtttgttttgtttgttttctaaagtgaataactgtgctccttcgttgtgtttgaggttgaagtaggagcttgaaggagaaggacgttacatcgcttcgcatgttccttgttaggtcaactcttgtctactccaccacctgcataacatgtaaaacgttgtccaaaactctacatgcttccatgtttgtatggtgcatggttcccaatttaattgtttcatggattgttgaaacctggtttaggattgaatttgttttgggatggaattagaagatttgacaactttttggctcaatgaacatggggtttgttttaagcctcctcatggttcttgtttttcattcactgctgcagtccctaaacctggtacattgcataaaggaatcggccaacgtaatgacagggacggagcggtgggacggagcgtgctggtccaca

SEQ ID NO: 114437 - DNA, 567 bp, Physcomitrella patens
  Intron number 2 from transcript Pp1s4_43V6.4 (locus Pp1s4_ 43V6) derived from phytozome v7.0 (chr-ID scaffold_4; pos 293102 to 293668 reverse strand)
tctgctctcctcaacttctgttgaaaggtgttaaagtgagttaacatcccgtttctgtggtggtgctgttatgcattgttgagcgaagttgcactagcatattgcctcaagaggaacccaactggtccgtacacaagttactctttgatgttcgtttgacgatgagaggatcaatctttctgaacgacgtggattctttgccaagactccgggtttgcgtttatccttgctcctctttgaagtcctcgaaaggttcatctcagcattttgggatgtcctcttctttttcaattttttttgaaatccaatttcaggggatttttcattctttggagaaggcgaaaaaggccgccatggaacttgtcatcaccatattactctagcagaggcgaatcaatgcgaatgaagggcttaggaacgccgcagagaatagtttcacaacttccatcgccctcggtggtgctgtttgtcacgttggatcggatggttaggtcttttcaagttgctgatataactcttggacagtgtgctgacatttgtgggacatttgagtgcagatcataagcc

SEQ ID NO: 114438 - DNA, 798 bp, Physcomitrella patens
  Intron number 1 from transcript Pp1s156_125V6.1 (locus Pp1 s156_125V6) derived from phytozome v7.0 (chr-ID scaffold_1 56; pos 720594 to 721391)
gttgcggcgcataccatcaaggacttctccttgaggtgaatttccagctcattaagaaactgtgtcacaggcttcgggagatccatacggctgttaccctctaagaaatcccttcttggctttttataaaggggcaattgatttccaattttaattcggaaactgctccctcagttggtaatgttgtaatgggaaggtgatctgctcaacttccgtttgcactaccagacaccataaggatactgcagtactatagaaattaatcagacaatcaaacgtatgtcttctctttggaacaatacgtatgccatgacttgtctgctcaaatgcttacacgaacattagcgacatttccagaggaaaacgccaatcaatgttgcagaccactgcatacggccgcgtgttgttgaatagcaaatagagggcaacaatgaagcttcttcaaaacttagattcacatcacaagtctactcaaccatattcgaagatattaactctgccgtttgcgtcacaccttgttcaaaaaagacaaaaaaaaaaaaaaaaaaaaaaaaaaacgaaacaaaatcaacgtcactagttcgacggtgaaaaaaaagaagaaagaaaaaaagacctatagcttcaccatcaatgtcacgaatgattagaaacggagcaaaaagaataagcacaggcacagttcgtacagaaaacgaaacctctcgttcagaatagtagacaatcgtggtttgtgcaagatcattaccacaattttctcaaggtgcgagcaaagactcaagaagtatattccacgat

SEQ ID NO: 114439 - DNA, 386 bp, Physcomitrella patens
  Intron number 2 from transcript Pp1s289_41V6.1 (locus Pp1s 289_41V6) derived from phytozome v7.0 (chr-ID scaffold_289 ; pos 304365 to 304750)
caggccaaggaggtaaggttgcttccagcacgcgatatcagagtactctgaattactttgaatgttttgcggcaccactcaaagtacagttgtgctttatctttttcatcgttggcatactattatacttttcgaagccataatcttcggaagattgagctctaatatctctttcagctctgtgcacggctgtcttgagagaaaatgttacttctccaagtttccaaggaactcaactaagtgttaatgtttctcatggcagtttcattttctgtattagcctctctcgaagtgttgttctcgaagccccgcgtcctgttagggccgtatttgatgtagcagtagtcaagtgcctgacgaggattaaatgatcaccgcaggtggac

SEQ ID NO: 114440 - DNA, 828 bp, Physcomitrella patens
  Intron number 1 from transcript Pp1s113_162V6.1 (locus Pp1 s113_162V6) derived from phytozome v7.0 (chr-ID scaffold_1 13; pos 851031 to 851858 reverse strand)
tcagttcacaggtacgaaaaatctgtctcgttgtggacatccgaagtcatgcagaacgggagtaccgtgctcgattacagctaataatcgataggtagagttttggaataaatctgtatgtgcacggccagaggtggtgggtgtgtggttacttgtaattagctcatcgtgacgctgtagagctcgtttcttgttcttgagtttgctcctcgtgtagcagtcccgacttttcttcaattgggaagagagcaatatatcctgttaggtcgcccattgtatctgtagatgctaccgttagactacaccggtgatactactcattcaaagttcgcttggcatttcctcagagcacgctcctatgttaaagtacggaggtgcgtggacgtaatgaggcatgcagatgaacttaatccatttgtctcatagttctgcattcctgtaatggccaatgcgtggcgctcaaatacatggattgggctgcacaacagtaccaacactcggcttcagagggttcgatcttggaggatttgacctcagattgaagcgttttcgagagcccttttttttggttctgtgagcaacatctagttgtgattgaattgaggaaatattgaatgttacttggaagagcatcaggtgtgtaaggctgcagtggttgtttccattcagggcgcgctatccgacaaacacgccgcagtctgtatgagacttggagtttgaatattggaaatgactcgatgaagaactggagaagtgattaggtttatcgtttgtcgtgcggaattttttgcagtctttttggtccgaagaatacggacgattccagtg

SEQ ID NO: 114441 - DNA, 777 bp, Physcomitrella patens
  Intron number 1 from transcript Pp1s302_25V6.1 (locus Pp1s 302_25V6) derived from phytozome v7.0 (chr-ID scaffold_302 ; pos 180224 to 181000)
gtcgtggcaccagggaggctaggcttcctaccaaggtgagctcactcgccgtcgcgttttccatctctcattgtggtggtatattcgtcttttcgacactgtattaaggctggtgtttatcatctactcggcaatatatgaccaagacaacgcagtgtcgtgtggtggtgccaggctgcccataccgccgtaattcatatcacatatattggttccgttttattcctcttcgcaatgtcgagattaagtcatggtttctaatcatatttaattagttgtttgattttagatcaattgccgtgttcgtgctctgcttattcgcatttctacaatttctaaagcttctgtcgtgtaatggtgcaagcttttgtttggcttggtcacaatctgaataatctaatttgtaaaagtatttttcactcaacaatcaacgactactagagctagaaatctacatggagacaaatgtttcgcctggtgttgataagttggaaccgtctaaaagtctatcgtactatgtagattctgcattagtgttgtgagtttaagtttccaattggtattgaagattttgttttgtattttctgcctacattgctgcctgattttcagatattttcgaacattgatttctttttggtttcacctccaatttgcgcatttatgtacacagctacatcatctgcttccattccaatgtgtgctttctttggttcagccttcttttctatttgattttttgacgtgtttttgctttcgtttctgcgtctaggtgtt

SEQ ID NO: 114442 - DNA, 502 bp, Physcomitrella patens
  Intron number 2 from transcript Pp1s136_208V6.1 (locus Pp1 s136_208V6) derived from phytozome v7.0 (chr-ID scaffold_1 36; pos 1026077 to 1026578)
gcaaggactggaagaaggtactgatctgttctgcatgttgcttaatgcctacacaacggggcacgacagagcctggacagattagattgaagttccattgtttgtcatgcatttttgtgcattttaatggaacctggtgttattcaaagattggttgattaactggttcttaactgggttttacaagtcgaatgcattctcaggtcctttttagctgcttgcttgcgatttctacttccttttcatctgccaaccaaccgtgggtagatattgtgtacagcagctaatacgatactatgcagaatttgtacttcttttcggtagtaattatgttacctggggtgttcttcagttcactctaaccaccgaataatgcggataaagaattggtttatgcttttactatggtccactgcatttattttttcgtggtgcaaactatgagtcacagaatttgatgatttcaggtttctgcgagcttacacaagagaacggcagagat

SEQ ID NO: 114443 - DNA, 901 bp, Physcomitrella patens
  Intron number 1 from transcript Pp1s39_286V6.1 (locus Pp1s 39_286V6) derived from phytozome v7.0 (chr-ID scaffold_39; pos 1450804 to 1451704)
ccttgcttatctccaagcaccgtttcgccaccgttcgttttctctcaccctctcatacccacgctattaccttctgaatcaacgtgtcattagttgattttgaaaccagactgtcttggttttctagggtttatttgtggttatgtctgattcatgggattgatggggactgcgttcaagtgggtttcgtggaatgtgtccttgcagtatgtatttctataaaattctttgaatgcttgcatgaggaggatgggatttctgggcaagacctaatttatcgcctttgtactattctgagtattagacaaacggtctcatgctagaacacgcctcttgagtagtgtcttgtccttagtcttgccggtagatctgttacctgtgagcgtgagagaagtgtagagaaaaatgagttgaatatgtactagggaatgcatgtttgttatgcgcaaacttgaaaaccctgacagcttattctaaacctcctccgcatttcagaactttgttttcaaacttgtcaagcttcagtgacgaatctgcgtcactacagctcatagttactgatacaaagggttctagaatgatgttacgtgaggtgtagtgtgcgtgatacatagtggcttagtacgccttcggaatctgcttcttcatgtgaataacttattttcagtggtggatattaattatacatctagcggatgtggactgctatcacgccatattcttcattcggatatcagactgttacatgaaggcctcatcagcgcgtgaaaagttttggacatggcacaatagtggtattttatgagtaaagggagtgacatgcacaatttaaggttttagctgactttgatgttggtatggaacagggacgtgtaaggaccaaaaccgtgaagaaggcctc

SEQ ID NO: 114444 - DNA, 670 bp, Physcomitrella patens
  Intron number 1 from transcript Pp1s37_351V6.1 (locus Pp1s 37_351V6) derived from phytozome v7.0 (chr-ID scaffold_37; pos 2319195 to 2319864 reverse strand)
tagagaaacggagagagctgcaagaagccttggaggtactgaattatatatgctgtttcacttttgtcatgtttgagttgttgcgacattgttaggcaactgtcttgttctttgaaacttattgaactcatcttaaatttcatgcgaggttgcagagtttcttattagtcacctggacaaaacaagttttagacgcatcgtagatccgcaatctcattgtggtcccattttgggaagaaggtcttaattgctgttttatgtgtgttctgagtcagttgaattcgcgaacctgttttctcagttttcttcaattctgctgagacattgagaattatcttagaagctattacactattataatgtcatcgagggagcatatcgattaccaattactattgttaatgatgtggataatgcttcaggcattttgattgccagcattatgcctggactgacttagaatctcagaactatacaatctggagcttaaaactaagagcagtgtgtcggggataatgatttatgcctgtgtgtggcttagtttccttgagaatgaagttgtagtctgatgatctctaagcatcattattctgaaattgttgttaatcctaaggtgttttcatatgattctgaaggaaaaacggcgtaaatttcgcgccgttggtgccgc

SEQ ID NO: 114445 - DNA, 1017 bp, Physcomitrella patens
  Intron number 1 from transcript Pp1s7_222V6.2 (locus Pp1s7 _222V6) derived from phytozome v7.0 (chr-ID scaffold_7; po s 1194128 to 1195144 reverse strand)
cagcagttggtgctgacaggtacttttctgctcacatttcagctcccgcactttgacacccaccgtccgcaattcctgggtttgcactggagtgtggggagttctgtgaatggggcaaattttgaacttgtaattgtatttttgggcgttacatacttgaagcagttaggttcacgaatctattttataatgacttggtagagagggagttgtttgagttgcagctcacgtctattggtgagtatgtatttggcacagtcctagattgcttatggctgtgtgtgagttcgagcttttcttgacctctctctctcgccctctctctcaattcaccgcttattttagttgggtatgtcgaaacgtcgcgtggcaattcagtacttgtgcggagtacttgcatctacgcaagatttgctgtgctccccacaagctgttaggggtgcttcgtaattgctacatcatccttgttatgctcttcagtagctctgaaccggaatttagaggttggaacagccggtgctctgcttgtctggtgcatttttaggtggcgtctcagtgttgcggtgattgtttcaaatttcgtcgttgaaggagagaaaactctgcacctcatagctgggtgctttctaaacactagattttatgtgaattttctgtagcttgcgattgagggttcagggttttgttcaaatcaatacggtgggataatgtctgtgcatctacatcctgagataggacttgaactgcccgttccatttccttacagaatagccagattttggtgtggaggaatcgagggatcgtgagaatcgcaatttggtgatacaatctggtgatcagttgtttatacgaaagtgattgtgttccatgcaagaagcatggttaaggtgatgatatgacggaacttgatttgtttgtgcaggatggaccgtagagctgattagtaatatgtaataaattggatcggcttgagttcatcttttggtagtccacaaggggtgggatctatctccagct

SEQ ID NO: 114446 - DNA, 592 bp, Physcomitrella patens
  Intron number 1 from transcript Pp1s71_314V6.2 (locus Pp1s 71_314V6) derived from phytozome v7.0 (chr-ID scaffold_71; pos 1519374 to 1519965 reverse strand)
cctggttgcggaacacgccggcggcctctgctccggtgagactttgctcttctcctttttgtgaaagctaccttctctgtgcgtggctggtagggatcgaagcaatgcgtgggcgtgatctctgcatcttgtgtgcttgccgtcgtgtttgttttgattgtgtgaacgatgccccgaagtcattgcgcctgatggttttatctaagaatttgtttcattaattggaatttagtcgtagttttagatctctctttctttcttttttttttttttttttttttaaaactctcagccgggattgcatttcttgaagtcgcacgtgattagacgctgggattctagcgtcatttatcagcgatgtttctgaacgtttcacatagtacaggtgaattcgttgtatgaggtactggttgaaaattttgatgaaatttgtctgaagcatcttggttggttacggacatcgtgtttgcgtgaacacgagtccagttctccagtctttgaaaaatcaaagtcaaaatcataatcttatttttcgggtgtttttatgatcgaggtagagtaggacgcattggaagtaggacgcattggaagc

SEQ ID NO: 114447 - DNA, 537 bp, Physcomitrella patens
  Intron number 2 from transcript Pp1s30_360V6.1 (locus Pp1s 30_360V6) derived from phytozome v7.0 (chr-ID scaffold_30; pos 2428776 to 2429312 reverse strand)
ttgcgaccatagctacactctcaaacttgccccaggtgggtgttctaaactacatttttgggccattgcattgccaagctttataagttcccccacaatagaactcttagtttgcacctgcagaagaattctccattaaacccaatagtatcctgctatccaaatagaaaaccggcttgctggagcgtggcttgagtgtaaggttagaggaacaggtgattgtcaatggtagattctaaatcccatctcattagagcaataaacttcatcagccgcttcgtcattctctcgagctcacatctcgagagttcctcatctaacctcatgtaacattctcagccgtgcgctcgcgagtataaaaattaagctacaagcaaggttttttgctttctttgaatcttaatatgtatcaagtagatgacatgcctaaattaatctccatttaagaaacgattccatgtctcccactgcagcatgtcttcaaattctgctcgtaatctagaagatttgacgtggaaggcacctacttcctctcag

SEQ ID NO: 114448 - DNA, 589 bp, Physcomitrella patens
  Intron number 1 from transcript Pp1s294_26V6.1 (locus Pp1s 294_26V6) derived from phytozome v7.0 (chr-ID scaffold_294 ; pos 90190 to 90778 reverse strand)
acgctgctgtgcctgcacctttcacttgttgcacggtgggttcgtgtcactggccccgctgtgcagtttcgtatgttcagttagttctgttgttgttgttattgttgtttttgttttttatttttactttaatgttgctgtcctggagtttcggttgcagggtgcgtgttgtgttggagcgttgtatgttctgttcggctttgtcgtggctggctggaagccaatggtgacctaatggttttagtgagtagtattctctgaaatggagttttaagagacccagcatttttcataggttggtgagacgccccagtcttgagtcgtgagaatgagggaatgagcttttcgcggggatttgagctcagtggtctgtttgttgttgggtttggtagccctcgttgcatttctttgtgtatgatacatgaaatgcgtccacctgtagcctctatctttttcgactgagtgcgtcattttcggaatggaaaggtctgctgggagtccgtgtacattctttgctttgttcctgatttgaaggtttgttgttcttgtgacaggttgggtcggcaggcagattcgagctcttcgatct

SEQ ID NO: 114449 - DNA, 562 bp, Physcomitrella patens
  Intron number 1 from transcript Pp1s89_78V6.1 (locus Pp1s8 9_78V6) derived from phytozome v7.0 (chr-ID scaffold_89; p os 362105 to 362666 reverse strand)
gcggtcgccttcaaggtaggtggatcttcgtgcactttctctgtttgttacttagattgcgattaatatagggctctcaatctcaatctcacaggaatttgattccttgctttttttttttattccttcttctttattcgtctttttccagcggcaattctttgcgtaggatacttcagttgtgcgtgtcatgttgacgaaggcacagttggaaattctgactctagtgattaatgttcgttttctgcatttcggtttcttttggtgtctgtttgatagggtgtctgttcctgagcgctgtccttgtgcgtgtggtggtctttgaaaccttgatcttcccacggcctgcgaagtaaatcctcgcattctgctctctagactttttaaagattttggatgactgtataccctaagaattgatgagacaatgaaaccgcagatgttatacagaattttgtttcatttcttggctcatcgttcataccataatctatctgaaactgatagtgaggcctggaaatttgcaggggctaggaagctgcttgcggaaacaccagcgcca

SEQ ID NO: 114450 - DNA, 874 bp, Physcomitrella patens
  Intron number 5 from transcript Pp1s173_73V6.1 (locus Pp1s 173_73V6) derived from phytozome v7.0 (chr-ID scaffold_173 ; pos 460042 to 460915)
agataaagaaacatctgctcctgttaaaaaacctcgtaagactcttcgttcagactctcatcttcgttgactttaaatttcttttttgatgttttcactgtgatatgttaacgtgggatgggttttatgcaattggctcattcgcgttaattcacttttatgttccctcacttttcttccagtacccttgctagtgccagacaaatcgtggaattactgtagaagtaatgttctgcagaggttagaagataggtcattggttttcttgtaaagttagattcatgaaaaagatacggtagacttggcttctgttctgaggagagagcgattatcccgccagggcatgaatgccctcttgaacgtcgcagcacatgttttggtcgtcgctatctgccacacgtcatgagtttcagtaggcttgacaagaggtgtgtggatgatggtttctgctttatggaaaaaacgaagaacacagatcctacaagtgcagagatcgagatgaaccaacgctaaagggtatgttaataatgttgacgttgtgaaggtcgaggagcttcagaggttggcgattttcaggccttggggcatcgctctaatttagccacacttactggtgatcatgtaatcagattcatgttcacattctgtaatttgttattccaaaacgcacagtggatttgcctggttcacaattgcagcagagtaacatacgagtaaaatttgagtctagacttgcatgacttccatgtcagtaaattttcgtgaaataaaatattagtgtcaattgctagaggtgaaagaggttgcactgatgtgaatcaactgggtacctggtgcaggggagcgggcagtctgggtccggaagcgaaggcac

SEQ ID NO: 114451 - DNA, 587 bp, Physcomitrella patens
  Intron number 2 from transcript Pp1s379_14V6.1 (locus Pp1s 379_14V6) derived from phytozome v7.0 (chr-ID scaffold_379 ; pos 127467 to 128053)
tcacagagctgtatgtgcatttcctttaatcactatcttttgtcctaaccacctccgtttgtttgcaccaatatgtatccaaaactaagtggtaggtcaggacctaagtctactatttgaggttgtagcccagcattttagtggcgactagtgttgatgattagattcgacgaagtggattctcaaattgttcagctctattaacctctcattcatgtcaggcacttgaatcagaagggtctgtctggaaacctcggttactccctcaccgcacttcaacaattattgatactgtgagccacaacttttcgttccaagctaacgctttcactcctttaatgctgtaaatttttcttcacacaagaattacttgaggcatcaaatgaaagattccgaatgtactggattcctgacactgtctagacctatcttatagtggatctttatacatttacaacattcttttgagattgtgagaaatgcctaggtgaggaatatggttttgttcaatttttgttgtttagatgtggatcccgtgcgaagattatgctttatgaaaactaaataatatctttattggtgcagtg

SEQ ID NO: 114452 - DNA, 590 bp, Physcomitrella patens
  Intron number 1 from transcript Pp1s79_2V6.2 (locus Pp1s79 _2V6) derived from phytozome v7.0 (chr-ID scaffold_79; pos 12205 to 12794 reverse strand)
tgaacgagtatcggttcattttcttacggaattaggtgagttgcggggttttgtgttcggtggtgggatttgtcgaaaccagctgtaaagcgaagctttgttcctaatttgtcttatttttttgtatttgtatttttttattgatagatcattgctagagagtttcacgcagttttggtttgtggtctttcttgaaaacgattggtttgacttttgttttgagtcggtgcgtgtttttgtttatcaatgtagtttgtggtaatcatagggtcttggttcataagttgctttagaaagttgattctgatatcggatgacttgccttctgtggtctatgttattacgactgcggtacattggtctattgccttcaccaattgtgacttggttcaagtcccgtcagctttctgaaaaatttctagtagcgcaccctagtatttgctcctagtgaagaaagaaccgaataacttctctcacacatgtagttgcctgtggttcactgtacgcgtttcacggttttcattctaacctctttcgacgcagatatccactatcacagattttccgactctgagaaaagtcttcaaatt

SEQ ID NO: 114453 - DNA, 467 bp, Physcomitrella patens
  Intron number 2 from transcript Pp1s143_150V6.1 (locus Pp1 s143_150V6) derived from phytozome v7.0 (chr-ID scaffold_1 43; pos 999704 to 1000170 reverse strand)
tcccagacaccgttgggttgaaggcggtactgtcggtatatttctacataagtggtgtttattaactgactaaacgtccggttgcatagctagccagctctgttgcagctttaaatgaccagttgcatgatgtgatgatggctggagtttatgtggttgggggggtttggaagacttagttgtccctgcagcttcgtggttctcgtggtttggcgtttcattgaatttttgattttttgaatttgattttgaatttgattttctctcgtataacacgtctaaccttctcacagggacaaagcaatatccatggagataacctaacttattattattattattatcatcctttattgttgttatcatctttcttattactaccactcccctagttaaaacgctgtttgtctactattctgctgattgctcacctctcatttggcgtggtgcaggcattgaagcgaatc

SEQ ID NO: 114454 - DNA, 943 bp, Physcomitrella patens
  Intron number 1 from transcript Pp1s143_150V6.1 (locus Pp1 s143_150V6) derived from phytozome v7.0 (chr-ID scaffold_1 43; pos 1001039 to 1001981 reverse strand)
gttcgttagcgagggggagagatttcgtgaacgatgtaagtgagcgggaagtttgttgcgacgtggtggatcattgtcgtcgtcgaattgggttttgtagttcttgtggcggcgagtgagtgagttagtgcgtgagtgtgtgagcgagtgagttcattgtaggtgcggtcgttttattatggttttccggttctttcatgcgatggcggatacgggtttcgagactggtttttgtagggcgaggtttgaacggtgttggtggttggaggcagcatgacacatgatttttgtggagtggtgggaggttggatggtttgtgtgagaggatcgggatttgtataaagtgacggggatttgaggtcgctttgatggttgcgttgttgtggagcgcgtgttcgacttgtgattaatttcgatcaattggcaaaattagcttctttttttttccctttttttttttctttttcatttttgggttcttttgaatgtggtcaatgcctttacttgtacgcgtcgttctcttccacgattacacccctgatttacttatttatgtgtttattgggaaccgattgctgtttcttagttgcattgcctgtcatgagggcagctaccgccctcaaggtgttgcattgaatttgtgttcacggttgagagttatcacatgttcgaaggcttttcggtgaactttgtttgaaaaggagtttgtttttatttgagattaaatattcaattctgaagggtagagcttgcgaagcacggtgagatgctcaaggactaggaggttgcacaacgggatgctttagtatgatttattggcggctttgctgtattaatttatgtgctaaaggcagaacaatctgggttggacatgaatctcacgagtgctattgaatcactgcttgcagggttgattgttcttcctttttgccttgcgctttgt

SEQ ID NO: 114455 - DNA, 786 bp, Physcomitrella patens
  Intron number 1 from transcript Pp1s9_382V6.1 (locus Pp1s9 _382V6) derived from phytozome v7.0 (chr-ID scaffold_9; po s 2544779 to 2545564 reverse strand)
tctgctggcagcacgctcgttggtgcttttagctcgtatgtttttctcgccctttgatgtttggaacgtttccactttgtctgctcttcggtgtggcgatgtattcttggtggttgggatagttatttaatgtgcattttaacacggaagagcagcaaacagtaagagaagatctttttttatgacgttgtgtgttggggcaccctttgccacgtttaattgtgttactgagctcgaaaccctaattgtgtggattaaaataaaatcatctcgtctgacgctgcaacgccccatcgttttgagagtcgtttgataatagagccgagtaggctctgagagaatggtgaaggattgcagttcatgggcataagcaactgttcacaaacatgttggtgattcggcttaagtaatacttgatgagatacatcatatctcagagcaagatgagggagtctgaaatgctcattcactaatcaagctaatttattcattggtgcaacatcgtctattgtttgcaatgcatcgccaaggtggtttcgcggatcaaattttcctggcgattattgacccttagattctagataagcttgagttgtgttcagtattatgtaatgcttcttttttgggatgaattgcaccttccaacaagagggaggcattctttttgatttcagcaacctcttgttagcttggtccttgctctcgcctttcaaagttccgtaggagatgaaagcctaaattgcggagcagtgatgttgggagcgtgtgggcagagttacaaaggga

SEQ ID NO: 114456 - DNA, 791 bp, Physcomitrella patens
  Intron number 2 from transcript Pp1s22_119V6.1 (locus Pp1s 22_119V6) derived from phytozome v7.0 (chr-ID scaffold_22; pos 759314 to 760104 reverse strand)
ttgatccgccaatacaagacatctgcaaatatctagtaaaagtccgctttcaacctcaacaatctgttgccatttaaattgtttgtttgagctttgttgcaaaggagcatgtaaagagttgttagagatcgaagcgcatgcagaacctacagcatggtatcgttattgacagaacttataagtgtgcacggtgcagcgtgtgtcattgcaagtttgtccacattgatattagatgctaactagtacaaccttataggtatgcactagttccgtgagtttaacttcgatgcctctttcttttttgtgtcttttttgttaatgtttactttgaacatcgtgaggtaatcatgtttcagtaccatttcctgagattccaatgttgatattgtctacttttcaatgatatgcaaattattccagtgtcaagagtgtcatgcagatttttttggatacgtcaccccatggtgttccatcgccttcaatacgaggatactccatttttcctagacttattcatgtagctttctttgaatgattagatccacaatttaatacgcagtgaaagaattcaaagttgtaatctcacaacctgaaccgctggaaacatgtggagtgcatatggtatgcaagtaattgagatgttatccctgtaaggctcttcgttgtcaaaaaacagaaattcttaaggttcaattctcgttattgtttgttcacacatgttgggatttgttccacctaatcatttatttcttttaggttgtgcggatcccgcagttagaccattcaacatt

SEQ ID NO: 114457 - DNA, 738 bp, Physcomitrella patens
  Intron number 2 from transcript Pp1s244_7V6.1 (locus Pp1s2 44_7V6) derived from phytozome v7.0 (chr-ID scaffold_244; pos 57905 to 58642)
aagaggtgatcattctcaatacttccacgtgctcattcaattctatgggcatgtcttaccggaatttgttagaattattggccaggtcatctcctccaatcaccttcagaaaaagctcaattctctatttatagccacttcactccaaatagatacaacaaaaattgaatagatctctcagaaattcccttgtgaatcagcccagagcgagttacgtctgaaagctttttcttgatcctaattaaacgaggatgcgcttctgtttgtgtgtgtatggatttattttgttcccttacagtgggtttcattgctcgattacaaatcaatttccaattatctacctccacatgtagattacttgcattcttctgcagtgcaacgctgacatgataactatccactgaatccaggcggtatattaccacaaagagtactgtccagaaattttactgattctattttcgaggacaaaatttctcgaattttgatgttcacatggagccttgtgtaccaatgcagtatctctgccaattccatggcaacagaattatttacaaattaagtagtatttttcctcggatgttttttcctttcagagtgacgacatgttcccaggagaaaaacggtttcaatattatgcagaagtataagcgtcaagctctgagaatacttacgaaaattggattaaatcatttgggagcagagtgttgagctggcccaggcagcaggcagctgctc

SEQ ID NO: 114458 - DNA, 922 bp, Physcomitrella patens
  Intron number 1 from transcript Pp1s359_39V6.1 (locus Pp1s 359_39V6) derived from phytozome v7.0 (chr-ID scaffold_359 ; pos 249016 to 249937 reverse strand)
aggatcccaaggtaggtcagtcttcttgagtcttgattttctgggttgagggtaaatggatccggacatggttatgggccgtggttggtggtgcatatcatcgctgcaggaggtgtggtaatggaacacgttgtggagttttaggcttttgtggttagaaagttttggaactgatcactggaatcgatttcgtttgtttcggtgaaggttaggtcaagctgaagtgatttagggtttattctagagaggatgtggtacattgagttgccagttgcaaacctgaaacgtttgtattccgtcataatgtaatttaggtttttgagcatattttatgggttttgtgggcctactagaaacctgacccactcttgatgagttagagtcaacgagttctgcagcttcaatcgttaagtttatcaagtccgtaagtcttaaatttttgttatgactgcagttgctatagctgagatatttttgagattaattttccggccatgcttttgccctaacagccaacgtagacgatcttgttgataatcgtttgcgccttcaccatatatctaatgattgctacccttgatcgtagtctagttacatattcctattcgagaggatattgaagactttgtggatttgtaagagcctaaggcacaagttccatactgcacgttgcctcccctgcccaggacggaagaacatgggagttcactttctaagttctgctccatgtgctcctcaatattatcacctactgctgttaatgtttcgtgaatctatcactcgaagttccaaaaagcagaaaattttgattattttattcaggtatattagtgctgtcgtgcttttcagtattctaaagataattctgctctgtaatggctgtgcaggtgagacataatattgctgttgcagagtactaccg

SEQ ID NO: 114459 - DNA, 809 bp, Physcomitrella patens
  Intron number 1 from transcript Pp1s49_100V6.1 (locus Pp1s 49_100V6) derived from phytozome v7.0 (chr-ID scaffold_49; pos 846481 to 847289 reverse strand)
accctctaggtatattctgaccaaatttggtttttgtgtttccttaatccttctctagaatgcaccgaaattattatgaaattcccactttggaagtgtgggcacgagtgaaattgtgttaatgtgggagcaatccagagttcattggatgggagaggcgacaattgcatgctttgatgaattttttagactttttccatgtgtttggtttgttttgggacgggtcttgacatgatatgtgagctgggaacccgggagtatttatttatgtaatgctcgagcttgatggactgattttagtcgatctcatgatgtggacgtagcagttgggtgttgatctgacagtaaagttaccttggtcagcattcattttaagcatccaatctatggttgtattggtttgaggctttgttgaagagtgttttatactaattcagttgctcattggtgaatttgacatttagaggcgcttctctttatttgattttgaagtgtctcctgatacttggttattgcgcggattgtgtgtaatgtacttggttgctttgttttctatgtccatatttcagtctgttatgatcgattgttaaaagtttattctcggcttccgcgtgaagttttttcactttcccactttttcttgttggcctccacggatggtgttctccggacttttagatttgaccaggtcttcgtttctctctatctctctttggattttaaggggtttgcaagtgtgtcaaggttgatcatctactcaattttggattgttgcaggcgctactggaatttcagttcatattgtagaa

SEQ ID NO: 114460 - DNA, 787 bp, Physcomitrella patens
  Intron number 1 from transcript Pp1s197_53V6.1 (locus Pp1s 197_53V6) derived from phytozome v7.0 (chr-ID scaffold_197 ; pos 233549 to 234335 reverse strand)
tctgtcttctgcgtttcgcccagacagttcgtcgcgtaagcattcactcttcttcaagccttcaattttggccttgatttttgggtctggattcaaatttgacgcgacgttctccttttcttttagttatttcttattttttattcttttttgtccttgaaggttggggaggtgtgcagacttctctttatcggagtatgtgaaagattatgttcagaacatgttgaaacgtatatttggtgcttctagtcaaagagatttttccttcaattagaataagttttcaactaggtcacaactcatctacgtggtgattagtgaagtctgtcgagtaagtatttgctcagaatttcgctggtaactagagtaagtattttgattggttgcgtttctcgatgtgctcaggtcatgcttgtatgaatttcgaaatttggtgctggattctttgttccacttttgtttagagttgatggaaaggaattagatccagttaagtatgcagtctgtaagagaacaggttgtatgattacagtcacgtgtattgattggattagtatttatgttagagttctagaacatcccacatgcttatgaaaatgggagatattctgaaaacctggaaatacaagtgtccgtattctggtatttagctaccttgatgctggctgctacaatgctaatctttagagtaataccaaatgttagtatgtatacataagtagctttctcagtttattttataatttgaaccttgaattgcagaggaaggggaggggcatttaagtga

SEQ ID NO: 114461 - DNA, 806 bp, Physcomitrella patens
  Intron number 1 from transcript Pp1s9_238V6.1 (locus Pp1s9 _238V6) derived from phytozome v7.0 (chr-ID scaffold_9; po s 1699200 to 1700005)
caggctgctttgctcagagagttgttgaagcaaaggtcagattcttgcttccactttgtgatattgagtactcatctctcgtcggaatctcgtccatcgttcttgcctaaacaaccactgtagaaagacctcttatttcttcgctcctgcctatggtcagaatgtcttcaggcgactttttctggtattctatgtacttgatggatgtggtgctgattgcggtatctcattgtaacactataccctaatcggtttatgttcacaattttagcacttcgatgtgtgtgccacgaaagatattccgtatcgtcgaaattgaggacacggtggatatcttggttgcggaagcattggatattttcaaattttgttgctgcctttatactttaccgaatcaaattgttttattggatactctggttagaaccattatatcttgaaaatttagaatttttctcatcataatttcgacgtacactgcaaaatgcactgcagcacaagcgtacatcatcacttagttgggttccatttttagcgaaatcttttttctttaagtatgcagtgaaacgttaacatttgaccctcgtcaattttcggtgctctattttcctgtggttgaattattttgtggcgatgaatgggaagtcatagattcttcatttttgtccagaggacattagctctacttgtcttggccatgtgaatcgtttcacggaacctgatgatatacttgactctgcacgggctaattaatcagtgttgttcttgcaggccacaagctgtattggaaagatttgagaaaaggg

SEQ ID NO: 114462 - DNA, 552 bp, Physcomitrella patens
  Intron number 2 from transcript Pp1s221_62V6.1 (locus Pp1s 221_62V6) derived from phytozome v7.0 (chr-ID scaffold_221 ; pos 568784 to 569335 reverse strand)
attatcaagggcgttaagggtccacagtacaggaggtaaatgtataattttgcttctagtaacctcttaagtaagttcagaagtatgtgggtttgatgttgaggcgcagattttatgttcatcataccttccctgggctgaaaaaggaaaataaaagaaaatagatattgaagaaatgaatagaacacaaatgtagcacggacatttttttaagcactttttatctatacgcactgtgacatgcaggtggccaacctgatttaggatttcagttctctcgagaggcttttgattctctttagaccctgctaaccttagatttgtccttcgtcaactggacttttatgagacacgaaactcatttgtttaccctttacaccatgggaaaatacgttaaatacgtgtcaacaagtttcaagatgtctttagtgtatcccccggtccacgagtctccaaaccacttaagggctaatcatatctggtcagtacaatgacagcttccgattgaatgttgcagctcaaaggtgggcgacgaagaagaagcatttccga

SEQ ID NO: 114463 - DNA, 877 bp, Physcomitrella patens
  Intron number 2 from transcript Pp1s47_284V6.2 (locus Pp1s 47_284V6) derived from phytozome v7.0 (chr-ID scaffold_47; pos 1786414 to 1787290)
agccagctagcagccagctacattccacctctcaggtactagttgtgctcgaagtgtacaataccgacattagatcttgtctccgaggagaaaacgacctgcgtcaaatgtttatcatttttagatctttgacgtttcacaattctctgggtgatcaacattagtgctgactgagcagcgtcattgctttgtgctatgtcggacacaagctgcttcacgaagcatctgtgtagaagagttgctgaatattgctttccgcaatttttgcagttgtctgatgcgattgaactcttttctgaaccgtctattttgtcctcaaaacttggcaagggtcctcgttactactctctatcatgacgagttgggttgacgagaattattgagttggacatgcacgatgtaagcacttggtggcatctggtttgagcccgtagcgtctggatgaagtgtatctggttgagagtatatcctttaacaacataacaaaggtgcgaagacgagaagtttgaacgtatgcagaagatgcctggtcttgtgtaagttgttcttcatcaggctttgagctaccagttgttcatgctaattgcgttagagagcttctataatctgaagcaggcaatgggcaattggtttggtaagacttgatcataagatctgaattgctcgccttctcaacattaatcttcatttctccgccatcttttatccctccagacttcacgaaacaaacggtctatcgtcatgcacattccgaaacgcaagtcatcgtctgtagtctagtgacagttctctagatcctctcattcgtttatgctcgacatggtttctgtactgatagtcgctttaatgtgaatgtaggtaggtgaagagataatcc

SEQ ID NO: 114464 - DNA, 987 bp, Physcomitrella patens
  Intron number 2 from transcript Pp1s164_55V6.1 (locus Pp1s 164_55V6) derived from phytozome v7.0 (chr-ID scaffold_164 ; pos 311176 to 312162)
gaagtctggcgtactgaacaatttatattgcaaaggtaattcatgtattttgaacgacgaaggagaatatccgcgatcaggataataatttcttaagctttgaatatccagatatgacatgaactcttgaatggcaaatttttcggagcatgtaatttggtagaagcagcgttaacaaggagctgaatagggcctatctccgaagccttactgcacttgcccatctttcatatgtagttataaaataaaacgtttattaatcttagaaattccagtgtaaatcgaagcacgaatttacatgctcttcgttttgctttaaaacagtcttttcaaattttacatgagatggtttcaactagtgattttgtgacgtgaattcgaagatacaatttgatttcttttgctcgatgttctctgtccaggggtctctactccctacgcttggagggacattgcttgcttcggggttcgtctactttcaagggatcttgatataggagttactcgcttgtgaagttggagccttatctggttgtcatactaatgcaccaaagctgtcatttagagtagataacttcagaaggggtcacttcacaagttatgtttttcataactttatgtgttgattgttccagagcagtatttcatgaaccgcagtgagggctttccatacgcatcctctattcaccgtgcatagaactacgaagcactgccacaggcaaagttggacaaccttgtgcattgctttaaggagagttaaccatgtcgagaacattgaaggaatccaagggaagatgcgacaatgatgtcttgaagcctacctgcctcatgcaaagcgacgatgcagaaaacagatcggccaagagtcgagggactccgaaatgcctggtgtgtttttgaggaatcaagtcatgtttttatttttcatgactcatttgtcttcattgctgaccttaaagaaattttcccacgttgaaaacttgcatc

SEQ ID NO: 114465 - DNA, 536 bp, Physcomitrella patens
  Intron number 1 from transcript Pp1s15_168V6.1 (locus Pp1s 15_168V6) derived from phytozome v7.0 (chr-ID scaffold_15; pos 1075582 to 1076117)
gacagagacactagtttctttgcacgacctggtgattgttttacccttgcctattctgatgttgttatgtctttcattctcatggtggtatgccagctaaagtaatggttgcacagctaagtttaaagactatccttaggttgaatcccgattggtacttgcatcaggaaaaaaaataataagatttagaatctggttgtttcatgcacgctttttaatggccgtgaatgaagaaaatgacgagacctgatattaatgccagctagtcaatgattccgcaaatcaacaaccaattttcattgtcgttttctactctcggggcacactagttaactttagtatgttaggaatgttttgaggtgcatctgagcgtcaatcctgagttagtctatgcggttcttcataaaatgaagccatgtacttctccacagttcaaagatactacatcgatgactaagtttctacacgtgtctcttttttgtgttgttttttttttttttttttttttggttgtgtgtaggcgttactcggtcacc

SEQ ID NO: 114466 - DNA, 906 bp, Physcomitrella patens
  Intron number 1 from transcript Pp1s12_317V6.1 (locus Pp1s 12_317V6) derived from phytozome v7.0 (chr-ID scaffold_12; pos 2203420 to 2204325)
atcctgcaacaccaggagagcgggaggaagagagggtgggcatctttcacttacactcggtgaacagttacaggctctgtctcgtagagcccttcccctccacatgctattgtaatctgagagcctggttcgaaaaatggggggtctcttgattcccttatcatttgtactgacggtttctcatgttggatcactgtagacgcaaccaaggtggcgaactgctcgagactcagttgtgttatcactgttgctgtcgccccaactcagctcagttgttgttgttgttgctgtagattgttggtggtgggagccctgaagctgttgcggactcagtttgggggagtgtgtggaggacgtattagtgtactgttgctgtgaatgcttcgtgaagatttgaggttagatggggagtgattagtggagtgggtagcctgtcacatcggatttttcaaaaaaataaatgtcttgtgtctagttgttatcgagtgagtggaagagtgtttcggaatgcggtgcaaaacatgcaagattgcaaatgggtggatctgtgctttgctggtttctgtgtaggttgttcgtttgtagcttttgaattctgttcttgcggtgttcgatggtttggcgtgagagtgccagtgtgcagatgacgggcgtttgttgtaggaaaagtttttcagagtgtgtgtaaagtggattagtttgtgaaatggaggggcagtttcacacatgctgaagtgcgaggcttgtgaaggttgttgctttgctatattactcatcttgcattcaggaatggaggtttagtggattggcgggaacgctacttgacatccaagaatggtaatttgaatctagtttctgtcacgtgttacaggttcgtctgcacggtcgctagagattttcaagtct

SEQ ID NO: 114467 - DNA, 985 bp, Physcomitrella patens
  Intron number 1 from transcript Pp1s103_43V6.1 (locus Pp1s 103_43V6) derived from phytozome v7.0 (chr-ID scaffold_103 ; pos 411251 to 412235)
tttcaagagggcgccaggtgaatgtctttttccgtgccctccttaatattgcacctggaaaatgttgatgtgaattcaatattctgtacagtaggtttttgccaagttgttgcagtgaaatttggaagggttgacagtagtttttaagccataatgttacgtatgatgagttttaacgattactgtagtttgaagggactgaaattccattcgatcgtaaaatgaatacatgtttccgcatgttcttcgtcactgcagtagtaatgaggatatccgacttgcacaattttctgtcaaatggtaatcttgatttagtcttgctgctgggacaagttgaattactgatgagagttgcagtacatccgcagcgttgtacatgtcttcttctcttcgatttaatggaatttttagccaacgtcgtgagatgtgactcttgtctaggatcgatggatataatcctcgcaccatctcataaccatttattaattaaggtgtctacaaatggctttagtttattttgaacatgtcctgtttcgcaatggaattacttcctcctgtcacgtcctcatgccccggaaacttctcgaatcatcttttttctgcctattaggtctagctacatcgcctgtttttgagtcaatctatatggtccatagaagaattgctcttgcacgaactgtacgaagaaattggttcttgttagttgtgatcacttcgaaaatcaaaatatttctttattttccttaattgcttctcctttagttgagacacgccattcttgtggacttggttcttcagctcttggttgcagtatcatctttgaacatatcatgataccttaataatgaagagcttcatgttggaggcatttgggattcactgagggatgataggattgtatcagctgaaggctgttctgatatttttatgcttatttactattgaatcaggtgtctcttcgaggcgccagcgcaaaggagcaaac

SEQ ID NO: 114468 - DNA, 200 bp, Physcomitrella patens
  Intron number 2 from transcript Pp1s429_1V6.1 (locus Pp1s4 29_1V6) derived from phytozome v7.0 (chr-ID scaffold_429; pos 22358 to 22557 reverse strand)
cgacactttgacgtccaggtgatcgaatcgtgctttacatcttcttgcaactatttaaatctgtttgatctcatttggctttattaacagcacgtctagaatgtcagttttactcgttacgattgtcgaaaacaaaactttaatgggttgtccgctcttgtcttcttttttccagattataggaggagcagtgctgcata

SEQ ID NO: 114469 - DNA, 742 bp, Physcomitrella patens
  Intron number 1 from transcript Pp1s114_80V6.1 (locus Pp1s 114_80V6) derived from phytozome v7.0 (chr-ID scaffold_114 ; pos 453413 to 454154)
tattcctttgagcagcgtttcgtttattcttcaaggtgcgtcttcattttgcaggacatgaggttttggtagggattaatagccagctccaacgatggaggaggctctgaactctgtagtatggagtctgctattattaggttcatttgagatcatgattgggggaagggagagcctgtgcggtccctaaagtggtgtgattttgacgttacgagtgttgtttagagtcgttattgcgatttcagaaaagaattgggacgttttggcgacctcgattgaggtgattgggattgttggagggatttgttgttgaggtttgccgctttgggcgggaaccctatcacctagaataacgtagtgaacattcattcgctgcttgcccatagtattgggcactagagagttcgcgttagggttttgttgtccaagaggcaggcagttagcgcagaagagcggggatgacgatgtgttggaagggggcaagaatttgatctgttttcgattgtttgtatttgagtgtggacagcgtcgtgtttgttcttgcagttctggtcaatgttaatacagagagataggttgaagttgatatagaatctccaatgaatctgcttacagtaatgtgttggtgtgatgcatgacctcgttgtatttttagtacactccgtgttcgtcatgtctctcacagtgggaatgattgcaaattgcaggaagctagttcaattttgatcaatctaattcgatc

SEQ ID NO: 114470 - DNA, 456 bp, Physcomitrella patens
  Intron number 2 from transcript Pp1s47_277V6.1 (locus Pp1s 47_277V6) derived from phytozome v7.0 (chr-ID scaffold_47; pos 1742296 to 1742751 reverse strand)
caaccagcccgctcgcaagaaaagaagaagaacaggtacggccttacactcctttgaagcttgctgtaatggaactagtgcgtgagtttcatttgtttttttatttttgacctagggtgtctgcgtgtttaaggcgatccccgttgagtacctaagccctactttgtacgtagattcagatgttcgggaagagtcgttggaaaatggtacacgtgggttaggttgatcattgaagtgcatgatgacacgcttatagaatattgactgagttacaaggtccccagtgcgcctacaattgttgtaatgtgttggtgaacactaatcacaatttgcagttgtgaggcccatcttgccggattcagttaaaagaaagtaaaggtcacgaaaataatgtaccggattcggtggtatgtatacgcagcgcgccagaagaaatctgtcgctgttttccctcga

SEQ ID NO: 114471 - DNA, 472 bp, Physcomitrella patens; identical to SEQ ID NO: 113876
  Intron number 2 from transcript Pp1s4_491V6.1 (locus Pp1s4 _491V6) derived from phytozome v7.0 (chr-ID scaffold_4; po s 3937219 to 3937690 reverse strand)

SEQ ID NO: 114472 - DNA, 556 bp, Physcomitrella patens
  Intron number 2 from transcript Pp1s174_93V6.1 (locus Pp1s 174_93V6) derived from phytozome v7.0 (chr-ID scaffold_174 ; pos 670358 to 670913 reverse strand)
ctggtacagcggcagctgttgagaaactgacaaaggtttgtggctttttttggtgtttttgtttttgtttttgtgtcaagcgtactgagagtctttagttcttgcttagatgtttccagtgaatccactggttatcggtttcagcatatactccaaatttccttagtagaattatgggtttagaacgagaagaccaaaatgaagatctgatttacgtgtgcataatggttgtgttagtcaatcacattgtcaaggtcatcaaactttttatggaatgataattttttaaggcgttacaaggagaatgcgaaacatttttagaccttaccgtttggattcacattatttttttcacttcatccctggctgttgtgttcaaaataaacttgtttgctgctatgttgagtgtcagtgagtgcatatttagctattgccttattatttgtccaccattgaaggtaatattgggcctaatagagtttcgtgcatgagatccacacccacttcctattatttgtcctttatttgaatttttttcccttcacttttgacagga

SEQ ID NO: 114473 - DNA, 597 bp, Physcomitrella patens
  Intron number 1 from transcript Pp1s42_16V6.1 (locus Pp1s4 2_16V6) derived from phytozome v7.0 (chr-ID scaffold_42; p os 87839 to 88435 reverse strand)
gtcactaccagctcaaattttaccagcggtacatcgtacgtgcacttccctttgagtgcttattttcatggcggtctgaaggatgctgaggaataccacactctttgtttgttgattttatttatttatttatttttatttttattgatcaggagttagaagtttaggctctgcaagtgtttttgtgagggatcgagggtcaatcgaagaaaagttgcatagagaacacttattggctttgattgcatttattctattcgatgcttttcgtcttttcatgtagcatttcattttattttatatttattttaaatagaagacttgactacttgaagaatgtcgaggttggaaatttgaaaatataattatgaatgtgttgattagtttccaagcttttgtagtggtttttgattaatcaaagcacgttccaaggtccggggccatttttgacatgctatgtcaggcttctagttgataggatttcaaattttgggcgttgtaagtcgtatctacaatttgagcatcgcccaaggtaactgataagatttattcgctggtacaggatccagagcttgaagtggactctctttcaagcgt

SEQ ID NO: 114474 - DNA, 490 bp, Physcomitrella patens
  Intron number 3 from transcript Pp1s310_50V6.1 (locus Pp1s 310_50V6) derived from phytozome v7.0 (chr-ID scaffold_310 ; pos 399395 to 399884)
tctgagtttttgtcttcaggtgaagtgaacatacacagtttcattttcttactgtagtttcttttgatctcgacatagagttcatgaagcttaaaatgaccctagtcatcttttacttcgttgtttttcatctggggaagaggtatctggttgggctaatcgttttgaaatagtaccgaagcatttctctctggtacgctctcctcgattgatcgtgtgttgattcctctctatagtgcttgataagcgcctgggatgctgggaatgcttattaggggtcatgctaaatgtggtcatatttatgagatactgctgaagcatcacttttttctaacgccagattttatcattactctatgttgtgacaatatctctgatttcgtcgatgttgaactggcagttgcaacttttgtaaaaattttgtgcacctgcaataacgattatttgtagatgctattcaggtcagggacaaagtgctgttttaggtaat

SEQ ID NO: 114475 - DNA, 512 bp, Physcomitrella patens
  Intron number 1 from transcript Pp1s143_29V6.1 (locus Pp1s 143_29V6) derived from phytozome v7.0 (chr-ID scaffold_143 ; pos 212972 to 213483)
tggtggaacccgacggcaacacttatcgctcccaggtaacctccatgcccgggccttgcgtccattccttgggattctcaatgcacaacgttttaattcatttaactgcgcgctaatggtgtactcttgcaatcaatgaaagcagctctcgctaatgctcttagctagataaatttaagtccaaagcttcaaaatcttatttattcaatgcaaggggattaccccgtctgtgtcaaaaaggagaaaaagaaaagaaaagaaagaatcctacttttttgttaaagaatttgatagttgccctgaattagggctggtgaaggatacttcaagttgaatgagtagcgaccaagtagaataatcgtgattgatcatcaattattcagccaccagaccagaaatcttgctcttgtttgacttgattggatgtagtaattttctgcatctcaactatattcacattgatgtatcttgtttgtttcgttgtgttcaattgcagcatctcaaacgcgtcc

SEQ ID NO: 114476 - DNA, 511 bp, Physcomitrella patens
  Intron number 1 from transcript Pp1s64_199V6.4 (locus Pp1s 64_199V6) derived from phytozome v7.0 (chr-ID scaffold_64; pos 1645063 to 1645573 reverse strand)
cagctggagtttacgcagatctatccacaggcagggtaattatttttctcacactcgttctcttccccactttttggtttacatttttggcggactcgttgtgcccttctctagcgcatttcggtccatttatgcactagacacgtgcaactactctaattctcacaattttaaaatgtcagggatttgcttcacatgcttctgcggataataaactcacagtactacgaaagtattgtattcgtcgagaatcaacttatttctctcggctttgttgtttgtatgtttcttgaagcatccacatctaccaagtaggaagtatctcccttaatcaaactttccccttgtcagtaaatgcagtggaattcgtcagcaaagttcaaaatatgtcgagtattctgcaaagtcttcatgtgatgtgatggactttgataagttcggggagtttgataagtggatccctttttatttcccaattattatggcacactcattttgcattggcgtgcag

SEQ ID NO: 114477 - DNA, 635 bp, Physcomitrella patens
  Intron number 1 from transcript Pp1s89_179V6.1 (locus Pp1s 89_179V6) derived from phytozome v7.0 (chr-ID scaffold_89; pos 890829 to 891463 reverse strand)
tctctgagcttcttgcctcgccccatatcgccgaggtttgcgtctatcctctttactgatttgcatgaaccgttgtatttgagaattctgattacctcatctaagctgtgttttgttttgtttttatttttcatttttcatttttttttaactttttatttctagtttactgggatcattgaacctcagtgcatgtcctactgtctcgtggcgggagaagtttcgtttcgtgtatattttaggtttttgtttgtttttacgttttttgatcgtgcgttttggattataccctaattctgaagtaacctgggtcggatgcctgtcactcggtcagacagatatagatatggatgtatgtgtttatgagtgtatgtgatttagttgtgtgtcatggtttcttcttttgatctaaaaacgggaaatctttgtggagaaagtgacaaagggactgatattgattagctagcgaatcaggccttgtttcattatcttattatggttgcgcaactggagatatgtgacgcatgaatttgactgaatctttgaatatgtttgattgcctggaaatgatgagcattcttgctggttgtgattttgtagttaaagggaacggagcactctgcttctttggatct

SEQ ID NO: 114478 - DNA, 1044 bp, Physcomitrella patens
  Intron number 1 from transcript Pp1s197_70V6.2 (locus Pp1s 197_70V6) derived from phytozome v7.0 (chr-ID scaffold_197 ; pos 291875 to 292918 reverse strand)
tgggagctaatccaatcaaagctattctggacgtaagagcctcatcttcgatgaaagcgatcgtatcagggtccagactgggtcgcaattttgggccggatgggaagagcgtggcttgaactgtcttgattgtcttcgtccaagcttgtgtttgtgcaggtgctgcggattctgtcatggcggatcttttaatcacaatgtgagaaccagtctaattactacaaaggagcatgataaacatggagcgagaatcaagattcatcaaacaatacaagaatactaaaataattttaggatttcatatacttctcacgttgctgtgttgttagggttgattcttgattctgtgtggagttggcgacctcctgagcacgaatctagtttctcctagtatcctactatagtgatcagagaaaaaaaaactaattgcgcgcttggggggcccttgcgggtgcccctagggtgtttcctctcctccatggagcggccacgttttgcggagcgtacaacacaatgatctcgtatggaagtcattttatacttctttgtaacacaaatgtgtttcattagatataaacagtacataagcataaacttcttgacataaaacatgtaaaaataaactgttcaaattttagtggaagagcttatgcaaaaactatttattgccatgagatattctacttaacacgaaagggcttcgactcaccgactattccctgatgataagcaaattcgacgaaaagtacgcgttcttacaacgatgacggagcgaaatgacgaaatttgagttctcgtccaccttgcccccgaagtcgaaacctaatcgcagttttttggtgatgcggatgtgagcttggaagcttcgaggctgcaagtgtgattcgagctgttccaccaattcttgcttgaagacctgcttctcggcaaattgtgtcgagtctatgtgaggattaggcagtgaagtaagctttggctgagattttgggtttgggattggcaagtacagggggaagttttccgaagtggcgttagagctgtaat

SEQ ID NO: 114479 - DNA, 316 bp, Physcomitrella patens
  Intron number 2 from transcript Pp1s12_415V6.1 (locus Pp1s 12_415V6) derived from phytozome v7.0 (chr-ID scaffold_12; pos 2880054 to 2880369 reverse strand)
tgtcaagacggaagaagttcccgctacaggaactagtgagttgccacaaatcattgaattgttaattttttttctttttatttttttatttttattctgtttcgaaatcattgtttatacattatatatgtggagtagatctcagtgagctgtgatcttattatttgcttcagcagagtcgatctttgaatcttcagtttgcatgcaggttaaattcatcggtgaatgtgatagatggattgtatgaatttgtgtataacacggccgtttgtgatcactcgttttgacctttatttttttcttatttccaggtcct

SEQ ID NO: 114480 - DNA, 819 bp, Physcomitrella patens
  Intron number 1 from transcript Pp1s317_48V6.3 (locus Pp1s 317_48V6) derived from phytozome v7.0 (chr-ID scaffold_317 ; pos 330545 to 331363)
gctcgcggcctgcgctcgccgttgccaatcggcaggtaatccgagctcgtgtccgtcgccattcgagccgccttgccagcccaatacgctctttttcttggaatttgtgccgggatgttgtgtttttttggttcggtcgtgctggctctgcttcttgcctcgtgtgcggcggttcgttagaatggtggtctggttgtactgcgagagtttgcgaggcgcagttttgtagagcttcagtaccatccgcttgaggttttcttgatgcgggcttctattttgtttttattgtttttattgtttgtttttttaatattttttaggtgaattaggagaggtagatatgattagagatcgctgcggatgtatcatgcggcttcagtgtcgggtcgtaggcgttctatgtcttgcgctcgaccctgtgagctgcatgaaagggcatgtattgtcgtcttcgagatgcgttattttatttatttatattttattttctcttggctgttcgttggagctcgaaagcatggctctacacgctcttgcattagtcgatgggcgcggatatgcagcgagaaggaattgtcacctgtcattttccgggcgttgaacatatgtgttttgctagattgattggaggtgttgagaccgtcactccttccttctcatctttgacttcgctacattttatgtccgtagtggaatgctacggtcgtattccagctaggaaagttgtgttaatttgttgcttcatgctgcaggtctgacatttaaattcttgtttatgtggcagatcagggtcttggttgggcccaaagttttatttta

SEQ ID NO: 114481 - DNA, 406 bp, Physcomitrella patens
  Intron number 1 from transcript Pp1s166_52V6.1 (locus Pp1s 166_52V6) derived from phytozome v7.0 (chr-ID scaffold_166 ; pos 359501 to 359906)
caggttatcaaactcgcccatcgtaagcactacctcccttttcgtgtgcgccaatgcaacttagtttcagttttccactttaattctttgaatttgatctagcaaaaaacagaagcctctagttttcataggcacagccgtgcaatttgctaggttcctgactagcgattctcatcaagaagcacctcacttcgaaaaaaaatccattctcttatattgaaagtatttcttcattatcgaccgacgagtgtttcacttaaaacttgcgttagaaagaaaaataaatgtgactttttagtctacgtctttgcttctttgttcaaattattggagtcctcgtcactgccaggatccgaccaagttctgtttacgtgcctcaggagaaaagagtttgagttctacgaca

SEQ ID NO: 114482 - DNA, 696 bp, Physcomitrella patens
  Intron number 1 from transcript Pp1s56_143V6.1 (locus Pp1s 56_143V6) derived from phytozome v7.0 (chr-ID scaffold_56; pos 983234 to 983929)
atccaaaccgagagctttggcgtgggaacaaccaggtaagcctaatgagggcaaagatatcccggtggcagcgccactgcattctgtgtttcgaaattggaccaattctaaggggttgtgttcttgattcatgctttcaaattctgttggacaagggaaccacgaggaaaatccgccgccaggaatgtgctcatctgtgggggttcaggagtgtacctttcgtggtcgcctttgcccaaccaatttggttacctcaggttggtcagactttaagagtggacgtataaaccataggggcggattacagtaatgatttatatctagttgtcactgaggaaagaaactgaagtgatcgtttgaatcgctaaccgtagttttatgtttagttttcagaagtttatatttcgtcattaaacattttgatgtagacaaccgtgtttaacattgcattgtcaagggcttttatatacgcatatatatatatatatatatatatatatatcatagctctgtcgttagtgtatctacgtattgcttagacgttacatgtttacatcggcagcgtgtagtagaatagttctgctttttttgtgcagctgaaaacaaatgagttcatcaacttgctgtctccgtcataattctattttctcttcttttgtaggacttgcagagaaaagttagatacgcttctgcgga

SEQ ID NO: 114483 - DNA, 1000 bp, Physcomitrella patens
  Intron number 1 from transcript Pp1s72_280V6.1 (locus Pp1s 72_280V6) derived from phytozome v7.0 (chr-ID scaffold_72; pos 1354311 to 1355310)
tccaagcggagcaaggtctgtcgatctctgcacccttgcgccccgattttgagctcgtttttgctggcattgtgtcatcttttcgagtgaaccttggagattgttgagtttgttttactccgtttgatatttccaggttagtggcaggcacgtgccttgcattctaagttgatgcatgatgtaccgccgtctttcccttgtagagagtgtagaagcgtgtgtaaaatctgtccatcatggagaggtgaaactagaaacggtagtgatcaacctctggtattagtgtcggatactacaccctctggccgtggtcgcgtaagatgtgtaaaggtcgcacactttcactcttctaaatcttgatctgcacatctgaagaccttattctgtcgctccatcggcaccctaatgctggataagcattccgggaacagcattgtctaatgggtgggaatggcattacgagaccacacgttattttgcgtaaaatttgactgtagaaagttttgatggtctttacagggcactgggaagtgggctttaggttgtcgaattatgttttttagttccaaccggctctgacagggtgggcttcaaagtaggtaggagttctgcatggagagttttgacttcatagtgaccccttcattatgggtaacgaatcagcaatgatttgcgggttgcatcgttctcatataatcggactaagtattttaggggcctgctcgtcgtccactgacgggctgttgttttcctacaaatcgtttagaagaagagtatcaagaaataccagcgcgtcctctaggtaccaactgcacgtaagctagtggtgtgtgagcgaggaacgtaggattggcaagtgttatttttgtgtgttaacaataatggccttccttgagaggggattacaagactgcaatgtgactgcatcttctggtgtacgatgagattgcatttcctgatcctcaatgttttttcttcttcctacaggccgcaccgacgt

SEQ ID NO: 114484 - DNA, 518 bp, Physcomitrella patens
  Intron number 2 from transcript Pp1s139_72V6.2 (locus Pp1s 139_72V6) derived from phytozome v7.0 (chr-ID scaffold_139 ; pos 608312 to 608829 reverse strand)
ggtatgatcgtgttctctagtttctacaaaattgtaatagaattgtccaggttaggtatatgtcagggttaaacctgatgacatttttatttttatttctaatgtggtgaaaaacttttctctttatgggtttgaattacatttgattgacaatcttcagggttatcacttcaacttatagttagtaatcgccgttcacagtttaaaaagctactgttataaggttcctgggaaaagacttactcttggaatcttttgttgttgatcatagccgtcacagatggtctgtacttattacttattgatattggtgcttgtaaaatgtagttgatagaaatgaatgtatcggtagaggttcatagctggcacttgtgcgaggttaataagtttgctagcattcttgtcaactcacgtttctgcaaattcggtcctgttctgtgttttcaaggaggattaacgcttgttttttcgagaaattttcaggttcttgtttctctttttggagaactttggcgtta

SEQ ID NO: 114485 - DNA, 911 bp, Physcomitrella patens
  Intron number 1 from transcript Pp1s15_475V6.1 (locus Pp1s 15_475V6) derived from phytozome v7.0 (chr-ID scaffold_15; pos 2778149 to 2779059 reverse strand)
agcactcctgcagcactctccggggtgaggatttttctttttttaaataaaaaaagaaattaataggggttttgatcgtttgtagtctttcatttgacttagttttgtgggttggacgtggattgccttctttgcgatgatcccctcgtcgatctgctgattaggggttgctctgctctacactttgcctcattatggggttataagctgcatgtcttgtcctgtgttactgttcttacttacaaaaatcgcgctatgtaatgatatggggttttcgttgcggagtggctgaagcttccgaaatcctcatcggagctgggtttttccagctggttttggttaatcctggaacattagagtagaatctggtggacccatttgtcccagcgggtctgtttccaaacatggtttagtcgatgttgattgtttttcctaaatgttatccatcagaattgtgtaactccagccagaggtccacgttatgaacgcatggcgtcattgctcagctaggttgtttaatatatgattttcacttgctgatcaagttcttgaaggcttggaatgtgtgaggcagactccaaactcaggaattttaagttgtaaattgcataggtttggtttctcatgttagtggtaaatgccggatctgaacggattaggattgaaagagttttcaggcaactctccgaattgttaaggaagtggaacaatgaccatcactggaatatctctgattggcgaatcttatcaatgctttcgttttcttgctcaaagattaggtattctccttgatgctgtggtctttcactttgtcttgatcgcatgcattagtttcaatgaagtctgatgaaagattttcctgtctcctttgtacaggttgggggcctttactcaggttttactcgactttc

SEQ ID NO: 114486 - DNA, 766 bp, Physcomitrella patens
  Intron number 1 from transcript Pp1s109_234V6.1 (locus Pp1 s109_234V6) derived from phytozome v7.0 (chr-ID scaffold_1 09; pos 1234753 to 1235518 reverse strand)
cacaacaaggtgcgatcttctgaggcttatcattgcttattttttttccactcgcttggttgtttcaacttattctctaggatagttggtagggtttcaatatgcgcaaatcaaaaacctcgtttaggattttggtttctcacagaagtaccgcttatgtctttttagggtcacttcagtctcagtaggagaatttttattgattgtgctctgaaattagattccaattgttgcaatctttcaaagcattttgtttcatgatcaaccataaattgagggtttattaaattagggttttatttgccttcgacgtgaacagttaaacgtatacagacggttccttttttggaatctattagttattcgctagtataattcgggcgtggaatgcctttctgtgtgattctttgtatagttgtctgatcaacttcgaaccatttcatccagtgataagtcctgaatggttcccgtagacttaatttcttagctatttctcttgttaccaccttgtagcaatcttcgacggttttttaaattgaatatctgtttctcaacaatgccattgtttgagttgttgagtagtctttaaatgtatgatacgcgccttgatacgtccttgattttggccagcttgcgtcaagttagagtaactgattagtcctggcggtcacgaacatggtttgagttatcaccagatcatgggaaacttgtccaaacgattttctttgtcttgtgcaggtcctttcagttgtgggattgctgcaag

SEQ ID NO: 114487 - DNA, 672 bp, Physcomitrella patens
  Intron number 1 from transcript Pp1s30_353V6.1 (locus Pp1s 30_353V6) derived from phytozome v7.0 (chr-ID scaffold_30; pos 2400249 to 2400920 reverse strand)
gtcttaggggttcatcacgtgaagtttgcgttcaggtattctttagtgacgcaattcgagttttaattggcaagattttgattctgatgctgtggagcagttttgcgtttcggttccggagtgctgagtgtgcttctttattctttgcttctatttgtagatgattatttgcgggaattctttgatgaatgcttgagatgattgcgggttctgattgttgagcattggtgctgcctgtggaagttgtccatgtgcaatgtagtgatgagcagtttctgcacattagggttttaaggtcctcagacattccggccttgccttggcgttccttattgtatttgaggctctggttacgcagaatcgtgcttttggttggttccggagcattgtaaacgtggtaacaaatatgctggttacattggacactgaattttttccgaggctgtgtgttctaagtattcgaattgcttggactattttgtctcaatagtatacgacatgaataataaccttctgaaaagatgcccggactttcttaggtcccttttcttgaccacacatagctcgaggtcactggtcttattagtaattatttggctgtgctggtcactaatgctaagtttgcatgatgttgcagtggacttcccgtgaacgtaatttttaaacaataaa

SEQ ID NO: 114488 - DNA, 511 bp, Physcomitrella patens
  Intron number 1 from transcript Pp1s116_30V6.1 (locus Pp1s 116_30V6) derived from phytozome v7.0 (chr-ID scaffold_116 ; pos 190348 to 190858 reverse strand)
tctgccacgcttgcagaacaacaccattcctccaagtgagtcgtaaattctctccatcttttaagtatggattgtattattctttactctctctctcttttttcttttttttttgttttttttttttttgttttctagatatgtggggctcacagcacaactcaggacgtcgccgatctagttctttcagatgcttcttctactgattgtcggtaaagtagagcatctgctgagtcctgctcttaaattattttctgtctattcaaatcatcaaactgttttgagtgcacccagatctcttccttttctgacgattttgggaactcaggaagtgttgtgggtggactgctctggttttcgtttgtttgatacgtatgctatcattcaagttgtgatagttattgcttgtcatctttaatgagctgaagcttggcaagtgattctaaatttcaaatgctcattttgttctgtttcaggggtgttggaacagttcttgagccaatactttgag

SEQ ID NO: 114489 - DNA, 1037 bp, Physcomitrella patens
  Intron number 2 from transcript Pp1s58_203V6.1 (locus Pp1s 58_203V6) derived from phytozome v7.0 (chr-ID scaffold_58; pos 1205740 to 1206776)
tcaccactgtgctgggtctggattggcactggtgagtgtccctcgttcaattctagggtgatcgtgcttctgtcttattcttgaggatgaatgtcgggatttctgatggttaaccactaagttagcgtactcgatctagcgcaatagctcctgtctaattgaaacgtttgaacagccattttgtttcattcatgctcacaaaatgctaagtttactcgtagaatgtgattagataagattctgtctttcccgaagtgagctagactagttctcttctcgttgttccaatggtacttcgttgtaaatgcgttcgtaagcgagaatgttgatgctagatctagagtacctcgccacgcactcgtcttcttttcctttttccctttgatcttttttccaaccgaatgccagtaccggtgcttgggataattagaagattacagattgtggaggatgttactgttggttatcgaacagttaagtttgttgaatgtggcctggggctacttctatcagcatttaccagatttcaccattgctctacttgttagtttttgcatgtggacactctcgttaggatttcaagggttgatattcaagatgcaatggtggttctttatttcttcatgcaatcaactatttcctgctgcatgaagcaaagtctgtcggaagaattgagctagtcttggcgttgtaatgttccttagcttgactttctgctgataacttaatcaaccgggtgttgtaggcttacttcctgttcattctgcacgactttaagttgaaagaaatatccaagactttgcttattgagatcgataaactattttttaggaaactcgaattgagctggtggtatcaatctgccatcagtttgcacacgaaggaagactagtttgcaatgcggaagagtggtttggggaatgttttgagttctgtgaagttgtagtcacaaaacgaggtcaacaatatcaactctgacacccggtcaacttgatttgttccatcaggagtactgcgccgcttcccgactctggaca

SEQ ID NO: 114490 - DNA, 599 bp, Physcomitrella patens
  Intron number 1 from transcript Pp1s106_19V6.1 (locus Pp1s 106_19V6) derived from phytozome v7.0 (chr-ID scaffold_106 ; pos 129687 to 130285)
agaaggttgttacacattcttcacctacaaacgttcctatcaaagaacttactctgaaatttaaaatcatttctaatcacttgagcatggttatgaggtcccccccctgctttctagctgactcttaaatcttccagaagtatcaaaaaatgttagcccttcattctattttgatcccgctggttggagtaattgaaacaaagttggtttgactgctgaggtgtcgttcaatcgcttcttattgttactgcagctgcaccttggttgttcaatcgtttcttgtgtcggagctctcacctgaaacctctgcattaatgtcttgaagtttattttcagcatgaagaagggggctttctcaccacagctaccatattctctcggtgctttctttgagtagaatttgaagtgtaacgatcactagcaaacgtgggttacgagagatctttaaggcaaaggcgaggggatactggacactgtttgatttcaggagcaagagaggctcagcggtttccaaagctttttcgaagtgcctgaaagccaaagctgtctaattttaatgcaattgtcatttcatgtttggagtttgtgtcatcttgtag

SEQ ID NO: 114491 - DNA, 875 bp, Physcomitrella patens
  Intron number 1 from transcript Pp1s155_48V6.1 (locus Pp1s 155_48V6) derived from phytozome v7.0 (chr-ID scaffold_155 ; pos 390788 to 391662)
cggctccccattcagcagattttcgtactggccatgtgagtgataatcccatctagccgacatggtgtgtttccttgctctggacgtgatactaaatgtgcgtagctgaaattcagggaacttgtgtgttgcttatgcttcgatacaaacgactggctcgaaagaatctgtgaaaatggctgacaccgagtgttccgtagcagacgaatctggtagtggtggtggtgatgacgatctctatctctcgcgcccgctctacctaaatcgtagtttgccaagggttcctcgttaatttgttaaatcgatcggttgcctgaacttgatctgaaggcgtctcaggattgttgtcgttatctagtcaacgagcccgtcgctatcagtgttgtctaattgctgataaccgacacatcattcaactcaaagtgtgtccggatcttacacgtgatgtggttatttatgtatttgttttagttatttgttatttgttatagttgttccagaagaacaacagtgtcctacatttcttttgatgactcaggcattctatcatcctatctcagtggctatccctccaaatgtttaggactccagaagttgaagtgtagtcccggctctgagttcctcctcctgaatttgaagcagtggtagatttctagttctccctcagcaagacgaaatccttccagcgaaaagaattccgtaatgattggcaaacgctggttgctcgttttttaagcgaataggtagggccgacccaatgccattcccaagcaagctgcagtaaacagcttggattcttcggaaagaattgtacattgggaaatttgtgtgttcctaacttagctctattctatgcaggagtatatattttgcgc

SEQ ID NO: 114492 - DNA, 840 bp, Physcomitrella patens
  Intron number 1 from transcript Pp1s283_20V6.1 (locus Pp1s 283_20V6) derived from phytozome v7.0 (chr-ID scaffold_283 ; pos 74389 to 75228 reverse strand)
atcagcgtctcctccgagagctccttctccaagaggtgcgccaatccgtccccgtccttcgttccttcttagcattccctctagctcttgtattttcatgtgcatcttcattttgtatgagataatttctgcgctctcatcaagtgacacacaagcgttccaataacatcgtaactatcttgttccttactctaacacgtcgagtaatttatcactgttcatttggctactgagatatggcttttttaagaaataatttttttcacttcagctgggaaaaaactgatttttccctcaacgtgtcatcttcaaaagaagataaatgcaattcgaatgactaattcgggcttcttgtgaactagatttcaaaattcatggactatgtagtctttatcatgactataggcttttcaacagagtttttcacagggtgccaggacattgtctatccgtcatacgcacacttgtatctctcatggcaacctagaatttttcggcgttttaatgtacgggtttgcgacaatctgtagggcttggaaggaaccctgatcaatacacgtgtacctcaatgcatgttgatagcggattccagaacaatggaagatctctggcactgaagttagtgcggtttgggttgtttgatatgactttcgcactagattcaggcactatggatcccctctgtatcgacctcttgattctggatcaatagttagaaatctgtgtcataggaaggtaagagttccgatgtctaaggaggtttcatatttctcatgacgtaccatctcgggcgtggagcttgcaggtacttgaaatatttgacgaagaagtacttgaaga

SEQ ID NO: 114493 - DNA, 831 bp, Physcomitrella patens
  Intron number 2 from transcript Pp1s42_94V6.1 (locus Pp1s4 2_94V6) derived from phytozome v7.0 (chr-ID scaffold_42; p os 743166 to 743996)
gcggcagcgaggctttgtgatcacattgcatctaggtgagtccgtcacccatctgctaagatcccaagtaccttcagttggctcgtcatgattaattggagaatagtcgtgtagctctggaataggtgactgcactcatcttttagaaaacaaacaaatgcttgacagttcgtctgtggcattgagttggacataacccccgcatagtcttatggtggaatctttgcactttcttcaatgctgctgtagccattctagtatcatttcaaaatgaaagctaagtcctcgagatggattttcaagataacgtggattagtacctttgttgatttcggagtagccttgggcagtcttgaagggatgctgttctcttgcggctttggtctaggaaaagttaggtgaaggtggttgttgatactggatgagcatacgagacctaaagttgtctgttatcctcaaattcaatgcgttgattgtcttattgttctctttgggtgtataattaatttcctagtctcgtgttttgcttccattttcctccttagaagctgttgcacaaaagttttcatatgttgtggggcttgaaaagattcaatgatgctataaagcctacaaaagagaagacttggtgggtgattgttagagatgctgaatcttttgtgttattcaatgaagtacaaggatacttgaaccgaatgctggatacttcattaggtggtatagaggaagggaagaattccaactggatcacgctgtataatggctgattggatacgctcattgcctccctgtgcagattgtacagcatagattcgaatttaatttagaata

SEQ ID NO: 114494 - DNA, 1016 bp, Physcomitrella patens
  Intron number 1 from transcript Pp1s79_62V6.1 (locus Pp1s7 9_62V6) derived from phytozome v7.0 (chr-ID scaffold_79; p os 370697 to 371712 reverse strand)
gcgggaagttttcatagctcttgcgtttaggaaaggtaaggggaggcgagtgatttgcaaggagattgtgagtgggggaggaggggggtaattttgtggagtttgtgagattgcacaccagcattgtgtgctggttgcgtcttgggtgcaatttcttggacgagggtttgtaatctttgtgtttggttggcgttctctttgtgacgcatttcgcgtggggtgcatccaatttggggttgcgaggttgttggggttcgattcctgaacggaatttggtttagatgcattttattgcggtgtagtgattggtgattcgaagttgatttcatttttagaggcagtagtttttaaatgctggagatcggcatagcgattagacttggtggttgaggagtgcttcacttagaaaaaaacgtgtagtatttgagtacttcttgcgattgtatctttcagtgcctgtagatatgttgtagcggaagaaaccacacaatggcgtttcgatcgatattctaatgtcggcttaagttttgaattttctatgtttgtcagtatatttacttttgagaatatatatatatatatatatatatatatatatatcgaattactgataaatttgttgagtgagaaagattgcaacgttctacatttgagtgtggcttcgaaatctggttcgaaagtaaatatggttcacgtgagcactgcacgagctaattataagtttgcagtatctttaatttgaatcttctcgactagagtgacggaggtgacttattgcagggtttttgttgtgtcgctgcaaacctagaactgattttctgaagttgtcatcggaatttcagactatgatttgccaactagtgcagcttatgattgaattataggctttgtgacttcgttatcgaaataactaatccgacgtcttcagatgctttgtcacggcatcattcccattgacattattccaacacaataagattaattagtgtaatgtgcgagctcaggtttacaggaac

SEQ ID NO: 114495 - DNA, 472 bp, Physcomitrella patens
  Intron number 1 from transcript Pp1s123_163V6.1 (locus Pp1 s123_163V6) derived from phytozome v7.0 (chr-ID scaffold_1 23; pos 1202824 to 1203295 reverse strand)
cttgtagcctctcaactatttccaccaatcacaaggtgagagtggtccaatcaaatgcatatgtaaggcaaccatatgtaagataactattatgatggtatgatgtgtttcctttgatctggtggttgaagttgaatcggcatcatactatgtaattacaaagcattaaccaccacaattagcgactgctgtgttcttgttggtttactttattttacatagaataatttcatgctgtaacttgcggttgttgaggttgagacataatattttgtggtcctattgaagacattttgtgtgctctgatgtctgcattgtttctcctacatatagtaactacgtaagatgttccagggttattgtgcctgaaaccacatacatatttattttgccggaaaaaatccgtgagaagagtgtatacaagtaatttttttcagagattttcattgctttgttcaaatgttgcaggacg

SEQ ID NO: 114496 - DNA, 355 bp, Physcomitrella patens
  Intron number 3 from transcript Pp1s51_46V6.1 (locus Pp1s5 1_46V6) derived from phytozome v7.0 (chr-ID scaffold_51; p os 319336 to 319690 reverse strand)
taattggtaagcaacttgctctcgacattgatccagacatttgcacttctaccgcttgatggaatctttcgtataggatactttatgttcgctcgattaccaaattactcttgatatttttctgtgccaatgtctgttatggatttatacccaagtttcttgtcttgcttttaataatcatgttttaaagttgtttgcttctcaagttaaagaatgatcggtttgagcttgcaactccttcaggttagtgaatcgctctgacaatgcttcacttggattccttgttttgagtctcattttgtttcgtatttcttgcacagaacatcacgaggaatctcccacagaggagccgtcg

SEQ ID NO: 114497 - DNA, 1033 bp, Physcomitrella patens
  Intron number 1 from transcript Pp1s136_176V6.1 (locus Pp1 s136_176V6) derived from phytozome v7.0 (chr-ID scaffold_1 36; pos 914217 to 915249)
tccactctcgaaattgaagcacgcgagtaagtgtcccgttgtgctgcacttttggattgtgctcgattttttgtttcattcgcgtgcttgtgtttgctggttcagattgaaagtagctatggtcgttgacttgtcgtctgaattgcattagtttcctttttgaaaaaaaatcgttaaagtttttgctggcgtttttttgatgaagtattgcttttagagatgcgcgtcgaggcgtattggtatgaaaatagtccaattgtcactgcattggcgtttaagtggtcttgattgtcgtaagttaatgagtgtgagtacgaattagtaattcggaaaaatgcgccgtgggcatggacctttggttatttcaagtcgcacttgtacctatcagtctagatttcagttttatattagatatagcaatcaatcaacactttgctatcaagatgctattatgttatcgtcttcaagctgattaatgggtagtctgttaattattggagagacttgaagctagccaccttaaaatttgattttcttattgaattcagcgtgattgcaatgttcgatgttacttgcagacagctggttcttagttctctttttagattcgtttgaaattgtgcaaagtttatgtcgtttgaggtctgtgttttaatgttatatactccaagcttgtcgtgtccatcacgtggataccatcctgaataatgaagagagcctggcataatccgtttcacccctagatgagaaaaaatgtcttagacatgtaagagagttcatttctggttgtgtaatggggattcaatcgggctgtgttgcctctttgaaaatatgtgtcatgtgacaatgggagatgtccagaaattatattttggagcatgttaatatgctgtatttatcaggtcttttagttttggaagtgctcagattgatgagagcttttaacagatttcatttgacctcagtgttcaccgaaggcttttgttggagttgtgcagtgtcattaaaatagtgctgcagttctgtaaggaga

SEQ ID NO: 114498 - DNA, 966 bp, Physcomitrella patens
  Intron number 1 from transcript Pp1s12_247V6.1 (locus Pp1s 12_247V6) derived from phytozome v7.0 (chr-ID scaffold_12; pos 1464785 to 1465750)
gctgacgttgtggaaatcaagctgccctcacacaggtgggtacgaactcttacaccaatgtgtgaatactcaaagaaggtgagctaatttctggtattgatcacatgaatctggacgtgcacagttgaatgaggcctctcagaatttcattgcccttctgatcgttatgcaccatcatttttaaacgagcatcgtgtttgtgggagatctgatactttctgaattagatactactctagggctggtggaggtgggtgaaggtaaaggacattcgtttatgcatcgccagaaagtttttgatagcactttgttccacctttatcggcatcattcaacttccttatagcgtatgagacgttatagacattttcacaatttcctcggaagcaacaatttcagttgtttcactgcagctcctgctgagatacttgctctgcagcttgttacactcccaatcaccttaaacctagaaagaaatcttcgaattacataaatgctagctgcaaggccttcggatacgtatatttgaagtgttgtgattttaaatatggatttgatcggacggacgaatcagagtggtcactgacaaggttgtaggtgaccaggtacaagtagtttagtgtattttgagaacatttttataacagctggtgtaggttggaatccctaactcaattttctgacacagtatggttaccctgtctgcacggtttgttgatgattgacattcgcaagtgcgcgaatcgccctcgtcgcccattaattgctcatccaaaaacttgagattcgatatttgttagcatggtttatgttaagctgcgactaacgacgtgctataacagcgtgctacgatagatggttcaaaagtgagggcagtttcatgttcagagtattgtgtctttgattaagtggtattcgtctttcattgcaggcattttggtgccaaccccttatcacgttgggttg

SEQ ID NO: 114499 - DNA, 449 bp, Physcomitrella patens
  Intron number 2 from transcript Pp1s201_15V6.1 (locus Pp1s 201_15V6) derived from phytozome v7.0 (chr-ID scaffold_201 ; pos 84390 to 84838)
attcgggctcaagccgtggacaacgagcttgcctcgtacgtgctcactcccgcatttcattttccgaccttctccgttttttgataactcgacatcgaatttctccgtatgtgatacaccgagctatgtatgatcttgtatacttcttcgcaaatacctttaatggttttaaggctccggaagcatgaacttgcaagtattatacctggcttgggttttaggtttaggagggatccggctcttgacaaatattagtatagttcccaagaggatgtctttctatggaaacttatttcgaaatgttgagatatgcaattgagtgcaatttgtttctagtttagaattttagatgagtgtgaactcaaaggaggtttgttcttactttgaaaccaattctctctttggctgttgcagtgaggagccttcaggttctggtgctccccaggttg

SEQ ID NO: 114500 - DNA, 585 bp, Physcomitrella patens
  Intron number 2 from transcript Pp1s199_158V6.1 (locus Pp1 s199_158V6) derived from phytozome v7.0 (chr-ID scaffold_1 99; pos 838223 to 838807)
agttttcattggatttgaaaaggtacattcttttgattaattcactagttccaaccttgtgtgtgagaaggacgtcgatgacttttcgacctctaaggaagtcgaaatgagctttagttttactaagtattggggcttagtagtcgtacaaacttccctttttttatttttcattattcgcttttgtttgtttgtttgttactttggtttagatgctggagcattttgaattgtgtttgctgatgttgtcgattggacgggattgaattggaatcgcatcagttttctgtaatagctggacgggaagcactgattgttttgcgggcattaaattattggacgcaatttataggaaaatgtttttggtggtggatcttcgttcatttaaaaacaaggcgctacattagcagacccgaatttgttgacagaaaaatattttctttggtgtgaaggccgtttctgccgaagtatcgttcagtcctatttcattgacgtgaatgcttaattacatgggctaaactcgtcaggacactgtaatgtccgcacttaacgtacatttggttgccattatgcagggagttgaag

SEQ ID NO: 114501 - DNA, 1043 bp, Physcomitrella patens
  Intron number 1 from transcript Pp1s24_194V6.1 (locus Pp1s 24_194V6) derived from phytozome v7.0 (chr-ID scaffold_24; pos 1946573 to 1947615 reverse strand)
cctccatcgccgcttgttctgatcacaaacactcggtgcgtttctcgctcgcacttgcattcgcatgcggtctcttacgcttcgctttgtgctctgtctcagccgcgttgggcttctctttgctcttcgcgtctctttctgtagctagaatgagttttctcatgagattgcgtttgctagtacagccttgactgtggaacggtttcagagtcgctcgggaagttttttttttttttgttcgctttggtcgagagtccttttcggcttttagaatgctgtggatttcgtcgagctgtggccgtgagaaatttggcgctagattgcggaagtttttggttgagtttgaagttgaattgagttgcgtttcggtatattttggacatttttgtgatgattttgtttgcgttcctgcacgtgccatgaatgtttgcaaggaagatcggttcctctttggaaaaataagttttagcttgcgtctggagtaatgcgcttctaggtttggttgacattgaaatctctcagcgcctggctggaaactgacttctccattcctttatattattactgcggtctaatcagcgcggtgcaatttagtagcattcctctatcctttcagattctcctgctccagtcatctccttttcactttcttgcagccctgaaaatttataatatattttattttttgttctgtcatcgggcgaaatttcttgtctaaaacgatgagatgaattcaaaatgcacatgaactagtaatggaccagtttaagtattgattgttgtgcggatcttttcagcttgcattcactgatcttcatgcagttctgtatctaatccaaatttagagtactattaataacatggagcggtatcgcccttgatgtctcatgttgcattataaaaccagtgtgagcaagagagtcctaatttcgtgcgtatttacaatcaccaatagacaatttcctatatctatctttttttacatatcattttcttgctgtgatacagaacttgtgggcgcggaggaagggcgtggagcgcat

SEQ ID NO: 114502 - DNA, 818 bp, Physcomitrella patens
  Intron number 1 from transcript Pp1s101_119V6.1 (locus Pp1 s101_119V6) derived from phytozome v7.0 (chr-ID scaffold_1 01; pos 558072 to 558889)
tggtaatctcaaggtgcggtgtagttcttcctcgccgaactgcaggcttcctgttcttcgattcgaaggaacgagattcttgtgactgttgtggcgagtttgcgtttgattttgtagtttttgagtctgtgaaattgtttgggtttcaattggagtgtgttcgagattattgataattttcgggggagcgggggaggaagtggagcatgagttcgatgcgttgcaagatttagtggtggttttcattcacaggatggatgtgttccaaagtgaggttgtagggatagcagcaaaggttgtttcgagaggttgctattcgtattgatttatttgtttgttgttacagtaatgcgtttggacgttctgcactgtgttcttacgattacgtgtccaaatctttaccgagcagtaatttgaaatcgctttttacactccttttatttttttggtgtctatttgtgcaaggagcggggtgattcggttgcattgtagcgactactcttttaaatagtttcttgtttttcttgaggatgtatttactttgtcaaattattaatcggttagtgctgttagatcgcaactgagttcttatgtttgtacatttttaggggtcggattaacaggattcgcatctcgagcaattgacaacatttgtatggaggggaattagtaggagtaaataaccaaaacacatgttcaggaattatcgtgcttgaagattgtttcttaccgttttgatcaggacctgaccagacactgctactgaattgcttctgtacgcagtgtacgcagatttgctagtcaagggtcggaaagag

SEQ ID NO: 114503 - DNA, 685 bp, Physcomitrella patens
  Intron number 1 from transcript Pp1s51_260V6.1 (locus Pp1s 51_260V6) derived from phytozome v7.0 (chr-ID scaffold_51; pos 1595018 to 1595702 reverse strand)
gtgagtttcggtggtggtcaaccacactgatagcagtgatgttgatatcaaggaacaaatgaagtcattatcagtttgtgtgtattggcttcttcattcaaaactacaagttttttttgttaacgtttctaggtggtgtatttgggtatgatgttacaaattgataaagttgtgataaagatcatcatcattgttattatcattatttaattatttttgtaatttttatttgtttactgggaataatagaagtggcattaaacatgagttttgattcaacaagtaatccattttttattttattttatttattttttgctaacactgctctaccacatgcttgaaaagacagaagaagaaaaagtaagattaaatagtattaaaacaaataatgagaaggagagaagaagattgtcctcacttgtatgaatcatgaggcgaatcagtatacacccaactaaatcaatttattattattattattattttcattcacatccaacttggataatgagcctttgacaaacacatctgtcaaagtcatggatgaaaagaaataaaaatgaaaatgaaaaagaagcttggactatttcttccctcaatattcctttattgtgtatggcttgaaagtctgagtgtctgtggctgaggctggcagtgacagattttgtgcagcagcaacaga

SEQ ID NO: 114504 - DNA, 1026 bp, Physcomitrella patens
  Intron number 1 from transcript Pp1s39_38V6.1 (locus Pp1s3 9_38V6) derived from phytozome v7.0 (chr-ID scaffold_39; p os 98570 to 99595)
caacgcgagtctcagtcctacgagtcccaatcccggtaagagtcccagtcttgtgagtcccattcttgatgcgagttttggtcctacgagcctcgattctggtacgagtctccctagtcctgtgactctcagtcttggtgtgagtcccagttcggcacaagtttctaaattttaaattgaaatttcttgaatttctttgaacttcttcaattctttgtctccatagaccaagtttatatttattctttgatttttttgttttttgatgctagataaattctattttaaataattataacactgacatgaataagtattagaatgaaatgtactttgttgcatgtgtagtgaagatctctgaatgcaaaagtattgtgttcagactcacaatcataacttaggtacgtattgagggcaaggcaaagttgtgatgtgaagcgaggtgaggtgaagtgagccagactccaagctcataaacctagtcgcattagaggtgaatctgtgctggatcaaaattttgttgccattatattgatctgtttttcttttgaagtgaagttgaagcattcttcgagcgatttgaatcgattttttattttttatttttttatttttttgttttattttattttattttgtttgttttgtttgttttctaaaatgagtaattgtgctcctttgttgtgtttgagattgaagtaggagcttgaaggagagggacgttacatcgcttcgcatgttccttattaggtcaactcttgtctactccaccacctgcataacatgtaaaacgttgtccaaaactctatatgcttccatgtttgtgtggtgtatggtttccaatttaattattttatggattgttgaaacttagtttagaattgaatttgttttagaatggaattaaaagatttgacaactttttggctcaatgaacatgggatttgttttaagcctcctcatggttcttatttttcattcactattgcaatcattccatggtacattgcataaaggaatcgacca

SEQ ID NO: 114505 - DNA, 862 bp, Physcomitrella patens
  Intron number 1 from transcript Pp1s85_165V6.1 (locus Pp1s 85_165V6) derived from phytozome v7.0 (chr-ID scaffold_85; pos 1200415 to 1201276)
attcttctacaccagtctctctgctatctggcacggtaaatttctaccgctcgttttgtgcttcatccatgctctccttatcgttgttttagacttttacctctctcttctggttctccctcattcattttgccaagaatatatgttcctgatattcttaacataaggtggggttccgcaagagtcgacatacaaaactaaaattgccaatcatgttgtgtgactttcacagtgttggtttgttcagtggcattgtgaatgttcatgtttggaactaactaactgggtgaatccaattaaacagcaaaggattttgtctacatccagttaagaatcaaagaattctgcctacttgtgtttcaaaaacaaaacaaaacaaactatctgtctgggtagacttccaccctcattgtacggtgaagagcatgtggatttttaggcatgaagaaggttgcaactcctccttggataatcccatgtctattgagtctacacattcttcatgatgtacactcagtcttgtcacatgcatagacaataacgtgaaggagtagctatgtgcttaatgctcattgtttttattgaagttgaatattttcttctctgggcccttgaaatttgataaagtttcaagctctgccgatgtgataaagtttacttctacaccaaatctcagctgatgtgtggaagttaacttactcctcccctaaattccacaaaatctcagctgaggatttggcggacctaggagaatatagtaagaagtgcaataaaagcaggacttttagagttctaattcttggggtctgagtttgggtgaaaaccagtccaaaaacccaattccttggaactgcacaagtcc

SEQ ID NO: 114506 - DNA, 1017 bp, Physcomitrella patens
  Intron number 1 from transcript Pp1s58_105V6.2 (locus Pp1s 58_105V6) derived from phytozome v7.0 (chr-ID scaffold_58; pos 513177 to 514193)
aagctgatcgctgtttcgggctcccaggtattaactaatcgaattatgtgagtagagctctttgtaaaacctatccgttttaccagtttttgtttttgtttgtttgtttgtttgtttgttttttttttgttttttttttgtatttttgttttttttgtagattcagcatgtgagggatgattcaaaaattcgataagtgtatacccgccacttaatgggaaacttagatttaagcggtgggtttcatttctaaatcctgaaattctaaagctagatttgtcttggcggatcgttttccacccatcgcacagaggttgtcaagggtttttggtgtgtttattttgtcctcaagtctgtaactcccgtcgaacatgtttcgaaaggagtatctacctatctatccatctatctatattctgctctgagcatgagtcatcacactctgcaaattgaatccactctagtctagctgttgtttatcgtttgcttctctttacacatgtatcaattaaacgtatttcggctgtctctgaatagtgatgctgagatggtggagagaaaagtgaagttaagccgattgagattgagagaagagctgaattttgtatatacctgaatttctcatttagagagctgatacggaactggagatttatgtggaggaagcaccagccatttagtgtattgttaattgtgacagaatgaattggtgttatccgtacacgatgtacgtgcaagtgtgtgattgatggaattcaatcaatcttacattttaatttagatttaagtatggttttattagtgtgcagcaatcatggagattcatgtttgcttagtagttgtggaacggcataggttaatctcatgatcagcattttaaattttttttacctcttctccgtaattcaagctcacatgatcttttcatctgatgaatagtgaatttatcaatagattctgcaaagcagtcaaactgtgaaattttacgttagcttattcggtgggttttccaggcag

SEQ ID NO: 114507 - DNA, 397 bp, Physcomitrella patens
  Intron number 3 from transcript Pp1s15_397V6.2 (locus Pp1s 15_397V6) derived from phytozome v7.0 (chr-ID scaffold_15; pos 2285395 to 2285791)
gctctccgaaggttgatgttttatttaagcaaatgattatgctcatctcagttgaactcatggaacgcgtagtgatttaagttaagttgtagagactgtagcgtattgttaattggttcattccttgtctagtatcgctttttgaattcttggttgtttgactttccattcaatatctgagatgcatgggtagtaggcctcctagcagtatcttcttttttgagttatttcaacgcctcattctcaatcccatttgagtcgtggtagtggagaaataattctgtgcaaattgaatcgttctggacaggttttgtttgattagtttttagtttttttccatacaagatgtctgaggcgtggcatttcttgtttgtaggttggagtagtgggtttctgc

SEQ ID NO: 114508 - DNA, 825 bp, Physcomitrella patens
  Intron number 2 from transcript Pp1s431_2V6.1 (locus Pp1s4 31_2V6) derived from phytozome v7.0 (chr-ID scaffold_431; pos 45748 to 46572 reverse strand)
tctgtcattgcccacgttgaccacggtacgtatcagaaactattacttagtggatttcctatgattactattctgacacaattgacttcatcgaattgaatttcgaaagttactctgtgttcaagaagagtagttctacaactaacatcattgaataaatagctcaaatagaattgaagtcacatatgactatttaattgttcttcaaatccgttacactgtgtgcgattcacttagactgcagcggtataatttataactgcgtcctctagttcgcaatttaggcacattatgaacataaatctgaccttacccagatctaagtcctccgatacactgattgaagttgttgacaggatgtctgcccatgtacggaatgctcaaagttacataaaaagcataatgcagaaaaaacattaaaatagccatcttcaaactatcttatatagagcttactctaagcatttgatgtagtccagcatatctaaaagtatagatcaatatgactcaaaccataattatactcttccaaatcaaattacattacgaggtgctcctccaacaccttttgtctgacgatacagtgtccgatgattcagtcatacttcaggtagtgctacaaacccacgatgtgtccattgtgaccatgaccttcctcagaattctctaacacatctcaggaagataaaaatctgaacaaactgaattagcaaaacatttgaggaaatctgatgataacagagtcaaaacatgcctagattaatgggggtgagtggtggaaatgtggcagggaagtcgacactgacggattcgctggtggctgct

SEQ ID NO: 114509 - DNA, 611 bp, Physcomitrella patens
  Intron number 2 from transcript Pp1s18_124V6.1 (locus Pp1s 18_124V6) derived from phytozome v7.0 (chr-ID scaffold_18; pos 609239 to 609849)
ttcctgagccttcagcagcaggtgaggaatcgtgttactggtggactctttcgaagtttgagttcattttgaatctcaatatgatttcaatgtttgcttctgctgttagtgcgttgaattggacgttattgtgcccattgaactgattcaatttggagtttgcaaaggttattcgcaaacatatgtgttttgtcattgtgttgtggcgttccttgatggatagctagcgagcacattattaacggatgagtatcttacactaaagagaagtggtcgatatttttgaattactgtcgtggtaaatcattgatttttgaaaaatttgtcaattacgtctgcagttcaggatctgaaaatgtatgtgagcttcgatgttgagtagaaacattgtgcttgatttgacatgtatgctatttcttgagtaactacgtagttttcttctgtttgtggtgtattgttttgtttttttttcgcgtaggtaatgactctgtgacaaagtaatgaccgaattttacatgctgatttatgttgtggaaattttcatctattacagaggggcttgtttctggactgcaggtgcgggagaagcaaaaaaagctctctatcactgc

SEQ ID NO: 114510 - DNA, 982 bp, Physcomitrella patens
  Intron number 2 from transcript Pp1s77_21V6.2 (locus Pp1s7 7_21V6) derived from phytozome v7.0 (chr-ID scaffold_77; p os 104066 to 105047)
cgaggaaggctggtatcaatctggctgactactaggtcagtgccgacttaaattattttttatcatctatatgatgaaattcataggatttgcaccacaattgagcttttcctcaaacacgaaatgcaaaaagaagggttcatattcttatcaggggagagtgagtacgatgacgctcgaggctgtactgaagtcttcttgtttcaactggcttatgatatcctttacaaattccacgtttcagcatgctgtcaggccgatgtaatgcccagaggttgattgctatgaatcagacgtgccagaaaaaaggttttacagtgcatgttattcaggggaaaattttcggaagcctttctatggtggagtttattgtgtccaacggcaatctgatttgttaaatgtcattatgaagaacttgtttatttgatgagtgaaatgaactaattatttattcaagtatacaggtcgtgcctgtcgtttgttcagtgctgtgtgtcttcgattccaattatagtcttttggattgtatgtgtttgatttgtctggagttgtgaggcagagctttaaatgtgaaattcccgctcatgtattgtgttgtctactctgaaaacttggatccttgttttggatatgcactgatgtcaacaactattgtaggatgacgtgtactctctcgaagctgtttattcagtgataataatgcctgaaccaacactaacttgtagctattcaagttttgatatggatcacatttcatttaggcttgaatcaactgtctttattagaattggcttgtttctaacttattacatctgacaccgttttatttatttatttttttgcatacgctaaccaacaacttcttccgttagtgattctgcgtctaagcttcagccacagaaaatcacagaagcaagatgatcatacattttctttccttttctttttttttttgaattcttgtttcttctgaaccagaaca

SEQ ID NO: 114511 - DNA, 627 bp, Physcomitrella patens
  Intron number 2 from transcript Pp1s4_43V6.3 (locus Pp1s4_ 43V6) derived from phytozome v7.0 (chr-ID scaffold_4; pos 293102 to 293728 reverse strand)
ttgtagccgtgtaggtgcccgtctcggatttctcggtcagccatcgttgaacccctaccgtctgctctcctcaacttctgttgaaaggtgttaaagtgagttaacatcccgtttctgtggtggtgctgttatgcattgttgagcgaagttgcactagcatattgcctcaagaggaacccaactggtccgtacacaagttactctttgatgttcgtttgacgatgagaggatcaatctttctgaacgacgtggattctttgccaagactccgggtttgcgtttatccttgctcctctttgaagtcctcgaaaggttcatctcagcattttgggatgtcctcttctttttcaattttttttgaaatccaatttcaggggatttttcattctttggagaaggcgaaaaaggccgccatggaacttgtcatcaccatattactctagcagaggcgaatcaatgcgaatgaagggcttaggaacgccgcagagaatagtttcacaacttccatcgccctcggtggtgctgtttgtcacgttggatcggatggttaggtcttttcaagttgctgatataactcttggacagtgtgctgacatttgtgggacatttgagtgcagatcataagcc

SEQ ID NO: 114512 - DNA, 671 bp, Physcomitrella patens
  Intron number 1 from transcript Pp1s310_49V6.1 (locus Pp1s 310_49V6) derived from phytozome v7.0 (chr-ID scaffold_310 ; pos 388535 to 389205)
tatatcagaccattcgccagcgctttgaaaagcgggtatgaaattgaccctaattatacgctttgtatcatggacctagtacacttttgaatatactggaacttgtattcgaaatagcacctccccagtcaggaagtccttggtttctatcgttgtagttcgagttggactttcattattgaattcgctgttcttcgttgtatcgaaattggatgcaagatttcaatttacttttttaatctagtctgtcgtgcacctgtatggttcttgattttttagttctaccagcatgcattcatccagttttaggatttgcttttggcatttatgctgcaatcgtggaaggggctaagagaataagtgtcgtctccacaaatgttcgaaacataagtattcttaactattgcattcattccgcggtatttttgttaatagaaattgaattgagtatgatttggcgagatcgtcatgactcagagttgtagttgggacaaatgaatgtttgtttttgttgatctgaagtcatgttttgcacattagagaacttagcctaatatgcttttagcgtagtggaggtggtattgcttctctttcttttatatctgaactgaagcatttacatttctaagtgaaaagtggttatttgtgctgcagcctgtctttcttcaaag

SEQ ID NO: 114513 - DNA, 659 bp, Physcomitrella patens
  Intron number 2 from transcript Pp1s210_61V6.1 (locus Pp1s 210_61V6) derived from phytozome v7.0 (chr-ID scaffold_210 ; pos 447160 to 447818)
aggtgctacgtccaacaccgatcatgatctaatgtcgctgtgataaaaaaaacaaaactctgattttatagttcaaagtaaacttagagatctcagccagataaagaatcggagtttgattttggggtttaaggaagaatcatgtttagaacatttcaaaacaagaacatgcttgctgtttacgttgaaagtcgacctgatctgaaaaactctttccttgaaatttctttttttagaatgtgacttattcttaccgactttatcgattttttgaatttattgacttagtacaatgcagtttattgtcttgtcgaatgttactcattcattcgttctttttttctttgtctcatttgtttttctttttctttttttctttctatcaattagtttctaattcttttcacttgattaatcaactgcgatatgctatcctttaattcccttgcacacaaacgatttgaagttgcatctcgtaagatctcagagtccaagatattgaagagaaggcttcttatttaattttttatatttgacttttatgagtttcttcaatcgtttttgctgttggattattttcatatgccacacgcgattttgttcacactcagttcatgcctgcaggtacaaccacaagctattacaattaaatcggctca

SEQ ID NO: 114514 - DNA, 852 bp, Physcomitrella patens
  Intron number 1 from transcript Pp1s39_390V6.1 (locus Pp1s 39_390V6) derived from phytozome v7.0 (chr-ID scaffold_39; pos 2022200 to 2023051 reverse strand)
acattttccctgccctggagatcctcttcaatctggtgctattcttcgcagacttcttcaactgtttttcagacatagagctttctgcgaagttggtgtcaaatctcgtttttcttgtgtccgcctcctcgttgcattcaatctagtctttgtttccgtgtttcttgagattcttgcaggttatggaactggtgcgaaggtgtttctgacgtggtcttgtggtatcggttgttatctgttggcatgttcttgattgcgaaaagagggagtagggcgttggtttagggacaggtaagagacgagaagcaaatcggcccagagacgcagaggggcgggagccatggggcaacaagggagcaaggattcggatgctccatcagtggttggctcgtctgtcagggcagtgcgaaatgcaacaggagatgcgaaaggggttgtaaaagaaactgcaggtgatattttaattcctcgattttgatgttgcacttctcttcacgtcaagggagcgggagcgtttgtccacgatcgctaagattattgaggtttagagttttcttaaatcttttcatcataatcggtgaatcaagtacggaacccggccatttcttgaacccagattggcactactattttcattcttcgttagagtcaccgtgaaagtcctcgtttctttcaactcagagtgattttacttttacattctttaatgagcgtagaggaagttcttgtttcttgacagtacacaattgtaacaggtgcctgaatcgttggtctcttaacctcttttccggacttttttttgcacatgcacttttagctgcgaaattggttcttctatagtactacactgac

SEQ ID NO: 114515 - DNA, 597 bp, Physcomitrella patens
  Intron number 1 from transcript Pp1s58_244V6.1 (locus Pp1s 58_244V6) derived from phytozome v7.0 (chr-ID scaffold_58; pos 1504896 to 1505492)
ttacgagcgaagaggaagcgagtaggctcgctcaggttggttcacagggcttctgtgtgtctcgctttatatttccgtcagcgggtgtgtttgtgttcgctgtccgcttctttcctcaaacgtattttggtggaaaattcattcttccgactctaatctaattctttatttagggttctgccttagctctagctgctattgtatagcttcaaactgttttgagcaagtgaccaccctgcaaccaagaaaatgctctgattaatcaatttctcaagctcatcttatcatgtcgacagctcctactcattgtgtttctgtaaccctgagcaaggaaaagcattctttgggttgttttgatttggcagagaaagacccgtgcatgagtttgcttttgttcctcatgtcatttcacttggattggtgttgctttttcatataatctaacagatttttatgtacctcgatagatccgagtacttgcagagcaattgtgtgaatttgcgtggcattcgccttcgttgtgttcacaccctgaactcaaatcttggtgctgattttgtaggtctccaagcgtttagagcggactgctggctactt

SEQ ID NO: 114516 - DNA, 509 bp, Physcomitrella patens
  Intron number 1 from transcript Pp1s163_106V6.2 (locus Pp1 s163_106V6) derived from phytozome v7.0 (chr-ID scaffold_1 63; pos 756798 to 757306)
gagagcccaaggtgggtgccgcagacttatgaaaattctagtgtttattcttctactcaactcgggatcatggactgtgcatgtaggccccgaaattctgagagttgtagggcgggcggggtaaaacgaagaatttctcagttgtcttttatgctctggattggtaatcaaagttggttggcgattctggtctctttattttatgcaattccatttttctcgcaagtatgtttgaaaaagcatgtcacaagacgaatttctagctttggcaaaccgatgattattgcaattagcttaagcccttggcttccgaacgcttcctgatcgtgcacagctccagtgtggtggcagagatatgcatttcgtgcttatttgaagattagttgctacgattgatgaaaatgctaactcttctcgcttgagggagatacgagaggtcttctaactggacataatctgtattcggtgatgcaggcatccttttcaactgtcttaagtcgatacgcctt

SEQ ID NO: 114517 - DNA, 676 bp, Physcomitrella patens; identical to SEQ ID NO: 114074
  Intron number 1 from transcript Pp1s219_73V6.1 (locus Pp1s 219_73V6) derived from phytozome v7.0 (chr-ID scaffold_219 ; pos 416063 to 416738)

SEQ ID NO: 114518 - DNA, 779 bp, Physcomitrella patens
  Intron number 1 from transcript Pp1s256_32V6.1 (locus Pp1s 256_32V6) derived from phytozome v7.0 (chr-ID scaffold_256 ; pos 201703 to 202481)
acagtgcggatcgcgattgtcggcgacgtggtaaatgcttcttctcgactttgcattcctccaatttgccgaaaaaatctttcttgctctatttcgaactccaattttgttataattcttgcttctattggctgtgaattttcggtgataagttgttttgtcgtggagagggaatccttctcgattgtcaactaattctccctgaattcgttgtgttgtaacgtcgcgtgttgaatattccaaaattgagattgagcgttttcgattttcttgtgaatggattgtggattgcgcaaaactctgttgtcaatgttcgttgtagaaccgagattttttatttttgttttgttttttgatttttgttgtttgcattttagagttgattagtgatgaacagcgattggaatctcgcctccattcccgtcaatatacgcgatacaatttgcgttgcacgtggtagtttcgagagctcattaggttgtgttggcattttgagatcataggtgtgattgcaaataatttttttgattccaatttcttttaatacaattcttgctcatcagtgtgatgttctagcttcatttctttaatttttaaatatttttttgtgtagtgcgataagttgcaggtaaatcacctacatagattaccgtggttgcatctcagatttgcaacctccgatttctggcttagcatatcagagagttgcaatatctgcgcataatttaagaagttatatttgtgtttcttattgatattgtgtgatctttcctttcagc

SEQ ID NO: 114519 - DNA, 821 bp, Physcomitrella patens
  Intron number 1 from transcript Pp1s269_15V6.1 (locus Pp1s 269_15V6) derived from phytozome v7.0 (chr-ID scaffold_269 ; pos 102067 to 102887 reverse strand)
agatctctgtatctgccgaggaggtaagaccatcaggctccttgaatccaccgggcacgtttgcaaatgtttttataggggagtttatctgttttggagaattcggacctcgaatcgacgttgtattggatgttttcgctaccgactttcggaattgatgcataggttttgatttggcacaagtgtttttaaggcaagtagtgtacggtatgtgttgatcgaaactaggtagacttgacagttttataacatagagaagttgtcgtctgttgttttattttattttttcatcattttatttagttttgtttttccagtaattaatttgcaattaattttctaatactatgagccagcattaactcaattcagaacatcaggtgtttctcacttagtattggatccgaattgattgtcagcttctgaactctaattcttatttcaaacatctgtgttcaaagtcgaccaggcacgagggtgagagctgtagaggattggaatgtaacaatccatgtgggttcggagatgcagtctcttctttttctcctgtctggttgtgctataatttatctcaaatcatctcaaatcatgtctgttcttttgtttatgaatatcagaatctatgaaggtttgcaatgatgtcaccccttagctttctctggaaagctgcggtgacctcagtttgatcaattgatgattccgttggtaaggctcttccatgttatcaactgtgcaacacgtgtcttatatcggaattaaatgttgttgaggggtggttcaacgcaggaattcaacattgagaagttacagattgtagaagc

SEQ ID NO: 114520 - DNA, 776 bp, Physcomitrella patens
  Intron number 2 from transcript Pp1s24_241V6.1 (locus Pp1s 24_241V6) derived from phytozome v7.0 (chr-ID scaffold_24; pos 2299472 to 2300247 reverse strand)
cggagctccaagcggactagaagcagtagtaggaggtacagagtattcgctagccattgttgcactttcataggtgtccacaattgtgcctatttttctcattttggggtagagaagctggctaatgaattgacggtttcagtcgttcgtttgagggattgtgaggatacggaatgaacacaccatctacatgaatgaacctggcaacttcagcaaactaaaatgatccatataccttctcgcactagagggtttaactagtcaatgctgcgagctgccatagacgcagtaaaaatgagtattaatcgcttgtggcttcaaaccttagaattaagatgttaaaaactcgacaacatttggcggaggtcggggatgtggggaatacctccagtggttgcaattgcaggagctgaaggtgtcattctgttgaatttctgcctactcccgcacgagtctcttctcttctcggacttaaattaatagaatgcaagacttcagaaagtagcctcttacttttgctcagtcagaaccatgtttcatgtttaggcctcgccactgttttttatttttgagattacacgtaatgatgatgtcgtccttttctctatctatgggggtttatctttaaaatgggtttattgccaatagaccttggatgctatgccttttacgtaggtctcagcaacaaagtgcctggactctttggcttgtagctctttttggagagcttttgattaacttacgacatgcaatgtgaacatgcaacaggactgtta

SEQ ID NO: 114521 - DNA, 562 bp, Physcomitrella patens
  Intron number 1 from transcript Pp1s9_310V6.4 (locus Pp1s9 _310V6) derived from phytozome v7.0 (chr-ID scaffold_9; po s 2136973 to 2137534 reverse strand)
aagcataacttcgccttcgttgtaagagcgcttctcccatttcctctctaggaagttatacgtaacattcatagtcttattatctcttcactgcaccacactgtgataactagattttgagcactggtcagtcagtgttgattctttttttgcatttttttgcatttatctgccttcttcttcttcttcttcttcttagtcttccatttcatttcttttccccccttaacgactttagataagtttcattcagaaagatcatacgtttgttttgctgtgagatccagtgacgttgattcgtcactggagaaacaatatgtctacatttagtttgcaggattggtggtgatggataaatcagggatagaggttgttgatattgataattagtacatcatcatacatagtacatatacattgttatcatcaagctgcagatattcttgctgcaagtatatcttgatgaaacgaccatgagctttctcatagtggctattgtcaccatttttggttgtgttcattgcttttgaatttctctattgcacactgcaggagtttctgg

SEQ ID NO: 114522 - DNA, 644 bp, Physcomitrella patens
  Intron number 1 from transcript Pp1s85_15V6.1 (locus Pp1s8 5_15V6) derived from phytozome v7.0 (chr-ID scaffold_85; p os 74454 to 75097 reverse strand)
gggctcaccaggtgtgtgtgtgcttttactttggtgactggtgtgctgtagcacctgcgggttcgaagtttgtcacggatggggcgtggtgaggataagaccttgatgtttgtagtggttgatctttgtagaagattttgaattggagggggagcccttgttgaggaatatgggaagggatgtggtggtggaaatggtagtagcgccagtgttaggttggggaggtttctatgtttagggttggtttactgtggtctgtattgacatcgctgtttcgcgcaccttcctgtgcgactttttgactgaatgcgtgtaggtattgtgaaattgcgaatgcaaagcccattaggtgaactttgccgcagctggttgggcaaagatatgatgactgggtttctgtttctgattgagacactgggaagtcgtgatgtgtgaatgttacgcataatgaagaatattaatcttcctcagggaacatatttgtggtgtgtgtgtgaaagagagtgcgcgttttgagaggggcgctcaatatttatcgctattttcataaatccaggttacattctgtttgcaattgcggtttggttttaaattttgtgctttggggtgtctggttggacagcaacacaagcttcatccctttt

SEQ ID NO: 114523 - DNA, 408 bp, Physcomitrella patens
  Intron number 1 from transcript Pp1s18_19V6.1 (locus Pp1s1 8_19V6) derived from phytozome v7.0 (chr-ID scaffold_18; p os 102845 to 103252)
ttgggttcgtctaccagatcaacattgctcccaaggtttgtattcaaatctttggtgtaatctctgggttgttcgatctgggtagtggagtatacgcatcgagaagatctgaaatctgctttagagattatttgagtttgagtgtggttgttcctccaatggtaggatagagagacccatgttctgtgtcttgtgtaatccttgtttaccgtttctaatcctgtctcccatgtgtatttaatggcgagatcaagttggtattccatctacttagtgtgtgagcgtgattgtggttacaagttgcggaatggtttgtgttttttcttttcttttcatgcgtgtgttttatagttagttgaaactgttgatgcagaaaatcggttttgaagaggaaatcttcgtggttga

SEQ ID NO: 114524 - DNA, 863 bp, Physcomitrella patens
  Intron number 1 from transcript Pp1s6_51V6.1 (locus Pp1s6_ 51V6) derived from phytozome v7.0 (chr-ID scaffold_6; pos 687657 to 688519)
cgcgaggttcaagcgtcggggaggaattagcagtgtgtgaggagcttggattttgctctattttttcactctttttttctttacctttttttttttaacgccgagggaagtggtggatgtattttgaatttggagttgaatcggcagtttgtatttattcgtcttgcttagagtgttgaaattggagatgcttctcgttggatcgttggacagtttagtattcttgcgaattacactgtaggttcggaggcttcggtagcaggtatcgtggtcttctagtttgttcgcggcggggtgtacacttcaagtttaaattcttgttgctgtatgagttgaaagccttccattaattggttacgtttaaagtcataaatgaactcacagtagttcccctagattttgcttattcaggtctaggtagaaagggcagggtgccaagtcaggtctgagaggccatcacggaggcattcgcaaagtgatgactgattcatcaagttcgtagagggtgcaatcgaatggagttgacatgtctgagtgtcttgctttgcatgcgtttcaatgagtactgcgctcttttagttgttccaggattttaagatgtcgtatgcacagggttatctgtgttgatgctcaaatgtgtactagttttcattagagagggctttcatcaaattgagaaaagttggcaatgcagttgaccagtgacgttcgattcactgctcgtgaatgtgctttgtgctacgttttttttttccaatcatttatttcggacttagtcttgtagggaggagtttttagtttcaatcacgtatgtataactaagttcctcagtgttgttgcttttgcagttcaactagtacaca

SEQ ID NO: 114525 - DNA, 1004 bp, Physcomitrella patens
  Intron number 1 from transcript Pp1s337_21V6.1 (locus Pp1s 337_21V6) derived from phytozome v7.0 (chr-ID scaffold_337 ; pos 196201 to 197204 reverse strand)
gtcgcctctgcttcatcgtcgccgtctcttctcaggttagagcactttcaagtgttggccaggactgagtataggaaggagggtttatttatttatttatttatttatttatttttctgttatttttattgctggctgatgtccatcttccgacgcgatcgtcgtttttttttttttgtttgtttgtttcattgtgttggaggagtgtaagatttaatcggatgcataggttgtgtgttttgcatgcgtttagagcgtttacatgtgcgatgcacgagctctggtgtcgtttagaggccactgatttagtagtttcttgtgcgagggggattagatcttgtaccgcaagatgttgctccggggttgtggtggcgatggcgttttataattaacatatagttcaatggtgatgatttaattagcagtggtgcatgagttaggtacggatcgggcgattgtggatccggactcgtgttcaacaataggctggattctcttctattgcgattggccagttcttacatgcaatcgggtacacgatcgctgaagtagaacaaattaaactcatcgactgaatttttgccgtctcctgaactgtcgaaatagagcttgaaaatttgattgatagtgattgtttagttctctgcgaaatcgttctacataatctttaaattctgaattaatctcaatgtattttgacatcagctgatcgcttgtccgctcgctcagttcaattcgattgagtattgcctgcagatttttcagaaaaatttaagtaatttgatagtaagaacttgacttcctgtggattttaaacagtatagcatatgaagtgccaggttttctgaatcctccatttcttctaatcgctatttccgaagacttctatacagtatggagggcgttctgtactgtcctgattgcgagacatgttttacgacgaaaatttactgctccttagaactaaaatcttctgaaatggttgggcaggtcggtattaagaa

SEQ ID NO: 114526 - DNA, 859 bp, Physcomitrella patens
  Intron number 1 from transcript Pp1s59_72V6.1 (locus Pp1s5 9_72V6) derived from phytozome v7.0 (chr-ID scaffold_59; p os 285257 to 286115)
tagtgcttgcaacctccagcacagatccccgacactcaccattcactccttcctacacctccaacccaaaccttcagacacccactgatcgatcggattgcaagatacgaatgcacaataagcacatctctgaatatcatttcttgcagaaatttactcggaaaattaaatattgaacgtctaaatgaccgattagctaaaccgctcatgtgaattttgtgcagtgatcttagtggcaaccaattctctgggccaatacttgacctgagagatctcacctatctaaataccttgtcagttaacctccaaacctatttttctacatcttgcagaacttccttcacaggaattgaaactgcacgccgccaattgttacctggtcctaattttctataatatgcgttagcacaatatgtttgaccgtatacagtttttattcttgtaatttattattcaaaaaacttgttcccactgtaacaggtgatgatgacttgatgcatctaacttgacaggcatcttaacaacaaaaatctcagcgacgagtttccagaatgacttgaagaacttcccaacttgattgaagtgtgagattgacataatcctgtagattcatcccatgtgtataaattccttccataagttcgctttctggttccacaatatcaaaatacttcagagagttacttagatttctgggccggagtggaccgagttctcttactctcagttaaaaagttgtatggatttgtttcctgcaattcgttcaacataacatccatcgattctctaaagaagaagcctgttatttcatcatttgggtgcagaacgggagcaatttcacaagctttactcaaaaagc

SEQ ID NO: 114527 - DNA, 705 bp, Physcomitrella patens
  Intron number 3 from transcript Pp1s33_69V6.2 (locus Pp1s3 3_69V6) derived from phytozome v7.0 (chr-ID scaffold_33; p os 438344 to 439048 reverse strand)
tgagttcccaggagtagtgcctcgcacatttctcggtatactctatctgacatctcaaactgttttaagggcactttttcttaagtctctagttaggatcattgttgatttgtagtgtgcataattctgaaatgctaatcagtagtatggtcacgtctgccactagcgaaggccatgagtatgtgtaagaatgaaagtaattattctcgcgcagaaggtgattaactgcgtaacagtctgtaagaatctgagacttgcaggatactacctgcaaaatagaattgttttacttcaactcgtgagaaagtttctttaaacgggtaaagatcgtggtttgaatttattgtgtaactcatataattatatgtgccaggggcactaatgatagcagtgatatcagctcctgtggttttggtccttaatcttctgcatctaccaaagctttatgccctttacaccggtaactcacttaatcacggacgagatagttcattgagagcgtttttcagcattatgtactcaataaatgtagcgactcattctgtgtcatcctattattttcatatttcaagtttatatttcattggtacctcgttaaattttctttgctgtgtaggtctagggtctctgagtgttgatttctgaagcttttagatctctttggatacagtacgtttggttcttggagcaacagtacttggttcc

SEQ ID NO: 114528 - DNA, 493 bp, Physcomitrella patens
  Intron number 1 from transcript Pp1s46_63V6.1 (locus Pp1s4 6_63V6) derived from phytozome v7.0 (chr-ID scaffold_46; p os 736160 to 736652)
ctgttgcgtctttgggagagctttcgagcgaggtgagaagtggatagtgtggtgcaatacggagggaattagacggggaggacatcgggttttggtggtttgagagctgcaggggaaagcgttgttgcggagtacaaatgagtcaatgcggagttgttctttcatgcagttgagcttcttctttgcttttcttttttccttcttgaaggaaattcggtgaatgtagcggttgaagatttggtgcagcgttgaggtatgtgctagggagggggtttgagtgactgaagcaagagggacgttgcgatcgctgtgagctgcttcaagttggtttgtgtgatgagttgtgatgctgcagtggaagagagcgtagagtaatgcgttagattgagtctagtcattattcgaaaacttttaagacttggagttcttacattattatgattttatggctgtcgcaggcctgtggttgtgaatcttgtctattttctggcac

SEQ ID NO: 114529 - DNA, 982 bp, Physcomitrella patens
  Intron number 2 from transcript Pp1s88_63V6.1 (locus Pp1s8 8_63V6) derived from phytozome v7.0 (chr-ID scaffold_88; p os 468771 to 469752)
attaccacgcccttctgaggtccgtaccctaccgttcagttcttagcatgtccacttgcacttaaatgtaaattgtgttgcacaagttgttataggttgaaggatatgctagttacgggaactcatctttcatcttaaccgtaatgtttgctgatgagtgattttcagatggtgcccgtgttcttctatgtttcacttatgcgacccaattgtattgtttatcgtttatttgtgttcggttgtgtatagaaaggatgactgtatggcggaatcgagcttatgagttctgtcatacatgtgcgtttgagtttgtttcgagtcaaatattagggaagctttgttgctaccctgctaggtggcatattctgccaccgttcttgatggctggaccaatctcgatgttggtaagcgttgtgaaatgtcactggatgtcgctcttctacttaatctcaatcttttaacgattactgaattgaaatatttcaaggtcacctgctggtggccgagtacggaggacaatagctttgttggtcaggggtgtttctgaatacattcaaaaattataataatggagtgcaaggagactacaattctgtgtagtgatttttgaatattgtaataatgattcgaatttacctcggcatttaaagttagtcttggcagaagctgtgttaaattacgccgtttgcatgattttgtaacaaggatttattgtagtgagaacgaggagcccctgttgtcatgaagaattcgctgtagttatttactgcggtgtcgtttgagtttaagattgaaaacttactttttgcggtttagctgaacagtccaagcattagaccacggtatatttgatcacgtatcgatgcatgtcaatggttgttcatattttaatctatattctctttccatctgcggtgtgacagtatttgatggcatttcaaattttgtttcgtgctttgtaggtttttgaaggcaaggaaat

SEQ ID NO: 114530 - DNA, 961 bp, Physcomitrella patens
  Intron number 1 from transcript Pp1s410_17V6.1 (locus Pp1s 410_17V6) derived from phytozome v7.0 (chr-ID scaffold_410 ; pos 142044 to 143004)
tacatcaagcaggtacaaagacctctaagaattgctgtcatcattattgttttgattgaatggaaggggtcaattgccttgcttatttttttcattttagcttagaggttctatatttctagtagctctgctgttgaagaactggtgggatgctatgacagtaaaattatagcatgtcatgaacaagaagtctgatgctgttgacagtgtttacgtattcatgcattacttaattcgacttcattatctctggaactttacttgagatatgaagggagctttctagttcttttttgccttttgtatcatgaagacttgaaccaaatagatctagccttgctaaagtgaatgtggtggagtgtcgggaaagattgctagtcaaattcaattttactatgtttattttggattctcgcgcaattgtttgaaactgtagtgcaataaagctactgcactgcagagtagggcgaaggaagcttgaattcgtcgcttctgcagggtaatctagcattgccaggaaggagatattgggtctggtcatgatcgttctgctagcttagttacctggattaagatcatatgaggatacttaggagagggaaaagctaaatagtcagtcacgggtgtatctaatccgaagatgaggatgaccattgtatctagaagtgtagagagcatcaaaattgttttacttaatcatctccctaacgtagacaaccatgtctatttcatcgtgctctcctcccagctagctttgaattcggcgggagggtcgatatttcattatgtgtacggaactgggatttgagttgtttatggcttattttattgtaaggtttttggtgtggtctttgctgaattgcctacggatgccattatgtcggttcaaaggtgataatacttggacgtggcgtttccgccttcaggtaattattgagggcttcaagagctacaaggagca

SEQ ID NO: 114531 - DNA, 553 bp, Physcomitrella patens
  Intron number 1 from transcript Pp1s206_83V6.1 (locus Pp1s 206_83V6) derived from phytozome v7.0 (chr-ID scaffold_206 ; pos 521646 to 522198)
tatcttctttgtgattttctgcgtgggaagaattggtaagcgttctgcgttgcttggtttgtgggaggaggtcaggagtgtaggagggcgattgttgcgatttgggtgggattgccgcttaccaggacttggaaggagattgagaagagcatatcctgagggggggcttgattgtagaggttgcaaagaggagtaaatagtagaaatctcgtggttgtttacatgctcatgaacggaagtgttaaacactgtcaatttaatcaacccaactcttttaatactgctatttcgaacgttgatttgattcttcacagtcgtctgacagacgaggtgtatgtggttgaggagggttgaatgatcaagtctttaggttgtgtggaacgaaaagaaatcgagtttatgttattgaattttgcgattctaggaaatacggattaccaagttttgatattcccctgtagttgagaggttcgacatatggatttgaatttaacccagattttgtaccttctgcacagcatactttccgacgccgcccaagcgaacctcgaga

SEQ ID NO: 114532 - DNA, 646 bp, Physcomitrella patens
  Intron number 2 from transcript Pp1s357_10V6.1 (locus Pp1s 357_10V6) derived from phytozome v7.0 (chr-ID scaffold_357 ; pos 94272 to 94917)
aagagagtcgctccttggaagccgccgagactcgagtaagtggcattgtgcttgtactgtcacttattagggatgttgcattattatccagctgtatttaagaaagttttttttttcttcgtttatttcgattgcaatattctttcttcaagtggcgtaaaagtagtcgggtataggactgcatctggagccgaaattacctacttcttaaatatgaaatgttgttcaacgtagaattccgtttcacattaaggtaggccccaagactaaaaagctatggaatagttgaacagtataatgcgagtataatttctgccgaaaaacgtgatccatacttaaactggaatcatgaaaaacaaccccctttacatgcctgcagagcatattgttttaggtttttcatgaggatttaatcagctgttccctcattttgaatgtcggaagcctatctatgctacactcgaaaacgaaggagaccgatgtacactgcgaatgtatgcggcatgagctgatcaactagtgactcggttactctaatttactttaatcggagtgattgtatcgttaaatgtgaacgaaagaaggtttcgtcacagctcttgtgtctaattactgttttttgagtttggcttggtttgtgcagtgt

SEQ ID NO: 114533 - DNA, 986 bp, Physcomitrella patens
  Intron number 1 from transcript Pp1s357_23V6.1 (locus Pp1s 357_23V6) derived from phytozome v7.0 (chr-ID scaffold_357 ; pos 166245 to 167230 reverse strand)
gaaatttgcacccccacttgcactgggtgagtcgaaatgctcactcaaaaaacgtggtagctatttacaagtgcagatgcaactgcaacttcggcatgactgcggcaagcttgagaatcactccgcttgtgcaccatgggcagtggctagacaactactgtcgggtcacatgaaaagaaaatgaaaactccgatgaaagactgatggaatttgcgacggagtagaggtagggcaagcggggcccacgcttgacacactgacttcgggcccgagccatagtcctttcagcctcttctctgctggcaagaattttccatgagagctggacggcatcttgaggttgttgcagcgaagggagcattctggagttggatgtgaagacgagttgtttttctcatacaatacagccatctgtccgactgtttagttgcattctactttgttttctgacttgtttgtctttagcctcgcgtgctaataataaattcatggttgctgcatgttcgctgttgaattttccacgcatggataaggtttgtcattcctaggtgtgtgggaaacatgacgaaacccgttctacaagatgtttttattccctgttcgagatgacatagaaaaacaaattttccccccatttcagaaggaaaaaaaaagggttcggggctgaaaattagaagttacctattaaagcttttaaccattggcaacaaaaagcccagaaacaaaaccaaaaaaaagtgacagtggatgaaaacaaccataaaaacaactgtaaaccatgatttgttccaaaagcgtgtaacgctcgatttgcaccggagacccaaaaaagcgcatgtgttcagctctaatgaatccaaagttgcctctacacatgcaacatgttcagataatgataagctttcagtcccatacccaacaactgcaaaatattctgaaacaaacaaacagagaatccttccgcccggaaacaagaaatccagaaa

SEQ ID NO: 114534 - DNA, 901 bp, Physcomitrella patens
  Intron number 1 from transcript Pp1s59_30V6.1 (locus Pp1s5 9_30V6) derived from phytozome v7.0 (chr-ID scaffold_59; p os 116893 to 117793 reverse strand)
aataaagatcaacttattgccctactaatagaagcgtaagcaactcacattgcccgaactatttgaacatgcttgaacatgctgataaatgtgcttcttgccgagattagctttcattatgtttcctgcagtatgtggagtacacaagaatgaattcagtgtgtcatcacattttggttacatctgtgaaatatacacgcttttgcagctcgtagaaagatttctggttttatatatttaagggcctaccattatagtgacatctatgtactcgctgagagcgttcaactctcaagttcttgaccgactgatccttacgacttagttgcaaaaggaatcttgactaccctgatttattgttgtggcgagggaaaccctatactcttctgaccacgttctcaactgttccctgctgaatttgagtactccgaccgctaaactgcaatttgaacttcagggcagccttaagtggatactccctgacaataatgtatgtagaactgtgaagagttttctgtaactgagcatcaatgcggctgaccacttgctgtagtcattattgtgtcactttttgagttagttaatttgccaaaacgtgccttaagctctgaagcagctgcttggcgcttaatatgaaattctgagaaagtcagctcattcctgggtcatttcctgggttttatagctctgactgacattgcatccattgtgtttacatggattgcatgacttggaaatgcagttcttctctttatggcctggtattccagcgttattttaatttactgtaattctttcttattttggactgaaagcttttgaatgactgggatgccgggtactgcatgtttggctggaatgtttgttgcatgcagagggtctctgtttcctgcagtggcag

SEQ ID NO: 114535 - DNA, 453 bp, Physcomitrella patens
  Intron number 1 from transcript Pp1s100_9V6.1 (locus Pp1s1 00_9V6) derived from phytozome v7.0 (chr-ID scaffold_100; pos 39129 to 39581)
caatttcaacgtcccttcggtaagatggatgttatccagtgcatttcccttttccattttaaggggttttttggtagatttcagctacaaactgcaattaattcaagcaataaaatacaatgaggcgtgaaattcagagaagttgaaagtcaccctgactgcaaataatgactgccttgatagtagattagagacaccataaaaaggtcagatgtgaggcatcgtgcatatgatcttttgcgctatctgtatcggaatttatcacctcatatcatcattgtggtggatttcagtattctgaggcgagatttccattgccagttcgtgtgattcaagaaattttacactaatgtgtgtattctgagccaatagacgacttttgccagaatctcatcttctttgagttgtgttgttacagaacaaggacaaggaatttagattgatcgtaaacga

SEQ ID NO: 114536 - DNA, 527 bp, Physcomitrella patens
  Intron number 1 from transcript Pp1s46_194V6.1 (locus Pp1s 46_194V6) derived from phytozome v7.0 (chr-ID scaffold_46; pos 1485629 to 1486155 reverse strand)
tttgaaagccctagtaagttttgagtgataccatctcttattccattttgaaactctcttctatcttcaaatgaagacattgttgctgtagcgaacttgtagtctgctttgagtttattactccaccgcttatctttctctccccaaatgcagtccctcgaaaacgtgtgtcattctcatgtacgatatgagcgcctgttgatcaacgcggggtgtgcaccacgtattctacagggagccgtagctttaaattacctacagtttgcagtttctgtgaggacaacatggtagcagtcgccctgcctgattgcatcaatttcttaacgtggaatagcctacctttcgctcattgctcctctgtcgataatcattgctgtattctttatgagctccgtaagtttcttgttatattccaaatactagtctgaaatttactgcggtactcatgtgatattgataaattcaatctgctctggcaatctatcaaatgggatattacagatcaagagagaatctctgacttcgag

SEQ ID NO: 114537 - DNA, 757 bp, Physcomitrella patens
  Intron number 1 from transcript Pp1s194_21V6.1 (locus Pp1s 194_21V6) derived from phytozome v7.0 (chr-ID scaffold_194 ; pos 112905 to 113661)
acctaattcagactcacttcggcgaatttgtacaggtttatgctttctctcacctccccgaagtaggatcggacgttatcaattctagcgttggcttgagtgctcgctggaattgtgtggttgtgttctgcttctcatgtttctgtctaccctgacttcgtgttacagtgcgcaatttgtgtgtccatttgccataggacaaaaatgtctggtaagtgcgtcttctagaattttttagggttttgagttaatgagtgattcttagatttgatcggacttgtggagtttgtcattgatgttgtgtgtgtttatttgaatgggaagtgggaatttggccgtctgtgtggaatcagaaattgtgacttgcttcctcgtagttggatgggggcagctgattgagagcctttccggtttgcacgcattgttataaatgtaatttagagttctgcccatgtgcatcataatatttgcgagtattggtcattgtcgaggattgcaaatatgggcatttatacaccaaatctgagttagatgtgtggtggtgaacattgacaacaatgttggtatagcacttattcaattagaactcctgcgaactttgtggtgtgtgtacattgcggttcggaattgaattctggtagatcaacattggcgttagaattggtgttgttagtggcgttttgttttttactatatttctctaacttcggggtggtttgcagaaagttgtcaagtgtctagtttaccgcggcccgct

SEQ ID NO: 114538 - DNA, 667 bp, Physcomitrella patens
  Intron number 1 from transcript Pp1s73_32V6.1 (locus Pp1s7 3_32V6) derived from phytozome v7.0 (chr-ID scaffold_73; p os 139788 to 140454 reverse strand)
tttagagtgcaaggtatgaatacttcaattcgaatgttctgctaatgtcctctagctcgtgagcaaaatagtaggttgccgcgttttatttgatcttttaagaggtggagaccagcaaatggtatgaaatcaggactcaacatatgtccatactcgttctaagatgtaggaaagagcataatgcggagtcagtaggatgcaatccggacttcctcttcaccatgcacagctattgaaccgttcttaagtaaaaccaaattgagtcatgaggagaagtttttaacaattttttttggaatcatttgaatttctgataaagaggagttcaattgctgctcgtactgagagtagcactgcctgtgaccctcataacattcttgccacaagctgagttccaaagtcagttgacaatagtgaagaaaatacatgtcagttgcgttggttaatgaaataaaaacagaaaagaaacgaaaagaagcgaaaaaatttaattgttcaatgaagagtgtgtaatctaaatcaggagatctacatctagtaatattataacactagcaagtgcataaccggccatgagggtgactgtctctttagcttctacattactgttacttgattgaataagcgacattcctgtcacagcctgcacgcaagacgaagtcaacag

SEQ ID NO: 114539 - DNA, 790 bp, Physcomitrella patens
  Intron number 1 from transcript Pp1s133_58V6.1 (locus Pp1s 133_58V6) derived from phytozome v7.0 (chr-ID scaffold_133 ; pos 383521 to 384310 reverse strand)
gttcagaaagcaggtatgtccattcctgcgcatttttttgcattgtatttcggtgcatgttgctgatgcgcttgtgtaatttcgtgagagggattttatgtcacgcgtgtttgagcattagtcccgctgaagctcctcgatgcaggtgtgttaacggcagaagggcgagaaggtagtttggttgcgtctgctggctcatcttgccttttgcttaagattgtgctgatttggacaagggatctttgaagcgtggaatgaagttgaatcactgtccaatgtgtgtaatagtgttgttttgtgtgcaaatccttaagtgaattgagctattatggttatcgattttgtaccgtgtgaagagggctgtctcgattgtgtaccgtgtgaagagggctgtctcgattgtgtttgaatctcaagtttataatgtagatgttggtggaccttgaggaattgtttaatattgatcttgcgaggacgtttttcgtctagaatcttgtattaccataatcagaatcatatgtggactgttttgatatgtggatttgataatttggaattaattttcatattgagacgtagttttcagcttcattgtttctccgaggatttttttcttttttcttttttctttttttttctttttcctgagacgataatcagctgtgaattttgtgacgtaagcaagttccaggcattggtctttgatgtgaagtttagtgtagacgtttaattgttaaggaatgctattttgagtttgttgaatggttcagttgtggcagggaaacgtcgg

SEQ ID NO: 114540 - DNA, 541 bp, Physcomitrella patens
  Intron number 2 from transcript Pp1s93_182V6.1 (locus Pp1s 93_182V6) derived from phytozome v7.0 (chr-ID scaffold_93; pos 1449359 to 1449899 reverse strand)
gtgctacaagaaagatctctttctgagcaggtaatgtggatttcctcggagcagacgttcttttcagcttgtgagttggtcccagcgaagtgaagttcaaatttgaacttagcatagtcattcctgataattatcattccagctcgtgttctatctaatacaagttccaatctcttaatattacgtctggatcatatcggtgtcaattaacagggtaactacttagtgtttcaacatgttttcacactatgccatatattcgacagtacagggacctcggtttttacatccttttgcagtaccttctgaacgcagtacgaaacgatttcaataaaactccaaccctgaaattgtgaccgctggtgttcacactaatttgattatcgttgaatgttctcattgattattagcataaccacatttaatgtctttgggatgctgtggccagactatcttcagtccacatctggctcattctatctaagatgctttttttattttttatttttttatttttatgtgcagtcataagaagaaacgt

SEQ ID NO: 114541 - DNA, 803 bp, Physcomitrella patens
  Intron number 1 from transcript Pp1s5_325V6.4 (locus Pp1s5 _325V6) derived from phytozome v7.0 (chr-ID scaffold_5; po s 2260557 to 2261359 reverse strand)
ttttacttttgtgggggcggtcatcgttatcatcggtgagtagatgcttgtgtaggactaaatttggtgaggtgtgtgctattctggcttgtttaatgttgagatcgtttctctggagtttgtgggttgcagatgtttgcctccgcaggtttgtatttcttgattgggtgtgtgttagttgctagtccgttgaagattgtgtcgattcgttgtgtgtcgtcatcttttaattgcctcttgatattctcaataaggaatttctcccaggaacctcggtggctgattatatgctggggtcgttctcaatcgcttctatcttcgggttggagataaactgatcagttcctcgagatatgctctaaaagtactctacagctagtcatgttcagccgcgtcctatccaattgctttaatttctatgccctgtcatcgctcttcaacatcgatgtttctttgaacttttcccatgccctttccttaaggatctgttcgttaaagctgtattcttgtcctaaactgtaatctttggagaagctaaattgtgacattgtaagtcttggactgcttatcttttacgcatcggtagagcatctctttacgactgctcttggtggtctgtgtaattggttgatgtgtctcatatttgctgcctagacttgttagtgcaactgttaattatagttttttaaggtaatcttcaacgatgcttgagtactacagtgtaatacctttatttgaatcattttcagccgttttcatgtgcagcagagagcattagaatcaaggagttgaaagcatccgtt

SEQ ID NO: 114542 - DNA, 564 bp, Physcomitrella patens
  Intron number 1 from transcript Pp1s271_80V6.1 (locus Pp1s 271_80V6) derived from phytozome v7.0 (chr-ID scaffold_271 ; pos 473822 to 474385)
tctctgagcttctcgcctctccgcatatcgctgaggtctgatcccaatgggtgtccgtcgtatgctcgaattttaggttttgagcttttaaaattcttgtcaccgattgccttgtttcaatcgctattcgtcaagttaatggggtctttgttcatgtcatactctggcagtataaatatgaattctagttattttgatgtgtttctgggtttatttttatttttatttttatttttaaagtagcctgtaaactttctctgatactttggatggaaccctaattctgacgcgttcaagaagtcagatgcctgtgatgggtgaattattgcgtagttttcgtgttttggtcttctttgatctagcaacgagaaggcgtgccggaggcagaggcatattgggacgtaattctatcgtgacttcgtttgattgcgcatgaagatgatataggccttcaagtttggccggaaattgttgaaccggctcgactgctcaaaaatttagagcgttcttcgttcttttgattctgcagttaaaaggaacggagcattctgcatctttagatct

SEQ ID NO: 114543 - DNA, 582 bp, Physcomitrella patens
  Intron number 1 from transcript Pp1s26_46V6.1 (locus Pp1s2 6_46V6) derived from phytozome v7.0 (chr-ID scaffold_26; p os 390887 to 391468 reverse strand)
gctactgcgcttgttaacctcgctctgtctcgccggtacagggtttttttatttttttgtttgtttgtttgtttccctcctcctttgatctctgcgattgttggcctttctcgcaggaggaggtcatcttaagtaatggaatcaaaatgattgaatcctgctgagaattgtgagttcctccttgttttgtgattgttcgtcttgaagctgtaaggtttatacggattgaacactggtttgtgaggcagctggagttgcttgctgcttggtcccatatgatctaccgtgagaggtttttggttttctgttttccctgtggtatttaagtgagtgaattgagcgtatttgaactacgtcgctagtggtcaaatacttcttctccttcctctatttcaattattttacttctttacttttgtatcgattgcgacaaatcacaatccgaattcgatgtttatgcgcagttttcttaggttctgaaccagaggagaatcttgttgattgatgatcttctcgcttagattaaagtaatctgttgtcggagatgagctcatggtagtaccctgcaggtttctttcgacg

SEQ ID NO: 114544 - DNA, 828 bp, Physcomitrella patens
  Intron number 1 from transcript Pp1s13_100V6.1 (locus Pp1s 13_100V6) derived from phytozome v7.0 (chr-ID scaffold_13; pos 813617 to 814444)
atttgtgcattaaggggtccaacgctctcggcaaggtagttttctcttccttaagtctcatttctctcatatcatgcgtatttgttactcagccctagtctgatatggtaggggtcttgctgccccggttgtggatgctgaatatcagctcgagtgctacacttaaaggttgatcgtcagtaatccccttcagaaattcgtgaagctgcacaagacgatcgggcgtaatgcgtattgtagttccactggaggaatgtactgggaattacgggtctagattgcgtgaagcctccgccgattaatgaatgatctctccaattgtctttcaagagtgatcgtagcaattagcgttttgtatctagcaatttgacttcttttggtttctttgtttagactttcttttttcgaaatgtttagggttttttaagtctccgcagtccagatagaagtagatgctattgtagtattgatacacattcttttgattcttgtgggaatatcactcccacgctctttaaagctgaatgcaaataccctcacatctatttgcagacacagatatagttttagcttcgtgaagaactgttgatcttgtagccgacaagatgctatcagtgccctgtcacgtctacagtttaaaacgcttttgttttctggtccctcgtttagagaaaatgtaaatgttggtccttcatgtatatttcgtttctctgaactcttcatgttattctaagttcacagtgggccttggttacgatcaaactggtaattgaaaaatgattctgtggatgataattcctttatatggctatttttctgatttcagaa

SEQ ID NO: 114545 - DNA, 437 bp, Physcomitrella patens
  Intron number 3 from transcript Pp1s1_539V6.2 (locus Pp1s1 _539V6) derived from phytozome v7.0 (chr-ID scaffold_1; po s 3115007 to 3115443)
cagccgttcacgccgtgggctcgcattgtagcgaggtagttgttttttcctatctatagttaattgggaaatcatgagaaatgcggtgctcgtaaaattttcccttcaacttatgttagggtgtattgttcaacattttaaattagtgttgcattgcgagctggagggtcatccatcagtaccaggtccaacttatcttggtttctgaatttcttctgtttgattgtgcgagttccttcgcaccagccttacgttgcttttgtacatctctgtgctattaatcacagttttgctttcagaatttacatttcgcaacaatctttttttagtatgttattgattttgcaaaataagatgggatggaaattgatattcatatgttttcattcttggaatgaccagtgggttggagttattgagagatccacgatataaca

SEQ ID NO: 114546 - DNA, 977 bp, Physcomitrella patens
  Intron number 1 from transcript Pp1s249_56V6.3 (locus Pp1s 249_56V6) derived from phytozome v7.0 (chr-ID scaffold_249 ; pos 328050 to 329026 reverse strand)
aggtcgtgacatttgcttcatcgaggtgctctttcgtgcgtaatgccaatcgtccctgattttgtcttagtttctctaggtgttgagtccaatcctaacgttgatctgtgagggtctcaactgtagagtacaggatggaaaccatttttgattgttgaactctgcccattctggtaacaagttttggaatgatagatgaagttaggttccacgcagtcccaagcacacctgactttaaatttacatctggattgttggtgaaagcagtggttgttttttgtgaattgtagggcagcatctgtattcgtcccaggctatcttaaattgcaaggataggatgttgtgccgtatttcatcgttacgatagttttctgagaagctacctcatcagttggtgcagaacacgctgtttggtgtgaagattaggtgaatctttagttctcttttctttttagattctttccaagctttcctccaaatggatgtctggcgcatcgcaattggcgggacctttttttttttttttttttttttttttttttcttcatttttatactacgttgtaattgataattatcctaattttttaaaaaaaaactggaaggaagtgtttcattaacttgaggaaaacgaagtttaaaaatgcatttcagcatccccagctggatgcaagttacaaattggtccttttagttccaccgaaatcgaattaagacatatgctgtcgatgagaaagctttgctttcaaattgaactgccaccgcttagaatagtttcatttcgataaagattacatatggtgtgcctgcggaaaggttttcccaatccttcaattcatgtatgatgtttatgattctcacaggcattatgttattaactatttaggttgaatttagaagagatttgttacttgtgttttaaatcaatagctcgttacgttgtgcttatagtgttaagtgattgctcaggcatcgatc

SEQ ID NO: 114547 - DNA, 850 bp, Physcomitrella patens
  Intron number 1 from transcript Pp1s78_210V6.2 (locus Pp1s 78_210V6) derived from phytozome v7.0 (chr-ID scaffold_78; pos 1431073 to 1431922)
ctgccctgtgactgggtttttgaggagttgttgaggttggtcttgggctctcttacttcactcgcgcctcgttgtgctttcatttcgttccggaacccgttctttgttggtgttgttcgagcagtgtttgttggagtagttgtggatgtcacggttgtccaggcattgatcttgtgacttttttgtgattgttgtgttctgttgaaatatttttcatgagatcggcttgaggttgatgttaaattggccttcgtttcggagttgaagtggctttgctgcgatttagtacaattttaggtgaataatgtgaggcttctcggggctggtgaggctaagggctttactttcgtgtatatagaagtggtttgaacagtgacgggagtgtctctttgagtcgtttcatttgtatgagtgtgacggattatgggtttgacctaatcctgtgatttccggttttgtaacgctttgtctttggtttgtagactcaaagcttgactgtggaagatgaagtaatcagtggataaggtttttatgtattaggggagtttttagctcttccttcatgttaacattaaactaagtattatttgaaaatccttactttcattatgatggcgtttcgtagtcgtcgtagtaaagtgtgcagatttgagtttgtaccaagttgggaattatggattccttgagtgcgaatcatggtaatttctcttctttttatattatactcaatgtgcgtggagcctgcgctttgggagtttttaagatgtaaaaaatagtataacagacgccatatactaattggttcatgtttgcagggtctacagctgcttacagcaattggtgccgttta

SEQ ID NO: 114548 - DNA, 804 bp, Physcomitrella patens
  Intron number 2 from transcript Pp1s215_88V6.1 (locus Pp1s 215_88V6) derived from phytozome v7.0 (chr-ID scaffold_215 ; pos 718604 to 719407 reverse strand)
aagcatcagtacttgcccaaggacttgcaggttcttttcccttccacctccgccttgctttttcggggttttctgggttttctgggttttctgggttttctgggttttttttttttttttttttttgttatcggctcgatttcttgaaggaacagaagaatgaggttagggtttttagcgattggaatgtttgcatggatctgtttgagctgagggaagctctttctcaagtgaaatgtgtagtttttgtgtgcgcgaatattttgcgagcgttaggtttagataccgaaacaaatgttcttgagcaaagaaagaggtttagagatcttgccgttactgggtttgttgtatctgtaactcttagagtagtagaggtgctcctcctaaactacctcgttacgcacataatgtgtttagtggggtacattctcaagatccatttaccaatatttgtaagagtgatattagcagggtttcagttgaggaatcttgcctagatgtgaatgctgctccgaacgctggatatatcgctgggctgtgacgtggcggtgggtaaacgtatgctactgttttgcagtgcaaattggtggcaggaggatacgtttttgctatcgatcagcagttatagtggtggctctagtttctgttcgagccagcggtcaagttgttcgtcggaactattttcgtagtatatgtccatatctgcattggtattgatgatggaaaaggatttttgaattgaaggacccgttgcaacctggctcatattattctcgtgcattttgcaggctaagcaaactccgt

SEQ ID NO: 114549 - DNA, 596 bp, Physcomitrella patens
  Intron number 1 from transcript Pp1s41_130V6.1 (locus Pp1s 41_130V6) derived from phytozome v7.0 (chr-ID scaffold_41; pos 1079439 to 1080034 reverse strand)
aatcgggtgcattgccgggcattttccgtgtgtgtgtgtgtgtgtttgtgtttgatcctgagattttgtgaccactttgagcttgcagatgggagagttctgattggagatcgcttgtgcgctaagtaggtagaaatgaaggctgttcatcttgtgttattgcattacgtgcgtggagattggtgttaatttatttttgaagtattgaaatgggggaattgagtgtttggtgtgcgcgtgctgagttaatggggttcggcagtatagactgttcaatgaatcgtgtgattgtacgcagtatgcaattttggtattgcactgttcgttgtctacggtttttcgaaagtgtttaattattcttttttcgatgaataaataaataaaccatgacacatcgataatgataattataatgatgaattatttatttgagagacatcgaagagtgtaagcgtgtgatcttcccaatactgcattctggtaatgcagtatttggtggaagggcagttgcaaattttttttgtactgaattgaatgaatgattaatctgatggtgtgtagaggtttgtgtgtgtacgcttgacgcgttgggggat

SEQ ID NO: 114550 - DNA, 813 bp, Physcomitrella patens
  Intron number 2 from transcript Pp1s227_69V6.1 (locus Pp1s 227_69V6) derived from phytozome v7.0 (chr-ID scaffold_227 ; pos 449095 to 449907)
aggtcgtcccgtgtttgcgcttctagatcgcggaggtaatattctctgttatatttcatgtgacaagatattacagtattttgtgggaatgctatcgtccctagctagccttagggagtccctggttaacctttgtcttaggataacccgtattcaaacctaagggtgctaaaattgaaaatcaccgaattaattgaggtttaatgtttatgaggctatttagcagctaatttagtaaatagacgaatctctaagtcgaatgtgttttactcttttttttttctttttttttcctcttttcttttcttttcttttctttcatatccacttctaaatccataatcacattcaacttgcagaaaacataaaatatacttaaaccttaattaaaaagaggcttttcagagcactcaccaactaacattcgatgaattgataaatgtttgcaacatgttttgtactaatcatttttatttattttttaattcaaaaaagtttatctgctgagaaagagaaaaagaacaaaggtatttatacatgtgtttatttgtttggtttttagtgtaagattgaaattgtgtgaatatacttgccaaacttggatgcatgattcaaatgagttgattattgggaattgattttatccatcatcactgtccttgtacatgcattttccatgaatataattttggtagtatcactaacaatccccatagaaaaacgatgcggcaaaactttgatcctccgctagatgcacctcaattttaaaacttgaactactgctcatgttgatacattaactgattatgcagg

SEQ ID NO: 114551 - DNA, 582 bp, Physcomitrella patens
  Intron number 4 from transcript Pp1s75_250V6.1 (locus Pp1s 75_250V6) derived from phytozome v7.0 (chr-ID scaffold_75; pos 1540011 to 1540592)
gtgcctcttcaaattttctttaaggaatatatctgtcaaggaagcggcggtttccaacaaaaaaatgatcaaatgcatcctgtaatgctggatgatccttaaattgtctctatatctggtctgaaatttggacaggaaaaaacaatgaagtcttgatcatatttcagttctgtagcgtcgcacagtttgtttcgttttgtacaccagacatctgtaagggtgcttcgaacgttagtgtccgtttgaatgaaatctcttttgcaataccatgtcctgctgccatgggatgtgcccgcatgacatcacatcgttggaagaaatgcagaccgtttattctttacagttagatgcacggtgtgacctgtatcaacagcctatatttggtaccttcgcttgtaagcgtgtgaatcccacaaggaggatctagagttctcaagttgaaactgttgctttgaaaagtacatcatcctcatgatttcagaacattttgccactgattgtgcatttaatgatgatctgaaattgggatggctttgtgatttcccaggaatttgaggagagtggagactcagagaagcattt

SEQ ID NO: 114552 - DNA, 640 bp, Physcomitrella patens
  Intron number 1 from transcript Pp1s122_147V6.1 (locus Pp1 s122_147V6) derived from phytozome v7.0 (chr-ID scaffold_1 22; pos 936408 to 937047 reverse strand)
tccgttgtcgaattgcttggtctgctgtttgcaaggtacgctgcgcaaccctttttttttttttttttttttttttttgttcttttttgttgtcggggacttttctattctgagttagggtttgcgcgcgagagaagcacgctcgatttccagtactttgttgcgacaccccttgtttggttggatgtcagcgttgcgaggattttttcataattacatgtgctatcaggtttacaggagtaaggagtttccttgaagagtgggccgttattgcgttgttgaatatttgagtattggtaggctttggcggtggggatgttggggctgtaatgtggttccgagctttctttgttgcttgaagagcatattgtcgggtattttttgagttctttgattttttttcatagaaaacgggtgcgtggtggtcctgagcttccaataatcgtcagtcttccccttcgtgccgctgttctgctagatattgtacagacgctattgagaacaggataccgttcgaggtagctttttgcaagaatggaagagagttctgctgctgacgcaatggctgtgatgcatgtcgcttcttcttcttttcgttttttgagtaatactatgttctttcttgttcgctttttagaat

SEQ ID NO: 114553 - DNA, 412 bp, Physcomitrella patens
  Intron number 2 from transcript Pp1s286_6V6.1 (locus Pp1s2 86_6V6) derived from phytozome v7.0 (chr-ID scaffold_286; pos 142306 to 142717 reverse strand)
tgtgcgcgcaacacagcttcttacctctcaaaaaggtgtgtagagttccttccaagaaattgactcttgtgtatgctattcaacaatttatttgcatcctgaatttcaataattaatattgcaatatcgactgtggttcatagaaattgatgacccacagatagtcgccagttacaacttcgtatggcctgaatcctcgaatttattaggttcctatgctcagttgtgaatatctggagtctgtaatagttctggtgtttatataactcctcttataagcaagttatcaaagtttgtgcacagaaaattggcagcttcaggttaaatgtttctttttcttctttgttttgttttgttttatttttccctttttgctctgcagtgtcactagcagcagcagcagcagctacga

SEQ ID NO: 114554 - DNA, 677 bp, Physcomitrella patens
  Intron number 1 from transcript Pp1s41_279V6.1 (locus Pp1s 41_279V6) derived from phytozome v7.0 (chr-ID scaffold_41; pos 1920371 to 1921047)
cagaagaagagagctgccgcatgttcaccctcagaaaaacattttattagcgtcatacttgaagcatcacgaactgttccaaaaaaaaaaaaaaaaaaaaaaaaaaaaacactagcagcagcccaatttcttcatccaacccaggagaatcctgcaacacatcagtccaaagtgcaaaagaacccataatttcggtcactgtgtgttggaaaaacaaagacctgcacggaagtaagcaaaaaatttaaccacgagctacgaaatcatcgcctgggtagtattcagtcagcaaagacgatacccctacaaagataggcccgtaccatcccaactcttccgacaaattaccacttcagtttcagtctcccaagtcgccgaggctttcgacgattctctataaagtattatgttcgaagcaaagttttcttcgacagctctgactccaggatgggctttggctatctcgccatgattccaaaagctatttattccacaccaaccagccaacaccagggagtccatgctctagttatcgtgagttcaatgaaattgtggcggtagcatctgatcaaaagaagctgttttgtgttttgttttttgttttgttttgttttgtttttttttttttttcatctctatgaggaactgggccctcctcctggtggtgccgagaaaat

SEQ ID NO: 114555 - DNA, 858 bp, Physcomitrella patens
  Intron number 1 from transcript Pp1s215_6V6.3 (locus Pp1s2 15_6V6) derived from phytozome v7.0 (chr-ID scaffold_215; pos 26763 to 27620 reverse strand)
aactgcttcggtatgttggggttggttttgatgtggtttttttgaggtttgctcttgtgttggtgacggtgaggtagtggtttcaaggattgatggatggatcggtgagtggttgagggtgacgagtggtagtgaaatgaaggtgcaagcgagggagtttgttgttgttgtgggtggggtcggcattggatggagttgcgaaaacggatatgtgcttttgggtcttgggtggcgttggcgcgtctctctggagcagatctttcatttcaagcttggtttttttcacaacacagtctgtcggttgaggccgtattggttagttaaatttgtgctagttggtgtattgtagcgtggctgcgctagatcttatctgtgcggtttgatgatagtgtttttgaaagaggagtcgatgagattcagctagtatattacagattggctggtgttttgtttagtcttacattgcgatgttgtattatatccacttattatcttttcctgggaaatgcttgtgtttaacatatgctctttgcttttccaccggtatgatctcgaagaattgagtgttttttctctgtggaatgttagtgatgtggataatccgacaagtcgtaaactttgtatttgtatgctcttggtggaacatttttggtttgcattaccttgtgtggtgatagtcatcgtccaaccaactggatgaaattagtttacagtattatatttcaccctcgtaatctctttgcgttgtgctgagacagtgggttgctgaccttgtctttaggaatgttgtactgaaaatatgccatgaaaacgtgttttgcagtaacaccagtcacaagtagcgaggaccaggaggca

SEQ ID NO: 114556 - DNA, 742 bp, Physcomitrella patens
  Intron number 1 from transcript Pp1s55_210V6.2 (locus Pp1s 55_210V6) derived from phytozome v7.0 (chr-ID scaffold_55; pos 1313861 to 1314602)
gagctgtggaggttagcctttttctgtgatcagtcctattgttgagttgggtgaggtgctttgtgcaccctgatatgcggtttcgcaaggaccgagttttattttattttatttttatttttttataatgtatgttcgttttttgtttagttttcggcaatctagaaggagtcaggatcttgacaggtacagtactacccagttcatcaatattttttcttttcttgtgaggaaatatgctgcgctgtgcttggtatgagcatgttaagaagccataagtccccgagtagtagtgttttaatctgtggctttgtttacttgtggagtcaagtggagaagtttcttaacactgtgtacgttgaattctctaagaaataactcctgtaccaagccagatgctctaatcgagcttggagtgctcttggatgatatgtttgtccaagttctcaccaaaatgactgaaagcaggaagttgtcattgaattgggtcatgttgaaggcagtctggtggtggaggcatgctttgttgtcctgattttgcgcttagtcgagcgaaagattgagaaacttagaggagttttagtcgtatgtattacgagagtgtcggtggcatgtgcaatcatggagttaccttcgtggattcgaacgggatgtttttttctttgatatatgtaggtggtatggtgttgattctgtataatattctgagatgactgagtttcctgtatttgctgataggttg

SEQ ID NO: 114557 - DNA, 941 bp, Physcomitrella patens
  Intron number 2 from transcript Pp1s45_250V6.2 (locus Pp1s 45_250V6) derived from phytozome v7.0 (chr-ID scaffold_45; pos 1983074 to 1984014)
attctgaccctgtctacggccctcggctcaaacaggttttcctttcgtctttcctttcctagtgtcctgttcttgcaggaatatggttttcattttcacttcgtcttggcgattgcagaaaccgtgtcagcatgtctgttgatgcttaagtattgttcgaaacgtttattgaaattgacgtcgcgcgcttgcgaatgtgctgagttttctcttccacaattgataccaggctctctagggtttccgactaagtcaattgccgcgaactccatcatcgtgaacaccattatgggtgatgttgtgttctcgttttctaggttttatgagtcctgacgttcttcaagaatgtgcgacggaactgttcactatcttgtaggattgttgagggttctcgagcttgtcgatgttcttctcatgcaggatccacttttacgttgaaccttatgtcttggattatagaattggattcttttgtctctgcacttgtaactgcaatggtgtatcgtcgtttatttctttaatctatatttgttatctgccttgtttttgtgacaccagttttccaacttaatgaaattggtattgtcggagtcatttgatcaaggttaatcgcgtctgcgagtgtcacatttagatttgtttcattgtatttgcgcgctaaaactcacatgtctggaacacaactgcacccctgaaatgacaaagtaccttcaactctagattctactgaagggcgacatattgtcctgctatgagttccatgacttctacctgttcaacggcaactaatcgagccttactagaatgttaagctgcatttatttgatttcaacagccaagccagcagacaaagtttgggtttatcaacagttggtgtgaaacctgtgtttaatgactggttaatttgatacaggtgaggcaaggagccactatcgccaatt

SEQ ID NO: 114558 - DNA, 837 bp, Physcomitrella patens
  Intron number 1 from transcript Pp1s80_71V6.2 (locus Pp1s8 0_71V6) derived from phytozome v7.0 (chr-ID scaffold_80; p os 438991 to 439827)
gggaaagtccgtgattgtgactgctatttctttttgtgcgtttggcgtcttctgtccgtccttcgattcggtgtaatgtgcttggagtacgtgtgatttgtgtggatttttgttttgattttcttttctgtgtggaggtgaagctgtttctgagtctgcagtttcttgtttttcttgggaatgttaaactgtcaatttttactattgtagtttctcgtgctcgaagcgtagattctaaaccgttctacagaagtccgaccactaatcttgcagctctccttaagtgcgtcagtgagggttagattttttccgacaaaaatgcctccgatgcactttctcggccatcgtatggcttcataaaccttgttggtgtctggaagcgccttatttctccttaccttatacgtcccacgactgctactgtgcttgtatcttctgttcactcagctagcagcgcctcccacccacaggtcctttgaaaataggtgttttatagtaatgtgatgtatgtggttcattatctcagattaagtcgtgacgatgttatgcaccgtctcttattacaggtgaaggtggttgtggctacgtagttttcgtagatttgaatcaccctacttgaagtcatcctttgttcaaacgatgtaaccaaagctacttgagaatttcaagttgagagagagactgttgaagcctccgctaatatgattcggaatggccagatgcctagacgtggatgcgttttgtcgaagctgctaattcgtattgaatctttgaagttcattgtggcatatgaattgtatatgtggacggctgatagattttgaatgaatgcagaat

SEQ ID NO: 114559 - DNA, 636 bp, Physcomitrella patens
  Intron number 1 from transcript Pp1s240_80V6.1 (locus Pp1s 240_80V6) derived from phytozome v7.0 (chr-ID scaffold_240 ; pos 495206 to 495841 reverse strand)
aatttgaattttattttatttttatttagtgttcaacaatgctctatgaggagaagacaaaggcaagtaattaaagagtgtatggaatccaccccaaccacaaaagtagcacctcttttcaaagcctccattagaagcttttgagccctactcacagtgatcttggaattctattcttgacaatttgcaacaacaatatacaaatcttaatttataatttatcaaaagttgaattattacttcacttttaatgaaaacaatgagatatatagccaatcaaagatgtttccaatcaaattgtaacttccaattgaaaattgttaaagatgtaaaacactaatcattcaaatgttatcatacatgtagaacttctaccaaatgttgtttttgaaatctgttgtggaagtaggactgtcaacaacagatttcgtttgttgttcgttttgggggttttatttttattttttgggatttttaaagagagaaagaaagaaagaaattccgcggttgggagtctctgagattggagagactggtcatggagattgaggttgctggatatggcgtcactgagctgattttagtgctgagcggaacgtaggtgtggggaagtcctgcctgctgctgcaatccacg

SEQ ID NO: 114560 - DNA, 1043 bp, Physcomitrella patens
  Intron number 1 from transcript Pp1s171_16V6.1 (locus Pp1s 171_16V6) derived from phytozome v7.0 (chr-ID scaffold_171 ; pos 106162 to 107204)
tagatcttgagatcggcacttacaacacagcatttgcagaagatccaaggaattttttttttttttttttttttttgtgtataccaagcatatcatatcagccttgcaaaatttgtgaaaatgaatgagatttgttggttgtcgctggcgacgacatcaaatctaaatcgacatttaatcctaatgaaatctcaatctgcaaggctcctctctagttggccaagtagctgatccccgaacattgcatggaaccatgcactggacacaagcacaaccacatgtgctgcaacatggacaaacgagcgagtgatgcattctactcaattcgattgaggagaagctcaacgccaaacagtccaggctgctcatcaaaactcgcttaagggttgtgtgttccttgttgatcaattgtgttacacaaccgccagttcacatgcaacgctaaattacataacaatattaagttgattttctttcaagtcttgtgaaagccgaaagccctctccagaagtaaaagagatgacgagcatttagggacttggtcattaacttgatagggtgttgagaagctgctacaccaaagtggcctgcaacgtccatcttgtacacattctaagtaaatcatttcttggatagaattaaattctaaggattctttcattgcgtttgtattttggattgattaatctctaatcttagatcgcatactctctaatatacccagcaatctatcacatgtgccgttttatgtattcacaattgaatctaaaggtgtgagttcaaaggtttcagagggggaactcccctctcgctgaagaatttcccctctggctgaagaatttcccctcttcagcctaaagcaactgttgttgcaatcgtgtttaagaattcctctggagcttacccttcatttacttttctttctttgagcctttgtatacacaaaataataatagtaaataagaataagaataatcccatggatcttctgcaaatgctgtgttgtaggtgccgatctcgagatctactacttcgtcacattg

SEQ ID NO: 114561 - DNA, 906 bp, Physcomitrella patens
  Intron number 1 from transcript Pp1s97_204V6.2 (locus Pp1s 97_204V6) derived from phytozome v7.0 (chr-ID scaffold_97; pos 1036824 to 1037729)
gaaaggtaatgcccactaaccctaacatgccctttcaaacctcctctatgtttttctagggcatgtttcacatgttcccatagtttgcagactcattaaaataagtctctaattctgcttgcacagcagtcctcaagatcgtgaagcagtgctcaaacaagaagtgctgaatttaaatcagcggtagaactgtccacggccctccacatcttgccgatttcatggttggactcagggcacaatgcacatcttggcattttctttgcagctgccggcataggaacataaaaatttattctatttaagttacaatttcaaatgcatttatgcgtttttcttttttttcctttcttccttttctttctttccttttctcaatttttggcccattcttcgcgtaatgtgtctggctcactttttgtattctactgaatctaattttaattttcctgagtgccactaccttacgacaaacaggataagtgcgtggaacgcctcaatctatacactgtcacgggtcaggtctccttaagatatcgaagatgccttggtttgtggataattaaatctggatttagtgtagtaacgtgttcaaggaaaatgatatgtgggtgttgtgagcatgtttaattctgcgtgcaatgtatcactcgaggcaatattcttttgatttcataaatacatatgtatatacatatataaatatatattctgtatggagccttaaatgtctttgtcatcgtcatacaattctgtccaagtacttagtgctgcttgcaaagaatttttttgtcttagattgtttgtacgcccctctatttgaaagaagttgacacttctttctccttttctggatgctacttttgtgcaggtccagtactgtaatttgcacctgaacggacattt

SEQ ID NO: 114562 - DNA, 921 bp, Physcomitrella patens
  Intron number 1 from transcript Pp1s1_162V6.2 (locus Pp1s1 _162V6) derived from phytozome v7.0 (chr-ID scaffold_1; po s 1019026 to 1019946)
tcgagctcgttgagtctcaggtactcgctttcacaaatgtttcaatctgaggaaatgttgtgttatatgtgctttttgagtggttggagattaattggaatgtgaaagtttttacatagttttttctcacattttgctaggttgaagatctcctgttaattgcttattttatttaatcttggaaatgtcaattgcttcgatcttgcaactgtgttgtagtaaattcggtttaacgactcttttgagaagcaaatatgaggtctagattgttgatttgtgatatgagttgtctcatacgatgtactgcatgattaggagtctattcttttgtagtatacctacattggttattaacttgatcgtgcaatgccgcgtacttttccattggtgaagtggttgtaaaggtcctgctcaccgtgtgttgaagtgtttgctaaagacatgatcaagtatgagagagagagagtaaacatgagttgttgatgacgtcttttgtatttaaattgtttggtgtgcttgtcttgattccttggctcgtggctgtccctcttcctcgctctcttgatggctctcgctggtcattaatcacgactagcagaaacttatgtgaacatcacgtttaaaataaaataaatatatttgatttgagtttgagatactggagttgtacatttgagtgccctgagtatcttaagctgcagggtcgggtgtcgttgaatatagccattgtggtcaatcaaatatcatgattttgttcagacttgtcgatttacttttgttttaactaacgaccttcactcctaagctgggattagtcagcgccagttatgtctttgctaagattgtgacctaatcaacagttaatccggttgtttcataatttcaggagaaatcaggtcaatctgagaaaggggaagaaac

SEQ ID NO: 114563 - DNA, 845 bp, Physcomitrella patens
  Intron number 1 from transcript Pp1s124_37V6.1 (locus Pp1s 124_37V6) derived from phytozome v7.0 (chr-ID scaffold_124 ; pos 318375 to 319219)
ctcttctaccatcggtaaggttacaaacttgttattaaatttatattaaattttctttcatttgtcttttgctttcaaaccttaaagtaagatcatgattgaaacattgagatattcatttatctgacatgatatttgacatgatatgcttttgtgtatcttactttttcaaaaatctgaattgttagccaagttgaactatggtgttaaatgtttgttgctcaaatcaacatagatatgatgttttgaattatgcatacattatgattattattattatgattattattattattttgataaaacttttaatcttactgtcattttcatgcacatacgtcttaggacaagctggaacagatccaaacccccctcggaagcctatgtgtgtgtgtgatggagcgttgtccagttgaaagatgatctttggagtgtcaaagcgctgttgctgaattgtgtaaacatagctcttttctcaaaatgaagcaatatttttcactgttctcacttccattgtcccactacctcccatcctatgcatctccagaccgtaatgcttccacctctgtgtttcattgtgggtttaacatgagagccgtgtgcaccctcttgagatattttccagcaccaaaatagctgaatttcaacttgtccgaccaaagtattcctctatccacttcttgtggttcttcgcccaagccatgcgcttattcatgtgaagttgtctcaacagcggcgtattcttcttcttcttcttcttcttcttagtgagtccagacaggccttgactgagttgtgtggaagccatttgctctgagatctgcaaatgatcgactttaagcagg

SEQ ID NO: 114564 - DNA, 811 bp, Physcomitrella patens
  Intron number 1 from transcript Pp1s204_138V6.3 (locus Pp1 s204_138V6) derived from phytozome v7.0 (chr-ID scaffold_2 04; pos 797782 to 798592 reverse strand)
cgatcgctttactaggtttggtacgaggtgtgcgtgtgtgtgtgcgtgcgtgtgtacttgtttgtggagcagagtcgtggtttttctcagctcttggtcgctgcgtgttcatgccaccgttaggaaggacaactcgctgttgatgcatgggctctaattcggtggagcttctatgtgcttttgggtcagagttggggatggagttttttttcggatgttttggtctcgtgaagttttgttgtggttgtcttgattttctttttgagggttatttcgtgtgatgtggcgagtagcggtgggaattttgttttcatgttgatgatttggctttgtttgtggagatcaagtgtgccttgttttactgtgattgagttggtttcggtctgattatgtcagatgctttagtgcagctgtaaactagttttcatgccattgtgcggaacgtacttggcaatccgtgaaggcttcatggtctatcgtgattctgactgctagttaagagaagctgaaggattggggttgctttcttactgtttgtgttgagtggtgtaagcttgtgccgtggtggattctctcagctgtgaagcgcatgtagccaaaatccaaatctgcgccagttagcttttagctgtgtgatagaaacctattcttctctacctaagtgaaattttggtaactgtacttcaaatagtcagacttcggaggccagaaaatactatagaggaacggcgatcttaggagcatttttactgtctttctgctctttgactttgttctgtttatgattatcaggatttggaaattgaagacg

SEQ ID NO: 114565 - DNA, 464 bp, Physcomitrella patens
  Intron number 3 from transcript Pp1s54_280V6.1 (locus Pp1s 54_280V6) derived from phytozome v7.0 (chr-ID scaffold_54; pos 1732448 to 1732911 reverse strand)
caggagccgtcaaaggtttgttttctctgatcaaataagtccgaaactagaagatgctctccatgaagactggaattcattcaacctcttcttcagcaccattgtttgtatcacggtactttctacgttgcaggatggtacgaatttatatgccgtctcaatcattcggggattgccttctgtcatgaaacagaagaaaaatggtcaacgacttatgaaccagcacaggcacaatcagtcatgcttttcataataccaatttgacattaacatattgtgtgagcttaacctctttgcatgcaagagtcattgattgtccttcaaaaacgagtaatttatttgatgttccactatggatgagttggagaagcaaactattgcaactatagtttttaagtagcatcctaaatgagcctttctgtagtgcagcaagtaaagattggagcaaaaggtgcggtgcaggg

SEQ ID NO: 114566 - DNA, 390 bp, Physcomitrella patens
  Intron number 4 from transcript Pp1s229_18V6.1 (locus Pp1s 229_18V6) derived from phytozome v7.0 (chr-ID scaffold_229 ; pos 212792 to 213181 reverse strand)
cttagtggtatcgatcttgaatctggacaaaggtatgattttgattgttccgtatcattcacaagtgttgggaatctagaaagatgtgaataaaacttacttggtgttttttctttttcttttcattctttccttttcttcttgtgattacttggttatgctatctggtgggtagtttattctgaactacttggattaggttatgtgccatgtactttatttttattttgatgataatcttgggtcgctacacatgacacgccagcactttgttttaatgacttcattaaactgccgggctgtaggctgtatgggtcttatttaaattattgatcgaatttcgatgcggtcttgtacataattttctgcttaatcgaacctttgtgcagg

SEQ ID NO: 114567 - DNA, 750 bp, Physcomitrella patens
  Intron number 1 from transcript Pp1s229_18V6.1 (locus Pp1s 229_18V6) derived from phytozome v7.0 (chr-ID scaffold_229 ; pos 214020 to 214769 reverse strand)
ctcctctgcctaatcattgctagggctccattttggtacgattcttggattgttgctgatgctcgttgcttttgccctaggtcatgcttgcagacttgatctctttgcagaactttgcagtgaattttagggtttcttgttgtagttctgtatttctgtttcacgtgatcgatttgtcaagtggccgaataaattcaaaaggatacatgattacgcaatccagtaggcggaggtaatagttttaattccgcatgtgaattttttgttcacggccgaactctgtttgttagaaattctttacgatgatattttattgcaggcttggtgaagttttgacagtttttgtttaattcgaggcagaccagtgattgagtttacatagtttggatgtggggatttgaaaagaattgagatacaggttgatattaaagaaagttaagattgacggtaacaagaggaaggaacacgtgaataatttttctttcatctactgtcatggttttgggtttgcaaagggactctggagaaggggcaaccgacaccttgcagcttataccattatggaaagaataatcttattgcatcttcttacagtgtgacccttacggtgaaatttaagtccttgctctgaattcttgtccaggagggttttctgtagacataataagataatcttgttttgattgaactagattgtcgcaagaccttgagtagttctgacgcatgaggtttgtgcatcagccaaggaat

SEQ ID NO: 114568 - DNA, 877 bp, Physcomitrella patens
  Intron number 1 from transcript Pp1s284_17V6.1 (locus Pp1s 284_17V6) derived from phytozome v7.0 (chr-ID scaffold_284 ; pos 147823 to 148699)
atttgcctgacttcatttctcatcttgaggccgtgctcgttctctctccttctctcggctttgtgtgtctcttctcgtgtattacccaatgtctctaccaaaggaacgtgtcgactcgtgtgcttcgagaagtaaacaaagtagccacgcaacacgttgtcacctggttggccgaaactctgctagtggcaatcacgagagatgcgatgcacaagtcaaggaccagacaaggggatgaacgttcatgaccgctcaagatgagactcttcataactagacttggacacggtatccaaaatcaaacatatacctcaaatacctgctactcttgcaaggtgtatctcattttatattaaaatagtagatgaactatcagcaaggaaatccctaaacaataggctctcttgcgtcgctactggctgacacaggattagtgttgcaactagttcttattccaacatttaccttcatttattttattttttttgttttgttttattattgaaattattgatttcttagttttaatgaaaactaggacagtaagtaatagcatggtaaaaatttaagtgtgctaaaaataaattgtacattactttaaaaaaacacaaaaacaaatttaagctggctactctaaaatcaaaaaactatcagctacaacttataggaaaatattttaaaaatgtagacttgatggctgtaatttcatttttgtttatagtatctcatttcaaatgctgttcccggctcgtatgtcgtcatattttactcatagaagatgttgaaataaggacatgtcttcagcacttcactgaaacgttttatgtaatgaccaaatgcaggaagtctgaagcacttcattcccacggggagtcga

SEQ ID NO: 114569 - DNA, 504 bp, Physcomitrella patens
  Intron number 2 from transcript Pp1s726_1V6.1 (locus Pp1s7 26_1V6) derived from phytozome v7.0 (chr-ID scaffold_726; pos 7037 to 7540)
gtactatcgtgcacggcactattacaggtatgtagttctcatcggttcaaaatcaggtttttcgtgcgggttaatgtttgggtgtagaggcttggaggcatactcttttcagctgtttcgttttgggctgattctgcaatgaggtagctgtaagtatcgatggaaggcgtgggattattttacttataagggtttaggttttgaaataggctcgatgaacttttgagggtttaggtttttaaatagggcttgatgtggtgagtggtttttgtgcaagaataggttggacttcactgctgtagaggttcaggttgtcaaaatattgaaatcttggggagctagtgaaagttcacgaagggactcatatgcagggaatctgtgacactactttttgttttattccatagcttaacccttagttcttcaatagcgcggttaaacgctagttgaatatttcacagttgttgattgcttgagagctcttttgcaggtgtggatatcagc

SEQ ID NO: 114570 - DNA, 450 bp, Physcomitrella patens
  Intron number 1 from transcript Pp1s473_1V6.1 (locus Pp1s4 73_1V6) derived from phytozome v7.0 (chr-ID scaffold_473; pos 31742 to 32191)
atttagaggtggcggcgccatcgatatcgtacgtggtctttaccttgtgggattgtgcccgagctgttgtttaattttgggcggagtttctctttccgctttgtcataattgttttctcactttgttgggttgaaaggatattagtagtgggacagcaatggtttgggctttatttgtgacaatgggtttctattcttctcttttgtttacttttcacaagccgtgcaatctcctacgtgtggacggattgttttttgagattgtggagcaatcccaactaagcatcccctttagttttttcacttgtgtgtcacagtctaacacggtcgttgtcctgttctacacaagactagatctatgttatggatggagcatctgtgataacctcgttcatttttttgtgtgtttcaacagtgcgatagcgaagggtggtggagtttctttagctc

SEQ ID NO: 114571 - DNA, 622 bp, Physcomitrella patens
  Intron number 1 from transcript Pp1s224_89V6.1 (locus Pp1s 224_89V6) derived from phytozome v7.0 (chr-ID scaffold_224 ; pos 511836 to 512457 reverse strand)
gcaaagtcgacttgcgccgattcttgtacttcttggtatgtgcgtttacatgcttcttattgctgcattgtggagagggcatcggtgatttggttggaatttctcgtgaagctagagtatggaagaggtttgtggtgggtttgaaacggggtttgagatttgtcggagtagcatgcaattgtgaacgcctttgtggcagctgtattcggtaatgttgatccttggattggtggttttgttttttcaattgcaggtgtaattagaaggtcgctgtggcagtcttctctgcaatttctagaatgtatacatagctgtgcagtctgttataagttttagtgattgtccttgttttgcagagagcattcctgtgtttgtctgatgtgggtgtctcggtcatcttttcttttaagtgtcggtctattttgtgatgaatgcgtcattccggtgctggagccagaactgagtggagaatctcagtttgtgagggtataacaatgagttgaactgaactgaattggatttgattagattgatgacgacactatggtatcttctcgtattctaacactatatccatcttgttcacgcagcattcatcgtcattgtcattgcgttggcttcc

SEQ ID NO: 114572 - DNA, 333 bp, Physcomitrella patens
  Intron number 2 from transcript Pp1s268_3V6.2 (locus Pp1s2 68_3V6) derived from phytozome v7.0 (chr-ID scaffold_268; pos 11309 to 11641 reverse strand)
ggagcttcagagcattaaggaggaagcagacgcaggtacgttattgccatagtattctgtgaacttcacctaaatcggggtgatgtcacggggatttttttctgcagatctgaatttgaaatttttcatttgtgacatcttaatctgaaatatgaattttgcactgattgcaacggatatccctcaaagtgttttactctttttcatttgatttttagcatttgtaataacaaaaaagaggatctctacgtcattgtctctttcatatcttctgagtttcatttattgcctggttcagctggtccgctagagtttgactcgccgctggaagta

SEQ ID NO: 114573 - DNA, 318 bp, Physcomitrella patens
  Intron number 1 from transcript Pp1s76_119V6.1 (locus Pp1s 76_119V6) derived from phytozome v7.0 (chr-ID scaffold_76; pos 833110 to 833427 reverse strand)
cctgcggggtaagtgcagttggagaagtttcgagggagttttcttggacaaatttgaagctttgaatcttttttggggttttcttagttcagacgtgcgtgctgtaagaagatgggcgtgtccttggtctttgagttttggtagcgcggaggatcgtcagccggctgttaatttcgattgttgcgctggtcctattattgtttctatcagcgtttttcatgatcgattttgtctacattgtgttgccgaagtgctgacagtaatttatttcgtttctttgcagctggagttctggatttgtctacttttgaccatcct

SEQ ID NO: 114574 - DNA, 847 bp, Physcomitrella patens
  Intron number 2 from transcript Pp1s3_18V6.2 (locus Pp1s3_ 18V6) derived from phytozome v7.0 (chr-ID scaffold_3; pos 155742 to 156588 reverse strand)
aaaacgtcaaaatatccgccctcgcgctgctcaaggttcgccggtttcctcgatttccatcagtgcttctcttctagccctaatttggcgtgcttcaattagaggatgataggttttactttgtctgtttttccgtgggggcttgtttcagtatgaatctgatttcgtgattatacttagcctagacacccatgcgagcgtaactcttgtgctcttctatctaggtttttcttggtaacttataagtcctatcgaagaagaacaagatttaaggctgatggtgaccacttaaccttacaaaatttattgtagtttcatcttgaggcaattcagcttggtagttgtttgcatcggaaaacttttaatgtaggcctaacgtttcaggtagtccttttattatgttaattctcagacgacgcttcgataggttatagtagagaaactgcgccctccaagatggtggatggattttactgaattagttctcccttgacctccctgtcattgaaacgtttacgtcactagaaactaatgcactaatcgctttctggtgaatgagtacaagcgtaccgagggcccctatcgtgtgtgtggtttatatttagatatcatggttattactcgtttttggttgcgtccagagatgcaatctatgatctttgttggcttctttgttttttttttactgaccaggtcttttgctcctgaccttgccttgtctttggtgcgggtgtaaaatcgttgattttgattgctagccttttcattttattagttcgtttctatttcagcagctatttagtagggacaattttaacgacttctacttagtttacctcctgtgcag

SEQ ID NO: 114575 - DNA, 650 bp, Physcomitrella patens
  Intron number 3 from transcript Pp1s1_405V6.2 (locus Pp1s1 _405V6) derived from phytozome v7.0 (chr-ID scaffold_1; po s 2462183 to 2462832)
tcggccgcgcaactcacaattgtacgtcttctctctcaaattccggattgcagtttgttgtgtgttttgagttcttctgacatttttcttttgtcacgcacattttcatgttattcgtagacaaagtgtaagcttccatagccaaccacctcagagagtattgtagaggtttgagaatgtcggtaattcttcgcggcctaagccgaatgaatcaagttgagaaaggattgcatgctggtttatgttgaatgatgaaattaaagtctacgaagagaaacccaattgagtgaaaaacaatgaccttcacatacctacaaacaaaagcatgttctagaggggctatattatttcaatgggttcaaacttccatgaagcctccatgtaattcaatgctttggcttcatctgcgttgcggttcatgagatgttatatcgctgaatgtgaaattttacaaagaagaaaaaacaaaaaacaaaaataaacaaaaacctttggaagaccttcctgttgaagttcactttccctaaatcttgccattcagagttttcgtagggagtgtagattaagggaaaagacattggcatgttccatcatagaaaaagtgaaaatctttgaggaatctgccaaatgtgatgcagcatatcagccag

SEQ ID NO: 114576 - DNA, 790 bp, Physcomitrella patens
  Intron number 1 from transcript Pp1s23_46V6.1 (locus Pp1s2 3_46V6) derived from phytozome v7.0 (chr-ID scaffold_23; p os 356099 to 356888)
cgagctccactgcgcctctcgttttcggatcccatgtatgtatgctctactctagcttcgttgtttctcaacctcgtgcctgcttcttaaattgcggcaattgttttgaagaattttagtgataatgtcaaagtcacggttggaatatgctaatgtgctggactacaattccaattttgcattttttgcaagtaaaatggtgtaccagtggaattgctaacctggcatcgcaatcgtagttcgaagtttactttgaatctagagccctgattgccggatggaggttcacgggatattcttaagatcagagagactttacccaggaattggtatcaagtcttgttcgtgtattcttttggtggtttagattgtagagctgttcttacaatccctgtagtacacctagtctttggtgctctgaatgcatcctgttacagtgtcttttcctttaactttaggatcagaatgcgtcacggatttcgcacctcaaatgtgcaagccatcaccgtctaatactatgatctacattctcgagcaggactgtagcttcgaaattgacatatttacatcaatttacattaactgagtttcaatatacggattgatatctctgaggaagaaaagtgattttcgtcattttggagctaaggcaagacttaagatttgaagtgggaagaatattttcgactttcattttgagcttgtaattcaggaattgagatatttggtgtgtttctaacttcgtcttcttattattagcaggtatattcggacacatctgcagtatttt

SEQ ID NO: 114577 - DNA, 396 bp, Physcomitrella patens
  Intron number 1 from transcript Pp1s134_27V6.1 (locus Pp1s 134_27V6) derived from phytozome v7.0 (chr-ID scaffold_134 ; pos 223430 to 223825)
atcaaggtaagagacttcgcggtgtagaacttctgtcaatgttgaaatttagaattgcatctgtacatcgtgttagtagattttgtgccaagtttgattgtacttactatggttgattgaaatgaacataatgagtcgattttaatgagctgcattagggaatagtcacgaagtttcttttcattatgagcgggataaagtgatgattaagattcttttcttagcgtgacttttttgtgtggtgcagtcagtggcctgttgccactacgctacgtcttgatttccttcagatgagtgcgggaataagacgcaatatcaactagcgctttcattttaatataagtgttgcttggttctgacggaggcaggataattattcatttcacagacttgtga

SEQ ID NO: 114578 - DNA, 369 bp, Physcomitrella patens
  Intron number 2 from transcript Pp1s144_23V6.1 (locus Pp1s 144_23V6) derived from phytozome v7.0 (chr-ID scaffold_144 ; pos 116878 to 117246)
caacagcttacaagggaaccgtaagagattttctaatcctgtgtccgtttcttgtgattgcaagactgaaggttcttaaaaaatgaaggtttaaaaaaaaaaaaaaaaaaaaaaaaaagaaggaaaaaagaaaaaaaagagagaaaaaaacacattatttgactgaatagtagttatgatattactactctcttcaataagctttagcgacattaacgcagctagcctaacatacaaagctggaaatcttcgtctttgcagataatattggctatgtgaccaacgatttttgaagtaaaaaggtactaaattctggaataatcaaattttacaggcgtgtcttgggacgacgacgaagacaacgggtca

SEQ ID NO: 114579 - DNA, 866 bp, Physcomitrella patens
  Intron number 1 from transcript Pp1s304_10V6.1 (locus Pp1s 304_10V6) derived from phytozome v7.0 (chr-ID scaffold_304 ; pos 68264 to 69129)
ccctacatacgaagcagtctgctcgggcgacacaggtacgtagtcttggtgattcatgtgcactattcctttagtttttttgcagctgatgcttgtacagtttaatctaggtcggttttgagaagtttgcatcgacgcttgtccatgactacatgcgtttttgaagtttcggtggacggttattgttgggctgtgtgtggaggtgtatgagtggggggatttcttgctcaattgacggtggctttattgctttaaaacaaccatcgcggtcagtggtttgaattcttggctttcaccgaaaattgagctcaaattttagattgttaattatggggtggattttgtcgcacggaagcatctgcggtagtttccagtgtgcgttaatctcaaggaattgaatttcgtgcaaactgaactgtaccctcgatttctaattgcggctttaacattcaagttttcgtgcttttctcaatgtttcattttagggtatggggaagtgagagtgtaaacactttaaaacattaaataaaataatagaaatttttgaagtttggtgaaaaccgcaagcacagagttgagggtaagtggcacacttctgcacattatccttattgctaattaggaatggtatatagtttcgtcctagaccgtagttctgttatgtctgcctgagtttagaccaaaatttctgattatgtcattttcgtgacgaaggactgtgcctgactcctttttggctcattttctggcttggtattcttaatttagacgtattttgtgtataatgttaactagttcttttaacgtaaggaatgtcttgtttgaaaacaggacattcagaagtagtgaggttacagtataatcca

SEQ ID NO: 114580 - DNA, 272 bp, Physcomitrella patens
  Intron number 2 from transcript Pp1s96_144V6.1 (locus Pp1s 96_144V6) derived from phytozome v7.0 (chr-ID scaffold_96; pos 945008 to 945279 reverse strand)
ccgaagatcatttcatcagaaaaggtactgtaagcctccgatgttgttgttttgaagagtgccatattttcttagtattaattcgataggatttcgctttcttacacgggatgaaatgttggtttgttgttttcgtagaaacaggctcgagtaatggatatttacattgtgctgtagtcttgataatttgagttggagtactttaaaatggtgaataatcttgtgactgggatgcagtaagggacgcgcagcaagaagagatcatcaagtgc

SEQ ID NO: 114581 - DNA, 477 bp, Physcomitrella patens
  Intron number 1 from transcript Pp1s488_11V6.2 (locus Pp1s 488_11V6) derived from phytozome v7.0 (chr-ID scaffold_488 ; pos 78400 to 78876)
tcgcaggtgagtgaatgatccatcagctgttgtttcatctcgccgtaaggcccctctcttgtgtgtttttttctttcatatagcatggaacgtagattatgtggttaatggtgtcgacaaatttgtcttctgtttgagtatgttcttgtttcgcaattatgcaattgttgaattcgttttggaaattttgactaaagaacatgttgttgattctaatcgcccttcgcttgagctcgaataaattggagttgataaggaacctagaagcaaccagccttttgtttgcttttttagcttcattaatctctgcttcgtgaagacgtagagatccgcctctaaaccgaggttttggttgagatttagggtgtgaggggcttgcacgatttctatttgtatcatgcatgtacaatggagactcctcaaagatttgatacttggacagggctacagcgttgtaggtgtggacgtagcgaaacc

SEQ ID NO: 114582 - DNA, 720 bp, Physcomitrella patens
  Intron number 2 from transcript Pp1s135_59V6.1 (locus Pp1s 135_59V6) derived from phytozome v7.0 (chr-ID scaffold_135 ; pos 508507 to 509226 reverse strand)
cacttggtcaagaggttagtgcttcggtattcattaatgttcctggattataatcagtttaaaacaagaatatttgtgatttgcttaggatatggttttctgtgaaattgttcttttttatgtataccatattgaaatgcaacaagatatctgcgtattatcacatctgagtccttagaccagcgtctacaaattagtgctctaggtaagcagtgtaaagaacctgggttcaaagcattaaagaatattttaaagtactatttcgtttgttgaagttactagcaacatcattagaacctctggcagtctgtgtatgcagactttattcgctcatgttctatctagacatttcttttctgattgaagagcatgtggttgctgaccatccttcatgtcatttgtgacgttcttggccatgaagtgattatgacttgtcgattagtgccacttatagttgagtctaatttgatatcgtgtagaagaagttaacgatgtgaaggtaaccatgatcttctttccctctggtctgtgcgtcgcttgtctcataggaggcttgtaactatatcgtgttggattattttagctagatggatttgaggtacaaccttttaacctaggacagagagcaactcaatttgtttgaacagccgtttacttctagagagaggttttgagttcctctcacatgcatgtcatggtaccttctccaggttcataacg

SEQ ID NO: 114583 - DNA, 945 bp, Physcomitrella patens
  Intron number 1 from transcript Pp1s33_371V6.1 (locus Pp1s 33_371V6) derived from phytozome v7.0 (chr-ID scaffold_33; pos 2264107 to 2265051 reverse strand)
attttcctcgtcaattgaagcttcccaggtattttgcccacacattccgcgggggaagttgtcgacaggattttcttcagttatgaatatgtatttctgggtttggcatgtggttttaatttgaggtttaggttgaggagaacaggcagcagagttcttttagatgctgataccctaattcgcacaattagaacacgtgagctttcgcattttgaggaaatgtagtcgttggtggatgtttagaggttctgtatgtaattgtgagtgtgttcgagatttttagttgtgcgccagtgaggattctagttgtggtaggtttgtttcactatatttttttagaggagaagttaattgagttgctccgattactttctctcgcgcaattggaatttgagcttagctgcacgagcaagatgctgattattttcgaagatagcgagcgtgctgttcagcagatcagagggctagtgctgtaggacgcttaatgattctgaaactggcgaatttgatgagtactcaactatattatgtgctctatagaaatgagaaattaccagacatgaagaattgaatgttcatggaagatcgttgaagatgatggaattgcaggtttaatcagcactggtgcatgaaatgaaaattcattctgctcgcctttttcttctttcctcgttggaactagtgtctccgatactttagtttttttgaggagtccgattgaacaatttgtctgcagcattccattttatttttctccgatacagtgttcatatttttgtcttttgcactgatgacaagctatgttattataatggttagttttttgcagatattttttctttgtcatcattaatagtagagttgcttgtcaagttacgattcactttgatatggttgtcttggataataggtgtgggcacaagcataaagaagaaaggtgcatcc

SEQ ID NO: 114584 - DNA, 998 bp, Physcomitrella patens
  Intron number 1 from transcript Pp1s84_243V6.3 (locus Pp1s 84_243V6) derived from phytozome v7.0 (chr-ID scaffold_84; pos 1332646 to 1333643)
agggtgtagagggtgtcagctaaaaacgcattcgggtgagttgttttccgtggcactgttgtggattgctggatgcgctcagatgactgcgatgctagggccttttggtttgactgcaattgctattgtgagtctgttgctggaaaattttgggcgtttgggtaagatttgacgttgcggatccccagcccagggggagagagagagagagagagagagagggagagagtgcagcgagtcagtaatgaattgtttgtgttacttcgctactaagaagcagtgttctagttggaacatacatgtggtaatatgacgaggtttatgggttggaattgtgagatgctgtgttgccgtaggtgtatcaagatctggtacttgtgagctgaatgggtcctagacaatttaaactgtatcagcaacggataactcttcgtgtacacaaaagcataaacaatagaaatgtgaaattgcaagagtggtattttaatagaatttcggactgaatttggtattatacaactatatttttacttctagattgtatcacaccgatgaatatttcatgtcccggtttcttaggaagggttgattccatcgttgttgcagcattttattttattttattagtggacattattggttaggtgggaaagtcaaggttaaactgatgatcatgacagcctctacgaacagtaaagattattcttgtgcacgattgtaagcaagggccgtcttcttccatctgtcttgtgaaaattaatgtgagaaattaatgtgcaaattgtctgattgtgggtgcaactacgtcactccgaaaaatacgtaatacattcatgtaattgcgtagcttccactttgaatgttttcatcaagtaggctgtagtgctgaattagttctcttaactgtctcagaattgtgaacatgtagaggactaatgttttcactgcaaactatcgatgcagagggcgagagcggaagacattgttttacacaaaag

SEQ ID NO: 114585 - DNA, 1025 bp, Physcomitrella patens
  Intron number 1 from transcript Pp1s50_60V6.1 (locus Pp1s5 0_60V6) derived from phytozome v7.0 (chr-ID scaffold_50; p os 583399 to 584423 reverse strand)
gggaagacgtgggcggcgcaggatctgaccgcccggtctgtttctgcaccatttccagaaactcttcatgtaggattgtgtgaactttcggagcgggcgtatgggcgcgcggtttcccgattctgcggctcttgttggatgtgtgtagtccagctagtttgtgcgtcgacgggttgttgatgtttacactcgtttacgctccattagcctccattccctcgaaatgaatgctcggaactctggtgtgggggaaaactaggaaaagctgttacttattcaactcaaggatttggatttctttctagactgagttatcccctgaaacctttctgcattgtgcttgtttaccgtcgaaattgaaagagacaagatgcatcgaaactgcgccttagcagtaggttttgtttctgcttggatgcggcagcactaacttgtgggtcacacacaacatcgtcaaattgtctagcttatggtatgtgatgaattgtgcaagcatcagactagttccagtcgatgagagctcatgagcaatctccgattgtattatgatgaagcccaagctctctgtgcacctcttgcgctctgggttttccatggaaaagcttgcagtcagcaagagctttgattgacacactcaacttgacgaaaggattcacaaccacaagaacggagttattcgaaccactccatcacgcaattcccaacaggtttccctttcaaaaaaaccgtaagattccagaagtcaccgcttcatttttattttattatcatttcgatagattcgaagatacagacaaaaacgacccatcagtcaggattggtggcctcagttttaggcaatcatcttctattcaccattaaaaatatcaaaaagtggaaaaagataccgtttacgactttttttttcaccgattcggctaccaggtgtgtaaccccatgatggtttgcgtcgaagactttcactgttatgaatattatccatgcgtaagcttttcaggcttgaaattaccacatcaagaaacttt

SEQ ID NO: 114586 - DNA, 1025 bp, Physcomitrella patens
  Intron number 1 from transcript Pp1s475_2V6.1 (locus Pp1s4 75_2V6) derived from phytozome v7.0 (chr-ID scaffold_475; pos 13747 to 14771)
cgctgcgtagcaagagaaacgaattaccgaagaaggtacgcaggcattttctaacatttattagggagaagggatatgattctattgcttaacttgtgcatcaacgtccacgcaaacatcattcggcgcagctcacgattaagtatgacttccgaacgacggacaccacataaaactctattctggttcattaaaggcgggatattgacaattacttgttcacaggtgcaaccgtgctaaatgtatttagcgtgtcgtactgttggatgacaatttccttagtggtgcacgctttgtgacctatttgtgcatccacttcccaatttcttgtgctgacctgtgttctgtcggtgatccaatgtggtttgacttctgattagttggtcagttgtatcacgattgtggtacataatttcggaactaaggttccatcctgacgaaacgtattagaaggacgtgttggtgagctattactgaagagtttaggatggttggatcgcagagaatcatctaatgtagatacttagagatctgctaaacttttgggttcctatcaatgttcactatcgagctcattatgttggctcgtgaatctaagataaatatttgtagataagctcaagcaaaacacctcgtcgtttgcatgggatttgctcaattcaggtctttcaatgtgcacatcgtactcgagcacacctttctagagttttacctctcatatttatcgctctatttggaattgacacgaatgtgctactctaccacagcacctgataatgtggtaacgaacataaatcgagaaaatcatttgtgtacttttggttattcgattgtgttatttgaaagagttgtaagatctgcagcattgtctcaattgtattcttttgagtttccaaaactacccaggcaggccaacgtattgtcataacgctgggattaaatattacagacactctgtgtagtttacgcagttagagaagctgctaatttctggttgcttttgtagactcgcttgactattgccg

SEQ ID NO: 114587 - DNA, 820 bp, Physcomitrella patens
  Intron number 3 from transcript Pp1s311_21V6.5 (locus Pp1s 311_21V6) derived from phytozome v7.0 (chr-ID scaffold_311 ; pos 158834 to 159653)
tggtctagtttctttaatcctcaggtgtgcactgacatggtacttcaataagttagtcttcgagaacatgttttccctgtttcacatatgcctggattcctggtcagtgaaactttaactatgacgcactttgttaaattatttgcatgcgccaccagtaatagagtacgtttcttcctaagagaggatgaccagaatgcgtagcatctactatgtttggtaaccctttactaccactatattctcgtccaactgtggttgatgtacgaattaaactcaaagcttaaccgatcttctcgtgagagaaaccagtaactcattgctacacttaacgttcatcgtttcccagttaatgttacgatatttaatggcatactgtgagctgttttggaattttttttttttttctttttttttactttttttttttttttgacttgttatgataatctcaaggattattatgacaagttcaaatattgcctgtttcagcctgtgggcttcattctctctactctttcgtatactttggacttcgtacttgttgaaacgttatacattctgtaagagtagagcaactttttgtatgcaattttagtctgatcacagttgcattcttgcgtttggttttattgaaggtgttgggcttggtagtggacaagtacaggcaaagtcttcgattgatccctcattaatttttttctgttttacctgggtttttttttgcttccagacacgaattgtaatgtctgatactgacaattttcaatcacaattctcatcacttgaattataacaacaacgtcctttgatgtcacag

SEQ ID NO: 114588 - DNA, 1040 bp, Physcomitrella patens
  Intron number 1 from transcript Pp1s414_24V6.1 (locus Pp1s 414_24V6) derived from phytozome v7.0 (chr-ID scaffold_414 ; pos 256942 to 257981 reverse strand)
cgaggggatcgccttctttacttggcatcattcaggtactgttgttgttgttgaccggaatttttcgtaattattttggttctgtatagataatctttgcatttgcgcactttgaatcttcttgcgtcgtgtttggtgcaatggttgcaaatgagtgagtgagtgagtgcgtgcgtgcttttggacatggttgcattacaaccgcagctcacgcctgatcggagcgcgatcctggccttgaaaaagcacttctggctcaatttcttgcatgtttttgttgtagacattgaagtttaatgaggtttgagctttcgatggtttgtgatcccgtgttgtgcagctttctgtcgtgtttgttaagtcgagctgagtatgttttagatcctctacaactgttttttgcgccatcggagcgtgagccagtacaggagcgtagcgaattcaaggtagagatagtgaggagcaggactgctggtaacaaggagttgtttgatcagttatgtcgtccttggtttagtttatgttgttatcatctctggcaacggattgctcgaaatttggcgtccacgtgcagtgttcgtgcggagacgtacccagaggaaaacgtggagaatgggagtggttgcaatgggtagcgtttgatttggcacttgcacgttttgtggctatggcggccgtcacgtatactgcaaaattttgaggtttcggaataggatccttatgcccgatcgcttagaatgttgttatgaacacaaatttttcatgttatcgaactgcattgagttgcttctttgcaagcagatagggaaaggaactcgtactgtaaatgaaatttcttcctccgatgttattcttggttgcggaacgggctcactgtaaggtcatgtattaccaggatatctgacagtctccgtctggtacaacggcgattactaatctgtcaacctttgtgctcacagcacaaagtaaaacataaattcgttgctttttgaacatgagtgttgactctgtaggttgctctgaatttcagggcgtgagta

SEQ ID NO: 114589 - DNA, 812 bp, Physcomitrella patens
  Intron number 1 from transcript Pp1s46_104V6.1 (locus Pp1s 46_104V6) derived from phytozome v7.0 (chr-ID scaffold_46; pos 970539 to 971350 reverse strand)
agtgcattcacgggttctttgcagtcgttatcgtaattttttgaggtgacctcttgacttcgtgttattttgagtttgcatttctcatctcgccaatgtatggctgaacatttaacgtcacatattggggttttgatagtttagcaacaatctattcttgctcggtcagacatgtccatggtgtttgcatcactatcaatcaaagcccacccaattagactaggaattacgaactttgctgcgccaagatggtgcttgacagtttaacatttttgttaacgggcgatgtattcatggagaattttgcatgtcaactccaatcgtggccactgaatgtgcatgatgtgtgtaatggattaaaatctacatgtaagaaacattgaaaaagcttccaaagaatttaacttgattgggttggattaacaggtgtgaagacagaagacattttcatttggaatgcctaaaattgtgcatatcgtcatattctttgtggtttacttgattattagcgtcgagctgaatctgcttctactaaactatatcgggtgcaatcacccggaaactctaatgtaatcagacagtggaaggcagtgtgtgagtttttcctcaattcgaaaagttacccgttgtattcaaacacgtaattgcttaaaagtaggctggttgtgaagactaatttggcgccatgatgcgtgggcgagaacaatccttgttgtaacaatcattaggccgctagtaagtttcaaagtagacaagactgcagtattaataaattagttacacgtatttcttggcaggttcgatcgacacaa

SEQ ID NO: 114590 - DNA, 762 bp, Physcomitrella patens
  Intron number 2 from transcript Pp1s94_4V6.1 (locus Pp1s94 _4V6) derived from phytozome v7.0 (chr-ID scaffold_94; pos 7063 to 7824)
ggtacgtacaagtaccactattctagcgaaatcttactttcatcttcctgaacatttactcaccggcttcaatgaacttgtcctcaaatggttctcacataacaatgaaacctgatttactctgcaagattacaatccttgttgtatttgacttataacatcaataccgggtctgacgtttttgccaatacaggtactattaagcgcgtgtttaaaatggtcgatcagtagaacatcgaaaacaatttagctgtttttggtctggtcttcctacttgtgcacggccaggtggatgtgatttaaactgttcatcgttttaagtatagacgacttcgaggattaaattcacaggagttcaggtcatccaattggtagaatgaccattcgacaccatgctctttgcagctattgaattggttataactttgtcgtgtaatgtgctgtccgtgccatgtccagaaaaggcagtgttatcattggttttgatcctggacttcctacctgtctggtaagttgtctggaatgttgtgcagaagtagtacttctcacttcgatgatttggaaaaaggttctggcgctagtcattctgcttccagatatgataacctctgtaatctcgtgggtgatgtgagtgaaagaccccataggtgcacaaatcaatctgagaggtgggtggcacatgtaggggtggttaagaacagatctcacgtggtttgcaacatttttgatggttgtaggttcagtcactcgcccggtatcttc

SEQ ID NO: 114591 - DNA, 688 bp, Physcomitrella patens
  Intron number 3 from transcript Pp1s161_122V6.1 (locus Pp1 s161_122V6) derived from phytozome v7.0 (chr-ID scaffold_1 61; pos 968293 to 968980 reverse strand)
agatgtaagatgtccatgtctagttcgatctgttgtttttcggtcgtaatttacctcatagttctggtgtgtattctgtaacgttctaccctttttcgcacttctttcctcctctcttttgagctgtttagttttcatttttcgatcctccctataacttgcagggtgcaaataagtaatctagtgatcagttgtaatctactgtccgctgtcctcagtgccgctgtaggaacagtatatggtcctttcaattcatgacattgtaagcttgaagctattattgatacacagctaatggcggctacctctgtgtttcttttctttttctttctctctttttctgcttcttctcatgcagaaccgtaatgtaggttagtgttgttaggtaatgcttatccaaagttaaggcaatggatcttactgagcagacttcagtatctactgtagacctaccatccaattctaagcgcatcctggatagtttcaatggtttagtcttgtgtcacgtttgcgttgtctttgcttctatatttattacctgtatgcaggttcagatttgttttgcagatgtttgagcattatctcatgcatcttcttgttctctgaagagcatggctgttatcgtggtggacgtgaggttcagatccttagacgttgggcactgcggtggttgcaggtcaggatctgt

SEQ ID NO: 114592 - DNA, 536 bp, Physcomitrella patens
  Intron number 1 from transcript Pp1s41_313V6.1 (locus Pp1s 41_313V6) derived from phytozome v7.0 (chr-ID scaffold_41; pos 2132415 to 2132950)
cgtttgaggagcctgcttactctggtgatttttttatttttacttattttttcttgatttttggttccccttcaaactgtgaaatttagacactgagtggttatgattaaatttagtgcttatgtttatgaagtgtttcgatggtcaattgttttttgtgtgaaatttcgttgcaaggatgatatcaaatgtatttttcttgctaagaaaagctctcgggttacgtatagtactcgagctgtttgagatgctttttcagaccgtcaaagagcacagattggtgaacttggttttcacgcgattttctagagtgatttgacaaaaatgaattgaggtgggattcgggagacgaagattttagggtccggatttacgcgattgagaagaataacatttttgaatggtggtcaaagttactgcgtgaagctagaatagtatgctggtacgaagcaccggcagtcagacgagtatggaggcactgatggagtctgtgaatggcagattcggaaacggaggcgggcgctagtgaggtctct

SEQ ID NO: 114593 - DNA, 332 bp, Physcomitrella patens
  Intron number 1 from transcript Pp1s407_43V6.2 (locus Pp1s 407_43V6) derived from phytozome v7.0 (chr-ID scaffold_407 ; pos 279731 to 280062)
ggccagttcaagaaaatcaagtacgtttcataacaagttggtagaaattgtcaaatggctacacaacattctggactttgtaattacttaatttattggggctcaaacctattgtgaactttttggtaaggctcaggaaatttgaattgcagcgtggcaattgcagtatgtcaaggtctcttggtgttggtcttcacccctcaactgttgtaaggtcgtgttagtcggagctttgttgttttgttttcataattactgcaagcgtaattccgttctttctaaatgctctccattgcatgaaattttttacaaggttgctggaagtagacgtg

SEQ ID NO: 114594 - DNA, 649 bp, Physcomitrella patens
  Intron number 1 from transcript Pp1s57_97V6.2 (locus Pp1s5 7_97V6) derived from phytozome v7.0 (chr-ID scaffold_57; p os 691828 to 692476)
ttggtcggaatactcggcaaaaggagcagggcgaggtattaggcaggagatgtcttcggcttttgcttgttagggacatttcttaatccttttcgttgacgtttcagtgcgtgtttctcatgaaggttttgactttggtatggtggatttttgaactcggacatcaccttcccttggcactttctgttttcaatttcgcgatatgcgtttcgaatagttaaatttgcccgactgtcgtcaaatctttaagtacgaatgaatctatatctaccgaattaacaactactgcagaagcttcaagcgacacgcacacaatgtggctgttttaagcagctgctcttttcctatcgaggaaatgccaacaaatactccacaagtgcagcgcactagaacacgcgcatacggtctctgggaaccgaatctcagcattggacttgctttgaagagaaagtctttttgagttttaaaatacgtggatttgttccaccttactcagtccagaccatcgactgtatactacacgccagttcaaaaccaggacgtcaattaagagaaatatctctgttgcagacttttggtgttctttaccaaaggttcactgtttacggaataattacaatagtgtcaaatgtggtttgttcaggtggag

SEQ ID NO: 114595 - DNA, 327 bp, Physcomitrella patens
  Intron number 3 from transcript Pp1s55_177V6.1 (locus Pp1s 55_177V6) derived from phytozome v7.0 (chr-ID scaffold_55; pos 1097170 to 1097496)
agactggggacgtggtggttggacgtgtaaccgaggttggtagtttcaaatttgagggcctttttcttcacgtttactcactaaagaccttttcccatttttcaccagctcaaaatgagaaaaggctctcaaattgcgccagtttaattaaaaccctgttaatattgttttgtgtgtgtgtgtctaaagttttgtaagtgaagtactattgggtttgttaaggaatgccgaagcctcttctttatggaatcgatatgattacattgtaccgcctgatcgatttgtattcgattgttgtctgtaacattttcaggtcggtggcaatag

SEQ ID NO: 114596 - DNA, 274 bp, Physcomitrella patens
  Intron number 3 from transcript Pp1s238_10V6.1 (locus Pp1s 238_10V6) derived from phytozome v7.0 (chr-ID scaffold_238 ; pos 193252 to 193525)
gtttcagggaaagagacaaccctcccaatactctagtacgtttttattctaagacttgttctgatgcaacctttgaatgtcttgtgtcaaattcttaacagttcctccctacctattccatgtttctatctttgttttttatgctcgcacattcaaatgttatgaattgcaatgaattttacaagggttgagttaatcctattgaacgagcccatgcccgcgatttcacatatgaaacacggtcttcgtattcttgctctggtcagttcagaaa

SEQ ID NO: 114597 - DNA, 781 bp, Physcomitrella patens
  Intron number 3 from transcript Pp1s97_54V6.4 (locus Pp1s9 7_54V6) derived from phytozome v7.0 (chr-ID scaffold_97; p os 401473 to 402253)
agttgtattcgactcttacagcccgaagtaaccaggtactactaagtttgcgtgctcacacttcttcaggtggtctgcagaagttaatttcatttgaattcctcttttggttttattcaacgtcgattaaggtcgcactatttcgcatacaaggccacaaaaaatctcttgagataaactacaaggttttgttttatctaaaatgtactgttacttaatagtcatgtcatgcctgaagtgcacataattatgcttgaccttttagaatatataaacattcttcataattaagaagattatccttgcaatgtaattctatgagtcattttattaggtgacgcatatatacatgtgtcactacatgttttttcattcgatttgtgtttctattttttttaatacatcacagataggcaaatatatatgtgcattaggccatacatgtttgcatgataaatatgaaaatataaaactaaaataaatacacacgtctatgtaataatcatttataatgaagtaagatagtatttatgtgcaaccttcaataatattaaatgctgtaatagtaaacaatcaattacatataaagttttctttttgttgagcagtaataacccatgctactggtatgtcattgtatatcctcaaatgcaaccaagatatgagtcttcgttcaattcacgttgaggactggagctgttgggtttttgatgtttgatttttcgcatttctgacgactgagtcgacacagctaagatatgaaacttgctttgcgcagcct

SEQ ID NO: 114598 - DNA, 418 bp, Physcomitrella patens
  Intron number 1 from transcript Pp1s122_131V6.1 (locus Pp1 s122_131V6) derived from phytozome v7.0 (chr-ID scaffold_1 22; pos 878391 to 878808 reverse strand)
caggggcgctgttcgtgctcgagtccaagggtctgtgtgcattcaaactcttggcctttcgtgttttgttttgttttgtttttctcttcgctggtgctgcgttacatctcttggcaagtgcttcagggtctgctattcgatgccgaatgttaggtttatggtagaatttcagtgagcttatacggggaatgtttgtctgtgttgccgtagcatcattcatgtcttgcgtctctgtggtgctgtttgagccctgattgatgttaagcccttgcaaatcaaaactttgtcttgtcgactgtcgctagtcctcatttcctgtagttcaccggccgtcagtagcggtatagcgtaggaatcacggcgtgcgtggttgttgataatgatagattcatatttttggtgtttctattgcaggaac

SEQ ID NO: 114599 - DNA, 606 bp, Physcomitrella patens
  Intron number 1 from transcript Pp1s26_54V6.1 (locus Pp1s2 6_54V6) derived from phytozome v7.0 (chr-ID scaffold_26; p os 481041 to 481646)
cggagtggtaggttaagataccagatgctggctattgacgtatgaggctttcgtagaagcaggtggagagtagcagcaagtcgagttggtcagtgctgcaggtttgtcgatgcgagcgtagtgggagggaggttccatgttatggcacccagaaggtagttgtggtggaagcttatttttatttgtttttatttttgtgcttatgggtggagggaggtgggtgtggagatcttgtcagagtgtttgagtagcgatcgggtagagtttggagcatgcgtgatagagatgaaatgactgatctgctgttttctgttcgggtattatgatcctactctgagcgaatgcgaccatggcggtggtccaccgctggcctcacgggtggtagtcggagaagagtttgtcaggttgtgatgagagtgaaacgggcgtagtgtatgacttatgagttaatcatagagaccatcttaccttaggatgttgcgtctgcggcaacaagattggcagaatgcagtcttgcaggcagttgggtcttcagggcccgtagcgttcagttctgcagaatgacgatctttgtacgggaatgttgcaggaaaacggttgaggaac

SEQ ID NO: 114600 - DNA, 484 bp, Physcomitrella patens
  Intron number 3 from transcript Pp1s26_54V6.1 (locus Pp1s2 6_54V6) derived from phytozome v7.0 (chr-ID scaffold_26; p os 482738 to 483221)
cacaggtgataatccagccatttgcaccatcgttactttggatttctcgcagttaattcctcatattgtagttgagtattaattttcttgaacaagtagtaattaagatgagcagaaacagtggacataggaagccgaagtctgatcaaggttaatttcaatttaccaggctctttttgcaactgcgaatgttaaccgaaactttgattcatctttggttttggagattccaaaatttatgttaatccaaatacacatgagaagagagacagagcttgacattgtacaactaaacattattgctggctacgtctcaagtaaatcgattatgatcacggtcagacaggcaaccttgtgaatacacaattttcgatttaaggccttcatatgaaatctgagtaagtgatacaccacgctgagtgcagtgagtatgggttgccggttgttgtacacaatgactaaaagattcacttgatatgcaggg

SEQ ID NO: 114601 - DNA, 408 bp, Physcomitrella patens
  Intron number 2 from transcript Pp1s275_62V6.1 (locus Pp1s 275_62V6) derived from phytozome v7.0 (chr-ID scaffold_275 ; pos 367535 to 367942 reverse strand)
attgatactgcaacccgtgagtgagtgtcttctccctctaagagccttaatatattttttttctgataggtttgcttcagcaagcttgcatttcgctttgtttggtacaacttcctacgttataacctttgattaggagtttatttcctggtatgggaaacttaatcagcgctcatgtagatattagtgaaggtcgtcgtatcacagcttattaatcctaggaatgaccttttggattcaatagatcggctggtcattgtattttgctgtggttcgtaggcgtctttctgctagggaacattggcttcaacctcgactttttatcgatatgccctgtattttgtgtttttaatgtatcttttgttatcaacagggtgcaggccctcatattgtcacccaccagagagc

SEQ ID NO: 114602 - DNA, 428 bp, Physcomitrella patens
  Intron number 2 from transcript Pp1s344_26V6.1 (locus Pp1s 344_26V6) derived from phytozome v7.0 (chr-ID scaffold_344 ; pos 185291 to 185718 reverse strand)
cagggctcgcagccctctccacctttgagaacattgtatgtgcttatccctctttagtgggtataacaattattaatgtgaaaaaaaaaaaatggggaatgttaaatagactcatgcctctcatatcaatgaaaaccaaccacattcctcatgtgttccatattcttcaacatgcatatgtcaatttcgtaaaaacctgggactatttaacattctcttacaataaattaatttaaaataacatcaaaatgactattggatgatggcacattgcactacaaagtgtctctcaaaggttgcttgctttaatctgagttttttttattattattattttatttaaagaagaaaaaaaggaaaatgctaatttatggtatttaagttggattgattgatgggtggatgggtgaattaaaaaggtggcaagt

SEQ ID NO: 114603 - DNA, 992 bp, Physcomitrella patens
  Intron number 1 from transcript Pp1s134_51V6.1 (locus Pp1s 134_51V6) derived from phytozome v7.0 (chr-ID scaffold_134 ; pos 418842 to 419833 reverse strand)
gcgtactgcaaggtaatgcggttttgctaaaaacttacgtctcacttcgaagcctgtgacactatggattgtggtgaaacatgcgatattgcctcttggtgtcattgcccatgttagcaacgctgaatgtactgacagttgatctgaacccattcatgattcgtccatgaatggattcatgcttttggagaccgccgacttatagtttttgaccatcaactttctctaatgagctgttttttcaacatttatgtgaccatccccgcattacctctagttactgcgagagactctagcaattgactccggaaacttaccacagaaggttccgattccaggtctccatagctgctgacagatttgactcacgttgcctaattagctgcagctaattttatggcacttctcagtcttaggagttttcttcaacttgcttcatgcaatgaaatacgagcaacagagaagctgctccctaatccttgagagggttcccattttcttaacttgttccattagggttcttgcttcattcccccaaagcttgtcttgagaaagttgtctgtagggagtcttgccatgtttcccgtgtacccatgtgaagcgttacgattctgaaatggcacttctcttttgctggtgttgagttctataatgatacgatattagttctctgtcctattcgttgctgaatcaaataaaactagaggttcagtttctttccgttctctcgatcgtgtggtaccctctcctttttgtcagaaagaaaagaaatgaaatgtcacttgtgcttttagtgatcaccgaatttgtgatcgcgaatttatactagatatcagagcatgttaactgcatagaaggagttcaacgttatcatgctcttcacagatctcaagtgaatgttatgcttttgtagaccttgagcgagtactgcactccttcagggagaacctctatttttgatacagttttgtgggaattgttgcaggaaggct

SEQ ID NO: 114604 - DNA, 757 bp, Physcomitrella patens
  Intron number 1 from transcript Pp1s14_391V6.1 (locus Pp1s 14_391V6) derived from phytozome v7.0 (chr-ID scaffold_14; pos 2409547 to 2410303)
tcggaggagagatcatcagtgctgactcaatacaggttcctcttctcataacttcaatctgcatcgtcattcgcgtcggaaatattccacacatgaaacttattgtttttttttgttttttttgttttttttgttttttttttgcctccaatgccatctctgaggggtttttattttcaattcttgactctagacgccccagctaaaggttccgatctgcactttgagttttgctaaattgtgcgatgcaaatattcaactacgagctcccaagtcagtgagcaaaaattagaaaccagttaaggatcacaatgtggatattgtcaaagagagatcgccagctcctttcgcctgcggtcgctcgatgttgcctgttcctttcaaacgctgctttcaacctttactggttcacctttttctttgtacggttacatacgccgtcgtcgttgcccttcgtgattaagtcactgcacaagaatatctatttcttctccattggagatctttgacatctttttgttgctaaaattaaattgaagttcgcccgagtgcgcgattcttgctgacgtatttttggtacaaatcatagctattttcgaaagaacagtcttcacttgctaggggacagatcctgtgcagctcaatgagaggtgctgacatctcttggaagcagtttctcatcctgttaaaactgttctagtctctgagactccttaagtgaacgagttttgtcactgaattgcaggtttacaaaggc

SEQ ID NO: 114605 - DNA, 745 bp, Physcomitrella patens
  Intron number 1 from transcript Pp1s175_34V6.1 (locus Pp1s 175_34V6) derived from phytozome v7.0 (chr-ID scaffold_175 ; pos 219299 to 220043)
atcgattccaatcttctagtcgctacaatctagaggtgagtggtggtagttgtgtgtaatgatcttgagctttggtcaaagcgctcttggttttttggcattgactactacctctatgaagagaagcattgttcttcttctcgcgggacacaatacgagttactggtgcgattttgaccaagttttggcgtgcgactggactgggctttgacaaggtcagcgaaaaggtagtactaagatagtgggaagtggtcaaaaattccaacgcggtcgtctaagtatacgcatcggtgcggcactacagtactgttgagtgacttgcagtgtctttgacaattagtggatctttctccccttccgttttgtgttcaagtggtagtggcaatcgtggctacgctcgtattggaaaaacttgagatttcatgcggaagttgtgactagttgggtgaagtagcaagttgctgcatgatcaaaagaacctttcttccttggcacttgttgacccacaagagttggtttctgttttgctttttccattccgttagagtgctgcggtgcagcacttctatttttttgatttgtatgttcggaaggagctccaaaggtggtgtatctgttgcggcattagagtgctgttgattataataggaatagcttgggtcgatatttgaggcgctatttctcaaccttcacaatttgcaataattcggggatgttgttttgccgattggacagaaggaccaag

SEQ ID NO: 114606 - DNA, 782 bp, Physcomitrella patens
  Intron number 2 from transcript Pp1s81_250V6.2 (locus Pp1s 81_250V6) derived from phytozome v7.0 (chr-ID scaffold_81; pos 1540902 to 1541683)
ccagtcaattccttttcagtcgctcaagcttgattgtaagtcgacatgaagatgtagttgacgggttctcagttcgaattctctcacacaatgaccgggaggttgggtggttgggatttccatgcaagtttgatttcttcctaaagaattatgagcatgcaccaataatttcatcagatcaaccgagcgatctctcacttcagaccgcttactgatcttgttctagacatctatcccaatttcttgtgggtgttcttttgtaacttaggcatttattaggacgtggattccacgacgtatgcttcagcattgagccttcacacctcgtcggcatactccaaattttaggagttttttggacagatttgagaacggctttaaatgttactgtagggttcttctatcgattgttttggatctattttcactaactctttataggaatcgcaatttgaatctcatacaattatataatctggggcaagagatgcctgctgttgaactcactctttcacatactagggtatgataagggttttaatgattctctacagttcttgtcaaagcacgtttgtttttgtccatcaagtatacgagacaactagtttccttgagtacctgatgttttaagcttcaatcatccaaagcctgatttcttaccctagatcacttcatatcttcgaagctctttgtacctgctcaatcttaaagcttattagcctctcttgacatggtgtatacttccagtaccagaacttcagggggagccagaggacatttca

SEQ ID NO: 114607 - DNA, 545 bp, Physcomitrella patens
  Intron number 1 from transcript Pp1s222_133V6.1 (locus Pp1 s222_133V6) derived from phytozome v7.0 (chr-ID scaffold_2 22; pos 711947 to 712491)
gtgacgtcgaactgcgccccgtgctccaggtttgtgtgaacgtgattgtgtttcgaaaagagatttttaattttttgaggatgtatcttaattcgagcgggagagagttttgcgcggtgagagtgttatggttggtggaagggttctgtggaggttaagtacttgagtagatggggtcaaaaaattgtgttgcgagttagaagacaattttttggtttgaattcagcggtgcagctgtttttgaagctgagaagcggccgatttgcgtagcgtgtggtgcacagcttctcgcttgggaattgttgaagcttctgtgtggatagcttcaatcacttgcaactgtgatatgaattttgagaaactatgtggtttaggggtttgcagtgacatgtaaaagctttcggaatactacggaagcgagagaaatttttctaagtttcaggctgttcaatcgattatatcgtttatagtgcaattattggattccttacaactatatgtaccctgcagatcgtcgacgttcgtcagatagggaattcacagac

SEQ ID NO: 114608 - DNA, 540 bp, Physcomitrella patens
  Intron number 2 from transcript Pp1s381_34V6.1 (locus Pp1s 381_34V6) derived from phytozome v7.0 (chr-ID scaffold_381 ; pos 255189 to 255728)
cccgtccagacagacgcttccacaaccccctcccggtgaggatatcattcttcagaccctcgacgccacttgaactcaaaaaaaaggtagtttatatggcatgagagaatgaaactgggttcaaatcctgaaactcaacaaaacgcagcctggtttctcaagtttctgttgcttcgtctaggttgtctgccaatttgtgcaacttatatgattatccagcttattcaaagaacaacattcacttcgttttagatgtaaccgcacaaggacaccctatctcttgacgtttctctttgctacgaagttaagttcctgcaacgggaaccctaaactacgaaaccctatgttgctctctctctcactctctgtttacaactgctgctacaactttttaaggtactcacatgcagttcaaagctgtaatgatcagaaaaaggagggtactcgcctcttcacactaaacaacaataaaaacaaacaaacaaacaaaatcatggatggatcacaggcgcgcacactctctcacacacacaaggggat

SEQ ID NO: 114609 - DNA, 999 bp, Physcomitrella patens
  Intron number 1 from transcript Pp1s55_300V6.1 (locus Pp1s 55_300V6) derived from phytozome v7.0 (chr-ID scaffold_55; pos 1808773 to 1809771 reverse strand)
actcagcgtggtgcacttttcgacagacgcagagcgtacgtgcaatgtctctggacttagtttcatgtcgagattcaaagcatcatcactaaccctggtagaacgaagccaatcaaatgagataattataacttctgaccatgttttaaccttaaacaatttctgatcccaaccccccatgtacacacaatctagattcaagtagtctcatgtcgtatcagattaactcactatgcatgacaatcaactactagaagaaatactgataatgataaatattactgtgaaattgcgatgttctttcttctgtgctgcttaggaagcattttcacaaagtgtaactccagccattgtgtcgattgcagacttgtcgtgcccactagtacttactgtcacgttaaacaatttattacacttccaaatcaatattaaattctcatgagcgcatatccgaagctttgttttgtagttgcgaagagaatcatctgccttggaaaccaatttctatccaaatgtcaatggcattacaaagttgccagtgaccacaagcgacgtgtctactcattgattatttaattacgcatgattataaaatctgaaatttctttgagatgctacgaataggtttactgtgccgtggcccaagctgattcttgcctccacgagattctcgaattttataaacggcactctagtgcataatcagagtgtgggtgttaacccatgttgcttacttgagtgacgtgtgtaatgtacgaattcgatttggttggctagaatcttccgatcaaaccttgagtttcaagccaaggtgatcttagacaattgctgccactgtatcaactctcatggccggtcatattgtcgcatctcagaactctttcttccttttcacagtgatttggtggcccagttttgttttttcacagcaatatgttactctcaaacataatgctatatacagggggctaaaggtgagcagtaattttcaagaggacc

SEQ ID NO: 114610 - DNA, 1025 bp, Physcomitrella patens
  Intron number 1 from transcript Pp1s5_337V6.1 (locus Pp1s5 _337V6) derived from phytozome v7.0 (chr-ID scaffold_5; po s 2384017 to 2385041 reverse strand)
gcaccgattcagcaccgcctcgctttcgtatcaaggtatgtgtggacgtgtgtgattggcgtggcttggacctgcagtcgcgctggctgaatcaactttcatttgtatcgaggggagggcgtggattgtcgtcgcaagttcgtcattcatttttttttcccttctgttttacagcttcatgtgtgcattctgtgttgagttcggaaagttggccgtcacatttgattcagattgaagtttttggatttttttgtcttgttctgtccaatacttgctcagaagtctctgattttgatttctcctaaggctcaagcgcattctggtctcgatcgtgttctcttgggtttttcttttcaacacaacctgttgttaaagcgtttgacaagctttgagaggaattctatcctcgtcggtaagtgcctgcatcaagtagcactggagggataaaattcatcaagttgtctacattttcgattattggttctcttgagatcagggtggtcaaacgattgtattcctctcccgttctatattatctgcaatgatgaatacgtagctcttcgcaatatataattcacgtcagtgcaacacaatctccagatcggttattcttgacttcacgctctcgcacttcaccaaattctgctagaaggtgatatctagatgtttttaaaatgctttggagctattcaactggtggttcgtttcgaaagccatagtttgtcaatccatggcttctttcgcttttgttccctctatgtttgtgaaaaaaatgagtggccgagatcgaagtctgtcacttccatatctctacctcgcgtatgatttggagcgtttctagaaagattttccgtgtgcaacatcatcatgctttctcctttcacttttacagcagaacgtgttcaactgtcttagattgaacgtgaactccttgaaacatgtcagagacttctcggcatagtgtttatgtaatgtttcatcttctgcattttgtgacagccgggaaagacgctaagttcgagggc

SEQ ID NO: 114611 - DNA, 949 bp, Physcomitrella patens
  Intron number 1 from transcript Pp1s65_314V6.1 (locus Pp1s 65_314V6) derived from phytozome v7.0 (chr-ID scaffold_65; pos 1802656 to 1803604)
cggctgcacgggattaccagaaggtgggtcatgttcttctctgctttttaagcttagagtggttgagaggagctgcttaacgctgtttagcgttgcgacagattagtttttgttggggatgttatgccttagggacgtccttgcgcgatgtagcaaacgatattttttttcgtggtttttacagggtttattttacattttttaattattattattattatcattattattatttttcctgcccagagagttctattccgaggcaatgtggtcggtggacttcatgtcttgaggaatgcaggttgaaaagggtcttttgttttctgttgagttttctggacatgggcacatttttgtacttgttttttttgatgttcatagatcggctctcatagtccttcaaaagtttgaatgagcgttgttgctggacccgggatggttagggttcattagatgaagcatgaagaagtagacattttgaagtttttttttttcaacgcgagtggtcttctatatatgttaatgtttttatcggggataatatgtggatgtacgattcttgttctttttcagtctagtttggtctttattcatgtttcgtcatgttctttcttcaagttagtacatgagggacgcatttctgttgtgaacatggacgttattgaagtttcttttagctccggaagtcccttaaagggtgcaacatgatgcgcgcatgtgcctacaacggctatttttttcactttacatagagaaacgatttttacgattcagacagtttgataggaaatcagttatcaagcttcccttgcatcccaaatttattgtattttcttaatgtattctggaacttaaaagagcgtaacgaagtatgctcgtcaacccatcctcgatcgttcactgaccaagtgcttcatgtccctgtggtgatctgtttcatatgcaggag

SEQ ID NO: 114612 - DNA, 362 bp, Physcomitrella patens
  Intron number 1 from transcript Pp1s78_27V6.1 (locus Pp1s7 8_27V6) derived from phytozome v7.0 (chr-ID scaffold_78; p os 194765 to 195126 reverse strand)
cacttcagatacacacagctgacgctgccttaatcgtgagttcttgacattccatgaaagatttcaacgtgggctttgagtttcaccgtaattttgaagatgtcgaagtgtttgatgggtgttggatctctcttggttgacatgcgaagcattgatggaggattagttttcttttcttttctttttggggttatgggttttaggtttctgtaggatattggtgccttgattctatattttgtgggactgaataattgtcattattgtcaggttttgtttttggtatcaggtgggctcaacttagtgattagccgagcattaggatctgattaaggtgttggaggcttgaagggtttgtgaga

SEQ ID NO: 114613 - DNA, 470 bp, Physcomitrella patens
  Intron number 2 from transcript Pp1s149_39V6.1 (locus Pp1s 149_39V6) derived from phytozome v7.0 (chr-ID scaffold_149 ; pos 144958 to 145427 reverse strand)
gaatcgtctggttagaatccctccctctgagcttaaagttgttttattccattctgttttctacctgagttccacgagctgttgttaacagttcatatgtgcttcagttccaccgtattgtcttcagaacatttggtttattgccactgctatagagattaactctctagagtttgtagtatgcaatcgttaggaactttgatcaatcttctaaagtcgtgtttttcaaacattcctttctattgacaggaattggtcttgtaaccacatattatatcgtccgtctttatatttagtcagaagtgatactctgctactattttgtcagactcgaggagttattattctaaaccaactttgcggcttagctttttatattcttttcccttgcaatatcttcatggcactgaacagaatggatccttgcctatgcagttcactctttgataccgttacgggtgaggaggtgg

SEQ ID NO: 114614 - DNA, 989 bp, Physcomitrella patens
  Intron number 1 from transcript Pp1s65_71V6.1 (locus Pp1s6 5_71V6) derived from phytozome v7.0 (chr-ID scaffold_65; p os 301764 to 302752)
cagggatctatccccccggttgcggactctcaagagtaacctctctctctctccatctccatcaacctccaaaatctagcaattctggtgtgtcgcgatatgtttattgttgcctcccgcttcttctgtttaatttctctgcggttagaacccctctcgcttgttagcaggttaaaatcactctttcgtaactaaccagcattaaatgtgtttacgttcaggagactattgtcttgtcaagattttagctttaatacttgttccttagggagctctgtaggttttttttaaagttcatactcttatgtttgcgccacagtagctggaactatccaacgaccattctagatagtaaaatacgcatctaatgtgcggttgatacctgaatgaaaagcgtattggtcctgtgtgcctgcacaattttgtagattagtcgaccattcagtgagagcaacttcaattcctcgaaaccctacaaagctttcctgcgagctattcagctttcgcttcaagtcacaggatcacataattggtacataaatcttcgagtggaaagacttgttgtttgatgtgacaagcattggacgttcgtgtcacaggctgatcatgagaaccacaatgctcctgctgtctgtggtgatagtgtcttattctatgtcttgatggttcaatctcttttgatcccttaagttccgaaggtcgtttaaattttttcaaaacttgtccggttaagaaccaaacaatttgatgaacgatacttgagacccaattatagcatctacaagttcagtatgggtattttgatgacagaagatttcaaatgctggttttgaacgaacctaaataatgttttatggttctaactcaaaccggattaccctcattgtaagggaagtatatgtgaaaatttcatcctcaattgccacgttatattttatcttttcaatcttaattccaaattttgttcttgtgtcagtggactagagcca

SEQ ID NO: 114615 - DNA, 674 bp, Physcomitrella patens
  Intron number 4 from transcript Pp1s124_86V6.2 (locus Pp1s 124_86V6) derived from phytozome v7.0 (chr-ID scaffold_124 ; pos 661181 to 661854 reverse strand)
gaatatccagtgtgcaagtaatttgtttgcttctatctttactcttggtctgcgttaggcgttttggccagcattttacgacgttggacttaccttcatgcttatgtcgtcaatattcgtgcatcatgaagatgaggtgtatctcatttttcaacaactctattaatctgtagcggtcttcttaaagtcccatgtatcatcaaggtgcacatttttcagcatgagttaaaccacgatagtggaatggataatgaaacagccattgtcgctggagtgcacttggatgcaatgtgtaataattgctctaaaagtttctttctttattttgaaaatttgagttcattattattctattaatttatgatttttcaaaaagaattcgcaccaccaatacaggattatccgttggattataggcaatctagctgcaagatattcgcttaaagattgtgacgagggaacttgatccttcacatgcattgagtggcttcaaaatgtgtgcatgaaatttgtagctgctaatgtggacaactgtggagttatgatgcagttgtactgcatacgcttggcaattatgtttcggcttttttgtgtttatggagcatctaatttatcgcgtattgtactggtgatgtgcaggaattaggaaaacatactggatcacctgtaataat

SEQ ID NO: 114616 - DNA, 744 bp, Physcomitrella patens
  Intron number 2 from transcript Pp1s35_345V6.2 (locus Pp1s 35_345V6) derived from phytozome v7.0 (chr-ID scaffold_35; pos 2000318 to 2001061)
cattatttgaagtattaaacagctgacgtgaacaagtaagtgaataagagcctaggagggcatggtgtccttagacttaagggcaaggcttggggagagtgggctcttgcttagatcagaaacttatgcacaaagtatccaacatctacatttcaatttacttccatgcagtactaaatcgttcaaatcctttgaaaagagggaattagttgagagcgtaactctcttagagcatgtgatcgcatgggtgaacctcatctgtattattcatcacgagccggactaagaagagtacatttgcacaagcgtgtgctttctgacgttccccgcgtctgttttgtcgaagtttcacttttcctcgtagatatttgcgttttgtgcaagtttgtctcaggaatctctctctaatgcgtccgaagtacgaaaaggcgcggttcgaattttgcgctctctacctctctctcgcgcgctcttccaaggacttgaaatactagtgacaaggcatagcattttccgtgaaaagcctttcctacgattctactactcatcaagagctacacgaaccgcccaatttcttcgatttgattggatagattaatgtgaacgagttgcaaacatgccgtgtgcacggaatacaaatgcttgcgcgtcttttcttcgtaggaagcgcggcgaatcgcagcagacattattcattgattcagcttaatgaattttttttgaatcttgttttttatggtagga

SEQ ID NO: 114617 - DNA, 484 bp, Physcomitrella patens
  Intron number 3 from transcript Pp1s218_51V6.1 (locus Pp1s 218_51V6) derived from phytozome v7.0 (chr-ID scaffold_218 ; pos 356480 to 356963 reverse strand)
tcaaggaagagccctatattgacttcagtggagaggtagtttactgccgtaccctctcatccatttacgacagtgcgggtagaagatggtgcttggaactggatttgatttatgttttaataatttctcagcttggaataattttattacaagagtgtaagagcacgttcacatctatcagaaaagcgtaaaataattccttttccggtcaaattgtacacttctactcctccaacagaaagatgaatggaagaaaactagacgcgaactttctcgtgcgcttcttcaaaatacttgtttgaaccagagaacatcatttccgccgatgtatattgttttcagatagaacgttgagtcctggcttgggcaatcacaggatgcagttcggaacttgcttagaataagtcgtagggcattgtcgcagtttggtgtggggattggactaggttttccttgacatgtttgtttcacattcaggaagcgt

SEQ ID NO: 114618 - DNA, 786 bp, Physcomitrella patens
  Intron number 1 from transcript Pp1s414_8V6.1 (locus Pp1s4 14_8V6) derived from phytozome v7.0 (chr-ID scaffold_414; pos 71516 to 72301)
ttcaagcgctcactagcgtcggctgccgtgttgaggcgagtcactcattgcctcctactcttttacgattcggtcgttggttgcatctttgagtgggattttttttccggaatttggaggactcgtggagagaatgggttgtgcgggtatggagtaggggagtttgtcgattggtccgtagttgtctgtagactctgtagttgttcaattggatggagcgctgtcttgtagagtaaattggtttgcttcctcccttgctacagtgaattgattgtttggctgagttccggacattacaatggttgagacgatgcagtattcaaaaatttagtcagcctcttaactataatgagaggtcggcgctggtcccgaggcctaatagctgtggcagcttaatcgctctaaccccaattacaccggggttaaagaaatagccatggcttatgtcacggtatcttacatccaaattgtttatacatggaattcaacccttcgcaggtttttttttgtttttgttttatttttattttttagtgttctgtggaatcaacgcttgtaaggtaccgagtctcaaataggcgggcagttaaagctctgaactattgaatggaaagcgccagtgtcttcccaggtcattggtcaaccatcttctcctgttgtggatggcgatccagggtgagtaattcgtgtaggctgttgaattctaaggtttgaatctgcttctaactccgcgtaattctgtgaaatacaggtgtgcgtagagaacaagaccatactcagtgtgga

SEQ ID NO: 114619 - DNA, 844 bp, Physcomitrella patens
  Intron number 1 from transcript Pp1s425_13V6.1 (locus Pp1s 425_13V6) derived from phytozome v7.0 (chr-ID scaffold_425 ; pos 127806 to 128649 reverse strand)
gccacttctcacagtgtcggcacaaaggagatctggtgcgttgccttctctatcggtgtgctttggtttgatcggatcactaattgtccaagagttttagagctgctgtgcgtagttcctctggtgtgggtcgggatctgcaaggccgtgaggaagaagagcagctggtcgtaggaatacaataacttatctcattggaatgttaataatccttcaaaatggttcaaattactgtggaaggctcagagttgtccaattcttcaaatcccaacattgcatcgggcaatttcagagtctaaattcaatcacagcatggtatcctgtaatgatcaaacttcctctaactattgacggagaaatattattacatcggttgattttttcaaattataatgctctcaattgcagactctttgattttattgctgtgtgcattgttttttaaagagctcggcttttatggatggtgcatttgaatgtggatttcttctctaaagaataagtggaatggatcgaacatgattttccaacctggtatccacttttttccgcttttacttagcagtttgtcaaattctgacctatgaaacatatattctgaagctgtaaagcatagagatggaggaaaaggtaaagtggtgaggaagtcttttaattcagctgaaaacgaagtaaattttgacaactctagttctttaaaattctctgacgattagaaacgaactcttctaacctttggagtacattcttttcatcagtcagtgtctagttatgtcgatcaaagtgctgctgatggtcattattatcaggtcacactacgatccggaatcctcgacgtggatca

SEQ ID NO: 114620 - DNA, 359 bp, Physcomitrella patens
  Intron number 3 from transcript Pp1s231_10V6.3 (locus Pp1s 231_10V6) derived from phytozome v7.0 (chr-ID scaffold_231 ; pos 89796 to 90154)
ccagaaaggggaccataaaacgccagagttcaaaggttagtgattgtgcattctctgataacattgcaggtccttctacacaatagttttgattttgattctgattttgtttttaggtttttttttccaacatcagacgtagttatttgattattgtcacctgacagctcggtaaccataaggtttctttggtatctgcaaggatcacagcatgtcctgcaagagataagtttcatggtttcattaatagctcctagctgtcttctctttcttatgatcctggtggcatcatttcatggtttagttgatacttgcaacgtgcagcaatcaatcccttgggaaaagttccgtgtattgtt

SEQ ID NO: 114621 - DNA, 902 bp, Physcomitrella patens
  Intron number 1 from transcript Pp1s311_78V6.1 (locus Pp1s 311_78V6) derived from phytozome v7.0 (chr-ID scaffold_311 ; pos 455237 to 456138 reverse strand)
caagactctcattaccacgcttggtttctgcttcggtacgagagttttcttggaacgtttgttttattttttgtgagtttgttctctttcagatctctgaattcttagaggtttgctgagccctcttgaatgaaagccgactagtcctagccttgtattgttggctcggtgggtgttctccggggtgctatctggtagcttcacctctcagattttcagggcgaaaatgtgggtactaaaatcttaaacgtgacaagcgtgtgacggcagccaattcgcgaacagatttatcgttactcgtagttgggtagtctagtgtgcatagcattgatagtagtgtacacccgcatcattcagcaggcgaatgttaattcgtttttctgcatagatttccttttgctacctgggatctagaccatctgaatagctgcgatggaacaactcacgctgctacttctcaccatcacatcatcttgatctccttcgaggacaagttacagtcctttgtttagataattcttcctttctgtgaattctttatgaaaagccgaacaaacggctagggtgtgcattgacgtaatctttgatatgtgtagtttacggtagggttgaagtaggtcaacagtatgcgctgcatttggtatcgaaagtctacgattctcatcacaagtggacaaatctgtactgttacgtgacttgcaatagtaaccagatttgctaggcgaaactttagtgagagtggcgacgtttgaaatttgataagctgatttctattttagctcttgttttaattcttcgtcatcattgatataaaaaatgttctgcggagggacatttcttttgacccttgatttttgcttggtgtagctaccacattgacaagctggcatctggctgtgaca

SEQ ID NO: 114622 - DNA, 656 bp, Physcomitrella patens
  Intron number 1 from transcript Pp1s243_40V6.2 (locus Pp1s 243_40V6) derived from phytozome v7.0 (chr-ID scaffold_243 ; pos 399677 to 400332)
gtgctcagcagtaccaggaggagtacgagaaacaggtaaggattattcttttcgaggtttcattttatataaacctggccgctagggtttgggtgcacaaccgatcacttaggttttttttctgtacgaccctttgcttcctttcccagtcagtggagggctttaaggctttgtggctattctcgtgccaacgggtttagaccaatatgtgtggagtggtcttcgttcaacgggtcttcttggatgtcttcatcgaagggtccacaatgggaggtttgcttgatgctaaacgcgtagtacatgtacccgagaatctgatgcgttttcttccgaggtagcctgtcgaggtaaagtttttgtggatcagaggcatgtgaacactattgggttgtagaggttattctagcttagttgccattccgcagactgttttccttcagagattacggagtgccaaagacatttgacaatgataacaggtctatcgtaattaagggttcgtgtgcgatataaaatagagcgtagtttttttgtgtgcgttaatctgttcatacgacaattgagctgttggctatgatgtttgattatggacttctctaattatgtccatactctctgcaggaaaaggatttgatcaatttgaagagggaggctaa

SEQ ID NO: 114623 - DNA, 715 bp, Physcomitrella patens
  Intron number 1 from transcript Pp1s35_281V6.1 (locus Pp1s 35_281V6) derived from phytozome v7.0 (chr-ID scaffold_35; pos 1511615 to 1512329)
tccgggagcattccgaccgtttcatctctgcaagggtgcgttcaagctcgtcctattcactggctgtatatcccgtttgtcctctttgcaatgagcgcttgtttgattgaaacgatggactctgcgttcagttaatgaggattttgcgttttcggtggcgttgtggagagtctctgctttgttcgggttaatgctggactacgttccttccagagttttcattggttttaaattttgtattttgtattttggttgaagacagtggctgtgttggttggttttaattttaaatgtagtgttggaaaaggtcgttactgcgtttacagggtggggttcttattggtttttagtttttttggtgagtacttttctggccatttgaaatagcggtgttaatcttaaagccaatggtatgatgttttgtttgtcgggttggccgtgcatttgttaagcagattgaagtgcggtttttttgttggaaacgatggttgagtattgtgtgtaatatcttgaacgctgttttaatgctcacgttgtttttctttttgaagcggattaggaaatgtggttctttacgtgccaagatgagcatgtattgaatgctcttagtaagctccccgggcgtataattctatcagaggttctgcttatgcccttgggtttgaatcggtgtcattgtactgtttgattttttaggggtgtggaatactctcgc

SEQ ID NO: 114624 - DNA, 580 bp, Physcomitrella patens
  Intron number 1 from transcript Pp1s129_157V6.3 (locus Pp1 s129_157V6) derived from phytozome v7.0 (chr-ID scaffold_1 29; pos 908980 to 909559 reverse strand)
cgaaagtcgccgagcttctgaacgatctctcccaggttgtatttctgggccgctttagtttactgacttggttgagtgtcagcagagtttccttttaaaacggtctgttcataattttgaaatttttaatttaataatcaaataataagaataataagaataataagaataataacttgtagctatcggttgtcagccttattatctaatttattttgaattccaagcatcacaaggttaactaggaagtccgtgttaagaagacaggcctgtgatgtgaattagctgcttgatcaccggtatagaggtttcgtaggtttggtgccgtttctaagtgatttcgtgttttcaatgtatacagattttgaaatgacgtaaacagagtcttacttcatgttattatatatttttaaaatgctttttataatctaagtagagagaatttgttagacaagagcacgtatcatgttcatcagcacaatttggtaaaactattactcaggaatcgtgtggtcattgagctgattctatattgtcatgtgcaggtcgtaaccaagcacctttccgaagaggacggatc

SEQ ID NO: 114625 - DNA, 703 bp, Physcomitrella patens
  Intron number 1 from transcript Pp1s253_34V6.2 (locus Pp1s 253_34V6) derived from phytozome v7.0 (chr-ID scaffold_253 ; pos 440308 to 441010)
agtacaggctgctcagcgcctaagctacgtactaggtacatttctgcactgcctctttccacctctacccttcttcgagtatcacgacgtccctgctgtcttccatactgcatcgacatggtttctcgcgctctcgctctctcttctcattcgcagtatgtctggtgttgttcgatgaacagcaatatattgagtcgttgaacattaggaagccgtaggtcctttcttcgcatctccggctttgacttagcgcgcctggttttttctgttcccgaattccgattcggattcttgggatgacccgagtgcccccgcctttatatatatatatatatatatatgtttattaatttttatgaattttcttacggttgaagtcgaatggtgttgccttaggagtgaatgtatggtgtgtctgctgctaggtcaaagatccgatgttgcttaaggtcattgtttgctccacatgtacttagagcatacatttgtcgattttctataattttatgaaggtatatggttattttgactagttggtgtttggaatcgctcgtttgagtggtttcgtgggtgtgaacgaagagcgtttttgatagtgtagttggagcaggcagtctgagaccggttactcattggcgatgattaaacgttggaggatgtggtttggtgattgatgcagagggtggagtttgcctaggctcgt

SEQ ID NO: 114626 - DNA, 840 bp, Physcomitrella patens
  Intron number 3 from transcript Pp1s253_34V6.2 (locus Pp1s 253_34V6) derived from phytozome v7.0 (chr-ID scaffold_253 ; pos 442069 to 442908)
ttgaagatcgagggcttgagactcatcacggccacgtatgttgatcattccttgctgtatttatagcttttctgagtcaaatatgctaccgtaatggtatgtgattggaatgttggttccttgagcagagatgtacgatagaccttttcgttgctctccctgcttatttcgacacctataaagcagtgataactgtagcttacgaggatcgctatgaaacgcaacaaattcttcatgttgctttttggatacactgtaaagttgttaaatggagcacgactgaaatccttgaaatattattctgaaggtgaaagtttttggaatatagcgccaagagaaacgagtttttgcaaattaatggtacaacttagtgagtcatcttgtgacgattgcgagcaaggtgatatttgtgggtcagaactagccggatgccttctctttttgaagacatattcccttcagaaagcccccagagaactagcaacacttcgtgtggagcgtattaatggacaatctgatgaaatgaatagtccgcagacagaagatgcgaaatggcctgtataaaataagaatgtctcgctgtgggagtcgagataaaggttgtgaaatcctgagtatcgctgttagcctgaagcactggccatgcatgcacttttgactggagatgagcccgttgcactgacagcttggccagtctgtagctgactatacactcctttagtacggccatttcaggtgttaagactctttgatagtttttaagtggcttcttaaaccatgattctgatttgtacttattggcgatttgtttattctatgtggatgtggtacagactgtgt

SEQ ID NO: 114627 - DNA, 1017 bp, Physcomitrella patens
  Intron number 1 from transcript Pp1s338_9V6.1 (locus Pp1s3 38_9V6) derived from phytozome v7.0 (chr-ID scaffold_338; pos 59798 to 60814 reverse strand)
gtcaagccatttccgatcaagtatctgatcgttctgtaagcagccctcattgccctcttcatgcgtttgcttttattatattatcgtttaacccttacttactcttttccgggcgtggaccgcaccttgccataacgttgaaggtaacgaggtagcgaacttgtcgagctaaaatggttattcatgctgagagtgctgtggttcagtggcggagctcagtttcatcgttgcacagtccattgtgacctagtgcatttttgtacgtggaattgtcttttcacaacccgaacgtaggttacgggagtattagggtttcgattttttttttctttgtcgttgtagaaatgtgcctatacagccttatgtatgaagtacctggtaatttcgagagtgaatatgaatacattttgaaccaattgcttacaattgcatcatttctgtcttgttttcttaacttgaagtgtttctaggacattaggtctgctccagccaagctgactctgtttttcgtagcctttttcatcagaagtagttgagttgagtgtttgcattttcagtttcggatggttgtagtatgttcaatcagaagcggtaggtagggtgtcgtgtatgggttagagattttttgtgggctcgtggactgtacgtacaaatatgtgagtacagctatcgttgttagtcccagtagagtacgtcgctgtagttgtagaagacttccttcacagacatgccagaataattcggggatttttcgtgttgtttaactgttcaatattatcagtaattctcaattccgagtattcaatgtctttagtgtggtccatcaacctctcctttgtccatcaattcaagaagtatgccgaactatgaatgtcacctcttcttcgtgtttatttcgttttatagttgctagagcataggttgtaatcaatctatgtatttatcttgttttaaagtttggaaacctcattctatgttgaaggataaagaagggagttacgaagaagccgaagcgga

SEQ ID NO: 114628 - DNA, 661 bp, Physcomitrella patens
  Intron number 1 from transcript Pp1s278_25V6.1 (locus Pp1s 278_25V6) derived from phytozome v7.0 (chr-ID scaffold_278 ; pos 314250 to 314910 reverse strand)
gtggcctgccaccgcgagaagattttctactgccggtaattttcctttgggttcctggaagtgtagttggagttcgtttgttgatgggtttatcaagcagcagtagttggcagcttcgtttaggagttgaattggtggagtaatttttattgctaaatcttgtgctggctgatgacgcctttgatttcgttaagcgaaacgtcccttagaaactgatcggtgggaggtttggctgtatatttgtgctgatgaaaatgtatgctctcagatgagctatctagggtttaggggttaaggattccaggaaatctgaattaggtcgttgatgggaaaggaaattctgcagtctgaattttttcttgcagttaaaaataatcttttgatataaacttcatttggaggggtttagatacgagtgtaagcatccttgtgagaggttatggttgtgacgttgcctttgaagaatgcattcaagcccgttgcacgttgaggattgagcaaggaaccgaaatgggtgttcctaaatcgtcatagagcatgttttacacgatctgtgaaactagaaaaccccagcaatgaaaaacttttatgagctgaagataagttgcctaaaatgtcgtgagtttgtgatgcagaagggcagcttcctttttcaccagat

SEQ ID NO: 114629 - DNA, 1001 bp, Physcomitrella patens
  Intron number 1 from transcript Pp1s298_65V6.1 (locus Pp1s 298_65V6) derived from phytozome v7.0 (chr-ID scaffold_298 ; pos 441834 to 442834)
gtatactgtgaaaggcactaacaaagtcgtgaaaggtgagtgaaggaattttaaaaggactctttccatgttttgatcctgattgcttgcaaatagacctggaatcacctccggtgcattgcccttgagacctgtgaacgtcaacattgttacttctcttcattttatgacgcaaaggcacaagttgctaaaaaaaaagttcattaacaactttcttcttttctcatgccactgattgctttgagctatagtagcaatatgcaatgttgttttagcatttagtgagcgaaaaatgctggacttcgatgctgcggaagagagcactgggtatgatgtcatgcattaatatttttcgatcacgttctcttttttagaagaactttttgcctccttaaattcggagaagtaaatgactagatggaccatcagatccttcatgtagattgctagctttctgcattttataatcactgaccaactgtagctttttaagctagttttcgagttcgtaatgatttagtactggtttcgacaatcttcaacaagaagacctgctggagtactgtttcttgccgctcttcttttgagtttttatttttagaatccttcagtatatcaaagttgaaccactcttgatttttgtgtccagaacgtgttagatcatgcccagaactgctgacaggttacgcactcctgggttgtagaactataacaatacgtactgaaactcctgctggtcccacgctattcttcctatcaggaaaacacaggggtttgggcgttgaactcctaaacagtgacttattgtgaacaatcttattagaatcataaatatctggtttcaatattctttgctggcttgtaagtgatatatcctctcctgctagaaagcgattaatgcttttctaataaggattttctcacaaaagctttctttactgaagggaatgacctcgaactgctttggaattatgatggatacagtgggagataccgtctta

SEQ ID NO: 114630 - DNA, 641 bp, Physcomitrella patens
  Intron number 1 from transcript Pp1s36_261V6.3 (locus Pp1s 36_261V6) derived from phytozome v7.0 (chr-ID scaffold_36; pos 1725851 to 1726491)
acgaggagcaggaggagaagaatccattctgtaggtagccctgtctgtctgtgtgtctgtccacttctggggggcgctggcgttgatcttaattcccattcttgttcgctgattggctgtgcacccgcttttttctgggttccgtctgattggcactgctgcttcttcatagagctcgtgggaatcgtcgtcgtatgcctttgtgtaacctctttgtgttaagagaattggggttggtgttgttgctcattaagagtttgtctgaatcctgtgagtctttgttttgttctgaattatgtatgtatatatgtatacagatatgtttgttgttgttgtttttttgttttgctttatccttgcgattgcagtggtgattcccactttggttgggttgaggaaatgtttgaagggtcagggaatttggcttcgttttctcgtgtggggtgttggccagttttggagtcatgtggtttgctgttgttttgttggaggttggtttgttctggtgccaggtgtggaaatcggaatgcgggaggtgaggtgcctgtgtttgcgttcgtctgatgagttgcccttgatttcgtgggggtgtggttgtgatatcaggtgattacgtgaagaggtgagggtattgtgcagtt

SEQ ID NO: 114631 - DNA, 923 bp, Physcomitrella patens
  Intron number 2 from transcript Pp1s33_363V6.2 (locus Pp1s 33_363V6) derived from phytozome v7.0 (chr-ID scaffold_33; pos 2164412 to 2165334 reverse strand)
aatacatttccgcatcattcgaatgaatacttgagtgatcttttggaaattttaagtccttggtcatcttcacccgccactttgtcactcgccgtctccctcacgagcctgtgttagcttgcctcgctgctgtcaggttctccatacttcaggaatcgattgtgcgggtcctcttaaatggactcaatctgcaacccgttgcccagtaatgataaaccattctcggagtacagagactgctgtaggaacatagaattttgggggtgactgcgtcgttttctgtttttggtttcgtcatgaaatgatttcgtgaccgcaaggatttctgggtgatgatggattttggaggagaagagggtggttcccctcactcagggtttgaattctggtgttggtctctgcagtgtggctataatgtactctgggcgtgaagaaagtaggctgcatgttttttgctggaaatttggtgacggtgagtgatgtgggcgtcattacttgtcgtcgtggttgtccttgttgttggtgttactttcttcattactcttttttctttttgtttcgttttttattttttagaaactaaaaatatacatgacgtctttgaagaagctacacgaatggtggagaggtggttctcatccacgacagttatgttcccttaatatgcatatgtgcaatatttaaaattttctaaccgaaaattccaccaaagcgaatcatttatggaaatgagggtatacttcaggtgcgaagcattttcaacgtattcaagaacatacgaccttattcatgcaagtggcgttttactgcaggatatctgttgaatctgatttctatccccatgctggagccatattcggctcctcaaaccttcgtgctgtgtttcagttgcgatattgaagatattttgctggaagtggacc

SEQ ID NO: 114632 - DNA, 917 bp, Physcomitrella patens
  Intron number 1 from transcript Pp1s45_89V6.1 (locus Pp1s4 5_89V6) derived from phytozome v7.0 (chr-ID scaffold_45; p os 607256 to 608172 reverse strand)
cttcgcgtctatttgctagaccactggctggcagggtgagtctacttaagcttattgaatattaatagctcgttaaacagaattagtgcaatgttatcggtatggaaacaatcggacagagcgttaaaaataaaggaacttcctgagtgcgtaactttccagactgcaggcacttcttaaagctccacgttcatgatagtgttgtccgagtgaagctttttcggcagctgtagaagagtggaattgcaacccttgttggtgcagcgtttctgagctatacagtgaacaaaggtgtcccaacgtttcgacgcagaccttagcatttcatgtgcattcctacacaagaagatccttgtgtgggctgaacttcttagtaactggttttttgtcggatttgaattctgttcgcgcgaccagtacatgctctctctctccagaagcctcgagagcctataaccttggagggctgtgttttgaaccctcggccatctgctgcccgtgtctatcacccttcagctgagcctcatccttacgtaatcctgagttgagcatcattgctctgcaagctctcagcagtttttttatcctgggctgataaagctaatggaaggatcccacctcctcctgcgtcagggtggttgataaatggtgcttcttcagtgtaattgtcagagagtcaagggaagcagtacatgtaggagttttaagttgtgtgttgctttctgagactccgttccctcgagggtcctttcttgattttctaaacaaatttcttttccctccgctatcgagactcgtgtattgctggtgggttgtacgaatgttgggggtggaactcttgacactgccttgactcgtgcgctctgaatgtccaaattttaggaagaaaatttcagcaactataactcgccgtcacc

SEQ ID NO: 114633 - DNA, 596 bp, Physcomitrella patens
  Intron number 1 from transcript Pp1s169_103V6.2 (locus Pp1 s169_103V6) derived from phytozome v7.0 (chr-ID scaffold_1 69; pos 546158 to 546753 reverse strand)
tcctggccccgagaagcagtcttgtgaaataacaggtgatgattctgtcttgtttcacgggtgcgaaatagatgcgaatgcgttcgttgatcttctcgcacttttcttggtggtgggagctctgatgacatacttggtgcgatcttttaatttgttggtttcctttgattagttatgtccgagaggtaacttggtttttaggaattagaagaagaaaagagaaaatggcacgatgatgagtttcagggtattcatttcagcctggagttaaaattttgtgaatgatcagcgggtgtgttctcttttcgatgggcaatcctgcattgaaattcccagtacctagtttcgatgctgtagctgtgatgagttagtgaggttgacagcattgacgtattgtcgctagcttacactgatttggactacaattttctgctttggattggtctattcattttggtgtgactgaactggagacagtttgcggattcagacctttgttaagaacttcgttatagaataatgatcgattgcattacatcttgtaaatttcaagtgctgcagttacttttcagcagcaacagcacgctatttacaac

SEQ ID NO: 114634 - DNA, 930 bp, Physcomitrella patens
  Intron number 1 from transcript Pp1s214_72V6.1 (locus Pp1s 214_72V6) derived from phytozome v7.0 (chr-ID scaffold_214 ; pos 575651 to 576580 reverse strand)
gcaaaatcatttgacgagcaagtctttcaactgaggtgcgtcatccttcatttttccggcttacaagcgtgccctcgaaaccttgtttgtgcgcgtgcaggtgcggtgtttttatgttgtggtggagttatttcggaactgtcaggcaaagataagcgccggaagaaggaataaagagaacttggaatgttgtgtacgatgtgcttgtcagtgctgtgagcgttatggtgcgctgtcggtttgcctgttaggttctcctctgagagggtttcgtttttggtgacggaggtcgtggtttcagatagcttgcgaaggaagaatcgttgtttggtttgaaggatttggagattggagcagaagttcggattcctgtttttgcatttatatttggattttttctatggcggtggacgatctgtccggcgtaatctgccgctgttgcagcagcgcttgcagcggcaactctatattccgctctcctcgtcacgctagctaatcattaaccgttgcagtgcgtgtctggttcgtcggtgtgcatcggaggctgtctttgactcttccttgtgtgataaaggctttattccagccatctgatgtatgcatacaatctggacttattctgcatggtagcttgagggtcgtgatggtggagttaaggtaagatcgccagataatagtcttcgttttcattttcccccttggtggtattagctaagttgtgctggggtacgtaagatcgacattctgttttctgcgttgctgtgaatatgtttctgcttccaagtctgatttcagtttctttccctcccacatggttggaatcgccatcggtggtagttggtcctaccgactgtttcaatactctgggcactgtgtgtagggtctgtaaatcctccaaacccacatcagtagcgcgtcaccccctcggcg

SEQ ID NO: 114635 - DNA, 569 bp, Physcomitrella patens
  Intron number 1 from transcript Pp1s17_376V6.2 (locus Pp1s 17_376V6) derived from phytozome v7.0 (chr-ID scaffold_17; pos 2447756 to 2448324)
ctccaaggaagcgctcaagttctctgtctggcaaggtcagttttcgcccctattccatttcgggttttgatcagatgatcagtgtaagcgattggattggaagtgattctgtctagttgccgctgtttttgaaattctgcaaggctgaccgcttgaagacgaagatatgctcggagtaggttgtgcttcgtaagcattggtgaattaattcacgaaatcctcaacactatgtggaagatggcagtactcacggttgatgaaatgatcatgttctcaatgcattattttcttggctcaagtgcttcagtaatcttaattcttgggacggagttgattgtacgtcctgcacatgttcgtataaatgcagtttgaatcttgaagcttgccttctgagaattttaaaacacaaggtttttggtttcgtactgtggtatagaaatattcgaggcaaggcactttgagtaactttgggttattggcacttctgagttccatgacctactatctgtgtctgtcattgattttatttatttatttatttattttgttgaacattcggagtgtaggag

SEQ ID NO: 114636 - DNA, 603 bp, Physcomitrella patens
  Intron number 1 from transcript Pp1s196_65V6.2 (locus Pp1s 196_65V6) derived from phytozome v7.0 (chr-ID scaffold_196 ; pos 473884 to 474486 reverse strand)
tgggtgcgcgggtcttggtgggttttgcgcgctgggtaattttctctctttgttttttttagtgaggttttgttctataatttgagaatgagtcgcaggagaaaggggtgttgccgtgttgaccatcacgcgatgatttatagcgcccacattctttaacgacgagtttgatttcttagatgagtcaatgtggtgctgaatttggggggtagaagaagcggggcagttttaggttgctggttcattgaagagaagtacacatgtttactcttgtagttgattctaatgggtaccttggagtcatttttgcctttcgacattggggtccctgctacattgccatattagggtattgcccgtcgtttgggggtttttagtttctgtcttgtgagactgatgctggaagtgttcattactttttgaattctttttgaaatacttagacttcacgataggtacacctgtagcttattggagttcttaaactccgtggcttttaggttttcggttttgcatattataaaaatcacgtggtaatgaactctctgtaacggtgagctgcaatctacatattgtatcggaaccaggtgaatagtatctgcc

SEQ ID NO: 114637 - DNA, 999 bp, Physcomitrella patens
  Intron number 1 from transcript Pp1s153_138V6.1 (locus Pp1 s153_138V6) derived from phytozome v7.0 (chr-ID scaffold_1 53; pos 790727 to 791725)
aactggctgcccaaacgtccccaacgcctttcaaggtattcatgagccattcatcacaatcataagctaggctctctctcaccgatactgttaattgacaacctggggcattcgagtgggtgtctctgctcctgccatcaggaacagaaagaaggaaaaagaaaaataatgaacacccaaaaaatattgaaaattaaaaatccctacagtcttctgaatgttcgaaaagcagagagagaatgctcctttcaaaaggattgttcggatgggctcagaagtattgcccatcacagcaatgctcttcgtatatcaatgacgaccctcgccgaacaatcctacggtctcaatttttaatgccgccctgaattagattagtagtgaatgactgcatggcggagaataataatgccttctcattgtgcttcgtgcagttcatgttacgtggttgatactcaacagcagcaaagttccttgtttagtacagtaccgaagctttttcacacattgtagtaaagtatggaccccctccatttccttatctccatgattgtggcatcggaattcttcctggagtgtaccttatggtcacttaacgtttctggtatggaactgtgaatatgcaatattcaatatgcatgactgggatagaacagaaaaaaggataatattcaagagaataagtcatgtcgaaagggggaggaaaaacagagaatttgatcaaaacgacatatatgtcggacgcaattaactagtgttattttttcatagcaggattgaaagtctgatcgtgccggattgtccttgtagacagaagtgacgtttatcctctaggctgatgcttgctttacacgcttgaactcaaagtcatcagaatttaatcagtttttgcagagaggttgtttcgattgacgaaatccttagaagttgaagcactcaacttgttgagcatgcacggatatatgtcttttaactggtggacatatcatgaccatgtataga

SEQ ID NO: 114638 - DNA, 872 bp, Physcomitrella patens
  Intron number 1 from transcript Pp1s211_68V6.1 (locus Pp1s 211_68V6) derived from phytozome v7.0 (chr-ID scaffold_211 ; pos 424031 to 424902 reverse strand)
gggaccagattgaggtatgttccttgcgcacatttgtggtcctgacaaaggattggatcaaatcacttgtctagttgttccctgcaaattttgtagtgtgcaccttgatcgcttcatctcgctagcagtttagattcttcggcagtagatgacttccaagtactttctatcttgagatggaactttcttggcatatttttctttttgtagtggagaatgccattcctggcctggattctgtgctccactttctgggctggaaaatcaacgagatggtagtgttctcacaatcacctccgagctcacgtgctctactacttgaatttagtcttattttttttttttttttttttttttttttacatgaaagcaatcaagggacgcctacatagctaggctgttgtagcaatcagcatgtttcgggacgcgcgatgctttcatctttgaattattttgggcgtacagattcatgcgagaagtggtagcatcagctcgttaccttgtgtttccttctggaatattgacttggaatgggattgattgcatgactttgggtgcaatttgagagtgataaccctaaaacctgacaacagtgaagtgattcggcactcacatcgacatcagatctttaatgttggacctaagtttgtattgatttcttgttattgtatagacgtaaaaactaagtttatacagatgaagtaatagttttaccacagtggcggtatatctgtgcggacttttagcttgattgggcttttcgcgatgtgtcaattctttagcattggtaattcgaaagctgataagaatggcagtacatttcagtttgattcgtaagctttgtggaagctggcatgtttttgtgcagggac

SEQ ID NO: 114639 - DNA, 463 bp, Physcomitrella patens
  Intron number 1 from transcript Pp1s372_41V6.1 (locus Pp1s 372_41V6) derived from phytozome v7.0 (chr-ID scaffold_372 ; pos 184045 to 184507 reverse strand)
tattatcttcactcaaagaaaattatgcacagagacttaaaaccataaaatattatgataaaagtaacaaacatggaaaatgggtatgtgcatgcaaaattggcagattttggattgtccaaaatcaaagaaaatagttattttactcaaacattcaatataggtactccgaaatatatggctccagaagtgattgatttcaatgaaccaaaaattgaagataatggacttataactattaatatacaaaagtatgcatttaaaagtgatgtatttagttttgatatgatgtgttgtgagatactaaccggaaaagagccttttttaagttcaagaccttatgagataagaagaaagataaaaagtggtgaatgtccaattcttcttgatcattgtccgccgattttggagattttgataaaagattgttgaaaatttaatcctagtgatcagccaacttttg

SEQ ID NO: 114640 - DNA, 768 bp, Physcomitrella patens
  Intron number 2 from transcript Pp1s194_186V6.1 (locus Pp1 s194_186V6) derived from phytozome v7.0 (chr-ID scaffold_1 94; pos 788982 to 789749)
tgcgcttctcatccagtctggtcttggcgccggtaagttctttgatctgctcagtatttctctgctagttttgagctgcgatcttgcctatcgaagcgtttctttctttgtgttaagttgtgcatgtatcgttcttgggtcagtatttgaggtcactctgtgttagtgtagtttccttagttttgaaatagttgctgcacttaaggaaacagctgggagtgatggaatcgaagtatacgataatgatagaccctgttcgtaagacgcttatgagaagccaatagaattgcctctacctccgcggttgtattgttttctgttgttggattttcaatgaggtgtcttctggtttgaagcccgttgcctgcaatttaacaagaaaatgaaacagtcgatattaatctgtagaaatgaaacgtttcactaatttcgagtttgtcctggagatggcgcttgtgctctaagatcactgcttattagctgcttcatttactgtgacgattattcattacggttcgtgcgattttttcaatatgatttggtcgtcttggaaacctggatgcgagctcttgataggagactctttgctttcgttctttagaaaacgtagttcaatgtggactagattccaaccttctaatacttgaagtcgtataacccgattaggggaatctcaactctaatgtgaaaccaagatctagttgggtgatctgcatttacgactcccggtactgatctaaaccttggcattgcgtatgtgagcagcga

SEQ ID NO: 114641 - DNA, 651 bp, Physcomitrella patens
  Intron number 1 from transcript Pp1s318_8V6.1 (locus Pp1s3 18_8V6) derived from phytozome v7.0 (chr-ID scaffold_318; pos 42551 to 43201 reverse strand)
acctttcaagcctttccatcctttcctcgagagtaattctacgatcaatctttttcatctcggttcatgatatctctctcttcctttcagttgttaaaccttcaatgtaatcacttgtaggaatattgatctcataattgaagtgtgaagttttaggaggatttcttacgggtcaaagacttgtggtagtgcgtgctgttgatacgaaccacttctgacttacctcatttttttgttttgtttctgcaaatagtacttttttgattgcctttcatcttcttggctgcctgtccactctttcatttgttagcatgcttcttgacagtacatcctgtcgttgtgcgaaccgctcgatcggttcctcctgctaacctagtgtcctgaaggcccctgctagctcgtgttctcttctctggttacgattagggtttacacaaaaggatatatcattaaaagacatattgtgtcacaaagtgtgctgcgttatgaagtttcccaattttaattattattataattattttttgtattgcatttctctgtgagaaactggaaaagttacgttttgactacccctctactgatgcaagaccactgacatacatcttttggctcaagacaatcttatttctgttgaacgatgtgcagggt

SEQ ID NO: 114642 - DNA, 315 bp, Physcomitrella patens
  Intron number 3 from transcript Pp1s149_139V6.1 (locus Pp1 s149_139V6) derived from phytozome v7.0 (chr-ID scaffold_1 49; pos 453895 to 454209)
caaggtgcatactccttgccaggtccatttctttaatgtcgaagcatatctccagaatgttgggcagcttcaatccatgccatgtcagaaatgaatcctttaagatctttgcagcttctgctttgtgttttttactcagttcggagatctttgatggttttcttatcctgaatatgctgatctagacatttacagagtgttttctttaccttagagttgtacaaggataacactagatagtgttttggtggcactacaaagtcaataaatatttggttcaaacaataaagtggctgtgcaggaaagaggagggat

SEQ ID NO: 114643 - DNA, 1047 bp, Physcomitrella patens
  Intron number 1 from transcript Pp1s120_129V6.3 (locus Pp1 s120_129V6) derived from phytozome v7.0 (chr-ID scaffold_1 20; pos 895079 to 896125 reverse strand)
gagaaacgcgtgtttgaattgatcaacggggtacggtaggggtccattcctgtggctcctagctccttccagtgttttgtggaagcagagtaggaaagcaatcgcagcttatcaagtttctatgaagcgagggttagtgttcgtgggacagtgtttcgatcatcccttgtacaaatgtgaggatccttgtcctgcagtaataatacgcggacagacgcagtcttatggttacagcacaggtcatttgtaatttttgttttgacttcgagcgtatgtctttgaagagctcttgcgatctgtgaatttaaaccctcagtattgtgacgcagtatttaagacacaaacaggttaatattttcctcttcatcctttagtcttagcagtgtgtactcaagttggtaacgtagcgattggacctgcgaaaggattcttctgaaggttgtaaagacagttacatgttagaattatgattatcttctatcttggaggcacttttgatgtcgattatataatcaccaattgcttcctggaattcggccacacggtgtgtgcgctcgttgggaagagtgtggaattgtgaggtgatttcacagttttcgagagcacattttgtagtaggcatgagtgaagtcgaggatggccgggacggtcgctgatttctgtctcccatattgatgaagagatttgacttagtcgtgatcgggtttccttacgaattcgaacacttgaagttattatatggcatagtcgaatctcgaatttgtagtccttgggtgctcggattgcgcttagtcgtgctccgggtagcaaatttgttggaagtttgataaacgtccggtacttctgggggcttgaagaaggcagcgtgggagtgtaaagctatagatgtatctgcagtctaattctttaatctgccgttttcattcgagcctacgattgccgtaatcatcatgctcgtatgcatttgtagagctttttcctaaatttttattgattcaagtttgatgtgcagctattagctattagctattagtgttgagaacaagt

SEQ ID NO: 114644 - DNA, 918 bp, Physcomitrella patens
  Intron number 1 from transcript Pp1s227_57V6.1 (locus Pp1s 227_57V6) derived from phytozome v7.0 (chr-ID scaffold_227 ; pos 396093 to 397010 reverse strand)
cggcatcgctgttgaagaagtggaagcagaacgaggttcgtaatgcttcggtcactaacctgttcagttcagtgatgcgggattcagtttaattaggtgatgtgcatttttccctgcaaaccttatatcgtcaatgaccatgtgaattgttaattgctggtttgctcttcagctatgtttcaatttgaattttcagtggtttcagcgtgtagcttaagtgatctcctaattatttcgcaaatctctgctgaagcagcctatcattagtctgaatttttttgtaatctcgaaagatttcttctctgttcggtggtgcaagtacagctgtttaatttgctacactgatgttacgaagtgtatgatgtagtaaatgaagtggtagtgatgtaggctttgagtcatcgtcctttgatcgaaataaacgaaagtgctcatttagagaagggttttgggcagttttttgtatctttctttttcttcgttgtttcggttttaattttgagctgctaatgagtgtgttcgattacaaacgcacaatgaactaatagcgtgatctattacgaaactttgccgtgaatttgttgctagatgtcgttgtcaacatggagtgtgctattttagacaatcataaatgtagacgtagttcgactaataagcggtgctaaggctgaagactgacgaaacaatgttgtaggttgaggatgtgtacatgatcctcatttctttttgcagtaatggaggataccgtacattcagatgacagcggaaagcttctaattccatgtttaataaatcctcatgatatattcggatattcggtcggttgtcggtgcgaaatttggaaggcttcttattgattttgaatttatcttctcacgaggattatcttcattgtgattttctccaggtgagcaggcc

SEQ ID NO: 114645 - DNA, 442 bp, Physcomitrella patens
  Intron number 1 from transcript Pp1s46_326V6.2 (locus Pp1s 46_326V6) derived from phytozome v7.0 (chr-ID scaffold_46; pos 2111793 to 2112234 reverse strand)
cttctcctgcttcgtgcgttgtttggagtttccaggtgggtttctctttctttctcttggtttctcttgcatctctgtcctgttgattggtcccatttttgagctggtaacaggggctgtgactattgtcttgctaaggattctgttcggttattgcattgtcatcagaattgggtcgtttggttgtatggctaactaggagggttatcctcgtggtttacgttttaaggctgtctgtttattttttggagacactccaaattattttattttattttattttattttttgaaaaaaatatttgtgtgattttgttgtgtaaaagattggattggattttagtggttaatgtcagtgattgtgggatttttattttcttttttctcttctcttgggaagtggagcttacgtgtgacatgaccttgaactgcagactttcaag

SEQ ID NO: 114646 - DNA, 775 bp, Physcomitrella patens
  Intron number 1 from transcript Pp1s81_164V6.2 (locus Pp1s 81_164V6) derived from phytozome v7.0 (chr-ID scaffold_81; pos 975234 to 976008 reverse strand)
tgtcccccttggacgtcattaagattcggttccaggtctttccccctgtgccctgttttgggttttgattactgtattgaaggaggcgcgagattgttactaaccatccgggctgatttcctgtaccgagagaagacccctattgatgtttaactcgaggtttttaagttgtttgcgtggatgatattagcccaattagtcgcttggaattacttcttgtgtattatgattagtgtattgcaatacaatctcatgccgtattagttggaagtcttggccatagaaattatgataccattctagagcggacgctatgtggatgttaccttgtgcaatcctctacccatgaaaaaatatcttcaacccgtatgcttcagctttgtgagtctgcagggatttctggaatattcacttgtgggctttactttgcaagcaacttcttacaatttttgcatgtaactatatctagattgagtttagcttcgattgcactggtgaactattcgttccggttgtagcccttacacggatgactagcataagtacaagttcaattagttatacatgagtagagaaccgcacttcatatattttttggagtgtacaggatttgagtatgcattaactctaggattatctgttttgactgattggtttttgtctacaattggaggattctccatgtggtgatcaactagttgaacatagactcagagacagtttgatttgctgcaatacagatccaactggagccgacaagttcaaggaatatttt

SEQ ID NO: 114647 - DNA, 271 bp, Physcomitrella patens
  Intron number 3 from transcript Pp1s48_58V6.4 (locus Pp1s4 8_58V6) derived from phytozome v7.0 (chr-ID scaffold_48; p os 543500 to 543770)
acaatcagaagctggtattaatcgtgaccctgcattgttttcttctagtatagaagtctagtagagtatgtttatttgattgaatgctacgtagatctgcagggtccattttttgtcgttgtttatcattaccgttttaaaagacgtagtcttctggaagaaaggatattgtatcttttttttcaagtcgtttgggcggttttttaagcctaacttcgcgtatcaagtgctttgagtggtgcattaattatttacagtgttggtgaatagg

SEQ ID NO: 114648 - DNA, 889 bp, Physcomitrella patens
  Intron number 1 from transcript Pp1s129_113V6.2 (locus Pp1 s129_113V6) derived from phytozome v7.0 (chr-ID scaffold_1 29; pos 720632 to 721520)
acgcttactactggtttcaggttagtttcgcacatcatttactcctgctcgtctggttttgggtgcagtctttttcagtcgcgatgagcaaaccatggggtatttggtttcagcaaatatttttggttctagcgcagtcatttgatgaattcctcaacgtaccttgggcgtgccacatgcttgatttagtccctctctctctctagcggaaaatttgcttaaaagcattgcccacagctaaactcctttcattgggttaaaaatgggccaaaatcgatttaattggtggctttgtgtggaccaagcggagaacatagtgtgaatggaattttttaaatgcttgacgtgattcgatacacgagattcgatgtaagtttgagaaaaatgtttagtacaacagaaatacatgcaaagtggcagcaaaattcagtttttttaatgaatgagcttaccgcgagtaaactactacttcagtcgggctatgtaggcgaatttgatttgtctctcttaatatcattctagtatttctaactataggtatttagaatggacatggtcattttactttttgagcttagacggaaatgatatttggaggttgcaatgaaaaataaagagggacactagaaaaagatcgcgctaatatttgacttacatctctgattctttacattgaacctgaagcaattgcatgaaataatacccatggtagtattaattagtctcggcagattggagtatataaagttcctaggatcaactctagtaaccatcgagccatcgcagctgagtcccttgatcctccagtctacttttttccacctcagtttgagtttctagttttgccgagtatttacaatatcgtatttgacatcttcttaacagaaat

SEQ ID NO: 114649 - DNA, 1031 bp, Physcomitrella patens
  Intron number 1 from transcript Pp1s227_133V6.1 (locus Pp1 s227_133V6) derived from phytozome v7.0 (chr-ID scaffold_2 27; pos 722509 to 723539)
tccctcaggtaaccctcttgccgtcctgatctgtatctgagtttggatttcgcattggagacgagcaaagttgtcagagcgagtttttctttaatgatgcagttttgtatcaacacctcgttgtcttcgattaggtttggaattatggatggaagcagtgaggccaagtatttattttgcatcatcactcgcagcaccgacagtttatcaattgccggatgtcacacatgggtcttcatgcgagcgatatacgattgtgattgacgtcctagaatgccaaagtgtgatgtagtatctagagagcacgaaccggttttgaagtgatatcgttgtatgtatagtcgactgtcaactgggctgggagtattagcagttccgaaaacaaccgaacctagattatacctgtttaaaatagtcttttcgttttgggcatggtaagaggagaagagtttgatcttatgcatccaagtctcttaagcgaccttgaagatacccatgtatcgcaaggcatggacaaacagactggaaaccttaccagttggtcagacaatgtgtttccacagcattgcgttcctgtggctgcatgtcaaggtattccaaatactaacgtcggcagcgatatcggattagaaagttgcccaatacgtcaaaatggtttaccctcttttcggcttggtcctgcatcggacgcagcctggtcttttaagtgcaaattcgagaaccatgactataagtctgcatctgtctactccaatgtatttagttaacctgtggctctctggtggtaaaaactacaatgagatttcatgtacattcccagattttatgaggcaaaagtgtacataccctcacaatcacagccttcggggcttaagcgtcatgctctgattctatgagcgcaatacagtgagttctcattgggatttcattcaagatcattgacaacgaggagcctgatgagatcggcgtggtgatgatttttattttattttccagggctggaaggagcgccagatttcgaaagtagagaa

SEQ ID NO: 114650 - DNA, 736 bp, Physcomitrella patens
  Intron number 2 from transcript Pp1s222_100V6.1 (locus Pp1 s222_100V6) derived from phytozome v7.0 (chr-ID scaffold_2 22; pos 564650 to 565385)
gaacaaagtcgaactgaccaaagggcaacttgaaggtttgtcaggctctctttctatgaacaaccatggtgattgtgttgcagttgaaatgaacaacattaactgaacactgttaaatttctctttcaatgtatttaacgtggtatcagagtgtgtttttgttatcattttgaccatggttatagtttttcaagcatgttaagttggcagaatgtgtctgaaaactgtgggtattatgaaacagaagatccttggtcctttttaatggctgtgctgcgaaatcattcactagttcagaaacaagttgatgagcacgtgtgcagtctttgaaatgttttatggatggttgttgttttttttcttgagaataattctagaaattttacatctcagctcagaaaagagaatcattttttgccaacctcgctctaaaagaagctgacatagaaatggcctctattcatgcggaaaaaagacagcttacttttcagtggaagactactttgatagccttgactcgttgtgataatgctgtgaaggttaataagtctgccatctaattgtaacatatttcactttaatgtatgtgtgtgtgtgtgtgtatgtctatatatagatatagagaatttcaaaaatgttatggtttatgtctttgatattgcaaaatcttaaatgagtttgcatgaaaagtaaatatgcaatgcacatgtggtatgtattttgcagcttctaagag

SEQ ID NO: 114651 - DNA, 876 bp, Physcomitrella patens
  Intron number 1 from transcript Pp1s407_7V6.1 (locus Pp1s4 07_7V6) derived from phytozome v7.0 (chr-ID scaffold_407; pos 61384 to 62259)
ggctgctgctgttgagagattggtaaggcacggtcccatgggccaagctcttttttcctcctactgtaagcgcgtctgtgaaggcttcatggtgttaaggactctccaggtttcgttgtgtgttatttgcatcttccgctgcccattctagactctctcccgcagccgttgtaaatcaatgtacccttgtatgtttcgcgttgcgttgagcaggccgtgaccccacgtcgggttgctatggagccggtgcgttcatgttactgaaaatggtctgcgtgcggaatgcgagggcgaggtctgtggggagtgttccggcagcgactgagacgtctaggttttggtgcaaatggttagtgcaaggatctgtgttatctttacttcaatgggggtttttagatgttgcgtttttggcacaattggaagccctgcggtgccgattgaaacccccaattcgacacccgagggatccatgtttttggtctgaatttccaatgtttctcagacaaagagtttttttctcctccaattcctcagtcatgtaacccgagagctagtgacacgggcagcgtgcgttttggagtgtcttgtttttctacacgaaaggctgcgatcgccatgtagggttcatgagctatgtgcgtaccatacttagctgaattaggggttttagtgtttactaggtcattgccctgtggatgatgtttttttttttgaggaaattatgtattttgtgaagctcctacacatcttcaactcagaggttttatactgagggtttagtcgagtgtcagtttgatttcgttgcaaagtgtcccattaactgttattttcttttctgcagaataccttatttctcaacaacatcttcagatcaga

SEQ ID NO: 114652 - DNA, 887 bp, Physcomitrella patens
  Intron number 1 from transcript Pp1s41_21V6.3 (locus Pp1s4 1_21V6) derived from phytozome v7.0 (chr-ID scaffold_41; p os 138358 to 139244 reverse strand)
gtattgcagctccccgacgtggtggtgctcttctcactctctctgttgaagcattgctgtatttatttgtatgcttttaaattccagattatgtgcggtcttgttccatttggagggccttttatgcagagcctggaattttggttgagagactaaatcgctggtttctatcttgcgttcagagtcttctggtgtatcgacttgctccaccttagtccatggtgtcatcattgtgcgtggaagccttgtagatccctggcctgattgtctgtagtgtgctctctcgtttggtgggtttttggtcttggtgtttggaattgaaagcgcaggatggactattgttgaaacatcgcatcgtagttgcgttgtgtggttttgtgttttgtgtgttgctgctttttgggtttcggttcaaggtagagagtcagttctcatagctttctgactgatgtttgccaatgaagtagtggagatcctggctctgaaggcgcatctttgttgcacatcttgcgaggcttgatggtttaatttcttctgtaatgcacttaaggggaccctcttaaattcgaactcaaaaccatgtgctccacgatggtgcttgtgtatattggattggcgtgccacactgtcgaaatctccaggacgtagtagcacctcatcatcgcttgtagtttcgggcgtggtcgattgctggctttaaaagtagagttttagctgaagtagttgtaagtgcttgcagaatcttagttcagtttcttatgtttttaaccaagttcaatctcacaaacagattttttttcctgacgaagcaacacctcgtagttgctgactctagaaagcgaggtcactaaccactgccttctttgtaatgcagattgggcaacgtt

SEQ ID NO: 114653 - DNA, 734 bp, Physcomitrella patens
  Intron number 2 from transcript Pp1s105_43V6.2 (locus Pp1s 105_43V6) derived from phytozome v7.0 (chr-ID scaffold_105 ; pos 245061 to 245794)
ctgccggcaagtgtttgttgcggtgtgcagtgcaggtgcgccgccaatttcgcgttacttcgattcgttttgtggagttgagaatctgagtgtcttcgtttctaatcccaatgttttcgccattttagagtttgaaaagcgtgcttgtgagtatttgattccttggtatacgtggcccgattaaacgagaagctcgcatcgagtgctatttctggtcgtgtggagaatcacaacctgcaccgtagtatacgattaaaggagcgatcattgatacctactttggttcggaatttcgttctcttggtgggattggccaagattgtagaggttgctcgattgactggattgacacagtgagtagggttgtgttcctctgccgatgtagttaaatcgttaaacatctcgtttggaaactttagttcttgcaaggtcttagggagcttaccaaagctatgaataaatacagaagaagttactgatttcgtatattcattatttatttactttgtgtgcattctggcatgcataggccgtgacatgacatctgagtgatacttcaatttctaaggccttccgcatccaaagttttttttctcaaagatttggtgcaggatgcagcatgtctctattcttcaaactgttctgaatcggatccagaaagttgtgatcgcacgtattctaatctgagatttattgcagagctcgaaaacataacaagccacagaaaatataaa

SEQ ID NO: 114654 - DNA, 795 bp, Physcomitrella patens
  Intron number 1 from transcript Pp1s3_537V6.1 (locus Pp1s3 _537V6) derived from phytozome v7.0 (chr-ID scaffold_3; po s 3174333 to 3175127)
cccactaggtacgttcggcatgattttgtatccttttttatttttgtattttctgtgttcgcaagttctgtattaaatgaaaatctccgaaaataggaaacacactacacataaagaaataagtaattataaaacaaggtgaatgcacgtatgcagaatacaggttcaagtaaagaatgaatgcacatcacagagaaaaagaggtttgagttgtacagatggaacagagggatggaggttcacagattctgtaatgaagagaatcatggtgatggagttaggaccttgcaaacttctctgggtggaaggtcgagcctgttttatttttattttcatttttgtgtggaaatgggtaagaaagaaaaaacagatttttggggttaatttgttaaaataaagttaatcttctttacgggggtaaagccaatgaagaggagggcaggtggtgtgagaattgaatttttttctacttccgactttctttttctgtgagtaattgtaaccacatgggctgtgttacttttgccccacatgaacaaagccagataccattttacagggcaaaagcctgactcacatgcgggaaaaagtgttggcaatgttgaccatgacaagataagaatgactacaaacaactggagcgaattagaaccttccaattttgcaaaacaaggggcccatgtttcccattctcaagaaaaataaacaaaacctgttcatcatgtgtggggtattgcattctttttctttttcattgcagtatcttttttctcaaaagccagccacgacctgata

SEQ ID NO: 114655 - DNA, 637 bp, Physcomitrella patens
  Intron number 1 from transcript Pp1s112_142V6.1 (locus Pp1 s112_142V6) derived from phytozome v7.0 (chr-ID scaffold_1 12; pos 694086 to 694722 reverse strand)
ccccagataggaacggccaaaaacttttagtgtgggtacgtatctagttgacctaactatccagcttgtcatgtttctatttccttctataccaacacatgctacttcttgtgacctttgcaatcaggtcgaatccagtcgtctttgaattcggcaccgaagttggctattcttgatgtgaaatgtcgagtactatcttgagtcctttagattgtggatttaggttaatgttttgaagcagattatttatccagagtggttttaaattggaagcagaagagagttttagggcacttaatcttcagaatttagttccttagatctacgcttgtcttgtatctctgcactttttttgggtgaagagtatttgtgtgacccagtctcaattatggtcctgaaatctcggcgcatattttgaaggtccttgctagttgatgaactgtgaatatcagccaacgaaccttacagaaatttgtagcgagcatattgttcgaagtagagtggtccttgttacacttacattcttgctcatcaacgattgtgaaccattcatgataatttagcattttctgactcgggcttcggttgatggtgattaatagtcgctgagagataacgcaaccaactacgtgaccat

SEQ ID NO: 114656 - DNA, 826 bp, Physcomitrella patens
  Intron number 1 from transcript Pp1s192_75V6.1 (locus Pp1s 192_75V6) derived from phytozome v7.0 (chr-ID scaffold_192 ; pos 627080 to 627905 reverse strand)
tgacctgtgaggttcttgttacattttttgtgcgacgaggatgtgtggttgtggcttctgttgttggaattctccggtggtttttcttcttcttattttctagttaaatatatgattaggctgcgtttctttttctttctctctttctttgcttccggaatttcgttggtgatggactgggtgtaattcgatgaaattctctagctaggtgtggtgaggaacttctttgcgcttctgcattgtgcaattttgggaatgaacaggttttacaggtgaccagtagaggaaagtgggtcaggatacctagttagagttagtcgcatacgtgtggggataaattagtgattccatctagcgctgagtctcaactggggcacgaaaatgcctatgcattgaaggaaccgagctctgtcgaatgtaggtcgtaatattgtaggattagggttagggttatatatgttttatcattttgattacatttgtctgattgggtcgtttgacgtctgcaacgaacatgtttttgtcagccaaggatgcagctgttaatgtgatcaaagttgatgatagcaagcatgtttccattaattcattaggttctgttcataatttcgtgaattcccaccaattttatggagtgtcttatctggttaagttctacataacctgttttaaggagtagtagcatttagagaggcatttttgagcgtttctcttttggtgtaaggttaagcaaggtagtttgtatctcgtgtgtttgctttcacgcagtactagtgttttaacgtatctatttttttcatccgattctggaaccatgcagctttcg

SEQ ID NO: 114657 - DNA, 791 bp, Physcomitrella patens
  Intron number 1 from transcript Pp1s13_158V6.1 (locus Pp1s 13_158V6) derived from phytozome v7.0 (chr-ID scaffold_13; pos 1105983 to 1106773 reverse strand)
cttgtattccagaggtgcgttgtcgtgaatttcagagcattttctttgtcatgatttgattgacgttaggaatcaaaaccagttgtgctaatggaacttatctatggaggtggattgtgaggaaatgtatggtggttcgactttacttttgatcattttggactgatttagtaaaaccacatgtgcttgagtggctgggaggaatatctgtggtagatgccatcacttagcactgtgacttgttatggtcgactaatattccatgcgaattcgttccatcttccaagggattcgtttcctaaaaatgagatcagttcttgcgactacggtggaagaaatgacgggtatatcacaatggttacggaattcccttcactgtacactttgagttgagttgcattggcatgttgtgaatagattgatgtgttgccactctaagaaacttcagtgaagaaacattgtgcaacagtttcaggctgtgttttgacattttctactgttttttttttttttttcaacaaaacaatcgtatcaatcgtggatacaatgccaggggatttctcaatatcctctgaatgactgttattggcaatgtgctctgaatgttgctgcttccaatttagactaaagctctcgcccttcaaatctgtttaccatagtcgctagaaatcacggcccctccataccccttcactccttcacacatgccaacaatcactcctattctcaatgtgcttggcttggcttcttctacagcttcaattttgcaagagaaggttacctcaagactt

SEQ ID NO: 114658 - DNA, 650 bp, Physcomitrella patens
  Intron number 1 from transcript Pp1s75_170V6.2 (locus Pp1s 75_170V6) derived from phytozome v7.0 (chr-ID scaffold_75; pos 917692 to 918341)
gaagaacaattagtccgcctcacaacgccttcgaggtttgttacaccagatttactccagagcttcgatagcttagtaggcacatcgaattatctttaatatgctagattaaaattcaaagaaccttcgcagccgtatgtccagtgcgtagtctaatcgcgcttggcaccacttttgttcggtcgagtcttcgaacttgcaccagcaggtcaggaggatgttctctcttttttgtgattagaacaccttttattttggtgaaataacgcttcccttctccacctatatttgcattccgacttcagaaaaactgagagtgtttcaattatggaatcctcgaaattaggagcttgtctcattcttcgcataacttcacgactgacaacaagttgctgctgaagagaagttgcgcatacttggatagatatcttcttattattgaagaccagtctgtggggtctgctctgctctttgcgattgatcgtttagtgtccgcacactacgtagtgcctcaaaatatgtaaaggacaggggaaattaaggagttttttttttttttttttttttttttgttgttgttgttgttgttgttgaaaggatgtaaacctttggaaggaagttgcagaattcccaggtcacttaaccgtcgg

SEQ ID NO: 114659 - DNA, 467 bp, Physcomitrella patens
  Intron number 5 from transcript Pp1s456_21V6.1 (locus Pp1s 456_21V6) derived from phytozome v7.0 (chr-ID scaffold_456 ; pos 158418 to 158884 reverse strand)
agcttatacggcgtcgagaaacatccgagtacagcaacaactctatccattattttccctaccaaattttgtagcttttgttcttcaatgaattttcgactgctgcttgccatcatttagtaatacagctcatgggttgagctccaaaaagcgtttttaaagtatgcacgcatggtaagtgtggtgggacttcaaagattttaacaaaatatgtcatgtttcgactctttgaatttgtgcagttttaggagtgatattcagtgtttctttttattaatattttcaagtatgtttcacgtgcatcttttctatgattaccattacgtaatcccatgtctcaccgattcaacgcttatctatgcacatttatgtgagatgagcaaactacatcatgaaagaatctgttcgaatataatgatttgagcacgttttgacttttaggtttattgaaggggattttgacgcgt

SEQ ID NO: 114660 - DNA, 863 bp, Physcomitrella patens
  Intron number 1 from transcript Pp1s456_21V6.1 (locus Pp1s 456_21V6) derived from phytozome v7.0 (chr-ID scaffold_456 ; pos 160393 to 161255 reverse strand)
agtggtgcccctgtgaactttttgctctcattgaggtgggttcttcttctcgctttccctctgtgctttcatggctatctacgttgccattagctcgattggttgggactgattgtggttattcctattctctgtgggtttccttggttgcaacgacattgccgttgtggtgcttaatatggttttgtgggagttggtaatggtggtggcgattgttgctttccatttgtggtgatggtggtgtgtataggtgattaacacgggagtttgttacagagagcatttgtgtgaagttggtttcgttaacatgtttgagtgttcgtgagttctggtgcgtgagaattgccaatgtgtcgtattaggatgtcttgtagtggtttccacatcgtatcggtcgaattcggagtgttcttgggtcataattcaggttttatttcggcgtttttgtgtttaaacgaatagcattcatgtttgttgaggacttgcaatgtcatcttgagatttgaagtggtgttttgcttttcgctgcaccctagctcatggtgaaaggattgggttgtcatggtatggtttctgatgcgatgtgctgatcacacgtggttgtatgcttgataatattgattaaccgctgaggagttcgtgccatcacaatttgtgattatcaacaaattgtctttatctggaaagtatcttgtaatgtatatggctggatttttatagaatatggaaaaagtttttatttaaaagtggactctgcgtattgaatcagataacaatttgagattatggtctatgctaaaaggagtgaacggtatcccttttctgcaggaagtgaacttccaagtgctatatagtggtattca

SEQ ID NO: 114661 - DNA, 484 bp, Physcomitrella patens
  Intron number 1 from transcript Pp1s208_78V6.1 (locus Pp1s 208_78V6) derived from phytozome v7.0 (chr-ID scaffold_208 ; pos 330059 to 330542)
tgcattctatgaccttcttttgcttcgtttttcttgtccctacactaaggattctttttttgaacctactcttcatttgatcatcatattaataaagccttttgtttctagtatttcatacaagttggtcagaagagagggcgaatcagatgttgaagaagatgaggatgatcaaccaaagaaaaagatccagttaggaatgcctggaactcaatagattacaacgtttacaatgctcggtggccaaatgaagcagagataaggcggcgcaagcttttgtcattgatgtggtgtgatgttgctcagttaggcatgagtccgatcatgtgtgtatcgtcaattttgactttgttctcttggatgtcgatcagcgattctgatttttatgacatgcgtttactttcagcaagcagcctaaattcggacagacccatttattgaacttttattcctatttttgtttcgacatgcagatatcactacg

SEQ ID NO: 114662 - DNA, 765 bp, Physcomitrella patens
  Intron number 1 from transcript Pp1s119_112V6.1 (locus Pp1 s119_112V6) derived from phytozome v7.0 (chr-ID scaffold_1 19; pos 954406 to 955170)
accttgttgaaggtcatcatcctcggcgatagcgggtactgtttcccgtgtttccgattctgtttttgtgtggagtttcgatttttatttttattttttgttttttgtttgagttttgaagtgggttatgagtttgtgaagcggcgtgtgcgggatgtgtgcgtggaatcgtttttccggagatgaggaggttgctttgaggtgtcatttgcggatcagcttatgataagcgtattgttggtctggatttttggaactgtgagggtgctgttattgtggatggtttggatcttgttgaagtatgattcttgcagagaaccttgtcgagaatgtttttgtttttttctggctgtgaatttgttggtgttccaatttttcctgccagctttgcagagatattgctcctttcgtctatcttggcgagtttctttttccgtgtttgatgaatatgctaaacgagcgccatattattgaggtggctagttcagagtttttcgtcggaggggtctatgtatgttcgtgcacaagcttttgagcaagtagttgaatacaaattgttcgagtgctgtggggttaattagtcgccttgagttctcaaggctgcacagatcagttgaaaagtccttattgaatgtacgttcgagtgtgtcaggtcttattgtcttcaattcctttgaataacgtgctctcttccagtttaattgaatctctcagcttcttttcttttttaaaaaaaatcgttgcagggttgggaagacatcgctg

SEQ ID NO: 114663 - DNA, 766 bp, Physcomitrella patens
  Intron number 1 from transcript Pp1s161_112V6.1 (locus Pp1 s161_112V6) derived from phytozome v7.0 (chr-ID scaffold_1 61; pos 771364 to 772129 reverse strand)
aacgatcttctcgcggtatgttatggaaggatttttgtttgatgaccagggaaggttgaatcgcatgtgaggagcttgtgttgtgaactttgaatgttcttgggagagggggtggcgtttcagtggcggagggcatgccagccatcgttatgaagaagtaatgagggtttttgatgatgttgctatgcgatatcatcacattatattgacgtttttaggcatttgtaaaccttttggggattgcacagcaatttcatggagtgaattcagagccctgtggtgtacagtaaccaaagttttttatggaactgcaatgaattaggatattttattgcgaggggtgcgattggaggatcttgaagtcttgtgagaattcgtggaacttcccatttgcacgtggatgtgtgttgtcctcacttaggtcacggtcttttctgtgctgaaggcattacaaatttcatgtacgtaataggtgaaggaggaaaggaaggatgttacttgtttttttctggaggttattgcgcggctagattcgaatctggattagtgattttccacctagggctcgttggtcagaaatttttaacggttcagagagaggtgaaatgactttgtacagagactatagttgttgtcgtgccaatgagttgcagtcaattacccttcttcctgtcaagctgtaaactctgtatactgcatactcttgaagatgttgcgtatcacagatgaatttgtgcgaatgtgcaggataaagattcatccgcta

SEQ ID NO: 114664 - DNA, 665 bp, Physcomitrella patens
  Intron number 2 from transcript Pp1s184_15V6.2 (locus Pp1s 184_15V6) derived from phytozome v7.0 (chr-ID scaffold_184 ; pos 66842 to 67506 reverse strand)
tcagggatttggacgttacttggggccgtaataaagtatgtctagctcttacctgtccctagggattgtaatttatagcatttgtatagcgtcatgtttattggtgttttttggttcaggtttgagcatttgaatcaggtttgtagtttttactctttggaacgagtcgtcgagatttcaacctttgagtagtgatcttaggtggttgtggcaagttcctcaccaggtctccattcagtctgaaaatttaaaaattctgctaattcctttcttataaaacccagtccacccggccttcggttgggaggtgtaattatttatgcagccgagaataatgcataagctgggtggtgaatttcatcttattcgacgcaggcaagctcttaatggtttttcaagagccctaacaattatcgaatctagttttctgtagggttgtggaattatgtagtctgatgcttgttgaaatctgtgtttgatactgagatcgttcgaagaaagctcttaaattgtttcgttggagtagattggtcgaaaataataaaatggtagcatgccatatctgaaatagaaacctaaatgggcgcgatgtgcgaatgaagttgattttcgagaaatgcttaagggtactcaatcggcctgtgtgttggtgtgtgcagttatta

SEQ ID NO: 114665 - DNA, 424 bp, Physcomitrella patens
  Intron number 1 from transcript Pp1s184_15V6.2 (locus Pp1s 184_15V6) derived from phytozome v7.0 (chr-ID scaffold_184 ; pos 67534 to 67957 reverse strand)
tcttcgccttacttccctgcttatttgcacatcaggtattcatatcttttgcttttgttttgttttgttttttgttttttgtttgtttttttttttcttctgttttttgctgtggggctttcagggttttggatcgtggtattgttgaggaattatacagttactttctaagaatgtgaaaattatgtgcgccttggggtgttgcggatgccgatttgtgttgaagttgtcacgattttttttcatattggtctagtacagaatgaaaaggcctgtctgttgatttatttattttttgattatttatttttttcctcttttaatcttagaacgggcgacataggctgttgcgcatttgggatctggaaattttggctgataagtagttttcttgggatttgttggcggtgtttgcagttggaaa

SEQ ID NO: 114666 - DNA, 740 bp, Physcomitrella patens
  Intron number 1 from transcript Pp1s147_28V6.1 (locus Pp1s 147_28V6) derived from phytozome v7.0 (chr-ID scaffold_147 ; pos 195424 to 196163 reverse strand)
tgaatctaattcataaagcgaaacatctgcctgaggtttcctttaaatgcaagcttgatgcactgtttctctggcttgctcttttcaactcaacgaaatctgtgttagattttcgttctgttgaaacttgatcacactacccgtgaaatcaaaatgtttgcctcctggatgagcctttgaattacattatttaagctgattaaggtgcagtttggttattttagaatttaaaccatcgttgcgaatatgcggccgctagactattctgatagcttctccagctctgatccttccaaaccgcacagtagttttcttttcgcatcgatgtctaggtttttaacatggtagtgcatccagatcgaatcacttatcactctgcagcggcttcagatcaatgaacgcaaatagttgcagcaagtgcccgttatctgcaattcatttcccctactttcagtcttgtgtgcatgacagggctatacgagagatctgcaagtgacactgttaatattgttttaaataataagaggtgtaagatttatgtgacgtgagattttcatggactatgtaatcatatcagttgtcttagaaatgagaccaaaaatactgaagttggtgcatatataaactatatcagagttgctgccgccctcgaaaattaggaaaatattacgtagataatgatatctcacacttcatatggcttatgcgataggagaaagtacccaccggaacgttgagta

SEQ ID NO: 114667 - DNA, 1015 bp, Physcomitrella patens
  Intron number 1 from transcript Pp1s74_224V6.1 (locus Pp1s 74_224V6) derived from phytozome v7.0 (chr-ID scaffold_74; pos 1409369 to 1410383 reverse strand)
gtggacgactgccctgtgcacaatgtaacaatctgggctcccggttcttgtatcgggtggtgaggtagcaattgagctgtcgctatgttgcttagggcagtacggagagggtttacaggatatcgtatcggaggtatactggagtcggcgcgatagcctgtttgttgtcgtcacgcacctccagtaatttttatggcaattttattgtagatatactttgagttggacgatcgaaggcgaaagagtcctttgagattgcggagaggttggtgctattggaaacaagttgtttgcaactattggttactcggtgctgggtatcgttttcgcaattattattattattattattattcacaaagtcaagacgtaaccctctgtttactgccgttggtctgggttttcgattttttttctctacaagcgaaattctttcgccatgcccctttttttaggagtatagagctctcgtgggatttggaacgaaaatgcggtgagaaacttttacttactcgtcattgactttgtagatttaaggcaaaatgacaaataatttacagaagcaggcatttaagagcacattgatcagggtacggtttgggtttgtattcttaacagcgacactattatcatgacgagactagaatagattttctcaaaatctgagaatacaacagtagctacaggttcaggctgctgatattgggctgctcttttcaacaaggtgtatttctttctgtcttaccaagtcttgacgaatacttaaaaaagtttctgaagatactttagctattcttaggaagatgtagtgctgatcaagtggacaaatttcgtgtctactggagcttaatgatctcggaacattcttctcttcacatatgtttagcattacaggtagttttgatatggtgtgttctacttgcatcgagtcgtgcctttggtaacactaaaagagtatctcatcaagtgattgcaactggtggcatgatatttggtttagcaggcccatttcgat

SEQ ID NO: 114668 - DNA, 564 bp, Physcomitrella patens
  Intron number 2 from transcript Pp1s65_268V6.1 (locus Pp1s 65_268V6) derived from phytozome v7.0 (chr-ID scaffold_65; pos 1557082 to 1557645)
ccaaaccctgagcgttttcctaaggtaaactttgttctatcacactattatgaatattgagaggccgtctgtatcactgctaatcaaagaatttccgggcttctcttcaatgatttattacttgtgttttttataattatcttgtcacaattcgaatagcgtgcaaatgcctccttaggttgtacaatggtgatgtacagtacccatcctctcttgaacagttttcgcgacattgttcggcccagtaacctaaatgtacagtaatcctagtctgggtttcggtattctttatgttaaggaagtttgcggaacgtgggtgacctcctccacacgtatatcctaggttttaccggtgcatctgcttgcacaatctttcttctatgtggatgtctgatcatcaccttcttatgatagtgccgattcgttctcatgctcaaagacgaagcttcagataactgcctttttagtgtctttgttgtgtgtctaaagatgcgactacgacgaatctacgtacaatggatgagatttatgttttgtctgcttgacttgtaggtacgcaagaca

SEQ ID NO: 114669 - DNA, 441 bp, Physcomitrella patens
  Intron number 4 from transcript Pp1s220_62V6.1 (locus Pp1s 220_62V6) derived from phytozome v7.0 (chr-ID scaffold_220 ; pos 434880 to 435320 reverse strand)
ccattaacagaaaatctgttcgcctattcaagcaggttatcttaaatcacccccatttcattagctctccttcatgacgttcatgtggataatctactgactactcgatattcatctaataattttcagatttttgtttaaattataaatgtcttctcttctttgaaccttcttaataaaccggtcgcttcgatctttgacctcattacattatctgaattcttctcgtctatgctctaaagttaaccattttcatgtgaagcataattcatgagcagttaacaaatgttttgaatttgtgatttctgtcctcgtttgtcaaacacgtcacaaaaaactctgatattgtcattagagctgcttatgcatcgagtttaaactaaagactcacttgtcccatgctcagaaaggtttggaagcgatcaaagtttccgatcgttt

SEQ ID NO: 114670 - DNA, 412 bp, Physcomitrella patens
  Intron number 1 from transcript Pp1s405_5V6.1 (locus Pp1s4 05_5V6) derived from phytozome v7.0 (chr-ID scaffold_405; pos 36381 to 36792 reverse strand)
ttcggcgctgcatctgcatttttgctgcagaggaggtaacacttttgtcgatttttgagatttttgcatcagagctttgtgtcgcattctgtattttggaacaatggggatcgattgagcgattgatcatgctgttgtggattgaagtgtgctggccgggttgagtagattaaacctgagatttctgcgtcaagatgttcctcctggttgttgggtattgcagcgttttgaagtttttttaaaaggaaggaaaaaaagaaaaaaaaaaaaaaaaaactcttcttttgtcgatcctgggttgcacagaagtgatcttagaagctgaatcgattttggggatttcttattgttgagttcctacctggataatgtcgtaggtaacatcgcagaggaatttgacacgaggaatttc

SEQ ID NO: 114671 - DNA, 941 bp, Physcomitrella patens
  Intron number 1 from transcript Pp1s78_128V6.1 (locus Pp1s 78_128V6) derived from phytozome v7.0 (chr-ID scaffold_78; pos 835875 to 836815)
cgagctgtctgttcaggttagtatttcaggtgttgttgttcgtggatccgtcgtatatatctcacatggattgtcttttgtgggaactgggttctgggttcttagtcttgccctaaaattcccccgcgtgcagcgtattgtgattgactggaactggaattgtgctgtggaagtctcgtgcaaacctttttgatatatcatagccgtggaagtgtatgttattgatttgttattttaatagaagaggttcaatgtggacaaggagagtccgaacagaaggcttgaaccgtgcggagtccgcgtttatggccacgcacacactcgcagttactctgctttggggtgcctggtttgcaatacagtgggaaagagcgccaggttttcattactatttcctcaaatgcaaactattatgttgataagctggtgctgatgttgagatcacaagttatgactattggaatagctcagtacaaacagtgcctgtttgtaaagtgttttctcgcaggatcgatcgcctgttctgagtggttgtcccgattttcctgttcgtagagaccagactgtctcgagatagatgtcttgctgtcttttagaatgatacaaaaaccccactcggctgagaagaaacagagaaaggctgtaaagttatagcacttcagccttgggttactgagtagatccggtcctgcactttgttgcataatttcagccttgttttaaaatttggatttgtatgaagcacttttatttttttctaattttcttactgaatgattaaacctgaaacctggacccctgacaccattcaggatcagagggaaaggattgtgagtgtaagatttcggtatttggccagtcagaacctggcattggatctattctttatctggtgactgctgctatattctaagttttgtactctgcattgcaggtggtgt

SEQ ID NO: 114672 - DNA, 747 bp, Physcomitrella patens
  Intron number 1 from transcript Pp1s55_58V6.1 (locus Pp1s5 5_58V6) derived from phytozome v7.0 (chr-ID scaffold_55; p os 392812 to 393558 reverse strand)
ggtcgccatccccggtgtcgtctctgattttcgaggtatttgtcgttattgttgtttttgttgttgatgatgattatgatggttttggatggttggggtttgggttgtgagatgttggatggtgtgcaacggggtttgaaactgaggtgaggtgtttgtgctctttgcttcacgtgggtggattggattttggctgctttgagggattggaagtcgtatttgggcctccttttgtgattctcgctggcgtgactccagtgctgatttagttaacgagttgggtttggtttgatgtatttaggagttggtgttattggagtactgagtatgaatcggctgcgatttttttcctttctgttttgatttgtttgttcgtttttgtttttttctgtgtgagagagtgtgtatgtgtgtgtgtgtgtggaagtgaaaaaattgtgatcagttttctgaggggcggaatatattgaagaggagtgcaggatttttaaggatatttttcaaatctagggtaacccaggtgcctggttactcgtgggggttccttttatgggttgttggtcggtctgcggggaagtgttgtaaacggaagtaacctatatctgttgggagattgatcataatgcaagaagcgcgggagaagaaattgagtttttggtgcaatttgctattctgagaattgtgcacttttcttgattcatttttatcatcgttgatagtgtttgcttcgccatcgcagatttgcac

SEQ ID NO: 114673 - DNA, 806 bp, Physcomitrella patens
  Intron number 1 from transcript Pp1s75_55V6.2 (locus Pp1s7 5_55V6) derived from phytozome v7.0 (chr-ID scaffold_75; p os 275193 to 275998)
ggttgctggtgggtgcgagcgggtgcttgagagcagcggtggcgagggtagttgggaatgtggctcttgtagattgtcgtctgatgagattgtcgcagttatgttgggggcgtattctatgttggaacatgctagggtttcggaaagaggcagaggtggttctctcaggtgatacttgttatttaggagcgcttcaaataacatcctctgttgcagcgagactcttgggggtggttgttacaattttgagcttgttgctgtatcatatgtccgttcaacttgtggttccatgtcgtcctggttgtggccaccccacgagtattagagtactatgttttctcgtgttttgaaccttttttggagccccttcgaaacttgtccattttacaagagcaaggtgtaagagacgtagatgacactgtttgcttttgtgaaatggacattagctgtacaaaggcatcaaatcttgttctggaaatcatcatttaaatcaatgttcttaagtgaccttcacgcagagccacttgaataacagacagcttttagtttcctcagagaagtgggaacttctgattgaagaagtctcacggacttgtacgtttacattgttgtacgtgtcatcattactctactgcgactgaactatacacttctgaatcgatcttgtcacaggggcaaaacattcctaccagaaaggttaaatctactactcgttgataatgcgtttaggtgtaagagctgaaatatgtggtttcaatttcttctgctaacgttcgaggatgactttattgcacagggaattagcc

SEQ ID NO: 114674 - DNA, 620 bp, Physcomitrella patens
  Intron number 2 from transcript Pp1s63_91V6.6 (locus Pp1s6 3_91V6) derived from phytozome v7.0 (chr-ID scaffold_63; p os 815013 to 815632 reverse strand)
caaattaagagcacttacagaaagttggctctgaagtaagtctctatactgtacatcctcactcggcctgtggtttgtatgatttactttatctaagaaatggtggattccatgctcagtggattgaagatttcgctaccaaaatgatgtgcctcttctgttactcgtaacatcaccgagcacccgctgtaatgctgtcggggtcgtattaacttgatttttgttggactattgtgtccataaaacgatacatagtaccctcatcttttttcaaaacataactctggctttaaattcaatgttgatgttccttcacatcatccgattatattgttttactctttatttgtttttgtttaatttgaagaatgtcatcatgtgctacggaatgtcgtgaagaaagagcgtggtcacaaggacaagcctctgagctgaattgatggtttacatcgtggcattataatgatcgaacaaggattctccaaattaggatttctcatattagggttttcgtcttttcttgcgtataactgctcaaggcaaatttaagacaattaatctgacattgacgattgttgagtgcaggtatcatccagataagaacacaggcaacccagagg

SEQ ID NO: 114675 - DNA, 781 bp, Physcomitrella patens
  Intron number 1 from transcript Pp1s99_189V6.1 (locus Pp1s 99_189V6) derived from phytozome v7.0 (chr-ID scaffold_99; pos 1101239 to 1102019 reverse strand)
gaaataaaggcacgatttcaattctattgtttttatcgttacaagtatctctcacggcttgaaaatatcgctattctatgaacggtctagaaagagtgtcgtggatcattaaatggtgagagatcatttcttctttctccccatcatcaataattaacttcttagtgactaatttgttttgttttgatttttaagtttattgaaatacattcctgcaatctctctctctctctctctctctctcactcttgctctcgcgataatccaagctattactctttccctgagtttcctttctgttgtatctacctaatctaagcgctgttttcagctcagattggagttcgttgttcaatgatctttaacaggcattccaaatctttttgttttgatttcacaccgagatattttgaccaaaatttcaatatttccttggaaaagtgggatggcaacagaacctcactagctttttgtgctaagggagcaacattatgttttgtcctcaacctatcttgttttactctttatctgcatatgaagcagaggttcgagtcgtgaagttaatgtgtattgattacgcttcctagtcgaatttgtcttacttattccttagaggtgtaatctgattcattaccatcttcctgaataattttataaactccatggtaacattcaatttgaccaagaggaacaagtttgtcttattcagcgtagctggctgttgtaatgtttgggggggactacagttttctgaaacttttatcaaacgtttggaagagtg

SEQ ID NO: 114676 - DNA, 667 bp, Physcomitrella patens
  Intron number 1 from transcript Pp1s78_54V6.1 (locus Pp1s7 8_54V6) derived from phytozome v7.0 (chr-ID scaffold_78; p os 289778 to 290444 reverse strand)
aacgcgggaccttcaggattccgtaagccagtcttttgacgatttctctctctcgctcgctctctctcatgtagatttgttttctgatatatatatatatatatatatatatatatatcttgtgaatgcacgcttgattcagttatactcaaataggtgccttacagtgtagtcgaggttttactcgatcatttttagggtttcttttgaagtctaccttgtggtccgtggtttattttgtcgagtagtggatttgaattagaatttttgaacaagatggtatttgcagtgatgagtgatttgttgcactaaggattatggtgatgttatttttcatgtggtcttgcatcccttttaatttaggaataagtttattctgattttacaatatgctctgtagctgtcttttaatctaaattgcagattgtaacttcaaaattttgacattggtgttgcaagctagcactattgatgcagctcaatattagagttggtcagtgtttgaggacatactgttcttcctctgatgacaaatacatttagggttttgagactatcggtggctggctccctttatcttatcatacctcgattagactgatctacattgtttcgagtaagatattgcacgagatagttgacatcgtagacttggcttttgcagaca

SEQ ID NO: 114677 - DNA, 892 bp, Physcomitrella patens
  Intron number 2 from transcript Pp1s13_289V6.4 (locus Pp1s 13_289V6) derived from phytozome v7.0 (chr-ID scaffold_13; pos 1909983 to 1910874)
tttcgccaagctgcgtcctcgcaagcataagcgaggtcagtggagaaatttcctgtatgaatcatttcataatttttgtaccgttcacgtgtacagattcaacctctcgattccttaggaaaccagatcactccactgctaggttcactttatagtaatctgtcgtcatgtgatgcataaacttctgttccgacgcttgcgaatacatgtccttagttttgattgcacttcgatttgattggtaagaggcctggatgagaattttgggagtgtgcacttatgattacgatggactgatttttggtagatcatctgaaattgtgggattgtgctgagccagtcgggttgttaaaagtctctgtagtttactatgtggcaatggtttcattactggtgggtatgatattttagtgattgggttactcagaaacgggtatagagatcgttcgtcgagtctggtcgcatggtataggagcttgaacatacgaagctaagttaaaatgatgggataaccaagctgatagcccaaatggctttgcgttaaggagcatgccgtgtgagctcgtgtcctttctgggaaaggcgcccgagaaaatactcttctgcgaaagtagaatattgtttttatttttcttctacacatgtccatgcctatttaggatgtatattcggaaggaaatgggatgtatggtatacttgcttttaatctatacgctgttaatctgttagtttttgttttctatatcgaagctgtcaaaaatcaagcaggagtgctcggttagggaatgatacatacagtattgtatgtcgtgtctgtgcttgaattgctcaaatgtaaatgtggaaagagctgctttcttacacctggttgtgataatcttcaggaagcggc

SEQ ID NO: 114678 - DNA, 771 bp, Physcomitrella patens
  Intron number 1 from transcript Pp1s94_157V6.1 (locus Pp1s 94_157V6) derived from phytozome v7.0 (chr-ID scaffold_94; pos 1289250 to 1290020)
tggctggcggacttacaattggaaatcaggttattgggtatttgcaatgtgcacttggaatgagctggttgctgtggttgcttggtttgtttctgagtttctggattagttaggcgggaatggtgcaaggtttagggttgcaagtaatagttttaaagaaggtcagaatccactgatcggtttttcaagggtttttaccatacaattgctagggtgggtatggaacgatagcagtcagtggactaatcgcaattattgttgattccgtgggattatttgcatcaaagaatttagctgtaagtgcttttcgttcgtattgtgttcttgtctacccgacgcctggaatttcctagaaggtttatttctgctgtgatgacacgagaacttatcgagtaattgactatactagaaaatcgaattaaagaacattctccattgtagtgtgtgccgatagaattatataaattattcgtatataactgtagtgacattttcgagaatctataaagtggcgcataatatttttgaatcttgcaacatgacattttgaatgatagtcccgtaacataagagtagtgtttaaggggagttcgcggccgattagaatcgcagtcctgggaaaagtctcaaaatgatatgagttattgacggcatttatactaatcatgcatgcttcaagtttttccgacggtgtcttgttaccctatttattttcagaaacatgacatgtggtttatgtgaaggctacaggcagcgtgaatctttgggatc

SEQ ID NO: 114679 - DNA, 830 bp, Physcomitrella patens
  Intron number 1 from transcript Pp1s204_138V6.2 (locus Pp1 s204_138V6) derived from phytozome v7.0 (chr-ID scaffold_2 04; pos 797782 to 798611 reverse strand)
ctcaagggtgtgtcgaatgcgatcgctttactaggtttggtacgaggtgtgcgtgtgtgtgtgcgtgcgtgtgtacttgtttgtggagcagagtcgtggtttttctcagctcttggtcgctgcgtgttcatgccaccgttaggaaggacaactcgctgttgatgcatgggctctaattcggtggagcttctatgtgcttttgggtcagagttggggatggagttttttttcggatgttttggtctcgtgaagttttgttgtggttgtcttgattttctttttgagggttatttcgtgtgatgtggcgagtagcggtgggaattttgttttcatgttgatgatttggctttgtttgtggagatcaagtgtgccttgttttactgtgattgagttggtttcggtctgattatgtcagatgctttagtgcagctgtaaactagttttcatgccattgtgcggaacgtacttggcaatccgtgaaggcttcatggtctatcgtgattctgactgctagttaagagaagctgaaggattggggttgctttcttactgtttgtgttgagtggtgtaagcttgtgccgtggtggattctctcagctgtgaagcgcatgtagccaaaatccaaatctgcgccagttagcttttagctgtgtgatagaaacctattcttctctacctaagtgaaattttggtaactgtacttcaaatagtcagacttcggaggccagaaaatactatagaggaacggcgatcttaggagcatttttactgtctttctgctctttgactttgttctgtttatgattatcaggatttggaaattgaagacg

SEQ ID NO: 114680 - DNA, 932 bp, Physcomitrella patens
  Intron number 2 from transcript Pp1s138_81V6.1 (locus Pp1s 138_81V6) derived from phytozome v7.0 (chr-ID scaffold_138 ; pos 343259 to 344190 reverse strand)
tggatcacggtacgtttatttcacctttcttctagttgcgtttggtttacggtgttctgttgttgttttcttggttctggaacgtgccccgaattgtgcaactgattattgacttcaaatctggtacaagtcttcgtaggttgtatttcgataattattcatctggagttgcagatgtggtttttgcgttattactgttgcgctcgagtcattagttgaaaaagcagattgagatgatggtgaactctcgaaacaactaaccaaatgtgtcccgtctcacgatgataaactgctggtaatctggctctagtttgtttaaagctatcttcatttagatgtcgatttcataatcacatcgatatcggctgtagacatcgaaaaagataataatttgattgtcgtttgtgttaagtaaactagtgggaattcttcttttagtctcaaggttcgactcctaaacttgcattcttgaaaagcacaatacagtaaacactcagaattccaagggcgaacttggtccgatgaatcccttgcacatgagctgagtgattctatttatgctgcatactgactgaattagtggtttagtccgaatctctgatacttgataatattttcagacgatacataaacttgtttatacagaggtccatttataagtttgagtctgtaatcatggagaattctcactgtttcaagttgtggcacatagacttctcaggcaaaagtcaatctaaatgatcatcttgtctcctcgcaaaagaatatcagcgactctgtctccgagttggtagctcgaaagacttatagcagtggtaacaaatctaaagaataggattgacgacaatgaacgtgaaggtcaagttgacgatcatgagatttggttgtggtttgcaggaaagtcgactttgacggattccctggtggctgct

SEQ ID NO: 114681 - DNA, 551 bp, Physcomitrella patens
  Intron number 1 from transcript Pp1s144_19V6.1 (locus Pp1s 144_19V6) derived from phytozome v7.0 (chr-ID scaffold_144 ; pos 107050 to 107600 reverse strand)
ccttcctcacgtaccagggcgtcactggcgaatttgtaagtgttttgagttttacatttcgtggaatggtatgtttggcgaaggctttcaggttgaggtggtaattttggaagagttagggttctattcgagatcgacatggaacgtgcaaaatgatgtggagagttgagtctcagagttcttgtgaatgcttgtttcgattccgcactgctgtgtcccttgtttatttactttggcttggtttttcattgcgataacttgccctgtggaattgttgttgtgttcatatattgtcgaattgtttttttcttccatagagcccgtttttgtgccctgattgatggtagacctctattgtaatctgtcgtggagggaattgcaaggagcttctaaatcatgggggcgtttctgtgtctctaatttattatccgatgatagactcaatcacaattagcgccaagtaaaggaaattcagattaatacactccgcttcctgtttcatggtcagtatattgatctgtaaatggaatgtgatgcagcacaaccaagat

SEQ ID NO: 114682 - DNA, 715 bp, Physcomitrella patens
  Intron number 2 from transcript Pp1s277_34V6.1 (locus Pp1s 277_34V6) derived from phytozome v7.0 (chr-ID scaffold_277 ; pos 196673 to 197387 reverse strand)
ccgagcatcattggacaattcttctccagggccaggtactgcttattcctaatatttttgtctgttatcactcgagaactaccttgacattgcctgtctaaggacatttattcatgggaatctcaatgcggttgtttatcccatgaagttgcttggattcattgctgccaccaccgtacatttactttccacgcaaattgctgaacgtagcttgttctttccataaattgcctaggacttgttctcacacacttaatcaaagtgggaattgctggttgctgttaaaattctgcacttgtcttgccaactcaatagtgaaataacaagagatagttgttgtatatgagagaatattgtacatcaatatctggtgtttcttgtgttgtaaacacaaagaaccacagattagttgtctcaatattcatcgttagtggaatcatatatccaacctaggaattcaagaatccaagttgacgttgctagctggcccttaactgatattccagttgaagcaagcctttatatattagaagtataaaagttgggattttgttgctacagccttagcgtgagtccttctaagaagaatttttgtgttttccatcacatgtgggtggttgttgtagttccatggaactccatgcgtacctgattagattttattttgcacttaacagttgagtttcgatttgttgagaatctccatattttacag

SEQ ID NO: 114683 - DNA, 490 bp, Physcomitrella patens
  Intron number 4 from transcript Pp1s70_213V6.2 (locus Pp1s 70_213V6) derived from phytozome v7.0 (chr-ID scaffold_70; pos 1306230 to 1306719)
gggtgctttgtgacaacgagagcttgagtcccaaggtaccggtatggatatatttgccctttaccaaaatcatcatggattttcatgagctttatttctctcctcatcttctgcactgaggaggtaagagcttcatagacatactacagctgccctttcgtcggtagattacgtcttatattaaacgtaatgttcttaagaatcatgattattttgggggcatgcagtgtagtataaatcaacaaataagcgtttgtagttttgtcttgagacaaaatatagataatggttgaatgctaacttgaggagcatcatgcattgaaattcatgttcattattatcccaggtgcatgtctccacaattgtggtaagggttcaactaaaaatactgagtacgtgtttattctgcaaagcagtgcagaggaaatattttgattgcatttttttgcttataggaaagcagggacagtcggagctttggtcctttacc

SEQ ID NO: 114684 - DNA, 987 bp, Physcomitrella patens
  Intron number 1 from transcript Pp1s249_56V6.1 (locus Pp1s 249_56V6) derived from phytozome v7.0 (chr-ID scaffold_249 ; pos 328050 to 329036 reverse strand)
agtgcagagaaggtcgtgacatttgcttcatcgaggtgctctttcgtgcgtaatgccaatcgtccctgattttgtcttagtttctctaggtgttgagtccaatcctaacgttgatctgtgagggtctcaactgtagagtacaggatggaaaccatttttgattgttgaactctgcccattctggtaacaagttttggaatgatagatgaagttaggttccacgcagtcccaagcacacctgactttaaatttacatctggattgttggtgaaagcagtggttgttttttgtgaattgtagggcagcatctgtattcgtcccaggctatcttaaattgcaaggataggatgttgtgccgtatttcatcgttacgatagttttctgagaagctacctcatcagttggtgcagaacacgctgtttggtgtgaagattaggtgaatctttagttctcttttctttttagattctttccaagctttcctccaaatggatgtctggcgcatcgcaattggcgggacctttttttttttttttttttttttttttttttcttcatttttatactacgttgtaattgataattatcctaattttttaaaaaaaaactggaaggaagtgtttcattaacttgaggaaaacgaagtttaaaaatgcatttcagcatccccagctggatgcaagttacaaattggtccttttagttccaccgaaatcgaattaagacatatgctgtcgatgagaaagctttgctttcaaattgaactgccaccgcttagaatagtttcatttcgataaagattacatatggtgtgcctgcggaaaggttttcccaatccttcaattcatgtatgatgtttatgattctcacaggcattatgttattaactatttaggttgaatttagaagagatttgttacttgtgttttaaatcaatagctcgttacgttgtgcttatagtgttaagtgattgctcaggcatcgatc

SEQ ID NO: 114685 - DNA, 664 bp, Physcomitrella patens
  Intron number 2 from transcript Pp1s84_180V6.1 (locus Pp1s 84_180V6) derived from phytozome v7.0 (chr-ID scaffold_84; pos 944348 to 945011)
ccatcggcgtggagttcgccactcgctccattcaggtaatatcctcgttcaggggcatgcaacgtgctctttacggattgagctgccacgctggttcttttggtggagaatgtagagcatactttaagagatagtcttgtgtgtggtgtgcattgtaatggtctgcaaacgtatatacgctgttaaatgtaggtgcgtgcggctgtggagtgcacttcaattatcgagatcaacacatgatttaggagccatgaaattgcgcagagggagttccttcgagtgagtcgtggtttcgaatattctagaagcaatttgtagagcttaccttcgttcatttatgctcgatcttgatatattgtcctatgaaaaaacggtcactcattactttggtgtctcaggattttgtatgttatgaatgagactggaaaggctgactccttcttacctcttcttctgattttgttttttgttattttatttttttttctttttccacaaggtggcctttcaggtttgttatgtctttgagggtatacacaacttctgtgaataatgatacgcagctgcttaaaacattctggtgatgacttaggtgatgcactctccagcacttggcttttgaatgctctaattcttggtgttccgctgcattaccattaggttg

SEQ ID NO: 114686 - DNA, 1047 bp, Physcomitrella patens
  Intron number 2 from transcript Pp1s57_172V6.1 (locus Pp1s 57_172V6) derived from phytozome v7.0 (chr-ID scaffold_57; pos 1293670 to 1294716 reverse strand)
tctagatcttacatatacgaccgagaaggtgacaggtatgacgtcttcttttgtccatgcccgttgaattttttaccgactttttagtgcagggattgtggaagaatcccggttgctgtctaaatccaattgattggcactgagttaccgacaaatgtatcggcatcagtttattcagatcaagtaatctcgttgcagtagtttatgatttggcttattgctctacctctaaagaaaattggggagatcaggatctgacattctggtgttatggtagatatggggggaaatcctgtttggaaagaaacaaataagttcgatttcgtcttcaagcctcaagaaaaggacttcatcacattaaaactctacaataaaaatgacacgtgtatcggattagcgaagtaagatttatgacaactaattgcgcacaatcaagtctgctccctttgatgaaccaaatcaaatgaaacactgatgctagttttcgcctttcctctccgttttctgattgatcagcacataacttttcgttgtaagatgcccctacagagtttcctatgaggatataatgaggctggggaatggcccgacacccctgaatgttccagtctttgctaagaagatgtatgagaagaagtgcggggaagtgggcttaaaaatacaaagaaagcagcaagaagtgagaacattcaagatccaaaacttcctttcgtgttgacgtgcccttttcatgcctttctatggagtactgtctatggactttactcatattcacagttaaaaaatttgttcaacttctggaacagactgcgggagaattgggcttagtgaggataaagttagttggaggacatgtcgagaaaatgacctcttttctcggttagtttcttggtctttcacttcgattgaagcaacttcatatgttatcgatggggtttccgaaacttcatactttcatttgcctagccttcgcttgcgcaaaactattgatggaatactgagttacttttttttgcatcctcgttgcagaaaagacagctgaagtcc

SEQ ID NO: 114687 - DNA, 623 bp, Physcomitrella patens
  Intron number 1 from transcript Pp1s1_304V6.1 (locus Pp1s1 _304V6) derived from phytozome v7.0 (chr-ID scaffold_1; po s 1933177 to 1933799)
cagaagcacggtgagaacgtctttccacttaaaaaaactctcgtatcgcgctgtggtttcctttctgtatttctccacatttctgttacgatatcgatgagatgtaatgaattaggaactgatgttcaaacactggacgattcgagtctaaggactgtgagttattttctacatcaggcaatggaaaataactcatgactgatagtatcgtaacaggctttttgttgtgttgaatttgcgggtgcttctagtatgagttagatctttgagaagaagcacgtatgtctggggttttgatatgaactagtgacagcgacttacgggagttttaacgttatggttcgtagggccaactgagtgaatatgttaatcacgtcagtttgctttttttgaccttggtggtcgtagtgatttctactgtacttcaattttcattgaatcctaattttcgtcgaagtgtgtgttaattgattattattacagtagaggagggtgtgacacatgccttttatgttggaacgaattgtttctttaaatgtaaaagaatcctgcggatttacactaacatgcacttttctgtatgtcatccctcgcaggatatattggagagtttgaactggttg

SEQ ID NO: 114688 - DNA, 659 bp, Physcomitrella patens
  Intron number 1 from transcript Pp1s1_632V6.1 (locus Pp1s1 _632V6) derived from phytozome v7.0 (chr-ID scaffold_1; po s 3743176 to 3743834 reverse strand)
gcccagtgggtaccctgctccggcccctgttggaggtgagactcctactgcactgcttctggtttacttttgttgtgatttcgttaatggggatgtaatgtgcttcttctgcgcgttaggttttcctatttgtgaccaatattacgagtttccggttacatattgggtaatttatgcttccgatttttgaggtttggttttgtattgttatctcttctggttgttaatgtttttgaatcatttgctgtggacttgttctttacaaattgaaaaatacttgctgttctactgccttatctcttactaggcctcatgtggcgaacggcagattgttggctcaacttattagattcttatcgctaatgttcttttgcattatgtctgtactagctttaaatccttatgacgatggttgtccttccatatatcattacatcatgcatactgaacttcgacctaatctcacttaatgtttttcgaaatatccgtttcaatgttcaggaatatgggagatttgtgtttcaatggtcatggtcccgacttggctttggcttcctctctgactttgtagtgttttgtgggctttataatttgactaacgatgcggcttggtttttggtgcaggtccattgtgaagtctcttccagctttctcctgat

SEQ ID NO: 114689 - DNA, 763 bp, Physcomitrella patens
  Intron number 2 from transcript Pp1s41_155V6.3 (locus Pp1s 41_155V6) derived from phytozome v7.0 (chr-ID scaffold_41; pos 1289717 to 1290479 reverse strand)
atctgcgcggggagcttcgtgcgtgctgtaagcagctcatctcctgtctttcaaaaactttgtatacttgcttgttacattgggagtgcacaagactttaactgaatggtgttgcagtaaagtcacttacatccatatataatttacgttcgagggttagtttgaaaagtccagcattcacggtttccgtgaagagctgtgttaccggaatcaaacgtttaaatgtggatttgaaaggtttttctgtgtcgaattgaccaagtttatgttgaagtgtgtgttttattctcaatgtcattgactcggatcgaactgtacaatgttgggatgaattttggaatctagcgcagaaatgcatgcgagaagcaatgttacttgatcatgggttatgttcattctgaaatttaatcatggaattttctgcaaattagttcgtttgcaattttcaaccattgagggaattctcggatgctctggtattagagccgtatcaagattattgaagcgtagcatgaatttttactctaagagagtcataaattcaatttgtgaacttgagagtagacagtcattatataacttgcagggtatcagagtggtcattgtgtttattaggaccctatactgataacttgactcttacgcacatgtatatgatcaagcgtagggactctgatataccatgggaagaacaactgacctattccttttgtggggtggttctgtagcgcgacattcttggttccactagaggagaattttt

SEQ ID NO: 114690 - DNA, 340 bp, Physcomitrella patens
  Intron number 1 from transcript Pp1s249_21V6.1 (locus Pp1s 249_21V6) derived from phytozome v7.0 (chr-ID scaffold_249 ; pos 124470 to 124809)
cgcgtctcgctcaccatcgtggatacatcttcaaggttctgcctcacgacgtttcttttcgtcacgaatgcatggtggtgattccaatttttttaattgttttgttgcattcggtattctctgcattggagtttcgggaggatatcaccttcatgtcgttttgattggccaattaatgtagtttcgctgctaacttgtgttgcggggctgcgatgatggacaaattagcgagaagaattatcgaagtaaaaccttgattgaccatataatttcatgtgtctcttgcattgcatcacaatggacaggcaacaagacaagatcaagacggaaacagagtgca

SEQ ID NO: 114691 - DNA, 487 bp, Physcomitrella patens
  Intron number 1 from transcript Pp1s412_35V6.1 (locus Pp1s 412_35V6) derived from phytozome v7.0 (chr-ID scaffold_412 ; pos 217093 to 217579 reverse strand)
ggtgggagctctacttcgtaattgtgattgtgaaggtcgttattcttcctgattccagtcgacatgtgtgtgtgtgtgtgcgtgagttatttaaaatactagaaaagagaactgatcaaatgatttcatatatcgatggactcgtttaattaaaaacgtttgttgttgagaatcactctgaatctctagtgaattcatgagttgacgatgtgtttgtttgttatatcaaattgtaacttatgcatagaacatgatatcggatgattccagtgtagtgctgtccttgtagcagacattaaacggttgcctgtctcgtaaagattgttgttgagtgagtatttcgaagccaggaccgatgtagaggcgaattgagccgcacttcgctggtcggaagtgtccaaagtttaccatgttgtcgttgcttttgaatgtggaacctagacctgaactggaaggtttgtgcctgtcccagtcactgcggttgcga

SEQ ID NO: 114692 - DNA, 612 bp, Physcomitrella patens
  Intron number 1 from transcript Pp1s13_318V6.1 (locus Pp1s 13_318V6) derived from phytozome v7.0 (chr-ID scaffold_13; pos 2072419 to 2073030)
tggaacgggagttggttgcaaaacaggtgcttcactatctgtgcttctcgttgccatgccttgtgtagagcatattgctcatcctgataatgtacaattttgtccttgctggttccttgatcggtttgattgtaaacatgtttcccgatcttcaaaaccttctgagctgtggtcttagcacagattatgttacatgagctttagatcgctagaagccagagccatcagtgggcaagtaccatcatgaatcggaattgcatcttttcctgttttttgccattttggcttttgtcgcatctctcggcttattcaatcatgcactttgcacggatgtcaagtagattcattgcggattgttcacagtgcccgtgaacacttcgaattagccttgtgctctctccgtagtaagaataataatattaggacattttcgtgatctactaacaggttataagctcttgtcccatcatttcctacaagcatctgttagaagggctctggaattgtgattgcttgcacgctttttttcgtttcgcacgtttcaaatctcaagaaaattgtgtggactgtgttgtagatttcgttggaaatcactgaggaggagaaaaagca

SEQ ID NO: 114693 - DNA, 605 bp, Physcomitrella patens
  Intron number 1 from transcript Pp1s1_555V6.1 (locus Pp1s1 _555V6) derived from phytozome v7.0 (chr-ID scaffold_1; po s 3205743 to 3206347 reverse strand)
gttgtgctatttgcgaggttggtcttttagttggatcgacttctccagtttgattctttctaattgcacttgatgtctaattctctacttttgcacctgtttatttggtcattatgtcaagaacataattaagtcccaagtttcttgcagcggtcacgaagtgttgctttgttgaactattttgatgatgtggggaaaagaacaaatttagaacattgctggtgcattttttgtaccagcttcgtgattacagagatggtcttcagacactatctggggaaagaatccagtcactgcctcgccatggaagagaagggagtcttattccgactgtgcagcgtgtggtgctgcaacgaaatagtggaaatattttcaaggaccttaaatgcatggattttgatggttggacctaccaagagtgtctggtgggtctttttcctacattgtgatctcttattttggaaagaagctagattatttggtctgctttgtaagctcgagcacgccactttatcatcaggatgtaggagcgaatcttgatctacatgtttctaacttggagctgtggtattaaatgttacaggagttggaagctagactaataa

SEQ ID NO: 114694 - DNA, 711 bp, Physcomitrella patens
  Intron number 1 from transcript Pp1s167_97V6.1 (locus Pp1s 167_97V6) derived from phytozome v7.0 (chr-ID scaffold_167 ; pos 459413 to 460123 reverse strand)
aggtcaaaggtgtgttgttctatcaacttcactgtcctgcttcaattgtttgtagtttttcatacatgtagtgatttggtatctctgataaagagccttgtaagtaagaaatgacgactgattatttccacacacggaggtaatcctcatcgaaatatgctagttttaatccttatcgaaatacgctagttttaacttcgtcttctgtgtcagtttcttttgaataggtttcaataaaatgtagtatattgtatattgttgcagtttgtagtgtctctcataccctgtacgattccaaaatctagaatacttaggtgtcagggaggtatctaatggattttgtcttacatggtaagtgccaacgtcaggcatgcctaccagactagtctatttgattactttctatgtaatccatgggggtgtgtcatttctgtaaatcaattaacagttatggctacaatcatcttagtcaggaattctatcgagtcaagactcagtatagaaattactgctgaagcattggccacaagccgttttaaggaaatatgctcagatctggcctttcgtttgtttgcttcatcaaatgataggtcatttctgacattaagcggtgtagttgtaaaatggctggacgccttaataagcaaggtctcaacgttcccctccctggatgcaggtaccctttgtggacgaggtactgaagatactatt

SEQ ID NO: 114695 - DNA, 622 bp, Physcomitrella patens
  Intron number 1 from transcript Pp1s88_97V6.1 (locus Pp1s8 8_97V6) derived from phytozome v7.0 (chr-ID scaffold_88; p os 636420 to 637041 reverse strand)
aaacaagccaaggtgatagacattttgtatagatcaagagagtgatgtgtagaagtgtaaccaaagaatgaaatcgctcaagtttaccttcttaaggaaatcagcaaattcacactttcctgctcagtagtacagcatgagtcaaatcgaaactgaattttgttcaacaaaagatgagacgtttcatcttctccaacctgtagcagttgtctccttaaatcagagcagtccgaatcttgttctagaagtttaatgcgtaggccaggccgaaatccgcaacgaggagatccattgtcttatgcaccagtaaaaaaaacaatgctgacctgtctgacctgcaacagcatgtgacaatcgcgtaattctgcaaaacagagattacagtcttcaattgatttgggtgagtagagactacacatgatatggatctttccaatccacaatcaaaatgtttttctgagccgtaaccacccgtacattttaactgtcaccatgagactttgtaaactctagaagttgaacctcccgtgtgcaaggtgaaatggtacagagtctaactttattttgatcattgtcctctgaagtagctaaacaaagtgaaagtgtccttcacaatcagctt

SEQ ID NO: 114696 - DNA, 905 bp, Physcomitrella patens
  Intron number 1 from transcript Pp1s326_65V6.2 (locus Pp1s 326_65V6) derived from phytozome v7.0 (chr-ID scaffold_326 ; pos 393473 to 394377)
gcgtttagggaccgtgggcgtgcgctgtggtattggtgcgttccggttccttgattttttttttttttttttttctttttctgtttcgttttggaggtctgttgacgatgacgttgatgatgcggtatttaagtactaggactgatcgcttcggatacatcagggatttgttggacattgtactctgttgctgaagtttgtatgattgtcacatcggtaatcgagttctgcggtagcatcgtcgaattctctaagggttgaagagtcgaatttttgaggagattgagattaactgcgggaagatacataatcagagctctctgtatgaagtgagtttcaatagagggatgttgacacgaataaaatatcgagagtaactggatattggttttttcactctacgatgatctgagattgaattttcgaattgagatttgactcttatgctggcttcgtctcatttcattaacggcaagacctaaatcttttcacatacagccaaaatctggggtgcaattacgctgtatctaggtactcgataatgataatgcagttccttagcgtgtctcgggaatgtagaggaattcgaactcagaataattccgcgtttttgaataatgtttttttttttttctccattaaatgtagatgtaggatattataaaggaattcagactacgatttatgcagaaggatgtaccaagctatcccatcttcacgattagctgtgttttaatcatcatctgaatttggtggaacgcgcacgcacatacaaacaaccatacacgcacatacaaacacacacacacgcacatacacacagagacatcccgctgatactgtgtacgaagttgatgctggttgttgcagtagctcgggctgcgatttcaggggcggcaagtagt

SEQ ID NO: 114697 - DNA, 1027 bp, Physcomitrella patens
  Intron number 1 from transcript Pp1s170_56V6.1 (locus Pp1s 170_56V6) derived from phytozome v7.0 (chr-ID scaffold_170 ; pos 520524 to 521550 reverse strand)
cggggtcggccagggtaagttaagccatagcacgctctattttgagcttcgtgttatctgtcaatgggcgccaagttttgcttgagagaagattctgcattctattgtggctcccgcctccaggagcaggagctgccattacccgctctcgctctcgctctctgttttgttggttttacgtacgtggggcttgcccgtgtggttgttgataggggaggaactggcttggtctgcttgatggtgtggcttctacattggatcgggtgcattgcaagtgtgtgtgtgtatgagtgaacttgagacttataagttggtagcaccacttttcgtttcctgcctgggggaaatagtgagaagagcacgagtcgttgtggcgctggagttgagctaatagtgttgcccttagagaggcagagtggagaactgttagaggtagtgtcgtcaccttgccgcattggaagcgtcctttatcgaggggtacgtgtgtgtacccaagtctctggattggtgtcttttgcactgtggtttggactctaaggttttggtgcaatttcatgcacgcctgaaagccctgcgttgtgctcacctcttcctccttgctgccttttttttgggggggaggggggggggttgtcttctgtagataagggattgacgattttctgtgtcatataagttatatatgccatgccctgcagacaaataaactttgatctacagttcagctctcaaacatagtgttcattaaatgaagcttagcaatcgggtttactacgcaacaggtatatctttcgaggggtgctgttgcattgacaagggtagtgaataataacaagcccagaaaattgaagtacacggttattgatggttgcatgtgttggaagagaaccgtcagtcagcacatgaaaggcaatgtgatctttggctctattttgatcactactttcattaaactgaaccgtggcctctgttgatcacgtgaactgttgcagcaatactgaagagagtaggcaaatatctggcggtt

SEQ ID NO: 114698 - DNA, 408 bp, Physcomitrella patens
  Intron number 1 from transcript Pp1s125_41V6.1 (locus Pp1s 125_41V6) derived from phytozome v7.0 (chr-ID scaffold_125 ; pos 328169 to 328576)
gttctgctggatctgggtctggcgattttcatcaggtatgatttaactttaatccttgtacagttgcctttggaggtgtattgaacaggttttagggttttcttatcaatgcacagaaaagaaacgtgggatgaatgaatgctttgagtaatgtgctgcaggttattgcatgaagtgaaacatacgcagaatgggtcgacaggatattaataagtaatttacataaaagaaattacaatttttaaattttaaactgatagaatcaaatacattaatgaaatcaaataagaatctgggagaaggttgctctggtagtgcataggaaatagccacatgcatggtttttatttccaagaaaataaagcacctaagaaactgttgttgtgttgatatgtccagtaccgacaa

SEQ ID NO: 114699 - DNA, 498 bp, Physcomitrella patens
  Intron number 3 from transcript Pp1s169_73V6.2 (locus Pp1s 169_73V6) derived from phytozome v7.0 (chr-ID scaffold_169 ; pos 416051 to 416548 reverse strand)
caggtattttctattttctgtcttgtctcttttgtttttgttttttactcgatatgttatatcatttcggtcttctcacggacgagactaaagaatggagtgccatcgttcttcaaagttgcatcatctgcttatcagtgcgaagaagtagacttcgatgaatgaaatatggtagccttatttatattaacggcattattccaaccaatgtggcgtggttttcaagtatcgcggcgttggagttgtgaatcaaatcgaggaagtgcacgtcttagtcatagaaaaatgtgtgtcgacacagcgtttagaataagcatgaacgaaaccctagatgtatcattcaaagactgaagccagtaaccggttcttgaagttcattctgtagcatgttttgaggctcttttctttcttttttctttttcttgcatctaggatatgctaattatgctgttactgttctcaggatcagcatcgggaaaagtgggcggcaagcaactt

SEQ ID NO: 114700 - DNA, 708 bp, Physcomitrella patens
  Intron number 3 from transcript Pp1s214_41V6.1 (locus Pp1s 214_41V6) derived from phytozome v7.0 (chr-ID scaffold_214 ; pos 272304 to 273011)
gaaggagacattggggcacaaagtgaagatttcaggtacaagtttcaaacttcctgtctcagatatcgtgcttttcaggaactttaaaacttgaatccttgatgctcggaggcgggcacgatctagtcgtttagcatcggcaattgcactcatcgcttttgccggtaaatgctgggaatgtactggagatttggagactgcctctttgtttgagttcgcctcggggttatcgaataggttacgtacttaggggatcttcgtgaactcccatagcagaattgaagtgatagagtttttgctaatgtcggcgaccacatgatgaaattgacacatctgaattttcagtgctgttagagaatgccagttatttcagtctattctgccccgacgtgatatgatggtattggcatcagtacttagatgccgattttttatttttattatttttttcaataataatattattatcattttttatgtctcgagggttgtcatctttacgctagtatcttggaaaattctgatttttcttcaaggtgacttctacttgcgtttgtttctatttgagctattgaaacatcactctctgaacctctgtggcccatatagtacacttgagctgaatcttgagaaggttctaaagaccatttttccgcttttaagactagcatagctaactccatttcttgtgtttctgcagtgatcacc

SEQ ID NO: 114701 - DNA, 819 bp, Physcomitrella patens
  Intron number 1 from transcript Pp1s211_61V6.1 (locus Pp1s 211_61V6) derived from phytozome v7.0 (chr-ID scaffold_211 ; pos 393186 to 394004)
aggtaatgtgcatgaagtcggaaagatttacgaggaaatgttgtattgcgcagatcgccaggaattaatatcgaaataaccttgaaagttggagttcaattttgctagttacggttatttagtagtaaccagcagattcaaattcgctcatggagtgcgcaatgtacaatgttctcctccaaacatgttacgaagctggagagtttcggttctagggtaacagcagcaaaatttgaacgctggggacttttgtgaatggatatcttttgcgatcataacagtgttgtgaagttcgctgcataattatactacttatctttgctatttgccaataattaattctgacgtagtaggagcatggcgacctgcggagccaaggaatcttgatgtgttagtggttagaaacaaatttctttcgagaagtacgttaagcaggaaagtacgggtaataactctcatggactggatgatttaaccggtccttgtatagttgttaattggacgtcaaccagtgagcatttcattttagggttgagggtttaagcatacgccggaggagtagggactgcaaaaaagtggccacgttaattaacactccaatctcagctgctagctgttcttcccttgggttgatctttgcttatccctttcttgatgcatttgagcatgttgtggagtcaaggcacatatgtcaagtagttcgtaagggcgaagtattgtaagagttaatggatatcaagactgaaagactaagtggaagatgttttttctccaacggagacgctgttctgaaagagtttgcttgtggtccatgtacag

SEQ ID NO: 114702 - DNA, 763 bp, Physcomitrella patens
  Intron number 1 from transcript Pp1s355_62V6.1 (locus Pp1s 355_62V6) derived from phytozome v7.0 (chr-ID scaffold_355 ; pos 342083 to 342845 reverse strand)
tggcgcttgaagttggcgttttcggtactgggcgctgggttcatgtttactcgtatttgtgtgggattgattggttttgaagatgtttttgggcattgtatgtcaatttcgtgttgtagaggagataatctttgttgaagcgagagttcgtagattggtctgttttttcttttggggtttctgttatttgtggtaattgagtcaattttagccttcatgggtatctgtgttgccttagattagtcgtcgtgttggatatctgcagcagttcactttccattggagtttgtgctagaggctgagcagactgctgagcatatgtggaattagtgtacagtttgagtttcaagttcgaaatgacgtagtggagaagtaatggggcaaattcctgaattgaatgaggttctgctatttggactttaactctattgaagtcgtacatgtcgttacacgctgttgtttgtttgtttgtttgtttgttttttttaattgttggacgtgcctgttgcctcgagtgaagttttcttcatccagcaaattgaggcattgtgcgagagttagaattttttctagatacagattcagaattcgttcctcattgctggaagtgctggttttccctcgaaagaaacataaattggtgtgtgtttgtgtgtgtatgtatatatgtgtgtttttccactttattctctagttattttaatgacacggatagtattgctgtgcagatacatttccaggactactgcagagttttgctcta

SEQ ID NO: 114703 - DNA, 664 bp, Physcomitrella patens
  Intron number 2 from transcript Pp1s198_115V6.1 (locus Pp1 s198_115V6) derived from phytozome v7.0 (chr-ID scaffold_1 98; pos 553011 to 553674)
gcaggtacgatttcgaaagtacatatggaattttgaagctaagaaagtacccatttacatgtattgtaatgtagcgaaagaattgaagtgtgctaagtttgtcttgtcacaatgagaatggatcccctatctcacgaggagagcgcgctagtggttttcattttatttttacttgttagaagctttcgggtagttatgaagcgagaaaatagaatggataggagagattgtagaacgggaaggctaagcatattgctgcgaagaagggatggcaggctgtagcattttggtgccgctttctttaggaatttgtgatcgtgttccagaggaaatatttcgtctactgtgtcgtttacttccaacctagcagtgaatttaaagattttaatcatttggaagtcgttaataatcaactaatagttaatgattggtatattaacagtaaagatgtatccctcagcggcgcgtttcggaaatttgcaattgaaaagatgtaattcatctggtctgaacttgtgatatagtccatttgattatgaacgagtaccaaaatattcgtacaacgccagagaggtgtggagtcttgtccattttctatcttggacgcattcgacggagaattgacaagacggtgactgttggaattgcagactagtaatttgca

SEQ ID NO: 114704 - DNA, 875 bp, Physcomitrella patens
  Intron number 1 from transcript Pp1s33_207V6.2 (locus Pp1s 33_207V6) derived from phytozome v7.0 (chr-ID scaffold_33; pos 1266965 to 1267839 reverse strand)
tcttctccagcactgatttgcttcgatttcaccaggtcctccatgccatccgactgctgacctggctacggttttccaagtgcatggtcatctctctctctactttttgcggattatacttttttgttttgctttgtgtacaagtcgagttctttttctttttttttttttttttttttttttgggttgtaatttggaggtcttcgtgatcgatgcggaagctttctcatgaggattgcgaggattaggagtttggaggtggattgtgtttgttgtgttgcgacaaatgctggtgagtttcgcaaaattctgccgatcgttcgcgctgggggagtcggtgtgggtgtggagatggccatgctgggtgttcgtctggcgatgctgtcaagcaatgcagggaatgggtagcgaggtgtagtttctggtttcaatttggttagataatgagtgcgttcggtggagacgaatgcggtcgtgtgcgccgaatatttgcgagatttctgggctggtcttatcgtgcctcgctggggctgacagcggtgtcgccaacctcgtgtcaatatcaaacaatcacgaaacttcgataagattaaaaataatagcgactccagtgcacttccttgttttagttgtttcccagtcaaacgctacaagtctcggttgacaggaaaggttcttagctgcacttcaaccgatctgtgaggtttggagttcgtgttacagtgcgtgcttgtggaattttgagttctggcacgtatttgttgagaaacccagttcgatatcaatgaggaatctgtatcgcagaatgcttctgacactgtcaggttctgtgtgacgcagagtcgcggtcacagcgaggagcaattacggtaata

SEQ ID NO: 114705 - DNA, 1025 bp, Physcomitrella patens
  Intron number 2 from transcript Pp1s94_22V6.2 (locus Pp1s9 4_22V6) derived from phytozome v7.0 (chr-ID scaffold_94; p os 130010 to 131034 reverse strand)
caactactcttctgcaggtaatcacttcggtcgctttcggaaaacgtagtagctctaggatttaatctttttgtttccttgggttttcgacggacaagggatctacaagtttgatgcagccagctttcgaaccagggactctagttgcaaccgtttcgtagcttaatttcgacctcatgtatcagaaaattcactttcagtggaaaaaatcttttcttctgcggaacattttggagaagttatttgaacattttgatcgctttgattcataagtatccgatcatgcaagtgtaccattcttgatcaggtcttatgtttcgaaacatgttgcaataaatctgcaatctattagaccttcacggcaatgtggcttgaacacttattaatatatactgtattataacattcaagttttgacgtgtttatgtagtgttacaagagatattcgcatttacagccctttggtgtcttgcatgctagatctgtgctcattgaccatctcagtgcttgcattcctatcagcctggagttttactgatttttatctagaagtaatttattaatagaaatcaggtttgtagatatcacacaccaaaatcctgtaattaatgcgtgattgaaagagttgtaagttcctcgtacggtttgttgctgttgacttcaagactcaaagaattgctccgtatttctcatgcaacaagagtttgatcctagatccttatccgtaacccagatactggtggtttcatggataagtgatcttaaggttttatttttatttttatttttttctctcgtatttatttatttatttatttatttatttatttatttttatatctatgtgcttccgtgtgttttgattgtttttggtagtgattgttaaacttgctaacttctagctagttgtcagtagataaataaaggcttactggttgtgcatgatttcgtggctgtactgttctcacattttgaatgtgaattgtgcaggaaaagggagcatcagagattgtcctgaaggctat

SEQ ID NO: 114706 - DNA, 858 bp, Physcomitrella patens
  Intron number 1 from transcript Pp1s94_22V6.2 (locus Pp1s9 4_22V6) derived from phytozome v7.0 (chr-ID scaffold_94; p os 131189 to 132046 reverse strand)
tgatcgttgctgccaccgccatttctcacgtctcggtactcgcacgcgtctagggtttccgtgcccatttcaattttgattgcgggttgcactgggggttgcacttttatttattcatttatttcttttgaacgtagcgtaattgcggcgttggtgagtggtcgagcgtgcgcagtagaggatttatggtgttcctggagggacagggccagaagtgatggtaggcgagtttgttaatttatattttatgtgtggtaccgactcggggtattgcggcggttttatttatttatttatttatttttcctggcgtattcaatgcttgtttaatccgatgttgtgtttataagtttcgggagctttgtggcgaagtgacgttttcggtgtcggagcatgccaagtggtacggttacgtgtgagggagtcggagagctagcagtgaactctcacatttcttcgactgcgttggtttgtgagctacgttatttcgtaatatttttaaggcgttgggcttcttcttgccatacacgctggcagaaggtcgtccgaaacgtgacattcttgtcattgtgctttcgcccctggaaattttctggcagtaatatcattgtaatggcaatgatgtgtttcgtctttgaaatatggaggccagcatgtggaagcggcattgtgactctggtttcacgcgaagtacagtgtgcgtctgacactgcaatagtctttcatattgatctttcggaggagttcctactccaggtcgattttcttgcgagagggttttacaaaataatttaaaaccgtttttctttggatcttgtggcaggtctttcttagagattttctttattgcttcggcag

SEQ ID NO: 114707 - DNA, 654 bp, Physcomitrella patens
  Intron number 1 from transcript Pp1s121_170V6.1 (locus Pp1 s121_170V6) derived from phytozome v7.0 (chr-ID scaffold_1 21; pos 1200127 to 1200780)
atactcttcgtctcatcaacttcatacgctccaaggtctttgcttcctcttagtattctccctcttagtgagatagttctattcagcactgtcgcgggttacacagaaaaatgtcaccagttatcgcagctcaaatagaatgtctgtccggggattgtagagaatcgcagtaagggctgaaatattgtgtcctggtcaagtaatggaagttccggggacaagtgaaatgcgcttaatcaggttaagaagggattttctgtgggtagaaagatcgtgcaaatctgtggaggtgcgctgagcatgggcacaaacgttaagtctgaactttgattaaaggctgagtaaccggattttgcaggttcaatgaagtttattgcgcagtcattaccgatgactcacatatttttcagtgtctaagtattggatgtttggttttaaaactaaatggacactttctcaatttttatgtgttttcttttataatttcttgataaattctggccttcagttttagattatatttcccgtcaatctgccagttaggtgtagccttccagtggtatagttcttcgtaattggtgaaaatacgcgttcgaaatcttgactctctcaatcatcactgcatcccaatctctaggtggctgaaactgaagc

SEQ ID NO: 114708 - DNA, 712 bp, Physcomitrella patens
  Intron number 2 from transcript Pp1s54_122V6.1 (locus Pp1s 54_122V6) derived from phytozome v7.0 (chr-ID scaffold_54; pos 811805 to 812516 reverse strand)
tcggattcaggtacaggatttcttttctctcgttgggcgaactttcacctcttagcttccgaaactgattgttagggttgattgtcggactgtaagtatctgttttttcattgccaatgaatgtactgtgaagtttcggtgatgtttgctactgttgagtgcttagcgggctagggtttggcgtagtgcgagtgtcggagaggtatttatgagagtggatcattcatctatgcttttatggttaatcacgaatagtatctactataaattcaaaatctttaggagtttggaagtcgcgatgcagagatgtgatcgtgggacatcgggcatctttatgttctcattgtaaagacctctgtactttctgtacaagaaccatcttttctattgcccatgctatttacacaagctccatttgacactgtagcaaatatttttgatataatactaataatagaaaagagagggttatgcttctcaactggcgaaagtctttagatatttaaaaaagctcttctttcaccccctcattttatgattgtcatggaattctacgtagaaggtatcctgtgcactttttgagggtttacagaacgggtattcaagagtgttatgctaagcagtgccatattgtactacaatgacactgaagtctgaatcttctttgtaattttttggaactcgtttggatacaggggagcttagccaacaa

SEQ ID NO: 114709 - DNA, 642 bp, Physcomitrella patens
  Intron number 1 from transcript Pp1s54_122V6.1 (locus Pp1s 54_122V6) derived from phytozome v7.0 (chr-ID scaffold_54; pos 812585 to 813226 reverse strand)
agcggcgggagtttctagcattggaggtgcaatgcgttgcagcgtttgtccgtgtgcttttttttatttttggggggtcggtagtttgttttcatgagttgtgctctgttgctactagtttgcttggattatcgcctttgatgaacagtatcggggcggttttgatgttttgcgggctgggaactggacgtggcatcgactctgagaaagtttttgagagttggggtggtgggggtttttctctgttgattgctctgagcaaggacttcaggttttctcttagttttcttcggaaatctctgctggtaatttagaagctaggctctgattcgtgggctcatgtatgacttgctccgtttcttgcattggaacgatatttcgtgtcgtcagtatgcaatcacaggagggtttggtttactgttattttctggtctgtgggaggatttttgctctcgtctacgattttttaaaagagtctcatacatgaatgagtgggtggcatttttattgttactttttatgtcgcttgtatcagaaataatcctttcgagttcaatacgcggtatgagaatttgttgtttctcattttgaataatttcatattcaggaacttgagagtggctgctttcgagtgttagtgtt

SEQ ID NO: 114710 - DNA, 454 bp, Physcomitrella patens
  Intron number 1 from transcript Pp1s97_19V6.1 (locus Pp1s9 7_19V6) derived from phytozome v7.0 (chr-ID scaffold_97; p os 148812 to 149265)
gaaggtaagtaacaccatgtttgacaaaagaactggttcatcaaacccacgcaagctacgtcatactctaccgtagactctgatcagttaacacggaaatctattttatttgaattaaattcaccaagatttcaaaagaaccatctattactgtgttacgttgactcctgcaacgtggccttcttggtcgggcatacatatgacattgtacaatcattaaaaaaattggtgtttttttaatactttttgaattgatcttccgaaataccaattattttcagcaaagaattcaccgtctagaaccacaatgttgcaaaagctctcatttgccttccacgatcagaactgacaatatttgtttgttttttattcttaataagtgatgtggatgggtaacagtaattagcaataattttcctctactaacttttaaagactaaaggccccgttctgg

SEQ ID NO: 114711 - DNA, 583 bp, Physcomitrella patens
  Intron number 1 from transcript Pp1s70_82V6.1 (locus Pp1s7 0_82V6) derived from phytozome v7.0 (chr-ID scaffold_70; p os 519560 to 520142 reverse strand)
tcgacgacagccagaagtacgacttctctttgcacaagacatccccttcaacgtaaaataaatctaaacattctatgtcaaatccctatcacaatcacgacacagaacagcgaaaaaccaaacacggagaacagacgataaaatccaccacaccaactcgcaagcttatccacaccccctaactatcagcctcaattcttcaccgacagacctcactccatctaaaattgtacaagaaggtgcagcataaaatctaagagttatcgcaactcatctccatccgctgaaaccccgaaacagcgaaaaacaaaattaattcaaaccaggaacagagatacaacaaggcgggaaagagttctcagaacagctccgtaaaccagaaactctacatctatctgaactcgagcacagaaacaatcaaacatgagaaggaacatgtgctcgctcttgcaagctcggcaggaacaaattcacactccgaacgacaataccgactcgaaattaaagacgaagccattcaattcaattcatctgactttcattcacagaaaactccaactcagcaatagggcagaaaaaaaaa

SEQ ID NO: 114712 - DNA, 667 bp, Physcomitrella patens
  Intron number 1 from transcript Pp1s229_33V6.1 (locus Pp1s 229_33V6) derived from phytozome v7.0 (chr-ID scaffold_229 ; pos 341182 to 341848)
gaggcaaccatagctgcggtggacttggtttctgggtgtgaggtcgattgcatgcatgtttctttctcattcttgtcgtgttaattggtatttgctgcgtgtttatgagcagcgaaagaagtcattatttttggtcgttggtttagttttgtaatttttgtaatttttgtaatttttgattattttaggtagttatcgttttcgttcccatctctttgattgattacttatttctattatttattttgcaatagttggtcggtgagtgattgccatgtacctgtagtgaaggcgaatgtctggttacagggaagtggtggaccgcttcaatgatagagaactttgtcttacgcttttcataaagtactgccaagagaagcgtagagaggttgaaaatagaattcgtcggggcaatcagttctgttttcgttttttcggaatgttggcaagtgatgcactgtttgaggaatgctgtactatgtttctttacagtgaaacagatctggtgcttttgtccgtttgttcaagttggggcacgatatcgttccccagtatccatgcctgttagaatttgagcacgagaatatacgtccacttttgacgtatttgctgaaagtttaaaggtggtgcaggatatttctcctacttctaactgtgatcaagtccg

SEQ ID NO: 114713 - DNA, 435 bp, Physcomitrella patens
  Intron number 3 from transcript Pp1s138_112V6.2 (locus Pp1 s138_112V6) derived from phytozome v7.0 (chr-ID scaffold_1 38; pos 639013 to 639447)
ggatctcaggtatgtttcttccaccagttttcttgcagttcaggaacgatgaggcttggaccctaaatgagtttctctgctactcgtattgtgtagacagaattagaataagagtattccaaaaaggatgcaaaaaatgtttttcagttggttttttcgaaacaacgatagttctatgtctttttctgatgcttgtgggtagcttctcgctttgtaagatgttgtctagattccactgtagcctcaactttacattggtatagtttgacttcaatttggacctctgcatgctgtgtagtttttattttatttttttaattttatttgagtagttgcatccaacattgtgtttgatgatacatgtaatttacttctcaaagtccattaaatggattcacagagcacctggttgccaacgcgaatacgagagtagag

SEQ ID NO: 114714 - DNA, 936 bp, Physcomitrella patens
  Intron number 1 from transcript Pp1s262_52V6.1 (locus Pp1s 262_52V6) derived from phytozome v7.0 (chr-ID scaffold_262 ; pos 366432 to 367367)
ccgaagtgggtaaccagaggattgcgagttgtgaggtagctagcagatcttgggcgcctaccaaaaagttagcgtggatgtgcgtcctctagtccgtgctggcgtgaaaacgtggacacatttggttgatttgcagcacgcaagtgtcggcgtgtaaatgggctgctctcgaatccgccgctcattatctactcgcatgtttctgccctctgaaatttcacaggctttctgcaaaccgtatcgcgctggagacattgcctgacgagaagtatgaactctgttagagtcccaggctttcatcaactatgatatgtgcatgttagtgccgcgtagaagattcgatacttctttagatgggacccgtcgtgcgatttgatcatcgtatgaacatagggttagtcgctgctgatgtgttggtcttgaaggagttgtttccgaggaggttgtttgtccacgtagagagcgtgctggttgattttgaggtttagcgcagtagtcttgttgtgttgtgagacgcctttcaacacctcctgctgcaattgggttcccgagaggcttgttttaatgaagaaggttattcctctagtttccctgagtctgagtacgacccatttttctttgcaccgcaagcggtgcatttgcagcgcaatgctgatcgaaggaagcgttgtctttaagtaggaactgtctttctccgactgtatggtctttatgaagagttttaatttaggtgtgtttagttcgtctcctacgaatcatcccaggcaggtcgagtcattgcctgatagatattagagtctttttttttatccagtttgagttcatgagtaatatttagacgtcgacccgtcttcttcattgtccctcattgctttctctcacattgatcacgtttttgcaggtattattgtaggattagttaactgcgccaacatt

SEQ ID NO: 114715 - DNA, 702 bp, Physcomitrella patens
  Intron number 2 from transcript Pp1s262_52V6.1 (locus Pp1s 262_52V6) derived from phytozome v7.0 (chr-ID scaffold_262 ; pos 367463 to 368164)
ggtacgcttttgtttcgtgtgcttgtaattcgtttacgctgtcatttgtagaattttgagtttgtaacaggttggtgaatacttttacggaagtctttcaaacacgtatatacaaccttgccatcatctctttccagaccttccgcctacttcgtacgtttgcgcatagcaacagggggatctactctgagcgattttattccagcagcattttgagtagttatagtgtatcagcaatttctcgttgctactcttgttgtcatcgatggtcttgttctcgtgaacatgatggatatgtgaagagcctcaggttaagttattctaggttttacgactatctgtgcacatacatggttggagtgttgaggtgcagtaatcaatattgaattgtaatcacctactatccggtgagtagtagcaggttttgaataatggaagtttttctgagaaaggatggaaaggcatgtggacattacgtgttgctgctgcgtaagttaaatgtaagagggtatcagaccgagtgcttaaagcatcggactgcagcggaactcaagaatgatttgaaactactgacagtcttctttgcgtgaaagaagagacctcgccaacttctaaagatcttaataagaggcttcaccaacttactggaagttattaagatttgcatctcttgttttgcagctgcaagcattacaggagacg

SEQ ID NO: 114716 - DNA, 407 bp, Physcomitrella patens
  Intron number 1 from transcript Pp1s144_158V6.1 (locus Pp1 s144_158V6) derived from phytozome v7.0 (chr-ID scaffold_1 44; pos 1099272 to 1099678)
ttgctttacacgtatccaaatttgattttgatcctttttttaggataggtttcgtggtactggaaccatgacgaaccgcgaagtttattatcagctgcatggcaattgtatagactatttttctagtcgttttcgtattgtgatttggggtatgttgtacgaggaaagcgttgtgtacttcaccgatacacaatacgtacaagaaacagaagtcttgcttgtgaatgtaggatttggtactcccaaacagactcaaaagacatgaattgatttagcgaagagattatcagaggagatgatatcttttattatcaatattattttagaaaattattactgttctttcaattaattcaattctccaaatttttggtccttaatgctgtttgtacagaaccatatacaac

SEQ ID NO: 114717 - DNA, 957 bp, Physcomitrella patens
  Intron number 1 from transcript Pp1s102_15V6.1 (locus Pp1s 102_15V6) derived from phytozome v7.0 (chr-ID scaffold_102 ; pos 79084 to 80040 reverse strand)
tcctgtatttggaatcggaacatcctgataagccggtaactagttttggtttctacctctctgcttttgttttcgacttctgagtcacgtcttgtcatggcacgtatcaagagcgttctgcaccttttgatttggggaataaggttctagcttctaagggtagttaattccgatttcatggtttttgtggttagggatgtggcaggattgaatgccgggtgcctttttttgtggtctcgatgcggagtttttagtccctgttttgtctataatagtcaaatagtaccagcgcaatcattgagagaattggaatgcgtaaggtctttcgagttgatgactgttctggatcactgcataattttgccctcgaaaccagacgctgtgtaccgaccacggtcatttaaaagcaaatgattctttcctaaagcgaatttccagaccttcgagtaacatcggggagatgttcaagtcttttaatcatgtcatgaatggtttgcagtgagctgttcaagtcacttcccaatactcctattttattattttattatttagcaagggtctgagctactgtcgtagatttttcgaatacatctagatacatcattttaaaatttggagtattggaaatcgatataactgttgtgaggattaagtttgacatttttttatttttttgctgatgaattagtttttcgggattagggttttcatcttacagaagaaatggctagaacactgaagatacattgcaaccttttaaattcacgatatgcgcaaatgaaatacatgagtcgctttttaaagaatttgctatctcatgtcaatgaactttggatcattttcactttgtactttgtcttgatatgttgctgttacattattggaatgagatatgtaaagagctttgatgaccttactgcagatccatctctacatcaactcccctgggggtgttgt

SEQ ID NO: 114718 - DNA, 840 bp, Physcomitrella patens
  Intron number 3 from transcript Pp1s218_29V6.1 (locus Pp1s 218_29V6) derived from phytozome v7.0 (chr-ID scaffold_218 ; pos 245588 to 246427)
gaatcaagaagtgatattctgtggttacttgtggtcttattttgctagtttattgttgataaggtgtgcagtaaccttgttcttgattgaaatagaaccaatgcgtcatccaccaacagtgatgattgatttagcaacgctttgtcttctgcaacctatctcgatcaggttataccactattttaagggttgcctcaacttcccacctttccactagatcttctgtacgatcatcttaacttggagcacataaaatcatctggtctggtgattttctatcgaatttgcacagtgcataaattgtgtcttaaaaattgcaatgtttggtccctagaaggaaaatacgagtgctgatcagtattagcaagtcttgtttccttgttggcatctcagatctcaaaagactcattagtggataactgctttagcccaatatcagctattcactttgagatgtttcacaacatcgagtaggcaagcttgcagtattgggtgggatagtgaaaaggtctgttagatatgatgtctaaccagtgacattctacctatcgtttgtgtatatggcatctttgtatgaagtattgtgttgttggtttctcttaaaatttaagtaagctggagaacaataagaggttcctgtgactttcttgatgctctcttagctgcagcaaggttacctcggttgatacgaaacaaccgagtgctatcagtacgagaattcaaatatcaacgctagaggttatggtttttggtcaaacattggatgtgctgtgaatgttggtgaatctgccccgttgatttgcagattctatagctagaagattgtcgaaaacgtgcacc

SEQ ID NO: 114719 - DNA, 368 bp, Physcomitrella patens
  Intron number 1 from transcript Pp1s133_27V6.1 (locus Pp1s 133_27V6) derived from phytozome v7.0 (chr-ID scaffold_133 ; pos 181393 to 181760 reverse strand)
aaggtgtttgaaaagctattaaaataagtatgcaatctttaacatatgctcaatttataaatccttattttaaaagtttgaaaagaaaaaaatccaaaaagataaaataaaaaataaaaacaaaaaccttttagatcttgttaagtcttaaatatattactgaattgaaaaaactaataagcactttcaaggttagttaattttattagaaaaaaatcatatgttttatttcattcaatcattatgttaaaattcaacattttattgattattttatttttcgaaatgcacgaactataattatttatctaagatattgaatatgtctttgagttctgttaatgtgtaatgcatgttattttagttac

SEQ ID NO: 114720 - DNA, 649 bp, Physcomitrella patens
  Intron number 1 from transcript Pp1s59_196V6.2 (locus Pp1s 59_196V6) derived from phytozome v7.0 (chr-ID scaffold_59; pos 1035779 to 1036427 reverse strand)
tagccgcgtcgaatttggtgccttgtgtcagtacttcataatctcatcatcttgcaatacagaggttgttgtgttaatttggtgtctttgtctttgcaactttttgattcgatcaccctgagcttggttttctaagatcgggttgtgcgtttcggttcagcattaagaggtgcacactcgatttttatgtaattatttatttatttttgtgtgtttttttgggtgtttgcgttatctctgtgaagcagattagtgttttgaaactttctcggttttcttgacgtgaaagcataattgatgaccatgatgctttgttttcgttgtggggatttcttgttttcttgtggcgtatagttgtgttgtttgaaaagaaaactgtgggtggttggatttttggggtctttactttggtggccctccatctgtgactatcacgcagatctgaggctatattaatttgttgtaaagttttgtgctgtaattaactgttgtgatgaccgtttttgcatagttctgagaccttcgtgtacaatgttcattggcaggttcaattgattatctgcgctctaacagtattttatttgctgtttgattactacaaaatactattcaatttggaggccctattttgtcattaactctcacaaag

SEQ ID NO: 114721 - DNA, 759 bp, Physcomitrella patens
  Intron number 1 from transcript Pp1s222_3V6.1 (locus Pp1s2 22_3V6) derived from phytozome v7.0 (chr-ID scaffold_222; pos 14722 to 15480 reverse strand)
ttgaacaggcaagagaaacttctaattacagctgttcaaactccacataggatatagtcacttacagatgagttaacgggaagcagtcaccgtgcgcagaattttttttgtaacggacttgtggtcgatgccctgcagaagtaccctaatacttttaatagctggtagcactttagagtgttgctgagaaaacctgtcaatctgttcttagtcatcccagatctatatgtaaataagatgccctaaagtggtggcggtggacatgccagctgattctgagatcatcagacctgaaagtccctcaactgatggtgaagaaatatctgttcattccaccgccacccggatatttggcattgagaatctatgatatgttggtgtttgtgggaatgtgaaacttaacgatctgtggttgtcacttctgatggcatctgttggcttacattgtatttatttttggtgttttggacacttcactgactggtcgtctaattaaactttctggaaactcttccgctccattaagtggcgcctggcaacttgtgaaattaaaatacttggaatttcaaaagagaagtcagcatacacatggatcggctattttgacctattctgttcaaattgcaatgaaaatcttagtcctctttctgagatagcaagctgagagatacactcactgctaaattttcaccaattttgatttcatggtttacacagacgatacctccgtgaatcatattttgcaggtgtcagatagct

SEQ ID NO: 114722 - DNA, 415 bp, Physcomitrella patens
  Intron number 1 from transcript Pp1s160_149V6.1 (locus Pp1 s160_149V6) derived from phytozome v7.0 (chr-ID scaffold_1 60; pos 909146 to 909560)
gtagaaccattgcagacctttcagcatacatccaggtttggggctattgttcctcaagaaattcaattggtgacacgggattcagacttgtaggaggatctaggcttcaaagaacatctctacatagtcaaaagagatctattgcttacgcagctttggtgctcgattttattgaagagcttcttcgaacatgtacttttgaaaaaattcagcactgtttgcagtaatcaagtcatgctttacgagcgcattattatgtgctgcagttgtgtggactgaattaattttctgtgagtttttgactacgatcagctcttaacactgtgtagagcagctgagcgttttgtccatagacaattataggtggcaaacatggagatctaagacatgattcaatgtgatgttgattgcagag

SEQ ID NO: 114723 - DNA, 722 bp, Physcomitrella patens
  Intron number 1 from transcript Pp1s240_14V6.1 (locus Pp1s 240_14V6) derived from phytozome v7.0 (chr-ID scaffold_240 ; pos 62449 to 63170 reverse strand)
ggatccatcgaaccttcggtaagttttattgaccgtccttacctttgaaatcttgcgtttctgtcacttttgatgtttaatacactttgtactggtgctacgcatcacgtgatacgtcttttgagcaattggggtcctttcactctgtcataagggcgtcagaagaatggaactggttgttccatagcttcgacaagatcagtgaggcattccaaaatcctattgagttgagcgccaacacaatgtgcgagcatccatgattgcaacgtgttttggaaacgacagaactgtccggattcacccatttgtaagaactttgtgatcgtaccaagtgtgacatcgtgtctggttcgttggcgtcactatatctccaaaggttatccttgacattaatgaagtgtgaatgctttctcatcaacatgctgcttcactacaattctcttcagacttgcccatgactgttgcctctctcgaaagtttgactgaataacttaatttcgagaacatttggctggctttgcggcaatgaaaggaatgcaagatattggtgcctcaatttttgcgtcatacatgagagacatttcagggagccttaagcagcttttcgcattttgtgttcgtttttgttttatggaactgaattcacgtgtttatccacgactgaatctaattatgtgaccatcacaggctactgtctacgaacactaagcaagacgtgtcgt

SEQ ID NO: 114724 - DNA, 548 bp, Physcomitrella patens
  Intron number 1 from transcript Pp1s54_186V6.2 (locus Pp1s 54_186V6) derived from phytozome v7.0 (chr-ID scaffold_54; pos 1148707 to 1149254)
tcgctgcttccgcattcagcgcttgctgggctgaggtgccgacatttcttcctctagattgatccggtttgaatttctgaagctggtttgggttgcgttgattcggatggatcggatttgcgcgtgagggtgtcttagtcgagcgtactctcgttattgtgggttttctgtggattaataaccttctgatttatttttatttttatttttatttggggggggggggggtgtgaggctgtcattgcgtttcgtagtttgattgtagaagagaaattgaatatttgctagaggatggatttttcttcagatttttttgttcatacagagttggggagtgtgtgtatttatttcattcgcattctctgatattccaaacgatgacctgaacttgaaaatgcaaccataagttcgtttgtgagcaatgggtgtatagcttctttttttgttttatttttatttattatttgtgttttccagtagtgtgagaaataacaaggcagttgatgacggcagacctgcaccattcccctagatacggccaaggtgag

SEQ ID NO: 114725 - DNA, 975 bp, Physcomitrella patens
  Intron number 1 from transcript Pp1s81_30V6.1 (locus Pp1s8 1_30V6) derived from phytozome v7.0 (chr-ID scaffold_81; p os 144009 to 144983)
taatattggtaagttgtgagctggtaatttggtgagcgtgtgtcaccgtaacgggtgttcaggaggtctggtggtagaagttaacgacgatgggtagtccacaaattcatcgagtggctagtcgtgatcgaagcacacgctggaaagctggcattacatgccggggagacgaaggaggaggaagttgctctgtgacagatgagccttgaattcccttccccgttgtgctctcctctcaattctgtgctgcattaacacacgtttgtccacccagctctccgattctttggtttggagaaccttgaggatgagatcatcgaagaatgtagaacatcatctcatttctatttatttatgtatttgtttgttttctgatgtactgagggaatatgaacgaatgctttacaagtcagtgcatgagttacgagggacgttgcagagtgctattactatactctgctgaatctagttcatcagtgatacacggtcatattcgacgaggagcgcttgagttagttaagtcatcaccatcgtgaatagtgataaaaactgacaagttgtacaggagaaaggcaaggagttataaatctggagtgctaaaagtaatcacagtgagtaatttgcagcaagacagagtgggagataagtgcatatacatttttttaaataaaaaattcctgtatttttcccccttttcttcatgagtcatcagaatatagaatttttggttcgaggcagtcaagctgcgaataaagattctcaatctcgagacaataccagctgttggaacatgccgaagtggaagaggcggagaggcagcagtagtccaagtcatgttgcaactttcgatatacatttcgggatgtgattggttcttagcagaagcacctaaattaaaggtggcaggggggcggggtggattattattatcggggaggtgagtattaaacgcaaatgatcagcagttacacgcaa

SEQ ID NO: 114726 - DNA, 676 bp, Physcomitrella patens
  Intron number 1 from transcript Pp1s326_16V6.1 (locus Pp1s 326_16V6) derived from phytozome v7.0 (chr-ID scaffold_326 ; pos 100916 to 101591)
atagggttgctgtttccagcagtgaccctttgacagtaagcctgctgctcatattttgattgttgcatccactttccagtatcttctcttctgaacttgtctttcagtttttattttattttattttgaacatcatttataccgcactcctacgtgattgatttgggcactaccctctatcggcagttaacacttgcgaaaatgttgttgtaatcgagcaaggttccaataggttaacactatcttattacggagtttacgtcataatttgtgcggtcagtttgtttcaaatgattcttacttagcaaatacccgtcacccggactgacttattgtcgctacttgcaaactttccgattcatgggttctaccctacgaatactgtaaagccctagaattgataaagggaatcggaatctttcactgttgaagacactaatctatatgaacaatttggaacatgcaagtgccgaagaactttacaaactgcaaaatatgattcttactttttggatcaacttctcaaagctaaacctgcacctgtacttggttctgttttgaaacccctgttcgacaattggtatcaatattggtgtagtaatttggtgaattgctttggtggtaactctaaattgcttgttttcttttccgttctaggtgagtgaggagcgtgaag

SEQ ID NO: 114727 - DNA, 618 bp, Physcomitrella patens
  Intron number 1 from transcript Pp1s118_210V6.1 (locus Pp1 s118_210V6) derived from phytozome v7.0 (chr-ID scaffold_1 18; pos 1028785 to 1029402 reverse strand)
taacaaattgccaggtatggttcaaaaaattcactctaattccctgagaacactggccaattataacgatagcattttcatggttgatcattgtaattgatcgttttcaacaatcctcctcaagaccattatattgacctccaaaaaaacatttatggcataaagaaaatcacttgtcaatcgagtaaattttttgacatgttttaaaaacaattcagcctttatccatctattgccgacccttgtaccaacctcaacaacaatatttttcttcgcacaattgttggaatttatgttgacaaatttgttggttccagcccaataatgtcaaaagaaaaagaaaaagaattgttaagccacttttaaagtcaccataagctcccatgattattttgtgggttttcaaattcaatgatcctcaccacgtagcttaatcttcttccatcatcaatgccaatatgttatggcagttctcaaccgcttctacatgtttgattataaccatgtttccactctttgccaaaactcgatctactcattttgctaatctaccagatgattagttaacaacaaaaccatatacacaatgtgatatcatgcaggaagccgagaactcga

SEQ ID NO: 114728 - DNA, 682 bp, Physcomitrella patens
  Intron number 1 from transcript Pp1s323_3V6.1 (locus Pp1s3 23_3V6) derived from phytozome v7.0 (chr-ID scaffold_323; pos 24847 to 25528 reverse strand)
cctgagctccgcctttgtgggtttgcacttgcaaggtaggatttcctcttcccttcgctttttgttttgttttttgctttttgttttgggtttcgcttcgtatgggtcatggggtcctagaagcgacgccctgcagctacggagaatggcttggaagcggatttttttaagagtagtattggatatgatcatggagaatgttggagtgttttccgtgttcattccgtcgtttctcgggagtaggggctcgccctgctggggttctagttctgaaattagtgggattgttttcggataaggtgttctttgagacccagggtttcggatgctttacttccgtaggttgttaagatatggtgacacattttaagtaattgttattatgagattctagtcttgtcgttgagtcttaccttgaaggagtcgggtttgtattctgagtggaatttggtttttctcttacgctaccgagaagctccgtgatatctttcttgtatctttaatcggtctttcattaggaaatggatttgacttgaagaaaccgtcaaatccttgccctctaaaattgaatcattgaacttaggtcgtgttttcgaattttgaagtcaatgttgcgataatgaaccctttattattccacttcacaggtgtagcctgcagaagctcagtggtgagcccagtg

SEQ ID NO: 114729 - DNA, 515 bp, Physcomitrella patens
  Intron number 1 from transcript Pp1s204_123V6.1 (locus Pp1 s204_123V6) derived from phytozome v7.0 (chr-ID scaffold_2 04; pos 663538 to 664052 reverse strand)
ctgagtctaacgggcaccaaaaatttttcaataaggtatgtccttaatcttttcttgtagaactcatttatcgtcctcctaaactagtaatgtttccttctacgttgaattttgcgcagcttcttgatatttcttcgtctgtagtcacgtggtgctctccctaccagccaacctggttggtgaggagaatgggaaccttttttcaccaacttcaaaattatggtagtttgtttcacaaattttaggttatacaagtcaattaaagttttccgccgaatctgcaatcgcgtatacttgtaatccactcgcagttcttgttaagtacctcagcatggtgttctggcagtgacaaggagtatacgttgttctttgcattgacatttcagctcttgaaaattaggaaatatagactaagagaaaaggagtgaaacttgggcgatgacttaaatcctacttggtaattgatgatctgtgttggattttgtattggaagggcctgaaaaaacagccaacgg

SEQ ID NO: 114730 - DNA, 1056 bp, Physcomitrella patens
  Intron number 1 from transcript Pp1s63_96V6.1 (locus Pp1s6 3_96V6) derived from phytozome v7.0 (chr-ID scaffold_63; p os 879880 to 880935 reverse strand)
agaagaagttggaaaaaccgtcgactcgacggcaggtcagggagttttgcacatggtatgttacttacgccgcaggcttgattattgtctcccaatcaaggattgatttcattcaattgttccattgcgatgtttgtaagctgcaacatgtgatgatcaagtggcactaggtgatacgctagcctgggggtctattctggaggtgagtgatcaaatttatagataaatttaggcatcttattgagcttatttcgaggtttcgtggtcaggttgtttgactatgtaccccatgacatttttttttttcttggtattaagaaagaaaccattccacagactcacacattggtatcgttcttcaaggagggtgtaaagtagagttgtaagttgctgaagagcatagattctttaagcatactagttctcttcgaatgcggtatggggtatttcatgggtttgaatgttttaacgcacaaatatttcatactattgtcgacagattcacagttaaagacagacatagttcttgaacactcagcactgaaccaagttcaagatagatataggacaaagctcaatcaagaaatttcatttgaatcgaatcccaggattttaatagccaggatgttaagaccagtccatttgaagccacatgcgaggagagtgatgtgagtggtttggcatctccaaggtcttgagagaaggttgatgtacaactcttcatagctcgatcaatagatgatagacaggcttttcgaatcttttgcaagtaaccttgatttatttataaagacctgtgatcgcttgtgtaccaccatgtaatcagggattaatgttacagtgagcgactgtgtcgaagagtttgctgcctgttatctgctgttctttttgagatgcactggaagtgaaaacgtagccgtattttgaagaccctcattgaccttatatgcacattagcacacaacaggcatatcatgttacaactcaaatagtaagaagcatagggtttcatgatgttcaggtcaaggaaggactgcatctggctttttctctggg

SEQ ID NO: 114731 - DNA, 599 bp, Physcomitrella patens
  Intron number 2 from transcript Pp1s102_135V6.2 (locus Pp1 s102_135V6) derived from phytozome v7.0 (chr-ID scaffold_1 02; pos 871886 to 872484)
gaaaatcatttactagtcacaaggtgttgctttggcattgaactctgtatttccatacgaagcgtttgttttgttcaatcgaatgtgcacaagcaatgtcttggaatggaatagtcatgcgtgttgccacctaagtgtgttcagccgggtgcatttgatgtgttatacctgagtcgaacttagtatttggaggttggtgctcgctctgagtatgtttcatgagcacttagtcaggggtttgagtgcaatgtttgcaggaggatatttcttcgtaatcgttcgcactttagttgtgataaattaagaattaggtctttatgatgcgtatagctctgtgcacctcacctggtcacatacttttagagcagcatttatgaaattgcattgcaagtgtgaaagggcagtgcaattcaatgcaatgtttgcataccagatgattatgtgcgtctagtattacagatacctccagctactcaattagggcaactattataggcattcatctttcgccactttctgttgtttacattttgatctgacatctgctgccttttctgttttcaggttatcacaaggcagtcccttctcgcggcacaggt

SEQ ID NO: 114732 - DNA, 836 bp, Physcomitrella patens
  Intron number 1 from transcript Pp1s220_98V6.1 (locus Pp1s 220_98V6) derived from phytozome v7.0 (chr-ID scaffold_220 ; pos 648159 to 648994 reverse strand)
aggtggaagcgatcaggaaaaagcgaatccgaaaggtacaccattttatttatgaagtttcagggtagctgtccaaaaaatgttaagctgatgcgaatccactttcttggtatccaatcgtcttcttggctgtgcattgaaaagtagccatattttctcaacctgagctaccagtcgtgagcagtaggtcgctgcatgtaggagttgatgttatcgtttcatcaagtctctaagtgcgctacacttttacattcttttagtgtgtagttaggtcattgataaactctacttgaacggcttttggggcttttctcagctgcatacacactcctataatctaaacagagttcctccaccagcaagtgcatttgcgggtatcgtattccgcttcaggatgaagttttgttgtgcccctaatttttcagacatcatagtattcctgcgaagattgtgttttgtttttgtttgttttcgtgttagtaggatgagttggcaagtattgagcttcacatctacttgcgtgggagattatcggaaaagttgcacatttccagatctttctggggtgaatctgagatactaacgaagtatactgcacctgaacaccacgaatagcagcatagcgtctctgtattgagacagactttgcacaatgtttgcatcgttgatttgcatagtcttgtgatttatggatacaagaagttcacgttaacattctattttgaatgcgtttacagacattaacaccgctgtttgttcttttcttttcttttttcttttgtttttggctctgtttttcagggcaagaaggagtttcttatcaagtggtaagtgta

SEQ ID NO: 114733 - DNA, 920 bp, Physcomitrella patens
  Intron number 1 from transcript Pp1s147_6V6.1 (locus Pp1s1 47_6V6) derived from phytozome v7.0 (chr-ID scaffold_147; pos 28322 to 29241)
gcccaggtgcgtattattctgctctgattaaccacacatgtagaattatttaattgtttacttatttttgtaaaaaatccatttatcactgtggatgttagatcggcccccgatggcttgagacccaattcagatcgcgattttggtcagaactctgcattagtgatgtcccttcttgtttctcatacttccaccagagttgcctagggtgcagcgtcaggagaatctgggtatgctgaatcttagacatagttgagaatttgtacgtcttaatctacaaaatgattttgtggattgttctcgagcagatttgagttattttcttacttccgagcttgccctcctcgttagttgaacgaaggatcgatccacctcatgtggcttgtctatcatttctagtagcctcaaccctgggacgtgcctcaatctcgtggttgacagattaaggatgagcatgttaccactgctttggtaactatcatgatttttaatacaggactacactactgaaattttcaaaataaaattctatctttgtgagttgtggcactgtttgctaacctgtgaagtctgttggagacggttttgaggtaaccgaatcgcggagtcattgcaatttctctatgaatataattttcagggttggtcatccttttgtttgagcaacctttagttgacaggcttagagatacggtattctaagggggtgagttacgtagttgtaagttttggggcactggcaaagcatgtatgaaaattttgtgaagctttgcttcaatattcaacataaatttctttgtacaaatccttttagctagttctttgcacacatgcttttgaattacaccaaacgatgcctaataagcgtggaaatcttcgttacaggtgccagtagactctgacgaagtaccggaactgcc

SEQ ID NO: 114734 - DNA, 708 bp, Physcomitrella patens
  Intron number 4 from transcript Pp1s126_191V6.1 (locus Pp1 s126_191V6) derived from phytozome v7.0 (chr-ID scaffold_1 26; pos 1192853 to 1193560)
ttttttcttgccctcggtcgtcatccagttatgtgaggtcctcttttacacggttgattggtttaagacatctgtttgtcttatttgttaattgcataattaagagtgcatctttaagctgtaaattcattaatagatcagtaactgatatttgttgcagagcaggttacatgtacaattattaagtcttcgtcagtgaattcacgcatctgtttctatcgatatggtcaaacattaacctttataaatgttccaatctagtttttcttcataggtcgttacaagtcagaccatcttttgtcccttattctaggaattgccactacctttggtggcagaaatcgagagtctgatgttgaataggtgtgctcatagagaggttcttgtttgagtgtgtctgggattgaagtatggaaaattttatttactgcaccacacatttaaaacgatttctcattaacaagtagagcaaatggcgtgttagtattaacgtatgtttttgtggtgaaattggtttaaaatgtctttacgactcaggagttgataactgatagttgaaaaagatgagattttctttgaattgattttgcacttgagaccttgactcggaactggaaaggatttatctgatttcaagttgtaccaatggtcgttgatggtatatatattgcaggagaaattgcaaggtttggcgcggggtaagtcttt

SEQ ID NO: 114735 - DNA, 797 bp, Physcomitrella patens
  Intron number 1 from transcript Pp1s134_142V6.1 (locus Pp1 s134_142V6) derived from phytozome v7.0 (chr-ID scaffold_1 34; pos 873100 to 873896 reverse strand)
aaaaaccaggtaaaagttcgattctacgatgtaatctaccaattatttgtgaaagtaggaactttgtatcgaatgaggcccttgatgtaagtggttgatactggacttagaatgcatcaaaacactgaagtcgcatgaaaccatgcttgcgtaacctggatcagaatttctcgacaaatacgctctgcgaatgaagagttcggatccatctctgttttgcaacctgcttgatggcaagcacgtttgacgaaacgaatgagctatctggcagctgataatcacaatctccattacggtgaccacgaaatccatgcacttaatcaaggatcgatgcttagagatccaagttttgtaaattattggagatgacagcattgagcagattcaaaatctcaggaattgtcaccgactttgtcgagatcaacaccaatgggacaattccagcctcgtttgaaaagaagttccactctttaaattgtattaagaaaaagaggatccgtgtagggtctgttttccgaggctcacgtgtgctgcttcttcaccttaattagtaactgaggaaaagccttcttcagagaaggatgagcttacaatcacgagaaaaaaaaactttacgggggcatcagagatcgcatctttgtacatccagctaagcacgacaacgaagtctatgaggggtatcgatgattcaggagaacggtggatgagatccgtgaaaggaattgatgatacacgagagcggcggacgagatccgtgagccatctatgctacagttggggtgtccttttccacagct

SEQ ID NO: 114736 - DNA, 628 bp, Physcomitrella patens
  Intron number 1 from transcript Pp1s3_460V6.1 (locus Pp1s3 _460V6) derived from phytozome v7.0 (chr-ID scaffold_3; po s 2744007 to 2744634 reverse strand)
ttgtgagttcgctaaattgttgatagctttgcgtttagataccaatattgaattcagtaacaatggcagaagagtcatccccttatatttttgagcgaaattcgtttgagttacataatggatttcttctcttccccattccttctcgtttcagatttgcacttcattgcaatctgactcctagtgttttgctcgcaattttcgccaactacgcggttaatttgtgtttgacggagtgtatgtcaagcagtttattgttggtccactttatcgtgtagtatgctcttcattcggaaagcagagattcacaacctgtatcataagcttgttttgccacagagggtagcaagttacaacaggattcttcataattaggccaacgttaatctttacaaaattggtgtcaacgaatccctctggactgttgtaggtgcgagataaggaaccggcatttggtaatttttataatgtatatacgatctaggttaagcttaagataatgctgcacctgtttcgaatggttcttttgtacaaattctcgtgataagatttggatacaggaataatttagctgtgcgattttgctaagagatgtcgctcatttgctgcatgcggggttttgtgcagg

SEQ ID NO: 114737 - DNA, 623 bp, Physcomitrella patens
  Intron number 1 from transcript Pp1s194_97V6.2 (locus Pp1s 194_97V6) derived from phytozome v7.0 (chr-ID scaffold_194 ; pos 464179 to 464801)
ggaagcgcaagttgctaacgtgcgagccgtcctaggtacattcctcgatgctccctgttggtcgcaaagtgtttttctggtgtaaggaatggatcgaacattcgatggcaattcgaggagtccgtgtcgcggtgttgactggacaattgctgcactggtgaaatttggtcatgcggtatctctgtgatgagagtttgaattgacgagcgttgcgattgtttaaaagctatgtcaacatcgtcgtgttcaggtcctttgcgttctaggaattagagtttaggtgttcaaagatgcacagttctttgtagatgttccgcaagcgatcagtctgtaagttatttttctattaggctgagtctcacaagaacgattttgcgttagaaacattttgctactgaggttgaattccttggaattttgttcactgttgatcggcggcttcttctttcgtcaataagtgcacagcggcttgttgagccgggacggggggtttgcatactggctgtgaagagactagttttttgagtttggattattatgctgaagtttgctcagagagttaatatattggtggtggggtccgtgcagataacataaagccgtcagatcttgggttggttaat

SEQ ID NO: 114738 - DNA, 814 bp, Physcomitrella patens
  Intron number 1 from transcript Pp1s70_130V6.3 (locus Pp1s 70_130V6) derived from phytozome v7.0 (chr-ID scaffold_70; pos 736152 to 736965)
gctcggcgagatcgtcaccaccattcccaccatcggtatgttctgattcagcatacctctcttctggtcatgtcctctcttgccttcgtgttttgcgttcgctgtccctgagcgtgagaggttcggttctggagtttgagcgaaatctcttttctgtgtcattgcatctcagatcgaacatcgacgctttgattcggactcagttttgccgttgttggttgtgtctttcatttgttttttgttgcttttcaaaattaacatgttgacatgtggaatgcttacggaggccgttaatgttatcttttattgccgaagcgtttaaacctaggtatttgattgagagttaaaacattctttgatttttgatgttcttctattcttgtccttcagtcacctgcatagttgatcacggagcaatggcttcgaagtctcgtctcattctttgaattctgaagagagacaatcacttttataattgcattaaatagttctaaaatgtaggaagtgagcacacagcaattgcactggattttagtaatgtgaactgaaagtattatgactaactgattggcttaattgctacggaattgcataagtgaaaggatggaatgtttagagtcaggttgttctggttttgctaatgatagtcgggattgctggattcgtttgttggatgtggactgggaatcaattctgtgggcttaacctttcgatgtttgaaacattgtgtcacaattacatgtccgaagagtatctgaggtggtacaaattttttacaggttttaacgtggagactgttgaatacaagaacatt

SEQ ID NO: 114739 - DNA, 323 bp, Physcomitrella patens
  Intron number 2 from transcript Pp1s46_248V6.1 (locus Pp1s 46_248V6) derived from phytozome v7.0 (chr-ID scaffold_46; pos 1722907 to 1723229 reverse strand)
cgtgtttgagaaggtagaatgtcacaactgagtattatgtttttcaagcattaatttgccttctcacaattcctggtttacaattttgacttatcttcgtgaactcttggtttatatgttgtttttttaaattgcaattaaacagcttgaatacatgttggaccatgttgccattcaaggttcccacgcctggcataactgaccaagtgatcattggacttgtactggcttttatatataaatggctttctctctgttcttagtaatcttgcttttttgatttttgattgttacacctgttgtataggcaagagcaaaacacg

SEQ ID NO: 114740 - DNA, 512 bp, Physcomitrella patens
  Intron number 1 from transcript Pp1s167_136V6.1 (locus Pp1 s167_136V6) derived from phytozome v7.0 (chr-ID scaffold_1 67; pos 735605 to 736116 reverse strand)
acgagttgccggaagaccttctgctctgtttggtggtgagtattcgtcctccttcatttggattttgaaggctgtgatcccaccattcatcgatttgtgcgaaatcgggggcagaatccaaatgcttccatctgaagataacccttcagttttgcaatttcattgcattgttttcaattgagagcagccgtgaatgaggttgtggtgatgggcatcatcttgggctacaagacatgagcgagaacctggtcgaatttgatagttgctgaccgcaattcaagtttgttgtctcacggaagaatttgttgatggattttcttgggttcaaagtgggtcgaggaataatagcattgggtttgctgctagaatcgtacatggacatccaaacaagattaagaatctttctctctaacggaatctgttgccagtgtaaagtacgtattgttgcctaagcaaatatatttgattgagatgtaggaggtggagcagacgataagaagcctgagaagaag

SEQ ID NO: 114741 - DNA, 347 bp, Physcomitrella patens
  Intron number 2 from transcript Pp1s75_108V6.1 (locus Pp1s 75_108V6) derived from phytozome v7.0 (chr-ID scaffold_75; pos 621413 to 621759)
gcgcttttaagctcggcatttgccacggccatcaggtcttgtcttcttcgcatttaccttataccccttgcatcataatcattacatcaaagtagaaattcatgcgtatatctgctatcacagggttaatttcaggttgcaactggttcaatgttttcaggtccgatccgtagaaaatagggttttgtctgttacatttattgtcgttcgccgtcgtgatactggttgtttttgaagttcatgtttttagtttatttatttaaacgtaaattaatatttatactagcttcctttccttttcttttcttttatcttcggtgttttttctatgatctgcaggttgtgcc

SEQ ID NO: 114742 - DNA, 1029 bp, Physcomitrella patens
  Intron number 1 from transcript Pp1s160_112V6.1 (locus Pp1 s160_112V6) derived from phytozome v7.0 (chr-ID scaffold_1 60; pos 724582 to 725610)
acaaaacttattatattccacaaggtaattgttttctgcttagtccaactggcttgacaagcattgacacaggaatatctcaatcaatgtgataacatcagagtagttggcatacaaagaagacaatgatattttacagttaacatgcaaatctgtggttactcacaccctaaacttgtcttaatttatgataagggtcactgtttatcaaggatgtttaggggtagggtttgacctttcaattgttgaactatgaagccagagaaaggtacccattgaggtagacattgagtgcttgcaaacacttcatcccttcattgcaaagttgggctacaccaccacatgtgcaaaatcctaaaaaagaatttccaataatgatgccattcttgttcccctgatcaccactggatgggtgtttatggcagctcaagctataaaagctccttatggggcttcacctctacctatgcaaaaccctaaaaaaggaaatccaataattatgccattcaattctcctgattacaactacatgaggttgaggcaaattggatttgaggaatgtggcatagatgttgttttttagcttgctaaaataagttagacccaacatatttctagaccccaaatgaaattttggaaatttatgttaaaataggaagaaaaaaaatgtatatatatatatatatatatattcacttattatttgtgaacatgtaacataaattgagtttgtaacagtgaattccagatactcaaaatctatgcaatggattttattttattttagtttagtttaatgtcaactttaaattgttcatacttgtatgtccactggagaccctactgtagcttaggttgtaaccctactctggcaattgatttaggaaaacattacaagaacatgaaactgaacctttaaagcattatcctaatcaagtacagctcatttgacaagtgtgattggatgagttgaataaatgatctgcagccatgtgcaatgctaagttgtgctgtgacagagctggagct

SEQ ID NO: 114743 - DNA, 709 bp, Physcomitrella patens
  Intron number 1 from transcript Pp1s33_271V6.1 (locus Pp1s 33_271V6) derived from phytozome v7.0 (chr-ID scaffold_33; pos 1611072 to 1611780)
gacttacgtacacgcttaattacgcaggtacatttgtggctccgttttttcttttttttcccccctttttttgtcgtttcggtttagatgcagaggtaccgtctcttcgtgtggaagcagcatatagccgagctatttaatcgggtgaatttggggaaaagaagaattttacaaggttattgtttgaagcatcctattgcagataccgtttaagttgtagctttatgtaattgaaaagtagcgaggtttctgaattgtagatgtcgatgccaagatcgctcacgagacacagaaatttagttgcttcatcacgatgaagccctagttgtaatttgattgtcgagaggttacaaataggatctgtccaaccctaatgacgagttcttgtttcgagagaggccaggtcatctatcagtgttaatttttttgattgttgaggtggcctaagtctttgtaatttctacttcctgttgttgcgctgccatatcgttagaagtacatgtacaaattctgtgatagttgaattagcccccgcaaattctgtgagttcctgcaatgaatgatagtgatcaagtcccttgccgcctgatcctctctgtcttttccacgttgtagcaattcggtatagacgatttccttgtgactgaacatccaaatagcaaatccctacccaagagctgcgactaaatcatgtttttgcgtgctacag

SEQ ID NO: 114744 - DNA, 589 bp, Physcomitrella patens
  Intron number 1 from transcript Pp1s157_50V6.1 (locus Pp1s 157_50V6) derived from phytozome v7.0 (chr-ID scaffold_157 ; pos 317334 to 317922)
gatctccgaggtcgggctgctgctgctgcatccaagtaagtcgtctgtggctgtgtgtcgggggattcggccatgagtgtttttcgtttttttgctttttttcttttttaaatgtttgtgaaccgttcgagtccgtgccgaaatcggaggggctttcatggagaatagtggacccaccgttcccctgcagactcctttctgctcacagtggagattttttagaatcaattgttcttctgagcaacccgtttttatcttttctttttttctttttctgtttttcctagttctgaagatattactcaatatggtctcagacgagtgtatgtttgtgtcagggggagagagagagagagagagagagagagagatggcatttgataatttagtttcgtgcgtcttatgagagcgagtgtttgagttccctgttaattttttttgtttttgtttattttctttgtacaggctagataagtgtcgggagttattacttatattatgtggtttctgagaggtctggtttgtaatgaatcatagcaatggaaaatatgcaggttgaatctagctgatttcaatcgcgtcgcttcgg

SEQ ID NO: 114745 - DNA, 949 bp, Physcomitrella patens
  Intron number 1 from transcript Pp1s74_159V6.1 (locus Pp1s 74_159V6) derived from phytozome v7.0 (chr-ID scaffold_74; pos 999454 to 1000402)
tcagcaaggctttgagagtcaaggatcgcatatcagtgagtttctgggcatcgcctctccattgattgatttttgattttcgattttcgattttttttaatgtccaattttcaaacgcctccgactgtgtatttgatagcacttgaaaaaccgtaccgactatgcttgccatctgtcttgattggttgtttcctactactccatcttcttctttctcccagccgatggttgtcgtcgcaaaattgcatcttctattcgaattagcgcttcattcaaatggacattgcttgtgactactggccgcttaggctggttaattgctttgcatcccttaatcttttgatttgtcgattattctcaattctcgtcatggatatttttcctactgcaccgcaagtctgcgcttagttgtgatttcgtgttcaatcctttaaatcaatgtgcaagtatattcattccgggttcaggtatgtaatggcattgttgttgatattgcagaaagcaatagaatggcttattatgctaatttgtaagtgtacaaccctgaaccacgtgcttagatatactcaaacgagggaatggaaatttaatgatacactgctccgagatgggatcagaataaatttctactctacttattgtttggaagtacgtaatatcgaagaagcgggcttcctagtttggcgacttttgctctagattcagagaagtttcacgtcaatattccaatcatctttggagtgtagaaatagtttaaattaaccgccgaatagccactagaacaacatgcttaaagcgtttggctactgtatgacttttacacaaatacctcctctagcgtgttttctgcaacctttctagatgcatcttatttctaaattttgttgactttttgattctacttgcatacgtagcgtgcacgggaggagtgcattgagctccgacaaga

SEQ ID NO: 114746 - DNA, 415 bp, Physcomitrella patens
  Intron number 1 from transcript Pp1s14_237V6.1 (locus Pp1s 14_237V6) derived from phytozome v7.0 (chr-ID scaffold_14; pos 1451916 to 1452330 reverse strand)
cctacaccccttctgctccgctcccgcccatccaggtacatttcctatcgacagtttcacttttgttttacgttctttggcgcgcacatgttagtattctgtgtttcctctcaaatgctcgtgtgagtttgaaaatgtatatgagtttggaactgtgaaaaggacctctcaccagtctcattagatttactcttattatttcttggtggattgcgtcattggattgagcttccagataatgctttaagataatcatttcatgctggatctatggatttgatttgaagtaggatttttgctttgaaagtgcgtggaggacatgtattttcttcagtgcaagcagtcatccgcactcattatgttattgttgcgtggtctagaggagcttggaacaattagagacgttgtctcgaca

SEQ ID NO: 114747 - DNA, 896 bp, Physcomitrella patens
  Intron number 2 from transcript Pp1s409_56V6.1 (locus Pp1s 409_56V6) derived from phytozome v7.0 (chr-ID scaffold_409 ; pos 281555 to 282450 reverse strand)
aggtgcccgtccacgacgaacttgaccgatgccattagggtttatgtgccgagagtttaaaacactgcgcccaggcttccttcgttttttttgtagttttttttgttatggatttttggtttttattttaaattttattttcctctcattccagagtgcacatacgtagcgtgagaattttgccggaactgtttgtccatgttaggcattgggccgcggctacttttgcctttgagcacgggttagggctctaggtcgttgaatagcaaaaggttacattgatccgatttttgctaaagattgagtcgtaaattagtgatcatgtagtaggtttgtttaattttatttttttactgacaagggtttagggtttatggacttgtttgcttcatattctcatatcggattgcacggtttagggtgttgcagctttggtgtttgggccatcaattgtcagagaattgacatttctttcgttgttgaggagtttagggtttagtaacaaaggtctgagtgagaatagcaagcagctcttttgctcgtttgtcgtgagggtacaatatgtattgtaggtaggatttctcaagttaatcttcagtggatcttattgtcatgatatttactgcgtattttaagggtcaagccatctacttttccagctaaatttctgccaggggttcctttacggatagctgaaaaagtagatgacttgcatcgtctgaaaaaagagttaaatggatccgttcctattgccaattgagtagaatttgttagtttctgctgctctcagcttgactgtggtgctccatttaaactagctgcgaaggacaactatgtatttaatctctaggttatgtgcaatgttgcagaataccacctgagccgaagaagacccg

SEQ ID NO: 114748 - DNA, 923 bp, Physcomitrella patens
  Intron number 2 from transcript Pp1s206_101V6.1 (locus Pp1 s206_101V6) derived from phytozome v7.0 (chr-ID scaffold_2 06; pos 666099 to 667021)
gaaagactggtctcggtcttccaaaacaaaagaaggtattcttttcccttctttccttttgcaaatgctggtactcctcagaatggatttaatttccgttgacattggtttctcattgatgggattgggcgttagaaatagggtgagtatgatacaacacaaaaagcacgtgcgatctgttgactttatttatatctatatatatacccagatatagtttgtcccccttataattaatcccccgaaaactaataacccccaataattaatcaaagttttgggaaccgactccagcttgaatctagttatctagtgttcattatttgttgttctgataattagtaacctctgataattaacctgcccaactccttaagttctaggtttcaatagtttccttgttaggtcaatatctttttgccttcattgtctgcttagctttccagctatctagtggattactttccttgcaactatgtttttcgtggagtcaatattttagcgtgcttaaagtctgctatctcatattgtttcttttgaatgtgttttgaacttgttctatcagctttctgtttataaactaagctaggtattgagactgctctgagcataatgtttcgtgggtagttgtgatgggatcactaaatttcatcatagctttttcaggacataacggaagagatttagtttagattagaaatctatcagctgaagtcgtgcacgacttctgttctcctcatttgctaaatttatgattttcttgttaccccgcatattttgaacttaatgacgtagctgtgaagtggtcctcaactttagtagtaatgattttctgcatcatgtccaattgataatttgctatcttttaaattttctatgtatttgcagccagtatcctactctcatcttgccaggtctctcca

SEQ ID NO: 114749 - DNA, 455 bp, Physcomitrella patens
  Intron number 1 from transcript Pp1s196_53V6.1 (locus Pp1s 196_53V6) derived from phytozome v7.0 (chr-ID scaffold_196 ; pos 368529 to 368983)
agtataagtgagtggtttttccttcccgctgtggcactctgttagtatacaccattggttatcattttcaactgcttattgctcttgcgtttttgaattatcaatttatacgtgcatgcgttgcacggccttgatcccaaccgtgaatgaggttgccttctctagttctggagctaacctttgtcaagacgatctagtcataaatagtaattttctctgttagacttgttcagcccttaacattgcccgaggtatctcaaaatcaaatttctcctctgttttagacagtaaattcagtgtaacacggtttcggtcgttctgaaagcaccctcttccaattgtcacacttgcaacgtcaaatacgatgtccatgatgcaatatttgtggttgagcactgagttcatgattgttttctgcagccagaagccagatctttacgccaagcttgcggaag

SEQ ID NO: 114750 - DNA, 703 bp, Physcomitrella patens
  Intron number 1 from transcript Pp1s167_73V6.1 (locus Pp1s 167_73V6) derived from phytozome v7.0 (chr-ID scaffold_167 ; pos 335214 to 335916)
ctttggaccggaaggacccactagagttgaagcaggttcggtttagtagttttggtttgttttctcttcttcattctctggtgctttcgcggtttgaatgtcggctcctgttctgtctgcagctcctggctgtggctccttttccatactttagccaggaacttcattgaagcctgtgaaaaccgtgtgtgcttacttctgacctgaagtagttgttttctaaatttgttgcttcctttcttcctgtttcgtaaattaggtgttagtggtaacacttggtttagtgcccagattatgtgagcattttgtccttagaagcaatatttttctggtgccgatattattctgctcaatagtcatgtgcattcttgacggatgggtgcttctaaggtgtgcagtcatagtcagaatcaatcttctctgtcgttttgctatgtttagaagcgattgtttctcaatgttgttcttccatggagaccgaattaacccagtatacttcatctctctctgaaatcgtttcagtatgccaattcttaaatcatatgttgaagcatgtagcgtctgttagtgcagccgccgccattgagccaattagctaatggctaaattttttctttgccacatccacttacacggacttctgattttcatttgtgcgttttttgcaggaaaattattgactgcgaagcttgttgatcgacca

SEQ ID NO: 114751 - DNA, 522 bp, Physcomitrella patens
  Intron number 1 from transcript Pp1s50_87V6.1 (locus Pp1s5 0_87V6) derived from phytozome v7.0 (chr-ID scaffold_50; p os 844056 to 844577 reverse strand)
gtgagctttaccacaaaatgaatgcaaacagaccttgaaaacaatgctctcagctgggataaaacttaatggattttgaccccatcgtaccagaagaaagtgagaaatgtgatcactgaaacaattatatgatacaactatcaaagaagaagaagtggtggtgatagtggagtttattacagacaatcttatgctaaacaaatcaaagatcttaagtgctcaatgcaggtcatgaggcccaagttttgcacatgtctgtgatatgtgggtacttacaaatcgacacgagccatggtccacttgacgtgagagctcagtagtgtattgaactagtgctttttggccacagctgtgatctgcttcaggctataaacaagacaacagctttacagacttttgccgaatctacagtaaagcatgaacaagtctaaacgtttatctacaccggcttaaagaccgatttgcagctggagtataatgaaaaaatttcatgtttctgaaaatggcaggggagtatattct

SEQ ID NO: 114752 - DNA, 1004 bp, Physcomitrella patens
  Intron number 1 from transcript Pp1s118_79V6.1 (locus Pp1s 118_79V6) derived from phytozome v7.0 (chr-ID scaffold_118 ; pos 427720 to 428723)
tcgagggtcagttgctgtctaactctgggctgggtcttgcccatttggggttcatgatgtcgggtttagtcggcaacctgcgaatgcatacgaagggaagtgttgaagaagattttatgtggtttgagctggtgtagttgtggggtccagagggggatgttggcacagagtgacagacctcttccctggaattgttggaccgtaattgctagattccacgtgaattgctccagtgggatttgcaattccaggtgtgttgaaataggactactatcattttggtgggtcatattgaggtgtgaaatgctggcctgttgctggacccagcgttgactcaactggttgttcatgtgcagctgggatggctcacaatttgcctccgctgttaatctgagctatgtttagggtttatttactccgcatcacacaggataaatgttctctccgagtctcgctctcttttcttttctctccctctcgctccctcccgtcgtggaatactgcaatctatgtccgtagatatgagggtgagagagagattagaagcaatttggattccatgcaaagtcaaacatacatattctaacgtttttttttttttttttttttttttttttgtctatgaaagcatttacacctttctacgcatatcttggtttcagcatactacagtcgtttgatgaagcgtacactatatagtttaatctaacgctcccactcgggaattacgcccggtgatacagtcacaaacgtagaaatggtctggtggaattgattccgtacaagtggtggctccgtatgaaatctagtgtagtgcttcctattgtcaacaatcgctgtgttttatgcatttcattttgaggttgtgcgagtcaggtgctgtaagcgcacccttcttagtgaagtttcttttaattacaaatatagagaagttgttctgtaattgcagaatctttatatgtcaagcctgcttatcacggcgtgggatgttggctgtgcaggag

SEQ ID NO: 114753 - DNA, 797 bp, Physcomitrella patens
  Intron number 1 from transcript Pp1s33_44V6.1 (locus Pp1s3 3_44V6) derived from phytozome v7.0 (chr-ID scaffold_33; p os 304643 to 305439 reverse strand)
actcacagctcgagtccatcacctatactgctaaggtgaattttcgacttagagcattaataccttggaatgcttgtgtcggaccttctcatacttcattgtagaagttagggcgcgttgtggttatttcgtgtaacttcgtttatgtgggtttagggtttacgtagtgcaagaaaatattgaaggtcgctctagggcaattgttatattgagttgtcaaaccctgtattgcctgatatatgggatatgtgattggagcgctcaggactgttttcacttctggcgtagaattgcgagaatgcttatgttctctcttgtggttaccggatttaaaatctctctgatatgacatcccctctttcatcgaaggtctctcgcttgtcagtagtctttcagagtgtggagtttggcaatctactatttctagtagaatctctctatgtgaaaaagaaaaaaagccgtttatttctctattaaattacgttatttgtaggtagtttcaatgaaagcacccccggaacgctggaacaactgtgttagccacccggtagctcaaaaaaattattcatctgtaaattagctgctgatcacatggtgcgaggtttcatatctcttctaagtctctgtcttgacttaaaaattagccttcatttcattttggggggtattagaaggagttcatcagtcaatttgcatgcccgctctgtcctttcagttgtgaagtggcctcgtgttgacaggtctttggttttcgtgtttcaggacggaaaagtctctcaattagaacacgttttcat

SEQ ID NO: 114754 - DNA, 862 bp, Physcomitrella patens
  Intron number 1 from transcript Pp1s264_72V6.1 (locus Pp1s 264_72V6) derived from phytozome v7.0 (chr-ID scaffold_264 ; pos 564731 to 565592)
agcgtgaccgacactctcgtactccgtatccttaaattcctctctggtattggcgctgcagtttcattttagcaccacctcaatcgggtgttccaattttgtacacccattggtttttgttggttttatgaacggttgcatgttgcatttaggtagctggtaaggcctctcacaatcgctgtgtatcgtcaaagaaattgcgtgcctgaattgggccgcggagatggctaatttttctcgcctttttattgcttgtatgggtcgttatatctgtattaggtcatgagtctgctgcatttggatacttcgtgcttaatacgagaaagttacagagacgttgcaaatgctgagtggtgctacatgtcgagctggagaagacaacggcgacacaaggagaaatttgaatatttatttttgtttcgtacggttgtgtagcatcaccgtggttgtgaccacctttgagagagactaagttctgtgagcatttcagggatatagttggttcgaacatgggaagttgtaattccgttgaaattttagggtttggattggtgtcagtcacaacggatggtcgaaaagttttcctcttgaatttcagtaggtttttaacacatgatgctctcagacttccctgctacatgggatgcttgaattgacacttgaagaatcaaattaaagtacaataaattgggggtccaattgttacgaatagggctagttttggattaaatattggtggatgtcttctgagaactgaaacatgtgtttgtgtctttaatctcgatgaagacttttggagatctttccttgaagaatttatgatgcgtcatttttattacttaacgagacatgaagactacac

SEQ ID NO: 114755 - DNA, 540 bp, Physcomitrella patens
  Intron number 1 from transcript Pp1s454_16V6.1 (locus Pp1s 454_16V6) derived from phytozome v7.0 (chr-ID scaffold_454 ; pos 174766 to 175305)
gtgtatgattctttcaacttgcctttcgcaaattcgttaatggaatcagtatcaaagggtagatgtaaatgaagttttcctgtttaatgtcgaaatgagtatgagactggtatcttgctaacatttgcaatcctcctaatctcatccgattgtgtgtctatccgaatattacaatggcagaagctgagtgtacatttttacatggaattcagtgcaggaagatgaccggaagacggtaaattttgtcggcgttctacgaggtgcatgcatatgtcaagtacatgcagcttctaacatgcgatttgaagtcgttacgagtctgggactagatttgtgcaagggacacgcactgtcactaatgacaaagacggagaccattttgtttgtgatgaaatcagtcagcataaacaactgatcctttcgcacataacttcaatcctttcactcttgcacacaatttcaatgagttttctttttccaactgggtacaaaaattggagtcgaggatctctaactcgaacattttgagcactgagccgt

SEQ ID NO: 114756 - DNA, 365 bp, Physcomitrella patens
  Intron number 1 from transcript Pp1s259_46V6.2 (locus Pp1s 259_46V6) derived from phytozome v7.0 (chr-ID scaffold_259 ; pos 228100 to 228464 reverse strand)
tcttccaactacaaacgtaatcattcttatgtgaaatggattttgtgctactgatttaataggaattttgagtgttaacttgttgcattaggtgagtttgtgcaaagatttagctgttcactcatatatttggtgagcagaaatatcattgttaggtatggcattgagtaacttggtgccaaatgtgcatgttgcagttcatattttaattatgaattattttgactttaatgatgtaagggccgttgttgaagttatttacttgaggcgatttgttcgcccaattatcatgttttgctaagtacgtgttgtctttgtttttcttttcagatctggccctaaagttcgaagcattggtcactggc

SEQ ID NO: 114757 - DNA, 659 bp, Physcomitrella patens
  Intron number 1 from transcript Pp1s465_18V6.1 (locus Pp1s 465_18V6) derived from phytozome v7.0 (chr-ID scaffold_465 ; pos 90443 to 91101)
gaccttgcattgaaggtactttggcgaattgaatccagttatctactcattttttcactttctccttttcgatgctttttgaattaatgtgtcgaaagaactgaatttatgttgcaatttgcaatgggtttcgttttcaggaattgctcacagctgaatcctgtttccgtgtgtctatttttgtgactggatgatagtggttagtggaatgatttttgacctgtattgcttgttagaatctggtgttggatatgaatggtatgccatagagagcccctggcttgtgagaacgatttgtgaatattgcctgcattgtagtgtacttctggttctctgtttcaattttttttttttcccttttaatgaaagcctgtaacttagcttgtaagaatgaagaggctttgaaaactgtaatggagattgtggcaagagtcgtgcatctcgtaatttctggtgatgaaccaatttggaattgcctctgtgacatcgaagaatatgtgaatttacttagtgctaattgaatctaaagtttatgtttggattttaactcggtattccaagaatctatatcttcgtgacgtctccagacgaggtcaggctcgacagtatgcactgtacggccatttctttaattactgaatgaattgcaggcaggtacg

SEQ ID NO: 114758 - DNA, 911 bp, Physcomitrella patens
  Intron number 1 from transcript Pp1s26_36V6.1 (locus Pp1s2 6_36V6) derived from phytozome v7.0 (chr-ID scaffold_26; p os 307868 to 308778 reverse strand)
agcgggtacgtgtggtagtcaatttcggtggagagtgtgtgtgcggaggtattttactagtgttgatgcgtcgggactggtgcgtaatgttggtcccttttttttggggaggcgacggggtgcgaagttcagtggctttgatctcgaacccttgttggattcggaggcattttatgtttcagggattgattgctctggtggattcgcgaggaatgtgatttggagcagatattcagttgtttttagaggtccatgcaatctcgctaaattataggtatttgagttcgagttggcaaggacaatctggagaagagaatctcctgcttttgagagccagaggatttcgtacagattgtaattggagtaatctatttgactcaagcgcctttggtcatgaagttggaagcagtgatcggtattgccttcggttcttcttcgattcagtcgtctctcctgctggacatgctattctctctgttatccccatcgaaaccttccatatttctaaacatttggggaccagctggctcttgcctcgcctgcgagttcttgaatgtagtctccttgcacgttttgttcgggataattggaatttattattttgctttagttgcagagggcagataattgaccgaactagctgctctgattcacctcctttcgtaagctctttaggtagacgtaagaggctttagtggaaacttttcgacatcctttgcagcgacctggaattcctctgccctcgcagatattcagtttcataagccagctttaatgtaaggatttttcttgaggtagcctgtatggcatcaaatgtcatggattgtcgaacccaagacttttcacacgcggtatgttgcaattttgccatttgtgttcccagggcttgtctgtatacgagaagaagaagt

SEQ ID NO: 114759 - DNA, 987 bp, Physcomitrella patens
  Intron number 1 from transcript Pp1s179_61V6.1 (locus Pp1s 179_61V6) derived from phytozome v7.0 (chr-ID scaffold_179 ; pos 869220 to 870206 reverse strand)
agtttctggagagcctgttgtcatttggacccgaggtcagcataaacttccccaaaacgtttgtcttaccaatttattcttctcataatagataaatccacaaactgattcatctattatgaataaaggcagtgagcttgaaagcttgggttgcagcgtaaccctgatagtatcataaatgacctaaaattgtagtgtatttttctccttcaatctcaataaaaactgaattgggttgggattatcaagggaggaaggagaagaagcgagaatgatccaaccattcctaagagtacagagtaaggattctgataggacgtggcccacgtattattcttggttgtctaacatagtgcaagtctgtagcatggtttgactttcataactatttacaaacgattcgaataaaaccgagaaataatatttgcggattggaatcttcagattacgaatcaaatataaagtgggaaatattctatttttattatttcaagggcaacaaatgaatgttccacgacaagcatctaaaatgttgcgtaaaatatgtgtcgttggctgggtttgtttgacaactcgtccattactttattgaggtactggatgacccattcggataacttcctcctcttcctcctcctttttttttttttttttttttttatttcttccaacttcttcaaacaccacgtcttacaaacacttgataggtgccgctgtggatttcaaagtgttttctaaaatatgtttctgagacatcggaaattggacaccgcctgacgagacttgcgaggcaggcaaaggcgaataggtttgtcggtggtataacgttagcggtgtccacgatcgaatggacacgccaagtcaaataaggtggtcgtggttcgcataacgaggggggtatgatgagccctgatattgttgttaaatgcacgacttttcaaacgtaacacaggaccacagtcgagatcttccgtctactttcgggat

SEQ ID NO: 114760 - DNA, 744 bp, Physcomitrella patens
  Intron number 1 from transcript Pp1s509_22V6.2 (locus Pp1s 509_22V6) derived from phytozome v7.0 (chr-ID scaffold_509 ; pos 107263 to 108006 reverse strand)
gtgacccctgccgaaattgacgagcttgctaagaagtatggtctttttgctcctcgttttaggattcaatacagcgtgttcctcccgacggtgaatgagttgtcggaggattgcttttcgtgagttgtgtaggttttgggaacagtttgtttctcaaaaaacaaattcctttgaattttgccgtgctacaggtgggtattttggctgtagtttcttcctgactcagaacttggattttctgggcacctaggtggagcaccttggtggataatgctatctcttagggtgtgaattacggagtttattgtctggttgactccttctccgggttttctcgtttttgcgtcctagcttgcgcagctctctctctttgtcatctttaatttgaacaaagaaattaggatgcactgtctctgggaagtgggtgattcccatttcgcaatgatgaagccattgcgaaggtttcattatccttgggccatatagttttaatagtttgaaacacgtgggtttaaggcttatctcccacctttttcaaactacgttcaccatagtttaggtacctttcaaaatgggataagattcaggtgagacaccagttagggagcctcaattttacttggatcatgcttcttaagaacctagccacgactctccactggtataattgaaaatcttttgggcatctaattttgaacatgccaaagagacctgattgcaacgttatgttgaatgtttgcaggt

SEQ ID NO: 114761 - DNA, 368 bp, Physcomitrella patens
  Intron number 3 from transcript Pp1s214_37V6.1 (locus Pp1s 214_37V6) derived from phytozome v7.0 (chr-ID scaffold_214 ; pos 250809 to 251176 reverse strand)
tggataggaacgacccgaattacgacagtgaagaggtttgcagtttacttctcacaaactttcacattgggacgaagtgcacgatttctaagcggctgtgtttgtttctggattttgatacttgagttagaaatatttgagatgtggagtatttgacttaggaagtatacttttgtctatcaactgctagttgtaaaatgagccattgttgctaggggtttcccaaacgaatgcttcttaagtatctcttctttgggtaagatctttgtgatgttggaggttacttgatcctggctgaaattattattttcttttttgatgttttggattcaggagccctatcaactggtgggagcaccagtttcgca

SEQ ID NO: 114762 - DNA, 990 bp, Physcomitrella patens
  Intron number 1 from transcript Pp1s214_37V6.1 (locus Pp1s 214_37V6) derived from phytozome v7.0 (chr-ID scaffold_214 ; pos 251724 to 252713 reverse strand)
gccagccctccctcctgcttcggcttcattccattgtgagcattgttttgaaaaagaaaacattttttgatttttttaataatttgctctgttttggatatttgtggagggtcggtatcgattgatgaatttttgttcctctggagttcaagtgatgttggttttggatgctgtgaggtggagctcgggcgggggtacgtcacaatgtgggcgtttggtttcttctttttggtgtttggttttgtttttttcccgcgagctggggctgagtctgtatggtgctcttctgttttttgatgcgtaacctgaggtgattctttagtctacgaattcgtattgggtttggtttggtttgtttttttttggtttttggttttttttttttattttgtgtgtgtatgtgtcgttgtagggttttggacgagttcgtttgtaacagagtgcgggtcggttttggtcgtatcattgcgaacttaagctcagatttgtgttcaatgcgttcaccctaattacattgctgatcgggtgaaagatttgcatcacacctgcgctggcattgatgacattgttgtgatagttttgctactttttgtgagtaaaagtggccttgtgccctggatctgacctttctgatactgttggagagtagggtaacccgctaaccagtggattattcgtcgtcgctgtggaatgacgatagtgcgcctttcgcagttgagctttgccgtagagtgtgatttctagggctttgtcaaacatactcatctggcgcttgcatccatcagctacccttgttgagaagccaattcttttgagtgtggtcgttggtagttgactagatggatgttcataattaattccttaaaccccacggaagtatgcgaaacctgcttatgaaacaatttgaactggaacctcttatttgcacacgtctcacttggccctttcttttcaggttggtgaagccgagggaaacactgtttgcaacac

SEQ ID NO: 114763 - DNA, 694 bp, Physcomitrella patens
  Intron number 1 from transcript Pp1s29_81V6.1 (locus Pp1s2 9_81V6) derived from phytozome v7.0 (chr-ID scaffold_29; p os 569780 to 570473 reverse strand)
aaactcaggcttagcaggtgagaacttcaacaccaccagcatagcattgacattttttactgtgtatagacatgtgaagctctttcatcaatgtgctgtgagcttttatagttgatagatatattttgactcataatgtggtactcgagataaatgcccctcaattatttccattctggaaatacccatgagtcccactacatggcttgaaatgagctgtcaggagtgaatggcaagcaattttcctaggtttcagcttcacataggaggaaagagattcattgagttttacctttataattgctgaactttgagatacataatctgattgcctgtccaatatagaagcaatgcggataagaataaccttttaaagtatgcccacaaaatagtttttcacaagaaaaggctgtttaagtacactgcagtttgtttctgtttttgtttgtttgtttttaagtatttctttgtgttgttttgtttgtttgtttgttttttttttttttaagtatttctttgtgttgttttgtttgtttgtttgtttttttgttttttaagtatttctttgtgttgttttgtttgtttgtttgtttgtttttttttaagtatttctttgtgttgttttgtttgtttttgacacatttttttgtcaatggtagaagtgttcagtcccctttaaaatcactgtggcaat

SEQ ID NO: 114764 - DNA, 848 bp, Physcomitrella patens
  Intron number 1 from transcript Pp1s65_251V6.1 (locus Pp1s 65_251V6) derived from phytozome v7.0 (chr-ID scaffold_65; pos 1483565 to 1484412 reverse strand)
ttgtctccaaggtttatttcctgtcagctcttacctattgctttgttttttcagagtttccttttcattttgatgtagtttcgctagcctgtttattcgttaattatttcaaaatatttatcatgaagctgctcttgaagaattacaagtaaaggccaatgttgtccaattcgaggagatttccttcatcgtgacttccttaagcctcctatatgctgtgacgtaatacaaaaaatgttggtggtaggtaaacgttttggcaattctttaagtccatacaagtcacatgcatagaaactctgcggaaatcgtattattttgagaatttgcttgatatagtgctctcatacttcctctatttactcgaatgaagagtctgttaataaaacccaacgcttttcaacatcagcataattattagtctatatgttattgtatattataatctcacagcgtgagactaacacgtagtacgtactattcttttcggaaggcccatttttgaagtgtacaacagtgttggcgacagttagtacatttatgtatacggtgaaagaattcaccaacttcaatgtgcgtcctgtcgatttggacgtattttaaatgcttattggtttcatggagcagccagtgaagagaatcgactgtaggtcatgtctcctaaaccgagaccgtgaccctcaaataatacagggttgaccaccgattgcgatcaaggcctgtcgacctcaagactgcgcgtttcctgattcattctatgtggcctttttacatcgtttcctgaatgcacattactaacaataatacttgaattttatgtaggttgaaaagcttctacttgagctgca

SEQ ID NO: 114765 - DNA, 686 bp, Physcomitrella patens
  Intron number 2 from transcript Pp1s14_135V6.1 (locus Pp1s 14_135V6) derived from phytozome v7.0 (chr-ID scaffold_14; pos 877974 to 878659)
ttcgtgcacttcaagaatgtaatgttctccctcttctgatttattctctgatccttgtttctctgatgaatgcgaaggtggcctggccacatgtatctaaaccaacttgtagataaatcggggacagtttcggagcacgtggattattccacagctgctgcggcggtttttactaattttcttccatgaatcgagatcagggatattcatcactagttgatgactagatatcaattgtagtggtagaaactatggtagtttaatgggactatttgattttgtaatgtcagtaatgcttcatatagaggcgattaagggttgacattcgaagcgatgcaagtgaaggtaaagacttgaattaactggaaggtcagtggtcatgaaacattttgctgaagagctttgaaatcaaagcgggtttccgtcagaatgaaaatgtggccgactactgtcgccagaatgtaacggttagtgaatcggtattttaatggtgtcgaatggagtcaaatgatatctttttcgaggcatggctattttggattttgaggctctgaagaagacgtgccacggagtcagttttcttgtgtttggttagaaccttgaatacatatattcctgtaaggtgcgttagagttttgttgcaaacttcagtatactgctacaaattgcatcgaagaagttgtcaa

SEQ ID NO: 114766 - DNA, 298 bp, Physcomitrella patens
  Intron number 1 from transcript Pp1s17_12V6.1 (locus Pp1s1 7_12V6) derived from phytozome v7.0 (chr-ID scaffold_17; p os 62078 to 62375)
ggtgggagtacctgcggcgggtcaagttagtgtttctgtcctttcttttatttttttaatcactacatattgatctttgtttgtcttttttctgcatcttattgccatgttttggatgcacctgaagtaattctggtttgcagatttgcttgcattggtacttcttcagtttgagttctagggttcgctgctcgtagaccgaaattttcaatgaatcgtataagaagtgttaagattttggttattaaattatatatgcttacgaatgtacgtgttctaatattctattggttaatag

SEQ ID NO: 114767 - DNA, 379 bp, Physcomitrella patens
  Intron number 2 from transcript Pp1s121_98V6.1 (locus Pp1s 121_98V6) derived from phytozome v7.0 (chr-ID scaffold_121 ; pos 688921 to 689299)
gacatttagtctctcaaaacaaacggaggttccaggtatcgacctctttctttctttactaagtaactaaaatttgcctcacaccgaaaacgttctttaatcgcaacagtgaaaggggacgaatctaattttctcgactgttgctcttttttgtttttgaatatttttttataaacgaatattagcactctttgatcctccctttcttatcttttaagattgcgccagaagcatcaaattgaggtctatatgggcatattttgaatcattttcgttcaatcccatgactgaacatgttaaactcgtcttcgcttggagatctgttcaattctaatttatacatgatcgatcctatcaggaaggaggattcgacttagat

SEQ ID NO: 114768 - DNA, 804 bp, Physcomitrella patens
  Intron number 1 from transcript Pp1s118_176V6.1 (locus Pp1 s118_176V6) derived from phytozome v7.0 (chr-ID scaffold_1 18; pos 838589 to 839392)
attcttcctgttccgctcagactttctcccttcgggtgcgtttcgtatgccctaattcacaacacccttgcgatgccactttctacgagtgcctcctggaccgaagccttgctctctgtatgaagttagagggctggctttgttcagtgcggagtggtttcgtgggccaggaaaataaaacgagagagtcgtatcggttttttttttttttttttttttttttttttttattcgtttgtagtgtggtttagtttttttctaggaggtgttggccgtggacaattttttaagtggctggagaaggctcgttaagatgagttaataaccggtagtttttgtttatttaaaatttgggcgttagttgaagcgtgtcgctgttggctgtgctaggattttttttttgtaatattaattgtcttgagatatcattcattgaataaataaataatttgtgcgcagagagaagttgtcgtgtgttttcagtggttcttggttggttcgttcttcaacacagggtttagggttgtctgatatcttcattttgatgtcgccttttgcttcgtcttttgcctcgtcttcacgcatgttcggtgataagtaaatcacttccggtacagggggttttgcaaatgtgttgccgttgttttatgtttcattttaattttgataaatgtggaatgaagagagcatatagggagtgctcctataactctgtcaggcttctttggaggctatgcttgtgctggagttccaaattgattacatgttgcagttgaacttgccagaggtgtgcactgctatcgc

SEQ ID NO: 114769 - DNA, 631 bp, Physcomitrella patens
  Intron number 2 from transcript Pp1s118_176V6.1 (locus Pp1 s118_176V6) derived from phytozome v7.0 (chr-ID scaffold_1 18; pos 839598 to 840228)
acctccagaagtcgtagtcctcctgcaaaatcaaggtaatctaaattggattctaactaaaataaaggcatatggcgctagcgtattaattttttgctatattagttgaaaatcttactggtaggcgaagcgaggagttgaacaattctgctctataccaaaatggttgtcatggtacagtggagaaagcttttctaggtttcatatcttactttagaaagttcaaagcaagaatgtgaatcagtaaattattagaggtttttatcattgatttggaaattataattgcttttgttttttatgtgcttttttacttcaagatacattatcatatgttctaaagataattcagcaactcactcctctgtgttttcatctcattggaatattaaaactagaaaataaaaagtccaaagcccatttattttgatcgcggtttgccccttttctttgtgaaggtatccacgcatcaagtcgtatccatttactctgtatgctaagttacggcgttagtatttccagcaaatatgactcctcttccatactttttttcccctctctttctaatttttacaactttcattgttaatgtcaatactgttacaatttttattatttttcctgtgcagtg

SEQ ID NO: 114770 - DNA, 923 bp, Physcomitrella patens
  Intron number 1 from transcript Pp1s277_44V6.1 (locus Pp1s 277_44V6) derived from phytozome v7.0 (chr-ID scaffold_277 ; pos 237498 to 238420)
cgattcctgctccctcgggtggtgccgaattggaggtaatctctaaccctctctccgttttcttttgccgacaaatttctatttaaatcaatgcttaagacttggtctcaaattctgccgtcctcgttgcattgatcacggaataatcagaattaaacaattctcatgttatcttcgaggtttttgtcatgttggataaaaatggtagtagctctcacacacacacacactctctctttctctctctcactattagttctgggttagaaaatctggagaggctcatgaaaatcgtttggaggtttttgaatattgtccaattgtatgataatccactattatgttagaagccttgttgtttctaaggtttaaataattacatgtactagaaacctttggtgagtaaaatggtcatttcacgcggttcttccaaacattcaaacccttccacgactaaactcaagtttcagttagaggcccgttggtcgacagaatcgcctttgtttgtatgttctccctttgccctgttatttattattaggaattcgaaccgaagaagagagattggtttgtgttcactgaatatctttcgtcgaagtctgttcacaaatattcaaagaatcaggttcgacttggctattttccagattggtcagggtttttcatgcctatcacaaactcaagaattatggtcgtcttgaactcccaacttgagtccgtaacgatcatcagtccattgccctcgtagaacagcatttgaggaaatttgcgttgatatctcccagcggttagaattgagctcttagatcattgagtatttcgagagtaacatttatcttgcatcatgttgcttcccgtaacttcaagggataaatgtcttgacggcaggcaaagaaggcgatcacggaacgagactggctgat

SEQ ID NO: 114771 - DNA, 804 bp, Physcomitrella patens
  Intron number 1 from transcript Pp1s97_13V6.2 (locus Pp1s9 7_13V6) derived from phytozome v7.0 (chr-ID scaffold_97; p os 128881 to 129684 reverse strand)
gagagttggtgtgctacatagtaggctgcgattgggtgagttgagggactgttttctttccttcgtacttggcagcttgctgctcagttgaaatggtgaggtgagggctgagttctaattttattatactgtgctcggtgttgagcttcacagttttggtttaggttaattttgggggaacgtaattgtaaagccgtctggagctgtcgagggattttacattttaatttatttatttatttattcctccactgagatttttatttatttattggatgtatcttctcagatagtgtgagatgcagttcaggactcgttgctgtttgagatttgaagagcgcggtctactttgtttggggaaagagtgttttttcttgcttcgacttggtttgataggggattgtgttacagtgaacatcttgcatttccacctttgttgcttgttttatacgtgatgattctatactttgcgtagtctatatttcatctgcattatgtcctctttctaagtccaatcttaaagtaggcggaggtttgacaggcggctctaatgttacacacgtgtggggtgtgatattatgtgaatgctgagaaacacttgggtatgtaatctgtaatttgaatcttcgagggaggtgattgagcaccaattttttatgcgttgttaccgagcccgttacttttcatgcatcacttcaggtttatgttgttggagtattttctttcggttagagccttatattttcagtttgtgttggtgagactacagtgtgagcctgcacattttgttgcatcgaaaaagaa

SEQ ID NO: 114772 - DNA, 720 bp, Physcomitrella patens
  Intron number 1 from transcript Pp1s20_370V6.2 (locus Pp1s 20_370V6) derived from phytozome v7.0 (chr-ID scaffold_20; pos 2511456 to 2512175)
ccgtcaagcaacatttcatcgccacttgtgagcaggtggaattttttgagcatgaaaggcttactaatttcttgaactggagtgagtcttcgtttatcgtcttgtgatgtgtctgtttgtcatattgcctcgattctgtgctttcagcgggtctgccctacttggagtatcttgtaaaacgaggattctgaaaatttcggtaggaactatgttgtttggtgattatttcgaaaagttgcatcttcagcaggcaatttgcgttgcgctgtacagaggcatatcataatcgctagataggcggaattttgcgaagcaattgatttcatttctgtttcaattcgtgatggcctgatgcagacgcccaacaatgagagagatttttaagtgagctcatttttagtcctgttactagtgaagttttcgccgttgtgtttagtgctcgttcacagggtttttgatttagtcatggcagttaccgcctcgtcaagacaaagtttttgagacaatttggacctgaagcctctacagcaccactatagagatgatggttttttttcttttctagttttagttcatcgtctctcaaatggaatattgggaatttgacgacgtaagaagtcctttgggacacctcgttttataaataaagaaaatcgctgaaaagttgcggagaactatgtctcttatgacgactgactcacttttgtggcttttgtaggc

SEQ ID NO: 114773 - DNA, 500 bp, Physcomitrella patens
  Intron number 1 from transcript Pp1s144_52V6.1 (locus Pp1s 144_52V6) derived from phytozome v7.0 (chr-ID scaffold_144 ; pos 369686 to 370185)
aaacacagtcggatcagcagggcttcttgctcggagtaagtatcttagcttccaccctcgcttctctcatcctcttcttctgctacattttagggtttctgaggttcgggttggcttgatggagttgatctgtagaggaaatgtttttgagggttaaattgctcatttactggttttcgttcgcaggagttgagtcgtttacagaatttaattcaagcggcattttatttttgattttgctcttgaaattttgatagcgtgtgtgattttttctcaactaatgtgtaatccaattttcttttataaattcaaatgctaggtctactgctgatttccttgagcaggcgtatcagtttatccatttgaacgagggttttgtttctggcatcatcatttggcattatcttgggtggtgctgctgttgttcaatgttgcctgtttgagaggtttagcacgattaaattgctgattcttgcggtcgtggtgcaccatttgaagca

SEQ ID NO: 114774 - DNA, 1048 bp, Physcomitrella patens
  Intron number 1 from transcript Pp1s35_153V6.1 (locus Pp1s 35_153V6) derived from phytozome v7.0 (chr-ID scaffold_35; pos 790409 to 791456)
tttggcgagtgtctggtttatcaaccacttctccggtgagtttgaccgtgcaagttttgcaggctttggttcggcgcgtgtacagtgaaggcaactgtttattctattctttctgtcaagtcatttgaattcgcgtctgcatgaattctgtggaaatggcttgatttctccggtcgcgtggccgctttttacgcatggatgtggcaaccaaatgtagtcattaaagcagattttgctgatatattaaatcgtggaaaaagttagcttacatttggcgtatggttaggatgaaggaacgaattgtgcaaggcttagagcctagcggcccactagttatgttgcttactctctgtccaagaagcgccataagtgggggttttctttcggagctcattgaagtgtgatattacatgtaaaacgttatgcttgtgaggagattggtagtgcgcctccatcttcacaagcaatgcatccgttttctgacgtctgaagtgtgatcttttcttttcatttcttctttttgtacttgacgtatactgaggtacctgtttgtccgagtgctgatacacaactcaaaatgttgagcataaaatgagaatttctccttgttctgggaggcttcaagtggtgccacctaaaaaattgccatatctctacagcatacaaagctgtgatctcacttgataattctgtccctaactgtcttcatcgtagtacttattgcccttacaaatcatgaactgcttaccaggaactttgctacttagatcagaaattcgggcactggcgttaagtgaagtatctgttaagcgaaactctgagttgttatgagatgtgtagcttctgatgatatgatagatgatttcaggtcttttgttcctatcttgaataggaagtagcgtgtagtaaactcacaatcagagcgtgttgcaatggagtacttgcttgcacatttgcattatctgctggccattcgtggttatttttgatactagtgctgatcagtgggtgtgcctatccgtacaggttgagtcggttcttgataaag

SEQ ID NO: 114775 - DNA, 249 bp, Physcomitrella patens
  Intron number 2 from transcript Pp1s231_34V6.2 (locus Pp1s 231_34V6) derived from phytozome v7.0 (chr-ID scaffold_231 ; pos 291610 to 291858 reverse strand)
gctagcgattcatttggaagtaagatattttccttgccgtttacgatttgattcttcctcatattatgcaaaccttaggggttttgcagtttatttcaactttgattgcttttttaggcggagtagaattcagaagttcgaatcgtgctgtcaaactaaatgagtgcttatattattttttattttttattattttcttattggatttttccaggaaggattcctttctcatatcttgaggatatccac

SEQ ID NO: 114776 - DNA, 502 bp, Physcomitrella patens
  Intron number 1 from transcript Pp1s13_132V6.1 (locus Pp1s 13_132V6) derived from phytozome v7.0 (chr-ID scaffold_13; pos 957997 to 958498 reverse strand)
tgtggagaacgattatccaattgtcgcgcgtatctgtacgtggaactatcaactccccccccccttttaatactgattcaatgcacgccctagtacacgcttttgtactctgtccaatttgacgctgcaacgcttattcctgtcatagagaagttttttttttttttctttttctttttttcgactacagccggctctttgcttaccactttcgacactgtaaggacttcatatctcaatatttttcagttgactgaagcaagtaagcaataaggtggattgcgaagtgtagttatggattttattatcatctagctttgtagttgaaggcgcctgagttcaaggttgtatcatctttttgatatcattcatacatttgtaattaagagtatgcaacttaagcttcatcttctttttcttcttctcctccatattcacatataaaaagtgtagttcaaattattcttatgtaatattttcttgtttgcaacagtatttgagt

SEQ ID NO: 114777 - DNA, 568 bp, Physcomitrella patens
  Intron number 2 from transcript Pp1s161_90V6.1 (locus Pp1s 161_90V6) derived from phytozome v7.0 (chr-ID scaffold_161 ; pos 541981 to 542548 reverse strand)
cagcctcaattcaagctccagtgcaaagcatcaatgtgagtagccctactgatggttcgctggttcgactagagcagaacgcaatttgattataatatacgagtctgatgaagtcggttcactccgacaacctcatgttcaatgatcggaagatttcctgactgccaggaaaagaaaattgtcaccaacatagtgagtcggcggatcgaacttaaagctgccatgatgcctaatcgcagcaatattactcggatctctctgtccaaccaccagagactcgttaataaacaaaaacagcattacactacggagatgacatcgtcaaattcggactcttccctgttttagtaacaagattcacaaaatgtaaccaacttctgttctgaaaacagtaaacaaaccaacacaaactggtgttttcgtcaatcccatacctgaaattttcataccgatctttagtgaaaaatccagcccattacacgcacaaaaatcccgacatgtaataaactaactgaatctattaatgcacacagacagattctccgaagtacgtacccgagcatctagt

SEQ ID NO: 114778 - DNA, 817 bp, Physcomitrella patens
  Intron number 1 from transcript Pp1s240_56V6.1 (locus Pp1s 240_56V6) derived from phytozome v7.0 (chr-ID scaffold_240 ; pos 249141 to 249957 reverse strand)
accgttgctagtacatttgtgggctgtctttctgggtatgactgcgttgagttgagtcgaaatccctttgaaagttcgttttctttgcgcttttgcttcatttctgagtgcgagtaacttgaaaagctaatgttaaagggatagaatcctggcgtgcgagaaattgggttcttgactcaattctgtggtgagacggtcgaatttcgttagagggacgcttagttttttcgagagaaaggggttctaatctcttgaagctttgaattgttggaagtgaaccctcctctagatactagttagtagtctcagctcttgtgtcctatgaatgtgtgttgacccacttaaaggagcgcgaatagatatacttatatgcacgccgttatggtttaccgtaagctgtttgatttaagcgaacggaatgtgaatgtatttgaagaggacaatgagatgctccacgagacagcagtttgtgtcggtttccgcttacgtacattccaattttatcggtgaaataatgtagtaaatctagaaaatcgatactgaacaatctattcgggtactccagttgtcctcatgtaatcgctgtgggtggtttgtaatgacaaaaattaactatgcttaatgttgttagattgtagtggcacggctaatggcacacttggagagttcgagaggtcgctctggaattgttgctagcgtaggattcgatagcagctcggaatttgtgatatttttaattttgtaattcatttattttgtgaatctttgcattacacgtgcagtgtggggaaattgacgactggagtgaagggtttgt

SEQ ID NO: 114779 - DNA, 517 bp, Physcomitrella patens
  Intron number 1 from transcript Pp1s36_230V6.3 (locus Pp1s 36_230V6) derived from phytozome v7.0 (chr-ID scaffold_36; pos 1485778 to 1486294 reverse strand)
cacggaaggaccttttcgtgtaatgccttgcattctcttgattgggtcttgtgtttttgttggggggcatgttgcgattggtaatagtttttgctgcgaagagttgctttaatggtcgcgcctttgcagcatttttttgtgtgtgcatgtgaggattgaagaagtctctcggtttcagttgcagtgtctgtttgaacctgctttgagggtctgaggtgggcgcaatcgactatcggacttgtatttggtttccatgacgtgtgctaggatgattgtgtacaatattgttcaggattttgattatgcgaagaaagtttttcctgaacgagaatcttcatgagggattaagaagaatccttcaagattttccggcagagttatgactagtcaatttgaattattttgtggccaattttgataggtgtcttcctgatcaacatctttaggttgatgagcgttttggattgtactagttttaatatcatcttcttttccttctcttttgtacaggtgaagt

SEQ ID NO: 114780 - DNA, 486 bp, Physcomitrella patens
  Intron number 1 from transcript Pp1s135_24V6.1 (locus Pp1s 135_24V6) derived from phytozome v7.0 (chr-ID scaffold_135 ; pos 198266 to 198751)
acacaggtgtcgcttttctcttaagaactcagtgtgaggagctgcgctttcgcgttgttattctcttccgtggactagaagatgtttacacagattaagggcaacacctgcttgtcggatcccatcaatgtaaaaatgtatcgacatgcgaatttctggatacatctagggtagggtaggctttgatttgattcgatgcatttggaagctacacttctttcttctgggagaaattgagggtgtgctaattacaggcatgcgcaattcattggtacaatctagtgggtttagggtttatgagacacatgcgtctcagttgaatagcttattcatttgtttttgtaaggcggaatcggatgtgtgctttatattgaaagcattcatagatatgaccctgttttcattagtctgcaatcagtgacgaactcgtcgttgtttatcattaatccaggattaacgaagattcgatcgttgttattggcacga

SEQ ID NO: 114781 - DNA, 901 bp, Physcomitrella patens
  Intron number 2 from transcript Pp1s167_52V6.3 (locus Pp1s 167_52V6) derived from phytozome v7.0 (chr-ID scaffold_167 ; pos 258251 to 259151 reverse strand)
cctctctcagggctcacatttgccattaaggacatgtaagtatcgaattccaagacttgtaagatggcttgctattgaaacatagtagctttacttctcccatcataaagttccagcgcttcgttattgcgagattgcttcgcagtgtactcattggggtttaacgccttccttttgtgccttttctgaatcttggaggctgaagatttgcaattcattagcggtattgtgttccgaaaattgtttatgatcttgcctcatctcttcatttaatccttcatttctgcctttctctacatgtacactgactggttttgatgcagttatgtacagttaaaattatttcttctctatgatctctccttttggattcccttatcaacgtaatgaagaagagcttttggattttgtataatcagaacctttgatgcttggaaatagtcgaaagtttgtttgtaagctcgatttttaaacggattaatcataatattcttagaaggcactaaaacattatagatttggaagaccaaatgagagcaattaggctgggaactgggtaatgccagattagtttgattactggacataagtggtctatttacacaaataacgtgggttcttttggcctttaaatttttttgcatctaatgttgacgcgacttctggtaggagtttagattgctgagcattcttttattgcaagtttcctggttctggaagttgtcgagaatcttccaagtatctcaattattagttgacagctagaattctccacctcttggcagcccgttgctgatcaataaaaataacaggttagcaatcagtcttgtacttctctaactcgacattggtttgatgggggacagattcgatatagagggatttgtcacaggttttggta

SEQ ID NO: 114782 - DNA, 239 bp, Physcomitrella patens
  Intron number 2 from transcript Pp1s161_125V6.1 (locus Pp1 s161_125V6) derived from phytozome v7.0 (chr-ID scaffold_1 61; pos 975853 to 976091 reverse strand)
caaggtctcttccttgagttttgtttttcttccgagccaagatttaatgtatgtttatggacaatcccatctctcaaagtgtaattccatgagcgatgcaattgaaaactgtgttgaaagaaactgccagcgtttagggtacagcagtcggttgaattcactttaatggtctatgtcagctgctgtgacgataaaggcaattgtataatcatgatgattcggatgtgctcgcttcacag

SEQ ID NO: 114783 - DNA, 712 bp, Physcomitrella patens
  Intron number 2 from transcript Pp1s215_103V6.1 (locus Pp1 s215_103V6) derived from phytozome v7.0 (chr-ID scaffold_2 15; pos 839275 to 839986)
tcaatcgcttgtaagcactgggctcctttgtttacttgacctaggctgacgtcgtttttttcttgtttctgattgtatattgtatgaatgcaaacgagattttagtttctttgcctttgaggtacagcgagcttatgccctggtgctgcagttgtacacggcctttttattttttttgcccacctcggtgaaccgtgagaatttggcagcggctgtttgtttaccgattattggctcgaacctgtgctttcgactaacttgacctcgcttccctcaagttttctgtgtttattttgtttccgatcgataaacttcattgcgtatttggtcccctgaatgcaaatgttcagggtttcggggtgtggggtggttttcaacacccatactttcaccttcctgtaatcctctggcagtattagtgtagtaagtttagtctatggaaacttaatggtggggatgtgaaattttaatggggttttgacttttcgacaccagataaccgtgtgaatacaatacttcaagcgcttagagtcagataatggcttttcctctctcctctgtaaaccttcttggatgacgaaggcaccttgaagtatttgatactatcaatacgttttgtaattcatgggatgttaattccttttcactgactcccaccatacctgtgttgctcgtgacagcgagtgggccgtgaacattcagagggacagtt

SEQ ID NO: 114784 - DNA, 977 bp, Physcomitrella patens
  Intron number 1 from transcript Pp1s242_11V6.1 (locus Pp1s 242_11V6) derived from phytozome v7.0 (chr-ID scaffold_242 ; pos 138381 to 139357)
acggcggtggtatgcattcgttacctactcattcattgtgaaatggacacctctcatgtcaggctctagaaacagtgcaagctcctttctaccttcataactagcttgaatcccgctactgaaaaatggagtggcaaatgtcctgctctcttttataagttcattgaatacggaattacctctagctgattttcaaggccgacgttgttctgcttttcagatcttccgtgagctatattggcttagtagtttgtaaatgagaatagagtaaggtgctgctgctgaagcctctgttggaagagttattcacacctgctcacatttcagaaattgagtccgaggcttttcgatttaggatctatttggttccctatcgtttcttccgtcagtgctgaagaaatctcgatcttcccaatccagatctgacaggaatctcggactatgagattttttgtgctcttgaggctttcaaggtgtctacgtctcttaccactttccaagtgtgtcagagagagcgatggcctacataatacattcgtatacgattagttaaggaattcatcgcctgaatctatcaaataggatccacatgtaactcttagacgtttccaggacattaaatcgctgcagtctgatatcctcggccatctcattaaccatttcttgcattagggtccaattttactaggttttttgagtacttacatttttttagtggagaaggtacactttgctttattgtgctgttacaacacgaaatgtactgaatttacacagaaccaacgtaagaactaggcgtcagcgaaattagaatactcttaactgatgcaatccactgaaagtggcactggacaatacagaacatgtacgggtcggttacgatgctgaagtagggatgtatacgtagcacgataaactcactaagcaatcgtggtatttcagttgctaatcgggtgcgagtaaccgttcggctgcgt

SEQ ID NO: 114785 - DNA, 1038 bp, Physcomitrella patens
  Intron number 1 from transcript Pp1s192_51V6.3 (locus Pp1s 192_51V6) derived from phytozome v7.0 (chr-ID scaffold_192 ; pos 463565 to 464602)
tacatctccgcgggaattttctgcgtcttttggtggtaattttggctcaaccggtcgtgtttgcgggatctggtgtgctgtggtgtgttgatgcggctctcggcggtttgggacgatccgttgttgctcgctgcctgtcatggttttttagggttttaactctcgtgtgagttgatttgcttatttacatgattcgaagtttcacggtgtggtggtttaggccttgtataccgacactggggtatttggtggattgttccttgcacttgtagcctggatgcagtggtagatgatggtgatgatttggttgttgggttgagaatggaagttttttcgtctctctctattttgtttttattttggatcgcaatgtgattgccctgcgggtttaagtttttgatggcctctgtagcagagtgcagtgctgtaagtcgattaggtgtaacttgaattgtggaggtttttgctatagtggaactaggacatgatgtgagatattgattatatttcggagatttggattatagctctgatccggtctcgtgtgttgctcaattactttacttggatcgtgaatagcacatgctagtgcgaggaagtgtggtattctcgcagattagggtatttgagttacaagcggtatattgagagtttcttcctgtcataatgtagactggtttttccttgtgaatttgtgaatctctgctccctgttcttgtttgtacaatttgattgaagcattaggaagagtgaggattcctatttatgtgatcaggaaatattgtgcttcatcactcgtagaatgttggacccgttgttattattcttgagacatttctcttaagtaatgcgcacaacaaggataatgtactggttctacgcatccctgtgacccctttgtcatgtacttaattaattaattcacttttcatacatttaacgtgaatagtctgttcttgcgtctttagtgctgctctcaggcctgtacgtggtactcataccgtagcgcttgtttggaaaattcagtggatccacagc

SEQ ID NO: 114786 - DNA, 450 bp, Physcomitrella patens
  Intron number 1 from transcript Pp1s376_46V6.1 (locus Pp1s 376_46V6) derived from phytozome v7.0 (chr-ID scaffold_376 ; pos 275907 to 276356)
tgttcaagcgcaaccctgttttgtttccccgaactgtatgtctacgcttcttttctcttcgtccgctttcttatgctgattacttggaaagcatggacttccaattgccgcatcaattattctagaaaaaaattatactcaggtttagtagtaatgtattgtctctgccttgacacatttacgacgattgtcatggggacacataatttgctatttcgtttgtcagtcgtgttttgtagacgaattcaaaacttcatttgaagtaatttctgattcagcagtgttgtcttcatctcgaggattaagcttaagcatttgagctgctttgaacaaatgctggcctgtaaaaatgaaaacatgggcgaatttcaagggtgcatttatgaactaatattcttggatttctgttctgcaggtgcctatcagaagcgggatagcaggaacccattt

SEQ ID NO: 114787 - DNA, 741 bp, Physcomitrella patens
  Intron number 1 from transcript Pp1s3_150V6.1 (locus Pp1s3 _150V6) derived from phytozome v7.0 (chr-ID scaffold_3; po s 1030655 to 1031395)
catcttccaagtcttgccaactctgcatctcttaggtatgtgattgcgtcaccttgtctgagtgtctttttttcttttcttttttatttcaccttcttctgtagtgttgccagttcttggttcctccttatgctgtcgtgcgcgttagtttctactggattacgctgtggctaagtggatattttcgcgggtgggttatgtctcaggtgatatgttgtctataagtacctttgatattaatatggcgaggtgaagttcttgttgccgaagcttaagagttgtagaagttcttgtaatcaagaatacacacgtgatatcaagcgtctatgatccccgcctctatcactttgaaaccaacgatgttattacaccgactgttgagctgcgttcgtttcgtagctgaagagtttcgaaaaaatacctatgtcgtgattagtgcgtgagcggtctagggtggtcaaatgcggtagtcacttgtgcgaggtaatgtccagcaagttggtggcatggctgcagtagggcgacatgaaaggaccccgggtgacttcgataccaatggcttttcctgcaaattaaaggtagtcagtcgcggaagtgatgtcttctatgatgctataaagctcctctgatgacctatgtcacagaatttttttcttgcgaagtttttaatcttatggtcggccttgattggacgtcatgatagtaggattcttgtgataatcaatttcgcaagcaagggtt

SEQ ID NO: 114788 - DNA, 541 bp, Physcomitrella patens
  Intron number 2 from transcript Pp1s38_22V6.2 (locus Pp1s3 8_22V6) derived from phytozome v7.0 (chr-ID scaffold_38; p os 81682 to 82222 reverse strand)
ttaagcccgagttggacctgaaaaaagagcaggaggtctggtttcttttcctgtaattctgttttcctacgttcctcttgaaattttcgtgattgtcccagagaatcgaggaggggaaaagcttgaggcctgttcgattatctcagagtcgcagaacgcaatttctggaatcattgtgttataatttatgctgaatattttctcactttgattgtatcgcaatctgggttctttacgtatcacaatttgttgtcaagaacggtgcaacagaatcggagttatttctttcccagtaggtgtccttcctgggtctgaaattcaatctaaagttagagtagtcaatagattctctcaatatcaggggtatcatcgattcagaatgtgaatcttctgggagtcttctaacagtgataacaaaccacctatcggtgagagaaaaagcgtggtaaaatatttctgttgcaatgatatgattttgaacaatggtttgtgcacggggattgcaggctaggttggcattggcaagagaaggcgatcgtta

SEQ ID NO: 114789 - DNA, 981 bp, Physcomitrella patens
  Intron number 1 from transcript Pp1s35_34V6.2 (locus Pp1s3 5_34V6) derived from phytozome v7.0 (chr-ID scaffold_35; p os 168344 to 169324 reverse strand)
tgaggtatttctcattgtggactgttgtagtattctaaaacacttttatttaattattcatttattttattagttggactgctcttcacagctcacagaaaatttctaaagaaacctttgtagacctgctgctccgaggtggagcgtccatgcaagacagggtctttgtaaagcttgcgaccaggcttcagggttacagagctcggaaacacgcactttaatgatctgcagtgaagcaacttgttaaagtctgcaggaatgagataggggtcttcgtcaaggttgttgctattccgtctggttgtagctggttgccttctctcttctaacgcgatggccactattcactcgtggtggaaggttttagaacggttttcaactgcataatttcttcacattgatgaggagtacaccagtactttcagctcggtcacaaacacggtgttattcatgtcgtggaagttaagtagtaactgttaattgtgccggaacaataaccagaaaaatagcatcatgatacttcgctttaacagtattcaaactccgagctgcttcaaaacatacttgtaatctggactgaaagcttacacatctctacaaagaagattaatcatcccaagttcagaaagcttctttgtacgaggttttaagagttttctgtgctgtggcaggtggaaaaaatgtggcgcaccaactgtagttaaggaactgcaatcaaactgataatcaacagacaaagtagttttcttttatttattttttgtttacttagaagggtacgacaagaaaccatgggggtaagcggtaccctctactctcactaaaatcttactcatcttcagagcacgtggtttcaagtttgaagtaatcaaatgttgaaagaaatactccacattcatccgagaaaattgctttgaagctgtgaagctcctcattcgcactgaattgcacgaattgtgctttgttgcgtgcagcttctgg

SEQ ID NO: 114790 - DNA, 796 bp, Physcomitrella patens
  Intron number 1 from transcript Pp1s381_35V6.1 (locus Pp1s 381_35V6) derived from phytozome v7.0 (chr-ID scaffold_381 ; pos 267311 to 268106)
tcttctgtcttcagcttgctgagagaccagtgacagtaagtttcgcttcatgcatttttcatttcgtttcatcttacctatattctttacttttcttctattccctcctttggcatctcagccacaatcagttcatatgacgatgcctgattttgtatctttcttttccgcatgcacacatggacttttatcgtagtaggagttaatgtcacagatagcgatcgcctttgtttttcagcctataaaataactgctgatgccttcacgatgcgatgtttgacttggcaaagaactgtcaaggatcacctttatcactactgtgtacagcaattgtaattttgtttcgtattgtttcttgttgcagtctcctcggtcggacatgtcgttcgacgctttttatattgaagcatgcttgtgggtctagatatacatgattttagaagtattcttctttcgaggacacatgctaacgtatctaatgaagatattttttctgggattgtggtacttatgggacactgtaaaggtcggttgcagccatgtcagtttcatatattgagcacgtagtacatagcctcaccagggctgtcaatgtttcttaagatattgcgtaacttgtggaagctgtagttgtaactattcgtaatcacacatgagtgtttctggttatatctctttaatcaagttgacagcatgaccattgccctatgggggtgtctactaccatcggtacgatgttaacttcttgtacgacttgttcctgagaaatgaggtgtgacctgtgattgcagacacc

SEQ ID NO: 114791 - DNA, 754 bp, Physcomitrella patens
  Intron number 1 from transcript Pp1s456_16V6.1 (locus Pp1s 456_16V6) derived from phytozome v7.0 (chr-ID scaffold_456 ; pos 146128 to 146881)
tccagctcggtgaatctgcctgttcgaggaacaaggttggtagcgtgattgtaatcattctgacgatctttctggtttcgatgtcaatacttcttttaattccgatgtgtcgtgatcagtttccttcgtatcgcgtaaggtggttgcactggattagaaacgatcgacaagtacagtcgtcattgacctgcaattcacggagccagagcatgaacagtgatgtcaaaatctattcgttgcaagcttgttatccacacaatcaaagtgaactggccgagtgtcactagcgcgatccgcgatggccgcgtccaacagtcatcaacaattatcttcgtgcgtactgaccggcttttacaactacttcatgatgcagaccgcaattctaacacgagttattggtttgaagatctagattatcgacaatgttcatcaggaggatgtgataccatgattgaaatcggaactcactcaagtgtgcccgaatttctcaaattactcttcaatcaaatcgaccagaaataaaccaaacctcgatgaatcctttaagcggagaggtggaggagttgcacttttgaacagtagagaggtgcaactgtgtagttcacatacagccctgaaatcaaccataatcatttgttgacagagcacccaattcgcttcagcaggtcatcgacttgatggatatatgcacgacgctcatgtgatcgaaaataaaaattgttctgtggtagggctgcaagctggcaaggctgga

SEQ ID NO: 114792 - DNA, 324 bp, Physcomitrella patens
  Intron number 1 from transcript Pp1s23_314V6.1 (locus Pp1s 23_314V6) derived from phytozome v7.0 (chr-ID scaffold_23; pos 2297919 to 2298242)
cctgaggtgagaattttcataatttgtttccagaattctgcatgtcggcgtcatgtttgatttgggtgctctcgaaggattgcttcaagtaatttgcccacgtgttattcaagaagcaagcgtattttatatattctgtggccatggagagcattcaactcgtgctagtgagaggtcacttaaaattgtcttccatttattcgtacatgaacaagatttgcggtacagttcagttggcacctgtatatctgagggcaaactctggaaaagagaaactgaactatttcggacgttttcttgtgctatgtgcgattttgcagctgt

SEQ ID NO: 114793 - DNA, 440 bp, Physcomitrella patens
  Intron number 3 from transcript Pp1s129_198V6.1 (locus Pp1 s129_198V6) derived from phytozome v7.0 (chr-ID scaffold_1 29; pos 1050480 to 1050919 reverse strand)
tgccgagcggagctgcacaaagcttgggatctcaggttagtgccatcattggtgtgaattgatgtgaattgttctgaatttttgttatttggacttatcttctctgtttgatttgcatgtgaaaatgccctgtttctaatagcgtatgacttttgaactacaatattctggtgccatgtcaatgacgtggtttttctggatgtgtggatgtccggttggtagaggaggccttctccgatttagtagacgtttgaggagagattttttttaaggtagaaatggcaatttctgagcgtgaaaaccctgcagttgcaaggtagttcttggagttaggtttgtggaagattcgcagtccgttggaagtgttaattttttaatgtctttattgggattccaatgtagcaggttacatcggtgtgccatccgagtattctgtcagc

SEQ ID NO: 114794 - DNA, 959 bp, Physcomitrella patens
  Intron number 1 from transcript Pp1s253_31V6.1 (locus Pp1s 253_31V6) derived from phytozome v7.0 (chr-ID scaffold_253 ; pos 403968 to 404926 reverse strand)
gcagcgtgagcaatttcggataggcctttggagtggtaagcatttcatccattccctttcagactcttacttgtacacagcgggtttctagaagctgagaggtttatgccttactatggcttgccggaagagtgcatttttttgttgattgtcgatgatgcaaagtatcggtatgattttgtataaaatcgtatggctggaaaatctctttgcatcaagcgaagatttggagagcttgggttacagaatgtaggcttcattttcggacttcaagtttcatggtgatggagagtggagggacgtagtttacgttctggagtctgcagcttattttgtttcttcaattttggctcttgcagtgttggaatcaaattgctttattttacaagataaatcttatacttatttcgtttaattcattgcaagtaggcttttatgctagcgatgagacggaggtcttactcattatgatagtgtgtgtgtgtgtttgtttgtgtgttgtatatatgtttgttctggcgttgttattcgtgctccagtgcagttctgtaatacagcatttgaagctgaaggaggataatcaatagatatgatttaaagatgagccttgttttctctttttctggagagaacatgattaagtttgtgcgcgacatgattaacatgttgtcatcttcccacctgtcttccttgatttgcacttgaactcaggcctaggcagttgttgaatgggatgctgtgtccgcgtggtgaggaaatcgttgtagcatttaagaatttcctgaacggcgtcggtcctaatatcagaggttctttgagtgtttagaataggttgtgagtcagtattgatttcaaatgttcactcgtacgggagaaagtaggaaacgcaaatgcgaaggaaagtcattggagtaaagctcacctttgtgatatgcatgcaggagaggttcttctggaaa

SEQ ID NO: 114795 - DNA, 358 bp, Physcomitrella patens
  Intron number 1 from transcript Pp1s65_122V6.1 (locus Pp1s 65_122V6) derived from phytozome v7.0 (chr-ID scaffold_65; pos 715104 to 715461 reverse strand)
agtgcaatagcaaatttcataggtatcattctttctcatcttttcttcatgttgtcattatttgtgtcactttgctttgtgataagtcttttcaagattttattgttgtactttgtatttacttacctacttgatattgaataaacacaagctaaattgtgactaaataatttggtagtttctatttagtttaatctaaaattttaatgaatgtcatttcaattttgtttctatttattatattaaaaagagaatcatacacatatccaagatttagaggatagtgttaatgacaattctaagcagtttagaagtaaatattaagacacaatttttttttgtatatagtattttcaca

SEQ ID NO: 114796 - DNA, 771 bp, Physcomitrella patens
  Intron number 1 from transcript Pp1s129_28V6.2 (locus Pp1s 129_28V6) derived from phytozome v7.0 (chr-ID scaffold_129 ; pos 249127 to 249897)
gtcgttgctgcaccagcttcggcgatcttgtttcggtgagtgttcaacattgcagctcgcaatacgatcgttattgctgtgtttgattcaatactttgattaaacatgcaaagtgaagaacgtagagagacaatttatgttctcgttacgatttaggtgggttatggagttgtggatctcgaagctgctctatttttgttttattttattttatttttccaatttattttccttatgttttttcggagatagacggactgacgaattgggatcttgtttcttgggtagagagattggtgctttatccttcttcggtcagtcttgtttatgtttatgatgatatgtggctgcagcggatgcctctcagtggagtggagtggagtagaggtgttgtgtgacggtagaagcactttatttgcgcgcaattagcggtttgtctcgttttagagaaggaaaccctaagtgttgtgtgattcatttgttgttttgtgagtgatcatctgcaggttttgtaaaagtttattgtctgtttgtaacagggttagtaattgttgatacatatttatatatatcatctaaagtctcattgaatcttgacccaggttgagtgtattgtcggttgaaattgcgttcgtcttgtcaaggagtttctcaccttctctatttttctattttccatgttttcctcatgttagggtgctcgtatttaaggggcacaaggtgatcaaagaagtgatctatcacaggtgaggtggggtttgggtcgtcaag

SEQ ID NO: 114797 - DNA, 854 bp, Physcomitrella patens
  Intron number 1 from transcript Pp1s80_71V6.1 (locus Pp1s8 0_71V6) derived from phytozome v7.0 (chr-ID scaffold_80; p os 438974 to 439827)
cggccagctgattcacggggaaagtccgtgattgtgactgctatttctttttgtgcgtttggcgtcttctgtccgtccttcgattcggtgtaatgtgcttggagtacgtgtgatttgtgtggatttttgttttgattttcttttctgtgtggaggtgaagctgtttctgagtctgcagtttcttgtttttcttgggaatgttaaactgtcaatttttactattgtagtttctcgtgctcgaagcgtagattctaaaccgttctacagaagtccgaccactaatcttgcagctctccttaagtgcgtcagtgagggttagattttttccgacaaaaatgcctccgatgcactttctcggccatcgtatggcttcataaaccttgttggtgtctggaagcgccttatttctccttaccttatacgtcccacgactgctactgtgcttgtatcttctgttcactcagctagcagcgcctcccacccacaggtcctttgaaaataggtgttttatagtaatgtgatgtatgtggttcattatctcagattaagtcgtgacgatgttatgcaccgtctcttattacaggtgaaggtggttgtggctacgtagttttcgtagatttgaatcaccctacttgaagtcatcctttgttcaaacgatgtaaccaaagctacttgagaatttcaagttgagagagagactgttgaagcctccgctaatatgattcggaatggccagatgcctagacgtggatgcgttttgtcgaagctgctaattcgtattgaatctttgaagttcattgtggcatatgaattgtatatgtggacggctgatagattttgaatgaatgcagaat

SEQ ID NO: 114798 - DNA, 742 bp, Physcomitrella patens
  Intron number 1 from transcript Pp1s97_86V6.1 (locus Pp1s9 7_86V6) derived from phytozome v7.0 (chr-ID scaffold_97; p os 602899 to 603640)
ctccaactacatacctttgagtaagccatcgcttcctgatcagtggtgacatttttctttgtccttagcaatggcatgtggtataagcaaaacgatgtgttcttacgatgctctcggggtgacttataaatgtgctgatgtttttgatattttcatacgaatccagtcacattctgaaagttgagcatttgatactgtgaatggtgccgccaccaaccatgaatggatcaaaaaacacgaagggccttctgatgcgagaccgtgaagctgggcttgatattttcaactgttctccaacagagtctcgaaagtccgaaaacattcatgagttggtggattgctcgacgtgactgcgcaagatccaaatgtaaccaaagctctgtttcttcgtgggaaagcacacgcaggggctttgccaatcgactaatgtgaactttaaggtaaacagcgaaagttgtacaacgtcctctttaaacagtccctgctaatactaccccatagaacaggcttgcctgttggttttccaagattcagcaactggttgtttcagtgcaactacacatttccgaggccaacagtccacggaagaatcaccccctcaaatcacaagtcatgatgtccccgtttctcctcaactaacagaaacaagatgatttgagtgatttcagtattgtaattattcaatgttaaaactaatttttcagtagggttggaggaggcaaaagtttgtgggaagcgacaa

SEQ ID NO: 114799 - DNA, 413 bp, Physcomitrella patens
  Intron number 2 from transcript Pp1s54_189V6.1 (locus Pp1s 54_189V6) derived from phytozome v7.0 (chr-ID scaffold_54; pos 1158207 to 1158619)
tcgggaatcggagtaagtttctaccgtgatcgatgcattggatcgcgagtctgccttttgaattagtcattttttgccgttttgtgaattcggaataatatccacagatagcattaccattataaataatagattgacattgcaattgtggaggatggttagtgaaacggatgatcttgttgacgtagtatcctggctgaaactttggcttgttctcatatcatgcgcaaacgactgttgctcggatgaagagccttagcttgtaattagcttgaatgttatgctctgcctggaaggcttcatgttccggtcagatgattcccctttcttttttgtacgcctttttcttctcatgcttttttatttcatgacgtgcagctcacgcgaagcttagacttcaaggctggctcacc

SEQ ID NO: 114800 - DNA, 757 bp, Physcomitrella patens
  Intron number 1 from transcript Pp1s14_432V6.2 (locus Pp1s 14_432V6) derived from phytozome v7.0 (chr-ID scaffold_14; pos 2743576 to 2744332)
tgcgagcttcagttttggccacgtgtggaatttaggtgtgttgcttttgatggttggttggagttcggtaattcgttgctgagcttgctcgtctggatccaattcgcggggaatagtatgtttgtggcgtctttgagtgctgagtctctgttttaaaatgcttggcaaacacggggagagaaaatggtgattgcatgtgggggcttcatcagtgtcgtctaggattcctattgctcgattccggggtttgacatctttgctttgtggttcacaagttcgtgtcggtgggaggattgctaagtgccaacccaaagttggaggtgacatgtagaatgggtgggatttgagtgggatgtggactttccgcatggttctcggaacgatcgtttgaaattcttcggaaggagttttgtgtgagattgccagtgtgcatctgtttggagcagagatgtgagctgcaaggcccggcaccacaaccctcgttcttgcttagatgtatcgggttgtgtttttagggtctctgatttacacgtttttccaacaaagattcctctggacatggaagaagtctgtcgtttgcagcatcagtaaacataggttattgtgaaccgtgatcagcagggttttatcaaattactcatgttagcagtatcaggtgcttcggttcaattagcctgccaatcacttgcatagttgtttttataataagattttcgactgacatggcttggacaatttgtgcagtgcaagagggttt

SEQ ID NO: 114801 - DNA, 497 bp, Physcomitrella patens
  Intron number 1 from transcript Pp1s298_31V6.1 (locus Pp1s 298_31V6) derived from phytozome v7.0 (chr-ID scaffold_298 ; pos 249278 to 249774 reverse strand)
aaggtaacgtcgaattgacacatcgcactgtgaacttgcgtagtcacttctgtttcgaacattgcgtgttcccggtattgccctcctttcgtgcttttggtatttgctcatcttcaggttgatggtttggtcttgacagttggatgagattcaattattgctcttcaaacataggtcggcattgaaacgagttagttgacatgagggggtttcagggattgcggtttgtgtcgcttacgagtttttgaatgtttctcgctttattaggtcaccttggtttcaaaagattgaggtgtcacgttttcttcatgccttacagtgttggctgtttgtgtccgcgcaaatgagcttttgcttataaatccagttaataatttattttattttcgccatgtcattgtttttgtcaagtaatctctctggcgatgttggtgctctttcttaagaacatgctttcctgtatcactcatactaatgggtagttacgcccgtccaga

SEQ ID NO: 114802 - DNA, 815 bp, Physcomitrella patens
  Intron number 1 from transcript Pp1s218_132V6.1 (locus Pp1 s218_132V6) derived from phytozome v7.0 (chr-ID scaffold_2 18; pos 742451 to 743265)
attcaaggtttttgccctcatcagtacccctgatacatcccctattggttctgagtggctgccggcctctgtgaagcatttcttttgtccttctcgcatgttacgatatatagtgatcgaatttgctttgtgtttcaaatggtgatcctcccgtcgctcttttagcttcgaagtagctactgtacaatatagttcatctctatcgctctactggagaggagtgaatgcacattaccgccgcaccctcccccccctccgcccagagtttctgattgctgattctttacagctttctcttcttggggaataggtcgtccgtaggatctgcactggtggttttgttcatctcattttcgaggattgaagctcgattctagaatccttagtagtgagtgttatagagacactgaaatgattccgtttggggctctgttttagcaaaatccatcctaaaagaagtccgtttggtgcctaacacggatttcgtatgtttgtaaggtatctgtcattcttttcacccgtctttgatttgactcacttcgagacatccttgtgacaagcctagatacgtagtgtttgtaatcttaatcgagttccaattgcgatggatagtattttgtgtgctaggattgtttgtaaaagcctcgatcctcttcaacggctgcgatttgcaatgaacatcttcctcaggcagcaaatgtcaaatgttcatccttattgtagtgccatggtgtagatcatattattagtctcgtacattctggttttgatcgcatgcaggtataaaggacctggccgttctcagctgcaatttg

SEQ ID NO: 114803 - DNA, 565 bp, Physcomitrella patens
  Intron number 1 from transcript Pp1s198_175V6.1 (locus Pp1 s198_175V6) derived from phytozome v7.0 (chr-ID scaffold_1 98; pos 783442 to 784006 reverse strand)
atccgcgccctgcattacgtttcagttggctacaggttagcagccagtcacttttttcgtcaaccgaaacggatgtcatatccagagattagacgtttgaaccaccgtaattgagatggagggtatgtggtgattagaaacgccggcatttgggaacgacaaaaaatacttacgaataaaaaaataataaaagaaaaacaataaaaagtggggatggggttggagttgtgttggtgaactggtaggaaggccaccaatggaggaaaagacctccgacatagcccgacaggctctgacgtctaccacaagtctcgacgaattgttcaatttttcaattcggcaaaggaggtctcaattcgtgtgtgagatcgtttgagttttgcgtagtttgatgtggttgggggagaatcacacactaattcaaagcggcattgcatggtcacctccagctctggttcattctggtcaagggaaatcttctccccaaatctgaacaactgatcagttatcatgtcaatccaatgctgcagaacttgtgacaacgcatttgactttgaatagtact

SEQ ID NO: 114804 - DNA, 816 bp, Physcomitrella patens
  Intron number 2 from transcript Pp1s3_191V6.1 (locus Pp1s3 _191V6) derived from phytozome v7.0 (chr-ID scaffold_3; po s 1215839 to 1216654 reverse strand)
gcagtgtttgggctcagagctcaagctttccgcaggtgaactttttcatttgaacaagtatgatctttgtgatttcctgggttcacagttttcaagcaccggtgttaattcgaaagatggtatgacacccttcatagcgagataatgcgcttgccaacgttttcggtttgatgcacttgaaattgataattccccggtacctggagtgtacttcatttattttggtctgatgattgctagcctctcatttgtgggactcgcaagtgtatatattttgattaaatatttaattggctgtatttgcctctcttgtaaacttgataactttcagaagctgctctgttttctttttaagataatcgtgttttacgagcatgaccgctagaactggttaatgcacttcgtggaatccaggttacaggattcatcgaatgtaatcaaccatgtaaaagggtcctattctcgattgaatggcactgttgttcaagtatgtcttatgtatggttaacttccttaccaatgtttctggatggtcagaaaatacttaacctatgcaatttattcctttgaaatggtttgatttctgagtcatcttaggactaggattcacagctgacggagtgaagttcactactgagctgcgcattgaatcggtcctctgtgtgatggtaccagctgtggtttggttcgctgattgaagaaccgtatcttcttcttgtgtgtcctgaaaagatcggagatatactttctaagtcgtatctgagattgtttatttggtctcgcagttaagccctgtggaggtagagaagcttcttg

SEQ ID NO: 114805 - DNA, 436 bp, Physcomitrella patens
  Intron number 1 from transcript Pp1s227_63V6.1 (locus Pp1s 227_63V6) derived from phytozome v7.0 (chr-ID scaffold_227 ; pos 433215 to 433650)
tgggtggtgggtctccgtgtgattctgctgttgaggtacgaggattggtgacctaatttggaagctttttggttgatcctgggtagtgtacgatggcgtgtggtggattaggaacggtgttttgctctggtggccggattgttacaccttgtgttgttcatgctgtttttaaggggtttgttgggttccggaattaggggttcttctttgtacagtggatcggtgatgcttttatacatttgatttggagaatctcacatggcagtagtagatttctgaccaaatgatgattccactagctgtgtgtcagagttcggcctctaattttcatcgatgtttcgaaatgggtggtgctaaatgatacacgctgagttttttcctattatctaggggtcgtaggagttcacttcaattgtgggcttgcaggtacagtcag

SEQ ID NO: 114806 - DNA, 512 bp, Physcomitrella patens
  Intron number 1 from transcript Pp1s144_52V6.2 (locus Pp1s 144_52V6) derived from phytozome v7.0 (chr-ID scaffold_144 ; pos 369686 to 370197)
aaacacagtcggatcagcagggcttcttgctcggagtaagtatcttagcttccaccctcgcttctctcatcctcttcttctgctacattttagggtttctgaggttcgggttggcttgatggagttgatctgtagaggaaatgtttttgagggttaaattgctcatttactggttttcgttcgcaggagttgagtcgtttacagaatttaattcaagcggcattttatttttgattttgctcttgaaattttgatagcgtgtgtgattttttctcaactaatgtgtaatccaattttcttttataaattcaaatgctaggtctactgctgatttccttgagcaggcgtatcagtttatccatttgaacgagggttttgtttctggcatcatcatttggcattatcttgggtggtgctgctgttgttcaatgttgcctgtttgagaggtttagcacgattaaattgctgattcttgcggtcgtggtgcaccatttgaagcaatgggttcagct

SEQ ID NO: 114807 - DNA, 412 bp, Physcomitrella patens
  Intron number 1 from transcript Pp1s65_226V6.1 (locus Pp1s 65_226V6) derived from phytozome v7.0 (chr-ID scaffold_65; pos 1265726 to 1266137)
ctctggcgagtaaggtagcgcatgatatctgtggttcttctcgttcgcatcgttttgatatgtttcattgcgccatcaatcgttagaatgtgagttcgtagtttcgattgttttagagggttcttttctttcataattttttttctgttaccttacagaggtagagtaaggtgagttttagcaggcgctttctacttggttgaagtgtttgcgattggcattcttgtttcttttagtgtatggaaattgatgtgggtgtagatttgaggactggttcttctgcggagcgtttaaagtaattaatgctctgcgtatatgtttcgtagtttgggtatatatggctgtatagttggtggctctgatctcgtgattatctttgaatttggggtgcgtaggtttgttgtcgatcgca

SEQ ID NO: 114808 - DNA, 589 bp, Physcomitrella patens
  Intron number 3 from transcript Pp1s3_192V6.1 (locus Pp1s3 _192V6) derived from phytozome v7.0 (chr-ID scaffold_3; po s 1221591 to 1222179 reverse strand)
gcaaccagttagcgctcttcagagcattggcaaaggtatgcaccttgtttggcacttcccaaaaccgttgattaactagcagccaagtttcccactgtgtacttgtagtagaaattatcagaggatgtagcaatgctcgctgatatttcaagtgctagaagtaatgctattttgatcctgatcactaccattttgcgaacctaccgtacttggacgcctgcagcgagccccataaatataatgtaaatatattctcgagcatatttaatttttacgttatttgagaatttatgtatttagtgactatttggatatttcagattattgctaaccttaagtaatgtgattacgtagacgaggatgagaaaccctttcatggacattttgaatatcaccatgttcaatttcttgttttttaaattgatacgaaccataatttctggttcactccgcttttcatgcgattgttcacttgtatctttattcaatactaaaccttgaagaatagcatttgtgtcgaaagtaataatactgaattaaaacattggttgcagtttttgaaccttttcaggacgccaatactagtctc

SEQ ID NO: 114809 - DNA, 464 bp, Physcomitrella patens
  Intron number 2 from transcript Pp1s81_165V6.1 (locus Pp1s 81_165V6) derived from phytozome v7.0 (chr-ID scaffold_81; pos 984852 to 985315 reverse strand)
taccgcaccttactgactggcttcccgacctgccggtaatcatcccaagtcgtggaatgggctcttacgaaacagggtttgatgttgagcgacttggtgatatttgcagtcttttcgcaccgatcgggcgtcgttcttttctgtgatggatgtctgtaatgtatatgtattgctattacggtatgtcagagagcttgaggccgtggatgcatgcggttcacctggtggttgattccttgtcgacacattggcttttggcaatctgatatggtctcccaggcttttgcacctctagatgtggcttgaggagatgagaactttattcaggaggctttgaacgaagtatgcaccttttatatgcatttggatatgtatacatgtatatatatgtttggcgtcaactcacttgtttcttcacctcgtggacagacatacgaaaatccattgaagcacaatccagcata

SEQ ID NO: 114810 - DNA, 809 bp, Physcomitrella patens
  Intron number 1 from transcript Pp1s120_132V6.1 (locus Pp1 s120_132V6) derived from phytozome v7.0 (chr-ID scaffold_1 20; pos 916047 to 916855)
ctattctggagaagctcgtttgctacaattctgccgtaagttgaattttctattgtcaaattgataacctatggatttcttgtgtgctattaggaggtttcatgagtgtcgtgctgaagccagttattgccgccaatgaatctgcacacgggattcttgaacagtggggtttcgtttgctttttaaaatatttgtttttgttcttttacatttttaattctctccttcttccagggtaattcttggttgatgggctcatgagaactgagtgtaagataattagtacctcctgttgctttagcttctgagattggatttgctcgagtagttcctagaacatcatgtcggtttattggttggtgaaacttcatatgttggagagaaatacttgctgctagcttttgttcctctggaacaggatttttttaactataccattcccgtgagcagctggattctttcactggttcgagtgtttgggctacagtatggttggggttttgtgatctagaggtttgatatttgaagcagctgtatcacgagtaaatagaatgctgctctcagcattctctgcaactcttagtgtagattaggtttagaccagtgactttgagtgctctaggttgaggaaattgcttaatttttttttgagtagagtgccttaccttgtcaattcttgtatctgtcagtctaagaatgatgagagtatatgagaatggaatattagatgggacatgaccttattctacctctccatcctgtcttaattggtcgatctctgaagggctgtggacaccgtggcatgcaga

SEQ ID NO: 114811 - DNA, 743 bp, Physcomitrella patens
  Intron number 2 from transcript Pp1s14_281V6.3 (locus Pp1s 14_281V6) derived from phytozome v7.0 (chr-ID scaffold_14; pos 1733360 to 1734102 reverse strand)
atttgattgcgtcgattgcacagtggaaaaaggaggtaccaagcctgcatttatcgtcactctgtgtgcttggaaaattagctcctttgcagcattggatcagattagtagtttggctgcaattcatgcgtctgctgataatcggcggcaggttaggctgtgcttcaatctacatgctttcattttccaagctatacatatcacgaccgttaaagatgacgagcatgccttttgttcaatcaagttagtaccagcttaagtaattcgagataaagcgatcatattgtgagagaatcagaagccgtagtcatgcattcttaagaaaatttaagagctcctttatgtttgtgacagtataattaatgtaaaatatgcctgaagcttgtaaatttcccccttttagtgataagaagacatgttagcacgtaaaggagatggcataggagttgcaattcaaaatcagccctccagaagcttagtgggatttaggttttgatatctctcattactttgtttgatctgtgattatggcttacaatatattgtgtgctgcagtgagttttggttgtaacacatttctctttttcgaatttccgcgtgagaactacgtcagatcacccagtctgctatagatgctttcttagttaatgctgtatcgagggagcaagataagggtgtgtgattagtgtatatatgagaaaattgtctcacattgaatgtcgttcttgtgtgacagaggaagc

SEQ ID NO: 114812 - DNA, 639 bp, Physcomitrella patens
  Intron number 1 from transcript Pp1s175_102V6.2 (locus Pp1 s175_102V6) derived from phytozome v7.0 (chr-ID scaffold_1 75; pos 618936 to 619574 reverse strand)
ggctcataggaggagggtgagtcgggtgtgtcatgggtttaattcatccgtatctagcgcgctagtgtggttttcattgattgtggtggtaatcacatgaggtgggtgcttgtcatggcgttgtggacatgtacagagggagagagaagatcctgcacattgcgtgatttcaagtgaggaggattgttgcatggcggagagctggaatggtagtagcgggtgtagggtgactattttgggtggcgggggtttgtgggggaatctgtgattgggttttggtggacgtcgcggtgggggtgcattgtcatggcttgacttcagtagtcagattttcttacgaggtcatggaaattgtatattggggaggaacaaaaaccgattttgacttggatatagttcctaggtcaaggagtcgtggaatgtcatggattcatgtgtaatggggtacgctgcacggttcattaagttgcgatgtggtgcacacatggaatggtttcgactgcgggatgaaaaccatgagtttggtttgtgttatacatgtgtcgccatggatacttgttttcaccgatagcattagtgctcatgttatggcgccttgggtgtgtggggtgttcgatgaagagcaggaggcgaaagagg

SEQ ID NO: 114813 - DNA, 922 bp, Physcomitrella patens
  Intron number 1 from transcript Pp1s215_18V6.1 (locus Pp1s 215_18V6) derived from phytozome v7.0 (chr-ID scaffold_215 ; pos 66550 to 67471 reverse strand)
cggatccaaagtcttctttcaggtgggatatgatttaacggtcctgctgtttccgagggcgtgttgttgattcacacgtgccttatttcttggaccttcggttcaatttccccatatttgctggggtctgcgctagagatccctgtgatagctggagattacaaagtcactatgtggtttttcttgcacgaaattttccctcagcagctggatgccggatgagggttacgttgttatcatctctgctagaaattaaacgaattacagagcttgttgtttgtttctcttcaaaagttcagaagattgtgcttggtgtgttgtttagatcgtcgcgctggtgatagcattatactttttcgtacttttgataacttcgactgaatactattcaaaggggatagccgtccatggagctgaaattggatttgtgttaaggtaattagaagagagtagcctcttgaaagctccatcgcgtcgtactgtgaaggaatgtatagattaagctgtagttttggtttcctcttcgtttctaggcagcttttatttgtttgatttctttttgtagctgaggatgagctgctttgcggcggcgcttggtttttcagtctatctcacttcgcttttctgtgtatcatcgaaagtttgtccttactttgctcttctttcgcgaagcggccgtacgttgctggagggcgcaaaattagcaacttactccacctcccggaatactgggttaggaatatcaaagtattgacatgctgcctatccagcaattctcattttccacaagatgaggctgaattttgcgcacagtaaattttgtcaaaacagctcgtagatgtgattgaattacgttcttagattgaatggtggatttgatgcaacaggcgaagcgttgcttctccatcgcacaggtgcttct

SEQ ID NO: 114814 - DNA, 950 bp, Physcomitrella patens
  Intron number 1 from transcript Pp1s416_25V6.1 (locus Pp1s 416_25V6) derived from phytozome v7.0 (chr-ID scaffold_416 ; pos 285761 to 286710)
cgcatcctttgccatcagataaaatccaaaaacgggtaagaaagttcctacacatcactacccaaacactttgaaaagcatcacagaaaggcattgccacttttgttaacaaagtgagtcccctctggtataaaaatatccttttcacctgcacagtttatttgacacgtgccaactacttacaaatgtcctttatcaaacttataaacaatggcctgtgcttgaggtacttgttgcagctttgaggaggtcctgttcaccgtgaaacccacacaatcatgcaacatattcatgtattaaaaacagtgaatttatttactcttgtgtatacaaaaagcacaaaaaaaacaaaaattggagctatgactgcatctatgaatgcttcgtacgagtagatttcgtatctcacttttgttctacacgaaggatctatctacacactcaaggaatagcaacaagaatagtctcgcacaggcaaaaaaaaaaaaaacaaaaacaaaaacaaaatcatgaatgcaagttctgataagatcccaaatgtccttgaatgaagactattgctttgcttctattaaaaaaaattattttttacttttttcactttggtgcaaagatgcgaaatgctgtcatttggtaggtaaaaagggttggacccaccttctgcgggttgtttgttttttatcatctgttttgtttgttgttgcctgatcgagaaatgactctgagttggttgaacctaatgcagattagagaacacaccatgcatttacaaaggactaggaccaaaagaaatccaagccctcgtctctcaaaataagaatctctaggtctttctagatagggaggtgggtagatagatatgtactgtgtatttgtgtttgtttgtgagttctaaacgatgcgcttgaaatcttaaactggtttaggtgcacctacttaagcaggtgatc

SEQ ID NO: 114815 - DNA, 889 bp, Physcomitrella patens
  Intron number 2 from transcript Pp1s88_113V6.1 (locus Pp1s 88_113V6) derived from phytozome v7.0 (chr-ID scaffold_88; pos 789093 to 789981 reverse strand)
gtacaggtacgtttcctgtgcactgtgctatcgttgatagagtgtgggattgatgaatgtattggggagcttcaacggacagttcgagagattctatccgacatgatgtctgggatttaaaaagtcgttcacggattgtcacttcccttctatcaaggtgaacgatttcattgttcagctcctgacgctaggaaagaaaaaacacaataacattcattccactaagctgagaataacgtgccatcgtgatagatcaaatatgggtgagcctgttactgattactgtgtcccagccttgaataatactgaacatctaaacgctcgtacacaatacatctttagattctaatcattgtgttggattcttcgtggaagtctggtaaagtcaacaaccacagacaagctagaaaaaaactaatgttgtacacacatgtcccggcggtggcgactgttgatttcgtagcctccatcagaacgtggttgctcccgataacacttcttttgcttcgggaaaaatctcccaacaaactgccgctcgaagaatattccctttcaactgcatggccatttccgtgcctatgagccctggcataggggcaccagcagctacggagcactgcatacaaacccgtagtcgacggcatttcaaggctcctatataggcaaaacatgtggacccggtttctgcggggatcatttttgtcttttctcctgtctcgagcgaatacccctcagtgtgcagaaaacaagcaatactgtaattagtccccacaaccgagaaaatgggaccttagaacatccacagtgacggacataacgtaggatgctctaaaataagcaacgtgattgtgcaggatttgcaagcaaatacattgggtcaaatctcaag

SEQ ID NO: 114816 - DNA, 1026 bp, Physcomitrella patens
  Intron number 1 from transcript Pp1s65_114V6.1 (locus Pp1s 65_114V6) derived from phytozome v7.0 (chr-ID scaffold_65; pos 659147 to 660172)
tagaaacgcttgaagaccagcttgaagctttacaggttttctgctcagttctcactaccgtgttttttacactgcactttctttcatgcgagacatgcgtgagtcgtctctcggtcttctggaattttaccggcgacttttcatgtattatgtccgagcaggtgcatttctcttgtttcgttggagttttggagtccttgtttattttcccaataacttaaactacatattattcctgagccgcggattattttgaatgcatgaagccctacaaggttatgtctgcaattgagagattggtttcgacagtttgcatgtaacggcgctcgacagttctcagaagacaactctctccatctatcctgtagttgaggttgagttggtttttctcgtgagacattgttgcctataggatgtcaacgtcaaaaacgtcgtatgatggcttttcatagggacattgtcagcactccggaagaatcgtagtggcgagcactgaaaccgaccccaatgcaacgcacaaaacttgaaaatgacgtacatattagagcatgaaatcttcatcgttctctactggatgaggttttgttaattttacagtagggttgataactcttacgctctgcaaagagtttgatcccttgacaagcgtttgtggtttctatgtgacgtgccattcctaggaatggcaaggatgtctgtttggattgtaacccgcgattatgaagagcaagtcggactttcatttgaggagcatcacaatgagatgttctttcgtaatttgcataatacaatcagtagaaaggtttcaagctctcagactacagctaagaacatatagggtgaatacttcaatgggtcgaaggagcactataatgttatgtcttgtcaggtgctcgtatcgtcattcaagaaaggtcttccatatcgtccatgctgttgtagctctgaactcttaaactttccctttgactaaagcaactgattttgtttctcagtcaacgcaaagtcaccagagagtcgaaaagg

SEQ ID NO: 114817 - DNA, 640 bp, Physcomitrella patens
  Intron number 1 from transcript Pp1s78_143V6.1 (locus Pp1s 78_143V6) derived from phytozome v7.0 (chr-ID scaffold_78; pos 884017 to 884656)
gaattggtcccgagattgcggaatcagtgaagaaggtgacgataacctgcttatgtttttttttttttttttttttttttttcttattctgatgatattttcacttcttcggttgcttgcagcaattccttcatcaattgatcatcatctgagttctgtatggacaacaggttattattcccacaatatttttgttatgtggtttccaaacttcaacttctgatcttcagacccttgggcacttcctatgagatcaaattaaattatctctgagcaagcattgaatggaggaagggctgaatttatgagtcttggtcgcttgtatcaataaacaagaacttggtctaacaatgtatgaaggatgtaccataacaagttgaattctttctaagaatcagatcctgtctcttcttcaaatgggggttaggttcacttatcttctcagctcattcgagcaatccagcaacattattgagaagtttttcctaaaaaagaaatcagaatattaaactgcagcgttagaattgggctcttcgaaaccctaaacacctcttgagaatttgtcaaataacggcataatataggttttgtaaacgcagccgtggttcattcgatgatgatacgtggttgcagatttttg

SEQ ID NO: 114818 - DNA, 623 bp, Physcomitrella patens
  Intron number 2 from transcript Pp1s74_62V6.1 (locus Pp1s7 4_62V6) derived from phytozome v7.0 (chr-ID scaffold_74; p os 357729 to 358351)
gggattcacattcactggaggcttcatttgtacaggtttgttatatctcatgaagtgcattgcagttgtagactttgaaggcaagttagtttttgtaaggctgtggtgaagacgagcataatctccaggattggttaaagtggaaatgatgttgattatctcagagaaaatgaggcaaacaatttcacaatgatcaacttggtgtcacatgaaccgtttcttgtatgttagcttcaccccctgcaggttaagtcacgccacaaacattggtcatgaactaactattcgcgacgatcaatatctaattatgggtagttctggattatttgtcagagagaggaagaactgctgtcagcatggtccaaaaagtagttcagctctctcagtggtgcaagcgacggaagaacagaccaaaatggtcctggtagcattagttttgattacgatcatggggagagcgtgggaatacgatgtaagaatgctaccaaagaaatgaatgtgacgtgaatctcgcctttcacaacgagatgctattggttctcgtacagcaaattgaacaatgagtatattcaacttctaggtggattataagccattgtttctgttacttgtagattgatctt

SEQ ID NO: 114819 - DNA, 859 bp, Physcomitrella patens
  Intron number 1 from transcript Pp1s74_237V6.2 (locus Pp1s 74_237V6) derived from phytozome v7.0 (chr-ID scaffold_74; pos 1469504 to 1470362 reverse strand)
ggtttcgacgacgtttagtggaggagaagtttgtggtgcgtggagtgacgtttattttattttacttcactgtgtctctgttcttctggttcctccatttgtttgtggatctgaacgtggtttggggttgaggaagagaatgaagagtttgtgattttacttgccctgaagtagggcggtatcaagtttgtgttcacgtttttatcttggttttgtcacttttggaaaaatagtgttttttgaggggtttcattgatcctttgcatttattcgaactcgtgtgtgcaatacctccaaggtttgccagaaaaatgcggcaaagttttttagtctattactcttcgtaagggtataaagctttagtgagcaaatattattttttcttccagtttggtcgtctctctggctacctctccacacccgagcctgggagaggcagctattgttctacctaaattgaacttcttaagaattggcttcgatttttggaacaacacaatgcttgtcagctcgatcatgaaggttgactcatgtcatcctgttcgttgttttcacgataataatcataacaggtttatgaaggaaatgaaaacacatgtgtgcttcaaacaattactgtgactcagactttgccatacacggcatgttggtttctatatctcctgcgcttcaaggttattatagcacattcgtactcccctctgtcttcttccgttggatactaaacgtgcttggttttctggagtctcgttgtctctacttgctgattttcccctaggaacggggcttttgggaaccgtcgtaatctgctgcaccgtcacttacgtgtatgtttgtttttacttgacttactcagggg

SEQ ID NO: 114820 - DNA, 784 bp, Physcomitrella patens
  Intron number 3 from transcript Pp1s105_149V6.1 (locus Pp1 s105_149V6) derived from phytozome v7.0 (chr-ID scaffold_1 05; pos 995999 to 996782)
actatattggagtagttctgcttgcagttttggaggtaataccacatttcttacgtgtctgatcatgaggttactcaaacttaacgaacgaagaagaataaaatgtcaaaaaacatcaaagaaagaacataaaaacacgaagaaaatttctcctgcagggaaaactgcagaaagcaatttaacaaataactgcagtcttcagtgcggttcagtatttgagacgcacatcaacatcaaaataatttgagatgcacactttttcgtagagctagaagctgagcaagttttggaattgtgggggatccttgctaccagcgccaagtgcaattctcgttgtaaccctcttaaacgaggactggggaagcatagaatgagcttgatagtaaggaacttgacagtcctgatccttcataaaggtgaccctttacttttctcatttcaacagcatcatttgaacagtcttcgttgcagtaaagaaagtagtttaaacttgcgactacactgtataacctagaaagaggcctgaaaaggagattatattagctcagaagcagcgaccagtttgaacacagaattagtaggattttccatgaggccaaagaacaagacatccaattcaatagggtttctgtgctttcttgtgggtcgaactggttcacaattcacgcattaggattgtcaatagcccacgaatataaagacacgcttaggatctcacaattgattttgctcatgtaagtgtaatgttacggtgacgcgatggcagggattgggatcagtggag

SEQ ID NO: 114821 - DNA, 523 bp, Physcomitrella patens
  Intron number 1 from transcript Pp1s59_15V6.1 (locus Pp1s5 9_15V6) derived from phytozome v7.0 (chr-ID scaffold_59; p os 37017 to 37539)
acgaggtacatttgactgctattttgatatttttttttatttctctttctttcacttcgtctaaatctctccgccgcctcattttgctctttcttttcagtttgtattaggtttacccaagtttgtttctcgttcaattccgtgtgcaaactcagagttgttgttaattcctcactttctgtgtctataatcttcttacgaagtgaaatagaagtttgcatgtctaagctctaattttgaacttgtgagtagagtacaacgtttcgtcaaactcgtgtcctgtagttcctttttactgctgatcaaagccaatctaaaactaagcactgatagaattaggtattgaattctgctgcattggtaacaaaacttatactggttttagttagtggtgcgattgcaatcttcactgttactctctctttaatgcctaaaattggcctaaaagtggtgtaggtctgaagcataactactagcatacatgtggattgacccttcttcttgcattttgcaggccaaacta

SEQ ID NO: 114822 - DNA, 809 bp, Physcomitrella patens
  Intron number 1 from transcript Pp1s100_231V6.2 (locus Pp1 s100_231V6) derived from phytozome v7.0 (chr-ID scaffold_1 00; pos 1296409 to 1297217)
gtagcagttttggtgaaggtgggaatccgtcgagtgcgaggaattcgatgtcgtaacttgatccggtgtcggagagtgttgctacatttggcgtatttctaggttttctttttcttcttttgagtgggtgggagtggagagatgagagtagccattgtgaggattgtagctcttgtgagtgattcgcatttgatattgtcatgctttgaactgtgatactcgtgagttgattgggaaataaactacctaaatctcctcggtggttagtgtccttgtaacttatctccatacaagtactatgccatcttaaattacttaggcgattcaccatttctttttaaacatcccgcatatattttacttcacaacctatttcatgagtatcagtcgtttgcatttgccccaagtgatcaacttgacttatttttctatttataaaaaacagatccgtcgtcctacgtttatcttttcttcacgttagctatcttttattacataagtcttcaaccaagtagtgttcaactgcaccgtacgtaattaccactttctggaagagccacttcgttgtcatctgagtaggaggatgtagcgtttgagcggagattgtcttcgacctttcttgtagtcctagtgctttatattcaagtttggtcggagagatcattaggctgcagcatgatagtgaactgcttttgaaatctgattttagcaatcactcaattttggactttggggtcgaatacatcttagctaccatggtaagagttacaagatgctgatcaacagtacgcttgtgcaggaaggttcag

SEQ ID NO: 114823 - DNA, 832 bp, Physcomitrella patens
  Intron number 1 from transcript Pp1s128_144V6.1 (locus Pp1 s128_144V6) derived from phytozome v7.0 (chr-ID scaffold_1 28; pos 1111270 to 1112101 reverse strand)
tctttcagcttcaggtgccatgtcaaaactaaactaaacaaaacaatgcacacacaacatgagaagaaaataaaataaaaaatgtaatgaaaggaacaaacaaacttgatctccaaatcctaatttctaatttatagtaaaatgatattgagaatagagtgctcttgtatagtggatcttcccaaaccctaaaaaaagatgcccttgtgtgttatctgaaccctgatgagggtgttttttttttttttttttttttttttttttgtgggttacttaaaccttatattgtaaggatgatgatattatttggaattttcacactctgaatgttatagaagatggtttattctagttaatgcatactctgaaccctaaaccttattaagcatgctattctgtgggtttctaaatgtgtaaatcttaaaccttataaagcatgctattgtgtgggttttctaaatcttaaatcaaaaattttataaagtgtaatattatgtaggatttctaaactctaaaccttataaagcacactattttgaaggctctccaaatcctaaacgctgacttttataaagtgtactattttgtgggttatctaaatcctaaaccttacaaagcatgctattatgtaggttgttagaaccctaaacttaaaaccttgcaaagtagaatagtctatggattctctaaaccctaaaccttgtaaaacgttcattttatgtgttctctaaaccctaaactcttacaaagtgtaatattatgtgggttttctaaaccctaaattgttttgacctcagactgagcagctgcttcaccgagctgttgggtggca

SEQ ID NO: 114824 - DNA, 571 bp, Physcomitrella patens
  Intron number 1 from transcript Pp1s135_51V6.1 (locus Pp1s 135_51V6) derived from phytozome v7.0 (chr-ID scaffold_135 ; pos 452808 to 453378 reverse strand)
agcagtctgtcgacgtattcaataagagccacgtggggttctctcattctttctttctgttcccgggggtacaggtttcaatttgcaattcaatctcgactggttcaggttgcaaactgagtcaccgtaattgaatgttgatgccgacacagcagccgcctctcttaaatttgatcacagtccgtatttatgactcgacagtaagtttcttccgccatttgagtgatttgaaatgatgaaccgatgaaactcatgagcgaactgacacaaattctacaaggttctactgtagtgaagttaaaagttattcaagaatgttcaaacatataagaatgcttgaaaagtattacacgacatgaaaataggatgtacatttgtaagggagggaagcttttagtacagatcatgagaagtctcaagtgacattgctgaaaacagaaagggtgaagcatagcatctctactgatggtgacggttgttttgaattggtgggtatgaatagtaatgatgtgactggaagtgataggctgttatagacgtcgaatcttaaaagaacagcagcatcaggagg

SEQ ID NO: 114825 - DNA, 506 bp, Physcomitrella patens
  Intron number 1 from transcript Pp1s14_103V6.1 (locus Pp1s 14_103V6) derived from phytozome v7.0 (chr-ID scaffold_14; pos 577997 to 578502 reverse strand)
ccagcttcgtcgcggtcttgtctggggactttcgtgtatgtcttcttggatccttttgttatttgttgtaatatcaagagttttatcttcctcgttcttgtgcttcgattcttttgaaatattctcttgcaattgaaatcgctgttgcatcgttgagctgccctgaatatatcatatgctgggttcctaacctaatagtgtgcttcgattgccaagatttagtattactcgttgacaggattcacatttacactttcaatgttcacttgtgtgaagaatctcaggacaatgtggtgcatccgttttttctttcatatgggtcatgattgttattcgtttccagacatttctgatcgcgtaatcgcaatttgattctattcgttgaacagtgtgtactcggaagttatacaggaaatagtgaacgctgccaaccatgtgcatgaattactgattctttgatgataatgtcagatttaatataccccttcctctttccgttcctactt

SEQ ID NO: 114826 - DNA, 889 bp, Physcomitrella patens
  Intron number 1 from transcript Pp1s74_259V6.1 (locus Pp1s 74_259V6) derived from phytozome v7.0 (chr-ID scaffold_74; pos 1638035 to 1638923)
ctttgctagtgccgtgggtctttccttgaagtgcttcgttagtgcttcggttcttgtggcctgtagcgatgaagaggtggttgccttttcttatttccggggagtacgttcgaattttgttagctgttgcagctgtgttaaattgggaattgggatcgatcacgtcgttgcttggttgtgaggtgtcatctttatggcacgagaaagggtttttaagtgggcaggttgaacaaggcaacgactgattcagccctttgtcctccgcaaatttagaatgtaagtgcaaatggtgtggtgccgttgaaccatcactgatgaagattggagttcaatcagatggcactattattttgcttgtatttacatgtgtctttcgttttatagaatcataatcagctgaagaataagaaagttgtcttttggttggctctagccatgcccgtgcgagacgttcatgtcaaattgcattgttttctcgtttgaagttctgcttgggtgtgcttgagcaataaaaccgctgttaaagattaaccatgtgtcactcttgattaaagactttattcgtcagtttatttgattgagctcaacgtcagcctaattactcaagcagaacttggatcggtagatagattggttctattctggaagacaaaaacgcatggctgagcccatgtatatttatttgaacaagagtggactatctttaataaactaaaaagactttcgattaaaaacttgtagcaaggagctggattaatcctattcgttttcaatccaaaagcaagagatcccaagagttcgaataagcttgaagccttcgtcaagtcttgaaaattattgttgatttctgcatcatcttgtgacggtccgtttccaggtctgcatcaat

SEQ ID NO: 114827 - DNA, 822 bp, Physcomitrella patens
  Intron number 2 from transcript Pp1s1_424V6.1 (locus Pp1s1 _424V6) derived from phytozome v7.0 (chr-ID scaffold_1; po s 2563353 to 2564174 reverse strand)
ggaagcctttggaagcttctccacaacgaattcaggcatgttcttcgttgctcaattctgattgtatactatcgttgagctttcctaataaatgggtgatccactgtcatgaagctttgcggtgggcatgtgaatgttttggtgcttagctcctctatttcgcagtcacttcctcaaatctttatagtgtcggttaaacattgcacttgaattgcaatgagtttgaaaaatcatgaaacggagtggtgattggagaattacaaaaatttaggtcacgaattatcgtcaactttccgattccgagtttgggtcatatgttctttctcattgaaattcatgatcagatcatgttcataagaccatcgacttaatgcagtagtgtaaatgaaaacacatttttgaatagaagcatcttgctgttgaaccaaatctacaaaaagctcaaaattcagttaggattgaatttcaatctaaactataatcttgaattctatctatcagctcataacgattcgcttgttagtgtctgataatgtttctctgtaggaaattgttcttattatgtctcacagacgggtttatcaattcttagtgtccatttggttttttcatttgcgaaataatttcaactattgtcttgcaagaagaatgttaccgttatcaattctctctgtgcggcttgaaatggaaatgctatttgtgtgactcctagttcttttactatgtgattgaagtcggacttggaatgattttagagtgaatgtgtaactcgagttggtgcttgcagccaggtgttgtgcatcggagctggtcgatacgagc

SEQ ID NO: 114828 - DNA, 777 bp, Physcomitrella patens
  Intron number 1 from transcript Pp1s20_135V6.1 (locus Pp1s 20_135V6) derived from phytozome v7.0 (chr-ID scaffold_20; pos 794172 to 794948)
ccaagttttccaatcggactcaatttaaaggcttggtaagttcaagagaataatgatcgtgatcttccatggagtactctgcgtgcatgggtaaagatctcggttcacagctttgcttttgagttcgcgacctcgtgtttctgtgattactgaggctatgtaagtttttgtgtgtggaaagtctgttcattgcggatatttgctgaggctggatatcgcggaatgtgtttcctgccattttgtgcatcgtatcgcgtatcggtttttgtctatggcgtccgccgctattcgcaattcaagtagagtgataagcaggagattgcaaactcttctgtgattagaagtctcctatccaacccaaccaacacccgatcttttgccgtgacgtcattattcgcagaagcgtagttttccgcccatcgaatgtaaaacggtggcttcgatgagctcagtaccctcatttacggtctttggtccaggctaggatgataatctaacactggcaaagtgctcttttcatgtcatgtctcttgtggttgtcagcctcaatctccgtttctacctgtctgtgcgtgtttttgatactcttaactactaattgaaaagaatatatcaatttggaatatgtcagaagtgtattgtttacagtcccaatcgtcattgtatttcgcgaaacgagtatggcatgtgatgtaagtgactgaatgactttatttacttgtttattttccgtgactttcaggttacggttagaagtgcacttgtggaaccagaatt

SEQ ID NO: 114829 - DNA, 555 bp, Physcomitrella patens
  Intron number 4 from transcript Pp1s46_310V6.1 (locus Pp1s 46_310V6) derived from phytozome v7.0 (chr-ID scaffold_46; pos 2054391 to 2054945)
tagaccaggggccttttgacgtcattctccacaaggtagattttctacgcgggtcccatcgaaacctggtttctcatttgccttgcgcacttcttttttatttgtgtcgtatgttggtgttctttcatgttttcttttgtttggagtcatttctacttctttcttctttctctttttcgacaatgtcaaaaacatttttttgaagttgaaagccttttgtaccaacaaacgcccagaagttatccagtctttctgtcaagtgtaaagactagtgttgcagatttcattggataatctgcaaacaatgtctccatgtccgagggtgttcattttcatatttacattgtccagacgtgaagctgtgcttgttggcggaactgcctggagtatggcaatatgctgttgagctctaaaaggtgcttgtcatggttcatgtatcattgtatctggctttatactgcttcttagttgcaagcgtgtgtcgttctggtaccgtgatatcagtactcactatggattgtactgatgtctgctgatacagttggcaggaaagga

SEQ ID NO: 114830 - DNA, 826 bp, Physcomitrella patens
  Intron number 1 from transcript Pp1s45_263V6.1 (locus Pp1s 45_263V6) derived from phytozome v7.0 (chr-ID scaffold_45; pos 2128818 to 2129643)
gctctgcatattctaagaccccaacaaggctcaaggtttactttaattttaaattaaatttatttgttttgttttgttttccttctcgtgtgggtttgatgttcactttgcagctggatcgatgatgttttttttttttactttgatattttaaaatagtatttgatcgtagtgatcgcggtccttctgtttttcttgagttttggcgattttatatttgcagtgagctatcgcattttaccagtcatttggggaatcctacgttgaaattgcagttggttcaaaaaaaatagtttcggtgaatttcaattattcggtcgtgtggttgatcatttaatggctttagtggtagtttttatatttttttatttataaatatatttttgaatcttttacttgtgattgtggggttttaagcatgccatttgcggatggggttctccagtatttgaaataggatttattacaagcagtttttagagtttacatttatctagggtccagctgcggcagtgagtttatgctccagagtttatccacattgttttatggtggatagctcatcctccgatcatctgatattctttcattgatttttgaacaagtagacagccgcttatttgtggaatttaccggaaacggctgttctctaagtcgcagacttaatttgtaatcacagtcttattaacttgatacatttgatatctaacagtcatgaagaattttatatatggattaccagcccattgcagtaccttcttcaaataagtgaaattcccgcacattaatgacgatgatcctccaattggaattttgcagatcatag

SEQ ID NO: 114831 - DNA, 602 bp, Physcomitrella patens
  Intron number 1 from transcript Pp1s54_29V6.1 (locus Pp1s5 4_29V6) derived from phytozome v7.0 (chr-ID scaffold_54; p os 230853 to 231454)
cagcgtgtacgtcgaataatccttcattgccgagccttccacgatttaattgcctttgactttggcactagctgttgagaagtcaggtagcgtgtcgttgcagcaggtgtaaatattttttttcaacgtcatcgacatagttcagagtcgtgtgctggagctgcttccgccactgtcgaaaaaaacaaattgaaaaggatcttattaactgtacctcttgttagtttcagtgggttgaagctcaaaaaacgaggcagtgcttaccttcacattagcaagtgcgatttcgtggtcttgaaaacgttttagttgttcaagtgtggcgaatttcattcgacatgtcactcaatcttcatttactgctccgcaacatgacacactgcgagaaattgaaaatggcaccaaatgaattctcttagctgtccttgtagaacacaacttgacgtttctgtcagagacagcagtctttcttttttcttctttctttttttttctttcttttttttcttttttatttaatgcaatgtgaaattgttggaaatgaactgtcaaatacatgcgaagctattctctaattctatgtcttccctaatctgtgcagg

SEQ ID NO: 114832 - DNA, 790 bp, Physcomitrella patens
  Intron number 1 from transcript Pp1s120_13V6.1 (locus Pp1s 120_13V6) derived from phytozome v7.0 (chr-ID scaffold_120 ; pos 64828 to 65617 reverse strand)
aactgccccagcctcgaattttggcgtcagcgaaggttcattttcgaccatcaaactgtttttaaattttaattacacattttttccgtcctatccctttgcagcatttcttacacatctaattaaagatcgatacttccaagggtgaaactagtccttaaaccaagattggctcgacatggaggtcttcatagtgttgctcctcactccagccaaagttcttagtctttgggttttgattattcaacattattgttgttctctccagttatattaagtacgatagagctcaagattttaaatgtgtaagtttagtcgtctaaccaggtttatatcatgtgtaaagtacggctcttttgtcagccagcagaatggtgacgtccttacccatttattctaagtgtctttgtcaagtagatctggatcagtgaaaataatgaagtgattgtgacttcatcgctgatccattatgttgcatgtagatttagaatcccaaccttctatctgttgctttcctcatttatgacgagactaccagaatgtgcaatattctgtttgtaggctttaaataattgtgtcatgaacaaactggtattgttcatgactagatgcgccctacggtttattgtttgattcagaacgggagtagataacactgcagttcttcctctgatttcgaagtcgaaatggcgataggtttaccgcaattgtagtggtatgaaacatgtgctaatcattagatttgtgcttctcaggtagtcgtaacaatcaggaaaacagtggcctcggc

SEQ ID NO: 114833 - DNA, 419 bp, Physcomitrella patens
  Intron number 2 from transcript Pp1s144_108V6.2 (locus Pp1 s144_108V6) derived from phytozome v7.0 (chr-ID scaffold_1 44; pos 826507 to 826925 reverse strand)
catccttggtgtaagttcaattcaatgtctttggtttaatcttcaaggaaacatttagtccaattatggtttggagtttgtaaatgtttcagtttatgtcaggcactgatagctgcaacgcgttaggtcgttggcatcgtttaggaacactggataaccaggcgttttgattttctttttgattttctttttattttattaaaaaaaaattaatttgctcttgtaatgcaagtattcttgattacgtacagtaattctaaaccatgtgttaagacctttagcagaagctctgtttttcacagtgctttccgtacgttttacatgtgaatattgacttgcttggttgtctttcttgtcttttttcctttactaggacttaaggatgagggttggcttcttgtgtaggtttaaggtgccca

SEQ ID NO: 114834 - DNA, 464 bp, Physcomitrella patens
  Intron number 1 from transcript Pp1s35_75V6.1 (locus Pp1s3 5_75V6) derived from phytozome v7.0 (chr-ID scaffold_35; p os 344564 to 345027 reverse strand)
cagttgcctgcattttctggcgtcctcttacttaggtacgtgacatgtgtaacgcaacatcaagagcattgctgttcaatggcacccagatagggcaattgtgttttaatcgtcctcaggaattttgtttttgaatcgggttgatgtgtttcaggaggagttgcatgattttatttcgcatattcttggtcatgtgaggcattcttttcgatcattgttcttgtttgaccttgagacaaagtaatcaaaatatccaatttcggcgagtggaggttgtagggacgaagttgatcaatttcggggacttctttagtttctgcggaagctgtacacaagggactgttgttgttggatcttgtttctttgtcacggatcgtatgttttatttttatggaaccagcttgtggagttgactagtcgtaatgcttctgtcgctgcagttcgccttcccagagaagaccaat

SEQ ID NO: 114835 - DNA, 953 bp, Physcomitrella patens
  Intron number 1 from transcript Pp1s5_239V6.1 (locus Pp1s5 _239V6) derived from phytozome v7.0 (chr-ID scaffold_5; po s 1644387 to 1645339)
aggggatcaaagtggaacggattcaggcttgtcaggttcgtgctactgcattgtgccttgggagcttggattgttgcaaggatggaagatgtttagcgcagtgtgccactcccgaaaagaaagtgtgtatgaatctgattctaaagagcgaattgtggagatcctctacatgtggttcgattgaacgccatgtttgcgaagaaacagccaaatcgtcacagagaatgtccccttacttttatttttgaagaatgacgtagcatatgatgctgaaaaagtacattttgcgagttagcgctagaatctgatacacgagggctggaaacctgtggcttgaaactctgtaattggatccgatttgactgagtggatttgaataaaacatattacgcttcttcttgagagtttaagcctctctgcagttagagttgatcaatttgcagacagttttcaccgcttctgatcgtggacaccaagatttagtccccgcgatggatgcatcattttgtagctgttatcaatagcgcctagtaatttgatggtttggttttgagtattttggatctgtctctgcacgtgttcaaactgctccctacctcgcatgatttattctccgtaatcatctcaaattcacacaatgaaggtttcaatcccttttcagggatagagaatccaataacaatgatttgttcctcaacatattattgtcattgcatctaaagcccatgttgattttacgaagacactgactttgggttcagcttttccaaactcagaatagtgcatctgattcattttatggctttcttaaaagcccaatgtccattcattgagtgattggcgaggttccgttacaataactcaatgaatggtgagagtttgtcttgcgctttactgatgcactttccgttgtcgtttgctggaatgagcaggtggctttttttcttggattg

SEQ ID NO: 114836 - DNA, 828 bp, Physcomitrella patens
  Intron number 1 from transcript Pp1s41_47V6.1 (locus Pp1s4 1_47V6) derived from phytozome v7.0 (chr-ID scaffold_41; p os 348013 to 348840 reverse strand)
agccaaccaagacgccctcgacatagggatagaaggtgagggaaccagttacagctccaggataatcttactcttgtttgttcgagttactggtgaaggtggtcggtgtaggttgaacagtgcggcgtgcaatgccttccatgaaattggatgtcacattcttaaacacgctgcagggccacggttcttgtctgcttcgataacgtaggctgaggtttgaaacatagtacggaagccacaaatcatttcttcaacaggttggcgagattgtactcagacttgctttgccctggaatggtatctcgtgttagttagctctgaacagcgtagcaacattttgtgtaggctgccttttcggtcctgtgcagcttccagttcagccaacattcgtttgatcccgtgctagatagttgtctttacagtagacgtcagagccatatctgaaaatctacgctccgaagtgattttgcggtcatgaattcttttgtcgagtcgcacactgaacgcttgcgcagcaaatatctaccgtgtgcgaagtattaatgcagatattctgttctatttggtagggcttctgtgtttctatccgagtctaagggccttcatttcatagttgagctctggttttgaatatacagagatgttctttaggatcgcgagcaccatctcgctacctgatattgtgagctctaagcttgtgttgcacacaactatatctcacacaatctatcatcaactggtgctgactgcttgttcaacagtatctaaccggcattgatgtcctgttgtgtagagaggagacgggctaccgcgtggtttagctgtctg

SEQ ID NO: 114837 - DNA, 699 bp, Physcomitrella patens
  Intron number 1 from transcript Pp1s301_39V6.1 (locus Pp1s 301_39V6) derived from phytozome v7.0 (chr-ID scaffold_301 ; pos 446805 to 447503)
atttgagttcccaagcttgtctacgttcctggaaggtaattcccttgcggtttcggaattcccaaccacaatcacgagtgttttttttcgtacgggaagtgaggcagaagaatcttgaagtagccggggtcatttcgcagaaatatggcagaagtttctaatgtctaaaccctaaacccggaaggcgcatgttcgttatttcttttgactttagtctttttggaagcattcatttgatcactttcgctaattcagctgctgcagcagctgattcgttttagtactagctggcctatgcgcatatcatgcagtgttcgaaacgagttatgcaagtcggaaggaattcagtataatacatgtttgtatgattgaaacggctttaatagaacttatcaggtcctttgaattttgcaatggtgagaaatccttctagaagagtaggttgtgactttcggtagtcttttgttacaagtgttgaatccctcatcggatgtcatcaagtaggatgtgttgattgtgtatatttaaaaatttctatcaaaaatgcattttagttacgtagagatcttcgcataagtgttatgttactaatagcggtttctattcatcagacgattgtgtttttgttttgaaataagttagtttctcaaaaaaatggtagaattataattagtgttattgaatattttttctaggcac

SEQ ID NO: 114838 - DNA, 940 bp, Physcomitrella patens
  Intron number 1 from transcript Pp1s128_51V6.1 (locus Pp1s 128_51V6) derived from phytozome v7.0 (chr-ID scaffold_128 ; pos 457347 to 458286 reverse strand)
gttcttttcgcatagtcaacgattgctcctttgtcgtaagttatttccccgttctcctttctctgagtataattcaatttttaatgaggccttttacacacacatataccgctagtattgctcattttatccctcttaagctgactagtattaactaagtaattagctgactagcattagccaaagagcctgcatagctgtaacagaggtatctcgaattgcacaattattgagcaggggtaatgtacgtgatgaggttatcggactccactactattttgttgtgaaaggttcatcgtggacatgaaaattgctgttgtccctcatgtaagcttttcggcttttcaatcctgcaacgtacagatccatgctctgtggatggtttctgttattttgtaatgttaaaaattgtttatggtcgattgatctttcttggcttggacttttgattttataagatatgcacacacacacacacacacacacacacacacacatatatatatatatatatatatttatatttctctctctctctcttgctctcacacacacacacacacacagtgatgtaaataatgcttggtctcaggtgtttgatgtcttttgagatcattactgccttttccttcttgtgagatttttattttgcctcatatattctatttctaatgctctctccatcactttccgctgtattatggaagactcgccgtttggagttattcatgacagagtcaaaccattgacagtcaacggaggttttcaaagatgtgacggtttgtctgcattgttgcatggttaattaagagtgtttagggttttgtaatcacagggtggtttgcccttcgttttcagcaaatcaagtttgcattgcagctagttactttactcaagtctttcgtgtgttatgtttcggatgcaggtcagcagatttgac

SEQ ID NO: 114839 - DNA, 547 bp, Physcomitrella patens
  Intron number 3 from transcript Pp1s133_25V6.4 (locus Pp1s 133_25V6) derived from phytozome v7.0 (chr-ID scaffold_133 ; pos 161544 to 162090 reverse strand)
aggttgcggtgggtttgtctcttcctcctttctgtggccacatattccgtctaaatcactgaagttttgatgaaggcctgaattgggcattcgtgacattctttcacgacgtaattatcaatatttatatcctggttgttggttttgccaagagcttactctttcagttatagcgagtctggagtgtgtctgtattgaggatgtattcctttcacctttctaacgcagtattctgaatttaaccttgatatattaataagataaatgtgtggttagacctatggatagtcacgtattacgtgcgagaatagaaaataaatacaaaatcgcttcatgattagtaatgttcactttttgacttttctcttatgaatcagcgaggattggaggatgatgatttattttttattttttttgtgtttcgtttgaagcctacagaatgtgttttcttgagccatttgactcctcatttggtgtgacactgatctcaaagatatggcgacattgttcaggtgaaaacggagaggcatatcattgaaggtgatcc

SEQ ID NO: 114840 - DNA, 713 bp, Physcomitrella patens
  Intron number 1 from transcript Pp1s133_25V6.4 (locus Pp1s 133_25V6) derived from phytozome v7.0 (chr-ID scaffold_133 ; pos 162771 to 163483 reverse strand)
ctgattttcgactctccagctttcagatactcgaggtatgcatgtcgaattatttttgtgtttggtgttggtaataatgggcttcggctgatttgagtgtttgaagagttagtttcaaggctgtgttgtgtgcgagttgagacgggtctgctggatttgtaagaagacctgtggatctaaggtctaggcacctgtcgtgtgaccgcggtatttttgtgtgggtgcggtgagtttttaaatttattcgttttgggtctgtgtttgcgatgagttgcagttcatcgtcaagttaaatgtcagagatttaaggcttatttggggcttattgttaatttggcaagttttgcacacaattccgttctttttgaagcagtttcaacattgtgcgactgcttagggatagatatgttcaccgattggtcactagccttgtgtttcaatttttgcttaatcttggacgatgaagttcgtgagaagcccatcgtacactgacagaaatgaagttcatcaggagttccgagcagtcaatcgatggcactaggctgctggggccattttttcggaagtttcaacctcatctacttttctcgaaccctggatggcagaacgaaattttagtgtttcttccttctgttgtttttttctctgcttcttcttgattggctattggttttgcaggaatcccagtgcccgtgtcgtgttttagtgactca

SEQ ID NO: 114841 - DNA, 1044 bp, Physcomitrella patens
  Intron number 1 from transcript Pp1s65_109V6.2 (locus Pp1s 65_109V6) derived from phytozome v7.0 (chr-ID scaffold_65; pos 610816 to 611859)
cgaggtcatcttccaagagcgtttcggtgcgattctgtactttgccttcttctctcgtgctcattttgtcacatactatcggcgtgcagtttgttggtttattttcggtttgcagtggcaagtttcttccgatcgtacttgcattatattgtgtgacatttcaagttgtttgttcttgtttaggggttttcagcttgagtcacttatgcggccgtatggtcattttcttggatcccggtgtttgagtgcgtcgtggttttgatgttgtggagaacagaagtttcgtgcacactatgctggtcacttcggtggcctgaccgtgtttttgctcactctagggataggcagtgcagtgaaaagtgttgtaaaaattgtcgacgaaggcgtctttgaagtctattcagtttcagctgacgattgagattattcatatggtaattacagctttgatgagcttattgtacagagtattgtgcgtggcctgggcattgatttgttatcagttgttatttagagttggtttttttgacaatctgcgatgctttttcccctgtcgctactccgtcatcatcctccgatgatgatctgtagtagaagcctatttttgcgctgcaatagcttcatacgagcacgtcaactacttctaaagctgactcgtgatcagcagctagagtatatgtctgtcccttacgtgcgcagcatgtttatttacattcttacggctacatgctatcgtgtgcattactctttctccttgcagttcatgctaagctgaaatgacttttcgtttgaacatagaactgaccctggttataaaccagcttggctttctttaccctcatctaaacgagtggtataatagtatcagtgtactatttttccgagttctaatggaatgggcttcgtttatttgttttccggcattatttaggcgggcagagtgttggttcgctttcaccttattgagattagcttaactatcttcttttgatgttatctgattgcgtagacggttgggagagtcgctggattcaatcaaactgg

SEQ ID NO: 114842 - DNA, 742 bp, Physcomitrella patens
  Intron number 1 from transcript Pp1s124_74V6.1 (locus Pp1s 124_74V6) derived from phytozome v7.0 (chr-ID scaffold_124 ; pos 573819 to 574560)
gttgagttgagcttcgatctggtggcggtgtgaaggtgagctgcttgtcactccgtggaaattctcttgctccacgattaccgccggatgaatgtaactcttcagtttgttgttgttgtgactgtgtagcttcctttgcattgccctgcgaatatgagctgtttgtgttttgaggacgtattctgtactgcgcagcgcgctatcaccgagtgatagttaagactctttggggaagattttttcctttggtgaagttgtggtttgggcaattagggatcgagaaacctcagactttccgtagttatgctgcgaagggtttaattcattaagagcattttcgtttcttggaaacagaaagaaaacatataacctgtatatcccacggctgaagcccagtagtaagagttttcgcctgtagattgacttaggtcgcttttgcgattattgagacgagtgggtcattactcgaaaatagcggaacaatatgcctctgctggagaggcaacgtttctggacaactcagtcggttcacttgaggaaggacgagaggaaggagtcctgacataaatcaaagagaagttggggaacagcttcaagtagcttgacactcgtaggaaatgctgttctttggtattaggaatggtccacttcgcattagtagacaccttcagtgatgtggtacatgtcgatttttttctcctcagaaggtatatttgagggtattggtggtctattgtggttg

SEQ ID NO: 114843 - DNA, 546 bp, Physcomitrella patens
  Intron number 1 from transcript Pp1s87_56V6.1 (locus Pp1s8 7_56V6) derived from phytozome v7.0 (chr-ID scaffold_87; p os 419228 to 419773)
acgtgctacgacatctatccgctaaacgagcaactgcagtcagacttcacaccatacatacgaaaataatatcacagaaatctggatccttttccaatgcaaacctccaaaatagataaacacacatgcttcgattccggacaacctaatcacagtttacaccggaaaagtacgaaacaacaaagaaaataaaaacacccctccttgcaagatctacgctccaacaaaaacatgataacaagatccaatcacctgatacacaaccaaccccccatagtaattcccagaaccaaataaccaacctccgaaaaaattaaacggacacaaatcatgcgcaataaccgccactcgaaacaaccaggaattacaaaaatcactcaaggcccaccattcaaaacagtataagctatatcaccagcactcaaaaaaaccaaaaacatcgaagaggaataaaacatcgtctcaaactaaaagaaactaaatcacatcaaaacatataaacaacttccagctctatactctggccaattcagctcagcaatcgaa

SEQ ID NO: 114844 - DNA, 943 bp, Physcomitrella patens
  Intron number 1 from transcript Pp1s126_151V6.1 (locus Pp1 s126_151V6) derived from phytozome v7.0 (chr-ID scaffold_1 26; pos 1030933 to 1031875 reverse strand)
tatcagaaaacgccccagaatccagctgtgatcaagtgagtgtctgttttccctgatagcatttcgatgaggtgtgcacacaagtgagcttcccgcagagaatctgcagtattttattagatctattgccaaagttatgattttacgttgatggtgactgacgctttctggccacctcatgatcgtgttttattctgtttgtttttttcatttttggtttgttcgtttttttcatttttttcctttcgaagtaattttttttttttttttttttttttttcctccccattgtcaatctctctcaccgcagcgctgcaggagccataaaactgtgattgtttcgctgaggaatgctgtaaaagatcatgttcttcccaaacaactcccacacgagttgctgtgaaatgaatccatcacttatctcgccttctacatcgtctgtggcgatgtgttcgtgcacatggtgcgtcgcaatccgactgactccagcgtttctgatgggtcctgtcgattccacggtaaactccaccactgcaaatcgatcgtattcttcatactttgattcaattctcacatggtcttcatccagaagaaccaatttgtgcatagataagctgaagtcagatggtattataggccgacctagataaacatagtctaattacacacagtgtgatccaggattacatagtaaattgattgccactgtatggaccatggttagcaacatgagatgggcttttccacagtgcctgagctttcaaagtgtttgagtccctgccattgtgaacaaaatgcagatgctcaaaccaggaggctgtgctttttctgtattcataaacactacagcatgtagttgacatgttcttcaaaaacattacctttatgtcattgacatgttcttcaaaaataatacctttatgttgttgagcagggtggttga

SEQ ID NO: 114845 - DNA, 363 bp, Physcomitrella patens
  Intron number 1 from transcript Pp1s105_10V6.1 (locus Pp1s 105_10V6) derived from phytozome v7.0 (chr-ID scaffold_105 ; pos 136967 to 137329 reverse strand)
tcatcgttcatcttgccggcattacttatatttaggtattcttcccgttgtttcattttttgaaatctgattttggggtgtcttttctgtgatctatgtgcgatatggatatcaaaagctatttggatcagaattggtcagttttggtattgtggtttgggtgtcgaggattacagactttggttttagtgaggtttattattacgtctttcgggccgttttaagcttcataactctattttcttaaacaagttctgtaggattcgtggactcgtgctctaattatcgggttaatgctgatgtttgttttatcaattattatcaacaggtttgtagttctagtggacgctttttcagtgttag

SEQ ID NO: 114846 - DNA, 1035 bp, Physcomitrella patens
  Intron number 1 from transcript Pp1s87_155V6.1 (locus Pp1s 87_155V6) derived from phytozome v7.0 (chr-ID scaffold_87; pos 1142357 to 1143391 reverse strand)
tccaagtcagtttcatgtcctttacctctcatttttcgtattagtcttcttctgttgtactctaataatttgtgttggagtagattgcgctcaagcgatgatatgatagaaaatttatgctatctagtttgtctttttttccctcctctttgtggaaatccacgattaggtcaccgtgcgttcctcagatgttttaatatttttatttcatgcagtagatttagtggtaagaactatgatttataattgcgtttcggagatgattctcttgacttctcgagatgctacatgatgcgcgcattctcaatgacttccctaattttcgctcttttccgtagatattttgctgataaaaccacctcgaaatgtggtgtgacgagatgaaactttgggtctgcactgttgtacatgatgagttttgccatacagtctccaaagttagtcgcgacttaatttcttacttcagagatattcttagtgtgcgttttcctgcaatgactcattaaagggccttggttagtgttcagtttgtgaggatgacgcacatctaaagatgattttgcgaacgttggataattgtttatggaacgcttcgatgtgatcatgagagctgggattttgttcgtttttggtttttctttttcttttttgtgagcactcgctagtatgcgtagtagtttgaacttatacagcttctccggtcggtcttggaatagtcctgagctaattcagctttattgtaacaagtagaaacggcatgctgttggtagatttaggatgttatttatctcttatccacttaacttcgtgaattggaattatcagatcaaataatctatttttccagattaggtcgtaacttgaaattgtaaacgaatgatgaatgtctgcgctttgtgtctaaaagctttcttgagtctctcctacttggcagtatgcaggggagacgatttctctagtgcatgccttgtctctgattttcatgtatggattgtggcaggtgaacggttgtcagcaactagtggcaacctaacg

SEQ ID NO: 114847 - DNA, 752 bp, Physcomitrella patens
  Intron number 2 from transcript Pp1s78_207V6.1 (locus Pp1s 78_207V6) derived from phytozome v7.0 (chr-ID scaffold_78; pos 1425222 to 1425973)
tagcctcgcaggggactgtttccaatctttccaatgtaaggttccattacctgagggctgtatcatgaatctttcatttgcagtgaacttgactgtacttattttgcaagtattgaagctccccgatgtggtgcctagcttttttgatacttgtcctctatgcttgataatttgttggctatgtggctatcgcacccgaagcttacccttacagaacttaaattcttatcgccttttcggtgaaaactatcagtattcaccttgagatgttgatctcgtggtcaactgtacccttgccatatcgaacctatactacctcttgctctcgtaagattattaaccaagactttcgggtggatttgtgaaggtgtatgggcttgctattttcgtataggttttagctggtagctatgtatttagttgtaagcttatttcgaggttcttcaatgaacatttgaaccgggaaatgagaaataaccatgaatcagttattattgccaggatagtattctagtgcaaaataacggttttgtattaaaacttaaagagtttaattttaacgagtgcacttcaacaaagagaagtcaatggtgcactgtattacacaaatttttaatttttttaatattttgattctgtttatatttttcttctctttctccatgtcaataatagtgaagaaaatcttattttttgtaaatcatcttgctcctgttctccttaacaggctttaggttcacaatatttgcagg

SEQ ID NO: 114848 - DNA, 690 bp, Physcomitrella patens
  Intron number 1 from transcript Pp1s304_34V6.1 (locus Pp1s 304_34V6) derived from phytozome v7.0 (chr-ID scaffold_304 ; pos 245238 to 245927)
ctccattgctggcgagcttccgtcttccagcgaaggtgtgtgttgtgtgtacttgcgttcgatgtttggttttttgtgtatggtaattggttgaagtttatgaggttgtgtttagagttccatggtgtccccctttgtgtgaagtaggtcttggtgttgagatgtttgattggaggtgcttgggttagctgctactcgctcagtggcatgggacagtcactttattcatcgctccgagatgttatgagtggatctgaaagagaaggtagtgttactctgtgaagtaaatttagggttttgggaaatttggtataagttgttacctagttttatgctgtctgtggtagaggggcggtgatacgtctatcttgcttcgcattggtcatctgcatagtgagttagagctaactatgatttgctcgtatttatgccgagtttgtgtatcgtcttctttctcagataatgcgtcccatgacaatgctctccttttaactttaatggattggcgctctgtgttgaatatagcagccagccaatctgtcgtcgccgtgctatcagttgactgacattattgagctccgtagaaactgcaatcatcttgtactctatggatttcagtagctatggtgtgtctaatgatgagtttcttttcttttgctgcagatcctctgcctacgagtagccccttga

SEQ ID NO: 114849 - DNA, 503 bp, Physcomitrella patens
  Intron number 3 from transcript Pp1s13_309V6.1 (locus Pp1s 13_309V6) derived from phytozome v7.0 (chr-ID scaffold_13; pos 2010296 to 2010798)
ttcttgggcaaggtggctttggtacagtctacaaggtactatacatcaccttacattttgtatctttttgcatttcaatgttttgataaaacttttttcctttaatttattttaaaatatattattaaatacatatatacaagcatgttttttgatacatcaatacatagtaataaaaaaaccaaatcagttgcgtatttaaatttggattcatgtaatgttcgtttaggactatatgaccctatatatatatatatatgtatatatttcttataaatttagtttaaaaaattatattacaaattaaaatcttatatacatgttaatgcaatatatttttgaaatttttttgtgtataattcaacgaagtatttgcatatgatttttttcctcataatttatttattttatagtgtgttatagttttgaagtgatggtgtgccctaacaaatttgattgtgttttttttttttttcttcttttaaattagggaaaacttgctg

SEQ ID NO: 114850 - DNA, 545 bp, Physcomitrella patens
  Intron number 3 from transcript Pp1s128_48V6.2 (locus Pp1s 128_48V6) derived from phytozome v7.0 (chr-ID scaffold_128 ; pos 437078 to 437622 reverse strand)
atccacattggggtattggtttcctttcctgttccgtgactgatgaagctcttcgaggtttttgctttgccatctggttgaatctttcggcagaagtttgttgagagggtgaagacatctgaatagtgcatatagaaatcttaggggaggaaatgatgaggacagtaattgctacaagaagctgaaaatttcaaaagaaaaaaagaaaaaaaaagaaaaccactttttaagtccttgggacaagcttggtatggcgatagccattgttcggtgttcttattctcgtgctaatggaatgaattcatgttttcgcaagcaaaaattcccaaatctcattctcaacattgtagagaaagctgatctgaatgaaagaaatcaagcctctagagcttgttttgtgtgtggtgacagatgattttgagtgtctgtgtttcttttttcgattgcaacatgcattgactctcgaaggcattgtcgctaaacagagcggtattgtgggaaaatttgcaggaaccggcacaaagaaacagcggaatttactttca

SEQ ID NO: 114851 - DNA, 733 bp, Physcomitrella patens
  Intron number 1 from transcript Pp1s175_102V6.1 (locus Pp1 s175_102V6) derived from phytozome v7.0 (chr-ID scaffold_1 75; pos 618842 to 619574 reverse strand)
ggctcataggaggagggtgagtcgggtgtgtcatgggtttaattcatccgtatctagcgcgctagtgtggttttcattgattgtggtggtaatcacatgaggtgggtgcttgtcatggcgttgtggacatgtacagagggagagagaagatcctgcacattgcgtgatttcaagtgaggaggattgttgcatggcggagagctggaatggtagtagcgggtgtagggtgactattttgggtggcgggggtttgtgggggaatctgtgattgggttttggtggacgtcgcggtgggggtgcattgtcatggcttgacttcagtagtcagattttcttacgaggtcatggaaattgtatattggggaggaacaaaaaccgattttgacttggatatagttcctaggtcaaggagtcgtggaatgtcatggattcatgtgtaatggggtacgctgcacggttcattaagttgcgatgtggtgcacacatggaatggtttcgactgcgggatgaaaaccatgagtttggtttgtgttatacatgtgtcgccatggatacttgttttcaccgatagcattagtgctcatgttatggcgccttgggtgtgtggggtgttcgatgaagagcaggaggcgaaagaggatgcggtaaatatgtacgttggtaggcatggagataatgatgtgcttgattcttctcaggatctgtacgaggcgcgtaaccactctctcctccc

SEQ ID NO: 114852 - DNA, 1021 bp, Physcomitrella patens
  Intron number 2 from transcript Pp1s169_16V6.1 (locus Pp1s 169_16V6) derived from phytozome v7.0 (chr-ID scaffold_169 ; pos 45945 to 46965 reverse strand)
aaactaccgcattagtgtactccgcgtgaattcaggtacttcatccattgcgtattcaatgggatgtctgatagttttgtgtttcttcacggtatttgtttatcattcacatgtatccgattctagtgactacgaggttcttgctggaccatgggatgcaacgttgggattattgggtaactacattattgctggaaggcgtcgcgggcttaggcggttttgttcaattattcaagagtgtttggtgcgagattagaccgtctgtgacattttctttgttatagtttttgcaacttaatcacagagtgggttcgaatgagcctggtgatattgtgcggacgttaacatgagtttgactttactcattcatgctcacatgcgaactatgatcttcaacacaagtggggaaaaagtcgactcgaactggagtcttagagattatattttagtgatagtccagtactactcgcatgcaaggaaatcatatgatacaatttgaaagcaaatcgcttcttggacttactgatttgttttaaatagcatgcacaattaaatggagcagcagcgtcaatggattgtgattgactagatgtttctgaacgacattcgcgagtatagtttctcttcaaaggtgttgcaactcaagaattctgccttgattcgacatgcaagtctcattttcaatcaattagggtttatcgttccatcaaataaatgaatacatattgtacttgtacacgtttgaaattagagattgaaaagtgaatatctgcgtctggcttcgtgacatcagagtcgaaattagacgctattcgaaatgattaacagtgagcaaacgctttagatatgacgctaagaatgacgccgtgagggccttttcatcgcagatttcatcgggaggtgctgtatcgatatatgagcacgaaatttgcggaggcaccaagtttgtatcaggatcttagcgaacatggaggctcttcatgtagggggtgggagacaacgggttactcactcacagtct

SEQ ID NO: 114853 - DNA, 624 bp, Physcomitrella patens
  Intron number 1 from transcript Pp1s16_248V6.1 (locus Pp1s 16_248V6) derived from phytozome v7.0 (chr-ID scaffold_16; pos 1983844 to 1984467 reverse strand)
gaggtggggaatcgacattcttgagttcgagcaggagtcataggatgttttctttacattactgtcttgtgcagttctaatgatggatcgcgggcgtagtcagagatggagagaaatatagcacaatgcaaagggtctaacctcttttggaatattggcatccaggtggttgtaggttgcttagatcgtatacatttgttgaatgtagctgccaccaaggagtgaaggtcttaaaaccttcagaggcatatcgcattcattgttctcgaagagaacgatttgtgtttggatttcagtttagatattttagggttattgattttctacaaattaaaaattaatattccaagtctcattaggtttattttaaatttatcatttttctatttctactcatgtcgctagaacagcgattggcgaggaatggtgctggtttgaaagagagagcgagatgaattacctgcagtaatcgtaacttaccagtcagtcccgaggggtggattcagcggcttgcataacacccccgttcaggagggacattaggcatggcggtagtttgagttgggaccttgggttgatcatgtgtcagatttcgtcaccaaccaccattgtggaaagagctgg

SEQ ID NO: 114854 - DNA, 859 bp, Physcomitrella patens
  Intron number 1 from transcript Pp1s395_19V6.3 (locus Pp1s 395_19V6) derived from phytozome v7.0 (chr-ID scaffold_395 ; pos 94073 to 94931 reverse strand)
gggagggagtgcagaggtgtgggcttctccgccaggttcgtcactgggttgggtcaaccatcccgcaattccttggttttcgtggaaagcgcgcagtgggtgattgacgcgttgatcgatggattcgtgaggtgggtctgagaatcggagggtgcaattggggccatgtccagcagccggtcgtctccgtgtggagatcacggatcggttgttgtagtagcaaggttggggtgtaaggtgagggagagggatagagggtgagtagcgccgaccatctttgacatccgttactctatcgccatggctaatttggataattagagagaaaaatcgaagaaaaagaagaagaagcagtgaggttaagaggatcggtgctctagcaagcattccgcacagcagaacgagtttcgagtaaagtggttgatttttgagtgttttgagtgtgtgattatagacactgggttttgattccgcgtggagctttgatgtgcagtgagtcctgtgcttgctaaagtgtgtttcatcgcttgtggaagttctatctttggttcttgcagttgagggtcggagttgatcaattggacgctgcccttagtggagttgatctctgccagggtcacctatttacggtgttgcgaacaagtttagcagtgaattttgctctcgtatcgttgttttggggctctagactagttttagactggttaagactgttgtgagctagaccgttttggtagcgtcaagatcgtttttgttttttgaacacaagaaggatccaagatggggtggtttgacaaatggttgggtgccgaacctgggtcaagttatcgttacgatcaaggatttgaatatcctagac

SEQ ID NO: 114855 - DNA, 823 bp, Physcomitrella patens
  Intron number 2 from transcript Pp1s376_7V6.1 (locus Pp1s3 76_7V6) derived from phytozome v7.0 (chr-ID scaffold_376; pos 38810 to 39632 reverse strand)
gtattcgcactcacattgcgcatcctgtgcctcaggtttgtctccaatctggggtctgtctgatttctcctcctccacctcctcttctcactctttatgtttttcttatcttattagatgaatgcagtgtttcttatcttattagatgaatacacttctttgtgatcctaactgtaatcatcgtgctatatcaaccagctccgagtgatcgattaccaagtccactggtacatatgcgtggtgatcttttgagattctttaccagcaaacttgagggtgatgtagaaggatttgcaggtgacctcagagtacatgtagcgcacgcaagaaaggacagtagttaaatgaacaggattttgagtgaattccttacatccatgaacgtgtgcatcggcctctcaacatctctgcaaggaccacatcaaacctggcatctttacaagccatctctagcttaaatgttggagactgttaatccacaaacttgtgggggtccacccaagcgaatttgttggggtcaccactcaagcgcttaaccgcatcccgcatcgcagctagatcgaaatttagatcgtcgtggacgattatatcctcagagttgtttgcgagcataccgtcctccggagtgttggttgcgtatgcaattgtagccgctcacatggtttctattaaggttatgtgtctaagattcgttattatattgaatgtgccgtgaaaacatttccctcgactcccctacacgcttttggataatatgactggaagataatgtgttcattttttagcaggtggttggagcacctgttaaggagcactcagaatt

SEQ ID NO: 114856 - DNA, 497 bp, Physcomitrella patens
  Intron number 1 from transcript Pp1s13_270V6.1 (locus Pp1s 13_270V6) derived from phytozome v7.0 (chr-ID scaffold_13; pos 1821789 to 1822285 reverse strand)
cgtcgacgcggtcgagcgtttgggtggcgccgatagtaagccaatcgtgcctgtctcacatgtccaaaagtacaattgcacatgatcttgcttgtgttctggtataatttgatgggatgtttcttagttctgggaatgatgagttgtgccgatgcgttcttcatgacaggagatgtaaatccccagtagcatccgtagcctcatttgcatatcttaacctctcgctttttgtttttgtccatctgtgtgtcttctcagagtttttggtttttagttgttgtcgtttttatttattgtttttatttttatttttattttttcgctcacggaattcttgctgtatgaagtcttatttctctcggagactgtcggaaaaaatacatattccagattgtgttctctgtgttcgagacgcctcgaggaatgcgtttagactgaacgatttttgagctgattgatggtccttctgaaatgcagaagctactccgaaatcggtg

SEQ ID NO: 114857 - DNA, 717 bp, Physcomitrella patens
  Intron number 1 from transcript Pp1s100_38V6.1 (locus Pp1s 100_38V6) derived from phytozome v7.0 (chr-ID scaffold_100 ; pos 220259 to 220975)
ccgtgatcgattcgctgttactggcagctcacaaggtgagtgatgccttttctttcattagtcgtgatcgtaatagaatcatcctctagtttctgaggtcttggaaccttttgtttgagtgcttgaccgccgctacaagaagcgtatgctccgtcatgtgaatattctcttatcaatgcgagtgcttcgaaagttgttgacgctgaagacgcgaattttggtttataatcattttggttcacgcggatacacaatttgggttttagtatgccctctttatagcaagcatcttcatatctgaattttggaatcctctgtgtaggaagagagcccagaataaaatgaaatatttgtttcgtttcttttctgcaattttctcattttcgatgtgagaagcaccctgtttttattctgaactacgtccccgttcaaaaaaatcccgctaggttttacctgaatgatttctgattagtgatcgtctctgaagttcctaacaccggaattgtccaatgaagtctggcgaagaggcaaggtccagctgaccagtatggctggataagatgttgatttgtatcagtaatttgttttattttattttattttattgttgttctgaactagtgatttgaagcttattgtaactcgtttttcaggaatgctgatccttcctgttctgtttgtggtcaaagttgttgcatcgggagccaaactgtgtgg

SEQ ID NO: 114858 - DNA, 476 bp, Physcomitrella patens
  Intron number 1 from transcript Pp1s80_154V6.1 (locus Pp1s 80_154V6) derived from phytozome v7.0 (chr-ID scaffold_80; pos 1044305 to 1044780)
cagctcccctcccagcttgttcttcttgagcgcttgtatgttgttttctattctccttttcttcctcttttgtctcgtgttgagattctatttattagtgatgcttgaatgtctttcactctgcgattattccgacattatctcagggttttagtagtgcgttcggttcatcacccccccccctttttctctcttcttttactttttttggctccccttgtgaggttttcggccctatatcgaagtatccgatgcgatgctgaagaagtttgattcgttttagcaacaagggcatgggtgcatacttgtcgaatcttcgataggatttccattctgtaacagggttttaaataacttatttatttctaaaaaattggactgaataaatggatattgattttatgcgctgatttgttgcacttaaaaccaagtatgtggttttttagtccattacttgttcgatggagatggcagga

SEQ ID NO: 114859 - DNA, 978 bp, Physcomitrella patens
  Intron number 1 from transcript Pp1s1_338V6.3 (locus Pp1s1 _338V6) derived from phytozome v7.0 (chr-ID scaffold_1; po s 2171170 to 2172147 reverse strand)
gctgttgtggcgtgcgcatcgcgagctggttgcgggtgagtgttgttcttcatcttcttcttgaataaacgaaacgtagtatatttattttttaaaatacattaatccagctagatttggatttttttgatttctttttgtgattttgatggattttgatttcgaagagttgatccgaggaagaataggtcgcgtttcttggtggccaagcggagtgtgatggacgtaaaacgagggctaggtaatttgagaggattatcgagtggggtcaaaatgggattccaagattcgaagtcaattctgtcagagctgaagcgtttttctctgagagttaggttttcgaaccttcatctccgttattgtcactgtcgcatgtagccagcggtgtgtgtgggttttcatagtttgcctttcgaatgaaccttgtttgaattagggtttatttaaaatgagatgcttcgaacttggctattcggttcagtttttcaattatgatttccgagtcatcgaatcccttctggaaatggaaaattccgtccctgtaagtggagcatattttcggcttatttgaaggattacgataatagagattaagaagccgaatgctctctgtattgaaaatggtagcatttagttaatgaaactcctgggtagctgttttagttcaatcatgctgtacggttggttacaggaggatttgggtcactggttaaactagaaggctttggcgataatgtggcacaacgagcttctagtctgtcgttttgtttgggatgtgggtggaggcagaatatgctggcagttagaatttcactaccactgtcgtctgtttgttgtatcatatactgctgtttctttgtaggtgaattagaagttatgagccttgattacggtttcaagaagttaaggttggaagccgtgcatagctgaatctttatctggattgtatggaatacaggaggccgaggcgttattagt

SEQ ID NO: 114860 - DNA, 742 bp, Physcomitrella patens
  Intron number 1 from transcript Pp1s126_79V6.4 (locus Pp1s 126_79V6) derived from phytozome v7.0 (chr-ID scaffold_126 ; pos 455794 to 456535 reverse strand)
ctgcgattgcgatttcttgtctcggagattaggtgggtcgaatcactcgccccatcttcgaggatttggaagttgttggctggggtttagtgatccgcaggttttagattgaggaccattctgacgtggatattttgttacgtggaagaatttcccgcttgcaaatacaacttgcatggtgattctttacttggactaagtgctgatgcagaggttctctgttctcataagattttagtgattgtcattaatgaagctcctctcgtgtgatcaagttcttttccatgtgtgtttcggttccattctagtgattattatatgggaaattatgtacgtgcggatccagctgccgttttgcatgctgacgatgaatgaaatgtcgtccgtagagagttgaaatctacagtccagtgcgagaatgacctgcgctgagctccatgatcgtcaaattttatgatttcgaaattctaagctcggatgttttggtgtttccctcgtttagggttcaagttttagttgtattcaaaggattttgtgtttgatcatttgtggggcgattccctcgaagtttcaattaaggttacctcaagtaaccgcccatgcaaaactgtttggaaagtaacctccctgtttggcagaatttgttgttgtgttcctgattaaatgtttctcatgcacattagaaagaaagccttgagtgcaatgtctaattcacgaaatgtgtattggagagcagagggag

SEQ ID NO: 114861 - DNA, 585 bp, Physcomitrella patens
  Intron number 2 from transcript Pp1s17_95V6.1 (locus Pp1s1 7_95V6) derived from phytozome v7.0 (chr-ID scaffold_17; p os 413440 to 414024)
gtcctcacagttctatcctttcagtattcgacaaggtgagcatgtagttaatgcctctttacagttgtcattaatgtgtagttgagggtgcaagtagaacagaaaaatattacgtgtatttcgttgtaaacaactttgtttttattacagccaatattagtaagtattattttattttattttaattttctttgttctgtaggtgcattatcttcatatctatgcgggatgaaaaatgtcctgaagtagtactagcaattatatgatcatttttttcatgaagagtcagatatttttcatagttgagggtgttacagcataatataatttactgtagtatttctactaattttagttagggctgtccaatttaggtagtgggacatcaaaagcagcttctatggttttcaacttggttgtttctgacacgtaagagaaatgcttgtccattcaccttttcgatcatgcaaaatgggtttaattctgcttggttctttgggatttatggatatgcttacttgctagttttgtctgcacacttgtatgtcaggttcgaaatcagcatacgaaggaggaccgaaccct

SEQ ID NO: 114862 - DNA, 882 bp, Physcomitrella patens
  Intron number 1 from transcript Pp1s23_111V6.1 (locus Pp1s 23_111V6) derived from phytozome v7.0 (chr-ID scaffold_23; pos 864626 to 865507 reverse strand)
accattgcagctcatcgccacagctccgcgaagaggtccaattctttctcccatttttctcattatcggtctcttatcttgaactgctgagtttgacacagaagctatcgtttgtgctctaatttgagtcttgtggagtcttttggccgctacactgcctactggtttcgggcttggtgaacttggttgagctgaaatcttttttgtttctgtttttctgagaatttctagaactccgttttaaccattctgtagatgtactttgggaccattgtgacagttaagcgtacaagcttcttgcttgacactcgaattgctcttaagaaaaatattgagagtagcttatttttatgtcttccccttgtcttcatagaccgttccaggtatcgggccggtcctgtcggatttccttcaagctccgaggcctgaactcctcaaccgtcgcttgtgcctttcacatagtcccggatgagtactcttctttcggttagtgagggtttaaggaactcgcattttcgtcatgtaatcttgaacttatccttaccgcattacatcctctcaagataaaggacagtcgcaacacattatttctggattttggagatatcagggttgcctagcgtctgaggttgagattacatgcgtggtgtttgggattggccaagttttcatttggaaacctcatttttttgtttgagtcgcaggtcggattcctgagtcgttacgcgtggtcatggctcgttatctcaagtgctaatctgggtgcataaatttattagttctctctcaatgaggtttcagcagtggaacgaagcacttgttgttgatgaaattggttctcgtccaggttggtaccatcgtcatcaacagcttgcttggtaa

SEQ ID NO: 114863 - DNA, 381 bp, Physcomitrella patens
  Intron number 2 from transcript Pp1s65_202V6.1 (locus Pp1s 65_202V6) derived from phytozome v7.0 (chr-ID scaffold_65; pos 1185653 to 1186033)
gatatttcggaggtgcaccaacgaagcacattcctgtaagtctcctcgttttggaaaatgagtctttgagtttctagtagtagggttttgaggcatttacttgtcagtttgcatgtcttcttgaattttgaattcatatattttgttgtttgtccacattggattggcgaaactcgttttggagtttttcagtatcccatgcataagaattaagatttagatttaacccagaaagatctcaatgagaagctcaatattttctgttgaaaggttattaatctgagagatgatagcaaatttatcatgagatgaggttgtttactagatgagtgccaagcgtatgcaggggtttacgcatccagtgaaagagctattcctgga

SEQ ID NO: 114864 - DNA, 951 bp, Physcomitrella patens
  Intron number 1 from transcript Pp1s59_284V6.1 (locus Pp1s 59_284V6) derived from phytozome v7.0 (chr-ID scaffold_59; pos 1462452 to 1463402 reverse strand)
tcctggggctgaaggacgagaaattgacgcgtttggtgaggaaatatcctatggtgatgtctaggagcttcaaggatggcatgttgtcgctgttgcaaactttgaatgtggttgggatttcggagcagttagcaccccgaattttggataaaaaccctcaattaatttttcgaattttagagagaaacgtttacagtgataatttggcatacttgaagtcttgtgggttgaccccgaagcagcttgagcgggttgtgaggatttatcctcagtctttgggagcaagcaagcagctccagttacaaccaactgtagaatttcttttgagtcttggagttactgaagtgaagattggtaaagttgtttctttgtcaccatattatcttggttaccggcacgatattagtcttctgccgaaggtaacattcctcttaagtattggcgtgaaaaaagagaatctaggaaagctgatcatggagcagcctagcatcctttgtttaagtatcggtgaaaacattatgcccaaacttaagtatttggaatctgtaggcgtagagcgagcccgtttaggagagatgatatgcagatatccggcgatgctgacgtctaatttagacacattgaagcttaaggtagacttttttggaagcaaagggctagttgggaagaatctcgtcaacctccttactctacatccagatctcctagggaggtctttggactctttgaattcaggctttgtgaacgtgcagaaaatcgggttcactcaggacgaagtatgctcgattttgaagatgcatcctacagttcttagtagtactgagactcatctacggaagaaattcgacttcctaaccactgttatgaaccggtccctgaaagaggttttaacgtttacggcatttgtgacctacagtcttgaaaggaggatcaaacctcggcatcgggtgt

SEQ ID NO: 114865 - DNA, 615 bp, Physcomitrella patens
  Intron number 1 from transcript Pp1s35_283V6.1 (locus Pp1s 35_283V6) derived from phytozome v7.0 (chr-ID scaffold_35; pos 1518250 to 1518864 reverse strand)
cacgggtgtgtccgtctccccatttggcaacgttctttttttttttttttttttttttttttttttgcggggaatgagtttgatgggtggtgctgggggactattagattcgaggtgtggtagttgtgtgtttttcggctgtgggtttgtatgcagagctcttcgggtgttggcattcttctttgggtagtcctcttgtcgatgactagtgttaaccacaaaaaaatgacacataataggtgattttcatatttgggtagaacgctgcagttttgataacttctccttctcgacgcgtaattgtgaaacagtggaatcagtgttttttaaattttttccttattctttaaaaacatgtttcgctatccagcagtataggtcgtgacagataaaaactataatcgatgaatgcagtctattggagatctaacttctcagtgtcgcacacctttgcttgactgcttcgaacttccattttttcttcttttttttttttttttccatttttaaagaaaaaattgacttgcttattttgattcagttttaggctttgagtatttactagaggaaacgttgacattaaaattcagtcgccagggtgggaggtcaggacgc

SEQ ID NO: 114866 - DNA, 480 bp, Physcomitrella patens
  Intron number 2 from transcript Pp1s17_100V6.1 (locus Pp1s 17_100V6) derived from phytozome v7.0 (chr-ID scaffold_17; pos 474823 to 475302)
cttccccgtctctttctagctccccagagaagaatgtaagcttctttgacttccgcactttttttattttttattttttgttaaaattttttatgttctctattcctgtatctaatcattctgatgtcatgtctcatctgtccagctttaaggtttcgtgtagttagatttttgcaatgaactcggtgatttgtatgctcgatcctcttctagtctatgtgagcataactgtactgctcttcaagtgattgtgagccgtcgttgcggtattccaatatgatataaaacataaacctgtttgaaaatatgtttgttgctctccagccatagttgagcatcgattcgcgttgattatgtccatactccacgctgccctaaaactggacctgtggttacacagcgattgctgtagtttttatgactatgtgacaaatagctgtagttacagctcataattacatgcccctgtgtatacaggac

SEQ ID NO: 114867 - DNA, 660 bp, Physcomitrella patens
  Intron number 1 from transcript Pp1s75_170V6.1 (locus Pp1s 75_170V6) derived from phytozome v7.0 (chr-ID scaffold_75; pos 917692 to 918351)
gaagaacaattagtccgcctcacaacgccttcgaggtttgttacaccagatttactccagagcttcgatagcttagtaggcacatcgaattatctttaatatgctagattaaaattcaaagaaccttcgcagccgtatgtccagtgcgtagtctaatcgcgcttggcaccacttttgttcggtcgagtcttcgaacttgcaccagcaggtcaggaggatgttctctcttttttgtgattagaacaccttttattttggtgaaataacgcttcccttctccacctatatttgcattccgacttcagaaaaactgagagtgtttcaattatggaatcctcgaaattaggagcttgtctcattcttcgcataacttcacgactgacaacaagttgctgctgaagagaagttgcgcatacttggatagatatcttcttattattgaagaccagtctgtggggtctgctctgctctttgcgattgatcgtttagtgtccgcacactacgtagtgcctcaaaatatgtaaaggacaggggaaattaaggagttttttttttttttttttttttttttgttgttgttgttgttgttgttgaaaggatgtaaacctttggaaggaagttgcagaattcccaggtcacttaaccgtcggctcagggcat

SEQ ID NO: 114868 - DNA, 415 bp, Physcomitrella patens
  Intron number 3 from transcript Pp1s122_25V6.3 (locus Pp1s 122_25V6) derived from phytozome v7.0 (chr-ID scaffold_122 ; pos 313912 to 314326)
tagaaccgcttcttgttgaaacccaagaacagaaggtatgttattagtttattatatattagcccttaagatgaagggcgaggcgcacacttgtcagtaagtgttctgtattaatatttataaacgaatgagactcatattcgttccaatgtttgaagaactatcgtaatattggattgaatgattacctaaatcatagtggagttggagttagagtttttttttctttttctttttcttccagtcgagcttctttttacttcggatccgggtccgttattagaatttttcttacgtaaatttggtttttaaaaacaaatctttattcctgattcaaagcaagctttcattatcgtctaactgaagatgcatgcttgcagtattctagcactcaaacaaacgctggattggagcg

SEQ ID NO: 114869 - DNA, 745 bp, Physcomitrella patens
  Intron number 1 from transcript Pp1s16_250V6.1 (locus Pp1s 16_250V6) derived from phytozome v7.0 (chr-ID scaffold_16; pos 1989520 to 1990264 reverse strand)
cgtcttctcattgtcgtcaacttaaggttgatcaggtacaatgccaacttactaccaccttgaatttccccctctctccctacctttccttaagccctaaatgtagttttccttttctctctcaatttatgattattatttttgtttttgttgttgttgttatctcgtgcactctgtgcaatcctcatgttttgcgaaaaatcaatcacgaggtgagaaagtctctagagcttccgtggctcaatgccgcttgtattaaatcgggatttggagtgatcattgtttcaatttcgggtgatttaggcagaatttggactgacggccggtatccagttctacttcgcagaagtttggcgacgactctattttatagtgagagtgtgttagatgttgcaggtttgcttggattacagagagttaaatctgaatgttggtgtgtaaagagtgaagtgtcttcttgactccgtttggaaaatcttcgtaactcgcagtgcacttttaattcaaattttgtgactgtgcacgtcctgtcgtgctcttccccattctgacggaatttttttaaattactttgagcatgtgtagttgctctgtctccagttgatataaatgagtaattcagtcccctcttcgaatttgtagaggattgatcactcgtttcataatgtagcgtttgtgcttatgatctgctattgattttccattttcagctgtctgtcttctcccggaatcacaggctacagtc

SEQ ID NO: 114870 - DNA, 1027 bp, Physcomitrella patens
  Intron number 1 from transcript Pp1s340_39V6.2 (locus Pp1s 340_39V6) derived from phytozome v7.0 (chr-ID scaffold_340 ; pos 253836 to 254862)
tcttacgtaggcgtgttcttcagtttgatacgaaggtgggtaccccttgttttccaactattttccatgttgcaaattcatttctatacgcaacctaatttgagtggtgacatgtaacggggttagtagatttatggtaactagtcccggtggtagtacagcagaggagaggaggtatggtcttgtgaagtgggctgaggatcgatcttgatcaactgtgggttcttctatcccaatttaatatttttcatgtatgattttttttttttatgccggaggatatgattcgaaagtagttctcgcagaggaaagatgcgatgttcgttgctccagcagaaaacgagactttatcatcaaggtcttcagaaagctctatctgtggatgagcttaaccctagaagctgcttgggctcgttgaaagctgtgtttcaatttgagaagctattttaacatgtaattccagtttgagtgctatctttctggagaaaattgggtgttgccctgagcttttgcaccagcgggctttttttgcacaaggtttaggcgacttcttcatgtttgattttaagctcaacgattataatggacggttggaattgacatgtgtgactaataatgagatctttctaatgttttgtccttctttccttcgtttattttagccagttgcttatatcacttctccatttcaaagttcttcatgtgcttgacagtaagtgaagctgagttcgctcatacgcatgaataaccgtagtttcaactagaccgactcttcaccttttttgaactagcgtaactcagggctggaaaaatgtgttgcggtatatttcgccttcttagtcagtttctggggtttttttttgtgatttaccattgtgttttgtgcagctttgatttatagaaagtccaactgagatgctctaacgaatctttcttagcattattttgggaattgtcgctgaatttgtgatagcattgggtgttttgtacaggtggcttgatcgtgtaagtcttcgaatttcaattg

SEQ ID NO: 114871 - DNA, 1025 bp, Physcomitrella patens
  Intron number 3 from transcript Pp1s391_72V6.1 (locus Pp1s 391_72V6) derived from phytozome v7.0 (chr-ID scaffold_391 ; pos 332410 to 333434 reverse strand)
gcccgcgatcggggccttccaggtgatgcatttactttcgcgctgcctcaacttcgtccctttgtgcaaagccgcaagcatgaggctttttcgaggatacgttttggacttctggaaatcttgaagtttctggttctggaaagcacagagaagttattgggctttatatgaaggtcgaagacaggagttttggttggcggttcacgaatgacatgttggaaagaagggagggttcgtattacgtagggttggtttgaagggtggagatagaaaatttgggttgttggacgaatggcatgtcgggagaactggagagttgttgtcactcggcttgtgtgggggtgtgggcagaggtgttggatgaaggatgtgaaggacgtgatagattttgaggagataaagatgggagggagatttgtatgatgggatggtgaagtgtacagatgattttggaatggctgaggcgggggttgtgtgaatgttgaggtggaagtggagtgtggtgtggtaggactgaagtgttgaagttttaaagggttgggaaaggtatttggtggtggtggtggtggtggtgattcggtgggtagtgactaaaacaaattcctctgagttccgctcagcagttaatgcacgggatccgtgctgacattccatgtcttattgcttcgtggtacctacggtggacaatttgaggattgcgggccatgcctctcagtttaaacatggcgagtgccacaggctacactgggggaactcaattaggagtggatgtggttcagcttaaatccatctctctcatactgtccctgaatttgtttgatggatattagggtgaaaagtatagcatgttttcctactccccagtacttggaatgtttgtcgatactcattcggctcctttaatgtgcgttgctaggcttttcattgtgagcatttgattctgtgtgcaggcttgatttcagccttttgattctatgcttttttggacaggggtgcagcttcagaattgtgtaacaactgcaggc

SEQ ID NO: 114872 - DNA, 954 bp, Physcomitrella patens
  Intron number 1 from transcript Pp1s281_7V6.1 (locus Pp1s2 81_7V6) derived from phytozome v7.0 (chr-ID scaffold_281; pos 21886 to 22839 reverse strand)
gtgaaggagaacttcgcgtggaggcactactactggtgagtttcatcgtctcgcctgcatgggtgccgggtgttgtgttccttgtaacagcgtcgttggggttgcttttgtgctggtgttggtattggtaggggtgtcttttttggtctgaactggattgatttaaccagattaactgtgttgtaagcaatgatgaatgcttactatgctgtagtcaagttttaaagttctaaaattttccaacatcggtactgcgttggcgttataacatatcagtaggcggttttctcaaatcttgggtgcactctccttgcaatgttcggctagttttcattcatctcacattgtatgagtggtttaggtgtttcagagcctccctgcagtcgtaatctcattctgcttccaatgaaacttattcttttagggtaggtcttcctgacaggagtatctgggggttaccagcctctgaaatcttcgagtaattgcgtattctctgaacaccatcacaagcgccgttttctatctctcattttaccctatattatcccttttttttttttttttttttttttgaaagaggtctgttgtaatttgtactaggcaacgctactagtttagattttttcctctcaccacagtccacagattcacgagtagttcgaaagtgtttttttctccctcttttgtaagggtttgtgtgtgagtattttgtttgtattgttaaacttctgtcccttcatgtcgtttgagggactctgaagtaattgtggaactaattaccgttccttaagcgaggaccatttaagtggagtgtgtaaattttgctgggtagccttacatgtgcttccacaaggatcttatgttgtttttttttcgtatttgattaagtatgaaatcttggaggtgaagtttgtactcaggttatcgtccactcatattgcaggtacttgacga

SEQ ID NO: 114873 - DNA, 902 bp, Physcomitrella patens
  Intron number 1 from transcript Pp1s41_18V6.1 (locus Pp1s4 1_18V6) derived from phytozome v7.0 (chr-ID scaffold_41; p os 122683 to 123584 reverse strand)
ggcacgtgctgaagccttgctgcagcaacggtaagttctctcaatttctgctactccaaagttgtcgcgatgaaggaacggtatggcggattacgagttgaatgcaccgatatttcaatcatactgtttggcggcgcatatcaatctttctctaaagatgcaatcacaaacagtaaaaagaaaacaaaaaaaacaaaattgatatatatatattttgcttgaactttatccgcagttttacctcaatactagaatacaattcaccggaaggtgttctgccgttccgtcacaaaatactgtctggtttgtgattaaacttcccgggttagctacattgattgcttttaaggtctctctagttaacttttctcaagttgtaatctaactcaatatatgtagctccgcttcgagaaagtgtaatgtcttgttgttacatggccttcatcgatctttagggctacaccgatactgattcttagaattgaccccgacaataattgtatcggggaaatctgctgggcccctttaggcctgtgcttacaggcaatgttcatctattgagaaaataacctctcttcctatctttagggggtgagttatagctgttgcaggttttgtatccaagtccaacgccaagattaggcctcaatttgatgtagctcgcagaccatttcagagccgtaaagggtcacaactgggtacttgattgcttaagctaattgaaatactaagataatactaatcaagaagcaaaccataaaactgttgaaggaaaccaactcatgacgctaatatcttcatgcaacgattaaaagtacacatgtattttgatcattagttgctttgtattcgagattataaactcaatgacggaagagttttgtaggagattgtgaggaagg

SEQ ID NO: 114874 - DNA, 362 bp, Physcomitrella patens
  Intron number 3 from transcript Pp1s1_497V6.1 (locus Pp1s1 _497V6) derived from phytozome v7.0 (chr-ID scaffold_1; po s 2904347 to 2904708)
caagctgggatccaggtcaacaatcagttgaagctgtaagctgtttacttcaaagaatatcttttcagttcctcacaaggtttgcagagtgttgaaaggattcaatggacgtttggatctaaaagttgcttgtcagttggtggagttttaccttttatcttcttccttggctgtaagcccgttcattttgtgtttgatactcgttcaatgtcttgtgagcgctttgattgtacttttatgctgtttaaggagtgaggtttatgcttcttttctgtgtattaattttcaaattaaatttattaggtgtcgttggtttctcttgtatagattgtgcaaggacttgcagattggaaggccgttga

SEQ ID NO: 114875 - DNA, 772 bp, Physcomitrella patens
  Intron number 1 from transcript Pp1s54_157V6.1 (locus Pp1s 54_157V6) derived from phytozome v7.0 (chr-ID scaffold_54; pos 991111 to 991882)
gcagcagcagcagcagcaccggctcgacagccgtgagtgttctcaattcctctctctctcgattcttccccttcaacgccgctcagcatctcgtcgcagcaaatcgaacgacttcttttgaccagcttttggtcgccaggaaatggtgcagtttgtgttttagggtttaggttatcctccttgcaacttgatcgtgttaggcgctttttattccagcgtttctcacacgcctcgtgtttttcgatggctctaccatcccctggtttcgttttgctagagtttctttcaggaacagagattgttagggtttttagggtttaggggttctgtggtgaagattcggctcccattcttctatagcttaggatgacgtgcttagcttgaggatgagaattcaagttggttgtgattgtagtggtggaaatcggtttgttagttgaagtagctgcttggttgagagctctgatctgagtgccgtcagattttttcacccttaagctgtaacgaagttaaaaatgaattgatcttcgcgggttttgagtatattactattgattttaccctttaatttgaagaaatttgtatgctaattaccatgggatattggattaccgaaatatatttcatttagggaattttgatcatggagaaattttagaagatcctttgttaataaagctgattactcttctcaactagcaggattcagtattctggattgatcgtgctgttttgggtttctcaggcctccgaaaagaagcagcagaattct

SEQ ID NO: 114876 - DNA, 452 bp, Physcomitrella patens
  Intron number 2 from transcript Pp1s218_56V6.2 (locus Pp1s 218_56V6) derived from phytozome v7.0 (chr-ID scaffold_218 ; pos 392082 to 392533)
agctacgagaggcctctcctgcctgttccttgctggtaggtatatctccaatgtcctctctgtccataacttgtagttttctgaggctagggatattttgttgaaggtttttcctggtctggtgcaatctgtgttgcaatctaatgttgaggaataggtaatatgaaagtagcgggttggtaatgagaactaacattcccaagccatgggtatcctgaggcatgttacttccaaaacgaggttatattttcacattactgagtcatgctcaaggatatcaaaggtaggaaaagagcgtcaaaggagacaagattgtgagatatgatcttgctctctacatccaatgcacggctgctatacctctacagaactttgctggggttgtgtcaatcttctgacttctggtagtgaatcgtgaaccgtgtttgttttatgtagcaaatagtaagtcc

SEQ ID NO: 114877 - DNA, 912 bp, Physcomitrella patens
  Intron number 1 from transcript Pp1s1_173V6.1 (locus Pp1s1 _173V6) derived from phytozome v7.0 (chr-ID scaffold_1; po s 1083323 to 1084234)
aggggggccgtgatccagagaatttgcgtttccaggtggggtttgctctctttactgcatcatcatctggtcgttggtccaacctctagagcggacgcagtggatgcaagaaagcacactgtatgtgtggctggctggaggaggaggagcatcggttggtgggttgggtgtcgttcatcagtgcctatttctggggtggtggtggtggtgtttttgtttgtttgtgtttgtgtttgtgtttttttttttcatttaccgctggatatttttctaatttggtcgtgtgaggcttttcttttactcttcctggttttgtttttttgaatctggtggaggatttttgcttgtactagtcctggagctactggtgatgggttgtgatttctgattgttcatgtgggggaaggtgggtttgttcttgtaagtgagttctgcgtgtggaaggtataagtgcttctgttgctgccggtgattgattgttggagtgtttgtgtcattcgagtcttcggtcaaggcgtagtcgtttgttcgctgcctcctttccccaggtttggcgctgtggtttatacatgattactttagaagttggtcaagattagctatcttgggtcctggtttgcaggggcctgtattaagaccccgattccccagtgagagtgggaaattcaagcttggaaatatcctctttctcttggaggtattcagtattgtgaagccaattgtccaattggtggtaattttaagtggtggccgctctggattgtcagtgggtctatgtacaagatgtgaagtgaacggagtgtttgggtccgagaggagcaaggaattgtgggagtgtctcaggactctcaacttaagaaacagtgctgttgtggcgtttcaggtgttgcttagttgcgctcgaggatagtg

SEQ ID NO: 114878 - DNA, 363 bp, Physcomitrella patens
  Intron number 1 from transcript Pp1s214_70V6.1 (locus Pp1s 214_70V6) derived from phytozome v7.0 (chr-ID scaffold_214 ; pos 572239 to 572601 reverse strand)
aacgtccaaagtttggagatatttgtgagaaacttgcaagtttgaagagaaagtttttaattggattttatgaaaataaatgcccttcttttagtggtttaaaggagaaagatcactaagacatagaaaaggataaaatatatatcaatccaatgataaagtttgggataatttatgttttctttgtttgattggttgatgtagattagaaacaaattcatgtagttgaatggtgtacgtaaaggaaacatgtatgtatataataatattattttacaacatgtgcaatatgtatgttttggcataacaattgtggttgtttataaaggtatacttgcaagatcatctactaggtagacaaga

SEQ ID NO: 114879 - DNA, 205 bp, Physcomitrella patens
  Intron number 1 from transcript Pp1s229_48V6.1 (locus Pp1s 229_48V6) derived from phytozome v7.0 (chr-ID scaffold_229 ; pos 576881 to 577085)
ttgctcgtaattttcaatttcctcatctagagcaggtttgagtcgcctctaaaatgctttttgattgttgctaaatcatgaattcggtttttgaatgtagtctgtctaggaagatacgacgagatatggagtgctggaattatgctgttctttttctcaacagcagtaatttctttttcagcccccaaagtcgtttctttacacc

SEQ ID NO: 114880 - DNA, 604 bp, Physcomitrella patens
  Intron number 1 from transcript Pp1s65_226V6.2 (locus Pp1s 65_226V6) derived from phytozome v7.0 (chr-ID scaffold_65; pos 1265534 to 1266137)
agcgactagtgtacaatcaagtgctggcgagagtggtgtgtcttcctcagcattcctgcttctgttgaagctttttgtttccatggatgttgcaggatctcgtcgtgttccatttcatgtttcttgtgtatatgttaagagagtggttctgttgtttggtatttgatcttgggaagtatttgttattaaatgctctggcgagtaaggtagcgcatgatatctgtggttcttctcgttcgcatcgttttgatatgtttcattgcgccatcaatcgttagaatgtgagttcgtagtttcgattgttttagagggttcttttctttcataattttttttctgttaccttacagaggtagagtaaggtgagttttagcaggcgctttctacttggttgaagtgtttgcgattggcattcttgtttcttttagtgtatggaaattgatgtgggtgtagatttgaggactggttcttctgcggagcgtttaaagtaattaatgctctgcgtatatgtttcgtagtttgggtatatatggctgtatagttggtggctctgatctcgtgattatctttgaatttggggtgcgtaggtttgttgtcgatcgca

SEQ ID NO: 114881 - DNA, 540 bp, Physcomitrella patens
  Intron number 3 from transcript Pp1s13_105V6.2 (locus Pp1s 13_105V6) derived from phytozome v7.0 (chr-ID scaffold_13; pos 828568 to 829107 reverse strand)
atccaaactcgtcaagcagtggaccttggaaaactgtactttttctttatccccatattagatttgataattccttagtctgattgaggcatcatttctgcatttgttttgtaatattttctctcaacctaaaatcttcttgtgcaatagtgcatggtgtaataacactgtattacaagttgttaatggcttacagaactgttcctatcagtgtgagcattttagcaaagaatttaaatgaagaagaggttagaggtagatgttaaaactcttaatgtgtgtccgtagaagattttcttcttgtaaagaaagagctttatcaggatttaagtctttataactttacagggaaaatgttttccagtccggataacttcagttatgtgcatcttgactgttaggaagagtatacatgctttatatgcaactttgagttcagcatgttggagtgtatctacttgtacatgtcaaacttaacacatgtctactggtgtttgtgagaaagtggcaacatcaacacagcttcagtatctgggatac

SEQ ID NO: 114882 - DNA, 433 bp, Physcomitrella patens
  Intron number 1 from transcript Pp1s142_145V6.1 (locus Pp1 s142_145V6) derived from phytozome v7.0 (chr-ID scaffold_1 42; pos 1043636 to 1044068 reverse strand)
cgttcgattaccggggtttcgattatcgcgttagtgtacgtatcatatccctctctttcatcacttccaatttgaggaggttttctctttggaatttgctgcagtctagatgaatgatgaatatttggtcctttgtcgttaaattttgattgttacaatgtcctcaaggttgatctcttgggttcgatggctctgatgctcaaaggagatgctctgtgtctctatatggttacaaatttcgggagaagatattgattattacaactatttaattttatgacgagcattacatcatcccctggaaagcgtatatttatttcgctttttgtttctagtttgtgtaagtaagaatattcttagttacacgtcttttcttattgaaagtttgctcttggtaggtgtttgttggaatcatacgcttctacgcagtcgc

SEQ ID NO: 114883 - DNA, 760 bp, Physcomitrella patens
  Intron number 1 from transcript Pp1s165_106V6.4 (locus Pp1 s165_106V6) derived from phytozome v7.0 (chr-ID scaffold_1 65; pos 771464 to 772223 reverse strand)
gggcgagggttgtgacgcaacgggacgctgtgcttgtgcgtgagtgctttgctgggttttcgttcttgatgtgcgattaggtggcgggcgtatcgcattttttccgggtctgtgagggtgttgttgatgggttggatgggttccgagtgagcctgacgcggggctgggtacgggatgttgtagattcacagcgaaatctgttctttcgttctacgtgggaccaatttgagagtcggtaaggcatttttaggtttttcttttcttttcacgcggatggttttgttggtggggatccgtggtttgatgtcggatggctagtgctgtggggttggctctcaagatccagctatcgtgatcgtgtggagattttggatttttcaaatctcgttctgggttggactcgattagatgtcgtgtgtggtacttcgttcttctcgatgctaactgcgccattctcttgacctgtctaccgatgtcgatacggtggctgaagcgttgattgtttccatctcccctatccttggccactgtatcgcaataattgggtaccgggggggggggtagtgcagttcgattttgggctttagcagtcaaagatctggatgaattgtttggacttagccatgttgatcacgatgaccttttgataacatgatcgcgcttgcagtgattttatttgtgtttgttggtacgttcgactgattgcattcaatatcccatttcagatcctattttcttgtggtgatcctattgtagattg

SEQ ID NO: 114884 - DNA, 440 bp, Physcomitrella patens
  Intron number 1 from transcript Pp1s115_193V6.1 (locus Pp1 s115_193V6) derived from phytozome v7.0 (chr-ID scaffold_1 15; pos 1085465 to 1085904 reverse strand)
cttcccagcaagacacgctccaggggaatccagtggtaagggcttgaacccgtgcggtacttgaatgatagatgtggcactctgaagtttagcagttttgcaccaacgctcggaaaaataatatctgattttcacggaactcatgttgcaaaatgcggatttcaatgttggaattgttggagaaactgccgaaagtcgtcgcctgttttatttgtgcttctctctgcgtgaattcgaataccctaatcctatagtattgtatgacagcgaagtcgcatgataaaggacagtcttagttcttttgaacttgaatcaaataaatacataagaaagaaagagaacgaatgaagaaatttctctccgagggaggcatgattttccttgctcttagcattagttgtattggtctcgaagtttgaagacagatcgcaagccggaaa

SEQ ID NO: 114885 - DNA, 382 bp, Physcomitrella patens
  Intron number 3 from transcript Pp1s57_35V6.1 (locus Pp1s5 7_35V6) derived from phytozome v7.0 (chr-ID scaffold_57; p os 189119 to 189500)
ccatcgcaggtatcaacgccacgtgtatgatgtcatgattccgtagtcgacataattcatgattatggtctttgccatattcagttgctgtctcattcaaatgccattactaccatcgctacgtatttcctggggttggagtcagcttattatcagagtgattacgctttatttacttattttgcacaattgtagagtacttgtactaattcttttgtaatctgttttttcggacttgcctgatagaaaacattaacttctttgctgcttttaactcccccccaaccctctattttgatcttagaaaagggtatgtaacactcttatcagacctttctaactagaaaattgttacaggaggtcacggtctctaaaggactga

SEQ ID NO: 114886 - DNA, 1035 bp, Physcomitrella patens
  Intron number 1 from transcript Pp1s38_222V6.2 (locus Pp1s 38_222V6) derived from phytozome v7.0 (chr-ID scaffold_38; pos 1288500 to 1289534 reverse strand)
gtgcgtagcgaggctgttgctcctacactttgcaagtgtgtttcctcctcctcttcagttctgtccattctgctcatagatcctgtttgcaaggcacctctctcgttcctgtatctatttatttttaaatttttaagcaacattttttcgattctctttcgtacagtgggcgtttgaagtttcgaagggtgtaactactgcgagtgctccttgcgctttgtttcatagctttgttttattcgattttcttttgtttttatttttgtggcgactccattgcctcgcgaacgcaccttcggatctgttctcatacgattactttgagtgattatgcgaaacttattcgcttgcttggagacgatctcttcatcgtcctctttggaggtagtgcgcgcatttgcatacatggagtgatctgtgaatgcatcaccctccgcttgaggtctactcattttatttgtttctctcacgaaacgttattcatccatcagtatccggcgcttgcaaggttcaaagcctcgggagggcaatctccgtgtggaaatgaatctgtcgatggacacttccggagctctagcgtctgttaggaacagaaattaaactatcctgaaatccatttattttgtgtctacctcgtactgtttcacgtttcgaacgaaaataattgagatttccaattgcggcttcagaagtcatacgttgcttcgttgaattttggtcgaagtcggagccgaggcttcaaaacgttgtaattttttgctatttcgcgactgactgcgctgtttgcaacagtaggctcttatctttcctgaattgcagatcttgcacagtgctgggacatggatcagaaacgcttggttgaatttttacgcattgattctccgactgcttgtcctagttccgcattcatgcttccttgccatgaatgaaacgattcgagtacttttttttatataggttgagaatattaaggtggtttgacgttgaacttataaatcaggtctcgaggaggaagcctggaagttcgatacgaag

SEQ ID NO: 114887 - DNA, 864 bp, Physcomitrella patens
  Intron number 1 from transcript Pp1s381_4V6.1 (locus Pp1s3 81_4V6) derived from phytozome v7.0 (chr-ID scaffold_381; pos 29461 to 30324 reverse strand)
agccggctattacttccgcctcggacgataagaaggtatggcttccttcttttcaatatggtattcatgtaagggtttattgcgatattgttcggtcaagaaaataatcgtctttacatgttaaaaacatctgcatgcgttatgtatgggcatgctcctgtggtaattcctcgcatttttatttctaattgagcaagaagcaacggcgatgcaggttagttgtcagtctaaattgtgcagtagggtttgaagaaatatttttaatttctacgcctcaaggatcgtctggagtacatgaatgacctattttttgtattccgatgctacgacaacgaatttaagtgtttaacttaatctcatcataagcaagtagcatttaggcacgtatatagtttttgggaagaaacctagttttgcaatttttgaaatttgtgggattagttttgaatgggatgaggtacgattgtgctggagaggattatcgtgtacattgtcttgctcaggaaattttaacaatgatcgtggtctcgacactgggcgtgttcaatatgttaggctcttcgtcaggctcgaattagagtgctatgtttgacttcattctgtttaactcgcgtgagccctaaaaattgtttctaatacaggagaacccgagtaattgctgggtcatgccgcatcaatccgtgtacactagcttgagaaatcatatggtttgatacttggagaaaaagttaccagcaatgacgattcactatcagatcaccttagattccctccgtttacttcatttgtctttgaaggaaggttatttacagggtgaaacttcttgcaggtggaaccagtgacgccccagtaccagaatcaaaa

SEQ ID NO: 114888 - DNA, 512 bp, Physcomitrella patens
  Intron number 1 from transcript Pp1s169_77V6.1 (locus Pp1s 169_77V6) derived from phytozome v7.0 (chr-ID scaffold_169 ; pos 427683 to 428194)
tccttcgtactcttgccccccaccccatccgtcaggtgagagattcttagccattctcctgccgattgcttcgttatgttccgtgccttggattcgttattgaggttcgtgttgtcacgagatcgagagagagggagaggggtgacgctttcttgaggtatttgttgaagattttgtttttgggtcagaaccggacgtttgtgagtaatttgaaacttgcgtggtttgtgtttggtttgattctgttttctgttcctgacgatggatttggtggagtggtgtgagtggtgaatgctgtatttttattcaattatgccgagtgatcattaagtactgatccattgagttttttttgcagacaattacgttctaatctgtttattttcttcgacgtcaacaatgtttatcaatgctgcgctgaaatcgggatattagtggctaacgtgatgactttcaatcttgtgtatcgagttgcagattgcacggtcagagtgttaaaaagcaaagaatca

SEQ ID NO: 114889 - DNA, 535 bp, Physcomitrella patens
  Intron number 3 from transcript Pp1s125_75V6.1 (locus Pp1s 125_75V6) derived from phytozome v7.0 (chr-ID scaffold_125 ; pos 593266 to 593800 reverse strand)
caagtcagaagttcaggtaaatttcttagagtcaattcgggtgtaaatttactcttttcatttgtttgctacaatcatgttttgatgcatacgttttcactggaatttgtaacttctaacatcctgacaattatgttgtttgattttcaatatcctaccatatatattgatttgagcatgcatgaatgaaatcttgtatttattaatttttacatgcatcatgatcaggcatgttacctccatgttgtaaattgttcgcctaaagccttatggtgcctcaaaatagatcaacgcttctcttactataagcttgtctcaagaagattctaatctcttcatgctccaagtttcttctgtttagcccgtcagattctgtttgtcttctgcaattatcatgttcacatgttaatattctttctgttcatatttccttgtcttcaaaaatactcagagaaaccaaatgtctgagttattcaagatgttctacggacagtacatttattaacacaggttatttactacttttgcagcatca

SEQ ID NO: 114890 - DNA, 962 bp, Physcomitrella patens
  Intron number 1 from transcript Pp1s38_3V6.1 (locus Pp1s38 _3V6) derived from phytozome v7.0 (chr-ID scaffold_38; pos 10121 to 11082 reverse strand)
cctctcggcgcggtgaaagaattcagcctctgcaggtttctgcctcaccttgagacccttttctttcgcagttttgcatggtgctgaaacgagagctggctacgattgctgagtcgtgccagggattgttttgagtccttgtccattaccacgcgcgattccctgtcctaattgatcctgatttcatcttaatttggtgtttcttgggaggggttagtgtttttgcagatttttgatgtgactccgtcctctgtttcttgttgtgtttttatttatttatttatttatttattccccttgatttcctgatgttttgtgtacagtgcagcgtttttgtttgggatcttttgtgtggagatgggagggttagtgcgtgaattgtctctctagatgcagtttgaatgtctggttggtaatttgtttctgtggaaattcatgagtttttgttgggagtgatggcttggggatcatggtttctaactttcattttctgtgattgagttatgcacaactaggaggggtttgttttttatgaagttttgagaggttcatggtaaggacgcccccacgttcagtctgtccacgacgatctttttaggggaatttgcaacacattgttgtcgctcatgcactgtttccaaaacatgagttcttaggttttggttttgttgcgccatgtttctgaactgaagtcgtcattctctttcagtgtatgaccaggtcctcagtgttttgagaaaatgaattcattccttgttctttcttttttcaaaagctggggactagaaaggttgtacgtgttgatggtcagtacatgctattagtattgtagtcgtcttgtctcttccaccgaatcgcattcaagctcttgtgttgcaactctctggtattctgatgacgaatctgtgtggagggaactattcaaagagatattccactgaggtcagacagcgccatcgact

SEQ ID NO: 114891 - DNA, 811 bp, Physcomitrella patens
  Intron number 1 from transcript Pp1s175_86V6.1 (locus Pp1s 175_86V6) derived from phytozome v7.0 (chr-ID scaffold_175 ; pos 485768 to 486578 reverse strand)
cagcaagagcctctgcccttgatacaggtgcatttctattgattttctgctgattgggcattttgttcatcacctttagggctttcatacgttgtgttcaaatgctcttctgcttgactcttttggattgtgtcgaatcacacatcctagatgccgacgcttgtatatgggcgtcggtgaaaagcgtgcagcattgtgcgtcagtggcaactgtggtggtgttgcaagatttgcgctctgtcaggaactctgagagtaatactccactgttcctcctcgaaaaatgaacttgaatgactagattctcatttgcgctaatacgcctgcttcttcataatcaacttttttacctgtttatagtgaatgaaccgttttcaagctactaatgttgtgaggttttgagtctctactaaattcccagagggtatgagtgctgcattaatgcaagaaacaattggaaaatctgttcgcctaacttgacatcatcttgctcatgtcaagaacacctccttggatctatcggctaagctaataccacattgcattacccctgttacgctaaccagttcctgttcatcaccttcttttacttaacagagctttgcatgttttaacggcaatgatcagatagtatgaagctgggttaatttgctgttgtgattggaggcgaccttttacgaggtggctaggctttctttcttagataacatggtgctttcattaagaagcaccgaaacccatatttcaaattcctgctgactttgaaatttttgattgagtactcagcgttgagttctgtggtctccagaaa

SEQ ID NO: 114892 - DNA, 687 bp, Physcomitrella patens
  Intron number 1 from transcript Pp1s88_1V6.2 (locus Pp1s88 _1V6) derived from phytozome v7.0 (chr-ID scaffold_88; pos 21747 to 22433 reverse strand)
tccgatctcctccctggctcgttgcttgtttacaggtatatgcgggtactgtaatagtctgcaattgtgactcgtctttgcactagatctgtgggtgtacgtgtgtgcggagttcatcggattgatgtgggtgtttcagtagaggtggttctcttcatagaggaagttttctgagggtttaggacagcttgagttgcagtcacagggctcgttaggagtaagtgcgaattttcggagagtgatatttttcggagaatcttgatgtggacctgacgaaggggactttgaattcgggtcacactttcctaagaggttttcgttttacgaggcgaatggttgagttttaaggggcgaatggttgagttttaaggacatattacttagatctaacaaacctagcggtgtgcttcgtccgtgccctttgaagggcgttgcttctcaggataaagttgtgagctggtggtattttagaagtggatcgatgtattgagtgcattgggtttactctgacgctgttgcgcggcattttggtttattttggaattgtcttcgggggcggatgcgagtttgcgaggagtttttgcaccagatctatcgttttctagtcacagtgggttattcttacatttattttggtgacgtattcatgcagaacagagttcttttttccacattccggtgagcgtt

SEQ ID NO: 114893 - DNA, 526 bp, Physcomitrella patens
  Intron number 1 from transcript Pp1s23_225V6.1 (locus Pp1s 23_225V6) derived from phytozome v7.0 (chr-ID scaffold_23; pos 1679200 to 1679725)
ggagttatcggacacggagattccggcctcttttggtatgttccactccttgggtctgttggtagtttgaatatgttttctttgcggtagtggcatcgccgtcttcgtgatgatggcgccgcggcgtggcatggggaggtttttgttttagggaatgatgtttgtctttcttggggtcgcttgagattgctgtgatttatgaagtttatttttagatatgttgtaaccttgttttgtgatggagtaagcggatttttgtaagcgttcattatgaaattaaagaataatcgtagatgcgggatattatgatttgttctatttgttggatccatgcccttacgatcgttgtgcatgccgtttttcaattgaccccatgtcggtttagtctaggccagcggtatattagtgacttttgcgacacaagtgtagcttctgtgtgtcctctattgattaatgctcgatatacttttgatattgatggtaggttggctgtgaaattgatgtgcagatccattcgcggaagcga

SEQ ID NO: 114894 - DNA, 378 bp, Physcomitrella patens
  Intron number 1 from transcript Pp1s5_178V6.1 (locus Pp1s5 _178V6) derived from phytozome v7.0 (chr-ID scaffold_5; po s 1245485 to 1245862)
agtttccgggttagtaatcctgattctttcctcttttctatggcgttttcaaaatttgttttattcaaagacgatttgaaaagaaaagaaaaagcaaaaaaagaaaaaaacggaaaccaaataattttttcttagggtttggtttttgaggttgaatctgcgtctgcagtcgtcgttacgaagcagctttgaatccagttcttgttgtcgaacacgcattttctactgatcatctgtaataggatttggtgtcattgaaaaatggtcgtgagtttttgaatgtcctttttttttccccccttcttctttggttctgatttggttcattattccttgtcaacagtttcaccaataccaggtggtggggcgggcccttcc

SEQ ID NO: 114895 - DNA, 921 bp, Physcomitrella patens
  Intron number 1 from transcript Pp1s128_53V6.1 (locus Pp1s 128_53V6) derived from phytozome v7.0 (chr-ID scaffold_128 ; pos 465294 to 466214 reverse strand)
gttgtaactgctgcgagtagagcggtgccgcggaggtgatcatccccttcttcccactttggtttttgtgcgcagattgattcaacttcctctcccgacgtatcgtggcggtgatgaaggttgccgagtttgagatgtgtgctgcctccgtctttacgggttggttttgtgtgttttgagggccttttgaagccaccccctccctttttagtggagagagtgttgtcgttggcatgcagctctgtaagagtctgtgcggggctgttcgtttgtgttttcgggtgttttgatgccttgacggtttggctgtgttgctggtgtgtgtgtaaaggagtctaaagagcatcacggttatcgatctttccctttggttgcagtgagacaggtgttgtgtgtatcaccgcatcgtgatcgacggtggattgacgtgcttgacctttttttctttcgttttgtctcttggtggctgtcggtcgtgtgatcgatgcgcgcctgttgatgtgtttttggtgtgtatggtgatgtcgctcttcttctttacttcctcgtttttttctttttttccacttttttgggggagttatggctgtggcaggtattacttccctgtatatgctggtggacgtgattgagggagattttaggttgctgacatcgttaaagccacagtctatactgacgcaaagtgatcagaatgtttgcaagtcactcatagaagagcacgacaaagagatggttttttgaagcaaaacattcgcgttagacggtgttcgctggtcaacttagcagttctttcttttctggtcacccttttcgaatggttgtttcattctaattgcggttattttgacgcatgattaacaaagcacttgtcatccttctgcagattgttgggctagtcgtaagagagaaggagaggga

SEQ ID NO: 114896 - DNA, 437 bp, Physcomitrella patens
  Intron number 1 from transcript Pp1s75_231V6.1 (locus Pp1s 75_231V6) derived from phytozome v7.0 (chr-ID scaffold_75; pos 1273023 to 1273459 reverse strand)
ccagttgcgagggattgtctcgccatcactgcctggtaacacctcgctgttattgttcatttttgtgggttttggcgtttacatagacattattggacttcgctatagcataagttaaatgcacaatttaaatttcaatcccttatgttgtagttctttgttgacatgttcgatcttgtcacacagaacaggggacttctgagtgttggggtgaatgtttctgattttcagcatttgctgcacttgcatgtgtctaacgattcaaacttatcgtggttagggtatagaattcaatgtatggaaaaacttgagtttagaaaaacttgagggatgtcatagcaattcgaagatttctattgcataatttttgtttatcactaacgttagcagcaaaataaactgtagcaaaggagggcccgttggagctgtaccaaggc

SEQ ID NO: 114897 - DNA, 977 bp, Physcomitrella patens
  Intron number 1 from transcript Pp1s288_43V6.1 (locus Pp1s 288_43V6) derived from phytozome v7.0 (chr-ID scaffold_288 ; pos 302027 to 303003 reverse strand)
acaagtttgaccagacgtaccaggtaatgaatcacaacaaattctctctctctctctcgctcgctcgctcggttgctcgctctcctgtctttcgttgttccttgtgggtggattgaaaagttccatacaaccacatttccaatctgggtatgcttgttaaattagaaatgaaacttcgtattgtcgaccaattctaaatttcggcatcaagccttctgatcaacttagaagaaaggacggtagcttggattttgagctcaatttcttcattctatttttttctttttgagtctttttttatttcatagttttttgtttttgccatcagcgcgattcatagtccacaactcccgcgtcagtcatgctaattgtgtcacacgcatagcctcctttggtctgcatgaggtgattacataaatggtttggttcaattaaagtcctcataaggttgttatatgagagttggagcccatcatgtttggaacagatcttgatatagaatatttgatgagaaattattcgtattccacctaaccactcgtcattgaagttttacttgatgcaaagcatatatcatgatgatatagaaggtctgtttcatgataaagcatcgctgaagagctcgtcaaaactgcactctattgataagcatgaactgtaatggtagatagtagaatgacctgcgggcatttgaatgattttcctagtagctcttgcgttgcggttacgagttgtccaacgatgggtgtctgctagcaacactgttaactatcttacaaggcgattgcgagtttccttcgaacactttgtaatggtgattttcgttgatcgacgtgtgcgtgtagaagatatctctgtcttcgaaattatacactgagtttcacataggtgtgtgtacagctcaaatgaatgtctcttacactattgatgtctgtttttcagccaactattggaattgacttcctttccaaaacgat

SEQ ID NO: 114898 - DNA, 696 bp, Physcomitrella patens
  Intron number 1 from transcript Pp1s196_65V6.1 (locus Pp1s 196_65V6) derived from phytozome v7.0 (chr-ID scaffold_196 ; pos 473884 to 474579 reverse strand)
gacctggagcagctgaatcccttctctcgtgaccagtaagtgccatgaatctctcaccgtgagcttggctgcagttgaagtttgtgctgcacttgggtgcgcgggtcttggtgggttttgcgcgctgggtaattttctctctttgttttttttagtgaggttttgttctataatttgagaatgagtcgcaggagaaaggggtgttgccgtgttgaccatcacgcgatgatttatagcgcccacattctttaacgacgagtttgatttcttagatgagtcaatgtggtgctgaatttggggggtagaagaagcggggcagttttaggttgctggttcattgaagagaagtacacatgtttactcttgtagttgattctaatgggtaccttggagtcatttttgcctttcgacattggggtccctgctacattgccatattagggtattgcccgtcgtttgggggtttttagtttctgtcttgtgagactgatgctggaagtgttcattactttttgaattctttttgaaatacttagacttcacgataggtacacctgtagcttattggagttcttaaactccgtggcttttaggttttcggttttgcatattataaaaatcacgtggtaatgaactctctgtaacggtgagctgcaatctacatattgtatcggaaccaggtgaatagtatctgcc

SEQ ID NO: 114899 - DNA, 605 bp, Physcomitrella patens
  Intron number 1 from transcript Pp1s38_267V6.1 (locus Pp1s 38_267V6) derived from phytozome v7.0 (chr-ID scaffold_38; pos 1511920 to 1512524 reverse strand)
ttgctggctgttgaagatttaacaaacaccttgacgtgatgaatgctttgattgatttgtcacttaggttgtaacctcgctttggttcggctcctagcgacgttgcatcttttctagttttttgaaaatcgaaacgttgaaaaggtggggcggttgtcatgtggttacgaaggtgaacttgcggagtcgttttcaatagttttgttttgtttctgagtggtgaggtgtaagcattcaaaatcactcggaaattaaggaaattaggttttgggtagggaaaagttgtcgcggaagttttagttgagttgttgtttttcggtggtttgtggcaatattctgctacgttgattatcaactagacgatagatttattgctttcgtgggagctatccaaaaattggcaagcaatggttgtctgagagattttttggaaattgaagaatctggacattggggcttagtgttagtcagaacagaaatccgagcctaattttgaagatctctctgaggattttagagtaagtttatctcgtttcgaaatgtgaaggagactttcgtgcaatataagattatggagagaagcttgttgaattgcaggtttcctg

SEQ ID NO: 114900 - DNA, 337 bp, Physcomitrella patens
  Intron number 1 from transcript Pp1s281_81V6.1 (locus Pp1s 281_81V6) derived from phytozome v7.0 (chr-ID scaffold_281 ; pos 376286 to 376622 reverse strand)
agcggtcgccctcaaacccagaaagcgtgcagaaggtgcaactaatttctgcaagagccccatccatgcctctctgtagattttcttcgtttgcttgctggcttcgtttacgtgtgcaactgagtggggagagtgagcgactggacgagtgtgtgggtttgttgtagacctgaagctggtgcacctacaaaggcatggaaatgaggggaaagaagacacaccaacaattcaaaataccctcttttgttaaataaccaccaccccgccgcggtgtgtgtgtgtgtgcgtgtgtgtgttaacagtaaacgcgccgtcgtcagttgtgcgggtgcaacga

SEQ ID NO: 114901 - DNA, 891 bp, Physcomitrella patens
  Intron number 1 from transcript Pp1s121_144V6.1 (locus Pp1 s121_144V6) derived from phytozome v7.0 (chr-ID scaffold_1 21; pos 999452 to 1000342)
gtcgcggtaccagggaggccaggcttcctaccaaggtgcctttcgcgtctgacttcataccttagtgatgaatttaagtttttgtattttttcttttatttctattatttcttcttcttcttcttcttccctctttattttttattttccccctgttgttctacttaggagtatgctgttttaggtatggttttgcgggtctcaattagtatttcaacgtatcgatcagctcttgctgtctttttttgaagacgtcatttgggcttcaagggtttaaagtcattatttttttttccgtattgtgacgctacaatccattactgaggctaaccccgccttgtttctggtcattacacaatttggatttagctagggttttgtaatatgcttgatgataccttagatttttatatcttttgatgattcatttgcttgaaagtcgagcgggttgagggtaatcagatttccatttgagattttcttttagttgttgcttggttacgtcgaactgtacttttccggctccctatgttaacagaacggattagtgaattcaagagttactatgggactgctcttgttaatggtgaggtttagaatggggtgtaggcagacgcacccaatttattattatcgaggtacatggtattggttctttcatcaaattctttgctgaaaaaaattctaattagccggcctgcgtttccttttttgaactttgagctgcacccttaaattttctggatgaagtccatgaaaatcacgtgttaaaaatctttttagaaaattttctgcattcttagaaaatcacatgttaaaaatcttctgtgatgttagtattgacggatgacaagcgggctggccgttttgtaggtgctgtggttgcggcgt

SEQ ID NO: 114902 - DNA, 546 bp, Physcomitrella patens
  Intron number 1 from transcript Pp1s73_29V6.1 (locus Pp1s7 3_29V6) derived from phytozome v7.0 (chr-ID scaffold_73; p os 112951 to 113496 reverse strand)
agtcctgagtcgcaacaactcctgctcacgattgagtaagtgcagtcgcaggttttctgtctttaacggttgccttaatacctctgctgtgaaacctatcgtctaatcttgcccgcgctcggtttgcacatatttatctttgctgctgtatcttcatagtcagaaatgaaaccttggatgtgtccagagtataattgtactaatgccgttgccgtggtggatgtgtatgttttaaagcgaattgattctgttattggctgataatgcgttttgaattgttaactttgtcccttttctaagttgaagtgaaaatgacacttctcataattatgtcgttttacgaaatcaaaattaggttaacaagtgcattagaaactcaagagtatttaattgggttctctactaggtaggttatgaactttgtatcttctcctgagcaactttgatcgtgtgcccacatgaccctgattgatgatcacgtcaaggtctgacaattcgttttcttttgcagagaaagagtgcgagagtacagggaagagagccgac

SEQ ID NO: 114903 - DNA, 632 bp, Physcomitrella patens
  Intron number 1 from transcript Pp1s38_234V6.1 (locus Pp1s 38_234V6) derived from phytozome v7.0 (chr-ID scaffold_38; pos 1379344 to 1379975 reverse strand)
ctcaaatacctaccacaaaggcagccattgctcaggcttgtgtcttaagaatgcattcaagtgaaatccacctttgaaagttgttttcgtttattaatcaactcattgttcattgcaacttgacattaggaaacgtcaattttaaattataatccacctaaaattggcttttcccacagcaagaacttcatgtcaactccattaaaaagttatttttggtatctacaatggaaaaaggttaaaaagctgctaaagtaatagatgggttctgcgagatcagttggagatgcgaagctcacttcatgttaagaatggaatcaaagatttcaaaatcactctttcacttttctttcacttgaaattctagaaccacatgagtgtcattttacaattagacgactactgatattcaaaaaagtggtctaatctgtccagggtattcaaacagtcgtcagagatggatcaagtttagactgtagcggcaatgtccttgttacagcgcaagaaatctgtgtgtcaataaacgacataatttagatatttttatcattttaaaacaagagatcacgcggtgaaaagaacagaactaggtggttcaccattctcttttccatgaaaatttgtgcagaaaa

SEQ ID NO: 114904 - DNA, 603 bp, Physcomitrella patens
  Intron number 1 from transcript Pp1s509_5V6.2 (locus Pp1s5 09_5V6) derived from phytozome v7.0 (chr-ID scaffold_509; pos 44266 to 44868 reverse strand)
cttgggcagaattaactgagagcaagttaaggttggtacacggcctgtaattgagacctttgttagctggtgtccatcgtatttagagtacatagtatcttccttactgtagatgttggagcttggtcttcctcttcactgcaaattttattttgtttcctggcttttttcgtgttgcttcagatttctactgatcatgacatcttctgaagtttttgacatttcatgaaaattgaattttagatgacttgattcggaccttttgcaagattcggctttcattgtattggaccaagtatataaaagcagcatatgattataatgcacttaagaactgaacgcaaattttagcgatgtgagcatctcataaccgattaggtctgaagtatatgtcgctatgattttcctgtctgcagcggaatcatctttgtagtatgtctgggctacaacaaagagtgctgctcacatgctgtcactctcctctatcgtccaaattatattttaaatagaatgatttcactatgttgagttttgatttcttcgattatcttctgacgctattgttgatacttattgcgcagatttgagaactgaaacataatc

SEQ ID NO: 114905 - DNA, 515 bp, Physcomitrella patens
  Intron number 1 from transcript Pp1s38_249V6.2 (locus Pp1s 38_249V6) derived from phytozome v7.0 (chr-ID scaffold_38; pos 1450005 to 1450519)
ttcagcccgccccgcattgccgtcccctgctcaaggtttgtcgctcacgtcctttttcacagttggcatttcattctgaattggtcgagctcattgcgtggcttttcaatttccacagggtttgtagttgtgaaacagaattaagtggaattcgtatgccttctctgcctcctcttgcgtgatttgtgagcgtgagactgtcaggcgctttgtgacattttgtcgacccattgaagctgctcccactcattttttcctgataacgattttttgattgtttctgtgttcttcagtgaacctgatggttgtggatatatggttgtttcacatcatatcattattattagcatcattactttaatacgagccttgtctggagatacagaggagtcatataatttgtaaactgtttcgaattctaggcgccgtcggatattattggactcttctgtaacaacctttctatgtaggaatgtcaaaagtctcagctgtaagctgctgtcattgcaggagtg

SEQ ID NO: 114906 - DNA, 991 bp, Physcomitrella patens
  Intron number 1 from transcript Pp1s105_164V6.1 (locus Pp1 s105_164V6) derived from phytozome v7.0 (chr-ID scaffold_1 05; pos 1075659 to 1076649)
tgggttcaattttcgctcgtgttagacgattgttggagtaatcgccctcctagacacgaggcagaaaattttgtttttttcatggttctcgactggtgggtcttgggatttctagcttcggagaatttgagaattcgaagagtctgtttcgtgcgattcggtctttgtttcgtgcaatgtcagcgtgttggattctctgcgacgccctgaatccagtttgtgtgtgaacctcctcacattgagagttttgaattaggggtgtgctagtgaggcttttagggtttgccctgtttgaatcggggaatgtgcgcttggaaggagatctgtacttcaatacggtctggtagagcacgagtttgaacaaccttggcattttctctcaccgatgaattgtatatcaggcgtatgtctactggtaaggaaatccgttgccttcgttgtagcaacttagggttttcgatccactgttaaataatgtagaacgtgccacgtaattccgcacgcgttatcgagaattcacgtacagtgactaatctgtacttttaattctgttttttattgtcttgttatagttttttagtttttttagtttttttttttttttttttttttttttttttttttgaggcagttgtgcatcaatttaagcgcagtcaagatgttgaggatttgtattctacttggcaaatctttattggcgagtaggacgagtttcgttgcacgtagatggacgattctgaaacttggaggcaagcgttttagtattcttctggccttgtagaagatgatacatgttgatcggatcggcacctgtagattttgtaggcaatcaacttttgctgaggattgtgtaccttttgaaatgcaattgattttttttttactgctttctcaagagatgcaagtgttagtagtgaattgctgcaagttttcaatagattgaacaacgatactatctgaactttctgtcttcagagttaaaacgacgatc

SEQ ID NO: 114907 - DNA, 453 bp, Physcomitrella patens
  Intron number 2 from transcript Pp1s509_13V6.1 (locus Pp1s 509_13V6) derived from phytozome v7.0 (chr-ID scaffold_509 ; pos 76079 to 76531 reverse strand)
ccaggtccgtaatgattgtttatgtcgctgaaatctgccgttgaaaagcaatctgcgcagttttcactagcatcaagtttcttctccttgttgactcagaatgtcttagtgcgtcagtctttcctagtgggtatggtatgtttgagtactggaccttgttgccgcagaaaaagatgtcatttaaggcactcgtgacttcttctttagtgtgtatgagcagcttaggcactgaggagttctgcagcaacgtattcttgttttgtaatttcaacattcgagttgtcgaagcttagcaaaatccttacaggaaagttatgatcgtagttttttgatgggttataattacccatttgtgtgtagaatcttagctgctgggtgagggtctcactgttagctctcgatgattgttgtttattaggataaagcaggtttcttcttctgcttggaagacag

SEQ ID NO: 114908 - DNA, 431 bp, Physcomitrella patens
  Intron number 1 from transcript Pp1s46_64V6.1 (locus Pp1s4 6_64V6) derived from phytozome v7.0 (chr-ID scaffold_46; p os 745248 to 745678 reverse strand)
tttctgcggcaggtttgcgttttgtcgcctctgaaacttgtgctgtagcagtgtgccttgtagcagtcgtgtatgggcgtaataatgagtacttttaaggtttgggttggtttcaatgcgcttcttcaaaattttcaacctgggtatagcggtttgggcatgaatgcacccttcattaggttgtcagagtgaagttgatagtaatattagcaggctggagacgttaaccacgatgtagctgtttgcggaactggacactgatgtggtacagcatttagtctaaaagaccgcacgtaaatctttgcctcgaatataatctgtgggtcttggacgagtgaagatcgaggaacttagcggatgatttgattctgtttataatgctgcacgtgtattttctttgcaggcatacaagactgctaccttcgtctcct

SEQ ID NO: 114909 - DNA, 407 bp, Physcomitrella patens
  Intron number 1 from transcript Pp1s41_226V6.1 (locus Pp1s 41_226V6) derived from phytozome v7.0 (chr-ID scaffold_41; pos 1713374 to 1713780 reverse strand)
gaagcgcggtgatgcatcgtgagcattacttgagactctagtttaggcaaggatttctacgagagatggtgtgatggccatgttggggttctcctttagagaattgtgttaggcgtcgagtacggagtgtgttcagggaagagcattacatgccctacctcacgtgggttgtaccattggcattaacattgacataaacaagacctaagctgatccccctagcggtgtcgtttgttcggtgcatcgagttctacaggatttgatactgcaatcaagtggtttcaattgataatcaaaagaaaatacatcttagttgggtgctaaaaagagaattgttagatcgagcgttcatatggttcttgatgcgtgcagaactcagttgagttctgcctcctctccaacaacca

SEQ ID NO: 114910 - DNA, 659 bp, Physcomitrella patens
  Intron number 1 from transcript Pp1s206_44V6.1 (locus Pp1s 206_44V6) derived from phytozome v7.0 (chr-ID scaffold_206 ; pos 210868 to 211526)
tggaaccctggtaagtgtcaggggatttttccttgtgcgatctcacatacaggaagaacgtgatgcaccatcttcatttttattttatttttgttgcatagtactggttcttgtgtgttttgatttcatacacatttttcttgcttcttatcgtttttactgtccttttggatggtcattgtggagtcggatgtttgcgcgaatcgttcgtttctcaataaatattcatgtatgtcagtgttgtgactgggctgcaatgactctgttttagtagtggatgtgaattgcgttgattttgagaggtcgtgcttagaattggaatgggatcattcgcaatgatcgtttaaatacattagagaggagttgtgagaagtaaaaaaatgatcaagcagtaatatattctaagcttgctagcatcctttgttcatggtactgagttatacgacaaacctatcactctatcagccagttgtggttcaaataatgttcctatttacgggtgacctattttggatgatgacctcgtgtgttcagagtgttgatgagttgagttgtaagttgagtcatgatttatattgaatgtggctgagagtaccgttcgagacttggtgctcatatgtacagggcacaaagcgtcacaagtttctcgcagcgtgctc

SEQ ID NO: 114911 - DNA, 593 bp, Physcomitrella patens
  Intron number 1 from transcript Pp1s41_289V6.1 (locus Pp1s 41_289V6) derived from phytozome v7.0 (chr-ID scaffold_41; pos 1967706 to 1968298 reverse strand)
atccttcgacttggagtggagttgatcaagcagaggtcaatgtcgtctaccttcatcttaagtctaatagacttgttattacgttcctgtcttgcactaggcgcttgaaatgtatatcgagatctccgaaaattttatgagagttttgcgaacgagctccttctgattgaaagggaagagatatatttacttcattgttccccacatctcgctataatcggcttcaacctgtaggcatttagtttattgcgcattgaattgaaggataaagatattcatgtctgaattctgtaacttttcaactctcgtttcacagaattaggaaaaatgctcgcacttgaagttcttttttagtgattaattttataacaaaaaaaattgaagatttctagttaatttgcaaaatttgacttcatacatgattaacgtagaagtcattgcgtttgttttaagaatatatcaaaattttgtgattacctgacatccagattttccatccatttaggaatatcgaaaatgtcccagcaagttttaaagaaattgataccatttcttgacgtgtaaaattgcagctggcaagaagggtgcgggaa

SEQ ID NO: 114912 - DNA, 324 bp, Physcomitrella patens
  Intron number 1 from transcript Pp1s102_133V6.1 (locus Pp1 s102_133V6) derived from phytozome v7.0 (chr-ID scaffold_1 02; pos 867988 to 868311 reverse strand)
gtggaacgcaagggagagcgcgtcaggttcactctctacgatacccatctattattttctcttttttttttttttttttcccttcttttcggttcgtgcgagtgttttgatttcagcgctgtggtgttctctgcggagattgtttgagttcgtgcaagttttcaaggattttggggagaggtttctggaagggggactgcatgtgagtcgtttctgtttgtgcccagcaaccctgaagctcattctgagtcccactgactgttttggtcggcgttgttgattcgtgtggcctggcattgtcttctttgttgtgtggcaggttgt

SEQ ID NO: 114913 - DNA, 664 bp, Physcomitrella patens
  Intron number 2 from transcript Pp1s17_207V6.1 (locus Pp1s 17_207V6) derived from phytozome v7.0 (chr-ID scaffold_17; pos 1355046 to 1355709)
ttctccggggagatcgagcacatcaggcttctctcgtaaggttttctctccttttgcagcagatctttcgtcttttaatttatctagtgagtctggacttcagatctcaatgatcctgaaatctatcaagatggcgtcatctgttcatggatcgtatttctaaattgaattttgtttttttagtcatatagagggatggagttctaggatcgtagaaatcggggcgtagcgattagactaccaagaggttgacatcttgcaactgaagtactcctgtagggagttcgtccaatgattatcgggatggatgcacgttcaatgtattgttgatgaattagatagtcgttacagtcgaatattttcttctcctagtggggtggtttttggttcacaacgggttctctcctaggatctgaaatcgcttacgtgagagtgggtacatgacgagtatccagcgagtttttacgaccattgtttctcgacccacgcgtgtgcaataaagcccttgtaattcatgcttgaacacaaattaaatgcacgaatcccatgaaaatgaatggtgtggatttaaaatgattactgatccttacaatcaaaatagtcctcagcttaatcgcccgtaattttctctttagattcctgatccatctatgcatctgtaggg

SEQ ID NO: 114914 - DNA, 910 bp, Physcomitrella patens
  Intron number 1 from transcript Pp1s14_350V6.1 (locus Pp1s 14_350V6) derived from phytozome v7.0 (chr-ID scaffold_14; pos 2109692 to 2110601 reverse strand)
gcgtttctaagtgagtcttatttcttgagaggcttagaatctgtcactctttgcaagtgacgtgagctgattttttggcaaattgcttgtatatcttctttgcatttcgggattgtttcggtgcggaacttatctctggggtttaagagccttgggatagcgtagaattgcccctggcactacagggcactggaagagctgcttttttcctgatttgtcccatttatgaataggaagtgagttttctgagataggatgtccctgtagtggcttacttctattagaaatctcgtttcttgagtggcgaggttttggaagcagaattccttgtttttgttgttgttgtcgttgtttttgttgttgttgtcgtcgtctttgtttgctttactaggtagaaatgtttgaatggtgctcctcaggttttggaaaatttgaaatgtaatttaccttctctgaaacggaattctgtttggagccctgaagtataatagttgcacgaattttcaaaagcaaatgaaggggtaatatgtgaaccgtgattcagataggtacgggaatgatcttaggggcgtttgttaactagagggtgtaaaagagacgataaatttacatctctatacctcattttttgagaccctcaaggctcacacgatcttttatttcccagtgctgaacctgcaactcttgcacttcctttttatgttgttaatgtttatggaagtaagcttatgcttacagcataaatgcatccattatgtcgtcagttctgggagctagaatcgggttctttttctaacactgtgattaatggctgtataaatattctgttgttgatgtgtgtgtatgtgtgtttgtgcgcgctgggttgattgcagaaatttaaggcggattaagagcggaagctgagacc

SEQ ID NO: 114915 - DNA, 705 bp, Physcomitrella patens
  Intron number 1 from transcript Pp1s19_34V6.1 (locus Pp1s1 9_34V6) derived from phytozome v7.0 (chr-ID scaffold_19; p os 216717 to 217421)
tcccagtttgcagactgctctcaaggcatatttaggtgatttctctacttttctggcgatccgagtggtttgatttggccctataagaagtttatcaagaaatacgccctaacgcagcgacgagtattgtcagtttcagtacagcgaagttccagtgtttcatagaagatacttttctggcattgcattaaattggagtctacctgcattgcgccagtttcaattaggaatcattcgtcacatgtatgacaaattcgacaaaggtcgtacattttcatacaaacggagatatgttgatatagattcagtaaattgatgctcgtgctctttcttactatttcctctaaaccctactactttcctgtgtatcataattacaaaagcaaattttattacaatatttcttttctaagggaataaaacagatagatgcatgagcaatgatcactgataaatcccggcgattgacttcgtgaaatggataagggaattcgtttgattcatggatgacggctaattttcaagaagttggaagagagaatgttccaagcatcgaagattgtagtttattaaaggatcctctagccttatttcgtaaatgttccggacacaacggttgtggccttgggggcacgtcactaatttggggtttttccccgtatgattgcagacaggaaacctgtgtcaccactgtctgagctccaa

SEQ ID NO: 114916 - DNA, 818 bp, Physcomitrella patens
  Intron number 1 from transcript Pp1s70_119V6.1 (locus Pp1s 70_119V6) derived from phytozome v7.0 (chr-ID scaffold_70; pos 673866 to 674683 reverse strand)
tgggatcgcgcctggtttgtatcattctcctgcaggcaagctctctgaatttgcacttaaacctttctcgtgagagcacttgctgattgatcggaatctggcaataccattgcatatgtgtcggacacctgaatcttttgttcttggtttattttttcggggcatgtcgtacctcagtaatgcacacctgcttgcttgcttgctggcttggcctcatttgcaagactgaaagtagaagcagaggattctccaattgtatatgtgcagttgcagcttttttgttttgatattttttgtaacgcatggagcgagtatcactcttgtttgaggacagtgatgaattggaatgctccggcaattgattagagcgacctatggagctcatcttttaagtcttgggcttcgctcacccttcagccatgttctaccatctatgtattttgttttaatgcatcgcagtaccaaagcaggtcctgcactgcgtcattggttcttacatcttgttctcatatttttaacttatcactcaagttgcgaagataaatacatctaagttgaaaagagttctactggaccatacactgctgctgaactgcccgtttcagatcattgccattcatcacgagctacagatgtcacagacctttcttgaattttgtcaagtggacctcaataatctttttcaatttgattcaatactcattgactgaccaaacaaaagattgtatcctatcctcgtttttatggctctgttaaataatatgatgattggattttgtactgattcagaatctacattcaatggtcttgattcacag

SEQ ID NO: 114917 - DNA, 734 bp, Physcomitrella patens
  Intron number 1 from transcript Pp1s88_114V6.1 (locus Pp1s 88_114V6) derived from phytozome v7.0 (chr-ID scaffold_88; pos 793490 to 794223 reverse strand)
ccagtcccttcactcaaaggcttcctggtgattctccgcttactctcttgttactcttggggtttctgtgattttggaacgacgcatttagtcacgatgtttctaggttagggtacattcagaggatgtagtactgcttcaagagagaagacgagggtaagcctaggctacaaaattgttgggaaagtgtacagggatgctgttttgggttctccatcgagcgttcctgtcgctcaaagttacgacgattattgttggtggaatcgagagtttattaaaggtggccttggaaattttgggttgtctcataggctataatgctctgttaaaatttatattctatgctattgcgattctattggctgtgagcagttttcctctgagcactccgatcatctaataagcgatgctcttgagtggaagcgggggagaagagggttatagcttgtctagaactccgacatagatcatgggagaaggtgtactatgcatttaattccgcaacgggggttatgtcttgtttcgtctatgggtcctatgagccgctggctgttatgaagcgcattaagagcatggctttgaagaaatattagacgcgttttcgctcatttgtggaatcggcagccttggaacgcgtggtttgaattgacaacgaatcattgcacaccatttactgaacttgtttcttcttgtgatcagccttacatcggagtccctggagccgactgcctatt

SEQ ID NO: 114918 - DNA, 643 bp, Physcomitrella patens
  Intron number 2 from transcript Pp1s81_109V6.1 (locus Pp1s 81_109V6) derived from phytozome v7.0 (chr-ID scaffold_81; pos 588753 to 589395)
aaggccggcctgtattggtaaatctatcttcgttatcaccttgtgtgtaggctctcgtaagttgaaccttgagtgagtcattttgaaactggaaattagttattagttgcgggagacgcttcagttctgaaaatcgaatgtctatatttatggttgtttttttttttttttttttttttgccttatctctctcgagtaagagctgatctgtgtgggcaatcaaaatgttctctcctgaccaatatctgtatttcgtatttatttctgcgtcataagtcactttaatgaaggagattgtattttgttagctttccatatagttgagctatcggacgagtcatgtacagtcttaatgctcataaacttgagctttcagaatactatggttgcttgttgtgggagtcacacagtgtgcctcagcggttgcagaaattacttccacagtcatcctgaagttatttctgctccacatgtctggtatcaaatcgtaatcagtagtttcttactgattcggtgccatcctgtctaaattttatgccatatgttgctccgcgttatccttagtacatcgtttgcttttaagatgttgtcctttatttcgagtgcaggtaataaagaagaagccagattatattctcaataa

SEQ ID NO: 114919 - DNA, 482 bp, Physcomitrella patens
  Intron number 2 from transcript Pp1s65_237V6.1 (locus Pp1s 65_237V6) derived from phytozome v7.0 (chr-ID scaffold_65; pos 1384093 to 1384574 reverse strand)
tgcagcagtttctcgactttgtacgggaggtatgggtttacccaacttagggattgcaaagtgttttagtacattgtggttttggagctgctgcaggttggaaatggctataaatgagttttatgtgtgaatagacttcgtcaagagagaggaacttgtgacacctcattagtggcatgaggaggaagaatatagtggtagttatcaatcatgtaaggaacgtaagtaatgcctcgatagatcttgttcgattgcacagtgagagtgaaacatacttaaataatggctggcacgtctctctctctctctctctctctctctctctctctctctatatatatatttgactgcttgttatggtgccttggcttgaatttttctagataacattgctctcaatttgatatttgcgtgggattttctattttttgttttttgttgttgcagatttaccagaattttagggcgaccgtaacttactt

SEQ ID NO: 114920 - DNA, 659 bp, Physcomitrella patens
  Intron number 1 from transcript Pp1s3_113V6.1 (locus Pp1s3 _113V6) derived from phytozome v7.0 (chr-ID scaffold_3; po s 717618 to 718276)
ccagccgggggaggagcaggttggagggcgggcaggtttgaacgattcacaactcttaccaaagtatgtttccacttaggaaacattttacatctcctcagttgggttgccttccgcatttggcccacactgatccacactctatacagagtgtgctgaagtttgttcaagggcttgcgtctcaatcccaaatccttcaattctctttagtataccccccaaattcctttaacagccattattatcaccaccactacttagtaaaatctgctcaagtatgtcatgtatagctcagagctttattttatttatttatttggcttcccaatcttgtcttaagagctcatagataaactttcttatgttacgttgcataagaaagctttgcaaaaatactttttgaccatgttataacgttttgagacaaccatttgttatgattttcaaccatcactcttgcttcaaagaatatttttcgtatataacagcactgaaagtacatgacacttttgtttccaggaagaacttctacaactcaaaaaattaactcgtcaattttttcttcaacacggatatttaataaacaaggattcaaaattgattccccatgggagtggtgcgcaggggagggtggctggtactcgtggcccccctgctct

SEQ ID NO: 114921 - DNA, 447 bp, Physcomitrella patens
  Intron number 3 from transcript Pp1s416_11V6.2 (locus Pp1s 416_11V6) derived from phytozome v7.0 (chr-ID scaffold_416 ; pos 175675 to 176121 reverse strand)
ctggttatatattttgacccagaggtgagcagtgctgattctgcagctactcccttcttcaacaaaacataacctacgtacgagcttgatcgatgtatgagatttgcacttgttgctcggatcttttatttgtacattgttggattcaaactgggccctgcaagttttcatgttcttgatgtccgtgatattatttttaaataactgttcaatttgacttccattatctatctgcactggtagctattttctttgatgtttctcataaatatgctaagacccagcgggcttagacttggaacccacattttaaaatattagaaacaagggggtccacgtgcatattcgagttcttaactcgatttagaaatgtttttttagtccagaattgtaaagtttttgttttcaactcttacagttatgtaaatttacttggtaatgcacaga

SEQ ID NO: 114922 - DNA, 735 bp, Physcomitrella patens
  Intron number 1 from transcript Pp1s421_1V6.1 (locus Pp1s4 21_1V6) derived from phytozome v7.0 (chr-ID scaffold_421; pos 13537 to 14271)
tttctgtgattgctcacagctttgatcgagcacaggtaagctttcatggctgttatgggcgccttatggtgagtagcgatcgagtctgagtgtagaatgggagcggaatccatggttttttgggtgatacatggtttgtttgatccttgcagtggaggagtccgttcggaggtttggcttgaagggagttttttttgacatggtggtgacgaaggtcgtcatcgtcgttgttttacagcgattcttgtctgttggatttcagaagagtcttcgcatttagtgaggtttgtgggggaggggtaggcatgatggagggcttcgatgtggaatgatgataagcgggcgttttgagctcgagattttatgttgctgagtgtttcggatgtcagataggattttcttacgttatgggtggctcgaggttgagaattttgggagggttccgtgcgttccttcgtgttgtagatgagcaggatgatattgtagtccgatcctttttggcttgcttcattgcgtctttgagatagtccttttactctccctcgatcctttttgctgttttgaactttgatttgatttttatttttattcttattcttcaacaattgttggtcttgtacaggtttttggctctttttgatcaatactttttgttccttgattactgtgccaatcttgcagctggtcattcccactgaattacgttcatcttcttgtgtagcttgctggtacaac

SEQ ID NO: 114923 - DNA, 944 bp, Physcomitrella patens
  Intron number 1 from transcript Pp1s133_100V6.1 (locus Pp1 s133_100V6) derived from phytozome v7.0 (chr-ID scaffold_1 33; pos 797157 to 798100)
ctggcaagcaagggaaaaatcttgtttttcacaaggtctgtagctttaaaatcccgaccttaattgttacatcattttatttattttattttatttatttatttcctggagcttgactgatgtaatttcaaagtcctcgttaggtgtgttctgcgatcatcactattgatctgaaaatattcttcatttaagtagcaggtgaacataaagttgccacatgtagactgtgaaatgtagaaggttttgtatgttttttttttctaacttgtcaaggaaaattgcattcgcaattcagatcatgcagtcttacaatgaaaaacagattaagatgtgtcccgtccgtaatttggctgtagtcgtgaacgttagcaggcattctctgataaatttttgaagatgtgcatacagactagcaatacctttcagacgaaagtttttgtgggttgctgatttagtattacgtactctcaaagtataatttaagcgacttgacgtagaagttgccacggcttgcccgtaattccatatctacctgagtaccttgcacctgaagcatccgtgaaactcgatcggctaaaccaatagtggggtgaatttcgttttctgagttatatcaatctttgtcaagcaggaacccctttatataatgacgttaccattcctatgagaagttggagtgcctgttgcctgaaatgatctttcattgaggctattttgccaacgaacacaattatacgcctcaacccctgtgcgaatagttgttgcaagggatgcttaaatactcactgtcgtaacatcaagcggctttcagcttggagtgaaatttcctgcttgatttttttttttttttttttttttttttttgaattttaaatcaactacatttttttctgatatgtggctatgcaggtggatctttgcgacaaggttggcatccaagctgt

SEQ ID NO: 114924 - DNA, 456 bp, Physcomitrella patens
  Intron number 1 from transcript Pp1s94_130V6.1 (locus Pp1s 94_130V6) derived from phytozome v7.0 (chr-ID scaffold_94; pos 918849 to 919304 reverse strand)
tggtggaacgttacgccatcagttgcgtggaatcagctgcaacatactataatttgctgcttctgcgtgtttactcttaaggactacccccgtcactcgcttgagtgaatgagtggggtagtttgaattttttttagtaatgttattgcaatgtcaaacaaattttatgaacagtaactactagttggttttttagttgctccgttttttctggggttgagaaagcactgatttgttgatctttggatggtgtctaggagtaccgggtttccgtatatcagtatgggtatcatctaacgtgaaatctctgataactgcaattctcttctttctactgttcatttttggagtatttacagcttataccgcactatggtttctaattatatgataatagcttcttttttttcgtgtaatgcagctcaatctttacgttgtgcttgcagagtactcagg

SEQ ID NO: 114925 - DNA, 493 bp, Physcomitrella patens
  Intron number 1 from transcript Pp1s377_46V6.1 (locus Pp1s 377_46V6) derived from phytozome v7.0 (chr-ID scaffold_377 ; pos 328039 to 328531)
ctgggcaccctttcctctcggtaagctgattctctgttccccggctttgaatttgctgtgtgttttcttttgggaaggtttatgtaggtttgagttggcgaactcgatttaggggttgtttaatttgacagatacattttttcttgatcagaagttatcaacacatggataccagggactctgatcttcctttaatatttttaggcttatttctgaagtatctgttcactgtaaaatacatctgaatagtctttacttaattgaataattggtcagtcatcgttataacgcgatacaacgtttaagattgaatacttactgtaaatgccacctttctatattcttgttcggtgcagtatacattttgaaattgacttccacttgtaagacttgagttagtaatagagatggtgttttttcaccttactctaattgagtaagttattcattgtgtgaaggtgaggttggccctgtggtgtaacagttaccttcg

SEQ ID NO: 114926 - DNA, 492 bp, Physcomitrella patens
  Intron number 2 from transcript Pp1s488_10V6.1 (locus Pp1s 488_10V6) derived from phytozome v7.0 (chr-ID scaffold_488 ; pos 71253 to 71744)
ccagacttatcactttggatttcccaaaaccggaggtgagcaaaatgaaaggccgtggtgtttttaactgttatcttgcatagtgtgccggagaaacagattctttgagtttatgaatttagagcttccagaatgcatgaacaactgcttttccttttcttttcttttatcctattttacaaacttggaatataattcttagacttcaactgcaaaaattactttacatcttttgtatcatgacattcgtacaatatattaaagtgcgactgtactaataaattaatccaagttgagtggagttactataatatgtcatgtggaggtgggttgaaaaacatacagaagcacttggagtaattaaggtacagaatagccgaataatcatccgcagagcctactcatctttcgcaggatgtgtgcagtacatgtactgtctaaaatttaaaattttgtgtaatgtcgtggacagagttgcgagctcaattcatc

SEQ ID NO: 114927 - DNA, 735 bp, Physcomitrella patens
  Intron number 1 from transcript Pp1s23_195V6.1 (locus Pp1s 23_195V6) derived from phytozome v7.0 (chr-ID scaffold_23; pos 1464626 to 1465360)
aagcgtgccaaaacttatcctcccagctacaccttgtgagtaacgtccccaatttcaaatgtaccagacacgttaggattcaacgagattgctagaaatgtaaaaacatatgtgggaccgcgtctgttttcttgtcaacgtggtgcttcattcagctccctccaaaagccgagtactactagtaggaaaacaacaactcagaaccgttttgaacaaattatcacgaaggaggggctgaattttggaatattgcatatagttctgacacctttaattgatatactttctactcaactaccactattcatttactaatgcgggtagtcaacttaacttgtgtaagggaggagagacccacccaatattagttttactgagtgatacgaatcgttaaaactaacatgttatagtgatcatttacagtgtgacgtgtataaacatagagagtaagggacatatacctgctgtatttgattttctgtagcagcatgattggtcggagcaacttgaacagaagattggaaatttacaacaggttcacttgcaattatcgtgggggtgcaagcatggtgcctgcaagtttgtcggtttcgcatctggtgtagatcatgcaatgtattaaaatttgtggtctggtattgttgttcacttcaagttttgtctttcattcactaagtaaacaaattcgttcatcatgcagacgacagcaaagaaatatacgagcttcaggacctt

SEQ ID NO: 114928 - DNA, 1056 bp, Physcomitrella patens
  Intron number 1 from transcript Pp1s391_1V6.1 (locus Pp1s3 91_1V6) derived from phytozome v7.0 (chr-ID scaffold_391; pos 10172 to 11227 reverse strand)
gccgtcgttgcactgggatccgtctgcaacgtcttgtaagtgtgcgtcgccctgtatttttgtttttcctgcagggcttgtggaaggtgttgtcatggattcgtcggtggattcgaactacgtagatttggaaaataatggaagtttggttccagcggtgttgtcggcgggcttgaatttatatatgaacatcgccagtctgtgtaaaggttgaatgcgctgagaggtgcatgtcgaggtacctcttttcacttattgttgaagttcagtttagatgaagtgcactagggcgagcaaacgtttgccgtcacaagaactggtgctggtagggaattgcaacggactcaggattgtctcattttgaggactacgtctgtaaacgtgggacgtcggctaggtggggttgacaatgtccattgcgactcaaagttcttgcttgccgtgcttgcctgattcaaccagcctccttgtgttgagaaagtctctctggttgtttcgaaatgaatcttttgataggttttcaaagttaaaacatttccatgtgactttgatgtattgcgcttttctcttcacccattatgtaagcgcttccaccttgtatcgttttccaacacggtgaaggtgatgacttgcaagagtcggaaggtggcctggatcattcgagtagacaactctctactctaatttgaggcgtgtgtgagaccgtatggttcttgtcaatggtggatagaatcggagagatgttatctgcctcgcagtgtattcactccgaaatctatcacttgctttgtgccttcctcaattgtctgagtgaagctaaatctggtgctcctttgacagggcatttgagtgtatcctttctaaagaccgttttatcggtgacttgttttagctctctatgtgagactctggtaagcgaaagtagcagattgcggcggtaaaggttgggggagccctatgtcgattaagcatgttccgcttaatctcacaccgagcttcggtttcattgtgggcattccagcagatcgtgggaagaccaaggtggcacagcgctcc

SEQ ID NO: 114929 - DNA, 1008 bp, Physcomitrella patens
  Intron number 1 from transcript Pp1s99_185V6.1 (locus Pp1s 99_185V6) derived from phytozome v7.0 (chr-ID scaffold_99; pos 1081884 to 1082891)
ctaggtaagtcgtaaaattctaggtaaccgattgtttgtgttagcacactgctcaagagccaacatggttcactgaaacggaagctcaggcatggatcatatgacgctatcagactttccaggcttgtgccaatgtaggcttcccagcatttaccatgggttttaggagctttgagaggtaaaattgattaatatagaattacatagctacgtttggatggagacatacaggagaatatcaaaacaagtctgaccagctgcccctcctccagacctgttggtcactaacttgagaacctgtcactgcggtgcagctgcgggcgactggaagcgcgacatgcatgaaattagagccacttttaccactcgttactcaaccatgatggaatagaagctaaattgcaccaatcctggaataagttggcaatcctcctggttctcaatgtggttccgtaagcgactgcagtgtccatcagatcttattctacattagcgggtacagtcagatacatagcatgtgaggattctgagtacggcctggtaagtagacctcgctaatgcaatctctggaaagatcacgacagctccagtgccgaaacaaatcttcatctactatattatgatcctaatatctgtaagctccaaagcgagcccgcggccaattgactgattccgatcatgaaagctaaatgaacacgaacggtacttcaccaaagaaactcaaatgcaacatcctcttccatggttgcacgacaaaacaatctccggcacttcaatgtcacataaaaaaatctcagaaacctgagtttcttcaagaaatctctccattcgtctgaaaacattcagaaacatggacataaaaagcacggctagaaaattatctcaatctttattcgtcaagatactcataagaaaataaattcacagactaccaacgcatcgcaaaatgaaaatattcgaaatggactttcagaacaaaaactacgcgctcgttagataaagcgagtc

SEQ ID NO: 114930 - DNA, 1003 bp, Physcomitrella patens
  Intron number 1 from transcript Pp1s192_51V6.4 (locus Pp1s 192_51V6) derived from phytozome v7.0 (chr-ID scaffold_192 ; pos 463565 to 464567)
tacatctccgcgggaattttctgcgtcttttggtggtaattttggctcaaccggtcgtgtttgcgggatctggtgtgctgtggtgtgttgatgcggctctcggcggtttgggacgatccgttgttgctcgctgcctgtcatggttttttagggttttaactctcgtgtgagttgatttgcttatttacatgattcgaagtttcacggtgtggtggtttaggccttgtataccgacactggggtatttggtggattgttccttgcacttgtagcctggatgcagtggtagatgatggtgatgatttggttgttgggttgagaatggaagttttttcgtctctctctattttgtttttattttggatcgcaatgtgattgccctgcgggtttaagtttttgatggcctctgtagcagagtgcagtgctgtaagtcgattaggtgtaacttgaattgtggaggtttttgctatagtggaactaggacatgatgtgagatattgattatatttcggagatttggattatagctctgatccggtctcgtgtgttgctcaattactttacttggatcgtgaatagcacatgctagtgcgaggaagtgtggtattctcgcagattagggtatttgagttacaagcggtatattgagagtttcttcctgtcataatgtagactggtttttccttgtgaatttgtgaatctctgctccctgttcttgtttgtacaatttgattgaagcattaggaagagtgaggattcctatttatgtgatcaggaaatattgtgcttcatcactcgtagaatgttggacccgttgttattattcttgagacatttctcttaagtaatgcgcacaacaaggataatgtactggttctacgcatccctgtgacccctttgtcatgtacttaattaattaattcacttttcatacatttaacgtgaatagtctgttcttgcgtctttagtgctgctctcaggcctgtacgtggtactcataccg

SEQ ID NO: 114931 - DNA, 1008 bp, Physcomitrella patens
  Intron number 1 from transcript Pp1s426_19V6.1 (locus Pp1s 426_19V6) derived from phytozome v7.0 (chr-ID scaffold_426 ; pos 112515 to 113522 reverse strand)
cgtcgtttctcagtgccatcgcactagggagtgtggtacgttcttcatcattggttaccaggttgaaggattttgtccgcgtaaatttaggtcatcgtgatgcgtgcttgaacgcttatacacaagttttatcgttaagatcccgagtgaggtcttgaggttacgccttgttgtggttgaaacaaggcatcgcggagggagagaggagggtgggtttgacggcagatagagtccagaatcacaattagtttacaattctcgatccatcagtgtcggtttactaaaggctatgcttgtcttgggcttgtttcacctttgttctttcttgagagctaagtttgtgcgtgcttgtgtaaattatcatccgacttggttctgaatctcagtgggaggaatgtgcgaaatataggatacaggtgctcgcctcataatttcaggcaagtagacaagtgtattttttagagaacatttacgtagtttctgggcaggcgacactgtgcattcctgcggaaagactaggttataagactgattgggcgtgaggatgctgggcttgattggattcaggagttcagataactcgaacattaaccactcaattcttggtcaacagttggcattgctgatgggtgctttagttgatttcacgacatcgcaagcgttagaatagtgaacttcttgtttgatcaatgatgcaatataccaatgtacggaacttatacagctagtttttgcatgaatttctttgagatttaaggggaacgtgttaatgtcagcaccccgttttcgtcggaatgacaatccgaggtggttttctcagaggagcgtcgtggattaggaactttctgttggaattcgcggaactcattgtgatcagaattgggattgcaatcctcaatgcaggaaaacatagtattgctacttgatttttgtattttctgtgtgcttattgctttgtgtttcatgaacacagagtgcaggaaagtcagcggtcctgaacaccatcat

SEQ ID NO: 114932 - DNA, 897 bp, Physcomitrella patens
  Intron number 1 from transcript Pp1s3_195V6.1 (locus Pp1s3 _195V6) derived from phytozome v7.0 (chr-ID scaffold_3; po s 1234998 to 1235894)
tggagtatttgcacggtgaggttgattttgtcgatgctggtcgtatttttaatgggcagaagaaaattatgatgtaaaacacttgaatgcagatcagtctgtattggttgctttttctcactccacaagatcccctactgatctatactctgtcccctttcaaattcaaaggtcaaaattaatgaatccagaaaagttgcacaaatgttttcacaatattcaggacgcagttcttgtgaagttgcttcttcagcaacaaagacatgtgattggaagtaatctcatagtctgcgataggatcactgattttttactaaatttcattccaaaatacagaacctagctgcaggaccagctgagactccaatgccctcacggattttgacagcggtccctgataacgaggaatccataaagaaactgctcagctaactccccaaaacttgtgggtgtttttgcgattggtcaatcctgactatgacacacgtattttcgaatcctgtactactgtacgaatgtaaaatgacgagttcttcgatttcctatcctgactttgatccttggcattcccaacattgagcaatcaaagctgttgcatgatacagtttggatggtgttttgaggaattcataccgcttattacagaaactgcagtgtagttttgtaaaggaatgcgcatcattttatacttcatttatttataaatgatgtgagtaggtacaagacgttacacatcaacccttttcaggaagaaaactaacacttatcgaagttgctgctgcatcgactgtgcatagatttcctcctgcataacccaattacttaatgtgatgatgtagctgtggtgttatatatattacaggtcactggagaccttgataagatatcgacattgca

SEQ ID NO: 114933 - DNA, 945 bp, Physcomitrella patens
  Intron number 3 from transcript Pp1s65_194V6.1 (locus Pp1s 65_194V6) derived from phytozome v7.0 (chr-ID scaffold_65; pos 1112272 to 1113216 reverse strand)
gaaatttggtaagtttgcctacatgcaggcattcttgcttcgatgttatgatttgtttggatagcatcccgaagtctttgattttgctcggtgttatctggatgttttcatttcttctccttgggtagtaatttggcctggcattggtgttcagaaacatcattggtgtgtgttatgaaggtagtctgaatggaatttttgacctcttctgacattgcggaagtctgtagtgctcggtactgttaacgtatccttcacagttgtgctgccttgtctgaaatctttctagatagttgaaggatgtttcttcctggatctcttttgcaactgttacctatttgaaagcgtatttcgctctgtgccttaatctttcatgatatacgtacagtcagacatatcctttcgtttggttgttggtgcaatttcacttctagaatcccgaatgctgtttcacactgtagggaaaaccttaaccatcttccatggtgggccctaagttccaaagcaattgagacctaggaacccaattggcacgtacttgtgaatatactggccttgtgtcagaatcggggtccttgtctctggcgtttaaggtagcagtaatcaatagtgatggttttttgttttacctttttcctggtacattatggttaatcacaaagcatgcacaattaattagaatttcgcgcaattccagctgttgagtggtcgatgagtccgaccgtgatcatttcgaattctttgctcttcttctcgctgcaactcttgggtgcccgtctttgttgctggactcgacccatgtgtatcgagccacttcgaaatggccgattcgcagtctgtgacggttgataggtagcgaatgtgcggggtgacgggtgcgctgagttgatggtgtggcggtgattttgatggtggtgtgatggtggttgtgcgcagtgaacgcga

SEQ ID NO: 114934 - DNA, 902 bp, Physcomitrella patens
  Intron number 1 from transcript Pp1s1_567V6.1 (locus Pp1s1 _567V6) derived from phytozome v7.0 (chr-ID scaffold_1; po s 3276561 to 3277462 reverse strand)
agcgagaggtaacgacaatattttcctgccttttcctcttgttaatcacaccacacttatttctggtcagtcgagaaaacagactcttagcctgctcacattttctctcgctctctctcctatctttgaaacggtttccgcatttaaaagtagttcgttaccgccggtgcaacctcgtgaatacattttttgcgttttttgttctttttgtttttttctgcatttttggtagatgtggagcgaggcttttagtttgaaattcacttctcatagacactaaacaaagttcattagagctcgagttacacactagtctcaaatttgagaagtttgcagttcatggaaactataggaaggtttcattattgctcatgttaatagtgaaattgaaacttgtgacaaatcgaacggagaattagatggtgcagctggaatatcgtaagttccgtatcttggtgtcgtagtctaagtgccgtgttatagacgtagtccagagcataatttctgatggatagtgatctcattgcgaatgcgagattattcctgtcccgaccgtagttacagttcaacttctctgttgagaaacacttttgcctcattcaattttaagcaagcggttttccctccaagatacatccaatttgtgctccagcttatttcatgaaaattgaaaggtctgaagatgtgtttgtaagctggataaggtgatacgtctgttttcttcctggtgttgtatgtactggtccccatcttgttgaggtgaaggtcgatttctggctctcttgaatagtttcgtcaatcgtactggagtcatggtgcttcatgtcgaagagacaactatgagtttggtttataattcgattgttcgttgtgtccacagaggaagtctaagggtgaaagaa

SEQ ID NO: 114935 - DNA, 409 bp, Physcomitrella patens
  Intron number 2 from transcript Pp1s243_72V6.1 (locus Pp1s 243_72V6) derived from phytozome v7.0 (chr-ID scaffold_243 ; pos 564343 to 564751)
aaggtttggaggtcagatttcttcaaagctacacgaaacttcttttaaattgttctggttcttcttctgaagaaaatgctggtttacgtgtacgctgtgaaatctactcatcaatcttcacgacgtatattttgtaatttcttgcagtccgagtttcaaaatatgtactgacgcatgtttgatgcctttgactgctcacgaacgattattttattttattttattttattttattttttatgttaatgtttataacgtcctaggaagttttgggtttattccaaagtctgtaattttaaaccgggtggagtctgggattatctgaactcgtacaattgtttggcgatcgtggtagaaagtttttgaaagctcatttgtgtagggtcaatgtgaattaggtgcaagccgg

SEQ ID NO: 114936 - DNA, 864 bp, Physcomitrella patens
  Intron number 1 from transcript Pp1s119_48V6.4 (locus Pp1s 119_48V6) derived from phytozome v7.0 (chr-ID scaffold_119 ; pos 320675 to 321538 reverse strand)
ggggttggagatacgtctatttgacgatttcggaggtgggttgattctcgatttttatttggttttgtttattgatttttttgattattttgttttcgaacggctggtgtgtcgtacgatgcgacgctgttaggtagggttttacttctattgaagctcgtaatccagggcggattttcgaggtgtattgtggtgggacgacggattgttgcagctttaaccctggtggcatatctagtggatgctcgggtgggcggagttcgctccatgtgtgttcttagaactgggttttggttttgtttcttggtggcttgagagacccttgacactgaaagctctgttgtcatagtgtcactgtacgaagttttcttttagaactgtgaacttgactgaagtaatggctcagagtttcctttctcgttcatttttaatccactggtttgtggttgtgcttcgtctagttcatgaaaatctggaatcttttgtttgatcgttttagcgctaaggcttgttattccgtattcggctttgttcatgaatcgaacttttttcttgattcaggtttccttggtacatctacggagttgatgttttgaggtgttaaagatattcggaaaaaggaagtacgttagcttttgtttcataacggtttcaagattgttttatctctctatttagttatctttgaaagtgttagtacaattggaatctcgcaccccaatactctaaggttgaaaggcacgtcgttgaaaatcaaatgtctgaaattaacgtctgcaattttgcgaatttagatattcaatcagtgctgacacgtccgtgtttcttctatcttagttgcacaggcctcagaattgaatagcc

SEQ ID NO: 114937 - DNA, 907 bp, Physcomitrella patens
  Intron number 2 from transcript Pp1s75_119V6.2 (locus Pp1s 75_119V6) derived from phytozome v7.0 (chr-ID scaffold_75; pos 674377 to 675283 reverse strand)
caaatcaagagcacgtacaggaagctggcgttgaagtgagtgtccatgtaaccttagtggacgtgttcttgatttgatgcttgctcatctttagctagaggattatgaacgttatcttaataaaattctaaactatagccttgagaagaagaaattggcatgaagtggtgcactcttcccctttccctagaagttcaattattaattttatgacctaaacatcatgtcgggatgatacaaattatttttgagtcctgttagagtttccgctgtctgctgcattgttgtcacacagtgctgcccagcaacatttaaaaacaatattacatcccagattttaaatttaggaacatgcctccctccatttaatatttgtttgttttttttcgtgtttatttgttttcgagcaatggcttaccttgaaggatggatgtccttccaagtatgaggcttggagctgaaaacatggtttactgagtcattatcaatgctagtaatgttaggcagcctagtcggaccaagtgaagaaatgctttgtttgtctttcaatcggagctggaaccctgtatattaaaagtgattcatggttttctttagtgagtagcgatcgagtttgtccgcgttcagtgcagagattgatgctttttatcgcaaatgagctagggctccagattcaagagcatcatttatgtgattcattacttggagttggaattattaaggcggtgcgagtttcttgcagtaggttttacatgtttcctgtagaggactgcacgggtttactctgatttttgcggctggggttgacctccataagatgcgcttccaaacaattggaaaatttatttcacggtgattgttgcttaaaccagatatcatccagacaaaaatacaggcaatccagagg

SEQ ID NO: 114938 - DNA, 725 bp, Physcomitrella patens
  Intron number 1 from transcript Pp1s19_235V6.1 (locus Pp1s 19_235V6) derived from phytozome v7.0 (chr-ID scaffold_19; pos 1626455 to 1627179)
gcggctgctctggttgaccaggtgacttgtcatggtctgcatttcaaatttgctgctcctatcaatagatgatggcgtttccttgaatatgtgagcgcacggttggccgtacgcatttggatgggttctcaattgaaagtctatagttattgagaatcagtgcaacttgtagttggaaccatcattcttgtattgtctgaagaactttcatgattggtcttaaacggttgccgcacaatgcaggcgatgatggggaggtggatgccattggctgtggtatatcacaaggattatgaaagtgctaaaagtgcttttctgctctatcaccaattatcctttgttagaggcctagtctattttctgttgatggtcctgccgttttttgaggtaattggtgccgcgggtttttgaagttggatattagtatacaactgcctttttggtttcttgtactccaagttcttggtatattattttgtggaactgaagtcatatcaaaacagaagaattttaagttctctttctgttatattgctagaaatattcctgttagttagagaagtgaaggatatgggttcattcaccaccactcagagtttaagtatgctgacttcatcaaagaattagaattcgtaaaacgaacctcttctaggtttatattttgccaagaaagttatgtttatttctggtctgagtttctttcctttgtttctttagattccagc

SEQ ID NO: 114939 - DNA, 920 bp, Physcomitrella patens
  Intron number 1 from transcript Pp1s105_41V6.2 (locus Pp1s 105_41V6) derived from phytozome v7.0 (chr-ID scaffold_105 ; pos 234899 to 235818 reverse strand)
gctcgccttttcaaggtcagttgacgggattatgctctaccctcttcataattcttatccttcagttttgtcgtgtttttgctgtggatttaggcggtctcggtcgactttgaatcgtaacggtttcgtatttcaacacaggacggaagaatcgtcgttagcctctggtggcattgagtttcgcgacggtctatgtccattgcttctttttttctgaaatttgcttattgtttgcgtcgaagcagcgtttcggtgttgagggttttatgaaagaggactgatgtgtgttgggctggctgttctgttgtcagttactgactcttcgctgttttccttttgtattggtagacttaatcggaagtcgctccagaagaattgtttgcggtagttatcaacgtgtttacgagagaccttgtttttgggttatgttctgcttgcgcatgtgtgttttagtgtagagcattacttagggctgtaataggttatagaaatgaattgtgatttgtgcaggtgtaagttagttcgcagctatgattaattttttagctaacgaaatttgaatttgaatgcacattgtatttgagatgaaatatgcgggattcgtgtgagagaaagtctgcgtccgcttcaagcgaaaacaagacgagattgagaagacgtatgtttgaggagggatgaatttaatatcgcgtttaggaatcaattagtgtggcagtcttaaaatgttcgttatgttagctttagtttatcctcattttacagtgagtatatacttggttaattcttgcaattctgagatagtgaggaccagggatgtggcaaagcttgaggtaacaaacacgtggcatgtcgaagtgctgaacgattttttctggctgaatgcagaatccggatcaactgtcggcgtacagagatcgtag

SEQ ID NO: 114940 - DNA, 753 bp, Physcomitrella patens
  Intron number 1 from transcript Pp1s74_161V6.1 (locus Pp1s 74_161V6) derived from phytozome v7.0 (chr-ID scaffold_74; pos 1038861 to 1039613 reverse strand)
ctatcagcctttgcgatcctttacatgttagtcctcctcccattatatgtatatttttctctgcttgcattttattctcttctagggatctgagtttcgagaacatgagtgtttacacgtttagggtgtagaattcagaactttgtttgctacatttgggaaagacaatcaagaacgatggccgtgtaagatcgcttggtgacaacccgatgggcatggactaagcgtcacattagcattgttagtttttgatcggcgaaagaaaattcttttgaaatatcgttgatggtgatatatcttgtctgtggtaattctcatcttttagtaaatcagtttacagcttctgttgcacacatatccgttgcattcatgagtcaaggttttcgaatttttcgactactctctgttttgtatagctgaacgtcgagctgggcttgaaccccagggtcacttacatagcttttcatttagcacttctgacaggactattattatatgatcattctgttcccctgtagcaagaatgaaatcagtagagatattagcaagtattcgatattgggctttactagaacggtttgagactatatgtgcagcagtttggtctagttattatctaagataattgacttcatgtatccctgcagtagttagccaggttatgatagtaatttgtagctaagaaatggctgagaatcaaagtttgttcttgtagcaggtattgcttgaaggagcttctgaccaaaatatacc

SEQ ID NO: 114941 - DNA, 786 bp, Physcomitrella patens
  Intron number 1 from transcript Pp1s165_106V6.1 (locus Pp1 s165_106V6) derived from phytozome v7.0 (chr-ID scaffold_1 65; pos 771438 to 772223 reverse strand)
gggcgagggttgtgacgcaacgggacgctgtgcttgtgcgtgagtgctttgctgggttttcgttcttgatgtgcgattaggtggcgggcgtatcgcattttttccgggtctgtgagggtgttgttgatgggttggatgggttccgagtgagcctgacgcggggctgggtacgggatgttgtagattcacagcgaaatctgttctttcgttctacgtgggaccaatttgagagtcggtaaggcatttttaggtttttcttttcttttcacgcggatggttttgttggtggggatccgtggtttgatgtcggatggctagtgctgtggggttggctctcaagatccagctatcgtgatcgtgtggagattttggatttttcaaatctcgttctgggttggactcgattagatgtcgtgtgtggtacttcgttcttctcgatgctaactgcgccattctcttgacctgtctaccgatgtcgatacggtggctgaagcgttgattgtttccatctcccctatccttggccactgtatcgcaataattgggtaccgggggggggggtagtgcagttcgattttgggctttagcagtcaaagatctggatgaattgtttggacttagccatgttgatcacgatgaccttttgataacatgatcgcgcttgcagtgattttatttgtgtttgttggtacgttcgactgattgcattcaatatcccatttcagatcctattttcttgtggtgatcctattgtagattgacgggtgaaagaagaagctcggggct

SEQ ID NO: 114942 - DNA, 1042 bp, Physcomitrella patens
  Intron number 1 from transcript Pp1s135_61V6.3 (locus Pp1s 135_61V6) derived from phytozome v7.0 (chr-ID scaffold_135 ; pos 536221 to 537262)
cgtttctctctctcttcctctacttttctccgcaagtaagcgtctactttctcgtctcgtctgctgcgtgtttttattttattttattttatattatttttcttttcttttcttgtgtgtgtgttttgtgttggtgttgcggagttctttttcttttatggatggtgatgttatggtgattaggagatggcatggtgtattgtgtaaggtgtctcgaactgtgtagaaaccccaggattagggcttgtggtctgcggatgggattagagggaggtcttgtaggaagattgccgccgtggtggtggaggtggagtgattgctggcgattcggtagagttgaattgagcttgggcttaggcggtggtgcattcattgaggatggggatgtgatggtcttacgtgattatcaggtgtgctgtaagttttgggcgtggcgaagaaatgggtgacgtgcgtgcttgagagttaacgtgctggatttagcgagagtgtgaagttgtgtttgatttgctgcagtggtgattcgggcctatttttgtacctctcgggacccttcgatttcttttcagaacgaggattttgtgaggtattctaatctggatgtttcggattaaagagtatgatcttggtctctctttggtggattatatattgctgcttgagttagcagttagccatgaagctgtgtgtttgtgattgcattgagtcgctgttcaggatcatctaaattcatagcttgtagttcttgtatgtctctttttatttctttcttctttttattttattttttagtttttgagtatctgtgactctctggtttcctaatgttaacgttcagagttcgaggatgctcttcgtttctatcatgagatgcttgcgtctaaatatgttcagtgccttatgctttgaagctattgcaagcttagcattttcatgatgttagctgctgatctcaattatgaattaggcacttgtttccctaatgtaattttcttctaaagttcgggcatgttgagttgcagatagacctttccgcggcaga

SEQ ID NO: 114943 - DNA, 829 bp, Physcomitrella patens
  Intron number 1 from transcript Pp1s87_187V6.1 (locus Pp1s 87_187V6) derived from phytozome v7.0 (chr-ID scaffold_87; pos 1413586 to 1414414 reverse strand)
atcgccagactccacgagtattccccaggttatttcttcactttaaaagcactgattggcagccatctgttctaagtattccgtcgtttaaacgaactctgaagcaattttctgcgtgtaagagatacgtttacttctgtccgagagtcacttgcaattgtagcctcagatgcgagactcttacttggttattgtggtggtagtggcgatggtggttcaaagaatgccggcttgtgtttattcgccagctatatctgcttgtctattacttttctatgccaccttttcgcgtcatatatatattaaatttcgtatttttgatgccttacatgacgaggaacaggattgttacgtgttgacataaatctgtatgggaagtttgaagtaataatcacagctgtttcctaaggcgtatgcgataaattggtgttgtagattcctgtcttcctttttcaattccgttttctgggtatttgtaagttcgtgtactggaattggctattaccaagctatggggttaaaatttatttatcatgtatcgtttttcgtttgtattggttacaagattccaaactctctcagctctgtaatgtactcttccaggatgcctgtttttctgggggaaagccgtcgtgtttctcttttgacttgaccttattcctagaatctgtttccgtgagagttactgcagattagaagaacatgtctggctatttgtgatcgatgcaaattttttaactaaccggaggtgtatttgaatggtgggatattgatattttatcttgctcgttcaggtctggttacacggtggtaataaacacttggaaga

SEQ ID NO: 114944 - DNA, 485 bp, Physcomitrella patens
  Intron number 4 from transcript Pp1s1_848V6.1 (locus Pp1s1 _848V6) derived from phytozome v7.0 (chr-ID scaffold_1; po s 5215176 to 5215660 reverse strand)
tccgaagctccatcctctcccaatttggtcttggggtaggttgtccgttcttttgctttgcacgttgatgacttcgatgattgagcgtttctctgagaagatttgatgtttcctgcatgcagctttctgcacttcattcgcatttgaattttctccttaagaattaatgacttgttgtggtatgcatcattagttttcttgcggatattttatcgcggacatgggaatgatagttgcattctatccaactttaggaggctatgaatttgtaagttttttctgttacggagagggagcatcagaatgttttgcattggattttatgtgattttggcgtttgttattcctttaatttttcctccatttaattttttggttgcgagtgtttcttttttcttttttcttttcttttatcttatttgctacttatttacatagttgtgtaacgtatgttgtgttttcagctcctgcatcatttggtgtca

SEQ ID NO: 114945 - DNA, 981 bp, Physcomitrella patens
  Intron number 1 from transcript Pp1s41_292V6.1 (locus Pp1s 41_292V6) derived from phytozome v7.0 (chr-ID scaffold_41; pos 2000921 to 2001901 reverse strand)
agcggagtgtgctttggaggtgagtgtggcgaggaggtcaaacgtaggaactgctcctgtgctttttgtcatttttgatgtcgggtgtgtgaggtcgttttttgatttggggtgttgatgatggtggttggggttgattgctagtgagtggtgattgttgggtgaggaggcggtcgcctctttcggtatagagaactcgtgggttcatcgaggtgtgggtggaatgagggggaagggctaggttttggttgtattggttgatcggtcagcctggggcggccgatcatttgacggtggggaaggcaagaaaggagatctgttggtgatgacatttgatggttttgcagggtttgactgaatatcattgctgttgtttctatcgtggtgcgattgatgttctagattggagtctcacctcaatctaccacgattgatagtggctcttgtgtgctctgagttctttagtttcctttcgcctcctaattattttttgggaaggccaccaaaatttataaataccttttggcggttcgatggcgagggtcgttttgcttgattaagcagagtggcacggtgctcgtgcggctttggaagttcttgagtccgtgttcccagcgattgagctgaaaatagtatcgcgtattcttctttcacttttgatcttccaggatgattagcaggagtaggcgaatgtgtttgtattgttacattcgacggcttttctgatgtttttcctgactatatcggcttttccgcgttagggattcccgcggaggagaggccgattctgctcttttagggtcgtttttgtcaggtttctgcatgttgcctttgctgcttgaaattgcttgccagtacaggaagccctcagtttggagtttaaagttccttccgtcagttaccaagaaatgaaatgacaatcctgcgacatctgttttctgttcaggtgcattgagcgagcgttacgaggggtgatcttgt

SEQ ID NO: 114946 - DNA, 987 bp, Physcomitrella patens
  Intron number 1 from transcript Pp1s278_52V6.2 (locus Pp1s 278_52V6) derived from phytozome v7.0 (chr-ID scaffold_278 ; pos 549475 to 550461)
atcggtgcccacttgacgctggtcctcgatcgcaagtaagtgcaactggacaaatgtactagtggttatattgcgatgttgaaagacttttttgatacagtgacagtaacttgaagccatccgcccaataagtgctctccatgttgatcgtgtactacagctgtcctcgacgcaacacagcgtgaaattgcagcgttgtcacgaatttgcagaataaaatcgttggacgcttcagcctcttcattattaagacgatctgctagacactcgcaactagcattgcatgatggtaacgaggaggaggaagatttagtccagcatgaagtatacacagttgtggcccccttcttacttcctcatgttcttcaagttgctcttggggaaaatgatttaactgcatttcaggactgacaaacatcagcattacgacgtaattcaacgtcaacaaccctcaaagcccaccgagcccccaatcgtctttagaagtcggcgcatttgaagaatttggcgctgcttatttgtgaagacaagctcaatctagaattgttcctttgaagtgaaagttggacggatgtgagagcttggtcattatgagcttggtcatgcactcagaatcgatctttttaaagctcatgtacgagaactgggagattgcaaggtggtcatgacatacggatggcgatggcaaattatgagctctgacttttccatgtgcgtagcatgacgtacacgcacgaggatttattaaaagaacatctcaattgatttctgactactacagaatttgagttctctacagtttctttttcacaaaattgagaatttagcttcgagcatctaagatttcatggttcaggcttgtaataatcaaggattgttgtctctttcatgtcaatctgagctaacaagtccaaaaatttcccatccaagagctttcatctgacgttgcatgatttggttcgaggtacactttggaaagcctggctc

SEQ ID NO: 114947 - DNA, 797 bp, Physcomitrella patens
  Intron number 3 from transcript Pp1s271_1V6.1 (locus Pp1s2 71_1V6) derived from phytozome v7.0 (chr-ID scaffold_271; pos 31261 to 32057)
ggaggtgatcaaacaagctcttttgaaaattggtacacttcgtgaaacttgtcgagctaatttcagtggggtatttaagccaaaattggcgtgtggcgtaacgtatgtgagtgtagttgagatctcgtgctttggaatgtgtcgtcaacttggagtgttgtatagcttagcttataggatatcaatcttaagagaagcttgtctcgtgatagtccttgaagtagctgtggattttatttttatttatttatttatttatttatttgagatacagtatggatagtcgaggactagggtcatttgattcctggggagatgtgcttgacatattttgcatttgggctgtcttcaaatttttcccgagaagtcgattacgtctgagatacagttcctcggttagttctttaggctgctttttagatattggaaggggtttgggaattggaggattttgatttagtagtgaattagctcctggttttcaatttgtgaaagaggaatatctcttgccagatttcgttgttgactctgttatttcatgatagcgtgctgtgtcctcaggtgtaggaaatgtctgtctgaaagacatctaatattagtggctgatgtagagccttgtccgcagctggagaagtcgatatcttcttagcacagggttgttgagactgctccgtaaatggaaaaactgctggtttgtgcgtttctatgtagaatttagacttgaggatcgtatcgttcacatactctgttgtgaactgtgtgtataactttgctatcaatttatgttgcagtttttg

SEQ ID NO: 114948 - DNA, 981 bp, Physcomitrella patens
  Intron number 1 from transcript Pp1s105_139V6.1 (locus Pp1 s105_139V6) derived from phytozome v7.0 (chr-ID scaffold_1 05; pos 904630 to 905610)
gagcatcaggttctagatcttccacatttctgcttcctacttagctatacacgtgtatcagttgtaattctagccatggttgtattacagaatgcaaaaatcttacgttttgactataccttgattaccatcaattgcaggtattcgtaaacatatcacagaaagggcatctaactggaaacttgaaaaattagtggaaactacattcggttccagtacgtttctaagcttcgaggtgaacaccccgattgaaacagtggactcgtattagctttgttaattttcgaccagtcttgaccagtattgacctcgaagtgcgacggaaaactctaattcaagtcataaccttgattcattgaatttgagtattcaataccacttgcagattacaaacgttatatcgactatcgactagtttgcgaatcttcaatgctgtaaatacgtgtttctgaccctagagtcttggaagtcatggagggttagcattttcctacttttgcttgtgtcacttcttcgctccaaagagcatgttcttgagctttatatacgcgaaggtctttagtttgaaggtcttcgagaacagtgacgttgtgtctgaatcgtgttttttcaccgccagattaagcacttaagaaattcttactaatacaaaatctgatgcttttttatagcatagaagtgcagaaagttttatatgagtgaaccgactaatacaaaatctgatgcttttttatactcacactggtgtctgtgaagtcttccaataagaggatagaacttcactgtgttcgacgccttcatgttgcacgaatcactttgcattctcaacctggatatatccgaatacgtgtgatgctttcgtggaaaggaatttcccaaacggttgaaactcacaaagcatctcaggatatagttcgtcagttgaacacatgacgatttcttttagggaccatctttcctactagcgcctcgcctagaaaa

SEQ ID NO: 114949 - DNA, 559 bp, Physcomitrella patens
  Intron number 1 from transcript Pp1s169_150V6.1 (locus Pp1 s169_150V6) derived from phytozome v7.0 (chr-ID scaffold_1 69; pos 810878 to 811436 reverse strand)
cgcctaccgagacaccgtctccgcaggaacaagaggtttgccttcctgactgattagagatacgcggaatgtcgttttgaaactttgagacttcatggagtgagtcttgatcttagggatcatttgacctggaaaacggaaatcgtgaatccttgaattgaattggcgaatgcgtatattctaagttatgctgtggtttttatcctaagtgttgataattaggagcgttgttgtttgtttgtttgtttgtttgtttcgttttgtttttccttttcgatctgggattttttaactcattacactgtacatacgtttgtttttgcgcgtgtcaaagaagcatacttctctggaacttctaagtatagttgtaggcatcttcgactcgatctattctatattatgtgtcaatttcagatgaattggaacgcgactaccggttatgtcttttatgcactttcttattcacattgtttgtatcgcaaggatactgttctaaatggtaatgtctgacctggtttggctaggaacggaagaagagcttgacatcctggtggaagaa

SEQ ID NO: 114950 - DNA, 840 bp, Physcomitrella patens
  Intron number 2 from transcript Pp1s198_111V6.1 (locus Pp1 s198_111V6) derived from phytozome v7.0 (chr-ID scaffold_1 98; pos 535915 to 536754)
cgatagaagaggtgagtcctaacataactagtcccagaattgattggttgttggctatgatgctttcataggtattcactacctactttatgtgaatccgaggaattgagaaactctagtgaatgtacgtatatcttgccttggctgtaggtggtagaaatagatatgcgctttagaaagcaccaggttgagatatgtctcttaagagtagagattgaagggtcatagacattcatttaaggactactagatatgactctgtttgagtttatttaggtgttaaggagcgatgagatgttggaagctgtatgtctcaataaaacagagttccagtggtcgtttggcaaatactccgattcagaaaggtgcagtacttataagcatttgataaacctgtctccccttctgtcttgtttcaatcctaatatcaatgccgcaacagtttgagggtttgttgtcgaaggacaggtctcgacaaatgtcttaatttttctcttcgtgaaataggactagagactccaaacaaccaacgttgcgtcaagcagcagctgacatgcttctaacatatcagcgtcaggcatgcctttctcatttatcctctttttgaattcctttcgcttttagtcagacacattctggtttggattcttgttctttctgtttatacgtctagattgggagtgccaaatttatttagatctgtcgtgcactttcaaaaaaaattattatcgatgtttttgtcgatttgtctgtgagcgtagaaattctgatccaggctgtatctttcacgtttggtttgtaattgattgtaccatattgaaaacgtcgtgtagattgaca

SEQ ID NO: 114951 - DNA, 918 bp, Physcomitrella patens
  Intron number 1 from transcript Pp1s126_38V6.1 (locus Pp1s 126_38V6) derived from phytozome v7.0 (chr-ID scaffold_126 ; pos 204763 to 205680 reverse strand)
actgtcgttctcctccctgcagctcaactccagtatagcctttgttgtttttgagcttttctccccttcctttgctgttgtcgttgtgttattttttttgttcacatgtaatgttttatttttggctgtgaggtggttctgatcttggggtggaagtagggtgatctgattttgaggcggctcgggtgtcgacttcagggatatagatggtgtgcttttgtgcgattttaggagtttgttttttgtattggttattgtcggcttagcgtaagggacggttcgaggttctcttttcgtgtttttgcacatttcttacagatcgttgtaaggttgggttctgcaatgcaggccgcaaaggtttggaaataggtttaaagaatcggtttatagtttgtgcgaggttcgaaagatgtgctggcagattttgcctttggaggtctggggatgctagctcatagtgtatatccttgtggttgttttggtactgtctcctgttagttgtcggtagcaaagagaatgtgctcgtgcttgactttgtcacggtagagtaagcctgaacttcgtgttcggtggctccaattccgtgggtaacagtttatgcatctttctttcgatgaactgtgattttttcttatcttggaggtgctcggcagttgctacgcgatccattttccaggtccaacatgtaatgagacagttcttcacgtatggacgtagttgaaaggtgtttaggggtttcagtttctcagttggaatcgtggaattttacctcggccataggtgttgtagatattcgcgttgaggactcagctgtgcgatcagaattatatcatcagtgagatgtattatcttatcatttctggttctgtttcgtatctcatgggggtgtatgtagtgcaggccgttctggacgagcac

SEQ ID NO: 114952 - DNA, 723 bp, Physcomitrella patens
  Intron number 1 from transcript Pp1s170_22V6.1 (locus Pp1s 170_22V6) derived from phytozome v7.0 (chr-ID scaffold_170 ; pos 202890 to 203612 reverse strand)
ttctccagcttcatccgagttggagagacattcaggtcagttgagatgttctgtatggtgtttgttaagaaattggtggtttggatgtgtgactgattggttttggtgagccgatattggaagaggtagcggtggtctcgaagactgaggggtagattgctaaccgggatttgtaagctgctaggtttgatctctgtagacgaaaagcttgctcccatttgtttccaaatcgtaagtttgttaattgtatagtacaaggtattgctgtgtgttgattcgcccgcattgcaaattctggaattgattttgtgtcatccgatccgatcacgtatcgggttgttctggcagacctggaggtgctgtagactcgctgtagtttaccctgcctcgtatatttagacttagtttggtccagtcctcaaattgaatgaccctatcatcaaacaccacgatcaaggagctatcccccaagaagcttcatctagatagtagatctggggacgcggctccagattcccttacaagtttatcgatataacaatgcatgaaaagttgctgttggacgccgtatggtcgaattttagctgtgttgagttctctaggcacatgcatgcatcacttttcttcctgcagtcacttatcatgagtttcacttttaaacttcaattattggccaatgtgaactcatgcggggtgccattttgttccaggttcgcgaataga

SEQ ID NO: 114953 - DNA, 870 bp, Physcomitrella patens
  Intron number 1 from transcript Pp1s296_11V6.2 (locus Pp1s 296_11V6) derived from phytozome v7.0 (chr-ID scaffold_296 ; pos 49661 to 50530 reverse strand)
cccgcggccgcgcatcccggggaaccctcggacccgtaacgctcgttctctatctgttctggtgttgctgtgttcgttgatgggggtgttcttttgctgtagataggtttgtcgttgagtggacatgtgcttgtgatttcgaatgcttgggctgaaatcgggactgagagctgatgcggtgtgatgtgcaattgagtctttgccggctctttgccgagttgagttaagtctggttggtttcagtggcatggtttgggaaaattgggatgcgtgtgaaatcagctagggttcctgcccgattcgttgtgtgtttatgtattttttcttcgtgacaatgtggttgttactgttttgtagattattgagctctcgcatgtcttctaatttgaattcttattttgttcctacaacaggcttgggatagtgtctttgagagtgaaatatcggtgtctgttcttgcattttggagtacgagctttctgccgattgtagtataattagtgcatcaagtgctgtcttggcttaccattggtcgaaatgtattgtgggtctggatgtgacagtgttttctccttggtcgtgggtttttcgttcgtgtcctcgggtttttggatgtaaattatgtgtggcctcgtggtcttctgcgtaatctgggtcggatttggcatacaatttaaagcccatgaaggtttcgtcatgcttgaaaggtctgtcatctgatgaagtacaagtttgttcttgtagacttacttcattgaggttttgacaggttttcagttgatcgtttcggagtgcgtattgttactcaccgtctctctttgtacttctgatgcagcaagccatcttcaaaaaaggatttttctactgcta

SEQ ID NO: 114954 - DNA, 945 bp, Physcomitrella patens
  Intron number 1 from transcript Pp1s115_78V6.1 (locus Pp1s 115_78V6) derived from phytozome v7.0 (chr-ID scaffold_115 ; pos 503106 to 504050)
agaagttgtttgcgtcgccgctctttgcctcgtcggtatgttccccttttttcttctcattttctggtattgaggagatggtatggaattctgatgttttctttcgacatttcaaggaagatcggatctgagtgtgccttgcagaaacgagcggtcttgttgttgctttaatctattggtctattatggcatgctctagtttggttgtctttgtcatggtttttatttttattttttattgtttttattgtatattacagtggttgcgcgtaaagtcgaattttcctcccgatcaggactagaagtactaaatgtgtaacagggctttagagtcgtccaattgtattacgggccaatgtttttttaattacaatcttacagcgttctctggtctttgagtacatggaagtctacacatatcttgccaccagaggactctgtaatttttttaagccgaagaagaataaggttgttaatttcacattattgtcagtgtacgatataggtcttccaagtatccagctgcagaggatggtatcacaactgatcgtcagtgaatgcatctctccttagggtttttatttttgaatttttttatttttatttttttcagaacatagccaggatggttaaaagatttagtatacagtggatgaaagttccggtggacttgctatttaattttgggagtgctctcgagcatttcagcatttagaggatctagttggttaaaatttcggtagagatagatagtatttgataggaattggattttgctagactacttgtggcattacagtattgagttgaatcttcatttcaatgtcttcttggttgaattcaaactgagttttctttacactgcatcagcttcctttcattacattccttcttcaccttgctttcatttatcacatttatgaatgaggcttcattatatgtagg

SEQ ID NO: 114955 - DNA, 978 bp, Physcomitrella patens
  Intron number 1 from transcript Pp1s87_19V6.3 (locus Pp1s8 7_19V6) derived from phytozome v7.0 (chr-ID scaffold_87; p os 250157 to 251134)
acgaggaagtgggactcttgcagcctagcgtaggggtaatgcccctggcttttcaatccaacaacttgagccccaatggaagtccgtcagttcatcggtggtttcttttttttttttttttttttttttatctctgattagagatggcagaaatgtcacttgagattgagggatagagatgtctgagtaatctcttgtagttggattctcggttcagacgctggattaggaacttagagactaccgtcttgctttgttttcatggtcacttctgcatagtgtggaaatctaacattccaaagttagattgcaatctgaaaggattccgaagccttgttcacatcctagagtttcttccggtatgtttcattgtaggaagcgggcaacgacagagcaaaaagacctctaagtctggcggcgacaactatcactgccacgctcgttggctttctcgtgggatgcgtagtctcattgtatgtttttggtcagtacgattctgagacatctgctctgaaagctgttgtcgggcggcagacgtatccgttgaattttttggtggtgggtgattggggtcgagaaggcgagttcaaccagaccatggttgcggagcaggtgaacagacctcttctcaatcacaatgctaactgcagtcgcggttgcgtagttggcagttttccttgcgattctggtggggtctagtcgttctcttctcacgagatgagtacgtaagagaaggacgtaacagagtcttgatgctgcgtaggtcattgtccaatcgtgaaattagtgaattatttttgagctcggggatctttcattcccctctagttcacgcgggttcacgttcatctccggtcctattcctgcacttctgtaggctatctcgtacgtttaagctattcttcaccttaagaggccctgttcctgtcgttagtttgaaggttgggaatctaacatgtttttcgctgtgaagcgcag

SEQ ID NO: 114956 - DNA, 732 bp, Physcomitrella patens
  Intron number 4 from transcript Pp1s126_196V6.1 (locus Pp1 s126_196V6) derived from phytozome v7.0 (chr-ID scaffold_1 26; pos 1219113 to 1219844 reverse strand)
agcttgagcaagagcttcaaagaactcggcaacaggttcatccctacattttatccatgtgctaatccatttgtatctgtatatgagggtgaatattcgatatttactcattgtttttttcaaaagaattttttacgagcagtatttgtctcactgatcaaatatatcaatctcttgttcaaggaaagatagatagtgagtagctttgattgctggtgacattggtgtggcgagaatatccttagctatttctacattcttagttcgaaacctgcggctacagctttcaacttttgtttatctttctagcatatcctcgcttctataaataccttttttcggtaatgcattcgattggttcttttctatcatccattttaatgtccaaatagtcaaagaattcctctccaacgctcgagcaagctttagtttaccgtctcgagcacttgatttatgctacaagtctaaccctgtcacttgaccacatttgttgagcccccaagctttatgtggcgtctgtttcctgttttgtctcactcaccttatactaggatgtgactgccatcatttacaatgttattcattgggcggttcttattgtgtgtgcagaagttgtgttgacattcaacattgcagcaatttctttgatctttcatacgactggaacctgagtgatgcatgtttgtgattttcttagcagggattatatctcggacctggctcgtgcagcgt

SEQ ID NO: 114957 - DNA, 875 bp, Physcomitrella patens
  Intron number 1 from transcript Pp1s298_23V6.1 (locus Pp1s 298_23V6) derived from phytozome v7.0 (chr-ID scaffold_298 ; pos 227658 to 228532)
aacaagcaggtgtagtgttttttttacgatccaacggcaattcttgtggtttttgttgtgccccttgtgtccttacatcagacgcatgtagcattctgtttctgtccatttctttatggtccggagagacgatgccaccttgataccgttctcttatcactcaattaccatttttgagatgccgaaggtcttgagtatggattgatttgtgtacttggggtgggtagggctccttcatttctccttgtcaggtctgtttaggtttagggttttcgtctctactgacgtgattcctctgtacactttcgtccccggtgcaattgatttcaatgattgataacccgtatcacttattttggacctaatctattgctgaacgactcgttttgttcaactctaattttagtgctggcttattcatttactagctttactagtgcttccatgttaatcatgaccagattttgtatgcatgtggaaaaaaacttataatttcttgctttttggactgtaatgtcaaggccccttgtttggtacggttttaggctgtatttcctatgagtcgaaaagtaatcatacttcgctacttaaaattagtgggagttgtagctgtcttcttagcgtcgcttttgtagaactaaagcacatcctggtgccctattaccaaaatctggatcttatgttcaagtcatgagaaatctttgaaggatggttttcagtgtaaagtcatacttttgtaaccatatcctcccacctatgttagtttttcaaattatgaatttatgagtttgatgcttggtttacatattaccatgcgagctgatggcccatgaaaaattcgtaggtcgggaacaggatcatccagaagcgtcttc

SEQ ID NO: 114958 - DNA, 509 bp, Physcomitrella patens
  Intron number 1 from transcript Pp1s45_269V6.4 (locus Pp1s 45_269V6) derived from phytozome v7.0 (chr-ID scaffold_45; pos 2156613 to 2157121 reverse strand)
ccaggttctttacataaatcttttgtttgttttttccttccatatcgcaatctatatgcggaaacctgagctgcatcttctgttgagtgattcacactgtgtggcttggacgctctcgtaagtgcgttttaaaaaagtgtattcttcagtagttgcgttagtgcttggaagtggggcgggttttagtcatccagagcagacggtcgattgtgattcaatgacctaaataatttggaatgtataataaagagtaacatattatcgacgaccttaaaacagctgcatttgattttgaacgaaatcttccctttgctagcccgtgctgaaattgtacttcatgccttcatggacgtttacaaaaccctacatttgaaatatctgtcgctatgtgaaacttcagatttggcaatactttgcttttcatgtaattgtgtcgtctcttggcgtcggctggttgcttcggcatctgcacaggttatttcttacgacgaggtcgctctgtgagacaa

SEQ ID NO: 114959 - DNA, 1012 bp, Physcomitrella patens
  Intron number 1 from transcript Pp1s13_197V6.2 (locus Pp1s 13_197V6) derived from phytozome v7.0 (chr-ID scaffold_13; pos 1320947 to 1321958)
tctgtctcccctcaaccccaatatctggtgcgcagatttttttttgtttattgttattattattattattttacaaaattccttgaaatttttctcttcgatgcttgtgatgatttccttatatcttgcggtgaggtgaagacttggaagtcattcgcgattcacgccaaatgcactttgcgccgcatctgtagtgtgttcgtagttttcgttcccttgacagtgaatccaggtcgttttgcggtccgcgagtcgtttgatgccggaatttgaaacagttggattggtgcgggtactgcctagccctggttgtgcgtaggagcatttggtgcgcttgtttgctcgcttgaaagtctgtgagttgtgttttcctggggcttgtcgaattttaagttactgctttgcggtttgaatgttttgtacaacctgtcggaaggcttagctttgccagttggtgtaaacgacattccttctcgctctggttgtgtgccagtttgtgagcattttgctttttaaatatttctgcgagacagaatattgaagttgttggaattgaattgaaatgttgggaagcatttttttgagtatgtctgtcacaatcgtttttgagtgtgatggaaggtatagggtggttattagaacgggccgtttgtatttatttgcctataggcttttgagttatgcaaagtgcggggaatctttttctgaagattggcaatatggaaggaattttttaaaaaaatgagagattaaagtaaaggataaaatcatgtagatcggatttgggcttgtggtggttgtgtgtttgcgacgttggtttaaagtgtatttcgaacaagggggaaatgaatcttggtgtcgtgtagtaaataatagtgaagctgctcctctgcagtattgatggttctattgacgtgatgttagagaccagataattgtatagaggttcttatgctgtggggtttcgaattgtcaaggttttagcgtccaacttgtgaagacttcatagagc

SEQ ID NO: 114960 - DNA, 998 bp, Physcomitrella patens
  Intron number 1 from transcript Pp1s33_283V6.1 (locus Pp1s 33_283V6) derived from phytozome v7.0 (chr-ID scaffold_33; pos 1653721 to 1654718)
gtggtgttcatcttgcctcaattgttgcatctcaagtaagtcacttttatttttaatatcttacattataaaattttttagctttgggatttgtagatttcaaactaagaacctattatactaaaattcgggatcataattttttaagtagtaatatacatttaatcaaaaacataacatttccaagtaggtttcattgtatcccataagagtatgtaatatacttcaacaaaattctatgagtattggtttggaaaaattactaaaatttcatgccaatttcattgttccagtacagagaatgtgatcagtgcaaaactggcccatgttcgcctcgatatctggtcgctctattgttcaacaaggaactttctctttgagcaatatccaaggggacacatacagggacagatgagatcatttgatggagagcttgagcaatcaagaacgagtaacttggaagggagtgtgggtttttcttcagagctgaacgtggcacgtcttgtttctctgactgaaactatatgccaattagacaaaaccttgtttaaacttattactacgatggaagaggagaacgacacaaactatgactaagaaaacaacaatgtgcaaggcaccggacaaatcactagtgcagacggcaactctaacccggccaacttcacacccatcatcaaccgggactggcagtggcaagtctatcaagaattcacaatcaaatctggttcagtgaggctgaggaaatgtggccatgtcatagaaggaaatcttacagccaagatgataccatttgatgtcatctatggtttgaaggaaaagctgtgggctcatcgaaactacatcaaaatttactcaccttcgttgatagatatcattgtccgtttcatcccaaagtacacgtatgaagtgagtgaaggaagtttagaagtgtattcctcttaattcttccatattcgtgagaaactgagggaaatcaaactgaagggacatcaaga

SEQ ID NO: 114961 - DNA, 797 bp, Physcomitrella patens; identical to SEQ ID NO: 114753
  Intron number 1 from transcript Pp1s33_54V6.1 (locus Pp1s3 3_54V6) derived from phytozome v7.0 (chr-ID scaffold_33; p os 367758 to 368554)

SEQ ID NO: 114962 - DNA, 728 bp, Physcomitrella patens
  Intron number 1 from transcript Pp1s118_122V6.1 (locus Pp1 s118_122V6) derived from phytozome v7.0 (chr-ID scaffold_1 18; pos 636314 to 637041 reverse strand)
ctgatcggtatgtcagttctgcacctggtgtccagcttgggactctttcggctggcttcatgaagaagctgctgtacatgtgctttgaagttctgtggttgcagctgattttgacctttttgtgtttcttgagcgatttttgagaaaaattgtgcaattctcaatgccgatttcgattccaatgtgatgtttaggagggtgctgctttttcagtgagaattggcatgtgacgatagagatatttcggtccgcactcgttgttatcaaattggagctcctctgcgttccattccactgtagctatctcttaagtttagcggtgcttggcttttggcaacaatcattttgttgacgcacgactctctgacatttatcgcaatttacttaattagaagctttgaggcagtcttttttgagttgcagtttttttttttttcaaaagatagccgacgaatgtggtcagggttttgaggctccagaagttgagacaatttttagatgttttctgtgcgactttttttcacaatgtcgtgtaaattgactacattcaaagcattgttttccttcactcctttaatttgaattcacatttatgtccagcaggtaatacgatgatatcttcttaaattctaaacccttaaatgtgcgtctacaatcattatgcggtcctctggtcttctgtcatgaatattattagttatgtgtttgcagatatcagccctcgtaca

SEQ ID NO: 114963 - DNA, 690 bp, Physcomitrella patens
  Intron number 1 from transcript Pp1s192_88V6.1 (locus Pp1s 192_88V6) derived from phytozome v7.0 (chr-ID scaffold_192 ; pos 719073 to 719762 reverse strand)
ggcagaagtaagatcctcaacctttttctttcttccaaggctctgcgtaggggacctttggaaatgtattgattggtgcatcactatattactcatttacgtataaataagtcattcatttttcatcatcttttgcctctctcgagcattaaggtttaccaatactggcttgcgtagagcagaagcttttactcaggtttaaactggagttcttcattgaaaaccatgatctttacttgtggtcttacaaccattctggtttactgatcacctaattagctaaaatgcggccatacgaattttccatcgctatttgagaatccttgctttgagaaggcaagcgtcacttatgtttgtgtgagaaggtttgagataattcatgagtgataatactcgcacttgtgcagtttcatatgcttgcacaccatagtttttatctctgcgaatgaagttcatttctgagtaacaaaaagttaaatgtggaagcatttttaaatatatacctctggaattccctctgatttgggtgttttgagactgagttgaatgtttgtgcatttgatttgtgccttttagtttgcaccctttcataaacgtcgattcaggttttgtgttctcaaatatttatttagcgttcttcgactttgtggtttaggtcgaaaggaccgtaaatctgcacgagacgaatac

SEQ ID NO: 114964 - DNA, 648 bp, Physcomitrella patens
  Intron number 1 from transcript Pp1s41_94V6.1 (locus Pp1s4 1_94V6) derived from phytozome v7.0 (chr-ID scaffold_41; p os 795162 to 795809 reverse strand)
tcgccttcacacctcggcttgcttggctcctcaaggtgtgttggctctttgatgtcttgctgcctgattctctctttatttttttatttttttattttttttttctctctctttgtagatattggtacatacagttgtggaggtctgcactcgtaatgcgtctagggcgaacttttcgtttctctttcggaggtgttgtacgctacgtggttataatgtgagacggcacatgaagatttctttttaccttgattgagaactcgtgtagcgtccatttttgttcttctggcgtgctgatgagtaggttccatttggaattatagggtttaggaggtttaggtcgttttgctccaatagcttatggtattacaggttttctttttcttttttcctttgataataaaccaaaataattggtctctttctaaattagatataaccaaaaattcttttcggcgtagctattttttacaggaagttttcagaaaacatcaagtgaagacttagagcgctgagggtttgaagcgtgtaattgttttagaaatttacaattgagaaggtcagagagtagctatggcttcaattcatattggcctgattcaaatgtggtattgctattgtcgtgttcatcttaacaggtagggcacg

SEQ ID NO: 114965 - DNA, 926 bp, Physcomitrella patens
  Intron number 2 from transcript Pp1s29_162V6.2 (locus Pp1s 29_162V6) derived from phytozome v7.0 (chr-ID scaffold_29; pos 1147056 to 1147981 reverse strand)
gctcacctgtgccggtatgttggtgtgtttgccttcacttattgtttcctgactgaacaagctgatcaagcagaatttactaaatttattttgtttccttaatcattatttactttttaaagatcttacatacaaacacccatattattatgcatatgaatacatgaatatgttttatgctctaatgagtgcctcaaacaatcagtcattattccacgaagaagttctctatgttgttgggaggtgttgcaaagtgcattcatgggtaattataatttttggtccttaagttgcaacaattagcgctcataatcatatattggcagtctgaggacaggaagctgcgggatttactcgaccgtttttatattcattttagaagtatcagtcaatatccagaattgcagccattttcgttgtatggaatctatgataaagtagctcgggagctgtaccattactcgcgattgttaacatttttaggcggttagatcctatggatactataatttcgttgagatcgagcagtttctagaggctttgttcaggtagaagctactggtgtttgaggaagttactgtaaccatttttagccgtcacctttccaatttttcaaaagagtgaacgatctcgccagctttcggagtacttgttaggattttaaaacttcccttttggtttgctattagattcaagctttgattttcagagcacgcttgggggctcaattgactccgactgcattctatgtatgctgtctaatacgtcttgttataagagtcgaagtggtgtaaggatacaatccaagtttccaatatccaagtcttcgaagaacatcagttcatctgcattgtcaagactaaattcggagagaatgttaatagcatgtttattgatttctcttcactgtgctttgaaggttcttg

SEQ ID NO: 114966 - DNA, 259 bp, Physcomitrella patens
  Intron number 2 from transcript Pp1s245_98V6.1 (locus Pp1s 245_98V6) derived from phytozome v7.0 (chr-ID scaffold_245 ; pos 548370 to 548628)
gaaacattacattgtgttcccaggtgagtggaggtttctgaatgtgtgttgcgagggagttatggtttgtctgttttgattgtatttggttcaggtctggaagagcttaagatatgaattttgcctcaaatgtctcgaaattgaagaattttccctgtgtcaaacaccattgcttgaccttggtgactgttgggttctttttgagctgcttattcaagaaatggataatgcattaatgcaggggaagtcaagagcggta

SEQ ID NO: 114967 - DNA, 673 bp, Physcomitrella patens
  Intron number 1 from transcript Pp1s3_375V6.1 (locus Pp1s3 _375V6) derived from phytozome v7.0 (chr-ID scaffold_3; po s 2199559 to 2200231)
gccggggtactagagaggctcgacttcccactaaggtactgtaatgccgccgactattttttatcacagattcagggtttagtgtagccagattcgtgtagaatgcgggtgtacaatggcgattactgtcccagcatgctacgtttccttgcttgtcgtttgctgtgtttttgggttttgtaattttaggatctgaggttttattagggtttttcactttggtaatttagctgccgtgttttgactttcatctattattgatgaggacactaggtttttggagggtgaatctgagttatggcagctagtaagcgtttcaagggttgaagtaatgtatctcaaagtttgtattgaactgaggttgaacttcatgtgtagcttgtagacttcctccccacccctgcttagcgacgcatccagcgtaacatattgaagggttttatgttctattgtgttctttacatccacaattttttgtgacgtctcgaactcttcggtcttatcattttaagatgtcacaactctctccagatctttttcaattgcgatgacgttgggtgtatggattattttctccgaatgtcaattgactgttggtctgatagtgcgaaaggatatagaattacaaatgactgatcgattggtggacttgtaggttttgtggttgcgacgc

SEQ ID NO: 114968 - DNA, 356 bp, Physcomitrella patens
  Intron number 1 from transcript Pp1s167_79V6.1 (locus Pp1s 167_79V6) derived from phytozome v7.0 (chr-ID scaffold_167 ; pos 368256 to 368611 reverse strand)
agtgcaatagcaaatttcataggtatcattctttctcatcttttcttcatgttatcattatctgtgttactttgctttgtgataagtcttttcaagattttattgatgtactttgtatttacttatctacttgatattgaataaacacaagctaaattgtgactaaatagtttggtagtttctatttagtttagtctaaaattttaatgaatgtcatctcaattttgtttctatttattatattaaaaagagaatcatacacatatccaagatttagaagatagtgttaatgacaattctaagcaatttagaagtaaatattaagataatttttttttatgtatagtattttgaca

SEQ ID NO: 114969 - DNA, 690 bp, Physcomitrella patens
  Intron number 2 from transcript Pp1s5_216V6.1 (locus Pp1s5 _216V6) derived from phytozome v7.0 (chr-ID scaffold_5; po s 1549225 to 1549914 reverse strand)
ttcgcagccaattttgtctcgtaaggaggattacggtgcgagtcgctgctcttcgtggaattgattgtgatgcatatctgcctttgttgagtttgttcggtgttcgatgatgtgcgtgcgcttttttgtgtcgtggtgtgtttcgggagcgcgcgagacgactgcgcggtgaagcgctgcatccctttccgtgtttttttttttttgttttgttttgttttcttctccttgttattgtcgagtgtcgtatgcgacggtggtttttgctcggtttgttgaaggtccatcgtttgagaggaattctatgattagtgtctggctgtgtgttcgagttttttgctaccattttgaggtctgtattgtgagcagtgttatttccagagcatgagttgtctagtaattgtattgtttaagttcaattctggaggatttaatacgccccgcataattttctgtctgcgtgggtttgtttacgtccttgttttcaatctgcatctgaggtctaactcatgttttttttccttcacgaatatttcgcttcatgagtcctttctagaccgttttggagaggatggtgagtgggagaatgagaatgccatcttgtgctggctttgttgctgttttatttagatatcagaggcctcagagctaatctccatttcgttttcggttggatttgtgtatgcagtc

SEQ ID NO: 114970 - DNA, 851 bp, Physcomitrella patens
  Intron number 1 from transcript Pp1s344_1V6.2 (locus Pp1s3 44_1V6) derived from phytozome v7.0 (chr-ID scaffold_344; pos 15676 to 16526 reverse strand)
cgttgccccgtggactcccgactcctcctttctacgtaagtgcgatgcctgtccctctttcgcagcgagcttctggcttttctgctgcttccttttatcgttccaagcaatcgctggaagcttttgagagaggcgtttgaatccggtgcgttgacgcctggccggtgagtttggttggagcccggtggaggtgttccgagagatgaatagattggagcgccttccggattaatatctccccggcaagggaagaataagtgtaaatgtaattggaagaatttgacgtgaggaagtgtgggggtttacgctcgggtccgacagtttggtttttgtttgagttgcaatgtgagtgaggtgtggacattatcaaaggttttcatatgaatttctggttcccgttgtctttttctgaaatccaggctcgtgtaggctcagagagaaggtgcttcaatgtgtttgtttttactcaattattctgtcgctctgaaggctcctgcttcggctagtgatcgttttttttaattctctaattttctaatttttttgcttgcgtagagctgaattttgtgaaatgcggaattcggcatggatgtttattgaccttttggtatttgatctcaatagactttgtctaggtgtaacagagtcaaagtgactatttacatgtagctcatgtaatcgagtgcacctatgtggtgattctactgttgttttccaaggtagaaaatagatggttggagatgaagctagtttggtactctgccgttgtgaagtgggattctggggctgtttagttgaagttatgtcaagtaatgacttttttgtctgatgcagagaaaatagacttcgcg

SEQ ID NO: 114971 - DNA, 484 bp, Physcomitrella patens
  Intron number 1 from transcript Pp1s180_59V6.1 (locus Pp1s 180_59V6) derived from phytozome v7.0 (chr-ID scaffold_180 ; pos 435373 to 435856)
tagccaaaataccttattttggagcatttaagaaagaaaatcatattttggagcatttaagaaagaagatcatacttaaaaggagtaaattaaaagatatgcatattgatgatacactagtaaatcacatattggagtttttgatgatatatatatatatatatatatatatatatatatatatagaattgattttttttattttaggttctatatatttaaatatatgttctttaatgatgttttgtaaaaattgaatgtgattagattctttggttagaaactatagcacaaagtgtatatttttgataacatcatgatttgattacttgaataggaatatgataatgaagtcaatataatgggtgtaaaaaaacagttgtctaagatcaaacaactatgcaagaaaggaataaatgcattgtgttttgttggtatgggtggaatttgaaagacttcattagcaaagactacatttgaacgc

SEQ ID NO: 114972 - DNA, 510 bp, Physcomitrella patens
  Intron number 1 from transcript Pp1s3_317V6.1 (locus Pp1s3 _317V6) derived from phytozome v7.0 (chr-ID scaffold_3; po s 1905543 to 1906052)
aatactccttctcggccgcgttctgagcaccgctggtgtatcaaccgcctaaactcagcaatgccgacgtttctgttttttaatatgatcaccgtgtatttgtagatgtaatcagttcacaatcatgcgcagacaaatacaatgacaacctccaacattgtcgaatcttcttaagagcgatcagttgattaagagatgtgccaaatttctggtatttgatgtacagttgaagatgatgaagccaacccatcttctctacctgcattcgtagatgaaaatattcaaaataaagacttactctgtgcagtttgaaggaggaggttgcaattcattggtttcgggttggggtagatcttggaaggcacagcgaacctagattctctgaatctcaccgaagttttattgttgagtactttgttactcttataatttggttttattgttgtttttgtcgttatttatttatttatttattattgactagattatcctttgggaaaaattagctcc

SEQ ID NO: 114973 - DNA, 900 bp, Physcomitrella patens
  Intron number 2 from transcript Pp1s3_317V6.1 (locus Pp1s3 _317V6) derived from phytozome v7.0 (chr-ID scaffold_3; po s 1906083 to 1906982)
accctgtggggagacattatcctagccaaaacaaagtatgtgtggtcactgatatatccccacctggattcagtttaataaatacaaattataaaaatttaagattttgactacttgcaaaaataccatgcaatttttattttattttgatatttcaagtaagatgtatgggctcttgactttgaagcaatactcattatgcatccaagagaatacctccaaaacaatatacaaaacatcatcattttgcaaggagcatggtcatggaagtggcatgtcacctcttcttgtcttttttcttactgaattccttccttaatctttctccttctttcagaaaattggtgtgtgtgtgtgtgtgcaccatgtgggccttcactcataatgcaaactcttgtagaacaagcttcaattctccccccattcacatccccacacgtctacacatcatgtatggctaagagagcccttctccctgtgcaacaactcatcacaagttgttgtaaaccacaccaagtcatccatgccacaagaaaaaacacaaggactctttcatgatgtgttacaattgtacacctacatcatcttcaaaatgggctaaatgccactcattccaccactcagaaatccccaaatcaccatgtccccaggttgcaagatcagcaccatttcatcactgtataccactgcaacctaaggaaactaatatcattcccatcactgtcagtgttgttttttccccactcactgaaaaagggtaacaaagcatgagagggcagtagcgagagggcagtagcgagtttgatcttcacatgtctagtaagaatgtcagggtttgtgtaatatttttgtgtggtgttgaaaggggcctccccaagtcagccaaagatcaggcactca

SEQ ID NO: 114974 - DNA, 556 bp, Physcomitrella patens
  Intron number 1 from transcript Pp1s323_51V6.2 (locus Pp1s 323_51V6) derived from phytozome v7.0 (chr-ID scaffold_323 ; pos 296909 to 297464)
tgcctgggtcggcccatcgcctgtttcctttactggttggtttctgggccacctttcatcccacccccctcccctccattgtgagccctatttacctattttgttagttatgcgtaccttgaggcctggctgatgtggagcttgtgttttgatgtttgcaaattttgaatgtgttgtcacatcagttgtagatgttggaagggactatcgtgtagtggagtgacttgagtccggtacatagcatggcggtacgggtagaggtgatggaattcatgattattttgtactaagttagggaatctttaggaagagatacattttcgatgaggagtcacgtatagttgtcaatcacattcaaaggattttttttgtttattattattatgtaagagaagaataaaacttctctgacattcagctggtggtgagtgatgcacgcactgcacaggagcttgactgccgaatccggttaagactcacatttattataagatgaacaaaccacaaacaaaatgctagtgataatatgttggacattgtcttctctggtgtagcg

SEQ ID NO: 114975 - DNA, 823 bp, Physcomitrella patens
  Intron number 1 from transcript Pp1s20_268V6.1 (locus Pp1s 20_268V6) derived from phytozome v7.0 (chr-ID scaffold_20; pos 1810224 to 1811046)
tagtagcgttggaaacgcagctgaagtcactacaggtgcctacatgtctcctctgtttttttacattattctcttttgcaatgtttgttttccaagggatttggttttggccgtagaaaaagaacttaaattctactttgggcttacccacaacttagttgtgacaatctagggttggtatgtttccagttcagagttggtatacggagtggttggatttcattttgagaatttcttttcattgtgctgcaacgttttgagtttctgtaatcatttgtctgcatcttctcagtgaatttgtcggagctggaatgccgtccgagattcagtgagtcttagaagtggatttgatgtcagttttgccgccccggagctgtttctttgcagcccttctttctcctttgtacttaggagattttcgtagtgcatgtctggctccttgaagctcgatcatgcaactgttttgtggtatcgcatgtcgttctagcaacatttcgttattatcgttttgtctgaagattgccattcagaaatatagttggaattatcctgcttgggaatccttcactacagagttttttcattgaaagaggttttgaagagggtttctagtgtccatctgtttaaccttgtaccagcaggggctattaggttttctattggattgacacattcgtggtatattagcattttgctgttgaattataatttggaattggaatacgctcaatttctgcccaaatgactgtcacgtatgctgatggtgatttctcctcatttgtcaatactcagtctgtacaacagcaacagcggatccggaagg

SEQ ID NO: 114976 - DNA, 864 bp, Physcomitrella patens
  Intron number 1 from transcript Pp1s224_48V6.1 (locus Pp1s 224_48V6) derived from phytozome v7.0 (chr-ID scaffold_224 ; pos 312644 to 313507 reverse strand)
tcatcaacaagtctggcggactcatcttctacaaggttttcgtcctttcccctcagttgcactgttgccgtgttgttagtgtagttttgtgagatgggttgttgttgttgttgttgtttttgtggtggtgggttaggggtgcgatgtagcagctggccgtgtagagatcagttctgttttttgttttttttgtattttttattttgtgtgtttaacgctgggatcggacactgttctttttgtgggaggtaggatcagggttgctggtaggggttgcacgatatcatattgtcagtggtgtctccgattcgaccctgaatcgttatggacagtcctgagggattcaggcagtgggaggagtaggatgttgaacctaaaccatgcactcttaatttttcgtaattttctagggttttaattgcggtgcaaggagttggcgtgggctagttacattaattttacgccacatatcacatcagtttggctggaccacttccgatccagtcagtttgacgatgtgttaatggagcgcgtcaccttgcgagactctctgtgatgatttgggttgtgggtttctgctcttagtctcttgtatcgcagattcaagtgctgcagcatggcatcaattaaaccctgaatttaaaactcatctgacaaggggcagtgatttgagtaaatggtgtctcgtcttcggtcgtacaacgatattatttttatttttttaataattatgatgctttttgttcatttcaggaaaagttgactagaacgataattgtgatggactgaaaatgcatcaattttcatgtgcatgagtgcttgaagtgtaacgatgaattctggattttgaactgacgcaggatt

SEQ ID NO: 114977 - DNA, 764 bp, Physcomitrella patens
  Intron number 1 from transcript Pp1s45_110V6.1 (locus Pp1s 45_110V6) derived from phytozome v7.0 (chr-ID scaffold_45; pos 709687 to 710450)
gtcgcgctcgcatgagccacatggtgtgtaggaattttttcgaagtatgtggattgccagcgaagtagagctggaactttttcatcggaatttttggcaagtgtgtttatgaggttgtcgagacctctcgtcgtgggttgaggtttcaatgtggatggtggtttgtggtgcggatgcgggggaggagtggagtagtttgtggcgtattgttgcggtcgggattttttgtttttgacatttctccttctttgtgttcgcggctgatgtttgattgtggagttttgaagttcatgctagggtcgttacagtgttccttatggttgttgatgagtgatggtagtgggagtagcgaggtgttcgtgggcgcagcattttgagtaagaagtgtggctcttggttttgtgtcggagcttcttgccaattagggagtagaactcgaattgggcttgaatcggtgttgtgtggcttctattgcgtttttgcctggggtttccgcaagagcttgattaaggcgtcattgcgaatgtggttgtgcggcattcctactcagtgtttcgattatcgctatcttctcgattcatagtctctaggattattttagttattgtcgaagtttcttttttagcattttgcttttgtgcagaggtttcagtcgcagattaggttatttttctcgtgaatgctgcgcttgttcttctattaacgatactagcattcggcctttctcagcgtggtttttgatttcgaggcaatcctttattcaa

SEQ ID NO: 114978 - DNA, 615 bp, Physcomitrella patens
  Intron number 1 from transcript Pp1s84_84V6.1 (locus Pp1s8 4_84V6) derived from phytozome v7.0 (chr-ID scaffold_84; p os 506709 to 507323 reverse strand)
tcctgtggaagactacttcaaaatcaaagcagctggttagttggctttgtgactcccattttgattcacacgattttttgacctgtattctttatgtttgactttcacgagtgccacattttacacgttcgcaattctacgacttcccaagtttcctcaatttaagggctgataaatcgtcggaagaaatctgatcctattcctattccgctgcttctatgttctatgagttcagtcagcgtggattcatcatcagagtagtttttctcttaagaatagaaattaaagtgatgataatatcttttcactgagattggattgtgaaacaatgacggaacatttagcagtcgagttgtgaaggctaatctctattccaggtctgcaatgcagctacgtaaaagtcttgtgcagcttagggttctcacctgcctaagtgatcaataagagtatatagaaagtgatccacattaacttatgggagtttatcttgtggaagcagataacaaacatttgatttggttaacgttcgtcgctcatcatttgaattctttttaatgtaacagttctggaaattgaaacactcaagaacttgtgctgatgtaggttcaaacgagg

SEQ ID NO: 114979 - DNA, 394 bp, Physcomitrella patens
  Intron number 1 from transcript Pp1s268_10V6.1 (locus Pp1s 268_10V6) derived from phytozome v7.0 (chr-ID scaffold_268 ; pos 31802 to 32195)
tgagccgaggaagtccgaagaccaatttgctctttgaacagaaaaaataagttttcaagaaaagagagccatcgggcaggcgtgcttgcatgggagccgtgaccttgggtagctgctttgcgacgattttttttcccgtgtggtggatgcactgaaaaggcagcaggtattggcagtttgacttgctgcattttgttgttgagtgctggtttcttactagcctggaggagtcatatcggattagtatagtttccaaatgaatgatgtcgtagggtggtggttgtagcttaatgcatgcactatcagtgtaaggagaccaaattgaccaccgcccgaaccatgtttgtgtgacctttaagattcaagcgaacatctaattgattcgagttaggtg

SEQ ID NO: 114980 - DNA, 824 bp, Physcomitrella patens
  Intron number 1 from transcript Pp1s421_1V6.2 (locus Pp1s4 21_1V6) derived from phytozome v7.0 (chr-ID scaffold_421; pos 13537 to 14360)
tttctgtgattgctcacagctttgatcgagcacaggtaagctttcatggctgttatgggcgccttatggtgagtagcgatcgagtctgagtgtagaatgggagcggaatccatggttttttgggtgatacatggtttgtttgatccttgcagtggaggagtccgttcggaggtttggcttgaagggagttttttttgacatggtggtgacgaaggtcgtcatcgtcgttgttttacagcgattcttgtctgttggatttcagaagagtcttcgcatttagtgaggtttgtgggggaggggtaggcatgatggagggcttcgatgtggaatgatgataagcgggcgttttgagctcgagattttatgttgctgagtgtttcggatgtcagataggattttcttacgttatgggtggctcgaggttgagaattttgggagggttccgtgcgttccttcgtgttgtagatgagcaggatgatattgtagtccgatcctttttggcttgcttcattgcgtctttgagatagtccttttactctccctcgatcctttttgctgttttgaactttgatttgatttttatttttattcttattcttcaacaattgttggtcttgtacaggtttttggctctttttgatcaatactttttgttccttgattactgtgccaatcttgcagctggtcattcccactgaattacgttcatcttcttgtgtagcttgctggtacaacatgatatcttcatcatcgttggatatgaaatgcagcccactttcaattttgcagaattgaagcgaacgcatttaggttgggctttcaca

SEQ ID NO: 114981 - DNA, 784 bp, Physcomitrella patens
  Intron number 1 from transcript Pp1s220_70V6.1 (locus Pp1s 220_70V6) derived from phytozome v7.0 (chr-ID scaffold_220 ; pos 464038 to 464821 reverse strand)
atcgacagacaccgcatcacagtccagtaaccgtgaggctctctctcacacccatctcgcagcttttgggttgcagctttcatttcttccacgcttgggctacttgttatgaggaggtcgtagggagttactgctcaataggtcggattattagttcggatgtaaaaccgtatttgggtttcgatccatgagtttctggggctttttgaatgcaaggtgggtgttttctttgtgttttcatcttgacgttttttttgagttttttaaactgctgttactctgtttagtattgtgtgttgtgaatgtgggtggtgtttggtgctttttagggttaggagtgtgtctgaagaattttggtttgtggggattggtgctgtgcgtgatgttggagctgcgttggatttggcttgtggttcagctagaaagttgtggctggcgtttcgcttggagctagacttgtgctatgttattatttaatttgattttgattttgttagggtttttatgagctgatttgattgaaacaattgagttttcgtttttgtttgtttgtttgtttttttggtttttttggtttttttggtttttttggttttttttttttttttttttttttctgaactcaaacaatagcggtttcctttttatgtacctagattttttgctcactgtgcaagtgatgttcttagaacgctaagatgtatgatcaaagctagtattgatagttgatgacgttgattttggagcagattcgatttatacttcttcagaaccggcaagggaa

SEQ ID NO: 114982 - DNA, 1053 bp, Physcomitrella patens
  Intron number 1 from transcript Pp1s36_50V6.1 (locus Pp1s3 6_50V6) derived from phytozome v7.0 (chr-ID scaffold_36; p os 254094 to 255146)
atcgctcaagagcgcttgcgtgctgtggacattgggtacatttccattccacctcctagtcattttcaattccagtcgctcaaggcgaagctcattgattttggctatgaagtagtgaagtttgagttcactcgctttgcattcaggaattgcccaagaattataactgaccatggagtggggatagtcttcccgggtacatgcaacggcatctgctgcaaccaagaatttgatggtcacctcagttatcgacgagattattaaagatgaatcatctaggtacatttgttttgtattggagatgtttgatttctcaaaccaaccaagggcgctaagtagctcagtattccggattacgtaaggtgcgcgcatgaataagtttcatgcatgcactgctgctcattttaaggattacttgtggaccgaatcttctgagccgaagaatccagatgcttttcaaaatgtataccgaccacttcccttgttttattccatgcgcacactgaaaaccaatcaaccatcgctcttagccaccaactcaactcagaccagggtagcatttaaacatcattagttgttctgttcgtcaacaaaagaagtgtctcctggcaactgaggcaaacgagcttcctctccattctatgattacgagcatcaaagttgagaaaacaggaaattagaattccaattcacatgcttatgaaaaggttctaatccaactatcacctaaacaagaaatgaatattgacatgtagaagttatctgaaaagttttgaaatgacgaatttgcttctactgatgctttcagaatatacgctgaggagtgattagaaagatgctgacttccaatctgctaatgttttcagaagtgcttagatttcgccactagttatgccgagtctaaggtctctggtggctgcaacacaagctgctcagagactaagcacatttagggtttgttacgaccaatcgaagttcaaaagaatggtaagatttgcgggcgaagacaagttaattcttctgttgcaggacggaagacttccagaaggccag

SEQ ID NO: 114983 - DNA, 177 bp, Physcomitrella patens
  Intron number 1 from transcript Pp1s134_91V6.1 (locus Pp1s 134_91V6) derived from phytozome v7.0 (chr-ID scaffold_134 ; pos 667548 to 667724)
atcatccaggatcatctccctctctggtttaccaggtaaacgcattatcccgcaatcttcgagaagtggaggaacaaccactttaattatgcattagtttctaacacttagatttctggtttttgatttttctttttgtcaggtggagcggaaggatttagagttgctgtcgattat

SEQ ID NO: 114984 - DNA, 515 bp, Physcomitrella patens
  Intron number 1 from transcript Pp1s128_129V6.1 (locus Pp1 s128_129V6) derived from phytozome v7.0 (chr-ID scaffold_1 28; pos 924790 to 925304)
cacactcgttgccaagctctctgcaagccttgaccgtgagtgcttcccagtgtgatccctctttcttcctcgtgtggccgttatttttcgtcccagggacgcgctctgtgtatgtgatttgttgtggagctcttctaatctttaaccggcccggatcgtactacgacatgagtgattcgaatgtgctgtgacgttattttgacttcgtgtctcacttagatttgtttgccttcgaggttggaagcactagtttgatttgtagaatctagttgtgtggtttagatttcgattagttgcctagtttttcttttctttttcatgatgaggcatttttattacgaacatgctcgtcaatttttcgttttttttctcgtgcagaatgtgaacattgcttgttgttcttcaatcatgccatgaacggtgtgctagatatattgtttaatctctaattcaactctctttctgtttcttattttgcagctaaggaggctcacaagtctaagttcgtcaatccc

SEQ ID NO: 114985 - DNA, 1043 bp, Physcomitrella patens
  Intron number 1 from transcript Pp1s29_269V6.1 (locus Pp1s 29_269V6) derived from phytozome v7.0 (chr-ID scaffold_29; pos 1843115 to 1844157 reverse strand)
ggactgctgcaggacagctctaaattccaccagaggtattcgatccttatagacagctaacagaacttccttgaggggataatgaaccttgtgaatgacatggtgcggcaaagcctagaggaaaatttgcaacgtattgtgcgcagggcgaactttcctttggcttagggatttgcgaaagcagagatgatgagatctctgtcgcctagtggattctcaagtttggagagttttcccttttgaaattatgttccattttcttcctgcacgttcctattccagtaattagtattccattttgtaatggaccctctcggactgagcaactgggcaagcttcccttcgatctagttcactacaaattttgtctggttctcaggtggtttgaaaatctagttttaacattctagaagaaattttgagacttttcatgaagttggcttaaatccttttgttggtggaggcgttatgaaagactacaagcttctagttccaatcgtctcgtgcgtggattgtagttctgcacttttcactcatccgacctgttggtgtgctgactaacaaacattcgagaaattttatcaccagttttgagaaacttaagcatatcttcagttcactcatacaggactgggatccaaaacagagttatttatttgaatttaataatgcgtacagtttactcacaacctttttggaattatagactcaagcctaaaaatgctatgcacaagcacggtgataaatacgaatttggggaggggttgcctgagagacataccagtctggtcttggcagaacggtcagagttgttcttccacgtatattcaacaaagataggtctgtaccagagccgttgattttcatttgacatgtatccttgcggatatgcactacataagagtgctgcaaattagttttgtgttcagatccaccgacgcgtgcaacctggagtaaaacaatgagaaaacaacggggatccttgctaagaactcacgagtccaactcatgatcttgaaactgtgcaggcatatccttacctc

SEQ ID NO: 114986 - DNA, 700 bp, Physcomitrella patens
  Intron number 2 from transcript Pp1s74_158V6.1 (locus Pp1s 74_158V6) derived from phytozome v7.0 (chr-ID scaffold_74; pos 994123 to 994822 reverse strand)
caaaaactgtgcaagttcctttggaggcgaggcaagtaagttgatctaatctctaatttaagtcaattatttgaaggactgctaaaatgtacagattcatttaaaaaagaataattaaggacataaaaggaagcttactttcatcttaatatgttagtacggttttgatctcccttggagttgcttatttaatggacatgtctacatgtaatgaagattcaaatttgttgcagtgaacctaggaacgtaatttgttggaatctgaacagtgtctcaattcttaatagtacacagccatagaacgctggagttctgacaaccctgatatacaagagctagcggattttccagccagtgtacttgaacttttatcttacaaagaggtttgtaacccaccctaaatctctgtgcagcactctggtgcctactgccaatttgatgtttctgaactacaagcagaatcatgtgtctgaaatcaagagtagggtttgctgcagagagactaatacgtgcgcaagtgatttaaaggcttggtttgaatgattctgagtgtgttggtttcgctcagattgaggaaaaagtttgagaaaatagcctgcaaactagattagatgaaagggatcattgtctccacattcagtcatcacattgaagttaaattaatcaccgtcttgtttctcatgcgagcaggcagctgtcc

SEQ ID NO: 114987 - DNA, 446 bp, Physcomitrella patens
  Intron number 1 from transcript Pp1s26_174V6.1 (locus Pp1s 26_174V6) derived from phytozome v7.0 (chr-ID scaffold_26; pos 1339539 to 1339984)
caaaacccttgccacacaaaaggttccatctttaatctcactttgatccattttcttatattttggctccaacatacaatttttgtttgttaagactagtgggaaagttttgtaacttgtaacattgtttcagaaacacacatgtggtcatttttctacatttttttcttcccatccatacttggaaaagaacttatttattttatagaagtaccaagtaaaatgagcatttggtgccaattttgattggttgtatagttgtggaatatttctctgacatgatggttactatttttaaaatgtaaattttggtttgagaagagagaaatgaacaaatcttaaattatggtttaattccagatacatatgacaatcctaagcattcaaattttgtatcaaaccatttgttttatttattgtgtgtatgctgcttatgcaggttgtga

SEQ ID NO: 114988 - DNA, 853 bp, Physcomitrella patens
  Intron number 1 from transcript Pp1s124_140V6.1 (locus Pp1 s124_140V6) derived from phytozome v7.0 (chr-ID scaffold_1 24; pos 961657 to 962509)
accaggtaaaaaaccaggatccaaaatatcacgctgccatattcctcacccatgatatattctactaccctcactatacttgaactaattgcacgacgcaagcaaggttgttttttccaacgtcaacaatagaaccccgagtaacttactgagaaacacaattcccaagctcattccgaagcttattttgctttttccactcggtttggttgataattaatttgtaatggactcttgtctgttgaacacatcagcatatcaacaagtccaccgtcaatatctttacagagaatatgaatatgagagtggaaactggagtcagctttatagagtcttgtcaaatgagatactccaatcccaaattccaggctgttctgaagaccagctgccacgggcacaggcttccacggcagtcgcctgggagtgattaagagccatactccggcgctgcccggactgtagacctgagttttcaagcaccatggcaaagatttccattcccaaagtcagagcacggcttcattgtcaatattactacgctgggtccaggattccagacatagatttcaataccttgggatatggtggagtggaatcaaagactatcactgtgctcatacccttgctagcagacctgggtacgttcatacccatggataggacccgccagcatttctaaccccgagctttaatccagctccccagtgggtctgtttttacaaagctggccttgctaactcctcacagaagacagacctgtcgtcacaccagcctagaactccagcaacagtcaaaattctgattatgttgtctgtgaggatcaaagcagaggctgcttccccaaagaacaaga

SEQ ID NO: 114989 - DNA, 881 bp, Physcomitrella patens
  Intron number 2 from transcript Pp1s99_226V6.1 (locus Pp1s 99_226V6) derived from phytozome v7.0 (chr-ID scaffold_99; pos 1210947 to 1211827 reverse strand)
ctctgagcagtaccttgcttgtgcaacttagagaggttcggaaaacttgcctctctttcgctttgctttgtgaactggatgtgggactgtgatttctcggactgttttttgtgcaatcccttctttctcttcagtttttttgcccagtttcggatacttgacgagtatccgacgcttgataacggactttcgtcgcttcttcctgctgctgttacttctctattctccatttgaactgccgctgtttaatcggcgcttaaacaaaatatagctttaaacttacttcaataggttggagttctgaggtaaaatggcttttcaactcaaggtaagattacctgaagagcgtaaccaccgaaaggagactcattgcttagtgcttgaagtcataatgttagtgaggatggggttcaagggcttggacattcttcagtgccctcgtgtttgaaatgtgtccttcaacagttttgaagcgtcttcgtcaaaacggggagtgtggacaccagaatgccttcgatgagcatctcacttgtctcttcagggtcattaacaaacgatttagtcgttggtatttaaaaatcttaggtcaaaataatacgctcaagtataaataatgatcactcatttgaaatacatatcctgcacctgcgttgattcagagaagctgaatacatggaagactgtaatgttcgtccagatataccaaatttcatgataatttcagataatttaagagtggaccactggcctagcttgcttgagatgaggtgattccttgaaagctcacaaaaactttaatgctgcaacttcacatgaaagcactctctcatctcgcgaagcttgtgtgaccgctttcacagggaggccaactgaaggtcacc

SEQ ID NO: 114990 - DNA, 654 bp, Physcomitrella patens
  Intron number 1 from transcript Pp1s75_170V6.3 (locus Pp1s 75_170V6) derived from phytozome v7.0 (chr-ID scaffold_75; pos 917692 to 918345)
gaagaacaattagtccgcctcacaacgccttcgaggtttgttacaccagatttactccagagcttcgatagcttagtaggcacatcgaattatctttaatatgctagattaaaattcaaagaaccttcgcagccgtatgtccagtgcgtagtctaatcgcgcttggcaccacttttgttcggtcgagtcttcgaacttgcaccagcaggtcaggaggatgttctctcttttttgtgattagaacaccttttattttggtgaaataacgcttcccttctccacctatatttgcattccgacttcagaaaaactgagagtgtttcaattatggaatcctcgaaattaggagcttgtctcattcttcgcataacttcacgactgacaacaagttgctgctgaagagaagttgcgcatacttggatagatatcttcttattattgaagaccagtctgtggggtctgctctgctctttgcgattgatcgtttagtgtccgcacactacgtagtgcctcaaaatatgtaaaggacaggggaaattaaggagttttttttttttttttttttttttttgttgttgttgttgttgttgttgaaaggatgtaaacctttggaaggaagttgcagaattcccaggtcacttaaccgtcggctca

SEQ ID NO: 114991 - DNA, 500 bp, Physcomitrella patens
  Intron number 2 from transcript Pp1s326_33V6.1 (locus Pp1s 326_33V6) derived from phytozome v7.0 (chr-ID scaffold_326 ; pos 196099 to 196598)
ggtttccatagaggtttggaccgttacattaaaaggtgggtacctattctcttctcagataaagcagtgagtgttgagtatcctaatgttgcgttatctatttttccttttaagttattttttttatcatgcattgctgtgtttcttttagatttcgagtactgttttgagttcggtgattctaatttgtgttaagtttgggtataaatgtgacgagtggggtgaaagtgaacataagtattcaagttatgttaattttataaaaatagtctttgttgtgtatagctcggtcacaatcgtatgttgcagatgttttgattatgcttttttaaccatactggtggaacggcgaaatgatttttgtcatcatcagattttatagccaaacatgaaagagtggtttctcaaaaaactgtcttaaggatgagatcctgtagctggtgctgggctgacaaactgaaggtctatttgttttgtgattgtagctatctctttcagga

SEQ ID NO: 114992 - DNA, 996 bp, Physcomitrella patens
  Intron number 1 from transcript Pp1s249_56V6.4 (locus Pp1s 249_56V6) derived from phytozome v7.0 (chr-ID scaffold_249 ; pos 328050 to 329045 reverse strand)
gttgttccaagtgcagagaaggtcgtgacatttgcttcatcgaggtgctctttcgtgcgtaatgccaatcgtccctgattttgtcttagtttctctaggtgttgagtccaatcctaacgttgatctgtgagggtctcaactgtagagtacaggatggaaaccatttttgattgttgaactctgcccattctggtaacaagttttggaatgatagatgaagttaggttccacgcagtcccaagcacacctgactttaaatttacatctggattgttggtgaaagcagtggttgttttttgtgaattgtagggcagcatctgtattcgtcccaggctatcttaaattgcaaggataggatgttgtgccgtatttcatcgttacgatagttttctgagaagctacctcatcagttggtgcagaacacgctgtttggtgtgaagattaggtgaatctttagttctcttttctttttagattctttccaagctttcctccaaatggatgtctggcgcatcgcaattggcgggacctttttttttttttttttttttttttttttttcttcatttttatactacgttgtaattgataattatcctaattttttaaaaaaaaactggaaggaagtgtttcattaacttgaggaaaacgaagtttaaaaatgcatttcagcatccccagctggatgcaagttacaaattggtccttttagttccaccgaaatcgaattaagacatatgctgtcgatgagaaagctttgctttcaaattgaactgccaccgcttagaatagtttcatttcgataaagattacatatggtgtgcctgcggaaaggttttcccaatccttcaattcatgtatgatgtttatgattctcacaggcattatgttattaactatttaggttgaatttagaagagatttgttacttgtgttttaaatcaatagctcgttacgttgtgcttatagtgttaagtgattgctcaggcatcgatc

SEQ ID NO: 114993 - DNA, 564 bp, Physcomitrella patens
  Intron number 1 from transcript Pp1s14_87V6.1 (locus Pp1s1 4_87V6) derived from phytozome v7.0 (chr-ID scaffold_14; p os 511964 to 512527 reverse strand)
ttcggattccacgtatctactgcctcaaattcaaagtaagttttggaatattcccctaaatgcttccatccttttcgcctgactaagaaaagcctgatactattttatgaagaagatgctatgtttcatgattattgccgctacaataaagaaaaatcctacaactctaaaaagagtctgaatccttattttcatatattttttctaattatctttctcgacgacatttctatgttctagcgtctgcacgtagtcgttcgaaaattcaaagatttgccaaattgtaggcggttgcctaggccgaagttaaatagacattttaaagcctaaattcttagttcaagaaatgaattctggtatgtagtacaccagccattactacttaaactcaacaattggaccacttcagagtctcagcaacggtatctattataccttcatccggatagtgtgataacgcagtgttgttcggtgtgcgtatgttatttattttattttattttatttatgtttttgtttttcccaacagtgtttttacacacagttctgagcgatatcgagcgt

SEQ ID NO: 114994 - DNA, 596 bp, Physcomitrella patens
  Intron number 1 from transcript Pp1s126_79V6.1 (locus Pp1s 126_79V6) derived from phytozome v7.0 (chr-ID scaffold_126 ; pos 455794 to 456389 reverse strand)
ggaagaatttcccgcttgcaaatacaacttgcgtgattctttacttggactaagtgctgatgcagaggttctctgttctcataagattttagtgattgtcattaatgaagctcctctcgtgtgatcaagttcttttccatgtgtgtttcggttccattctagtgattattatatgggaaattatgtacgtgcggatccagctgccgttttgcatgctgacgatgaatgaaatgtcgtccgtagagagttgaaatctacagtccagtgcgagaatgacctgcgctgagctccatgatcgtcaaattttatgatttcgaaattctaagctcggatgttttggtgtttccctcgtttagggttcaagttttagttgtattcaaaggattttgtgtttgatcatttgtggggcgattccctcgaagtttcaattaaggttacctcaagtaaccgcccatgcaaaactgtttggaaagtaacctccctgtttggcagaatttgttgttgtgttcctgattaaatgtttctcatgcacattagaaagaaagccttgagtgcaatgtctaattcacgaaatgtgtattggagagcagagggag

SEQ ID NO: 114995 - DNA, 1047 bp, Physcomitrella patens
  Intron number 2 from transcript Pp1s112_133V6.1 (locus Pp1 s112_133V6) derived from phytozome v7.0 (chr-ID scaffold_1 12; pos 666581 to 667627 reverse strand)
cgacgccgcccatacaggctcctctacaaatcaaggtatctcgttgcttcgctttgttggaattcgcttgtgatgacttttcttttacgcagtggaaattccttgaaaaacggtagcttgtactaggttttagaaggtgtcgagtgccgtaaaaacataccctaatctgtataaattgtgaaatatctgagttcttcgcttagattgcgtctaaattcttgaagaagaataaatgaagaaattaacaagtatatggtgccctcccagcggcattgcgcagccgcacttgataagatggtttctaggagttgtgcgtcaatacataagtaagcattttaggaataatgtttctacgctgtcattgttaaacttttacttcattgtgtgagagatatgttttgtgagtgaaaaggccatgaattcagggacttctttggtgttaaaccctggatatctggatttagcgattcatgcttaagctcttaccaggttctccaagtagaattaataaaatggagctgagcctccctgtaagtgtgttcattcgtgatcgaagagtttttttttttttttttttttttttttttttgtcatcatgaaatgtcttgttctcatgtcatgttgtagctgctgttttataatgtttcttgagtgagggagaccaacacaattgctagttgatacttccagaaggatatgtgcgacgtggtttctctgttaggcatgacttatattaaaatcaaagtttgaagctcttcatttctacaacttgatactaggttctcctatcagaaaccccttctgttgacaaacaaacaatacattacatcttgagttgattgagttgtacctgctctgatttgattcatgtttcgtgtgattttatcgccattgttgaaagttatttattgttttccgaaggtttgcaacttcagtgtacggtgaaagaacagtggttttgttacttcagctgaaaaggtgaacttacggcgtgtattttatttgtggacaggatctgagaccatctgttgccaccaacattaactt

SEQ ID NO: 114996 - DNA, 948 bp, Physcomitrella patens
  Intron number 1 from transcript Pp1s388_8V6.1 (locus Pp1s3 88_8V6) derived from phytozome v7.0 (chr-ID scaffold_388; pos 99256 to 100203)
agtcagttcggaggtcaggtttgtgcaatttgcttttgttttgtttttttatttcttttcttttatctctttttcacttggttccgtcatttgatcgttttgtaatatttcagtgtggcctctattcggaaaaaataaatatttgaattgaacgttttcttgagtttagtttggcaattttggttcttggatttggagattgaaggcgtgaagcagttgacgaggaagtggaggccgcatttgtttgagattaatttggaaatttagtatgaggtgcaaagtagctgattttcgtcgcattcgtttagagatttgtattcaatttcagaagtgttggaatttattttttgcaattcaatatagtataactgcaattcctggtcttaggatgggctgtactctgtaatttcttcttgcgtattcttcttgtcttcgtttcaaaattctcaaatgatgtgctgctttgcttctaataaatttttttatttcagattacataaatgtaacaacattagaccctggattgatagaacgtatcatcattaatgagatgaggtttaggtctttcaagtaaacatctcctgcaagcacagtacagggcgaagctcaagttaaatgttggaccctatagctaatgctgggtgcaagattttttgttaacccagaattagctatagggtccaacattgcctctgcgttcaatggaatatgtgaattagatgagattagcatgacatcttatttagggtaactaattcgctgttagaactgaacgaacttatttttcgacgctcttgctttgataaacctgagtttcaatggctgttcttacgtatccaaatattaaggtccttaatcacaaattattgaccctgatattggctcggacatatttacttgtggctttatcaagggactggccattgaggaagatcccggccaggtact

SEQ ID NO: 114997 - DNA, 851 bp, Physcomitrella patens
  Intron number 1 from transcript Pp1s45_97V6.1 (locus Pp1s4 5_97V6) derived from phytozome v7.0 (chr-ID scaffold_45; p os 625053 to 625903 reverse strand)
cttcattggagctgcagctgctctcgtcttctcatgtatggactctcactcactctcgaccgatctggcccagaagtggttcgtttgttcttgggtgtcgcttcattttggggtttggtgatggatcgttggaccgggccgctaatatacgacccccgtatttagggtatctagaatccgtgtcgattttagctttgtggattgtttccagtcttttgtggtcggtggtgatgataggatttttcagtagggtctgatgtggtcgaatgctctctggatggccgcgcgggtgaggtattgttctgtgtcagcgtatctgtcggtgacatgcgtatgctacttgtggtgcgatcacagttcaattaagtttggtctgggtgatgctctttactttagtgttgggcgaggtagcggtgtgggtgggtggtggaatcgagtgccagccgctgttggaaagattccgtttcgcaagcgtggtttccgattgattcatcttcaataggctatgttgtagaaatttgtcatatcagggttttctgcgtgatttccattagaatccgcaagttctcctttgaattgaatgattattcggtgatatttgtaagtgcgatggtcagtcattgattggatgcatgatcttttccagtatgagcgaggcattttgtgacgaataagttgaaaacgtatgactctttttgatagagtgtgtaacttgaaggcgtagaattccttcgtaaatcacctccttgataacagcgatgttgggcaccccactttcgagtgcctcatctaggatatggcctcgaaattcctagatatgaataaaatggtgaaggtttttgcgcgcaggc

SEQ ID NO: 114998 - DNA, 677 bp, Physcomitrella patens
  Intron number 1 from transcript Pp1s33_110V6.1 (locus Pp1s 33_110V6) derived from phytozome v7.0 (chr-ID scaffold_33; pos 618961 to 619637)
gtttactcaggacagggcgtctcttcagtcttcaggtacgtagcgtggtcatctctgcgctcactgttgggggcttacgtgccatgcatggttcaatgtgccacgatgctcagccgtttagtctttctttcgagctgtttgctgccatagtcaagttttgggttatggatatcgcactggtggctttgtgctagaaataggacacgttgtcagttccaacgaagacatgctgtgggttgttgcaagattttgctgtagatcttgggttgttacttttggtgtagtgcgttgtgtttatctgcgtaatggaattgagtttatcttagatctggcgtggttctgggttttagacgttgtttgggtacgtgggttgcctaagatgacaatggggacatgtccttggagtggtagttttctcgtcctcatttcctggtttcacggacattggagcaagcgtagagttcgatattagtctctctggaaatctattttgatttatttatttgattgttgtgagatgcgcttctttgttgcttttgggatccacactgaaacgtgtcgagatttgttgacggacacgcttgtccagaattttcttgtgatgcattgatggtgcggatactaaactatttactcatcagatatcttcctgtgtattcgtttctgcagcagaaacg

SEQ ID NO: 114999 - DNA, 744 bp, Physcomitrella patens
  Intron number 2 from transcript Pp1s81_37V6.2 (locus Pp1s8 1_37V6) derived from phytozome v7.0 (chr-ID scaffold_81; p os 193827 to 194570 reverse strand)
ttacctcatcaagttgctgttgattggcgacagtggtatgcattatgtgccttgattctacgagggaaatggagttccgattattgcgtgtagtttactccttgtttttttttctgttgcttcgaccgtagcacagactacattctggtgttcttgttgctgtatgggagcttggtcggaatgattttttcgaaattcaagtgtgggagatgacatccttttggaagtgtgtatacacacaagcgtaccaccaaaagattcttttcagctgctctaccgtagcatatgatttttgatgccgcattttcaatttcctactcctcgagaaggattttgaccccaaggccgttgttgcttcaagatgttccacgctttgcctaactactagtagtcacgtgacaagtacattctgtcttcttcgaaatctatgatccgcctgtgatatttgactataacgaaggaagttgtgaacgagttcggatgaagacgagatcgtttgccatgtttgctgactggcatcctggtttgattctggattaggtctttagctagtagagaaatgctttcctgggtttgagtaagtgcatgatgtgatgcagaattttatgatttggacaccgtgttgctaccggtcgatgtcgaggcttttatgtcatatcaacgtcaactttatcacaccaaagttgaatattacgttgctcatttgcaggggttgggaaatcttgtcttctccttcgtttctcg

SEQ ID NO: 115000 - DNA, 1009 bp, Physcomitrella patens
  Intron number 1 from transcript Pp1s120_129V6.2 (locus Pp1 s120_129V6) derived from phytozome v7.0 (chr-ID scaffold_1 20; pos 895122 to 896130 reverse strand)
tgagcgagaaacgcgtgtttgaattgatcaacggggtacggtaggggtccattcctgtggctcctagctccttccagtgttttgtggaagcagagtaggaaagcaatcgcagcttatcaagtttctatgaagcgagggttagtgttcgtgggacagtgtttcgatcatcccttgtacaaatgtgaggatccttgtcctgcagtaataatacgcggacagacgcagtcttatggttacagcacaggtcatttgtaatttttgttttgacttcgagcgtatgtctttgaagagctcttgcgatctgtgaatttaaaccctcagtattgtgacgcagtatttaagacacaaacaggttaatattttcctcttcatcctttagtcttagcagtgtgtactcaagttggtaacgtagcgattggacctgcgaaaggattcttctgaaggttgtaaagacagttacatgttagaattatgattatcttctatcttggaggcacttttgatgtcgattatataatcaccaattgcttcctggaattcggccacacggtgtgtgcgctcgttgggaagagtgtggaattgtgaggtgatttcacagttttcgagagcacattttgtagtaggcatgagtgaagtcgaggatggccgggacggtcgctgatttctgtctcccatattgatgaagagatttgacttagtcgtgatcgggtttccttacgaattcgaacacttgaagttattatatggcatagtcgaatctcgaatttgtagtccttgggtgctcggattgcgcttagtcgtgctccgggtagcaaatttgttggaagtttgataaacgtccggtacttctgggggcttgaagaaggcagcgtgggagtgtaaagctatagatgtatctgcagtctaattctttaatctgccgttttcattcgagcctacgattgccgtaatcatcatgctcgtatgcatttgtagagctttttcctaaatttttattgattcaagtttg

SEQ ID NO: 115001 - DNA, 592 bp, Physcomitrella patens
  Intron number 1 from transcript Pp1s153_98V6.2 (locus Pp1s 153_98V6) derived from phytozome v7.0 (chr-ID scaffold_153 ; pos 623947 to 624538 reverse strand)
gtgatttcgactttccagcaacgctcgaagtgcaggttggttgtgggtagttcgatcttttgtgttgggatcttgggttgcttgccatggggtggagatgagctttgaggtggctttcggtggaggttgcgtcttgtgcttgtttgtttttgtatatacacattattgtaagtgctgtagtttattattccttttttgtctgtttcttctatgggtgcttgttcgtgttgacttggttcttggtcttagcgtaagcatcatacacgtactattcgttgttgtttgagggcgcaattgctgaacgaatctcgataacgttgtctacagctgttctgcagtttttcggggttatgatgggcgctttgttagatatggagcattttagtaattggggagagttcttcgttaggaccgtagcgcagagtcagcgaaatgtagcacagtgtacgtggagtttttttgggggggaacatctctcctcttaaggagactacctctgtattgtcttgcagcttgaaggatgtacgagcctgcttgatatcaaaaccttccgtggattttgtattgtgtaggtgatcttgtagaagccaca

SEQ ID NO: 115002 - DNA, 890 bp, Physcomitrella patens
  Intron number 1 from transcript Pp1s167_101V6.1 (locus Pp1 s167_101V6) derived from phytozome v7.0 (chr-ID scaffold_1 67; pos 497959 to 498848 reverse strand)
tagtgagggcaccggaggttgagagtgatttataggtgaatctttgagcggccatcgttgatgagggattacattttattgtgcgttggtaaaagcggctgcaattgctcggagatttgtgtcggatatatcttcttcatatactgattatgggaaattaatgagttcctgtccctatctagcttctttctgttattgtcgtaatactgagttctgtccctcgtcttatccattggagtctatggttcatcaaggacttgagttaaattgatgctgttttctgtgaaatttttaggattttgggcttgcccactggagtgatgaggtgatttgtcgtatgttaacgcaatgtagtattgggtgtgcacacatagtgcaaatggataaccaagtggtgccgtgtatttgattcatagtttgagtagttgtaacgatttcatcgtagtgtagcatcaacttgacgaaaacggattgtttgcaagtagtgtttattgtcatttgtatccctcaaccattatctggactctcattaacaacttcaaactgctcatgcgactagcattacaagaaccttgaatgtttagggctactgttatatctagataagaaggctgtattgtccaatttgcaaaacttatcgatatagcatgtaatcgcatttctaattcattgaatagagaggttaatcaagttttaactatttcgttagggtttgtttaacaaagttttcctgattcaatctaattagtcgcgcgttttcgtactcgttttgtaagttcaattatctaattattgtgagtatgaacattcgctactaccaaggttcccatgccactaagatagtgctggcctgacgtaatggaagcttgtgaacttgcagaaaatttgta

SEQ ID NO: 115003 - DNA, 545 bp, Physcomitrella patens
  Intron number 2 from transcript Pp1s149_132V6.2 (locus Pp1 s149_132V6) derived from phytozome v7.0 (chr-ID scaffold_1 49; pos 439852 to 440396 reverse strand)
caatcagcgtaagtaatcttcaaatcctgcacttatatgcttggtttgcttgctgagtatcattttcgaaaatacgaaaaaaaaaaaaaaaaaaaaaatgaagaaggatcaaaaaagagagcatattgtttcaatttgatgctatgaggtgtggagttcagaatttctagaagttcaccacggttgtggtttagttctttcatacggcgaaagaattcattcatgttcaagtctctctgcaagtctctcgctagagtcatccatttgcggcttactgacgtcctttcacgtttttgaaagttggtatgagtagtcactagagacatggaattttacattgataccacaaccaagagacaccagatgagcttaaatgaaagtgactagttcaccacataaaagtaaaaataaatagtccttcaaagaaacgtcgtttctgttatcattgtttgtttgtttgtttttcaaagctcggtggctaatgaaacataaacgtatgaatcgatgcagatcaggagagacttcaacagtcgtgaccgacaaca

SEQ ID NO: 115004 - DNA, 473 bp, Physcomitrella patens
  Intron number 2 from transcript Pp1s16_276V6.1 (locus Pp1s 16_276V6) derived from phytozome v7.0 (chr-ID scaffold_16; pos 2219137 to 2219609)
tcaatagcaattttttcccatacagacaaattagtgtaagttttattatgtctttgtatcaatttttagtatatatatatatatatatatatatatatatatagcaattgattgtagttgtcatttttcaaaggtttaacaaaatatgttgcaatacgtaacattactcttcttatcactcaaagagaagaattatgttaatgccaggaatctaagtaaaagtgttatatgctacagataaaatgcgaacagagtctatctaatttcattttgttatacaatggttcattatatatacatatatatgcgtattatgaagagtgaaacatacagattttttttgtgcttgatgtattgataacaagttaaacaaataattaaattagtgatcgtgaaaatttgatttgggtaattgtgtatatacaaacatatgacctgaatttgtaaatgtgattttttttttgtttgtagac

SEQ ID NO: 115005 - DNA, 772 bp, Physcomitrella patens
  Intron number 1 from transcript Pp1s97_184V6.1 (locus Pp1s 97_184V6) derived from phytozome v7.0 (chr-ID scaffold_97; pos 1001306 to 1002077)
tggcaaggcatacaagactacaatcaaattgcgtatgacctagtcaagtcactatcagatgacaatcttactaatggtcgttggttcaaagaatttgatagtacttggagaaggaacagagtattatgtgtcaagctagggaagcataattacctcaagtcactagtccagtcttcctctataatgaagtaattcatctgtgaaaaaaaaaaaacaaaacaaaacaaaacaaaaacaacaacaacacttcattgattaggctctgaagtaacagcttcattgtccaaaaggttggaggcattcacaacataaagtcaatctgccaaatgcccatcttgtaacaattaagctggattttgctattaaaactgcacaaaattgtgtacatgcaagcaagtctcaatgaaatattcttcaaagtggtagttcttattctcatcctcatgttgcaggctccccagagcctgagcatgagaaggaactttagtctgctatgcacaactttgaaatcagtggtgcagggtttttatgaactgcaaaccattacatgtacattacttcataaaatgaagcagatagatgtagatagatgtagatgtggccgagatttgtaaacagattagttattcaaattatccaattcctgcaattcttgatcccttacacatttgtatttacagcttgtaacatcactgatgagctgtcttctctggttctgattctacaaattgaatactaatgtgcaggtttaaaactgtcatctctgggtcag

SEQ ID NO: 115006 - DNA, 995 bp, Physcomitrella patens
  Intron number 1 from transcript Pp1s171_14V6.1 (locus Pp1s 171_14V6) derived from phytozome v7.0 (chr-ID scaffold_171 ; pos 71638 to 72632 reverse strand)
gcattggtaagcatcttttctctgagcagagcaaccatgtccccgctttggtcgtttgttacgtatcaatggcgagcactgccttgattcagctagctgaaaagctccttaacagactattgttactctatggtttgcttataagtgacgcgaatactgtgtaatgcgaatgctgaaaacctgtgctttactcatgtatttccttaattaataacctgacggacctggccattcaaaacgttagactgggtgtgtttttgaagcttttgattcaaaataattaaatagttggatgttacagacggccctcatattaatattcatccttagtatttggatagctttagaactcatatagcttgtaatttcagcttgtgaggtttccttgaaaatgcctaacgcagaatctgcaatacaactatcctttgtcattgcctgctgacacacgtccagtggatatttttctttatgttttgcaactaggctatttaaattcctcatatacttatacgtctcatatgctctaaatttgtgtcttctgttccttacatcactcgcactagaaagttgagtggcatattttattaagatcaaatgccttagttataaaagttaacttggcttcggtagtattctttaactcacaacctgcacattctcgagtgaatcatctgttctagtgggaactgttgacttagttccgattggactaattcgttgagacgctagatatattatagaaactaactatctgaaggcctttataaacctattgaacattttgaactttttcatttcgttgaatgattcttttcagtaaaatgatcataatatttatcatgtttgccccatttgacaattttttccatgagcttgtgccagatgttctatgtggtggtttatttgacgcgtgaagtgttcatgtgtttgattgcgaacctgtattttcctctgtttcaggtacagattttaccgttaagaagcacagtaatcag

SEQ ID NO: 115007 - DNA, 484 bp, Physcomitrella patens
  Intron number 4 from transcript Pp1s70_213V6.1 (locus Pp1s 70_213V6) derived from phytozome v7.0 (chr-ID scaffold_70; pos 1306236 to 1306719)
tttgtgacaacgagagcttgagtcccaaggtaccggtatggatatatttgccctttaccaaaatcatcatggattttcatgagctttatttctctcctcatcttctgcactgaggaggtaagagcttcatagacatactacagctgccctttcgtcggtagattacgtcttatattaaacgtaatgttcttaagaatcatgattattttgggggcatgcagtgtagtataaatcaacaaataagcgtttgtagttttgtcttgagacaaaatatagataatggttgaatgctaacttgaggagcatcatgcattgaaattcatgttcattattatcccaggtgcatgtctccacaattgtggtaagggttcaactaaaaatactgagtacgtgtttattctgcaaagcagtgcagaggaaatattttgattgcatttttttgcttataggaaagcagggacagtcggagctttggtcctttacc

SEQ ID NO: 115008 - DNA, 893 bp, Physcomitrella patens
  Intron number 1 from transcript Pp1s96_37V6.2 (locus Pp1s9 6_37V6) derived from phytozome v7.0 (chr-ID scaffold_96; p os 253037 to 253929 reverse strand)
ttcaacttagcacgaaggaggattcattgctgagggtttggagcctgtcccacctgaacctgtgctttcctggcatgtatgtgtgcgaatttaatgtggtgatgcgttctcagtcgtttttgtttacattgtttcgggatggaggcattcgggtggaaggaatggtgtgggtagagaaatggtgtgaggaaacagttcgtgagaagaattagatattgagatgcggtctgatttgcaggcgtcgtaatggtgttctgtttcgtgctagactgaatttatgagtatggagttagggtttaagtgcaaagactttgtggtggtcaagggtaattgatatcttttgcggagagcttgtgaatctttggtgggtaacgaagtctttgatggtggtaactactgcgaatgcttagattctttcgcagcacgaattgctatggccgcactttctctcatgaattgtgaaaaaatttcagtcagcggttgtgaggggttacattgaagaacaagcggtgcgcttatcgattttgctcattttggattgactgtgtacataagcaattttgaggacgcgagtgtttcctcgaggttgttgtcgtttgctcaacaggcgtcaatagcccattatagcacatactgaaacttagccctagaattttgtcattcgagtgaaggtatacagttatgtgagtttcgttgtctacatcgcgttgtagggttggatgtattcgcgtgattccaggcttggggttggtaaagttgtttgaaataagggatctctgcatgcgttacacgtctgtttcttttgctgtttgtctcccatcgtctcaaacaaattcgattttctacgatgttgaacagcttctgggctccctgtgcatatctgaactcgttaa

SEQ ID NO: 115009 - DNA, 1027 bp, Physcomitrella patens
  Intron number 2 from transcript Pp1s16_355V6.1 (locus Pp1s 16_355V6) derived from phytozome v7.0 (chr-ID scaffold_16; pos 2545690 to 2546716)
ttttccacgagcacaatccaactgagtcaagagcaaaatgctgaaccatagacagttgaggtcaagcgaaccttttgcaaggcccttggtggaaaaggaagcgacgttggtccagtgaaaaacacaagacgacttgaagcgaaagccgtacaacgataggcctggtctgactccacaaacgcttcctcgcgaccatcgaagggggatgttggccttggaaacgacgacagaacaatacaattgagcagaaaatcgcctgtcatggcagcgaagtcgagacagtgcgtcatgaattctaatccccttgtatctggtcggaagttgtcagcaacatcatcaaagataagatatgttattgaactgtctcccacgaagtctaagcgcatgagtcactccccaatatcaaggtcaaaacgaactgaggaagaaatatgacgttggcgtcctggaagcaaatgcggctggaaagaactttgtggagagcattacatcctccataaatagcaaaattgaatgcaaatcctcaatgctctctgatagggataaggagattttcaacagaatgatgagtagatcagtgaatgggaagaaaaaattctccgtagacaaggcctgtggaatgaagtcaagtgttgatctttctgcggcagctcgcagagcacgtcgtttgtctcaagttctcagaagcgaacatgaaatcaagcataagaaccagcagtttgcaattgatgtacaacagctacggcagcaaattgttgtaaacgaatcggagttaactctttggattttggttattccatggaaacgctttatgtaggatgtagtaggagcctcctttatgataccacatcaatgcaaaccgctaggatgagcaaattttgaaaattttggcgtccatggtgccattttctgacggtaatttacggcgagtaccatctacaccgcatgattgacttcactcctttcttgcacatcctttgatgattgcgcaggtccaaagggctcaatcggtgggtctattgctaag

SEQ ID NO: 115010 - DNA, 618 bp, Physcomitrella patens
  Intron number 1 from transcript Pp1s48_126V6.1 (locus Pp1s 48_126V6) derived from phytozome v7.0 (chr-ID scaffold_48; pos 1125858 to 1126475 reverse strand)
ctagggttgtgtgccttctgggtggtaacaagcgggtacgtgaattttggattgcattgacgtgccagtcacttttgtttttgttttgttttgaggtcaaattttgaagtggggtgtggcgtttagcctggcaggtttagtgcttatttggctcttcttgatagtaatgcattgcctcgatgagtggtaagttatcaggaaagctgaaaaacatattttctcatggaaatgtttttgggtcaattgcgaagggtatcttgaccgtcggtagtgttcgaatatgagaagctgccgggtgagcttattgagcgcacatgattgtatgtctcacctgttttactagagagagtgtggcgtagtatttaactgttgatctcctctactacttcaaattctatcctgcggttataaatgctttcgatagccacagaactccccacgtccgattttcatagcatttaggttagatattcaatattcatgtatgtaattttattcacagccttgacgtctgtcttaatgggccactcgcgacatacctgcataagacatactactgctactctggggatctcatcaaaatgtacatgacatctaaataaacatgacaatgccagg

SEQ ID NO: 115011 - DNA, 996 bp, Physcomitrella patens
  Intron number 1 from transcript Pp1s194_126V6.1 (locus Pp1 s194_126V6) derived from phytozome v7.0 (chr-ID scaffold_1 94; pos 563901 to 564896)
cttaaattggactcaaaagtgaaggtaagaggtgccttgctttgaattaatgtcaagagtatgcaaaaatgtccattgcatgtagatgatcttagtgatattttttaagctcacaacacaaatcaccctcacaaaacaaaactacatgattgaaaatatttttacattcattgttcacttttgcttatgccttgaaagatcaacatctcagtagtcgagcttctcacagaacaagcatcacattcatagaacttggtcaaaattctcatcttttggattcgatacgaggctaaacttcatttctacaaaggatttttaggagggtctacaactccttcaccatagtgaatttgacatgaataccttgacgtaactattgtgactacatatcaatattcttctacatggattgcttcatagggcatttcttccaaccatgcaaagaaatatcattagggccttattttagggcatcttgataagcttgttttagagaaattaggatttttttggaaaaatcccatatttaaagaggcttgttcatcacacatttggagatcaatgttttgtcctcacttcaactcttattcaatagtagggaagtgatttgcaactcttaaaagtcttgtaaggaactatttgatttatggtgattaggttcacattgtatcaatttgttgccaaagtgattgagtttgggttggtttcttgactttgaaacataagatttaggtttctaggttgaagatgagatggaaattctttgtgcaagtatgacctacagatctgtttgctattgacatttttccaaaattatcatcaatttctttgatattccagtattggcaatcccattatcttcaggaactctgttggttgttgtttagccggctctgaatttgtatagacacaagttagttgtcattgcctgagtttcataggacattatttatttttattttacttttcttggatttttttagtgcagtgtgtaca

SEQ ID NO: 115012 - DNA, 1027 bp, Physcomitrella patens
  Intron number 1 from transcript Pp1s532_9V6.1 (locus Pp1s5 32_9V6) derived from phytozome v7.0 (chr-ID scaffold_532; pos 73046 to 74072 reverse strand)
tgaaggactttgaaaggtaatggcaacgaatcgcaagccaccatgatttcacccccccccccccccccccctcttctaagcgattttgtctgtacacaacgtacgttaaaattttgactacgcacgttggcaattttttgtctggaggtgcaagcagacaaactttttttggttagagaggtcgtgggttgtctttgtttcgtggatttcgattgctgctgagtttaagtgaagattttgagtttgagtttgagtttgagtgggatttcatcgtttaggatatttgaaggtgctgggaattatgagatattgtggtggttaaggtgaccaaaatgtggtacttcaactgggagggaccccttcgaaatctctacatagtgacccaattcataagcttctatccctcgattttcatcccccatcaaacctctcccccaggtttcctttgcactatctcccactcaccatctgctgttttttgtatatctcccctcaagtctgtactgtcccaaattcgtcattgcagattttcttgggatcacccatgatttgtcatggtccctatggatcattaagggtgtggcccacataccggggtcgtggctcttgcttggagaatgaacgagggagtcttctgtatgtgctgcagaaattttgttgaagggcagtttcatatcgctttaatggattgtgcgcaattgaggtagtcctggattgctggttcatgtgtttgtaatttttgtggagttttctggatggtgaagagatgtaaagcatctgagctctgatattctgtcgagaacggtgtgagaatgcaagagatttgaaaacaagagaacggcttcgggtgtattttgataagcttacctaaggtttctccgtgtcattaagataacatactattgattttcatggcattttcttgaccgtttttgttggatgtggttggtattttcctggtgattaacactcggactgtgtttgtgcggcaaactcaggtttcgggataactgcttggtcggaccgc

SEQ ID NO: 115013 - DNA, 832 bp, Physcomitrella patens
  Intron number 1 from transcript Pp1s206_32V6.1 (locus Pp1s 206_32V6) derived from phytozome v7.0 (chr-ID scaffold_206 ; pos 164382 to 165213 reverse strand)
accgaagcaagcgccgcaagttgactggtacatggcatgccctgcaacaacccttacttaccgtgattaccccctcgatggagttgttgttgttgttgatcgtctctcgttttccattcgttgaaatggtgtccccccccccctggtttgtttttggttgtcagttgcgtccggattgcgtcattgtgtgcagagggttagttggctttgtgtagatttaagtgagtctctctttgggtaagaaatgtttctggattttaatggagtatgctaggatgaggcttgtagtattgggttagtggttgcttaattgcattaccattgatattaagctccattgtttagtatgagcactaccctgggcgaatttgggataggagtagatgagttaagaagcttcttgaactctagtttaagttacaggtctctgcattgaacttcgtgcagcattgaacctgacgacgtattcgctgccgattagttgcctgaaaatgacctcgtaaacgcttgagttgggtagttggacatgtcctagttgagttcgctttccatcttcaggagcagtcgataattctggattcgaccagcccattgatctttatgattcacgatcatcatttcagaggatcctttattcaaagagtatttttattctctctcgctcaaagtggtttttttatttatttattttttaatttttatattgctcagaaagtcgttgcgggctgacggtgagactctaagcttcaatttcagaagctgttccgagacagcataattgaggactgacaactgtgacctatgcatttcgcagaggatcacaatttctgca

SEQ ID NO: 115014 - DNA, 772 bp, Physcomitrella patens
  Intron number 1 from transcript Pp1s100_41V6.1 (locus Pp1s 100_41V6) derived from phytozome v7.0 (chr-ID scaffold_100 ; pos 229943 to 230714)
ttgcgggtgcctcttgttgctgcttgtcttcactggtgagctgttgttattggtaccatgcaatattaatattacatggagaaaaggcaaacggcctcattgagatttttagacttagctgttttttgtttttgtttttgtttttgtttttttttttaataaaaaggagccatcgttgtttggagcatcatctggaccatctgaaaaatttccaagtacaacctgaggatggcgagcaaagagagtgcgaattgtgtccagttagcatcccttcttcactttcgcctgttgctcatatgtcaccactcaagtgtcttttttgttctaacggttgttggaacatgaagacatacacctcatttctatatgctattccgatgaaaatgagcttgttttggatcgctagcctaatatatgcgtcagaatcaatgatagctcttgtcaagtgcaccagagcttagataatttcttaaatttagtgcaggacaaatttagtgactgtcaccaaaagcttttgagttcaccttcacattaagacagattgaccattgctagaggtaaaagagtaagaagacaaatagatgtcaattgaagctaggacaaatatttcgagttaggttaatacgaacatcccataaatcggaaacacagagatatcttctcagcacatcttttgcggtgcacaccctaagaatgatagatattatgtataatctaaaacatgttctcattttcagctcgcgaattgtgcagaagctgcacgaaagtggtc

SEQ ID NO: 115015 - DNA, 434 bp, Physcomitrella patens
  Intron number 2 from transcript Pp1s215_89V6.1 (locus Pp1s 215_89V6) derived from phytozome v7.0 (chr-ID scaffold_215 ; pos 729609 to 730042 reverse strand)
ggatcctgtcaaggctgtaagtgtcttcctaacctttttcctggttgttgttatgcatgtttggtatatattatagagttcgtgaacaatgctgctgtgaacggggatgtaaacgcgttggcgcattaagaaaattcgaggtctttctgtgtcaaaatttcttgctgttctatgcgttgcttcagttattgagttgcaaacctgaaatctgtttctcgggagttttcgttctcaatagcgagggtctctctcacctgagagcttctaaagatgttaagtttgattatcatagccttccttatttcgttttgaagttctttgcctcaggttggtatattaaacatcctttgagtaagcagtacaaattgtttcgtatgcggggctcgatactctgattaaaatggcttttttgatttttattccaacagacggct

SEQ ID NO: 115016 - DNA, 1017 bp, Physcomitrella patens
  Intron number 2 from transcript Pp1s161_40V6.1 (locus Pp1s 161_40V6) derived from phytozome v7.0 (chr-ID scaffold_161 ; pos 285331 to 286347 reverse strand)
gaactcgatcctggtgaagcacccacaatccgcaggtaaggcgtaacctaggctggttcatatctgagtgttgtttagggtttctctacggtagcacgttagcattctgtgccaatctaaactatgagttctgaatccattagtacaccacgtttagtgttaaggggaagtttgcagggcacatggtggattgtttaggtgatgtagcagtttctctgctgaaggtgtgcgacttcgtatgcagtttgtagagccgccctggtgtttgagagcgtttgttttgttacctttcctaccttagagatttctttggtgtttgttgtatgttagaatgtgtcagtatgttacaatgttcgacgaatgtgtagagcgatattgtaacaaaaataactatttgtgacacaaacaagtttaagagaacatgtagtggaatcaaagctaatggtttgactcagcccggtcaagccatcactgcaatcttcaacttctctgtagaatcttacacatgtctgatttgattgtactagcaccgacccaatggagctctcatgcttatctagccactgcctttgttgcgcagcgtcacttttcttcttctgaaaagtgccatctccgcacgactacctgatctttctctcgtattcgccatctctaagaagtctacctcttggttcaaagtctcttaatcaggtcatgtttggtttctttcgctggcgcttcagtttgcgatattagtatacacatttcgatagtccgtacaatgatatactaggggatgggtctacttcagacagatgttttgcagttctcacttttgttttatgctaaactgcttctgcagatgtgttttataagttttttacattattgaagggaatccgtctcgttgattaggagttcagaataaaaactgggtgattcttaacatccctgactgggctgagcatgagcggagcaatatacctaaaaccctattactacgctcatgtgtctgcccggtttaggttctgtcgaggc

SEQ ID NO: 115017 - DNA, 636 bp, Physcomitrella patens
  Intron number 1 from transcript Pp1s84_131V6.1 (locus Pp1s 84_131V6) derived from phytozome v7.0 (chr-ID scaffold_84; pos 728495 to 729130)
aaatctctcatcgccggaggtgtggctggtggagtgtaagtctcgcggtcctcatcgagattaactcccttttgtaacttgtaatttgtggttgcatgctttcgttcatgcagtttttttgcattgagtttgagaaatgtatgtcgaaaatgctttcggatccatactttctcttgctggggcaaaagacttcaaacttggcttaaattttggttgttttctgcaagtccgtggtcgtgtcgcatttcaaataaccgtgtctccactcagatggagaataagatttcatattggtatcggtgtttggatggaactgatttggattagttttactcaattgtgatgaatagggttcgctattttatgttcacaaactgaggtatatcgcttttgattacgttatttgagttggttgatggtattcttcagcatatgaagtgtcttcagctgcagtgacttcagtgcttcgacctgtgttcctgagatcgcgacatcgttctctattgtgtctattttatttttttcttttaaaattttatctgctcattctgggggttgactctcaagtttttcatgatattttgcttgtccttgtttgggtgcagatctcgcactgctgttgctccattggagcgt

SEQ ID NO: 115018 - DNA, 641 bp, Physcomitrella patens
  Intron number 2 from transcript Pp1s57_150V6.1 (locus Pp1s 57_150V6) derived from phytozome v7.0 (chr-ID scaffold_57; pos 1101870 to 1102510)
agactgatagctttgcgaggtttgatctctcaatattcttgctcggatctgccatgtttaatctacgcattaaatgactgagagttcactgctgcattattaccaatttaacccaagtttttttatccactacttataaattagctttgaattttatggataataaatttgattttaatatccttagttccttaagcggtaagcacaaagtttggtcagattttactcgccacacttcagccgcgattattcttcaaggttataaattgaactccagattgagcattatctaggccctgacagtgtgattcatttctagttgtcaatattttaaaatgtcgttcgcagttccgatttttcttaaaaagaaagagaggttatatatacatatgtatacaaatagttttttattttttattttttaatatcatatatatatatatatatatatatatatatatatataatctatttttatttttatttttgtatgttaggcaaagatttgtttttgagattgagagttctaatcctataatggatgatcagcagtgcggtatcagaacccgcccagttggagtccaatgttgtgaggaccattgtttctatatcctgaattgtgctcctctgtgacaggaacg

SEQ ID NO: 115019 - DNA, 938 bp, Physcomitrella patens
  Intron number 1 from transcript Pp1s74_61V6.3 (locus Pp1s7 4_61V6) derived from phytozome v7.0 (chr-ID scaffold_74; p os 350292 to 351229)
cgggtcagttacaagcgcctgtgcaaagtgagcactgagtcggaactcggtttgagtctcgttcattttttttccggaagtattttgtcaacttttcgtggatcaagtcgagtgcgcttagtgcctaccttgggctttgtactacagatccatgcgttttgtgggctcatgcacggttcatgtttggtgacagcaagtgttgatgatttgcgtggcactttgctcgagctgtagctgaacgctgctgttttcttgctcttaggtttctgaagcttttggaaggtgtgacagcccttgcatctgtctgtggttcttggtgtggcttttccggtagaacccaatttttatatgtatttttggatgagagggatttgctccgattgcatctgaactttttcacgttttcttttggtactctcacaagccgagcatttcaaaagtcgcaagatttggctcaatgtgacaaatttatacgattggttcattttcttttctttaattgtagcgacttgggggaattatttgaaagcaattttctgtcctcatgttattgtttttttcgctgttggaatgggagggtcctgtcgtccgcctgctcagatttttgttcgagtccgaggtgcgtgggttggttctgccgatttggttatgcgattcttccactgagcggaacagaattaactaatttttggaaacgtagtcaactctgtcattttttaaattttaatttaattttaaatttattttcttgcttcacttgctgcattaggcgcctctgctcaggatcaccttccgtctttagttcttctctgtggggattttaattcactttttgcgaacaaccattataagattcccgtgttttttctgtgctgctgaacacgtcctttgccgctattgtagcagcttttttggaggaataacgggacttaagcaac

SEQ ID NO: 115020 - DNA, 283 bp, Physcomitrella patens
  Intron number 2 from transcript Pp1s38_221V6.1 (locus Pp1s 38_221V6) derived from phytozome v7.0 (chr-ID scaffold_38; pos 1282519 to 1282801 reverse strand)
gaccacgcatttttcatattcctcataaggatcaggtatttttaccttattggcgttaatcgatgtttttactttatcgatttgttggcttttcgtatgttcaatgtttgttttgttttgttaatttcctttttctatgagttttgcaaaacttagcaatgaggtagttggtagcagatttcgatagttttgagttattcttcatccttacagtggtcattaactcatttgaaaatcatgaatgacaggtttatcagccgtccgaagaagagattcgtctctt

SEQ ID NO: 115021 - DNA, 368 bp, Physcomitrella patens
  Intron number 2 from transcript Pp1s238_32V6.1 (locus Pp1s 238_32V6) derived from phytozome v7.0 (chr-ID scaffold_238 ; pos 390075 to 390442 reverse strand)
gcgaatactctctctttgtacaggcaagtagtacactatctttgatatttttctttgtgaaaagctgtaccgtatgtagaaggatagtttttctttccgtataaaagtagggtgtaaaattcactcttcaggtggctctgttacacggaaatatgccggctaccattaatagtggcatttgtccgtagtgtcaaaccttgtagaaacaaataacctcttgtattatgttttttttgcagtaggttaatgtcaaactctctcatttattgtggtgatcagttacacaatccagcccctatacaacattaaaacttattcacagacctggtgatatgcttttaggacagtgaagcggctaggtatccctg

SEQ ID NO: 115022 - DNA, 780 bp, Physcomitrella patens
  Intron number 3 from transcript Pp1s1_206V6.1 (locus Pp1s1 _206V6) derived from phytozome v7.0 (chr-ID scaffold_1; po s 1312288 to 1313067)
cgctctccatcgaaggtggggcaggaccaagacaggtttgttcgagctgcttgttgtaaacatcctttgcatctaggattagaaaaaaataaaaataaaataaatcaaataaactttattttccaccgtctattctaagaacacgaagaaggaaataatactattcagtagtctctgcccccctagatgcgcttttcacttcttaagttctctaagcattctaaaccatcttcgctcattccaataaaacatcaagtgtgcgtattgacggtgccaattgtacttgagggttatgacttctttatcttgatttagttcagagtgttcacaaaatatatatatatatatatatatatatatatatataataaaataaaataaaagcttcaaaattatctgtgggcagaacatcggtaacccattcgcatgtgataatacttttcatgtaccgtaatgattccataaagtagcgacatcgattagtctttaagccaggtaggcatgcggtcggtctggtttgaagatctcatcatgccgacaaagagtcgaacaaatattgacatgcattatatgtttccaatctgagtttgaagtctatttcaattgttggtaacaattatccagattttatgcccatcgtttcggtcagctccagttcggtcgagagcactcttctacgagttctgtagagcgatgggatccgtaactaacaaactgtctcgattggcaaaatttaccgctacagcaaacgacgaaaaacttcatcacacagaaagctca

SEQ ID NO: 115023 - DNA, 434 bp, Physcomitrella patens
  Intron number 1 from transcript Pp1s344_24V6.1 (locus Pp1s 344_24V6) derived from phytozome v7.0 (chr-ID scaffold_344 ; pos 154531 to 154964 reverse strand)
gcctggctacaaaattgataacagcaaaggtgcaaacattcttctatagtcacgaaactaatactaaaaaaattaattcgagataatactaaaaccatcaattattattgcaatatatcaatatttcaacacatggtgatgcacatctagaaaatgaataataataataataataataataataataaccacttaaattgatatcacactcattaagttgataagtatcttacttatccctaagtatactttgatggtttgtttgttggtttttatgtttgtattaaaacttaatttttttaagtttttaaaaaatggagataaaattgagcactatctgttttcttattttttttattttttttaatatagctttaagctcaaacttgtgtgaaacagggccgattcaacatcaaattatttcaatcgctgaa

SEQ ID NO: 115024 - DNA, 534 bp, Physcomitrella patens
  Intron number 2 from transcript Pp1s65_153V6.1 (locus Pp1s 65_153V6) derived from phytozome v7.0 (chr-ID scaffold_65; pos 842433 to 842966 reverse strand)
ccttggctcgtctgttgccgttcctcgctgcggtatgcatgttcaactttgaaatggaatcgtgcaggtagaactagtgttattgttatgagttttagcagtaattatgatccattgctacgactgtaattgtaaggcactaggctagggcttagctccattgtagagttcacatctcgatatacgctgcaattattttgtcgctatgatttttgactgcgaatcgaagcgctatcgtgaactgtctgttacacctgcatacaaagttgtgtcttttttagggcaaattctgctacattgtaccatcacccgaggtagtatttattgctggtcttaagcgcgcgatcgtcaagaaagttgtcgattagggtttccttttaccttgcccatgcactctcacatgcgtccagtagaggtactagttagttgcttctctcttctgcgatttttcaaaaaggaaaaagagaaagaaaattcaaaaggagttctttttggtgtttgttttatttccaggttgaaaagagcgagaaagat

SEQ ID NO: 115025 - DNA, 830 bp, Physcomitrella patens
  Intron number 1 from transcript Pp1s115_10V6.1 (locus Pp1s 115_10V6) derived from phytozome v7.0 (chr-ID scaffold_115 ; pos 60293 to 61122)
cgcttttcccatcacgaccgaattggagttcacatgtgggcaatcgctgtcatacttttccctgatacttcagtgcaccgaacgataattttcttgagaaattcttgtagcaaccatgttggtagttgatcaagcgagttctagcgctcctagagtgcagtttagtcaatttctttcaaattgtctgctcctttgacagaactacgttgtcagattactgcttcgggcttttttcttttctctgagggagccggcttccacagtggatttgaagcggccttatgcgttttgcagtgaatacttattttgaagcttatgattactggagcgaagaacaaggtgagagaaggacatgagcacacgaagctggaagaattatagcaggattgtagacaggtggaatttcagatgcgctcgagtcttgatattgaagtatggcactggtggatacagattgaacgctgttttggattctggactccgctattctgtgagcttttgattgagacatagctttggcaccagtgcacgaagccaataccattgtcttctgttgttatgagaagtgacatctcctgttttttagttagtgaagtgtgcacgtcagtaagttgcactcacgtcaaagaggacttaacaactgtcatacattagaaaaagagatctgggataatttatttgatagagctcatcaggaaacgcatgatcacgagcaaagtgacgctttacctcggagaagggcacaagttccgctgcacttacatgctttggtagctacactaatatattgcgcaggccttggagaatcttcagcagtgctgcgcgtaata

SEQ ID NO: 115026 - DNA, 857 bp, Physcomitrella patens
  Intron number 1 from transcript Pp1s1_248V6.3 (locus Pp1s1 _248V6) derived from phytozome v7.0 (chr-ID scaffold_1; po s 1609358 to 1610214)
gcacaattgcgagagggtgggatttgtgggcgtggctacaatctttgtccgactggttttcttttggctgcgatgcgcatcttgaatttagacgtgattttggtcgaaatgtgtatatgtggcaattcggcaccgctctctgctgacgtctctagaaattttaaggagatggttaatttttctaaaggatcggtgatccgcttaggaccgtgacgctgctacttaatttatgggatttgagttttgttgttattgttttttttgttggtccagaatcttaagcagctacagagtacgtgccaggattacagaaacctcgagcctggaacctagtgcatctccttagtcgaagaatttcactatgactgctactatgtgtacttctaagaccggatttaatgcgtgattgggcataaatgaccacagatcttatgcgttgttggtacgactgttgcgattttattttgttttttgtgtgagaattgtatgcttacgttgattgtgtaacctaattgcagatttcagtgtacgtgttcgaggatgttaattagcaaatggaaatgacctcgtaatgcgccccacttgtatgcctttccctagtgtaaatattggttttaataaccagtgtgacgggttcatgtcgttcatcgtattggtttcgttaagatacatgtgttcatacgctggtttgacgattagtttttctttagcgttcaagatcttctttgcttcaataccaatatgtgtatgtgtagcagcagcacactgcgtttcataatacaatccaaatggaagttgatcgattttggcgtatgtttgcaggtcttctgattggcaattgttgggagaagttttgg

SEQ ID NO: 115027 - DNA, 990 bp, Physcomitrella patens
  Intron number 1 from transcript Pp1s215_23V6.1 (locus Pp1s 215_23V6) derived from phytozome v7.0 (chr-ID scaffold_215 ; pos 76282 to 77271)
tgctactgctgctactgctgcggcttctcccgctggtgggtttccatctcgattgctcccacgattgatactgcggtcggggctctgattttttgatttttttgatttgtttattgtatatattttttcctctttgtgtgtttgtgttcagttgtgtgagcgatgaattgtaatcgccaaacctagtgcgggagggttggaagaaaatgtgggagagtatggtctagtggtttcgagaatcatcgcacttgatccgggaggtcttccttgtagagcaaaatttggagctttgttgtttaggcatttttagcggacgtagcggtatgaaacacttaaacacattgcttgtgttttgggtgccactagagattggaaatatgatttgctgaggaacgacggcgtgaatcaatacccggtagttacatttcctcagatggggagagctaatgtcttggattttccctccaccttctgtttgattatgatcagaagattcatccccatctcatctgcaatttgtcgagcccagacaaggggagcagaagccaatgcaaggatattttaaatttgatgagccgttggttgtgagatttcagaggggtgacagttatggtggtgattggacgagtctttcttgctcaggcagtttttaagtaatttgtgttttttcatgtttaatgacattaacgggtgtaatagttacaaaggagcagcaattttggaggtaaactgtggtcattatgaatacacatgtagttctatagtaggtcggtatcctgcagctagatcaagaagttgacggtgagtccggaaaaatgttacagcttgtcatcgttaatataaagttcatcaagtggttatatgtttaacacttccttatgagatggttgaggaatttttcttgagtgtttacaaatgtggatgaattgtgttgaatctggtactgcacttgtaggattgaagatcaaggttaaggcagcagtgggggca

SEQ ID NO: 115028 - DNA, 898 bp, Physcomitrella patens
  Intron number 2 from transcript Pp1s88_41V6.2 (locus Pp1s8 8_41V6) derived from phytozome v7.0 (chr-ID scaffold_88; p os 245026 to 245923 reverse strand)
gacgaggcttgcgaggaagcggaggaagctttgaagtgagtcgctgctctttaccctttcctgtgcaagcctgctttagtttagtttctcttccttggaagcggatggtggtagcctttgccccttttttttatggtctagtgttgtagcttttggaactgcctcggtgagtgctgtggtgggttgtggaattcttgtttagagtaaacagattatgggcgggcgatgcaaatgattcttgcgcgtttgtactgcacattgcctatccaataagtcgttgcttgagagtcgaaaaaacacacatgtgtcgcttgtttcattccattcactggcattataaatctttactgctgcatatctttacttctcaaaaatctttggtgaaattggatttttcctgctcgccgctggataaatcctccttatcctttggatgttttcgttgaattgccacttctggagcacagttattagaacgaacctcatcatcagtaacagcactgattgcctgaatttatgctgcataacacggtcttaattacataatcttcatcgcccctgaccaacttgatcaagaacacttgtatcatctggatctttgttacatctgatcagtccgttttgtagtacattcatgagcagaatcaaacataggttagtatacatataaatatatatttttaatgcaaaaatgcacagtaactagtcagatatggagttcacaagtaagcattcaggcatactgagtctatttttcttagcaaaacaggagtcgaatgtcaaatatatgcatggaaaaggccagcaatagtcattatcattcaattagggtttttaaaagggtaactgaatgttggcttgcctctgttgagtaggctcttcctccaaggcaaattcg

SEQ ID NO: 115029 - DNA, 882 bp, Physcomitrella patens
  Intron number 1 from transcript Pp1s169_155V6.1 (locus Pp1 s169_155V6) derived from phytozome v7.0 (chr-ID scaffold_1 69; pos 857965 to 858846)
attatcagctgaaggtgatgacgccctcctgtgccccatttgtgtcattctcgcactgtgtttggtcctgggcaggtttacaatgggatgagtacgtttctaagaatgtttgagtgtgggtgttgcgtgtttgggtgcgaattagaggggatgggattaagctgtccttcgccggagaatgagcttgagagatgagtgttgcgcagcagcaggcttttcacacaccgccgttgagttttttgacggtctacctgtgattttttggtaatttgcaagagtctttttttggtttttgttgctctctagtggaacagatagtttacactgagtgcagcgaatttggggttacgaagactgggtcaatgtgttctgaagctactactgggtaaattcgattggggattgagtgaaatggtccattaaatttggggtcctcaaaacccattggttgccacgaggaagcaagaatccacttcccacatcgtgtttgttgccagagccagggaatggaaggttttaaccacgccttatttttccatatatctggcacattttgttttgagtttgcgaatgaaaggaaaactttctttatcagaatataggacgagcttttgggaagttgggaagtgaataatgggttagaatattgactctttggagctaatgaaataatgacatagccttggttgtctgttgtatatttagcatgcattgaaccatccctcatcgtgaagccgcatcgttctgctgctaggaacaatgtcattgtttatattgtatacagtacacatgcatgagcattctggaattgtaatggaattaagcaagaaaatttagcaacagtgttctcattggccttacggtctttccagatttcgcagt

SEQ ID NO: 115030 - DNA, 506 bp, Physcomitrella patens
  Intron number 3 from transcript Pp1s59_351V6.1 (locus Pp1s 59_351V6) derived from phytozome v7.0 (chr-ID scaffold_59; pos 1812873 to 1813378)
ggcaacaggactaagccttgcactaagtttttcaggtaaatgtgattttaagcttgagttttaattatgaatggttgaacctaaacgtaccggagaaggattttgccaattaactcccttcctcaaaacactgagacaccgacacggcattgttccaactatatatgtattttttttgtcccttcgcccaccacccctcttgttttgttcagtttggttttttttgagtgaggttttttgtggtttgaatttcgtttttgaagtttacctcccaaattttataaaagcggtcgaaattttgtaccaaaacgctagagtttgacaattcgaccttttgtgctctcgctgtaaagtttgatgcatcatgcataccaaattggtcggaggtctgagtcaataacgtccattgcttcttttttgattatcgtgtcttctctctgaaatacatcttggtgtttggtggttttgcagcacatctggttgtccatacggtgaaggctgtcact

SEQ ID NO: 115031 - DNA, 885 bp, Physcomitrella patens
  Intron number 1 from transcript Pp1s48_175V6.1 (locus Pp1s 48_175V6) derived from phytozome v7.0 (chr-ID scaffold_48; pos 1258774 to 1259658)
aagcagcaaaggtgtcattcttcatttcgttgctgcggtgtagtaaccgtgtattgcgatgttcctaatttcttccatgtggccattgtgtggtggtcaaggtaagcaaataagcagcgagctcgtctacgttccttctctgctgttatcgagcatcgaggggttagctactacgtggaattgagttgatcggaggcgacccaatttgaaaattgtctccagagagaagcaagttggtattcaagcgcagcaaggaagtatcgtcgactgaagtgtgtgaagcttgagcatcgtctagtgtcaatgacaacatcaatgtgagcaatttggacctgctatagaggtattgctgaagtgggtggcaagatttgttggtgatggttgatgatgtctaagcaaaggatttcttgcacggtgtgcagagaatgaccaggcagcggattcactagtgtctattgtatgttccactactaatgtggcgaggtgactatattcattgcaactagacttgttgcaccactgcacaaagactcaatcctcacaattcttccttgacaacaatgttaacatcttttgatttatcttacaacaacctcaatggtacgatccctccagaacaatctctccagaattcatctccctgacttagtttagtagattaaacttctcttttaataatctgagtgtgaaaagctgtccacaaacctatgggatgcttgaacctcccttcatttggagaaaattctctgttttgtggaagtcatcgacattgcagtggaagccgccgtggccttttgtccttgtgtttttttagcacattaggttcttccatgagcacaaatttgatagaaaagcacatataatccacgtcacttagttggttct

SEQ ID NO: 115032 - DNA, 579 bp, Physcomitrella patens
  Intron number 1 from transcript Pp1s16_17V6.1 (locus Pp1s1 6_17V6) derived from phytozome v7.0 (chr-ID scaffold_16; p os 92420 to 92998 reverse strand)
gggacttgatcctcgagccaaagattgcatagcaggtgaggaattgttcttctaccttttgtttatcccagtgctgcggttcttgttcttcgatatacttggaacgatcatcagtgttgatttacagtacgttgaggcatcttgttgtcaccagaagctcaatcccgtcttttgtatatgtgtgtggaggtgttttaatattagttttaactttatatggttttccttcttcccttgtagtgttcctctgacagttctgatcaaaccctccccctgcatccctttcaatcaatttatttgattgcgcttctatccagttgattagaatatgaacattctgctccttttccacgtggcagtatgacctagtcatatttgttcttggagccaggaagattcatgtctctttgtgggcgaggtggtaccggatgttctactttcgcaacaaaacacttcgagtcgatgccgtgtgtaggtgttgtggagtgatgacgtggagtctctcgaactagtctagtgtcaaggtttttcccctgatcaaacgtacatcttattcattgcaggagacgggggactgtt

SEQ ID NO: 115033 - DNA, 915 bp, Physcomitrella patens
  Intron number 2 from transcript Pp1s45_237V6.3 (locus Pp1s 45_237V6) derived from phytozome v7.0 (chr-ID scaffold_45; pos 1824131 to 1825045)
tgcaccttaaggtagcgctcaatcgatcggtgtgttcaatctacatgtgcttcactgtttggggcgcggaaatggccatcattgagttcgtgcatagatgggtccaatttctaggccagtctttccacatattacgtgttggggttggtgtttctttgctgagtgtggcttttttggttttttggttttttggggttttttttcctcgtgtgaaggatttttggagtcaaccatgtgaaatttggctgggttctgaatcaaggtagtagaagcggcaaagttgaaacaagcaatttgtttgatcgatgccgattgtgttgatcagcaagggtttcgcttacggttcattgtcgttgccgtttcgtgccttttctttgatcgaaattcaagctccgacgattagaaattggtatctctatgtatttttggtctgaaatcaacatcgagttgtccatgtggcggatgtcacaaagttaatttcagtttggctagggtttccctgctctaaatatatcaacttgagacttgatagttgtgagaaaggtatcgatcatgaatgcgaagattagatgtgtattactggcttctggagctcaattctctgtttaatctctgttgtatacatcagtacttagatgtgtgtgttttatttacttatttttgagttataagtgactgaagtgctcttccttaagtcataagtagagcctttatcttttcccgctattggctcgttacatggaagttcctctagctttccccaaggacccttccataaactacattctaaaaggattagaatgtaatgagtttgtatgctctttttaaggtttcgatgtgtagtcgttgctttgaaaatggcacattcatgcatcgtttgtaaccggtctcctctacagggagtgctgtcggagg

SEQ ID NO: 115034 - DNA, 305 bp, Physcomitrella patens
  Intron number 1 from transcript Pp1s78_27V6.2 (locus Pp1s7 8_27V6) derived from phytozome v7.0 (chr-ID scaffold_78; p os 194822 to 195126 reverse strand)
cacttcagatacacacagctgacgctgccttaatcgtgagttcttgacattccatgaaagatttcaacgtgggctttgagtttcaccgtaattttgaagatgtcgaagtgtttgatgggtgttggatctctcttggttgacatgcgaagcattgatggaggattagttttcttttcttttctttttggggttatgggttttaggtttctgtaggatattggtgccttgattctatattttgtgggactgaataattgtcattattgtcaggttttgtttttggtatcaggtgggctcaacttagt

SEQ ID NO: 115035 - DNA, 618 bp, Physcomitrella patens
  Intron number 1 from transcript Pp1s135_101V6.2 (locus Pp1 s135_101V6) derived from phytozome v7.0 (chr-ID scaffold_1 35; pos 772855 to 773472)
cgtgttcattctagggattgcgctcgtgcgtgaaggtatgctgctttgcttggatggtttgggcctttggtttggtaagcgtaggtcttcgtgaggtctagactgagaggtgtcgcgattgtttttttttttttttttttttttgttattttgttttttttgttgttgttgttttgagcggttttgcaagcagctataatcgagaaggtttcttttctgcagtgattgcatacgagcatcacggtcgtcccctcaaaaaattactttttgtgtgagtacagggagagggatcggtcgttattgaacttgtggtgttctcatggacactcaagttcggatttttgaacttatcgctaatttcgcctgggatggcgcttatgtgtgtcgtcatggaccttgcagcacaaatttcgtgtgatatccaagtagcgtcacaggcgttcgggctgcacgattcatattgtttcttatgagttgtttagcctcatgtggcgtttcattgtggtggtgtgacaagggtctggcttctgtggaatgcttttgattttctgagtttacctttttctgttttgtcattctctagggttttttttgtccgctgggtatctatcatcaccg

SEQ ID NO: 115036 - DNA, 866 bp, Physcomitrella patens
  Intron number 1 from transcript Pp1s351_49V6.1 (locus Pp1s 351_49V6) derived from phytozome v7.0 (chr-ID scaffold_351 ; pos 367423 to 368288 reverse strand)
ttgagcagggctgaggtgccgctgctgctgctgtggtgagtatttctccgccgagtgtgtgtgttcggaggagagggagtagattcgtaagaatgatgagtggtggggaaggcttgagtgcgtaggttttgtctttcttttggtagtgaagggatctgtgtctcaagggttgggttgagggagtttgacttggtaatggcgtttatttatttatttatttttttaagttgcctggagtgctttggtgttttcgttagatgtttttatcttagagagggttagggtaagggagaggcgtggtggtgatctttgactaggggtggagctagcgtttgggtctgggagtctatggttcggggattatcgtaaaccagtgaggattttatgagagaggtggcttggggtcaagtgtatgagaaaggtctggtgtattgacggcgggcaagatgggatttagcagtttgatctttgtttgctgtgcttaatgccttttggtgtttttatttttgtttattttcgtgttctcgaaccatgggtggctcgctacaaagtaataagtcgtccatttttcttctgattagcatagcgagtgtgtcggtcgttcagatgcttcaatattgaaagatgatggtggtgagtcggagaagaattggtatccctgccctggcttttttgttgttatggtcggagctccgcacttcttgtttactgtacccagtttgcagctggtattcttgcaattttactgttaccttgttgtgtagcttgttgctccaattgaacctttgtcgtcgccggggattaactgtgattcatcccgaattttttcagatttgacgtaatcacgtgttggttgaacattcggt

SEQ ID NO: 115037 - DNA, 613 bp, Physcomitrella patens
  Intron number 1 from transcript Pp1s323_51V6.3 (locus Pp1s 323_51V6) derived from phytozome v7.0 (chr-ID scaffold_323 ; pos 296909 to 297521)
tgcctgggtcggcccatcgcctgtttcctttactggttggtttctgggccacctttcatcccacccccctcccctccattgtgagccctatttacctattttgttagttatgcgtaccttgaggcctggctgatgtggagcttgtgttttgatgtttgcaaattttgaatgtgttgtcacatcagttgtagatgttggaagggactatcgtgtagtggagtgacttgagtccggtacatagcatggcggtacgggtagaggtgatggaattcatgattattttgtactaagttagggaatctttaggaagagatacattttcgatgaggagtcacgtatagttgtcaatcacattcaaaggattttttttgtttattattattatgtaagagaagaataaaacttctctgacattcagctggtggtgagtgatgcacgcactgcacaggagcttgactgccgaatccggttaagactcacatttattataagatgaacaaaccacaaacaaaatgctagtgataatatgttggacattgtcttctctggtgtagcgatgaactccgctttcattcctcccgtaggctttgagacgggcatcgcgtgttgcaga

SEQ ID NO: 115038 - DNA, 688 bp, Physcomitrella patens
  Intron number 2 from transcript Pp1s100_246V6.1 (locus Pp1 s100_246V6) derived from phytozome v7.0 (chr-ID scaffold_1 00; pos 1364572 to 1365259)
gcgagattcaatagaccctacgtcagtatgattgtgtattctcttgagcccctgctttagatctgctggttaaccaccatttggtggtcgaagagaggctgtaatgaactgttgcttgctccccctgttttccctttttgcttgggagttcaatgttttgcaacatttctcaatgttttcatgtacggcttgagctcatttaaatctgaagttctaccttactttgcatgagaacatggtgttcaatgccttgactgttgatgtagataaatacagttattctatttaagttagaagttgaaagctttttagaacatcttgtgtctcgcacacgttgaacaaacgcttatattgattaatgacgtgtcaaaattgttggtctgcctatctctatgttgctgtgagttttaaaagtggtcactcgtgatgacccttcgtagagaacggaagcatgtgtagcttatgagtgttcagtgtcttcttatctgtacattgcacatggtgctgtaattctggatatttattgatattattagctatcttagctgctagttttctgagtttcttggtgcgagttccatacctttacatctttatgtttgatatttatcatcttatgattatagttactggttttgcttgtgtatgtccagaattcagccttgcagaggtgagttgaatttgtcta

SEQ ID NO: 115039 - DNA, 845 bp, Physcomitrella patens
  Intron number 1 from transcript Pp1s1_819V6.1 (locus Pp1s1 _819V6) derived from phytozome v7.0 (chr-ID scaffold_1; po s 5021650 to 5022494)
tgcgcctcactgaaacacaattggctggtgaccaggttgtggcatgatcctcctctgaaggactcttttcatgaaaatacgtgtataatttcttaagcatacttgactatcatgtcaccgcatattttgaacgataggtccagtttggtactggttacaacatttacgagtggttctagagttttgttaaaaatcagctcataaaataccaacttgtttttcattaattttacaaggagcctactgatattttgagtatcatgccattagcttgtcacaggtcgatagtattctggacaaggatggaaattgcaaagtccatattctttgatctgaatctcgattgcggatctcactagccacatgtcgacacgaggctcagctttgaagttgcacaggaaagttgtccgtgacatgcagcatggagtcgaaaacgaggtattactgaatggtcgtgaggggctgcaaacttagcgaacatgggaatgtgtcttcactcaagcaaactaaatttgaggaccaaaattattcgccatccgaatttgtacggcacacaagccacttgaagagataacaagacgtgattatttcgaaacgacaataacacgctgtggtcggatttgttgtcctcaaacgctcgacaatgctccgaggtggcaagatgtatttggaaaggtgctgtcgcaggaaggggttcgagtggaatgaaagtttcttattgattgcgacgaaatttcggggcaaaaaggacgactatctgaatccactttatgacaatcttcagggccgaggttcgttcctcaatgtgaggtgtcggcgaggaaaaagcaccttacgacatcagg

SEQ ID NO: 115040 - DNA, 622 bp, Physcomitrella patens
  Intron number 1 from transcript Pp1s3_519V6.1 (locus Pp1s3 _519V6) derived from phytozome v7.0 (chr-ID scaffold_3; po s 3026819 to 3027440)
ctttcgcgacgctgacctccttgcatcgttccaaagtacgcggtgctgatggctttgtaactgcgcttccaagttttagttttgatttttgatttttgattttttttacctgaatttttaagtgaacacagatgatgtgttgcgcgacagattgatcatgccctatttcccacgcaaaattttatgcttgttctgagtgcgtactagaacaaagtatagtgtatgggtccttggagagagatgagagaattttgaggatggaaggagagtggaaatgcggggtgtcaaggaattccttgtacagttttaagtcagctggtcttattttctttggctgcattgcttgcgacatgcaggttttttattttttacttttattttttcttttaattctaatttttttgaagttctagattgaactggtttgcgatagttggatacttgaagattggaatgtcaagccctaaagtccctgcataagttgagtcttccctacagccatgacatgtgcgagcctgataattgcataacagtagtcgccctgggatttaatctttgtgaccggtttcttcgcacgctgcttgcagacagctgccaggattacaatcgacagagcgtgccg

SEQ ID NO: 115041 - DNA, 870 bp, Physcomitrella patens
  Intron number 1 from transcript Pp1s133_10V6.1 (locus Pp1s 133_10V6) derived from phytozome v7.0 (chr-ID scaffold_133 ; pos 89400 to 90269)
tcaatttggtgctcggtggcggattcttcgttttggtgtgtggctgctctgctcctctgcttcgtgtccgtgctaccggtcgatcctgcgtcgtcggaagttttttctttttctttttctttgtggtttctgcagtcttcgtgaatggaatgtttgcgggaaagaatggaattaggaactactcggttgtgatgtggcggtctgactgtcgtgttgtacggagctagtgatggacctctgctcggcggtggtgctcagttggcagagttgttgctgtggaggctgctctcgggttgtgcggccaattgtagctctctttgggtttattaatttgtgctggtgatggaatgtctcaattctttgtttacgttcaaaatttttttcgtcgatgtcactggttaatcgttttgttcttgagatgaaattggacatgtgtgtggatttcttctggtttgtaccccaaattttgaggtgtgcatgaccgcgtgaaagctcttcttaagctttcgccgaacggacggtcttcaatttcgaggcttacttactctgaaacacgcccctttccttgtcgaggtgcacggaattgttgctgcctttaactgacgtgatatcctgagcttgcagctttagacggtctgatcgtacaagagctttctgccgagtcattactctttaagtttcgctgagatcggacgtgttgcctcgtgttcaatcgctgccttttctctgcgtagttgccatcattttacagttgatattgtattttgtggttgttaatggcgcgatttgattatgccggaagaagtcaaagctgatgctgcatggttttttttgcgcaggtcgagtgtgccttcgtctctctctagagat

SEQ ID NO: 115042 - DNA, 564 bp, Physcomitrella patens
  Intron number 1 from transcript Pp1s36_25V6.2 (locus Pp1s3 6_25V6) derived from phytozome v7.0 (chr-ID scaffold_36; p os 162451 to 163014 reverse strand)
cggaggcaagcaggaaggtgatgtcggatcgttttgtctaccgttgatgtcatgaatctagaattgtgtgcgggcatttcgatttttcacatacagtagtaatcagctaaataggaaattaactaatcacacttgctgttcttctgagattctctgacgcactcattttaaaatatttagctctttatttatttcttttatttttatcattttgaaaagtgaaggatactttggtatttcccatcacggaagttcaatgcctgtatttgaattaagtatttaatgaattcctagtgtttcttttctgaatttcatgtaattattttagattgacacattgaaaaatcagatatatattcgcatatgcaacatatatatttggatatataacatatatatccggatattgttgatttatttacgtgttattatttagagtatatggtgcatctcaaatacgacaacttcgtgaacgcttgcattggtcttcttaacctggttttgttgttgcttcttttacacggtgcaggggaagaacattctttgttgattgggagattttat

SEQ ID NO: 115043 - DNA, 762 bp, Physcomitrella patens
  Intron number 1 from transcript Pp1s100_61V6.1 (locus Pp1s 100_61V6) derived from phytozome v7.0 (chr-ID scaffold_100 ; pos 333396 to 334157 reverse strand)
ctccatctggtatgtcctggtgctcctcgttctcgattcgtgtccgattctctgtacgatgctcttcgatcgtttcctgcgtgcagttgtttcaggtggaacttgatgatttcgcttgtggcttggaggtcgtttacctggggccgtataaatgcttctcgttttgtgatatgcaggatgttttgggggaaaataattaaagctgtaatcatttgtggacgtctgaggtttctagcttgttggtgatgagattcctacgtgttggttgttgcctctgcttgacgtcgtcgtcatgggtaccgatctcgatctcgatctcggggtcacactgatagtcctccactgacgtgtcgaagaattcgatatttgagttctgtgcatgtagtgtgtctgcctgctgggtcttgtaaccttttctgtttcgactttggattaggtcttctctgaattttggttttcaagcttgtgttcctcgccgctttgggctcaaagcgccagatcaattacaatgtatgtcccaattatgtttgagatgctcgacactttggatcgcaacatcggaagttcacatatcttgttcaaagtattacatagcgtgagatgcatgctccccatatatgtctggatgtttttagcgttatcataatagagttgcatgcttagtagtacaatggatcgtctaatgcgaccgatttattaggtatctccatttatcggagaatgataaagaatgctcttgtgtttgtttggcaggcgcattgg

SEQ ID NO: 115044 - DNA, 328 bp, Physcomitrella patens
  Intron number 3 from transcript Pp1s13_206V6.1 (locus Pp1s 13_206V6) derived from phytozome v7.0 (chr-ID scaffold_13; pos 1360762 to 1361089)
tcgtatgtgttactattccgacaccctcctgctccgtctaattctcctcttcaaagctgaagataatgataatttccaagcagaactctctaaagctgcaatatatgtgcaagcatcaatttgtcagatatcagtgttattatgaaccttgatagaagcagagcttcaaaacatagctattgatgctctttgattcctctggttgtgcttgaggttgatgagctatattgtgaaatgatttcgttttctttgcacgctctctctcgtgcccaacattcgtttcttagtggcaggcaacactctatcccctactcttgactgctctgct

SEQ ID NO: 115045 - DNA, 825 bp, Physcomitrella patens
  Intron number 1 from transcript Pp1s13_384V6.1 (locus Pp1s 13_384V6) derived from phytozome v7.0 (chr-ID scaffold_13; pos 2440851 to 2441675 reverse strand)
ttaatttccatcctgtacgtcttcttgtcagtttgattggccaccatttctaataaacattctgttcctactcacaacgaatctacaattttttgccatttgggttctttcgggattcgtgcttctgatgtgtttcactgccctgacttggccggaacctgcaggtccctatacttgtgcataatatatccgacagaagttggactttaagtgaagaagattgcatagaatctggttaggtgaagaattctattactctcatttactaaaaactcacaaaaagatacaagctcaagcaagctggcacttccgcgcatacaaagctacacgcatctacaaattgcatgaaccacgagtgtagcgaaaggtgtggccaggagaggcagaagcgaacagtgaacggttgatggagaccagtgaactgggaagtcaagtaatgctcaagaccgtcgctaattttaattccgtgttgttcgtcggggtcatttgatcacaaatgcacccattaaaggtggtcattctccgccagtatccggatactttggtaatcaaagtcaggtcgttcaattctataatgtctgattgacaattggcagatgtgaaaactttgtacacaatggcgcagttggcaggacaatccgccacgttgaatttgtagtattgacgagttcaaatgcatcaccagagaaccaaaaccatgcaatttattgacagctggatcttagatcacatcgttcgttcccgtctttaatgtttgacttcgtttcgaggagggtcaaattctttacagggaaaactggaggcaggatcagcggacccatctcg

SEQ ID NO: 115046 - DNA, 646 bp, Physcomitrella patens
  Intron number 2 from transcript Pp1s118_104V6.1 (locus Pp1 s118_104V6) derived from phytozome v7.0 (chr-ID scaffold_1 18; pos 547673 to 548318)
agccttacagaaggctacttctcgttgaaagctgggcgccgtgatttctcctcccactcgtgagtttatgaaaattatccggctaccagacttccatgacccccttcccgtagttttgatatatgttcatgttcaattggttcaatgttgattgccagctccccgggggtacaagcgtctgtgttgactctatgcagtggctgtctctatcctatctgtttaatggcccttatttttgcatttactcttgcaagttttaagaggcacaggttcagacgatcgctaaattattttttcaggtctataatgagagctctatgaagctggctcactttaatggttgcatttccgccaagtgttctccacaaccacaagaggagatcttcacagcctgtggcgggcagagtctggtgcacaaagttttttttgttattgttttttttttttttttttttttttttttttttttttttttttttgaaaaaaccttgctttctttcagaagttgagtaattgttttctctgtgaaagttcaaatgcggtatgttctgcatttaatattttcaaccatatccaaatttactaagatgtgcctcaccaactgacggctgcgccctgcagggattgattaaattgcgtgattatc

SEQ ID NO: 115047 - DNA, 284 bp, Physcomitrella patens
  Intron number 1 from transcript Pp1s240_100V6.1 (locus Pp1 s240_100V6) derived from phytozome v7.0 (chr-ID scaffold_2 40; pos 622669 to 622952 reverse strand)
ggctccagcttgccaattcctttgcaacaacctgtgtaagattttagtcttcgaatcagcggtcttcctcctgctgtgatggatcctttgttttgttttgttttgttttttgttttttgattttttgttttgttttgttttgttttatttttctttgcagttgtagtgatcgacttctggagataagtaatgtgttttgtgattacggacgcttgcgtgtggattggtgattgtgatatattgctgaatgattgcagcaacggtgaaggcatcgttcgaggcac

SEQ ID NO: 115048 - DNA, 884 bp, Physcomitrella patens
  Intron number 1 from transcript Pp1s105_245V6.1 (locus Pp1 s105_245V6) derived from phytozome v7.0 (chr-ID scaffold_1 05; pos 1355835 to 1356718)
tgcagccccttgacattgccaaaacgattttgcaggtaattgactcagttggaaatctcggtcttagagctgaactggtagttttcttcaggcccacacggaaaacgatccctgaaatggttcagacttttcagagtgaatttttgtacattaggggtttccattttatgtcatttattcttttttattcttttgaattgttttcaacgttgagtgtgatcactgatgtcaattgcttatgaagaattgttgaacaattcaacatgttttggttttggtgcttgaattaggtaccctcgaagactcgctgttagctgacctgcttagaaatgtcgactcgtgtatgtagatgttgtctcgcaatttcaaagctagttttcaacgtgaagttcatgaaattagggtttagggtttaagactttatctcacaggttatgattgaatatcccataatcaaacatgtgaaggaattttcaaagaatgcgtgctattgtgttgtctgactgtacatgaggtgctcttgtgcgtccgtgttgtaggttttgtttccgttcagtatcgtaacttctaattctttaggtacatcacttggagattgtgagacactaaaattgatacttgcgtgtactaggtgatatttctgttaaaattcatatcaggcttagaattttaacttaacatggttgctacttggaattgtttggaatttttcacaggaagggactgccgtgaattttagcaggttatggttttgggttaacactttgtcacgttgattctgattcttgaccctataatttacgaaagagttattttggaattgagtttgtgactgtgtttgagggtcaggcttctgctgaagtgagagggagttacagcaactt

SEQ ID NO: 115049 - DNA, 581 bp, Physcomitrella patens
  Intron number 1 from transcript Pp1s20_213V6.1 (locus Pp1s 20_213V6) derived from phytozome v7.0 (chr-ID scaffold_20; pos 1313140 to 1313720)
tcgagaagtggacctcagtcggaaccagcttagcggtaaatcgatcgatcctcttcaatatgcactctttattgcgcatcgttgaggctgttgaatcacaattaccatctgagtttcttctaccaactcttctcaagtctttaccacatgaatagcatacctgtaaagaatggacgacttgacctagaaactttgaatttagctgcagaagaatgtggtatagacgatatgcatcgttagaagaagtgacaatcacatgttccacagttctagttctaacttgcttgatcaagtcgttaaatactctgccggttgataacctcttgaaccctccaagtcctgctgcttaatccacaattcttcttgtttttttgtttgtttgtttgtttttgttttgttttgttttgttttgttttttttttttttctgtgggaaatttcactacccagcagctgaattgaatgctaatatgaatttctcaacacctccaactcgatgacgcagggtgtgatgattaagcacttgtattttcttcgttattgacttgtgcaggtggcttgggccttgtgactaccaaagtc

SEQ ID NO: 115050 - DNA, 599 bp, Physcomitrella patens
  Intron number 2 from transcript Pp1s35_68V6.1 (locus Pp1s3 5_68V6) derived from phytozome v7.0 (chr-ID scaffold_35; p os 322199 to 322797)
ctatcctcaatcttttaggagatatcttttgtcaggtacttgacactgtcttttctccgcattctactaaaatacgagaattcaggataactacaaagatacgtaatgtccactaggggattgtggacaatcttttgtgcttattacttgagccagttgttttcagtttctgcagaagatcctcactattttgggggaaaatcatctcctgccctttgcgggtacaaaacctgtctgcgcctagcttccatcatctagacgtgtctttagccttcatctagtttggctacatatacctgacgttgtgtaaatttacattttgtacttgagaagattattttggagttgtcaaatctgtctggatgcatcagatgtttccatcttctgacatgagccttagcacagtttagagctggaatgttgatgggagggccatttttctactttttctttggaggggtaattcagatggctgactgtaatttataccacgctgcgaattccttttgatctagcagctggacatagcatttgaattgtattctcatagttgaccattgtcgattggcagttagtgatcgacaagtccgacaaagtcg

SEQ ID NO: 115051 - DNA, 757 bp, Physcomitrella patens
  Intron number 1 from transcript Pp1s5_325V6.1 (locus Pp1s5 _325V6) derived from phytozome v7.0 (chr-ID scaffold_5; po s 2260603 to 2261359 reverse strand)
ttttacttttgtgggggcggtcatcgttatcatcggtgagtagatgcttgtgtaggactaaatttggtgaggtgtgtgctattctggcttgtttaatgttgagatcgtttctctggagtttgtgggttgcagatgtttgcctccgcaggtttgtatttcttgattgggtgtgtgttagttgctagtccgttgaagattgtgtcgattcgttgtgtgtcgtcatcttttaattgcctcttgatattctcaataaggaatttctcccaggaacctcggtggctgattatatgctggggtcgttctcaatcgcttctatcttcgggttggagataaactgatcagttcctcgagatatgctctaaaagtactctacagctagtcatgttcagccgcgtcctatccaattgctttaatttctatgccctgtcatcgctcttcaacatcgatgtttctttgaacttttcccatgccctttccttaaggatctgttcgttaaagctgtattcttgtcctaaactgtaatctttggagaagctaaattgtgacattgtaagtcttggactgcttatcttttacgcatcggtagagcatctctttacgactgctcttggtggtctgtgtaattggttgatgtgtctcatatttgctgcctagacttgttagtgcaactgttaattatagttttttaaggtaatcttcaacgatgcttgagtactacagtgtaatacctttatttgaatcattttcagccgttttc

SEQ ID NO: 115052 - DNA, 539 bp, Physcomitrella patens
  Intron number 1 from transcript Pp1s81_117V6.1 (locus Pp1s 81_117V6) derived from phytozome v7.0 (chr-ID scaffold_81; pos 692667 to 693205 reverse strand)
accccgaggctgctgcctcgcttcagcaagccaaggtgggtctccaggctgggatttgtggctatcgtgaatcgggatcatgaaattgtgactgggaattcactggatccttcaatttagggcttctcgtttctggtaaaattcgtgatttgtgcttgttaattgtattctcgctgaattatgagatctttttacttctggttgagtgccttttcgtgattatggttgttcatgaatcgaggggagttaatctttagtaaattgtcattcaattctgtatattgattggttcaggggtctttgttttgaattggcttgcatgctcgtgtttgaggcaggacattggtgtgtaagtaggatttcgtacttaaaccataatcggaacgaaccctggaaagttgtgaacaggttggaagttaacttggagaaaccgcaacttctttttattatcccttgctaagattcaagaagaatgcgataactagctaagaatgcgataactagctcagaagtgaggacaaagactacttgcgatcaaa

SEQ ID NO: 115053 - DNA, 719 bp, Physcomitrella patens
  Intron number 2 from transcript Pp1s13_212V6.2 (locus Pp1s 13_212V6) derived from phytozome v7.0 (chr-ID scaffold_13; pos 1390543 to 1391261)
gtgtttcaattacttgctgagattacatccttgaggtataccaattactatttctcgccattgttgatgggcactccgatgctctgaaattcctagttgttcttcttcctcctatcgttaacccagccgaagtattcataattggacaggagaatcggttttaaatatcatacaaacaaagtacatatgggtttgacaaacaggagacgtacctacagttttccaattatgcaattccgacccagtttcatgtatcgcgtgcaaatttaggcgtgcaatttgaagaacctgcgcttattgcaagacagataactacagtgtacttttcaaaaaatgtatccatcaggacaattgaatttgtgcccacttttacctccacaaccatgcaatgttataatcaacggcatcacgacgtgtagttaataattcaagtcgcaatttttgtcttcttcgctgtcgattatacaccaggcacctattttatgtttggcgggtaagaatgaaactgttgaacggtgcggggggctggtagagctggtgtttgacgagactaaatttttgatttgcttacaatctacccattcacggcagagagtggtacatgaatgtcaaattgtaagtaggctgtcctgagtgttgttagattaaaaacgatcttgggttggatcattgtctttctaatatagttaccgctcacctctatcgttgtatgtagaggg

SEQ ID NO: 115054 - DNA, 694 bp, Physcomitrella patens
  Intron number 1 from transcript Pp1s391_1V6.3 (locus Pp1s3 91_1V6) derived from phytozome v7.0 (chr-ID scaffold_391; pos 10172 to 10865 reverse strand)
gaggactacgtctgtaaacgtgggacgtcggctaggtggggttgacaatgtccattgcgactcaaagttcttgcttgccgtgcttgcctgattcaaccagcctccttgtgttgagaaagtctctctggttgtttcgaaatgaatcttttgataggttttcaaagttaaaacatttccatgtgactttgatgtattgcgcttttctcttcacccattatgtaagcgcttccaccttgtatcgttttccaacacggtgaaggtgatgacttgcaagagtcggaaggtggcctggatcattcgagtagacaactctctactctaatttgaggcgtgtgtgagaccgtatggttcttgtcaatggtggatagaatcggagagatgttatctgcctcgcagtgtattcactccgaaatctatcacttgctttgtgccttcctcaattgtctgagtgaagctaaatctggtgctcctttgacagggcatttgagtgtatcctttctaaagaccgttttatcggtgacttgttttagctctctatgtgagactctggtaagcgaaagtagcagattgcggcggtaaaggttgggggagccctatgtcgattaagcatgttccgcttaatctcacaccgagcttcggtttcattgtgggcattccagcagatcgtgggaagaccaaggtggcacagcgctcc

SEQ ID NO: 115055 - DNA, 700 bp, Physcomitrella patens
  Intron number 1 from transcript Pp1s274_79V6.2 (locus Pp1s 274_79V6) derived from phytozome v7.0 (chr-ID scaffold_274 ; pos 531650 to 532349)
cctcccttctcttgcagctgcttaggtcagcacttgattgtcacggcttttcgttactttgattgccatgattagtcgaaactttgggaatacatcctgcttaaggtaatgcctcagctgcaatcaatgtactatttacttgtcaatgctgcagtttgcttaagattcaattgctcgcttcccattatcaattctgattgaaattttagaacgagattcgtcactatggaactgccgaacatatttgatttttgagaaaggcgtgtctattgatttttgaagggaaatggtttgttgattaggtgtacactgttcattcaaatctccaaggattcaatgctcaaagactcatcgtagattcaaatctcctgaagagtctcaatgtatcagtgcatgagagtttccaaagtagtttgttcgttaacgttgaagtagaaggattgggttcgtttcagggagagtgttggattccatagtcattgagtcgaaaatagcattctaccaaaagtaacacttgtttgttcaacattgcgctctgcttgtacaattctatgattgaatccacctcaaacactactaaagaactttgcatagtattctttaaaaaattattgtaaatacgttttatgtatgtttctgaacataatttttaactatgacttgagtgattctcagcattattgatttccaaaaactacga

SEQ ID NO: 115056 - DNA, 865 bp, Physcomitrella patens
  Intron number 1 from transcript Pp1s208_44V6.1 (locus Pp1s 208_44V6) derived from phytozome v7.0 (chr-ID scaffold_208 ; pos 170880 to 171744 reverse strand)
cgagtttccctacttccgtgactttcagtcccggcgtgagtcccagttcggcacaagtttctaaattctgaattaaaatttcttgaattccttcgaacttcttgaattctttgtctccatagactaagtttgtatttgttctttgtttcttttgttttttgatgctaaaaaacttctattttaaataattataacactgacgtgaaaaagtattggagtgaaatgcacccacttgcatgtgtagtgaagatccccaaatgcgaaagtattgtggtcagacttacaatcctaaccaagtaacgtattgagggcaaggcgaagttgtgatgtgaggcaaggtgaggcaaggtgagctagactccaagctcgtaaacttgattgcattggaggtgaacctgtgctggatcaaaatttggctgccctgtgttgatctgtttttatttcgaagtgaagttgagacattcttggggcgatttgaatcggttttttatttttaatattttattttattttgtttgttttctaaagtgagtaactgtgctctttcgttgtgtttgaggttgaagtaggagcttgaaggagagggacgttacattgctttgcttattctttataaggtcaactcttgtctactccaccacctacataacatgtaaaacgttgtccaaaactctacatgcttccatgtttgtgtagtgcatggttcccaatttaaatgtttcatggattgttgaaacctagtttaggattgaatttgttttgagatggaattagaagatttgacaactttttggctcaatgaatatggggtttgttttaagcctcttcatggttcttatttttcattcactactgcagtcactcc

SEQ ID NO: 115057 - DNA, 927 bp, Physcomitrella patens
  Intron number 1 from transcript Pp1s129_202V6.1 (locus Pp1 s129_202V6) derived from phytozome v7.0 (chr-ID scaffold_1 29; pos 1062471 to 1063397)
gccggttggtggttcaagttgcagataaggctcaggtgattgattctgctttcactgtgttcagttagattggtttgtgtggcgtttggaggttttcttctcaaccaaaaatttgtccgggcggaggacatttttagtgcacatattggaatatcctaattaccctgatgctgagtctagccactgcggaatcaaaatctgatcgtcgaattcaaagcttttgggttgttccgaatccgctcctctctcatttaggtctaggtcaaatatattcgaatatcagggatgggtgttatcgtagcgaacagcacgatggtaccattaccaagtcagcagcttaagcaattcgaaagcactttctttctcaagtaatagacatcagtaccaggacgtacccggtgcactgtaagcctcattgcgttttcggcatgcggaacgcgactgtgactgcgcgtaagatgaaaactgtagttaggatggtactcaagatgcactatatgaagaaattgggttgtgctgccttactgggctctaaatagcagcaggtctaacgactttgtatttaggtggatctttttgtgaatttttccatttacatatcttgtttcagccaaccacaattactcgctcttcttcttcctctcatgattgtattttaaggtaacgtgtaatttgtaatgaccataattagcaatgtgccgagttgtcttccttttttaatcccacatagaatatctgatcgttttgactagaatatcatcgctttcttgctgcacattgctgatcatttcgttaatccaaaatgttcatgtggcaatttttgtgtcgtgataattgattcttgatgtgctcagttccttttgttcataaaccttttttttcccccattttcacaggtgtgtacgcaacgttcgtggaagcgaccat

SEQ ID NO: 115058 - DNA, 878 bp, Physcomitrella patens
  Intron number 2 from transcript Pp1s17_137V6.1 (locus Pp1s 17_137V6) derived from phytozome v7.0 (chr-ID scaffold_17; pos 819308 to 820185)
cagactgtttcttgcagacgaattactgtcagcaggtgttcaccaatcccctttgcacaatacttgcacctatgtgctaaaagaacaattataatgaatacactcacagcttgcagaaaagtcgtagtctaatttgttagtcgacgtttcaaaatttcagaataattcgcacacgaaaagtttgtctctaaatttgtgtcgttacagcatcgtaccgatgaaggctattgtacatcgacttgcaagcgatttgaacttatccgacagttctgaaacatgttggttcagcgggtacttctgctcactgccacttgtacaaatgcaatcggcaagaatcaaaccgaagtcgtagggcggttaggcttgactagaatatccacttaagctcttttattttctaatgtgctttcaggcgttgtcagacccttcaagtagtaataccttcacaaaatggtgtaaaattaaaacagatcacaaggattacgacctgtatatgtttgacgctctcaaaccaacctccccaccattaccctctcaagtgcagaggaagagcccagctctcgtcgtgggacaagaaattcggataactttagaattgtttaacgaaggtaattgagcattaagtatgcaacatccttggtacaattacttcaggtgatcttcaaataagaaactaagtagcagatccatgtattttaaccgattttctgagtggtgtaatagtgcagccaaaatttcgtgagacatatctttggcgttgattccctgcgtcgcgaggctaactccacgtaattaattgaaccaaacagactaatgtagacgttgattttttttggtttttaggccagggcgtgcttgaagaattcgactaccctcca

SEQ ID NO: 115059 - DNA, 985 bp, Physcomitrella patens
  Intron number 1 from transcript Pp1s41_309V6.3 (locus Pp1s 41_309V6) derived from phytozome v7.0 (chr-ID scaffold_41; pos 2088289 to 2089273)
cgcctccgtaatatcttcttcttcgactactactagtactgttcttctattattattcattattatttcttgccgattcactgttgtgtatggttcctcatgccaccggaaccttcgtttttggcttctcgcagcgctctctgtctctctcttagtcaaaacctgaatcgacaccgcttgctcactcaatcgtcgccttcttcccccagctggtgtattgtggtgtagtggggggtttgatctgtagtgggtgctgtcctgcgaggtgggtttttcgcattgtgcactctctgggatggtttcgtgtgtttgtttgtaaggatgtgtagttgttaaggtgaaggtttgcattgctgtgttgggagcgttgttgggtgtgttttttttgtttagttttgttttctgtttttgtttgtgggggatgagggaatggcgattgaatagtttgagggatttgggactgagctgtgctggagttggcttcagatttgttgtgtgggtgcgaatttccatgtctttgatgagacaaaccgtctgttctgcacattgtcatcccttactaccgttgtttgttgcatcttaaacatcaatcggctcctgtttacgattcgtgtcctgggaagattgggttttctgaagttgactgttttgttcgagcattgcgaacttttcttagagctgtcatactcaattggcacagggttgtgaatttgatccaatgtttcgtggtatgatggaggagggtttggtgatgcgtttgattccttgcttgttcaaggtcagggttaacagaggttttgtatcgctagatttgcatcgcgttggggttgctgacctttcgatatcatcgtgttactaccgggagccgtgtcattgcaaacagtgcgttgattcgtgattgtttgttggttttgaattttgactgctcgttttcgaattctcctaggaactggttttgactcgcgcatttggattcgctgcagga

SEQ ID NO: 115060 - DNA, 588 bp, Physcomitrella patens
  Intron number 2 from transcript Pp1s16_230V6.2 (locus Pp1s 16_230V6) derived from phytozome v7.0 (chr-ID scaffold_16; pos 1848223 to 1848810 reverse strand)
aaccatcgaccggcgagctttttagcagtgcccaggtgagactcttctgattcgtagtgcatggaggttctgtacacgattctaaacactaaatcgtaacttgcaggatgagtggttgtggccatatttcagcttctcctaagacaactttaagttatctgcaatgtttacgtgagcgttaccgttgtttgtttttttattgttgttgttgttgttatcttccgaagcttcagagacaaccattttctttgagagtgtttttttagagtaatggtcttgtccttcatgattgaaatattttatctatagctcttccgattagtgctagagactcccattattgtagattcacggtatcttccgtaggggatgttcactgcacatgtgcttattaggttagacgttgatgatgcttaatcaacactttacacattgttgtctttgtttgaattcaaccacgattagactttttcttaaaattacaggaattgttgtgcattttttgaaggatgatgcgctcatccctctttgcgcgtttgttttcgccctgcaggtcttgtaccaagctgcatccggcgggaaagttga

SEQ ID NO: 115061 - DNA, 538 bp, Physcomitrella patens
  Intron number 1 from transcript Pp1s74_43V6.1 (locus Pp1s7 4_43V6) derived from phytozome v7.0 (chr-ID scaffold_74; p os 276480 to 277017)
caagagcaagccggcttggtcccgtacgtgattcctgaccttttaacgagttttggttgcttaatgttcatctgggcggtttttgtgaaagagttggagatgttgcttccccgcgtttgattctgcagtttttgtttctcattctggaagtatgagcttaggatttttgtttggatatgaacaggttcgaattttatgcgtcaaagatattgtgttcttcagatctgttgctattagggttttcgtttttctttttttcttttcttttcttttcttttccgagaccaattttggagcaggatacagtaccgtcagcttttggaggattttgggttaacgtatttggtaggcttattttatgcttattcaattttgaggatagctgcgggctttaagtatcggcatgatggatgcgggacacattgcttttcggcagtctcttatgttttcacgggaatcggctaactgtagatggcattcatgctgaattgttgagggttttgggattgcagaaagcaggagcggctggagtttttgt

SEQ ID NO: 115062 - DNA, 580 bp, Physcomitrella patens
  Intron number 2 from transcript Pp1s102_92V6.1 (locus Pp1s 102_92V6) derived from phytozome v7.0 (chr-ID scaffold_102 ; pos 599217 to 599796)
ccttcctgagacacctgctcacagagcgatttccggtatgcgcgtgagtgaagctgtgcacatgttcaactcggttgtttgcacatgctgtagttatcagttgtttgatgtcatattgaggttatgaaagcttgggttctcatgtgggttcaacagggttacaaactcctcccaagggttatgtataatcaatgtttgcattcaaactctattggatcactcctgtagcagttgttgtgatgaccttgcagatgccatagagtctggaacgactctagtataagtgtttaataaaaatggaagaaaaatagtaaccaatgtggtggacattctacaatggcttagtctggttttggacttcaagtaaattaaacttagtcagtagctctttgtcaatataaatagaaataaaaataaacactattcatcacaaatagatttataagtgtaattggcatagaattaaaaatgtctttaaatgatgcataaaataattcttgtctagattatgaacaaaagtaaaagtttacatcatactataatacaaataattttgagtctgtttcccgctccaaaactc

SEQ ID NO: 115063 - DNA, 878 bp, Physcomitrella patens
  Intron number 1 from transcript Pp1s180_52V6.2 (locus Pp1s 180_52V6) derived from phytozome v7.0 (chr-ID scaffold_180 ; pos 361078 to 361955)
gagctggattctgatctcagtttctgggtacgagggtatgtgatttgtgttctatttttatttttgttttttcagatgttttgagctgttagagattagggtatggcgggagggagctcacgagggggtagcggtagcagtggtaagaaaaaaaagaaagcgaagcccttgtcgaaagacccagttcgccttgctgccgcagtcctcacgctttccaaatgggcgtcgccgaagatgccctgtttgaacctctcgctccccaaaatggaccttcacacgcacagcacctgcagtaagtcctgttgtttttttttaggtttgcggaataatgttacgatcccaccacgtgctgactctctagcagcttgcaccgttctgaatgcttccttgttgggttcgtagagaaaaaaaggtgaacattgttgcttttaacattattttgactagatttcatgtgtaatgcccgtcgccagaaggattctatgtgacaaattcggagtgtctactgtgttgaaagatgaaaattatcgtcgagggtgatgacagggcagccatttagtctttatcatttaatacctaattggcaccatccataattcttgggggcttagctctacattgttggaagtttccttacggacagaatttgaggtcgtttctgggtaaatagttgaaggcaagtaaccttctgatgtgcatttaaatcccaaatcgcaaatctgagtatgttattttattaactggttctttcttaaatctggtataattagaaagactgatgatcagcgtaaaggtttagccaggactagaatacgtttacagcatcttctgtcgcaaaggatccttaattcaagcaaatcgagtgtgctttgcaggtg

SEQ ID NO: 115064 - DNA, 618 bp, Physcomitrella patens
  Intron number 1 from transcript Pp1s281_10V6.2 (locus Pp1s 281_10V6) derived from phytozome v7.0 (chr-ID scaffold_281 ; pos 35564 to 36181)
ggccaggatatcagtcctcttagcttcattgtcaggtatccaactcttctattttattcgcgtgttcttgtttcccattgatgtgagtcacctggaccgtgcaatgctctgggttcgatgatgatgggcggtgtggtcattcaaagctctttaggaagtgttttgtagttgagaaatcgtgaacactcaccttacgcgatggttccatcttagtggcgctgggccacccaaaatcgctagtttatcattttttgatatcgctttgttacaagtttcattttttcgtaacgaggactgtgctctttttaatgtgccatctttgaattatgtactcgagttgtaagtatacagatgcagattacacaacgttgaattcatttagtgagtctgatgctcgaatacgtggattttctgtttttgggtagcactgcatctcagtcttacagaagattcagcgttcttgctaaagctgttgtcattgtagtaatctgagcattgaatgaaacgaaagtttccatcaagcttaaaatcgagtcttattaatacaatatatatacatttttcttgtgctcccatttctcagggttgagaagagtacacagctgcgagtgtacatct

SEQ ID NO: 115065 - DNA, 820 bp, Physcomitrella patens
  Intron number 1 from transcript Pp1s14_317V6.1 (locus Pp1s 14_317V6) derived from phytozome v7.0 (chr-ID scaffold_14; pos 1922228 to 1923047 reverse strand)
gagcaggagggcttgccggtgtgcagactaactgggtaggacccttttgagttcccctgtctttctgggcgcatttgcaaggaagggtttcgtgttgccttgaagattttggttgttgggtggcttgttgtttgccttcgtcgggtctcgaggtgggtaacttgacatagtggtggtattgtagtgaatctcgaagcgtcgttattagatttgagatttctcacactcgggatgcgtttgggagttggatcgttttttttgattacaattcttggatccagtgagggaagcagggggagtatcattgaaagttttgaagtgctgttgaagtgtgtaaagggcagatggtgcccgaggcagggtgtatttgaacccagtagccacggatccaggccaccggatgagtgtgggaattgcttcctggagcaaccgtgtaggaagttttgaataaagtcgttctagttcgtcttatcgacagcaaggtgctttgatgaggcgtaacggcaacggaacttgtgaagcatttattccaggaatcaggaatgtgcttcactggatccctcaccacaggtttggagcaccaacgtaatgtacaaacgtaaggttgaacgcagtttagggactgaacgtgattattgtatggttttcaatgctcttcttactctctgttgcaatgggcgtgtctagaggagcttacgttggagaagttttaggaagtgttcaatgtttggaatgatctcacttcatttactcttggttggaagaattatggtcgaactaacttctttacagcggccgttattaggatacgtcaacacca

SEQ ID NO: 115066 - DNA, 944 bp, Physcomitrella patens
  Intron number 1 from transcript Pp1s46_192V6.1 (locus Pp1s 46_192V6) derived from phytozome v7.0 (chr-ID scaffold_46; pos 1473126 to 1474069 reverse strand)
gaggtgggttagctgtgatttttgcattggtgtactgctgtatcgcatactgtcatggttgtgatgatttaagtttcttgtggttatgttttcattatcccatgactatcagcatcttttgattcatggtcggctttgtcaatattaatttccatttcatttcatgttatattgttcactctttgcaatattaagtcgagaaatgcacaaaaatgccacatctggatcctgctatatgttatgcaggtagtctagtgtttgtgctttcaacattttttttttttttttaaatgctcctctttgcattataatattaggattgatctactcaaaattggaatccgtaagttttatttttctgtcttggtagaatctgaacaatctttatacatcattgttgaaatttaaatcatcaatagcgttccgcataacctggacatatttatggcagtaacttaacagtgcaaaagaaaatctttcattttttgatgtttgcatatctgttctagcctctgttatcttttggaagttttagagacctaaaatggtatagtatttctactttgttagaagttttggttacagcagaggaagattctaccctctaaatgcagaaatgaatcaagtcattgtgatttacttacaaggagtatcccaaagaagagtctggtttgctcagtagtaggatctttcacttgacagtcatgttgtctcaaaatgtcttccttaggtcataaacatcccctaagtttgtgcacaactttcactatattctctctgcagtagacagtcgttttataagttgagattatcgagaaaaggtcctctctcttgcactcataccaggttttgtcttatgtcgtttgatggttcctaaaatacgtttgtactgtcatttctcaaggcttgtggatcgtaatgatggaaggttgaacatgcaggtg

SEQ ID NO: 115067 - DNA, 783 bp, Physcomitrella patens
  Intron number 1 from transcript Pp1s124_125V6.1 (locus Pp1 s124_125V6) derived from phytozome v7.0 (chr-ID scaffold_1 24; pos 864045 to 864827)
gcggaactcaagatccgatcccctaattcgcccatgtacgttgaggttctgcctttgtaaccatgtcggagttgttggttttgagagtcagaatcttcgtacaaaatttttgttcatgttgctagttatttgttgtgctcgtgggcatgattctgtctttatttcgcgactgcgagttatgaattaagctggttgtgcgaataactgctcattcaattggtaagcttgagatcattcagctctcggctagggcttagttctaagggcacactcctgggcatggagttaggatcaacaggatcttgcataactgaactgtctgcactctgtgcgcgttccatgcattcttctccttttttctagtgatgtgagggatcatcgtccacgagaatctgggtgagtattacaattcgtcaaagcacatcaatcgtgttaagcttttcccagtcgtggtacactctcataggaccgttgtttgagtgtgggatcccaaatttcatctctgacaagatgattgtacgaaacgtaactattgttctcgttgatttcaattacaaggaacatcattccatcagttatgattattttcgactatcttcgaaataactacgttcgagtctattgttttcgtttgattcaaaggtagcattatttggcagaatgcctgttaggtggagtcttgaaattttaggtctttatatttgatatgaattgtagtttttagattgatcttgataaagattctgaaaatatcctgaattaacgagatgttggcctttgcag

SEQ ID NO: 115068 - DNA, 413 bp, Physcomitrella patens
  Intron number 2 from transcript Pp1s13_120V6.3 (locus Pp1s 13_120V6) derived from phytozome v7.0 (chr-ID scaffold_13; pos 896526 to 896938)
ccagagtgctatcattgggcttcatctaaagaaaggttcatgacctatttcctcgaactgattaaagtttcgtttttgtaggcgattttcaaggtacataatataatgcaacggcctcgatcatcagtacatgatcagcattctggtgccattcgtgatgcgcttttgcttagatatctggagcaaactctgtgtaccatacacttcatatggtcgaagagtctccagcgaaagtgagttatgtgcttctgtcagcactattaatctgaatcaaattttatcattggatgtctctattcttgtgaaatgaacttagaagaattgttggaatcgatcttcttttttgcacacatcttagacttcgacgtatgggtgtgcaaggcatcgtgcagctttctttcacaaatctttcc

SEQ ID NO: 115069 - DNA, 933 bp, Physcomitrella patens
  Intron number 1 from transcript Pp1s73_55V6.1 (locus Pp1s7 3_55V6) derived from phytozome v7.0 (chr-ID scaffold_73; p os 234391 to 235323)
aaccaacacaaatccctcgacggggactataaccagctttcccttctattaaatataaaaaacaaagcgagtaactgacaccctaagtaagtgggtatattctattcacgacgcactaggtttcagagtggggagtaataggcactagtagtaaaaaaatcttcaaaggcttattcgatgtttgtggattcttcgatcgacgacatgcccgacaccgacccagcaaagctctctgtctggcacttcgcaactaattgattcaaatcattggcagttaacgtaatgtttcttataatactgagagttaggtcttgtcgggtcttacattgttgtgtgaatccgttagttttagacgtccttgttgaacctacgaagctaatttcctttcaggtcgttgcctattagaacctacccatttatcttataaaaatatcaatgaaattagtaaccttaaaaacactcaaaggagcaaatcgtacacagtcaatgttaagaacttctgaaacgtttcacgctatgttgcgttctttgtttggtatttgtgttaaccgtcctggacagtaaatagggctttgcagcgttcaccacagactggaaccatcgctagggggatgatttgacaacgcacagagccgttgataggtgcatttttcatccacgttaccacacaaagccaaaagagctagaaagccaaagttaagaagaaggcaaaacacaatcttgcagatatgccatcacaatataaattttgttttgtttttctttattttgatacttttttattatttttatatagtttgaacttattgttattttagccgaatgggatcattaccaagagattgggtcttttggggtttttctgaagggccatatggggcttatttttaaagcacttggataattcgtggatgctttttgtgcatgcagagt

SEQ ID NO: 115070 - DNA, 773 bp, Physcomitrella patens
  Intron number 1 from transcript Pp1s19_190V6.1 (locus Pp1s 19_190V6) derived from phytozome v7.0 (chr-ID scaffold_19; pos 1275510 to 1276282 reverse strand)
cagaggggtccctgcgagccattccagaccggaaggtgaacaaagagggggtcactacaaacccaataactccaaaaagactgcctcatcatgctggtgctttggtgcatagttttagctgtcaatccatcaactacttctaggttaatccgacactacatgtttacagcactaggcctagttctgattcacgataccccaatgtagctcatccttccagacactgtatcacttcgctgtgtattttttttctagtccgcttcgtaacgattcaagcgcctgttctttgcattcgttttttaaagtgaattgagctcactgtaaaacaatcacaggttggtatggatcaaattttctctctccagaactgatgttgatcatgaggttatgctttgagcactgtcgatattattctacaggtttggaacagattcagatgaggcttatccgaagaatttgactcggtagtaaattggaatgatcaggtttcacattgcacttcggaagatagacctggtgtcatgaatttgaccttagagctcactgtaattcgtcacagtttttttctcggacgatttttccaccctttagtcttgttatagtagtaatccaactttcattgtctctgcaaagttaaatctgtgcattaaactgtgcaaccaagtgaacttatttgatgtctaggggtttgattttgttgagtgtttgtttaccttattggtaggtattctttcacatgagtatcatttctgtgtacaggagacgttatctaa

SEQ ID NO: 115071 - DNA, 627 bp, Physcomitrella patens
  Intron number 1 from transcript Pp1s50_141V6.1 (locus Pp1s 50_141V6) derived from phytozome v7.0 (chr-ID scaffold_50; pos 1327877 to 1328503 reverse strand)
cttgaggtaataaactgctctcttcaaatccgttgcttgtctgttatcactaagcatttgcaacatttatgtgcttagtaaaacgatgatctgatgtgcgatgtgtgttgagcatatgaagatagtttgaatatatgtcaaagtggaattttcttgtatgtgttattgttagcggtcatttctagctcaaattttaaggttgtgaaggtgtgtgagaacccgcatcttcttttatttttttctactttttcttccctcgtactttcttagtattataattgaagtccataattaaaggtcgcactttactcctgattgtgtactaacttctgaaccgccgtaggtcaaagtgattatttcttttgtccattgtttgatacctatatctatgcatgtgtaccatgttttcaccttcattgctagtgaagaatcaaaataaagtatgtctattaaaacatcatgtgctcaaaacgctaagcagaaatcttggtcagttatgttcgaaagatgttatgaagtcaattcgaatgttcaagaattaatgattattgttacaagacaagtttaaagaactactagttacgcatcgtgagtgctctcaaattgcaggagcaattcaaggcaagt

SEQ ID NO: 115072 - DNA, 874 bp, Physcomitrella patens
  Intron number 1 from transcript Pp1s54_259V6.1 (locus Pp1s 54_259V6) derived from phytozome v7.0 (chr-ID scaffold_54; pos 1563293 to 1564166)
ccgtagagtggagcagcagcagctctttcccacaggtgagtgttacgcgttaggtactagaggtggccatgttgttagaggatgcagctaggtccgacgctggttcatggtgggccaacggtggatcaatcgtggtggctagagattcccgagaatggtgacttaggctgggacggtggcgttggaattgtggcgccgagggatccgctgttggcgagttagtggatttgtgattaagtagtgatcgtggtcatgagttctgcgtgttttgataaaatggtttacgtgtttggggcggctgggctagcattggcgtttgggattttaggagaaccttgagtggttctctgcaggcggagatttgggaggatagctccgacttctccttgttggttgagttggagcccattgtggtttcgacagcagatatatcgattttgagtcacgctgtaatcgtgtgtcttgagagggtggaaaggtggatcccgtgttcagcaatttgctgtacgtcgcggtttgttggtttcggcacatgcggtcgtctgtgtctgcactcaagggttccctcgtgggatggaagtcctggatggccgggttgcccacagtgcgctacgaacacagttgtgttgccttggacccgctgaattttgatacttagtctttgagccgattataagattttatcggtgcggtcgcgaatctatcgaagttcgcatcgtttccagtatacagatcttgtacaatgcgttctttgtttttctctgtctaacagtattctgcttagttgtggtggtcagttcgttgcaggaattttatcccaaattggaagaaaaatattcactcgtgtttgaattatattgtggggttttagcac

SEQ ID NO: 115073 - DNA, 1044 bp, Physcomitrella patens
  Intron number 1 from transcript Pp1s23_342V6.1 (locus Pp1s 23_342V6) derived from phytozome v7.0 (chr-ID scaffold_23; pos 2474347 to 2475390 reverse strand)
attttctaacttgtggagcagcgatttaaattctggtgatttcctccgctattgcatttgccactgaatggctacatgttttttttgctggatgaggatgtgatttaggaaaattgtgggtgtttgagactttggctgaggattggcagtagtagtgcttattcggttcggtaattgaacatagagaagtgtataatagaacaactctgagagatgacttgttttgcgaagagtagggttttgttttggtaaagcatgatcctgggatttgcgctagtgggtgcagaaaatcttgtcgagtttttgctacttctcggtacccagataattgtacataactgtgcatagaattgtagagatttgctagaaggcatgacttttctctgcacaatcagtggttgctgtgaattttgcaataatttgtgctaattgaatgctactctttgtggaatgtatttttcaaggctgcacttaaaacttattatacttcacgtgtaagggagtgaaggaacgcttaggcagaatagatatcgtgcagtgggtttgcaaggaattacacttatattctgtttaaggcatggagaataacgtgattatgcgaattatttgaaatttgcactgatcgctgtaagacaaacacaattattcttgcatccgtgcatcgctggtgagtttccttcagttatctcgttgaaatctgcccgcagtgaggagaattggtcgaatatttaatgcaagtttgtgtcatccacagccctctcaacctataaattaggattatcgagtcgcttagtgtattctcgacattcttacagattggatttcgacgtatttgaatttatcctattactttctgtagataatataaatgtgtggattaaagaggatattgaggacaccaatttcttcaggtttgtgggttgaaatcagattttttttttattcttgcttttgttgccacaagttctcactcctgtaattctgcacatttgcaacatggaatgtacaggtttgtcttatattggtaacaaagcagaaaggggg

SEQ ID NO: 115074 - DNA, 524 bp, Physcomitrella patens
  Intron number 1 from transcript Pp1s88_112V6.1 (locus Pp1s 88_112V6) derived from phytozome v7.0 (chr-ID scaffold_88; pos 783739 to 784262)
gagagacttagacaacagtttctattctcggcctggtgtgattatttttccaagtctattttagtgttgtcaaggttgagttatgtctacgtgagcctaaatctctatcctgagtttgaatcttgagtttcttttggtggttattaaaaaatatatattattggtttttattcatttttaattttttcttctttttttaattttttacaccagttaaagagatgcgaagtacaactgatcttataatggtcgagaccggtatttgatgtcgtctccgtattctatgcgcattggcgtatcttgtaattgagaaaagctttggacctgatcaatgctggctaatttgggtagaagttcagttggggtgtatttataaatcagaaatggattttcattgacatggactggccaatgcagtaatcctgagaatgcgctgcggatgttttgcttgtggttcttaactagtgaatcaaatgctgattttctgacgtttctttttcgtgtgtaggcctcagccagtcacc

SEQ ID NO: 115075 - DNA, 385 bp, Physcomitrella patens
  Intron number 1 from transcript Pp1s102_73V6.1 (locus Pp1s 102_73V6) derived from phytozome v7.0 (chr-ID scaffold_102 ; pos 501520 to 501904)
tgcacttgtgaaaagcaagtcttctagaatcatcggtatgctggtttctcttgtgactttttatttatttatttattttcatttttttttatttttgattccagtaccggcaaattgggtcaccaaaaaaataatgatacatgtccctagttgggtgcaagtggaatcgtttctgcaacagcaggctgaagtaagatgaaggaccgcaagctgcaccgcgtaaaatgttttacaagaacgccgtacacgcgtggcgctggccgctaggacccacacagtctagatggatcgaagctttgttgactcgatacgttttcttcgcaatgcttgcttgtttctgacatcgccagagcccaggcacagaagctgcctcggaaagagcgat

SEQ ID NO: 115076 - DNA, 646 bp, Physcomitrella patens
  Intron number 1 from transcript Pp1s184_61V6.1 (locus Pp1s 184_61V6) derived from phytozome v7.0 (chr-ID scaffold_184 ; pos 388227 to 388872 reverse strand)
aagaaagatccggaattgtatcctctgttgcgtttgatttttgtttttctctgtttgggctgaatgggcgcggtgagttgaggctgttgttccgaggggttgtcgggttgattttgcctgccgaatccgctcaatcgaacatgtcgtgactctgattgtgccgtttgaagatgcgcgtattcagagatactgcccgtgtgtgtgtgtgtgtgtatacatatatatatatatatatatatatatttattcagagttaagtagtatcatctgaacctccgctttaattcactgcgcatagcgcactgtctgtctagggtttagaaacgggctctacagcttccaccaatcgaaatctttcagaattgaaaacaattcagacaggacttcagaatggcatgcaattaacttgttgcggataggtagttatgttgcaagctagcctggctcctttgggggagtttagttttattttgttttaatttattttttcttttcatccttggtttgtcaatcaaattaattactttacgtaggccgcgaagttgcataagataaattattcagtaatggttcctccacgtgtaaattggtctatgttgttattggagttctgccttgactttggtgatgaacaggtacaagcgaa

SEQ ID NO: 115077 - DNA, 849 bp, Physcomitrella patens
  Intron number 1 from transcript Pp1s16_393V6.1 (locus Pp1s 16_393V6) derived from phytozome v7.0 (chr-ID scaffold_16; pos 2706109 to 2706957)
ctcgttcgttgcgcttaccgaggtatcttgatgctctcccgctgttttcgcggttgaatgttcgtcgttgtttggaaatgaaagtggaaaaagtagacaagccgatgtgtccaagaggatggtctcttaacgccggtcattagaaatcacttgccatgttgcagtcgcttgaattggtctcttctgagactcaggtcaagccaatgcggagctgtcagagaagattgaaagagtagtcaaggcttttgctgttggtggtcggaattgagtgactaactcggacgagcaactttttttcttccgatttgaacgacgtcagttttttctttttctttgttttgtttttttaacattcgttgttgttgttgttgttgttgttgttgttattgctttgtcgcaatcgaccaatattaagctttcaaagaagccaagcttttttgatttctagtcgcgattgctctcccgtcgtcctttttctctcgttagtgaaatttgctctctacaagtacaagccttcagacctgtgcggttttccccagagagggagaaagtgagagatttattatttattattacttttaatagactcaatggagagttaaggtcgcttaacacgtcatgagtttggtagagcccaacaaggagtgatactatgcacaatcagtattcttataaattattatgcccgatcgtgtatagagggtctccttcttcttcttcttatttatttatttatttatttatttattttaataattttttttatctctctcttcgatgatttagtcatcaaagttactatgataaacctgttgggatcaaagttcatgtcgaaaagcatcacttaat

SEQ ID NO: 115078 - DNA, 479 bp, Physcomitrella patens
  Intron number 1 from transcript Pp1s177_94V6.1 (locus Pp1s 177_94V6) derived from phytozome v7.0 (chr-ID scaffold_177 ; pos 609354 to 609832)
cctgtggtttgtggaactgtttgtttctcaattttagtactagtttgttcagctttgctttgtcaaattggtgtttctgtttatttagttttactgtagcattattttcaatagtgtcaatggttttgggatgttcatgtgtgaggattgttttgttttgttttgtttcgttttgttttttttttttttcttctcccggtattatgtaaatcttcaaatttatttcttctaatttttttttggcatttatgttttgatgttggaactcgttgacaagaccagttcatctgtttgccctctcattttcctctcttccttggccagtaaaatcattcattaatacaacagtcatactttatgtgtgaccctcgccgaactcatatcggagattccctttttaatttctttctttttgtgcatatgttctgccttcttttgttatagattcgacgccatctctattccagtactgatcaatc

SEQ ID NO: 115079 - DNA, 917 bp, Physcomitrella patens
  Intron number 1 from transcript Pp1s35_107V6.1 (locus Pp1s 35_107V6) derived from phytozome v7.0 (chr-ID scaffold_35; pos 534583 to 535499)
aaggtctgttttaaaccaagcagttagaatactactttctattctgcattgttgaagtggatagagtcgttttatttatttatttatttatttttatttttttgctatggttcaattaccgtttctgcttaaatggtcgtcttagattgttttgattggttgcattcatttagcgacttgtcagaacctttcgtgcattgttgtagagcttcaccctttttctttgtgcgttcgcatcatttagcatggacacccgtgtggtgcagattctgatgttgatgtcaacgacatggtaacaggcaggccttattcatttgatttccgaaatgaagaggagtgactaccggtctgtgttccccaaatcccatcttcctcgatggattgttaaccgtgagcttgagaaggtttcttgtgcctccaacctttgagaaaactgagaattgaattgggtacaactaggaacatgacggcacccatagcttaagataccgagccaattctaactcgctaatttcatcattcttggtttgttcagactggggcgcaaagtaacttgcatccttttgtagtataatgcatattttttcacctgcaacatcattgttacaatcaatttttctctctttacatatatagtgtagctgttgttcttggtgtcattgtcctatgtcttggtaacctaaaaagctttgccaatccagttgtcggcaattttggcaggttgattggatgaatattattttgagaaaattgtggcccttcttcaatgaggtacaaacttctcaaaaaacgacggttgtgtacgtgcagtttacaagtgattttctgtacaagtttgagtgcatttcttgcttgggtaaatcactttcaattatcttttagtcgcttgtactggaaggtcatttgacgccttttgc

SEQ ID NO: 115080 - DNA, 658 bp, Physcomitrella patens
  Intron number 1 from transcript Pp1s118_132V6.1 (locus Pp1 s118_132V6) derived from phytozome v7.0 (chr-ID scaffold_1 18; pos 679001 to 679658 reverse strand)
aacagcctaacactacgccattaagcatacaccaagctcttcgccctcagtgctctcctaaaccaaagcgcctctcggcttcctgcctcatttgcttcgtaccgccaacccaactccccaagaaaaaaaactttaaaaaaaaaacaaaacaaacaaacaaacaaacaaacaaaaacaaaaacaaaatcagagcatgtcactctaaaacatctcaaactcagctccactcgcacaaccttgggagaccgaaccctcagagagactacaatggtgagctccactccagagtccacgctcttccacgcacttgaaaaccaacctgcacacacacaccgacataagaagggggaaaaataaaaagtgtccccaacttactcggaaatcttcacgaaagctttgcctaaccccagaaatggttaaaagacgcaagatgtaatcaaaatgcacacacagcagagaagcacctccgacatcagtgtcggcaaaataaaaccaaaaacaaaaaaaaaaaaaagaccccccacctgtgcacaagtaggcttctctctctcgcagtcggtccccgattcaaagattcatccctctacgtgatggtgttcattcattcacatccatgttcatctcaatcaaataatggcggaggcctgcatacgtcgga

SEQ ID NO: 115081 - DNA, 538 bp, Physcomitrella patens
  Intron number 1 from transcript Pp1s36_230V6.5 (locus Pp1s 36_230V6) derived from phytozome v7.0 (chr-ID scaffold_36; pos 1485778 to 1486315 reverse strand)
ttttgggttggaactctgatgcacggaaggaccttttcgtgtaatgccttgcattctcttgattgggtcttgtgtttttgttggggggcatgttgcgattggtaatagtttttgctgcgaagagttgctttaatggtcgcgcctttgcagcatttttttgtgtgtgcatgtgaggattgaagaagtctctcggtttcagttgcagtgtctgtttgaacctgctttgagggtctgaggtgggcgcaatcgactatcggacttgtatttggtttccatgacgtgtgctaggatgattgtgtacaatattgttcaggattttgattatgcgaagaaagtttttcctgaacgagaatcttcatgagggattaagaagaatccttcaagattttccggcagagttatgactagtcaatttgaattattttgtggccaattttgataggtgtcttcctgatcaacatctttaggttgatgagcgttttggattgtactagttttaatatcatcttcttttccttctcttttgtacaggtgaagt

SEQ ID NO: 115082 - DNA, 942 bp, Physcomitrella patens
  Intron number 1 from transcript Pp1s124_16V6.1 (locus Pp1s 124_16V6) derived from phytozome v7.0 (chr-ID scaffold_124 ; pos 144563 to 145504)
cttcgcagcccggctgcgacaacagcttcgttctggtgagtcccggatctgaataggtgtgactagaaatagctcgtgttgagggaatagcgaagtgatttggaaaggagcggtgatggatccggggtttcttctctttggcttcatggggttagggtattggaagaatttaacagaggattcggagcgacgaagtgcgtgggcagtgtcaggattgacggaatttggatactttgggtggatttgtgtcattgtgttccctgataaattaataacttgatgaaatttggtctgaggaatccttaaattctggtactgtcctctgcaattcgtgccatgacttggtttggaaggtgctatggctttggatatcttgagtagggttagtagaatttaagaggtgaattatggtcgagggcggaatcgtgcttatatcaattagtagctttgctagttcttacgctgggctagatcaaagcggtgtatcattagagctacttttttgggtattctagagtagaattctgagctcgttctcacacatgtttgctatcaaatgccgaacgcaaatgatgaacagagaagcatactaaatttgaagacctgtgaggtcattcactgaaagttcgaatacaaattaaatattgttcggtgctagtctggttgcataacatacgttttgactgtgagacttgtgttctgttataaaatgcttcgattttttgaagagacgagtggcatatgattcaattctttcaatttttggtattggtattggtattggtacacacacacacacacacacacacacacatatatatatatatatatatatatatatatatatatatattgtttgtttgtttgtttaaattattattattttgaagttatttctttctaagtcctacacttgttttccaggtcaaaatacgaaactgg

SEQ ID NO: 115083 - DNA, 913 bp, Physcomitrella patens
  Intron number 2 from transcript Pp1s238_40V6.1 (locus Pp1s 238_40V6) derived from phytozome v7.0 (chr-ID scaffold_238 ; pos 423562 to 424474 reverse strand)
ctcactcatcctcctctgccagccacttccgtcaggtatgcaaatctagattctttcaacttcctcacagcaaatacgaggcggtgtccagtaatttcctttcttcgttgtttcagaggatgggacggaaattttctatgtctcgctatctatactgggatcggataattgtgaaaatgccatatttctggtgctattcgtagcatatattctcacttttgtggaatgtatcagaatgtttccttatccgttgtcctctttgaggggaattttataatctttatctgaatgttaatatccgttatctttttggatgctttttcatctctccctgaatatgtcaattgacctagaaaccatgtcttaaaccatggtttctttttttcttcttttcaaattgatcagatcgaggggtacctcccagtgggaaagttgtctccgtttggaactctcacttttcaatctcctcttttgcgtttatgggcttattgctttgcacttaaagttttcccattggccattgtttggtaaggtacagtgttctcttgtttattcagcacacgtcttttctggaatgcaatggtatttttatgtcgtgaggagaaattacagctcgtgacgcagctttcacacacttcgtttccgactagttgcctgtgtttggagcatcggctagcagttctaccaaaaactcttcatggcagtgtgcaatgaaagtagatgttcttaggacacctatgctgtccacttaagcagagcatttggttttatgtctatcgtatgcaagatttgttgactttgcttcaaaacagatgataggcccatgctcatgctcacgtttatcaagcccactaaattggtgcacattgttcacgcaggcattctcgttattgaaactgccaaccgggagact

SEQ ID NO: 115084 - DNA, 735 bp, Physcomitrella patens
  Intron number 1 from transcript Pp1s372_19V6.1 (locus Pp1s 372_19V6) derived from phytozome v7.0 (chr-ID scaffold_372 ; pos 91994 to 92728)
tcgtcgctcagaattccgcacaaaccgaagagacagtgagtttagttcccgcctcctgacctctttggcttgctaggatgagggagttttgtgcgtttctaacatgtcgcatgtattcgagtttcgggtttggatgccagtgggtgcaaggtgcggcatccgtttgtttttagggttcctaccattggatgatttggccaaattcaccgtttgcggagtctgggcagggttcgtttagggttttagaaattgggactgatgccttgtgataccttgcgtattcgacaagcatggattatcatgtgttgttctcgttacgatattcttgtgcaagctgtagtttggattctcctatcattatttttgtaagaagctgattgctttttggtaatgagcctttatgttttggtaaattatttatttatttattttattttttatatgaacgatagtcactttgttcattttgctactttgctatcaaaacattcgtcttctggtctttggctttcagttctttgtgttttggggtcctctattatttgtcaagtacggaattatcaaaaatttggtttaggtcaggctgagggaggatttttttcattcgcgaatacgttctcacgggccatgcactcgttggttcgtgagaagtcaattatcagaaccgtaccaattcaatttgggtgatgggacctcttgatgtttggcaggaagtaggagaggacgtcgagacga

SEQ ID NO: 115085 - DNA, 526 bp, Physcomitrella patens
  Intron number 3 from transcript Pp1s20_272V6.1 (locus Pp1s 20_272V6) derived from phytozome v7.0 (chr-ID scaffold_20; pos 1827552 to 1828077)
ctgtgattcagtaccggtacaagcctccacacggttcctaatcttgtgcttttctccagcattaacgtacatttgagtactaaaaatattttgagtgttgcttattatttcagtttcatcttatgcaatcttggcgaatgtgttaagtttgattttctatttacgtgctctcttgggttactcttcaagtagtctgttgcccagatacgtgcgtagactcttgactaaatttgtgtcattgtgtaaagctccatatctttgatagccacattgcggctggtcacttgtatctctgtacagcgaaattcaccgttaacatccaaattaagtttctaaatcgatatgtttgtctactcttttgctctcgaattcgtatcacttttttgtattttccatgttcggttagatgtagtgtaagccgctgaatacgtatcctgaatgtggatttcagagatgaagatgtcccctgattatttgatttctcgggcttggatataggttgactgagatagagggccccgacggt

SEQ ID NO: 115086 - DNA, 574 bp, Physcomitrella patens
  Intron number 1 from transcript Pp1s78_63V6.1 (locus Pp1s7 8_63V6) derived from phytozome v7.0 (chr-ID scaffold_78; p os 389393 to 389966)
cctccgtgaacgcagcagagctgctggagtgggttttctgttgtctgctctctattctctaacggtcatcgattcggaattctcgtcttggttgaggatccgatgttgaaaattgtggaggggtttgtttttagctatgtaggaagaatttctcgctactttcaccttggtttggattagctcatgtttgctgcttggatagtttctgacccctactgtatggcgctctgtttttcaatatttgctaaaatctgcttaatcaaagcagcttttctttgaaatgtagttcgtcaactctcttgttttgccgtttgattagtgaaactcatcctgtcagttagttaagagaagctgttccatatctactcaaggtttaacgatcgcaatatgttaaggttttgtttcagcacagttgctattgtcacatttattccttcatgccgattgctgaatagtctgatgaataagattacgcaattgtgtgcgtcttaaatggttattttctagtaagatcatttgtgagcagtgtgaaactttctgcaggtgggacgttctctacaaacgtgcaattata

SEQ ID NO: 115087 - DNA, 472 bp, Physcomitrella patens
  Intron number 1 from transcript Pp1s412_23V6.1 (locus Pp1s 412_23V6) derived from phytozome v7.0 (chr-ID scaffold_412 ; pos 117147 to 117618 reverse strand)
aaggtcgttattcttcctgattccagtagacgtgtgtgatgcgtatgcgcgctagttatacaaaacacaaaacattgatcaaataaaaaaaacatgaataaatgaaaaaactaaattgtgtaattgaaatagtcttataacaactatgcctcactctagtggatctagaacttgacactgtgtttgtttgtacaatcatattggaacagatgcatggcaattataggagaaggtcacagggaggtgctcttactcgtcgcagtcattatacggttgccaattttatgaaaattacctgtgagtgtgaaattttaagagaggaacggtgtagaggtacatggagttgcactccgctggctcaactaggatggtcgaaactgtcctaatggtagcatgtcgtcgttggttttttgatgtggagtctagacctgaactggaaggtttgtgcctgtcccagtcactgcggttgcga

SEQ ID NO: 115088 - DNA, 626 bp, Physcomitrella patens
  Intron number 2 from transcript Pp1s45_112V6.1 (locus Pp1s 45_112V6) derived from phytozome v7.0 (chr-ID scaffold_45; pos 719806 to 720431)
gtgtaggtcaaccttcggctcgctaagccgctttggtaagttgcttaatctccctctcttgaattcccaatcttttcatgtgcaggaaacaaatggatattctcttgaaactattgagaagcaaatgcgctatcttcctcatttgctttgccgaagatattagattgcagagacaaagtgcctatggattaaatcaatcaatgtagattgcgagttggtactacctgacatggcactggaacagtataatttgtttccagaagggtgcacagttacctgaaactgttagtagtactgtgcatgaagtatgcgcctctggcatgaaggggacaaagcaaagcaccccccttttgtgtgagatagattggagtttcgttggtttaactttgtctcgagaaatcaagattctgaaacaccaaacttctatttagacagcaacgagatagaacagttttgcttttgcttgaatgatcagagcttgcacttcctacttgtaagaatagttacagaccagtttgcttgaatgtatgaactcttctatgatgacaagtttgccttgagaaatagctgagcctcttctataatgaagctaacaagttctctattgtgataaatttgcagcggtt

SEQ ID NO: 115089 - DNA, 1016 bp, Physcomitrella patens
  Intron number 1 from transcript Pp1s231_7V6.3 (locus Pp1s2 31_7V6) derived from phytozome v7.0 (chr-ID scaffold_231; pos 55126 to 56141)
cattgctacggttggtgggttcccgtacttggtcttcaaactcaattgggctgcgcttttgtctttggttttctcccctttgctctcgctattctgattttgctccatatctgcacgatgcccatgtcttataagttacgcctggtctcaaatcgccatgtgtctcttgattgttgggacctccacgcattttttgaatcgcgagtttccgtatggattagcttagacgtggcaagacacatgacaatgcggtgtgatgtcttaaatcttaaatctgtgttctagaagtctcaggatattgtttgctggtctaaattctgtcacagcttctgtaattacgcattagttttctacagcagaaaacttgagtactgcggaggaagctccgaaattttgaacattcgcaaacgagtgagaaaagttgagagactgtggattgtaattgtcgaagcttgtgatgctatcggccgctcacaggacttcagggtgccggttctgacgaactttcagcccagtacagggctccaactcatgttccttcgctcccaaggacatcctccctacaatcactgtatcgaattactcgtacactttcgtgaggtcctggttgaactactgcacctcctttttacatccgtatgctctcatactcagcagcttaagacctcgattacaagtcctggagtggttggtcctcgaattggggtttttgtttttgaatttcagggttgcggcaggaatagtttttaattgagagtaagtgggaggtgcaaccttttgaagaaaaaaaatatatatctatatatatatatatatatatatacatgactcgaaagccatgatttccttgggtgctaatgtaattcttacaaagaatcgtagtatatagatcaaattattgtgaggttgtgcgaagtagcgtgtttatcttaaaccttcacgatgtctgctagagtttgcagttgtagcttcggtgacgtttatttattggagaggatccggtgaccatttcaggc

SEQ ID NO: 115090 - DNA, 1018 bp, Physcomitrella patens
  Intron number 1 from transcript Pp1s391_39V6.1 (locus Pp1s 391_39V6) derived from phytozome v7.0 (chr-ID scaffold_391 ; pos 186618 to 187635)
aaactcgtagaagtcaggtttggttcccgtgcatgaggaaagggtttttagggctgtcaatttctcagtcgtaccgttattgccctcttttccattgcttaccgacttaagattttccatcctaataaatttctcgaaaaggttaatatccaagattgccttactgacctcacttttttttattttatttttttaatcaagtagaagccgttgcttgtgatatacttgtaatttttttctcttagcaacaatcgtatggttgtaattttattttagcagcaatacggagtagtgtcgctggatgagatgggccgtgcttctgaggaataaaataatcttcgtaatcttaagtggcaatgcgcctatttttaacgtcggctgatgagccgtctttatttgttacttgttgcaatcctatctcacaccatgtcaggatgctgtttcattattgtcgcgcgtttttcgattttatttgtgacggatacttcattgagcgcgggttctgaagttactcattgaagtagcttacctagtaacggatacatggtggtccgcaagtcgtgcatgaattatcaagtattatctaaaatacgttttaaagggcacttagagacagtgtattggaatttcagtactcttatcagatgagaacaccagtttgaggttgacgacggttttttggttttaaaaataatatttgattatcattccaagctcaaaatacaatcaagctagatacatgagcggctttgttaaagaatgaatttgtgctacttaaatgatgcatgcctactgcttgcatcgtcagtttcgaagatttcaaatctaatgtcggtagatcgaacaagaagtgatttgtgaaggcttttgcttatttttcacttttgctattagaaatgcaataggggcacttggtttgttctttgtcgttgcgtgcatgtttttgcacagttgattgttgctgttaatgaattgtggccgtggtcacgtatacaggttgactcggtgctggataagg

SEQ ID NO: 115091 - DNA, 890 bp, Physcomitrella patens
  Intron number 1 from transcript Pp1s412_41V6.1 (locus Pp1s 412_41V6) derived from phytozome v7.0 (chr-ID scaffold_412 ; pos 234128 to 235017 reverse strand)
gatttgaagaggtgagtcgtccctacacaaccagcagataattcaaaatctcattgcaaactgttcagttgtacatttttctgtgatgaggagatatcgcaggcttaggcgatctgttttagagaaatgatcagaggctagcatcagcaccttctgaagtatctgttcattttatagaatacattccagcagcgaaatctacctcataaagtagcacaagaacttgtcgagaacaaactctttcatgcttcattcaagattaaacagccatgtcttctcgcgatagctcagaatataccaggactcagaaactgataaataaatttaaaaacatgtgcagaaatatgcgttctccaatctcaaatgttaagtgctttactacctttcaataaagtttgtcaagtcgatgctatgtttttggaagagttctcttaaaattcccagagacaaaaccaggttcaaggttcgtggttggcgcacaagctccgacggcaagttgtcccctcttgccgaccagtcctccgttccaaatagaactcagctccagtaccgaccacagcttgcaaagatggcttcggaggcaaaaagaaaaaagaaaaaaagaactccactgaacaaatcaaataagcctcttagaatggcaacatagtcacaaacgactctaccagtggtattgagctttattctacaactcgactgcagtgctatatctgataataaaacaactcagggaaacttgtcttgtaataacgaagggagaggcatcgctgtcatatacaattttcgcattgtcctgactcgtttgtgaggaagaaatttccatcatcaattatgacactgaaagcgatgtcacaggcatcgaactgcctccgtttgtttaactcctacaa

SEQ ID NO: 115092 - DNA, 769 bp, Physcomitrella patens
  Intron number 1 from transcript Pp1s93_80V6.1 (locus Pp1s9 3_80V6) derived from phytozome v7.0 (chr-ID scaffold_93; p os 843061 to 843829 reverse strand)
gatccgacgaagaagaggtttcatcttatgcacctttgccacttctttctagtttgtctaggagaaatttttggatattggatatctcaaattgtgcatcgatgtaagcttgttgctatcaatagttaattcgaagacttgcgcagtctctgatttctagcctcgtagcacccgaagattattgtgatttttttcaatttcaatggtctgtagtgtagatccatttctaattttcaccttctactcaactgaatatttcttaagtgtttgaatcaatagtagcaagtaccttccttattctcgtgtaagtccactgaaggcatccaagccgacttgcagaggtctcctgggagtgtagaacaggaggagagaaagcagtaaaactacttgattttcacaagttttgaaatatttccgaggaatttagatgcaaaaataaaatcttcgtgcagctatctacaattttttttgttttgacaatgtgtcaatccaccaataaggatgatttgatacaaagttcaatgattcaagcatttatatcattcttaatagaaaagagggaaaaagttgtgttcacaatattcaaaagttaagttggtaccttgtgcagaaatggcctgccaatctgcaagtttgttgccaattgaacatcatgcacaattgtacattagatgtgttctatgttatagtaatttcacgaatgcggtctttaactatgttgttacatcttacagatattttgagcgcgagctggacaatatcaagcacg

SEQ ID NO: 115093 - DNA, 847 bp, Physcomitrella patens
  Intron number 1 from transcript Pp1s169_48V6.2 (locus Pp1s 169_48V6) derived from phytozome v7.0 (chr-ID scaffold_169 ; pos 274643 to 275489 reverse strand)
tgtcgttgtggtgtcaaggttctggtggctttaaggttgtttttgaatcggagaattgatctctttttttctgtgtagcttgggacgagtttaggacgggttggattctgcccggagctgctaatttgtaaggtttttggttaatgattttgtggagatggcttaggtcttcgtattgacgatctctaggtgtaacgtttagtgattttcagaggtgtttggtggagtggtttgatttagggagggctggctaggttgataattcaaggcgttgtggcgggtgatagtttcaagagtttggtggttcgttgagaattttggttgcaaccgagttgaatcacgttctgtaagcttctgggagtttttaaacgggtgcgctgtcatttgggagcgccaatgcccccagaactgagtcgtatagcgtagtttcgcttaagaacgagaatttatattatattatattatattatattctttttttcatatctaagaaagctcttctagggtttggaagggaaagtttctgctgaaaacttgtcttgcggtttgatcgaacttcgattttcatcttacggggatcgagtttctgcgacgaaaggaatttgcggaattagggcaaactttggggtaacttcagtgccatggagtgtccatgaggtgcgaacagatggacagatgatgagcctgatgttttatggctctttgcagtttgttctcgcgccaatttgtttttcttcagctgcagtgagtgatataaatagcttgcacttgccggacagaacaacttcaacagtctaattgtatgttacaaggtggtggcatcttctacgttaccaggctttattcg

SEQ ID NO: 115094 - DNA, 897 bp, Physcomitrella patens
  Intron number 1 from transcript Pp1s17_236V6.1 (locus Pp1s 17_236V6) derived from phytozome v7.0 (chr-ID scaffold_17; pos 1533627 to 1534523 reverse strand)
ggaaaatcatctgacgagcaaggctttcaactgaggtgcgtcatccttcatttttccggcttacaagcgcgccctcaaaatattgtttgtgcgcgtgcaggtgtggtgtttttatgttgtggtggagttatttcgaaattgtcgggcaaagataagcgccggaagaaggaataaaaagaacttggaaggctttgtacggtatgcttgtcagagctgtgagcgttatggtgcgctgtcggtttgcctgttaggttctcctctgagagggtttcctttttggtgacggaggtcgtggtttcagatagcttgcggaggaaggatcgttgtttgatttgaaggatttggagattgaagcagaagttcggattcctgtttttgcacttatttttggattttgtgtatggcggtggacaacctgtcctgcgtgatctgccgctgttgcagcagctcttgcagcggcaactctatattccgctctcctcgtcacgctagctaaacattaaccgttcgagtgcaccggaggctgtgtttgactcttccttgggtgatgaaggcattgttccagccatctgatatatgcatacaatctgggcttattctgcatggtagcttgagtgtcgtggtggtggagttaaggtgtgatagccagataatagtcttcgttttcatgttccccctggtggtatcagctaagtaagttgtgctggggtacgtaagatcgacattctggtttctgcgttgctgtgaatatgtttctgcttccaagtgtggtttcagtttctttccctcccacgtggttggaatcgccatcggtggtagttggtcccactgactgtttcgatactctggtcactgtgtgcagggtctgcgaatccttcaaacccacatcaggagcgc

SEQ ID NO: 115095 - DNA, 642 bp, Physcomitrella patens
  Intron number 1 from transcript Pp1s211_148V6.1 (locus Pp1 s211_148V6) derived from phytozome v7.0 (chr-ID scaffold_2 11; pos 763654 to 764295 reverse strand)
tgttttacattcctagcacaggaagttctgtttcggtaagctgcctgacttcacatcgtgctcagctcctctattcgagttctgtatgttttgatgaattattgtggagcagagttggctggtgcttgtaggactccttgaaaaacccgagaatccctacgcgtttacatcgttctgctcaaggttgtataggacaacactttaaaaacttgttctttccggatttgcgcaattttgcgaaaattgctttgttcatgcagggaagagtgtcattaaaggttctcttgtaatgctgcattcaagagtagtttctagtgggcaaatgtgctagggcggatctcttgaaattttttaggttccctagaattaaattttgaggtttgaaaagtttaaattctaggttccagaattggaccagaagtgggagtcctagtttgtacaggtccaattgaaatgtaaggtagcatgtgcgtgtaatcctgggagtttatatcggtgggcatcgttgtagttataataatactgatacggatgtatcgctgtagaatttggaacctgctgttgaggttactgttttgcttgtaataacttgtgagtacgtttgcactttctgcacgcagtctggtgcacctgcgagtttca

SEQ ID NO: 115096 - DNA, 327 bp, Physcomitrella patens
  Intron number 1 from transcript Pp1s46_63V6.3 (locus Pp1s4 6_63V6) derived from phytozome v7.0 (chr-ID scaffold_46; p os 736326 to 736652)
cagttgagcttcttctttgcttttcttttttccttcttgaaggaaattcggtgaatgtagcggttgaagatttggtgcagcgttgaggtatgtgctagggagggggtttgagtgactgaagcaagagggacgttgcgatcgctgtgagctgcttcaagttggtttgtgtgatgagttgtgatgctgcagtggaagagagcgtagagtaatgcgttagattgagtctagtcattattcgaaaacttttaagacttggagttcttacattattatgattttatggctgtcgcaggcctgtggttgtgaatcttgtctattttctggcac

SEQ ID NO: 115097 - DNA, 676 bp, Physcomitrella patens
  Intron number 1 from transcript Pp1s165_129V6.1 (locus Pp1 s165_129V6) derived from phytozome v7.0 (chr-ID scaffold_1 65; pos 964852 to 965527)
gcatcatcattgttcgacttcactgtcctcttcaggcaacatctctcttccgctcttgccagtcctcacagtattttattttattttgtatattttattctaatttttttacggcaatgtgcgcacggcagggaggcgcaatttttctcctctgtctcgtctttgtttttgtttgtgcgcattggtttttggatcttgtggcattcttgaccgtcccgcttcattccttgatcaaattgaatggttccgattattcagccctgaatttttgctgcgcatctttagtgtttgcgctagagattattaatttcgccctcatatactgcatgtttgctacgtgctcctgttttatttttttcttttcttttttttgtttcgtgtgtgacgtagttgtatgtttaaatttggatcgtttagaagcgaaagagggcactgtttcaaattgtcgacgatgtcggctgttcagtgttcaaggatttttaaggatttctggcaaccgagaatttttaaacgtaaagaaaaatacttctacacaagtccatgggttttatttgtcttggacaagataagactccttccgggggttcgtgttaataggagaacagctcaagcttgacaattgagagattttgcaggtacagattcaaagttggaaaatcgggacattgtgcttgac

SEQ ID NO: 115098 - DNA, 640 bp, Physcomitrella patens
  Intron number 1 from transcript Pp1s357_28V6.1 (locus Pp1s 357_28V6) derived from phytozome v7.0 (chr-ID scaffold_357 ; pos 194360 to 194999 reverse strand)
agggattacacaccctgcaagagctacccttacaggtcgaatcccgatcttcccatgttcgatttcgtcttcacttgcttcaaagatatcaaaaacacaaaacccacccatcgttcttcacgctgcgatgtttctcacttgcagtcccacaattgtcttctcactcagattgcgagggtcagtttctgttgatttcttttttttgttcctattattgttcatatgttgaagtgcacatgatcgtcaggttttcggtattgcgaaacattgcaagaaactaacagccttggcatgaatctcctccatatcttcgagaaaatcgcaaccccacttcgggaattgactgtttcaaacttgggtcctccgtcaaaacgcaagattcatcgttgtgtttgcagttctgtgggatcggggtactcgaactgcgaagacgggtataggggggtctatcttgcttgacggcgagacgggtataggagtctctaggggtggtcttaggaacggaatgaacgagaaaagcaacaatggattaatgaaaagaacaacaccgtggagcattgggagggccacgtgtcctctccacaactatgattccgcggtgcggtgcaggtggactttgaactgaaggtactgtctgaga

SEQ ID NO: 115099 - DNA, 911 bp, Physcomitrella patens
  Intron number 1 from transcript Pp1s222_39V6.1 (locus Pp1s 222_39V6) derived from phytozome v7.0 (chr-ID scaffold_222 ; pos 172496 to 173406)
gggaaattttgtggtgagtgctcacttttggcgtgaacttggcctcactgtgaattgcttgcttggcgcctgtgagtgaggacggaggtcaataagctctcgaatgctttgtttagcaaacgcagtcttggtcttctttactgtcgagcttattgcctggtgtgtttcttttatttcgtctctctcactggcatctccatttctccatccgatgcgtggtgttcgttgatgggtcggtagaattgggtaaattcagtggctgtaacccgcaagctgttattcttttttggatatatctatatatatatatatatatatatatatatacatatatgtgaatatattcgttttttatgtcctctttttaccccatagcatccttagccttggatgcagcgctctccgtcttacacttatggggttctcaacctcgagtttagttcagctgttttttttttttttttttttttttttgtttatcttgaaggcactcgtacctatgccactttgtgctgagcagtgtgctacactcgtgtagctgtgtccccgtctcaaaatctgattgaagatgagattctcatatcctccagcctcgggcatgtgcaagtgtgtacacattgcgaaatgtcagacaaaatgtaatgcacttttgctacagtgcgaatagagtcttgaaaataagacccctgttcacatggggatgtgagtgatttagagtcttttaatggattcttttcttcaatttgcaagcatcctctacggtcatttggctttttgtgaggagcacttttcaacatggctagttaatgtttttgagctgctctttgatgtggttatacaaaggatggtgatgaattcgtaaatcatctgatccgtctttgttgactgtttgcaggaacagttggaaagtt

SEQ ID NO: 115100 - DNA, 496 bp, Physcomitrella patens
  Intron number 1 from transcript Pp1s282_26V6.1 (locus Pp1s 282_26V6) derived from phytozome v7.0 (chr-ID scaffold_282 ; pos 169860 to 170355)
ctcaattttctctttgggtgagttaaagtagttgcgactctgctatgttcagtcggaggctgtccgtctttgccgctgcatttccctcattggttggtggttatgggttttcttagagaggtttcgtggtggacttggtttgatttatgcaggggagttgaaactttggtcggtggtgtgagtacacgtattggttatgaaactagagggcttcgagagattgcgagatattacaaatgagagagtctgcgtgatcgtcttctgcagcctagaaggagaatcgacgcctagctctagattttctgtttccctttttttgcgaggaatttgataatggctgagtaattgacgtagcaattatcattgcgaaactcgctacttactttcttaacattctgttgtatattttgtggttgttgtatttctggtgagataatacgaaatgaaacagagattagagggtgtttccgaaggttttgatttgctgaacctacag

SEQ ID NO: 115101 - DNA, 518 bp, Physcomitrella patens
  Intron number 1 from transcript Pp1s298_14V6.2 (locus Pp1s 298_14V6) derived from phytozome v7.0 (chr-ID scaffold_298 ; pos 177439 to 177956)
cagcagctttggctctgttcaccctggtaagcatatctttggagaatacatgtgtcgacgagtttggtgtctaatttggggaacgtcgtcatgtgtagcacaggtttgaaattccattctcttccggttgtgcatgtgcattccttgggcaagggttaatctttacctcccagacgccgtccagcagattaatgaacattcagatgagagctacggcaaatcgattcctaacaatcaaaatcggaacctgtttcttttttatgttaggcaatgctcgattttctgagctcttgaacatccacgcagttgcgaggtgaaattttattgatgatggaaaccgttcaagaagagagtccttctctcatcagcagcccaaaatgttttgtctctagaatgtcgactgtctgcattgcgatgtttatcacatgcttgtattcagagggtagacagtttttttgaaagaccagtggaatcgttttgcaggtcagtgtgtggacattgggctcggctgcgaactc

SEQ ID NO: 115102 - DNA, 769 bp, Physcomitrella patens
  Intron number 1 from transcript Pp1s16_25V6.1 (locus Pp1s1 6_25V6) derived from phytozome v7.0 (chr-ID scaffold_16; p os 117108 to 117876)
gccaccttcaaccgaaagtgagtgtaaatagaatctcccaacgccattgcattttcttatgttgaattttctctcgtaacttaccgttcgctagatccttagatatgcgtgagactttaggtattgtgaaaccatgaatcgctttgattctgtaaatactaagaatccattcgaagaggtcatttaagcaggagaattgtaatttggcgcttgttggatactttggattcatgcagaaaacatgaatgacatatgggatggctttttggcttccgggtaggtagggttcggaaagggttttgtgaaattaccctctcttgcaaaaatagtcctttagtggcgtgtatgtgcaagcgtacggtcacttatgttttactgcggcagggtttactagggttctagatgatacactgtggcgttcgaaccttctgaagtgaaactctgggaacccttttgtgtaatgatggaatgctttgatcttcctattattcgtacaaatgcggtttcattcattaggtcattgtcaaagtcgtgtatttaatgtattggaaatatttccgtttgaattaacagaaacgtcagtagttgatggtgggtggcaatcaggccttttggtaggagacgagcacaatccattgtggaaacgtttctagtttttttagtgagtagtatggacattttatgaagtaaattgctgttgaatatataattcaggccatgatagattttaaccgctgaattgtgttgagatttttgcagtaagccgcac

SEQ ID NO: 115103 - DNA, 871 bp, Physcomitrella patens
  Intron number 1 from transcript Pp1s99_86V6.3 (locus Pp1s9 9_86V6) derived from phytozome v7.0 (chr-ID scaffold_99; p os 649281 to 650151)
cagtggtggcaattggcgtaggtgagattaacgaggtgtgtggacctgttcttcttctgcgttttgggttttgggaaatttcctcttgttttgtgctgcttcgactgtgcgtgtaggtctttctttaacttggtcggtggagggcgattgtaagccctgtccactcttagtcgatctggcactctttgcacgctccctctggagcagctctcatcgtgctttatttggcagccttttcactgcgaagtattgacgtcgtctcaggttttcttaatcaagctattcctggaatagtcaggtgaggaaacagctgatagaatcacttccattgtgtcgcccctcttgtatgcacacaagtgtgacgcactgtttgacttgctgtagaagctggctatggctatgtcggcgaggggtggaaaagaccctggtacggccgtcataacgtttcaatctgggtgcatgtcttttattgctcttctcctcgtctttaaggacagaggcctatatgcaagcaagcaaatggattccgacgtactctttgtataagcgcattgatcttagaaatatagttaggtctccaactttgaaactacgaaaagtcgtatatctcgaaacttctggatgagtaccgttgtcagcagctcaaacagctcaagtcaagccaagtcaaagcaggtcaggtctagttacgtcaagtcaggccaagtggtcgactcgcgattcccttacaaagatctctgtacgttttcaaaatttgtgtagcacactgccctgctgtgcaaaacgtggacattagttcttgaggttgctgatttcagctttagcgcgtttttagttctcatattctgtgctctgatttggcccagatttg

SEQ ID NO: 115104 - DNA, 668 bp, Physcomitrella patens
  Intron number 1 from transcript Pp1s249_66V6.1 (locus Pp1s 249_66V6) derived from phytozome v7.0 (chr-ID scaffold_249 ; pos 365939 to 366606 reverse strand)
ctttccacgcagcctgctggtatgatactgcttcctcagtagatgctctttttagagtttccagaatgatgtcatgttcagcatgtgtattttcgtattgttgtggtcttattgaggggcaagaacgaaggaagtgtcgatgattaggagtcgtgtacgagggttgcctgctctccgaggattatatttaaatctcggctcatgtatcacttcagatttatccgtttctcgataacgatcctttcttgctgtggaatgtgagcgacttgattgctgtctcggccactttgaaagaaggtcttgtaaggttgttagtattcttgttcgggtgtatccgtaattgagtgaagaagcattcatacgtcattatataatagtgttcttgcgatattgatcgtacagttgccaaggaacgatgccaccctatggcttatcaaccgctttaggaaattctttaaatcatacttcgtcatggtggacatgactattttatggattgccgcataacctaatctaaaacccatgaggggacttgtgacatattttatattaggttagggcttataaaattttagcaggattttttggttttcaagcctgagtctacagatttacacaacccctgaggctttctgtgctgttgatttgttttgtctccaggaaagaaa

SEQ ID NO: 115105 - DNA, 640 bp, Physcomitrella patens
  Intron number 3 from transcript Pp1s87_135V6.1 (locus Pp1s 87_135V6) derived from phytozome v7.0 (chr-ID scaffold_87; pos 998595 to 999234 reverse strand)
ttgctctgcaggtgggtaggtaggttgacatctatttatatttgtattgttaggtttaaatactctataatacttaaaagaaaaaaaagaaaaaagaaaaaagaaatactagtacttcaaatcagcacaaagtaaaaataaagaatgggtacatgatcttaaagtatataaataaaaaaaaaaacgaaagaaagttggtttaactttgttttaatatttatgattagaattaccaagctgtccattcagacagcctggtaattctaatcatacaagtccattataccagctgcggatatttgtgcatttgaaaaataaaaataaaaataaaatatgttattgtaatgtaaggaatgcaaattgatgacattcacaaaaaatcaaaacatattgcaatactctaagatgaaactggttttggctttttaattaatttttttaaaacaatcttccacaaatggtggatatgcttatcatgtataatttgcaaaacatgaccaaaaagttttgatctctgtgtgtgtgtgtgtatgtatatatatatatatatatacacatatatatatatatatgtatatatagacacatatgtaattcattaaatgacttggtctgtgactcctcacaggcaacacaggaa

SEQ ID NO: 115106 - DNA, 926 bp, Physcomitrella patens
  Intron number 1 from transcript Pp1s13_387V6.1 (locus Pp1s 13_387V6) derived from phytozome v7.0 (chr-ID scaffold_13; pos 2453699 to 2454624)
tccgttcttcggagccagggttgcttctgcatctggttggttttgcagctctgcgtggctcttccgtttaagaaatttggaggatgcatttaattgtgaaatcagggccattaacttgtacctacgttcttttcaacttctgctctcgtatcattcgaatcgttgtgaatcgtgggtcgagtgattttattttctttgttgaaacgtctgtaagtaggttcacaattttcagtgttcaatactcggatgttgtgtgctgcgttttttaagaacatgttgaatgtaggaatgggagtgaaaagtctgagaacaactgtcattaatgtcggaatggtatcgtgttctgcttaattcaaaattatgcaatgcgcactcttacgtttactttgttctgtgaaccggtgctgcatcgggtagcgacgaaactattcaatctaattatgtatctaacgattggcagcatttgccattttctctctagcttaaagaaacatgcacaacaattgaactctcctttgaacttaatgtagtaggcttatcaaaatgacacctgtgacatgcgtcgtaatttctgtcatgtacttctcgtgcctcacgtgaatctgtcttgaccatttcttattttgatattggattcttggtaaacttcaactgttcttagtctgttaatatctgatatgtaagtgcagttgtcttggtgttagtgtttttacagaaccgccttggcacttggagatgttttgcgttttagactgttcctacttagtcttgttcaagttgcacatgttctctctcattctgctcgaccttgttacgcaggaaaagtcctgatttttaatgaagaaatttggaatcatgtttttgagttcttgattcttatatcatgtgcagatccaaagagcccgaattggaggaagagagtctcc

SEQ ID NO: 115107 - DNA, 899 bp, Physcomitrella patens
  Intron number 1 from transcript Pp1s41_21V6.2 (locus Pp1s4 1_21V6) derived from phytozome v7.0 (chr-ID scaffold_41; p os 138358 to 139256 reverse strand)
gctagctagctcgtattgcagctccccgacgtggtggtgctcttctcactctctctgttgaagcattgctgtatttatttgtatgcttttaaattccagattatgtgcggtcttgttccatttggagggccttttatgcagagcctggaattttggttgagagactaaatcgctggtttctatcttgcgttcagagtcttctggtgtatcgacttgctccaccttagtccatggtgtcatcattgtgcgtggaagccttgtagatccctggcctgattgtctgtagtgtgctctctcgtttggtgggtttttggtcttggtgtttggaattgaaagcgcaggatggactattgttgaaacatcgcatcgtagttgcgttgtgtggttttgtgttttgtgtgttgctgctttttgggtttcggttcaaggtagagagtcagttctcatagctttctgactgatgtttgccaatgaagtagtggagatcctggctctgaaggcgcatctttgttgcacatcttgcgaggcttgatggtttaatttcttctgtaatgcacttaaggggaccctcttaaattcgaactcaaaaccatgtgctccacgatggtgcttgtgtatattggattggcgtgccacactgtcgaaatctccaggacgtagtagcacctcatcatcgcttgtagtttcgggcgtggtcgattgctggctttaaaagtagagttttagctgaagtagttgtaagtgcttgcagaatcttagttcagtttcttatgtttttaaccaagttcaatctcacaaacagattttttttcctgacgaagcaacacctcgtagttgctgactctagaaagcgaggtcactaaccactgccttctttgtaatgcagattgggcaacgtt

SEQ ID NO: 115108 - DNA, 736 bp, Physcomitrella patens
  Intron number 2 from transcript Pp1s65_165V6.1 (locus Pp1s 65_165V6) derived from phytozome v7.0 (chr-ID scaffold_65; pos 894934 to 895669 reverse strand)
ttgtcggtacttcttttcattatctcacttataaggtatgaagtatctacgatactattgacttactctcttctgcggcaacgctctcttgaataatctcctgaagtatgccgattgtgaatgcaccatggtcattcacctcaagtcagttccgtggcaaaaattaaacaaaagcaaaaaataattagtcacatcgaaaacaactgcatttactaacttcaggactccatcgtgaatagatatcataattaaatgtgtgggttcttaagtatatatccgacacagtttctgacattttcatactccgcatctttgacccctgcaacaccatactcacagcgtgctctatcatttgggaagaccctgctgaacattgttatgaatccatcgtccggcctgcaatcttctcccagttttttttggtcacttatgtttctcccaagtgtttagtcttcatggttcgcgcacgcctgaaacaaaccataaaagcttccaatgttttcgagggtattgtctctatactgtggtgtgtccgcggataaaaattagttgacagctaaactccccttagtgcaaatggtctgatctcttctgttcacatttcatacaatatctgcttcaatgtaagaagctctatcaccagattctgtcacaccgtgcaatgtctgtatgtcggctcaatgccattgtaatctgtcattggatcccattctgagcttggtttcacttgcaggaa

SEQ ID NO: 115109 - DNA, 538 bp, Physcomitrella patens
  Intron number 3 from transcript Pp1s17_340V6.1 (locus Pp1s 17_340V6) derived from phytozome v7.0 (chr-ID scaffold_17; pos 2200651 to 2201188)
ctacctgctacaactctgtttacggcggtgaccctgtgagattctccttgcttcaggaattatttgtaattttattcaccttttcctgtctgtgaagatctataatcgcttacgccgtcatactagcaggcattaccattgtcaaatgtcgtgttcgtagtttcggaatttctcttttgattttatgttgcaacgtgaagagttgtgattgtttttgcatcctgtcagcgttagcgattttgtgttagaagaatgaggttattgggatttcctgggatttttgtgtgtttttttttaagaagaatcgttagtaatttttcttaacagactaagtttttcagattcaaattcacatggatgataatttggatccatcattcacatgggtgatgatgatgatgtggagttgcgagttttgtttgaactaagtaatacttgactttgaagatgagataaacatggatttcttattctgtctacgattggtcattgtattgatgcagctagaagaaggagaaatagatttgagaagaggtcg

SEQ ID NO: 115110 - DNA, 647 bp, Physcomitrella patens
  Intron number 1 from transcript Pp1s135_103V6.1 (locus Pp1 s135_103V6) derived from phytozome v7.0 (chr-ID scaffold_1 35; pos 822530 to 823176)
tcatcagtctcaaaggagttggcgcctggtaacaggtgaggttggaatgttgtccctaacggatcatgatattgaactttcgactgacccaatgacgttcgcttaacattcaaagtattgtttaaccctcgaaaaatatctcgaatcggttgctgaatacttgatttcctgggcatgaatcttgttcaatccgtactcttcaaatacatcatggggtgcgctgtcgtcaggatacgacaccaactctcctacactgaagagtatttgaatttatagtcttgtttgttcttacacgattatttaagacatagattagctcgtcattacatgtaaacatttgggattttcacgggcatttactgcattctcccttgaacagcctatcttcattcaaactgtagtctgattacagtttaatccccacattaaaaaatgttggatttaaagttagtgctgacgacacagaagcatagaattgcataattattgtgtggaggctaagcctcttcatatgctgagggtgactttttgggcaactttcattctttctcttctgcttcttctcttcctcgtcctcctcctctctctttccttcatattagttgaggctttgctgatttttttggtgaatgtgttcaggaaaatat

SEQ ID NO: 115111 - DNA, 365 bp, Physcomitrella patens
  Intron number 2 from transcript Pp1s120_80V6.1 (locus Pp1s 120_80V6) derived from phytozome v7.0 (chr-ID scaffold_120 ; pos 539902 to 540266)
gaagagccgactcggcaacaggttcttgattcacggtaactcgcttgatttttgcgcataaactgaggaagtttttgtgatggaattcaacacgatttttcgattcttttgccagactttatgttaagaacatgctcaacaaacataatcgttactgcttagctgagctgtaaaccctgctcttcattcctcattggcacttctttaggagctcctgctgtgaagtagacgttagattgtaggcatagaatcaaaccaaatatacttttttatttttatttttaaaataagcatgacattaaagcatgtttgatttgggaatttttgcagcaagcgctgttaactcttttctgaatactcttgat

SEQ ID NO: 115112 - DNA, 601 bp, Physcomitrella patens
  Intron number 1 from transcript Pp1s55_207V6.2 (locus Pp1s 55_207V6) derived from phytozome v7.0 (chr-ID scaffold_55; pos 1301643 to 1302243 reverse strand)
tcgccaaccactaccgggtgttgtgcctcgttagggtacgcacatttttccatctgggtcttgatcgcaggagaagcggtgtcggatcagtcaccttgagttctttgcttgtagctggatcgtccccgggattgtgcattttggggcgcagagctcttgttttaggttctcgttgcagatctttggtgtttgtgtgtacttgcgcgcaggagcttgtgacttcggaggtggggtggcttgttgggttttagagttctgctgtgacggcgtttgatattgtcttgttttgtttttgttgtctttcaatttttgaagcaagcagaaaattcttccactgtagttttgttttgttttgttttgttttgtttttttccacacaccctccctctcacgataattgataggcatgaatggtagttctggtgtagcccttgggttgctgtggatatgcgatcttgagaacatggggaggatttaaaattgggagatataattttatttttattcgagaatggaatgattgagtagacgacactggcgtttggttttggttgtgatcacggcagggtgcgtgtgaagcatagaacgaagcctcttggtt

SEQ ID NO: 115113 - DNA, 237 bp, Physcomitrella patens
  Intron number 1 from transcript Pp1s266_14V6.1 (locus Pp1s 266_14V6) derived from phytozome v7.0 (chr-ID scaffold_266 ; pos 202968 to 203204)
acaaaggatctggtggtgttgcaccagatctgcaggtgctttgactgtcagttgcgtgtggggctttgccttgccctgctacactgccctatatccactcccccacctatgttttatcccatgtttgtttgtttgtttgtttgttttctcaacatgggttttagttgtctttgctcttgcatgattatgagagaacacacagaagatctattctaaactgaaaatcgtgtacaggaa

SEQ ID NO: 115114 - DNA, 939 bp, Physcomitrella patens
  Intron number 1 from transcript Pp1s33_383V6.1 (locus Pp1s 33_383V6) derived from phytozome v7.0 (chr-ID scaffold_33; pos 2301542 to 2302480)
gtcaacaaaacactccagtttaccagactcatcaggtttttccttgaattctagtctcgattacttttcaacatttgctacttgttaatcctgggttgtgagtctgtttctgactagtgtacaagctggagagatcagccaattactcaaccgacgctttcgactcaaatcgccacaatcaattgtgaacaaatctgaacctgggcatatcgttgcaggcattttcagaaacatgacgagcaaagcgtttaaagcatacaacactacgaacatttgatgttttcagggcctgtgattcaccaactaccgtgattcggaatctctctctctaggacaaacccggttcatgtgatgatcacttgtatggagagcagattccaaccaaaatcaaccaacgacattcatgagtggcgaaaagtggacaactgaagtatcctcgaggtctacattcgcgctgcattcatcttatgataaacaagacaaaagtcgaggattgggggtgcagtgtttgtgttctattttgttgcacgttatttatttctccgatcaagtgttcgacacaatgacaactggaattcttgatggtatcgagacaccgagattcttatcatctaacccaaagaaacagtgttacctgccaaacagaaacctctctctggaccctaccatttaccacaccctcgtcaacgtttccacgtttctagtaaacttccacctcaggaaagcgagaacttgcagaaaagccggaatcattctctcccggactacctgcatcgagtcggcagttaagaataccgtagccacaatgttggaatctaggcctatattgtcgcaggcctagaatcccaatgccttcctacgtctccgtggttatctggatctcctgaagtggagggatcgctagacacgaaaagcgggtggacgcttccataagtctgg

SEQ ID NO: 115115 - DNA, 449 bp, Physcomitrella patens
  Intron number 1 from transcript Pp1s5_346V6.1 (locus Pp1s5 _346V6) derived from phytozome v7.0 (chr-ID scaffold_5; po s 2558946 to 2559394 reverse strand)
tgctctgcaaaattacaacacggagcttatccatcgtatgttacagagaaatcatcaatttcatttttctaatccttgttaaaatatacattattattttaacctacttggtctttttttgtttgcttgtttttttacaagaatcaccgtttgaactaaatctattaaatataggtctaaatgtttcataaaaagaataacaaaaatacatgacagttataatcttgagtttatccatgctgcatgatacagttgaaatgtatgtatacattttgattaagttttgagcatcaatgatcattttattcttccgcaaaatcaaaaaattgaaacaaactcatgctcaatttaacaacatagatttgtatgtataatgtaattgaaaagtttgtgtaaaatgtaaagaaaatgttgttgtgtaggcattgaagagttacgtgaaaagaggg

SEQ ID NO: 115116 - DNA, 799 bp, Physcomitrella patens
  Intron number 1 from transcript Pp1s33_38V6.1 (locus Pp1s3 3_38V6) derived from phytozome v7.0 (chr-ID scaffold_33; p os 251424 to 252222 reverse strand)
ccatttattcgcaggctccctgagtttaaattctggtacgtgtgataatttttcagcatatttttaggcagaagtgtgctttctattttagacattgttttacttttgcttctgcattgccttgggtgcgttgagtcaggctggtcctgacctgctcgaggactgagcttcgggacatatgtcaaattgtccaatgcgggtatgagtgtggcagcgactactgcatgtatgtagaggaactgttaaaccacgtattggcagcaagaatgtgacattgactatgaatttcaggtatatagagcatgtactgtagtgctgttagctgaaacgcttctgttggacttccctggactccttaatgtctcttatgcatgctatttgagcacctattagttttactcgatcgaatgctgagctcacaactcgttgcaagtcagtggttcttcgtttttgtcacattgatatgatgtatgggtgatgacgaaaccgataatttagtgctcggctccaatcggtgagcagagtggctgactgctaaagctaaagatcgtgcactctaatttctcaaagcacgagttaagatttaacgggtgtcatgaacttatatccattcttcctgaaagttatggaagacaatcatttattctattctgggtacaggactgggattgttatgaatcatatttgtatgtgtttgattgggctgcaactaagttttaaaatgccatctcacgtaactctaattcatttttgtagactcatgttatctgactctgatacgcttttctcttttacaggt

SEQ ID NO: 115117 - DNA, 961 bp, Physcomitrella patens
  Intron number 1 from transcript Pp1s63_97V6.1 (locus Pp1s6 3_97V6) derived from phytozome v7.0 (chr-ID scaffold_63; p os 884095 to 885055 reverse strand)
tccctcctgccccacctccgcttccgcctccgccagtaagcctcctctctctaccgtttctcgccttgtgcgttctctgtctgttcttcgttgcggaggtttccgtgttgggatggggggacgttgctgtgtccgttagatggtatatggtatatggtgttgtatgtccttgaatgtggagaaaccccagggttagggtttggggtttgcggatgggcagagagggtgggcgttttagttagattcctgtggtggtggttgtgttgttgttgttggaattgagtgattggtgggggacttggcggagttgaattgaggttggttttgtttggttgcgtgcttggggtgtgagtcgtcgggaactggtgcacttgggatgggaatgccatagttttaggtttagcgggagttgtagagtggggttgtttttgtggtggtgcgaggagatggatggcgtgcgtggttgggggttgatgtgatatattgtcacgggattgcggaactgtgtcttgatatgcagcagtggtgattcacgcccatcgatgtacttttcgaaaccctcttaatcatgattttgacgaagagtttgtggtggtttataatttcgctgtgtaagagtatcgagtaggatctaggcccgtcctgtgcatggttttgatgggtcctttgtttaacagttagaaatgagttttaattctcttttgactgcgaccctctgctgttcagaacctctctggtcgtcaaatgttgacatttatagttataggatgatcttcgttgtcgttatgaaatttttgtgtttgcatttttggcaacgtgcttcgtctctaagctgcgactaactgtgtttttccaaggtcgtgggtcctaatttaaattcgcagttagtctcgttcacaaatccaattttgactttaacgttctggcattgtgctgcgcagacatacatccctcggaaaaa

SEQ ID NO: 115118 - DNA, 579 bp, Physcomitrella patens
  Intron number 3 from transcript Pp1s167_88V6.1 (locus Pp1s 167_88V6) derived from phytozome v7.0 (chr-ID scaffold_167 ; pos 397655 to 398233)
gaaagggtatgatgatctagcctacatgttgtttttaatattttacagcaattttgtaggatttgtctttctgacgtgttacaggttcttagaaatcgtgcttctttcgtgtttgccgtggtcgggcttcttcagcgtagtttgtccttttcgtcatcattgaaactgaacctcttcaagcttctgcaactgaccaactaaggatcgctggccgtgttcattttggtttgatttagtccttttctttacttgtactctatcctcattttctctatccttctgatgtactttgagcatacatatccttctaccactccggtcattactgcgaggagcagctgccacctctacgtcttttgcttttgatctgtcttgtctacaataagcattactacaattttaaagcttcgcaacgattttcttaaacgatcatgatcttctaagggcgtgcttcgcccattcaaatgctaaggaaacaaaaccttcgacaccacatactgtatgaaatgaaacatggacaatcaaggtttttttctgtgtggcgtgcaggtatagagctttactgtgcaccaacagcgg

SEQ ID NO: 115119 - DNA, 895 bp, Physcomitrella patens
  Intron number 1 from transcript Pp1s402_34V6.1 (locus Pp1s 402_34V6) derived from phytozome v7.0 (chr-ID scaffold_402 ; pos 212119 to 213013 reverse strand)
tcggagcttacgtgagttggagagattgagtgaggattggtgaggattagcgaggactgcggatgtcattgatgttgcgtaggttggagttgagcgggggtttatctgtgatcgctgcgttgaggggttttgaatctggatgaatttctcgtgacatgattttctgcgggtggtgatcgtagttcgaaggagtgtgttgaggcgtggaggcaatattacattggaaatcgtgcattcagtgctagtagaggattgcatttcattcatcgctgcattaatgttggttctcgtaaacttagtaaatgttgcgaaagcgattttgcgggattgacgaggatatccagcctttggttcatatctctggcttacttttgaatcaatcggcgtgtgtgtatatatatacacacacacacacacacgtatgcgcgtgggtgtgtgagtggaggtattagtttaattagtgtaaatgaattggagcgtccaaagctttttgctttaagtacggggttttaaagctttgctgctacatgttctggtgcagatatctcaacgagcaacttcaaaatacaactttgatcacagaatctagtaaggtgggagcgaagaattttgagtacgtcagtagtagggtctggtcaatgttattgcatgtttgttcatagaagtctttactaaagaatgtttggcaagtgcgatcagagaagcactttgctttgtttcaaagaaatttctgcaatttgttaggcttgccgtgatggtatatattccaaaagaacatagcatttttctgctattacggcagtgttcatctgtaacgggtgattttatgtaagtcagcaggtctaaattgtccctcgtgtactttcagaactacctcgttgagacgatcagatcg

SEQ ID NO: 115120 - DNA, 553 bp, Physcomitrella patens
  Intron number 1 from transcript Pp1s293_8V6.1 (locus Pp1s2 93_8V6) derived from phytozome v7.0 (chr-ID scaffold_293; pos 33392 to 33944)
gttggctctgtcggcgcgtggccgcagagttacaagtaatcgtgaaactaaagttttcttttaagaaaaattcgttgtggatggactgttcagcgtcggttgactggtttcttggcgtggtagacgaattatttggaactttgagggttgtgtatgagagcaattttggtattgcgttgagaatttgaggaaggagattggcatgcctttgatttgcgtttcattcttgtgattgaccaagtggtggcgttgtacgttgctgtgccctttctgttatcctgcttgtgttgaattttctttcagtttgtcatactgtttgtgcatggtttttgattcttttgggtctggttagttctcatttgccctgccccgtcccaatccttaagaatgtgatgcgaggcacggcagttttgtctggcgagtatttgacggtcacgagatcgcggagaagttggggttgtgctgcaggctgtgcatttgttaggccccggctcgtccgattagtgaaccataatgttatgcggtcattgtgtttggttcttgcagacaatcc

SEQ ID NO: 115121 - DNA, 321 bp, Physcomitrella patens
  Intron number 1 from transcript Pp1s218_100V6.1 (locus Pp1 s218_100V6) derived from phytozome v7.0 (chr-ID scaffold_2 18; pos 601522 to 601842 reverse strand)
gcaaagaccctgaggccgatcacatctactctgaggtctcaatccaaaactctatgtctgctttaggttttaagaaaaacaaaacaagacaaaaatcttcttactgtaggtttaagtttgcatagtgggacagacgccagagtgtgcattgagtgctggagagcactttctaacaagagagcgttgcggcacttccagaattagatctccgaagtttggatgtgaaagacagaaataagtaagattcttgtttctgtttttgattttgctttgtaggaagaaaaccgacgcttaatcctaaaagtgctaaatcacttgcag

SEQ ID NO: 115122 - DNA, 594 bp, Physcomitrella patens
  Intron number 1 from transcript Pp1s214_61V6.2 (locus Pp1s 214_61V6) derived from phytozome v7.0 (chr-ID scaffold_214 ; pos 517772 to 518365)
cgaggttagtttcgccaatttggagcagctgatgctttcagttgtgaatcatttgttcgcgccgctggtttcgtttttattttattttcctcttatttttaatgtttctttttgtaagttttctttttttctttttttttgaggttttttcagcgtccgtggctcgaagagtagattaagtttacaatccgtgagctcgagtctttgagaatgcactgattagttgaggatgcgtgcaatgcatctgcgccattgcattgctgttttcagttttgatttctagttttggtggttgtgaaagaggggatgtttggttatgcgggggcttgactttgctagatcaaaattggaaggacagtaagaccttttgagttaggtatgatttggtgcaaaatggaagctatgaccttttctggactttggtttcactgctgagtcgttacttgtggagtttcaaagttgatattgtgattgaatgcttcggctgctcattgaccgttttcttggatcacacattccgattgggcatggaatttgacggtttcattcaccatcctggcgttcttggtcgttttgtagattaaccacaaccaa

SEQ ID NO: 115123 - DNA, 975 bp, Physcomitrella patens
  Intron number 1 from transcript Pp1s301_54V6.1 (locus Pp1s 301_54V6) derived from phytozome v7.0 (chr-ID scaffold_301 ; pos 524003 to 524977 reverse strand)
cctctttctggactcacatttgctgtcaaagatatgtaagtatcgaccctgtcttttgtgggatggctctgtggttgaaatgcagtagttctcgtcacgagcagttatgctactcattggtctctcgataggaaacatcagtgcttaagaattaaaaatctcctgtcgttccttctctccgctgtctaaagaatcgtagattttctagtttatagcttcactgcactctgaagattctctcgttattgattttatgtcaaatcatatccggggggcttcatttgaatctagtttcacaccctccttgaattttgttcttatctcgcctaattcggcatggctcgtggttttgagggcatcttgtatgttttctcaaactcttttttgtggcagtcaacccaataaacttacgatgcttggggaccttgatccttaagaaactacgatgctcgacaaattttgaaaatctaactcggatgattcagtcgttaattggcttgattatagttcattgttacgtagtactggaagagagcagatggaagaactcagtcgaatacagttaaagctgtgaaattttgatctcttaaaattaaaatattctcaagccatttcggattgttgtactcatgggactctattgttgaaaggaccattgcgacaattaggtgtgttaggttcccttggtttatatttgtcttcacatggcaaaatttctagattacagtcctaggcaacctagtacgtcgaatcagctttggaaggattttggtccatcatcatcattataatccgattgttctgttggctgaaagctgctcaagcttcttaaagtatcataactagtagttggcatccagggtcatgcattccttacacctctctgtaactttcttagtgattgtcaaatacgtctgttagaaatcagcctttaatctcgccctggggcttttggtgtgttgaagaacagattcg

SEQ ID NO: 115124 - DNA, 573 bp, Physcomitrella patens
  Intron number 1 from transcript Pp1s13_374V6.1 (locus Pp1s 13_374V6) derived from phytozome v7.0 (chr-ID scaffold_13; pos 2375098 to 2375670)
gactccgcagtctatctccgcatcttcttggtcgggtgagtgcttaacactctctcttgaacgagtgtttccctctcactttcatcatctaagcactttaggcaacttcattcacgtgccatatgcgacctcatctcacgcggcatttcttctgtgaagcttctttcagcggatattaattcttctattttttcatttgtttttccattcttgtacttttaaggaatgccttgcattacacatacatgcaattattgaaaggaacaattaatccaaagtcccttgtagtgaggcttctcagctttttttccttttttcttttcttttttagattggttatgttcgtaatggacaggcgaaggtaggattctcatggtgcagtaacatgaaacccagtagatgggttttgctcgtttttttagttttacagatctcattgatctacatcaggacaactattgtggaagatatatgactccccatttcaaaatttattgaatgcttgaagttgggcaattgctgagaaacggatgttgttttgagttttgtaggttgaagatcttcatacccctg

SEQ ID NO: 115125 - DNA, 522 bp, Physcomitrella patens
  Intron number 1 from transcript Pp1s55_284V6.1 (locus Pp1s 55_284V6) derived from phytozome v7.0 (chr-ID scaffold_55; pos 1749404 to 1749925 reverse strand)
ccctcaggaaaactcacgcagtacagtaactgcaggtccgaatttcgatccttgccctgaacaagtacctgcaaatgccgattgcagtctcttcacacagtagagcggctatagcagattgtagtttctactgttgtttgttatttgattgcttgctagtaaatttgtttgttttcttttcctttttctttcgttcggaccaacttattagcgcttcgaacctctttggtacttgtgttcaaaacttgccctgggattgtccaccttgatctatgatttaccgtagtaataccaacgctattcattcacctgattatctgctactgtttattcgagaaatcgtcgagcacgagtcactgaattgtcgctgggagtgtttctatcttctcggagacttaaacgactggcagctgcacattcgcaatatgagatgacagggtccacttcagagtaattttctgtctttaattcgtctcacatttgccagaaaactgacactttcagtgtggtgcagtatcgaag

SEQ ID NO: 115126 - DNA, 748 bp, Physcomitrella patens
  Intron number 1 from transcript Pp1s265_4V6.2 (locus Pp1s2 65_4V6) derived from phytozome v7.0 (chr-ID scaffold_265; pos 29004 to 29751 reverse strand)
gtgaaccatcgcttgtgacaaatctttggttggtggtaagctgctgtacgttgtggtggttcttctgaggatgcaagcacatgcagaacgattgggtattttagtttcgccggttagtttcgatgattttgatttgagagaaaccatgtgtgttttggttgtcttgaaaaggattttgtattcttagacttattgagcggtcgtgattgtgttagatcgtcatgctagtgagcaatttattgggcgttaatcttttcccatgattatctagtttgtttcggctgctcggtcgaagattttacataatagagtttattccctgttgggtccgcctcgaaacagatttcggtttgggcagggaggtgggtttagctttatcgatttgctagtttggcttccacctgcgtcactcagctctgggactgctcctttcgatcattttccagacatttgtgaattctactatccccggttagcccgaggtatcgtgtctgcatgtcaaccaaagcgtagaattgcaaaagtcgatggagaagttgccgagtacaattaacgcatggttacgcttctcctggagtggggatcgttagctcagagcttgttgaatgatttttgtgaatactctttgctcggtaaaattgatgctttagtccgaagttcagattcattcttcttaatcgttttaattttatcttttaaatttttattggcagacatatcttccaatccactagagtgaattcctttg

SEQ ID NO: 115127 - DNA, 488 bp, Physcomitrella patens
  Intron number 2 from transcript Pp1s46_217V6.1 (locus Pp1s 46_217V6) derived from phytozome v7.0 (chr-ID scaffold_46; pos 1599110 to 1599597 reverse strand)
tgccaagctaccccacctaccgtggagcctcgacagtaagtgttaattgccgaattttaatgaggaactgttttgactgtaacactggttaagtctgcgacgctggcttagactgtaacactggcttagcttcttgcttattttttattgattcccaagatgcttttcaaaataatataatatctgaccatggatccgtgttctttgcaatcactgaatcccaaattgttcgacggaggctacttcaacagcgcgttgaatggaagagacctacctctttgattctggtgctgaggatcttgtttctacatgagaatgggatgtatcgtcaattaacatgcccaaagtttggattgacttctgctatcattcgagagacctgtgtacaggacacaaagatcacaaaggccttatcggtgttgtgtgcctatggaccttttctgtttgctaaagttggggaggaatcgcaagaagctcttcggcatcgt

SEQ ID NO: 115128 - DNA, 1043 bp, Physcomitrella patens
  Intron number 1 from transcript Pp1s268_63V6.1 (locus Pp1s 268_63V6) derived from phytozome v7.0 (chr-ID scaffold_268 ; pos 399765 to 400807)
gttgtggaggacgagacgggagtcagtggcactcggtaagtatcgcttgtcctttaattggtttttcaggtgctggtgcttcgtgtatcccacaggaggattcgggagctgtcttggtagttccactggatgcgaaatctcggtgtttatatttttttgatgagcctggacgtaggttgcgaattaggacgtgttttgcagcaggaccagcgtgcgaaagattctgcccgaacttttcttcgttccttgtcgttccaagagcaagcagtatctgtagtcgaaaatccgccttcttcttgctgaagttcttctgaacccgttgtgcttcggcttgctttctgttcctgcaagaattgcgggattccattgtgttattgttcttggagcttaagaactaagctggcgtaggaccttgtgttttaaacctatatgattcaatcgccactagctgaagcagcaatatcagtttcgtttttaggaaatagttacttctgcttttgatattagatctacctcactgcaatggaagattcctgcgcttgcttcgttttttttttttttttttttttttttttttttaacttacccaaatcttgtgctaaatggatgcaaacttggatcagtgaggggctttgcttgagcgattctgttgaggacatttccatctgtgttggtaattctattgcaattcgtaaacttcggatggaacagtattgagagcatagtatcgcctacatggaacacgaaggatgcagagggtttaggatttatcctggtttcacagtagtcaatagcaacagagctaatctttgggtggagctggctagttgttatgaatctgtgtgatgcaaacacatcgaagactcagcttcacaaatccaggatgggcattaaacagcgcttctcgctttgcttgctgatctgaagaatagttgtggacaagaaccaccgtgtacgagagaaccttgtgggggcatgactgagaaaatctgttgaaattgattgtaggtaaggtacgtcaaggaaaacattatctgggaact

SEQ ID NO: 115129 - DNA, 409 bp, Physcomitrella patens
  Intron number 1 from transcript Pp1s350_47V6.1 (locus Pp1s 350_47V6) derived from phytozome v7.0 (chr-ID scaffold_350 ; pos 379951 to 380359 reverse strand)
gcaggtaacagagctggtatcacatggcgagatgtcgcgtgagggtgatgagaatggcgaatttctgccgtgctggcgaattcttcgtgttgtgttgtaaatttttttttaggtgatgttaacattcgtggttcagtattgcgaatgtacgttgtggtttttaagatttgggagacaagggagctgtgagtttttttgtttgtttgtttgtaatgtttcactccgtctctggaagaaattggagtggcttcttagttatggaagccgttcttttcaataatggttattgcggactgttttgatgatttcatcattgataaattttattgtgcgatgatcttcttggcggattagatgatttccagttttttttttgatcgagtgagtattagtgtgcagagagttttaa

SEQ ID NO: 115130 - DNA, 600 bp, Physcomitrella patens
  Intron number 1 from transcript Pp1s29_47V6.1 (locus Pp1s2 9_47V6) derived from phytozome v7.0 (chr-ID scaffold_29; p os 320053 to 320652)
cttcaggttactcaactaattttttctccattaaagggattttttgtttttgattgtacataaatggtaaagaattttctgccattgtatgtggtaccatagagtgcagtcagattcagttctgagaggtaaaatttgtgttgtgttttctgttatggtggtcgctttgccatcctctagaaaagcagaccgacactgtgtcggtcttgtaagtgtaaaaagaagaagcctcctagcagacttctcgactgactactgtattatagagcttgatgcccgatgcatcacatatgtctggagtttggatttataaactcactaattttggtgttgtatggttcatgattttgcaatacagaacgtcagaggccttgtgcctatccttagtcatcctaagtttaccacctatattgttacagctcttctgaaattacagccttgttattattggtgtttattcacttgtaagaacgcctgtctaagctacacgtgggtgatcaatttgacaagattattaacagtcaggtcactcgtcatgagtatcgatgtgctcttgaaaaatgttcatatacagttcgaacttggggttgattcaggagg

SEQ ID NO: 115131 - DNA, 683 bp, Physcomitrella patens
  Intron number 2 from transcript Pp1s13_177V6.1 (locus Pp1s 13_177V6) derived from phytozome v7.0 (chr-ID scaffold_13; pos 1173008 to 1173690)
gcaaacaaatcgatcgaacattcacctttgacaaggtcagttgacgacctgcatccgtttgtttggttttggtacggggcagaattactccctcaatgtgcaaatgcaactcacgtcgaaaatttgaatttaatcgaagagtcttcttcgtaacgttacgcatttggaacggtcgtactccaaccgggttgtgtgaattttcactcttttcacctttgtaagtctgttctttccaaaagttttcgcccccagcgtagtcaaacttcattgtgaattgacgcgaccatggaataggtctggcggcgctattttgtagtgccgtcaatttaatatatccaccacagccccttcaatcactgtatccgtgattttctagcttttccttgtagttacccccttgctttggctgccgttgaaatcctgggcagtgttgacatgtttaattctctgccaaagcgtttcaattggaacaattgctctagcaactatgactgaatagctcgtttttcaccgctctctgcatctgcaagaaataaatctgacgccgatttcaacaaatgagtttagattgtgtcatcatccattgtgaaacaacgaccaggttgtctgaagactctcactacttgttgcatctttcctgccattcaggttttcggaccgcaatcaaggcaattagacctgta

SEQ ID NO: 115132 - DNA, 355 bp, Physcomitrella patens
  Intron number 2 from transcript Pp1s94_120V6.1 (locus Pp1s 94_120V6) derived from phytozome v7.0 (chr-ID scaffold_94; pos 882044 to 882398 reverse strand)
catcgaatttacttgagaaacaagatatacagcttgtgagccctctcagacgcctttataactacaaactgtaatgttacctgtgtcgaattttcttgtaatttttgtttatttactgtctgctcgttttaacttgaggacgtactttgttcgtttttatactattattttaattctagtatataaatgacgaagacaatgttttggtgtgcgcttctttcttcaactaagatagctaatgcatattcaatagattcgctttatgttttcagtggtttcttgttctgtaagaagctattcattctccctcttttgaaccttgttcttggtttgatgcgttgtgttataggcgttg

SEQ ID NO: 115133 - DNA, 303 bp, Physcomitrella patens
  Intron number 3 from transcript Pp1s54_107V6.1 (locus Pp1s 54_107V6) derived from phytozome v7.0 (chr-ID scaffold_54; pos 689503 to 689805)
ctgctcaacaagctttgcagccccgaaaggccaaggttggtatttcacgggaaggatcttgggcacatgactgatctttttagcacttggatttaatatcagctcacccccacctgaattttaatgccttctttatcaatcagcttttctttctctgtattttccctctatgatttatttactatacaagaatccttaaacactattgactgatgaagaacgggtacatgcatcattgtcggcaattgccaatggtgctctttaactttgtttttgattatcgccctgttcaggttgcagtaa

SEQ ID NO: 115134 - DNA, 1050 bp, Physcomitrella patens
  Intron number 1 from transcript Pp1s41_291V6.1 (locus Pp1s 41_291V6) derived from phytozome v7.0 (chr-ID scaffold_41; pos 1994424 to 1995473)
ccaatttgcagacgagtcggaagacggttgcagaggttggagaattaggactttggtattctgtttcaaggtgcttgagttgtagtgacaattatggagaggcaattctgggtttgtagggtggttctgcggtgactcaggattgttgagtgagaagcattggtttaatgtagttgtccaccgtcgtccagttgctttagtgcagccgatacgagaggcatgtggattcaagcggggtactccaagggaaaattgtcgatgggttatgtcaacgtttcgagaaaggacttgtcctttaaaaaagtcctttgcatgtgtgcaaattgggttaatttgacgggattgaacttgaatagcaattactattcgcgcgaacttttcatctgttccgcaaattagcaacttattggcgaagtgtgccaagctgcagttggttacaaaggctagggtgatgctaaccattgtgacggtgaggtcagccgctcaatttggcagccagcatttactcggttgtcaggtttgaaatttacgtacaagttatgggcaaaggtgtacgaaggagaactgaactgagacataaattattttgaaagtggcgaagcgggtgcagcagctggagacgtcgcctttaggttgacaactgaggcagaaaatattagtcacgcttttcatttcgtaccccatgcaagagaaattgcgcgtctcagccaaacctgtcgacatctacttcgaaattagtgcattccagaaaatgggggagttcgagcagttgaaaattctgtgatattttgaacacgctgttaccatttgagcaaccggcaaacgccgttgtacttttttgttatcagaacctcgttcatgtgatgccttttgggaggatgtagaatcttctttttccttggttgcagttttcaaggtacagtgtgctgcagaatcattccttccaatccgattgcttagtgctgatcacgattttggtcaaacctattctctcactgaacgtgaaatttttgtcgtcttctgtcgcagttgggtggtctcgacatagca

SEQ ID NO: 115135 - DNA, 967 bp, Physcomitrella patens
  Intron number 1 from transcript Pp1s20_124V6.1 (locus Pp1s 20_124V6) derived from phytozome v7.0 (chr-ID scaffold_20; pos 752321 to 753287)
aggttttcgaagcatcttcagatcactcgcaacaggtatgttgtgaattttgatatttggacatcatgtgattcgtggcagtcttaggcgtgtgcaagtaaatagggtttgtcgttgcgatctggcagtgtatatacgtggagtttgtgtagttggttttgagtttggagggaggaggtttaagtatatatgtgctttttatgtcttgttgataccgtacccatggatttgtttcacaatgctggattcgtagttctagtcgaaagttgttcgtggctgaaaattaagtggcggggcatgtgatagctgttttttggttcattttacgagggaagactgttagcattttgagaccaatcgatcaaaagcgattgctttgcgattgcagctaggcttctcaaattatctgagagggcaaccatgccagattctttcgcggaaggatgcatcgcgttgctgtagtctctagggtactaactgagagctgaagcgggtaaacaagtgctgcaggaggttatggtgcgggagtggggcttctagtttgagccgtaaggtgtcatttagctctgcggtgaggattaacagtagccaccaattttctcgttgcagcctcttgcctctgaggtgtttccaacctctcctcctaaccaccattgaaaaagaaaaagaaggagaaacctaacatttactcacccacccacctcctcaacccctcacacgtagggacatacatacatgttatatttacataaataaactatatattgcttaaacgccgcttcggacagagaatgtgatgtgttctaggatggaagatttgaattgtatgcgctgcacaccttcattttctgggatcataggctcaatttgaatttcgttcggcaatgtcgtgcagaattatctggggaaccatagtactgaatcttctgtagcttggttttagctgctccggaagttactcgggagc

SEQ ID NO: 115136 - DNA, 1046 bp, Physcomitrella patens
  Intron number 1 from transcript Pp1s1_490V6.2 (locus Pp1s1 _490V6) derived from phytozome v7.0 (chr-ID scaffold_1; po s 2883382 to 2884427 reverse strand)
gcagtggagcttcgaagtctgaatttgggctgacggtgagtagcaatcgctggcgcaagtgatcgcctcttgtgtcgaagcgtcgtgttctttagcttctggattccttttcgtggtttatgcatctgcacgttgacgttgagcgtgatcgcttagtactctgggattatagaatttcgcagctcaatttttgtttaacagttcatcgagttggcttttcctgcaatagagtcgccttcacttctcgctttttcagtccagctcgaatgcttttcttcagaggtacgaagattgtttgaaagttcgcacgtaaagcgtcgaatgggttaataaatactctgattttgatttgttgtttatctttttgtttttattttgttattttagtgaaggcattagaggacttttatggtttgtgaatgtaggcgttgcttgagaaggtctgaagtgcgagaattgggcctggttagttagatcctgagtcgtcacttaatgaaggggaagctgacttcgagctgggatttggtaaagcctgagattacatgtgcaaagaacctagtgaatgtagaatggatatcctccttgtttagtccttgacacttgaagtgatagtactttgctgagagttcaaacggaccttaggaattggctatggtcttcgatctatcgacaaatggttttccaattgagttcatctttcatttgagtttttctcgatttttagtaaaatctctctttttggaaactttacaacttgagttcccactctgcttcataacggacatgcatgtgtatagagtttatcgtgctcaattttccatttgctgggttcctatgttcaacttgtacttggttgggacttagatgagctgcaggcttacagcgggtactattttacaggagtgcacgtatataaacaagttgttttgcgggtttagtatcggagcataaaaactgaaagatgcactcaaccatgactaatttgtgacgatgttgcatctttgtgatcaggagtgctgtgattgctcttgtgtagttgaccaaga

SEQ ID NO: 115137 - DNA, 1034 bp, Physcomitrella patens
  Intron number 1 from transcript Pp1s192_51V6.5 (locus Pp1s 192_51V6) derived from phytozome v7.0 (chr-ID scaffold_192 ; pos 463534 to 464567)
ttaacttctgcatcgtactgggaggtttgtctacatctccgcgggaattttctgcgtcttttggtggtaattttggctcaaccggtcgtgtttgcgggatctggtgtgctgtggtgtgttgatgcggctctcggcggtttgggacgatccgttgttgctcgctgcctgtcatggttttttagggttttaactctcgtgtgagttgatttgcttatttacatgattcgaagtttcacggtgtggtggtttaggccttgtataccgacactggggtatttggtggattgttccttgcacttgtagcctggatgcagtggtagatgatggtgatgatttggttgttgggttgagaatggaagttttttcgtctctctctattttgtttttattttggatcgcaatgtgattgccctgcgggtttaagtttttgatggcctctgtagcagagtgcagtgctgtaagtcgattaggtgtaacttgaattgtggaggtttttgctatagtggaactaggacatgatgtgagatattgattatatttcggagatttggattatagctctgatccggtctcgtgtgttgctcaattactttacttggatcgtgaatagcacatgctagtgcgaggaagtgtggtattctcgcagattagggtatttgagttacaagcggtatattgagagtttcttcctgtcataatgtagactggtttttccttgtgaatttgtgaatctctgctccctgttcttgtttgtacaatttgattgaagcattaggaagagtgaggattcctatttatgtgatcaggaaatattgtgcttcatcactcgtagaatgttggacccgttgttattattcttgagacatttctcttaagtaatgcgcacaacaaggataatgtactggttctacgcatccctgtgacccctttgtcatgtacttaattaattaattcacttttcatacatttaacgtgaatagtctgttcttgcgtctttagtgctgctctcaggcctgtacgtggtactcataccg

SEQ ID NO: 115138 - DNA, 227 bp, Physcomitrella patens
  Intron number 3 from transcript Pp1s179_34V6.1 (locus Pp1s 179_34V6) derived from phytozome v7.0 (chr-ID scaffold_179 ; pos 530029 to 530255)
gacacgaagaggtgagctgtgcttttctccgtggattgactatcgagaggattctggtgattatttttatttgtattttttgggaaactcttaggttttttcttcgtggttattttctttattttgatgtctcttacttgcatggaatcgtgattaattgtcgatggcgttggtgttttctttgagttgcaggctaagcaccactgaaacaatttggagttggctta

SEQ ID NO: 115139 - DNA, 962 bp, Physcomitrella patens
  Intron number 1 from transcript Pp1s133_132V6.1 (locus Pp1 s133_132V6) derived from phytozome v7.0 (chr-ID scaffold_1 33; pos 1057291 to 1058252)
atatattccgagggatctcgcattgaagtaagtactgtatcatctgcatttcttgcgtattctttcgctgcaaggaagtgagtaacgcatgtctattagttattttgtaagccttgagtgagtactcagaatcgagagcgcgcatccactgtggaaaatctagatctgattccctcttaactcagattcatcgcagaacttttccgcctgtgggtccttggtaaagcgtctcgagtctctgaatacattttaagagattttgaagttctttcaaattattttaatgcattctctgtgtacatcgttatatgattaactcgagatatctctttaaaccaaagcgaagttacctgatatcatctatcgctctagccaagttttgtattctaccgagacattttgattttgaacgtgttagcaagaagagcatcgcagctactagttttgaagggcacagattgatcagttttgtgaagtagaggtccagcattgcgcttctgggttgacattgcggacctttcgtagaattctaagttcagaagttgccataaatgtagcaaaggtccacagtacccgataataataagaataataataatgaaaacaataacaataagtatgaaataaataaacaacaacagcaaacacatcatactaaaagctggaaaaagtttcaaactatagcttcgacaatggttccgacgaattgaaccgggtgaggaggagggattttttgtgagagggacgaaggagagttcaaggaatttcgttgaatgctactggtggtcctgttgccgtggccatctcagaacttagtgccgtgacgttgtaggaatttgttgagatactaaattcacctgcttatttcatattgttgagttgacgaagtataccatcccaaacgtctaactggtgttttggaacctactggcagctcgatccttggtgcatttcaattggga

SEQ ID NO: 115140 - DNA, 785 bp, Physcomitrella patens
  Intron number 1 from transcript Pp1s35_59V6.1 (locus Pp1s3 5_59V6) derived from phytozome v7.0 (chr-ID scaffold_35; p os 247317 to 248101)
acagtagaagcgcaggtaacgaaaaaacttgagctatccagaactatatccatcacaaagatagaaagaaacttttgtttgtttttgtttttgtttttgtttttttttttttcctttttttttttttgtttttgggcagagacaaaagagatatcaccaacatgtaattctattccaggttgacatggctgacaataaagcaaggctttgcacgagataaggattatctttacacctgcatgtcattattctaagtagcataggatgcacattctatccttgtggtcaatggaccttgctacctttttgtggctctccgtgatcaacatcgattacggtggtctgccccatcaccagtagacatagctggaacattaacaaaatttcccagactttcttaagatgagtatgaccacacaatcctctaaaactccacgtcagatcgagcccatctttcacgcgtacgaagtgtgcatcctcattttaatacctaaaaatgttattcaacaataccatcaacaagaaatttacaaattcaaatccatattcctacacgtcagagcgaaagcaagctcaccaaaacctaacacaataatccaaagtaatttaccatccgtgtttacttcctatttcaatatctactggaagatgaacccattcaaatgtaatgtgaaccccaaagaactgaagattggaaacagcttgtagcagagattgttgcaaacttgacctaatctttaaaattattgaactgattcacaaatttgcacccgcagcgcaggtaa

SEQ ID NO: 115141 - DNA, 618 bp, Physcomitrella patens
  Intron number 1 from transcript Pp1s224_89V6.2 (locus Pp1s 224_89V6) derived from phytozome v7.0 (chr-ID scaffold_224 ; pos 511836 to 512453 reverse strand)
agtcgacttgcgccgattcttgtacttcttggtatgtgcgtttacatgcttcttattgctgcattgtggagagggcatcggtgatttggttggaatttctcgtgaagctagagtatggaagaggtttgtggtgggtttgaaacggggtttgagatttgtcggagtagcatgcaattgtgaacgcctttgtggcagctgtattcggtaatgttgatccttggattggtggttttgttttttcaattgcaggtgtaattagaaggtcgctgtggcagtcttctctgcaatttctagaatgtatacatagctgtgcagtctgttataagttttagtgattgtccttgttttgcagagagcattcctgtgtttgtctgatgtgggtgtctcggtcatcttttcttttaagtgtcggtctattttgtgatgaatgcgtcattccggtgctggagccagaactgagtggagaatctcagtttgtgagggtataacaatgagttgaactgaactgaattggatttgattagattgatgacgacactatggtatcttctcgtattctaacactatatccatcttgttcacgcagcattcatcgtcattgtcattgcgttggcttcc

SEQ ID NO: 115142 - DNA, 559 bp, Physcomitrella patens
  Intron number 1 from transcript Pp1s14_373V6.2 (locus Pp1s 14_373V6) derived from phytozome v7.0 (chr-ID scaffold_14; pos 2256560 to 2257118 reverse strand)
gaagtgaattatctccccgatcgaggaaaagaagggtatgtgctggatctgaaattgaagtttgatttcttgccaaattaatcatggatttctttgaggataagaactatcctcagagattattagagattaccttctatttggacgcatggctttacatcagtatgaattatttgttggaacgcaagcactatgaactggctatggggcagcatcatatttctcacatgtttctaaatagctacaaacccagagctatcttgcacaacttgccctccgatgattctaaggcattcgtcatgtttctttctttttgctccctggctttacaaatacatcaaccctcgagcgctcgcagattctgtgatgcttgattcttcaacacatagttgtcccggagacttcagcttgtgattaatccaactgaggaggagaggatggtggaaacacagtcaaatctcaattccttttctccctttgtcatgccaatttttcgacgaatcaagctaacctgagtactaattgcaagtcagctttggtgtcacttgtaaacagattt

SEQ ID NO: 115143 - DNA, 887 bp, Physcomitrella patens; identical to SEQ ID NO: 114652
  Intron number 1 from transcript Pp1s41_21V6.1 (locus Pp1s4 1_21V6) derived from phytozome v7.0 (chr-ID scaffold_41; p os 138358 to 139244 reverse strand)

SEQ ID NO: 115144 - DNA, 902 bp, Physcomitrella patens
  Intron number 1 from transcript Pp1s355_2V6.1 (locus Pp1s3 55_2V6) derived from phytozome v7.0 (chr-ID scaffold_355; pos 9925 to 10826)
gagaagttgaatcgtgtgccgtcgaagaatatcctgtaagtgatatagatgcaatgggtcttctgctagtagttttttcgttaggttttgtggtttgcggagatgtagatgatcgggggttttcgaatctttaaattgaattgtagattgctcgatgtctacgagaattttaggaatggacaatcctatgcacttcaaaacttcgtgtggcaaatccgtgcttgcgagcttgaattacatcggtgaagtgtggctgttagagtctttacccgaggcagtgtagcggatgtttgagctttcataataatggtgacagatgtagaaggggggacgaaatgttagaagttgattctcccaaaagcctcaaacttagaaataagacacgtaatgttgtaactgtagctttgtagattcgattacatggtttggaggaaatggccttcatgataagcgtctatcttttggtagtttgttctgtttgcaagtattgttcaactgagtcacgttttgccatcaaccaccttatcatttgttattttagatgctactcttcaagattctgctcactcttgccctgtaggacaatgtcaacgatgttaactggtgattcgtttgtcttttctcactctcaagcttgtatacttccttcctcagtttcgtatcctcgtctaagcgaacgaattgtgcttagtctgtacgggtctatgcacggatatagtagtgcttcatttaacctaattagctgtatttcccttggtctatttacgtacatccaagactgtgactggtacctaactgtgggttttggattttgagctcaaattaatggctttacaaagtggattgaacaatgttgataaatgatgttctcatgccatttttgcagaaacaaacgaataaga

SEQ ID NO: 115145 - DNA, 512 bp, Physcomitrella patens
  Intron number 1 from transcript Pp1s80_55V6.1 (locus Pp1s8 0_55V6) derived from phytozome v7.0 (chr-ID scaffold_80; p os 274756 to 275267)
gcctccttgaccgagatcatcgcattcctcaccaggttgtgttccttttttgtgcctttgttgccatgcatttctaattagcattctcaattagcaatggtcttatatagtacatcggctgtttttgcaacttactttgcaaggtatgaacataaaattggaattcatggttgcttgcctgtttgagctttagtattgactcattgggttatgccttttgagaagtgtttataattagtggattgtgttttgttgattgaaatgataatgtgtgttaccttcttccagtgtgatttaagatttaaaagtagttattattattattgttgttgttgttgttgttgttgttgtaattatcatgtaaacagaaatggaaataaaataaaatagaaaaaaaattaactttgttttgaagatttgaaaatgttggcttatggaatcagtgaaggaaataataaagaaataaaaattaaagaattagaggttgctcttgatttatcagaaagaagtag

SEQ ID NO: 115146 - DNA, 353 bp, Physcomitrella patens
  Intron number 1 from transcript Pp1s19_21V6.1 (locus Pp1s1 9_21V6) derived from phytozome v7.0 (chr-ID scaffold_19; p os 183266 to 183618)
gcgcacatctaacagtgctgttgctgcagctggtaattctttggagtagattgagcagagttggtttttcttaaatcaaactgagccctagccggaatttttttcagtttagggttttcgcttcagtaaattgctctatttatatgtttttaaaacaatttttttgtagcatgggttgctcaggtgtgtggattcgaatttttctcagtctgaatgttttattttttatttatttttattttgccgctttagcatagtttgtagccttgtaggtttcttcgttttcgtatttagagtttttcatgtatgattatggaggttactgaattctgctgttgcagtgaaactgtcag

SEQ ID NO: 115147 - DNA, 495 bp, Physcomitrella patens
  Intron number 1 from transcript Pp1s54_184V6.1 (locus Pp1s 54_184V6) derived from phytozome v7.0 (chr-ID scaffold_54; pos 1113074 to 1113568)
gtcaggctccgggagttcgtccaaaagcgcagcaggtctattctgaaatgcctatgattattttcatttgtcttttttctttttggcctgtgtaatctacagaccgttgaatgagatttgaatggtaatattataacctcagcacatacttgcagtggattcaagtctcaaatcgagaaatatcggaggtttcagttttttcaatgtttccttcctgcagaagagtctatttgtcaagaaattttccatcgcttcgcatattttgatagagtttaggcgtttattatatatcttattgccatctttgtacatatttttgcattgctcatactctatctgtttcaaattttggagctgatgatgtcattgtttaaggcttagtataatggcaaccgcctgcacagttgttactgcgattgtttcctttttttattaccgtaacatttgacttatgtatcagagcctctattgtcaaaattaccgaagacggtccat

SEQ ID NO: 115148 - DNA, 524 bp, Physcomitrella patens
  Intron number 1 from transcript Pp1s38_240V6.2 (locus Pp1s 38_240V6) derived from phytozome v7.0 (chr-ID scaffold_38; pos 1405144 to 1405667)
ggaagggtttgagtaagttttttcttcttgacatttctgtcggcctgagatgtgacacttttgggtgattgaaagcctgtagagctcgttgttcgatgagctcatacgcatccgtctccctcttcagtgccatttatcaaagggtgtacatgtagagcttgcactggatggtcatcgcatatacaagactatactgcaaatgccttttgattgtagtcactgcaatagcttaataggatatctgggagcattcggtcagtcacagtacatcagaggatccggaactgaaggtcacggactcgcatgttttgcttcaaagtcgtaattcaaattcagtctgctaggcgatgtgtcgaattcagaggtgtagctcatagattaagtatgggttcgtcgttttcagacagatcttttattgcagggtggatacgaaagaattagggttgcgtagggttggaaagtcgacttcgtggcattattggtcacccattttcttacgtttttactatcgattgcagaaccta

SEQ ID NO: 115149 - DNA, 926 bp, Physcomitrella patens
  Intron number 2 from transcript Pp1s94_169V6.1 (locus Pp1s 94_169V6) derived from phytozome v7.0 (chr-ID scaffold_94; pos 1428914 to 1429839 reverse strand)
gaggagagaaaatcaaagaattcagaccagtcaaggtctgtggacaaagttgttcgaaagacgttctattatgccaaacctcttagtgtggatatctaagtgaaatctaacgacaagaatgttgctgttttagagctcaagaatggaggcctcggatgccccttgcttattcataaactttgggcaagatgctcctgccagacaggttcaatatggcctgacgtcattagatttttgttaattctcgtcttcacgatttttcaacaatgttcagttgtcatgcctgctgatatgggaggctgcattgcttcagggattgaccccaattgctggtgcaacgttagcatcacgaaaggacaagctaggagcctcctgaattgcattcttcaggtgtataattacttagttttgtaagctgttttactaccctaaacccttgactaccttggagttttttcggtggggcaagatcagcttagagctcagcgttgcaagatctgccactgcctttgtcatagtattctagtgaaagggtaggccttttaaacaaatcttcgatttccctgagcatctttttgttgtttgtaccgtattttaatcttcacgtatctaaaggtgtatgttaagggatcaaaagccaccctatccccccccccccctcctgggcaaccggtggattttctgatttctagtattgaagttgtgaggacttcttgcaagataccaagaaagcagatattcctgaggttctgaagaggcctaagtgctcagtaatttcaaaacttggtgctcgcaatgatgtgtcttatattggtctgatcttcagataagaagctgatgaatacagtgtgaagtggcccttattctacattttttcctgtcgagttgcagggcaaaggttggatttggtgttctcacggatatcc

SEQ ID NO: 115150 - DNA, 818 bp, Physcomitrella patens
  Intron number 1 from transcript Pp1s23_266V6.1 (locus Pp1s 23_266V6) derived from phytozome v7.0 (chr-ID scaffold_23; pos 1922053 to 1922870 reverse strand)
gtgttcttggtgaccgacaactacaaactcttcaggtgtggtgtttttgaagtaatatcgttaggctgttgtatgtgggatgctcgaatcttgatgcacacgagtccagttatttgcatgagggtccagtttcaacacacatggagaatgatgcgtggttgaaagcatttcaggactggttcgggtaaagtcggattgcacattggtagaagtctcgcgaaaacttgctgccgtcactgccctcttcactaattctgaaacgaagtatcaacgccaataaggaatattgtcgatacttggtttctgcacaccatttatgaaaagtttcgacaaaaagattagtgattcaaattgtagactaaaagtgaagattccttcccaggatgaagaatctttgacgtcgcactgagagtcagactgcttgaagcaagcacctagtgttgtggtctgggttcgtgagatgatcaagggtgtgaatgttattatctcatagaagctcatcgttttttatgctgtgatgaaatgtaaacttttactatttttcgggacaatcatgcttcctcacaatccatcgtagtatcttctattcccttcgaaatctgtaactgaccacgtgctgtcgcagacgttttgttttcttacatcacgtttcactcacgtcgcagtccctgggtcttctctgatatttgggcatgttttaatgtgtgaagttgcgcaggaggttgtggaactgagatgtccagtagtatggaccctgcgcatgaatttgcactttgcgaaccttcttaacttgtcgttattcttctgcaggttccttg

SEQ ID NO: 115151 - DNA, 318 bp, Physcomitrella patens
  Intron number 1 from transcript Pp1s386_30V6.1 (locus Pp1s 386_30V6) derived from phytozome v7.0 (chr-ID scaffold_386 ; pos 240424 to 240741 reverse strand)
tgaagctgcagtgactccagtatctcttggtcgtaatacgtaatatctcttgatgaatacttatatcctcattgggattacagtgcgcacgcagcatttcgcatgaaaatatctccaaatcgaatgcattggtcctggtcaacagatgtgaaggatttctaatcatgtcaatttgttttttcttcttattgtcgacttagctagagcttctctcaaacctggtgatcctagtttatgacctaatcgtagcctgatcagttttgaaaatttattgtggggtcagaaacagtacaaggttttgagaagacaagatcagaa

SEQ ID NO: 115152 - DNA, 954 bp, Physcomitrella patens
  Intron number 1 from transcript Pp1s88_12V6.1 (locus Pp1s8 8_12V6) derived from phytozome v7.0 (chr-ID scaffold_88; p os 57023 to 57976 reverse strand)
gggaagacaaaggagcctgaggggaaggtgatcatctcttcgtgttttcttcttttcatttatttatttattttttctttctctgttgcttctcgatgcgttgattttggaaagttgattggcgtgggagatgggatgaattgttggtgtgtcgcgcagtgctctgctagggttcctcctcgtgtgttggtcttaaggattagtgccatagtctgacgtatgttaggtgcgcagcgaagacttaaactactcaactgaaacaggggtttgtttttgtcgagggtgaacgtctgtcattccttgtgagtaggcagtcattccaggtctttcagaagtcattcaatcgattagatcaatcatatggttttcccatttgcctttccaattacttcgttgtgtttttatccgctctctagcactagttggataaaattgtatcacgctgggattcggagggtgagaatccttctgatgacgctgtcaggcaattgaaatctcggcaataccggttgcgttttagtttctcttgattttatacctctgataatcggcttcaaattttatctctccagctactaccgtgatcgtctgttgcagccgaagagaatcgcagcatcgtagcatgtttcactggcagaaaatggaagaaaacaaagctgtataaaatttgagtcttgaaagatgaaattcaatcattggttcttacaaatccaagacacacattgatggctttaactgttggttgagaattgtcacgaagcacaaccaaacactaacgattctggtcttacaaatttcaaaatatgaaagatggagacgcaagatttcctaggagctattgtcgtcaagtatgacgaaagtgcagagctagagtaagtattttcgtctatttgctgacggccgtatttttctttgacagattgaattttggaataacccagaacggtctggttg

SEQ ID NO: 115153 - DNA, 929 bp, Physcomitrella patens
  Intron number 1 from transcript Pp1s165_123V6.1 (locus Pp1 s165_123V6) derived from phytozome v7.0 (chr-ID scaffold_1 65; pos 891558 to 892486)
cgacttcaattttcttgtaattgcgaccgccttaggtgtgtcaccatttctctcaacacgtgtgttgtttacgtagtgtgcatgttgtagaagcctgttcggttttctgcgtgagatgtctggcctgagcttctgcatcaactacatcgcgtcgatatttatcttctgtcttatgttaaccttccctacaactttgcaaaaaatttgccttctatgctggctgtcggtgagtagttccatcctctgtacacagaacccgggattgcttatccttcacgaaactccgtgtggcgcgtccacgcgtttttgcatatatatatatatatatatatatatatatatattcatatacacacatacttggttctgctcgtttccaaatgttaatggcttgagtctatgaaacggcacttgtttacgttcagggattgctttctcaaagccgttcagatcgtcaatttggacctagggtttgcactggtagatattatgcatcttagacagtctaaattgccggtttggcattccgactttgaatctggccaagttttgttcaatgtctgcttcaagcaattcgaagggcggtcctcatcagagtcctagtggtcctagttagaccattcctcagctacaaactaattaggtctacctttttgctctgaaacaagcaattcgtattatcctggcgttcacttgcactaaatttatttatttgtttatttttttgattctgtaatgttattaactagggctgttgagtagtgtacataccttgacgaacttgtttggtaatgatttgtctttatcaggatctggagtagtaatcaatggaataggaatggacctagggaggggtgttgttgaagcactttaaattctgatgcccacaaattccttcattgtaggactatctattgagtgattttatt

SEQ ID NO: 115154 - DNA, 972 bp, Physcomitrella patens
  Intron number 1 from transcript Pp1s23_86V6.1 (locus Pp1s2 3_86V6) derived from phytozome v7.0 (chr-ID scaffold_23; p os 775263 to 776234)
tccggtgacacgctgtgcggcaatccatctgctcggtacgactcgcgcttcctcttctttagttactgttcagtggaattcagcgcttcgtttgagcatgataatatagtcatctcgaagtttcgtttctggtttttggattttgttgtatgagttcgattttgtcagtgtttttcttgtatagggccactcagttgtagcacatggcccaggaatactgtcgagagcaacatcaggaaactggtttagagtacatcaagtagtgatgtattgtcgttttcgatctctgtggtgtggggtttaagattctgacaatgatagggtatatctctgttttaggtcgatgtttaatcgccaatcttaatttgattagcatttttggaagactttggaacgcttctgcgatcgtttgggattattttgtgcagtggtgattgtgtcgtgtcatggatgtatggtgaggctttaggatatcaggtttggttgtagttttctgattggtggtcactagcacttagttgagaattcttagtgttaatcctagttgcagctctgcaacgtgatggggttcatggctgaaggaatgagggatgcagaacttggtcgagtttgagcttcttgacctgagcccgagatgaatttggatctgctttattattgtggttcattcccgagacgcaatggggcgaaatctcgttcactgcaataatgcgttaggagagaaaggatgtctattcttggtccatgcacacaacgttcaagtagaagtctgtcaatttaaagatgtcttatatgtatttttcctttgaattctttttaaattgtaatgttcacagggtgcgatagcacattctgtcctgtcgtccgtactcctatgtaaagtccgttttaagaagctgggtttgcttgaaatttagcattctgatgcagttttgtgtcgtgcagaaggaagttgttccaaaagaagtagtc

SEQ ID NO: 115155 - DNA, 822 bp, Physcomitrella patens
  Intron number 1 from transcript Pp1s87_46V6.1 (locus Pp1s8 7_46V6) derived from phytozome v7.0 (chr-ID scaffold_87; p os 387347 to 388168 reverse strand)
tgctttatcagcgattgagcaagtgagtgtttcctagtcttgttttcatttcgtttttccatgcgcgagtcggttgctgttgttggaaccctaaggttttgttacaatttgttattgctgcactcgcaatgtattgggttgtgccgctgtacggggagaatgcaatatttagggcttgtgtagtactcttgcgaatcgcttcagctgtagttgaccaggagtttagcgtgacatgatttttcaaatttttagggttttgggtggtgtcgatgttttggctttggtgctgttgcatgtttacgttgttttttcgtatcatgggatttgacataaatgttgtctcgtgtacattagatgatagctctcatgaatcgtgtgtgtgtttgaatctgtaaattattgcgggttggagaattccacctcgtagttttgtgcatttgcgggacgagatgctagcgctaggattttgtagggtttctcgttgtcttctcttgcagttcctctgacttcaggaaagggtatggatagggtattagcgaagaattttgggtcaccaagagggtgggcattcccgtttctctattgtgtctggtttaggcttcggcagaaatatgtacagacctttgttgttgtaaaaaagataggatacctagtgcgtggttttgggcgatttggggtgttaaacgaagctgtcgtagtagagtttcctgtcaagtatgacgtttcttttgcagttattttctgtaatgtcgcacgggtttcttacagcatccttttggtatggcagtggatcgaagacgcgaccgggaccgaggtggtgac

SEQ ID NO: 115156 - DNA, 570 bp, Physcomitrella patens
  Intron number 1 from transcript Pp1s402_16V6.1 (locus Pp1s 402_16V6) derived from phytozome v7.0 (chr-ID scaffold_402 ; pos 105865 to 106434 reverse strand)
tgggaagaggatcgtcgctcggtccctcaaagcatgtaagcaattggtttacggtgccctgtttttctatgacattagtggtgaatttgtttacagggattgggatccccgatggcatgtttcattttaagtatatgttaacctagaagatcctagaattgacaccacgaaggtatcagaagaattttgtgtttcaggtttttttcgaattttgagttgataatttgaatgagattttagtagtattctataaagcttaattcgtttgcacgttgagcacgtgaagagattgaaaatgaaactgaataaggaaatacttagctcacatctgtcagcaccatagtattgctagctttgccagtcttcacatagacaacagcctcaattttgtcgctatttctaagcatacttaatgacatcatgcatgacaatcccattggttttaatcgctctctcgttctctgtcttttcctctcgaaacatttatcttcaaaaagctgtcagcttggtactgtgcagtgttgatatattgtatccttcaattttgtgttacacggttattgcaggtca

SEQ ID NO: 115157 - DNA, 850 bp, Physcomitrella patens
  Intron number 1 from transcript Pp1s247_60V6.1 (locus Pp1s 247_60V6) derived from phytozome v7.0 (chr-ID scaffold_247 ; pos 620522 to 621371)
ggaggctgctgcaggtataatgtaagtgttgcaacgcacgtgttgcagtgttgctttagtgccctgtacatttaggaggtcgtccttcgcaatttcaattttgtaactcaatacaggttcacaggcttggatgccctagcagaacctgttttcagtacagcaacttcacggaggtttgtgggagtgggtggaagaccttttctctcgaagaagcctgcattgaattgcaggggaattgtatgaatgctaagatgcttatgatgaaaaggttttgagctcctttccacgatgggtgtaaaggcaccgataggaatgaaatcatttgtttcgacaattctcaaacggaacacggcaacagaacattgacagcacaaacaaatagaggttgaattaagcgtttccgtagctgtctagatactatgcttcaactactcatgcaagtccgtcaagtcggtcatgttttcacttcactgcatatccttcacctgagaatgcagctgtgtacttttccagttcactgtcaatacccagatcgtatgtcaaaagctcacagacatagaccattgtgtttgaataagattgttctggtctgtaactcgatgctcaaaactaacattgagagaattgcttctcttttcttttctgttgacgggccatcacacccagcttgcgacctgattgttgtgtgattccgcaggtctgcacgatagtcatgttgtgttgaattgtaatcataaatttacgcttctttgattccttgggatacagctcatcatggcttgtagcttctgtgactaacttctggtttattgcagtatttaaagaaaattatcaattcagtgagagacaa

SEQ ID NO: 115158 - DNA, 613 bp, Physcomitrella patens; identical to SEQ ID NO: 115037
  Intron number 1 from transcript Pp1s323_51V6.1 (locus Pp1s 323_51V6) derived from phytozome v7.0 (chr-ID scaffold_323 ; pos 296909 to 297521)

SEQ ID NO: 115159 - DNA, 839 bp, Physcomitrella patens
  Intron number 1 from transcript Pp1s94_26V6.1 (locus Pp1s9 4_26V6) derived from phytozome v7.0 (chr-ID scaffold_94; p os 180040 to 180878)
tcgcagcgtattggctcgtttttcctacgcagcgggtgcgtgattgtggattttggttttgagtggtgtgttagctgtttttgtggagcgaagtggagttgcctctcagcttgaatgatttgagcgggcgaccggagcgtagctttgcggagggcttgttgaagtgcggttctcatttgaggattttggacttttttggctggtcaagcgtattgagtgttctgctagtcgtttacaaggtttggttggttttgcgcacttgggtgcttgaaagattcgaggttttcaagaagtgcctgggggaagctcgatcctgtttggtgctcgttgactattcagattgtgggtgatactgtttgtgacactcgggagctacgagggccaatcggaagagtgaaattgtattgtgtgattatttgggtgaggattaaaatagagtcttggtattgttgttttcttgaacatgatttcaatgatgagtaagcatgtcggaagtaggaagacacgaggtttttgcacaatcaccaccacttcataatcaaatactgtagtttgtatcacaccaatgttgccagcaaattgtgaagcactgcaggcgacggttgcaagctttaggttattcttgtttaagtttactgcggatatgctgtgtttctagcgagtggatgctccatgcgtgctctaatctcgaatatgttttagaagtcaatgttagattattggatgtactagctttgcatgtaacacgtctatcacggtggtctgagtcacggaagaactgactgcggttcagtgtctttataggtggtcaacacaggagttagggagttagcgtgctg

SEQ ID NO: 115160 - DNA, 1035 bp, Physcomitrella patens
  Intron number 1 from transcript Pp1s100_117V6.1 (locus Pp1 s100_117V6) derived from phytozome v7.0 (chr-ID scaffold_1 00; pos 573674 to 574708)
ggcgattggtttctgttctgctcatcgttgctgaggtcggttccaggttcagatgtggaagggattcgtgggaaggatttgtggaggctgcagtgcattcttaggatcggatatagggattttagatgggttttgtttgcttgggggactgagtgtatccgtttcggagttgttgggatcagttgatgctggatcgtgatgcagtgtaggcaactcgaatttgaattaagcctccgtggtgaatgaagggtttatgaagtggtctgtgaccagatgttgtttttcagggactctaattgtgatatttaggttcgaggttgattctgccaattcatcacaaattccgtttagaatttagtgaaactagatgactctcgagccttatgcgccgaaggatgtttgctcagctgaaagcttggtttttggttttattttattttaatgggaatgtattattgtataagaaaatttgagtcttgtgtgaactgtgttgaaggtagttgagatgctcatgatgattcaagagagaaaaagtatcttattgggatttgataattttttatttacagatgcggttagaatatccgctttgacaaacgtatagggaaaaataggctatatgagctttcaatcaacgttgattaccgatcccggatgggtacagtccgaatggctatatatttacaagatgaaagtctatacgttctgtcatagggttccaaagtgaggctgttcaattgtaagagatcggaaattaaagcctaagatgttgtcgcagagataccccgagaactcggtctgaaactgtcgtagtatgtcctctattgaacatttaagaagaacattgccccactctattttcctgaagaatgtgcaattgtaatcgcgctgataacggtgaacttctgttgcggaatcttaaagtttgcagtatgcatgttagcttgcgagtgttactgccatcatctatatctaacatccaggtgctggtggttggcagcttcctctttgggagcccttgagcaattctattac

SEQ ID NO: 115161 - DNA, 960 bp, Physcomitrella patens
  Intron number 1 from transcript Pp1s154_81V6.2 (locus Pp1s 154_81V6) derived from phytozome v7.0 (chr-ID scaffold_154 ; pos 522041 to 523000)
cgcctctgtagtggtgagtttgtcttccttgaagcaattcgaactgatacaactggagaagagtatttcataattcgaattttgggtctacatagttcattggcggatttatggagtcgacttggaatccctcatcatctgagtcggtttattaactgtggttggtcgtcatgcagtctgtatcccttagggaattcgaattgttattttagaagaggatatttttgctattgatacatctcgtagtcgatatactggagattatgctatcgtcacaatgagaccgttgcttgagcttagttttttaaacgagttacacaataatacccgatttatttatttatttatttattttttgcattgtagaggatgaaagagctgtacatttcttgtttacttgcaaaccggtagtccctgaatgatgatccgtcgatgtcactcagttccctgttttgttgattgatcgggaatttagggctttgttagagtacgttgaatacaagatgcatacaatgtcagccttgtaaagatgctgcgatgtttcttgatcaacgaacagtgcttaaatcattttgaaaggaggtttttgtttttttaatcgtaggttttatgatacttcgaagggatgctcgcatgttctaccttttcctgctctggtgcatttgtttctaagctttctctatttctgttagacatctccaacagctgaatctacatgttcttccgcatctagggttcacgtcgattctgaaggtcgttatttgtgttttcttgtttaattttatttcttagattttgcgtggtgtcttgattgtcatggggactttattttttccgattgtagttctcttcagagatcccacatggtctgaatcctgcgacttttataacagataaatcctcgttccttttttgttctaacaatggcatattttgtggatgctctgatcagttgtagga

SEQ ID NO: 115162 - DNA, 914 bp, Physcomitrella patens
  Intron number 1 from transcript Pp1s36_293V6.1 (locus Pp1s 36_293V6) derived from phytozome v7.0 (chr-ID scaffold_36; pos 1967231 to 1968144 reverse strand)
tgatcccggctccctcgagtggtgtcgaattggaggtgatttcttacgcttcgtcccctcctcctttgcagacattttttgaaaattatgcttcgtgataatccgtcttgggattttccccgtcgtcgctgcgctggctaacaaaataactagaattagattatcatcaatatcatcatgctgaagtaggttcactgaagtctttgaatatttcctcactttctctcccacagtattgaactggaaaattttgaaggtggtcatgaaaatgattggagcctttgaatactgaccaaacctattgtaatccgcgactagtgcgaaaaggagtgataacatcctcattgatgaaaaacatttatacgttgcactcaaaagatttcttgagttagggcgttttacttgattcatccatgaatccaaactcctggccgataaatctccttaatcgttagatagcagatcgtccgtcaacacaagtggttatctgtacatgctcttccaagtccctgtgatttttttatgatttgaggaagggatttaagataaggagaaggaatgttttctgttcttgactcgtggtcacagttaatcggaataccttctgaaattttctagctgctgaaactgaccagactgtttcaagcctatgacgttatctggaatttcggttttctttcaacggcagaattgatcaataacgatcataatatttaatgatcaattcgtatggctgtttcctacttgtacaacagcctttttcaaagaagaaatttgcatcgatactcccctatgaattgcatatttccttcgagctcatcacctatctcttgaatcgaacgctgatgttttactacattatctcctggtatttacaagtgaggtcgtggtgacgacaggctaagaagatagcc

SEQ ID NO: 115163 - DNA, 855 bp, Physcomitrella patens
  Intron number 1 from transcript Pp1s38_85V6.1 (locus Pp1s3 8_85V6) derived from phytozome v7.0 (chr-ID scaffold_38; p os 483743 to 484597 reverse strand)
ggttcggaaagagcaatctcccggacgttgtgcaggttggattccggttctctcacaatttcgagcatgcttcctcgttcttgtcactgtaaatctggggcgttggataagagaaatgtgcctgcggatgtggattaggtgccaagttcgtttctgatttatcagtatggtgggtgtgttcgcccaatcccaaaagcattgcaactctctgtgggagtgacctcaatccagagattggttgaaagagagttgtgaatattcatcctaatgcgttatgttagagacgaggagagaacaatgttttcttcgggagagagagattcttgtttggacgatttcggatgaatatttggtaatgaatttcgaatttagtctttattcttcaaagttagtatgcatcgagaccggagaaggtctttgtccattgctgaatgtagaacaatattttgagttgttacgctgaattccatgatcgtcgaggaccataaaaggccgactttgtcacggtgtttggggtgtccactcgctattctacgtgtcctaagcagctggtaagggtcaccaacgtatagtcgaatttcaaggatggcgtagtcaagtgaagataaggttcgatctgcaccattgcagatagcgtaatgtaatcgagactcggattccaacaggtttttacttggttaaggcgaacgaatgaaaaatgctgtagtatcattgttttttttgtttacgggttcatcgacttggagcacataaattgctgcctccgtaattttttttttaatcctatgatcttgtatgtggagcacaccctggttgaatattaatttttggcgcaggcaggagacccagtgctcc

SEQ ID NO: 115164 - DNA, 1041 bp, Physcomitrella patens
  Intron number 1 from transcript Pp1s192_51V6.2 (locus Pp1s 192_51V6) derived from phytozome v7.0 (chr-ID scaffold_192 ; pos 463562 to 464602)
gtctacatctccgcgggaattttctgcgtcttttggtggtaattttggctcaaccggtcgtgtttgcgggatctggtgtgctgtggtgtgttgatgcggctctcggcggtttgggacgatccgttgttgctcgctgcctgtcatggttttttagggttttaactctcgtgtgagttgatttgcttatttacatgattcgaagtttcacggtgtggtggtttaggccttgtataccgacactggggtatttggtggattgttccttgcacttgtagcctggatgcagtggtagatgatggtgatgatttggttgttgggttgagaatggaagttttttcgtctctctctattttgtttttattttggatcgcaatgtgattgccctgcgggtttaagtttttgatggcctctgtagcagagtgcagtgctgtaagtcgattaggtgtaacttgaattgtggaggtttttgctatagtggaactaggacatgatgtgagatattgattatatttcggagatttggattatagctctgatccggtctcgtgtgttgctcaattactttacttggatcgtgaatagcacatgctagtgcgaggaagtgtggtattctcgcagattagggtatttgagttacaagcggtatattgagagtttcttcctgtcataatgtagactggtttttccttgtgaatttgtgaatctctgctccctgttcttgtttgtacaatttgattgaagcattaggaagagtgaggattcctatttatgtgatcaggaaatattgtgcttcatcactcgtagaatgttggacccgttgttattattcttgagacatttctcttaagtaatgcgcacaacaaggataatgtactggttctacgcatccctgtgacccctttgtcatgtacttaattaattaattcacttttcatacatttaacgtgaatagtctgttcttgcgtctttagtgctgctctcaggcctgtacgtggtactcataccgtagcgcttgtttggaaaattcagtggatccacagc

SEQ ID NO: 115165 - DNA, 677 bp, Physcomitrella patens; identical to SEQ ID NO: 114998
  Intron number 1 from transcript Pp1s33_110V6.2 (locus Pp1s 33_110V6) derived from phytozome v7.0 (chr-ID scaffold_33; pos 618961 to 619637)

SEQ ID NO: 115166 - DNA, 939 bp, Physcomitrella patens
  Intron number 1 from transcript Pp1s1_624V6.1 (locus Pp1s1 _624V6) derived from phytozome v7.0 (chr-ID scaffold_1; po s 3701756 to 3702694)
agcctaagcaaggtgtcaatctgttgcctaagctggtactattctacttctcctgtgctttctcctgtacttctgaatctggggttttcttgagaacatgctatgtggaacacataattgtggacaatcgtaaagggcatcgcataatctctgtttatgtataaaggtattaggggtttgtgattggcaatgctggtgtgacaaagttcgttttaaagaggcttttgaatgaaattatgatcattccagacttccactatattggccttgagtttctattttctggtattgggttctaaagagaaaatatgtgcacgaattttagttaagagatatacttcccatccacaaaccttgcttcaaagattatggatcattcggtcctttatacagagccttatctattacctggaaggcaatatttgtttggttgttgattgcttgattctttatctttacattctcgcattctttttaccttcctccaagaaaaatgtcaaatctacgctttcaatctgcaagatgtatgatgcatgtttccagatttgagattattgttaccctctcatccttgtgacgcatcaatcgttgaagtgcggatctgctgttaagatcctctataccctgatgctggtgctagtcaaggcagaactgaacgtagtcaccgcatcaaaaagtcagtgagccgcttggtactcaatgaaagttgtggcggtttgcttctggtaaatcatgaattcttaattggcagccctaaacgctcacacttgtgttgaagagagataggtaatattcgttgacaaagtacttgtgagcagcattctggatgatgagtacttaaaatgtctatggaagtgatgtgactgaaatggaattaatgttctgttttgtcttgcctacacagcttcggagacttcttccagctgtagtgatcggagt

SEQ ID NO: 115167 - DNA, 515 bp, Physcomitrella patens
  Intron number 1 from transcript Pp1s59_196V6.1 (locus Pp1s 59_196V6) derived from phytozome v7.0 (chr-ID scaffold_59; pos 1035779 to 1036293 reverse strand)
agatcgggttgtgcgtttcggttcagcattaagaggtgcacactcgatttttatgtaattatttatttatttttgtgtgtttttttgggtgtttgcgttatctctgtgaagcagattagtgttttgaaactttctcggttttcttgacgtgaaagcataattgatgaccatgatgctttgttttcgttgtggggatttcttgttttcttgtggcgtatagttgtgttgtttgaaaagaaaactgtgggtggttggatttttggggtctttactttggtggccctccatctgtgactatcacgcagatctgaggctatattaatttgttgtaaagttttgtgctgtaattaactgttgtgatgaccgtttttgcatagttctgagaccttcgtgtacaatgttcattggcaggttcaattgattatctgcgctctaacagtattttatttgctgtttgattactacaaaatactattcaatttggaggccctattttgtcattaactctcacaaag

SEQ ID NO: 115168 - DNA, 570 bp, Physcomitrella patens
  Intron number 2 from transcript Pp1s81_252V6.1 (locus Pp1s 81_252V6) derived from phytozome v7.0 (chr-ID scaffold_81; pos 1550291 to 1550860)
atattccaaaaatcaatcgagtacaccattttgaggtacctctgcttccttatcacctccgtttctaaaatcaatgtgcacttactacggcaaaataggatacatgaaacacataagtccggagaggctcattgacatccgaaaactagagtcggatagaatggaaaaacttggactaaaaccacagactgcggcatttgtagaagaggacttacagtggctagtaccagaatatagtacctttcatgatgatgttgcattcatcaaaggcaacgacaacaatcaactatttgaagctgcattatcttctctagagttcaataatattgattctgggtggtaccttaacaatggtgccacctagcatgtcactagacaaagtcaacacttcgataaatttaaagattatagtggtaacatcaaaacagcagatggaaaaagttacccaattactggtaaaggaagtgtcaaattcaatctgccttctcccggagtaaaggaaattcagaatgttctttacgtccctggattgcagaaaaacctgctgtctataggctcatttgcagataa

SEQ ID NO: 115169 - DNA, 362 bp, Physcomitrella patens
  Intron number 2 from transcript Pp1s35_206V6.1 (locus Pp1s 35_206V6) derived from phytozome v7.0 (chr-ID scaffold_35; pos 1076547 to 1076908)
taagagaaggaatcgaatctcggttgtatctgcaggtgcgtttcctgttttagaaaccccctatttggcgaagacccaaaagtatagggataaactgttggtgcaagattaataagaactttgaattcgaactcaaccatgatttataagaagttaatatattagaacaggcgtttgttgttctttataatcaaacgttctgaagcagtttttattatcttttcctagtctaaaattcaacaactgccacagcccgaataaaaggttttgttttcgcgagttacaaatcaggaatgtgtttttgctgacgggcctttttcgtttgaggatgacagggttgacgacagattctggaactgcag

SEQ ID NO: 115170 - DNA, 730 bp, Physcomitrella patens
  Intron number 1 from transcript Pp1s129_28V6.1 (locus Pp1s 129_28V6) derived from phytozome v7.0 (chr-ID scaffold_129 ; pos 249127 to 249856)
gtcgttgctgcaccagcttcggcgatcttgtttcggtgagtgttcaacattgcagctcgcaatacgatcgttattgctgtgtttgattcaatactttgattaaacatgcaaagtgaagaacgtagagagacaatttatgttctcgttacgatttaggtgggttatggagttgtggatctcgaagctgctctatttttgttttattttattttatttttccaatttattttccttatgttttttcggagatagacggactgacgaattgggatcttgtttcttgggtagagagattggtgctttatccttcttcggtcagtcttgtttatgtttatgatgatatgtggctgcagcggatgcctctcagtggagtggagtggagtagaggtgttgtgtgacggtagaagcactttatttgcgcgcaattagcggtttgtctcgttttagagaaggaaaccctaagtgttgtgtgattcatttgttgttttgtgagtgatcatctgcaggttttgtaaaagtttattgtctgtttgtaacagggttagtaattgttgatacatatttatatatatcatctaaagtctcattgaatcttgacccaggttgagtgtattgtcggttgaaattgcgttcgtcttgtcaaggagtttctcaccttctctatttttctattttccatgttttcctcatgttagggtgctcgtatttaaggggcacaaggtgatcaaag

SEQ ID NO: 115171 - DNA, 662 bp, Physcomitrella patens
  Intron number 1 from transcript Pp1s84_178V6.1 (locus Pp1s 84_178V6) derived from phytozome v7.0 (chr-ID scaffold_84; pos 939579 to 940240 reverse strand)
tgtggtcgctggtcaagcgtgccacaaaatctaaggttggttcgtgaaaatttcttgatctcagtttcctggtttcaacatttgattgtaattctgatcgacattccaattgctcctacttcggttcctatcctaagctatcttctgaaccttcttcgccgaatcccagtcgagcctgcgtattcctgtatctttctcggtcacaccgtctggtcatcttttgaagctacaaagcagagattagaagaatattagctgcggcgtgttttgatttctttactctcgctgcaaattgtctcaaagacgcctagatttggattctttttgtttaattggttacttgatcttattgcacattcatggtggtggtattaactggtaatcttcatcatacaagtcgtgtctactcaatgtgatcgttttttaatatgtagcaaatttggggaattcggaatgattctggtactacaaatcccactctttgcttctttaatgcattggctattatttagttcaaacaatgaacagtttgcaaagcagcgtcagaaaattcctaaaactttcccttaacctcgtgacgtggtccgaaagacccaggttatcagcttctctaatcgtcctcgatgttgtgtttgatgtacagatcgtgaagaaaactttta

SEQ ID NO: 115172 - DNA, 882 bp, Physcomitrella patens
  Intron number 3 from transcript Pp1s204_48V6.1 (locus Pp1s 204_48V6) derived from phytozome v7.0 (chr-ID scaffold_204 ; pos 213175 to 214056)
ttgagatatctcggaacattacagacacacccaaggtgagttcggcactcattgcataagtttctaatgactttcaaaaccgtggtaggatgccgtattaagacattttagttgtgcaacttcttcggcaaaatgctcttttctgaggttctgcacattgcttacccaggttttattgtgttgtgcagagaattgctacgataactgcatagtggaggactgcaaccacgctatgtccttgaatacataatctgctaactggctggtattgaacatactttgtacaaaacactactccgatgctaacgacgattagtctcgatgtgcgaaacacctgcgggcattcaaagtccctgtaaatacacgcttcttgactggtttgtacatatgcagaacatgaatgtgaaggcgaagctttgaagtttttttttcactccctagatttgtcagggcttgcaccacgttacagatgtccttgagaatccctccaacagcacaaatagtcgtatattgctgttttgtgacttccactgatggtaaatgaccaagtccctccaccctccctccacactgccttcggagcctttggtggaagtaacttcttacccctgcaccactttggacggagttttcattgttgaagacacacctgttccatactccagggtttttgaattcactgttcaagcattcacatttcagatagttccctttgtcgcccatatcgtttgtccattagacagactgaaatcactcatccttcagatttcaatggcgttacagcatcccaggcagttgtaaagtttgcctcattactccaagtgttaattgtgatgtctgaaagtatcataacaatttgggatgcagtcaacaagtggagag

SEQ ID NO: 115173 - DNA, 907 bp, Physcomitrella patens
  Intron number 1 from transcript Pp1s46_127V6.1 (locus Pp1s 46_127V6) derived from phytozome v7.0 (chr-ID scaffold_46; pos 1159637 to 1160543)
ggccaagctcgccgagcaggcggagcgttacggtgtgtgtgtgtgctcgatatgttaacatgtttttcttctttccattagcttggtttttgtggagtttttcgggagttatttgtttatttattattattagtattattacttttgagatctgtgatgtttcgattttggattcgagtggtggcgggaggcggatcatggatgtcgggagcactgtcgttttttagatgcgtagatgtggtctgtgggaatgtgaatgggagtcttggtttgaatggatgtttggagcgctgtcgttgtggttgggaagagttacgttgtgtttttgggatgtatctggtttattcatcgaggcgattgtgttggtgtggtgagttgtttccttcttcgcgagggtttttctgaaacgatcatttatgtgttggttggagtcacgaaggaaggtgaatgcttgagtgtttggatttggaagttttgttttatgtgcgcattgtcctttctgaagtggaaaggatgcttcgtgcgaaggtggatttccttctattcattcttaatgattcagcgatgttacataccatgcgtcttagtcttgcaggccgttctgtgagatctgatttggggtgctgaacgtttcgtatctcgcaggaatttaaagtttggttttgtttcggcgaaatcttaagatatgtttattagttccgtgaacgcatgtacttctgtcggattaagtccaacttagtttcacgatgtctgtctggcgatctggttcagatcttagagattcttcgttccacttcatcattaaaaccaatcataggaaacattcagggtcatgtcgtagggtatttaagtcagtatatctgcatttggcttgtttgttttgtgattcgtaatttgaactgcagag

SEQ ID NO: 115174 - DNA, 539 bp, Physcomitrella patens
  Intron number 1 from transcript Pp1s36_339V6.1 (locus Pp1s 36_339V6) derived from phytozome v7.0 (chr-ID scaffold_36; pos 2196071 to 2196609)
gttgccgcttcttctactggtgccgccgtgcctaggtttttatttttgtctttatttttggttttttttctgttctcctccttattctcaggtcacgtttgtaacattcccgttgaccttgttttaagtggatgagtatcgaggctggtctctaaaggcagcagggtagagtcgatcctgtggtgtgacgttggggtgagtggctaatggatgggttttggtgtgattgagattggtgagttgaggtcgtgtgttgtttgttggtgttgattggggagggggggagggcaagggtagatgcgttggcagagtgaggggtatgacatgtttgagtatgttgtgttttttttgaggggattaaggagagagtttcgattctgggacccccctcccctcccgccactttccggttgattttgtaagatcttagcttgttgactgcatcttctgttgtgtgtttggtttaggctcgagagtgtgaatgctgtttcattgctgatgtagtgcatgcactggtgttggttgttttgtttcagctc

SEQ ID NO: 115175 - DNA, 842 bp, Physcomitrella patens
  Intron number 1 from transcript Pp1s376_23V6.1 (locus Pp1s 376_23V6) derived from phytozome v7.0 (chr-ID scaffold_376 ; pos 159036 to 159877)
ttcacagaaatttcacagtacgatactttctccgtcctccgtttctaaacgaatgcatcagttgggttttgatcgacacctgaaagcaaaatcttacgatagaattctaaaattcgggaaaatttgggtgaaccagtcccgcgacaagtccactctaaatcaggaactatcctgttgattgattacgcgttaattttgactgcaagtgctgtagcgaggcatcaagatcacttgcaggtttatgcttggggaggataagtgaattcaagccatttggcatcaaaagagcgttgcaattgacctggtttggcgatgatctaaacagcggttctaaacagattatgagctttcagagaatttgaacgtgtcccttagcgaattttgatgcacaagtctgtggacaaaagagacgaaatgccgaggttatatgttcatctatggaatctgaaggcaaatcgaaacgtgcattctatgaccttccgttctcaaatactgcccaagcgggatagctgaggtctgagaacttcagcagtctgcactttcagaaatcttttgtggacaattacactgatatcaagcgaggcagttccaacccaggcaaagatgtggaacatgaagaacatggtctacatttcctcagttcaggagccttcttcacatagtgcaaatcgtaaaactcgtatttcaaaggctaaggatgacgtatctatctgataatcacaacgtgagatgtaataaacattgagtatcacagcttcactgtgccaattagaaacttctgcaatcaaaactgcgacgagaaaaacgcaacgaccacctcttaatccatcccattttgtagg

SEQ ID NO: 115176 - DNA, 743 bp, Physcomitrella patens
  Intron number 1 from transcript Pp1s284_71V6.1 (locus Pp1s 284_71V6) derived from phytozome v7.0 (chr-ID scaffold_284 ; pos 488406 to 489148 reverse strand)
agatttcgctgagggtttcagcgaacacttcaaaggtatgctgcaactggtacgcaatacagaaacaccccactaccttctccaggtcaacatgccatccggtcgtcattttcaaattcccttatatgtggatcgttattacccgtctcagatttcggtatgaactagggcgagaaatctaaacgaacttgtgctgtaattgatgagtgcctatcaagattgtcgatcataagctacaaactttttagtaaatcagagtaggccaccggaattcggaacccgagtgcgacattaaattagatgttagaagtaagttttcaattgtagcgtcactatactggatctaatctttggaatacttttgacatcaagaatgccagtcttactcatggaattgaattactgctaggtctacagaagcagatcattcaacaagaacagtactgttagaaatgatgtaaaacctccgatgctacacaatttgaatgacggatgtccagagccttatgacttttctttttctttcacaaccaaggggctgaatcatatgctaacggtgctgcacaattgaattctatgctcaataggttccacatttctttgatcgtgaagaccagttttcaggaagttggactggtgaaggaatggggaacccaagactctcactcaacgcaacgcctaattctatgaatgtttacatggacacagggaatccacaactgaactgcaccctcgatagcgtt

SEQ ID NO: 115177 - DNA, 985 bp, Physcomitrella patens
  Intron number 2 from transcript Pp1s262_12V6.1 (locus Pp1s 262_12V6) derived from phytozome v7.0 (chr-ID scaffold_262 ; pos 82266 to 83250)
tagaaaagttttcagaattgataaagaaagtagaggtatgttttacataagaaatcctctatgttgtatcttttagtgaagtggggtattaccataaaatcattctattctacttttatttcatgcatcagatttctgttataactttgcaattgaaatgaagtagatgtgaatgaagagcaagcattaaaaatatgaaattgatagtcattttccacaaaatataactggtaagaatttattcaggaactttcaaatgaagtattagaatcagaagaagatgctaaaagaaaattgattgagggtgaagttttttgtaagcaagtgttctctgacattgtaatattctcacttgatgctgagttttcattattatttttttatttatgtgctttattttatgatcagttaatgtattatattgtggtatattgaaataatgatttgaatgaaataattacgcacaaactaacttcttcattgattttctttttcaaaaaattgcaaaagcttgtgccaaaagatcctttccgtgacttttctgctgagccatccagtgtggaaaaagaagagatttgtgtatttgattacccaccaactcaggtgactaagtatcttagtatataaaagaaaataaaaaaataaaaaaatttctgattatatatcttgtttaatagttatcataaatattttctgtatttgaataagtttaatttatggtatctatagattatgttctaaatcttttacaagttaaatcaatgtttttctccatctccatcaatgacaaggtcttgcatataattcctttgcaaacgctgaagtttatgaaattgtggactttcactttcaatctctatgttgaatggatttatccattgtccatattttgtcaactccttgaaaaattacaaaacactaacaatcctttcaacaaaactatctattcattgaatgcaggaagaaagacctcagccacgaccac

SEQ ID NO: 115178 - DNA, 332 bp, Physcomitrella patens
  Intron number 1 from transcript Pp1s74_23V6.1 (locus Pp1s7 4_23V6) derived from phytozome v7.0 (chr-ID scaffold_74; p os 154368 to 154699)
tatatgtacgtcttattcaccttttttctttcttactgtcttgacttcaatagctctcagtaattgacttatcttttttgttttgttttgttttgttttgtggcgagatcttcaaatctgtatgacctcaagtacaccagagagaagagggatttagaggaataatttttcttttcaaaaaatgaaatcagtattagtagaagaagaaggaacaagaaagtgtggtaagagccaatcctgtttttcgtctgactttgcaaattaagcactcgtgagaattcgtatcaaaatgtgtttcttcttgcagatagtgagaacagcggccagccttc

SEQ ID NO: 115179 - DNA, 724 bp, Physcomitrella patens
  Intron number 1 from transcript Pp1s391_7V6.1 (locus Pp1s3 91_7V6) derived from phytozome v7.0 (chr-ID scaffold_391; pos 28047 to 28770)
tgaggaacttgcagcgtcatccgttgcgcaccaaagtaagcctcaccacgctgctcgctcgatcgctcgatcggttggtggtccccccccccccccgcccccccagtgcgtgtatgcaattgggttgtaccttgatgggattgttacaacgatcgttgcatggattttatggttttgtcgtgacttttgtgtttctggctatggtggcgttcttcagattaaggggttataacaagcgaatctattactgggtcacactatcgtcgtgaattggttgcagtagggcttatgtatggtgtgttttcttcgcgatgagatttctagtatctgcgtagttttcatgtttattcctagtgtttttttaaagcagataggagtgagcagctctcttgcttttggctttcttgttggggatatcgatccgagcttgtgactcggtgtcagaaatttcgatggttttattttattttattttattttgattttattctcctcctacttcttccgttgatgcttggacctgcatgtacatggttttgagagaagaatgagaagagttaataatttatttgttaatataagttattgaatcaaccaatttcttatattcgtctggatgctttacatttcggtttcaaatcggggctttatcaaagaggatgtcttgacatgtaaaggtgttggtgcaggccattacagctggagtgttggcaggaagtgctga

SEQ ID NO: 115180 - DNA, 810 bp, Physcomitrella patens
  Intron number 1 from transcript Pp1s118_83V6.1 (locus Pp1s 118_83V6) derived from phytozome v7.0 (chr-ID scaffold_118 ; pos 447202 to 448011)
gctggcagcttccagcgcacacgttccaggtttgaatattctattctcctcttttttcaaatagagatatgtttgaaaatattgttgattgtatcttgttttcaggtgaattttttagaccagcagctcgtgttggtggtaggcactgtttagcttcaatgcgccagtttcaatgacggcaaacaagccagatcccatgacttgattgtttctttttccggaccgtctaaagccagtccctgttacatccattttgattttttagatcaatcatttgcatcaatatgaaattcgctgagtcgagggaatggcagtgcgcgcagcagtgaccgcgcaagggccgtgaatcagtattccaaatctgttctgggatactttttttcttttcttctgaaaggctaaatctcactcactcaaggcgattagaaaagtactgggtggaattgttcacctactgcaactcctgtcctacctggctactagttctcgacacatcgctgcctgattttctgtagacacgcctggacacgaaggcggatgtaacagtcgtggcctgattcttcgtagaacgctcagttgtctttacatatggatttgagcacttttagtggtggcagagtacatggttgtttattattagcacatgaacacaccaccacatcctgggaggaattgcgattttggaaagggaagtatccattcaacagtgcgtcatgatccttgtcagaagctttgatcacagaacttacagcgttcaatgtcttataatgtctagattttggcgatcacagtttttttcattctggcgac

SEQ ID NO: 115181 - DNA, 523 bp, Physcomitrella patens
  Intron number 2 from transcript Pp1s38_241V6.1 (locus Pp1s 38_241V6) derived from phytozome v7.0 (chr-ID scaffold_38; pos 1408269 to 1408791)
cactccctgttgtgctagacggatcggaaaaaagcgttagtttctgtgatgtagattattgtgaatggttgttgggactgcctgcattgcggttgcattgcgacgctccttatcgtgggagttttcaattgcagtttgatcgttgtttcgtgcagtgttacctttaagtcttgttgaagaaattgttgccacagtgacggggtttggtggcgcatcttctttactagaacgtcactagccatggcgggtgtcatttatgtcacttgggtagtattatttctcatcttcgcaccttttcttgatttggcgggttttgcatctttgtgtgtgataaatgatatctggtacttgcacgggtgatgatgaagggccagatccatgcggcatgctgttgttgttttgggttgtgtttatatcaaaacccttctaatttgttgacatttttatttttatttttttccttctttggtttgtgttctttaagataggaaggagagcggctggcagttgtgctagaccagac

SEQ ID NO: 115182 - DNA, 586 bp, Physcomitrella patens
  Intron number 5 from transcript Pp1s65_300V6.1 (locus Pp1s 65_300V6) derived from phytozome v7.0 (chr-ID scaffold_65; pos 1738622 to 1739207 reverse strand)
atcttgtgttttttgtccgccttcaggttagttgtgcaagatgcaccacttttgagaccatcccaaagtagcacatgttttgcgttatgtttgtttttcttagccaacattaagcattctacaagaatgtaatagatatgcctgctcaagtccttgtagtggacaaaagcaacccaatggtttggcacgtctttttgtttttattttctttttatgtaaaatgagaatacagtttcgttttaataagcagttaattttccccctgctcgacttcgatttccagatcatgtgatccgttcttattgctgtacatgagcaacctaattaggaaagaaccctaatgttgtggggtttagaaaacaggagtaatgccatttctttggaacctatgcatcctgagatcgactagatatcatgaccaaattaacttacagaatcgtgacagtgactttttgcggagacttcttggattgttctgtctgccttttgcgtaagctcaactaatcaaacgctattgtgtgtgaacgaaactcgaatggaatgtggtgcagagctcgccatatagtgacagctatccctcagaatc

SEQ ID NO: 115183 - DNA, 800 bp, Physcomitrella patens
  Intron number 1 from transcript Pp1s65_300V6.1 (locus Pp1s 65_300V6) derived from phytozome v7.0 (chr-ID scaffold_65; pos 1740256 to 1741055 reverse strand)
ttaacaaaattcgttgcgtctgcgtgaaaattcgagtgagaaacctttcttttatgttgcttcagttgttggctacttgtttatctccagtttcagggggaggggggggggacgtggaggtttgtttcatagcgatagttgtgagggcgtgatcaggaccgaattcgtgacctagtggcgtgtgaggagagtgaggcgaatgaaaattttgaggtgtttcttactagggtttgaatgtgcgcatggattgcgataaatccaagggttgtgcggcgaaggaaggaagtggaactgattctgtccttgtttattgaggttctggaacctgcgaaggcactcgcttagcgttgtttgtgtaatgtttgttcatgaaggtcgtgaggttcatgagaataagcttaggcacgaatcttacgacccttgttcttttaccattttcttgcttcgttctctgcgtgcgtggtagattcgcgcgctttcgttggttgtaagagacattcttattttacgtcagaggctgtacgatctctgtgtcttcattctgctgcagtttaatctcagagatcgtcttagacgatttttagccactctaataaatttttgttcacttggattttatgctcttatctgagccatccgtgtttggtgtagctcattgcatcctctgcttgcggtgtgctcgatatagagttgtcagcaaaagatatcgcgttatgattgagatgatcgaatattaactggattcaattctttttgaatttttagttgatcctaggtaaatacttgaacgtgcagctgaa

SEQ ID NO: 115184 - DNA, 625 bp, Physcomitrella patens
  Intron number 1 from transcript Pp1s35_174V6.1 (locus Pp1s 35_174V6) derived from phytozome v7.0 (chr-ID scaffold_35; pos 870015 to 870639 reverse strand)
ttctcgcaaacaggtgaaaatacatatcaacttgctgcaagtttcaaggaatttttgcagctcctcattcgcaggagaagtggaatttgattcaattacaggagattcactccctgatccgtagtgtttaatgtaggatggagtcttatccactaatgggaatttcgttcgagacttgtcagttgtaaacgtagatcgcattctttaacataacagtctctaaactgattcacctgtggttgcaatcttttgctgtcaatagctgcatttcttcttcgtactactgaaaattcccactgactaaccttgaatagtagcacgtatttgttaacactcctacagaatcaaattgcattatcctagagtgtgatgagctacctatgccctgttacggatgacatgatgagaagaatgatacagttcaatagtcttgttcaatatttagatcgcgagtagtttctttcctttgagtcgcgtgcttcatatttcttcaacctcaagcttgtggttgtgtcgaaatactactcttggcagactctattagcccctcgatcttgctctgtacattgaattacctatttgaaatgcaggtgcaagctcctggtgctgctaaggtacagaagtg

SEQ ID NO: 115185 - DNA, 1026 bp, Physcomitrella patens
  Intron number 1 from transcript Pp1s167_124V6.1 (locus Pp1 s167_124V6) derived from phytozome v7.0 (chr-ID scaffold_1 67; pos 613214 to 614239 reverse strand)
tcaacaatccaccgcattagtaagctttttctccccctccccttcccaacccctttcatccttttcacttttttttttttttttttttgattttttcctttcttttgtattgtttaaagctatatagaagattgcgccaattggaagtagggaatgtatggaagaaacgttccatgcatggtcaattaggcagactggctaaagtgccagattttgcttcgactgtgattactcctggttgtcggttaatcttatgtcgctttagtaatgaatgacggtgttatgccgttgatgaattttgcgcgtttgagacgcgacaaggaagagcgcactggcctttcactgtagcaggttttctgcagactttcggtgcattttactccgacgcgcggaagtggggtttcgaatttgtgtccccgggtgaggtagatttttgttgtgttggattttggatggtttagagtagtcggtctgtgggtgtttgtgatcattgagctgcaagaaggtgacgtgagaacacgtaggaggacaggcttcttttcggttgccctagggctgttcacttcggagcttttggaacggatttgcaggtttccggcctcgtgcaagaagctaatcttatcattatctgcttaccacttaaggtgcctggaacagtttcagtgtctgcatgttggtgttcaatcacaacaaatttgccgttgtagaagttgatgtttctctgggattggcggagttgatttcccgatggcatttttgaaagttgttttatttcaagaatcacattttagggtgtaggaacactcacaccaccgaggcccaaaactcttgaatatggaattatggaataatcaagatccttctttgcggtccatttctcagcagttgctgacctattgaatccagatgcattgttgaaaacgcacctctgaggggttcgacgtgacaaccacaacacctgggaggctgctgaatgtgaagtgaatactaggaacaagaattgtacaggtactttcctgacataac

SEQ ID NO: 115186 - DNA, 771 bp, Physcomitrella patens
  Intron number 2 from transcript Pp1s75_223V6.1 (locus Pp1s 75_223V6) derived from phytozome v7.0 (chr-ID scaffold_75; pos 1228143 to 1228913)
tctcctgctcgtatcctgtggaggactatccgcgggtacgcctacttagcatttctccgttgatgagtacgtttgtttgccaatgcttgacactcacttgtcggtgaccatggtgttttagggtttctaacgttaaccattcgcttctggcgtgttgaagatactgaatgtctcataacctcttaattaaggtatttcaactactcggcgttctttttacatgcgcaaacgcttcttttagaggatccaagtgcttcccctatccttgaaaattacacgaacagtgctccaacgaagcatatttaagttgaaatcgaatgtaggtatattagtcattcgtcgccaggcatgctctaaggtgctcattctaccgttcaatcgagaacccctcctatgcccataaggtttggctacgggtacttagctgtaatagctcaaaagcgttttaatagtcttactccaatgtaaacatgtcagcaacattgttaaatttcaaaaatcaatttcctcgactattccgcttcacactgcactagtcacatactaatttttttggattttaatttgactcatttgaactgaagcttttcttctcacaggtggtaactgtgcggagttgttactatcacgataacttgttacaatatgtttaaatttagcttatcaacgaatgcaaatgagtatcatttttcccagtgaacaacatgaattactttgtttattcccgaggtactgtcgagttctagtcaataccgtttatgttgttgcaga

SEQ ID NO: 115187 - DNA, 663 bp, Physcomitrella patens
  Intron number 2 from transcript Pp1s198_140V6.1 (locus Pp1 s198_140V6) derived from phytozome v7.0 (chr-ID scaffold_1 98; pos 673410 to 674072)
cccttggtaacccaccaaaattcaactcctctggttgagctttttgaaattctcacccatttttgatagatccatcgggtcttgtttttttacgtgtagttcgtaactactattagcccatcgaatgaagtgtctcattcgctggtgaactgacgaggttttgctggcaaccttaatctgctcatgataatccgtgatattggggcgttttgtaaggttactgaagtggtaatatttgcgtttttttcgtgaattacatatgaaattacagacgatgatagctcatgtttgatgtgactagcaaattcttgtggataattttcattgagtatacatagggtgtggagtgcaaaagttgccttgacgagggcgaggaatggatctagaatttgcaaggcgttgtagtgtttaggtcaaagttaacaaccacgtacagattgatgagaatagtcgcaacacgagagaaagtatgcaaagctacaactcttgcacaggtgaatgcaaacagtgaaacgtgaagctgaattggtcactctggactttgaattgggtacaacagtctgctagtccaagaagcatgtgaagaataacgggtcttgttgtgtaaataattggatggtgtgagtaggctagcccttctttgggtggaacaagccagtcatt

SEQ ID NO: 115188 - DNA, 464 bp, Physcomitrella patens
  Intron number 1 from transcript Pp1s73_193V6.1 (locus Pp1s 73_193V6) derived from phytozome v7.0 (chr-ID scaffold_73; pos 1144176 to 1144639 reverse strand)
tggtgctggcgttggtgttggtttgacaggtacggattacaatccaatgttaacattttattcaactctgttggtcatgaattgtcaatttgatttggttgaagaacattgcattttgtaatttggatagaattcaatcctgtgttagtattaaattcctagtaacattcgcctcctttgcggggacttcatgcttgcaaatactctcctcccagatttttacaagtttttcaatcaactttgggatggtattaccgtttgtaaatagttcttgtcgcatagtttgtatgtccagtttctcaatccctgttttctctttctctacttggtttttacagtttgattgtggatcgcatcttcggagtcttttcttgttgataaattttgtgtgtgcagttgctaatcattctgtttattggtattattcaggaggaactgggattggggcaacaccttggagttca

SEQ ID NO: 115189 - DNA, 640 bp, Physcomitrella patens
  Intron number 1 from transcript Pp1s3_488V6.2 (locus Pp1s3 _488V6) derived from phytozome v7.0 (chr-ID scaffold_3; po s 2889727 to 2890366)
gacggattccctgcaatttgctttcctgtttgtcggtaaatatctacgccggtgtgggttttgttgtttattatttattattagaagaatgcaggagatgtatggctcgtttccaaacatgccagtccactatatcctctttttctttctttctttctttcttttttttctttttctttttattttattttgttgttgttgttgttgtgtgtgtgtgtgtgtgtagagtgatctgtccctgttatagtcgtttttgaactatgtccaattcaagttggacattatgcatgcctaacagctggtctggttctgttaaatcactccactgtttgtgggagatggcatttgggagttgtttccggaattaaatcgagacaatataagcttagggttttctgattgtggcaacaaaacgtttggttgctctttcgattgttggagaagatgaattctgcttttgaactttggagacgactgatgcagtggctgttgaactcttgcctaaggaaagctaacttggaaatgtaaggacattaattggtttacttttttagagatgggaattttttatattttcgataatgtattcacgatttttttcgcagttttgccacttgctatttggatcgtcattctcaag

SEQ ID NO: 115190 - DNA, 418 bp, Physcomitrella patens
  Intron number 1 from transcript Pp1s17_339V6.1 (locus Pp1s 17_339V6) derived from phytozome v7.0 (chr-ID scaffold_17; pos 2197840 to 2198257 reverse strand)
ttgccagccagattagtggagttctcactacgcaggttgtgacgactcccgtcatgtccttcacaaatggcgcatttatattcagttttttttttcttcatctttgcaagtgtcaaatgcaaatttgacctgcatacatggtgaaagacgatgatatgaatcacctagctttaattagtttgttccacataataatattgagctcaaaagtaggtcaaaataggtaaataatatctcgattgttaaatcggaggcgccgttccggtaataggatgtaaatcgcgactgcgtgctttgatacctgagtaattctttatgatcagtgtgaagcaacggaagtatgcttagaatgttgcattttgtagctcgattttgaacttagatttgtggttgtattaccttctgcaggctttactat

SEQ ID NO: 115191 - DNA, 767 bp, Physcomitrella patens
  Intron number 3 from transcript Pp1s277_23V6.1 (locus Pp1s 277_23V6) derived from phytozome v7.0 (chr-ID scaffold_277 ; pos 128103 to 128869 reverse strand)
ccgcatcgtctctccctcttgcggtatctgctgtaagcgtccacgctacagccagtttattaagacgagcaatcattctcacaatccaaattcaattcttagaacgttaatgtattcctcaaggtttttgtttttaactctcgcggcacttagctacatttttgtatagtgttctcatggtgcataataagcgattgacaatgtacaacgagtcattcgagctggctgagagcggaactttgatttgttttttaattcagcaattataagcctacattttggcactgttgtgactttctcggggtgttaggaaattcttaagttgtcaaatgaattgatatgcgtggtgaggtgctcggtttgtttcgggttttgtttcttgcatgactttgcgagggcaccaaatgagcaacgtagagtgtttctatcaggtttagcgcatttagcacgtgtttaaatgctttataatgtgttaccaatattgctcaaagatgttaagcaaagagttatgattgaattttgcagtggagggtgggtgtttagacagaaccaagtcaactccaacagtgtatctagtgaagattaccttggtaattctaaaatggatttcaaagcattaggacgcaggagagttggctctattggagcacgaaatattccatcttggttacaattaacactcacatcgttgtggtctgtattttaattctaaatttgaaaattgtggttcaggtttactttataaaccacagatacgacggcgtgca

SEQ ID NO: 115192 - DNA, 1026 bp, Physcomitrella patens
  Intron number 1 from transcript Pp1s78_25V6.1 (locus Pp1s7 8_25V6) derived from phytozome v7.0 (chr-ID scaffold_78; p os 178239 to 179264 reverse strand)
ttgcaatttttgatagagttttggtaagtgggtaacccctgacactcttattcattttagttcaattgagaatggtatgtaatatatcaattgttgttaaatattctttttttccaaatacatttaagaattcaaactgatcagcatgaccaatgcatggaattgggtgccagagattgcaaatcacatcagaatttgtaaaatttgtaacttgcgtttgaaagtgtttagaataaataataaaaattaaaagctagaaaattaatttttaaaaataagtaacacaatcagtttaaataattaagatattaaagcaaattaaattaagtggcatctttagagagtaaaagcaaataggtgaatccattgttctaagttgaacttgagcattgattgacatacactccacacattggtgtgataaagaagtcatgtgcaattcaacaactcttgcatgactttatgatcttacagaccagatagattcattatttcatcaattagtatgtcaatgattaccaaaaaaaaaaaaaaaaaaaaaaaaaaatgtaaaaaaaaaaaaaacaaacaaaacaaaacaaacaagcataagaataaactaatcaagccaggaaatcagaaattcctagtaatcttggatgaaaaatatctcacccaaatgacctgaagccatctggtgtgaagaaagttgccacaaaaaaacagttgggatatggatgaaaagcacaagactattcaaaaacggagcagaagagtgattgagagtaagagtacccttgaatagtgtgggtggaatgatgggcaaggtcgaggacagcaagtggactccaacagattgctggcttgtttctgtcttcttctgtcccttatcacatcacacctcctcctcattcattcattccccacacagccagcctcgacactacgtgtcatagaaacctccttattcaatcggctggctcaagacatccaggccattagatttttagattgaatcctggtcgttgcagggtctattaggaactc

SEQ ID NO: 115193 - DNA, 987 bp, Physcomitrella patens
  Intron number 1 from transcript Pp1s204_128V6.1 (locus Pp1 s204_128V6) derived from phytozome v7.0 (chr-ID scaffold_2 04; pos 763253 to 764239)
cagttaaatatccaattaggaacagtttttctcaggtgggcccaattctgttttttttgttgcaacagtactctagtattaatttattgggttcatcagcaatcacagtattctctagggcagtttcagtattcaaaacctgctacttataggagtgtgaagtttctatttcctgctctttttattctttgttagttagggaaaatctacttgtaaccatttaataattgtgtaaattctaggcattgtgaagaaatgcttagtgctatggctgaggtgcattgaatgtagcttccaaccacctcttcctcatgtgcctgtatgcatgcaaatacattaagtggaatggggcattgattggtgtgctttggacttaattgaaaatttgaacagtggagttgaaaattaagtttgatcacatgtgtctaatttgatagaggctgtggtatgggcttgtctaactccctttgatattaaaggatcgtatgtaactccttttcactcattggccactatgtttttcttatttttggagtttgggaagagtatgggcatttaggagatgaaagcagctgtacattaagagaatttatgggtcacgttttcttcagagttctctcctctttgacgagcaggtttcacaccacaaatttgcaagacacaaacatacgcttgattgagagggggggggggtgaatctgctttgaaggcgtggaaagggagcagcgagacaagagttaattccaacgtcgtgaaccaccgtaggctgagcagaatagatctatagactaccgaagtggcaagcttgtatcagctgggaaagtttgtactgaagccctcagcaaagagctggcagcgcctggagggattggtgtgcgaaactcaacttttgagctttaatacgtccctagtttaatattatcctcattcattctcattcatcactttgcagacgaggatctaatcctggaattcaaatagatctac

SEQ ID NO: 115194 - DNA, 564 bp, Physcomitrella patens
  Intron number 2 from transcript Pp1s274_30V6.1 (locus Pp1s 274_30V6) derived from phytozome v7.0 (chr-ID scaffold_274 ; pos 253277 to 253840 reverse strand)
tcttcggtctgtgcaagcagcggcggcatcgtcaggtgtgtaatcttagaaagaatctggatcctggatctgtcagatgattcttgtgtgctcttgtatgcctacttgctgctttttgggtagtatgcttacttacacttgtgagaacatgctttcgtggtggactgataaggggtaaaggtagaataagcaggtctggtataagtttcttccctgcgttcacccatcagggtgtcagatagtactttattcttggcacttagtttgcttcagtttgccctgccttgtgtacggatcatcatcacttggggtgtcgtgttttgaatagcaggtagtgtttcccgacatctttgttccattctttggcaactttggtgctgactaattttaggtgtccgattttttcaaacttagaaacctctattatctctcatcgtacgttttgaagggtgcaatttatcttgagaagcggcagaagcgctactcctgcaagtgcgaggccactggatgtttagtttaaccattggttttttatttgaattactggattgcatgtgcagataa

SEQ ID NO: 115195 - DNA, 947 bp, Physcomitrella patens
  Intron number 1 from transcript Pp1s75_43V6.1 (locus Pp1s7 5_43V6) derived from phytozome v7.0 (chr-ID scaffold_75; p os 243969 to 244915)
cggacgccttacagtccagccaattttttgtacaggtgtgtgatgttcgcattgcctggagtttaccgttgcgttactcggctttgggtgaactaattgtgttttcctgtgaactcgctcgcatgttgtatgaattttcatatgttaatgcaatgttttcttcgtcacgagttatgcagtcctgcatttcagaattgagggaaacagagacctttttaatttattcctgttaatttcgactatacatggattgatcctactgcattagaagagtttttggttttcttctctctctagcattgccattagcagccactatctatgtgaggtatcaccatgtgactaagcagcaacgagtaatcaaatcccatcatactctgttcgttataatcttggtacagctattagttgggaggtttttgttattctatgttccaacagcgtgttttgtccctctctgttttatacatttaatttttaaaaattagactaattaattatttttgtcgtgtaaagtagatgaattcacttggtacttagaatccagacggacttactctcatgtgtgttatcgtctgggtgccgtcaagcctatctcacgtttcccctctttttttctatctttacttttatatttcctctttaatcgtgaattgatttctcaacatgcaataattttttccacacatgaatttgaactctgatcttgtattgagctgggttcgctaaatcgcatgtgtttatgtaagggtttttttagctggtaagatttcacttcagcgtagtggggtaaattttttttacttttttgcatccgatcagaaagaatccaaatccatcatacataaaagtttatggatcgaggttaccatctcgtgtgttcaacttgataaatggatgaatgagataacgttcaaccttttgatgtgaatgcagctggtggcgat

SEQ ID NO: 115196 - DNA, 841 bp, Physcomitrella patens
  Intron number 1 from transcript Pp1s227_57V6.2 (locus Pp1s 227_57V6) derived from phytozome v7.0 (chr-ID scaffold_227 ; pos 396093 to 396933 reverse strand)
cgggattcagtttaattaggtgatgtgcatttttccctgcaaaccttatatcgtcaatgaccatgtgaattgttaattgctggtttgctcttcagctatgtttcaatttgaattttcagtggtttcagcgtgtagcttaagtgatctcctaattatttcgcaaatctctgctgaagcagcctatcattagtctgaatttttttgtaatctcgaaagatttcttctctgttcggtggtgcaagtacagctgtttaatttgctacactgatgttacgaagtgtatgatgtagtaaatgaagtggtagtgatgtaggctttgagtcatcgtcctttgatcgaaataaacgaaagtgctcatttagagaagggttttgggcagttttttgtatctttctttttcttcgttgtttcggttttaattttgagctgctaatgagtgtgttcgattacaaacgcacaatgaactaatagcgtgatctattacgaaactttgccgtgaatttgttgctagatgtcgttgtcaacatggagtgtgctattttagacaatcataaatgtagacgtagttcgactaataagcggtgctaaggctgaagactgacgaaacaatgttgtaggttgaggatgtgtacatgatcctcatttctttttgcagtaatggaggataccgtacattcagatgacagcggaaagcttctaattccatgtttaataaatcctcatgatatattcggatattcggtcggttgtcggtgcgaaatttggaaggcttcttattgattttgaatttatcttctcacgaggattatcttcattgtgattttctccaggtgagcaggcc

SEQ ID NO: 115197 - DNA, 981 bp, Physcomitrella patens
  Intron number 1 from transcript Pp1s45_229V6.2 (locus Pp1s 45_229V6) derived from phytozome v7.0 (chr-ID scaffold_45; pos 1788135 to 1789115 reverse strand)
ttttggtggaggacaagcgtgttggcactttggaggtcagttggaggaattgggttttttcgtttcttctatctgttgggtccgatcgcatggtgtcgggttgtcgtgaagagtacttctattgcaggtatctgaagaggattgttagtggtttttgggatttggggacgagagggaaagtttttgaggtttctggatgcgcagagggagagagcgagagagagagagagaaagagatagtctctggcttgcttgcgtttcgggaagcaaagaggacacggcaacacttgtgaggactgcagacagcgtggcgagcgtttgacgttttagagattttttttgtaagtttgctttgacttgatgtttgtccaatgtggaaatcgtgagggcgttgggagcctggatgagtatagatactggagtgcgttgcagacgtagagttcgccatcgtcaagagacttttaaggttagagcggtggggatgaagaggtgcaattgtcgatctctgtggatttgtatctgttggattctactttgttttgtggtacgtaaaaccctggtagcggtgaagagagtgcagtaaactgaatctctgagggttattcttagtacagtttgagttggtgtacgcttgtagtgaaagaggacattttggtgaagtaatttgtcccaacaaggggtaacttgcacacgtgaaacttaagcacttcgatggggacctctcgttgtgttatgcttcttatctttttccaaaatcgtttttgactttgaatcttgcaattgtgtgtcacctgttttgaaaattattctgaaaaacattgaattatgttggcagaaagccctgagttagtttgtcgtttatatggaacttggttttgcgtcttgttagctttgcagatgtacgtgctggtttccgttctacactaatatctgcgggtctgtgcagatcatccctctcacagcattacagattgttgtgaa

SEQ ID NO: 115198 - DNA, 463 bp, Physcomitrella patens
  Intron number 1 from transcript Pp1s50_69V6.1 (locus Pp1s5 0_69V6) derived from phytozome v7.0 (chr-ID scaffold_50; p os 746408 to 746870)
cctttggattttcagcaggtatgttggcatatcaatccagatgtatccttccagaaatcgtttctttttggaggaactgtgcaatgcaaattactgataaaaccaaatggcgaaaatgctagtcatttaaagttggcgaaaaacaatggaagtcaatacttacgtaacagttaatgatctaaatccgcttacatacaccacataagcttcttttctgatttcaaataagctgatgagacttggtgcaagtgttaaatactccaatgaacgtaatctcatacttgtaatgaatcgaccatgttgaatgctaacacaatactaagaatgtcctgcattcccatccaactcctggtattctcgtagagcttttgtgcatttcaattcttcggtaacgtagtttgtctttgttgcaataaatttctacaatttttttgacacatgtcaatgtttcaacaggaaaggc

SEQ ID NO: 115199 - DNA, 668 bp, Physcomitrella patens
  Intron number 1 from transcript Pp1s5_325V6.3 (locus Pp1s5 _325V6) derived from phytozome v7.0 (chr-ID scaffold_5; po s 2260557 to 2261224 reverse strand)
tttgcctccgcaggtttgtatttcttgattgggtgtgtgttagttgctagtccgttgaagattgtgtcgattcgttgtgtgtcgtcatcttttaattgcctcttgatattctcaataaggaatttctcccaggaacctcggtggctgattatatgctggggtcgttctcaatcgcttctatcttcgggttggagataaactgatcagttcctcgagatatgctctaaaagtactctacagctagtcatgttcagccgcgtcctatccaattgctttaatttctatgccctgtcatcgctcttcaacatcgatgtttctttgaacttttcccatgccctttccttaaggatctgttcgttaaagctgtattcttgtcctaaactgtaatctttggagaagctaaattgtgacattgtaagtcttggactgcttatcttttacgcatcggtagagcatctctttacgactgctcttggtggtctgtgtaattggttgatgtgtctcatatttgctgcctagacttgttagtgcaactgttaattatagttttttaaggtaatcttcaacgatgcttgagtactacagtgtaatacctttatttgaatcattttcagccgttttcatgtgcagcagagagcattagaatcaaggagttgaaagcatccgtt

SEQ ID NO: 115200 - DNA, 415 bp, Physcomitrella patens
  Intron number 1 from transcript Pp1s231_7V6.2 (locus Pp1s2 31_7V6) derived from phytozome v7.0 (chr-ID scaffold_231; pos 55727 to 56141)
tcctggttgaactactgcacctcctttttacatccgtatgctctcatactcagcagcttaagacctcgattacaagtcctggagtggttggtcctcgaattggggtttttgtttttgaatttcagggttgcggcaggaatagtttttaattgagagtaagtgggaggtgcaaccttttgaagaaaaaaaatatatatctatatatatatatatatatatatacatgactcgaaagccatgatttccttgggtgctaatgtaattcttacaaagaatcgtagtatatagatcaaattattgtgaggttgtgcgaagtagcgtgtttatcttaaaccttcacgatgtctgctagagtttgcagttgtagcttcggtgacgtttatttattggagaggatccggtgaccatttcaggc

SEQ ID NO: 115201 - DNA, 389 bp, Physcomitrella patens
  Intron number 1 from transcript Pp1s65_218V6.1 (locus Pp1s 65_218V6) derived from phytozome v7.0 (chr-ID scaffold_65; pos 1235358 to 1235746 reverse strand)
aagattgaaaatctgaagcgacgttacaaggtagtgcctttggccaaatttgttcagcggaataggatcttttgacttgactgttggatggctttaaatagattaaagaataacctggtttaagttcaaagattctttgagctcttcttcactatatttgtttttggggagggacttgattacttagctgataaacaaggcttggaatgttgaagccaatcttgacttgcagggtttgcggttctgaaaatcatgaattctctcttgtctgggaacttcacatttctcatagggacttggttttcttagaggtatttcgatcttaatagaatcgggaaccaattttgtggaattttatgaacctgggcgattgcatgtcgttgctgtag

SEQ ID NO: 115202 - DNA, 458 bp, Physcomitrella patens
  Intron number 1 from transcript Pp1s35_242V6.2 (locus Pp1s 35_242V6) derived from phytozome v7.0 (chr-ID scaffold_35; pos 1300213 to 1300670)
tactagtgcacctgcaacctcgcctgctccttcacgtacgccacttcctcatctctcctgtgttttgaagttttccaaagaactggtcattagcttcgtcaaaagtttagtgtttaggccctcacagaatcaactaggtcatggaaaccatatcttgcgagtcaaacgctaattattatgtatatagatttagtaatttacaatatgggaaacagtcaacaaggatcttttgttcttttcttcaaattctgatgttaaattgaccttttgtttttttatttcatgttacacatgaagatgttagatacctcagctgaaagacctcgtgatggtgcatatgtttctatgacatgggacatggttactttgaacccggttcgtcccaatcagaagcactaatacgagatttttgtcgtcaagcagaccctttcttcggaaaccgaacgactggaaaccat

SEQ ID NO: 115203 - DNA, 509 bp, Physcomitrella patens
  Intron number 2 from transcript Pp1s227_35V6.1 (locus Pp1s 227_35V6) derived from phytozome v7.0 (chr-ID scaffold_227 ; pos 226340 to 226848)
acgcccaacaaggttatagccagcaagcctaccaggtaggggattcattctgattgatgtcccgtttatttacatatgtgtctcttcaaagttttgtagtgcatattgatttttaattattttaaatgaacgtaataactcattactagaatgtaataacccattctacatgtttgtcattgccaaggtaaataacatggtcttctgtgcagtctatctttataaacttttaggaacctgttctgcatcgttagatgtgttttcaccattgaaccaatattttttgctactcactgtttgattattttacgacttacgacgatacatcatcacagtatacacgacctcagacatttaatttccgctgaatgatttaaccatcattcaactggatggctttttatttacttatttatttgatcgactatgttgatattttatgtttactcattggtctgtgtaacattgtttcagcaaccaaccgcagcatccgcccaagtaggttacgc

SEQ ID NO: 115204 - DNA, 481 bp, Physcomitrella patens
  Intron number 1 from transcript Pp1s97_74V6.1 (locus Pp1s9 7_74V6) derived from phytozome v7.0 (chr-ID scaffold_97; p os 554528 to 555008 reverse strand)
tgggcgctgcatcccttctcctccctttcgcagtatggttctgcaccctgcttgtttctctttttattgtagccattgcgtttcacatcgtttcctacgtctcgtcttgccgcatctcttcaatggtgtagtttctgagggtttgtttgtttttgtttttgtttttgtttattttttttatttttaggttttctgtgtttcagttgcagtttgaatgacttccgtgtgggttgaaggtgtcagcagtagctagttatggtcagagaggagttctatgatgattattgtctctttgcgttccgttttggtgaaagttatggtcccgttgtttacgatcggatttagggtttggagaacgttggtgaggttttgtttgttttttcgagtggggtattttgtaaaagatttggatattatttgttaattggaagatgcaactgcgttcttttgttataggtgaagtacgcgagagatccggata

SEQ ID NO: 115205 - DNA, 556 bp, Physcomitrella patens
  Intron number 1 from transcript Pp1s184_69V6.1 (locus Pp1s 184_69V6) derived from phytozome v7.0 (chr-ID scaffold_184 ; pos 457929 to 458484)
gccctcaacgcgtccctcagccttctttgcatcaggtataggacatcctcacctgtttgtttctgttctgagctctggagtccaattttagtttgtcgattcttttcctgtaatgaggggagtaggtttgaacacgagttcaattggattgtggaacgaagggtgacttggaaggactgtgcttctcctcggaaggagatctgatgatttccttgcctctagtggtttccgagagtgggaaaattgtcttttcttttagcgacttacggaatgctcaatgcaaatctaggtgacgttgagggacctcttgagctgaacaagctgtgataggagtaatttttagaggaggaatgctgtagaaaagagcctcagaatctttgatcagatagagttctccaggtgtttattttaaaccctgaaacttctaattataggtggatcgcagtaaaatctgcctcttgaactgctcgaatgcacgagagggacaccttgaatgtatgtgactggtttttgaaatgttgttgttttttttgtttttgtttttctgcagaggtcc

SEQ ID NO: 115206 - DNA, 821 bp, Physcomitrella patens
  Intron number 1 from transcript Pp1s3_553V6.1 (locus Pp1s3 _553V6) derived from phytozome v7.0 (chr-ID scaffold_3; po s 3292698 to 3293518)
atttggtgagtggggtttccattgtgcttggtcatggttgtgagctccgagggttctgttttcgtatggtcggttgggtggcttaggttgttttttattttttttaataggattttgatagtggtttctttttaggatttttttgggtgggtttagcagtgatcaggagaagattttctctttctcgggtagaaaaattgggtcaatacctcgatactaattttatgcttgaattttaattttggtgtttggggatattttgggatgcttttgaagggtggtgggaggctgtggaaatcatggaaatctctggagtttttgcagctgattgtattctagttttagggattttcttttgtgcattttaataagcagttccagtgaggagaataatgattgtgatgtatgttgattggaaatcgggcgcgtattgtattcttttgtagccatgtagctgatcgatggtttgatcgggttttgaagggtggacatagttgttaggtcagtggttcgccttggtcatttgatgtgaaaagaaccctaaagttgatggtcggggtgagtcaattgaggctcaagagaactcagttatggatagtaatgcatttggtggtggtggaggtagatgcttacaggctaacttttaatgttctgacgatgggcatagccgttacgcttctttggatctcaatcctgtttctgcatggacaatgatgagtgtatttttctctcccttgtgagtagctttccatgattcaattttataattttttggatggcctgcagtcggaagaagatcttgctctaaagcagcagttgga

SEQ ID NO: 115207 - DNA, 938 bp, Physcomitrella patens
  Intron number 1 from transcript Pp1s1_272V6.1 (locus Pp1s1 _272V6) derived from phytozome v7.0 (chr-ID scaffold_1; po s 1821304 to 1822241)
catcactgtaagttaccggacaagtgttgcctgcggtgtacaatcaaagtctggctctgctgtcgcgtccgattgtgacgaggtgcgtgaacttcgcgttgagagagagagagagagagagagagagagagagagaggggggcggttgtcgagtgagcgccggtttcgcgtagagagagcgcttgtttggttgttcgcgggcgcttcggatggttggacttcctcagtggttgctgtcgttggggtgcggtggttgagtttcgtagcttgtttgcggatttgcggggttctgagagagaatcgggaagcgttagcggtgagtgggattaggctgtggagaatgattgtgcgataagggtagtccctgggactgaagagaggcatttgcggatttccgttgagaacgagatatttctgagtgtctgtgttgattattattattattattattattattttaatttagtgtttcgtcggtgtatgtagctgttttgcagcgtgagtggggcatttggtttattttcggacgtcgtggctgtagtttgtggtttgtattttgcgtgttcgtcaacctcattttcttcagtggtatgtctcttgattgtgcaagtgaaggaaatattcagtgaaaggagggttcgcgtatatatagaaatatattcatctttttcctttttttttttctttgtaaattttcgaaagtcctcggatttttagttagctgcgtaacgatgttgtacttcaatggtagtgagctgtgcagaggggtaaaggtggactttgagagggtctgttttttttaatagtgggatcctagcacttgctgtagaattgacactatgggcgtggatgttgggaataaggattggtcaggaatgattgtgggtggtggattttaagacattactgttgtctgtatgcaggatttggggtttgga

SEQ ID NO: 115208 - DNA, 691 bp, Physcomitrella patens
  Intron number 1 from transcript Pp1s266_16V6.1 (locus Pp1s 266_16V6) derived from phytozome v7.0 (chr-ID scaffold_266 ; pos 231696 to 232386 reverse strand)
tcggctggaccctgataagaagttacactttttatgtaagtctcgtcggcggtgctttctgacgatgcctgttttcaatctcatcaaaattgacctttattccgatggatttggactgtggcttgccgtgaaggtttcgtcccgcccttttcctttggttcgtgtctaggtccaaatggaaggctatttcagggtagcgaaaatttaccacgctaatggataataatgttagcgggattgggggtgaagagcagaatatcaacaggatcaattgttcgcacaaaactaggttctcccagtgaatgacatatcttggcatttataactctattaaggatgctgcttgttgtaatacgatttatggtgagatttcgttgtcgaatgcgacttatatctaaggcagtgaactggtggtgcgagggtccctgttctcgagggccctatactcagattttctactgcaatgatgcccaacattttgtatctgtttgtatgttggattgctagccattggcatagataggatgtcctttagattatcgattcgggcctcagttctgaattggacttgtctggtctgtgccagagaaagatgcgcttacatctttcaacttttttatttttacttatttttttgatttttacatcctttacagacgaaccaggcaaacaggtttcaagtgcaatcaag

SEQ ID NO: 115209 - DNA, 760 bp, Physcomitrella patens
  Intron number 1 from transcript Pp1s350_5V6.2 (locus Pp1s3 50_5V6) derived from phytozome v7.0 (chr-ID scaffold_350; pos 59781 to 60540)
ggcagcgactgccagtgcagtcccggcaactgcaggtgagtgttgataaattggttcttgacttgtcatgacgttgtctgtaaaaattgcgcgagttaattttgtcgctatgatcgtggcgtggggttagagtgtgtgttagagagagttggtttaacttaacggacgattgtaggttgccctgagtgatgttgtgttgttgctgaacaatgctggacgttggagttatatgtttttgtataactgaaggagttcacaatccaggactcagtttatgagtcgttcccggtgacgtcctcgcatgattgggaaaatagcttacatagtcgttggtttacttttcgtcgtagctaagagctccttgatgtcaagctactgaaactcagcatgttctttgtgttgttagtacgatttaatcgacgcgtctcctgcgattaggccaagaattgctggtgtattcgtgcttgtgctagtgtctgtcgattcagttgcaggtgtttgtttgggctgaggagttctttactttggaaagagaacgatggctctagtatgtgttttgagcacgtccaaaatagttcagtcgggtaggatggaggttctgtcattttgattgtcacaggtgaattactattacgcatcgaaaggtgctggttcctttgactacatgccatcgacgctgtagttttaaccgtcatgaagtttttcacaaagtatcagattttttgacttggacgtactactgactttcaggtgcaggacc

SEQ ID NO: 115210 - DNA, 607 bp, Physcomitrella patens
  Intron number 1 from transcript Pp1s80_59V6.1 (locus Pp1s8 0_59V6) derived from phytozome v7.0 (chr-ID scaffold_80; p os 304118 to 304724)
cttcgtgctcgaggccttcacagtgctgccaagtacatctttttttcttctttttctttgaacatgcgtgctgtcctctcctttagtctggtccttctctgcaatgcatagtagtgagctacaggctaggtatccttgcatttgaattggttgagcccgactgtctgaaggcctagcaactgcattgaaaggcctaagcgtgtttgaaatcattaatctaaacctatgccgcgtaatctaagatttttgggagcgtttgagcattctcaatagaaaacccttcaattttgaggatattttattgtggatttgtaggacattaatttattgtgttgttccaattcgctatttgtgtctgttaagtacattttgtgtgatttgtccatgtatgtagaatcaccttcaatttttgtttttgttttgttttgttttgtttttttttttttttttttttttttgtgtgggagtgctgctagcgcaatctgtatgaactatttaagtgattgtcagtttatcactaattggaattagtgaagcgtgatttcgtttctgactaaaaggagttgtcgcagggctgcagaacaactagttggccttcgtgagaaaa

SEQ ID NO: 115211 - DNA, 288 bp, Physcomitrella patens
  Intron number 3 from transcript Pp1s211_126V6.1 (locus Pp1 s211_126V6) derived from phytozome v7.0 (chr-ID scaffold_2 11; pos 636479 to 636766)
gacatccaacatccgtgtcattccaaacttttctggtaatgattgtagagtcaagtatagtttgggtaatcaaatacagctcctatgggcttgttattgtcatctttacgtgcagtcacgttcagtcagcagatgcattaagttttgtcgtcacatagtaagcccagtggcttttcttcattctgtgtcataactgagggcttatgagtaaagtatgagatctgtctctgcttcacattccactacctaagctgtttgatgatttgtctgtttatcctctgctcacag

SEQ ID NO: 115212 - DNA, 982 bp, Physcomitrella patens
  Intron number 1 from transcript Pp1s115_195V6.1 (locus Pp1 s115_195V6) derived from phytozome v7.0 (chr-ID scaffold_1 15; pos 1140195 to 1141176)
atgtaagtatcggtgatacctgtaggattatggtttaaatccatggtagtctgtcagattgcgctgattctgttcttacggcgagtttggcttatatgtcatattatagtttccaacaggaaaagttgaaagaatcaagtatctcaatacaaataccttgagttgcagatggttgtgtgagacggtccgatggcttgagtggtttgtttccacaataatgtgtgatgaagggaaacgagattttgtttcgtagatttaaccgtcacgaaacctgtaggatatgcgagggtccaaacacgtttcgtgcaataaaccttggtggtttttccggaaatattgatatcaacctgctagttcagcttgtggcggtcaaaacttaggtcactggttatgagaaagcaaaccttactgatgccgttgaattcgcacatactgcggactttcctctctacttctttatttgtttatgttttatgttaatattaacgatgatgtccacgactttttaaaattatacctggcttctcgaacgatggtttgctcggcaatgtttgattgcacagaaggggtcagcagcatgcaacacacaccttgataacaggaatcaacgtgattggagcccctcaggcgcttaggtcaagtagttttttctttaaatttctatgatcttaggatggcatcggtttctgatgccatgtggtgaatgtccgcagatgttcctaatggctttttcattatctggatctgcaacagcttgctgtagcaatcatcgactgggatcattgcttcaccaggtaatgatgcagaagtcaggtttgatcggaacaagtccttgtcccatggacagtgttgtactaccttctttgcttttaaaaaaaatcttatcctcgtcgctgaagacttccatttccactttgttcaaaacaccaacagtagctcttcgaatcatcggtgtgtgcagcattctcaactgcacacttgg

SEQ ID NO: 115213 - DNA, 223 bp, Physcomitrella patens
  Intron number 1 from transcript Pp1s36_58V6.1 (locus Pp1s3 6_58V6) derived from phytozome v7.0 (chr-ID scaffold_36; p os 359727 to 359949)
cgccgtgagttttgattttgttttttttgttttttgttttttgttttctttcgtcttcgcttcatacgactaattattgttcatgaacgaccgtctctccctctgtgtaattcttgtaaattgtcttcgtttattcatttttttccacatagatttgaatttcggtttccggacatctgcttgtacagatccgtgggagcacgtgcttgcgataggattggga

SEQ ID NO: 115214 - DNA, 798 bp, Physcomitrella patens
  Intron number 2 from transcript Pp1s75_56V6.1 (locus Pp1s7 5_56V6) derived from phytozome v7.0 (chr-ID scaffold_75; p os 280404 to 281201 reverse strand)
gtggaggtacgctcgttttcttcgtattggaagtgctgccccttgaaaccccgttctttagacttttaatgaaggaatctcgattttttttggatgaattcctgctgctcgcataggtaacccggaccttgtttcttgtcagaaacatgcaatgtgtaggctgtctaggtcgactctactactcctcctcctcccattcttcaatgtgtcgaaggtcttgggaagaagacacctatcaactcatggcgctaagcgtgatttgattaaagacatttttctcctttccttcaatcaactgaaaagcaatttacatagtttagtgtgcgttgaattgacacaaacttgacctacagttttctaggtgctttaggattttgcggggtgtcactaatgagtggctatcattcagcagtgtttagtaggacagaggtaacgttgaactggaatgttttcactaaagcagtgtagtttactagaaatttttgcatttgattctaatttgttccgaaatgagggtttgagtagggcatgagctttcagaaatgatttggcaacgtttaaagtagagttctttaacaacttcgtctcaattcgtctcaagaatgcctcctcttattcttgatgctcctggattttaaagaactgaatcacaagtaattaattgtttgggctcctttttcaaaaccaggcaatgtgaaagagagaataatgaccttataactatgtgctcctttcgctctggcattcacagttaataagcttaacgcgttgagaattgggggtggtgacagtgggagc

SEQ ID NO: 115215 - DNA, 983 bp, Physcomitrella patens
  Intron number 1 from transcript Pp1s76_82V6.1 (locus Pp1s7 6_82V6) derived from phytozome v7.0 (chr-ID scaffold_76; p os 483490 to 484472 reverse strand)
tggggcctttccactcacgagggcttctcttcaaggtctgataatcagtgttgcgcggaaggattttgttggggtgtgtgtgtttgtgcattttttctcgcagaatttgaacactctttttttttttttttttttttttttttggctgagttgggggttgaggtcgtcgcgggggttcggcgatttggtgatttgtcgatgcggtgccgaatggtccatcgtgtgcgtggtgttgttgattttgggtggttgtggagagtgagtaagcttggagggtaatggtgcagtagggttttggtttcagagttcgatttcgaggttcttaggtttgtcgatggcgtccgttagaagttggatcttgtctgatttttgttagaggctttcgttgtggccagttcttgcatcgtgtttggtgacaatggtctgtttgtgttgagtatgtatcagcggtgcagtagtggtgaatagacatttttgtagtgcttttcaaagttttaattgctcgctaatgccactgtgctttggagcaatgctacgaatgagaaatggttttaatcttggtggactttagaatttagctatcgcagtgtgagtgggcttcgtcgcccttacagaaaataccgtcaggaagctcattttctattctcattattattattattattgaaaagagagtggtggcttcagtgggtgtatactgggatcttacctcttttctagttcgattgaagagttggagttttacgttgcgagtagctacctgtgaggatgcgggtacgattgtagtggtttctgctgaacccagcagtgcatgttcgcttcttgggcttgcaatcaaattttcagacttaaaagcaggacgaccctgcgtgctgggatagctacgactgagttgacgggagtgattgtgtgtttctaactcgttgccttgttttgtttttgccgcagatatacatcaaatttgtattttccacgcagtaaat

SEQ ID NO: 115216 - DNA, 933 bp, Physcomitrella patens
  Intron number 1 from transcript Pp1s354_37V6.2 (locus Pp1s 354_37V6) derived from phytozome v7.0 (chr-ID scaffold_354 ; pos 334020 to 334952 reverse strand)
ctccgctctgatcccaggattgccgttgtgtgaaggtgtgttgaatgttgcgaggtagtggacttatagttgcgcgttgagagaatgctgagggccgtgattggggttgtctggcagtgtttgcgaatgtggtgccgttctgttcgctggagtttcgctgtttgagggtgggttgttttggttcttgatgtgaaagagtgggttttctgaggtttatctttagtgatgtcagtcgttcttattttattctctttttttggagttatccctgtgtttttgtccgagagaacgagttgtcgcacttgtaacggcgactgctatagattcgggtaccggctctcgttaccttgatggtaatgtgttgagagtcgaactagtgcatttgaatacaaaatatgcatagctctgcttcaggtcacgggatatgctcaccgtttgaataacgcccgcttgcagctgtgaaacgtgctgaatcacgaggtttaggagaaagataatgttggaagagtttcattgatgtctttggttcgcgtcagtcttcattgtcggaggtttctctttgttttaacgtttgcggcctctggtatctctctacttacatgcttttacgaaatttgaggaaattttggaagttggcatattgaatccatatgggcaaatcagctactttaggagttcgaaattgctgcaatgatctattttgttgagacaacccgctgtttcgtggtccacattcagtgtagggaagggctcactagtcgtaacatcctaggacaacattcagagggaacagtgccatataggcatagtatgccaagaatctatttccctggatttacgataattgtttgactctgtctcgaatattactttagattcttgaattacgcttgtgtcgaatttcgaatactgattccaatttcttgcaggtcg

SEQ ID NO: 115217 - DNA, 836 bp, Physcomitrella patens
  Intron number 1 from transcript Pp1s3_177V6.3 (locus Pp1s3 _177V6) derived from phytozome v7.0 (chr-ID scaffold_3; po s 1124114 to 1124949 reverse strand)
tttcctttgctggatttgttcgaatttatttgcaggtgaggctcagatttctattctaaatcgattttttttttttttttttttttttttttttgagttcgttctttgttttctgtccagtttttgcaatttccctggaggattgaatgccgtcagcacgactaggagagctaaagaatccaattctctttgttattgtaaagttgattttgatgttagtttacgagacactcttgtgagcgacagtgagtgaccgatcatgttacggtagcaggatagcacagatggtgacgtgtttagagaatatatcaagcatgagaatttaagaaactattgggaagggttcctatttaagaatgaatggatttgagagagtacaatttgtatgcggatatgcactgaaaccacgcaaatactgcttaaaaattgaaacatgcgagatgggagcagtcaccagtgtggaattcaatactcggatgcatgattttgacttgcttgctagaagagtaaatgatactttaattttgaatgcgatgagatgaagagaccttactgcattatcacgttgtcagttgttacaccgcttttctttacgttcttccaagatgtggcagaatggcagtgaaaaggaattcctatgaactgtaaaatggcaatttaggccagccaggtggatggcatttcaactaaggaaacttctcatgatctgtgtagaaggaaaagatgcaattgattttagtggcatcgagccatattattcctcgctcatgctcttctttccattggcttgctcatgtgcagtgggcctttactggagaagacaaggttcaccaaag

SEQ ID NO: 115218 - DNA, 515 bp, Physcomitrella patens
  Intron number 1 from transcript Pp1s165_60V6.1 (locus Pp1s 165_60V6) derived from phytozome v7.0 (chr-ID scaffold_165 ; pos 467411 to 467925)
aattcattctcgccggcacgcttgataataatctggtatgcttccccctgttattcttttgactgagtcctcgttgttgtccgcttcatatgattctactgtctttagtgatgtgttgatctttgagcaacgagtgaattggcgagagagactgcattttctttttttcagtggttggtaagttcagatactaagtagttgcattgcgggttgaaagaaccttacgaatgaatttagcttattgttcttctgacatatagagtttgtctttaaataatgtccagaaatgatcagcgtaagttccagctttgattgtgacgatatttcggtgaatctccatgcaccataggactgcaattcctggctctccttagttcctttcatatgtttttccaggtcgattgtttctaagcctttctattctattcatcctttttataagatctcctgatttcgtcgtaattatactcgaggcttgaaatgacttttattggatgtgcagcgtttgtggaatt

SEQ ID NO: 115219 - DNA, 583 bp, Physcomitrella patens
  Intron number 1 from transcript Pp1s13_291V6.1 (locus Pp1s 13_291V6) derived from phytozome v7.0 (chr-ID scaffold_13; pos 1915793 to 1916375)
tctcgctctcgccctcttcgcgtaaagcctgcgaggtgagattttgcctcgtgttccgtgtgtagtttctctcttggatctgagctccatgcccctgttatcaggtactgagtaatatcgttgcgtttttttcttgttgggttgcgtgacggtttggtcggtagagggtaatgacatcgggttttggtgcgcgcagtgtaggtcgagcctctctctgcctttttttgtctttttgagaaagggtgtagctcttggggtggcttgggttgtgatgagttcaatcaggttaagaatttttctacgagagtgctgggtccttcgtggctgtaatttgtgtattgtctatgattattacacgtggttgaagctggatcctacctgcagaggaagctgtccttaagtacggaagaattcgtggtgttctgtgggagccggtaatgtgtagtggtgtttcgcttgacaccatgggaagctgtcaagctggtcggttgcttggattgtcggtctgcgtgttttcatgcactcacgaacttttttttggctttgatttagaatcagcagatctgcagtgtgagacgaacgc

SEQ ID NO: 115220 - DNA, 955 bp, Physcomitrella patens
  Intron number 1 from transcript Pp1s490_20V6.1 (locus Pp1s 490_20V6) derived from phytozome v7.0 (chr-ID scaffold_490 ; pos 102146 to 103100)
tacttgcacagattgcagcttctctccatcgccaggtgcctgcacgctccctccacaacgcttccccttgtctcgatcgtcttttgggtcctttcgtgtgagaatttggtgtccagtgtgacccgggaacctcttttgatggctgttgatgcaagtgggtcctttgagtttctccagggtttgtcctgaacgatgagcgtgttgcgctttttcacgatccgtggtggtcactgccatggatcgtggaggtttgagtttcgtttcagaggtgggttgttgcaactttgggaaattggtggtgatcagttgggattgtggaattagggtttccgagatgggcgttgtcgctttgaccttatttattacgcgatcggaggaccgaatctggttgggttaacatgtggtgtctgtctgttcagattgtagtcggaggactcttggatgctattcttttggaggatttgcttataatcctgtgtttggtgttgtaatgccagttagggttgaattatactaactgtgctcttatttttcggtgtcggtttcaggttggattctgcatttttttctttctaatttgcatatactgtagcattagagagttactatctaaatagactagattgtttgtttcgcctgaaatcattttgtctagaccagttgtttactatctatgaccaagcgcttgctctttgtatgtggagttctacttcatcgtagagatagcagtgttttcattggtggacagtgatttttctattcttcgtggttgctttcatgttgctggtgtgatcctacatacctcaggcaacgttgggaatgccgttttgaggcgactttgtgcatgtgctgccaccttttctcgagttggtgaatcgcgtccgtgttaacttgtgtttcatcaaattctcggtcagcaggaatcggacgtcctgtgcgcgacttgttattcttg

SEQ ID NO: 115221 - DNA, 957 bp, Physcomitrella patens
  Intron number 1 from transcript Pp1s13_285V6.1 (locus Pp1s 13_285V6) derived from phytozome v7.0 (chr-ID scaffold_13; pos 1893486 to 1894442 reverse strand)
ctcgaagagtaagtgaagcatgctggcttggctcttgaagggtttgaagaatctttttaggcaccgtagaaatcgtacatatcgagagtgatgaatctgtcccatcaaaacttcaaagaagcttttggacgattcgacactctcaacctcaatagccgatgtctgtcgcacgcttccaaatctttcgttagaatccgacaccagtcattttgaacttatccaaacgaccttgttttttaactagtttttcttaagtttaagatgataacaataattttaatatattttaataactagtatacctcatagttattattacaatttctagtctgacactagaatgaagcatgaatcgtttagctgttgcgtaatcaacatttccatgatgctcaactatattcccctggtaaagaacctggatttctgttttatgtttttgtgaaatatccgctctcgtctgctggatgttgaatccaaatgatgatagcctttacctgtgaaaggataaaagaagctggacgttttggaggcgactgacgtgagcagtgtgggtgtcttgcagttcgcacctccaagttttgttagggtggtagatggtgatagttaccgccggattctgtagccgctgtcgtgaattggaagtgattgaccagttgaagctgctactagattcaataggctttctctcaaaactcaagtcacttgacgtctcatggaataacttgaagcttttgccttctggtcttgaccaatgcaggaggcactttattactttcagtatttgtaatgtatatttttcaattcctatttttattttaatttaattgctgttcctcctgctacgaagtagacacgagaacaatgtctcgttgaaaaatgacagtaatccttttttagagactcattgattcatattagttgtttgatgatttgtgacaggccttcggaagtccttcc

SEQ ID NO: 115222 - DNA, 968 bp, Physcomitrella patens
  Intron number 1 from transcript Pp1s161_63V6.1 (locus Pp1s 161_63V6) derived from phytozome v7.0 (chr-ID scaffold_161 ; pos 401330 to 402297 reverse strand)
gttccctgcatccgttcccgcctcctgctaattgggtacttcgattatccgtcgcacagtacctgtgctccaatttgggtgcaaaatttcacttacaggtttcatgcatgtgaattcgttcttctgcttgctttgttttctgtttcggtgatttggagattgtggggagtgtttttttcaggtgcagaatcctgttaacgtattaggaactgcatttttgcaatttctgtttttgcgagaattgtgcgtgtttgcttagggttttcagctgtgatgcatatatgtatgtttaatggatggttaatttatgtagtttagtacgtttagcataatttgaagtgcgtgtttggagattcagttgcgtggattttgtatttaaatttatgaaaataaatatacatctgtgtgtctagcattcttagtcgcataagttcgctggcagttggggtgatgtgatgtactagtcgtcttttctggtgaatgattctggtaggtcagctatcgctaatacttcttctcggaattgacgggaatcagaaattggttgtggaactggtgtcttccagttactggggttgtgaattacgagattcgtgttttttggggcatactaacgtagatgagttattttatgaaaataataccaatgtggtgagtaacgtcgagatttttctttcattggtttagtgtcgacttcttgcttgaagttccttttgttatttacaatcattcgtgttatatgtaatgttcatatacaggcttacccaacgctaattgtgtaaaccttcagcttaatcaagagcacctaacttgggacgacggatggaatgcatcatcgttgcaatttttgtgttctctatgataagattctgttttgtcgcgctacgttttgatacaactgctgacttaccctttcacgcatgtcctttgcagactccgttaacttggcagtactcaggatcgcagtg

SEQ ID NO: 115223 - DNA, 748 bp, Physcomitrella patens
  Intron number 1 from transcript Pp1s154_83V6.1 (locus Pp1s 154_83V6) derived from phytozome v7.0 (chr-ID scaffold_154 ; pos 529341 to 530088)
gcttatcgcacaacgcggtgtaggtggacttcatcgcgaactttacaagtagctgtccatacaccctgcatatcctacttactgcaatcactcggaagatctttcaaatccttctctaaatactatctcacgtgtgcgagtttgaaaagccgtactacccttctctttgattcatcgtgctgtgcatcatctaagaataaaccagtgctttctaacgaattttccgaggtagagcaaggcctgttcccgatcgatttcaatgatgaatattgatcgaaataggattttaaacgatgagtcaacttgttcataatagcatctctttgcaattcattcttgattcggttctagctatcgataaagttgcggcatcttaaataacttcgctaacgtcatcgagccgaatccacactagagcccatgttagtgttgtttttttgcaactccggacgctaggctaccagttctgtgagcagctcgtgcctacacaacttaggacttgatctttcgcagagaatcgctggttgttaagttatgttggctttggtccgatccttgcgtataaatctagtcgtctatgttagaaagggaacctcgtttctgtttgtagtacccatgaattctggctacaaatatgacgaagtggcacagcaagtcatgagctcaaagtaccacttcgtacggagaaacgtggtgctgcgtactaatttgcgaaagactatgtatggggttctctgtaggtcatatt

SEQ ID NO: 115224 - DNA, 507 bp, Physcomitrella patens
  Intron number 1 from transcript Pp1s16_299V6.1 (locus Pp1s 16_299V6) derived from phytozome v7.0 (chr-ID scaffold_16; pos 2332003 to 2332509)
gtaagaaaacatctatactatctttttaaggttgcctatccaaattttaagccatgttgcatcaaccatagctaactcatatcaaacgtgacctttgttaagaacaattccaaacgtgacctttgttaagaacaattccaaacgtgacctttgttaagaacaattccattttggatgggcttgtgtgttggttttttacttttgcttctaaaccttaatgtattattgccctaatgttaatgttgatgtcagatttactatttggtgttgatgattcttgtcaactattgtttattcttaggcccccaaatattgcaatattcttacttaagtaccaaaatttgacattgttgtgaaagagttgtaaattatggttagaattttcccaacttggtaatcaatggtcccattagtggaggtgcacttaccaattttgactcaaggattacttagcacaaaatttgtaacaaaaatcaattcttcgttttggttctagtcagattggaa

SEQ ID NO: 115225 - DNA, 726 bp, Physcomitrella patens
  Intron number 1 from transcript Pp1s13_392V6.1 (locus Pp1s 13_392V6) derived from phytozome v7.0 (chr-ID scaffold_13; pos 2475549 to 2476274)
tctctgctggaaggtatggtctcttattcgggagtcgagactgccgagtatctctggttttcgttcaagtaggttggtagaattgtgccctatttactttcatgaatgtatttgtgctatctatccgatggacgtttgaatctgatgagagtgtttcagtgtgatagctgaaaattcctcgtgataatgaaatcaagcttctcagtgtagttatctgtatattgtaatgatatacgctatagaacattgtgagtatcgattttgttgacaatgtgtttgacttatatcacctttccatatgtctcgttaaaaacgagaaattattgggtgtgctagtatcatggtctgcagtttatgtccctgggacggctcattcatggccttgaaaggtgtcagaaagtttaaatcttctgtatcattgtgtaacttgaagcactgtaaaacagcgggagtgttctggaatattcctacttgatcttttagattcgatgaccttttgaagtgattattgcactgttttcattttaactgatttgcttccgcatcctcggtgtgatgttacccatttacatggatagaatgatgtgtctcgagctcgagattattctgtatatcaaattcgaatggttgatgtgattgttttgttttagataaattctattcttctaaccattgctcttgtttcttgtagcatcgagtactggcctgatccccagcggggtatta

SEQ ID NO: 115226 - DNA, 1016 bp, Physcomitrella patens
  Intron number 1 from transcript Pp1s55_110V6.2 (locus Pp1s 55_110V6) derived from phytozome v7.0 (chr-ID scaffold_55; pos 751879 to 752894 reverse strand)
attttgtgtctggaggtgagttagtattgtcatttcctgtgttgggatccgattttgagcttggtgcgctgattggatgtttctggaggggaatgatcgacttgttgtacaaacgcagtccctaggtttttcattttgaaggcaatgaggcgttcttttctttctaatctcacattcctgtggagaggtataaattatgggagtttgtataagatatcttcgcgggctgttccttagtttatgtaaaacgcttgttagaatacgtgaaggtatttgagattgagggcaaacccttggaatttgggatatcgtaacgataacgaaccacaccttctctgagttctttgaatatgtgagtacgaatatatgcgctcagtaatttttgggatcatcctccgtatagttttactgaatttcttctcagagcttcagttgtagcgggtagtggtagtcggcactgtcaaggttacttggacgtcaggattgcttggaattcggtgttgacgttcagtttagtagttgtgtcatttgcaaatcgccagtgttgaaaaattgtgaagacaatgtttcactcatattaatcacctctgataacttttctagtctatgatttgataaagtacttaaataccttcccggacccgttttctatctagaacaacttagcttagactgatatgagtattttgatgcacaatgctcttctccagtacttcgcttgcgaacacaccaattcaatattccatttctatgagatgcagcttctcttataactggagcttggtactagttctaaccaatttctgtcgcttgattagcgtgcagagcgtgacttttctatattttaggaactgatgacagacagcgcatacgcggatgttttatttcctcacagcattcctatgttccggagtctgatagtccggctcgaatgtcagtgtgattccattgatcccacaccttggtgtgccaatgggtcagctggaacgactgcagttcgaggaggaaggcccaat

SEQ ID NO: 115227 - DNA, 713 bp, Physcomitrella patens
  Intron number 1 from transcript Pp1s323_62V6.3 (locus Pp1s 323_62V6) derived from phytozome v7.0 (chr-ID scaffold_323 ; pos 349604 to 350316)
gagtgtccctgtgattgcttgattctacattcaaggtaaggtggatgatttaagcaatattgggccgagtcaagcgatcctcctggttgtgattttggtcttatttttggttgtctggtgtggatgtgtgtgtgtgtgggtatgtgtatgtgtgtgtgtgctctcaaataacactttcgtgtttgagatttacagcaatggtttgtgagctgtggagtcgatcttctatttcgtgtgatttttgggggtgcttatttgcttttagtaagtttggattgcggatcatatggttgaatgtgtggaatgaatctgagaatgagtatagtcaacatatgaagtttcttttgaataagagcagatccaatcatgaacttggccattgttctggatttcgttcggctttttctctggggggggggggatgtagtcagcatcttgtaagcatctataccgtggccagttttttgattgagcaatcgtgtagatggaatcatcatgtttcttgctgtgtggggcaattttgctcttcaaagctgaagtgcctcacaaatatcatcaatttaaaaataaatttgaagttttgtgagtgccgatggcttgacttgacctggtttgttgaggcgtagtgtctctggtttcgctttcctataatgttatcgaaagttttgacgatgtcagggggggagttcagcatcattgaacagttttgacgg

SEQ ID NO: 115228 - DNA, 689 bp, Physcomitrella patens
  Intron number 1 from transcript Pp1s220_84V6.3 (locus Pp1s 220_84V6) derived from phytozome v7.0 (chr-ID scaffold_220 ; pos 543125 to 543813)
ccttcaggtacccctcctcaggtacccctcctcaggtactcctcgatcgctgcgtgtttgcatgtctggaactggcctgtatcgccactagcttcgttgctttgccattgttgttttgacgattcttgtgtcgcgattgtggtaggggagagagaatcgtgattgggtgtagctaggttgattgagagtggaagaataatgtgtggagatggggttgtgaacttgagtttttctttttttggttttattttgcttgtcttggattgggtttcaggagggctgaggtttgagaggcggttgtagttgattgtagggtggggtactctggaggattgggctatactctaattttgagggtgtagtgaggaattggggtttagggttcactgtcgtgtaatgttgtagattgagtctcgtgtttggcttaatacaggaattggattggtactgaattgcgaactcgtcaagattgtttgtgtcgtgtgtctgcttcaccaaatagccgcttgtgttctgaagcaattgtaggagtctaggtggtttcgatgaacgtttcggtttgtccgtcttcatgaagcgcattcaagccaatcggtcgaagtttttagtcgggcattgtttttttttccttgtatagatgttttatattcaggtgatgcaggagcggtgttcacgcgtagtagagcacc

SEQ ID NO: 115229 - DNA, 406 bp, Physcomitrella patens
  Intron number 1 from transcript Pp1s3_637V6.1 (locus Pp1s3 _637V6) derived from phytozome v7.0 (chr-ID scaffold_3; po s 4002332 to 4002737)
cacaaggttgaaaaccatcacaaggttaggaatatgaacttacacgtcgtttcagctaagcacaaacttactacgtagagtcctagcttttattcttcattgcttgatcttcaaacctgtatccgactacggcattctttcgcagggcatattgtttagggacctgaagaacacgacgcgttctagattgtttcaccagtctgtcgggatttcgtttttgtagctcttcctctttttcaagcacagcttagcgtttgaatttaatctatcccaaggattcgtaggtatgactgtatgtgtcgtgctttcttattagcaaattcttgtatttctctttgcagctgctcactcgtatactcgttttcattcaggagaaaattaaatttgagattgcaaaattacaaca

SEQ ID NO: 115230 - DNA, 481 bp, Physcomitrella patens
  Intron number 1 from transcript Pp1s14_278V6.1 (locus Pp1s 14_278V6) derived from phytozome v7.0 (chr-ID scaffold_14; pos 1664265 to 1664745 reverse strand)
tcggtgatactgttcattccctgttacatgtaagagaaattatgtgtctcgccttaacctatcaaccttcgtttgggaataagtgcatgcccgagagttttagaaaatcgagaagctttggagtcctttgataaattcaacacgctattagcattgagtaacaaatatagagtgttatgtttgttgtttttggacctatatttaagtgctcgttaatactcttgtggaattccttaagtcttcactttgccttcactgcagttttcaaagcttaatgtcgccaatatcatcactgccgatgcaatttatagttatttgtcatgattctagtctggtctatttttcttttaactggataggaaagctaatattttatgtaaggtaatcttatcttaacaattgttatttattgaatccatgttaaagtaattgtattttttcaagttcggatttaagtagttactggactttgaatgtgcag

SEQ ID NO: 115231 - DNA, 759 bp, Physcomitrella patens
  Intron number 1 from transcript Pp1s149_177V6.2 (locus Pp1 s149_177V6) derived from phytozome v7.0 (chr-ID scaffold_1 49; pos 590489 to 591247)
ttgagttcgtgaggcttcatttgcgattttaggaggtaagcgtgttttcttatcaattttttcgaactatctcgaattgttagtcttgagggtgtgagtttgtgatttagtgctctatgtgtgggagctgtattaaacgctcattttctcaaattcaggattaagagcattatgatgtaatgttcattcgtgtttctattagaggaattgaatattcgaagttatcgacgtggagtttctcgttcatttcagctgatatttatatttatatttatatttttctttttactttttctgtcttcgcttttcttgatgcgtctggttttgaatttgtttgctacagacatgacgaatagtttccacatttgtgtgcggccttggattgttataaagacttctcgtaatgccatcttcttaccatatatacagtcttcgatttatcccatttcattttgtcatgtgtcattctgtcgagtacagtacgtggtctcggatccaggttttttgtgttacgttttagctggttgtgtcacatttcttagttcttgtcgattgagcaagttttttttatcctctctcattgccagctgtttcacgatgattgtgaggatattgaggtagatttgtttcttcaaaacgagaaaaccaatttagtcgagttaggagtagtgagtggaatggtttattgactttagaagcatcaatactgctgtcttccttccaggttgttcaaggtaggtctttatcggaatcgggccg

SEQ ID NO: 115232 - DNA, 656 bp, Physcomitrella patens
  Intron number 3 from transcript Pp1s149_177V6.2 (locus Pp1 s149_177V6) derived from phytozome v7.0 (chr-ID scaffold_1 49; pos 591943 to 592598)
atatttcaagtaaatagtaggtcgttgaacatatcttgtgaattcactgttgatacaaatgtgtagccgatgcagacgttgctagaaacgatttttgttgattgagaaaaacgagtttggttttgggttacacagcaaaaaaaggtaattttggataattttggttaattctctaaggtttgttttctgtcttgtggagatcaaagtcaaacattcaacgtttacattcttgaaagtctaagtgtccaaattgaatgactctaatcgtgagacaattcaagaattcacaagtgactcgtccatcttctatatcgaatattatacgtcgcaacttattgacagaatctctattctcctctgttctcttctattctcttctttcttcgtcttcttcttcgctattttatttaatttattctcgctacttcttcccctcaaagtgtgaagtggtttgttatgcacggtgctttaatgaggggcaataattagatagcacagcgaatagggtgttaagaagtacgatcagcccataagcctgtccactataaaagtactcgtatacaatctgctattgtagtgtctagatccgcctgtggtatgtattcattgctacagaatttaatgaaatatcttgtgttgttgcaggaaagcgtgtc

SEQ ID NO: 115233 - DNA, 806 bp, Physcomitrella patens
  Intron number 1 from transcript Pp1s249_38V6.1 (locus Pp1s 249_38V6) derived from phytozome v7.0 (chr-ID scaffold_249 ; pos 234068 to 234873 reverse strand)
ccatttctgcaaaaacttcgcctccgttctgttgtgtgagttttgttgcactcttttcgcattttgattggatttgcaaaggtgcggtgcgagctggttatactggctgtgcaatgtcactgtatttagtgtgctgaattttgctgctgcgttggaatgtcacgtgcggagtcgactatagcttatgaatgtcctttgttcattttgattttggtcattacaaccctcaatgttccgcatcaaacacagatttttcattttgtttttgattattgtgagtttcgacgctatgattgcactgattcattgtcgatacaaatcgtattatattcttctcatcacatatctcggatgctattatgatgtctttcctttgaccgaattctcctatttcagtgaatacttagcggaaaggtttagtgcgtggtatccttgtggacttctcttggtcctcgaaatacgctattggttatcggagatagtgaaactcgtgtcagtacgagttttgtcttgcgaatcattgtccgcatcggtagcgcaaagttgtttcccgagcggcagtattctcgggagtatggaggtggaagatgcggagaaattaaataagatttgctcatttggctagcttgtatgattgtaattggaactacaccatcaaaaattcaggatatgtattttttatttatagaaatgctgcacttggaggacctgggctcaagctatggcatctttcaaggacaatcctgattcatttgttcatgtgaatgacagttatctttgtcctgagccttatccagaggcgaaca

SEQ ID NO: 115234 - DNA, 376 bp, Physcomitrella patens
  Intron number 1 from transcript Pp1s144_7V6.1 (locus Pp1s1 44_7V6) derived from phytozome v7.0 (chr-ID scaffold_144; pos 31286 to 31661)
ttggttttggatatcgtggtctactagcggcttgggtgagactttctttcgatttttattctatggctagagtggaaagttcttgcagtcaagttgcagcgaggcgtgggaattctttagagtcatggcgacgcaatctcttgtttttcttgttttttttttgtttttcttgttttggttttgtattgtttttttttgtttttttgttttgttttgttttgttttgtttttttttttttttcttttgattccggctccgatcaaggcgactttttttttttcttttttttaatgtttttttattgtgttcgtgcggtgacgttggtttctcttccttcaagcaacgtgttgcggcattcaagtgcacgctcgattc

SEQ ID NO: 115235 - DNA, 939 bp, Physcomitrella patens
  Intron number 1 from transcript Pp1s70_155V6.1 (locus Pp1s 70_155V6) derived from phytozome v7.0 (chr-ID scaffold_70; pos 854176 to 855114 reverse strand)
gtgcgctgctgagtggtggccgcaaccgtgggttcatgtgtgtttttttctttttgttttctttttcccgttgaagtgctctgaatttttttgagaggtgggtgtaatgagtggggcgtttggagggttgcgtgtttgggattaattcaaggattcggggatcctttggtgaattttgtcgtcgttgttgtagttgttgtcgcggttttctggatcggtagcgagtgcgttgtacgagaatcgggaggggggtggggtgggtacggaagtccgaattcgagagagccttgtttgtaggtgtgtgacacacgcgattgatggcgtcggcttgacttgcgggttgcatggattgcttgtttgtctcattgaggttgaagcagtagacaaaattgctgctgagagtgcagtgctttcctttgcagaacttgtggtcttgcaaagaagaggtgttctacgagtctcgtgctttttcatttctccacgcccgagggggtcttgaaagtagttgaaactgtttgttcaggtgatagtcaacgaagacagaatatattggaatccaatgcttcggaggctagtctcggagatcatcagagtggcgtgtagctagtgtgagggctctccaactccatcgtcagtctttcagaacagttttgcagttaaagtacaacggcttcttctgtgggggattgaactcagcatcgctttgcctcacatgatctcattgtgtgggacacaggttctgattgtctagcggaaccttgcgacatggatcactggccgtgttcgcatttttgagggtgtagattagttttatttatttatttaaaatcaaactttttcttattgcactgctggggaggtgaggtttgtggcttagcgatcagagttcgtaagcgatggacgtcgccattgattatgtgcagaagcccgcgattacaa

SEQ ID NO: 115236 - DNA, 969 bp, Physcomitrella patens
  Intron number 1 from transcript Pp1s115_20V6.1 (locus Pp1s 115_20V6) derived from phytozome v7.0 (chr-ID scaffold_115 ; pos 199200 to 200168 reverse strand)
aggacgtgctaattgatatgtgagttgagctccgccttacccttgtaagaagagaggttcaggtttcctagccgaacatcggatttgttctcccttgggggtgtaagggtcagagctgtgacggattcctgtagctggtgaactcttagaggattgcttgttgtgttcgtattgagttgtatgctgattatcatagtgtacaaatgtttagcccattggttggttcctcaattgttattttcgcagcgcgtagaacttcacggtctattacgttgattgaatctgttgattaattcagggtttttatttattttttatttctcttacaggtagataaatcaccagatgatgattattttacagagtttacagtatttggaaccatttttttgcactggattgtgtttattcgcactatatattttagaaatcaacagtgagaactctttcagtaaggttaactacagatatatgcaaagaaatcgcagttggatcatcttttacaaaacaaacttcacagtaggcatcatcttcctctttttctcctattttgtataaacacttcctgaagcacgcatttttgatgaagtaattattttccaaaccttgaaattacttcaaatgattctcatacttggaatgttattttggtcaatttattagcggatggctttattaccctagttttattgaaatgtaaagcagacagaagtcattggagtgccatttctatcgacgaccttcggcttagagctctggactggttgtgtctagcacagcattatctcgagtgttctgattgattccgtgcgtgcatcgatacttattgtaatcaaattatgtctatattctaggacttgatgccgcaacttattgtcgaattcggaatgtatagttaagattgaagtaatttattttatatggtttgatgcaggaaggctaagctgtatcgatttgataaggagggaa

SEQ ID NO: 115237 - DNA, 547 bp, Physcomitrella patens
  Intron number 1 from transcript Pp1s96_101V6.1 (locus Pp1s 96_101V6) derived from phytozome v7.0 (chr-ID scaffold_96; pos 599907 to 600453 reverse strand)
gtggctcttacaagcaagtgagtcttctttttgtattgtatttttaattttcaaaaataaatgaataaataaataatatagattatgtttctagtatcaatttctttgttttcttcaatcagggtttgtggaattttctgtcgtggacatccttaccctgtgtgtcaaaccttcattttcttcaagcgaagggtttttgtaatcctagtaagtgttgtgaatcattaagttattgaggcattgcttatttcttcgttttatgtgtttattctcacatgatccacaatgcctgacttcctgttggactcaaaaagtctgcagagctggcaggtgcagaagtgggtgtgtatatagtccgttcgaagaaattaagctacatgaaactcttcttcttcttccatctgttcgtttgatccaccgactctcccaggttgtttgtctatgcaggtcccaacggctgattgggaagttattgcttataaagtaagaactaaaattactctttgtatcaggtgcgatctatagcagcagaatcagatagagcata

SEQ ID NO: 115238 - DNA, 495 bp, Physcomitrella patens
  Intron number 1 from transcript Pp1s78_121V6.1 (locus Pp1s 78_121V6) derived from phytozome v7.0 (chr-ID scaffold_78; pos 733925 to 734419 reverse strand)
acttctagtgcaacctcctttgcttctcttgcaatgtaagtaccacaccgtaattattttggcttcaactatctctatgctaattgattgaggaagtgtcaatgtaaagtggaataaaatacagcaaagaaattgctgaaggttgtgattaatcacttcaatttctcaaaattgcagcttgtgctcgtgtaacaaatgtgatgttgaaggtcattgatttcttcatctaaatcattttctatatatgtcttattttctcaacctagttcatcgcaatttgtaagctatgggcattgccttggaactataaagtatatctaagtcgaaatatattaactcttggattgcatgttgatgaaacaaatgctcatcaagcacattatttggttttgacatttgaacaccttgtcattgtttgcctgtggctgtaggttgaagataccaagtgtaacatgtttaagaaattcgttttgaactttgactgtattgaaacag

SEQ ID NO: 115239 - DNA, 274 bp, Physcomitrella patens
  Intron number 2 from transcript Pp1s112_188V6.1 (locus Pp1 s112_188V6) derived from phytozome v7.0 (chr-ID scaffold_1 12; pos 878902 to 879175 reverse strand)
gggcaggttggtgagttcctctcttgaggttttatgttttacctcgatccttcctatttgcagagagttcccagttggatttgctcggtacttcatggcgatgtcgtctttagatcgttatatcgcttccatttcttttgatcaatattctgatttgaccaaaattggtatccattcttctaggtttgtttttgactaatttgacacttgcgggggacattattctcctgcttcgcttgattgacttgttttcgaatggttggggcaggttcgt

SEQ ID NO: 115240 - DNA, 638 bp, Physcomitrella patens
  Intron number 1 from transcript Pp1s298_54V6.1 (locus Pp1s 298_54V6) derived from phytozome v7.0 (chr-ID scaffold_298 ; pos 399884 to 400521)
cgatacaagacaatttcccttcaacacctggcaaggtcagcactcttgtgaattttgtgaaggaataaacttaaattttccaagggggaagggactagtcaaatatataacgtagcccaacgatttgagaggtagatgtgagacaacaagaaactgtgtttagccaaagggggaaattcgcattaatccatgtaatagcagttcttaaagactctggtggtatgtgcaatctcgtaatatagtgacacactccacagaaatcatgtcgtgtctgagaatttttttaagcaaagaacatgatggctggaatttttcattcctattctcctggaaccagcatacttgctttaaatgaatgattcgccatttccatccacaaatgccagctattgccttttgctgaagtgaaggggggatgcgaagttaatagatgtattaggtgattcctgaatattttgaagctccaggtgttaaattggttttatttcatgttcagtgatcgaagcacctctgaattgtgccgttccaacatgggtcagactcttaaagatagtctaagacagtttattgttctcatttgtctgaagaaatgaatcaaaaatcaactgagttggtgatggtataccctgcaggttaaa

SEQ ID NO: 115241 - DNA, 629 bp, Physcomitrella patens
  Intron number 1 from transcript Pp1s286_37V6.1 (locus Pp1s 286_37V6) derived from phytozome v7.0 (chr-ID scaffold_286 ; pos 291605 to 292233)
atctcaggagacttaccaggcgtgaataaagacaggtgggtttcatctaactttcattgatggtttcaggccccagcatttgtacagggggtgatgaatagatttcttggtgtcagcttcaattcatcctaaagatacttagttttaggtcattaaatgtaatatggtgtggatttccacaatttcttagcagatgtttggtaaaaaaaaacatttatttagaaatatgtcaagtttgccccctagttttaaaatataataatctcaaaaaccaatcgctttaaaatccaacattttctgtgctccacaattcgaccatagcacaaccacaaccgaaatgataacaattatttcttgatatgtggttgtttttggaagaatagctattttaaaccattggtgttaattatggttgatccaactgcatggatttgatgcttgctcactatcttctatctatgctcataagtcatcaccaaagtatttcattaacctgtatttcgaacataccatcataactggagtagcccttggaaataaacagatggacagagaaggtgctatttgagaattttgaccaatagcccgttttattttcttcaccttgatgacaatgcaggtgcgtgaaa

SEQ ID NO: 115242 - DNA, 995 bp, Physcomitrella patens
  Intron number 1 from transcript Pp1s75_196V6.1 (locus Pp1s 75_196V6) derived from phytozome v7.0 (chr-ID scaffold_75; pos 1079421 to 1080415 reverse strand)
tcttctccatcatctacttatttgcaggtgagcattcttggccgctgaacttggaacatttgaaccagaagagtggattaagcttgttgccagccatctgtgttgttgaattttgaattctgaattgacatctcgacatgtcaaatgaatattcattagtttttggtaaattcgatacatattcagctgttctttcgggacttttaattagttattgttaatttctcctcagtgaaagacttcggtcatacccatgaagtgaattgttcagtctccttccgagagttcacaagtggtgtgtcaatcgagcactggatgtcttttccatttgcacaatccatcctcaagagccgtgagtgattttaaggttcaggagacatagtgtttatacgtgagattttcgatgtagaaataataactgctgagaaatttatgcgtaatttctgctccctcaaccaagaaattgatttgtaaaggaatatgcacagttttctggttcttcattgttagttttaagtatttttagcttgtcctggcttcagattactgtctcattggctaatcaattggaatgatagactctgtaaccattgccatcttttgctttagaagaagtctgtgcaacaagagtgaggagcgtttggtagtgcctgttgatctctgacgctaccatttgcctttccagatagtttatttgcaattctgttcatttttagacgtttcctcctagctagaatggtcatggatgagtaagatcatgaacccatgttgaattttttaagtcaaattcagatctctagtaaaaacacctcggttttgttgtaattcttaagcgtgacaagaacccgacaatgttaagtagagaatcgtttcttcgcttggaaagttggcatgttgattgttgagaaattgacacccaggagcaccatgttaaaatttcctagaatcgttttcttgcaggaatttcagtggcctatacagctccgcaaaggcat

SEQ ID NO: 115243 - DNA, 993 bp, Physcomitrella patens
  Intron number 1 from transcript Pp1s245_102V6.1 (locus Pp1 s245_102V6) derived from phytozome v7.0 (chr-ID scaffold_2 45; pos 565089 to 566081)
ggtcaagatataagccccctcagtttcattgtcaggtgagctcttgtgtttgttttcttcaatctggtactgattgataaggttacatcaatcatgatagactttgcaacggttgtctgtgaagatcacgtttaagctatgtatcccaggaatcgaatgaagttcatgagatatgtgaatgaagctacagattgctgacttcagattagcgtgatttcgtttgtgtgatattgtgacattcaaatctctgaacttcacagttgaaaactcgcatcatggtcccaagttcctaaggcaacgctttttgtaaactcagagtagactatatgaaaaatacttgagcattcgtaggagccttgtctgagaaatcacaactccgcgagagtgcctgctccaaagtctttaaaagctaaatgagaaggcttagtcacctctgtggcctgtccgcacgaacaacgaatcttcaaagttaagtggaagtaataaaaaactcaatactttgacgaatgtagtcttcatgcataagcgtagctttactctaaatcagtatcaaatagtgctaagtgggtgataagcaatctctttttcatacgtgggtagaattgtagcactgttgcaagtatacagtaccagcacgagtacttcaatcacgtgggtacttcttcacagattaagcaagccatgaatcgataacttggtgggaagatcagatttggatacaataatctgtttgaccccgtgatcatccctaaccgtttgaggggtacgaagcatcattcgaagactcatcatgcctcgttgagagtttgctctcgtgtaaaacttgaaggcacacggagtgcctcacgaggttcatgatcccactaaatcattgcaagtttgataatgacacgaatcaattgatcaacaactacgctggtgataaattgctggactgatgcgtgactcacatgtgcaggattgagaagagtacgcaactgcaagtgtacatct

SEQ ID NO: 115244 - DNA, 650 bp, Physcomitrella patens
  Intron number 1 from transcript Pp1s135_61V6.2 (locus Pp1s 135_61V6) derived from phytozome v7.0 (chr-ID scaffold_135 ; pos 536613 to 537262)
gtcttacgtgattatcaggtgtgctgtaagttttgggcgtggcgaagaaatgggtgacgtgcgtgcttgagagttaacgtgctggatttagcgagagtgtgaagttgtgtttgatttgctgcagtggtgattcgggcctatttttgtacctctcgggacccttcgatttcttttcagaacgaggattttgtgaggtattctaatctggatgtttcggattaaagagtatgatcttggtctctctttggtggattatatattgctgcttgagttagcagttagccatgaagctgtgtgtttgtgattgcattgagtcgctgttcaggatcatctaaattcatagcttgtagttcttgtatgtctctttttatttctttcttctttttattttattttttagtttttgagtatctgtgactctctggtttcctaatgttaacgttcagagttcgaggatgctcttcgtttctatcatgagatgcttgcgtctaaatatgttcagtgccttatgctttgaagctattgcaagcttagcattttcatgatgttagctgctgatctcaattatgaattaggcacttgtttccctaatgtaattttcttctaaagttcgggcatgttgagttgcagatagacctttccgcggcaga

SEQ ID NO: 115245 - DNA, 821 bp, Physcomitrella patens
  Intron number 2 from transcript Pp1s243_85V6.1 (locus Pp1s 243_85V6) derived from phytozome v7.0 (chr-ID scaffold_243 ; pos 618732 to 619552)
aggagtactgtgagaaacattctatcctcgacgaggtccgatactttccactcccctaaatgtttacatactagcggcagtcactgttacaatattccgaacctacgaaacaggatactagatccacaataacgaatttcaatctaaagaaaagggagattcttaccttttggtttctggagtcagtcttgacacacacagaagtgtaattaccaccacaaagaagactcagtaagtttgagcaagaaatgaggacccaactctaatagcactcttttgtacctgtaaaccaggttagatttagtgcagggtacaaatttttctcttacggtgcacacatgtcggcaatcaaatgctgtggtttttatatattatattttattttcttcctaagtatcttggttgaaatgctgtgttgaagttcattgttggtggtaatcaatagtttgaaaagtcagtggacaacgcggtctgtttcgtgccttcgaagctaaattctatcccacgtcttatgtcatttaagtttttatcttcgtggacatggatttcctaacaccgcaatgggatattaaggttttgcaatattgttacgactggactttgcaggccctcgaagtagttggacgtctcagatggttaatcctctccatcgtgttaatcctccacaacgtagtaaaaagtttagataattttttcagatgacctgtgtcactgacatgatgggattgtaattcaaaagtgctgaagtgagctgtgaactttgcgaaccccgtaaactgcctgcaagttataaatttgcatatattctggtgtagggttga

SEQ ID NO: 115246 - DNA, 671 bp, Physcomitrella patens
  Intron number 1 from transcript Pp1s198_63V6.1 (locus Pp1s 198_63V6) derived from phytozome v7.0 (chr-ID scaffold_198 ; pos 338351 to 339021 reverse strand)
ggtttacagattgaggttgatcagttctttatctggtatgtaccttgattgtatttcgtgtttcctgttttcctttccaactatctggtgctctttttttatttttttattttttatttattttctctttgtagttgtcttgcagtgtgcctggccgcaattttagagacgcttggaatggcgttttatgatcttgttaagtggatctcccagcgtaattggggcaccgcttctgtcagaaatttgtttattctgtgttttgatttgtttgtttgtttattttcccgacaaatgaaggatctatataatttttgatatcctacacactagcgaagctgttttgtatcacttaccagggggaggaattcattacatttctttggttgggacctgttgtgtctctttgcactttttaaaattctgctactcgtcttagtagataaacacgtatcgtacttagcttctactactttttttcttctatatgtgctatttacaacgttgcatcaaggctctgttgcatggaaagggagttaaagaaagggatgaatccaataagtagttagtcccatttgaacgatatacttaccttcataccagggtctcatcacaatatccgtgaccatcttcctggtattatcctgtgcagaggttggggaaacgtctgagaa

SEQ ID NO: 115247 - DNA, 508 bp, Physcomitrella patens
  Intron number 1 from transcript Pp1s100_55V6.3 (locus Pp1s 100_55V6) derived from phytozome v7.0 (chr-ID scaffold_100 ; pos 283879 to 284386)
gatctgattagggtttgcgggtttgtgcgggggaggtagtcgcacaacgcaatcgaaggttttagggttttgttttttagctttcctttgggtcgacactctttgagatgattggattgtgttgtacctgaagattagctgcgagtttgattattgttttttctctttccttttgtttgatatgtaatttccgttgcggataggttggtgcactttgaaattgaatttcgctttgttttgacgtactttgttttggaagttatcatcttatcttgaggctaccaatttttcaccatcttattgggcgcaagggtagaatctcgcagcttcgggaaatcttagcttgtgttgtttgaattgctggaaacgttatcaataattgttcagaatctatttcaaggaaaaacctaacattcctattgagtgagtcaactgaacattttttctcaaattttgtcattgcggattttcattaaattgccgtccctttcttttgtacaggtttgta

SEQ ID NO: 115248 - DNA, 837 bp, Physcomitrella patens
  Intron number 1 from transcript Pp1s177_78V6.1 (locus Pp1s 177_78V6) derived from phytozome v7.0 (chr-ID scaffold_177 ; pos 510677 to 511513 reverse strand)
aagctggaaggtatgggtgtcggatcatacttctgctggagtgaccgtttaatttctgcgttgaatggtccacttctaggtttaccggttcgacgcaattcgttgttagtatcgaattagcgatctcatgtagtaggaatctgacgccaaaattttgcgcaactggttgtaatattatagaggatacaagataagcattagcgtatgaggggatgtgatttttgtgggttttctcaccttaaaattcgggtagcggtgcgcttgatatttagggtggctttgttttctggtatcagttctcagggactagttagctgggaatcaaaatttagtctgattgtactttgtttcggggtgtccagcatgcaattttagggttagaaattgagctgcagtgtcgagcttgttatgattgtaatggtctttggttgaattagcgatattaaccagtggatattatctgttggtttaatattgcctgttcgtttcattgtagctataatttatcttggaggaagtccacgagggatctaatgccctttcagtgtgaagaataaaaatggcataaccatgctggttctaatctgtcctgcacttccatgatcacatcttcaatcatgaattgtctcaacggtttcggttggttggagtattgatatcacgtgaaccaaatgtctttcatacaatctttaatttttaatttcagtgaagtattgctgaatttgggcacatggaaatgctggggtgctgatattgcttgctatggctctcattgatggcatatgtggacttcatcctgcagttgtagctggcttagcattccttttctcggtcggt

SEQ ID NO: 115249 - DNA, 389 bp, Physcomitrella patens
  Intron number 1 from transcript Pp1s344_10V6.1 (locus Pp1s 344_10V6) derived from phytozome v7.0 (chr-ID scaffold_344 ; pos 98807 to 99195 reverse strand)
gcgcacggtggagtccttggaaaccacttcaccaggtacgaagttaatcatttttttctttttcttgaatggaagagaagaaaaagacataacacacgaatttatttccttgcgtttcttccacgaagcagtttgcattcttcagttacaacaatgcaaatagcgtccgtttggctgaccactcttcctggtaggagcttcaactgggactcaaattttctggcattttaggaaagaataccctaagaaatggaaaaggacgcgtaaatttttagttcaatattcgatctagagaatgattggcacgagcatcaatctccgattgctttaaatgaattcaatgctacttgaatcacaaacgtttgatgtgttgacagactcaagctggg

SEQ ID NO: 115250 - DNA, 710 bp, Physcomitrella patens
  Intron number 1 from transcript Pp1s171_15V6.1 (locus Pp1s 171_15V6) derived from phytozome v7.0 (chr-ID scaffold_171 ; pos 77918 to 78627)
ttcagaaactgcaatatcaaggcagtggtccacaggtttgttctctacggcctcaagcaatagcttgtacttgattcacgcaagtgcagacaaaacattttgtatagagagtgtatcgagacaactttgtctctcagcaaactttcagagtctacgagtgtatttgcaacaatcacaactacttctcattgacaatcaaaacctttctatcagaagcacttgttgtactaatatacaaatagccatgtcatttatgatgttgtccctctacgcaacaatttttagaagcaaattgtcgcatgccatcgaaagaggtggaacgagacaacggaaagacaacgaacaagacgaacaacgaagaagaagttcatgtaacaccaaaacacacaaacacaaacacaaacaaacttttcgatctaaaagcgcagagaattgattctatgtccatacaaaaagttgctgtagtctcagggcatccgcaaatgttgcctgagatcatttctccatggatagtgtccctccacaattttctgttgcagatgtgccatgcagaatattcacgtaaaaaaaataaaaaataaaaaaaccaacatgctaattttctgaaacatggactgtgcatcatctagtagtctttgccattcgtctgaacgtgagattgtaacgctacaaatgcttgttcctactcacagatcggggacttgggttgc

SEQ ID NO: 115251 - DNA, 917 bp, Physcomitrella patens
  Intron number 1 from transcript Pp1s344_26V6.3 (locus Pp1s 344_26V6) derived from phytozome v7.0 (chr-ID scaffold_344 ; pos 208609 to 209525 reverse strand)
ttgaccccagctcaaacgacttcactcttgccaaagtatgtttgcaaagctcaaactcatttttctcttgtagctatttctctcaaagaataaagctttacaattagggtgtctacaaaattcagatttccatctaatttttattgtagttttctttttttttcctaaatttatttgaggaagcatttccaataaaaattttaattttaaaaaaaggataatgaattaaaattaaaaattaaaaattaataaattcaaaatgaaaaatgaaaaaaaatagtgaaaatgtaataaattcaaaattcaaaattcaaatacaaaattagtgaaaatgttgaattctgacaagaaaacatgtttcaaaatatgtcagtttcattattttcaggttttgatgttcttcatcaaatattcaagttgtccatcatgtgtttatcttctcttcatttgccttaggttttttgttttttttttttttgtttcccttcttccctttcttgattgaaaaaacaacaacttaaatgtacattctttgtgaggtccttaatttaaatgcaactacaaaaaatctaaatttatgtatgaataaatcttcatccaaattcatttcatatagaattatttttattttcattacacttacatttattgatttaaaaaaacctgctcttccagaatagttgatttattgcatatatatatatatatatatatatatatataaatgtgtgtgtgtgtatctacataaaattgaagtaattctactcataattgagaagtagtacccatttgtttttgtgtatgttaaaaacaaactcatagtatcaaaaatttcaactctaataactcaaagtcatattatttgtgaccatataatgattttttataacaggtagcagagttgcaattggctgtgc

SEQ ID NO: 115252 - DNA, 504 bp, Physcomitrella patens
  Intron number 2 from transcript Pp1s175_8V6.2 (locus Pp1s1 75_8V6) derived from phytozome v7.0 (chr-ID scaffold_175; pos 36414 to 36917)
ctgcaagcgaataagaggccttccttcccgacttggtatatttctgtctccatctgtcactaggttatttgcatcgtttattgtgaataatttcgaggtatgcatgcatgcatttaaaaatgatgctatgaatttggctaacgatagcaacatgtgtcagtgcggtctctgcagattttgtgatccttaagttaatgtaagggtggccgttgtgtcaggttgcgcagcgtaggagagtttgttaatcgtgatgtagcgttctttgttgtattgatgctgcttaacttctttaagcatcaaagttcttctatggtaacacctgagagtaatgaagtcgggagtacagtttgcttctgtgtagtgaacgctggatgaaaagggatgagtgtgtacatggtcttcgtataatgtgaccttttagaattgaatgtttgtattttttaaatacaaccgtagcagccatgaatgagattaatgctgatggctaaatcttgtgtacagatt

SEQ ID NO: 115253 - DNA, 415 bp, Physcomitrella patens
  Intron number 1 from transcript Pp1s78_29V6.1 (locus Pp1s7 8_29V6) derived from phytozome v7.0 (chr-ID scaffold_78; p os 203845 to 204259)
tcctggcaggtcagattcgtgacgtgcctttctcgttctcttgattgctcgatgtctcgatctccgttaaattagtcagggtttttacttgtaacgagcatgtcatatttagggttgtaattagccattgaagagggatacggattcgaatggagaaaggagcgtctctactacgatatttctgaattgggtttctccgtctcttgcttgatatcacatttggctcacctttcatttagaaacctctgttttatgactggttcaattttttggaaagtcttcgaggtttttctgccgcttttacgtcatttagatccctcgaagattttctgagcatgtttgaattggtgatcgaacttccttttctgcttgtaacgcagacctgttgaagttgtgaaatctgaaactgagtata

SEQ ID NO: 115254 - DNA, 388 bp, Physcomitrella patens
  Intron number 1 from transcript Pp1s519_18V6.1 (locus Pp1s 519_18V6) derived from phytozome v7.0 (chr-ID scaffold_519 ; pos 90893 to 91280 reverse strand)
attgacattgcaacccgtgagtgagtgtcttctcctcctgagtgcctacacttcgtgtattggtaacgttctcgttagaaaaataatctctgtttgatgaaactgtcttaatgacaatcgcacttcatggcatgcacaaatttaccagggcttacgtagggttgtgtgaaaatttagattttaggacgccttaattttaagggtctattttttggattcattggactagataaagtccttttagttctatgattttcagtcacctgcatgataggtgaaactggttgcttattgagacttgatatcgaaacacttgaaactccatttctctaacttacttttgatatcaacagggtgcaagctcttatattgtcacccaccagagagc

SEQ ID NO: 115255 - DNA, 643 bp, Physcomitrella patens
  Intron number 2 from transcript Pp1s59_120V6.1 (locus Pp1s 59_120V6) derived from phytozome v7.0 (chr-ID scaffold_59; pos 479442 to 480084 reverse strand)
aaaaagtaatctccaatccttttgtatatatatatatatataaagttttgaatgtgataactccgaaattggtaaataccatacacttaagttgatagaaattttaacatcattttaagtgatgcttctctactgactacatgttctcatacctagaatatttttgaaactcctactatgttgatatatccaagaacataaatcacctaatttttttacatttaattatatattttttgaaaattatatatgttgtgcaaattctgcacaacttttcaaaattattaaaataataataataataataatattcttagacttgtacaatgtttctgtttatttattttttttgttttttgttttttttgttttttctttttgcgtaaaggattaagttgttatgattattttcattgttatttttgctaattttttatttcagtttatgaagattggatacaaacaaattttaaaaaccaatcactctgtattcaaactaagtatttggaaaagcatagagaagaaatttaatcacgtcatagttgatgaccatttattttcagtgtgtatgtaagcaatatttaatttgatttttgtgacttgtgaaggcactcaaagaaacagctgaaaaactagaaggggc

SEQ ID NO: 115256 - DNA, 735 bp, Physcomitrella patens
  Intron number 4 from transcript Pp1s126_196V6.2 (locus Pp1 s126_196V6) derived from phytozome v7.0 (chr-ID scaffold_1 26; pos 1219110 to 1219844 reverse strand)
agcttgagcaagagcttcaaagaactcggcaacaggttcatccctacattttatccatgtgctaatccatttgtatctgtatatgagggtgaatattcgatatttactcattgtttttttcaaaagaattttttacgagcagtatttgtctcactgatcaaatatatcaatctcttgttcaaggaaagatagatagtgagtagctttgattgctggtgacattggtgtggcgagaatatccttagctatttctacattcttagttcgaaacctgcggctacagctttcaacttttgtttatctttctagcatatcctcgcttctataaataccttttttcggtaatgcattcgattggttcttttctatcatccattttaatgtccaaatagtcaaagaattcctctccaacgctcgagcaagctttagtttaccgtctcgagcacttgatttatgctacaagtctaaccctgtcacttgaccacatttgttgagcccccaagctttatgtggcgtctgtttcctgttttgtctcactcaccttatactaggatgtgactgccatcatttacaatgttattcattgggcggttcttattgtgtgtgcagaagttgtgttgacattcaacattgcagcaatttctttgatctttcatacgactggaacctgagtgatgcatgtttgtgattttcttagcagggattatatctcggacctggctcgtgcagcgttga

SEQ ID NO: 115257 - DNA, 793 bp, Physcomitrella patens
  Intron number 4 from transcript Pp1s57_139V6.1 (locus Pp1s 57_139V6) derived from phytozome v7.0 (chr-ID scaffold_57; pos 1038139 to 1038931)
ggaactactgctcttatcgctcttctacaatccaggtagtttatttattttattatgtttcattaaagtgaagaagttatcaatcgcccacttttactactgtcttatcaggcgaaccaatgatctgctcatcctattagcaacgttcatgtcattttttccgagaactgaagtctaaatgactccttatgctcaagcacttgctcagcaaatgcctacagatagagcagttcaatcttccctcaacatactcctccgggttagaatcctttcgtagatgctggagatgatttttgtgttactttaatggcagcatatggttcttgaactgcccatctggttttcgtaatactactaccatctgttttagtcaataatgcgatctattctaatgctgtcagttacacttactgttaacaagcaggcatctataatggccatcatggcctgtttatttataatcaaatatactcgattccactccatctaatcttcagatatacagcatcccgtgaagctcaacttagttaaatatagtccctatttagtttaacgctttattatgtaaggactctatcatctaattaagagcatatgagtctgagcgaataaaaatccacaaaatagattaatctgtgctccatcggcttaccaatgttcttacctataatgagagtacaccttaaggttcgcaaatggcccattgttaaggtttatcttttcaagaggagagccgtttcaaatattctaaattgagggatgtgggaaattttcaggaacttgctggtggcga

SEQ ID NO: 115258 - DNA, 337 bp, Physcomitrella patens
  Intron number 1 from transcript Pp1s442_23V6.1 (locus Pp1s 442_23V6) derived from phytozome v7.0 (chr-ID scaffold_442 ; pos 203453 to 203789)
gtggaatcgcgctctcgcgcaaaccctagtacgaggtgagtgttttctgtttgttggtttgtttatttgtttatttatttatttctatattgtgaagagtctgagtttgaggagatgttagttggatctaaatcttttttggggtcaacggtttttgatagttggtctgtttggggtctagggttgtgtacgcgagattaacttattgcactgggatgctccatgtaatcttcgtattgagggggtgagctcaattgtgagtgggagctgggtcttgatcgtgattgtttttttgtggctgcggtgcgtagggcagagcttagtgtgattcatagca

SEQ ID NO: 115259 - DNA, 466 bp, Physcomitrella patens
  Intron number 1 from transcript Pp1s41_94V6.2 (locus Pp1s4 1_94V6) derived from phytozome v7.0 (chr-ID scaffold_41; p os 795162 to 795627 reverse strand)
tctttcggaggtgttgtacgctacgtggttataatgtgagacggcacatgaagatttctttttaccttgattgagaactcgtgtagcgtccatttttgttcttctggcgtgctgatgagtaggttccatttggaattatagggtttaggaggtttaggtcgttttgctccaatagcttatggtattacaggttttctttttcttttttcctttgataataaaccaaaataattggtctctttctaaattagatataaccaaaaattcttttcggcgtagctattttttacaggaagttttcagaaaacatcaagtgaagacttagagcgctgagggtttgaagcgtgtaattgttttagaaatttacaattgagaaggtcagagagtagctatggcttcaattcatattggcctgattcaaatgtggtattgctattgtcgtgttcatcttaacaggtagggcacg

SEQ ID NO: 115260 - DNA, 826 bp, Physcomitrella patens
  Intron number 1 from transcript Pp1s150_15V6.1 (locus Pp1s 150_15V6) derived from phytozome v7.0 (chr-ID scaffold_150 ; pos 200599 to 201424 reverse strand)
gcggcatccgacctgcaatccggtaaacttgccagccgtttctgttctatgtgtcgtttgtagctcgtcaattgttatcgtttgttgcgattagctttcgatgttcggaatgggaactcgttctactggcgttagtgacgatcgtttgtttgctttaagctctctagaagcaattgtggtctttctattgttctagtctttttcttagaatttggttttgcgcgcgatctgcttttttgtcacttgttatgattcttgtgaattcacgagagttcagttttttaagcttgggttagataatgtaagagtggtgaagggctgttttctgccttttagcatttcaatggttgcagtcccgaaacttgacacagagatttggtgtgccttgctctgtaacctcattaagtgcgtgtcattattggagtgaataatgctgtaatttcttggagcacctataatcgcgacttacaatcgagagcgctacattttctgaaacttttggtgtttctgcactataatgaaattctcttcaacatgaacaattggcgttctcattcacatatggcatcgtttgaattttttctccgcctactacccctggtttgtagggtggtaaggtcttacgagtgaagtaaaattgcagttgcgaagggttgcatatttgagcttctggcattggcttgacctaatagacacacacacatgtatatatgtagatatacaccaaatctaagactcatagttgacttgtggaaaaaaggcgtaattttgttgtggttgtcgtggcacagtggcgggcggcgttgtagcactgggcaagtttgaa

SEQ ID NO: 115261 - DNA, 811 bp, Physcomitrella patens; identical to SEQ ID NO: 114564
  Intron number 1 from transcript Pp1s204_138V6.1 (locus Pp1 s204_138V6) derived from phytozome v7.0 (chr-ID scaffold_2 04; pos 797782 to 798592 reverse strand)

SEQ ID NO: 115262 - DNA, 782 bp, Physcomitrella patens
  Intron number 1 from transcript Pp1s165_106V6.2 (locus Pp1 s165_106V6) derived from phytozome v7.0 (chr-ID scaffold_1 65; pos 771438 to 772219 reverse strand)
gagggttgtgacgcaacgggacgctgtgcttgtgcgtgagtgctttgctgggttttcgttcttgatgtgcgattaggtggcgggcgtatcgcattttttccgggtctgtgagggtgttgttgatgggttggatgggttccgagtgagcctgacgcggggctgggtacgggatgttgtagattcacagcgaaatctgttctttcgttctacgtgggaccaatttgagagtcggtaaggcatttttaggtttttcttttcttttcacgcggatggttttgttggtggggatccgtggtttgatgtcggatggctagtgctgtggggttggctctcaagatccagctatcgtgatcgtgtggagattttggatttttcaaatctcgttctgggttggactcgattagatgtcgtgtgtggtacttcgttcttctcgatgctaactgcgccattctcttgacctgtctaccgatgtcgatacggtggctgaagcgttgattgtttccatctcccctatccttggccactgtatcgcaataattgggtaccgggggggggggtagtgcagttcgattttgggctttagcagtcaaagatctggatgaattgtttggacttagccatgttgatcacgatgaccttttgataacatgatcgcgcttgcagtgattttatttgtgtttgttggtacgttcgactgattgcattcaatatcccatttcagatcctattttcttgtggtgatcctattgtagattgacgggtgaaagaagaagctcggggct

SEQ ID NO: 115263 - DNA, 762 bp, Physcomitrella patens
  Intron number 1 from transcript Pp1s249_95V6.1 (locus Pp1s 249_95V6) derived from phytozome v7.0 (chr-ID scaffold_249 ; pos 626766 to 627527 reverse strand)
tagcggcggtatcttgtcaaattcatgtaatttacagccactttcacttcaacctgtgacgatgtcctctgccctatctgtttcaattttacttaatcttattctcggaattgttcggtccttgttgtgggtctgaatctttctcctcctgggtgtggaaagacattacaccacccgacttgctcatcacctgaggtgtgcctcaaaagttggttcaccagtgaagagttgctcccaaaatttgtcgttcagaccaccctggttccaaggtggaaaacgtcctgatcccttcaacgaagctaatagtaggtttccaacccgtatggatcttccctttgtgtgatttagtgtttgattttttttgtggagttggaagatgactgttctcaaggttgtgggaaaacataatatgatcttagtgattacaagtgcttgtatgaggtaaattctttgctttggtttcatgctgtatcctagtcaggataaacgtgccacttgtaataaacattcaaagatcaattagggtgttggagagttagtcagcgaattgcttcgggggagatgaattcctgtagctagtttcaggctccagcaattgtgtcttctgtttttgtctctgattattgcaaaatcaatgttgcagtgcatgcacttcgatgagattatttcgattttactgatggcatggggaatgtttcatagtgaaacttatgttgtgtatccgcagttaagagtaagaacgaattggtggtgtgctttgga

SEQ ID NO: 115264 - DNA, 670 bp, Physcomitrella patens
  Intron number 1 from transcript Pp1s125_28V6.1 (locus Pp1s 125_28V6) derived from phytozome v7.0 (chr-ID scaffold_125 ; pos 274855 to 275524)
gctcttggtttcggtgaaatcactgtatctttcaggtgagcaattcctgctctcacttctgtttccatactccgccgtttcagataaaaaaatttccaatgcgaatctcaggtatggaaacccgtggaagatgtagcatcgtccatgagcatcatatgtaaatccagcatgaacttgtgatacattttcagtctctgaaataaataccagaacaacaagatctgaaggacggtgataagaaaatcaagccttgcagtggctgctgtcaaccaactccgcacagcaggaagagcgcccgtttgattgaaaagcacgcagcctcactaataggttgtcgagcaggaagagctcacaagcgcaggcgcaaaggctcacaattcaaaaggaagaagaaacgcgtatgctggttatatttaggagctccttggttgggaggctgccataatttgaaaatgcctcttcatgaaaggaggacaggacttagggtggactctgattctgggtgtaagggtacactaaattgttgttaatccagttccataaacatgaatttcctttttgttgtcttctcccaccaccatccatgacacttggcgccgataaggttatttacctcagtcaatttcctgtggcaggtcttgtagttgacgctgttaactcctccagtgaa

SEQ ID NO: 115265 - DNA, 422 bp, Physcomitrella patens
  Intron number 1 from transcript Pp1s45_269V6.1 (locus Pp1s 45_269V6) derived from phytozome v7.0 (chr-ID scaffold_45; pos 2156700 to 2157121 reverse strand)
ccaggttctttacataaatcttttgtttgttttttccttccatatcgcaatctatatgcggaaacctgagctgcatcttctgttgagtgattcacactgtgtggcttggacgctctcgtaagtgcgttttaaaaaagtgtattcttcagtagttgcgttagtgcttggaagtggggcgggttttagtcatccagagcagacggtcgattgtgattcaatgacctaaataatttggaatgtataataaagagtaacatattatcgacgaccttaaaacagctgcatttgattttgaacgaaatcttccctttgctagcccgtgctgaaattgtacttcatgccttcatggacgtttacaaaaccctacatttgaaatatctgtcgctatgtgaaacttcagatttggcaatactttgcttttc

SEQ ID NO: 115266 - DNA, 393 bp, Physcomitrella patens
  Intron number 1 from transcript Pp1s306_71V6.1 (locus Pp1s 306_71V6) derived from phytozome v7.0 (chr-ID scaffold_306 ; pos 366339 to 366731)
tcagagctggacttgaagaactggcatcgaatcaggtaataattccagtgatttatctatctctaaaccttgaatgaataagtgagaaattaggaaattacgatcggaggttgtgttctaaattaaagatgtctcatcaactctttgatactttgaagttctgcactaatttatgccatgtttgagcatttttctaagcgtagattaacgcgcattatgttttaattattatgcaacctcttctacggatttcgtgtcatatatataaacaaacgaaacagtctaatctgtgtttctcccttagaatcaggcccgaatttttgtttattgagaaaaggcaccgtgaatttgtgactaggtattgatttcggcagctacagcaagtacgcttgg

SEQ ID NO: 115267 - DNA, 852 bp, Physcomitrella patens
  Intron number 1 from transcript Pp1s76_167V6.2 (locus Pp1s 76_167V6) derived from phytozome v7.0 (chr-ID scaffold_76; pos 1345313 to 1346164)
ggctcaaggttttcaccctatctaaggtgagaatcttatgggaagtgccatgggaatagcattgtagggatgatccttcgcaaagagcccgactcctagcttttagtaattttatttgctagcttgagtgtgaatcgcaagttttcctttctacgacaagtcggggaatccaagttttcaatgataatgaaatgtcgcgaagttcaaactgatgaagacttacaccaaactctttacacctctcgcttttgaggagtgttttgcatggttaatttagaacatgcttccaatataaacttgggaagattcgtcacacaaaacttaactgaaaagatgagcttgcaggaatgtcaaattcgtgggagtttgattggtaggatctcacattttccttcacttagctgtatttaacttcaccatcatccaagtttttgtgacgttttgtatcaatgtccttgcatctaaaaacttatgactgcttaggtgtaaaacaacttcattaatctgcatatttctgttaaatttatattttaatgtttgatctatatttgccataaaattatgtttcgcatcgtttaagtctttcttcctttccatcaccttttcttgacaatttttaactttggaaacacattgagttcctgagtgttctagctgagaacctgataggttaatcacttacatttcgtcatctctccacttatcgtgaaatcgagatgcaagtctgaagttactgtttctcctggagatatgccaaaaccagcgttccgaaggttagccttgtaatgttcatcatgatgaaatctggttgctaacaatatatcgggtgtttctcattagtcggaagtccca

SEQ ID NO: 115268 - DNA, 948 bp, Physcomitrella patens
  Intron number 1 from transcript Pp1s204_98V6.3 (locus Pp1s 204_98V6) derived from phytozome v7.0 (chr-ID scaffold_204 ; pos 439339 to 440286 reverse strand)
gcggaggaactttcgtcggacgactctggttgcaggtgcgtcgtatgttccctgcgcttgttgcgattcaccatctgaagctccgttttggaagaatctctggagcttcaatctttttttccccttgaattcgacgtttcgttgcgtcgatgttggtgggtgctagtgactaggagcgcgctcgtggtgtgcctcactagatgatggtgaaaaaattcgcttctctgtgtcggtttcgtgagtgccgtttaggtattaatctatcagtcctgtcagtcgtttgcgaggtattcatttctagcgtctatccacgcactcgattgaatcttagctttgattagcccaaagagtagtctctgtatgaatttattttaccgggttactgtgtcttgtgggtagttttaatcaactagatagagtgaacgcagaactagtttttgctgcgactgaaataattagtaccgtcgtgtcttgactctcagccacccgggcttctgacggaaatgggtttatctcactggagcgctgtgaaacacaccgcttgcagtatttgttagccgatgaaatacaagaatctcgtattgaactccgtgtgtagaacctcaatcttattccaactacggtttttaagtgcttcgcagagtttccaaattggtctttcttttgatgattcaattgtccaggccatcagcattctcgttaccaagatttctcctaagctcagtgttgatgctagcagtacactcctaggggtttctcacacaaaaagatgtgcctcacaaatcccgaatcaagtcaaaatttcaaatggtaacaatcacacaaaccattctgctgttcttcttgactttttgacgaccacttgatcttcgtttgttgcttcctctcacgagattgaagatgttttgttcagctgcgctgtggtgtgcgaaacgcataggttaggac

SEQ ID NO: 115269 - DNA, 1004 bp, Physcomitrella patens
  Intron number 1 from transcript Pp1s100_231V6.1 (locus Pp1 s100_231V6) derived from phytozome v7.0 (chr-ID scaffold_1 00; pos 1296214 to 1297217)
tgcatccttgacctcacgcagatccggtgcttgtggtaagaatcttcacttgccggttgatgaatcactcccttgtttatagtcgtcgacccaagttccttagttgcttcgctgctgtgcttgagttcgactaggttctagccacccggaacctgcagtttgggcttgcgtttctttccttggagtgtctcgatggtagcagttttggtgaaggtgggaatccgtcgagtgcgaggaattcgatgtcgtaacttgatccggtgtcggagagtgttgctacatttggcgtatttctaggttttctttttcttcttttgagtgggtgggagtggagagatgagagtagccattgtgaggattgtagctcttgtgagtgattcgcatttgatattgtcatgctttgaactgtgatactcgtgagttgattgggaaataaactacctaaatctcctcggtggttagtgtccttgtaacttatctccatacaagtactatgccatcttaaattacttaggcgattcaccatttctttttaaacatcccgcatatattttacttcacaacctatttcatgagtatcagtcgtttgcatttgccccaagtgatcaacttgacttatttttctatttataaaaaacagatccgtcgtcctacgtttatcttttcttcacgttagctatcttttattacataagtcttcaaccaagtagtgttcaactgcaccgtacgtaattaccactttctggaagagccacttcgttgtcatctgagtaggaggatgtagcgtttgagcggagattgtcttcgacctttcttgtagtcctagtgctttatattcaagtttggtcggagagatcattaggctgcagcatgatagtgaactgcttttgaaatctgattttagcaatcactcaattttggactttggggtcgaatacatcttagctaccatggtaagagttacaagatgctgatcaacagtacgcttgtgcaggaaggttcag

SEQ ID NO: 115270 - DNA, 839 bp, Physcomitrella patens
  Intron number 1 from transcript Pp1s304_15V6.2 (locus Pp1s 304_15V6) derived from phytozome v7.0 (chr-ID scaffold_304 ; pos 84045 to 84883 reverse strand)
gcaggtaataacgtgaaacatgtgtgctatagtgctgaattcgatgtaactgcacaggatgttgtggtttccacgacgtcgagagaatttctccatgtggcgatcgttggatgctgttttttcttgttttttttttttcgttttttttgttttttttgtttttttggagtgatgtacgaattgtgtccgaagaatttttttttagcggcttcttgtattttatattgatgtttgtttagggtttgtgggcattttacgtcgagagtctgttgggtactcttgggttgcgattgggacatgtgctgttcatgagggtcgatatgattggcgcatttgggcgtcttgttacgtgttagtatgaattcttgtatggatgagctcaggatctgttgttgctgacctttgtggccgtgcgagagagtcatttgtgtgtttaggatttggacaaaagttcatcgttatagctcccaaatgtcctacaagaaagagtagatgctcagttcactattctgggagaagtccaatctaagtgttgttgaggatgttctctcagtcgaaatctatgcatcttgatagagctggtgctccagctgtagaccacgaggtctatattttgattgttgggactatcatgtttaattgcacttagctttgacttttcttgaaatgccagattgcccatcttggattatactgatggattcagattttgttgccagatttttcatcctgctaatgtatctggatcgtatcgtatccagaaatagcccaacaagagtcttttttttgggttagggtctcaaattattacggtttgattgtggtgcagttcactttga

SEQ ID NO: 115271 - DNA, 253 bp, Physcomitrella patens
  Intron number 3 from transcript Pp1s10_326V6.1 (locus Pp1s 10_326V6) derived from phytozome v7.0 (chr-ID scaffold_10; pos 2549464 to 2549716 reverse strand)
atccaggttttccttcactttttctttaaattggtctctctatttctgatttgtgtttttgctgaacttaactcctctgatgtatagcactgcaacgtcttagtaaagttgtagcattggtagttgatgaaacttattttgatatctactaatgtatttgtgtcaccatccttctaattagatattttcttcttattctgtagacttcagtcttattgcatttaatgctatttttgcagtgtgttaatcttaa

SEQ ID NO: 115272 - DNA, 849 bp, Physcomitrella patens
  Intron number 1 from transcript Pp1s313_74V6.1 (locus Pp1s 313_74V6) derived from phytozome v7.0 (chr-ID scaffold_313 ; pos 384890 to 385738 reverse strand)
gcaacgtcgtcgcggcagggcttgatcagaataaggtaaattatttatgcgtttttatttttatttttatttttattttttttgacgagaggacagttttctcttcgctagggcgtaaacacctgtttagacgcgaattttggtagcctgcagttcccttaggagagaaatggtgggcgcattatgcatcagacgaaggtgactggtaatgctgcaggtctcgatgaattgagccctgaaatacgcggatttatgtggtgttcagtaggtggttttttgcgggatgaagtgtcagattttgatgatcagaacattagggatcatttgttggggttttgggtttgagctctcattggtgcagttggatactctattctgagtgtgtgtttcgtcaaagctggcgattttgtttcagcatttttgaggaaatgaacgaggatatgatgttagtgattgtctgtagaacatgtgtcgtttcctgtattttctaacaggtttcagacactgatttcagtgctgttttcacagtttgcgttgctggaatgaagctgagagtgttcatggtgtattatttctagttgtagtagttagacctcttggttagcttcctagaccatggttcatagtcagattttccattgcagcttgtattatatactcgatcaccatctatatcatgctagtttctggatggcgaaattctggactagtttacagattctttcgtaagtccttctaaggtttgaagctaaaaagtagcaccaggggccggtcaaaaagaaatgacaacaatcggtgacaaccacttatgcgtgacgttttcttctcgtgggtgtacgtagggtcaag

SEQ ID NO: 115273 - DNA, 449 bp, Physcomitrella patens
  Intron number 1 from transcript Pp1s183_106V6.1 (locus Pp1 s183_106V6) derived from phytozome v7.0 (chr-ID scaffold_1 83; pos 799027 to 799475 reverse strand)
cgttcaacctgtcgttgagatatacatctgtgacggtaagtcttctcagcgatcttctcgtatctctctgtttacatttatctttgtatcacattctagtgccatagtgttctagttatgaggtgatgatcacatgtttctgaaagtatcagtccacatctggattttcatttcattttattatttatcatttttgcaatataagtctagttagcaaggagtatttcgcatcgaattagattgtggatgatatgaacactcacagaatgtttttgaggtacgaagcacatcaatttggttttgatttgataatcatgagaggtgagacgggatcagcttcctgctctcgagattcttagacgctccgtcggatacgaattgaaatcttacgattattgtgttcttgtcctgcagtcgaatactatcttgagcagtgcatccagcttgtt

SEQ ID NO: 115274 - DNA, 988 bp, Physcomitrella patens
  Intron number 1 from transcript Pp1s25_25V6.1 (locus Pp1s2 5_25V6) derived from phytozome v7.0 (chr-ID scaffold_25; p os 271837 to 272824 reverse strand)
aagacaagctccgagttcaactcaggtgtgttgaatcgacaacagctccgacgtggaatgtctgggattttctgatgcgtgcagaaggttttctaaagttgcaggtttcaaaattcttctgacagagatgaatagcgttgccaataatttgaaggactgagatccttaagtgaccaggagatcgaatgcttgtcagtgagtccagcatcaaatgaaacagtcccctttctaagcagaagtcaagttggtgaagttcatcatctgccagaagaaaagataagaaaatcagagaaaattaaacgtatttcgtggctggttgaatttcttattgcattgtggtacctttgacgaggactgagtgggttgattgcatgaatcacgatgagtgcatgacgcctgatgaaagctgctctgtgggtctgggtctggtactacgtggtccggttaccagggcagcaatcaacatttgagcaatcaacattttagggccataacaaaatgcaaatttataatgaatgtataatccaaaatttagtgtagtgtggtgaaaaattcgtcgtacgcatgactttgtggacatcgttgtgttcatttatgtccaacatgttccgaacagaggctcctcaaagttagataccgcgttatctgagtagcttaggctttggttcggagctgatgtgaagctcgttacacttcgttcattgagctcccaccgtagaatgtcattcactcttaaatgactgtctgatcgaagctgcacggcatccttgcgctactttgcgtaccaaagaagcattatccctgtcctagaattgcaggtttgcgtctttcaccaacaatccccaagtacaacatgattcataaccgtttctgcatctcgaaacgttggtcgtaattggttttttgcctacaatcaactcagatcactaggccaccttgtattccgtggggtgtagtaattctcagctccacactgaagaagccaggg

SEQ ID NO: 115275 - DNA, 605 bp, Physcomitrella patens
  Intron number 4 from transcript Pp1s31_214V6.2 (locus Pp1s 31_214V6) derived from phytozome v7.0 (chr-ID scaffold_31; pos 1160261 to 1160865 reverse strand)
acctcgccagttgggcccctctctaacacggcaaggtactgaacttcttcatcatgaacgacctcaaactttggttttgacttttacaacggaaattcgtgtgttgatatacaacttcaatcaggtcattcttgcatctgcgcgctttcagcattacctgtgagagctgccgggtgtctttcgttttttaggattccttgggaacagtgtgtggtgctacggctcagcttgcacaatttcattaatttgagctattgtttcgtggaaaatattaggtagttgttgtcagtgttcttagtcgggcgttgaagaggtatgtaaacacatatggagtaggaattaattctattttaaattttagtttgttgcctgtttattcgctatttcttttgggtaatctgcttttatttttgacgtcatgtggttcatggaagcaagagcacctctttctattgggcttaacgaacttagtctctatttatttcatttgttttgattataaaatcattatcattattagaatattttatgagaatgggaatgttcacccctttcttcatctgtttccagtcgcaggacactgatttatctgattctgaccttga

SEQ ID NO: 115276 - DNA, 789 bp, Physcomitrella patens
  Intron number 1 from transcript Pp1s172_76V6.1 (locus Pp1s 172_76V6) derived from phytozome v7.0 (chr-ID scaffold_172 ; pos 793535 to 794323 reverse strand)
gatccggcctcgattccaccgtcgcccttcgcctcgtatgttccacgcttcttcttcgtcttcgttttcgttttcgcatggcctttttgtttggtctggattttgttttgtctgtcatgaatggagatttgccttattctttaaaccctagagacctattgcgagtgattgcgaacatttcaggcacattgtggcgttgtagaaggtgtttggtcgagttttctgtgagcaacagcgctcgattgtagaggattttgagaatctgagtctcttctggcactcggttgatgaagtgtgaatgagatgagtgagtgtgggcgatgtgatgctatagaggatttttgtcgcagtaggagtggaatgtaggggtaggagatgcctggagcggaggattatgtaaacctaaatattcgtccatccgtggcggggtgctgatgtcttcggtttgtcggaacgatttgcactgaattttttgtttgcccatgtgtgtgagtgctaattagagtagtggattacgaggtttagggctggctaaagtgagggagattcttgtaggaagtggtgaagtgattcattatatgataggcttgaggtcccactctggtttgggtggtagagaatgagcgtaagacagatcgtagaacagcaagtttgtgcttacgaattgttaaattagcggagttctagcaattcaaacttcgtcttagctcgatatcatgacgacattgacttgtttgcttgttcccatcatcagaaattcctgaattcgttactgccgaggcagccagt

SEQ ID NO: 115277 - DNA, 967 bp, Physcomitrella patens
  Intron number 1 from transcript Pp1s25_217V6.1 (locus Pp1s 25_217V6) derived from phytozome v7.0 (chr-ID scaffold_25; pos 1401290 to 1402256)
gtgactccgcaggtgcattgtcaatctcacgtctctgattattacattttttatgttaaattagcatatccacgttctttgttatacctttaaattgcttcatcatatttactgaggtttgttggtaccttgcaatggtactttttgtgaatgaaggtgttcttaatagcagaggggctgaatttctgcggaatgacgagttagagactatagacattgatgcaagtgatcatgaggattggacgagaagttctgccaaggttgggttgcccatggcgcaaagattggacgagcttctgcaaggaaacaattcacgttcaaaacacaataatccgaagcagaggcagaaaggcaaaagtatgttttatcatgacgtcgttttttgcaccctgctcaagttgattttattattgtattggctcaagagaatcctagatatatgagtttgttggaacgagatcctttcgactctgtgatgggttaaataggcgataaccagaactttccacaacaatctcgacgcgacgcgtcccattgcttttgtgacagaaactttcaatttgatcatgctatcatacttgtgtgaggtcatggtgacagctaccataacgtgaatgcgccaactgtgtcaataagttaactttacatggcattctaacatacttagtatgtgtactgcaaccatcttgtatgtttatcatgagtcgtcaattttaactagatatgttttcttccaggatcatttcaatcaaatttcgagataaaacgtgtatttaaagaggatgatatcgaagtatgtgacaatgctcagatggacactccaattcatcctccagtgatcactagaccgcaaacattgccaagtatcgctgagcagtttcaggaagcacttatggcagctcccgctctcgattgtgcttctgccccttcagtgcagtttccaattacccaagactactctacccgt

SEQ ID NO: 115278 - DNA, 537 bp, Physcomitrella patens
  Intron number 2 from transcript Pp1s91_64V6.3 (locus Pp1s9 1_64V6) derived from phytozome v7.0 (chr-ID scaffold_91; p os 437477 to 438013 reverse strand)
aaagttcccattcttgttgaaactttatcaagcaagtataatttgcctccctctttttccatcgtcattacttctctctgcgtttcttccatgctgaaaactttatgtgaagaatttatgttatctccattttaggtcttttgtcaggcaggtgaaactcatccgaatgtgataagaagtgattatgtcttaacctgtaattagtttttttgtattttcttagtatgtttgtaatcaacactatatttttcgacattttttttttttcaatactcatgatttcttattgcttttgtgtatactaattgtcaatgttaagagtgcgacccttggtcatgttggagcttgcaagcgtcttaataaccaagtttttgtggtttctttgatttttgttgtttacaaggttgactttattatcatctgtgtcttaaccatcctcaacaatatctataataacgcatatcttgatagatagtctacctgttcaatttttttggttcctgcgatgttgaagtttgtatattatgctcagggagg

SEQ ID NO: 115279 - DNA, 459 bp, Physcomitrella patens
  Intron number 1 from transcript Pp1s91_172V6.1 (locus Pp1s 91_172V6) derived from phytozome v7.0 (chr-ID scaffold_91; pos 1055174 to 1055632 reverse strand)
gccgtcacattctcggttgtctcccgatccctaaacacctgtaaagctccgttctgcaatatttttggcccccaccttctgtattcaattcttcatttagaaccatcccctaaactgttcttttgaattagcaggtttggatccagaaatgaggacgtttacgataaccatgccatctgtaggtgtctttgtcttcggcgttgcaatatgctgtttttgctgcttcaagtatggcctgcaacgatggtatgaccgaatcacaatgaaaacacgaacgaaatccaaacagggtatcacgtactcggtgagtaataattgggtcagatgcaccatactcaaaataccgtcatcaatccttagaattccacgacggcaacgggattgacaagaaatctatgtgaatcttaacttgcaattgatccaggcatcacttcagcgaaaaaaacagcagatagagaa

SEQ ID NO: 115280 - DNA, 289 bp, Physcomitrella patens
  Intron number 2 from transcript Pp1s385_31V6.1 (locus Pp1s 385_31V6) derived from phytozome v7.0 (chr-ID scaffold_385 ; pos 235991 to 236279 reverse strand)
acgaagtcactgccaggctaaaggagctcggcaacgtaagttgcttttggtttcggcttggtccacagcattgtctaatttcatcttctgggtttgtagcgagagtgctttttgcttttcagcaccaacattaacctccatccgcagccttcatagtcttcccagttccacgtttatagttgttgtccgtcaggtcaagcaacttgtcttgcttacttattgtaaattcaagctggtttggttttgactcacaggtgagtgactctaaggacgttctccaaagaacttt

SEQ ID NO: 115281 - DNA, 1018 bp, Physcomitrella patens
  Intron number 2 from transcript Pp1s31_51V6.1 (locus Pp1s3 1_51V6) derived from phytozome v7.0 (chr-ID scaffold_31; p os 267619 to 268636 reverse strand)
gctttcagtcagcaactaaggttagtgcgaacaccagtctttatcctgctccgaacgtttaatctttcattggaacatctccatgttcttgtttgaagtgcctgtgttggaatgctaattctgagggatcaaacttctgccacagctctacagctctacattgttgtagaaggatctagagagatgattagcagaaaataatctcaacagttagaaatttttctctcgaattgaatgctttgcaaagaacaggcttggtgataaactgggtcaacaggagcaagcttgtcattcccctgaactactcattcttgtgcactcagtcgatttcaatgttacgctataagaaaatcgcatcaaacaagaaggaatttgtgtggtctcgatgttcagattgcccttgattgtctatctttaccttccttttgcgcattactgctctgtctatttctttccgattagcccacaacttcacaatgtctaattagctctcaacttcaagttataaaacgatcccttcagttgtgtttttctcatgggttcaaactgacatttttgtgagggctctttattatcatcttcctcatcgtgtgtacttggcagccaaacctcgacgcactggttatgcttctcgaggacccaatcggtgcaatcagactatgaatcgtgtctgtttgaacggcagtggacgatcaacatggttgatacacacagaaatcatgccagtgttgaattctggtcttaaggaaatgaacccagggcatggaccactgtgaagtctattcccttgagtttatcaggatgcccttgtctgcttaacatttagcttgggttgtgtctactgcgcagtatgtttgctcatactaaatttcctgatggttttctcatgtttaatcacaagcttatgaaagtctgtgaagagggagtgaagaactgagcatatatttttgtaatttcattgtgacaatcctgtgttcttgctcatttgcagattcttccttatttgtcattgttgtga

SEQ ID NO: 115282 - DNA, 497 bp, Physcomitrella patens
  Intron number 2 from transcript Pp1s526_11V6.2 (locus Pp1s 526_11V6) derived from phytozome v7.0 (chr-ID scaffold_526 ; pos 31563 to 32059)
gatctcggccttcttcatagtgcttcttttctcaagtaatgttcttctctatatactttctatgcaccgctcaaatattaacaagaacatcgattagacatgcacaacagcattggcattatgtaattagaatagtggacataaggtgttgttctcctcggtgcaacataaatatcttgttgacggagtactcgctggcagtggcagaggtgtttttttgttaatatggttagtgtacttcagatttctcacagctagatttttacggagtactcatattttctgtggtacgactacactattacatgctgcctaagcaatcatcaattcgtaatcactgtctactgtgtcgctttgatttttcgtagtttcttgttgtcatgctttgttacaagttatatcactaagagtggcagcttggtaaactgagttgaatcaaatgcagcacaacctgacatttgttttatgtcgtcttagatttccgattgacaagccga

SEQ ID NO: 115283 - DNA, 515 bp, Physcomitrella patens
  Intron number 3 from transcript Pp1s526_11V6.2 (locus Pp1s 526_11V6) derived from phytozome v7.0 (chr-ID scaffold_526 ; pos 32097 to 32611)
cttgctgttgctcactggtgtgggaaccaccttaggtacatgggtcatttgctctactttctattattaccttattttttggaatggctgtgcttcacaggaagttgaatatgattttaaaattcggtagactgctggtacatggattgaacattttccttgtgcatcagtgtactagggctgtgtcagagcacctcggaagtactgttgtgagttatcaggattgcacattggtaggctcgtgagcgtacctatcacatttatagctctgtgaactagaacccagtagttaagtgccagatacttaaaggacaagtgatatgaacacaatcattaacttgaatttgggccaggcaaaccgacttttctttctcttgcttcaacatttctaaattgtttctctcgttttgaagaagactaacacctcgttccattccattcagaactatagcattgtgactttgagttgtgtacgtgcaggtttcaaggaagttttatttctggaaagaactctg

SEQ ID NO: 115284 - DNA, 295 bp, Physcomitrella patens
  Intron number 4 from transcript Pp1s10_153V6.1 (locus Pp1s 10_153V6) derived from phytozome v7.0 (chr-ID scaffold_10; pos 1137260 to 1137554 reverse strand)
ttcaagtccgttaatctcttcctctgccttggatgtttcactgctggtgctttggtttacatttcttatttgatctagtgtgtatttgttttttgatttatttattttttaatttttagaattgtaccttcacaggtttcattagctactctgctatgctgttctttgtctttttctttccttttattgttatttgggagcaatctatttaccatttggttatataaatttaatattaagtgtaccactccaaaatgcaggtctgctgggaaaagtttgcgaactactttgaagt

SEQ ID NO: 115285 - DNA, 589 bp, Physcomitrella patens
  Intron number 1 from transcript Pp1s25_110V6.2 (locus Pp1s 25_110V6) derived from phytozome v7.0 (chr-ID scaffold_25; pos 758269 to 758857)
ctactcccccgaaccgggaagacgtcaaggacaaggtgagtaccctcgcgtttgtctgaccataaggttggccgagagatgcctttgatcgttgtgcagtgtttgagattgtggctaccatgcgcgtcgtgatttttgtttttattaacggtttgtggttttaaccgattccttagagttatgcattctgagtgtcgcactttggaatttgtagaaatttatctgttcatagtggctgaatgagaatttaattctgactcaatcttggctaagattcctacaggtaatggatcttgtaatagtggtgacagtacagtggtatttgcaatgagtgagcgttgaaatagtggctgtattctcttgaacgaggcttacagcactgtgcaattcccttgccgttggctctgcctccttacactggcagcttttatctttcattagggatgattatttatttatatccctcgagtgttgttactagatttttgtccttgtagaaaacttccttttaaaacttgcgaatcgcaattcatctccatcgatcctagcgattggcaactcactgaactttcttctgcacagattccta

SEQ ID NO: 115286 - DNA, 775 bp, Physcomitrella patens
  Intron number 1 from transcript Pp1s25_291V6.1 (locus Pp1s 25_291V6) derived from phytozome v7.0 (chr-ID scaffold_25; pos 1941924 to 1942698)
tgaagagagcctgatatcattaaaaagtgatttaggttagtgctgcacttgttcaacgatattatttgatcaatttttggattatcaccaacactaggggtgattaaaaatctaattataccaaaacttcattattgattccttcagaaaagttttccctatgccattctaatttcagactcttgtaactacgtatcataaagattgggatgattcatatacctatgaatactgcttgtcgatgttctgttatggccgtcgacagcaaagattttacaaccaatgtctccgtgaaacctcatcggaacaaaattcaatactgcgaactggtacaaaaataaatttcgtcttacatttgccacaattcgcactacaaaggcaaattcaaagaatcatttattagaagatacgtgataaatctgtgacaatcatttctggttaacttttcttgcaatttggtcatggccccgcgtgtttgtcgtgaaattcacaacaacagttttcttactgatgcagaaaattggatctttcatagcttacgtcttcttagtataagtagcggagaagatctgatttaaagcacttttattaggtaaggacaattgcaatatatggaaatttagcatctgtaagacaaaccatccatgtgaacaaggaggtttcaaagaagttgagcaccttcagataagggtagccattggtgtttttttttacaataatgatgtattatatctagaattcaagtaacgacatgtatgacttgtttgcagtaccc

SEQ ID NO: 115287 - DNA, 981 bp, Physcomitrella patens
  Intron number 2 from transcript Pp1s545_4V6.1 (locus Pp1s5 45_4V6) derived from phytozome v7.0 (chr-ID scaffold_545; pos 16978 to 17958)
tgaagcaggtccagatctgcggtttcttggtcgccaggcccaactaaataattcgttgagtacacgaacttttgcagcgtagttgataagtgaagaattatgtgtacactacttgcggtcaccatttatcattaaatattgaaggatcctttgggtatgatatgtgtcttatgacttgcacaacgtcaatggtaatcgctttagaactctctcgacacatgaccatcacgattaaagcctttcccaaccttcaatgctgctctgacaaattcaaaatacttgctcattgaccgattgattgtattccatgaaaagaaaacattacatactgccccatttactgtgacacagtacccctgtcaaaccccattttctaccaacccctgattcgatatatcgcagagcgcaatatacttcacaaggcaaaataacacccgttcagaaagaacttgtcacaacattatcattgacaagcaactactatcatgcgaaaattcctcttcagaaaaaatactaccctctttctggtattattcatcacaatctccgtccgacaatgttgtaagtgaactctgtttttttacatctcccccttcccacactagattaataatacatgacagatctgctatgtgagacacatccaaatatgttgcactcttcaaagcggattgcagaagaaaaaatagcagcctctgcaactgcaaccaacacacatcatcgctgaacgaggtagcatttcggcagtaccttgaacagtaattactaggtttacgaatcgattgtacctcgaactactttcggtggtgccgacagagctcaaggcttgcacacgaagattactcaacagttggataatagtgtgcttcgctcatacctccccttgtctgtccaaactcgatgacaatggatgaccaatttgatgcctgagaagattaagccattgtgtggacagtgttcgacatcgacttcgtggtggaa

SEQ ID NO: 115288 - DNA, 579 bp, Physcomitrella patens
  Intron number 3 from transcript Pp1s540_16V6.1 (locus Pp1s 540_16V6) derived from phytozome v7.0 (chr-ID scaffold_540 ; pos 59339 to 59917)
tggttcccagacggggaaacctgactgtttcagtaagactccaccttagcagtaaagattagagttcctccgatgctgttaagcaaggaacatgaggcagatttttcaccgacgcgtttgtttttcaagaaaagggcaaaacttcaccgtcattagtcgcagaattcaagtgcttcacaatccgaggctggactcgtgtctggtcgtcgattcaagcagttaacttgagctcctctgaaacaactgcaagagttcacaaacatgtgccatgcaatacatgaatatatatccaacttcagaagccacagggtgagaacatggtgttctgtctcatgtccagataaagtgactcgatgtcaacgaaccctgaaatctctgaacttcctttaaggctgcttttttctttttgaatctttccgtccaaaagaaaataaatacacctcatcaaactaagtctacttagtttagtgtaagacagaaactaaatctactcagtttagtgtatgatgtgctgcccattaattgatagacttgtttgcatgataacgaagagaatctgaggtcggcgtttcggtacag

SEQ ID NO: 115289 - DNA, 793 bp, Physcomitrella patens
  Intron number 1 from transcript Pp1s31_198V6.1 (locus Pp1s 31_198V6) derived from phytozome v7.0 (chr-ID scaffold_31; pos 1026714 to 1027506 reverse strand)
ccatagcactaagccgcgtgttcttgcgctgacaggtgtgaaatgtggtcgatttctcacgatcgatcgaagtttctcttttttattacgcttcacgctgattttactcgaaattttgattaggatcgtaggttttgcaatgctggtgaacgccgatatggcatttagtaccctgcaatgaagtctcagagaataatgtggctctcggtcttctattgacacaacgttagatatctctcgccgtcagaagaagcgttgctatgaagcattttaatattaccaccttgctcatatccgttccgcggagatttagttcaggtcggagctcgctccgtcctgtgagtctcttcatgtaaggacctgctgctaaatattttgctgtagaaagttcgtctcgaccaaatacgtacatttctgtagtaaatgccgatagcgttctggataccgtaacgaaggcgacctattttggcgagtgaaatgtaatagctccagttgaatatgttttcagaactgagctgaaggaaaattcgatcacggttttgactgacctggggtggtcaaccttgtgaattttaattccaattttctagttttttcacctgccaaatttggcaacgtccaactcagtaaattcttaaaaagaaacccaagctttacccgcagacttttaattacaattcggaaggcttttcaagctccatctagttgtccggttatcttttggatgacttcatggttcatgagattggaactgatgctcttttcgtttatgaacactgaattttgtgcagta

SEQ ID NO: 115290 - DNA, 780 bp, Physcomitrella patens
  Intron number 1 from transcript Pp1s34_44V6.1 (locus Pp1s3 4_44V6) derived from phytozome v7.0 (chr-ID scaffold_34; p os 262930 to 263709)
ggctccggcgttctctccttccctttcgcattccggttcgtcgtttcgctcctcaaagctaatcacattaagacagaattggacttggagtatggtcaagtgttttgaagtcatactacctcgtaaattctcgcgatagtaggttatgaacttgttgactgaagatcgagattaggtgtagcgaattcattagtgaacgcacaccgtccttgactaatagtacaaaacattagctcatcagacaataaactctttctccttgagtttcttttactctcaccgacataagagttggaccatctgtgctttgtaaaacgtgtgattacaatggaacctaatatatgagaatatttctcatgtcagaattaaattcccatcgaagatgatcattgcagcagttctgattgtggccaaaatgcaaggtgcgggcatagattgcagtagtatccatgtataaattgcagcaatcactcggccagccatggaatccatttttgtggatttgctgcactttaggtttcggcaatgcaaacacgctaagtcttatatatgttgaaaacttaccgcaaagcccattaggtcaaacttgcactagatttctggagacaattcatgggtctcctcaatatatctattcttcgtggaagcgataaaattgtaagggttggtcctcggagctggtttggttgatttgattctgactcgcaagtttgggatatcatctgcttgtttctattttttgtagccaaactggtgtggttggtgggcttatcttgacca

SEQ ID NO: 115291 - DNA, 708 bp, Physcomitrella patens
  Intron number 3 from transcript Pp1s8_73V6.3 (locus Pp1s8_ 73V6) derived from phytozome v7.0 (chr-ID scaffold_8; pos 563515 to 564222 reverse strand)
atacaccgagagcaatcttaggtaacgtgtttctttcgtggaaacacgctcatatactctctgaccacaatgatttgctctgcatctgttatgcattcgtttgttacggcattgtgactacgaggcttaggttgaagtttgcgttttctctattcaagttttttaaaagttcctcccgaatatcgcatgtaattcgacaagatgtgagagtttccttttgaatgcattgacaagatatcccttatttttaagataaataattcctgatcgcagcaaacaggtctttgacctgttgatagagtgtacagttctctttcatttctgttattcatgtgccactggaacagtcaaatactatttttgagttatttggtgtctacatagttgaatgcgtctatgtagagtacagtcgtgtgataagaaatgctttgtgttgggatcatgaatggaactctatttggtctttgctttttgctttttgtgtatagtagaagtttatgaccctcgggattttattttttggagaacttttggtgtatcttcttagtattgtgtcaccctagctacgatttcgccttaatccgattagatggtctaagttaccaaagaaaaggtctgacggaataaacagatggcttgattgcaagggaagaagaagatgcagtgaacagagatttgtttggggctgcaggtagcgaatcatcacca

SEQ ID NO: 115292 - DNA, 864 bp, Physcomitrella patens
  Intron number 1 from transcript Pp1s34_52V6.1 (locus Pp1s3 4_52V6) derived from phytozome v7.0 (chr-ID scaffold_34; p os 314806 to 315669)
ctcgcttcttctcgcgcaaggtcttgagagtgcaggtggtaatggatggggtgtgcctctcgtgatgcgattcctgccctgtactaacttggtccggaggtggtatatgtcgcggtgatgaggtcccgaagtaggggccacaatcgtgtttttagcggaggtcgcgttgcgattgattgtggaggtttggggtggggatacgtgcgcttccgtgcgtcactggatatgctggtgtgtggtggtcgttgtttcgaatttctggttgtatttgttgtttgtttgtttgtttgtttgtttgtttttgtcgaatacaagtcgagaggaggggtttcgttacagggtttgtttcagggggttggtctcgcaaaagcaaccccccgtgggtggtttcctccgattcttcttagtgtgattcttgctctatcctagttgtagctcatttagttttgatttttcaaatgatttctcaacgattactctgtgaaagtcggttttgcgttgttgtttgggcaagtatttgctcgtgcagcctttatctttttcgtacagtgtggttttaaagtggtccatggattctcaggttgctagagaccttattgatcgctgggagtagaaaatgggtgatcatcgttatgccatctcccagaatttcctctaatgggaaatcggcatgtatttggaacgttttgagtgaaggccatctagtacaattcatgtagaaatggacactattttctttacatttttggaattggcgtttatgttaggtttagctgctaatgcaatttacgttgccgcacgcgaattacgtgatatcgtttggttaacatgtgtcgttggaatggcaggtggtggaatcgtctg

SEQ ID NO: 115293 - DNA, 470 bp, Physcomitrella patens
  Intron number 1 from transcript Pp1s40_21V6.2 (locus Pp1s4 0_21V6) derived from phytozome v7.0 (chr-ID scaffold_40; p os 165192 to 165661 reverse strand)
tcagctttttggcgattccctctccgtttcccgtcagtttcatctatgaagcgcgggattgggatttgaaacttttttttgatgacagacaattattgttttcatgtgtcttcctaattccgagggtgaaatgcggcaatttgttttacctttagttgccgtgggtttaatttagtggagcctcaaattgttactcatctttcaaaagggtatcctacagcttgtttatctgcatatgattcgtgggcactcgattggccacattgagcaggtggaagttctggcttattgacaaaagcattaagaacacacatgattcaagttcctttttattgcaactcgttcatcttgaaaacattttctcacaaaatattccttataaaacctcacctcatctaaagttatatgcacttcgaattcaaagtggtaaatatacaaatcgaatctatgccagattattgcttgaagac

SEQ ID NO: 115294 - DNA, 505 bp, Physcomitrella patens
  Intron number 1 from transcript Pp1s83_135V6.1 (locus Pp1s 83_135V6) derived from phytozome v7.0 (chr-ID scaffold_83; pos 968479 to 968983)
ggagtccacgaaggtgattgaacaaaccacttaatttctatttacgtgagctttattcttgtcagtgcgtattggacacaagccggcacaaaatcaaagtaagttcaatatggagtggatccttctcatctgggataagctgtttgattcgtttgaaggttggaggtggaaatttgtgatagtagttgacacgaaacctatctagcagtaacgttattaggaagactgcgggaaaatgcgggtaggaaagtggagtaccctgttgtcggcagcgttgcgttgttgttttagaataattttcaggtgtgacttggactcaagattctttctgtatgcgaggaagatgtttttcccccttaatgctaattctgtggtgatcgtgtaaagcttatggagttggggattcccttagggtgattgattttgatgtaagggtgtagttgttggactgtctctctcactgtacttcactggaactcaattgtctgttttctgtaaagatttt

SEQ ID NO: 115295 - DNA, 610 bp, Physcomitrella patens
  Intron number 2 from transcript Pp1s152_91V6.1 (locus Pp1s 152_91V6) derived from phytozome v7.0 (chr-ID scaffold_152 ; pos 514995 to 515604 reverse strand)
ttccacatatcagctctttttaggccttccacctagtaagttcctatagatcaaagcttgagccgatttatttgtgtttatggtttataaaatttatagatgcttggagaatgaggcatgcgtgttgtgctcatgtcttaatgcttatctgttatgattatgtagttgcgtagaagcagtagcctttcctatgtattttcagttttggaccagtgtaattaacgaatgcgatattttacacatttttatacgaagttcatttagtggcttgcatttttctgttttgccagttcctatacatgttttgggtgtgtcgactatttgaaccaagtatttgaatctcgtggtcttgttcatcgtgtgttgttttcatggatatcaatgatgggtcttttttgactgctagttcgaatgatgggatatgaatttattaatggttattactacaagcgataaatgttgatgccttacaagtttgaatggttgctctaaattcaagcttgatatctgacaagaaaattctttccctgttgttggatttgtgcaaagtaggaaataagttttttgctcattgtgttgttttcgtgcatttacccagctttggtggaga

SEQ ID NO: 115296 - DNA, 838 bp, Physcomitrella patens
  Intron number 1 from transcript Pp1s34_56V6.6 (locus Pp1s3 4_56V6) derived from phytozome v7.0 (chr-ID scaffold_34; p os 329996 to 330833 reverse strand)
ctcgtcctggattgtaggggaagcgtacactggaggttagtagattgcgtcgcaatttgtgttacttatagaatgggtttgtctcgtcttcgtaccccgtctgcgtcgcgcaaggagattcctcgcaggacatgtgcgacgggtaagggcacttgctctaaccgtagtgacgtcgttgtccactgatttgtatctcgtgaagcagttgaaagaatgacggatttgaaggatctccttcagaggtcgagcatgggcaggagttgcctgtgttgcagctatgtttgttttattcagctgtagctctctgcacccccacgagaaccctcgccctgctcgaaattcttatttgggcgccatgatttggcttgcaaatgatgtcgtctagttgtaactctctgtcttcgatgcacactcatcattcctttcgtattgtttttgtcttttggtttttgtgttttgtattgtttaatcgtgcctacatctatgaccttcctgtgccactcagtcagactgagatcgaaaagattttagcaatgcgacatggtcgggagtttgagttggtaatgaatcggggtgattttaacttgttttagagttttggcgggcattcatcttcttcaatacattcatgacccaacaaccggtactcgttggtttggctcaataattatattgtgaagctggaatggttctgagcctgtgccaagattcccacccgcgatatggtgctgtatttctccgaagttgttcgtttctcattggtttcagtgtaggcacacttatctccttgtgcgcttgtgcaggtgcttttagtttgcaagggtcgagggttttcagc

SEQ ID NO: 115297 - DNA, 1064 bp, Physcomitrella patens
  Intron number 1 from transcript Pp1s10_103V6.1 (locus Pp1s 10_103V6) derived from phytozome v7.0 (chr-ID scaffold_10; pos 717546 to 718609 reverse strand)
gcaatacttccgggtcgcatattgttaatcatctggtaacgtttctgggccttttgaactgtccatttatgtggcaggtggtcgtgtatcgggttagggtttagcttctccaacaatgagttattacttggtcttttatcattaatagaatattttaatttgatttttatccgcttaggtctatgtttttttccttccttttaatttttttttaaaaaattattatttccctctctattctcttctcttttccgattcaggttcttagatggcgggtgcactgacgaattttaggttctttgggttttctaggttacattttgaatacgaacttgtgattctgatctgaggctggagctttctttgtttgtgtaaagtctcaaaggtttatggccaggtctattgaacgttgttttcatttggagttgaaattagtgcgcatttttccgcaatgtgcaaagagaggatgttttgtacgttatgcataaattcattattgcattacgtgcagttgatcactttattgcccgtgtcttcgaagctcaatactttagggtttgaaattggtccattttatggaaaagggagaaggcatggaagtggtgttctcagatgtacccgtcaacctctggagattaaatggttgttagggattatgcatcttattttagggaggatgatttttcgtgaaaccaagagtaaactatgcatgggatgtaattctaccttagaaagcccgattatggatgttcttttatttggtacgacaatatatgagttaattgtaaatttttacagttatttaatcttcagagtttattattatgttgttcatgatattttctagattatacaccttgaaaattctcgatgtggtatcgatgaccctgttatcgctacatcgtggtcttcgtcgcacttattcgaacgcttgaaaatattgcgctacatatcagcatattttctctaagtaccgcagtaagtggattctaaaattgatctggtaggaaactgactcgtacttttcaggttcgagccaaacacaaagaagtctgcttgcacaa

SEQ ID NO: 115298 - DNA, 403 bp, Physcomitrella patens
  Intron number 2 from transcript Pp1s91_127V6.2 (locus Pp1s 91_127V6) derived from phytozome v7.0 (chr-ID scaffold_91; pos 758812 to 759214 reverse strand)
cttgctatcttccactttggcattgtcgtctggtgagtttcatccacagttcttcaattttctcttcaatgttcgtaacagaaaagatttgatataagtaacgttgtcatcagatttttgttttgttttgttttgttttgtttttgttcttttggttaaacttaaaactagtacttttagtgagaagaagtggttttaagataatagtgggggttaagtatcatgtttttcaacacttagacatgtgttgtaagcgtggggaattcgttacctttatggaagaaaatcgcctctaatttgtaatttaatgtcagggatttgaagggtctgtgaacgcaaatactcattatggattcttatgtcttcaggcttggcgttgttgtcgcttaaagcactgcttcac

SEQ ID NO: 115299 - DNA, 340 bp, Physcomitrella patens
  Intron number 2 from transcript Pp1s98_86V6.1 (locus Pp1s9 8_86V6) derived from phytozome v7.0 (chr-ID scaffold_98; p os 473671 to 474010 reverse strand)
ctgcgatttttgggagcacagaatacctacattgcgtgagtttgaagttctagcttgaagttgtgatcaatgtcagggaaggtttcaggattagaggcttgagatgtcatatcctgcctgcaatgtagattattttttgagttttttgagtttatttttattttattttattttttttcatctgtgttgcagcagtttgagtagttcggaaaagtgctgctgtccaagtggagaagatatctgattcgtgaacttgatcgcctacattgtagatttttgtcttcacttaactttggatggtttaaaagcattgaatgtcttcttgaatgtcatcaccagg

SEQ ID NO: 115300 - DNA, 677 bp, Physcomitrella patens
  Intron number 1 from transcript Pp1s10_323V6.3 (locus Pp1s 10_323V6) derived from phytozome v7.0 (chr-ID scaffold_10; pos 2508345 to 2509021)
ggcagtgtcaaggttcgatcccgtgtcaacagtcatgccttgcccattctaatgcttttacattagctaatagagcaaatcttcgggaaccgaaataagaagtaggtaggaagattggcggtattgttagctttaattttgtcttgattgttgtgccgatgcagtagctgtgtacaatgcgtggacttatcatagggagggtttctatttttctttaattttttcccccttcttttccttcttttccttttcgttcttagaaagtggttgagttgatgcagttattattttaatttacataagtgctctagttagtgaaaaatatgcgcgagtaactgtttgacctagtcagctgtgctcaatgcaaggtgcctgtgttgtagagctcagtagcatttaaattgtgtgatgattcctctttgacgccactccaaggcctttgaatttcctgtttgtatgaacgggaattggtgttgtattttgccaagcatcgtttgttgttgctcgatagaatcctctatctaaaagttcaaagtcaataatctatctagtgattaaagagctggctatggtcaagttaatacttatgaaagcaatcaccccccactttgagttcaagtatgatgcaagagtgcatatgtacacgcctaatttctttttcttatgctaacagaaaa

SEQ ID NO: 115301 - DNA, 902 bp, Physcomitrella patens
  Intron number 1 from transcript Pp1s108_134V6.1 (locus Pp1 s108_134V6) derived from phytozome v7.0 (chr-ID scaffold_1 08; pos 749436 to 750337)
ctctgaagttcatagagcgcttatacttgcgaaaagtaagtacttgcgaaaagtaagtacgtgcgcaacgatacgagcatttgtgaatttcgggcgggctgatatgcaagttgtattttacatcaagcaatatcagtactgtacaacatgatctttagtgaagtttctgagggtttagttgataactcaaaaaccatatggaatgctttggtttgcaggtcgttttcacgcttggattactgagtgagcgatccacattttcaagctggaatctgaccttgatgttgaacgtttattaatgtattcgattcagatacggtcttcgagattgctgagaaacaagaattgatttgatcttatcaaggaaacaatggatcgaatatctgaaacagtcatgagccgaccacttgaggcaattggcaagacgagctcgacagaagtcaacgaggttgcattgttggaaaattttctttcaattccaagtatagaaaaagcgtggaccagtccatcatggagaggtgcggacttcgaaaacgttttgggaagcgtgccctctgatttcgtgtgatttatcagtttctcaacccaatgatgcgaatttatcttgcaagtttcaaagcgttaccggagcgtaattcccactcctccttgtgtgtggagttttcaatgtctctcatattaaaaagcaaaagtagcattgacagtccagatattcatgctcgtgcagtcccaatgttgtggaaattgcgcccttggttacgtagagttctctttggctactcagactacaattcagtatcgtgaatggagaacgttcaagagagatcagttcttatatattttttgtgtgtagtctttatcctctgttaacttttgagtgaatggaaaatacacaggagacg

SEQ ID NO: 115302 - DNA, 210 bp, Physcomitrella patens
  Intron number 1 from transcript Pp1s43_130V6.1 (locus Pp1s 43_130V6) derived from phytozome v7.0 (chr-ID scaffold_43; pos 1021017 to 1021226)
ctgaggttagtgttgcatcaaagtgttttgagttaggatgagaattcaataaaaaagaaaatcatagcaggggtttgaagtgaggacgaaacaaatacgcgtcttctggagaagacattaagacaaaaaaatagaattgggtttttcatctcacatgcaacatctttcatgcaagtttcatgacaagcgtgttgtataaatttgtgcagg

SEQ ID NO: 115303 - DNA, 796 bp, Physcomitrella patens
  Intron number 1 from transcript Pp1s91_107V6.1 (locus Pp1s 91_107V6) derived from phytozome v7.0 (chr-ID scaffold_91; pos 684342 to 685137)
aacaagcaggtacggttctctcgctatccgttttttttttttggtggaatccagcttgtttcagtcggttccggcgttccttgtttcagcttacaccagaatattgtgagagaaattcattattttgagtgtggtatgtttgtgcattttatcttcgtttttctcatctgagtccgtgttttgaaaaagtggaaatgctgctttattataccttaaagtcctttcagagttagggctccctgttgtagtaatgcaaccccccgaggaagttcgagattaattcagtttgagattactttcgttcttgataaccatcattaaagtggtaatttgtatgtgatactcttgaatcccagtcttcatcatcttctgatgttaattctctttgcgtgcacactaataattctttttttataattcactctgttaagttaatttgtattggagtgaagcctcttcactggcccgtcgtgaatgctgatttagttattgttgcaacgcacacagctctcgcctgagtgatgtatgtgcgacagtacttaccaattcttgccattctagtgccgcgatcagttttctagatttaaatttcgtgaagcctgtattgaatgctttttccagacatttgacaccgcctttacctggtaacggtcgtaatattgacggccttcgtctgcaattctatcatgtttggttgtccatttggagtttatgaagttccaaagttgtaaacctcagtgctcatcaaacatgattcgtgtgcaggtcgggaacaggatcatccagaagcgtcttc

SEQ ID NO: 115304 - DNA, 999 bp, Physcomitrella patens
  Intron number 1 from transcript Pp1s31_153V6.1 (locus Pp1s 31_153V6) derived from phytozome v7.0 (chr-ID scaffold_31; pos 798400 to 799398 reverse strand)
ctgcgcgcgaggtacgtactatcgtattgttctgttttttacttttagtctggtttaagttttgttatttctctagaaaataaatgaatagcagaagctgttgttctattttttattttttattatttatttattggattttgtgattaacgatgctgaaaggatcttctgcttaccttagaacaatcgcacattcacggaaagttcttgatttccctgtgtatcgaattcacttggatcagttctttgtgttgtcacttgggggatgtaggatacgttagagatagcatataagagatcgtttcatctgctcttaatatttggatgaaaagaggaaaatgaaaccttcgtatttgtgctaggtcgatgccgttatgcactcactggcgaggtgaaaaaagttgtccgagagtctttgcttattattagttttgtcgaagaatgaactggttcaatgttcctctgtaagaataacagatcaagcatgaaaaaatttctaccgctagtgactatttgaaattgtattatgagctttattctattcgtgtttaagtagtatcgatggggtttgttactgtccctgcctgtactttctgtggatatcatgttaaagacgaaatgtagttttcaataagtcaacggttcgcatatggagcactttcgatgcttgttttcctatttctgtcatggatgcactcgatcactacgtagggacgacaagatgtgcattgatattagattttagcattgcaagatatatagagctttaaacgaagacacgcaacttgacttgctggtaaaatgaatttgtattttaatggctaattcaaatgcttcgcactcatgagaggtaattatctgtttgctctacgattatgattgaagatgcctttcacatgtcatatgtcttctcttgctttcatgcatggttctattattgaccagtggttatttgagtgtgtaggtggaggcagtaatcaggggccttgttgctcagca

SEQ ID NO: 115305 - DNA, 441 bp, Physcomitrella patens
  Intron number 1 from transcript Pp1s52_142V6.1 (locus Pp1s 52_142V6) derived from phytozome v7.0 (chr-ID scaffold_52; pos 1216044 to 1216484)
cgctcaactccggaaacttcaccaagcttggtaagattcgacggatcgtttgtttactcttgatttgcgctagttccgttcatttgtttacgaaaaggttctcaaattaaagattaataatagaataaaacagaattggaggaggtttacaacgtcgtccctcatcatgcctgcatttacagctctagctgcacactattttcctgattttttttggtgaattattagttcaatgtcacttaatgcttcacttgctgagccacttgtgccccttggtgttgcccgtgttgggttattcttgattttcatttgcctcgtagagttgctgctttgattttagcttttcttggctgctgatttctgaattatggctttcttaaccaccactgtaatgtgatatctaagcggagatgattcatgaccttctttcagcatattaca

SEQ ID NO: 115306 - DNA, 861 bp, Physcomitrella patens
  Intron number 2 from transcript Pp1s52_142V6.1 (locus Pp1s 52_142V6) derived from phytozome v7.0 (chr-ID scaffold_52; pos 1216564 to 1217424)
gggaatactcgccccttatcgcagactaggcattggtaagtttgtaataagctgtgtatgtatgcacgtcacaagcatatttcaagtagtcatggcaacatgcttctccacctctcgtatgaaagaaacatgatgagatcggattttcttacagtatacctattttggagaatgattgttgttattgctaaccctagagacgacatttggaatcgcgcactttgtccttactggtgtcatttgatgatgcaagtgctgttatcatttacaatgaagaacgttaattgtgaagtggccagtgaaaaggttggttcgaaaaccaaagattggcataggaagattacgacattaaaattcgtcataaagcgtcggtttctgagagtagtatgtatgccatgagttgtagcacttttcgacacgtggagcaggaacactagccgtaagattgaaaacttatattgttcctctgcacggagtggctcttaagtttttggcttgtaaatcaacgtacagttgagctctttatttgaacttgtggaaagcttcttgccctaaacagcctgcccgtggggttctgcacagttgaactttttgtatttgttttgttggacgtggtgtccttcaactctgttaggtggtggttcattgcgaatgctgtgttctccacgttgtgagctgcccggatcatcgggctagtataaaaccaaggggatgtttgcctgatacttaattcttaggaaacgttcgtgattcctttgtttagtccagctccggtggccttctctcatacccattcttgttgcaccacggcaagtattctgactcaaattttttgtggcgcaggctcgaagctgcttcaga

SEQ ID NO: 115307 - DNA, 731 bp, Physcomitrella patens
  Intron number 1 from transcript Pp1s52_78V6.2 (locus Pp1s5 2_78V6) derived from phytozome v7.0 (chr-ID scaffold_52; p os 866530 to 867260 reverse strand)
gttcccgtggctgcttctcacctgaggactttgaggtaccgtgtcaaccatctgggatttgctatgggctctattgttgcgcttctgggcggttttgcttggcgcatcgaacgagggggtgaaagagtgcgagagagagaggtaggagagagatttatatttagtagtttttgtgctttggagacagttgccagtttggtttattagtccctatctttcccaagtcgtggttgggtctctcaggcaagccctaattgtggtttgagctcggatgagccgtgacttgcgcgggctcatgtcgctggcgggcttgtgagttattcttttggttgtggctgtttggagtaagcgtgtgtgttttcttgatgctacttcgttctcacgacgtttgagcgtgtggtgtcggagtcgactgctctggattcttcttgtgccagttttccgtaatagacgaaatgagtgggtttgtaatatggcggagattattgttagcagagtcagggattgttgttttgagcattgcaatagcaagtcgcgcttcgtgggatcagaggtcgaaatagagatggtgttatttgcgcagaaactatttacgtgtggatgtatgaatttgacttcggttacgtttgagggttggttttcaatcgtcttttgcatgttctaaaaaaaatcttgcagttttgttgacaaatgcagcacacgtcgcacctgaattcttgttgtggagcgca

SEQ ID NO: 115308 - DNA, 986 bp, Physcomitrella patens
  Intron number 1 from transcript Pp1s68_241V6.1 (locus Pp1s 68_241V6) derived from phytozome v7.0 (chr-ID scaffold_68; pos 1315056 to 1316041 reverse strand)
ctgacaacctgtggcaatacttggctatcaagaaggtgcagttaactactataaatgacttcattgaagaaccgactctatggtttcataacctgcttgtcagatgtgtaattgtccactagatagacgtggtgtagatgtagacagggactagcaccgcgcacgaatgttcgggaggcactgtgtctcagttttattagacggctctgaatttttgaggcttgctcagtgtctggtcattggcaaccgagtattggggtttcatatttaggatttgcaaactctactgaccagagatagggtagtttagattacatatttgtcaaacttgactttgcagagttttctttgtgatacggtgtcattgacagccatgtgccctaaaaggggatgttggtgggtacttttaaattaagtttatttgaatattaatatttgtgtccttaactaagtgagacttttggtatatcgcatctcttgacactaactatcgaggagttaggatttccaagtgcttcatttttacaatttgtgatcgggtggatttagttttaccatttcaatgtttgaccaagtgaagctgatcaccctctgacccgtgcatctgacttagcatttgctgaatttttttacgtcacgactttaaggtacttgctgctaacatttctctaattctgcccaactgacactaatttatgactatgcaagcctagaacaaggccaaatgttttgtctcttatggatacgattttccatggagcttttgacaggtggtggcttgatcttatttttctcgctccaatcaagatgatcaactcttagattcatgcagcgtttgttgcctcttgggtttggtatcgaatttagcacaagctgcacatggtattatgtattgaatagggagaaaacttgatgatctattactgacatatggtgccatattctgcgcaggttcttggcaaccagaggagcctcattggtttttg

SEQ ID NO: 115309 - DNA, 898 bp, Physcomitrella patens
  Intron number 1 from transcript Pp1s27_378V6.1 (locus Pp1s 27_378V6) derived from phytozome v7.0 (chr-ID scaffold_27; pos 2529875 to 2530772)
acatagatcctgagaaagctgacttaggttcgtttcattccatggcttgattctcagtttggatcctctcgtgctcgtgcatagttcagtgtgggctttatggatgcaacgtcgcatatgttttaaagtcatggctctttcagctttagggtctctgtttgctttttcattgggtctttatatgcacgtcattacatatcaagtcggagaaacgccaatcgactactcggaacacttcttttaagatgctacattgccgacttcgtcatgggcacatgtcccgcaattgctggagcatatcttttgcgtttccggacaatcactactcctcattagttggagctgagcttgggagaagttagctactgttcagtttcgatgttgtgtactcgttcgtggctgtattgtcttagtgtacatattattttaaaacttaagaaaatttaccgagatagaattcaagagttgcttccattttcgttgagtagcactcattcccaaatcatttcagggttttaattctacttttctgcttcctgacttacttcgctaggtattagtgtagggttttaggttgttgtgcttggtttgtttcttatactttgcaatgtttgcatcatacttgccttgatgaatttttctggttattacccgatcctttacgtgtcgattgtctcccatgagttcaccttgtctccgtcgtttgattagtgaatttgtaccaatacaatactctgcttggtagctttctctgatatccaggtgccattctttaacggtattgtgaccgatctttcagtttttcccagtattttctctcttcttgtctttgtccgctttcattccttgttggtctacttagtttaccaggagtttgaaatgtcacgatctgcagaaa

SEQ ID NO: 115310 - DNA, 476 bp, Physcomitrella patens
  Intron number 1 from transcript Pp1s117_175V6.1 (locus Pp1 s117_175V6) derived from phytozome v7.0 (chr-ID scaffold_1 17; pos 1071986 to 1072461 reverse strand)
ttcagtgtgcaatttgggctctttttgcgcaatctgtgagtgagtctttctgatgagtcactgtggtaatatatctcaatcgctcctaatgttgccattgggagcctttttcatgtcatggagaagatgcatagtttattcggatgtgtgtttttgtgtaatgtgcaggcaccctaacttagcaatcaagggagttggagaatctgcatcatacccacgttgttttgccgttgcgtcaccgagacaattttgagaggtaatctgaaaagacattattaactgtgatttattttctgtgttcaaaattggctttgttgatgacacaaattgagggaccaattttgttacataatgttgttttttgaatttttgaattttgatttttgatttattttttattttgatttttgatttattttataatatttctggcatctgcagctgctggtattgtgcgtgggcagattgttcgtcat

SEQ ID NO: 115311 - DNA, 591 bp, Physcomitrella patens
  Intron number 1 from transcript Pp1s25_151V6.1 (locus Pp1s 25_151V6) derived from phytozome v7.0 (chr-ID scaffold_25; pos 1074023 to 1074613)
cgcgcggtgcagtggcgcagcctacgtcgcagcaggtttttccatgcctggaaatcgattacggaatcagtagttgtgatgcaatttgtatggttggttaattcgtgtatagtgtattctgggaaagtttttttttttttttttttttttttttgatcgcattgatgcggttttggaagccaagcgattgtggatagattatggtggaggtagctgatttttgtggttttcattgaggaactgcttttcttacctcccattttttttttcttctgctgttcagaactccgacaggatcggttgtttgattgattcatagtatattcgtgtttttgtttttagtttttgttgttgttgttgttattgctgttgcttattaatgatctacatatcctcactttaatgtgaggctttttagtattttgtgagaacattgttgaatacggtggctgctgtcgaagttgtttttatagtgattgagcgtgttaattgttgttttgaaatttgagagtggattaaaggttggcttttgtggtgtggtaatgtgtgaatacaggattattacaagtcgttggtaccttcccagctgct

SEQ ID NO: 115312 - DNA, 543 bp, Physcomitrella patens
  Intron number 2 from transcript Pp1s10_72V6.1 (locus Pp1s1 0_72V6) derived from phytozome v7.0 (chr-ID scaffold_10; p os 473877 to 474419 reverse strand)
catcagaagattggacttacaggtgaacctccctacaaaacagggtgtcaaattgttggctttgggcaatgcgccgcatttcgtccaccaaagcagtcatctttgggagcgatcacatagttatccagaccacttcgttgccattaaagtttcgactgtgttctgagaatgggaaatattatttgtattgacagcttacagctttttctattatgagcatcgtataccccctgccgcactccaaaagtagatcacattcacatttgtagtgcacaagaacccactaggccacccctacaattcaactcaaagtggtctgtagtttactacttttatttctctttttgtttgttgtttagtatctcttaccgatccattccaaaatggactatctgactattagtttaacatctttatccatcttctcttagttcctttatttcgagagtttttgtgcggtgaagtgatgtttagcgaggatccaacaatttctgtggcatctctgcagcttttcaaggctcaaagcggtgcagcgtcgtgtgc

SEQ ID NO: 115313 - DNA, 255 bp, Physcomitrella patens
  Intron number 1 from transcript Pp1s98_6V6.1 (locus Pp1s98 _6V6) derived from phytozome v7.0 (chr-ID scaffold_98; pos 46540 to 46794 reverse strand)
ccgtagagaagttgggcacgggcaggtacaataactataatagacaatgaattaatgtttttgttgatagaataacattttatatttatttgattattttctcttatgatactttagtgacgtgttgaaaaagaatcaactagattagcatgtaggtttgttatttattgttggtttttaatagatagaagatttatagtattaattaaattttgtaccaatcctttatgtttgttgttatgataaggtggcgag

SEQ ID NO: 115314 - DNA, 964 bp, Physcomitrella patens
  Intron number 1 from transcript Pp1s8_183V6.1 (locus Pp1s8 _183V6) derived from phytozome v7.0 (chr-ID scaffold_8; po s 1720144 to 1721107 reverse strand)
ggagtggttcacggagcacaaattgcgtgcagttggtgaattcgcagtggacttttagaactttttattgctgttttggttttttttgtttgctagggggtttcttgtgtggactgtattcggtacaaggttctggatgggaatcgagaatgtgattgcaatctcgtgagagggtgtttattattttgtggagacgaagaactgtgctgcacgtttaagtggttttggagttggttcgtggatgggaaaacagagtgacctagtttatcccttcgatttttttctgttttttcgtggaagttatgtagatttttgtgtttgttcaagtgcttgctagtgttgctgaaatcaaggtcttgagagtttgatgtcagtaaatcgtattctatcgggtgaatcttgagggagcagacactgtatctcaatcatataatcattgtaggcttgtaggttcatcaatacatgtggagaattggttatctaatcatgtacagcatctatgtcgacgatagaattttattgattttcgtagtgcgtgcgcaagtttgcggacaagtacctgctgctttcgttatttgggttactggtctttatctgtaatgaattggaaattcatcctggactgtagatgaccttttttaacggagatttgccatcgcgtgggactttaaggcgacatagaacatgccttattcacctcgcaacagtccgccatccattatatttataattacgcagagtttaaaattttcagggaccaggggattccctttagatgatagctctaatagacctaaaatttactgacgtggataataaatacattgtttcttgcaatgtcttcttagtgtcaaatatgcttgattttaccttggtaatttgtacttgcaccattcattttctctaacagtcgtggttgcatgcgccaggtacactttgggcttcatcattgataggctcattt

SEQ ID NO: 115315 - DNA, 831 bp, Physcomitrella patens
  Intron number 1 from transcript Pp1s34_161V6.1 (locus Pp1s 34_161V6) derived from phytozome v7.0 (chr-ID scaffold_34; pos 780908 to 781738 reverse strand)
cttgctgttgaccaggtaaaaaacgctcataaaatccttagccttcctaatataatttctgttattgttttaggtgtttgtagacttcgtgtaggtaagctctaaatttttttgagttgtcatgttgtgcttctcttatcgggtactcgaaaaattctttcgacgacgttattttctgggtagtctgtgcaacaatcagactaatatgcaatgtttaggggtcttctgtcagcattgtgaggtagttgacgagtcgtaacagtgactttttagccttaattagcgactagctgaattttgccactcaattcaggcttccttttctttattgatcactagacctaaattaccgaccaacagagccgttcgtcttattgaatgtaaattactccgggtcgcaaatcaagaagggtaatgagtttacgtactcgacattttttatgtgctttaccgataccatgaagtcaacctacgttgctaatatttccaccacaaaagggtagataacatagatcctacttgagtgactgtttatttcacaacttgctggtacttcttttaacgaagagggtggcctcgttgaggatttgtgattcgcgattttcagtgtatgctaacgcctgctagttggctatcagatatttgatacccttcaacttagggctattttctttagccacaatgaaataatgttctctagactgtaagaagaagtttgtgtagctgtaattaactaagtagtccccggtgtcagaaaatgccggatatttgatagagacctgagatgcatcatgttcacacaaacttgtgtgtatgattcaggttcaccct

SEQ ID NO: 115316 - DNA, 836 bp, Physcomitrella patens
  Intron number 1 from transcript Pp1s25_336V6.1 (locus Pp1s 25_336V6) derived from phytozome v7.0 (chr-ID scaffold_25; pos 2352507 to 2353342)
ggaagtcctggccgagtttcctattgacaaagaaggtgagtgtttctcgccttgtagctttccgtcccctgtcagtaacgatggcgaatctctctttcacctgtcagctcactcgcgattgcactctcggcgtggaacgaagtctttttacaggatgtgcaaatttgattgccttttatttggattttcagtattttcttttcgagaataaaccttgagcgaagtggtgtgtaatgtatcccgtaatgagccgcttaaatcaatctttctcctggaatgcgtttccctcgtggcaaattttctttgtacatatagccactctgcatggattattacattactctgtcttatttctctctaagctagtcatgctcgagaagttatgattacctttcacggccgtcttatgttattttgagcttcaattttgttggagacctaccttgaagcgtatgcccgctctaattcatccgttgacagctgaaattacgtctgaagagaataaaagcttcttggtggatagagtaggaatgataatacatatctctcttcctatccctctccctcatccttttgtgtttttttgtatgttctgaaatttggtgatgtcttcctctgtttggagtccgtttgggcgctatcataggatctgcacgtttagggagtgcgtgttgtgaacatgttgtacaaaaccttcagagactcacctgtgaatatcgacaatcttctggcccagaagctaaggtttcactgctatattggtcgtttgcctactttatattatatttagggcccagttatgaattttaattgaaaccccctgcatgcagttgagg

SEQ ID NO: 115317 - DNA, 736 bp, Physcomitrella patens
  Intron number 1 from transcript Pp1s172_24V6.1 (locus Pp1s 172_24V6) derived from phytozome v7.0 (chr-ID scaffold_172 ; pos 158730 to 159465 reverse strand)
ctgcgacgcagccattccagtgagttttcgtggtgggcgaaaggattgctcgtgtgtttgaatgggaattcgggggtgaattgggtcggagtcggtggggtaattccccctggttgctgggtgcgaggttgtgagcaggtgctttgtttgctgtgcgagtcggatctgtaaagattgcggatgatgagccatattgaaggagggatgacgttttgtagttttcatttttatattttcctgaggtttctaggggtcgttatttttgtgtgctgggatggagatgagatttcccaggaatgtaaactcgtgcattggaggttaagggcttagggggatggaaatggaacttcgcgcgtccccttcatgcatggcttttgatcgaaatatgggaaaaatttagcgcgtgaatatcaggtgttgaaagaaacggggtgtcattgctctgcattttcggcttccaaattttttctaggattgcagaggagtgcttagctattgaagcccagaccttcgataaatttttgtgcaatgccagcacttgcattatgattttttaagacgggactgaatgtgagatgttttaaggatcaaattgaaggaagagagtcgaaattttaagttgacttgtcagaattcatctcaaattacacaagtctcattaagaatgattcagttttctcctgtttgcgtaaaagtaacaccaaagtggcttctttgcgcggggcagatatctcgg

SEQ ID NO: 115318 - DNA, 421 bp, Physcomitrella patens
  Intron number 1 from transcript Pp1s43_49V6.1 (locus Pp1s4 3_49V6) derived from phytozome v7.0 (chr-ID scaffold_43; p os 347563 to 347983 reverse strand)
tccgctcctgtcactgtcgagagcaaacaagtccggtatgccgaggtttaagctgcttccgtctcttgcgttgtagtattcagctccttcgcgcttagcattagttttcctctcttgcgttctaattctagtcgagtggtcagtgtggttaagtggatttctgaagttttttgtggagttggatgttgttgagttttgcaattactgcgcgggttggaattttgtttttttggacttaatttggatggtatgactgggtcgcaagggaattcgtgtaaggagcgggtgttctcattgcattcgcatgttgtttttcatagagcgtcttcttaataactagtcggtgctgcaatgacgttgtcaactcgaatgagaatgtggtgcatctgaaaacaaaaagtgctttgtttctgcagagtga

SEQ ID NO: 115319 - DNA, 936 bp, Physcomitrella patens
  Intron number 1 from transcript Pp1s291_43V6.1 (locus Pp1s 291_43V6) derived from phytozome v7.0 (chr-ID scaffold_291 ; pos 257692 to 258627 reverse strand)
cgcgagaaccagggccgcaccgcaccgcacagtgcgcatttcttccccattttttgccaattcattgtgtctctttcttaccgccggttcctttctcgatttctgttcatggtgttgtttccggcaatggcctccgtggatgcgtttttttctttccgctgtatagttcgagagactctttcgggaatgcgttggtagaaaacgagggtcggtaggtttgcggagtccaatgtggttagattttccgagtttgatctcgtttctgctgtcgtggtaatctaagctaccgtgttggtgaggaagagaggtcttagatcactcggtttggattatttagttctgttgttcttattactctggagttggcaattagtggaacgtttctgtcttatgagaatgtgagtttcgggaatgtctctcgttggagtatagaaacagggacagatgaagagtgcggcgaaaatgtatttcttgtgcaagcatgcttctcgtgacatgtccatggcctttgtggaattcttttgatgcaaggacctgagagaaatggccaaatctatgtctatgatagtaagaaaaactgacagcatgggaatttatgaactgccagtctttgaaatccatcgtggcttgcgcaatcgcaagtgatgtgggctgagatgattgacaatagaaacgcattgttgctcaggtttgttttgtgcaaggaagagtacaatgtggtgccatttttatttttatttttatcattttaatctttgtcttcgtgttttattctattttttgttttattttttgttatcaatagaaaaaattgtctaggatttgattgaaagcgtgtcgtctgaaattgcagtctcgcaatgcaagttctcttctctcatgatggtcgatttttgtgcagtccctggtgcgtcattcaattggcttcaacgttcc

SEQ ID NO: 115320 - DNA, 1034 bp, Physcomitrella patens
  Intron number 1 from transcript Pp1s25_198V6.4 (locus Pp1s 25_198V6) derived from phytozome v7.0 (chr-ID scaffold_25; pos 1301997 to 1303030 reverse strand)
tgcatcagctttgccgtccatcgtgttttgtttcggtaaagagattgttgtcgagggaatgttctcagagggccttagacagctgtgattgagtgctctggttatagtgaggtgtttggatatcgtgataaagccttttctttttcttttctttttatatatatgtgcatgtatgtgtttttgtgtgtgtatgcgtgggagaatgagtgtgagagtgtgttctattcggtgattcgtttgtaatttctttttcgttatgttcgggttagctggttttgataattttttggagagtggggaatgagagaaggatttgtcgccgaactgcgcagtgatgtgcgagtcgaatttgtgtaaactgtgacgagttttttaatggcatagaatgtgggcgcgcgggggttttattagctttacttcatggtctttgtgcttccgatttacttttctccgccaggtttttatcctgtacaatttgaattgtgctatatgatttgtgtatagaatcggccgggcaatcagattcgccatagccttgttgattttgaggaagacttctagccagcacgggcgaattcttctgctagagagattataaggtggtcttcttctgaattttattctcttgaagtgctgcaatagattctggcaagtctgtttccgatttttccactacggtgaattccttacctgtctattttcttcgtgccgttagtctctctcgatgatctttgtgaacttggcctacattgtgtaatattcctctatgaatgatgaatgagtatttaaattgaggttctctttgtccatattccagctacagctccttagcacttgtgtctagtccaccgggaatcgaattgccttagaagcatactgtctgttgccttctggcttcgctttggtgtgccctgagtttgtctgtcttaagctcaacgaagggactcatctttcctcgaagtttaattctgaacgctcctgcaatgtcaatgtgattagtcttcacttctcgttttgtgcggagctggtactcc

SEQ ID NO: 115321 - DNA, 607 bp, Physcomitrella patens
  Intron number 2 from transcript Pp1s183_17V6.1 (locus Pp1s 183_17V6) derived from phytozome v7.0 (chr-ID scaffold_183 ; pos 151452 to 152058 reverse strand)
ccaaggttacaatctctacttatggaccctcccttttgtgcgtcagcagtgcgagattgattgaaggatcacgtctagttctatgggttgataagagatgtagattaccgtggcagggtgtaaagtgcatttatctgtaatagtctgcagtggcttccgctggggtacatatgtttttgtaaataggtccttaacaactatttacgttctgcgtgctgtggtcaaagacatggtcaaccaggtgctacgaaattgtttggatgctaattagttcaagcaattggttacggatgatgttgttttcttccaggtggttcttcgtggaattttggttttgttgacactcgatgttgttccctcacccgtattctttcttctctcaatgcaccttgtttcggttatttataggtttcatgattacacgtggtggcaggtaatgcagtgctgattaggtctgtcctaggttcatatttgtattgacctgattgtgcgatcagtatcaaaaccctaattacctcaaagcattgaaagtgttgattgtgtgcgagagagcacgtgctaacgctttgttgtcgtgtataggtcgacggtatcgtctacttggtag

SEQ ID NO: 115322 - DNA, 958 bp, Physcomitrella patens
  Intron number 2 from transcript Pp1s91_39V6.1 (locus Pp1s9 1_39V6) derived from phytozome v7.0 (chr-ID scaffold_91; p os 233790 to 234747 reverse strand)
tggttgcagggatatcacgtcaacttgttgtttaggtattgtttcttcccatatttgttgcgagttttcctaccgatgcaatctttgaactgcaggcatttggtaattccattcgtccacaattgcgccacaggtcacagcaaaaatcaaacttcgttgcatagttctgtggtcataggtctgcttacgaatactacgtcaggtcaaagcttatactgtacttcatagtagagtgagcgtttcattcaaatttatttccatcacctttcatcaattcggcaactttacgatacatatccttgaggctcgaatttcttcgatcatggagaattttatgtctgacagacccgttgcaagaattcgagtgatcccgacttagtagtcatttggtattaactcatacataattttatcgtgtattctgtcggttgctgttataattaattttcaggttttgggccgtattttctatttaacacatttattaccctcttttaaagcttgtagatagtctccatcagttcaaaccctggggttcttgtgcagtcacccagacatacaacagactggtttcagaaattctctattcctctcctagtgtccttgtcaatgtttagtacctactcttgttgatcttgttttcatttccttgacaataaagcttcatgtcatttttggaaatatattgcccaaagtgtccttggatctcttttagttattgtatgccttgctctggatgtgatcttctgagtcgaggcgattagttttatgacgttggaattgctcctcgcctcgagattgaatgtactaggatcagttagaatgtatgtaccgtcatcggttcaagtatctactctcttaatgattatctcacctcagatttagtcgctgcactttgtccttggtgtttatgtgttcttaatgcctgcagataggttattgtgcggcgagaaaaagc

SEQ ID NO: 115323 - DNA, 664 bp, Physcomitrella patens
  Intron number 2 from transcript Pp1s25_216V6.1 (locus Pp1s 25_216V6) derived from phytozome v7.0 (chr-ID scaffold_25; pos 1394597 to 1395260)
attttgatttcgatactgaaacactttcggacatcgtaaggatttttttttgattttctactttttaatcttggtgttgtgttcgtgtatgtattcgagtttggggtgtgtttgtggggatgcgacaacggggtcgacgagtgtatcttcttggttgcggtatataagtgggcactcgttagggttttatcaaagtgtattgattaagggttggtatgatattagctacttagtttcgcagagtaatttggatacgaagttgtagtacggtggaaaattgggttaggttgaacgtgcccttgcatgtagtaactgtgattttggtatctgaaatgattgcttgcataccgtgcagtatagtgtgtatgtggctgaagttagagttttgggcttcaggcacgatttgtgaattttttgcagaatgcagtagtataaaagcctgggtgaacatcaacatgtcctggagacttaattcaaattgtgtagttttactggtggcaaaattcgaagatgggtttttccaattcagattgtcatatcttactatctggaccatcagggtgatgtcgtcagaacaagaataatgttgacatcattcagagatattgcatggacacattagatgtttttttaatccacgggtttcttgtgctgtcttagatcc

SEQ ID NO: 115324 - DNA, 1051 bp, Physcomitrella patens
  Intron number 1 from transcript Pp1s31_68V6.1 (locus Pp1s3 1_68V6) derived from phytozome v7.0 (chr-ID scaffold_31; p os 370850 to 371900)
tccactctcgaaatcgaagcgcgtgagtaagtatctcgatttctttcctcgctctaggttttagattagtctgccttttgttgcttgcgcgtctctgcccttgcggattctggatatcattctcttgggcagcggcttcatttctgacattggcctggctgtctgcatttccttgtaccttaaaccttataaccttataaggtattctcttgctggatttcatgaggagttttggcgggacattttattttaattttgttttgtttttgtttttatttatttatttatttattattttgtttttgtttttgttttgttttgttttgttttgtttttttttttttttgtgtcttttcggagtcgacgttcctccgtgaagttttttttattggggttcagtgacatagaatctacgacgatgtcactgtagtagggctcgatcgtttcggtttacggaagtgagtgttattgtgcaccaattgggcagttgtaggaatgcactgcggacgtgaacctgtagtttttcttagttgcatctgtttctgttagcttagtttgtgagtttgattcggtttagcggctcgatcaaaatgctactacctagttccctcgttgttccagcttcatcgttctgaagttaattgttgggtggactcaaagtaaacttccttaaagttaatatcaacacgcttataatatcgatgatacctgaagaaagttagttttgaggactttgtattgagaattattttgtaattgtggacggtttatggaaattgaaattctttttaaggtcgcgtacttaaagcctgctgtgcttgttacttcgatgtcagtccaaatgacggagagccctaatgcaaacggatgatttcattattattcaaggtcaataaaaatgaagtagttcatctctcgtagtacgatgaaacagagcatttttgaatttgagctagaattcggtggatttctcctccactgtgtgtggtctaaagacctttgtggggactgtgcagtgtcattaagatagtgctgcagttctgtaaagaga

SEQ ID NO: 115325 - DNA, 879 bp, Physcomitrella patens
  Intron number 2 from transcript Pp1s34_343V6.2 (locus Pp1s 34_343V6) derived from phytozome v7.0 (chr-ID scaffold_34; pos 1723909 to 1724787 reverse strand)
gagcttgctccggaacaggtagtgtgccgttttagacttgttttattttattttttgatttgtgttcaacttggtttatcccccataagtttttgtttcgtgcctgtgtgtgtgcgtgtgtgtgtgtgtgtgtaaatgtgtgtatgttagttttaaaaagtgctttagttcattgatgtctagaactcaagctagagattttttttttttttttttttttttttttaatctttatgctatgagattcacgattgatggactcaaggtgccagtttcagtttcctcggagcaacttgtgacggagtgatagtattttttgttttattttttttcagttgtcgttgtttttgctgctgctgttgttgtcttttactcttcttttcccgtggcattgttccctgttggcactgtttcagcggtagacgtcttggacagtacctcaggttgaacagttttggtgctgttgactttgagctgtaaatggctacaagcgtagcgtaccttagtaattgggacgttcactttctgcgtagaaatgtagtgtcttcttaatggctttctgtaggttagctcaagtttcgaaattgtcgatgtcagtaggagcaataacatctttagtcttctgtcatcttatgctaccaacaatagttaatatttatcgtttactatctcagtgtacaataccttcctgcctcagcttgaaaatgatttgagagcatcagtaagtacgtatttcctttttggtctgatattctttgtatatacatacatacctatatacatatatgagagcattgtagtcattctctgcacgcgttctaagtgtctctacttcgagtaacaggaagatcttgcttatttacatcaacaattgttttc

SEQ ID NO: 115326 - DNA, 447 bp, Physcomitrella patens
  Intron number 3 from transcript Pp1s68_29V6.1 (locus Pp1s6 8_29V6) derived from phytozome v7.0 (chr-ID scaffold_68; p os 130194 to 130640 reverse strand)
tttcttcaactcaagtcatactacaccgatactaggtatgcttttactcttttattctgataattgtaggattaacagcccacggtaagagttttagattttcctgaaggacgaagtttgtaattgtcagtattcttatcttcaaatttgctcttaggatctcgtctttacgtatcgtactttgaccacatattcatttgatgattttttttgtcggtggtctatttgtttctttaaagatgatgcaaaagcccattgctcataatttatcctgtttagtctgtacgaatatcaatactcctggtaagtttcatataaattctttatgtattacatattcgtctgagaactgaaattcacatatctgtttgagtttggtcatgtttttagctaatcagttcttcgattgcaggggggtgattcctccgtccggacaagagtatccca

SEQ ID NO: 115327 - DNA, 248 bp, Physcomitrella patens
  Intron number 2 from transcript Pp1s515_4V6.1 (locus Pp1s5 15_4V6) derived from phytozome v7.0 (chr-ID scaffold_515; pos 52985 to 53232)
gtaggtgtggcgcagaataggaagtttgtggagttgtaagctgtgacctcttcagcatttgtagcattaaattcgctgcttgtagtggaatgtgcaggttttgtttgtgcttacgcgttcttttggttttgagtgatatttattttttttctctttttcagtatccttggtgtgcgccgtaaggtgtggttttgttttaaggtggccttgcagtgcagaagacccgcgctggggactgagattttgtc

SEQ ID NO: 115328 - DNA, 231 bp, Physcomitrella patens
  Intron number 2 from transcript Pp1s8_313V6.1 (locus Pp1s8 _313V6) derived from phytozome v7.0 (chr-ID scaffold_8; po s 3279947 to 3280177)
cgtttgattatcgggtatctcttttcaatactgaggtatgtccttttatgtcaattacgattaagtttttgtataattttttgctgttttcttttgatcctgtcctgatttatagcactctcttgtatttcatgagttgtttggagttgactttgacatcttactgcttaagacgcatctttctgccttcttccagttgtcaaggagaagaatacacctagcagaactgca

SEQ ID NO: 115329 - DNA, 762 bp, Physcomitrella patens
  Intron number 1 from transcript Pp1s152_87V6.2 (locus Pp1s 152_87V6) derived from phytozome v7.0 (chr-ID scaffold_152 ; pos 477592 to 478353)
gcctgtactattaccccctctttttacctttttcttgttttccggcagtatagtttgttcatgatctgttaattccactcgtcgtttccgtttttctcactaaattggtgtataggaatgtgcaatcagttgagattcgaggacgttgtacgaggatttgagcagttttgtggtgtggtatcgtgtgttttggtgtgcttgactcagcgtggtagattttcagaggacatttatgctagtgtattgttttgttgtggtatttgaatggccatttgaaggtgtggttagctattgtagtgaatggctcctttcattgcctttcgaagaagattttagcatttcggtatcttggtgtcggaggctaaaaacacgcgtgagagtttatcaagtgacttcatattgctgtctcagttttttcaatggtctgtatgggtttatttggatgagttgaccagcggtcttggtgaatcaacagtagtaagtgtttgtcggtggtattcaaggaagaaaagcaggaactatttgttcgaagttatgcggcagggttttcgttttattttgttttaaactcttgtgtagggtttgagattttagaattaaattcaacagttgatttttggatttcggcctgtttttttatcaccatgtttgaattgacgtggaatggatttcatcatttcttcagttagtctggaactggctctggaaccgaggtttttgtttgcaggaggttttcatcagcttcagtatttgagtcccagc

SEQ ID NO: 115330 - DNA, 653 bp, Physcomitrella patens
  Intron number 2 from transcript Pp1s34_107V6.1 (locus Pp1s 34_107V6) derived from phytozome v7.0 (chr-ID scaffold_34; pos 565714 to 566366)
cgcaacgtcaagggacccgtgcgtgaaggtaaactaccttatcaagttcgatttttgtaagattttctactaagaaagatagaattttggaggaatgaggacctacatgatgttgtcatattagatatctatggggttacttatcacctcagtcgtgtgcatttcgaatgtgtgtgaatttacatagttcggatcttcgtgtgtcaccacatgttttctctctcgctcaattctgtgatgaagcgtcctgagtctgaaactacataaatcagtgcagaactacatcttgtcaactgaatttttcctccttatgtttcatctttacttcgtgcgattgtgatatctatggtgggagacatccgatgtatgtgatgacgagggttttatggtaatgttgcttgcgtttacacacttgaactaattgtcgctgcagtacgaaattgtagttcgtagttctcttaccgacagcccaggaattcgttttgttatatgtcttccgtattagctattttttcatggacatggggaatattttcaatgttttaggagttcatgcttagaacttgaatgtgctcaatcaaattgtctttgttaactttattctctatgactttgcaggtgacattctgactctcctcgagtctgagcgtgaa

SEQ ID NO: 115331 - DNA, 728 bp, Physcomitrella patens
  Intron number 1 from transcript Pp1s273_60V6.1 (locus Pp1s 273_60V6) derived from phytozome v7.0 (chr-ID scaffold_273 ; pos 513008 to 513735)
ctaaggtacatcgtgctcatgcctcttcacttctctgttttttttttttttttttttttttttgttgttttgattttctcagtagtacaatggatttctgtgttttagtttgctggtctctgattcttgaatttcgatatcattaactacaagctgcagtatctctttatgtttaggttctataagagcacggattcgttgaattcaccgaccttgaagctaattcaggattcatgcagggttttagacattgttgtaagatctgtgtgaatccgtgttactcgacaagcatgaattatcgtgtcgtaccttcctcgtgatagtcgtgcgccagttctccttctgcttgtcctactttgttataataggaatcagacgccttttcaataatgagctgaatgaaattgttaattggaaagatattttgtatgttggttcattgtttctgcttcgctcttctgtgagcaatgtgttcagcttctggcgtataaacctcaatatttcatgtttagaatattcttttactcccccgaaaccagcatcattgataacatcgtttaggttggtcaaggggtaaaattgttgattagctgatagatttttattagtgttacgcttggcatgctgtaagatgtaggatttctgcaccatcacaagtctttttgaatggaaggatttctcgatgtttggtagaaaacagaagaagtcgcggagaagaaaggagaggc

SEQ ID NO: 115332 - DNA, 993 bp, Physcomitrella patens
  Intron number 1 from transcript Pp1s34_56V6.7 (locus Pp1s3 4_56V6) derived from phytozome v7.0 (chr-ID scaffold_34; p os 329996 to 330988 reverse strand)
taatctgggtggtcagtttgtggggcagtgctaaggtgaggatatggaggctctgattgtgtaccaggagggtattgcctcttacgctggaatttgcgaattgtgtgcttttgaatcccgctggttcttccgcccctgctttcgctttcgtttttctcgtcctggattgtaggggaagcgtacactggaggttagtagattgcgtcgcaatttgtgttacttatagaatgggtttgtctcgtcttcgtaccccgtctgcgtcgcgcaaggagattcctcgcaggacatgtgcgacgggtaagggcacttgctctaaccgtagtgacgtcgttgtccactgatttgtatctcgtgaagcagttgaaagaatgacggatttgaaggatctccttcagaggtcgagcatgggcaggagttgcctgtgttgcagctatgtttgttttattcagctgtagctctctgcacccccacgagaaccctcgccctgctcgaaattcttatttgggcgccatgatttggcttgcaaatgatgtcgtctagttgtaactctctgtcttcgatgcacactcatcattcctttcgtattgtttttgtcttttggtttttgtgttttgtattgtttaatcgtgcctacatctatgaccttcctgtgccactcagtcagactgagatcgaaaagattttagcaatgcgacatggtcgggagtttgagttggtaatgaatcggggtgattttaacttgttttagagttttggcgggcattcatcttcttcaatacattcatgacccaacaaccggtactcgttggtttggctcaataattatattgtgaagctggaatggttctgagcctgtgccaagattcccacccgcgatatggtgctgtatttctccgaagttgttcgtttctcattggtttcagtgtaggcacacttatctccttgtgcgcttgtgcaggtgcttttagtttgcaagggtcgagggttttcagc

SEQ ID NO: 115333 - DNA, 374 bp, Physcomitrella patens
  Intron number 3 from transcript Pp1s137_122V6.1 (locus Pp1 s137_122V6) derived from phytozome v7.0 (chr-ID scaffold_1 37; pos 447510 to 447883 reverse strand)
ttgccaacctccaaaaaaagaaagaggaggagaaggtaagaacttcagtacggtttggatatgtcatgtggatggttgagattttaatgtctttatgaatgatcgttcttcttgagcagagaaggcatagcttacgtgtgagggtttatggtgttttattgtagtgatcatcagtgtcctcaactacatttgggacgtttattattttctagccatttttctttgtgaattaaagttgtgatgagtagtcttctgcagataagttcagaacatggtgcttttctagacgggtgtaggacttcacgttcttatattctttgattttttttccacgtacaggccttgaaggaattgaaagcgaaggcccagagtaa

SEQ ID NO: 115334 - DNA, 354 bp, Physcomitrella patens
  Intron number 2 from transcript Pp1s108_69V6.1 (locus Pp1s 108_69V6) derived from phytozome v7.0 (chr-ID scaffold_108 ; pos 410731 to 411084 reverse strand)
gccacaagtttcatcttcacaaggtacttttttttttttttttttttttttttttgtgtgtgtgtatgtgctgtatctcatccatatgaaattcatagttttagcggtggctattataacgttcattaattcgttcatttatttttggtttttccttattatttgatgtgttgaatttcttcttgtacatgctccctgtatcgtttatgctctacttacaattagggctacaattaattaggcccccaaagttcattttttatttcaaggtatcactatattttgatattagtttcatcaagtgcggtgaataacatctcctgttggctgttgtaagtttcccttgttggcgaa

SEQ ID NO: 115335 - DNA, 665 bp, Physcomitrella patens
  Intron number 1 from transcript Pp1s91_219V6.2 (locus Pp1s 91_219V6) derived from phytozome v7.0 (chr-ID scaffold_91; pos 1251210 to 1251874)
gattgttcctttgtgaaatattagtcgacttgaaggtgatcccttttgcctaggttctccgttgttctctgagtgttgtttttgtcggtcgcatttcggtgtaaggtcttgccttgtgattctcatctcttttcacatgtgtgtagattaagattgagttactgccattcttgcgagcgaatctgatgtacatgcttcaaattagaattctctgagtgagtttgtcatctggttgttattatcgtgatgtggaccatatggtgctcctaaattgcaaggattttaagtaatcgcgaatttgattgtggatttctgttttaagcctgtgttttgcgtgaagatcttgcccccatccggtttttcatggtttaattctactgcataatttggaaggaattgctgcacagcgtctttgtatttaatgtcggtatttatgctcacctgattaatggatgggcgaagtggacgttgaaacaaaataaagacttcagtaaccctgttgattcgtcagtgcacccgataactcaagtcaagttttaggttaatgtgtgttttcaattttgcattcacatttcaggctttttcgttggttgcggtctgttgaatctgcattacttctcttgaatacagatatcatttgccatcacagcaaggagatcctgcga

SEQ ID NO: 115336 - DNA, 859 bp, Physcomitrella patens
  Intron number 1 from transcript Pp1s25_334V6.1 (locus Pp1s 25_334V6) derived from phytozome v7.0 (chr-ID scaffold_25; pos 2348421 to 2349279)
caaaaaaacgaatcggaatccgttggttctgtgtggtatgctattgaatcgtttctgttcatcttctttgtggtggattcctcgctatacaagagaatttaggcatttatagtgcacatgagtggaggtattactggttttcacaatcgacctcaattattatggttgctccgagataattttgagtgtcgatccgcacacctcgagatttcggaattggtgatttgctgcgtttgaaagtatggaaattctgagcggtatcagttgatgcaattcggactatgtgggttctcttagccttttctggctcgatgttcggttttgaattgtgttgaagagtgttctgtgcttctttcatggggacactgttcatgtgccgcagtccagatttgaagcatgtcaaaaaaatagtagtggatacagtgtattagttcgccttcttacattcaatccgggttgcaggtgcctggtgagacattcagtgtaagaagatttgactactactgctgatggtgtaattcatctcattttattaatgctgtaatgttggagatatttagattgttaagctgagatttttttgtgggttacttcttagttgctttcatggggtttcagcagaaggcctcaaactttctcttgaaactttctcttgacggcttggctgccctcgacacatgatctccagcgtagaagagtgtttgattcacgttagaaagaccatgtggtgttattcatagacggcggttacgaatcttgaccgaactaatattgctaaaacatatgataaaagcttacgcttgacagttgtcatcaaatgacaggggcgattgcaactgccggcgtgttggtcgctggt

SEQ ID NO: 115337 - DNA, 699 bp, Physcomitrella patens
  Intron number 1 from transcript Pp1s10_398V6.1 (locus Pp1s 10_398V6) derived from phytozome v7.0 (chr-ID scaffold_10; pos 3113732 to 3114430)
agcaagaaaaggtattactactttaatttcttgttttactaattaggtagatgtgcagaaacattagcatgccagttggaaacaattgcatgttaccactttttcagtgcactttctaacgttcatttctaaagcgtattgctaccaggtagtagccatgatattgaagtcaaacaacaacgaattcctttggataagagagaaacttaaattgcttgatatgatatctgcgtcaagtttccaatgtcaatcttccacagcatcgaggaataggaacttggagtacagattgtgctgcaaaggcgataccatgttcctcaatcgctaagtcttctttagctcacatgctgtaaatctcatgacgccgatttaagtggatcaccccacattgcaacaaccagctcaggttgtcgccgacacaattgaggtgcaaagccatcttgtagagaacttgactccagaagaggttcgctgagatgttgggtgcctctacttcattcggcaccaatgagttctttacaacgatgccaatgattcccaactccaagtgttttgtatgtgctgttataaattggctttactgcaaaaaattggtgttgccaatgtggaatcgagcactactgcagacagctggttctgaaaaacttccgggattgtaactcagatcaagtaaagctgcttggctgcaaggtggggtcc

SEQ ID NO: 115338 - DNA, 741 bp, Physcomitrella patens
  Intron number 1 from transcript Pp1s98_66V6.1 (locus Pp1s9 8_66V6) derived from phytozome v7.0 (chr-ID scaffold_98; p os 361402 to 362142 reverse strand)
gaagtgccgggaagcttgtaaaggatcctacagaagtgagattttgcggtagtcgtcttgaatgggttttttttgcaggatgcgtgagtaggattgccttgcaattgtgatagaggcgattgaggtctcatcggtggtgttttcggagtggtcatgtggcgggaaaattagtatggtgcacattttaggggatacttgttggcatgtttttttgtttggacttcgtgcacacaagttgtagtttgcgttagagcaagcgttggttttgtcgccagaacgtgcgggtttttggtttatacttggcaccagtgttgtagttaaatgtgtagcacaagtgtttatcttctttttgtctttttttttcttttttcttccttcaggtaggtctttcgaacggggataatggtgtaatatattttgaagtatttatttatttatttatttttatttgatttggtcaaacttgtgcttggagcatcttcaatcctctgtcatgtggcagtttatttgaagaactcagagctgtatatgcgtgagtagagttgaggaggggtatgatggtttttgtcgtggcaaacaattacagcactttaccggttcaccgtcaacacttagttcgccattttgtattttacactacctgtgtaatcatgtgttgtgcagtcgtaagtatgttaagcagagaaccaggatataatattcattgcaaattgtgtcagtgcaggtgatcacattggctgc

SEQ ID NO: 115339 - DNA, 1013 bp, Physcomitrella patens
  Intron number 1 from transcript Pp1s8_66V6.4 (locus Pp1s8_ 66V6) derived from phytozome v7.0 (chr-ID scaffold_8; pos 528020 to 529032)
tttcgctgcgctgagacctccggaatcgagcgcaggtgagttctcgaggtgttcttgagctgttgtcatgggagggtctgtgataccggtttgcgaatctcgtcgcccccgcctcgtttgtggtgtgcattgttgatggaagtgcctgaaaagctcgcttcgtggcttcatgtagatttgattggtgaacactgactgtgatgcgcctctgtgacgtgacagagatcttagtgctcgacgtttgttttctccgcataggtacatttgaaaaaaatgaatcgattctgtaatacttgtgtggcgctagtgttgtatttcttgaactcggtgtgtagcaaagtagccaggatttggaatgggaatgaaacgatctgtgcaaaattgctgccgttgaaattttgcgatttattcgatggacgagtgtgagtcgtggtggatcaaggcagttggtcatgtctacctcagctgaagtgagggagggggagcgagagagagagagagagagagagaggttacgctatgtggctagttaaaagtctgatatgttttgtgcggccaatggatctgattagagctcgaaaggacagtgctcaaacagtttcgttttcagttcgatatattccttcaactgtatcaaaccttcgcgacttagcgccgagatgcagagaaagcaattacaggaagtcagtttcgtcgacctataatgtatttatgaaaacatgtcacgaaattgacttctaagtgtacgaattccttatcattgacattactgaaagaagcgctgtacctcaactctcatattccagctttcttcagagttgttgaatgcacatttcgatcgccgggaaagttgcgctgagtttattaatttgtggagttcgaatcatgtgggagtaaccagcatagatgggcttgtctcagtcgaagctctcacatctggattttagtgcaatgattgaaaagtggattgcattggcgcattttgcagtataggggtgagtattggaatttgt

SEQ ID NO: 115340 - DNA, 316 bp, Physcomitrella patens
  Intron number 2 from transcript Pp1s8_66V6.4 (locus Pp1s8_ 66V6) derived from phytozome v7.0 (chr-ID scaffold_8; pos 529279 to 529594)
ggggggcctactaaaggtttgttttcgaactagaatcaaagacactcttgggtctggatcctcaatccgggctaaactttgcactagcttctttcaatagacggattctttggttatgggatcgatcctgttgtcgataaatgaacatttcaacagcaaagcaatatctctatttagaggaggagtctgtcgaattccagatgtgcttgtgcagctgaaatgcttcaacaatcttcattttttagttttttaattttgtgtttttggcggtaatcatgtaggtactcgcttccggccactttcttttaacttggct

SEQ ID NO: 115341 - DNA, 779 bp, Physcomitrella patens
  Intron number 1 from transcript Pp1s52_33V6.1 (locus Pp1s5 2_33V6) derived from phytozome v7.0 (chr-ID scaffold_52; p os 492684 to 493462 reverse strand)
ctgcaaatctttgccatcctttgcaggttagtcttgctcctatttcacaagttctttttcattgataagtttcttctcacttcctagtcataattgcttgtagtttagcattcagcacttgtttgcggagtcagggtaagacaatcaatattgctctggtcgtgtgggattctggcaataacctgatgttcttggacttcatacaaggcttagtatattgttatttcatctagtaaaggaagtgccgaagtagtgtgtcatggcgggttttattgaatgtggtaaacattaccttcaactaaaatttgcgagggtttatttgcgcttcgtatcattcgcctttgagtcatgactgcacactagcacaatatattcgtgaatttagatttcagattgcggaactttaaaactggaactccttgataatgctctattactctttgctggaccttcaacctagcttgaaccccgctattctgtatttagcttatcattaagctggtcccaggaggtttctggtaactccattttcgtgagtttaggaatggtgacgttgctagggaacatagacaagactttcatactggtctttgttggatggttttgacaccttatgtgtgatgccacttggtctgttttgttgtcaagaatactttacatcgggtatcttagcaaaaaaatatacattacgaagggatgcctcctgaagaaatggccaagaactaagggttatggctggggcaggtattacttgaaggagcatctgatcagaggatact

SEQ ID NO: 115342 - DNA, 749 bp, Physcomitrella patens
  Intron number 1 from transcript Pp1s40_287V6.1 (locus Pp1s 40_287V6) derived from phytozome v7.0 (chr-ID scaffold_40; pos 2232043 to 2232791 reverse strand)
tgcacgttgcggagtgcctatttgcgtcccgtgtggttagatcttaactgttcagcatttttctccacttcgttcatcgcttttgtagcgtgtgaggtttagtgccggtatcctttcgtgctgcgtataggaatgctgttaagcaatttccattggatcctgttgttcgagaaatagtcaacgctggctttgtttctgtttctcgcttctgtttgggtccagcatgaatataaattcgcagaccgcttctgagtgtgaaatgattgcgacgttcgtactcctacgacttctggtgcgacgagtttaattatttgattaaaataaaacatttggttattaggtgatttttgttcgagaaaaatcaggttccttgtcgataatagggagggctttggctgtgaattaaggtcattctgcgggaaattctgtgtccaggttcagtcagtagactcaaagagcctgacggcaagaacagggcacaggacatggccatgccttctcgtctttcaagtagtggcctgtacctgcagaaacactgtcatcgtacagtacatcttgtttgatcactgtgcgtttgtcgacagataacctggaacatacctgacaagcggatacatatgcgattcatagtgactaacgttgcactggacaatgagaagagcaaacctgacgtgtctgcgtctgacaaaatgatttcaccactgttttgagaagatacaagaccaaagagctaggaggcccgaccttag

SEQ ID NO: 115343 - DNA, 678 bp, Physcomitrella patens
  Intron number 1 from transcript Pp1s31_58V6.1 (locus Pp1s3 1_58V6) derived from phytozome v7.0 (chr-ID scaffold_31; p os 330700 to 331377 reverse strand)
gtgtcatctggacgctcaatcctcgaacaaggtcattgcgattcctatctctattacttgattgttaccatggtggttatgcttgatgccgtcgtagaaatgaaaattcaacagctgcgaaaaattctaacgtgtgattgcagaaagcacatgtatctgcatgcatgttctatcaaagtgcagaccacttgccatgaattgaattggaacgttttggaacatataggcttaatgccgtggctcacgtttgaaaggaatgaaaaacttgtttctgctcttgacttcgaattctgcaagtgaccttattcaaaagatgaatttaagtgtggaattggcttttcaatgaatgaatccactgaggaatctatttgatcttgtggggtcattcgaaagctcgacccccgctggatattaaaactgagaggttgtcgttcttgacagtcacatgaagatatatatatatatatatatatattttttttcctgtggtattttctgtggaaaatgcagcggcaggcacggatctttgtactccatgtatcaaacgagaatcatggttttattttcttagtctcatgttctagatttccgccaaagatgtgacacaaactggacagatatcaatgtattgtcgtggattcagggtcctcgactggacgaggggatactttcaggtta

SEQ ID NO: 115344 - DNA, 653 bp, Physcomitrella patens
  Intron number 2 from transcript Pp1s267_14V6.1 (locus Pp1s 267_14V6) derived from phytozome v7.0 (chr-ID scaffold_267 ; pos 117791 to 118443 reverse strand)
cttcggattggtgggaattctccgtcttgttgcaggcaagcaatactgttctgttgagaattttagtaccccgtaatctgtgttcgcttagccgattttatgaacgttgtgatttttattttatttattttttctgcacttttcagtatgttagacgtatagatgctgcaatcgaatgacaaggattaagcattctggtcattttgagatatggatttggattatggcagatgtctcaatttagtctttcaagtgaagagaagaagtaaagttggaaaattaaaatatgaatgtaaataagagcttcttcatatcttgcatatatatatatatatataaatataaatataaatatataaataaatatatgtgcggaatatttttgattagatttaggtttttgcatttatgtcaagagcaacagcgataacagttgcaccaacatgcttgaaatttagacaataacattgaatggcaattcggtgatgttaatcaaagtgtcagaacggccagaagacctttaactgcctgtctaatctgcgacgtggacgagataaatgccaatgcatatttgcatcatatagtttgttcgtagtgtgtcgaggctgcgttgatattttatgaagcgatgtatatggtgctttcaggtgccc

SEQ ID NO: 115345 - DNA, 695 bp, Physcomitrella patens
  Intron number 1 from transcript Pp1s86_23V6.1 (locus Pp1s8 6_23V6) derived from phytozome v7.0 (chr-ID scaffold_86; p os 229993 to 230687)
acagagatcccgctcacattagcagataagacgaagtaatcagtcctttgccttcaatcatggtatcgtcttcttgtgcttgcactacttatgcattttctcagtgtttgtcaaatccttgttacaacggttaaggagaaagtccaacataatccttactatgtgactagaggaactctctgtatatgagtccccatgttacgcactttggataccgccacggcacgtcacctctcgtatccaccatcaatttttaagagtttctggtatttccctgtcagtttaatcccacgtcaaccagctccttcatggagtttcttttattgctcagcagattaatttggtacccgcctcgaaagaaatgaccgaggacataacaagcaaattcagctgcgctatctggtatgaggatctgcgatattgggttgtcatcaaaagaggcacttggttcgatcagaagtggcgcatctgaaactccacagtttgatgtaagaatcttgacagaataatatgcctagtgctacgtgcacgactgtttgaattgcgcacacatctacgcccaaatcaatgatccaaccttcttctaaatatcgctcgcatccaccctggatttgactgggagtcaaaccttcttatcttcttggtgtcactgcgattcaggaggtttggtaatcttggcacctggactggaaggc

SEQ ID NO: 115346 - DNA, 691 bp, Physcomitrella patens
  Intron number 4 from transcript Pp1s117_139V6.1 (locus Pp1 s117_139V6) derived from phytozome v7.0 (chr-ID scaffold_1 17; pos 925693 to 926383)
agtacaaagtaaaagctgaagctgctcgtcaagcggtagtgcaaagttgaactttcttgttgtacctaacataggatgtgtttgttcattctaaagaaattcattggcaatagaaggaaagggtttcttcacggacatagacggaggatttatcgtggtttgtttgccagacaccttgaatttctttgcatgagttggaaggatttaggtgggaaagtgcatcacacaaagttaactgaaattctgagattttgctaccaagatatcgtgacttgcagattactgttggggcattaatgtagtctattttacaaaactgcattcctgtgagtactaacttctttaaatattacgtctgctctccgccacacccccccccccccactaaatacagaaatgaaaaacaaaatgaagggagaagaagaaaaaaaaaaaaaaaaagaaaaaaaaaaagaaaaaaaaaaaacatatgtcaggttttgatgagtgatactcttacaggacatgttatcgtttgccagattctaacaatttaagaggaatgaatgacgtcagctgaacaatgtcatttggataatcaatgtgtttctttgttgtaagtaaccccgcattgcctgcactcaagcttcagtacaaaatcaaatcccatgttgtagacaatcgtcaaagtgccgaagaagctgttcagtgc

SEQ ID NO: 115347 - DNA, 539 bp, Physcomitrella patens
  Intron number 2 from transcript Pp1s336_25V6.2 (locus Pp1s 336_25V6) derived from phytozome v7.0 (chr-ID scaffold_336 ; pos 82817 to 83355 reverse strand)
acactgcttcaccttccccagccaagtcaagccgagtaagtttgttttttttctttttgtggatctgcaatttgtaatgggtttgcggcagacaggggcgtggtgtgagctgaagcatcagaacggagcaatctttcttagagttcgcttgaggactatcattttagattcaggagtggttcaaatgcagcatttctagtcgagagtatggtcatggcactcttttttttgctttttattctttgtagtcttcctgcaataaaggaatgtttggattctacctgtggggttcaaactgtaaactttaatacgaaaaacatgccccttttatgcctagacttctctattcaatcaaccgcacacgccatggagttaatattctaccctacacatctaataatgagattttatcccttcaatgtagtgagatttttatgagggacttcagatggaatttgtttttgattgtcctattgcttttaagacatggttccttttttgcagcctaatcccttcggtgcagcaaggccaagagaaca

SEQ ID NO: 115348 - DNA, 906 bp, Physcomitrella patens
  Intron number 1 from transcript Pp1s137_113V6.1 (locus Pp1 s137_113V6) derived from phytozome v7.0 (chr-ID scaffold_1 37; pos 412545 to 413450)
attagggcggaggagttgagtggtttcatcatcaggtagggcgttgcatttccgtagcggcgttggtcttggtgttggttttgggttttttcttccagttggatgtagcgaggtgatgaggggtgatgaggttgtggaggaagtaggattggggattggatttgtggggctgctgcagggatcagtgaagcttcaggattccctgcgtacaactgcataggctgtgcactctggtggtgcgcaaagcgtgttagtcatgaagatgtagtttgggggtttcgcaattgtggtgcacagcttggttatgagcatgaaatttatggttactaagtagcaattgggtatttcatcaggaatgaagttagacgagtttttgtggccgttttgagggacggtgtaatcagagctgcgacgctcaggagtttgtagatgttcttctgggtcttttgtattagccttgagttgtgtttgaaagacgaggattgaagttggacggtgtctgtaaaatagcgcagtgaagtttaggctgttgaatgtgaatgcggggattactgtttagtaatagtatacatgagtgcacgatacgagttgatgatttggttttgtatatatgtgtattcataaataattgcacttagcagggttgcgcgtctgaaattagtattggaagttggcgggctggtcacgctttagtatttctattccagggttgacgaacttctgttccgatcacaatgttcatttacgagatacatcgtgggagtcatctccagaggaatagctcattgaaatcaccacttgtctgtatttagaggaactactagcgagcagtgtgtttggttcactaaatttcgacctcgtcaattttcagagggtgtatcttgatacaatagcagcaacggaatc

SEQ ID NO: 115349 - DNA, 386 bp, Physcomitrella patens
  Intron number 1 from transcript Pp1s91_167V6.2 (locus Pp1s 91_167V6) derived from phytozome v7.0 (chr-ID scaffold_91; pos 1026779 to 1027164)
cttgaaaaagaactatacgatgtgagtctattcctttgtttaagcttccttgatggcatactgttttggtggttgaattctaaggcgacgagtagaacgtggaatgggtcatattttccatttcctggcccttattctacaagtgagattgacaaggtttcagtgcccttgcccaacgagagaaacaaataaaccaagaggggaaactttgttcgaatccttgcgacccagaagcagatatttcttgagctaccaaagagtttcgcacgcatcgctgtgatggtgtactcttaatcaaagactattcactgctctaaactgcctgtgtcatgagttcttgtcttcttgcagtgtgcaagagctcacaaaaggagcctcgtcgaaag

SEQ ID NO: 115350 - DNA, 592 bp, Physcomitrella patens
  Intron number 1 from transcript Pp1s83_173V6.1 (locus Pp1s 83_173V6) derived from phytozome v7.0 (chr-ID scaffold_83; pos 1224407 to 1224998)
gtcgtggtacccgcgaggctcggcttcctaccaaggtttagcttgcttgcttgctcgttagtctttttggtttttcgtttctgtgtgatgaatactcgtttttagttttttatttttttattcactctttcttctgtattctctcttgcggctgtttatgcatttagggaatttcgatgctgcacctaggtaggtgttggtttcgggcattgcgcatgatgtttagggccatccggtgttttcttagttggtctaggttgaattcttttccacaactagtttgtattctttttattgctctgtttggtttgttacggaattgtgtacattattgcaaactttagttaagaacattttgtttcgtgccactgcctttttagaaagtttcagacattgcttttgttacatgcgtgtgattccctccagccacacaccgacatcgcactctacgagctgttgttgctttcagcttgcgccccctttaatagctttaggcatggacagtactcgatgcttgtaacgctgtttttgaaattccaaatgattcaaaaataataattccctggctgtgtaggtattgtggttgcggcgc

SEQ ID NO: 115351 - DNA, 956 bp, Physcomitrella patens
  Intron number 1 from transcript Pp1s83_134V6.1 (locus Pp1s 83_134V6) derived from phytozome v7.0 (chr-ID scaffold_83; pos 965530 to 966485 reverse strand)
gcttatcgaacagagaggctgcacgaattgcaagagtgagtttaataacgctgtgttgtttcacataatcatatgtaatcctttgaacttttgggttaaatagcgagtcaagtcattgtactaagcggccacttttcgttgatgtcaacatattttcgggagcagtatgaattactcccgacatttttactcattccactatgtgttgggctctgggaggatgtgggttatgtaattgaacacataattttgaatacggaagtatacccgaggttgtcatttcttgtgtgagttaaacaagttgcatctcatagtggtccaagttttacaacgtgcttacattgcttttgtaataagaagcaatgtttatttgcatttactcatcattgactgactatttaaaatgagagaatatagaagagaatatgttgaaaggtttggttctccatgctttcttgcggtttctccttacggttgtgaagatagcaattcagtgtataacagcctcaattctagtgaattgtcctttatctgttcactccaataaagtgtggttcatgctattcgaattgaacattgtggtgttttaaatgctgatatcttacttcatcaaagtagcacagttgattatttttagaaactagctttataatcggctgagggtacataatgttgattttattcctttacatggaatttgcaaatttatcatccgtctattgtttcgaatgtttttcttcttcgcgcttgatattgtttactggttcatatgaatagtccatggcatataatgtgtcagtttatctgtgtgccgttttgtaagttgtgtttctcgatgcagataacctttagctaaatgtttcacgtgtatctgtgtacttcgcttgtgcttgcgtttgtacagtgaggaaatctgattagttgtcttttgttctgctaggtttccaaggagttcg

SEQ ID NO: 115352 - DNA, 600 bp, Physcomitrella patens
  Intron number 1 from transcript Pp1s52_213V6.1 (locus Pp1s 52_213V6) derived from phytozome v7.0 (chr-ID scaffold_52; pos 1710694 to 1711293)
ctgtttctgttggttcctgtcctcggcagctacgggtgtgtttctatgctatttgccgttgtgtgttggtttgttgcatgtgtctcaccatcaagagttggtgagggatggcatctcgtatcttatggttttggtctttggtggaagacttgttatttggttaatgcagggttatcaaaatttgtgactatgttttcttttctggggtgctgtattctttcccttttttcattttacatcttttctctggatgtttcatttgtgtatctgtttgttgtatcttcactatattcagcaggtttggggttgaagcgtttttgtgaagttgttctggaaattttcgcgtttgttttcttcctctttagatgagctttgcttgttgaaaaaggggatgttaccttaaaaataagagttgctgcaggaaggaagaaaacaaataataataaaataataataataataataatcataatatttaaaagatcaaacaaatcaacaaacaaatggaaacgtactgtgatgccaaaagaatacacggaatccatgacattttgcgtgtgtgcaggtacgctgaggcataccgagagagagagaagctgc

SEQ ID NO: 115353 - DNA, 950 bp, Physcomitrella patens
  Intron number 2 from transcript Pp1s452_14V6.1 (locus Pp1s 452_14V6) derived from phytozome v7.0 (chr-ID scaffold_452 ; pos 63505 to 64454 reverse strand)
aggaagaccttagaagccgagattgagaacaagcggtatgtgcttcaatcgttaactgcacctacaaccatgaacagcctcacattaatgagtcccatctcgaaatttattaacggaaacacatgcatcacttctgaagccacctaccgtgtgtaggagaataatgcctgtcccccgactctcaccttgtccggtcttgttccttgagagccgttgtgcggtaaatttgcctcaaacaaacacaaaaatcagaagctaccaagcactccacagccccacactatgctagaaacaaaaaatgaattctgagagggaagtcttcgcaacaatcaatgccagtttaagtttctacccatcaaagggaaacccaggcattcggtaccaaccatatccacgtagcaaagccaacgccgagaaggcttttgtaacgattcctcgacggtagctccggctctaattcaaaatcttaacgccctacaaacccattgtacaaacatttcaaaatcgcctttaaaaacaatgactgaccaacaaattaaacagtgctcagatgtggctaatggccccaaacagcgaaacaatacaaaccaccatttcacctctttcatttaaaaacaacaaatcttaataattctatcatccctggaactggaatctgaagatgtaatacttcgttgttctgtgattgctggatcagagaaactcttgaaatgttaagtctacgcctcaatgatgggtaaaaaaaaactcagaagccaaaaatcataatctgacaaaagagcgaggttcagggcacatagatcgtagcacggagcgtccaggatttcaggttctcacttgtcaactacgacatggtacaccccggaatttttagcttcttatacaacaatagtccaaggattttgctcaagacaggctgagaatcgggggagagggcggagctaatcttc

SEQ ID NO: 115354 - DNA, 630 bp, Physcomitrella patens
  Intron number 1 from transcript Pp1s43_234V6.1 (locus Pp1s 43_234V6) derived from phytozome v7.0 (chr-ID scaffold_43; pos 1837922 to 1838551)
gagatccttaaacaggtgttttcccttgcgccatctcatatcaaatgatatcttctcgattccaaattctgtgttaaacccctaaaacgcgcatcttgtgaagattcttactatttggactgtcggctttcatgcgtaataaccacgttcctgactgtttagcttgaaattgtaatcttatgaatctaaataaccgaatcaaattctgttatttgtttatgccttataaccaagttctattaccaatggaatgggtttaagagccagtcgatgactcttgttcaagctttgagcttctggaagcctataacgaaatgcccaatttctttttttttcttcgtggggaaatctatcatgaacatgagaactaaatcccctccccattcgggtctttcaaaaattagtgatacgctgctgatgagtactttgtcctctatcgtgtacgtgtatgatgttgttgcagctagtacttataatttctgcacctcatcgactagaggactgatgctatataattagaatcagttttgattgctttcagtacctgtaaattacgtcttctgactaacacaagcgcttcgccttttaattgctcgattgccttgcagtgtattagagactggccagacg

SEQ ID NO: 115355 - DNA, 297 bp, Physcomitrella patens
  Intron number 2 from transcript Pp1s91_35V6.1 (locus Pp1s9 1_35V6) derived from phytozome v7.0 (chr-ID scaffold_91; p os 207900 to 208196)
cgtttgctgtcgcgaaacacttctcctggtcccaggtgggccagtttctcctgccatgaaattgagaacggaatgctttactcaatcttcttgaactatcaaattaaggcacagcgatgcaaacatacctgcgtcatctgctttttaatcattttctagtcaaaaaatcgctcataatgattgagaatttttcacgttgtaccctagtttagactgtagcttcgatgatcctatggaagctaatttatcctgcgtgtgtcaggttccactgtacatagcagcacagtgtagcggagc

SEQ ID NO: 115356 - DNA, 419 bp, Physcomitrella patens
  Intron number 2 from transcript Pp1s239_23V6.1 (locus Pp1s 239_23V6) derived from phytozome v7.0 (chr-ID scaffold_239 ; pos 203147 to 203565)
ggattgcactgaattggagaatattctaaagaaaggtctcgttttattatgtcttcccgtgttcttgttcgtgactagagcttactagcaaattgaattgtagggtttttgaaatgagttcttgttttcttttcctgagattataccacaatcgctttgtttgattattttctcgtttttcttgcatgtataaacaaatattaatacttttggtttcattgttggcatcttccttcatgtatgtctaaacgtttctattgtaattcgtttgtgagtcttcacaagactgaattttcaagagtatcttagttttctgccttactcatccatttgattgcacatcctgatgcttgtctcagaatttatctgttctgatgcctgcagataagagatccctgccagagacattcaaactgttt

SEQ ID NO: 115357 - DNA, 1023 bp, Physcomitrella patens
  Intron number 1 from transcript Pp1s10_84V6.1 (locus Pp1s1 0_84V6) derived from phytozome v7.0 (chr-ID scaffold_10; p os 579156 to 580178 reverse strand)
gcgacttagatccgggatagtcgaggcttcgcgaggtaatgccattgatagctgccgtgcattttttaaacattgtcggtgttgatgtagttattcaagttttcgttactggatcatcgtggctgttgtttgtttgtttttttgcttgtatttgattttattttgtattgtaagaagaatgtattgtaagaagtggtcggggagtgtgcgctgtggtatttgatggttttggaggccccaaagcaagcagcactgtagtccttgccactattgatcagtgccttcgatcaaagtcgcttcgaatgactttgttgcgcagctaataatgacgagcgttaatgctgtttcggtctgaagtctttagatctacgtttataattattggtttgctcctttgtagcatggcctcgtgaagaatgacttgttacttattgaaagtaccacagagaggcagggtctgcactcccctgtgcgcttcctatccaccgtctacatgtgcaatggaaccttgaggagaccagtgtacacttctaaagtgtcacgtagttcatatgctaagcgtatttcttgtttagactggaacagccatgaagtcatgaattgatttcatcctctgcctcgaacctttaacaaaggttcattaactatctaagtaggtcaggatgaatcccagcaagtacttgaatctgttttcttctgtgtaagtgggtttaccgtgaatagtatatcttcttgataatttttatgtttaacgtgttacatgcttcaggatatctcgttcgaaacgtgtatttggaagcctttgagtcttagtcgtcgtagtagataatgtgaggtcagctggctgattttcacgaaagtcatcatcttcttcatctgttcggagacctcaatgaatcctagatctcgtgcaaggctctttgtaagtggaatgcggaactttttgtttgaagtccggaaaatgaagttgcctggttcatctttgcagataaacgaggggaggattcgtgcaagtagcagaag

SEQ ID NO: 115358 - DNA, 663 bp, Physcomitrella patens
  Intron number 2 from transcript Pp1s315_38V6.2 (locus Pp1s 315_38V6) derived from phytozome v7.0 (chr-ID scaffold_315 ; pos 225590 to 226252 reverse strand)
tttggatccagcagccgtaagttccccttcctctttgattcagatattacaggttcaatgttaggaattgcgttgtggtggttgcaattcgatactcgatgattaacctgaaggatgccgaggttgtggaaattagtcacttggttaaacttgctcgatctgtgtacgggattgccacttcctacagaatcttgctgtagtttgatggagtataagtaatccattccttgcatcatagattcattgcattagggtatactatcacaagtttttctacgaagtgtggtgatttagttcaagagaagattatggtctatttcttctctttggcactttaatttttgtttcgaccggcatacctcgtctaaaacttcggacgatgcagcttgaataacctctttgctactgttatcaaatctccagtttcttggttcgtggatcatattcatgtagggttggtaacaggatcagaaattgttgtggtagattaaaaacgatcttcgttatcacatgtctccatcactccaacatatgctttgcagtcctctacagaagtttccaagcgtgaatttgtctcgaaaattataatttctgacaagtggtcttgattttctctgtgtttgttcagcctttggggcaacaactccgagtccatttggcgct

SEQ ID NO: 115359 - DNA, 981 bp, Physcomitrella patens
  Intron number 1 from transcript Pp1s255_66V6.1 (locus Pp1s 255_66V6) derived from phytozome v7.0 (chr-ID scaffold_255 ; pos 571606 to 572586)
ctctacgacgctgagattttcctgttcgttgcgtggtgagcttgtgaatgcagattgtcggcagtgctcatgtttgaatttgaagtggtttctgttttttttcttccccctttactggtgcttagattatagagtaagtgagtatgtgggttgttgagtgttttgaaattgggtattgagcgatgagcagttttaagggatttttttattggcttgcggatgcagaattggttcaaggtttgaggagtggttggaaggtcgtgtcaaacgttctcggttcacttctgcgtcgtagcattttttctagactttttctgagtggtgtaacgtcaattctcactgtgagaggatgttctcttggtggtcacgctaaagcagaaggattataggatctcccatgtggctcattcttaccaacgaacggatttcttcctcgttcttcgagtggtcatgcggtgaattagtgggtcgacatcacgtctgcacgtacttaacccgatcttgcgttgaagaaatcagagaagggcctggagccaggacgtgttttcttgggactctttgtaatgctgcgctgttattgtggtagattctagtgattcgttgacagaaagttccaaccagttctgttcatgcaattctttttatcaagatatcgaatgtgtactttagacatggagtttaagcataatttaggtgagcaatgaaatccagttgcgaggagttctttcatattgtggcaatctcgctgaggacattttttatattttttaacctgacatggaaatgattcccaaagatgaattggagtttggattgcccgggtgtggataaacggagcaaccaacacacaggattgtggattccactcatgttatgttattgtgccaatattgatatcgaacttctatgtgtcttttgaggccgtgacaaatgtgagaagaaatttggtggtttcaggagaagattgatagagaattaata

SEQ ID NO: 115360 - DNA, 422 bp, Physcomitrella patens
  Intron number 5 from transcript Pp1s255_66V6.1 (locus Pp1s 255_66V6) derived from phytozome v7.0 (chr-ID scaffold_255 ; pos 573333 to 573754)
ctggcactgcgggtggattccaggttacttcattgtttttttcaattcgtttgttcttgcatctgctttcaggcattttcttgttcagatctacattatgcgcatctctgttttaacatgtcgcacaagccctttgaccagatttatcataatttttgtaaaatgtagccccgcagcgttgctgcaattttcatagaaagaaacccagtaacttccacaatcgataaaaacgatagcattaaagcaacaaactttttctatatgtttattcatttttttttatttttttattttttccgtgcgcaattcattccttgaacttctagattttatttttcgctaaccatgatgacatctttgagctatgagaccgcttatagtttattggttaatcttccaggcaaagggcgccaacattggcg

SEQ ID NO: 115361 - DNA, 681 bp, Physcomitrella patens
  Intron number 1 from transcript Pp1s117_177V6.1 (locus Pp1 s117_177V6) derived from phytozome v7.0 (chr-ID scaffold_1 17; pos 1079706 to 1080386 reverse strand)
tttacgatttgactcccaaagtaagcttattgtttggagcagttttatttgtgttggtctttcattttgactgtttgctttgatttcttgtaatcggtcttgacaatgttgcctagttatgtaattaggtgattttgttgatttccattgaatgttctgtttttctcactccagagaattgttatactaagggttttgtggagagacgaaccaacttagtgttggacgatatcgtgtcctggttggcctacttgaattgatggagcttgatgtgcatgtttttccgtaaatagtcgcttcttttaccagcatcatttcgtttcagaatttcgtatgatttttgcatgctcatatgaacgccactcatcagagctaaattgccttcgtagtctttcagctggccaagaccatgttcgcatacaattctgaactttgattgttcaatttaataatcaaagcattagcacctacacttcaacttgatattattgaaattttttcccttctcaaatatggaacttcaatctttcttttctttcttgatttagggtttaagttgcgatctgtgaaaattcatttcattcttttagactttctctaaggtttagggtgaactcaagattttgccgcatttatttatatgcagacgtacgtcattaaattatccaggagtagtggagt

SEQ ID NO: 115362 - DNA, 984 bp, Physcomitrella patens
  Intron number 2 from transcript Pp1s27_149V6.1 (locus Pp1s 27_149V6) derived from phytozome v7.0 (chr-ID scaffold_27; pos 1165014 to 1165997)
ttgtctaggatcgacaggagggtatccaagcttctgtacgattcgtaacctaactcttcgagtctattaattgaaacatctaaccgcactagtgaaccttgctcttttattcacgcaagcctctagtagcagatcgccggtatttgtgtcatcaatcggcaccctgcccaaaacatcgtctgtcttgtgcgtccatttcggcgatcattaacatccccactccctcccctcctctctttccttgtatctgaagaactcattacttattgattttaacagcatcgttcggaaatttattgtggaaactgtctatcttttgcgcaacagattccttgaggggtagggacgcagctgcaaggagttgcgaggattgatttcgtattttagatcattgcaagcacttctacttttcattagttggtggaagcattctggtttctgtccaagtccgtttcgcaggtatttcaattgacaaggtccacctaacatttcgttgtacattacagtcaataatcctgctcatatagaaacacagtaccaggtctacttttttataaatttgaattgtcccctaataagggagctaatttcagctgatcgtaggatcctttaacagcagctaccacccttatagtgaattataatttagtctatccaaacaattttctcactaattattaattcggatgacagtcaagtagattgtgtttttaacttgggaaccatttcgtcgcctcagccgatataactttgtagtatgtattgataattctcgacatttcatgtcatggtctcggggtagttgcaaattcagcgctcctaccactatttatgctgacgaagtgctacatctactctatcaaccttaattttctgcatacttactcttcagcatttgttgactattatgggcattgtccataacttttagccgaaggtaattgtgtatacgagtgttgttctttgttagaacatttttgcagg

SEQ ID NO: 115363 - DNA, 369 bp, Physcomitrella patens
  Intron number 2 from transcript Pp1s52_233V6.3 (locus Pp1s 52_233V6) derived from phytozome v7.0 (chr-ID scaffold_52; pos 1826010 to 1826378 reverse strand)
gctactgattcttttggaagtaagagatctttcctttctttctttttcgcttgcgcgcatcttgcaataatcctggaagaggcagccacttgcacgtgatctgactgaaggaaacagtgtagatttatctccatttgctaggagaaacatttgggagatgattaggggcccagttgcactatctccttcctgatccactcacgtgcatatgcagctcccgtcctgcaactacagggctctggacacttagttcagctcccaaaggttcaaaccctaaatgacgtgacataatgagatcaaattgattcagcgatgattttatttttcctgacaggaagaatccctttcgcatatcttgaggatatccac

SEQ ID NO: 115364 - DNA, 695 bp, Physcomitrella patens
  Intron number 1 from transcript Pp1s52_233V6.3 (locus Pp1s 52_233V6) derived from phytozome v7.0 (chr-ID scaffold_52; pos 1826577 to 1827271 reverse strand)
attttgttggagattcgcggacgattgcctgcgaggtgaattttaggttgtttgtgggaatttcggtgttgattttcttcaaatttcaggttaaaatcttctttgtgttttcttttttttcttttctggcgagagtcgagttgcggatgttgggcgtggaattgatttttgctttggaaccgagtttttgttttagttttggtttgctgggctgcgaggaggggaattttttgcttggtttttgtttgtggggattttagggattaatggttgagtagagtatgtaatcatggtgtttcatagtagtgcttggaccgtctaatacccgccggaattagttgaagcgtggttcggttctctaacgaaaattatgactgcatgcatcatcagggttagagggctctcggagttgcaagcagcagaagttctttacttttttttttactgattttcttatttccgaccctatcgaagtgagttatactaggagttttatttttcaagtttttatttttaataattcctgcagtattcttccctccagcagtgtgttacagcggtggaattcaaatttttaggcttattatctgagtggtattgattgaaatattttggctcagttgactgtgaggatttggattgcgtgaaatttagatttaaggcgtacagtgttggcttgtagcagattttcaaac

SEQ ID NO: 115365 - DNA, 342 bp, Physcomitrella patens
  Intron number 2 from transcript Pp1s230_39V6.1 (locus Pp1s 230_39V6) derived from phytozome v7.0 (chr-ID scaffold_230 ; pos 479434 to 479775)
tcaaggagttctctacgcggaacgaagattgtcaggtgcgtttagctcgtcctatctagtcaatgaatcttttgatttaatctaattcaatttaatttcgtttttttgcactgtttgcgatgtgttcttgcacctgattgaaagtcttaagttcatttggtgaagaaaggcattcttggaatgagtgtttgaaaacctgcgcggagtaaactgcttcaaaattaattgtataatcaatgctttggattgtcgagcctggagttacgaggattactgaagtaattgcatttgtatcgccaccttgcaggttctcgctgtcagtagcctttggaatactgctaa

SEQ ID NO: 115366 - DNA, 624 bp, Physcomitrella patens
  Intron number 1 from transcript Pp1s31_245V6.1 (locus Pp1s 31_245V6) derived from phytozome v7.0 (chr-ID scaffold_31; pos 1326088 to 1326711 reverse strand)
caaagccgtgttttactggtatttcttgttctcaattttctcatccccatttttttgctcatggtaactccttcaaattaatcttagacgattatttcaaattcgctcaggaagtgtaatctttttaagtgacctcctaaaccaagaacgtataacttgagcgactgaagttacgattgtatatgaggtggtgtaaagcgggtggaactttgttggagtttgtcaaatgaagagttctctatatttttctcattcggtttctaatgttcacagctgggtatcagctccattttttattccatagttgctgtgtctttgtggtgcacgatgttacaacaattaaatttagcattctcgagagactcctactttttatttatttattttcactactagcccactcgtaatctcttctcctttagggctattttccgtgtctgaagaaaaggccgtggccctaataatatgaattatgttctttgagttgctggtacttggtacttttttcattgtattgagcgtttcggtgctggtttgcagtatgaaaattttcatttatctctccttctcaaaccttgttctttggaaggttcttacttattccaccacgtgtgcccagctctc

SEQ ID NO: 115367 - DNA, 370 bp, Physcomitrella patens
  Intron number 1 from transcript Pp1s34_156V6.1 (locus Pp1s 34_156V6) derived from phytozome v7.0 (chr-ID scaffold_34; pos 754076 to 754445 reverse strand)
agagattcgaaggcagccgaacttattctttctaagtgagtttcgtcattgcggattcgattaccgctgatagttttaagaacaacatgagaattgtctacttcttatcactttatgtcctcttcatttcttttgtcggggcatccacgttcctgcaggatatgcattcttgagttgaaatttggaagactggtctcagtaattttgcatttgttgaaaatgtactctttatcctcggtcctgatcagtaaattggaatcaagatgccgtatggcagggcattgacgattaatgcactttcagatggtatttttaatgcaaacaaacaatggtttacatcaattttttctatatttgatttctttgcaga

SEQ ID NO: 115368 - DNA, 501 bp, Physcomitrella patens
  Intron number 1 from transcript Pp1s188_65V6.1 (locus Pp1s 188_65V6) derived from phytozome v7.0 (chr-ID scaffold_188 ; pos 543943 to 544443 reverse strand)
tgaggcgcatcaggttatgccttactctctactcttattctcccccttttcaattctctctcactctccctcactcattctatactttctcttccatatatatatatatatatatatatttatacatgtttgaagaggacaacactgttattgcttgcagcatttcgcaagttttgcctcatcagaactcattgccatatttgatatgttttcctttacgatcttttttatgatgagaactttgatttttttcagagaggatctctagttatttgagtattacaaaatttaagtcgtttaaacaaaaaacaggaaaccaaaaagtctacaaacaagtacagttccttcacattcgtttgcagtggaattaaggaacaccagtgccttttcttctttttttctttttactaaaattcattcattcattcattcattttgttgatttaaataaatatttatttattagaccgaggacagcaccagagtgtacaacttccacaa

SEQ ID NO: 115369 - DNA, 886 bp, Physcomitrella patens
  Intron number 1 from transcript Pp1s10_139V6.2 (locus Pp1s 10_139V6) derived from phytozome v7.0 (chr-ID scaffold_10; pos 914935 to 915820 reverse strand)
ttcgcagcgtggtgatcggagtgaagcctcagcaggtgcgttttggaagaatttgtggcaggatttttggacagattgtagtgaattgagagctaagtgagcgggctaggagcttggtttagaagaagaagaagaagaagaagaagacagagcagctttggtctggtgtatttttggtcatcgtgtgtgcgtggttttgtttcggaggttttaatgctcttttcgatcacgtttgataatatggaatagaatgatgtatgatgattatgcttcgttttgagctttatttcttttttgctggtttagttttatttggctgtggaggagttgaatttctaagagtttggagagcgtgaattgtggcaatatgtgctgaatcggctgtgatcttgagaagtgatggacgtggttttgaaattggtggctggatgagctgcttttttctgaagactgatataacgtaagggttcggtgagggtgtgatgcttcgtacgtttgcaccttgcgtggttgcaaatgaaatcattaaagattgaaatagagaaacatctgtcgcgcggacttttcgctgcggtatctttttcctaatcggcggatgttgatcattgttttctgctgcgtgtgtcgctgcagaatttttgttttggttttggttctgaccgggattattttttcatttttttatttttttttcccttaggttgcctgacgatttggttcgggtcttgaagtatgaaagttcattttctatctttgagttgtcactatctcagcctcagcacaggcagtattgaatttaacaagtttttatgaagtactaggttgtgagggtgtggatgatcggttctgttttgcagccatggagctgacttgtaacggtccagaa

SEQ ID NO: 115370 - DNA, 697 bp, Physcomitrella patens
  Intron number 1 from transcript Pp1s68_168V6.1 (locus Pp1s 68_168V6) derived from phytozome v7.0 (chr-ID scaffold_68; pos 903496 to 904192)
cagatacttgagaccactaggaatctgctttgtatacgccctaacttaatcataactttccgcgtttttgtctgttctcgttttatttgttttgagctttgtttggaatttgtttcctctcagatctcgtcgagtggattcagcttcttcttcaataagtcccacactgaattccggaatcaactgcaatacccgatttaactgcaatacctgagctacctgccgaacttgagtcaactgcaaaatctgaatcagaacaagaacaggctagttctgttgaggcaagggtaaagcattatggaagtgggagaaaatcgaaaataccttccgccttgaatattgacaaatttgaggaacctagtatcgtcagtacaggaagatcacctggtgttgtttcgaagggatcaccttgggacaactggtttaaaggtggcattatcggctctggaacgtttggctcagtgtatgagggtattgacaacgatggaatgtttttttgccggcaaggaagcatttcttcaagctcaagggcaggttggacaagaggctatcaagcaattagaacatgaaatagcacttcttagcgatattcagcacccaaatattgttcagtacctgggtactgggatgatgagaaactctatatttttttctggagctagtaagcaagggctcagtggctagcttatacaagaag

SEQ ID NO: 115371 - DNA, 1022 bp, Physcomitrella patens
  Intron number 1 from transcript Pp1s31_216V6.1 (locus Pp1s 31_216V6) derived from phytozome v7.0 (chr-ID scaffold_31; pos 1182939 to 1183960 reverse strand)
tcttccgcattgtgagattgcgcatccgctagttgctctcccttgtgttggatttccttcggattttggacgattttgaacatatcttgagaggccccccttccggagtgtctccttggagtgggtgttactgtagcggcggaaaattgaggccatcgtgcactcgattggaagctgagttttgtatctgagtttctagttactattgattctgtattcggcaaggatcggctctgtttggtgcggaagggtgagcgaccgagagagagaggagagagagagcgaaaagtcttcaaaacttgaccttgggaaacagtggcttatgacctcgaagcagccattcttgttattaggaagtctagaaatgaaataagctatttgaattttgtgtttaaataaataaaattacgtgaaattctcgtatggggcagtggaagtacaatttattttattttaggaagtgggtctttgtgcgtattacaacgttttcctattgtctgtttttaacccaaacccatacattagaatttttaataataatttattattaccagattgatatattattccattgtttgaggaggtcaaggaataaataggattttcttcgacgtgaaagatgtttctgagcgaaaaatattatttgttgtttacaggcaactagtctttgtctatgattcctgaagtcggctgttttcgttctaattttgctttatttcaaagtaactaatcaaatattgagactgtaggtagtgtacacctgggacgcctgtaaaatgggttcttgtcttgacatactcaagcaaaagcagaatgagatccatagtttcaatgaaaattaaaagtgaaaagtggaaggcatagttgcaaaggacagctcaaaacgtacgactttatcgaacaaaaaccttaggcatggtgaaggcaatttcatgtgtttctttttgtatttcttttcttcgtttcatgtcataatattcttccaaacgtcttctcatgcagggaggactacagcaggtgtc

SEQ ID NO: 115372 - DNA, 904 bp, Physcomitrella patens
  Intron number 1 from transcript Pp1s434_6V6.1 (locus Pp1s4 34_6V6) derived from phytozome v7.0 (chr-ID scaffold_434; pos 39295 to 40198 reverse strand)
caaagctggtgatctggttgggaaacggagctcaggtgagagcactggttataccagcgtgcccattgtcttctcttaggaaaggttctctctctctctctctctctctcgctgtaaccgagtaccaaggtcagatacaagttccgaggatcgaaacggcttagtgggatctagatacctcaaggtccaagcaatgagtggggaaagatctgctcaggaccaaattttgagatcttgaatcatgaccctcgttttgttacacatctatgtagatgtgataatcgtctttgttgactgactcgtcgttcctgatgacacgcttttctacaagatctagaggagctacacccgagtggatgttcgaaagagtaagtgggttgcattggttgaccgagaagatacaccgcatctcctcagaaacagtgcacgagatgctgctggatgaggtatcacaagcatctgcagctttctagtgtagagactacgctgactgtggatttcagtgtggtgaagaatgttttttttaatgttcacatccttgtttcagaggcttaagaaatgactctagcagcagcagggacatttggagcttccacgtgtttcacttttaatttgttattaatattcttattttttaattgtctccaatgatcactctcattatgtgcgaatgttgcaacagtctttgagatttcaggtgtgagaaatcttatctgttcgattgctatgcacctgagattcctaaagatatgtagacttttgcaaccgctgtttttgcagcccaaatttctttctccagctttttaccttcaaagcagagcgaaattcctctactaatgaagacgattccctgttgtgtaattgtccagtacaacgtgctagctccggagcaactggtttttgt

SEQ ID NO: 115373 - DNA, 671 bp, Physcomitrella patens
  Intron number 1 from transcript Pp1s27_218V6.1 (locus Pp1s 27_218V6) derived from phytozome v7.0 (chr-ID scaffold_27; pos 1608647 to 1609317 reverse strand)
aaagggcggtcggtaagtcaaattgtgattggacttgtgctagcaattcatgtttgttgtacaaattaactcgtgcaaagaagtttttattttattattatttattatttttttattttttatttcatgtgaggaattgtagagagttgagaggcttcatatagggggtttgaattgtttttggggggtgaaaagcgtaagaaataatttttaatcaaattacaaaacaagggggtcgagttttgagttttttcgcttagcattttcacgagaatggtagaaaaagatgtttgctgttattgaaaaaatacgtatcacaggttttattgtttagtcagaattagcacacgtgttttctgttgtgatcatagcttcagttgactcaagaaatccaagctagttctacagtctttcctaaatgtcaaatagcatgcggacaccaagctacgatgttatcagcactaaagactcgaagtccgtggatttaaattagatggttggtaagaaagcaaatgatgtaggcatggtattgtagaacgttattagatgccattgggagtgtccggctaccaccgagtgttccttgagacatcgatgccattcaattgtatctagctgtagctgataaatgtttgctacaatctttgctcctgtgccagagagtgggagag

SEQ ID NO: 115374 - DNA, 1001 bp, Physcomitrella patens
  Intron number 1 from transcript Pp1s545_8V6.1 (locus Pp1s5 45_8V6) derived from phytozome v7.0 (chr-ID scaffold_545; pos 46093 to 47093 reverse strand)
aggtacgtgagctagggcttggggattcctggaggcggctcttgcttggttggtgccgagggcagcaagaggcgtttctctctcttttatttttttgttccatctggcggccgcttttatggctgtaagtttgagctctgttgcatgtttttgagttgattggcttgtagtttttgtttgtagaatgattgcgaattcttgtttgtggatccatctcctcggatgggtttagatgccgaaattattggcgtagataagtgacatttttaacaaagtcgtagtttggagtacagtgccgtgttttatgatatcaacaggggagtaggtcaaaccaggtttcagctttattagtctgaatcgattagcattgtttgcggcttccagttttgaacatgttgcgttttcgaacaggtgtccgatgatttgctctagcctggttattcttagcagcggttgccttccatagtgttcttgtgtacgcgaggactactcgcgtagcgtatacttttacgtttcctctgtatctgcctgcagctgccacaaaccctagaatacattctagggtcttcgacactggtcatccttttattttgtaatcagggtctttcacttgttccgcatattctttctgttatgtgtttgtgtccgttgaacatgtagcaacgaagccccagagatgtgggattgtgcgattgagatcctttgtcgggcaacatggctatcgagaatcattcccttttgtagggtcagttttcattatgtaatgtgattatcagtcgaaatgtacgatgtgcgcactaaatcctgatgttgatcttgagttaagaggtttgatggcatactgtttgttgcataataccaaggcctccttcactagtgcattcaaataatggataccattccacctttgtttcattctccgaatacgacttactaatatgtcttctgtgtggtcttgttccgcagctcgaaggagaaaccgacccttgggtacgtgtatt

SEQ ID NO: 115375 - DNA, 827 bp, Physcomitrella patens
  Intron number 1 from transcript Pp1s152_87V6.1 (locus Pp1s 152_87V6) derived from phytozome v7.0 (chr-ID scaffold_152 ; pos 477592 to 478418)
gcctgtactattaccccctctttttacctttttcttgttttccggcagtatagtttgttcatgatctgttaattccactcgtcgtttccgtttttctcactaaattggtgtataggaatgtgcaatcagttgagattcgaggacgttgtacgaggatttgagcagttttgtggtgtggtatcgtgtgttttggtgtgcttgactcagcgtggtagattttcagaggacatttatgctagtgtattgttttgttgtggtatttgaatggccatttgaaggtgtggttagctattgtagtgaatggctcctttcattgcctttcgaagaagattttagcatttcggtatcttggtgtcggaggctaaaaacacgcgtgagagtttatcaagtgacttcatattgctgtctcagttttttcaatggtctgtatgggtttatttggatgagttgaccagcggtcttggtgaatcaacagtagtaagtgtttgtcggtggtattcaaggaagaaaagcaggaactatttgttcgaagttatgcggcagggttttcgttttattttgttttaaactcttgtgtagggtttgagattttagaattaaattcaacagttgatttttggatttcggcctgtttttttatcaccatgtttgaattgacgtggaatggatttcatcatttcttcagttagtctggaactggctctggaaccgaggtttttgtttgcaggaggttttcatcagcttcagtatttgagtcccagcctcatgttatgtgcagcttctgtgtggcagttgtgtaagccgccttcacacgtttttctctgtca

SEQ ID NO: 115376 - DNA, 735 bp, Physcomitrella patens
  Intron number 1 from transcript Pp1s31_1V6.1 (locus Pp1s31 _1V6) derived from phytozome v7.0 (chr-ID scaffold_31; pos 18554 to 19288)
tcaaaattcccttcgacgccatccggacaagagcggtattgctcacatctgctctttacttgcactaaagcgactctgtgtctattccagtctatcttctttatgtttagcgttttcatgtttgagaaacttacatcgaaaaggattgactttttcttttgtttattatttcttgaatatgctgaaataccgtagagtatccctacctcaaaagtctctcatggcgcattcagatagaccagtgtacatcaagggaatacgaagtgaaatttggttgtaagttatggaaatattacagtagtgcccaattcggttgcagaacctgcaataactacctatatcctttcgtttctctacatgttctagccgtatattgcatctttctttcattccggttgatattcagctttcgtgaggattgcaagtgcttctgagttttgagttttctccatccgaatttgatgtgtgggcgatgtggttgtctctttgtccacacagtattttttctatcaggtcaatttaaggcgtgtagttttacagagtcaaagaataaacccgcctttttgagagcatgcgagacatggcactgagtgtttattgatcattatatgagcggatggactgaattgagcagcttcttagggtaaacctaggacatgcaatgacaggaaacgttctgaaaatgttctgaaaatggcaggtggagcgaggggttcgattggaacgagtggccat

SEQ ID NO: 115377 - DNA, 634 bp, Physcomitrella patens
  Intron number 1 from transcript Pp1s234_70V6.2 (locus Pp1s 234_70V6) derived from phytozome v7.0 (chr-ID scaffold_234 ; pos 480542 to 481175 reverse strand)
tgcattgaagcttaccctatcaggtatcccgcctggtgggtattccctcttttgggcatattctgaattgttttgttttgttttgtttttcgtaggagtgatgtcttgtttcccggattcgaatcgttttctcttaacatcgctctgtctaaccctatttgattttgggtcattggtcgggttcgtgacttcgttgaatctctcgtgatcgcgtataaggtgacttggtttagctaagagcattgctctcataggtgctttatgaaatttcgcgtggtcggtgcggtgccaagttgcccagagttgcaattttattttaaatgcttacggaatactacaacgacggtttcgtttgtaaaccctagaaagcttgtggcatatatttttttatctttttatcttggaaaatatatccataagctttgtagtgtttttgaaagcttggccttttatcacgtttaatgccgcttaactctgggcggaaatttggaagagcaccatgagctcttactatgaagtttggactcgccggttgataatattttagaaggcagaatgcactaacagttttcgtttacatttattgtgctcataatcaaattttaacgaagatactgaatgttttttcgccagg

SEQ ID NO: 115378 - DNA, 921 bp, Physcomitrella patens
  Intron number 1 from transcript Pp1s315_65V6.1 (locus Pp1s 315_65V6) derived from phytozome v7.0 (chr-ID scaffold_315 ; pos 451147 to 452067)
catctcactctctgctccttctagcatgatatgtttggtgtagtttctgtcttactaagtttgccggattaagatcaagatatatatccttcagttatggacttgtcttcattttcccagttgttgtccatgtctgcgcgtggttgtttttttgcgaattttaatttctagttctgcttcgaatggttgactgcaaccgtagttttttgatcgattaaccataatctttttggtttttaatgtttaaactgcacccattcgttagaatgtaacgttgattccagtctttctcactcgatacctgctcaaggaatcgaccatagcactaattgatccataagtagtcatctgcacctggtatgtgcggaagcttagccggaacacatagcagcttcattacaccagcttgaacggctttccagtcaactggattcacacttgtagcgtctactttcaccaatacctgatccttcatagggacaggcaccggcacctctacaagctgccaatttaatcattgagaacaagaccatatcagagttacatctcggttacggaaaaaacagtattcgggggcttcgaaaacattcaaaaaaatcccagaggcagcgtccagcaaaatccttacgctccaaccactcaaatggaccttggcttggtggataagatttttcaagattacggcccataactttactagatccccaaagaggacagccataaccatagcccataatgaacagatccaggcaatgataccaaagccggaaaacaaaatcatctgatttcgtaatagctttaattcaatcaaaccgcatttgctgtgaaaccatagtccatatgttacgccaaatggtttcaatctaatgtgtgacattttctttagaacggaggatcgttagctgagtacgttgtatcacc

SEQ ID NO: 115379 - DNA, 782 bp, Physcomitrella patens
  Intron number 1 from transcript Pp1s52_245V6.1 (locus Pp1s 52_245V6) derived from phytozome v7.0 (chr-ID scaffold_52; pos 1901405 to 1902186 reverse strand)
cgtgtggcggcagcattggcgtcccgcgtcagcaggtgctacactttccctcttcatctgtggaaatcccagtcttgagtgacgtgattattgttctgggcatcagttagagtgccatttgaagagtgattgtacatgttctcgttttgtctctgatagcgagtcttgtgtttgtgagtcggtagacttttgatttcgattatttggaaatgcgtcttcttgttcagtgtttagcatctgtataaattcttgatgtagcgttccgtgtaagaacttgcacggggtgatcgtcttctgagcgtttcttttagggtgccttattggtgaatgggatcttcgtgttgggttgtcctctattttgtcttcatgtttacaacttctcggtatcgcgaatactctctccacacgcttactgtaactgtattgtttcggtgttatattctttctaatgggaaccggcttgtttgctttgaggtcatagtggcctccgaccttctttggctcgtctcctgctgcgtcgatgactttcttcaactgtctgctatgacgatcttgaaatttgacctaatcttgctgtgttttcaccaatgcgattccgaatacctagtgttacgcagagaatttacttggagggcttttttacagggcgactgttgttgcaatgatttgcactgtattttcttttcgtgtttatattactgctttacctaatttagtgatgtgtttggacttggacatattttgtaggggacaatcacttgtgcaagtaagtttccatacac

SEQ ID NO: 115380 - DNA, 474 bp, Physcomitrella patens
  Intron number 2 from transcript Pp1s234_79V6.2 (locus Pp1s 234_79V6) derived from phytozome v7.0 (chr-ID scaffold_234 ; pos 511355 to 511828 reverse strand)
gattattgattccacttccaaggacgcttccagtggtaagcaaatcaagagtcgggatgcaagagttcctttccagaacttatacttcaccttacagcaagagggttggatttttgtgtctgccaaccatctgtttaaccagcaatagaattctcatttcttaaaggacatggtctgatccttttcttcgaaaccaatccttgactgtaaatcatgttattccactttccacgaattgcgtttgtagctctcagtccagctgcactatgtccatccacagatattgtgaagtttacaaacgtggttaattccgataggaggtcttctcgttgaatttgtgtaagtgggctcatgagtggagtgtggagtcgttcagattaatgcacctattgaggtgttttgagtatgcgatgtgaatgcaactactcgcagtatggtttatggttcagagacactgacagtgtcaaaatgcag

SEQ ID NO: 115381 - DNA, 930 bp, Physcomitrella patens
  Intron number 1 from transcript Pp1s25_170V6.1 (locus Pp1s 25_170V6) derived from phytozome v7.0 (chr-ID scaffold_25; pos 1191432 to 1192361)
ccggctttttttgtggtgcgtcttgtggagctttacagtgctgcattgtggttttcatttttgagttgaccgggatttcacatggagattctggttgtgatcgacgttgagaaatggtagggtttttctttttcttttttcttttttctttttgttgctacacttgggctttctattcttgcttatcgcactattcgaagacctactagtacatattcccaatgaactcaaattgttgtgcacaattagctgttaagggttatctttgctgtagttctggttgtcatagccggttggattgtttttgacacatatcaatcatatagtttctggttactcgttagaagcgatgtgatttcatggaagttggatttatgcatccgtaataattagaagagttgtttttcaagctcataccgaatactccggttcttgtgaagtcttgcttcctcactgtttgtctcagaatgatatgattacgctggtttagtgtgatgggatcatgagacgctgtgttcaaattttgcgtctctgagttttgaatcgttttgcacgcttgacttcattttcattttcattttcatttttatttttgattacttttttgagaaagtttggacaagtgtttaagtcttttctgaattttccggaattagcttcttgtccaggttgatttttctttctcaagccagcatgttgatgtgtttaccgatcataaggagatgagaagttaaacccgatggtagtttctaaatttttggtcgaacagtgttattgtcaacttgttgtgagtttattgtcctgattttgactttattatcgtcttcagtactgtttttgtctctttgaaatgacacagctgcgattgactttggattcgtatttctgcttgcagacagaggagaggcttaggtcttcgttgtcgcataa

SEQ ID NO: 115382 - DNA, 457 bp, Physcomitrella patens
  Intron number 1 from transcript Pp1s303_63V6.1 (locus Pp1s 303_63V6) derived from phytozome v7.0 (chr-ID scaffold_303 ; pos 382007 to 382463)
gtatgtctcgtctttctttctcctgcatataacccatctgaatccccttggatgccttaagtgattctaggttctggttgagttgaatcatcacatgcgggtatgcaacgatgggcgattacgctttcgcgtctatcctggttttcttagtttcattctttagcatagctatggtggcgcaggggacagtagagataagtggtttctatcgtcatcaataaattaaggtttggttttgaatggttttgcatttgtggaacatggtcaacgatcggaacgatgtttttgtctgaagaatgaagtatctgataattaagttatgaggatagctcccgattagcccgtgcagaattgtttttgctctgatttaattgtccgcagacttcttgagaacctttgtacttatgcgtacattgatgcaggttcttttagaattagatcccttcttgaacgagct

SEQ ID NO: 115383 - DNA, 402 bp, Physcomitrella patens
  Intron number 1 from transcript Pp1s98_167V6.1 (locus Pp1s 98_167V6) derived from phytozome v7.0 (chr-ID scaffold_98; pos 968494 to 968895)
agaaacgccctcggcttgcgaggttcgtcttcgtctgaacgccgtttgcgcatttcccattttgttcaaatctacgctcaagactgttgtgtgagaagggttatattctttttttcgtaatcatcttgagcattcgcattatccatatattttgggacttctaataggttgacaatgttctcttgaaaactagttgggttagtcgccagtttaagatacttgctttgaaattgatggtgattgtaaataaagtactaataaaatggcgctaacgcagtcgtttgttcaatcttatggagttttgtggttttccttctcactttacgatgggtgtgattttgagatttttccctcacacttttttttttgttgttgttcagtgttatagtggaggcagtgaaa

SEQ ID NO: 115384 - DNA, 998 bp, Physcomitrella patens
  Intron number 1 from transcript Pp1s152_13V6.1 (locus Pp1s 152_13V6) derived from phytozome v7.0 (chr-ID scaffold_152 ; pos 68331 to 69328 reverse strand)
acatcgcactgctcaaaacctatgtgagtgcgcttttggtcttgacgcgagctccgtgtcgtgtgatgccgttttcgatcggtcttgggcgtggaatttgtatctctgcgtttttgtcttctgttaaatatggttacgtgtggaaacgaattggtcgattacttcaatcgcggagcactgctttgtatgcatgtggaattgtttcacgttttttctgggattgttagctaaggtgacgaagaattgagaattcgaggtcttttgtggatttggacgtggttttgtcgcggtgtattgcgagctgtttttggaaatagattgaagaatgaattattgctatgtatacaatcccttgtggatccgcatttgacagggatttgcggagtttggtagtgttatcggatgtcggcatttcgtgctgttttgagaaccgggagcgggttgattttggcatgctcttgttgtatgacttgagttgttcatagtttctttcgatcctttttgtttttttcgctattcatgtttgatagccgttgtatggtttgtgaaactttatttgcacacgggacgtgacctgcaagtcacgatgaattcgtgatggatggaagagtttcaagaatttggcagtgaaccgtttagctctaacttagaattgcaggttgtaattattttatggaaccctaaaatctttttgaggctacatcttgtacgaatagacttctgaagtcccagttttttttttttttttttttttttttttttttttttcctttccttgaaacacttccgaatgcttatgcctgtagaaacgattctgaggtagctctaatacttggatagaacaggactgacttgtacatcttcttggtaactatggttcacttggctgtcgacagtctcagtcttctttggaaacgaccagtccaaaagatatggggttttttaccttcctgatgaataatgatctacttggttgcatctgcagggcttgggtccat

SEQ ID NO: 115385 - DNA, 672 bp, Physcomitrella patens
  Intron number 1 from transcript Pp1s27_132V6.1 (locus Pp1s 27_132V6) derived from phytozome v7.0 (chr-ID scaffold_27; pos 1045033 to 1045704 reverse strand)
cctccgcttcgctgatcccctcacgtcgtatcaaagtatgtggtaattctatctttgcaacgactggattcttgttttgagcaatgttttctgaattttggattgaacaaaattactgaattgtgagataggtcttccatagctcgctcgtcatgtaattattcatgctcattctttgtgcacattagaacaattagagtactcttcagaattgaaaaagaaaaaaaaaaaaaacaaacaaacaaacaaacaaagaaatcacacgtacatcgcaactgaggctaactggtcctctaatctgctcttgaacttcgaagttagaagggaggagggaaggagagcagggacatatggaattaagaatttttttgaagttgttgcagctccccatttgcttttcttcggtcgtatcgctagtggcgtcgagaaaaataaaattttaaataaaattcaagatcacattgaaacggttccagggttttgattttggaaattggagtgttgagccctgaattgtctgcttaaggcaaattttccccagggcatggcacatggaggcttgacaaccgtaggagacaagactagaatttgggccatttcgaccttcgagactgattatttggcacgctgcttgcagggggcttataggaacgtgatcgacaaagcgcaacg

SEQ ID NO: 115386 - DNA, 694 bp, Physcomitrella patens
  Intron number 1 from transcript Pp1s61_107V6.1 (locus Pp1s 61_107V6) derived from phytozome v7.0 (chr-ID scaffold_61; pos 459601 to 460294 reverse strand)
agtacgtctaatttattatttttatcattttatcagcgtttttttgtgagaatttattgatagacaagtatcaagaaccaaggagcatgtaccttgacattattaacacgaaggcgcagcagcattttcactagagtctagaaactactttgtttctcagttggtcgttagtcacaaaggttcttcgttatgcatgaggattcttttgcgaacagcatttatctgcaactgtgatctagtaactatagtactgttagtcacggccagattttcaccttcttgttggagttgagccagttcgaaaaattgaaatgttttctacttccatcgattacatcatatataccttccttgatgaagaaaagaccacgggtttttagaagtgttctaaattcatgctttcaagaaagataagaaggccgaatatttgaagaagatgcttgccctctgatagaattataataaggttcagccgctagtaaatttgttacaccgattgatatatttcctaactacctagaattctttttgcatgggcagtggaagctatattgtcccaaaatggcttagcctggtagagagtcaaggaattattgagaagaaagtagtaatttgtgtactagtcgcacatatctttgtcattgctaaaatttgattatattgcaggctatacgataaacttgccgagaacgca

SEQ ID NO: 115387 - DNA, 480 bp, Physcomitrella patens
  Intron number 1 from transcript Pp1s107_188V6.1 (locus Pp1 s107_188V6) derived from phytozome v7.0 (chr-ID scaffold_1 07; pos 1153972 to 1154451 reverse strand)
gcgctgccgcttccttggcgatctctggcttccaggtacgtcttcgatagtgtcgtgtgtgtttttgtgcgagtccgttcgcacgttttcgcagacgttgtgctgtcgtcgttcaggtcgagttttctagtgtcactcttggattgctgagcgatgccgatgtgggttagctgcagatggtgtagtttgtctcgttgcgaggacttggacttttactgcggatggtgctgttcgtcgcaatccgtaattggtccttctgtgattatgggattcatatgtttatacgtattggatagtgtgtctatgctcttggagtatttaacggccgtgatagtatatctctagattttagtttgggcgttgattcgttattccattgtcttctctttttcttttttcttttttctttttgaattatttgcgagaactaactctttgtattcctggaacatcagggacagaagctggcatccgtttgca

SEQ ID NO: 115388 - DNA, 768 bp, Physcomitrella patens
  Intron number 2 from transcript Pp1s43_252V6.1 (locus Pp1s 43_252V6) derived from phytozome v7.0 (chr-ID scaffold_43; pos 2019473 to 2020240)
tgtttcggaaaatcaagaccaggtcggaaaacaaggtaagacgctggttcttagcttacacttgacttttgctgtgttttgaacttatgtcgtttgtcattttacagtagttaatttttgcgcaattcacatccaacccgaggcgcacgctagatggtcttggtttgcagcatttatgttgctcacacgcgtaactttggcactccaacttgtgttgatattttcatctttcaattcactcgagtgtggtatgatttaaaattaaaatttatgctttctttagttctttcattctccgatttagctctaaaggcttagtatttgattgttatgacaaattatcacgatttaatcaacatttttcattccactttttcggcactgtacaattttttcctactggcatcaatgtgcctctccgcacatagcaaggtagaaggttttcatcgcacagtacacgaccgaggatttacgatggttgactgattgtaaatctaaacccaatggccccatatgaatcagctgataccgatcttaaatgacgtgaatattgtagcgatcagcattcaggaatttctatagctagcactaaattcagtgcgtatgtattgatatccttccttcataatctccttgagtatgctatgtggcatttatatttttaatagtgttttagcgttcgaaagttttcgaatttgaatatgaagatgaaggcatttcgtttgtggcttaccgatgcaggtatttgaggcagggtttggttgtgga

SEQ ID NO: 115389 - DNA, 764 bp, Physcomitrella patens
  Intron number 3 from transcript Pp1s291_59V6.1 (locus Pp1s 291_59V6) derived from phytozome v7.0 (chr-ID scaffold_291 ; pos 423616 to 424379)
aaggttcgagaagacgaagagcttgagaagaaaaggtaatgcctcgctaagaatggcgttctgaccctcatgggaaagatatgtccaataaaaaagaaactggaagccttaaggatatacctctcattgttatctgctatgattctaatcaaattgctgatgttaacaggggaagtaacatggaagaggaatcagccaagtaattttgccaaaataacggcagtttttcatggttagcattgatagaatggatgggttagctttccatcgcagtcaaagtttgtagtggaagtgacgccatgtggtgagacatttctcctggtccatggcagtgcgattatgtctgaatcgaatcacttagtatcatgtctcgcacatttcacgtcgtccctcacagtgaatgtgtataggtccttattgtccacgggtgatcagtggaggatatgtttcagctgcctcttcaaattgagcttgtttgtcatctctggatgtacaatgtgtcacggttcgtatgtcgcagtatattcggacctgacctcgtgcaacacacctcaggttatgcatcagttttgtgttgtttctatctgcttttacattgactgcgtgctttgaaagaatcattatcatgaatgttaggttatcccccctgtatgttccactcaagcatggggatgggtttatccattacgggcgtatcattgtcgctaactatgcactatttatttacaggcggcagcaagaggctgaagcaaaggttattgagg

SEQ ID NO: 115390 - DNA, 690 bp, Physcomitrella patens
  Intron number 1 from transcript Pp1s52_78V6.1 (locus Pp1s5 2_78V6) derived from phytozome v7.0 (chr-ID scaffold_52; p os 866571 to 867260 reverse strand)
gttcccgtggctgcttctcacctgaggactttgaggtaccgtgtcaaccatctgggatttgctatgggctctattgttgcgcttctgggcggttttgcttggcgcatcgaacgagggggtgaaagagtgcgagagagagaggtaggagagagatttatatttagtagtttttgtgctttggagacagttgccagtttggtttattagtccctatctttcccaagtcgtggttgggtctctcaggcaagccctaattgtggtttgagctcggatgagccgtgacttgcgcgggctcatgtcgctggcgggcttgtgagttattcttttggttgtggctgtttggagtaagcgtgtgtgttttcttgatgctacttcgttctcacgacgtttgagcgtgtggtgtcggagtcgactgctctggattcttcttgtgccagttttccgtaatagacgaaatgagtgggtttgtaatatggcggagattattgttagcagagtcagggattgttgttttgagcattgcaatagcaagtcgcgcttcgtgggatcagaggtcgaaatagagatggtgttatttgcgcagaaactatttacgtgtggatgtatgaatttgacttcggttacgtttgagggttggttttcaatcgtcttttgcatgttctaaaaaaaatcttgcagttttgttgacaa

SEQ ID NO: 115391 - DNA, 902 bp, Physcomitrella patens
  Intron number 1 from transcript Pp1s364_41V6.1 (locus Pp1s 364_41V6) derived from phytozome v7.0 (chr-ID scaffold_364 ; pos 201575 to 202476)
gtattgtcgccctgaagagctaattaagcaggtgagaaaagttccctttctgccctcctaaccctagcccctgcgcctttaggaggggaataacacggtattgggtttaaggcggaattgggtgctgcggtcaccagatgagaaaaataaagagattgcatttcgccactgtcgcacagtcactggtgtctgattcattcacctctattaatgtcggtttatcaccgactcactctttagtgttttctcgctctgttccaactgagtaaactctgggctgtttgcttttttcgtacatatatatatatatatatattctattcttttctgttctcttggtgaaaaacactttgagaacacatcacagtggatttttttcagtatgccaatccagacagggcagaataaagacagcatcagcagagtggacagtcctgttctgaaccctttgtacatgtctacacctgggaatgagattcaattctaggtttaggatttttaggtttagggttttgcccttaacttcatctacgtaagctaaaccctgcaatagcttcactgtgtatatgatatttgctgccaaattacagttgtctcagtgaatgtcaagattcttttgtgggttctttaagctcttcttcacatgaacataataaatcatttcttgataattccccaaacagctggctccatattattctttacaaatggaatgaagaatgaaagattctaagcttagcacaaacttaacaaatgcagatgtaccaattcacattgtgatcttcataactcaaaaaagattgaacccatgggtatggggagctgtgtgttcttgtatctcttaggcaacatttcatctttttattgtaaaaaagttgatgtcaaactttggtcagctggag

SEQ ID NO: 115392 - DNA, 871 bp, Physcomitrella patens
  Intron number 1 from transcript Pp1s40_42V6.1 (locus Pp1s4 0_42V6) derived from phytozome v7.0 (chr-ID scaffold_40; p os 339306 to 340176 reverse strand)
aatacttggtgtaaatcagttggacctcagcagttcggcgccctatcataccctaacttacaaaacttcaaccgaaattgctgtgatcgtaatattcggagcattttgtatcgagaaacacatcttagagtgattggagctgtttttatatattcgtttacagtttgtatttttattttaaggtttgttttcactgtgtcgagtcgtgtttgattagagtagcgaagtggagagtagaaataaaactccgcatactgacaatttgtttctactctccacaatatcccaaagagactccgcactacccgatgatcatgtacggtttgcagcctctttgtgatgggatgttcacgttcgtagcaagtcagaactagtttacgagacgcttgatgtggtcattagctgccctgctttgagccttggagatcgcaggatcgccctccatttgtcgcggcatcctctttcctatcgtgcctcgtattggaggtgggtgtattcatgcgtcttgctgcgccagtacccattttcacagtcggtcgtttcttggtcgcggttttgctttgaggccttcttcttgaggtgacgtgggttggtgttgaagtagaattgatttgaggtaacacttgggcattttcgtcgaagattcggtccatacgcgcttgggagagtatcgagtggttcaaaccatccataccggctcgtgaatttcgaccttgcttgcctttttttaaagatatcctgctttttctggattatttcaaattagtctggtgatcttggaggatggagggaacagagtagcttaacgcagagagggatatgtaatgaacataaatttgacgggttgtgatatgagcaggagcttgcagtg

SEQ ID NO: 115393 - DNA, 776 bp, Physcomitrella patens
  Intron number 1 from transcript Pp1s364_60V6.1 (locus Pp1s 364_60V6) derived from phytozome v7.0 (chr-ID scaffold_364 ; pos 351107 to 351882 reverse strand)
gtggtttgagggggtgcggagtggcacggtaggttcatttatacgaacttgggattgaggtgtactcatttacacacttgtacgtctgttgccttgcagcacacaggaattttgtatcatatatcaatttgattaattttcagcatttgatacctgagtcaagcgcagtgttaaacgttgatgctagcaccctgatcattttctttctttcaactcagttttcgttcgatccttttccaagtgccgattgacattggaagcttttgctcgtttctgtgattgacatttgaagcctataactcgcttctaagtgccaatttccacggcacctgtgatattcacacacgacccgtgggttgtaagttatctgtcttccttcgtgtggaaccaacgagtcattgagtcactacttgataagattctagtactgagccgcgaagatttgccatacacgtacctttcttttggttgctgagtgatgtcactaggccgactgttagagccctaaggcatcacatgttaattgtaacatccccttttgcagcatttcataactagcttttcctccccgtcctggactcttcctgtgttaccgcagctgttggcgacgtgctcgtatgggcacgtcggatagtcaaacccccacctggaaatgcggattctcttattgactttcggtgaagcttggaaatgatcttttgcgtctaaacagacctgaatcgcgtctttgtctctgagcaggcaggtgaaccacgaaatcaacgaggtgggtgcaa

SEQ ID NO: 115394 - DNA, 911 bp, Physcomitrella patens
  Intron number 1 from transcript Pp1s10_183V6.2 (locus Pp1s 10_183V6) derived from phytozome v7.0 (chr-ID scaffold_10; pos 1373217 to 1374127 reverse strand)
gttttgtggaccgatacgtgtgtgatttcgtcagggtaagtgtcgaaaatcccttttcgggtgtgggtgttgtttggccagggctgaaattcgcgcttggcgtaacatgttgctgttgtgagatcgttgggatgtgggcctccgtcggttctctgtttacatatttaaattactttgcttactggggcagttctttgcctgcgcggtgtagtttctttacgacacgaattgaatgcattcatttctatattgaacattgtttgttttctttttctttttctttttctctgctcttcgtgtggtcttacacgactattaagctacttagatagatgagggtactgtattgacgtgaaattgacttttattttttatttttaaaaatcatagagtttttagaacatttggggtcttgtaggttttcgtattcaaactttagctctcgtctcttgctactgttatgaaatttcgtccaatgtgggtcgcatatcacttattagaactggaagtttctcttggagcgttgtttagatcacacagggatatattggagtctttccatcagcagaacatgtagagagctcctcatttatgtgaatgcacctaatagtaagggattcagtaaggaatatacagatgaattctagtgcatgcatagaatgagaagctactctgcatcgcatttaattggaaacatccattttctgcataatactttgaatgttcaattagcttagtttcacatgcattggtacgccgaactgaattgaagagagaccttgggatcttacagtggagtggaattagtttaaaaccagagtttcataaaaagcggagaggaaaacacttagggttcaattgttaagacttcaggtgaaacacgttgtcttagaagagagtggtttgagcag

SEQ ID NO: 115395 - DNA, 873 bp, Physcomitrella patens
  Intron number 3 from transcript Pp1s107_11V6.1 (locus Pp1s 107_11V6) derived from phytozome v7.0 (chr-ID scaffold_107 ; pos 63579 to 64451 reverse strand)
gagggaatttgtattgtatcgttcttcgccaagtgagtaccctggaactctggtacctgtggaaagcaagtacgtgagtaaggatttttattcttgttgtagggttatactttataatatgatgggtatcctctgcgtggttcctatcgatgaagtggtgaacaggatgttatttaacggatacgggttgatgttaacctctgaacgccatttcttttctaattatattgaagtgaatttagatgaaagtctttaaaattttaagtttcaagagcggtgttccaaattaatttagtaatgagaatatcacatttttatggcaattaggtgtgttaatttagggcatggatatttcggaacccccttcgctagtttggtaccccggagttgatagttggttgttcgagagttgaagacaagaggaccaacatggtggtcacaatgatgacaaaatatttttattgaggtcatcaatttgatcacaaggggtaccaaaatagacaagggtatctaaatatctgttcccttaatttactgatatcattttgaattggattatctacgatcttttaaaccaaaaaattattcctaaaaacatatgcaaccttaagaatcgagtatggtgtattaagaatgggattcatacactgatccattttttttggtttagtacgaatcatattttatggtgttaaattctgaacatcagacacagcattttggtatgttggtaattgtcggatggttcttgccatgaaattgtgcttcaaattttgcatccttgaattgcactaggaacatttttgaagcgcttcctgggcatctctgacggttaagagttaattgtgaaaatgatggaatcagggcagacag

SEQ ID NO: 115396 - DNA, 554 bp, Physcomitrella patens
  Intron number 2 from transcript Pp1s10_173V6.1 (locus Pp1s 10_173V6) derived from phytozome v7.0 (chr-ID scaffold_10; pos 1258750 to 1259303 reverse strand)
agtgtgaaattgatacacgccaggtaagtttctaaccagaaccattataaggaagagtatggtcgaaaactttgggaataacttcgtatttaaatagttactcacaatcctaatctccttcttttctaaagtagacctctgcgatacatgtaattcatggtgtagattgttggccaagcctgcaagaatgtgcactcaactcagtttggcttgagaaactgatggaattcaatgagcttcgttggaagtttaatcatgaactttgttgtttgaacttttcgaagtatttttaggcgatggtagatcactgcaacggctaatgatgtttcgtaaccattgtagaattaattggtggtttgattctttttggaacggctgcatgttgatgtaatcacaattttttcttttttttctttttttctttttatcaatgtctaacgtcgtttctgaggcccttggagaagacctaggcttgatcagtgtgggctatacttatgtggttcacttgatgttccacaggctacacgcgcaatttttgaccttagcagcacttg

SEQ ID NO: 115397 - DNA, 331 bp, Physcomitrella patens
  Intron number 1 from transcript Pp1s86_66V6.2 (locus Pp1s8 6_66V6) derived from phytozome v7.0 (chr-ID scaffold_86; p os 615770 to 616100)
cagtcactcaagccacgtcgcagttgtggcgttgggtgagttttcgagagaatcgtttgttcatttttatatatgttttttaagtttttttatcttctcatgaagagggctatttccgagtaacattcgagtttgagattttgtgtagtaggattaatttgagtgcagcttaagttcgctgtgagatggcaccgtttatgtgcgtttgattttttaatagttactatttccttcttgctgatttctatttttttactacttttcccttatatttttcaattttgtggtctttgcagtttgttttaggctctgtacttgtgcgagttgcctt

SEQ ID NO: 115398 - DNA, 670 bp, Physcomitrella patens
  Intron number 1 from transcript Pp1s40_165V6.1 (locus Pp1s 40_165V6) derived from phytozome v7.0 (chr-ID scaffold_40; pos 1048114 to 1048783)
atacattggtaagttttatattagagatttggtgttatataaatgttgcattggtttgtttgatttcaagatttacacattaaaaaatatgtgtaatttaatgaagttattttatcaaaatatgaatatgtggttagattgttcttttagaaactatggcatgaattatatattttgttaaaaacttgatttaattatattcatagatacattattgtaaagatactataatgggtgtagaatagcatttgtcaaacatcaaacaattatgcaagaatgaaataaatacattttgttttattggtatgggtggaattgaaaagaccacattagcaaagattacatttgatactatgcagcacatatacaatgtatcatgctttgttgaaggtattcaaaagaaggatagtggtctttcaataatttgtaaagtttagaatcaactaaactttgaatcaaaaccaaggagtttagaagaagcacaagctatgatgaaagaagtattgatgagcaaaaagttcatgttggtcttagatgatgtgaaggactagagtcaaaccaatgatatagtatctatggatgttctatgttctaacaaaggtagcatattaattgtgacatctcgaaattgggaggtggtaaaaagctaccctacaaagattcataaatt

SEQ ID NO: 115399 - DNA, 838 bp, Physcomitrella patens
  Intron number 1 from transcript Pp1s52_184V6.1 (locus Pp1s 52_184V6) derived from phytozome v7.0 (chr-ID scaffold_52; pos 1560983 to 1561820 reverse strand)
cattgctcatcactggtacgtgctcgcgaatgcagagatgagatattttaacctatttgagaacgggggttttggagtcttgtgacccatgtgtctattaatttcgactttctttaaagaatggtttatgtatgttttgtttgtgtgtgtgtgtgtgtgtgtgtgtgttttttttttttttttttttttttttttcgtgtccctgtattgttattgctaaaaatccaccggaccaccattggattctttgaatgtgtaccagtttcttagctgaggccttgaaagttgatcgcagacttcaaaggccttgaaagtgagtgacaatagacagtcgtcctgaacttaacctgttctaactcgaatttgcatcggtacttgctcattgggaatttacaaattcagttaatgtagtgtccgttagcgggcttacttcttctgctgtcctacttgaatctacatgaatcgattcgatcctcctgagaaaatcgtttacaagtcctacttctactaatattgaatagctgttggtgcgttgcgctttctttatcattggctctagctgtttgggtcctagtcttagcgcaatcactaagaacgatgtcaaacgtcagaatgaccgctcgttcacgtaatcttcattgttacgtgagggttgttgtggtcgagtttagtggtaaaagtatcgcctattgttgagtaaacagcttttagacttgaaattgcattagtttgggcatctagttggattattttgctcaaccgatcaaccagcacatgtgaattccagttttccttgaatgtagtctcgggatttggagcaaacctggcagaagcacag

SEQ ID NO: 115400 - DNA, 887 bp, Physcomitrella patens
  Intron number 1 from transcript Pp1s8_27V6.1 (locus Pp1s8_ 27V6) derived from phytozome v7.0 (chr-ID scaffold_8; pos 113242 to 114128 reverse strand)
cagcagtggcacgtgtctcacaagctctgctttaggtaagtgttcagcaacatagccactcgatttgcacgtgcctttctagccttttcagcgtgaaaccgagacttttggcctccatccacactggatatctgcatatttccttctgcgcctgctctctctctctctctctctctctctctctcttaccttcttttatactttcttttgcgtcttgcagcttttcttcactcagctacaaatcttgtttctgcaaaggtaaggattggctgataggtatggaaaatggttaggggaccctgtctttccttgcaggagaatgccaacgtggagttgaagatcttttcccaggttctgcaggatctcgttgttttccattttattactcgtacctggaaatctctaaccctctagtttaattacctccgtgtcgattctaaatggtgttcagaatctgagtttctagaacacgacctagttaacaggttgattattaccgtaacaattgtggcacgactgcataaaatagtgtagtgccacatatcagtagaggtggtaagtcggaagtcgtaagcaagtgcttcaggtcatttgcctcagttatgtagaatttgttgccttacatggtcgacatctttcacagcaagtgctgcacactcgcttcgttatgaagatctgtacgactttgatttatagtacattaatcaaatagcattggtaatttcgtcttattgggtttggagcactggtattgacaagatattgagttttcttgcaatattttagtgagttcaatgaggtattgtccagagcttttagtaaattttagtaccttagcacatgtaatattcttctctgtttctgttcatgataggtcttgtatacaa

SEQ ID NO: 115401 - DNA, 708 bp, Physcomitrella patens
  Intron number 1 from transcript Pp1s10_32V6.1 (locus Pp1s1 0_32V6) derived from phytozome v7.0 (chr-ID scaffold_10; p os 284780 to 285487 reverse strand)
ggagagaacgtcgatctctacattcccaggaagtggtaagcttgcatactttgttatttcatgctccttgaagttgcgtcgaataagtgcgaaggttgtgtttggaggctgttggggctgtagattattcccttttaagctgtgtgcgtcttcggcatggtcattgtaggcgagccgttcttgtccgctctcgacggattcctttctgtgtgcatgtattgcgttcgtcttcattaggtgattggcgtgtactttttgtcaaacagggttttttcgatttgacttggttttctttttctttttcttttgattgttaggttatagctggttgttgcagttgtactgtgccatcgatgaccgtcaattgcttggtagcgactctgttgatgtttcttttctatgctcaagtggcatacgagttcatcttgcgtaaattgatggttcaatcaagtgatatattgtccacgaggaactgtcttagatttcgtttccacctcttattctcggaactagctttttgtaggtccaaattctgcagttactgtgcccagcacagtatatttgtgaattagtgcgaaggaggtgccgaattgctccctttcgtgaagttctatgacagctatgttgggctgtttgtggaagaaatgtttactgagaattatgtgcgtgtccacagttcgtcaaccaacaggttgatcacctccaagg

SEQ ID NO: 115402 - DNA, 536 bp, Physcomitrella patens
  Intron number 1 from transcript Pp1s43_8V6.1 (locus Pp1s43 _8V6) derived from phytozome v7.0 (chr-ID scaffold_43; pos 29849 to 30384 reverse strand)
gttgctgttcctggcgcattcactcccacttgcaggtgagttgcttcttcatgcctcggtgtgcttttgtgtaaggctggatcaggttcttaacccattctttctccttgtttcagtcgccgggtcacggtgagggaagacatagtgttgcgtgggttaatcttttgggtttcggtgttgatgtggagtctgccgtgctgtggagtttctcgaaagattagtcagctctgagcctcgatgcgaggtttttgtttagtttttcatgtgaaaatatccttctggaggtgtcgagtatcttttgaaattggagaatagtatttcgtttcggtgctttttttttaacattgggttttatgttgagtcgtttcgttggtctattttgtggtttgattggaaacgttggactgaattacacttcgcacttaacaagtagtatgcgaatgtgttgcaaacaatgtcattattctgtgtactgtcgcttatggttcacatgtcattttgtggcagccaggaacacgttcccggtttcatcgaca

SEQ ID NO: 115403 - DNA, 393 bp, Physcomitrella patens
  Intron number 1 from transcript Pp1s40_4V6.2 (locus Pp1s40 _4V6) derived from phytozome v7.0 (chr-ID scaffold_40; pos 26677 to 27069 reverse strand)
tgcggagcagttgtgcacgttatttgttgtggtacccattccttggtttcatgtaggtgatgcgattgttgcgggattgcagagtctcggcattgtggctagggctcataggttcggaggaattgggttcagactggaattgggggttttccaaaagaaattgtgaagagtatgcgtgtttgatgcgccgttgttctcatttttttggttgtaggaatttttaatctcgtggatttgggttgatgtgttggtggaaggtttgattgagagaactatacattccttcgctgagaattttctcgtgaagaggggtgtcgatttatttttgtttcaagcttgataggttgtcgcgtggtagtgtaacgggcaggtagtcaaagcggaggaggacga

SEQ ID NO: 115404 - DNA, 947 bp, Physcomitrella patens
  Intron number 1 from transcript Pp1s25_63V6.1 (locus Pp1s2 5_63V6) derived from phytozome v7.0 (chr-ID scaffold_25; p os 541599 to 542545 reverse strand)
tgctctcttccaatttccgtagaggcgccgtgcttgtaagtttgtcatctcctgatctttagttgacgggaatttctctttgaacattccatgaatggattcgcacagttccataatgcaatgtttcatgcgcgtgaggcttgtgcaaagattttttgggtgcttttacctcttgcaagtaaccgttgacttattcttggagcgttgccgtctttgaggagtaactttcttcatttcttccagagccttcatgcaatgtagttacacatcagaccttaatttcggaagggctgtttgtgccgagcattgagtaagacttttgttaacatttagtccattacaactcgagataatatcagagtgtcgaatctcggactttgtttgagtatgaggagtatgccaacacttgcgagcaggagtatatgccaacacgagtatgaatcaatgtggagttgtaactgccaggttctggcagttccgcatgccaaaagctcttttcttcatccagtgcagagatctattgcgcttctgtccggcttaggttgagggataatgaattggggaactagcaaaacctggtgtgtaatcgcacgcagctgtgtaatcctggcgccgttcaagtgaactcacgaaccaggacacatacactcgagggatccacttcgacaatcaagctctgataacaacgttatatatatatatatatatatatatatagatataaacatacatatatccacatgctcagacagatgtgtgggtgggtatgtgtgtgtgggtgtggatatattataataatttcttaccgtatgctgattctaagttggttgtctggatcacatgctttgtcccacaaaattgtggtgatgattcgttttgttgaagtccttacacagagaactgaaagctgtgggtgggtgtgattgaccatcccagggttagttgcg

SEQ ID NO: 115405 - DNA, 539 bp, Physcomitrella patens
  Intron number 1 from transcript Pp1s25_198V6.6 (locus Pp1s 25_198V6) derived from phytozome v7.0 (chr-ID scaffold_25; pos 1302492 to 1303030 reverse strand)
tgcatcagctttgccgtccatcgtgttttgtttcggtaaagagattgttgtcgagggaatgttctcagagggccttagacagctgtgattgagtgctctggttatagtgaggtgtttggatatcgtgataaagccttttctttttcttttctttttatatatatgtgcatgtatgtgtttttgtgtgtgtatgcgtgggagaatgagtgtgagagtgtgttctattcggtgattcgtttgtaatttctttttcgttatgttcgggttagctggttttgataattttttggagagtggggaatgagagaaggatttgtcgccgaactgcgcagtgatgtgcgagtcgaatttgtgtaaactgtgacgagttttttaatggcatagaatgtgggcgcgcgggggttttattagctttacttcatggtctttgtgcttccgatttacttttctccgccaggtttttatcctgtacaatttgaattgtgctatatgatttgtgtatagaatcggccgggcaatcagattcgccatagccttgt

SEQ ID NO: 115406 - DNA, 497 bp, Physcomitrella patens
  Intron number 1 from transcript Pp1s267_86V6.1 (locus Pp1s 267_86V6) derived from phytozome v7.0 (chr-ID scaffold_267 ; pos 567005 to 567501 reverse strand)
ccgaggtaagtcttctcgattttgattaggccgctcctcacctacacttattaaagttcagcgtttctaaaaaaattgtctgtattggagtttgttatattcttgggcagatgacctaacgtgttttattcgtggggttcgtgtgtcatcggaaggcattagcagttgatgcgcagttttgcggaaacttttatgtcacagggaatagggagaaattaggtttaaaattacttaattgttaatatttcattagttttcatgttcttgaagaaaacgtgatatatgaaggtgttcatacatcaccgctgttgctccctgcttgaatttcaatcgtgtgtttgttctgtaaaataccgaggaagagcacaatgactaattatctggtgtatagttatccccatggacttcgtttaacatgtccaacgagttgacccggcggcatattattttttgattgtgcagatactactgtgactactgcgacacgcatctaactc

SEQ ID NO: 115407 - DNA, 285 bp, Physcomitrella patens
  Intron number 1 from transcript Pp1s40_186V6.1 (locus Pp1s 40_186V6) derived from phytozome v7.0 (chr-ID scaffold_40; pos 1309409 to 1309693)
tcttccataattttccagaggtaaatattatgataggaaatgatatattatttacctctctaggaagtataccttttcttctatcactacagcatgaaactgtttttgatggcgttctgcttacattggttgtgtactgaaggtttgcttgaatgtaactacaatacgtgtttccgtattatctcaaagatttgatattggttactgtggtagcgtccgctccatatttgactgagttttttgagcataggtggttggagcgaagagagcacttgagtacaatag

SEQ ID NO: 115408 - DNA, 573 bp, Physcomitrella patens
  Intron number 2 from transcript Pp1s375_13V6.1 (locus Pp1s 375_13V6) derived from phytozome v7.0 (chr-ID scaffold_375 ; pos 72024 to 72596)
tcgctcttcagcatccgaagagagtcgaccagaaggtctgtttaacttattctttcttcgtccaattgttgatccatcacttctcaacgggtggttcggagccaaaacttccttgcacaggacttggacaatattcactctgacattttgtgactgatagtggtcataatcacaatgtacattgcacagattttgagcagttttatctgagtgttgcgtattcagtgtttaaaccccaattttctgaagcataatcttgttctaggtttacaatttttggatcctttggcgcttggcaaatgatgttgtgatggcaattttgcaagaaatcggcaacactgagtagttgattcttgtgagttttcaactgtgacagggtagaaaaagaagtttattttcgcattgccggaatcaatgcttgtgtttttagtagcctgaacacttcgattatacaggaaatttttgtggctacattatttgatcttccctctgttgcatagttccgttttgacgagttttttgttctgttttgttgttgttttgtatcttgcttctttggtaatagagaactcg

SEQ ID NO: 115409 - DNA, 595 bp, Physcomitrella patens
  Intron number 1 from transcript Pp1s31_202V6.1 (locus Pp1s 31_202V6) derived from phytozome v7.0 (chr-ID scaffold_31; pos 1067214 to 1067808 reverse strand)
acggcaacaggaggccacaaatcaacgaaggtttgtagacaactctgtctctcaaacttgagaatttttgagctggtagtccttcgtgttttgagtgttacatgttgatggttgttgatcaccttgtcatcccgttcttctcactgtcccattttggtgtgcctttcctggtatgtgaagcatgacggaatccttcgaagtaattagtgttacctctatgcctctgacgttctctttacagtgtacgaagtgcgttagttttcatatgaccaatggtattagtgtttacagataaattaacagaactgcagatgggtgttaattaaataatgttacttgagtttcacaatctagaaggcggttagctattcccgtcgcttgtgtagggtatagattggattctccctgctgtaactcgagatacgttagtctgtcaacactgcgttgtcaacacgtcttgatggagtggtttctattgagaacttataacattggccacatctacatcctcgaggaaaacagggaatcggtgatttttttcgtacccttactatcatgtgacaactttccttctgtcattacattcatgcaggcg

SEQ ID NO: 115410 - DNA, 693 bp, Physcomitrella patens
  Intron number 2 from transcript Pp1s137_148V6.2 (locus Pp1 s137_148V6) derived from phytozome v7.0 (chr-ID scaffold_1 37; pos 511401 to 512093 reverse strand)
ttgggcaaaaaggttgttgttacgggtactcccctcgtcccctcccttcttcttcttcttcttcttcttctctctggctctctctcacacgcacacgaacacagtgtactgtatttgaagacaagtacaatgttctaaaatctccccttcatttttatttacttttcgttcgttcgttcgtcgtcgtcgtcgttgttgttgtgaagcaattctgaacataagctttacttattagaagtgtatgctgttcatgaggattttttgcctctgacttgtgatatcttttaataccttacctagtgaacttcagagaactacaagcagtttagtaagctccgcgcgatcgatcctcgtctacgaagtgtgtcggtgtagttagcataatttcattactttgtactgcaaacccgtgtgtagtagattcaaaaatcgaactgcagtttcaaagattcgagtgttctgaccaattaatcgttgatcccgtcgttgcgtgtccggatattttttgcataaagacatttataaggttgtcttcgctgaatcacttttgatgtcgtggcttggtttttgtaatcctggtgagtgtcagtgttatgtgaggtcttcttgtggttcctctctgccattggtttgacaccttttccttggcactagacaggcgtgcgttgaagagattattgatacttggtgcaa

SEQ ID NO: 115411 - DNA, 693 bp, Physcomitrella patens
  Intron number 1 from transcript Pp1s10_228V6.1 (locus Pp1s 10_228V6) derived from phytozome v7.0 (chr-ID scaffold_10; pos 1730446 to 1731138 reverse strand)
accctcgtagcattgctgccgcatttgtgcttctggtaagttatcggggtgttcatattgcgcgtgcttgttgaggtttgaggacttggcatatattatgaggaagagttccgatatgctcatctgttcagttacttattcctgttcacctttgggttcttggttactttcctttttttttcattgatgcatcagaatttggatcatcgtgaagtcgctttggttgtggagctgtagatacttaactcacaatgcgagatacctcaatggtttgttttggtagtctcgttgtgcactctgttgctatggcttgcttgaaccaagtagagacctatcgggaacagttgatgactgtaggcaggatgttgacgacaagtcgtggcgtcacttgggcttcagcttgatctgcttgagctaataatctttttgcatacccgacccttgtgttgtactattagaagtcgatcgttaattctgccacaccagcttgaaattgggcttgtggtgcgtgagtcgaatgcatggtctaattttgatcctcgtctccgctgtcatggaatgacaggtcagggttattggttttcttttttccctcagaaatgttcaatgctaatggtgtgcgatatgccaatgatgggaacgatatttactagagtctctgcctttcacaggttctgttaagaaactgtcaag

SEQ ID NO: 115412 - DNA, 623 bp, Physcomitrella patens
  Intron number 1 from transcript Pp1s86_217V6.1 (locus Pp1s 86_217V6) derived from phytozome v7.0 (chr-ID scaffold_86; pos 1399137 to 1399759 reverse strand)
ggccactcttgctctcacctgccaaactttgaaatgtaggtcattcgacctaattgaggaattccagttttggactcaaatatatatatatatatatatatatatatttctgtttttgcttggctttgtttatatcctgaatcctgtgtagcattcttctaattgagggttgtgattagagtttagatcaaatggtgcggtatgaagttcatggcgacgtggacgtctctgtcatgcaatgcttttgatacaagcttttgatcattgttagagccatccacctacagttatactcttgctgaactggccgttagctacaattttttaattctatttgcaggattttctgttggtacagtttgtgagtggcttgaactttaatggttattaatttcgtcagcgttgtgaccttggtatggctgggagggttcaagattatcgtagtgttgttgatgcttcgattatggcgggatacggaagaaaatagctacagaatcgttcctatgtagagtttagtgataaacagaagcttcttctaggagttattcattacattgtcatgaacttgtactttttcgtggatttcagatcttccagttttgaaggaagtgatagctttcacc

SEQ ID NO: 115413 - DNA, 1055 bp, Physcomitrella patens
  Intron number 2 from transcript Pp1s31_203V6.1 (locus Pp1s 31_203V6) derived from phytozome v7.0 (chr-ID scaffold_31; pos 1077632 to 1078686 reverse strand)
agtatatcagcgaatcagtcaccgccatctttcttgtaagattactagcaagatgtggatgccaattctgttgatctgttgagcttattgttgagcttgcagccttcattgtactatccttccgaggtaggttatatcgaagtgtggaaatctatttcggtaatcatatgttcagctattatgattcgcacccgaactacgattgcattttctgccctaaatcacgaaatagcatagaaactagcgaacgtctaaaggccctccatcgagtggtttatgatcacgtctgcgacgcaattttttcttcaccggcggtaacctgtaaaggttaatacttttatatacatcaagtaatcaccttcaggttctgtagtattcatggacatgtgggatgattgaatcgtaaatctgcattatccggccctttcagctgtcctctctacaccactcatattctacagtctttctctagttctccgcagtaatatatttcccacagaaacgcctgttgtcgctgatcatgaaattagccttttgtagagaagggtttccttatcgaatgaggtgctcatcaagcgcttagtgcttctccttaaactgctcgtacttcatttcagagcttaaattcagcagtagtacttgctatgagaaagacatcgcttcatcacatgcttttcaactgatcaggcgttttccatttgtacccggcgaagtgatattaaggactatcatagtctgcctctccatttttattatctgaaaaggtttttgctgcctgtatatgcaattgagttttgttttgatgtgcattagaattctttgtagattcttctcagggaggatttcagttttgaaaggcttgtcgtgcgcttggaactttgatgtaagagatgcttttgttgctatcgatgactttacctgcattcttcggttctttgttcccaaggtgtagataacttggtaggaccaaagaagacacttgtcgttttctatttaaacaagtattcatcaatgctgcagggtttctgtacagggatcgttgtgctggtcacaag

SEQ ID NO: 115414 - DNA, 931 bp, Physcomitrella patens
  Intron number 1 from transcript Pp1s458_5V6.2 (locus Pp1s4 58_5V6) derived from phytozome v7.0 (chr-ID scaffold_458; pos 42166 to 43096 reverse strand)
tattactgtggcgatttttcagcagtgaggtacatgtgagatgtagagaaatacgtcatgaactcaagtctctacacctgtgtgagtgttttgtggtttctgcgatcgctactgagattgagattgttatctcgaagagtcctcggtgtcatcttagaacacatattgcaattgaatcttcgttcaaagattgctattttcgtttgggtgcttttagtttcagaggtagccaacgaacgaactgagataacgtatagaataggttattagattcacaaaaatgagcgagtttgtaatcttttgtacaatcttgtggaggtttatgttttgatagatttctttgatctttttttcccatctttcctgtgaaagagaattactttgatagtaggagaggcctttagtaacatgaagagacatatcattgcaattcctcttagaggaaatggtgtttttcttcctgagtggtatgctattaactagaggatcgtaactgatctgtgaagcgactttcttaaccatccttaaatatcttgacatgattgtgagaaatgctattcagaatcaaatcgctgttctgtcttttggattaatgagttatgcttcgtgcctcgggatcctatggattattatgtctctgccacgagtcctatgttatctgtgtcacgtatctttcgttcattttcatatacgaagagttcctcacacttagcggagcgattgactaacatcttactcattgcaagcttttctcttgctgttttgaaactcgaatgtaacgttctcgattctcgctgtgtgaatcaacaccagtattcgttattttaatccatttgaatttatttttgttatcggatgattagaagcactaaatcgacattttctttggatatcagtgtgaagggaactgtcaataagggatcttctagtc

SEQ ID NO: 115415 - DNA, 849 bp, Physcomitrella patens
  Intron number 1 from transcript Pp1s25_147V6.1 (locus Pp1s 25_147V6) derived from phytozome v7.0 (chr-ID scaffold_25; pos 1069824 to 1070672 reverse strand)
gcaagggtactctttaccaccaatcttatcaggtgttagaaattaaaatttgagttgtatgagtttgttttatcatgctatgaaattgtgtaggagcctgagctagtggacctctacaatttgatcactgatcagtgcgatttatctctaacaaagtctgccattttgggattggcagaatccattcagtaatctagggttggttgtgtagtagctttcaattcttatcgtggacaatgatcctatttttatcgcggcaaaggtcattgaagactctaggtgacatcttggataagtgcagaatagttttcctgtagcagtgatttcatggccgaaacccatccgttgatagatccctcaaaataatgcggacatatcatcgaaatggacgcaaggtggtcttttatagtaatatcatcgttgagagttgtgcgccaggttcagcacccattcatttcatgggattaaattgcaagcaaatctcagtgaatgcacacatgcagagaaactgtacttctaggttacctccattctttcatatgccacacgggagtacaattttctcgttagcgatcttcacacatctcttgttgggggagtttcatctaccaacccactgaaagtttagaggttgatttgtaataaggaaaggatgctttgcagctctaatagggctgtcacacatgccctgcatttctatggcacgttcgaaaccaacctgtctacgagaagcgcaacaagctcatcatggaaaagatagcctttcctactcgacaaagcgtgaatgataatgatttctgagtatgtctcacaggaagaaacagatactgaagaactgctcgttccaga

SEQ ID NO: 115416 - DNA, 445 bp, Physcomitrella patens
  Intron number 2 from transcript Pp1s107_137V6.1 (locus Pp1 s107_137V6) derived from phytozome v7.0 (chr-ID scaffold_1 07; pos 886702 to 887146)
tttctaggtacatattcgcacacaaagaaatcatttttcttgcaggttcttctgaagtattcgtgcagtgtattctataattatgctgtggcatgttgaaagatgtttcggcaacagatatggagattagactaactttgatcatgtagctataccctcattattttgatacatatcacacgtacagttctctgtagatcaaagagaagtgcatttataagctagtcagatctttcggaactgcatttggaagtcttattacttcgaagactactgacttgtaatgttttggtttttttgttgttttgtgattttaacacacaacacttcaaaaagttgaatggaaagtaaaatacagaaaataagagataagctaaaacaaaaatgagctacgtatcataaattgttcgatctgtttcagtgcgaaaagcagccgcttgggctg

SEQ ID NO: 115417 - DNA, 370 bp, Physcomitrella patens
  Intron number 2 from transcript Pp1s117_53V6.1 (locus Pp1s 117_53V6) derived from phytozome v7.0 (chr-ID scaffold_117 ; pos 442413 to 442782 reverse strand)
cagaacgcggtaagcagatttaatcttccttctcgatttttgtcttcctggaatcttgctcagtagggcttactatgaatcaataatattcatccggccttttctgtaaggttctgttttgttcttgtttgctccattttttttctgtttgagtgttttaattgtaatcttggtggacgggtttgttgaagattcttataattgcgcttcggttccatacacatggtttaggcattgcaatactatataggagtctttcttgcccactcaaatcttcaccatttaaatttcaagcttgtcatacaagaagtggcatgattggttgtattgcgtaggccaagaaaaagtgatagcgattgttcagtatatc

SEQ ID NO: 115418 - DNA, 683 bp, Physcomitrella patens
  Intron number 1 from transcript Pp1s27_171V6.1 (locus Pp1s 27_171V6) derived from phytozome v7.0 (chr-ID scaffold_27; pos 1335174 to 1335856 reverse strand)
cgttctgttgctgcctagtgagttgttggtaagtggcgacaacttgttgtgagcgtgctgggttcgggtctagcttcacattacggtgtttgatgttcttggttgaggtttatgaggggcacagaaattgtacgtggttgaattttccaattttctgtgagttttgagaagtggaattggtgtgatgttagagtttgggaaactgacagagagttgggtttggttagtggtcgtggtgtgcatgatttacattctgtttttcatgattctctttatttttcagtacttgttgcaaattttacttgcagtgcttgtatgtaattttgaaacagaactgaattgtgaatggtttacttggtttgtgggtgtccatgatatttattcgtttattttctcccccttcttctgtaataggagtctgtttagttttcatgaattatagcatgttacggcttatctgaggcattggcgtctgagtgttgcaacgtcattttttatcgtgggtgtagagatgggcggcagtattgtctcgctatatgtgattactattattattgttgttatttattgcttctactttctcctctccatacagtagggcttccttcctctgttcaagatgttagcattttatctggcgcattttgtgcttgtgcaggttttccaggttctggaggtcgatt

SEQ ID NO: 115419 - DNA, 646 bp, Physcomitrella patens
  Intron number 1 from transcript Pp1s86_25V6.1 (locus Pp1s8 6_25V6) derived from phytozome v7.0 (chr-ID scaffold_86; p os 241256 to 241901 reverse strand)
agggcgaaggttagtagctttctggctcctttattcatcttctctgtatttgtcgacgttctgctctattgcgacaagaactgtttcggagtatatgtgttgagtaggattctgattgtgctttgctttgtccttcgttgtgagtttatttgattttgcaaactcattgctctattttataccatttgtagcgctgtgggtttccttcgtacctgcttagatttcgttaatctttcttttgaggacctttgttctctcgttgagcacactactgagcacattttgctaaccgaaagatacaacgcgttcatctctgacaagatgtgagaaataatgaaaatcttcttcttttcggggttagggttatttgctgtttgtgccggtgatgcctgtacttaagccccaaagtattggtataccttacgatgctccccttcgagtccatccgacagtggctcgcgtgatgccgtgcgcgattataaatcatgcagatttcgtagttgtatatatcagtgtcttaatattctatcgctgagagcctagggtttattttgacttttactccagataaatgctgagaatatcgaaatgctattcatacgtactgattatatgttgtgtacatttgcagtggaagaaaaaacgc

SEQ ID NO: 115420 - DNA, 537 bp, Physcomitrella patens
  Intron number 1 from transcript Pp1s10_4V6.1 (locus Pp1s10 _4V6) derived from phytozome v7.0 (chr-ID scaffold_10; pos 23432 to 23968)
tgcaggtggatgttttctcctctaaatgatgtgattctaaaactaggtcttgattgtgtctcctgaaattgacgtttaatgttgtactcgggaaccgagtgggtgtttacctagaagcacaaaaattctttgagttttcgtttcttgtcaacacacaggtgatgggtaaccaaatggttgacgagaaattcgcacttttccatagtttcgtgaaccatgcacgccatggccgtgtgagaatagagatatggtgtgttgccatgaaaggaaaattgccatgaaaccctatgagcgtggaaaacgtcgcgcatttcaaacaggagtttgtgtgaagaggtgtaccaagttaggacgattatcgacaaaatacttgcctcgagatacggtgccacgaagtatgctgtattctttcttgcccaccgtccaatttagttccagcaccatatggcaacccatgacgattctgacacacagcttgctgctcgtttggggccatttgcagattccagaaacctggtcgtgcagaaagggactttg

SEQ ID NO: 115421 - DNA, 737 bp, Physcomitrella patens
  Intron number 1 from transcript Pp1s68_79V6.1 (locus Pp1s6 8_79V6) derived from phytozome v7.0 (chr-ID scaffold_68; p os 320842 to 321578 reverse strand)
aaacgaagcaatcaaacgcggcgttcatcccggtaggacaccccaaactgcttgaactttctctcgaatttcccctgcagctcacatgctaaaacctagagtgaaattgtattgaagtcttgtgttgagttggagaattacagcaatttgtaagcagcagatcagagggacaccaggggaaaatcttcaatcacaatttattttaaaataaattccaaacaagtcgagacttttattggttccacactttatcaggttattttttcctactatatatctatgtatttttccaatctttcattttgattttggcgatgcatccaaagaacagaggatgcctgctttggtagaggaactgatgttgggtttgtctgagagttaagcatgtgggacacagtacacttgaaagtgaaatcgtcgtcgtaaaagattatggaattggctttctaccctgattttgagattttagaaattgtgaatacgacactccaaattatttttcagtctagtggtttttaagtttaaaaataagtagtgtgtgtgtgtgtgtgttttttttttttttttttttttttaatcatttccttcagccaaagcagacatttattcaggcgaatgttaacggattccatcgcgttcttgctgtagtagagttcaggttgtctgggatgtagaaaatctccatatgttggatactagcagatcacctaagcagaagataacggagcagaaaactc

SEQ ID NO: 115422 - DNA, 424 bp, Physcomitrella patens
  Intron number 1 from transcript Pp1s117_137V6.1 (locus Pp1 s117_137V6) derived from phytozome v7.0 (chr-ID scaffold_1 17; pos 915783 to 916206 reverse strand)
gttcattccgctggttaaggtctgcgtcgctgttccctctacgtcttctgttgcgctgggtttgtgcgacctttttatttatttatttatttatttttacccgtggttgtacgatctcggaagttttggttggaacattcttttctttggggaaagatggtttaccagatttatagtttctgatctctgttttaggtttcgtatttttttgtggggattaatcaaactgaaattctacgagagttactctgtttcgagtatgagtcctcgctgaggaggatcaatgcagcgtatgcgaatcgactcatcaatcggcatgtgttgctgcaactagcaagttttttgatcatttcgaccctatgattattggccttgcttttgttgacatgttctgtggacgataacagagactcggtgctggaga

SEQ ID NO: 115423 - DNA, 631 bp, Physcomitrella patens
  Intron number 2 from transcript Pp1s10_72V6.2 (locus Pp1s1 0_72V6) derived from phytozome v7.0 (chr-ID scaffold_10; p os 473789 to 474419 reverse strand)
catcagaagattggacttacaggtgaacctccctacaaaacagggtgtcaaattgttggctttgggcaatgcgccgcatttcgtccaccaaagcagtcatctttgggagcgatcacatagttatccagaccacttcgttgccattaaagtttcgactgtgttctgagaatgggaaatattatttgtattgacagcttacagctttttctattatgagcatcgtataccccctgccgcactccaaaagtagatcacattcacatttgtagtgcacaagaacccactaggccacccctacaattcaactcaaagtggtctgtagtttactacttttatttctctttttgtttgttgtttagtatctcttaccgatccattccaaaatggactatctgactattagtttaacatctttatccatcttctcttagttcctttatttcgagagtttttgtgcggtgaagtgatgtttagcgaggatccaacaatttctgtggcatctctgcagcttttcaaggctcaaagcggtgcagcgtcgtgtgcggagaacagaaactgtgtcagaccaacaggctatgttgtgtcccaactcttctgtagaagaaattcctcgctgagccagtatctttgg

SEQ ID NO: 115424 - DNA, 717 bp, Physcomitrella patens
  Intron number 2 from transcript Pp1s315_36V6.2 (locus Pp1s 315_36V6) derived from phytozome v7.0 (chr-ID scaffold_315 ; pos 217460 to 218176)
aaggtatggcttatctcattcggttagatgtgttcttaggtgtaatgtagggtatcattgtttttacggattaagcgttattgatctgtaagttgaaatcagcactggatctgatattgtgatcttcattttccatttggctgagttccttatcgccgttagagtgaggtgacactgcatttcgatttcacatacattagaggataatctcaacatagagcttgagtacgatattggtaatggtaacaactagactagtatcgcatacatgatttggtttttaaagacatcaacgcgcggtctttgaatcgtttagttgaattatttcaaggtattcgccacagcgtttctttgaaatggctattgaaaatgatgagaaagcattctagttgaactgctctcgatttcccatccttgttgtttcgctttcaggaaagttgatatttttttgttaattcagaaacatggtgggcaggtattacctctttgcgttaagcagtcctgaaagccgcccttcaaaatcccattcccgctgttgcgaacacgacacaacggcctacaagaacagaacatcattttactctcatgagttcctcccatatacatgcagaaagtaacagggaagtggtctttgtggtcctggatactaaccaaccaacttatattgttaatagtgatgtccattcattaattcccagggtaaatttaggcaaagag

SEQ ID NO: 115425 - DNA, 882 bp, Physcomitrella patens
  Intron number 1 from transcript Pp1s336_16V6.2 (locus Pp1s 336_16V6) derived from phytozome v7.0 (chr-ID scaffold_336 ; pos 39628 to 40509)
tctgcctcgattgctgccgtgagtgcactacctgaagcttttttgctcctactcttgaatcctaatcctcttattctccctcctcttgtcttcatcccgctgttttcacgcttggtttggtcacatggtcgggataatccgtcaccttgtccggcttcgtcgaattctgtgaattgtgtcgtgctggtttcggaagatttgagctgagcgttgcatgccgttgcctattctgcgaggttgcatcgattttcgttatctggtttagaggtattgaagaggcctttctttttcagagggtttgaattggtgtggatgatttgacagcgttagtgctggcattgtgatagtggtgctatgaagttatgccccggagagccctaatagttagtttctttcgacatttgatacacatatgcagaattcagtcggttttgtcgtgagaaagcttatcagtgtttagatgccaagcaaggacgagttcaagtgtgtttgacaatcggagtgcgcggtcactagagattacaatgctacattaagaaagattttacactgaagtagcgtgagaaaattgcattaagctctgttcttgcgaagctcatcatttagaaataatctgctgatgttctgtaattcagaaagattcgggttgaagctatttgaatcaagtagctaacaatcttgccgaatgcaaaacctatatttcactctaaatgtgtcttgaatagcccaagaccaggtccatagttcaaagtttatgtatcgattttcatctactgattcaggagatactgctcaacggcatgatttgaaagctcgttggattcactctattctccttgttggtcagcaactggaatcatcaattgcatttttctcgagctc

SEQ ID NO: 115426 - DNA, 1060 bp, Physcomitrella patens
  Intron number 1 from transcript Pp1s108_113V6.1 (locus Pp1 s108_113V6) derived from phytozome v7.0 (chr-ID scaffold_1 08; pos 644089 to 645148 reverse strand)
ggcggcgtataaagttggtggggataccggtcacggtgagtgcgctgcggttgatgcgcttcgtgcttttactcttggtttgtgcgtggtttagaggttttgtggtggcgaggattggcgattttgggtgggttctgatcgggggtttcgtttgcaaacccttgtcaagtggcagattcttcttgatgtgtcgcgtggtggtatcgtgatcctggcaactttgaagagttgaattggatcacgtttttagattcaacagcgtggaacgagttgatgagatttgtgtactgagaaatgtagcattgaggttgccaggagttttatgataccgtaagtagtttacggtgtgcagttgctctcctaccaaaaactagagtttgaacgtcaaccatagggatagttggacaaccatccagagaatatgtgcattttagactgtacgaatcatggtcgttgagttgagtttgctgtttgctttaggtgatcagggctggtgaattgctcactcttttctttgtactctaattagattaagtactagggcatccatgatttggtctcgtgggtttgttcgccttgtaggtatttcgagattttttttgtgttttcgtgcctgtgatgacaaacttcctcgaataagggatagtgccgcaacactctccgtccagaatttaattaatattctattgggcctagataaattggatattgtgatatttgttgtcaataggatttttttttgtttaaatgatcaaaataagatactcttttgttcgcttagtttgtggaatttcaagattgttgtgaagtcttccattggaatggttggaatgttagatgattatctcatggctggatccaacaaatctaaggaatttgaaattttgattctaccacacacatacaccactctgttgatttctctttctgatatctcatcagtggccatttgatatgttagcaggtgcaggcattgataggaactacggttctgattcttctttccattgtgtgttctgtgacaggcatcgcttttgccatccttggaacacttctattc

SEQ ID NO: 115427 - DNA, 905 bp, Physcomitrella patens
  Intron number 1 from transcript Pp1s61_8V6.1 (locus Pp1s61 _8V6) derived from phytozome v7.0 (chr-ID scaffold_61; pos 31700 to 32604)
aagattgcgactgcgtcgtccaggtcagcgagcatcgttccgagctccgtgttgaacgtcttggcattttgtggggttgtgtggatttcgttgtcgggatggattttagtgggctgtgggttcatggaattgcacatgttgtttgtgctggagcgagaaaattgtgcacggatttcgtgttctgggaaattgtgtcaaagaatgggagaaaccatgcgccgcgcttacgaatctgctgctgtaatgggttcattacccacagcaccagagtcggatgtgacgacatttgtgggttctgatctctgttgtgtttatatacttgtcgcgtggcgagtttcgtaatgaagatgggtggaagaacgatgtgttttgggcagatttcgcaattttagagatgtttttgcttagtccttttgaatgccgacccttgctgtgatagctttgtcgcattttttacattactcgcccacaatagagttgtaggtgaaattttctgtgattttttttgcaattgttgacttctgttgcagtgttgttttttctttttcttttcgctgctctctgcctgcggccagaaatgtgatcagccagtcagcacggattgagtgttacgaacttgagttgattttaggttgtaagactcagcatggtggctgaggtaaagttgcatttgttgacaacttcattatacagtgttgagacctaatttccataacatcttgtaatgggatgaatcacgactttcgtctaatttatgaatcacacataatttattgttgcagtttgtgttagcttctcgttagatcctttgcaacgttttgagttgcggaatgtaaattgaaagctctgttgttttggtttcaagtgtaggcttggggtggtaggtggattgtggggtgctggaa

SEQ ID NO: 115428 - DNA, 793 bp, Physcomitrella patens
  Intron number 1 from transcript Pp1s91_220V6.2 (locus Pp1s 91_220V6) derived from phytozome v7.0 (chr-ID scaffold_91; pos 1257332 to 1258124 reverse strand)
acactgtaacctcatatattgcagctcaagcggtacagtcttgctccctgctcatcttttctgtctgtctgtttatctggtttgaaggcacgtagtaattactttgtttgcaccttgacaaggacctcggctctgacaattgtaacgcgtgttaggtcagtggccatcatcgggtatttgtgctcagtttgtatgaatcgggtttttaaggtgtatgcgcacggtttttccctaggacgagaggccaccgtaatgtgtgtttcttcccgcttgatggggtcgtcttcttcagtacgtatttcgtttgaaaatgccgttctgtgcgtgagaatctctgtgctattacgttctgtagggagaataatctgagctttctagcgcgatgtggggttttgcgtctgtgagacattgatttgcagcagattaatttttacttttagacttaagttccttaaaagcgacacaactgcaagcctagctggctcgcacaagtctagtgcactctttcacagtttgattcaccgtcgcacgaaatcctagggtatctatgtcattctggagtggtccgattctacctcaggaatactcagctccttcggtgatagaagataaaattaggcattgttacagattctacaaattgggtcgcctgcgcttcgtctccgtcactggtgtttcaaaactaaactctcttctcggggtcaagctacgtagtttcccactattttgagacctagtatttgcatagggcaattcaggggacgttgcaactggcgcgatagaccctcggaga

SEQ ID NO: 115429 - DNA, 838 bp, Physcomitrella patens
  Intron number 1 from transcript Pp1s107_181V6.1 (locus Pp1 s107_181V6) derived from phytozome v7.0 (chr-ID scaffold_1 07; pos 1129848 to 1130685 reverse strand)
aacaagcaggtatggtctctttgtacctcttcggctgtcgtctacttttggagatgtctgtctggcttaatgactttcgtctgtgggtgcgtcttcgccactattctcgatccttctgctgtcaacattgtgtctccaatgtctttggagaccgggatacttcttttcgaaatatggagagtgtatcgttaccatatagttgtcgcttcgaccgttagggttttttcttgggagtgatttttgctgatttgcaattatgctttcgaaaccaaggtaggttttgatgattttcccctccttgaatatccaccgtcgtctcaatctttgggatataagttctattttccatgtgaacatgttatgatttgattgctggtgttactaattttttttgcggacggatggattttattcacattggtcgtgaagcaccctgataaactgcttgcgacacagattctgggctgtcaccttcacatttataacatacggataattttgatttagactgtagagtgagggtgcgaatcgggatcattgataaaaatctatcacagatacctgcagtttatcttcacaggtttcttcattggggatgtctatattttgaaacacacttggactcactgtaatgagttagatctttccattttgatatcatttcgccattcgtttagaatctccgtactgtgacgtattagatgagtatgcaacatcggctcgtctatggattagagaatcctacctgttcgagaccgaggtctacaggtaatgtagcttacgtaatgtttgattttgtacaggttggaaacaggatcatccagaagcgtctgcacgt

SEQ ID NO: 115430 - DNA, 576 bp, Physcomitrella patens
  Intron number 1 from transcript Pp1s31_114V6.2 (locus Pp1s 31_114V6) derived from phytozome v7.0 (chr-ID scaffold_31; pos 602648 to 603223)
agcattttaatatcatttttgttgatcttcaagaggtgggatgatcgccgcttccccttgtttttttttctgctcgtaacggatatgcaatttcttcaaaatagaaccgaacgcaattttgattgtttaattacacgctaagtttacagtttgtggcggttagctagcaatggaaccatgtgtatcttctctcaagtatgatcttatctcgccacttaatcacctgggtatcctctcaaggtcctgctattggagttgccctagtgaaataagtagtggtcacgtgccctaatgattagtccgttgtcttgttttcgatgctgagttttgtcctaaggattttgtttgcaaatgttgtcagtgatgggcctgaaagccaatgcgcagcttacgtcacggacaacccaggatataaattattgaatgtgatgtacttcatttccagaacccttcgtagagtcaggctcgctgctgaagtcatattctcattactgctttctgtgttgtgatcaaatgtgtacgtgaagaggctgttctgagatattgccatatttgtatgcaggaattagtggcagc

SEQ ID NO: 115431 - DNA, 606 bp, Physcomitrella patens
  Intron number 1 from transcript Pp1s34_438V6.1 (locus Pp1s 34_438V6) derived from phytozome v7.0 (chr-ID scaffold_34; pos 2222971 to 2223576)
taccttcaggaggtgtttcgaggacctggttcgaggtaatggctctgttcgacagaatttctagtagatttcggtttcagttggatatgctgcgcgttgttttgcttcgtttttacacgtttcattgcctaggccggatttttcaattttcgttcgaatgagagatgtttttacgttatttgtttttgtttgggtctattgcagtgctgaagtaaattactcaaaattccaaaatatggtccagtcgtcccggaaatcgtagcacattatttagaattttggcctcgtatgttcacctatgtgcttctcttagaatttcagaattggcatttgacatttacgcggttttgtgaatactctgcccatttgcttctgttcgaggtgaacataacagacgctgtacttcgttaatcttgcgagcagagtccagagaattggcataagcctggactaaaagtagctgtccccggtctgctgatttctgtgtgaaaatagctcaagcttatattactctggaccgagttcttgatacatgtattttcttaagctgaaaagaagtactggaagacagggttcaacagattgaggagcaccgagttccaccga

SEQ ID NO: 115432 - DNA, 838 bp, Physcomitrella patens
  Intron number 1 from transcript Pp1s52_190V6.1 (locus Pp1s 52_190V6) derived from phytozome v7.0 (chr-ID scaffold_52; pos 1584303 to 1585140 reverse strand)
ggttcaacagcgagggtcaattcaaaatccttcaggtggagtttgtttgtttttttttttgttttttttttttgggtgtgtgtttgaagtcctggcttgatgcagttttggtaagatatgcttgaaattttgaactcttcgtttttttatcctgtttggaataatttttttggggtttgttgcataatatccgattcatgccttgaatgtacgtcatggttaaaacaatgcaatgctaccttctcaaaccatcgtcgtagggtataaagaaaacctaattttggcgtggatgatctccaatgtctaatttgctgccccactcaaaatcattgctcgttctgaattcttggttcatcgccgcaactattgcttaactcgaccattcaataacttctgctttttagcgtgtctttgttgtgaatgcaattatactgtatatgttttctgagcagtgactgtattaccttgtgtcactattaaaacgttgtcaaggatggttggggttttgattcctagtggttgcattgctgctcctgtagcattgaagtagcagtttacgaggaagagtatcgtgatttgaagcaatatttcgagtcgcgggtttgagagatcgtagtagtcttatatccttctgcttgctggcgagttcgattagataattgatctattgatgaatttaggtcgattgaagctgattgccgcttcatgaaaatggcggaagtttaatgtttcgtcagatgttgggcaagttctcggcagattgtttttgcgttaggccatctgaattttgctttccagcttcatggcttactcttgctcgtctgctcaggttgctgac

SEQ ID NO: 115433 - DNA, 632 bp, Physcomitrella patens
  Intron number 2 from transcript Pp1s61_120V6.1 (locus Pp1s 61_120V6) derived from phytozome v7.0 (chr-ID scaffold_61; pos 567638 to 568269 reverse strand)
cccgaaggtcacatttgaagttaatggtatcctcctctttcacttttttcttgaagagtactacatcggatcgtgtatagtgtcaaaaccaagaacccattcatacttaactgaacgcattcacgcgcagaaccttccatgcggctacttttgctgcataaacagtacctgactgaattggatccgagagaagagtatggtaaggtttggtgtggttggtttgagtcttcgtgagtcgctgactaaaatttcaataaaaatcgacctggtaccgcgtactcgtttgtactgatacttttcgtaaccttgtagtgagaaaatagaacgcatcaccctctgtactttgcatcagcagtgagccgatcgctctagatttctttgcagggacagaagcatctcttagattctgttccgtggacctctctgggttttttggaacagttacacaacctgcattgttctcgttctgcattctctactgcgtccaagatagaaaatctgtgttgcaagatttcagtaaatatggagtgaaccaatatgcctccagtcttcatgctgtcatgttttaagtatttttcttggtttttaatttccaagataatcaagaaatcaagtacttacggatttctgtt

SEQ ID NO: 115434 - DNA, 347 bp, Physcomitrella patens
  Intron number 2 from transcript Pp1s137_233V6.1 (locus Pp1 s137_233V6) derived from phytozome v7.0 (chr-ID scaffold_1 37; pos 840468 to 840814 reverse strand)
tctccaggtgaattacgtgcaattttaattttgatttttttgtttttttgttttttttttccgccactatatgatgtgatcatcgaggtttaaggttggcggtgttgctgagcagtttcattatcaaccctacgttgattttcatttctcgcgagaaactaggattgatgttctgcaattggcttcgaacgttaagaggattacactctcaactattgaagaaaataatggtatgactgtgtatacaagtataaactctacaattggtttggtagattttaagtgttaactaagctggaactggtttgctgttctgcagttacactccaccacaaccagggagtagt

SEQ ID NO: 115435 - DNA, 805 bp, Physcomitrella patens
  Intron number 1 from transcript Pp1s40_278V6.1 (locus Pp1s 40_278V6) derived from phytozome v7.0 (chr-ID scaffold_40; pos 2162054 to 2162858 reverse strand)
caaaaaaaactccaggtatatttcttgacttaatcctatgctctacattacattttgatctttctaagcctctaaggacaagaaatttaatataacacgaagattgtcatcgtgttcgaaagccacattgtatttttaggattctgaagtagtattatgaacccgtaaacaccatacatgtcttttgaaattacgaaattgatgaatagtgcatattattaggaaaaggctaagttgcaagctctctgtagtccgaaagttagttgttttaaagataacaatcatacgttcaattgcaagcatccatatgttaaatcaattaaacgaacatagcttcaattaatcctttagaatcatgatttcttaatttaatttagaaattttattgtgatggttcgaattggtttgtgtaaaaaatattcaaatagaaaataatcctacatacattgtcaaactaaagaggtaaatacatcattttgtataaaatctatacatttgtctactctcttgtttaaacttggaacttcttttccccacagctttgagttttgaggttagccatggttattaaaagatttggtaattcacaaggagtttctttttatataaaaaaactgaataattaatcaatcgattaaattttatacataaaaagggaattttgtcaaaagtattcaggcttcatctgggtcgtcataacgttcaaaaataatatgttgaattattgcttcctttgttttactatcttgacatacatcattgttctttgttgtgaaacaggaggaatatctgatcagagcatact

SEQ ID NO: 115436 - DNA, 806 bp, Physcomitrella patens
  Intron number 1 from transcript Pp1s91_40V6.1 (locus Pp1s9 1_40V6) derived from phytozome v7.0 (chr-ID scaffold_91; p os 243067 to 243872 reverse strand)
caggtctttcaaaatcctttgaagtttctacaatgaggatcttaaaatgcaataatatctttgttattaaatgtccctctcaatgttaagtgttttaagattaatgctgttgtaaactcaactacacaaacaaagaaatatattcacacgatgcaattaaaccaaatatgtcttgtgcaaatccaagcatccttgctcatcacagtgcctacttttgggcatttttgcccatagatttagaacgtttgaaaatcaaaaacttccatccagtgttctcatctaataaaaatattaacattaatgggaaggaggaagaagcaattctaagaagcaatttctttgatgattagtggaaatgtgcacaaatggatactttacggtacaactaatgtccatgttgtgagagcatgatgggatacctacaagaacaaatgatattttgctgaatattgttactcaattcccttcataaccacagacaacacaccccaaatcattcccaatacaccatttttttactggtgtgggtgggtattggaaagtacataaaaatactcataaaatttacatagttctttaaaattaaaaaccatgatttcaaatggcatagtatcagaatcaaatgtagttgtttacattgccattttcaatatattaaatgtaattttcatcttgacaattggtacatggaaagagcaatcaaaattaaattgaaatccaaacatggaaatgatttttaatgtataagatgtttgtcatgtctatttgtagactttagttaccgaacctacttggtaagttattta

SEQ ID NO: 115437 - DNA, 634 bp, Physcomitrella patens
  Intron number 1 from transcript Pp1s251_70V6.1 (locus Pp1s 251_70V6) derived from phytozome v7.0 (chr-ID scaffold_251 ; pos 553252 to 553885)
cttccggcacccaaggtgggtatccatcccacaccgctcctccaggctccgtttcttggttgtggttccagtattgtagtgagtgggtctcatcagattgctatacagttttcgaacaacaaataaaaaccagatctgttgtgtcttggctgcttgtatgggattacccctttgttggagttgtaaagacggacgtgtcgaacatgaatgcttctcgaagtttaagatgaggagcacaagcgggctggagtcgttaggagtttggcagtgtagctgtagttattagtcacttcatggtctttagcgttcgttgtttgcgagttgttttcaagctttgttgtgctttttagctttctttgccaccactatgaaagttccatgtctcctgtgattaatgggggtcttggaagttttcgaagctcaggttgtcggttttttgttttttttttttctcagggtatgttggctcgtcatcgtcagttgtgtggcattacagttgctccacattttggagtgtggttcctttgatctgtatacgttcattctttccccgttgagttcagcatttgtaatttttgcgtgtacgtttaagtctgcagggggcgcgtgtggattcggaaacctctacagctcc

SEQ ID NO: 115438 - DNA, 1051 bp, Physcomitrella patens
  Intron number 1 from transcript Pp1s251_10V6.2 (locus Pp1s 251_10V6) derived from phytozome v7.0 (chr-ID scaffold_251 ; pos 53512 to 54562 reverse strand)
ttcctccgtccctcccctgcctccctgccagcctcgtgagttttcctttctctcctctctctctttcctggtatcctttgcactttcgggtccatttccaccacagcttccttagccgtttggatgaatgctcgatcggggtgttgtgggatcttgcgctgaatcatttcttcctctcatgttttgctgtactgacaaattggaacaatttacccattgggttttttgggttgtaatgtgttttcatattcaattgatgaattggtgatgagtaggcagctggaggttgatcaatggttgtcagattgtgagtcgttttcgaatttgtggttttgtagctggatttggttgtcgctctcgtgaagacggcgaatatactcgcctgtgcccagcgtgctagtcctttgatctgttatgtgtattttaatgttgtcaatttggtcgagtattgttttggtggcagtgaactttgagtgtgtcgtggttaaggatattcgtcgtttgacatatggttagccagaaggattacaggcgcgtttttgtttttgttaataatgttttttgaagttattaactcacctggcaattccagactgaatctcacgtttgtgtgaaacgtgttgtacatttgtaggttgaggtagtcacgatccttaggaaatactgtttgtgttgctgttttggttccatttgcttagggttacgcttgccaaatatgcagaagagatgaggctaagctgtggtatctgcattgacatctacgctacatctatgccacctacaactgcaatttgtaatttggtgttggattgacaaggttctgtgggacgtttccaggttgaaaactagtattagtacagtttcgtattgtggtatcgtggaccgttttggatattcatgtgcttgagttgcattaagatttttcgattgtcccattgcggattgcgagggtctctcgcatgccaatttataccttcgacttgagtttatcatgaatccactattctgacgtgtaggtggccttacgccaaattcgttttgagagatattc

SEQ ID NO: 115439 - DNA, 435 bp, Physcomitrella patens
  Intron number 1 from transcript Pp1s91_234V6.1 (locus Pp1s 91_234V6) derived from phytozome v7.0 (chr-ID scaffold_91; pos 1280055 to 1280489 reverse strand)
tcgattttggggccgctggcatattattctgaaaagtacgtccaagttcagaaaccttttgtcatcgtcgttcttgtaacatttctggaggaatcttcctcatcacacgaaaacagttgtcgaagaatttgtaattcgagcaaagttgtgtcactttagccgataatttgagtgagtcgttaatacatcttgctactgttgtatatcacgtgcatcattattggagatgattcttgacgtatcttctatgcgaatcacagctgaaagcatttgtataagcgtgatctcagcactgaagttcgagtattaatagttatctttgcttcgagcccattaatcgcgaataatcgtgattcccctcttgctcttttgaatttcacagtgattttaatgtttctttttgtcccttgcaaatgaaggagggtacgaccgccg

SEQ ID NO: 115440 - DNA, 545 bp, Physcomitrella patens
  Intron number 1 from transcript Pp1s375_42V6.1 (locus Pp1s 375_42V6) derived from phytozome v7.0 (chr-ID scaffold_375 ; pos 276565 to 277109 reverse strand)
ctggtgaatgtctcaatcccaaaaccagtgataattatattctagtatgtgggaatagcaagcagtcgggatatacttattagcaatataatgctccgttctatttcaataatcaagattattagatccaaagccaagaaaaaattgaggggataaattaaggtcctcaagattcttcgataaatcggatggaatatgtccaagccattcttacgaagagatagcaaaaggagaaaagaccaattcaatattcagatgagtttgatgtgaagggccaatttggcctaattacggaaacatccaatccaggttttgatatgcgcctcttacctagtatgagacctgattcgattgggcaacccaatgagctcttgaatacagaggcttcagtttcatttcaagttgttccattctctatgccattttggagaaatattctttttgtggaaagatcctcttagaggcgggaattccatagaagtgggtctattgttctaattcggagtccagagttgaagaataggggacctcacggagttaaagga

SEQ ID NO: 115441 - DNA, 624 bp, Physcomitrella patens
  Intron number 1 from transcript Pp1s91_80V6.2 (locus Pp1s9 1_80V6) derived from phytozome v7.0 (chr-ID scaffold_91; p os 505630 to 506253 reverse strand)
tgaagaaaatattctcagtgccatatctggccggagtaagtccttcctattctaaaatcgtgttccttaacccatattttagattactcacagtgtaaggcgttcaacttgtaccatgtaatcctagaccgttcttgcaattttcgggctgtttcccgagaccatcttggcaacacaggttttgatcgtgcagtgttaaacttcgtcttatttttaacgttcccattgatgtggagaatcagaacttagggaaaaatgtcttgggtgtggcgtatggtccagttcttgcaatacaaacttatttatgctctatcaaaaaacaaatcgtgttcatagtgtttcgattcatgtgttgaattgactatatcttcttgaaggtcatttatgacactctttgtgctcaaatcagatagaactgttgttctgcttacatatgaactcattaaaccgatctaaatttggaataagaattaccaatggcaaaggtgggaacagcttattcgtgtggtttcgaatccacccgattcgtgctcgttataacagaagaagagcttcatgataagtatcttaccgtcgttttgttgatcagacattattgtggaggatcactacggaaggttacgt

SEQ ID NO: 115442 - DNA, 627 bp, Physcomitrella patens
  Intron number 1 from transcript Pp1s92_48V6.1 (locus Pp1s9 2_48V6) derived from phytozome v7.0 (chr-ID scaffold_92; p os 510048 to 510674 reverse strand)
agcgaaactccaaagtatgctctaacaattcttcaagttatttgagttcgactgtctcttgtgtaaacaagtcatggctattattgaaacgagtgacacatttcgatacagttttggatggccaccatagaaggattcatgcttcaataaccgttattgatgcgttaggcctggatgcttagtgaactcaagtggtttgttgctggttaagaatccattcgtgcaaaggttatcgacatctgcgcaaataagtgtgacccgctctctcactcggggggacgggatggtttccaagttgagatactttatactcagcttgtaactcattgaacaaatcaaacttatcctacttcagatcaatatgatttccttcacatttcatagctgattgcttgtgtgttttcttgcaaagggtaatgagtcttgtcacattacaaaaacgcactgtagcagaggtgggatcgtcgtggagacgagtgacttacattttcgttcccttggcaaggtagaagagaatgtggtagcggttctcacaacttacgccattgtgtggtggaaaaactttcttttggctttgttacgctctgattgctgtaattatgttaagagctgtctgtgtgcagttac

SEQ ID NO: 115443 - DNA, 563 bp, Physcomitrella patens
  Intron number 1 from transcript Pp1s137_262V6.1 (locus Pp1 s137_262V6) derived from phytozome v7.0 (chr-ID scaffold_1 37; pos 982772 to 983334)
gaatcgtcgttgatattgaaggctaaatcaggtattcgcgcgttcgttgcgcatcgcgtatccttttggattacgcgcattctgtgggtataaatcgagcttctttttaggttcggtttgtgtcgcgcttggacgaatgctgccgctaggctttagattttacgtgtatgagacagatcagcttctcgtacttggtagctttggatcattgaagtcacgatgcatcattttgagaaaatatccacaatgtgtgaatccaaggggtggcacaggtagggactacagttgcttagagatcgcctgcgtggtttctttcagaagaatgaatgtctgctttacgacctgattgggtcttgtcagactttagattgatagcttagttagtcgctgttctcgggctcgtctgagcagggcacgatgcaagcttagattaagagtgagagtggttctcatgtttttagaattgtttttttgtttttcgttttttttatcaatctctcgaaaagtgaactaagaatgtcataacttgacacaatattggtgatggttggcagctttgcaga

SEQ ID NO: 115444 - DNA, 276 bp, Physcomitrella patens
  Intron number 2 from transcript Pp1s10_107V6.1 (locus Pp1s 10_107V6) derived from phytozome v7.0 (chr-ID scaffold_10; pos 781262 to 781537)
tgaaaagaaagataattttttgagacgtattcctggtgggtttttcacattgttatttttattcatttgtttatttcttcacatacataattgtaaccatgttgcattcttaatacttgacttaatattcccttctacacaattaagaacaccatttaaaaaaaaaaacaaaacaaaacaaaacaaaacaaaaaatcatcttgaattcaaaaacctaacacaaggaattaatataaatttgtcggagcataggaagtgagatttctttcttcaaaa

SEQ ID NO: 115445 - DNA, 1014 bp, Physcomitrella patens
  Intron number 1 from transcript Pp1s43_89V6.1 (locus Pp1s4 3_89V6) derived from phytozome v7.0 (chr-ID scaffold_43; p os 769263 to 770276)
gtagtcgagagaactgttacttccggggcttgcaggtgggttggtcctccacacacgaaaccttgactcacggcaatcgatttgcgagggaccatgtttcttgtgccctggagttggtggttacgtgatcaaagagggtttcagtcggtttggttgtgtactcgctgactctgcaatgagactgcaaggctgtcgatccctgtgctctcgtgcgagcaacttgaacggcggtcttcaagcccaatcctggggctgcgagagcaaaatcggtgtgtcatacctatatgaaggaaggcgcaaaaaggtgcaagctgcaagaattgttaatgtattgaaaaggatgtcctcatggtacttgactcccctaatttcaaaggaggtattctgtaaagagaaagtgttggacaggatgatttggaagtaacttcatggtcaattgttacaagtcaaattaaagccatgagtcagaaaaggtcaataaatgtccacttcttatggtcagggcttcaatttacatgtgatctttgaaaaattacaagtttttccagcagttaaaacattcatgaaccaagactcatgacctttttcattaccgagaagtaatggtaaacatttgcagcttgagagtgttttggaatgtaccaatcacaatggtattgaaagttgagaactttaagagaacagatggacgacccaagaaaggataagcagtaggttggttcaggagatgtgataagactggaatattatgcactgcgatcgtcagccctgactgtaggctacctgttggtgaaatatggaggagtccggcatgttactgccgtggttggtttggtggctccactcaacagcaaccactgtaagcagtgacggaggttacagcaacctaacctaaacttcacattctgcacaactggagggctttcgatctgatcggttagttgccagtgacatcacaacctcggattttttggtgaagaggacaaccagaactcaccacgcaattcagaaacc

SEQ ID NO: 115446 - DNA, 870 bp, Physcomitrella patens
  Intron number 1 from transcript Pp1s40_195V6.2 (locus Pp1s 40_195V6) derived from phytozome v7.0 (chr-ID scaffold_40; pos 1367654 to 1368523 reverse strand)
ccctggtttcccgacgacttgactaaaacctccaagtgagttttcttgtcgtggtgcaggttgcttcctaattcggccgctctagaatacttttggatatcttcactgcggtgccggaacagtgcagatatttttgttttgaattttttttttttttggaattttcagtgcctaggatgtggtatcggaatgatgaaagaggtttatgctgtggtttatgaattatgaaacgcttcgtcgggtttcggtagtgtgaaatgtcagtgaagttttccgtgcttcatagctcggccgtcttggttgtcgttgattgtcgtctcgaggggtttttaggaatcttaggtcaagagacttgagaggttttgtcgtaggaacagaatcttctcttcgttggattcaatcgactatggaggcattgcaggaaatggcaatatttattgctctttgcattgtgattagacgcaagtattggaaggttttgatttccacattctgtccactttatctcatcgttatatttcaaacgaaattcacggggtatagtgctgccttggtcgttccttttctcattcctaatcgcgtatgcaaagacctacttataaaattactgaaagtcgcagacggcgggggggaaggggggagagaacttttctatatagtacgtgatgaagtgttctcacttgaatttggcttttaattgaattagttttcgatttttgatgatctatttctagttgaagagatgaaatcaaatgcccacttctctctttgcaactacatatgtatgcatcaactcctgtatcaagaccctaagtcttcctgacccaggcacttatgcttttgattgcatgttgtgtttgtatgaacagg

SEQ ID NO: 115447 - DNA, 635 bp, Physcomitrella patens
  Intron number 1 from transcript Pp1s367_8V6.1 (locus Pp1s3 67_8V6) derived from phytozome v7.0 (chr-ID scaffold_367; pos 90205 to 90839)
aaatccagcgcgagaacattagtaagtctcctcttctctttattcctcgacctctttccgtgccacctccgtgttcattgccgcactccctcatgttaggtcgttacggcctctctccgttccttccaccccctggtgcacagcattgcttggtttcgtggtgtttccgtggggaacgcccgtcgaaaagcggaaattcaccctttccgtcgcttgcggattttgtttttattttcatattttataatttttgagttttatgacgctgtcaaaccttgcgtgcatgttcgagtcccggcgagatttcgcaacttcaaggggtttgttttttaatttggaaagaagaacaaaaaaaggaaaaaagaatccttagctcagaaccgaatcgcttgtactggcgaggtagctttagctggagctctaaggctgaccgaggagctagctgggcaaattccaatagcctcacctattatcagattctctttctgggtagttttgccagcttccgaagcgtgcattgccatgtttggtgacaactttcgctctagttccaagcatgatttgttatatttgctaacagcatctcttctggatctctagtgtcccttaagccggagctgttcgagggccttcga

SEQ ID NO: 115448 - DNA, 979 bp, Physcomitrella patens
  Intron number 1 from transcript Pp1s479_10V6.1 (locus Pp1s 479_10V6) derived from phytozome v7.0 (chr-ID scaffold_479 ; pos 60867 to 61845 reverse strand)
cctcgccgaaccagtgtcgccgacggccttccaaggtacgcgtcttcccatgtcttcgatttttctgattacccaacaattgctttgtctcgatgatgctgattcgctccggaatactgcatcgagagactgtttgtaggttcattttcgtttggtttgttccggtttgtgttttcggataagtctcgtttctgggtgcttagtgtaggttcattttcgtttggtttgttccggtttgtgttttcgggtaagtctcgtttttgggtgcttagtaacgtttgagtcgtcttcttcgacgctctgaagcccttggtcaagtgtttgttgtggagacgaagggcttaggtaatgcgaaatttttcagtttgccttttacgtttttgctattattgttagtgttgttgttactgttgagtttatgcagttttagagagaggaaagatagggaatgttatgttgaggtttgtctgcaacctggaatggtggtggggttactgttttgcacaattctgccaccgtcgtgcaggggcttctttgttttgagtagatgagccagcggttgctatcttcttgggagtgagttagattaatgcccttttcctgtggaccgcgctacaaattgtttgggcaacttcttgtgtgcttctgtgttgcattgataatgctcttccgtgttggagtgttccctttgttcttctttgattgttttgatgttgagctgctaccagcactttctctgggtgtgctgtagctccgaagtcatgtggtggcgtgtggcgaatttatgttgattttgaagtggccactctcgttctatttctaatttgggggaggggaagggggagggggtttgaccctgttaagatcactgtttactagtatacatagtatttcacataatcaggtgttgagtagacttttaaagagtatatgttgttactgcatggcatttaatcatcttgaatggaatgccgagcag

SEQ ID NO: 115449 - DNA, 430 bp, Physcomitrella patens
  Intron number 3 from transcript Pp1s31_144V6.1 (locus Pp1s 31_144V6) derived from phytozome v7.0 (chr-ID scaffold_31; pos 736488 to 736917 reverse strand)
gatcatcctggtcagcattacacacacacacacatatctgtatatatatatatatatatatatatacacagctcttctttgaactgtattttacgtcagggagcatattttgagtttgtatgaaaagatttgtaccactgatgaaggaataagtgccttgacaacatgtggctagtagcagaaatgcaagaaagtctgcctcaagtaagttccatgtttattttaagataatcattccaaacattcatatagatgttatctttatatctttaaagctagacgggaattcaatgatacattctgactaaattttgtcacctaggaagagtcttttcaattctctgactgtaatctttgtccatgacgtttcacatgacaatagaatacaagcataaattgaagctcttactctcttcaggaggtagatttc

SEQ ID NO: 115450 - DNA, 758 bp, Physcomitrella patens
  Intron number 1 from transcript Pp1s31_343V6.1 (locus Pp1s 31_343V6) derived from phytozome v7.0 (chr-ID scaffold_31; pos 1908760 to 1909517 reverse strand)
cgtacgccgtgccgcacagtgagcaagccgatcaggtgtgttgctcgtttgacgtctgatagtcggtgatctatatgacagcttcatgcattgtaggtttttttcggggtagcttagatctgttgtctcgtgtgtggaaagttgaagtttggaaggataggttgagtttgaattcgtcgaagattttagcagtaagttcaacttgtttcagatggaactgtatacttttgtgtgttggaggaattgttgctgcagtttttgttttctttgattacgtcagagcgcaatgtgcatcacgtaatgcgacttgttagtagaattcaggaggtgatttagatttgtaccgggttcactcatctgcccgtggaggaaggtcatgcctaccgtcagacgatttgtccagtttggtcttgcgtagatatttgccgtattggatcttctgtaatgtagactggttgtggtttaattgccaggagagaggttgcgtgatttgctctagtgattgattgggaatcaagagtattatgaaccatcgggactcgagttcgtgaattggtcgtgtggtatgtttttgggacatggataggttattgtgcacagttccaatggatctgggtaattggaaaacagcttaatgagttacttcaattctaatataattttgccatcattctcgttattgttattttgaattcttcactgaatttcgttgtgtggcgatgctaaaggtagcagtagatattgactacaaccgaacc

SEQ ID NO: 115451 - DNA, 352 bp, Physcomitrella patens
  Intron number 1 from transcript Pp1s399_25V6.1 (locus Pp1s 399_25V6) derived from phytozome v7.0 (chr-ID scaffold_399 ; pos 223833 to 224184)
ggctctcgaggtattttccctcaccttctaacctctgtggtttctccatttcgtcaacagctcatcttctctcttgaggttgcatagatgtttgcatattccttcggctgtcagaattgtggtgtcaacgtttattgtgattttttctagttcctctggcatttgggttgtctttcaaatgtccttggttgatggtttgattgttttattggtttaattttttggaattcatttttgtgattttttgaataattatttagatttttatttgatgtacaatatttttgacaagagtttaatttcttcttacttgatgtgaagagatttgaagaagcagaagccggattaattc

SEQ ID NO: 115452 - DNA, 389 bp, Physcomitrella patens
  Intron number 1 from transcript Pp1s234_27V6.1 (locus Pp1s 234_27V6) derived from phytozome v7.0 (chr-ID scaffold_234 ; pos 224651 to 225039)
atatccaagtttgttttcttagtttcctaatatactcttgtcttatgggatctaattcttttctgtttggttctggagatgtactaatatcagctcgggatctattgaaaatgtcaagtggtttcattttgagttgcttacttgtcgacagaagcctccacttaaacttcattgacaaagtggtggcccagttgatgagatttatgggagaagtagggataaggggttgtgctctcatgagtctatgcggcggcattcgcaccgaacagtgtgcaatttgaattgggtcgcttcaagtgtgtgtaaggttgctctgtcgaattggaggatttaacgtattcttttgtggtttttggaagagcaggttggaggggtgagggtacgacagc

SEQ ID NO: 115453 - DNA, 754 bp, Physcomitrella patens
  Intron number 1 from transcript Pp1s31_279V6.2 (locus Pp1s 31_279V6) derived from phytozome v7.0 (chr-ID scaffold_31; pos 1546253 to 1547006 reverse strand)
tgttgaatcgccaaggcagtccaaccttgtgtcaggtgggtcattgttttcgtgtgtatttttgtgcaggagagattgtagtcagttttcgggttggagaaccttgcttttttgatgctcattgccctcgagtagttagaactcggcgcgcgatttttaagggcatgcaatgtcttcatttgtgcgggtagatgacagacgatgatatgaaaatgggaactaaattagtgtctggagaagaatgtagctggggactccagattcatctgaaatatgacatttcctgaatggcattatcagatacgccctggcctctgatcggagcatgcgattccatgaggatacttagccagtctttttgtcagcccagaattgggaattcaaatatgttatacagtgtacctcgataacggaattgtacaagctgatgatgagagcttagataagtaagcagcatcctagcatgggtgaatgcataatgcatgaagctgactatgtggatggatccaagtattttgctctacaagattcgcgtgctcttttcacgtcgtttctgaatgctcaaagtcttttgtccctgagccccgtctttcaaatgttgtaatgaagttcgttgcgtataagtccacgcggaatgcttcaagttacagtgagtataggttgtatgtcatatgtcatacgtctttcggttctaacacgagagtttcgttgtttggcagtgagagcttcagaaggaccgaacagcgaggggaag

SEQ ID NO: 115454 - DNA, 1054 bp, Physcomitrella patens
  Intron number 1 from transcript Pp1s68_5V6.1 (locus Pp1s68 _5V6) derived from phytozome v7.0 (chr-ID scaffold_68; pos 25730 to 26783)
agagagctttgccgacgttccacgactaaaataatgtaagtgagtgtggaaagagtcgtggtggatgtgctctgcctgcgctggatcatattgatgctccggtgagctcgatccgtatttggacaaatttgttgcgcgtgttcctttgctcttgttgatgttggactggtctttcaccgaaggtccgaagcaaaggatctgggggagtgagaggagagacggtggattcctgacggaggggaagtcttaatagcggtgtactgttgtttaaagctttctggatcggtcgatgactgaagaggatggtattagatctttttttttttttttttttttttttttttgtgattcgctctgtttttgtgtgaataaaacgagtcgacgacattcgcatggtgtaacctgatctcgagaagacggtagggactgcattatatgaatcaacactgcttgttctccactggaactagtttacagtctagtacgcatcgcgtttcggtttctcggagtgatgtttgagttcattctgtgttgtgatcgggagtcggtaactgctgtggtccattctgttcgatattgcgcaatttatgtgatgaacagtaaagtgtcgcataattggaatggattctgtgaactgtaggtgtttaagcgtttgtgtatcagttcacacatttctttttcaaggaagctcaaagttgcgactattaaatgaggaaatggttgggtggtcttttaccgagtctttcattttgaactgtcttttaatagttcagtgatcatcccatgaccgacgaagctccgctgcacgaattatgtagcggaaaaatttattgtcagtgtgaggacacatgctatctgcactgaatgatatttttgcatgtttagattgcgcaacagttaaacctgacacattgtaccagataagtcaggagtggaggttgatgaaaaaaaacagattgacttaaaaaaacacattttcttacaaagtatgattaaatgtgttaaacatcgttttccagttcgaggcctgtcgcggagtaaattggtgcatcga

SEQ ID NO: 115455 - DNA, 570 bp, Physcomitrella patens
  Intron number 1 from transcript Pp1s232_73V6.1 (locus Pp1s 232_73V6) derived from phytozome v7.0 (chr-ID scaffold_232 ; pos 664769 to 665338 reverse strand)
gctgacattgtgcccaaaaccgcagagaattttaggtgcagtatacaagccttaatcccagcatttcgttttgattacagctcgtcgcaagcgcgtcaagttggagctttaaattagggtttgagggtttgcgattgagtgccggagcagcttgttatgttttttcaaatcgtttattttttccttttgtgtcttctgcacattggttcaacagagtttggccggtcgttatatgtcgttctcaactttcacataggcctgctgataacttttaataagagtgggtagagattgtctattgaatgctgtttgcgaagcttcgaacttacgggccgttatcgtaattgaacgcaatggtggtcatggtgactattaacttttgccaaaaagaagatcctttttcaaggtctaaaaatttaatacgtgctacgatgtcaagggggtggattaacttctagatattttttctccttctttagcacgaaaatcttcgcctctctcttctgatcgtgcactctggtggtgagcaatgcaggcaattttgcactggggaattcaggtaataatatt

SEQ ID NO: 115456 - DNA, 884 bp, Physcomitrella patens
  Intron number 2 from transcript Pp1s27_119V6.1 (locus Pp1s 27_119V6) derived from phytozome v7.0 (chr-ID scaffold_27; pos 946549 to 947432)
ttgaaaggaaattccaagaggtgcttcacaaaccagtaagtaacattccaccagtgtatgcctttgactcatgcaactgtcaatgtgagactgttgcgtcgagcttataatagaaacattggcacagtttccctattgattcttcgaccaactttaagtctctccatgcactacgtggtcctaccctcttcccagatttgtcatttaagtagtctacaatcatcgtaccacggtaggggaattctataatattatttgttcccttcttgtatgactaagcttattcctacgttgacaagagaaacagaatgaagcatatttgaatcggtaacgctgcaaaggaatcaaatctgagcacggaatgagaagaatgtggtcttctcccacgtactctcgttttggtacattgaatccactaagtactgcctccactggtacaagcagcagtcatcaaccaacaagtaattcagaaagaaatccatgcttctgatgattgttaagcatccatgggttccaattgtaatactcctcattgttcttaggagtatattgatattcttttcaaagtttaaaggtgaattatgataatattgctacaccaggacaatatacctgacaaaacacgtggggttatgaggacaatgggatccaattttgataaaaacgtcaacttgaaatttgaatattatttggtggtgaaaaggaaacgtagtttccgctttgctctcaacattatacttcattccgaaacatgtgttaaccgcacatgtgtcagaatgactatgtggatgtgcttcggagagtacatagaagcctcaatgtgaatttcgttgaggggttaagataatttatttgttctggggcttacatcccagagggggaag

SEQ ID NO: 115457 - DNA, 639 bp, Physcomitrella patens
  Intron number 1 from transcript Pp1s10_319V6.1 (locus Pp1s 10_319V6) derived from phytozome v7.0 (chr-ID scaffold_10; pos 2498919 to 2499557 reverse strand)
atttggccaccgagctggagcagcagaagattcacgtgaggactcattcctcactcgatagagcgtcgaaccgggtcttcttgttcacctttgtttgccgaattagctgagattttgaagtttggcctgaaccctagttttttgggttgtcgtacctggacgtctatttttaatttttaattttatttattttcttaatttttttgtttacacttgaagttggtgctgtgttgttgaagcttgacataggtttttgagtgtgtatgttgtgtgcggtagttttttttgtttgggtttctttgggttggtgtgacttggtttaggcatggtctgtgcgcagcggagttgcttgaggatcctgggtttttcttttgcttatttttatttttattttattttttatgcgggtgtatgatagggaatgagactgatgatgggtctatgtttcctttactgcttcgtagatgaggggtcaccaaggagggattacatgggataattgttcatgtcagtcactttatgtgcttaaattttgatagttggtaggttagatgttcgcttttaggttttgagaaaatgtggttcctgttgaccacctgtgattgaattctgcctgtggaactgtccatgcacagtcag

SEQ ID NO: 115458 - DNA, 390 bp, Physcomitrella patens
  Intron number 1 from transcript Pp1s251_8V6.1 (locus Pp1s2 51_8V6) derived from phytozome v7.0 (chr-ID scaffold_251; pos 30979 to 31368 reverse strand)
cataacatcgaggacgacaaaacttttctccgcaggtattgagagtatacaaatttcacagagtttgaaaccgtgtggtagaagtttttttgatgatttgtcaggaaggttgatcaccctatcttaacaccacagtctatgtgtggggttgaaagtaccttaatggcgagctgcttgcaattgttaaacccgagctttctattttttcttgtgttaattttctgattcatcaaacggtggtggttcagagaatgggtggcataccgtgcttccttcatgttttcttcttgtgtagcaatttttgaaccttctaaaattaattattatcatttcttttatcgaaactttatttgaatgattgggttgctctatgtgcaggttcagcttccg

SEQ ID NO: 115459 - DNA, 856 bp, Physcomitrella patens
  Intron number 1 from transcript Pp1s291_82V6.1 (locus Pp1s 291_82V6) derived from phytozome v7.0 (chr-ID scaffold_291 ; pos 537612 to 538467 reverse strand)
ccttgcagtattggttttgtaagtttatcattttctttttttgaaggaatttgatcaatagtcaagctcaagtggcgctctcttcgtagcactcagcttccctgattctaggcctccatgttgttagattcaaagtagtacatgacaatccaagaaagtatgatcattctggtaaagtcaagtttatggtaccagcgtcgactgattgtgaatgtacgtaactgattttaaggtgctggcagttttcgtgtccatgtgatcggaacttcgtctgacaatctcgcgaccctttgttgctcacacatgagtttgtctcagttcgctttttaagttcgttaatcctttcgagagatgaagaagcgacgtttcgagaaagggacaggctgatgagcacctacttagcagattcaatgcgttgggtgcccgcaactgcccggttcgaggctaagattgaattgacccgttgagcaaactgcacaacgtaatccctgtcaagtcgataatttatgatgttagtggatgatcactttgcgtcgctctcgctgcctggtgcaattcagatcattgggctagaatcatttactctggaaaagcctgggtttcgggtcctagaactcgtgcagtctacaacctctcatcaataaacagacgtggattatattttcggaggcaactgaaatttgctttctccaaaaacgcagtgtccttggagtgccatttgaagctttaagcatgctcctgaagcaattagggattgtaaatcatttccctagaaggtagcttcattggaatctcttggacagatagagttctttttgttgtaagctatccatggaatcgttgcagaaacaaagcc

SEQ ID NO: 115460 - DNA, 381 bp, Physcomitrella patens
  Intron number 1 from transcript Pp1s43_49V6.5 (locus Pp1s4 3_49V6) derived from phytozome v7.0 (chr-ID scaffold_43; p os 347563 to 347943 reverse strand)
ccgaggtttaagctgcttccgtctcttgcgttgtagtattcagctccttcgcgcttagcattagttttcctctcttgcgttctaattctagtcgagtggtcagtgtggttaagtggatttctgaagttttttgtggagttggatgttgttgagttttgcaattactgcgcgggttggaattttgtttttttggacttaatttggatggtatgactgggtcgcaagggaattcgtgtaaggagcgggtgttctcattgcattcgcatgttgtttttcatagagcgtcttcttaataactagtcggtgctgcaatgacgttgtcaactcgaatgagaatgtggtgcatctgaaaacaaaaagtgctttgtttctgcagagtga

SEQ ID NO: 115461 - DNA, 1021 bp, Physcomitrella patens
  Intron number 1 from transcript Pp1s267_80V6.1 (locus Pp1s 267_80V6) derived from phytozome v7.0 (chr-ID scaffold_267 ; pos 496671 to 497691)
agtggcgttgatcatattgcaagtgtgcgggacatgtgagtttcaaaagtttgataactcgtgtaggagtgttgttgaagcttgttgtgtgttaagtcggggtacagtttaattatcatgttaagtattttttcaggagattaccctcctacatctaggtagttaccgcttctgggccttgaggtattatctgtgactacaagccgataatttacgagaccattctttttagtttctttcggttcgagcttgggaagttacgcatatgctttattcttccgaaatcaatacttgagggggttgaataaatttgccgtcatattatttggtattgtcccttctagtgagatgtgtttttcacgtgtgtgtctgtgcgcaaggcatgaagtttatgtttgaggtaacaacattttcatatttttattgtgaaactaatcatgtattaaagtatgaagaggaacccctcgggctcatgattgccttttttttcacttattattattattattttatcgattatgttcattgtagcaagaaagtctagccgcttctacatatgcttcattacagcattaagcgtgtcttggcttcatatcttaagatcgagtaatttcgttctgttgaacatagttgaagcaggtagctgcccttggacgagcacttaggtctttgtgagacagaaccctagtgtttgtttttctcagtacagctgtgcgggccaacagtggggcctataccttgtgtctaatcattgtgtaattggtatcatcctgatgcaagtctttgtatttggtgcatgcatctctcatttagtgagtgaaataaccatttacatagttcctgtaaatcatcacataggattgggtattctgattttgctactcgtgctactgttctatttgttcgaatttctctgttgttactgcaagttaactatgaacatttatttatatattgaactattttttaacttggctttatttttttacaggattgacctcttcttctgtaatattgacac

SEQ ID NO: 115462 - DNA, 441 bp, Physcomitrella patens
  Intron number 1 from transcript Pp1s10_252V6.1 (locus Pp1s 10_252V6) derived from phytozome v7.0 (chr-ID scaffold_10; pos 1935113 to 1935553)
cgtccagtgcagactttgcgggcaattctgtccaggcatgcttctgcatcaaacctctaggctaatttggaagagttacatttatcctttagtcaggattgtgtgtttgtctgcttgatcttgtttttggttttttggtttttttaaattagtttttaaattttcagtccaagagtagcttcatagtttagattacattcttgtgcaacaatttgagctaatgagtggaatggagagtggattcatgttcatattttgattagtattgattagattgctgttagtcggtagaagcggatgcgttgctttattctatgttgctgctgaagtacttttaacagttgtggttagagagtcagtataaagttgtggaagattgaccttgcaatttcgaactcctgcacaggctagaacaagcttattgtggcactatcggatacg

SEQ ID NO: 115463 - DNA, 728 bp, Physcomitrella patens
  Intron number 1 from transcript Pp1s98_66V6.3 (locus Pp1s9 8_66V6) derived from phytozome v7.0 (chr-ID scaffold_98; p os 361402 to 362129 reverse strand)
gcttgtaaaggatcctacagaagtgagattttgcggtagtcgtcttgaatgggttttttttgcaggatgcgtgagtaggattgccttgcaattgtgatagaggcgattgaggtctcatcggtggtgttttcggagtggtcatgtggcgggaaaattagtatggtgcacattttaggggatacttgttggcatgtttttttgtttggacttcgtgcacacaagttgtagtttgcgttagagcaagcgttggttttgtcgccagaacgtgcgggtttttggtttatacttggcaccagtgttgtagttaaatgtgtagcacaagtgtttatcttctttttgtctttttttttcttttttcttccttcaggtaggtctttcgaacggggataatggtgtaatatattttgaagtatttatttatttatttatttttatttgatttggtcaaacttgtgcttggagcatcttcaatcctctgtcatgtggcagtttatttgaagaactcagagctgtatatgcgtgagtagagttgaggaggggtatgatggtttttgtcgtggcaaacaattacagcactttaccggttcaccgtcaacacttagttcgccattttgtattttacactacctgtgtaatcatgtgttgtgcagtcgtaagtatgttaagcagagaaccaggatataatattcattgcaaattgtgtcagtgcaggtgatcacattggctgc

SEQ ID NO: 115464 - DNA, 927 bp, Physcomitrella patens
  Intron number 1 from transcript Pp1s91_42V6.1 (locus Pp1s9 1_42V6) derived from phytozome v7.0 (chr-ID scaffold_91; p os 255029 to 255955)
ttgttgttgttgttgttcgtggatttgtgtgtcaggtatcatcgcttttcccaatctctttgaggggagttttgtttgaaaatgttgagtcggtattgttgggatcttgtcactggggtgctgtagttttttatgggggaagtgtcggaggaaggtggtttcgtatttgttgatgtttggatggggactgagagcgagagagagggtattggttatgggagaattttggtgtggttttcgttcgtgttcgtcggctgcaggtgcttgaaccgttctcccgtgtttgtacgtatggtttgcgaataatgcgaagaagatggtgtagtctggggttgtatttttctcttgttaacgtgtttaagctcgcaacgtgttttgtgattgaagagcctttgatttggcatctgtctctcgtccagttccgttggaagtaattggttagcgatttcttttgtttttcgctggatcctgctgcagttaatatcttgtttctacggatcagctgcattttttcactttttctcgaacccagcctttatctgattttgttgttgctagctttgttctcacactcaaaatgcactctgaatatatcaatccgagaatttcaactgaatgacgtttgtctgaaatttttacttctgactgttttttttatcttcacacagagatgtgcagtaggttggttgtcgctctccacctgacgcattgtgaatttcctttccttaccctgccttgccttatccgtttcatggccttttttctgttttttttcttttttttattaattttctctatccgtattgtttcatggatcaagtggtcccagacacttcgttgcatttttcaaacctcaatcatgcagctcacttctcttgccatctatctgcaggattacattttagtccaggcacttaaggtaagcag

SEQ ID NO: 115465 - DNA, 343 bp, Physcomitrella patens
  Intron number 2 from transcript Pp1s10_144V6.1 (locus Pp1s 10_144V6) derived from phytozome v7.0 (chr-ID scaffold_10; pos 918954 to 919296)
agcctaagcaagggcaggtttgtctttcactaaccttcagtctttgatacattgattagcaaaaaaatgaaggcaatcaaaaaaaatcattctttgcttgtactgttgctatgaagtaaagccactgggttttcttagatcaaggataggattgaattgctgtgccttctgtctgtaatgatgctcgatgtatatttgtggttgattatgaataggttcagatcaatttcgtggtttcttatctacaagatttgcgtgaaataaatgttgtaaacttcagtgaatcaaaatgctgaggattaattggtgaaccttgatatgcagtataacttcgagggcagat

SEQ ID NO: 115466 - DNA, 999 bp, Physcomitrella patens
  Intron number 1 from transcript Pp1s303_66V6.1 (locus Pp1s 303_66V6) derived from phytozome v7.0 (chr-ID scaffold_303 ; pos 393774 to 394772 reverse strand)
acctcgtcggaccgggcttcgagcccggccctgaggtaattcctcttcttttttggctcaccaatttcagctcattgtggttgtatctggacagtttcgtgtatgactgtagtgattgggtggattgtattggcgatctacttatagtttgtagagtagagcattattcatgattttgaaaaaaagaaaaaaggtaacaaaaattttgaaatatgatttgtaagatttgacctgattttgagtattgagtgattgcgttgagtttagaagagcccttgtactgggttgttgtggtcgctgaagattcttataagtatgtggtcgaagctcgcatgtgtgcgagtagcatgtaggtgttgtcttcgtgaatgcatggattgttgctgatcgttgtgatgggaggtgatggaaaatggatttgattcagagcatcatcatcagcttgtttgtaagcggattgggatgctagtaacaatcaaggtctttaatggatcgctttagagtatgtttgaatcgttgatgccgtgacaagtaaggaattccgagtgagcatatgtcactgcagataaagttcgtgtttaaggctacacgattatatcaacattcttggttttcgagtccgttagtagggtagagaatattgctgtcttcttgtattctggcttgttttttgagttcttacgaattagggttgtgtttatgtggcaatgagtggcaaatcgtcgtcaaaaccgtccattctacatcgcattttttacttgagtgtactggagtttcttaatgttgatctgaaaatgcaccctcatgtgttaacaatgagcgtgtgtatcctgtgttttgactttctgagctggaagtggacttaaaggacgggcactgaaacaactttgtttttcgtcgaagaagtaggcatatgctaacttgtgacctggtcagtgttatcctggttataagctctacctggttttggtgggttgcagctactcgagtcgctgcaga

SEQ ID NO: 115467 - DNA, 273 bp, Physcomitrella patens
  Intron number 3 from transcript Pp1s92_58V6.1 (locus Pp1s9 2_58V6) derived from phytozome v7.0 (chr-ID scaffold_92; p os 568903 to 569175 reverse strand)
tagaatttgaaaaagacactatctctgagagacaagtatgcctacactccatccttctttactcagagtctgtcctcagggtctcagtacattcccacatgcatacagtattgattcttgccacaatactgtataaaaagggataattattggacagaagcatccaattttttgatttttggttttcttttctttccacatctcttacatgtgaaaaaaacaactgcatcagggggcaagtggtaagggtggaattgggttggtggagggcag

SEQ ID NO: 115468 - DNA, 873 bp, Physcomitrella patens
  Intron number 1 from transcript Pp1s458_4V6.1 (locus Pp1s4 58_4V6) derived from phytozome v7.0 (chr-ID scaffold_458; pos 28431 to 29303)
ttcactaatccgcaggagctcaatcttatcatcgcgtatcctttttttcccctttttctcacgagagtcttcatctctttgtattttggtgagtgaaaattacgatggtttatacatagttttgtggttatgcttgtgtgtgtgtgtttttttttttttttttttttttttttttaatttatttctactgagctgcaccaatttctgttgtcggaagtgtgccctcggcgtagaatgcttgtgatactagaatttttttgatattatcggacggcatgtttaggtcagtggtgtggttgcgtgtgttccgatgatggactcaataatctggttgagataggtttatttgtactgaactgcgacgaaattgagctccctgacgacttttacgaatcagcatcgcgtactttggaagtataggcatttgaatttctttagacgttgaaatcagcggcggtatatgtgcttcgggcagtttacgcgactgttaattttttgtttatgcgtctaccatacgaatgtttgctagcacgtacttggttgagaacgggaggacaataggctgccaattatgtcgtagtttcctcttttgaaagtgttgcgtctatttcgtgcttcccatttctgtggtttaggattgaatttattctcgggagttagagggggtttttaggagagaaggtgcacatggagtgattatgcttcgttcggggtgttaacaatttatgtttctcacagagtggagaactatttcactactgtgtatgaagttgccagttcttgtgtttgtgtttatctcaacagctcgtgccatttacacggtcttactaaagactcgtttgtcaatgagattcttgactcctattttagaaa

SEQ ID NO: 115469 - DNA, 739 bp, Physcomitrella patens
  Intron number 1 from transcript Pp1s225_55V6.1 (locus Pp1s 225_55V6) derived from phytozome v7.0 (chr-ID scaffold_225 ; pos 341633 to 342371)
ctccaaggaagcgctcaaggtttccgtctggagtccgttttctgctttattatctcccgcgatcattacttttgtgtttgtatggtagtgctgttttgatttcctgtttgtaagtttcagtcgctgaattgttcaacgatccattaatactacaattcaagatcttggtagagatccttgtagtaattcagcacatccctttcacaatccggaatgcgattctgttgctttcgccttttccttgagtgaatgcagggacaaacattcttttcgacgttttatattaaaccctgaaccctgtttttttccccatcaatacgaaactacccttgtactgtaaccattccaagtgtagaaaacttctaatcctatcctctttgggaggtttctagcaccgttgtttagtagtactgcgactattgaacgcactgagaattttacgtcgtttttaatagttgagttttgaaactgattcggaccgtggattgtttgttctgcatcatgactgtctgttcgctttcttcgatcagtttatttacgaacctttcataaactgatgaaatttactgaacatttagagattacgtaatttaagcaattgtggaatttatttcgatgttgtacaatcattcacgtgaggttgctttttatttattatttattatttttattgcattcattatcaattaccgtctccaagttccactaatattagcttgttctattttgagtgcaggag

SEQ ID NO: 115470 - DNA, 755 bp, Physcomitrella patens
  Intron number 1 from transcript Pp1s273_2V6.1 (locus Pp1s2 73_2V6) derived from phytozome v7.0 (chr-ID scaffold_273; pos 17654 to 18408)
gagatatctacaaagtatgttggcattttgaaatgatttacaatagctttatgtttttattttttttctttcatgatcctttgaacatcaacaaaatggtcctacacaatttacatcttatttctttttaaatattatgcctaagttgtaaatgtatacttgtttaaaaacaaccctaaaaaatgataggggtttcacataggtcttagcagtttgaagtctctagagttcaataatgaaacagtatcttaagagtgtgtttaaaagaaacagagtatatatttaatagttcagtttctgattggaagttggttttatttttccatttccttgttggtgatttattgtgatgtagattgtacaaatttattggataaaacaatccaaggatctcttcaaaataataatactaataataataataataacaataattctttttatgatatggataaatagcaccttatagaagatttcaaatatccatagaattcaatgaagagtaggaaaatggttacattttgaaacaactcaatcctccaaccaagagaactccaggaatttgtcagaaggaaactctaaatgataggttttattttgattctgatattgatgaaattaatctaatttaaaatgtttaaatcttttatctatgtaattattttaaacgttgtttctacagtaactcccactcaaggataaaaataaaaataaaatctcaattattattcaggtggtaccaagagtgtttggga

SEQ ID NO: 115471 - DNA, 678 bp, Physcomitrella patens
  Intron number 1 from transcript Pp1s353_26V6.1 (locus Pp1s 353_26V6) derived from phytozome v7.0 (chr-ID scaffold_353 ; pos 153479 to 154156)
tgtgctcacaaggtaaaataatccgacgttttgcgattggaaatgactgttggaaaggacaggtcatcaataaattttctctttctacgttgctttctggtggaagcgcttgaagtttgttatgaagtagatatcgtaggaaatgagaacctgctgcttgagtgggattgtacaggtttagtatgaatcctcacgtcagtgcattttacaagtttctccaagttattttttatgaatgacggcattggggacttaaactcctctagtcttcattgaagaatcaaagtcatgattcaatatgaatgctcgcttaactggaaccgtttcataagtttaacatactcacgatgttaatgctacttctcatagctacatacattagtgagaaatggtaatatagggacacaaaaaacaaagtgtgttctgtttgacatgagtgtgtggtttgtaacatttgcaatttgttgttcctcctggcgttttcctatcagtagcagattaaaatgcagctctggagctttaccttacaagatttctcatcatcgtctatagcctttcacgggctcgtatagtttgtgtttgaataggtgaagtgtcactaagaattgctattgctcatttggtggcctgggggtgtttgcagatcagaggagtccctcacgtataggtgcagagggt

SEQ ID NO: 115472 - DNA, 763 bp, Physcomitrella patens
  Intron number 1 from transcript Pp1s117_149V6.1 (locus Pp1 s117_149V6) derived from phytozome v7.0 (chr-ID scaffold_1 17; pos 949835 to 950597 reverse strand)
tttcgaggtatgtttcaactgtggtggttatgttgatacttttgttgtagttggaagcatttgtctttccgtggtacaacaatgcgagtgagggctggagtctgatttttctgtcgcacgaaaacccaattattgcatgccagaatgtgatcttcacttgaggatttggaaatccatcctctcagtacgagaatggatctgtccaccttttccccatcatagaaggtttcaattgaatcccttgtcctctagtaccggtcaatgagacgcaagggtatcatattaataatttgatttcaaggttttgggatcaagagaatcggactttgttttcaaattgagcttgggattgaggtttacgcttctccgtgttttcggtgataggaagtgtcaataatttagacatggttgctagacattttatcattaaagttcatcggtacacagctgccgtcagagctaaagtcagaggattttttagtgtgagtatatattgtttctcttcctggaacccttttcccttcccctgcttattactccgcgaacctgtacttgtttctccacttgcctggttacagtatctccgtgattcacttctaattagagcttgacagtttatggatcggttggtggtttggcacatctggaaatttgtaatataaagctgcacttgaagataatccataaatctacgcatgcaagtaggtcttaatctgccgcatacatgttgaatatttgaatgcagggattcgtaaatttgtgc

SEQ ID NO: 115473 - DNA, 455 bp, Physcomitrella patens
  Intron number 1 from transcript Pp1s188_9V6.1 (locus Pp1s1 88_9V6) derived from phytozome v7.0 (chr-ID scaffold_188; pos 122989 to 123443 reverse strand)
aggtgcgggtgagatttttccctgtttattcttccaatcgcttttaattcctctgcccttgctttttacatgtactcgatgtggccgagcttctcaaatgtttgaacagagcgacctgtgtatgagggtttatgtatcacagtggaatttttggtccgatgcgtggatatttgtaatttaaatgcggcgtagtggtcattacaagaggagaatatgatgttttaatttgaattgatacgggcgttgagtgaatctgtgcggttaaaaacatgggttcagtgatgtggtcacatttgccaagacgtctgcatcgggatctagggtttagggtttcggaatgtattttgtctctagctttggaacatgatgaaggaacgcgacattgttgagcaaggaactgatgaattgaattgcggttgcgcagggacccggttggtcacaggaattaaacgact

SEQ ID NO: 115474 - DNA, 708 bp, Physcomitrella patens
  Intron number 1 from transcript Pp1s152_167V6.1 (locus Pp1 s152_167V6) derived from phytozome v7.0 (chr-ID scaffold_1 52; pos 889874 to 890581 reverse strand)
gtttccctctttgcctgttcctacattgccggcaggtacgcgagtcttgagccctatgctccggggtttgcaaggagatgtgcggcattacgtaaacgggtcgttcttgctcgctgcaaaatatacgctccttgtccgaatcgatctccttctcctttagtaacgattgctttgggggggggggggggggatggggattttaaaatcactgtagtacaaagtgttgtgagtgtagggtagagtgttgactgatagcattactagtctgtcgaaagcacaggatcggttttttcctctgttctgtgttacaaatcatctaaagatttagggttgtagttttcgttgtcgcctttcttttcttctttaaataatatttttctatattagtcataaattttatctttcaattctccacctagatcgtgtttaaaattttgtattgagtgaagaccatgccgagggttaggaatcatattctcgtttcgtgtgtagtttaaacgccgtgttatctagccctgttctatcttatttgttgcaacgagcatataaccacatttttttttcccgaagaataattgaacattagtcctatagaagtgaagtggctacgagtatccatcttgtgttcgtatttgattagcctcagccacttccggagtactgcagcctttgactcctttgcaatgttgaactataggttgtggcagg

SEQ ID NO: 115475 - DNA, 395 bp, Physcomitrella patens
  Intron number 1 from transcript Pp1s25_69V6.1 (locus Pp1s2 5_69V6) derived from phytozome v7.0 (chr-ID scaffold_25; p os 574184 to 574578)
tcactcattcaccacaaagcttgcacaagcttctggtgagttgtgacgagcaacatatccaacctgccgtgccatgactgagtttacttgtcatttaatcgatcagagttcttttcctgatttcaactgataacacagaaataaagtaaaaagattgttgtgggtgttgagaaatgcaactatgcgttcctggatgtgaagtcaggacgtttatttttatttattttatttatttattttgtttttttggttttttggtttggtttggtttggtttgatttgtttgtttttgtttttgtttttttttgttttttttttcagttggaaccatctctggtattcttcactcttcataccattgatgtcatcgtggttctctccacaggtggaaagga

SEQ ID NO: 115476 - DNA, 806 bp, Physcomitrella patens
  Intron number 1 from transcript Pp1s34_187V6.1 (locus Pp1s 34_187V6) derived from phytozome v7.0 (chr-ID scaffold_34; pos 1007722 to 1008527)
aagtaacgcgatagttgtgcgggcttcagattctggttagtttcctgcagattttacattgtgttagtcttgtgaggatacgggttccgcttgtatgggttcagtggtctgcgaagtatgatctcgcagtgattcaaagacgttgtaggggctcaatacccagttttatttcaggtgacgattagttcaggaaactacagaagaagggtaaggaccatttgggttgtagacctacaacatcgtaaggagtttgtgcggagacgtgagttactcaaaagcattttcttgcatacaaaaactgtcatatgtgccagaaatatgcatgcaagcaccatattttgagattaatatcctgcagtcctgtaactgatacggttttgtgtttgatctttttggtcaagaaagtgagtgaataaattcatacgtattggtaaatgacgggggtgctattcagtgtgatccttggtcatcgccggtttttttcagtgttgatagaacctgggagaatacagacttgagatgacgataagttagggttgtgtgctagttttaattctagcgttttgcagatgaggttttctggatacgtaatttacgacattgtgactggaattcatgaatctttgcttgtgctgcgaatctttattctgtccacgtactttctctggtcattttaattgttcggcagccgcacaatttttttttaacttaaatttgtgcttcgaagtgcatattaaagtgtcattccctcacttttgcatggtttggcagcaactgcatcaccgtctagtgcagctcctgccatc

SEQ ID NO: 115477 - DNA, 805 bp, Physcomitrella patens
  Intron number 1 from transcript Pp1s98_21V6.1 (locus Pp1s9 8_21V6) derived from phytozome v7.0 (chr-ID scaffold_98; p os 123682 to 124486 reverse strand)
caggcaagaattttattctatcttccatctcctttaagtgctacattcctttactcatgcatcagtttccacttttcttttcctttttaaatcttttttttaggttcatattattttctgagcgctcttcaatatagatagagttatttgataacagtaaatgatccacaggcgagctcacagtcgagttcatcaaaacctactagtgtctctgtaagtgcaagcataatgtcttgcagccttcactctgatctgcagtgtccatatatcagtgtcttgagttcagtggtccggtccttttttggtgcagaaatcacatcatttataactttccagctgataactgccatgtcccttctagatcatgttcaatttggattgtcggagatcaaaccatcccattgagcaaaagccaatgtcgaatttgcactttgaaacataggtttaggtagggatgccttattattcctgacgaagtttctgagtcaaatgttagcgctctgttgcttttcgtggtagcagtctatttagtaaaacttccctcaagtaatgtaaatgcggatcatttggaagttggtagtaaagtaggtctgctttttgggcctttcgaatggttttctattgttaacctgccggaaaagcttttctagcaaaatcctggatttactgcgcttttctgcacaaatttaatttcgtttatcactttctgtccactttattcgatgatgtttcggtgtagtgccttgaagtggatggagcaactaactgacggtgatatcatggcaggtgttttatctggttgagt

SEQ ID NO: 115478 - DNA, 749 bp, Physcomitrella patens
  Intron number 1 from transcript Pp1s534_1V6.2 (locus Pp1s5 34_1V6) derived from phytozome v7.0 (chr-ID scaffold_534; pos 4614 to 5362)
ctaactggattccatcgccaaggcctcgccagattgtaatactgcccccgcttcacgcttttcttgcttcatttccctttcttctgaattttgtttcatctcttttggtggccggatgggctattgtactaattttcatggcagtgagagatttgtgagaggtggtctgggcaatggagtgagggtgcgatggagttctgcgtttgattgaagtgggcgatggttgaaaaggtgtgcattgtggtttgtgagttgctttctgtagtttttgtgagctgggtcaggggtgtggattgggtgtagagaggaagagggttgagtgacgaggtgcaattgattggaggaaagtttgtgggggagggttttgtgagttgggttgaatggttgaagcggattgcaggatcgggtgaagtggaggtggattggatgtacaattaggtgggttgcggggtcatgggtcatgggtgttggagtgggcatgggttttgagtgttggaaataatgtttaggtcgcggatgagctctgtctttggtgcgatcctgttttttttttttattatttttatttttatcagtgactggctgtggatccgtatatttgacttgaatgtttgactgaaatttagattagatgcacagtggctcgaggaagacatagactaggaatgaaatatcctggggagtcgaggcatgggattagttcattgatgtacttgcaaatgtgcacttttatcagcagggctacattc

SEQ ID NO: 115479 - DNA, 1058 bp, Physcomitrella patens
  Intron number 1 from transcript Pp1s34_24V6.2 (locus Pp1s3 4_24V6) derived from phytozome v7.0 (chr-ID scaffold_34; p os 191252 to 192309)
cgacgggggattgagtggtggcagtgattgttgaggtacatggagccctggggtcggtctgtgattaggccggttggtggtcgcgagtcgggattgagtctgggtgatatgtgttggtggtcgtggacggggatttgtgattgtatgtgatcggtctcgcgggtggcttgggtgatcgcagtggtggtgggaggtgattgagcttgaacttgggatcgttggtctccttcgtgcgtttcgcgtttttgagagagtagggtttcggggacatttggtcggtttgtgcggtttttgtgtgcacgcggatgtttgttccttcaggaattcgtagtatgttggagagtgcagcgcaggtcatctgggcatatgaggagaatgccagtgttcgtttggttttttcgggtgttttctggggatgttctcttttcgattgcttttgcgtattgttttggtccagtgaagtgtggcaattttttttacttaagatccacagttttagtgaagtgcagaatcgttgggagggaaatgtgtacacacttgattggagtcaatctggttctcttgtagagagtacgttggctttaccaggtggttttgtaatttacttcttaatcgggggttttgggaagaatatttgcacaggagtgtcgtccacgttgacttgttgggagcgcctgtcatttttggttggatttcaccattgaggagttcgttagtttatacagatgtcgtggaattattcaaatgtgaggtccaggattaaaagtagagtctgcggtactgggaatggttgcagttgtggacatgtatggtgggttgttttgaccggaactatgctgtgttttcttcataattttttgcaccatgaatttgaagcgatgccgactaggcgaagaatatttgtctgatacggcttgcatgcgtggtgggaacttttgtgtacttagtctttggaattgaggaattgagtttaatcgaatctagtttacggaatgtgatgttcttaatgatggatgtgagaagcttgttgtgtagggcaaatattacaataggtgatt

SEQ ID NO: 115480 - DNA, 613 bp, Physcomitrella patens
  Intron number 1 from transcript Pp1s83_176V6.1 (locus Pp1s 83_176V6) derived from phytozome v7.0 (chr-ID scaffold_83; pos 1236073 to 1236685)
cattgattctgctactgcgaaggtcagccttgaaggtaattgacgcagttgaagcagcttttcggaggtttgttttgaagctaattctgttctcacatgattctcagaaactcctcaaagcaatggcgtctttaaaaagaataatcctagcagtcatagctgtgatgttgaggtttagtaaagtatagttgcccaaacgtattaatgtttacaatgtctgaagtaacacttcttgagttgacttgattttggcactgccgtgttaataattttatgggaagctcatatcaaccgaactcgaaaattgtgtggttcagattgctatcgtataaagtttcaatatcatattggtagctttcttcgatgcgccatcagacattggtatattcagttatattctgcaagatttcaaacatgtactgtataaactagttttaacggtgatgcagttggatgagtatcgttttaattacgtctcaccaagtgtgtaacatcatctttcatatttgatttagtaaacaaagtaaccgtaaattcatttagatgccttcaaatttggatgaactcgtcgtgatgattgggtgttttttttgcagtatcacaagcggtgttt

SEQ ID NO: 115481 - DNA, 1051 bp, Physcomitrella patens; identical to SEQ ID NO: 115324
  Intron number 1 from transcript Pp1s31_68V6.2 (locus Pp1s3 1_68V6) derived from phytozome v7.0 (chr-ID scaffold_31; p os 370850 to 371900)

SEQ ID NO: 115482 - DNA, 842 bp, Physcomitrella patens
  Intron number 2 from transcript Pp1s313_29V6.1 (locus Pp1s 313_29V6) derived from phytozome v7.0 (chr-ID scaffold_313 ; pos 107931 to 108772 reverse strand)
tgtgagctggagtgcacagctgctgaagatctgcagtaagtgctattcttgaccaatcagccaagtttgttctgaatgtcactcgtgtttgctgtgtggaagggcgtatgctctgatcaaaggaggcttacctgtaaccttaagtaaaccaaattgagagccttgttttgtgtgatgaactctatgggatgagcattaatttaaaacgcaacaatgtctatgtctcgacatcattcacggtaccttcttgatatgaaatccgtgtcactagtatctgcttttctttcagctctacttttcatgggtagagctgtaatctaatttggcggccaggctgtgagaactgctccatttgtggtgaagtccgatgctgtactggtaatcacagaggctactgaagttcaattcggtagggggcggatattaacatgataatgtaaaatatagaactgggtatgagtagttttcctatctccgccagaggccttgtcattgtaattgtgatctctcacgttgaatcatttttattaggctgtcgttgcggtgctgagtcatcgttaataacgagaggagaattaggtttcgtgagttaactcctaaggtaacatctgtcaatgttgcaaagaagttcacattgaaaggaaggaatcgttcaggtaaactttggaagcatctgagtgaatgctcctgggattcaaagcaaaacgtcggtttctgaaagtggcattgtctcaatggaaataggttttagcgtgtgcgaccttgatgagatcaaatctttctaattgaggattctcatgtaactaggtgcccgatttgcctagtggaatacgaagagtggg

SEQ ID NO: 115483 - DNA, 444 bp, Physcomitrella patens
  Intron number 1 from transcript Pp1s91_144V6.1 (locus Pp1s 91_144V6) derived from phytozome v7.0 (chr-ID scaffold_91; pos 863103 to 863546)
gaagaaaaggtatgtccaccgcatttcaagtgcagagaacggaaagaccggttcagttgtgaattccagttctcagatgtgagaattagtgtaatgttcgtactcagccatttagtgaggcaccatagaatcacagagaacgtaggttcatgtgacaatgtgagcatcatgatgaattcagcattgttgaatatacgcaggtaaattctgaaatttgtagagttgaaacactaaacattatatgtttatgtacagggagtaggacgcagtcctggaattcaattcgtgtagcagcacgagaattaggtctatgttgaactgataagaaatacttctaacatatttgatttccagctggaacctagtaatctcgatttcagccatttctgcgagtatcttcgactaatttttcttttcttgtctgacataatgcgtctctcagcc

SEQ ID NO: 115484 - DNA, 913 bp, Physcomitrella patens
  Intron number 2 from transcript Pp1s267_88V6.1 (locus Pp1s 267_88V6) derived from phytozome v7.0 (chr-ID scaffold_267 ; pos 568703 to 569615)
agtgtgtgatcccttccccctagcatttgcatttcgtttagtaaacactgaatttctctgcaggtgcatacgttatgcacttagagtcctacatcggaggagcttctctcaacatgtgttttgtcctctgaccagtcctgcatgacttgtgatatgttccccagaaaatcactgttcacaatccgtggtagtgcaattaagagccgcaagcagtttaaggaggttgccatcccttctttcactgtctatttaatgatgtcacatatcacaactaccgttagcttcacattatctcttctcgtaatttcctccgtttttagatcaacagctttgaaatgcttaagtgaagcccctcgcctcttggccatttagtttgctttattgtatagtggagtccgtccactaactgccctctggatgtagggttcattttcttgcagttttgaaaactggttatcggtgaacctttctgttggcagatggtggaaatggttgagtttgtgacattggccatttgatcaacattcaaggggcagtagcctggtctgattaggtgggacttaacaggcaatgttttttgagtgcattagtgaaggaatttgttttatgaactgcaatgattcgcatcatcataggctagatcggcgttgcaggtattactcaagcaggtttcatataacggcttgtcgacgaagcctaaaaggcaaattcagtgacactatgattgtcggataaccgaagactatcctgtaattttttcagaggacctgtttcggaactgatcgaactctctatcctcatcttgacagtgaattctctagaattacggtctccactgtagtatacagagacgctggtggtttctatgttaatttgttactgaggggcgatatgcgcatgtcatcagaggccg

SEQ ID NO: 115485 - DNA, 1017 bp, Physcomitrella patens
  Intron number 1 from transcript Pp1s31_294V6.1 (locus Pp1s 31_294V6) derived from phytozome v7.0 (chr-ID scaffold_31; pos 1622792 to 1623808 reverse strand)
cacgtactcgttgctcgtgctcaacatcacatttcgtatgtggtctcttcttttcgcgtgtgttgcattccgttggatctcgtggttttctctctgttgcttgcggggttgtcgagttgaagtggcgggtttaggtttgtgtgctcttcagtagtcggaggtgagtttcgtatgtcgttatcacgctaggtttttgccatgctctctcgcaaaaatccgtataacgagctttgtgctcgctgtgtgttgctcgttcgagtctcgtgcacgagctgcttctgcagcgttggttatattatcatcaactttgatggtgcgtgtatatgtgtgtgtatatatatatatatatgtctttactttcgtcatggttcaagttaggtacgaagcacaattctcatgcaagccgtgtaggttttaggccattgcttacgtttattttcagtgtcactcattggtgaggcttttgtatcatattccagcttattttttaggttcagaactagagcgattggctcctcggtagtgtttttctacggtaaatccctgtaatagtatctatcgttgcgttatttttttgaatcttgaatgctttcgagaaatttcaagtgttttaaggtgctgttggattacgtattctgcgaatttctcaattactgttgccctgaattcttgtcaagcaattttctacactatagattgaatagccatagccgagttctgaggttgtcgttttcaatcaatttctgtttccaatttccaactggactcaatatagattatattgttaatcactaggcttacccagctctgatgcgaagttactcatgtttaatttgttcgaatctgtcttcaacctcgtgtcctttctcgtgcttatttctcagtttgcttctttttcaattcataaagtatgaggttacattacaatttggtttttaacatgctcatgtaagttgtagaacagaatcttgattatggtggacatgttactctgttatatgtcaggaactagcgctg

SEQ ID NO: 115486 - DNA, 436 bp, Physcomitrella patens
  Intron number 1 from transcript Pp1s40_64V6.1 (locus Pp1s4 0_64V6) derived from phytozome v7.0 (chr-ID scaffold_40; p os 458941 to 459376)
tcgccaaagcttgtgaagagtggggcttctttcaggttcatcatcaatgcaaccgttaaacatggaataatcaccaagttttattcttctcgagataacgttggacatagaaattataggaggggaaaagaaaaacttctggatagcttcagtgaatatttacaattttctgttattctgttcaggcctcagacgaccttcatagattttgtttatttatttttcgattattttgattttttaaaacaattttagcggtacacggttctctcaaaccttgttcatatgagcctcacacctagacttttcggtgtgattcatgactgatttcgaaaatattcaaggtatttgatggactgcagactggccgagtgtgagggattgaagttcatgttgtatctgtcaggtgctcaaccacggcgtgccaccgtctttg

SEQ ID NO: 115487 - DNA, 793 bp, Physcomitrella patens
  Intron number 1 from transcript Pp1s255_29V6.1 (locus Pp1s 255_29V6) derived from phytozome v7.0 (chr-ID scaffold_255 ; pos 403160 to 403952 reverse strand)
gcaaacaggtgcgaattacttcctctcgagtcccggttaccgtgtctagacgctagtctcatttttcatactagttgccagatatagttaccaagtaaaattccgcgtgtcagggttgcagggtacagtgtcttgatggatagcttatattttaagtgaattcttccatgtatgtcatgatgatcatgtctctcagtgtatcatatccaaagctgcgaattttcactgtgtatgagtagatctgcacgtgttaacctacttattaatgtcctcttcgatttcagtcttgcgcaatgtacatctgatttatgggaattgcacaaagaactggaaaatttgctgatgacaatccgaatttctaagcgtgctctgattgcattagctgtgttagtcgttgtgctagtcgtgtttatatgttaccattacactttggattaggatgtgtagttgctcgaaggatgttcgaagctcgagctgctaatttatctttctagccgtgaactatttctcctagtgttttctcaccggactctacagtttggtatttgttgatttctggaggcctctctttgatttcagacttgcacgagaatgcttgtccgatccatgagaggccagaaacgcatggcaagtttagcacctccttcgatagttactactcagacattatcgacttacctcactgcacctgtaaggatgtcctttagttcatttctgaaggtcgtggttttgattttgaaaatcaaaaattagatgtttgaaactcttgatcttttaatgtctttgcaggtgt

SEQ ID NO: 115488 - DNA, 258 bp, Physcomitrella patens
  Intron number 1 from transcript Pp1s25_85V6.1 (locus Pp1s2 5_85V6) derived from phytozome v7.0 (chr-ID scaffold_25; p os 636341 to 636598)
gtcttccatcacaggtaattgaaaacataaagaaagaaagatatgggtaatgcatggtaatggaacattcatttttaacaatgtgggtctattaagtagtagataaattcttcaaatttgatagatgtttgtatgaagtaagtttttttttgaattggaataaaatttgaaaatggtgtgtttgtttgtgtgtgtgtgtatgtgtatagatagataacacattctcaattattgtattatacaggtcccctttcaaaa

SEQ ID NO: 115489 - DNA, 813 bp, Physcomitrella patens
  Intron number 1 from transcript Pp1s34_448V6.1 (locus Pp1s 34_448V6) derived from phytozome v7.0 (chr-ID scaffold_34; pos 2341088 to 2341900 reverse strand)
cgcaacgcttctttgcaggtaattgtcccagctgattatgtccttcactgatgctcaatctgccgcatcgtagttgatgacgcagtttttgcagtgtgaaatggccctctgagcaacatctgtcccacatgttcgctatggctattcgaatattgggattaacagaatcccaatataccgttattcacatttcttctgttttattcgagcaaacctaattgtttgattactgctcacatttctcgttactgtatatcctcctgcgacaccgatgtaaactcactgaatgtgctcctctgaggaagttgcaacgaaagtcaccattcaacatcttctcgcaaagagatgaacttcacattcatagaatcctacgaacttgtatacgactctcctatcgtggcgttgtgaagggcccaggcgaaggtggtaatactcttcccatttaaagattcaaattcgccaaatagcttcgcttatcagatacctttgttttctcacaaaatatctgattttgacttgagagcttatttttatgtcaaaatactcggccactaattgcgaaggaccaaaggttcaaaagcttggtcacgcctttgacttatgctttgagcagtttattcccagaagttagtggctgaggaatggttcggctgactacttgagaccacttctttgaccatttcttatctcatgagactgatcttcacgaagaggtaacgacgctgcaacgtgatggcttatggttatcgaaagttgagaaaccctagtcaaccaactgctgacacatagtttcgtgtgccgatgatgcagggg

SEQ ID NO: 115490 - DNA, 353 bp, Physcomitrella patens
  Intron number 1 from transcript Pp1s31_330V6.1 (locus Pp1s 31_330V6) derived from phytozome v7.0 (chr-ID scaffold_31; pos 1812391 to 1812743 reverse strand)
gtaggtaatcctgtggtttcttttttttttttgattccgagattgttatgatggctttttatgtttcgagtgtggtactcgaggtgatgcccggaagcgagacaatatgattgatcgtaagcttatatttggtgtatcccatacaagcacgtgaacaatcaagaggttttggatttttgaagaagattgaaaattgtagatactagaagtgatgatgttaatctagcggaagtccaaaacttttgctattgacttggactgtctagcattcttgcattgataagtactcagtatttttttgtctgcttgttcattttggaattccggcttcaagggtgagaattggcaagaag

SEQ ID NO: 115491 - DNA, 602 bp, Physcomitrella patens
  Intron number 1 from transcript Pp1s8_123V6.2 (locus Pp1s8 _123V6) derived from phytozome v7.0 (chr-ID scaffold_8; po s 1073633 to 1074234)
ctggtcacgctagtttgaggtttgctgcttttttctgtcatttgtcttacctttttagttctgttcgggttaccgataccgacgtatcatttcttgtgaggaaaaattccttcgggtcgggcctcgaatagagtagagttgatttgtgtgcgttagtgtcatttgatggattgtttcatgaaagtggagacggtgaattgaacagtagttggttgtgaagtcgagaagtagttttattggagaagttgaaatcgagtttttcttgttttgttgcatgttttggggagttgtttgggtgaattattgcatgcgtatctagttgtgcgagcttagattgggttttgtatgcaactggatcttcttcacacttcttctgttgaaagtacttacgttgaagtagttgttccggtaattaggttttcgtggtctgcaagaagggtgcacaggtggaagtacgccgcattattgttcccgagatcttcacatcgcattcagcataatttgatttgtatagggagtgagtttgtgttcaaaggtttaaattggaaaggcgggttggttggatggatgggcagaaagtcaagcacttgtgagagagttgg

SEQ ID NO: 115492 - DNA, 910 bp, Physcomitrella patens
  Intron number 1 from transcript Pp1s117_173V6.1 (locus Pp1 s117_173V6) derived from phytozome v7.0 (chr-ID scaffold_1 17; pos 1060452 to 1061361)
catcgattttgaagtagaagtatgtattgtgatgatgaatggcatttaagattttgtaacttttacaatcgttttgaaaattttaggagttaaaaatttaaaattgttttcaattggataagctttttcatgtagaaatctcgtccagaactggaaaactaatatgatcttgaaattgataacttttgttcatgggcttgcgtagtgcagagtttggtaggcccaactcgacctctagtttaatttttgtgtctgctacctgcattcgtgtagttatatcctttaacatcgaaatcaggaatcgtcttcctggtttcgttgctctcatcttattctctgcaagaatgcttctgggccttcctaaccgttcctaacgctgttggtgctgctgccaaggaagtcgagagcatgtcctgtctttgcgcagcgttagcctggatatggatcttcgtcgtcttcttcgcccaaagatgaatctcctgacaatagaaacatggaaactgataaagtatgtgactcgcaactgtctgctttgacatgactcaaattcgccctcgagtcatttctccctcagctactttctccttctgtgcaatggttcattcactcgattatattttaaggccaaatgtcgctatgtggagggtgtcgtaagacgcatctctgcctggtatcaccttgtcattgtgcagtgtaaagctcgattatctcagttgaatagaatgtcgacggctagacggcaagattgctgtgcccagccgtcaatgctgacaattaagggtgcttccgtagagacggggttagttcatagaactggtttacttttttgagttgaagtcagtatgcacggaggtcttaattagcttgtgacacaggtagagggaccacaagactcttcggaagttggaaa

SEQ ID NO: 115493 - DNA, 428 bp, Physcomitrella patens
  Intron number 1 from transcript Pp1s188_94V6.1 (locus Pp1s 188_94V6) derived from phytozome v7.0 (chr-ID scaffold_188 ; pos 678302 to 678729 reverse strand)
gcacgctcgtcgttgctcgccacgcttttcacgaggtacttcaccccttttccttggccttcatttcatagcctgctctgatttctctgtacccctaccctaccgcgttgaatagcccatgatatgtgcagacggttctttaataaacgaaacaaaaaagagaaaaaagagaaatcagaaaagaaggaagaaggaggaaggatttgaatgctgtggatttaaagaagatgatttggggagctggtgtgggtctttgtgatcttactggcttctggatcacatgtaaaagttgacttaggtttggaatgatctgcgagtcgattgtgcgttgccttccataaagtttgtatgcgtgttttgagctgttaattatgcgagtttttgcttgtgcagtcgctctttcaccattcatagaagtggatcgctga

SEQ ID NO: 115494 - DNA, 418 bp, Physcomitrella patens
  Intron number 3 from transcript Pp1s52_122V6.1 (locus Pp1s 52_122V6) derived from phytozome v7.0 (chr-ID scaffold_52; pos 1095741 to 1096158 reverse strand)
ttgaagaaaagaggtaagttctcctactatatttttattcttttccttcaaattgtgaatgagatcaaagtcggatacttattttctttgtcacctgcatcgaaaaaaacttgatgccttcatgtcttatcgttctaggagttgggattcatttaggtcagacttgttttctcgctctcacacctctgtaatcttgagcacttaaaaattgttattctccgtacacagtttaaatagagctcagaaccgtctatgcgttcaactttgtggtctatttacttcttactgaatgaactattagggaaacaaaatagtggtttgttaggatgccattttttttgttaattatatttatattttaaaaaatattttccttcatgcagcacaagtttcaagcaggatcgcaaacaacagaaag

SEQ ID NO: 115495 - DNA, 481 bp, Physcomitrella patens
  Intron number 1 from transcript Pp1s1735_2V6.1 (locus Pp1s 1735_2V6) derived from phytozome v7.0 (chr-ID scaffold_173 5; pos 2756 to 3236 reverse strand)
gtggagctggatttgcggtatatcaaagatcaaagctttacattcgattttaaaatcatatttaaaacagtcatgatgatgatcagaagtaaaggggcttattagacttaatccatgggagtaattaaaatggctgagaaattaaagatcatttttgttagtcatacctatatgggaggtacgtacgttgtaggttcccaccatttggcatctcaattgcggaagatggggcatgatgtattgcatattagcacacctgtcactccgtttcattggctgaataaaaaaacgagaaaagaaaatcaagatcgatttcaactttggcgcaaatggaaaagctttaaccgggatgaggtcaaaaatatcgttccattatccctgcttccatggaaaatctcaaataaaatttatcggaagttcaaaattaacttgacgaccgaaatgatatgttttcccagcttaaaaacgataacggattatt

SEQ ID NO: 115496 - DNA, 728 bp, Physcomitrella patens
  Intron number 1 from transcript Pp1s31_142V6.1 (locus Pp1s 31_142V6) derived from phytozome v7.0 (chr-ID scaffold_31; pos 730240 to 730967 reverse strand)
tgttggcctgccccgcgggcgtgcctgcatcgttggtactcagctcctcctgttgttgccctctatccgttcctcagaacatgaaaactcaagttaggtttgctggacagattcgatacattatttgtatatgtggactcttcggatccttacctcgtgcaggatgtaagcatattttgtggttggcatccttctcccttttgaaaatggcgtagcaatggtttgtcttgaattccgaagtctttggttttctactttgatcattgccacacttaagatttctgttagagcaacactttaaccgctcaattcgcacgccgccatcaaggcgccacttctgtgggcacgcttcgagcttctctgtgttgcctcgaggcccaagtttgtgcttcattctaacattctgcaagctgctaattgatgtgctacatgtaaaccgatagtgtcatagtcagggttcctgctatattataaagatataatgcccacatatctcaggaatctcttacattgctgctttagcatttcctgctatcttctcctgcacttaaattacacaatccaggtgtaagtagtcaaagaatttttgttcttgcatttcgtgaacgatcttattcttaagttaatcaatgaaaagtcaatgtcggtttttatcgtagcataccttgtgaactctactgatatcgttggctaatgtgtgcagcttgaagtagagtttagtccggcgt

SEQ ID NO: 115497 - DNA, 923 bp, Physcomitrella patens
  Intron number 1 from transcript Pp1s152_153V6.3 (locus Pp1 s152_153V6) derived from phytozome v7.0 (chr-ID scaffold_1 52; pos 803262 to 804184 reverse strand)
agaaaaatcagcaggacgaggctctgttgctgcaggtgggtggtttttggcaatgcccttcccagcttgagtcttcaccgtttgctggtgctgagagactatggcctgtcgctgccgatggtttgtaaccttcgaagggttagagaggtagatggtttgcatggtggatcgcatcaagtttgtttcttcctccgagggttttgtagccttcgaagggttagtgaggtagatggtttggatggtggattgcatcaagtttgtttcttcctctcagggttttgtggatagcttgccagtcgtttattttggttggtcttcgtgcgagttgcaaatgtggcgggtgccgtgaaggctgctcggaaagctctaagccactgtttattgtttattttattcccggaaggtgtttgttgtgaggcgggtttccagcgtcatagagtgttgtgcatgccagttctgtggggtttttttttttttttctttttctttttcttttcatcgtagctgttgttcgcaagctcactcggttattcggggacatgctttttttcagttttggaatttcagtgtatgtaggtatattcttgccccggcacaagcacatcaaaattatacatttgccttagaagacttcgtgcaagagatagatgtgattgagttggttacttctttgacgaaagtgcaggtcttctcgtgtgagcctcgatagaggaagctcgcattgcgttgtgtgagggtatcttggatgtccttgtgtagaaactcagagaagtggagaaggtgagcaccgttccaccgagtgttgtgagctcgtggattaaaaggcgggcttattgttgcggcagggtacagatttggtggatcttgaagcggagtgccgaatctgtcagccctaattgttggggtcgcttcacagtttctcc

SEQ ID NO: 115498 - DNA, 736 bp, Physcomitrella patens
  Intron number 1 from transcript Pp1s353_28V6.2 (locus Pp1s 353_28V6) derived from phytozome v7.0 (chr-ID scaffold_353 ; pos 175015 to 175750 reverse strand)
cattacaccaccaccgtgttttaggcattggccaggtttggcttttgctatactgggttctgcattatgggctgtttggttgtgctagttgtgaggattcccacaattgcgttggggtcggtttccactgtttggtgagtgagtaagtgattgggattgtgggtgtctttggacccaagtgtagttctttgttgagtttcctttatctttgtttacgtggggatcgtaaggttagtggtttttgttctctgggttttgggttaagtttgtgtcgctgttttgaggagttgggtgtttgcttgtgtgcgcatttgaggtttggtggattgaaggtttttttttttagagaggtggtgtgggtatgctggaaatgtagtttttttaatgattttttaaggatgccccttagtgtgattttttattttgttcgtgagcacgatcaaagattaatatgattgatttgctttagcatgtctttttagccaacgagttgaattatggaatgtggtgtggacaaccttgaatatgatgcttgatataaccagatattgtgattaggattctttgatttgcagtacctgattcgacctgttggatttacgaacatcatgttgatatgtggattggattggattggacaggtcggttctgcttcctgagaagatggattatgagattctgtacttgtctgaagcgttgctgatatgtgcagattggacttgtactttgaattgca

SEQ ID NO: 115499 - DNA, 832 bp, Physcomitrella patens
  Intron number 1 from transcript Pp1s230_38V6.1 (locus Pp1s 230_38V6) derived from phytozome v7.0 (chr-ID scaffold_230 ; pos 471443 to 472274)
cccaggtattttctctttggctcttcttacaggctgccaaattatatttattacagcaaacatctgctcggggtttgagtctggtgtggggttgagagttgaggttgttaccgtagtaagtccatatcaccgagctacaggttgaagagtagtaatcactaggtgaatcttgtcccgaattattgggctagtctatcttctcccgcagcttggagcagaagaaaaacagtattttctttactttttgatggggcatccttcgcaaatgtgaacttagcccttgtcatccgtttcaacactatagatatgtccttctctgaatacaattgagagagtatgtttgaggatcattatctacagcagatattcagcagctcaattgcagatgattagtggatttttcagtctattacgaaatgtttaggtacatcttttgcccggtgggggatgtcttgtgtattttagatatactccgaggaattcaaacgttttagagctttcccggcgggatgggtattcaagcatttttgaacctgtattgaattgattcatcttgatgttggagtacatatgatacctctccagaaactgtggttgtccaatgtttggtttaagtagaattgttgattttgcaatgcgaatacacatacgctcaaagacctgggtttgtgcttttaactgacgaaactaattttaggtgatggtaattctggtttggtttttagaaacgggcgactttcgaaaggcagtctttgacaggactgttgtcttgacgccatactgttcctaccacatattgtgtcgtaatggtgatcgctatttttatgtgcag

SEQ ID NO: 115500 - DNA, 855 bp, Physcomitrella patens
  Intron number 1 from transcript Pp1s31_392V6.1 (locus Pp1s 31_392V6) derived from phytozome v7.0 (chr-ID scaffold_31; pos 2382264 to 2383118 reverse strand)
tcgtcggcgctcacaacatttttgcacgtatccgggtgggtcgcgcgtctctgacctttgttgctgcatttcggacggttgttgggtcaccagcttggctttgtccgcacaccatttgagctgtcaacgagctttttaggtttcgaccctgaagagtcgtgtttatttatttatttattgttctcttttctcttgtgtcgtatctgcgcttcgtaatggtgtttgtgtcggtgccttgggtgagaatttgtgttgtgagaacttttgagagtgtggactgtttggcttggtgagtcaatcatgttgtctctgtggggtgtggagagggggtgtggagaggtgttggagtcgcattgtgtgccgagggagattctcagtgtcgtggtgagcagaggcgattggaaaatggtttaagtctgtgatcaacggctgggttagctgtgttcttgtaggattggcttcagttgctaggacgatttattgccttctagattctgccgggatgtagggagaattgacgcgtttgatgtgcaggtgtagtcagtcgtactttggtgtggtcttaactcagatggcctgcacccaaatttcgcctgacggcttaggtcgacgagttgcagttccacgagtttagctgatgaatttggtacttgatgggtgtgtaggattttgcgtgggtcatgcctattgagttttactctagtaatgaaaccttctctctttcaggttttatttttaggtcatacagattctaggatattcgaagccgatgatatcctctggccttgcatttaagtgtggattcctgctgtttgtgtagttgggacacagtcacagatacagggcgatcataag

SEQ ID NO: 115501 - DNA, 640 bp, Physcomitrella patens
  Intron number 1 from transcript Pp1s315_10V6.1 (locus Pp1s 315_10V6) derived from phytozome v7.0 (chr-ID scaffold_315 ; pos 43800 to 44439 reverse strand)
gtatcgctgtcttcggtacagctcctgctttagtatcttgttttcgaatttcaatgctttcgatctttgtcgcgtgttcacctagtgataggctctacattttccatagctggcagcgtatgatttggaatgtctctatgttaaatcatgcacaattttgaaggattatctaatcctacactctatatcattctcttcttaaaaattgcttcaatgtcgattcctaaactttgcttcacgtataattttctgatagtgcaaattgtctacgactagacttcagaacagagaagttggtgtcccttatatctctgacactgattcttcgactattagccgtaaacattctcgattcagttgtacccataaactagttcagctcaaattctgattaaagtcttgtacacccttgttatctgcaatagtagtgtaagaaatttaattattcttcgccttgtacttgagactatttgtttttgacactgtggactccctcacgctgccgtaacttgatcattctcattaactttacgattcttgtaagagtccttatgcatgtccagtgtttcttagatttgtgcacctggcatgggtattgtaacagcagcttaagtcttgcacctgcgatggttgtgctaga

SEQ ID NO: 115502 - DNA, 530 bp, Physcomitrella patens
  Intron number 2 from transcript Pp1s353_18V6.1 (locus Pp1s 353_18V6) derived from phytozome v7.0 (chr-ID scaffold_353 ; pos 97290 to 97819 reverse strand)
acctgcaacaacgtcacttttgaggtcactgcattgtaagttcatcgcgcggacttgatccgacctttgtttcgactgctcttgattcagacagcttctggattttttgactttattgatgatggagcacagatataaaataatcgtagctgcgctggttacgattatatttgcaagtgtttcggcctccaagtctatccgaacctcgagtcgctggaaagaaaacgactttccagagcttggttttttcagcttggagtggctctctgagacctcttggtgctttttctccgactgtacaggaatttgtcagaccacgctctagcaggagaaatctctccgtcaataggactgttgcgcagcctgcaagttttgtaaggctccctcaccaactgtaggactagcacttggctgacctagaaagttaacacaagatacattataaattttggcctcacgaagcactcaacgttcttctcttataaacttgtgcagggatctcagtcaaaacaatatttctggacaactcc

SEQ ID NO: 115503 - DNA, 529 bp, Physcomitrella patens
  Intron number 2 from transcript Pp1s83_135V6.4 (locus Pp1s 83_135V6) derived from phytozome v7.0 (chr-ID scaffold_83; pos 968479 to 969007)
ggagtccacgaaggtgattgaacaaaccacttaatttctatttacgtgagctttattcttgtcagtgcgtattggacacaagccggcacaaaatcaaagtaagttcaatatggagtggatccttctcatctgggataagctgtttgattcgtttgaaggttggaggtggaaatttgtgatagtagttgacacgaaacctatctagcagtaacgttattaggaagactgcgggaaaatgcgggtaggaaagtggagtaccctgttgtcggcagcgttgcgttgttgttttagaataattttcaggtgtgacttggactcaagattctttctgtatgcgaggaagatgtttttcccccttaatgctaattctgtggtgatcgtgtaaagcttatggagttggggattcccttagggtgattgattttgatgtaagggtgtagttgttggactgtctctctcactgtacttcactggaactcaattgtctgttttctgtaaagattttatgatgcagtctgggtatttttcg

SEQ ID NO: 115504 - DNA, 507 bp, Physcomitrella patens
  Intron number 5 from transcript Pp1s25_70V6.1 (locus Pp1s2 5_70V6) derived from phytozome v7.0 (chr-ID scaffold_25; p os 577026 to 577532)
aactcccttgtcaacctgaaaaatttagtatctctgtaagaaattcttccagacttctccacaaatcttcattggaaatgtcactctcgtttcccttttagttcaagttcatgctttcactttttcattcagcgtacagaattattgaaagacaacctccatacttaatggatccaagtggctgtttatgtcttttggtcgttgtccttttctacacaaatggggcaaagtaaccttgcctattcgcatcagtaaggaataatgattcattttaactaccaagttttttaaaccttagctcagaaacgtagggtgccgagggaaatttcaaaatgtgagccttatttgaaacttcgtctcgctgttgccttcacagttgcggggtccatgatcaaatgatagcaggtttattaaagaatggaaccttttattgtggggaataatttggaggttattatccaagacgtgtgttttctttccgcagaaatttgagagggaatcatttca

SEQ ID NO: 115505 - DNA, 646 bp, Physcomitrella patens
  Intron number 2 from transcript Pp1s234_70V6.1 (locus Pp1s 234_70V6) derived from phytozome v7.0 (chr-ID scaffold_234 ; pos 480542 to 481187 reverse strand)
tggtggacaccctgcattgaagcttaccctatcaggtatcccgcctggtgggtattccctcttttgggcatattctgaattgttttgttttgttttgtttttcgtaggagtgatgtcttgtttcccggattcgaatcgttttctcttaacatcgctctgtctaaccctatttgattttgggtcattggtcgggttcgtgacttcgttgaatctctcgtgatcgcgtataaggtgacttggtttagctaagagcattgctctcataggtgctttatgaaatttcgcgtggtcggtgcggtgccaagttgcccagagttgcaattttattttaaatgcttacggaatactacaacgacggtttcgtttgtaaaccctagaaagcttgtggcatatatttttttatctttttatcttggaaaatatatccataagctttgtagtgtttttgaaagcttggccttttatcacgtttaatgccgcttaactctgggcggaaatttggaagagcaccatgagctcttactatgaagtttggactcgccggttgataatattttagaaggcagaatgcactaacagttttcgtttacatttattgtgctcataatcaaattttaacgaagatactgaatgttttttcgccagg

SEQ ID NO: 115506 - DNA, 562 bp, Physcomitrella patens
  Intron number 1 from transcript Pp1s61_266V6.1 (locus Pp1s 61_266V6) derived from phytozome v7.0 (chr-ID scaffold_61; pos 1479191 to 1479752 reverse strand)
tgcgctgcaatattgacacaggtttgtaatcgatgctgtcagtttcaagcataggttcggcgatcatgttttggttttggttattgagcaacaaattagctctttgtgagcttgtattctggagtgctgattgagtgctgtcatcagatgctgcatcgaccaggatgcaaacgagctcattcggaaattcgaaaggtttacgggccacattgcctgagagttgctggcaggtggcttaatctagccttggagaataacttgtccttgtttctaatattcggattcatgtaccagggttttcttttggtttaaatcttaatctcagcagcagaagacctttgtctctctttgggtactttgagatagatggatttatttgtctctactttactcgagttacacgacttctaaattcaaatgactcaatcttgaattactcgacgacgattggtgatttgtgaagatgatgggtcttttaaacctaacgaattattagacgaatgctagtatgtgaactttgttacagtactttgtttttggacagctggactttcctccacaa

SEQ ID NO: 115507 - DNA, 865 bp, Physcomitrella patens
  Intron number 1 from transcript Pp1s83_251V6.1 (locus Pp1s 83_251V6) derived from phytozome v7.0 (chr-ID scaffold_83; pos 1598645 to 1599509)
cgcgaggttcaagcgtcggggaggaattagcagtgtgtgaggagcttggattttgctctattttttcactctttttttctttaccttttttttttaacgccgagggaagtggtggatgtattttgaatttggagttgaatcggcagtttgtatttattcgtcttgcttagagtgttgaaattggagatgcttctcgttggatcgttggacagtttagtattcttgcgaattacactgtaggttcggaggcttcggtagcaggtatcgtggtcttctagtttgttcgcggcggggtgtacacttcaagtttaaattcttgttgctgtatgagttgaaagccttccattaattggttacgtttaaagtcataaatgaactcacagtagttcccctagattttgcttattcaggtctaggtagaaagggcagggtgccaagtcaggtctgagaggccatcacggaggcattcgcaaagtgatgactgattcatcaagttcgtagagggtgcaatcgaatggagttgacatgtctgagtgtcttgctttgcatgcgtttcaatgagtactgcgctcttttagttgttccaggtttttaagatgtcgtatgcacagggttatctgtgttgatgctcaaatgtgtactagttttcattagagagggctttcatcaaattgagaaaagttggcgatgcagttgaccagtgacgttcgattcactgctcgtgaatgtgctttgtgctacgttttttttttccaatcattttttcggacttagtcttgtagggaggagtttttagtttcaatcacgtatgtataactaagttcctcagtgttgttgcttttgcagttcaactagtacacagtga

SEQ ID NO: 115508 - DNA, 510 bp, Physcomitrella patens
  Intron number 2 from transcript Pp1s68_3V6.1 (locus Pp1s68 _3V6) derived from phytozome v7.0 (chr-ID scaffold_68; pos 20643 to 21152 reverse strand)
tcttgacaagtgatagcgagtctacgcgctttgaggtacgacttaattcctgccaacttagaactctgtctcgtgttactcccctttctcaatctttttcgagctataagtttggtctgaatgatcagcccattgtatctggggcttaagtttactaatcagccaaaaatggcatgttataacacaattatttttactggttgattcttctttcttcaggtttgagtggaaggatcgcatagcgattatagagcctgtttgttgatatcgggtagtttttggattcgtaggcgttttttttgtttttgttttttttgcgagactgcgagatctttattgttgacgtgattaattaaaaatgagttcaatgcctaaccaaacatcagtgaaattggcttaggttcagttcgattgccactgaattacgttaggaattcaaaattaaactgctgaactatgttgggaattgaagcacgaccttttgatgtacatggcttcaattttgcagat

SEQ ID NO: 115509 - DNA, 692 bp, Physcomitrella patens
  Intron number 1 from transcript Pp1s188_85V6.1 (locus Pp1s 188_85V6) derived from phytozome v7.0 (chr-ID scaffold_188 ; pos 633795 to 634486)
gcgctttcgctgaggcagaaacagctcggtaacgccgcttccttgcagatctgtgttcgcattgttagaagtcagcacacagactgctttacttcgcgagattgggtgatatattaattattttatttattatttatttatttactactctcttgtgggcatattttctggatcgatagtgttggagtaattcgtgctttggatgtaatggtgatatttccttgctgcaagtaggttgtactggaatgatttgttgggttagatggggccgagatttaatttgattgtttgtatgttgttgagggaattgagaatcattttttttcagtggagttgggtgtgagtctgtttttatggctattagatgagaactggtgtgtcgcgcagtcttatcgggaaattttatggatggtgtttgagggagagatgcacggggtttggtttgtggagtgctctgcaccttcgtaggtttagggtttacgtgtaggacttatatttttttttgttcttgcattgtgcggaatcggatgcgtgagtgtcgagctgttagagtatacgtggaatgttgtcaatgacatggatggtgcgggcaacttggttaccgtgatattggaggttgtcttcattcacgaacattgtcattttgtgcatgatacatgacctgaatttgagggcggtgaacatgtttacag

SEQ ID NO: 115510 - DNA, 839 bp, Physcomitrella patens
  Intron number 1 from transcript Pp1s34_160V6.2 (locus Pp1s 34_160V6) derived from phytozome v7.0 (chr-ID scaffold_34; pos 774764 to 775602)
ctcttgttgagaggttgattttccttcttttttgcatcaaattgatcgttcagcgtagggccgtttcttagctagagaagtgtcagtccgttcacacggtgtgtacgattaaccttctctttcaatattcggaatggctacgattaggtggaacagcagcacagggatgcgtcggcaattgtaacctccgctcacctggaaatctgtgatccattcttattcaaaacctttgctccctattgttgggcaaattagagtgtgataaacatagtataccacgacctggacgtgtgcgtagttggcagctgcggccttgctccttgcatttgatcaaaactggctggtactggaaagtaatatataagaatttgatataattcgttatgactgactgcgataagcttgcggttggatccaactgaactcggggtcgtacatacattgtcggcaaatttgatatcgtatatttgaagaatctactgactacttttgtcttcagacttgcgctattcactccacttccattgtattgaagaatgtggtccatgaccaagagtatagcgccgtgtttatcttagttgtttcatcctaaccaccgtcctagtcccaaagccactatctgtggttgggcgaaggtaccaggaaattaagagttactaaagtcactctgaaggagagtaaccctctgccattgtcggaaagcttgcaggcgcgcttcgaagatgttttgaatgttcatttatttatccttccattctttccccctatatatctatttatccacatttcattgttattaattgtatggctggcagagcgaacatttctcaggtgttccc

SEQ ID NO: 115511 - DNA, 1059 bp, Physcomitrella patens
  Intron number 1 from transcript Pp1s34_24V6.1 (locus Pp1s3 4_24V6) derived from phytozome v7.0 (chr-ID scaffold_34; p os 191252 to 192310)
cgacgggggattgagtggtggcagtgattgttgaggtacatggagccctggggtcggtctgtgattaggccggttggtggtcgcgagtcgggattgagtctgggtgatatgtgttggtggtcgtggacggggatttgtgattgtatgtgatcggtctcgcgggtggcttgggtgatcgcagtggtggtgggaggtgattgagcttgaacttgggatcgttggtctccttcgtgcgtttcgcgtttttgagagagtagggtttcggggacatttggtcggtttgtgcggtttttgtgtgcacgcggatgtttgttccttcaggaattcgtagtatgttggagagtgcagcgcaggtcatctgggcatatgaggagaatgccagtgttcgtttggttttttcgggtgttttctggggatgttctcttttcgattgcttttgcgtattgttttggtccagtgaagtgtggcaattttttttacttaagatccacagttttagtgaagtgcagaatcgttgggagggaaatgtgtacacacttgattggagtcaatctggttctcttgtagagagtacgttggctttaccaggtggttttgtaatttacttcttaatcgggggttttgggaagaatatttgcacaggagtgtcgtccacgttgacttgttgggagcgcctgtcatttttggttggatttcaccattgaggagttcgttagtttatacagatgtcgtggaattattcaaatgtgaggtccaggattaaaagtagagtctgcggtactgggaatggttgcagttgtggacatgtatggtgggttgttttgaccggaactatgctgtgttttcttcataattttttgcaccatgaatttgaagcgatgccgactaggcgaagaatatttgtctgatacggcttgcatgcgtggtgggaacttttgtgtacttagtctttggaattgaggaattgagtttaatcgaatctagtttacggaatgtgatgttcttaatgatggatgtgagaagcttgttgtgtagggcaaatattacaataggtgattt

SEQ ID NO: 115512 - DNA, 991 bp, Physcomitrella patens
  Intron number 1 from transcript Pp1s27_271V6.1 (locus Pp1s 27_271V6) derived from phytozome v7.0 (chr-ID scaffold_27; pos 1830082 to 1831072 reverse strand)
ttgcagtggattttaacaattccgagctaatcgtcagtattattattctactttcatttttagtgaagatattttcagacagtgtgggttttctttgcttggcaaaatatttggcatctgggattggcgatgagcatcaaaatggtgattgatttatgaggtccttggtctactgaagcctcgtatttcctcttttcttcaatgttctgcaagtttaccgaactttagattacggaaacgagcatggcctacgtcatgcctgccttttctcccgaaagcttgattctgaggtgaaattaaggctctgagtggaatcggcacagattatactgttctagactgtttggtcgttgatcgattagtagaagcccgtgggtcagtagtgcagcgaaatgaagccactgaggatgatttggcagtagtcattgaaattgctgacaaattgtaaggacacacgacttacattgagaccctaattgcgaggcatttcgatctgaattgtatagaagctgaaagatggtgaggaatgaacttgcgctagtggagaatttcttgtgaaatttatctacaatgacacgaatttgctgtttcaattgtcttcgaatgattactacaagtatgtattgctatgtattagactatttgaataccttccacagtcttttgatgattaagagttggaagttgatcacaacccatgccgtattcttcttatctttgaaaaccatcaacctgcccttcagaaatcaagcatctctgacttcccggtgtttgatttctccttctagcattttcccctttggtttccgatttacgaccctactacaacttgatgctcttgatgtgatttagactcacatattaaagagggtctggtcgatgagcaccatgtggtttattcctatccgtgatacgctcactaagtattaacttaactgttaagtgccgatgtgtagattcgggaagagttacagcaagctgtgaagggagc

SEQ ID NO: 115513 - DNA, 738 bp, Physcomitrella patens
  Intron number 1 from transcript Pp1s423_9V6.1 (locus Pp1s4 23_9V6) derived from phytozome v7.0 (chr-ID scaffold_423; pos 34609 to 35346 reverse strand)
atattgaactccttcgagttgcttagaccacgccagtgagtttcctgaacttgaaatgctcaatgcaaactattcctgtgtagatatatcgctgtgtctttctaacagattcttatattttctgaatggcgtgtttgatttcagcttttcttgacgtacagtgtgtgcttgatagagttaaattatgacaacgcattaggtaagatagttatgcttcttaattggagggtaaatggtccatcatcctccgtcacgaaactgtattgaactctggatggttatcacaccacattggtatgcactgccccctcctgagtgaaatcaagcaattaatggtattcgtgttcgacacctcttggtagatactaaacttttacctacactctttcatttgttttctcctctggtcactgttctgtcaacggcgagagcgtccatgatcccatgaatggagacattttgtcagcttgtatccattaggtttgtcctgctgtcaattgcatcgtagaaaccgtacgtgtgctaagaacatttcactctgtgttccaatacgtcttcttttctttttctttttcttttctctgtgtgtgggtgttagaaacatttcactctgcacagaaggatggttttccacatttagtttgcctctatttgatctcaaacttcatgaggaccacattcaaatgtactgacctctaatctctgttgtttatgtcttctcgataggctgtcggcaag

SEQ ID NO: 115514 - DNA, 931 bp, Physcomitrella patens
  Intron number 2 from transcript Pp1s10_323V6.1 (locus Pp1s 10_323V6) derived from phytozome v7.0 (chr-ID scaffold_10; pos 2508091 to 2509021)
gcctagtttcacgagttagttttgagtgtgcgttagtaagatcacgatccaactctttgcaaacctttttctagtttgcaatgctgatttctctcctcatttgaagtttttgaggtgttttgggtgtggccgcgctgttgatggggatttcccgacactttgcttacagaacttagcaccacggacaaagcgttatttatttatttatttaatttgacgagtgtttttctttttatgatcgaattgatgcgatgggcagtgtcaaggttcgatcccgtgtcaacagtcatgccttgcccattctaatgcttttacattagctaatagagcaaatcttcgggaaccgaaataagaagtaggtaggaagattggcggtattgttagctttaattttgtcttgattgttgtgccgatgcagtagctgtgtacaatgcgtggacttatcatagggagggtttctatttttctttaattttttcccccttcttttccttcttttccttttcgttcttagaaagtggttgagttgatgcagttattattttaatttacataagtgctctagttagtgaaaaatatgcgcgagtaactgtttgacctagtcagctgtgctcaatgcaaggtgcctgtgttgtagagctcagtagcatttaaattgtgtgatgattcctctttgacgccactccaaggcctttgaatttcctgtttgtatgaacgggaattggtgttgtattttgccaagcatcgtttgttgttgctcgatagaatcctctatctaaaagttcaaagtcaataatctatctagtgattaaagagctggctatggtcaagttaatacttatgaaagcaatcaccccccactttgagttcaagtatgatgcaagagtgcatatgtacacgcctaatttctttttcttatgctaacagaaaa

SEQ ID NO: 115515 - DNA, 884 bp, Physcomitrella patens
  Intron number 2 from transcript Pp1s27_258V6.1 (locus Pp1s 27_258V6) derived from phytozome v7.0 (chr-ID scaffold_27; pos 1796842 to 1797725 reverse strand)
agcgggcgcttgcgacgcacgctgttgtttctgaggtgggtttccggttattaccctagatgtggtctgattcttgcaattggcatcgttggatgaatgacaactgagacgaggctattaactcggtgatggcaagagaaaactcgcttgtgcgagctcagtcgcattcgtttgcaatttgagatgcttctcttcttggtgacgacctacttccaggaggttggtgcatggagggaaggttagcaccatgcagtcaccgcatattgcgtagacaaagcatccaggatggttaaagttaaaatggattttggacatggtgaccagtgttatttgaatagatgccaattcgaatgaatatctattttttttcatcctttcatctgctttaatttttaatgttagtgttattccttacttgtgttttttgttttgttttttcaaagaatccgttcaatttgccatctctaaaaaatatgtctcaatttcatcagtgatcaattcatgcgtagaataattatcctttcgtgtcttgcttctatataagatcttttaagtattttgagcgaggttattctgcggtacctcgatcatgttttcgtggctcttggatatatttaaccaacacatagactgttgttgtatcttctgatacagtcatttttttctaattttgagttggaacacaagtgaaggcatgttatctcatgggttgatgatcctcgttggaatttcagaggtgcaaccacttcgtatttcttacccccatgtttgtgttatcagcaggttggtggagctggcgagatagtttgtctctaatcaataagagtataagggtgtattgcaaagttgtaccaataaaaaggaagcgtctttgaaaggtggcg

SEQ ID NO: 115516 - DNA, 548 bp, Physcomitrella patens
  Intron number 1 from transcript Pp1s83_237V6.1 (locus Pp1s 83_237V6) derived from phytozome v7.0 (chr-ID scaffold_83; pos 1526308 to 1526855)
attcctgggatttgaccccagagcgttatcttcctgtaagcaattttctctcataattcctcaatgtgattttttctgttttttggctccctcgaagtgtgttccaagtatgtgtgcattgcttctgatctccatggcttcctttttcaaacccttcccatatgcttgtgagagagtaggctttcatgttgtagcatgcactcgggaccctggaacatattgaatccttttgtgaaacagtgccctgtcgacttgctctctgaatgtcttgttcttttctggaatgagttgaggtccactctctcgctatgtgatggacacggcccataatgatttagttactctcgtattcctgtactttaggttatgatttgatgatgtcatgggttttattttgatttgagaaaaatgggtttggcactcactgtgcacatcttgatttttattgaacattttatttttttcttgcaattgttgcctcccgtttagctatcgactgttatatgtcttatatagagctacagcttattgcagacaatcaggagttt

SEQ ID NO: 115517 - DNA, 928 bp, Physcomitrella patens
  Intron number 1 from transcript Pp1s91_11V6.1 (locus Pp1s9 1_11V6) derived from phytozome v7.0 (chr-ID scaffold_91; p os 74675 to 75602 reverse strand)
gggcactaggctatttgcggtaagttacctgctgattgggatgactttgtgttattggttttgtcccatgagttgcccatattaataacatttgttttcgctaagttggtgaatccctttgctgggaaacgaggtagattttttctcacgctttcactctattactctttgtttttttctgtgtgtgctgacggagtagcttcatgtacagtccacgaggttcatgtccatcagtgccccagcttcatttatgtaatgggtctaaatgcaaacaacgatattctgaaaattctgtgctgctttctttgaagggagagatgttggagctgagctataattgtaacgttaacatgcttggcattagaaaatattatcgtttcgctgcaccgcccaggggagctgcagcttattccattccctttcgtcttcctcgtagggatcggaacggaactcggctattgctgcagcttattctattccccacaccatcgttttctgttatttcccacataacgacaaatcgaaatttgaaaatggttgttgtaattacatgtgccatgcaatattctcaccgcggaaagcaggaaagcatgcatgttaaaatggaaaacgcctttgtaaactggagcgggggggggagaagggccgttgttgctggctgaccggccaccggtgcccagtgctggtggcttaacttagttcgaggatgggtttgaaatctttgttacttcgaagggatgagctcaacaatattctccggattgattatcccgttgttaaggaaggcatactcgttttgtttccaaccatgtgcctgctggattcacggcaactgatatcagcaactctgttgcctgaatgcacagtccagagttcaacgcctccgtcccaattggttgggtgtttttttttggcagtgcacagtcgg

SEQ ID NO: 115518 - DNA, 429 bp, Physcomitrella patens
  Intron number 1 from transcript Pp1s40_4V6.1 (locus Pp1s40 _4V6) derived from phytozome v7.0 (chr-ID scaffold_40; pos 26677 to 27105 reverse strand)
tgcgaccaggacacggcaagcggcagcattgacatgtgcggagcagttgtgcacgttatttgttgtggtacccattccttggtttcatgtaggtgatgcgattgttgcgggattgcagagtctcggcattgtggctagggctcataggttcggaggaattgggttcagactggaattgggggttttccaaaagaaattgtgaagagtatgcgtgtttgatgcgccgttgttctcatttttttggttgtaggaatttttaatctcgtggatttgggttgatgtgttggtggaaggtttgattgagagaactatacattccttcgctgagaattttctcgtgaagaggggtgtcgatttatttttgtttcaagcttgataggttgtcgcgtggtagtgtaacgggcaggtagtcaaagcggaggaggacga

SEQ ID NO: 115519 - DNA, 714 bp, Physcomitrella patens
  Intron number 1 from transcript Pp1s8_123V6.1 (locus Pp1s8 _123V6) derived from phytozome v7.0 (chr-ID scaffold_8; po s 1073521 to 1074234)
agggacacagagcgcttgtcgaagcacaatctcaggtgctctgggtctcctccttcttgttggattcgttttcattgcctgattgcctcttctccatcttcagcttgctatgctggtcacgctagtttgaggtttgctgcttttttctgtcatttgtcttacctttttagttctgttcgggttaccgataccgacgtatcatttcttgtgaggaaaaattccttcgggtcgggcctcgaatagagtagagttgatttgtgtgcgttagtgtcatttgatggattgtttcatgaaagtggagacggtgaattgaacagtagttggttgtgaagtcgagaagtagttttattggagaagttgaaatcgagtttttcttgttttgttgcatgttttggggagttgtttgggtgaattattgcatgcgtatctagttgtgcgagcttagattgggttttgtatgcaactggatcttcttcacacttcttctgttgaaagtacttacgttgaagtagttgttccggtaattaggttttcgtggtctgcaagaagggtgcacaggtggaagtacgccgcattattgttcccgagatcttcacatcgcattcagcataatttgatttgtatagggagtgagtttgtgttcaaaggtttaaattggaaaggcgggttggttggatggatgggcagaaagtcaagcacttgtgagagagttgg

SEQ ID NO: 115520 - DNA, 955 bp, Physcomitrella patens
  Intron number 1 from transcript Pp1s8_196V6.1 (locus Pp1s8 _196V6) derived from phytozome v7.0 (chr-ID scaffold_8; po s 1768565 to 1769519)
taacttgctcagccgattcgggcacttttcccgcggtagatcttgaatctctttcttcttgcgtatggtgtcaactttaagaatgatagttatgaacggtcaaactagggcacgatgcgggttgtgtatcccgttatgcatatttttttccctgttctggaatttttttcatttaataggagtgagcttggttttgtggcttttaggaaaggggaaccggttttgtacgatgcgtagagttgtgggttctgtctgttaccttcttttgagtaattgtaatgattttgctcttgatctagtagaagtgcggattctacagctagaatgttttacctgtccaggtttttggctagctagcagttgcgtatgtcgcggaggtttagttctggaacagtttcggaaagctaattatgtgtgatgttctttgaaaatctatatcctgttaccctaaaaaatcagtgattcgatgtagttgatccagtgcagagaattgtaatgtctgtttgaaagttatgatgtacaaaggttattcagtgagaatgtgcgtttagggtgaaaatacgaggtcatgtattagaggtttttgattatgcggagtaacagtgtggtagcagttgttgccttggggtttgatttgaaattgaatgaagcgactgattattgtatgtgtgcttcggcaataagatttatttatgaccaccagcgtattagcagagaatattagtctggtacattcgttgtgatggatgtgaaagattagtattttcgctcctgactgtgtgctacaaaacattggtccgaattcgtcataaattttcaaatgttgaaattaattttgataggctgagtatgaaaggcgcaagaacgttggtactaagcagccattgttgaaactaaaatacctttgtttcattttccaggatttgcctcagacgccttagcaggtacagcttca

SEQ ID NO: 115521 - DNA, 721 bp, Physcomitrella patens
  Intron number 1 from transcript Pp1s68_87V6.1 (locus Pp1s6 8_87V6) derived from phytozome v7.0 (chr-ID scaffold_68; p os 342042 to 342762)
gatcatttcctggagggcgacacgctgaaacattcgtatggactctgaaaccatctcccttctgcgtacttgaaatgttcggacgaagttggaaagaaaaaagaaaaaagaaatcgctcaatccctctctttgtactttgtgtgtgccacgctgacgcgtttgtttgggtgagtatttttatctgattttttttttttttttttttttttttgaaggcgtggccaagtgcatgacgtctgtgttatctgttcgaattcgaatgtgggattgattcaatttaatttggttggttttccaaggctcactgaatctggtgattggtctgtgaatggtggttttggtctgtggctcctcgtctgtgagattccttctttgactgtgttggaagatctcacagtagaaatgttgattatttctttctttcttgggcgacgttatgtggtgcttaatcgatttcatcatgtttattttaggatagagtcatttttaaatccagcacttatcaaatttgtgcgttgtcgatttttatggggtttttctgttgtctcaattccaattgactagagccagttgtgaatcctgcttctacttggtaatgctgtgaacgtgatgagtttggaaaagaaggcaccatttgctaccttattcttcgttagggtcgtgtcttgcttttcactcagactggacagctttttctgagcaattgctattttgttgcag

SEQ ID NO: 115522 - DNA, 689 bp, Physcomitrella patens
  Intron number 1 from transcript Pp1s31_201V6.1 (locus Pp1s 31_201V6) derived from phytozome v7.0 (chr-ID scaffold_31; pos 1055749 to 1056437 reverse strand)
tccacaacaattgtatcaagctcgccgcggagaatgtatgtaacccctggtgaaatgcaccgtcgtcctgttaaatttgtccgtttgattatggtgcctgcaatgcgcttctttaagagcacgtcttgaagcttcactaccggagccttcagtctgccgcgcacaatgtgtgtctgcctggggaaatcaattaaaaagtcggtctgtttggtttttctgctggattacctctatcatgtcttctaggactattttatgcttgtatatgaacttgatatttaatggaaagtttcatgttaatgattagtctttattttgatgcttagatatttgcctcagagcagatgtgcgtattgtggaggccgttgttgccttttttgacggaatcacttatagctgcatataggaagtgccacacccatgtttactttgtgatgttatttatttatttattttattattattatttttttttctcttgggcgtgtgagatattagtttggcaggtgcttggtccgacctgaacggtgtgttgctatgcgatcaaggttgtgtgagttgaatttaattagattattggcaaccctttgcttgttttgggtctgaggcgactaagcaccggtaaccggtgtttggatttttggatgcgtgcagaaaatcacgcagcgcaatacctgggatctgaagtt

SEQ ID NO: 115523 - DNA, 899 bp, Physcomitrella patens
  Intron number 1 from transcript Pp1s34_210V6.1 (locus Pp1s 34_210V6) derived from phytozome v7.0 (chr-ID scaffold_34; pos 1085721 to 1086619)
acgaggaaagcgccggcacgacctttgcggttaaggtgaggtcgaattctgacggttgttttagattgctgatactcgccatttgtgttgcctgcaattgtttgttctgttatttttttttggttaatgtgaggataactggtggcaggtagaggcgaattccaagggtttggttttgttttgttttgttttttgtcatttcctgtgcaatgcattctgattccatctcggtctacatttttttgatttttcaattcattgacgagttaaggtttcctccttggttaatcttcagaaaattaattctcactgcttgagcaggatacgcctctatgtgtgcaccgtgtttggtttagtccaaccaacaatctaaacctaaacatatgttgtcaattcaattacacttaggtgcggtcagcttcttttgcgtatccctagctgattttccacttgaatgtagttgtgaacgttgtgtatcatatcttctacaccttcatgataatgaattgcagttacgcccctttatgtaaatgcaggtttatggttttagaaaagcccctctttttagaggtttagaagtaaaaaacaaaagctgtagctttgattcgtgagctttgattcattttctcattagtttttcgtatgagaggagcaaaatctaatgattgtttagaattcacttaatatttacattaatgattgttctcacttgttatcttagcagccatctattctaaagagattcgaaacaattggctttcttatacttgtctctaggtatcatgttttgaattagtagatattgacattgaggttcgtataactgcttcattatttgagattaatgtctattgttctgtttccccctgagtacagaatagcgaaagcagcaattgtta

SEQ ID NO: 115524 - DNA, 1030 bp, Physcomitrella patens
  Intron number 1 from transcript Pp1s83_179V6.2 (locus Pp1s 83_179V6) derived from phytozome v7.0 (chr-ID scaffold_83; pos 1245792 to 1246821)
acgcttgtcgcgattttgtggttgatctggtggtaattctcgtgacttaaggtcgatggtgtgttagagaggtttccagtggtgagcgtcggtggtgctttgatcgcgcattgttaggaacaccgcaggcgccgcatagtcggtactttgtttggagggaagtgtaggttttatcgtcggggggtttgttttttttctttttttaaagaacaaatttcataggataacctctttggctggtgtcttgttcttcggagagaattgagcttcgttgaaggataattttaggaacgaggagtgcgggaggtgggaagacgggcgtgatgttggtatcactgagtcggttcacttgttgacaccgggagaggtagtggacgaccgtttcgtaacaatgggtttgttgtgtgattaagatcacgaatatggtacgagagagtgatttttgcgcgattctgcttgcgattgtagtcgagcatgattgtatagctctcaatgaatttgtctctgatggtagagaatcgggtgcgagaggcgaagcttttgagtttcgtgtagaatgaatggaaggggatttgttgccgttgcggaagaggggggggggttgagactgtttatgcggagagttttctgcctcttatttctgccttcaaaagtttcccttctctacatcaggggtatataaggatctcgtacacgcgatcaaaggcttatttgatcagcgctctttgtcctcttgcgactaatttcactggaacttcccgttgtctgcactagcaatatgcgaattgaacctatagtttataccatagtgtaggcccaatcacccgatattcacggagcatatatccagtattacatgtcctcatgttcatgtagcccatgcatgttgcttatgcccgtgcaaatcgatctgagtttctgacctgtgtgacatgctgcctcgcacagtgaacttctgacatgcgtgcctttctcttctctgtcgtggaaaacaggaaactaatcccttttccagcactaaacgattgaa

SEQ ID NO: 115525 - DNA, 418 bp, Physcomitrella patens
  Intron number 2 from transcript Pp1s152_71V6.1 (locus Pp1s 152_71V6) derived from phytozome v7.0 (chr-ID scaffold_152 ; pos 358063 to 358480)
gccggtatgtggatctatattactattttaatcttctgtagttcattggtattgcttgaacgcacaagagtgacttgaagattctgcgataatcgccgcagtcgtcattctgaggctttcagaatctaaaataattgttgtgaatgcgacgggaacctctttaattcgagcctgttgcggagagtttcaggcgtttcctctaaaaccctttgagtctcgaaatcccacaaaagtatgaaaatattcaattgggtgttacaagtgtattttgcatgtctgatttggtctatgtgactggtgggggtgtcatgaattagaatgtgtaaatcgaaacggggggatttcatgataccgaataaacatggctgtatttgaggttgcaggatccacccaagctgcaaaacccccacaaagatct

SEQ ID NO: 115526 - DNA, 1017 bp, Physcomitrella patens
  Intron number 1 from transcript Pp1s8_179V6.2 (locus Pp1s8 _179V6) derived from phytozome v7.0 (chr-ID scaffold_8; po s 1642547 to 1643563)
gacgcgctgcgacgcgccgttctaaacatttcctggtcagttttcgttcccctcttctcagttctggacacactctatcctttaagcagttttctgaattctatgctcctctcaaatcacgagtgaggccctcaggtgtaggtgtgtaacttgacacttgcatgtgctagtctctgattccccacaagcgagggagtattttcttcttcgctagtttgcagccacattcgaatgcgggttaaacgttaaatgcttgcatactgactagaggaatggtgtttcttccctgacacagcttactcatcccccttccgtagacgagggagggattctttgtggctttttgttttgagctgtattctcgacttgccaattgttcctccaaagctactaaatgcctttcaattgacaaatcagaaacatgtcaaggactttgcaatagcaaaggctccttcagaaagcgagctagtttgcttttagtcatatgattctcggagcggagagacctaaggatatcggagaataaagaatgttatatagtctgtttgctctttcatcatgataagattcctccgaacgtctttttggtaccttgaaactaacagctcgccacccaatacctgcactatatcgaagcaggtagttatgattgaaacacagtcagtaaacctatttgcatcttagaacggccgttttatactaagcctgcaagtcgttattctaatcttcattaagtttaagtcccgagaataaatgagaaacatgcttacccttgctacagtaaaaactgctcggcagttcaagaattagacttgaaaattataatcggctagattcctataacgcatgtctgaactccataggataatctccctccccttgttgctctcttcattctgacacaattttattgctgtccaaaatgcttggtaacttttacagcatgttcactagttgctaatatgactggatcaacgtgcaggaagacagggtcggaagtaagaggattagtccggc

SEQ ID NO: 115527 - DNA, 365 bp, Physcomitrella patens
  Intron number 2 from transcript Pp1s34_373V6.1 (locus Pp1s 34_373V6) derived from phytozome v7.0 (chr-ID scaffold_34; pos 1942434 to 1942798 reverse strand)
tttgccaatttgcctacgcaagagcgaaacaaaaggtatgcgaagtttctatcttatttgatttgaatttaataatttgcaactgtactggaaacttgtgttaacttgcgcgaaatgtcagcagttttgatgaaataatcttaaggatctgtgtggcaacaccggtacattggctgccttgtagagaagtcactagtaaaggatgggtgtttaaactggtgcttcagtcttcttttcacccacaagtgagtatcacatcactcaaacttccagtgactgcaatctgaaaaggcatcttattttgttgtgggtgcgttggattttgctcaggaagattgaaaatctcgaggtacgtttgacctctc

SEQ ID NO: 115528 - DNA, 962 bp, Physcomitrella patens
  Intron number 1 from transcript Pp1s230_31V6.1 (locus Pp1s 230_31V6) derived from phytozome v7.0 (chr-ID scaffold_230 ; pos 348240 to 349201)
ccgtcctctacgtcagcgtcgaatttcttccggtgaggcccctggttgcgaaagcgctttgttagctttgaatgtcgcagatcgggaagagtgatcggaagtgtatgcgattggcattgttacggcggtggatgagaactgtccggatatcgtgcacattgaatgtgcgtaacgtgccgatgtcgcttttttttcgattgattagacaataacgttagcttgtgtcttagcttatttcattacattgtgatcgcagtggaatttccgtgaggtagtaattcagattttggctctatatttttagaagtgcgaaataggatccatcttggtttgttaaattcttccacattatattttatgagattagtggtgatttatacctgtgggagtttcaaaggatttttatgattccttcaatgcttacgctggcttccagtgttattattatttttattattttttgtttttattttatttttttgtttttgttttaaaagtcactctaaaattcacttgatattgatcctttcgtttgttccttcgttctgtcaaaatgattattttgacttgtattttgtataacttctcttatttgtcaatattatttctgctgatacgctccacattatccctgagattcttgtggttagttgtgagttacttgctaaccatgggcatttcatgattacgcggcaatttgcactgtagcaagagcaaccagctcactagctcaatgtctttctcgtccttttctccttttggaaatgacaacattgttatctctgggaagcaatacagtggttgtatgccattccacggaagtacgttgtttctactgtaagctattcatggaaagtgttgatgaatttgtcttcattttgcagtgaggcactaagagtcaagtctattccctaacaatatttctttgatttggtgtttgtaggagaaagatactaccacag

SEQ ID NO: 115529 - DNA, 608 bp, Physcomitrella patens
  Intron number 1 from transcript Pp1s107_87V6.1 (locus Pp1s 107_87V6) derived from phytozome v7.0 (chr-ID scaffold_107 ; pos 616185 to 616792 reverse strand)
acgacggaaaacctcgccgcaaaggtcactcttctttttttatgttcctccctttctcaagagctttcttttctaaaacaagtcggaagtgaattttacacgttagactgaacgtgacttgcaattgatagcatcaatttgttctgttagacaagagctccagctctcgaagcaaatatttgttgacttcttagttggggtggataatagctcaaagaggtcttcaacgagtttagaacactcttgggatgggattgtctaatcactaccaaattcagtggcgtactttgaaaatgctgcacaagatgggactctattcaatgatatccagtagttttgggggattatggcgccatcattagtgggtcttcgatgatatgaacgatatgttccattgttaattgaggattttagtttctaactttgatgagagaagaagagtgatagtaaaggatctcgagagctgcaagagcatttagatgtgtgtggcttgattggacttgagcactgcgtgtaatttgctgtgttaggctttactacatttgtttgacgcagttgtgttggcaccaacagggacagtcattacttcggcagcccatattataacg

SEQ ID NO: 115530 - DNA, 523 bp, Physcomitrella patens
  Intron number 1 from transcript Pp1s173_27V6.1 (locus Pp1s 173_27V6) derived from phytozome v7.0 (chr-ID scaffold_173 ; pos 171167 to 171689 reverse strand)
aaatctacagtaagtgtttctataactaatgaaagtttccatgcgggatttggatttgtttgattttatggtatgagctcgaggaaagctctgtgaagattttctatgtcatgttaatgttgtactttccggagtgcctccttgtttgtatagtgaacgttttctcttgatttatattaaaatagatgatggctgaactgcagtacctagagaattagtgtcggagcatctccacttctgagctatattcccacatgtgaatgaactatttcggactgttttgtgaaccgatctacaccattctaggaacagtgtttaacataggagcattcactgtagcatgtccaatcatcacagggaatctgcacgtcaaagcatcccaggtaatctgtagcagcattgtagtacatctgtgaggattgtgaactcggtaacaggtttcttaatttgacggactgggtcaccagtatctagcactgattgtgttttgttcttcgtacagttgccagaccgacttggcaaa

SEQ ID NO: 115531 - DNA, 970 bp, Physcomitrella patens
  Intron number 1 from transcript Pp1s93_81V6.2 (locus Pp1s9 3_81V6) derived from phytozome v7.0 (chr-ID scaffold_93; p os 850489 to 851458 reverse strand)
gtacacccgagcacgctgaaatcgctccaaagagtgtatagttcttggttcccacctccttccatttttgatcttactataaaatgcttgaattcctcggttgcaggcaatttagtatctctttggagtgaggaattagtgtttctagcggcggttggttcttttgtgaggtaagttgaattgtgcttccggcccatagttggtgcgacctcccaagctgttgttcggaaacagcatattacagatctttaaatacttgccaatatctgtttgagaagcataaatttcccaagctagttatcagcgtgagtaaccaatgcttggggataaaatttagatgccgtgcaatgtgatttggacttgtacgcctagcaggaaaccaggttggatatgtgtttctactgtagagtcagaagcagtttgccatatattgtcactgagttagttctttccatggtagaatggtttgtataaagccgagtttattacaggtcaatacttgtagtatttaacatctctactgtaagcaccaatttaatccaaatcgataccaaaatattttattatattgagtcggattatcgtcgagtgaatgatcgtttcttcttttttttcttttttggcattaagatgttgagggctttgtgcacattttggtcatgatcaaccttctgcataaaacacttgctggagctaatctgaagtctttgcagccttgggcttgctctaaggaaaaaagttataaagtcctgcataggttttgatcataacgcgctgtcccttaggtttcttgtcgaatgcttgtgtgaagttcggtttctacctacgatataatcgacgattcattgttgttctgacatactctcttgtgtgtttacaaccatcattctgcagctgagattatgttaagtgcgagtgattgtcctgtaacagtcgataattgggtgttgtttgattttatccagaaacc

SEQ ID NO: 115532 - DNA, 837 bp, Physcomitrella patens
  Intron number 1 from transcript Pp1s12_351V6.1 (locus Pp1s 12_351V6) derived from phytozome v7.0 (chr-ID scaffold_12; pos 2498524 to 2499360 reverse strand)
ttccagtggcaaggtggttatgctttttttttaaatttatctatactttttgttgttttatttttgtgtttttgggattctttagggtgttggggtttgacgttttttctgttttcttttccttttttagaagtttgagttttgtaatgtggcgtttgattgtttggtgttttgggtgtgaggtggtcggggtttatgtggtgggattgttccaagtcgatatcgtgatcataggcttctaagattttggctgagacgagggtttttagtttcacctaggtcgttgatcgtatttgttccagacagcgtcggtaggatttcccggatgacaatgccgtatgcgtagaacttaaagctctgtaggcgagccaatgctgaacttggcagaacataactcacttaaatatacctgtgaaagatttagggttttttcacgatttgtctgagttagcgaggttttttctagatgaaacgagttgattcctcagatatgattttttttttttttttttttttttttttttcttcttcctccttgaagcaccggattcatctccaggtttgtactgagtttgtagaagcatctgcgggtgcgtaaatatgcggtggagattttgtttgtttgtttcataagtagataagtagcatgatattatttttgagcttcttggaaaacccttactcgaactttctaggtgttcgtgtccaccgtgaagtgcttgaagtattcggtaagtcgatttatccaccgagcaaatgttgactaccatgatgacactcgttagacgtgtgggtttttcaggtacaagtggtgcaacaaatcaaccacgagggaga

SEQ ID NO: 115533 - DNA, 582 bp, Physcomitrella patens
  Intron number 1 from transcript Pp1s164_123V6.1 (locus Pp1 s164_123V6) derived from phytozome v7.0 (chr-ID scaffold_1 64; pos 837387 to 837968)
tgcacggggcgcctcccaacgttacattggccaaggtctttttcttctcctttcagaaattttgttaatctcctttcagagattttgttatttttttattacataattacttatcaagaactttacctacaccttaaacctggttggcacacctacctcctaaaccttggtctaagttgatgatgaccctgatgatactgagttcccgaattagggtcttcaaaccctaattagggtttataaaccctaaatttaagaaaatgaaacacataaatttgagaaacaaaaaccattgtataggtctttgtggcattctaagctttggcaaaatttcaaaactatcaaaaaattgataggttgtgagatatttagcatcaaaaacctatgggatgcccttgtaaccctaaatcctaaacccctaaaccctaaacctaaacctgaaaaacaagatggcccttccctaggcactgttcaaagtcagaaacttggagccttttgtcaaaccaatggatccatatgtttgtacaaggtcatagaagtcttgattttgaagtgttttattatgtgtgaagcagtgatata

SEQ ID NO: 115534 - DNA, 965 bp, Physcomitrella patens
  Intron number 1 from transcript Pp1s79_272V6.1 (locus Pp1s 79_272V6) derived from phytozome v7.0 (chr-ID scaffold_79; pos 1544188 to 1545152)
tgcccctcagcgttgggccgtgtctggattctgcggtaatcttctctctgtccttgctgctgtcaccgtgaacagcttcccattttttttaagaaaaaaattgtgttccaggacgtcggtggcgtggctttcatggtcggtggggagagtttagggttgtggagctcagcgatttgcatgaaacttaagatatatggttgcgttttcctgtagaacgtgtgaaacggtgttaatgcaaatgaaattctgcagctgcggtgcacttacgagggattaggaggacgtcagggttttttgttagcgttgattgattggcattggagattgtgtggttcaatagctgttttgggattgttttgttgatggaagtgagagtagaggtaatggtcgcgacgaaagagtcttttcatgaattacaagagttgctcttgtggtagatttgcccagtgcttgcgtaattgagatgtggcgtaaatcctacaattattgaacatattaaaatttcgagatgcgtattttttccaccgtagggttggtgcatatagtgggcatagtttccttagtttgttctcaattctctggtgagaaattgcggagtttgtgcgacgcctcgggaatggattcaaatttatgttcataagctcatcagaaaacttcctagcaaacggttgaagcgtaatctagtttctgaattgtgctgtctgattggagcactgctttttaatagaagttgagtgggaaccaagttttcaaagtgcctccgaaggcggccaagtcaaagattatgattccaaaaccttttcaagttcagctacatagcgagcgtaacttaaatagattttacatttgagttgttgtgtcaaaattgggttaggttgatgcgatggaacgatcaacatctgtaacgtagtgaagtattcaaccatagagtgcggattctttttttgatttgcaggctagagtta

SEQ ID NO: 115535 - DNA, 937 bp, Physcomitrella patens
  Intron number 1 from transcript Pp1s85_133V6.1 (locus Pp1s 85_133V6) derived from phytozome v7.0 (chr-ID scaffold_85; pos 1033213 to 1034149)
tgctaatctctgggaagtggacatcgcttttgagggtctgagcattgatccccgattggtagttcaatctacctgtagttgagtagatttttgttttatctatttatttatttattcatttttcttgcatcagtccgctagttggacggcgcattttggataggaggatgttggttggagattgagtgaatatccccaaaggttccagtaatctgagttttgtaccattttagtacttgacgtccctacttagactgtatggggttacactgataaaatacttagagatatttatgagcctacaataagctttttgattgggaagtatattccgtgagtttgtagtgggagcagcactttctacgtgcgcatgttaacgaatagacaaattttctcatgtgattctttcagtgagatgataattcgaagttcaaccacgtgagtaaatgtgcgtgtctgtgtgtttcaaccatacacgaagaccgcggactgcagaaagttgaaatgcaagataggtctctactggctgggttttctcaagagttagaagttcatccaggtttaaagcgttcaaagcgaagttcctccttgttacaagacatgattcctttttaatggttttaacttgaattttgtgacataactttaagttcaaaggctgacctcgaaccctttgaccgtaaaatgggggcacaagatgtgaagacaaactactttcatcgacgaattgtatctgtatgaactatttattcatcgagatggacttagagaacagcgattgaccacacaagtcttacgtgctggtcctcttttttttgacatggtgatcaaggtttttacgtgaaatgaagagagatgttgttttgggaagttggtgaataatacatgagtttcgtatgcaggtactatacgagcagaggttccattgggacccgtc

SEQ ID NO: 115536 - DNA, 514 bp, Physcomitrella patens
  Intron number 1 from transcript Pp1s151_12V6.1 (locus Pp1s 151_12V6) derived from phytozome v7.0 (chr-ID scaffold_151 ; pos 122748 to 123261)
gaaacaggttcatttcttctcgagaaaaattttgagcttctctaatcttctgtagttaagtactcatcgatctatcgaagtaacaattgcacaaaattatatcgttcaccgaccttcactttgatgaaggacacccccaggttgataacttgttgtaggcacttcttcccctcttcttggagcaactattgtgtaaatgaagggtcaacatgttgcacgatttgtttgcagatctaaattcggtagatcattagaaagacaccattgccttcgtagctcttagtttggttggtcaggagagtgtccttgtgttgttcttttactagtcgagagtctagaccacacttgaaagaggtattctttacacagtgtttcagtccgtagaattttcgtttattttgtaacgtgtggaagcaatgcactggaggagtctggatcatccgtgtttccttaaaacatgctgctatgatgttgaccaggacaagttctactttacgcagtcttcaaaacccca

SEQ ID NO: 115537 - DNA, 653 bp, Physcomitrella patens
  Intron number 1 from transcript Pp1s24_210V6.2 (locus Pp1s 24_210V6) derived from phytozome v7.0 (chr-ID scaffold_24; pos 2027183 to 2027835 reverse strand)
cgcgcatttgctaggtgtgggtatctgggttttcggtgcgttttcctagctctggtgtgttgggtttgctctttgtatgtttctagagttttctaaagttctgagtgggtttgttttgtttgttttgttttttgattttttgggttttttgcttgcaatgctttttttttgttttttttttattggttgttttttcgggggtggtgtcgtgatttttgaaggccaatctctcgatggcgtgtatagttttcttgtagttataacgaacattgtagcgcttagggtttattaggggccctgaaatcggggttaatcgccgtatttggggattcgggttgtaggtttggtgagcgacatgcttcactggtaatcttcacgcttcgcattgttaaagcgattcatttagcgaaaaattgcacaactagtttcattgtctagtcttttgttgcgtatgactgttctacattgatatctatgatgattcaagctggttgtacatttcatagtgagagatgcgtattaagtattgtaaatcaatctccgagttgttcaatctggtcgaggtttatctatttggtgaatcaagctcaagggttactctctgttctgtggaggcagatcgctctagcagggaggaattaattttcaacttg

SEQ ID NO: 115538 - DNA, 537 bp, Physcomitrella patens
  Intron number 1 from transcript Pp1s175_54V6.1 (locus Pp1s 175_54V6) derived from phytozome v7.0 (chr-ID scaffold_175 ; pos 366667 to 367203)
gcatctctcaggtatgcccctcttcctcactcttcctgcattgcaacgtcacctggatccataaacactgttcggagaactgagacgtagtagcaatggcggcatcgtttgtctgatagtgcaattagtgacgaacctgagtagcgagctgtcgaagtcgaggggaaacactggatgtcgaagtagtgctcacagtagaagcgattcgaggattcgtgtgtttatttttctttcctgtggggagtttttttgatctcatggtacatgagcaagagtgttcagcgcgagttgtggggctgtaggtattgactaggtgagaattgaacgcttcctcctttttcttcaacgataccagaaggaaaactcgggtggattattttcagtactgttcctgttgtcttcagagtttgtcacatcacttccacgctacatgccattaagtaaaattttgccatgactggtattcgggggcctcgtgctttccctgagtttggatcgtagaattgacgggattgaaacgttggcatttaacagagt

SEQ ID NO: 115539 - DNA, 886 bp, Physcomitrella patens
  Intron number 1 from transcript Pp1s99_240V6.1 (locus Pp1s 99_240V6) derived from phytozome v7.0 (chr-ID scaffold_99; pos 1269580 to 1270465)
cagcggcagtgaggtactgccgtgatgggttgatgcttgcgagtcgttttgagtgatttgaggagtgagcaacgtggaaggcgagacaggaaggccctgttgcggagctttgagtgagcttgcatggtttgcgagacagtgagtgagggagtgatgagctcatggttttgttttttgctattgacaaaggcaaagtttctttgcaatctctgcgagcgtcttatccaggcagacgcacgagtctgtttggtttcggccttcgtttttatcgtttaaatgtatatttagtttggctatttttgagggtccaactgtgatgaaatgcgacttaattttagattacgaaggcttgttcaggagtgatgcatagcagcgatggtggtctgtcatccgttgacgttatgggttgtccagggagaaatttttctttggctatagagggcgatcgacgcagaccgtgatttgtacactaaagagagacagacaaaaaacgaggaacgttgtgtgaataagagacctgcggaaagtatactagcgagattattcttgttcatcgttgcggtaggtccctgctcgaggttacggttgttcaaatcagcaaagcatttttatatttatttttattttttggtctttcagatacctatctacgcatcacaagtttgggatatgttgcagatctgctctctttcgagattggaaacgtatgctgttggggtagggcgaattatctgttggggggtattgttgtggcaagtcattttcgtcggattgcagattttgggtactacatcgggggtgtctcgaggaatgatgtgattccatggtgatcttctttgcggtacttaattttttttaagtgtccatatgcaggttttctctggaa

SEQ ID NO: 115540 - DNA, 548 bp, Physcomitrella patens
  Intron number 2 from transcript Pp1s189_109V6.1 (locus Pp1 s189_109V6) derived from phytozome v7.0 (chr-ID scaffold_1 89; pos 808579 to 809126)
ttgaccaggattcggacagcctagcttgtgagtctcaactaactactttccaattatggtcggcccttttctcacggtttctccatgtctgacaatctgcagtgttgagcaatttaattcgttttgtatcctcttaattacttacaacatgccatgaaacgtctagcatggacttaaatttatcacttttaaggattttgattactagaaactagctcgttaaaaaggttagtgctatcaaggtctacttcacaggggcatttattagcagctatttattgatttattgctaaagtttcgatcattaatattggacggtcttattagcacagtgtacttattgtaaaaagtagctgctgataacagtgaatagctggtggtttcgacaattgttagagattacctgtacaaggacaggcaatttatttcaatttgtgatgtgccataggaaagattagactattcttcagtcatcatttaaattgtttgcatattcattcgatatacgtgagttacagttgcggtgagcttggctgaggctgcaaacg

SEQ ID NO: 115541 - DNA, 655 bp, Physcomitrella patens
  Intron number 2 from transcript Pp1s148_60V6.1 (locus Pp1s 148_60V6) derived from phytozome v7.0 (chr-ID scaffold_148 ; pos 365324 to 365978)
cattacaaaaaagactcattcttaaatcagaagaagtgagccttcatttttaaaatcttattgtttttagtgaaaattattcacgatatattaataatatttttgtgaaatttttatagaatttgatgatttttttttttttaaaatacatgtggttgcatttaaatgtacgatgcaactataaaacacaatcctttatgaaatttacttcatgtaatttttgatattcataaatacataaattcaaatacaaataaaaagaaaaaatgggtgaaagtgacaccggagtattatacttctttcaaaatacagtttgaaatattcaaaatcaaaagagaatgcaatgtgtggtcttttattttttaattttttttgtgcaatttttctgttcgcttagaaatctatgaagacaatcacataattataaacaatgaatcacttgttttaatccctaggagaagtcaattatgtttataacacctcaaatgcaaatgcaagtagttttaattttgaaccatctaacttcttacttcatacacataattattattacgatttttttttttttttaagaaatatataatcaaatatatatataaatatatatcaatcattcacaggtggtggaaaaagatttgttgatacaagacaaaga

SEQ ID NO: 115542 - DNA, 988 bp, Physcomitrella patens
  Intron number 1 from transcript Pp1s66_233V6.1 (locus Pp1s 66_233V6) derived from phytozome v7.0 (chr-ID scaffold_66; pos 1157359 to 1158346 reverse strand)
cacacgcaggtctgttcccttgttcccccctgctctgccctgctttgatttttttcttttcacgcctatcggtaaatggcttagatggctagagcgctggtggtttggaaattgcagaagtagatcatacctgctgtcttcgccttgcttcagtttttcccgtattagtctgcaaacattagtcttttgcattatgtttgcaagcgcttgaagggattcagagtttttctagggcttagaaatcctcgattttcggcaatgctgcaaggctattgtttcgttttttcacttagtcgattttttgacgttctctgtatggactccggtcgtaattgacttgtcatggtccctatagccattgctcgacactaagaccggttccatataaggttactgaaggaacacatcgctatataaaatcaactaatgaagtatttagatgtctgacatagtcttagatccgtgtgaagctcgggtaaagccatcgcaagaagcacaagtattgcacattttgacaaacagaggacctgcgaaatttcaaaccttctagctaaccttaataagaacccttaagcacaacttctgagaaaatgtgtaagtagaaaatgctcgagagcagagctacgacctgtaatgctttagttccagttgtgaacaatttcttatacggcttctgaattcttagttccatttcgacaagaagtttgtttcataaggcagatctggcatcaaattttgtagaccttcgtacaccctggcaaccgattaagatccttgttgtggatattctggtgtcaagttgcaaattgtgggttggatttaaatgtttatacatgatgaggtttagggttatatgaaataggtttttcaaataatattcgtagaaatggcaccagaagcaggtcttctttaatcatccctgcatttgtttcttttattctagaactcatggtgattgttacaagtgcaggctcccagatttcaattt

SEQ ID NO: 115543 - DNA, 686 bp, Physcomitrella patens
  Intron number 1 from transcript Pp1s310_52V6.1 (locus Pp1s 310_52V6) derived from phytozome v7.0 (chr-ID scaffold_310 ; pos 405520 to 406205)
cactaccagaggcatacagctttgccgatttcagggtgcgtgccaatttttcatgggtgtcgagacccccgttgaggtgggctcatatttagggtttaggttgattttttctgttggcatttccgtgctgttggttgtgtttttgggtatgtgataactatttagctttgagttggcacaaaatttaagtagtggataaggagattaagcagaatgtaattttttcattttgagtctgatttgggtagatcggaagcttagaactaggattctgagctagtttctttaacgctgtaaaccatcatacgatgtgaaatagttgtggaagtgctcgcgtttttgcggaatgtaaattttcaagtatataggatagagatttttctttgctaggaattgtctcatcggttcgcaaatcagcccaaaattgattgtatgggtggagtattgtgttatttcccctcgaatttcaatctaaattttccgcacgagttctttgaattggaggccctcatttttgcttcctttcgaagttaaaaacaaaacaggaaatgtagcggcttctgaattaggattaagtggtggcaacgatgttgacatatgtcgaaccagctgtgttaaaacctcgaattcgatttgttttggtatttgcagatttgagtttgtttctgtcctagtgcttttcacaa

SEQ ID NO: 115544 - DNA, 477 bp, Physcomitrella patens
  Intron number 1 from transcript Pp1s191_85V6.1 (locus Pp1s 191_85V6) derived from phytozome v7.0 (chr-ID scaffold_191 ; pos 502551 to 503027 reverse strand)
ctgctttccagcttacgccatcacggaacaggtccagccgcacaacctcgtttgtgtcgtcagttcttgctaccattccgtgccttgtgtactttttttgttttttttaataataataaaaaaacttaactcttgttcttcacaccctggtagcttctgctgaaatctttggatggaattccagttagggtgtatgcctttctttttttcacgctttgggtggagattgctggttgactacatgatggtgagtgctcaaataggggtccatgatggacatggaactgcaaatgtttcataatctctaccgcgcgaagtgtgtatgtataacagccacagtacaagtcactggagtatgaatataattaataactatgaggacagcagaaagcatgttgaccagttcaggggagtttctgacaggaattttgattctgttcaggtgcgagctcgtagtagtctggggagaggagacag

SEQ ID NO: 115545 - DNA, 721 bp, Physcomitrella patens
  Intron number 1 from transcript Pp1s12_317V6.2 (locus Pp1s 12_317V6) derived from phytozome v7.0 (chr-ID scaffold_12; pos 2203605 to 2204325)
ttggatcactgtagacgcaaccaaggtggcgaactgctcgagactcagttgtgttatcactgttgctgtcgccccaactcagctcagttgttgttgttgttgctgtagattgttggtggtgggagccctgaagctgttgcggactcagtttgggggagtgtgtggaggacgtattagtgtactgttgctgtgaatgcttcgtgaagatttgaggttagatggggagtgattagtggagtgggtagcctgtcacatcggatttttcaaaaaaataaatgtcttgtgtctagttgttatcgagtgagtggaagagtgtttcggaatgcggtgcaaaacatgcaagattgcaaatgggtggatctgtgctttgctggtttctgtgtaggttgttcgtttgtagcttttgaattctgttcttgcggtgttcgatggtttggcgtgagagtgccagtgtgcagatgacgggcgtttgttgtaggaaaagtttttcagagtgtgtgtaaagtggattagtttgtgaaatggaggggcagtttcacacatgctgaagtgcgaggcttgtgaaggttgttgctttgctatattactcatcttgcattcaggaatggaggtttagtggattggcgggaacgctacttgacatccaagaatggtaatttgaatctagtttctgtcacgtgttacaggttcgtctgcacggtcgctagagattttcaagtct

SEQ ID NO: 115546 - DNA, 561 bp, Physcomitrella patens
  Intron number 2 from transcript Pp1s153_133V6.4 (locus Pp1 s153_133V6) derived from phytozome v7.0 (chr-ID scaffold_1 53; pos 750113 to 750673 reverse strand)
gtgtttggactgacgaatttgctggtatgatagtgttctcatcaactggaagttacatcttcatgttcagtttatgaattggttcgatcatactttgtttagatgccttctgtagttaattaactggaggataaagacttctgcaattccaaagcacatagagcacaccgaaccctttacacttgtgaacagctattaccttctatattttcatgacgtactatgttatgtttgaaaacatcagagctcgcatgctacaaatctcgaaactgagaacttgtatttcagtctccctcatggcctatttccatgactaagtaagctaatgtagagaatcaggagaaggttacgtaggtatttcgtccatgacgccgaaatgtagtttgatctagctgctgttccattctattatatttcttttcttcttcttctacttcttcctttcatttaaatttaatttttcttcatctcaggtttgtggtcctgattggattttatttgtgacaattatcatttcattgtgtagcattgggcctcgaggactgcatagagcaaacctgg

SEQ ID NO: 115547 - DNA, 485 bp, Physcomitrella patens
  Intron number 1 from transcript Pp1s100_55V6.2 (locus Pp1s 100_55V6) derived from phytozome v7.0 (chr-ID scaffold_100 ; pos 283902 to 284386)
tgtgcgggggaggtagtcgcacaacgcaatcgaaggttttagggttttgttttttagctttcctttgggtcgacactctttgagatgattggattgtgttgtacctgaagattagctgcgagtttgattattgttttttctctttccttttgtttgatatgtaatttccgttgcggataggttggtgcactttgaaattgaatttcgctttgttttgacgtactttgttttggaagttatcatcttatcttgaggctaccaatttttcaccatcttattgggcgcaagggtagaatctcgcagcttcgggaaatcttagcttgtgttgtttgaattgctggaaacgttatcaataattgttcagaatctatttcaaggaaaaacctaacattcctattgagtgagtcaactgaacattttttctcaaattttgtcattgcggattttcattaaattgccgtccctttcttttgtacaggtttgta

SEQ ID NO: 115548 - DNA, 710 bp, Physcomitrella patens
  Intron number 1 from transcript Pp1s115_132V6.1 (locus Pp1 s115_132V6) derived from phytozome v7.0 (chr-ID scaffold_1 15; pos 788198 to 788907)
gcgtgatcggtgctgcctgcgttgtcgccacggtacgctgcggttgcatttttcattctggattttggagttgtgcgttgccttaattcagatttgtttgggctagtgagggcttttttgccaaatgcggatgcctggcgggtggattcgttaggtttgaatggaattcttatgaacaggaaggtttacggatatgttttcatcacgttttgttttgtctgcaatcgtttcttgggattttcttgtccttctttctattgctagcaccgtgaatttcgatggattctgcaggtttaggtatcccttgttggtgtgcggtgagagatgtttgaagctgttgattatggaataatagttaattagatgcgacagggcgttagggttgtgtctctgcacctctctgtatggttgtgtggtaacttactactcggtggagagtctgacaaagtagctatatgcgttaaaaaatctaaaaaataagaaaaagaaaagaaaaaagcaaaagcaaaaacaaaaacaaaaaacaaaaaaatcgtttgttagaagtttcggacagggattttgatactgcaacattattgaaagtgaagtcattgagattcattttaactagctgtattattctcttcctcctgtcgacatatgtagaagtgtttaacatggtatgtcttgcagattcatttcgtattgctgatcagtcggcagggcaa

SEQ ID NO: 115549 - DNA, 347 bp, Physcomitrella patens
  Intron number 1 from transcript Pp1s15_416V6.1 (locus Pp1s 15_416V6) derived from phytozome v7.0 (chr-ID scaffold_15; pos 2361659 to 2362005)
acttccttggtaagagtcaacgattccaaaaagcaaaaatgtatcatatcctcacatgagcaacgaatatgttgaatatgttcgtgagttgagttgaactagaagaagataaaggaagccgaagttttttactctacacaacaaccacagttggagttgcctcagtgaacgaagcaaattgagttcagtgtgctttgtgtctatccttcagtttgacttcagtggacactggaacgatgcaaaaccgatccgattaaaaacttcatagctttattgctcacgagtgcctaacctaacggggggtggtattgtgtggtcctgggttttagctgagtcccttggcttaa

SEQ ID NO: 115550 - DNA, 588 bp, Physcomitrella patens
  Intron number 4 from transcript Pp1s22_123V6.1 (locus Pp1s 22_123V6) derived from phytozome v7.0 (chr-ID scaffold_22; pos 767480 to 768067)
agtgcgattgcgcattaccttaggcttcgtggagagtaagaactttgacaaacatagtctttcttgcctgtgttatttactcagaactttaatttgtgtgtgagaaagaggttcttgaggatccttaatcctgagtatttctttgcggccaatatggtttgttaccgtgtttcttgtgtaagtttgtaatgaggagttgtaacatcctaagctcctctgaattaagtttggattccatttgctgtcgtaacctagtactttggacatcctaaacattaaatgagacatatatacttgatgattcaaccgaaacctaaaatatttttctaacacctcgcaagagtctaatttggtaacgcctcagcttgatttttcactttgaaacggttgtagaaaattatgctgcaattcctctgattattcctcttttttttgaagctttaaaatgtttaaattttccctcctccttgctctttcgattcatattttggcttctgtggtctacataaatgagttgaagtttttgtttttccatgttgacacaacgaatcttattttgatgtggcagtgcatttggtcagctcctcg

SEQ ID NO: 115551 - DNA, 869 bp, Physcomitrella patens
  Intron number 1 from transcript Pp1s15_386V6.1 (locus Pp1s 15_386V6) derived from phytozome v7.0 (chr-ID scaffold_15; pos 2197636 to 2198504)
cacgtctcctcgacgccccttcccgcattccggaggtgagcttccttctttctagtttataccagcgtgtgcttgcagagcctcttctatagatgatgaaattgaggctgaaacgtagtatattttaggattgaggatttggggtttcatgggaggtgtgttgagcttcttggttgtgatgggagctcttcaaaccgcctaatcggtatccgggccgcacatggtgatattttgtttttttctggactgtcgcaagtccaatttctgaggttatggaggttttcggccttaaagctttcactacgtccatttgtaggattgtggtttttcatttcttagtggtcgggttttataaacgaggtacgggagatgacgttttgaacattctcgggtgattcagaaatctagaatttttgagtttttgaggatttcttggttatcgaaattaacaaccaagataaccaaggtttcgatcgtcaccaagttcttgtccgttatgcaaaagcacggtgtgcgagctgaattttaaacttttgtttgaatgtaaagaatcgtgtaagtctgaaggaactgacttcctatatatcaacacatagactaggctgcatgcatgatattgacttttgtgggagtgcctacagtattgagccgcacatattatttctatttcagttgtttaaacagacttagtcaggcagtgaggtgcatttcctatgtcataagatttgacggcgatgttctacgtcttagcctcagttaattcaaacgcatcccatctccgcttctgtgatgtgattaataaatgctgacgaattcgtcacttcgctaaccttcttgttagggttcaggctacatcggtgagctagtag

SEQ ID NO: 115552 - DNA, 1061 bp, Physcomitrella patens
  Intron number 1 from transcript Pp1s307_62V6.1 (locus Pp1s 307_62V6) derived from phytozome v7.0 (chr-ID scaffold_307 ; pos 356563 to 357623 reverse strand)
tccggatcgctcaacctttccaatcgtggtctcgcgtaagtcttatccctcaaacgcattcgttgcttgcccgatccgcactggattagcttttggtcagtgggaatggtcgctagggaacatgttttttgaaaaaggtgaatagtatcggggttgttccctattcgccctcgcgcctgtttgggtgcatcatgtatttttcgcctcagtttaggactgtttggaattagctaaaattttggtgagctctatgagttgcgacataagattgtgaaagtaatggagtcaatatccgcgcctcggtttcattgagggttcagttatgcaagaaatttcgattgcaaccaactttttcctcttgttcgtggatcgattcgattgcctagttcctagactacatggtagttctgagattgaaggggttagtatcgatggtcaatgaaccctctattatttttcaagatttgctcctgttctgtagattgagctgactcagtcaagaagtgtgtatcgtaaatggctggaacgatggtttatatgtcactgaaattaaacattgggtaacacttggactgaaggagcgacgctttcttcaagaacattggtgtttatgtaggaattacaaactttcagttgttgcaagcaagcgcattttctcagtatcgtatttcgaatctgtgacgagtagatgattgaatcgatgcgggttctggatgctttagggtgaccagtcgcgatggttacgatggcattgatgtcttagaagtggcaccgtccttgaatttggaatgcagtagctgacaatttgatggttttgaggtttggctaaaccttgaaagcagaaatattatcattaatagcttgatagatggaaaaaagtgaagcgggatttttaggaaatttaaattctaattcatttgaggataaagatgtagtataagttcccattgaaggtcagagtaccaagcgcaagatatagaagttatttgtcgatatattcaaggttgtcattcgtgctcttgttgacagagaggttcctccccgagtgtacaatttgctga

SEQ ID NO: 115553 - DNA, 1024 bp, Physcomitrella patens
  Intron number 1 from transcript Pp1s16_373V6.1 (locus Pp1s 16_373V6) derived from phytozome v7.0 (chr-ID scaffold_16; pos 2618668 to 2619691)
cacagcatctgaacaccaagcagcaagtgagcctcactacctcgaaacgaccatctctggaagctaaaagtagaggattttctcccctacgcaatgcttgctgtataattgctgtgcttgctgtgtaaatgccaagtaccgatacgatacgattgtcactattatttttccggggattcgtgcgtcctacagcactgggcatcttcctgctctatctctacgagcccctccctgagtggtagcgaaccagcgtagataatagagctacccttaagtgaaaagagcttcgcatgaagaacatgcagaaacggaaaattatctgaccttggttttgaagaaatgctgctactatacagggcaccatatcagaatggattcatggctagctcatggtcaggcctatgtgactaagtcaaacgtccccgacttaaattgtggaagactactttatgggttaatcaatatgagttgcgttattcagctccaatgccgctgcaatagaggtgctcattttgcctttcattttgatccctcgggggatgcctgattgattacgaactcaattcatcttgttttatcttgggttttgcatggccagctgcatattagaagttaattgcgtcagacagttgtagagacaacaggaaaagcaagcctattactggagcttttgctgcgtgttgtggtagagttgaaaggatttatgcgtgactatgaactactggtaatggaatagcgatgaccagcgctttgttgcagaatcatgcaacacaaactcgcgcactgaacgttgtaaagttagaagacaaagtcagtagaatgatgagccacaccatttatcccctcctgggcataggagaacgttttgtaacaaaagttcctcaggacactctccctctttcttaatgcaacggaagtttttaattaaatcactacgatcctcagctgctttcattcaccagagaattttcatgactatttatgttcagtggcaactggtcggagtaccacgagacgtgaatac

SEQ ID NO: 115554 - DNA, 704 bp, Physcomitrella patens
  Intron number 1 from transcript Pp1s44_276V6.1 (locus Pp1s 44_276V6) derived from phytozome v7.0 (chr-ID scaffold_44; pos 1768375 to 1769078 reverse strand)
aagaagaaggtggaagaaggtacgcttttcgagtgcggaggttttggtttcgtgttgtcaatcgttgcgttggagttcatcgtgtgtatcgcgtcctttgtctcgtcttcgtgttggagaattttccgggtttttgagatgtgtatgtaaatgtgtgtgtgtgtgtgtgtgaatttatatatatatatatatatatatatatatgtatgtatgtatattgatatataggtaaatctgattgtattgttgaggtctcgcatgtgtgaatggaaattcgttttctctttttctcgatgcgtagcgtttacaatcaaatattgtgaaactgtatatggatttccgatggattgttgcggtgttttataccctaaactttgaatctcgtactagacgagagttgtggggggcatgtcgctaattctctttttctaatagcaacccttgttttttcttatcctgtttaatcttatttttcttattcttcttctttttcctttgcgactgcctctatgcttcctatttgcatttacttcgagccctccaagatcagtactaattgtccctgagagcatgaagcatgaagtggttatcgaattttgttgggtttggcgaaaaatgaagagctgcaatttctgtttcaaagcgacactgttagactgattatcagcgttttgataatctttggtctagcccttcgcagcaag

SEQ ID NO: 115555 - DNA, 869 bp, Physcomitrella patens
  Intron number 1 from transcript Pp1s37_35V6.1 (locus Pp1s3 7_35V6) derived from phytozome v7.0 (chr-ID scaffold_37; p os 216885 to 217753)
ggaggtcttggctgaattccctattgacaaagaaggtgagattctctctcctttcagctctctttcagcgtttcgtgttgatgaagaaggtgaaggcgagtctttcacctaccagctgtcttgccgtcgcaccaggcgtgttcgatttaagtgcgaatttcgtatccctctttcatgaaccttttcatttcaagagggatacatgaacaagtagctgtgatgctttctgcacggtatttcccagcgtgacgtgtggagtgcatccaaggatagagcaatgaagtcgctttgattcatactttcgtcctggtgctgttcctttgaacaccttcgaaagtcgggatgggatccatgcagacgagctcatcatgctcctggattgcatttggctcctgtccaatctagctcaaaaccaagtagctgtcatgcataaaacttttaaacgaaacctttattcccccttctttcgttttgttgaagttatatgtgggtgagtgcttcgtcccaagcgtacatcctcagtgtttcagttgtaaacagctgaatttgttctcgaagatgatgaagtgttcttggaggatagcggctggtaacagtggagatgttaattttctccttttgatatgcttgaaagacaattgcgggattctgagtgtggtttgggcctatttcgagaggctaaaggttctgaaggtatgattaggggatgcacgctggaatcaactcgatcaaaccttctttgggtcccctctaggttgggacgccaaccgcgtttatgagaatatgtttttggtcccaagtcaaagggttcaagtgccgtcaggacttagccatggttcataattgaaagtttctgcatgcagttgagg

SEQ ID NO: 115556 - DNA, 598 bp, Physcomitrella patens
  Intron number 1 from transcript Pp1s7_295V6.1 (locus Pp1s7 _295V6) derived from phytozome v7.0 (chr-ID scaffold_7; po s 1769128 to 1769725)
cttgcgatagctccaagtgcgttctcttcaatccccccccccctttttttttttttttttttttttttttttcctttttattccgtttctgttcattgaacaatggatacttggagagttctattttataggtccctgatcaactagcgaagcataggaaaatctgggctgaaatcatttacatagcagattagtttcacgtgattacgttctcatggaaatgtttgggttctcatatttctgctaataaagcgagtaacatctagatggaacaagttctgcgtgttccaacgcttaaaatgtagtaccatacggaatatttccaacttccttactgacctagttcatcaggtgttcagtgttgacgctagttctttgtattgtgttctcttaaggcgagctgctgtggtgtacgtcaatatatgtttttctgaaaattcaaagagacgttgatttgattctcatgatatccatctaatttcatcaggaatgttaagctgatttggtaaacccagaagcttgaaatttactaacatctggtatctcgcgtatttttaccaaaggaccccgagaattgactggggcagtcgatcttgta

SEQ ID NO: 115557 - DNA, 792 bp, Physcomitrella patens
  Intron number 1 from transcript Pp1s159_111V6.1 (locus Pp1 s159_111V6) derived from phytozome v7.0 (chr-ID scaffold_1 59; pos 554727 to 555518 reverse strand)
ggtgcttattgttacgtatctttgggcgactccaggttagtcggtggtcgaatcgggagtttttgttttttgagaggagtagtgttgtttggttggattgcgtcgatgtcggattttgggattgatgtgagatagttgcttgattagcagttggcatgagaattcggacgctattgaggttgactgtattcttgtagcctcgacacactttcgatactggctctcacttgcattcacagttgtttgaattgaaattgcgagacgtcgatttgaagcaaagtcgaattcagtcacagtgtgtattgcggagacaccgaaaagctgtgcacataggatgtgatggttttacacgtttctgaagatgctgtgccgattttactctacaatggtattattgaggccacgagaagattgacgaatgcttaatgctatctaggcgtattcaagcacacgataggctgttttccttgtggaaagacctttttcaaaactggtgaacatttttttaaactgttccagtctgcattcagcatagcatgtggacatggaactaggaacggagctgtgtcttacagggggatgattgcatcgaagtgtacataaatggtgttatcttggacgtgattcgtatggatggaacttataagaatggttgagatttagtattcatcagcgccgagttctatacaatgttgcataatgatgagatttcctgttttcatgctccttagttaaagtggtggttatgatcgttttttattgtgaccaggagtggcgccggggttctgggac

SEQ ID NO: 115558 - DNA, 417 bp, Physcomitrella patens
  Intron number 2 from transcript Pp1s455_4V6.1 (locus Pp1s4 55_4V6) derived from phytozome v7.0 (chr-ID scaffold_455; pos 71032 to 71448)
tgaatagacctcagggctagcaaggatttggggaggtgagctctgcttttctttcggttttgcactgcaggatttttatttgtcgaatgatggacactcggaccaagtggatgtcagctgcagcttttagattttttaaattaggtttttgaacatttgattaataattgttttccttactaaaatttgcactggtgagagtttagaccagctgtagttagtgtcgtttctgttgtacaaaaagatcacaacttgtcttcgcaaaacgttaacagactgtatgagttgtcgtggaggactcttttatcataatggtaattctccgaaatcggatcagcgggggtcgtcgtccaaattaatgaccttgcgacgtggttttcaggatccaagagctcggtagaaggagcttcgacgttg

SEQ ID NO: 115559 - DNA, 462 bp, Physcomitrella patens
  Intron number 2 from transcript Pp1s161_69V6.1 (locus Pp1s 161_69V6) derived from phytozome v7.0 (chr-ID scaffold_161 ; pos 457387 to 457848)
ctattccatttgcaggtatagttacgatccctgatattctgtgtacaactgaaattagtataattctgtaatatttgtgtttttcatggttgaattcccctgtctggtgccggaaacctgttgtgaaaaattcatgattctgtgaatatctcctcggatcaggctatgtgtagttttttaagcgtatctgaattacacatcactgaaagacttctgacgtttggctttaatacgatcgctgccactctgaatcgagcatcttcttgctccttacatttgttcaaatggagtatcaaatattactttaaattgcctagagaaacaagttgtcttactaaagtgctaacggcattgacgtcgccattgaaagtaagatgtccgaacttgaaacccaattgacctgattaaaagtttgattgttctctagggcgcaagtttgtggaggtcgccaatccagggcct

SEQ ID NO: 115560 - DNA, 802 bp, Physcomitrella patens
  Intron number 3 from transcript Pp1s113_119V6.1 (locus Pp1 s113_119V6) derived from phytozome v7.0 (chr-ID scaffold_1 13; pos 608706 to 609507 reverse strand)
ataaagctagtggtaccacatattcatctaccccctctggctgtgaagattgcgcttctgatttctgtatttgtctaacattttcgttagtgtctatggttataagcaccactctcattgtggccgggttacactagttctcatattgtgcctctgtaagacttgtatttaagaagtaatatgtcagatactttggtatactgtaaatagggttctggcgtggcctctgttgggcgatgtatattctagaagggtttttttagtctaattgtatatattttagacggctagtcccatgcacaccagaagttttaatgaaagcgccatgctgactgaactgtaagcgttgtgcaataaatgagcggaaaatcgttgccactagttcgtctattcttttcatagatgttagggcagttgattgcatcgtgcaactcaagtcgattgtttcattttgatttggcacataatcttccgtagatttgtcttttcataaactgtgacgggttttaagtttgttcagtctcttgcttttggataccgacaagccgtacgaaccgtactacgttttagttcctcctgtttctaattagattatgattcaggaattcaagtttttgtaagtgtctgaaaatgcacactcaatactttgtgccaaatatgtggttctttcagatctctgatctgtgcaatctttgtctgcgtcaaccaggtgttccattaggttaattttatttccgctgtgttgtgtgtgatatgcattgaagcaggaaaacagcagtctgaaactcccaagaataaaccg

SEQ ID NO: 115561 - DNA, 411 bp, Physcomitrella patens
  Intron number 2 from transcript Pp1s26_202V6.2 (locus Pp1s 26_202V6) derived from phytozome v7.0 (chr-ID scaffold_26; pos 1488440 to 1488850)
ttggggagaatcagaggggtcgtttcttgaaggcaggcatttttcattaatatttgatgttggtttcatatatgacgtaaactggtcttggatgtgaaatggcggaatttggggaacttagcattggttattctgattctgcatgagttgcgctctgtgttcgttacaacacttgctagtaaatctttagattaggcttattgtcctaaggaagctgtcttctttctctgattttgatgggaatattctaaggaccttctcaaccaggatttgtttttctccacttcgattcgcacagttaaatttattttcctcttttcgaggttttcttgtactattcttttgtggaaagtgaacagaattgattgtgctgtaggtgtctgaagcctcggtgacccgtaaccgcagcac

SEQ ID NO: 115562 - DNA, 938 bp, Physcomitrella patens
  Intron number 1 from transcript Pp1s12_189V6.2 (locus Pp1s 12_189V6) derived from phytozome v7.0 (chr-ID scaffold_12; pos 1150534 to 1151471)
agcgattacagtcacaagagtcaactgtatttgaggtttacttcgacagcttctctcctcatgcaaatttgcagacttgagctcttccattatctatgttttttcatgcctgtgtattggctctttagctgtgacctaatccgctcttgaaagcgatctttccatgtttttcttactttcaatgtaacttagaatttaaattttgggcaattaaaattgcgtcacgtcgatgactttcttggcgaagtactgtcgtcctgaggttttggggctatttgattaccttgctgtcgtggaaattcatgtcgcgatctcgttccttgtgtacactcctggaattcgcgagcaaaacagaattgcatgagttcatattgttgtaagatattatgcctgtacgtagttcaaactcttttagggtttgggctaccctacattaacctagcagctcctacttgtcgccctgatgttgcaaggaaatttgtaaatgacggtgagtccaccctcgtaagaacacattgaagcatgaagtgtctggggtttatatatacctttgctgttactttccgcaattggagagtgcaaatacatgcccacacttgatgtttgtgattgttatatctttatgatgattagaagttgtttcctactctacatacagcgatcagcagctattttaattcctcaacatcctattcttaaatttagggttgatgctcacattatttgcgagatgcatacaaagaatttgctgaagtagtggaggttttgtcgacagggtttaggttataatactctcagattcaaatcaacagtactctgtatggaccatacaacatagtagcctatgaacgatgtcctagcgcagtgggaattgcggcatgttattaagacgaacgaggtgatacattcttcaggaacgaagaagcgaagagttaaat

SEQ ID NO: 115563 - DNA, 555 bp, Physcomitrella patens
  Intron number 2 from transcript Pp1s2_15V6.2 (locus Pp1s2_ 15V6) derived from phytozome v7.0 (chr-ID scaffold_2; pos 68050 to 68604 reverse strand)
tcctatcagctaacttcgccaagttgggagagcaggtacagtagcctagtttgcaagtcatttgaatcttacgtcttcgctattctcatgcttcttgtttttgatcatatcacattctagggatagagaaccctgctgccgaaattttgcttggggccaacaaacagtcatcaattctatcctgacatttgggagtctctctgctgtcccagctctgaaacatcggcataatgctgaattcatgaaccagtcgtagaatgggaagcctttttgatactcatgtacagattgtcctccacacaaccttgtctatcagttttttcttttttttttcttttatttatttatttatctttttctggaccgtttgtgtttcagtcatgctcaaactttttctggaagaagacttcaatcttggatcaacctgttcagtaattttgagagcaaagcatgctgtgttactccctaacctatctgaatgagtaattgattgactttttattcactagtatatgcgattgttctttgacagatcaaggctgtggaaaacgccgg

SEQ ID NO: 115564 - DNA, 643 bp, Physcomitrella patens
  Intron number 1 from transcript Pp1s257_31V6.2 (locus Pp1s 257_31V6) derived from phytozome v7.0 (chr-ID scaffold_257 ; pos 187808 to 188450)
gagctccaagcgcactttaacaggcttcccacccggtgagtggagattattcatacctgcaagccttgcatccaaccctagctctagtacttcttacagctctcaaaagctcctccaggcatttcataagctatttgaattcggaccaccgcgcggatatgttcgcattttgcgcaataagaattctttctatctgaaaaatgtgactacgatttaaaccctcgcagttctttttattcacaaggttttccgaaaacccctacgagtttcacataaaccctacagcagctccagatcctgaagcacttatttgaaatttttttgagcgttgtgtagaatgaaacccctcatactccccgaggatttcttctcttttaccaaagtgttgtagaagatggacaacctaaatactaacactctgcaatcttctttttgtagtacacgatcgcatgtagaaataaacgtagcccttcgagttgagtaattaatttccgtgtcgagattcatcattttcagttatggcatattttctctgctgtaccagagtatgtcaatggaggttgaaagatcgccggcctgtatgagagcaagttctataaccgggttctaatgattttagtgctcttggcgtatgtgtgtagat

SEQ ID NO: 115565 - DNA, 590 bp, Physcomitrella patens
  Intron number 1 from transcript Pp1s302_16V6.1 (locus Pp1s 302_16V6) derived from phytozome v7.0 (chr-ID scaffold_302 ; pos 95802 to 96391 reverse strand)
aaatctcagcttgacaggttctattgctattctcatgagttgtcacgtgcattccacataactgacgacttccctgctttctattcctgatcaccccatcatgtttaagtctatgtcgacgttaacaactattttaaagctctgggtgtgtacaaggatgcgtagatgaggtttctgaagtctcagatgcgctatttgtagatggaacctaggtttcacaacggtttcgttaccgaaatttagattctgaatgtatgtaaggcagagagtttttggttgtattatacattgagtaaactgttttcttccaattcagagcatcatcattttccttataacctaaacctggttacgctgcagttgcttttctcgcatctcctactgtttctcatttgaagtggcggtagcggagactgaatatttcagcgaattatttcttaagtggttaggaacttttagggtgtatatgcatgtttcgtttcaggataagattttccatgaatttgtctgttgtgttttgattggagtagtcctatcttgatcctcaatttgcaggcaagagagagagaatcaagaaaatttacatactc

SEQ ID NO: 115566 - DNA, 792 bp, Physcomitrella patens
  Intron number 1 from transcript Pp1s106_39V6.1 (locus Pp1s 106_39V6) derived from phytozome v7.0 (chr-ID scaffold_106 ; pos 230722 to 231513 reverse strand)
gctgaggtacgcgtccgagtgaatcgcttcccgtttctggtgatttttgcttgccttgagagcagtacagtggatcgggagtaggagcttgagattgtgttggaatggaatgtgatggattggatgcgtcgtgtttgctggatgttgtattacgaatcgcggtagatcactaggttctcgtcttttcgcgtatgtgcggattcgctcggttcttgtgaacttgttttgtcggttgctatttgtttgagttgagcgagttgaagtttggctactgatagtgccataatcccgcgtcccaatttcttgttggaatgcttgctcatacgcttcttaattgtcttgcggttaagaagagcaaatttagctgtgtaacaaggtttcgttagtcgtttcaacatgtgttagggagacctgctatagaatcttcatttggtctaagatttttttattagagttgcactagtacatgttttattttcattttcattggtttcgtgagacttgttggattttttttttttgtttatatttatgtttttataattacttcagctgttttttttgttactgtttccaacgctaaaccactcaaagcttttagaattttcattggatttctgccttctgtctttctggaatgaatgtgaatgagcttgttagttgtgcaaaagctctgcagtgatttccgtactttatggaaacgctcagaactacacattttgtgttacctctattcgtgaatgtcctaacaaagcttgtttaaatgtgtagactacagttttgaaggtggcc

SEQ ID NO: 115567 - DNA, 767 bp, Physcomitrella patens
  Intron number 2 from transcript Pp1s64_105V6.1 (locus Pp1s 64_105V6) derived from phytozome v7.0 (chr-ID scaffold_64; pos 976447 to 977213 reverse strand)
actcaagctagtcacgaaagcttacgggatcgtgggtaaggttcacctactatttaatcctatcttccgtcaggcttatgaagtatagtagaaactgtgtcaaaaagtaaaatagccgggagtaggtggataactccttgttgaatatttcgtcttttttttggtgttacgtggatgtttaaaagataattacacgcctcagaaggggtgattccgtttgtatcagtacatcgtggacggtttctgggtcacgacttcgtattgtatactgttgtggtcgttttatggcgtgtattcgcccacggtcttgtgcttgtgcttgtgcttgtccttttctttaattcttaggttctatcattactatttttaaagtcgatgtctaccaaaagatgctctctcaaatatcagtacttcgttctactcattgaagctttgggatcgggtggttgacattgtcagactctgacataaactgatttgtctcagttagaaagcaagtaaaattcaatcgcaacatagtgtttcagcctaatttttgatatgaattttggaaaagtttctacgcttttttttcgttcataaatcaatatttcagctgaataggagttggtaaaaatagataggaggttttaaagttttgaagttgatgatctttagataacgaatgatgttatcagtacgctaattgtgtgcagcgattggttctgattcgctcttattgcatctgctcatttccaggatttatcaagtttaaggagtcttattac

SEQ ID NO: 115568 - DNA, 620 bp, Physcomitrella patens
  Intron number 2 from transcript Pp1s246_84V6.1 (locus Pp1s 246_84V6) derived from phytozome v7.0 (chr-ID scaffold_246 ; pos 408759 to 409378)
cacaaggtgggaccctagaactgggaggaatcgcgcttagttcctgttatatttagcttttgagaaagcgttgtttctcatcttcaaaaaccttctttagctctgcttgttctagcgaaaaggatgctgatctgccttggagacattggaggttgaaggagcgttcagaggtgatagttttaaaaaaaacaatactgctgtgaaaaagataactttcaaagctcgagagagacgaagagttttttctggctgctttgcttgtggctggttctatatcttcattcgttcacctgtattgaagcaatgatagttcaccgttcagcccagatgaactcgaagacatcgcggagcctattctgtgtcgatgaaccagccccaattcgtgaatcaaaatctactccgcatgcagaatcgaacaaatgcacaatcaatgcagaagttaactgactcgtatatgagcatgagagtttttcttggagttctggcaattcgtgtcattttgatcaaaatgtaggaaaaaaaacatgttattcatgattttcaacaaaggtaaagtcttgatacattgataacttagtgatatatttgcttccacaacacagagacgccgcgtggcaagc

SEQ ID NO: 115569 - DNA, 937 bp, Physcomitrella patens
  Intron number 1 from transcript Pp1s89_84V6.1 (locus Pp1s8 9_84V6) derived from phytozome v7.0 (chr-ID scaffold_89; p os 432187 to 433123 reverse strand)
cctgaggtaccgttttcttcggatcttgactcgtcacttgctgctcttgtaatggatcctccattgtgttcagtcaattaatcagaaaccaccctgcactcctcttcgcatgtgggtggcatgattggtgaactgtcgatgcaggagtgctctgtttgagggccgagtcatgtggtgtcaagaaaaagctgtcttaaattgtagactatggcgtagcacaatcattccacaccgtgaggttgccaatttcaagaggttaaagtaatatatgtgtacacaactgtcaagaaccatcggctctgaatgtagcagattacaagtcatattatcgtccaaaacaaaaagaataatttgtagctctcattctcctacctttctgtcccggaggcattctccttcccgggaattgtccattttttcactccattccgcaaacatggaactcgcaatctctgtccatcgatattatcatttcgacgaaatacgaaagccactaagagttcagtatgcttgcacacagcttttgcagtcttacgattcactgctttgatggtttgtcttgatttgagggaactcccgaaggctccaggagtctctgatttctgtcccagatcaaaggtccattaggttgtgtggatagctcggaggtgcctcctggttcatcgatacgagaatttgaacaatgtcccgcatttaattctacacccagtagctcgaaatcatccgcaaaatgtgctcctcgatggataacatctgagctgataggaagtcaattgtgacacattcaaggagcgtaacttgcaagcattgcctatattcgtactctacccggaaaactgctaaaatcccagttgtgaacgctgacatttctccctggatataaatattgattgatggtgcagacagtggagctgaagacggtggtccttcgggtgat

SEQ ID NO: 115570 - DNA, 798 bp, Physcomitrella patens
  Intron number 1 from transcript Pp1s163_129V6.1 (locus Pp1 s163_129V6) derived from phytozome v7.0 (chr-ID scaffold_1 63; pos 922399 to 923196 reverse strand)
tagatctaagaacagctccagctactgcgggtaaggtgtgtaaatttctgcctttttttttctcgcttccgtacccttggttctctctctatccacctctttactaaaacgtaggctagtggatttgtgcgactgctgtgcagaattgtttctgatgaggtttcagtcttagaaatctcaagataggagtgtagcttttcaaagtcttctgaaagagcttgtttaaaaataggttacaaagcaggtgttgtagcaggagtcgagcggtatggagctgcaaggagatgaagaaccatcacccattctctaactagacagtctttgggcacttgtgcaatgtgtaacagacttgtggctcgaataatttagaacgtagcttgtggaggacgtgagacaattggtcattaccatcaggcagcaagtgtgtcaaataatttaacttatattgtattcatatcaggattagcctaagtgtatttgggctagctacatctacatggtgtgcaggagaatgttgagtaagcactaagtgcactctatttattccttttgtgtgtgtgtgtgtgtccaattcactcacaggcgtgctcgccaagcgttgtactgggcacgaattgattgtgcagattgcatgatctctttgcaaagtactgtcgatctttttctacttcgtcttctagaatttcaagttagattttgtgggagtaacttggaaatgagggatataaaaattactgcttgaattcaaacaatttattgtttggttgttgcagtctacgaaaccgtcggaatccaatc

SEQ ID NO: 115571 - DNA, 568 bp, Physcomitrella patens
  Intron number 1 from transcript Pp1s258_49V6.2 (locus Pp1s 258_49V6) derived from phytozome v7.0 (chr-ID scaffold_258 ; pos 311376 to 311943 reverse strand)
attgaaggactccgacgatccaaaccccggttctggtatgttcaaatgcaacgtcttctcgttgcttgaaaaatctgctgcatagtttcgtgcagtgaatgacgacaaacagaggttatttgagagtaattatatgttgacgctagagagttcctaggcgatgctaggtccttgataatgtattcatagaagggtacggacaatcaatcaagccaggagagggattaacacaaatcgcagggaacggttttgttttgttttgttttgttttgttttttatctgtttgtttgttttttttctctctctcagaaagtttaagattggttctgaggattaaaattccgagggccaacatgaagaactgtaggtttcatcattacattttacaacatttcaagtttgagtttcaccctgatatccaatctcttcatcggtgtaactaattacaatatgaatctgacgttttccctactttttcaagggtgggaaggtcatcatattttcagatggtctacttgtatatgtgctgcctcctgttaatcatctatgctttggctatggcagagg

SEQ ID NO: 115572 - DNA, 994 bp, Physcomitrella patens
  Intron number 2 from transcript Pp1s15_241V6.1 (locus Pp1s 15_241V6) derived from phytozome v7.0 (chr-ID scaffold_15; pos 1458640 to 1459633 reverse strand)
gagccgctaaggctactaaggtgaggccgccttgctttggatcgttgttgtttcgtaggatttttgtagtattgaatttctctgcctctttttgacaaaaccctgagagggggcgatgttgttagtgccgtttctctgccgaggagcatgtatgcattggaatgtgagttccagtgggaggttccgatcactgtgtgattttcttaactcggatagaaggacgggcctgaactaacgtcgccttagtgcttctcgcctgacagtttatcgagtaggtttctgtgatggtgaaattctttggatttggcgtgaacttttcagaaatgaattgccgaagttggagaattttcaagcccgtttatcagtggtagcaatttgatgacagttcccttcctgtggcatccggcagttaggctattctttggatcacatgggatttatagggcactagcttttcacatttggcaatgctgctgagcagaatttaatttgcgtatttcgcgtagtttgtattcggtggaactaatcgattgatacatttgtttcgagtaggtttttgagcgttacagatagactatattagtccccaattgaatgatctccattgcaaggtaaataagcattcgggtatttggaaattggggaaatacggtacatggttctgtcttatgacaggattgtcaaccacttcacggatgaaaaacctggcataagaaggaatcatccgtctatttaaaaatgcgtgctggttgttggttgtcgagtttgaagctctatgtggatgtgatagacgcatgtctacatgtgtatgtttttaaatgcatgtgaattatctctgaagacgagaaattttcatttggttcttgggcagcaaatcaaacaccgattctaacatttatgtattacaaggtacattctgaattggtttctattttaatacacgtagcatggctatgcagaagcagggcaaagaggttgatccagtacgggtatt

SEQ ID NO: 115573 - DNA, 867 bp, Physcomitrella patens
  Intron number 1 from transcript Pp1s18_85V6.1 (locus Pp1s1 8_85V6) derived from phytozome v7.0 (chr-ID scaffold_18; p os 414203 to 415069 reverse strand)
ccgattgctgttgagacagagaatccagctccaaggtgtgtgtgttctctgagattggttctggctgataatctccgtttgctgtaatcgttgtactcggaaatgcatgcatggaaaaattggcagagtttgtgcaacccttgatagtgcggtaagacctgtttctatcgaatgtttagaattcaaaattaaactatcatggcgcagttcaaggtgcttttcagcggagactgtgagatcagatgcagttatttttacttagtcgaaacactacgttcctaaatcttttcagggacaatgttacaaattcgattactatatgatagtttgccccgccagtctttcgtgatgatttccgccacgcttgactatccatgcgtactgattttttctagcgtctgctttcagaccacatatcttcgagagagtcggggggggggggggggggtagagagagagagagagagagagaagttcgaaaggtttttaccatactgtacttgatattagacaaaggtttattacagtttatatcggccaactgagcgttggcattcgacacctaaaattcttaaaatctgcatgctttgatcgttaccttcgtcaccattttcgctcatacagtggtgccaatttcaggtcttcgttttcagtatattcttcagtgtgacgccttttgtcgtttattagaggcagattgtgatgttctcaatattaattcgaggataaccttaccagttggagttcataaacgtagacgtcatgattagtggattcaatttagattttgttgcgttggctcagagcacattgcctttttggaaattgatgacagcaaggacgagtctcagagcttctgtgttggca

SEQ ID NO: 115574 - DNA, 877 bp, Physcomitrella patens
  Intron number 1 from transcript Pp1s276_76V6.1 (locus Pp1s 276_76V6) derived from phytozome v7.0 (chr-ID scaffold_276 ; pos 415598 to 416474)
ccagatttttcgagtttgattgtgaatcaatacaagtgcggtatgaactcttttgtatagtctctgcattacttgtgtgatcatcgcatcctttcgtctttacaaattttctgctgatttgtttttaggtctgtgggttgcaattgacgatgagtattccggtgtgccggtgacgtgctagtgagttctgtgttctggaaaagacgttggaggtttaaaattcgctctctctgctacgataatccattaattctttgttaagacaaaatccgatacgtgtcctgcacttagctctgagcagtttgagattttgtgaattgttgtagcgcgacacttaggtgcccttgtttaagttgtgggtcaaaggagtgccgccagcggtcgaccttttttagattcccatgtctatgacttcgacattctagttcacttatgttaatttggttagcaattggccggtgatttgcttttaaaagggatcctgggtctatttgtttttctaggattgatggtagaagaggagtagacgatgagattactaagagttctcctgtaacttgctaaagctggttactactctggaaacaactttttatgatctgagaatataggtggacatcagctctttcggacatgcctcgaggtggccgaaccctaataaaatgctgcttcgtcttagatccttagagctgcgtgacatcttggtcatctttttcctgcaggaagttatgattcaattgatataaaatcgatttgaaattcattggactcttttgcagcacgtttcttttttctttcctctacctgcgtcgattagaattttaaaaacatcttgtcattgcattatgtaacctaactttgattgtgggttttgcag

SEQ ID NO: 115575 - DNA, 879 bp, Physcomitrella patens
  Intron number 1 from transcript Pp1s18_102V6.1 (locus Pp1s 18_102V6) derived from phytozome v7.0 (chr-ID scaffold_18; pos 482828 to 483706)
ggtgccagtcccaagacgtcactttacgtcggtacgccgctctttaagtgcttcgtgtttcttacgtgtttcgctgatttctgaaaggttagaatggcagtaattttttgttttttgtttttctctctcaatgttctcttgaagcaatgagaagaagagattgtactgatcgaaatctagcatttaaggattctgaaaaatcgtggttgaatttgtgtttgaaaatgttgagctgaggttgaggtagaggctgttgttcaagtcgcatgtctcaggagcgaatagtatggaagtactattcgtcattgatagggcgaggatgatatgtactcgatggttcttttcagcactgaactgctgtcaagcggagaggataacgtttctgcatttgccggtttcatgtagtactggtatagttgaacttgaattgagaattcaattccatagtcgggatgttatagagataaccctaaaatcttaaaccttaattaattttcatgatgatattctcaagaggtattcactgtcttgatggtaacagcgctcggtttctataatagatagggagaagacacatgagtagtaccggatgcagcgatttcaaggattgcattgttgagattaatacattgaattctttcataatttatgactaaaccagctcaaaacctcgatgagagtaatagcgcttttctttaagcaaagataatgacgttgacaagagtcgtacggtgtcacatctgtaatatatctatctatctatctatctatatatatatatatatatataagagttgggatgctcggcggtgctaggattcagaggtggaattcaaccttgaggatgccttttatgtggaacaggtggtttggagaaga

SEQ ID NO: 115576 - DNA, 540 bp, Physcomitrella patens
  Intron number 1 from transcript Pp1s263_29V6.1 (locus Pp1s 263_29V6) derived from phytozome v7.0 (chr-ID scaffold_263 ; pos 148194 to 148733)
cgcttggttggtggactttgaagccccgaaccaaggtaggattgctgtttctctcatttcgttacacattggttttttttttattgaggtttggaatttgatgaattttggaatttgatgaattttggaatcgtcgggctgcgtttttgtggttgcttggcctgtgattgagttggtgagttttgtgctagtgactagagtgggtggggtgtcttgagcacatggaagcttgtgtgccttattggaatgagttcacttggttgagcaattttcttccaaattaggttgtcgttttctccctggattgacgacaggctttttcgcacatttcagtgaaattgcatgcttataatcctcaatttggcgatatctcttgtcgttgaatagctcatatggcaagctcagtagttgatcagatgtgacttcgccattgttgtagttttgattgttttgtgatttagtgtgctgttttccgtgagccacgatgctgcgtgtcggtagtgatttgtcaatccgtgtcatgtacaggaagaaagagag

SEQ ID NO: 115577 - DNA, 338 bp, Physcomitrella patens
  Intron number 2 from transcript Pp1s260_21V6.1 (locus Pp1s 260_21V6) derived from phytozome v7.0 (chr-ID scaffold_260 ; pos 219106 to 219443)
caacactgaaaaacatcagccggctagaaagcttggtacattttcagaacgctatatgactgtttgtttgcttttccttttatatgatattccgtgtgtacgaagaatttgagaagatgaccgataatttttacatttttgcatttgctccgattagagttgaaatttaaaggtgtgcttatcctgggggagtcttttgacagctatttttgcaggattaagtaatagtggaaaggattttgatattggagttggaaattcacaatttttttgtattatcaagctagtttatttaatttggttttaatttagttttgaatttacaacaggtgcaagaa

SEQ ID NO: 115578 - DNA, 1042 bp, Physcomitrella patens
  Intron number 1 from transcript Pp1s22_87V6.1 (locus Pp1s2 2_87V6) derived from phytozome v7.0 (chr-ID scaffold_22; p os 614942 to 615983)
gcgttctggggatctcttggcagccccgggttggtgtgccgcatgcttcccaactttgattgtttccaatacttaggtcctactttgcaaatgcatattcttaggtctagctgaaacttaagtgatcgtaggttgatacgttatgacatcagcacttcgtttctagttaggagggtctgtatgcaatttcgttttattttttttgcaagtgtacttttttattgggagcgagggtctatcgatctgtaccgtgtcacttttgttgctgtgggtagctatatgtttgtcaattacatacctacctagcttaaaagcagtcacagatcatttcaggttatccctgcatcatgctatttggaaacacaaacatggattctttctgccgacagtctactttctggtttgaagcaattttaggttttctgagtcattgaagttctgagctggtgacattgaatcctaaacttttacgaggcaggagctcaattcagcaaggactccttatcgtacttgatatccagttcaactgatgcacctccctccccatattgatcgaaacaattttgtagtttgtctgggattggacgagaaaatcaagttagttaaccgtttaatcatttactccatggaatttcaagccttcatggcttcataattcattgggttgaaaaactggtgcttggatagaaacagtcactatactgattcccgtttcacatgggtagttccataatctgcatctcgtccgtaatgaacatgtggtcgaaatctgtgctcgggaatttcacggatgggtggcttccaaaatttgttacgtctttcaaccagagggttgtactgtttactcttcattcacgttcgtagtttctcatcgatgacgttgagttgcgcaattgtcttttccgaaagatcattataatttctcactatcacgacgtccggttttacggaagttccaggaatacgtaagtggagctgatgtgactacgattttttttatttgggagcttgtttatgagcagatttcctcctccgctagtgc

SEQ ID NO: 115579 - DNA, 818 bp, Physcomitrella patens
  Intron number 1 from transcript Pp1s226_46V6.1 (locus Pp1s 226_46V6) derived from phytozome v7.0 (chr-ID scaffold_226 ; pos 231960 to 232777 reverse strand)
ttcaaccccttcatcaggtgcgtgtattactcctccggtctccaatccaattcgcatcgcatatggcctcgtgatcagctggaaggattggaagcctggcttgtgtggaattagcaattgggatccctcaatccccctcattgcgggcgaggattgttctttttgcggtccttttatataatccagcaatttcgtatggagtcgactgtagttaacatagctttcaatactcctgattgtgcaactaggggttccatcgttcaccagcatggagtttgaattgaatcgtcttaattacccgatgacgctctgtatgtctattgaattgttaattttcgtcttcaatttctcttgttttgaaccgttacgtgtcctggaattatggacaatcaggtgaaatcagatcgagtgaatttagaaaattggtcgattaacaccgaatatgtcagtgtgtgtagggttttcaagagggcttgaactatcgtggtatgttgacaggatgtaggttaggattcatgtgctctaagatggttttagaagaacgtgattccttgagtcctgagcagtgcataagtttctacatgtttgagaggaattccgcggttgcattcccttgtaagaatctcgcggagttggtgtgcgatggctgacactgggttgttgaattggacgaacttcgattctcgaggtttgatccttgtttaggggtttccccacatgtacctcgcaattcatataccccctattggaactaatttaggggattctcaaattaatgtgcaggggtgtacaacagcagcaacaaggacaaccatctc

SEQ ID NO: 115580 - DNA, 721 bp, Physcomitrella patens
  Intron number 1 from transcript Pp1s319_4V6.1 (locus Pp1s3 19_4V6) derived from phytozome v7.0 (chr-ID scaffold_319; pos 14819 to 15539)
gctacaccacaaaaggtatcaaattttattcaaaaacaaaatataaccagcagcataatagcgctcagtatttgccagagatttaaaacttctaaaatctttgctaaacctgctcacattctcttcacattctgtccaaaaattataaattccaggacgacgacctctttgcaccaagtagtaacactgcctacactgaagattctttggaccaagcaatacaccgtgtctagattgctgaggaggatgctcggaattcagagggaactcccgcacctcagacatctgctctttgctgaatgtgtactactcaactagcctcaccaaccaagtcaatttttgcaaaagaaaaacaagaaaggcccacattgagacaaacatcatcctaatctattagttactatccacaagccaacagtagcattgctactacgaaatagaaataaaacaacttatttgcacatcgcaagaagctatcacaatagaataaactaatgtgtaaagagggattgttgaaataacggttacacactaatatgccgttatgcactgagagtgcctccctaaacacagccaaaagtcttgacaactagagactatttgtatcgtactcaaattgtttttcaattgaacaattcattccattttcatttactgcacttaatttatcaagcttttcatgtcaggctggaatttttgagaatttggtaagacacaaagc

SEQ ID NO: 115581 - DNA, 692 bp, Physcomitrella patens
  Intron number 2 from transcript Pp1s47_66V6.1 (locus Pp1s4 7_66V6) derived from phytozome v7.0 (chr-ID scaffold_47; p os 354675 to 355366 reverse strand)
acattgtggaaccattattgctcagcggtttccaggtgaattactgttccatcctttccaggttaagagtttgttcacgtatccgagagccctttgagtattagtatgtctcgggtcagtagttgccgttgtatctagtagacatgtacttacgataaaatgtgatgtaactggagttttgttgattttcgaagatagatagggatgtgatatcagcctactttaataggcattgggaattgcatgatacatgccgataattcctgaaaccatatgtacttgaggtattgcagatttgtggtatcattgcaaacagatttgactgtaagagcgaagactacggtaattagcatttcagtcaccacaatctttacagaagaagtaagacccatgtttttcttattttgcatcttttttggccagattagcatcaatgagcagtcccaaacgtagccgttttgaacctactgtcaccctctattgtcaggtagatattcattttgcaatgaaccttatgtgaatactgaccataccgaccgtccatttgtatcgtttcaggtgtcaaaagacttgaggctgtgccattgacgttttatcaaactgttcctaccctcttttctctgagatgacggatgactttgtcggttggaagtccagtcatacccccattacatcacagaagtctgaggaag

SEQ ID NO: 115582 - DNA, 701 bp, Physcomitrella patens
  Intron number 1 from transcript Pp1s7_498V6.1 (locus Pp1s7 _498V6) derived from phytozome v7.0 (chr-ID scaffold_7; po s 3179713 to 3180413)
ttgcaaggacgcaggtgttggagtttctgaagcaggtgtgttggcgttgacctaatcgtgatagattgggagcttctgctaatgacgattggattcgtaggttacagttgtgatttggaaatgtgatgtattcattcatttgtttctgagtaattcacttggagctatgtacttctcaagttttctagtgcgttgatgacgtgaacaaggtcgtgtctacatgcggtagtgatactacgctagattagactgtcttttggatgcatgagataagttggcgtgttgaatgtatttggtgcggagttgtcgaattgaggcaatgatattattaggatttgttcattgaggataggattatggaagatttaagattcttatggtgacttatgttcacacgcttcactggcgaatctgaaagccctgttgagtaacgtcggtttcaatggaggcagtaaattccataatacgtgaacttccttaagagatatggtgcatcttctttgatcttatgaggtcagtaagacaatgttggtgtcaccaagtccagccactgtacactttttgtaattgtaaatggtgtattcattcatcttcaacaacaaacattggagtgtctgaaactgttaaagactgctcctgtgagatcataaggacaatatgaacatggttgtgtgatgctgtctatttgtcgcaggtgcgca

SEQ ID NO: 115583 - DNA, 637 bp, Physcomitrella patens
  Intron number 1 from transcript Pp1s11_79V6.1 (locus Pp1s1 1_79V6) derived from phytozome v7.0 (chr-ID scaffold_11; p os 668927 to 669563)
cttccacaagtcgcagcctctgtttgtctccggaggttagattccagtgtccttcaccagcttctagtgttctggatagccttgggggcgaggatcttctgtttatgttcttttgggagtgcatttagagcattggcttttgattaagtcactggagtcgttaccacattgtctgggaaatcatacaatgtgaaatcatcgaatattttacatttgtggcaagatctcgggatgcctgtgagctgtaggttttgtttatttcattttccccgtcgaaaatgaattcttaagtcgagttttcactgcagttgtgtcagggttcacatttagcatggcgtcgagccgatgaattgctaaaagaaaatgacggtatattgaaactgtcttttcgtccgtaacgaatctaatttaattttaagaattgggcgagttgttctcttgtaaagctctccacctgccgcagcatctctacattcttatattctgctcaatttttatcttttcctcctagtgagtagtccgatttcatgattagattacccacatattgaagatattatgtagattttgtgtgcgatgcccacttaatttgtattaatattgtgctctacgtgtttgggaaccgggaatgtagggg

SEQ ID NO: 115584 - DNA, 667 bp, Physcomitrella patens
  Intron number 1 from transcript Pp1s224_9V6.1 (locus Pp1s2 24_9V6) derived from phytozome v7.0 (chr-ID scaffold_224; pos 63566 to 64232 reverse strand)
taaagacaacgaggcatcaagatcatcatctgaaggtacgttgtacttgtcttcttagtttgtgagttgtgtcggaggaaatggtgttgctcgtctttgttttcggattactaattttgagaactagacatgtctgaataacctgcatgatatcacatgaaaaagcgtattttcatcacttttgctttagatgttcttagttgactgcattattaagggcgagcgtttgacttagcaatgcccatgagtcctcgactttgcttgtaccacacttcggctatgtttgctgtatcctttaaatccttggtcgtcatattccatgaaggatttgaagggcgcatataatgaattgaaacatgatgtgtttattttgctcctcggtgttgctataaatatctctcgatttttactcaattcatcatgactttcgtaggtacgcatgggttgtattaattgtcgtgtgcaatgcggcggtgtacatgtgcggttattgtcctgataatttgtagcgatgtcgcgatgtcgcgatgtcttaatggtgaatcttaatggagtaatgaacgtacagtctaccttccgaacttcgatacacctctcagttcgtatttttccgctgtttttaaacttatattgggagttgatttttgtgccggcgattttgtaggca

SEQ ID NO: 115585 - DNA, 479 bp, Physcomitrella patens
  Intron number 3 from transcript Pp1s38_243V6.1 (locus Pp1s 38_243V6) derived from phytozome v7.0 (chr-ID scaffold_38; pos 1426449 to 1426927 reverse strand)
actcagaggataccgacggaccttccaaggtatgattgcactgtggtcatttcgaatacggtgttcgattgcagcttcctcactttaatcatttgattaaatcttttcagtatggtttgagtatggatcttgtttcaaattcagttatctcttgttaccttcatacttcactgcaggttatggattaatactgaaagagaagtcctgctatttatagtgaactcagaagaattagagttcactagatttgacctgttatactttagaactctacaataggctttgaattgtcaactagctgtgccgagacatgtcgtgagtgttgttctttgcatggtaatacggagtttagttgcctcgaataaatactggtttcctattcccaccaacaaacagctttccgcctccgaaaaggttcactattcatgcgatttcggtagaatatgttgaaacccgtagtctttttggttttgatgcag

SEQ ID NO: 115586 - DNA, 513 bp, Physcomitrella patens
  Intron number 2 from transcript Pp1s38_243V6.1 (locus Pp1s 38_243V6) derived from phytozome v7.0 (chr-ID scaffold_38; pos 1426968 to 1427480 reverse strand)
agctcttcacaaggtgctatttgcatttgtcgcaggtgggtccaactgtactacctgctgatgattttactacttgaaataaaattttgtgatttgaagtatgcatttgttttgttttgggtgcggcagtccagtagagctttgaacatgctcatgacttgatacaagtagcgcttaacactttgtatattttctcgttccttccaacacccgttctagcgccgttatctcggtttgtgcagcaaaatatttctgattggtcagctacttcttggttgtctagagacaggttaaggcaatgtatttcgagaggaatatgttgacccggcattagttaatggatgtcagaagaaacgattgtatgctcaattcatagaccctcactttttctttagaaaaaacccatcgtctttgacatcagaggattatggtactgactggtgttatgcttacttcagcaagcaagtttgagatagtggtttatgttgctgactggccgtgtattcttaggtc

SEQ ID NO: 115587 - DNA, 687 bp, Physcomitrella patens
  Intron number 1 from transcript Pp1s190_85V6.1 (locus Pp1s 190_85V6) derived from phytozome v7.0 (chr-ID scaffold_190 ; pos 712032 to 712718 reverse strand)
aacccgagctcacggatctgctacctggtcgcaaggtaattcctgattgctgttttctgaaagctagctttgtcgttggatttctcgctagtgtaggttgggcttgattgctgagatcatgaaatgcatttatttttaagtgcaccgtcggttcggcattgtaccgaggaaggaaattggttgcgattttgaggatggaaacctatgggaatggaggttgcgagatattcgatttgtttcttgtggaagtgtggagtgttctcgcaaaaagctgattgttctaccagcgggtttcttagcttttagaggagttagtttgcttgatttcgtttcatttttggtattcaatgaaggtatagttgcattttattcgtctggagctataggagttcagtaaacattttagcgtactaattcgaaatttctacagaacccttttgatggcattgttttgaagatgttaatgttcataaatatattttacagcgtggctaataaatacaccaactctctgcgtggcaatcactaatccctgttctttacagcctcttgtttgattgttcttattgtttgaggcttgttaagaaattttagaagttgttcattttcttatgaacatgtctcgaggccaacggattttgtttgatatcagaaaacactacggttttggctgctgtgtacggtcct

SEQ ID NO: 115588 - DNA, 794 bp, Physcomitrella patens
  Intron number 3 from transcript Pp1s174_97V6.1 (locus Pp1s 174_97V6) derived from phytozome v7.0 (chr-ID scaffold_174 ; pos 678636 to 679429 reverse strand)
ttgtttgcaggaactgtaaagggtaaggcttgtaatttttatttatgcttcgttgaattccataattgggaggtcaaggatgagcatgtaaacctgccggtgcttaccggtaatcaagtcaatgtgattactgagtctgacgtgtgatctggtagtgctgatcgttattctagtgggatgattagtaccaatctgctcttagttgctcggatactttgaactttgtgatgatttgtaagattgtgatttcaattcttagaagtataggttgctcttgattagtttgaagaaattgagtacggttccgtggtgtccttcagaaaatccgtaagcttctgtcgtgaggtcacctaaaacctgctgtaattttcgctcgtttcttctgtctaacctcaaaatttccactcaaattcaaaatcagaacaagtcgacatgtttgtaagaagttcatgtcagaggttttagattattggctgatgaatgaggatttcaccataaactaaggaacattcactgaagaaacaaagtccctacccgtgcaagtccatacttagagtcatattttattcaatgcaacatccttttagggtttcgactaacgacacagcgtttactagtaggtttacagttcagactcatatttctgcatccgcatgtgtgcgactggtttagtacccattgtttgaaggcttaattcaatttcattggccacagccatctagtttgtttatcaaaaaaaattcgcttttaatcctgcagaacgggatcgaagaccggctcatccagtcggtgcg

SEQ ID NO: 115589 - DNA, 835 bp, Physcomitrella patens
  Intron number 2 from transcript Pp1s44_237V6.2 (locus Pp1s 44_237V6) derived from phytozome v7.0 (chr-ID scaffold_44; pos 1550338 to 1551172 reverse strand)
acctttttgattcctcgtgtttcgcacaaggagtactgttatctagcagacatgccatcgtgcctgtgtgacttctgtgagacatgaacgttattaagtttaggagtatcattttgttctcgaggttcctctgtcttcttcggagctcttctgttattctttatttatttatttatctttgtttaaaacactgagggttttagttagtgagtggtggaatcctgtgtacctggattttgctatgttcctactactatgcaccgaagatctagttgagtttcctgtgtttttccttttcctttagtttttgattacttcccgatcctctcactgtacctagttctctaaagagtacaatttatatgcattttcttagatcgaacattgcgtgcgctcaaggaacaactatgaagtactatgatatcttttttctgttcgtgtgctattcgttccttttgttggttgttgatacgttgagtgtagttcttgttctgagttgcaatgagtttcgctcggcatattttttatctacatttttgtcagtgtgtagataatttacagtattttgttaccacgtgtagccagtaggaaacttatctctattatttcgctctgtatcttggtgtaacattcatgagcttcttgtagctccctttcttcttgatgcggaaatgaatgttgcggatagatattcatagtcatgttagtatgttctccaggtctataccttcagaaagtgagttaaagcaaatcatgtcctcaactaagcttcacaaactcaattcgtttctggctgtcaggcacttaaacttgatcacctcgcgtgattggtggg

SEQ ID NO: 115590 - DNA, 906 bp, Physcomitrella patens
  Intron number 1 from transcript Pp1s44_237V6.2 (locus Pp1s 44_237V6) derived from phytozome v7.0 (chr-ID scaffold_44; pos 1551210 to 1552115 reverse strand)
gtggttggtccttgccgatcgcgctcaccgaaaacgtgagttcttactccggttcgcaatagtttcacgctgctcaagtatggtgtttgaagccacatgcatccgtgggattgattgtcgtctaggttgtttgaatggagtcgtggtcgatgtgtcggttgtctcgttcttatcgctcagagcactatttgagtttttttctcttttttcttttgcttcatcgtcacctttgatttgtctttttgaattgtccttcaaatcactcgcttacatgcgagtatttgatgattgagtgtctcttatttggttggtttgatattttcgacgttattgacccgtggttattatcatacgcaacacatctttttattgaataagctgtgaagttttctcgtttgagtataatcaggttaatttcaccgattaattagtctggttcaaagtgaatgtatggcgttctttacgcttggagctttgtttgtatgtggaatgactcttttgagtctattcggttctgcattgattattaggcctgtccgtgtttacattatttacttgcatgcgaagccccatccctctcccttcccttttttcttgcggtgtctatgcagctgtacgaaagtgctgtacaagagaagctaaatgttagtcgcattcactaatatgtttcgtacataattgcagcacttgtttgactttgttctctgcattagtttgcttgattcttcagcctacctcacgcgatgtatttctagatattaaatgccatcggatatataacggtcggtgcttgttgtctcgtatgaagtattgggaaggtttggcttcatctttacgaatgtctaatgctctgatttggcattgtctgcaattgtggtgcagtgcaactgccttacatttgaggga

SEQ ID NO: 115591 - DNA, 601 bp, Physcomitrella patens
  Intron number 3 from transcript Pp1s285_18V6.1 (locus Pp1s 285_18V6) derived from phytozome v7.0 (chr-ID scaffold_285 ; pos 239288 to 239888)
ctttagtttctcgcttgcaaggccttaaacgcaaggtatagttgtcgacatttatgtgagatatgtgtgcataggtcagtgctttctcttattgcttgagtttcacttttttcctggatttgaagatcctgatggctgtgttgatggctacgggttctcatttttgaattacacctgcaaattcatgttgatatcaggtgtattgtttacatgactctgaaggttgtaccatggatattgagtcgtgagtttatcaagtttattggcgtatgtatgcttgcacaaggaagtttgttctatcggaaataaaacattctaatatgtttctgcataggtcatgcattggccgacgtttacttgaagcggaatgacagtttttggttatctgcgtcattgtgtagtcatacttgtcgattaattctgcagtaggatgattctacccttgccttgtttggccagacgttcacaccacttctttgaagttgttgtgaaatggtacacctgtgaatgtgctgttcggagatgtatttatgtgttttattgcggaggtttgaatcgggttgcagttggacgagagcaacaaaggtgagcaagtgcaagt

SEQ ID NO: 115592 - DNA, 647 bp, Physcomitrella patens
  Intron number 2 from transcript Pp1s233_90V6.1 (locus Pp1s 233_90V6) derived from phytozome v7.0 (chr-ID scaffold_233 ; pos 588873 to 589519 reverse strand)
gtagtggaggtattagaagctttcatcatttgcttggaagaaccaagcagtgagtatgaaattaggaatattttctattttcgttggtgggtttctgctgctgtgtgaacaatgcagatacaactctgttttgtaagggcgtcgagatttgactcttcgttcttatttttacacttgtgaaccagctgttttagctggcattgtgctagaagacgtttatcttcggtttttgatgattttgttcataaatgtgatgaactagaggcagttggagttagaggctgtgcagttgggcagacatattctaagtcgtagttctagaggatctgacaagcatgcatgtgaggagatgaattcctcgcaccctatttggaacacatcattattagaatataaatctccgtatggcttctatattgatgtatgaagcacttaatttcatcgatattgggccttggcagtctctcgaggaatgtggatatgaaaattttaattattttaaaatttcaatttaattttccctctttctggaggtgtacatgtgtctttcagtttgttaacctcaaagacgatttaatatgagtttacctctcattttggagtgttttggtaatatgttatgcagattcggggaagaagtgtttttt

SEQ ID NO: 115593 - DNA, 830 bp, Physcomitrella patens
  Intron number 1 from transcript Pp1s65_300V6.2 (locus Pp1s 65_300V6) derived from phytozome v7.0 (chr-ID scaffold_65; pos 1740226 to 1741055 reverse strand)
ttaacaaaattcgttgcgtctgcgtgaaaattcgagtgagaaacctttcttttatgttgcttcagttgttggctacttgtttatctccagtttcagggggaggggggggggacgtggaggtttgtttcatagcgatagttgtgagggcgtgatcaggaccgaattcgtgacctagtggcgtgtgaggagagtgaggcgaatgaaaattttgaggtgtttcttactagggtttgaatgtgcgcatggattgcgataaatccaagggttgtgcggcgaaggaaggaagtggaactgattctgtccttgtttattgaggttctggaacctgcgaaggcactcgcttagcgttgtttgtgtaatgtttgttcatgaaggtcgtgaggttcatgagaataagcttaggcacgaatcttacgacccttgttcttttaccattttcttgcttcgttctctgcgtgcgtggtagattcgcgcgctttcgttggttgtaagagacattcttattttacgtcagaggctgtacgatctctgtgtcttcattctgctgcagtttaatctcagagatcgtcttagacgatttttagccactctaataaatttttgttcacttggattttatgctcttatctgagccatccgtgtttggtgtagctcattgcatcctctgcttgcggtgtgctcgatatagagttgtcagcaaaagatatcgcgttatgattgagatgatcgaatattaactggattcaattctttttgaatttttagttgatcctaggtaaatacttgaacgtgcagctgaagtgttgggaagtgaagaaaaacagatagtg

SEQ ID NO: 115594 - DNA, 622 bp, Physcomitrella patens
  Intron number 2 from transcript Pp1s2_811V6.1 (locus Pp1s2 _811V6) derived from phytozome v7.0 (chr-ID scaffold_2; po s 4966203 to 4966824)
gctgcatctgcttctggttgctggattgctctcaggtattgcgttgaagatttcatgttaagtgttctattccattaagtcggaacaagaatttccatattctctctatttttttgacaagtaacaagtcttgggagtaaattctgttatttaaggtcagtgcccacccaagcgaaactcacactttcttccgtgtatttctcctccattctctatcccaatcaaaatcttttcgctttagtcttttgaatgtgaccccaactacgatgtattgcccgaagagtgcattggtgacagctatttgattgatatcgttatgagtgaccacaatagcagaaccgatcagttgctctcctgcattgtgttagctggggatgacattcctttcgagttcgatttgtagcattgtgtggccagtttggaatttcttaggggcacgtgcacttgtggtactggagtaagttaatttttaatgcagctgttacgtatgattcgagtcagctttttgatttgagtgcttgctaaatctggttttgtcactctgaaagttttaaagcttgtgaccaagtttctgttcctaaccgtaggtgcaacagcagtacctttatcacaacaggcgaag

SEQ ID NO: 115595 - DNA, 496 bp, Physcomitrella patens
  Intron number 3 from transcript Pp1s2_811V6.1 (locus Pp1s2 _811V6) derived from phytozome v7.0 (chr-ID scaffold_2; po s 4966790 to 4967285)
gtgcaacagcagtacctttatcacaacaggcgaaggtaaataatccgcgtccctccatgtaccctacatctgttcttcatacgcttcttcttctcttttttatttctgtagttaaatgtagttaattattacgctagaacttctaaaaaacgggcatggagacaagaataaggaattcacgtcagaggttttgagtcagcgcgattctttgaaaaagttaatcgttgtttggactattgattgcacaggacgcctgtggtgctgttttgagccattctccttttgaggcattcacaaggaactcttcttgctctgaaatcgcttgttaactgggtttgtttaatgtggtgtaccccatgcgtagattgttttgagatcgacctgaaattcagttcagtgtggttagctcgagtcttcttttcgctttgatttatatgaagttttcataaatgggtgagcagaggtctcagaagcataaggacgaggactgcgccaa

SEQ ID NO: 115596 - DNA, 452 bp, Physcomitrella patens
  Intron number 1 from transcript Pp1s115_125V6.1 (locus Pp1 s115_125V6) derived from phytozome v7.0 (chr-ID scaffold_1 15; pos 769676 to 770127)
ttgctctgctcctgattcttggttttttgtttaatgtttttccctcctctcctcacttatttcatttccttgtttttaaattctcttgctctttccaatattggtgattgcttccagtcgttgcttgcttctggcacggtaatcgggacctatttggtttgtgttgagttcatcgtcgttctattgcctcggaagagtcgagctttggcgcggattgctggatttcggatttgatgttttgtgtgcgagttagggtgtttggtaattctggtgtggtttagtcggtgattgagcttctgattgtgcgtcggagtggattttttcttggttttctgggctgtgaggagggaggttttgattgtttttggtgggttgtgggatttggggtgccgtagatgttttaatccgcgtggacgtaacatctagtgtggtttgctgaaccaactaacagg

SEQ ID NO: 115597 - DNA, 876 bp, Physcomitrella patens
  Intron number 2 from transcript Pp1s193_64V6.1 (locus Pp1s 193_64V6) derived from phytozome v7.0 (chr-ID scaffold_193 ; pos 684156 to 685031)
ccatcctcatcagtgactactattctcaagagaaggcaagtgtgttatcaagacaggcctttcgttttgtttgatcgtattctcttccttataaccactaggttatcgccacgcgagtagtcaagattgatcgtttgtttacaggtagatggctcttgcatgtttagctttataatctctaaccgctgatagctatgtccttttctatttatgtttacatcacagctcttatggcttagctgtaggaagcacatacttcgacaaacaagtgatcctgcatcttataatttcgaatggatatgatttttgtttttgttttagtttgtttcttcttcgatgtgatatcgaagagtgaacagccgattggggctatggtaaacacttatagtctttcgagcctagagttctgtaggttgcaccaacataaaatacctctctcgtcaatcagacaccacctttgatttacttatcaaataagcaattaaatgataattcagttcaaatttcatttttgctcctaccttagaatcacttcgttcatacagcttcgatttacggaaggcacatctttaggtctcgttagtaggcactagttaggaactggttcccttcgtcgggttccaaaaatgggacgatgctcgtcacttcgatgagagtacgaaaggcacgtttgtggatctttaaaatgaagtttggaacactttcttggtgattttcttgtgacaggattttgcgtcctagtttgagtatgtaaagtacttgtctccggaatattttatacctttttaatggttgtgttcaacaaattaagccatacctttgaaatctgtgcaatcatgttcttccaggagccaatcaagacgatccagtttggca

SEQ ID NO: 115598 - DNA, 635 bp, Physcomitrella patens
  Intron number 1 from transcript Pp1s58_245V6.1 (locus Pp1s 58_245V6) derived from phytozome v7.0 (chr-ID scaffold_58; pos 1518264 to 1518898)
cgttcgacgaagaggaacaagtgaacccattctcagtaagcatacatacatgcagttcaggttctgcagctttaggaggatattttcactatttgttgattcatcccaagggctcctcacttcattttaattcaaaagatttatttatttattttttaacgatagtttagagttcttttaagaaatgtgtttcattaaacgtggtgtgctttctagatatgaactgcgtcgcaaatgatatcttcttattttctaggtctctgttcttcgggcgtttttagagcataatatctcttgagtttccgagaacaagtcgaggtggaatgtcttgtacttgatagtttcttagtaaactacgatgctgcatcgagagcgatggcatttcgtttgagtgctgagtaccagacactttattcaacgctttctttaactagaagaagagagtgcttctcgaatctcgtggttatgtacgtttttatttgttttttacgtggtacctcagagctcagaaaatgttcgcacttttcgttcagtgatttagaaacgtgaatcactaaaagcaaaatttacgaagcattggaagatgtgtcaatgctgcagaatcccgtggtgagggcgcaggttgggaagccatc

SEQ ID NO: 115599 - DNA, 631 bp, Physcomitrella patens
  Intron number 1 from transcript Pp1s212_36V6.1 (locus Pp1s 212_36V6) derived from phytozome v7.0 (chr-ID scaffold_212 ; pos 191345 to 191975 reverse strand)
ttcttgcaatcagtttcagtatctggacccactcggtaacttctcacacagcttcttaatctcaccttcaattgtgtgctcacatctgtgcatcttttttttgtgtttttccacagtattagctgcgttggttagacagcattctagaatttgcttggtgactttcatgtatcatcttcaacgcctagattgcctttttcaatgaagttagtgaaaccgtgcttggtgtttagatttgagtttcagatatatggatagtcttgtcgtttttccctgacatttggatttcagccatggttttgatgattgtggtgaggaacattttagaggttcatgctcatgaaagggtcttggcttgtcttgtgtgaagagctgctgtcgattgaaattcagcttcaatttggactttgttcttatttgtgtctgtttatttcttgcgaaaggtgtccagttgtatcgttccgggtagtctactacgcggagcacaatcctgtggtgacaattctatcctatcccatcttgcagtggtcagaaattgaaggtctttgttctttctctgcggttctcacctgtcaccatctgcttggatgttatatttcttcgttgcaggatttcagttttaacgacagct

SEQ ID NO: 115600 - DNA, 484 bp, Physcomitrella patens
  Intron number 2 from transcript Pp1s111_34V6.1 (locus Pp1s 111_34V6) derived from phytozome v7.0 (chr-ID scaffold_111 ; pos 178885 to 179368)
acacacctgcaccacttcgagaatctttgtacaaggtctgtagccttcctttaagttttgtcgaaaatttcgtgttatcaggagcacagatgtctcagtggctgtagtcagttactgcagttccctgaaatttctttgctgcattgaagaactttgtttcttcttggttttgtatgtaccaaatccagataacaaagcccataatcttttaggcatttcagtatccgacaattatttatacatgtaattattttcacctcgccaatgcctcgttgaatcttagagacttttcatgtgaatagaacgatgagacatcacctagttccagattgacttctgtgcgatgcgtatttctcccgtggaattttaccatcttgataccaaatggatgcctttcaatcagacgcacatgcatgtgtgtcctagtgtttgtttgaatttataattttactgctgacactgtgtactgttctaattcagcctt

SEQ ID NO: 115601 - DNA, 710 bp, Physcomitrella patens
  Intron number 1 from transcript Pp1s219_98V6.1 (locus Pp1s 219_98V6) derived from phytozome v7.0 (chr-ID scaffold_219 ; pos 584815 to 585524)
cggtgagagatctgtgcgaagatctgtaggaaaacagaaacgaaaactaaaggttatggtagtgtcagtgtcttctctgtgtgtgtttgtttataacgtagagcagctgtagtttagcacttgcaagcttttcaggagcttgctgaggttctcttgtcagggaattcaaggcaagtgaaaaagcaggagtaatttaggaggtccagagcagctgaagaaaagcatcacaattggtctacacgatattgaactggcttaattactctggacaacttcctgtctaattcatgcgtccattgtgatctctgcttgttcttctgcacttaacaccagtgtgtgacccttgcactagaatttgtatttttggacaagatcttttttgctgaggtttagctgctgattttctttgaacatctctgttaatggcgttgtaaatttcccacactctttctctgtccagtggatgtaattgggaaattccaattcttctctgctacatacaagcaggcgtgggattttgtgtgagctgtttactttgatcatgtttgcgaatgggcttcaacacatgacttggatgtactcggcagcattcggctccttagatattctgcaacatcttctttatttgctagattcagtcttctgaacacgttacaccttcatctgtgcttgcagacagcatttgtaaatttttgtgaagctccaagttc

SEQ ID NO: 115602 - DNA, 621 bp, Physcomitrella patens
  Intron number 2 from transcript Pp1s263_59V6.1 (locus Pp1s 263_59V6) derived from phytozome v7.0 (chr-ID scaffold_263 ; pos 365899 to 366519)
tcattgcggttcgtgcttccaacccattctgtttctgtgtgctcctgtttgtatttgggcttgttcatacaatgtttgtggggctcttaatgttagcagcacaaggatcacgcaagtctatcttcgcgatcaatctgtaaatactctaggttctttaggctacatttaatgagcttgacagtccttgttgatagagcaacaaaatgaatcataaaatgcactactacctgatgacgtgagaaatccgcgcagggctatttttcattcttacctttcatggttgctgatagaagtttctcggtttctcaccctcattcagtcataactttggtagtggagttgtaaacaatcaaattggaagagacctaatagtttagataaacaatacaatttaggcggcttgatatcttcattactatctcgtacaatagaacattatttccttcaagcgttttgttttgaacattaaacaagtttagcgttggtacaacaggtggctttaccgattgtttagctgacaatatataagttcccgagttcttagaattggtacacgttctaattttaatgttttctttttcttttcctgctgccatgcagtccggtggcttcactgaagac

SEQ ID NO: 115603 - DNA, 545 bp, Physcomitrella patens
  Intron number 1 from transcript Pp1s39_139V6.1 (locus Pp1s 39_139V6) derived from phytozome v7.0 (chr-ID scaffold_39; pos 570924 to 571468)
ctggtaagtttgtgtctggtaagtttgtgtcttgtggggatctgggttgttcgtcttcgtggtatttggggtcaatttctgcccaggaatcgttgtggaagaattgaagtagcactgtataacacaccggtcgcacttaaagaacttgggttgttttgggttgattgcgacctgtatctttctttcgtccttccatgatgtgcaatggcaattagagttcgagggagggtgttaacgattcttcgcctgatgccacagtggcattatggtgactacttccatcgagaaccttgagcttgctgcatttcttctcttcgttgtgacatggagagagttaaagtcttgtgaataatcgcaatgtctccacttgattcttggctcttgaaatggagcccatcgcatggaagagtaaaaatcggatggtatcacttcggagaaagggatgcttaaaataaagtacagcacggcattagaggactaaggaatagtaaggtttttaatagcgcactatcaatcaaattaaccggatttgtgtgcgcaggaga

SEQ ID NO: 115604 - DNA, 812 bp, Physcomitrella patens
  Intron number 1 from transcript Pp1s100_136V6.1 (locus Pp1 s100_136V6) derived from phytozome v7.0 (chr-ID scaffold_1 00; pos 653587 to 654398)
ctttggcccagaaggtgaaactagggttaaagcaggtacactcttccttcaataactcttccgtttttgtggattgtattgcaggatggcatttgggtctacaggtacatagttgatctctccggattgttgggatggtgataatcgtctgatctgggttgcagttagttacttggcactgatccctgttcttcgcattccgattctattgtggtgttaggtgaagttcggtggtatagtttgggtcttatattgtcaaaatctcttttgcctgaaaacaatcgttcccatgcttgctgcctttgggaaatgtactcgagtctcggattgctatctcgcatcggcagtgatggttagaagcgaccaccgctggagtttgttattagtgacctgtgcgtgatcctgtgtctcgctatttgacaactcaagcattctgtttaatattacttaatgaagaacagatgatgtctgaagtatactgatgcttgtcctagctactagaaatgatgtggtgggaaccatggcgcctctgttttgcatcttcagctgaaatagagaacctgctacgtgaacctattgtgcgatgtgacggattttagttcataattcatactcgggcttctaggatcaaagaatagtttcgggaatggtttacgttgagtctttcctcgttaagttctcgatatattgtacttgaaatgaagggactcacaactaaatttgagatgaatatatgggtgtcacgcatctaacatttacttgtgcgaaaatttgcaggcgaattatttactgataagcttgttaatcgaccg

SEQ ID NO: 115605 - DNA, 759 bp, Physcomitrella patens
  Intron number 1 from transcript Pp1s201_39V6.1 (locus Pp1s 201_39V6) derived from phytozome v7.0 (chr-ID scaffold_201 ; pos 161068 to 161826)
gctgggtgagatcgtcaccaccatcccgaccatcggtatgttttctttatttttatttttttattttatgtttgtttgtttgtttgtttgtttgtgtggtgtttcttctggcggagtttcgggagctgagtaggtttttgaagtgaagggttggtgttgggtcttcgtgagggaacatgattcggcgtgaatcgcagagccgcatcatcgggtggtgtggttgaaatgatttgaagagttgatcccgatttgagtcgttgtgagagctgttgtttgtgccttattaggggtttcttgatgttgtggtttatggtcttctcgacgctgctgtggtcgtttttggttgattctttgtcttgttaatcgagtttagattcagagtgtggccagctgtgcgggaagccagtgcggtggtcaacagatctgatcttatgtgttgcaccttttaggcgatcttagcctttctcccatttgccctttcgacatgggatgagcttcggcgttcttgtagtttgcttggacataggtagtggttatttgctggtcttatttgattgaaatagatggatcccgccttcgacgtgttccacagcataattcaattgtgcacttttcatcctgtggcgatttaggtgtttgattcaagttgaacgcctttttccaaattttcttttttgagatgaattactcgtgccaacagtctcttgagatgggcttgatgagaacaacgttgtgtgcatgtgtgatacgcagggttta

SEQ ID NO: 115606 - DNA, 386 bp, Physcomitrella patens
  Intron number 2 from transcript Pp1s178_95V6.1 (locus Pp1s 178_95V6) derived from phytozome v7.0 (chr-ID scaffold_178 ; pos 677582 to 677967)
ccatacctggcactgttctgatttatctcttgctggtgagaaccctggttttctttttacttttccattatggttttgaggccaagcaaacttgattgttgtgtgtaatgagtgataggcagcgctctggaacaagattttttagaggtatttatcttaaaggtatagtgtaaaagttcccacttggaggcacctccaacttctttactaatgaagaataaactaataatggtaaaagcagattattattgtacatgttaatagtttcaactatggtctgactcccgcctacaatcaacccctagagtagatgttcgggaagatgaaattttgaaatttttgttcaactacatgaataatttgggtaggtcaaaaacgaattcaat

SEQ ID NO: 115607 - DNA, 894 bp, Physcomitrella patens
  Intron number 1 from transcript Pp1s59_205V6.1 (locus Pp1s 59_205V6) derived from phytozome v7.0 (chr-ID scaffold_59; pos 1051074 to 1051967)
gtgtgtgatcagtgtaagttttttttttttttttttttttttgtgggtttctcaagtattattagaagttgatttgaggtttcggaatttgtatgtctttcgagctccttagggttacgcctggtgattcatataactgacccgaaagtttggattcacggggtttcgtggctctgatgctcggattattagtcgagctatgccactgttagtgcctgaatgttgttttgtttgtttgtttgttgcttttgagcgtgggtggaattctccctgaattgcgtggattacggctgatcctcgacccggcatttgtagcattcagatattagggttcgtgttcaactgtgcagagaggttatcattggaggtgtaagtgtggtgattatcttcaggtgtcgaggcctgcttgctcaggttatgttggactggaaaatcgcgatacgatgagttgtttttatctcatttcgaattcgagtgggatgattagcttcgtgcacctagctgtgatatgcctcctgctgatgtcatgtactagttgtaatatactttaggcttttcgccgaaactcctaaagatcgaggtgaacagttgttttattctgtttgcactgaagacagacttagcagagctcatacctccaattaggtgtgtctgttcattgtgtactaacacaagaatgtaggaggaacttcggcgcctattttatgtttatttagcttagaaaattggcaaaattactcatctgctgatttgtcaaaccagaggatgtaagcctatttttaacatttatggtgtcacgttgacatttttatcctaatttctatttttgaattttcgtggagttgaatgttttaatcaggtcagaagaagattacgaaagtaagagtacctgac

SEQ ID NO: 115608 - DNA, 432 bp, Physcomitrella patens
  Intron number 1 from transcript Pp1s447_16V6.1 (locus Pp1s 447_16V6) derived from phytozome v7.0 (chr-ID scaffold_447 ; pos 57947 to 58378 reverse strand)
gttgactagtgtacacccggtatggtgatcgctggtcgtcggacaattccttaagcacacaatttgggtgtttacagttgtcttggttgtgatggaaacttgatctgttattgttcagtttactggttgctaccagtggcttacaatgtgaaaatcttgagtgacatctcatggattattctggctagattagagttgtattctttgtatcattgattgtccaggacaggaaagggaattgagagagtcaacgtgtccatttattaacttcttttcctggtcaagattgcttgtattcatgaatgatcgtcaggttgctgttaatctaaaaatgatcttcgtttcattatattttgagtgttcatctgattccagaacttggttttgggagagtcttaaatgacagaagtagaaactctatggtcaaacagg

SEQ ID NO: 115609 - DNA, 986 bp, Physcomitrella patens
  Intron number 1 from transcript Pp1s41_309V6.2 (locus Pp1s 41_309V6) derived from phytozome v7.0 (chr-ID scaffold_41; pos 2088288 to 2089273)
acgcctccgtaatatcttcttcttcgactactactagtactgttcttctattattattcattattatttcttgccgattcactgttgtgtatggttcctcatgccaccggaaccttcgtttttggcttctcgcagcgctctctgtctctctcttagtcaaaacctgaatcgacaccgcttgctcactcaatcgtcgccttcttcccccagctggtgtattgtggtgtagtggggggtttgatctgtagtgggtgctgtcctgcgaggtgggtttttcgcattgtgcactctctgggatggtttcgtgtgtttgtttgtaaggatgtgtagttgttaaggtgaaggtttgcattgctgtgttgggagcgttgttgggtgtgttttttttgtttagttttgttttctgtttttgtttgtgggggatgagggaatggcgattgaatagtttgagggatttgggactgagctgtgctggagttggcttcagatttgttgtgtgggtgcgaatttccatgtctttgatgagacaaaccgtctgttctgcacattgtcatcccttactaccgttgtttgttgcatcttaaacatcaatcggctcctgtttacgattcgtgtcctgggaagattgggttttctgaagttgactgttttgttcgagcattgcgaacttttcttagagctgtcatactcaattggcacagggttgtgaatttgatccaatgtttcgtggtatgatggaggagggtttggtgatgcgtttgattccttgcttgttcaaggtcagggttaacagaggttttgtatcgctagatttgcatcgcgttggggttgctgacctttcgatatcatcgtgttactaccgggagccgtgtcattgcaaacagtgcgttgattcgtgattgtttgttggttttgaattttgactgctcgttttcgaattctcctaggaactggttttgactcgcgcatttggattcgctgcagga

SEQ ID NO: 115610 - DNA, 732 bp, Physcomitrella patens
  Intron number 1 from transcript Pp1s70_114V6.1 (locus Pp1s 70_114V6) derived from phytozome v7.0 (chr-ID scaffold_70; pos 637608 to 638339)
tccaagaccaagctttagcagcgtacgtcgcgattcaagtattttgctttcaactgcactgaaacgaccataacttttcttctcagcatctcttgccaagttgctggaatataattcactctttgagtctgtttgtaactaattggcgcactttttcctaagctcttgtagcaggcctcgtctgattgagttagtgcaccattgtccaagttggtgtcagaacgggggccttcagtttgtctaggagagggctgcagctggactaaaacctatggtttaatgggagtgttccctcgagtttgttgtggcctctgacgtttgcgtctatttcactaggaaagttcttgcatgatttgcgtaaaacgttcacacatatttgagaagacttatgggcttaagcatttggagaatgtttgggttcttcggaaacttttttttttttttgcgctctccctgtttacagcgcagaacgtgtctttcaatgtcaaccgtgtgtcaaaagcttcttcatttttgtgcttaagacttccgattcctaggagtgacagaggcattgtggtttgaatcaaagtgagttcgcattctgttcaatcggtgcttaggacgttgattgctcttccaaagtccgaggtgttccatatcttttattttatttcaaagtttttgcctgaagtcgtcgcgccataacaaactgcagtaatcactcatcttttgggggatcacgacttttat

SEQ ID NO: 115611 - DNA, 748 bp, Physcomitrella patens
  Intron number 1 from transcript Pp1s87_129V6.1 (locus Pp1s 87_129V6) derived from phytozome v7.0 (chr-ID scaffold_87; pos 956788 to 957535)
aagaacttgcacgagcgaaagctaaggtattgaggcctgttaagaatccttggcttctcacttcagctgcccaaattctctccgtctctttcctttatgttcttggattgtaccccgagtatttgattatatattttgtgtgcgattgtgcaagcccttgctttaatttaatttaatttttttgataggtaattttcacttgcacattttagataagcattctcttacttcgcgaagatgagaagctgtttctattttcaagccacgctcaccgggccctcttgctccgttgttacgagttgcagctggcacttgcttaattcgccagtttttgtattggtgaaacagctgctcaaacttgatattcaataatctcaaacgcagtttacgattcgattgtaaagtagttgatggtattgctctactgcagtacaagtcggttgaatgttacagcactgttatccctgagcctgtaggatccttgctcggaagtttacgtcgttcatgtttgttattgagttgatcaaagtatctctcaatgtttatgccagtttcgattgttggaattgcaaaggttgtgctcgagaaacttttgcattggagtacaatcgggcaaaggggttcttcttgtcttggacgataattgctgaactgctttcgaacgtagtggttgtggattcactgaacactcatggtaattggttggttgacttcatcagacgttggtcgttggagcggaagctggctg

SEQ ID NO: 115612 - DNA, 850 bp, Physcomitrella patens
  Intron number 1 from transcript Pp1s51_222V6.1 (locus Pp1s 51_222V6) derived from phytozome v7.0 (chr-ID scaffold_51; pos 1440240 to 1441089 reverse strand)
gctgataacgtctgtggattgtctttgctgttcaggtactctttcacaagccctctgaagttggcctcaactattctctgcacttgttaaggtcaagtagaactctctcattcgaacactggactgaatgaatctatcgatttctgaagctgcagcgttccgtatgagttatagtctctgtttcctacaacctcttggctccctttcgctgcagcagcgctgctacggtagggatgatcttaaggacaagggagttgtgttgaattagaaacatggcatttcgaagagtctgatgatcaatgactggaaattgtagggaatgagacaaatttgtattcactatggcctcagtggatagtgaaatgatctcgtctgccggttgagaagcattttaactcaaattcgaaatttgtatagttggactgtccatttcttggatttttctatgccgggatgctagaagaaaattctttcgatcagcatgatttgtacagttggtttatccggttgttatcgaattagctgaaatctgttttaaatgtactgtctagtgcacgcatgtcatacagcattgttttttccggcacacacggagttcacccaatgaattgaggcatacttactagtttgattcctacccgaggtgaaccgtcaactaccgaggtgggccatgctgaagctgtttcatacagtacttagaaaattgcgatttgattccgcgggaaacttatgaaattgttgctatcggtgtatcagctatcagcagcatcacggactattgccataattccaacactccgaggctggtgagcttgctgctgcctgtggctgccttcgattcgccactctg

SEQ ID NO: 115613 - DNA, 848 bp, Physcomitrella patens
  Intron number 1 from transcript Pp1s213_95V6.2 (locus Pp1s 213_95V6) derived from phytozome v7.0 (chr-ID scaffold_213 ; pos 535000 to 535847)
tgccctctggggcttggcgtggtgaggattctgaggtgagtcttggtgtgttctcgaagaatttggccctcgatttcgttgctgtcgtgagagttttttttttttttttttttttttttttttcccccctcttcgtcgttgtttttgtggcgagattgtaatggtgtgggatttgtgtgttgttagttctagtcgtggtttggagtttaaggatgtcgtgctcagggtacgttttatgtggagttgtccctcttcttgagctcctctttcttattcctagcgattattaatgggattttttattattagtaataatcgagattctgtcggcacgcagatcttttcattgttgattgtgatggtacttttgccagtcttgtccgtgtgtcctcgtcactaaatctcgactgtgtggagacgttgttgaaaaagattctcatgcagatgtaaactgtgcagaatggttacgtgtcatggatattttcgttgatgaagccaaggaagtgtctcattgatgtggtatgctgttcctctttgattagtgtttcggaaagggggtgtgagattcccgcggtatttttcgggaaaggggtatcgactttcatcgttgttgtctaatgtcgcagaaaatacatcttaaaattaagtgagtcgattgttatttcagaggtacaagtcatcttttcctctgcacctccctcttttaatgtgtaggctcagtttttattttgtattataaaatttctcatcaagtcacactcatgagaatcgggccagattttggtctcagctgtattctgttggtatttttagatcattttaccactggagcctatattttagaacaa

SEQ ID NO: 115614 - DNA, 953 bp, Physcomitrella patens
  Intron number 1 from transcript Pp1s325_48V6.1 (locus Pp1s 325_48V6) derived from phytozome v7.0 (chr-ID scaffold_325 ; pos 251027 to 251979 reverse strand)
tggtgagttgcctcagagttagttggagttcgtttaataagtcattacacaccttcaacttgttttctactgcttctcttgcacagtgtgccgaatttttctgtttctgctacagcgtgaagaatcggaatgtctgtttctagtgcgggtcacaatatcgaaagtgctgcgatagtttatgatcaagcagtgtgttacaatgtaagcttaggccgggtgcttaagccttgagatcctttggttggagatcgctgatagttttggtttgcagacacctgagtgatactagcaaatcactcaggaatctcactatctgaattattgttaaccttaatccacttctcccatggcagcatatgttgattacaatttttggtttttatgtgtttttttgtggcaaaaaaaacttcaattgatgttgatgatataacaccagtgaaattgttgaagccataaaactggatccattctagacgaatcagggacagttgctcttacggctcgtccccaaatcgaatggtcacaaatcgcaaacgctctcaatcaaactaaatgttcatttaacctctgaaaacaccaaaagtttttttttttttttttttttttttttttttctatttgcacccatcccaggattagtaagatgattgtctagtgcaaataggcagtacgagtgaggagcaatattttctcttatttctctagatatgagaggtgtctggtatttatgctgttttgcaatggacagtatggtccaattattgcttagctccagtcatacacttgaatcatgtatattgaagactttcgggtggggtcaaagctcctagctcttctattaattttcagtgcatgcaggcccctactaattttggaaccgaattctgtttaagtgtgatagaggagttctcaacttctcacaaggatcctgtcttgtaggttcttgttctgct

SEQ ID NO: 115615 - DNA, 708 bp, Physcomitrella patens
  Intron number 1 from transcript Pp1s35_329V6.1 (locus Pp1s 35_329V6) derived from phytozome v7.0 (chr-ID scaffold_35; pos 1850294 to 1851001 reverse strand)
tgttgctttgcagggttttgagctgaagggaacaggtgaggagagtgccgagtgccggtgattgattcggagactgttctgtatccgatacagagcctctctcgattttatctctgttggaatgtcaaatttttgagagagttatgcggttgccagtgttaatgccagcatatcagcttttcacgtgtactgcatagttttttttttttttttttaatttaatttaattaaaaattttatcatttattcgtagttgctactcacagaagatagtcatggtcttctcgttgctgtaatgtagatgaaggttgttccttcgtttatgtagtcgtcctagagataactagaaacgttctaggttttgaagttatttgattgagaatttccttccagtgtgggaaggagttggtgctgtgtgttttggcattactgcatccgtggcttgggcgaattgtgtctattgtggggtcggcagaaaaaagttgggagagatagaggctgtctttaggtttttgagatcttgatagtttactgaattctttgtctcttaaacttatgaaggtgttctaaattagtgaatcatgtaacgtgttttgagattacagcatgttaaaccttgagacttagagggaaactagtaactcattgaaatttgttccctgttttggcgtagagtatttggattaggaattgtttgaacgccagata

SEQ ID NO: 115616 - DNA, 570 bp, Physcomitrella patens
  Intron number 1 from transcript Pp1s141_67V6.1 (locus Pp1s 141_67V6) derived from phytozome v7.0 (chr-ID scaffold_141 ; pos 514147 to 514716)
tcacgcacgccaaggcacatcttgaacgagcggtaggtggtttgtgttttggtgcatctattgggtaaggcagtttttgtgagttcttgcgtaatttttcttataaattttcgtgaagctcgaaaatggaaccttagagactggaattgtgtctcaaataatttcgctttttgacgctgcgcattttactgtttcggtgagtgatatttgaggtgaagggaattaaaacttgcaaagttcgttttgttcgtggataatgaattattcatatttctgaacggcagtttagatcgaataattatttgtcaggtctcggcgaagtcagtggtgtcgtcgagtgctgcccctttaactatctgtgcattggggctcaagtacaggacatatttcaaaactattggtctgtagcagtagttgaaaatttaggtttgtttgcttttgactacacgttttttcctgaagaattagccgactgcctgtcttttatccgaagctctaagtggccctttcagtttgtgctttgttctggttgcagcaattgttattgaaacaaattccaacttgttttga

SEQ ID NO: 115617 - DNA, 632 bp, Physcomitrella patens
  Intron number 2 from transcript Pp1s74_22V6.1 (locus Pp1s7 4_22V6) derived from phytozome v7.0 (chr-ID scaffold_74; p os 150120 to 150751 reverse strand)
gctaacttggacacagccactataaataagtgagtcgtttcccttgcttacaaacggcagaagtttgcaggagcttcttttgatttgttcgtttgttaatacatgtactcaattgcacttttactcgagatcaatgaaaaccattggttcattgattgctactccttgtcgtaggtagaagttgtagtgcaaatgcgtttggaagtggtattcaaaattacacgcttgtgtattgtatacagagaaaccttgttattttgatgattcgcgtacttgttagatgacagttgcatgcgatctcgaagatgctctcacgttgtattttcgtaatgacgtacggggaattgatgaattggacgagtatttatctataaaggatgtccaaatcaacctctagattgattggttttgcatctttctagagctggcctcttttgttaattttaatcacttgaagttcggggttggttattgatttttttgcaagcaatgtctaccttttcttcctcaatcgctcttaagtgttggagtgtgttcttgcgtgactgtaattaggcaggcaatcgttcggattagtgacatctgtgttgtgaacagagcttttgaggggcctaaaaagccaccgaagaagg

SEQ ID NO: 115618 - DNA, 837 bp, Physcomitrella patens
  Intron number 1 from transcript Pp1s51_244V6.1 (locus Pp1s 51_244V6) derived from phytozome v7.0 (chr-ID scaffold_51; pos 1549493 to 1550329 reverse strand)
aacgaaatcatactttctgcaaatctggtgcagtggtaaatgaatttgacctgttatggtatattgtgagctttaagatgtttaagtctgattctgatagatttctttgtttgcttttattttgtgacgcattcaaattagtttggtatttctaaaagctgatggtggctactgttacgattataaaagtgcgttaaattattttctcttctcttattgaggaaaagaagggtcgtcataaggtgctctgtagtttggcacacctggtcgcagtaaacgatgaggatgagttcatgtaaaacaagcgtggtaactttgcttgctttatgacacagaatcaatcggcaaacttgaaagccgtttttttgggaacttttcaccgaattcaccgtatctcacaatacactccataactaaggtgttattcccatcaatcgccaacattccttcacgtttcgtagccagggtcagttctagcagcaagtcattctgtgcaacgtgctagctgataggcgatttttgctggcattatcctgttcccgtttagccaagcagaaagacaatttttttttaatgaagtcttgttctgatgcacttcgttctaatcggatcagtggctttgttttttttttttttttgcttggtgtgatttttgagggcattatgttgaggaaattgagcggagcgttgtttctggtcattggacacaagggagctctctgcggagatttttagggtttgagcaaaagacgtgattttggaatgctggattgttgataagttgctttgatcttgtttgtagctgtcgttgaggtctgtgggattggaactgatttc

SEQ ID NO: 115619 - DNA, 708 bp, Physcomitrella patens
  Intron number 1 from transcript Pp1s59_173V6.1 (locus Pp1s 59_173V6) derived from phytozome v7.0 (chr-ID scaffold_59; pos 898218 to 898925)
ttttcagagggtaagttgcagatggttcgatcaactcaactactgatcttttaacttaatttagttttgccttacattttatgcactctcacgactgtagacttactggaggttacagttttgcattgagtttatttgttgatcagcatttcccaaaactggcgcggagagactgacatggctcggctccaattttctaacaaattttttgtcttatttttgcaattgagttcgaccattggatctgatgtagcgtatattctctgtccagctttgaaagccaagatgtccttcttttctttcaaattctcttttttcgatctttgtttagaaatgggatatagcttttcatcaaaaactctgatgcccttggttatagttactccttcactcaatcggaccaataattgacacgtaaagatccttgagtcttctctagttgcactaccgaccacaaactaagctgtctttcgcgtcacattatcgatcacgccatgctgtgtattattccatttccatgccaggcgagcttctggagggctgcaagtgggtagtgaagacaatatgaagcttaggttgattaaattcatagaaaatatggaattttgagttttcgatcactctagactacgttctgatagttgttcatgctgcttgaattgtacttgagcagatttgataaggagttgaacaaagaggtggcaatca

SEQ ID NO: 115620 - DNA, 341 bp, Physcomitrella patens
  Intron number 3 from transcript Pp1s148_36V6.2 (locus Pp1s 148_36V6) derived from phytozome v7.0 (chr-ID scaffold_148 ; pos 262069 to 262409)
gaacactctgctctagttgtggtgacgtatacgaggtagaaagcctcaaaattatttcaacttgaaacgctcttttgaatgctgctctctgtttttctccgaaggatatgacttcgatgtgaaagcccttctaatgtcttctcattaactaccgttttcggagcaactgtttgtgttgttagtagaactttaaaattgctgatttctctcaaacatgttttttttcaagaaatgtcttcgtagttaactgggggcagtgttttctgtgtgaatcgacatttgattggaatttgtattgctggccaggttcgtcttctgaaggacaaagatactggtcagaa

SEQ ID NO: 115621 - DNA, 908 bp, Physcomitrella patens
  Intron number 2 from transcript Pp1s478_14V6.1 (locus Pp1s 478_14V6) derived from phytozome v7.0 (chr-ID scaffold_478 ; pos 107753 to 108660 reverse strand)
tgcaggtgtgttgctgtgttgtttgcgctgcattttggtgtgattcccgcttgacaatgtgaattggtttcttttgtagtttgaatttggaagttggagagggagacttggaacggatgagctgtaggacggaatgcaatacgttattttattttattttatttttgcttgccactgtgcacattgcgtgtggatgcatctctctccctccgagtttctggcgttgatgatcgtctaatctctatctgttgcaaaagactaaggtatttcctcatggcaacagtcgcaagaaaacattcaatcagtaaatcaatcgtttcgtacttcatcggttgctcggatttaaattccaaccgataaagccagtggccagttacggctccttgcatttaggatcattcgcgttcactcacttcgtaaaggttttctctcgggttagacatctagatggtttggaaacttaggcctgtcacatttctagagcatggtttagaaattcactctcaatggcaattctactcagtagaccttgttctgtgaaaccctcttgaatttattgtttagaagtattactaattatctaatccatcagagcagtgccatctattgggagactggcgcagtatagtgcccggctattgaagtcttcacgtcgctgtaatagctggtagggcctttcatggtgttttcactactctcacgttctagacctttgattgggctcgattcgagactttcaaagttggcaacagagaacgtctgtgcaaacgtaatctttacctaatgcgcactggagaagctctgggtttgtatcatacatatttctgtcacagacgataatgtttttggcaatttcactcaaactgtggaccactgtttttgacagaacaaattggcaagtgagaaga

SEQ ID NO: 115622 - DNA, 665 bp, Physcomitrella patens
  Intron number 1 from transcript Pp1s265_4V6.3 (locus Pp1s2 65_4V6) derived from phytozome v7.0 (chr-ID scaffold_265; pos 29004 to 29668 reverse strand)
cagaacgattgggtattttagtttcgccggttagtttcgatgattttgatttgagagaaaccatgtgtgttttggttgtcttgaaaaggattttgtattcttagacttattgagcggtcgtgattgtgttagatcgtcatgctagtgagcaatttattgggcgttaatcttttcccatgattatctagtttgtttcggctgctcggtcgaagattttacataatagagtttattccctgttgggtccgcctcgaaacagatttcggtttgggcagggaggtgggtttagctttatcgatttgctagtttggcttccacctgcgtcactcagctctgggactgctcctttcgatcattttccagacatttgtgaattctactatccccggttagcccgaggtatcgtgtctgcatgtcaaccaaagcgtagaattgcaaaagtcgatggagaagttgccgagtacaattaacgcatggttacgcttctcctggagtggggatcgttagctcagagcttgttgaatgatttttgtgaatactctttgctcggtaaaattgatgctttagtccgaagttcagattcattcttcttaatcgttttaattttatcttttaaatttttattggcagacatatcttccaatccactagagtgaattcctttg

SEQ ID NO: 115623 - DNA, 886 bp, Physcomitrella patens
  Intron number 1 from transcript Pp1s269_38V6.1 (locus Pp1s 269_38V6) derived from phytozome v7.0 (chr-ID scaffold_269 ; pos 239947 to 240832 reverse strand)
ccctcgagtgtcgtcgctgagcacgataagtataagtatgttaagctctcgctctcttccttgaatcgctggcgtttctgtcgtggagtctatgttctgatttgtgagttggtgtctgggtttgatttgatcttcatcgcctgtgtattgagtgcgaagccatcttcaggagctagatagaaaacaggaagtctgatgatgtttgaaaagttcaatcaagtgcttccttcattttctgctggttgtgacgtcgtcctttgtcctcgtctatcataactttcaattgattctgctattaaagagcattccagttctatcccctgtgaacctgtttttctttttctttttcttttttctttctgtaacggaggcgaatacaagaaagtttttgttacgatgcaaaatgccagtcaatgcagattacaatttgatggattttagcacaagtctaaatgttggagttttgctcatcatattgtttgacaccgaagatgtagtctggttagatgcaacacgaatttttcatcgtttatccttggtcttactgtcatgaacagattgtcgtttccttccaattcttccaattattgacttaattcttatgaaaatagaaatgatttggagattacaatcatcggactgtcgtacccttccttttgttgtttcaatgttcgctgtagtaagagtatttctaagaagttaaacatgctgtctaactactttttaactggaaaaaggctagagagtctttgtcggagtctcagtcgaacgtgcaggtcaagttcaaatcttttccagtaccacacaagcagaactttttgaccagatggctttgtaattgtaatgtgcaggtatctttctgaactgctcgcggaaagacagaatt

SEQ ID NO: 115624 - DNA, 704 bp, Physcomitrella patens
  Intron number 2 from transcript Pp1s44_141V6.1 (locus Pp1s 44_141V6) derived from phytozome v7.0 (chr-ID scaffold_44; pos 937141 to 937844)
gctggcagcgtctatcatcagcaagtccgggaaaggtatggcgtaatgcattagtaggatttttccgtggtctttagtctctagtcttacagtcacacattacgggtacggcatcgtggacctgaagatgtgcctagtacactattgttgtgcgcaatcgcgtggtattagtcgggatagttgtgttcgaggcaaacaaaacgggggattatttagggttttctgatgtatggagaatggtcttccctagtggaggttctagaattttgtcaggattttgtggattcgtcatcgccaatgagaagaatctacattaatatgaatggagacgttgctgtgtagatcccgatcttgcacttggtttagtgtggcagtgttctagttggatatatagcggcttgggatataatattcgtttagaagcatagcttatggcagctgcatttgttttgttttgttttttttttttttttggtttttgttttttgtttttgaggtctgcgctttatttgttattaggattcgacacttgtttctgacactcagttggaatgagctttcttgcagtatatctagcttcctttgttcggaaagttgtatctttatgtatggccagtggtgttgtgggattgtcgcagaatctactgtacagctaaaatcttgaatatttgggtactattttgcagctttggtttctcggcagt

SEQ ID NO: 115625 - DNA, 359 bp, Physcomitrella patens
  Intron number 3 from transcript Pp1s113_94V6.2 (locus Pp1s 113_94V6) derived from phytozome v7.0 (chr-ID scaffold_113 ; pos 492271 to 492629)
tggcttctcagtccgtttttgttccaattgacgttgtaagtttgttgatctgtcaattttttgacattgccagttttaaaagcttagtaaactcattttctgcaccttcttcagcttgaggaagaggttagggctccttgcttgtgtggattacaatcaaaagtatttcttagttacggagactgaattcttttgtttcagtttcatttgcttctctttgttgtgaatcttgtttgaggcattagtaacgttgttttcattgcataatttgttcgattcattttctttggtctccctgaatgtattcgccggtttaatgttctccgagttttgcatgtctgcaggtgagtcaacgtttg

SEQ ID NO: 115626 - DNA, 884 bp, Physcomitrella patens
  Intron number 1 from transcript Pp1s246_124V6.1 (locus Pp1 s246_124V6) derived from phytozome v7.0 (chr-ID scaffold_2 46; pos 560352 to 561235)
ttctaatccgttccgctcttctggtcagttcgcaggtaattaatgtatacatatttgcacttatctccccctttctgtccctctctcgtgaagggtgttgtagtagcctggacaacctccagtgtatgaccttgatcgaagctccacagccaagaagacgagattgagtcggtttgtgtgtgttagataatggttgctgctacgccgtgaatgttgttcagagtggtggttgtggtgccgtagatcacatcatcggcaaccatgacacgaggtcgacagatttgaagacaggcttcttgaattacatgtgaatcttgttgccttcccgatctacggttgagctcgccagtgtttagttgttcatggaaattttggttgcttgcatgctttaatttacgcttgttcttcaaggaaatggtgaaaatttgatgattcaaagaaaaactttaaattttgaattaattttgactcaagctcattctggcttccacaaggattcataaagggttcatgtttcttaatttgtttattttgtgaggtgaaataaaacctctcgttttattaaaaaaaaacaaagaaaagaaaaaaaggacagattgcttatcaagttggaagtgggtgaagaagtttatattggttgagaaacttattcttgcttcaatccatctcataatttgtaacctccttcacaagtgtaaatacagatagatttaatttgtcacgtcatacgaaggaaatgatgaatggtgggattccgtgcgtggcgcaagttgagaggaataatctaaaatagagagaatggaaggctcccacccacatggtagcactgatcggatgtttgctttgcagggtcgggggactgtcggtgcaagaagcagaagaag

SEQ ID NO: 115627 - DNA, 940 bp, Physcomitrella patens
  Intron number 1 from transcript Pp1s26_83V6.1 (locus Pp1s2 6_83V6) derived from phytozome v7.0 (chr-ID scaffold_26; p os 748870 to 749809)
gctgctgctaagaaggccgcaggcgaaggtgagtgaaaattcagacgaatgtcagagttcctgtgaattctagtcgtatgtgctcagtgtgtgtgcgtgcgggtgcgtgtgtgtttttgtgggtgcgcgctattttatatggagtgtatacatcgaatttgtggaattcacaggtttttgaatctgcgctgtcatggaaatgcgattttagtacatggatagaacgtggaattacgttgttggtgtcgttttcagcacttggatctaggatttcgggacccaaaattgcaatgccaagaggctgtatgttctgctgaacggagtggtcaaatttgtctcagcatgaccgtagtcattattcgcagtagcgtcatcctgcaaaattgaactcacgaataggaatgtgtcgatgttgtcgacttctgggccctgctttgaattttaaacagcgtgttctttcaacagactgctggtttttacaatttagtttttagaattatgaacggtagctaacacagttgagttcataagaattgattaacagcttcaatgtagttctctactactagcaccaatctccagctataaattttgatttttatcgactcccttaggcgtcattctggctgggtcttttgaggcgggattcacatgcatgaagaagtgactcttcgatctggtatttcagtaagggtctcgcctttctcgtgccacgatgctagagctgttccttcgaaaatgtagtcttggttacatgtcacccttgacttgacaaaattgggcagattttagagtttattaccaaccgatgcccttcttcaatttcatcttgcaagagattgatggcatttctggggcatttggctatgccgtatttcggttaatttaatcatattctaacggacgttttgtttggcatgaggcgcaggtggttcgcaag

SEQ ID NO: 115628 - DNA, 520 bp, Physcomitrella patens
  Intron number 1 from transcript Pp1s104_75V6.1 (locus Pp1s 104_75V6) derived from phytozome v7.0 (chr-ID scaffold_104 ; pos 536342 to 536861 reverse strand)
ctcttcgcttgcgttgagcgtcgtctctcaccgtgcgtcttccaaacccccctcgctttctgttctcacattgttaattcagaacatcacattcgtgaaagttgcttcgtttttgtacattggtgtctttagggtttcagcgtgcggtggtcgtctacatttttgatgctgttgaaccttctattgcaatgacatgttttatgtctacactgttcttttttcattttcttctgtcatcagtagttttttaggttcccagccacgagggccattccgtgaatggactctgattacctcagccctcgtcattgttcttcgccgcatcgcttcgcgaatttgtataagaggatgtcaggattttagttgtttgattccactgcgttgactttctgcgcaccagttccaccgtatcataaactaatttattagggttattatgtgggctgatactgacgttatattctcatgtttatgtttctgttcagccttctcaaaagactttcaggatcaagaagaagtt

SEQ ID NO: 115629 - DNA, 668 bp, Physcomitrella patens
  Intron number 1 from transcript Pp1s49_246V6.1 (locus Pp1s 49_246V6) derived from phytozome v7.0 (chr-ID scaffold_49; pos 1876671 to 1877338 reverse strand)
gtggtgagtggcttttgttacagacagttgtggccttttttcgtggctctgcgaaagacttccaaatcttacatggtttagcctgacttgttttcttgaaactggcagtacgaaatcgtttttgtagcctacatgttgaaataatggagtaactgataatctgccgtcgctgacacgttccattatgtgattaatgccaattcaagtagtacctgtgttcggtaaagaatggtagcttgatttggtgaagtgtggttcaagtgagtagttacttaaagagttgaatgatttcatcaaatcatgtcggcgtctcccttccttcacatttcagaatagaaaacctcgtactaaatgtgatgtcccaaagaaattaactagtcattttcttttcggtttatagaacttcgaacacatctgttactgttcactagatgacgaacccgtaggaaagctcttttttacttctctaacctgattgcagaggatatgtgattgcgtgcttgcgttccccattgacgtatcgtaacattacaacctcatgttaagttctgatcccgtaacgtgctccaaaggttgtgtttgtcagtcttaattatttgaattattttgaagttttcgtgcactctattgcaggtgagagaactaggcgtccgaaggtgcaagatacc

SEQ ID NO: 115630 - DNA, 826 bp, Physcomitrella patens
  Intron number 1 from transcript Pp1s140_2V6.1 (locus Pp1s1 40_2V6) derived from phytozome v7.0 (chr-ID scaffold_140; pos 6032 to 6857 reverse strand)
tgcgtgcgagcgttcgtcaccggctgcactaatcggtaggcagattacgcaggcagttttgttttgtctacttctcttcctgattgatatcttcttgatgattcactgatgtattatcttcgctacctcttctcctcagaattcggcatatatgagtatgtaagcatccaccgggtgaattccacaatgcgaatggtattcgttccgatgaatctttccttagatgttgatgtttgaggagtttctcttgtctgctggcaataattttattgtaggttcggagacgcgcagttttcaaactaacgtgccgtcaaaggtacgcgagttcgtcgcttaatcgtgtattagatgctgagggtggagtttttggttttccaattgccgaagtggtgagcggtgttgctcattttgtgggctgaagagatctacttcagcaaacagaaaagtgtgagtaccatcatctgacaaatctcgatcatagggttgcccttcggtcgttcaaaaccttcgccgttgaagtgcaatgccagaaaccttgtgatgtttattccgcgcttcctgctaccacttatgttatcgatggtctcgctctttggtcaaatgcggagtctgaaatttccaaggtataaatgctaccctggaaattccagacctagaattacttgaaaggttgagtctctgttaggtttgtggtggtgattttctcgaagggtagtgagtcctaatgggactctcgattccattccttcattcaatatatttgttctgattcttacttggatttcaggaaggtgttgctgttacctatcgctctcgccgtgaaacc

SEQ ID NO: 115631 - DNA, 673 bp, Physcomitrella patens
  Intron number 1 from transcript Pp1s5_248V6.3 (locus Pp1s5 _248V6) derived from phytozome v7.0 (chr-ID scaffold_5; po s 1743842 to 1744514)
cgctttggcgcttggtctctcgctctcgttaggaggtcagttaattttacctcaaatcacctgcatctcagctacatgtggtttgtaattctgttattctgaggtgcgaggacaaattagtattagatactggctgcattgattctgatgcaagtattacagcttttctacagctggatcgaagtttagaggtcataatctgaagggtggcataatgtcacgctgattcttcaaaaaaaaaaatcaaaaacaaagaagaatagaaggaaagagacagaatttttcgtttgtaatatctgcatatcgggtgggatttatgcacatacagagatcaggagcatctctatttgcaatatacgctgtaatctggaatcatggatgtctatctcattctttatgctcattgaactttgtcgtattaatacgtcatgatttcagattgataagaaatactcgtgagtttgaagtatcttaaacaacaatgaatggtcgtaattcctgggaatctcttgaaaaggtttagcttaatcgtattcaatacttgtaatgatcctttaagtgcacttttaagatatacctcaacggaaatcgacaatctcattattcgaagaatctactgttacgtcaagatgggattacgtatatcagaaagtggtttgtagcaggtgtcgac

SEQ ID NO: 115632 - DNA, 461 bp, Physcomitrella patens
  Intron number 1 from transcript Pp1s204_4V6.1 (locus Pp1s2 04_4V6) derived from phytozome v7.0 (chr-ID scaffold_204; pos 13265 to 13725 reverse strand)
cggggaggtacatgtctcttccttttgctcttgctgtggaggtttttttatttcttatttttcttgaattgtctcctgatgttttcatccctcaaatactacgaggagataaacacatggtcgtgaaccctaatagcagggacacggttccataacattggctgggaactacaatatcgctaaactagatggatcaccagagaggttcaaatactcctcgagataattacaccacattttcttgtctcttagttttcaaggtcgtgagctaattgtaagtgtttgcggatatgtcaattgaaagtttccgcagacttgctgaatttgctatgatgaaataccgtaacaggatgttagcagactaatttggaggattaatggcggttggtttgatccttttgcgaccaccagtgtgcaagcaaaacacattcattgttggtttgactgttgcagggtgattg

SEQ ID NO: 115633 - DNA, 785 bp, Physcomitrella patens
  Intron number 1 from transcript Pp1s80_90V6.1 (locus Pp1s8 0_90V6) derived from phytozome v7.0 (chr-ID scaffold_80; p os 609625 to 610409 reverse strand)
tcaactatccccgaagaacggaggtactaaattttttcactgctttcgtcatgtagttaatatagccattcatggcttttggtccttctgtgagtgattttttaggacactataatctgtattcttttggtttactcatggggtattcggaacccaacctggggactattattgacaattcgaaataaccattcatttcgtaagtttattatgtgctagtacgtccggaaccatgtatatctttctgtaatttcgtcgaagaagacttcgctagctctttcatcagctactgggtttagaaacggcacttgtagggtgtaggttatgtgtagtcttcacagcctatcgagcggtatcagcagttcttacaggtctgctggtagtggatttatcgtgtatcatcaaggacaaataaacgactttgtttcaaagtgataatagtttgccttaagcaggaagtcgtcaccagcttccttttcaatcaggctcaaatctcctgaattacgttgtctatacgcagtcatggacatcttgttgtggacctctgctatttgatggttatttctgtcattgcggaataggaaaatgacattttttgtctgcgagcattggagtttgcatctaccgtattatgtgctcctacattggatgctccaagaagccagtttcttggtttactcatcagtgttagattttcgcacatgattcggaaaagaggttacgctggtatgtgacgtgtcagtttcttaaactagctcgttattgtgttattgacagtgcaacaa

SEQ ID NO: 115634 - DNA, 879 bp, Physcomitrella patens
  Intron number 1 from transcript Pp1s365_36V6.1 (locus Pp1s 365_36V6) derived from phytozome v7.0 (chr-ID scaffold_365 ; pos 336989 to 337867)
ggtccggtaagtgacatgcgtctcctctcatccgggtttcgcatttgttcttggattgctcatggtcttgtcttaacgagaagtcgcggaagtttgctctccttggtgtttaattcggaagaattcaaaagtcgggtgattaagctacctgcaggaatgcattcagtgcctttttttttttttttttgagagttcgtatgcactgttttgagccacgcccaatcacttgaaagccaaattgctcacggttcacgacctagaatttgtagggtaatgctgttgtagcttttttcatttttcatttttttttttttttttttttttttttttcccttctcttgctcgtcatcttctagatatgtgctgcacatttgtttgttttttatttttttcaatttgggagttcttcgcactccttgaatgcttggttgagctttcttggagctctgcatttcctgtacttcgcatgggagtccaaacatgttatgagtggatgataatgcttacctggttctggtagcaatcatctcgataagaaggaggatgtctagtgggaggagaggaagaagaatatcctcgggaccaaattctttgtccacattatgcagtttagaagcaatttcattacgttatcttgtgttctcatgcttgtcatcagtgtggtgaattctatatgtgccttaccgtaaagactaccgcgtgagaacgtataaatcacctcccgattcaattgtcttggaactaaaccctgaaaatggatttccggtcgtgatgtttttgttcattccctaatatcgttagtctcaaacaaatatgattggtaatttctaaaactgtatttgtttatgcagtgtaagatgtgtttgctttaatcgcagg

SEQ ID NO: 115635 - DNA, 688 bp, Physcomitrella patens
  Intron number 1 from transcript Pp1s433_10V6.3 (locus Pp1s 433_10V6) derived from phytozome v7.0 (chr-ID scaffold_433 ; pos 93302 to 93989)
tattgaggatttgtccatccacaggtagtatataagctgcggggtgctgtccagtttcaaaaaacagagtggtttttaaggattagcatcgattcatctcgctgctctgaactgtctcgttcgatctgtgtttgaagcaagattattgggctgtgtaaaattattttcagtgttggggctgagttttagttgcaagtctctgctgtgttgaattccgggttgaggattctacgcggaggactgtttgtgggtttagcggtagtcgcttgcgaattcctgcactggcggtagcgtcatcgccttaatttcgagtgcctcttgactcccctggaagtcgcaatgtgtgcattctttctccatctgaagagtaccccttattttctcattttagtgctttgcgttttgtacccgttcatcatgtttttcctctccaggaaaactcctccagtggcagagaagtctgtccttctgcatccctcgcagtaagacagtgccttcttcttatgtccattctgtttgaagggacatttgcctatctcccttcccttcccttttagagtgttccgaatgggtgacgagcaattctatacgctagatgcgtcccctcgcagaattttgatttgggctttacaaatgcctgaatagttctgcaactaacctttcaattgttgctgatatttttaggaag

SEQ ID NO: 115636 - DNA, 857 bp, Physcomitrella patens
  Intron number 1 from transcript Pp1s41_2V6.1 (locus Pp1s41 _2V6) derived from phytozome v7.0 (chr-ID scaffold_41; pos 22728 to 23584 reverse strand)
agcacgcctgctggtccagctcgacgctcttctcggtatgtcgtcgaaagagctttttgcccgcatcttaatgtgaatgtctggtgcttcttcattttggtgctacctggccatgcgtgacaccctttttctcttcaagaacaccacgtatttattatcgccggttccatttgtgttctcattattgtccttgcactctccatttcttgtgtgatcccctggtcattcaatcatttacgactacctttattgctcctgaacattcttcacatgatcttttggtgtcctcttgattccttcactttctgaaccctagttcgtttctgagcttcccaagtccgtaatgacgtttagcatggtctgtgtcgcattgctactggtagagaagaagacgttgtccgattcgatgacctcctcaacgatgtttgagtaggtcttgatatgaagatagcattttctcgatctacactgaaatcagctgatttttagttcccttcttctgtattgccgtgtagtttcctgccgcacgaacctttctgattagggtagtgctcaggaaactggttacttgttctagtaccttgtcctactcttcgccaattagtcttcacgcacggttgttcactggtgaagccattgtgaaagtagtggaattggatctgttcaagctgctatcataccaagagtttgcaacaaggtgaacagtcttggtatgtatgatgaacctctacgcgctgacattaacatggagactcttaccataactactggattggagtttgaccttgacatgtggaatgatgtatggccaacaaaccgcaggttgtctggatctcctgttatttcatacgccgaga

SEQ ID NO: 115637 - DNA, 443 bp, Physcomitrella patens
  Intron number 3 from transcript Pp1s293_5V6.1 (locus Pp1s2 93_5V6) derived from phytozome v7.0 (chr-ID scaffold_293; pos 13903 to 14345)
gcagtagccttgcaagaatcagagttgtggtaggttctatgtagtcattgcgtaactgaacattgtagatcatcgaggaagtcttctcttttctcgatttattttcattgtttagtgttttttagaaactaagttctgtatgctctactctctctataatcttcaaaccttaagccatccagaaagttagctttgtagaatctgctgcttttggtctggattagataaagtgtagcgtaattcatttctggtttgaatttatttagtgaacttatgtggaccagttttcaagcatctataggctaacagtatgaacagtgtggtaaagtagtttcaatttaagttgtgatctatcatccaggatggtttgtgctctttgttcaaggctgttggaatttatgatcataggtccgcaaacggccgttaaataaaaaggaaatctc

SEQ ID NO: 115638 - DNA, 959 bp, Physcomitrella patens
  Intron number 2 from transcript Pp1s12_224V6.2 (locus Pp1s 12_224V6) derived from phytozome v7.0 (chr-ID scaffold_12; pos 1302405 to 1303363 reverse strand)
tctttaatcctgagaaagtggatttaggtttgtttcgcctcatgacttatgcatcaatttcgaaaaaagagttgtccctttagcacagtagtggccttagcagttcgcatcggttttatgccatgtctgcctgtgttgtttcttcgtcaagttagtctcgcaagggatacactcagtactatgtttcaaggttcaggaatgctacataggagtctattattttgttgtgtcaacacctgaaccaaagacgtgttctcttctcaaaaactctaaaactagcgcaccttgtccaaagagttcgttatgttgactagccttgattattggacaatatattttgcgctgcacgtcttttgctcctgtgctgattggcgcgcactgaggtcgacgaagattagccattgggtgggtaatggtcatcagttggttctgttctcgcctgcttgcaacgtgttggatcgtcttggctagaactttctgtatgagaatgtaatgtcttgagcttgtttgaaatgccacatgaattttttactgaaggctaccactgttttagagtagatccaagacctgtttatgggggaacacgaattagtttgtgttgcttcttgtttcgagtttatttgttgatttaattaggttgacggttgtcttcagtgggttgttttgtgtgctgtttggatattcaaatcgtgcagtcatttctctattctcttgatcaattgtctcctcattaatttcgatttgggtccctaattgtctgacacttggacgtatttagagctcattcaagaatctctgcatagtagcgtgttctgatactatggtgctatttttgattcgttgttttagaagtgttttctattggatattttgagtacattgagtctcacaacaattgctggaacacttgatcgttagcaggaatgactagcaggttaacttgtggtggcatgcagata

SEQ ID NO: 115639 - DNA, 942 bp, Physcomitrella patens
  Intron number 1 from transcript Pp1s85_12V6.1 (locus Pp1s8 5_12V6) derived from phytozome v7.0 (chr-ID scaffold_85; p os 67865 to 68806 reverse strand)
aagcccgcatctgaggggagccagcttttaggtgatgaatatgatcagttattttcacgcacatcgtcttttctttgcataaattgttgagtgatttatgtgtggattaatttcatttggttttcatgtttctcgacttagctgatagtgttcatctcgcgctttgagaaaccagcgtctccttttctgctctctgttcgacggcggggaatgattacatttctttaaatgtgaacgaactaagaacaagaattgataactatcttttattcattaatttctccaaggttttcaaaattttcagttagagaactcgggatgttaacgactccacagtgggagcagtgcatgctgcacaatttcgatgacgactgctgcctggtgcagcattgggttcagtaatggtgaatttatctttgagtttcatcgtttcactcgaatttgatagaaaagcaattctagtgctcagcttggacagcttgcttatctcgacggtttgggcgtcaaccttgattaaattagaccgagagcattgagcatctccacgatttttgggatcctgatcgcagacttagtggaggtatagagaccaagaaatattggactccgattggagtccaatatttcagagcatgcatctatcattgtccggaaacagttacagtactttctaataatattaatacatagaggaaactccgagggtattaaaagtattttttgtaattcaaaataaaataaaatctataaattaaatagaatgagaatttagtaatataaaattttaactgttgttattttgacttatgggtaaatggttgaggagattccaactggatttttttacatagttattcttctttcagtttgctaacacttgcgatgaaattgtctcctgtgtgagcagttcctcggaaaaagtactgtgaatcaatttacaag

SEQ ID NO: 115640 - DNA, 593 bp, Physcomitrella patens
  Intron number 1 from transcript Pp1s58_257V6.2 (locus Pp1s 58_257V6) derived from phytozome v7.0 (chr-ID scaffold_58; pos 1629087 to 1629679)
gtttcacctatccctcgttggcggtgctgtgagttagtttcgagaagaaacgttttagtgggtaggatgtatttgattttgaagtgtgtccgatcttcttggaatttcgaattgtaaacaacaaccagaacgtaacagttttttgtcaaattgcattagatgctttgaagcgaaagcgtcagcaggttcatgttggtgtcgtaaggattgtagaaaggtctgatttcgataaagtcatatttgcccggttccttcgttgcaatttgagattttttcccttgcctccagcgcttggtctgttaatccaagggacttagatcgaattttgaaaagctgtgtatgcaactggtttttcaccggttgataatcgacactgttatggactgttatgggttgtaaaattatatccatgtgttcaacgcacaaatcatttttgattctcaatctgttgcataatcaattgaattattaagagttttgatcgattgcgttggtataggtcatgattgacgtagccctgagattgcactaacaagtcgctggctgtgtcatgtccaggtgaaaacgtcgcctgtgaggactctacgtggtga

SEQ ID NO: 115641 - DNA, 867 bp, Physcomitrella patens
  Intron number 1 from transcript Pp1s177_12V6.1 (locus Pp1s 177_12V6) derived from phytozome v7.0 (chr-ID scaffold_177 ; pos 77924 to 78790)
ggcttcgggacctggccatccatctcgatctcgaggtgggaatgctttttagggttttggttttgacttggttgttgagggtgggtagttttttgggtggggtttagtgtgtagggtatgtaattagacggggagcttattttttctaaaactcaaaagtagaggagagaactaattggattttttttgttttttgtttttatttttattttattttagtgttcatcttctctttgttgcgctacggaaaattgggtggacactgttttgaattgataatttttttgagttggttttgtgagggggtggttgataggtgcattttagggttgttgttgttgttgttagttcttgaggttaagaaggattgaatcggatgtggtgagacatttgtagggtaggtttgaggagcgttgagaagctttgagttagggttgagggaaggtgagaatgctgaagggtggggtgtaaacgattttgggatactgcgaggggggaatagcagcaggttggtgtagtgggcttttgcaggtctaagcggtaagggaagggaggtgtagcggagttgagatccatactgaggagcaatttactagggacgaagtgaattgaacgggtttttttgcttgtttttgtctggacggagttctgcaattccgtcacagttcgatgttgatgaatctgcagttgtgttcccttctatgtctctgacattgatcgatagatgctgtttttgccttaatggcaatgatctgctgcacctgtgcgcacaagtaagtggagcgagtaaagctgcagttgtctgacatctttttggcttctagaggtgcagcagtcttcttgtggaggtttaagaagcattttctt

SEQ ID NO: 115642 - DNA, 270 bp, Physcomitrella patens
  Intron number 4 from transcript Pp1s42_30V6.1 (locus Pp1s4 2_30V6) derived from phytozome v7.0 (chr-ID scaffold_42; p os 197557 to 197826 reverse strand)
ctcaaggttcccacgacagcaacatgacccaagtcaaaaaaataaaaacaaatgtcaccaactgaaaagaataacaaaaaaactaagtgtttattgttactctatattgtgtatttttgcaaagggaaccgttcaaaagttacacagattatttttttattattttttttattttttttggtgctaatcggaatttgtgtattgtgttttgtgtttttttctggaaaatctctgaatggtggaattgtgccaccttgaaggctatagcag

SEQ ID NO: 115643 - DNA, 473 bp, Physcomitrella patens
  Intron number 1 from transcript Pp1s33_152V6.1 (locus Pp1s 33_152V6) derived from phytozome v7.0 (chr-ID scaffold_33; pos 914943 to 915415)
taccgcaatctgtggtcaaggtatgcaactatctccttatcgaatgcgatgttggttgcttttttgttgataaatctaggggttgcctctggtggttttctttgcatggtagtcgcgactttttgattggtggtgtgtggaggttctgaagagtgatggcgtgtggtgtggtgatcgcacagttctacacatatgaggggctgaagcgctggatttaacgagaccagcctcgtgacacccctttgagcacaccacaagcggtaggttgcgtcgggtgttgatttcgttgtatagtagctgacttgatggtgaattacatgacattgttactttgtcacctctgggccgattaggcaaagtatggagtcttggtggagtgctagcaggcgtggaatgatcatgaggcgtatatagattggaatgagagaaagagcacgaactgtaactgggtttgtggatgtgtaataaagggc

SEQ ID NO: 115644 - DNA, 929 bp, Physcomitrella patens
  Intron number 1 from transcript Pp1s15_384V6.1 (locus Pp1s 15_384V6) derived from phytozome v7.0 (chr-ID scaffold_15; pos 2188776 to 2189704 reverse strand)
gctgcgttgcgtgaagccaagagaactggcaacttgtaacgctctctgcctatttcgtgttgttgaatttgccctaatagagagctttcgtatagtttgaggttttgcatcggttgttctcgtccggcttagggttaccttttatgggttttttcttaaggacattgcaggttgaaggagttgggaatatttcgaatgtcttttggcttcttctaaagggtggattgcactgcgctagatttgtctctagttcttgaggttaagcttctggagagattcatgcgagcaggattaccatctagagattctgtctagtgcgagtacttttgcgccattgtaggttttgaggtttttctccctttctacgaaatcattcacgcactaattgttttttactttaggttctgctttacatccatgttgcatgccgatcttcacttttgaagaatctccttacataacaatcctcttctttatctcttctcctgcacctttgcttctcttttgttctgtatatctggaacaaggttcagtcgagcttgattagcatctggctacatgatacgttgaattgctacagtgactgtacagttgatcagttggatacagttctgtcgatagggtcccttctaatgacgttatgtttggaccaaagattcgaaaaatcgcatgaatcaccggagaataattttgcattgagttttcaacatcattgaatactgttggctaatcctcgtgtgactcagttagtggtgactcatcttcgtgtgagttggtgtcatgtagataatggaaaaattatcacatgttcaattgtgtttgttcactaggtttcatctctctctactcgtaacggtagatgttttgatgattttgtttgtatcttgaccgttttctggtgttttgctgcagggccagaattctcgttg

SEQ ID NO: 115645 - DNA, 1035 bp, Physcomitrella patens
  Intron number 1 from transcript Pp1s269_46V6.1 (locus Pp1s 269_46V6) derived from phytozome v7.0 (chr-ID scaffold_269 ; pos 297208 to 298242)
tcctcctcacttaatcctgctacacttgtcgcggggtacgtgacctctctttattgtctacttactacccatcaggtttgagtcccgtacctttgctgcctgatacagatccaagcgcccttgagaggtttgtttttgttggtctgtcctgtcgctgacttgtcttccaggcttgagatgctcctctatctctctctctctctgctggagatgctagcgcacggattgcaatgcggagagacagggaatcattttaaaggctttctatattgcgttctgatgagacgatggttggtttccattggtggatgttcgcacggtgttgcgatgtgaactgactgtatggtttttaagtgggtagcgcctgttttctactttggggtgcgacatcacctttggttggttgccttccgccctacattttgcagtgaatgcgttgaataaacatcggaatggccacgtctgtgttcaattactttactaggagctgattgtttctcctggatcggaccacagtcgccttctagaacgcttcttatgactctaatacaaggtccctttcatagccttccagacaaacagctattgagtaccactagattcgttcggttgcaattgttcactagttacgttgatcgagacccattgtattgtgtgtcggagaatggaagtctgcacacacagaatttttttgcagacagggaaaccaattgtaattcttactcgtagaataccgactccacgaagtaggtactgctcagattgtaaattacactgcaggttgtgcaattggacaaggtactaacttgcattcatgttccgccactaaggttttgtgtttatcgaagagcttttgctggttaattctaatattggattatttgcgttgcggacgtgttaccgtgtgctcccaggtgtgaagctgagctgaattgaatttttgtccatctcctgtatcctcgatgaagctcactttcgctcttccattcgcctcttgcaggtgaagtgaggttgttgcgtaagatctcacaatcc

SEQ ID NO: 115646 - DNA, 751 bp, Physcomitrella patens
  Intron number 1 from transcript Pp1s177_89V6.1 (locus Pp1s 177_89V6) derived from phytozome v7.0 (chr-ID scaffold_177 ; pos 600966 to 601716)
ttctacggtggttctgttcacgactcatctgccacgtaagcccctgtctccggctcaaatagtaaataaggtttgaatttgcttttcttttctttttttaaatttttttgctgggtcgtaaccgtttgacttaaacctaaattgtgatgattcttcgctttaggatggtaaactagttatgaaatttcagctgttggggtgaaatctttatcatgcacacatattatgattgttttgtaactttccataaactgttagactcaaattatttaatcattgaatgttttgactaatataaattccaacattaatgtaattgaatgggggttcttcccattacagaaagaaaaaaacaaaacaaaataaaataagtgttatacctgttactgtgaagtgtattttttcactcttttaaaagaagatgtgtttttcttgattttttatctcatatcttttgatagatatatgcattagatgaaagatgatagtttcaaatattcaagttcttttccttattcttctgtgatagggtactatcacagtcataatctacaaccaccttggtgattgaattccgaagccatcaaacctgactcactcaacaagctccaaacccatatggaaatgggaacatgcatgaagaagggaaacagagagattgccacttaacaattctatttccgactggcaaaggaaaatggcaactaggccattgaggtgggtctggttgtgatcccaggtgtcaagcaat

SEQ ID NO: 115647 - DNA, 954 bp, Physcomitrella patens
  Intron number 1 from transcript Pp1s89_220V6.1 (locus Pp1s 89_220V6) derived from phytozome v7.0 (chr-ID scaffold_89; pos 1091525 to 1092478)
ccgtggaagaagaagaagaagaagaagaagaagaggtagatttcgtttcctctcctcacatttacgaattatcttcgtgcttacaaccaatttggactgggatggcgttcaagctagctaggtctcgttggtttactgtcgcatttgatgccttcgtgttgtggaacgagtagcgtgtctaaatacagaaatggacatctcctcttcgtttatgcaggaaatgtgtaggtgggtcagtcgacatgtagtcctttttcagctcctcgctgccattgtgcgaacttgcaaaatagcagaatttttttcatacttttacttctgtgcgtagcaggagtttgtgttgcttttatgttgatgcgcgtatggtagattttgtaaagctaatcgacggagatagaaatagcagcgatggtgaacttatcttaaattcagtgtgcggaaagttgtagatgtggcattcttggaggatttccatttcttctggacttaatcgtgcaagtggaccatggattcaaggacaatttccgtggtatcttagtttattttattttaattttaatatttttaatgttttgttttattttgcgagtaacctttaactataaattttcccaatccaaggagtttcgtatatgcagttaaatataggtccttttgaccactgttctgcttttatgatggtgtcctcatgattattgttgtaagtggctacttgtttcaggggctacttaaggcgctacggtctggtctccgcttttgtatttcgaaagtataatttgtgtactggtattggatattcaatgttaattcttttagtctagttttagctcaaaatctacacgctcaagctctcgaagcggtaattcaaatccttgagacacttatcattcacaatgcaatttacctgtgtaacgaactcaccgcagatttttgggaattggagattattttgag

SEQ ID NO: 115648 - DNA, 1007 bp, Physcomitrella patens
  Intron number 1 from transcript Pp1s38_153V6.1 (locus Pp1s 38_153V6) derived from phytozome v7.0 (chr-ID scaffold_38; pos 878843 to 879849)
tggaatccggtctcgtaacagcaggtttggatcatctacttgttgcattcctcttccctctaccaatctctgaacaaaatcttaatgatcaattttgtatttatggtgtctttcacgtcgaagcgttcctcgtagaaaattgactccttcattggcgttattatttctaaattctgttcttggtgttgaagtgctcctctcaaggttgcattgcattttcccgttctaatagatatgaagtagaaaattaaaaatttccaaaacctcaggaattcttcagcctgaaaatttctccaaccgtaatttaaagcatttactggtagtaacctgtcaattgtattatcctgcaatatgtaagattctgaacttttatgcttagagaggagttattcactgcaacttagtactattcactacaataaaaaaatcaaatgagaatattctcaccacaatgtacattactaaaaatagaactgcgattgacgttgttaatacatccatattccgtgattgtgagttaatgtaggctgtagttgcacggctcgataagttaatgacctgcatcattgatagctacgacgtagtcctcttagcaatgttaagtgttcttaagggtgttccatttagtacgtaattgagagctacgtaacttgatcactacatctatggtttccgaattggtgttattaagctttagctcctactgtaaacagaagaacaaactataatgctattttattgacattcaagttttggtattaattcgcggagaagtaaatacgacttgtacctttatccttcatcctagcggtttccttcagttacagcgttcgctggacagtgggatgtgctgcattgtcacaaatgatgagtaacgagatatacgtgactattatatgggactggcgagttcaaggtgatttatgcttaagtcgacaaaaaattatcaagattggtactaatggtattgtttctgccgcagttcgaaaagagatcaggttaaacga

SEQ ID NO: 115649 - DNA, 846 bp, Physcomitrella patens
  Intron number 1 from transcript Pp1s244_11V6.1 (locus Pp1s 244_11V6) derived from phytozome v7.0 (chr-ID scaffold_244 ; pos 65364 to 66209)
gttagttatttcacgagtacgtgtgttcgtttcaggtatagtgaattcgattcttaatctctttgcattccacaatatctcttgctacatttgttttcgtttaaaatgcaggtgttttattttgtttttgtttttggccgagtacggttttttttgtgatgtgcgacacattttgagctctgagttcttggtcctaggaggaagttatgggtagggtcagtgtaggcatttaattcggtgtttttgtgctgtatatgaggtcgaatgtagctttggtttatgggttattgtcgaatagaggttagtttgagtaccttgtggtgttagggtttgtgtgactttgtcgaaggggtgttggatcaaattgcgacttgttagaaattttacacttgcgtgctctttcctggtttgctttcggaattgtgagcaagacattggaatgcaattggaaaagacttgttacgttttgcattaactagttcttggccacaccagtctgttcttagtctcctcgaagtcctgtggacggtgtacggtgacttttctcagtttgatacggcattctctgtaaaccttttaggttctaatgaactgaattatgcttagtattgctatggcttattgttggagggagaatcaagcacatgtaacgcaggtgcggcgtatggcctgtaatgcctcatgcacaggatagagaatttaccctgggattttaaagtgatttaataaacatctactctgtgaacattttcgtagattgctttccaattttactttgactttcaaattgaaaaactcagataagagtggctttgtctggcccctctgtctagatcaaggagaagg

SEQ ID NO: 115650 - DNA, 883 bp, Physcomitrella patens
  Intron number 1 from transcript Pp1s157_87V6.1 (locus Pp1s 157_87V6) derived from phytozome v7.0 (chr-ID scaffold_157 ; pos 697198 to 698080 reverse strand)
acctccagaagtcggagtcctccagcgaaaacgaggtagttttatgaaaattttaaacatgataatgagtttcatacttcatttgaagaccgctgctgattcgagaggaaagtcaacttgtatagttgtgctctgacaaggtagatatcattgtacattagatggtgcattccaggttttgtgaacgattcaggagtttttatctgaacagtcacgatgttttcttaaaatcaaataaaggtttctgatatttttccggagttcaaacagtacctctgctgtaacaatcacgggcttacttcctgttcattgcatcttaagaagtttgaagtcaatgtcgcgttgcatctttcttagttctctcttttggagtatccaacctaaaactgagtagtggacgtccatttaattttacaattgaatgccttgtgtgccacattagagatcatcctgtcgtatttacaaatgtgtaagcatcaagtagtgcgcagttttcgtaagtgtccgggaacgtatcgacaagtcggttagtttactttctgaatctgaagcttacatatttgtggaccttataatgtgttgctatttgtttgtcgagtttagtgacaatgcaggtgcaaagaatatcagatcacccttttctttatctaagaaagtttctccagtaaagtaagcaatctttacaacattatttgtgtggaatgtcttgttttaagctcgtgaagagaatctcctgctggccattggtcctcacaccgtcttctacatactctctgtttttggatatgcgtgatactaaatggttttcaacttttttgcctattgatatgacatatttcggatcacagaaaattgcgtagctcgattcctgagtccactgtat

SEQ ID NO: 115651 - DNA, 432 bp, Physcomitrella patens
  Intron number 2 from transcript Pp1s271_62V6.1 (locus Pp1s 271_62V6) derived from phytozome v7.0 (chr-ID scaffold_271 ; pos 393385 to 393816)
ttttaagagcggacctctctatatctcatcgaaaggtatgttgcgacactctcctgcatttgttgtttgttgactcaattttgtcttttggtcctcttcctactgcgtcgaggcattttgattgacaatgcatccggtcctcgattccaccatcttcgtttatagtccagttacagcttagagatcattatttcttcttagggcgaggcaagtaagtctggaagtactcaaatcaaatagaggatttgcatttaactgtcaattcttcaatattgtccgaaatgtcagaatgtgcataatcgtgtgtgttatcttttcttttctttcgcgccgttccaaaatattaatggtgatatgactttttaaactgttcgcaactcaattattgaagtgagctgttctcgatcgttattcaggtcttggttggaagtc

SEQ ID NO: 115652 - DNA, 827 bp, Physcomitrella patens
  Intron number 3 from transcript Pp1s59_169V6.1 (locus Pp1s 59_169V6) derived from phytozome v7.0 (chr-ID scaffold_59; pos 891534 to 892360)
tggaggccactgaagcccgcatacttcacgaggtacgtattggacatagagttgagggatggcaaactgaacaaaataccaaccctggtctacacttctacttttcatagatagaaaacaaagaactgatcttatacttttgagctgaattcttttgccaaatacgtactgatgactgcaaaataatcttaggagcattttattgtaatgtgattatttctattttaattggaattagggtaactttttgaatacatcgattctgaaaataagtcgtcttcagatatactttaaaaaattatatttctgtgatttgaacaatctaatacaacattccaaatacaaatgttgcaaaagtatgtttgaagaaaatgtatccaaaaattacatttattgagtcccattttttaattatatatcaaaattaactagttatttgacttttaattcataatgttatcatacgggacaacatgtatttgttaaatctaaatatgaaaacattttccaaacatgcatcattaaaataatccttaagaaaaaaaagccggcaggtagttgcgaaagtagtgaattatttttttatcacttgatttttatttcaagcttaaagaaaaccaattacgaccataaacaccaaatatgcataatttcctggtggtactcagtcaaataactagtttcattttaggtattaatttcatgttatgcaactttgtcgatggaggaacatcccaagttgcatgtttatttagatacttgctaacgatctgattgttgatatacaagcaggcaagggcattgcagaaccaggatttactggatca

SEQ ID NO: 115653 - DNA, 631 bp, Physcomitrella patens
  Intron number 2 from transcript Pp1s24_63V6.1 (locus Pp1s2 4_63V6) derived from phytozome v7.0 (chr-ID scaffold_24; p os 629042 to 629672)
ctttgaagcaagcttcgcacggcgcaaaaagctaggtacgaatagtacctttcagtactgtccgtgactctttcctagtttagctcaccacttttataatctattgtggcagaacaactggcattgtatgttgaactcgcccaagtcatcttcgtctcccctttcagacatatatttaattccatctcgacacagaaaaaggagggaagaaattaaactcaaaaaacgcaataaaaaacaaaagcattgcttcgtttaatgaccacttattcgagactcaggctctatgtccacatcgatattccatgggaatgtatggcgtggtccacaatacaaacaaagctcagcagatgtgtgtttatattcacgaacacgtgatgcatcgtaagtggcgttttgtcggtatccccaccaagttctcttttgggtattggtaatatgtttgtagaaaaccttggtttgtgagtaaccattccagtgtttcaagcgtagcagtgagtggtgtcctgctcttaaagcggagatgttgatgttcgtaaaacttttgaaacaatatgacaaccatttgttttttgtgatacaaatcatggtgctttggcagcacatcccccagactgggactggtctgcag

SEQ ID NO: 115654 - DNA, 491 bp, Physcomitrella patens
  Intron number 1 from transcript Pp1s17_19V6.2 (locus Pp1s1 7_19V6) derived from phytozome v7.0 (chr-ID scaffold_17; p os 78461 to 78951)
gtgaggtacttggtttttgatttttgtgattactgtcttatttgacaaccttgacgcttggctaatacatctagattttttcataatttttgaagggatatggctttattttcatatattacgttggattccgtttaaattattggcttgcgtttatagaatactttctttcaactggattttaaggaccattttcagttgactaccaaaaagaggaataaactgatcaagtgctgtcgtttacacaagtacgcgcgtttcattgtcttgtacagcgtagattttattgtctgtgttggcaaaagacagagcgtgggcaatagtaactgtcgggagtggctgtctttgttcttgtcgatcgaatgtcttggatttgcagtctataagtttgccctagtctataattttcttgatattgtaattattacgctgcgagtttgagtagagttcaatggaggaaatcttggtgttttgtgaaggaaggtgaagcc
